United States Patent Application Publication US 2008/0318210 A1 - sequence listing, part 7

SEQ ID NO: 239709 - RNA, 17 nt, Moloney murine sarcoma virus
gaauaccaaacaggaua

SEQ ID NO: 239710 - RNA, 22 nt, Moloney murine sarcoma virus
gacagcugagugaugggccaaa

SEQ ID NO: 239711 - RNA, 17 nt, Moloney murine sarcoma virus
gguaagcaguuccugcc

SEQ ID NO: 239712 - RNA, 17 nt, Moloney murine sarcoma virus
gguaagcgguuccugcc

SEQ ID NO: 239713 - RNA, 18 nt, Moloney murine sarcoma virus
ggcucagggccaagaaca

SEQ ID NO: 239714 - RNA, 16 nt, Moloney murine sarcoma virus
ggcucagggccaagaa

SEQ ID NO: 239715 - RNA, 14 nt, Moloney murine sarcoma virus
ggauaucuguggua

SEQ ID NO: 239716 - RNA, 16 nt, Moloney murine sarcoma virus
gcucggggccaagaac

SEQ ID NO: 239717 - RNA, 17 nt, Moloney murine sarcoma virus
gcucggggccaagaaca

SEQ ID NO: 239718 - RNA, 19 nt, Moloney murine sarcoma virus
gcucggggccaagaacaga

SEQ ID NO: 239719 - RNA, 22 nt, Moloney murine sarcoma virus
gccagucuuccgauagacugcg

SEQ ID NO: 239720 - RNA, 17 nt, Moloney murine sarcoma virus
gcauccgaaucgugguc

SEQ ID NO: 239721 - RNA, 23 nt, Moloney murine sarcoma virus
uccugccccggcucagggccaag

SEQ ID NO: 239722 - RNA, 13 nt, Moloney murine sarcoma virus
ugaauaccaaaca

SEQ ID NO: 239723 - RNA, 18 nt, Moloney murine sarcoma virus
ugaauaccaaacaggaua

SEQ ID NO: 239724 - RNA, 19 nt, Moloney murine sarcoma virus
ugagugaugggccaaacag

SEQ ID NO: 239725 - RNA, 11 nt, Moloney murine sarcoma virus
ugccccggcuc

SEQ ID NO: 239726 - RNA, 15 nt, Moloney murine sarcoma virus
ugccccggcucaggg

SEQ ID NO: 239727 - RNA, 20 nt, Moloney murine sarcoma virus
ugccccggcucggggccaag

SEQ ID NO: 239728 - RNA, 12 nt, Moloney murine sarcoma virus
ugggccaaacag

SEQ ID NO: 239729 - RNA, 15 nt, Moloney murine sarcoma virus
gugaugggccaaaca

SEQ ID NO: 239730 - RNA, 17 nt, Moloney murine sarcoma virus
gugaugggccaaacagg

SEQ ID NO: 239731 - RNA, 20 nt, Moloney murine sarcoma virus
gugaugggccaaacaggaua

SEQ ID NO: 239732 - RNA, 16 nt, Moloney murine sarcoma virus
gcucagggccaagaac

SEQ ID NO: 239733 - RNA, 17 nt, Moloney murine sarcoma virus
gcucagggccaagaaca

SEQ ID NO: 239734 - RNA, 19 nt, Moloney murine sarcoma virus
gcucagggccaagaacaga

SEQ ID NO: 239735 - RNA, 20 nt, Moloney murine sarcoma virus
gcugaauaccaaacaggaua

SEQ ID NO: 239736 - RNA, 21 nt, Moloney murine sarcoma virus
gcugaauaccaaacaggauau

SEQ ID NO: 239737 - RNA, 18 nt, Moloney murine sarcoma virus
gcugagugaugggccaaa

SEQ ID NO: 239738 - RNA, 11 nt, Moloney murine sarcoma virus
uaucuguggua

SEQ ID NO: 239739 - RNA, 11 nt, Moloney murine sarcoma virus
gaacagaugag

SEQ ID NO: 239740 - RNA, 11 nt, Moloney murine sarcoma virus
gauaucugugg

SEQ ID NO: 239741 - RNA, 21 nt, Moloney murine sarcoma virus
gauaucugugguaagcaguuc

SEQ ID NO: 239742 - RNA, 14 nt, Moloney murine sarcoma virus
gccaaacaggauau

SEQ ID NO: 239743 - RNA, 20 nt, Moloney murine sarcoma virus
gccaaacaggauaucugugg

SEQ ID NO: 239744 - RNA, 20 nt, Moloney murine sarcoma virus
cugagugaugggccaaacag

SEQ ID NO: 239745 - RNA, 14 nt, Moloney murine sarcoma virus
cucuccgagcucaa

SEQ ID NO: 239746 - RNA, 20 nt, Moloney murine sarcoma virus
cuuccgcucuccgagcucaa

SEQ ID NO: 239747 - RNA, 16 nt, Moloney murine sarcoma virus
cggggccaagaacaga

SEQ ID NO: 239748 - RNA, 17 nt, Moloney murine sarcoma virus
cggggccaagaacagau

SEQ ID NO: 239749 - RNA, 12 nt, Moloney murine sarcoma virus
cucagcaguuuc

SEQ ID NO: 239750 - RNA, 12 nt, Moloney murine sarcoma virus
cucagggccaag

SEQ ID NO: 239751 - RNA, 16 nt, Moloney murine sarcoma virus
cucagggccaagaaca

SEQ ID NO: 239752 - RNA, 20 nt, Moloney murine sarcoma virus
cucagggccaagaacagaug

SEQ ID NO: 239753 - RNA, 18 nt, Moloney murine sarcoma virus
cacgacgggggucuuuca

SEQ ID NO: 239754 - RNA, 21 nt, Moloney murine sarcoma virus
cacucggcgcgccagucuucc

SEQ ID NO: 239755 - RNA, 15 nt, Moloney murine sarcoma virus
caaacaggauaucug

SEQ ID NO: 239756 - RNA, 16 nt, Moloney murine sarcoma virus
ccaaacaggauaucug

SEQ ID NO: 239757 - RNA, 21 nt, Moloney murine sarcoma virus
ccaaacaggauaucuguggua

SEQ ID NO: 239758 - RNA, 21 nt, Moloney murine sarcoma virus
ccugccccggcucagggccaa

SEQ ID NO: 239759 - RNA, 20 nt, Moloney murine sarcoma virus
agcugaauaccaaacaggau

SEQ ID NO: 239760 - RNA, 17 nt, Moloney murine sarcoma virus
aguuccugccccggcuc

SEQ ID NO: 239761 - RNA, 16 nt, Moloney murine sarcoma virus
agggccaagaacagau

SEQ ID NO: 239762 - RNA, 22 nt, Moloney murine sarcoma virus
acagcugaauaccaaacaggau

SEQ ID NO: 239763 - RNA, 17 nt, Moloney murine sarcoma virus
accuuauuugaacuaac

SEQ ID NO: 239764 - RNA, 13 nt, Moloney murine sarcoma virus
aaaaauacauaac

SEQ ID NO: 239765 - RNA, 15 nt, Moloney murine sarcoma virus
aaaaauacauaacug

SEQ ID NO: 239766 - RNA, 16 nt, Moloney murine sarcoma virus
agcugaauaccaaaca

SEQ ID NO: 239767 - RNA, 21 nt, Moloney murine sarcoma virus
agcugagugaugggccaaaca

SEQ ID NO: 239768 - RNA, 21 nt, Moloney murine sarcoma virus
aggcauggaaaaauacauaac

SEQ ID NO: 239769 - RNA, 13 nt, Moloney murine sarcoma virus
auaccaaacagga

SEQ ID NO: 239770 - RNA, 22 nt, Moloney murine sarcoma virus
auaccaaacaggauaucugugg

SEQ ID NO: 239771 - RNA, 23 nt, Moloney murine sarcoma virus
auaaagccucuugcuguuugcau

SEQ ID NO: 239772 - RNA, 15 nt, Moloney murine sarcoma virus
aucaaggucaggaac

SEQ ID NO: 239773 - RNA, 13 nt, Moloney murine sarcoma virus
aacagaugagaca

SEQ ID NO: 239774 - RNA, 17 nt, Moloney murine sarcoma virus
aacagaugagacagcug

SEQ ID NO: 239775 - RNA, 23 nt, Moloney murine sarcoma virus
aaagaaacagcugaauaccaaac

SEQ ID NO: 239776 - RNA, 21 nt, Moloney murine sarcoma virus
aaaagauuuuauuuagucucc

SEQ ID NO: 239777 - RNA, 21 nt, Moloney murine sarcoma virus
aaagauuuuauuuagucucca

SEQ ID NO: 239778 - RNA, 19 nt, Moloney murine sarcoma virus
aaggcauggaaaaauacau

SEQ ID NO: 239779 - RNA, 12 nt, Moloney murine sarcoma virus
aauaccaaacag

SEQ ID NO: 239780 - RNA, 14 nt, Moloney murine sarcoma virus
aagcaguuccugcc

SEQ ID NO: 239781 - RNA, 21 nt, Moloney murine sarcoma virus
aagcaguuccugccccggcuc

SEQ ID NO: 239782 - RNA, 21 nt, Moloney murine sarcoma virus
aagcgguuccugccccggcuc

SEQ ID NO: 239783 - RNA, 14 nt, Moloney murine sarcoma virus
agacagcugaguga

SEQ ID NO: 239784 - RNA, 18 nt, Moloney murine sarcoma virus
acccguauucccaauaaa

SEQ ID NO: 239785 - RNA, 19 nt, Moloney murine sarcoma virus
acccguauucccaauaaag

SEQ ID NO: 239786 - RNA, 16 nt, Moloney murine sarcoma virus
acaggauaucuguggu

SEQ ID NO: 239787 - RNA, 18 nt, Moloney murine sarcoma virus
acaggauaucugugguaa

SEQ ID NO: 239788 - RNA, 13 nt, Moloney murine sarcoma virus
aaagaaacagcug

SEQ ID NO: 239789 - RNA, 22 nt, Moloney murine sarcoma virus
gaaacagcugaauaccaaacag

SEQ ID NO: 239790 - RNA, 18 nt, Moloney murine sarcoma virus
gaaaaauacauaacugag

SEQ ID NO: 239791 - RNA, 17 nt, Moloney murine sarcoma virus
aaauacauaacugagaa

SEQ ID NO: 239792 - RNA, 16 nt, Moloney murine sarcoma virus
aacaaagaaacagcug

SEQ ID NO: 239793 - RNA, 13 nt, Moloney murine sarcoma virus
gauaucuguggua

SEQ ID NO: 239794 - RNA, 18 nt, Moloney murine sarcoma virus
gccucuugcuguuugcau

SEQ ID NO: 239795 - RNA, 16 nt, Moloney murine sarcoma virus
gccaagaacagaugag

SEQ ID NO: 239796 - RNA, 17 nt, Moloney murine sarcoma virus
gccacuuugcaaggcau

SEQ ID NO: 239797 - RNA, 17 nt, Moloney murine sarcoma virus
gaucaaggucaggaaca

SEQ ID NO: 239798 - RNA, 20 nt, Moloney murine sarcoma virus
ggaacaaagaaacagcugaa

SEQ ID NO: 239799 - RNA, 16 nt, Moloney murine sarcoma virus
ggggccaagaacagau

SEQ ID NO: 239800 - RNA, 12 nt, Moloney murine sarcoma virus
ggcucggggcca

SEQ ID NO: 239801 - RNA, 18 nt, Moloney murine sarcoma virus
ggcucggggccaagaaca

SEQ ID NO: 239802 - RNA, 17 nt, Moloney murine sarcoma virus
aaacaggauaucugugg

SEQ ID NO: 239803 - RNA, 13 nt, Moloney murine sarcoma virus
cgccagucuuccg

SEQ ID NO: 239804 - RNA, 16 nt, Moloney murine sarcoma virus
cugugguaagcaguuc

SEQ ID NO: 239805 - RNA, 21 nt, Moloney murine sarcoma virus
cugugguaagcaguuccugcc

SEQ ID NO: 239806 - RNA, 16 nt, Moloney murine sarcoma virus
cucggggccaagaaca

SEQ ID NO: 239807 - RNA, 15 nt, Moloney murine sarcoma virus
cucagggccaagaac

SEQ ID NO: 239808 - RNA, 14 nt, Moloney murine sarcoma virus
cucagggccaagaa

SEQ ID NO: 239809 - RNA, 16 nt, Moloney murine sarcoma virus
cccggcucagggccaa

SEQ ID NO: 239810 - RNA, 19 nt, Moloney murine sarcoma virus
cccggcucagggccaagaa

SEQ ID NO: 239811 - RNA, 19 nt, Moloney murine sarcoma virus
cccggcucggggccaagaa

SEQ ID NO: 239812 - RNA, 21 nt, Moloney murine sarcoma virus
ccugccccggcucggggccaa

SEQ ID NO: 239813 - RNA, 13 nt, Moloney murine sarcoma virus
ccugccccggcuc

SEQ ID NO: 239814 - RNA, 17 nt, Moloney murine sarcoma virus
ccaaacaggauaucugu

SEQ ID NO: 239815 - RNA, 19 nt, Moloney murine sarcoma virus
ccaaacaggauaucugugg

SEQ ID NO: 239816 - RNA, 16 nt, Moloney murine sarcoma virus
cagggccaagaacaga

SEQ ID NO: 239817 - RNA, 19 nt, Moloney murine sarcoma virus
cagggccaagaacagauga

SEQ ID NO: 239818 - RNA, 14 nt, Moloney murine sarcoma virus
ucuccucugaguga

SEQ ID NO: 239819 - RNA, 19 nt, Moloney murine sarcoma virus
uccagggugccccaaggac

SEQ ID NO: 239820 - RNA, 23 nt, Moloney murine sarcoma virus
uccugccccggcucggggccaag

SEQ ID NO: 239821 - RNA, 12 nt, Moloney murine sarcoma virus
uaucugugguaa

SEQ ID NO: 239822 - RNA, 14 nt, Moloney murine sarcoma virus
gugguaagcaguuc

SEQ ID NO: 239823 - RNA, 19 nt, Moloney murine sarcoma virus
guaccuuauuugaacuaac

SEQ ID NO: 239824 - RNA, 22 nt, Moloney murine sarcoma virus
aacgccacuuugcaaggcaugg

SEQ ID NO: 239825 - RNA, 19 nt, Moloney murine sarcoma virus
aaguaacgccacuuugcaa

SEQ ID NO: 239826 - RNA, 16 nt, Moloney murine sarcoma virus
uugaacuaaccaauca

SEQ ID NO: 239827 - RNA, 21 nt, Moloney murine sarcoma virus
ugugguaagcaguuccugccc

SEQ ID NO: 239828 - RNA, 15 nt, Moloney murine sarcoma virus
ugagugaugggccaa

SEQ ID NO: 239829 - RNA, 18 nt, Moloney murine sarcoma virus
ugagugaugggccaaaca

SEQ ID NO: 239830 - RNA, 15 nt, Moloney murine sarcoma virus
ugaugggccaaacag

SEQ ID NO: 239831 - RNA, 17 nt, Moloney murine sarcoma virus
ugaugggccaaacagga

SEQ ID NO: 239832 - RNA, 19 nt, Moloney murine sarcoma virus
ugaugggccaaacaggaua

SEQ ID NO: 239833 - RNA, 20 nt, Moloney murine sarcoma virus
ugaugggccaaacaggauau

SEQ ID NO: 239834 - RNA, 15 nt, Moloney murine sarcoma virus
ugccccggcucgggg

SEQ ID NO: 239835 - RNA, 20 nt, Moloney murine sarcoma virus
ugccccggcucagggccaag

SEQ ID NO: 239836 - RNA, 14 nt, Moloney murine sarcoma virus
uccgagcucaauaa

SEQ ID NO: 239837 - RNA, 14 nt, Moloney murine sarcoma virus
ucagauguuuccag

SEQ ID NO: 239838 - RNA, 14 nt, Moloney murine sarcoma virus
ucagggccaagaac

SEQ ID NO: 239839 - RNA, 16 nt, Moloney murine sarcoma virus
ugaacuaaccaaucag

SEQ ID NO: 239840 - RNA, 12 nt, Moloney murine sarcoma virus
ugaugggccaaa

SEQ ID NO: 239841 - RNA, 19 nt, Moloney murine sarcoma virus
uggaaaaauacauaacuga

SEQ ID NO: 239842 - RNA, 21 nt, Moloney murine sarcoma virus
ugugguaagcgguuccugccc

SEQ ID NO: 239843 - RNA, 12 nt, Moloney murine sarcoma virus
caagaacagaug

SEQ ID NO: 239844 - RNA, 15 nt, Moloney murine sarcoma virus
caaagaaacagcuga

SEQ ID NO: 239845 - RNA, 16 nt, Moloney murine sarcoma virus
augggccaaacaggau

SEQ ID NO: 239846 - RNA, 12 nt, Moloney murine sarcoma virus
ccggcucagggc

SEQ ID NO: 239847 - RNA, 18 nt, Moloney murine sarcoma virus
ccggcucagggccaagaa

SEQ ID NO: 239848 - RNA, 19 nt, Moloney murine sarcoma virus
ccggcucagggccaagaac

SEQ ID NO: 239849 - RNA, 12 nt, Moloney murine sarcoma virus
ccggcucggggc

SEQ ID NO: 239850 - RNA, 15 nt, Moloney murine sarcoma virus
ccggcucggggccaa

SEQ ID NO: 239851 - RNA, 19 nt, Moloney murine sarcoma virus
ccggcucggggccaagaac

SEQ ID NO: 239852 - RNA, 16 nt, Moloney murine sarcoma virus
cccggcucggggccaa

SEQ ID NO: 239853 - RNA, 20 nt, Moloney murine sarcoma virus
cccggcucggggccaagaac

SEQ ID NO: 239854 - RNA, 23 nt, Moloney murine sarcoma virus
cagaucaaggucaggaacaaaga

SEQ ID NO: 239855 - RNA, 21 nt, Moloney murine sarcoma virus
cagcugagugaugggccaaac

SEQ ID NO: 239856 - RNA, 12 nt, Moloney murine sarcoma virus
cagggccaagaa

SEQ ID NO: 239857 - RNA, 17 nt, Moloney murine sarcoma virus
cagggccaagaacagau

SEQ ID NO: 239858 - RNA, 14 nt, Moloney murine sarcoma virus
caggauaucugugg

SEQ ID NO: 239859 - RNA, 17 nt, Moloney murine sarcoma virus
caguuccugccccggcu

SEQ ID NO: 239860 - RNA, 14 nt, Moloney murine sarcoma virus
caguuucuagugaa

SEQ ID NO: 239861 - RNA, 15 nt, Moloney murine sarcoma virus
caucagauguuucca

SEQ ID NO: 239862 - RNA, 21 nt, Moloney murine sarcoma virus
agugaaucaucagauguuucc

SEQ ID NO: 239863 - RNA, 11 nt, Moloney murine sarcoma virus
auaccaaacag

SEQ ID NO: 239864 - RNA, 14 nt, Moloney murine sarcoma virus
auaccaaacaggau

SEQ ID NO: 239865 - RNA, 22 nt, Moloney murine sarcoma virus
agaugagacagcugagugaugg

SEQ ID NO: 239866 - RNA, 22 nt, Moloney murine sarcoma virus
agaucaaggucaggaacaaaga

SEQ ID NO: 239867 - RNA, 18 nt, Moloney murine sarcoma virus
aggaacaaagaaacagcu

SEQ ID NO: 239868 - RNA, 16 nt, Moloney murine sarcoma virus
aggauaucugugguaa

SEQ ID NO: 239869 - RNA, 16 nt, Moloney murine sarcoma virus
acagaugagacagcug

SEQ ID NO: 239870 - RNA, 18 nt, Moloney murine sarcoma virus
gagugaugggccaaacag

SEQ ID NO: 239871 - RNA, 21 nt, Moloney murine sarcoma virus
gagugaugggccaaacaggau

SEQ ID NO: 239872 - RNA, 21 nt, Moloney murine sarcoma virus
gcaaggcauggaaaaauacau

SEQ ID NO: 239873 - RNA, 19 nt, Moloney murine sarcoma virus
gaucaaggucaggaacaaa

SEQ ID NO: 239874 - RNA, 22 nt, Moloney murine sarcoma virus
gaaaaguucagaucaaggucag

SEQ ID NO: 239875 - RNA, 18 nt, Moloney murine sarcoma virus
gaaacagcugaauaccaa

SEQ ID NO: 239876 - RNA, 21 nt, Moloney murine sarcoma virus
cugugguaagcgguuccugcc

SEQ ID NO: 239877 - RNA, 17 nt, Moloney murine sarcoma virus
cggcucagggccaagaa

SEQ ID NO: 239878 - RNA, 22 nt, Moloney murine sarcoma virus
cugccccggcucggggccaaga

SEQ ID NO: 239879 - RNA, 12 nt, Moloney murine sarcoma virus
cucggggccaag

SEQ ID NO: 239880 - RNA, 20 nt, Moloney murine sarcoma virus
cucggggccaagaacagaug

SEQ ID NO: 239881 - RNA, 18 nt, Moloney murine sarcoma virus
uagaaaaguucagaucaa

SEQ ID NO: 239882 - RNA, 22 nt, Moloney murine sarcoma virus
uaagcaguuccugccccggcuc

SEQ ID NO: 239883 - RNA, 15 nt, Moloney murine sarcoma virus
uaagcgguuccugcc

SEQ ID NO: 239884 - RNA, 16 nt, Moloney murine sarcoma virus
guuccugccccggcuc

SEQ ID NO: 239885 - RNA, 14 nt, Moloney murine sarcoma virus
gcccucagcaguuu

SEQ ID NO: 239886 - RNA, 18 nt, Moloney murine sarcoma virus
gcucuccgagcucaauaa

SEQ ID NO: 239887 - RNA, 19 nt, Moloney murine sarcoma virus
gguccccagaugcggucca

SEQ ID NO: 239888 - RNA, 21 nt, Moloney murine sarcoma virus
gguccagcccucagcaguuuc

SEQ ID NO: 239889 - RNA, 22 nt, Moloney murine sarcoma virus
ggauaucugugguaagcaguuc

SEQ ID NO: 239890 - RNA, 12 nt, Moloney murine sarcoma virus
gggccaagaaca

SEQ ID NO: 239891 - RNA, 20 nt, Moloney murine sarcoma virus
gggccaaacaggauaucugu

SEQ ID NO: 239892 - RNA, 13 nt, Moloney murine sarcoma virus
ggcucggggccaa

SEQ ID NO: 239893 - RNA, 16 nt, Moloney murine sarcoma virus
ggcucggggccaagaa

SEQ ID NO: 239894 - RNA, 17 nt, Mouse mammary tumor virus
guaaguucauggucaca

SEQ ID NO: 239895 - RNA, 22 nt, Mouse mammary tumor virus
gcucgagcagaaccacccguga

SEQ ID NO: 239896 - RNA, 17 nt, Mouse mammary tumor virus
gcuuauguaaaccauga

SEQ ID NO: 239897 - RNA, 13 nt, Mouse mammary tumor virus
gcagaccccggug

SEQ ID NO: 239898 - RNA, 16 nt, Mouse mammary tumor virus
uaaaugcucuaaccuc

SEQ ID NO: 239899 - RNA, 13 nt, Mouse mammary tumor virus
uaaaagagugcua

SEQ ID NO: 239900 - RNA, 14 nt, Mouse mammary tumor virus
uaaaccaugauaua

SEQ ID NO: 239901 - RNA, 17 nt, Mouse mammary tumor virus
guuuccugacuuggcuu

SEQ ID NO: 239902 - RNA, 18 nt, Mouse mammary tumor virus
uaagcucuaaaugcucua

SEQ ID NO: 239903 - RNA, 12 nt, Mouse mammary tumor virus
agccaaagcccc

SEQ ID NO: 239904 - RNA, 17 nt, Mouse mammary tumor virus
ccgucuccgcucgucac

SEQ ID NO: 239905 - RNA, 22 nt, Mouse mammary tumor virus
auguucuuuuggauucuaucca

SEQ ID NO: 239906 - RNA, 23 nt, Mouse mammary tumor virus
auguucuuuuggauucuauccaa

SEQ ID NO: 239907 - RNA, 14 nt, Mouse mammary tumor virus
caacaguccuaaca

SEQ ID NO: 239908 - RNA, 17 nt, Mouse mammary tumor virus
caagugguuuccugacu

SEQ ID NO: 239909 - RNA, 14 nt, Mouse mammary tumor virus
uauguaaaugcuua

SEQ ID NO: 239910 - RNA, 14 nt, Mouse mammary tumor virus
ugcucuaaccuccu

SEQ ID NO: 239911 - RNA, 22 nt, Mouse mammary tumor virus
ugaguaaacuugcaacaguccu

SEQ ID NO: 239912 - RNA, 24 nt, Mouse mammary tumor virus
uugaucuaagcucuaaaugcucua

SEQ ID NO: 239913 - RNA, 16 nt, Mouse mammary tumor virus
uuuauguaaaugcuua

SEQ ID NO: 239914 - RNA, 16 nt, Mouse mammary tumor virus
gucagcucgagcagaa

SEQ ID NO: 239915 - RNA, 20 nt, Mouse mammary tumor virus
guaucaaauguuuugaucua

SEQ ID NO: 239916 - RNA, 17 nt, Mouse mammary tumor virus
uauccuucacuuuccag

SEQ ID NO: 239917 - RNA, 16 nt, Mouse mammary tumor virus
ucacuuauccuucacu

SEQ ID NO: 239918 - RNA, 14 nt, Mouse mammary tumor virus
ucuaaaugcucuaa

SEQ ID NO: 239919 - RNA, 23 nt, Mouse mammary tumor virus
cgcucgucacuuauccuucacuu

SEQ ID NO: 239920 - RNA, 23 nt, Mouse mammary tumor virus
cgucacuuauccuucacuuucca

SEQ ID NO: 239921 - RNA, 18 nt, Mouse mammary tumor virus
cuaagcucuaaaugcucu

SEQ ID NO: 239922 - RNA, 16 nt, Mouse mammary tumor virus
gcucuaaaugcucuaa

SEQ ID NO: 239923 - RNA, 17 nt, Mouse mammary tumor virus
gcucuaaaugcucuaac

SEQ ID NO: 239924 - RNA, 13 nt, Mouse mammary tumor virus
gcucuaaccuccu

SEQ ID NO: 239925 - RNA, 21 nt, Mouse mammary tumor virus
gcagagccaaagcccccggug

SEQ ID NO: 239926 - RNA, 20 nt, Mouse mammary tumor virus
gcacgucagcucgagcagaa

SEQ ID NO: 239927 - RNA, 19 nt, Mouse mammary tumor virus
gauauaaaagagugcuaaa

SEQ ID NO: 239928 - RNA, 14 nt, Mouse mammary tumor virus
aauuuuugaguaaa

SEQ ID NO: 239929 - RNA, 21 nt, Mouse mammary tumor virus
aaauuuuugaguaaacuugca

SEQ ID NO: 239930 - RNA, 13 nt, Mouse mammary tumor virus
aaccaugauauaa

SEQ ID NO: 239931 - RNA, 18 nt, Mouse mammary tumor virus
aucaaauguuuugaucua

SEQ ID NO: 239932 - RNA, 19 nt, Mouse mammary tumor virus
aucaaauguuuugaucuaa

SEQ ID NO: 239933 - RNA, 13 nt, Mouse mammary tumor virus
aggucgagcagag

SEQ ID NO: 239934 - RNA, 13 nt, Mouse mammary tumor virus
agcucgagcagaa

SEQ ID NO: 239935 - RNA, 16 nt, Mouse mammary tumor virus
auguuuugaucuaagc

SEQ ID NO: 239936 - RNA, 18 nt, Mouse mammary tumor virus
auguaaaccaugauauaa

SEQ ID NO: 239937 - RNA, 19 nt, Mouse mammary tumor virus
acaguccuaacauucaccu

SEQ ID NO: 239938 - RNA, 18 nt, Mouse mammary tumor virus
agcucgagcagaaccacc

SEQ ID NO: 239939 - RNA, 22 nt, Mouse mammary tumor virus
ccaaguuuuauguaaaugcuua

SEQ ID NO: 239940 - RNA, 17 nt, Mouse mammary tumor virus
auguaaaccaugauaua

SEQ ID NO: 239941 - RNA, 20 nt, Mouse mammary tumor virus
cacuuauccuucacuuucca

SEQ ID NO: 239942 - RNA, 20 nt, Mouse mammary tumor virus
uaucaaauguuuugaucuaa

SEQ ID NO: 239943 - RNA, 18 nt, Mouse mammary tumor virus
ucaaauguuuugaucuaa

SEQ ID NO: 239944 - RNA, 22 nt, Mouse mammary tumor virus
ucaaauguuuugaucuaagcuc

SEQ ID NO: 239945 - RNA, 20 nt, Mouse mammary tumor virus
uaaacuugcaacaguccuaa

SEQ ID NO: 239946 - RNA, 22 nt, Mouse mammary tumor virus
uguucuuuuggauucuauccaa

SEQ ID NO: 239947 - RNA, 13 nt, Mouse mammary tumor virus
uucacuuuccaga

SEQ ID NO: 239948 - RNA, 23 nt, Mouse mammary tumor virus
ugcaacaguccuaacauucaccu

SEQ ID NO: 239949 - RNA, 13 nt, Mouse mammary tumor virus
ucuaaaugcucua

SEQ ID NO: 239950 - RNA, 15 nt, Mouse mammary tumor virus
ucauggucacagacu

SEQ ID NO: 239951 - RNA, 14 nt, Mouse mammary tumor virus
gcaacaguccuaac

SEQ ID NO: 239952 - RNA, 18 nt, Mouse mammary tumor virus
gcucgagcagaaccaccc

SEQ ID NO: 239953 - RNA, 13 nt, Mouse mammary tumor virus
ccuucacuuucca

SEQ ID NO: 239954 - RNA, 22 nt, Mouse mammary tumor virus
cuugcaacaguccuaacauuca

SEQ ID NO: 239955 - RNA, 19 nt, Mouse mammary tumor virus
cuuauccuucacuuuccag

SEQ ID NO: 239956 - RNA, 16 nt, Mouse mammary tumor virus
uauaaaagagugcuaa

SEQ ID NO: 239957 - RNA, 11 nt, Mouse mammary tumor virus
uaacauucacc

SEQ ID NO: 239958 - RNA, 21 nt, Mouse mammary tumor virus
guuaggucgagcagagccaaa

SEQ ID NO: 239959 - RNA, 17 nt, Mouse mammary tumor virus
gucgcggguucgcucgc

SEQ ID NO: 239960 - RNA, 16 nt, Mouse mammary tumor virus
gucgagcagagccaaa

SEQ ID NO: 239961 - RNA, 23 nt, Mouse mammary tumor virus
uuaaguaaguucauggucacaga

SEQ ID NO: 239962 - RNA, 16 nt, Mouse mammary tumor virus
uguaaaccaugauaua

SEQ ID NO: 239963 - RNA, 18 nt, Mouse mammary tumor virus
uguaaaccaugauauaaa

SEQ ID NO: 239964 - RNA, 16 nt, Mouse mammary tumor virus
cacuuauccuucacuu

SEQ ID NO: 239965 - RNA, 20 nt, Mouse mammary tumor virus
cagcucgagcagaaccaccc

SEQ ID NO: 239966 - RNA, 18 nt, Murine leukemia virus
cagcugaauaugggccaa

SEQ ID NO: 239967 - RNA, 20 nt, Murine leukemia virus
cagcugaauaugggccaaac

SEQ ID NO: 239968 - RNA, 15 nt, Murine leukemia virus
cagcgccaguccucc

SEQ ID NO: 239969 - RNA, 22 nt, Murine leukemia virus
cagcaguuucuagagaaccauc

SEQ ID NO: 239970 - RNA, 17 nt, Murine leukemia virus
aguaacgccauuuugca

SEQ ID NO: 239971 - RNA, 20 nt, Murine leukemia virus
auaaacccucuugcaguugc

SEQ ID NO: 239972 - RNA, 13 nt, Murine leukemia virus
aggauaucugugg

SEQ ID NO: 239973 - RNA, 19 nt, Murine leukemia virus
aggaacagauggaacagcu

SEQ ID NO: 239974 - RNA, 18 nt, Murine leukemia virus
agaucaaggucaggaaca

SEQ ID NO: 239975 - RNA, 19 nt, Murine leukemia virus
agaugcgguccagcccuca

SEQ ID NO: 239976 - RNA, 15 nt, Murine leukemia virus
agcaacuuaucugug

SEQ ID NO: 239977 - RNA, 15 nt, Murine leukemia virus
aacgccauuuugcaa

SEQ ID NO: 239978 - RNA, 23 nt, Murine leukemia virus
aagaacagaugguccccagaugc

SEQ ID NO: 239979 - RNA, 16 nt, Murine leukemia virus
aaacaggauaucugug

SEQ ID NO: 239980 - RNA, 19 nt, Murine leukemia virus
aaacccucuugcaguugca

SEQ ID NO: 239981 - RNA, 19 nt, Murine leukemia virus
ugacugagucgcccgggua

SEQ ID NO: 239982 - RNA, 13 nt, Murine leukemia virus
uggaacagcugaa

SEQ ID NO: 239983 - RNA, 19 nt, Murine leukemia virus
uggaaaaauacauaacuga

SEQ ID NO: 239984 - RNA, 20 nt, Murine leukemia virus
aauaugggccaaacaggaua

SEQ ID NO: 239985 - RNA, 13 nt, Murine leukemia virus
aauaugggccaaa

SEQ ID NO: 239986 - RNA, 11 nt, Murine leukemia virus
aagaacagaug

SEQ ID NO: 239987 - RNA, 13 nt, Murine leukemia virus
aacccucuugcag

SEQ ID NO: 239988 - RNA, 16 nt, Murine leukemia virus
ugaacuaaccaaucag

SEQ ID NO: 239989 - RNA, 13 nt, Murine leukemia virus
cuccgauugacug

SEQ ID NO: 239990 - RNA, 18 nt, Murine leukemia virus
cuccgauugacugagucg

SEQ ID NO: 239991 - RNA, 15 nt, Murine leukemia virus
cugcccagggaccac

SEQ ID NO: 239992 - RNA, 17 nt, Murine leukemia virus
cggggcgccaguccucc

SEQ ID NO: 239993 - RNA, 15 nt, Murine leukemia virus
ccggcucagggccaa

SEQ ID NO: 239994 - RNA, 18 nt, Murine leukemia virus
ccggcucagggccaagaa

SEQ ID NO: 239995 - RNA, 15 nt, Murine leukemia virus
ccucugagugauuga

SEQ ID NO: 239996 - RNA, 20 nt, Murine leukemia virus
ccaguccuccgauugacuga

SEQ ID NO: 239997 - RNA, 18 nt, Murine leukemia virus
gcuggccagcaacuuauc

SEQ ID NO: 239998 - RNA, 22 nt, Murine leukemia virus
gcucaauaaaagagcccacaac

SEQ ID NO: 239999 - RNA, 22 nt, Murine leukemia virus
gccaguccuccgauugacugag

SEQ ID NO: 240000 - RNA, 15 nt, Murine leukemia virus
gccccaaggaccuga

SEQ ID NO: 240001 - RNA, 22 nt, Murine leukemia virus
ggauaucugugguaagcaguuc

SEQ ID NO: 240002 - RNA, 18 nt, Murine leukemia virus
ggcucagggccaagaaca

SEQ ID NO: 240003 - RNA, 21 nt, Murine leukemia virus
gaauagagaaguucagaucaa

SEQ ID NO: 240004 - RNA, 21 nt, Murine leukemia virus
gaacuaaccaaucaguucgcu

SEQ ID NO: 240005 - RNA, 21 nt, Murine leukemia virus
gaacagcugaauaugggccaa

SEQ ID NO: 240006 - RNA, 15 nt, Murine leukemia virus
ugaauaugggccaaa

SEQ ID NO: 240007 - RNA, 12 nt, Murine leukemia virus
ugggccaaacag

SEQ ID NO: 240008 - RNA, 14 nt, Murine leukemia virus
gugguaagcaguuc

SEQ ID NO: 240009 - RNA, 19 nt, Murine leukemia virus
gcucagggccaagaacaga

SEQ ID NO: 240010 - RNA, 12 nt, Murine leukemia virus
gcccagggacca

SEQ ID NO: 240011 - RNA, 17 nt, Murine leukemia virus
guccuccgauugacuga

SEQ ID NO: 240012 - RNA, 13 nt, Murine leukemia virus
ggcucagggccaa

SEQ ID NO: 240013 - RNA, 16 nt, Murine leukemia virus
cuagugucuaugacug

SEQ ID NO: 240014 - RNA, 17 nt, Murine leukemia virus
cuagugucuaugacuga

SEQ ID NO: 240015 - RNA, 20 nt, Murine leukemia virus
cuucugcuccccgagcucaa

SEQ ID NO: 240016 - RNA, 20 nt, Murine leukemia virus
gccaaacaggauaucugugg

SEQ ID NO: 240017 - RNA, 17 nt, Murine leukemia virus
gcauccgacuugugguc

SEQ ID NO: 240018 - RNA, 21 nt, Murine leukemia virus
gauaucugugguaagcaguuc

SEQ ID NO: 240019 - RNA, 15 nt, Murine leukemia virus
gauggaacagcugaa

SEQ ID NO: 240020 - RNA, 19 nt, Murine leukemia virus
gaaccaucagauguuucca

SEQ ID NO: 240021 - RNA, 19 nt, Murine leukemia virus
ccaauaaacccucuugcag

SEQ ID NO: 240022 - RNA, 15 nt, Murine leukemia virus
ccaucagauguuucc

SEQ ID NO: 240023 - RNA, 21 nt, Murine leukemia virus
ccgucagcgggggucuuucau

SEQ ID NO: 240024 - RNA, 17 nt, Murine leukemia virus
agcugaauaugggccaa

SEQ ID NO: 240025 - RNA, 16 nt, Murine leukemia virus
agggccaagaacagau

SEQ ID NO: 240026 - RNA, 16 nt, Murine leukemia virus
aggucaggaacagaug

SEQ ID NO: 240027 - RNA, 18 nt, Murine leukemia virus
acaggauaucugugguaa

SEQ ID NO: 240028 - RNA, 14 nt, Murine leukemia virus
acccguguauccaa

SEQ ID NO: 240029 - RNA, 16 nt, Murine leukemia virus
augggccaaacaggau

SEQ ID NO: 240030 - RNA, 19 nt, Murine leukemia virus
caaggucaggaacagaugg

SEQ ID NO: 240031 - RNA, 20 nt, Murine leukemia virus
aucaaggucaggaacagaug

SEQ ID NO: 240032 - RNA, 11 nt, Murine leukemia virus
agucuccagaa

SEQ ID NO: 240033 - RNA, 13 nt, Murine leukemia virus
aacuuaucugugu

SEQ ID NO: 240034 - RNA, 21 nt, Murine leukemia virus
aaaagauuuuauuuagucucc

SEQ ID NO: 240035 - RNA, 23 nt, Murine leukemia virus
accgacccaccaccgggagguaa

SEQ ID NO: 240036 - RNA, 12 nt, Murine leukemia virus
acuuaucugugu

SEQ ID NO: 240037 - RNA, 15 nt, Murine leukemia virus
aaaaauacauaacug

SEQ ID NO: 240038 - RNA, 13 nt, Murine leukemia virus
gauaucuguggua

SEQ ID NO: 240039 - RNA, 23 nt, Murine leukemia virus
gauaucugugguaagcaguuccu

SEQ ID NO: 240040 - RNA, 11 nt, Murine leukemia virus
gauaucugugg

SEQ ID NO: 240041 - RNA, 17 nt, Murine leukemia virus
aaauacauaacugagaa

SEQ ID NO: 240042 - RNA, 18 nt, Murine leukemia virus
gaaaaauacauaacugag

SEQ ID NO: 240043 - RNA, 15 nt, Murine leukemia virus
gcaacuuaucugugu

SEQ ID NO: 240044 - RNA, 23 nt, Murine leukemia virus
gcaguuccugccccggcucaggg

SEQ ID NO: 240045 - RNA, 14 nt, Murine leukemia virus
gcccucagcaguuu

SEQ ID NO: 240046 - RNA, 17 nt, Murine leukemia virus
gcugaauaugggccaaa

SEQ ID NO: 240047 - RNA, 18 nt, Murine leukemia virus
gcugaauaugggccaaac

SEQ ID NO: 240048 - RNA, 15 nt, Murine leukemia virus
cgccaguccuccgau

SEQ ID NO: 240049 - RNA, 20 nt, Murine leukemia virus
cucagggccaagaacagaug

SEQ ID NO: 240050 - RNA, 12 nt, Murine leukemia virus
cucagggccaag

SEQ ID NO: 240051 - RNA, 12 nt, Murine leukemia virus
cucagcaguuuc

SEQ ID NO: 240052 - RNA, 14 nt, Murine leukemia virus
cuccccgagcucaa

SEQ ID NO: 240053 - RNA, 19 nt, Murine leukemia virus
cagggccaagaacagaugg

SEQ ID NO: 240054 - RNA, 17 nt, Murine leukemia virus
cauaacugagaauagag

SEQ ID NO: 240055 - RNA, 21 nt, Murine leukemia virus
ccugccccggcucagggccaa

SEQ ID NO: 240056 - RNA, 16 nt, Murine leukemia virus
cccggcucagggccaa

SEQ ID NO: 240057 - RNA, 23 nt, Murine leukemia virus
uccugccccggcucagggccaag

SEQ ID NO: 240058 - RNA, 14 nt, Murine leukemia virus
uccuccgauugacu

SEQ ID NO: 240059 - RNA, 18 nt, Murine leukemia virus
uccucugagugauugacu

SEQ ID NO: 240060 - RNA, 20 nt, Murine leukemia virus
uaucugugguaagcaguucc

SEQ ID NO: 240061 - RNA, 17 nt, Murine leukemia virus
guauccaauaaacccuc

SEQ ID NO: 240062 - RNA, 22 nt, Murine leukemia virus
guauccaauaaacccucuugca

SEQ ID NO: 240063 - RNA, 18 nt, Murine leukemia virus
gucagcgggggucuuuca

SEQ ID NO: 240064 - RNA, 22 nt, Murine leukemia virus
uaagcaguuccugccccggcuc

SEQ ID NO: 240065 - RNA, 17 nt, Murine leukemia virus
aaggucaggaacagaug

SEQ ID NO: 240066 - RNA, 20 nt, Murine leukemia virus
ugccccggcucagggccaag

SEQ ID NO: 240067 - RNA, 22 nt, Murine leukemia virus
ugcaguugcagcgccaguccuc

SEQ ID NO: 240068 - RNA, 21 nt, Murine leukemia virus
ucacucggggcgccaguccuc

SEQ ID NO: 240069 - RNA, 12 nt, Murine leukemia virus
caagaacagaug

SEQ ID NO: 240070 - RNA, 13 nt, Murine leukemia virus
caagaacagaugg

SEQ ID NO: 240071 - RNA, 14 nt, Murine leukemia virus
caacuuaucugugu

SEQ ID NO: 240072 - RNA, 19 nt, Murine leukemia virus
auggaacagcugaauaugg

SEQ ID NO: 240073 - RNA, 17 nt, Murine leukemia virus
ccagcccucagcaguuu

SEQ ID NO: 240074 - RNA, 16 nt, Murine leukemia virus
caucagauguuuccag

SEQ ID NO: 240075 - RNA, 14 nt, Murine leukemia virus
caggauaucugugg

SEQ ID NO: 240076 - RNA, 22 nt, Murine leukemia virus
agaucaaggucaggaacagaug

SEQ ID NO: 240077 - RNA, 18 nt, Murine leukemia virus
agauggaacagcugaaua

SEQ ID NO: 240078 - RNA, 19 nt, Murine leukemia virus
guuuggcaagcuagcuuaa

SEQ ID NO: 240079 - RNA, 16 nt, Murine leukemia virus
guacccguguauccaa

SEQ ID NO: 240080 - RNA, 21 nt, Murine leukemia virus
gguccagcccucagcaguuuc

SEQ ID NO: 240081 - RNA, 20 nt, Murine leukemia virus
gggccaaacaggauaucugu

SEQ ID NO: 240082 - RNA, 22 nt, Murine leukemia virus
ggaacagcugaauaugggccaa

SEQ ID NO: 240083 - RNA, 13 nt, Murine leukemia virus
cuccucugaguga

SEQ ID NO: 240084 - RNA, 16 nt, Murine leukemia virus
cugugguaagcaguuc

SEQ ID NO: 240085 - RNA, 17 nt, Murine leukemia virus
gaucaaggucaggaaca

SEQ ID NO: 240086 - RNA, 17 nt, Murine leukemia virus
gagaccccugcccaggg

SEQ ID NO: 240087 - RNA, 15 nt, Murine osteosarcoma virus
gaugguucccagaaa

SEQ ID NO: 240088 - RNA, 17 nt, Murine osteosarcoma virus
gcaaugccuuccaggga

SEQ ID NO: 240089 - RNA, 16 nt, Murine osteosarcoma virus
gaaaaacaagaacaag

SEQ ID NO: 240090 - RNA, 19 nt, Murine osteosarcoma virus
gaacaaaugguucccagaa

SEQ ID NO: 240091 - RNA, 15 nt, Murine osteosarcoma virus
cgggacuagggccaa

SEQ ID NO: 240092 - RNA, 15 nt, Murine osteosarcoma virus
cggccagggccaaga

SEQ ID NO: 240093 - RNA, 13 nt, Murine osteosarcoma virus
gggccaagaacaa

SEQ ID NO: 240094 - RNA, 12 nt, Murine osteosarcoma virus
ggccagggccaa

SEQ ID NO: 240095 - RNA, 17 nt, Murine osteosarcoma virus
guaccgggacuagggcc

SEQ ID NO: 240096 - RNA, 18 nt, Murine osteosarcoma virus
gcacuagggccccggcca

SEQ ID NO: 240097 - RNA, 16 nt, Murine osteosarcoma virus
gcccgagccaggaaac

SEQ ID NO: 240098 - RNA, 17 nt, Murine osteosarcoma virus
gccccggccagggccaa

SEQ ID NO: 240099 - RNA, 18 nt, Murine osteosarcoma virus
gccugcuacuuccagagu

SEQ ID NO: 240100 - RNA, 18 nt, Murine osteosarcoma virus
gccggucaccucgagggu

SEQ ID NO: 240101 - RNA, 21 nt, Murine osteosarcoma virus
guucucagaaaaacaagaaca

SEQ ID NO: 240102 - RNA, 16 nt, Murine osteosarcoma virus
agaguggucagggccu

SEQ ID NO: 240103 - RNA, 12 nt, Murine osteosarcoma virus
agagacccagaa

SEQ ID NO: 240104 - RNA, 15 nt, Murine osteosarcoma virus
agagcugauguucuc

SEQ ID NO: 240105 - RNA, 16 nt, Murine osteosarcoma virus
acagaugguucccaga

SEQ ID NO: 240106 - RNA, 18 nt, Murine osteosarcoma virus
acaacaacaguuucaaga

SEQ ID NO: 240107 - RNA, 18 nt, Murine osteosarcoma virus
acaaaugguucccagaaa

SEQ ID NO: 240108 - RNA, 14 nt, Murine osteosarcoma virus
caguuucaagagac

SEQ ID NO: 240109 - RNA, 12 nt, Murine osteosarcoma virus
ccagagugguca

SEQ ID NO: 240110 - RNA, 19 nt, Murine osteosarcoma virus
ccggccagggccaagaaca

SEQ ID NO: 240111 - RNA, 13 nt, Murine osteosarcoma virus
auguucucagaaa

SEQ ID NO: 240112 - RNA, 18 nt, Murine osteosarcoma virus
auucaguuuacagaaaga

SEQ ID NO: 240113 - RNA, 16 nt, Murine osteosarcoma virus
cacaacauugacaaag

SEQ ID NO: 240114 - RNA, 19 nt, Murine osteosarcoma virus
ugacaaagcgccgguugua

SEQ ID NO: 240115 - RNA, 14 nt, Murine osteosarcoma virus
ugccagaagcacga

SEQ ID NO: 240116 - RNA, 15 nt, Murine osteosarcoma virus
uguggucaagcacua

SEQ ID NO: 240117 - RNA, 13 nt, Murine osteosarcoma virus
ugguucccagaaa

SEQ ID NO: 240118 - RNA, 15 nt, Murine osteosarcoma virus
ggguaagaaccccac

SEQ ID NO: 240119 - RNA, 16 nt, Murine osteosarcoma virus
ucaagagacccagaaa

SEQ ID NO: 240120 - RNA, 16 nt, Murine osteosarcoma virus
cccagaaauagcuaaa

SEQ ID NO: 240121 - RNA, 21 nt, Murine osteosarcoma virus
ccagagcugauguucucagaa

SEQ ID NO: 240122 - RNA, 13 nt, Murine osteosarcoma virus
ccagggccaagaa

SEQ ID NO: 240123 - RNA, 22 nt, Murine osteosarcoma virus
aaacaagaacaaggagguaaag

SEQ ID NO: 240124 - RNA, 14 nt, Murine osteosarcoma virus
ccggccagggccaa

SEQ ID NO: 240125 - RNA, 18 nt, Murine osteosarcoma virus
ccggccagggccaagaac

SEQ ID NO: 240126 - RNA, 13 nt, Murine osteosarcoma virus
ccuaaggugggca

SEQ ID NO: 240127 - RNA, 15 nt, Murine osteosarcoma virus
cuguggucaagcacu

SEQ ID NO: 240128 - RNA, 11 nt, Murine osteosarcoma virus
cgcggacaaag

SEQ ID NO: 240129 - RNA, 14 nt, Murine osteosarcoma virus
gggaucaaccccaa

SEQ ID NO: 240130 - RNA, 17 nt, Murine osteosarcoma virus
ggccagggccaagaaca

SEQ ID NO: 240131 - RNA, 11 nt, Murine osteosarcoma virus
gccagggccaa

SEQ ID NO: 240132 - RNA, 12 nt, Murine osteosarcoma virus
gccagggccaag

SEQ ID NO: 240133 - RNA, 15 nt, Murine osteosarcoma virus
gccagggccaagaac

SEQ ID NO: 240134 - RNA, 18 nt, Murine osteosarcoma virus
gccucuuggcccggccug

SEQ ID NO: 240135 - RNA, 22 nt, Murine osteosarcoma virus
gccucuacgccacacuggccua

SEQ ID NO: 240136 - RNA, 23 nt, Murine osteosarcoma virus
aaauaccagagcugauguucuca

SEQ ID NO: 240137 - RNA, 22 nt, Murine osteosarcoma virus
acuuccagaguggucagggccu

SEQ ID NO: 240138 - RNA, 15 nt, Murine osteosarcoma virus
agaaaaacaagaaca

SEQ ID NO: 240139 - RNA, 16 nt, Murine osteosarcoma virus
agaacaaaugguuccc

SEQ ID NO: 240140 - RNA, 22 nt, Murine osteosarcoma virus
acugcaguaacgccauuuugca

SEQ ID NO: 240141 - RNA, 12 nt, Murine osteosarcoma virus
acuagggccaaa

SEQ ID NO: 240142 - RNA, 17 nt, Murine osteosarcoma virus
acuagggccaagaacaa

SEQ ID NO: 240143 - RNA, 23 nt, Murine osteosarcoma virus
acuagggccccggccagggccaa

SEQ ID NO: 240144 - RNA, 18 nt, Murine osteosarcoma virus
acagaugguucccagaaa

SEQ ID NO: 240145 - RNA, 16 nt, Murine osteosarcoma virus
acaaaugguucccaga

SEQ ID NO: 240146 - RNA, 14 nt, Murine osteosarcoma virus
aaagaccccuucau

SEQ ID NO: 240147 - RNA, 15 nt, Murine osteosarcoma virus
aaugguucccagaaa

SEQ ID NO: 240148 - RNA, 22 nt, Murine osteosarcoma virus
aauaccagagcugauguucuca

SEQ ID NO: 240149 - RNA, 23 nt, Murine osteosarcoma virus
aauaccagagcugauguucucag

SEQ ID NO: 240150 - RNA, 17 nt, Murine osteosarcoma virus
agccaggaaaccgugaa

SEQ ID NO: 240151 - RNA, 20 nt, Murine osteosarcoma virus
aguaccgggacuagggccaa

SEQ ID NO: 240152 - RNA, 21 nt, Murine osteosarcoma virus
agggccaagaacaaaugguuc

SEQ ID NO: 240153 - RNA, 21 nt, Murine osteosarcoma virus
agggccaagaacagaugguuc

SEQ ID NO: 240154 - RNA, 22 nt, Murine osteosarcoma virus
auuuaaacuaaccaaucagcuc

SEQ ID NO: 240155 - RNA, 18 nt, Murine osteosarcoma virus
accgggacuagggccaaa

SEQ ID NO: 240156 - RNA, 18 nt, Murine osteosarcoma virus
accagagcugauguucuc

SEQ ID NO: 240157 - RNA, 14 nt, Murine osteosarcoma virus
acuagggccaaaca

SEQ ID NO: 240158 - RNA, 12 nt, Murine osteosarcoma virus
acuagggccaag

SEQ ID NO: 240159 - RNA, 14 nt, Murine osteosarcoma virus
acuagggccaagaa

SEQ ID NO: 240160 - RNA, 21 nt, Murine osteosarcoma virus
agaaacugucucaagguuccc

SEQ ID NO: 240161 - RNA, 20 nt, Murine osteosarcoma virus
agggccccggccagggccaa

SEQ ID NO: 240162 - RNA, 15 nt, Murine osteosarcoma virus
auagaggcuggaaag

SEQ ID NO: 240163 - RNA, 22 nt, Murine osteosarcoma virus
ccugcggcgagccugccagaag

SEQ ID NO: 240164 - RNA, 15 nt, Murine osteosarcoma virus
cagaaaaacaagaac

SEQ ID NO: 240165 - RNA, 16 nt, Murine osteosarcoma virus
caaugccuuccaggga

SEQ ID NO: 240166 - RNA, 14 nt, Murine osteosarcoma virus
augguucccagaaa

SEQ ID NO: 240167 - RNA, 15 nt, Murine osteosarcoma virus
augguucccagaaau

SEQ ID NO: 240168 - RNA, 18 nt, Murine osteosarcoma virus
aucuguggucaagcacua

SEQ ID NO: 240169 - RNA, 21 nt, Murine osteosarcoma virus
caaacaggauaucugugguca

SEQ ID NO: 240170 - RNA, 23 nt, Murine osteosarcoma virus
gaaaguaccgggacuagggccaa

SEQ ID NO: 240171 - RNA, 18 nt, Murine osteosarcoma virus
cuugaucgucgggggcaa

SEQ ID NO: 240172 - RNA, 17 nt, Murine osteosarcoma virus
gagccugccagaagcac

SEQ ID NO: 240173 - RNA, 13 nt, Murine osteosarcoma virus
gacuagggccaaa

SEQ ID NO: 240174 - RNA, 15 nt, Murine osteosarcoma virus
gacuagggccaaaca

SEQ ID NO: 240175 - RNA, 13 nt, Murine osteosarcoma virus
gacuagggccaag

SEQ ID NO: 240176 - RNA, 17 nt, Murine osteosarcoma virus
gacuagggccaagaaca

SEQ ID NO: 240177 - RNA, 12 nt, Murine osteosarcoma virus
gccacacuggcc

SEQ ID NO: 240178 - RNA, 18 nt, Murine osteosarcoma virus
gccagggccaagaacaga

SEQ ID NO: 240179 - RNA, 14 nt, Murine osteosarcoma virus
cugggcgcggacaa

SEQ ID NO: 240180 - RNA, 12 nt, Murine osteosarcoma virus
cuagggccaaga

SEQ ID NO: 240181 - RNA, 15 nt, Murine osteosarcoma virus
cuagggccaagaaca

SEQ ID NO: 240182 - RNA, 16 nt, Murine osteosarcoma virus
cuagggccaagaacaa

SEQ ID NO: 240183 - RNA, 13 nt, Murine osteosarcoma virus
ggacuagggccaa

SEQ ID NO: 240184 - RNA, 18 nt, Murine osteosarcoma virus
ggacuagggccaagaaca

SEQ ID NO: 240185 - RNA, 20 nt, Murine osteosarcoma virus
uaccagagcugauguucuca

SEQ ID NO: 240186 - RNA, 13 nt, Murine osteosarcoma virus
uaucuguggucaa

SEQ ID NO: 240187 - RNA, 21 nt, Murine osteosarcoma virus
uagggccccggccagggccaa

SEQ ID NO: 240188 - RNA, 21 nt, Murine osteosarcoma virus
gaacagaugguucccagaaau

SEQ ID NO: 240189 - RNA, 22 nt, Murine osteosarcoma virus
aaaguaccgggacuagggccaa

SEQ ID NO: 240190 - RNA, 12 nt, Murine osteosarcoma virus
gacuagggccaa

SEQ ID NO: 240191 - RNA, 21 nt, Murine osteosarcoma virus
gacuagggccaaacaggauau

SEQ ID NO: 240192 - RNA, 16 nt, Murine osteosarcoma virus
gacuagggccaagaac

SEQ ID NO: 240193 - RNA, 19 nt, Murine osteosarcoma virus
gacuagggccaagaacaaa

SEQ ID NO: 240194 - RNA, 22 nt, Murine osteosarcoma virus
gccccggccagggccaagaaca

SEQ ID NO: 240195 - RNA, 20 nt, Murine osteosarcoma virus
ccgggacuagggccaagaac

SEQ ID NO: 240196 - RNA, 20 nt, Murine osteosarcoma virus
cggccugcuacuuccagagu

SEQ ID NO: 240197 - RNA, 20 nt, Murine osteosarcoma virus
cucagaaaaacaagaacaag

SEQ ID NO: 240198 - RNA, 13 nt, Murine osteosarcoma virus
cuagggccaagaa

SEQ ID NO: 240199 - RNA, 17 nt, Murine osteosarcoma virus
cuagggccaagaacaaa

SEQ ID NO: 240200 - RNA, 23 nt, Murine osteosarcoma virus
cuagggccccggccagggccaag

SEQ ID NO: 240201 - RNA, 13 nt, Murine osteosarcoma virus
cuggaaaguaccg

SEQ ID NO: 240202 - RNA, 21 nt, Murine osteosarcoma virus
cuggccggucaccucgagggu

SEQ ID NO: 240203 - RNA, 20 nt, Murine osteosarcoma virus
ucucagaaaaacaagaacaa

SEQ ID NO: 240204 - RNA, 19 nt, Murine osteosarcoma virus
guuucaagagacccagaaa

SEQ ID NO: 240205 - RNA, 18 nt, Murine osteosarcoma virus
uaccgggacuagggccaa

SEQ ID NO: 240206 - RNA, 18 nt, Murine osteosarcoma virus
uacuuccagaguggucag

SEQ ID NO: 240207 - RNA, 17 nt, Murine osteosarcoma virus
aagaacagaugguuccc

SEQ ID NO: 240208 - RNA, 22 nt, Murine osteosarcoma virus
aagaacagaugguucccagaaa

SEQ ID NO: 240209 - RNA, 22 nt, Murine osteosarcoma virus
aagaacaaaugguucccagaaa

SEQ ID NO: 240210 - RNA, 19 nt, Murine osteosarcoma virus
aaggcaugggaaaauacca

SEQ ID NO: 240211 - RNA, 22 nt, Murine osteosarcoma virus
aaacaggauaucuguggucaag

SEQ ID NO: 240212 - RNA, 16 nt, Murine osteosarcoma virus
aaaaaucacgugaaua

SEQ ID NO: 240213 - RNA, 21 nt, Murine osteosarcoma virus
aagaacagaugguucccagaa

SEQ ID NO: 240214 - RNA, 14 nt, Murine osteosarcoma virus
aagagacccagaaa

SEQ ID NO: 240215 - RNA, 15 nt, Murine osteosarcoma virus
agagaggcuggaaag

SEQ ID NO: 240216 - RNA, 20 nt, Murine osteosarcoma virus
acuugaucgucgggggcaau

SEQ ID NO: 240217 - RNA, 22 nt, Murine osteosarcoma virus
acaguuucaagagacccagaaa

SEQ ID NO: 240218 - RNA, 19 nt, Murine osteosarcoma virus
aucgucgggggcaaugccu

SEQ ID NO: 240219 - RNA, 15 nt, Murine osteosarcoma virus
augaccggggaucaa

SEQ ID NO: 240220 - RNA, 17 nt, Murine osteosarcoma virus
cagaugguucccagaaa

SEQ ID NO: 240221 - RNA, 17 nt, Murine osteosarcoma virus
caaaugguucccagaaa

SEQ ID NO: 240222 - RNA, 19 nt, Homo sapiens
acuaaaagguaugcaauca

SEQ ID NO: 240223 - RNA, 23 nt, Homo sapiens
ucuaaugaaaccugugucucuga

SEQ ID NO: 240224 - RNA, 17 nt, Homo sapiens
ugcacaugcacgugugu

SEQ ID NO: 240225 - RNA, 15 nt, Homo sapiens
gcuggagugcaguga

SEQ ID NO: 240226 - RNA, 18 nt, Homo sapiens
caguuaagagaaaugagc

SEQ ID NO: 240227 - RNA, 16 nt, Homo sapiens
uaggaacacuccuuca

SEQ ID NO: 240228 - RNA, 16 nt, Homo sapiens
aggcccuucucuccag

SEQ ID NO: 240229 - RNA, 19 nt, Homo sapiens
ugccagcuuaucucagggg

SEQ ID NO: 240230 - RNA, 14 nt, Homo sapiens
cugcugacaguguu

SEQ ID NO: 240231 - RNA, 17 nt, Homo sapiens
ugucauauaagauucau

SEQ ID NO: 240232 - RNA, 13 nt, Homo sapiens
ucuaaagcugcca

SEQ ID NO: 240233 - RNA, 23 nt, Homo sapiens
aagugggggaguggccacagaaa

SEQ ID NO: 240234 - RNA, 19 nt, Homo sapiens
cauucuccuuguguuacua

SEQ ID NO: 240235 - RNA, 15 nt, Homo sapiens
cugauggugcaauga

SEQ ID NO: 240236 - RNA, 11 nt, Homo sapiens
agccuuccagg

SEQ ID NO: 240237 - RNA, 12 nt, Homo sapiens
accaucccugaa

SEQ ID NO: 240238 - RNA, 23 nt, Homo sapiens
ugcagcucuggagguacgaaaag

SEQ ID NO: 240239 - RNA, 23 nt, Homo sapiens
accaugauuaaccacuucagcug

SEQ ID NO: 240240 - RNA, 18 nt, Homo sapiens
gcauccuggcacccggcc

SEQ ID NO: 240241 - RNA, 14 nt, Homo sapiens
ugggccuggcuccc

SEQ ID NO: 240242 - RNA, 18 nt, Homo sapiens
gaccuugaaugaugccau

SEQ ID NO: 240243 - RNA, 20 nt, Homo sapiens
ggaucaaaguugaugaaaua

SEQ ID NO: 240244 - RNA, 13 nt, Homo sapiens
ccaggcugggcug

SEQ ID NO: 240245 - RNA, 15 nt, Homo sapiens
auuuuauuaugcaug

SEQ ID NO: 240246 - RNA, 20 nt, Homo sapiens
agacugaguacguugugcau

SEQ ID NO: 240247 - RNA, 21 nt, Homo sapiens
cuucaaucucuugcacucaaa

SEQ ID NO: 240248 - RNA, 22 nt, Homo sapiens
ucucgugauugauaagaaccuu

SEQ ID NO: 240249 - RNA, 12 nt, Homo sapiens
aaagcagugcau

SEQ ID NO: 240250 - RNA, 22 nt, Homo sapiens
ggacucaaugcacugacauugu

SEQ ID NO: 240251 - RNA, 17 nt, Homo sapiens
aaaacacaaaaguuucu

SEQ ID NO: 240252 - RNA, 13 nt, Homo sapiens
ccaaugaugguca

SEQ ID NO: 240253 - RNA, 20 nt, Homo sapiens
cucuuccacuuugauaccau

SEQ ID NO: 240254 - RNA, 15 nt, Homo sapiens
cagccucacaguccu

SEQ ID NO: 240255 - RNA, 14 nt, Homo sapiens
gucagcacuaccuc

SEQ ID NO: 240256 - RNA, 13 nt, Homo sapiens
augaggcauuugu

SEQ ID NO: 240257 - RNA, 18 nt, Homo sapiens
gccaggcaugguggccca

SEQ ID NO: 240258 - RNA, 18 nt, Homo sapiens
cccaaauucuuucagugg

SEQ ID NO: 240259 - RNA, 23 nt, Homo sapiens
guucaauucucauuugucacaca

SEQ ID NO: 240260 - RNA, 11 nt, Homo sapiens
caucuuccaag

SEQ ID NO: 240261 - RNA, 15 nt, Homo sapiens
cuucaaauauuuccc

SEQ ID NO: 240262 - RNA, 16 nt, Homo sapiens
ccccaggcugggcugu

SEQ ID NO: 240263 - RNA, 22 nt, Homo sapiens
uucaaccaguuugaaccaagaa

SEQ ID NO: 240264 - RNA, 22 nt, Homo sapiens
augaaaugaggucagagccugc

SEQ ID NO: 240265 - RNA, 12 nt, Homo sapiens
ccuggcaagaau

SEQ ID NO: 240266 - RNA, 20 nt, Homo sapiens
uacucaccucaccccacugu

SEQ ID NO: 240267 - RNA, 14 nt, Homo sapiens
ccucaggcaggugg

SEQ ID NO: 240268 - RNA, 16 nt, Homo sapiens
gcuucauuuccugugu

SEQ ID NO: 240269 - RNA, 23 nt, Homo sapiens
acaucuuggucagauuugaacuc

SEQ ID NO: 240270 - RNA, 13 nt, Homo sapiens
uguggacacagcu

SEQ ID NO: 240271 - RNA, 13 nt, Homo sapiens
auguguguucaug

SEQ ID NO: 240272 - RNA, 16 nt, Homo sapiens
ggcucucaggccagcu

SEQ ID NO: 240273 - RNA, 22 nt, Homo sapiens
ucaacaucuuggucagauuuga

SEQ ID NO: 240274 - RNA, 16 nt, Homo sapiens
acccugcuucaaauau

SEQ ID NO: 240275 - RNA, 19 nt, Homo sapiens
cuuuucgcaggauucuucc

SEQ ID NO: 240276 - RNA, 16 nt, Homo sapiens
agagcaguguggaaaa

SEQ ID NO: 240277 - RNA, 23 nt, Homo sapiens
gagccuccugcccuuaccugcca

SEQ ID NO: 240278 - RNA, 22 nt, Homo sapiens
augugcugaaugguuuucaaaa

SEQ ID NO: 240279 - RNA, 18 nt, Homo sapiens
accagcgugugacuacuc

SEQ ID NO: 240280 - RNA, 18 nt, Homo sapiens
ccccucaacaccucugca

SEQ ID NO: 240281 - RNA, 14 nt, Homo sapiens
cucaccugccccuc

SEQ ID NO: 240282 - RNA, 16 nt, Homo sapiens
gcaggcucucaggcca

SEQ ID NO: 240283 - RNA, 13 nt, Homo sapiens
acacugcuuguga

SEQ ID NO: 240284 - RNA, 14 nt, Homo sapiens
uccacugugccaug

SEQ ID NO: 240285 - RNA, 17 nt, Homo sapiens
caaaaaacaacugacca

SEQ ID NO: 240286 - RNA, 18 nt, Homo sapiens
acaucuuggucagauuug

SEQ ID NO: 240287 - RNA, 22 nt, Homo sapiens
acauguuuuucuucucccucag

SEQ ID NO: 240288 - RNA, 18 nt, Homo sapiens
cuuacacuuuaugcacaa

SEQ ID NO: 240289 - RNA, 13 nt, Homo sapiens
gggaccucaggcc

SEQ ID NO: 240290 - RNA, 22 nt, Homo sapiens
ugaaaauguauguguaaguauu

SEQ ID NO: 240291 - RNA, 20 nt, Homo sapiens
guuacagacaaagcguggug

SEQ ID NO: 240292 - RNA, 17 nt, Homo sapiens
ugagacucugucucaaa

SEQ ID NO: 240293 - RNA, 20 nt, Homo sapiens
acuuuucuuucagccaagaa

SEQ ID NO: 240294 - RNA, 18 nt, Homo sapiens
gcauaaguuaacuuccaa

SEQ ID NO: 240295 - RNA, 13 nt, Homo sapiens
ggcauccaguauc

SEQ ID NO: 240296 - RNA, 15 nt, Homo sapiens
ucccugccaauggac

SEQ ID NO: 240297 - RNA, 12 nt, Homo sapiens
cccagauugcaa

SEQ ID NO: 240298 - RNA, 23 nt, Homo sapiens
ccuccuccagccgccaugcuccu

SEQ ID NO: 240299 - RNA, 20 nt, Homo sapiens
agcacaugccucucucaggc

SEQ ID NO: 240300 - RNA, 20 nt, Homo sapiens
uguuggccaaagccaaagcu

SEQ ID NO: 240301 - RNA, 22 nt, Homo sapiens
cucacacggacacucaaaagcu

SEQ ID NO: 240302 - RNA, 19 nt, Homo sapiens
gaaaaaccaccaccaucac

SEQ ID NO: 240303 - RNA, 19 nt, Homo sapiens
gccagcuuaucucaggggu

SEQ ID NO: 240304 - RNA, 18 nt, Homo sapiens
aaggggagaguaacccug

SEQ ID NO: 240305 - RNA, 14 nt, Homo sapiens
gauccaagcugguc

SEQ ID NO: 240306 - RNA, 16 nt, Homo sapiens
gcagccacauuccuga

SEQ ID NO: 240307 - RNA, 13 nt, Homo sapiens
cugauggugcaau

SEQ ID NO: 240308 - RNA, 16 nt, Homo sapiens
ugacuuaagcacacuu

SEQ ID NO: 240309 - RNA, 21 nt, Homo sapiens
ucacaggcagguccaggguuu

SEQ ID NO: 240310 - RNA, 12 nt, Homo sapiens
cugaggugggag

SEQ ID NO: 240311 - RNA, 21 nt, Homo sapiens
gggcccaaauucuuucagugg

SEQ ID NO: 240312 - RNA, 18 nt, Homo sapiens
gcuucaguggcagcugcu

SEQ ID NO: 240313 - RNA, 20 nt, Homo sapiens
aggccuggccagaugcacca

SEQ ID NO: 240314 - RNA, 17 nt, Homo sapiens
caaaaagaggcuaugug

SEQ ID NO: 240315 - RNA, 16 nt, Homo sapiens
cagacaggaccaggga

SEQ ID NO: 240316 - RNA, 20 nt, Homo sapiens
uugagcucaggaguuugaga

SEQ ID NO: 240317 - RNA, 16 nt, Homo sapiens
uccccaagcaguguga

SEQ ID NO: 240318 - RNA, 16 nt, Homo sapiens
ucacggcucacugcag

SEQ ID NO: 240319 - RNA, 20 nt, Homo sapiens
cuuucuucccuacaguugaa

SEQ ID NO: 240320 - RNA, 14 nt, Homo sapiens
uccaaggguacuaa

SEQ ID NO: 240321 - RNA, 17 nt, Homo sapiens
cugggguggggaccuca

SEQ ID NO: 240322 - RNA, 13 nt, Homo sapiens
uggcagcucagag

SEQ ID NO: 240323 - RNA, 20 nt, Homo sapiens
uuuccuucauucaacccacc

SEQ ID NO: 240324 - RNA, 12 nt, Homo sapiens
ucaaccccauga

SEQ ID NO: 240325 - RNA, 22 nt, Homo sapiens
guuauaauaauguuaacaugga

SEQ ID NO: 240326 - RNA, 16 nt, Homo sapiens
uucaguguacauggaa

SEQ ID NO: 240327 - RNA, 15 nt, Homo sapiens
cuuacuuaaccugaa

SEQ ID NO: 240328 - RNA, 23 nt, Homo sapiens
acccuggugaccagcaccaucuc

SEQ ID NO: 240329 - RNA, 13 nt, Homo sapiens
uccuagcacuuug

SEQ ID NO: 240330 - RNA, 13 nt, Homo sapiens
uucugcucacaua

SEQ ID NO: 240331 - RNA, 16 nt, Homo sapiens
aaauuuguaugcucaa

SEQ ID NO: 240332 - RNA, 21 nt, Homo sapiens
cucugagacucgcgacaaugc

SEQ ID NO: 240333 - RNA, 15 nt, Homo sapiens
cagugguaugaucac

SEQ ID NO: 240334 - RNA, 15 nt, Homo sapiens
aaugagccuggcaag

SEQ ID NO: 240335 - RNA, 16 nt, Homo sapiens
cuacugaggugcuaug

SEQ ID NO: 240336 - RNA, 15 nt, Homo sapiens
cuuagugugugcaau

SEQ ID NO: 240337 - RNA, 14 nt, Homo sapiens
ugcacgugugugca

SEQ ID NO: 240338 - RNA, 14 nt, Homo sapiens
ucacgccacugcac

SEQ ID NO: 240339 - RNA, 20 nt, Homo sapiens
gauuuugaaauuuuuauuaa

SEQ ID NO: 240340 - RNA, 15 nt, Homo sapiens
ccuuagaagucacac

SEQ ID NO: 240341 - RNA, 21 nt, Homo sapiens
cuccugguguggaagagcucc

SEQ ID NO: 240342 - RNA, 19 nt, Homo sapiens
accucagccucccaaagug

SEQ ID NO: 240343 - RNA, 23 nt, Homo sapiens
gugaagcugggagaaccaaaaag

SEQ ID NO: 240344 - RNA, 18 nt, Homo sapiens
auuccuguucccaugaga

SEQ ID NO: 240345 - RNA, 14 nt, Homo sapiens
caccaagcccaguu

SEQ ID NO: 240346 - RNA, 20 nt, Homo sapiens
cugugucuuuuuucacuaca

SEQ ID NO: 240347 - RNA, 16 nt, Homo sapiens
acacuugggagcaaaa

SEQ ID NO: 240348 - RNA, 13 nt, Homo sapiens
aaaggaggggaua

SEQ ID NO: 240349 - RNA, 22 nt, Homo sapiens
auguccaagaagcccaggaaag

SEQ ID NO: 240350 - RNA, 18 nt, Homo sapiens
augaaaaaauaacacugu

SEQ ID NO: 240351 - RNA, 19 nt, Homo sapiens
aacucugauuaugaauaca

SEQ ID NO: 240352 - RNA, 20 nt, Homo sapiens
aggguaucaggugcugccau

SEQ ID NO: 240353 - RNA, 18 nt, Homo sapiens
cugcgucucauacucacc

SEQ ID NO: 240354 - RNA, 15 nt, Homo sapiens
gccccugcccggcug

SEQ ID NO: 240355 - RNA, 15 nt, Homo sapiens
acacuguacugcaau

SEQ ID NO: 240356 - RNA, 23 nt, Homo sapiens
gccaggccagagggagugacaga

SEQ ID NO: 240357 - RNA, 23 nt, Homo sapiens
aaaagaugcuucucacugccaug

SEQ ID NO: 240358 - RNA, 15 nt, Homo sapiens
caaaguagaagucuu

SEQ ID NO: 240359 - RNA, 20 nt, Homo sapiens
uuccaauuuacauacucugc

SEQ ID NO: 240360 - RNA, 16 nt, Homo sapiens
aggccauuuguguuua

SEQ ID NO: 240361 - RNA, 16 nt, Homo sapiens
aaucucuugcacucaa

SEQ ID NO: 240362 - RNA, 19 nt, Homo sapiens
cagauugcaacaggcuggg

SEQ ID NO: 240363 - RNA, 18 nt, Homo sapiens
uccuacucugugucaggu

SEQ ID NO: 240364 - RNA, 14 nt, Homo sapiens
ugagucgaggacag

SEQ ID NO: 240365 - RNA, 17 nt, Homo sapiens
cacucuggcagcucaga

SEQ ID NO: 240366 - RNA, 19 nt, Homo sapiens
cuuucugcuaucaaagagg

SEQ ID NO: 240367 - RNA, 21 nt, Homo sapiens
aggacagggaggugaccccag

SEQ ID NO: 240368 - RNA, 17 nt, Homo sapiens
caucaagaugugacaug

SEQ ID NO: 240369 - RNA, 16 nt, Homo sapiens
aaaccuguuucugcag

SEQ ID NO: 240370 - RNA, 20 nt, Homo sapiens
augaucuuugcagacaggca

SEQ ID NO: 240371 - RNA, 19 nt, Homo sapiens
gacagucccugccaaugga

SEQ ID NO: 240372 - RNA, 18 nt, Homo sapiens
ccaggcaggucuugaacu

SEQ ID NO: 240373 - RNA, 21 nt, Homo sapiens
cuuuucuguccgagcuuugaa

SEQ ID NO: 240374 - RNA, 23 nt, Homo sapiens
ggcccuggccuagcauacguaca

SEQ ID NO: 240375 - RNA, 22 nt, Homo sapiens
aaaacuugauguguuaucucuu

SEQ ID NO: 240376 - RNA, 14 nt, Homo sapiens
cagcuaaugggaca

SEQ ID NO: 240377 - RNA, 22 nt, Homo sapiens
cagccucugaaaaccaauguuc

SEQ ID NO: 240378 - RNA, 13 nt, Homo sapiens
ggcuaccuacaua

SEQ ID NO: 240379 - RNA, 21 nt, Homo sapiens
cacuugcagacucuacagagg

SEQ ID NO: 240380 - RNA, 16 nt, Homo sapiens
caggcagguccagggu

SEQ ID NO: 240381 - RNA, 23 nt, Homo sapiens
ucuuauuuaaugaaagacuguac

SEQ ID NO: 240382 - RNA, 16 nt, Homo sapiens
uagaagucacacagua

SEQ ID NO: 240383 - RNA, 16 nt, Homo sapiens
augaguaacaggaaaa

SEQ ID NO: 240384 - RNA, 22 nt, Homo sapiens
gacugaguacguugugcauuug

SEQ ID NO: 240385 - RNA, 17 nt, Homo sapiens
ugcgaucuggguucacu

SEQ ID NO: 240386 - RNA, 18 nt, Homo sapiens
guaaaugggggugcauuu

SEQ ID NO: 240387 - RNA, 12 nt, Homo sapiens
cugcauguuaca

SEQ ID NO: 240388 - RNA, 19 nt, Homo sapiens
gcagauacaggaaaagcug

SEQ ID NO: 240389 - RNA, 21 nt, Homo sapiens
aaagguagcuuuucccaaacu

SEQ ID NO: 240390 - RNA, 22 nt, Homo sapiens
guuugaagaugccgcauuugga

SEQ ID NO: 240391 - RNA, 20 nt, Homo sapiens
gugcccccacccccacccuc

SEQ ID NO: 240392 - RNA, 13 nt, Homo sapiens
agggaaaaaccag

SEQ ID NO: 240393 - RNA, 17 nt, Homo sapiens
ccaccuuggcucaaguc

SEQ ID NO: 240394 - RNA, 23 nt, Homo sapiens
gacccacggagcccuuaugacau

SEQ ID NO: 240395 - RNA, 19 nt, Homo sapiens
cgaaaagaggggaagagac

SEQ ID NO: 240396 - RNA, 17 nt, Homo sapiens
ucgaugcagugcuucca

SEQ ID NO: 240397 - RNA, 13 nt, Homo sapiens
aggugacagagug

SEQ ID NO: 240398 - RNA, 17 nt, Homo sapiens
cugccugaagucacaca

SEQ ID NO: 240399 - RNA, 18 nt, Homo sapiens
ugcaucaagaugugacau

SEQ ID NO: 240400 - RNA, 21 nt, Homo sapiens
aagaaccuuuugagugccuua

SEQ ID NO: 240401 - RNA, 21 nt, Homo sapiens
auacauaaacaagaccacguu

SEQ ID NO: 240402 - RNA, 12 nt, Homo sapiens
agcucaccagcc

SEQ ID NO: 240403 - RNA, 15 nt, Homo sapiens
ugguucccauuugcu

SEQ ID NO: 240404 - RNA, 20 nt, Homo sapiens
aggaagccucccacgacugc

SEQ ID NO: 240405 - RNA, 15 nt, Homo sapiens
ucuuccacuuugaua

SEQ ID NO: 240406 - RNA, 14 nt, Homo sapiens
ugugccaugugcca

SEQ ID NO: 240407 - RNA, 14 nt, Homo sapiens
gcuaugcauuugaa

SEQ ID NO: 240408 - RNA, 16 nt, Homo sapiens
cuagguucgaauccag

SEQ ID NO: 240409 - RNA, 16 nt, Homo sapiens
aaggggcccaagagag

SEQ ID NO: 240410 - RNA, 20 nt, Homo sapiens
acugagugagcaucauggag

SEQ ID NO: 240411 - RNA, 21 nt, Homo sapiens
cgcaaccaccaccaaccacug

SEQ ID NO: 240412 - RNA, 15 nt, Homo sapiens
gagagaaggggccca

SEQ ID NO: 240413 - RNA, 19 nt, Homo sapiens
aagugagacccugucucaa

SEQ ID NO: 240414 - RNA, 15 nt, Homo sapiens
cagugcccccuggug

SEQ ID NO: 240415 - RNA, 23 nt, Homo sapiens
auucuuaaauauguggaguucau

SEQ ID NO: 240416 - RNA, 20 nt, Homo sapiens
ggaaaagcugcugacagugu

SEQ ID NO: 240417 - RNA, 20 nt, Homo sapiens
ccaaaaaaugcuugcuucaa

SEQ ID NO: 240418 - RNA, 18 nt, Homo sapiens
uagcugggacuacaggug

SEQ ID NO: 240419 - RNA, 13 nt, Homo sapiens
ggacuacaggcac

SEQ ID NO: 240420 - RNA, 23 nt, Homo sapiens
aauucucuuuccuguagucccau

SEQ ID NO: 240421 - RNA, 15 nt, Homo sapiens
gcauguuugugauug

SEQ ID NO: 240422 - RNA, 16 nt, Homo sapiens
gaugagaggaaaucac

SEQ ID NO: 240423 - RNA, 22 nt, Homo sapiens
auucuccaccugccagggacag

SEQ ID NO: 240424 - RNA, 13 nt, Homo sapiens
acagggugagcac

SEQ ID NO: 240425 - RNA, 11 nt, Homo sapiens
cugaaaaccaa

SEQ ID NO: 240426 - RNA, 20 nt, Homo sapiens
accucugccugaagucacac

SEQ ID NO: 240427 - RNA, 11 nt, Homo sapiens
cuaugggacuc

SEQ ID NO: 240428 - RNA, 18 nt, Homo sapiens
gugcugggauuacaggug

SEQ ID NO: 240429 - RNA, 19 nt, Homo sapiens
cugauucccaagcucugcu

SEQ ID NO: 240430 - RNA, 13 nt, Homo sapiens
aaacucaccugcc

SEQ ID NO: 240431 - RNA, 19 nt, Homo sapiens
ucaccaaaucagcugcuac

SEQ ID NO: 240432 - RNA, 13 nt, Homo sapiens
cugaagucacaca

SEQ ID NO: 240433 - RNA, 18 nt, Homo sapiens
guggugaacagaacaaaa

SEQ ID NO: 240434 - RNA, 16 nt, Homo sapiens
ucucugcccuccaaga

SEQ ID NO: 240435 - RNA, 15 nt, Homo sapiens
ccaaaucagcugcua

SEQ ID NO: 240436 - RNA, 15 nt, Homo sapiens
cuuguguuaugaagc

SEQ ID NO: 240437 - RNA, 16 nt, Homo sapiens
ccuaguuccaccauca

SEQ ID NO: 240438 - RNA, 15 nt, Homo sapiens
ggaccagagcugcca

SEQ ID NO: 240439 - RNA, 14 nt, Homo sapiens
ccaucaccagacag

SEQ ID NO: 240440 - RNA, 13 nt, Homo sapiens
ccagggucucacu

SEQ ID NO: 240441 - RNA, 15 nt, Homo sapiens
ucccaacucacccca

SEQ ID NO: 240442 - RNA, 18 nt, Homo sapiens
uuauggcuuuugugcauu

SEQ ID NO: 240443 - RNA, 15 nt, Homo sapiens
augcuuguacauaau

SEQ ID NO: 240444 - RNA, 17 nt, Homo sapiens
uaugaucacggcucacu

SEQ ID NO: 240445 - RNA, 16 nt, Homo sapiens
auguucugggacacag

SEQ ID NO: 240446 - RNA, 15 nt, Homo sapiens
aaggcggugagcaau

SEQ ID NO: 240447 - RNA, 20 nt, Homo sapiens
ccagccugggugacagagca

SEQ ID NO: 240448 - RNA, 23 nt, Homo sapiens
caaagcgugguggacaugcacag

SEQ ID NO: 240449 - RNA, 16 nt, Homo sapiens
ugccagcuuaucucag

SEQ ID NO: 240450 - RNA, 16 nt, Homo sapiens
uguucucugaggacac

SEQ ID NO: 240451 - RNA, 19 nt, Homo sapiens
gaucagccugggcaaugug

SEQ ID NO: 240452 - RNA, 14 nt, Homo sapiens
cuccccgggcagca

SEQ ID NO: 240453 - RNA, 13 nt, Homo sapiens
uugacaggauuau

SEQ ID NO: 240454 - RNA, 12 nt, Homo sapiens
aaauucuuucag

SEQ ID NO: 240455 - RNA, 17 nt, Homo sapiens
agaccaucccugaaggc

SEQ ID NO: 240456 - RNA, 14 nt, Homo sapiens
uugcaccacugcac

SEQ ID NO: 240457 - RNA, 15 nt, Homo sapiens
uguacagacaacaaa

SEQ ID NO: 240458 - RNA, 21 nt, Homo sapiens
cuuuugagugccuuacacaau

SEQ ID NO: 240459 - RNA, 15 nt, Homo sapiens
agauaauacaccacu

SEQ ID NO: 240460 - RNA, 19 nt, Homo sapiens
cuguuucugcagccacuau

SEQ ID NO: 240461 - RNA, 21 nt, Homo sapiens
uaacuaaaagguaugcaauca

SEQ ID NO: 240462 - RNA, 15 nt, Homo sapiens
cccuggccuagcaua

SEQ ID NO: 240463 - RNA, 19 nt, Homo sapiens
ccuguagucccauugaugu

SEQ ID NO: 240464 - RNA, 20 nt, Homo sapiens
gagaaggcaaccuugacucu

SEQ ID NO: 240465 - RNA, 17 nt, Homo sapiens
aauacaguaucucaggg

SEQ ID NO: 240466 - RNA, 21 nt, Homo sapiens
cuccacuuucuagccagagga

SEQ ID NO: 240467 - RNA, 17 nt, Homo sapiens
guaugaucacggcucac

SEQ ID NO: 240468 - RNA, 18 nt, Homo sapiens
cuacugggggcaacccug

SEQ ID NO: 240469 - RNA, 22 nt, Homo sapiens
caaccacugcgaccacaagaag

SEQ ID NO: 240470 - RNA, 12 nt, Homo sapiens
aggcggugagca

SEQ ID NO: 240471 - RNA, 13 nt, Homo sapiens
uacagacaacaaa

SEQ ID NO: 240472 - RNA, 13 nt, Homo sapiens
ccucucucaggcc

SEQ ID NO: 240473 - RNA, 15 nt, Homo sapiens
uacagauagauauau

SEQ ID NO: 240474 - RNA, 13 nt, Homo sapiens
gcauuuguuugaa

SEQ ID NO: 240475 - RNA, 19 nt, Homo sapiens
cuugaccucaggugaucca

SEQ ID NO: 240476 - RNA, 13 nt, Homo sapiens
aagcauucuucaa

SEQ ID NO: 240477 - RNA, 20 nt, Homo sapiens
uggucguuuucaacagaauu

SEQ ID NO: 240478 - RNA, 17 nt, Homo sapiens
gucucauacucaccuca

SEQ ID NO: 240479 - RNA, 22 nt, Homo sapiens
uuccuggcacugcuuccaguga

SEQ ID NO: 240480 - RNA, 23 nt, Homo sapiens
uucuaccuuccugcaacaccuug

SEQ ID NO: 240481 - RNA, 14 nt, Homo sapiens
gcugggagaaccaa

SEQ ID NO: 240482 - RNA, 16 nt, Homo sapiens
acacaguucaauucuc

SEQ ID NO: 240483 - RNA, 15 nt, Homo sapiens
auggacaaugaccca

SEQ ID NO: 240484 - RNA, 20 nt, Homo sapiens
guaaaugggggugcauuuga

SEQ ID NO: 240485 - RNA, 19 nt, Homo sapiens
uccucuccccagcaaguga

SEQ ID NO: 240486 - RNA, 13 nt, Homo sapiens
gagguacucuccu

SEQ ID NO: 240487 - RNA, 14 nt, Homo sapiens
caggcucucaggcc

SEQ ID NO: 240488 - RNA, 20 nt, Homo sapiens
cuuuaagagaaaugagcugc

SEQ ID NO: 240489 - RNA, 14 nt, Homo sapiens
aggaaaggcuccag

SEQ ID NO: 240490 - RNA, 13 nt, Homo sapiens
cugacccacugcu

SEQ ID NO: 240491 - RNA, 16 nt, Homo sapiens
agagaaaguacuucuc

SEQ ID NO: 240492 - RNA, 20 nt, Homo sapiens
ugguccauagagagcaagac

SEQ ID NO: 240493 - RNA, 22 nt, Homo sapiens
uucccuacaguugaaaaacagc

SEQ ID NO: 240494 - RNA, 20 nt, Homo sapiens
cuaucaaguauuauaccuuu

SEQ ID NO: 240495 - RNA, 21 nt, Homo sapiens
uagagacaggguuuugccaug

SEQ ID NO: 240496 - RNA, 12 nt, Homo sapiens
ccaucaccagac

SEQ ID NO: 240497 - RNA, 14 nt, Homo sapiens
ucagccucccaaag

SEQ ID NO: 240498 - RNA, 20 nt, Homo sapiens
gcccacgcuggagugcagug

SEQ ID NO: 240499 - RNA, 22 nt, Homo sapiens
aggucagagccugcaguuauua

SEQ ID NO: 240500 - RNA, 12 nt, Homo sapiens
ggccauguauua

SEQ ID NO: 240501 - RNA, 18 nt, Homo sapiens
caagucagcacuaccucc

SEQ ID NO: 240502 - RNA, 18 nt, Homo sapiens
ugggguacccacugcucu

SEQ ID NO: 240503 - RNA, 16 nt, Homo sapiens
uacaguaucucagggc

SEQ ID NO: 240504 - RNA, 20 nt, Homo sapiens
gugccuuauggaacacucug

SEQ ID NO: 240505 - RNA, 16 nt, Homo sapiens
ugagacccugucucaa

SEQ ID NO: 240506 - RNA, 14 nt, Homo sapiens
uccuuucaccacau

SEQ ID NO: 240507 - RNA, 14 nt, Homo sapiens
caguuagcucucaa

SEQ ID NO: 240508 - RNA, 15 nt, Homo sapiens
acaggaucaaaguug

SEQ ID NO: 240509 - RNA, 21 nt, Homo sapiens
ccucucagauuguaccauuga

SEQ ID NO: 240510 - RNA, 15 nt, Homo sapiens
cuaaugaaaccugug

SEQ ID NO: 240511 - RNA, 22 nt, Homo sapiens
ugccuuauggaacacucugaga

SEQ ID NO: 240512 - RNA, 15 nt, Homo sapiens
acuggaagcacagcu

SEQ ID NO: 240513 - RNA, 23 nt, Homo sapiens
acagaagaaacuacccucuggag

SEQ ID NO: 240514 - RNA, 15 nt, Homo sapiens
uuuuaaaugcaccug

SEQ ID NO: 240515 - RNA, 16 nt, Homo sapiens
cauaauuguucuuagu

SEQ ID NO: 240516 - RNA, 14 nt, Homo sapiens
ggcaugguggccca

SEQ ID NO: 240517 - RNA, 17 nt, Homo sapiens
gaucuaggaagacuuug

SEQ ID NO: 240518 - RNA, 12 nt, Homo sapiens
uauguugcccag

SEQ ID NO: 240519 - RNA, 16 nt, Homo sapiens
cacaugugcacaugca

SEQ ID NO: 240520 - RNA, 15 nt, Homo sapiens
gaccgugugugaaau

SEQ ID NO: 240521 - RNA, 20 nt, Homo sapiens
aguccucagugguuggcaau

SEQ ID NO: 240522 - RNA, 22 nt, Homo sapiens
cgagauagccaaggccaaagga

SEQ ID NO: 240523 - RNA, 15 nt, Homo sapiens
ugccaaaaacaacaa

SEQ ID NO: 240524 - RNA, 19 nt, Homo sapiens
auucucuccuguaccucuu

SEQ ID NO: 240525 - RNA, 16 nt, Homo sapiens
uccaaaugcccagcuu

SEQ ID NO: 240526 - RNA, 22 nt, Homo sapiens
cuggaugcagccucacaguccu

SEQ ID NO: 240527 - RNA, 15 nt, Homo sapiens
augagguacucuccu

SEQ ID NO: 240528 - RNA, 18 nt, Homo sapiens
ucucacacaugagcauca

SEQ ID NO: 240529 - RNA, 19 nt, Homo sapiens
uuugcuaaaugugaaugau

SEQ ID NO: 240530 - RNA, 19 nt, Homo sapiens
gugcugggauuacaggugu

SEQ ID NO: 240531 - RNA, 14 nt, Homo sapiens
aucccucauccuca

SEQ ID NO: 240532 - RNA, 19 nt, Homo sapiens
ccacugugaagagaaccau

SEQ ID NO: 240533 - RNA, 11 nt, Homo sapiens
cacuccaugag

SEQ ID NO: 240534 - RNA, 20 nt, Homo sapiens
uaugcaugaaguaauaugca

SEQ ID NO: 240535 - RNA, 21 nt, Homo sapiens
aaugagcugcacuccaugagu

SEQ ID NO: 240536 - RNA, 20 nt, Homo sapiens
ccucuuucccucccuuccuc

SEQ ID NO: 240537 - RNA, 13 nt, Homo sapiens
uugagacagaguu

SEQ ID NO: 240538 - RNA, 22 nt, Homo sapiens
caccauauuaccacagacauac

SEQ ID NO: 240539 - RNA, 23 nt, Homo sapiens
aggccuggccagaugcaccagcc

SEQ ID NO: 240540 - RNA, 20 nt, Homo sapiens
uuaugagaaaugccagugug

SEQ ID NO: 240541 - RNA, 21 nt, Homo sapiens
ccuagccuuagaagucacaca

SEQ ID NO: 240542 - RNA, 11 nt, Homo sapiens
aaugcagagau

SEQ ID NO: 240543 - RNA, 12 nt, Homo sapiens
acaugugcacau

SEQ ID NO: 240544 - RNA, 18 nt, Homo sapiens
aguaggaagacuuuggaa

SEQ ID NO: 240545 - RNA, 16 nt, Homo sapiens
aaagguugaagcacca

SEQ ID NO: 240546 - RNA, 16 nt, Homo sapiens
ccgcacugggcuuggg

SEQ ID NO: 240547 - RNA, 14 nt, Homo sapiens
ugacauuguuggcc

SEQ ID NO: 240548 - RNA, 21 nt, Homo sapiens
gacacagcucuucuccaggcu

SEQ ID NO: 240549 - RNA, 14 nt, Homo sapiens
agaacuuuccagga

SEQ ID NO: 240550 - RNA, 19 nt, Homo sapiens
cuggcacugcuuccaguga

SEQ ID NO: 240551 - RNA, 17 nt, Homo sapiens
agaauugaaaaaccauu

SEQ ID NO: 240552 - RNA, 14 nt, Homo sapiens
ccaauuuacauacu

SEQ ID NO: 240553 - RNA, 20 nt, Homo sapiens
cauuucugagaucaaaacgg

SEQ ID NO: 240554 - RNA, 20 nt, Homo sapiens
ugcccacgcuggagugcagu

SEQ ID NO: 240555 - RNA, 15 nt, Homo sapiens
cucaaauaacuaaaa

SEQ ID NO: 240556 - RNA, 23 nt, Homo sapiens
gcccugugggcccccaaauggaa

SEQ ID NO: 240557 - RNA, 20 nt, Homo sapiens
caugacacgaauauugcuga

SEQ ID NO: 240558 - RNA, 21 nt, Homo sapiens
cucaaaagcugggcagguugg

SEQ ID NO: 240559 - RNA, 19 nt, Homo sapiens
agaggcagggucucacucu

SEQ ID NO: 240560 - RNA, 15 nt, Homo sapiens
ugccaugccagcuua

SEQ ID NO: 240561 - RNA, 14 nt, Homo sapiens
ccccgaugggaugg

SEQ ID NO: 240562 - RNA, 21 nt, Homo sapiens
ccugcaaccugauugugucuc

SEQ ID NO: 240563 - RNA, 17 nt, Homo sapiens
ccugaaacaacccaaag

SEQ ID NO: 240564 - RNA, 17 nt, Homo sapiens
aagcaugugagacuggu

SEQ ID NO: 240565 - RNA, 16 nt, Homo sapiens
ccaugagaugaugcca

SEQ ID NO: 240566 - RNA, 18 nt, Homo sapiens
agucccaccuuggcugca

SEQ ID NO: 240567 - RNA, 16 nt, Homo sapiens
gaauuuuuacugggga

SEQ ID NO: 240568 - RNA, 20 nt, Homo sapiens
uauaguuaucaaucucuagu

SEQ ID NO: 240569 - RNA, 12 nt, Homo sapiens
ugguggcagcuc

SEQ ID NO: 240570 - RNA, 21 nt, Homo sapiens
ugucagccauuccuguuccca

SEQ ID NO: 240571 - RNA, 14 nt, Homo sapiens
cucuacucuaggga

SEQ ID NO: 240572 - RNA, 22 nt, Homo sapiens
caacaccucugcacaagcugca

SEQ ID NO: 240573 - RNA, 19 nt, Homo sapiens
uccaaaguacacuguuuca

SEQ ID NO: 240574 - RNA, 16 nt, Homo sapiens
acuaaggaaucuuucu

SEQ ID NO: 240575 - RNA, 21 nt, Homo sapiens
uacugaugcagaaagaccgug

SEQ ID NO: 240576 - RNA, 18 nt, Homo sapiens
aaggggcccaaauucuuu

SEQ ID NO: 240577 - RNA, 21 nt, Homo sapiens
auucuucuccacuuucuagcc

SEQ ID NO: 240578 - RNA, 20 nt, Homo sapiens
gcugggcagaggaaagcaaa

SEQ ID NO: 240579 - RNA, 16 nt, Homo sapiens
agcuuugaaaauucag

SEQ ID NO: 240580 - RNA, 16 nt, Homo sapiens
acuuuaccugaaacaa

SEQ ID NO: 240581 - RNA, 22 nt, Homo sapiens
ccaggugcuaggaacacuccuu

SEQ ID NO: 240582 - RNA, 24 nt, Homo sapiens
caacacucacauuuauucugcuca

SEQ ID NO: 240583 - RNA, 22 nt, Homo sapiens
ucccagacccccuugcccaggc

SEQ ID NO: 240584 - RNA, 14 nt, Homo sapiens
gccugguggcagcu

SEQ ID NO: 240585 - RNA, 15 nt, Homo sapiens
guaggaagacuuugg

SEQ ID NO: 240586 - RNA, 15 nt, Homo sapiens
cugccucugacacac

SEQ ID NO: 240587 - RNA, 19 nt, Homo sapiens
acuugauguguuaucucuu

SEQ ID NO: 240588 - RNA, 21 nt, Homo sapiens
acaacaaaccuguuucugcag

SEQ ID NO: 240589 - RNA, 17 nt, Homo sapiens
ugccucugccucugaca

SEQ ID NO: 240590 - RNA, 17 nt, Homo sapiens
acaugccucucucaggc

SEQ ID NO: 240591 - RNA, 16 nt, Homo sapiens
cagugccaaaaacaac

SEQ ID NO: 240592 - RNA, 20 nt, Homo sapiens
gaauuauaauuaguuccuca

SEQ ID NO: 240593 - RNA, 17 nt, Homo sapiens
aggugaggaagcaaaag

SEQ ID NO: 240594 - RNA, 13 nt, Homo sapiens
guccgagcuuuga

SEQ ID NO: 240595 - RNA, 14 nt, Homo sapiens
ccucugaaaaccaa

SEQ ID NO: 240596 - RNA, 16 nt, Homo sapiens
auucucauuugucaca

SEQ ID NO: 240597 - RNA, 21 nt, Homo sapiens
gccgagaucacgccacugcac

SEQ ID NO: 240598 - RNA, 16 nt, Homo sapiens
cauauuaccacagaca

SEQ ID NO: 240599 - RNA, 19 nt, Homo sapiens
acacuugacaucaacugca

SEQ ID NO: 240600 - RNA, 17 nt, Homo sapiens
caugccucucucaggcc

SEQ ID NO: 240601 - RNA, 20 nt, Homo sapiens
uguaauuugugauacaaugc

SEQ ID NO: 240602 - RNA, 12 nt, Homo sapiens
uagauacuguau

SEQ ID NO: 240603 - RNA, 19 nt, Homo sapiens
aagcacaugccucucucag

SEQ ID NO: 240604 - RNA, 23 nt, Homo sapiens
acauuuuuaagugcugcauuuaa

SEQ ID NO: 240605 - RNA, 15 nt, Homo sapiens
cagaaucucaaauaa

SEQ ID NO: 240606 - RNA, 13 nt, Homo sapiens
acaugugcacaug

SEQ ID NO: 240607 - RNA, 21 nt, Homo sapiens
auuguuagucucuugauucau

SEQ ID NO: 240608 - RNA, 17 nt, Homo sapiens
ugaggaaacugcacugu

SEQ ID NO: 240609 - RNA, 15 nt, Homo sapiens
ugagugggugaauaa

SEQ ID NO: 240610 - RNA, 16 nt, Homo sapiens
agauagauauaugcuc

SEQ ID NO: 240611 - RNA, 14 nt, Homo sapiens
uaugugagcacaaa

SEQ ID NO: 240612 - RNA, 22 nt, Homo sapiens
auacacacacacgcgugcacac

SEQ ID NO: 240613 - RNA, 15 nt, Homo sapiens
auggagggagaagaa

SEQ ID NO: 240614 - RNA, 23 nt, Homo sapiens
cuuaccagcagagcaccuuagac

SEQ ID NO: 240615 - RNA, 21 nt, Homo sapiens
cagggucucacucugucgccc

SEQ ID NO: 240616 - RNA, 22 nt, Homo sapiens
aagugagacccugucucaaaaa

SEQ ID NO: 240617 - RNA, 14 nt, Homo sapiens
auggauuuccagcc

SEQ ID NO: 240618 - RNA, 15 nt, Homo sapiens
agaaaacuguuaaua

SEQ ID NO: 240619 - RNA, 17 nt, Homo sapiens
uacuaaggaaucuuucu

SEQ ID NO: 240620 - RNA, 15 nt, Homo sapiens
auagccaaggccaaa

SEQ ID NO: 240621 - RNA, 17 nt, Homo sapiens
aucacggcucacugcag

SEQ ID NO: 240622 - RNA, 13 nt, Homo sapiens
aggaacacuccuu

SEQ ID NO: 240623 - RNA, 21 nt, Homo sapiens
gaacucuucaaucucuugcac

SEQ ID NO: 240624 - RNA, 13 nt, Homo sapiens
cacagaggcugcc

SEQ ID NO: 240625 - RNA, 22 nt, Homo sapiens
cagugguuggcaauuguuucaa

SEQ ID NO: 240626 - RNA, 20 nt, Homo sapiens
guacuggagaaaauggacgu

SEQ ID NO: 240627 - RNA, 18 nt, Homo sapiens
ugaaugaugccaugagga

SEQ ID NO: 240628 - RNA, 12 nt, Homo sapiens
acggacacucaa

SEQ ID NO: 240629 - RNA, 17 nt, Homo sapiens
caaaacauuuuacuuua

SEQ ID NO: 240630 - RNA, 15 nt, Homo sapiens
gugaaaggaaagagg

SEQ ID NO: 240631 - RNA, 15 nt, Homo sapiens
aggucauugguggca

SEQ ID NO: 240632 - RNA, 19 nt, Homo sapiens
ugcccacgcuggagugcag

SEQ ID NO: 240633 - RNA, 13 nt, Homo sapiens
uuaugacuccaga

SEQ ID NO: 240634 - RNA, 20 nt, Homo sapiens
cugagaugggacaggaucaa

SEQ ID NO: 240635 - RNA, 22 nt, Homo sapiens
agguuuuuggucugacccacug

SEQ ID NO: 240636 - RNA, 12 nt, Homo sapiens
accaaccacugc

SEQ ID NO: 240637 - RNA, 15 nt, Homo sapiens
augccucucucaggc

SEQ ID NO: 240638 - RNA, 17 nt, Homo sapiens
uuccucuuccacuuuga

SEQ ID NO: 240639 - RNA, 16 nt, Homo sapiens
cuuucccaucuuccaa

SEQ ID NO: 240640 - RNA, 16 nt, Homo sapiens
uucagugccaaaaaca

SEQ ID NO: 240641 - RNA, 22 nt, Homo sapiens
cucugcacaagcugcacccuca

SEQ ID NO: 240642 - RNA, 19 nt, Homo sapiens
acaggcccggcuccaggcu

SEQ ID NO: 240643 - RNA, 20 nt, Homo sapiens
cacagaaaauggaagacagc

SEQ ID NO: 240644 - RNA, 17 nt, Homo sapiens
accacaagaaggaugau

SEQ ID NO: 240645 - RNA, 22 nt, Homo sapiens
uaagaaccuuuugagugccuua

SEQ ID NO: 240646 - RNA, 18 nt, Homo sapiens
ucucuugcacucaaagcu

SEQ ID NO: 240647 - RNA, 17 nt, Homo sapiens
agccugcuccagcuguu

SEQ ID NO: 240648 - RNA, 15 nt, Homo sapiens
acuuaaccugaagcu

SEQ ID NO: 240649 - RNA, 21 nt, Homo sapiens
augaaaccugugucucugaga

SEQ ID NO: 240650 - RNA, 11 nt, Homo sapiens
cuuccaaggau

SEQ ID NO: 240651 - RNA, 18 nt, Homo sapiens
ugccgucuaccugagggg

SEQ ID NO: 240652 - RNA, 23 nt, Homo sapiens
cuuguaaauagcucagguguccc

SEQ ID NO: 240653 - RNA, 20 nt, Homo sapiens
cucuacccuggcacuauaau

SEQ ID NO: 240654 - RNA, 19 nt, Homo sapiens
gcuuccuccugguguggaa

SEQ ID NO: 240655 - RNA, 15 nt, Homo sapiens
ugccugaagucacac

SEQ ID NO: 240656 - RNA, 14 nt, Homo sapiens
ugaagacaaugacu

SEQ ID NO: 240657 - RNA, 14 nt, Homo sapiens
gcaggcucucaggc

SEQ ID NO: 240658 - RNA, 16 nt, Homo sapiens
gacacauguccaagaa

SEQ ID NO: 240659 - RNA, 21 nt, Homo sapiens
gccgagauagccaaggccaaa

SEQ ID NO: 240660 - RNA, 16 nt, Homo sapiens
uaaaauuacugaugca

SEQ ID NO: 240661 - RNA, 14 nt, Homo sapiens
auaaccuagccuua

SEQ ID NO: 240662 - RNA, 20 nt, Homo sapiens
aauuucccaaagcagugcau

SEQ ID NO: 240663 - RNA, 17 nt, Homo sapiens
ccauuucugagaucaaa

SEQ ID NO: 240664 - RNA, 20 nt, Homo sapiens
cccagcccacuucugccaua

SEQ ID NO: 240665 - RNA, 15 nt, Homo sapiens
gcagggaaacagcua

SEQ ID NO: 240666 - RNA, 18 nt, Homo sapiens
cccugagcuuucugcuau

SEQ ID NO: 240667 - RNA, 14 nt, Homo sapiens
uucuacccaggugc

SEQ ID NO: 240668 - RNA, 20 nt, Homo sapiens
acugcacuccagccugggug

SEQ ID NO: 240669 - RNA, 15 nt, Homo sapiens
cuuuugagugccuua

SEQ ID NO: 240670 - RNA, 17 nt, Homo sapiens
ggaagggggcugggaca

SEQ ID NO: 240671 - RNA, 20 nt, Homo sapiens
uguuucugcagccacuauug

SEQ ID NO: 240672 - RNA, 17 nt, Homo sapiens
uucuccaagcaggacau

SEQ ID NO: 240673 - RNA, 15 nt, Homo sapiens
cuuuagcgcccaguu

SEQ ID NO: 240674 - RNA, 21 nt, Homo sapiens
cucuugagccugggaggucaa

SEQ ID NO: 240675 - RNA, 13 nt, Homo sapiens
uucaugcugcuua

SEQ ID NO: 240676 - RNA, 21 nt, Homo sapiens
uacucgaguuacagacaaagc

SEQ ID NO: 240677 - RNA, 18 nt, Homo sapiens
agauagccaaggccaaag

SEQ ID NO: 240678 - RNA, 21 nt, Homo sapiens
ccucuucucuacucuagggaa

SEQ ID NO: 240679 - RNA, 13 nt, Homo sapiens
cacuugacaucaa

SEQ ID NO: 240680 - RNA, 16 nt, Homo sapiens
agcgugugacuacucc

SEQ ID NO: 240681 - RNA, 22 nt, Homo sapiens
cccuuuuuuggcugcugaaggc

SEQ ID NO: 240682 - RNA, 13 nt, Homo sapiens
cauacaauuccaa

SEQ ID NO: 240683 - RNA, 23 nt, Homo sapiens
ccucagggucccugguggcagcu

SEQ ID NO: 240684 - RNA, 14 nt, Homo sapiens
agaaaguacuucuu

SEQ ID NO: 240685 - RNA, 18 nt, Homo sapiens
agacaccuugacagggca

SEQ ID NO: 240686 - RNA, 15 nt, Homo sapiens
agaaccaaaaagagg

SEQ ID NO: 240687 - RNA, 18 nt, Homo sapiens
aauuccaaacacauacag

SEQ ID NO: 240688 - RNA, 17 nt, Homo sapiens
ugcccuccaagaccuuc

SEQ ID NO: 240689 - RNA, 12 nt, Homo sapiens
uaaagcugccag

SEQ ID NO: 240690 - RNA, 13 nt, Homo sapiens
uugcggacagcca

SEQ ID NO: 240691 - RNA, 20 nt, Homo sapiens
aggcaggaggaucacuugag

SEQ ID NO: 240692 - RNA, 18 nt, Homo sapiens
auuauaauuaguuccuca

SEQ ID NO: 240693 - RNA, 20 nt, Homo sapiens
ugggugaauaauacaguauc

SEQ ID NO: 240694 - RNA, 20 nt, Homo sapiens
aaugcucuuuacuucaugga

SEQ ID NO: 240695 - RNA, 18 nt, Homo sapiens
agagcuacacaggggaaa

SEQ ID NO: 240696 - RNA, 14 nt, Homo sapiens
uucaguggcagcug

SEQ ID NO: 240697 - RNA, 21 nt, Homo sapiens
cuuccaacucaaacucuuaaa

SEQ ID NO: 240698 - RNA, 20 nt, Homo sapiens
uaagcacacuugacaucaac

SEQ ID NO: 240699 - RNA, 23 nt, Homo sapiens
aacuuuguuuagcccaaaaccaa

SEQ ID NO: 240700 - RNA, 17 nt, Homo sapiens
gaaccaaaaagaggcua

SEQ ID NO: 240701 - RNA, 21 nt, Homo sapiens
aggaguuugggguaugggaga

SEQ ID NO: 240702 - RNA, 17 nt, Homo sapiens
uuaagcacacuugacau

SEQ ID NO: 240703 - RNA, 14 nt, Homo sapiens
guuuucaguguaca

SEQ ID NO: 240704 - RNA, 15 nt, Homo sapiens
accugaaacaaccca

SEQ ID NO: 240705 - RNA, 22 nt, Homo sapiens
ucuugaccucaggugauccacc

SEQ ID NO: 240706 - RNA, 21 nt, Homo sapiens
acaguuaagagaaaugagcuu

SEQ ID NO: 240707 - RNA, 17 nt, Homo sapiens
ucucauacucaccucac

SEQ ID NO: 240708 - RNA, 15 nt, Homo sapiens
uaauuaaaacacaac

SEQ ID NO: 240709 - RNA, 14 nt, Homo sapiens
uugccauguuggcc

SEQ ID NO: 240710 - RNA, 17 nt, Homo sapiens
cucagagagggugggag

SEQ ID NO: 240711 - RNA, 17 nt, Homo sapiens
gugcucugaucauccac

SEQ ID NO: 240712 - RNA, 23 nt, Homo sapiens
uaagugaggaugaaaaaauaaca

SEQ ID NO: 240713 - RNA, 15 nt, Homo sapiens
cagguuuuuggucug

SEQ ID NO: 240714 - RNA, 16 nt, Homo sapiens
cucgaguuacagacaa

SEQ ID NO: 240715 - RNA, 18 nt, Homo sapiens
ccuggguaacuagggaag

SEQ ID NO: 240716 - RNA, 14 nt, Homo sapiens
aguuugaaccaaga

SEQ ID NO: 240717 - RNA, 17 nt, Homo sapiens
gccuggccccucagggu

SEQ ID NO: 240718 - RNA, 11 nt, Homo sapiens
cagagcugcca

SEQ ID NO: 240719 - RNA, 18 nt, Homo sapiens
auacucaccucaccccac

SEQ ID NO: 240720 - RNA, 22 nt, Homo sapiens
ucaggugucccugcacuugcag

SEQ ID NO: 240721 - RNA, 13 nt, Homo sapiens
cacacacauacac

SEQ ID NO: 240722 - RNA, 17 nt, Homo sapiens
ucucugaggacacuaac

SEQ ID NO: 240723 - RNA, 13 nt, Homo sapiens
ggaaaugggagac

SEQ ID NO: 240724 - RNA, 11 nt, Homo sapiens
cgcgugcacac

SEQ ID NO: 240725 - RNA, 23 nt, Homo sapiens
acucacacggacacucaaaagcu

SEQ ID NO: 240726 - RNA, 18 nt, Homo sapiens
ugggcccaaugcacuuug

SEQ ID NO: 240727 - RNA, 13 nt, Homo sapiens
ccucuuucccucc

SEQ ID NO: 240728 - RNA, 20 nt, Homo sapiens
ccagagaggguggugaccuc

SEQ ID NO: 240729 - RNA, 14 nt, Homo sapiens
gccucucucaggcc

SEQ ID NO: 240730 - RNA, 22 nt, Homo sapiens
gcacaugccucucucaggccaa

SEQ ID NO: 240731 - RNA, 16 nt, Homo sapiens
ugcuugagcucaggag

SEQ ID NO: 240732 - RNA, 22 nt, Homo sapiens
ggaugaaaaaauaacacuguac

SEQ ID NO: 240733 - RNA, 18 nt, Homo sapiens
acaucuugcucugcugac

SEQ ID NO: 240734 - RNA, 18 nt, Homo sapiens
agccauuccuguucccau

SEQ ID NO: 240735 - RNA, 11 nt, Homo sapiens
ggccaguguga

SEQ ID NO: 240736 - RNA, 16 nt, Homo sapiens
ucaccacaugugcaca

SEQ ID NO: 240737 - RNA, 15 nt, Homo sapiens
uaaggaauaccuguc

SEQ ID NO: 240738 - RNA, 21 nt, Homo sapiens
cugcagcuuuguuuguuguca

SEQ ID NO: 240739 - RNA, 18 nt, Homo sapiens
gcugggcuucaguggcag

SEQ ID NO: 240740 - RNA, 19 nt, Homo sapiens
guugcaggaccucagguga

SEQ ID NO: 240741 - RNA, 14 nt, Homo sapiens
ucuaugacacaugc

SEQ ID NO: 240742 - RNA, 15 nt, Homo sapiens
agugugacugaucuc

SEQ ID NO: 240743 - RNA, 16 nt, Homo sapiens
cugucaauuacaggaa

SEQ ID NO: 240744 - RNA, 15 nt, Homo sapiens
uaaaaauccccaaaa

SEQ ID NO: 240745 - RNA, 20 nt, Homo sapiens
gcaaaguaucccuacuguaa

SEQ ID NO: 240746 - RNA, 14 nt, Homo sapiens
aggaauaccugucc

SEQ ID NO: 240747 - RNA, 18 nt, Homo sapiens
gcacagacccugcccugu

SEQ ID NO: 240748 - RNA, 17 nt, Homo sapiens
acauaaugcgugcauac

SEQ ID NO: 240749 - RNA, 20 nt, Homo sapiens
ucugcucacauaucugucau

SEQ ID NO: 240750 - RNA, 16 nt, Homo sapiens
cuaguugucacuuucc

SEQ ID NO: 240751 - RNA, 19 nt, Homo sapiens
aucuaggaagacuuuggaa

SEQ ID NO: 240752 - RNA, 14 nt, Homo sapiens
uaaaacacaacauc

SEQ ID NO: 240753 - RNA, 19 nt, Homo sapiens
cagccucccgaauagcugg

SEQ ID NO: 240754 - RNA, 19 nt, Homo sapiens
gaaugaaugucagugugac

SEQ ID NO: 240755 - RNA, 20 nt, Homo sapiens
aggugggaggauugcuugag

SEQ ID NO: 240756 - RNA, 20 nt, Homo sapiens
cugaggugggaggaucucuu

SEQ ID NO: 240757 - RNA, 16 nt, Homo sapiens
ugucccugcacuugca

SEQ ID NO: 240758 - RNA, 16 nt, Homo sapiens
agucucacuguugccc

SEQ ID NO: 240759 - RNA, 15 nt, Homo sapiens
uggcuuuugugcauu

SEQ ID NO: 240760 - RNA, 16 nt, Homo sapiens
uccuguagucccauug

SEQ ID NO: 240761 - RNA, 14 nt, Homo sapiens
cucucaggccagcu

SEQ ID NO: 240762 - RNA, 23 nt, Homo sapiens
ugcacagcuaacauggaaguacu

SEQ ID NO: 240763 - RNA, 19 nt, Homo sapiens
gcacugggcuuggggacca

SEQ ID NO: 240764 - RNA, 18 nt, Homo sapiens
aauaaauuuguaugcuca

SEQ ID NO: 240765 - RNA, 14 nt, Homo sapiens
ccaaugauggucac

SEQ ID NO: 240766 - RNA, 15 nt, Homo sapiens
aucuagauacuguau

SEQ ID NO: 240767 - RNA, 16 nt, Homo sapiens
cuggcuaugcauuuga

SEQ ID NO: 240768 - RNA, 14 nt, Homo sapiens
gacccuauugcugc

SEQ ID NO: 240769 - RNA, 13 nt, Homo sapiens
ugacacacagcuc

SEQ ID NO: 240770 - RNA, 18 nt, Homo sapiens
guaucccaugagccucag

SEQ ID NO: 240771 - RNA, 19 nt, Homo sapiens
ggguuucuaaagcugccag

SEQ ID NO: 240772 - RNA, 21 nt, Homo sapiens
gagccgagauugcaccacugc

SEQ ID NO: 240773 - RNA, 19 nt, Homo sapiens
auuuugcuaaaugugaaug

SEQ ID NO: 240774 - RNA, 17 nt, Homo sapiens
ccaaagggccccuuucu

SEQ ID NO: 240775 - RNA, 15 nt, Homo sapiens
uagugugugcaauuu

SEQ ID NO: 240776 - RNA, 13 nt, Homo sapiens
accucucucacuc

SEQ ID NO: 240777 - RNA, 16 nt, Homo sapiens
augaggaaacugcacu

SEQ ID NO: 240778 - RNA, 17 nt, Homo sapiens
agcugcacuccaugagu

SEQ ID NO: 240779 - RNA, 22 nt, Homo sapiens
cacgaauauugcugauggugca

SEQ ID NO: 240780 - RNA, 14 nt, Homo sapiens
accaaccacugcga

SEQ ID NO: 240781 - RNA, 17 nt, Homo sapiens
cugggacuacaggugug

SEQ ID NO: 240782 - RNA, 12 nt, Homo sapiens
aaucucuaguug

SEQ ID NO: 240783 - RNA, 14 nt, Homo sapiens
aggaagacuuugga

SEQ ID NO: 240784 - RNA, 14 nt, Homo sapiens
uaauuaguuccuca

SEQ ID NO: 240785 - RNA, 21 nt, Homo sapiens
caaaucagcugcuacuacucc

SEQ ID NO: 240786 - RNA, 22 nt, Homo sapiens
ucugauccuaguuccaccauca

SEQ ID NO: 240787 - RNA, 17 nt, Homo sapiens
cucgcgacaaugcaaac

SEQ ID NO: 240788 - RNA, 14 nt, Homo sapiens
cguugugcauuugg

SEQ ID NO: 240789 - RNA, 17 nt, Homo sapiens
uuggagggugucccaaa

SEQ ID NO: 240790 - RNA, 15 nt, Homo sapiens
uuccuguagucccau

SEQ ID NO: 240791 - RNA, 21 nt, Homo sapiens
gaaugcucuuuacuucaugga

SEQ ID NO: 240792 - RNA, 15 nt, Homo sapiens
guugaaagaucaaaa

SEQ ID NO: 240793 - RNA, 15 nt, Homo sapiens
augcagugcuuccaa

SEQ ID NO: 240794 - RNA, 13 nt, Homo sapiens
acaggcacccacc

SEQ ID NO: 240795 - RNA, 13 nt, Homo sapiens
uuucuugcaugag

SEQ ID NO: 240796 - RNA, 22 nt, Homo sapiens
ugggacuacaggugugagucac

SEQ ID NO: 240797 - RNA, 20 nt, Homo sapiens
gaacagguuuaaaaaucccc

SEQ ID NO: 240798 - RNA, 16 nt, Homo sapiens
agaucucuaacuucac

SEQ ID NO: 240799 - RNA, 20 nt, Homo sapiens
aauaauacaguaucucaggg

SEQ ID NO: 240800 - RNA, 23 nt, Homo sapiens
cuaagugauccucccaccucagc

SEQ ID NO: 240801 - RNA, 11 nt, Homo sapiens
accaaccuggg

SEQ ID NO: 240802 - RNA, 14 nt, Homo sapiens
gccuggacccugug

SEQ ID NO: 240803 - RNA, 21 nt, Homo sapiens
cacugcaccgggccacagaga

SEQ ID NO: 240804 - RNA, 18 nt, Homo sapiens
uuccucauuagcauuuug

SEQ ID NO: 240805 - RNA, 18 nt, Homo sapiens
gcuugaccgugaggccag

SEQ ID NO: 240806 - RNA, 23 nt, Homo sapiens
acuuugaccucugcagcaauaaa

SEQ ID NO: 240807 - RNA, 20 nt, Homo sapiens
gcgagcccugguggcagugg

SEQ ID NO: 240808 - RNA, 20 nt, Homo sapiens
ggaagccagcaggcucucag

SEQ ID NO: 240809 - RNA, 19 nt, Homo sapiens
gaccagggauuuccaugau

SEQ ID NO: 240810 - RNA, 16 nt, Homo sapiens
caaaaaaagaaaaaga

SEQ ID NO: 240811 - RNA, 15 nt, Homo sapiens
gugauguguuuccau

SEQ ID NO: 240812 - RNA, 19 nt, Homo sapiens
cacuauagccuaggugaca

SEQ ID NO: 240813 - RNA, 23 nt, Homo sapiens
caucuugcucugcugacagacac

SEQ ID NO: 240814 - RNA, 21 nt, Homo sapiens
uaggcauuugcugaauacaga

SEQ ID NO: 240815 - RNA, 18 nt, Homo sapiens
aagccagcaggcucucag

SEQ ID NO: 240816 - RNA, 21 nt, Homo sapiens
gaaccaagaacuuuccaggaa

SEQ ID NO: 240817 - RNA, 21 nt, Homo sapiens
cuaaaugaaaaucgugacaac

SEQ ID NO: 240818 - RNA, 12 nt, Homo sapiens
aauaaaacaaca

SEQ ID NO: 240819 - RNA, 22 nt, Homo sapiens
ucuccauguuugauguaucuga

SEQ ID NO: 240820 - RNA, 12 nt, Homo sapiens
gacucaaugcac

SEQ ID NO: 240821 - RNA, 18 nt, Homo sapiens
ccaggcuggcgugcagug

SEQ ID NO: 240822 - RNA, 16 nt, Homo sapiens
ugaccaguuguugaua

SEQ ID NO: 240823 - RNA, 16 nt, Homo sapiens
gcugggacuacaggug

SEQ ID NO: 240824 - RNA, 18 nt, Homo sapiens
cuauagccuaggugacag

SEQ ID NO: 240825 - RNA, 14 nt, Homo sapiens
agguuggcaaaaag

SEQ ID NO: 240826 - RNA, 19 nt, Homo sapiens
uuccaaggguacuaaggaa

SEQ ID NO: 240827 - RNA, 20 nt, Homo sapiens
augcuugcuucaaccccaug

SEQ ID NO: 240828 - RNA, 12 nt, Homo sapiens
cuaugggacuca

SEQ ID NO: 240829 - RNA, 17 nt, Homo sapiens
aaugucagugugacuga

SEQ ID NO: 240830 - RNA, 21 nt, Homo sapiens
uugcaaaguaucccuacugua

SEQ ID NO: 240831 - RNA, 20 nt, Homo sapiens
aacacaaacgggcucagcaa

SEQ ID NO: 240832 - RNA, 19 nt, Homo sapiens
ucagcaaaagaugcuucuc

SEQ ID NO: 240833 - RNA, 16 nt, Homo sapiens
uggcccacgcacuucg

SEQ ID NO: 240834 - RNA, 17 nt, Homo sapiens
cgaugcagugcuuccaa

SEQ ID NO: 240835 - RNA, 13 nt, Homo sapiens
uccagccccugga

SEQ ID NO: 240836 - RNA, 19 nt, Homo sapiens
cuggagaaaauggacgugu

SEQ ID NO: 240837 - RNA, 17 nt, Homo sapiens
uccuuuagcgcccaguu

SEQ ID NO: 240838 - RNA, 16 nt, Homo sapiens
uaaaacccaagugccu

SEQ ID NO: 240839 - RNA, 19 nt, Homo sapiens
ugaguacuacaguccuccc

SEQ ID NO: 240840 - RNA, 14 nt, Homo sapiens
cucugcauguuaca

SEQ ID NO: 240841 - RNA, 14 nt, Homo sapiens
ugcacaaacagagg

SEQ ID NO: 240842 - RNA, 16 nt, Homo sapiens
agguuuuuggucugac

SEQ ID NO: 240843 - RNA, 21 nt, Homo sapiens
ccugcaguuauuaacacuaac

SEQ ID NO: 240844 - RNA, 17 nt, Homo sapiens
gagaaaugccagugugc

SEQ ID NO: 240845 - RNA, 20 nt, Homo sapiens
uccaauauucgcugugucag

SEQ ID NO: 240846 - RNA, 21 nt, Homo sapiens
aaccuuuugagugccuuacac

SEQ ID NO: 240847 - RNA, 19 nt, Homo sapiens
uaauucuuagcucauucuc

SEQ ID NO: 240848 - RNA, 16 nt, Homo sapiens
agcccaccuuggcuca

SEQ ID NO: 240849 - RNA, 12 nt, Homo sapiens
ggacucaaugca

SEQ ID NO: 240850 - RNA, 18 nt, Homo sapiens
auucuguuggccagugug

SEQ ID NO: 240851 - RNA, 22 nt, Homo sapiens
aacugcaucaagaugugacaug

SEQ ID NO: 240852 - RNA, 16 nt, Homo sapiens
uggaagacagcucuua

SEQ ID NO: 240853 - RNA, 14 nt, Homo sapiens
caggugcugccauc

SEQ ID NO: 240854 - RNA, 22 nt, Homo sapiens
cacucuuauugcccacgcugga

SEQ ID NO: 240855 - RNA, 16 nt, Homo sapiens
uacguugugcauuugg

SEQ ID NO: 240856 - RNA, 17 nt, Homo sapiens
cauaagauaaaugugcu

SEQ ID NO: 240857 - RNA, 14 nt, Homo sapiens
cucugugucaggug

SEQ ID NO: 240858 - RNA, 17 nt, Homo sapiens
uuucaccacaugugcac

SEQ ID NO: 240859 - RNA, 16 nt, Homo sapiens
gccaaugggagcucau

SEQ ID NO: 240860 - RNA, 15 nt, Homo sapiens
aauauauaaccagug

SEQ ID NO: 240861 - RNA, 16 nt, Homo sapiens
gcucugcugacagaca

SEQ ID NO: 240862 - RNA, 15 nt, Homo sapiens
aaauaccagccagua

SEQ ID NO: 240863 - RNA, 19 nt, Homo sapiens
cucuggcuaaauucaugcu

SEQ ID NO: 240864 - RNA, 16 nt, Homo sapiens
agcgugagccacugca

SEQ ID NO: 240865 - RNA, 17 nt, Homo sapiens
cucacauaucugucauu

SEQ ID NO: 240866 - RNA, 14 nt, Homo sapiens
gcuggcgugcagug

SEQ ID NO: 240867 - RNA, 14 nt, Homo sapiens
ugccuuggggacaa

SEQ ID NO: 240868 - RNA, 17 nt, Homo sapiens
uagcugggacuacaggu

SEQ ID NO: 240869 - RNA, 19 nt, Homo sapiens
cucauuugucacacacuuu

SEQ ID NO: 240870 - RNA, 14 nt, Homo sapiens
ucaguguacaugga

SEQ ID NO: 240871 - RNA, 20 nt, Homo sapiens
cagccugggugacagagcaa

SEQ ID NO: 240872 - RNA, 12 nt, Homo sapiens
gaagcauuuacu

SEQ ID NO: 240873 - RNA, 20 nt, Homo sapiens
gccgugauuuucauugcugg

SEQ ID NO: 240874 - RNA, 20 nt, Homo sapiens
gugagcaauccugcaagaac

SEQ ID NO: 240875 - RNA, 16 nt, Homo sapiens
accugucccccugaca

SEQ ID NO: 240876 - RNA, 17 nt, Homo sapiens
agugcuuguuccucuca

SEQ ID NO: 240877 - RNA, 21 nt, Homo sapiens
gaugaucuaggaagacuuugg

SEQ ID NO: 240878 - RNA, 13 nt, Homo sapiens
uguggguuucuaa

SEQ ID NO: 240879 - RNA, 20 nt, Homo sapiens
uucuccacuuucuagccaga

SEQ ID NO: 240880 - RNA, 19 nt, Homo sapiens
aauccagagagcagugugg

SEQ ID NO: 240881 - RNA, 13 nt, Homo sapiens
ccuuagacagucc

SEQ ID NO: 240882 - RNA, 14 nt, Homo sapiens
cuacagaggccaug

SEQ ID NO: 240883 - RNA, 12 nt, Homo sapiens
cuuugagugaag

SEQ ID NO: 240884 - RNA, 22 nt, Homo sapiens
augugauaaaaccccaucucua

SEQ ID NO: 240885 - RNA, 21 nt, Homo sapiens
uucuugauaaagaagauucug

SEQ ID NO: 240886 - RNA, 20 nt, Homo sapiens
cuggcgugcaguggugcgau

SEQ ID NO: 240887 - RNA, 14 nt, Homo sapiens
guugugugugcuuu

SEQ ID NO: 240888 - RNA, 18 nt, Homo sapiens
ugagaaaugccagugugc

SEQ ID NO: 240889 - RNA, 18 nt, Homo sapiens
cucuuugggccuggcucc

SEQ ID NO: 240890 - RNA, 22 nt, Homo sapiens
uuuggcauuccccacuugagaa

SEQ ID NO: 240891 - RNA, 12 nt, Homo sapiens
aacguggcugcu

SEQ ID NO: 240892 - RNA, 17 nt, Homo sapiens
acuugauguguuaucuc

SEQ ID NO: 240893 - RNA, 12 nt, Homo sapiens
ccaagcucugcu

SEQ ID NO: 240894 - RNA, 21 nt, Homo sapiens
caaaaaagcgaaccgugagga

SEQ ID NO: 240895 - RNA, 20 nt, Homo sapiens
ccaguaaaugggggugcauu

SEQ ID NO: 240896 - RNA, 23 nt, Homo sapiens
ccccaggcugggcuguucacucu

SEQ ID NO: 240897 - RNA, 19 nt, Homo sapiens
acgcaaccaccaccaacca

SEQ ID NO: 240898 - RNA, 17 nt, Homo sapiens
cagacccugcccugugg

SEQ ID NO: 240899 - RNA, 16 nt, Homo sapiens
gaagagcuccuugaua

SEQ ID NO: 240900 - RNA, 20 nt, Homo sapiens
caaaaguuuaaaaagcucac

SEQ ID NO: 240901 - RNA, 15 nt, Homo sapiens
cuuacuguacaugaa

SEQ ID NO: 240902 - RNA, 14 nt, Homo sapiens
caagaugugacaug

SEQ ID NO: 240903 - RNA, 19 nt, Homo sapiens
gaauucuuaaauaugugga

SEQ ID NO: 240904 - RNA, 12 nt, Homo sapiens
ccauccagguuc

SEQ ID NO: 240905 - RNA, 14 nt, Homo sapiens
aguacguugugcau

SEQ ID NO: 240906 - RNA, 21 nt, Homo sapiens
cugggcagaaggaagacuuca

SEQ ID NO: 240907 - RNA, 20 nt, Homo sapiens
cucuggacaggcauguucuc

SEQ ID NO: 240908 - RNA, 20 nt, Homo sapiens
ggaggauguucugggacaca

SEQ ID NO: 240909 - RNA, 20 nt, Homo sapiens
ucccuacauggaguauaugu

SEQ ID NO: 240910 - RNA, 20 nt, Homo sapiens
aggugauccacccaccucag

SEQ ID NO: 240911 - RNA, 16 nt, Homo sapiens
ugggaggccaaggugg

SEQ ID NO: 240912 - RNA, 21 nt, Homo sapiens
uuaugagaaaugccagugugc

SEQ ID NO: 240913 - RNA, 16 nt, Homo sapiens
gguucuacccaggugc

SEQ ID NO: 240914 - RNA, 20 nt, Homo sapiens
cgcuacccgggaagggggcu

SEQ ID NO: 240915 - RNA, 12 nt, Homo sapiens
agcucagguguc

SEQ ID NO: 240916 - RNA, 15 nt, Homo sapiens
ccagcucugguccau

SEQ ID NO: 240917 - RNA, 17 nt, Homo sapiens
ccuggguaacuagggaa

SEQ ID NO: 240918 - RNA, 23 nt, Homo sapiens
gguaugaucacggcucacugcag

SEQ ID NO: 240919 - RNA, 23 nt, Homo sapiens
uucgaauccagagagcagugugg

SEQ ID NO: 240920 - RNA, 20 nt, Homo sapiens
uaauuuuuuugagacagagu

SEQ ID NO: 240921 - RNA, 12 nt, Homo sapiens
cagcuaacaugg

SEQ ID NO: 240922 - RNA, 20 nt, Homo sapiens
ccugugaguacuacaguccu

SEQ ID NO: 240923 - RNA, 14 nt, Homo sapiens
uagccaaggccaaa

SEQ ID NO: 240924 - RNA, 14 nt, Homo sapiens
acagcuaacaugga

SEQ ID NO: 240925 - RNA, 19 nt, Homo sapiens
cuuccaaggguacuaagga

SEQ ID NO: 240926 - RNA, 15 nt, Homo sapiens
acagggaggugaccc

SEQ ID NO: 240927 - RNA, 18 nt, Homo sapiens
uaaaacccaagugccuua

SEQ ID NO: 240928 - RNA, 16 nt, Homo sapiens
aaccccaucucuacaa

SEQ ID NO: 240929 - RNA, 21 nt, Homo sapiens
cauaguaugguggcuggguug

SEQ ID NO: 240930 - RNA, 16 nt, Homo sapiens
cccugguggcagcuca

SEQ ID NO: 240931 - RNA, 23 nt, Homo sapiens
cacugugaagagaaccauaucaa

SEQ ID NO: 240932 - RNA, 13 nt, Homo sapiens
agauauaugcucu

SEQ ID NO: 240933 - RNA, 14 nt, Homo sapiens
cagggaggugaccc

SEQ ID NO: 240934 - RNA, 14 nt, Homo sapiens
cucugguccauaga

SEQ ID NO: 240935 - RNA, 19 nt, Homo sapiens
agcuuucugcuaucaaaga

SEQ ID NO: 240936 - RNA, 16 nt, Homo sapiens
aauccagacccggcug

SEQ ID NO: 240937 - RNA, 19 nt, Homo sapiens
agcugggagaaccaaaaag

SEQ ID NO: 240938 - RNA, 16 nt, Homo sapiens
gucccauugauguacu

SEQ ID NO: 240939 - RNA, 20 nt, Homo sapiens
aguuugggguaugggagaga

SEQ ID NO: 240940 - RNA, 23 nt, Homo sapiens
aacacuaaugaggaaacugcacu

SEQ ID NO: 240941 - RNA, 16 nt, Homo sapiens
gagccuggcaagaaug

SEQ ID NO: 240942 - RNA, 14 nt, Homo sapiens
gucacuuuccucuu

SEQ ID NO: 240943 - RNA, 14 nt, Homo sapiens
uuccagugaggcuc

SEQ ID NO: 240944 - RNA, 18 nt, Homo sapiens
ugucucuuuaaugucaca

SEQ ID NO: 240945 - RNA, 21 nt, Homo sapiens
accgggcacucagaagacacu

SEQ ID NO: 240946 - RNA, 16 nt, Homo sapiens
ucuagggaaaaaccag

SEQ ID NO: 240947 - RNA, 15 nt, Homo sapiens
ggugaccagcaccau

SEQ ID NO: 240948 - RNA, 21 nt, Homo sapiens
caugagccucagcauccuggc

SEQ ID NO: 240949 - RNA, 12 nt, Homo sapiens
uugaccucaggu

SEQ ID NO: 240950 - RNA, 15 nt, Homo sapiens
cucuuauauugccau

SEQ ID NO: 240951 - RNA, 12 nt, Homo sapiens
gaaccauaucaa

SEQ ID NO: 240952 - RNA, 13 nt, Homo sapiens
uuagaaaaaccac

SEQ ID NO: 240953 - RNA, 17 nt, Homo sapiens
ccacauuccugaugcuu

SEQ ID NO: 240954 - RNA, 21 nt, Homo sapiens
auauuaaggaagacaauguga

SEQ ID NO: 240955 - RNA, 17 nt, Homo sapiens
gucuaggaaucaugugc

SEQ ID NO: 240956 - RNA, 21 nt, Homo sapiens
aaaguggugagaggcauccag

SEQ ID NO: 240957 - RNA, 18 nt, Homo sapiens
uuccucuuuccaucuacc

SEQ ID NO: 240958 - RNA, 19 nt, Homo sapiens
uacagacaacaaaccuguu

SEQ ID NO: 240959 - RNA, 19 nt, Homo sapiens
acuuaagcacacuugacau

SEQ ID NO: 240960 - RNA, 16 nt, Homo sapiens
aucccuuaccucggug

SEQ ID NO: 240961 - RNA, 20 nt, Homo sapiens
acauacaauuccaaacacau

SEQ ID NO: 240962 - RNA, 14 nt, Homo sapiens
acgucugacaggca

SEQ ID NO: 240963 - RNA, 18 nt, Homo sapiens
gccagcaggcucucaggc

SEQ ID NO: 240964 - RNA, 19 nt, Homo sapiens
gccaccaacauacucccau

SEQ ID NO: 240965 - RNA, 15 nt, Homo sapiens
auccuaggcauuugc

SEQ ID NO: 240966 - RNA, 17 nt, Homo sapiens
ucuguuggccaguguga

SEQ ID NO: 240967 - RNA, 14 nt, Homo sapiens
gauccuccaggugc

SEQ ID NO: 240968 - RNA, 14 nt, Homo sapiens
gcccaaugcacuuu

SEQ ID NO: 240969 - RNA, 14 nt, Homo sapiens
cacaggcccggcuc

SEQ ID NO: 240970 - RNA, 23 nt, Homo sapiens
cagcuuuguuuguugucagcuga

SEQ ID NO: 240971 - RNA, 18 nt, Homo sapiens
auaaaguuuuaugagaaa

SEQ ID NO: 240972 - RNA, 20 nt, Homo sapiens
ggacaaggaugaucuaggaa

SEQ ID NO: 240973 - RNA, 13 nt, Homo sapiens
ugcagugcuucca

SEQ ID NO: 240974 - RNA, 20 nt, Homo sapiens
cggaaugaaccacaucuugc

SEQ ID NO: 240975 - RNA, 14 nt, Homo sapiens
ccacaugugcacau

SEQ ID NO: 240976 - RNA, 18 nt, Homo sapiens
uacgugaguccuggcaug

SEQ ID NO: 240977 - RNA, 14 nt, Homo sapiens
uugauguacuuuac

SEQ ID NO: 240978 - RNA, 19 nt, Homo sapiens
auuccuguucccaugagau

SEQ ID NO: 240979 - RNA, 22 nt, Homo sapiens
gaccucaggugauccacccacc

SEQ ID NO: 240980 - RNA, 16 nt, Homo sapiens
ggcuucaguggcagcu

SEQ ID NO: 240981 - RNA, 14 nt, Homo sapiens
agagaaggggccca

SEQ ID NO: 240982 - RNA, 13 nt, Homo sapiens
gaaaugccagugu

SEQ ID NO: 240983 - RNA, 22 nt, Homo sapiens
cauggaaguacuauaauuuacc

SEQ ID NO: 240984 - RNA, 23 nt, Homo sapiens
uacagacaaagcgugguggacau

SEQ ID NO: 240985 - RNA, 21 nt, Homo sapiens
caggaagccagcaggcucuca

SEQ ID NO: 240986 - RNA, 19 nt, Homo sapiens
agccuuagaagucacacag

SEQ ID NO: 240987 - RNA, 16 nt, Homo sapiens
gcccacuucugccaua

SEQ ID NO: 240988 - RNA, 22 nt, Homo sapiens
cucuacugaggugcuauguucu

SEQ ID NO: 240989 - RNA, 17 nt, Homo sapiens
ucacucuuauugcccac

SEQ ID NO: 240990 - RNA, 18 nt, Homo sapiens
uuaacuuccaauuuacau

SEQ ID NO: 240991 - RNA, 23 nt, Homo sapiens
acaggaagguagaaauaucugaa

SEQ ID NO: 240992 - RNA, 19 nt, Homo sapiens
acugaguacguugugcauu

SEQ ID NO: 240993 - RNA, 23 nt, Homo sapiens
gugccaagcagagguugggaggc

SEQ ID NO: 240994 - RNA, 22 nt, Homo sapiens
aaugcacugacauuguuggcca

SEQ ID NO: 240995 - RNA, 14 nt, Homo sapiens
ugguucaggguugg

SEQ ID NO: 240996 - RNA, 18 nt, Homo sapiens
gagccacugcaccgggcc

SEQ ID NO: 240997 - RNA, 20 nt, Homo sapiens
ccagugaggcucugcccuug

SEQ ID NO: 240998 - RNA, 15 nt, Homo sapiens
agggggugcccuccc

SEQ ID NO: 240999 - RNA, 16 nt, Homo sapiens
aagguaugcaaucaaa

SEQ ID NO: 241000 - RNA, 22 nt, Homo sapiens
aaccacuucagcugacuuuucu

SEQ ID NO: 241001 - RNA, 19 nt, Homo sapiens
cacagcugggguggggacc

SEQ ID NO: 241002 - RNA, 13 nt, Homo sapiens
cucauaguauggu

SEQ ID NO: 241003 - RNA, 20 nt, Homo sapiens
aucuccaaaauaaaacuuuu

SEQ ID NO: 241004 - RNA, 24 nt, Homo sapiens
ugucacuuuccucuuccacuuuga

SEQ ID NO: 241005 - RNA, 15 nt, Homo sapiens
gugagcacuaaggug

SEQ ID NO: 241006 - RNA, 15 nt, Homo sapiens
augcaaggucauuuu

SEQ ID NO: 241007 - RNA, 15 nt, Homo sapiens
cucacauaucuguca

SEQ ID NO: 241008 - RNA, 15 nt, Homo sapiens
ugugaaccaccacac

SEQ ID NO: 241009 - RNA, 18 nt, Homo sapiens
uugcaggaccucagguga

SEQ ID NO: 241010 - RNA, 15 nt, Homo sapiens
gauuucuguuuagau

SEQ ID NO: 241011 - RNA, 23 nt, Homo sapiens
ucuuuccuguagucccauugaug

SEQ ID NO: 241012 - RNA, 19 nt, Homo sapiens
ucccuuugacgccauccca

SEQ ID NO: 241013 - RNA, 16 nt, Homo sapiens
aagagaaccauaucaa

SEQ ID NO: 241014 - RNA, 17 nt, Homo sapiens
uacaggugugagucacc

SEQ ID NO: 241015 - RNA, 12 nt, Homo sapiens
gguggacaugca

SEQ ID NO: 241016 - RNA, 15 nt, Homo sapiens
uaagagaaaugagcu

SEQ ID NO: 241017 - RNA, 13 nt, Homo sapiens
uucccaaacugau

SEQ ID NO: 241018 - RNA, 16 nt, Homo sapiens
auggcuuuugugcauu

SEQ ID NO: 241019 - RNA, 17 nt, Homo sapiens
uccuucauucaacccac

SEQ ID NO: 241020 - RNA, 19 nt, Homo sapiens
gauugugcgugcaugugug

SEQ ID NO: 241021 - RNA, 14 nt, Homo sapiens
caaaggaagcacau

SEQ ID NO: 241022 - RNA, 14 nt, Homo sapiens
caucccugaaggcc

SEQ ID NO: 241023 - RNA, 19 nt, Homo sapiens
auuuuuguagagccagggu

SEQ ID NO: 241024 - RNA, 18 nt, Homo sapiens
ccagcaggcucucaggcc

SEQ ID NO: 241025 - RNA, 19 nt, Homo sapiens
cuacauggaguauauguca

SEQ ID NO: 241026 - RNA, 14 nt, Homo sapiens
aacacauacaggaa

SEQ ID NO: 241027 - RNA, 19 nt, Homo sapiens
uuccaaacacauacaggaa

SEQ ID NO: 241028 - RNA, 21 nt, Homo sapiens
cccacccuccuuucaccacau

SEQ ID NO: 241029 - RNA, 22 nt, Homo sapiens
ucgcuccugugucuugcaaugg

SEQ ID NO: 241030 - RNA, 15 nt, Homo sapiens
ucuacccuggcacua

SEQ ID NO: 241031 - RNA, 22 nt, Homo sapiens
uaugcaugaaguaauaugcaca

SEQ ID NO: 241032 - RNA, 20 nt, Homo sapiens
ucaaagauauuuugcuuugu

SEQ ID NO: 241033 - RNA, 13 nt, Homo sapiens
gaaacugcacugu

SEQ ID NO: 241034 - RNA, 12 nt, Homo sapiens
ucuggcagcuca

SEQ ID NO: 241035 - RNA, 13 nt, Homo sapiens
ugugauaaaaccc

SEQ ID NO: 241036 - RNA, 13 nt, Homo sapiens
cagcuuaucucag

SEQ ID NO: 241037 - RNA, 13 nt, Homo sapiens
augagaugaugcc

SEQ ID NO: 241038 - RNA, 18 nt, Homo sapiens
guuaagagaaaugagcuu

SEQ ID NO: 241039 - RNA, 15 nt, Homo sapiens
cuuauacauuugaua

SEQ ID NO: 241040 - RNA, 12 nt, Homo sapiens
aauucuucucca

SEQ ID NO: 241041 - RNA, 12 nt, Homo sapiens
ggcuaagugauc

SEQ ID NO: 241042 - RNA, 22 nt, Homo sapiens
agacaaugugaaaagaaaaaug

SEQ ID NO: 241043 - RNA, 16 nt, Homo sapiens
cccaguuagcucucaa

SEQ ID NO: 241044 - RNA, 17 nt, Homo sapiens
gggggcuccagggggug

SEQ ID NO: 241045 - RNA, 16 nt, Homo sapiens
acagacuggaagcaca

SEQ ID NO: 241046 - RNA, 18 nt, Homo sapiens
uugucacuuuccucuucc

SEQ ID NO: 241047 - RNA, 13 nt, Homo sapiens
cuaaagcugccag

SEQ ID NO: 241048 - RNA, 20 nt, Homo sapiens
acaugccucucucaggccaa

SEQ ID NO: 241049 - RNA, 23 nt, Homo sapiens
augaugccaugaggaacaaggca

SEQ ID NO: 241050 - RNA, 15 nt, Homo sapiens
cauaaugcgugcaua

SEQ ID NO: 241051 - RNA, 16 nt, Homo sapiens
cuccauguuugaugua

SEQ ID NO: 241052 - RNA, 12 nt, Homo sapiens
gggcucagcaaa

SEQ ID NO: 241053 - RNA, 23 nt, Homo sapiens
augcuugcuucaaccccaugaga

SEQ ID NO: 241054 - RNA, 21 nt, Homo sapiens
ggauugcuacuguccuaccca

SEQ ID NO: 241055 - RNA, 22 nt, Homo sapiens
gcagcagggagggcuucugcca

SEQ ID NO: 241056 - RNA, 11 nt, Homo sapiens
guuuucagugu

SEQ ID NO: 241057 - RNA, 17 nt, Homo sapiens
uuccugaaccgaugaga

SEQ ID NO: 241058 - RNA, 14 nt, Homo sapiens
gccuaggugacaga

SEQ ID NO: 241059 - RNA, 19 nt, Homo sapiens
uuguauucucuccuguacc

SEQ ID NO: 241060 - RNA, 22 nt, Homo sapiens
ggaagccucccacgacugcccg

SEQ ID NO: 241061 - RNA, 23 nt, Homo sapiens
agccaagaauucuuaaauaugug

SEQ ID NO: 241062 - RNA, 17 nt, Homo sapiens
accucuugagccuugaa

SEQ ID NO: 241063 - RNA, 16 nt, Homo sapiens
ucuagauacuguauca

SEQ ID NO: 241064 - RNA, 18 nt, Homo sapiens
uaaccagcagaaaugccu

SEQ ID NO: 241065 - RNA, 21 nt, Homo sapiens
caucccucuggggcuguucac

SEQ ID NO: 241066 - RNA, 13 nt, Homo sapiens
auagacaauuuau

SEQ ID NO: 241067 - RNA, 11 nt, Homo sapiens
acacccuguga

SEQ ID NO: 241068 - RNA, 17 nt, Homo sapiens
caugccuggauggggcu

SEQ ID NO: 241069 - RNA, 20 nt, Homo sapiens
ugcagacucuacagaggcca

SEQ ID NO: 241070 - RNA, 17 nt, Homo sapiens
uuauuauggcacaucag

SEQ ID NO: 241071 - RNA, 18 nt, Homo sapiens
gcaggacuaaaugucuag

SEQ ID NO: 241072 - RNA, 18 nt, Homo sapiens
cacuuacacuuuaugcac

SEQ ID NO: 241073 - RNA, 14 nt, Homo sapiens
aaauggaagacagc

SEQ ID NO: 241074 - RNA, 21 nt, Homo sapiens
gcacacuugcacccaugugua

SEQ ID NO: 241075 - RNA, 13 nt, Homo sapiens
ucuucucuacucu

SEQ ID NO: 241076 - RNA, 18 nt, Homo sapiens
cuacuguaauuugugaua

SEQ ID NO: 241077 - RNA, 18 nt, Homo sapiens
uuaacauggacaugaucu

SEQ ID NO: 241078 - RNA, 20 nt, Homo sapiens
aucacaagucagcacuaccu

SEQ ID NO: 241079 - RNA, 22 nt, Homo sapiens
accccagugcuuguuccucuca

SEQ ID NO: 241080 - RNA, 18 nt, Homo sapiens
gcuuaaaacaacacucac

SEQ ID NO: 241081 - RNA, 16 nt, Homo sapiens
ugcgucucauacucac

SEQ ID NO: 241082 - RNA, 17 nt, Homo sapiens
uguacauggaauaacau

SEQ ID NO: 241083 - RNA, 15 nt, Homo sapiens
aggaagcacaugccu

SEQ ID NO: 241084 - RNA, 20 nt, Homo sapiens
uccugugucuugcaauggca

SEQ ID NO: 241085 - RNA, 22 nt, Homo sapiens
uacugaggugcuauguucuuag

SEQ ID NO: 241086 - RNA, 18 nt, Homo sapiens
cacaggcagguccagggu

SEQ ID NO: 241087 - RNA, 19 nt, Homo sapiens
auggcuuggggggcuccag

SEQ ID NO: 241088 - RNA, 12 nt, Homo sapiens
uagaaaaaccac

SEQ ID NO: 241089 - RNA, 19 nt, Homo sapiens
uaauuuaccugaagucuuu

SEQ ID NO: 241090 - RNA, 17 nt, Homo sapiens
gccuggggucugacaau

SEQ ID NO: 241091 - RNA, 19 nt, Homo sapiens
gugacaacacuuguguuau

SEQ ID NO: 241092 - RNA, 20 nt, Homo sapiens
cagccucccgaguagcuggg

SEQ ID NO: 241093 - RNA, 15 nt, Homo sapiens
gaaagugaccauguu

SEQ ID NO: 241094 - RNA, 17 nt, Homo sapiens
ugcccuaaaguguauuu

SEQ ID NO: 241095 - RNA, 22 nt, Homo sapiens
gauacuguaucaugacaaagac

SEQ ID NO: 241096 - RNA, 23 nt, Homo sapiens
ugacuuaagcacacuugacauca

SEQ ID NO: 241097 - RNA, 15 nt, Homo sapiens
gccucucccaucacu

SEQ ID NO: 241098 - RNA, 15 nt, Homo sapiens
acacucacauuuauu

SEQ ID NO: 241099 - RNA, 21 nt, Homo sapiens
acccugucuaaugaaaccugu

SEQ ID NO: 241100 - RNA, 13 nt, Homo sapiens
gucccccuuccau

SEQ ID NO: 241101 - RNA, 22 nt, Homo sapiens
acccuccuuucaccacaugugc

SEQ ID NO: 241102 - RNA, 15 nt, Homo sapiens
auccucccaccucag

SEQ ID NO: 241103 - RNA, 17 nt, Homo sapiens
caggugccucaagagaa

SEQ ID NO: 241104 - RNA, 21 nt, Homo sapiens
ccaguaaaugggggugcauuu

SEQ ID NO: 241105 - RNA, 13 nt, Homo sapiens
ggugaacagaaca

SEQ ID NO: 241106 - RNA, 21 nt, Homo sapiens
caggcucucaggccagcugcu

SEQ ID NO: 241107 - RNA, 14 nt, Homo sapiens
gugccuuacacaau

SEQ ID NO: 241108 - RNA, 19 nt, Homo sapiens
guuuuuaaaaaacugcuga

SEQ ID NO: 241109 - RNA, 19 nt, Homo sapiens
aagagaaaaaauauuuucc

SEQ ID NO: 241110 - RNA, 14 nt, Homo sapiens
cauccacugugcca

SEQ ID NO: 241111 - RNA, 17 nt, Homo sapiens
aggcuaugugagcacaa

SEQ ID NO: 241112 - RNA, 21 nt, Homo sapiens
cuugaccgugaggccagagac

SEQ ID NO: 241113 - RNA, 14 nt, Homo sapiens
acagaguuguuaca

SEQ ID NO: 241114 - RNA, 17 nt, Homo sapiens
uugaccgugaggccaga

SEQ ID NO: 241115 - RNA, 13 nt, Homo sapiens
ugaaaauucuuga

SEQ ID NO: 241116 - RNA, 14 nt, Homo sapiens
cuuuguacagacaa

SEQ ID NO: 241117 - RNA, 16 nt, Homo sapiens
gauccacccaccucag

SEQ ID NO: 241118 - RNA, 15 nt, Homo sapiens
acaguauuacuucug

SEQ ID NO: 241119 - RNA, 23 nt, Homo sapiens
auaaaguuucuguugauaaucau

SEQ ID NO: 241120 - RNA, 19 nt, Homo sapiens
acauguaauuaaguacuau

SEQ ID NO: 241121 - RNA, 20 nt, Homo sapiens
gccuccccagcaccuaggug

SEQ ID NO: 241122 - RNA, 22 nt, Homo sapiens
gccugggggcugggcagaggaa

SEQ ID NO: 241123 - RNA, 15 nt, Homo sapiens
caagugccuuagcaa

SEQ ID NO: 241124 - RNA, 16 nt, Homo sapiens
cugcccuuaccugcca

SEQ ID NO: 241125 - RNA, 23 nt, Homo sapiens
cuaacuuuccuucauucaaccca

SEQ ID NO: 241126 - RNA, 22 nt, Homo sapiens
guuuuaagaggcagggucucac

SEQ ID NO: 241127 - RNA, 21 nt, Homo sapiens
aucaacugcaucaagauguga

SEQ ID NO: 241128 - RNA, 16 nt, Homo sapiens
uuccuacugggggcaa

SEQ ID NO: 241129 - RNA, 21 nt, Homo sapiens
augccaugggcccucucagca

SEQ ID NO: 241130 - RNA, 19 nt, Homo sapiens
agugauccucccaccucag

SEQ ID NO: 241131 - RNA, 22 nt, Homo sapiens
ucauuuaggugaggaagcaaaa

SEQ ID NO: 241132 - RNA, 13 nt, Homo sapiens
ugcacccaugugu

SEQ ID NO: 241133 - RNA, 16 nt, Homo sapiens
ucaggaagcucagggc

SEQ ID NO: 241134 - RNA, 22 nt, Homo sapiens
aagcugagaugggacaggauca

SEQ ID NO: 241135 - RNA, 14 nt, Homo sapiens
acaggcaagcaccu

SEQ ID NO: 241136 - RNA, 14 nt, Homo sapiens
aaggaagcacaugc

SEQ ID NO: 241137 - RNA, 22 nt, Homo sapiens
auucaugcugcuuagaugacau

SEQ ID NO: 241138 - RNA, 15 nt, Homo sapiens
aaauauuucccucac

SEQ ID NO: 241139 - RNA, 16 nt, Homo sapiens
cuaagagucucuauua

SEQ ID NO: 241140 - RNA, 14 nt, Homo sapiens
agccagggucucac

SEQ ID NO: 241141 - RNA, 18 nt, Homo sapiens
acagccucugaaaaccaa

SEQ ID NO: 241142 - RNA, 17 nt, Homo sapiens
cuuuucccaaacugauc

SEQ ID NO: 241143 - RNA, 23 nt, Homo sapiens
aguacacuguuucaaacuuuacu

SEQ ID NO: 241144 - RNA, 19 nt, Homo sapiens
uucuucagagacuccugca

SEQ ID NO: 241145 - RNA, 17 nt, Homo sapiens
cugggagaaccaaaaag

SEQ ID NO: 241146 - RNA, 16 nt, Homo sapiens
ugugugcacguacaca

SEQ ID NO: 241147 - RNA, 14 nt, Homo sapiens
cgaguuacagacaa

SEQ ID NO: 241148 - RNA, 12 nt, Homo sapiens
uuucuacccagc

SEQ ID NO: 241149 - RNA, 19 nt, Homo sapiens
guuaauaaaggaacauuaa

SEQ ID NO: 241150 - RNA, 20 nt, Homo sapiens
augagguacucuccuggaaa

SEQ ID NO: 241151 - RNA, 23 nt, Homo sapiens
cuauagccuaggugacagaguga

SEQ ID NO: 241152 - RNA, 17 nt, Homo sapiens
aucuggguucacugcaa

SEQ ID NO: 241153 - RNA, 18 nt, Homo sapiens
cucagccucccaaagugc

SEQ ID NO: 241154 - RNA, 23 nt, Homo sapiens
acaucaacugcaucaagauguga

SEQ ID NO: 241155 - RNA, 17 nt, Homo sapiens
uuccacuuugauaccau

SEQ ID NO: 241156 - RNA, 12 nt, Homo sapiens
ccagaauuuccc

SEQ ID NO: 241157 - RNA, 14 nt, Homo sapiens
cuguaucaugacaa

SEQ ID NO: 241158 - RNA, 13 nt, Homo sapiens
auacucaccucac

SEQ ID NO: 241159 - RNA, 19 nt, Homo sapiens
gacagagugagacucuguc

SEQ ID NO: 241160 - RNA, 18 nt, Homo sapiens
aauaucaagagagguuaa

SEQ ID NO: 241161 - RNA, 19 nt, Homo sapiens
caaaaaaaggcggugagca

SEQ ID NO: 241162 - RNA, 22 nt, Homo sapiens
cucuugauucauaaugacuuaa

SEQ ID NO: 241163 - RNA, 20 nt, Homo sapiens
gucagauuugaacucuucaa

SEQ ID NO: 241164 - RNA, 12 nt, Homo sapiens
acuuuaccuuuu

SEQ ID NO: 241165 - RNA, 14 nt, Homo sapiens
auguguuuccauau

SEQ ID NO: 241166 - RNA, 18 nt, Homo sapiens
gcccaguuggguggaugc

SEQ ID NO: 241167 - RNA, 15 nt, Homo sapiens
cugggauuacaggug

SEQ ID NO: 241168 - RNA, 19 nt, Homo sapiens
uaacaccaugauuaaccac

SEQ ID NO: 241169 - RNA, 15 nt, Homo sapiens
cucuccgaccagaca

SEQ ID NO: 241170 - RNA, 13 nt, Homo sapiens
caggccagcugcu

SEQ ID NO: 241171 - RNA, 16 nt, Homo sapiens
auuaaccacuucagcu

SEQ ID NO: 241172 - RNA, 23 nt, Homo sapiens
cccugguggaaugcgggggagca

SEQ ID NO: 241173 - RNA, 21 nt, Homo sapiens
gaacacuaaugaggaaacugc

SEQ ID NO: 241174 - RNA, 20 nt, Homo sapiens
cucaaacucuugaccucagg

SEQ ID NO: 241175 - RNA, 17 nt, Homo sapiens
gaaaugagcugcacucc

SEQ ID NO: 241176 - RNA, 16 nt, Homo sapiens
cuugaggcaacucauc

SEQ ID NO: 241177 - RNA, 21 nt, Homo sapiens
acacaggcccggcuccaggcu

SEQ ID NO: 241178 - RNA, 16 nt, Homo sapiens
gaagucuuuguacaga

SEQ ID NO: 241179 - RNA, 18 nt, Homo sapiens
aaaagaugaagcugagau

SEQ ID NO: 241180 - RNA, 14 nt, Homo sapiens
accagagcugccac

SEQ ID NO: 241181 - RNA, 14 nt, Homo sapiens
cucugccugaaguc

SEQ ID NO: 241182 - RNA, 18 nt, Homo sapiens
agcuccgcuuucuaccca

SEQ ID NO: 241183 - RNA, 17 nt, Homo sapiens
agcacacuugacaucaa

SEQ ID NO: 241184 - RNA, 14 nt, Homo sapiens
ucccugcaaccuga

SEQ ID NO: 241185 - RNA, 12 nt, Homo sapiens
cacuccaugagu

SEQ ID NO: 241186 - RNA, 15 nt, Homo sapiens
ucccaucugugaaag

SEQ ID NO: 241187 - RNA, 15 nt, Homo sapiens
auacaguaucucagg

SEQ ID NO: 241188 - RNA, 14 nt, Homo sapiens
aagcauuuacuuug

SEQ ID NO: 241189 - RNA, 15 nt, Homo sapiens
agcugccaccugccu

SEQ ID NO: 241190 - RNA, 17 nt, Homo sapiens
caugauguuuuccauga

SEQ ID NO: 241191 - RNA, 12 nt, Homo sapiens
gucugacaggca

SEQ ID NO: 241192 - RNA, 21 nt, Homo sapiens
gagaucacgccacugcacuau

SEQ ID NO: 241193 - RNA, 20 nt, Homo sapiens
agcuugaccgugaggccaga

SEQ ID NO: 241194 - RNA, 13 nt, Homo sapiens
uguucugggacac

SEQ ID NO: 241195 - RNA, 19 nt, Homo sapiens
ugaucacggcucacugcag

SEQ ID NO: 241196 - RNA, 18 nt, Homo sapiens
agaauugaaaaaccauuu

SEQ ID NO: 241197 - RNA, 14 nt, Homo sapiens
uggucuacacugug

SEQ ID NO: 241198 - RNA, 16 nt, Homo sapiens
aauugcuucaagcauu

SEQ ID NO: 241199 - RNA, 20 nt, Homo sapiens
uacuaacuuuccuucauuca

SEQ ID NO: 241200 - RNA, 20 nt, Homo sapiens
ggugggagugggcccaaugc

SEQ ID NO: 241201 - RNA, 14 nt, Homo sapiens
accaucaagccacc

SEQ ID NO: 241202 - RNA, 21 nt, Homo sapiens
cuaaaguguauuuuuuuacua

SEQ ID NO: 241203 - RNA, 20 nt, Homo sapiens
gggaggucaaggcugcagug

SEQ ID NO: 241204 - RNA, 13 nt, Homo sapiens
uagaaaaaccacc

SEQ ID NO: 241205 - RNA, 22 nt, Homo sapiens
gggccuggccugagcugggaug

SEQ ID NO: 241206 - RNA, 14 nt, Homo sapiens
acagcucuucucca

SEQ ID NO: 241207 - RNA, 13 nt, Homo sapiens
uuuuagacagagu

SEQ ID NO: 241208 - RNA, 13 nt, Homo sapiens
cuguucccaugag

SEQ ID NO: 241209 - RNA, 17 nt, Homo sapiens
ggauucuuauggacaau

SEQ ID NO: 241210 - RNA, 17 nt, Homo sapiens
uguggaugauaaaacac

SEQ ID NO: 241211 - RNA, 19 nt, Homo sapiens
aagccagcaggcucucagg

SEQ ID NO: 241212 - RNA, 16 nt, Homo sapiens
gcuugggcuucauccu

SEQ ID NO: 241213 - RNA, 14 nt, Homo sapiens
gagguacgaaaaga

SEQ ID NO: 241214 - RNA, 21 nt, Homo sapiens
auaacacuguacugcaauaag

SEQ ID NO: 241215 - RNA, 19 nt, Homo sapiens
caauuacaggaaguacugg

SEQ ID NO: 241216 - RNA, 15 nt, Homo sapiens
ucuauauccauaacu

SEQ ID NO: 241217 - RNA, 12 nt, Homo sapiens
uuucaaacuuua

SEQ ID NO: 241218 - RNA, 17 nt, Homo sapiens
cuccaugagugcagcuc

SEQ ID NO: 241219 - RNA, 15 nt, Homo sapiens
cuucuguccuacucu

SEQ ID NO: 241220 - RNA, 20 nt, Homo sapiens
gcagccucacaguccuuacc

SEQ ID NO: 241221 - RNA, 18 nt, Homo sapiens
acuucuuauacauuugau

SEQ ID NO: 241222 - RNA, 19 nt, Homo sapiens
uucuuuuuccccaauaaau

SEQ ID NO: 241223 - RNA, 23 nt, Homo sapiens
uuuuaugagaaaugccagugugc

SEQ ID NO: 241224 - RNA, 18 nt, Homo sapiens
aaagcaucuaugugagac

SEQ ID NO: 241225 - RNA, 16 nt, Homo sapiens
acuaaaaggugaccaa

SEQ ID NO: 241226 - RNA, 20 nt, Homo sapiens
uuuaugagaaaugccagugu

SEQ ID NO: 241227 - RNA, 14 nt, Homo sapiens
agagaaaugagcug

SEQ ID NO: 241228 - RNA, 16 nt, Homo sapiens
cagagaugugccccca

SEQ ID NO: 241229 - RNA, 23 nt, Homo sapiens
agcuccuucuguccuacucugug

SEQ ID NO: 241230 - RNA, 22 nt, Homo sapiens
agcuaggccuggccagaugcac

SEQ ID NO: 241231 - RNA, 21 nt, Homo sapiens
uuaacuuccaauuuacauacu

SEQ ID NO: 241232 - RNA, 13 nt, Homo sapiens
ugaaccacaucuu

SEQ ID NO: 241233 - RNA, 14 nt, Homo sapiens
ucugacacacagcu

SEQ ID NO: 241234 - RNA, 17 nt, Homo sapiens
agacuggaagcacagcu

SEQ ID NO: 241235 - RNA, 16 nt, Homo sapiens
ugccugguggcagcug

SEQ ID NO: 241236 - RNA, 21 nt, Homo sapiens
auauguuuuaagaggcagggu

SEQ ID NO: 241237 - RNA, 17 nt, Homo sapiens
agagaggguggugaccu

SEQ ID NO: 241238 - RNA, 20 nt, Homo sapiens
uugaguccagaaguuugaga

SEQ ID NO: 241239 - RNA, 22 nt, Homo sapiens
uuguguuuauauauaagccaaa

SEQ ID NO: 241240 - RNA, 16 nt, Homo sapiens
gaugauaaaacacaaa

SEQ ID NO: 241241 - RNA, 20 nt, Homo sapiens
cacacaguauuacuucugcu

SEQ ID NO: 241242 - RNA, 16 nt, Homo sapiens
uauauaagccaaaaaa

SEQ ID NO: 241243 - RNA, 14 nt, Homo sapiens
ucccccuuccaugg

SEQ ID NO: 241244 - RNA, 11 nt, Homo sapiens
uauaugcucug

SEQ ID NO: 241245 - RNA, 20 nt, Homo sapiens
uuaagcacacuugacaucaa

SEQ ID NO: 241246 - RNA, 13 nt, Homo sapiens
caucuaugugaga

SEQ ID NO: 241247 - RNA, 13 nt, Homo sapiens
gaagacaauguga

SEQ ID NO: 241248 - RNA, 16 nt, Homo sapiens
gaaaaaauaacacugu

SEQ ID NO: 241249 - RNA, 19 nt, Homo sapiens
cugaguacguugugcauuu

SEQ ID NO: 241250 - RNA, 13 nt, Homo sapiens
ugaaaaaauaaca

SEQ ID NO: 241251 - RNA, 14 nt, Homo sapiens
agagcaguguggaa

SEQ ID NO: 241252 - RNA, 20 nt, Homo sapiens
ccauguaagcaccccuucau

SEQ ID NO: 241253 - RNA, 21 nt, Homo sapiens
aggggauagagagagaccacu

SEQ ID NO: 241254 - RNA, 19 nt, Homo sapiens
gcagccuggggucugacaa

SEQ ID NO: 241255 - RNA, 15 nt, Homo sapiens
aguaggaagacuuug

SEQ ID NO: 241256 - RNA, 21 nt, Homo sapiens
gccguacucuuuggggcagcu

SEQ ID NO: 241257 - RNA, 14 nt, Homo sapiens
auccuaggcauuug

SEQ ID NO: 241258 - RNA, 23 nt, Homo sapiens
acaaagcgugguggacaugcaca

SEQ ID NO: 241259 - RNA, 22 nt, Homo sapiens
cuccagcucaccagccccagug

SEQ ID NO: 241260 - RNA, 19 nt, Homo sapiens
auuacaggaaguacuggag

SEQ ID NO: 241261 - RNA, 21 nt, Homo sapiens
cagggucucacuauguugccc

SEQ ID NO: 241262 - RNA, 17 nt, Homo sapiens
uaguaugaggcauuugu

SEQ ID NO: 241263 - RNA, 19 nt, Homo sapiens
gguuccuaauccucuagga

SEQ ID NO: 241264 - RNA, 19 nt, Homo sapiens
agccagcaggcucucaggc

SEQ ID NO: 241265 - RNA, 18 nt, Homo sapiens
auuggaaauuuguuauaa

SEQ ID NO: 241266 - RNA, 24 nt, Homo sapiens
uuaaaucagccguguaaccaugga

SEQ ID NO: 241267 - RNA, 18 nt, Homo sapiens
uucuagcauggcugccaa

SEQ ID NO: 241268 - RNA, 22 nt, Homo sapiens
cucaaccuccugggcuaaguga

SEQ ID NO: 241269 - RNA, 18 nt, Homo sapiens
aggaguuugagaccaacc

SEQ ID NO: 241270 - RNA, 14 nt, Homo sapiens
auuacuucugcuac

SEQ ID NO: 241271 - RNA, 18 nt, Homo sapiens
gugauccacccaccucag

SEQ ID NO: 241272 - RNA, 14 nt, Homo sapiens
ggagacgggggcag

SEQ ID NO: 241273 - RNA, 21 nt, Homo sapiens
uaaaugugaaugaugauccua

SEQ ID NO: 241274 - RNA, 15 nt, Homo sapiens
ugagaccaaccuggg

SEQ ID NO: 241275 - RNA, 17 nt, Homo sapiens
uggaauaaggagaauga

SEQ ID NO: 241276 - RNA, 22 nt, Homo sapiens
cagcuuguaaauagcucaggug

SEQ ID NO: 241277 - RNA, 17 nt, Homo sapiens
gcucuuuugagcauuua

SEQ ID NO: 241278 - RNA, 21 nt, Homo sapiens
gaaugauuaauuaaaacacaa

SEQ ID NO: 241279 - RNA, 15 nt, Homo sapiens
agaaagacuaucuaa

SEQ ID NO: 241280 - RNA, 20 nt, Homo sapiens
uugcaggaccucaggugaga

SEQ ID NO: 241281 - RNA, 17 nt, Homo sapiens
uguuagugguuacccag

SEQ ID NO: 241282 - RNA, 23 nt, Homo sapiens
agucgaggacagggaggugaccc

SEQ ID NO: 241283 - RNA, 15 nt, Homo sapiens
auugauaagaaccuu

SEQ ID NO: 241284 - RNA, 14 nt, Homo sapiens
cugaugcagaaaga

SEQ ID NO: 241285 - RNA, 17 nt, Homo sapiens
augacaucugucuagga

SEQ ID NO: 241286 - RNA, 13 nt, Homo sapiens
aucuuccaagggu

SEQ ID NO: 241287 - RNA, 13 nt, Homo sapiens
ucuuccccagaua

SEQ ID NO: 241288 - RNA, 12 nt, Homo sapiens
uucuuuccugag

SEQ ID NO: 241289 - RNA, 13 nt, Homo sapiens
caacucaucuuag

SEQ ID NO: 241290 - RNA, 16 nt, Homo sapiens
cuguuggccaguguga

SEQ ID NO: 241291 - RNA, 21 nt, Homo sapiens
uucagagacuccugcaggcag

SEQ ID NO: 241292 - RNA, 20 nt, Homo sapiens
cuuacacuuuaugcacaaaa

SEQ ID NO: 241293 - RNA, 16 nt, Homo sapiens
cucuucaaucucuugc

SEQ ID NO: 241294 - RNA, 22 nt, Homo sapiens
guacauggaauaacauguaauu

SEQ ID NO: 241295 - RNA, 11 nt, Homo sapiens
uuucaccacau

SEQ ID NO: 241296 - RNA, 12 nt, Homo sapiens
uacguugugcau

SEQ ID NO: 241297 - RNA, 13 nt, Homo sapiens
gguagaagcccuu

SEQ ID NO: 241298 - RNA, 12 nt, Homo sapiens
ugccgcauuugg

SEQ ID NO: 241299 - RNA, 14 nt, Homo sapiens
gucucauacucacc

SEQ ID NO: 241300 - RNA, 21 nt, Homo sapiens
aucuugaauuguaaggaauga

SEQ ID NO: 241301 - RNA, 22 nt, Homo sapiens
gccaguaaaugggggugcauuu

SEQ ID NO: 241302 - RNA, 18 nt, Homo sapiens
cuuucugcuaucaaagag

SEQ ID NO: 241303 - RNA, 12 nt, Homo sapiens
uucacuacauua

SEQ ID NO: 241304 - RNA, 17 nt, Homo sapiens
aaugaaugucaguguga

SEQ ID NO: 241305 - RNA, 14 nt, Homo sapiens
ucuuaguuugcagu

SEQ ID NO: 241306 - RNA, 12 nt, Homo sapiens
uugugcauuugg

SEQ ID NO: 241307 - RNA, 21 nt, Homo sapiens
agagacaggguuuugccaugu

SEQ ID NO: 241308 - RNA, 14 nt, Homo sapiens
ucacagccucugaa

SEQ ID NO: 241309 - RNA, 14 nt, Homo sapiens
acacgcgugcacac

SEQ ID NO: 241310 - RNA, 22 nt, Homo sapiens
ccuucagugccaaaaacaacaa

SEQ ID NO: 241311 - RNA, 23 nt, Homo sapiens
aaaacuuuucuaauacucuaccc

SEQ ID NO: 241312 - RNA, 15 nt, Homo sapiens
ccaaugggagcucau

SEQ ID NO: 241313 - RNA, 19 nt, Homo sapiens
cacuaaugaggaaacugca

SEQ ID NO: 241314 - RNA, 21 nt, Homo sapiens
guagcuuuucccaaacugauc

SEQ ID NO: 241315 - RNA, 14 nt, Homo sapiens
agccccauccucug

SEQ ID NO: 241316 - RNA, 17 nt, Homo sapiens
ggaauccagacccggcu

SEQ ID NO: 241317 - RNA, 18 nt, Homo sapiens
cuugucuuuggacccuga

SEQ ID NO: 241318 - RNA, 17 nt, Homo sapiens
ccauggacccaauauuu

SEQ ID NO: 241319 - RNA, 21 nt, Homo sapiens
gugagggaacagagagguuaa

SEQ ID NO: 241320 - RNA, 19 nt, Homo sapiens
cugccagccgagauagcca

SEQ ID NO: 241321 - RNA, 16 nt, Homo sapiens
augccagcuuaucuca

SEQ ID NO: 241322 - RNA, 14 nt, Homo sapiens
agguggggcagcuu

SEQ ID NO: 241323 - RNA, 14 nt, Homo sapiens
aguagcugggacua

SEQ ID NO: 241324 - RNA, 16 nt, Homo sapiens
aauuacaggaaguacu

SEQ ID NO: 241325 - RNA, 23 nt, Homo sapiens
uggguugcaggaccucaggugag

SEQ ID NO: 241326 - RNA, 16 nt, Homo sapiens
aaucauaaaacuugau

SEQ ID NO: 241327 - RNA, 17 nt, Homo sapiens
gccauccucccaagggg

SEQ ID NO: 241328 - RNA, 19 nt, Homo sapiens
cauauucaggaagcucagg

SEQ ID NO: 241329 - RNA, 17 nt, Homo sapiens
auuguuuucaguguaca

SEQ ID NO: 241330 - RNA, 16 nt, Homo sapiens
aaaggugaccaaugau

SEQ ID NO: 241331 - RNA, 22 nt, Homo sapiens
gaaaagaggggaagagacuugg

SEQ ID NO: 241332 - RNA, 15 nt, Homo sapiens
auacauuugauaaag

SEQ ID NO: 241333 - RNA, 21 nt, Homo sapiens
aggaucaaaguugaugaaaua

SEQ ID NO: 241334 - RNA, 16 nt, Homo sapiens
uuguacagacaacaaa

SEQ ID NO: 241335 - RNA, 15 nt, Homo sapiens
cagccugcuccagcu

SEQ ID NO: 241336 - RNA, 18 nt, Homo sapiens
ugaguacguugugcauuu

SEQ ID NO: 241337 - RNA, 21 nt, Homo sapiens
aagauucauauuuacuucuua

SEQ ID NO: 241338 - RNA, 18 nt, Homo sapiens
acagacaacaaaccuguu

SEQ ID NO: 241339 - RNA, 16 nt, Homo sapiens
ugaauaauacaguauc

SEQ ID NO: 241340 - RNA, 16 nt, Homo sapiens
cuggucccacucaguc

SEQ ID NO: 241341 - RNA, 14 nt, Homo sapiens
caguggcuaccuac

SEQ ID NO: 241342 - RNA, 17 nt, Homo sapiens
acacaguauuacuucug

SEQ ID NO: 241343 - RNA, 19 nt, Homo sapiens
cgaggacagggaggugacc

SEQ ID NO: 241344 - RNA, 12 nt, Homo sapiens
agcuuaucucag

SEQ ID NO: 241345 - RNA, 17 nt, Homo sapiens
cuugaaugaugccauga

SEQ ID NO: 241346 - RNA, 18 nt, Homo sapiens
gaaaaaauaacacuguac

SEQ ID NO: 241347 - RNA, 17 nt, Homo sapiens
uuaaauaaaucauaaaa

SEQ ID NO: 241348 - RNA, 16 nt, Homo sapiens
cuagcauggcugccaa

SEQ ID NO: 241349 - RNA, 22 nt, Homo sapiens
guuuuuauggcuuuugugcauu

SEQ ID NO: 241350 - RNA, 18 nt, Homo sapiens
uuuaagagaaaugagcug

SEQ ID NO: 241351 - RNA, 18 nt, Homo sapiens
agguaugcaaucaaaucu

SEQ ID NO: 241352 - RNA, 14 nt, Homo sapiens
auaacuuuuuccaa

SEQ ID NO: 241353 - RNA, 13 nt, Homo sapiens
agcagugugauug

SEQ ID NO: 241354 - RNA, 15 nt, Homo sapiens
gccugggaucccuca

SEQ ID NO: 241355 - RNA, 23 nt, Homo sapiens
ccugacaacacucauugaccuga

SEQ ID NO: 241356 - RNA, 20 nt, Homo sapiens
ggagcaaaaucgaugcagug

SEQ ID NO: 241357 - RNA, 18 nt, Homo sapiens
ggagggucugcagggaau

SEQ ID NO: 241358 - RNA, 23 nt, Homo sapiens
auuuccugugucuuuuuucacua

SEQ ID NO: 241359 - RNA, 21 nt, Homo sapiens
aggaagguagaaauaucugaa

SEQ ID NO: 241360 - RNA, 16 nt, Homo sapiens
aaugcucuuuacuuca

SEQ ID NO: 241361 - RNA, 14 nt, Homo sapiens
guauuauaccuuuu

SEQ ID NO: 241362 - RNA, 22 nt, Homo sapiens
ugacaaggggcaguggugguuu

SEQ ID NO: 241363 - RNA, 22 nt, Homo sapiens
uguaagcucuacugaggugcua

SEQ ID NO: 241364 - RNA, 15 nt, Homo sapiens
gucuuagauguauau

SEQ ID NO: 241365 - RNA, 18 nt, Homo sapiens
ugccucugacacacagcu

SEQ ID NO: 241366 - RNA, 16 nt, Homo sapiens
gauccucccaccucag

SEQ ID NO: 241367 - RNA, 21 nt, Homo sapiens
gugcugggauuacagguguga

SEQ ID NO: 241368 - RNA, 13 nt, Homo sapiens
uugcaugaggcua

SEQ ID NO: 241369 - RNA, 16 nt, Homo sapiens
cgugcacacaccagag

SEQ ID NO: 241370 - RNA, 13 nt, Homo sapiens
aaggagauuuaca

SEQ ID NO: 241371 - RNA, 19 nt, Homo sapiens
ggccgggcgcgguggcuca

SEQ ID NO: 241372 - RNA, 19 nt, Homo sapiens
ggaagccacagggugagca

SEQ ID NO: 241373 - RNA, 20 nt, Homo sapiens
uacguuaugauaguguccca

SEQ ID NO: 241374 - RNA, 12 nt, Homo sapiens
cuaaugggacac

SEQ ID NO: 241375 - RNA, 16 nt, Homo sapiens
cagagagcagugugga

SEQ ID NO: 241376 - RNA, 18 nt, Homo sapiens
acuauguugcccaggcag

SEQ ID NO: 241377 - RNA, 17 nt, Homo sapiens
cauucugccugcccagg

SEQ ID NO: 241378 - RNA, 20 nt, Homo sapiens
uugaaauauaggaacuuaaa

SEQ ID NO: 241379 - RNA, 15 nt, Homo sapiens
acagcuaacauggaa

SEQ ID NO: 241380 - RNA, 19 nt, Homo sapiens
gugugggggaagcaccaua

SEQ ID NO: 241381 - RNA, 17 nt, Homo sapiens
gccucucucaggccaaa

SEQ ID NO: 241382 - RNA, 18 nt, Homo sapiens
ccagcgugugacuacucc

SEQ ID NO: 241383 - RNA, 22 nt, Homo sapiens
gcacuuuguucuggcucuucca

SEQ ID NO: 241384 - RNA, 19 nt, Homo sapiens
aagaguaggaagacuuugg

SEQ ID NO: 241385 - RNA, 11 nt, Homo sapiens
uccuucuuccc

SEQ ID NO: 241386 - RNA, 17 nt, Homo sapiens
uuccuguucccaugaga

SEQ ID NO: 241387 - RNA, 21 nt, Homo sapiens
acccccugaauuucucacaaa

SEQ ID NO: 241388 - RNA, 18 nt, Homo sapiens
uauucaguaauaacucua

SEQ ID NO: 241389 - RNA, 19 nt, Homo sapiens
gaugaccuugaaugaugcc

SEQ ID NO: 241390 - RNA, 16 nt, Homo sapiens
ucauccacugugccau

SEQ ID NO: 241391 - RNA, 21 nt, Homo sapiens
cacucacacggacacucaaaa

SEQ ID NO: 241392 - RNA, 22 nt, Homo sapiens
cugugggucgcgugaugcgcau

SEQ ID NO: 241393 - RNA, 13 nt, Homo sapiens
gguggaugccugg

SEQ ID NO: 241394 - RNA, 17 nt, Homo sapiens
ugcaugaaguaauaugc

SEQ ID NO: 241395 - RNA, 19 nt, Homo sapiens
ugauccuaggcauuugcug

SEQ ID NO: 241396 - RNA, 17 nt, Homo sapiens
gaaaguacguuaugaua

SEQ ID NO: 241397 - RNA, 19 nt, Homo sapiens
uuaucaaucucuaguuguc

SEQ ID NO: 241398 - RNA, 17 nt, Homo sapiens
ucucaacugagugagca

SEQ ID NO: 241399 - RNA, 18 nt, Homo sapiens
gcaugaaguaauaugcac

SEQ ID NO: 241400 - RNA, 12 nt, Homo sapiens
ggaggauguucu

SEQ ID NO: 241401 - RNA, 17 nt, Homo sapiens
acccugcucuccgacca

SEQ ID NO: 241402 - RNA, 23 nt, Homo sapiens
uuaaauaaaucauaaaacuugau

SEQ ID NO: 241403 - RNA, 16 nt, Homo sapiens
gacaucugucuaggaa

SEQ ID NO: 241404 - RNA, 17 nt, Homo sapiens
ccucuuagaaaaaccac

SEQ ID NO: 241405 - RNA, 17 nt, Homo sapiens
accaaaucagcugcuac

SEQ ID NO: 241406 - RNA, 14 nt, Homo sapiens
cguguuaugacucc

SEQ ID NO: 241407 - RNA, 14 nt, Homo sapiens
gugcagcucuggag

SEQ ID NO: 241408 - RNA, 17 nt, Homo sapiens
aaagcugcugacagugu

SEQ ID NO: 241409 - RNA, 15 nt, Homo sapiens
auggcuuuugugcau

SEQ ID NO: 241410 - RNA, 22 nt, Homo sapiens
cgggaggauguucugggacaca

SEQ ID NO: 241411 - RNA, 23 nt, Homo sapiens
uucugacccaugcugcccuguga

SEQ ID NO: 241412 - RNA, 16 nt, Homo sapiens
cagcaggcucucaggc

SEQ ID NO: 241413 - RNA, 21 nt, Homo sapiens
uuguuaguaugaggcauuugu

SEQ ID NO: 241414 - RNA, 13 nt, Homo sapiens
agcugcacccuca

SEQ ID NO: 241415 - RNA, 16 nt, Homo sapiens
agauguauauauuucc

SEQ ID NO: 241416 - RNA, 11 nt, Homo sapiens
uaugugagcac

SEQ ID NO: 241417 - RNA, 16 nt, Homo sapiens
acuuccacugccaucc

SEQ ID NO: 241418 - RNA, 16 nt, Homo sapiens
gguuucuaaagcugcc

SEQ ID NO: 241419 - RNA, 22 nt, Homo sapiens
gacaaagcgugguggacaugca

SEQ ID NO: 241420 - RNA, 14 nt, Homo sapiens
ucuaaagcugccag

SEQ ID NO: 241421 - RNA, 18 nt, Homo sapiens
cagacacaggcccggcuc

SEQ ID NO: 241422 - RNA, 15 nt, Homo sapiens
gugaggaagcaaaag

SEQ ID NO: 241423 - RNA, 13 nt, Homo sapiens
guacucuccugga

SEQ ID NO: 241424 - RNA, 19 nt, Homo sapiens
cgggcacucagaagacacu

SEQ ID NO: 241425 - RNA, 13 nt, Homo sapiens
cucugcacaagcu

SEQ ID NO: 241426 - RNA, 22 nt, Homo sapiens
ccugcccuuaccugccaggaag

SEQ ID NO: 241427 - RNA, 19 nt, Homo sapiens
ugaagucccagauacuugg

SEQ ID NO: 241428 - RNA, 17 nt, Homo sapiens
uguucaugcacacuugc

SEQ ID NO: 241429 - RNA, 21 nt, Homo sapiens
aaugacuuacuguacaugaaa

SEQ ID NO: 241430 - RNA, 20 nt, Homo sapiens
ccugaauuucucacaaagga

SEQ ID NO: 241431 - RNA, 15 nt, Homo sapiens
cauuuuuuaaaugca

SEQ ID NO: 241432 - RNA, 21 nt, Homo sapiens
aacagguuuaaaaauccccaa

SEQ ID NO: 241433 - RNA, 16 nt, Homo sapiens
ggccuggccagaugca

SEQ ID NO: 241434 - RNA, 22 nt, Homo sapiens
cauguuggccaggcuggucuca

SEQ ID NO: 241435 - RNA, 18 nt, Homo sapiens
aucaacaucuuggucaga

SEQ ID NO: 241436 - RNA, 18 nt, Homo sapiens
agacaggguuuugccaug

SEQ ID NO: 241437 - RNA, 23 nt, Homo sapiens
gcugagggugagugggugaauaa

SEQ ID NO: 241438 - RNA, 20 nt, Homo sapiens
acacauuuuuuaaaugcacc

SEQ ID NO: 241439 - RNA, 19 nt, Homo sapiens
cuucuuccccccgcuguca

SEQ ID NO: 241440 - RNA, 23 nt, Homo sapiens
agacuuuuccaacccucaucacc

SEQ ID NO: 241441 - RNA, 21 nt, Homo sapiens
gccaguuggucccccuuccau

SEQ ID NO: 241442 - RNA, 20 nt, Homo sapiens
cccacuggaggcaugugaug

SEQ ID NO: 241443 - RNA, 14 nt, Homo sapiens
cccugucucaaaaa

SEQ ID NO: 241444 - RNA, 23 nt, Homo sapiens
agagucacuggaacacuaaugag

SEQ ID NO: 241445 - RNA, 12 nt, Homo sapiens
ugggcagaggaa

SEQ ID NO: 241446 - RNA, 22 nt, Homo sapiens
accuagguggggccugggguag

SEQ ID NO: 241447 - RNA, 22 nt, Homo sapiens
uagccugccucuucucuacucu

SEQ ID NO: 241448 - RNA, 18 nt, Homo sapiens
guuuagcccaaaaccaag

SEQ ID NO: 241449 - RNA, 23 nt, Homo sapiens
guaauuuuuuuaucgucacugcu

SEQ ID NO: 241450 - RNA, 13 nt, Homo sapiens
gagugagcugguu

SEQ ID NO: 241451 - RNA, 14 nt, Homo sapiens
auccucccaccuca

SEQ ID NO: 241452 - RNA, 22 nt, Homo sapiens
ucuuucagccaagaauucuuaa

SEQ ID NO: 241453 - RNA, 19 nt, Homo sapiens
agacaaugacuuacuguac

SEQ ID NO: 241454 - RNA, 16 nt, Homo sapiens
auaauucuacuuugag

SEQ ID NO: 241455 - RNA, 16 nt, Homo sapiens
guucaugcacacuugc

SEQ ID NO: 241456 - RNA, 23 nt, Homo sapiens
gcaggcuucuuccccccaaaacu

SEQ ID NO: 241457 - RNA, 16 nt, Homo sapiens
uguucugggacacagu

SEQ ID NO: 241458 - RNA, 18 nt, Homo sapiens
aucccauaugccugggca

SEQ ID NO: 241459 - RNA, 11 nt, Homo sapiens
cagcucugcaa

SEQ ID NO: 241460 - RNA, 18 nt, Homo sapiens
cugccauuucugagauca

SEQ ID NO: 241461 - RNA, 16 nt, Homo sapiens
uucauacccuguuacc

SEQ ID NO: 241462 - RNA, 19 nt, Homo sapiens
aaacuacccucuggagaua

SEQ ID NO: 241463 - RNA, 21 nt, Homo sapiens
cuuaccugccaggaagccagc

SEQ ID NO: 241464 - RNA, 21 nt, Homo sapiens
uuuguagagccagggucucac

SEQ ID NO: 241465 - RNA, 22 nt, Homo sapiens
gacuggccaagguuuggggaag

SEQ ID NO: 241466 - RNA, 15 nt, Homo sapiens
agcauuuagacucuc

SEQ ID NO: 241467 - RNA, 22 nt, Homo sapiens
ucgaauccagagagcagugugg

SEQ ID NO: 241468 - RNA, 20 nt, Homo sapiens
ugguggacaugcacagcuaa

SEQ ID NO: 241469 - RNA, 14 nt, Homo sapiens
uaacaccaugauua

SEQ ID NO: 241470 - RNA, 14 nt, Homo sapiens
aaaaugagguacuc

SEQ ID NO: 241471 - RNA, 22 nt, Homo sapiens
cacagugagucgaggacaggga

SEQ ID NO: 241472 - RNA, 14 nt, Homo sapiens
aguugauucagcuc

SEQ ID NO: 241473 - RNA, 15 nt, Homo sapiens
uaaauucaugcugcu

SEQ ID NO: 241474 - RNA, 13 nt, Homo sapiens
ccacagggugagc

SEQ ID NO: 241475 - RNA, 11 nt, Homo sapiens
cuuucuucccu

SEQ ID NO: 241476 - RNA, 22 nt, Homo sapiens
ccuucuuacuuaaccugaagcu

SEQ ID NO: 241477 - RNA, 21 nt, Homo sapiens
uugaaaaaaaaaaacacaaaa

SEQ ID NO: 241478 - RNA, 21 nt, Homo sapiens
cacuauagccuaggugacaga

SEQ ID NO: 241479 - RNA, 18 nt, Homo sapiens
accaacauacucccaucu

SEQ ID NO: 241480 - RNA, 14 nt, Homo sapiens
gacagagucucacu

SEQ ID NO: 241481 - RNA, 13 nt, Homo sapiens
aggggcacagggu

SEQ ID NO: 241482 - RNA, 17 nt, Homo sapiens
aaauauguggaguucau

SEQ ID NO: 241483 - RNA, 15 nt, Homo sapiens
cugaaugguuuucaa

SEQ ID NO: 241484 - RNA, 23 nt, Homo sapiens
ugauagugucccacggugccuug

SEQ ID NO: 241485 - RNA, 18 nt, Homo sapiens
aagcgugagccacugcac

SEQ ID NO: 241486 - RNA, 21 nt, Homo sapiens
aucgucacugcuuaacuucac

SEQ ID NO: 241487 - RNA, 17 nt, Homo sapiens
ugcacagcuaacaugga

SEQ ID NO: 241488 - RNA, 23 nt, Homo sapiens
caaagccuccuccagccgccaug

SEQ ID NO: 241489 - RNA, 19 nt, Homo sapiens
cacagaaaauggaagacag

SEQ ID NO: 241490 - RNA, 12 nt, Homo sapiens
cucuacaaaaag

SEQ ID NO: 241491 - RNA, 14 nt, Homo sapiens
ugggguaugggaga

SEQ ID NO: 241492 - RNA, 23 nt, Homo sapiens
auggcugccaaugggagcucaug

SEQ ID NO: 241493 - RNA, 23 nt, Homo sapiens
gaagaaaauaguggugugauuug

SEQ ID NO: 241494 - RNA, 19 nt, Homo sapiens
aguuugagaccaaccuggg

SEQ ID NO: 241495 - RNA, 14 nt, Homo sapiens
ucuuaauucuuagc

SEQ ID NO: 241496 - RNA, 14 nt, Homo sapiens
uuagaagucacaca

SEQ ID NO: 241497 - RNA, 17 nt, Homo sapiens
cacaugugcacaugcac

SEQ ID NO: 241498 - RNA, 13 nt, Homo sapiens
uugaacuuugacc

SEQ ID NO: 241499 - RNA, 14 nt, Homo sapiens
ggucugugugauga

SEQ ID NO: 241500 - RNA, 21 nt, Homo sapiens
cugacccaugcugcccuguga

SEQ ID NO: 241501 - RNA, 15 nt, Homo sapiens
cugcauguuacauaa

SEQ ID NO: 241502 - RNA, 22 nt, Homo sapiens
agccaaggccaaaggaagcaca

SEQ ID NO: 241503 - RNA, 17 nt, Homo sapiens
gcugauggugcaaugac

SEQ ID NO: 241504 - RNA, 15 nt, Homo sapiens
agcaggcucucaggc

SEQ ID NO: 241505 - RNA, 17 nt, Homo sapiens
auaaugacuuaagcaca

SEQ ID NO: 241506 - RNA, 18 nt, Homo sapiens
cucaggaguuugagacca

SEQ ID NO: 241507 - RNA, 17 nt, Homo sapiens
cuguuucugcagccacu

SEQ ID NO: 241508 - RNA, 19 nt, Homo sapiens
ggcacucagaagacacuga

SEQ ID NO: 241509 - RNA, 19 nt, Homo sapiens
cauaaugacuuaagcacac

SEQ ID NO: 241510 - RNA, 16 nt, Homo sapiens
cagccaugauucuuuu

SEQ ID NO: 241511 - RNA, 18 nt, Homo sapiens
ucuaaaggcuaccuuugu

SEQ ID NO: 241512 - RNA, 22 nt, Homo sapiens
uaaaauaaauuuguaugcucaa

SEQ ID NO: 241513 - RNA, 20 nt, Homo sapiens
aacaucuuuuucuacucgag

SEQ ID NO: 241514 - RNA, 15 nt, Homo sapiens
ugaaacaacccaaag

SEQ ID NO: 241515 - RNA, 20 nt, Homo sapiens
gcagaaggaagacuucaucc

SEQ ID NO: 241516 - RNA, 13 nt, Homo sapiens
gugauccacccac

SEQ ID NO: 241517 - RNA, 22 nt, Homo sapiens
ucccaucacuucccuacaugga

SEQ ID NO: 241518 - RNA, 15 nt, Homo sapiens
aucccaugagccuca

SEQ ID NO: 241519 - RNA, 23 nt, Homo sapiens
ugcacacauuuuuuaaaugcacc

SEQ ID NO: 241520 - RNA, 12 nt, Homo sapiens
aaaaaaaauccc

SEQ ID NO: 241521 - RNA, 14 nt, Homo sapiens
gcucuggacaggca

SEQ ID NO: 241522 - RNA, 13 nt, Homo sapiens
gccucucucaggc

SEQ ID NO: 241523 - RNA, 16 nt, Homo sapiens
cagcgagcccuggugg

SEQ ID NO: 241524 - RNA, 16 nt, Homo sapiens
cagaaguuugagauca

SEQ ID NO: 241525 - RNA, 13 nt, Homo sapiens
caacugaccaguu

SEQ ID NO: 241526 - RNA, 14 nt, Homo sapiens
ucuacgccagggga

SEQ ID NO: 241527 - RNA, 19 nt, Homo sapiens
ucugccucugacacacagc

SEQ ID NO: 241528 - RNA, 14 nt, Homo sapiens
auucagcucugcaa

SEQ ID NO: 241529 - RNA, 15 nt, Homo sapiens
ucaguguacauggaa

SEQ ID NO: 241530 - RNA, 20 nt, Homo sapiens
agacagaguuuucacucuua

SEQ ID NO: 241531 - RNA, 21 nt, Homo sapiens
ggaagcuccgcuuucuaccca

SEQ ID NO: 241532 - RNA, 19 nt, Homo sapiens
ccugugaguacuacagucc

SEQ ID NO: 241533 - RNA, 14 nt, Homo sapiens
ggcuggguggcacc

SEQ ID NO: 241534 - RNA, 20 nt, Homo sapiens
auagauauaugcucugcaug

SEQ ID NO: 241535 - RNA, 17 nt, Homo sapiens
acucagaagacacugau

SEQ ID NO: 241536 - RNA, 19 nt, Homo sapiens
cguuucuaugacacaugca

SEQ ID NO: 241537 - RNA, 22 nt, Homo sapiens
gcacacugcuugugaaaggaaa

SEQ ID NO: 241538 - RNA, 16 nt, Homo sapiens
augaaacauuuuguca

SEQ ID NO: 241539 - RNA, 19 nt, Homo sapiens
cccacgcuggagugcagug

SEQ ID NO: 241540 - RNA, 20 nt, Homo sapiens
auguuuuucuucucccucag

SEQ ID NO: 241541 - RNA, 16 nt, Homo sapiens
gcccacacuugggagc

SEQ ID NO: 241542 - RNA, 23 nt, Homo sapiens
ugugaaugaugauccuaggcauu

SEQ ID NO: 241543 - RNA, 13 nt, Homo sapiens
ucaaucucuaguu

SEQ ID NO: 241544 - RNA, 13 nt, Homo sapiens
cuuauauacagac

SEQ ID NO: 241545 - RNA, 18 nt, Homo sapiens
cugaagucuuuguacaga

SEQ ID NO: 241546 - RNA, 14 nt, Homo sapiens
agccucacaguccu

SEQ ID NO: 241547 - RNA, 19 nt, Homo sapiens
uaggaagguuaauguucau

SEQ ID NO: 241548 - RNA, 19 nt, Homo sapiens
uguuucugcagccacuauu

SEQ ID NO: 241549 - RNA, 12 nt, Homo sapiens
ccagccuugacc

SEQ ID NO: 241550 - RNA, 20 nt, Homo sapiens
cugggauuacaggugugaac

SEQ ID NO: 241551 - RNA, 20 nt, Homo sapiens
ucauugaccugaggcccuuc

SEQ ID NO: 241552 - RNA, 18 nt, Homo sapiens
ucacauuuauucugcuca

SEQ ID NO: 241553 - RNA, 18 nt, Homo sapiens
ucccccugacaacacuca

SEQ ID NO: 241554 - RNA, 18 nt, Homo sapiens
cuguggaugauaaaacac

SEQ ID NO: 241555 - RNA, 15 nt, Homo sapiens
caugcugcccuguga

SEQ ID NO: 241556 - RNA, 17 nt, Homo sapiens
gcugguugagguuucaa

SEQ ID NO: 241557 - RNA, 18 nt, Homo sapiens
augcacagcuaacaugga

SEQ ID NO: 241558 - RNA, 16 nt, Homo sapiens
ggccuccugugugugc

SEQ ID NO: 241559 - RNA, 13 nt, Homo sapiens
gagcaggcuucuu

SEQ ID NO: 241560 - RNA, 16 nt, Homo sapiens
aacucaaacucuuaaa

SEQ ID NO: 241561 - RNA, 18 nt, Homo sapiens
augaucuaggaagacuuu

SEQ ID NO: 241562 - RNA, 16 nt, Homo sapiens
cacagacccugcccug

SEQ ID NO: 241563 - RNA, 14 nt, Homo sapiens
auguugcccaggca

SEQ ID NO: 241564 - RNA, 16 nt, Homo sapiens
cacacgcgugcacaca

SEQ ID NO: 241565 - RNA, 21 nt, Homo sapiens
ugcagaaagaccgugugugaa

SEQ ID NO: 241566 - RNA, 13 nt, Homo sapiens
gugauacaaugcu

SEQ ID NO: 241567 - RNA, 14 nt, Homo sapiens
uagugguuacccag

SEQ ID NO: 241568 - RNA, 20 nt, Homo sapiens
gaguucauacccuguuacca

SEQ ID NO: 241569 - RNA, 15 nt, Homo sapiens
gcugcacuccaugag

SEQ ID NO: 241570 - RNA, 20 nt, Homo sapiens
cuccuggccucaagugauuc

SEQ ID NO: 241571 - RNA, 14 nt, Homo sapiens
uacaagcgugagcc

SEQ ID NO: 241572 - RNA, 21 nt, Homo sapiens
cccagccccuucugacccaug

SEQ ID NO: 241573 - RNA, 17 nt, Homo sapiens
auaccugucccccugac

SEQ ID NO: 241574 - RNA, 15 nt, Homo sapiens
gucacucuggcagcu

SEQ ID NO: 241575 - RNA, 18 nt, Homo sapiens
aauccccaaaaaagcgaa

SEQ ID NO: 241576 - RNA, 14 nt, Homo sapiens
aagagaaaugagcu

SEQ ID NO: 241577 - RNA, 18 nt, Homo sapiens
cagccugggcaaugugau

SEQ ID NO: 241578 - RNA, 19 nt, Homo sapiens
agguagaaauaucugaaaa

SEQ ID NO: 241579 - RNA, 15 nt, Homo sapiens
ccaccaucaccagac

SEQ ID NO: 241580 - RNA, 19 nt, Homo sapiens
accauuuugggguacccac

SEQ ID NO: 241581 - RNA, 19 nt, Homo sapiens
ugagcacaaagguagcuuu

SEQ ID NO: 241582 - RNA, 12 nt, Homo sapiens
cuaugcauuuga

SEQ ID NO: 241583 - RNA, 18 nt, Homo sapiens
ugaucacggcucacugca

SEQ ID NO: 241584 - RNA, 17 nt, Homo sapiens
augccagcuuaucucag

SEQ ID NO: 241585 - RNA, 14 nt, Homo sapiens
cuauguugcccagg

SEQ ID NO: 241586 - RNA, 22 nt, Homo sapiens
acaggguuuugccauguuggcc

SEQ ID NO: 241587 - RNA, 18 nt, Homo sapiens
ucucaaguuaucagggua

SEQ ID NO: 241588 - RNA, 16 nt, Homo sapiens
uccuguucccaugaga

SEQ ID NO: 241589 - RNA, 22 nt, Homo sapiens
ugaacuggguacuuguggacac

SEQ ID NO: 241590 - RNA, 21 nt, Homo sapiens
guacauggaauaacauguaau

SEQ ID NO: 241591 - RNA, 17 nt, Homo sapiens
gacagcugccugggauc

SEQ ID NO: 241592 - RNA, 14 nt, Homo sapiens
accacuucagcuga

SEQ ID NO: 241593 - RNA, 13 nt, Homo sapiens
caaaaacaacaac

SEQ ID NO: 241594 - RNA, 17 nt, Homo sapiens
augccugguggcagcug

SEQ ID NO: 241595 - RNA, 21 nt, Homo sapiens
ugugugcacguacacacacau

SEQ ID NO: 241596 - RNA, 15 nt, Homo sapiens
aaugggggugcauuu

SEQ ID NO: 241597 - RNA, 15 nt, Homo sapiens
acugcuuuuggucug

SEQ ID NO: 241598 - RNA, 24 nt, Homo sapiens
acaaagcgugguggacaugcacag

SEQ ID NO: 241599 - RNA, 15 nt, Homo sapiens
uagccaaguguggua

SEQ ID NO: 241600 - RNA, 22 nt, Homo sapiens
caauaaggggagaguaacccug

SEQ ID NO: 241601 - RNA, 18 nt, Homo sapiens
gucacacacuuuggcuau

SEQ ID NO: 241602 - RNA, 19 nt, Homo sapiens
uggacuuccacugccaucc

SEQ ID NO: 241603 - RNA, 15 nt, Homo sapiens
cgugugacuacuccc

SEQ ID NO: 241604 - RNA, 16 nt, Homo sapiens
ugggacacccugugau

SEQ ID NO: 241605 - RNA, 20 nt, Homo sapiens
aagcauaaaaauuagccaag

SEQ ID NO: 241606 - RNA, 14 nt, Homo sapiens
caccacaugugcac

SEQ ID NO: 241607 - RNA, 21 nt, Homo sapiens
acgccacugcacuauagccua

SEQ ID NO: 241608 - RNA, 18 nt, Homo sapiens
auuguaaggaaugauuaa

SEQ ID NO: 241609 - RNA, 21 nt, Homo sapiens
agcuugaccgugaggccagag

SEQ ID NO: 241610 - RNA, 20 nt, Homo sapiens
aagugagacccugucucaaa

SEQ ID NO: 241611 - RNA, 20 nt, Homo sapiens
ugccagcuuaucucaggggu

SEQ ID NO: 241612 - RNA, 23 nt, Homo sapiens
gccaagguuuggggaagaacgaa

SEQ ID NO: 241613 - RNA, 16 nt, Homo sapiens
agaaaaaggaugcauu

SEQ ID NO: 241614 - RNA, 18 nt, Homo sapiens
aagcgugguggacaugca

SEQ ID NO: 241615 - RNA, 13 nt, Homo sapiens
ugcuuugugauuu

SEQ ID NO: 241616 - RNA, 19 nt, Homo sapiens
ugggcuggugucaccugaa

SEQ ID NO: 241617 - RNA, 17 nt, Homo sapiens
ugaaaaaauaacacugu

SEQ ID NO: 241618 - RNA, 17 nt, Homo sapiens
auucucauuugucacac

SEQ ID NO: 241619 - RNA, 22 nt, Homo sapiens
aaaaaugcuugcuucaacccca

SEQ ID NO: 241620 - RNA, 21 nt, Homo sapiens
ucuuagauguauauauuuccu

SEQ ID NO: 241621 - RNA, 17 nt, Homo sapiens
guacguugugcauuugg

SEQ ID NO: 241622 - RNA, 22 nt, Homo sapiens
acugcaucguuucaucuuccaa

SEQ ID NO: 241623 - RNA, 14 nt, Homo sapiens
acauucuguuaauc

SEQ ID NO: 241624 - RNA, 15 nt, Homo sapiens
uggucccccuuccau

SEQ ID NO: 241625 - RNA, 12 nt, Homo sapiens
ucaccaagccca

SEQ ID NO: 241626 - RNA, 17 nt, Homo sapiens
gaaaacacuguucucug

SEQ ID NO: 241627 - RNA, 20 nt, Homo sapiens
augaucacggcucacugcag

SEQ ID NO: 241628 - RNA, 14 nt, Homo sapiens
uacaggugugaguc

SEQ ID NO: 241629 - RNA, 14 nt, Homo sapiens
uugggcuucauccu

SEQ ID NO: 241630 - RNA, 13 nt, Homo sapiens
gcaggauucuucc

SEQ ID NO: 241631 - RNA, 15 nt, Homo sapiens
aaggaugcccaaaga

SEQ ID NO: 241632 - RNA, 16 nt, Homo sapiens
uaucuagauacuguau

SEQ ID NO: 241633 - RNA, 21 nt, Homo sapiens
uaacauguaauuaaguacuau

SEQ ID NO: 241634 - RNA, 22 nt, Homo sapiens
uggucaccaaaucagcugcuac

SEQ ID NO: 241635 - RNA, 16 nt, Homo sapiens
gaaugcagugguauga

SEQ ID NO: 241636 - RNA, 23 nt, Homo sapiens
caaagcucuuuugagcauuuaga

SEQ ID NO: 241637 - RNA, 19 nt, Homo sapiens
ucauacucaccucacccca

SEQ ID NO: 241638 - RNA, 20 nt, Homo sapiens
cugcaucaagaugugacaug

SEQ ID NO: 241639 - RNA, 22 nt, Homo sapiens
cucaagugauucuccugccuca

SEQ ID NO: 241640 - RNA, 16 nt, Homo sapiens
uggcuuuugugcauua

SEQ ID NO: 241641 - RNA, 18 nt, Homo sapiens
ucuggagguacgaaaaga

SEQ ID NO: 241642 - RNA, 19 nt, Homo sapiens
accagagcugccaccugcc

SEQ ID NO: 241643 - RNA, 20 nt, Homo sapiens
acaagcgugagccacugcac

SEQ ID NO: 241644 - RNA, 11 nt, Homo sapiens
cucagugccac

SEQ ID NO: 241645 - RNA, 22 nt, Homo sapiens
acuauagccuaggugacagagu

SEQ ID NO: 241646 - RNA, 16 nt, Homo sapiens
augcucugcauguuac

SEQ ID NO: 241647 - RNA, 19 nt, Homo sapiens
ggagcugccuguucagcuc

SEQ ID NO: 241648 - RNA, 15 nt, Homo sapiens
ucaagaugugacaug

SEQ ID NO: 241649 - RNA, 14 nt, Homo sapiens
uggaauaacaugua

SEQ ID NO: 241650 - RNA, 19 nt, Homo sapiens
guuuaaaaauccccaaaaa

SEQ ID NO: 241651 - RNA, 17 nt, Homo sapiens
ccaauauuuaccagacc

SEQ ID NO: 241652 - RNA, 17 nt, Homo sapiens
gagucgaggacagggag

SEQ ID NO: 241653 - RNA, 20 nt, Homo sapiens
ugaauaauacaguaucucag

SEQ ID NO: 241654 - RNA, 23 nt, Homo sapiens
cacuguuuuauuuuaauucaguu

SEQ ID NO: 241655 - RNA, 14 nt, Homo sapiens
cuuuccuucauuca

SEQ ID NO: 241656 - RNA, 19 nt, Homo sapiens
guucuggcucuuccaggcu

SEQ ID NO: 241657 - RNA, 22 nt, Homo sapiens
cauuuuggauucuuauggacaa

SEQ ID NO: 241658 - RNA, 22 nt, Homo sapiens
gaaugaaugucagugugacuga

SEQ ID NO: 241659 - RNA, 19 nt, Homo sapiens
gaaugcagagaugugcccc

SEQ ID NO: 241660 - RNA, 19 nt, Homo sapiens
cauuaucuagauacuguau

SEQ ID NO: 241661 - RNA, 15 nt, Homo sapiens
aagaagcucucuccu

SEQ ID NO: 241662 - RNA, 22 nt, Homo sapiens
cgcuaaaugaaaaucgugacaa

SEQ ID NO: 241663 - RNA, 21 nt, Homo sapiens
gugaugaugaaaugaggucag

SEQ ID NO: 241664 - RNA, 13 nt, Homo sapiens
cuccuuguguuac

SEQ ID NO: 241665 - RNA, 23 nt, Homo sapiens
gcagguuggugggggccucggug

SEQ ID NO: 241666 - RNA, 16 nt, Homo sapiens
uagacagagucucacu

SEQ ID NO: 241667 - RNA, 19 nt, Homo sapiens
aacagguuuuccugaagaa

SEQ ID NO: 241668 - RNA, 18 nt, Homo sapiens
ugcccggcaggguccuag

SEQ ID NO: 241669 - RNA, 23 nt, Homo sapiens
ucugcuuuuuaaagaaugcucuu

SEQ ID NO: 241670 - RNA, 17 nt, Homo sapiens
uggccccugcccggcug

SEQ ID NO: 241671 - RNA, 12 nt, Homo sapiens
ccggcugcgugg

SEQ ID NO: 241672 - RNA, 21 nt, Homo sapiens
gaauuucccaaagcagugcau

SEQ ID NO: 241673 - RNA, 15 nt, Homo sapiens
uggggaccucaggcc

SEQ ID NO: 241674 - RNA, 22 nt, Homo sapiens
aaugaaaccugugucucugaga

SEQ ID NO: 241675 - RNA, 13 nt, Homo sapiens
ccugaagucacac

SEQ ID NO: 241676 - RNA, 15 nt, Homo sapiens
agguacgaaaagagg

SEQ ID NO: 241677 - RNA, 13 nt, Homo sapiens
ugccucucucagg

SEQ ID NO: 241678 - RNA, 15 nt, Homo sapiens
caaacucaccugccc

SEQ ID NO: 241679 - RNA, 16 nt, Homo sapiens
gaucaaaguugaugaa

SEQ ID NO: 241680 - RNA, 14 nt, Homo sapiens
ggcuuggggaccag

SEQ ID NO: 241681 - RNA, 14 nt, Homo sapiens
uaguggugugauuu

SEQ ID NO: 241682 - RNA, 23 nt, Homo sapiens
uauacacuuacacuuuaugcaca

SEQ ID NO: 241683 - RNA, 22 nt, Homo sapiens
aacgccuguaggaagaaaaagg

SEQ ID NO: 241684 - RNA, 14 nt, Homo sapiens
ugaccucaggugau

SEQ ID NO: 241685 - RNA, 16 nt, Homo sapiens
accccucaacaccucu

SEQ ID NO: 241686 - RNA, 13 nt, Homo sapiens
ugaagcugagaug

SEQ ID NO: 241687 - RNA, 15 nt, Homo sapiens
cuuacuuaggugugg

SEQ ID NO: 241688 - RNA, 18 nt, Homo sapiens
accuggccucugcacucc

SEQ ID NO: 241689 - RNA, 16 nt, Homo sapiens
auucauaaugacuuaa

SEQ ID NO: 241690 - RNA, 16 nt, Homo sapiens
uggggagaaaguacuu

SEQ ID NO: 241691 - RNA, 19 nt, Homo sapiens
cucccaaagugcugggauu

SEQ ID NO: 241692 - RNA, 21 nt, Homo sapiens
uuguacauaaugcgugcauac

SEQ ID NO: 241693 - RNA, 15 nt, Homo sapiens
cagggugagcacucu

SEQ ID NO: 241694 - RNA, 14 nt, Homo sapiens
cauggaaguacuau

SEQ ID NO: 241695 - RNA, 14 nt, Homo sapiens
caucaugucuggcu

SEQ ID NO: 241696 - RNA, 20 nt, Homo sapiens
uguguucaugcacacuugca

SEQ ID NO: 241697 - RNA, 22 nt, Homo sapiens
ggagaguaacccugucuaauga

SEQ ID NO: 241698 - RNA, 19 nt, Homo sapiens
aggguugggcuggugucac

SEQ ID NO: 241699 - RNA, 23 nt, Homo sapiens
aacacucacauuuauucugcuca

SEQ ID NO: 241700 - RNA, 17 nt, Homo sapiens
ccuaggcauuugcugaa

SEQ ID NO: 241701 - RNA, 20 nt, Homo sapiens
aaggcugucaauuacaggaa

SEQ ID NO: 241702 - RNA, 21 nt, Homo sapiens
cuugagaauuacccuuuugcc

SEQ ID NO: 241703 - RNA, 23 nt, Homo sapiens
agaaccaaaaagaggcuauguga

SEQ ID NO: 241704 - RNA, 19 nt, Homo sapiens
cccacuggaggcaugugau

SEQ ID NO: 241705 - RNA, 18 nt, Homo sapiens
cacugaugggcaaccccc

SEQ ID NO: 241706 - RNA, 17 nt, Homo sapiens
uagaagucuuagaugua

SEQ ID NO: 241707 - RNA, 16 nt, Homo sapiens
aggugauccacccacc

SEQ ID NO: 241708 - RNA, 16 nt, Homo sapiens
acaagcugcacccuca

SEQ ID NO: 241709 - RNA, 14 nt, Homo sapiens
gcuaggaacacucc

SEQ ID NO: 241710 - RNA, 17 nt, Homo sapiens
cuuagguuggcaaaaag

SEQ ID NO: 241711 - RNA, 10 nt, Homo sapiens
cucacuccuu

SEQ ID NO: 241712 - RNA, 13 nt, Homo sapiens
augaauacagaua

SEQ ID NO: 241713 - RNA, 15 nt, Homo sapiens
aaggguaucugguga

SEQ ID NO: 241714 - RNA, 19 nt, Homo sapiens
agggagggcuccagacaca

SEQ ID NO: 241715 - RNA, 12 nt, Homo sapiens
uauacauuugau

SEQ ID NO: 241716 - RNA, 22 nt, Homo sapiens
ugcaagaauugaagcaggacua

SEQ ID NO: 241717 - RNA, 20 nt, Homo sapiens
agcucacauagauaugacuu

SEQ ID NO: 241718 - RNA, 17 nt, Homo sapiens
acuuggaaaugggagac

SEQ ID NO: 241719 - RNA, 20 nt, Homo sapiens
cuuggugucgggcaugacac

SEQ ID NO: 241720 - RNA, 15 nt, Homo sapiens
agaccgugugugaaa

SEQ ID NO: 241721 - RNA, 15 nt, Homo sapiens
ucaaggcugcaguga

SEQ ID NO: 241722 - RNA, 19 nt, Homo sapiens
aauuuagaaauauaauuga

SEQ ID NO: 241723 - RNA, 17 nt, Homo sapiens
gccagcaggcucucagg

SEQ ID NO: 241724 - RNA, 18 nt, Homo sapiens
acaugaucuucuuuauaa

SEQ ID NO: 241725 - RNA, 14 nt, Homo sapiens
uuaagagaaaugag

SEQ ID NO: 241726 - RNA, 16 nt, Homo sapiens
uucuucccuacaguug

SEQ ID NO: 241727 - RNA, 20 nt, Homo sapiens
ucuguuggccagugugacaa

SEQ ID NO: 241728 - RNA, 18 nt, Homo sapiens
uggucccccuuccaugga

SEQ ID NO: 241729 - RNA, 16 nt, Homo sapiens
auuugcugaauacaga

SEQ ID NO: 241730 - RNA, 16 nt, Homo sapiens
aacucuugaccucagg

SEQ ID NO: 241731 - RNA, 21 nt, Homo sapiens
ucagugccaaaaacaacaaca

SEQ ID NO: 241732 - RNA, 14 nt, Homo sapiens
acuggcugcaaagg

SEQ ID NO: 241733 - RNA, 22 nt, Homo sapiens
agaaaguacuucuccacccugc

SEQ ID NO: 241734 - RNA, 22 nt, Homo sapiens
agugcuuguuccucucaucucc

SEQ ID NO: 241735 - RNA, 12 nt, Homo sapiens
aauaacacugua

SEQ ID NO: 241736 - RNA, 21 nt, Homo sapiens
aucagccugggcaaugugaua

SEQ ID NO: 241737 - RNA, 14 nt, Homo sapiens
auccuagcacuuug

SEQ ID NO: 241738 - RNA, 19 nt, Homo sapiens
cacuauaauguaagcucua

SEQ ID NO: 241739 - RNA, 14 nt, Homo sapiens
gugggauccuccag

SEQ ID NO: 241740 - RNA, 19 nt, Homo sapiens
auauuuugcuuugugauuu

SEQ ID NO: 241741 - RNA, 19 nt, Homo sapiens
cacauguccaagaagccca

SEQ ID NO: 241742 - RNA, 17 nt, Homo sapiens
uccaaggguacuaagga

SEQ ID NO: 241743 - RNA, 17 nt, Homo sapiens
cacaugcaaggucauuu

SEQ ID NO: 241744 - RNA, 17 nt, Homo sapiens
acuggaacacuaaugag

SEQ ID NO: 241745 - RNA, 14 nt, Homo sapiens
uagaaauuccccac

SEQ ID NO: 241746 - RNA, 22 nt, Homo sapiens
guaagcucuacugaggugcuau

SEQ ID NO: 241747 - RNA, 12 nt, Homo sapiens
aaaacacaacau

SEQ ID NO: 241748 - RNA, 21 nt, Homo sapiens
aagugcugggauuacaggugu

SEQ ID NO: 241749 - RNA, 17 nt, Homo sapiens
uucaccacaugugcaca

SEQ ID NO: 241750 - RNA, 13 nt, Homo sapiens
caguguacaugga

SEQ ID NO: 241751 - RNA, 20 nt, Homo sapiens
cugggagagccuuccagggg

SEQ ID NO: 241752 - RNA, 14 nt, Homo sapiens
auuguuuucagugu

SEQ ID NO: 241753 - RNA, 13 nt, Homo sapiens
ggagaggggcaca

SEQ ID NO: 241754 - RNA, 15 nt, Homo sapiens
acacucuugguagaa

SEQ ID NO: 241755 - RNA, 14 nt, Homo sapiens
uugcaauggcagcc

SEQ ID NO: 241756 - RNA, 14 nt, Homo sapiens
cucuacaaaaagca

SEQ ID NO: 241757 - RNA, 20 nt, Homo sapiens
uagaauuugggggaaaauuu

SEQ ID NO: 241758 - RNA, 16 nt, Homo sapiens
guuugaaccaagaacu

SEQ ID NO: 241759 - RNA, 15 nt, Homo sapiens
guauucuuauuuaau

SEQ ID NO: 241760 - RNA, 23 nt, Homo sapiens
cgccagauucuuuccugaggcug

SEQ ID NO: 241761 - RNA, 15 nt, Homo sapiens
ccacuuugauaccau

SEQ ID NO: 241762 - RNA, 18 nt, Homo sapiens
guacuacaguccucccau

SEQ ID NO: 241763 - RNA, 20 nt, Homo sapiens
cagacucuacagaggccaug

SEQ ID NO: 241764 - RNA, 20 nt, Homo sapiens
acacugcauguuugugauug

SEQ ID NO: 241765 - RNA, 23 nt, Homo sapiens
uagauuuuagacccuauugcugc

SEQ ID NO: 241766 - RNA, 15 nt, Homo sapiens
gggaggggaagaaaa

SEQ ID NO: 241767 - RNA, 18 nt, Homo sapiens
gagauagccaaggccaaa

SEQ ID NO: 241768 - RNA, 18 nt, Homo sapiens
cuacucgaguuacagaca

SEQ ID NO: 241769 - RNA, 15 nt, Homo sapiens
ugaacagaacaaaag

SEQ ID NO: 241770 - RNA, 17 nt, Homo sapiens
aagugaagacaaugacu

SEQ ID NO: 241771 - RNA, 18 nt, Homo sapiens
aaaggaugcacagaguug

SEQ ID NO: 241772 - RNA, 16 nt, Homo sapiens
guuggucccccuucca

SEQ ID NO: 241773 - RNA, 21 nt, Homo sapiens
aggauauaguuaucaaucucu

SEQ ID NO: 241774 - RNA, 14 nt, Homo sapiens
gcucacugcagccu

SEQ ID NO: 241775 - RNA, 11 nt, Homo sapiens
acugaccaguu

SEQ ID NO: 241776 - RNA, 13 nt, Homo sapiens
cucauuugucaca

SEQ ID NO: 241777 - RNA, 16 nt, Homo sapiens
ugaguacguugugcau

SEQ ID NO: 241778 - RNA, 15 nt, Homo sapiens
ccuaauccucuagga

SEQ ID NO: 241779 - RNA, 14 nt, Homo sapiens
agcuuaucucaggg

SEQ ID NO: 241780 - RNA, 19 nt, Homo sapiens
ucagcaauacagacuacuu

SEQ ID NO: 241781 - RNA, 13 nt, Homo sapiens
caaagcagugcau

SEQ ID NO: 241782 - RNA, 23 nt, Homo sapiens
cugcagagggcacagaaaaugga

SEQ ID NO: 241783 - RNA, 22 nt, Homo sapiens
ccugggugacagagcaagugag

SEQ ID NO: 241784 - RNA, 16 nt, Homo sapiens
acaugugcacaugcac

SEQ ID NO: 241785 - RNA, 22 nt, Homo sapiens
acaguucaauucucauuuguca

SEQ ID NO: 241786 - RNA, 15 nt, Homo sapiens
auguaagcucuacug

SEQ ID NO: 241787 - RNA, 20 nt, Homo sapiens
accaugauuaaccacuucag

SEQ ID NO: 241788 - RNA, 19 nt, Homo sapiens
gcacagacccugcccugug

SEQ ID NO: 241789 - RNA, 15 nt, Homo sapiens
acacuuacacuuuau

SEQ ID NO: 241790 - RNA, 18 nt, Homo sapiens
acuauaauguaagcucua

SEQ ID NO: 241791 - RNA, 24 nt, Homo sapiens
ugugcucugaucauccacugugcc

SEQ ID NO: 241792 - RNA, 17 nt, Homo sapiens
uaauaauaaaacaacag

SEQ ID NO: 241793 - RNA, 15 nt, Homo sapiens
aaugggagacggggg

SEQ ID NO: 241794 - RNA, 14 nt, Homo sapiens
acccaccccagugc

SEQ ID NO: 241795 - RNA, 16 nt, Homo sapiens
agagcugggugucaag

SEQ ID NO: 241796 - RNA, 21 nt, Homo sapiens
acacauuuuuuaaaugcaccu

SEQ ID NO: 241797 - RNA, 18 nt, Homo sapiens
auuuuuuugagacagagu

SEQ ID NO: 241798 - RNA, 15 nt, Homo sapiens
acaguccucccaucu

SEQ ID NO: 241799 - RNA, 23 nt, Homo sapiens
aaaaccaccaccaucaccagaca

SEQ ID NO: 241800 - RNA, 12 nt, Homo sapiens
guucccauuugc

SEQ ID NO: 241801 - RNA, 13 nt, Homo sapiens
uacgccaggggaa

SEQ ID NO: 241802 - RNA, 21 nt, Homo sapiens
gaaccacucuaucaaguauua

SEQ ID NO: 241803 - RNA, 17 nt, Homo sapiens
gccagcuuaucucaggg

SEQ ID NO: 241804 - RNA, 16 nt, Homo sapiens
uguucaugcacacuug

SEQ ID NO: 241805 - RNA, 18 nt, Homo sapiens
cuaacuuuccuucauuca

SEQ ID NO: 241806 - RNA, 16 nt, Homo sapiens
ucuaugacacaugcaa

SEQ ID NO: 241807 - RNA, 15 nt, Homo sapiens
cuuaccugccaggaa

SEQ ID NO: 241808 - RNA, 14 nt, Homo sapiens
ucuucucuacucua

SEQ ID NO: 241809 - RNA, 22 nt, Homo sapiens
caauuauuuauuaaaugcccag

SEQ ID NO: 241810 - RNA, 16 nt, Homo sapiens
aaaggaugcccaaaga

SEQ ID NO: 241811 - RNA, 17 nt, Homo sapiens
uuccacaaguuaaauaa

SEQ ID NO: 241812 - RNA, 14 nt, Homo sapiens
cuuauacauuugau

SEQ ID NO: 241813 - RNA, 22 nt, Homo sapiens
ucaaaagguuaauaaaguaauu

SEQ ID NO: 241814 - RNA, 16 nt, Homo sapiens
cccacugcucugguua

SEQ ID NO: 241815 - RNA, 14 nt, Homo sapiens
uggaacacuaauga

SEQ ID NO: 241816 - RNA, 22 nt, Homo sapiens
acacugugcugagucugaaggc

SEQ ID NO: 241817 - RNA, 22 nt, Homo sapiens
gcagaguugaagacagagcuac

SEQ ID NO: 241818 - RNA, 14 nt, Homo sapiens
ucucucuucuccac

SEQ ID NO: 241819 - RNA, 19 nt, Homo sapiens
cucuuucccucccuuccuc

SEQ ID NO: 241820 - RNA, 18 nt, Homo sapiens
gaaagaccgugugugaaa

SEQ ID NO: 241821 - RNA, 14 nt, Homo sapiens
uaucccuacuguaa

SEQ ID NO: 241822 - RNA, 13 nt, Homo sapiens
uggucugacccac

SEQ ID NO: 241823 - RNA, 23 nt, Homo sapiens
gaauccagagagcaguguggaaa

SEQ ID NO: 241824 - RNA, 17 nt, Homo sapiens
ucuuaauucuuagcuca

SEQ ID NO: 241825 - RNA, 22 nt, Homo sapiens
aaacacauacaggaagguagaa

SEQ ID NO: 241826 - RNA, 13 nt, Homo sapiens
ccagcugcuuggg

SEQ ID NO: 241827 - RNA, 22 nt, Homo sapiens
uuccugaagaauugaaaaacca

SEQ ID NO: 241828 - RNA, 22 nt, Homo sapiens
gugccucugggacuggacaauu

SEQ ID NO: 241829 - RNA, 14 nt, Homo sapiens
cacuguugcccagg

SEQ ID NO: 241830 - RNA, 19 nt, Homo sapiens
uaguuugcaguuacacuaa

SEQ ID NO: 241831 - RNA, 21 nt, Homo sapiens
agguuuuccugaagaauugaa

SEQ ID NO: 241832 - RNA, 19 nt, Homo sapiens
ucuucuccacuuucuagcc

SEQ ID NO: 241833 - RNA, 19 nt, Homo sapiens
cacugcacuauagccuagg

SEQ ID NO: 241834 - RNA, 22 nt, Homo sapiens
uuauauugccauuucuuccaca

SEQ ID NO: 241835 - RNA, 23 nt, Homo sapiens
guucaucauccuaagcuauucag

SEQ ID NO: 241836 - RNA, 20 nt, Homo sapiens
ugaggauuuugauccaagcu

SEQ ID NO: 241837 - RNA, 19 nt, Homo sapiens
acuucuuauacauuugaua

SEQ ID NO: 241838 - RNA, 14 nt, Homo sapiens
agauaaaugugcug

SEQ ID NO: 241839 - RNA, 15 nt, Homo sapiens
gaaugcgggggagca

SEQ ID NO: 241840 - RNA, 20 nt, Homo sapiens
gcuuguaaauagcucaggug

SEQ ID NO: 241841 - RNA, 16 nt, Homo sapiens
cauuucugagaucaaa

SEQ ID NO: 241842 - RNA, 18 nt, Homo sapiens
ucacuucccuacauggag

SEQ ID NO: 241843 - RNA, 16 nt, Homo sapiens
acucagaagacacuga

SEQ ID NO: 241844 - RNA, 13 nt, Homo sapiens
cccugcccggcug

SEQ ID NO: 241845 - RNA, 21 nt, Homo sapiens
aucuuccaaggguacuaagga

SEQ ID NO: 241846 - RNA, 17 nt, Homo sapiens
auuagccaaguguggua

SEQ ID NO: 241847 - RNA, 21 nt, Homo sapiens
cuguaauccuagcacuuuggg

SEQ ID NO: 241848 - RNA, 15 nt, Homo sapiens
cccaccaucaugucu

SEQ ID NO: 241849 - RNA, 16 nt, Homo sapiens
aggggaagagacuugg

SEQ ID NO: 241850 - RNA, 16 nt, Homo sapiens
aagacuuuucuuucag

SEQ ID NO: 241851 - RNA, 21 nt, Homo sapiens
ugggguacccacugcucuggu

SEQ ID NO: 241852 - RNA, 15 nt, Homo sapiens
agcucuuuugagcau

SEQ ID NO: 241853 - RNA, 12 nt, Homo sapiens
aaacugcacugu

SEQ ID NO: 241854 - RNA, 23 nt, Homo sapiens
accucugccugaagucacacagu

SEQ ID NO: 241855 - RNA, 11 nt, Homo sapiens
acuuacuguac

SEQ ID NO: 241856 - RNA, 22 nt, Homo sapiens
acuuuguuuagcccaaaaccaa

SEQ ID NO: 241857 - RNA, 19 nt, Homo sapiens
cacgugguccuaaucuucu

SEQ ID NO: 241858 - RNA, 17 nt, Homo sapiens
cuguucucugcccucca

SEQ ID NO: 241859 - RNA, 20 nt, Homo sapiens
aagaugcuucucacugccau

SEQ ID NO: 241860 - RNA, 16 nt, Homo sapiens
gcaucaagaugugaca

SEQ ID NO: 241861 - RNA, 16 nt, Homo sapiens
uucagccaagaauucu

SEQ ID NO: 241862 - RNA, 20 nt, Homo sapiens
cugaucucucgugauugaua

SEQ ID NO: 241863 - RNA, 23 nt, Homo sapiens
gaacacuaaugaggaaacugcac

SEQ ID NO: 241864 - RNA, 20 nt, Homo sapiens
ggcacucagaagacacugau

SEQ ID NO: 241865 - RNA, 15 nt, Homo sapiens
agucucuugauucau

SEQ ID NO: 241866 - RNA, 17 nt, Homo sapiens
agucuuuguacagacaa

SEQ ID NO: 241867 - RNA, 14 nt, Homo sapiens
agcagagguuggga

SEQ ID NO: 241868 - RNA, 16 nt, Homo sapiens
agcauacguacacauu

SEQ ID NO: 241869 - RNA, 15 nt, Homo sapiens
guggucuaaacaaaa

SEQ ID NO: 241870 - RNA, 21 nt, Homo sapiens
gauggccauguauuaccugaa

SEQ ID NO: 241871 - RNA, 20 nt, Homo sapiens
cuuaaauauguggaguucau

SEQ ID NO: 241872 - RNA, 20 nt, Homo sapiens
accuuuaagagaaaugagcu

SEQ ID NO: 241873 - RNA, 23 nt, Homo sapiens
gugaaccaccacacccagcccac

SEQ ID NO: 241874 - RNA, 21 nt, Homo sapiens
caaaaagaggcuaugugagca

SEQ ID NO: 241875 - RNA, 17 nt, Homo sapiens
ugaguacguugugcauu

SEQ ID NO: 241876 - RNA, 13 nt, Homo sapiens
aguugaagacaga

SEQ ID NO: 241877 - RNA, 22 nt, Homo sapiens
gcucagcaaaagaugcuucuca

SEQ ID NO: 241878 - RNA, 21 nt, Homo sapiens
accaucucuccuccuuuucac

SEQ ID NO: 241879 - RNA, 16 nt, Homo sapiens
caaaaguuuaaaaagc

SEQ ID NO: 241880 - RNA, 13 nt, Homo sapiens
gugcccccaugua

SEQ ID NO: 241881 - RNA, 16 nt, Homo sapiens
aaaaggggggugggag

SEQ ID NO: 241882 - RNA, 22 nt, Homo sapiens
cagcuuaucucaggggugugcg

SEQ ID NO: 241883 - RNA, 23 nt, Homo sapiens
agccacuauuguuagucucuuga

SEQ ID NO: 241884 - RNA, 18 nt, Homo sapiens
cuccugggcuaagugauc

SEQ ID NO: 241885 - RNA, 15 nt, Homo sapiens
ugaaugaugccauga

SEQ ID NO: 241886 - RNA, 20 nt, Homo sapiens
cgagauugcaccacugcacu

SEQ ID NO: 241887 - RNA, 16 nt, Homo sapiens
agcaucuaugugagac

SEQ ID NO: 241888 - RNA, 17 nt, Homo sapiens
acauuccugaugcuucu

SEQ ID NO: 241889 - RNA, 17 nt, Homo sapiens
gacucuuuggacacuca

SEQ ID NO: 241890 - RNA, 17 nt, Homo sapiens
cucuuauccaacaucaa

SEQ ID NO: 241891 - RNA, 22 nt, Homo sapiens
aaugguuuucuuguguguuuau

SEQ ID NO: 241892 - RNA, 11 nt, Homo sapiens
uggaagacagc

SEQ ID NO: 241893 - RNA, 18 nt, Homo sapiens
auuuuagagacagaagaa

SEQ ID NO: 241894 - RNA, 20 nt, Homo sapiens
gcuuaaaggggcuagaguga

SEQ ID NO: 241895 - RNA, 11 nt, Homo sapiens
cgaguuacaga

SEQ ID NO: 241896 - RNA, 15 nt, Homo sapiens
acuuuccucuuccac

SEQ ID NO: 241897 - RNA, 13 nt, Homo sapiens
ugcacacaccaga

SEQ ID NO: 241898 - RNA, 16 nt, Homo sapiens
caaugcuuugaucccu

SEQ ID NO: 241899 - RNA, 20 nt, Homo sapiens
aagauucauauuuacuucuu

SEQ ID NO: 241900 - RNA, 15 nt, Homo sapiens
aucaagaugugacau

SEQ ID NO: 241901 - RNA, 15 nt, Homo sapiens
ugauuaaauucuugc

SEQ ID NO: 241902 - RNA, 24 nt, Homo sapiens
agcgugcauaaguuaacuuccaau

SEQ ID NO: 241903 - RNA, 17 nt, Homo sapiens
aucagccugcuccagcu

SEQ ID NO: 241904 - RNA, 22 nt, Homo sapiens
agcuacuguuuauuauuuuauu

SEQ ID NO: 241905 - RNA, 16 nt, Homo sapiens
accaguuguugauaac

SEQ ID NO: 241906 - RNA, 16 nt, Homo sapiens
acuugagaauuacccu

SEQ ID NO: 241907 - RNA, 17 nt, Homo sapiens
ucaaaauaaaaaugagg

SEQ ID NO: 241908 - RNA, 20 nt, Homo sapiens
caucauccuaagcuauucag

SEQ ID NO: 241909 - RNA, 14 nt, Homo sapiens
ccagcuuaucucag

SEQ ID NO: 241910 - RNA, 13 nt, Homo sapiens
aaguuugagauca

SEQ ID NO: 241911 - RNA, 16 nt, Homo sapiens
cucccaggcauucccc

SEQ ID NO: 241912 - RNA, 16 nt, Homo sapiens
uacucgaguuacagac

SEQ ID NO: 241913 - RNA, 12 nt, Homo sapiens
acauacucccau

SEQ ID NO: 241914 - RNA, 15 nt, Homo sapiens
gacagagcaagugag

SEQ ID NO: 241915 - RNA, 16 nt, Homo sapiens
aagucagcacuaccuc

SEQ ID NO: 241916 - RNA, 13 nt, Homo sapiens
ggagaaaauggac

SEQ ID NO: 241917 - RNA, 19 nt, Homo sapiens
aaauaacacuguacugcaa

SEQ ID NO: 241918 - RNA, 12 nt, Homo sapiens
uggcaccagcag

SEQ ID NO: 241919 - RNA, 19 nt, Homo sapiens
ugcucacauaucugucauu

SEQ ID NO: 241920 - RNA, 20 nt, Homo sapiens
ucuuugcagacaggcaagca

SEQ ID NO: 241921 - RNA, 15 nt, Homo sapiens
uuccauggacuuugu

SEQ ID NO: 241922 - RNA, 23 nt, Homo sapiens
aggggagcaaaaucgaugcagug

SEQ ID NO: 241923 - RNA, 20 nt, Homo sapiens
guguuuauauauaagccaaa

SEQ ID NO: 241924 - RNA, 15 nt, Homo sapiens
acuauguugcccagg

SEQ ID NO: 241925 - RNA, 13 nt, Homo sapiens
cagagcaagugag

SEQ ID NO: 241926 - RNA, 20 nt, Homo sapiens
ggaaacagcuaaugggacac

SEQ ID NO: 241927 - RNA, 12 nt, Homo sapiens
acuguacaugaa

SEQ ID NO: 241928 - RNA, 22 nt, Homo sapiens
cauagagagcaagacgcugugc

SEQ ID NO: 241929 - RNA, 21 nt, Homo sapiens
aggaugaaagugaccauguuu

SEQ ID NO: 241930 - RNA, 20 nt, Homo sapiens
ugggugucaagagggucuga

SEQ ID NO: 241931 - RNA, 18 nt, Homo sapiens
auggcugccaaugggagc

SEQ ID NO: 241932 - RNA, 21 nt, Homo sapiens
aggccagagggagugacagag

SEQ ID NO: 241933 - RNA, 14 nt, Homo sapiens
aagagucucuauua

SEQ ID NO: 241934 - RNA, 19 nt, Homo sapiens
auuuaacagaaauguacag

SEQ ID NO: 241935 - RNA, 14 nt, Homo sapiens
uacuuguggacaca

SEQ ID NO: 241936 - RNA, 19 nt, Homo sapiens
uuagaaaaaccaccaccau

SEQ ID NO: 241937 - RNA, 14 nt, Homo sapiens
guaugaggcauuug

SEQ ID NO: 241938 - RNA, 15 nt, Homo sapiens
aaauaacacuguacu

SEQ ID NO: 241939 - RNA, 14 nt, Homo sapiens
augaaaauucuuga

SEQ ID NO: 241940 - RNA, 19 nt, Homo sapiens
cuggccagaugcaccagcc

SEQ ID NO: 241941 - RNA, 13 nt, Homo sapiens
acuguugcccagg

SEQ ID NO: 241942 - RNA, 21 nt, Homo sapiens
aagcacaugccucucucaggc

SEQ ID NO: 241943 - RNA, 13 nt, Homo sapiens
ugcuaaaugugaa

SEQ ID NO: 241944 - RNA, 21 nt, Homo sapiens
aauagcugggacuacaggugu

SEQ ID NO: 241945 - RNA, 20 nt, Homo sapiens
uugagaauuacccuuuugcc

SEQ ID NO: 241946 - RNA, 13 nt, Homo sapiens
uuucuacucgagu

SEQ ID NO: 241947 - RNA, 18 nt, Homo sapiens
ccaaacacauacaggaag

SEQ ID NO: 241948 - RNA, 21 nt, Homo sapiens
ugaacuccuggccucaaguga

SEQ ID NO: 241949 - RNA, 13 nt, Homo sapiens
uugaacaaacugg

SEQ ID NO: 241950 - RNA, 17 nt, Homo sapiens
uaggugaggaagcaaaa

SEQ ID NO: 241951 - RNA, 20 nt, Homo sapiens
cuuuacuucauggacuucca

SEQ ID NO: 241952 - RNA, 14 nt, Homo sapiens
acuuuguguucacc

SEQ ID NO: 241953 - RNA, 17 nt, Homo sapiens
gagccuccugcccuuac

SEQ ID NO: 241954 - RNA, 14 nt, Homo sapiens
cuccauguuugaug

SEQ ID NO: 241955 - RNA, 13 nt, Homo sapiens
ucccuuucuuccc

SEQ ID NO: 241956 - RNA, 15 nt, Homo sapiens
aacacuguacugcaa

SEQ ID NO: 241957 - RNA, 22 nt, Homo sapiens
ucuaaauaauaauaaaacaaca

SEQ ID NO: 241958 - RNA, 17 nt, Homo sapiens
uuaagagaaaugagcug

SEQ ID NO: 241959 - RNA, 20 nt, Homo sapiens
agcugcuugggcuucauccu

SEQ ID NO: 241960 - RNA, 16 nt, Homo sapiens
aguaucccuacuguaa

SEQ ID NO: 241961 - RNA, 15 nt, Homo sapiens
aaguaaggcaugguu

SEQ ID NO: 241962 - RNA, 17 nt, Homo sapiens
cuguacaaaguagaagu

SEQ ID NO: 241963 - RNA, 22 nt, Homo sapiens
ccacaagacccuugugguccca

SEQ ID NO: 241964 - RNA, 15 nt, Homo sapiens
auuuugauccaagcu

SEQ ID NO: 241965 - RNA, 18 nt, Homo sapiens
accauuuagcacacugcu

SEQ ID NO: 241966 - RNA, 18 nt, Homo sapiens
agaagaaaauaguggugu

SEQ ID NO: 241967 - RNA, 16 nt, Homo sapiens
guucagguaacaggca

SEQ ID NO: 241968 - RNA, 13 nt, Homo sapiens
ugcccacacuugg

SEQ ID NO: 241969 - RNA, 18 nt, Homo sapiens
aagaccuucuccuucacc

SEQ ID NO: 241970 - RNA, 18 nt, Homo sapiens
ggcacucagaagacacug

SEQ ID NO: 241971 - RNA, 20 nt, Homo sapiens
aucgucacugcuuaacuuca

SEQ ID NO: 241972 - RNA, 15 nt, Homo sapiens
ggaagacaaugugaa

SEQ ID NO: 241973 - RNA, 16 nt, Homo sapiens
aggugaggaagcaaaa

SEQ ID NO: 241974 - RNA, 23 nt, Homo sapiens
agcugggguggggaccucaggcc

SEQ ID NO: 241975 - RNA, 22 nt, Homo sapiens
acuaaggugugcucugaucauc

SEQ ID NO: 241976 - RNA, 11 nt, Homo sapiens
accugaagucu

SEQ ID NO: 241977 - RNA, 22 nt, Homo sapiens
uucaguguacauggaauaacau

SEQ ID NO: 241978 - RNA, 20 nt, Homo sapiens
aaccuggguaacuagggaag

SEQ ID NO: 241979 - RNA, 14 nt, Homo sapiens
cacaugcacgugug

SEQ ID NO: 241980 - RNA, 21 nt, Homo sapiens
cucugagaguagagucacugg

SEQ ID NO: 241981 - RNA, 12 nt, Homo sapiens
cgaucuggguuc

SEQ ID NO: 241982 - RNA, 21 nt, Homo sapiens
gaaaacaugcuacacacugca

SEQ ID NO: 241983 - RNA, 20 nt, Homo sapiens
uacauggaauaacauguaau

SEQ ID NO: 241984 - RNA, 14 nt, Homo sapiens
cagaaauguguuau

SEQ ID NO: 241985 - RNA, 21 nt, Homo sapiens
uuugucauauaagauucauau

SEQ ID NO: 241986 - RNA, 23 nt, Homo sapiens
uucauuuaggugaggaagcaaaa

SEQ ID NO: 241987 - RNA, 14 nt, Homo sapiens
cugcacuccagccu

SEQ ID NO: 241988 - RNA, 19 nt, Homo sapiens
cccaggccuccccagcacc

SEQ ID NO: 241989 - RNA, 23 nt, Homo sapiens
aaaguuuuaugagaaaugccagu

SEQ ID NO: 241990 - RNA, 21 nt, Homo sapiens
cacucacauuuauucugcuca

SEQ ID NO: 241991 - RNA, 20 nt, Homo sapiens
uggaugcagccucacagucc

SEQ ID NO: 241992 - RNA, 14 nt, Homo sapiens
agcauggcugccaa

SEQ ID NO: 241993 - RNA, 17 nt, Homo sapiens
guucuuaguuugcaguu

SEQ ID NO: 241994 - RNA, 13 nt, Homo sapiens
ugaacacucuugg

SEQ ID NO: 241995 - RNA, 13 nt, Homo sapiens
cuacagagcagac

SEQ ID NO: 241996 - RNA, 16 nt, Homo sapiens
cauguguguucaugca

SEQ ID NO: 241997 - RNA, 20 nt, Homo sapiens
acuaaugaggaaacugcacu

SEQ ID NO: 241998 - RNA, 15 nt, Homo sapiens
aucacgccacugcac

SEQ ID NO: 241999 - RNA, 18 nt, Homo sapiens
ugcggccuuuggcuucac

SEQ ID NO: 242000 - RNA, 14 nt, Homo sapiens
uacaggaaguacug

SEQ ID NO: 242001 - RNA, 13 nt, Homo sapiens
auucaugcugcuu

SEQ ID NO: 242002 - RNA, 17 nt, Homo sapiens
caguauuacuucugcua

SEQ ID NO: 242003 - RNA, 17 nt, Homo sapiens
cucuuuucaaaacauuu

SEQ ID NO: 242004 - RNA, 15 nt, Homo sapiens
cauacccuguuacca

SEQ ID NO: 242005 - RNA, 19 nt, Homo sapiens
aaaaucagccugcuccagc

SEQ ID NO: 242006 - RNA, 19 nt, Homo sapiens
agacaggguuuugccaugu

SEQ ID NO: 242007 - RNA, 19 nt, Homo sapiens
gagcaaaaucgaugcagug

SEQ ID NO: 242008 - RNA, 21 nt, Homo sapiens
cugaagucuuuguacagacaa

SEQ ID NO: 242009 - RNA, 12 nt, Homo sapiens
aagcugggagaa

SEQ ID NO: 242010 - RNA, 16 nt, Homo sapiens
gggcuguucacucucu

SEQ ID NO: 242011 - RNA, 18 nt, Homo sapiens
ccaccucucucacuccuu

SEQ ID NO: 242012 - RNA, 18 nt, Homo sapiens
acucuagggaaaaaccag

SEQ ID NO: 242013 - RNA, 13 nt, Homo sapiens
aguuacacuaaaa

SEQ ID NO: 242014 - RNA, 18 nt, Homo sapiens
augcagugguaugaucac

SEQ ID NO: 242015 - RNA, 20 nt, Homo sapiens
aaaaaggaugcauucccuac

SEQ ID NO: 242016 - RNA, 18 nt, Homo sapiens
cugccuguugggccagga

SEQ ID NO: 242017 - RNA, 14 nt, Homo sapiens
ugauaaccacuaag

SEQ ID NO: 242018 - RNA, 16 nt, Homo sapiens
uucuaaaggcuaccuu

SEQ ID NO: 242019 - RNA, 14 nt, Homo sapiens
caggccccugccac

SEQ ID NO: 242020 - RNA, 16 nt, Homo sapiens
cucuauuaaaauuacu

SEQ ID NO: 242021 - RNA, 13 nt, Homo sapiens
aggcuaugugagc

SEQ ID NO: 242022 - RNA, 15 nt, Homo sapiens
agccugggcaaugug

SEQ ID NO: 242023 - RNA, 17 nt, Homo sapiens
gccacagggugagcacu

SEQ ID NO: 242024 - RNA, 20 nt, Homo sapiens
acugcaucaagaugugacau

SEQ ID NO: 242025 - RNA, 15 nt, Homo sapiens
caggugcugccaucc

SEQ ID NO: 242026 - RNA, 21 nt, Homo sapiens
ucuuauccaacaucaacaucu

SEQ ID NO: 242027 - RNA, 16 nt, Homo sapiens
ccuuucccaucuucca

SEQ ID NO: 242028 - RNA, 21 nt, Homo sapiens
cccagauagcuggcugggugg

SEQ ID NO: 242029 - RNA, 14 nt, Homo sapiens
caccuugacagggc

SEQ ID NO: 242030 - RNA, 15 nt, Homo sapiens
gccugaagucacaca

SEQ ID NO: 242031 - RNA, 19 nt, Homo sapiens
cagcuuguaaauagcucag

SEQ ID NO: 242032 - RNA, 19 nt, Homo sapiens
uuagugguuacccaguuag

SEQ ID NO: 242033 - RNA, 22 nt, Homo sapiens
ccgagcuuugaaaauucagugg

SEQ ID NO: 242034 - RNA, 18 nt, Homo sapiens
cugggagaaccaaaaaga

SEQ ID NO: 242035 - RNA, 21 nt, Homo sapiens
ugaugccaugggcccucucag

SEQ ID NO: 242036 - RNA, 19 nt, Homo sapiens
ggccagagggagugacaga

SEQ ID NO: 242037 - RNA, 15 nt, Homo sapiens
ggacuuggaagcucc

SEQ ID NO: 242038 - RNA, 20 nt, Homo sapiens
gcccuucuaccuuccugcaa

SEQ ID NO: 242039 - RNA, 20 nt, Homo sapiens
augucucuuuaaugucacag

SEQ ID NO: 242040 - RNA, 17 nt, Homo sapiens
ugugaaauucucuuucc

SEQ ID NO: 242041 - RNA, 16 nt, Homo sapiens
uacucaccucacccca

SEQ ID NO: 242042 - RNA, 12 nt, Homo sapiens
aacuuuccuuca

SEQ ID NO: 242043 - RNA, 19 nt, Homo sapiens
gcacuccaugagugcagcu

SEQ ID NO: 242044 - RNA, 19 nt, Homo sapiens
uauaagauucauauuuacu

SEQ ID NO: 242045 - RNA, 18 nt, Homo sapiens
aggacagggaggugaccc

SEQ ID NO: 242046 - RNA, 16 nt, Homo sapiens
ggauguucugggacac

SEQ ID NO: 242047 - RNA, 17 nt, Homo sapiens
cuucuaccuuccugcaa

SEQ ID NO: 242048 - RNA, 12 nt, Homo sapiens
agagcagugugg

SEQ ID NO: 242049 - RNA, 13 nt, Homo sapiens
aucaaucucuagu

SEQ ID NO: 242050 - RNA, 14 nt, Homo sapiens
augaucacggcuca

SEQ ID NO: 242051 - RNA, 19 nt, Homo sapiens
caccucugcacaagcugca

SEQ ID NO: 242052 - RNA, 15 nt, Homo sapiens
cagagacacaagccu

SEQ ID NO: 242053 - RNA, 14 nt, Homo sapiens
cucauacucaccuc

SEQ ID NO: 242054 - RNA, 9 nt, Homo sapiens
augcacaaa

SEQ ID NO: 242055 - RNA, 14 nt, Homo sapiens
cacaucuugcucug

SEQ ID NO: 242056 - RNA, 13 nt, Homo sapiens
caccagcagccug

SEQ ID NO: 242057 - RNA, 14 nt, Homo sapiens
ccugggcaauguga

SEQ ID NO: 242058 - RNA, 23 nt, Homo sapiens
aggauauaguuaucaaucucuag

SEQ ID NO: 242059 - RNA, 20 nt, Homo sapiens
aacucuacccuggcacuaua

SEQ ID NO: 242060 - RNA, 18 nt, Homo sapiens
aaaugggggugcauuuga

SEQ ID NO: 242061 - RNA, 20 nt, Homo sapiens
ucucacuauguugcccaggc

SEQ ID NO: 242062 - RNA, 18 nt, Homo sapiens
caaagcgugguggacaug

SEQ ID NO: 242063 - RNA, 16 nt, Homo sapiens
aaugaggaaacugcac

SEQ ID NO: 242064 - RNA, 17 nt, Homo sapiens
gggaccagagcugccac

SEQ ID NO: 242065 - RNA, 23 nt, Homo sapiens
caaagacugaguacguugugcau

SEQ ID NO: 242066 - RNA, 20 nt, Homo sapiens
uguuccugaaccgaugagaa

SEQ ID NO: 242067 - RNA, 19 nt, Homo sapiens
uauauuguuuucaguguac

SEQ ID NO: 242068 - RNA, 20 nt, Homo sapiens
auggacuuccacugccaucc

SEQ ID NO: 242069 - RNA, 18 nt, Homo sapiens
agcaggcucucaggccag

SEQ ID NO: 242070 - RNA, 12 nt, Homo sapiens
acccaccucagc

SEQ ID NO: 242071 - RNA, 16 nt, Homo sapiens
gcccaaauucuuucag

SEQ ID NO: 242072 - RNA, 17 nt, Homo sapiens
ucuugauucauaaugac

SEQ ID NO: 242073 - RNA, 19 nt, Homo sapiens
aaaguuuaaaaagcucaca

SEQ ID NO: 242074 - RNA, 16 nt, Homo sapiens
gaguuacagacaaagc

SEQ ID NO: 242075 - RNA, 9 nt, Homo sapiens
ucccagugc

SEQ ID NO: 242076 - RNA, 17 nt, Homo sapiens
ggccaggcuggucucaa

SEQ ID NO: 242077 - RNA, 19 nt, Homo sapiens
aacauguaauuaaguacua

SEQ ID NO: 242078 - RNA, 12 nt, Homo sapiens
uguuaugacucc

SEQ ID NO: 242079 - RNA, 21 nt, Homo sapiens
gcaugacacgaauauugcuga

SEQ ID NO: 242080 - RNA, 22 nt, Homo sapiens
uaugaggcauuuguuugaacug

SEQ ID NO: 242081 - RNA, 22 nt, Homo sapiens
ggaaaauuuuaaaaauacagau

SEQ ID NO: 242082 - RNA, 18 nt, Homo sapiens
cuuucccucccuuccucu

SEQ ID NO: 242083 - RNA, 18 nt, Homo sapiens
caggcccggcuccaggcu

SEQ ID NO: 242084 - RNA, 13 nt, Homo sapiens
cauacucaccuca

SEQ ID NO: 242085 - RNA, 14 nt, Homo sapiens
agcaaaagauucua

SEQ ID NO: 242086 - RNA, 21 nt, Homo sapiens
cugauucccaagcucugcucc

SEQ ID NO: 242087 - RNA, 14 nt, Homo sapiens
gaccagagcugcca

SEQ ID NO: 242088 - RNA, 23 nt, Homo sapiens
gaucacagccucugaaaaccaau

SEQ ID NO: 242089 - RNA, 17 nt, Homo sapiens
caugggaaugaauguca

SEQ ID NO: 242090 - RNA, 17 nt, Homo sapiens
ucuggcuaugcauuuga

SEQ ID NO: 242091 - RNA, 21 nt, Homo sapiens
gcuuccuccugguguggaaga

SEQ ID NO: 242092 - RNA, 13 nt, Homo sapiens
caucucuacaaaa

SEQ ID NO: 242093 - RNA, 18 nt, Homo sapiens
gaucuaggaagacuuugg

SEQ ID NO: 242094 - RNA, 22 nt, Homo sapiens
cuugagaggguggaauauccaa

SEQ ID NO: 242095 - RNA, 14 nt, Homo sapiens
uggcuuuugugcau

SEQ ID NO: 242096 - RNA, 15 nt, Homo sapiens
gcugggcuucagugg

SEQ ID NO: 242097 - RNA, 14 nt, Homo sapiens
acuuguggacacag

SEQ ID NO: 242098 - RNA, 18 nt, Homo sapiens
ccgugugugaaauucucu

SEQ ID NO: 242099 - RNA, 17 nt, Homo sapiens
cuacucgaguuacagac

SEQ ID NO: 242100 - RNA, 22 nt, Homo sapiens
ugguuuuuaaaaaacugcugac

SEQ ID NO: 242101 - RNA, 13 nt, Homo sapiens
gaccaucccugaa

SEQ ID NO: 242102 - RNA, 22 nt, Homo sapiens
cucaucuuagguuggcaaaaag

SEQ ID NO: 242103 - RNA, 15 nt, Homo sapiens
cagaagaaacuaccc

SEQ ID NO: 242104 - RNA, 16 nt, Homo sapiens
aucauaaaacuugaug

SEQ ID NO: 242105 - RNA, 21 nt, Homo sapiens
aguagagucacuggaacacua

SEQ ID NO: 242106 - RNA, 15 nt, Homo sapiens
gcuccuucuguccua

SEQ ID NO: 242107 - RNA, 11 nt, Homo sapiens
aacuggcugca

SEQ ID NO: 242108 - RNA, 18 nt, Homo sapiens
cagaggagagaggacccc

SEQ ID NO: 242109 - RNA, 19 nt, Homo sapiens
uuuuauggcuuuugugcau

SEQ ID NO: 242110 - RNA, 22 nt, Homo sapiens
ugccucagccucccaaagugcu

SEQ ID NO: 242111 - RNA, 22 nt, Homo sapiens
uaccugaagucuuuguacagac

SEQ ID NO: 242112 - RNA, 17 nt, Homo sapiens
ccuuccaggggugggac

SEQ ID NO: 242113 - RNA, 18 nt, Homo sapiens
acaugccucucucaggcc

SEQ ID NO: 242114 - RNA, 18 nt, Homo sapiens
agccuaggugacagagug

SEQ ID NO: 242115 - RNA, 15 nt, Homo sapiens
ucccuucuuacuuaa

SEQ ID NO: 242116 - RNA, 19 nt, Homo sapiens
caggugugaaccaccacac

SEQ ID NO: 242117 - RNA, 22 nt, Homo sapiens
agacucgauagugguggugaac

SEQ ID NO: 242118 - RNA, 15 nt, Homo sapiens
ggcuaugugagcaca

SEQ ID NO: 242119 - RNA, 23 nt, Homo sapiens
ucggcgccuuaaggauguucuag

SEQ ID NO: 242120 - RNA, 19 nt, Homo sapiens
cuuacuuaaccugaagcua

SEQ ID NO: 242121 - RNA, 13 nt, Homo sapiens
uggccaaagccaa

SEQ ID NO: 242122 - RNA, 15 nt, Homo sapiens
aguucaucuugaauu

SEQ ID NO: 242123 - RNA, 20 nt, Homo sapiens
ugcggaaugaaccacaucuu

SEQ ID NO: 242124 - RNA, 19 nt, Homo sapiens
aaacugauuacaacugcua

SEQ ID NO: 242125 - RNA, 12 nt, Homo sapiens
aguguacaugga

SEQ ID NO: 242126 - RNA, 21 nt, Homo sapiens
uagacgagcaggcuucuuccc

SEQ ID NO: 242127 - RNA, 13 nt, Homo sapiens
uucugggacacag

SEQ ID NO: 242128 - RNA, 15 nt, Homo sapiens
uggccucccaacuca

SEQ ID NO: 242129 - RNA, 14 nt, Homo sapiens
aaaguacuucucca

SEQ ID NO: 242130 - RNA, 19 nt, Homo sapiens
guugauucagcucugcaag

SEQ ID NO: 242131 - RNA, 14 nt, Homo sapiens
gcucucaggccagc

SEQ ID NO: 242132 - RNA, 15 nt, Homo sapiens
ugaagucacacagug

SEQ ID NO: 242133 - RNA, 14 nt, Homo sapiens
ucauacucaccuca

SEQ ID NO: 242134 - RNA, 17 nt, Homo sapiens
uccuaguuccaccauca

SEQ ID NO: 242135 - RNA, 17 nt, Homo sapiens
auauugcugauggugca

SEQ ID NO: 242136 - RNA, 19 nt, Homo sapiens
ugugugaaauucucuuucc

SEQ ID NO: 242137 - RNA, 18 nt, Homo sapiens
guccuacucugugucagg

SEQ ID NO: 242138 - RNA, 13 nt, Homo sapiens
uacaggugugaac

SEQ ID NO: 242139 - RNA, 15 nt, Homo sapiens
cugccaugccagcuu

SEQ ID NO: 242140 - RNA, 19 nt, Homo sapiens
acccaauauuuaccagacc

SEQ ID NO: 242141 - RNA, 20 nt, Homo sapiens
uaacauguaauuaaguacua

SEQ ID NO: 242142 - RNA, 16 nt, Homo sapiens
guuugguucaugguga

SEQ ID NO: 242143 - RNA, 20 nt, Homo sapiens
caggcugggcuucaguggca

SEQ ID NO: 242144 - RNA, 14 nt, Homo sapiens
aaauucaugcugcu

SEQ ID NO: 242145 - RNA, 16 nt, Homo sapiens
ugggcagagcagagac

SEQ ID NO: 242146 - RNA, 18 nt, Homo sapiens
uucaccacaugugcacau

SEQ ID NO: 242147 - RNA, 16 nt, Homo sapiens
acccaccaucaugucu

SEQ ID NO: 242148 - RNA, 15 nt, Homo sapiens
gugaagcugggagaa

SEQ ID NO: 242149 - RNA, 13 nt, Homo sapiens
gagagcagugugg

SEQ ID NO: 242150 - RNA, 16 nt, Homo sapiens
auaaguuaacuuccaa

SEQ ID NO: 242151 - RNA, 16 nt, Homo sapiens
cacgcuggagugcagu

SEQ ID NO: 242152 - RNA, 14 nt, Homo sapiens
aguagagacagggu

SEQ ID NO: 242153 - RNA, 14 nt, Homo sapiens
gaggcaugugauga

SEQ ID NO: 242154 - RNA, 15 nt, Homo sapiens
accucugcacaagcu

SEQ ID NO: 242155 - RNA, 15 nt, Homo sapiens
uuggccagugugaca

SEQ ID NO: 242156 - RNA, 13 nt, Homo sapiens
ucucucuucucca

SEQ ID NO: 242157 - RNA, 17 nt, Homo sapiens
cagaguggauucuugaa

SEQ ID NO: 242158 - RNA, 20 nt, Homo sapiens
ccuuagcagggaaacagcua

SEQ ID NO: 242159 - RNA, 16 nt, Homo sapiens
uuggaauuuugugccc

SEQ ID NO: 242160 - RNA, 14 nt, Homo sapiens
caggaaguacugga

SEQ ID NO: 242161 - RNA, 19 nt, Homo sapiens
ccgugaggccagagacaca

SEQ ID NO: 242162 - RNA, 15 nt, Homo sapiens
cugcacuccaugagu

SEQ ID NO: 242163 - RNA, 19 nt, Homo sapiens
cuugauucauaaugacuua

SEQ ID NO: 242164 - RNA, 20 nt, Homo sapiens
augagaggaaaucaccgaaa

SEQ ID NO: 242165 - RNA, 20 nt, Homo sapiens
uacaguuacucagaauucuc

SEQ ID NO: 242166 - RNA, 13 nt, Homo sapiens
aaauaacacugua

SEQ ID NO: 242167 - RNA, 23 nt, Homo sapiens
cuuuccaggaaggcuaaagggaa

SEQ ID NO: 242168 - RNA, 20 nt, Homo sapiens
augccucucucaggccaaac

SEQ ID NO: 242169 - RNA, 13 nt, Homo sapiens
uauuuaccagacc

SEQ ID NO: 242170 - RNA, 20 nt, Homo sapiens
aggucauugguggcagagug

SEQ ID NO: 242171 - RNA, 18 nt, Homo sapiens
uguggaugauaaaacaca

SEQ ID NO: 242172 - RNA, 18 nt, Homo sapiens
cauaaguuaacuuccaau

SEQ ID NO: 242173 - RNA, 15 nt, Homo sapiens
ucccacucaguccau

SEQ ID NO: 242174 - RNA, 15 nt, Homo sapiens
cuucccuacauggag

SEQ ID NO: 242175 - RNA, 21 nt, Homo sapiens
cagcuaacauggaaguacuau

SEQ ID NO: 242176 - RNA, 15 nt, Homo sapiens
agcaggacauggaca

SEQ ID NO: 242177 - RNA, 13 nt, Homo sapiens
gagacucugucuc

SEQ ID NO: 242178 - RNA, 13 nt, Homo sapiens
ucauaaugacuua

SEQ ID NO: 242179 - RNA, 13 nt, Homo sapiens
cauccaguaucuu

SEQ ID NO: 242180 - RNA, 15 nt, Homo sapiens
cugccugaagucaca

SEQ ID NO: 242181 - RNA, 14 nt, Homo sapiens
aggggcaguggugg

SEQ ID NO: 242182 - RNA, 16 nt, Homo sapiens
cuucaaccccaugaga

SEQ ID NO: 242183 - RNA, 15 nt, Homo sapiens
auccacugugccaug

SEQ ID NO: 242184 - RNA, 13 nt, Homo sapiens
ugugacugaucuc

SEQ ID NO: 242185 - RNA, 22 nt, Homo sapiens
ggaaggagaggagaggggcaca

SEQ ID NO: 242186 - RNA, 13 nt, Homo sapiens
acuuugaccucug

SEQ ID NO: 242187 - RNA, 21 nt, Homo sapiens
uucauuuaggugaggaagcaa

SEQ ID NO: 242188 - RNA, 15 nt, Homo sapiens
uacaggagugagcac

SEQ ID NO: 242189 - RNA, 13 nt, Homo sapiens
auugaaaaaccau

SEQ ID NO: 242190 - RNA, 16 nt, Homo sapiens
aagugagagaggggga

SEQ ID NO: 242191 - RNA, 15 nt, Homo sapiens
gccuccccagcaccu

SEQ ID NO: 242192 - RNA, 20 nt, Homo sapiens
ucauggagggagaagaaaga

SEQ ID NO: 242193 - RNA, 13 nt, Homo sapiens
auauaacuuuuuc

SEQ ID NO: 242194 - RNA, 20 nt, Homo sapiens
agacucuacagaggccaugg

SEQ ID NO: 242195 - RNA, 20 nt, Homo sapiens
cuggcacugcuuccagugag

SEQ ID NO: 242196 - RNA, 17 nt, Homo sapiens
uucccuacaguugaaaa

SEQ ID NO: 242197 - RNA, 22 nt, Homo sapiens
cucaaacucuugaccucaggug

SEQ ID NO: 242198 - RNA, 21 nt, Homo sapiens
uguuaacauggacaugaucuu

SEQ ID NO: 242199 - RNA, 18 nt, Homo sapiens
ggccagagggagugacag

SEQ ID NO: 242200 - RNA, 12 nt, Homo sapiens
uuacacaauggu

SEQ ID NO: 242201 - RNA, 12 nt, Homo sapiens
uguuuuccauga

SEQ ID NO: 242202 - RNA, 17 nt, Homo sapiens
auuuaccugaagucuuu

SEQ ID NO: 242203 - RNA, 20 nt, Homo sapiens
uugugauacaaugcugugcc

SEQ ID NO: 242204 - RNA, 9 nt, Homo sapiens
ucuuuccau

SEQ ID NO: 242205 - RNA, 11 nt, Homo sapiens
gccuuacacaa

SEQ ID NO: 242206 - RNA, 18 nt, Homo sapiens
ucuguacgucugacaggc

SEQ ID NO: 242207 - RNA, 20 nt, Homo sapiens
uaggagggcuggcaacuuag

SEQ ID NO: 242208 - RNA, 17 nt, Homo sapiens
ucuuuaaugucacaggc

SEQ ID NO: 242209 - RNA, 16 nt, Homo sapiens
aggggcccaagagaga

SEQ ID NO: 242210 - RNA, 22 nt, Homo sapiens
caaguccucagugguuggcaau

SEQ ID NO: 242211 - RNA, 16 nt, Homo sapiens
cugccugaagucacac

SEQ ID NO: 242212 - RNA, 12 nt, Homo sapiens
acagccaugauu

SEQ ID NO: 242213 - RNA, 16 nt, Homo sapiens
cacugcuuaacuucac

SEQ ID NO: 242214 - RNA, 19 nt, Homo sapiens
gaaaauaguggugugauuu

SEQ ID NO: 242215 - RNA, 16 nt, Homo sapiens
ugauucagacagcugc

SEQ ID NO: 242216 - RNA, 21 nt, Homo sapiens
aguggugcgaucuggguucac

SEQ ID NO: 242217 - RNA, 18 nt, Homo sapiens
gacccaugcugcccugug

SEQ ID NO: 242218 - RNA, 20 nt, Homo sapiens
aacuuuguuuagcccaaaac

SEQ ID NO: 242219 - RNA, 16 nt, Homo sapiens
cauccaguaucuugaa

SEQ ID NO: 242220 - RNA, 17 nt, Homo sapiens
auguucuuucacccuuu

SEQ ID NO: 242221 - RNA, 12 nt, Homo sapiens
ucucaggccagc

SEQ ID NO: 242222 - RNA, 13 nt, Homo sapiens
auacaauuccaaa

SEQ ID NO: 242223 - RNA, 14 nt, Homo sapiens
gauucauaaugacu

SEQ ID NO: 242224 - RNA, 21 nt, Homo sapiens
uucgaauccagagagcagugu

SEQ ID NO: 242225 - RNA, 15 nt, Homo sapiens
gaagaacgaagccac

SEQ ID NO: 242226 - RNA, 19 nt, Homo sapiens
cagaaaugccuuacccuca

SEQ ID NO: 242227 - RNA, 20 nt, Homo sapiens
auaacuuuguuuagcccaaa

SEQ ID NO: 242228 - RNA, 23 nt, Homo sapiens
ggacucaaugcacugacauuguu

SEQ ID NO: 242229 - RNA, 23 nt, Homo sapiens
acaguucaauucucauuugucac

SEQ ID NO: 242230 - RNA, 21 nt, Homo sapiens
gguggaugccugguggcagcu

SEQ ID NO: 242231 - RNA, 16 nt, Homo sapiens
cacgaauauugcugau

SEQ ID NO: 242232 - RNA, 15 nt, Homo sapiens
cuacucgaguuacag

SEQ ID NO: 242233 - RNA, 23 nt, Homo sapiens
uucauuuggcauuccccacuuga

SEQ ID NO: 242234 - RNA, 15 nt, Homo sapiens
gggagagccuuccag

SEQ ID NO: 242235 - RNA, 17 nt, Homo sapiens
gugggaggggaagaaaa

SEQ ID NO: 242236 - RNA, 15 nt, Homo sapiens
cccacuucugccaua

SEQ ID NO: 242237 - RNA, 15 nt, Homo sapiens
gaacgaagccaccuu

SEQ ID NO: 242238 - RNA, 16 nt, Homo sapiens
ucuacugaggugcuau

SEQ ID NO: 242239 - RNA, 16 nt, Homo sapiens
gaguaggaagacuuug

SEQ ID NO: 242240 - RNA, 19 nt, Homo sapiens
auaacacuguacugcaaua

SEQ ID NO: 242241 - RNA, 19 nt, Homo sapiens
gucaggugccucaagagaa

SEQ ID NO: 242242 - RNA, 20 nt, Homo sapiens
gggcacagaaaauggaagac

SEQ ID NO: 242243 - RNA, 17 nt, Homo sapiens
gucucacuauguugccc

SEQ ID NO: 242244 - RNA, 18 nt, Homo sapiens
agguaaggaauaccuguc

SEQ ID NO: 242245 - RNA, 18 nt, Homo sapiens
ugggacaugggaaagggg

SEQ ID NO: 242246 - RNA, 16 nt, Homo sapiens
augcuggcuguuggcu

SEQ ID NO: 242247 - RNA, 14 nt, Homo sapiens
uuggagaaaggauu

SEQ ID NO: 242248 - RNA, 18 nt, Homo sapiens
ggggaagaaaaacucuau

SEQ ID NO: 242249 - RNA, 19 nt, Homo sapiens
agaaccaaaaagaggcuau

SEQ ID NO: 242250 - RNA, 19 nt, Homo sapiens
cagaaagaccgugugugaa

SEQ ID NO: 242251 - RNA, 15 nt, Homo sapiens
guucugggacacagu

SEQ ID NO: 242252 - RNA, 18 nt, Homo sapiens
cauacaauuccaaacaca

SEQ ID NO: 242253 - RNA, 19 nt, Homo sapiens
acacugcauguuugugauu

SEQ ID NO: 242254 - RNA, 16 nt, Homo sapiens
auuccccacccugaaa

SEQ ID NO: 242255 - RNA, 20 nt, Homo sapiens
acuugggccacugugaagag

SEQ ID NO: 242256 - RNA, 21 nt, Homo sapiens
gugagcacuaaggugugcucu

SEQ ID NO: 242257 - RNA, 14 nt, Homo sapiens
ugguggacaugcac

SEQ ID NO: 242258 - RNA, 19 nt, Homo sapiens
gaagucacacaguauuacu

SEQ ID NO: 242259 - RNA, 23 nt, Homo sapiens
gauaaaauaaaaagaugaagcug

SEQ ID NO: 242260 - RNA, 18 nt, Homo sapiens
caacaggguuuuuuucca

SEQ ID NO: 242261 - RNA, 21 nt, Homo sapiens
aguucagccugggugugugaa

SEQ ID NO: 242262 - RNA, 15 nt, Homo sapiens
aaguuaacuuccaau

SEQ ID NO: 242263 - RNA, 20 nt, Homo sapiens
aagacccuuguggucccacc

SEQ ID NO: 242264 - RNA, 19 nt, Homo sapiens
aaugaugauccuaggcauu

SEQ ID NO: 242265 - RNA, 21 nt, Homo sapiens
uguucaugcacacuugcaccc

SEQ ID NO: 242266 - RNA, 20 nt, Homo sapiens
ugagucaccaagcccaguua

SEQ ID NO: 242267 - RNA, 15 nt, Homo sapiens
gcuucaaccccauga

SEQ ID NO: 242268 - RNA, 12 nt, Homo sapiens
ccacuucugcca

SEQ ID NO: 242269 - RNA, 14 nt, Homo sapiens
ggcagcucagagag

SEQ ID NO: 242270 - RNA, 22 nt, Homo sapiens
aggggcccaaauucuuucagug

SEQ ID NO: 242271 - RNA, 17 nt, Homo sapiens
ucagaucucuaacuuca

SEQ ID NO: 242272 - RNA, 17 nt, Homo sapiens
uccugggcuaagugauc

SEQ ID NO: 242273 - RNA, 14 nt, Homo sapiens
uuuuccugccaggc

SEQ ID NO: 242274 - RNA, 19 nt, Homo sapiens
agugggugaauaauacagu

SEQ ID NO: 242275 - RNA, 13 nt, Homo sapiens
gccaggaagccag

SEQ ID NO: 242276 - RNA, 19 nt, Homo sapiens
cgagaucacgccacugcac

SEQ ID NO: 242277 - RNA, 19 nt, Homo sapiens
ccuauauuguuuucagugu

SEQ ID NO: 242278 - RNA, 23 nt, Homo sapiens
acucuauuuuuguaaaaagggaa

SEQ ID NO: 242279 - RNA, 17 nt, Homo sapiens
cugaguacguugugcau

SEQ ID NO: 242280 - RNA, 21 nt, Homo sapiens
gacaguuaagagaaaugagcu

SEQ ID NO: 242281 - RNA, 18 nt, Homo sapiens
auccagagagcagugugg

SEQ ID NO: 242282 - RNA, 21 nt, Homo sapiens
ucuuucaguggcuaccuacau

SEQ ID NO: 242283 - RNA, 17 nt, Homo sapiens
aguaauaugcacacauu

SEQ ID NO: 242284 - RNA, 13 nt, Homo sapiens
acugcagcuuugu

SEQ ID NO: 242285 - RNA, 17 nt, Homo sapiens
ggacuacaggcacccac

SEQ ID NO: 242286 - RNA, 23 nt, Homo sapiens
cugcacuauagccuaggugacag

SEQ ID NO: 242287 - RNA, 20 nt, Homo sapiens
aguggcuaccuacauacaau

SEQ ID NO: 242288 - RNA, 12 nt, Homo sapiens
ucccaaacccuu

SEQ ID NO: 242289 - RNA, 17 nt, Homo sapiens
uagccuuagaagucaca

SEQ ID NO: 242290 - RNA, 20 nt, Homo sapiens
aaagacuguacaaaguagaa

SEQ ID NO: 242291 - RNA, 18 nt, Homo sapiens
gaccucugccugaaguca

SEQ ID NO: 242292 - RNA, 22 nt, Homo sapiens
auuguuuucaguguacauggaa

SEQ ID NO: 242293 - RNA, 19 nt, Homo sapiens
cugaauuucucacaaagga

SEQ ID NO: 242294 - RNA, 11 nt, Homo sapiens
gaggcuaugug

SEQ ID NO: 242295 - RNA, 18 nt, Homo sapiens
caaaaagaggcuauguga

SEQ ID NO: 242296 - RNA, 15 nt, Homo sapiens
ucagcugaaccuggg

SEQ ID NO: 242297 - RNA, 19 nt, Homo sapiens
uuauauauaagccaaaaaa

SEQ ID NO: 242298 - RNA, 15 nt, Homo sapiens
aggcucgagcaugcc

SEQ ID NO: 242299 - RNA, 16 nt, Homo sapiens
ugaauuuuggcugugu

SEQ ID NO: 242300 - RNA, 14 nt, Homo sapiens
acuguccuacccac

SEQ ID NO: 242301 - RNA, 16 nt, Homo sapiens
aucuaggaagacuuug

SEQ ID NO: 242302 - RNA, 20 nt, Homo sapiens
cagagugaacacucuuggua

SEQ ID NO: 242303 - RNA, 23 nt, Homo sapiens
auuacaagcgugagccacugcac

SEQ ID NO: 242304 - RNA, 15 nt, Homo sapiens
ugaaugucaguguga

SEQ ID NO: 242305 - RNA, 19 nt, Homo sapiens
uccaaggauggaccacaca

SEQ ID NO: 242306 - RNA, 19 nt, Homo sapiens
auucucauuugucacacac

SEQ ID NO: 242307 - RNA, 15 nt, Homo sapiens
cucuuuaaugucaca

SEQ ID NO: 242308 - RNA, 13 nt, Homo sapiens
ucauucaacccac

SEQ ID NO: 242309 - RNA, 16 nt, Homo sapiens
aauucucagaaucuca

SEQ ID NO: 242310 - RNA, 11 nt, Homo sapiens
cuuaccugcca

SEQ ID NO: 242311 - RNA, 18 nt, Homo sapiens
gcuaggaacacuccuuca

SEQ ID NO: 242312 - RNA, 14 nt, Homo sapiens
acuugggagcaaaa

SEQ ID NO: 242313 - RNA, 13 nt, Homo sapiens
ucucaggccaaac

SEQ ID NO: 242314 - RNA, 19 nt, Homo sapiens
aaaagcaucuaugugagac

SEQ ID NO: 242315 - RNA, 14 nt, Homo sapiens
ggccccucaggguc

SEQ ID NO: 242316 - RNA, 18 nt, Homo sapiens
aggccaaacucaccugcc

SEQ ID NO: 242317 - RNA, 14 nt, Homo sapiens
ucaaauaacuaaaa

SEQ ID NO: 242318 - RNA, 18 nt, Homo sapiens
ccaaggauggaccacaca

SEQ ID NO: 242319 - RNA, 13 nt, Homo sapiens
cccaucucuacaa

SEQ ID NO: 242320 - RNA, 18 nt, Homo sapiens
uuugcuaagugaggauga

SEQ ID NO: 242321 - RNA, 19 nt, Homo sapiens
cuuagaauuugggggaaaa

SEQ ID NO: 242322 - RNA, 22 nt, Homo sapiens
ccuggaugcagccucacagucc

SEQ ID NO: 242323 - RNA, 19 nt, Homo sapiens
caugucuuuucuugcauga

SEQ ID NO: 242324 - RNA, 21 nt, Homo sapiens
uccucauuagcauuuugcuaa

SEQ ID NO: 242325 - RNA, 14 nt, Homo sapiens
uugcagacaggcaa

SEQ ID NO: 242326 - RNA, 18 nt, Homo sapiens
gacauugcggacagccac

SEQ ID NO: 242327 - RNA, 18 nt, Homo sapiens
uuguuucaaccaguuuga

SEQ ID NO: 242328 - RNA, 11 nt, Homo sapiens
cuuuugugcau

SEQ ID NO: 242329 - RNA, 16 nt, Homo sapiens
gccucugcacuccccu

SEQ ID NO: 242330 - RNA, 16 nt, Homo sapiens
ggcuucauccuccuca

SEQ ID NO: 242331 - RNA, 19 nt, Homo sapiens
cugacccugcuucaaauau

SEQ ID NO: 242332 - RNA, 15 nt, Homo sapiens
augcugucccuuacg

SEQ ID NO: 242333 - RNA, 14 nt, Homo sapiens
ggugugugaagcug

SEQ ID NO: 242334 - RNA, 20 nt, Homo sapiens
cagccucccgaauagcuggg

SEQ ID NO: 242335 - RNA, 23 nt, Homo sapiens
cuaagagggagggagggcuccag

SEQ ID NO: 242336 - RNA, 15 nt, Homo sapiens
cucucaggccaaacu

SEQ ID NO: 242337 - RNA, 22 nt, Homo sapiens
aagcgugguggacaugcacagc

SEQ ID NO: 242338 - RNA, 18 nt, Homo sapiens
cguuaugauaguguccca

SEQ ID NO: 242339 - RNA, 12 nt, Homo sapiens
aggcucucaggc

SEQ ID NO: 242340 - RNA, 21 nt, Homo sapiens
augagccucagcauccuggca

SEQ ID NO: 242341 - RNA, 19 nt, Homo sapiens
ccuugaaaacacuguucuc

SEQ ID NO: 242342 - RNA, 20 nt, Homo sapiens
aauucucauuugucacacac

SEQ ID NO: 242343 - RNA, 15 nt, Homo sapiens
ccccagugcccacag

SEQ ID NO: 242344 - RNA, 14 nt, Homo sapiens
acgggcucagcaaa

SEQ ID NO: 242345 - RNA, 21 nt, Homo sapiens
uuguagagccagggucucacu

SEQ ID NO: 242346 - RNA, 14 nt, Homo sapiens
auacaguaucucag

SEQ ID NO: 242347 - RNA, 13 nt, Homo sapiens
aaagauacaguua

SEQ ID NO: 242348 - RNA, 19 nt, Homo sapiens
ggcucagcggggacagcuc

SEQ ID NO: 242349 - RNA, 15 nt, Homo sapiens
agugagcaucaugga

SEQ ID NO: 242350 - RNA, 13 nt, Homo sapiens
cuuuugugcauua

SEQ ID NO: 242351 - RNA, 15 nt, Homo sapiens
aaagaggcuauguga

SEQ ID NO: 242352 - RNA, 20 nt, Homo sapiens
ugccucugacacacagcucu

SEQ ID NO: 242353 - RNA, 15 nt, Homo sapiens
ugggagaaccaaaaa

SEQ ID NO: 242354 - RNA, 16 nt, Homo sapiens
gacauuguuggccaaa

SEQ ID NO: 242355 - RNA, 14 nt, Homo sapiens
gagcccuuaugaca

SEQ ID NO: 242356 - RNA, 13 nt, Homo sapiens
ccucaggugaucc

SEQ ID NO: 242357 - RNA, 14 nt, Homo sapiens
cuuagaaaaaccac

SEQ ID NO: 242358 - RNA, 21 nt, Homo sapiens
cagugguuggcaauuguuuca

SEQ ID NO: 242359 - RNA, 15 nt, Homo sapiens
gaugcagugcuucca

SEQ ID NO: 242360 - RNA, 14 nt, Homo sapiens
acaguaucucaggg

SEQ ID NO: 242361 - RNA, 17 nt, Homo sapiens
uccaaaguacacuguuu

SEQ ID NO: 242362 - RNA, 23 nt, Homo sapiens
auaauauuaaggaagacaaugug

SEQ ID NO: 242363 - RNA, 14 nt, Homo sapiens
aggcagggucucac

SEQ ID NO: 242364 - RNA, 19 nt, Homo sapiens
gaucccccgccccauccuc

SEQ ID NO: 242365 - RNA, 15 nt, Homo sapiens
uaucaggguauucca

SEQ ID NO: 242366 - RNA, 15 nt, Homo sapiens
cuggcaagaaugugu

SEQ ID NO: 242367 - RNA, 15 nt, Homo sapiens
gccaccuuugaagaa

SEQ ID NO: 242368 - RNA, 18 nt, Homo sapiens
cuugaccgugaggccaga

SEQ ID NO: 242369 - RNA, 12 nt, Homo sapiens
gaauuucucaca

SEQ ID NO: 242370 - RNA, 19 nt, Homo sapiens
gagugggcccaaugcacuu

SEQ ID NO: 242371 - RNA, 13 nt, Homo sapiens
agugagacccugu

SEQ ID NO: 242372 - RNA, 17 nt, Homo sapiens
gaagcauuuacuuugug

SEQ ID NO: 242373 - RNA, 13 nt, Homo sapiens
guuucuccaagca

SEQ ID NO: 242374 - RNA, 21 nt, Homo sapiens
gucucuuuaaugucacaggca

SEQ ID NO: 242375 - RNA, 19 nt, Homo sapiens
ugggauuacaggugugaac

SEQ ID NO: 242376 - RNA, 13 nt, Homo sapiens
gcggcuggcagcc

SEQ ID NO: 242377 - RNA, 20 nt, Homo sapiens
cugaagucuuuguacagaca

SEQ ID NO: 242378 - RNA, 19 nt, Homo sapiens
ccucauuagcauuuugcua

SEQ ID NO: 242379 - RNA, 11 nt, Homo sapiens
uucugagauca

SEQ ID NO: 242380 - RNA, 14 nt, Homo sapiens
uaauguaagcucua

SEQ ID NO: 242381 - RNA, 22 nt, Homo sapiens
agugaagcugggagaaccaaaa

SEQ ID NO: 242382 - RNA, 14 nt, Homo sapiens
cuccagggggugcc

SEQ ID NO: 242383 - RNA, 11 nt, Homo sapiens
ucuggcagcuc

SEQ ID NO: 242384 - RNA, 15 nt, Homo sapiens
uuccaaacacauaca

SEQ ID NO: 242385 - RNA, 15 nt, Homo sapiens
caccaaccacugcga

SEQ ID NO: 242386 - RNA, 21 nt, Homo sapiens
guuucuuuuuucggcuaaaaa

SEQ ID NO: 242387 - RNA, 17 nt, Homo sapiens
aaaaccagcgugugacu

SEQ ID NO: 242388 - RNA, 18 nt, Homo sapiens
accacaugugcacaugca

SEQ ID NO: 242389 - RNA, 19 nt, Homo sapiens
caggccaaacucaccugcc

SEQ ID NO: 242390 - RNA, 16 nt, Homo sapiens
agugaagcugggagaa

SEQ ID NO: 242391 - RNA, 21 nt, Homo sapiens
aauucucuuauccaacaucaa

SEQ ID NO: 242392 - RNA, 12 nt, Homo sapiens
gaaaacacuguu

SEQ ID NO: 242393 - RNA, 18 nt, Homo sapiens
cuugaaaacacuguucuc

SEQ ID NO: 242394 - RNA, 17 nt, Homo sapiens
agaaaauggaagacagc

SEQ ID NO: 242395 - RNA, 21 nt, Homo sapiens
gcacuauaauguaagcucuac

SEQ ID NO: 242396 - RNA, 12 nt, Homo sapiens
ucuaaagcugcc

SEQ ID NO: 242397 - RNA, 11 nt, Homo sapiens
gaccucaggug

SEQ ID NO: 242398 - RNA, 24 nt, Homo sapiens
gaugggauggcuuggggggcucca

SEQ ID NO: 242399 - RNA, 11 nt, Homo sapiens
agaaugcacaa

SEQ ID NO: 242400 - RNA, 14 nt, Homo sapiens
caggugugagucac

SEQ ID NO: 242401 - RNA, 19 nt, Homo sapiens
uaaugacuuaagcacacuu

SEQ ID NO: 242402 - RNA, 20 nt, Homo sapiens
acagagugagacucugucuc

SEQ ID NO: 242403 - RNA, 18 nt, Homo sapiens
ucugcugacagacacagg

SEQ ID NO: 242404 - RNA, 15 nt, Homo sapiens
aaaaagaaugcagag

SEQ ID NO: 242405 - RNA, 15 nt, Homo sapiens
uaggcauuugcugaa

SEQ ID NO: 242406 - RNA, 19 nt, Homo sapiens
ucagccucccgaauagcug

SEQ ID NO: 242407 - RNA, 20 nt, Homo sapiens
gaacauguuuuucuucuccc

SEQ ID NO: 242408 - RNA, 15 nt, Homo sapiens
uucucucuucuccac

SEQ ID NO: 242409 - RNA, 23 nt, Homo sapiens
cuucccacuggaggcaugugaug

SEQ ID NO: 242410 - RNA, 21 nt, Homo sapiens
cugcacuccaugagugcagcu

SEQ ID NO: 242411 - RNA, 13 nt, Homo sapiens
ucccucauccuca

SEQ ID NO: 242412 - RNA, 19 nt, Homo sapiens
aaagacuguacaaaguaga

SEQ ID NO: 242413 - RNA, 18 nt, Homo sapiens
gucuaugggacucaaugc

SEQ ID NO: 242414 - RNA, 15 nt, Homo sapiens
caaaagauucuacaa

SEQ ID NO: 242415 - RNA, 16 nt, Homo sapiens
cugcaucaagauguga

SEQ ID NO: 242416 - RNA, 23 nt, Homo sapiens
accucaggccugggggcugggca

SEQ ID NO: 242417 - RNA, 22 nt, Homo sapiens
uccuuaccagcagagcaccuua

SEQ ID NO: 242418 - RNA, 14 nt, Homo sapiens
cauguccaagaagc

SEQ ID NO: 242419 - RNA, 21 nt, Homo sapiens
gaacagguuuaaaaaucccca

SEQ ID NO: 242420 - RNA, 18 nt, Homo sapiens
ggacauugcggacagcca

SEQ ID NO: 242421 - RNA, 14 nt, Homo sapiens
aguagagucacugg

SEQ ID NO: 242422 - RNA, 19 nt, Homo sapiens
uggaagagcuccuugauau

SEQ ID NO: 242423 - RNA, 13 nt, Homo sapiens
ccagacccggcug

SEQ ID NO: 242424 - RNA, 18 nt, Homo sapiens
cacuugggagcaaaagau

SEQ ID NO: 242425 - RNA, 14 nt, Homo sapiens
ucuuauauugccau

SEQ ID NO: 242426 - RNA, 16 nt, Homo sapiens
ccuuuugagugccuua

SEQ ID NO: 242427 - RNA, 12 nt, Homo sapiens
uaagccaaaaaa

SEQ ID NO: 242428 - RNA, 20 nt, Homo sapiens
agcauuuugcuaaaugugaa

SEQ ID NO: 242429 - RNA, 17 nt, Homo sapiens
aaggaagacuucauccc

SEQ ID NO: 242430 - RNA, 17 nt, Homo sapiens
ugggauuacagguguga

SEQ ID NO: 242431 - RNA, 19 nt, Homo sapiens
ucagacagcugccugggau

SEQ ID NO: 242432 - RNA, 19 nt, Homo sapiens
cacaugcacgugugugcac

SEQ ID NO: 242433 - RNA, 10 nt, Homo sapiens
ccauggacuu

SEQ ID NO: 242434 - RNA, 16 nt, Homo sapiens
gcuuucuacccagcga

SEQ ID NO: 242435 - RNA, 14 nt, Homo sapiens
uaucagaauucuca

SEQ ID NO: 242436 - RNA, 22 nt, Homo sapiens
aucuucuuuauaauucuacuuu

SEQ ID NO: 242437 - RNA, 20 nt, Homo sapiens
cagagugagacucugucuca

SEQ ID NO: 242438 - RNA, 15 nt, Homo sapiens
aguugauucagcucu

SEQ ID NO: 242439 - RNA, 18 nt, Homo sapiens
cuccaagaccuucuccuu

SEQ ID NO: 242440 - RNA, 19 nt, Homo sapiens
cucaaacucuuaaaaccca

SEQ ID NO: 242441 - RNA, 14 nt, Homo sapiens
aagaggcagggucu

SEQ ID NO: 242442 - RNA, 23 nt, Homo sapiens
agaagcccuucuaccuuccugca

SEQ ID NO: 242443 - RNA, 16 nt, Homo sapiens
augggggugcauuuga

SEQ ID NO: 242444 - RNA, 18 nt, Homo sapiens
auauugccauuucuucca

SEQ ID NO: 242445 - RNA, 19 nt, Homo sapiens
uuuugucuaugggacucaa

SEQ ID NO: 242446 - RNA, 15 nt, Homo sapiens
gguuuuacugcagcu

SEQ ID NO: 242447 - RNA, 23 nt, Homo sapiens
ugcauaccacuuuuguucuuggu

SEQ ID NO: 242448 - RNA, 14 nt, Homo sapiens
cacagaguuguuac

SEQ ID NO: 242449 - RNA, 18 nt, Homo sapiens
agcugccugggaucccuc

SEQ ID NO: 242450 - RNA, 21 nt, Homo sapiens
gagacagcacaggcagcccca

SEQ ID NO: 242451 - RNA, 13 nt, Homo sapiens
accagagcugcca

SEQ ID NO: 242452 - RNA, 11 nt, Homo sapiens
uacauggaaua

SEQ ID NO: 242453 - RNA, 14 nt, Homo sapiens
guaagcucuacuga

SEQ ID NO: 242454 - RNA, 18 nt, Homo sapiens
gcucaccagccccagugc

SEQ ID NO: 242455 - RNA, 16 nt, Homo sapiens
uaugacuccagaauuu

SEQ ID NO: 242456 - RNA, 15 nt, Homo sapiens
acccucuggagauaa

SEQ ID NO: 242457 - RNA, 14 nt, Homo sapiens
agaagaaacuaccc

SEQ ID NO: 242458 - RNA, 13 nt, Homo sapiens
gccucagugccac

SEQ ID NO: 242459 - RNA, 19 nt, Homo sapiens
guagcugggacuacaggca

SEQ ID NO: 242460 - RNA, 22 nt, Homo sapiens
cugggcagaggaaagcaaagga

SEQ ID NO: 242461 - RNA, 23 nt, Homo sapiens
uucacaguucucuccuucuuccc

SEQ ID NO: 242462 - RNA, 16 nt, Homo sapiens
ugaaaauucuugauaa

SEQ ID NO: 242463 - RNA, 20 nt, Homo sapiens
gcaccacugcacuccagccu

SEQ ID NO: 242464 - RNA, 20 nt, Homo sapiens
uggagaaaauggacguguua

SEQ ID NO: 242465 - RNA, 22 nt, Homo sapiens
ccuuuccaaaugcccagcuuaa

SEQ ID NO: 242466 - RNA, 19 nt, Homo sapiens
acuccuguaggaagguuaa

SEQ ID NO: 242467 - RNA, 16 nt, Homo sapiens
accacaaaacuuuucu

SEQ ID NO: 242468 - RNA, 19 nt, Homo sapiens
cgccagauucuuuccugag

SEQ ID NO: 242469 - RNA, 18 nt, Homo sapiens
agugggcccaaugcacuu

SEQ ID NO: 242470 - RNA, 21 nt, Homo sapiens
acugcacuauagccuagguga

SEQ ID NO: 242471 - RNA, 22 nt, Homo sapiens
uucucuugagaggguggaauau

SEQ ID NO: 242472 - RNA, 16 nt, Homo sapiens
uccuggccucaaguga

SEQ ID NO: 242473 - RNA, 15 nt, Homo sapiens
agcccugagcuuucu

SEQ ID NO: 242474 - RNA, 23 nt, Homo sapiens
ugugaaacuggauuaaacuuaau

SEQ ID NO: 242475 - RNA, 19 nt, Homo sapiens
gaagugacaccaguucuuu

SEQ ID NO: 242476 - RNA, 13 nt, Homo sapiens
auccacugugcca

SEQ ID NO: 242477 - RNA, 15 nt, Homo sapiens
ccuaggcauuugcug

SEQ ID NO: 242478 - RNA, 15 nt, Homo sapiens
cacugcgaccacaag

SEQ ID NO: 242479 - RNA, 16 nt, Homo sapiens
gcugggauuacaggug

SEQ ID NO: 242480 - RNA, 18 nt, Homo sapiens
gauacaggaaaagcugcu

SEQ ID NO: 242481 - RNA, 16 nt, Homo sapiens
gaaaauggaagacagc

SEQ ID NO: 242482 - RNA, 14 nt, Homo sapiens
uguggcgcagcaua

SEQ ID NO: 242483 - RNA, 18 nt, Homo sapiens
cuuuucauaaccuagccu

SEQ ID NO: 242484 - RNA, 15 nt, Homo sapiens
gucccauugauguac

SEQ ID NO: 242485 - RNA, 20 nt, Homo sapiens
cacaaaauguaggguuauaa

SEQ ID NO: 242486 - RNA, 20 nt, Homo sapiens
uuuccuguagucccauugau

SEQ ID NO: 242487 - RNA, 14 nt, Homo sapiens
augugcacaugcac

SEQ ID NO: 242488 - RNA, 17 nt, Homo sapiens
uagauguauauauuucc

SEQ ID NO: 242489 - RNA, 17 nt, Homo sapiens
cugcuuccagugaggcu

SEQ ID NO: 242490 - RNA, 18 nt, Homo sapiens
ucaccucaccccacugug

SEQ ID NO: 242491 - RNA, 20 nt, Homo sapiens
acaguuaagagaaaugagcu

SEQ ID NO: 242492 - RNA, 21 nt, Homo sapiens
acugcauaugaaaggacacua

SEQ ID NO: 242493 - RNA, 19 nt, Homo sapiens
uaagaaaaaggaugcacag

SEQ ID NO: 242494 - RNA, 22 nt, Homo sapiens
aaccuagccuuagaagucacac

SEQ ID NO: 242495 - RNA, 15 nt, Homo sapiens
auauguggaguucau

SEQ ID NO: 242496 - RNA, 12 nt, Homo sapiens
agagccuuccag

SEQ ID NO: 242497 - RNA, 20 nt, Homo sapiens
gcuggcgugcaguggugcga

SEQ ID NO: 242498 - RNA, 13 nt, Homo sapiens
uaaguacuaugua

SEQ ID NO: 242499 - RNA, 17 nt, Homo sapiens
cagauagauauaugcuc

SEQ ID NO: 242500 - RNA, 23 nt, Homo sapiens
ugaggaugaaaaaauaacacugu

SEQ ID NO: 242501 - RNA, 18 nt, Homo sapiens
ugcuucaaccccaugaga

SEQ ID NO: 242502 - RNA, 21 nt, Homo sapiens
gagggcacagaaaauggaaga

SEQ ID NO: 242503 - RNA, 20 nt, Homo sapiens
agccgagauugcaccacugc

SEQ ID NO: 242504 - RNA, 18 nt, Homo sapiens
gcucacauaucugucauu

SEQ ID NO: 242505 - RNA, 19 nt, Homo sapiens
agaaaauggacguguuaug

SEQ ID NO: 242506 - RNA, 20 nt, Homo sapiens
agcugggagaaccaaaaaga

SEQ ID NO: 242507 - RNA, 21 nt, Homo sapiens
acuccagaauuucccaaagca

SEQ ID NO: 242508 - RNA, 16 nt, Homo sapiens
auacucccaucuguga

SEQ ID NO: 242509 - RNA, 16 nt, Homo sapiens
guacuauguaucaaug

SEQ ID NO: 242510 - RNA, 23 nt, Homo sapiens
uacucccaucugugaaaggaaag

SEQ ID NO: 242511 - RNA, 16 nt, Homo sapiens
uggggauaugauuuaa

SEQ ID NO: 242512 - RNA, 17 nt, Homo sapiens
agcaauccugcaagaac

SEQ ID NO: 242513 - RNA, 19 nt, Homo sapiens
caacugcaucaagauguga

SEQ ID NO: 242514 - RNA, 10 nt, Homo sapiens
cuucugccau

SEQ ID NO: 242515 - RNA, 14 nt, Homo sapiens
uguguuaucucuua

SEQ ID NO: 242516 - RNA, 11 nt, Homo sapiens
ggggugcccuc

SEQ ID NO: 242517 - RNA, 15 nt, Homo sapiens
cuugcacccaugugu

SEQ ID NO: 242518 - RNA, 15 nt, Homo sapiens
uccucccaccucagc

SEQ ID NO: 242519 - RNA, 14 nt, Homo sapiens
cagagauggccaug

SEQ ID NO: 242520 - RNA, 11 nt, Homo sapiens
agaaaaaccac

SEQ ID NO: 242521 - RNA, 17 nt, Homo sapiens
ccacaucuugcucugcu

SEQ ID NO: 242522 - RNA, 18 nt, Homo sapiens
uacuucuuauacauuuga

SEQ ID NO: 242523 - RNA, 18 nt, Homo sapiens
acauggaauaacauguaa

SEQ ID NO: 242524 - RNA, 17 nt, Homo sapiens
gcccaggcaggucuuga

SEQ ID NO: 242525 - RNA, 13 nt, Homo sapiens
aauugacaggauu

SEQ ID NO: 242526 - RNA, 20 nt, Homo sapiens
ucuguggucuaaacaaaaaa

SEQ ID NO: 242527 - RNA, 15 nt, Homo sapiens
ugaggcugggcuccc

SEQ ID NO: 242528 - RNA, 20 nt, Homo sapiens
ugcccaggcuggcgugcagu

SEQ ID NO: 242529 - RNA, 22 nt, Homo sapiens
aagaugcuucucacugccaugc

SEQ ID NO: 242530 - RNA, 15 nt, Homo sapiens
uuagcauuuugcuaa

SEQ ID NO: 242531 - RNA, 23 nt, Homo sapiens
gccuggggucugacaauaccucg

SEQ ID NO: 242532 - RNA, 21 nt, Homo sapiens
caggguuuugccauguuggcc

SEQ ID NO: 242533 - RNA, 22 nt, Homo sapiens
gggccaguuggucccccuucca

SEQ ID NO: 242534 - RNA, 18 nt, Homo sapiens
caggccuccccagcaccu

SEQ ID NO: 242535 - RNA, 17 nt, Homo sapiens
ucagaaauguguuauca

SEQ ID NO: 242536 - RNA, 23 nt, Homo sapiens
cccaaacccauuuuagagacaga

SEQ ID NO: 242537 - RNA, 23 nt, Homo sapiens
cacaguauuacuucugcuacaua

SEQ ID NO: 242538 - RNA, 19 nt, Homo sapiens
gaugaaaaaauaacacugu

SEQ ID NO: 242539 - RNA, 14 nt, Homo sapiens
ucuuuggacccuga

SEQ ID NO: 242540 - RNA, 15 nt, Homo sapiens
ucuacugaggugcua

SEQ ID NO: 242541 - RNA, 20 nt, Homo sapiens
uggggcagcuugaggguugg

SEQ ID NO: 242542 - RNA, 11 nt, Homo sapiens
gguggggaccu

SEQ ID NO: 242543 - RNA, 21 nt, Homo sapiens
ccugcccuuaccugccaggaa

SEQ ID NO: 242544 - RNA, 12 nt, Homo sapiens
uucaaucucuug

SEQ ID NO: 242545 - RNA, 19 nt, Homo sapiens
ucuuuucuugcaugaggcu

SEQ ID NO: 242546 - RNA, 13 nt, Homo sapiens
uggauguucugac

SEQ ID NO: 242547 - RNA, 13 nt, Homo sapiens
aaggauggaccac

SEQ ID NO: 242548 - RNA, 23 nt, Homo sapiens
agacagucccugccaauggacua

SEQ ID NO: 242549 - RNA, 13 nt, Homo sapiens
uucaguaauaacu

SEQ ID NO: 242550 - RNA, 19 nt, Homo sapiens
ggaugcagccucacagucc

SEQ ID NO: 242551 - RNA, 22 nt, Homo sapiens
guagucaggugccucaagagaa

SEQ ID NO: 242552 - RNA, 23 nt, Homo sapiens
cucuucuccaccucccacaaagg

SEQ ID NO: 242553 - RNA, 15 nt, Homo sapiens
uugauguucuuucac

SEQ ID NO: 242554 - RNA, 12 nt, Homo sapiens
acacacagcucu

SEQ ID NO: 242555 - RNA, 14 nt, Homo sapiens
cagcaggcucucag

SEQ ID NO: 242556 - RNA, 18 nt, Homo sapiens
cucucaggccaaacucac

SEQ ID NO: 242557 - RNA, 17 nt, Homo sapiens
gcaagugagacccuguc

SEQ ID NO: 242558 - RNA, 13 nt, Homo sapiens
agcccaccccuca

SEQ ID NO: 242559 - RNA, 18 nt, Homo sapiens
accacaucuugcucugcu

SEQ ID NO: 242560 - RNA, 21 nt, Homo sapiens
aaugcccagccccuucugacc

SEQ ID NO: 242561 - RNA, 22 nt, Homo sapiens
acagacaaagcgugguggacau

SEQ ID NO: 242562 - RNA, 17 nt, Homo sapiens
aaagauucuacaaagcu

SEQ ID NO: 242563 - RNA, 20 nt, Homo sapiens
aggugggaggaucucuugag

SEQ ID NO: 242564 - RNA, 17 nt, Homo sapiens
aaagaggcuaugugagc

SEQ ID NO: 242565 - RNA, 16 nt, Homo sapiens
gggacucaaugcacug

SEQ ID NO: 242566 - RNA, 15 nt, Homo sapiens
accacaugugcacau

SEQ ID NO: 242567 - RNA, 13 nt, Homo sapiens
ugcaaggucauuu

SEQ ID NO: 242568 - RNA, 18 nt, Homo sapiens
uuucauuuaggugaggaa

SEQ ID NO: 242569 - RNA, 23 nt, Homo sapiens
caccaaaucagcugcuacuacuc

SEQ ID NO: 242570 - RNA, 12 nt, Homo sapiens
cagauacuuggg

SEQ ID NO: 242571 - RNA, 16 nt, Homo sapiens
ccccaggguccuguag

SEQ ID NO: 242572 - RNA, 20 nt, Homo sapiens
uguucugacccugcuucaaa

SEQ ID NO: 242573 - RNA, 22 nt, Homo sapiens
caugcuccuggcccacugcauc

SEQ ID NO: 242574 - RNA, 21 nt, Homo sapiens
ucagugccuuauggaacacuc

SEQ ID NO: 242575 - RNA, 20 nt, Homo sapiens
agguacgaaaagaggggaag

SEQ ID NO: 242576 - RNA, 17 nt, Homo sapiens
cuuucuagccagaggag

SEQ ID NO: 242577 - RNA, 22 nt, Homo sapiens
uuaaaacaacacucacauuuau

SEQ ID NO: 242578 - RNA, 21 nt, Homo sapiens
ccaauauuuaccagaccacaa

SEQ ID NO: 242579 - RNA, 18 nt, Homo sapiens
agcccagagugaacacuc

SEQ ID NO: 242580 - RNA, 13 nt, Homo sapiens
aagaaacuacccu

SEQ ID NO: 242581 - RNA, 16 nt, Homo sapiens
ggaaaggcuccaggag

SEQ ID NO: 242582 - RNA, 17 nt, Homo sapiens
acacuguacugcaauaa

SEQ ID NO: 242583 - RNA, 17 nt, Homo sapiens
cugcgugguugaugauc

SEQ ID NO: 242584 - RNA, 17 nt, Homo sapiens
acggacacucaaaagcu

SEQ ID NO: 242585 - RNA, 17 nt, Homo sapiens
ugaauuguaaggaauga

SEQ ID NO: 242586 - RNA, 20 nt, Homo sapiens
ccacccuccuuucaccacau

SEQ ID NO: 242587 - RNA, 17 nt, Homo sapiens
auguugaaagaucaaaa

SEQ ID NO: 242588 - RNA, 24 nt, Homo sapiens
aaaaccaauguucucucuucucca

SEQ ID NO: 242589 - RNA, 13 nt, Homo sapiens
ucugacacacagc

SEQ ID NO: 242590 - RNA, 16 nt, Homo sapiens
guaucaggugcugcca

SEQ ID NO: 242591 - RNA, 17 nt, Homo sapiens
caaugaguaacaggaaa

SEQ ID NO: 242592 - RNA, 13 nt, Homo sapiens
uaaugggacacua

SEQ ID NO: 242593 - RNA, 21 nt, Homo sapiens
uuuuaaaaaaaucccauuuaa

SEQ ID NO: 242594 - RNA, 12 nt, Homo sapiens
gccugcccuccc

SEQ ID NO: 242595 - RNA, 15 nt, Homo sapiens
cuucauggacuucca

SEQ ID NO: 242596 - RNA, 19 nt, Homo sapiens
cugaaaaccaauguucucu

SEQ ID NO: 242597 - RNA, 18 nt, Homo sapiens
cauaaugacuuaagcaca

SEQ ID NO: 242598 - RNA, 19 nt, Homo sapiens
acguguuaugacuccagaa

SEQ ID NO: 242599 - RNA, 13 nt, Homo sapiens
aggcggugagcaa

SEQ ID NO: 242600 - RNA, 20 nt, Homo sapiens
uauggcuuuugugcauuauc

SEQ ID NO: 242601 - RNA, 17 nt, Homo sapiens
uuccccccaaaacugau

SEQ ID NO: 242602 - RNA, 20 nt, Homo sapiens
aguaacccugucuaaugaaa

SEQ ID NO: 242603 - RNA, 18 nt, Homo sapiens
ccgcauuuggauuggaug

SEQ ID NO: 242604 - RNA, 18 nt, Homo sapiens
ugagaggggaacagacug

SEQ ID NO: 242605 - RNA, 22 nt, Homo sapiens
ggcugguuagagguucccuuug

SEQ ID NO: 242606 - RNA, 14 nt, Homo sapiens
caugugcacaugca

SEQ ID NO: 242607 - RNA, 23 nt, Homo sapiens
cggagacggagucccaccuuggc

SEQ ID NO: 242608 - RNA, 15 nt, Homo sapiens
gauguuuccaaugcu

SEQ ID NO: 242609 - RNA, 16 nt, Homo sapiens
cuaagcuauucaguaa

SEQ ID NO: 242610 - RNA, 17 nt, Homo sapiens
ugauccacccaccucag

SEQ ID NO: 242611 - RNA, 17 nt, Homo sapiens
acuucuuauacauuuga

SEQ ID NO: 242612 - RNA, 12 nt, Homo sapiens
gcuaaagggaaa

SEQ ID NO: 242613 - RNA, 18 nt, Homo sapiens
aaccuuuugagugccuua

SEQ ID NO: 242614 - RNA, 14 nt, Homo sapiens
uggucagauuugaa

SEQ ID NO: 242615 - RNA, 18 nt, Homo sapiens
ucaauuacaggaaguacu

SEQ ID NO: 242616 - RNA, 20 nt, Homo sapiens
uuaagaggcagggucucacu

SEQ ID NO: 242617 - RNA, 15 nt, Homo sapiens
cucaaugcacugaca

SEQ ID NO: 242618 - RNA, 21 nt, Homo sapiens
ugacccaugcugcccugugag

SEQ ID NO: 242619 - RNA, 18 nt, Homo sapiens
cugagugggggaucacag

SEQ ID NO: 242620 - RNA, 15 nt, Homo sapiens
ucgugacaacacuug

SEQ ID NO: 242621 - RNA, 16 nt, Homo sapiens
acccaguuagcucuca

SEQ ID NO: 242622 - RNA, 20 nt, Homo sapiens
aggacauugcggacagccac

SEQ ID NO: 242623 - RNA, 12 nt, Homo sapiens
uccagacacaug

SEQ ID NO: 242624 - RNA, 16 nt, Homo sapiens
cuugaaugaugccaug

SEQ ID NO: 242625 - RNA, 14 nt, Homo sapiens
ccuacucuguguca

SEQ ID NO: 242626 - RNA, 17 nt, Homo sapiens
uucuccaccugccaggg

SEQ ID NO: 242627 - RNA, 15 nt, Homo sapiens
aagagaaaugagcug

SEQ ID NO: 242628 - RNA, 15 nt, Homo sapiens
auauauaagccaaaa

SEQ ID NO: 242629 - RNA, 21 nt, Homo sapiens
gccgagauugcaccacugcac

SEQ ID NO: 242630 - RNA, 13 nt, Homo sapiens
uacaggaaguacu

SEQ ID NO: 242631 - RNA, 21 nt, Homo sapiens
agcauacguacacauuuuauu

SEQ ID NO: 242632 - RNA, 16 nt, Homo sapiens
acugacauuguuggcc

SEQ ID NO: 242633 - RNA, 16 nt, Homo sapiens
uaacauggaaguacua

SEQ ID NO: 242634 - RNA, 14 nt, Homo sapiens
uagggaaaaaccag

SEQ ID NO: 242635 - RNA, 14 nt, Homo sapiens
guaugguaggguaa

SEQ ID NO: 242636 - RNA, 16 nt, Homo sapiens
uacuaaggaaucuuuc

SEQ ID NO: 242637 - RNA, 16 nt, Homo sapiens
cacuucccuacaugga

SEQ ID NO: 242638 - RNA, 12 nt, Homo sapiens
ugacacacagcu

SEQ ID NO: 242639 - RNA, 18 nt, Homo sapiens
cugggauuacaagcguga

SEQ ID NO: 242640 - RNA, 14 nt, Homo sapiens
agagucacuggaac

SEQ ID NO: 242641 - RNA, 22 nt, Homo sapiens
uaaaugucucuuuaaugucaca

SEQ ID NO: 242642 - RNA, 21 nt, Homo sapiens
aagagguuuuaaaaaaauccc

SEQ ID NO: 242643 - RNA, 13 nt, Homo sapiens
uuaucucaggggu

SEQ ID NO: 242644 - RNA, 21 nt, Homo sapiens
gaagccagcaggcucucaggc

SEQ ID NO: 242645 - RNA, 13 nt, Homo sapiens
agugggugaauaa

SEQ ID NO: 242646 - RNA, 20 nt, Homo sapiens
aaggcuaccuuuguauucuc

SEQ ID NO: 242647 - RNA, 16 nt, Homo sapiens
auuuuuagacagaguc

SEQ ID NO: 242648 - RNA, 23 nt, Homo sapiens
ucuaugggacucaaugcacugac

SEQ ID NO: 242649 - RNA, 14 nt, Homo sapiens
aagaaagacuaucu

SEQ ID NO: 242650 - RNA, 13 nt, Homo sapiens
uggcccacgcacu

SEQ ID NO: 242651 - RNA, 18 nt, Homo sapiens
ugaucccuucuuacuuaa

SEQ ID NO: 242652 - RNA, 18 nt, Homo sapiens
gauuacaggugugaacca

SEQ ID NO: 242653 - RNA, 15 nt, Homo sapiens
ccacugcgaccacaa

SEQ ID NO: 242654 - RNA, 12 nt, Homo sapiens
aucuuugcagac

SEQ ID NO: 242655 - RNA, 13 nt, Homo sapiens
ugagccacugcac

SEQ ID NO: 242656 - RNA, 12 nt, Homo sapiens
augccagugugc

SEQ ID NO: 242657 - RNA, 13 nt, Homo sapiens
uggcccacugcau

SEQ ID NO: 242658 - RNA, 14 nt, Homo sapiens
agcugccaccugcc

SEQ ID NO: 242659 - RNA, 14 nt, Homo sapiens
gcugcacuccauga

SEQ ID NO: 242660 - RNA, 15 nt, Homo sapiens
ggagggcuccagaca

SEQ ID NO: 242661 - RNA, 23 nt, Homo sapiens
auagugguggugaacagaacaaa

SEQ ID NO: 242662 - RNA, 15 nt, Homo sapiens
uaaugauagcuacug

SEQ ID NO: 242663 - RNA, 16 nt, Homo sapiens
aucacagccucugaaa

SEQ ID NO: 242664 - RNA, 12 nt, Homo sapiens
caaauauuuccc

SEQ ID NO: 242665 - RNA, 21 nt, Homo sapiens
gaguugauucagcucugcaag

SEQ ID NO: 242666 - RNA, 19 nt, Homo sapiens
acaggauuauuggaaauuu

SEQ ID NO: 242667 - RNA, 19 nt, Homo sapiens
auacaauuccaaacacaua

SEQ ID NO: 242668 - RNA, 16 nt, Homo sapiens
ggcccaaugcacuuug

SEQ ID NO: 242669 - RNA, 23 nt, Homo sapiens
aaaugcccagcuuaaaggggcua

SEQ ID NO: 242670 - RNA, 16 nt, Homo sapiens
uucugaggauugcaga

SEQ ID NO: 242671 - RNA, 15 nt, Homo sapiens
auccagacccggcug

SEQ ID NO: 242672 - RNA, 21 nt, Homo sapiens
gcagacucuacagaggccaug

SEQ ID NO: 242673 - RNA, 16 nt, Homo sapiens
uacaggugugagucac

SEQ ID NO: 242674 - RNA, 18 nt, Homo sapiens
uaagagaaaugagcugca

SEQ ID NO: 242675 - RNA, 21 nt, Homo sapiens
agaauuauaauuaguuccuca

SEQ ID NO: 242676 - RNA, 17 nt, Homo sapiens
gcuaccuacauacaauu

SEQ ID NO: 242677 - RNA, 21 nt, Homo sapiens
aggugcuauguucuuagugga

SEQ ID NO: 242678 - RNA, 19 nt, Homo sapiens
acaccuugacagggcacac

SEQ ID NO: 242679 - RNA, 18 nt, Homo sapiens
ccaaggguacuaaggaau

SEQ ID NO: 242680 - RNA, 18 nt, Homo sapiens
uggaaagaguaggaagac

SEQ ID NO: 242681 - RNA, 19 nt, Homo sapiens
uacaggaagguagaaauau

SEQ ID NO: 242682 - RNA, 20 nt, Homo sapiens
aagagggagggagggcucca

SEQ ID NO: 242683 - RNA, 15 nt, Homo sapiens
uguguucaugcacac

SEQ ID NO: 242684 - RNA, 17 nt, Homo sapiens
gacucuacagaggccau

SEQ ID NO: 242685 - RNA, 13 nt, Homo sapiens
gacccaugcugcc

SEQ ID NO: 242686 - RNA, 22 nt, Homo sapiens
ugccccucaacucuccuccaga

SEQ ID NO: 242687 - RNA, 12 nt, Homo sapiens
aaauaacacugu

SEQ ID NO: 242688 - RNA, 21 nt, Homo sapiens
ugaaauaucaagagagguuaa

SEQ ID NO: 242689 - RNA, 18 nt, Homo sapiens
cucagcaggggaggguag

SEQ ID NO: 242690 - RNA, 20 nt, Homo sapiens
agaggggaacagacuggaag

SEQ ID NO: 242691 - RNA, 16 nt, Homo sapiens
uaacaggcagauacag

SEQ ID NO: 242692 - RNA, 16 nt, Homo sapiens
cgcuggaccuugaacu

SEQ ID NO: 242693 - RNA, 19 nt, Homo sapiens
cuccugguguggaagagcu

SEQ ID NO: 242694 - RNA, 21 nt, Homo sapiens
gcacugacauuguuggccaaa

SEQ ID NO: 242695 - RNA, 16 nt, Homo sapiens
ccaauauuuaccagac

SEQ ID NO: 242696 - RNA, 20 nt, Homo sapiens
gcauggcugccaaugggagc

SEQ ID NO: 242697 - RNA, 21 nt, Homo sapiens
caaagcgugguggacaugcac

SEQ ID NO: 242698 - RNA, 23 nt, Homo sapiens
augacuccagaauuucccaaagc

SEQ ID NO: 242699 - RNA, 21 nt, Homo sapiens
cagcugcuugggcuucauccu

SEQ ID NO: 242700 - RNA, 19 nt, Homo sapiens
ugaccuugaaugaugccau

SEQ ID NO: 242701 - RNA, 12 nt, Homo sapiens
gcgugcacacac

SEQ ID NO: 242702 - RNA, 23 nt, Homo sapiens
uacugcagcuuuguuuguuguca

SEQ ID NO: 242703 - RNA, 21 nt, Homo sapiens
cauauucaggaagcucagggc

SEQ ID NO: 242704 - RNA, 20 nt, Homo sapiens
gaggucaaggcugcagugag

SEQ ID NO: 242705 - RNA, 24 nt, Homo sapiens
aaggugugcucugaucauccacug

SEQ ID NO: 242706 - RNA, 16 nt, Homo sapiens
uccugggagugagcug

SEQ ID NO: 242707 - RNA, 17 nt, Homo sapiens
uguccuacccacccucc

SEQ ID NO: 242708 - RNA, 19 nt, Homo sapiens
ucucagauuguaccauuga

SEQ ID NO: 242709 - RNA, 23 nt, Homo sapiens
caucuuggucagauuugaacucu

SEQ ID NO: 242710 - RNA, 22 nt, Homo sapiens
uacaaaaguuuaaaaagcucac

SEQ ID NO: 242711 - RNA, 17 nt, Homo sapiens
aaauacagauagauaua

SEQ ID NO: 242712 - RNA, 16 nt, Homo sapiens
cagccccagugcccac

SEQ ID NO: 242713 - RNA, 12 nt, Homo sapiens
agacccggcugc

SEQ ID NO: 242714 - RNA, 15 nt, Homo sapiens
acacuugcacccaug

SEQ ID NO: 242715 - RNA, 18 nt, Homo sapiens
acacauuuuucuuaggga

SEQ ID NO: 242716 - RNA, 16 nt, Homo sapiens
uuccaaacacauacag

SEQ ID NO: 242717 - RNA, 16 nt, Homo sapiens
agaacgaagccaccuu

SEQ ID NO: 242718 - RNA, 13 nt, Homo sapiens
uugaaugaugcca

SEQ ID NO: 242719 - RNA, 22 nt, Homo sapiens
uugaagacuuuucuuucagcca

SEQ ID NO: 242720 - RNA, 15 nt, Homo sapiens
ggacaggcauguucu

SEQ ID NO: 242721 - RNA, 18 nt, Homo sapiens
acugugccaugugccagg

SEQ ID NO: 242722 - RNA, 18 nt, Homo sapiens
gauuaauuaaaacacaac

SEQ ID NO: 242723 - RNA, 15 nt, Homo sapiens
auguguguucaugca

SEQ ID NO: 242724 - RNA, 16 nt, Homo sapiens
guccccgcacugggcu

SEQ ID NO: 242725 - RNA, 21 nt, Homo sapiens
ggaaauauuaagaaagacuau

SEQ ID NO: 242726 - RNA, 16 nt, Homo sapiens
gucuuuguacagacaa

SEQ ID NO: 242727 - RNA, 18 nt, Homo sapiens
gagcaagugagacccugu

SEQ ID NO: 242728 - RNA, 20 nt, Homo sapiens
agagaaugcacaaacagagg

SEQ ID NO: 242729 - RNA, 13 nt, Homo sapiens
accaauguucucu

SEQ ID NO: 242730 - RNA, 23 nt, Homo sapiens
ggaagcacaugccucucucaggc

SEQ ID NO: 242731 - RNA, 17 nt, Homo sapiens
aagcgugagccacugca

SEQ ID NO: 242732 - RNA, 18 nt, Homo sapiens
cugcagagggcacagaaa

SEQ ID NO: 242733 - RNA, 19 nt, Homo sapiens
gaccaguuguugauaacca

SEQ ID NO: 242734 - RNA, 17 nt, Homo sapiens
aggauguucugggacac

SEQ ID NO: 242735 - RNA, 22 nt, Homo sapiens
acguuucuaaaggcuaccuuug

SEQ ID NO: 242736 - RNA, 23 nt, Homo sapiens
auuagccaagugugguagagugu

SEQ ID NO: 242737 - RNA, 13 nt, Homo sapiens
gguaucaggugcu

SEQ ID NO: 242738 - RNA, 17 nt, Homo sapiens
gacucaaugcacugaca

SEQ ID NO: 242739 - RNA, 20 nt, Homo sapiens
aaucuaaauggaaccacucu

SEQ ID NO: 242740 - RNA, 22 nt, Homo sapiens
agcucaggugucccugcacuug

SEQ ID NO: 242741 - RNA, 23 nt, Homo sapiens
auaagaaccuuuugagugccuua

SEQ ID NO: 242742 - RNA, 17 nt, Homo sapiens
uuaugacuccagaauuu

SEQ ID NO: 242743 - RNA, 16 nt, Homo sapiens
acuuguggacacagcu

SEQ ID NO: 242744 - RNA, 12 nt, Homo sapiens
cucacgccugua

SEQ ID NO: 242745 - RNA, 19 nt, Homo sapiens
aaagcgugguggacaugca

SEQ ID NO: 242746 - RNA, 14 nt, Homo sapiens
gagcuuucugcuau

SEQ ID NO: 242747 - RNA, 13 nt, Homo sapiens
gauggauuuccag

SEQ ID NO: 242748 - RNA, 20 nt, Homo sapiens
accauuuagcacacugcuug

SEQ ID NO: 242749 - RNA, 18 nt, Homo sapiens
gcugcuacuacuccugua

SEQ ID NO: 242750 - RNA, 17 nt, Homo sapiens
cagaaucucaaauaacu

SEQ ID NO: 242751 - RNA, 22 nt, Homo sapiens
agaugaugccaugggcccucuc

SEQ ID NO: 242752 - RNA, 18 nt, Homo sapiens
aaaacuuuucuaauacuc

SEQ ID NO: 242753 - RNA, 15 nt, Homo sapiens
caggcauguucucug

SEQ ID NO: 242754 - RNA, 19 nt, Homo sapiens
uuuauuuuuguagagccag

SEQ ID NO: 242755 - RNA, 13 nt, Homo sapiens
ccagaugccaggg

SEQ ID NO: 242756 - RNA, 17 nt, Homo sapiens
gcaauccugcaagaaca

SEQ ID NO: 242757 - RNA, 19 nt, Homo sapiens
uaagccaaaaaaugcuugc

SEQ ID NO: 242758 - RNA, 12 nt, Homo sapiens
auucuucuguac

SEQ ID NO: 242759 - RNA, 23 nt, Homo sapiens
cgaauuuucacagccaugauucu

SEQ ID NO: 242760 - RNA, 18 nt, Homo sapiens
cgaucuggguucacugca

SEQ ID NO: 242761 - RNA, 23 nt, Homo sapiens
aauacagauagauauaugcucug

SEQ ID NO: 242762 - RNA, 16 nt, Homo sapiens
cuaaaagguaugcaau

SEQ ID NO: 242763 - RNA, 19 nt, Homo sapiens
cuuucaccacaugugcaca

SEQ ID NO: 242764 - RNA, 19 nt, Homo sapiens
cuauguugcccaggcaggu

SEQ ID NO: 242765 - RNA, 17 nt, Homo sapiens
uagcugggacuacaggc

SEQ ID NO: 242766 - RNA, 18 nt, Homo sapiens
cuccccagcaagugagag

SEQ ID NO: 242767 - RNA, 21 nt, Homo sapiens
ggaagcacaugccucucucag

SEQ ID NO: 242768 - RNA, 14 nt, Homo sapiens
ucacugcaaccucc

SEQ ID NO: 242769 - RNA, 13 nt, Homo sapiens
agcuguucagcug

SEQ ID NO: 242770 - RNA, 14 nt, Homo sapiens
gcgcgguggcucac

SEQ ID NO: 242771 - RNA, 21 nt, Homo sapiens
aggcuucuuccccccaaaacu

SEQ ID NO: 242772 - RNA, 14 nt, Homo sapiens
gaguugaagacaga

SEQ ID NO: 242773 - RNA, 19 nt, Homo sapiens
aguggggcuggaagcagaa

SEQ ID NO: 242774 - RNA, 19 nt, Homo sapiens
caugaaguaauaugcacac

SEQ ID NO: 242775 - RNA, 15 nt, Homo sapiens
ugugcgccuacagga

SEQ ID NO: 242776 - RNA, 14 nt, Homo sapiens
ugggccacugugaa

SEQ ID NO: 242777 - RNA, 16 nt, Homo sapiens
aaaaaggaugcacaga

SEQ ID NO: 242778 - RNA, 15 nt, Homo sapiens
caccacaugugcaca

SEQ ID NO: 242779 - RNA, 16 nt, Homo sapiens
gaggaaacugcacugu

SEQ ID NO: 242780 - RNA, 15 nt, Homo sapiens
cuguucuuuccaaag

SEQ ID NO: 242781 - RNA, 17 nt, Homo sapiens
uuguaaauagcucaggu

SEQ ID NO: 242782 - RNA, 22 nt, Homo sapiens
ggagggcuccagacacaugucc

SEQ ID NO: 242783 - RNA, 15 nt, Homo sapiens
uuguaugagguuuga

SEQ ID NO: 242784 - RNA, 19 nt, Homo sapiens
uuccaaugcuuugaucccu

SEQ ID NO: 242785 - RNA, 13 nt, Homo sapiens
uauauaagccaaa

SEQ ID NO: 242786 - RNA, 20 nt, Homo sapiens
cuuuuuaauauugauaugcu

SEQ ID NO: 242787 - RNA, 14 nt, Homo sapiens
guuuuacugcagcu

SEQ ID NO: 242788 - RNA, 23 nt, Homo sapiens
ggauguucuagcauggcugccaa

SEQ ID NO: 242789 - RNA, 20 nt, Homo sapiens
agagugagacucugucucaa

SEQ ID NO: 242790 - RNA, 17 nt, Homo sapiens
ucuccaccugccaggga

SEQ ID NO: 242791 - RNA, 20 nt, Homo sapiens
uccaggggugggacacccug

SEQ ID NO: 242792 - RNA, 16 nt, Homo sapiens
agccaaggccaaagga

SEQ ID NO: 242793 - RNA, 16 nt, Homo sapiens
acuuagguguggggga

SEQ ID NO: 242794 - RNA, 20 nt, Homo sapiens
uuaaaacaacacucacauuu

SEQ ID NO: 242795 - RNA, 14 nt, Homo sapiens
agugguggugaaca

SEQ ID NO: 242796 - RNA, 13 nt, Homo sapiens
ccucauuagcauu

SEQ ID NO: 242797 - RNA, 17 nt, Homo sapiens
auagccaaggccaaagg

SEQ ID NO: 242798 - RNA, 16 nt, Homo sapiens
caguccauagcagaga

SEQ ID NO: 242799 - RNA, 22 nt, Homo sapiens
cucuuccacuuugauaccauug

SEQ ID NO: 242800 - RNA, 18 nt, Homo sapiens
uuuuuaaaaaacugcuga

SEQ ID NO: 242801 - RNA, 16 nt, Homo sapiens
aaagaaugcucuuuac

SEQ ID NO: 242802 - RNA, 11 nt, Homo sapiens
agugacagagg

SEQ ID NO: 242803 - RNA, 13 nt, Homo sapiens
acaaugugaaaag

SEQ ID NO: 242804 - RNA, 23 nt, Homo sapiens
uuuuauuuuuagacagagucuca

SEQ ID NO: 242805 - RNA, 12 nt, Homo sapiens
uaaaugugaaug

SEQ ID NO: 242806 - RNA, 17 nt, Homo sapiens
auguucucugaggacac

SEQ ID NO: 242807 - RNA, 14 nt, Homo sapiens
guuacauaagauaa

SEQ ID NO: 242808 - RNA, 13 nt, Homo sapiens
accuguuucugca

SEQ ID NO: 242809 - RNA, 15 nt, Homo sapiens
agaccuucuccuuca

SEQ ID NO: 242810 - RNA, 20 nt, Homo sapiens
uucagcuccagcucaccagc

SEQ ID NO: 242811 - RNA, 21 nt, Homo sapiens
cuuuguuuguugucagcugaa

SEQ ID NO: 242812 - RNA, 13 nt, Homo sapiens
ucuuuauaauucu

SEQ ID NO: 242813 - RNA, 22 nt, Homo sapiens
ccccuguagagugggagcugag

SEQ ID NO: 242814 - RNA, 21 nt, Homo sapiens
caugggaaugaaugucagugu

SEQ ID NO: 242815 - RNA, 20 nt, Homo sapiens
gaaaagcugcugacaguguu

SEQ ID NO: 242816 - RNA, 13 nt, Homo sapiens
cuagauacuguau

SEQ ID NO: 242817 - RNA, 16 nt, Homo sapiens
auacaguaucucaggg

SEQ ID NO: 242818 - RNA, 22 nt, Homo sapiens
ugaauaauacaguaucucaggg

SEQ ID NO: 242819 - RNA, 12 nt, Homo sapiens
aagaaugcucuu

SEQ ID NO: 242820 - RNA, 19 nt, Homo sapiens
aucauccacugugccaugu

SEQ ID NO: 242821 - RNA, 18 nt, Homo sapiens
ugacaucagcaauacaga

SEQ ID NO: 242822 - RNA, 21 nt, Homo sapiens
agauauuuugcuuugugauuu

SEQ ID NO: 242823 - RNA, 17 nt, Homo sapiens
ucccccagcagccuggg

SEQ ID NO: 242824 - RNA, 13 nt, Homo sapiens
uggucaccaaauc

SEQ ID NO: 242825 - RNA, 15 nt, Homo sapiens
gagaccaucccugaa

SEQ ID NO: 242826 - RNA, 17 nt, Homo sapiens
ccaaaggaagcacaugc

SEQ ID NO: 242827 - RNA, 14 nt, Homo sapiens
uuccaauuuacaua

SEQ ID NO: 242828 - RNA, 18 nt, Homo sapiens
uauggcuuuugugcauua

SEQ ID NO: 242829 - RNA, 20 nt, Homo sapiens
cuuuuauaaacuuuaccuuu

SEQ ID NO: 242830 - RNA, 14 nt, Homo sapiens
aaucucuugcacuc

SEQ ID NO: 242831 - RNA, 15 nt, Homo sapiens
gcuucaguggcagcu

SEQ ID NO: 242832 - RNA, 22 nt, Homo sapiens
caucuaugugagaccauuuagc

SEQ ID NO: 242833 - RNA, 15 nt, Homo sapiens
ccaggagcagccaca

SEQ ID NO: 242834 - RNA, 15 nt, Homo sapiens
auucuccugccucag

SEQ ID NO: 242835 - RNA, 14 nt, Homo sapiens
augacaucagcaau

SEQ ID NO: 242836 - RNA, 23 nt, Homo sapiens
gagcccacgcccccacuggugac

SEQ ID NO: 242837 - RNA, 22 nt, Homo sapiens
gcaauacagacuacuucuuccc

SEQ ID NO: 242838 - RNA, 20 nt, Homo sapiens
aauauuucccucaccuuucc

SEQ ID NO: 242839 - RNA, 16 nt, Homo sapiens
uagcacagacccugcc

SEQ ID NO: 242840 - RNA, 21 nt, Homo sapiens
guaugcucaauuauuuugcau

SEQ ID NO: 242841 - RNA, 10 nt, Homo sapiens
acccaagggc

SEQ ID NO: 242842 - RNA, 22 nt, Homo sapiens
aucuuccaaggguacuaaggaa

SEQ ID NO: 242843 - RNA, 19 nt, Homo sapiens
uggaggggggaggugggau

SEQ ID NO: 242844 - RNA, 15 nt, Homo sapiens
acuaagagucucuau

SEQ ID NO: 242845 - RNA, 12 nt, Homo sapiens
gucuugaacucc

SEQ ID NO: 242846 - RNA, 22 nt, Homo sapiens
ggggcccaaauucuuucagugg

SEQ ID NO: 242847 - RNA, 16 nt, Homo sapiens
cacuaaccacgcugga

SEQ ID NO: 242848 - RNA, 18 nt, Homo sapiens
ggaggccauuuguguuua

SEQ ID NO: 242849 - RNA, 13 nt, Homo sapiens
auaaaucauaaaa

SEQ ID NO: 242850 - RNA, 17 nt, Homo sapiens
agaguaggaagacuuug

SEQ ID NO: 242851 - RNA, 18 nt, Homo sapiens
cccucaacaccucugcac

SEQ ID NO: 242852 - RNA, 20 nt, Homo sapiens
caugccucucucaggccaaa

SEQ ID NO: 242853 - RNA, 16 nt, Homo sapiens
auaucugaaaauguau

SEQ ID NO: 242854 - RNA, 16 nt, Homo sapiens
auggaguauaugucaa

SEQ ID NO: 242855 - RNA, 20 nt, Homo sapiens
aggcuccaggagcagccaca

SEQ ID NO: 242856 - RNA, 17 nt, Homo sapiens
aaaucagcugcuacuac

SEQ ID NO: 242857 - RNA, 20 nt, Homo sapiens
guaauuaaguacuauguauc

SEQ ID NO: 242858 - RNA, 21 nt, Homo sapiens
cuguuggccagugugacaagg

SEQ ID NO: 242859 - RNA, 15 nt, Homo sapiens
cacagcuaacaugga

SEQ ID NO: 242860 - RNA, 21 nt, Homo sapiens
uugugcauuaucuagauacug

SEQ ID NO: 242861 - RNA, 18 nt, Homo sapiens
cuugagcccagagugaac

SEQ ID NO: 242862 - RNA, 19 nt, Homo sapiens
aguaacccugucuaaugaa

SEQ ID NO: 242863 - RNA, 23 nt, Homo sapiens
cccucaacaccucugcacaagcu

SEQ ID NO: 242864 - RNA, 19 nt, Homo sapiens
acccucuuagaaaaaccac

SEQ ID NO: 242865 - RNA, 14 nt, Homo sapiens
uaggcauuugcuga

SEQ ID NO: 242866 - RNA, 17 nt, Homo sapiens
accucugccugaaguca

SEQ ID NO: 242867 - RNA, 12 nt, Homo sapiens
aagucacacagu

SEQ ID NO: 242868 - RNA, 18 nt, Homo sapiens
ccacgcuggagugcagug

SEQ ID NO: 242869 - RNA, 13 nt, Homo sapiens
cuugggagcaaaa

SEQ ID NO: 242870 - RNA, 20 nt, Homo sapiens
augagcugcacuccaugagu

SEQ ID NO: 242871 - RNA, 19 nt, Homo sapiens
cacugugccaugugccagg

SEQ ID NO: 242872 - RNA, 16 nt, Homo sapiens
ucugccugaagucaca

SEQ ID NO: 242873 - RNA, 20 nt, Homo sapiens
uaggugacagagugagacuc

SEQ ID NO: 242874 - RNA, 11 nt, Homo sapiens
gcuucugccau

SEQ ID NO: 242875 - RNA, 21 nt, Homo sapiens
gcccaggaaaggcuccaggag

SEQ ID NO: 242876 - RNA, 20 nt, Homo sapiens
agccaagaauucuuaaauau

SEQ ID NO: 242877 - RNA, 12 nt, Homo sapiens
gagacaggguuu

SEQ ID NO: 242878 - RNA, 14 nt, Homo sapiens
acggcucacugcag

SEQ ID NO: 242879 - RNA, 17 nt, Homo sapiens
ucugccugaagucacac

SEQ ID NO: 242880 - RNA, 19 nt, Homo sapiens
agauagccaaggccaaagg

SEQ ID NO: 242881 - RNA, 21 nt, Homo sapiens
ccucccaaagugcugggauua

SEQ ID NO: 242882 - RNA, 16 nt, Homo sapiens
ugcaugcugucccuua

SEQ ID NO: 242883 - RNA, 15 nt, Homo sapiens
agggagaagaaagaa

SEQ ID NO: 242884 - RNA, 19 nt, Homo sapiens
ugcugcuugaggcaacuca

SEQ ID NO: 242885 - RNA, 22 nt, Homo sapiens
ggcugggggccucagugccacu

SEQ ID NO: 242886 - RNA, 18 nt, Homo sapiens
ucuagcauggcugccaau

SEQ ID NO: 242887 - RNA, 15 nt, Homo sapiens
caggaagguagaaau

SEQ ID NO: 242888 - RNA, 11 nt, Homo sapiens
caucuauguga

SEQ ID NO: 242889 - RNA, 14 nt, Homo sapiens
aaccacuucagcug

SEQ ID NO: 242890 - RNA, 23 nt, Homo sapiens
aaauaacuaaaagguaugcaauc

SEQ ID NO: 242891 - RNA, 17 nt, Homo sapiens
caugugcacaugcacgu

SEQ ID NO: 242892 - RNA, 21 nt, Homo sapiens
aaaaauagccugccucuucuc

SEQ ID NO: 242893 - RNA, 13 nt, Homo sapiens
cugcacuccauga

SEQ ID NO: 242894 - RNA, 21 nt, Homo sapiens
aauuaguuccucauuagcauu

SEQ ID NO: 242895 - RNA, 16 nt, Homo sapiens
ccgugaggccagagac

SEQ ID NO: 242896 - RNA, 22 nt, Homo sapiens
cacccuccuuucaccacaugug

SEQ ID NO: 242897 - RNA, 22 nt, Homo sapiens
agccauuccuguucccaugaga

SEQ ID NO: 242898 - RNA, 19 nt, Homo sapiens
cccagucuggaaugcagug

SEQ ID NO: 242899 - RNA, 14 nt, Homo sapiens
gaccuucuccuuca

SEQ ID NO: 242900 - RNA, 22 nt, Homo sapiens
ugcccacacuugggagcaaaag

SEQ ID NO: 242901 - RNA, 15 nt, Homo sapiens
uagcugggacuacag

SEQ ID NO: 242902 - RNA, 22 nt, Homo sapiens
cacggacgacgcgagggcccca

SEQ ID NO: 242903 - RNA, 16 nt, Homo sapiens
gccuggucguuuucaa

SEQ ID NO: 242904 - RNA, 21 nt, Homo sapiens
aaaucgugacaacacuugugu

SEQ ID NO: 242905 - RNA, 12 nt, Homo sapiens
ucugaaaaccaa

SEQ ID NO: 242906 - RNA, 17 nt, Homo sapiens
caggcacccaccaucau

SEQ ID NO: 242907 - RNA, 14 nt, Homo sapiens
gccagggucucacu

SEQ ID NO: 242908 - RNA, 23 nt, Homo sapiens
agccugcaguuauuaacacuaac

SEQ ID NO: 242909 - RNA, 13 nt, Homo sapiens
auucuucugcuuc

SEQ ID NO: 242910 - RNA, 21 nt, Homo sapiens
ucuuucagccaagaauucuua

SEQ ID NO: 242911 - RNA, 17 nt, Homo sapiens
cagcucuguccugggag

SEQ ID NO: 242912 - RNA, 22 nt, Homo sapiens
acaguugaaaaacagcugaggg

SEQ ID NO: 242913 - RNA, 17 nt, Homo sapiens
agauguauauauuuccu

SEQ ID NO: 242914 - RNA, 18 nt, Homo sapiens
guuaucuaauauguaaca

SEQ ID NO: 242915 - RNA, 16 nt, Homo sapiens
gaugccagggacccac

SEQ ID NO: 242916 - RNA, 21 nt, Homo sapiens
uuugcuaaaugugaaugauga

SEQ ID NO: 242917 - RNA, 18 nt, Homo sapiens
aaagaggggaagagacuu

SEQ ID NO: 242918 - RNA, 14 nt, Homo sapiens
uggaagcacagcuu

SEQ ID NO: 242919 - RNA, 16 nt, Homo sapiens
agccucugaaaaccaa

SEQ ID NO: 242920 - RNA, 11 nt, Homo sapiens
agccagaggag

SEQ ID NO: 242921 - RNA, 22 nt, Homo sapiens
agugguggugaacagaacaaaa

SEQ ID NO: 242922 - RNA, 14 nt, Homo sapiens
ucucccuucauccu

SEQ ID NO: 242923 - RNA, 14 nt, Homo sapiens
caugagaugaugcc

SEQ ID NO: 242924 - RNA, 15 nt, Homo sapiens
uaugacaucagcaau

SEQ ID NO: 242925 - RNA, 23 nt, Homo sapiens
aaguuuuaugagaaaugccagug

SEQ ID NO: 242926 - RNA, 14 nt, Homo sapiens
ucaagaugugacau

SEQ ID NO: 242927 - RNA, 13 nt, Homo sapiens
agaaguuucugcc

SEQ ID NO: 242928 - RNA, 20 nt, Homo sapiens
auaaugacuuaagcacacuu

SEQ ID NO: 242929 - RNA, 14 nt, Homo sapiens
aggauugcuacugu

SEQ ID NO: 242930 - RNA, 20 nt, Homo sapiens
cccagagaggguggugaccu

SEQ ID NO: 242931 - RNA, 20 nt, Homo sapiens
agccacagggugagcacucu

SEQ ID NO: 242932 - RNA, 19 nt, Homo sapiens
ucugcauguuacauaagau

SEQ ID NO: 242933 - RNA, 23 nt, Homo sapiens
aaagaccgugugugaaauucucu

SEQ ID NO: 242934 - RNA, 19 nt, Homo sapiens
aaggaugaucuaggaagac

SEQ ID NO: 242935 - RNA, 20 nt, Homo sapiens
cacuauaauguaagcucuac

SEQ ID NO: 242936 - RNA, 23 nt, Homo sapiens
aaaaccccaucucuacaaaaagc

SEQ ID NO: 242937 - RNA, 16 nt, Homo sapiens
caaggauccugagcca

SEQ ID NO: 242938 - RNA, 15 nt, Homo sapiens
agaguugaagacaga

SEQ ID NO: 242939 - RNA, 15 nt, Homo sapiens
cagguuggugggggc

SEQ ID NO: 242940 - RNA, 19 nt, Homo sapiens
cuguuggcugggggccuca

SEQ ID NO: 242941 - RNA, 17 nt, Homo sapiens
ggagauuuacaacuggg

SEQ ID NO: 242942 - RNA, 14 nt, Homo sapiens
aguugccagucacc

SEQ ID NO: 242943 - RNA, 17 nt, Homo sapiens
augcucugcauguuaca

SEQ ID NO: 242944 - RNA, 22 nt, Homo sapiens
ucagccauuccuguucccauga

SEQ ID NO: 242945 - RNA, 20 nt, Homo sapiens
gcgaucuggguucacugcaa

SEQ ID NO: 242946 - RNA, 14 nt, Homo sapiens
ugggcaaugugaua

SEQ ID NO: 242947 - RNA, 23 nt, Homo sapiens
uaccugaagucuuuguacagaca

SEQ ID NO: 242948 - RNA, 18 nt, Homo sapiens
auguaucaaugaguaaca

SEQ ID NO: 242949 - RNA, 20 nt, Homo sapiens
aagugauccucccaccucag

SEQ ID NO: 242950 - RNA, 20 nt, Homo sapiens
cugugucuugcaauggcagc

SEQ ID NO: 242951 - RNA, 22 nt, Homo sapiens
cagcguuucuaugacacaugca

SEQ ID NO: 242952 - RNA, 13 nt, Homo sapiens
aaauguacagcaa

SEQ ID NO: 242953 - RNA, 13 nt, Homo sapiens
ucagggucccugg

SEQ ID NO: 242954 - RNA, 16 nt, Homo sapiens
aaucucuaguugucac

SEQ ID NO: 242955 - RNA, 17 nt, Homo sapiens
uacuuguggacacagcu

SEQ ID NO: 242956 - RNA, 17 nt, Homo sapiens
aggaugcuuguacauaa

SEQ ID NO: 242957 - RNA, 17 nt, Homo sapiens
cauguuuuucuucuccc

SEQ ID NO: 242958 - RNA, 20 nt, Homo sapiens
aaugacuuaagcacacuuga

SEQ ID NO: 242959 - RNA, 18 nt, Homo sapiens
ggcaugggaaugaauguc

SEQ ID NO: 242960 - RNA, 17 nt, Homo sapiens
cacacuugggagcaaaa

SEQ ID NO: 242961 - RNA, 20 nt, Homo sapiens
aaaucagcugcuacuacucc

SEQ ID NO: 242962 - RNA, 19 nt, Homo sapiens
gaggauugcuugagcucag

SEQ ID NO: 242963 - RNA, 19 nt, Homo sapiens
ccuuucaauaggaaaaacu

SEQ ID NO: 242964 - RNA, 19 nt, Homo sapiens
aaccacuaagagucucuau

SEQ ID NO: 242965 - RNA, 21 nt, Homo sapiens
cuggcaugggaaugaauguca

SEQ ID NO: 242966 - RNA, 20 nt, Homo sapiens
aacucaaacucuuaaaaccc

SEQ ID NO: 242967 - RNA, 21 nt, Homo sapiens
cccuauugcugcuugaggcaa

SEQ ID NO: 242968 - RNA, 21 nt, Homo sapiens
ugggcagagcagagaccaucc

SEQ ID NO: 242969 - RNA, 20 nt, Homo sapiens
uaucaaugaguaacaggaaa

SEQ ID NO: 242970 - RNA, 14 nt, Homo sapiens
aucagcugcuacua

SEQ ID NO: 242971 - RNA, 18 nt, Homo sapiens
auggacaugaucuucuuu

SEQ ID NO: 242972 - RNA, 23 nt, Homo sapiens
uugaagacuuuucuuucagccaa

SEQ ID NO: 242973 - RNA, 14 nt, Homo sapiens
aaacagcugagggu

SEQ ID NO: 242974 - RNA, 14 nt, Homo sapiens
uaacacuguacugc

SEQ ID NO: 242975 - RNA, 20 nt, Homo sapiens
gccaagcagagguugggagg

SEQ ID NO: 242976 - RNA, 16 nt, Homo sapiens
cagugguuggcaauug

SEQ ID NO: 242977 - RNA, 19 nt, Homo sapiens
guacuggagaaaauggacg

SEQ ID NO: 242978 - RNA, 23 nt, Homo sapiens
augggauggcuuggggggcucca

SEQ ID NO: 242979 - RNA, 16 nt, Homo sapiens
cuuuugagugccuuac

SEQ ID NO: 242980 - RNA, 18 nt, Homo sapiens
agcacaaagguagcuuuu

SEQ ID NO: 242981 - RNA, 17 nt, Homo sapiens
ccucaggcaggugggau

SEQ ID NO: 242982 - RNA, 20 nt, Homo sapiens
gaucagccugggcaauguga

SEQ ID NO: 242983 - RNA, 15 nt, Homo sapiens
aucuuuucauuuagg

SEQ ID NO: 242984 - RNA, 16 nt, Homo sapiens
cuccuggcccacugca

SEQ ID NO: 242985 - RNA, 23 nt, Homo sapiens
uccaggggugggacacccuguga

SEQ ID NO: 242986 - RNA, 17 nt, Homo sapiens
cgugcacacaccagagc

SEQ ID NO: 242987 - RNA, 12 nt, Homo sapiens
gcccacacuugg

SEQ ID NO: 242988 - RNA, 17 nt, Homo sapiens
auauuuaccagaccaca

SEQ ID NO: 242989 - RNA, 22 nt, Homo sapiens
aagcagugcaugcugucccuua

SEQ ID NO: 242990 - RNA, 17 nt, Homo sapiens
auucgcugugucagcau

SEQ ID NO: 242991 - RNA, 21 nt, Homo sapiens
gacacucacacggacacucaa

SEQ ID NO: 242992 - RNA, 16 nt, Homo sapiens
cacuaaggugugcucu

SEQ ID NO: 242993 - RNA, 17 nt, Homo sapiens
aauucucauuugucaca

SEQ ID NO: 242994 - RNA, 15 nt, Homo sapiens
ucuuuguacagacaa

SEQ ID NO: 242995 - RNA, 22 nt, Homo sapiens
caucauggagggagaagaaaga

SEQ ID NO: 242996 - RNA, 18 nt, Homo sapiens
agaaaugagcugcacucc

SEQ ID NO: 242997 - RNA, 16 nt, Homo sapiens
ggccccugcccggcug

SEQ ID NO: 242998 - RNA, 16 nt, Homo sapiens
ucauacucaccucacc

SEQ ID NO: 242999 - RNA, 15 nt, Homo sapiens
gagacagcacaggca

SEQ ID NO: 243000 - RNA, 14 nt, Homo sapiens
caucaagaugugac

SEQ ID NO: 243001 - RNA, 22 nt, Homo sapiens
cacacccagcccacuucugcca

SEQ ID NO: 243002 - RNA, 14 nt, Homo sapiens
ucccaccucagccu

SEQ ID NO: 243003 - RNA, 18 nt, Homo sapiens
guuugguucauggugaag

SEQ ID NO: 243004 - RNA, 21 nt, Homo sapiens
cuuuuuuggcugcugaaggcu

SEQ ID NO: 243005 - RNA, 23 nt, Homo sapiens
uaaguacuauguaucaaugagua

SEQ ID NO: 243006 - RNA, 16 nt, Homo sapiens
gcgugagccacugcac

SEQ ID NO: 243007 - RNA, 14 nt, Homo sapiens
ccuggccucaagug

SEQ ID NO: 243008 - RNA, 14 nt, Homo sapiens
gaauguuugccucu

SEQ ID NO: 243009 - RNA, 12 nt, Homo sapiens
uguuugugauug

SEQ ID NO: 243010 - RNA, 13 nt, Homo sapiens
cucugaaaaccaa

SEQ ID NO: 243011 - RNA, 13 nt, Homo sapiens
ggcggugagcaau

SEQ ID NO: 243012 - RNA, 16 nt, Homo sapiens
cccaaacccuucagug

SEQ ID NO: 243013 - RNA, 21 nt, Homo sapiens
gaguuauuuuuauuuauuuaa

SEQ ID NO: 243014 - RNA, 16 nt, Homo sapiens
gagagggggauguuuc

SEQ ID NO: 243015 - RNA, 15 nt, Homo sapiens
guguuuauugucaaa

SEQ ID NO: 243016 - RNA, 22 nt, Homo sapiens
ugggggaucacagccucugaaa

SEQ ID NO: 243017 - RNA, 23 nt, Homo sapiens
uugguggcagaguggauucuuga

SEQ ID NO: 243018 - RNA, 17 nt, Homo sapiens
auaauacaguaucucag

SEQ ID NO: 243019 - RNA, 19 nt, Homo sapiens
aagaauugaaaaaccauuu

SEQ ID NO: 243020 - RNA, 17 nt, Homo sapiens
uguccuacucuguguca

SEQ ID NO: 243021 - RNA, 18 nt, Homo sapiens
gaggacacuaaccacgcu

SEQ ID NO: 243022 - RNA, 19 nt, Homo sapiens
aacuggguacuuguggaca

SEQ ID NO: 243023 - RNA, 18 nt, Homo sapiens
cucuggcuaaauucaugc

SEQ ID NO: 243024 - RNA, 14 nt, Homo sapiens
ucccauuugcuccu

SEQ ID NO: 243025 - RNA, 20 nt, Homo sapiens
gauagauauaugcucugcau

SEQ ID NO: 243026 - RNA, 12 nt, Homo sapiens
auggacuuuguu

SEQ ID NO: 243027 - RNA, 17 nt, Homo sapiens
cuggcacuauaauguaa

SEQ ID NO: 243028 - RNA, 15 nt, Homo sapiens
caaaucagcugcuac

SEQ ID NO: 243029 - RNA, 15 nt, Homo sapiens
aauucuuucaguggc

SEQ ID NO: 243030 - RNA, 21 nt, Homo sapiens
cuuccaauuuacauacucugc

SEQ ID NO: 243031 - RNA, 17 nt, Homo sapiens
agauagccaaggccaaa

SEQ ID NO: 243032 - RNA, 16 nt, Homo sapiens
aggaaacugcacuguu

SEQ ID NO: 243033 - RNA, 13 nt, Homo sapiens
uguucccaugaga

SEQ ID NO: 243034 - RNA, 13 nt, Homo sapiens
cugugugaugaug

SEQ ID NO: 243035 - RNA, 17 nt, Homo sapiens
auagccuaggugacaga

SEQ ID NO: 243036 - RNA, 19 nt, Homo sapiens
uuucuggcuaugcauuuga

SEQ ID NO: 243037 - RNA, 21 nt, Homo sapiens
gauuaauuaaaacacaacauc

SEQ ID NO: 243038 - RNA, 17 nt, Homo sapiens
cagaaggaagacuucau

SEQ ID NO: 243039 - RNA, 17 nt, Homo sapiens
acuugacaucaacugca

SEQ ID NO: 243040 - RNA, 20 nt, Homo sapiens
ggaggugaccccagguuucu

SEQ ID NO: 243041 - RNA, 21 nt, Homo sapiens
aaaugucucuuuaaugucaca

SEQ ID NO: 243042 - RNA, 11 nt, Homo sapiens
aucaccagaca

SEQ ID NO: 243043 - RNA, 16 nt, Homo sapiens
ugguggacaugcacag

SEQ ID NO: 243044 - RNA, 15 nt, Homo sapiens
aaagaguaggaagac

SEQ ID NO: 243045 - RNA, 19 nt, Homo sapiens
aagauaaaugugcugaaug

SEQ ID NO: 243046 - RNA, 15 nt, Homo sapiens
agacuggaagcacag

SEQ ID NO: 243047 - RNA, 19 nt, Homo sapiens
uccuucacagaugggugcu

SEQ ID NO: 243048 - RNA, 18 nt, Homo sapiens
aauucucauuugucacac

SEQ ID NO: 243049 - RNA, 13 nt, Homo sapiens
ggguucacugcaa

SEQ ID NO: 243050 - RNA, 14 nt, Homo sapiens
caccaccaaccacu

SEQ ID NO: 243051 - RNA, 21 nt, Homo sapiens
gugaccucugccugaagucac

SEQ ID NO: 243052 - RNA, 21 nt, Homo sapiens
accuagccuuagaagucacac

SEQ ID NO: 243053 - RNA, 22 nt, Homo sapiens
cucagaagacacugaugggcaa

SEQ ID NO: 243054 - RNA, 17 nt, Homo sapiens
uauaauguaagcucuac

SEQ ID NO: 243055 - RNA, 13 nt, Homo sapiens
ucuacccaggugc

SEQ ID NO: 243056 - RNA, 16 nt, Homo sapiens
uauuuuuagacagagu

SEQ ID NO: 243057 - RNA, 12 nt, Homo sapiens
cuggggugggag

SEQ ID NO: 243058 - RNA, 12 nt, Homo sapiens
uaagagaaauga

SEQ ID NO: 243059 - RNA, 20 nt, Homo sapiens
uuaaauaaugugaaacugga

SEQ ID NO: 243060 - RNA, 14 nt, Homo sapiens
aauacaguaucuca

SEQ ID NO: 243061 - RNA, 20 nt, Homo sapiens
aaucagcugcuacuacuccu

SEQ ID NO: 243062 - RNA, 15 nt, Homo sapiens
gucggaaaacaugcu

SEQ ID NO: 243063 - RNA, 20 nt, Homo sapiens
gauacccaucccauaugccu

SEQ ID NO: 243064 - RNA, 14 nt, Homo sapiens
aaacucaccugccc

SEQ ID NO: 243065 - RNA, 18 nt, Homo sapiens
ccucaaccuccugggcua

SEQ ID NO: 243066 - RNA, 13 nt, Homo sapiens
uacguugugcauu

SEQ ID NO: 243067 - RNA, 16 nt, Homo sapiens
acacucuugguagaag

SEQ ID NO: 243068 - RNA, 20 nt, Homo sapiens
uucuguccgagcuuugaaaa

SEQ ID NO: 243069 - RNA, 17 nt, Homo sapiens
acacuugggagcaaaag

SEQ ID NO: 243070 - RNA, 20 nt, Homo sapiens
guagagacaggguuuugcca

SEQ ID NO: 243071 - RNA, 18 nt, Homo sapiens
acagcucuucuccaggcu

SEQ ID NO: 243072 - RNA, 23 nt, Homo sapiens
aggaagcaaaagcaucuauguga

SEQ ID NO: 243073 - RNA, 17 nt, Homo sapiens
acaaugacuuacuguac

SEQ ID NO: 243074 - RNA, 13 nt, Homo sapiens
acguugugcauuu

SEQ ID NO: 243075 - RNA, 18 nt, Homo sapiens
gucacuuuccucuuccac

SEQ ID NO: 243076 - RNA, 19 nt, Homo sapiens
gcucagcggggacagcucc

SEQ ID NO: 243077 - RNA, 13 nt, Homo sapiens
aaucuaaauggaa

SEQ ID NO: 243078 - RNA, 21 nt, Homo sapiens
cagacuacuucuuccccagau

SEQ ID NO: 243079 - RNA, 17 nt, Homo sapiens
uaaugacuuaagcacac

SEQ ID NO: 243080 - RNA, 19 nt, Homo sapiens
uuuccuguagucccauuga

SEQ ID NO: 243081 - RNA, 21 nt, Homo sapiens
cagaaguuugagaucagccug

SEQ ID NO: 243082 - RNA, 18 nt, Homo sapiens
cugacacacagcucuguc

SEQ ID NO: 243083 - RNA, 18 nt, Homo sapiens
accaccaaccacugcgac

SEQ ID NO: 243084 - RNA, 17 nt, Homo sapiens
auucauauuuacuucuu

SEQ ID NO: 243085 - RNA, 15 nt, Homo sapiens
cccccuuccauggac

SEQ ID NO: 243086 - RNA, 22 nt, Homo sapiens
gacucgauagugguggugaaca

SEQ ID NO: 243087 - RNA, 17 nt, Homo sapiens
agcuuguaaauagcuca

SEQ ID NO: 243088 - RNA, 18 nt, Homo sapiens
ugcaugaaguaauaugca

SEQ ID NO: 243089 - RNA, 16 nt, Homo sapiens
ucaaggcugcagugag

SEQ ID NO: 243090 - RNA, 19 nt, Homo sapiens
aguugaugaaauaucaaga

SEQ ID NO: 243091 - RNA, 22 nt, Homo sapiens
gauuacaagcgugagccacugc

SEQ ID NO: 243092 - RNA, 21 nt, Homo sapiens
auuccaaacacauacaggaag

SEQ ID NO: 243093 - RNA, 20 nt, Homo sapiens
aauucucuaguuugauuaaa

SEQ ID NO: 243094 - RNA, 14 nt, Homo sapiens
aauucuacuuugag

SEQ ID NO: 243095 - RNA, 22 nt, Homo sapiens
aggauccugagccagauuucac

SEQ ID NO: 243096 - RNA, 15 nt, Homo sapiens
uggaagcacagcuuc

SEQ ID NO: 243097 - RNA, 16 nt, Homo sapiens
auagugucccacggug

SEQ ID NO: 243098 - RNA, 20 nt, Homo sapiens
caggguuuugccauguuggc

SEQ ID NO: 243099 - RNA, 17 nt, Homo sapiens
cuccacuuucuagccag

SEQ ID NO: 243100 - RNA, 15 nt, Homo sapiens
ggaaacugcacuguu

SEQ ID NO: 243101 - RNA, 15 nt, Homo sapiens
uacaaaagcauguga

SEQ ID NO: 243102 - RNA, 17 nt, Homo sapiens
uuagacagagucucacu

SEQ ID NO: 243103 - RNA, 18 nt, Homo sapiens
ucuaugggacucaaugca

SEQ ID NO: 243104 - RNA, 17 nt, Homo sapiens
gcacagcuaacauggaa

SEQ ID NO: 243105 - RNA, 18 nt, Homo sapiens
uagagccagggucucacu

SEQ ID NO: 243106 - RNA, 15 nt, Homo sapiens
aacccauuuuagaga

SEQ ID NO: 243107 - RNA, 20 nt, Homo sapiens
acugcacuauagccuaggug

SEQ ID NO: 243108 - RNA, 15 nt, Homo sapiens
aaaaauaacacugua

SEQ ID NO: 243109 - RNA, 20 nt, Homo sapiens
ccaacaucaacaucuugguc

SEQ ID NO: 243110 - RNA, 13 nt, Homo sapiens
cucuacaaaaagc

SEQ ID NO: 243111 - RNA, 20 nt, Homo sapiens
cagggcacaccgggcacuca

SEQ ID NO: 243112 - RNA, 17 nt, Homo sapiens
cugguguggaagagcuc

SEQ ID NO: 243113 - RNA, 23 nt, Homo sapiens
guuuuuauggcuuuugugcauua

SEQ ID NO: 243114 - RNA, 16 nt, Homo sapiens
uccuaagcuauucagu

SEQ ID NO: 243115 - RNA, 18 nt, Homo sapiens
uuuuguuccacaaguuaa

SEQ ID NO: 243116 - RNA, 11 nt, Homo sapiens
gagcugggaug

SEQ ID NO: 243117 - RNA, 21 nt, Homo sapiens
auuaacuuuuauaaacuuuac

SEQ ID NO: 243118 - RNA, 15 nt, Homo sapiens
guagagucacuggaa

SEQ ID NO: 243119 - RNA, 21 nt, Homo sapiens
acagauuuuuggagaaaggau

SEQ ID NO: 243120 - RNA, 16 nt, Homo sapiens
gucuggaaugcagugg

SEQ ID NO: 243121 - RNA, 14 nt, Homo sapiens
gagauggccaugua

SEQ ID NO: 243122 - RNA, 20 nt, Homo sapiens
uggauuaaacuuaaucuaaa

SEQ ID NO: 243123 - RNA, 23 nt, Homo sapiens
ucucuugauucauaaugacuuaa

SEQ ID NO: 243124 - RNA, 13 nt, Homo sapiens
aaaagcugggcag

SEQ ID NO: 243125 - RNA, 23 nt, Homo sapiens
ugguggcagaguggauucuugaa

SEQ ID NO: 243126 - RNA, 14 nt, Homo sapiens
agaguagagucacu

SEQ ID NO: 243127 - RNA, 18 nt, Homo sapiens
gcaggcucucaggccagc

SEQ ID NO: 243128 - RNA, 10 nt, Homo sapiens
ggacuuuguu

SEQ ID NO: 243129 - RNA, 21 nt, Homo sapiens
acacagcucuucuccaggcug

SEQ ID NO: 243130 - RNA, 14 nt, Homo sapiens
uagcccaaaaccaa

SEQ ID NO: 243131 - RNA, 18 nt, Homo sapiens
uuccaaugcuuugauccc

SEQ ID NO: 243132 - RNA, 23 nt, Homo sapiens
aauaacuaaaagguaugcaauca

SEQ ID NO: 243133 - RNA, 18 nt, Homo sapiens
gagaagagaaugcacaaa

SEQ ID NO: 243134 - RNA, 15 nt, Homo sapiens
uuucaaccaguuuga

SEQ ID NO: 243135 - RNA, 12 nt, Homo sapiens
acugggggcaac

SEQ ID NO: 243136 - RNA, 17 nt, Homo sapiens
caucacuucccuacaug

SEQ ID NO: 243137 - RNA, 19 nt, Homo sapiens
acaucuugcucugcugaca

SEQ ID NO: 243138 - RNA, 20 nt, Homo sapiens
ggaugcauucccuacagauu

SEQ ID NO: 243139 - RNA, 15 nt, Homo sapiens
uacccucuggagaua

SEQ ID NO: 243140 - RNA, 13 nt, Homo sapiens
gauuaaacuuaau

SEQ ID NO: 243141 - RNA, 14 nt, Homo sapiens
uuccccacuugaga

SEQ ID NO: 243142 - RNA, 18 nt, Homo sapiens
uacucgaguuacagacaa

SEQ ID NO: 243143 - RNA, 22 nt, Homo sapiens
uccugugugugcgccuacagga

SEQ ID NO: 243144 - RNA, 20 nt, Homo sapiens
auuuugggguacccacugcu

SEQ ID NO: 243145 - RNA, 21 nt, Homo sapiens
aagacugaguacguugugcau

SEQ ID NO: 243146 - RNA, 18 nt, Homo sapiens
cuaagcuauucaguaaua

SEQ ID NO: 243147 - RNA, 21 nt, Homo sapiens
cgagcaugccuggauggggcu

SEQ ID NO: 243148 - RNA, 14 nt, Homo sapiens
augacuuacuguac

SEQ ID NO: 243149 - RNA, 15 nt, Homo sapiens
gauagauauaugcuc

SEQ ID NO: 243150 - RNA, 15 nt, Homo sapiens
cuuuccuucauucaa

SEQ ID NO: 243151 - RNA, 13 nt, Homo sapiens
agcugaaccuggg

SEQ ID NO: 243152 - RNA, 18 nt, Homo sapiens
cgcugugucagcauagaa

SEQ ID NO: 243153 - RNA, 21 nt, Homo sapiens
caagcuggucccacucagucc

SEQ ID NO: 243154 - RNA, 15 nt, Homo sapiens
ugaguccuggcaugg

SEQ ID NO: 243155 - RNA, 22 nt, Homo sapiens
guagagacaggguuuugccaug

SEQ ID NO: 243156 - RNA, 22 nt, Homo sapiens
caucuugcucugcugacagaca

SEQ ID NO: 243157 - RNA, 23 nt, Homo sapiens
cccauguaagcaccccuucauuu

SEQ ID NO: 243158 - RNA, 22 nt, Homo sapiens
uaggccuggggacggcuuuuac

SEQ ID NO: 243159 - RNA, 16 nt, Homo sapiens
gaagacuucaucccuc

SEQ ID NO: 243160 - RNA, 11 nt, Homo sapiens
aguuugcaguu

SEQ ID NO: 243161 - RNA, 16 nt, Homo sapiens
ccuauauuguuuucag

SEQ ID NO: 243162 - RNA, 22 nt, Homo sapiens
caugugccagguuuuuggucug

SEQ ID NO: 243163 - RNA, 11 nt, Homo sapiens
uggugugauuu

SEQ ID NO: 243164 - RNA, 18 nt, Homo sapiens
ugccucgaacuggcugca

SEQ ID NO: 243165 - RNA, 23 nt, Homo sapiens
auuacaggugugaaccaccacac

SEQ ID NO: 243166 - RNA, 14 nt, Homo sapiens
aguucaucuugaau

SEQ ID NO: 243167 - RNA, 19 nt, Homo sapiens
agcacuaaggugugcucug

SEQ ID NO: 243168 - RNA, 21 nt, Homo sapiens
cccuucauccuucuggaauaa

SEQ ID NO: 243169 - RNA, 20 nt, Homo sapiens
gaccucaggugauccaccca

SEQ ID NO: 243170 - RNA, 17 nt, Homo sapiens
caggaaaggcuccagga

SEQ ID NO: 243171 - RNA, 18 nt, Homo sapiens
cacguacacacacauaca

SEQ ID NO: 243172 - RNA, 14 nt, Homo sapiens
aucugaaaauguau

SEQ ID NO: 243173 - RNA, 19 nt, Homo sapiens
gccuacaggagugagcacu

SEQ ID NO: 243174 - RNA, 19 nt, Homo sapiens
ccccuucauuuggcauucc

SEQ ID NO: 243175 - RNA, 22 nt, Homo sapiens
uucaauucucauuugucacaca

SEQ ID NO: 243176 - RNA, 16 nt, Homo sapiens
aagcugggagaaccaa

SEQ ID NO: 243177 - RNA, 18 nt, Homo sapiens
cuuuuuaaagaaugcucu

SEQ ID NO: 243178 - RNA, 13 nt, Homo sapiens
gagagccuuccag

SEQ ID NO: 243179 - RNA, 15 nt, Homo sapiens
gauguucugggacac

SEQ ID NO: 243180 - RNA, 15 nt, Homo sapiens
ucuggcucuuccagg

SEQ ID NO: 243181 - RNA, 13 nt, Homo sapiens
caauuauuuugca

SEQ ID NO: 243182 - RNA, 21 nt, Homo sapiens
auauuaagaaagacuaucuaa

SEQ ID NO: 243183 - RNA, 23 nt, Homo sapiens
aaguuuuuauggcuuuugugcau

SEQ ID NO: 243184 - RNA, 17 nt, Homo sapiens
uuaagagaaaugagcuu

SEQ ID NO: 243185 - RNA, 18 nt, Homo sapiens
aguuggucccccuuccau

SEQ ID NO: 243186 - RNA, 22 nt, Homo sapiens
ccucagccucccaaagugcugg

SEQ ID NO: 243187 - RNA, 14 nt, Homo sapiens
uaugaggcauuugu

SEQ ID NO: 243188 - RNA, 20 nt, Homo sapiens
aauacagauagauauaugcu

SEQ ID NO: 243189 - RNA, 22 nt, Homo sapiens
aggaugaucuaggaagacuuug

SEQ ID NO: 243190 - RNA, 17 nt, Homo sapiens
ucaccacaugugcacau

SEQ ID NO: 243191 - RNA, 13 nt, Homo sapiens
cacacugcuugug

SEQ ID NO: 243192 - RNA, 18 nt, Homo sapiens
acuuguggacacagcucu

SEQ ID NO: 243193 - RNA, 19 nt, Homo sapiens
caaccaguuugaaccaaga

SEQ ID NO: 243194 - RNA, 22 nt, Homo sapiens
uauucuguuggccagugugaca

SEQ ID NO: 243195 - RNA, 13 nt, Homo sapiens
ugacuuacuguac

SEQ ID NO: 243196 - RNA, 16 nt, Homo sapiens
cauccagguucagcuu

SEQ ID NO: 243197 - RNA, 19 nt, Homo sapiens
auuugaacucuucaaucuc

SEQ ID NO: 243198 - RNA, 23 nt, Homo sapiens
agugguggugaacagaacaaaag

SEQ ID NO: 243199 - RNA, 17 nt, Homo sapiens
aaccaccaccaaccacu

SEQ ID NO: 243200 - RNA, 15 nt, Homo sapiens
gaggugggauccucc

SEQ ID NO: 243201 - RNA, 21 nt, Homo sapiens
guaaaugggggugcauuugag

SEQ ID NO: 243202 - RNA, 20 nt, Homo sapiens
gauguucugacccugcuuca

SEQ ID NO: 243203 - RNA, 15 nt, Homo sapiens
uaucagaauucucag

SEQ ID NO: 243204 - RNA, 15 nt, Homo sapiens
acagggugagcacuc

SEQ ID NO: 243205 - RNA, 14 nt, Homo sapiens
gcucugccucccau

SEQ ID NO: 243206 - RNA, 20 nt, Homo sapiens
gcccaggcuggcgugcagug

SEQ ID NO: 243207 - RNA, 17 nt, Homo sapiens
ccauguuggccaggcug

SEQ ID NO: 243208 - RNA, 22 nt, Homo sapiens
ucuugaaauauaggaacuuaaa

SEQ ID NO: 243209 - RNA, 20 nt, Homo sapiens
caagacgcugugcugcccug

SEQ ID NO: 243210 - RNA, 23 nt, Homo sapiens
ucuguggguuucuaaagcugcca

SEQ ID NO: 243211 - RNA, 18 nt, Homo sapiens
gaauauaacuuuuuccaa

SEQ ID NO: 243212 - RNA, 22 nt, Homo sapiens
agcugggguggggaccucaggc

SEQ ID NO: 243213 - RNA, 19 nt, Homo sapiens
cauggacaaggaugaucua

SEQ ID NO: 243214 - RNA, 22 nt, Homo sapiens
ucaaaauaaaaaugagguacuc

SEQ ID NO: 243215 - RNA, 16 nt, Homo sapiens
uauuuaccagaccaca

SEQ ID NO: 243216 - RNA, 16 nt, Homo sapiens
cccauugauguacuuu

SEQ ID NO: 243217 - RNA, 13 nt, Homo sapiens
guacuacaguccu

SEQ ID NO: 243218 - RNA, 17 nt, Homo sapiens
aaaguuucucuuuucaa

SEQ ID NO: 243219 - RNA, 17 nt, Homo sapiens
guggugaacagaacaaa

SEQ ID NO: 243220 - RNA, 13 nt, Homo sapiens
caggaaguacugg

SEQ ID NO: 243221 - RNA, 19 nt, Homo sapiens
aaucauaaaacuugaugug

SEQ ID NO: 243222 - RNA, 20 nt, Homo sapiens
gaggcaggaggaucacuuga

SEQ ID NO: 243223 - RNA, 18 nt, Homo sapiens
cauguguguucaugcaca

SEQ ID NO: 243224 - RNA, 19 nt, Homo sapiens
aucucuugcacucaaagcu

SEQ ID NO: 243225 - RNA, 14 nt, Homo sapiens
agacucugucucaa

SEQ ID NO: 243226 - RNA, 22 nt, Homo sapiens
cuucuuccccccaaaacugauu

SEQ ID NO: 243227 - RNA, 13 nt, Homo sapiens
aggcuggucucaa

SEQ ID NO: 243228 - RNA, 19 nt, Homo sapiens
uucagugccaaaaacaaca

SEQ ID NO: 243229 - RNA, 22 nt, Homo sapiens
cagugcccacaggaucagucug

SEQ ID NO: 243230 - RNA, 19 nt, Homo sapiens
augucucuuuaaugucaca

SEQ ID NO: 243231 - RNA, 21 nt, Homo sapiens
uagucccauugauguacuuua

SEQ ID NO: 243232 - RNA, 12 nt, Homo sapiens
guaaggcugugg

SEQ ID NO: 243233 - RNA, 18 nt, Homo sapiens
gccaugggccuccugugu

SEQ ID NO: 243234 - RNA, 20 nt, Homo sapiens
auacagacagagauggccau

SEQ ID NO: 243235 - RNA, 16 nt, Homo sapiens
cugccacccuggggag

SEQ ID NO: 243236 - RNA, 17 nt, Homo sapiens
gacuacaggcacccacc

SEQ ID NO: 243237 - RNA, 20 nt, Homo sapiens
acgugugugcacguacacac

SEQ ID NO: 243238 - RNA, 18 nt, Homo sapiens
ccaacgucugugccauuu

SEQ ID NO: 243239 - RNA, 20 nt, Homo sapiens
ugguuaucuaauauguaaca

SEQ ID NO: 243240 - RNA, 20 nt, Homo sapiens
ucucacucugucgcccaguc

SEQ ID NO: 243241 - RNA, 23 nt, Homo sapiens
ugugcauuaucuagauacuguau

SEQ ID NO: 243242 - RNA, 16 nt, Homo sapiens
caaggcaaggcuguca

SEQ ID NO: 243243 - RNA, 15 nt, Homo sapiens
ccacggccaggccag

SEQ ID NO: 243244 - RNA, 20 nt, Homo sapiens
gggcucccuucccaccucuc

SEQ ID NO: 243245 - RNA, 15 nt, Homo sapiens
ucaaccccaugagac

SEQ ID NO: 243246 - RNA, 13 nt, Homo sapiens
ucuugaagacuuu

SEQ ID NO: 243247 - RNA, 16 nt, Homo sapiens
agucucuugauucaua

SEQ ID NO: 243248 - RNA, 20 nt, Homo sapiens
aagccagcaggcucucaggc

SEQ ID NO: 243249 - RNA, 18 nt, Homo sapiens
uuuugcccacacuuggga

SEQ ID NO: 243250 - RNA, 16 nt, Homo sapiens
uuacuuuguguucacc

SEQ ID NO: 243251 - RNA, 15 nt, Homo sapiens
cucugacacacagcu

SEQ ID NO: 243252 - RNA, 21 nt, Homo sapiens
uaguugucacuuuccucuucc

SEQ ID NO: 243253 - RNA, 14 nt, Homo sapiens
agcagaaaugccuu

SEQ ID NO: 243254 - RNA, 14 nt, Homo sapiens
ucauaaugacuuaa

SEQ ID NO: 243255 - RNA, 15 nt, Homo sapiens
uguuacugucuucag

SEQ ID NO: 243256 - RNA, 20 nt, Homo sapiens
aacuugauguguuaucucuu

SEQ ID NO: 243257 - RNA, 21 nt, Homo sapiens
augugacuugagcccagagug

SEQ ID NO: 243258 - RNA, 19 nt, Homo sapiens
cagagucucacuguugccc

SEQ ID NO: 243259 - RNA, 16 nt, Homo sapiens
auugaauauaacuuuu

SEQ ID NO: 243260 - RNA, 22 nt, Homo sapiens
uuaaaauaaauuuguaugcuca

SEQ ID NO: 243261 - RNA, 13 nt, Homo sapiens
ugaaaacacuguu

SEQ ID NO: 243262 - RNA, 16 nt, Homo sapiens
caucuugaauuguaag

SEQ ID NO: 243263 - RNA, 15 nt, Homo sapiens
agugggggaucacag

SEQ ID NO: 243264 - RNA, 18 nt, Homo sapiens
uacuguaauuugugauac

SEQ ID NO: 243265 - RNA, 13 nt, Homo sapiens
gcauguguguuca

SEQ ID NO: 243266 - RNA, 22 nt, Homo sapiens
agacagaguuuucacucuuauu

SEQ ID NO: 243267 - RNA, 20 nt, Homo sapiens
ccugaagucacacagugagu

SEQ ID NO: 243268 - RNA, 21 nt, Homo sapiens
ugaaaaaaaaaaacacaaaaa

SEQ ID NO: 243269 - RNA, 20 nt, Homo sapiens
cgaucuggguucacugcaac

SEQ ID NO: 243270 - RNA, 14 nt, Homo sapiens
auuguuagucucuu

SEQ ID NO: 243271 - RNA, 14 nt, Homo sapiens
aacucuugaccuca

SEQ ID NO: 243272 - RNA, 23 nt, Homo sapiens
cuguacaaaguagaagucuuaga

SEQ ID NO: 243273 - RNA, 19 nt, Homo sapiens
ugaaaaaauaacacuguac

SEQ ID NO: 243274 - RNA, 17 nt, Homo sapiens
gacaccuugacagggca

SEQ ID NO: 243275 - RNA, 15 nt, Homo sapiens
acaaaaaacaacuga

SEQ ID NO: 243276 - RNA, 15 nt, Homo sapiens
uggccucaagugauu

SEQ ID NO: 243277 - RNA, 22 nt, Homo sapiens
accauucuccaccugccaggga

SEQ ID NO: 243278 - RNA, 20 nt, Homo sapiens
aacuuuccuucauucaaccc

SEQ ID NO: 243279 - RNA, 20 nt, Homo sapiens
accucaggugagaagcagag

SEQ ID NO: 243280 - RNA, 19 nt, Homo sapiens
agaauuucccaaagcagug

SEQ ID NO: 243281 - RNA, 14 nt, Homo sapiens
aaaugccagugugc

SEQ ID NO: 243282 - RNA, 19 nt, Homo sapiens
cauuccuguucccaugaga

SEQ ID NO: 243283 - RNA, 13 nt, Homo sapiens
ugaauaauacagu

SEQ ID NO: 243284 - RNA, 16 nt, Homo sapiens
uucugggacacaguuc

SEQ ID NO: 243285 - RNA, 17 nt, Homo sapiens
gcaauacagacuacuuc

SEQ ID NO: 243286 - RNA, 21 nt, Homo sapiens
ugauucuuuugcccacacuug

SEQ ID NO: 243287 - RNA, 13 nt, Homo sapiens
agagacagaagaa

SEQ ID NO: 243288 - RNA, 14 nt, Homo sapiens
uccucccaccucag

SEQ ID NO: 243289 - RNA, 18 nt, Homo sapiens
gugauccucccaccucag

SEQ ID NO: 243290 - RNA, 15 nt, Homo sapiens
uucucauuugucaca

SEQ ID NO: 243291 - RNA, 21 nt, Homo sapiens
uacacacacacgcgugcacac

SEQ ID NO: 243292 - RNA, 16 nt, Homo sapiens
agccuaggugacagag

SEQ ID NO: 243293 - RNA, 18 nt, Homo sapiens
augccagcuuaucucagg

SEQ ID NO: 243294 - RNA, 21 nt, Homo sapiens
uaagagggagggagggcucca

SEQ ID NO: 243295 - RNA, 22 nt, Homo sapiens
acagccaugauucuuuugccca

SEQ ID NO: 243296 - RNA, 13 nt, Homo sapiens
gagaaggggccca

SEQ ID NO: 243297 - RNA, 19 nt, Homo sapiens
gcuguucacucucucgucu

SEQ ID NO: 243298 - RNA, 14 nt, Homo sapiens
ucgcgugaugcgca

SEQ ID NO: 243299 - RNA, 15 nt, Homo sapiens
aaaaaucccuuaccu

SEQ ID NO: 243300 - RNA, 18 nt, Homo sapiens
aucacuucccuacaugga

SEQ ID NO: 243301 - RNA, 21 nt, Homo sapiens
cagacucuacagaggccaugg

SEQ ID NO: 243302 - RNA, 22 nt, Homo sapiens
uggaauuuugugcccccaugua

SEQ ID NO: 243303 - RNA, 16 nt, Homo sapiens
ucccaaagcagugcau

SEQ ID NO: 243304 - RNA, 19 nt, Homo sapiens
cagggucucacucugucgc

SEQ ID NO: 243305 - RNA, 18 nt, Homo sapiens
aauacagauauaagaaau

SEQ ID NO: 243306 - RNA, 13 nt, Homo sapiens
aacaccucugcac

SEQ ID NO: 243307 - RNA, 20 nt, Homo sapiens
augugagaccauuuagcaca

SEQ ID NO: 243308 - RNA, 15 nt, Homo sapiens
aauuguuuggggaug

SEQ ID NO: 243309 - RNA, 17 nt, Homo sapiens
auaaaaccccaucucua

SEQ ID NO: 243310 - RNA, 14 nt, Homo sapiens
augauagcuacugu

SEQ ID NO: 243311 - RNA, 22 nt, Homo sapiens
gugugugcacguacacacacau

SEQ ID NO: 243312 - RNA, 18 nt, Homo sapiens
uggcaugggaaugaaugu

SEQ ID NO: 243313 - RNA, 13 nt, Homo sapiens
auacacuuacacu

SEQ ID NO: 243314 - RNA, 22 nt, Homo sapiens
augauccuaggcauuugcugaa

SEQ ID NO: 243315 - RNA, 20 nt, Homo sapiens
caagacucuuuggacacuca

SEQ ID NO: 243316 - RNA, 16 nt, Homo sapiens
ucucaggccagcugcu

SEQ ID NO: 243317 - RNA, 15 nt, Homo sapiens
gaccgugaggccaga

SEQ ID NO: 243318 - RNA, 14 nt, Homo sapiens
guuacugucuucag

SEQ ID NO: 243319 - RNA, 17 nt, Homo sapiens
cuaauauguaacaagcc

SEQ ID NO: 243320 - RNA, 14 nt, Homo sapiens
gcuggagugcagug

SEQ ID NO: 243321 - RNA, 21 nt, Homo sapiens
aaauucucuuuccuguagucc

SEQ ID NO: 243322 - RNA, 21 nt, Homo sapiens
aauacagacuacuucuucccc

SEQ ID NO: 243323 - RNA, 21 nt, Homo sapiens
uugcccacacuugggagcaaa

SEQ ID NO: 243324 - RNA, 18 nt, Homo sapiens
uuucauaaccuagccuua

SEQ ID NO: 243325 - RNA, 13 nt, Homo sapiens
agauggccaugua

SEQ ID NO: 243326 - RNA, 16 nt, Homo sapiens
cuccagcucaccagcc

SEQ ID NO: 243327 - RNA, 13 nt, Homo sapiens
uaagaaagacuau

SEQ ID NO: 243328 - RNA, 21 nt, Homo sapiens
auuuuguuuuugucuuaaaaa

SEQ ID NO: 243329 - RNA, 9 nt, Homo sapiens
gacuuggaa

SEQ ID NO: 243330 - RNA, 13 nt, Homo sapiens
aauucuacuuuga

SEQ ID NO: 243331 - RNA, 16 nt, Homo sapiens
uccaugauguuuucca

SEQ ID NO: 243332 - RNA, 13 nt, Homo sapiens
ccucuuccacuuu

SEQ ID NO: 243333 - RNA, 22 nt, Homo sapiens
acucauucuucuguacgucuga

SEQ ID NO: 243334 - RNA, 17 nt, Homo sapiens
uacuucauggacuucca

SEQ ID NO: 243335 - RNA, 19 nt, Homo sapiens
ccacuuucuagccagagga

SEQ ID NO: 243336 - RNA, 20 nt, Homo sapiens
aaacuuuucuaauacucuac

SEQ ID NO: 243337 - RNA, 18 nt, Homo sapiens
accuugaaugaugccaug

SEQ ID NO: 243338 - RNA, 11 nt, Homo sapiens
agaaugcucuu

SEQ ID NO: 243339 - RNA, 12 nt, Homo sapiens
cccggcccagug

SEQ ID NO: 243340 - RNA, 15 nt, Homo sapiens
uucgaauccagagag

SEQ ID NO: 243341 - RNA, 16 nt, Homo sapiens
cugauggugcaaugac

SEQ ID NO: 243342 - RNA, 21 nt, Homo sapiens
cugaucauccacugugccaug

SEQ ID NO: 243343 - RNA, 22 nt, Homo sapiens
uaaugaaagacuguacaaagua

SEQ ID NO: 243344 - RNA, 21 nt, Homo sapiens
cuuuucgcaggauucuuccuc

SEQ ID NO: 243345 - RNA, 22 nt, Homo sapiens
uucaguggcuaccuacauacaa

SEQ ID NO: 243346 - RNA, 16 nt, Homo sapiens
aucaagaugugacaug

SEQ ID NO: 243347 - RNA, 20 nt, Homo sapiens
uauguggaguucaucuugaa

SEQ ID NO: 243348 - RNA, 19 nt, Homo sapiens
aauaacacuguacugcaau

SEQ ID NO: 243349 - RNA, 22 nt, Homo sapiens
aagaagcccaggaaaggcucca

SEQ ID NO: 243350 - RNA, 18 nt, Homo sapiens
auuucuaaaucuccaaaa

SEQ ID NO: 243351 - RNA, 20 nt, Homo sapiens
augccaugaggaacaaggca

SEQ ID NO: 243352 - RNA, 14 nt, Homo sapiens
aauauuuaccagac

SEQ ID NO: 243353 - RNA, 14 nt, Homo sapiens
uaacagaaauguac

SEQ ID NO: 243354 - RNA, 22 nt, Homo sapiens
gggaaugaaugucagugugacu

SEQ ID NO: 243355 - RNA, 16 nt, Homo sapiens
aaugacuuaagcacac

SEQ ID NO: 243356 - RNA, 13 nt, Homo sapiens
cuggcgugcagug

SEQ ID NO: 243357 - RNA, 24 nt, Homo sapiens
cagcugacuuuucuguccgagcuu

SEQ ID NO: 243358 - RNA, 19 nt, Homo sapiens
gagugagacucugucucaa

SEQ ID NO: 243359 - RNA, 22 nt, Homo sapiens
gaggcugggcucccuucccacc

SEQ ID NO: 243360 - RNA, 23 nt, Homo sapiens
aaaacauuuuacuuuaaaaggag

SEQ ID NO: 243361 - RNA, 16 nt, Homo sapiens
ccaguguuguggauuu

SEQ ID NO: 243362 - RNA, 14 nt, Homo sapiens
cuaggaggucucua

SEQ ID NO: 243363 - RNA, 15 nt, Homo sapiens
ccugccaggaagcca

SEQ ID NO: 243364 - RNA, 18 nt, Homo sapiens
aaucucaaauaacuaaaa

SEQ ID NO: 243365 - RNA, 16 nt, Homo sapiens
auaauacaguaucuca

SEQ ID NO: 243366 - RNA, 14 nt, Homo sapiens
cauaacucugauua

SEQ ID NO: 243367 - RNA, 16 nt, Homo sapiens
caagaccacguuucua

SEQ ID NO: 243368 - RNA, 16 nt, Homo sapiens
ugcuuguacauaaugc

SEQ ID NO: 243369 - RNA, 16 nt, Homo sapiens
cagaguugaagacaga

SEQ ID NO: 243370 - RNA, 16 nt, Homo sapiens
uaacaggaaaauuuua

SEQ ID NO: 243371 - RNA, 18 nt, Homo sapiens
uagccuuagaagucacac

SEQ ID NO: 243372 - RNA, 21 nt, Homo sapiens
guggcagcugcuuuugucuau

SEQ ID NO: 243373 - RNA, 20 nt, Homo sapiens
guauuuuguuuuugucuuaa

SEQ ID NO: 243374 - RNA, 16 nt, Homo sapiens
cuacccuggcacuaua

SEQ ID NO: 243375 - RNA, 13 nt, Homo sapiens
auuuauucugcuc

SEQ ID NO: 243376 - RNA, 14 nt, Homo sapiens
agacuucaucccuc

SEQ ID NO: 243377 - RNA, 20 nt, Homo sapiens
agugggagcugaguggggga

SEQ ID NO: 243378 - RNA, 13 nt, Homo sapiens
guucccaugagau

SEQ ID NO: 243379 - RNA, 18 nt, Homo sapiens
caagucaagugaaaaagg

SEQ ID NO: 243380 - RNA, 19 nt, Homo sapiens
aggaggggugugggcaccc

SEQ ID NO: 243381 - RNA, 21 nt, Homo sapiens
auucacuagguucgaauccag

SEQ ID NO: 243382 - RNA, 15 nt, Homo sapiens
ccucaccccacugug

SEQ ID NO: 243383 - RNA, 13 nt, Homo sapiens
uauguguaaguau

SEQ ID NO: 243384 - RNA, 14 nt, Homo sapiens
ggguaucuggugac

SEQ ID NO: 243385 - RNA, 10 nt, Homo sapiens
uguagagugg

SEQ ID NO: 243386 - RNA, 20 nt, Homo sapiens
aggccagagggagugacaga

SEQ ID NO: 243387 - RNA, 21 nt, Homo sapiens
uccucugacagaagaacccca

SEQ ID NO: 243388 - RNA, 19 nt, Homo sapiens
cugccauauucuguuggcc

SEQ ID NO: 243389 - RNA, 21 nt, Homo sapiens
agugcugggauuacaggugug

SEQ ID NO: 243390 - RNA, 22 nt, Homo sapiens
ggagugggcccaaugcacuuug

SEQ ID NO: 243391 - RNA, 18 nt, Homo sapiens
ccacaaccgaccagaugc

SEQ ID NO: 243392 - RNA, 20 nt, Homo sapiens
agccccaucccaaacccuuc

SEQ ID NO: 243393 - RNA, 18 nt, Homo sapiens
gcucugaucauccacugu

SEQ ID NO: 243394 - RNA, 14 nt, Homo sapiens
agaaaguacuucuc

SEQ ID NO: 243395 - RNA, 14 nt, Homo sapiens
ccugaagucacaca

SEQ ID NO: 243396 - RNA, 21 nt, Homo sapiens
accagcagagcaccuuagaca

SEQ ID NO: 243397 - RNA, 18 nt, Homo sapiens
aguggcuaccuacauaca

SEQ ID NO: 243398 - RNA, 23 nt, Homo sapiens
aucuacccuccgauuguuccuga

SEQ ID NO: 243399 - RNA, 19 nt, Homo sapiens
auaauguuaacauggacau

SEQ ID NO: 243400 - RNA, 13 nt, Homo sapiens
accuuguuucccu

SEQ ID NO: 243401 - RNA, 15 nt, Homo sapiens
gcccccugguggaau

SEQ ID NO: 243402 - RNA, 16 nt, Homo sapiens
acuguaauuugugaua

SEQ ID NO: 243403 - RNA, 15 nt, Homo sapiens
auccuagcacuuugg

SEQ ID NO: 243404 - RNA, 14 nt, Homo sapiens
uugugguuaaucug

SEQ ID NO: 243405 - RNA, 17 nt, Homo sapiens
gauccuaguuccaccau

SEQ ID NO: 243406 - RNA, 16 nt, Homo sapiens
caccucugcacaagcu

SEQ ID NO: 243407 - RNA, 15 nt, Homo sapiens
ugauuaugaauacag

SEQ ID NO: 243408 - RNA, 17 nt, Homo sapiens
ugugccugaagucccag

SEQ ID NO: 243409 - RNA, 23 nt, Homo sapiens
aucaaaucugcuuuuuaaagaau

SEQ ID NO: 243410 - RNA, 14 nt, Homo sapiens
augucaagccauaa

SEQ ID NO: 243411 - RNA, 22 nt, Homo sapiens
uaaguacuauguaucaaugagu

SEQ ID NO: 243412 - RNA, 18 nt, Homo sapiens
gcaccgggccacagagaa

SEQ ID NO: 243413 - RNA, 18 nt, Homo sapiens
gaucauccacugugccau

SEQ ID NO: 243414 - RNA, 16 nt, Homo sapiens
ucagguggggcagcuu

SEQ ID NO: 243415 - RNA, 15 nt, Homo sapiens
gcuuugaaaauucag

SEQ ID NO: 243416 - RNA, 14 nt, Homo sapiens
aguaauaugcacac

SEQ ID NO: 243417 - RNA, 22 nt, Homo sapiens
ccugaagucuuuguacagacaa

SEQ ID NO: 243418 - RNA, 11 nt, Homo sapiens
uaugcauuuga

SEQ ID NO: 243419 - RNA, 21 nt, Homo sapiens
aacaucuuggucagauuugaa

SEQ ID NO: 243420 - RNA, 22 nt, Homo sapiens
uagcagcagggagggcuucugc

SEQ ID NO: 243421 - RNA, 13 nt, Homo sapiens
gcacuccaugagu

SEQ ID NO: 243422 - RNA, 18 nt, Homo sapiens
gcacucaaagcuuguuaa

SEQ ID NO: 243423 - RNA, 15 nt, Homo sapiens
agagaaggggcccaa

SEQ ID NO: 243424 - RNA, 22 nt, Homo sapiens
uaucuugaagacuuuucuuuca

SEQ ID NO: 243425 - RNA, 13 nt, Homo sapiens
ccaguaucuugaa

SEQ ID NO: 243426 - RNA, 18 nt, Homo sapiens
gugcacguacacacacau

SEQ ID NO: 243427 - RNA, 15 nt, Homo sapiens
ugaaaauucuugaua

SEQ ID NO: 243428 - RNA, 13 nt, Homo sapiens
aauaacacuguac

SEQ ID NO: 243429 - RNA, 22 nt, Homo sapiens
ugaaacgcaaccaccaccaacc

SEQ ID NO: 243430 - RNA, 13 nt, Homo sapiens
aacacaacaucuu

SEQ ID NO: 243431 - RNA, 12 nt, Homo sapiens
aaauucuugaua

SEQ ID NO: 243432 - RNA, 16 nt, Homo sapiens
uucucccucagucugg

SEQ ID NO: 243433 - RNA, 20 nt, Homo sapiens
ccuuucaccacaugugcaca

SEQ ID NO: 243434 - RNA, 14 nt, Homo sapiens
agaguaacccuguc

SEQ ID NO: 243435 - RNA, 23 nt, Homo sapiens
auaacucuacccuggcacuauaa

SEQ ID NO: 243436 - RNA, 18 nt, Homo sapiens
agaaccuuuugagugccu

SEQ ID NO: 243437 - RNA, 14 nt, Homo sapiens
gauacccaucccau

SEQ ID NO: 243438 - RNA, 13 nt, Homo sapiens
cugugauggggcc

SEQ ID NO: 243439 - RNA, 23 nt, Homo sapiens
aaauggacguguuaugacuccag

SEQ ID NO: 243440 - RNA, 13 nt, Homo sapiens
aggcaacugcauu

SEQ ID NO: 243441 - RNA, 21 nt, Homo sapiens
auaaugcgugcauaccacuuu

SEQ ID NO: 243442 - RNA, 12 nt, Homo sapiens
agaucacgccac

SEQ ID NO: 243443 - RNA, 15 nt, Homo sapiens
uagauauaugcucug

SEQ ID NO: 243444 - RNA, 12 nt, Homo sapiens
uuucauugcugg

SEQ ID NO: 243445 - RNA, 19 nt, Homo sapiens
uuuuagacccuauugcugc

SEQ ID NO: 243446 - RNA, 16 nt, Homo sapiens
uugcugucccuuuucc

SEQ ID NO: 243447 - RNA, 19 nt, Homo sapiens
guuuauugucaaaguggug

SEQ ID NO: 243448 - RNA, 15 nt, Homo sapiens
aggauuuugauccaa

SEQ ID NO: 243449 - RNA, 12 nt, Homo sapiens
aagaugaagcug

SEQ ID NO: 243450 - RNA, 21 nt, Homo sapiens
ucaaccuccugggcuaaguga

SEQ ID NO: 243451 - RNA, 19 nt, Homo sapiens
ccaucucuacaaaaagcau

SEQ ID NO: 243452 - RNA, 17 nt, Homo sapiens
cuucaaccccaugagac

SEQ ID NO: 243453 - RNA, 22 nt, Homo sapiens
ugagcaauccugcaagaacaag

SEQ ID NO: 243454 - RNA, 12 nt, Homo sapiens
uggacacagcuc

SEQ ID NO: 243455 - RNA, 14 nt, Homo sapiens
augacaaagacuga

SEQ ID NO: 243456 - RNA, 23 nt, Homo sapiens
cacagcugggguggggaccucag

SEQ ID NO: 243457 - RNA, 16 nt, Homo sapiens
gggcaacccuggugac

SEQ ID NO: 243458 - RNA, 19 nt, Homo sapiens
ucacauuuauucugcucac

SEQ ID NO: 243459 - RNA, 20 nt, Homo sapiens
gggucucacuauguugccca

SEQ ID NO: 243460 - RNA, 20 nt, Homo sapiens
uuggggaugagaaagguuga

SEQ ID NO: 243461 - RNA, 15 nt, Homo sapiens
ugcauuuggugguuu

SEQ ID NO: 243462 - RNA, 16 nt, Homo sapiens
ggaccagagcugccac

SEQ ID NO: 243463 - RNA, 16 nt, Homo sapiens
aggcucucaggccagc

SEQ ID NO: 243464 - RNA, 22 nt, Homo sapiens
aucacggcucacugcagccuca

SEQ ID NO: 243465 - RNA, 20 nt, Homo sapiens
ggugugaaccaccacaccca

SEQ ID NO: 243466 - RNA, 17 nt, Homo sapiens
cuuuccuguagucccau

SEQ ID NO: 243467 - RNA, 15 nt, Homo sapiens
cacccugaaagcccu

SEQ ID NO: 243468 - RNA, 15 nt, Homo sapiens
aaaauuacugaugca

SEQ ID NO: 243469 - RNA, 18 nt, Homo sapiens
cauuccuguucccaugag

SEQ ID NO: 243470 - RNA, 20 nt, Homo sapiens
augaccuugaaugaugccau

SEQ ID NO: 243471 - RNA, 19 nt, Homo sapiens
uccaugauguuuuccauga

SEQ ID NO: 243472 - RNA, 12 nt, Homo sapiens
acgcgugcacac

SEQ ID NO: 243473 - RNA, 23 nt, Homo sapiens
gagaaaaaauauuuuccugccag

SEQ ID NO: 243474 - RNA, 17 nt, Homo sapiens
auucagcucugcaagaa

SEQ ID NO: 243475 - RNA, 23 nt, Homo sapiens
gagugggcccaaugcacuuuguu

SEQ ID NO: 243476 - RNA, 17 nt, Homo sapiens
cuguucagcugguugag

SEQ ID NO: 243477 - RNA, 17 nt, Homo sapiens
acaccaugauuaaccac

SEQ ID NO: 243478 - RNA, 12 nt, Homo sapiens
aggaagcucagg

SEQ ID NO: 243479 - RNA, 20 nt, Homo sapiens
ugagcauuuagacucucgac

SEQ ID NO: 243480 - RNA, 15 nt, Homo sapiens
aggaagacaauguga

SEQ ID NO: 243481 - RNA, 23 nt, Homo sapiens
ugcagccucacaguccuuaccag

SEQ ID NO: 243482 - RNA, 16 nt, Homo sapiens
aaauucaugcugcuua

SEQ ID NO: 243483 - RNA, 17 nt, Homo sapiens
gcugggagagccuucca

SEQ ID NO: 243484 - RNA, 23 nt, Homo sapiens
ucuuauauugccauuucuuccac

SEQ ID NO: 243485 - RNA, 16 nt, Homo sapiens
ugcacuccagccuggg

SEQ ID NO: 243486 - RNA, 18 nt, Homo sapiens
agcaauacagacuacuuc

SEQ ID NO: 243487 - RNA, 23 nt, Homo sapiens
aaagcagugcaugcugucccuua

SEQ ID NO: 243488 - RNA, 23 nt, Homo sapiens
gauguacuuuaccugaaacaacc

SEQ ID NO: 243489 - RNA, 16 nt, Homo sapiens
ucacugcuuaacuuca

SEQ ID NO: 243490 - RNA, 17 nt, Homo sapiens
cgauagugguggugaac

SEQ ID NO: 243491 - RNA, 16 nt, Homo sapiens
cauccacugugccaug

SEQ ID NO: 243492 - RNA, 23 nt, Homo sapiens
ugccaugccagcuuaucucaggg

SEQ ID NO: 243493 - RNA, 15 nt, Homo sapiens
uaggaagacuuugga

SEQ ID NO: 243494 - RNA, 18 nt, Homo sapiens
ugccauauucuguuggcc

SEQ ID NO: 243495 - RNA, 12 nt, Homo sapiens
uaaauagcucag

SEQ ID NO: 243496 - RNA, 18 nt, Homo sapiens
uagcagggaaacagcuaa

SEQ ID NO: 243497 - RNA, 18 nt, Homo sapiens
cagcaagugagagcuggg

SEQ ID NO: 243498 - RNA, 17 nt, Homo sapiens
aucgaugcagugcuucc

SEQ ID NO: 243499 - RNA, 19 nt, Homo sapiens
cagccucccgaguagcugg

SEQ ID NO: 243500 - RNA, 20 nt, Homo sapiens
ggaugaaaaaauaacacugu

SEQ ID NO: 243501 - RNA, 22 nt, Homo sapiens
agccccauucugccugcccagg

SEQ ID NO: 243502 - RNA, 16 nt, Homo sapiens
ggaaugaaugucagug

SEQ ID NO: 243503 - RNA, 14 nt, Homo sapiens
caaggcugcaguga

SEQ ID NO: 243504 - RNA, 15 nt, Homo sapiens
uucaaccccaugaga

SEQ ID NO: 243505 - RNA, 21 nt, Homo sapiens
gggcucccuucccaccucucu

SEQ ID NO: 243506 - RNA, 19 nt, Homo sapiens
gcuugaccuuuaagagaaa

SEQ ID NO: 243507 - RNA, 21 nt, Homo sapiens
cuaaaaggugaccaaugaugg

SEQ ID NO: 243508 - RNA, 19 nt, Homo sapiens
uaaaugggggugcauuuga

SEQ ID NO: 243509 - RNA, 19 nt, Homo sapiens
aagcaggacuaaaugucua

SEQ ID NO: 243510 - RNA, 10 nt, Homo sapiens
uuuccaugau

SEQ ID NO: 243511 - RNA, 14 nt, Homo sapiens
ccaaggccaaagga

SEQ ID NO: 243512 - RNA, 12 nt, Homo sapiens
cauggugaaggu

SEQ ID NO: 243513 - RNA, 23 nt, Homo sapiens
ucuacuuugagugcugucuccau

SEQ ID NO: 243514 - RNA, 17 nt, Homo sapiens
gugaacagaacaaaagg

SEQ ID NO: 243515 - RNA, 16 nt, Homo sapiens
ccacaaccgaccagau

SEQ ID NO: 243516 - RNA, 21 nt, Homo sapiens
agaucagccugggcaauguga

SEQ ID NO: 243517 - RNA, 15 nt, Homo sapiens
gauagccaaggccaa

SEQ ID NO: 243518 - RNA, 20 nt, Homo sapiens
uugaaagaucaaaagguuaa

SEQ ID NO: 243519 - RNA, 13 nt, Homo sapiens
aguguacauggaa

SEQ ID NO: 243520 - RNA, 14 nt, Homo sapiens
cugcacuugcagac

SEQ ID NO: 243521 - RNA, 18 nt, Homo sapiens
cacuaauggggcggugag

SEQ ID NO: 243522 - RNA, 13 nt, Homo sapiens
aagacuucauccc

SEQ ID NO: 243523 - RNA, 14 nt, Homo sapiens
accaccaaccacug

SEQ ID NO: 243524 - RNA, 16 nt, Homo sapiens
cacuuugauaccauug

SEQ ID NO: 243525 - RNA, 19 nt, Homo sapiens
ucaaacucuugaccucagg

SEQ ID NO: 243526 - RNA, 19 nt, Homo sapiens
agaagacacugaugggcaa

SEQ ID NO: 243527 - RNA, 14 nt, Homo sapiens
aucacaagucagca

SEQ ID NO: 243528 - RNA, 16 nt, Homo sapiens
cugggcuuggggacca

SEQ ID NO: 243529 - RNA, 13 nt, Homo sapiens
acuuaagcacacu

SEQ ID NO: 243530 - RNA, 19 nt, Homo sapiens
gcacucagaagacacugau

SEQ ID NO: 243531 - RNA, 20 nt, Homo sapiens
aggagagcuagcagcaggga

SEQ ID NO: 243532 - RNA, 18 nt, Homo sapiens
cugcucuccgaccagaca

SEQ ID NO: 243533 - RNA, 14 nt, Homo sapiens
cuaaggugugcucu

SEQ ID NO: 243534 - RNA, 13 nt, Homo sapiens
gccucacaguccu

SEQ ID NO: 243535 - RNA, 12 nt, Homo sapiens
ugugucagcaua

SEQ ID NO: 243536 - RNA, 12 nt, Homo sapiens
gguuucauucug

SEQ ID NO: 243537 - RNA, 22 nt, Homo sapiens
aacuggaaaguacguuaugaua

SEQ ID NO: 243538 - RNA, 22 nt, Homo sapiens
uucuuccccccaaaacugauua

SEQ ID NO: 243539 - RNA, 13 nt, Homo sapiens
cuuagacaguccc

SEQ ID NO: 243540 - RNA, 14 nt, Homo sapiens
ccaaaggaagcaca

SEQ ID NO: 243541 - RNA, 19 nt, Homo sapiens
aagugauccucccaccuca

SEQ ID NO: 243542 - RNA, 16 nt, Homo sapiens
cuccucuccccagcaa

SEQ ID NO: 243543 - RNA, 15 nt, Homo sapiens
aacugaccaguuguu

SEQ ID NO: 243544 - RNA, 22 nt, Homo sapiens
accucugccugaagucacacag

SEQ ID NO: 243545 - RNA, 20 nt, Homo sapiens
uacagauagauauaugcucu

SEQ ID NO: 243546 - RNA, 16 nt, Homo sapiens
aagagggucugaggaa

SEQ ID NO: 243547 - RNA, 21 nt, Homo sapiens
uacacuaaaaggugaccaaug

SEQ ID NO: 243548 - RNA, 17 nt, Homo sapiens
agaucacgccacugcac

SEQ ID NO: 243549 - RNA, 13 nt, Homo sapiens
gauauaugcucug

SEQ ID NO: 243550 - RNA, 14 nt, Homo sapiens
caucuuccaacuca

SEQ ID NO: 243551 - RNA, 17 nt, Homo sapiens
uuguuggccaaagccaa

SEQ ID NO: 243552 - RNA, 13 nt, Homo sapiens
auacccaucccau

SEQ ID NO: 243553 - RNA, 17 nt, Homo sapiens
ccucuuugagugaagcu

SEQ ID NO: 243554 - RNA, 18 nt, Homo sapiens
cgauuguuccugaaccga

SEQ ID NO: 243555 - RNA, 12 nt, Homo sapiens
gagaaaugagcu

SEQ ID NO: 243556 - RNA, 23 nt, Homo sapiens
aagugcugggauuacagguguga

SEQ ID NO: 243557 - RNA, 19 nt, Homo sapiens
gcacaugccucucucaggc

SEQ ID NO: 243558 - RNA, 19 nt, Homo sapiens
cuguuggccagugugacaa

SEQ ID NO: 243559 - RNA, 17 nt, Homo sapiens
aaggaagacaaugugaa

SEQ ID NO: 243560 - RNA, 15 nt, Homo sapiens
gaaaagcugcugaca

SEQ ID NO: 243561 - RNA, 16 nt, Homo sapiens
caaugacuuacuguac

SEQ ID NO: 243562 - RNA, 13 nt, Homo sapiens
acagaaaauggaa

SEQ ID NO: 243563 - RNA, 17 nt, Homo sapiens
cacuguugcccaggcug

SEQ ID NO: 243564 - RNA, 20 nt, Homo sapiens
cagggucucacuauguugcc

SEQ ID NO: 243565 - RNA, 19 nt, Homo sapiens
ggcacccggccccugcugg

SEQ ID NO: 243566 - RNA, 16 nt, Homo sapiens
ggcccugccuccuuug

SEQ ID NO: 243567 - RNA, 12 nt, Homo sapiens
acuuugauacca

SEQ ID NO: 243568 - RNA, 22 nt, Homo sapiens
ucugaucauccacugugccaug

SEQ ID NO: 243569 - RNA, 17 nt, Homo sapiens
aaggaaagaggcucugg

SEQ ID NO: 243570 - RNA, 12 nt, Homo sapiens
caaaaaacaacu

SEQ ID NO: 243571 - RNA, 22 nt, Homo sapiens
gcagagcagagaccaucccuga

SEQ ID NO: 243572 - RNA, 13 nt, Homo sapiens
caggaagcucagg

SEQ ID NO: 243573 - RNA, 22 nt, Homo sapiens
cucuacccucuuagaaaaacca

SEQ ID NO: 243574 - RNA, 14 nt, Homo sapiens
acccaccucagccu

SEQ ID NO: 243575 - RNA, 17 nt, Homo sapiens
uaaaugggggugcauuu

SEQ ID NO: 243576 - RNA, 21 nt, Homo sapiens
ugcauguuacauaagauaaau

SEQ ID NO: 243577 - RNA, 23 nt, Homo sapiens
gugcuaggaacacuccuucacag

SEQ ID NO: 243578 - RNA, 18 nt, Homo sapiens
aaguacuucuccacccug

SEQ ID NO: 243579 - RNA, 17 nt, Homo sapiens
cucuccccagcaaguga

SEQ ID NO: 243580 - RNA, 14 nt, Homo sapiens
aagauaaaugugcu

SEQ ID NO: 243581 - RNA, 19 nt, Homo sapiens
uuaaggaugcuuguacaua

SEQ ID NO: 243582 - RNA, 21 nt, Homo sapiens
uucccuuuuuuggcugcugaa

SEQ ID NO: 243583 - RNA, 22 nt, Homo sapiens
gaagcacaugccucucucaggc

SEQ ID NO: 243584 - RNA, 12 nt, Homo sapiens
aagguaugcaau

SEQ ID NO: 243585 - RNA, 14 nt, Homo sapiens
uccagacccggcug

SEQ ID NO: 243586 - RNA, 14 nt, Homo sapiens
aguuccaccaucaa

SEQ ID NO: 243587 - RNA, 12 nt, Homo sapiens
gacuacaggugu

SEQ ID NO: 243588 - RNA, 16 nt, Homo sapiens
ggagggagaagaaaga

SEQ ID NO: 243589 - RNA, 17 nt, Homo sapiens
guuuccuggcacugcuu

SEQ ID NO: 243590 - RNA, 15 nt, Homo sapiens
ucucauuugucacac

SEQ ID NO: 243591 - RNA, 18 nt, Homo sapiens
agcaccuuagacaguccc

SEQ ID NO: 243592 - RNA, 14 nt, Homo sapiens
ugccaaaaacaaca

SEQ ID NO: 243593 - RNA, 14 nt, Homo sapiens
guacgggaggguaa

SEQ ID NO: 243594 - RNA, 19 nt, Homo sapiens
cuacagagcagacaguuaa

SEQ ID NO: 243595 - RNA, 17 nt, Homo sapiens
cccacuguggcugauuu

SEQ ID NO: 243596 - RNA, 13 nt, Homo sapiens
cauggaaguacua

SEQ ID NO: 243597 - RNA, 12 nt, Homo sapiens
acucugugucag

SEQ ID NO: 243598 - RNA, 17 nt, Homo sapiens
uguaagcaccccuucau

SEQ ID NO: 243599 - RNA, 14 nt, Homo sapiens
cuugacagggcaca

SEQ ID NO: 243600 - RNA, 13 nt, Homo sapiens
ccuguucccauga

SEQ ID NO: 243601 - RNA, 14 nt, Homo sapiens
agccuggacccugu

SEQ ID NO: 243602 - RNA, 23 nt, Homo sapiens
aaacuggaaaguacguuaugaua

SEQ ID NO: 243603 - RNA, 20 nt, Homo sapiens
uaagcucuacugaggugcua

SEQ ID NO: 243604 - RNA, 21 nt, Homo sapiens
agcaccuuagacagucccugc

SEQ ID NO: 243605 - RNA, 13 nt, Homo sapiens
ugaacagaacaaa

SEQ ID NO: 243606 - RNA, 15 nt, Homo sapiens
acaggugugagucac

SEQ ID NO: 243607 - RNA, 24 nt, Homo sapiens
ugcacuuuguucuggcucuuccag

SEQ ID NO: 243608 - RNA, 15 nt, Homo sapiens
uccacugugccaugu

SEQ ID NO: 243609 - RNA, 21 nt, Homo sapiens
aaagcgugguggacaugcaca

SEQ ID NO: 243610 - RNA, 13 nt, Homo sapiens
ggcuuuugugcau

SEQ ID NO: 243611 - RNA, 12 nt, Homo sapiens
aacuugggccac

SEQ ID NO: 243612 - RNA, 14 nt, Homo sapiens
auucucuccuguac

SEQ ID NO: 243613 - RNA, 18 nt, Homo sapiens
aagaguaggaagacuuug

SEQ ID NO: 243614 - RNA, 20 nt, Homo sapiens
uaaguacuauguaucaauga

SEQ ID NO: 243615 - RNA, 17 nt, Homo sapiens
gaagacaaugacuuacu

SEQ ID NO: 243616 - RNA, 18 nt, Homo sapiens
uguuaacauggacaugau

SEQ ID NO: 243617 - RNA, 15 nt, Homo sapiens
guucuacccaggugc

SEQ ID NO: 243618 - RNA, 17 nt, Homo sapiens
gcaggcucucaggccag

SEQ ID NO: 243619 - RNA, 22 nt, Homo sapiens
cuuuugcccacacuugggagca

SEQ ID NO: 243620 - RNA, 22 nt, Homo sapiens
ucccacuggaggcaugugauga

SEQ ID NO: 243621 - RNA, 15 nt, Homo sapiens
gauauaagaaauaca

SEQ ID NO: 243622 - RNA, 16 nt, Homo sapiens
augggacucaaugcac

SEQ ID NO: 243623 - RNA, 16 nt, Homo sapiens
ucuuagaaaaaccacc

SEQ ID NO: 243624 - RNA, 21 nt, Homo sapiens
cgcccagucuggaaugcagug

SEQ ID NO: 243625 - RNA, 20 nt, Homo sapiens
ccuggcccacugcaucguuu

SEQ ID NO: 243626 - RNA, 12 nt, Homo sapiens
aaaaaaaagggg

SEQ ID NO: 243627 - RNA, 21 nt, Homo sapiens
ccacaucuugcucugcugaca

SEQ ID NO: 243628 - RNA, 18 nt, Homo sapiens
aaggacacuagaagauuu

SEQ ID NO: 243629 - RNA, 18 nt, Homo sapiens
caccaucaccagacaggu

SEQ ID NO: 243630 - RNA, 17 nt, Homo sapiens
acuaaggugugcucuga

SEQ ID NO: 243631 - RNA, 17 nt, Homo sapiens
cagagcugccaccugcc

SEQ ID NO: 243632 - RNA, 19 nt, Homo sapiens
aacuagggaagauaauauu

SEQ ID NO: 243633 - RNA, 16 nt, Homo sapiens
agcucaccucucccuu

SEQ ID NO: 243634 - RNA, 14 nt, Homo sapiens
aacauggaaguacu

SEQ ID NO: 243635 - RNA, 17 nt, Homo sapiens
cccagagugaacacucu

SEQ ID NO: 243636 - RNA, 18 nt, Homo sapiens
agcuaggccuggccagau

SEQ ID NO: 243637 - RNA, 13 nt, Homo sapiens
cucuugcacucaa

SEQ ID NO: 243638 - RNA, 18 nt, Homo sapiens
agugccaaaaacaacaac

SEQ ID NO: 243639 - RNA, 21 nt, Homo sapiens
gauucauauuuacuucuuaua

SEQ ID NO: 243640 - RNA, 21 nt, Homo sapiens
ucgagccacaaccgaccagau

SEQ ID NO: 243641 - RNA, 15 nt, Homo sapiens
ggacagggaggugac

SEQ ID NO: 243642 - RNA, 14 nt, Homo sapiens
gaagucacacagua

SEQ ID NO: 243643 - RNA, 19 nt, Homo sapiens
cuucaaucucuugcacuca

SEQ ID NO: 243644 - RNA, 21 nt, Homo sapiens
ucuggagauaaaauaaaaaga

SEQ ID NO: 243645 - RNA, 19 nt, Homo sapiens
cugaugcagaaagaccgug

SEQ ID NO: 243646 - RNA, 21 nt, Homo sapiens
aaaauggacguguuaugacuc

SEQ ID NO: 243647 - RNA, 20 nt, Homo sapiens
gaaugaaugucagugugacu

SEQ ID NO: 243648 - RNA, 18 nt, Homo sapiens
gguaugaucacggcucac

SEQ ID NO: 243649 - RNA, 19 nt, Homo sapiens
aagacuuuggaaagacuuu

SEQ ID NO: 243650 - RNA, 15 nt, Homo sapiens
ucaccaagcccaguu

SEQ ID NO: 243651 - RNA, 16 nt, Homo sapiens
uuggucccccuuccau

SEQ ID NO: 243652 - RNA, 19 nt, Homo sapiens
augccucucucaggccaaa

SEQ ID NO: 243653 - RNA, 12 nt, Homo sapiens
ugagugccuuac

SEQ ID NO: 243654 - RNA, 18 nt, Homo sapiens
ucaccaaaucagcugcua

SEQ ID NO: 243655 - RNA, 16 nt, Homo sapiens
cuuauuuaaugaaaga

SEQ ID NO: 243656 - RNA, 18 nt, Homo sapiens
accuuuuuuauacauaaa

SEQ ID NO: 243657 - RNA, 19 nt, Homo sapiens
ccagagaggguggugaccu

SEQ ID NO: 243658 - RNA, 19 nt, Homo sapiens
ugcaucguuucaucuucca

SEQ ID NO: 243659 - RNA, 11 nt, Homo sapiens
caaggccaaag

SEQ ID NO: 243660 - RNA, 22 nt, Homo sapiens
gcuucucacugccaugccagcu

SEQ ID NO: 243661 - RNA, 13 nt, Homo sapiens
aaagcagugcaug

SEQ ID NO: 243662 - RNA, 15 nt, Homo sapiens
gaggaaagcaaagga

SEQ ID NO: 243663 - RNA, 19 nt, Homo sapiens
cuggugaccagcaccaucu

SEQ ID NO: 243664 - RNA, 21 nt, Homo sapiens
cauuuuuaguagagacagggu

SEQ ID NO: 243665 - RNA, 14 nt, Homo sapiens
aaagcaugugagac

SEQ ID NO: 243666 - RNA, 23 nt, Homo sapiens
ugccauccucccaaggggcccaa

SEQ ID NO: 243667 - RNA, 16 nt, Homo sapiens
ucaacaccucugcaca

SEQ ID NO: 243668 - RNA, 15 nt, Homo sapiens
acaugcacgugugug

SEQ ID NO: 243669 - RNA, 22 nt, Homo sapiens
uaaaguuucuguugauaaucau

SEQ ID NO: 243670 - RNA, 18 nt, Homo sapiens
aggcauccaguaucuuga

SEQ ID NO: 243671 - RNA, 17 nt, Homo sapiens
ggaagguucuacgccag

SEQ ID NO: 243672 - RNA, 18 nt, Homo sapiens
aggagaggggcacagggu

SEQ ID NO: 243673 - RNA, 14 nt, Homo sapiens
ugaagucacacagu

SEQ ID NO: 243674 - RNA, 15 nt, Homo sapiens
ggcacaccgggcacu

SEQ ID NO: 243675 - RNA, 22 nt, Homo sapiens
ugggucgcgugaugcgcauguc

SEQ ID NO: 243676 - RNA, 20 nt, Homo sapiens
cuccuucaccuuugucccca

SEQ ID NO: 243677 - RNA, 21 nt, Homo sapiens
cuggccccucagggucccugg

SEQ ID NO: 243678 - RNA, 19 nt, Homo sapiens
aaugaggaaacugcacugu

SEQ ID NO: 243679 - RNA, 13 nt, Homo sapiens
ggcuuggggacca

SEQ ID NO: 243680 - RNA, 19 nt, Homo sapiens
agugagucgaggacaggga

SEQ ID NO: 243681 - RNA, 22 nt, Homo sapiens
ucuaaacaaaaaaaggcgguga

SEQ ID NO: 243682 - RNA, 13 nt, Homo sapiens
ccagagcugccac

SEQ ID NO: 243683 - RNA, 17 nt, Homo sapiens
agucugauucccaagcu

SEQ ID NO: 243684 - RNA, 12 nt, Homo sapiens
gagccugcaguu

SEQ ID NO: 243685 - RNA, 20 nt, Homo sapiens
ucaugcugcuuagaugacau

SEQ ID NO: 243686 - RNA, 21 nt, Homo sapiens
cuucagugccaaaaacaacaa

SEQ ID NO: 243687 - RNA, 22 nt, Homo sapiens
ggcccagagggccugcaaggga

SEQ ID NO: 243688 - RNA, 16 nt, Homo sapiens
cuugccgucuaccuga

SEQ ID NO: 243689 - RNA, 13 nt, Homo sapiens
acaucaacugcau

SEQ ID NO: 243690 - RNA, 22 nt, Homo sapiens
auucauauuuacuucuuauaca

SEQ ID NO: 243691 - RNA, 21 nt, Homo sapiens
uaaugacuuaagcacacuuga

SEQ ID NO: 243692 - RNA, 15 nt, Homo sapiens
ucauacucaccucac

SEQ ID NO: 243693 - RNA, 16 nt, Homo sapiens
ucccaucucacacaug

SEQ ID NO: 243694 - RNA, 13 nt, Homo sapiens
aagcacacuugac

SEQ ID NO: 243695 - RNA, 19 nt, Homo sapiens
cagcugcgguccacccagg

SEQ ID NO: 243696 - RNA, 16 nt, Homo sapiens
ugacagacacaggccc

SEQ ID NO: 243697 - RNA, 15 nt, Homo sapiens
guaugaggcauuugu

SEQ ID NO: 243698 - RNA, 12 nt, Homo sapiens
ccaaggugggag

SEQ ID NO: 243699 - RNA, 20 nt, Homo sapiens
aggcugggagagccuuccag

SEQ ID NO: 243700 - RNA, 18 nt, Homo sapiens
agcugggacuacaggcac

SEQ ID NO: 243701 - RNA, 17 nt, Homo sapiens
ucauuagcauuuugcua

SEQ ID NO: 243702 - RNA, 14 nt, Homo sapiens
uuugauucagacag

SEQ ID NO: 243703 - RNA, 18 nt, Homo sapiens
aauacaccacuacauucu

SEQ ID NO: 243704 - RNA, 14 nt, Homo sapiens
uucucugaaggaca

SEQ ID NO: 243705 - RNA, 12 nt, Homo sapiens
cacauuccugau

SEQ ID NO: 243706 - RNA, 15 nt, Homo sapiens
cagcucugcaagaau

SEQ ID NO: 243707 - RNA, 20 nt, Homo sapiens
cccagcucugguccauagag

SEQ ID NO: 243708 - RNA, 23 nt, Homo sapiens
ugaaaggaaagaggcucuggcua

SEQ ID NO: 243709 - RNA, 20 nt, Homo sapiens
auaugcuuauacacuuacac

SEQ ID NO: 243710 - RNA, 20 nt, Homo sapiens
aggcagggucucacucuguc

SEQ ID NO: 243711 - RNA, 14 nt, Homo sapiens
uagaguugauacua

SEQ ID NO: 243712 - RNA, 16 nt, Homo sapiens
ucuuauuuaaugaaag

SEQ ID NO: 243713 - RNA, 19 nt, Homo sapiens
uguccggucccugucccag

SEQ ID NO: 243714 - RNA, 20 nt, Homo sapiens
augagccuggcaagaaugug

SEQ ID NO: 243715 - RNA, 18 nt, Homo sapiens
aaugucagugugacugau

SEQ ID NO: 243716 - RNA, 22 nt, Homo sapiens
accuuuguauucucuccuguac

SEQ ID NO: 243717 - RNA, 14 nt, Homo sapiens
gccugccucuucuc

SEQ ID NO: 243718 - RNA, 18 nt, Homo sapiens
gccaaaaaaugcuugcuu

SEQ ID NO: 243719 - RNA, 13 nt, Homo sapiens
aauaacauguaau

SEQ ID NO: 243720 - RNA, 21 nt, Homo sapiens
accaguuugaaccaagaacuu

SEQ ID NO: 243721 - RNA, 18 nt, Homo sapiens
ucucacuguugcccaggc

SEQ ID NO: 243722 - RNA, 14 nt, Homo sapiens
auguucugggacac

SEQ ID NO: 243723 - RNA, 15 nt, Homo sapiens
aggguaaggcugugg

SEQ ID NO: 243724 - RNA, 14 nt, Homo sapiens
caaaugcccagcuu

SEQ ID NO: 243725 - RNA, 13 nt, Homo sapiens
uauaagaaauaca

SEQ ID NO: 243726 - RNA, 19 nt, Homo sapiens
cucugagacucgcgacaau

SEQ ID NO: 243727 - RNA, 19 nt, Homo sapiens
cagccugggugacagagca

SEQ ID NO: 243728 - RNA, 23 nt, Homo sapiens
aucacggcucacugcagccucaa

SEQ ID NO: 243729 - RNA, 15 nt, Homo sapiens
ugggaggccauuugu

SEQ ID NO: 243730 - RNA, 19 nt, Homo sapiens
gacaguuaagagaaaugag

SEQ ID NO: 243731 - RNA, 13 nt, Homo sapiens
aaaacauuuuacu

SEQ ID NO: 243732 - RNA, 20 nt, Homo sapiens
guggugaacagaacaaaagg

SEQ ID NO: 243733 - RNA, 18 nt, Homo sapiens
agcacacugcuugugaaa

SEQ ID NO: 243734 - RNA, 16 nt, Homo sapiens
uuagaagucacacagu

SEQ ID NO: 243735 - RNA, 15 nt, Homo sapiens
accaccaccaucacc

SEQ ID NO: 243736 - RNA, 19 nt, Homo sapiens
uaaccaguguuguggauuu

SEQ ID NO: 243737 - RNA, 18 nt, Homo sapiens
uguacgucugacaggcaa

SEQ ID NO: 243738 - RNA, 17 nt, Homo sapiens
auugauaugcuuauaca

SEQ ID NO: 243739 - RNA, 15 nt, Homo sapiens
auaauuaguuccuca

SEQ ID NO: 243740 - RNA, 16 nt, Homo sapiens
agcccuuagcagggaa

SEQ ID NO: 243741 - RNA, 19 nt, Homo sapiens
agcccaccccucaacaccu

SEQ ID NO: 243742 - RNA, 21 nt, Homo sapiens
cuuguacauaaugcgugcaua

SEQ ID NO: 243743 - RNA, 15 nt, Homo sapiens
ccuccaggugcacaa

SEQ ID NO: 243744 - RNA, 20 nt, Homo sapiens
cauuccuguucccaugagau

SEQ ID NO: 243745 - RNA, 20 nt, Homo sapiens
cagaauucucagaaucucaa

SEQ ID NO: 243746 - RNA, 13 nt, Homo sapiens
ggauguucuagca

SEQ ID NO: 243747 - RNA, 19 nt, Homo sapiens
gguggaaugcgggggagca

SEQ ID NO: 243748 - RNA, 18 nt, Homo sapiens
aaacuacccucuggagau

SEQ ID NO: 243749 - RNA, 17 nt, Homo sapiens
gaucacgccacugcacu

SEQ ID NO: 243750 - RNA, 17 nt, Homo sapiens
uacauaaugcgugcaua

SEQ ID NO: 243751 - RNA, 18 nt, Homo sapiens
ccaaaggaagcacaugcc

SEQ ID NO: 243752 - RNA, 21 nt, Homo sapiens
agugcagugagccgagaucac

SEQ ID NO: 243753 - RNA, 22 nt, Homo sapiens
ccccgcacugggcuuggggacc

SEQ ID NO: 243754 - RNA, 13 nt, Homo sapiens
cugcugacagugu

SEQ ID NO: 243755 - RNA, 21 nt, Homo sapiens
gcuuauacacuuacacuuuau

SEQ ID NO: 243756 - RNA, 21 nt, Homo sapiens
aagcugggagaaccaaaaaga

SEQ ID NO: 243757 - RNA, 11 nt, Homo sapiens
aaagcugccag

SEQ ID NO: 243758 - RNA, 16 nt, Homo sapiens
auguguguucaugcac

SEQ ID NO: 243759 - RNA, 20 nt, Homo sapiens
aaagcuuaccaaggggaaug

SEQ ID NO: 243760 - RNA, 15 nt, Homo sapiens
uagcauggcugccaa

SEQ ID NO: 243761 - RNA, 12 nt, Homo sapiens
uuccugaggcug

SEQ ID NO: 243762 - RNA, 15 nt, Homo sapiens
acacuaaaaggugac

SEQ ID NO: 243763 - RNA, 18 nt, Homo sapiens
ccugggugugugaagcug

SEQ ID NO: 243764 - RNA, 15 nt, Homo sapiens
ucccaucacuucccu

SEQ ID NO: 243765 - RNA, 23 nt, Homo sapiens
cuaagugaggaugaaaaaauaac

SEQ ID NO: 243766 - RNA, 21 nt, Homo sapiens
aguuccucauuagcauuuugc

SEQ ID NO: 243767 - RNA, 21 nt, Homo sapiens
ugcgaucuggguucacugcaa

SEQ ID NO: 243768 - RNA, 22 nt, Homo sapiens
cccaagggccuggccugagcug

SEQ ID NO: 243769 - RNA, 20 nt, Homo sapiens
ccucauuagcauuuugcuaa

SEQ ID NO: 243770 - RNA, 15 nt, Homo sapiens
aacaacugaccaguu

SEQ ID NO: 243771 - RNA, 15 nt, Homo sapiens
guacguugugcauuu

SEQ ID NO: 243772 - RNA, 17 nt, Homo sapiens
uccagagagcagugugg

SEQ ID NO: 243773 - RNA, 15 nt, Homo sapiens
acaccuugacagggc

SEQ ID NO: 243774 - RNA, 15 nt, Homo sapiens
cuggaugcagccuca

SEQ ID NO: 243775 - RNA, 17 nt, Homo sapiens
uauuuaccagaccacaa

SEQ ID NO: 243776 - RNA, 18 nt, Homo sapiens
augcauucccuacagauu

SEQ ID NO: 243777 - RNA, 23 nt, Homo sapiens
cacuauagccuaggugacagagu

SEQ ID NO: 243778 - RNA, 20 nt, Homo sapiens
agagaauucucuuauccaac

SEQ ID NO: 243779 - RNA, 16 nt, Homo sapiens
auauuguuuucagugu

SEQ ID NO: 243780 - RNA, 16 nt, Homo sapiens
aaaagaggcuauguga

SEQ ID NO: 243781 - RNA, 14 nt, Homo sapiens
gugucgggcaugac

SEQ ID NO: 243782 - RNA, 11 nt, Homo sapiens
caagcucugcu

SEQ ID NO: 243783 - RNA, 23 nt, Homo sapiens
agcacuaaggugugcucugauca

SEQ ID NO: 243784 - RNA, 13 nt, Homo sapiens
gaagaaaaaggau

SEQ ID NO: 243785 - RNA, 15 nt, Homo sapiens
cgcuggagugcagug

SEQ ID NO: 243786 - RNA, 18 nt, Homo sapiens
uuuccuucauucaaccca

SEQ ID NO: 243787 - RNA, 20 nt, Homo sapiens
aaacucuugaccucagguga

SEQ ID NO: 243788 - RNA, 22 nt, Homo sapiens
uacucaccucaccccacugugg

SEQ ID NO: 243789 - RNA, 22 nt, Homo sapiens
ucagaagacacugaugggcaac

SEQ ID NO: 243790 - RNA, 18 nt, Homo sapiens
ugaacucuucaaucucuu

SEQ ID NO: 243791 - RNA, 17 nt, Homo sapiens
guggcagcucaccucuc

SEQ ID NO: 243792 - RNA, 14 nt, Homo sapiens
aauauugcugaugg

SEQ ID NO: 243793 - RNA, 19 nt, Homo sapiens
aguucauacccuguuacca

SEQ ID NO: 243794 - RNA, 18 nt, Homo sapiens
acauuuauucugcucaca

SEQ ID NO: 243795 - RNA, 20 nt, Homo sapiens
cccaggccuccccagcaccu

SEQ ID NO: 243796 - RNA, 20 nt, Homo sapiens
aagcacaugccucucucagg

SEQ ID NO: 243797 - RNA, 21 nt, Homo sapiens
aggacacuagaagauuuugaa

SEQ ID NO: 243798 - RNA, 15 nt, Homo sapiens
aacuuccaauuuaca

SEQ ID NO: 243799 - RNA, 20 nt, Homo sapiens
agacucgauaguggugguga

SEQ ID NO: 243800 - RNA, 15 nt, Homo sapiens
caaaggaagcacaug

SEQ ID NO: 243801 - RNA, 20 nt, Homo sapiens
acgcgugcacacaccagagc

SEQ ID NO: 243802 - RNA, 17 nt, Homo sapiens
ccgaauagcugggacua

SEQ ID NO: 243803 - RNA, 15 nt, Homo sapiens
uguuucugaaaggga

SEQ ID NO: 243804 - RNA, 23 nt, Homo sapiens
gcauaaagucagggguucccuuu

SEQ ID NO: 243805 - RNA, 22 nt, Homo sapiens
guuacauaagauaaaugugcug

SEQ ID NO: 243806 - RNA, 17 nt, Homo sapiens
uagucucuugauucaua

SEQ ID NO: 243807 - RNA, 17 nt, Homo sapiens
aaagacuguacaaagua

SEQ ID NO: 243808 - RNA, 13 nt, Homo sapiens
ggugccuugggga

SEQ ID NO: 243809 - RNA, 22 nt, Homo sapiens
ugauucuccugccucagccucc

SEQ ID NO: 243810 - RNA, 12 nt, Homo sapiens
uguaucaugaca

SEQ ID NO: 243811 - RNA, 14 nt, Homo sapiens
auuguuucuuucaa

SEQ ID NO: 243812 - RNA, 19 nt, Homo sapiens
gcagagguugggaggccau

SEQ ID NO: 243813 - RNA, 21 nt, Homo sapiens
guggguuucuaaagcugccag

SEQ ID NO: 243814 - RNA, 20 nt, Homo sapiens
ccaggcuggcgugcaguggu

SEQ ID NO: 243815 - RNA, 20 nt, Homo sapiens
acugcaccgggccacagaga

SEQ ID NO: 243816 - RNA, 17 nt, Homo sapiens
cugggagagccuuccag

SEQ ID NO: 243817 - RNA, 24 nt, Homo sapiens
cacugcuuaacuucacauauugau

SEQ ID NO: 243818 - RNA, 21 nt, Homo sapiens
cacuaaggugugcucugauca

SEQ ID NO: 243819 - RNA, 18 nt, Homo sapiens
gccaugaggaacaaggca

SEQ ID NO: 243820 - RNA, 18 nt, Homo sapiens
aaccacugcgaccacaag

SEQ ID NO: 243821 - RNA, 18 nt, Homo sapiens
ccaccaccaucaccagac

SEQ ID NO: 243822 - RNA, 13 nt, Homo sapiens
aauggaagacagc

SEQ ID NO: 243823 - RNA, 12 nt, Homo sapiens
gacagcucuuau

SEQ ID NO: 243824 - RNA, 24 nt, Homo sapiens
acaaaggagagcuagcagcaggga

SEQ ID NO: 243825 - RNA, 13 nt, Homo sapiens
gugauccucccac

SEQ ID NO: 243826 - RNA, 18 nt, Homo sapiens
uaggaggaacagguuuaa

SEQ ID NO: 243827 - RNA, 17 nt, Homo sapiens
gaccaguuguugauaac

SEQ ID NO: 243828 - RNA, 21 nt, Homo sapiens
acucacacggacacucaaaag

SEQ ID NO: 243829 - RNA, 20 nt, Homo sapiens
uccauguuugauguaucuga

SEQ ID NO: 243830 - RNA, 16 nt, Homo sapiens
guugaugaaauaucaa

SEQ ID NO: 243831 - RNA, 19 nt, Homo sapiens
accugccaggaagccagca

SEQ ID NO: 243832 - RNA, 13 nt, Homo sapiens
agcagaaaugccu

SEQ ID NO: 243833 - RNA, 21 nt, Homo sapiens
ugcuuuuuaaagaaugcucuu

SEQ ID NO: 243834 - RNA, 21 nt, Homo sapiens
cucuacucuagggaaaaacca

SEQ ID NO: 243835 - RNA, 15 nt, Homo sapiens
uucagcugguugagg

SEQ ID NO: 243836 - RNA, 17 nt, Homo sapiens
cagauuguaccauugag

SEQ ID NO: 243837 - RNA, 20 nt, Homo sapiens
aagcugggagaaccaaaaag

SEQ ID NO: 243838 - RNA, 19 nt, Homo sapiens
acccucuggagauaaaaua

SEQ ID NO: 243839 - RNA, 18 nt, Homo sapiens
gaccagggauuuccauga

SEQ ID NO: 243840 - RNA, 16 nt, Homo sapiens
agcaccauaacuuugu

SEQ ID NO: 243841 - RNA, 12 nt, Homo sapiens
agacaaugacuu

SEQ ID NO: 243842 - RNA, 21 nt, Homo sapiens
cauuuaggugaggaagcaaaa

SEQ ID NO: 243843 - RNA, 21 nt, Homo sapiens
acagugagucgaggacaggga

SEQ ID NO: 243844 - RNA, 14 nt, Homo sapiens
uaagagucucuauu

SEQ ID NO: 243845 - RNA, 13 nt, Homo sapiens
agugguuacccag

SEQ ID NO: 243846 - RNA, 17 nt, Homo sapiens
ggccuggucguuuucaa

SEQ ID NO: 243847 - RNA, 23 nt, Homo sapiens
ccuacaguugaaaaacagcugag

SEQ ID NO: 243848 - RNA, 19 nt, Homo sapiens
cuuuccuguagucccauug

SEQ ID NO: 243849 - RNA, 16 nt, Homo sapiens
cucuuagaaaaaccac

SEQ ID NO: 243850 - RNA, 17 nt, Homo sapiens
gucuugcaauggcagcc

SEQ ID NO: 243851 - RNA, 15 nt, Homo sapiens
ccccuguucuggcag

SEQ ID NO: 243852 - RNA, 17 nt, Homo sapiens
gaauuucucacaaagga

SEQ ID NO: 243853 - RNA, 17 nt, Homo sapiens
ucuagcauggcugccaa

SEQ ID NO: 243854 - RNA, 16 nt, Homo sapiens
acgccuguaauccuag

SEQ ID NO: 243855 - RNA, 22 nt, Homo sapiens
cacugugcugagucugaaggcu

SEQ ID NO: 243856 - RNA, 12 nt, Homo sapiens
caccccacugug

SEQ ID NO: 243857 - RNA, 16 nt, Homo sapiens
acuguccuacccaccc

SEQ ID NO: 243858 - RNA, 21 nt, Homo sapiens
aaauucuguuuuucuaggccu

SEQ ID NO: 243859 - RNA, 21 nt, Homo sapiens
uuuaagaaaaaggaugcacag

SEQ ID NO: 243860 - RNA, 13 nt, Homo sapiens
caaccccaugaga

SEQ ID NO: 243861 - RNA, 16 nt, Homo sapiens
ccugcggugcuaucuc

SEQ ID NO: 243862 - RNA, 17 nt, Homo sapiens
aaguaucccuacuguaa

SEQ ID NO: 243863 - RNA, 15 nt, Homo sapiens
uuagcccaaaaccaa

SEQ ID NO: 243864 - RNA, 15 nt, Homo sapiens
ucacugcagccucaa

SEQ ID NO: 243865 - RNA, 16 nt, Homo sapiens
cauauucuguuggcca

SEQ ID NO: 243866 - RNA, 18 nt, Homo sapiens
guugugugugcuuucuaa

SEQ ID NO: 243867 - RNA, 13 nt, Homo sapiens
cucagcaaaagau

SEQ ID NO: 243868 - RNA, 14 nt, Homo sapiens
cacacgcgugcaca

SEQ ID NO: 243869 - RNA, 15 nt, Homo sapiens
gcaucaagaugugac

SEQ ID NO: 243870 - RNA, 20 nt, Homo sapiens
cccacuguggcugauuugga

SEQ ID NO: 243871 - RNA, 17 nt, Homo sapiens
aggaggggugugggcac

SEQ ID NO: 243872 - RNA, 17 nt, Homo sapiens
gacacaugcaaggucau

SEQ ID NO: 243873 - RNA, 18 nt, Homo sapiens
gcagacaguuaagagaaa

SEQ ID NO: 243874 - RNA, 19 nt, Homo sapiens
uggcugggggccucagugc

SEQ ID NO: 243875 - RNA, 14 nt, Homo sapiens
gugaggaagcaaaa

SEQ ID NO: 243876 - RNA, 16 nt, Homo sapiens
acagcuccuucugucc

SEQ ID NO: 243877 - RNA, 13 nt, Homo sapiens
cuuuggacacuca

SEQ ID NO: 243878 - RNA, 18 nt, Homo sapiens
uguuuagcccaaaaccaa

SEQ ID NO: 243879 - RNA, 19 nt, Homo sapiens
ugggcccccaaauggaaau

SEQ ID NO: 243880 - RNA, 13 nt, Homo sapiens
aucccuacuguaa

SEQ ID NO: 243881 - RNA, 15 nt, Homo sapiens
ucuaugacacaugca

SEQ ID NO: 243882 - RNA, 21 nt, Homo sapiens
ugaagcugggagaaccaaaaa

SEQ ID NO: 243883 - RNA, 13 nt, Homo sapiens
acauaucugucau

SEQ ID NO: 243884 - RNA, 14 nt, Homo sapiens
uucagcucugcaag

SEQ ID NO: 243885 - RNA, 22 nt, Homo sapiens
aaugugacuugagcccagagug

SEQ ID NO: 243886 - RNA, 14 nt, Homo sapiens
auauauaagccaaa

SEQ ID NO: 243887 - RNA, 21 nt, Homo sapiens
guacacuguuucaaacuuuac

SEQ ID NO: 243888 - RNA, 12 nt, Homo sapiens
agcuuuucccaa

SEQ ID NO: 243889 - RNA, 22 nt, Homo sapiens
aauaaauuuguaugcucaauua

SEQ ID NO: 243890 - RNA, 21 nt, Homo sapiens
gcacagcugggguggggaccu

SEQ ID NO: 243891 - RNA, 19 nt, Homo sapiens
acugaugggcaacccccag

SEQ ID NO: 243892 - RNA, 17 nt, Homo sapiens
ccaaagugcugggauua

SEQ ID NO: 243893 - RNA, 23 nt, Homo sapiens
ugcagugguaugaucacggcuca

SEQ ID NO: 243894 - RNA, 21 nt, Homo sapiens
ggguguggcgcagcauauuca

SEQ ID NO: 243895 - RNA, 18 nt, Homo sapiens
gcagccuggggucugaca

SEQ ID NO: 243896 - RNA, 15 nt, Homo sapiens
uucacagccaugauu

SEQ ID NO: 243897 - RNA, 16 nt, Homo sapiens
auacagauagauauau

SEQ ID NO: 243898 - RNA, 13 nt, Homo sapiens
agauaaaugugcu

SEQ ID NO: 243899 - RNA, 19 nt, Homo sapiens
ucacaagucagcacuaccu

SEQ ID NO: 243900 - RNA, 19 nt, Homo sapiens
caugcacagcuaacaugga

SEQ ID NO: 243901 - RNA, 20 nt, Homo sapiens
cuggcaugggaaugaauguc

SEQ ID NO: 243902 - RNA, 12 nt, Homo sapiens
ugguaugaucac

SEQ ID NO: 243903 - RNA, 15 nt, Homo sapiens
cuuccccccaaaacu

SEQ ID NO: 243904 - RNA, 14 nt, Homo sapiens
aaauauaauugaca

SEQ ID NO: 243905 - RNA, 18 nt, Homo sapiens
uuucuaugacacaugcaa

SEQ ID NO: 243906 - RNA, 14 nt, Homo sapiens
caguguacauggaa

SEQ ID NO: 243907 - RNA, 15 nt, Homo sapiens
cauguauuaccugaa

SEQ ID NO: 243908 - RNA, 23 nt, Homo sapiens
aggaagccagcaggcucucaggc

SEQ ID NO: 243909 - RNA, 14 nt, Homo sapiens
augagaaaugccag

SEQ ID NO: 243910 - RNA, 19 nt, Homo sapiens
cauguaauuaaguacuaug

SEQ ID NO: 243911 - RNA, 15 nt, Homo sapiens
ugacuuaagcacacu

SEQ ID NO: 243912 - RNA, 18 nt, Homo sapiens
aaacucuccucugcugcu

SEQ ID NO: 243913 - RNA, 20 nt, Homo sapiens
agcuguaaaguugcagguug

SEQ ID NO: 243914 - RNA, 12 nt, Homo sapiens
cugcuccagcug

SEQ ID NO: 243915 - RNA, 22 nt, Homo sapiens
uuuguuaguaugaggcauuugu

SEQ ID NO: 243916 - RNA, 13 nt, Homo sapiens
uauaagccaaaaa

SEQ ID NO: 243917 - RNA, 18 nt, Homo sapiens
uucuugaacaaacuggaa

SEQ ID NO: 243918 - RNA, 21 nt, Homo sapiens
cugggguggggaccucaggcc

SEQ ID NO: 243919 - RNA, 17 nt, Homo sapiens
uaacauggaaguacuau

SEQ ID NO: 243920 - RNA, 14 nt, Homo sapiens
ccaaacucaccugc

SEQ ID NO: 243921 - RNA, 24 nt, Homo sapiens
accaugauuaaccacuucagcuga

SEQ ID NO: 243922 - RNA, 17 nt, Homo sapiens
agacauacuaaccagca

SEQ ID NO: 243923 - RNA, 23 nt, Homo sapiens
aaggaugaucuaggaagacuuug

SEQ ID NO: 243924 - RNA, 22 nt, Homo sapiens
cuaaaugugaaugaugauccua

SEQ ID NO: 243925 - RNA, 17 nt, Homo sapiens
gagucucacuguugccc

SEQ ID NO: 243926 - RNA, 14 nt, Homo sapiens
auccacccaccuca

SEQ ID NO: 243927 - RNA, 22 nt, Homo sapiens
aguuuuuauggcuuuugugcau

SEQ ID NO: 243928 - RNA, 20 nt, Homo sapiens
auuaacuuuuauaaacuuua

SEQ ID NO: 243929 - RNA, 12 nt, Homo sapiens
ccagauugcaac

SEQ ID NO: 243930 - RNA, 13 nt, Homo sapiens
ccaguucuuuuaa

SEQ ID NO: 243931 - RNA, 20 nt, Homo sapiens
ccagguuuuuggucugaccc

SEQ ID NO: 243932 - RNA, 14 nt, Homo sapiens
agagaaaugagcuu

SEQ ID NO: 243933 - RNA, 17 nt, Homo sapiens
gugauuuucauugcugg

SEQ ID NO: 243934 - RNA, 14 nt, Homo sapiens
gacuuggaaauggg

SEQ ID NO: 243935 - RNA, 14 nt, Homo sapiens
aggauguucuagca

SEQ ID NO: 243936 - RNA, 23 nt, Homo sapiens
gugaagacaaugacuuacuguac

SEQ ID NO: 243937 - RNA, 14 nt, Homo sapiens
ugaucuuugcagac

SEQ ID NO: 243938 - RNA, 19 nt, Homo sapiens
cacgacugcccggcagggu

SEQ ID NO: 243939 - RNA, 22 nt, Homo sapiens
cauguguguucaugcacacuug

SEQ ID NO: 243940 - RNA, 17 nt, Homo sapiens
guaaauagcucaggugu

SEQ ID NO: 243941 - RNA, 20 nt, Homo sapiens
acacaaacgggcucagcaaa

SEQ ID NO: 243942 - RNA, 23 nt, Homo sapiens
aauagcugggacuacagguguga

SEQ ID NO: 243943 - RNA, 16 nt, Homo sapiens
ccagacacauguccaa

SEQ ID NO: 243944 - RNA, 13 nt, Homo sapiens
cuggagugcagug

SEQ ID NO: 243945 - RNA, 17 nt, Homo sapiens
auauugccauuucuucc

SEQ ID NO: 243946 - RNA, 23 nt, Homo sapiens
cuguggguuucuaaagcugccag

SEQ ID NO: 243947 - RNA, 19 nt, Homo sapiens
cagugccaaaaacaacaac

SEQ ID NO: 243948 - RNA, 15 nt, Homo sapiens
ugggauggauuucca

SEQ ID NO: 243949 - RNA, 21 nt, Homo sapiens
agaguaacccugucuaaugaa

SEQ ID NO: 243950 - RNA, 18 nt, Homo sapiens
ucucacuauguugcccag

SEQ ID NO: 243951 - RNA, 14 nt, Homo sapiens
agaaauguguuauc

SEQ ID NO: 243952 - RNA, 14 nt, Homo sapiens
gcuuuugugcauua

SEQ ID NO: 243953 - RNA, 18 nt, Homo sapiens
cugcaucaagaugugaca

SEQ ID NO: 243954 - RNA, 14 nt, Homo sapiens
ugcaccacugcacu

SEQ ID NO: 243955 - RNA, 10 nt, Homo sapiens
uuggggacca

SEQ ID NO: 243956 - RNA, 19 nt, Homo sapiens
aagugguacuaacuuuccu

SEQ ID NO: 243957 - RNA, 21 nt, Homo sapiens
accucaccccacuguggcuga

SEQ ID NO: 243958 - RNA, 15 nt, Homo sapiens
aagccgugauuuuca

SEQ ID NO: 243959 - RNA, 22 nt, Homo sapiens
gccauauucuguuggccagugu

SEQ ID NO: 243960 - RNA, 12 nt, Homo sapiens
ggcucucaggcc

SEQ ID NO: 243961 - RNA, 22 nt, Homo sapiens
cauacacacacacgcgugcaca

SEQ ID NO: 243962 - RNA, 14 nt, Homo sapiens
gagccuuccagggg

SEQ ID NO: 243963 - RNA, 14 nt, Homo sapiens
agcucuacugaggu

SEQ ID NO: 243964 - RNA, 16 nt, Homo sapiens
gaacuggguacuugug

SEQ ID NO: 243965 - RNA, 18 nt, Homo sapiens
cagagucucacuguugcc

SEQ ID NO: 243966 - RNA, 14 nt, Homo sapiens
uggcuaaauucaug

SEQ ID NO: 243967 - RNA, 18 nt, Homo sapiens
aaagggcccagagagggu

SEQ ID NO: 243968 - RNA, 22 nt, Homo sapiens
cccaggugguuauggagagggu

SEQ ID NO: 243969 - RNA, 17 nt, Homo sapiens
cacuaaggugugcucug

SEQ ID NO: 243970 - RNA, 16 nt, Homo sapiens
aguaugaggcauuugu

SEQ ID NO: 243971 - RNA, 17 nt, Homo sapiens
ugaauuuuggcuguguc

SEQ ID NO: 243972 - RNA, 11 nt, Homo sapiens
augacacgaau

SEQ ID NO: 243973 - RNA, 23 nt, Homo sapiens
agcggcuggcagcccaccccuca

SEQ ID NO: 243974 - RNA, 15 nt, Homo sapiens
ugaacacucuuggua

SEQ ID NO: 243975 - RNA, 24 nt, Homo sapiens
cuccuuucaccacaugugcacaug

SEQ ID NO: 243976 - RNA, 22 nt, Homo sapiens
aggcauccaguaucuugaagac

SEQ ID NO: 243977 - RNA, 15 nt, Homo sapiens
gcuugggcuucaucc

SEQ ID NO: 243978 - RNA, 14 nt, Homo sapiens
gaacacuccuucac

SEQ ID NO: 243979 - RNA, 13 nt, Homo sapiens
cagagcugccacc

SEQ ID NO: 243980 - RNA, 17 nt, Homo sapiens
cacuucccuacauggag

SEQ ID NO: 243981 - RNA, 17 nt, Homo sapiens
aaugaggaaacugcacu

SEQ ID NO: 243982 - RNA, 23 nt, Homo sapiens
cacagcuaacauggaaguacuau

SEQ ID NO: 243983 - RNA, 19 nt, Homo sapiens
cccaggcuggcgugcagug

SEQ ID NO: 243984 - RNA, 17 nt, Homo sapiens
uguucagcuccagcuca

SEQ ID NO: 243985 - RNA, 21 nt, Homo sapiens
cuuggggaccagagcugccac

SEQ ID NO: 243986 - RNA, 15 nt, Homo sapiens
ucaacucuccuccag

SEQ ID NO: 243987 - RNA, 16 nt, Homo sapiens
gaauccagacccggcu

SEQ ID NO: 243988 - RNA, 13 nt, Homo sapiens
agagccagggucu

SEQ ID NO: 243989 - RNA, 14 nt, Homo sapiens
cuguucccaugaga

SEQ ID NO: 243990 - RNA, 15 nt, Homo sapiens
cugggcuugucugua

SEQ ID NO: 243991 - RNA, 16 nt, Homo sapiens
augcucuuuacuucau

SEQ ID NO: 243992 - RNA, 15 nt, Homo sapiens
uuggauuguccccga

SEQ ID NO: 243993 - RNA, 13 nt, Homo sapiens
gagaaaugagcug

SEQ ID NO: 243994 - RNA, 13 nt, Homo sapiens
cgaccagacaccu

SEQ ID NO: 243995 - RNA, 19 nt, Homo sapiens
agcucugcuccucucccca

SEQ ID NO: 243996 - RNA, 21 nt, Homo sapiens
acauacucugcuuagaauuug

SEQ ID NO: 243997 - RNA, 14 nt, Homo sapiens
cagagaaaguacuu

SEQ ID NO: 243998 - RNA, 22 nt, Homo sapiens
uggauguucugacccugcuuca

SEQ ID NO: 243999 - RNA, 12 nt, Homo sapiens
aaaugccagugu

SEQ ID NO: 244000 - RNA, 15 nt, Homo sapiens
aaaccgaauuuucac

SEQ ID NO: 244001 - RNA, 12 nt, Homo sapiens
cagagucucacu

SEQ ID NO: 244002 - RNA, 17 nt, Homo sapiens
uuaucagaauucucaga

SEQ ID NO: 244003 - RNA, 22 nt, Homo sapiens
acugugaagagaaccauaucaa

SEQ ID NO: 244004 - RNA, 13 nt, Homo sapiens
ugcuucagccucc

SEQ ID NO: 244005 - RNA, 23 nt, Homo sapiens
ucuucuccaggcuguaucccaug

SEQ ID NO: 244006 - RNA, 12 nt, Homo sapiens
gcaggaccucag

SEQ ID NO: 244007 - RNA, 17 nt, Homo sapiens
gaagaauugaaaaacca

SEQ ID NO: 244008 - RNA, 15 nt, Homo sapiens
agguggggucacucu

SEQ ID NO: 244009 - RNA, 23 nt, Homo sapiens
gugagcaauccugcaagaacaag

SEQ ID NO: 244010 - RNA, 18 nt, Homo sapiens
ugcagugguaugaucacg

SEQ ID NO: 244011 - RNA, 15 nt, Homo sapiens
auaguggugugauuu

SEQ ID NO: 244012 - RNA, 14 nt, Homo sapiens
cuaugugagcacaa

SEQ ID NO: 244013 - RNA, 23 nt, Homo sapiens
acaagaucacaagucagcacuac

SEQ ID NO: 244014 - RNA, 20 nt, Homo sapiens
cacagcuucauuuccugugu

SEQ ID NO: 244015 - RNA, 19 nt, Homo sapiens
gagacagaguuuucacucu

SEQ ID NO: 244016 - RNA, 16 nt, Homo sapiens
gccucucucaggccaa

SEQ ID NO: 244017 - RNA, 18 nt, Homo sapiens
aaaaguuuaaaaagcuca

SEQ ID NO: 244018 - RNA, 17 nt, Homo sapiens
guggugagaggcaucca

SEQ ID NO: 244019 - RNA, 23 nt, Homo sapiens
auucaacagguuuuccugaagaa

SEQ ID NO: 244020 - RNA, 14 nt, Homo sapiens
acauacucccaucu

SEQ ID NO: 244021 - RNA, 11 nt, Homo sapiens
cccuacaugga

SEQ ID NO: 244022 - RNA, 13 nt, Homo sapiens
gggguaugggaga

SEQ ID NO: 244023 - RNA, 22 nt, Homo sapiens
gaggcagccccauucugccugc

SEQ ID NO: 244024 - RNA, 18 nt, Homo sapiens
gcaaaagcaucuauguga

SEQ ID NO: 244025 - RNA, 20 nt, Homo sapiens
gaccuucuccuucaccuuug

SEQ ID NO: 244026 - RNA, 10 nt, Homo sapiens
ggaagagcuc

SEQ ID NO: 244027 - RNA, 15 nt, Homo sapiens
cucauccucauaccc

SEQ ID NO: 244028 - RNA, 17 nt, Homo sapiens
acccaguuagcucucaa

SEQ ID NO: 244029 - RNA, 19 nt, Homo sapiens
cuaggaaucaugugccaag

SEQ ID NO: 244030 - RNA, 16 nt, Homo sapiens
uaagagaaaugagcug

SEQ ID NO: 244031 - RNA, 19 nt, Homo sapiens
acagcugggguggggaccu

SEQ ID NO: 244032 - RNA, 13 nt, Homo sapiens
cuauguucuuagu

SEQ ID NO: 244033 - RNA, 17 nt, Homo sapiens
cuaggcauuugcugaau

SEQ ID NO: 244034 - RNA, 17 nt, Homo sapiens
cucacauuuauucugcu

SEQ ID NO: 244035 - RNA, 16 nt, Homo sapiens
uugggaggccauuugu

SEQ ID NO: 244036 - RNA, 20 nt, Homo sapiens
uauuaaggaagacaauguga

SEQ ID NO: 244037 - RNA, 19 nt, Homo sapiens
uacucgaguuacagacaaa

SEQ ID NO: 244038 - RNA, 22 nt, Homo sapiens
gacgccaucccagccccaauga

SEQ ID NO: 244039 - RNA, 12 nt, Homo sapiens
uagaagucacac

SEQ ID NO: 244040 - RNA, 14 nt, Homo sapiens
acacugcuugugaa

SEQ ID NO: 244041 - RNA, 14 nt, Homo sapiens
gagggagugacaga

SEQ ID NO: 244042 - RNA, 16 nt, Homo sapiens
ccuuucaccacaugug

SEQ ID NO: 244043 - RNA, 15 nt, Homo sapiens
uuagacagucccugc

SEQ ID NO: 244044 - RNA, 18 nt, Homo sapiens
cauuuaaaaaaaaucccu

SEQ ID NO: 244045 - RNA, 23 nt, Homo sapiens
ggacaaggaugaucuaggaagac

SEQ ID NO: 244046 - RNA, 21 nt, Homo sapiens
ucugagacucgcgacaaugca

SEQ ID NO: 244047 - RNA, 15 nt, Homo sapiens
ucugacccacugcuu

SEQ ID NO: 244048 - RNA, 19 nt, Homo sapiens
uacuggagaaaauggacgu

SEQ ID NO: 244049 - RNA, 21 nt, Homo sapiens
gcacccccggcccagugcccc

SEQ ID NO: 244050 - RNA, 16 nt, Homo sapiens
ugaagucacacaguga

SEQ ID NO: 244051 - RNA, 16 nt, Homo sapiens
cugggggccucagugc

SEQ ID NO: 244052 - RNA, 24 nt, Homo sapiens
uucuccaagcaggacauggacaag

SEQ ID NO: 244053 - RNA, 22 nt, Homo sapiens
ccuugaaaacacuguucucugc

SEQ ID NO: 244054 - RNA, 17 nt, Homo sapiens
agcugggguggggaccu

SEQ ID NO: 244055 - RNA, 17 nt, Homo sapiens
ggagguacgaaaagagg

SEQ ID NO: 244056 - RNA, 18 nt, Homo sapiens
aaagaugaagcugagaug

SEQ ID NO: 244057 - RNA, 14 nt, Homo sapiens
cugucgcccagucu

SEQ ID NO: 244058 - RNA, 20 nt, Homo sapiens
gaagguucuacgccagggga

SEQ ID NO: 244059 - RNA, 18 nt, Homo sapiens
uccuaggcauuugcugaa

SEQ ID NO: 244060 - RNA, 13 nt, Homo sapiens
aaugcaccuggaa

SEQ ID NO: 244061 - RNA, 20 nt, Homo sapiens
cuugaccucaggugauccac

SEQ ID NO: 244062 - RNA, 17 nt, Homo sapiens
ucuguccuacucugugu

SEQ ID NO: 244063 - RNA, 13 nt, Homo sapiens
uucugaaagggac

SEQ ID NO: 244064 - RNA, 19 nt, Homo sapiens
augacaucagcaauacaga

SEQ ID NO: 244065 - RNA, 16 nt, Homo sapiens
acacucaaaagcuggg

SEQ ID NO: 244066 - RNA, 21 nt, Homo sapiens
gauuauuggaaauuuguuaua

SEQ ID NO: 244067 - RNA, 19 nt, Homo sapiens
aggcugucaauuacaggaa

SEQ ID NO: 244068 - RNA, 23 nt, Homo sapiens
uuucaguggcuaccuacauacaa

SEQ ID NO: 244069 - RNA, 12 nt, Homo sapiens
gcaguguggaaa

SEQ ID NO: 244070 - RNA, 13 nt, Homo sapiens
ccaucaagccacc

SEQ ID NO: 244071 - RNA, 15 nt, Homo sapiens
aagagaaaugagcuu

SEQ ID NO: 244072 - RNA, 16 nt, Homo sapiens
cuauuguuucuuucaa

SEQ ID NO: 244073 - RNA, 22 nt, Homo sapiens
uucuacucgaguuacagacaaa

SEQ ID NO: 244074 - RNA, 16 nt, Homo sapiens
aacuacccucuggaga

SEQ ID NO: 244075 - RNA, 16 nt, Homo sapiens
augucagugugacuga

SEQ ID NO: 244076 - RNA, 20 nt, Homo sapiens
agaaaauaguggugugauuu

SEQ ID NO: 244077 - RNA, 16 nt, Homo sapiens
ugcagccucaaccucc

SEQ ID NO: 244078 - RNA, 14 nt, Homo sapiens
uucaaccaguuuga

SEQ ID NO: 244079 - RNA, 15 nt, Homo sapiens
cgaguuacagacaaa

SEQ ID NO: 244080 - RNA, 17 nt, Homo sapiens
aauccagagagcagugu

SEQ ID NO: 244081 - RNA, 19 nt, Homo sapiens
gcauuuggugguuucagaa

SEQ ID NO: 244082 - RNA, 14 nt, Homo sapiens
ccuuagacaguccc

SEQ ID NO: 244083 - RNA, 18 nt, Homo sapiens
cagauagauauaugcucu

SEQ ID NO: 244084 - RNA, 14 nt, Homo sapiens
cugcccuccaagac

SEQ ID NO: 244085 - RNA, 21 nt, Homo sapiens
guccucccaucucacacauga

SEQ ID NO: 244086 - RNA, 16 nt, Homo sapiens
ccuggccccucagggu

SEQ ID NO: 244087 - RNA, 12 nt, Homo sapiens
gucuacacugug

SEQ ID NO: 244088 - RNA, 23 nt, Homo sapiens
cuggcugcaaaggguaucaggug

SEQ ID NO: 244089 - RNA, 17 nt, Homo sapiens
caagagagacagcacag

SEQ ID NO: 244090 - RNA, 18 nt, Homo sapiens
aagaauguguuuaaacuu

SEQ ID NO: 244091 - RNA, 20 nt, Homo sapiens
acaggaaguacuggagaaaa

SEQ ID NO: 244092 - RNA, 14 nt, Homo sapiens
uguuuucucuugag

SEQ ID NO: 244093 - RNA, 21 nt, Homo sapiens
uucucagaaucucaaauaacu

SEQ ID NO: 244094 - RNA, 16 nt, Homo sapiens
gcuaugugagcacaaa

SEQ ID NO: 244095 - RNA, 23 nt, Homo sapiens
aagcucugcuccucuccccagca

SEQ ID NO: 244096 - RNA, 14 nt, Homo sapiens
auccuggaguucug

SEQ ID NO: 244097 - RNA, 18 nt, Homo sapiens
aggccuggccagaugcac

SEQ ID NO: 244098 - RNA, 21 nt, Homo sapiens
uuaccugccaggaagccagca

SEQ ID NO: 244099 - RNA, 15 nt, Homo sapiens
ccugggcaaugugau

SEQ ID NO: 244100 - RNA, 22 nt, Homo sapiens
guuuuaugagaaaugccagugu

SEQ ID NO: 244101 - RNA, 19 nt, Homo sapiens
augccagcuuaucucaggg

SEQ ID NO: 244102 - RNA, 15 nt, Homo sapiens
ucaguaauaacucua

SEQ ID NO: 244103 - RNA, 16 nt, Homo sapiens
acuugcacccaugugu

SEQ ID NO: 244104 - RNA, 22 nt, Homo sapiens
gacagccacggccaggccagag

SEQ ID NO: 244105 - RNA, 15 nt, Homo sapiens
acugccaugccagcu

SEQ ID NO: 244106 - RNA, 13 nt, Homo sapiens
aagugaggaugaa

SEQ ID NO: 244107 - RNA, 22 nt, Homo sapiens
guuggccagugugacaaggauu

SEQ ID NO: 244108 - RNA, 22 nt, Homo sapiens
aaacugauuacaacugcuacag

SEQ ID NO: 244109 - RNA, 20 nt, Homo sapiens
ucucaaacucuugaccucag

SEQ ID NO: 244110 - RNA, 15 nt, Homo sapiens
ggcuguaucccauga

SEQ ID NO: 244111 - RNA, 12 nt, Homo sapiens
ucucuugauuca

SEQ ID NO: 244112 - RNA, 14 nt, Homo sapiens
cuguucuuucuggc

SEQ ID NO: 244113 - RNA, 19 nt, Homo sapiens
uacuacaguccucccaucu

SEQ ID NO: 244114 - RNA, 11 nt, Homo sapiens
acgccacugca

SEQ ID NO: 244115 - RNA, 20 nt, Homo sapiens
gcucaggugucccugcacuu

SEQ ID NO: 244116 - RNA, 17 nt, Homo sapiens
gcacagggucucuacca

SEQ ID NO: 244117 - RNA, 16 nt, Homo sapiens
uagcugggacuacagg

SEQ ID NO: 244118 - RNA, 17 nt, Homo sapiens
cauacucugcuuagaau

SEQ ID NO: 244119 - RNA, 14 nt, Homo sapiens
aauugaaaaaccau

SEQ ID NO: 244120 - RNA, 20 nt, Homo sapiens
caaccccuucgcuccugugu

SEQ ID NO: 244121 - RNA, 15 nt, Homo sapiens
agaucacgccacugc

SEQ ID NO: 244122 - RNA, 14 nt, Homo sapiens
cagaugcaccagcc

SEQ ID NO: 244123 - RNA, 17 nt, Homo sapiens
cccaauauuuaccagac

SEQ ID NO: 244124 - RNA, 19 nt, Homo sapiens
caauaaagcagcguuucua

SEQ ID NO: 244125 - RNA, 13 nt, Homo sapiens
cauauuuacuucu

SEQ ID NO: 244126 - RNA, 13 nt, Homo sapiens
agcgugagccacu

SEQ ID NO: 244127 - RNA, 22 nt, Homo sapiens
aagagacuuggaaaugggagac

SEQ ID NO: 244128 - RNA, 19 nt, Homo sapiens
ucaccaacgucugugccau

SEQ ID NO: 244129 - RNA, 15 nt, Homo sapiens
uguuggccaguguga

SEQ ID NO: 244130 - RNA, 20 nt, Homo sapiens
uucgcaggauucuuccuccc

SEQ ID NO: 244131 - RNA, 19 nt, Homo sapiens
cuccgcuuucuacccagcg

SEQ ID NO: 244132 - RNA, 23 nt, Homo sapiens
cuuucccucccuuccucuuucca

SEQ ID NO: 244133 - RNA, 22 nt, Homo sapiens
gauauaugcucugcauguuaca

SEQ ID NO: 244134 - RNA, 20 nt, Homo sapiens
cagagaauucucuuauccaa

SEQ ID NO: 244135 - RNA, 23 nt, Homo sapiens
gcauuuagacucucgacuggcca

SEQ ID NO: 244136 - RNA, 14 nt, Homo sapiens
ggcagggucucacu

SEQ ID NO: 244137 - RNA, 20 nt, Homo sapiens
aguagcugggacuacaggca

SEQ ID NO: 244138 - RNA, 15 nt, Homo sapiens
auacacuuacacuuu

SEQ ID NO: 244139 - RNA, 17 nt, Homo sapiens
gacguguuaugacucca

SEQ ID NO: 244140 - RNA, 20 nt, Homo sapiens
uaaaacaacacucacauuua

SEQ ID NO: 244141 - RNA, 16 nt, Homo sapiens
cuuagacagucccugc

SEQ ID NO: 244142 - RNA, 18 nt, Homo sapiens
ggagauaaaauaaaaaga

SEQ ID NO: 244143 - RNA, 18 nt, Homo sapiens
aggggagaguaacccugu

SEQ ID NO: 244144 - RNA, 15 nt, Homo sapiens
ugggacacccuguga

SEQ ID NO: 244145 - RNA, 18 nt, Homo sapiens
cagcugcuugggcuucau

SEQ ID NO: 244146 - RNA, 19 nt, Homo sapiens
cacauuuauucugcucaca

SEQ ID NO: 244147 - RNA, 12 nt, Homo sapiens
gaaccaagaacu

SEQ ID NO: 244148 - RNA, 22 nt, Homo sapiens
cucugccugaagucacacagug

SEQ ID NO: 244149 - RNA, 23 nt, Homo sapiens
aaugugacuugagcccagaguga

SEQ ID NO: 244150 - RNA, 14 nt, Homo sapiens
ugggacuacaggca

SEQ ID NO: 244151 - RNA, 20 nt, Homo sapiens
auuuacauacucugcuuaga

SEQ ID NO: 244152 - RNA, 17 nt, Homo sapiens
acaugcacagcuaacau

SEQ ID NO: 244153 - RNA, 15 nt, Homo sapiens
uccuucauucaaccc

SEQ ID NO: 244154 - RNA, 20 nt, Homo sapiens
aaaaacaacugaccaguugu

SEQ ID NO: 244155 - RNA, 21 nt, Homo sapiens
cggccccugcugguucagggu

SEQ ID NO: 244156 - RNA, 17 nt, Homo sapiens
ugaaguaauaugcacac

SEQ ID NO: 244157 - RNA, 17 nt, Homo sapiens
aauaacacuguacugca

SEQ ID NO: 244158 - RNA, 13 nt, Homo sapiens
ucaagaugugaca

SEQ ID NO: 244159 - RNA, 17 nt, Homo sapiens
cuucuguccuacucugu

SEQ ID NO: 244160 - RNA, 19 nt, Homo sapiens
auuuuguuuuugucuuaaa

SEQ ID NO: 244161 - RNA, 13 nt, Homo sapiens
aaagcugcugaca

SEQ ID NO: 244162 - RNA, 11 nt, Homo sapiens
agagcugccac

SEQ ID NO: 244163 - RNA, 12 nt, Homo sapiens
uccuccaggugc

SEQ ID NO: 244164 - RNA, 23 nt, Homo sapiens
guguuuccuggcacugcuuccag

SEQ ID NO: 244165 - RNA, 20 nt, Homo sapiens
auguucugggacacaguuca

SEQ ID NO: 244166 - RNA, 18 nt, Homo sapiens
cacacuugggagcaaaag

SEQ ID NO: 244167 - RNA, 13 nt, Homo sapiens
agggugacggggg

SEQ ID NO: 244168 - RNA, 20 nt, Homo sapiens
ccuagcacuuugggaggcca

SEQ ID NO: 244169 - RNA, 12 nt, Homo sapiens
cagugugacaag

SEQ ID NO: 244170 - RNA, 19 nt, Homo sapiens
cagcuaacauggaaguacu

SEQ ID NO: 244171 - RNA, 19 nt, Homo sapiens
caaggcugggggaagaagc

SEQ ID NO: 244172 - RNA, 18 nt, Homo sapiens
uggccaggcuggucucaa

SEQ ID NO: 244173 - RNA, 18 nt, Homo sapiens
gaguacuacaguccuccc

SEQ ID NO: 244174 - RNA, 14 nt, Homo sapiens
ucuacagaggccau

SEQ ID NO: 244175 - RNA, 15 nt, Homo sapiens
ugguugagguuucaa

SEQ ID NO: 244176 - RNA, 22 nt, Homo sapiens
gaagacagcucuuauauugcca

SEQ ID NO: 244177 - RNA, 17 nt, Homo sapiens
aucuugcucugcugaca

SEQ ID NO: 244178 - RNA, 13 nt, Homo sapiens
uucuuccacaaga

SEQ ID NO: 244179 - RNA, 18 nt, Homo sapiens
aguacguugugcauuugg

SEQ ID NO: 244180 - RNA, 12 nt, Homo sapiens
acaguaucucag

SEQ ID NO: 244181 - RNA, 19 nt, Homo sapiens
augcacagcuaacauggaa

SEQ ID NO: 244182 - RNA, 21 nt, Homo sapiens
acccacugcuuuuggucugug

SEQ ID NO: 244183 - RNA, 15 nt, Homo sapiens
auccacccaccucag

SEQ ID NO: 244184 - RNA, 13 nt, Homo sapiens
caccucugcacaa

SEQ ID NO: 244185 - RNA, 20 nt, Homo sapiens
cuucagaucucuaacuucac

SEQ ID NO: 244186 - RNA, 15 nt, Homo sapiens
ccaaggccaaaggaa

SEQ ID NO: 244187 - RNA, 13 nt, Homo sapiens
caggcaagcaccu

SEQ ID NO: 244188 - RNA, 14 nt, Homo sapiens
gcccuuaccugcca

SEQ ID NO: 244189 - RNA, 19 nt, Homo sapiens
uuuuuaagugcugcauuua

SEQ ID NO: 244190 - RNA, 16 nt, Homo sapiens
aaaagcaucuauguga

SEQ ID NO: 244191 - RNA, 14 nt, Homo sapiens
ucucucgugauuga

SEQ ID NO: 244192 - RNA, 19 nt, Homo sapiens
auucauaaugacuuaagca

SEQ ID NO: 244193 - RNA, 13 nt, Homo sapiens
uacgggaggguaa

SEQ ID NO: 244194 - RNA, 13 nt, Homo sapiens
gaugauaaaacac

SEQ ID NO: 244195 - RNA, 18 nt, Homo sapiens
gagccagauuucacucuc

SEQ ID NO: 244196 - RNA, 14 nt, Homo sapiens
cacaugugcacaug

SEQ ID NO: 244197 - RNA, 13 nt, Homo sapiens
aaugcacuuuguu

SEQ ID NO: 244198 - RNA, 16 nt, Homo sapiens
gaguucaucuugaauu

SEQ ID NO: 244199 - RNA, 16 nt, Homo sapiens
ugccaggaagccagca

SEQ ID NO: 244200 - RNA, 15 nt, Homo sapiens
cuaacuuuccuucau

SEQ ID NO: 244201 - RNA, 19 nt, Homo sapiens
cucacauuuauucugcuca

SEQ ID NO: 244202 - RNA, 17 nt, Homo sapiens
gaggacuuuucuuugug

SEQ ID NO: 244203 - RNA, 23 nt, Homo sapiens
uaucuaauauguaacaagccacc

SEQ ID NO: 244204 - RNA, 16 nt, Homo sapiens
auccacccaccucagc

SEQ ID NO: 244205 - RNA, 20 nt, Homo sapiens
agccccuggaugcagccuca

SEQ ID NO: 244206 - RNA, 20 nt, Homo sapiens
ugaagacagagcuacacagg

SEQ ID NO: 244207 - RNA, 20 nt, Homo sapiens
cuggcagaguugaagacaga

SEQ ID NO: 244208 - RNA, 13 nt, Homo sapiens
ugaugaucuuugc

SEQ ID NO: 244209 - RNA, 15 nt, Homo sapiens
guaaggaauaccugu

SEQ ID NO: 244210 - RNA, 14 nt, Homo sapiens
gaagacuucauccc

SEQ ID NO: 244211 - RNA, 14 nt, Homo sapiens
uaucaggugcugcc

SEQ ID NO: 244212 - RNA, 12 nt, Homo sapiens
gauccuccaggu

SEQ ID NO: 244213 - RNA, 21 nt, Homo sapiens
uggcagugggagcugccuguu

SEQ ID NO: 244214 - RNA, 21 nt, Homo sapiens
aucacaagucagcacuaccuc

SEQ ID NO: 244215 - RNA, 15 nt, Homo sapiens
cugcaucaagaugug

SEQ ID NO: 244216 - RNA, 19 nt, Homo sapiens
gggugacagagcaagugag

SEQ ID NO: 244217 - RNA, 18 nt, Homo sapiens
uauuucccucaccuuucc

SEQ ID NO: 244218 - RNA, 19 nt, Homo sapiens
cuugcuucaaccccaugag

SEQ ID NO: 244219 - RNA, 14 nt, Homo sapiens
ucacuggaacacua

SEQ ID NO: 244220 - RNA, 19 nt, Homo sapiens
gauacaggaaaagcugcug

SEQ ID NO: 244221 - RNA, 21 nt, Homo sapiens
cucugaggacacuaaccacgc

SEQ ID NO: 244222 - RNA, 21 nt, Homo sapiens
cccacgacugcccggcagggu

SEQ ID NO: 244223 - RNA, 20 nt, Homo sapiens
uucccaucuuccaaggguac

SEQ ID NO: 244224 - RNA, 15 nt, Homo sapiens
ccaccaacauacucc

SEQ ID NO: 244225 - RNA, 16 nt, Homo sapiens
ugcaggaccucaggug

SEQ ID NO: 244226 - RNA, 14 nt, Homo sapiens
ccaggaagccagca

SEQ ID NO: 244227 - RNA, 12 nt, Homo sapiens
aagaaacuaccc

SEQ ID NO: 244228 - RNA, 23 nt, Homo sapiens
uucaauauccccaagcaguguga

SEQ ID NO: 244229 - RNA, 16 nt, Homo sapiens
ucuuuugagcauuuag

SEQ ID NO: 244230 - RNA, 18 nt, Homo sapiens
uggguacuuguggacaca

SEQ ID NO: 244231 - RNA, 18 nt, Homo sapiens
gaagucuuuguacagaca

SEQ ID NO: 244232 - RNA, 20 nt, Homo sapiens
acgccagauucuuuccugag

SEQ ID NO: 244233 - RNA, 17 nt, Homo sapiens
uugaggauuuugaucca

SEQ ID NO: 244234 - RNA, 13 nt, Homo sapiens
cacgcgugcacac

SEQ ID NO: 244235 - RNA, 13 nt, Homo sapiens
aggggugggacac

SEQ ID NO: 244236 - RNA, 21 nt, Homo sapiens
agccgagaucacgccacugca

SEQ ID NO: 244237 - RNA, 17 nt, Homo sapiens
agacaccuugacagggc

SEQ ID NO: 244238 - RNA, 20 nt, Homo sapiens
acacagcucuucuccaggcu

SEQ ID NO: 244239 - RNA, 16 nt, Homo sapiens
uauaauguaagcucua

SEQ ID NO: 244240 - RNA, 15 nt, Homo sapiens
aguagagucacugga

SEQ ID NO: 244241 - RNA, 17 nt, Homo sapiens
agaaaaaggaugcacag

SEQ ID NO: 244242 - RNA, 15 nt, Homo sapiens
cauuuauucugcuca

SEQ ID NO: 244243 - RNA, 16 nt, Homo sapiens
caggcaagcaccuccu

SEQ ID NO: 244244 - RNA, 21 nt, Homo sapiens
caggugauccacccaccucag

SEQ ID NO: 244245 - RNA, 22 nt, Homo sapiens
uugcccacacuugggagcaaaa

SEQ ID NO: 244246 - RNA, 20 nt, Homo sapiens
cuagcacuuugggaggccaa

SEQ ID NO: 244247 - RNA, 21 nt, Homo sapiens
cuuaagcacacuugacaucaa

SEQ ID NO: 244248 - RNA, 18 nt, Homo sapiens
aguuuuauuuuuguagag

SEQ ID NO: 244249 - RNA, 17 nt, Homo sapiens
uauacauaaacaagacc

SEQ ID NO: 244250 - RNA, 15 nt, Homo sapiens
gggcuggaagcagaa

SEQ ID NO: 244251 - RNA, 19 nt, Homo sapiens
gacagaagaaacuacccuc

SEQ ID NO: 244252 - RNA, 23 nt, Homo sapiens
cuugcaaaguaucccuacuguaa

SEQ ID NO: 244253 - RNA, 12 nt, Homo sapiens
ugggacacaguu

SEQ ID NO: 244254 - RNA, 20 nt, Homo sapiens
ugugauugacgggacuguug

SEQ ID NO: 244255 - RNA, 14 nt, Homo sapiens
ugauuuaaaucagc

SEQ ID NO: 244256 - RNA, 23 nt, Homo sapiens
acaggcaaugcuggcuguuggcu

SEQ ID NO: 244257 - RNA, 13 nt, Homo sapiens
aaugccagugugc

SEQ ID NO: 244258 - RNA, 13 nt, Homo sapiens
aggguggugaccu

SEQ ID NO: 244259 - RNA, 12 nt, Homo sapiens
uuuacaacuggg

SEQ ID NO: 244260 - RNA, 13 nt, Homo sapiens
uuauacauuugau

SEQ ID NO: 244261 - RNA, 14 nt, Homo sapiens
guaucaaugaguaa

SEQ ID NO: 244262 - RNA, 18 nt, Homo sapiens
cacaugccucucucaggc

SEQ ID NO: 244263 - RNA, 18 nt, Homo sapiens
cagagcugccaccugccu

SEQ ID NO: 244264 - RNA, 12 nt, Homo sapiens
acagacaaagcg

SEQ ID NO: 244265 - RNA, 12 nt, Homo sapiens
cagggucucacu

SEQ ID NO: 244266 - RNA, 21 nt, Homo sapiens
gacuugagcccagagugaaca

SEQ ID NO: 244267 - RNA, 13 nt, Homo sapiens
guaacuuacuuag

SEQ ID NO: 244268 - RNA, 16 nt, Homo sapiens
agucccauugauguac

SEQ ID NO: 244269 - RNA, 21 nt, Homo sapiens
cuuuguuuagcccaaaaccaa

SEQ ID NO: 244270 - RNA, 22 nt, Homo sapiens
ucauaaugacuuaagcacacuu

SEQ ID NO: 244271 - RNA, 13 nt, Homo sapiens
acaggugugaacc

SEQ ID NO: 244272 - RNA, 22 nt, Homo sapiens
uucauuuaggugaggaagcaaa

SEQ ID NO: 244273 - RNA, 22 nt, Homo sapiens
guuguuugauucagacagcugc

SEQ ID NO: 244274 - RNA, 14 nt, Homo sapiens
uacguugugcauuu

SEQ ID NO: 244275 - RNA, 15 nt, Homo sapiens
cagcuccuucugucc

SEQ ID NO: 244276 - RNA, 19 nt, Homo sapiens
gaccuuuaagagaaaugag

SEQ ID NO: 244277 - RNA, 21 nt, Homo sapiens
uuuuaagaaaaaggaugcaca

SEQ ID NO: 244278 - RNA, 22 nt, Homo sapiens
aagacugaguacguugugcauu

SEQ ID NO: 244279 - RNA, 11 nt, Homo sapiens
ccaaugcuuug

SEQ ID NO: 244280 - RNA, 19 nt, Homo sapiens
agaaauaucugaaaaugua

SEQ ID NO: 244281 - RNA, 19 nt, Homo sapiens
uggacccugaggcccagag

SEQ ID NO: 244282 - RNA, 20 nt, Homo sapiens
agauagccaaggccaaagga

SEQ ID NO: 244283 - RNA, 14 nt, Homo sapiens
auugauguacuuua

SEQ ID NO: 244284 - RNA, 15 nt, Homo sapiens
gugagcacaaaggua

SEQ ID NO: 244285 - RNA, 22 nt, Homo sapiens
uagucccauugauguacuuuac

SEQ ID NO: 244286 - RNA, 22 nt, Homo sapiens
ucauaguggcuuaaaacaacac

SEQ ID NO: 244287 - RNA, 13 nt, Homo sapiens
gcuaugcauuuga

SEQ ID NO: 244288 - RNA, 16 nt, Homo sapiens
aaaauaccagccagua

SEQ ID NO: 244289 - RNA, 19 nt, Homo sapiens
gcauuuacuuuguguucac

SEQ ID NO: 244290 - RNA, 14 nt, Homo sapiens
gacaggaccaggga

SEQ ID NO: 244291 - RNA, 16 nt, Homo sapiens
ggaacacucugagacu

SEQ ID NO: 244292 - RNA, 16 nt, Homo sapiens
uugggcuggugucacc

SEQ ID NO: 244293 - RNA, 17 nt, Homo sapiens
cacgcuggagugcagug

SEQ ID NO: 244294 - RNA, 18 nt, Homo sapiens
aucuuccaaggguacuaa

SEQ ID NO: 244295 - RNA, 14 nt, Homo sapiens
ugcacuccaugagu

SEQ ID NO: 244296 - RNA, 22 nt, Homo sapiens
acugaguacguugugcauuugg

SEQ ID NO: 244297 - RNA, 23 nt, Homo sapiens
augugagaccauuuagcacacug

SEQ ID NO: 244298 - RNA, 24 nt, Homo sapiens
ggauccuccaggugcacaagcucc

SEQ ID NO: 244299 - RNA, 21 nt, Homo sapiens
auuacaacugcuacagagcag

SEQ ID NO: 244300 - RNA, 16 nt, Homo sapiens
gcacaugccucucuca

SEQ ID NO: 244301 - RNA, 17 nt, Homo sapiens
agacacaggcccggcuc

SEQ ID NO: 244302 - RNA, 14 nt, Homo sapiens
acaaguccucagug

SEQ ID NO: 244303 - RNA, 16 nt, Homo sapiens
uaacagaaauguacag

SEQ ID NO: 244304 - RNA, 19 nt, Homo sapiens
cuccccgggcagcagagag

SEQ ID NO: 244305 - RNA, 16 nt, Homo sapiens
cuuggcgcugccccug

SEQ ID NO: 244306 - RNA, 22 nt, Homo sapiens
caguuguugauaaccacuaaga

SEQ ID NO: 244307 - RNA, 16 nt, Homo sapiens
cugcuucaaauauuuc

SEQ ID NO: 244308 - RNA, 15 nt, Homo sapiens
uccaccugccaggga

SEQ ID NO: 244309 - RNA, 14 nt, Homo sapiens
aacucuuaaaaccc

SEQ ID NO: 244310 - RNA, 21 nt, Homo sapiens
uauuuuuagacagagucucac

SEQ ID NO: 244311 - RNA, 12 nt, Homo sapiens
gaagcacagcuu

SEQ ID NO: 244312 - RNA, 22 nt, Homo sapiens
acucuauuuuuguaaaaaggga

SEQ ID NO: 244313 - RNA, 16 nt, Homo sapiens
caugcuacacacugca

SEQ ID NO: 244314 - RNA, 18 nt, Homo sapiens
cugggauuacagguguga

SEQ ID NO: 244315 - RNA, 18 nt, Homo sapiens
auuaagaaagacuaucua

SEQ ID NO: 244316 - RNA, 21 nt, Homo sapiens
gcaugugaugagaggaaauca

SEQ ID NO: 244317 - RNA, 15 nt, Homo sapiens
agagaugugccccca

SEQ ID NO: 244318 - RNA, 20 nt, Homo sapiens
gugcagugagccgagaucac

SEQ ID NO: 244319 - RNA, 18 nt, Homo sapiens
aauuuucacagccaugau

SEQ ID NO: 244320 - RNA, 12 nt, Homo sapiens
aguuuuaugaga

SEQ ID NO: 244321 - RNA, 14 nt, Homo sapiens
agaaucucaaauaa

SEQ ID NO: 244322 - RNA, 23 nt, Homo sapiens
cuuaaaccgccaaggcuggggga

SEQ ID NO: 244323 - RNA, 17 nt, Homo sapiens
cauucuccuuguguuac

SEQ ID NO: 244324 - RNA, 14 nt, Homo sapiens
ucugccucugacac

SEQ ID NO: 244325 - RNA, 20 nt, Homo sapiens
cuacucuagggaaaaaccag

SEQ ID NO: 244326 - RNA, 19 nt, Homo sapiens
uuuuacuggggauucuuga

SEQ ID NO: 244327 - RNA, 16 nt, Homo sapiens
ucucacuguugcccag

SEQ ID NO: 244328 - RNA, 17 nt, Homo sapiens
cccauaugccugggcag

SEQ ID NO: 244329 - RNA, 20 nt, Homo sapiens
gacuuaagcacacuugacau

SEQ ID NO: 244330 - RNA, 17 nt, Homo sapiens
uaaugaaaccugugucu

SEQ ID NO: 244331 - RNA, 14 nt, Homo sapiens
auaaagcagcguuu

SEQ ID NO: 244332 - RNA, 23 nt, Homo sapiens
uuccucauuagcauuuugcuaaa

SEQ ID NO: 244333 - RNA, 21 nt, Homo sapiens
uugaagacagagcuacacagg

SEQ ID NO: 244334 - RNA, 13 nt, Homo sapiens
gcugccugggauc

SEQ ID NO: 244335 - RNA, 22 nt, Homo sapiens
agcagagcaccuuagacagucc

SEQ ID NO: 244336 - RNA, 18 nt, Homo sapiens
gcgggggagcaggcagug

SEQ ID NO: 244337 - RNA, 23 nt, Homo sapiens
cacguuucuaaaggcuaccuuug

SEQ ID NO: 244338 - RNA, 14 nt, Homo sapiens
ugacaggcaaugcu

SEQ ID NO: 244339 - RNA, 15 nt, Homo sapiens
cuuuucauaaccuag

SEQ ID NO: 244340 - RNA, 14 nt, Homo sapiens
agccuuagaaguca

SEQ ID NO: 244341 - RNA, 16 nt, Homo sapiens
caggugugaaccacca

SEQ ID NO: 244342 - RNA, 24 nt, Homo sapiens
uuuccuggcacugcuuccagugag

SEQ ID NO: 244343 - RNA, 20 nt, Homo sapiens
caaggccaaaggaagcacau

SEQ ID NO: 244344 - RNA, 16 nt, Homo sapiens
ugaguacuacaguccu

SEQ ID NO: 244345 - RNA, 14 nt, Homo sapiens
uuugcagacaggca

SEQ ID NO: 244346 - RNA, 15 nt, Homo sapiens
uccagcucaccagcc

SEQ ID NO: 244347 - RNA, 22 nt, Homo sapiens
ccaauuuaaagaaaacuguuaa

SEQ ID NO: 244348 - RNA, 15 nt, Homo sapiens
gaggccucgacccac

SEQ ID NO: 244349 - RNA, 21 nt, Homo sapiens
gcacaugccucucucaggcca

SEQ ID NO: 244350 - RNA, 22 nt, Homo sapiens
agcuaacauggaaguacuauaa

SEQ ID NO: 244351 - RNA, 15 nt, Homo sapiens
auuuuuuugagacag

SEQ ID NO: 244352 - RNA, 15 nt, Homo sapiens
uuggaauuuugugcc

SEQ ID NO: 244353 - RNA, 16 nt, Homo sapiens
cuugguucccauuugc

SEQ ID NO: 244354 - RNA, 18 nt, Homo sapiens
cuccugugucuugcaaug

SEQ ID NO: 244355 - RNA, 21 nt, Homo sapiens
aggccaaaggaagcacaugcc

SEQ ID NO: 244356 - RNA, 16 nt, Homo sapiens
aaagaagauucugugg

SEQ ID NO: 244357 - RNA, 21 nt, Homo sapiens
accauuuugggguacccacug

SEQ ID NO: 244358 - RNA, 19 nt, Homo sapiens
ucagcuuguaaauagcuca

SEQ ID NO: 244359 - RNA, 20 nt, Homo sapiens
guaauuugugauacaaugcu

SEQ ID NO: 244360 - RNA, 23 nt, Homo sapiens
acuaaugaggaaacugcacuguu

SEQ ID NO: 244361 - RNA, 23 nt, Homo sapiens
aggggcccaaauucuuucagugg

SEQ ID NO: 244362 - RNA, 16 nt, Homo sapiens
gacacaggcccggcuc

SEQ ID NO: 244363 - RNA, 18 nt, Homo sapiens
gaauaauacaguaucuca

SEQ ID NO: 244364 - RNA, 16 nt, Homo sapiens
uggggcuggaagcaga

SEQ ID NO: 244365 - RNA, 15 nt, Homo sapiens
gaagcauuuacuuug

SEQ ID NO: 244366 - RNA, 15 nt, Homo sapiens
cuaugugagcacaaa

SEQ ID NO: 244367 - RNA, 18 nt, Homo sapiens
ccacagggugagcacucu

SEQ ID NO: 244368 - RNA, 20 nt, Homo sapiens
uucuacucgaguuacagaca

SEQ ID NO: 244369 - RNA, 15 nt, Homo sapiens
ccaaacucaccugcc

SEQ ID NO: 244370 - RNA, 16 nt, Homo sapiens
acuucccuacauggag

SEQ ID NO: 244371 - RNA, 22 nt, Homo sapiens
aacuuuuauaaacuuuaccuuu

SEQ ID NO: 244372 - RNA, 23 nt, Homo sapiens
caacugcaucaagaugugacaug

SEQ ID NO: 244373 - RNA, 23 nt, Homo sapiens
aaauucuucuccacuuucuagcc

SEQ ID NO: 244374 - RNA, 16 nt, Homo sapiens
uuuaaaugcaccugga

SEQ ID NO: 244375 - RNA, 20 nt, Homo sapiens
ugggugacagagcaagugag

SEQ ID NO: 244376 - RNA, 17 nt, Homo sapiens
agcugggacuacaggug

SEQ ID NO: 244377 - RNA, 17 nt, Homo sapiens
uauggcuuuugugcauu

SEQ ID NO: 244378 - RNA, 15 nt, Homo sapiens
caaggcugcagugag

SEQ ID NO: 244379 - RNA, 15 nt, Homo sapiens
cagagaccaucccug

SEQ ID NO: 244380 - RNA, 13 nt, Homo sapiens
aggacauggacaa

SEQ ID NO: 244381 - RNA, 14 nt, Homo sapiens
cuuucuacccagcg

SEQ ID NO: 244382 - RNA, 22 nt, Homo sapiens
ccagccugcuaauuccccagau

SEQ ID NO: 244383 - RNA, 13 nt, Homo sapiens
guaaaaagggaaa

SEQ ID NO: 244384 - RNA, 20 nt, Homo sapiens
cagaaggaagacuucauccc

SEQ ID NO: 244385 - RNA, 18 nt, Homo sapiens
ugucuuuuuucacuacau

SEQ ID NO: 244386 - RNA, 12 nt, Homo sapiens
uucaaacuuuac

SEQ ID NO: 244387 - RNA, 18 nt, Homo sapiens
auuaucuagauacuguau

SEQ ID NO: 244388 - RNA, 16 nt, Homo sapiens
uggacaugcacagcua

SEQ ID NO: 244389 - RNA, 23 nt, Homo sapiens
acacuaacgauuuguuaaugaua

SEQ ID NO: 244390 - RNA, 14 nt, Homo sapiens
cucccacaaaggag

SEQ ID NO: 244391 - RNA, 21 nt, Homo sapiens
augaccuugaaugaugccaug

SEQ ID NO: 244392 - RNA, 23 nt, Homo sapiens
gaagagccuugcggaagguucua

SEQ ID NO: 244393 - RNA, 16 nt, Homo sapiens
uaaaagguaugcaauc

SEQ ID NO: 244394 - RNA, 18 nt, Homo sapiens
auuagcauuuugcuaaau

SEQ ID NO: 244395 - RNA, 17 nt, Homo sapiens
cuaacuugucuuuggac

SEQ ID NO: 244396 - RNA, 22 nt, Homo sapiens
gucaccaaaucagcugcuacua

SEQ ID NO: 244397 - RNA, 21 nt, Homo sapiens
acuggaacacuaaugaggaaa

SEQ ID NO: 244398 - RNA, 22 nt, Homo sapiens
gaaaaucgugacaacacuugug

SEQ ID NO: 244399 - RNA, 19 nt, Homo sapiens
uggggaccagagcugccac

SEQ ID NO: 244400 - RNA, 19 nt, Homo sapiens
ccauuuagcacacugcuug

SEQ ID NO: 244401 - RNA, 19 nt, Homo sapiens
ccaaagcagugcaugcugu

SEQ ID NO: 244402 - RNA, 17 nt, Homo sapiens
gaacaaggcaaggcugu

SEQ ID NO: 244403 - RNA, 16 nt, Murray Valley encephalitis virus
aggacuagagguuaga

SEQ ID NO: 244404 - RNA, 18 nt, Murray Valley encephalitis virus
accccaggaggacugggu

SEQ ID NO: 244405 - RNA, 15 nt, Murray Valley encephalitis virus
acuggguuaccaaag

SEQ ID NO: 244406 - RNA, 16 nt, Murray Valley encephalitis virus
cgccgaggagugcaau

SEQ ID NO: 244407 - RNA, 16 nt, Murray Valley encephalitis virus
cccaggaggacugggu

SEQ ID NO: 244408 - RNA, 17 nt, Murray Valley encephalitis virus
cccaggaggacugggua

SEQ ID NO: 244409 - RNA, 17 nt, Murray Valley encephalitis virus
cccaggaggacuggguu

SEQ ID NO: 244410 - RNA, 16 nt, Murray Valley encephalitis virus
guagacggugcugccu

SEQ ID NO: 244411 - RNA, 12 nt, Murray Valley encephalitis virus
uguaauauagua

SEQ ID NO: 244412 - RNA, 19 nt, Murray Valley encephalitis virus
ccgggaggaggugaugcaa

SEQ ID NO: 244413 - RNA, 13 nt, Murray Valley encephalitis virus
ccgaggagugcaa

SEQ ID NO: 244414 - RNA, 17 nt, Murray Valley encephalitis virus
ccccaggaggacugggu

SEQ ID NO: 244415 - RNA, 22 nt, Murray Valley encephalitis virus
caggaggacuggguuaccaaag

SEQ ID NO: 244416 - RNA, 15 nt, Murray Valley encephalitis virus
caggccagccgguua

SEQ ID NO: 244417 - RNA, 17 nt, Murray Valley encephalitis virus
agaugaagcccguguca

SEQ ID NO: 244418 - RNA, 14 nt, Murray Valley encephalitis virus
aggaggugaugcaa

SEQ ID NO: 244419 - RNA, 12 nt, Murray Valley encephalitis virus
aggugaugcaaa

SEQ ID NO: 244420 - RNA, 19 nt, Murray Valley encephalitis virus
guuaggcugccaccgaagg

SEQ ID NO: 244421 - RNA, 20 nt, Murray Valley encephalitis virus
gccgggaggaggugaugcaa

SEQ ID NO: 244422 - RNA, 13 nt, Murray Valley encephalitis virus
gccgaggagugca

SEQ ID NO: 244423 - RNA, 21 nt, Murray Valley encephalitis virus
gacuggguaaacaaagccgua

SEQ ID NO: 244424 - RNA, 11 nt, Murray Valley encephalitis virus
gaggagugcaa

SEQ ID NO: 244425 - RNA, 23 nt, Murray Valley encephalitis virus
uaaguagcaagacuugauaguca

SEQ ID NO: 244426 - RNA, 17 nt, Murray Valley encephalitis virus
gcaagacuugauaguca

SEQ ID NO: 244427 - RNA, 23 nt, Murray Valley encephalitis virus
ccaggaggacuggguaaacaaag

SEQ ID NO: 244428 - RNA, 21 nt, Murray Valley encephalitis virus
agcugauucuccacgguugga

SEQ ID NO: 244429 - RNA, 16 nt, Murray Valley encephalitis virus
acgguuggaaagccuc

SEQ ID NO: 244430 - RNA, 15 nt, Murray Valley encephalitis virus
acuggguaaacaaag

SEQ ID NO: 244431 - RNA, 23 nt, Murray Valley encephalitis virus
accaaccccaggaggacuggguu

SEQ ID NO: 244432 - RNA, 13 nt, Murray Valley encephalitis virus
aggaggacugggu

SEQ ID NO: 244433 - RNA, 14 nt, Murray Valley encephalitis virus
aggaggacugggua

SEQ ID NO: 244434 - RNA, 21 nt, Murray Valley encephalitis virus
aagccucccagaaccgucucg

SEQ ID NO: 244435 - RNA, 20 nt, Murray Valley encephalitis virus
aaccccaggaggacuggguu

SEQ ID NO: 244436 - RNA, 15 nt, Murray Valley encephalitis virus
uaauguaauauagua

SEQ ID NO: 244437 - RNA, 13 nt, Murray Valley encephalitis virus
guuaggcugccac

SEQ ID NO: 244438 - RNA, 16 nt, Murray Valley encephalitis virus
gccgaggagugcaauc

SEQ ID NO: 244439 - RNA, 20 nt, Murray Valley encephalitis virus
ggccccaggaggacugggua

SEQ ID NO: 244440 - RNA, 16 nt, Murray Valley encephalitis virus
gacuggguuaccaaag

SEQ ID NO: 244441 - RNA, 12 nt, Murray Valley encephalitis virus
gaggagugcaau

SEQ ID NO: 244442 - RNA, 18 nt, Norwalk virus
gaaaugugggcaucauau

SEQ ID NO: 244443 - RNA, 21 nt, Norwalk virus
gaaaugugggcaucauauuca

SEQ ID NO: 244444 - RNA, 20 nt, Norwalk virus
guaauaugaaaugugggcau

SEQ ID NO: 244445 - RNA, 21 nt, Norwalk virus
guaauaugaaaugugggcauc

SEQ ID NO: 244446 - RNA, 16 nt, Norwalk virus
gcuaccacauugagau

SEQ ID NO: 244447 - RNA, 15 nt, Norwalk virus
gcuaaaaauuuggca

SEQ ID NO: 244448 - RNA, 24 nt, Norwalk virus
gcuccagucacccgcauuguagau

SEQ ID NO: 244449 - RNA, 14 nt, Norwalk virus
cuccaaagccaaag

SEQ ID NO: 244450 - RNA, 20 nt, Norwalk virus
cgaguccucugcuaccacau

SEQ ID NO: 244451 - RNA, 14 nt, Norwalk virus
ccagucacccgcau

SEQ ID NO: 244452 - RNA, 14 nt, Norwalk virus
cccaaggugaauuu

SEQ ID NO: 244453 - RNA, 15 nt, Norwalk virus
caucauauucauuua

SEQ ID NO: 244454 - RNA, 19 nt, Norwalk virus
cauuugccucuaagcaaaa

SEQ ID NO: 244455 - RNA, 16 nt, Norwalk virus
gugggcaucauauuca

SEQ ID NO: 244456 - RNA, 23 nt, Norwalk virus
uaauaugaaaugugggcaucaua

SEQ ID NO: 244457 - RNA, 17 nt, Norwalk virus
uaguuuccugcauaccc

SEQ ID NO: 244458 - RNA, 17 nt, Norwalk virus
ucugcuaccacauugag

SEQ ID NO: 244459 - RNA, 14 nt, Norwalk virus
uccuauugaucccu

SEQ ID NO: 244460 - RNA, 19 nt, Norwalk virus
uccuauugaucccuggaua

SEQ ID NO: 244461 - RNA, 18 nt, Norwalk virus
ugaaaugugggcaucaua

SEQ ID NO: 244462 - RNA, 22 nt, Norwalk virus
ugaaaugugggcaucauauuca

SEQ ID NO: 244463 - RNA, 16 nt, Norwalk virus
ugaagcuucaaaucaa

SEQ ID NO: 244464 - RNA, 13 nt, Norwalk virus
ugaauuuacuauu

SEQ ID NO: 244465 - RNA, 15 nt, Norwalk virus
ucauuuaauuagguu

SEQ ID NO: 244466 - RNA, 23 nt, Norwalk virus
aauuauuggcuaaaaauuuggca

SEQ ID NO: 244467 - RNA, 22 nt, Norwalk virus
aauuagguuuaauuagguuuaa

SEQ ID NO: 244468 - RNA, 19 nt, Norwalk virus
aauuagguuuaauuugaug

SEQ ID NO: 244469 - RNA, 15 nt, Norwalk virus
aaugugggcaucaua

SEQ ID NO: 244470 - RNA, 19 nt, Norwalk virus
aaugugggcaucauauuca

SEQ ID NO: 244471 - RNA, 20 nt, Norwalk virus
aaugugggcaucauauucau

SEQ ID NO: 244472 - RNA, 23 nt, Norwalk virus
aaugugggcaucauauucauuua

SEQ ID NO: 244473 - RNA, 14 nt, Norwalk virus
aaugccuuuacugc

SEQ ID NO: 244474 - RNA, 23 nt, Norwalk virus
ugcuggacaaguuaauccuauug

SEQ ID NO: 244475 - RNA, 14 nt, Norwalk virus
ugcugcuuccacag

SEQ ID NO: 244476 - RNA, 14 nt, Norwalk virus
uguagauuggaaug

SEQ ID NO: 244477 - RNA, 13 nt, Norwalk virus
ugggcaucauauu

SEQ ID NO: 244478 - RNA, 20 nt, Norwalk virus
ugggcaucauauucauuuaa

SEQ ID NO: 244479 - RNA, 16 nt, Norwalk virus
uggcuaaaaauuuggc

SEQ ID NO: 244480 - RNA, 16 nt, Norwalk virus
uuaauccuuucuugcu

SEQ ID NO: 244481 - RNA, 14 nt, Norwalk virus
aggugaauuuacua

SEQ ID NO: 244482 - RNA, 17 nt, Norwalk virus
auaauacccccggugau

SEQ ID NO: 244483 - RNA, 21 nt, Norwalk virus
augaaaugugggcaucauauu

SEQ ID NO: 244484 - RNA, 21 nt, Norwalk virus
auugagauccgguggcuucau

SEQ ID NO: 244485 - RNA, 16 nt, Norwalk virus
cacuccuccgugcugg

SEQ ID NO: 244486 - RNA, 15 nt, Norwalk virus
caauugcugcuucca

SEQ ID NO: 244487 - RNA, 12 nt, Norwalk virus
agauauucacuc

SEQ ID NO: 244488 - RNA, 21 nt, Norwalk virus
agagucaggauuaugcuagcu

SEQ ID NO: 244489 - RNA, 15 nt, Norwalk virus
aagauaauaguuucc

SEQ ID NO: 244490 - RNA, 14 nt, Norwalk virus
aaagguaucaacaa

SEQ ID NO: 244491 - RNA, 23 nt, Norwalk virus
aagaucuguggcaggagcuccag

SEQ ID NO: 244492 - RNA, 21 nt, Norwalk virus
aaugugggcaucauauucauu

SEQ ID NO: 244493 - RNA, 13 nt, Norwalk virus
aaaaauuuggcaa

SEQ ID NO: 244494 - RNA, 19 nt, Norwalk virus
agguaucaacaaaauuugc

SEQ ID NO: 244495 - RNA, 19 nt, Norwalk virus
aggugaauuuacuauuucc

SEQ ID NO: 244496 - RNA, 22 nt, Norwalk virus
auauucauuuaauuagguuuaa

SEQ ID NO: 244497 - RNA, 23 nt, Norwalk virus
aucagguugaagcuucaaaucaa

SEQ ID NO: 244498 - RNA, 17 nt, Norwalk virus
ccaaggugaauuuacua

SEQ ID NO: 244499 - RNA, 13 nt, Norwalk virus
cauauucauuuaa

SEQ ID NO: 244500 - RNA, 12 nt, Norwalk virus
ccucuaagcaaa

SEQ ID NO: 244501 - RNA, 15 nt, Norwalk virus
ccauaccauuugccu

SEQ ID NO: 244502 - RNA, 15 nt, Norwalk virus
cccgcauuguagauu

SEQ ID NO: 244503 - RNA, 20 nt, Norwalk virus
cccuggauaauuaauaauuu

SEQ ID NO: 244504 - RNA, 12 nt, Norwalk virus
caaaauuugcaa

SEQ ID NO: 244505 - RNA, 16 nt, Norwalk virus
auuuaauuagguuuaa

SEQ ID NO: 244506 - RNA, 18 nt, Norwalk virus
augugggcaucauauuca

SEQ ID NO: 244507 - RNA, 13 nt, Norwalk virus
gcaucauauucau

SEQ ID NO: 244508 - RNA, 18 nt, Norwalk virus
gcaucauauucauuuaau

SEQ ID NO: 244509 - RNA, 22 nt, Norwalk virus
gaauggcgugagagugucugcu

SEQ ID NO: 244510 - RNA, 16 nt, Norwalk virus
cgggcauacagguugg

SEQ ID NO: 244511 - RNA, 17 nt, Norwalk virus
uaauuagguuuaauuag

SEQ ID NO: 244512 - RNA, 20 nt, Norwalk virus
uaauuagguuuaauuugaug

SEQ ID NO: 244513 - RNA, 16 nt, Norwalk virus
uaucagguugaagcuu

SEQ ID NO: 244514 - RNA, 23 nt, Norwalk virus
uaucaacaaaauuugcaacugca

SEQ ID NO: 244515 - RNA, 20 nt, Norwalk virus
uaugaaaugugggcaucaua

SEQ ID NO: 244516 - RNA, 19 nt, Norwalk virus
ucaacaaaauuugcaacug

SEQ ID NO: 244517 - RNA, 20 nt, Norwalk virus
uauucauuuaauuagguuua

SEQ ID NO: 244518 - RNA, 21 nt, Norwalk virus
uauucauuuaauuagguuuaa

SEQ ID NO: 244519 - RNA, 23 nt, Norwalk virus
gcuuccacagcagguagugcucu

SEQ ID NO: 244520 - RNA, 12 nt, Norwalk virus
ugggcaucauau

SEQ ID NO: 244521 - RNA, 14 nt, Norwalk virus
ugggcaucauauuc

SEQ ID NO: 244522 - RNA, 15 nt, Norwalk virus
ugggcaucauauuca

SEQ ID NO: 244523 - RNA, 16 nt, Norwalk virus
ugggcaucauauucau

SEQ ID NO: 244524 - RNA, 21 nt, Norwalk virus
ugguggcgaagcggcccucca

SEQ ID NO: 244525 - RNA, 13 nt, Norwalk virus
uggugcaauugcu

SEQ ID NO: 244526 - RNA, 19 nt, Norwalk virus
uguagcagguucuucgaca

SEQ ID NO: 244527 - RNA, 21 nt, Norwalk virus
ugugcaagccccccaagguga

SEQ ID NO: 244528 - RNA, 17 nt, Norwalk virus
uucaugucaguucccau

SEQ ID NO: 244529 - RNA, 18 nt, Norwalk virus
uuggugcaauugcugcuu

SEQ ID NO: 244530 - RNA, 15 nt, Norwalk virus
ugacccucuugcaau

SEQ ID NO: 244531 - RNA, 15 nt, Norwalk virus
ugccucuaagcaaaa

SEQ ID NO: 244532 - RNA, 13 nt, Norwalk virus
uccccaucuuaau

SEQ ID NO: 244533 - RNA, 18 nt, Norwalk virus
gaguccucugcuaccaca

SEQ ID NO: 244534 - RNA, 15 nt, Norwalk virus
gcaagaucuguggca

SEQ ID NO: 244535 - RNA, 22 nt, Norwalk virus
gaaaauucuuuuaaacaugaca

SEQ ID NO: 244536 - RNA, 18 nt, Norwalk virus
cggcccuccaaagccaaa

SEQ ID NO: 244537 - RNA, 22 nt, Norwalk virus
cuagcugguaaugccuuuacug

SEQ ID NO: 244538 - RNA, 22 nt, Norwalk virus
gggaagauaauaguuuccugca

SEQ ID NO: 244539 - RNA, 13 nt, Norwalk virus
ggcaucauauuca

SEQ ID NO: 244540 - RNA, 17 nt, Norwalk virus
ggcaucauauucauuua

SEQ ID NO: 244541 - RNA, 16 nt, Norwalk virus
guuugaccagugcuga

SEQ ID NO: 244542 - RNA, 19 nt, Norwalk virus
uaaaaauuuggcaacuaga

SEQ ID NO: 244543 - RNA, 14 nt, Norwalk virus
agguuaaugcuucu

SEQ ID NO: 244544 - RNA, 12 nt, Norwalk virus
aguccucugcua

SEQ ID NO: 244545 - RNA, 14 nt, Norwalk virus
agugucugcucccg

SEQ ID NO: 244546 - RNA, 13 nt, Norwalk virus
auaauuaauaauu

SEQ ID NO: 244547 - RNA, 17 nt, Norwalk virus
auaauaguuuccugcau

SEQ ID NO: 244548 - RNA, 19 nt, Norwalk virus
auaugaaaugugggcauca

SEQ ID NO: 244549 - RNA, 12 nt, Norwalk virus
acaaaauuugca

SEQ ID NO: 244550 - RNA, 13 nt, Norwalk virus
acaaaauuugcaa

SEQ ID NO: 244551 - RNA, 18 nt, Norwalk virus
acagcagguagugcucug

SEQ ID NO: 244552 - RNA, 15 nt, Norwalk virus
cauaccauuugccuc

SEQ ID NO: 244553 - RNA, 14 nt, Norwalk virus
ccgaguccucugcu

SEQ ID NO: 244554 - RNA, 17 nt, Norwalk virus
cacagcagguagugcuc

SEQ ID NO: 244555 - RNA, 14 nt, Norwalk virus
auugaucccuggau

SEQ ID NO: 244556 - RNA, 17 nt, Norwalk virus
augaaaugugggcauca

SEQ ID NO: 244557 - RNA, 20 nt, Norwalk virus
augaaaugugggcaucauau

SEQ ID NO: 244558 - RNA, 22 nt, Norwalk virus
augaaaugugggcaucauauuc

SEQ ID NO: 244559 - RNA, 19 nt, Norwalk virus
ugaaaugugggcaucauau

SEQ ID NO: 244560 - RNA, 20 nt, Norwalk virus
ugaaaugugggcaucauauu

SEQ ID NO: 244561 - RNA, 20 nt, Norwalk virus
ucugacccucuugcaaugga

SEQ ID NO: 244562 - RNA, 22 nt, Norwalk virus
ucuuaauccuuucuugcuccau

SEQ ID NO: 244563 - RNA, 15 nt, Norwalk virus
ucuaucacaaaugua

SEQ ID NO: 244564 - RNA, 16 nt, Norwalk virus
ucgcgacugcuggaca

SEQ ID NO: 244565 - RNA, 21 nt, Norwalk virus
ucaguucccauaccauuugcc

SEQ ID NO: 244566 - RNA, 13 nt, Norwalk virus
uccaaagccaaag

SEQ ID NO: 244567 - RNA, 20 nt, Norwalk virus
uccagucacccgcauuguag

SEQ ID NO: 244568 - RNA, 14 nt, Norwalk virus
uugccucuaagcaa

SEQ ID NO: 244569 - RNA, 13 nt, Norwalk virus
uucacauaaucuu

SEQ ID NO: 244570 - RNA, 12 nt, Norwalk virus
ugcuucugaccc

SEQ ID NO: 244571 - RNA, 17 nt, Norwalk virus
uggugcaauugcugcuu

SEQ ID NO: 244572 - RNA, 16 nt, Norwalk virus
ugugggcaucauauuc

SEQ ID NO: 244573 - RNA, 20 nt, Norwalk virus
uuaauuagguuuaauuugau

SEQ ID NO: 244574 - RNA, 11 nt, Norwalk virus
ugcuucugacc

SEQ ID NO: 244575 - RNA, 17 nt, Norwalk virus
ugaucccuggauaauua

SEQ ID NO: 244576 - RNA, 17 nt, Norwalk virus
ugcaauugcugcuucca

SEQ ID NO: 244577 - RNA, 19 nt, Norwalk virus
ugcaauugcugcuuccaca

SEQ ID NO: 244578 - RNA, 20 nt, Norwalk virus
ugauuggguaucagguugaa

SEQ ID NO: 244579 - RNA, 18 nt, Norwalk virus
uaauuagguuuaauuuga

SEQ ID NO: 244580 - RNA, 17 nt, Norwalk virus
ucacccgcauuguagau

SEQ ID NO: 244581 - RNA, 13 nt, Norwalk virus
ucuuaauccuuuc

SEQ ID NO: 244582 - RNA, 19 nt, Norwalk virus
cccgaguccucugcuacca

SEQ ID NO: 244583 - RNA, 14 nt, Norwalk virus
ccuccaaagccaaa

SEQ ID NO: 244584 - RNA, 14 nt, Norwalk virus
cauaccauuugccu

SEQ ID NO: 244585 - RNA, 18 nt, Norwalk virus
cauuugccucuaagcaaa

SEQ ID NO: 244586 - RNA, 15 nt, Norwalk virus
cuaccacauugagau

SEQ ID NO: 244587 - RNA, 13 nt, Norwalk virus
aacaaaauuugca

SEQ ID NO: 244588 - RNA, 22 nt, Norwalk virus
gagauccgguggcuucauguca

SEQ ID NO: 244589 - RNA, 14 nt, Norwalk virus
gccucuaagcaaaa

SEQ ID NO: 244590 - RNA, 17 nt, Norwalk virus
gcccuccaaagccaaag

SEQ ID NO: 244591 - RNA, 23 nt, Norwalk virus
gcccaagccauaauuggugcaau

SEQ ID NO: 244592 - RNA, 15 nt, Norwalk virus
gggcaucauauucau

SEQ ID NO: 244593 - RNA, 10 nt, Norwalk virus
accagugcug

SEQ ID NO: 244594 - RNA, 22 nt, Norwalk virus
aaugcuucugacccucuugcaa

SEQ ID NO: 244595 - RNA, 20 nt, Norwalk virus
agguaucaacaaaauuugca

SEQ ID NO: 244596 - RNA, 12 nt, Norwalk virus
auaccauuugcc

SEQ ID NO: 244597 - RNA, 14 nt, Norwalk virus
auaugaaauguggg

SEQ ID NO: 244598 - RNA, 15 nt, Norwalk virus
auuuaauuagguuua

SEQ ID NO: 244599 - RNA, 18 nt, Norwalk virus
auuuaauuagguuuaauu

SEQ ID NO: 244600 - RNA, 14 nt, Norwalk virus
auugcugcuuccac

SEQ ID NO: 244601 - RNA, 23 nt, Norwalk virus
augugggcaucauauucauuuaa

SEQ ID NO: 244602 - RNA, 16 nt, O`nyong-nyong virus
auuauaaaauacaaaa

SEQ ID NO: 244603 - RNA, 22 nt, O`nyong-nyong virus
auuauaaaauacaaaaguauaa

SEQ ID NO: 244604 - RNA, 18 nt, O`nyong-nyong virus
auuggugcccccuuagag

SEQ ID NO: 244605 - RNA, 18 nt, O`nyong-nyong virus
auagaaccagguauaggu

SEQ ID NO: 244606 - RNA, 18 nt, O`nyong-nyong virus
auaaaaacagguauuggu

SEQ ID NO: 244607 - RNA, 23 nt, O`nyong-nyong virus
aguaauauacuguacagguauac

SEQ ID NO: 244608 - RNA, 15 nt, O`nyong-nyong virus
aaaauagguauuggu

SEQ ID NO: 244609 - RNA, 15 nt, O`nyong-nyong virus
aaccaccacaaucgg

SEQ ID NO: 244610 - RNA, 19 nt, O`nyong-nyong virus
accagugaaaauagguauu

SEQ ID NO: 244611 - RNA, 17 nt, O`nyong-nyong virus
acauuauuuaaccagug

SEQ ID NO: 244612 - RNA, 20 nt, O`nyong-nyong virus
acauuauuuaaccagugaaa

SEQ ID NO: 244613 - RNA, 21 nt, O`nyong-nyong virus
acauuauagaaccagguauag

SEQ ID NO: 244614 - RNA, 16 nt, O`nyong-nyong virus
acccccuuagagguac

SEQ ID NO: 244615 - RNA, 14 nt, O`nyong-nyong virus
acaccaacaauagg

SEQ ID NO: 244616 - RNA, 15 nt, O`nyong-nyong virus
acuguacagguauac

SEQ ID NO: 244617 - RNA, 22 nt, O`nyong-nyong virus
gcacauuauagaaccagguaua

SEQ ID NO: 244618 - RNA, 15 nt, O`nyong-nyong virus
gauauauguauuauc

SEQ ID NO: 244619 - RNA, 19 nt, O`nyong-nyong virus
gaaaaacaaaacaaaaaua

SEQ ID NO: 244620 - RNA, 21 nt, O`nyong-nyong virus
gaaaauagguauuggugcccc

SEQ ID NO: 244621 - RNA, 18 nt, O`nyong-nyong virus
cccuuagaggcacauuau

SEQ ID NO: 244622 - RNA, 19 nt, O`nyong-nyong virus
ccccuuagaggcacauuau

SEQ ID NO: 244623 - RNA, 14 nt, O`nyong-nyong virus
cccccuuaguggca

SEQ ID NO: 244624 - RNA, 13 nt, O`nyong-nyong virus
uagaaccagguau

SEQ ID NO: 244625 - RNA, 15 nt, O`nyong-nyong virus
uauauguauuaucca

SEQ ID NO: 244626 - RNA, 19 nt, O`nyong-nyong virus
uauaggugcccccuuagag

SEQ ID NO: 244627 - RNA, 16 nt, O`nyong-nyong virus
guauaaaaacagguau

SEQ ID NO: 244628 - RNA, 22 nt, O`nyong-nyong virus
ugcccccuuaguggcacacuaa

SEQ ID NO: 244629 - RNA, 23 nt, O`nyong-nyong virus
ugccccaaaguaauauacuguac

SEQ ID NO: 244630 - RNA, 20 nt, O`nyong-nyong virus
uggugcccccuuagaggcac

SEQ ID NO: 244631 - RNA, 14 nt, O`nyong-nyong virus
aagagacguaggua

SEQ ID NO: 244632 - RNA, 11 nt, O`nyong-nyong virus
uguacagguau

SEQ ID NO: 244633 - RNA, 14 nt, O`nyong-nyong virus
uuagaggcacauua

SEQ ID NO: 244634 - RNA, 14 nt, O`nyong-nyong virus
uuagagguacauua

SEQ ID NO: 244635 - RNA, 16 nt, O`nyong-nyong virus
uuauagaaccagguau

SEQ ID NO: 244636 - RNA, 14 nt, O`nyong-nyong virus
auuauagaaccagg

SEQ ID NO: 244637 - RNA, 15 nt, O`nyong-nyong virus
auuauagaaccaggu

SEQ ID NO: 244638 - RNA, 21 nt, O`nyong-nyong virus
caaaaguauaaaaacagguau

SEQ ID NO: 244639 - RNA, 14 nt, O`nyong-nyong virus
cccccuuagaggca

SEQ ID NO: 244640 - RNA, 18 nt, O`nyong-nyong virus
ccaaaguaauauacugua

SEQ ID NO: 244641 - RNA, 16 nt, O`nyong-nyong virus
caccaacaauagguau

SEQ ID NO: 244642 - RNA, 17 nt, O`nyong-nyong virus
caccaacaauagguaua

SEQ ID NO: 244643 - RNA, 16 nt, O`nyong-nyong virus
acauuauagaaccagg

SEQ ID NO: 244644 - RNA, 17 nt, O`nyong-nyong virus
acauuauagaaccaggu

SEQ ID NO: 244645 - RNA, 16 nt, O`nyong-nyong virus
acauuauuuaaccagu

SEQ ID NO: 244646 - RNA, 18 nt, O`nyong-nyong virus
auaggugcccccuuagag

SEQ ID NO: 244647 - RNA, 21 nt, O`nyong-nyong virus
auacaaaaguauaaaaacagg

SEQ ID NO: 244648 - RNA, 22 nt, O`nyong-nyong virus
auacaaaaguauaaaaacaggu

SEQ ID NO: 244649 - RNA, 14 nt, O`nyong-nyong virus
agugaaaauaggua

SEQ ID NO: 244650 - RNA, 17 nt, O`nyong-nyong virus
uacauuauuuaaccagu

SEQ ID NO: 244651 - RNA, 14 nt, O`nyong-nyong virus
uacuguacagguau

SEQ ID NO: 244652 - RNA, 22 nt, O`nyong-nyong virus
uaguggcacacuaaccaccaca

SEQ ID NO: 244653 - RNA, 20 nt, O`nyong-nyong virus
guaauauacuguacagguau

SEQ ID NO: 244654 - RNA, 20 nt, O`nyong-nyong virus
gguacauuauuuaaccagug

SEQ ID NO: 244655 - RNA, 18 nt, O`nyong-nyong virus
gcccccuuaguggcacac

SEQ ID NO: 244656 - RNA, 21 nt, O`nyong-nyong virus
ugcccccuuagaggcacauua

SEQ ID NO: 244657 - RNA, 16 nt, O`nyong-nyong virus
gcccccuuagaggcac

SEQ ID NO: 244658 - RNA, 16 nt, O`nyong-nyong virus
gcccccuuagagguac

SEQ ID NO: 244659 - RNA, 19 nt, O`nyong-nyong virus
gguacccccuuagagguac

SEQ ID NO: 244660 - RNA, 20 nt, O`nyong-nyong virus
guacagguauacgugcuccc

SEQ ID NO: 244661 - RNA, 19 nt, O`nyong-nyong virus
uauugguacccccuuagag

SEQ ID NO: 244662 - RNA, 19 nt, O`nyong-nyong virus
uauuggugcccccuuagag

SEQ ID NO: 244663 - RNA, 13 nt, O`nyong-nyong virus
uacaaaaguauaa

SEQ ID NO: 244664 - RNA, 23 nt, O`nyong-nyong virus
uacaaaaguauaaaaacagguau

SEQ ID NO: 244665 - RNA, 14 nt, O`nyong-nyong virus
uacaccaacaauag

SEQ ID NO: 244666 - RNA, 18 nt, O`nyong-nyong virus
uacaccaacaauagguau

SEQ ID NO: 244667 - RNA, 23 nt, O`nyong-nyong virus
uacccccuuagagguacauuauu

SEQ ID NO: 244668 - RNA, 20 nt, O`nyong-nyong virus
uaaccagugaaaauagguau

SEQ ID NO: 244669 - RNA, 13 nt, O`nyong-nyong virus
uaaaaacagguau

SEQ ID NO: 244670 - RNA, 23 nt, O`nyong-nyong virus
cuuagaggcacauuauagaacca

SEQ ID NO: 244671 - RNA, 18 nt, O`nyong-nyong virus
auugguacccccuuagag

SEQ ID NO: 244672 - RNA, 14 nt, O`nyong-nyong virus
caaucgguaauaug

SEQ ID NO: 244673 - RNA, 19 nt, O`nyong-nyong virus
ccccuuagagguacauuau

SEQ ID NO: 244674 - RNA, 18 nt, O`nyong-nyong virus
cccuuagagguacauuau

SEQ ID NO: 244675 - RNA, 17 nt, O`nyong-nyong virus
cauuauagaaccaggua

SEQ ID NO: 244676 - RNA, 18 nt, O`nyong-nyong virus
cauuauagaaccagguau

SEQ ID NO: 244677 - RNA, 22 nt, O`nyong-nyong virus
agagguacaccaacaauaggua

SEQ ID NO: 244678 - RNA, 19 nt, O`nyong-nyong virus
aaaaguauaaaaacaggua

SEQ ID NO: 244679 - RNA, 13 nt, O`nyong-nyong virus
acaauagguauaa

SEQ ID NO: 244680 - RNA, 16 nt, O`nyong-nyong virus
cagcacgauauaugua

SEQ ID NO: 244681 - RNA, 14 nt, O`nyong-nyong virus
auuauccauaaaag

SEQ ID NO: 244682 - RNA, 12 nt, O`nyong-nyong virus
caaaguaauaua

SEQ ID NO: 244683 - RNA, 17 nt, O`nyong-nyong virus
caaaguaauauacugua

SEQ ID NO: 244684 - RNA, 17 nt, O`nyong-nyong virus
auauguauuauccauaa

SEQ ID NO: 244685 - RNA, 20 nt, O`nyong-nyong virus
ugguacccccuuagagguac

SEQ ID NO: 244686 - RNA, 22 nt, O`nyong-nyong virus
aauaugaagagacguagguaug

SEQ ID NO: 244687 - RNA, 20 nt, O`nyong-nyong virus
aauacaaaaguauaaaaaca

SEQ ID NO: 244688 - RNA, 20 nt, O`nyong-nyong virus
aaccagugaaaauagguauu

SEQ ID NO: 244689 - RNA, 21 nt, O`nyong-nyong virus
uaggugcccccuuagagguac

SEQ ID NO: 244690 - RNA, 23 nt, O`nyong-nyong virus
uaggugcccccuuagagguacac

SEQ ID NO: 244691 - RNA, 15 nt, O`nyong-nyong virus
uaaccaccacaaucg

SEQ ID NO: 244692 - RNA, 22 nt, O`nyong-nyong virus
uacacaugccccaaaguaauau

SEQ ID NO: 244693 - RNA, 18 nt, O`nyong-nyong virus
uacaaaaguauaaaaaca

SEQ ID NO: 244694 - RNA, 13 nt, O`nyong-nyong virus
aacaauagguaua

SEQ ID NO: 244695 - RNA, 22 nt, O`nyong-nyong virus
uacccccuuagagguacauuau

SEQ ID NO: 244696 - RNA, 17 nt, O`nyong-nyong virus
cauuauuuaaccaguga

SEQ ID NO: 244697 - RNA, 22 nt, O`nyong-nyong virus
cugagcagcacgauauauguau

SEQ ID NO: 244698 - RNA, 18 nt, O`nyong-nyong virus
gcccccuuagaggcacau

SEQ ID NO: 244699 - RNA, 12 nt, O`nyong-nyong virus
gguacaccaaca

SEQ ID NO: 244700 - RNA, 19 nt, O`nyong-nyong virus
ggugcccccuuagagguac

SEQ ID NO: 244701 - RNA, 19 nt, O`nyong-nyong virus
ggcacauuauagaaccagg

SEQ ID NO: 244702 - RNA, 20 nt, O`nyong-nyong virus
gaaccagguauaggugcccc

SEQ ID NO: 244703 - RNA, 16 nt, Ovine lentivirus
aaagcagagucaggau

SEQ ID NO: 244704 - RNA, 22 nt, Ovine lentivirus
aaagcagagucaggaugacaca

SEQ ID NO: 244705 - RNA, 19 nt, Ovine lentivirus
cauuguuaucagaaagcag

SEQ ID NO: 244706 - RNA, 13 nt, Ovine lentivirus
ccuauaaaagcug

SEQ ID NO: 244707 - RNA, 17 nt, Ovine lentivirus
aauguaaccguuaucag

SEQ ID NO: 244708 - RNA, 13 nt, Ovine lentivirus
uguaaacaaguug

SEQ ID NO: 244709 - RNA, 19 nt, Ovine lentivirus
ugccugacuguggagacaa

SEQ ID NO: 244710 - RNA, 11 nt, Ovine lentivirus
uuaucagaaag

SEQ ID NO: 244711 - RNA, 18 nt, Ovine lentivirus
uuaucagaaagcagaguc

SEQ ID NO: 244712 - RNA, 23 nt, Ovine lentivirus
aucauuguuaucagaaagcagag

SEQ ID NO: 244713 - RNA, 17 nt, Ovine lentivirus
augacacagcaaaugua

SEQ ID NO: 244714 - RNA, 19 nt, Ovine lentivirus
aggaugacacagcaaaugu

SEQ ID NO: 244715 - RNA, 22 nt, Ovine lentivirus
agcugggagagaucagagcacu

SEQ ID NO: 244716 - RNA, 17 nt, Ovine lentivirus
cagagucaggaugacac

SEQ ID NO: 244717 - RNA, 15 nt, Ovine lentivirus
aaucauuguuaucag

SEQ ID NO: 244718 - RNA, 19 nt, Ovine lentivirus
aaaucauguaucagcugau

SEQ ID NO: 244719 - RNA, 17 nt, Ovine lentivirus
agagucaggaugacaca

SEQ ID NO: 244720 - RNA, 23 nt, Ovine lentivirus
agcagagucaggaugacacagca

SEQ ID NO: 244721 - RNA, 14 nt, Ovine lentivirus
aucagaaagcagag

SEQ ID NO: 244722 - RNA, 20 nt, Ovine lentivirus
accguuaucagaaagcagag

SEQ ID NO: 244723 - RNA, 17 nt, Ovine lentivirus
cagaaagcagagucagg

SEQ ID NO: 244724 - RNA, 16 nt, Ovine lentivirus
auguaaccgcaaguuc

SEQ ID NO: 244725 - RNA, 21 nt, Ovine lentivirus
auguaaccguuaucagaaagc

SEQ ID NO: 244726 - RNA, 16 nt, Ovine lentivirus
auuguuaucagaaagc

SEQ ID NO: 244727 - RNA, 14 nt, Ovine lentivirus
guaaccguuaucag

SEQ ID NO: 244728 - RNA, 19 nt, Ovine lentivirus
gucaggaugacacagcaaa

SEQ ID NO: 244729 - RNA, 18 nt, Ovine lentivirus
uuguuaucagaaagcaga

SEQ ID NO: 244730 - RNA, 13 nt, Ovine lentivirus
uguuaucagaaag

SEQ ID NO: 244731 - RNA, 20 nt, Ovine lentivirus
uguuaucagaaagcagaguc

SEQ ID NO: 244732 - RNA, 11 nt, Ovine lentivirus
gcagagucagg

SEQ ID NO: 244733 - RNA, 22 nt, Ovine lentivirus
gcagagucaggaugacacagca

SEQ ID NO: 244734 - RNA, 20 nt, Ovine lentivirus
gcucccaggucucuccugcc

SEQ ID NO: 244735 - RNA, 15 nt, Ovine lentivirus
cugggagagaucaga

SEQ ID NO: 244736 - RNA, 14 nt, Ovine lentivirus
gaaagcagagucag

SEQ ID NO: 244737 - RNA, 12 nt, Ovine lentivirus
cuguggagacaa

SEQ ID NO: 244738 - RNA, 19 nt, Ovine lentivirus
gagucaggaugacacagca

SEQ ID NO: 244739 - RNA, 14 nt, Ovine lentivirus
agucaggaugacac

SEQ ID NO: 244740 - RNA, 14 nt, Ovine lentivirus
agagucaggaugac

SEQ ID NO: 244741 - RNA, 13 nt, Ovine lentivirus
caggaugacacag

SEQ ID NO: 244742 - RNA, 20 nt, Ovine lentivirus
ucagaaagcagagucaggau

SEQ ID NO: 244743 - RNA, 21 nt, Ovine lentivirus
ucagaaagcagagucaggaug

SEQ ID NO: 244744 - RNA, 17 nt, Ovine lentivirus
aagcacaaucauuguua

SEQ ID NO: 244745 - RNA, 15 nt, Ovine lentivirus
aagcagagucaggau

SEQ ID NO: 244746 - RNA, 14 nt, Ovine lentivirus
uaucagaaagcaga

SEQ ID NO: 244747 - RNA, 16 nt, Ovine lentivirus
ucaggaugacacagca

SEQ ID NO: 244748 - RNA, 17 nt, Ovine lentivirus
ucaggaugacacagcaa

SEQ ID NO: 244749 - RNA, 17 nt, Ovine lentivirus
ccguuaucagaaagcag

SEQ ID NO: 244750 - RNA, 18 nt, Ovine lentivirus
gcagagucaggaugacac

SEQ ID NO: 244751 - RNA, 11 nt, Ovine lentivirus
ggaugacacag

SEQ ID NO: 244752 - RNA, 15 nt, Ovine lentivirus
agaaagcagagucag

SEQ ID NO: 244753 - RNA, 17 nt, Ovine lentivirus
agaaagcagagucagga

SEQ ID NO: 244754 - RNA, 18 nt, Ovine lentivirus
aaagcagagucaggauga

SEQ ID NO: 244755 - RNA, 19 nt, Ovine lentivirus
aggucauaaccgcaauugu

SEQ ID NO: 244756 - RNA, 16 nt, Ovine lentivirus
caaucauuguuaucag

SEQ ID NO: 244757 - RNA, 14 nt, Ovine lentivirus
cagaaagcagaguc

SEQ ID NO: 244758 - RNA, 21 nt, Homo sapiens
uugggaaaauacguugaggga

SEQ ID NO: 244759 - RNA, 13 nt, Homo sapiens
aagcaggacagag

SEQ ID NO: 244760 - RNA, 19 nt, Homo sapiens
gguggauuccgagugguga

SEQ ID NO: 244761 - RNA, 17 nt, Homo sapiens
cugggaucuggugguca

SEQ ID NO: 244762 - RNA, 16 nt, Homo sapiens
aggacgugggccucca

SEQ ID NO: 244763 - RNA, 16 nt, Homo sapiens
agagaugaaugcccag

SEQ ID NO: 244764 - RNA, 16 nt, Homo sapiens
gaaaaacuuaaauauu

SEQ ID NO: 244765 - RNA, 13 nt, Homo sapiens
cacagaagggugu

SEQ ID NO: 244766 - RNA, 19 nt, Homo sapiens
ugcagccacuuucugccag

SEQ ID NO: 244767 - RNA, 20 nt, Homo sapiens
ucugucccauucccugggau

SEQ ID NO: 244768 - RNA, 16 nt, Homo sapiens
auaccguguggcccaa

SEQ ID NO: 244769 - RNA, 12 nt, Homo sapiens
aagccacugccu

SEQ ID NO: 244770 - RNA, 19 nt, Homo sapiens
agggugugggccaccagag

SEQ ID NO: 244771 - RNA, 19 nt, Homo sapiens
cgccccccccuccccaugc

SEQ ID NO: 244772 - RNA, 19 nt, Homo sapiens
uaaguguuagagggaacag

SEQ ID NO: 244773 - RNA, 17 nt, Homo sapiens
aucuugagggcagacag

SEQ ID NO: 244774 - RNA, 23 nt, Homo sapiens
cuaugaucuugagggcagacagc

SEQ ID NO: 244775 - RNA, 15 nt, Homo sapiens
uagcaugaaccaccc

SEQ ID NO: 244776 - RNA, 16 nt, Homo sapiens
aagcuguuaggcucac

SEQ ID NO: 244777 - RNA, 15 nt, Homo sapiens
gcauagcagaccaca

SEQ ID NO: 244778 - RNA, 22 nt, Homo sapiens
gauuaagaucagcaaagggagg

SEQ ID NO: 244779 - RNA, 18 nt, Homo sapiens
guacaguggugagaucac

SEQ ID NO: 244780 - RNA, 17 nt, Homo sapiens
caaagggcucaagggug

SEQ ID NO: 244781 - RNA, 13 nt, Homo sapiens
cacuuucugccag

SEQ ID NO: 244782 - RNA, 20 nt, Homo sapiens
gguugucagcugcagccacu

SEQ ID NO: 244783 - RNA, 13 nt, Homo sapiens
gaggauaaagggc

SEQ ID NO: 244784 - RNA, 15 nt, Homo sapiens
cugugccagaccuca

SEQ ID NO: 244785 - RNA, 12 nt, Homo sapiens
cugcagguugaa

SEQ ID NO: 244786 - RNA, 15 nt, Homo sapiens
aggaaccagcaggau

SEQ ID NO: 244787 - RNA, 19 nt, Homo sapiens
aaaaauuccuuaaacagug

SEQ ID NO: 244788 - RNA, 21 nt, Homo sapiens
gcuccaagugauacuucugcc

SEQ ID NO: 244789 - RNA, 21 nt, Homo sapiens
gccaggucuagcaaacauaau

SEQ ID NO: 244790 - RNA, 22 nt, Homo sapiens
aaagggaggaggugcacagcac

SEQ ID NO: 244791 - RNA, 22 nt, Homo sapiens
aaaagccagggcuggagaacaa

SEQ ID NO: 244792 - RNA, 22 nt, Homo sapiens
ccagaguuggacccgaccccaa

SEQ ID NO: 244793 - RNA, 17 nt, Homo sapiens
gacccuggucaccagag

SEQ ID NO: 244794 - RNA, 11 nt, Homo sapiens
cucuugucucc

SEQ ID NO: 244795 - RNA, 19 nt, Homo sapiens
uggugagaucacaguucau

SEQ ID NO: 244796 - RNA, 20 nt, Homo sapiens
cccuaggauaaaaagccagg

SEQ ID NO: 244797 - RNA, 17 nt, Homo sapiens
cucauacaucaagccaa

SEQ ID NO: 244798 - RNA, 18 nt, Homo sapiens
gcugccuguccccaugcu

SEQ ID NO: 244799 - RNA, 13 nt, Homo sapiens
agaguggcccaag

SEQ ID NO: 244800 - RNA, 15 nt, Homo sapiens
uacagguaugugcca

SEQ ID NO: 244801 - RNA, 16 nt, Homo sapiens
gcaccugauucucaca

SEQ ID NO: 244802 - RNA, 18 nt, Homo sapiens
ccaauacugccaaccaga

SEQ ID NO: 244803 - RNA, 17 nt, Homo sapiens
cagcaccugauucucac

SEQ ID NO: 244804 - RNA, 16 nt, Homo sapiens
uaccguguggcccaag

SEQ ID NO: 244805 - RNA, 18 nt, Homo sapiens
gcagccacuuucugccag

SEQ ID NO: 244806 - RNA, 16 nt, Homo sapiens
uuccccucuugucucc

SEQ ID NO: 244807 - RNA, 20 nt, Homo sapiens
acccagaguggcccaagacu

SEQ ID NO: 244808 - RNA, 21 nt, Homo sapiens
cugcuccguggaggagguugg

SEQ ID NO: 244809 - RNA, 22 nt, Homo sapiens
ccauccacacggcugaccucau

SEQ ID NO: 244810 - RNA, 16 nt, Homo sapiens
acaagaaacagccacu

SEQ ID NO: 244811 - RNA, 17 nt, Homo sapiens
acuuucugccagcaucu

SEQ ID NO: 244812 - RNA, 21 nt, Homo sapiens
agaauuuucagcaaaguacaa

SEQ ID NO: 244813 - RNA, 16 nt, Homo sapiens
ugugaacuugaagaag

SEQ ID NO: 244814 - RNA, 15 nt, Homo sapiens
aguacugccaauacu

SEQ ID NO: 244815 - RNA, 18 nt, Homo sapiens
gccacugccucucccucu

SEQ ID NO: 244816 - RNA, 13 nt, Homo sapiens
cagcgcugcaguu

SEQ ID NO: 244817 - RNA, 11 nt, Homo sapiens
gucaccagagg

SEQ ID NO: 244818 - RNA, 17 nt, Homo sapiens
ccagaguggcccaagac

SEQ ID NO: 244819 - RNA, 20 nt, Homo sapiens
aggaggcccagcugcucagu

SEQ ID NO: 244820 - RNA, 12 nt, Homo sapiens
uguccagaguuu

SEQ ID NO: 244821 - RNA, 23 nt, Homo sapiens
ucuaaccaagaggcugguuuugg

SEQ ID NO: 244822 - RNA, 23 nt, Homo sapiens
ccagcaggauggcaggggcaaag

SEQ ID NO: 244823 - RNA, 13 nt, Homo sapiens
ugcgacccaagac

SEQ ID NO: 244824 - RNA, 23 nt, Homo sapiens
ccacuuucugccagcaucugcag

SEQ ID NO: 244825 - RNA, 20 nt, Homo sapiens
cugugguuacaagaaacagc

SEQ ID NO: 244826 - RNA, 18 nt, Homo sapiens
auggaugcgacccaagac

SEQ ID NO: 244827 - RNA, 16 nt, Homo sapiens
gccagugggaccccac

SEQ ID NO: 244828 - RNA, 17 nt, Homo sapiens
ugcagccuugacuucuc

SEQ ID NO: 244829 - RNA, 15 nt, Homo sapiens
gauauuccaagggcu

SEQ ID NO: 244830 - RNA, 22 nt, Homo sapiens
aagccagggcuggagaacaaga

SEQ ID NO: 244831 - RNA, 18 nt, Homo sapiens
agcccugccccacaccuc

SEQ ID NO: 244832 - RNA, 21 nt, Homo sapiens
cagacagcagaauuccucuua

SEQ ID NO: 244833 - RNA, 19 nt, Homo sapiens
caaaugcaauuuccaacac

SEQ ID NO: 244834 - RNA, 21 nt, Homo sapiens
aauucaggccgcaagcagcug

SEQ ID NO: 244835 - RNA, 15 nt, Homo sapiens
gcuagaaggacucac

SEQ ID NO: 244836 - RNA, 22 nt, Homo sapiens
gcaagagaaaauaagcaggaca

SEQ ID NO: 244837 - RNA, 16 nt, Homo sapiens
gaaaaaaaacauugca

SEQ ID NO: 244838 - RNA, 23 nt, Homo sapiens
cugaauuaagcagcucaccaucc

SEQ ID NO: 244839 - RNA, 16 nt, Homo sapiens
ccagaguuggacccga

SEQ ID NO: 244840 - RNA, 21 nt, Homo sapiens
caagauggaugcgacccaaga

SEQ ID NO: 244841 - RNA, 16 nt, Homo sapiens
agcugcucugcaagag

SEQ ID NO: 244842 - RNA, 16 nt, Homo sapiens
ccaaaagaaacugaca

SEQ ID NO: 244843 - RNA, 24 nt, Homo sapiens
cccauucccugggaucuggugguc

SEQ ID NO: 244844 - RNA, 18 nt, Homo sapiens
acaguaaaaggacagaga

SEQ ID NO: 244845 - RNA, 11 nt, Homo sapiens
ggccaccagag

SEQ ID NO: 244846 - RNA, 13 nt, Homo sapiens
ucucccugcuuug

SEQ ID NO: 244847 - RNA, 19 nt, Homo sapiens
aggcuguggcuggugagcc

SEQ ID NO: 244848 - RNA, 13 nt, Homo sapiens
ucucacagcaaca

SEQ ID NO: 244849 - RNA, 17 nt, Homo sapiens
aacucgggcucccgggu

SEQ ID NO: 244850 - RNA, 20 nt, Homo sapiens
cacuuucugccagcaucugc

SEQ ID NO: 244851 - RNA, 17 nt, Homo sapiens
ugcaguugcucaggaca

SEQ ID NO: 244852 - RNA, 20 nt, Homo sapiens
cacgcuccuauaggaccaag

SEQ ID NO: 244853 - RNA, 20 nt, Homo sapiens
auggaaaaaaaacauugcaa

SEQ ID NO: 244854 - RNA, 15 nt, Homo sapiens
agaggauuugcucug

SEQ ID NO: 244855 - RNA, 19 nt, Homo sapiens
caagacucccagaucagcu

SEQ ID NO: 244856 - RNA, 15 nt, Homo sapiens
gcccuggaggcggug

SEQ ID NO: 244857 - RNA, 20 nt, Homo sapiens
agguggauuccgagugguga

SEQ ID NO: 244858 - RNA, 16 nt, Homo sapiens
aggcucacaguuacag

SEQ ID NO: 244859 - RNA, 17 nt, Homo sapiens
agaagaccuugggccaa

SEQ ID NO: 244860 - RNA, 20 nt, Homo sapiens
aagauggaugcgacccaaga

SEQ ID NO: 244861 - RNA, 14 nt, Homo sapiens
ccuguguugcccag

SEQ ID NO: 244862 - RNA, 16 nt, Homo sapiens
aggauaaaaagccagg

SEQ ID NO: 244863 - RNA, 16 nt, Homo sapiens
cugaauuaagcagcuc

SEQ ID NO: 244864 - RNA, 23 nt, Homo sapiens
aagccaauaccguguggcccaag

SEQ ID NO: 244865 - RNA, 21 nt, Homo sapiens
cagugggaccccacagaguug

SEQ ID NO: 244866 - RNA, 22 nt, Homo sapiens
cacagaagggugugggccacca

SEQ ID NO: 244867 - RNA, 12 nt, Homo sapiens
ccagcaucugca

SEQ ID NO: 244868 - RNA, 19 nt, Homo sapiens
ccaccauaaaucacaucau

SEQ ID NO: 244869 - RNA, 16 nt, Homo sapiens
ugaagccaugucuaca

SEQ ID NO: 244870 - RNA, 20 nt, Homo sapiens
cugccaaccagagcagcuca

SEQ ID NO: 244871 - RNA, 11 nt, Homo sapiens
uuaagcagcuc

SEQ ID NO: 244872 - RNA, 11 nt, Homo sapiens
gacccaagacc

SEQ ID NO: 244873 - RNA, 18 nt, Homo sapiens
augcaagaaguacugcca

SEQ ID NO: 244874 - RNA, 17 nt, Homo sapiens
gguugucagcugcagcc

SEQ ID NO: 244875 - RNA, 14 nt, Homo sapiens
guguccaaggagca

SEQ ID NO: 244876 - RNA, 19 nt, Homo sapiens
cugacccuggucaccagag

SEQ ID NO: 244877 - RNA, 21 nt, Homo sapiens
gagcaaggaaacguaauuugg

SEQ ID NO: 244878 - RNA, 14 nt, Homo sapiens
gccuguccccaugc

SEQ ID NO: 244879 - RNA, 16 nt, Homo sapiens
aaccagagcagcucac

SEQ ID NO: 244880 - RNA, 20 nt, Homo sapiens
guuacaagaaacagccacug

SEQ ID NO: 244881 - RNA, 16 nt, Homo sapiens
cagacuagaguacagu

SEQ ID NO: 244882 - RNA, 20 nt, Homo sapiens
ugcagccacuuucugccagc

SEQ ID NO: 244883 - RNA, 21 nt, Homo sapiens
agcaccugauucucacagcaa

SEQ ID NO: 244884 - RNA, 18 nt, Homo sapiens
aagagccgggaacagaga

SEQ ID NO: 244885 - RNA, 18 nt, Homo sapiens
acagaggauuugcucugg

SEQ ID NO: 244886 - RNA, 13 nt, Homo sapiens
acuuucugccagc

SEQ ID NO: 244887 - RNA, 20 nt, Homo sapiens
ugccaaccagagcagcucac

SEQ ID NO: 244888 - RNA, 15 nt, Homo sapiens
gcacguaagcuccuu

SEQ ID NO: 244889 - RNA, 12 nt, Homo sapiens
cucuugucuccc

SEQ ID NO: 244890 - RNA, 23 nt, Homo sapiens
ucagcugcagccacuuucugcca

SEQ ID NO: 244891 - RNA, 13 nt, Homo sapiens
agaucagcaaagg

SEQ ID NO: 244892 - RNA, 18 nt, Homo sapiens
ucugcagguugaagccau

SEQ ID NO: 244893 - RNA, 18 nt, Homo sapiens
ugugacaacaugcaagaa

SEQ ID NO: 244894 - RNA, 21 nt, Homo sapiens
agccauauaggcagcaccuga

SEQ ID NO: 244895 - RNA, 13 nt, Homo sapiens
gugccagaccuca

SEQ ID NO: 244896 - RNA, 17 nt, Homo sapiens
cacacggcugaccucau

SEQ ID NO: 244897 - RNA, 19 nt, Homo sapiens
acgugggccuccagaguug

SEQ ID NO: 244898 - RNA, 20 nt, Homo sapiens
ccaagauggaugcgacccaa

SEQ ID NO: 244899 - RNA, 14 nt, Homo sapiens
accagagcagcuca

SEQ ID NO: 244900 - RNA, 12 nt, Homo sapiens
cccacagaguug

SEQ ID NO: 244901 - RNA, 14 nt, Homo sapiens
caaagagaccagcc

SEQ ID NO: 244902 - RNA, 13 nt, Homo sapiens
ccgucagaucucu

SEQ ID NO: 244903 - RNA, 14 nt, Homo sapiens
ccaagucauccucc

SEQ ID NO: 244904 - RNA, 16 nt, Homo sapiens
ccugugccagaccuca

SEQ ID NO: 244905 - RNA, 17 nt, Homo sapiens
ucauccucccaccucag

SEQ ID NO: 244906 - RNA, 22 nt, Homo sapiens
ccaagauggaugcgacccaaga

SEQ ID NO: 244907 - RNA, 17 nt, Homo sapiens
cagcagcccugccccac

SEQ ID NO: 244908 - RNA, 22 nt, Homo sapiens
aagaauuuucagcaaaguacaa

SEQ ID NO: 244909 - RNA, 14 nt, Homo sapiens
aaccacccagagug

SEQ ID NO: 244910 - RNA, 12 nt, Homo sapiens
ugcccucuccca

SEQ ID NO: 244911 - RNA, 18 nt, Homo sapiens
uacagguaugugccacca

SEQ ID NO: 244912 - RNA, 18 nt, Homo sapiens
ucucccuggaucuaccug

SEQ ID NO: 244913 - RNA, 16 nt, Homo sapiens
ucacaguucauugcag

SEQ ID NO: 244914 - RNA, 18 nt, Homo sapiens
cccugugccagaccucaa

SEQ ID NO: 244915 - RNA, 15 nt, Homo sapiens
cuuuguguccagagu

SEQ ID NO: 244916 - RNA, 22 nt, Homo sapiens
ccaggcaggauauuccaagggc

SEQ ID NO: 244917 - RNA, 20 nt, Homo sapiens
caugcaagaaguacugccaa

SEQ ID NO: 244918 - RNA, 20 nt, Homo sapiens
gucucccgccccccacacuu

SEQ ID NO: 244919 - RNA, 16 nt, Homo sapiens
agccacuuucugccag

SEQ ID NO: 244920 - RNA, 15 nt, Homo sapiens
ccaagaccacccucc

SEQ ID NO: 244921 - RNA, 14 nt, Homo sapiens
guuccccucuuguc

SEQ ID NO: 244922 - RNA, 12 nt, Homo sapiens
acuuucugccag

SEQ ID NO: 244923 - RNA, 14 nt, Homo sapiens
ccagugggacccca

SEQ ID NO: 244924 - RNA, 18 nt, Homo sapiens
gggaacagagaagugugg

SEQ ID NO: 244925 - RNA, 15 nt, Homo sapiens
cacacguuccacgac

SEQ ID NO: 244926 - RNA, 20 nt, Homo sapiens
caagaggcugguuuuggcau

SEQ ID NO: 244927 - RNA, 18 nt, Homo sapiens
cuguuaggcucacaguua

SEQ ID NO: 244928 - RNA, 17 nt, Homo sapiens
agcuugagcugcucugc

SEQ ID NO: 244929 - RNA, 23 nt, Homo sapiens
accagccucccucccugugccag

SEQ ID NO: 244930 - RNA, 19 nt, Homo sapiens
gggaaaauacguugaggga

SEQ ID NO: 244931 - RNA, 12 nt, Homo sapiens
gaaacagccacu

SEQ ID NO: 244932 - RNA, 20 nt, Homo sapiens
agggugugggccaccagaga

SEQ ID NO: 244933 - RNA, 14 nt, Homo sapiens
gagaacaagaaagg

SEQ ID NO: 244934 - RNA, 11 nt, Homo sapiens
cucccauguca

SEQ ID NO: 244935 - RNA, 15 nt, Homo sapiens
ggaugcgacccaaga

SEQ ID NO: 244936 - RNA, 15 nt, Homo sapiens
cugccagcaucugca

SEQ ID NO: 244937 - RNA, 10 nt, Homo sapiens
gccaccagag

SEQ ID NO: 244938 - RNA, 20 nt, Homo sapiens
uaagccacugccucucccuc

SEQ ID NO: 244939 - RNA, 22 nt, Homo sapiens
aaacuggcaaaauaguucugca

SEQ ID NO: 244940 - RNA, 10 nt, Homo sapiens
gaucuaccug

SEQ ID NO: 244941 - RNA, 12 nt, Homo sapiens
ccagagcagcuc

SEQ ID NO: 244942 - RNA, 20 nt, Homo sapiens
gcagggaagaggggugcaga

SEQ ID NO: 244943 - RNA, 21 nt, Homo sapiens
gaccaagauggaugcgaccca

SEQ ID NO: 244944 - RNA, 14 nt, Homo sapiens
ucuuuacuguggaa

SEQ ID NO: 244945 - RNA, 23 nt, Homo sapiens
accguggagcuuaagccacugcc

SEQ ID NO: 244946 - RNA, 20 nt, Homo sapiens
guacugccaauacugccaac

SEQ ID NO: 244947 - RNA, 13 nt, Homo sapiens
aucucccugcuuu

SEQ ID NO: 244948 - RNA, 20 nt, Homo sapiens
acugcauagcagaccacaca

SEQ ID NO: 244949 - RNA, 13 nt, Homo sapiens
ugcagccacuuuc

SEQ ID NO: 244950 - RNA, 14 nt, Homo sapiens
uguguccagaguuu

SEQ ID NO: 244951 - RNA, 22 nt, Homo sapiens
gcccagcugcucagugcaacug

SEQ ID NO: 244952 - RNA, 20 nt, Homo sapiens
aggacgcugaccguggagcu

SEQ ID NO: 244953 - RNA, 15 nt, Homo sapiens
aguugcucaggacac

SEQ ID NO: 244954 - RNA, 12 nt, Homo sapiens
gcaucugcagcc

SEQ ID NO: 244955 - RNA, 14 nt, Homo sapiens
uugguucuuugguc

SEQ ID NO: 244956 - RNA, 21 nt, Homo sapiens
uugucagcugcagccacuuuc

SEQ ID NO: 244957 - RNA, 21 nt, Homo sapiens
ugccccaucacugcgccacug

SEQ ID NO: 244958 - RNA, 18 nt, Homo sapiens
uggacugguugguuuugc

SEQ ID NO: 244959 - RNA, 21 nt, Homo sapiens
agcccuaggauaaaaagccag

SEQ ID NO: 244960 - RNA, 12 nt, Homo sapiens
ccucccauguca

SEQ ID NO: 244961 - RNA, 12 nt, Homo sapiens
ccuccagaguug

SEQ ID NO: 244962 - RNA, 15 nt, Homo sapiens
accacccagaguggc

SEQ ID NO: 244963 - RNA, 17 nt, Homo sapiens
cccugugccagaccuca

SEQ ID NO: 244964 - RNA, 18 nt, Homo sapiens
aagagaaaauaagcagga

SEQ ID NO: 244965 - RNA, 21 nt, Homo sapiens
ugaagaagguugucagcugca

SEQ ID NO: 244966 - RNA, 17 nt, Homo sapiens
agaggcuguggcuggug

SEQ ID NO: 244967 - RNA, 14 nt, Homo sapiens
gccgggaacagaga

SEQ ID NO: 244968 - RNA, 17 nt, Homo sapiens
acuacagguaugugcca

SEQ ID NO: 244969 - RNA, 15 nt, Homo sapiens
gcagcuuagggcccu

SEQ ID NO: 244970 - RNA, 14 nt, Homo sapiens
aaugcaauuuccaa

SEQ ID NO: 244971 - RNA, 20 nt, Homo sapiens
cgccccccccuccccaugca

SEQ ID NO: 244972 - RNA, 19 nt, Homo sapiens
uaggucuccaagaccaccc

SEQ ID NO: 244973 - RNA, 20 nt, Homo sapiens
acugacccuggucaccagag

SEQ ID NO: 244974 - RNA, 13 nt, Homo sapiens
cuuuacuguggaa

SEQ ID NO: 244975 - RNA, 14 nt, Homo sapiens
caaccagagcagcu

SEQ ID NO: 244976 - RNA, 12 nt, Homo sapiens
agaaacagccac

SEQ ID NO: 244977 - RNA, 12 nt, Homo sapiens
aaaaauaguaaa

SEQ ID NO: 244978 - RNA, 19 nt, Homo sapiens
ccaauaccguguggcccaa

SEQ ID NO: 244979 - RNA, 14 nt, Homo sapiens
cauacaucaagcca

SEQ ID NO: 244980 - RNA, 19 nt, Homo sapiens
gccauuuuguuguguguau

SEQ ID NO: 244981 - RNA, 19 nt, Homo sapiens
aucucugugguuacaagaa

SEQ ID NO: 244982 - RNA, 12 nt, Homo sapiens
cuccaagaccac

SEQ ID NO: 244983 - RNA, 23 nt, Homo sapiens
gauuuaaaaacaaaaaaacacaa

SEQ ID NO: 244984 - RNA, 15 nt, Homo sapiens
augcgacccaagacc

SEQ ID NO: 244985 - RNA, 22 nt, Homo sapiens
cacugacccuggucaccagagg

SEQ ID NO: 244986 - RNA, 18 nt, Homo sapiens
caccauaaaucacaucau

SEQ ID NO: 244987 - RNA, 17 nt, Homo sapiens
acaguggugagaucaca

SEQ ID NO: 244988 - RNA, 21 nt, Homo sapiens
cccacagaguuggggagauaa

SEQ ID NO: 244989 - RNA, 18 nt, Homo sapiens
caggcuggucuugaacuc

SEQ ID NO: 244990 - RNA, 18 nt, Homo sapiens
ccacacggcugaccucau

SEQ ID NO: 244991 - RNA, 18 nt, Homo sapiens
gacugguugguuuugcca

SEQ ID NO: 244992 - RNA, 22 nt, Homo sapiens
acaagggggaagggaugcaggg

SEQ ID NO: 244993 - RNA, 19 nt, Homo sapiens
cugcagguugaagccaugu

SEQ ID NO: 244994 - RNA, 14 nt, Homo sapiens
acaccuccucucac

SEQ ID NO: 244995 - RNA, 21 nt, Homo sapiens
acuuucugccagcaucugcag

SEQ ID NO: 244996 - RNA, 19 nt, Homo sapiens
cagcugcagccacuuucug

SEQ ID NO: 244997 - RNA, 14 nt, Homo sapiens
uagacucaggaaag

SEQ ID NO: 244998 - RNA, 20 nt, Homo sapiens
gaauuuucagcaaaguacaa

SEQ ID NO: 244999 - RNA, 15 nt, Homo sapiens
agaucagcaaaggga

SEQ ID NO: 245000 - RNA, 15 nt, Homo sapiens
agcaaacauaaugcu

SEQ ID NO: 245001 - RNA, 18 nt, Homo sapiens
cuggccuugagcuucuaa

SEQ ID NO: 245002 - RNA, 20 nt, Homo sapiens
aggcagcaccugauucucac

SEQ ID NO: 245003 - RNA, 13 nt, Homo sapiens
gaguggugacagg

SEQ ID NO: 245004 - RNA, 13 nt, Homo sapiens
uggcccaagacuc

SEQ ID NO: 245005 - RNA, 20 nt, Homo sapiens
uuuucagcaaaguacaaaaa

SEQ ID NO: 245006 - RNA, 22 nt, Homo sapiens
uugcucuggacagagauggaag

SEQ ID NO: 245007 - RNA, 19 nt, Homo sapiens
gagaacaagaaagggccag

SEQ ID NO: 245008 - RNA, 19 nt, Homo sapiens
gcgacggcuuccaucugcc

SEQ ID NO: 245009 - RNA, 12 nt, Homo sapiens
uggcccaagacc

SEQ ID NO: 245010 - RNA, 18 nt, Homo sapiens
ccagcacccagaaucuca

SEQ ID NO: 245011 - RNA, 21 nt, Homo sapiens
aagagauaggaaccagcagga

SEQ ID NO: 245012 - RNA, 13 nt, Homo sapiens
cagcucaccaucc

SEQ ID NO: 245013 - RNA, 12 nt, Homo sapiens
uuguaauucuuu

SEQ ID NO: 245014 - RNA, 11 nt, Homo sapiens
ccuccccaugc

SEQ ID NO: 245015 - RNA, 22 nt, Homo sapiens
aacagaauugauaacugagcaa

SEQ ID NO: 245016 - RNA, 17 nt, Homo sapiens
gcagccacuuucugcca

SEQ ID NO: 245017 - RNA, 23 nt, Homo sapiens
gcuuaagccacugccucucccuc

SEQ ID NO: 245018 - RNA, 21 nt, Homo sapiens
aguucugcagguugaagccau

SEQ ID NO: 245019 - RNA, 19 nt, Homo sapiens
cacguuccacgacagauga

SEQ ID NO: 245020 - RNA, 19 nt, Homo sapiens
acagaguuggggagauaaa

SEQ ID NO: 245021 - RNA, 22 nt, Homo sapiens
gcgccccccccuccccaugcag

SEQ ID NO: 245022 - RNA, 17 nt, Homo sapiens
aguucauaggucuccaa

SEQ ID NO: 245023 - RNA, 17 nt, Homo sapiens
aaaacaaaaaaacacaa

SEQ ID NO: 245024 - RNA, 20 nt, Homo sapiens
aacauacccgccuagcugcu

SEQ ID NO: 245025 - RNA, 24 nt, Homo sapiens
gccucccucccugugccagaccuc

SEQ ID NO: 245026 - RNA, 12 nt, Homo sapiens
gacugguugguu

SEQ ID NO: 245027 - RNA, 21 nt, Homo sapiens
aguucauaggucuccaagacc

SEQ ID NO: 245028 - RNA, 16 nt, Homo sapiens
caagaaguacugccaa

SEQ ID NO: 245029 - RNA, 21 nt, Homo sapiens
cugcauagcagaccacacaga

SEQ ID NO: 245030 - RNA, 21 nt, Homo sapiens
ccguguggcccaagaccccca

SEQ ID NO: 245031 - RNA, 13 nt, Homo sapiens
auccucccaccuc

SEQ ID NO: 245032 - RNA, 16 nt, Homo sapiens
augugaacuugaagaa

SEQ ID NO: 245033 - RNA, 15 nt, Homo sapiens
gcaaggaaacguaau

SEQ ID NO: 245034 - RNA, 13 nt, Homo sapiens
cagagcagcucac

SEQ ID NO: 245035 - RNA, 23 nt, Homo sapiens
cugaccguggagcuuaagccacu

SEQ ID NO: 245036 - RNA, 19 nt, Homo sapiens
ugacccuggucaccagagg

SEQ ID NO: 245037 - RNA, 15 nt, Homo sapiens
cccaucucccugcuu

SEQ ID NO: 245038 - RNA, 22 nt, Homo sapiens
aagguugucagcugcagccacu

SEQ ID NO: 245039 - RNA, 13 nt, Homo sapiens
guggcccaagacc

SEQ ID NO: 245040 - RNA, 20 nt, Homo sapiens
gggugugggccaccagagaa

SEQ ID NO: 245041 - RNA, 13 nt, Homo sapiens
ccagcaucugcag

SEQ ID NO: 245042 - RNA, 17 nt, Homo sapiens
aggauggcaggggcaaa

SEQ ID NO: 245043 - RNA, 18 nt, Homo sapiens
acugguugguuuugccau

SEQ ID NO: 245044 - RNA, 15 nt, Homo sapiens
caccagaggcugcaa

SEQ ID NO: 245045 - RNA, 17 nt, Homo sapiens
agguugaagccaugucu

SEQ ID NO: 245046 - RNA, 15 nt, Homo sapiens
agccacuuucugcca

SEQ ID NO: 245047 - RNA, 22 nt, Homo sapiens
aggcagcgcugcaguugcucag

SEQ ID NO: 245048 - RNA, 19 nt, Homo sapiens
gcagcgcugcaguugcuca

SEQ ID NO: 245049 - RNA, 23 nt, Homo sapiens
ugaaccacccagaguggcccaag

SEQ ID NO: 245050 - RNA, 18 nt, Homo sapiens
aaauuuggccucuggccu

SEQ ID NO: 245051 - RNA, 16 nt, Homo sapiens
agcuuaagccacugcc

SEQ ID NO: 245052 - RNA, 18 nt, Homo sapiens
gucccauucccugggauc

SEQ ID NO: 245053 - RNA, 18 nt, Homo sapiens
aauacugccaaccagagc

SEQ ID NO: 245054 - RNA, 21 nt, Homo sapiens
cauagcagaccacacagaagg

SEQ ID NO: 245055 - RNA, 18 nt, Homo sapiens
gaaccagauucuauccuc

SEQ ID NO: 245056 - RNA, 17 nt, Homo sapiens
ucuaugaucuugagggc

SEQ ID NO: 245057 - RNA, 18 nt, Homo sapiens
aacgacgggggcaggugc

SEQ ID NO: 245058 - RNA, 17 nt, Homo sapiens
gcaucugcagccacuuu

SEQ ID NO: 245059 - RNA, 23 nt, Homo sapiens
accacggggccgacauugucucc

SEQ ID NO: 245060 - RNA, 20 nt, Homo sapiens
guucauaggucuccaagacc

SEQ ID NO: 245061 - RNA, 23 nt, Homo sapiens
aggcagcgcugcaguugcucagg

SEQ ID NO: 245062 - RNA, 20 nt, Homo sapiens
uguuuuauagacccugggaa

SEQ ID NO: 245063 - RNA, 23 nt, Homo sapiens
uucugcagguugaagccaugucu

SEQ ID NO: 245064 - RNA, 20 nt, Homo sapiens
cccugugccagaccucaaaa

SEQ ID NO: 245065 - RNA, 18 nt, Homo sapiens
uggaaaaaaaacauugca

SEQ ID NO: 245066 - RNA, 14 nt, Homo sapiens
acccagaaucucau

SEQ ID NO: 245067 - RNA, 16 nt, Homo sapiens
gcaucugcagccacuu

SEQ ID NO: 245068 - RNA, 12 nt, Homo sapiens
cagcaucugcag

SEQ ID NO: 245069 - RNA, 21 nt, Homo sapiens
augaagacccccuccaaagag

SEQ ID NO: 245070 - RNA, 15 nt, Homo sapiens
agggcucaaggguga

SEQ ID NO: 245071 - RNA, 21 nt, Homo sapiens
uucaggccgcaagcagcugcc

SEQ ID NO: 245072 - RNA, 15 nt, Homo sapiens
gcuccuauaggacca

SEQ ID NO: 245073 - RNA, 13 nt, Homo sapiens
guggcccaagacu

SEQ ID NO: 245074 - RNA, 20 nt, Homo sapiens
ugccagcaucugcagccacu

SEQ ID NO: 245075 - RNA, 19 nt, Homo sapiens
cuucccuccucccauguca

SEQ ID NO: 245076 - RNA, 12 nt, Homo sapiens
uauuauggaaaa

SEQ ID NO: 245077 - RNA, 22 nt, Homo sapiens
agccacuuucugccagcaucug

SEQ ID NO: 245078 - RNA, 21 nt, Homo sapiens
ccugcuuuggucuugccccau

SEQ ID NO: 245079 - RNA, 17 nt, Homo sapiens
auacaucaagccaauac

SEQ ID NO: 245080 - RNA, 12 nt, Homo sapiens
guguggcccaag

SEQ ID NO: 245081 - RNA, 12 nt, Homo sapiens
auagcucagaau

SEQ ID NO: 245082 - RNA, 17 nt, Homo sapiens
uugucuugagacagggu

SEQ ID NO: 245083 - RNA, 15 nt, Homo sapiens
gggaagaggggugca

SEQ ID NO: 245084 - RNA, 22 nt, Homo sapiens
ugucugucuccagcacccagaa

SEQ ID NO: 245085 - RNA, 11 nt, Homo sapiens
ucagugcugcc

SEQ ID NO: 245086 - RNA, 10 nt, Homo sapiens
ccugccccaa

SEQ ID NO: 245087 - RNA, 17 nt, Homo sapiens
ccugugccagaccucaa

SEQ ID NO: 245088 - RNA, 21 nt, Homo sapiens
guugaagccaugucuacauga

SEQ ID NO: 245089 - RNA, 23 nt, Homo sapiens
gaggcgacggcuuccaucugccc

SEQ ID NO: 245090 - RNA, 23 nt, Homo sapiens
cccagaaucucauuaaagcuuau

SEQ ID NO: 245091 - RNA, 11 nt, Homo sapiens
cucccaaagug

SEQ ID NO: 245092 - RNA, 14 nt, Homo sapiens
cuggucaccagagg

SEQ ID NO: 245093 - RNA, 18 nt, Homo sapiens
aacucuuggcuccaagug

SEQ ID NO: 245094 - RNA, 18 nt, Homo sapiens
auggcaggggcaaagggc

SEQ ID NO: 245095 - RNA, 14 nt, Homo sapiens
cuccucccauguca

SEQ ID NO: 245096 - RNA, 21 nt, Homo sapiens
gacucacuagacucaggaaag

SEQ ID NO: 245097 - RNA, 12 nt, Homo sapiens
aaaauaguaaaa

SEQ ID NO: 245098 - RNA, 18 nt, Homo sapiens
cagguugaagccaugucu

SEQ ID NO: 245099 - RNA, 11 nt, Homo sapiens
aguugcucagg

SEQ ID NO: 245100 - RNA, 16 nt, Homo sapiens
ccguguggcccaagac

SEQ ID NO: 245101 - RNA, 14 nt, Homo sapiens
ccuugggccaagau

SEQ ID NO: 245102 - RNA, 16 nt, Homo sapiens
cuccaaagagaccagc

SEQ ID NO: 245103 - RNA, 18 nt, Homo sapiens
uucccuccucccauguca

SEQ ID NO: 245104 - RNA, 19 nt, Homo sapiens
gaggggugcagaggcugug

SEQ ID NO: 245105 - RNA, 14 nt, Homo sapiens
accccacagaguug

SEQ ID NO: 245106 - RNA, 17 nt, Homo sapiens
aggcccagcugcucagu

SEQ ID NO: 245107 - RNA, 16 nt, Homo sapiens
caaccagagcagcuca

SEQ ID NO: 245108 - RNA, 14 nt, Homo sapiens
aaggaaacuuugaa

SEQ ID NO: 245109 - RNA, 15 nt, Homo sapiens
ucuccccuguucccc

SEQ ID NO: 245110 - RNA, 14 nt, Homo sapiens
gacauugucucccg

SEQ ID NO: 245111 - RNA, 16 nt, Homo sapiens
agauaggaaccagcag

SEQ ID NO: 245112 - RNA, 17 nt, Homo sapiens
agagaaguguggggaag

SEQ ID NO: 245113 - RNA, 17 nt, Homo sapiens
ucccucccugugccaga

SEQ ID NO: 245114 - RNA, 19 nt, Homo sapiens
auuuucagcaaaguacaaa

SEQ ID NO: 245115 - RNA, 17 nt, Homo sapiens
cagaguggcccaagacu

SEQ ID NO: 245116 - RNA, 12 nt, Homo sapiens
cgacccaagacc

SEQ ID NO: 245117 - RNA, 13 nt, Homo sapiens
uauaaaauucuug

SEQ ID NO: 245118 - RNA, 18 nt, Homo sapiens
uggaugcgacccaagacc

SEQ ID NO: 245119 - RNA, 14 nt, Homo sapiens
caggggcaaagggc

SEQ ID NO: 245120 - RNA, 16 nt, Homo sapiens
aucugcagccacuuuc

SEQ ID NO: 245121 - RNA, 15 nt, Homo sapiens
caggugcaaguucau

SEQ ID NO: 245122 - RNA, 23 nt, Homo sapiens
cugcaauucaggccgcaagcagc

SEQ ID NO: 245123 - RNA, 21 nt, Homo sapiens
accccaauggaugaagacccc

SEQ ID NO: 245124 - RNA, 17 nt, Homo sapiens
aggacucacuagacuca

SEQ ID NO: 245125 - RNA, 17 nt, Homo sapiens
gucagcugcagccacuu

SEQ ID NO: 245126 - RNA, 17 nt, Homo sapiens
ugugggccaccagagaa

SEQ ID NO: 245127 - RNA, 16 nt, Homo sapiens
agaugugaacuugaag

SEQ ID NO: 245128 - RNA, 17 nt, Homo sapiens
aauaccguguggcccaa

SEQ ID NO: 245129 - RNA, 18 nt, Homo sapiens
guggauuccgagugguga

SEQ ID NO: 245130 - RNA, 22 nt, Homo sapiens
caagauggaugcgacccaagac

SEQ ID NO: 245131 - RNA, 14 nt, Homo sapiens
gaagaaaaauaucu

SEQ ID NO: 245132 - RNA, 15 nt, Homo sapiens
uggcacguaagcucc

SEQ ID NO: 245133 - RNA, 21 nt, Homo sapiens
agaucuuuguguccagaguuu

SEQ ID NO: 245134 - RNA, 17 nt, Homo sapiens
gcuggaggaugugggca

SEQ ID NO: 245135 - RNA, 18 nt, Homo sapiens
gccuuuacugcauagcag

SEQ ID NO: 245136 - RNA, 16 nt, Homo sapiens
uagagggaacagggcg

SEQ ID NO: 245137 - RNA, 13 nt, Homo sapiens
gcuuccaucugcc

SEQ ID NO: 245138 - RNA, 15 nt, Homo sapiens
ccucuggucccacaa

SEQ ID NO: 245139 - RNA, 21 nt, Homo sapiens
ccacugacccuggucaccaga

SEQ ID NO: 245140 - RNA, 17 nt, Homo sapiens
aauaagcaggacagagg

SEQ ID NO: 245141 - RNA, 15 nt, Homo sapiens
accguguggcccaag

SEQ ID NO: 245142 - RNA, 22 nt, Homo sapiens
acccaaaagaaacugacaugcc

SEQ ID NO: 245143 - RNA, 16 nt, Homo sapiens
aguucauaggucucca

SEQ ID NO: 245144 - RNA, 19 nt, Homo sapiens
aagagccgggaacagagaa

SEQ ID NO: 245145 - RNA, 21 nt, Homo sapiens
gguuacaagaaacagccacug

SEQ ID NO: 245146 - RNA, 15 nt, Homo sapiens
ugccagcaucugcag

SEQ ID NO: 245147 - RNA, 18 nt, Homo sapiens
ggcgacggcuuccaucug

SEQ ID NO: 245148 - RNA, 18 nt, Homo sapiens
aaagggaggaggugcaca

SEQ ID NO: 245149 - RNA, 23 nt, Homo sapiens
agaagaccuugggccaagaugcu

SEQ ID NO: 245150 - RNA, 13 nt, Homo sapiens
aacugacaugccc

SEQ ID NO: 245151 - RNA, 14 nt, Homo sapiens
acucacuagacuca

SEQ ID NO: 245152 - RNA, 15 nt, Homo sapiens
cauaggucuccaaga

SEQ ID NO: 245153 - RNA, 15 nt, Homo sapiens
gugcacagcacacgu

SEQ ID NO: 245154 - RNA, 19 nt, Homo sapiens
agcuccuugucugucucca

SEQ ID NO: 245155 - RNA, 14 nt, Homo sapiens
cccagcugcucagu

SEQ ID NO: 245156 - RNA, 17 nt, Homo sapiens
agcugcucagugcaacu

SEQ ID NO: 245157 - RNA, 16 nt, Homo sapiens
cugccagcaucugcag

SEQ ID NO: 245158 - RNA, 17 nt, Homo sapiens
gcccaggcuggucuuga

SEQ ID NO: 245159 - RNA, 15 nt, Homo sapiens
gaaaggaaacuuuga

SEQ ID NO: 245160 - RNA, 16 nt, Homo sapiens
ucucccugcuuugguc

SEQ ID NO: 245161 - RNA, 13 nt, Homo sapiens
cuggaucuaccug

SEQ ID NO: 245162 - RNA, 19 nt, Homo sapiens
aucacugcgccacugcucc

SEQ ID NO: 245163 - RNA, 12 nt, Homo sapiens
ugcagguggugu

SEQ ID NO: 245164 - RNA, 18 nt, Homo sapiens
uucauaggucuccaagac

SEQ ID NO: 245165 - RNA, 16 nt, Homo sapiens
cugcuuuggucuugcc

SEQ ID NO: 245166 - RNA, 20 nt, Homo sapiens
gcagccacuuucugccagca

SEQ ID NO: 245167 - RNA, 14 nt, Homo sapiens
cuccaaagagacca

SEQ ID NO: 245168 - RNA, 10 nt, Homo sapiens
ccaccagaga

SEQ ID NO: 245169 - RNA, 17 nt, Homo sapiens
acggcuuccaucugccc

SEQ ID NO: 245170 - RNA, 20 nt, Homo sapiens
agaggggagagagacuggag

SEQ ID NO: 245171 - RNA, 12 nt, Homo sapiens
gacauugucucc

SEQ ID NO: 245172 - RNA, 22 nt, Homo sapiens
gaguggcccaagacucccagau

SEQ ID NO: 245173 - RNA, 18 nt, Homo sapiens
uaaaaggacagagauuaa

SEQ ID NO: 245174 - RNA, 21 nt, Homo sapiens
caggagcugaggauaaagggc

SEQ ID NO: 245175 - RNA, 17 nt, Homo sapiens
acaaguuaaaaaggucu

SEQ ID NO: 245176 - RNA, 14 nt, Homo sapiens
ccagaguggcccaa

SEQ ID NO: 245177 - RNA, 16 nt, Homo sapiens
agcugcagccacuuuc

SEQ ID NO: 245178 - RNA, 14 nt, Homo sapiens
cuacuagaugugaa

SEQ ID NO: 245179 - RNA, 13 nt, Homo sapiens
ccagaguggccca

SEQ ID NO: 245180 - RNA, 23 nt, Homo sapiens
augaaugcccaggagcugaggau

SEQ ID NO: 245181 - RNA, 14 nt, Homo sapiens
cugccaaccagagc

SEQ ID NO: 245182 - RNA, 22 nt, Homo sapiens
agugcugaauuaagcagcucac

SEQ ID NO: 245183 - RNA, 17 nt, Homo sapiens
acaguaaaaggacagag

SEQ ID NO: 245184 - RNA, 19 nt, Homo sapiens
ugugacaacaugcaagaag

SEQ ID NO: 245185 - RNA, 13 nt, Homo sapiens
ucugccagcaucu

SEQ ID NO: 245186 - RNA, 14 nt, Homo sapiens
gcccagcugcucag

SEQ ID NO: 245187 - RNA, 21 nt, Homo sapiens
auccacacggcugaccucaua

SEQ ID NO: 245188 - RNA, 20 nt, Homo sapiens
ugcauagcagaccacacaga

SEQ ID NO: 245189 - RNA, 21 nt, Homo sapiens
ggacagagauuaagaucagca

SEQ ID NO: 245190 - RNA, 16 nt, Homo sapiens
uggucagcccuaggau

SEQ ID NO: 245191 - RNA, 19 nt, Homo sapiens
caucugcagccacuuucug

SEQ ID NO: 245192 - RNA, 21 nt, Homo sapiens
guacugccaauacugccaacc

SEQ ID NO: 245193 - RNA, 22 nt, Homo sapiens
caaggacgugggccuccagagu

SEQ ID NO: 245194 - RNA, 16 nt, Homo sapiens
uacugccaaccagagc

SEQ ID NO: 245195 - RNA, 16 nt, Homo sapiens
cggcuuccaucugccc

SEQ ID NO: 245196 - RNA, 14 nt, Homo sapiens
aggcagcaccugau

SEQ ID NO: 245197 - RNA, 15 nt, Homo sapiens
cugguugguuuugcc

SEQ ID NO: 245198 - RNA, 14 nt, Homo sapiens
gccagcaucugcag

SEQ ID NO: 245199 - RNA, 20 nt, Homo sapiens
aagucauccucccaccucag

SEQ ID NO: 245200 - RNA, 16 nt, Homo sapiens
cugccuguccccaugc

SEQ ID NO: 245201 - RNA, 14 nt, Homo sapiens
ugugccaccacguc

SEQ ID NO: 245202 - RNA, 18 nt, Homo sapiens
gucuccaagaccacccuc

SEQ ID NO: 245203 - RNA, 19 nt, Homo sapiens
ugaagacccccuccaaaga

SEQ ID NO: 245204 - RNA, 22 nt, Homo sapiens
caaguucauaggucuccaagac

SEQ ID NO: 245205 - RNA, 16 nt, Homo sapiens
ugcaauuuccaacaca

SEQ ID NO: 245206 - RNA, 16 nt, Homo sapiens
agcaucugcagccacu

SEQ ID NO: 245207 - RNA, 20 nt, Homo sapiens
aguucauaggucuccaagac

SEQ ID NO: 245208 - RNA, 14 nt, Homo sapiens
ugcaguugcucagg

SEQ ID NO: 245209 - RNA, 20 nt, Homo sapiens
cuuucugccagcaucugcag

SEQ ID NO: 245210 - RNA, 18 nt, Homo sapiens
gucagcugcagccacuuu

SEQ ID NO: 245211 - RNA, 13 nt, Homo sapiens
ugggccaccagag

SEQ ID NO: 245212 - RNA, 14 nt, Homo sapiens
aaaagaaacuugug

SEQ ID NO: 245213 - RNA, 21 nt, Homo sapiens
aacaugugacaacaugcaaga

SEQ ID NO: 245214 - RNA, 16 nt, Homo sapiens
aggaggcccagcugcu

SEQ ID NO: 245215 - RNA, 14 nt, Homo sapiens
gcuuugguggcacg

SEQ ID NO: 245216 - RNA, 16 nt, Homo sapiens
cuacagguaugugcca

SEQ ID NO: 245217 - RNA, 12 nt, Homo sapiens
aaaaaaacauug

SEQ ID NO: 245218 - RNA, 13 nt, Homo sapiens
accugauucucac

SEQ ID NO: 245219 - RNA, 15 nt, Homo sapiens
aggcccagcugcuca

SEQ ID NO: 245220 - RNA, 14 nt, Homo sapiens
cccaugcuuaacau

SEQ ID NO: 245221 - RNA, 13 nt, Homo sapiens
gcaguugcucagg

SEQ ID NO: 245222 - RNA, 21 nt, Homo sapiens
ccacuuucugccagcaucugc

SEQ ID NO: 245223 - RNA, 17 nt, Homo sapiens
gaaaggaaacuuugaac

SEQ ID NO: 245224 - RNA, 19 nt, Homo sapiens
cucucacuccccagccugg

SEQ ID NO: 245225 - RNA, 16 nt, Homo sapiens
cccaucucccugcuuu

SEQ ID NO: 245226 - RNA, 22 nt, Homo sapiens
cccaggaggcccagcugcucag

SEQ ID NO: 245227 - RNA, 16 nt, Homo sapiens
gcaucugcagccagca

SEQ ID NO: 245228 - RNA, 21 nt, Homo sapiens
agaaggacucacuagacucag

SEQ ID NO: 245229 - RNA, 18 nt, Homo sapiens
ccaagacucccagaucag

SEQ ID NO: 245230 - RNA, 17 nt, Homo sapiens
ucacaguucauugcagc

SEQ ID NO: 245231 - RNA, 22 nt, Homo sapiens
aucucccugcuuuggucuugcc

SEQ ID NO: 245232 - RNA, 14 nt, Homo sapiens
uauaggaccaagau

SEQ ID NO: 245233 - RNA, 17 nt, Homo sapiens
acugcauagcagaccac

SEQ ID NO: 245234 - RNA, 18 nt, Homo sapiens
caggaaauaacccacaaa

SEQ ID NO: 245235 - RNA, 21 nt, Homo sapiens
cccaugucacugcagauugag

SEQ ID NO: 245236 - RNA, 13 nt, Homo sapiens
gccagcaucugca

SEQ ID NO: 245237 - RNA, 12 nt, Homo sapiens
cugccagcaucu

SEQ ID NO: 245238 - RNA, 15 nt, Homo sapiens
ccacuuucugccagc

SEQ ID NO: 245239 - RNA, 19 nt, Homo sapiens
acguaagcuccuugucugu

SEQ ID NO: 245240 - RNA, 21 nt, Homo sapiens
ugacuucucaacgccaaguca

SEQ ID NO: 245241 - RNA, 12 nt, Homo sapiens
gcugcugucaca

SEQ ID NO: 245242 - RNA, 17 nt, Homo sapiens
ccacacggcugaccuca

SEQ ID NO: 245243 - RNA, 14 nt, Homo sapiens
acugcgccacugcu

SEQ ID NO: 245244 - RNA, 16 nt, Homo sapiens
caccagaggcugcaau

SEQ ID NO: 245245 - RNA, 20 nt, Homo sapiens
aggcaggauauuccaagggc

SEQ ID NO: 245246 - RNA, 14 nt, Homo sapiens
guuaggcucacagu

SEQ ID NO: 245247 - RNA, 16 nt, Homo sapiens
ucccaguggagccaua

SEQ ID NO: 245248 - RNA, 21 nt, Homo sapiens
acgucuggcuaaucuuuuuau

SEQ ID NO: 245249 - RNA, 19 nt, Homo sapiens
ucccugugccagaccucaa

SEQ ID NO: 245250 - RNA, 19 nt, Homo sapiens
accacccagaguggcccaa

SEQ ID NO: 245251 - RNA, 22 nt, Homo sapiens
acuagacucaggaaagcuguua

SEQ ID NO: 245252 - RNA, 13 nt, Homo sapiens
cugccagcaucug

SEQ ID NO: 245253 - RNA, 21 nt, Homo sapiens
gucagugcugccuguccccau

SEQ ID NO: 245254 - RNA, 18 nt, Homo sapiens
agaaaacuguuugggaaa

SEQ ID NO: 245255 - RNA, 23 nt, Homo sapiens
cccaggagcugaggauaaagggc

SEQ ID NO: 245256 - RNA, 21 nt, Homo sapiens
uucccuccucccaugucacug

SEQ ID NO: 245257 - RNA, 19 nt, Homo sapiens
uuuaauaaaaauuccuuaa

SEQ ID NO: 245258 - RNA, 15 nt, Homo sapiens
ccucucccucugguc

SEQ ID NO: 245259 - RNA, 14 nt, Homo sapiens
aucaagccaauacc

SEQ ID NO: 245260 - RNA, 13 nt, Homo sapiens
ugccaaccagagc

SEQ ID NO: 245261 - RNA, 13 nt, Homo sapiens
ugaagccaugucu

SEQ ID NO: 245262 - RNA, 17 nt, Homo sapiens
agaaguacugccaauac

SEQ ID NO: 245263 - RNA, 12 nt, Homo sapiens
uaggaccaagau

SEQ ID NO: 245264 - RNA, 21 nt, Homo sapiens
ccucagccuccugaguagcua

SEQ ID NO: 245265 - RNA, 20 nt, Homo sapiens
gguuacaagaaacagccacu

SEQ ID NO: 245266 - RNA, 14 nt, Homo sapiens
gagccauauaggca

SEQ ID NO: 245267 - RNA, 16 nt, Homo sapiens
gcaugaaccacccaga

SEQ ID NO: 245268 - RNA, 15 nt, Homo sapiens
ugcgacccaagaccc

SEQ ID NO: 245269 - RNA, 20 nt, Homo sapiens
cguguuccccucuugucucc

SEQ ID NO: 245270 - RNA, 19 nt, Homo sapiens
acagcaacaugugacaaca

SEQ ID NO: 245271 - RNA, 13 nt, Homo sapiens
cuagaaggacuca

SEQ ID NO: 245272 - RNA, 19 nt, Homo sapiens
cagugcaacugacaaguua

SEQ ID NO: 245273 - RNA, 16 nt, Homo sapiens
auccucccaccucagc

SEQ ID NO: 245274 - RNA, 16 nt, Homo sapiens
cccuggucaccagagg

SEQ ID NO: 245275 - RNA, 23 nt, Homo sapiens
aaggacgugggccuccagaguug

SEQ ID NO: 245276 - RNA, 23 nt, Homo sapiens
cagccucccucccugugccagac

SEQ ID NO: 245277 - RNA, 17 nt, Homo sapiens
cuuuguguccagaguuu

SEQ ID NO: 245278 - RNA, 20 nt, Homo sapiens
cccuccuuucauuugcuaga

SEQ ID NO: 245279 - RNA, 15 nt, Homo sapiens
gaguggcccaagacu

SEQ ID NO: 245280 - RNA, 16 nt, Homo sapiens
cguguggcccaagacc

SEQ ID NO: 245281 - RNA, 23 nt, Homo sapiens
caucuuuuuuugguucuuugguc

SEQ ID NO: 245282 - RNA, 20 nt, Homo sapiens
caaagggaggaggugcacag

SEQ ID NO: 245283 - RNA, 21 nt, Homo sapiens
auguuuuauagacccugggaa

SEQ ID NO: 245284 - RNA, 22 nt, Homo sapiens
agguggauuccgaguggugaca

SEQ ID NO: 245285 - RNA, 18 nt, Homo sapiens
gguugcuuugguggcacg

SEQ ID NO: 245286 - RNA, 17 nt, Homo sapiens
aaugcaauuuccaacac

SEQ ID NO: 245287 - RNA, 16 nt, Homo sapiens
uggcucuguuggcaga

SEQ ID NO: 245288 - RNA, 20 nt, Homo sapiens
acgcuccuauaggaccaaga

SEQ ID NO: 245289 - RNA, 23 nt, Homo sapiens
aaugcaaagcuugagcugcucug

SEQ ID NO: 245290 - RNA, 23 nt, Homo sapiens
auuuaaaaacaaaaaaacacaaa

SEQ ID NO: 245291 - RNA, 15 nt, Homo sapiens
ggcuuccaucugccc

SEQ ID NO: 245292 - RNA, 22 nt, Homo sapiens
ccaauggaugaagacccccucc

SEQ ID NO: 245293 - RNA, 21 nt, Homo sapiens
aggccagugggaccccacaga

SEQ ID NO: 245294 - RNA, 17 nt, Homo sapiens
aguaaaaggacagagau

SEQ ID NO: 245295 - RNA, 14 nt, Homo sapiens
uucccuccugcuuu

SEQ ID NO: 245296 - RNA, 17 nt, Homo sapiens
gcagcaccugauucuca

SEQ ID NO: 245297 - RNA, 23 nt, Homo sapiens
augaaccacccagaguggcccaa

SEQ ID NO: 245298 - RNA, 22 nt, Homo sapiens
cagcaccugauucucacagcaa

SEQ ID NO: 245299 - RNA, 14 nt, Homo sapiens
gccacuuucugcca

SEQ ID NO: 245300 - RNA, 11 nt, Homo sapiens
cuccagaguug

SEQ ID NO: 245301 - RNA, 21 nt, Homo sapiens
ugccagcaucugcagccacuu

SEQ ID NO: 245302 - RNA, 12 nt, Homo sapiens
ugguuacaagaa

SEQ ID NO: 245303 - RNA, 17 nt, Homo sapiens
gcagccuugacuucuca

SEQ ID NO: 245304 - RNA, 12 nt, Homo sapiens
aauagcucagaa

SEQ ID NO: 245305 - RNA, 13 nt, Homo sapiens
gcaccugauucuc

SEQ ID NO: 245306 - RNA, 14 nt, Homo sapiens
ugggccaccagaga

SEQ ID NO: 245307 - RNA, 17 nt, Homo sapiens
ggcaagguuaagccuuu

SEQ ID NO: 245308 - RNA, 23 nt, Homo sapiens
aauacugccaaccagagcagcuc

SEQ ID NO: 245309 - RNA, 22 nt, Homo sapiens
cagaagggugugggccaccaga

SEQ ID NO: 245310 - RNA, 14 nt, Homo sapiens
ugugguuacaagaa

SEQ ID NO: 245311 - RNA, 20 nt, Homo sapiens
cccaucacugcgccacugcu

SEQ ID NO: 245312 - RNA, 13 nt, Homo sapiens
uccagcacccaga

SEQ ID NO: 245313 - RNA, 13 nt, Homo sapiens
uggcccaagaccc

SEQ ID NO: 245314 - RNA, 16 nt, Homo sapiens
auaggucuccaagacc

SEQ ID NO: 245315 - RNA, 12 nt, Homo sapiens
gccccaucacug

SEQ ID NO: 245316 - RNA, 13 nt, Homo sapiens
ccuucuugcugcc

SEQ ID NO: 245317 - RNA, 20 nt, Homo sapiens
acgacgggggcaggugcaag

SEQ ID NO: 245318 - RNA, 17 nt, Homo sapiens
cagccacuuucugccag

SEQ ID NO: 245319 - RNA, 17 nt, Homo sapiens
ucucccccguguucccc

SEQ ID NO: 245320 - RNA, 13 nt, Homo sapiens
augcagguggugu

SEQ ID NO: 245321 - RNA, 23 nt, Homo sapiens
ccaauacugccaaccagagcagc

SEQ ID NO: 245322 - RNA, 18 nt, Homo sapiens
accacccagaguggccca

SEQ ID NO: 245323 - RNA, 16 nt, Homo sapiens
aagaauuuucagcaaa

SEQ ID NO: 245324 - RNA, 12 nt, Homo sapiens
agagcagcucac

SEQ ID NO: 245325 - RNA, 22 nt, Homo sapiens
ucugccagcaucugcagccacu

SEQ ID NO: 245326 - RNA, 18 nt, Homo sapiens
cuguccacuagaccagug

SEQ ID NO: 245327 - RNA, 20 nt, Homo sapiens
aguacugccaauacugccaa

SEQ ID NO: 245328 - RNA, 14 nt, Homo sapiens
ucccuccugcuuug

SEQ ID NO: 245329 - RNA, 20 nt, Homo sapiens
cuuucccgggcuguccacua

SEQ ID NO: 245330 - RNA, 20 nt, Homo sapiens
ccgggaacagagaagugugg

SEQ ID NO: 245331 - RNA, 19 nt, Homo sapiens
gccaauaccguguggccca

SEQ ID NO: 245332 - RNA, 13 nt, Homo sapiens
cucacuagacuca

SEQ ID NO: 245333 - RNA, 19 nt, Homo sapiens
cuugucuccccuguucccc

SEQ ID NO: 245334 - RNA, 16 nt, Homo sapiens
agggaagaggggugca

SEQ ID NO: 245335 - RNA, 20 nt, Homo sapiens
auuaagaucagcaaagggag

SEQ ID NO: 245336 - RNA, 23 nt, Homo sapiens
auuuaaagcauuccuuucuuuaa

SEQ ID NO: 245337 - RNA, 16 nt, Homo sapiens
ugugggccaccagaga

SEQ ID NO: 245338 - RNA, 12 nt, Homo sapiens
cugcucugcaag

SEQ ID NO: 245339 - RNA, 16 nt, Homo sapiens
uugcucuggacagaga

SEQ ID NO: 245340 - RNA, 19 nt, Homo sapiens
ugccaccacgucuggcuaa

SEQ ID NO: 245341 - RNA, 16 nt, Homo sapiens
cagaguggcccaagac

SEQ ID NO: 245342 - RNA, 11 nt, Homo sapiens
gccagaccuca

SEQ ID NO: 245343 - RNA, 22 nt, Homo sapiens
agagaagaccuugggccaagau

SEQ ID NO: 245344 - RNA, 16 nt, Homo sapiens
cuuucugccagcaucu

SEQ ID NO: 245345 - RNA, 19 nt, Homo sapiens
aaagcuugagcugcucugc

SEQ ID NO: 245346 - RNA, 16 nt, Homo sapiens
gcaaaauaguucugca

SEQ ID NO: 245347 - RNA, 17 nt, Homo sapiens
acccagaguggcccaag

SEQ ID NO: 245348 - RNA, 14 nt, Homo sapiens
aaaaagccagggcu

SEQ ID NO: 245349 - RNA, 21 nt, Homo sapiens
gcuuuucuuuucuaaccaaga

SEQ ID NO: 245350 - RNA, 17 nt, Homo sapiens
aggccagugggacccca

SEQ ID NO: 245351 - RNA, 16 nt, Homo sapiens
gucauccucccaccuc

SEQ ID NO: 245352 - RNA, 18 nt, Homo sapiens
ccugggaucuggugguca

SEQ ID NO: 245353 - RNA, 22 nt, Homo sapiens
cagcaaagggaggaggugcaca

SEQ ID NO: 245354 - RNA, 22 nt, Homo sapiens
caguggugagaucacaguucau

SEQ ID NO: 245355 - RNA, 18 nt, Homo sapiens
auaagcaggacagaggau

SEQ ID NO: 245356 - RNA, 15 nt, Homo sapiens
gacccaggaggccca

SEQ ID NO: 245357 - RNA, 13 nt, Homo sapiens
uggaucuaccugg

SEQ ID NO: 245358 - RNA, 15 nt, Homo sapiens
aagaaagggccagga

SEQ ID NO: 245359 - RNA, 14 nt, Homo sapiens
aagacccaggaggc

SEQ ID NO: 245360 - RNA, 22 nt, Homo sapiens
uuacugcauagcagaccacaca

SEQ ID NO: 245361 - RNA, 20 nt, Homo sapiens
gccagcaucugcagccacuu

SEQ ID NO: 245362 - RNA, 14 nt, Homo sapiens
aggucuccaagacc

SEQ ID NO: 245363 - RNA, 18 nt, Homo sapiens
uucccgggcuguccacua

SEQ ID NO: 245364 - RNA, 17 nt, Homo sapiens
agcaugaaccacccaga

SEQ ID NO: 245365 - RNA, 18 nt, Homo sapiens
cccagcugcucagugcaa

SEQ ID NO: 245366 - RNA, 22 nt, Homo sapiens
gcaagcugggacuggcaggaaa

SEQ ID NO: 245367 - RNA, 18 nt, Homo sapiens
uggcccccuuucccgggc

SEQ ID NO: 245368 - RNA, 16 nt, Homo sapiens
gggcccgcaccgacca

SEQ ID NO: 245369 - RNA, 18 nt, Homo sapiens
augugacaacaugcaaga

SEQ ID NO: 245370 - RNA, 20 nt, Homo sapiens
acccgccuagcugcugucac

SEQ ID NO: 245371 - RNA, 18 nt, Homo sapiens
gcagggaagaggggugca

SEQ ID NO: 245372 - RNA, 21 nt, Homo sapiens
caggacagaggauuugcucug

SEQ ID NO: 245373 - RNA, 11 nt, Homo sapiens
cauugucuccc

SEQ ID NO: 245374 - RNA, 21 nt, Homo sapiens
aaaggaacauugguugcuuug

SEQ ID NO: 245375 - RNA, 22 nt, Homo sapiens
ccaagucauccucccaccucag

SEQ ID NO: 245376 - RNA, 17 nt, Homo sapiens
aggaaaggaaacuuuga

SEQ ID NO: 245377 - RNA, 20 nt, Homo sapiens
guugucagcugcagccacuu

SEQ ID NO: 245378 - RNA, 14 nt, Homo sapiens
auaaaaagccaggg

SEQ ID NO: 245379 - RNA, 18 nt, Homo sapiens
gccuagcugcugucacau

SEQ ID NO: 245380 - RNA, 21 nt, Homo sapiens
aggauuugcucuggacagaga

SEQ ID NO: 245381 - RNA, 18 nt, Homo sapiens
uugucagcugcagccacu

SEQ ID NO: 245382 - RNA, 15 nt, Homo sapiens
cacaguucauugcag

SEQ ID NO: 245383 - RNA, 15 nt, Homo sapiens
ccgucagaucucugu

SEQ ID NO: 245384 - RNA, 14 nt, Homo sapiens
ggccaagaugcuaa

SEQ ID NO: 245385 - RNA, 12 nt, Homo sapiens
gaagccaugucu

SEQ ID NO: 245386 - RNA, 16 nt, Homo sapiens
gaucagcuaccaggca

SEQ ID NO: 245387 - RNA, 18 nt, Homo sapiens
gggcuguccacuagacca

SEQ ID NO: 245388 - RNA, 23 nt, Homo sapiens
gcaagcugggacuggcaggaaau

SEQ ID NO: 245389 - RNA, 18 nt, Homo sapiens
ugucgggcccuucuugcu

SEQ ID NO: 245390 - RNA, 16 nt, Homo sapiens
uucaggccgcaagcag

SEQ ID NO: 245391 - RNA, 18 nt, Homo sapiens
aauaccguguggcccaag

SEQ ID NO: 245392 - RNA, 14 nt, Homo sapiens
uuacugcauagcag

SEQ ID NO: 245393 - RNA, 22 nt, Homo sapiens
uaaaaacaaaaaaacacaaaaa

SEQ ID NO: 245394 - RNA, 18 nt, Homo sapiens
guggucagcccuaggaua

SEQ ID NO: 245395 - RNA, 19 nt, Homo sapiens
uugagcugcucugcaagag

SEQ ID NO: 245396 - RNA, 21 nt, Homo sapiens
augcuaaaugggaaugcaaag

SEQ ID NO: 245397 - RNA, 13 nt, Homo sapiens
aauuaagcagcuc

SEQ ID NO: 245398 - RNA, 14 nt, Homo sapiens
cccagaguggccca

SEQ ID NO: 245399 - RNA, 15 nt, Homo sapiens
acugccaaccagagc

SEQ ID NO: 245400 - RNA, 15 nt, Homo sapiens
agcaacaugugacaa

SEQ ID NO: 245401 - RNA, 13 nt, Homo sapiens
cgacauugucucc

SEQ ID NO: 245402 - RNA, 22 nt, Homo sapiens
cauacccgccuagcugcuguca

SEQ ID NO: 245403 - RNA, 19 nt, Homo sapiens
ccaggagcugaggauaaag

SEQ ID NO: 245404 - RNA, 13 nt, Homo sapiens
gccacuuucugcc

SEQ ID NO: 245405 - RNA, 17 nt, Homo sapiens
cugccagcaucugcagc

SEQ ID NO: 245406 - RNA, 12 nt, Homo sapiens
ccagcacccaga

SEQ ID NO: 245407 - RNA, 20 nt, Homo sapiens
acugccucucccucuggucc

SEQ ID NO: 245408 - RNA, 13 nt, Homo sapiens
gcgacccaagacc

SEQ ID NO: 245409 - RNA, 21 nt, Homo sapiens
cugacaaguuaaaaaggucua

SEQ ID NO: 245410 - RNA, 17 nt, Homo sapiens
cagccugggcccaucuc

SEQ ID NO: 245411 - RNA, 19 nt, Homo sapiens
ugcaaguucauaggucucc

SEQ ID NO: 245412 - RNA, 20 nt, Homo sapiens
cucacagcaacaugugacaa

SEQ ID NO: 245413 - RNA, 20 nt, Homo sapiens
caggaaagcuguuaggcuca

SEQ ID NO: 245414 - RNA, 15 nt, Homo sapiens
gaccuugggccaaga

SEQ ID NO: 245415 - RNA, 20 nt, Homo sapiens
uacuuauugauuuaaaaaca

SEQ ID NO: 245416 - RNA, 21 nt, Homo sapiens
uugaucagggaccaugaaaag

SEQ ID NO: 245417 - RNA, 23 nt, Homo sapiens
cuuccgucucccccguguucccc

SEQ ID NO: 245418 - RNA, 22 nt, Homo sapiens
cuucccuccucccaugucacug

SEQ ID NO: 245419 - RNA, 18 nt, Homo sapiens
ccaaagagaccagccucc

SEQ ID NO: 245420 - RNA, 15 nt, Homo sapiens
caaaauaguucugca

SEQ ID NO: 245421 - RNA, 22 nt, Homo sapiens
ggccagugggaccccacagagu

SEQ ID NO: 245422 - RNA, 17 nt, Homo sapiens
uugagcugcucugcaag

SEQ ID NO: 245423 - RNA, 20 nt, Homo sapiens
caguaaaaggacagagauua

SEQ ID NO: 245424 - RNA, 19 nt, Homo sapiens
ucccaaagugcugaauuaa

SEQ ID NO: 245425 - RNA, 13 nt, Homo sapiens
gucuccaagacca

SEQ ID NO: 245426 - RNA, 13 nt, Homo sapiens
ggucuccaagacc

SEQ ID NO: 245427 - RNA, 19 nt, Homo sapiens
accugauucucacagcaac

SEQ ID NO: 245428 - RNA, 15 nt, Homo sapiens
agcugggacuggcag

SEQ ID NO: 245429 - RNA, 20 nt, Homo sapiens
ccucaucuuuuuuugguucu

SEQ ID NO: 245430 - RNA, 17 nt, Homo sapiens
aaagcuguuaggcucac

SEQ ID NO: 245431 - RNA, 18 nt, Homo sapiens
uaguaaaauauaaaaaca

SEQ ID NO: 245432 - RNA, 16 nt, Homo sapiens
auggcaggggcaaagg

SEQ ID NO: 245433 - RNA, 22 nt, Homo sapiens
gccaauaccguguggcccaaga

SEQ ID NO: 245434 - RNA, 13 nt, Homo sapiens
uuaagcagcucac

SEQ ID NO: 245435 - RNA, 15 nt, Homo sapiens
uaggucuccaagacc

SEQ ID NO: 245436 - RNA, 22 nt, Homo sapiens
agcagaccacacagaagggugu

SEQ ID NO: 245437 - RNA, 14 nt, Homo sapiens
ccuaaaaacuggca

SEQ ID NO: 245438 - RNA, 20 nt, Homo sapiens
accagcaggauggcaggggc

SEQ ID NO: 245439 - RNA, 22 nt, Homo sapiens
aaccaagaggcugguuuuggca

SEQ ID NO: 245440 - RNA, 13 nt, Homo sapiens
cccuccccaugca

SEQ ID NO: 245441 - RNA, 11 nt, Homo sapiens
cagcaaaggga

SEQ ID NO: 245442 - RNA, 21 nt, Homo sapiens
caagacccaggaggcccagcu

SEQ ID NO: 245443 - RNA, 14 nt, Homo sapiens
ggaggaugugggca

SEQ ID NO: 245444 - RNA, 12 nt, Homo sapiens
uuccgucucccc

SEQ ID NO: 245445 - RNA, 22 nt, Homo sapiens
caauaccguguggcccaagacc

SEQ ID NO: 245446 - RNA, 16 nt, Homo sapiens
gaggcccagcugcuca

SEQ ID NO: 245447 - RNA, 16 nt, Homo sapiens
gcauagcagaccacac

SEQ ID NO: 245448 - RNA, 23 nt, Homo sapiens
cagaguuggggagauaaaggaac

SEQ ID NO: 245449 - RNA, 12 nt, Homo sapiens
gaguggcccaag

SEQ ID NO: 245450 - RNA, 13 nt, Homo sapiens
ccgcaagcagcug

SEQ ID NO: 245451 - RNA, 15 nt, Homo sapiens
cuccaagaccacccu

SEQ ID NO: 245452 - RNA, 20 nt, Homo sapiens
uccaagggcuuagagaugaa

SEQ ID NO: 245453 - RNA, 13 nt, Homo sapiens
ugccagcaucugc

SEQ ID NO: 245454 - RNA, 24 nt, Homo sapiens
agccacuuucugccagcaucugca

SEQ ID NO: 245455 - RNA, 23 nt, Homo sapiens
gggcccaucucccugcuuugguc

SEQ ID NO: 245456 - RNA, 21 nt, Homo sapiens
aagggugugggccaccagaga

SEQ ID NO: 245457 - RNA, 18 nt, Homo sapiens
cgccuucccuccugcuuu

SEQ ID NO: 245458 - RNA, 18 nt, Homo sapiens
agaagaccuugggccaag

SEQ ID NO: 245459 - RNA, 15 nt, Homo sapiens
auccgucagaucucu

SEQ ID NO: 245460 - RNA, 21 nt, Homo sapiens
ccagaguuggacccgacccca

SEQ ID NO: 245461 - RNA, 22 nt, Homo sapiens
ccaauaccguguggcccaagac

SEQ ID NO: 245462 - RNA, 14 nt, Homo sapiens
cuccagcacccaga

SEQ ID NO: 245463 - RNA, 22 nt, Homo sapiens
uugucugucuccagcacccaga

SEQ ID NO: 245464 - RNA, 18 nt, Homo sapiens
ugggaccccacagaguug

SEQ ID NO: 245465 - RNA, 13 nt, Homo sapiens
auaagcaggacag

SEQ ID NO: 245466 - RNA, 19 nt, Homo sapiens
guugaagccaugucuacau

SEQ ID NO: 245467 - RNA, 15 nt, Homo sapiens
agggcagacagcaga

SEQ ID NO: 245468 - RNA, 13 nt, Homo sapiens
cccugugccagac

SEQ ID NO: 245469 - RNA, 17 nt, Homo sapiens
ccacuuucugccagcau

SEQ ID NO: 245470 - RNA, 11 nt, Homo sapiens
ggcccaagacu

SEQ ID NO: 245471 - RNA, 20 nt, Homo sapiens
gggaugcagggggaggcagc

SEQ ID NO: 245472 - RNA, 21 nt, Homo sapiens
ccgaccacggggccgacauug

SEQ ID NO: 245473 - RNA, 22 nt, Homo sapiens
gaucagcuaccaggcaggauau

SEQ ID NO: 245474 - RNA, 18 nt, Homo sapiens
accguguggcccaagacc

SEQ ID NO: 245475 - RNA, 16 nt, Homo sapiens
cagccacuuucugcca

SEQ ID NO: 245476 - RNA, 14 nt, Homo sapiens
ucccugugccagac

SEQ ID NO: 245477 - RNA, 15 nt, Homo sapiens
ugugggccaccagag

SEQ ID NO: 245478 - RNA, 14 nt, Homo sapiens
gcuuccaucugccc

SEQ ID NO: 245479 - RNA, 15 nt, Homo sapiens
acaugaaaguccuca

SEQ ID NO: 245480 - RNA, 21 nt, Poliovirus
ugggucauacuguuguagggg

SEQ ID NO: 245481 - RNA, 22 nt, Poliovirus
uggauugggucauacuguugua

SEQ ID NO: 245482 - RNA, 21 nt, Poliovirus
gucgaauuggauugggucaua

SEQ ID NO: 245483 - RNA, 22 nt, Poliovirus
guagggguaaauuuuucuuuaa

SEQ ID NO: 245484 - RNA, 14 nt, Poliovirus
gggucauacuguug

SEQ ID NO: 245485 - RNA, 22 nt, Poliovirus
gaauuggauugggucauacugu

SEQ ID NO: 245486 - RNA, 17 nt, Poliovirus
ccucagucgaauuggau

SEQ ID NO: 245487 - RNA, 18 nt, Poliovirus
ccucagucgaauuggauu

SEQ ID NO: 245488 - RNA, 14 nt, Poliovirus
ugggucauacuguu

SEQ ID NO: 245489 - RNA, 22 nt, Poliovirus
aauuggauugggucauacuguu

SEQ ID NO: 245490 - RNA, 11 nt, Poliovirus
uuuucuuuaau

SEQ ID NO: 245491 - RNA, 13 nt, Poliovirus
guuguagggguaa

SEQ ID NO: 245492 - RNA, 19 nt, Poliovirus
ucauacuguuguaggggua

SEQ ID NO: 245493 - RNA, 17 nt, Poliovirus
gauugggucauacuguu

SEQ ID NO: 245494 - RNA, 14 nt, Poliovirus
uuguagggguaaau

SEQ ID NO: 245495 - RNA, 12 nt, Poliovirus
ucauacuguugu

SEQ ID NO: 245496 - RNA, 14 nt, Poliovirus
uuggauugggucau

SEQ ID NO: 245497 - RNA, 15 nt, Poliovirus
auuuuucuuuaauuc

SEQ ID NO: 245498 - RNA, 13 nt, Poliovirus
accucagucgaau

SEQ ID NO: 245499 - RNA, 21 nt, Poliovirus
ggucauacuguuguaggggua

SEQ ID NO: 245500 - RNA, 13 nt, Poliovirus
uacuguuguaggg

SEQ ID NO: 245501 - RNA, 15 nt, Poliovirus
uacuguuguaggggu

SEQ ID NO: 245502 - RNA, 19 nt, Poliovirus
uaccucagucgaauuggau

SEQ ID NO: 245503 - RNA, 11 nt, Poliovirus
auacuguugua

SEQ ID NO: 245504 - RNA, 17 nt, Poliovirus
auacuguuguaggggua

SEQ ID NO: 245505 - RNA, 13 nt, Poliovirus
cuguuguaggggu

SEQ ID NO: 245506 - RNA, 15 nt, Poliovirus
cucagucgaauugga

SEQ ID NO: 245507 - RNA, 13 nt, Poliovirus
gggucauacuguu

SEQ ID NO: 245508 - RNA, 15 nt, Poliovirus
gggguaaauuuuucu

SEQ ID NO: 245509 - RNA, 18 nt, Poliovirus
uaccucagucgaauugga

SEQ ID NO: 245510 - RNA, 21 nt, Poliovirus
uuggauugggucauacuguug

SEQ ID NO: 245511 - RNA, 18 nt, Poliovirus
uggauugggucauacugu

SEQ ID NO: 245512 - RNA, 19 nt, Poliovirus
uggauugggucauacuguu

SEQ ID NO: 245513 - RNA, 18 nt, Puumala virus
uuaaugggcccaaacaug

SEQ ID NO: 245514 - RNA, 17 nt, Puumala virus
uuauauauucagggauc

SEQ ID NO: 245515 - RNA, 13 nt, Puumala virus
uuauuucauauca

SEQ ID NO: 245516 - RNA, 20 nt, Puumala virus
uguuaacauguagacauauu

SEQ ID NO: 245517 - RNA, 17 nt, Puumala virus
ucuuuucucggagcaua

SEQ ID NO: 245518 - RNA, 17 nt, Puumala virus
uuucucggagcauacua

SEQ ID NO: 245519 - RNA, 20 nt, Puumala virus
uuucucggagcauacuacua

SEQ ID NO: 245520 - RNA, 14 nt, Puumala virus
aaucaauacaggga

SEQ ID NO: 245521 - RNA, 13 nt, Puumala virus
uaauuaacaaacu

SEQ ID NO: 245522 - RNA, 17 nt, Puumala virus
uaauuaacaaacuaauc

SEQ ID NO: 245523 - RNA, 19 nt, Puumala virus
uaauuaacaaacuaaucag

SEQ ID NO: 245524 - RNA, 13 nt, Puumala virus
uaauaacaaucaa

SEQ ID NO: 245525 - RNA, 13 nt, Puumala virus
uaacaaacuaauc

SEQ ID NO: 245526 - RNA, 14 nt, Puumala virus
uaacaaacuaauca

SEQ ID NO: 245527 - RNA, 15 nt, Puumala virus
uaacaaacuaaucag

SEQ ID NO: 245528 - RNA, 20 nt, Puumala virus
uaaacuagaaauguagcauu

SEQ ID NO: 245529 - RNA, 22 nt, Puumala virus
guagcauuauaaguacauauca

SEQ ID NO: 245530 - RNA, 13 nt, Puumala virus
ucaacuaauaaca

SEQ ID NO: 245531 - RNA, 13 nt, Puumala virus
uauuucauaucau

SEQ ID NO: 245532 - RNA, 20 nt, Puumala virus
uaugacuaccuauaugccau

SEQ ID NO: 245533 - RNA, 18 nt, Puumala virus
uaucaacuaauaacaauc

SEQ ID NO: 245534 - RNA, 19 nt, Puumala virus
uaucaacuaauaacaauca

SEQ ID NO: 245535 - RNA, 17 nt, Puumala virus
uagaaauguagcauuau

SEQ ID NO: 245536 - RNA, 18 nt, Puumala virus
uauacuucuuauugcucu

SEQ ID NO: 245537 - RNA, 16 nt, Puumala virus
ucuuauugcucuuuuc

SEQ ID NO: 245538 - RNA, 13 nt, Puumala virus
cugauuaugccug

SEQ ID NO: 245539 - RNA, 15 nt, Puumala virus
ccucauacugauuau

SEQ ID NO: 245540 - RNA, 12 nt, Puumala virus
cccaaacaugug

SEQ ID NO: 245541 - RNA, 13 nt, Puumala virus
cccaaacauguga

SEQ ID NO: 245542 - RNA, 14 nt, Puumala virus
cauuaauuaacaaa

SEQ ID NO: 245543 - RNA, 17 nt, Puumala virus
cauuaauuaacaaacua

SEQ ID NO: 245544 - RNA, 20 nt, Puumala virus
cauuaauuaacaaacuaauc

SEQ ID NO: 245545 - RNA, 13 nt, Puumala virus
cauaugacuaccu

SEQ ID NO: 245546 - RNA, 13 nt, Puumala virus
cauaucaacuaau

SEQ ID NO: 245547 - RNA, 14 nt, Puumala virus
cauaucaacuaaua

SEQ ID NO: 245548 - RNA, 13 nt, Puumala virus
caguuaucagggu

SEQ ID NO: 245549 - RNA, 14 nt, Puumala virus
caguuaugaauaua

SEQ ID NO: 245550 - RNA, 13 nt, Puumala virus
cagugugcuuaua

SEQ ID NO: 245551 - RNA, 22 nt, Puumala virus
cagggaucacuaauggcaguua

SEQ ID NO: 245552 - RNA, 20 nt, Puumala virus
cagucaccauaugacuaccu

SEQ ID NO: 245553 - RNA, 14 nt, Puumala virus
ggcccaaacaugug

SEQ ID NO: 245554 - RNA, 21 nt, Puumala virus
gcuaguuguuuacuaaucaaa

SEQ ID NO: 245555 - RNA, 13 nt, Puumala virus
gcacuuuacuaau

SEQ ID NO: 245556 - RNA, 13 nt, Puumala virus
gcaguuaugaaua

SEQ ID NO: 245557 - RNA, 13 nt, Puumala virus
gcccaaacaugug

SEQ ID NO: 245558 - RNA, 20 nt, Puumala virus
gaaauguagcauuauaagua

SEQ ID NO: 245559 - RNA, 23 nt, Puumala virus
gaguuguuaacauguagacauau

SEQ ID NO: 245560 - RNA, 13 nt, Puumala virus
aaauuauacgggu

SEQ ID NO: 245561 - RNA, 18 nt, Puumala virus
auacuucuuauugcucuu

SEQ ID NO: 245562 - RNA, 15 nt, Puumala virus
auaaguacauaucaa

SEQ ID NO: 245563 - RNA, 15 nt, Puumala virus
auaugacuaccuaua

SEQ ID NO: 245564 - RNA, 14 nt, Puumala virus
agggaucacuaaug

SEQ ID NO: 245565 - RNA, 16 nt, Puumala virus
caaucaauacagggau

SEQ ID NO: 245566 - RNA, 20 nt, Puumala virus
caauacagggaucacuaaug

SEQ ID NO: 245567 - RNA, 22 nt, Puumala virus
auuauacggguuuauaguugca

SEQ ID NO: 245568 - RNA, 17 nt, Puumala virus
auuauauauucagggau

SEQ ID NO: 245569 - RNA, 19 nt, Puumala virus
auuaccucauacugauuau

SEQ ID NO: 245570 - RNA, 17 nt, Puumala virus
auuacauaugcacugau

SEQ ID NO: 245571 - RNA, 20 nt, Puumala virus
auuacauaugcacugauuau

SEQ ID NO: 245572 - RNA, 17 nt, Puumala virus
auugcucuuuucucgga

SEQ ID NO: 245573 - RNA, 22 nt, Puumala virus
augugcuaguuguuuacuaauc

SEQ ID NO: 245574 - RNA, 20 nt, Puumala virus
auuaacaaacuaaucagggu

SEQ ID NO: 245575 - RNA, 21 nt, Puumala virus
auuaacaaacuaaucaggguu

SEQ ID NO: 245576 - RNA, 20 nt, Puumala virus
auuaauuaacaaacuaauca

SEQ ID NO: 245577 - RNA, 9 nt, Puumala virus
aacauguag

SEQ ID NO: 245578 - RNA, 16 nt, Puumala virus
aacuagaaauguagca

SEQ ID NO: 245579 - RNA, 18 nt, Puumala virus
aauauauuaagacauuau

SEQ ID NO: 245580 - RNA, 11 nt, Puumala virus
aauuagcauua

SEQ ID NO: 245581 - RNA, 16 nt, Puumala virus
aauacagggaucacua

SEQ ID NO: 245582 - RNA, 15 nt, Puumala virus
agaaauguagcauua

SEQ ID NO: 245583 - RNA, 16 nt, Puumala virus
uaccucagugugcuua

SEQ ID NO: 245584 - RNA, 23 nt, Puumala virus
uacauaucaacuaauaacaauca

SEQ ID NO: 245585 - RNA, 14 nt, Puumala virus
uacauuaccucaua

SEQ ID NO: 245586 - RNA, 22 nt, Puumala virus
uacuagugcagucaccauauga

SEQ ID NO: 245587 - RNA, 20 nt, Puumala virus
uauacuucuuauugcucuuu

SEQ ID NO: 245588 - RNA, 14 nt, Puumala virus
uagcacuuuacuaa

SEQ ID NO: 245589 - RNA, 18 nt, Puumala virus
uaacaaucaauacaggga

SEQ ID NO: 245590 - RNA, 18 nt, Puumala virus
guucuugcggagucuacu

SEQ ID NO: 245591 - RNA, 21 nt, Puumala virus
guucuugcggagucuacuacu

SEQ ID NO: 245592 - RNA, 19 nt, Puumala virus
ggguuuauaguugcaguua

SEQ ID NO: 245593 - RNA, 18 nt, Puumala virus
gguuuauaguugcaguua

SEQ ID NO: 245594 - RNA, 21 nt, Puumala virus
guagugaguuguuaacaugua

SEQ ID NO: 245595 - RNA, 16 nt, Puumala virus
gaguuguuaacaugua

SEQ ID NO: 245596 - RNA, 20 nt, Puumala virus
gauuuacuagugcagucacc

SEQ ID NO: 245597 - RNA, 19 nt, Puumala virus
cuugcggagucuacuacua

SEQ ID NO: 245598 - RNA, 20 nt, Puumala virus
cuuuacuaauuacauuaccu

SEQ ID NO: 245599 - RNA, 19 nt, Puumala virus
cuuuucucggagcauacua

SEQ ID NO: 245600 - RNA, 22 nt, Puumala virus
cuuuucucggagcauacuacua

SEQ ID NO: 245601 - RNA, 17 nt, Puumala virus
cucggagcauacuacua

SEQ ID NO: 245602 - RNA, 16 nt, Puumala virus
cuaauaacaaucaaua

SEQ ID NO: 245603 - RNA, 19 nt, Puumala virus
accuauaugccauuauuuc

SEQ ID NO: 245604 - RNA, 17 nt, Puumala virus
acuaauggcaguuauga

SEQ ID NO: 245605 - RNA, 16 nt, Puumala virus
acuucuuauugcucuu

SEQ ID NO: 245606 - RNA, 23 nt, Puumala virus
acauauuauauauucagggauca

SEQ ID NO: 245607 - RNA, 16 nt, Puumala virus
acaaucaauacaggga

SEQ ID NO: 245608 - RNA, 24 nt, Puumala virus
acuuuuuuucucaaaacuuauuca

SEQ ID NO: 245609 - RNA, 21 nt, Puumala virus
agcauuauaaguacauaucaa

SEQ ID NO: 245610 - RNA, 14 nt, Puumala virus
aguuaucaggguca

SEQ ID NO: 245611 - RNA, 16 nt, Puumala virus
aguuguuuacuaauca

SEQ ID NO: 245612 - RNA, 15 nt, Puumala virus
aguuguuaacaugua

SEQ ID NO: 245613 - RNA, 14 nt, Puumala virus
auaaguacauauca

SEQ ID NO: 245614 - RNA, 17 nt, Puumala virus
auaucuaaucauuauau

SEQ ID NO: 245615 - RNA, 14 nt, Puumala virus
aucaauacagggau

SEQ ID NO: 245616 - RNA, 15 nt, Puumala virus
aucaauacagggauc

SEQ ID NO: 245617 - RNA, 15 nt, Puumala virus
caaucaauacaggga

SEQ ID NO: 245618 - RNA, 22 nt, Puumala virus
caaucaauacagggaucacuaa

SEQ ID NO: 245619 - RNA, 22 nt, Puumala virus
auuauagauguagugaguuguu

SEQ ID NO: 245620 - RNA, 23 nt, Puumala virus
auuauagauguagugaguuguua

SEQ ID NO: 245621 - RNA, 18 nt, Puumala virus
auuauauauucagggauc

SEQ ID NO: 245622 - RNA, 22 nt, Puumala virus
auuaacaaacuaaucaggguua

SEQ ID NO: 245623 - RNA, 16 nt, Puumala virus
auguagugaguuguua

SEQ ID NO: 245624 - RNA, 22 nt, Puumala virus
auguagcauuauaaguacauau

SEQ ID NO: 245625 - RNA, 14 nt, Puumala virus
auguauauuaucuu

SEQ ID NO: 245626 - RNA, 15 nt, Puumala virus
aucuuuaugcuauau

SEQ ID NO: 245627 - RNA, 14 nt, Puumala virus
cauaucauguauau

SEQ ID NO: 245628 - RNA, 14 nt, Puumala virus
cauaugacuaccua

SEQ ID NO: 245629 - RNA, 18 nt, Puumala virus
uucuugcggagucuacua

SEQ ID NO: 245630 - RNA, 16 nt, Puumala virus
uuauaaguacauauca

SEQ ID NO: 245631 - RNA, 14 nt, Puumala virus
uuauuucauaucau

SEQ ID NO: 245632 - RNA, 22 nt, Puumala virus
uuaagacauuauuuuauaauca

SEQ ID NO: 245633 - RNA, 19 nt, Puumala virus
uuaauuaacaaacuaauca

SEQ ID NO: 245634 - RNA, 14 nt, Puumala virus
uuaccucauacuga

SEQ ID NO: 245635 - RNA, 19 nt, Puumala virus
uuacauuaccucauacuga

SEQ ID NO: 245636 - RNA, 23 nt, Puumala virus
ugugcuaguuguuuacuaaucaa

SEQ ID NO: 245637 - RNA, 21 nt, Puumala virus
ugcuaguuguuuacuaaucaa

SEQ ID NO: 245638 - RNA, 14 nt, Puumala virus
ucacuaauggcagu

SEQ ID NO: 245639 - RNA, 18 nt, Puumala virus
ugacuaccuauaugccau

SEQ ID NO: 245640 - RNA, 20 nt, Puumala virus
uuuuucucaaaacuuauuca

SEQ ID NO: 245641 - RNA, 17 nt, Puumala virus
gauuauagauguaguga

SEQ ID NO: 245642 - RNA, 13 nt, Puumala virus
aaauguagcauua

SEQ ID NO: 245643 - RNA, 13 nt, Puumala virus
ggagcauacuacu

SEQ ID NO: 245644 - RNA, 14 nt, Puumala virus
ccuauaugccauua

SEQ ID NO: 245645 - RNA, 15 nt, Puumala virus
cauuauuucauauca

SEQ ID NO: 245646 - RNA, 14 nt, Puumala virus
cauguagacauauu

SEQ ID NO: 245647 - RNA, 15 nt, Puumala virus
cauauuauauauuca

SEQ ID NO: 245648 - RNA, 19 nt, Puumala virus
cauauuauauauucaggga

SEQ ID NO: 245649 - RNA, 14 nt, Puumala virus
cuucuuauugcucu

SEQ ID NO: 245650 - RNA, 16 nt, Puumala virus
cuucuuauugcucuuu

SEQ ID NO: 245651 - RNA, 22 nt, Puumala virus
cuauauucgauuuacuagugca

SEQ ID NO: 245652 - RNA, 23 nt, Puumala virus
cuagugcagucaccauaugacua

SEQ ID NO: 245653 - RNA, 15 nt, Puumala virus
cuaauuacauuaccu

SEQ ID NO: 245654 - RNA, 17 nt, Puumala virus
ucauuaauuaacaaacu

SEQ ID NO: 245655 - RNA, 22 nt, Puumala virus
ucauuaauuaacaaacuaauca

SEQ ID NO: 245656 - RNA, 19 nt, Puumala virus
ucauuaucuaauuagcauu

SEQ ID NO: 245657 - RNA, 22 nt, Puumala virus
uauaaguacauaucaacuaaua

SEQ ID NO: 245658 - RNA, 12 nt, Puumala virus
ucaauacaggga

SEQ ID NO: 245659 - RNA, 14 nt, Puumala virus
ucaauacagggauc

SEQ ID NO: 245660 - RNA, 14 nt, Puumala virus
ucuuuaugcuauau

SEQ ID NO: 245661 - RNA, 15 nt, Puumala virus
guuguuuacuaauca

SEQ ID NO: 245662 - RNA, 16 nt, Puumala virus
uaacauguagacauau

SEQ ID NO: 245663 - RNA, 19 nt, Puumala virus
uacuaaucuuuaugcuaua

SEQ ID NO: 245664 - RNA, 10 nt, Puumala virus
uacuaaucaa

SEQ ID NO: 245665 - RNA, 13 nt, Puumala virus
uacuaaucaaauu

SEQ ID NO: 245666 - RNA, 19 nt, Puumala virus
uaaugggcccaaacaugug

SEQ ID NO: 245667 - RNA, 19 nt, Puumala virus
uauaaaaaaaacuagcacu

SEQ ID NO: 245668 - RNA, 20 nt, Puumala virus
uagugaguuguuaacaugua

SEQ ID NO: 245669 - RNA, 18 nt, Puumala virus
uagcacuuuacuaauuac

SEQ ID NO: 245670 - RNA, 15 nt, Puumala virus
aacauguagacauau

SEQ ID NO: 245671 - RNA, 17 nt, Puumala virus
aauuaacaaacuaauca

SEQ ID NO: 245672 - RNA, 22 nt, Puumala virus
aaucauuaucuaauuagcauua

SEQ ID NO: 245673 - RNA, 12 nt, Puumala virus
aauacagggauc

SEQ ID NO: 245674 - RNA, 16 nt, Puumala virus
aaguacauaucaacua

SEQ ID NO: 245675 - RNA, 21 nt, Puumala virus
uguagacauauuauauauuca

SEQ ID NO: 245676 - RNA, 15 nt, Puumala virus
uuaucuaauuagcau

SEQ ID NO: 245677 - RNA, 15 nt, Puumala virus
uucucggagcauacu

SEQ ID NO: 245678 - RNA, 17 nt, Puumala virus
uucuaccucagugugcu

SEQ ID NO: 245679 - RNA, 19 nt, Puumala virus
uucuaccucagugugcuua

SEQ ID NO: 245680 - RNA, 14 nt, Puumala virus
uucagggaucauau

SEQ ID NO: 245681 - RNA, 19 nt, Puumala virus
uucagggaucauaugugcu

SEQ ID NO: 245682 - RNA, 13 nt, Puumala virus
acuuuacuaauua

SEQ ID NO: 245683 - RNA, 14 nt, Puumala virus
accucagugugcuu

SEQ ID NO: 245684 - RNA, 17 nt, Puumala virus
acggguuuauaguugca

SEQ ID NO: 245685 - RNA, 14 nt, Puumala virus
aaauguagcauuau

SEQ ID NO: 245686 - RNA, 19 nt, Puumala virus
aaucauuaucuaauuagca

SEQ ID NO: 245687 - RNA, 17 nt, Puumala virus
aaucaauacagggauca

SEQ ID NO: 245688 - RNA, 17 nt, Puumala virus
acaaacuaaucaggguu

SEQ ID NO: 245689 - RNA, 23 nt, Puumala virus
cacuuuuuuucucaaaacuuauu

SEQ ID NO: 245690 - RNA, 15 nt, Puumala virus
caaacuaaucagggu

SEQ ID NO: 245691 - RNA, 19 nt, Puumala virus
auuaucuaauuagcauuau

SEQ ID NO: 245692 - RNA, 20 nt, Puumala virus
auuaucuaauuagcauuaug

SEQ ID NO: 245693 - RNA, 20 nt, Puumala virus
agcauuauaaguacauauca

SEQ ID NO: 245694 - RNA, 22 nt, Puumala virus
auaacaaucaauacagggauca

SEQ ID NO: 245695 - RNA, 18 nt, Puumala virus
aguuacuaaucuuuaugc

SEQ ID NO: 245696 - RNA, 14 nt, Puumala virus
aucuuuaugcuaua

SEQ ID NO: 245697 - RNA, 16 nt, Puumala virus
augccuggacuuuugu

SEQ ID NO: 245698 - RNA, 13 nt, Puumala virus
auauucagggauc

SEQ ID NO: 245699 - RNA, 19 nt, Puumala virus
auauuauauauucagggau

SEQ ID NO: 245700 - RNA, 19 nt, Puumala virus
aucauaugugcuaguuguu

SEQ ID NO: 245701 - RNA, 13 nt, Puumala virus
auauauucaggga

SEQ ID NO: 245702 - RNA, 16 nt, Puumala virus
auauauuaagacauua

SEQ ID NO: 245703 - RNA, 18 nt, Puumala virus
auauaaaaaaaacuagca

SEQ ID NO: 245704 - RNA, 17 nt, Puumala virus
auaaucauuaucuaauu

SEQ ID NO: 245705 - RNA, 16 nt, Puumala virus
ccauaugacuaccuau

SEQ ID NO: 245706 - RNA, 18 nt, Puumala virus
cauuauaaguacauauca

SEQ ID NO: 245707 - RNA, 22 nt, Puumala virus
cauuauaaguacauaucaacua

SEQ ID NO: 245708 - RNA, 20 nt, Puumala virus
cauauuauauauucagggau

SEQ ID NO: 245709 - RNA, 15 nt, Puumala virus
cauguagacauauua

SEQ ID NO: 245710 - RNA, 10 nt, Puumala virus
caaacuaauc

SEQ ID NO: 245711 - RNA, 16 nt, Puumala virus
auucauuucuaccuca

SEQ ID NO: 245712 - RNA, 18 nt, Puumala virus
acuagaaauguagcauua

SEQ ID NO: 245713 - RNA, 22 nt, Puumala virus
acuagcacuuuacuaauuacau

SEQ ID NO: 245714 - RNA, 17 nt, Puumala virus
agaaauguagcauuaua

SEQ ID NO: 245715 - RNA, 23 nt, Puumala virus
aucacuuuuuuucucaaaacuua

SEQ ID NO: 245716 - RNA, 15 nt, Puumala virus
aucuaauuagcauua

SEQ ID NO: 245717 - RNA, 23 nt, Puumala virus
auauucagggaucauaugugcua

SEQ ID NO: 245718 - RNA, 16 nt, Puumala virus
auauauucagggauca

SEQ ID NO: 245719 - RNA, 17 nt, Puumala virus
aucaacuaauaacaauc

SEQ ID NO: 245720 - RNA, 19 nt, Puumala virus
aucaacuaauaacaaucaa

SEQ ID NO: 245721 - RNA, 17 nt, Puumala virus
auacuucuuauugcucu

SEQ ID NO: 245722 - RNA, 14 nt, Puumala virus
aguugcaguuauca

SEQ ID NO: 245723 - RNA, 19 nt, Puumala virus
aguugcaguuaucaggguc

SEQ ID NO: 245724 - RNA, 20 nt, Puumala virus
gacuaccuauaugccauuau

SEQ ID NO: 245725 - RNA, 14 nt, Puumala virus
gcaguuaucagggu

SEQ ID NO: 245726 - RNA, 16 nt, Puumala virus
cuuaauuacauaugca

SEQ ID NO: 245727 - RNA, 20 nt, Puumala virus
cuuaauuacauaugcacuga

SEQ ID NO: 245728 - RNA, 18 nt, Puumala virus
cuaauuacauuaccucau

SEQ ID NO: 245729 - RNA, 21 nt, Puumala virus
cuagugcagucaccauaugac

SEQ ID NO: 245730 - RNA, 18 nt, Puumala virus
cuaguuguuuacuaauca

SEQ ID NO: 245731 - RNA, 14 nt, Puumala virus
cuauaugccauuau

SEQ ID NO: 245732 - RNA, 20 nt, Puumala virus
gugcuaguuguuuacuaauc

SEQ ID NO: 245733 - RNA, 14 nt, Puumala virus
gcccaaacauguga

SEQ ID NO: 245734 - RNA, 20 nt, Puumala virus
uaaguacauaucaacuaaua

SEQ ID NO: 245735 - RNA, 21 nt, Puumala virus
uaagacauuauuuuauaauca

SEQ ID NO: 245736 - RNA, 19 nt, Puumala virus
uaauuagcauuauguaggu

SEQ ID NO: 245737 - RNA, 18 nt, Puumala virus
uaauuacauuaccucaua

SEQ ID NO: 245738 - RNA, 15 nt, Puumala virus
uaaucuuuaugcuau

SEQ ID NO: 245739 - RNA, 18 nt, Puumala virus
uaaucauuaucuaauuag

SEQ ID NO: 245740 - RNA, 23 nt, Puumala virus
uaauaacaaucaauacagggauc

SEQ ID NO: 245741 - RNA, 15 nt, Puumala virus
uauugcucuuuucuc

SEQ ID NO: 245742 - RNA, 15 nt, Puumala virus
uauucgauuuacuag

SEQ ID NO: 245743 - RNA, 22 nt, Puumala virus
uauucagggaucauaugugcua

SEQ ID NO: 245744 - RNA, 15 nt, Puumala virus
ucaaauuauacgggu

SEQ ID NO: 245745 - RNA, 18 nt, Puumala virus
ucaacuaauaacaaucaa

SEQ ID NO: 245746 - RNA, 14 nt, Puumala virus
uaugacuaccuaua

SEQ ID NO: 245747 - RNA, 12 nt, Puumala virus
uaucaacuaaua

SEQ ID NO: 245748 - RNA, 17 nt, Puumala virus
uagcauuauaaguacau

SEQ ID NO: 245749 - RNA, 21 nt, Puumala virus
uagcauuauaaguacauauca

SEQ ID NO: 245750 - RNA, 16 nt, Puumala virus
ugggcccaaacaugug

SEQ ID NO: 245751 - RNA, 20 nt, Puumala virus
uuaaacuagaaauguagcau

SEQ ID NO: 245752 - RNA, 16 nt, Puumala virus
uuaacaaacuaaucag

SEQ ID NO: 245753 - RNA, 14 nt, Puumala virus
uuuauaguugcagu

SEQ ID NO: 245754 - RNA, 19 nt, Puumala virus
uuucuaccucagugugcuu

SEQ ID NO: 245755 - RNA, 20 nt, Puumala virus
uucagggaucauaugugcua

SEQ ID NO: 245756 - RNA, 16 nt, Puumala virus
uugcaguuaucagggu

SEQ ID NO: 245757 - RNA, 18 nt, Puumala virus
ugccauuauuucauauca

SEQ ID NO: 245758 - RNA, 17 nt, Puumala virus
ugaguuguuaacaugua

SEQ ID NO: 245759 - RNA, 18 nt, Puumala virus
ugauuauagauguaguga

SEQ ID NO: 245760 - RNA, 18 nt, Puumala virus
ugaauauauuaagacauu

SEQ ID NO: 245761 - RNA, 18 nt, Puumala virus
ucauuaucuaauuagcau

SEQ ID NO: 245762 - RNA, 12 nt, Puumala virus
ucauaugugcua

SEQ ID NO: 245763 - RNA, 15 nt, Puumala virus
ucuaauuagcauuau

SEQ ID NO: 245764 - RNA, 17 nt, Puumala virus
cuaauuacauuaccuca

SEQ ID NO: 245765 - RNA, 19 nt, Puumala virus
ccuauaugccauuauuuca

SEQ ID NO: 245766 - RNA, 14 nt, Red clover mottle virus
auauuagcuuuaaa

SEQ ID NO: 245767 - RNA, 23 nt, Red clover mottle virus
aguacuauugugguauugcuuua

SEQ ID NO: 245768 - RNA, 17 nt, Red clover mottle virus
auaauauuagcuuuaaa

SEQ ID NO: 245769 - RNA, 22 nt, Red clover mottle virus
uucgugugauggcuuacuuuug

SEQ ID NO: 245770 - RNA, 16 nt, Red clover mottle virus
uuagcuuuaaaguuau

SEQ ID NO: 245771 - RNA, 22 nt, Red clover mottle virus
uuaauauaguacuauuguggua

SEQ ID NO: 245772 - RNA, 15 nt, Red clover mottle virus
aauauuagcuuuaaa

SEQ ID NO: 245773 - RNA, 20 nt, Red clover mottle virus
uugugauaauauuagcuuua

SEQ ID NO: 245774 - RNA, 12 nt, Red clover mottle virus
uaguugcauauu

SEQ ID NO: 245775 - RNA, 14 nt, Red clover mottle virus
uaauauuagcuuua

SEQ ID NO: 245776 - RNA, 23 nt, Red clover mottle virus
uauuuuaauauaguacuauugug

SEQ ID NO: 245777 - RNA, 20 nt, Red clover mottle virus
ucauuuucuuucuugcuuga

SEQ ID NO: 245778 - RNA, 16 nt, Red clover mottle virus
gcuugaguguguuauu

SEQ ID NO: 245779 - RNA, 23 nt, Red clover mottle virus
ugauaauauuagcuuuaaaguua

SEQ ID NO: 245780 - RNA, 12 nt, Red clover mottle virus
uuucgugugaug

SEQ ID NO: 245781 - RNA, 18 nt, Red clover mottle virus
uuuacaaauuugugauaa

SEQ ID NO: 245782 - RNA, 19 nt, Red clover mottle virus
uuuacaaauuugugauaau

SEQ ID NO: 245783 - RNA, 18 nt, Red clover mottle virus
uugugauuacuuuguaug

SEQ ID NO: 245784 - RNA, 15 nt, Red clover mottle virus
uugcuuuaaaguuau

SEQ ID NO: 245785 - RNA, 17 nt, Red clover mottle virus
uuacaaauuugugauaa

SEQ ID NO: 245786 - RNA, 14 nt, Red clover mottle virus
ugugauuacuuugu

SEQ ID NO: 245787 - RNA, 22 nt, Red clover mottle virus
ugugauaauauuagcuuuaaag

SEQ ID NO: 245788 - RNA, 20 nt, Red clover mottle virus
uauugugguauugcuuuaaa

SEQ ID NO: 245789 - RNA, 20 nt, Red clover mottle virus
uauuuuaauauaguacuauu

SEQ ID NO: 245790 - RNA, 15 nt, Red clover mottle virus
uaauauuagcuuuaa

SEQ ID NO: 245791 - RNA, 16 nt, Red clover mottle virus
uacaaauuugugauaa

SEQ ID NO: 245792 - RNA, 22 nt, Red clover mottle virus
uacuauugugguauugcuuuaa

SEQ ID NO: 245793 - RNA, 19 nt, Red clover mottle virus
cuauugugguauugcuuua

SEQ ID NO: 245794 - RNA, 13 nt, Red clover mottle virus
caaauuugugaua

SEQ ID NO: 245795 - RNA, 21 nt, Red clover mottle virus
uuuuuacaaauuugugauaau

SEQ ID NO: 245796 - RNA, 23 nt, Red clover mottle virus
uuugugauaauauuagcuuuaaa

SEQ ID NO: 245797 - RNA, 19 nt, Red clover mottle virus
ucuugcuugaguguguuau

SEQ ID NO: 245798 - RNA, 15 nt, Red clover mottle virus
auaauauuagcuuua

SEQ ID NO: 245799 - RNA, 14 nt, Red clover mottle virus
cuuuugugauuacu

SEQ ID NO: 245800 - RNA, 13 nt, Red clover mottle virus
guauugcuuuaaa

SEQ ID NO: 245801 - RNA, 14 nt, Red clover mottle virus
gcuuuaaaguuaug

SEQ ID NO: 245802 - RNA, 16 nt, Red clover mottle virus
gcuuacuuuugugauu

SEQ ID NO: 245803 - RNA, 19 nt, Red clover mottle virus
uauaguacuauugugguau

SEQ ID NO: 245804 - RNA, 12 nt, Red clover mottle virus
acuuuugugauu

SEQ ID NO: 245805 - RNA, 22 nt, Red clover mottle virus
acuauugugguauugcuuuaaa

SEQ ID NO: 245806 - RNA, 22 nt, Red clover mottle virus
auguuuuuacaaauuugugaua

SEQ ID NO: 245807 - RNA, 20 nt, Red clover mottle virus
auggcuuacuuuugugauua

SEQ ID NO: 245808 - RNA, 12 nt, Red clover mottle virus
aaauuugugaua

SEQ ID NO: 245809 - RNA, 14 nt, Red clover mottle virus
gcuuuaaaguuauu

SEQ ID NO: 245810 - RNA, 23 nt, Red clover mottle virus
uauaguacuauugugguauugcu

SEQ ID NO: 245811 - RNA, 14 nt, Red clover mottle virus
gugauuacuuugua

SEQ ID NO: 245812 - RNA, 21 nt, Red clover mottle virus
uacuauugugguauugcuuua

SEQ ID NO: 245813 - RNA, 17 nt, Red clover mottle virus
uuuacaaauuugugaua

SEQ ID NO: 245814 - RNA, 21 nt, Red clover mottle virus
uugugauaauauuagcuuuaa

SEQ ID NO: 245815 - RNA, 16 nt, Red clover mottle virus
uugugguauugcuuua

SEQ ID NO: 245816 - RNA, 17 nt, Red clover mottle virus
uugugguauugcuuuaa

SEQ ID NO: 245817 - RNA, 15 nt, Red clover mottle virus
ucuuuucgugugaug

SEQ ID NO: 245818 - RNA, 16 nt, Red clover mottle virus
uuacuuuugugauuac

SEQ ID NO: 245819 - RNA, 19 nt, Red clover mottle virus
ugguauugcuuuaaaguua

SEQ ID NO: 245820 - RNA, 18 nt, Red clover mottle virus
ugugguauugcuuuaaag

SEQ ID NO: 245821 - RNA, 16 nt, Red clover mottle virus
ugugauaauauuagcu

SEQ ID NO: 245822 - RNA, 23 nt, Homo sapiens
acuaauagaauaaaggcaguuuu

SEQ ID NO: 245823 - RNA, 22 nt, Homo sapiens
uccccuugcccagggcucagcc

SEQ ID NO: 245824 - RNA, 21 nt, Homo sapiens
guauuuggaaauaaagucaga

SEQ ID NO: 245825 - RNA, 18 nt, Homo sapiens
aucugcaccccacuucag

SEQ ID NO: 245826 - RNA, 15 nt, Homo sapiens
uugacacugcucuaa

SEQ ID NO: 245827 - RNA, 18 nt, Homo sapiens
uaaauauaucuaccccag

SEQ ID NO: 245828 - RNA, 16 nt, Homo sapiens
uguguaauuagugcca

SEQ ID NO: 245829 - RNA, 12 nt, Homo sapiens
cuccuagccuug

SEQ ID NO: 245830 - RNA, 21 nt, Homo sapiens
aagauggcauaaccugucuca

SEQ ID NO: 245831 - RNA, 20 nt, Homo sapiens
cagggcuuuacuccguaaca

SEQ ID NO: 245832 - RNA, 21 nt, Homo sapiens
agacucagggccccagcacua

SEQ ID NO: 245833 - RNA, 14 nt, Homo sapiens
auucacagugcucu

SEQ ID NO: 245834 - RNA, 20 nt, Homo sapiens
aguauuuagaagccaacuau

SEQ ID NO: 245835 - RNA, 13 nt, Homo sapiens
ugggcauucacac

SEQ ID NO: 245836 - RNA, 16 nt, Homo sapiens
uaauacauucacccag

SEQ ID NO: 245837 - RNA, 14 nt, Homo sapiens
ugacacaugcugaa

SEQ ID NO: 245838 - RNA, 21 nt, Homo sapiens
caugcagcuguggcagaguua

SEQ ID NO: 245839 - RNA, 17 nt, Homo sapiens
cugaggcagacagcagc

SEQ ID NO: 245840 - RNA, 13 nt, Homo sapiens
cugaccagccuug

SEQ ID NO: 245841 - RNA, 17 nt, Homo sapiens
cgcuaauucaaggaauu

SEQ ID NO: 245842 - RNA, 21 nt, Homo sapiens
guacuauucaaucuuuacaca

SEQ ID NO: 245843 - RNA, 20 nt, Homo sapiens
cacugccugcccagugccau

SEQ ID NO: 245844 - RNA, 19 nt, Homo sapiens
uagcuuagaccucagccug

SEQ ID NO: 245845 - RNA, 19 nt, Homo sapiens
ucuuacaaugcauucugag

SEQ ID NO: 245846 - RNA, 17 nt, Homo sapiens
cuugcuaccaguauuua

SEQ ID NO: 245847 - RNA, 17 nt, Homo sapiens
auugacuaucaaacuga

SEQ ID NO: 245848 - RNA, 18 nt, Homo sapiens
cuuucaacagaauucacu

SEQ ID NO: 245849 - RNA, 20 nt, Homo sapiens
uuucuccucacuguauccag

SEQ ID NO: 245850 - RNA, 15 nt, Homo sapiens
uaucuucaucuguga

SEQ ID NO: 245851 - RNA, 17 nt, Homo sapiens
cccagacuagauguagu

SEQ ID NO: 245852 - RNA, 18 nt, Homo sapiens
auuggggaagacuguggc

SEQ ID NO: 245853 - RNA, 17 nt, Homo sapiens
ccauuuuugaaaccaaa

SEQ ID NO: 245854 - RNA, 18 nt, Homo sapiens
agagccccacccucagau

SEQ ID NO: 245855 - RNA, 23 nt, Homo sapiens
augcagcuguggcagaguuacag

SEQ ID NO: 245856 - RNA, 13 nt, Homo sapiens
cauuaucagucca

SEQ ID NO: 245857 - RNA, 21 nt, Homo sapiens
aacucccuuucaacagaauuc

SEQ ID NO: 245858 - RNA, 14 nt, Homo sapiens
gcccacugccugcc

SEQ ID NO: 245859 - RNA, 21 nt, Homo sapiens
uccaaagggcauggguuuuau

SEQ ID NO: 245860 - RNA, 13 nt, Homo sapiens
ccucucucuguaa

SEQ ID NO: 245861 - RNA, 20 nt, Homo sapiens
aaguucaugcagcuguggca

SEQ ID NO: 245862 - RNA, 18 nt, Homo sapiens
gaaauaaaguuggugaca

SEQ ID NO: 245863 - RNA, 20 nt, Homo sapiens
aaggcuuagacccucaugcu

SEQ ID NO: 245864 - RNA, 18 nt, Homo sapiens
aagccaacccugugacug

SEQ ID NO: 245865 - RNA, 18 nt, Homo sapiens
acagcagcucaggcacac

SEQ ID NO: 245866 - RNA, 17 nt, Homo sapiens
cagacauguggugggac

SEQ ID NO: 245867 - RNA, 23 nt, Homo sapiens
aguuacaguucugugguuucaug

SEQ ID NO: 245868 - RNA, 16 nt, Homo sapiens
agcaucuggcucuaau

SEQ ID NO: 245869 - RNA, 20 nt, Homo sapiens
cugacauguacgauucacuc

SEQ ID NO: 245870 - RNA, 22 nt, Homo sapiens
gagcccugucuccucucucugu

SEQ ID NO: 245871 - RNA, 15 nt, Homo sapiens
ggcacccuuagccac

SEQ ID NO: 245872 - RNA, 16 nt, Homo sapiens
ugcauauuuuauuaua

SEQ ID NO: 245873 - RNA, 15 nt, Homo sapiens
uagaaggauccucca

SEQ ID NO: 245874 - RNA, 15 nt, Homo sapiens
agagcacacuguagc

SEQ ID NO: 245875 - RNA, 17 nt, Homo sapiens
auaaugucccuucacaa

SEQ ID NO: 245876 - RNA, 15 nt, Homo sapiens
auaguuacuguguaa

SEQ ID NO: 245877 - RNA, 14 nt, Homo sapiens
agcauuacaguggg

SEQ ID NO: 245878 - RNA, 16 nt, Homo sapiens
auaauuuaccuaagau

SEQ ID NO: 245879 - RNA, 23 nt, Homo sapiens
aucauuaaaauuaacaugugcca

SEQ ID NO: 245880 - RNA, 16 nt, Homo sapiens
uaaaguaugugcauau

SEQ ID NO: 245881 - RNA, 20 nt, Homo sapiens
cagccaccccaccccugagc

SEQ ID NO: 245882 - RNA, 20 nt, Homo sapiens
cagggaagcccugacugugu

SEQ ID NO: 245883 - RNA, 15 nt, Homo sapiens
ugugggaaauccaca

SEQ ID NO: 245884 - RNA, 22 nt, Homo sapiens
ccugucugccagccagcagcca

SEQ ID NO: 245885 - RNA, 22 nt, Homo sapiens
uguaauaaacucauuucuagca

SEQ ID NO: 245886 - RNA, 12 nt, Homo sapiens
uaucuaccccag

SEQ ID NO: 245887 - RNA, 22 nt, Homo sapiens
aauuccuuagcuuagaccucag

SEQ ID NO: 245888 - RNA, 20 nt, Homo sapiens
cagacuggauaguccgucuc

SEQ ID NO: 245889 - RNA, 14 nt, Homo sapiens
ucuuccccauaauc

SEQ ID NO: 245890 - RNA, 14 nt, Homo sapiens
ccagcuagcaaaau

SEQ ID NO: 245891 - RNA, 17 nt, Homo sapiens
guaucucaguaccccau

SEQ ID NO: 245892 - RNA, 17 nt, Homo sapiens
auaaaguuggugacaga

SEQ ID NO: 245893 - RNA, 13 nt, Homo sapiens
cccuucucuguau

SEQ ID NO: 245894 - RNA, 20 nt, Homo sapiens
agaccucggugggcauucac

SEQ ID NO: 245895 - RNA, 20 nt, Homo sapiens
auuccuuagcuuagaccuca

SEQ ID NO: 245896 - RNA, 23 nt, Homo sapiens
caguauuuagaagccaacuauga

SEQ ID NO: 245897 - RNA, 23 nt, Homo sapiens
uugcauuuaauuuauugaggcuu

SEQ ID NO: 245898 - RNA, 20 nt, Homo sapiens
uuacccccugggagccccaa

SEQ ID NO: 245899 - RNA, 15 nt, Homo sapiens
ccuagagcacacugu

SEQ ID NO: 245900 - RNA, 22 nt, Homo sapiens
cuguguacagaauucugcuacc

SEQ ID NO: 245901 - RNA, 15 nt, Homo sapiens
uuccuaauacuguca

SEQ ID NO: 245902 - RNA, 19 nt, Homo sapiens
caggcucuccaggugguca

SEQ ID NO: 245903 - RNA, 16 nt, Homo sapiens
ccucagaugcacauga

SEQ ID NO: 245904 - RNA, 22 nt, Homo sapiens
cccagaggagccaccaguucuc

SEQ ID NO: 245905 - RNA, 17 nt, Homo sapiens
cugaccagccuugacac

SEQ ID NO: 245906 - RNA, 15 nt, Homo sapiens
cauaaccugucucac

SEQ ID NO: 245907 - RNA, 14 nt, Homo sapiens
acacaccuugacaa

SEQ ID NO: 245908 - RNA, 16 nt, Homo sapiens
ccaagccaacccugug

SEQ ID NO: 245909 - RNA, 13 nt, Homo sapiens
acaugugguggga

SEQ ID NO: 245910 - RNA, 19 nt, Homo sapiens
cuccaaagucacacagagu

SEQ ID NO: 245911 - RNA, 18 nt, Homo sapiens
ugccacuuaauguauguu

SEQ ID NO: 245912 - RNA, 11 nt, Homo sapiens
agcacacugua

SEQ ID NO: 245913 - RNA, 18 nt, Homo sapiens
cuauugaccgagcacaua

SEQ ID NO: 245914 - RNA, 11 nt, Homo sapiens
caucucuccag

SEQ ID NO: 245915 - RNA, 22 nt, Homo sapiens
cucccagaggagccaccaguuc

SEQ ID NO: 245916 - RNA, 21 nt, Homo sapiens
ucaccuggacuuaagcaucug

SEQ ID NO: 245917 - RNA, 17 nt, Homo sapiens
cagaccucggugggcau

SEQ ID NO: 245918 - RNA, 14 nt, Homo sapiens
uuaauacauucacc

SEQ ID NO: 245919 - RNA, 23 nt, Homo sapiens
ccagagccguuacuacacacaaa

SEQ ID NO: 245920 - RNA, 17 nt, Homo sapiens
uccccauaaucacugac

SEQ ID NO: 245921 - RNA, 14 nt, Homo sapiens
gaacucccuuucaa

SEQ ID NO: 245922 - RNA, 14 nt, Homo sapiens
cuuccuggaccuga

SEQ ID NO: 245923 - RNA, 19 nt, Homo sapiens
accauuuuugaaaccaaac

SEQ ID NO: 245924 - RNA, 19 nt, Homo sapiens
cccuuucaacagaauucac

SEQ ID NO: 245925 - RNA, 22 nt, Homo sapiens
acucuuccccauaaucacugac

SEQ ID NO: 245926 - RNA, 17 nt, Homo sapiens
uagaaagagaaacaguu

SEQ ID NO: 245927 - RNA, 22 nt, Homo sapiens
caugagauggaggccuccuuau

SEQ ID NO: 245928 - RNA, 15 nt, Homo sapiens
uuuucugauaaaaga

SEQ ID NO: 245929 - RNA, 12 nt, Homo sapiens
uguucuugugaa

SEQ ID NO: 245930 - RNA, 22 nt, Homo sapiens
auccgaggcagggucaggagag

SEQ ID NO: 245931 - RNA, 14 nt, Homo sapiens
caucuugcuaccag

SEQ ID NO: 245932 - RNA, 20 nt, Homo sapiens
uuaauuuauugaggcuuuaa

SEQ ID NO: 245933 - RNA, 18 nt, Homo sapiens
ccccuugccagacaugug

SEQ ID NO: 245934 - RNA, 21 nt, Homo sapiens
aggauccacuuggucugugag

SEQ ID NO: 245935 - RNA, 11 nt, Homo sapiens
acauugaacaa

SEQ ID NO: 245936 - RNA, 20 nt, Homo sapiens
agcucuggggugggcaguuu

SEQ ID NO: 245937 - RNA, 18 nt, Homo sapiens
ugguuucuagcaugaaga

SEQ ID NO: 245938 - RNA, 16 nt, Homo sapiens
cacagaggaucugcuu

SEQ ID NO: 245939 - RNA, 21 nt, Homo sapiens
cuguguacagaauucugcuac

SEQ ID NO: 245940 - RNA, 13 nt, Homo sapiens
uggugauuuagca

SEQ ID NO: 245941 - RNA, 23 nt, Homo sapiens
cugguccaguuccuucacuuaca

SEQ ID NO: 245942 - RNA, 23 nt, Homo sapiens
cacucccaccugacacaccaggc

SEQ ID NO: 245943 - RNA, 16 nt, Homo sapiens
ucaacagaauucacuu

SEQ ID NO: 245944 - RNA, 18 nt, Homo sapiens
aaggauccuccaaaguca

SEQ ID NO: 245945 - RNA, 19 nt, Homo sapiens
ugaccagccuugacacucc

SEQ ID NO: 245946 - RNA, 23 nt, Homo sapiens
cuucaguuuccauccccaggauc

SEQ ID NO: 245947 - RNA, 15 nt, Homo sapiens
guaacuuucugcuga

SEQ ID NO: 245948 - RNA, 14 nt, Homo sapiens
cgauccccugucac

SEQ ID NO: 245949 - RNA, 23 nt, Homo sapiens
augggacagggaggacgcucucu

SEQ ID NO: 245950 - RNA, 21 nt, Homo sapiens
gacuguguggagcuaaggaca

SEQ ID NO: 245951 - RNA, 18 nt, Homo sapiens
uugugaauuaggcuguaa

SEQ ID NO: 245952 - RNA, 15 nt, Homo sapiens
uacauaaaguaugug

SEQ ID NO: 245953 - RNA, 22 nt, Homo sapiens
agcccugacuguguggagcuaa

SEQ ID NO: 245954 - RNA, 21 nt, Homo sapiens
gcaaaccaucccagcacugca

SEQ ID NO: 245955 - RNA, 21 nt, Homo sapiens
auuacuggccuuuuucauuua

SEQ ID NO: 245956 - RNA, 15 nt, Homo sapiens
acagaggaucugcuu

SEQ ID NO: 245957 - RNA, 17 nt, Homo sapiens
cacacugagcugagggg

SEQ ID NO: 245958 - RNA, 22 nt, Homo sapiens
aggagaggggcagaacagccgc

SEQ ID NO: 245959 - RNA, 20 nt, Homo sapiens
guucucauggguggcacuca

SEQ ID NO: 245960 - RNA, 16 nt, Homo sapiens
ucucucuucucuccag

SEQ ID NO: 245961 - RNA, 22 nt, Homo sapiens
gucucuguggcaggccugguca

SEQ ID NO: 245962 - RNA, 17 nt, Homo sapiens
accagagccguuacuac

SEQ ID NO: 245963 - RNA, 21 nt, Homo sapiens
ucugauaaaagauggccauau

SEQ ID NO: 245964 - RNA, 17 nt, Homo sapiens
uggcauaaccugucuca

SEQ ID NO: 245965 - RNA, 16 nt, Homo sapiens
cacugccugcccagug

SEQ ID NO: 245966 - RNA, 15 nt, Homo sapiens
agcacuaaagcagug

SEQ ID NO: 245967 - RNA, 14 nt, Homo sapiens
acacagagugccug

SEQ ID NO: 245968 - RNA, 20 nt, Homo sapiens
caugcugaacaucacagcuu

SEQ ID NO: 245969 - RNA, 13 nt, Homo sapiens
cuuauuuccucau

SEQ ID NO: 245970 - RNA, 23 nt, Homo sapiens
ucacaauuauuaccaucucucca

SEQ ID NO: 245971 - RNA, 14 nt, Homo sapiens
ucuugcuaccagua

SEQ ID NO: 245972 - RNA, 13 nt, Homo sapiens
uaucaguccaaag

SEQ ID NO: 245973 - RNA, 23 nt, Homo sapiens
acuuggucugugagaugcuagaa

SEQ ID NO: 245974 - RNA, 17 nt, Homo sapiens
ccccugagcugaauaaa

SEQ ID NO: 245975 - RNA, 23 nt, Homo sapiens
acaccauuccuucugcccugcuu

SEQ ID NO: 245976 - RNA, 17 nt, Homo sapiens
ggucagagggcccagug

SEQ ID NO: 245977 - RNA, 20 nt, Homo sapiens
cuccagcuagcaaaauuacu

SEQ ID NO: 245978 - RNA, 21 nt, Homo sapiens
aagggauuuucagcccucaga

SEQ ID NO: 245979 - RNA, 19 nt, Homo sapiens
augucacgggaccaguauu

SEQ ID NO: 245980 - RNA, 13 nt, Homo sapiens
uuguuuacccaau

SEQ ID NO: 245981 - RNA, 16 nt, Homo sapiens
caugaauaucaguuau

SEQ ID NO: 245982 - RNA, 18 nt, Homo sapiens
gcuccacuuggucuguga

SEQ ID NO: 245983 - RNA, 14 nt, Homo sapiens
uauaaggacacuga

SEQ ID NO: 245984 - RNA, 22 nt, Homo sapiens
cuuuucuccucacuguauccag

SEQ ID NO: 245985 - RNA, 23 nt, Homo sapiens
aacaaaucugcaccccacuucag

SEQ ID NO: 245986 - RNA, 22 nt, Homo sapiens
cucuuccccauaaucacugacc

SEQ ID NO: 245987 - RNA, 15 nt, Homo sapiens
uggcauaaccugucu

SEQ ID NO: 245988 - RNA, 22 nt, Homo sapiens
gcugucacaauuauuaccaucu

SEQ ID NO: 245989 - RNA, 20 nt, Homo sapiens
accaucccagcacugcaccc

SEQ ID NO: 245990 - RNA, 17 nt, Homo sapiens
gcacaguacccggugac

SEQ ID NO: 245991 - RNA, 17 nt, Homo sapiens
ucaguccaaagggcaug

SEQ ID NO: 245992 - RNA, 14 nt, Homo sapiens
agccaccaguucuc

SEQ ID NO: 245993 - RNA, 11 nt, Homo sapiens
aacccaaagug

SEQ ID NO: 245994 - RNA, 18 nt, Homo sapiens
aacuucuugcuucuuucu

SEQ ID NO: 245995 - RNA, 22 nt, Homo sapiens
cagggcucagccuggugggccu

SEQ ID NO: 245996 - RNA, 19 nt, Homo sapiens
aggagccaccaguucucau

SEQ ID NO: 245997 - RNA, 15 nt, Homo sapiens
cacccuuagccacuu

SEQ ID NO: 245998 - RNA, 19 nt, Homo sapiens
cggagcccugucuccucuc

SEQ ID NO: 245999 - RNA, 18 nt, Homo sapiens
gagccuauaucuucaucu

SEQ ID NO: 246000 - RNA, 13 nt, Homo sapiens
uccugucugccag

SEQ ID NO: 246001 - RNA, 16 nt, Homo sapiens
cuccacuuggucugug

SEQ ID NO: 246002 - RNA, 14 nt, Homo sapiens
ggaagauggcauaa

SEQ ID NO: 246003 - RNA, 20 nt, Homo sapiens
gaacacugggggaggggaca

SEQ ID NO: 246004 - RNA, 19 nt, Homo sapiens
cauguggugggacagggac

SEQ ID NO: 246005 - RNA, 19 nt, Homo sapiens
auauuuuauuauagucacu

SEQ ID NO: 246006 - RNA, 22 nt, Homo sapiens
ggucuuaggaugugucuugggg

SEQ ID NO: 246007 - RNA, 13 nt, Homo sapiens
uuaaagaaagugu

SEQ ID NO: 246008 - RNA, 21 nt, Homo sapiens
acaaaucugcaccccacuuca

SEQ ID NO: 246009 - RNA, 17 nt, Homo sapiens
gaauacauaaaguaugu

SEQ ID NO: 246010 - RNA, 15 nt, Homo sapiens
ucauuauuugcagag

SEQ ID NO: 246011 - RNA, 23 nt, Homo sapiens
gccuucaguuuccauccccagga

SEQ ID NO: 246012 - RNA, 18 nt, Homo sapiens
gaggcagacagcagcuca

SEQ ID NO: 246013 - RNA, 14 nt, Homo sapiens
ugcacgcacacugu

SEQ ID NO: 246014 - RNA, 19 nt, Homo sapiens
ccccacugcagacaugacc

SEQ ID NO: 246015 - RNA, 22 nt, Homo sapiens
agaaggguaccuugaacacugg

SEQ ID NO: 246016 - RNA, 18 nt, Homo sapiens
cugcacucccaccugaca

SEQ ID NO: 246017 - RNA, 20 nt, Homo sapiens
ucucaguaccccauggagcu

SEQ ID NO: 246018 - RNA, 17 nt, Homo sapiens
agccuagccgaccucag

SEQ ID NO: 246019 - RNA, 16 nt, Homo sapiens
ucuuccucccuggaau

SEQ ID NO: 246020 - RNA, 17 nt, Homo sapiens
ugacauguacgauucac

SEQ ID NO: 246021 - RNA, 18 nt, Homo sapiens
aguaugaaaaugucauug

SEQ ID NO: 246022 - RNA, 22 nt, Homo sapiens
cuauugaccgagcacauaccau

SEQ ID NO: 246023 - RNA, 23 nt, Homo sapiens
gaaggguaccuugaacacugggg

SEQ ID NO: 246024 - RNA, 18 nt, Homo sapiens
gccacuggacugacgacu

SEQ ID NO: 246025 - RNA, 22 nt, Homo sapiens
cuaauuuguuuucccuucuuac

SEQ ID NO: 246026 - RNA, 20 nt, Homo sapiens
uucugauaaaagauggccau

SEQ ID NO: 246027 - RNA, 16 nt, Homo sapiens
agagccguuacuacac

SEQ ID NO: 246028 - RNA, 23 nt, Homo sapiens
uuuucggccccauguaucucagu

SEQ ID NO: 246029 - RNA, 18 nt, Homo sapiens
uaggccaugggacaggga

SEQ ID NO: 246030 - RNA, 16 nt, Homo sapiens
ggagcaugagugccgu

SEQ ID NO: 246031 - RNA, 16 nt, Homo sapiens
cuucuuacaaugcauu

SEQ ID NO: 246032 - RNA, 17 nt, Homo sapiens
uacaguucugugguuuc

SEQ ID NO: 246033 - RNA, 23 nt, Homo sapiens
gagccuauaucuucaucugugaa

SEQ ID NO: 246034 - RNA, 16 nt, Homo sapiens
gcugcaagguacucug

SEQ ID NO: 246035 - RNA, 23 nt, Homo sapiens
ccccauguaucucaguaccccau

SEQ ID NO: 246036 - RNA, 17 nt, Homo sapiens
ucuggcacucugagguc

SEQ ID NO: 246037 - RNA, 14 nt, Homo sapiens
aggcacccuuagcc

SEQ ID NO: 246038 - RNA, 11 nt, Homo sapiens
cagggacccac

SEQ ID NO: 246039 - RNA, 20 nt, Homo sapiens
aucugguccaguuccuucac

SEQ ID NO: 246040 - RNA, 12 nt, Homo sapiens
cuguaacuacuu

SEQ ID NO: 246041 - RNA, 15 nt, Homo sapiens
caucugguccaguuc

SEQ ID NO: 246042 - RNA, 15 nt, Homo sapiens
aauuacuaccagagc

SEQ ID NO: 246043 - RNA, 16 nt, Homo sapiens
cuccuuugagucuuug

SEQ ID NO: 246044 - RNA, 18 nt, Homo sapiens
gcucuccccuucucugua

SEQ ID NO: 246045 - RNA, 17 nt, Homo sapiens
ggcauagcucuggggug

SEQ ID NO: 246046 - RNA, 17 nt, Homo sapiens
cuuuuuuucuguaccag

SEQ ID NO: 246047 - RNA, 18 nt, Homo sapiens
ugaucaguaugaaaaugu

SEQ ID NO: 246048 - RNA, 12 nt, Homo sapiens
cacucagucucu

SEQ ID NO: 246049 - RNA, 15 nt, Homo sapiens
gcaacugaggcagac

SEQ ID NO: 246050 - RNA, 23 nt, Homo sapiens
uacaguuuauuauguacuauuca

SEQ ID NO: 246051 - RNA, 14 nt, Homo sapiens
cucagcccccugac

SEQ ID NO: 246052 - RNA, 19 nt, Homo sapiens
cauauuuuauuauagucac

SEQ ID NO: 246053 - RNA, 12 nt, Homo sapiens
aaaaaaacguau

SEQ ID NO: 246054 - RNA, 16 nt, Homo sapiens
acccuuagccacuuca

SEQ ID NO: 246055 - RNA, 16 nt, Homo sapiens
aguuugguuucuagca

SEQ ID NO: 246056 - RNA, 20 nt, Homo sapiens
agccguuacuacacacaaag

SEQ ID NO: 246057 - RNA, 18 nt, Homo sapiens
ucagccuagccgaccuca

SEQ ID NO: 246058 - RNA, 15 nt, Homo sapiens
ugcccagggcucagc

SEQ ID NO: 246059 - RNA, 20 nt, Homo sapiens
ugcauauuuuauuauaguca

SEQ ID NO: 246060 - RNA, 14 nt, Homo sapiens
uggggaagacugug

SEQ ID NO: 246061 - RNA, 13 nt, Homo sapiens
aaggauccuccaa

SEQ ID NO: 246062 - RNA, 11 nt, Homo sapiens
caccaguucuc

SEQ ID NO: 246063 - RNA, 14 nt, Homo sapiens
ccuggucaggcucu

SEQ ID NO: 246064 - RNA, 18 nt, Homo sapiens
gucugugagaugcuagaa

SEQ ID NO: 246065 - RNA, 23 nt, Homo sapiens
cuuuugugaauuaggcuguaacu

SEQ ID NO: 246066 - RNA, 18 nt, Homo sapiens
cccagacuagauguagua

SEQ ID NO: 246067 - RNA, 21 nt, Homo sapiens
gaauuaggcuguaacuacuuu

SEQ ID NO: 246068 - RNA, 16 nt, Homo sapiens
cugcuaccucacuggg

SEQ ID NO: 246069 - RNA, 21 nt, Homo sapiens
gccggccaaggccucuaggga

SEQ ID NO: 246070 - RNA, 21 nt, Homo sapiens
accagcccuacaccauuccuu

SEQ ID NO: 246071 - RNA, 22 nt, Homo sapiens
ucagaccucggugggcauucac

SEQ ID NO: 246072 - RNA, 20 nt, Homo sapiens
agugggugccccccuugcca

SEQ ID NO: 246073 - RNA, 19 nt, Homo sapiens
uccccugaugggcccugac

SEQ ID NO: 246074 - RNA, 16 nt, Homo sapiens
aauggcaaagacugga

SEQ ID NO: 246075 - RNA, 18 nt, Homo sapiens
gacuagauguaguauuuu

SEQ ID NO: 246076 - RNA, 23 nt, Homo sapiens
agcacugcaccccaggcagccac

SEQ ID NO: 246077 - RNA, 12 nt, Homo sapiens
agccuggugggc

SEQ ID NO: 246078 - RNA, 19 nt, Homo sapiens
uauuaauacauucacccag

SEQ ID NO: 246079 - RNA, 18 nt, Homo sapiens
gaugcacaugagcuggcg

SEQ ID NO: 246080 - RNA, 14 nt, Homo sapiens
gggaagcccugacu

SEQ ID NO: 246081 - RNA, 18 nt, Homo sapiens
aguuacaguucugugguu

SEQ ID NO: 246082 - RNA, 16 nt, Homo sapiens
ucagagggcccagugg

SEQ ID NO: 246083 - RNA, 22 nt, Homo sapiens
auccuccaaagucacacagagu

SEQ ID NO: 246084 - RNA, 15 nt, Homo sapiens
aauuaggcuguaacu

SEQ ID NO: 246085 - RNA, 15 nt, Homo sapiens
ugacuguguggagcu

SEQ ID NO: 246086 - RNA, 12 nt, Homo sapiens
ucauuucuagca

SEQ ID NO: 246087 - RNA, 19 nt, Homo sapiens
uaccagagccguuacuaca

SEQ ID NO: 246088 - RNA, 17 nt, Homo sapiens
uguggcugcuagcacuu

SEQ ID NO: 246089 - RNA, 20 nt, Homo sapiens
uucugcccugcuuuugcuag

SEQ ID NO: 246090 - RNA, 14 nt, Homo sapiens
uagcuuagaccuca

SEQ ID NO: 246091 - RNA, 19 nt, Homo sapiens
gucuccucucucuguaaua

SEQ ID NO: 246092 - RNA, 22 nt, Homo sapiens
uauuuagaagccaacuaugauu

SEQ ID NO: 246093 - RNA, 19 nt, Homo sapiens
uucugugguuucauguuag

SEQ ID NO: 246094 - RNA, 23 nt, Homo sapiens
uggucaggcucuccaggugguca

SEQ ID NO: 246095 - RNA, 15 nt, Homo sapiens
ugaccagccuugaca

SEQ ID NO: 246096 - RNA, 22 nt, Homo sapiens
ccccuuuuauuaauacauucac

SEQ ID NO: 246097 - RNA, 14 nt, Homo sapiens
uuggaagauggcau

SEQ ID NO: 246098 - RNA, 23 nt, Homo sapiens
acccaguguuuuaggagcaugag

SEQ ID NO: 246099 - RNA, 17 nt, Homo sapiens
ugcuaccucacuggggu

SEQ ID NO: 246100 - RNA, 23 nt, Homo sapiens
gucucaccuggacuuaagcaucu

SEQ ID NO: 246101 - RNA, 19 nt, Homo sapiens
aauucauuuuuuaaauucc

SEQ ID NO: 246102 - RNA, 21 nt, Homo sapiens
aguguuauuucagagagcaaa

SEQ ID NO: 246103 - RNA, 12 nt, Homo sapiens
aaccugucucac

SEQ ID NO: 246104 - RNA, 18 nt, Homo sapiens
gacccagggaugacaugu

SEQ ID NO: 246105 - RNA, 21 nt, Homo sapiens
gauuacaaaucagaagucauc

SEQ ID NO: 246106 - RNA, 21 nt, Homo sapiens
ucauuaaaauuaacaugugcc

SEQ ID NO: 246107 - RNA, 20 nt, Homo sapiens
cuuuacuccguaacagauuu

SEQ ID NO: 246108 - RNA, 13 nt, Homo sapiens
gcugcuagcacuu

SEQ ID NO: 246109 - RNA, 13 nt, Homo sapiens
auaaggacacuga

SEQ ID NO: 246110 - RNA, 15 nt, Homo sapiens
ccuagccgaccucag

SEQ ID NO: 246111 - RNA, 12 nt, Homo sapiens
accucauuauca

SEQ ID NO: 246112 - RNA, 13 nt, Homo sapiens
gcuuagaccucag

SEQ ID NO: 246113 - RNA, 17 nt, Homo sapiens
cuagaaacugacacaug

SEQ ID NO: 246114 - RNA, 23 nt, Homo sapiens
cuugcaaaccaucccagcacugc

SEQ ID NO: 246115 - RNA, 23 nt, Homo sapiens
agucaucuugcuaccaguauuua

SEQ ID NO: 246116 - RNA, 12 nt, Homo sapiens
caacccugugac

SEQ ID NO: 246117 - RNA, 23 nt, Homo sapiens
uuccccuuuuauuaauacauuca

SEQ ID NO: 246118 - RNA, 16 nt, Homo sapiens
cacaccuugacaaaau

SEQ ID NO: 246119 - RNA, 15 nt, Homo sapiens
gucuggcccaccagg

SEQ ID NO: 246120 - RNA, 19 nt, Homo sapiens
cuuucaacagaauucacuu

SEQ ID NO: 246121 - RNA, 17 nt, Homo sapiens
caguaugaaaaugucau

SEQ ID NO: 246122 - RNA, 12 nt, Homo sapiens
aucuuuacacaa

SEQ ID NO: 246123 - RNA, 12 nt, Homo sapiens
accucacugggg

SEQ ID NO: 246124 - RNA, 23 nt, Homo sapiens
guaacuuucugcugaugaacaaa

SEQ ID NO: 246125 - RNA, 14 nt, Homo sapiens
ugcagacaugaccc

SEQ ID NO: 246126 - RNA, 16 nt, Homo sapiens
ccaguuccuucacuua

SEQ ID NO: 246127 - RNA, 16 nt, Homo sapiens
ucuuaacuucuugcuu

SEQ ID NO: 246128 - RNA, 20 nt, Homo sapiens
ugcauucugagguaaccuca

SEQ ID NO: 246129 - RNA, 18 nt, Homo sapiens
accuuauaguuacugugu

SEQ ID NO: 246130 - RNA, 19 nt, Homo sapiens
agcccuccucugcacuccc

SEQ ID NO: 246131 - RNA, 13 nt, Homo sapiens
uguacgauucacu

SEQ ID NO: 246132 - RNA, 20 nt, Homo sapiens
aaggguucagagacucaggg

SEQ ID NO: 246133 - RNA, 23 nt, Homo sapiens
uaaaaaaaaaacguauugcauuu

SEQ ID NO: 246134 - RNA, 22 nt, Homo sapiens
gugggugccccccuugccagac

SEQ ID NO: 246135 - RNA, 23 nt, Homo sapiens
cuuuucggccccauguaucucag

SEQ ID NO: 246136 - RNA, 18 nt, Homo sapiens
acuaucaaacugaagcca

SEQ ID NO: 246137 - RNA, 21 nt, Homo sapiens
agcacgguggugcccaagcca

SEQ ID NO: 246138 - RNA, 12 nt, Homo sapiens
ugccagacaugu

SEQ ID NO: 246139 - RNA, 12 nt, Homo sapiens
accacauggcuu

SEQ ID NO: 246140 - RNA, 14 nt, Homo sapiens
caguuccuucacuu

SEQ ID NO: 246141 - RNA, 22 nt, Homo sapiens
cugggcuaaguaaauaggaauu

SEQ ID NO: 246142 - RNA, 17 nt, Homo sapiens
gcaccccaggcagccac

SEQ ID NO: 246143 - RNA, 12 nt, Homo sapiens
aacaugugccag

SEQ ID NO: 246144 - RNA, 16 nt, Homo sapiens
agaagccaacuaugau

SEQ ID NO: 246145 - RNA, 16 nt, Homo sapiens
agccaccaguucucau

SEQ ID NO: 246146 - RNA, 22 nt, Homo sapiens
gcaucauuauuugcagagacag

SEQ ID NO: 246147 - RNA, 14 nt, Homo sapiens
gcccccugaccugg

SEQ ID NO: 246148 - RNA, 19 nt, Homo sapiens
auugaggcuuuaaaacuua

SEQ ID NO: 246149 - RNA, 16 nt, Homo sapiens
aaauuaacaugugcca

SEQ ID NO: 246150 - RNA, 19 nt, Homo sapiens
gaccaguauuguuuaccca

SEQ ID NO: 246151 - RNA, 18 nt, Homo sapiens
ucugcuaccucacugggg

SEQ ID NO: 246152 - RNA, 17 nt, Homo sapiens
ggcacaguacccgguga

SEQ ID NO: 246153 - RNA, 14 nt, Homo sapiens
caaagaaaguguau

SEQ ID NO: 246154 - RNA, 16 nt, Homo sapiens
uccucacuguauccag

SEQ ID NO: 246155 - RNA, 21 nt, Homo sapiens
gacucagggccccagcacuaa

SEQ ID NO: 246156 - RNA, 15 nt, Homo sapiens
auccgaggcaggguc

SEQ ID NO: 246157 - RNA, 18 nt, Homo sapiens
agccacuggacugacgac

SEQ ID NO: 246158 - RNA, 17 nt, Homo sapiens
ucauuaucaguccaaag

SEQ ID NO: 246159 - RNA, 12 nt, Homo sapiens
caaucuuuacac

SEQ ID NO: 246160 - RNA, 21 nt, Homo sapiens
gugccaucaggaugagcagua

SEQ ID NO: 246161 - RNA, 17 nt, Homo sapiens
agcuaaggacacagugg

SEQ ID NO: 246162 - RNA, 13 nt, Homo sapiens
gcacgguggugcc

SEQ ID NO: 246163 - RNA, 22 nt, Homo sapiens
acaguuuauuauguacuauuca

SEQ ID NO: 246164 - RNA, 14 nt, Homo sapiens
gcuaccaguauuua

SEQ ID NO: 246165 - RNA, 16 nt, Homo sapiens
aaucuuuacacaaugu

SEQ ID NO: 246166 - RNA, 13 nt, Homo sapiens
auaaucacugacc

SEQ ID NO: 246167 - RNA, 16 nt, Homo sapiens
caguagucagacugga

SEQ ID NO: 246168 - RNA, 13 nt, Homo sapiens
gagugccugccuc

SEQ ID NO: 246169 - RNA, 16 nt, Homo sapiens
gugaauuaggcuguaa

SEQ ID NO: 246170 - RNA, 21 nt, Homo sapiens
cagcacuaaagcaguggacac

SEQ ID NO: 246171 - RNA, 14 nt, Homo sapiens
aggaauugguuuca

SEQ ID NO: 246172 - RNA, 15 nt, Homo sapiens
aucuucaucugugaa

SEQ ID NO: 246173 - RNA, 20 nt, Homo sapiens
uucagccuagccgaccucag

SEQ ID NO: 246174 - RNA, 19 nt, Homo sapiens
agaggagccaccaguucuc

SEQ ID NO: 246175 - RNA, 20 nt, Homo sapiens
uuagacccucaugcugccaa

SEQ ID NO: 246176 - RNA, 20 nt, Homo sapiens
cuguaaagcuuugugcagau

SEQ ID NO: 246177 - RNA, 17 nt, Homo sapiens
aaauguuuugaguguua

SEQ ID NO: 246178 - RNA, 15 nt, Homo sapiens
ugcaccccacuucag

SEQ ID NO: 246179 - RNA, 22 nt, Homo sapiens
gcccucagaaucgcuccaccuu

SEQ ID NO: 246180 - RNA, 23 nt, Homo sapiens
auagcucuggggugggcaguuuu

SEQ ID NO: 246181 - RNA, 19 nt, Homo sapiens
augucauuguucuugugaa

SEQ ID NO: 246182 - RNA, 17 nt, Homo sapiens
gcaaagaugaucaguau

SEQ ID NO: 246183 - RNA, 19 nt, Homo sapiens
aggaagcugugagagcagu

SEQ ID NO: 246184 - RNA, 11 nt, Homo sapiens
aaaggugacca

SEQ ID NO: 246185 - RNA, 14 nt, Homo sapiens
cauguuaguuaccu

SEQ ID NO: 246186 - RNA, 19 nt, Homo sapiens
agaaaagcccaaguucaug

SEQ ID NO: 246187 - RNA, 14 nt, Homo sapiens
cuagccgaccucag

SEQ ID NO: 246188 - RNA, 14 nt, Homo sapiens
ucaacagaauucac

SEQ ID NO: 246189 - RNA, 22 nt, Homo sapiens
gaggcuccacuuggucugugag

SEQ ID NO: 246190 - RNA, 16 nt, Homo sapiens
cuuuuuuucuguacca

SEQ ID NO: 246191 - RNA, 18 nt, Homo sapiens
aacagcccuccucugcac

SEQ ID NO: 246192 - RNA, 23 nt, Homo sapiens
acauguggugggacagggaccca

SEQ ID NO: 246193 - RNA, 12 nt, Homo sapiens
cuccucugcacu

SEQ ID NO: 246194 - RNA, 20 nt, Homo sapiens
acagccgcuccugucugcca

SEQ ID NO: 246195 - RNA, 23 nt, Homo sapiens
cccccacugcagacaugacccga

SEQ ID NO: 246196 - RNA, 19 nt, Homo sapiens
uggcaaagaugaucaguau

SEQ ID NO: 246197 - RNA, 19 nt, Homo sapiens
uuucccuucuuacaaugca

SEQ ID NO: 246198 - RNA, 19 nt, Homo sapiens
ugugccacacaccuugaca

SEQ ID NO: 246199 - RNA, 12 nt, Homo sapiens
cugcuaccucac

SEQ ID NO: 246200 - RNA, 23 nt, Homo sapiens
auucauuuuucuuucugauguca

SEQ ID NO: 246201 - RNA, 17 nt, Homo sapiens
acauguacgauucacuc

SEQ ID NO: 246202 - RNA, 16 nt, Homo sapiens
accaucccagcacugc

SEQ ID NO: 246203 - RNA, 20 nt, Homo sapiens
gacuguggcugcuagcacuu

SEQ ID NO: 246204 - RNA, 12 nt, Homo sapiens
caauuauuacca

SEQ ID NO: 246205 - RNA, 18 nt, Homo sapiens
cuuuggaagauggcauaa

SEQ ID NO: 246206 - RNA, 20 nt, Homo sapiens
aaacuuauccuccaugaaua

SEQ ID NO: 246207 - RNA, 15 nt, Homo sapiens
aagucaucuugcuac

SEQ ID NO: 246208 - RNA, 23 nt, Homo sapiens
guggagauucucuggcacucuga

SEQ ID NO: 246209 - RNA, 16 nt, Homo sapiens
aguuuauuauguacua

SEQ ID NO: 246210 - RNA, 16 nt, Homo sapiens
gucuucguacugggaa

SEQ ID NO: 246211 - RNA, 21 nt, Homo sapiens
acuauucaaucuuuacacaau

SEQ ID NO: 246212 - RNA, 19 nt, Homo sapiens
guuuauuauguacuauuca

SEQ ID NO: 246213 - RNA, 22 nt, Homo sapiens
gcaacugaggcagacagcagcu

SEQ ID NO: 246214 - RNA, 15 nt, Homo sapiens
caguuccuucacuua

SEQ ID NO: 246215 - RNA, 22 nt, Homo sapiens
agcaggaagcugugagagcagu

SEQ ID NO: 246216 - RNA, 15 nt, Homo sapiens
acauaccaugugcca

SEQ ID NO: 246217 - RNA, 22 nt, Homo sapiens
cuucagccuagccgaccucagc

SEQ ID NO: 246218 - RNA, 16 nt, Homo sapiens
agccuagccgaccuca

SEQ ID NO: 246219 - RNA, 15 nt, Homo sapiens
uagcuuagaccucag

SEQ ID NO: 246220 - RNA, 23 nt, Homo sapiens
ucuccucucucuguaauaaacuc

SEQ ID NO: 246221 - RNA, 18 nt, Homo sapiens
aguucaugcucccagcca

SEQ ID NO: 246222 - RNA, 15 nt, Homo sapiens
gcuccugucugccag

SEQ ID NO: 246223 - RNA, 16 nt, Homo sapiens
agaaacugacacaugc

SEQ ID NO: 246224 - RNA, 13 nt, Homo sapiens
agauggaggccuc

SEQ ID NO: 246225 - RNA, 16 nt, Homo sapiens
aaagggauuuucagcc

SEQ ID NO: 246226 - RNA, 23 nt, Homo sapiens
cuaguuguaauuuuuuuguggga

SEQ ID NO: 246227 - RNA, 16 nt, Homo sapiens
auguuaguuaccuuau

SEQ ID NO: 246228 - RNA, 20 nt, Homo sapiens
caucucuccagcuagcaaaa

SEQ ID NO: 246229 - RNA, 23 nt, Homo sapiens
gccccagcacuaaagcaguggac

SEQ ID NO: 246230 - RNA, 20 nt, Homo sapiens
uccuagaaacugacacaugc

SEQ ID NO: 246231 - RNA, 17 nt, Homo sapiens
ucuccucucucuguaau

SEQ ID NO: 246232 - RNA, 14 nt, Homo sapiens
caguuuccaucccc

SEQ ID NO: 246233 - RNA, 21 nt, Homo sapiens
aaaauacuuguugcugucaca

SEQ ID NO: 246234 - RNA, 21 nt, Homo sapiens
uuccuagaaacugacacaugc

SEQ ID NO: 246235 - RNA, 19 nt, Homo sapiens
cuucucuccagcugacuaa

SEQ ID NO: 246236 - RNA, 11 nt, Homo sapiens
aggcuguaacu

SEQ ID NO: 246237 - RNA, 13 nt, Homo sapiens
ccaccaguucuca

SEQ ID NO: 246238 - RNA, 11 nt, Homo sapiens
guaccaguuaa

SEQ ID NO: 246239 - RNA, 18 nt, Homo sapiens
agcaguaccggccaagca

SEQ ID NO: 246240 - RNA, 20 nt, Homo sapiens
acacaugcugaacaucacag

SEQ ID NO: 246241 - RNA, 20 nt, Homo sapiens
acaauuauuaccaucucucc

SEQ ID NO: 246242 - RNA, 15 nt, Homo sapiens
uaaaggcaguuuucu

SEQ ID NO: 246243 - RNA, 23 nt, Homo sapiens
ucaggagaggggcagaacagccg

SEQ ID NO: 246244 - RNA, 13 nt, Homo sapiens
cuugaacacuggg

SEQ ID NO: 246245 - RNA, 18 nt, Homo sapiens
ggguggcacucagucucu

SEQ ID NO: 246246 - RNA, 19 nt, Homo sapiens
gucacacagagugccugcc

SEQ ID NO: 246247 - RNA, 12 nt, Homo sapiens
ggccaagcauaa

SEQ ID NO: 246248 - RNA, 17 nt, Homo sapiens
uaccuugaacacugggg

SEQ ID NO: 246249 - RNA, 18 nt, Homo sapiens
agccuagccgaccucagc

SEQ ID NO: 246250 - RNA, 18 nt, Homo sapiens
auggcauaaccugucuca

SEQ ID NO: 246251 - RNA, 18 nt, Homo sapiens
auucuuuacccccuggga

SEQ ID NO: 246252 - RNA, 16 nt, Homo sapiens
ccaucccagcacugca

SEQ ID NO: 246253 - RNA, 15 nt, Homo sapiens
aauacauucacccag

SEQ ID NO: 246254 - RNA, 13 nt, Homo sapiens
uucauuccccuga

SEQ ID NO: 246255 - RNA, 20 nt, Homo sapiens
ucccagaggagccaccaguu

SEQ ID NO: 246256 - RNA, 22 nt, Homo sapiens
agacuguggcugcuagcacuug

SEQ ID NO: 246257 - RNA, 14 nt, Homo sapiens
gggugggcacagua

SEQ ID NO: 246258 - RNA, 13 nt, Homo sapiens
gccaccaguucuc

SEQ ID NO: 246259 - RNA, 21 nt, Homo sapiens
gaguuaauauauagaagggua

SEQ ID NO: 246260 - RNA, 16 nt, Homo sapiens
gccuagccgaccucag

SEQ ID NO: 246261 - RNA, 17 nt, Homo sapiens
cugagcucgguggaccc

SEQ ID NO: 246262 - RNA, 17 nt, Homo sapiens
gagggcccaguggugcc

SEQ ID NO: 246263 - RNA, 15 nt, Homo sapiens
ucacacagagugccu

SEQ ID NO: 246264 - RNA, 14 nt, Homo sapiens
gugugacucauuaa

SEQ ID NO: 246265 - RNA, 21 nt, Homo sapiens
cauuccccugaugggcccuga

SEQ ID NO: 246266 - RNA, 14 nt, Homo sapiens
uucauuuaucuaua

SEQ ID NO: 246267 - RNA, 22 nt, Homo sapiens
uccuccaugaauaucaguuauu

SEQ ID NO: 246268 - RNA, 21 nt, Homo sapiens
gucagagggcccaguggugcc

SEQ ID NO: 246269 - RNA, 21 nt, Homo sapiens
aaucgcuccaccuugcagcuc

SEQ ID NO: 246270 - RNA, 17 nt, Homo sapiens
agaggagccaccaguuc

SEQ ID NO: 246271 - RNA, 13 nt, Homo sapiens
cucagaugcacau

SEQ ID NO: 246272 - RNA, 13 nt, Homo sapiens
ugcccagugccau

SEQ ID NO: 246273 - RNA, 13 nt, Homo sapiens
cuuagaccucagc

SEQ ID NO: 246274 - RNA, 19 nt, Homo sapiens
auaaucauuaaaauuaaca

SEQ ID NO: 246275 - RNA, 19 nt, Homo sapiens
cuccacuuggucugugaga

SEQ ID NO: 246276 - RNA, 12 nt, Homo sapiens
cuguauuccuag

SEQ ID NO: 246277 - RNA, 15 nt, Homo sapiens
agccuauaucuucau

SEQ ID NO: 246278 - RNA, 23 nt, Homo sapiens
cauuccccugaugggcccugacu

SEQ ID NO: 246279 - RNA, 16 nt, Homo sapiens
gcuaccucacuggggu

SEQ ID NO: 246280 - RNA, 17 nt, Homo sapiens
ccuauaucuucaucugu

SEQ ID NO: 246281 - RNA, 21 nt, Homo sapiens
agaccucggugggcauucaca

SEQ ID NO: 246282 - RNA, 18 nt, Homo sapiens
agucacuaguuguaauuu

SEQ ID NO: 246283 - RNA, 20 nt, Homo sapiens
uagaaggguaccuugaacac

SEQ ID NO: 246284 - RNA, 16 nt, Homo sapiens
ugauaaaagauggcca

SEQ ID NO: 246285 - RNA, 19 nt, Homo sapiens
ucagcugcaagguacucug

SEQ ID NO: 246286 - RNA, 19 nt, Homo sapiens
ggcccugacucuuccccau

SEQ ID NO: 246287 - RNA, 22 nt, Homo sapiens
aauguuguuuuaggaauacaua

SEQ ID NO: 246288 - RNA, 19 nt, Homo sapiens
aaagcaguggacaccagga

SEQ ID NO: 246289 - RNA, 17 nt, Homo sapiens
cuuagcuuagaccucag

SEQ ID NO: 246290 - RNA, 20 nt, Homo sapiens
uuucacgccugaggcaauua

SEQ ID NO: 246291 - RNA, 14 nt, Homo sapiens
ccucaugcugccaa

SEQ ID NO: 246292 - RNA, 13 nt, Homo sapiens
uuguucuugugaa

SEQ ID NO: 246293 - RNA, 21 nt, Homo sapiens
cagcagcucaggcacacuucu

SEQ ID NO: 246294 - RNA, 15 nt, Homo sapiens
accgagcacauacca

SEQ ID NO: 246295 - RNA, 18 nt, Homo sapiens
ggauaguccgucucugcu

SEQ ID NO: 246296 - RNA, 21 nt, Homo sapiens
agacccucaugcugccaauau

SEQ ID NO: 246297 - RNA, 21 nt, Homo sapiens
auucugagguaaccucauuau

SEQ ID NO: 246298 - RNA, 19 nt, Homo sapiens
gacucagggccccagcacu

SEQ ID NO: 246299 - RNA, 19 nt, Homo sapiens
aauaaguacuguguacaga

SEQ ID NO: 246300 - RNA, 13 nt, Homo sapiens
caggaagcuguga

SEQ ID NO: 246301 - RNA, 20 nt, Homo sapiens
aaaaaacguauugcauuuaa

SEQ ID NO: 246302 - RNA, 17 nt, Homo sapiens
uuucaacagaauucacu

SEQ ID NO: 246303 - RNA, 19 nt, Homo sapiens
acagagccccacccucaga

SEQ ID NO: 246304 - RNA, 14 nt, Homo sapiens
gaccucagccugug

SEQ ID NO: 246305 - RNA, 16 nt, Homo sapiens
cggccuccauccugag

SEQ ID NO: 246306 - RNA, 15 nt, Homo sapiens
cauaaucacugacca

SEQ ID NO: 246307 - RNA, 17 nt, Homo sapiens
aucaguccaaagggcau

SEQ ID NO: 246308 - RNA, 18 nt, Homo sapiens
gaagagccccccacugca

SEQ ID NO: 246309 - RNA, 19 nt, Homo sapiens
gaaacaguugguaacuuuu

SEQ ID NO: 246310 - RNA, 17 nt, Homo sapiens
cuuagaggagugaaaug

SEQ ID NO: 246311 - RNA, 19 nt, Homo sapiens
aucuugcuaccaguauuua

SEQ ID NO: 246312 - RNA, 19 nt, Homo sapiens
cagaggagccaccaguucu

SEQ ID NO: 246313 - RNA, 20 nt, Homo sapiens
auucugcuaccucacugggg

SEQ ID NO: 246314 - RNA, 20 nt, Homo sapiens
cucuuccccauaaucacuga

SEQ ID NO: 246315 - RNA, 22 nt, Homo sapiens
cuccagcuagcaaaauuacuac

SEQ ID NO: 246316 - RNA, 15 nt, Homo sapiens
aaaaacguauugcau

SEQ ID NO: 246317 - RNA, 23 nt, Homo sapiens
aaagauggccauauuaccccuuu

SEQ ID NO: 246318 - RNA, 15 nt, Homo sapiens
gaggcagccggccaa

SEQ ID NO: 246319 - RNA, 21 nt, Homo sapiens
augccaacucagcccccugac

SEQ ID NO: 246320 - RNA, 15 nt, Homo sapiens
gaccucggugggcau

SEQ ID NO: 246321 - RNA, 22 nt, Homo sapiens
guacagaauucugcuaccucac

SEQ ID NO: 246322 - RNA, 19 nt, Homo sapiens
gagaggcagauuucaggga

SEQ ID NO: 246323 - RNA, 16 nt, Homo sapiens
acugccugcccagugc

SEQ ID NO: 246324 - RNA, 14 nt, Homo sapiens
cacugagcugaggg

SEQ ID NO: 246325 - RNA, 15 nt, Homo sapiens
agcauuacagugggu

SEQ ID NO: 246326 - RNA, 19 nt, Homo sapiens
acuggauccaaacccaucu

SEQ ID NO: 246327 - RNA, 14 nt, Homo sapiens
ucuuccucccugga

SEQ ID NO: 246328 - RNA, 22 nt, Homo sapiens
uaaaaaaaaaacguauugcauu

SEQ ID NO: 246329 - RNA, 21 nt, Homo sapiens
gagcaguuugguuucuagcau

SEQ ID NO: 246330 - RNA, 18 nt, Homo sapiens
ucuggcucuaauucacag

SEQ ID NO: 246331 - RNA, 16 nt, Homo sapiens
aagagccccccacugc

SEQ ID NO: 246332 - RNA, 14 nt, Homo sapiens
cucucuucucucca

SEQ ID NO: 246333 - RNA, 13 nt, Homo sapiens
ccuagaaacugac

SEQ ID NO: 246334 - RNA, 19 nt, Homo sapiens
gguaauaaguacuguguac

SEQ ID NO: 246335 - RNA, 17 nt, Homo sapiens
acgugcacgcacacugu

SEQ ID NO: 246336 - RNA, 20 nt, Homo sapiens
cagcagccagcucucagcca

SEQ ID NO: 246337 - RNA, 17 nt, Homo sapiens
uccugucggagcccugu

SEQ ID NO: 246338 - RNA, 22 nt, Homo sapiens
uacuauucaaucuuuacacaau

SEQ ID NO: 246339 - RNA, 20 nt, Homo sapiens
uccuuagcuuagaccucagc

SEQ ID NO: 246340 - RNA, 15 nt, Homo sapiens
agauggcagcaguga

SEQ ID NO: 246341 - RNA, 12 nt, Homo sapiens
uucggccuccau

SEQ ID NO: 246342 - RNA, 17 nt, Homo sapiens
cccaaguucaugcagcu

SEQ ID NO: 246343 - RNA, 14 nt, Homo sapiens
gaugagcaguaccg

SEQ ID NO: 246344 - RNA, 20 nt, Homo sapiens
cagcuguggcagaguuacag

SEQ ID NO: 246345 - RNA, 23 nt, Homo sapiens
aguuaccuuauaguuacugugua

SEQ ID NO: 246346 - RNA, 17 nt, Homo sapiens
cugccuauuaucuguca

SEQ ID NO: 246347 - RNA, 22 nt, Homo sapiens
ugcaagguacucuggugaguca

SEQ ID NO: 246348 - RNA, 16 nt, Homo sapiens
caaugcauucugaggu

SEQ ID NO: 246349 - RNA, 20 nt, Homo sapiens
cccaugccaccggcuccacu

SEQ ID NO: 246350 - RNA, 15 nt, Homo sapiens
guuugguuucuagca

SEQ ID NO: 246351 - RNA, 12 nt, Homo sapiens
uccuucacuuac

SEQ ID NO: 246352 - RNA, 11 nt, Homo sapiens
ccuucacuuac

SEQ ID NO: 246353 - RNA, 19 nt, Homo sapiens
agaaacaguugguaacuuu

SEQ ID NO: 246354 - RNA, 18 nt, Homo sapiens
cuagcaaaauuacuacca

SEQ ID NO: 246355 - RNA, 20 nt, Homo sapiens
gaagagccccccacugcaga

SEQ ID NO: 246356 - RNA, 22 nt, Homo sapiens
ucauuguucuugugaacccaaa

SEQ ID NO: 246357 - RNA, 23 nt, Homo sapiens
guggugccccagcacgguggugc

SEQ ID NO: 246358 - RNA, 17 nt, Homo sapiens
aguaccggccaagcaua

SEQ ID NO: 246359 - RNA, 14 nt, Homo sapiens
ggcacucagucucu

SEQ ID NO: 246360 - RNA, 19 nt, Homo sapiens
cacaauuauuaccaucucu

SEQ ID NO: 246361 - RNA, 14 nt, Homo sapiens
guccuuuugacacu

SEQ ID NO: 246362 - RNA, 13 nt, Homo sapiens
cagcccccugacc

SEQ ID NO: 246363 - RNA, 14 nt, Homo sapiens
augccaacucagcc

SEQ ID NO: 246364 - RNA, 15 nt, Homo sapiens
aguuuauuauguacu

SEQ ID NO: 246365 - RNA, 18 nt, Homo sapiens
cauccugaggcuccacuu

SEQ ID NO: 246366 - RNA, 19 nt, Homo sapiens
cccuucuuacaaugcauuc

SEQ ID NO: 246367 - RNA, 19 nt, Homo sapiens
ggcuuuaaaacuuauccuc

SEQ ID NO: 246368 - RNA, 18 nt, Homo sapiens
acaaaggcuauugaccga

SEQ ID NO: 246369 - RNA, 14 nt, Homo sapiens
auggaggccuccuu

SEQ ID NO: 246370 - RNA, 19 nt, Homo sapiens
auaaauauaucuaccccag

SEQ ID NO: 246371 - RNA, 15 nt, Homo sapiens
gugcacgcacacugu

SEQ ID NO: 246372 - RNA, 14 nt, Homo sapiens
aaguaugugcauau

SEQ ID NO: 246373 - RNA, 15 nt, Homo sapiens
aaugucacgggacca

SEQ ID NO: 246374 - RNA, 21 nt, Homo sapiens
uuccccuugcccagggcucag

SEQ ID NO: 246375 - RNA, 20 nt, Homo sapiens
ucagagggcccaguggugcc

SEQ ID NO: 246376 - RNA, 14 nt, Homo sapiens
ucaguaccccaugg

SEQ ID NO: 246377 - RNA, 18 nt, Homo sapiens
cugucacgugugggcaau

SEQ ID NO: 246378 - RNA, 15 nt, Homo sapiens
gccccaauucgaucc

SEQ ID NO: 246379 - RNA, 22 nt, Homo sapiens
accaggguccuuuugacacugc

SEQ ID NO: 246380 - RNA, 14 nt, Homo sapiens
gccuauaucuucau

SEQ ID NO: 246381 - RNA, 17 nt, Homo sapiens
cuauugaccgagcacau

SEQ ID NO: 246382 - RNA, 14 nt, Homo sapiens
aaaaacguauugca

SEQ ID NO: 246383 - RNA, 22 nt, Homo sapiens
ucuuaguguaugauuacuggcc

SEQ ID NO: 246384 - RNA, 19 nt, Homo sapiens
acugccugcccagugccau

SEQ ID NO: 246385 - RNA, 15 nt, Homo sapiens
uuuauuaaucuuagu

SEQ ID NO: 246386 - RNA, 18 nt, Homo sapiens
aaucacugaccagccuug

SEQ ID NO: 246387 - RNA, 15 nt, Homo sapiens
cuguaccaguuaauu

SEQ ID NO: 246388 - RNA, 15 nt, Homo sapiens
ccccauaaucacuga

SEQ ID NO: 246389 - RNA, 19 nt, Homo sapiens
agagcacacuguagcauua

SEQ ID NO: 246390 - RNA, 17 nt, Homo sapiens
ucugcaccccacuucag

SEQ ID NO: 246391 - RNA, 20 nt, Homo sapiens
gugccacacaccuugacaaa

SEQ ID NO: 246392 - RNA, 17 nt, Homo sapiens
ucauuguucuugugaac

SEQ ID NO: 246393 - RNA, 15 nt, Homo sapiens
guagucagacuggau

SEQ ID NO: 246394 - RNA, 21 nt, Homo sapiens
ugacucuuccccauaaucacu

SEQ ID NO: 246395 - RNA, 18 nt, Homo sapiens
accaguuaauuuuuccaa

SEQ ID NO: 246396 - RNA, 21 nt, Homo sapiens
uguuguuuuaggaauacauaa

SEQ ID NO: 246397 - RNA, 11 nt, Homo sapiens
uuacaguucug

SEQ ID NO: 246398 - RNA, 15 nt, Homo sapiens
ccaugggacagggag

SEQ ID NO: 246399 - RNA, 15 nt, Homo sapiens
uggcacucagucucu

SEQ ID NO: 246400 - RNA, 16 nt, Homo sapiens
auucaaucuuuacaca

SEQ ID NO: 246401 - RNA, 15 nt, Homo sapiens
aucccagcacugcac

SEQ ID NO: 246402 - RNA, 16 nt, Homo sapiens
auaaugucccuucaca

SEQ ID NO: 246403 - RNA, 20 nt, Homo sapiens
acacacaaaggcuauugacc

SEQ ID NO: 246404 - RNA, 15 nt, Homo sapiens
gaauacauaaaguau

SEQ ID NO: 246405 - RNA, 22 nt, Homo sapiens
ugaggcuuuaaaacuuauccuc

SEQ ID NO: 246406 - RNA, 17 nt, Homo sapiens
ccccaucugguccaguu

SEQ ID NO: 246407 - RNA, 22 nt, Homo sapiens
auacauucacccagauaaucau

SEQ ID NO: 246408 - RNA, 23 nt, Homo sapiens
ugggguagaaggauccuccaaag

SEQ ID NO: 246409 - RNA, 14 nt, Homo sapiens
cuggaggcacccuu

SEQ ID NO: 246410 - RNA, 14 nt, Homo sapiens
uggccagaagucaa

SEQ ID NO: 246411 - RNA, 13 nt, Homo sapiens
gugacucuugggg

SEQ ID NO: 246412 - RNA, 15 nt, Homo sapiens
ucagggaagcccuga

SEQ ID NO: 246413 - RNA, 14 nt, Homo sapiens
gugaauuaggcugu

SEQ ID NO: 246414 - RNA, 19 nt, Homo sapiens
gagcacauaccaugugcca

SEQ ID NO: 246415 - RNA, 18 nt, Homo sapiens
acaguuuauuauguacua

SEQ ID NO: 246416 - RNA, 20 nt, Homo sapiens
uacauaaaguaugugcauau

SEQ ID NO: 246417 - RNA, 15 nt, Homo sapiens
gaccagccuugacac

SEQ ID NO: 246418 - RNA, 12 nt, Homo sapiens
cuguaccaguua

SEQ ID NO: 246419 - RNA, 19 nt, Homo sapiens
aucuauaauuuaccuaaga

SEQ ID NO: 246420 - RNA, 13 nt, Homo sapiens
aagucaucuugcu

SEQ ID NO: 246421 - RNA, 20 nt, Homo sapiens
uccuuguauuuaaauauuaa

SEQ ID NO: 246422 - RNA, 12 nt, Homo sapiens
cacagagugccu

SEQ ID NO: 246423 - RNA, 17 nt, Homo sapiens
aggcagauuucagggaa

SEQ ID NO: 246424 - RNA, 15 nt, Homo sapiens
uggaagauggcauaa

SEQ ID NO: 246425 - RNA, 17 nt, Homo sapiens
cugucuucguacuggga

SEQ ID NO: 246426 - RNA, 22 nt, Homo sapiens
auuuccucauuuuuauaauguc

SEQ ID NO: 246427 - RNA, 20 nt, Homo sapiens
uguuguuuuaggaauacaua

SEQ ID NO: 246428 - RNA, 11 nt, Homo sapiens
agccacuucau

SEQ ID NO: 246429 - RNA, 17 nt, Homo sapiens
agaauaaaggcaguuuu

SEQ ID NO: 246430 - RNA, 21 nt, Homo sapiens
cuucagccuagccgaccucag

SEQ ID NO: 246431 - RNA, 16 nt, Homo sapiens
cgguggacccagggau

SEQ ID NO: 246432 - RNA, 16 nt, Homo sapiens
acaccuugacaaaauc

SEQ ID NO: 246433 - RNA, 15 nt, Homo sapiens
cugcugaugaacaaa

SEQ ID NO: 246434 - RNA, 22 nt, Homo sapiens
cuaacagcccuccucugcacuc

SEQ ID NO: 246435 - RNA, 23 nt, Homo sapiens
gaaagcaucauuauuugcagaga

SEQ ID NO: 246436 - RNA, 19 nt, Homo sapiens
ggagcccugucuccucucu

SEQ ID NO: 246437 - RNA, 12 nt, Homo sapiens
ugacucuugggg

SEQ ID NO: 246438 - RNA, 20 nt, Homo sapiens
agacucagggccccagcacu

SEQ ID NO: 246439 - RNA, 13 nt, Homo sapiens
gccaacccuguga

SEQ ID NO: 246440 - RNA, 18 nt, Homo sapiens
cgagcacauaccaugugc

SEQ ID NO: 246441 - RNA, 19 nt, Homo sapiens
gaaauaaaguuggugacag

SEQ ID NO: 246442 - RNA, 21 nt, Homo sapiens
acuauugaaguugcagauuca

SEQ ID NO: 246443 - RNA, 23 nt, Homo sapiens
ugcauucugagguaaccucauua

SEQ ID NO: 246444 - RNA, 18 nt, Homo sapiens
cauccccaggauccacuu

SEQ ID NO: 246445 - RNA, 15 nt, Homo sapiens
aucucaguaccccau

SEQ ID NO: 246446 - RNA, 15 nt, Homo sapiens
cuaaggacacagugg

SEQ ID NO: 246447 - RNA, 21 nt, Homo sapiens
acagugcucuuuucuccucac

SEQ ID NO: 246448 - RNA, 23 nt, Homo sapiens
uaauuuuuuugugggaaauccac

SEQ ID NO: 246449 - RNA, 20 nt, Homo sapiens
caugagcuggcgggauugaa

SEQ ID NO: 246450 - RNA, 16 nt, Homo sapiens
uucaugcucccagcca

SEQ ID NO: 246451 - RNA, 19 nt, Homo sapiens
uacaaugcauucugaggua

SEQ ID NO: 246452 - RNA, 15 nt, Homo sapiens
ccagggaugacaugu

SEQ ID NO: 246453 - RNA, 21 nt, Homo sapiens
uggaaauaaagucagauggaa

SEQ ID NO: 246454 - RNA, 21 nt, Homo sapiens
cuucaguuuccauccccagga

SEQ ID NO: 246455 - RNA, 19 nt, Homo sapiens
gguuucauguuaguuaccu

SEQ ID NO: 246456 - RNA, 18 nt, Homo sapiens
guaccuugaacacugggg

SEQ ID NO: 246457 - RNA, 21 nt, Homo sapiens
acucuuccccauaaucacuga

SEQ ID NO: 246458 - RNA, 21 nt, Homo sapiens
ugucauccucaaagaaagugu

SEQ ID NO: 246459 - RNA, 15 nt, Homo sapiens
cucucuucucuccag

SEQ ID NO: 246460 - RNA, 16 nt, Homo sapiens
caucuugcuaccagua

SEQ ID NO: 246461 - RNA, 19 nt, Homo sapiens
gauuuagcaggaagcugug

SEQ ID NO: 246462 - RNA, 23 nt, Homo sapiens
cguaacagauuuuguuggcauag

SEQ ID NO: 246463 - RNA, 23 nt, Homo sapiens
uccccugucacgugugggcaaug

SEQ ID NO: 246464 - RNA, 15 nt, Homo sapiens
uuauaguuacugugu

SEQ ID NO: 246465 - RNA, 18 nt, Homo sapiens
agagggcccaguggugcc

SEQ ID NO: 246466 - RNA, 15 nt, Homo sapiens
acagaauucacuugu

SEQ ID NO: 246467 - RNA, 16 nt, Homo sapiens
uaucucaguaccccau

SEQ ID NO: 246468 - RNA, 20 nt, Homo sapiens
ugcaccccaggcagccacuc

SEQ ID NO: 246469 - RNA, 22 nt, Homo sapiens
aaauguuuugaguguuauuuca

SEQ ID NO: 246470 - RNA, 13 nt, Homo sapiens
aguaugugcauau

SEQ ID NO: 246471 - RNA, 17 nt, Homo sapiens
gaugaacaaaucugcac

SEQ ID NO: 246472 - RNA, 18 nt, Homo sapiens
uugguuuaaagaaagugu

SEQ ID NO: 246473 - RNA, 21 nt, Homo sapiens
cuuuucuccucacuguaucca

SEQ ID NO: 246474 - RNA, 13 nt, Homo sapiens
gccccaauucgau

SEQ ID NO: 246475 - RNA, 14 nt, Homo sapiens
aagcacagcccuua

SEQ ID NO: 246476 - RNA, 13 nt, Homo sapiens
cucaguaccccau

SEQ ID NO: 246477 - RNA, 18 nt, Homo sapiens
ggccuucaguuuccaucc

SEQ ID NO: 246478 - RNA, 14 nt, Homo sapiens
gccauauuaccccu

SEQ ID NO: 246479 - RNA, 19 nt, Homo sapiens
aacccaaagugugacucau

SEQ ID NO: 246480 - RNA, 13 nt, Homo sapiens
cuuccccuugccc

SEQ ID NO: 246481 - RNA, 17 nt, Homo sapiens
ucucuguauuccuagaa

SEQ ID NO: 246482 - RNA, 19 nt, Homo sapiens
gauucacuccuuugagucu

SEQ ID NO: 246483 - RNA, 13 nt, Homo sapiens
cccaggauccacu

SEQ ID NO: 246484 - RNA, 17 nt, Homo sapiens
ugccccccuugccagac

SEQ ID NO: 246485 - RNA, 19 nt, Homo sapiens
aaacuuuuuuucuguacca

SEQ ID NO: 246486 - RNA, 19 nt, Homo sapiens
cucagaaucgcuccaccuu

SEQ ID NO: 246487 - RNA, 20 nt, Homo sapiens
aauacauaaaguaugugcau

SEQ ID NO: 246488 - RNA, 16 nt, Homo sapiens
uugcaaaccaucccag

SEQ ID NO: 246489 - RNA, 20 nt, Homo sapiens
cauuguucuugugaacccaa

SEQ ID NO: 246490 - RNA, 22 nt, Homo sapiens
caggagaggggcagaacagccg

SEQ ID NO: 246491 - RNA, 17 nt, Homo sapiens
caguuugguuucuagca

SEQ ID NO: 246492 - RNA, 21 nt, Homo sapiens
ggcaauguucccccucuccuc

SEQ ID NO: 246493 - RNA, 18 nt, Homo sapiens
aaucgcuccaccuugcag

SEQ ID NO: 246494 - RNA, 20 nt, Homo sapiens
gggguagaaggauccuccaa

SEQ ID NO: 246495 - RNA, 15 nt, Homo sapiens
ugacacugcucuaac

SEQ ID NO: 246496 - RNA, 16 nt, Homo sapiens
cucaguagucagacug

SEQ ID NO: 246497 - RNA, 14 nt, Homo sapiens
ugcugaacaucaca

SEQ ID NO: 246498 - RNA, 12 nt, Homo sapiens
aagaaaguguau

SEQ ID NO: 246499 - RNA, 21 nt, Homo sapiens
cauuguucuugugaacccaaa

SEQ ID NO: 246500 - RNA, 14 nt, Homo sapiens
ggugggacagggac

SEQ ID NO: 246501 - RNA, 15 nt, Homo sapiens
ggaggacgcucucug

SEQ ID NO: 246502 - RNA, 17 nt, Homo sapiens
aggcagccacuccuagc

SEQ ID NO: 246503 - RNA, 15 nt, Homo sapiens
cagggacccacuuca

SEQ ID NO: 246504 - RNA, 17 nt, Homo sapiens
auacuuguugcugucac

SEQ ID NO: 246505 - RNA, 15 nt, Homo sapiens
cauaaugacagagag

SEQ ID NO: 246506 - RNA, 22 nt, Homo sapiens
auagcucuggggugggcaguuu

SEQ ID NO: 246507 - RNA, 16 nt, Homo sapiens
acccucagaugcacau

SEQ ID NO: 246508 - RNA, 13 nt, Homo sapiens
gaugcugucuucg

SEQ ID NO: 246509 - RNA, 19 nt, Homo sapiens
auuaaucuuaguguaugau

SEQ ID NO: 246510 - RNA, 15 nt, Homo sapiens
gcaccccacuucaga

SEQ ID NO: 246511 - RNA, 21 nt, Homo sapiens
uuucugauaaaagauggccau

SEQ ID NO: 246512 - RNA, 13 nt, Homo sapiens
gccccauguaucu

SEQ ID NO: 246513 - RNA, 20 nt, Homo sapiens
ucacaccaccccccaugcca

SEQ ID NO: 246514 - RNA, 19 nt, Homo sapiens
uggcagaguuacaguucug

SEQ ID NO: 246515 - RNA, 19 nt, Homo sapiens
gcccacugccugcccagug

SEQ ID NO: 246516 - RNA, 18 nt, Homo sapiens
aaucugcaccccacuuca

SEQ ID NO: 246517 - RNA, 14 nt, Homo sapiens
uccuaauacuguca

SEQ ID NO: 246518 - RNA, 13 nt, Homo sapiens
gagccaaggguuc

SEQ ID NO: 246519 - RNA, 13 nt, Homo sapiens
caauuauuaccau

SEQ ID NO: 246520 - RNA, 14 nt, Homo sapiens
ucugucagcugcaa

SEQ ID NO: 246521 - RNA, 19 nt, Homo sapiens
uauuaucugucagcugcaa

SEQ ID NO: 246522 - RNA, 14 nt, Homo sapiens
agggacccacuuca

SEQ ID NO: 246523 - RNA, 19 nt, Homo sapiens
cuggcacucugaggucucu

SEQ ID NO: 246524 - RNA, 14 nt, Homo sapiens
aaagguccuggcaa

SEQ ID NO: 246525 - RNA, 18 nt, Homo sapiens
uuauuucagagagcaaau

SEQ ID NO: 246526 - RNA, 14 nt, Homo sapiens
acugacacaugcug

SEQ ID NO: 246527 - RNA, 23 nt, Homo sapiens
ucccucccagaggagccaccagu

SEQ ID NO: 246528 - RNA, 15 nt, Homo sapiens
uggcugcuagcacuu

SEQ ID NO: 246529 - RNA, 14 nt, Homo sapiens
uaccucacuggggu

SEQ ID NO: 246530 - RNA, 13 nt, Homo sapiens
cugucagcugcaa

SEQ ID NO: 246531 - RNA, 24 nt, Homo sapiens
ggcuuuaaaacuuauccuccauga

SEQ ID NO: 246532 - RNA, 14 nt, Homo sapiens
uauaucuaccccag

SEQ ID NO: 246533 - RNA, 20 nt, Homo sapiens
aauucacagugcucuuuucu

SEQ ID NO: 246534 - RNA, 15 nt, Homo sapiens
uaugaaaaugucauu

SEQ ID NO: 246535 - RNA, 18 nt, Homo sapiens
aagagccccccacugcag

SEQ ID NO: 246536 - RNA, 18 nt, Homo sapiens
accgagcacauaccaugu

SEQ ID NO: 246537 - RNA, 18 nt, Homo sapiens
ucugauaaaagauggcca

SEQ ID NO: 246538 - RNA, 14 nt, Homo sapiens
auuaacaugugcca

SEQ ID NO: 246539 - RNA, 15 nt, Homo sapiens
auuggauuuccuaau

SEQ ID NO: 246540 - RNA, 14 nt, Homo sapiens
aaucuuuacacaau

SEQ ID NO: 246541 - RNA, 14 nt, Homo sapiens
ugcaaaccauccca

SEQ ID NO: 246542 - RNA, 21 nt, Homo sapiens
gcuccacuuggucugugagau

SEQ ID NO: 246543 - RNA, 17 nt, Homo sapiens
uaaagguccuggcaaag

SEQ ID NO: 246544 - RNA, 16 nt, Homo sapiens
uauuaauacauucacc

SEQ ID NO: 246545 - RNA, 16 nt, Homo sapiens
caggcucuccaggugg

SEQ ID NO: 246546 - RNA, 17 nt, Homo sapiens
ccccauaaucacugacc

SEQ ID NO: 246547 - RNA, 17 nt, Homo sapiens
gucacacagagugccug

SEQ ID NO: 246548 - RNA, 15 nt, Homo sapiens
uaaauauaucuaccc

SEQ ID NO: 246549 - RNA, 20 nt, Homo sapiens
aacagauuuuguuggcauag

SEQ ID NO: 246550 - RNA, 15 nt, Homo sapiens
uauguacuauucaau

SEQ ID NO: 246551 - RNA, 17 nt, Homo sapiens
auuuccuaauacuguca

SEQ ID NO: 246552 - RNA, 17 nt, Homo sapiens
guaaagcuuugugcaga

SEQ ID NO: 246553 - RNA, 16 nt, Homo sapiens
uuuugaaaaugggcuc

SEQ ID NO: 246554 - RNA, 22 nt, Homo sapiens
cagaccucggugggcauucaca

SEQ ID NO: 246555 - RNA, 11 nt, Homo sapiens
gguagccacug

SEQ ID NO: 246556 - RNA, 18 nt, Homo sapiens
uauccuccaugaauauca

SEQ ID NO: 246557 - RNA, 16 nt, Homo sapiens
aaagcuuugugcagau

SEQ ID NO: 246558 - RNA, 14 nt, Homo sapiens
uauaacuaacaugu

SEQ ID NO: 246559 - RNA, 22 nt, Homo sapiens
caguguuuuaggagcaugagug

SEQ ID NO: 246560 - RNA, 16 nt, Homo sapiens
guaacuuucugcugau

SEQ ID NO: 246561 - RNA, 15 nt, Homo sapiens
agcucgguggaccca

SEQ ID NO: 246562 - RNA, 15 nt, Homo sapiens
gucuuggggugggca

SEQ ID NO: 246563 - RNA, 19 nt, Homo sapiens
acagggaggacgcucucug

SEQ ID NO: 246564 - RNA, 17 nt, Homo sapiens
ucuccccuucucuguau

SEQ ID NO: 246565 - RNA, 18 nt, Homo sapiens
cagcuagcaaaauuacua

SEQ ID NO: 246566 - RNA, 13 nt, Homo sapiens
acagaauucacuu

SEQ ID NO: 246567 - RNA, 12 nt, Homo sapiens
ucuucagccuag

SEQ ID NO: 246568 - RNA, 16 nt, Homo sapiens
auugaaggaugcuguc

SEQ ID NO: 246569 - RNA, 12 nt, Homo sapiens
caccuugacaaa

SEQ ID NO: 246570 - RNA, 22 nt, Homo sapiens
uuccuuagcuuagaccucagcc

SEQ ID NO: 246571 - RNA, 18 nt, Homo sapiens
ggaagcugugagagcagu

SEQ ID NO: 246572 - RNA, 14 nt, Homo sapiens
ucauugacuaucaa

SEQ ID NO: 246573 - RNA, 20 nt, Homo sapiens
uuacaaugcauucugaggua

SEQ ID NO: 246574 - RNA, 11 nt, Homo sapiens
auucacaccac

SEQ ID NO: 246575 - RNA, 23 nt, Homo sapiens
aggcaacugaggcagacagcagc

SEQ ID NO: 246576 - RNA, 19 nt, Homo sapiens
uacauaaaguaugugcaua

SEQ ID NO: 246577 - RNA, 12 nt, Homo sapiens
aaucacugacca

SEQ ID NO: 246578 - RNA, 19 nt, Homo sapiens
ugugaauuaggcuguaacu

SEQ ID NO: 246579 - RNA, 21 nt, Homo sapiens
cugacuauugaaguugcagau

SEQ ID NO: 246580 - RNA, 20 nt, Homo sapiens
ccuaauacugucauccucaa

SEQ ID NO: 246581 - RNA, 16 nt, Homo sapiens
cauuuuugaaaccaaa

SEQ ID NO: 246582 - RNA, 22 nt, Homo sapiens
gccuauuaucugucagcugcaa

SEQ ID NO: 246583 - RNA, 22 nt, Homo sapiens
ucuguauuccuagaaacugaca

SEQ ID NO: 246584 - RNA, 14 nt, Homo sapiens
accccugagcugaa

SEQ ID NO: 246585 - RNA, 13 nt, Homo sapiens
caacuacuaauag

SEQ ID NO: 246586 - RNA, 18 nt, Homo sapiens
acugaccagccuugacac

SEQ ID NO: 246587 - RNA, 18 nt, Homo sapiens
auuaggcuguaacuacuu

SEQ ID NO: 246588 - RNA, 19 nt, Homo sapiens
cuuugugcagauucuuuac

SEQ ID NO: 246589 - RNA, 22 nt, Homo sapiens
aaggguaccuugaacacugggg

SEQ ID NO: 246590 - RNA, 20 nt, Homo sapiens
gacgugcacgcacacugucu

SEQ ID NO: 246591 - RNA, 16 nt, Homo sapiens
cacuuacagauggcag

SEQ ID NO: 246592 - RNA, 19 nt, Homo sapiens
cugaaguucaugcucccag

SEQ ID NO: 246593 - RNA, 13 nt, Homo sapiens
cgauucacuccuu

SEQ ID NO: 246594 - RNA, 16 nt, Homo sapiens
gaugggcccugacucu

SEQ ID NO: 246595 - RNA, 15 nt, Homo sapiens
agcucaggcacacuu

SEQ ID NO: 246596 - RNA, 18 nt, Homo sapiens
ccagggaugacauguccc

SEQ ID NO: 246597 - RNA, 22 nt, Homo sapiens
auccugaggcuccacuuggucu

SEQ ID NO: 246598 - RNA, 23 nt, Homo sapiens
guauuccuagaaacugacacaug

SEQ ID NO: 246599 - RNA, 14 nt, Homo sapiens
uaauaaguacugug

SEQ ID NO: 246600 - RNA, 18 nt, Homo sapiens
aggagccaccaguucuca

SEQ ID NO: 246601 - RNA, 21 nt, Homo sapiens
ccuggcaaagaugaucaguau

SEQ ID NO: 246602 - RNA, 13 nt, Homo sapiens
acacagagugccu

SEQ ID NO: 246603 - RNA, 17 nt, Homo sapiens
ugcauuuaauuuauuga

SEQ ID NO: 246604 - RNA, 19 nt, Homo sapiens
uucugcuaccucacugggg

SEQ ID NO: 246605 - RNA, 22 nt, Homo sapiens
acuguggcugcuagcacuugga

SEQ ID NO: 246606 - RNA, 12 nt, Homo sapiens
acagagugccug

SEQ ID NO: 246607 - RNA, 13 nt, Homo sapiens
ugcagcccacugc

SEQ ID NO: 246608 - RNA, 15 nt, Homo sapiens
aggcagccacuccua

SEQ ID NO: 246609 - RNA, 20 nt, Homo sapiens
accaguauuguuuacccaau

SEQ ID NO: 246610 - RNA, 23 nt, Homo sapiens
gaugaacaaaucugcaccccacu

SEQ ID NO: 246611 - RNA, 22 nt, Homo sapiens
aaaugucauuguucuugugaac

SEQ ID NO: 246612 - RNA, 21 nt, Homo sapiens
aauacaguuuauuauguacua

SEQ ID NO: 246613 - RNA, 19 nt, Homo sapiens
cuuuaaaacuuauccucca

SEQ ID NO: 246614 - RNA, 22 nt, Homo sapiens
caacccgucuggcccaccaggg

SEQ ID NO: 246615 - RNA, 17 nt, Homo sapiens
acgcacacugucugccc

SEQ ID NO: 246616 - RNA, 14 nt, Homo sapiens
acgcacacugucug

SEQ ID NO: 246617 - RNA, 16 nt, Homo sapiens
cauguacgauucacuc

SEQ ID NO: 246618 - RNA, 14 nt, Homo sapiens
ccaauuuuuuauaa

SEQ ID NO: 246619 - RNA, 23 nt, Homo sapiens
uagcaggaagcugugagagcagu

SEQ ID NO: 246620 - RNA, 20 nt, Homo sapiens
ggauccacuuggucugugag

SEQ ID NO: 246621 - RNA, 20 nt, Homo sapiens
gagauucucuggcacucuga

SEQ ID NO: 246622 - RNA, 18 nt, Homo sapiens
cuagagcacacuguagca

SEQ ID NO: 246623 - RNA, 22 nt, Homo sapiens
agccuauaucuucaucugugaa

SEQ ID NO: 246624 - RNA, 18 nt, Homo sapiens
acucagucucucuucucu

SEQ ID NO: 246625 - RNA, 9 nt, Homo sapiens
cuaccccag

SEQ ID NO: 246626 - RNA, 20 nt, Homo sapiens
cacuggacugacgacuugag

SEQ ID NO: 246627 - RNA, 23 nt, Homo sapiens
gaggcuccacuuggucugugaga

SEQ ID NO: 246628 - RNA, 18 nt, Homo sapiens
uagcaggaagcugugaga

SEQ ID NO: 246629 - RNA, 20 nt, Homo sapiens
cuuuugacacugcucuaaca

SEQ ID NO: 246630 - RNA, 21 nt, Homo sapiens
uucagccuagccgaccucagc

SEQ ID NO: 246631 - RNA, 19 nt, Homo sapiens
ggguccuuuugacacugcu

SEQ ID NO: 246632 - RNA, 19 nt, Homo sapiens
uccacuuggucugugagau

SEQ ID NO: 246633 - RNA, 22 nt, Homo sapiens
gaugcugucuucguacugggaa

SEQ ID NO: 246634 - RNA, 19 nt, Homo sapiens
ccacuuggucugugagaug

SEQ ID NO: 246635 - RNA, 15 nt, Homo sapiens
gcagcccacugccug

SEQ ID NO: 246636 - RNA, 13 nt, Homo sapiens
ggccauauuaccc

SEQ ID NO: 246637 - RNA, 15 nt, Homo sapiens
aaccucauuaucagu

SEQ ID NO: 246638 - RNA, 19 nt, Homo sapiens
aggaauacauaaaguaugu

SEQ ID NO: 246639 - RNA, 23 nt, Homo sapiens
accaugugccacacaccuugaca

SEQ ID NO: 246640 - RNA, 21 nt, Homo sapiens
aggcuccacuuggucugugag

SEQ ID NO: 246641 - RNA, 20 nt, Homo sapiens
cugguccaguuccuucacuu

SEQ ID NO: 246642 - RNA, 21 nt, Homo sapiens
acuuacagauggcagcaguga

SEQ ID NO: 246643 - RNA, 15 nt, Homo sapiens
agugugacucauuaa

SEQ ID NO: 246644 - RNA, 21 nt, Homo sapiens
ccagaggagccaccaguucuc

SEQ ID NO: 246645 - RNA, 14 nt, Homo sapiens
gggcucagccuggu

SEQ ID NO: 246646 - RNA, 18 nt, Homo sapiens
cuguagcauuacaguggg

SEQ ID NO: 246647 - RNA, 15 nt, Homo sapiens
ugcacucccaccuga

SEQ ID NO: 246648 - RNA, 18 nt, Homo sapiens
cagggcucagccuggugg

SEQ ID NO: 246649 - RNA, 23 nt, Homo sapiens
auucugagguaaccucauuauca

SEQ ID NO: 246650 - RNA, 15 nt, Homo sapiens
ccuugccagacaugu

SEQ ID NO: 246651 - RNA, 17 nt, Homo sapiens
auguacgauucacuccu

SEQ ID NO: 246652 - RNA, 19 nt, Homo sapiens
agggauuuucagcccucag

SEQ ID NO: 246653 - RNA, 13 nt, Homo sapiens
uggucugugagau

SEQ ID NO: 246654 - RNA, 17 nt, Homo sapiens
gccaacccugugacuga

SEQ ID NO: 246655 - RNA, 19 nt, Homo sapiens
ugguaauaaguacugugua

SEQ ID NO: 246656 - RNA, 14 nt, Homo sapiens
aacugaagccagaa

SEQ ID NO: 246657 - RNA, 17 nt, Homo sapiens
cagcccccugaccugga

SEQ ID NO: 246658 - RNA, 18 nt, Homo sapiens
cuagaaagagaaacaguu

SEQ ID NO: 246659 - RNA, 18 nt, Homo sapiens
uaguuaccuuauaguuac

SEQ ID NO: 246660 - RNA, 18 nt, Homo sapiens
ugaggcaauuagacacuu

SEQ ID NO: 246661 - RNA, 20 nt, Homo sapiens
guacccggugacucuugggg

SEQ ID NO: 246662 - RNA, 18 nt, Homo sapiens
cagcucuccccuucucug

SEQ ID NO: 246663 - RNA, 16 nt, Homo sapiens
gaggagccaccaguuc

SEQ ID NO: 246664 - RNA, 20 nt, Homo sapiens
ccugagcucgguggacccag

SEQ ID NO: 246665 - RNA, 22 nt, Homo sapiens
gaauucugcuaccucacugggg

SEQ ID NO: 246666 - RNA, 21 nt, Homo sapiens
uauguacuauucaaucuuuac

SEQ ID NO: 246667 - RNA, 16 nt, Homo sapiens
ccugugacugacaugu

SEQ ID NO: 246668 - RNA, 20 nt, Homo sapiens
gacacaugcugaacaucaca

SEQ ID NO: 246669 - RNA, 14 nt, Homo sapiens
cuucacuuacagau

SEQ ID NO: 246670 - RNA, 17 nt, Homo sapiens
aaacguauugcauuuaa

SEQ ID NO: 246671 - RNA, 16 nt, Homo sapiens
acccgaguaacuuucu

SEQ ID NO: 246672 - RNA, 21 nt, Homo sapiens
ucuuccccauaaucacugacc

SEQ ID NO: 246673 - RNA, 11 nt, Homo sapiens
acaaugcauuc

SEQ ID NO: 246674 - RNA, 13 nt, Homo sapiens
uccuaauacuguc

SEQ ID NO: 246675 - RNA, 21 nt, Homo sapiens
cuauaauuuaccuaagauuac

SEQ ID NO: 246676 - RNA, 17 nt, Homo sapiens
ccucggugggcauucac

SEQ ID NO: 246677 - RNA, 11 nt, Homo sapiens
aagugcuguuu

SEQ ID NO: 246678 - RNA, 15 nt, Homo sapiens
uugacaaaaucuuuu

SEQ ID NO: 246679 - RNA, 15 nt, Homo sapiens
cuuauccuccaugaa

SEQ ID NO: 246680 - RNA, 13 nt, Homo sapiens
cacuucauucccc

SEQ ID NO: 246681 - RNA, 11 nt, Homo sapiens
gagcacacugu

SEQ ID NO: 246682 - RNA, 16 nt, Homo sapiens
ucggugggcauucaca

SEQ ID NO: 246683 - RNA, 23 nt, Homo sapiens
uccuggcaaagaugaucaguaug

SEQ ID NO: 246684 - RNA, 19 nt, Homo sapiens
auguaucucaguaccccau

SEQ ID NO: 246685 - RNA, 22 nt, Homo sapiens
cuuuucggccccauguaucuca

SEQ ID NO: 246686 - RNA, 14 nt, Homo sapiens
agaaaguguauuug

SEQ ID NO: 246687 - RNA, 14 nt, Homo sapiens
cuguggcagaguua

SEQ ID NO: 246688 - RNA, 22 nt, Homo sapiens
gggcacaguacccggugacucu

SEQ ID NO: 246689 - RNA, 14 nt, Homo sapiens
ccaugggacaggga

SEQ ID NO: 246690 - RNA, 14 nt, Homo sapiens
cugcccagugccau

SEQ ID NO: 246691 - RNA, 17 nt, Homo sapiens
gcacgguggugcccaag

SEQ ID NO: 246692 - RNA, 12 nt, Homo sapiens
augcauucugag

SEQ ID NO: 246693 - RNA, 18 nt, Homo sapiens
uagcaaaauuacuaccag

SEQ ID NO: 246694 - RNA, 22 nt, Homo sapiens
aggaugugucuuggggugggca

SEQ ID NO: 246695 - RNA, 12 nt, Homo sapiens
accuugacaaaa

SEQ ID NO: 246696 - RNA, 18 nt, Homo sapiens
gucugccagccagcagcc

SEQ ID NO: 246697 - RNA, 16 nt, Homo sapiens
accuugaacacugggg

SEQ ID NO: 246698 - RNA, 12 nt, Homo sapiens
cccaguggugcc

SEQ ID NO: 246699 - RNA, 20 nt, Homo sapiens
cagggcccugagcucggugg

SEQ ID NO: 246700 - RNA, 22 nt, Homo sapiens
auuuuuuugugggaaauccaca

SEQ ID NO: 246701 - RNA, 22 nt, Homo sapiens
auguacuauucaaucuuuacac

SEQ ID NO: 246702 - RNA, 21 nt, Homo sapiens
uaugauuauuaacgaugucca

SEQ ID NO: 246703 - RNA, 18 nt, Homo sapiens
ccuuagcuuagaccucag

SEQ ID NO: 246704 - RNA, 17 nt, Homo sapiens
aaccagagccugagugu

SEQ ID NO: 246705 - RNA, 22 nt, Homo sapiens
aaaauaaauauaucuaccccag

SEQ ID NO: 246706 - RNA, 21 nt, Homo sapiens
guccuuuugacacugcucuaa

SEQ ID NO: 246707 - RNA, 23 nt, Homo sapiens
uguggagcuaaggacacagugga

SEQ ID NO: 246708 - RNA, 14 nt, Homo sapiens
cucacuguauccag

SEQ ID NO: 246709 - RNA, 17 nt, Homo sapiens
gcagaguuacaguucug

SEQ ID NO: 246710 - RNA, 18 nt, Homo sapiens
accauuuuugaaaccaaa

SEQ ID NO: 246711 - RNA, 12 nt, Homo sapiens
aggacacagugg

SEQ ID NO: 246712 - RNA, 16 nt, Homo sapiens
aacucauuucuagcag

SEQ ID NO: 246713 - RNA, 12 nt, Homo sapiens
aucccagcacug

SEQ ID NO: 246714 - RNA, 15 nt, Homo sapiens
uucuccucacuguau

SEQ ID NO: 246715 - RNA, 21 nt, Homo sapiens
uucccggguagccacuggacu

SEQ ID NO: 246716 - RNA, 23 nt, Homo sapiens
gagacucagggccccagcacuaa

SEQ ID NO: 246717 - RNA, 22 nt, Homo sapiens
auauuuauuuauuuucccugag

SEQ ID NO: 246718 - RNA, 22 nt, Homo sapiens
guguggagcuaaggacacagug

SEQ ID NO: 246719 - RNA, 15 nt, Homo sapiens
agggauuuucagccc

SEQ ID NO: 246720 - RNA, 21 nt, Homo sapiens
gagcucgguggacccagggau

SEQ ID NO: 246721 - RNA, 23 nt, Homo sapiens
ucauuccccugaugggcccugac

SEQ ID NO: 246722 - RNA, 13 nt, Homo sapiens
agcuuagaccuca

SEQ ID NO: 246723 - RNA, 19 nt, Homo sapiens
aaagucacacagagugccu

SEQ ID NO: 246724 - RNA, 14 nt, Homo sapiens
gaggucucuguggc

SEQ ID NO: 246725 - RNA, 18 nt, Homo sapiens
cucuaauucacagugcuc

SEQ ID NO: 246726 - RNA, 21 nt, Homo sapiens
gccuccucuguccagggcccu

SEQ ID NO: 246727 - RNA, 23 nt, Homo sapiens
ucagaccucggugggcauucaca

SEQ ID NO: 246728 - RNA, 12 nt, Homo sapiens
ucaguaccccau

SEQ ID NO: 246729 - RNA, 20 nt, Homo sapiens
uaccccagacuagauguagu

SEQ ID NO: 246730 - RNA, 16 nt, Homo sapiens
agagcuggaggcaccc

SEQ ID NO: 246731 - RNA, 16 nt, Homo sapiens
cacauaccaugugcca

SEQ ID NO: 246732 - RNA, 17 nt, Homo sapiens
gagccccccacugcaga

SEQ ID NO: 246733 - RNA, 16 nt, Homo sapiens
ucacacagagugccug

SEQ ID NO: 246734 - RNA, 19 nt, Homo sapiens
ugccucugcagcccacugc

SEQ ID NO: 246735 - RNA, 17 nt, Homo sapiens
gcuauugaccgagcaca

SEQ ID NO: 246736 - RNA, 15 nt, Homo sapiens
gugagucaccacuuc

SEQ ID NO: 246737 - RNA, 11 nt, Homo sapiens
acgguggugcc

SEQ ID NO: 246738 - RNA, 19 nt, Homo sapiens
aguucaugcagcuguggca

SEQ ID NO: 246739 - RNA, 19 nt, Homo sapiens
acucagggccccagcacua

SEQ ID NO: 246740 - RNA, 14 nt, Homo sapiens
gaacaaaucugcac

SEQ ID NO: 246741 - RNA, 16 nt, Homo sapiens
gagagcaaauggcaaa

SEQ ID NO: 246742 - RNA, 14 nt, Homo sapiens
acuucacacacagg

SEQ ID NO: 246743 - RNA, 17 nt, Homo sapiens
aggagcaugagugccgu

SEQ ID NO: 246744 - RNA, 22 nt, Homo sapiens
acuggauccaaacccaucuucc

SEQ ID NO: 246745 - RNA, 17 nt, Homo sapiens
cccaaagugugacucau

SEQ ID NO: 246746 - RNA, 19 nt, Homo sapiens
ggugggccuccucugucca

SEQ ID NO: 246747 - RNA, 14 nt, Homo sapiens
acugaggcagacag

SEQ ID NO: 246748 - RNA, 23 nt, Homo sapiens
ggucugugagaugcuagaacucc

SEQ ID NO: 246749 - RNA, 19 nt, Homo sapiens
cauggguggcacucagucu

SEQ ID NO: 246750 - RNA, 16 nt, Homo sapiens
ccuucuuacaaugcau

SEQ ID NO: 246751 - RNA, 17 nt, Homo sapiens
uagccgaccucagccuu

SEQ ID NO: 246752 - RNA, 21 nt, Homo sapiens
uuaaucuuaguguaugauuac

SEQ ID NO: 246753 - RNA, 15 nt, Homo sapiens
agaguuacaguucug

SEQ ID NO: 246754 - RNA, 21 nt, Homo sapiens
gauccugucuggccuucaguu

SEQ ID NO: 246755 - RNA, 18 nt, Homo sapiens
acaugcugaacaucacag

SEQ ID NO: 246756 - RNA, 21 nt, Homo sapiens
acuguguaauuagugccacuu

SEQ ID NO: 246757 - RNA, 19 nt, Homo sapiens
ccuccaugaauaucaguua

SEQ ID NO: 246758 - RNA, 15 nt, Homo sapiens
agcacgguggugccc

SEQ ID NO: 246759 - RNA, 18 nt, Homo sapiens
ucagaagucaucuugcua

SEQ ID NO: 246760 - RNA, 16 nt, Homo sapiens
cugaacaucacagcuu

SEQ ID NO: 246761 - RNA, 16 nt, Homo sapiens
auaccaugugccacac

SEQ ID NO: 246762 - RNA, 14 nt, Homo sapiens
ccccaucuggucca

SEQ ID NO: 246763 - RNA, 17 nt, Homo sapiens
cugcuaccucacugggg

SEQ ID NO: 246764 - RNA, 16 nt, Homo sapiens
caaaucugcaccccac

SEQ ID NO: 246765 - RNA, 14 nt, Homo sapiens
ucuauaauuuaccu

SEQ ID NO: 246766 - RNA, 20 nt, Homo sapiens
ggccagaagucaaggcuuag

SEQ ID NO: 246767 - RNA, 23 nt, Homo sapiens
aggaugugucuuggggugggcac

SEQ ID NO: 246768 - RNA, 17 nt, Homo sapiens
cuggggugggcaguuuu

SEQ ID NO: 246769 - RNA, 16 nt, Homo sapiens
cuucaucugugaaaug

SEQ ID NO: 246770 - RNA, 14 nt, Homo sapiens
gaguuuggccagaa

SEQ ID NO: 246771 - RNA, 14 nt, Homo sapiens
uuuuccaacuacua

SEQ ID NO: 246772 - RNA, 18 nt, Homo sapiens
cucuuccccauaaucacu

SEQ ID NO: 246773 - RNA, 18 nt, Homo sapiens
ucuaacagcccuccucug

SEQ ID NO: 246774 - RNA, 13 nt, Homo sapiens
cauaccaugugcc

SEQ ID NO: 246775 - RNA, 17 nt, Homo sapiens
aaggacacaguggagau

SEQ ID NO: 246776 - RNA, 12 nt, Homo sapiens
agccgaccucag

SEQ ID NO: 246777 - RNA, 17 nt, Homo sapiens
cagggacccacuucaca

SEQ ID NO: 246778 - RNA, 14 nt, Homo sapiens
gaaggaugcugucu

SEQ ID NO: 246779 - RNA, 13 nt, Homo sapiens
caguucugugguu

SEQ ID NO: 246780 - RNA, 16 nt, Homo sapiens
guaaagcuuugugcag

SEQ ID NO: 246781 - RNA, 22 nt, Homo sapiens
ccccaugccaccggcuccacuu

SEQ ID NO: 246782 - RNA, 12 nt, Homo sapiens
aagauggcauaa

SEQ ID NO: 246783 - RNA, 21 nt, Homo sapiens
agagccugaguguugccuaau

SEQ ID NO: 246784 - RNA, 23 nt, Homo sapiens
aauuccuuagcuuagaccucagc

SEQ ID NO: 246785 - RNA, 19 nt, Homo sapiens
cccucuccucucuuccucc

SEQ ID NO: 246786 - RNA, 13 nt, Homo sapiens
cagaccucggugg

SEQ ID NO: 246787 - RNA, 20 nt, Homo sapiens
ggaggcacccuuagccacuu

SEQ ID NO: 246788 - RNA, 21 nt, Homo sapiens
acuguaaagcuuugugcagau

SEQ ID NO: 246789 - RNA, 20 nt, Homo sapiens
uccugaggcuccacuugguc

SEQ ID NO: 246790 - RNA, 22 nt, Homo sapiens
ggguaggcgggaaggaggguua

SEQ ID NO: 246791 - RNA, 22 nt, Homo sapiens
agagcaguuugguuucuagcau

SEQ ID NO: 246792 - RNA, 16 nt, Homo sapiens
uagcuuagaccucagc

SEQ ID NO: 246793 - RNA, 16 nt, Homo sapiens
auccacacugagcuga

SEQ ID NO: 246794 - RNA, 18 nt, Homo sapiens
aggcagccggccaaggcc

SEQ ID NO: 246795 - RNA, 21 nt, Homo sapiens
ggcucuaauucacagugcucu

SEQ ID NO: 246796 - RNA, 22 nt, Homo sapiens
auuggauuuccuaauacuguca

SEQ ID NO: 246797 - RNA, 20 nt, Homo sapiens
aaugacagagagaggcagau

SEQ ID NO: 246798 - RNA, 15 nt, Homo sapiens
agccagcagccagcu

SEQ ID NO: 246799 - RNA, 17 nt, Homo sapiens
uuagcuuagaccucagc

SEQ ID NO: 246800 - RNA, 14 nt, Homo sapiens
auuuuugaaaccaa

SEQ ID NO: 246801 - RNA, 21 nt, Homo sapiens
cucuguauuccuagaaacuga

SEQ ID NO: 246802 - RNA, 11 nt, Homo sapiens
cucaugcugcc

SEQ ID NO: 246803 - RNA, 14 nt, Homo sapiens
uggagcugggcuaa

SEQ ID NO: 246804 - RNA, 22 nt, Homo sapiens
ggcacucugaggucucuguggc

SEQ ID NO: 246805 - RNA, 18 nt, Homo sapiens
auuauuaccaucucucca

SEQ ID NO: 246806 - RNA, 23 nt, Homo sapiens
aacccaaagugugacucauuaaa

SEQ ID NO: 246807 - RNA, 17 nt, Homo sapiens
ugaggucucuguggcag

SEQ ID NO: 246808 - RNA, 22 nt, Homo sapiens
cuuagacccucaugcugccaau

SEQ ID NO: 246809 - RNA, 16 nt, Homo sapiens
cagauggcagcaguga

SEQ ID NO: 246810 - RNA, 17 nt, Homo sapiens
cauaaaguaugugcaua

SEQ ID NO: 246811 - RNA, 10 nt, Homo sapiens
ggcaguuuuu

SEQ ID NO: 246812 - RNA, 15 nt, Homo sapiens
aucuugcuaccagua

SEQ ID NO: 246813 - RNA, 13 nt, Homo sapiens
uggaaucuuguaa

SEQ ID NO: 246814 - RNA, 12 nt, Homo sapiens
gucagacuggau

SEQ ID NO: 246815 - RNA, 20 nt, Homo sapiens
guuaauuuuuccaacuacua

SEQ ID NO: 246816 - RNA, 18 nt, Homo sapiens
ggaauuucuuaacuucuu

SEQ ID NO: 246817 - RNA, 14 nt, Homo sapiens
ugccagacaugugg

SEQ ID NO: 246818 - RNA, 15 nt, Homo sapiens
gaaacugacacaugc

SEQ ID NO: 246819 - RNA, 19 nt, Homo sapiens
gugucuuggggugggcaca

SEQ ID NO: 246820 - RNA, 22 nt, Homo sapiens
uuaccccuuuucggccccaugu

SEQ ID NO: 246821 - RNA, 19 nt, Homo sapiens
auugaccgagcacauacca

SEQ ID NO: 246822 - RNA, 16 nt, Homo sapiens
agcucaggcacacuuc

SEQ ID NO: 246823 - RNA, 18 nt, Homo sapiens
uaaaauuaacaugugcca

SEQ ID NO: 246824 - RNA, 18 nt, Homo sapiens
cugccaauauccuaauaa

SEQ ID NO: 246825 - RNA, 12 nt, Homo sapiens
uggaagauggca

SEQ ID NO: 246826 - RNA, 22 nt, Homo sapiens
uaguuguaauuuuuuuguggga

SEQ ID NO: 246827 - RNA, 17 nt, Homo sapiens
ccugacucuuccccaua

SEQ ID NO: 246828 - RNA, 10 nt, Homo sapiens
cauugaacaa

SEQ ID NO: 246829 - RNA, 23 nt, Homo sapiens
agguccuggcaaagaugaucagu

SEQ ID NO: 246830 - RNA, 12 nt, Homo sapiens
agaacagccgcu

SEQ ID NO: 246831 - RNA, 22 nt, Homo sapiens
gccugaggcaauuagacacuuu

SEQ ID NO: 246832 - RNA, 11 nt, Homo sapiens
caaagugugac

SEQ ID NO: 246833 - RNA, 19 nt, Homo sapiens
aaauguuguuuuaggaaua

SEQ ID NO: 246834 - RNA, 19 nt, Homo sapiens
guuaauuuugaagugcugu

SEQ ID NO: 246835 - RNA, 18 nt, Homo sapiens
gugagaugcuagaacucc

SEQ ID NO: 246836 - RNA, 17 nt, Homo sapiens
cuggucaggcucuccag

SEQ ID NO: 246837 - RNA, 14 nt, Homo sapiens
cagggaagcccuga

SEQ ID NO: 246838 - RNA, 19 nt, Homo sapiens
cucagaugcacaugagcug

SEQ ID NO: 246839 - RNA, 17 nt, Homo sapiens
ugucacaauuauuacca

SEQ ID NO: 246840 - RNA, 14 nt, Homo sapiens
cuucucuccagcug

SEQ ID NO: 246841 - RNA, 14 nt, Homo sapiens
gcacacugucugcc

SEQ ID NO: 246842 - RNA, 21 nt, Homo sapiens
aaacuaccagcccuacaccau

SEQ ID NO: 246843 - RNA, 21 nt, Homo sapiens
acaggcaacugaggcagacag

SEQ ID NO: 246844 - RNA, 17 nt, Homo sapiens
uuucauuuaucuauaau

SEQ ID NO: 246845 - RNA, 14 nt, Homo sapiens
gaguuacaguucug

SEQ ID NO: 246846 - RNA, 16 nt, Homo sapiens
accggcuccacuuucc

SEQ ID NO: 246847 - RNA, 14 nt, Homo sapiens
agcaugagugccgu

SEQ ID NO: 246848 - RNA, 23 nt, Homo sapiens
agaauucugcuaccucacugggg

SEQ ID NO: 246849 - RNA, 12 nt, Homo sapiens
ugaacacugggg

SEQ ID NO: 246850 - RNA, 17 nt, Homo sapiens
acccuuagccacuucau

SEQ ID NO: 246851 - RNA, 14 nt, Homo sapiens
auuccuagaaacug

SEQ ID NO: 246852 - RNA, 19 nt, Homo sapiens
gucacagaggaucugcuug

SEQ ID NO: 246853 - RNA, 23 nt, Homo sapiens
gaacagccgcuccugucugccag

SEQ ID NO: 246854 - RNA, 19 nt, Homo sapiens
uucauguuaguuaccuuau

SEQ ID NO: 246855 - RNA, 17 nt, Homo sapiens
gcccuagagcacacugu

SEQ ID NO: 246856 - RNA, 17 nt, Homo sapiens
gggauuggggaagacug

SEQ ID NO: 246857 - RNA, 19 nt, Homo sapiens
ucucauggguggcacucag

SEQ ID NO: 246858 - RNA, 14 nt, Homo sapiens
aauacauucaccca

SEQ ID NO: 246859 - RNA, 15 nt, Homo sapiens
uaaaguaugugcaua

SEQ ID NO: 246860 - RNA, 19 nt, Homo sapiens
aauuuaccuaagauuacaa

SEQ ID NO: 246861 - RNA, 20 nt, Homo sapiens
gcccacugccugcccagugc

SEQ ID NO: 246862 - RNA, 22 nt, Homo sapiens
ucaaagaaaguguauugguuua

SEQ ID NO: 246863 - RNA, 19 nt, Homo sapiens
auggcaaagacuggaucca

SEQ ID NO: 246864 - RNA, 16 nt, Homo sapiens
cccaccccugagcuga

SEQ ID NO: 246865 - RNA, 17 nt, Homo sapiens
acugucauccucaaaga

SEQ ID NO: 246866 - RNA, 20 nt, Homo sapiens
caaucuuuacacaaugucac

SEQ ID NO: 246867 - RNA, 16 nt, Homo sapiens
guggcacucagucucu

SEQ ID NO: 246868 - RNA, 20 nt, Homo sapiens
gccccccuugccagacaugu

SEQ ID NO: 246869 - RNA, 22 nt, Homo sapiens
cuaauagaauaaaggcaguuuu

SEQ ID NO: 246870 - RNA, 13 nt, Homo sapiens
agagcuggaggca

SEQ ID NO: 246871 - RNA, 22 nt, Homo sapiens
auuuaucuauaauuuaccuaag

SEQ ID NO: 246872 - RNA, 16 nt, Homo sapiens
agcaaaauuacuacca

SEQ ID NO: 246873 - RNA, 11 nt, Homo sapiens
gggcccugacu

SEQ ID NO: 246874 - RNA, 15 nt, Homo sapiens
auuuuuccaacuacu

SEQ ID NO: 246875 - RNA, 14 nt, Homo sapiens
acgauucacuccuu

SEQ ID NO: 246876 - RNA, 19 nt, Homo sapiens
ugacccgaguaacuuucug

SEQ ID NO: 246877 - RNA, 17 nt, Homo sapiens
uaaagcuuugugcagau

SEQ ID NO: 246878 - RNA, 10 nt, Homo sapiens
aguaccccau

SEQ ID NO: 246879 - RNA, 12 nt, Homo sapiens
aguuacugugua

SEQ ID NO: 246880 - RNA, 16 nt, Homo sapiens
cuuuggcaugagaugg

SEQ ID NO: 246881 - RNA, 22 nt, Homo sapiens
cccuuuuauuaauacauucacc

SEQ ID NO: 246882 - RNA, 17 nt, Homo sapiens
uguacgauucacuccuu

SEQ ID NO: 246883 - RNA, 20 nt, Homo sapiens
gggauuuucagcccucagaa

SEQ ID NO: 246884 - RNA, 12 nt, Homo sapiens
uggucugugaga

SEQ ID NO: 246885 - RNA, 20 nt, Homo sapiens
caggaagcugugagagcagu

SEQ ID NO: 246886 - RNA, 13 nt, Homo sapiens
aucaguccaaagg

SEQ ID NO: 246887 - RNA, 22 nt, Homo sapiens
auccugucuggccuucaguuuc

SEQ ID NO: 246888 - RNA, 14 nt, Homo sapiens
gcuguaacuacuuu

SEQ ID NO: 246889 - RNA, 13 nt, Homo sapiens
uugcuaccaguau

SEQ ID NO: 246890 - RNA, 19 nt, Homo sapiens
aucucuccagcuagcaaaa

SEQ ID NO: 246891 - RNA, 22 nt, Homo sapiens
aaaucagaagucaucuugcuac

SEQ ID NO: 246892 - RNA, 23 nt, Homo sapiens
auuuagaagccaacuaugauuau

SEQ ID NO: 246893 - RNA, 21 nt, Homo sapiens
aguuccuucacuuacagaugg

SEQ ID NO: 246894 - RNA, 16 nt, Homo sapiens
cuggugagucaccacu

SEQ ID NO: 246895 - RNA, 18 nt, Homo sapiens
auaaaggcaguuuucuaa

SEQ ID NO: 246896 - RNA, 13 nt, Homo sapiens
accagccuugaca

SEQ ID NO: 246897 - RNA, 13 nt, Homo sapiens
gucagacuggaua

SEQ ID NO: 246898 - RNA, 22 nt, Homo sapiens
gcauucacaccaccccccaugc

SEQ ID NO: 246899 - RNA, 23 nt, Homo sapiens
aaacuuuuuuucuguaccaguua

SEQ ID NO: 246900 - RNA, 17 nt, Homo sapiens
uuugaaaccaaaccaga

SEQ ID NO: 246901 - RNA, 18 nt, Homo sapiens
uuagaagccaacuaugau

SEQ ID NO: 246902 - RNA, 13 nt, Homo sapiens
cagcugacuaaac

SEQ ID NO: 246903 - RNA, 15 nt, Homo sapiens
acugccugcccagug

SEQ ID NO: 246904 - RNA, 14 nt, Homo sapiens
auaaggacacugaa

SEQ ID NO: 246905 - RNA, 17 nt, Homo sapiens
ucucuccagcugacuaa

SEQ ID NO: 246906 - RNA, 21 nt, Homo sapiens
agugccacuuaauguauguua

SEQ ID NO: 246907 - RNA, 14 nt, Homo sapiens
cacuuggucuguga

SEQ ID NO: 246908 - RNA, 21 nt, Homo sapiens
aaccagagccugaguguugcc

SEQ ID NO: 246909 - RNA, 15 nt, Homo sapiens
gcacaguacccggug

SEQ ID NO: 246910 - RNA, 15 nt, Homo sapiens
uacauucacccagau

SEQ ID NO: 246911 - RNA, 21 nt, Homo sapiens
aguggugccccagcacggugg

SEQ ID NO: 246912 - RNA, 17 nt, Homo sapiens
ccaggcagccacuccua

SEQ ID NO: 246913 - RNA, 15 nt, Homo sapiens
aagcauaaugacaga

SEQ ID NO: 246914 - RNA, 20 nt, Homo sapiens
aaaucugcaccccacuucag

SEQ ID NO: 246915 - RNA, 14 nt, Homo sapiens
gaugugucuugggg

SEQ ID NO: 246916 - RNA, 20 nt, Homo sapiens
caguuauuuuuaaacuguaa

SEQ ID NO: 246917 - RNA, 22 nt, Homo sapiens
acuaauagaauaaaggcaguuu

SEQ ID NO: 246918 - RNA, 12 nt, Homo sapiens
cccuucucugua

SEQ ID NO: 246919 - RNA, 13 nt, Homo sapiens
augaaaaugucau

SEQ ID NO: 246920 - RNA, 19 nt, Homo sapiens
uugaccgagcacauaccau

SEQ ID NO: 246921 - RNA, 23 nt, Homo sapiens
cacucugaggucucuguggcagg

SEQ ID NO: 246922 - RNA, 16 nt, Homo sapiens
ccugccuccugguccc

SEQ ID NO: 246923 - RNA, 15 nt, Homo sapiens
uauaucuaccccaga

SEQ ID NO: 246924 - RNA, 16 nt, Homo sapiens
agagccccacccucag

SEQ ID NO: 246925 - RNA, 21 nt, Homo sapiens
gacagagccccacccucagau

SEQ ID NO: 246926 - RNA, 17 nt, Homo sapiens
agcacuaaagcagugga

SEQ ID NO: 246927 - RNA, 21 nt, Homo sapiens
cagauuucagggaagcccuga

SEQ ID NO: 246928 - RNA, 18 nt, Homo sapiens
auuucagggaagcccuga

SEQ ID NO: 246929 - RNA, 19 nt, Homo sapiens
agccagcagccagcucuca

SEQ ID NO: 246930 - RNA, 21 nt, Homo sapiens
aacccaucuuccuggaccuga

SEQ ID NO: 246931 - RNA, 15 nt, Homo sapiens
aaucuuuacacaaug

SEQ ID NO: 246932 - RNA, 14 nt, Homo sapiens
acuaugauuauuaa

SEQ ID NO: 246933 - RNA, 22 nt, Homo sapiens
aagacuguggcugcuagcacuu

SEQ ID NO: 246934 - RNA, 24 nt, Homo sapiens
ccagcacugcaccccaggcagcca

SEQ ID NO: 246935 - RNA, 20 nt, Homo sapiens
agauuucagggaagcccuga

SEQ ID NO: 246936 - RNA, 16 nt, Homo sapiens
ugagccuauaucuuca

SEQ ID NO: 246937 - RNA, 12 nt, Homo sapiens
agaaacugacac

SEQ ID NO: 246938 - RNA, 17 nt, Homo sapiens
cgugcacgcacacuguc

SEQ ID NO: 246939 - RNA, 16 nt, Homo sapiens
gucuccucucucugua

SEQ ID NO: 246940 - RNA, 17 nt, Homo sapiens
cuaauucacagugcucu

SEQ ID NO: 246941 - RNA, 23 nt, Homo sapiens
aaacauuuaaauuauacaaucau

SEQ ID NO: 246942 - RNA, 22 nt, Homo sapiens
aggcuccacuuggucugugaga

SEQ ID NO: 246943 - RNA, 16 nt, Homo sapiens
ugagucuuuggaugcc

SEQ ID NO: 246944 - RNA, 14 nt, Homo sapiens
auaguccgucucug

SEQ ID NO: 246945 - RNA, 16 nt, Homo sapiens
agggccccagcacuaa

SEQ ID NO: 246946 - RNA, 16 nt, Homo sapiens
ugccccccuugccaga

SEQ ID NO: 246947 - RNA, 14 nt, Homo sapiens
caagcauaaugaca

SEQ ID NO: 246948 - RNA, 22 nt, Homo sapiens
aauacauaaaguaugugcauau

SEQ ID NO: 246949 - RNA, 20 nt, Homo sapiens
augcugucuucguacuggga

SEQ ID NO: 246950 - RNA, 14 nt, Homo sapiens
caggcaacugaggc

SEQ ID NO: 246951 - RNA, 20 nt, Homo sapiens
ccuugcaaaccaucccagca

SEQ ID NO: 246952 - RNA, 15 nt, Homo sapiens
auacauucacccaga

SEQ ID NO: 246953 - RNA, 23 nt, Homo sapiens
uuugaaaaugggcucaaccagaa

SEQ ID NO: 246954 - RNA, 17 nt, Homo sapiens
ugugaauuaggcuguaa

SEQ ID NO: 246955 - RNA, 14 nt, Homo sapiens
ugaggcuccacuug

SEQ ID NO: 246956 - RNA, 13 nt, Homo sapiens
caaaccaucccag

SEQ ID NO: 246957 - RNA, 17 nt, Homo sapiens
uauaaggacacugaagc

SEQ ID NO: 246958 - RNA, 11 nt, Homo sapiens
ucacacacagg

SEQ ID NO: 246959 - RNA, 15 nt, Homo sapiens
gagccaccaguucuc

SEQ ID NO: 246960 - RNA, 16 nt, Homo sapiens
gacccagggaugacau

SEQ ID NO: 246961 - RNA, 15 nt, Homo sapiens
ugaauaucaguuauu

SEQ ID NO: 246962 - RNA, 20 nt, Homo sapiens
gcucuaauucacagugcucu

SEQ ID NO: 246963 - RNA, 13 nt, Homo sapiens
uucuguaccaguu

SEQ ID NO: 246964 - RNA, 21 nt, Homo sapiens
auccuaauaaaaaggugacca

SEQ ID NO: 246965 - RNA, 19 nt, Homo sapiens
aggaauuucuuaacuucuu

SEQ ID NO: 246966 - RNA, 13 nt, Homo sapiens
auuguuuacccaa

SEQ ID NO: 246967 - RNA, 21 nt, Homo sapiens
acuuaagcaucuggcucuaau

SEQ ID NO: 246968 - RNA, 20 nt, Homo sapiens
aauggcaaagacuggaucca

SEQ ID NO: 246969 - RNA, 16 nt, Homo sapiens
augcugaacaucacag

SEQ ID NO: 246970 - RNA, 21 nt, Homo sapiens
cacugccugcccagugccauc

SEQ ID NO: 246971 - RNA, 15 nt, Homo sapiens
auuuugaagugcugu

SEQ ID NO: 246972 - RNA, 21 nt, Homo sapiens
caaguucaugcagcuguggca

SEQ ID NO: 246973 - RNA, 18 nt, Homo sapiens
agaauucacuuguggcua

SEQ ID NO: 246974 - RNA, 11 nt, Homo sapiens
cagcacugcac

SEQ ID NO: 246975 - RNA, 14 nt, Homo sapiens
ucacacagagugcc

SEQ ID NO: 246976 - RNA, 14 nt, Homo sapiens
gggaagacuguggc

SEQ ID NO: 246977 - RNA, 17 nt, Homo sapiens
ucacgggaccaguauug

SEQ ID NO: 246978 - RNA, 21 nt, Homo sapiens
cagcuagcaaaauuacuacca

SEQ ID NO: 246979 - RNA, 21 nt, Homo sapiens
aguucucauggguggcacuca

SEQ ID NO: 246980 - RNA, 16 nt, Homo sapiens
gagccguuacuacaca

SEQ ID NO: 246981 - RNA, 15 nt, Homo sapiens
auuucuuaacuucuu

SEQ ID NO: 246982 - RNA, 14 nt, Homo sapiens
uuugacacugcucu

SEQ ID NO: 246983 - RNA, 13 nt, Homo sapiens
auaguuacugugu

SEQ ID NO: 246984 - RNA, 15 nt, Homo sapiens
uaaagcuuugugcag

SEQ ID NO: 246985 - RNA, 20 nt, Homo sapiens
auaguccgucucugcuuauc

SEQ ID NO: 246986 - RNA, 18 nt, Homo sapiens
ugugaacccaaaguguga

SEQ ID NO: 246987 - RNA, 20 nt, Homo sapiens
acuguggcugcuagcacuug

SEQ ID NO: 246988 - RNA, 21 nt, Homo sapiens
ucaaucuuuacacaaugucac

SEQ ID NO: 246989 - RNA, 19 nt, Homo sapiens
aacccaucuuccuggaccu

SEQ ID NO: 246990 - RNA, 21 nt, Homo sapiens
aggguaccuugaacacugggg

SEQ ID NO: 246991 - RNA, 17 nt, Homo sapiens
uggauccaaacccaucu

SEQ ID NO: 246992 - RNA, 15 nt, Homo sapiens
acucauuucuagcag

SEQ ID NO: 246993 - RNA, 14 nt, Homo sapiens
cacaguacccggug

SEQ ID NO: 246994 - RNA, 15 nt, Homo sapiens
caugagugccgugug

SEQ ID NO: 246995 - RNA, 15 nt, Homo sapiens
acugcaccccaggca

SEQ ID NO: 246996 - RNA, 12 nt, Homo sapiens
uuaucaguccaa

SEQ ID NO: 246997 - RNA, 16 nt, Homo sapiens
ucuguauuccuagaaa

SEQ ID NO: 246998 - RNA, 22 nt, Homo sapiens
ugaggcagacagcagcucaggc

SEQ ID NO: 246999 - RNA, 13 nt, Homo sapiens
aauuauuaccauc

SEQ ID NO: 247000 - RNA, 17 nt, Homo sapiens
cagaaucgcuccaccuu

SEQ ID NO: 247001 - RNA, 19 nt, Homo sapiens
auuuagaagccaacuauga

SEQ ID NO: 247002 - RNA, 19 nt, Homo sapiens
gcuuuaaaacuuauccucc

SEQ ID NO: 247003 - RNA, 14 nt, Homo sapiens
caucccagcacugc

SEQ ID NO: 247004 - RNA, 13 nt, Homo sapiens
gcccagugccauc

SEQ ID NO: 247005 - RNA, 13 nt, Homo sapiens
caacuaugauuau

SEQ ID NO: 247006 - RNA, 22 nt, Homo sapiens
ccuggugggccuccucugucca

SEQ ID NO: 247007 - RNA, 16 nt, Homo sapiens
aauauaucuaccccag

SEQ ID NO: 247008 - RNA, 19 nt, Homo sapiens
cugacacaccaggcgcuaa

SEQ ID NO: 247009 - RNA, 13 nt, Homo sapiens
ugaacacuggggg

SEQ ID NO: 247010 - RNA, 21 nt, Homo sapiens
cagugggugccccccuugcca

SEQ ID NO: 247011 - RNA, 13 nt, Homo sapiens
auccuccaaaguc

SEQ ID NO: 247012 - RNA, 14 nt, Homo sapiens
cuugaacacugggg

SEQ ID NO: 247013 - RNA, 19 nt, Homo sapiens
caaagaugaucaguaugaa

SEQ ID NO: 247014 - RNA, 14 nt, Homo sapiens
gcacccuuagccac

SEQ ID NO: 247015 - RNA, 16 nt, Homo sapiens
accccaggcagccacu

SEQ ID NO: 247016 - RNA, 17 nt, Homo sapiens
gccaagcauaaugacag

SEQ ID NO: 247017 - RNA, 18 nt, Homo sapiens
caaauggcaaagacugga

SEQ ID NO: 247018 - RNA, 21 nt, Homo sapiens
gugaauuaggcuguaacuacu

SEQ ID NO: 247019 - RNA, 14 nt, Homo sapiens
agccccaauucgau

SEQ ID NO: 247020 - RNA, 13 nt, Homo sapiens
ugugagaugcuag

SEQ ID NO: 247021 - RNA, 18 nt, Homo sapiens
ggucagagggcccagugg

SEQ ID NO: 247022 - RNA, 10 nt, Homo sapiens
ucuaccccag

SEQ ID NO: 247023 - RNA, 21 nt, Homo sapiens
cguucccggguagccacugga

SEQ ID NO: 247024 - RNA, 17 nt, Homo sapiens
uuuuguuggcauagcuc

SEQ ID NO: 247025 - RNA, 14 nt, Homo sapiens
aaaacguauugcau

SEQ ID NO: 247026 - RNA, 13 nt, Homo sapiens
agccgaccucagc

SEQ ID NO: 247027 - RNA, 16 nt, Homo sapiens
ccauuuuugaaaccaa

SEQ ID NO: 247028 - RNA, 15 nt, Homo sapiens
ucuuaguguaugauu

SEQ ID NO: 247029 - RNA, 16 nt, Homo sapiens
gagccccccacugcag

SEQ ID NO: 247030 - RNA, 19 nt, Homo sapiens
caccuugacaaaaucuuuu

SEQ ID NO: 247031 - RNA, 24 nt, Homo sapiens
aauacauaaaguaugugcauauuu

SEQ ID NO: 247032 - RNA, 19 nt, Homo sapiens
accagagccguuacuacac

SEQ ID NO: 247033 - RNA, 17 nt, Homo sapiens
ggcacccuuagccacuu

SEQ ID NO: 247034 - RNA, 16 nt, Homo sapiens
aguaugaaaaugucau

SEQ ID NO: 247035 - RNA, 16 nt, Homo sapiens
ugcagcccacugccug

SEQ ID NO: 247036 - RNA, 18 nt, Homo sapiens
aggcagccacuccuagcc

SEQ ID NO: 247037 - RNA, 23 nt, Homo sapiens
aaaucuuuuaauacaguuuauua

SEQ ID NO: 247038 - RNA, 15 nt, Homo sapiens
ggcauucacaccacc

SEQ ID NO: 247039 - RNA, 15 nt, Homo sapiens
ucaucuugcuaccag

SEQ ID NO: 247040 - RNA, 18 nt, Homo sapiens
acuauugaaguugcagau

SEQ ID NO: 247041 - RNA, 14 nt, Homo sapiens
uagccgaccucagc

SEQ ID NO: 247042 - RNA, 20 nt, Homo sapiens
acugaggcagacagcagcuc

SEQ ID NO: 247043 - RNA, 22 nt, Homo sapiens
ccuucaguuuccauccccagga

SEQ ID NO: 247044 - RNA, 23 nt, Homo sapiens
gucuucagccuagccgaccucag

SEQ ID NO: 247045 - RNA, 14 nt, Homo sapiens
accaccccccaugc

SEQ ID NO: 247046 - RNA, 17 nt, Homo sapiens
auuaauacauucaccca

SEQ ID NO: 247047 - RNA, 23 nt, Homo sapiens
aaggguaccuugaacacuggggg

SEQ ID NO: 247048 - RNA, 18 nt, Homo sapiens
agccagcagccagcucuc

SEQ ID NO: 247049 - RNA, 21 nt, Homo sapiens
uauagaaggguaccuugaaca

SEQ ID NO: 247050 - RNA, 16 nt, Homo sapiens
cucuccagcugacuaa

SEQ ID NO: 247051 - RNA, 13 nt, Homo sapiens
uaauacauucacc

SEQ ID NO: 247052 - RNA, 21 nt, Homo sapiens
aagcccaaguucaugcagcug

SEQ ID NO: 247053 - RNA, 19 nt, Homo sapiens
aucuuuacacaaugucacg

SEQ ID NO: 247054 - RNA, 16 nt, Homo sapiens
uguuggcauagcucug

SEQ ID NO: 247055 - RNA, 24 nt, Homo sapiens
ccugugacugacauguacgauuca

SEQ ID NO: 247056 - RNA, 14 nt, Homo sapiens
uucagcccucagaa

SEQ ID NO: 247057 - RNA, 16 nt, Homo sapiens
aucauuaaaauuaaca

SEQ ID NO: 247058 - RNA, 19 nt, Homo sapiens
agacuagauguaguauuuu

SEQ ID NO: 247059 - RNA, 23 nt, Homo sapiens
aaggcuuagacccucaugcugcc

SEQ ID NO: 247060 - RNA, 15 nt, Homo sapiens
aauaaguacugugua

SEQ ID NO: 247061 - RNA, 18 nt, Homo sapiens
uaggagcaugagugccgu

SEQ ID NO: 247062 - RNA, 14 nt, Homo sapiens
caauauccuaauaa

SEQ ID NO: 247063 - RNA, 21 nt, Homo sapiens
agguggucagagggcccagug

SEQ ID NO: 247064 - RNA, 21 nt, Homo sapiens
ucgauccccugucacgugugg

SEQ ID NO: 247065 - RNA, 20 nt, Homo sapiens
ugacucuuccccauaaucac

SEQ ID NO: 247066 - RNA, 17 nt, Homo sapiens
uacuauucaaucuuuac

SEQ ID NO: 247067 - RNA, 15 nt, Homo sapiens
ccccaggauccacuu

SEQ ID NO: 247068 - RNA, 15 nt, Homo sapiens
acuuggucugugaga

SEQ ID NO: 247069 - RNA, 15 nt, Homo sapiens
cauguaucucaguac

SEQ ID NO: 247070 - RNA, 18 nt, Homo sapiens
uccuuagcuuagaccuca

SEQ ID NO: 247071 - RNA, 18 nt, Homo sapiens
ugugccacacaccuugac

SEQ ID NO: 247072 - RNA, 18 nt, Homo sapiens
cuauucaaucuuuacaca

SEQ ID NO: 247073 - RNA, 15 nt, Homo sapiens
cuuuaaaacuuaucc

SEQ ID NO: 247074 - RNA, 12 nt, Homo sapiens
ccucucucugua

SEQ ID NO: 247075 - RNA, 19 nt, Homo sapiens
acuucuugcuucuuucuag

SEQ ID NO: 247076 - RNA, 17 nt, Homo sapiens
gccaucaggaugagcag

SEQ ID NO: 247077 - RNA, 18 nt, Homo sapiens
ccaugugccacacaccuu

SEQ ID NO: 247078 - RNA, 12 nt, Homo sapiens
uauuuauuuucc

SEQ ID NO: 247079 - RNA, 21 nt, Homo sapiens
cacacuguagcauuacagugg

SEQ ID NO: 247080 - RNA, 17 nt, Homo sapiens
cucuccccuucucugua

SEQ ID NO: 247081 - RNA, 17 nt, Homo sapiens
uaccaucucuccagcua

SEQ ID NO: 247082 - RNA, 22 nt, Homo sapiens
ucuuguaaagguccuggcaaag

SEQ ID NO: 247083 - RNA, 20 nt, Homo sapiens
caauuauuaccaucucucca

SEQ ID NO: 247084 - RNA, 15 nt, Homo sapiens
acaucacagcuuauu

SEQ ID NO: 247085 - RNA, 15 nt, Homo sapiens
guaccccauggagcu

SEQ ID NO: 247086 - RNA, 18 nt, Homo sapiens
guucccggguagccacug

SEQ ID NO: 247087 - RNA, 19 nt, Homo sapiens
uauuuggaaauaaagucag

SEQ ID NO: 247088 - RNA, 17 nt, Homo sapiens
guacagaauucugcuac

SEQ ID NO: 247089 - RNA, 20 nt, Homo sapiens
aagcaucauuauuugcagag

SEQ ID NO: 247090 - RNA, 13 nt, Homo sapiens
auaucuaccccag

SEQ ID NO: 247091 - RNA, 12 nt, Homo sapiens
agauggccauau

SEQ ID NO: 247092 - RNA, 15 nt, Homo sapiens
uuuccaacuacuaau

SEQ ID NO: 247093 - RNA, 16 nt, Homo sapiens
cauaaaguaugugcau

SEQ ID NO: 247094 - RNA, 21 nt, Homo sapiens
cagcacgguggugcccaagcc

SEQ ID NO: 247095 - RNA, 14 nt, Homo sapiens
acuuggucugugag

SEQ ID NO: 247096 - RNA, 18 nt, Homo sapiens
gcccuccucugcacuccc

SEQ ID NO: 247097 - RNA, 14 nt, Homo sapiens
cuugcaaaccaucc

SEQ ID NO: 247098 - RNA, 14 nt, Homo sapiens
accuugacaaaauc

SEQ ID NO: 247099 - RNA, 18 nt, Homo sapiens
cauguacgauucacuccu

SEQ ID NO: 247100 - RNA, 15 nt, Homo sapiens
aggcucuccaggugg

SEQ ID NO: 247101 - RNA, 21 nt, Homo sapiens
gucuuaggaugugucuugggg

SEQ ID NO: 247102 - RNA, 23 nt, Homo sapiens
uaaacuuuuuuucuguaccaguu

SEQ ID NO: 247103 - RNA, 14 nt, Homo sapiens
agcccaaguucaug

SEQ ID NO: 247104 - RNA, 14 nt, Homo sapiens
uuguugcugucaca

SEQ ID NO: 247105 - RNA, 20 nt, Homo sapiens
cauguaucucaguaccccau

SEQ ID NO: 247106 - RNA, 18 nt, Homo sapiens
gauauuuauuuauuuucc

SEQ ID NO: 247107 - RNA, 18 nt, Homo sapiens
auagaauaaaggcaguuu

SEQ ID NO: 247108 - RNA, 14 nt, Homo sapiens
accaugugccacac

SEQ ID NO: 247109 - RNA, 21 nt, Homo sapiens
cuguggcugcuagcacuugga

SEQ ID NO: 247110 - RNA, 15 nt, Homo sapiens
uugaaaaugggcuca

SEQ ID NO: 247111 - RNA, 23 nt, Homo sapiens
aaaaugucauuguucuugugaac

SEQ ID NO: 247112 - RNA, 21 nt, Homo sapiens
uguggcugcuagcacuuggag

SEQ ID NO: 247113 - RNA, 22 nt, Homo sapiens
ccaacccgucuggcccaccagg

SEQ ID NO: 247114 - RNA, 20 nt, Homo sapiens
cccuuucaacagaauucacu

SEQ ID NO: 247115 - RNA, 14 nt, Homo sapiens
agcacgguggugcc

SEQ ID NO: 247116 - RNA, 16 nt, Homo sapiens
uucugagguaaccuca

SEQ ID NO: 247117 - RNA, 15 nt, Homo sapiens
cuguggcugcuagca

SEQ ID NO: 247118 - RNA, 18 nt, Homo sapiens
gauccaaacccaucuucc

SEQ ID NO: 247119 - RNA, 20 nt, Homo sapiens
ugcccagggcucagccuggu

SEQ ID NO: 247120 - RNA, 14 nt, Homo sapiens
uggaaauaaaguca

SEQ ID NO: 247121 - RNA, 13 nt, Homo sapiens
agcacacuguagc

SEQ ID NO: 247122 - RNA, 14 nt, Homo sapiens
caguggacaccagg

SEQ ID NO: 247123 - RNA, 17 nt, Homo sapiens
auucucuggcacucuga

SEQ ID NO: 247124 - RNA, 13 nt, Homo sapiens
aaaggcaguuuuc

SEQ ID NO: 247125 - RNA, 20 nt, Homo sapiens
uuuuauaaugucccuucaca

SEQ ID NO: 247126 - RNA, 21 nt, Homo sapiens
acugacauguacgauucacuc

SEQ ID NO: 247127 - RNA, 15 nt, Homo sapiens
cuguggcagaguuac

SEQ ID NO: 247128 - RNA, 13 nt, Homo sapiens
augggacagggag

SEQ ID NO: 247129 - RNA, 12 nt, Homo sapiens
ugagguaaccuc

SEQ ID NO: 247130 - RNA, 16 nt, Homo sapiens
ccagcacgguggugcc

SEQ ID NO: 247131 - RNA, 13 nt, Homo sapiens
uugagucuuugga

SEQ ID NO: 247132 - RNA, 18 nt, Homo sapiens
caccugacacaccaggcg

SEQ ID NO: 247133 - RNA, 16 nt, Homo sapiens
uaaagcuuugugcaga

SEQ ID NO: 247134 - RNA, 13 nt, Homo sapiens
uuuauuauauaua

SEQ ID NO: 247135 - RNA, 21 nt, Homo sapiens
gcucaguagucagacuggaua

SEQ ID NO: 247136 - RNA, 17 nt, Homo sapiens
cagcagccagcucucag

SEQ ID NO: 247137 - RNA, 15 nt, Homo sapiens
ggcccugagcucggu

SEQ ID NO: 247138 - RNA, 19 nt, Homo sapiens
uccuuagcuuagaccucag

SEQ ID NO: 247139 - RNA, 13 nt, Homo sapiens
aacaaaucugcac

SEQ ID NO: 247140 - RNA, 21 nt, Homo sapiens
cagggcucagccuggugggcc

SEQ ID NO: 247141 - RNA, 16 nt, Homo sapiens
uuccuagaaacugaca

SEQ ID NO: 247142 - RNA, 22 nt, Homo sapiens
agaaggauccuccaaagucaca

SEQ ID NO: 247143 - RNA, 19 nt, Homo sapiens
ugucugccagccagcagcc

SEQ ID NO: 247144 - RNA, 18 nt, Homo sapiens
ggccuucggccuccaucc

SEQ ID NO: 247145 - RNA, 20 nt, Homo sapiens
ucagccuagccgaccucagc

SEQ ID NO: 247146 - RNA, 15 nt, Homo sapiens
auaaaguaugugcau

SEQ ID NO: 247147 - RNA, 23 nt, Homo sapiens
ucugccucugcagcccacugccu

SEQ ID NO: 247148 - RNA, 13 nt, Homo sapiens
caucuuccuggac

SEQ ID NO: 247149 - RNA, 18 nt, Homo sapiens
acagcccuuaugcgguua

SEQ ID NO: 247150 - RNA, 21 nt, Homo sapiens
ucccagaggagccaccaguuc

SEQ ID NO: 247151 - RNA, 13 nt, Homo sapiens
uugaaaaugggcu

SEQ ID NO: 247152 - RNA, 16 nt, Homo sapiens
ugcuaccucacugggg

SEQ ID NO: 247153 - RNA, 16 nt, Homo sapiens
gagcaguaccggccaa

SEQ ID NO: 247154 - RNA, 18 nt, Homo sapiens
ugcugaacaucacagcuu

SEQ ID NO: 247155 - RNA, 20 nt, Homo sapiens
cuccucacuguauccagguu

SEQ ID NO: 247156 - RNA, 22 nt, Homo sapiens
ugucuuggggugggcacaguac

SEQ ID NO: 247157 - RNA, 20 nt, Homo sapiens
agauggcauaaccugucuca

SEQ ID NO: 247158 - RNA, 18 nt, Homo sapiens
gcuguggcagaguuacag

SEQ ID NO: 247159 - RNA, 15 nt, Homo sapiens
aaagacuggauccaa

SEQ ID NO: 247160 - RNA, 21 nt, Homo sapiens
cucuuccccauaaucacugac

SEQ ID NO: 247161 - RNA, 14 nt, Homo sapiens
auuugcagagacag

SEQ ID NO: 247162 - RNA, 22 nt, Homo sapiens
cuuggucugugagaugcuagaa

SEQ ID NO: 247163 - RNA, 22 nt, Homo sapiens
agggaagagccccccacugcag

SEQ ID NO: 247164 - RNA, 17 nt, Homo sapiens
aguguaugauuacuggc

SEQ ID NO: 247165 - RNA, 24 nt, Homo sapiens
gacacaugcugaacaucacagcuu

SEQ ID NO: 247166 - RNA, 12 nt, Homo sapiens
gaagacuguggc

SEQ ID NO: 247167 - RNA, 22 nt, Homo sapiens
guuuccauccccaggauccacu

SEQ ID NO: 247168 - RNA, 12 nt, Homo sapiens
ugggcauucaca

SEQ ID NO: 247169 - RNA, 15 nt, Homo sapiens
ugcuagaacucccuu

SEQ ID NO: 247170 - RNA, 16 nt, Homo sapiens
auucgauccccuguca

SEQ ID NO: 247171 - RNA, 14 nt, Homo sapiens
cucagaugcacaug

SEQ ID NO: 247172 - RNA, 14 nt, Homo sapiens
uagagcacacugua

SEQ ID NO: 247173 - RNA, 21 nt, Homo sapiens
ugcucaguagucagacuggau

SEQ ID NO: 247174 - RNA, 15 nt, Homo sapiens
cuuuacuccguaaca

SEQ ID NO: 247175 - RNA, 15 nt, Homo sapiens
accuugaacacuggg

SEQ ID NO: 247176 - RNA, 16 nt, Homo sapiens
cgugugggcaauguuc

SEQ ID NO: 247177 - RNA, 12 nt, Homo sapiens
cuugccagacau

SEQ ID NO: 247178 - RNA, 23 nt, Homo sapiens
agcaguuugguuucuagcaugaa

SEQ ID NO: 247179 - RNA, 14 nt, Homo sapiens
ucaaagaaagugua

SEQ ID NO: 247180 - RNA, 23 nt, Homo sapiens
cucauggguggcacucagucucu

SEQ ID NO: 247181 - RNA, 15 nt, Homo sapiens
uucagcccucagaau

SEQ ID NO: 247182 - RNA, 17 nt, Homo sapiens
uuauuauguacuauuca

SEQ ID NO: 247183 - RNA, 14 nt, Homo sapiens
cacugcagacauga

SEQ ID NO: 247184 - RNA, 12 nt, Homo sapiens
cagaugcacaug

SEQ ID NO: 247185 - RNA, 22 nt, Homo sapiens
agcucuggggugggcaguuuuu

SEQ ID NO: 247186 - RNA, 21 nt, Homo sapiens
gccuauaucuucaucugugaa

SEQ ID NO: 247187 - RNA, 16 nt, Homo sapiens
ugugaacccaaagugu

SEQ ID NO: 247188 - RNA, 15 nt, Homo sapiens
cuugugaacccaaag

SEQ ID NO: 247189 - RNA, 18 nt, Homo sapiens
gcagcucaggcacacuuc

SEQ ID NO: 247190 - RNA, 15 nt, Homo sapiens
ucaacagaauucacu

SEQ ID NO: 247191 - RNA, 16 nt, Homo sapiens
ggccuucaguuuccau

SEQ ID NO: 247192 - RNA, 21 nt, Homo sapiens
ugagcuggcgggauugaagga

SEQ ID NO: 247193 - RNA, 13 nt, Homo sapiens
agagcacacugua

SEQ ID NO: 247194 - RNA, 21 nt, Homo sapiens
auuccccugaugggcccugac

SEQ ID NO: 247195 - RNA, 20 nt, Homo sapiens
uccccugaugggcccugacu

SEQ ID NO: 247196 - RNA, 18 nt, Homo sapiens
ucugccagccagcagcca

SEQ ID NO: 247197 - RNA, 19 nt, Homo sapiens
aggccuccuuauuccccau

SEQ ID NO: 247198 - RNA, 17 nt, Homo sapiens
gaauaaaggcaguuuuc

SEQ ID NO: 247199 - RNA, 14 nt, Homo sapiens
cucaaagaaagugu

SEQ ID NO: 247200 - RNA, 17 nt, Homo sapiens
uccuagaaacugacaca

SEQ ID NO: 247201 - RNA, 12 nt, Homo sapiens
aauacauucacc

SEQ ID NO: 247202 - RNA, 22 nt, Homo sapiens
guaauaaacucauuucuagcag

SEQ ID NO: 247203 - RNA, 11 nt, Homo sapiens
aguuccuucac

SEQ ID NO: 247204 - RNA, 15 nt, Homo sapiens
aacagaauucacuug

SEQ ID NO: 247205 - RNA, 16 nt, Homo sapiens
cuagcacuuggagcca

SEQ ID NO: 247206 - RNA, 13 nt, Homo sapiens
ccuccauccugag

SEQ ID NO: 247207 - RNA, 16 nt, Homo sapiens
uauuaccaucucucca

SEQ ID NO: 247208 - RNA, 14 nt, Homo sapiens
cauaaccugucuca

SEQ ID NO: 247209 - RNA, 13 nt, Homo sapiens
gccugaggcaauu

SEQ ID NO: 247210 - RNA, 18 nt, Homo sapiens
aauuauuaccaucucucc

SEQ ID NO: 247211 - RNA, 19 nt, Homo sapiens
acccucagaugcacaugag

SEQ ID NO: 247212 - RNA, 15 nt, Homo sapiens
auauaucuaccccag

SEQ ID NO: 247213 - RNA, 19 nt, Homo sapiens
ccacugccugcccagugcc

SEQ ID NO: 247214 - RNA, 21 nt, Homo sapiens
auuuaggccaugggacaggga

SEQ ID NO: 247215 - RNA, 18 nt, Homo sapiens
ucuuccccauaaucacug

SEQ ID NO: 247216 - RNA, 18 nt, Homo sapiens
uggucagagggcccagug

SEQ ID NO: 247217 - RNA, 20 nt, Homo sapiens
cucuccagguggucagaggg

SEQ ID NO: 247218 - RNA, 19 nt, Homo sapiens
aucugcaccccacuucaga

SEQ ID NO: 247219 - RNA, 21 nt, Homo sapiens
cagaggagccaccaguucuca

SEQ ID NO: 247220 - RNA, 14 nt, Homo sapiens
aaagcuuugugcag

SEQ ID NO: 247221 - RNA, 18 nt, Homo sapiens
cagaaaagcccaaguuca

SEQ ID NO: 247222 - RNA, 20 nt, Homo sapiens
agaggagccaccaguucuca

SEQ ID NO: 247223 - RNA, 12 nt, Homo sapiens
cugugacugaca

SEQ ID NO: 247224 - RNA, 18 nt, Homo sapiens
uauuaauacauucaccca

SEQ ID NO: 247225 - RNA, 17 nt, Homo sapiens
cucuggcacucugaggu

SEQ ID NO: 247226 - RNA, 18 nt, Homo sapiens
uccccauaaucacugacc

SEQ ID NO: 247227 - RNA, 12 nt, Homo sapiens
cacgguggugcc

SEQ ID NO: 247228 - RNA, 16 nt, Homo sapiens
cugcccuagagcacac

SEQ ID NO: 247229 - RNA, 15 nt, Homo sapiens
aagcaucuggcucua

SEQ ID NO: 247230 - RNA, 14 nt, Homo sapiens
uacgauucacuccu

SEQ ID NO: 247231 - RNA, 18 nt, Homo sapiens
uguacuauucaaucuuua

SEQ ID NO: 247232 - RNA, 14 nt, Homo sapiens
acaguucugugguu

SEQ ID NO: 247233 - RNA, 19 nt, Homo sapiens
gaacaaguuguuucauuga

SEQ ID NO: 247234 - RNA, 14 nt, Homo sapiens
augaucaguaugaa

SEQ ID NO: 247235 - RNA, 21 nt, Homo sapiens
cuuagacccucaugcugccaa

SEQ ID NO: 247236 - RNA, 14 nt, Homo sapiens
cccaggcagccacu

SEQ ID NO: 247237 - RNA, 22 nt, Homo sapiens
gggaaagggauuuucagcccuc

SEQ ID NO: 247238 - RNA, 12 nt, Homo sapiens
uaauacauucac

SEQ ID NO: 247239 - RNA, 13 nt, Homo sapiens
auaccaugugcca

SEQ ID NO: 247240 - RNA, 19 nt, Homo sapiens
cuuauccguuagccguggu

SEQ ID NO: 247241 - RNA, 22 nt, Homo sapiens
cugggggaggggacauugaaca

SEQ ID NO: 247242 - RNA, 12 nt, Homo sapiens
gaacacuggggg

SEQ ID NO: 247243 - RNA, 22 nt, Homo sapiens
guaacagauuuuguuggcauag

SEQ ID NO: 247244 - RNA, 14 nt, Homo sapiens
uaaaguaugugcau

SEQ ID NO: 247245 - RNA, 17 nt, Homo sapiens
uauagucacuaguugua

SEQ ID NO: 247246 - RNA, 19 nt, Homo sapiens
ggcucuaauucacagugcu

SEQ ID NO: 247247 - RNA, 16 nt, Homo sapiens
ccaccugacacaccag

SEQ ID NO: 247248 - RNA, 15 nt, Homo sapiens
auaaucacugaccag

SEQ ID NO: 247249 - RNA, 12 nt, Homo sapiens
acacaguggaga

SEQ ID NO: 247250 - RNA, 22 nt, Homo sapiens
aguuaccuuauaguuacugugu

SEQ ID NO: 247251 - RNA, 13 nt, Homo sapiens
aguguaugauuac

SEQ ID NO: 247252 - RNA, 22 nt, Homo sapiens
uccccuuuuauuaauacauuca

SEQ ID NO: 247253 - RNA, 15 nt, Homo sapiens
ugacagagagaggca

SEQ ID NO: 247254 - RNA, 21 nt, Homo sapiens
uucacaccaccccccaugcca

SEQ ID NO: 247255 - RNA, 23 nt, Homo sapiens
aaauuccuuagcuuagaccucag

SEQ ID NO: 247256 - RNA, 17 nt, Homo sapiens
uuugugggaaauccaca

SEQ ID NO: 247257 - RNA, 17 nt, Homo sapiens
ggaggcagccggccaag

SEQ ID NO: 247258 - RNA, 16 nt, Homo sapiens
gcacuuuaaacauuua

SEQ ID NO: 247259 - RNA, 13 nt, Homo sapiens
gcauaaccugucu

SEQ ID NO: 247260 - RNA, 14 nt, Homo sapiens
cccuucucuguauu

SEQ ID NO: 247261 - RNA, 17 nt, Homo sapiens
ucaacagaauucacuug

SEQ ID NO: 247262 - RNA, 17 nt, Homo sapiens
aucuuuacacaauguca

SEQ ID NO: 247263 - RNA, 24 nt, Homo sapiens
uaucuucaucugugaaauggggau

SEQ ID NO: 247264 - RNA, 16 nt, Homo sapiens
aggguaccuugaacac

SEQ ID NO: 247265 - RNA, 20 nt, Homo sapiens
ccuuuuauuaauacauucac

SEQ ID NO: 247266 - RNA, 18 nt, Homo sapiens
agcacauaccaugugcca

SEQ ID NO: 247267 - RNA, 14 nt, Homo sapiens
aaggccucuaggga

SEQ ID NO: 247268 - RNA, 16 nt, Homo sapiens
aguauuuagaagccaa

SEQ ID NO: 247269 - RNA, 14 nt, Homo sapiens
cuggaccugaaguu

SEQ ID NO: 247270 - RNA, 13 nt, Respiratory syncytial virus
ugucaacauacua

SEQ ID NO: 247271 - RNA, 21 nt, Respiratory syncytial virus
ugucaacauagacaagucaac

SEQ ID NO: 247272 - RNA, 17 nt, Respiratory syncytial virus
uguagggaacaagccca

SEQ ID NO: 247273 - RNA, 19 nt, Respiratory syncytial virus
uguauagugagaaaacuug

SEQ ID NO: 247274 - RNA, 21 nt, Respiratory syncytial virus
uguauagugagaaaacuugau

SEQ ID NO: 247275 - RNA, 14 nt, Respiratory syncytial virus
ugguucaacuaauc

SEQ ID NO: 247276 - RNA, 12 nt, Respiratory syncytial virus
uggggcaaauaa

SEQ ID NO: 247277 - RNA, 14 nt, Respiratory syncytial virus
uggggcaaauacaa

SEQ ID NO: 247278 - RNA, 16 nt, Respiratory syncytial virus
ugcuaaucauaaucuc

SEQ ID NO: 247279 - RNA, 17 nt, Respiratory syncytial virus
ugcuaaucauaaucucc

SEQ ID NO: 247280 - RNA, 18 nt, Respiratory syncytial virus
uggcaaugauaaucucaa

SEQ ID NO: 247281 - RNA, 18 nt, Respiratory syncytial virus
ugugcagaaacacaucaa

SEQ ID NO: 247282 - RNA, 16 nt, Respiratory syncytial virus
uuaaacagaauacuua

SEQ ID NO: 247283 - RNA, 23 nt, Respiratory syncytial virus
uuaaaucuauagcacaaaucaca

SEQ ID NO: 247284 - RNA, 22 nt, Respiratory syncytial virus
uuacuauguauaaucaaaagaa

SEQ ID NO: 247285 - RNA, 13 nt, Respiratory syncytial virus
uuuccuaugccaa

SEQ ID NO: 247286 - RNA, 19 nt, Respiratory syncytial virus
uuucaaucaaaacaaccaa

SEQ ID NO: 247287 - RNA, 12 nt, Respiratory syncytial virus
uugccaauccuc

SEQ ID NO: 247288 - RNA, 18 nt, Respiratory syncytial virus
uugccaauccucaaaaca

SEQ ID NO: 247289 - RNA, 19 nt, Respiratory syncytial virus
uugccaauccucaaaacaa

SEQ ID NO: 247290 - RNA, 19 nt, Respiratory syncytial virus
uugcuuccagucaaaacau

SEQ ID NO: 247291 - RNA, 20 nt, Respiratory syncytial virus
uugagacuauaauaauauca

SEQ ID NO: 247292 - RNA, 23 nt, Respiratory syncytial virus
uucacuuauaauugcagccauca

SEQ ID NO: 247293 - RNA, 21 nt, Respiratory syncytial virus
uucaucagaucuaguacucaa

SEQ ID NO: 247294 - RNA, 17 nt, Respiratory syncytial virus
uuccuagaaucaauaaa

SEQ ID NO: 247295 - RNA, 19 nt, Respiratory syncytial virus
ugauaacaacaauaaucuc

SEQ ID NO: 247296 - RNA, 12 nt, Respiratory syncytial virus
ugauacacucaa

SEQ ID NO: 247297 - RNA, 12 nt, Respiratory syncytial virus
ugaccaaaucaa

SEQ ID NO: 247298 - RNA, 15 nt, Respiratory syncytial virus
ugaaugauacacuca

SEQ ID NO: 247299 - RNA, 15 nt, Respiratory syncytial virus
ugaauacaacacaaa

SEQ ID NO: 247300 - RNA, 14 nt, Respiratory syncytial virus
ugaaacuauugcac

SEQ ID NO: 247301 - RNA, 19 nt, Respiratory syncytial virus
ugaaacuauugcacaaagu

SEQ ID NO: 247302 - RNA, 22 nt, Respiratory syncytial virus
ucugucaacauagacaagucaa

SEQ ID NO: 247303 - RNA, 18 nt, Respiratory syncytial virus
ucuguacaucaacacaca

SEQ ID NO: 247304 - RNA, 14 nt, Respiratory syncytial virus
ugccaauccucaaa

SEQ ID NO: 247305 - RNA, 16 nt, Respiratory syncytial virus
ugcauaaccacacucc

SEQ ID NO: 247306 - RNA, 19 nt, Respiratory syncytial virus
ugcauaaccacacuccaua

SEQ ID NO: 247307 - RNA, 17 nt, Respiratory syncytial virus
ugcaguugcucaugcaa

SEQ ID NO: 247308 - RNA, 14 nt, Respiratory syncytial virus
ugcccauguuccaa

SEQ ID NO: 247309 - RNA, 16 nt, Respiratory syncytial virus
ucucacuuacauuauu

SEQ ID NO: 247310 - RNA, 16 nt, Respiratory syncytial virus
ucggcaaaccacaaag

SEQ ID NO: 247311 - RNA, 16 nt, Respiratory syncytial virus
ucacaauaucugucaa

SEQ ID NO: 247312 - RNA, 13 nt, Respiratory syncytial virus
ucauccagcaaau

SEQ ID NO: 247313 - RNA, 13 nt, Respiratory syncytial virus
ucauccauauuau

SEQ ID NO: 247314 - RNA, 19 nt, Respiratory syncytial virus
ucaucuauuauucauauca

SEQ ID NO: 247315 - RNA, 15 nt, Respiratory syncytial virus
ucaugcaaagcacac

SEQ ID NO: 247316 - RNA, 14 nt, Respiratory syncytial virus
uccaacuaaucaca

SEQ ID NO: 247317 - RNA, 13 nt, Respiratory syncytial virus
uccacauacacag

SEQ ID NO: 247318 - RNA, 13 nt, Respiratory syncytial virus
caacaauaaucuc

SEQ ID NO: 247319 - RNA, 16 nt, Respiratory syncytial virus
caacaaucgagccaga

SEQ ID NO: 247320 - RNA, 16 nt, Respiratory syncytial virus
caaaucacauuaucca

SEQ ID NO: 247321 - RNA, 18 nt, Respiratory syncytial virus
caaaugcaauuaccgcaa

SEQ ID NO: 247322 - RNA, 14 nt, Respiratory syncytial virus
caaaucaaugucac

SEQ ID NO: 247323 - RNA, 17 nt, Respiratory syncytial virus
caaacaaaccaacucac

SEQ ID NO: 247324 - RNA, 14 nt, Respiratory syncytial virus
caaacaacaugcag

SEQ ID NO: 247325 - RNA, 20 nt, Respiratory syncytial virus
caaacaacaugcagugcagu

SEQ ID NO: 247326 - RNA, 13 nt, Respiratory syncytial virus
caaaccacaaagu

SEQ ID NO: 247327 - RNA, 17 nt, Respiratory syncytial virus
caaaccacaaagucaca

SEQ ID NO: 247328 - RNA, 12 nt, Respiratory syncytial virus
caaaacccaucu

SEQ ID NO: 247329 - RNA, 14 nt, Respiratory syncytial virus
caaaaccacaucaa

SEQ ID NO: 247330 - RNA, 16 nt, Respiratory syncytial virus
caaaaccacaucaaca

SEQ ID NO: 247331 - RNA, 20 nt, Respiratory syncytial virus
caaaaccacaucaacaucuc

SEQ ID NO: 247332 - RNA, 15 nt, Respiratory syncytial virus
caaaacaaaugcaau

SEQ ID NO: 247333 - RNA, 13 nt, Respiratory syncytial virus
auuuaaauccaaa

SEQ ID NO: 247334 - RNA, 13 nt, Respiratory syncytial virus
auuucaaucaaaa

SEQ ID NO: 247335 - RNA, 23 nt, Respiratory syncytial virus
auuucaaucaaaacaaccaaaau

SEQ ID NO: 247336 - RNA, 15 nt, Respiratory syncytial virus
auuagugucauaaca

SEQ ID NO: 247337 - RNA, 20 nt, Respiratory syncytial virus
auuagugucauaacacucaa

SEQ ID NO: 247338 - RNA, 24 nt, Respiratory syncytial virus
auuacugaugauauauacacaaua

SEQ ID NO: 247339 - RNA, 14 nt, Respiratory syncytial virus
auuggaccucucaa

SEQ ID NO: 247340 - RNA, 19 nt, Respiratory syncytial virus
auucucaagcaaauucugg

SEQ ID NO: 247341 - RNA, 18 nt, Respiratory syncytial virus
aucugucaacauagacaa

SEQ ID NO: 247342 - RNA, 18 nt, Respiratory syncytial virus
augugcagaaacacauca

SEQ ID NO: 247343 - RNA, 19 nt, Respiratory syncytial virus
augugcagaaacacaucaa

SEQ ID NO: 247344 - RNA, 20 nt, Respiratory syncytial virus
auguuaaacagaauacuuaa

SEQ ID NO: 247345 - RNA, 14 nt, Respiratory syncytial virus
cagagacaucauaa

SEQ ID NO: 247346 - RNA, 22 nt, Respiratory syncytial virus
cagagacaucauaacacacaga

SEQ ID NO: 247347 - RNA, 21 nt, Respiratory syncytial virus
cacuuauaauugcagccauca

SEQ ID NO: 247348 - RNA, 22 nt, Respiratory syncytial virus
cacuuauaauugcagccaucau

SEQ ID NO: 247349 - RNA, 17 nt, Respiratory syncytial virus
cacugcuuguaagacaa

SEQ ID NO: 247350 - RNA, 16 nt, Respiratory syncytial virus
cacucucaaucaucua

SEQ ID NO: 247351 - RNA, 18 nt, Respiratory syncytial virus
cacgaaggcuccacauac

SEQ ID NO: 247352 - RNA, 19 nt, Respiratory syncytial virus
caccuaaagaucccaagaa

SEQ ID NO: 247353 - RNA, 21 nt, Respiratory syncytial virus
caaugauaaucucaacuucac

SEQ ID NO: 247354 - RNA, 15 nt, Respiratory syncytial virus
caaucuguacaucaa

SEQ ID NO: 247355 - RNA, 18 nt, Respiratory syncytial virus
caacacaaaauauggcac

SEQ ID NO: 247356 - RNA, 19 nt, Respiratory syncytial virus
caacacaaaauauggcacu

SEQ ID NO: 247357 - RNA, 21 nt, Respiratory syncytial virus
caaggaccaacgcaccaccaa

SEQ ID NO: 247358 - RNA, 16 nt, Respiratory syncytial virus
caagcccaauuaucaa

SEQ ID NO: 247359 - RNA, 17 nt, Respiratory syncytial virus
caagccaucauccauau

SEQ ID NO: 247360 - RNA, 17 nt, Respiratory syncytial virus
caauggaccuucauuaa

SEQ ID NO: 247361 - RNA, 16 nt, Respiratory syncytial virus
caaugguuucauaucu

SEQ ID NO: 247362 - RNA, 14 nt, Respiratory syncytial virus
caaugucuuagaaa

SEQ ID NO: 247363 - RNA, 23 nt, Respiratory syncytial virus
cacacagauuuauauacuugaua

SEQ ID NO: 247364 - RNA, 17 nt, Respiratory syncytial virus
caccaugcaagccauca

SEQ ID NO: 247365 - RNA, 18 nt, Respiratory syncytial virus
caccaugcaagccaucau

SEQ ID NO: 247366 - RNA, 15 nt, Respiratory syncytial virus
cacaucaacaucuca

SEQ ID NO: 247367 - RNA, 23 nt, Respiratory syncytial virus
cacauacacagcugcuguucaau

SEQ ID NO: 247368 - RNA, 17 nt, Respiratory syncytial virus
cauguucuuacaauggu

SEQ ID NO: 247369 - RNA, 22 nt, Respiratory syncytial virus
caugauaacaacaauaaucucu

SEQ ID NO: 247370 - RNA, 18 nt, Respiratory syncytial virus
caucaaauucaaccauua

SEQ ID NO: 247371 - RNA, 21 nt, Respiratory syncytial virus
caucaacaucucaccaugcaa

SEQ ID NO: 247372 - RNA, 18 nt, Respiratory syncytial virus
caucuauuauucauauca

SEQ ID NO: 247373 - RNA, 14 nt, Respiratory syncytial virus
caucucaccaugca

SEQ ID NO: 247374 - RNA, 17 nt, Respiratory syncytial virus
caucucaccaugcaagc

SEQ ID NO: 247375 - RNA, 16 nt, Respiratory syncytial virus
cauaaccacacuccau

SEQ ID NO: 247376 - RNA, 17 nt, Respiratory syncytial virus
cauacuaauaacaagua

SEQ ID NO: 247377 - RNA, 21 nt, Respiratory syncytial virus
cauuauaaacccaacaaauga

SEQ ID NO: 247378 - RNA, 22 nt, Respiratory syncytial virus
cauucuggcaaugauaaucuca

SEQ ID NO: 247379 - RNA, 22 nt, Respiratory syncytial virus
ccaaaauaaccauauauacuca

SEQ ID NO: 247380 - RNA, 17 nt, Respiratory syncytial virus
ccaacucacccauccaa

SEQ ID NO: 247381 - RNA, 10 nt, Respiratory syncytial virus
ccaacuaauc

SEQ ID NO: 247382 - RNA, 11 nt, Respiratory syncytial virus
cauugucacuu

SEQ ID NO: 247383 - RNA, 21 nt, Respiratory syncytial virus
ccagagacaucauaacacaca

SEQ ID NO: 247384 - RNA, 15 nt, Respiratory syncytial virus
ccaucauauucauag

SEQ ID NO: 247385 - RNA, 13 nt, Respiratory syncytial virus
ccaucauccauau

SEQ ID NO: 247386 - RNA, 16 nt, Respiratory syncytial virus
cccauguuccaaucau

SEQ ID NO: 247387 - RNA, 21 nt, Respiratory syncytial virus
cccucugugguucaacuaauc

SEQ ID NO: 247388 - RNA, 23 nt, Respiratory syncytial virus
cccuuuucaaaacuauacaaaga

SEQ ID NO: 247389 - RNA, 20 nt, Respiratory syncytial virus
ccuauaacaucaaauucaac

SEQ ID NO: 247390 - RNA, 14 nt, Respiratory syncytial virus
ccucggcaaaccac

SEQ ID NO: 247391 - RNA, 20 nt, Respiratory syncytial virus
ccucugugguucaacuaauc

SEQ ID NO: 247392 - RNA, 19 nt, Respiratory syncytial virus
ccucuuuacaaaaccacau

SEQ ID NO: 247393 - RNA, 18 nt, Respiratory syncytial virus
aguugaaugauacacuca

SEQ ID NO: 247394 - RNA, 17 nt, Respiratory syncytial virus
agugucauaacacucaa

SEQ ID NO: 247395 - RNA, 19 nt, Respiratory syncytial virus
aguauaaauuccauacuaa

SEQ ID NO: 247396 - RNA, 21 nt, Respiratory syncytial virus
agaggugucauuuuagucaua

SEQ ID NO: 247397 - RNA, 15 nt, Respiratory syncytial virus
agcuauucauaugaa

SEQ ID NO: 247398 - RNA, 23 nt, Respiratory syncytial virus
agcuaccaaauuccuagaaucaa

SEQ ID NO: 247399 - RNA, 18 nt, Respiratory syncytial virus
agcugcuguucaauacaa

SEQ ID NO: 247400 - RNA, 20 nt, Respiratory syncytial virus
aggcuaucuuagugcucuaa

SEQ ID NO: 247401 - RNA, 15 nt, Respiratory syncytial virus
aggcuccacauacac

SEQ ID NO: 247402 - RNA, 15 nt, Respiratory syncytial virus
auagaaguaaccaaa

SEQ ID NO: 247403 - RNA, 17 nt, Respiratory syncytial virus
auagaaguaaccaaaga

SEQ ID NO: 247404 - RNA, 15 nt, Respiratory syncytial virus
auacauccauaacaa

SEQ ID NO: 247405 - RNA, 17 nt, Respiratory syncytial virus
auacauccauaacaaua

SEQ ID NO: 247406 - RNA, 14 nt, Respiratory syncytial virus
auacacaugauaac

SEQ ID NO: 247407 - RNA, 16 nt, Respiratory syncytial virus
auaacaacuucaugca

SEQ ID NO: 247408 - RNA, 19 nt, Respiratory syncytial virus
auaacaauagaauucucaa

SEQ ID NO: 247409 - RNA, 16 nt, Respiratory syncytial virus
auaaaacaagaauuag

SEQ ID NO: 247410 - RNA, 20 nt, Respiratory syncytial virus
auaaauauaaaagugcugua

SEQ ID NO: 247411 - RNA, 23 nt, Respiratory syncytial virus
auaaauaucaacuagcaaaucaa

SEQ ID NO: 247412 - RNA, 18 nt, Respiratory syncytial virus
aucaacuucugucaucca

SEQ ID NO: 247413 - RNA, 13 nt, Respiratory syncytial virus
aucaacaucucac

SEQ ID NO: 247414 - RNA, 14 nt, Respiratory syncytial virus
aucaaccauucaau

SEQ ID NO: 247415 - RNA, 17 nt, Respiratory syncytial virus
aucaaacaacaugcagu

SEQ ID NO: 247416 - RNA, 16 nt, Respiratory syncytial virus
auauuagugucauaac

SEQ ID NO: 247417 - RNA, 22 nt, Respiratory syncytial virus
auauuagugucauaacacucaa

SEQ ID NO: 247418 - RNA, 20 nt, Respiratory syncytial virus
auagccucggcaaaccacaa

SEQ ID NO: 247419 - RNA, 19 nt, Respiratory syncytial virus
auauagaaguaaccaaaga

SEQ ID NO: 247420 - RNA, 13 nt, Respiratory syncytial virus
aucuauagcacaa

SEQ ID NO: 247421 - RNA, 14 nt, Respiratory syncytial virus
aucuauaaaccauc

SEQ ID NO: 247422 - RNA, 15 nt, Respiratory syncytial virus
aucuauaaaccaucu

SEQ ID NO: 247423 - RNA, 22 nt, Respiratory syncytial virus
aucuauaaaccaucucacuuac

SEQ ID NO: 247424 - RNA, 21 nt, Respiratory syncytial virus
aucuaucauuggauuuucuua

SEQ ID NO: 247425 - RNA, 21 nt, Respiratory syncytial virus
aucucuuugcuaaucauaauc

SEQ ID NO: 247426 - RNA, 22 nt, Respiratory syncytial virus
aucucuuugcuaaucauaaucu

SEQ ID NO: 247427 - RNA, 16 nt, Respiratory syncytial virus
aucugauggcacaaaa

SEQ ID NO: 247428 - RNA, 18 nt, Respiratory syncytial virus
aucugauggcacaaaaca

SEQ ID NO: 247429 - RNA, 16 nt, Respiratory syncytial virus
auccuugcaaauuuga

SEQ ID NO: 247430 - RNA, 17 nt, Respiratory syncytial virus
auccuugcugcagucac

SEQ ID NO: 247431 - RNA, 18 nt, Respiratory syncytial virus
auccuaaugcuuaccaca

SEQ ID NO: 247432 - RNA, 20 nt, Respiratory syncytial virus
auccucaaaacaaaugcaau

SEQ ID NO: 247433 - RNA, 14 nt, Respiratory syncytial virus
aucacuuacaauau

SEQ ID NO: 247434 - RNA, 22 nt, Respiratory syncytial virus
aucagugaguugauucauacaa

SEQ ID NO: 247435 - RNA, 19 nt, Respiratory syncytial virus
aucauuggaggaaauccaa

SEQ ID NO: 247436 - RNA, 16 nt, Respiratory syncytial virus
aucaucccaagucauu

SEQ ID NO: 247437 - RNA, 21 nt, Respiratory syncytial virus
aucaugauugcaauacugaac

SEQ ID NO: 247438 - RNA, 16 nt, Respiratory syncytial virus
aucaucaaacuauuaa

SEQ ID NO: 247439 - RNA, 22 nt, Respiratory syncytial virus
aucaucaaacuauuaacucaaa

SEQ ID NO: 247440 - RNA, 20 nt, Respiratory syncytial virus
auccauucuggcaaugauaa

SEQ ID NO: 247441 - RNA, 12 nt, Respiratory syncytial virus
auccaacuaauc

SEQ ID NO: 247442 - RNA, 23 nt, Respiratory syncytial virus
agaacacacuauauuucaaucaa

SEQ ID NO: 247443 - RNA, 13 nt, Respiratory syncytial virus
agaaaccauagaa

SEQ ID NO: 247444 - RNA, 22 nt, Respiratory syncytial virus
agaaacauuugauaacaaugaa

SEQ ID NO: 247445 - RNA, 12 nt, Respiratory syncytial virus
agaaucaauaaa

SEQ ID NO: 247446 - RNA, 13 nt, Respiratory syncytial virus
agacuaacaauaa

SEQ ID NO: 247447 - RNA, 17 nt, Respiratory syncytial virus
agacuauaauaauauca

SEQ ID NO: 247448 - RNA, 18 nt, Respiratory syncytial virus
agacuauaauaauaucac

SEQ ID NO: 247449 - RNA, 16 nt, Respiratory syncytial virus
agagaagacaccauaa

SEQ ID NO: 247450 - RNA, 20 nt, Respiratory syncytial virus
agacugaugaucacagacau

SEQ ID NO: 247451 - RNA, 22 nt, Respiratory syncytial virus
agacugaugaucacagacauga

SEQ ID NO: 247452 - RNA, 14 nt, Respiratory syncytial virus
agacaucauaacac

SEQ ID NO: 247453 - RNA, 13 nt, Respiratory syncytial virus
agaccaacaaaca

SEQ ID NO: 247454 - RNA, 14 nt, Respiratory syncytial virus
agaccauugucacu

SEQ ID NO: 247455 - RNA, 16 nt, Respiratory syncytial virus
agacaggccacauuua

SEQ ID NO: 247456 - RNA, 17 nt, Respiratory syncytial virus
agacagaugauacugua

SEQ ID NO: 247457 - RNA, 14 nt, Respiratory syncytial virus
agacaaaacuuuau

SEQ ID NO: 247458 - RNA, 15 nt, Respiratory syncytial virus
agacaaaacuuuaug

SEQ ID NO: 247459 - RNA, 16 nt, Respiratory syncytial virus
acuauaauaauaucac

SEQ ID NO: 247460 - RNA, 12 nt, Respiratory syncytial virus
acuauacaaaga

SEQ ID NO: 247461 - RNA, 15 nt, Respiratory syncytial virus
acucucaaucaucua

SEQ ID NO: 247462 - RNA, 20 nt, Respiratory syncytial virus
acucaccgaaucaaccauuc

SEQ ID NO: 247463 - RNA, 20 nt, Respiratory syncytial virus
acuuauaaaagaacuagcua

SEQ ID NO: 247464 - RNA, 20 nt, Respiratory syncytial virus
accucuuuacaaaaccacau

SEQ ID NO: 247465 - RNA, 19 nt, Respiratory syncytial virus
acccaucuggagccucaga

SEQ ID NO: 247466 - RNA, 14 nt, Respiratory syncytial virus
accauucaaugaaa

SEQ ID NO: 247467 - RNA, 20 nt, Respiratory syncytial virus
accauccaacggagcacagg

SEQ ID NO: 247468 - RNA, 21 nt, Respiratory syncytial virus
accaacaaacaaaccaacuca

SEQ ID NO: 247469 - RNA, 14 nt, Respiratory syncytial virus
accaacucacccau

SEQ ID NO: 247470 - RNA, 17 nt, Respiratory syncytial virus
accaaaauaaccauaua

SEQ ID NO: 247471 - RNA, 24 nt, Respiratory syncytial virus
accagagacaucauaacacacaga

SEQ ID NO: 247472 - RNA, 16 nt, Respiratory syncytial virus
acaugcagugcaguca

SEQ ID NO: 247473 - RNA, 20 nt, Respiratory syncytial virus
acaugagaccauugucacuu

SEQ ID NO: 247474 - RNA, 16 nt, Respiratory syncytial virus
acaggccacauuuaca

SEQ ID NO: 247475 - RNA, 18 nt, Respiratory syncytial virus
acagcugcuguucaauac

SEQ ID NO: 247476 - RNA, 21 nt, Respiratory syncytial virus
acagagcuaccaaauuccuag

SEQ ID NO: 247477 - RNA, 19 nt, Respiratory syncytial virus
acacucaacaaagaucaac

SEQ ID NO: 247478 - RNA, 13 nt, Respiratory syncytial virus
acagaauugcagu

SEQ ID NO: 247479 - RNA, 20 nt, Respiratory syncytial virus
acagaauugcaguugcucau

SEQ ID NO: 247480 - RNA, 21 nt, Respiratory syncytial virus
acagaauugcaguugcucaug

SEQ ID NO: 247481 - RNA, 18 nt, Respiratory syncytial virus
acagaagaccaacaaaca

SEQ ID NO: 247482 - RNA, 20 nt, Respiratory syncytial virus
acagaagaugcuaaucauaa

SEQ ID NO: 247483 - RNA, 17 nt, Respiratory syncytial virus
cuauaauaauaucacua

SEQ ID NO: 247484 - RNA, 17 nt, Respiratory syncytial virus
cucaucuauaaaccauc

SEQ ID NO: 247485 - RNA, 22 nt, Respiratory syncytial virus
cucauagacaacccaucuauca

SEQ ID NO: 247486 - RNA, 16 nt, Respiratory syncytial virus
cuaaucauguucuuac

SEQ ID NO: 247487 - RNA, 17 nt, Respiratory syncytial virus
cuaaucauguucuuaca

SEQ ID NO: 247488 - RNA, 22 nt, Respiratory syncytial virus
cuaaucauguucuuacaauggu

SEQ ID NO: 247489 - RNA, 15 nt, Respiratory syncytial virus
cuaaugucaacauac

SEQ ID NO: 247490 - RNA, 16 nt, Respiratory syncytial virus
cuaaugucaacauacu

SEQ ID NO: 247491 - RNA, 23 nt, Respiratory syncytial virus
cuaccaaauuccuagaaucaaua

SEQ ID NO: 247492 - RNA, 20 nt, Respiratory syncytial virus
cggcaaaccacaaagucaca

SEQ ID NO: 247493 - RNA, 22 nt, Respiratory syncytial virus
cuaaauacaaaaaauauacuga

SEQ ID NO: 247494 - RNA, 16 nt, Respiratory syncytial virus
cuaaagaucccaagaa

SEQ ID NO: 247495 - RNA, 14 nt, Respiratory syncytial virus
cuaacaauaacguu

SEQ ID NO: 247496 - RNA, 15 nt, Respiratory syncytial virus
cuuaagucuauggau

SEQ ID NO: 247497 - RNA, 19 nt, Respiratory syncytial virus
cuuaaaucuauagcacaaa

SEQ ID NO: 247498 - RNA, 23 nt, Respiratory syncytial virus
cuuaaaucuauagcacaaaucac

SEQ ID NO: 247499 - RNA, 15 nt, Respiratory syncytial virus
cuuccagucaaaaca

SEQ ID NO: 247500 - RNA, 23 nt, Respiratory syncytial virus
cuucacgaaggcuccacauacac

SEQ ID NO: 247501 - RNA, 23 nt, Respiratory syncytial virus
cuucacuuauaauugcagccauc

SEQ ID NO: 247502 - RNA, 14 nt, Respiratory syncytial virus
cugucaacucaaua

SEQ ID NO: 247503 - RNA, 20 nt, Respiratory syncytial virus
cugucaacauagacaaguca

SEQ ID NO: 247504 - RNA, 16 nt, Respiratory syncytial virus
cucaugcaaagcacac

SEQ ID NO: 247505 - RNA, 18 nt, Respiratory syncytial virus
gcauaaccacacuccaua

SEQ ID NO: 247506 - RNA, 17 nt, Respiratory syncytial virus
gcaguugcucaugcaaa

SEQ ID NO: 247507 - RNA, 14 nt, Respiratory syncytial virus
gccaucauauucau

SEQ ID NO: 247508 - RNA, 20 nt, Respiratory syncytial virus
gccaaucagccaauccaaaa

SEQ ID NO: 247509 - RNA, 20 nt, Respiratory syncytial virus
gaugauauauacacaauaua

SEQ ID NO: 247510 - RNA, 19 nt, Respiratory syncytial virus
gauauagaaguaaccaaag

SEQ ID NO: 247511 - RNA, 20 nt, Respiratory syncytial virus
gaccaacaaacaaaccaacu

SEQ ID NO: 247512 - RNA, 14 nt, Respiratory syncytial virus
gaccauugucacuu

SEQ ID NO: 247513 - RNA, 18 nt, Respiratory syncytial virus
gacuugauugaugcaauu

SEQ ID NO: 247514 - RNA, 21 nt, Respiratory syncytial virus
gacuugauugaugcaauucaa

SEQ ID NO: 247515 - RNA, 18 nt, Respiratory syncytial virus
gacacucucaaucaucua

SEQ ID NO: 247516 - RNA, 22 nt, Respiratory syncytial virus
gaagacaccauaaaaauacuca

SEQ ID NO: 247517 - RNA, 14 nt, Respiratory syncytial virus
gaagaccaacaaac

SEQ ID NO: 247518 - RNA, 15 nt, Respiratory syncytial virus
gaagaccaacaaaca

SEQ ID NO: 247519 - RNA, 21 nt, Respiratory syncytial virus
gaagacccuacgccaagugau

SEQ ID NO: 247520 - RNA, 16 nt, Respiratory syncytial virus
gaauacuuaagucuau

SEQ ID NO: 247521 - RNA, 20 nt, Respiratory syncytial virus
cuugauugaugcaauucaaa

SEQ ID NO: 247522 - RNA, 13 nt, Respiratory syncytial virus
cuugagacuauaa

SEQ ID NO: 247523 - RNA, 16 nt, Respiratory syncytial virus
gaacuagcuaauguca

SEQ ID NO: 247524 - RNA, 19 nt, Respiratory syncytial virus
gaaaugaaacuauugcaca

SEQ ID NO: 247525 - RNA, 18 nt, Respiratory syncytial virus
uaccaaucuguacaucaa

SEQ ID NO: 247526 - RNA, 20 nt, Respiratory syncytial virus
uacaacacaaaauauggcac

SEQ ID NO: 247527 - RNA, 16 nt, Respiratory syncytial virus
uacaacaucuagguau

SEQ ID NO: 247528 - RNA, 21 nt, Respiratory syncytial virus
uaaucauuggaggaaauccaa

SEQ ID NO: 247529 - RNA, 14 nt, Respiratory syncytial virus
uaaucauaaucucc

SEQ ID NO: 247530 - RNA, 13 nt, Respiratory syncytial virus
uaaguaauaucaa

SEQ ID NO: 247531 - RNA, 16 nt, Respiratory syncytial virus
uaaccauauauacuca

SEQ ID NO: 247532 - RNA, 17 nt, Respiratory syncytial virus
uaaccauauauacucac

SEQ ID NO: 247533 - RNA, 15 nt, Respiratory syncytial virus
uaacagaauugcagu

SEQ ID NO: 247534 - RNA, 22 nt, Respiratory syncytial virus
uaacagaauugcaguugcucau

SEQ ID NO: 247535 - RNA, 14 nt, Respiratory syncytial virus
uaaagaucccaaga

SEQ ID NO: 247536 - RNA, 21 nt, Respiratory syncytial virus
uaaagaucccaagaaaaaaga

SEQ ID NO: 247537 - RNA, 20 nt, Respiratory syncytial virus
uaaaagugcuguaacagaau

SEQ ID NO: 247538 - RNA, 16 nt, Respiratory syncytial virus
ucaaacuauuaacuca

SEQ ID NO: 247539 - RNA, 19 nt, Respiratory syncytial virus
ucaaacuauuaacucaaac

SEQ ID NO: 247540 - RNA, 19 nt, Respiratory syncytial virus
ucaaaauuuucuacaacau

SEQ ID NO: 247541 - RNA, 16 nt, Respiratory syncytial virus
ucaaacaacaugcagu

SEQ ID NO: 247542 - RNA, 17 nt, Respiratory syncytial virus
ucaaacaacaugcagug

SEQ ID NO: 247543 - RNA, 16 nt, Respiratory syncytial virus
ucaaaacaaaugcaau

SEQ ID NO: 247544 - RNA, 17 nt, Respiratory syncytial virus
ucaaaacaaaugcaauu

SEQ ID NO: 247545 - RNA, 18 nt, Respiratory syncytial virus
ucaaaacuauacaaagaa

SEQ ID NO: 247546 - RNA, 19 nt, Respiratory syncytial virus
ucaaaacuauacaaagaaa

SEQ ID NO: 247547 - RNA, 15 nt, Respiratory syncytial virus
uauuauucauaucau

SEQ ID NO: 247548 - RNA, 22 nt, Respiratory syncytial virus
ucaacucuggggcaaauaacaa

SEQ ID NO: 247549 - RNA, 16 nt, Respiratory syncytial virus
ucaacuagcaaaucaa

SEQ ID NO: 247550 - RNA, 12 nt, Respiratory syncytial virus
ucaacaucucac

SEQ ID NO: 247551 - RNA, 17 nt, Respiratory syncytial virus
ucaacauacuagugaaa

SEQ ID NO: 247552 - RNA, 22 nt, Respiratory syncytial virus
ucaacacaagagucacacaauc

SEQ ID NO: 247553 - RNA, 15 nt, Respiratory syncytial virus
ucaaugaaauccauu

SEQ ID NO: 247554 - RNA, 23 nt, Respiratory syncytial virus
ucaaucaucuauuauucauauca

SEQ ID NO: 247555 - RNA, 11 nt, Respiratory syncytial virus
ucaaucaaaac

SEQ ID NO: 247556 - RNA, 20 nt, Respiratory syncytial virus
ucaaucaaaacaaccaaaau

SEQ ID NO: 247557 - RNA, 13 nt, Respiratory syncytial virus
uacuccuaauuau

SEQ ID NO: 247558 - RNA, 20 nt, Respiratory syncytial virus
uacugaauacaacacaaaau

SEQ ID NO: 247559 - RNA, 20 nt, Respiratory syncytial virus
uacugaugauauauacacaa

SEQ ID NO: 247560 - RNA, 17 nt, Respiratory syncytial virus
uaguaaguuucaaagaa

SEQ ID NO: 247561 - RNA, 18 nt, Respiratory syncytial virus
uauaaauuccauacuaau

SEQ ID NO: 247562 - RNA, 14 nt, Respiratory syncytial virus
uauaaaccaucuca

SEQ ID NO: 247563 - RNA, 20 nt, Respiratory syncytial virus
uauacaaagaaaccauagaa

SEQ ID NO: 247564 - RNA, 15 nt, Respiratory syncytial virus
uauaauugcagccau

SEQ ID NO: 247565 - RNA, 22 nt, Respiratory syncytial virus
uaugaugugcagaaacacauca

SEQ ID NO: 247566 - RNA, 12 nt, Respiratory syncytial virus
gcucauagacaa

SEQ ID NO: 247567 - RNA, 18 nt, Respiratory syncytial virus
gcucauagacaacccauc

SEQ ID NO: 247568 - RNA, 16 nt, Respiratory syncytial virus
ggaaauccaacuaauc

SEQ ID NO: 247569 - RNA, 20 nt, Respiratory syncytial virus
ggccuuacuuuacacuaaua

SEQ ID NO: 247570 - RNA, 17 nt, Respiratory syncytial virus
gugcagaaacacaucaa

SEQ ID NO: 247571 - RNA, 12 nt, Respiratory syncytial virus
gugaacaaacuu

SEQ ID NO: 247572 - RNA, 15 nt, Respiratory syncytial virus
gucaugauaaacuca

SEQ ID NO: 247573 - RNA, 19 nt, Respiratory syncytial virus
ggcuaucuuagugcucuaa

SEQ ID NO: 247574 - RNA, 23 nt, Respiratory syncytial virus
guaucauaucugucaacucaaua

SEQ ID NO: 247575 - RNA, 14 nt, Respiratory syncytial virus
gucacuaacaccau

SEQ ID NO: 247576 - RNA, 17 nt, Respiratory syncytial virus
guaacagaauugcaguu

SEQ ID NO: 247577 - RNA, 12 nt, Respiratory syncytial virus
ggagcacaggag

SEQ ID NO: 247578 - RNA, 17 nt, Respiratory syncytial virus
ggcaaugauaaucucaa

SEQ ID NO: 247579 - RNA, 16 nt, Respiratory syncytial virus
ggcaaauucacaucac

SEQ ID NO: 247580 - RNA, 21 nt, Respiratory syncytial virus
ggcaaauaaaacaucauggaa

SEQ ID NO: 247581 - RNA, 17 nt, Respiratory syncytial virus
gguauacuaguguuaua

SEQ ID NO: 247582 - RNA, 13 nt, Respiratory syncytial virus
ggucaacuaugaa

SEQ ID NO: 247583 - RNA, 15 nt, Respiratory syncytial virus
gguaaaauugauaaa

SEQ ID NO: 247584 - RNA, 21 nt, Respiratory syncytial virus
gggacacucucaaucaucuau

SEQ ID NO: 247585 - RNA, 22 nt, Respiratory syncytial virus
ggugucauuuuagucauaauua

SEQ ID NO: 247586 - RNA, 21 nt, Respiratory syncytial virus
gccaugaccaaaucaaccaga

SEQ ID NO: 247587 - RNA, 22 nt, Respiratory syncytial virus
gccaugaccaaaucaaccagaa

SEQ ID NO: 247588 - RNA, 17 nt, Respiratory syncytial virus
gcaaauaaaacaucaug

SEQ ID NO: 247589 - RNA, 15 nt, Respiratory syncytial virus
gcaaauacaccaucc

SEQ ID NO: 247590 - RNA, 19 nt, Respiratory syncytial virus
gcaaauauggaaacauacg

SEQ ID NO: 247591 - RNA, 18 nt, Respiratory syncytial virus
gcuccacauacacagcug

SEQ ID NO: 247592 - RNA, 15 nt, Respiratory syncytial virus
gcuccugaauuccau

SEQ ID NO: 247593 - RNA, 16 nt, Respiratory syncytial virus
gcuaaucauaaucucc

SEQ ID NO: 247594 - RNA, 23 nt, Respiratory syncytial virus
gcucaugcaaagcacaccggcaa

SEQ ID NO: 247595 - RNA, 15 nt, Respiratory syncytial virus
gcguauuauugcaaa

SEQ ID NO: 247596 - RNA, 22 nt, Respiratory syncytial virus
aaaugcaaacauguccaaaaac

SEQ ID NO: 247597 - RNA, 18 nt, Respiratory syncytial virus
aaauauaaaagugcugua

SEQ ID NO: 247598 - RNA, 16 nt, Respiratory syncytial virus
gauugaugcaauucaa

SEQ ID NO: 247599 - RNA, 20 nt, Respiratory syncytial virus
gaugugcagaaacacaucaa

SEQ ID NO: 247600 - RNA, 23 nt, Respiratory syncytial virus
gauuaggaagagaagacaccaua

SEQ ID NO: 247601 - RNA, 22 nt, Respiratory syncytial virus
gcaaaaagccaugaccaaauca

SEQ ID NO: 247602 - RNA, 14 nt, Respiratory syncytial virus
gaucuaguacucaa

SEQ ID NO: 247603 - RNA, 16 nt, Respiratory syncytial virus
gauacacucaacaaag

SEQ ID NO: 247604 - RNA, 16 nt, Respiratory syncytial virus
gauaaucccuuuucaa

SEQ ID NO: 247605 - RNA, 18 nt, Respiratory syncytial virus
gaggugucauuuuaguca

SEQ ID NO: 247606 - RNA, 21 nt, Respiratory syncytial virus
gaggugucauuuuagucauaa

SEQ ID NO: 247607 - RNA, 19 nt, Respiratory syncytial virus
gauacuauaguuacaaaaa

SEQ ID NO: 247608 - RNA, 13 nt, Respiratory syncytial virus
aaacuucacgaag

SEQ ID NO: 247609 - RNA, 23 nt, Respiratory syncytial virus
aaagccaugaccaaaucaaccag

SEQ ID NO: 247610 - RNA, 12 nt, Respiratory syncytial virus
aaacuauugcac

SEQ ID NO: 247611 - RNA, 12 nt, Respiratory syncytial virus
aaacucaagaag

SEQ ID NO: 247612 - RNA, 14 nt, Respiratory syncytial virus
aaagucaaguugaa

SEQ ID NO: 247613 - RNA, 19 nt, Respiratory syncytial virus
aaagugggaagcacuaaau

SEQ ID NO: 247614 - RNA, 16 nt, Respiratory syncytial virus
gacaggccacauuuac

SEQ ID NO: 247615 - RNA, 22 nt, Respiratory syncytial virus
aaaguuugcuccugaauuccau

SEQ ID NO: 247616 - RNA, 20 nt, Respiratory syncytial virus
gacaccacaccacaaagacu

SEQ ID NO: 247617 - RNA, 15 nt, Respiratory syncytial virus
gaacaacccucaccu

SEQ ID NO: 247618 - RNA, 22 nt, Respiratory syncytial virus
gaacaagcccaauuaucaaaga

SEQ ID NO: 247619 - RNA, 16 nt, Respiratory syncytial virus
gaaauucgaggucauu

SEQ ID NO: 247620 - RNA, 23 nt, Respiratory syncytial virus
gaacuagcuaaugucaacauacu

SEQ ID NO: 247621 - RNA, 16 nt, Respiratory syncytial virus
gaagaugcaaacaaca

SEQ ID NO: 247622 - RNA, 17 nt, Respiratory syncytial virus
gaagaugcuaaucauaa

SEQ ID NO: 247623 - RNA, 22 nt, Respiratory syncytial virus
gaagaugcuaaucauaaauuca

SEQ ID NO: 247624 - RNA, 14 nt, Respiratory syncytial virus
gaaucaaccauuca

SEQ ID NO: 247625 - RNA, 15 nt, Respiratory syncytial virus
gaaucaaccauucaa

SEQ ID NO: 247626 - RNA, 19 nt, Respiratory syncytial virus
gaaucaaccauucaaugaa

SEQ ID NO: 247627 - RNA, 14 nt, Respiratory syncytial virus
gaauaccagauuaa

SEQ ID NO: 247628 - RNA, 14 nt, Respiratory syncytial virus
cuagcaaaucaaug

SEQ ID NO: 247629 - RNA, 18 nt, Respiratory syncytial virus
cuaguaaguuucaaagaa

SEQ ID NO: 247630 - RNA, 13 nt, Respiratory syncytial virus
cuagcuaauguca

SEQ ID NO: 247631 - RNA, 20 nt, Respiratory syncytial virus
cuaguguuauaacuauagaa

SEQ ID NO: 247632 - RNA, 15 nt, Respiratory syncytial virus
cuauagcacaaauca

SEQ ID NO: 247633 - RNA, 17 nt, Respiratory syncytial virus
cuauagcacaaaucaca

SEQ ID NO: 247634 - RNA, 18 nt, Respiratory syncytial virus
cuauagcacaaaucacau

SEQ ID NO: 247635 - RNA, 17 nt, Respiratory syncytial virus
cuauauuucaaucaaaa

SEQ ID NO: 247636 - RNA, 20 nt, Respiratory syncytial virus
cuaucauuggauuuucuuaa

SEQ ID NO: 247637 - RNA, 15 nt, Respiratory syncytial virus
cucaaacaauucaag

SEQ ID NO: 247638 - RNA, 16 nt, Respiratory syncytial virus
cucaacaaagaucaac

SEQ ID NO: 247639 - RNA, 20 nt, Respiratory syncytial virus
cucaucuauaaaccaucuca

SEQ ID NO: 247640 - RNA, 18 nt, Respiratory syncytial virus
cucaccaugcaagccauc

SEQ ID NO: 247641 - RNA, 20 nt, Respiratory syncytial virus
cucaccaugcaagccaucau

SEQ ID NO: 247642 - RNA, 18 nt, Respiratory syncytial virus
cucacccauccaaccaaa

SEQ ID NO: 247643 - RNA, 20 nt, Respiratory syncytial virus
cucacccauccaaccaaaca

SEQ ID NO: 247644 - RNA, 20 nt, Respiratory syncytial virus
cucaccgaaucaaccauuca

SEQ ID NO: 247645 - RNA, 18 nt, Respiratory syncytial virus
cucaccucuuuacaaaac

SEQ ID NO: 247646 - RNA, 18 nt, Respiratory syncytial virus
cggcaaaccacaaaguca

SEQ ID NO: 247647 - RNA, 20 nt, Respiratory syncytial virus
cuaaucauaaucuccaucau

SEQ ID NO: 247648 - RNA, 21 nt, Respiratory syncytial virus
cuaaccagagacaucauaaca

SEQ ID NO: 247649 - RNA, 21 nt, Respiratory syncytial virus
cuuguaagacaaaacuuuaug

SEQ ID NO: 247650 - RNA, 16 nt, Respiratory syncytial virus
cuuagugcucuaagaa

SEQ ID NO: 247651 - RNA, 19 nt, Respiratory syncytial virus
cuuauaaaagaacuagcua

SEQ ID NO: 247652 - RNA, 22 nt, Respiratory syncytial virus
cuucacgaaggcuccacauaca

SEQ ID NO: 247653 - RNA, 17 nt, Respiratory syncytial virus
cugaauacaacacaaaa

SEQ ID NO: 247654 - RNA, 21 nt, Respiratory syncytial virus
cugaaauaacaacuucaugca

SEQ ID NO: 247655 - RNA, 16 nt, Respiratory syncytial virus
cucuuuacaaaaccac

SEQ ID NO: 247656 - RNA, 19 nt, Respiratory syncytial virus
cuguagggaacaagcccaa

SEQ ID NO: 247657 - RNA, 18 nt, Respiratory syncytial virus
cuggggcaaauaugucac

SEQ ID NO: 247658 - RNA, 23 nt, Respiratory syncytial virus
cugcuuguaagacaaaacuuuau

SEQ ID NO: 247659 - RNA, 18 nt, Respiratory syncytial virus
caucaacacacaacacca

SEQ ID NO: 247660 - RNA, 23 nt, Respiratory syncytial virus
caucauauucauagccucggcaa

SEQ ID NO: 247661 - RNA, 22 nt, Respiratory syncytial virus
caucaugauugcaauacugaac

SEQ ID NO: 247662 - RNA, 21 nt, Respiratory syncytial virus
caucauaaucaccaacccucu

SEQ ID NO: 247663 - RNA, 12 nt, Respiratory syncytial virus
caucacuuacaa

SEQ ID NO: 247664 - RNA, 13 nt, Respiratory syncytial virus
caucaacaucuca

SEQ ID NO: 247665 - RNA, 14 nt, Respiratory syncytial virus
caucaacaucucac

SEQ ID NO: 247666 - RNA, 14 nt, Respiratory syncytial virus
cauccauaacaaua

SEQ ID NO: 247667 - RNA, 18 nt, Respiratory syncytial virus
cauccauauuauaaagua

SEQ ID NO: 247668 - RNA, 11 nt, Respiratory syncytial virus
caucauggaaa

SEQ ID NO: 247669 - RNA, 18 nt, Respiratory syncytial virus
cauccaaccaaacaucua

SEQ ID NO: 247670 - RNA, 16 nt, Respiratory syncytial virus
caugauaacaacaaua

SEQ ID NO: 247671 - RNA, 15 nt, Respiratory syncytial virus
cauugucacuugaga

SEQ ID NO: 247672 - RNA, 16 nt, Respiratory syncytial virus
ccaugaccaaaucaac

SEQ ID NO: 247673 - RNA, 15 nt, Respiratory syncytial virus
ccaacgcaccaccaa

SEQ ID NO: 247674 - RNA, 16 nt, Respiratory syncytial virus
ccaacucacccaucca

SEQ ID NO: 247675 - RNA, 12 nt, Respiratory syncytial virus
ccaaaacuagcc

SEQ ID NO: 247676 - RNA, 20 nt, Respiratory syncytial virus
aaaauggcucuuagcaaagu

SEQ ID NO: 247677 - RNA, 12 nt, Respiratory syncytial virus
ccacaucaucaa

SEQ ID NO: 247678 - RNA, 14 nt, Respiratory syncytial virus
aaaauacauccaua

SEQ ID NO: 247679 - RNA, 17 nt, Respiratory syncytial virus
ccucaaaacaaaugcaa

SEQ ID NO: 247680 - RNA, 18 nt, Respiratory syncytial virus
ccucaaaacaaaugcaau

SEQ ID NO: 247681 - RNA, 16 nt, Respiratory syncytial virus
ccucggcaaaccacaa

SEQ ID NO: 247682 - RNA, 22 nt, Respiratory syncytial virus
ccucaccucuuuacaaaaccac

SEQ ID NO: 247683 - RNA, 21 nt, Respiratory syncytial virus
cgaggucauugcuugaauggu

SEQ ID NO: 247684 - RNA, 18 nt, Respiratory syncytial virus
ccuugcaaauuugaaauu

SEQ ID NO: 247685 - RNA, 14 nt, Respiratory syncytial virus
uccaaaacuagcca

SEQ ID NO: 247686 - RNA, 21 nt, Respiratory syncytial virus
ucauagacaacccaucuauca

SEQ ID NO: 247687 - RNA, 21 nt, Respiratory syncytial virus
ucauagccucggcaaaccaca

SEQ ID NO: 247688 - RNA, 22 nt, Respiratory syncytial virus
ucauaucaucgugcuuauacaa

SEQ ID NO: 247689 - RNA, 12 nt, Respiratory syncytial virus
ucauauucauag

SEQ ID NO: 247690 - RNA, 21 nt, Respiratory syncytial virus
ucaucaaacuauuaacucaaa

SEQ ID NO: 247691 - RNA, 23 nt, Respiratory syncytial virus
ucaucagaucuaguacucaaaua

SEQ ID NO: 247692 - RNA, 13 nt, Respiratory syncytial virus
uccauucuggcaa

SEQ ID NO: 247693 - RNA, 17 nt, Respiratory syncytial virus
uccauuggaccucucaa

SEQ ID NO: 247694 - RNA, 16 nt, Respiratory syncytial virus
uccaacuaaucacaau

SEQ ID NO: 247695 - RNA, 20 nt, Respiratory syncytial virus
uauuuugaauggccacccca

SEQ ID NO: 247696 - RNA, 20 nt, Respiratory syncytial virus
ucaacacaagagucacacaa

SEQ ID NO: 247697 - RNA, 18 nt, Respiratory syncytial virus
ucaacaucucaccaugca

SEQ ID NO: 247698 - RNA, 19 nt, Respiratory syncytial virus
ucaacaucucaccaugcaa

SEQ ID NO: 247699 - RNA, 12 nt, Respiratory syncytial virus
ucaaaacaucac

SEQ ID NO: 247700 - RNA, 21 nt, Respiratory syncytial virus
ucaaaacaucacugaagaauu

SEQ ID NO: 247701 - RNA, 23 nt, Respiratory syncytial virus
ucaaaagaacacacuauauuuca

SEQ ID NO: 247702 - RNA, 11 nt, Respiratory syncytial virus
uauaacaucaa

SEQ ID NO: 247703 - RNA, 15 nt, Respiratory syncytial virus
uauaaacccaacaaa

SEQ ID NO: 247704 - RNA, 17 nt, Respiratory syncytial virus
uauaauugcagccauca

SEQ ID NO: 247705 - RNA, 23 nt, Respiratory syncytial virus
uauaauugcagccaucauauuca

SEQ ID NO: 247706 - RNA, 14 nt, Respiratory syncytial virus
uauaauaaauauca

SEQ ID NO: 247707 - RNA, 20 nt, Respiratory syncytial virus
ucaaggaaaauaaguguaau

SEQ ID NO: 247708 - RNA, 21 nt, Respiratory syncytial virus
ucacgaaggcuccacauacac

SEQ ID NO: 247709 - RNA, 14 nt, Respiratory syncytial virus
ucacauuauccauu

SEQ ID NO: 247710 - RNA, 18 nt, Respiratory syncytial virus
ucagaucaucccaaguca

SEQ ID NO: 247711 - RNA, 15 nt, Respiratory syncytial virus
ugaaacaaauaucca

SEQ ID NO: 247712 - RNA, 15 nt, Respiratory syncytial virus
ugaaauaacaacuuc

SEQ ID NO: 247713 - RNA, 21 nt, Respiratory syncytial virus
ugaaagauggggcaaauacaa

SEQ ID NO: 247714 - RNA, 17 nt, Respiratory syncytial virus
ugaaacuauugcacaaa

SEQ ID NO: 247715 - RNA, 16 nt, Respiratory syncytial virus
ugaacuaagauauuaa

SEQ ID NO: 247716 - RNA, 15 nt, Respiratory syncytial virus
ugaacuaauccuaaa

SEQ ID NO: 247717 - RNA, 16 nt, Respiratory syncytial virus
ugaaugauacacucaa

SEQ ID NO: 247718 - RNA, 16 nt, Respiratory syncytial virus
ugaccaaaucaaccag

SEQ ID NO: 247719 - RNA, 20 nt, Respiratory syncytial virus
uccucaaaacaaaugcaauu

SEQ ID NO: 247720 - RNA, 18 nt, Respiratory syncytial virus
uccuaaugcuuaccacau

SEQ ID NO: 247721 - RNA, 19 nt, Respiratory syncytial virus
uccuaguuuauaguuauau

SEQ ID NO: 247722 - RNA, 19 nt, Respiratory syncytial virus
ucugcucauagacaaccca

SEQ ID NO: 247723 - RNA, 21 nt, Respiratory syncytial virus
ucugcucauagacaacccauc

SEQ ID NO: 247724 - RNA, 13 nt, Respiratory syncytial virus
ucugucaacucaa

SEQ ID NO: 247725 - RNA, 20 nt, Respiratory syncytial virus
ucuuaaaaucugaacuucau

SEQ ID NO: 247726 - RNA, 19 nt, Respiratory syncytial virus
ucugugguucaacuaauca

SEQ ID NO: 247727 - RNA, 15 nt, Respiratory syncytial virus
ucucacuuacauuau

SEQ ID NO: 247728 - RNA, 16 nt, Respiratory syncytial virus
ucucaaucaucuauua

SEQ ID NO: 247729 - RNA, 23 nt, Respiratory syncytial virus
uaaucacagaagaugcuaaucau

SEQ ID NO: 247730 - RNA, 15 nt, Respiratory syncytial virus
uaaucacaauaucug

SEQ ID NO: 247731 - RNA, 10 nt, Respiratory syncytial virus
uaaccaaaga

SEQ ID NO: 247732 - RNA, 15 nt, Respiratory syncytial virus
uaaccagagacauca

SEQ ID NO: 247733 - RNA, 15 nt, Respiratory syncytial virus
uaaugucaacauacu

SEQ ID NO: 247734 - RNA, 12 nt, Respiratory syncytial virus
uacaaaaauggc

SEQ ID NO: 247735 - RNA, 23 nt, Respiratory syncytial virus
uacaaaaauggcucuuagcaaag

SEQ ID NO: 247736 - RNA, 13 nt, Respiratory syncytial virus
uacaaaaccacau

SEQ ID NO: 247737 - RNA, 15 nt, Respiratory syncytial virus
uacaaaaccacauca

SEQ ID NO: 247738 - RNA, 23 nt, Respiratory syncytial virus
uacaaacuuucuaccuacauucu

SEQ ID NO: 247739 - RNA, 19 nt, Respiratory syncytial virus
uacacagcugcuguucaau

SEQ ID NO: 247740 - RNA, 21 nt, Respiratory syncytial virus
uacacaugauaacaacaauaa

SEQ ID NO: 247741 - RNA, 22 nt, Respiratory syncytial virus
uacacaugauaacaacaauaau

SEQ ID NO: 247742 - RNA, 17 nt, Respiratory syncytial virus
uacuagugaaacaaaua

SEQ ID NO: 247743 - RNA, 21 nt, Respiratory syncytial virus
aacaagcccaauuaucaaaga

SEQ ID NO: 247744 - RNA, 12 nt, Respiratory syncytial virus
uaguuaauauaa

SEQ ID NO: 247745 - RNA, 18 nt, Respiratory syncytial virus
uaguuaauauaaaacuug

SEQ ID NO: 247746 - RNA, 23 nt, Respiratory syncytial virus
uaguguuauaacuauagaauuaa

SEQ ID NO: 247747 - RNA, 19 nt, Respiratory syncytial virus
uagugaaacaaauauccac

SEQ ID NO: 247748 - RNA, 21 nt, Respiratory syncytial virus
uaguauaaauuccauacuaau

SEQ ID NO: 247749 - RNA, 13 nt, Respiratory syncytial virus
uagcuaaugucaa

SEQ ID NO: 247750 - RNA, 20 nt, Respiratory syncytial virus
uaggaagagaagacaccaua

SEQ ID NO: 247751 - RNA, 12 nt, Respiratory syncytial virus
uagcacaaauca

SEQ ID NO: 247752 - RNA, 15 nt, Respiratory syncytial virus
uagcacaaaucacau

SEQ ID NO: 247753 - RNA, 24 nt, Respiratory syncytial virus
uagccucggcaaaccacaaaguca

SEQ ID NO: 247754 - RNA, 13 nt, Respiratory syncytial virus
uagaaaagaccug

SEQ ID NO: 247755 - RNA, 22 nt, Respiratory syncytial virus
uaaauuuaaauccaaaucuaau

SEQ ID NO: 247756 - RNA, 17 nt, Respiratory syncytial virus
uaaaucuuaaaucuaua

SEQ ID NO: 247757 - RNA, 16 nt, Respiratory syncytial virus
uaaaucuauagcacaa

SEQ ID NO: 247758 - RNA, 15 nt, Respiratory syncytial virus
uaaagggcaaauuca

SEQ ID NO: 247759 - RNA, 18 nt, Respiratory syncytial virus
uaaagggcaaauucacau

SEQ ID NO: 247760 - RNA, 13 nt, Respiratory syncytial virus
uaaaauugauaaa

SEQ ID NO: 247761 - RNA, 14 nt, Respiratory syncytial virus
uaaaaauaaucaua

SEQ ID NO: 247762 - RNA, 15 nt, Respiratory syncytial virus
uaaaaauaaucauaa

SEQ ID NO: 247763 - RNA, 17 nt, Respiratory syncytial virus
uaaaaauaaucauaaca

SEQ ID NO: 247764 - RNA, 13 nt, Respiratory syncytial virus
uaaaaauacucag

SEQ ID NO: 247765 - RNA, 13 nt, Respiratory syncytial virus
uaaaacaagaauu

SEQ ID NO: 247766 - RNA, 18 nt, Respiratory syncytial virus
uaaaaaaaauggggcaaa

SEQ ID NO: 247767 - RNA, 21 nt, Respiratory syncytial virus
guuacuauguauaaucaaaag

SEQ ID NO: 247768 - RNA, 20 nt, Respiratory syncytial virus
uuuaucaaacaacaugcagu

SEQ ID NO: 247769 - RNA, 14 nt, Respiratory syncytial virus
uuuauauacuugau

SEQ ID NO: 247770 - RNA, 19 nt, Respiratory syncytial virus
aacagaauacuuaagucua

SEQ ID NO: 247771 - RNA, 18 nt, Respiratory syncytial virus
uuugcuccugaauuccau

SEQ ID NO: 247772 - RNA, 15 nt, Respiratory syncytial virus
uuugcuaaucauaau

SEQ ID NO: 247773 - RNA, 18 nt, Respiratory syncytial virus
uuugcuaaucauaaucuc

SEQ ID NO: 247774 - RNA, 20 nt, Respiratory syncytial virus
aaccaauggaaaauacaucc

SEQ ID NO: 247775 - RNA, 15 nt, Respiratory syncytial virus
aaccauggacacaac

SEQ ID NO: 247776 - RNA, 18 nt, Respiratory syncytial virus
aaccacaucaacaucuca

SEQ ID NO: 247777 - RNA, 23 nt, Respiratory syncytial virus
aacccucugugguucaacuaauc

SEQ ID NO: 247778 - RNA, 18 nt, Respiratory syncytial virus
aacuuuuagugaacuaau

SEQ ID NO: 247779 - RNA, 18 nt, Respiratory syncytial virus
aacuagcuaaugucaaca

SEQ ID NO: 247780 - RNA, 15 nt, Respiratory syncytial virus
aaucagccaauccaa

SEQ ID NO: 247781 - RNA, 23 nt, Respiratory syncytial virus
aaucaucuauuauucauaucauc

SEQ ID NO: 247782 - RNA, 15 nt, Respiratory syncytial virus
aaucauaacaaugaa

SEQ ID NO: 247783 - RNA, 16 nt, Respiratory syncytial virus
aaucauaacaaugaac

SEQ ID NO: 247784 - RNA, 14 nt, Respiratory syncytial virus
aauauccacauggg

SEQ ID NO: 247785 - RNA, 20 nt, Respiratory syncytial virus
aauacauccauaacaauaga

SEQ ID NO: 247786 - RNA, 14 nt, Respiratory syncytial virus
aauacaacacaaaa

SEQ ID NO: 247787 - RNA, 18 nt, Respiratory syncytial virus
aauaaucauaacaaugaa

SEQ ID NO: 247788 - RNA, 14 nt, Respiratory syncytial virus
aauaacaauggagu

SEQ ID NO: 247789 - RNA, 21 nt, Respiratory syncytial virus
aauaacaauggaguugccaau

SEQ ID NO: 247790 - RNA, 19 nt, Respiratory syncytial virus
aaguagauuccuaguuuau

SEQ ID NO: 247791 - RNA, 16 nt, Respiratory syncytial virus
aagacaaaacuuuaug

SEQ ID NO: 247792 - RNA, 13 nt, Respiratory syncytial virus
aauccaacuaauc

SEQ ID NO: 247793 - RNA, 14 nt, Respiratory syncytial virus
aaucuagcuauuca

SEQ ID NO: 247794 - RNA, 20 nt, Respiratory syncytial virus
aaucuagcuauucauaugaa

SEQ ID NO: 247795 - RNA, 15 nt, Respiratory syncytial virus
aaucucaacuucacu

SEQ ID NO: 247796 - RNA, 21 nt, Respiratory syncytial virus
aaugcaaacauguccaaaaac

SEQ ID NO: 247797 - RNA, 14 nt, Respiratory syncytial virus
aaugauaaucucaa

SEQ ID NO: 247798 - RNA, 16 nt, Respiratory syncytial virus
aaugucaacauacuag

SEQ ID NO: 247799 - RNA, 20 nt, Respiratory syncytial virus
aaugcuuaccacaucaucaa

SEQ ID NO: 247800 - RNA, 18 nt, Respiratory syncytial virus
aauggcucuuagcaaagu

SEQ ID NO: 247801 - RNA, 22 nt, Respiratory syncytial virus
aauggcucuuagcaaagucaag

SEQ ID NO: 247802 - RNA, 14 nt, Respiratory syncytial virus
aauggaaaauacau

SEQ ID NO: 247803 - RNA, 23 nt, Respiratory syncytial virus
aauggaucccauuauuaauggaa

SEQ ID NO: 247804 - RNA, 22 nt, Respiratory syncytial virus
aauuaccgcaauccuugcugca

SEQ ID NO: 247805 - RNA, 23 nt, Respiratory syncytial virus
aauucaaccauuauaaacccaac

SEQ ID NO: 247806 - RNA, 20 nt, Respiratory syncytial virus
aauuuaaauccaaaucuaau

SEQ ID NO: 247807 - RNA, 15 nt, Respiratory syncytial virus
aauugcaguugcuca

SEQ ID NO: 247808 - RNA, 20 nt, Respiratory syncytial virus
aauucacaucaccuaaagau

SEQ ID NO: 247809 - RNA, 22 nt, Respiratory syncytial virus
aauugaauaccagauuaacuua

SEQ ID NO: 247810 - RNA, 21 nt, Respiratory syncytial virus
uuaauaacuuuuagugaacua

SEQ ID NO: 247811 - RNA, 19 nt, Respiratory syncytial virus
ugucacgaaggaauccuug

SEQ ID NO: 247812 - RNA, 20 nt, Respiratory syncytial virus
ugucacgaaggaauccuugc

SEQ ID NO: 247813 - RNA, 20 nt, Respiratory syncytial virus
uuaucaaacaacaugcagug

SEQ ID NO: 247814 - RNA, 12 nt, Respiratory syncytial virus
uuauucauauca

SEQ ID NO: 247815 - RNA, 20 nt, Respiratory syncytial virus
uucuggcaaugauaaucuca

SEQ ID NO: 247816 - RNA, 22 nt, Respiratory syncytial virus
uucaccaaucugauggcacaaa

SEQ ID NO: 247817 - RNA, 22 nt, Respiratory syncytial virus
uucaucgaaacucucaucuaua

SEQ ID NO: 247818 - RNA, 22 nt, Respiratory syncytial virus
uguaacagaauugcaguugcuc

SEQ ID NO: 247819 - RNA, 15 nt, Respiratory syncytial virus
uguauauuaacuaaa

SEQ ID NO: 247820 - RNA, 14 nt, Respiratory syncytial virus
uguauaaucaaaag

SEQ ID NO: 247821 - RNA, 14 nt, Respiratory syncytial virus
ugggacacucucaa

SEQ ID NO: 247822 - RNA, 19 nt, Respiratory syncytial virus
ugggacacucucaaucauc

SEQ ID NO: 247823 - RNA, 18 nt, Respiratory syncytial virus
ugggaagcacuaaauaca

SEQ ID NO: 247824 - RNA, 17 nt, Respiratory syncytial virus
uggagccucagaucauc

SEQ ID NO: 247825 - RNA, 14 nt, Respiratory syncytial virus
ugcagaaacacauc

SEQ ID NO: 247826 - RNA, 19 nt, Respiratory syncytial virus
ugcagaaacacaucaauaa

SEQ ID NO: 247827 - RNA, 19 nt, Respiratory syncytial virus
auaacaauggaguugccaa

SEQ ID NO: 247828 - RNA, 14 nt, Respiratory syncytial virus
auaaccacacucca

SEQ ID NO: 247829 - RNA, 19 nt, Respiratory syncytial virus
aguugaaugauacacucaa

SEQ ID NO: 247830 - RNA, 13 nt, Respiratory syncytial virus
aguaaccaaagaa

SEQ ID NO: 247831 - RNA, 16 nt, Respiratory syncytial virus
aggaggaauaaauuua

SEQ ID NO: 247832 - RNA, 14 nt, Respiratory syncytial virus
aggaauccuugcaa

SEQ ID NO: 247833 - RNA, 22 nt, Respiratory syncytial virus
aggaaaauaaguguaauggaac

SEQ ID NO: 247834 - RNA, 22 nt, Respiratory syncytial virus
auaaucauuggaggaaauccaa

SEQ ID NO: 247835 - RNA, 15 nt, Respiratory syncytial virus
auaaucauaacaaug

SEQ ID NO: 247836 - RNA, 16 nt, Respiratory syncytial virus
auaaucucuuugcuaa

SEQ ID NO: 247837 - RNA, 19 nt, Respiratory syncytial virus
auagccucggcaaaccaca

SEQ ID NO: 247838 - RNA, 22 nt, Respiratory syncytial virus
auagccucggcaaaccacaaag

SEQ ID NO: 247839 - RNA, 18 nt, Respiratory syncytial virus
auagcacaaaucacauua

SEQ ID NO: 247840 - RNA, 21 nt, Respiratory syncytial virus
auaguucaaauggagccugaa

SEQ ID NO: 247841 - RNA, 19 nt, Respiratory syncytial virus
auagugagaaaacuugaug

SEQ ID NO: 247842 - RNA, 21 nt, Respiratory syncytial virus
auagguauguuauaugcuaug

SEQ ID NO: 247843 - RNA, 19 nt, Respiratory syncytial virus
aucauaucugucaacucaa

SEQ ID NO: 247844 - RNA, 21 nt, Respiratory syncytial virus
aucacuaaccagagacaucau

SEQ ID NO: 247845 - RNA, 20 nt, Respiratory syncytial virus
aucaucuauuauucauauca

SEQ ID NO: 247846 - RNA, 19 nt, Respiratory syncytial virus
auauucauagccucggcaa

SEQ ID NO: 247847 - RNA, 21 nt, Respiratory syncytial virus
aucaccaacccucugugguuc

SEQ ID NO: 247848 - RNA, 14 nt, Respiratory syncytial virus
aucgauacuuuauc

SEQ ID NO: 247849 - RNA, 18 nt, Respiratory syncytial virus
aucgaaacucucaucuau

SEQ ID NO: 247850 - RNA, 19 nt, Respiratory syncytial virus
augcagugcagucagcaaa

SEQ ID NO: 247851 - RNA, 15 nt, Respiratory syncytial virus
augcacugcuuguaa

SEQ ID NO: 247852 - RNA, 22 nt, Respiratory syncytial virus
augaugugcagaaacacaucaa

SEQ ID NO: 247853 - RNA, 22 nt, Respiratory syncytial virus
augauacacucaacaaagauca

SEQ ID NO: 247854 - RNA, 23 nt, Respiratory syncytial virus
augaaauccauuggaccucucaa

SEQ ID NO: 247855 - RNA, 18 nt, Respiratory syncytial virus
augaccaaaucaaccaga

SEQ ID NO: 247856 - RNA, 21 nt, Respiratory syncytial virus
augauaacaacaauaaucucu

SEQ ID NO: 247857 - RNA, 13 nt, Respiratory syncytial virus
auggagccugaaa

SEQ ID NO: 247858 - RNA, 14 nt, Respiratory syncytial virus
auuauucauaucau

SEQ ID NO: 247859 - RNA, 13 nt, Respiratory syncytial virus
auggaaacauacg

SEQ ID NO: 247860 - RNA, 23 nt, Respiratory syncytial virus
auucaccaaucugauggcacaaa

SEQ ID NO: 247861 - RNA, 13 nt, Respiratory syncytial virus
auucauaugaaga

SEQ ID NO: 247862 - RNA, 20 nt, Respiratory syncytial virus
auuccuggucaacuaugaaa

SEQ ID NO: 247863 - RNA, 18 nt, Respiratory syncytial virus
auucuggccuuacuuuac

SEQ ID NO: 247864 - RNA, 21 nt, Respiratory syncytial virus
auucuggcaaugauaaucuca

SEQ ID NO: 247865 - RNA, 18 nt, Respiratory syncytial virus
caaagaaaaccucuagua

SEQ ID NO: 247866 - RNA, 22 nt, Respiratory syncytial virus
caaacaucuauacgccaaucag

SEQ ID NO: 247867 - RNA, 15 nt, Respiratory syncytial virus
caaagaaaccauaga

SEQ ID NO: 247868 - RNA, 18 nt, Respiratory syncytial virus
caaagacugaugaucaca

SEQ ID NO: 247869 - RNA, 13 nt, Respiratory syncytial virus
caaaaagccauga

SEQ ID NO: 247870 - RNA, 22 nt, Respiratory syncytial virus
caaauggagccugaaaauuaua

SEQ ID NO: 247871 - RNA, 22 nt, Respiratory syncytial virus
caaaugcaauuaccgcaauccu

SEQ ID NO: 247872 - RNA, 11 nt, Respiratory syncytial virus
caaaugcaaac

SEQ ID NO: 247873 - RNA, 18 nt, Respiratory syncytial virus
caaaugcaaacaugucca

SEQ ID NO: 247874 - RNA, 20 nt, Respiratory syncytial virus
caacacacaaugacaccaca

SEQ ID NO: 247875 - RNA, 14 nt, Respiratory syncytial virus
caaauaaaucaauu

SEQ ID NO: 247876 - RNA, 16 nt, Respiratory syncytial virus
caaauaacaauggagu

SEQ ID NO: 247877 - RNA, 22 nt, Respiratory syncytial virus
caaauauggaaacauacgugaa

SEQ ID NO: 247878 - RNA, 23 nt, Respiratory syncytial virus
caaauauggaaacauacgugaac

SEQ ID NO: 247879 - RNA, 17 nt, Respiratory syncytial virus
caaauauccacacccaa

SEQ ID NO: 247880 - RNA, 14 nt, Respiratory syncytial virus
caaaugagacagau

SEQ ID NO: 247881 - RNA, 23 nt, Respiratory syncytial virus
caaaugagacagaugauacugua

SEQ ID NO: 247882 - RNA, 18 nt, Respiratory syncytial virus
caacgcaccaccaagaca

SEQ ID NO: 247883 - RNA, 13 nt, Respiratory syncytial virus
caacauacuagug

SEQ ID NO: 247884 - RNA, 16 nt, Respiratory syncytial virus
cagauuuacuuauaaa

SEQ ID NO: 247885 - RNA, 19 nt, Respiratory syncytial virus
cagauuuauauacuugaua

SEQ ID NO: 247886 - RNA, 17 nt, Respiratory syncytial virus
cagccaauccaaaacua

SEQ ID NO: 247887 - RNA, 19 nt, Respiratory syncytial virus
cagcugcuguucaauacaa

SEQ ID NO: 247888 - RNA, 13 nt, Respiratory syncytial virus
caagccaucaucc

SEQ ID NO: 247889 - RNA, 14 nt, Respiratory syncytial virus
caagccaucaucca

SEQ ID NO: 247890 - RNA, 16 nt, Respiratory syncytial virus
caagccaucauccaua

SEQ ID NO: 247891 - RNA, 16 nt, Respiratory syncytial virus
cacaaaauauggcacu

SEQ ID NO: 247892 - RNA, 21 nt, Respiratory syncytial virus
cacaccacaaagacugaugau

SEQ ID NO: 247893 - RNA, 22 nt, Respiratory syncytial virus
cacacagauuuauauacuugau

SEQ ID NO: 247894 - RNA, 13 nt, Respiratory syncytial virus
cacacaacaccaa

SEQ ID NO: 247895 - RNA, 17 nt, Respiratory syncytial virus
cacacaacaccaacaga

SEQ ID NO: 247896 - RNA, 14 nt, Respiratory syncytial virus
cacuauauuucaau

SEQ ID NO: 247897 - RNA, 15 nt, Respiratory syncytial virus
caccaccaagacacu

SEQ ID NO: 247898 - RNA, 20 nt, Respiratory syncytial virus
acaagcccaauuaucaaaga

SEQ ID NO: 247899 - RNA, 12 nt, Respiratory syncytial virus
acaacaugcagu

SEQ ID NO: 247900 - RNA, 16 nt, Respiratory syncytial virus
acaauagaauucucaa

SEQ ID NO: 247901 - RNA, 18 nt, Respiratory syncytial virus
aaucucuuugcuaaucau

SEQ ID NO: 247902 - RNA, 22 nt, Respiratory syncytial virus
aaugacaccacaccacaaagac

SEQ ID NO: 247903 - RNA, 19 nt, Respiratory syncytial virus
aauucacaucaccuaaaga

SEQ ID NO: 247904 - RNA, 20 nt, Respiratory syncytial virus
aauucagccgacccaaccau

SEQ ID NO: 247905 - RNA, 19 nt, Respiratory syncytial virus
aauucuggccuuacuuuac

SEQ ID NO: 247906 - RNA, 14 nt, Respiratory syncytial virus
aaucaaccauucaa

SEQ ID NO: 247907 - RNA, 15 nt, Respiratory syncytial virus
aaucauccaugccag

SEQ ID NO: 247908 - RNA, 16 nt, Respiratory syncytial virus
aaucauguucuuacaa

SEQ ID NO: 247909 - RNA, 12 nt, Respiratory syncytial virus
aaucaugaaugu

SEQ ID NO: 247910 - RNA, 13 nt, Respiratory syncytial virus
aaucaucuauuau

SEQ ID NO: 247911 - RNA, 14 nt, Respiratory syncytial virus
aaucauaaucucca

SEQ ID NO: 247912 - RNA, 15 nt, Respiratory syncytial virus
aauccaacuaaucac

SEQ ID NO: 247913 - RNA, 19 nt, Respiratory syncytial virus
aauaucacuaaccagagac

SEQ ID NO: 247914 - RNA, 16 nt, Respiratory syncytial virus
aauauggaaacauacg

SEQ ID NO: 247915 - RNA, 18 nt, Respiratory syncytial virus
aauaaccauauauacuca

SEQ ID NO: 247916 - RNA, 22 nt, Respiratory syncytial virus
aauaaucucuuugcuaaucaua

SEQ ID NO: 247917 - RNA, 17 nt, Respiratory syncytial virus
aagauggggcaaauaca

SEQ ID NO: 247918 - RNA, 21 nt, Respiratory syncytial virus
aagaugcuaaucauaaauuca

SEQ ID NO: 247919 - RNA, 13 nt, Respiratory syncytial virus
aagcacuaaauac

SEQ ID NO: 247920 - RNA, 13 nt, Respiratory syncytial virus
aaguaaccaaaga

SEQ ID NO: 247921 - RNA, 12 nt, Respiratory syncytial virus
aauaaaacauca

SEQ ID NO: 247922 - RNA, 15 nt, Respiratory syncytial virus
aacaacccucaccuc

SEQ ID NO: 247923 - RNA, 19 nt, Respiratory syncytial virus
aacaacagagcuaccaaau

SEQ ID NO: 247924 - RNA, 16 nt, Respiratory syncytial virus
aacaauagaauucuca

SEQ ID NO: 247925 - RNA, 18 nt, Respiratory syncytial virus
aacacacuauauuucaau

SEQ ID NO: 247926 - RNA, 20 nt, Respiratory syncytial virus
aacacaucaauaaguuaugu

SEQ ID NO: 247927 - RNA, 15 nt, Respiratory syncytial virus
aaauaacaacuucau

SEQ ID NO: 247928 - RNA, 13 nt, Respiratory syncytial virus
aaacuauugcaca

SEQ ID NO: 247929 - RNA, 14 nt, Respiratory syncytial virus
aaacuauacaaaga

SEQ ID NO: 247930 - RNA, 15 nt, Respiratory syncytial virus
aagaucaacuucugu

SEQ ID NO: 247931 - RNA, 21 nt, Respiratory syncytial virus
aagaucaacuucugucaucca

SEQ ID NO: 247932 - RNA, 20 nt, Respiratory syncytial virus
aagaccugggacacucucaa

SEQ ID NO: 247933 - RNA, 14 nt, Respiratory syncytial virus
aagaaaccauagaa

SEQ ID NO: 247934 - RNA, 22 nt, Respiratory syncytial virus
aacucaaacaauucaagccaug

SEQ ID NO: 247935 - RNA, 12 nt, Respiratory syncytial virus
aacuauugcaca

SEQ ID NO: 247936 - RNA, 14 nt, Respiratory syncytial virus
aacuauugcacaaa

SEQ ID NO: 247937 - RNA, 15 nt, Respiratory syncytial virus
aacuauugcacaaag

SEQ ID NO: 247938 - RNA, 23 nt, Respiratory syncytial virus
accucuuuacaaaaccacaucaa

SEQ ID NO: 247939 - RNA, 15 nt, Respiratory syncytial virus
acauccauaacaaua

SEQ ID NO: 247940 - RNA, 15 nt, Respiratory syncytial virus
acaucaacaucucac

SEQ ID NO: 247941 - RNA, 15 nt, Respiratory syncytial virus
acacacuauauuuca

SEQ ID NO: 247942 - RNA, 18 nt, Respiratory syncytial virus
acacacaacaccaacaga

SEQ ID NO: 247943 - RNA, 19 nt, Respiratory syncytial virus
acauggggcaaauaaucau

SEQ ID NO: 247944 - RNA, 14 nt, Respiratory syncytial virus
acaugcagugcagu

SEQ ID NO: 247945 - RNA, 18 nt, Respiratory syncytial virus
acauuugauaacaaugaa

SEQ ID NO: 247946 - RNA, 21 nt, Respiratory syncytial virus
acauuugauaacaaugaagaa

SEQ ID NO: 247947 - RNA, 22 nt, Respiratory syncytial virus
accaacagaagaccaacaaaca

SEQ ID NO: 247948 - RNA, 23 nt, Respiratory syncytial virus
accauugucacuugagacuauaa

SEQ ID NO: 247949 - RNA, 23 nt, Respiratory syncytial virus
accauuaguuaauauaaaacuug

SEQ ID NO: 247950 - RNA, 19 nt, Respiratory syncytial virus
accauucaaugaaauccau

SEQ ID NO: 247951 - RNA, 14 nt, Respiratory syncytial virus
acuugauaaaucau

SEQ ID NO: 247952 - RNA, 17 nt, Respiratory syncytial virus
agacaacccaucuauca

SEQ ID NO: 247953 - RNA, 22 nt, Respiratory syncytial virus
agaagaccaacaaacaaaccaa

SEQ ID NO: 247954 - RNA, 19 nt, Respiratory syncytial virus
agaagaaucuagcuauuca

SEQ ID NO: 247955 - RNA, 15 nt, Respiratory syncytial virus
agaagacaccauaaa

SEQ ID NO: 247956 - RNA, 13 nt, Respiratory syncytial virus
acuuacauuauuu

SEQ ID NO: 247957 - RNA, 18 nt, Respiratory syncytial virus
agcaaauacaccauccaa

SEQ ID NO: 247958 - RNA, 14 nt, Respiratory syncytial virus
agagucacacaauc

SEQ ID NO: 247959 - RNA, 20 nt, Respiratory syncytial virus
agauauagaaguaaccaaag

SEQ ID NO: 247960 - RNA, 21 nt, Respiratory syncytial virus
agauauagaaguaaccaaaga

SEQ ID NO: 247961 - RNA, 15 nt, Respiratory syncytial virus
agagacaucauaaca

SEQ ID NO: 247962 - RNA, 22 nt, Respiratory syncytial virus
agacuugauugaugcaauucaa

SEQ ID NO: 247963 - RNA, 12 nt, Respiratory syncytial virus
aaaauaaucaua

SEQ ID NO: 247964 - RNA, 15 nt, Respiratory syncytial virus
aaaauaaucauaaca

SEQ ID NO: 247965 - RNA, 10 nt, Respiratory syncytial virus
aaaaccacau

SEQ ID NO: 247966 - RNA, 15 nt, Respiratory syncytial virus
aaaaccacaucaaca

SEQ ID NO: 247967 - RNA, 20 nt, Respiratory syncytial virus
aaaaccacaucaacaucuca

SEQ ID NO: 247968 - RNA, 16 nt, Respiratory syncytial virus
aaaacuauacaaagaa

SEQ ID NO: 247969 - RNA, 20 nt, Respiratory syncytial virus
aaacaucuauacgccaauca

SEQ ID NO: 247970 - RNA, 12 nt, Respiratory syncytial virus
aaaccaacucac

SEQ ID NO: 247971 - RNA, 20 nt, Respiratory syncytial virus
aaacauuugauaacaaugaa

SEQ ID NO: 247972 - RNA, 19 nt, Respiratory syncytial virus
aaaccacaucaacaucuca

SEQ ID NO: 247973 - RNA, 18 nt, Respiratory syncytial virus
aaacaaggaccaacgcac

SEQ ID NO: 247974 - RNA, 19 nt, Respiratory syncytial virus
aaacaacagagcuaccaaa

SEQ ID NO: 247975 - RNA, 16 nt, Respiratory syncytial virus
aaacaacaugcagugc

SEQ ID NO: 247976 - RNA, 16 nt, Respiratory syncytial virus
aaaaagccaugaccaa

SEQ ID NO: 247977 - RNA, 21 nt, Respiratory syncytial virus
aaaaagccaugaccaaaucaa

SEQ ID NO: 247978 - RNA, 20 nt, Respiratory syncytial virus
aaaaagcguauuauugcaaa

SEQ ID NO: 247979 - RNA, 16 nt, Respiratory syncytial virus
aaaaauagauacuaua

SEQ ID NO: 247980 - RNA, 21 nt, Respiratory syncytial virus
uuuuagugaacuaauccuaaa

SEQ ID NO: 247981 - RNA, 16 nt, Respiratory syncytial virus
ucuuuacaaaaccaca

SEQ ID NO: 247982 - RNA, 15 nt, Respiratory syncytial virus
ucuuaaaaucugaac

SEQ ID NO: 247983 - RNA, 21 nt, Respiratory syncytial virus
ucuaucauuggauuuucuuaa

SEQ ID NO: 247984 - RNA, 19 nt, Respiratory syncytial virus
ucuaguaaguuucaaagaa

SEQ ID NO: 247985 - RNA, 17 nt, Respiratory syncytial virus
ucuauaaaccaucucac

SEQ ID NO: 247986 - RNA, 17 nt, Respiratory syncytial virus
ugagaaaacuugaugaa

SEQ ID NO: 247987 - RNA, 15 nt, Respiratory syncytial virus
ugaauuccauggaga

SEQ ID NO: 247988 - RNA, 19 nt, Respiratory syncytial virus
ugaaauucgaggucauugc

SEQ ID NO: 247989 - RNA, 20 nt, Respiratory syncytial virus
ugaagaauuuuaucaaacaa

SEQ ID NO: 247990 - RNA, 17 nt, Respiratory syncytial virus
ugcaauuaccgcaaucc

SEQ ID NO: 247991 - RNA, 19 nt, Respiratory syncytial virus
ugcaauuaccgcaauccuu

SEQ ID NO: 247992 - RNA, 15 nt, Respiratory syncytial virus
ugcaagccaucaucc

SEQ ID NO: 247993 - RNA, 22 nt, Respiratory syncytial virus
ugagaccauugucacuugagac

SEQ ID NO: 247994 - RNA, 20 nt, Respiratory syncytial virus
ugagacuauaauaauaucac

SEQ ID NO: 247995 - RNA, 17 nt, Respiratory syncytial virus
ugaucacagacaugaga

SEQ ID NO: 247996 - RNA, 22 nt, Respiratory syncytial virus
ucaccaugcaagccaucaucca

SEQ ID NO: 247997 - RNA, 19 nt, Respiratory syncytial virus
ucacagaagaugcuaauca

SEQ ID NO: 247998 - RNA, 22 nt, Respiratory syncytial virus
ucacuuauaauugcagccauca

SEQ ID NO: 247999 - RNA, 14 nt, Respiratory syncytial virus
ucagccaauccaaa

SEQ ID NO: 248000 - RNA, 13 nt, Respiratory syncytial virus
ucauaacacucaa

SEQ ID NO: 248001 - RNA, 15 nt, Respiratory syncytial virus
ucauuuuagucauaa

SEQ ID NO: 248002 - RNA, 15 nt, Respiratory syncytial virus
uccaacggagcacag

SEQ ID NO: 248003 - RNA, 21 nt, Respiratory syncytial virus
uccagucaaaacaucacugaa

SEQ ID NO: 248004 - RNA, 13 nt, Respiratory syncytial virus
uccauaguucaaa

SEQ ID NO: 248005 - RNA, 18 nt, Respiratory syncytial virus
uccauaguucaaauggag

SEQ ID NO: 248006 - RNA, 18 nt, Respiratory syncytial virus
uccagcaaauacaccauc

SEQ ID NO: 248007 - RNA, 19 nt, Respiratory syncytial virus
uccagcaaauacaccaucc

SEQ ID NO: 248008 - RNA, 13 nt, Respiratory syncytial virus
ucgauacuuuauc

SEQ ID NO: 248009 - RNA, 16 nt, Respiratory syncytial virus
ugcagaaacacaucaa

SEQ ID NO: 248010 - RNA, 21 nt, Respiratory syncytial virus
uggaaauucugcuaaugugua

SEQ ID NO: 248011 - RNA, 21 nt, Respiratory syncytial virus
uggacacaacacacaaugaca

SEQ ID NO: 248012 - RNA, 18 nt, Respiratory syncytial virus
uggagaagaugcaaacaa

SEQ ID NO: 248013 - RNA, 14 nt, Respiratory syncytial virus
uggaggaaauccaa

SEQ ID NO: 248014 - RNA, 22 nt, Respiratory syncytial virus
uggaggaaauccaacuaaucac

SEQ ID NO: 248015 - RNA, 15 nt, Respiratory syncytial virus
ugucacuaacaccau

SEQ ID NO: 248016 - RNA, 23 nt, Respiratory syncytial virus
ugucauccagcaaauacaccauc

SEQ ID NO: 248017 - RNA, 20 nt, Respiratory syncytial virus
uggcauguuauuaaucacag

SEQ ID NO: 248018 - RNA, 19 nt, Respiratory syncytial virus
uggcacuuuuccuaugcca

SEQ ID NO: 248019 - RNA, 15 nt, Respiratory syncytial virus
uuaauaaaaauaucc

SEQ ID NO: 248020 - RNA, 17 nt, Respiratory syncytial virus
uuaagacuaacaauaac

SEQ ID NO: 248021 - RNA, 13 nt, Respiratory syncytial virus
uuaacucaaacaa

SEQ ID NO: 248022 - RNA, 18 nt, Respiratory syncytial virus
ugugguucaacuaaucaa

SEQ ID NO: 248023 - RNA, 13 nt, Respiratory syncytial virus
uuauucauaucau

SEQ ID NO: 248024 - RNA, 13 nt, Respiratory syncytial virus
uuauauacuugau

SEQ ID NO: 248025 - RNA, 15 nt, Respiratory syncytial virus
uuauaugcuaugucu

SEQ ID NO: 248026 - RNA, 22 nt, Respiratory syncytial virus
uugauacuccuaauuaugaugu

SEQ ID NO: 248027 - RNA, 13 nt, Respiratory syncytial virus
uugcucaugcaaa

SEQ ID NO: 248028 - RNA, 16 nt, Respiratory syncytial virus
uugcucaugcaaagca

SEQ ID NO: 248029 - RNA, 11 nt, Respiratory syncytial virus
uugcuaaucau

SEQ ID NO: 248030 - RNA, 14 nt, Respiratory syncytial virus
uugcaaaaagccau

SEQ ID NO: 248031 - RNA, 17 nt, Respiratory syncytial virus
uucacaucaccuaaaga

SEQ ID NO: 248032 - RNA, 23 nt, Respiratory syncytial virus
uucacgaaggcuccacauacaca

SEQ ID NO: 248033 - RNA, 14 nt, Respiratory syncytial virus
uucaccaucauaau

SEQ ID NO: 248034 - RNA, 16 nt, Respiratory syncytial virus
uucaccaucauaauca

SEQ ID NO: 248035 - RNA, 20 nt, Respiratory syncytial virus
uucaccaucauaaucaccaa

SEQ ID NO: 248036 - RNA, 15 nt, Respiratory syncytial virus
uucaauacaaugucu

SEQ ID NO: 248037 - RNA, 14 nt, Respiratory syncytial virus
uauccacacccaau

SEQ ID NO: 248038 - RNA, 21 nt, Respiratory syncytial virus
uauccacauggggcaaauaau

SEQ ID NO: 248039 - RNA, 16 nt, Respiratory syncytial virus
uaguauugauacuccu

SEQ ID NO: 248040 - RNA, 16 nt, Respiratory syncytial virus
uaguauaaauuccaua

SEQ ID NO: 248041 - RNA, 13 nt, Respiratory syncytial virus
uagcacaaaucac

SEQ ID NO: 248042 - RNA, 19 nt, Respiratory syncytial virus
uagcacaaaucacauuauc

SEQ ID NO: 248043 - RNA, 22 nt, Respiratory syncytial virus
uagauauagaaguaaccaaaga

SEQ ID NO: 248044 - RNA, 18 nt, Respiratory syncytial virus
uagaaacauuugauaaca

SEQ ID NO: 248045 - RNA, 16 nt, Respiratory syncytial virus
uagaaguaaccaaaga

SEQ ID NO: 248046 - RNA, 16 nt, Respiratory syncytial virus
uacuuaagucuaugga

SEQ ID NO: 248047 - RNA, 23 nt, Respiratory syncytial virus
uacauuccuggucaacuaugaaa

SEQ ID NO: 248048 - RNA, 23 nt, Respiratory syncytial virus
uaauuuaaaauuaaggagagaca

SEQ ID NO: 248049 - RNA, 22 nt, Respiratory syncytial virus
uacaaugguuucauaucugcuc

SEQ ID NO: 248050 - RNA, 17 nt, Respiratory syncytial virus
guuauuaaucacagaag

SEQ ID NO: 248051 - RNA, 18 nt, Respiratory syncytial virus
guuacuauguauaaucaa

SEQ ID NO: 248052 - RNA, 17 nt, Respiratory syncytial virus
guuaaaucuuaaaucua

SEQ ID NO: 248053 - RNA, 17 nt, Respiratory syncytial virus
gugucauuuuagucaua

SEQ ID NO: 248054 - RNA, 18 nt, Respiratory syncytial virus
uaacaauagaauucucaa

SEQ ID NO: 248055 - RNA, 19 nt, Respiratory syncytial virus
uaaauucacuggguuaaua

SEQ ID NO: 248056 - RNA, 18 nt, Respiratory syncytial virus
uaacaacuucaugcauaa

SEQ ID NO: 248057 - RNA, 18 nt, Respiratory syncytial virus
uaaauauaaaagugcugu

SEQ ID NO: 248058 - RNA, 14 nt, Respiratory syncytial virus
guugcucaugcaaa

SEQ ID NO: 248059 - RNA, 19 nt, Respiratory syncytial virus
gcuccugaauuccauggag

SEQ ID NO: 248060 - RNA, 10 nt, Respiratory syncytial virus
ggcaaugaua

SEQ ID NO: 248061 - RNA, 12 nt, Respiratory syncytial virus
ggcaaaccacaa

SEQ ID NO: 248062 - RNA, 14 nt, Respiratory syncytial virus
guaagaggugucau

SEQ ID NO: 248063 - RNA, 19 nt, Respiratory syncytial virus
gguaagaggugucauuuua

SEQ ID NO: 248064 - RNA, 20 nt, Respiratory syncytial virus
cuuugcuaaucauaaucucc

SEQ ID NO: 248065 - RNA, 16 nt, Respiratory syncytial virus
cuuuacaaaaccacau

SEQ ID NO: 248066 - RNA, 22 nt, Respiratory syncytial virus
cuuuacaaaaccacaucaacau

SEQ ID NO: 248067 - RNA, 19 nt, Respiratory syncytial virus
cuuguaguauaaauuccau

SEQ ID NO: 248068 - RNA, 15 nt, Respiratory syncytial virus
gaaacuauugcacaa

SEQ ID NO: 248069 - RNA, 15 nt, Respiratory syncytial virus
gaaugauacacucaa

SEQ ID NO: 248070 - RNA, 15 nt, Respiratory syncytial virus
gaaucuagcuauuca

SEQ ID NO: 248071 - RNA, 13 nt, Respiratory syncytial virus
gaaguaaccaaag

SEQ ID NO: 248072 - RNA, 14 nt, Respiratory syncytial virus
gaaguaaccaaaga

SEQ ID NO: 248073 - RNA, 15 nt, Respiratory syncytial virus
gaaggcuccacauac

SEQ ID NO: 248074 - RNA, 15 nt, Respiratory syncytial virus
gauugcaauacugaa

SEQ ID NO: 248075 - RNA, 16 nt, Respiratory syncytial virus
gcaaauaaaacaucau

SEQ ID NO: 248076 - RNA, 21 nt, Respiratory syncytial virus
gcaaaggcuaucuuagugcuc

SEQ ID NO: 248077 - RNA, 19 nt, Respiratory syncytial virus
gcaauccuugcugcaguca

SEQ ID NO: 248078 - RNA, 14 nt, Respiratory syncytial virus
gcaaugauaaucuc

SEQ ID NO: 248079 - RNA, 18 nt, Respiratory syncytial virus
gcaaugauaaucucaacu

SEQ ID NO: 248080 - RNA, 22 nt, Respiratory syncytial virus
gaugacccugcaucacuuacaa

SEQ ID NO: 248081 - RNA, 16 nt, Respiratory syncytial virus
gauacuauaguuacaa

SEQ ID NO: 248082 - RNA, 23 nt, Respiratory syncytial virus
gaguuacuauguauaaucaaaag

SEQ ID NO: 248083 - RNA, 13 nt, Respiratory syncytial virus
gauaacaacaaua

SEQ ID NO: 248084 - RNA, 21 nt, Respiratory syncytial virus
cuaagauauuaagacuaacaa

SEQ ID NO: 248085 - RNA, 21 nt, Respiratory syncytial virus
cuaucauuggauuuucuuaaa

SEQ ID NO: 248086 - RNA, 22 nt, Respiratory syncytial virus
cuaucauuggauuuucuuaaaa

SEQ ID NO: 248087 - RNA, 12 nt, Respiratory syncytial virus
cuauucauauga

SEQ ID NO: 248088 - RNA, 22 nt, Respiratory syncytial virus
cucaaucaucuauuauucauau

SEQ ID NO: 248089 - RNA, 21 nt, Respiratory syncytial virus
cucaccgaaucaaccauucaa

SEQ ID NO: 248090 - RNA, 19 nt, Respiratory syncytial virus
cucucaucuauaaaccauc

SEQ ID NO: 248091 - RNA, 14 nt, Respiratory syncytial virus
cugauggcacaaaa

SEQ ID NO: 248092 - RNA, 15 nt, Respiratory syncytial virus
cugauggcacaaaac

SEQ ID NO: 248093 - RNA, 16 nt, Respiratory syncytial virus
cugauggcacaaaaca

SEQ ID NO: 248094 - RNA, 21 nt, Respiratory syncytial virus
cucuguuuugcuuccagucaa

SEQ ID NO: 248095 - RNA, 18 nt, Respiratory syncytial virus
cuguaacagaauugcagu

SEQ ID NO: 248096 - RNA, 18 nt, Respiratory syncytial virus
cuggcaaugauaaucuca

SEQ ID NO: 248097 - RNA, 14 nt, Respiratory syncytial virus
cugcuguucaauac

SEQ ID NO: 248098 - RNA, 22 nt, Respiratory syncytial virus
cgcaauccuugcugcagucaca

SEQ ID NO: 248099 - RNA, 21 nt, Respiratory syncytial virus
cgaugacccugcaucacuuac

SEQ ID NO: 248100 - RNA, 13 nt, Respiratory syncytial virus
auaaucauaacaa

SEQ ID NO: 248101 - RNA, 15 nt, Respiratory syncytial virus
auaaucccuuuucaa

SEQ ID NO: 248102 - RNA, 18 nt, Respiratory syncytial virus
auaauaucacuaaccaga

SEQ ID NO: 248103 - RNA, 17 nt, Respiratory syncytial virus
auacaaagaaaccauag

SEQ ID NO: 248104 - RNA, 12 nt, Respiratory syncytial virus
auauuaagacua

SEQ ID NO: 248105 - RNA, 13 nt, Respiratory syncytial virus
aucaaugucacua

SEQ ID NO: 248106 - RNA, 22 nt, Respiratory syncytial virus
auaugggugcccauguuccaau

SEQ ID NO: 248107 - RNA, 13 nt, Respiratory syncytial virus
auaucugcucaua

SEQ ID NO: 248108 - RNA, 17 nt, Respiratory syncytial virus
auaucacuaaccagaga

SEQ ID NO: 248109 - RNA, 19 nt, Respiratory syncytial virus
aguuauauaaaacaauuga

SEQ ID NO: 248110 - RNA, 20 nt, Respiratory syncytial virus
aguuaauauaaaacuugaca

SEQ ID NO: 248111 - RNA, 17 nt, Respiratory syncytial virus
aguguuauaacuauaga

SEQ ID NO: 248112 - RNA, 24 nt, Respiratory syncytial virus
agucuauggauaaaagcaucgaua

SEQ ID NO: 248113 - RNA, 15 nt, Respiratory syncytial virus
agucaugauaaacuc

SEQ ID NO: 248114 - RNA, 14 nt, Respiratory syncytial virus
agccaucauauuca

SEQ ID NO: 248115 - RNA, 13 nt, Respiratory syncytial virus
agccaucauccau

SEQ ID NO: 248116 - RNA, 17 nt, Respiratory syncytial virus
agccucagaucauccca

SEQ ID NO: 248117 - RNA, 16 nt, Respiratory syncytial virus
agcaucgauacuuuau

SEQ ID NO: 248118 - RNA, 17 nt, Respiratory syncytial virus
agcaucgauacuuuauc

SEQ ID NO: 248119 - RNA, 17 nt, Respiratory syncytial virus
acuuuuagugaacuaau

SEQ ID NO: 248120 - RNA, 21 nt, Respiratory syncytial virus
agauacuauaguuacaaaaaa

SEQ ID NO: 248121 - RNA, 20 nt, Respiratory syncytial virus
agauaguaucauaucuguca

SEQ ID NO: 248122 - RNA, 20 nt, Respiratory syncytial virus
agauaguauugauacuccua

SEQ ID NO: 248123 - RNA, 18 nt, Respiratory syncytial virus
agauauagaaguaaccaa

SEQ ID NO: 248124 - RNA, 14 nt, Respiratory syncytial virus
acaaugacaccaca

SEQ ID NO: 248125 - RNA, 17 nt, Respiratory syncytial virus
acaaugguuucauaucu

SEQ ID NO: 248126 - RNA, 23 nt, Respiratory syncytial virus
acaaguuaaaucuuaaaucuaua

SEQ ID NO: 248127 - RNA, 17 nt, Respiratory syncytial virus
acaacuucaugcauaac

SEQ ID NO: 248128 - RNA, 16 nt, Respiratory syncytial virus
acaaagaaaccauaga

SEQ ID NO: 248129 - RNA, 15 nt, Respiratory syncytial virus
acaaagacugaugau

SEQ ID NO: 248130 - RNA, 18 nt, Respiratory syncytial virus
acaaagacugaugaucac

SEQ ID NO: 248131 - RNA, 21 nt, Respiratory syncytial virus
acaaagaucaacuucugucau

SEQ ID NO: 248132 - RNA, 12 nt, Respiratory syncytial virus
acaaaaccacau

SEQ ID NO: 248133 - RNA, 15 nt, Respiratory syncytial virus
acaaaaccacaucaa

SEQ ID NO: 248134 - RNA, 20 nt, Respiratory syncytial virus
aaugacaccacaccacaaag

SEQ ID NO: 248135 - RNA, 14 nt, Respiratory syncytial virus
acaucaacaucuca

SEQ ID NO: 248136 - RNA, 16 nt, Respiratory syncytial virus
acaucaacaucucacc

SEQ ID NO: 248137 - RNA, 18 nt, Respiratory syncytial virus
acaucagugaguugauuc

SEQ ID NO: 248138 - RNA, 14 nt, Respiratory syncytial virus
acaucaccuaaaga

SEQ ID NO: 248139 - RNA, 15 nt, Respiratory syncytial virus
acaucaccuaaagau

SEQ ID NO: 248140 - RNA, 15 nt, Respiratory syncytial virus
acaucucaccaugca

SEQ ID NO: 248141 - RNA, 15 nt, Respiratory syncytial virus
acagaugauacugua

SEQ ID NO: 248142 - RNA, 14 nt, Respiratory syncytial virus
acaguaaccuugca

SEQ ID NO: 248143 - RNA, 17 nt, Respiratory syncytial virus
acauacuagugaaacaa

SEQ ID NO: 248144 - RNA, 14 nt, Respiratory syncytial virus
acauacgugaacaa

SEQ ID NO: 248145 - RNA, 23 nt, Respiratory syncytial virus
acacucuguuuugcuuccaguca

SEQ ID NO: 248146 - RNA, 20 nt, Respiratory syncytial virus
acacaagagucacacaaucu

SEQ ID NO: 248147 - RNA, 14 nt, Respiratory syncytial virus
acaccacaccacaa

SEQ ID NO: 248148 - RNA, 22 nt, Respiratory syncytial virus
acuauuaacucaaacaauucaa

SEQ ID NO: 248149 - RNA, 15 nt, Respiratory syncytial virus
acuauugcacaaagu

SEQ ID NO: 248150 - RNA, 15 nt, Respiratory syncytial virus
acuauguauaaucaa

SEQ ID NO: 248151 - RNA, 19 nt, Respiratory syncytial virus
accgcaauccuugcugcag

SEQ ID NO: 248152 - RNA, 17 nt, Respiratory syncytial virus
accaauggaaaauacau

SEQ ID NO: 248153 - RNA, 18 nt, Respiratory syncytial virus
acgaaggcuccacauaca

SEQ ID NO: 248154 - RNA, 22 nt, Respiratory syncytial virus
acgcuaagguaaaauugauaaa

SEQ ID NO: 248155 - RNA, 21 nt, Respiratory syncytial virus
cauaucugucaacucaauaga

SEQ ID NO: 248156 - RNA, 18 nt, Respiratory syncytial virus
caucauauucauagccuc

SEQ ID NO: 248157 - RNA, 14 nt, Respiratory syncytial virus
caucaugauugcaa

SEQ ID NO: 248158 - RNA, 14 nt, Respiratory syncytial virus
cauacgugaacaaa

SEQ ID NO: 248159 - RNA, 15 nt, Respiratory syncytial virus
caucgauacuuuauc

SEQ ID NO: 248160 - RNA, 19 nt, Respiratory syncytial virus
cauccagcaaauacaccau

SEQ ID NO: 248161 - RNA, 20 nt, Respiratory syncytial virus
cauccagcaaauacaccauc

SEQ ID NO: 248162 - RNA, 17 nt, Respiratory syncytial virus
cagcugcuguucaauac

SEQ ID NO: 248163 - RNA, 16 nt, Respiratory syncytial virus
caccacaccacaaaga

SEQ ID NO: 248164 - RNA, 14 nt, Respiratory syncytial virus
cagaauugcaguug

SEQ ID NO: 248165 - RNA, 12 nt, Respiratory syncytial virus
ccaaccaaacau

SEQ ID NO: 248166 - RNA, 21 nt, Respiratory syncytial virus
ccaacaaacaaaccaacucac

SEQ ID NO: 248167 - RNA, 16 nt, Respiratory syncytial virus
ccaaucagccaaucca

SEQ ID NO: 248168 - RNA, 16 nt, Respiratory syncytial virus
ccaaucuguacaucaa

SEQ ID NO: 248169 - RNA, 16 nt, Respiratory syncytial virus
cauggacacaacacac

SEQ ID NO: 248170 - RNA, 17 nt, Respiratory syncytial virus
cauggagaagaugcaaa

SEQ ID NO: 248171 - RNA, 15 nt, Respiratory syncytial virus
caugcagugcaguca

SEQ ID NO: 248172 - RNA, 17 nt, Respiratory syncytial virus
ccagcaaauacaccauc

SEQ ID NO: 248173 - RNA, 15 nt, Respiratory syncytial virus
ccaauuaucaaagaa

SEQ ID NO: 248174 - RNA, 18 nt, Respiratory syncytial virus
ccaauggaaaauacaucc

SEQ ID NO: 248175 - RNA, 19 nt, Respiratory syncytial virus
ccaugcaagccaucaucca

SEQ ID NO: 248176 - RNA, 20 nt, Respiratory syncytial virus
ccauaaaaauacucagagau

SEQ ID NO: 248177 - RNA, 19 nt, Respiratory syncytial virus
ccauucaaugaaauccauu

SEQ ID NO: 248178 - RNA, 18 nt, Respiratory syncytial virus
ccauggacacaacacaca

SEQ ID NO: 248179 - RNA, 21 nt, Respiratory syncytial virus
ccauggacacaacacacaaug

SEQ ID NO: 248180 - RNA, 15 nt, Respiratory syncytial virus
ccauguuccaaucau

SEQ ID NO: 248181 - RNA, 14 nt, Respiratory syncytial virus
aucacagacaugag

SEQ ID NO: 248182 - RNA, 20 nt, Respiratory syncytial virus
augauaacaacaauaaucuc

SEQ ID NO: 248183 - RNA, 19 nt, Respiratory syncytial virus
augaucacagacaugagac

SEQ ID NO: 248184 - RNA, 13 nt, Respiratory syncytial virus
augcaagccauca

SEQ ID NO: 248185 - RNA, 22 nt, Respiratory syncytial virus
augcaagccaucauccauauua

SEQ ID NO: 248186 - RNA, 13 nt, Respiratory syncytial virus
augcaaacaacag

SEQ ID NO: 248187 - RNA, 15 nt, Respiratory syncytial virus
augcagugcagucag

SEQ ID NO: 248188 - RNA, 12 nt, Respiratory syncytial virus
augcaauucaaa

SEQ ID NO: 248189 - RNA, 14 nt, Respiratory syncytial virus
augcauaaccacac

SEQ ID NO: 248190 - RNA, 23 nt, Respiratory syncytial virus
auguauagugagaaaacuugaug

SEQ ID NO: 248191 - RNA, 12 nt, Respiratory syncytial virus
auguauaaucaa

SEQ ID NO: 248192 - RNA, 14 nt, Respiratory syncytial virus
auggggcaaauaca

SEQ ID NO: 248193 - RNA, 14 nt, Respiratory syncytial virus
augucaacauacua

SEQ ID NO: 248194 - RNA, 16 nt, Respiratory syncytial virus
augucaacauacuagu

SEQ ID NO: 248195 - RNA, 18 nt, Respiratory syncytial virus
augucaacauacuaguga

SEQ ID NO: 248196 - RNA, 15 nt, Respiratory syncytial virus
augcuuaccacauca

SEQ ID NO: 248197 - RNA, 18 nt, Respiratory syncytial virus
auggaaaauacauccaua

SEQ ID NO: 248198 - RNA, 13 nt, Respiratory syncytial virus
auggaguugccaa

SEQ ID NO: 248199 - RNA, 14 nt, Respiratory syncytial virus
auggaguugccaau

SEQ ID NO: 248200 - RNA, 17 nt, Respiratory syncytial virus
auuaacucaaacaauuc

SEQ ID NO: 248201 - RNA, 14 nt, Respiratory syncytial virus
auuaagacuaacaa

SEQ ID NO: 248202 - RNA, 22 nt, Respiratory syncytial virus
auuaagagucaugauaaacuca

SEQ ID NO: 248203 - RNA, 17 nt, Respiratory syncytial virus
auuaucauuuugaucua

SEQ ID NO: 248204 - RNA, 19 nt, Respiratory syncytial virus
auuauccauucuggcaaug

SEQ ID NO: 248205 - RNA, 14 nt, Respiratory syncytial virus
auucacaucaccua

SEQ ID NO: 248206 - RNA, 13 nt, Respiratory syncytial virus
caauaucugucaa

SEQ ID NO: 248207 - RNA, 19 nt, Respiratory syncytial virus
caaucaucuauuauucaua

SEQ ID NO: 248208 - RNA, 20 nt, Respiratory syncytial virus
caaucaucuauuauucauau

SEQ ID NO: 248209 - RNA, 15 nt, Respiratory syncytial virus
caauagaauucucaa

SEQ ID NO: 248210 - RNA, 19 nt, Respiratory syncytial virus
cacagauuuauauacuuga

SEQ ID NO: 248211 - RNA, 20 nt, Respiratory syncytial virus
cacacucuguuuugcuucca

SEQ ID NO: 248212 - RNA, 15 nt, Respiratory syncytial virus
cacacuauauuucaa

SEQ ID NO: 248213 - RNA, 20 nt, Respiratory syncytial virus
caacuucaugcauaaccaca

SEQ ID NO: 248214 - RNA, 22 nt, Respiratory syncytial virus
caaguuaaaucuuaaaucuaua

SEQ ID NO: 248215 - RNA, 18 nt, Respiratory syncytial virus
caagucauuguucaucag

SEQ ID NO: 248216 - RNA, 22 nt, Respiratory syncytial virus
caacuagcaaaucaaugucacu

SEQ ID NO: 248217 - RNA, 23 nt, Respiratory syncytial virus
caacuagcaaaucaaugucacua

SEQ ID NO: 248218 - RNA, 13 nt, Respiratory syncytial virus
caaaacuauacaa

SEQ ID NO: 248219 - RNA, 13 nt, Respiratory syncytial virus
auugcaauacuga

SEQ ID NO: 248220 - RNA, 14 nt, Respiratory syncytial virus
auugcaguugcuca

SEQ ID NO: 248221 - RNA, 21 nt, Respiratory syncytial virus
caaacuuucuaccuacauucu

SEQ ID NO: 248222 - RNA, 19 nt, Respiratory syncytial virus
caaagaaagcccuauaaca

SEQ ID NO: 248223 - RNA, 23 nt, Respiratory syncytial virus
caaagaaagcccuauaacaucaa

SEQ ID NO: 248224 - RNA, 19 nt, Respiratory syncytial virus
caaagaucaacuucuguca

SEQ ID NO: 248225 - RNA, 19 nt, Respiratory syncytial virus
caaagcacaccggcaacca

SEQ ID NO: 248226 - RNA, 22 nt, Respiratory syncytial virus
caaaggcuaucuuagugcucua

SEQ ID NO: 248227 - RNA, 21 nt, Respiratory syncytial virus
caaccaauggaaaauacaucc

SEQ ID NO: 248228 - RNA, 19 nt, Respiratory syncytial virus
caaccaaaauaaccauaua

SEQ ID NO: 248229 - RNA, 16 nt, Respiratory syncytial virus
caacaugcagugcagu

SEQ ID NO: 248230 - RNA, 21 nt, Respiratory syncytial virus
caacaugcagugcagucagca

SEQ ID NO: 248231 - RNA, 21 nt, Respiratory syncytial virus
caacagagcuaccaaauuccu

SEQ ID NO: 248232 - RNA, 17 nt, Respiratory syncytial virus
caaauaacaauggaguu

SEQ ID NO: 248233 - RNA, 17 nt, Respiratory syncytial virus
uguacaucaacacacaa

SEQ ID NO: 248234 - RNA, 14 nt, Respiratory syncytial virus
uggucaacuaugaa

SEQ ID NO: 248235 - RNA, 23 nt, Respiratory syncytial virus
uguaagacaaaacuuuauguuaa

SEQ ID NO: 248236 - RNA, 13 nt, Respiratory syncytial virus
uggcacaaaacag

SEQ ID NO: 248237 - RNA, 17 nt, Respiratory syncytial virus
uggggcaaauaaaucaa

SEQ ID NO: 248238 - RNA, 14 nt, Respiratory syncytial virus
uggggcaaaugcaa

SEQ ID NO: 248239 - RNA, 22 nt, Respiratory syncytial virus
uuaauuaaaaauaaucauaaca

SEQ ID NO: 248240 - RNA, 13 nt, Respiratory syncytial virus
uuacaaaaccaca

SEQ ID NO: 248241 - RNA, 12 nt, Respiratory syncytial virus
uucaaagaagac

SEQ ID NO: 248242 - RNA, 14 nt, Respiratory syncytial virus
uguuauuaaucaca

SEQ ID NO: 248243 - RNA, 15 nt, Respiratory syncytial virus
uguucaauacaaugu

SEQ ID NO: 248244 - RNA, 22 nt, Respiratory syncytial virus
uuaaaaagcguauuauugcaaa

SEQ ID NO: 248245 - RNA, 13 nt, Respiratory syncytial virus
ugauaaacucaag

SEQ ID NO: 248246 - RNA, 20 nt, Respiratory syncytial virus
ugauaacaacaauaaucucu

SEQ ID NO: 248247 - RNA, 13 nt, Respiratory syncytial virus
ugauaacaaugaa

SEQ ID NO: 248248 - RNA, 16 nt, Respiratory syncytial virus
ugcaagccaucaucca

SEQ ID NO: 248249 - RNA, 19 nt, Respiratory syncytial virus
ugcaagccaucauccauau

SEQ ID NO: 248250 - RNA, 13 nt, Respiratory syncytial virus
ugauauauacaca

SEQ ID NO: 248251 - RNA, 17 nt, Respiratory syncytial virus
ugcauaaccacacucca

SEQ ID NO: 248252 - RNA, 15 nt, Respiratory syncytial virus
uuucaaucaaaacaa

SEQ ID NO: 248253 - RNA, 16 nt, Respiratory syncytial virus
aacaguaaccuugcau

SEQ ID NO: 248254 - RNA, 15 nt, Respiratory syncytial virus
uugcuuccagucaaa

SEQ ID NO: 248255 - RNA, 21 nt, Respiratory syncytial virus
aacacacuauauuucaaucaa

SEQ ID NO: 248256 - RNA, 16 nt, Respiratory syncytial virus
aacacaagagucacac

SEQ ID NO: 248257 - RNA, 19 nt, Respiratory syncytial virus
uucacuucaccaucauaau

SEQ ID NO: 248258 - RNA, 18 nt, Respiratory syncytial virus
uucacgaaggcuccacau

SEQ ID NO: 248259 - RNA, 22 nt, Respiratory syncytial virus
aauccauuggaccucucaagac

SEQ ID NO: 248260 - RNA, 17 nt, Respiratory syncytial virus
aagcaucgauacuuuau

SEQ ID NO: 248261 - RNA, 19 nt, Respiratory syncytial virus
aagcaucgauacuuuauca

SEQ ID NO: 248262 - RNA, 13 nt, Respiratory syncytial virus
aagccaucaucca

SEQ ID NO: 248263 - RNA, 17 nt, Respiratory syncytial virus
aagcccuauaacaucaa

SEQ ID NO: 248264 - RNA, 19 nt, Respiratory syncytial virus
aaggaauccuugcaaauuu

SEQ ID NO: 248265 - RNA, 12 nt, Respiratory syncytial virus
aaguaaccaaag

SEQ ID NO: 248266 - RNA, 14 nt, Respiratory syncytial virus
aaguaaccaaagaa

SEQ ID NO: 248267 - RNA, 18 nt, Respiratory syncytial virus
aagauggggcaaauacaa

SEQ ID NO: 248268 - RNA, 13 nt, Respiratory syncytial virus
aagaucccaagaa

SEQ ID NO: 248269 - RNA, 20 nt, Respiratory syncytial virus
aagacugaugaucacagaca

SEQ ID NO: 248270 - RNA, 18 nt, Respiratory syncytial virus
aagacuugauugaugcaa

SEQ ID NO: 248271 - RNA, 19 nt, Respiratory syncytial virus
aagaccugggacacucuca

SEQ ID NO: 248272 - RNA, 17 nt, Respiratory syncytial virus
aacuugaugaaagacag

SEQ ID NO: 248273 - RNA, 13 nt, Respiratory syncytial virus
aacuugacagaag

SEQ ID NO: 248274 - RNA, 20 nt, Respiratory syncytial virus
aacuucaucgaaacucucau

SEQ ID NO: 248275 - RNA, 16 nt, Respiratory syncytial virus
aacgcaccaccaagac

SEQ ID NO: 248276 - RNA, 19 nt, Respiratory syncytial virus
aacaucuauacgccaauca

SEQ ID NO: 248277 - RNA, 20 nt, Respiratory syncytial virus
aacauacuagugaaacaaau

SEQ ID NO: 248278 - RNA, 22 nt, Respiratory syncytial virus
aacucacccauccaaccaaaca

SEQ ID NO: 248279 - RNA, 12 nt, Respiratory syncytial virus
aacucaauagau

SEQ ID NO: 248280 - RNA, 22 nt, Respiratory syncytial virus
aacucuggggcaaauaacaaug

SEQ ID NO: 248281 - RNA, 16 nt, Respiratory syncytial virus
uacucaccgaaucaac

SEQ ID NO: 248282 - RNA, 14 nt, Respiratory syncytial virus
uacgugaacaaacu

SEQ ID NO: 248283 - RNA, 21 nt, Respiratory syncytial virus
aacaacccucaccucuuuaca

SEQ ID NO: 248284 - RNA, 14 nt, Respiratory syncytial virus
aacaacuucaugca

SEQ ID NO: 248285 - RNA, 14 nt, Respiratory syncytial virus
uacauccauaacaa

SEQ ID NO: 248286 - RNA, 16 nt, Respiratory syncytial virus
uacauccauaacaaua

SEQ ID NO: 248287 - RNA, 17 nt, Respiratory syncytial virus
uaauuaaaaauaaucau

SEQ ID NO: 248288 - RNA, 22 nt, Respiratory syncytial virus
uaauuaaaaauaaucauaacaa

SEQ ID NO: 248289 - RNA, 23 nt, Respiratory syncytial virus
uaauuaugaugugcagaaacaca

SEQ ID NO: 248290 - RNA, 22 nt, Respiratory syncytial virus
uaauugcagccaucauauucau

SEQ ID NO: 248291 - RNA, 16 nt, Respiratory syncytial virus
uaaaagugcuguaaca

SEQ ID NO: 248292 - RNA, 18 nt, Respiratory syncytial virus
uaaaccaucucacuuaca

SEQ ID NO: 248293 - RNA, 18 nt, Respiratory syncytial virus
guugaaugauacacucaa

SEQ ID NO: 248294 - RNA, 21 nt, Respiratory syncytial virus
uaacaauggaguugccaaucc

SEQ ID NO: 248295 - RNA, 12 nt, Respiratory syncytial virus
uaacacucaauc

SEQ ID NO: 248296 - RNA, 15 nt, Respiratory syncytial virus
uaacacucaauccua

SEQ ID NO: 248297 - RNA, 16 nt, Respiratory syncytial virus
uaacaucaaauucaac

SEQ ID NO: 248298 - RNA, 24 nt, Respiratory syncytial virus
uaagauauuaagacuaacaauaac

SEQ ID NO: 248299 - RNA, 17 nt, Respiratory syncytial virus
uaagacaaaacuuuaug

SEQ ID NO: 248300 - RNA, 23 nt, Respiratory syncytial virus
guucaucagaucuaguacucaaa

SEQ ID NO: 248301 - RNA, 15 nt, Respiratory syncytial virus
guucaacuaaucaaa

SEQ ID NO: 248302 - RNA, 21 nt, Respiratory syncytial virus
guauaaauuccauacuaauaa

SEQ ID NO: 248303 - RNA, 16 nt, Respiratory syncytial virus
gucacuugagacuaua

SEQ ID NO: 248304 - RNA, 19 nt, Respiratory syncytial virus
uauagugagaaaacuugau

SEQ ID NO: 248305 - RNA, 16 nt, Respiratory syncytial virus
uauauauuagugucau

SEQ ID NO: 248306 - RNA, 19 nt, Respiratory syncytial virus
uauagaaguaaccaaagaa

SEQ ID NO: 248307 - RNA, 14 nt, Respiratory syncytial virus
uauauuucaaucaa

SEQ ID NO: 248308 - RNA, 21 nt, Respiratory syncytial virus
uauacuugauaaaucaugaau

SEQ ID NO: 248309 - RNA, 22 nt, Respiratory syncytial virus
uauacugaauacaacacaaaau

SEQ ID NO: 248310 - RNA, 20 nt, Respiratory syncytial virus
uagaaucaauaaagggcaaa

SEQ ID NO: 248311 - RNA, 14 nt, Respiratory syncytial virus
uaucuuagugcucu

SEQ ID NO: 248312 - RNA, 21 nt, Respiratory syncytial virus
uaucauaucugucaacucaau

SEQ ID NO: 248313 - RNA, 19 nt, Respiratory syncytial virus
uaucugucaacauagacaa

SEQ ID NO: 248314 - RNA, 23 nt, Respiratory syncytial virus
uaucugcucauagacaacccauc

SEQ ID NO: 248315 - RNA, 21 nt, Respiratory syncytial virus
ucaaacaacaugcagugcagu

SEQ ID NO: 248316 - RNA, 12 nt, Respiratory syncytial virus
ucaacuaaucaa

SEQ ID NO: 248317 - RNA, 22 nt, Respiratory syncytial virus
ucaacuagcaaaucaaugucac

SEQ ID NO: 248318 - RNA, 22 nt, Respiratory syncytial virus
ucacuucaccaucauaaucacc

SEQ ID NO: 248319 - RNA, 17 nt, Respiratory syncytial virus
ucacuugagacuauaau

SEQ ID NO: 248320 - RNA, 15 nt, Respiratory syncytial virus
ucacuuacauuauuu

SEQ ID NO: 248321 - RNA, 17 nt, Respiratory syncytial virus
ucacuuacauuauuuaa

SEQ ID NO: 248322 - RNA, 19 nt, Respiratory syncytial virus
ucaccucuuuacaaaacca

SEQ ID NO: 248323 - RNA, 21 nt, Respiratory syncytial virus
ucaccucuuuacaaaaccaca

SEQ ID NO: 248324 - RNA, 18 nt, Respiratory syncytial virus
ucaccaugcaagccauca

SEQ ID NO: 248325 - RNA, 16 nt, Respiratory syncytial virus
ucuuugcuaaucauaa

SEQ ID NO: 248326 - RNA, 14 nt, Respiratory syncytial virus
ucuuagcaaaguca

SEQ ID NO: 248327 - RNA, 13 nt, Respiratory syncytial virus
ucuuaaaucuaua

SEQ ID NO: 248328 - RNA, 22 nt, Respiratory syncytial virus
ucuaguaaguuucaaagaagac

SEQ ID NO: 248329 - RNA, 19 nt, Respiratory syncytial virus
ucuauacgccaaucagcca

SEQ ID NO: 248330 - RNA, 23 nt, Respiratory syncytial virus
ucuauaaaccaucucacuuacau

SEQ ID NO: 248331 - RNA, 13 nt, Respiratory syncytial virus
uccugaauuccau

SEQ ID NO: 248332 - RNA, 18 nt, Respiratory syncytial virus
uccaaucauccaugccag

SEQ ID NO: 248333 - RNA, 13 nt, Respiratory syncytial virus
uccagcaaauaca

SEQ ID NO: 248334 - RNA, 23 nt, Respiratory syncytial virus
ggaacaagcccaauuaucaaaga

SEQ ID NO: 248335 - RNA, 16 nt, Respiratory syncytial virus
ggaagagaagacacca

SEQ ID NO: 248336 - RNA, 21 nt, Respiratory syncytial virus
ggcauguuauuaaucacagaa

SEQ ID NO: 248337 - RNA, 16 nt, Respiratory syncytial virus
gccaggcaaaaucaac

SEQ ID NO: 248338 - RNA, 13 nt, Respiratory syncytial virus
gccaauccaaaac

SEQ ID NO: 248339 - RNA, 16 nt, Respiratory syncytial virus
gccaauccucaaaaca

SEQ ID NO: 248340 - RNA, 15 nt, Respiratory syncytial virus
gccucggcaaaccac

SEQ ID NO: 248341 - RNA, 16 nt, Respiratory syncytial virus
gcagccaucauauuca

SEQ ID NO: 248342 - RNA, 16 nt, Respiratory syncytial virus
gcaccaccaagacacu

SEQ ID NO: 248343 - RNA, 17 nt, Respiratory syncytial virus
gcacaccggcaaccaac

SEQ ID NO: 248344 - RNA, 16 nt, Respiratory syncytial virus
gcacaaaucacauuau

SEQ ID NO: 248345 - RNA, 16 nt, Respiratory syncytial virus
gcaaugauaaucucaa

SEQ ID NO: 248346 - RNA, 21 nt, Respiratory syncytial virus
aaauuuaaauccaaaucuaau

SEQ ID NO: 248347 - RNA, 23 nt, Respiratory syncytial virus
aaaucuuauauuaaaaauuccca

SEQ ID NO: 248348 - RNA, 19 nt, Respiratory syncytial virus
aaaucuauagcacaaauca

SEQ ID NO: 248349 - RNA, 22 nt, Respiratory syncytial virus
aaaucuauagcacaaaucacau

SEQ ID NO: 248350 - RNA, 23 nt, Respiratory syncytial virus
aaauucgaggucauugcuugaau

SEQ ID NO: 248351 - RNA, 16 nt, Respiratory syncytial virus
aaauucacaucaccua

SEQ ID NO: 248352 - RNA, 19 nt, Respiratory syncytial virus
aaauucacaucaccuaaag

SEQ ID NO: 248353 - RNA, 15 nt, Respiratory syncytial virus
aaaucaaugucacua

SEQ ID NO: 248354 - RNA, 19 nt, Respiratory syncytial virus
gaccaacaaacaaaccaac

SEQ ID NO: 248355 - RNA, 11 nt, Respiratory syncytial virus
aaauaaaucaa

SEQ ID NO: 248356 - RNA, 23 nt, Respiratory syncytial virus
gacaucauaacacacagauuuau

SEQ ID NO: 248357 - RNA, 19 nt, Respiratory syncytial virus
gauaacaacaauaaucucu

SEQ ID NO: 248358 - RNA, 20 nt, Respiratory syncytial virus
gauauagaaguaaccaaaga

SEQ ID NO: 248359 - RNA, 21 nt, Respiratory syncytial virus
gagacaucauaacacacagau

SEQ ID NO: 248360 - RNA, 16 nt, Respiratory syncytial virus
gagauaguauugauac

SEQ ID NO: 248361 - RNA, 19 nt, Respiratory syncytial virus
aacaaaccaacucacccau

SEQ ID NO: 248362 - RNA, 20 nt, Respiratory syncytial virus
aacaaauauccacacccaau

SEQ ID NO: 248363 - RNA, 20 nt, Respiratory syncytial virus
gaacuggggcaaauauguca

SEQ ID NO: 248364 - RNA, 15 nt, Respiratory syncytial virus
gaaauaacaacuuca

SEQ ID NO: 248365 - RNA, 22 nt, Respiratory syncytial virus
gaaauaacaacuucaugcauaa

SEQ ID NO: 248366 - RNA, 16 nt, Respiratory syncytial virus
gaaggcuccacauaca

SEQ ID NO: 248367 - RNA, 21 nt, Respiratory syncytial virus
gaacuucaucgaaacucucau

SEQ ID NO: 248368 - RNA, 22 nt, Respiratory syncytial virus
gaagacccuacgccaagugaua

SEQ ID NO: 248369 - RNA, 19 nt, Respiratory syncytial virus
gaagaauuuuaucaaacaa

SEQ ID NO: 248370 - RNA, 14 nt, Respiratory syncytial virus
aaagaacuagcuaa

SEQ ID NO: 248371 - RNA, 13 nt, Respiratory syncytial virus
aaagaucccaaga

SEQ ID NO: 248372 - RNA, 22 nt, Respiratory syncytial virus
aaagauaguaucauaucuguca

SEQ ID NO: 248373 - RNA, 23 nt, Respiratory syncytial virus
aaacccaucuggagccucagauc

SEQ ID NO: 248374 - RNA, 15 nt, Respiratory syncytial virus
aaaccaucucacuua

SEQ ID NO: 248375 - RNA, 23 nt, Respiratory syncytial virus
gaauuagauaaauauaaaagugc

SEQ ID NO: 248376 - RNA, 16 nt, Respiratory syncytial virus
gaaucuagcuauucau

SEQ ID NO: 248377 - RNA, 21 nt, Respiratory syncytial virus
gaaaauacauccauaacaaua

SEQ ID NO: 248378 - RNA, 21 nt, Respiratory syncytial virus
gaaacauuugauaacaaugaa

SEQ ID NO: 248379 - RNA, 18 nt, Respiratory syncytial virus
gaaagcccuauaacauca

SEQ ID NO: 248380 - RNA, 21 nt, Respiratory syncytial virus
cuuuucaaaacuauacaaaga

SEQ ID NO: 248381 - RNA, 23 nt, Respiratory syncytial virus
cagaauugcaguugcucaugcaa

SEQ ID NO: 248382 - RNA, 16 nt, Respiratory syncytial virus
caguugcucaugcaaa

SEQ ID NO: 248383 - RNA, 17 nt, Respiratory syncytial virus
cauacuagugaaacaaa

SEQ ID NO: 248384 - RNA, 19 nt, Respiratory syncytial virus
cauacuagugaaacaaaua

SEQ ID NO: 248385 - RNA, 15 nt, Respiratory syncytial virus
cauaagaugaaagau

SEQ ID NO: 248386 - RNA, 20 nt, Respiratory syncytial virus
cauaacaauagaauucucaa

SEQ ID NO: 248387 - RNA, 21 nt, Respiratory syncytial virus
cauagccucggcaaaccacaa

SEQ ID NO: 248388 - RNA, 13 nt, Respiratory syncytial virus
cauagacaaguca

SEQ ID NO: 248389 - RNA, 22 nt, Respiratory syncytial virus
cauaucugucaacucaauagau

SEQ ID NO: 248390 - RNA, 14 nt, Respiratory syncytial virus
caucuauacgccaa

SEQ ID NO: 248391 - RNA, 19 nt, Respiratory syncytial virus
caucuauuauucauaucau

SEQ ID NO: 248392 - RNA, 17 nt, Respiratory syncytial virus
cauguuauuaaucacag

SEQ ID NO: 248393 - RNA, 23 nt, Respiratory syncytial virus
cauuaaaaagcguauuauugcaa

SEQ ID NO: 248394 - RNA, 15 nt, Respiratory syncytial virus
cauuauaaacccaac

SEQ ID NO: 248395 - RNA, 14 nt, Respiratory syncytial virus
ccaauuaucaaaga

SEQ ID NO: 248396 - RNA, 16 nt, Respiratory syncytial virus
ccaaucauccaugcca

SEQ ID NO: 248397 - RNA, 23 nt, Respiratory syncytial virus
ccauucuggcaaugauaaucuca

SEQ ID NO: 248398 - RNA, 13 nt, Respiratory syncytial virus
ccauccaaccaaa

SEQ ID NO: 248399 - RNA, 14 nt, Respiratory syncytial virus
ccaucauauucaua

SEQ ID NO: 248400 - RNA, 19 nt, Respiratory syncytial virus
ccaucauccauauuauaaa

SEQ ID NO: 248401 - RNA, 22 nt, Respiratory syncytial virus
ccagagacaucauaacacacag

SEQ ID NO: 248402 - RNA, 23 nt, Respiratory syncytial virus
ccagagacaucauaacacacaga

SEQ ID NO: 248403 - RNA, 20 nt, Respiratory syncytial virus
cccuauaacaucaaauucaa

SEQ ID NO: 248404 - RNA, 13 nt, Respiratory syncytial virus
cccauccaaccaa

SEQ ID NO: 248405 - RNA, 15 nt, Respiratory syncytial virus
ccugcaucacuuaca

SEQ ID NO: 248406 - RNA, 16 nt, Respiratory syncytial virus
ccugcaucacuuacaa

SEQ ID NO: 248407 - RNA, 19 nt, Respiratory syncytial virus
ccugcaucacuuacaauau

SEQ ID NO: 248408 - RNA, 18 nt, Respiratory syncytial virus
cuguacaucaacacacaa

SEQ ID NO: 248409 - RNA, 17 nt, Respiratory syncytial virus
cuccacauacacagcug

SEQ ID NO: 248410 - RNA, 19 nt, Respiratory syncytial virus
cucauagacaacccaucua

SEQ ID NO: 248411 - RNA, 17 nt, Respiratory syncytial virus
cucaccaugcaagccau

SEQ ID NO: 248412 - RNA, 22 nt, Respiratory syncytial virus
cucaagacuugauugaugcaau

SEQ ID NO: 248413 - RNA, 15 nt, Respiratory syncytial virus
cucaagaagugcagu

SEQ ID NO: 248414 - RNA, 14 nt, Respiratory syncytial virus
cuauugcacaaagu

SEQ ID NO: 248415 - RNA, 15 nt, Respiratory syncytial virus
cuauuauucauauca

SEQ ID NO: 248416 - RNA, 16 nt, Respiratory syncytial virus
cuauguauaaucaaaa

SEQ ID NO: 248417 - RNA, 16 nt, Respiratory syncytial virus
cucggcaaaccacaaa

SEQ ID NO: 248418 - RNA, 20 nt, Respiratory syncytial virus
cucggcaaaccacaaaguca

SEQ ID NO: 248419 - RNA, 12 nt, Respiratory syncytial virus
cucucaaucauc

SEQ ID NO: 248420 - RNA, 21 nt, Respiratory syncytial virus
cuacauucuucacuucaccau

SEQ ID NO: 248421 - RNA, 20 nt, Respiratory syncytial virus
cuaagauauuaagacuaaca

SEQ ID NO: 248422 - RNA, 18 nt, Respiratory syncytial virus
cguauuauugcaaaaagc

SEQ ID NO: 248423 - RNA, 15 nt, Respiratory syncytial virus
cgccaggcaaaauca

SEQ ID NO: 248424 - RNA, 20 nt, Respiratory syncytial virus
cgccaaucagccaauccaaa

SEQ ID NO: 248425 - RNA, 23 nt, Respiratory syncytial virus
cgcaauccuugcugcagucacac

SEQ ID NO: 248426 - RNA, 18 nt, Respiratory syncytial virus
aaaccacaucaacaucuc

SEQ ID NO: 248427 - RNA, 23 nt, Respiratory syncytial virus
aaacauacgugaacaaacuucac

SEQ ID NO: 248428 - RNA, 17 nt, Respiratory syncytial virus
auggggcaaauaaucau

SEQ ID NO: 248429 - RNA, 13 nt, Respiratory syncytial virus
auggcacaaaaca

SEQ ID NO: 248430 - RNA, 14 nt, Respiratory syncytial virus
auguauaaucaaaa

SEQ ID NO: 248431 - RNA, 23 nt, Respiratory syncytial virus
auuaaaaagcguauuauugcaaa

SEQ ID NO: 248432 - RNA, 22 nt, Respiratory syncytial virus
auuaaaaauaaucauaacaaug

SEQ ID NO: 248433 - RNA, 15 nt, Respiratory syncytial virus
auuaaguaauaucaa

SEQ ID NO: 248434 - RNA, 14 nt, Respiratory syncytial virus
auuaacucaaacaa

SEQ ID NO: 248435 - RNA, 16 nt, Respiratory syncytial virus
auuaagacuaacaaua

SEQ ID NO: 248436 - RNA, 18 nt, Respiratory syncytial virus
auguccaaaaacaaggac

SEQ ID NO: 248437 - RNA, 17 nt, Respiratory syncytial virus
auguuccaaucauccau

SEQ ID NO: 248438 - RNA, 16 nt, Respiratory syncytial virus
auuggaggaaauccaa

SEQ ID NO: 248439 - RNA, 13 nt, Respiratory syncytial virus
auugcagccauca

SEQ ID NO: 248440 - RNA, 20 nt, Respiratory syncytial virus
auugcaguugcucaugcaaa

SEQ ID NO: 248441 - RNA, 15 nt, Respiratory syncytial virus
auugauaaaacaaga

SEQ ID NO: 248442 - RNA, 22 nt, Respiratory syncytial virus
auuacugaugauauauacacaa

SEQ ID NO: 248443 - RNA, 12 nt, Respiratory syncytial virus
caaaacaaccaa

SEQ ID NO: 248444 - RNA, 22 nt, Respiratory syncytial virus
caaaacaaccaaaauaaccaua

SEQ ID NO: 248445 - RNA, 16 nt, Respiratory syncytial virus
caaaacaaaugcaauu

SEQ ID NO: 248446 - RNA, 16 nt, Respiratory syncytial virus
auuuucuacaacaucu

SEQ ID NO: 248447 - RNA, 14 nt, Respiratory syncytial virus
caauaaagggcaaa

SEQ ID NO: 248448 - RNA, 19 nt, Respiratory syncytial virus
caauaaagggcaaauucac

SEQ ID NO: 248449 - RNA, 24 nt, Respiratory syncytial virus
caauaugggugcccauguuccaau

SEQ ID NO: 248450 - RNA, 15 nt, Respiratory syncytial virus
caaucauccaugcca

SEQ ID NO: 248451 - RNA, 22 nt, Respiratory syncytial virus
caaucaucuauuauucauauca

SEQ ID NO: 248452 - RNA, 17 nt, Respiratory syncytial virus
caauccuugcugcaguc

SEQ ID NO: 248453 - RNA, 23 nt, Respiratory syncytial virus
caauccuaaugcuuaccacauca

SEQ ID NO: 248454 - RNA, 13 nt, Respiratory syncytial virus
caaauuccuagaa

SEQ ID NO: 248455 - RNA, 13 nt, Respiratory syncytial virus
caaaauauggcac

SEQ ID NO: 248456 - RNA, 13 nt, Respiratory syncytial virus
caaaauaaccaua

SEQ ID NO: 248457 - RNA, 15 nt, Respiratory syncytial virus
caacccaucuaucau

SEQ ID NO: 248458 - RNA, 21 nt, Respiratory syncytial virus
caacccaucuaucauuggauu

SEQ ID NO: 248459 - RNA, 14 nt, Respiratory syncytial virus
caacuucacuuaua

SEQ ID NO: 248460 - RNA, 14 nt, Respiratory syncytial virus
caacuaugaaauga

SEQ ID NO: 248461 - RNA, 15 nt, Respiratory syncytial virus
cagaaacacaucaau

SEQ ID NO: 248462 - RNA, 18 nt, Respiratory syncytial virus
cacugcuuguaagacaaa

SEQ ID NO: 248463 - RNA, 14 nt, Respiratory syncytial virus
caccucuuuacaaa

SEQ ID NO: 248464 - RNA, 19 nt, Respiratory syncytial virus
cacgaaggcuccacauaca

SEQ ID NO: 248465 - RNA, 19 nt, Respiratory syncytial virus
cacugaagaauuuuaucaa

SEQ ID NO: 248466 - RNA, 21 nt, Respiratory syncytial virus
cacuaauacacaugauaacaa

SEQ ID NO: 248467 - RNA, 23 nt, Respiratory syncytial virus
cacuaauacacaugauaacaaca

SEQ ID NO: 248468 - RNA, 19 nt, Respiratory syncytial virus
cacacuauauuucaaucaa

SEQ ID NO: 248469 - RNA, 18 nt, Respiratory syncytial virus
caaugguuucauaucugc

SEQ ID NO: 248470 - RNA, 15 nt, Respiratory syncytial virus
caaugauaaucucaa

SEQ ID NO: 248471 - RNA, 13 nt, Respiratory syncytial virus
caaugauaaucuc

SEQ ID NO: 248472 - RNA, 19 nt, Respiratory syncytial virus
caaugacaccacaccacaa

SEQ ID NO: 248473 - RNA, 22 nt, Respiratory syncytial virus
caaugacaccacaccacaaaga

SEQ ID NO: 248474 - RNA, 14 nt, Respiratory syncytial virus
caaugaaauccauu

SEQ ID NO: 248475 - RNA, 16 nt, Respiratory syncytial virus
cacaucaacaucucac

SEQ ID NO: 248476 - RNA, 15 nt, Respiratory syncytial virus
cacaucaccuaaaga

SEQ ID NO: 248477 - RNA, 18 nt, Respiratory syncytial virus
cacccauccaaccaaaca

SEQ ID NO: 248478 - RNA, 14 nt, Respiratory syncytial virus
agggcaaauucaca

SEQ ID NO: 248479 - RNA, 16 nt, Respiratory syncytial virus
aguaaguuucaaagaa

SEQ ID NO: 248480 - RNA, 17 nt, Respiratory syncytial virus
agguauguuauaugcua

SEQ ID NO: 248481 - RNA, 17 nt, Respiratory syncytial virus
agucauuguucaucaga

SEQ ID NO: 248482 - RNA, 22 nt, Respiratory syncytial virus
agcccuauaacaucaaauucaa

SEQ ID NO: 248483 - RNA, 21 nt, Respiratory syncytial virus
agaugauacuguagggaacaa

SEQ ID NO: 248484 - RNA, 13 nt, Respiratory syncytial virus
agccaauccaaaa

SEQ ID NO: 248485 - RNA, 18 nt, Respiratory syncytial virus
agcuauucauaugaagaa

SEQ ID NO: 248486 - RNA, 16 nt, Respiratory syncytial virus
agcuaccaaauuccua

SEQ ID NO: 248487 - RNA, 13 nt, Respiratory syncytial virus
auagcacaaauca

SEQ ID NO: 248488 - RNA, 11 nt, Respiratory syncytial virus
auagcacaaau

SEQ ID NO: 248489 - RNA, 13 nt, Respiratory syncytial virus
auauuucaaucaa

SEQ ID NO: 248490 - RNA, 22 nt, Respiratory syncytial virus
aucaaacaacaugcagugcagu

SEQ ID NO: 248491 - RNA, 21 nt, Respiratory syncytial virus
aucaaggaaaauaaguguaau

SEQ ID NO: 248492 - RNA, 12 nt, Respiratory syncytial virus
aucaacaucuca

SEQ ID NO: 248493 - RNA, 19 nt, Respiratory syncytial virus
aucaacaucucaccaugca

SEQ ID NO: 248494 - RNA, 15 nt, Respiratory syncytial virus
aucauaacacacaga

SEQ ID NO: 248495 - RNA, 18 nt, Respiratory syncytial virus
aucucuuugcuaaucaua

SEQ ID NO: 248496 - RNA, 22 nt, Respiratory syncytial virus
aucugaacuucaucgaaacucu

SEQ ID NO: 248497 - RNA, 15 nt, Respiratory syncytial virus
aucugauggcacaaa

SEQ ID NO: 248498 - RNA, 21 nt, Respiratory syncytial virus
aucuccaucaugauugcaaua

SEQ ID NO: 248499 - RNA, 19 nt, Respiratory syncytial virus
aucucaccaugcaagccau

SEQ ID NO: 248500 - RNA, 17 nt, Respiratory syncytial virus
aucuauuauucauauca

SEQ ID NO: 248501 - RNA, 14 nt, Respiratory syncytial virus
aucuauagcacaaa

SEQ ID NO: 248502 - RNA, 15 nt, Respiratory syncytial virus
aucuauagcacaaau

SEQ ID NO: 248503 - RNA, 20 nt, Respiratory syncytial virus
aucuauagcacaaaucacau

SEQ ID NO: 248504 - RNA, 13 nt, Respiratory syncytial virus
auccaaccaaaca

SEQ ID NO: 248505 - RNA, 16 nt, Respiratory syncytial virus
auccucaaaacaaaug

SEQ ID NO: 248506 - RNA, 22 nt, Respiratory syncytial virus
auaauugcagccaucauauuca

SEQ ID NO: 248507 - RNA, 20 nt, Respiratory syncytial virus
auaauuuuuuaauaacuuuu

SEQ ID NO: 248508 - RNA, 20 nt, Respiratory syncytial virus
auaacuuuuagugaacuaau

SEQ ID NO: 248509 - RNA, 21 nt, Respiratory syncytial virus
auacuguagggaacaagccca

SEQ ID NO: 248510 - RNA, 14 nt, Respiratory syncytial virus
auacuaguguuaua

SEQ ID NO: 248511 - RNA, 13 nt, Respiratory syncytial virus
auacuaauaacaa

SEQ ID NO: 248512 - RNA, 16 nt, Respiratory syncytial virus
auagaaguaaccaaag

SEQ ID NO: 248513 - RNA, 17 nt, Respiratory syncytial virus
auagacaacccaucuau

SEQ ID NO: 248514 - RNA, 21 nt, Respiratory syncytial virus
auagauauagaaguaaccaaa

SEQ ID NO: 248515 - RNA, 16 nt, Respiratory syncytial virus
auaccagauuaacuua

SEQ ID NO: 248516 - RNA, 13 nt, Respiratory syncytial virus
auacauccauaac

SEQ ID NO: 248517 - RNA, 21 nt, Respiratory syncytial virus
auacacaugauaacaacaaua

SEQ ID NO: 248518 - RNA, 16 nt, Respiratory syncytial virus
acuauguauaaucaaa

SEQ ID NO: 248519 - RNA, 14 nt, Respiratory syncytial virus
acucaccgaaucaa

SEQ ID NO: 248520 - RNA, 14 nt, Respiratory syncytial virus
acuagugaaacaaa

SEQ ID NO: 248521 - RNA, 13 nt, Respiratory syncytial virus
agaaaaccucuag

SEQ ID NO: 248522 - RNA, 24 nt, Respiratory syncytial virus
agaaaagaccugggacacucucaa

SEQ ID NO: 248523 - RNA, 21 nt, Respiratory syncytial virus
acuuauaauugcagccaucau

SEQ ID NO: 248524 - RNA, 22 nt, Respiratory syncytial virus
agaaguaaccaaagaaagcccu

SEQ ID NO: 248525 - RNA, 18 nt, Respiratory syncytial virus
agaauuaaguaauaucaa

SEQ ID NO: 248526 - RNA, 17 nt, Respiratory syncytial virus
agaccauugucacuuga

SEQ ID NO: 248527 - RNA, 17 nt, Respiratory syncytial virus
acaccacaccacaaaga

SEQ ID NO: 248528 - RNA, 14 nt, Respiratory syncytial virus
acaaauauccacac

SEQ ID NO: 248529 - RNA, 22 nt, Respiratory syncytial virus
acaaauauccacacccaaugga

SEQ ID NO: 248530 - RNA, 14 nt, Respiratory syncytial virus
acaacacacaauga

SEQ ID NO: 248531 - RNA, 14 nt, Respiratory syncytial virus
acaacaauaaucuc

SEQ ID NO: 248532 - RNA, 23 nt, Respiratory syncytial virus
acagaagaccaacaaacaaacca

SEQ ID NO: 248533 - RNA, 16 nt, Respiratory syncytial virus
acagaagaugcuaauc

SEQ ID NO: 248534 - RNA, 20 nt, Respiratory syncytial virus
acagauuuauauacuugaua

SEQ ID NO: 248535 - RNA, 12 nt, Respiratory syncytial virus
acaucucaccau

SEQ ID NO: 248536 - RNA, 15 nt, Respiratory syncytial virus
acauacgugaacaaa

SEQ ID NO: 248537 - RNA, 19 nt, Respiratory syncytial virus
acauuauccauucuggcaa

SEQ ID NO: 248538 - RNA, 15 nt, Respiratory syncytial virus
accacaccacaaaga

SEQ ID NO: 248539 - RNA, 18 nt, Respiratory syncytial virus
accacaucaacaucucac

SEQ ID NO: 248540 - RNA, 14 nt, Respiratory syncytial virus
accaucauaaucac

SEQ ID NO: 248541 - RNA, 18 nt, Respiratory syncytial virus
accuaaagaucccaagaa

SEQ ID NO: 248542 - RNA, 17 nt, Respiratory syncytial virus
accugggacacucucaa

SEQ ID NO: 248543 - RNA, 20 nt, Respiratory syncytial virus
aauacacaugauaacaacaa

SEQ ID NO: 248544 - RNA, 14 nt, Respiratory syncytial virus
aaguugaaugauac

SEQ ID NO: 248545 - RNA, 19 nt, Respiratory syncytial virus
aaguugaaugauacacuca

SEQ ID NO: 248546 - RNA, 21 nt, Respiratory syncytial virus
aagugaacaacccucaccucu

SEQ ID NO: 248547 - RNA, 19 nt, Respiratory syncytial virus
aagccaucauccauauuau

SEQ ID NO: 248548 - RNA, 18 nt, Respiratory syncytial virus
aagcccaauuaucaaaga

SEQ ID NO: 248549 - RNA, 21 nt, Respiratory syncytial virus
aagaauuuuaucaaacaacau

SEQ ID NO: 248550 - RNA, 15 nt, Respiratory syncytial virus
aagacaaaacuuuau

SEQ ID NO: 248551 - RNA, 13 nt, Respiratory syncytial virus
aagaagacccuac

SEQ ID NO: 248552 - RNA, 20 nt, Respiratory syncytial virus
aauugcagccaucauauuca

SEQ ID NO: 248553 - RNA, 22 nt, Respiratory syncytial virus
acaaaaccacaucaacaucuca

SEQ ID NO: 248554 - RNA, 18 nt, Respiratory syncytial virus
acaaaacaguaaccuugc

SEQ ID NO: 248555 - RNA, 14 nt, Respiratory syncytial virus
aaucucaacuucac

SEQ ID NO: 248556 - RNA, 17 nt, Respiratory syncytial virus
aaugauaaucucaacuu

SEQ ID NO: 248557 - RNA, 14 nt, Respiratory syncytial virus
aaugauacacucaa

SEQ ID NO: 248558 - RNA, 21 nt, Respiratory syncytial virus
aacuaaucaaacaaaacccau

SEQ ID NO: 248559 - RNA, 14 nt, Respiratory syncytial virus
aaccaucucacuua

SEQ ID NO: 248560 - RNA, 15 nt, Respiratory syncytial virus
aaccauauauacuca

SEQ ID NO: 248561 - RNA, 18 nt, Respiratory syncytial virus
aaccucuaguaaguuuca

SEQ ID NO: 248562 - RNA, 22 nt, Respiratory syncytial virus
aacaucucaccaugcaagccau

SEQ ID NO: 248563 - RNA, 16 nt, Respiratory syncytial virus
aacaucuauacgccaa

SEQ ID NO: 248564 - RNA, 17 nt, Respiratory syncytial virus
aaccaaagaaagcccua

SEQ ID NO: 248565 - RNA, 16 nt, Respiratory syncytial virus
aaccaaaauaaccaua

SEQ ID NO: 248566 - RNA, 21 nt, Respiratory syncytial virus
aacauuugauaacaaugaaga

SEQ ID NO: 248567 - RNA, 14 nt, Respiratory syncytial virus
aaauuuaaauccaa

SEQ ID NO: 248568 - RNA, 18 nt, Respiratory syncytial virus
aaauuuaaauccaaaucu

SEQ ID NO: 248569 - RNA, 19 nt, Respiratory syncytial virus
aacaaaugagacagaugau

SEQ ID NO: 248570 - RNA, 20 nt, Respiratory syncytial virus
aacaaaugagacagaugaua

SEQ ID NO: 248571 - RNA, 18 nt, Respiratory syncytial virus
aaagcaucgauacuuuau

SEQ ID NO: 248572 - RNA, 14 nt, Respiratory syncytial virus
aaauagauacuaua

SEQ ID NO: 248573 - RNA, 18 nt, Respiratory syncytial virus
aaauagauacuauaguua

SEQ ID NO: 248574 - RNA, 13 nt, Respiratory syncytial virus
aaauacaccaucc

SEQ ID NO: 248575 - RNA, 14 nt, Respiratory syncytial virus
aaauucccauagcu

SEQ ID NO: 248576 - RNA, 12 nt, Respiratory syncytial virus
aaauucacauca

SEQ ID NO: 248577 - RNA, 15 nt, Respiratory syncytial virus
aaaugcaaacauguc

SEQ ID NO: 248578 - RNA, 23 nt, Respiratory syncytial virus
aaauauacugaauacaacacaaa

SEQ ID NO: 248579 - RNA, 19 nt, Respiratory syncytial virus
aaaagaccugggacacucu

SEQ ID NO: 248580 - RNA, 20 nt, Respiratory syncytial virus
aaaauggaucccauuauuaa

SEQ ID NO: 248581 - RNA, 20 nt, Respiratory syncytial virus
aaagaccugggacacucuca

SEQ ID NO: 248582 - RNA, 21 nt, Respiratory syncytial virus
aaagaccugggacacucucaa

SEQ ID NO: 248583 - RNA, 19 nt, Respiratory syncytial virus
aaagcacaccggcaaccaa

SEQ ID NO: 248584 - RNA, 21 nt, Respiratory syncytial virus
aaagcacaccggcaaccaaca

SEQ ID NO: 248585 - RNA, 21 nt, Respiratory syncytial virus
aaaaauaaucauaacaaugaa

SEQ ID NO: 248586 - RNA, 17 nt, Respiratory syncytial virus
aaaaauaaucauaacaa

SEQ ID NO: 248587 - RNA, 13 nt, Respiratory syncytial virus
aaaacaauugaau

SEQ ID NO: 248588 - RNA, 18 nt, Respiratory syncytial virus
aaaacaaggaccaacgca

SEQ ID NO: 248589 - RNA, 14 nt, Respiratory syncytial virus
aaaacaaaugcaau

SEQ ID NO: 248590 - RNA, 22 nt, Respiratory syncytial virus
aaaagaccugggacacucucaa

SEQ ID NO: 248591 - RNA, 14 nt, Respiratory syncytial virus
aaaauaaucauaac

SEQ ID NO: 248592 - RNA, 16 nt, Respiratory syncytial virus
aaaauaaucauaacaa

SEQ ID NO: 248593 - RNA, 12 nt, Respiratory syncytial virus
aaaauaaccaua

SEQ ID NO: 248594 - RNA, 21 nt, Respiratory syncytial virus
aaaauaaccauauauacucac

SEQ ID NO: 248595 - RNA, 14 nt, Respiratory syncytial virus
aaaagaacuagcua

SEQ ID NO: 248596 - RNA, 15 nt, Respiratory syncytial virus
aaaacuauacaaaga

SEQ ID NO: 248597 - RNA, 14 nt, Homo sapiens
cagaaaacaaaaaa

SEQ ID NO: 248598 - RNA, 21 nt, Homo sapiens
aucuuucaggacucuaccuca

SEQ ID NO: 248599 - RNA, 22 nt, Homo sapiens
agcagaaaucuagaagacuguc

SEQ ID NO: 248600 - RNA, 15 nt, Homo sapiens
acaauccaucucuca

SEQ ID NO: 248601 - RNA, 19 nt, Homo sapiens
aaccccaucucuacugaaa

SEQ ID NO: 248602 - RNA, 16 nt, Homo sapiens
aagcaauaaccucaaa

SEQ ID NO: 248603 - RNA, 20 nt, Homo sapiens
ugaaaccccaucucuacuga

SEQ ID NO: 248604 - RNA, 18 nt, Homo sapiens
agaaaucuagaagacugu

SEQ ID NO: 248605 - RNA, 18 nt, Homo sapiens
agcagccacaaccaaaaa

SEQ ID NO: 248606 - RNA, 13 nt, Homo sapiens
accucuaugcaau

SEQ ID NO: 248607 - RNA, 16 nt, Homo sapiens
ccuuguaaagacugua

SEQ ID NO: 248608 - RNA, 14 nt, Homo sapiens
aaccucuaugcaau

SEQ ID NO: 248609 - RNA, 14 nt, Homo sapiens
guuggcacaugccu

SEQ ID NO: 248610 - RNA, 13 nt, Homo sapiens
cccagcuacuuga

SEQ ID NO: 248611 - RNA, 14 nt, Homo sapiens
aaaguacaaaaauu

SEQ ID NO: 248612 - RNA, 16 nt, Homo sapiens
cacgagaucaagagau

SEQ ID NO: 248613 - RNA, 18 nt, Homo sapiens
cucaaagugacuauucag

SEQ ID NO: 248614 - RNA, 14 nt, Homo sapiens
cuuguaaagacugu

SEQ ID NO: 248615 - RNA, 19 nt, Homo sapiens
aagaggcaccacuaaaaga

SEQ ID NO: 248616 - RNA, 19 nt, Homo sapiens
gagcagccacaaccaaaaa

SEQ ID NO: 248617 - RNA, 20 nt, Homo sapiens
uguagaagaaagagcaacaa

SEQ ID NO: 248618 - RNA, 19 nt, Homo sapiens
aaaacuucaguaaguacgu

SEQ ID NO: 248619 - RNA, 15 nt, Homo sapiens
ggacaacauccuuaa

SEQ ID NO: 248620 - RNA, 16 nt, Homo sapiens
caaagugacuauucag

SEQ ID NO: 248621 - RNA, 20 nt, Homo sapiens
acucacuuaucccaagagaa

SEQ ID NO: 248622 - RNA, 19 nt, Homo sapiens
acuccuuguaaagacugua

SEQ ID NO: 248623 - RNA, 16 nt, Homo sapiens
ugucagcuuccaaaca

SEQ ID NO: 248624 - RNA, 20 nt, Homo sapiens
cgagacuugguuucaaaaaa

SEQ ID NO: 248625 - RNA, 22 nt, Homo sapiens
agagcaacaauccaucucucaa

SEQ ID NO: 248626 - RNA, 17 nt, Homo sapiens
caacaauccaucucuca

SEQ ID NO: 248627 - RNA, 20 nt, Homo sapiens
acacuaugaagauguuucaa

SEQ ID NO: 248628 - RNA, 13 nt, Homo sapiens
uagcagaaaucua

SEQ ID NO: 248629 - RNA, 15 nt, Homo sapiens
agccacaaccaaaaa

SEQ ID NO: 248630 - RNA, 12 nt, Homo sapiens
cacgagaucaag

SEQ ID NO: 248631 - RNA, 13 nt, Homo sapiens
aguaaguacgugu

SEQ ID NO: 248632 - RNA, 18 nt, Homo sapiens
ccaaaacaaacaaacaga

SEQ ID NO: 248633 - RNA, 11 nt, Homo sapiens
ugaaagaucuu

SEQ ID NO: 248634 - RNA, 16 nt, Homo sapiens
gcugaggcaagagaau

SEQ ID NO: 248635 - RNA, 19 nt, Homo sapiens
caaaaaaaccucuaugcaa

SEQ ID NO: 248636 - RNA, 14 nt, Homo sapiens
gagcgagacuuggu

SEQ ID NO: 248637 - RNA, 18 nt, Homo sapiens
uguuucaaaaaaucugac

SEQ ID NO: 248638 - RNA, 16 nt, Homo sapiens
gcagccacaaccaaaa

SEQ ID NO: 248639 - RNA, 16 nt, Homo sapiens
acaaaaaaaccucuau

SEQ ID NO: 248640 - RNA, 21 nt, Homo sapiens
gagaucaugccacuacacucc

SEQ ID NO: 248641 - RNA, 16 nt, Homo sapiens
cagccacaaccaaaaa

SEQ ID NO: 248642 - RNA, 14 nt, Homo sapiens
cagcuuccaaacau

SEQ ID NO: 248643 - RNA, 15 nt, Homo sapiens
aaaaccucuaugcaa

SEQ ID NO: 248644 - RNA, 15 nt, Homo sapiens
aaacauuaaugcaau

SEQ ID NO: 248645 - RNA, 15 nt, Homo sapiens
ggcucacaccuguaa

SEQ ID NO: 248646 - RNA, 15 nt, Homo sapiens
augauacacuaugaa

SEQ ID NO: 248647 - RNA, 20 nt, Homo sapiens
uagucccagcuacuugagag

SEQ ID NO: 248648 - RNA, 17 nt, Homo sapiens
ccuuaagucaaaagaga

SEQ ID NO: 248649 - RNA, 18 nt, Homo sapiens
aagauguuucaaaaaauc

SEQ ID NO: 248650 - RNA, 20 nt, Homo sapiens
ccuggaaagaaaaagcaaua

SEQ ID NO: 248651 - RNA, 14 nt, Homo sapiens
aaagugacuauuca

SEQ ID NO: 248652 - RNA, 16 nt, Homo sapiens
ccauagugaccaacau

SEQ ID NO: 248653 - RNA, 19 nt, Homo sapiens
gcagccacaaccaaaaaau

SEQ ID NO: 248654 - RNA, 23 nt, Homo sapiens
ugaagauguuucaaaaaaucuga

SEQ ID NO: 248655 - RNA, 19 nt, Homo sapiens
acaacauccuuaagucaaa

SEQ ID NO: 248656 - RNA, 16 nt, Homo sapiens
agcagccacaaccaaa

SEQ ID NO: 248657 - RNA, 18 nt, Homo sapiens
agugaaaccccaucucua

SEQ ID NO: 248658 - RNA, 21 nt, Homo sapiens
aaagaucuuucaggacucuac

SEQ ID NO: 248659 - RNA, 16 nt, Homo sapiens
agucaaaagagagaag

SEQ ID NO: 248660 - RNA, 12 nt, Homo sapiens
cacaaccaaaaa

SEQ ID NO: 248661 - RNA, 16 nt, Homo sapiens
agucccagcuacuuga

SEQ ID NO: 248662 - RNA, 14 nt, Homo sapiens
aaaccucuaugcaa

SEQ ID NO: 248663 - RNA, 23 nt, Homo sapiens
aaagugacucacuuaucccaaga

SEQ ID NO: 248664 - RNA, 17 nt, Homo sapiens
aaaucuagaagacuguc

SEQ ID NO: 248665 - RNA, 20 nt, Homo sapiens
uacuugagaggcugaggcaa

SEQ ID NO: 248666 - RNA, 18 nt, Homo sapiens
gaaaucuagaagacuguc

SEQ ID NO: 248667 - RNA, 18 nt, Homo sapiens
uccaaacauuaaugcaau

SEQ ID NO: 248668 - RNA, 16 nt, Homo sapiens
aaaaccucuaugcaau

SEQ ID NO: 248669 - RNA, 15 nt, Homo sapiens
uacaacacacacugu

SEQ ID NO: 248670 - RNA, 16 nt, Homo sapiens
acaauccaucucucaa

SEQ ID NO: 248671 - RNA, 16 nt, Homo sapiens
aaaucuagaagacugu

SEQ ID NO: 248672 - RNA, 21 nt, Homo sapiens
aaagagcaacaauccaucucu

SEQ ID NO: 248673 - RNA, 20 nt, Homo sapiens
cuacuccuuguaaagacugu

SEQ ID NO: 248674 - RNA, 16 nt, Homo sapiens
aaaacuucaguaagua

SEQ ID NO: 248675 - RNA, 14 nt, Homo sapiens
cuagcagaaaucua

SEQ ID NO: 248676 - RNA, 16 nt, Homo sapiens
gaugauacacuaugaa

SEQ ID NO: 248677 - RNA, 16 nt, Homo sapiens
aaccucaaagugacua

SEQ ID NO: 248678 - RNA, 19 nt, Homo sapiens
gaaaucuagaagacuguca

SEQ ID NO: 248679 - RNA, 19 nt, Homo sapiens
guguggugagaucaugcca

SEQ ID NO: 248680 - RNA, 21 nt, Homo sapiens
aagagaaugaaauugcugaaa

SEQ ID NO: 248681 - RNA, 12 nt, Homo sapiens
aaaucuagaaga

SEQ ID NO: 248682 - RNA, 19 nt, Homo sapiens
uagagcagccacaaccaaa

SEQ ID NO: 248683 - RNA, 12 nt, Homo sapiens
auccaucucuca

SEQ ID NO: 248684 - RNA, 20 nt, Homo sapiens
gaagaaagagcaacaaucca

SEQ ID NO: 248685 - RNA, 20 nt, Homo sapiens
uguaaucccaacauuuuggg

SEQ ID NO: 248686 - RNA, 14 nt, Homo sapiens
ugauacacuaugaa

SEQ ID NO: 248687 - RNA, 14 nt, Homo sapiens
cuuucaggacucua

SEQ ID NO: 248688 - RNA, 16 nt, Homo sapiens
uucaggacucuaccuc

SEQ ID NO: 248689 - RNA, 16 nt, Homo sapiens
caacauccuuaaguca

SEQ ID NO: 248690 - RNA, 16 nt, Homo sapiens
guguuggcacaugccu

SEQ ID NO: 248691 - RNA, 17 nt, Homo sapiens
caaugguuaacaucuuc

SEQ ID NO: 248692 - RNA, 21 nt, Homo sapiens
agagcaacaauccaucucuca

SEQ ID NO: 248693 - RNA, 17 nt, Homo sapiens
aggcugaggcaagagaa

SEQ ID NO: 248694 - RNA, 17 nt, Homo sapiens
cacuuaucccaagagaa

SEQ ID NO: 248695 - RNA, 20 nt, Homo sapiens
ucuuucaggacucuaccuca

SEQ ID NO: 248696 - RNA, 13 nt, Homo sapiens
uaugcaaucugag

SEQ ID NO: 248697 - RNA, 14 nt, Homo sapiens
aacaauccaucucu

SEQ ID NO: 248698 - RNA, 15 nt, Homo sapiens
cccaucucuacugaa

SEQ ID NO: 248699 - RNA, 15 nt, Homo sapiens
ucuagaagacuguca

SEQ ID NO: 248700 - RNA, 17 nt, Homo sapiens
caugccuguagucccag

SEQ ID NO: 248701 - RNA, 15 nt, Homo sapiens
auacacuaugaagau

SEQ ID NO: 248702 - RNA, 20 nt, Homo sapiens
aaaauucuauuacaguaugu

SEQ ID NO: 248703 - RNA, 20 nt, Homo sapiens
acaaccaaaaaauucuacaa

SEQ ID NO: 248704 - RNA, 21 nt, Homo sapiens
uccagguuuccuuaagggaca

SEQ ID NO: 248705 - RNA, 13 nt, Homo sapiens
aucugaccaaaac

SEQ ID NO: 248706 - RNA, 18 nt, Homo sapiens
aucacgagaucaagagau

SEQ ID NO: 248707 - RNA, 15 nt, Homo sapiens
cuauucaguuuucag

SEQ ID NO: 248708 - RNA, 21 nt, Homo sapiens
aguacguguuauuuuuuucaa

SEQ ID NO: 248709 - RNA, 12 nt, Homo sapiens
uacacuaugaag

SEQ ID NO: 248710 - RNA, 17 nt, Homo sapiens
ucugucuuuauaaucua

SEQ ID NO: 248711 - RNA, 16 nt, Homo sapiens
agaucacgagaucaag

SEQ ID NO: 248712 - RNA, 21 nt, Homo sapiens
aaaauucuauuacaguauguc

SEQ ID NO: 248713 - RNA, 19 nt, Homo sapiens
cuccuuguaaagacuguag

SEQ ID NO: 248714 - RNA, 23 nt, Homo sapiens
ccgggaggcagagguugcagugu

SEQ ID NO: 248715 - RNA, 21 nt, Homo sapiens
aaagacuguagaagaaagagc

SEQ ID NO: 248716 - RNA, 14 nt, Homo sapiens
cuaugcaaucugag

SEQ ID NO: 248717 - RNA, 19 nt, Homo sapiens
ugucuuuauaaucuacucc

SEQ ID NO: 248718 - RNA, 16 nt, Homo sapiens
cacuaaaagaucgcag

SEQ ID NO: 248719 - RNA, 17 nt, Homo sapiens
ucuuuauaaucuacucc

SEQ ID NO: 248720 - RNA, 22 nt, Homo sapiens
accucauaucaguuugcuagca

SEQ ID NO: 248721 - RNA, 19 nt, Homo sapiens
cacacuguucugaaaguga

SEQ ID NO: 248722 - RNA, 17 nt, Homo sapiens
caaaaaaucugaccaaa

SEQ ID NO: 248723 - RNA, 13 nt, Homo sapiens
aagugacuauuca

SEQ ID NO: 248724 - RNA, 13 nt, Homo sapiens
gacuguagaagaa

SEQ ID NO: 248725 - RNA, 18 nt, Homo sapiens
uuugcuagcagaaaucua

SEQ ID NO: 248726 - RNA, 13 nt, Homo sapiens
auacacuaugaag

SEQ ID NO: 248727 - RNA, 17 nt, Homo sapiens
ccacaaccaaaaaauuc

SEQ ID NO: 248728 - RNA, 14 nt, Homo sapiens
cugaggcaagagaa

SEQ ID NO: 248729 - RNA, 20 nt, Homo sapiens
ucaaguaguguaucacagua

SEQ ID NO: 248730 - RNA, 22 nt, Homo sapiens
ucaguuugcuagcagaaaucua

SEQ ID NO: 248731 - RNA, 16 nt, Homo sapiens
agccuccagguuuccu

SEQ ID NO: 248732 - RNA, 15 nt, Homo sapiens
guucugaaagugacu

SEQ ID NO: 248733 - RNA, 13 nt, Homo sapiens
aagagcaacaauc

SEQ ID NO: 248734 - RNA, 22 nt, Homo sapiens
aucuacuccuuguaaagacugu

SEQ ID NO: 248735 - RNA, 23 nt, Homo sapiens
aaaaaccucuaugcaaucugagu

SEQ ID NO: 248736 - RNA, 20 nt, Homo sapiens
gaagauguuucaaaaaaucu

SEQ ID NO: 248737 - RNA, 23 nt, Homo sapiens
caguuuucaggaugauacacuau

SEQ ID NO: 248738 - RNA, 15 nt, Homo sapiens
cuuaucccaagagaa

SEQ ID NO: 248739 - RNA, 19 nt, Homo sapiens
aagacugucagcuuccaaa

SEQ ID NO: 248740 - RNA, 14 nt, Homo sapiens
gaccaaaacaaaca

SEQ ID NO: 248741 - RNA, 20 nt, Homo sapiens
acaaaaaaaccucuaugcaa

SEQ ID NO: 248742 - RNA, 18 nt, Homo sapiens
ucuuuauaaucuacuccu

SEQ ID NO: 248743 - RNA, 14 nt, Homo sapiens
ccaucucuacugaa

SEQ ID NO: 248744 - RNA, 20 nt, Homo sapiens
cugucuuuauaaucuacucc

SEQ ID NO: 248745 - RNA, 15 nt, Homo sapiens
aaagugacuauucag

SEQ ID NO: 248746 - RNA, 22 nt, Homo sapiens
cacacacuguucugaaagugac

SEQ ID NO: 248747 - RNA, 12 nt, Homo sapiens
aucccaagagaa

SEQ ID NO: 248748 - RNA, 16 nt, Homo sapiens
gaaagaaaaagcaaua

SEQ ID NO: 248749 - RNA, 15 nt, Homo sapiens
cuuguaaagacugua

SEQ ID NO: 248750 - RNA, 19 nt, Homo sapiens
gcaauaaccucaaagugac

SEQ ID NO: 248751 - RNA, 11 nt, Homo sapiens
gccacaaccaa

SEQ ID NO: 248752 - RNA, 20 nt, Homo sapiens
ucaggaugauacacuaugaa

SEQ ID NO: 248753 - RNA, 21 nt, Homo sapiens
uagagcagccacaaccaaaaa

SEQ ID NO: 248754 - RNA, 17 nt, Homo sapiens
ucaaagugacuauucag

SEQ ID NO: 248755 - RNA, 12 nt, Homo sapiens
aaaaaaucugac

SEQ ID NO: 248756 - RNA, 14 nt, Homo sapiens
uccuuaagggacaa

SEQ ID NO: 248757 - RNA, 13 nt, Homo sapiens
aaccucuaugcaa

SEQ ID NO: 248758 - RNA, 19 nt, Homo sapiens
aacacacacuguucugaaa

SEQ ID NO: 248759 - RNA, 12 nt, Homo sapiens
auaaucuacucc

SEQ ID NO: 248760 - RNA, 14 nt, Homo sapiens
cgagaucaagagau

SEQ ID NO: 248761 - RNA, 13 nt, Homo sapiens
agaaaucuagaag

SEQ ID NO: 248762 - RNA, 18 nt, Homo sapiens
aagacugucagcuuccaa

SEQ ID NO: 248763 - RNA, 24 nt, Homo sapiens
acaauccaucucucaaguagugua

SEQ ID NO: 248764 - RNA, 12 nt, Homo sapiens
aauucuauuaca

SEQ ID NO: 248765 - RNA, 19 nt, Homo sapiens
auagugaaaccccaucucu

SEQ ID NO: 248766 - RNA, 11 nt, Homo sapiens
cugaccaaaac

SEQ ID NO: 248767 - RNA, 13 nt, Homo sapiens
aaccucaaaguga

SEQ ID NO: 248768 - RNA, 22 nt, Homo sapiens
acacuguucugaaagugacuca

SEQ ID NO: 248769 - RNA, 16 nt, Homo sapiens
cugaaagaucuuucag

SEQ ID NO: 248770 - RNA, 21 nt, Homo sapiens
cagaaaucuagaagacuguca

SEQ ID NO: 248771 - RNA, 16 nt, Homo sapiens
acaaccaaaaaauucu

SEQ ID NO: 248772 - RNA, 13 nt, Homo sapiens
caacacacacugu

SEQ ID NO: 248773 - RNA, 15 nt, Homo sapiens
acaaacaaacagaaa

SEQ ID NO: 248774 - RNA, 17 nt, Homo sapiens
agcuggguguguuggca

SEQ ID NO: 248775 - RNA, 19 nt, Homo sapiens
ucaagaccauagugaccaa

SEQ ID NO: 248776 - RNA, 11 nt, Homo sapiens
aaagacuguag

SEQ ID NO: 248777 - RNA, 20 nt, Homo sapiens
ggcagagguugcaguguggu

SEQ ID NO: 248778 - RNA, 14 nt, Homo sapiens
acaaacaaacagaa

SEQ ID NO: 248779 - RNA, 20 nt, Homo sapiens
cugaccuggaaagaaaaagc

SEQ ID NO: 248780 - RNA, 18 nt, Homo sapiens
ucucuacugaaaguacaa

SEQ ID NO: 248781 - RNA, 13 nt, Homo sapiens
cugaaaguacaaa

SEQ ID NO: 248782 - RNA, 14 nt, Homo sapiens
caaaaaaucugacc

SEQ ID NO: 248783 - RNA, 14 nt, Homo sapiens
agacuugguuucaa

SEQ ID NO: 248784 - RNA, 16 nt, Homo sapiens
uuucaaaaaaucugac

SEQ ID NO: 248785 - RNA, 13 nt, Homo sapiens
cuagaagacuguc

SEQ ID NO: 248786 - RNA, 22 nt, Homo sapiens
aaacaaaaaaaccucuaugcaa

SEQ ID NO: 248787 - RNA, 13 nt, Homo sapiens
ccacaaccaaaaa

SEQ ID NO: 248788 - RNA, 20 nt, Homo sapiens
gcaauaaccucaaagugacu

SEQ ID NO: 248789 - RNA, 12 nt, Homo sapiens
guaaagacugua

SEQ ID NO: 248790 - RNA, 20 nt, Homo sapiens
gaucaugccacuacacucca

SEQ ID NO: 248791 - RNA, 16 nt, Homo sapiens
agaucgcaguuugccu

SEQ ID NO: 248792 - RNA, 18 nt, Homo sapiens
aggcagagguugcagugu

SEQ ID NO: 248793 - RNA, 17 nt, Homo sapiens
uccuuguaaagacugua

SEQ ID NO: 248794 - RNA, 21 nt, Homo sapiens
caacaauccaucucucaagua

SEQ ID NO: 248795 - RNA, 17 nt, Homo sapiens
agacugucagcuuccaa

SEQ ID NO: 248796 - RNA, 15 nt, Homo sapiens
aucuagaagacuguc

SEQ ID NO: 248797 - RNA, 17 nt, Homo sapiens
ucaaaaaaucugaccaa

SEQ ID NO: 248798 - RNA, 18 nt, Homo sapiens
cugucagcuuccaaacau

SEQ ID NO: 248799 - RNA, 15 nt, Homo sapiens
gauguuucaaaaaau

SEQ ID NO: 248800 - RNA, 15 nt, Homo sapiens
gagcagccacaacca

SEQ ID NO: 248801 - RNA, 22 nt, Homo sapiens
cauagugaccaacauagugaaa

SEQ ID NO: 248802 - RNA, 12 nt, Homo sapiens
uauaaucuacuc

SEQ ID NO: 248803 - RNA, 23 nt, Homo sapiens
agcagaaaucuagaagacuguca

SEQ ID NO: 248804 - RNA, 24 nt, Homo sapiens
aagaucuuucaggacucuaccuca

SEQ ID NO: 248805 - RNA, 23 nt, Homo sapiens
agaagacugucagcuuccaaaca

SEQ ID NO: 248806 - RNA, 12 nt, Homo sapiens
uaaagacuguag

SEQ ID NO: 248807 - RNA, 23 nt, Homo sapiens
guuucaaaaaaucugaccaaaac

SEQ ID NO: 248808 - RNA, 18 nt, Homo sapiens
uucugucuuuauaaucua

SEQ ID NO: 248809 - RNA, 13 nt, Homo sapiens
auguuucaaaaaa

SEQ ID NO: 248810 - RNA, 19 nt, Homo sapiens
cagaaaucuagaagacugu

SEQ ID NO: 248811 - RNA, 14 nt, Homo sapiens
cucacuuaucccaa

SEQ ID NO: 248812 - RNA, 16 nt, Homo sapiens
augaaauugcugaaag

SEQ ID NO: 248813 - RNA, 21 nt, Homo sapiens
aguagagcagccacaaccaaa

SEQ ID NO: 248814 - RNA, 19 nt, Homo sapiens
aucucuacugaaaguacaa

SEQ ID NO: 248815 - RNA, 15 nt, Homo sapiens
caauccaucucucaa

SEQ ID NO: 248816 - RNA, 21 nt, Homo sapiens
ccuuaagggacaacauccuua

SEQ ID NO: 248817 - RNA, 22 nt, Homo sapiens
acuuaucccaagagaaugaaau

SEQ ID NO: 248818 - RNA, 14 nt, Homo sapiens
aaagcaauaaccuc

SEQ ID NO: 248819 - RNA, 22 nt, Homo sapiens
ccuguagucccagcuacuugag

SEQ ID NO: 248820 - RNA, 21 nt, Homo sapiens
aaagugacucacuuaucccaa

SEQ ID NO: 248821 - RNA, 14 nt, Homo sapiens
uagaagacugucag

SEQ ID NO: 248822 - RNA, 22 nt, Homo sapiens
ccaucucuacugaaaguacaaa

SEQ ID NO: 248823 - RNA, 23 nt, Homo sapiens
agaucuuucaggacucuaccuca

SEQ ID NO: 248824 - RNA, 15 nt, Homo sapiens
ucaagaccauaguga

SEQ ID NO: 248825 - RNA, 17 nt, Homo sapiens
gaaaucuagaagacugu

SEQ ID NO: 248826 - RNA, 14 nt, Homo sapiens
ccacaaccaaaaaa

SEQ ID NO: 248827 - RNA, 22 nt, Homo sapiens
aaaaaccucuaugcaaucugag

SEQ ID NO: 248828 - RNA, 11 nt, Homo sapiens
caaaaaaucug

SEQ ID NO: 248829 - RNA, 20 nt, Homo sapiens
gggaggcagagguugcagug

SEQ ID NO: 248830 - RNA, 19 nt, Homo sapiens
cacuaugaagauguuucaa

SEQ ID NO: 248831 - RNA, 16 nt, Homo sapiens
auucaguuuucaggau

SEQ ID NO: 248832 - RNA, 19 nt, Homo sapiens
agaaaucuagaagacuguc

SEQ ID NO: 248833 - RNA, 14 nt, Homo sapiens
aucuagaagacugu

SEQ ID NO: 248834 - RNA, 19 nt, Homo sapiens
cucacaccuguaaucccaa

SEQ ID NO: 248835 - RNA, 20 nt, Homo sapiens
caucucuacugaaaguacaa

SEQ ID NO: 248836 - RNA, 19 nt, Homo sapiens
cuuuauaaucuacuccuug

SEQ ID NO: 248837 - RNA, 13 nt, Homo sapiens
aacacacacuguu

SEQ ID NO: 248838 - RNA, 21 nt, Homo sapiens
acccgggaggcagagguugca

SEQ ID NO: 248839 - RNA, 21 nt, Homo sapiens
caaaaaaaccucuaugcaauc

SEQ ID NO: 248840 - RNA, 13 nt, Homo sapiens
cauuaaugcaaug

SEQ ID NO: 248841 - RNA, 17 nt, Homo sapiens
acauccuuaagucaaaa

SEQ ID NO: 248842 - RNA, 14 nt, Homo sapiens
gccuggugcagugg

SEQ ID NO: 248843 - RNA, 23 nt, Homo sapiens
acaauccaucucucaaguagugu

SEQ ID NO: 248844 - RNA, 20 nt, Homo sapiens
cuuccaaacauuaaugcaau

SEQ ID NO: 248845 - RNA, 14 nt, Homo sapiens
gugagaucaugcca

SEQ ID NO: 248846 - RNA, 22 nt, Homo sapiens
uuucaaaaaaucugaccaaaac

SEQ ID NO: 248847 - RNA, 16 nt, Homo sapiens
cugaccaaaacaaaca

SEQ ID NO: 248848 - RNA, 12 nt, Homo sapiens
cagccacaacca

SEQ ID NO: 248849 - RNA, 16 nt, Homo sapiens
uguggugagaucaugc

SEQ ID NO: 248850 - RNA, 20 nt, Homo sapiens
ucaaaaaaucugaccaaaac

SEQ ID NO: 248851 - RNA, 23 nt, Homo sapiens
aagaaagagcaacaauccaucuc

SEQ ID NO: 248852 - RNA, 13 nt, Homo sapiens
ucugaccaaaaca

SEQ ID NO: 248853 - RNA, 16 nt, Homo sapiens
accccaucucuacuga

SEQ ID NO: 248854 - RNA, 14 nt, Homo sapiens
guuugcuagcagaa

SEQ ID NO: 248855 - RNA, 21 nt, Homo sapiens
aaucugaccaaaacaaacaaa

SEQ ID NO: 248856 - RNA, 15 nt, Homo sapiens
uguguuggcacaugc

SEQ ID NO: 248857 - RNA, 22 nt, Homo sapiens
aacauagugaaaccccaucucu

SEQ ID NO: 248858 - RNA, 12 nt, Homo sapiens
uaugcaaucuga

SEQ ID NO: 248859 - RNA, 14 nt, Homo sapiens
uaagggacaacauc

SEQ ID NO: 248860 - RNA, 17 nt, Homo sapiens
aucuagaagacugucag

SEQ ID NO: 248861 - RNA, 16 nt, Homo sapiens
cuuguaaagacuguag

SEQ ID NO: 248862 - RNA, 14 nt, Homo sapiens
aaucugaccaaaac

SEQ ID NO: 248863 - RNA, 21 nt, Homo sapiens
ucuuucaggacucuaccucau

SEQ ID NO: 248864 - RNA, 22 nt, Homo sapiens
auaaccucaaagugacuauuca

SEQ ID NO: 248865 - RNA, 20 nt, Homo sapiens
uguagucccagcuacuugag

SEQ ID NO: 248866 - RNA, 16 nt, Homo sapiens
agccacaaccaaaaaa

SEQ ID NO: 248867 - RNA, 12 nt, Homo sapiens
uuauaaucuacu

SEQ ID NO: 248868 - RNA, 22 nt, Homo sapiens
acuccuuguaaagacuguagaa

SEQ ID NO: 248869 - RNA, 13 nt, Homo sapiens
aaucugaccaaaa

SEQ ID NO: 248870 - RNA, 23 nt, Homo sapiens
cuagcagaaaucuagaagacugu

SEQ ID NO: 248871 - RNA, 21 nt, Homo sapiens
aacaaaaaaaccucuaugcaa

SEQ ID NO: 248872 - RNA, 15 nt, Homo sapiens
acacuguucugaaag

SEQ ID NO: 248873 - RNA, 12 nt, Homo sapiens
aauugcugaaag

SEQ ID NO: 248874 - RNA, 23 nt, Homo sapiens
auuguuugaacccgggaggcaga

SEQ ID NO: 248875 - RNA, 17 nt, Homo sapiens
uggaaagaaaaagcaau

SEQ ID NO: 248876 - RNA, 15 nt, Homo sapiens
agaccauagugacca

SEQ ID NO: 248877 - RNA, 23 nt, Homo sapiens
acauagugaaaccccaucucuac

SEQ ID NO: 248878 - RNA, 20 nt, Homo sapiens
auaucaguuugcuagcagaa

SEQ ID NO: 248879 - RNA, 18 nt, Homo sapiens
aaccucuaugcaaucuga

SEQ ID NO: 248880 - RNA, 19 nt, Homo sapiens
gauacacuaugaagauguu

SEQ ID NO: 248881 - RNA, 17 nt, Homo sapiens
acucuaccucauaucag

SEQ ID NO: 248882 - RNA, 17 nt, Homo sapiens
uaaccucaaagugacua

SEQ ID NO: 248883 - RNA, 21 nt, Homo sapiens
cucuacugaaaguacaaaaau

SEQ ID NO: 248884 - RNA, 20 nt, Homo sapiens
ugaccaaaacaaacaaacag

SEQ ID NO: 248885 - RNA, 22 nt, Homo sapiens
aaucugaguagagcagccacaa

SEQ ID NO: 248886 - RNA, 15 nt, Homo sapiens
uuugcuagcagaaau

SEQ ID NO: 248887 - RNA, 14 nt, Homo sapiens
aaagacuguagaag

SEQ ID NO: 248888 - RNA, 18 nt, Homo sapiens
ucuuucaggacucuaccu

SEQ ID NO: 248889 - RNA, 17 nt, Homo sapiens
guuucaaaaaaucugac

SEQ ID NO: 248890 - RNA, 16 nt, Homo sapiens
ugacucacuuauccca

SEQ ID NO: 248891 - RNA, 17 nt, Homo sapiens
ggaaagaaaaagcaaua

SEQ ID NO: 248892 - RNA, 12 nt, Reston Ebola virus (REBOV)
uuugaaauggag

SEQ ID NO: 248893 - RNA, 15 nt, Reston Ebola virus (REBOV)
ucauauuuugaucaa

SEQ ID NO: 248894 - RNA, 17 nt, Reston Ebola virus (REBOV)
ucguaugucuagcaaau

SEQ ID NO: 248895 - RNA, 12 nt, Reston Ebola virus (REBOV)
ucuauucuaauc

SEQ ID NO: 248896 - RNA, 18 nt, Reston Ebola virus (REBOV)
ugcauuuguuaacuuauc

SEQ ID NO: 248897 - RNA, 14 nt, Reston Ebola virus (REBOV)
ucuuuuccuaucuu

SEQ ID NO: 248898 - RNA, 18 nt, Reston Ebola virus (REBOV)
ugaaaaugugaucuaaua

SEQ ID NO: 248899 - RNA, 13 nt, Reston Ebola virus (REBOV)
ugaaugcucuaua

SEQ ID NO: 248900 - RNA, 18 nt, Reston Ebola virus (REBOV)
ugaaugcucuauagucua

SEQ ID NO: 248901 - RNA, 21 nt, Reston Ebola virus (REBOV)
ugaauaugacaacaucuugcu

SEQ ID NO: 248902 - RNA, 21 nt, Reston Ebola virus (REBOV)
ugacccaggacccgcaagaga

SEQ ID NO: 248903 - RNA, 17 nt, Reston Ebola virus (REBOV)
ugagguauuuugucuag

SEQ ID NO: 248904 - RNA, 18 nt, Reston Ebola virus (REBOV)
ugauaagaauacacuuua

SEQ ID NO: 248905 - RNA, 13 nt, Reston Ebola virus (REBOV)
ugaguaauaauca

SEQ ID NO: 248906 - RNA, 16 nt, Reston Ebola virus (REBOV)
uucgcccauugaaaau

SEQ ID NO: 248907 - RNA, 21 nt, Reston Ebola virus (REBOV)
uucacugagucccaccaggaa

SEQ ID NO: 248908 - RNA, 23 nt, Reston Ebola virus (REBOV)
uuauaacgauuuugcauuucuaa

SEQ ID NO: 248909 - RNA, 22 nt, Reston Ebola virus (REBOV)
uugaacauagucauaaggggau

SEQ ID NO: 248910 - RNA, 14 nt, Reston Ebola virus (REBOV)
uugaaaaugugauc

SEQ ID NO: 248911 - RNA, 16 nt, Reston Ebola virus (REBOV)
uuaacaaucgcuagua

SEQ ID NO: 248912 - RNA, 13 nt, Reston Ebola virus (REBOV)
ugugcaauuguca

SEQ ID NO: 248913 - RNA, 14 nt, Reston Ebola virus (REBOV)
ugcuaauagguuug

SEQ ID NO: 248914 - RNA, 21 nt, Reston Ebola virus (REBOV)
ugguuacacagugaguauuag

SEQ ID NO: 248915 - RNA, 12 nt, Reston Ebola virus (REBOV)
ugucaaugcuau

SEQ ID NO: 248916 - RNA, 15 nt, Reston Ebola virus (REBOV)
ugucaaugcuauacu

SEQ ID NO: 248917 - RNA, 18 nt, Reston Ebola virus (REBOV)
ugucuagcaaauuaucaa

SEQ ID NO: 248918 - RNA, 15 nt, Reston Ebola virus (REBOV)
guauccaaguuuaug

SEQ ID NO: 248919 - RNA, 14 nt, Reston Ebola virus (REBOV)
ggugcgagauuucc

SEQ ID NO: 248920 - RNA, 22 nt, Reston Ebola virus (REBOV)
gugcuacuuuucuauaagugau

SEQ ID NO: 248921 - RNA, 14 nt, Reston Ebola virus (REBOV)
ggagauaaauggac

SEQ ID NO: 248922 - RNA, 15 nt, Reston Ebola virus (REBOV)
gcuauuauucugcua

SEQ ID NO: 248923 - RNA, 12 nt, Reston Ebola virus (REBOV)
gccccaagucca

SEQ ID NO: 248924 - RNA, 17 nt, Reston Ebola virus (REBOV)
gccccaaguccaaccau

SEQ ID NO: 248925 - RNA, 22 nt, Reston Ebola virus (REBOV)
uauuaaggaguuuuuuaaucua

SEQ ID NO: 248926 - RNA, 18 nt, Reston Ebola virus (REBOV)
uaucacguuaaagauuua

SEQ ID NO: 248927 - RNA, 16 nt, Reston Ebola virus (REBOV)
uaucgcaauuaucgau

SEQ ID NO: 248928 - RNA, 12 nt, Reston Ebola virus (REBOV)
uauaaauacagu

SEQ ID NO: 248929 - RNA, 13 nt, Reston Ebola virus (REBOV)
uauaagugauucu

SEQ ID NO: 248930 - RNA, 14 nt, Reston Ebola virus (REBOV)
uauaacaagugaug

SEQ ID NO: 248931 - RNA, 17 nt, Reston Ebola virus (REBOV)
uaguaauaaugauucuu

SEQ ID NO: 248932 - RNA, 16 nt, Reston Ebola virus (REBOV)
uauuauucugcuagua

SEQ ID NO: 248933 - RNA, 14 nt, Reston Ebola virus (REBOV)
uauuagaauguacu

SEQ ID NO: 248934 - RNA, 16 nt, Reston Ebola virus (REBOV)
uauucugaaugcucua

SEQ ID NO: 248935 - RNA, 12 nt, Reston Ebola virus (REBOV)
uauuuugaucaa

SEQ ID NO: 248936 - RNA, 17 nt, Reston Ebola virus (REBOV)
uauuuuaauaacauguc

SEQ ID NO: 248937 - RNA, 15 nt, Reston Ebola virus (REBOV)
uaaauaauacuuuau

SEQ ID NO: 248938 - RNA, 22 nt, Reston Ebola virus (REBOV)
uaaauaaugauuguguguauua

SEQ ID NO: 248939 - RNA, 13 nt, Reston Ebola virus (REBOV)
uaaauacacuuaa

SEQ ID NO: 248940 - RNA, 14 nt, Reston Ebola virus (REBOV)
uaaauacacuuaag

SEQ ID NO: 248941 - RNA, 21 nt, Reston Ebola virus (REBOV)
uaaauacacuuaagacuugac

SEQ ID NO: 248942 - RNA, 15 nt, Reston Ebola virus (REBOV)
uaagaauacacuuua

SEQ ID NO: 248943 - RNA, 21 nt, Reston Ebola virus (REBOV)
uaauacgacuucggugugcaa

SEQ ID NO: 248944 - RNA, 13 nt, Reston Ebola virus (REBOV)
uaaugauauugca

SEQ ID NO: 248945 - RNA, 15 nt, Reston Ebola virus (REBOV)
uaaugauauugcaua

SEQ ID NO: 248946 - RNA, 20 nt, Reston Ebola virus (REBOV)
uaccacuccgagauggaucc

SEQ ID NO: 248947 - RNA, 16 nt, Reston Ebola virus (REBOV)
uacgccuagauaacua

SEQ ID NO: 248948 - RNA, 14 nt, Reston Ebola virus (REBOV)
gaacauagucauaa

SEQ ID NO: 248949 - RNA, 15 nt, Reston Ebola virus (REBOV)
gaaccagcccaggaa

SEQ ID NO: 248950 - RNA, 18 nt, Reston Ebola virus (REBOV)
gaacccaaugacaaccac

SEQ ID NO: 248951 - RNA, 17 nt, Reston Ebola virus (REBOV)
gacuucggugugcaauu

SEQ ID NO: 248952 - RNA, 20 nt, Reston Ebola virus (REBOV)
gacuugaauguaauaaggua

SEQ ID NO: 248953 - RNA, 15 nt, Reston Ebola virus (REBOV)
gacuauugaacuauu

SEQ ID NO: 248954 - RNA, 18 nt, Reston Ebola virus (REBOV)
gagguugauaacaaugua

SEQ ID NO: 248955 - RNA, 16 nt, Reston Ebola virus (REBOV)
gcauuucuuaucuuca

SEQ ID NO: 248956 - RNA, 13 nt, Reston Ebola virus (REBOV)
gcauugagcacug

SEQ ID NO: 248957 - RNA, 22 nt, Reston Ebola virus (REBOV)
gcauuguugaguuaacuaucua

SEQ ID NO: 248958 - RNA, 13 nt, Reston Ebola virus (REBOV)
gcaguaaccagaa

SEQ ID NO: 248959 - RNA, 19 nt, Reston Ebola virus (REBOV)
cuuauuagugcuacuuuuc

SEQ ID NO: 248960 - RNA, 18 nt, Reston Ebola virus (REBOV)
cuuccauuuuuacaugug

SEQ ID NO: 248961 - RNA, 24 nt, Reston Ebola virus (REBOV)
cuucaucuucuaaagugagauauu

SEQ ID NO: 248962 - RNA, 17 nt, Reston Ebola virus (REBOV)
cuuaaaacaaucuacua

SEQ ID NO: 248963 - RNA, 17 nt, Reston Ebola virus (REBOV)
cuuaaucuaaggccauu

SEQ ID NO: 248964 - RNA, 17 nt, Reston Ebola virus (REBOV)
cuuacaaacaugcacaa

SEQ ID NO: 248965 - RNA, 22 nt, Reston Ebola virus (REBOV)
cuuacaccggucuauccaagau

SEQ ID NO: 248966 - RNA, 17 nt, Reston Ebola virus (REBOV)
cuaauugcauugagcac

SEQ ID NO: 248967 - RNA, 13 nt, Reston Ebola virus (REBOV)
cuacuaucgcaau

SEQ ID NO: 248968 - RNA, 15 nt, Reston Ebola virus (REBOV)
cuacuaucugcagua

SEQ ID NO: 248969 - RNA, 16 nt, Reston Ebola virus (REBOV)
acaguuuuaguuccga

SEQ ID NO: 248970 - RNA, 16 nt, Reston Ebola virus (REBOV)
acaucuugcuucuugu

SEQ ID NO: 248971 - RNA, 22 nt, Reston Ebola virus (REBOV)
accaccauugccccaaguccaa

SEQ ID NO: 248972 - RNA, 15 nt, Reston Ebola virus (REBOV)
acccaaugacaacca

SEQ ID NO: 248973 - RNA, 10 nt, Reston Ebola virus (REBOV)
acccauucug

SEQ ID NO: 248974 - RNA, 14 nt, Reston Ebola virus (REBOV)
accccaguuccuau

SEQ ID NO: 248975 - RNA, 21 nt, Reston Ebola virus (REBOV)
acuuaucggugcgagauuucc

SEQ ID NO: 248976 - RNA, 18 nt, Reston Ebola virus (REBOV)
acuuauugauaagaauac

SEQ ID NO: 248977 - RNA, 16 nt, Reston Ebola virus (REBOV)
acuuggcauuucuuau

SEQ ID NO: 248978 - RNA, 19 nt, Reston Ebola virus (REBOV)
acuuacaccggucuaucca

SEQ ID NO: 248979 - RNA, 18 nt, Reston Ebola virus (REBOV)
acugagucccaccaggaa

SEQ ID NO: 248980 - RNA, 23 nt, Reston Ebola virus (REBOV)
acugagucccaccaggaaacaaa

SEQ ID NO: 248981 - RNA, 18 nt, Reston Ebola virus (REBOV)
agacggccaacagcagca

SEQ ID NO: 248982 - RNA, 19 nt, Reston Ebola virus (REBOV)
agaaaugaccccaguuccu

SEQ ID NO: 248983 - RNA, 13 nt, Reston Ebola virus (REBOV)
aucaucauaguau

SEQ ID NO: 248984 - RNA, 13 nt, Reston Ebola virus (REBOV)
aucauaacuuuau

SEQ ID NO: 248985 - RNA, 19 nt, Reston Ebola virus (REBOV)
aucgcuaguaauuuuaauc

SEQ ID NO: 248986 - RNA, 19 nt, Reston Ebola virus (REBOV)
auauaauguaaauauaaca

SEQ ID NO: 248987 - RNA, 18 nt, Reston Ebola virus (REBOV)
aucacguuaaagauuuag

SEQ ID NO: 248988 - RNA, 19 nt, Reston Ebola virus (REBOV)
auaacaauguaccaaguga

SEQ ID NO: 248989 - RNA, 20 nt, Reston Ebola virus (REBOV)
auaacaauguaccaagugaa

SEQ ID NO: 248990 - RNA, 16 nt, Reston Ebola virus (REBOV)
auacacuuaagacuug

SEQ ID NO: 248991 - RNA, 13 nt, Reston Ebola virus (REBOV)
agcccacagacca

SEQ ID NO: 248992 - RNA, 15 nt, Reston Ebola virus (REBOV)
aguucaacccaguca

SEQ ID NO: 248993 - RNA, 20 nt, Reston Ebola virus (REBOV)
aguuccgauucuaaguauau

SEQ ID NO: 248994 - RNA, 21 nt, Reston Ebola virus (REBOV)
ccuccagcauauaaugauauu

SEQ ID NO: 248995 - RNA, 22 nt, Reston Ebola virus (REBOV)
ccacgauugcucucagucaaua

SEQ ID NO: 248996 - RNA, 14 nt, Reston Ebola virus (REBOV)
cauuuuuacaugug

SEQ ID NO: 248997 - RNA, 12 nt, Reston Ebola virus (REBOV)
cauaacuuuaua

SEQ ID NO: 248998 - RNA, 13 nt, Reston Ebola virus (REBOV)
cagcagcaaacca

SEQ ID NO: 248999 - RNA, 22 nt, Reston Ebola virus (REBOV)
caucuacaaaaacuaauccauu

SEQ ID NO: 249000 - RNA, 19 nt, Reston Ebola virus (REBOV)
cauauuuugaucaaguaau

SEQ ID NO: 249001 - RNA, 14 nt, Reston Ebola virus (REBOV)
caucaaaaaaugag

SEQ ID NO: 249002 - RNA, 14 nt, Reston Ebola virus (REBOV)
caaggcaagccaca

SEQ ID NO: 249003 - RNA, 18 nt, Reston Ebola virus (REBOV)
caaggcucgaacaacucc

SEQ ID NO: 249004 - RNA, 16 nt, Reston Ebola virus (REBOV)
caagcaacgagacaau

SEQ ID NO: 249005 - RNA, 19 nt, Reston Ebola virus (REBOV)
caaugacucguuaacaauc

SEQ ID NO: 249006 - RNA, 13 nt, Reston Ebola virus (REBOV)
caauaaauuaaua

SEQ ID NO: 249007 - RNA, 18 nt, Reston Ebola virus (REBOV)
caccgcgaacccaaugac

SEQ ID NO: 249008 - RNA, 20 nt, Reston Ebola virus (REBOV)
cacgauugcucucagucaau

SEQ ID NO: 249009 - RNA, 21 nt, Reston Ebola virus (REBOV)
auggucuuauuugaauaugac

SEQ ID NO: 249010 - RNA, 17 nt, Reston Ebola virus (REBOV)
auuggagauaaauggac

SEQ ID NO: 249011 - RNA, 21 nt, Reston Ebola virus (REBOV)
auuugaugaagauuaaaaccu

SEQ ID NO: 249012 - RNA, 15 nt, Reston Ebola virus (REBOV)
auuguagacaauuua

SEQ ID NO: 249013 - RNA, 13 nt, Reston Ebola virus (REBOV)
aaaaacuaaucca

SEQ ID NO: 249014 - RNA, 19 nt, Reston Ebola virus (REBOV)
aaaacuaaaccaagcaaua

SEQ ID NO: 249015 - RNA, 20 nt, Reston Ebola virus (REBOV)
aaaacauuugaugaagauua

SEQ ID NO: 249016 - RNA, 13 nt, Reston Ebola virus (REBOV)
agaguaugccaau

SEQ ID NO: 249017 - RNA, 14 nt, Reston Ebola virus (REBOV)
agcaaauuaucaau

SEQ ID NO: 249018 - RNA, 14 nt, Reston Ebola virus (REBOV)
agcaaaccaggaac

SEQ ID NO: 249019 - RNA, 19 nt, Reston Ebola virus (REBOV)
agcagaggcaacagacuca

SEQ ID NO: 249020 - RNA, 15 nt, Reston Ebola virus (REBOV)
acuuaagacuugacc

SEQ ID NO: 249021 - RNA, 21 nt, Reston Ebola virus (REBOV)
acugagucccaccaggaaaca

SEQ ID NO: 249022 - RNA, 18 nt, Reston Ebola virus (REBOV)
agaauuauaaaagaauca

SEQ ID NO: 249023 - RNA, 14 nt, Reston Ebola virus (REBOV)
agacaauuuacugg

SEQ ID NO: 249024 - RNA, 21 nt, Reston Ebola virus (REBOV)
acuuggcauuucuuaucuuca

SEQ ID NO: 249025 - RNA, 22 nt, Reston Ebola virus (REBOV)
acuuuauuuuaauaacauguca

SEQ ID NO: 249026 - RNA, 13 nt, Reston Ebola virus (REBOV)
acagcagcaaacc

SEQ ID NO: 249027 - RNA, 17 nt, Reston Ebola virus (REBOV)
acagcagcaaaccagga

SEQ ID NO: 249028 - RNA, 13 nt, Reston Ebola virus (REBOV)
acauauacacuua

SEQ ID NO: 249029 - RNA, 20 nt, Reston Ebola virus (REBOV)
accgcgaacccaaugacaac

SEQ ID NO: 249030 - RNA, 21 nt, Reston Ebola virus (REBOV)
acccacaacauccccgaugac

SEQ ID NO: 249031 - RNA, 19 nt, Reston Ebola virus (REBOV)
acccaaugacaaccaccau

SEQ ID NO: 249032 - RNA, 20 nt, Reston Ebola virus (REBOV)
acgauugcucucagucaaua

SEQ ID NO: 249033 - RNA, 18 nt, Reston Ebola virus (REBOV)
aacccagucaaaacuaaa

SEQ ID NO: 249034 - RNA, 20 nt, Reston Ebola virus (REBOV)
aagaguuccauuuaguaaua

SEQ ID NO: 249035 - RNA, 17 nt, Reston Ebola virus (REBOV)
aaacuaauccauuauaa

SEQ ID NO: 249036 - RNA, 14 nt, Reston Ebola virus (REBOV)
aaauaauacuuuau

SEQ ID NO: 249037 - RNA, 14 nt, Reston Ebola virus (REBOV)
aaauaaguacauga

SEQ ID NO: 249038 - RNA, 17 nt, Reston Ebola virus (REBOV)
aaaguuaaauucuccua

SEQ ID NO: 249039 - RNA, 13 nt, Reston Ebola virus (REBOV)
aacacagcaucca

SEQ ID NO: 249040 - RNA, 18 nt, Reston Ebola virus (REBOV)
aacacagcauccauugaa

SEQ ID NO: 249041 - RNA, 18 nt, Reston Ebola virus (REBOV)
aacaauguaccaagugaa

SEQ ID NO: 249042 - RNA, 14 nt, Reston Ebola virus (REBOV)
aacaagcuauuagu

SEQ ID NO: 249043 - RNA, 21 nt, Reston Ebola virus (REBOV)
aacaacacagcauccauugaa

SEQ ID NO: 249044 - RNA, 22 nt, Reston Ebola virus (REBOV)
aaauuaagaaaaacauuugaug

SEQ ID NO: 249045 - RNA, 13 nt, Reston Ebola virus (REBOV)
aaauggagauuau

SEQ ID NO: 249046 - RNA, 20 nt, Reston Ebola virus (REBOV)
aaguaaucaugauuuuauga

SEQ ID NO: 249047 - RNA, 22 nt, Reston Ebola virus (REBOV)
aaguaagguagcugauucacug

SEQ ID NO: 249048 - RNA, 20 nt, Reston Ebola virus (REBOV)
aagcaauauucugaaugcuc

SEQ ID NO: 249049 - RNA, 18 nt, Reston Ebola virus (REBOV)
aagguagcugauucacug

SEQ ID NO: 249050 - RNA, 11 nt, Reston Ebola virus (REBOV)
aauaacauguc

SEQ ID NO: 249051 - RNA, 16 nt, Reston Ebola virus (REBOV)
aauccauuauaacuua

SEQ ID NO: 249052 - RNA, 23 nt, Reston Ebola virus (REBOV)
aaucaucauaguaugaggaauaa

SEQ ID NO: 249053 - RNA, 18 nt, Reston Ebola virus (REBOV)
aaucacccaucugauguc

SEQ ID NO: 249054 - RNA, 21 nt, Reston Ebola virus (REBOV)
aaucuuaauuguuagagguaa

SEQ ID NO: 249055 - RNA, 21 nt, Reston Ebola virus (REBOV)
aaucugauuguauagaauuau

SEQ ID NO: 249056 - RNA, 19 nt, Reston Ebola virus (REBOV)
aaucuuaaaauaaguacau

SEQ ID NO: 249057 - RNA, 17 nt, Reston Ebola virus (REBOV)
acaacauccccgaugac

SEQ ID NO: 249058 - RNA, 18 nt, Reston Ebola virus (REBOV)
acaacacagcauccauug

SEQ ID NO: 249059 - RNA, 14 nt, Reston Ebola virus (REBOV)
caauuuaccacucc

SEQ ID NO: 249060 - RNA, 19 nt, Reston Ebola virus (REBOV)
cacaacauccccgaugacc

SEQ ID NO: 249061 - RNA, 17 nt, Reston Ebola virus (REBOV)
cagcagcaaaccaggaa

SEQ ID NO: 249062 - RNA, 21 nt, Reston Ebola virus (REBOV)
cagcauauaaugauauugcau

SEQ ID NO: 249063 - RNA, 13 nt, Reston Ebola virus (REBOV)
cagcauccauuga

SEQ ID NO: 249064 - RNA, 17 nt, Reston Ebola virus (REBOV)
cagaggcaacagacuca

SEQ ID NO: 249065 - RNA, 18 nt, Reston Ebola virus (REBOV)
caacggagagacaaucac

SEQ ID NO: 249066 - RNA, 14 nt, Reston Ebola virus (REBOV)
auugagcacugcua

SEQ ID NO: 249067 - RNA, 15 nt, Reston Ebola virus (REBOV)
auugugcagauuuaa

SEQ ID NO: 249068 - RNA, 14 nt, Reston Ebola virus (REBOV)
auuguguguauuaa

SEQ ID NO: 249069 - RNA, 12 nt, Reston Ebola virus (REBOV)
aucuuugcuuau

SEQ ID NO: 249070 - RNA, 15 nt, Reston Ebola virus (REBOV)
augauuguagacaau

SEQ ID NO: 249071 - RNA, 15 nt, Reston Ebola virus (REBOV)
aucaucauaguauga

SEQ ID NO: 249072 - RNA, 16 nt, Reston Ebola virus (REBOV)
aucaucauaguaugag

SEQ ID NO: 249073 - RNA, 16 nt, Reston Ebola virus (REBOV)
aggggauaaauaauac

SEQ ID NO: 249074 - RNA, 19 nt, Reston Ebola virus (REBOV)
aguuccgauucuaaguaua

SEQ ID NO: 249075 - RNA, 19 nt, Reston Ebola virus (REBOV)
auaacaugucaaugcuaua

SEQ ID NO: 249076 - RNA, 17 nt, Reston Ebola virus (REBOV)
ugacgcuguugaugaua

SEQ ID NO: 249077 - RNA, 13 nt, Reston Ebola virus (REBOV)
ugccuaacuauug

SEQ ID NO: 249078 - RNA, 16 nt, Reston Ebola virus (REBOV)
ugcuacuuuucuauaa

SEQ ID NO: 249079 - RNA, 14 nt, Reston Ebola virus (REBOV)
uggaaccucagcca

SEQ ID NO: 249080 - RNA, 15 nt, Reston Ebola virus (REBOV)
uggagauaaauggac

SEQ ID NO: 249081 - RNA, 23 nt, Reston Ebola virus (REBOV)
uggcucaauguucuugauuugaa

SEQ ID NO: 249082 - RNA, 23 nt, Reston Ebola virus (REBOV)
uuccgacgggaucaauagacuaa

SEQ ID NO: 249083 - RNA, 16 nt, Reston Ebola virus (REBOV)
uuccagucuugaguaa

SEQ ID NO: 249084 - RNA, 20 nt, Reston Ebola virus (REBOV)
uucguaaagcuaaauacacu

SEQ ID NO: 249085 - RNA, 21 nt, Reston Ebola virus (REBOV)
uucgagcuauuauucugcuag

SEQ ID NO: 249086 - RNA, 23 nt, Reston Ebola virus (REBOV)
uucgagcuauuauucugcuagua

SEQ ID NO: 249087 - RNA, 16 nt, Reston Ebola virus (REBOV)
uuauucugcuaguaau

SEQ ID NO: 249088 - RNA, 23 nt, Reston Ebola virus (REBOV)
uuaaauuccauucgagcuauuau

SEQ ID NO: 249089 - RNA, 17 nt, Reston Ebola virus (REBOV)
aauuggaagaucauucc

SEQ ID NO: 249090 - RNA, 18 nt, Reston Ebola virus (REBOV)
aauuggaagaucauucca

SEQ ID NO: 249091 - RNA, 22 nt, Reston Ebola virus (REBOV)
aauuaucgauggaucuacccua

SEQ ID NO: 249092 - RNA, 16 nt, Reston Ebola virus (REBOV)
aaugcuauacuguuaa

SEQ ID NO: 249093 - RNA, 19 nt, Reston Ebola virus (REBOV)
aaugauaauuccugacgac

SEQ ID NO: 249094 - RNA, 22 nt, Reston Ebola virus (REBOV)
aaucuauuuucgcuaauugcau

SEQ ID NO: 249095 - RNA, 21 nt, Reston Ebola virus (REBOV)
aaucuuaaaauaaguacauga

SEQ ID NO: 249096 - RNA, 15 nt, Reston Ebola virus (REBOV)
aagcuaaauacacuu

SEQ ID NO: 249097 - RNA, 13 nt, Reston Ebola virus (REBOV)
aauacacuuuauc

SEQ ID NO: 249098 - RNA, 14 nt, Reston Ebola virus (REBOV)
aauauaacaaguga

SEQ ID NO: 249099 - RNA, 19 nt, Reston Ebola virus (REBOV)
aagaaaaacauuugaugaa

SEQ ID NO: 249100 - RNA, 19 nt, Reston Ebola virus (REBOV)
aaccagucgguauuuucca

SEQ ID NO: 249101 - RNA, 19 nt, Reston Ebola virus (REBOV)
aacagcagcaaaccaggaa

SEQ ID NO: 249102 - RNA, 17 nt, Reston Ebola virus (REBOV)
uuuccagucuugaguaa

SEQ ID NO: 249103 - RNA, 17 nt, Reston Ebola virus (REBOV)
uuuaguuccgauucuaa

SEQ ID NO: 249104 - RNA, 18 nt, Reston Ebola virus (REBOV)
uuuagcaaagaauugaua

SEQ ID NO: 249105 - RNA, 17 nt, Reston Ebola virus (REBOV)
uuuaaguaauauacaua

SEQ ID NO: 249106 - RNA, 23 nt, Reston Ebola virus (REBOV)
uucuugauuugaacauagucaua

SEQ ID NO: 249107 - RNA, 20 nt, Reston Ebola virus (REBOV)
gugggucuuaucuagcauug

SEQ ID NO: 249108 - RNA, 18 nt, Reston Ebola virus (REBOV)
guacaugaaugagaauua

SEQ ID NO: 249109 - RNA, 21 nt, Reston Ebola virus (REBOV)
guacaugacuugaauguaaua

SEQ ID NO: 249110 - RNA, 19 nt, Reston Ebola virus (REBOV)
gucuagcaaauuaucaaua

SEQ ID NO: 249111 - RNA, 17 nt, Reston Ebola virus (REBOV)
gucuauucuaaucagag

SEQ ID NO: 249112 - RNA, 17 nt, Reston Ebola virus (REBOV)
gucuuuuugaaauggag

SEQ ID NO: 249113 - RNA, 13 nt, Reston Ebola virus (REBOV)
guuuuuuaaucua

SEQ ID NO: 249114 - RNA, 23 nt, Reston Ebola virus (REBOV)
guugguuacacagugaguauuag

SEQ ID NO: 249115 - RNA, 17 nt, Reston Ebola virus (REBOV)
uagacuaaaaaucugau

SEQ ID NO: 249116 - RNA, 19 nt, Reston Ebola virus (REBOV)
uagcccugacuagacaaau

SEQ ID NO: 249117 - RNA, 22 nt, Reston Ebola virus (REBOV)
uagauagguaaucuaacacuga

SEQ ID NO: 249118 - RNA, 21 nt, Reston Ebola virus (REBOV)
uagaguguaugaauugugcag

SEQ ID NO: 249119 - RNA, 13 nt, Reston Ebola virus (REBOV)
uagcucuuugaau

SEQ ID NO: 249120 - RNA, 18 nt, Reston Ebola virus (REBOV)
uagcguaacacaucauaa

SEQ ID NO: 249121 - RNA, 22 nt, Reston Ebola virus (REBOV)
uaguugugggucuuaucuagca

SEQ ID NO: 249122 - RNA, 11 nt, Reston Ebola virus (REBOV)
aacaagcuauu

SEQ ID NO: 249123 - RNA, 19 nt, Reston Ebola virus (REBOV)
aacaauggcuaagauuuca

SEQ ID NO: 249124 - RNA, 19 nt, Reston Ebola virus (REBOV)
aacaaucuacuaucgcaau

SEQ ID NO: 249125 - RNA, 11 nt, Reston Ebola virus (REBOV)
uacacuuuauc

SEQ ID NO: 249126 - RNA, 14 nt, Reston Ebola virus (REBOV)
uacaaacaugcaca

SEQ ID NO: 249127 - RNA, 14 nt, Reston Ebola virus (REBOV)
uacaaaaacuaauc

SEQ ID NO: 249128 - RNA, 15 nt, Reston Ebola virus (REBOV)
uaaucaugauuuuau

SEQ ID NO: 249129 - RNA, 13 nt, Reston Ebola virus (REBOV)
uaauccauuauaa

SEQ ID NO: 249130 - RNA, 19 nt, Reston Ebola virus (REBOV)
ucugaugucaccauaucca

SEQ ID NO: 249131 - RNA, 14 nt, Reston Ebola virus (REBOV)
uccuaguauuuauu

SEQ ID NO: 249132 - RNA, 13 nt, Reston Ebola virus (REBOV)
ugacaaccaccau

SEQ ID NO: 249133 - RNA, 16 nt, Reston Ebola virus (REBOV)
ugacaaccaccauugc

SEQ ID NO: 249134 - RNA, 15 nt, Reston Ebola virus (REBOV)
ugacaacaucuugcu

SEQ ID NO: 249135 - RNA, 21 nt, Reston Ebola virus (REBOV)
ugaacagccgaacaacacagc

SEQ ID NO: 249136 - RNA, 23 nt, Reston Ebola virus (REBOV)
ugaacagccgaacaacacagcau

SEQ ID NO: 249137 - RNA, 17 nt, Reston Ebola virus (REBOV)
ucuugaguaauaaucau

SEQ ID NO: 249138 - RNA, 17 nt, Reston Ebola virus (REBOV)
ucagccagacuauugaa

SEQ ID NO: 249139 - RNA, 18 nt, Reston Ebola virus (REBOV)
ucacguuaaagauuuaga

SEQ ID NO: 249140 - RNA, 20 nt, Reston Ebola virus (REBOV)
ucaacccagucaaaacuaaa

SEQ ID NO: 249141 - RNA, 21 nt, Reston Ebola virus (REBOV)
ucaauaaauuaauauagauau

SEQ ID NO: 249142 - RNA, 16 nt, Reston Ebola virus (REBOV)
uauaaugauauugcau

SEQ ID NO: 249143 - RNA, 13 nt, Reston Ebola virus (REBOV)
uauucuaaucaga

SEQ ID NO: 249144 - RNA, 14 nt, Reston Ebola virus (REBOV)
uauucuaaucagag

SEQ ID NO: 249145 - RNA, 18 nt, Reston Ebola virus (REBOV)
uauucugaaugcucuaua

SEQ ID NO: 249146 - RNA, 18 nt, Reston Ebola virus (REBOV)
uauugauaagaauacacu

SEQ ID NO: 249147 - RNA, 20 nt, Reston Ebola virus (REBOV)
uauaacuuauuagugcuacu

SEQ ID NO: 249148 - RNA, 21 nt, Reston Ebola virus (REBOV)
ucaaaacuaaaccaagcaaua

SEQ ID NO: 249149 - RNA, 18 nt, Reston Ebola virus (REBOV)
uauuuuccagacuuggca

SEQ ID NO: 249150 - RNA, 22 nt, Reston Ebola virus (REBOV)
uauuuugaucaaguaaucauga

SEQ ID NO: 249151 - RNA, 13 nt, Reston Ebola virus (REBOV)
uauuuuaucauca

SEQ ID NO: 249152 - RNA, 13 nt, Reston Ebola virus (REBOV)
ucauaacuuuaua

SEQ ID NO: 249153 - RNA, 18 nt, Reston Ebola virus (REBOV)
ucagucaauaaauuaaua

SEQ ID NO: 249154 - RNA, 13 nt, Reston Ebola virus (REBOV)
cgaacccaaugac

SEQ ID NO: 249155 - RNA, 18 nt, Reston Ebola virus (REBOV)
cgacuucggugugcaauu

SEQ ID NO: 249156 - RNA, 17 nt, Reston Ebola virus (REBOV)
ccugacuagacaaauua

SEQ ID NO: 249157 - RNA, 22 nt, Reston Ebola virus (REBOV)
ccuauuugacgguacaugacuu

SEQ ID NO: 249158 - RNA, 13 nt, Reston Ebola virus (REBOV)
cccaccaggaaac

SEQ ID NO: 249159 - RNA, 13 nt, Reston Ebola virus (REBOV)
cccacagaccaag

SEQ ID NO: 249160 - RNA, 13 nt, Reston Ebola virus (REBOV)
ccgaacaacacag

SEQ ID NO: 249161 - RNA, 19 nt, Reston Ebola virus (REBOV)
cauuuuuacauguguauau

SEQ ID NO: 249162 - RNA, 17 nt, Reston Ebola virus (REBOV)
cauugagcacugcuaau

SEQ ID NO: 249163 - RNA, 21 nt, Reston Ebola virus (REBOV)
cauucgagcuauuauucugcu

SEQ ID NO: 249164 - RNA, 21 nt, Reston Ebola virus (REBOV)
cuccuccagcauauaaugaua

SEQ ID NO: 249165 - RNA, 17 nt, Reston Ebola virus (REBOV)
cugagucccaccaggaa

SEQ ID NO: 249166 - RNA, 16 nt, Reston Ebola virus (REBOV)
cugacuagacaaauua

SEQ ID NO: 249167 - RNA, 18 nt, Reston Ebola virus (REBOV)
cuuauuugaauaugacaa

SEQ ID NO: 249168 - RNA, 15 nt, Reston Ebola virus (REBOV)
cuugaccgauucauc

SEQ ID NO: 249169 - RNA, 13 nt, Reston Ebola virus (REBOV)
cuaauccuaguau

SEQ ID NO: 249170 - RNA, 15 nt, Reston Ebola virus (REBOV)
cuaauccuaguauuu

SEQ ID NO: 249171 - RNA, 21 nt, Reston Ebola virus (REBOV)
cuaaucagagguauaacaaug

SEQ ID NO: 249172 - RNA, 14 nt, Reston Ebola virus (REBOV)
cuaaauacacuuaa

SEQ ID NO: 249173 - RNA, 20 nt, Reston Ebola virus (REBOV)
cucauauuuugaucaaguaa

SEQ ID NO: 249174 - RNA, 21 nt, Reston Ebola virus (REBOV)
cuauuuuuccacgauugcucu

SEQ ID NO: 249175 - RNA, 14 nt, Reston Ebola virus (REBOV)
cuaucgcaauuauc

SEQ ID NO: 249176 - RNA, 21 nt, Reston Ebola virus (REBOV)
cuacaaaaacuaauccauuau

SEQ ID NO: 249177 - RNA, 21 nt, Reston Ebola virus (REBOV)
gaaucaagauuuauuuaacaa

SEQ ID NO: 249178 - RNA, 20 nt, Reston Ebola virus (REBOV)
gaaauuggagauaaauggac

SEQ ID NO: 249179 - RNA, 18 nt, Reston Ebola virus (REBOV)
gaacaacacagcauccau

SEQ ID NO: 249180 - RNA, 21 nt, Reston Ebola virus (REBOV)
gaacaacacagcauccauuga

SEQ ID NO: 249181 - RNA, 19 nt, Reston Ebola virus (REBOV)
gaacagccgaacaacacag

SEQ ID NO: 249182 - RNA, 13 nt, Reston Ebola virus (REBOV)
gaacaaugccuaa

SEQ ID NO: 249183 - RNA, 12 nt, Reston Ebola virus (REBOV)
gaacccaaugac

SEQ ID NO: 249184 - RNA, 16 nt, Reston Ebola virus (REBOV)
aaacuaauccauuaua

SEQ ID NO: 249185 - RNA, 13 nt, Reston Ebola virus (REBOV)
gcaaaccaggaac

SEQ ID NO: 249186 - RNA, 18 nt, Reston Ebola virus (REBOV)
gauuuauuuaacaaggca

SEQ ID NO: 249187 - RNA, 18 nt, Reston Ebola virus (REBOV)
gauuugaacauagucaua

SEQ ID NO: 249188 - RNA, 21 nt, Reston Ebola virus (REBOV)
gauucuuaaaacaaucuacua

SEQ ID NO: 249189 - RNA, 14 nt, Reston Ebola virus (REBOV)
gauucuaaguauau

SEQ ID NO: 249190 - RNA, 15 nt, Reston Ebola virus (REBOV)
gauuaucagcauuuc

SEQ ID NO: 249191 - RNA, 17 nt, Reston Ebola virus (REBOV)
gagacggccaacagcag

SEQ ID NO: 249192 - RNA, 20 nt, Reston Ebola virus (REBOV)
gagaaaugaccccaguuccu

SEQ ID NO: 249193 - RNA, 15 nt, Reston Ebola virus (REBOV)
gcggagcuucuacua

SEQ ID NO: 249194 - RNA, 15 nt, Reston Ebola virus (REBOV)
gcuauuaguuauuac

SEQ ID NO: 249195 - RNA, 12 nt, Reston Ebola virus (REBOV)
gcuaagauuuca

SEQ ID NO: 249196 - RNA, 16 nt, Reston Ebola virus (REBOV)
gcauuucuuaaauggg

SEQ ID NO: 249197 - RNA, 21 nt, Reston Ebola virus (REBOV)
gccccaaguccaaccaugaca

SEQ ID NO: 249198 - RNA, 18 nt, Reston Ebola virus (REBOV)
gguuuagcaaagaauuga

SEQ ID NO: 249199 - RNA, 15 nt, Reston Ebola virus (REBOV)
guaauuuuaaucucc

SEQ ID NO: 249200 - RNA, 18 nt, Reston Ebola virus (REBOV)
ggucuuuuugaaauggag

SEQ ID NO: 249201 - RNA, 17 nt, Reston Ebola virus (REBOV)
ggaguuuuuuaaucuaa

SEQ ID NO: 249202 - RNA, 18 nt, Reston Ebola virus (REBOV)
ggaguuuuuuaaucuaau

SEQ ID NO: 249203 - RNA, 20 nt, Reston Ebola virus (REBOV)
uuuugaaauggagauuauca

SEQ ID NO: 249204 - RNA, 12 nt, Reston Ebola virus (REBOV)
uuuuuuaaucua

SEQ ID NO: 249205 - RNA, 23 nt, Reston Ebola virus (REBOV)
uucuaauccuaguauuuauuaga

SEQ ID NO: 249206 - RNA, 17 nt, Reston Ebola virus (REBOV)
uuccagacuuggcauuu

SEQ ID NO: 249207 - RNA, 16 nt, Reston Ebola virus (REBOV)
uuagaauguacuacca

SEQ ID NO: 249208 - RNA, 21 nt, Reston Ebola virus (REBOV)
uuagauggaaccucagccaga

SEQ ID NO: 249209 - RNA, 17 nt, Reston Ebola virus (REBOV)
uuauuacuuauugauaa

SEQ ID NO: 249210 - RNA, 14 nt, Reston Ebola virus (REBOV)
uuauucugcuagua

SEQ ID NO: 249211 - RNA, 23 nt, Reston Ebola virus (REBOV)
uuauuuaacaaggcaagccacaa

SEQ ID NO: 249212 - RNA, 13 nt, Reston Ebola virus (REBOV)
uuacauguguaua

SEQ ID NO: 249213 - RNA, 20 nt, Reston Ebola virus (REBOV)
uuacgccuagauaacuaaua

SEQ ID NO: 249214 - RNA, 14 nt, Reston Ebola virus (REBOV)
uggaucuacccuau

SEQ ID NO: 249215 - RNA, 19 nt, Reston Ebola virus (REBOV)
uggucuuuuugaaauggag

SEQ ID NO: 249216 - RNA, 20 nt, Reston Ebola virus (REBOV)
uguaaauauaacaagugaug

SEQ ID NO: 249217 - RNA, 15 nt, Reston Ebola virus (REBOV)
ugcucucagucaaua

SEQ ID NO: 249218 - RNA, 15 nt, Reston Ebola virus (REBOV)
uccuaucuuugcuua

SEQ ID NO: 249219 - RNA, 15 nt, Reston Ebola virus (REBOV)
uccauucgagcuauu

SEQ ID NO: 249220 - RNA, 22 nt, Reston Ebola virus (REBOV)
uccagcauauaaugauauugca

SEQ ID NO: 249221 - RNA, 15 nt, Reston Ebola virus (REBOV)
uccagucuugaguaa

SEQ ID NO: 249222 - RNA, 19 nt, Reston Ebola virus (REBOV)
uccagucuugaguaauaau

SEQ ID NO: 249223 - RNA, 17 nt, Reston Ebola virus (REBOV)
uccacgauugcucucag

SEQ ID NO: 249224 - RNA, 19 nt, Reston Ebola virus (REBOV)
ucaccgcgaacccaaugac

SEQ ID NO: 249225 - RNA, 22 nt, Reston Ebola virus (REBOV)
ugaacagccgaacaacacagca

SEQ ID NO: 249226 - RNA, 18 nt, Reston Ebola virus (REBOV)
ugaauugugcagauuuaa

SEQ ID NO: 249227 - RNA, 14 nt, Reston Ebola virus (REBOV)
ugacuugaauguaa

SEQ ID NO: 249228 - RNA, 15 nt, Reston Ebola virus (REBOV)
ucuagaguauacuca

SEQ ID NO: 249229 - RNA, 14 nt, Reston Ebola virus (REBOV)
ucuuaaaacaaucu

SEQ ID NO: 249230 - RNA, 15 nt, Reston Ebola virus (REBOV)
ucugaaugcucuaua

SEQ ID NO: 249231 - RNA, 20 nt, Reston Ebola virus (REBOV)
caaacuuacaaacaugcaca

SEQ ID NO: 249232 - RNA, 15 nt, Reston Ebola virus (REBOV)
caaaacuaaaccaag

SEQ ID NO: 249233 - RNA, 20 nt, Reston Ebola virus (REBOV)
auuuucgcuaauugcauuga

SEQ ID NO: 249234 - RNA, 23 nt, Reston Ebola virus (REBOV)
auuuuaauaacaugucaaugcua

SEQ ID NO: 249235 - RNA, 13 nt, Reston Ebola virus (REBOV)
caaguccaaccau

SEQ ID NO: 249236 - RNA, 20 nt, Reston Ebola virus (REBOV)
augucaaugcuauacuguua

SEQ ID NO: 249237 - RNA, 15 nt, Reston Ebola virus (REBOV)
ccauuuaguaauaau

SEQ ID NO: 249238 - RNA, 12 nt, Reston Ebola virus (REBOV)
cccacagaccaa

SEQ ID NO: 249239 - RNA, 21 nt, Reston Ebola virus (REBOV)
ccagucaaaacuaaaccaagc

SEQ ID NO: 249240 - RNA, 21 nt, Reston Ebola virus (REBOV)
ccaacggagagacaaucacag

SEQ ID NO: 249241 - RNA, 12 nt, Reston Ebola virus (REBOV)
ccaaccaugaca

SEQ ID NO: 249242 - RNA, 21 nt, Reston Ebola virus (REBOV)
cagaagagaaguucaacccag

SEQ ID NO: 249243 - RNA, 16 nt, Reston Ebola virus (REBOV)
cagcccggacucacua

SEQ ID NO: 249244 - RNA, 14 nt, Reston Ebola virus (REBOV)
cagacuauugaacu

SEQ ID NO: 249245 - RNA, 18 nt, Reston Ebola virus (REBOV)
acgacuucggugugcaau

SEQ ID NO: 249246 - RNA, 20 nt, Reston Ebola virus (REBOV)
accaagucagcccggacuca

SEQ ID NO: 249247 - RNA, 19 nt, Reston Ebola virus (REBOV)
acuauugggcggcuuccau

SEQ ID NO: 249248 - RNA, 17 nt, Reston Ebola virus (REBOV)
acacaucauaacuuuau

SEQ ID NO: 249249 - RNA, 18 nt, Reston Ebola virus (REBOV)
acacaucauaacuuuaua

SEQ ID NO: 249250 - RNA, 22 nt, Reston Ebola virus (REBOV)
acaucgggauagaacaaugccu

SEQ ID NO: 249251 - RNA, 23 nt, Reston Ebola virus (REBOV)
acaagauguuaugguuuagcaaa

SEQ ID NO: 249252 - RNA, 23 nt, Reston Ebola virus (REBOV)
acaacauccccgaugacccagga

SEQ ID NO: 249253 - RNA, 22 nt, Reston Ebola virus (REBOV)
acaagugaugaagauuaagaaa

SEQ ID NO: 249254 - RNA, 16 nt, Reston Ebola virus (REBOV)
acaauguaccaaguga

SEQ ID NO: 249255 - RNA, 18 nt, Reston Ebola virus (REBOV)
acaauggcuaagauuuca

SEQ ID NO: 249256 - RNA, 20 nt, Reston Ebola virus (REBOV)
agaucauuccaaacuuacaa

SEQ ID NO: 249257 - RNA, 20 nt, Reston Ebola virus (REBOV)
agauaaugauaauuccugac

SEQ ID NO: 249258 - RNA, 18 nt, Reston Ebola virus (REBOV)
agaguuuaaguaauauac

SEQ ID NO: 249259 - RNA, 14 nt, Reston Ebola virus (REBOV)
agcaauauucugaa

SEQ ID NO: 249260 - RNA, 13 nt, Reston Ebola virus (REBOV)
aggauuauguaga

SEQ ID NO: 249261 - RNA, 15 nt, Reston Ebola virus (REBOV)
agcuaaauacacuua

SEQ ID NO: 249262 - RNA, 20 nt, Reston Ebola virus (REBOV)
agucaaaacuaaaccaagca

SEQ ID NO: 249263 - RNA, 15 nt, Reston Ebola virus (REBOV)
agucccaccaggaaa

SEQ ID NO: 249264 - RNA, 15 nt, Reston Ebola virus (REBOV)
aguaauuuuaaucuc

SEQ ID NO: 249265 - RNA, 23 nt, Reston Ebola virus (REBOV)
agguggucuuuuugaaauggaga

SEQ ID NO: 249266 - RNA, 13 nt, Reston Ebola virus (REBOV)
agucuauucuaau

SEQ ID NO: 249267 - RNA, 16 nt, Reston Ebola virus (REBOV)
aguuuauuagguuuau

SEQ ID NO: 249268 - RNA, 20 nt, Reston Ebola virus (REBOV)
auaucggaagagaguaugcc

SEQ ID NO: 249269 - RNA, 22 nt, Reston Ebola virus (REBOV)
auaauguaaauauaacaaguga

SEQ ID NO: 249270 - RNA, 17 nt, Reston Ebola virus (REBOV)
auaaugauuguguguau

SEQ ID NO: 249271 - RNA, 13 nt, Reston Ebola virus (REBOV)
auaauacuuuaua

SEQ ID NO: 249272 - RNA, 17 nt, Reston Ebola virus (REBOV)
cgacuucggugugcaau

SEQ ID NO: 249273 - RNA, 15 nt, Reston Ebola virus (REBOV)
cgcagccggaccaag

SEQ ID NO: 249274 - RNA, 17 nt, Reston Ebola virus (REBOV)
cgcccagagcccacaga

SEQ ID NO: 249275 - RNA, 20 nt, Reston Ebola virus (REBOV)
cguaugucuagcaaauuauc

SEQ ID NO: 249276 - RNA, 20 nt, Reston Ebola virus (REBOV)
cugaugucaccauauccaaa

SEQ ID NO: 249277 - RNA, 17 nt, Reston Ebola virus (REBOV)
cugauuguggauugacc

SEQ ID NO: 249278 - RNA, 15 nt, Reston Ebola virus (REBOV)
cucucagucaauaaa

SEQ ID NO: 249279 - RNA, 17 nt, Reston Ebola virus (REBOV)
cuagcaaauuaucaaua

SEQ ID NO: 249280 - RNA, 13 nt, Reston Ebola virus (REBOV)
cuaucuuugcuua

SEQ ID NO: 249281 - RNA, 18 nt, Reston Ebola virus (REBOV)
cuaucugcaguaaccaga

SEQ ID NO: 249282 - RNA, 15 nt, Reston Ebola virus (REBOV)
gagucccaccaggaa

SEQ ID NO: 249283 - RNA, 13 nt, Reston Ebola virus (REBOV)
gagauaaauggac

SEQ ID NO: 249284 - RNA, 16 nt, Reston Ebola virus (REBOV)
gagacaaucacagguu

SEQ ID NO: 249285 - RNA, 15 nt, Reston Ebola virus (REBOV)
gagacggccaacagc

SEQ ID NO: 249286 - RNA, 17 nt, Reston Ebola virus (REBOV)
gaucaaguaaucaugau

SEQ ID NO: 249287 - RNA, 13 nt, Reston Ebola virus (REBOV)
gcaaauuaucaau

SEQ ID NO: 249288 - RNA, 20 nt, Reston Ebola virus (REBOV)
gcaagcaacgagacaauuua

SEQ ID NO: 249289 - RNA, 14 nt, Reston Ebola virus (REBOV)
gauucuuaaucuaa

SEQ ID NO: 249290 - RNA, 14 nt, Reston Ebola virus (REBOV)
gauuguagacaauu

SEQ ID NO: 249291 - RNA, 18 nt, Reston Ebola virus (REBOV)
gaagauuaaaaccuucau

SEQ ID NO: 249292 - RNA, 22 nt, Reston Ebola virus (REBOV)
gaacaacacagcauccauugaa

SEQ ID NO: 249293 - RNA, 14 nt, Reston Ebola virus (REBOV)
cuuuucagauuauc

SEQ ID NO: 249294 - RNA, 18 nt, Reston Ebola virus (REBOV)
ggucuuauuugaauauga

SEQ ID NO: 249295 - RNA, 15 nt, Reston Ebola virus (REBOV)
guaaucaugauuuua

SEQ ID NO: 249296 - RNA, 17 nt, Reston Ebola virus (REBOV)
guaaucaugauuuuaug

SEQ ID NO: 249297 - RNA, 17 nt, Reston Ebola virus (REBOV)
gggaggaguuagcaauc

SEQ ID NO: 249298 - RNA, 16 nt, Reston Ebola virus (REBOV)
gggaucaauagacuaa

SEQ ID NO: 249299 - RNA, 18 nt, Reston Ebola virus (REBOV)
ggccaacagcagcaaacc

SEQ ID NO: 249300 - RNA, 23 nt, Reston Ebola virus (REBOV)
ggccaacagcagcaaaccaggaa

SEQ ID NO: 249301 - RNA, 12 nt, Reston Ebola virus (REBOV)
gcagcaaaccag

SEQ ID NO: 249302 - RNA, 22 nt, Reston Ebola virus (REBOV)
uaaaaccuucaucgccaguaaa

SEQ ID NO: 249303 - RNA, 21 nt, Reston Ebola virus (REBOV)
uaaauucuccuaaccucauau

SEQ ID NO: 249304 - RNA, 18 nt, Reston Ebola virus (REBOV)
uaacaagugaugaagauu

SEQ ID NO: 249305 - RNA, 15 nt, Reston Ebola virus (REBOV)
guuaacaaucgcuag

SEQ ID NO: 249306 - RNA, 18 nt, Reston Ebola virus (REBOV)
guuacacagugaguauua

SEQ ID NO: 249307 - RNA, 14 nt, Reston Ebola virus (REBOV)
uaauuuuaaucucc

SEQ ID NO: 249308 - RNA, 17 nt, Reston Ebola virus (REBOV)
uacacagugaguauuag

SEQ ID NO: 249309 - RNA, 23 nt, Reston Ebola virus (REBOV)
uaacuuaucggugcgagauuucc

SEQ ID NO: 249310 - RNA, 13 nt, Reston Ebola virus (REBOV)
uacauguguauau

SEQ ID NO: 249311 - RNA, 23 nt, Reston Ebola virus (REBOV)
uacaugaaugagaauuaguugug

SEQ ID NO: 249312 - RNA, 15 nt, Reston Ebola virus (REBOV)
uacuaucugcaguaa

SEQ ID NO: 249313 - RNA, 18 nt, Reston Ebola virus (REBOV)
uacuaucugcaguaacca

SEQ ID NO: 249314 - RNA, 23 nt, Reston Ebola virus (REBOV)
uagauagguaaucuaacacugaa

SEQ ID NO: 249315 - RNA, 15 nt, Reston Ebola virus (REBOV)
uagcaaagaauugau

SEQ ID NO: 249316 - RNA, 23 nt, Reston Ebola virus (REBOV)
uagucauaaggggauaaauaaua

SEQ ID NO: 249317 - RNA, 14 nt, Reston Ebola virus (REBOV)
uagugcuacuuuuc

SEQ ID NO: 249318 - RNA, 19 nt, Reston Ebola virus (REBOV)
uauagucuauucuaaucag

SEQ ID NO: 249319 - RNA, 15 nt, Reston Ebola virus (REBOV)
uauauaauguaaaua

SEQ ID NO: 249320 - RNA, 14 nt, Reston Ebola virus (REBOV)
aaaacaaucuacua

SEQ ID NO: 249321 - RNA, 17 nt, Reston Ebola virus (REBOV)
aaagauuuagaguguau

SEQ ID NO: 249322 - RNA, 23 nt, Reston Ebola virus (REBOV)
aaaagaaucaagcagaggcaaca

SEQ ID NO: 249323 - RNA, 12 nt, Reston Ebola virus (REBOV)
aaagcuaaauac

SEQ ID NO: 249324 - RNA, 19 nt, Reston Ebola virus (REBOV)
aaauuggagauaaauggac

SEQ ID NO: 249325 - RNA, 18 nt, Reston Ebola virus (REBOV)
aaccuucaucgccaguaa

SEQ ID NO: 249326 - RNA, 21 nt, Reston Ebola virus (REBOV)
aaccuuagauggaaccucagc

SEQ ID NO: 249327 - RNA, 18 nt, Reston Ebola virus (REBOV)
aaugcuucgcccauugaa

SEQ ID NO: 249328 - RNA, 17 nt, Reston Ebola virus (REBOV)
aauggcuaagauuucaa

SEQ ID NO: 249329 - RNA, 18 nt, Reston Ebola virus (REBOV)
aaucuaauuuuccagucu

SEQ ID NO: 249330 - RNA, 22 nt, Reston Ebola virus (REBOV)
aauagauagcccugacuagaca

SEQ ID NO: 249331 - RNA, 21 nt, Reston Ebola virus (REBOV)
aauugcauugagcacugcuaa

SEQ ID NO: 249332 - RNA, 23 nt, Reston Ebola virus (REBOV)
aauuaguugugggucuuaucuag

SEQ ID NO: 249333 - RNA, 17 nt, Reston Ebola virus (REBOV)
aagugauucuuaaucua

SEQ ID NO: 249334 - RNA, 13 nt, Reston Ebola virus (REBOV)
aagucagcccgga

SEQ ID NO: 249335 - RNA, 14 nt, Reston Ebola virus (REBOV)
aaguccaaccauga

SEQ ID NO: 249336 - RNA, 22 nt, Reston Ebola virus (REBOV)
aauacgacuucggugugcaauu

SEQ ID NO: 249337 - RNA, 14 nt, Reston Ebola virus (REBOV)
acaacacagcaucc

SEQ ID NO: 249338 - RNA, 18 nt, Reston Ebola virus (REBOV)
agaccacgccagcaccca

SEQ ID NO: 249339 - RNA, 18 nt, Reston Ebola virus (REBOV)
agagcccacagaccaaga

SEQ ID NO: 249340 - RNA, 24 nt, Reston Ebola virus (REBOV)
agaguuuaaguaauauacauauac

SEQ ID NO: 249341 - RNA, 14 nt, Reston Ebola virus (REBOV)
agaauacacuuuau

SEQ ID NO: 249342 - RNA, 15 nt, Reston Ebola virus (REBOV)
agaauacacuuuauc

SEQ ID NO: 249343 - RNA, 16 nt, Reston Ebola virus (REBOV)
acuucggugugcaauu

SEQ ID NO: 249344 - RNA, 14 nt, Reston Ebola virus (REBOV)
auacauauacacuu

SEQ ID NO: 249345 - RNA, 15 nt, Reston Ebola virus (REBOV)
auacauauacacuua

SEQ ID NO: 249346 - RNA, 14 nt, Reston Ebola virus (REBOV)
auagaacaaugccu

SEQ ID NO: 249347 - RNA, 21 nt, Reston Ebola virus (REBOV)
auagaauuauaaaagaaucaa

SEQ ID NO: 249348 - RNA, 19 nt, Reston Ebola virus (REBOV)
agucuugaguaauaaucau

SEQ ID NO: 249349 - RNA, 19 nt, Reston Ebola virus (REBOV)
aucuacaaaaacuaaucca

SEQ ID NO: 249350 - RNA, 18 nt, Reston Ebola virus (REBOV)
auccaaauguugugcuag

SEQ ID NO: 249351 - RNA, 14 nt, Reston Ebola virus (REBOV)
aucauaacuuuaua

SEQ ID NO: 249352 - RNA, 22 nt, Reston Ebola virus (REBOV)
agcauuguugaguuaacuaucu

SEQ ID NO: 249353 - RNA, 14 nt, Reston Ebola virus (REBOV)
agcccggacucacu

SEQ ID NO: 249354 - RNA, 17 nt, Reston Ebola virus (REBOV)
aguccaaccaugacaag

SEQ ID NO: 249355 - RNA, 14 nt, Reston Ebola virus (REBOV)
agucccaccaggaa

SEQ ID NO: 249356 - RNA, 18 nt, Reston Ebola virus (REBOV)
agucaaaacuaaaccaag

SEQ ID NO: 249357 - RNA, 17 nt, Reston Ebola virus (REBOV)
agguauuuugucuagag

SEQ ID NO: 249358 - RNA, 18 nt, Reston Ebola virus (REBOV)
agguaaucuaacacugaa

SEQ ID NO: 249359 - RNA, 17 nt, Reston Ebola virus (REBOV)
agguaacaagcuauuag

SEQ ID NO: 249360 - RNA, 16 nt, Reston Ebola virus (REBOV)
aguaauugaggauuau

SEQ ID NO: 249361 - RNA, 18 nt, Reston Ebola virus (REBOV)
aguaagguagcugauuca

SEQ ID NO: 249362 - RNA, 12 nt, Reston Ebola virus (REBOV)
agcugauucacu

SEQ ID NO: 249363 - RNA, 14 nt, Reston Ebola virus (REBOV)
cacccacaacaucc

SEQ ID NO: 249364 - RNA, 13 nt, Reston Ebola virus (REBOV)
caccauauccaaa

SEQ ID NO: 249365 - RNA, 13 nt, Reston Ebola virus (REBOV)
cacagaccaagac

SEQ ID NO: 249366 - RNA, 15 nt, Reston Ebola virus (REBOV)
caauguaccaaguga

SEQ ID NO: 249367 - RNA, 15 nt, Reston Ebola virus (REBOV)
cacguuaaagauuua

SEQ ID NO: 249368 - RNA, 23 nt, Reston Ebola virus (REBOV)
caaauuaagaaaaacauuugaug

SEQ ID NO: 249369 - RNA, 12 nt, Reston Ebola virus (REBOV)
caauauucugaa

SEQ ID NO: 249370 - RNA, 18 nt, Reston Ebola virus (REBOV)
caauauucugaaugcucu

SEQ ID NO: 249371 - RNA, 21 nt, Reston Ebola virus (REBOV)
caagcagaggcaacagacuca

SEQ ID NO: 249372 - RNA, 14 nt, Reston Ebola virus (REBOV)
auuuuuacaugugu

SEQ ID NO: 249373 - RNA, 23 nt, Reston Ebola virus (REBOV)
auuuugucuagaguauacucaaa

SEQ ID NO: 249374 - RNA, 19 nt, Reston Ebola virus (REBOV)
auuauaaaagaaucaagca

SEQ ID NO: 249375 - RNA, 17 nt, Reston Ebola virus (REBOV)
auucuaaucagagguau

SEQ ID NO: 249376 - RNA, 17 nt, Reston Ebola virus (REBOV)
auugcucucagucaaua

SEQ ID NO: 249377 - RNA, 19 nt, Reston Ebola virus (REBOV)
auguguauauaaccaaucu

SEQ ID NO: 249378 - RNA, 15 nt, Reston Ebola virus (REBOV)
augucuagcaaauua

SEQ ID NO: 249379 - RNA, 19 nt, Reston Ebola virus (REBOV)
auguaccaagugaacagcc

SEQ ID NO: 249380 - RNA, 22 nt, Reston Ebola virus (REBOV)
auggucuuauuugaauaugaca

SEQ ID NO: 249381 - RNA, 15 nt, Reston Ebola virus (REBOV)
auggcuaagauuuca

SEQ ID NO: 249382 - RNA, 18 nt, Reston Ebola virus (REBOV)
aaacauuugaugaagauu

SEQ ID NO: 249383 - RNA, 20 nt, Reston Ebola virus (REBOV)
aaaccaggaaccagcccagg

SEQ ID NO: 249384 - RNA, 18 nt, Reston Ebola virus (REBOV)
cgcagccggaccaaguca

SEQ ID NO: 249385 - RNA, 20 nt, Reston Ebola virus (REBOV)
cgcccagagcccacagacca

SEQ ID NO: 249386 - RNA, 19 nt, Reston Ebola virus (REBOV)
cgcccauugaaaaugugau

SEQ ID NO: 249387 - RNA, 17 nt, Reston Ebola virus (REBOV)
cgccuagauaacuaaua

SEQ ID NO: 249388 - RNA, 19 nt, Reston Ebola virus (REBOV)
cggaagagaguaugccaau

SEQ ID NO: 249389 - RNA, 14 nt, Reston Ebola virus (REBOV)
cucuauagucuauu

SEQ ID NO: 249390 - RNA, 22 nt, Reston Ebola virus (REBOV)
cccccaucggcaagcaacgaga

SEQ ID NO: 249391 - RNA, 22 nt, Reston Ebola virus (REBOV)
cccgcaagagacggccaacagc

SEQ ID NO: 249392 - RNA, 16 nt, Reston Ebola virus (REBOV)
ccaguaaaugauuaua

SEQ ID NO: 249393 - RNA, 16 nt, Reston Ebola virus (REBOV)
ccauuauaacuuauua

SEQ ID NO: 249394 - RNA, 19 nt, Reston Ebola virus (REBOV)
ccaaggcucgaacaacucc

SEQ ID NO: 249395 - RNA, 20 nt, Reston Ebola virus (REBOV)
cauuucuuuuguaauuaauu

SEQ ID NO: 249396 - RNA, 16 nt, Reston Ebola virus (REBOV)
caugucaaugcuauac

SEQ ID NO: 249397 - RNA, 13 nt, Reston Ebola virus (REBOV)
cauauacacuuac

SEQ ID NO: 249398 - RNA, 15 nt, Reston Ebola virus (REBOV)
caguaaaugauuaua

SEQ ID NO: 249399 - RNA, 22 nt, Reston Ebola virus (REBOV)
cuuugcuuauauugguguaacu

SEQ ID NO: 249400 - RNA, 13 nt, Reston Ebola virus (REBOV)
cuuaauuguuaga

SEQ ID NO: 249401 - RNA, 14 nt, Reston Ebola virus (REBOV)
gaaaaugugaucua

SEQ ID NO: 249402 - RNA, 15 nt, Reston Ebola virus (REBOV)
gaaaaugugaucuaa

SEQ ID NO: 249403 - RNA, 14 nt, Reston Ebola virus (REBOV)
gaaaaaaucaugau

SEQ ID NO: 249404 - RNA, 18 nt, Reston Ebola virus (REBOV)
gaaaaaaucaugauugua

SEQ ID NO: 249405 - RNA, 19 nt, Reston Ebola virus (REBOV)
gaauuggaagaucauucca

SEQ ID NO: 249406 - RNA, 20 nt, Reston Ebola virus (REBOV)
aaacuuggguuuugccuuau

SEQ ID NO: 249407 - RNA, 13 nt, Reston Ebola virus (REBOV)
gaaauggagauua

SEQ ID NO: 249408 - RNA, 21 nt, Reston Ebola virus (REBOV)
gauagguaaucuaacacugaa

SEQ ID NO: 249409 - RNA, 17 nt, Reston Ebola virus (REBOV)
gauaaauaauacuuuau

SEQ ID NO: 249410 - RNA, 14 nt, Reston Ebola virus (REBOV)
gaguuuaaguaaua

SEQ ID NO: 249411 - RNA, 18 nt, Reston Ebola virus (REBOV)
gaguugguuacacaguga

SEQ ID NO: 249412 - RNA, 19 nt, Reston Ebola virus (REBOV)
gaguugguuacacagugag

SEQ ID NO: 249413 - RNA, 13 nt, Reston Ebola virus (REBOV)
gaguauacucaaa

SEQ ID NO: 249414 - RNA, 14 nt, Reston Ebola virus (REBOV)
gagcuucuacuauc

SEQ ID NO: 249415 - RNA, 21 nt, Reston Ebola virus (REBOV)
aaauuaagaaaaacauuugau

SEQ ID NO: 249416 - RNA, 13 nt, Reston Ebola virus (REBOV)
gggauaaauaaua

SEQ ID NO: 249417 - RNA, 16 nt, Reston Ebola virus (REBOV)
gcuuacgccuagauaa

SEQ ID NO: 249418 - RNA, 18 nt, Reston Ebola virus (REBOV)
gcuaguaauuuuaaucuc

SEQ ID NO: 249419 - RNA, 20 nt, Reston Ebola virus (REBOV)
ucaucuucuaaagugagaua

SEQ ID NO: 249420 - RNA, 19 nt, Reston Ebola virus (REBOV)
ucaucuacaaaaacuaauc

SEQ ID NO: 249421 - RNA, 22 nt, Reston Ebola virus (REBOV)
ucgagcuauuauucugcuagua

SEQ ID NO: 249422 - RNA, 22 nt, Reston Ebola virus (REBOV)
ucuauaagugauucuuaaucua

SEQ ID NO: 249423 - RNA, 18 nt, Reston Ebola virus (REBOV)
ucuacaaaaacuaaucca

SEQ ID NO: 249424 - RNA, 14 nt, Reston Ebola virus (REBOV)
ucuuaaucuaaggc

SEQ ID NO: 249425 - RNA, 14 nt, Reston Ebola virus (REBOV)
ucuuugaauuggaa

SEQ ID NO: 249426 - RNA, 18 nt, Reston Ebola virus (REBOV)
ucuuauuugaauaugaca

SEQ ID NO: 249427 - RNA, 20 nt, Reston Ebola virus (REBOV)
ucaccgcgaacccaaugaca

SEQ ID NO: 249428 - RNA, 17 nt, Reston Ebola virus (REBOV)
uauuaagaaaaaaucau

SEQ ID NO: 249429 - RNA, 23 nt, Reston Ebola virus (REBOV)
uauuaaggaguuuuuuaaucuaa

SEQ ID NO: 249430 - RNA, 17 nt, Reston Ebola virus (REBOV)
uaucugcaguaaccaga

SEQ ID NO: 249431 - RNA, 12 nt, Reston Ebola virus (REBOV)
uaucagcauuuc

SEQ ID NO: 249432 - RNA, 14 nt, Reston Ebola virus (REBOV)
uaugaauugugcag

SEQ ID NO: 249433 - RNA, 14 nt, Reston Ebola virus (REBOV)
uauauugguguaac

SEQ ID NO: 249434 - RNA, 17 nt, Reston Ebola virus (REBOV)
guauccaaguuuaugaa

SEQ ID NO: 249435 - RNA, 21 nt, Reston Ebola virus (REBOV)
guaugucuagcaaauuaucaa

SEQ ID NO: 249436 - RNA, 18 nt, Reston Ebola virus (REBOV)
guagacaauuuacuggua

SEQ ID NO: 249437 - RNA, 19 nt, Reston Ebola virus (REBOV)
guuacacagugaguauuag

SEQ ID NO: 249438 - RNA, 14 nt, Reston Ebola virus (REBOV)
gugcaauugucaag

SEQ ID NO: 249439 - RNA, 14 nt, Reston Ebola virus (REBOV)
gucccaccaggaaa

SEQ ID NO: 249440 - RNA, 16 nt, Reston Ebola virus (REBOV)
gucccaccaggaaaca

SEQ ID NO: 249441 - RNA, 16 nt, Reston Ebola virus (REBOV)
gucuuaucuagcauug

SEQ ID NO: 249442 - RNA, 16 nt, Reston Ebola virus (REBOV)
uaagacuugaccgauu

SEQ ID NO: 249443 - RNA, 17 nt, Reston Ebola virus (REBOV)
uaagaguuuaaguaaua

SEQ ID NO: 249444 - RNA, 16 nt, Reston Ebola virus (REBOV)
uaacuaucuaaucuau

SEQ ID NO: 249445 - RNA, 15 nt, Reston Ebola virus (REBOV)
guucuugauuugaac

SEQ ID NO: 249446 - RNA, 19 nt, Reston Ebola virus (REBOV)
uaaacuuggguuuugccuu

SEQ ID NO: 249447 - RNA, 20 nt, Reston Ebola virus (REBOV)
uaaacuuggguuuugccuua

SEQ ID NO: 249448 - RNA, 22 nt, Reston Ebola virus (REBOV)
uaaauaauacuuuauauuucug

SEQ ID NO: 249449 - RNA, 16 nt, Reston Ebola virus (REBOV)
uaauugcauugagcac

SEQ ID NO: 249450 - RNA, 18 nt, Reston Ebola virus (REBOV)
uaauuccgacgggaucaa

SEQ ID NO: 249451 - RNA, 15 nt, Reston Ebola virus (REBOV)
uacauauacacuuac

SEQ ID NO: 249452 - RNA, 19 nt, Reston Ebola virus (REBOV)
uacgccuagauaacuaaua

SEQ ID NO: 249453 - RNA, 22 nt, Reston Ebola virus (REBOV)
aacuuaucggugcgagauuucc

SEQ ID NO: 249454 - RNA, 23 nt, Reston Ebola virus (REBOV)
aacuuaucggugcgagauuuccu

SEQ ID NO: 249455 - RNA, 19 nt, Reston Ebola virus (REBOV)
aacuuggguuuugccuuau

SEQ ID NO: 249456 - RNA, 21 nt, Reston Ebola virus (REBOV)
aagagaaguucaacccaguca

SEQ ID NO: 249457 - RNA, 17 nt, Reston Ebola virus (REBOV)
aagaguuuaaguaauau

SEQ ID NO: 249458 - RNA, 24 nt, Reston Ebola virus (REBOV)
aagugaacagccgaacaacacagc

SEQ ID NO: 249459 - RNA, 16 nt, Reston Ebola virus (REBOV)
aaucaagcagaggcaa

SEQ ID NO: 249460 - RNA, 16 nt, Reston Ebola virus (REBOV)
uugaacauagucauaa

SEQ ID NO: 249461 - RNA, 13 nt, Reston Ebola virus (REBOV)
uugaaaaugugau

SEQ ID NO: 249462 - RNA, 16 nt, Reston Ebola virus (REBOV)
uuggaagaucauucca

SEQ ID NO: 249463 - RNA, 12 nt, Reston Ebola virus (REBOV)
uugguaucugag

SEQ ID NO: 249464 - RNA, 21 nt, Reston Ebola virus (REBOV)
uuuauuaagaaaaaaucauga

SEQ ID NO: 249465 - RNA, 14 nt, Reston Ebola virus (REBOV)
ugcaguaaccagaa

SEQ ID NO: 249466 - RNA, 13 nt, Reston Ebola virus (REBOV)
ugaucaaguaauc

SEQ ID NO: 249467 - RNA, 23 nt, Reston Ebola virus (REBOV)
ugauuugaacauagucauaaggg

SEQ ID NO: 249468 - RNA, 13 nt, Reston Ebola virus (REBOV)
ugaguuaacuauc

SEQ ID NO: 249469 - RNA, 21 nt, Reston Ebola virus (REBOV)
ugaguuaacuaucuaaucuau

SEQ ID NO: 249470 - RNA, 15 nt, Reston Ebola virus (REBOV)
ugagucccaccagga

SEQ ID NO: 249471 - RNA, 21 nt, Reston Ebola virus (REBOV)
ugaggaauaagauaaugauaa

SEQ ID NO: 249472 - RNA, 15 nt, Reston Ebola virus (REBOV)
uggucuuauuugaau

SEQ ID NO: 249473 - RNA, 14 nt, Reston Ebola virus (REBOV)
ugugcaauugucaa

SEQ ID NO: 249474 - RNA, 19 nt, Rous sarcoma virus
uguuuugcccuuagacuau

SEQ ID NO: 249475 - RNA, 20 nt, Rous sarcoma virus
ugaguuagcaauaugccuua

SEQ ID NO: 249476 - RNA, 23 nt, Rous sarcoma virus
ugcaauacuccuguagucuugca

SEQ ID NO: 249477 - RNA, 18 nt, Rous sarcoma virus
ugcauagggagggggaaa

SEQ ID NO: 249478 - RNA, 23 nt, Rous sarcoma virus
uuggacgaaccacugaauuccgc

SEQ ID NO: 249479 - RNA, 12 nt, Rous sarcoma virus
aagcagaaggcu

SEQ ID NO: 249480 - RNA, 18 nt, Rous sarcoma virus
aacgaugaguuagcaaua

SEQ ID NO: 249481 - RNA, 19 nt, Rous sarcoma virus
aacgaugaguuagcaauau

SEQ ID NO: 249482 - RNA, 20 nt, Rous sarcoma virus
aacgaugaguuagcaauaug

SEQ ID NO: 249483 - RNA, 16 nt, Rous sarcoma virus
uacgaucgugccuuau

SEQ ID NO: 249484 - RNA, 18 nt, Rous sarcoma virus
uacuccuguagucuugca

SEQ ID NO: 249485 - RNA, 19 nt, Rous sarcoma virus
uacaaggaaagaaaaggca

SEQ ID NO: 249486 - RNA, 21 nt, Rous sarcoma virus
gucuugcaacaugcuuaugua

SEQ ID NO: 249487 - RNA, 18 nt, Rous sarcoma virus
uauuuaagugccuagcuc

SEQ ID NO: 249488 - RNA, 17 nt, Rous sarcoma virus
ucccuguuuugcccuua

SEQ ID NO: 249489 - RNA, 13 nt, Rous sarcoma virus
ggacaauucugcu

SEQ ID NO: 249490 - RNA, 22 nt, Rous sarcoma virus
ggacgaaccacugaauuccgca

SEQ ID NO: 249491 - RNA, 18 nt, Rous sarcoma virus
gcaauacuccuguagucu

SEQ ID NO: 249492 - RNA, 14 nt, Rous sarcoma virus
gcagaaggcuucau

SEQ ID NO: 249493 - RNA, 20 nt, Rous sarcoma virus
gccggaccgucgauucccua

SEQ ID NO: 249494 - RNA, 23 nt, Rous sarcoma virus
aaauuguuuagcauuaggcgucc

SEQ ID NO: 249495 - RNA, 15 nt, Rous sarcoma virus
aaauacgcuuuugca

SEQ ID NO: 249496 - RNA, 18 nt, Rous sarcoma virus
gaguuagcaauaugccuu

SEQ ID NO: 249497 - RNA, 15 nt, Rous sarcoma virus
gauagucugauggcc

SEQ ID NO: 249498 - RNA, 23 nt, Rous sarcoma virus
gagauauuguauuuaagugccua

SEQ ID NO: 249499 - RNA, 16 nt, Rous sarcoma virus
gaaauacgcuuuugca

SEQ ID NO: 249500 - RNA, 20 nt, Rous sarcoma virus
gaaugaagcagaaggcuuca

SEQ ID NO: 249501 - RNA, 15 nt, Rous sarcoma virus
gaaaaggcaccgugc

SEQ ID NO: 249502 - RNA, 22 nt, Rous sarcoma virus
cauuaggcguccugcguugcuc

SEQ ID NO: 249503 - RNA, 15 nt, Rous sarcoma virus
ccauuuuaccauuca

SEQ ID NO: 249504 - RNA, 15 nt, Rous sarcoma virus
cccucaggacaauuc

SEQ ID NO: 249505 - RNA, 15 nt, Rous sarcoma virus
cuccuguagucuugc

SEQ ID NO: 249506 - RNA, 14 nt, Rous sarcoma virus
cucaggacaauucu

SEQ ID NO: 249507 - RNA, 20 nt, Rous sarcoma virus
cuguuuugcccuuagacuau

SEQ ID NO: 249508 - RNA, 17 nt, Rous sarcoma virus
cguccugcguugcuccg

SEQ ID NO: 249509 - RNA, 14 nt, Rous sarcoma virus
ccuuagacuauucg

SEQ ID NO: 249510 - RNA, 12 nt, Rous sarcoma virus
ccuguuuugccc

SEQ ID NO: 249511 - RNA, 16 nt, Rous sarcoma virus
augugcaguuugacug

SEQ ID NO: 249512 - RNA, 23 nt, Rous sarcoma virus
auugcucaaauaaugcuucugua

SEQ ID NO: 249513 - RNA, 17 nt, Rous sarcoma virus
auuggacgaaccacuga

SEQ ID NO: 249514 - RNA, 14 nt, Rous sarcoma virus
auuaggaagguauc

SEQ ID NO: 249515 - RNA, 23 nt, Rous sarcoma virus
auuagggcuggaggcagcacgga

SEQ ID NO: 249516 - RNA, 13 nt, Rous sarcoma virus
caauaugccuuac

SEQ ID NO: 249517 - RNA, 20 nt, Rous sarcoma virus
caauaaacgccauuuuacca

SEQ ID NO: 249518 - RNA, 19 nt, Rous sarcoma virus
caauacuccuguagucuug

SEQ ID NO: 249519 - RNA, 15 nt, Rous sarcoma virus
caacaugcuuaugua

SEQ ID NO: 249520 - RNA, 12 nt, Rous sarcoma virus
aggcaccgugca

SEQ ID NO: 249521 - RNA, 19 nt, Rous sarcoma virus
aggggaccaugauguguau

SEQ ID NO: 249522 - RNA, 15 nt, Rous sarcoma virus
agcucgauacaauaa

SEQ ID NO: 249523 - RNA, 14 nt, Rous sarcoma virus
agucugauggccaa

SEQ ID NO: 249524 - RNA, 19 nt, Rous sarcoma virus
auaaggcaggcaagacagc

SEQ ID NO: 249525 - RNA, 19 nt, Rous sarcoma virus
agaaaaggcaccgugcaug

SEQ ID NO: 249526 - RNA, 23 nt, Rous sarcoma virus
accuacaauugcucaaauaaugc

SEQ ID NO: 249527 - RNA, 20 nt, Rous sarcoma virus
aauacuccuguagucuugca

SEQ ID NO: 249528 - RNA, 23 nt, Rous sarcoma virus
aagugccuagcucgauacaauaa

SEQ ID NO: 249529 - RNA, 13 nt, Rous sarcoma virus
aaugugcaguuug

SEQ ID NO: 249530 - RNA, 15 nt, Rous sarcoma virus
aaugcuucuguagaa

SEQ ID NO: 249531 - RNA, 15 nt, Rous sarcoma virus
uagucuuaugcaaua

SEQ ID NO: 249532 - RNA, 23 nt, Rous sarcoma virus
uaaggcaggcaagacagcuauuu

SEQ ID NO: 249533 - RNA, 16 nt, Rous sarcoma virus
guacgaucgugccuua

SEQ ID NO: 249534 - RNA, 14 nt, Rous sarcoma virus
guauuuaagugccu

SEQ ID NO: 249535 - RNA, 15 nt, Rous sarcoma virus
guagucuuaugcaau

SEQ ID NO: 249536 - RNA, 16 nt, Rous sarcoma virus
guacgcggauaggaau

SEQ ID NO: 249537 - RNA, 19 nt, Rous sarcoma virus
ggucagguauaaugugcag

SEQ ID NO: 249538 - RNA, 14 nt, Rous sarcoma virus
gaaauguagucuua

SEQ ID NO: 249539 - RNA, 21 nt, Rous sarcoma virus
gaaauguagucuuaugcaaua

SEQ ID NO: 249540 - RNA, 13 nt, Rous sarcoma virus
gaauaugauggcg

SEQ ID NO: 249541 - RNA, 14 nt, Rous sarcoma virus
gcaauaugccuuac

SEQ ID NO: 249542 - RNA, 19 nt, Rous sarcoma virus
gauacaauaaacgccauuu

SEQ ID NO: 249543 - RNA, 22 nt, Rous sarcoma virus
gacaauucugcuuggaauauga

SEQ ID NO: 249544 - RNA, 23 nt, Rous sarcoma virus
cuauucgaguugccucuguggau

SEQ ID NO: 249545 - RNA, 15 nt, Rous sarcoma virus
cugauggccaaauaa

SEQ ID NO: 249546 - RNA, 15 nt, Rous sarcoma virus
cgugaccuacaauug

SEQ ID NO: 249547 - RNA, 18 nt, Rous sarcoma virus
cgugaccuacaauugcuc

SEQ ID NO: 249548 - RNA, 20 nt, Rous sarcoma virus
cgugaccuacaauugcucaa

SEQ ID NO: 249549 - RNA, 16 nt, Rous sarcoma virus
cgcagagauauuguau

SEQ ID NO: 249550 - RNA, 15 nt, Rous sarcoma virus
ccuacaauugcucaa

SEQ ID NO: 249551 - RNA, 17 nt, Rous sarcoma virus
cgaguugccucugugga

SEQ ID NO: 249552 - RNA, 13 nt, Rous sarcoma virus
auaaggcaggcaa

SEQ ID NO: 249553 - RNA, 13 nt, Rous sarcoma virus
auaaugugcaguu

SEQ ID NO: 249554 - RNA, 17 nt, Rous sarcoma virus
auagggagggggaaaug

SEQ ID NO: 249555 - RNA, 22 nt, Rous sarcoma virus
auaaacgccauuuuaccauuca

SEQ ID NO: 249556 - RNA, 23 nt, Rous sarcoma virus
agucugauggccaaauaaggcag

SEQ ID NO: 249557 - RNA, 15 nt, Rous sarcoma virus
agucuuaugcaauac

SEQ ID NO: 249558 - RNA, 12 nt, Rous sarcoma virus
aguuagcaauau

SEQ ID NO: 249559 - RNA, 21 nt, Rous sarcoma virus
aguuagcaauaugccuuacaa

SEQ ID NO: 249560 - RNA, 15 nt, Rous sarcoma virus
agcaauaugccuuac

SEQ ID NO: 249561 - RNA, 17 nt, Rous sarcoma virus
agcaauaugccuuacaa

SEQ ID NO: 249562 - RNA, 19 nt, Rous sarcoma virus
agauauuguauuuaagugc

SEQ ID NO: 249563 - RNA, 19 nt, Rous sarcoma virus
acaaggaaagaaaaggcac

SEQ ID NO: 249564 - RNA, 16 nt, Rous sarcoma virus
acaauucugcuuggaa

SEQ ID NO: 249565 - RNA, 21 nt, Rous sarcoma virus
acaauucugcuuggaauauga

SEQ ID NO: 249566 - RNA, 19 nt, Rous sarcoma virus
acaccugaaugaagcagaa

SEQ ID NO: 249567 - RNA, 17 nt, Rous sarcoma virus
acgaugaguuagcaaua

SEQ ID NO: 249568 - RNA, 20 nt, Rous sarcoma virus
acgaugaguuagcaauaugc

SEQ ID NO: 249569 - RNA, 21 nt, Rous sarcoma virus
acgaugaguuagcaauaugcc

SEQ ID NO: 249570 - RNA, 21 nt, Rous sarcoma virus
caccacauuggugugcaccug

SEQ ID NO: 249571 - RNA, 15 nt, Rous sarcoma virus
cacauuggugugcac

SEQ ID NO: 249572 - RNA, 16 nt, Rous sarcoma virus
cagguauaaugugcag

SEQ ID NO: 249573 - RNA, 19 nt, Rous sarcoma virus
auucugcuuggaauaugau

SEQ ID NO: 249574 - RNA, 24 nt, Rous sarcoma virus
augcaauacuccuguagucuugca

SEQ ID NO: 249575 - RNA, 16 nt, Rous sarcoma virus
augauggcgucuuccc

SEQ ID NO: 249576 - RNA, 14 nt, Rous sarcoma virus
augcuucuguagaa

SEQ ID NO: 249577 - RNA, 15 nt, Rous sarcoma virus
augaguuagcaauau

SEQ ID NO: 249578 - RNA, 20 nt, Rous sarcoma virus
caauucugcuuggaauauga

SEQ ID NO: 249579 - RNA, 15 nt, Rous sarcoma virus
auugcgaacaccuga

SEQ ID NO: 249580 - RNA, 17 nt, Rous sarcoma virus
caaauaaugcuucugua

SEQ ID NO: 249581 - RNA, 15 nt, Rous sarcoma virus
ugacugaggggacca

SEQ ID NO: 249582 - RNA, 19 nt, Rous sarcoma virus
ugcaauacuccuguagucu

SEQ ID NO: 249583 - RNA, 19 nt, Rous sarcoma virus
ucaccacauuggugugcac

SEQ ID NO: 249584 - RNA, 15 nt, Rous sarcoma virus
ucaggacaauucugc

SEQ ID NO: 249585 - RNA, 20 nt, Rous sarcoma virus
ucagacgggucuaacaugga

SEQ ID NO: 249586 - RNA, 14 nt, Rous sarcoma virus
ugcuuggaauauga

SEQ ID NO: 249587 - RNA, 19 nt, Rous sarcoma virus
ugguacgaucgugccuuau

SEQ ID NO: 249588 - RNA, 14 nt, Rous sarcoma virus
uugcaacaugcuua

SEQ ID NO: 249589 - RNA, 18 nt, Rous sarcoma virus
uugcgaacaccugaauga

SEQ ID NO: 249590 - RNA, 19 nt, Rous sarcoma virus
uuggacgaaccacugaauu

SEQ ID NO: 249591 - RNA, 17 nt, Rous sarcoma virus
gggaaauguagucuuau

SEQ ID NO: 249592 - RNA, 22 nt, Rous sarcoma virus
guaaggugguacgaucgugccu

SEQ ID NO: 249593 - RNA, 23 nt, Rous sarcoma virus
guaacgaugaguuagcaauaugc

SEQ ID NO: 249594 - RNA, 20 nt, Rous sarcoma virus
gcucaaauaaugcuucugua

SEQ ID NO: 249595 - RNA, 16 nt, Rous sarcoma virus
gauugcgaacaccuga

SEQ ID NO: 249596 - RNA, 13 nt, Rous sarcoma virus
gaucgugccuuau

SEQ ID NO: 249597 - RNA, 20 nt, Rous sarcoma virus
gaugaguuagcaauaugccu

SEQ ID NO: 249598 - RNA, 16 nt, Rous sarcoma virus
cauucaccacauuggu

SEQ ID NO: 249599 - RNA, 14 nt, Rous sarcoma virus
cauuuuaccauuca

SEQ ID NO: 249600 - RNA, 23 nt, Rous sarcoma virus
cgaggcgugaccuacaauugcuc

SEQ ID NO: 249601 - RNA, 17 nt, Rous sarcoma virus
cgauugcgaacaccuga

SEQ ID NO: 249602 - RNA, 15 nt, Rous sarcoma virus
ccuggguugauggcc

SEQ ID NO: 249603 - RNA, 12 nt, Rous sarcoma virus
uauaaugugcag

SEQ ID NO: 249604 - RNA, 13 nt, Rous sarcoma virus
uagucuugcaaca

SEQ ID NO: 249605 - RNA, 14 nt, Rous sarcoma virus
uagucugauggcca

SEQ ID NO: 249606 - RNA, 12 nt, Rous sarcoma virus
uagcaauaugcc

SEQ ID NO: 249607 - RNA, 15 nt, Rous sarcoma virus
uagcaauaugccuua

SEQ ID NO: 249608 - RNA, 16 nt, Rous sarcoma virus
uagcaauaugccuuac

SEQ ID NO: 249609 - RNA, 22 nt, Rous sarcoma virus
uuaugcaauacuccuguagucu

SEQ ID NO: 249610 - RNA, 23 nt, Rous sarcoma virus
uucccuguuuugcccuuagacua

SEQ ID NO: 249611 - RNA, 18 nt, Rous sarcoma virus
ugguacgaucgugccuua

SEQ ID NO: 249612 - RNA, 18 nt, Rous sarcoma virus
aggugguacgaucgugcc

SEQ ID NO: 249613 - RNA, 19 nt, Rous sarcoma virus
aggugguacgaucgugccu

SEQ ID NO: 249614 - RNA, 21 nt, Rous sarcoma virus
auagggagggggaaauguagu

SEQ ID NO: 249615 - RNA, 23 nt, Rous sarcoma virus
auaggaauccccucaggacaauu

SEQ ID NO: 249616 - RNA, 12 nt, Rous sarcoma virus
aucgugccuuau

SEQ ID NO: 249617 - RNA, 17 nt, Rous sarcoma virus
augaagcagaaggcuuc

SEQ ID NO: 249618 - RNA, 18 nt, Rous sarcoma virus
auuguauuuaagugccua

SEQ ID NO: 249619 - RNA, 14 nt, Rous sarcoma virus
caagacagcuauuu

SEQ ID NO: 249620 - RNA, 21 nt, Rous sarcoma virus
caagacagcuauuuguaacug

SEQ ID NO: 249621 - RNA, 15 nt, Rous sarcoma virus
caauugcucaaauaa

SEQ ID NO: 249622 - RNA, 15 nt, Rous sarcoma virus
caauucugcuuggaa

SEQ ID NO: 249623 - RNA, 19 nt, Rous sarcoma virus
aaugaagcagaaggcuuca

SEQ ID NO: 249624 - RNA, 22 nt, Rous sarcoma virus
aauccccucaggacaauucugc

SEQ ID NO: 249625 - RNA, 15 nt, Rous sarcoma virus
aauaaggcaggcaag

SEQ ID NO: 249626 - RNA, 19 nt, Rous sarcoma virus
aauaugauggcgucuuccc

SEQ ID NO: 249627 - RNA, 12 nt, Rous sarcoma virus
aauaugccuuac

SEQ ID NO: 249628 - RNA, 20 nt, Rous sarcoma virus
aaauguagucuuaugcaaua

SEQ ID NO: 249629 - RNA, 22 nt, Rous sarcoma virus
aacugcgaaauacgcuuuugca

SEQ ID NO: 249630 - RNA, 22 nt, Rous sarcoma virus
acgaucgugccuuauuaggaag

SEQ ID NO: 249631 - RNA, 16 nt, Rous sarcoma virus
acauggauuggacgaa

SEQ ID NO: 249632 - RNA, 23 nt, Rous sarcoma virus
acauggauuggacgaaccacuga

SEQ ID NO: 249633 - RNA, 17 nt, Rous sarcoma virus
aaaaggcaccgugcaug

SEQ ID NO: 249634 - RNA, 20 nt, Rous sarcoma virus
auuguauuuaagugccuagc

SEQ ID NO: 249635 - RNA, 13 nt, Rous sarcoma virus
caauacuccugua

SEQ ID NO: 249636 - RNA, 17 nt, Rous sarcoma virus
cauuggugugcaccugg

SEQ ID NO: 249637 - RNA, 15 nt, Rous sarcoma virus
ccucaggacaauucu

SEQ ID NO: 249638 - RNA, 15 nt, Rous sarcoma virus
ccugaaugaagcaga

SEQ ID NO: 249639 - RNA, 17 nt, Rous sarcoma virus
ccuagcucgauacaaua

SEQ ID NO: 249640 - RNA, 18 nt, Rous sarcoma virus
ccuagcucgauacaauaa

SEQ ID NO: 249641 - RNA, 19 nt, Rous sarcoma virus
ccccucaggacaauucugc

SEQ ID NO: 249642 - RNA, 22 nt, Rous sarcoma virus
agugccuagcucgauacaauaa

SEQ ID NO: 249643 - RNA, 13 nt, Rous sarcoma virus
agguauaaugugc

SEQ ID NO: 249644 - RNA, 14 nt, Rous sarcoma virus
agguauaaugugca

SEQ ID NO: 249645 - RNA, 13 nt, Rous sarcoma virus
aggcaccgugcau

SEQ ID NO: 249646 - RNA, 18 nt, Rous sarcoma virus
aggcaagacagcuauuug

SEQ ID NO: 249647 - RNA, 13 nt, Rous sarcoma virus
auacuccuguagu

SEQ ID NO: 249648 - RNA, 21 nt, Rous sarcoma virus
auaggaauccccucaggacaa

SEQ ID NO: 249649 - RNA, 19 nt, Rous sarcoma virus
aucgugccuuauuaggaag

SEQ ID NO: 249650 - RNA, 22 nt, Rous sarcoma virus
aucagacgggucuaacauggau

SEQ ID NO: 249651 - RNA, 18 nt, Rous sarcoma virus
agaaauuguuuagcauua

SEQ ID NO: 249652 - RNA, 18 nt, Rous sarcoma virus
acgccauuuuaccauuca

SEQ ID NO: 249653 - RNA, 22 nt, Rous sarcoma virus
cugaggggaccaugauguguau

SEQ ID NO: 249654 - RNA, 21 nt, Rous sarcoma virus
gauauuguauuuaagugccua

SEQ ID NO: 249655 - RNA, 15 nt, Rous sarcoma virus
gaugaguuagcaaua

SEQ ID NO: 249656 - RNA, 15 nt, Rous sarcoma virus
uacgaucgugccuua

SEQ ID NO: 249657 - RNA, 21 nt, Rous sarcoma virus
uaagugccuagcucgauacaa

SEQ ID NO: 249658 - RNA, 17 nt, Rous sarcoma virus
uacuccuguagucuugc

SEQ ID NO: 249659 - RNA, 22 nt, Rous sarcoma virus
uagggagggggaaauguagucu

SEQ ID NO: 249660 - RNA, 21 nt, Rous sarcoma virus
uaggcguccugcguugcuccg

SEQ ID NO: 249661 - RNA, 17 nt, Rous sarcoma virus
uaugauggcgucuuccc

SEQ ID NO: 249662 - RNA, 22 nt, Rous sarcoma virus
ggaaauguagucuuaugcaaua

SEQ ID NO: 249663 - RNA, 14 nt, Rous sarcoma virus
ggacaauucugcuu

SEQ ID NO: 249664 - RNA, 19 nt, Rous sarcoma virus
ggagggggaaauguagucu

SEQ ID NO: 249665 - RNA, 17 nt, Rous sarcoma virus
gguauaaugugcaguuu

SEQ ID NO: 249666 - RNA, 23 nt, Rous sarcoma virus
guaucagacgggucuaacaugga

SEQ ID NO: 249667 - RNA, 16 nt, Rous sarcoma virus
uguauuuaagugccua

SEQ ID NO: 249668 - RNA, 19 nt, Rous sarcoma virus
uguagucuugcaacaugcu

SEQ ID NO: 249669 - RNA, 12 nt, Rous sarcoma virus
uguuuagcauua

SEQ ID NO: 249670 - RNA, 21 nt, Rous sarcoma virus
uuaggcguccugcguugcucc

SEQ ID NO: 249671 - RNA, 13 nt, Rous sarcoma virus
uuuaagugccuag

SEQ ID NO: 249672 - RNA, 14 nt, Rous sarcoma virus
ugaguuagcaauau

SEQ ID NO: 249673 - RNA, 17 nt, Rous sarcoma virus
ugaccuacaauugcuca

SEQ ID NO: 249674 - RNA, 18 nt, Rous sarcoma virus
ugccuagcucgauacaau

SEQ ID NO: 249675 - RNA, 17 nt, Rubella virus
uccccgcaccuguugcu

SEQ ID NO: 249676 - RNA, 22 nt, Rubella virus
uccccgcaccuguugcuguaua

SEQ ID NO: 249677 - RNA, 14 nt, Rubella virus
uaggccacuagauc

SEQ ID NO: 249678 - RNA, 17 nt, Rubella virus
cuaggccacuagauccc

SEQ ID NO: 249679 - RNA, 23 nt, Rubella virus
accaaccugggcacccccccacu

SEQ ID NO: 249680 - RNA, 19 nt, Rubella virus
cccgcacuaggccacuaga

SEQ ID NO: 249681 - RNA, 15 nt, Rubella virus
ccgcggcaaccgggg

SEQ ID NO: 249682 - RNA, 16 nt, Rubella virus
ccugcgugaccucgug

SEQ ID NO: 249683 - RNA, 21 nt, Rubella virus
ccugcauuucaccaaccuggg

SEQ ID NO: 249684 - RNA, 14 nt, Rubella virus
caugcaaaccgggc

SEQ ID NO: 249685 - RNA, 15 nt, Rubella virus
caccuguugcuguau

SEQ ID NO: 249686 - RNA, 16 nt, Rubella virus
caccuguugcuguaua

SEQ ID NO: 249687 - RNA, 20 nt, Rubella virus
cacuagauccccgcaccugu

SEQ ID NO: 249688 - RNA, 18 nt, Rubella virus
aaacccgcacuaggccac

SEQ ID NO: 249689 - RNA, 15 nt, Rubella virus
aacccgcacuaggcc

SEQ ID NO: 249690 - RNA, 13 nt, Rubella virus
cacuagauccccg

SEQ ID NO: 249691 - RNA, 22 nt, Rubella virus
cacuagauccccgcaccuguug

SEQ ID NO: 249692 - RNA, 16 nt, Rubella virus
aacccgcacuaggcca

SEQ ID NO: 249693 - RNA, 18 nt, Rubella virus
uagauccccgcaccuguu

SEQ ID NO: 249694 - RNA, 15 nt, Rubella virus
ccgcaccuguugcug

SEQ ID NO: 249695 - RNA, 19 nt, Rubella virus
ccgcacuaggccacuagau

SEQ ID NO: 249696 - RNA, 17 nt, Rubella virus
ccugacaccgaggcacc

SEQ ID NO: 249697 - RNA, 12 nt, Rubella virus
ccacuagauccc

SEQ ID NO: 249698 - RNA, 22 nt, Rubella virus
cuagauccccgcaccuguugcu

SEQ ID NO: 249699 - RNA, 22 nt, Rubella virus
cuaggccacuagauccccgcac

SEQ ID NO: 249700 - RNA, 13 nt, Rubella virus
ucaccaaccuggg

SEQ ID NO: 249701 - RNA, 17 nt, Rubella virus
ccccgcaccuguugcug

SEQ ID NO: 249702 - RNA, 14 nt, Rubella virus
ccgcaccuguugcu

SEQ ID NO: 249703 - RNA, 18 nt, Rubella virus
ccgcaccuguugcuguau

SEQ ID NO: 249704 - RNA, 14 nt, Rubella virus
ccgcacuaggccac

SEQ ID NO: 249705 - RNA, 15 nt, Rubella virus
accuguugcuguaua

SEQ ID NO: 249706 - RNA, 14 nt, Rubella virus
acccgcacuaggcc

SEQ ID NO: 249707 - RNA, 18 nt, Rubella virus
acccgcacuaggccacua

SEQ ID NO: 249708 - RNA, 22 nt, Rubella virus
acccccgcgcaugcaaaccggg

SEQ ID NO: 249709 - RNA, 15 nt, Rubella virus
accgaggcacccacc

SEQ ID NO: 249710 - RNA, 17 nt, Rubella virus
agauccccgcaccuguu

SEQ ID NO: 249711 - RNA, 19 nt, Rubella virus
cgcacuaggccacuagauc

SEQ ID NO: 249712 - RNA, 23 nt, Rubella virus
cuagauccccgcaccuguugcug

SEQ ID NO: 249713 - RNA, 15 nt, Rubella virus
gcacuaggccacuag

SEQ ID NO: 249714 - RNA, 12 nt, Rubella virus
gcgaaacccgca

SEQ ID NO: 249715 - RNA, 17 nt, Rubella virus
uagauccccgcaccugu

SEQ ID NO: 249716 - RNA, 13 nt, Rubella virus
acuaggccacuag

SEQ ID NO: 249717 - RNA, 19 nt, Rubella virus
acuagauccccgcaccugu

SEQ ID NO: 249718 - RNA, 16 nt, Rubella virus
cgcaccuguugcugua

SEQ ID NO: 249719 - RNA, 14 nt, Rubella virus
cgcacuaggccacu

SEQ ID NO: 249720 - RNA, 13 nt, Rubella virus
cuguugcuguaua

SEQ ID NO: 249721 - RNA, 17 nt, Rubella virus
aaacccgcacuaggcca

SEQ ID NO: 249722 - RNA, 16 nt, Rubella virus
gcacuaggccacuaga

SEQ ID NO: 249723 - RNA, 17 nt, Rubella virus
gcacuaggccacuagau

SEQ ID NO: 249724 - RNA, 15 nt, Rubella virus
gcaccuguugcugua

SEQ ID NO: 249725 - RNA, 22 nt, SARS coronavirus
gcacacuaugguucaaacaugc

SEQ ID NO: 249726 - RNA, 20 nt, SARS coronavirus
gcaauccuaauaacaaugcu

SEQ ID NO: 249727 - RNA, 13 nt, SARS coronavirus
gauccagcuggug

SEQ ID NO: 249728 - RNA, 21 nt, SARS coronavirus
gauccagcugguggugcgcuu

SEQ ID NO: 249729 - RNA, 18 nt, SARS coronavirus
gcgcaauuuuuguaccuc

SEQ ID NO: 249730 - RNA, 18 nt, SARS coronavirus
ggauuuguuuaugagauu

SEQ ID NO: 249731 - RNA, 14 nt, SARS coronavirus
gcucuacucgccac

SEQ ID NO: 249732 - RNA, 21 nt, SARS coronavirus
gcuuaaacaacuccuggaaca

SEQ ID NO: 249733 - RNA, 13 nt, SARS coronavirus
gcuugugcugacg

SEQ ID NO: 249734 - RNA, 22 nt, SARS coronavirus
aaagauuguccagcgguugcug

SEQ ID NO: 249735 - RNA, 14 nt, SARS coronavirus
gaacuuagauuccc

SEQ ID NO: 249736 - RNA, 13 nt, SARS coronavirus
gaaaaaguugcug

SEQ ID NO: 249737 - RNA, 17 nt, SARS coronavirus
gaaaaaguugcugguuu

SEQ ID NO: 249738 - RNA, 23 nt, SARS coronavirus
gaaacuucucauuguuuugacuu

SEQ ID NO: 249739 - RNA, 17 nt, SARS coronavirus
cuuuucauagauggcac

SEQ ID NO: 249740 - RNA, 14 nt, SARS coronavirus
cuuuucaucagaca

SEQ ID NO: 249741 - RNA, 18 nt, SARS coronavirus
cuuuugcuugucgcugca

SEQ ID NO: 249742 - RNA, 14 nt, SARS coronavirus
cuuuugauauuuac

SEQ ID NO: 249743 - RNA, 20 nt, SARS coronavirus
gauauauuuucuacaaugca

SEQ ID NO: 249744 - RNA, 20 nt, SARS coronavirus
gacauugauuguauuuacau

SEQ ID NO: 249745 - RNA, 13 nt, SARS coronavirus
gaccacauuggca

SEQ ID NO: 249746 - RNA, 17 nt, SARS coronavirus
gacaacgguacuauuac

SEQ ID NO: 249747 - RNA, 20 nt, SARS coronavirus
aaauuauucucuuccugaca

SEQ ID NO: 249748 - RNA, 19 nt, SARS coronavirus
aaauuugcacuaacuugca

SEQ ID NO: 249749 - RNA, 18 nt, SARS coronavirus
cuguuuggaacuuuaaca

SEQ ID NO: 249750 - RNA, 18 nt, SARS coronavirus
cuggauuauguuacuaca

SEQ ID NO: 249751 - RNA, 12 nt, SARS coronavirus
cucuuacuuugu

SEQ ID NO: 249752 - RNA, 20 nt, SARS coronavirus
cucuuagaucaauuacugca

SEQ ID NO: 249753 - RNA, 19 nt, SARS coronavirus
cuaugguucaaacaugcac

SEQ ID NO: 249754 - RNA, 13 nt, SARS coronavirus
cuacuaauguugu

SEQ ID NO: 249755 - RNA, 14 nt, SARS coronavirus
cuauuccuagccug

SEQ ID NO: 249756 - RNA, 16 nt, SARS coronavirus
cucgcuccucaucacg

SEQ ID NO: 249757 - RNA, 19 nt, SARS coronavirus
cucgcgcuauugcugcuag

SEQ ID NO: 249758 - RNA, 21 nt, SARS coronavirus
cgucuugguucacagcucuca

SEQ ID NO: 249759 - RNA, 21 nt, SARS coronavirus
cguagugccccccgcauuaca

SEQ ID NO: 249760 - RNA, 14 nt, SARS coronavirus
cgguaauucaagaa

SEQ ID NO: 249761 - RNA, 17 nt, SARS coronavirus
cuaacuugcacuagcac

SEQ ID NO: 249762 - RNA, 20 nt, SARS coronavirus
cuaccaugaacaacaaguca

SEQ ID NO: 249763 - RNA, 21 nt, SARS coronavirus
cuaaacgaacaugaaacuucu

SEQ ID NO: 249764 - RNA, 20 nt, SARS coronavirus
cguuuacgauacauagucua

SEQ ID NO: 249765 - RNA, 22 nt, SARS coronavirus
ccagaauggaggacgcaauggg

SEQ ID NO: 249766 - RNA, 12 nt, SARS coronavirus
ccagaagcuuca

SEQ ID NO: 249767 - RNA, 18 nt, SARS coronavirus
ccagggcguuccaaucaa

SEQ ID NO: 249768 - RNA, 13 nt, SARS coronavirus
cauuucacccucu

SEQ ID NO: 249769 - RNA, 14 nt, SARS coronavirus
cauuucacccucuu

SEQ ID NO: 249770 - RNA, 24 nt, SARS coronavirus
ccaauagugguccagaugaccaaa

SEQ ID NO: 249771 - RNA, 22 nt, SARS coronavirus
ccaaagucuaaacgaacaugaa

SEQ ID NO: 249772 - RNA, 16 nt, SARS coronavirus
ccaaacugcugcauuu

SEQ ID NO: 249773 - RNA, 16 nt, SARS coronavirus
caggcacuaguacuga

SEQ ID NO: 249774 - RNA, 16 nt, SARS coronavirus
cauaauaaagcuuguu

SEQ ID NO: 249775 - RNA, 15 nt, SARS coronavirus
uccaguucauuugca

SEQ ID NO: 249776 - RNA, 18 nt, SARS coronavirus
ucaucuuguugacuucca

SEQ ID NO: 249777 - RNA, 18 nt, SARS coronavirus
uccagcugguggugcgcu

SEQ ID NO: 249778 - RNA, 21 nt, SARS coronavirus
ucuuauuauuucuuacucuca

SEQ ID NO: 249779 - RNA, 12 nt, SARS coronavirus
ucuuacucucac

SEQ ID NO: 249780 - RNA, 17 nt, SARS coronavirus
ucuuagaucaauuacug

SEQ ID NO: 249781 - RNA, 15 nt, SARS coronavirus
ucucuaugcaguugc

SEQ ID NO: 249782 - RNA, 17 nt, SARS coronavirus
ucucuaugcaguugcau

SEQ ID NO: 249783 - RNA, 23 nt, SARS coronavirus
ucuaguauuuuuaauacuuugcu

SEQ ID NO: 249784 - RNA, 15 nt, SARS coronavirus
uauuuaacucaggau

SEQ ID NO: 249785 - RNA, 21 nt, SARS coronavirus
uauuauuaacaauucuacuaa

SEQ ID NO: 249786 - RNA, 21 nt, SARS coronavirus
uauuaacaauucuacuaaugu

SEQ ID NO: 249787 - RNA, 17 nt, SARS coronavirus
ucaacugucaagaucca

SEQ ID NO: 249788 - RNA, 14 nt, SARS coronavirus
ucaaacaugcacac

SEQ ID NO: 249789 - RNA, 19 nt, SARS coronavirus
ucacuuuaauugacuucua

SEQ ID NO: 249790 - RNA, 12 nt, SARS coronavirus
ucagacacucuu

SEQ ID NO: 249791 - RNA, 22 nt, SARS coronavirus
ucagcgucuaacuaaauacaca

SEQ ID NO: 249792 - RNA, 18 nt, SARS coronavirus
uagaauuauuaugagaug

SEQ ID NO: 249793 - RNA, 21 nt, SARS coronavirus
uauacgagcauguaacuuuga

SEQ ID NO: 249794 - RNA, 22 nt, SARS coronavirus
uacugcgucuugguucacagcu

SEQ ID NO: 249795 - RNA, 19 nt, SARS coronavirus
uaugagauuuuuuacucuu

SEQ ID NO: 249796 - RNA, 20 nt, SARS coronavirus
uaugcaguugcauaugcacu

SEQ ID NO: 249797 - RNA, 13 nt, SARS coronavirus
uauggaagagccc

SEQ ID NO: 249798 - RNA, 20 nt, SARS coronavirus
uaucauuaugaggacuuuca

SEQ ID NO: 249799 - RNA, 17 nt, SARS coronavirus
gucuugguucacagcuc

SEQ ID NO: 249800 - RNA, 18 nt, SARS coronavirus
guccagcgguugcugucc

SEQ ID NO: 249801 - RNA, 23 nt, SARS coronavirus
guccagcgguugcuguccaugac

SEQ ID NO: 249802 - RNA, 13 nt, SARS coronavirus
guccagaugacca

SEQ ID NO: 249803 - RNA, 23 nt, SARS coronavirus
guucaagcuccuaauuacacuca

SEQ ID NO: 249804 - RNA, 18 nt, SARS coronavirus
guuccaaucaacaccaau

SEQ ID NO: 249805 - RNA, 20 nt, SARS coronavirus
gugguccagaugaccaaauu

SEQ ID NO: 249806 - RNA, 17 nt, SARS coronavirus
guggacccacagauuca

SEQ ID NO: 249807 - RNA, 18 nt, SARS coronavirus
guacuucuuuuucuugcu

SEQ ID NO: 249808 - RNA, 11 nt, SARS coronavirus
guagugcuauc

SEQ ID NO: 249809 - RNA, 11 nt, SARS coronavirus
guauucuugcu

SEQ ID NO: 249810 - RNA, 15 nt, SARS coronavirus
gucaccaaacugcug

SEQ ID NO: 249811 - RNA, 12 nt, SARS coronavirus
uacaacuuccuc

SEQ ID NO: 249812 - RNA, 21 nt, SARS coronavirus
uacaggguuucauacuauuaa

SEQ ID NO: 249813 - RNA, 13 nt, SARS coronavirus
aacaacauugcca

SEQ ID NO: 249814 - RNA, 18 nt, SARS coronavirus
uaccuucaugaaggucac

SEQ ID NO: 249815 - RNA, 21 nt, SARS coronavirus
uaaauacacaauggcugauuu

SEQ ID NO: 249816 - RNA, 16 nt, SARS coronavirus
uaaaccucaugugcuu

SEQ ID NO: 249817 - RNA, 15 nt, SARS coronavirus
guugcauaugcacug

SEQ ID NO: 249818 - RNA, 15 nt, SARS coronavirus
uaagaggcauacuau

SEQ ID NO: 249819 - RNA, 21 nt, SARS coronavirus
aacgauaccgcuacaagccuc

SEQ ID NO: 249820 - RNA, 16 nt, SARS coronavirus
aacaugaaaauuauuc

SEQ ID NO: 249821 - RNA, 16 nt, SARS coronavirus
aagaucaguuucacca

SEQ ID NO: 249822 - RNA, 13 nt, SARS coronavirus
aauaaauuugcac

SEQ ID NO: 249823 - RNA, 14 nt, SARS coronavirus
uugcuguccaugac

SEQ ID NO: 249824 - RNA, 19 nt, SARS coronavirus
uugcuauuuggaaucuuga

SEQ ID NO: 249825 - RNA, 15 nt, SARS coronavirus
uugcacuaacuugca

SEQ ID NO: 249826 - RNA, 20 nt, SARS coronavirus
uugcaauuuacugcugcuau

SEQ ID NO: 249827 - RNA, 16 nt, SARS coronavirus
uugauuaucauuauga

SEQ ID NO: 249828 - RNA, 19 nt, SARS coronavirus
uugacuucuauuugugcuu

SEQ ID NO: 249829 - RNA, 22 nt, SARS coronavirus
uugaccggugcaccacuuuuga

SEQ ID NO: 249830 - RNA, 12 nt, SARS coronavirus
uuuauuuaacuc

SEQ ID NO: 249831 - RNA, 20 nt, SARS coronavirus
uuuacaucuugcgagcuaua

SEQ ID NO: 249832 - RNA, 14 nt, SARS coronavirus
uuguugacuuccag

SEQ ID NO: 249833 - RNA, 18 nt, SARS coronavirus
uuguaagguacaacacua

SEQ ID NO: 249834 - RNA, 20 nt, SARS coronavirus
uuuucauagauggcacacua

SEQ ID NO: 249835 - RNA, 14 nt, SARS coronavirus
uuuuaguagugcua

SEQ ID NO: 249836 - RNA, 17 nt, SARS coronavirus
uuugguucuaccaugaa

SEQ ID NO: 249837 - RNA, 23 nt, SARS coronavirus
ugcaguugcauaugcacuguagu

SEQ ID NO: 249838 - RNA, 11 nt, SARS coronavirus
ugcauaugcac

SEQ ID NO: 249839 - RNA, 15 nt, SARS coronavirus
ugcuuggcuuugugc

SEQ ID NO: 249840 - RNA, 19 nt, SARS coronavirus
ugcugacaauaaauuugca

SEQ ID NO: 249841 - RNA, 20 nt, SARS coronavirus
ugauuguauuuacaucuugc

SEQ ID NO: 249842 - RNA, 18 nt, SARS coronavirus
ugauuaucauuaugagga

SEQ ID NO: 249843 - RNA, 23 nt, SARS coronavirus
ugauacauuaaaagaaauacucg

SEQ ID NO: 249844 - RNA, 21 nt, SARS coronavirus
ugagcucacuuuaauugacuu

SEQ ID NO: 249845 - RNA, 19 nt, SARS coronavirus
uguuaccaucuauucacau

SEQ ID NO: 249846 - RNA, 16 nt, SARS coronavirus
uucaacaagagcucua

SEQ ID NO: 249847 - RNA, 12 nt, SARS coronavirus
uuauuuaacuca

SEQ ID NO: 249848 - RNA, 21 nt, SARS coronavirus
uuauaagggcuuccaguucau

SEQ ID NO: 249849 - RNA, 15 nt, SARS coronavirus
uuauagcacugcuug

SEQ ID NO: 249850 - RNA, 15 nt, SARS coronavirus
uuacaauagcagaga

SEQ ID NO: 249851 - RNA, 19 nt, SARS coronavirus
uuacacucaacauacuuca

SEQ ID NO: 249852 - RNA, 19 nt, SARS coronavirus
ugucauaccuuuuaaggau

SEQ ID NO: 249853 - RNA, 20 nt, SARS coronavirus
uggauuauguuacuacaauu

SEQ ID NO: 249854 - RNA, 14 nt, SARS coronavirus
acuaucaacuguca

SEQ ID NO: 249855 - RNA, 15 nt, SARS coronavirus
acuauccugaugaaa

SEQ ID NO: 249856 - RNA, 13 nt, SARS coronavirus
acugucaagaucc

SEQ ID NO: 249857 - RNA, 18 nt, SARS coronavirus
acuggcccagaagcuuca

SEQ ID NO: 249858 - RNA, 17 nt, SARS coronavirus
acugcugcuauuuguua

SEQ ID NO: 249859 - RNA, 13 nt, SARS coronavirus
acuuuucaucaga

SEQ ID NO: 249860 - RNA, 15 nt, SARS coronavirus
acuuauagcacugcu

SEQ ID NO: 249861 - RNA, 16 nt, SARS coronavirus
acuuauagcacugcuu

SEQ ID NO: 249862 - RNA, 17 nt, SARS coronavirus
acuuccagguuacaaua

SEQ ID NO: 249863 - RNA, 17 nt, SARS coronavirus
acuucccuacggcgcua

SEQ ID NO: 249864 - RNA, 14 nt, SARS coronavirus
agaaauacucguca

SEQ ID NO: 249865 - RNA, 21 nt, SARS coronavirus
agacacucuuuauuuaacuca

SEQ ID NO: 249866 - RNA, 14 nt, SARS coronavirus
agacagauugaacc

SEQ ID NO: 249867 - RNA, 17 nt, SARS coronavirus
acccgcucaaugugguc

SEQ ID NO: 249868 - RNA, 12 nt, SARS coronavirus
acauaccuauca

SEQ ID NO: 249869 - RNA, 21 nt, SARS coronavirus
acauacgagggcaauucacca

SEQ ID NO: 249870 - RNA, 16 nt, SARS coronavirus
acaucuugcgagcuau

SEQ ID NO: 249871 - RNA, 20 nt, SARS coronavirus
acaucuugcgagcuauauca

SEQ ID NO: 249872 - RNA, 17 nt, SARS coronavirus
acagauugaaccagcuu

SEQ ID NO: 249873 - RNA, 21 nt, SARS coronavirus
acagauugaaccagcuugaga

SEQ ID NO: 249874 - RNA, 21 nt, SARS coronavirus
aauugacuucuauuugugcuu

SEQ ID NO: 249875 - RNA, 19 nt, SARS coronavirus
aauuauucucuuccugaca

SEQ ID NO: 249876 - RNA, 15 nt, SARS coronavirus
aauuuuuguaccucu

SEQ ID NO: 249877 - RNA, 15 nt, SARS coronavirus
acaaagaaggcaucg

SEQ ID NO: 249878 - RNA, 14 nt, SARS coronavirus
aauacuuugcuuca

SEQ ID NO: 249879 - RNA, 17 nt, SARS coronavirus
aauacuuugcuucacca

SEQ ID NO: 249880 - RNA, 23 nt, SARS coronavirus
aauacugcgucuugguucacagc

SEQ ID NO: 249881 - RNA, 19 nt, SARS coronavirus
aagucuaaacgaacaugaa

SEQ ID NO: 249882 - RNA, 17 nt, SARS coronavirus
aaggcagaugggcuaug

SEQ ID NO: 249883 - RNA, 14 nt, SARS coronavirus
aaggaguuccugau

SEQ ID NO: 249884 - RNA, 12 nt, SARS coronavirus
aagaaccuugcc

SEQ ID NO: 249885 - RNA, 16 nt, SARS coronavirus
aagcuccuaauuacac

SEQ ID NO: 249886 - RNA, 20 nt, SARS coronavirus
aaccucaugugcuugaagau

SEQ ID NO: 249887 - RNA, 14 nt, SARS coronavirus
aacuuauguacuca

SEQ ID NO: 249888 - RNA, 21 nt, SARS coronavirus
aacauugccaaaaggcuucua

SEQ ID NO: 249889 - RNA, 16 nt, SARS coronavirus
aacaugaaacuucuca

SEQ ID NO: 249890 - RNA, 14 nt, SARS coronavirus
aaauugacaaugcu

SEQ ID NO: 249891 - RNA, 14 nt, SARS coronavirus
auacuaugucuaac

SEQ ID NO: 249892 - RNA, 20 nt, SARS coronavirus
aucauacguuuggcaacccu

SEQ ID NO: 249893 - RNA, 12 nt, SARS coronavirus
aucaaauguugu

SEQ ID NO: 249894 - RNA, 13 nt, SARS coronavirus
aucaacgcaugua

SEQ ID NO: 249895 - RNA, 14 nt, SARS coronavirus
auauggaagagccc

SEQ ID NO: 249896 - RNA, 12 nt, SARS coronavirus
agcuagguguug

SEQ ID NO: 249897 - RNA, 21 nt, SARS coronavirus
agcuacuucguugcuuccuuc

SEQ ID NO: 249898 - RNA, 19 nt, SARS coronavirus
agcuauaucacuaucagga

SEQ ID NO: 249899 - RNA, 21 nt, SARS coronavirus
agcguacuucuuuuucuugcu

SEQ ID NO: 249900 - RNA, 21 nt, SARS coronavirus
agcccuuuauaagggcuucca

SEQ ID NO: 249901 - RNA, 17 nt, SARS coronavirus
agccuggauuauguuac

SEQ ID NO: 249902 - RNA, 17 nt, SARS coronavirus
agaugaugaagaaccua

SEQ ID NO: 249903 - RNA, 19 nt, SARS coronavirus
aguaauagguuuccuauuc

SEQ ID NO: 249904 - RNA, 20 nt, SARS coronavirus
aguacagcgcugugcaucua

SEQ ID NO: 249905 - RNA, 14 nt, SARS coronavirus
caacuccuggaaca

SEQ ID NO: 249906 - RNA, 16 nt, SARS coronavirus
caacuuccucaaggaa

SEQ ID NO: 249907 - RNA, 23 nt, SARS coronavirus
caacaagagcucuacucgccacu

SEQ ID NO: 249908 - RNA, 14 nt, SARS coronavirus
caauauuguuaacg

SEQ ID NO: 249909 - RNA, 14 nt, SARS coronavirus
caagagcucuacuc

SEQ ID NO: 249910 - RNA, 17 nt, SARS coronavirus
caagaucaguuucacca

SEQ ID NO: 249911 - RNA, 21 nt, SARS coronavirus
cacgucagcgucuaacuaaau

SEQ ID NO: 249912 - RNA, 22 nt, SARS coronavirus
cacugcuuggcuuugugcucua

SEQ ID NO: 249913 - RNA, 19 nt, SARS coronavirus
cagaaugaaugagcucacu

SEQ ID NO: 249914 - RNA, 21 nt, SARS coronavirus
caauggggcaaggccaaaaca

SEQ ID NO: 249915 - RNA, 11 nt, SARS coronavirus
cacagcucuca

SEQ ID NO: 249916 - RNA, 13 nt, SARS coronavirus
auugcugcuagac

SEQ ID NO: 249917 - RNA, 17 nt, SARS coronavirus
auugccaaaaggcuucu

SEQ ID NO: 249918 - RNA, 16 nt, SARS coronavirus
auucuacuaauguugu

SEQ ID NO: 249919 - RNA, 19 nt, SARS coronavirus
auucucuuccugacauuga

SEQ ID NO: 249920 - RNA, 15 nt, SARS coronavirus
auucuccugcucgaa

SEQ ID NO: 249921 - RNA, 15 nt, SARS coronavirus
auuggcuacuaccga

SEQ ID NO: 249922 - RNA, 22 nt, SARS coronavirus
auuggcuacuaccgaagagcua

SEQ ID NO: 249923 - RNA, 12 nt, SARS coronavirus
auuugcaauuua

SEQ ID NO: 249924 - RNA, 16 nt, SARS coronavirus
auuucuuccauuuuau

SEQ ID NO: 249925 - RNA, 13 nt, SARS coronavirus
auguuacuaucaa

SEQ ID NO: 249926 - RNA, 20 nt, SARS coronavirus
auuaauuuuaguagugcuau

SEQ ID NO: 249927 - RNA, 17 nt, SARS coronavirus
auuaacaauucuacuaa

SEQ ID NO: 249928 - RNA, 17 nt, SARS coronavirus
augguucaaacaugcac

SEQ ID NO: 249929 - RNA, 18 nt, SARS coronavirus
aaaacagcgccgacccca

SEQ ID NO: 249930 - RNA, 11 nt, SARS coronavirus
aaaagaaccuu

SEQ ID NO: 249931 - RNA, 22 nt, SARS coronavirus
uacuuuguaguuaagaggcaua

SEQ ID NO: 249932 - RNA, 15 nt, SARS coronavirus
uaaggaugguauuua

SEQ ID NO: 249933 - RNA, 18 nt, SARS coronavirus
uaauugcugucgcuucca

SEQ ID NO: 249934 - RNA, 17 nt, SARS coronavirus
uacagcgcugugcaucu

SEQ ID NO: 249935 - RNA, 13 nt, SARS coronavirus
uacaauagcagag

SEQ ID NO: 249936 - RNA, 17 nt, SARS coronavirus
uacaauuugccuauucu

SEQ ID NO: 249937 - RNA, 17 nt, SARS coronavirus
uacuuauagcacugcuu

SEQ ID NO: 249938 - RNA, 21 nt, SARS coronavirus
uacauuaaaagaaauacucgu

SEQ ID NO: 249939 - RNA, 11 nt, SARS coronavirus
uacaucuugcg

SEQ ID NO: 249940 - RNA, 15 nt, SARS coronavirus
uaacaaugcugccac

SEQ ID NO: 249941 - RNA, 14 nt, SARS coronavirus
uaacucaggauuua

SEQ ID NO: 249942 - RNA, 17 nt, SARS coronavirus
uaaaaauugacaaugcu

SEQ ID NO: 249943 - RNA, 16 nt, SARS coronavirus
guugcaacugagggag

SEQ ID NO: 249944 - RNA, 13 nt, SARS coronavirus
gccuuucugcuau

SEQ ID NO: 249945 - RNA, 15 nt, SARS coronavirus
gcacuaguacugaug

SEQ ID NO: 249946 - RNA, 17 nt, SARS coronavirus
gcuuaucauggcagaca

SEQ ID NO: 249947 - RNA, 13 nt, SARS coronavirus
gcuuggcuuugug

SEQ ID NO: 249948 - RNA, 17 nt, SARS coronavirus
gcugucgcuuccaggag

SEQ ID NO: 249949 - RNA, 20 nt, SARS coronavirus
gcgucuaacuaaauacacaa

SEQ ID NO: 249950 - RNA, 16 nt, SARS coronavirus
gguucaacaagagcuc

SEQ ID NO: 249951 - RNA, 21 nt, SARS coronavirus
ggguuuuugguucuaccauga

SEQ ID NO: 249952 - RNA, 18 nt, SARS coronavirus
guaauacuuauagcacug

SEQ ID NO: 249953 - RNA, 13 nt, SARS coronavirus
gguuuacccaaua

SEQ ID NO: 249954 - RNA, 22 nt, SARS coronavirus
ggcuuccaguucauuugcaauu

SEQ ID NO: 249955 - RNA, 15 nt, SARS coronavirus
ggcaaggccaaaaca

SEQ ID NO: 249956 - RNA, 15 nt, SARS coronavirus
ggaacaacauugcca

SEQ ID NO: 249957 - RNA, 19 nt, SARS coronavirus
cuaugcaguugcauaugca

SEQ ID NO: 249958 - RNA, 14 nt, SARS coronavirus
cuauuaccuaggaa

SEQ ID NO: 249959 - RNA, 15 nt, SARS coronavirus
cuaugguucaaacau

SEQ ID NO: 249960 - RNA, 20 nt, SARS coronavirus
cuaacuugcacuagcacaca

SEQ ID NO: 249961 - RNA, 17 nt, SARS coronavirus
cuaagaagaauuauucg

SEQ ID NO: 249962 - RNA, 13 nt, SARS coronavirus
cuaauaaaccuca

SEQ ID NO: 249963 - RNA, 17 nt, SARS coronavirus
cucaauguggucauuca

SEQ ID NO: 249964 - RNA, 16 nt, SARS coronavirus
cuccuaauuacacuca

SEQ ID NO: 249965 - RNA, 20 nt, SARS coronavirus
cucgccacuuuuucucauug

SEQ ID NO: 249966 - RNA, 12 nt, SARS coronavirus
cucuugcugaca

SEQ ID NO: 249967 - RNA, 19 nt, SARS coronavirus
cugacaauaaauuugcacu

SEQ ID NO: 249968 - RNA, 12 nt, SARS coronavirus
cucuaugcaguu

SEQ ID NO: 249969 - RNA, 21 nt, SARS coronavirus
cucuaugcaguugcauaugca

SEQ ID NO: 249970 - RNA, 22 nt, SARS coronavirus
cucuaugcaguugcauaugcac

SEQ ID NO: 249971 - RNA, 23 nt, SARS coronavirus
cucuaugcaguugcauaugcacu

SEQ ID NO: 249972 - RNA, 21 nt, SARS coronavirus
cuguaguacagcgcugugcau

SEQ ID NO: 249973 - RNA, 20 nt, SARS coronavirus
cgcaauggggcaaggccaaa

SEQ ID NO: 249974 - RNA, 23 nt, SARS coronavirus
ccuaauguuacuaucaacuguca

SEQ ID NO: 249975 - RNA, 19 nt, SARS coronavirus
cguacuucuuuuucuugcu

SEQ ID NO: 249976 - RNA, 17 nt, SARS coronavirus
cgcuauugcugcuagac

SEQ ID NO: 249977 - RNA, 15 nt, SARS coronavirus
cgcucaaugugguca

SEQ ID NO: 249978 - RNA, 14 nt, SARS coronavirus
gacaaugcuucucc

SEQ ID NO: 249979 - RNA, 16 nt, SARS coronavirus
gagcccuaauguguaa

SEQ ID NO: 249980 - RNA, 18 nt, SARS coronavirus
gaggccagggcguuccaa

SEQ ID NO: 249981 - RNA, 14 nt, SARS coronavirus
gaggcauacuaugu

SEQ ID NO: 249982 - RNA, 20 nt, SARS coronavirus
gaugaccaaauuggcuacua

SEQ ID NO: 249983 - RNA, 13 nt, SARS coronavirus
gaugaagaaccua

SEQ ID NO: 249984 - RNA, 18 nt, SARS coronavirus
gcaauggggcaaggccaa

SEQ ID NO: 249985 - RNA, 23 nt, SARS coronavirus
gauugaaccagcuugagagcaaa

SEQ ID NO: 249986 - RNA, 11 nt, SARS coronavirus
gaaucuugacg

SEQ ID NO: 249987 - RNA, 16 nt, SARS coronavirus
gacaacgguacuauua

SEQ ID NO: 249988 - RNA, 18 nt, SARS coronavirus
gaaccuugcccaucagga

SEQ ID NO: 249989 - RNA, 15 nt, SARS coronavirus
cuuugcuucaccauu

SEQ ID NO: 249990 - RNA, 16 nt, SARS coronavirus
cuuguggccaguaaca

SEQ ID NO: 249991 - RNA, 22 nt, SARS coronavirus
cuuguuauuggcguugcauuuc

SEQ ID NO: 249992 - RNA, 22 nt, SARS coronavirus
cuuguugacuuccagguuacaa

SEQ ID NO: 249993 - RNA, 14 nt, SARS coronavirus
cuuuaaucucacau

SEQ ID NO: 249994 - RNA, 12 nt, SARS coronavirus
cuuuaauugacu

SEQ ID NO: 249995 - RNA, 17 nt, SARS coronavirus
cuugcgagcuauaucac

SEQ ID NO: 249996 - RNA, 12 nt, SARS coronavirus
cuugcuagucac

SEQ ID NO: 249997 - RNA, 13 nt, SARS coronavirus
cuugcugacaaua

SEQ ID NO: 249998 - RNA, 15 nt, SARS coronavirus
agauuuuuuacucuu

SEQ ID NO: 249999 - RNA, 16 nt, SARS coronavirus
agcaacgauaccgcua

SEQ ID NO: 250000 - RNA, 12 nt, SARS coronavirus
aggaaagguuuu

SEQ ID NO: 250001 - RNA, 22 nt, SARS coronavirus
aggaaagguuuuaccuuuucau

SEQ ID NO: 250002 - RNA, 20 nt, SARS coronavirus
aggaacuggcccagaagcuu

SEQ ID NO: 250003 - RNA, 22 nt, SARS coronavirus
agcacugcuuggcuuugugcuc

SEQ ID NO: 250004 - RNA, 13 nt, SARS coronavirus
agccucuucucgc

SEQ ID NO: 250005 - RNA, 19 nt, SARS coronavirus
agccucuucucgcuccuca

SEQ ID NO: 250006 - RNA, 19 nt, SARS coronavirus
aguuaagaggcauacuaug

SEQ ID NO: 250007 - RNA, 22 nt, SARS coronavirus
aggcgcaauuuuuguaccucua

SEQ ID NO: 250008 - RNA, 20 nt, SARS coronavirus
auaccuaucagcugcgugca

SEQ ID NO: 250009 - RNA, 19 nt, SARS coronavirus
auaauggaccccaaucaaa

SEQ ID NO: 250010 - RNA, 14 nt, SARS coronavirus
accuaggaacuggc

SEQ ID NO: 250011 - RNA, 23 nt, SARS coronavirus
accuaggaacuggcccagaagcu

SEQ ID NO: 250012 - RNA, 14 nt, SARS coronavirus
accuaauguuacua

SEQ ID NO: 250013 - RNA, 19 nt, SARS coronavirus
acgauaccgcuacaagccu

SEQ ID NO: 250014 - RNA, 23 nt, SARS coronavirus
acucccuuucggauggcuuguua

SEQ ID NO: 250015 - RNA, 16 nt, SARS coronavirus
acuccuggaacaaugg

SEQ ID NO: 250016 - RNA, 21 nt, SARS coronavirus
acugcuuggcuuugugcucua

SEQ ID NO: 250017 - RNA, 23 nt, SARS coronavirus
acuucucauuguuuugacuugua

SEQ ID NO: 250018 - RNA, 18 nt, SARS coronavirus
acuucuauuaccuaggaa

SEQ ID NO: 250019 - RNA, 14 nt, SARS coronavirus
acuuccucaaggaa

SEQ ID NO: 250020 - RNA, 19 nt, SARS coronavirus
acuaugucuaacuaccaac

SEQ ID NO: 250021 - RNA, 22 nt, SARS coronavirus
acuaugguucaaacaugcacac

SEQ ID NO: 250022 - RNA, 20 nt, SARS coronavirus
acuaccgaagagcuacccga

SEQ ID NO: 250023 - RNA, 14 nt, SARS coronavirus
acuaaaagaaccuu

SEQ ID NO: 250024 - RNA, 20 nt, SARS coronavirus
acaccuaauguuacuaucaa

SEQ ID NO: 250025 - RNA, 15 nt, SARS coronavirus
acaauucuacuaaug

SEQ ID NO: 250026 - RNA, 13 nt, SARS coronavirus
acaauucuacuaa

SEQ ID NO: 250027 - RNA, 14 nt, SARS coronavirus
acauaccuaucagc

SEQ ID NO: 250028 - RNA, 17 nt, SARS coronavirus
acaagagcucuacucgc

SEQ ID NO: 250029 - RNA, 16 nt, SARS coronavirus
acaacgguacuauuac

SEQ ID NO: 250030 - RNA, 18 nt, SARS coronavirus
acaauggaaccuaguaau

SEQ ID NO: 250031 - RNA, 13 nt, SARS coronavirus
acaaugcugccac

SEQ ID NO: 250032 - RNA, 23 nt, SARS coronavirus
acaaugcugccaccgugcuacaa

SEQ ID NO: 250033 - RNA, 21 nt, SARS coronavirus
acaaugcuucuccugcaagua

SEQ ID NO: 250034 - RNA, 22 nt, SARS coronavirus
acaauagcagagauauugauua

SEQ ID NO: 250035 - RNA, 18 nt, SARS coronavirus
acaaauuaaaaugucuga

SEQ ID NO: 250036 - RNA, 17 nt, SARS coronavirus
cccagaugguacuucua

SEQ ID NO: 250037 - RNA, 21 nt, SARS coronavirus
cccagaagcuucacuucccua

SEQ ID NO: 250038 - RNA, 23 nt, SARS coronavirus
ccauuucacccucuugcugacaa

SEQ ID NO: 250039 - RNA, 19 nt, SARS coronavirus
cauuucacccucuugcuga

SEQ ID NO: 250040 - RNA, 17 nt, SARS coronavirus
ccaguucauuugcaauu

SEQ ID NO: 250041 - RNA, 19 nt, SARS coronavirus
ccaguucauuugcaauuua

SEQ ID NO: 250042 - RNA, 16 nt, SARS coronavirus
ccagguuacaauagca

SEQ ID NO: 250043 - RNA, 12 nt, SARS coronavirus
ccaugaacaaca

SEQ ID NO: 250044 - RNA, 17 nt, SARS coronavirus
ccacagauucaacugac

SEQ ID NO: 250045 - RNA, 14 nt, SARS coronavirus
ccagaugaccaaau

SEQ ID NO: 250046 - RNA, 18 nt, SARS coronavirus
cagggcguuccaaucaac

SEQ ID NO: 250047 - RNA, 15 nt, SARS coronavirus
caguaaaaauugaca

SEQ ID NO: 250048 - RNA, 20 nt, SARS coronavirus
caguaaaaauugacaaugcu

SEQ ID NO: 250049 - RNA, 22 nt, SARS coronavirus
caguaaaaauugacaaugcuuc

SEQ ID NO: 250050 - RNA, 23 nt, SARS coronavirus
caguaaaaauugacaaugcuucu

SEQ ID NO: 250051 - RNA, 18 nt, SARS coronavirus
cauaaaacgaacaugaaa

SEQ ID NO: 250052 - RNA, 15 nt, SARS coronavirus
caguucauuugcaau

SEQ ID NO: 250053 - RNA, 20 nt, SARS coronavirus
cauacgagggcaauucacca

SEQ ID NO: 250054 - RNA, 13 nt, SARS coronavirus
cauaugcacugua

SEQ ID NO: 250055 - RNA, 16 nt, SARS coronavirus
cagaagcuucacuucc

SEQ ID NO: 250056 - RNA, 21 nt, SARS coronavirus
cagaauggaggacgcaauggg

SEQ ID NO: 250057 - RNA, 18 nt, SARS coronavirus
cagaaugaaugagcucac

SEQ ID NO: 250058 - RNA, 16 nt, SARS coronavirus
cagcgcugugcaucua

SEQ ID NO: 250059 - RNA, 16 nt, SARS coronavirus
caaacugcugcauuua

SEQ ID NO: 250060 - RNA, 13 nt, SARS coronavirus
caaaaggcuucua

SEQ ID NO: 250061 - RNA, 16 nt, SARS coronavirus
auugcaauggcuugua

SEQ ID NO: 250062 - RNA, 22 nt, SARS coronavirus
auuucucuaugcaguugcauau

SEQ ID NO: 250063 - RNA, 23 nt, SARS coronavirus
auuucucuaugcaguugcauaug

SEQ ID NO: 250064 - RNA, 14 nt, SARS coronavirus
auuucuuacucuca

SEQ ID NO: 250065 - RNA, 20 nt, SARS coronavirus
auuuuauucuaauguuacag

SEQ ID NO: 250066 - RNA, 14 nt, SARS coronavirus
auuuucuacaaugc

SEQ ID NO: 250067 - RNA, 15 nt, SARS coronavirus
auuuucuacaaugca

SEQ ID NO: 250068 - RNA, 13 nt, SARS coronavirus
cacacuagccauc

SEQ ID NO: 250069 - RNA, 15 nt, SARS coronavirus
cacagcucucacuca

SEQ ID NO: 250070 - RNA, 18 nt, SARS coronavirus
cacagcucucacucagca

SEQ ID NO: 250071 - RNA, 11 nt, SARS coronavirus
caacugucaag

SEQ ID NO: 250072 - RNA, 17 nt, SARS coronavirus
caacugucaagauccag

SEQ ID NO: 250073 - RNA, 16 nt, SARS coronavirus
augcuacagcaacgau

SEQ ID NO: 250074 - RNA, 23 nt, SARS coronavirus
augcuacagcaacgauaccgcua

SEQ ID NO: 250075 - RNA, 17 nt, SARS coronavirus
augauguucaagcuccu

SEQ ID NO: 250076 - RNA, 21 nt, SARS coronavirus
augauguucaagcuccuaauu

SEQ ID NO: 250077 - RNA, 15 nt, SARS coronavirus
augcaguugcauaug

SEQ ID NO: 250078 - RNA, 12 nt, SARS coronavirus
auugacaaugcu

SEQ ID NO: 250079 - RNA, 21 nt, SARS coronavirus
auugacaaugcuucuccugca

SEQ ID NO: 250080 - RNA, 15 nt, SARS coronavirus
auuauuuaagccucu

SEQ ID NO: 250081 - RNA, 16 nt, SARS coronavirus
auuauuucuuacucuc

SEQ ID NO: 250082 - RNA, 19 nt, SARS coronavirus
auuaugaggacuuucagga

SEQ ID NO: 250083 - RNA, 19 nt, SARS coronavirus
auuauucucuuccugacau

SEQ ID NO: 250084 - RNA, 20 nt, SARS coronavirus
auuaacaauucuacuaaugu

SEQ ID NO: 250085 - RNA, 21 nt, SARS coronavirus
auggcagacaacgguacuauu

SEQ ID NO: 250086 - RNA, 15 nt, SARS coronavirus
auggcagcuagcccu

SEQ ID NO: 250087 - RNA, 21 nt, SARS coronavirus
auggcugauuuagucuaugcu

SEQ ID NO: 250088 - RNA, 17 nt, SARS coronavirus
ucaccaaacugcugcau

SEQ ID NO: 250089 - RNA, 16 nt, SARS coronavirus
ucaccaaaacuuuuca

SEQ ID NO: 250090 - RNA, 17 nt, SARS coronavirus
uauggaggcgcaauuuu

SEQ ID NO: 250091 - RNA, 23 nt, SARS coronavirus
ucauuugcaauuuacugcugcua

SEQ ID NO: 250092 - RNA, 17 nt, SARS coronavirus
ucauaccuuuuaaggau

SEQ ID NO: 250093 - RNA, 17 nt, SARS coronavirus
ucauacuauuaaucaua

SEQ ID NO: 250094 - RNA, 17 nt, SARS coronavirus
uccagcgguugcugucc

SEQ ID NO: 250095 - RNA, 22 nt, SARS coronavirus
ucccuacggcgcuaacaaagaa

SEQ ID NO: 250096 - RNA, 21 nt, SARS coronavirus
uccuuguaagguacaacacua

SEQ ID NO: 250097 - RNA, 15 nt, SARS coronavirus
ugcaauuuacugcug

SEQ ID NO: 250098 - RNA, 20 nt, SARS coronavirus
ugauauauuuucuacaaugc

SEQ ID NO: 250099 - RNA, 18 nt, SARS coronavirus
ugacuuguauuucucuau

SEQ ID NO: 250100 - RNA, 16 nt, SARS coronavirus
ugacaauaaccagaau

SEQ ID NO: 250101 - RNA, 23 nt, SARS coronavirus
ugacaacagauguuucaucuugu

SEQ ID NO: 250102 - RNA, 15 nt, SARS coronavirus
ucuuuauuuaacuca

SEQ ID NO: 250103 - RNA, 20 nt, SARS coronavirus
ucuuagaucaauuacugcac

SEQ ID NO: 250104 - RNA, 15 nt, SARS coronavirus
ucuuguugacuucca

SEQ ID NO: 250105 - RNA, 21 nt, SARS coronavirus
ucuaugcaguugcauaugcac

SEQ ID NO: 250106 - RNA, 16 nt, SARS coronavirus
uugcgagcuauaucac

SEQ ID NO: 250107 - RNA, 20 nt, SARS coronavirus
uugaugaggguaauugugau

SEQ ID NO: 250108 - RNA, 12 nt, SARS coronavirus
uucucuaugcag

SEQ ID NO: 250109 - RNA, 17 nt, SARS coronavirus
uucuaauguuacagggu

SEQ ID NO: 250110 - RNA, 20 nt, SARS coronavirus
uucaagcuccuaauuacacu

SEQ ID NO: 250111 - RNA, 21 nt, SARS coronavirus
uucaacugacaauaaccagaa

SEQ ID NO: 250112 - RNA, 18 nt, SARS coronavirus
uucaaacaugcacaccua

SEQ ID NO: 250113 - RNA, 15 nt, SARS coronavirus
uucaacaagagcucu

SEQ ID NO: 250114 - RNA, 17 nt, SARS coronavirus
uucacagcucucacuca

SEQ ID NO: 250115 - RNA, 21 nt, SARS coronavirus
uucacagcucucacucagcau

SEQ ID NO: 250116 - RNA, 16 nt, SARS coronavirus
uuacaucuugcgagcu

SEQ ID NO: 250117 - RNA, 13 nt, SARS coronavirus
uuaaucucacaua

SEQ ID NO: 250118 - RNA, 18 nt, SARS coronavirus
uguggccaguaacacuug

SEQ ID NO: 250119 - RNA, 19 nt, SARS coronavirus
uguuaacgugaguuuagua

SEQ ID NO: 250120 - RNA, 16 nt, SARS coronavirus
uuauuucuuacucuca

SEQ ID NO: 250121 - RNA, 20 nt, SARS coronavirus
uuauuaacaauucuacuaau

SEQ ID NO: 250122 - RNA, 16 nt, SARS coronavirus
uuagccuuucugcuau

SEQ ID NO: 250123 - RNA, 22 nt, SARS coronavirus
uuaucauuaugaggacuuucag

SEQ ID NO: 250124 - RNA, 18 nt, SARS coronavirus
uuauacgagcauguaacu

SEQ ID NO: 250125 - RNA, 18 nt, SARS coronavirus
uggugacaugguaccaca

SEQ ID NO: 250126 - RNA, 14 nt, SARS coronavirus
ugcuucuccugcaa

SEQ ID NO: 250127 - RNA, 13 nt, SARS coronavirus
ugcacuagcacac

SEQ ID NO: 250128 - RNA, 21 nt, SARS coronavirus
uggacccacagauucaacuga

SEQ ID NO: 250129 - RNA, 20 nt, SARS coronavirus
uggaagagcccuaaugugua

SEQ ID NO: 250130 - RNA, 16 nt, SARS coronavirus
uggaacuuuaacauug

SEQ ID NO: 250131 - RNA, 18 nt, SARS coronavirus
uuuuucagagcgcuacca

SEQ ID NO: 250132 - RNA, 15 nt, SARS coronavirus
uuggcuuugugcucu

SEQ ID NO: 250133 - RNA, 23 nt, SARS coronavirus
cuagggguaauacuuauagcacu

SEQ ID NO: 250134 - RNA, 17 nt, SARS coronavirus
cuauaucacuaucagga

SEQ ID NO: 250135 - RNA, 13 nt, SARS coronavirus
cuaauugcugucg

SEQ ID NO: 250136 - RNA, 23 nt, SARS coronavirus
cuaauugcugucgcuuccaggag

SEQ ID NO: 250137 - RNA, 19 nt, SARS coronavirus
cuacaacuuccucaaggaa

SEQ ID NO: 250138 - RNA, 16 nt, SARS coronavirus
cuacucgcguguuaaa

SEQ ID NO: 250139 - RNA, 17 nt, SARS coronavirus
cuaucagcugcgugcaa

SEQ ID NO: 250140 - RNA, 20 nt, SARS coronavirus
cuaugcaguugcauaugcac

SEQ ID NO: 250141 - RNA, 16 nt, SARS coronavirus
cuauuuggaaucuuga

SEQ ID NO: 250142 - RNA, 18 nt, SARS coronavirus
cuauuuggaaucuugacg

SEQ ID NO: 250143 - RNA, 13 nt, SARS coronavirus
cguuccaaucaac

SEQ ID NO: 250144 - RNA, 16 nt, SARS coronavirus
cgguugcuguccauga

SEQ ID NO: 250145 - RNA, 16 nt, SARS coronavirus
cggcgcuaacaaagaa

SEQ ID NO: 250146 - RNA, 16 nt, SARS coronavirus
cuugcacuagcacaca

SEQ ID NO: 250147 - RNA, 20 nt, SARS coronavirus
cuugcugacaauaaauuugc

SEQ ID NO: 250148 - RNA, 16 nt, SARS coronavirus
cuugcugcugucuaca

SEQ ID NO: 250149 - RNA, 23 nt, SARS coronavirus
cuugaauacacccaaagaccaca

SEQ ID NO: 250150 - RNA, 23 nt, SARS coronavirus
cuuauggauuuguuuaugagauu

SEQ ID NO: 250151 - RNA, 22 nt, SARS coronavirus
cuucacuucccuacggcgcuaa

SEQ ID NO: 250152 - RNA, 20 nt, SARS coronavirus
cuucaugaaggucaccaaac

SEQ ID NO: 250153 - RNA, 18 nt, SARS coronavirus
cuuagaucaauuacugca

SEQ ID NO: 250154 - RNA, 20 nt, SARS coronavirus
cugacauugauuguauuuac

SEQ ID NO: 250155 - RNA, 23 nt, SARS coronavirus
cucuugcugacaauaaauuugca

SEQ ID NO: 250156 - RNA, 17 nt, SARS coronavirus
cugccacagagaaauca

SEQ ID NO: 250157 - RNA, 16 nt, SARS coronavirus
ccagaugguacuucua

SEQ ID NO: 250158 - RNA, 23 nt, SARS coronavirus
ccagaugguacuucuauuaccua

SEQ ID NO: 250159 - RNA, 15 nt, SARS coronavirus
ccaguucauuugcaa

SEQ ID NO: 250160 - RNA, 18 nt, SARS coronavirus
ccacagauucaacugaca

SEQ ID NO: 250161 - RNA, 20 nt, SARS coronavirus
ccacagauucaacugacaau

SEQ ID NO: 250162 - RNA, 17 nt, SARS coronavirus
cauuguuuugacuugua

SEQ ID NO: 250163 - RNA, 20 nt, SARS coronavirus
caugguaccacauauaucac

SEQ ID NO: 250164 - RNA, 15 nt, SARS coronavirus
caugaaaauuauucu

SEQ ID NO: 250165 - RNA, 17 nt, SARS coronavirus
caugaaaauuauucucu

SEQ ID NO: 250166 - RNA, 24 nt, SARS coronavirus
caugaaggucaccaaacugcugca

SEQ ID NO: 250167 - RNA, 19 nt, SARS coronavirus
cccacagauucaacugaca

SEQ ID NO: 250168 - RNA, 12 nt, SARS coronavirus
gaugauguucaa

SEQ ID NO: 250169 - RNA, 15 nt, SARS coronavirus
gauugcgauugcaau

SEQ ID NO: 250170 - RNA, 23 nt, SARS coronavirus
gauuguccagcgguugcugucca

SEQ ID NO: 250171 - RNA, 17 nt, SARS coronavirus
gauucccucgaggccag

SEQ ID NO: 250172 - RNA, 16 nt, SARS coronavirus
gauucaacugacaaua

SEQ ID NO: 250173 - RNA, 17 nt, SARS coronavirus
gauugcaauggcuugua

SEQ ID NO: 250174 - RNA, 20 nt, SARS coronavirus
gaggagguucaacaagagcu

SEQ ID NO: 250175 - RNA, 16 nt, SARS coronavirus
gaggcauacuaugucu

SEQ ID NO: 250176 - RNA, 20 nt, SARS coronavirus
gagcuauaucacuaucagga

SEQ ID NO: 250177 - RNA, 20 nt, SARS coronavirus
gagcucacuuuaauugacuu

SEQ ID NO: 250178 - RNA, 14 nt, SARS coronavirus
gaggacgcaauggg

SEQ ID NO: 250179 - RNA, 22 nt, SARS coronavirus
aaagguuuuaccuuuucauaga

SEQ ID NO: 250180 - RNA, 17 nt, SARS coronavirus
aaagcuuguuuuccucu

SEQ ID NO: 250181 - RNA, 16 nt, SARS coronavirus
gacaauaaauuugcac

SEQ ID NO: 250182 - RNA, 17 nt, SARS coronavirus
gacagaaugaaugagcu

SEQ ID NO: 250183 - RNA, 18 nt, SARS coronavirus
gacagaaugaaugagcuc

SEQ ID NO: 250184 - RNA, 15 nt, SARS coronavirus
gaacaugaaacuucu

SEQ ID NO: 250185 - RNA, 22 nt, SARS coronavirus
gaaccuaguaauagguuuccua

SEQ ID NO: 250186 - RNA, 17 nt, SARS coronavirus
gaacaaauuaaaauguc

SEQ ID NO: 250187 - RNA, 19 nt, SARS coronavirus
gaacaaauuaaaaugucug

SEQ ID NO: 250188 - RNA, 23 nt, SARS coronavirus
gaaauuuuuagaucagacacucu

SEQ ID NO: 250189 - RNA, 20 nt, SARS coronavirus
cuuuaaucaauguguaacau

SEQ ID NO: 250190 - RNA, 21 nt, SARS coronavirus
aaacgaacaugaaaauuauuc

SEQ ID NO: 250191 - RNA, 14 nt, SARS coronavirus
gaacuaacuauuau

SEQ ID NO: 250192 - RNA, 22 nt, SARS coronavirus
gcugcgugcaagaucaguuuca

SEQ ID NO: 250193 - RNA, 16 nt, SARS coronavirus
gccccagaugguacuu

SEQ ID NO: 250194 - RNA, 20 nt, SARS coronavirus
gccaguaaaaauugacaaug

SEQ ID NO: 250195 - RNA, 21 nt, SARS coronavirus
gccaguaaaaauugacaaugc

SEQ ID NO: 250196 - RNA, 22 nt, SARS coronavirus
gccaguaaaaauugacaaugcu

SEQ ID NO: 250197 - RNA, 13 nt, SARS coronavirus
gcaacgauaccgc

SEQ ID NO: 250198 - RNA, 13 nt, SARS coronavirus
gguuuuuguacau

SEQ ID NO: 250199 - RNA, 22 nt, SARS coronavirus
gguucaaacaugcacaccuaau

SEQ ID NO: 250200 - RNA, 12 nt, SARS coronavirus
gguauucuugcu

SEQ ID NO: 250201 - RNA, 17 nt, SARS coronavirus
gguauggaggcgcaauu

SEQ ID NO: 250202 - RNA, 17 nt, SARS coronavirus
gguccagaugaccaaau

SEQ ID NO: 250203 - RNA, 15 nt, SARS coronavirus
ggucaccaaacugcu

SEQ ID NO: 250204 - RNA, 24 nt, SARS coronavirus
gcuucuccugcaaguacuguucau

SEQ ID NO: 250205 - RNA, 18 nt, SARS coronavirus
gcuucuacgcagagggaa

SEQ ID NO: 250206 - RNA, 19 nt, SARS coronavirus
ggcaaggccaaaacagcgc

SEQ ID NO: 250207 - RNA, 23 nt, SARS coronavirus
ggcacaggcacuaguacugaugu

SEQ ID NO: 250208 - RNA, 19 nt, SARS coronavirus
ggcuucuacgcagagggaa

SEQ ID NO: 250209 - RNA, 13 nt, SARS coronavirus
uagaugaugaaga

SEQ ID NO: 250210 - RNA, 23 nt, SARS coronavirus
uagcaaucuuuaaucaaugugua

SEQ ID NO: 250211 - RNA, 22 nt, SARS coronavirus
uagcagagauauugauuaucau

SEQ ID NO: 250212 - RNA, 13 nt, SARS coronavirus
uaguagugcuauc

SEQ ID NO: 250213 - RNA, 22 nt, SARS coronavirus
uagcguacuucuuuuucuugcu

SEQ ID NO: 250214 - RNA, 23 nt, SARS coronavirus
uagcuacuucguugcuuccuuca

SEQ ID NO: 250215 - RNA, 14 nt, SARS coronavirus
uaggaaagguuuua

SEQ ID NO: 250216 - RNA, 18 nt, SARS coronavirus
uagggaggacuugaaaga

SEQ ID NO: 250217 - RNA, 14 nt, SARS coronavirus
uaauagguuuccua

SEQ ID NO: 250218 - RNA, 19 nt, SARS coronavirus
guuucauacuauuaaucau

SEQ ID NO: 250219 - RNA, 20 nt, SARS coronavirus
gucugauaauggaccccaau

SEQ ID NO: 250220 - RNA, 16 nt, SARS coronavirus
gugacaugguaccaca

SEQ ID NO: 250221 - RNA, 16 nt, SARS coronavirus
ucaacaagagcucuac

SEQ ID NO: 250222 - RNA, 23 nt, SARS coronavirus
ucaaguuuagaguagauggugac

SEQ ID NO: 250223 - RNA, 17 nt, SARS coronavirus
ucaagcuccuaauuaca

SEQ ID NO: 250224 - RNA, 22 nt, SARS coronavirus
ucaagcuccuaauuacacucaa

SEQ ID NO: 250225 - RNA, 14 nt, SARS coronavirus
ucacucagcauggc

SEQ ID NO: 250226 - RNA, 15 nt, SARS coronavirus
ucauacuauuaauca

SEQ ID NO: 250227 - RNA, 13 nt, SARS coronavirus
ucauagauggcac

SEQ ID NO: 250228 - RNA, 17 nt, SARS coronavirus
ucauagauggcacacua

SEQ ID NO: 250229 - RNA, 20 nt, SARS coronavirus
ucauuugcaauuuacugcug

SEQ ID NO: 250230 - RNA, 18 nt, SARS coronavirus
ucauuguuuugacuugua

SEQ ID NO: 250231 - RNA, 19 nt, SARS coronavirus
ucauuguuuugacuuguau

SEQ ID NO: 250232 - RNA, 22 nt, SARS coronavirus
ucuugcugacaauaaauuugca

SEQ ID NO: 250233 - RNA, 15 nt, SARS coronavirus
ucuugguucacagcu

SEQ ID NO: 250234 - RNA, 21 nt, SARS coronavirus
ucuuccauuuuauucuaaugu

SEQ ID NO: 250235 - RNA, 24 nt, SARS coronavirus
ugaaggucaccaaacugcugcauu

SEQ ID NO: 250236 - RNA, 16 nt, SARS coronavirus
ugacaauaaauuugca

SEQ ID NO: 250237 - RNA, 19 nt, SARS coronavirus
ugacaauaaauuugcacua

SEQ ID NO: 250238 - RNA, 21 nt, SARS coronavirus
uccuauuccuagccuggauua

SEQ ID NO: 250239 - RNA, 23 nt, SARS coronavirus
ucuaugcucuacgucauuuugau

SEQ ID NO: 250240 - RNA, 16 nt, SARS coronavirus
ucucuuccugacauug

SEQ ID NO: 250241 - RNA, 18 nt, SARS coronavirus
ucucuuccugacauugau

SEQ ID NO: 250242 - RNA, 12 nt, SARS coronavirus
uuuuuagaucag

SEQ ID NO: 250243 - RNA, 13 nt, SARS coronavirus
aagaaauucaacu

SEQ ID NO: 250244 - RNA, 13 nt, SARS coronavirus
aagaaccuuguac

SEQ ID NO: 250245 - RNA, 18 nt, SARS coronavirus
aacuaagaagaauuauuc

SEQ ID NO: 250246 - RNA, 15 nt, SARS coronavirus
aaccucaugugcuug

SEQ ID NO: 250247 - RNA, 16 nt, SARS coronavirus
aacgaacuaacuauua

SEQ ID NO: 250248 - RNA, 22 nt, SARS coronavirus
aaccuaguaauagguuuccuau

SEQ ID NO: 250249 - RNA, 19 nt, SARS coronavirus
uucuuccauuuuauucuaa

SEQ ID NO: 250250 - RNA, 18 nt, SARS coronavirus
uuuagagacguacuuguu

SEQ ID NO: 250251 - RNA, 14 nt, SARS coronavirus
uuucauacuauuaa

SEQ ID NO: 250252 - RNA, 16 nt, SARS coronavirus
uuuuaaggaugguauu

SEQ ID NO: 250253 - RNA, 15 nt, SARS coronavirus
uuuucucauuguugc

SEQ ID NO: 250254 - RNA, 12 nt, SARS coronavirus
aauaacaaugcu

SEQ ID NO: 250255 - RNA, 22 nt, SARS coronavirus
aaguuccuaaaaacuaauugcu

SEQ ID NO: 250256 - RNA, 19 nt, SARS coronavirus
aaggaggaacuuagauucc

SEQ ID NO: 250257 - RNA, 18 nt, SARS coronavirus
aaguacuguucaugcuac

SEQ ID NO: 250258 - RNA, 12 nt, SARS coronavirus
aaucugaacucu

SEQ ID NO: 250259 - RNA, 16 nt, SARS coronavirus
aaugcuucuccugcaa

SEQ ID NO: 250260 - RNA, 22 nt, SARS coronavirus
aauggcugauuuagucuaugcu

SEQ ID NO: 250261 - RNA, 21 nt, SARS coronavirus
aauuacacucaacauacuuca

SEQ ID NO: 250262 - RNA, 20 nt, SARS coronavirus
aauugcugucgcuuccagga

SEQ ID NO: 250263 - RNA, 12 nt, SARS coronavirus
aauugacaaugc

SEQ ID NO: 250264 - RNA, 14 nt, SARS coronavirus
aauucaccauuuca

SEQ ID NO: 250265 - RNA, 14 nt, SARS coronavirus
ugguaccuucauga

SEQ ID NO: 250266 - RNA, 15 nt, SARS coronavirus
uguauuucucuaugc

SEQ ID NO: 250267 - RNA, 14 nt, SARS coronavirus
uggacccacagauu

SEQ ID NO: 250268 - RNA, 16 nt, SARS coronavirus
uggacccacagauuca

SEQ ID NO: 250269 - RNA, 14 nt, SARS coronavirus
uggaccccaaucaa

SEQ ID NO: 250270 - RNA, 15 nt, SARS coronavirus
uggaccccaaucaaa

SEQ ID NO: 250271 - RNA, 19 nt, SARS coronavirus
ugcuuuuuagccuuucugc

SEQ ID NO: 250272 - RNA, 13 nt, SARS coronavirus
ugcaucuaauaaa

SEQ ID NO: 250273 - RNA, 20 nt, SARS coronavirus
ugacuuccagguuacaauag

SEQ ID NO: 250274 - RNA, 13 nt, SARS coronavirus
uucauacuauuaa

SEQ ID NO: 250275 - RNA, 14 nt, SARS coronavirus
uucauacuauuaau

SEQ ID NO: 250276 - RNA, 17 nt, SARS coronavirus
uuccuuguuuuaauaau

SEQ ID NO: 250277 - RNA, 22 nt, SARS coronavirus
uuccuuguuuuaauaaugcuua

SEQ ID NO: 250278 - RNA, 13 nt, SARS coronavirus
uucuaauguuaca

SEQ ID NO: 250279 - RNA, 12 nt, SARS coronavirus
uucuacaaugca

SEQ ID NO: 250280 - RNA, 21 nt, SARS coronavirus
uucuacaaugcaucaacgcau

SEQ ID NO: 250281 - RNA, 22 nt, SARS coronavirus
uucuccugcaaguacuguucau

SEQ ID NO: 250282 - RNA, 14 nt, SARS coronavirus
uucucuuccugaca

SEQ ID NO: 250283 - RNA, 18 nt, SARS coronavirus
uucucauuguugcugcuc

SEQ ID NO: 250284 - RNA, 19 nt, SARS coronavirus
uuauuauuucuuacucuca

SEQ ID NO: 250285 - RNA, 20 nt, SARS coronavirus
uuauuauuucuuacucucac

SEQ ID NO: 250286 - RNA, 16 nt, SARS coronavirus
uuauuaacaauucuac

SEQ ID NO: 250287 - RNA, 17 nt, SARS coronavirus
uuauuaacaauucuacu

SEQ ID NO: 250288 - RNA, 19 nt, SARS coronavirus
uuaguuaacuuuaaucuca

SEQ ID NO: 250289 - RNA, 23 nt, SARS coronavirus
uuaucauuaugaggacuuucagg

SEQ ID NO: 250290 - RNA, 23 nt, SARS coronavirus
uuagggaggacuugaaagagcca

SEQ ID NO: 250291 - RNA, 20 nt, SARS coronavirus
uuaaucaauguguaacauua

SEQ ID NO: 250292 - RNA, 16 nt, SARS coronavirus
ugucuaacuaccaaca

SEQ ID NO: 250293 - RNA, 13 nt, SARS coronavirus
cacuaugguucaa

SEQ ID NO: 250294 - RNA, 21 nt, SARS coronavirus
cacuaugguucaaacaugcac

SEQ ID NO: 250295 - RNA, 21 nt, SARS coronavirus
caccgugcuacaacuuccuca

SEQ ID NO: 250296 - RNA, 23 nt, SARS coronavirus
caccgugcuacaacuuccucaag

SEQ ID NO: 250297 - RNA, 21 nt, SARS coronavirus
caagccucuucucgcuccuca

SEQ ID NO: 250298 - RNA, 15 nt, SARS coronavirus
cagaugguacuucua

SEQ ID NO: 250299 - RNA, 22 nt, SARS coronavirus
cagauucaacugacaauaacca

SEQ ID NO: 250300 - RNA, 13 nt, SARS coronavirus
caggaacauacga

SEQ ID NO: 250301 - RNA, 20 nt, SARS coronavirus
cagcucucacucagcauggc

SEQ ID NO: 250302 - RNA, 16 nt, SARS coronavirus
caaaguuccuaaaaac

SEQ ID NO: 250303 - RNA, 17 nt, SARS coronavirus
caacagauguuucaucu

SEQ ID NO: 250304 - RNA, 14 nt, SARS coronavirus
auuugugcuuuuua

SEQ ID NO: 250305 - RNA, 19 nt, SARS coronavirus
auggaccccaaucaaacca

SEQ ID NO: 250306 - RNA, 15 nt, SARS coronavirus
auuauuaacaauucu

SEQ ID NO: 250307 - RNA, 16 nt, SARS coronavirus
auggaggcgcaauuuu

SEQ ID NO: 250308 - RNA, 16 nt, SARS coronavirus
auuaugaggacuuuca

SEQ ID NO: 250309 - RNA, 14 nt, SARS coronavirus
augaaugagcucac

SEQ ID NO: 250310 - RNA, 20 nt, SARS coronavirus
augagcucacuuuaauugac

SEQ ID NO: 250311 - RNA, 18 nt, SARS coronavirus
augagauuuuuuacucuu

SEQ ID NO: 250312 - RNA, 15 nt, SARS coronavirus
aucuaauaaaccuca

SEQ ID NO: 250313 - RNA, 16 nt, SARS coronavirus
aucuuguugacuucca

SEQ ID NO: 250314 - RNA, 18 nt, SARS coronavirus
augcaguugcauaugcac

SEQ ID NO: 250315 - RNA, 23 nt, SARS coronavirus
auagcagagauauugauuaucau

SEQ ID NO: 250316 - RNA, 24 nt, SARS coronavirus
auaaugcuagggagagcugccuau

SEQ ID NO: 250317 - RNA, 19 nt, SARS coronavirus
auauauuuucuacaaugca

SEQ ID NO: 250318 - RNA, 14 nt, SARS coronavirus
auaucacuaucagg

SEQ ID NO: 250319 - RNA, 17 nt, SARS coronavirus
aucgaggguacagugaa

SEQ ID NO: 250320 - RNA, 19 nt, SARS coronavirus
agguucaacaagagcucua

SEQ ID NO: 250321 - RNA, 17 nt, SARS coronavirus
agguuuuaccuuuucau

SEQ ID NO: 250322 - RNA, 16 nt, SARS coronavirus
aggaacuggcccagaa

SEQ ID NO: 250323 - RNA, 15 nt, SARS coronavirus
aggaacaacauugcc

SEQ ID NO: 250324 - RNA, 22 nt, SARS coronavirus
auaauacugcgucuugguucac

SEQ ID NO: 250325 - RNA, 19 nt, SARS coronavirus
auaaaccucaugugcuuga

SEQ ID NO: 250326 - RNA, 18 nt, SARS coronavirus
aguugcauaugcacugua

SEQ ID NO: 250327 - RNA, 20 nt, SARS coronavirus
aguuaagaggcauacuaugu

SEQ ID NO: 250328 - RNA, 19 nt, SARS coronavirus
aacagguuuuuguacauaa

SEQ ID NO: 250329 - RNA, 22 nt, SARS coronavirus
aacauacgagggcaauucacca

SEQ ID NO: 250330 - RNA, 16 nt, SARS coronavirus
aacauacuucaucuau

SEQ ID NO: 250331 - RNA, 14 nt, SARS coronavirus
aacuccuggcagca

SEQ ID NO: 250332 - RNA, 12 nt, SARS coronavirus
aacgaacaugaa

SEQ ID NO: 250333 - RNA, 16 nt, SARS coronavirus
aagagcccuaaugugu

SEQ ID NO: 250334 - RNA, 21 nt, SARS coronavirus
aacaauggaaccuaguaauag

SEQ ID NO: 250335 - RNA, 17 nt, SARS coronavirus
aaacgaacuaacuauua

SEQ ID NO: 250336 - RNA, 20 nt, SARS coronavirus
aauaauugcgcucaauaaaa

SEQ ID NO: 250337 - RNA, 16 nt, SARS coronavirus
aauaacaaugcugcca

SEQ ID NO: 250338 - RNA, 19 nt, SARS coronavirus
aaguacuguucaugcuaca

SEQ ID NO: 250339 - RNA, 16 nt, SARS coronavirus
aauucuccugcucgaa

SEQ ID NO: 250340 - RNA, 16 nt, SARS coronavirus
aauugacaaugcuucu

SEQ ID NO: 250341 - RNA, 15 nt, SARS coronavirus
aauucaccauuucac

SEQ ID NO: 250342 - RNA, 15 nt, SARS coronavirus
acaacgguacuauua

SEQ ID NO: 250343 - RNA, 16 nt, SARS coronavirus
acaugcacaccuaaug

SEQ ID NO: 250344 - RNA, 13 nt, SARS coronavirus
accaaacugcugc

SEQ ID NO: 250345 - RNA, 15 nt, SARS coronavirus
accacuuuugaugau

SEQ ID NO: 250346 - RNA, 18 nt, SARS coronavirus
acgguuuacgucuacucg

SEQ ID NO: 250347 - RNA, 15 nt, SARS coronavirus
acccaauaauacugc

SEQ ID NO: 250348 - RNA, 14 nt, SARS coronavirus
acccacagauucaa

SEQ ID NO: 250349 - RNA, 22 nt, SARS coronavirus
acccacagauucaacugacaau

SEQ ID NO: 250350 - RNA, 17 nt, SARS coronavirus
acgaacuuauguacuca

SEQ ID NO: 250351 - RNA, 14 nt, SARS coronavirus
acuuuaauugacuu

SEQ ID NO: 250352 - RNA, 17 nt, SARS coronavirus
acuuuaauugacuucua

SEQ ID NO: 250353 - RNA, 21 nt, SARS coronavirus
acuugcacuagcacacacuuu

SEQ ID NO: 250354 - RNA, 22 nt, SARS coronavirus
agcaacgauaccgcuacaagcc

SEQ ID NO: 250355 - RNA, 21 nt, SARS coronavirus
agauguuucaucuuguugacu

SEQ ID NO: 250356 - RNA, 22 nt, SARS coronavirus
agauggugacaugguaccacau

SEQ ID NO: 250357 - RNA, 15 nt, SARS coronavirus
agaucaauuacugca

SEQ ID NO: 250358 - RNA, 21 nt, SARS coronavirus
aaacagguacguuaauaguua

SEQ ID NO: 250359 - RNA, 15 nt, SARS coronavirus
aaaauugacaaugcu

SEQ ID NO: 250360 - RNA, 17 nt, SARS coronavirus
aaaauugacaaugcuuc

SEQ ID NO: 250361 - RNA, 13 nt, SARS coronavirus
cacucaacauacu

SEQ ID NO: 250362 - RNA, 21 nt, SARS coronavirus
cacucgaaauccaggaucuag

SEQ ID NO: 250363 - RNA, 23 nt, SARS coronavirus
cacgucagcgucuaacuaaauac

SEQ ID NO: 250364 - RNA, 21 nt, SARS coronavirus
cacuaacuugcacuagcacac

SEQ ID NO: 250365 - RNA, 22 nt, SARS coronavirus
cacacacuuugcuuuugcuugu

SEQ ID NO: 250366 - RNA, 17 nt, SARS coronavirus
caaugcuucuccugcaa

SEQ ID NO: 250367 - RNA, 13 nt, SARS coronavirus
auuuacugcugcu

SEQ ID NO: 250368 - RNA, 14 nt, SARS coronavirus
auuuacugcugcua

SEQ ID NO: 250369 - RNA, 22 nt, SARS coronavirus
auuucacccucuugcugacaau

SEQ ID NO: 250370 - RNA, 22 nt, SARS coronavirus
auuuauuagacucuuacuuugu

SEQ ID NO: 250371 - RNA, 22 nt, SARS coronavirus
auugcuauuuggaaucuugacg

SEQ ID NO: 250372 - RNA, 20 nt, SARS coronavirus
auucucuuccugacauugau

SEQ ID NO: 250373 - RNA, 21 nt, SARS coronavirus
auuacugcacagccaguaaaa

SEQ ID NO: 250374 - RNA, 17 nt, SARS coronavirus
auuagggaggacuugaa

SEQ ID NO: 250375 - RNA, 20 nt, SARS coronavirus
auggugacaugguaccacau

SEQ ID NO: 250376 - RNA, 16 nt, SARS coronavirus
auguuacuaucaacug

SEQ ID NO: 250377 - RNA, 21 nt, SARS coronavirus
caucuaauaaaccucaugugc

SEQ ID NO: 250378 - RNA, 18 nt, SARS coronavirus
cauuguuuugacuuguau

SEQ ID NO: 250379 - RNA, 19 nt, SARS coronavirus
cauuguugcugcucuagua

SEQ ID NO: 250380 - RNA, 17 nt, SARS coronavirus
cauuaugaggacuuuca

SEQ ID NO: 250381 - RNA, 18 nt, SARS coronavirus
cauuaagagaaagacaga

SEQ ID NO: 250382 - RNA, 19 nt, SARS coronavirus
ccagaauggaggacgcaau

SEQ ID NO: 250383 - RNA, 14 nt, SARS coronavirus
ccugacauugauug

SEQ ID NO: 250384 - RNA, 14 nt, SARS coronavirus
ccucuugcugacaa

SEQ ID NO: 250385 - RNA, 15 nt, SARS coronavirus
ccccaaucaaaccaa

SEQ ID NO: 250386 - RNA, 22 nt, SARS coronavirus
accaacgguuuacgucuacucg

SEQ ID NO: 250387 - RNA, 21 nt, SARS coronavirus
acaugaaaauuauucucuucc

SEQ ID NO: 250388 - RNA, 18 nt, SARS coronavirus
acaucuugcgagcuauau

SEQ ID NO: 250389 - RNA, 14 nt, SARS coronavirus
acaugguaccacau

SEQ ID NO: 250390 - RNA, 22 nt, SARS coronavirus
acagucggugauuauuauuaac

SEQ ID NO: 250391 - RNA, 22 nt, SARS coronavirus
acagaaugaaugagcucacuuu

SEQ ID NO: 250392 - RNA, 14 nt, SARS coronavirus
aauuuacugcugcu

SEQ ID NO: 250393 - RNA, 16 nt, SARS coronavirus
accucaugugcuugaa

SEQ ID NO: 250394 - RNA, 21 nt, SARS coronavirus
accucaugugcuugaagaucc

SEQ ID NO: 250395 - RNA, 11 nt, SARS coronavirus
accccaaucaa

SEQ ID NO: 250396 - RNA, 11 nt, SARS coronavirus
acccucuugcu

SEQ ID NO: 250397 - RNA, 15 nt, SARS coronavirus
acccucuugcugaca

SEQ ID NO: 250398 - RNA, 18 nt, SARS coronavirus
accaugaacaacaaguca

SEQ ID NO: 250399 - RNA, 14 nt, SARS coronavirus
agaagcuucacuuc

SEQ ID NO: 250400 - RNA, 18 nt, SARS coronavirus
agaagcuucacuucccua

SEQ ID NO: 250401 - RNA, 17 nt, SARS coronavirus
agacaacgguacuauua

SEQ ID NO: 250402 - RNA, 18 nt, SARS coronavirus
acgguacucgacauaccu

SEQ ID NO: 250403 - RNA, 23 nt, SARS coronavirus
auagcguacuucuuuuucuugcu

SEQ ID NO: 250404 - RNA, 20 nt, SARS coronavirus
auaucacgucagcgucuaac

SEQ ID NO: 250405 - RNA, 14 nt, SARS coronavirus
auauauuuucuaca

SEQ ID NO: 250406 - RNA, 16 nt, SARS coronavirus
auauuuugguuuucac

SEQ ID NO: 250407 - RNA, 21 nt, SARS coronavirus
auacgagcauguaacuuugaa

SEQ ID NO: 250408 - RNA, 23 nt, SARS coronavirus
auagcaaucuuuaaucaaugugu

SEQ ID NO: 250409 - RNA, 21 nt, SARS coronavirus
auaaauuugcacuaacuugca

SEQ ID NO: 250410 - RNA, 21 nt, SARS coronavirus
aggcaauuuauuagacucuua

SEQ ID NO: 250411 - RNA, 14 nt, SARS coronavirus
aggcuugauguggc

SEQ ID NO: 250412 - RNA, 16 nt, SARS coronavirus
agccccagaugguacu

SEQ ID NO: 250413 - RNA, 15 nt, SARS coronavirus
agcuagguguuggua

SEQ ID NO: 250414 - RNA, 20 nt, SARS coronavirus
agcuacuucguugcuuccuu

SEQ ID NO: 250415 - RNA, 21 nt, SARS coronavirus
agcgccgaccccaagguuuac

SEQ ID NO: 250416 - RNA, 19 nt, SARS coronavirus
aguaaaaauugacaaugcu

SEQ ID NO: 250417 - RNA, 14 nt, SARS coronavirus
aguaacacuugcuu

SEQ ID NO: 250418 - RNA, 22 nt, SARS coronavirus
agggcuuccaguucauuugcaa

SEQ ID NO: 250419 - RNA, 18 nt, SARS coronavirus
aguuccuaaaaacuaauu

SEQ ID NO: 250420 - RNA, 23 nt, SARS coronavirus
aguucauuugcaauuuacugcug

SEQ ID NO: 250421 - RNA, 16 nt, SARS coronavirus
aguugcauaugcacug

SEQ ID NO: 250422 - RNA, 20 nt, SARS coronavirus
cuacuucguugcuuccuuca

SEQ ID NO: 250423 - RNA, 13 nt, SARS coronavirus
cuacaacuuccuc

SEQ ID NO: 250424 - RNA, 14 nt, SARS coronavirus
cuacaacuuccuca

SEQ ID NO: 250425 - RNA, 16 nt, SARS coronavirus
cuaauguuacuaucaa

SEQ ID NO: 250426 - RNA, 21 nt, SARS coronavirus
cuaauguuacuaucaacuguc

SEQ ID NO: 250427 - RNA, 22 nt, SARS coronavirus
cuaauguuacuaucaacuguca

SEQ ID NO: 250428 - RNA, 17 nt, SARS coronavirus
cucacuuuaauugacuu

SEQ ID NO: 250429 - RNA, 22 nt, SARS coronavirus
cucacuuuaauugacuucuauu

SEQ ID NO: 250430 - RNA, 21 nt, SARS coronavirus
cucaauaaaagauggcagcua

SEQ ID NO: 250431 - RNA, 14 nt, SARS coronavirus
cuauaucacuauca

SEQ ID NO: 250432 - RNA, 15 nt, SARS coronavirus
cgugguauucuugcu

SEQ ID NO: 250433 - RNA, 12 nt, SARS coronavirus
cugcuauuccuu

SEQ ID NO: 250434 - RNA, 17 nt, SARS coronavirus
cuuaggagaaugacaaa

SEQ ID NO: 250435 - RNA, 18 nt, SARS coronavirus
cuugaauacacccaaaga

SEQ ID NO: 250436 - RNA, 20 nt, SARS coronavirus
cuuccugacauugauuguau

SEQ ID NO: 250437 - RNA, 13 nt, SARS coronavirus
cuucuauuaccua

SEQ ID NO: 250438 - RNA, 21 nt, SARS coronavirus
gcauuuagagacguacuuguu

SEQ ID NO: 250439 - RNA, 16 nt, SARS coronavirus
gccaaaaggcuucuac

SEQ ID NO: 250440 - RNA, 20 nt, SARS coronavirus
gacuuucaggauugcuauuu

SEQ ID NO: 250441 - RNA, 18 nt, SARS coronavirus
gagcuauaucacuaucag

SEQ ID NO: 250442 - RNA, 21 nt, SARS coronavirus
gacccacagauucaacugaca

SEQ ID NO: 250443 - RNA, 14 nt, SARS coronavirus
cuugauguggcuua

SEQ ID NO: 250444 - RNA, 23 nt, SARS coronavirus
gaaagugaguacgaacuuaugua

SEQ ID NO: 250445 - RNA, 18 nt, SARS coronavirus
cuugguucacagcucuca

SEQ ID NO: 250446 - RNA, 16 nt, SARS coronavirus
gaauuauuaugagaug

SEQ ID NO: 250447 - RNA, 17 nt, SARS coronavirus
gaauggaggacgcaaug

SEQ ID NO: 250448 - RNA, 14 nt, SARS coronavirus
uacucgacauaccu

SEQ ID NO: 250449 - RNA, 15 nt, SARS coronavirus
uagguuuccuauucc

SEQ ID NO: 250450 - RNA, 20 nt, SARS coronavirus
uaguacagcgcugugcaucu

SEQ ID NO: 250451 - RNA, 19 nt, SARS coronavirus
uaugucuaacuaccaacau

SEQ ID NO: 250452 - RNA, 15 nt, SARS coronavirus
uauuuggaaucuuga

SEQ ID NO: 250453 - RNA, 13 nt, SARS coronavirus
uauuuauuuugcu

SEQ ID NO: 250454 - RNA, 23 nt, SARS coronavirus
uauuucucuaugcaguugcauau

SEQ ID NO: 250455 - RNA, 15 nt, SARS coronavirus
uauuuugguuuucac

SEQ ID NO: 250456 - RNA, 12 nt, SARS coronavirus
uauugcugcuag

SEQ ID NO: 250457 - RNA, 22 nt, SARS coronavirus
ucaagccucuucucgcuccuca

SEQ ID NO: 250458 - RNA, 16 nt, SARS coronavirus
ucaacugucaagaucc

SEQ ID NO: 250459 - RNA, 16 nt, SARS coronavirus
gugguagugaccuuga

SEQ ID NO: 250460 - RNA, 14 nt, SARS coronavirus
gugguauucuugcu

SEQ ID NO: 250461 - RNA, 23 nt, SARS coronavirus
uacgagggcaauucaccauuuca

SEQ ID NO: 250462 - RNA, 13 nt, SARS coronavirus
uacacccaaagac

SEQ ID NO: 250463 - RNA, 22 nt, SARS coronavirus
uaauggaccccaaucaaaccaa

SEQ ID NO: 250464 - RNA, 13 nt, SARS coronavirus
uaauuacacucaa

SEQ ID NO: 250465 - RNA, 15 nt, SARS coronavirus
uaauacuuauagcac

SEQ ID NO: 250466 - RNA, 14 nt, SARS coronavirus
uaaucaauguguaa

SEQ ID NO: 250467 - RNA, 18 nt, SARS coronavirus
guauucuugcuagucaca

SEQ ID NO: 250468 - RNA, 15 nt, SARS coronavirus
gguggacccacagau

SEQ ID NO: 250469 - RNA, 22 nt, SARS coronavirus
ggguaauacuuauagcacugcu

SEQ ID NO: 250470 - RNA, 20 nt, SARS coronavirus
gugcucuaggaaagguuuua

SEQ ID NO: 250471 - RNA, 15 nt, SARS coronavirus
ggcagaugggcuaug

SEQ ID NO: 250472 - RNA, 19 nt, SARS coronavirus
ggcacuaguacugaugucg

SEQ ID NO: 250473 - RNA, 21 nt, SARS coronavirus
gcguuccaaucaacaccaaua

SEQ ID NO: 250474 - RNA, 14 nt, SARS coronavirus
gcuauugcugcuag

SEQ ID NO: 250475 - RNA, 23 nt, SARS coronavirus
gcucuuguggccaguaacacuug

SEQ ID NO: 250476 - RNA, 18 nt, SARS coronavirus
gcugacaauaaauuugca

SEQ ID NO: 250477 - RNA, 20 nt, SARS coronavirus
uccucuggcucuuguggcca

SEQ ID NO: 250478 - RNA, 17 nt, SARS coronavirus
ucuaacuaaauacacaa

SEQ ID NO: 250479 - RNA, 16 nt, SARS coronavirus
ucgugguauucuugcu

SEQ ID NO: 250480 - RNA, 22 nt, SARS coronavirus
ucucauuguuuugacuuguauu

SEQ ID NO: 250481 - RNA, 20 nt, SARS coronavirus
ugcgucuugguucacagcuc

SEQ ID NO: 250482 - RNA, 18 nt, SARS coronavirus
ugcaguugcauaugcacu

SEQ ID NO: 250483 - RNA, 21 nt, SARS coronavirus
ugauuguauuuacaucuugcg

SEQ ID NO: 250484 - RNA, 13 nt, SARS coronavirus
ugaaugagcucac

SEQ ID NO: 250485 - RNA, 12 nt, SARS coronavirus
uuucauacuauu

SEQ ID NO: 250486 - RNA, 14 nt, SARS coronavirus
uuucagagcgcuac

SEQ ID NO: 250487 - RNA, 21 nt, SARS coronavirus
uuucaucuuguugacuuccag

SEQ ID NO: 250488 - RNA, 18 nt, SARS coronavirus
uuucucauuguugcugcu

SEQ ID NO: 250489 - RNA, 13 nt, SARS coronavirus
uuucucuaugcag

SEQ ID NO: 250490 - RNA, 12 nt, SARS coronavirus
uuuacaucuugc

SEQ ID NO: 250491 - RNA, 19 nt, SARS coronavirus
uuuacaucuugcgagcuau

SEQ ID NO: 250492 - RNA, 12 nt, SARS coronavirus
uugaaagagcca

SEQ ID NO: 250493 - RNA, 21 nt, SARS coronavirus
uucucauuguuuugacuugua

SEQ ID NO: 250494 - RNA, 17 nt, SARS coronavirus
uugcacuaacuugcacu

SEQ ID NO: 250495 - RNA, 21 nt, SARS coronavirus
uugcccaucaggaacauacga

SEQ ID NO: 250496 - RNA, 18 nt, SARS coronavirus
uugccaaaaggcuucuac

SEQ ID NO: 250497 - RNA, 17 nt, SARS coronavirus
uucaugaaggucaccaa

SEQ ID NO: 250498 - RNA, 15 nt, SARS coronavirus
uucauuugcaauuua

SEQ ID NO: 250499 - RNA, 16 nt, SARS coronavirus
uucuacuaauguuguu

SEQ ID NO: 250500 - RNA, 17 nt, SARS coronavirus
uuccucaaggaacaaca

SEQ ID NO: 250501 - RNA, 22 nt, SARS coronavirus
uucccuacggcgcuaacaaaga

SEQ ID NO: 250502 - RNA, 23 nt, SARS coronavirus
uuacugcugcuauuuguuaccau

SEQ ID NO: 250503 - RNA, 16 nt, SARS coronavirus
uuacuaucaacuguca

SEQ ID NO: 250504 - RNA, 14 nt, SARS coronavirus
ugugcaucuaauaa

SEQ ID NO: 250505 - RNA, 12 nt, SARS coronavirus
uguuacuaucaa

SEQ ID NO: 250506 - RNA, 20 nt, SARS coronavirus
uguuacaggguuucauacua

SEQ ID NO: 250507 - RNA, 18 nt, SARS coronavirus
uguuaccaucuauucaca

SEQ ID NO: 250508 - RNA, 20 nt, SARS coronavirus
uguaguacagcgcugugcau

SEQ ID NO: 250509 - RNA, 17 nt, SARS coronavirus
uggauuauguuacuaca

SEQ ID NO: 250510 - RNA, 14 nt, SARS coronavirus
uggcacacuauggu

SEQ ID NO: 250511 - RNA, 15 nt, SARS coronavirus
uggcguugcauuucu

SEQ ID NO: 250512 - RNA, 14 nt, SARS coronavirus
uuugcaauuuacug

SEQ ID NO: 250513 - RNA, 23 nt, SARS coronavirus
uuugcacuaacuugcacuagcac

SEQ ID NO: 250514 - RNA, 16 nt, SARS coronavirus
gacaacgguacuauua

SEQ ID NO: 250515 - RNA, 23 nt, SARS coronavirus
gaaagugaguacgaacuuaugua

SEQ ID NO: 250516 - RNA, 15 nt, SARS coronavirus
gcacaggcacuagua

SEQ ID NO: 250517 - RNA, 21 nt, SARS coronavirus
gcugguggugcgcuuauagcu

SEQ ID NO: 250518 - RNA, 16 nt, SARS coronavirus
gucuugguucacagcu

SEQ ID NO: 250519 - RNA, 20 nt, SARS coronavirus
guuaagaggcauacuauguc

SEQ ID NO: 250520 - RNA, 20 nt, Dobrava virus
cuggaauuauuauacuacug

SEQ ID NO: 250521 - RNA, 19 nt, Dobrava virus
uuuccggagcauacuacua

SEQ ID NO: 250522 - RNA, 20 nt, Dobrava virus
ucuugcggagcauacuacua

SEQ ID NO: 250523 - RNA, 21 nt, Dobrava virus
ucuuuagggagucuacuacua

SEQ ID NO: 250524 - RNA, 19 nt, Seoul virus
uuacuaaaaaaaauacucu

SEQ ID NO: 250525 - RNA, 21 nt, Seoul virus
uuauuaaucuucauagcaugu

SEQ ID NO: 250526 - RNA, 14 nt, Seoul virus
ugcggagucuacua

SEQ ID NO: 250527 - RNA, 18 nt, Seoul virus
uuuaaacacuuuaccauu

SEQ ID NO: 250528 - RNA, 18 nt, Seoul virus
uaccauuaaaaacuuaac

SEQ ID NO: 250529 - RNA, 19 nt, Seoul virus
cauuuugcggagucuacua

SEQ ID NO: 250530 - RNA, 21 nt, Seoul virus
cauuuugcggagucuacuacu

SEQ ID NO: 250531 - RNA, 22 nt, Seoul virus
cauuuugcggagucuacuacua

SEQ ID NO: 250532 - RNA, 16 nt, Seoul virus
uuugcggagucuacua

SEQ ID NO: 250533 - RNA, 12 nt, Seoul virus
uuaaacacuuua

SEQ ID NO: 250534 - RNA, 18 nt, Seoul virus
uuacuaaaaaaaauacuc

SEQ ID NO: 250535 - RNA, 20 nt, Seoul virus
ucucccaaucuuuuauugau

SEQ ID NO: 250536 - RNA, 12 nt, Seoul virus
ggagucuacuac

SEQ ID NO: 250537 - RNA, 17 nt, Seoul virus
cuucauuuucauuuugc

SEQ ID NO: 250538 - RNA, 16 nt, Seoul virus
cugauaacuaacuuuc

SEQ ID NO: 250539 - RNA, 23 nt, Seoul virus
aucgaguuuuaaacacuuuacca

SEQ ID NO: 250540 - RNA, 16 nt, Seoul virus
aucugauaacuaacuu

SEQ ID NO: 250541 - RNA, 19 nt, Seoul virus
aucugauaacuaacuuuca

SEQ ID NO: 250542 - RNA, 22 nt, Seoul virus
auguaucgaguuuuaaacacuu

SEQ ID NO: 250543 - RNA, 19 nt, Seoul virus
auuuugcggagucuacuac

SEQ ID NO: 250544 - RNA, 21 nt, Seoul virus
uuaaccuggcucuaauaucug

SEQ ID NO: 250545 - RNA, 23 nt, Seoul virus
uuaaccuggcucuaauaucugau

SEQ ID NO: 250546 - RNA, 12 nt, Seoul virus
uuuucauuuugc

SEQ ID NO: 250547 - RNA, 20 nt, Seoul virus
uuuucauuuugcggagucua

SEQ ID NO: 250548 - RNA, 19 nt, Seoul virus
ucauuuugcggagucuacu

SEQ ID NO: 250549 - RNA, 23 nt, Seoul virus
ucauuuugcggagucuacuacua

SEQ ID NO: 250550 - RNA, 20 nt, Seoul virus
ucacuucauuuucauuuugc

SEQ ID NO: 250551 - RNA, 16 nt, Seoul virus
auaucugauaacuaac

SEQ ID NO: 250552 - RNA, 17 nt, Seoul virus
ucuugcggagucuacua

SEQ ID NO: 250553 - RNA, 19 nt, Seoul virus
uuugcggagucuacuacua

SEQ ID NO: 250554 - RNA, 19 nt, Seoul virus
uucacuucauuuucauuuu

SEQ ID NO: 250555 - RNA, 20 nt, Sin Nombre virus
aaaccaugacuuguucucuc

SEQ ID NO: 250556 - RNA, 19 nt, Sin Nombre virus
acuuguucucucuacugcu

SEQ ID NO: 250557 - RNA, 23 nt, Sin Nombre virus
acuuguucucucuacugcucugu

SEQ ID NO: 250558 - RNA, 15 nt, Sin Nombre virus
acaacauuauuucau

SEQ ID NO: 250559 - RNA, 14 nt, Sin Nombre virus
aguguuaagucauu

SEQ ID NO: 250560 - RNA, 21 nt, Sin Nombre virus
auaacauuuguauauucccau

SEQ ID NO: 250561 - RNA, 14 nt, Sin Nombre virus
augcuaagucuaua

SEQ ID NO: 250562 - RNA, 22 nt, Sin Nombre virus
augcuaagucuauaugauuuau

SEQ ID NO: 250563 - RNA, 13 nt, Sin Nombre virus
auuccaaaccaug

SEQ ID NO: 250564 - RNA, 15 nt, Sin Nombre virus
auuccaaaccaugac

SEQ ID NO: 250565 - RNA, 23 nt, Sin Nombre virus
auuccaaaccaugacuuguucuc

SEQ ID NO: 250566 - RNA, 12 nt, Sin Nombre virus
caaaccaugacu

SEQ ID NO: 250567 - RNA, 23 nt, Sin Nombre virus
caauuuucuuuauuccaaaccau

SEQ ID NO: 250568 - RNA, 16 nt, Sin Nombre virus
ccaugacuuguucucu

SEQ ID NO: 250569 - RNA, 16 nt, Sin Nombre virus
cuuauauucagggcau

SEQ ID NO: 250570 - RNA, 19 nt, Sin Nombre virus
cuauauaaucccauuugcu

SEQ ID NO: 250571 - RNA, 13 nt, Sin Nombre virus
ggagcauacuacu

SEQ ID NO: 250572 - RNA, 18 nt, Sin Nombre virus
gguaaugggcacuaauca

SEQ ID NO: 250573 - RNA, 21 nt, Sin Nombre virus
gcuaagucuauaugauuuauu

SEQ ID NO: 250574 - RNA, 19 nt, Sin Nombre virus
cuuguucucucuacugcuc

SEQ ID NO: 250575 - RNA, 16 nt, Sin Nombre virus
cuuuauuccaaaccau

SEQ ID NO: 250576 - RNA, 20 nt, Sin Nombre virus
cuuuauuccaaaccaugacu

SEQ ID NO: 250577 - RNA, 12 nt, Sin Nombre virus
gacuuguucucu

SEQ ID NO: 250578 - RNA, 20 nt, Sin Nombre virus
gacuuguucucucuacugcu

SEQ ID NO: 250579 - RNA, 17 nt, Sin Nombre virus
uaaugggcacuaaucag

SEQ ID NO: 250580 - RNA, 14 nt, Sin Nombre virus
uaaugcuaagucua

SEQ ID NO: 250581 - RNA, 13 nt, Sin Nombre virus
uaguuaaucuuga

SEQ ID NO: 250582 - RNA, 15 nt, Sin Nombre virus
uaguuaaucuugaua

SEQ ID NO: 250583 - RNA, 17 nt, Sin Nombre virus
guuuauuguuaucuguu

SEQ ID NO: 250584 - RNA, 18 nt, Sin Nombre virus
uaaauguaguuaaucuug

SEQ ID NO: 250585 - RNA, 22 nt, Sin Nombre virus
ucuguucucggagcauacuacu

SEQ ID NO: 250586 - RNA, 21 nt, Sin Nombre virus
ucuuuauuccaaaccaugacu

SEQ ID NO: 250587 - RNA, 11 nt, Sin Nombre virus
uccaaaccaug

SEQ ID NO: 250588 - RNA, 19 nt, Sin Nombre virus
ucaagggccaauuauauca

SEQ ID NO: 250589 - RNA, 12 nt, Sin Nombre virus
uauaaccagggu

SEQ ID NO: 250590 - RNA, 14 nt, Sin Nombre virus
uauaaccaggguaa

SEQ ID NO: 250591 - RNA, 22 nt, Sin Nombre virus
uuuucuuuauuccaaaccauga

SEQ ID NO: 250592 - RNA, 12 nt, Sin Nombre virus
aacauuauuuca

SEQ ID NO: 250593 - RNA, 17 nt, Sin Nombre virus
aacccauuaacagcuaa

SEQ ID NO: 250594 - RNA, 17 nt, Sin Nombre virus
aaccaugacuuguucuc

SEQ ID NO: 250595 - RNA, 13 nt, Sin Nombre virus
aauaacauuugua

SEQ ID NO: 250596 - RNA, 12 nt, Sin Nombre virus
aauaagauuuau

SEQ ID NO: 250597 - RNA, 23 nt, Sin Nombre virus
ugacuuguucucucuacugcucu

SEQ ID NO: 250598 - RNA, 14 nt, Sin Nombre virus
uuaguguuaaguca

SEQ ID NO: 250599 - RNA, 15 nt, Sin Nombre virus
uuaguguuaagucau

SEQ ID NO: 250600 - RNA, 21 nt, Sin Nombre virus
uuccugcggagcauacuacua

SEQ ID NO: 250601 - RNA, 19 nt, Sin Nombre virus
uucauuauauguauguucu

SEQ ID NO: 250602 - RNA, 15 nt, Sin Nombre virus
uuccaaaccaugacu

SEQ ID NO: 250603 - RNA, 22 nt, Sin Nombre virus
uuccaaaccaugacuuguucuc

SEQ ID NO: 250604 - RNA, 23 nt, Sin Nombre virus
uuccaaaccaugacuuguucucu

SEQ ID NO: 250605 - RNA, 18 nt, Sin Nombre virus
auaucaauaacauuugua

SEQ ID NO: 250606 - RNA, 13 nt, Sin Nombre virus
auauucagggcau

SEQ ID NO: 250607 - RNA, 14 nt, Sin Nombre virus
aguauuaagucaua

SEQ ID NO: 250608 - RNA, 19 nt, Sin Nombre virus
acauuuguauauucccaua

SEQ ID NO: 250609 - RNA, 21 nt, Sin Nombre virus
ccuauauaaucccauuugcuu

SEQ ID NO: 250610 - RNA, 13 nt, Sin Nombre virus
ccaaaccaugacu

SEQ ID NO: 250611 - RNA, 21 nt, Sin Nombre virus
ccaaaccaugacuuguucucu

SEQ ID NO: 250612 - RNA, 21 nt, Sin Nombre virus
aucuguuuaaugcuaagucua

SEQ ID NO: 250613 - RNA, 16 nt, Sin Nombre virus
auuauaaccaggguaa

SEQ ID NO: 250614 - RNA, 18 nt, Sin Nombre virus
auuguaguauuguauuau

SEQ ID NO: 250615 - RNA, 13 nt, Sin Nombre virus
caaaccaugacuu

SEQ ID NO: 250616 - RNA, 16 nt, Sin Nombre virus
caaaccaugacuuguu

SEQ ID NO: 250617 - RNA, 22 nt, Sin Nombre virus
caccuauauaaucccauuugcu

SEQ ID NO: 250618 - RNA, 13 nt, Sin Nombre virus
cucucuacugcuc

SEQ ID NO: 250619 - RNA, 21 nt, Sin Nombre virus
cuuauaucaauaacauuugua

SEQ ID NO: 250620 - RNA, 16 nt, Sin Nombre virus
cuacugcucuguucuc

SEQ ID NO: 250621 - RNA, 17 nt, Sin Nombre virus
cuacugcucuguucucg

SEQ ID NO: 250622 - RNA, 19 nt, Sin Nombre virus
cuugauaguauuaagucau

SEQ ID NO: 250623 - RNA, 21 nt, Sin Nombre virus
gacuuguucucucuacugcuc

SEQ ID NO: 250624 - RNA, 17 nt, Sin Nombre virus
gauaguauuaagucaua

SEQ ID NO: 250625 - RNA, 15 nt, Sin Nombre virus
ggcacuaaucagggu

SEQ ID NO: 250626 - RNA, 21 nt, Sin Nombre virus
guauuaacuaacccauuaaca

SEQ ID NO: 250627 - RNA, 13 nt, Sin Nombre virus
guauuaagucaua

SEQ ID NO: 250628 - RNA, 20 nt, Sin Nombre virus
uaaucaaaauaagauuuaua

SEQ ID NO: 250629 - RNA, 18 nt, Sin Nombre virus
uaagauuuauauacauag

SEQ ID NO: 250630 - RNA, 14 nt, Sin Nombre virus
uauuccaaaccaug

SEQ ID NO: 250631 - RNA, 17 nt, Sin Nombre virus
uauuccaaaccaugacu

SEQ ID NO: 250632 - RNA, 17 nt, Sin Nombre virus
uauguucuuauaucaau

SEQ ID NO: 250633 - RNA, 13 nt, Sin Nombre virus
uaguguuaaguca

SEQ ID NO: 250634 - RNA, 21 nt, Sin Nombre virus
uaggguggguucaagggccaa

SEQ ID NO: 250635 - RNA, 17 nt, Sin Nombre virus
uuaguuaagcuuauuaa

SEQ ID NO: 250636 - RNA, 22 nt, Sin Nombre virus
uuaacaccuauauaaucccauu

SEQ ID NO: 250637 - RNA, 15 nt, Sin Nombre virus
uguucucucuacugc

SEQ ID NO: 250638 - RNA, 20 nt, Sin Nombre virus
uguauuguuaguuaagcuua

SEQ ID NO: 250639 - RNA, 15 nt, Sin Nombre virus
uucucggagcauacu

SEQ ID NO: 250640 - RNA, 19 nt, Sin Nombre virus
uuguucucucuacugcucu

SEQ ID NO: 250641 - RNA, 16 nt, Sin Nombre virus
auaguauuaagucaua

SEQ ID NO: 250642 - RNA, 16 nt, Sin Nombre virus
aguuaagcuuauuaaa

SEQ ID NO: 250643 - RNA, 22 nt, Sin Nombre virus
aguuaaucuugauaguauuaag

SEQ ID NO: 250644 - RNA, 13 nt, Sin Nombre virus
aguguuaagucau

SEQ ID NO: 250645 - RNA, 17 nt, Sin Nombre virus
agucuauaugauuuauu

SEQ ID NO: 250646 - RNA, 18 nt, Sin Nombre virus
aguuucgguaagucuguu

SEQ ID NO: 250647 - RNA, 22 nt, Sin Nombre virus
agauuuauauacauagauuuau

SEQ ID NO: 250648 - RNA, 21 nt, Sin Nombre virus
aauuuucuuuauuccaaacca

SEQ ID NO: 250649 - RNA, 19 nt, Sin Nombre virus
acaccuauauaaucccauu

SEQ ID NO: 250650 - RNA, 17 nt, Sin Nombre virus
acugcucuguucucgga

SEQ ID NO: 250651 - RNA, 17 nt, Sin Nombre virus
auuauaucacaggguau

SEQ ID NO: 250652 - RNA, 15 nt, Sin Nombre virus
augauuuauuaauca

SEQ ID NO: 250653 - RNA, 14 nt, Sin Nombre virus
augacuuguucucu

SEQ ID NO: 250654 - RNA, 22 nt, Sin Nombre virus
augacuuguucucucuacugcu

SEQ ID NO: 250655 - RNA, 23 nt, Sin Nombre virus
augacuuguucucucuacugcuc

SEQ ID NO: 250656 - RNA, 17 nt, Sin Nombre virus
aucuuguuaaguuuguu

SEQ ID NO: 250657 - RNA, 19 nt, Sin Nombre virus
caauuauaucacaggguau

SEQ ID NO: 250658 - RNA, 14 nt, Sin Nombre virus
caacauuauuucau

SEQ ID NO: 250659 - RNA, 13 nt, Sin Nombre virus
ccaugacuuguuc

SEQ ID NO: 250660 - RNA, 19 nt, Sin Nombre virus
ccaugacuuguucucucua

SEQ ID NO: 250661 - RNA, 20 nt, Sin Nombre virus
ccaugacuuguucucucuac

SEQ ID NO: 250662 - RNA, 23 nt, Sin Nombre virus
ccaugacuuguucucucuacugc

SEQ ID NO: 250663 - RNA, 17 nt, Sin Nombre virus
cuuuauuccaaaccaug

SEQ ID NO: 250664 - RNA, 19 nt, Sin Nombre virus
cuuuauuccaaaccaugac

SEQ ID NO: 250665 - RNA, 21 nt, Sin Nombre virus
cuuuauuccaaaccaugacuu

SEQ ID NO: 250666 - RNA, 16 nt, Sin Nombre virus
cuuguucucucuacug

SEQ ID NO: 250667 - RNA, 19 nt, Sin Nombre virus
cugcucuguucucggagca

SEQ ID NO: 250668 - RNA, 20 nt, Sin Nombre virus
ggcauuauuauaaccagggu

SEQ ID NO: 250669 - RNA, 20 nt, Sin Nombre virus
ggccaauuauaucacagggu

SEQ ID NO: 250670 - RNA, 20 nt, Sin Nombre virus
guguuuaguguuaagucauu

SEQ ID NO: 250671 - RNA, 22 nt, Sin Nombre virus
guucucucuacugcucuguucu

SEQ ID NO: 250672 - RNA, 18 nt, Sin Nombre virus
guucucggagcauacuac

SEQ ID NO: 250673 - RNA, 15 nt, Sin Nombre virus
uacugcucuguucuc

SEQ ID NO: 250674 - RNA, 21 nt, Sin Nombre virus
uaagcuuauuaaaucuuguua

SEQ ID NO: 250675 - RNA, 15 nt, Sin Nombre virus
uaguauuaagucaua

SEQ ID NO: 250676 - RNA, 13 nt, Sin Nombre virus
uauaucacagggu

SEQ ID NO: 250677 - RNA, 14 nt, Sin Nombre virus
uccaaaccaugacu

SEQ ID NO: 250678 - RNA, 22 nt, Sin Nombre virus
uccaaaccaugacuuguucucu

SEQ ID NO: 250679 - RNA, 18 nt, Sin Nombre virus
uccuuaacaccuauauaa

SEQ ID NO: 250680 - RNA, 21 nt, Sin Nombre virus
ucucucuacugcucuguucuc

SEQ ID NO: 250681 - RNA, 17 nt, Sin Nombre virus
ucuacugcucuguucuc

SEQ ID NO: 250682 - RNA, 17 nt, Sin Nombre virus
ucuuuauuccaaaccau

SEQ ID NO: 250683 - RNA, 18 nt, Sin Nombre virus
ucuuuauuccaaaccaug

SEQ ID NO: 250684 - RNA, 19 nt, Sin Nombre virus
ucuguuuaaugcuaagucu

SEQ ID NO: 250685 - RNA, 13 nt, Sin Nombre virus
ugacuuguucucu

SEQ ID NO: 250686 - RNA, 16 nt, Sin Nombre virus
ugauaguauuaaguca

SEQ ID NO: 250687 - RNA, 16 nt, Sin Nombre virus
uuauuccaaaccauga

SEQ ID NO: 250688 - RNA, 18 nt, Sin Nombre virus
uuauuccaaaccaugacu

SEQ ID NO: 250689 - RNA, 23 nt, Sin Nombre virus
uguuaaguuuuguuaaguuguau

SEQ ID NO: 250690 - RNA, 14 nt, Sin Nombre virus
uuaacuaacccauu

SEQ ID NO: 250691 - RNA, 14 nt, Sin Nombre virus
uuaaguuguauuaa

SEQ ID NO: 250692 - RNA, 20 nt, Sin Nombre virus
uuaagcuuauuaaaucuugu

SEQ ID NO: 250693 - RNA, 17 nt, Sin Nombre virus
uucgguaagucuguuaa

SEQ ID NO: 250694 - RNA, 17 nt, Sin Nombre virus
uucuuuauuccaaacca

SEQ ID NO: 250695 - RNA, 15 nt, Sin Nombre virus
uuuuauacaaguauu

SEQ ID NO: 250696 - RNA, 16 nt, Sin Nombre virus
uuuuauuuuuauacaa

SEQ ID NO: 250697 - RNA, 18 nt, Sin Nombre virus
uuuauuccaaaccaugac

SEQ ID NO: 250698 - RNA, 13 nt, Sin Nombre virus
uugauaguauuaa

SEQ ID NO: 250699 - RNA, 18 nt, Sin Nombre virus
uugauaguauuaagucau

SEQ ID NO: 250700 - RNA, 13 nt, Sin Nombre virus
aaucccauuugcu

SEQ ID NO: 250701 - RNA, 11 nt, Sin Nombre virus
aauccuuaaca

SEQ ID NO: 250702 - RNA, 16 nt, Sin Nombre virus
aauccuuaacaccuau

SEQ ID NO: 250703 - RNA, 17 nt, Sin Nombre virus
uguuaaauguaguuaau

SEQ ID NO: 250704 - RNA, 21 nt, Sin Nombre virus
uguucucggagcauacuacua

SEQ ID NO: 250705 - RNA, 20 nt, Sin Nombre virus
uguucucucuacugcucugu

SEQ ID NO: 250706 - RNA, 12 nt, Sin Nombre virus
uuauauacauag

SEQ ID NO: 250707 - RNA, 12 nt, Sin Nombre virus
ugcucuguucuc

SEQ ID NO: 250708 - RNA, 18 nt, Sin Nombre virus
guucucucuacugcucug

SEQ ID NO: 250709 - RNA, 20 nt, Sin Nombre virus
guucucucuacugcucuguu

SEQ ID NO: 250710 - RNA, 23 nt, Sin Nombre virus
guucucucuacugcucuguucuc

SEQ ID NO: 250711 - RNA, 14 nt, Sin Nombre virus
uacauagauuuauu

SEQ ID NO: 250712 - RNA, 12 nt, Sin Nombre virus
guguuuaguguu

SEQ ID NO: 250713 - RNA, 16 nt, Sin Nombre virus
guuaaguuguauuaag

SEQ ID NO: 250714 - RNA, 14 nt, Sin Nombre virus
uauacaaguauuaa

SEQ ID NO: 250715 - RNA, 22 nt, Sin Nombre virus
uauaugugagcaagaguaugac

SEQ ID NO: 250716 - RNA, 14 nt, Sin Nombre virus
uauauucagggcau

SEQ ID NO: 250717 - RNA, 15 nt, Sin Nombre virus
uauaucacaggguau

SEQ ID NO: 250718 - RNA, 12 nt, Sin Nombre virus
uauauaaucuau

SEQ ID NO: 250719 - RNA, 12 nt, Sin Nombre virus
uauuuauacuaa

SEQ ID NO: 250720 - RNA, 20 nt, Sin Nombre virus
ucaacuuauauucagggcau

SEQ ID NO: 250721 - RNA, 16 nt, Sin Nombre virus
uauguucuuauaucaa

SEQ ID NO: 250722 - RNA, 18 nt, Sin Nombre virus
uaugugagcaagaguaug

SEQ ID NO: 250723 - RNA, 22 nt, Sin Nombre virus
uaugugagcaagaguaugacaa

SEQ ID NO: 250724 - RNA, 14 nt, Sin Nombre virus
ccaaaccaugacuu

SEQ ID NO: 250725 - RNA, 17 nt, Sin Nombre virus
cauuauauguauguucu

SEQ ID NO: 250726 - RNA, 17 nt, Sin Nombre virus
cucggagcauacuacua

SEQ ID NO: 250727 - RNA, 19 nt, Sin Nombre virus
cuguucucggagcauacua

SEQ ID NO: 250728 - RNA, 11 nt, Sin Nombre virus
aaaccaugacu

SEQ ID NO: 250729 - RNA, 14 nt, Sin Nombre virus
aaaccaugacuugu

SEQ ID NO: 250730 - RNA, 19 nt, Sin Nombre virus
aaaccaugacuuguucucu

SEQ ID NO: 250731 - RNA, 18 nt, Sin Nombre virus
ggcaguaaucaacuuaua

SEQ ID NO: 250732 - RNA, 13 nt, Sin Nombre virus
auuguuaucuguu

SEQ ID NO: 250733 - RNA, 13 nt, Sin Nombre virus
cacuaaucagggu

SEQ ID NO: 250734 - RNA, 19 nt, Sin Nombre virus
cacuaaucaggguuuauug

SEQ ID NO: 250735 - RNA, 15 nt, Sin Nombre virus
caauaacauuuguau

SEQ ID NO: 250736 - RNA, 15 nt, Sin Nombre virus
agucauuguuuauug

SEQ ID NO: 250737 - RNA, 16 nt, Sin Nombre virus
agucuauaugauuuau

SEQ ID NO: 250738 - RNA, 21 nt, Sin Nombre virus
aguuuuguuaaguuguauuaa

SEQ ID NO: 250739 - RNA, 18 nt, Sin Nombre virus
aacauuuguauauuccca

SEQ ID NO: 250740 - RNA, 13 nt, Sin Nombre virus
aagucuauaugau

SEQ ID NO: 250741 - RNA, 21 nt, Sin Nombre virus
acauagauuuauuuuauauac

SEQ ID NO: 250742 - RNA, 23 nt, Sin Nombre virus
acaccuauauaaucccauuugcu

SEQ ID NO: 250743 - RNA, 21 nt, Sin Nombre virus
accaugacuuguucucucuac

SEQ ID NO: 250744 - RNA, 11 nt, Sin Nombre virus
acugcucuguu

SEQ ID NO: 250745 - RNA, 15 nt, Sin Nombre virus
acugcucuguucucg

SEQ ID NO: 250746 - RNA, 19 nt, Sin Nombre virus
aaucaaaauaagauuuaua

SEQ ID NO: 250747 - RNA, 18 nt, Sin Nombre virus
acauagauuuauuuuaua

SEQ ID NO: 250748 - RNA, 15 nt, Sindbis virus
aaaaacucgauguac

SEQ ID NO: 250749 - RNA, 14 nt, Sindbis virus
aaaaacucaaugua

SEQ ID NO: 250750 - RNA, 14 nt, Sindbis virus
auccgaccagcaaa

SEQ ID NO: 250751 - RNA, 12 nt, Sindbis virus
auaaccacuaua

SEQ ID NO: 250752 - RNA, 22 nt, Sindbis virus
aggaacugaugugcauaaugca

SEQ ID NO: 250753 - RNA, 16 nt, Sindbis virus
aggaagcgcagugcau

SEQ ID NO: 250754 - RNA, 22 nt, Sindbis virus
aggaagcgcagugcauaaugcu

SEQ ID NO: 250755 - RNA, 22 nt, Sindbis virus
aggaagcguggugcauaaugcc

SEQ ID NO: 250756 - RNA, 23 nt, Sindbis virus
aacacuaaaaacucgauguacuu

SEQ ID NO: 250757 - RNA, 12 nt, Sindbis virus
aacugaugugca

SEQ ID NO: 250758 - RNA, 19 nt, Sindbis virus
agcaaaacucgauguacuu

SEQ ID NO: 250759 - RNA, 22 nt, Sindbis virus
uuccgaggaagcgcagugcaua

SEQ ID NO: 250760 - RNA, 15 nt, Sindbis virus
aagcguggugcauaa

SEQ ID NO: 250761 - RNA, 16 nt, Sindbis virus
aagcguggugcauaau

SEQ ID NO: 250762 - RNA, 14 nt, Sindbis virus
aagcguggugcaua

SEQ ID NO: 250763 - RNA, 22 nt, Sindbis virus
aaugcugcgcaguguugccaca

SEQ ID NO: 250764 - RNA, 22 nt, Sindbis virus
ucugaggaagcguggugcauaa

SEQ ID NO: 250765 - RNA, 16 nt, Sindbis virus
gcaaaacucgauguac

SEQ ID NO: 250766 - RNA, 15 nt, Sindbis virus
gaagcguggugcaua

SEQ ID NO: 250767 - RNA, 12 nt, Sindbis virus
aaacucgaugua

SEQ ID NO: 250768 - RNA, 16 nt, Sindbis virus
aaacucgauguacuuc

SEQ ID NO: 250769 - RNA, 19 nt, Sindbis virus
cuagcggacgccaaaaacu

SEQ ID NO: 250770 - RNA, 14 nt, Sindbis virus
cugaugugcauaau

SEQ ID NO: 250771 - RNA, 17 nt, Sindbis virus
cugaggaagcguggugc

SEQ ID NO: 250772 - RNA, 20 nt, Sindbis virus
cugaggaagcguggugcaua

SEQ ID NO: 250773 - RNA, 18 nt, Sindbis virus
caucaggcugguacauua

SEQ ID NO: 250774 - RNA, 20 nt, Sindbis virus
ccgaggaagcgcagugcaua

SEQ ID NO: 250775 - RNA, 21 nt, Sindbis virus
ccgaggaagcgcagugcauaa

SEQ ID NO: 250776 - RNA, 19 nt, Sindbis virus
cgaggaagcgcagugcaua

SEQ ID NO: 250777 - RNA, 19 nt, Sindbis virus
cgaggaacugaugugcaua

SEQ ID NO: 250778 - RNA, 23 nt, Sindbis virus
cgaccagcaaaacucgauguacu

SEQ ID NO: 250779 - RNA, 22 nt, Sindbis virus
uuuaucuagcggacgccaaaaa

SEQ ID NO: 250780 - RNA, 22 nt, Sindbis virus
uuccgaggaacugaugugcaua

SEQ ID NO: 250781 - RNA, 20 nt, Sindbis virus
uccgaggaagcgcagugcau

SEQ ID NO: 250782 - RNA, 22 nt, Sindbis virus
uccgaggaagcgcagugcauaa

SEQ ID NO: 250783 - RNA, 20 nt, Sindbis virus
ugaggaagcguggugcauaa

SEQ ID NO: 250784 - RNA, 22 nt, Sindbis virus
ugcauaaugccacgcagcgucu

SEQ ID NO: 250785 - RNA, 21 nt, Sindbis virus
ugcauaaugcugcgcaguguu

SEQ ID NO: 250786 - RNA, 20 nt, Sindbis virus
ugcaucaggcugguacauua

SEQ ID NO: 250787 - RNA, 19 nt, Sindbis virus
uaucuagcggacgccaaaa

SEQ ID NO: 250788 - RNA, 18 nt, Sindbis virus
uaaaaacucgauguacuu

SEQ ID NO: 250789 - RNA, 14 nt, Sindbis virus
guacauuagauccc

SEQ ID NO: 250790 - RNA, 15 nt, Sindbis virus
gcaaaacucgaugua

SEQ ID NO: 250791 - RNA, 13 nt, Sindbis virus
gcauaacuuuuau

SEQ ID NO: 250792 - RNA, 18 nt, Sindbis virus
gaggaacugaugugcaua

SEQ ID NO: 250793 - RNA, 18 nt, Sindbis virus
gaggaagcguggugcaua

SEQ ID NO: 250794 - RNA, 21 nt, Sindbis virus
gaccgcuacgccccaaugauc

SEQ ID NO: 250795 - RNA, 15 nt, Sindbis virus
gaacugaugugcaua

SEQ ID NO: 250796 - RNA, 12 nt, Sindbis virus
cguggugcauaa

SEQ ID NO: 250797 - RNA, 13 nt, Sindbis virus
cguggugcauaau

SEQ ID NO: 250798 - RNA, 23 nt, Sindbis virus
cugaggaagcguggugcauaaug

SEQ ID NO: 250799 - RNA, 17 nt, Sindbis virus
cacgcagcgucugcaua

SEQ ID NO: 250800 - RNA, 19 nt, Sindbis virus
cacuauauuaaccauuuau

SEQ ID NO: 250801 - RNA, 14 nt, Sindbis virus
caacacuaaaaacu

SEQ ID NO: 250802 - RNA, 19 nt, Sindbis virus
cagcaaaacucgauguacu

SEQ ID NO: 250803 - RNA, 23 nt, Sindbis virus
cagcaaaacucgauguacuuccg

SEQ ID NO: 250804 - RNA, 17 nt, Sindbis virus
cauaaccacuauauuaa

SEQ ID NO: 250805 - RNA, 16 nt, Sindbis virus
caguguugccacauaa

SEQ ID NO: 250806 - RNA, 22 nt, Sindbis virus
accagcaaaacucgauguacuu

SEQ ID NO: 250807 - RNA, 21 nt, Sindbis virus
acgccaaaaacucaauguauu

SEQ ID NO: 250808 - RNA, 14 nt, Sindbis virus
acugaugugcauaa

SEQ ID NO: 250809 - RNA, 16 nt, Sindbis virus
agugcauaaugcugcg

SEQ ID NO: 250810 - RNA, 14 nt, Sindbis virus
agcgcagugcauaa

SEQ ID NO: 250811 - RNA, 16 nt, Sindbis virus
auauagcaacacuaaa

SEQ ID NO: 250812 - RNA, 13 nt, Sindbis virus
acugaugugcaua

SEQ ID NO: 250813 - RNA, 21 nt, Sindbis virus
acugaugugcauaaugcauca

SEQ ID NO: 250814 - RNA, 16 nt, Sindbis virus
acucgauguacuuccg

SEQ ID NO: 250815 - RNA, 20 nt, Sindbis virus
acuaaaaacucgauguacuu

SEQ ID NO: 250816 - RNA, 22 nt, Sindbis virus
acacuaaaaacucgauguacuu

SEQ ID NO: 250817 - RNA, 19 nt, Sindbis virus
aauauagcaacacuaaaaa

SEQ ID NO: 250818 - RNA, 13 nt, Sindbis virus
agcgcagugcaua

SEQ ID NO: 250819 - RNA, 15 nt, Sindbis virus
agcgcagugcauaau

SEQ ID NO: 250820 - RNA, 19 nt, Sindbis virus
agcguggugcauaaugcca

SEQ ID NO: 250821 - RNA, 19 nt, Sindbis virus
caauauagcaacacuaaaa

SEQ ID NO: 250822 - RNA, 14 nt, Sindbis virus
cacuaaaaacucga

SEQ ID NO: 250823 - RNA, 15 nt, Sindbis virus
aaaacucgauguacu

SEQ ID NO: 250824 - RNA, 16 nt, Sindbis virus
aaaacucgauguacuu

SEQ ID NO: 250825 - RNA, 20 nt, Sindbis virus
aaaaacucgauguacuuccg

SEQ ID NO: 250826 - RNA, 16 nt, Sindbis virus
ggaagcgcagugcaua

SEQ ID NO: 250827 - RNA, 23 nt, Sindbis virus
ggaagcguggugcauaaugccac

SEQ ID NO: 250828 - RNA, 14 nt, Sindbis virus
ggaacugaugugca

SEQ ID NO: 250829 - RNA, 22 nt, Sindbis virus
ggaacugaugugcauaaugcau

SEQ ID NO: 250830 - RNA, 22 nt, Sindbis virus
gcaucaggcugguacauuagau

SEQ ID NO: 250831 - RNA, 18 nt, Sindbis virus
gaacugaugugcauaaug

SEQ ID NO: 250832 - RNA, 19 nt, Sindbis virus
gaggaacugaugugcauaa

SEQ ID NO: 250833 - RNA, 18 nt, Sindbis virus
gaggaagcgcagugcaua

SEQ ID NO: 250834 - RNA, 19 nt, Sindbis virus
gaggaagcgcagugcauaa

SEQ ID NO: 250835 - RNA, 19 nt, Sindbis virus
gaggaagcguggugcauaa

SEQ ID NO: 250836 - RNA, 11 nt, Sindbis virus
cucgauguacu

SEQ ID NO: 250837 - RNA, 14 nt, Sindbis virus
cucgauguacuucc

SEQ ID NO: 250838 - RNA, 15 nt, Sindbis virus
cucgauguacuuccg

SEQ ID NO: 250839 - RNA, 13 nt, Sindbis virus
cgucugcauaacu

SEQ ID NO: 250840 - RNA, 16 nt, Sindbis virus
cgcagcgucugcauaa

SEQ ID NO: 250841 - RNA, 23 nt, Sindbis virus
cauuuaucuagcggacgccaaaa

SEQ ID NO: 250842 - RNA, 11 nt, Sindbis virus
cagugcauaau

SEQ ID NO: 250843 - RNA, 18 nt, Sindbis virus
uauagcaacacuaaaaac

SEQ ID NO: 250844 - RNA, 22 nt, Sindbis virus
uauagcaacacuaaaaacucga

SEQ ID NO: 250845 - RNA, 19 nt, Sindbis virus
ucuagcggacgccaaaaac

SEQ ID NO: 250846 - RNA, 20 nt, Sindbis virus
uccgaggaacugaugugcau

SEQ ID NO: 250847 - RNA, 21 nt, Sindbis virus
uccgaggaacugaugugcaua

SEQ ID NO: 250848 - RNA, 22 nt, Sindbis virus
uccgaggaacugaugugcauaa

SEQ ID NO: 250849 - RNA, 21 nt, Sindbis virus
uccgaggaagcgcagugcaua

SEQ ID NO: 250850 - RNA, 15 nt, Sindbis virus
gugcauaaugcugcg

SEQ ID NO: 250851 - RNA, 17 nt, Sindbis virus
uacgccccaaugauccg

SEQ ID NO: 250852 - RNA, 15 nt, Sindbis virus
ugcgcaguguugcca

SEQ ID NO: 250853 - RNA, 20 nt, Sindbis virus
ugccacgcagcgucugcaua

SEQ ID NO: 250854 - RNA, 21 nt, Sindbis virus
ugccacgcagcgucugcauaa

SEQ ID NO: 250855 - RNA, 13 nt, Sindbis virus
ugccacauaacca

SEQ ID NO: 250856 - RNA, 16 nt, Sindbis virus
ugauccgaccagcaaa

SEQ ID NO: 250857 - RNA, 19 nt, Sindbis virus
ugaugugcauaaugcauca

SEQ ID NO: 250858 - RNA, 16 nt, Sindbis virus
uggugcauaaugccac

SEQ ID NO: 250859 - RNA, 15 nt, Sindbis virus
ugugcauaaugcauc

SEQ ID NO: 250860 - RNA, 23 nt, Sindbis virus
uucugaggaagcguggugcauaa

SEQ ID NO: 250861 - RNA, 19 nt, Sindbis virus
uuaucuagcggacgccaaa

SEQ ID NO: 250862 - RNA, 17 nt, Sindbis virus
ugauccgaccagcaaaa

SEQ ID NO: 250863 - RNA, 12 nt, Sindbis virus
ugaugugcauaa

SEQ ID NO: 250864 - RNA, 13 nt, Sindbis virus
ugaugugcauaau

SEQ ID NO: 250865 - RNA, 21 nt, Sindbis virus
ucugaggaagcguggugcaua

SEQ ID NO: 250866 - RNA, 23 nt, Sindbis virus
ucuagcggacgccaaaaacucaa

SEQ ID NO: 250867 - RNA, 11 nt, Sindbis virus
ucgauguacuu

SEQ ID NO: 250868 - RNA, 12 nt, Sindbis virus
ucgauguacuuc

SEQ ID NO: 250869 - RNA, 14 nt, Sindbis virus
ucgauguacuuccg

SEQ ID NO: 250870 - RNA, 16 nt, Sindbis virus
ggaagcguggugcaua

SEQ ID NO: 250871 - RNA, 19 nt, Sindbis virus
ggaagcguggugcauaaug

SEQ ID NO: 250872 - RNA, 15 nt, Sindbis virus
gcgcagugcauaaug

SEQ ID NO: 250873 - RNA, 15 nt, Sindbis virus
gcugcgcaguguugc

SEQ ID NO: 250874 - RNA, 15 nt, Sindbis virus
cugaugugcauaaug

SEQ ID NO: 250875 - RNA, 12 nt, Sindbis virus
cgcagugcauaa

SEQ ID NO: 250876 - RNA, 18 nt, Sindbis virus
cuuuuauuaaucaacaaa

SEQ ID NO: 250877 - RNA, 19 nt, Sindbis virus
cuuuuauuaaucaacaaaa

SEQ ID NO: 250878 - RNA, 22 nt, Sindbis virus
gcaacacuaaaaacucgaugua

SEQ ID NO: 250879 - RNA, 14 nt, Sindbis virus
ccagcaaaacucga

SEQ ID NO: 250880 - RNA, 22 nt, Sindbis virus
ccagcaaaacucgauguacuuc

SEQ ID NO: 250881 - RNA, 20 nt, Sindbis virus
ccgaggaacugaugugcaua

SEQ ID NO: 250882 - RNA, 21 nt, Sindbis virus
ccgaggaacugaugugcauaa

SEQ ID NO: 250883 - RNA, 14 nt, Sindbis virus
cagcgucugcauaa

SEQ ID NO: 250884 - RNA, 17 nt, Sindbis virus
caaaacucgauguacuu

SEQ ID NO: 250885 - RNA, 19 nt, Sindbis virus
augccacgcagcgucugca

SEQ ID NO: 250886 - RNA, 22 nt, Sindbis virus
augccacgcagcgucugcauaa

SEQ ID NO: 250887 - RNA, 17 nt, Sindbis virus
acucgauguacuuccga

SEQ ID NO: 250888 - RNA, 22 nt, Sindbis virus
agcaaaacucgauguacuuccg

SEQ ID NO: 250889 - RNA, 16 nt, Sindbis virus
aggaacugaugugcau

SEQ ID NO: 250890 - RNA, 17 nt, Sindbis virus
aggaacugaugugcaua

SEQ ID NO: 250891 - RNA, 14 nt, Tobacco etch virus
gaacgacaaaguga

SEQ ID NO: 250892 - RNA, 23 nt, Tobacco etch virus
ugcuuuccgcuuuuaagcuuauu

SEQ ID NO: 250893 - RNA, 18 nt, Tobacco etch virus
gcuuuuaagcuuauugua

SEQ ID NO: 250894 - RNA, 15 nt, Tobacco etch virus
agcuauucacagugg

SEQ ID NO: 250895 - RNA, 18 nt, Tobacco etch virus
aggcgaacgacaaaguga

SEQ ID NO: 250896 - RNA, 21 nt, Tobacco etch virus
auauaugaauagcuauucaca

SEQ ID NO: 250897 - RNA, 23 nt, Tobacco etch virus
auauauaugaauagcuauucaca

SEQ ID NO: 250898 - RNA, 16 nt, Tobacco etch virus
cuaauucuccuaugua

SEQ ID NO: 250899 - RNA, 19 nt, Tobacco etch virus
gaauagcuauucacagugg

SEQ ID NO: 250900 - RNA, 22 nt, Tobacco etch virus
uaauaugucuuauuagucucau

SEQ ID NO: 250901 - RNA, 12 nt, Tobacco etch virus
ugaauagcuauu

SEQ ID NO: 250902 - RNA, 17 nt, Tobacco etch virus
cuaauucuccuauguag

SEQ ID NO: 250903 - RNA, 12 nt, Tobacco etch virus
cucauuacuuag

SEQ ID NO: 250904 - RNA, 20 nt, Tobacco etch virus
ucuuguguugaauaguaucu

SEQ ID NO: 250905 - RNA, 20 nt, Tobacco etch virus
aauaugucuuauuagucuca

SEQ ID NO: 250906 - RNA, 22 nt, Tula virus
aagguagcuacuaaguugauua

SEQ ID NO: 250907 - RNA, 19 nt, Tula virus
acaaaauucacaccaaugc

SEQ ID NO: 250908 - RNA, 22 nt, Tula virus
acaaaauucacaccaaugcaug

SEQ ID NO: 250909 - RNA, 12 nt, Tula virus
aauucacacaua

SEQ ID NO: 250910 - RNA, 14 nt, Tula virus
aaaucaaacacaua

SEQ ID NO: 250911 - RNA, 12 nt, Tula virus
acuuuacuacua

SEQ ID NO: 250912 - RNA, 15 nt, Tula virus
acuuuacuacuacuc

SEQ ID NO: 250913 - RNA, 17 nt, Tula virus
acugagcuaucaucucu

SEQ ID NO: 250914 - RNA, 20 nt, Tula virus
acaguauguguuuauaucaa

SEQ ID NO: 250915 - RNA, 15 nt, Tula virus
auaucaaacugaacu

SEQ ID NO: 250916 - RNA, 19 nt, Tula virus
auaucaaacugaacuguau

SEQ ID NO: 250917 - RNA, 21 nt, Tula virus
augcaugauuacaauucacac

SEQ ID NO: 250918 - RNA, 22 nt, Tula virus
augauuacaauucacacauaca

SEQ ID NO: 250919 - RNA, 19 nt, Tula virus
augaguacuauuuguugcu

SEQ ID NO: 250920 - RNA, 20 nt, Tula virus
augaguacuauuuguugcuc

SEQ ID NO: 250921 - RNA, 22 nt, Tula virus
cacaaaauucacaccaaugcau

SEQ ID NO: 250922 - RNA, 13 nt, Tula virus
cacuuuacuacua

SEQ ID NO: 250923 - RNA, 15 nt, Tula virus
cacucagguaaucug

SEQ ID NO: 250924 - RNA, 17 nt, Tula virus
cacucagguaaucugcu

SEQ ID NO: 250925 - RNA, 20 nt, Tula virus
auuccuuaaugcauauguac

SEQ ID NO: 250926 - RNA, 13 nt, Tula virus
ugaaacugagcua

SEQ ID NO: 250927 - RNA, 14 nt, Tula virus
ucuauuuaaacauu

SEQ ID NO: 250928 - RNA, 16 nt, Tula virus
uccaaaaaaaacuacc

SEQ ID NO: 250929 - RNA, 17 nt, Tula virus
uccaaaaaaaacuacca

SEQ ID NO: 250930 - RNA, 17 nt, Tula virus
guugcucuuuucucgga

SEQ ID NO: 250931 - RNA, 17 nt, Tula virus
gugaaacugagcuauca

SEQ ID NO: 250932 - RNA, 15 nt, Tula virus
uagguaaguuuacua

SEQ ID NO: 250933 - RNA, 17 nt, Tula virus
uaccacuuuacuacuac

SEQ ID NO: 250934 - RNA, 14 nt, Tula virus
aauucacacauaca

SEQ ID NO: 250935 - RNA, 11 nt, Tula virus
aacuaccacuu

SEQ ID NO: 250936 - RNA, 16 nt, Tula virus
uucacacauacacuga

SEQ ID NO: 250937 - RNA, 23 nt, Tula virus
uuccugcauacacacacgcacau

SEQ ID NO: 250938 - RNA, 15 nt, Tula virus
uucucggagcauacu

SEQ ID NO: 250939 - RNA, 12 nt, Tula virus
uucuucaucucu

SEQ ID NO: 250940 - RNA, 17 nt, Tula virus
uuacuaaucuccuauau

SEQ ID NO: 250941 - RNA, 13 nt, Tula virus
ugcaugauuacaa

SEQ ID NO: 250942 - RNA, 22 nt, Tula virus
ugcaugauuacaauucacacau

SEQ ID NO: 250943 - RNA, 19 nt, Tula virus
uguaguuccugcauacaca

SEQ ID NO: 250944 - RNA, 22 nt, Tula virus
ugggucaaaucaaacacauaua

SEQ ID NO: 250945 - RNA, 13 nt, Tula virus
cuauuuguugcuc

SEQ ID NO: 250946 - RNA, 15 nt, Tula virus
cuauauuaacaguau

SEQ ID NO: 250947 - RNA, 14 nt, Tula virus
cuacucuaccucau

SEQ ID NO: 250948 - RNA, 21 nt, Tula virus
caugauuacaauucacacaua

SEQ ID NO: 250949 - RNA, 15 nt, Tula virus
gauuacaauucacac

SEQ ID NO: 250950 - RNA, 13 nt, Tula virus
aaaucaaacacau

SEQ ID NO: 250951 - RNA, 14 nt, Tula virus
gagcuaucaucucu

SEQ ID NO: 250952 - RNA, 14 nt, Tula virus
ucugcugcucugua

SEQ ID NO: 250953 - RNA, 13 nt, Tula virus
ugauuauugcacu

SEQ ID NO: 250954 - RNA, 22 nt, Tula virus
ugaguacuauuuguugcucuuu

SEQ ID NO: 250955 - RNA, 21 nt, Tula virus
ugcauauguacuuauaccuua

SEQ ID NO: 250956 - RNA, 14 nt, Tula virus
ucacacauacacug

SEQ ID NO: 250957 - RNA, 21 nt, Tula virus
uuccugcggagcauacuacua

SEQ ID NO: 250958 - RNA, 14 nt, Tula virus
uugaccacucaggu

SEQ ID NO: 250959 - RNA, 16 nt, Tula virus
uuuacuacuacucuac

SEQ ID NO: 250960 - RNA, 17 nt, Tula virus
uuucucggagcauacua

SEQ ID NO: 250961 - RNA, 20 nt, Tula virus
uuucucggagcauacuacua

SEQ ID NO: 250962 - RNA, 18 nt, Tula virus
ugggcacaaaauucacac

SEQ ID NO: 250963 - RNA, 13 nt, Tula virus
uuacaauucacac

SEQ ID NO: 250964 - RNA, 17 nt, Tula virus
uuacaauucacacauac

SEQ ID NO: 250965 - RNA, 19 nt, Tula virus
uuacaauucacacauacac

SEQ ID NO: 250966 - RNA, 13 nt, Tula virus
uuucuucaucucu

SEQ ID NO: 250967 - RNA, 17 nt, Tula virus
uaaucguaagguagcua

SEQ ID NO: 250968 - RNA, 14 nt, Tula virus
uacuauuuguugcu

SEQ ID NO: 250969 - RNA, 16 nt, Tula virus
uaucuuauauuacuaa

SEQ ID NO: 250970 - RNA, 19 nt, Tula virus
uaucaaacugaacuguaua

SEQ ID NO: 250971 - RNA, 14 nt, Tula virus
uacucuaccucaua

SEQ ID NO: 250972 - RNA, 16 nt, Tula virus
ucaaaucaaacacaua

SEQ ID NO: 250973 - RNA, 18 nt, Tula virus
ucaaaucaaacacauaua

SEQ ID NO: 250974 - RNA, 13 nt, Tula virus
ggagcauacuacu

SEQ ID NO: 250975 - RNA, 18 nt, Tula virus
gcaugauuacaauucaca

SEQ ID NO: 250976 - RNA, 21 nt, Tula virus
cuacagcuuggucauugacca

SEQ ID NO: 250977 - RNA, 16 nt, Tula virus
cuacuacucuaccuca

SEQ ID NO: 250978 - RNA, 22 nt, Tula virus
cuacuaaguugauuauugcacu

SEQ ID NO: 250979 - RNA, 12 nt, Tula virus
cucauacuacuu

SEQ ID NO: 250980 - RNA, 12 nt, Tula virus
cugcauacacac

SEQ ID NO: 250981 - RNA, 19 nt, Tula virus
auagcccucauacuacuuc

SEQ ID NO: 250982 - RNA, 20 nt, Tula virus
aucuccuauauuaacaguau

SEQ ID NO: 250983 - RNA, 23 nt, Tula virus
acugauuggguugggugggucaa

SEQ ID NO: 250984 - RNA, 14 nt, Tula virus
acuuauaccuuaua

SEQ ID NO: 250985 - RNA, 18 nt, Tula virus
acuuuacuacuacucuac

SEQ ID NO: 250986 - RNA, 21 nt, Tula virus
acuuuacuacuacucuaccuc

SEQ ID NO: 250987 - RNA, 16 nt, Tula virus
acuacucuaccucaua

SEQ ID NO: 250988 - RNA, 16 nt, Tula virus
acucuaccucauaucg

SEQ ID NO: 250989 - RNA, 16 nt, Tula virus
acgcacauccaaugau

SEQ ID NO: 250990 - RNA, 17 nt, Tula virus
cacacacgcacauccaa

SEQ ID NO: 250991 - RNA, 15 nt, Tula virus
cacacauacacugau

SEQ ID NO: 250992 - RNA, 16 nt, Tula virus
cacaccaaugcaugau

SEQ ID NO: 250993 - RNA, 12 nt, Tula virus
cacuuuacuacu

SEQ ID NO: 250994 - RNA, 17 nt, Tula virus
caaaucaaacacauaua

SEQ ID NO: 250995 - RNA, 15 nt, Tula virus
caaacugaacuguau

SEQ ID NO: 250996 - RNA, 14 nt, Tula virus
auuacaauucacac

SEQ ID NO: 250997 - RNA, 17 nt, Tula virus
agguaaguuuacuaauc

SEQ ID NO: 250998 - RNA, 14 nt, Tula virus
auaacuuuuuauua

SEQ ID NO: 250999 - RNA, 19 nt, Tula virus
cacauccaaugauaugaau

SEQ ID NO: 251000 - RNA, 16 nt, Tula virus
caaugcaugauuacaa

SEQ ID NO: 251001 - RNA, 12 nt, Tula virus
caauauaacuuu

SEQ ID NO: 251002 - RNA, 15 nt, Tula virus
caaaauucacaccaa

SEQ ID NO: 251003 - RNA, 20 nt, Tula virus
auugcacuacagcuugguca

SEQ ID NO: 251004 - RNA, 13 nt, Tula virus
aaugcauauguac

SEQ ID NO: 251005 - RNA, 14 nt, Tula virus
acuacucuaccuca

SEQ ID NO: 251006 - RNA, 15 nt, Tula virus
acuaccacuuuacua

SEQ ID NO: 251007 - RNA, 17 nt, Tula virus
acucuaccucauaucga

SEQ ID NO: 251008 - RNA, 22 nt, Tula virus
aaaaacuaccacuuuacuacua

SEQ ID NO: 251009 - RNA, 18 nt, Tula virus
gaguacuauuuguugcuc

SEQ ID NO: 251010 - RNA, 19 nt, Tula virus
cuuuucucggagcauacua

SEQ ID NO: 251011 - RNA, 17 nt, Tula virus
cucggagcauacuacua

SEQ ID NO: 251012 - RNA, 21 nt, Tula virus
cuacuaaguugauuauugcac

SEQ ID NO: 251013 - RNA, 17 nt, Tula virus
ugcucuguauguuuauu

SEQ ID NO: 251014 - RNA, 23 nt, Tula virus
ugcauacacacacgcacauccaa

SEQ ID NO: 251015 - RNA, 15 nt, Tula virus
ugauuacaauucaca

SEQ ID NO: 251016 - RNA, 17 nt, Tula virus
ugauuauugcacuacag

SEQ ID NO: 251017 - RNA, 15 nt, Tula virus
ugagcuaucaucucu

SEQ ID NO: 251018 - RNA, 17 nt, Tula virus
ucuuuucucggagcaua

SEQ ID NO: 251019 - RNA, 15 nt, Tula virus
uuacuacuacucuac

SEQ ID NO: 251020 - RNA, 23 nt, Tula virus
uguuccugcggagcauacuacua

SEQ ID NO: 251021 - RNA, 16 nt, Tula virus
uuguugcucuuuucuc

SEQ ID NO: 251022 - RNA, 19 nt, Tula virus
uugggcacaaaauucacac

SEQ ID NO: 251023 - RNA, 22 nt, Tula virus
uuuguauuaugucacuagugua

SEQ ID NO: 251024 - RNA, 16 nt, Tula virus
uacuauuuguugcucu

SEQ ID NO: 251025 - RNA, 20 nt, Tula virus
uacuauuuguugcucuuuuc

SEQ ID NO: 251026 - RNA, 15 nt, Tula virus
guugauuauugcacu

SEQ ID NO: 251027 - RNA, 20 nt, Tula virus
uauagcccucauacuacuuc

SEQ ID NO: 251028 - RNA, 18 nt, Tula virus
uaucaaacugaacuguau

SEQ ID NO: 251029 - RNA, 18 nt, Tula virus
uauguacuuauaccuuau

SEQ ID NO: 251030 - RNA, 14 nt, Tula virus
ucaaacacauauaa

SEQ ID NO: 251031 - RNA, 22 nt, Tula virus
cuuuucucggagcauacuacua

SEQ ID NO: 251032 - RNA, 21 nt, Tula virus
cuguauagcccucauacuacu

SEQ ID NO: 251033 - RNA, 16 nt, Tula virus
cgaucauuccuggacu

SEQ ID NO: 251034 - RNA, 16 nt, Tula virus
guaagguagcuacuaa

SEQ ID NO: 251035 - RNA, 23 nt, Tula virus
guacuauuuguugcucuuuucuc

SEQ ID NO: 251036 - RNA, 14 nt, Tula virus
guacuuauaccuua

SEQ ID NO: 251037 - RNA, 20 nt, Tula virus
guaguuccugcauacacaca

SEQ ID NO: 251038 - RNA, 18 nt, Tula virus
guauagcccucauacuac

SEQ ID NO: 251039 - RNA, 19 nt, Tula virus
guauagcccucauacuacu

SEQ ID NO: 251040 - RNA, 12 nt, Tula virus
uacaauucacac

SEQ ID NO: 251041 - RNA, 18 nt, Tula virus
uacaauucacacauacac

SEQ ID NO: 251042 - RNA, 14 nt, Tula virus
uacuuauaccuuau

SEQ ID NO: 251043 - RNA, 15 nt, Tula virus
uacuaaucuccuaua

SEQ ID NO: 251044 - RNA, 20 nt, Tula virus
guuccugcggagcauacuac

SEQ ID NO: 251045 - RNA, 12 nt, Tula virus
agcauacuacua

SEQ ID NO: 251046 - RNA, 19 nt, Tula virus
aguacuauuuguugcucuu

SEQ ID NO: 251047 - RNA, 20 nt, Tula virus
auauaacuuuuuauuauucc

SEQ ID NO: 251048 - RNA, 17 nt, Tula virus
auauuacuaaucuccua

SEQ ID NO: 251049 - RNA, 14 nt, Tula virus
acuauuuguugcuc

SEQ ID NO: 251050 - RNA, 19 nt, Tula virus
acacacgcacauccaauga

SEQ ID NO: 251051 - RNA, 21 nt, Tula virus
acacacacgcacauccaauga

SEQ ID NO: 251052 - RNA, 22 nt, Tula virus
acacacacgcacauccaaugau

SEQ ID NO: 251053 - RNA, 19 nt, Tula virus
acaguauguguuuauauca

SEQ ID NO: 251054 - RNA, 23 nt, Tula virus
aaugaguacuauuuguugcucuu

SEQ ID NO: 251055 - RNA, 13 nt, Tula virus
acaaaauucacac

SEQ ID NO: 251056 - RNA, 20 nt, Tula virus
acaaaauucacaccaaugca

SEQ ID NO: 251057 - RNA, 18 nt, Tula virus
acaauucacacauacacu

SEQ ID NO: 251058 - RNA, 12 nt, Tula virus
augauuacaauu

SEQ ID NO: 251059 - RNA, 16 nt, Tula virus
augcaugauuacaauu

SEQ ID NO: 251060 - RNA, 16 nt, Tula virus
aucuuauauuacuaau

SEQ ID NO: 251061 - RNA, 19 nt, Tula virus
aucuuauauuacuaaucuc

SEQ ID NO: 251062 - RNA, 19 nt, Tula virus
auucacaccaaugcaugau

SEQ ID NO: 251063 - RNA, 23 nt, Tula virus
augucacuaguguaaguucauua

SEQ ID NO: 251064 - RNA, 18 nt, Tula virus
auguacuuauaccuuaua

SEQ ID NO: 251065 - RNA, 15 nt, Tula virus
auugcacuacagcuu

SEQ ID NO: 251066 - RNA, 17 nt, Tula virus
cacaaaauucacaccaa

SEQ ID NO: 251067 - RNA, 16 nt, Tula virus
cagcuuggucauugac

SEQ ID NO: 251068 - RNA, 23 nt, Tula virus
cauaucgaucauuccuggacuuu

SEQ ID NO: 251069 - RNA, 21 nt, Tula virus
cauacacacacgcacauccaa

SEQ ID NO: 251070 - RNA, 18 nt, Tula virus
ccaaugcaugauuacaau

SEQ ID NO: 251071 - RNA, 16 nt, Tula virus
ucauaucgaucauucc

SEQ ID NO: 251072 - RNA, 21 nt, Tula virus
ugauuacaauucacacauaca

SEQ ID NO: 251073 - RNA, 19 nt, Tula virus
uuaaugcauauguacuuau

SEQ ID NO: 251074 - RNA, 20 nt, Tula virus
uugauuauugcacuacagcu

SEQ ID NO: 251075 - RNA, 17 nt, Tula virus
uucacaccaaugcauga

SEQ ID NO: 251076 - RNA, 21 nt, Uukuniemi virus
uucggcccaaacuacagugau

SEQ ID NO: 251077 - RNA, 16 nt, Uukuniemi virus
uugauggaguccucag

SEQ ID NO: 251078 - RNA, 13 nt, Uukuniemi virus
uucugcccaguga

SEQ ID NO: 251079 - RNA, 14 nt, Uukuniemi virus
uucugcccagugac

SEQ ID NO: 251080 - RNA, 18 nt, Uukuniemi virus
uucugcccagugaccuga

SEQ ID NO: 251081 - RNA, 15 nt, Uukuniemi virus
uucuucuucauccca

SEQ ID NO: 251082 - RNA, 14 nt, Uukuniemi virus
uucuuccgaucuga

SEQ ID NO: 251083 - RNA, 15 nt, Uukuniemi virus
ugcuuuuacuaucuc

SEQ ID NO: 251084 - RNA, 16 nt, Uukuniemi virus
uggaguccucagggag

SEQ ID NO: 251085 - RNA, 15 nt, Uukuniemi virus
ugcucaauugcagug

SEQ ID NO: 251086 - RNA, 20 nt, Uukuniemi virus
ugcuggcauugcuuuuacua

SEQ ID NO: 251087 - RNA, 21 nt, Uukuniemi virus
ugcuggcauugcuuuuacuau

SEQ ID NO: 251088 - RNA, 21 nt, Uukuniemi virus
ugguccuggagaacuccagca

SEQ ID NO: 251089 - RNA, 24 nt, Uukuniemi virus
ugauccagugcuccucaagguuga

SEQ ID NO: 251090 - RNA, 18 nt, Uukuniemi virus
ugacugggagucaggaag

SEQ ID NO: 251091 - RNA, 20 nt, Uukuniemi virus
ugaagaaccuuuucucugca

SEQ ID NO: 251092 - RNA, 16 nt, Uukuniemi virus
ucugaggacaguugca

SEQ ID NO: 251093 - RNA, 21 nt, Uukuniemi virus
ucuuccgaucugauucaaaca

SEQ ID NO: 251094 - RNA, 17 nt, Uukuniemi virus
ucauaguugcaaggugc

SEQ ID NO: 251095 - RNA, 17 nt, Uukuniemi virus
uccagggugguccuuag

SEQ ID NO: 251096 - RNA, 13 nt, Uukuniemi virus
uccuuuacuucca

SEQ ID NO: 251097 - RNA, 17 nt, Uukuniemi virus
uccuuggugaauguggu

SEQ ID NO: 251098 - RNA, 19 nt, Uukuniemi virus
uccuucaccagauucugcc

SEQ ID NO: 251099 - RNA, 22 nt, Uukuniemi virus
uccucagggagggucucaucga

SEQ ID NO: 251100 - RNA, 17 nt, Uukuniemi virus
ucagaucaaugaucuga

SEQ ID NO: 251101 - RNA, 21 nt, Uukuniemi virus
ccagauucugcccagugaccu

SEQ ID NO: 251102 - RNA, 19 nt, Uukuniemi virus
ccaucuuggcggacuuugu

SEQ ID NO: 251103 - RNA, 21 nt, Uukuniemi virus
ccagccugcagagcagaguca

SEQ ID NO: 251104 - RNA, 12 nt, Uukuniemi virus
ccagcagucgcu

SEQ ID NO: 251105 - RNA, 23 nt, Uukuniemi virus
ccagcagucgcucccuagcacuc

SEQ ID NO: 251106 - RNA, 14 nt, Uukuniemi virus
caugcacacuggau

SEQ ID NO: 251107 - RNA, 15 nt, Uukuniemi virus
cccuagcacucucaa

SEQ ID NO: 251108 - RNA, 14 nt, Uukuniemi virus
ccgaucugauucaa

SEQ ID NO: 251109 - RNA, 16 nt, Uukuniemi virus
ccauuuccguccacca

SEQ ID NO: 251110 - RNA, 19 nt, Uukuniemi virus
cccaaacuacagugauccu

SEQ ID NO: 251111 - RNA, 21 nt, Uukuniemi virus
cagggccuugauggaguccuc

SEQ ID NO: 251112 - RNA, 16 nt, Uukuniemi virus
cauaguugcaaggugc

SEQ ID NO: 251113 - RNA, 21 nt, Uukuniemi virus
cagagucauuggcauccaaga

SEQ ID NO: 251114 - RNA, 15 nt, Uukuniemi virus
cagauccuucaccag

SEQ ID NO: 251115 - RNA, 13 nt, Uukuniemi virus
caauugcagugaa

SEQ ID NO: 251116 - RNA, 21 nt, Uukuniemi virus
caauugcagugaagaaccuuu

SEQ ID NO: 251117 - RNA, 16 nt, Uukuniemi virus
caaaggugauccagug

SEQ ID NO: 251118 - RNA, 17 nt, Uukuniemi virus
caaaggugauccagugc

SEQ ID NO: 251119 - RNA, 19 nt, Uukuniemi virus
caaaggugauccagugcuc

SEQ ID NO: 251120 - RNA, 14 nt, Uukuniemi virus
auucugcccaguga

SEQ ID NO: 251121 - RNA, 13 nt, Uukuniemi virus
acagauccuucac

SEQ ID NO: 251122 - RNA, 13 nt, Uukuniemi virus
accucagaucaau

SEQ ID NO: 251123 - RNA, 16 nt, Uukuniemi virus
accucagaucaaugau

SEQ ID NO: 251124 - RNA, 16 nt, Uukuniemi virus
auaguugcaaggugcu

SEQ ID NO: 251125 - RNA, 19 nt, Uukuniemi virus
agguucauaguugcaaggu

SEQ ID NO: 251126 - RNA, 22 nt, Uukuniemi virus
aggugcuugcucaauugcagug

SEQ ID NO: 251127 - RNA, 23 nt, Uukuniemi virus
aggugcuugcucaauugcaguga

SEQ ID NO: 251128 - RNA, 18 nt, Uukuniemi virus
aguccaauuagagaguuu

SEQ ID NO: 251129 - RNA, 20 nt, Uukuniemi virus
agucgcucccuagcacucuc

SEQ ID NO: 251130 - RNA, 22 nt, Uukuniemi virus
agucgcucccuagcacucucaa

SEQ ID NO: 251131 - RNA, 20 nt, Uukuniemi virus
agucaggaaggagcuugcca

SEQ ID NO: 251132 - RNA, 16 nt, Uukuniemi virus
agccugcagagcagag

SEQ ID NO: 251133 - RNA, 22 nt, Uukuniemi virus
aggaaggagcuugccagaccag

SEQ ID NO: 251134 - RNA, 15 nt, Uukuniemi virus
agaucaaugaucuga

SEQ ID NO: 251135 - RNA, 19 nt, Uukuniemi virus
agaguuggauggacaguaa

SEQ ID NO: 251136 - RNA, 17 nt, Uukuniemi virus
guugcaaggugcuugcu

SEQ ID NO: 251137 - RNA, 12 nt, Uukuniemi virus
guuggaugcugg

SEQ ID NO: 251138 - RNA, 19 nt, Uukuniemi virus
uagcacucucaaaggugau

SEQ ID NO: 251139 - RNA, 20 nt, Uukuniemi virus
ggucucaucgaucaggccag

SEQ ID NO: 251140 - RNA, 12 nt, Uukuniemi virus
ggccagcaaagg

SEQ ID NO: 251141 - RNA, 13 nt, Uukuniemi virus
ggcggacuuugug

SEQ ID NO: 251142 - RNA, 23 nt, Uukuniemi virus
ggcuucggcccaaacuacaguga

SEQ ID NO: 251143 - RNA, 21 nt, Uukuniemi virus
gggagggucucaucgaucagg

SEQ ID NO: 251144 - RNA, 13 nt, Uukuniemi virus
gcagagcagaguc

SEQ ID NO: 251145 - RNA, 17 nt, Uukuniemi virus
cgaucugauucaaacau

SEQ ID NO: 251146 - RNA, 16 nt, Uukuniemi virus
cugauucaaacaugaa

SEQ ID NO: 251147 - RNA, 20 nt, Uukuniemi virus
cucucaaaggugauccagug

SEQ ID NO: 251148 - RNA, 14 nt, Uukuniemi virus
cuggccaauccuug

SEQ ID NO: 251149 - RNA, 14 nt, Uukuniemi virus
cuccucaagguuga

SEQ ID NO: 251150 - RNA, 15 nt, Uukuniemi virus
cucaauugcagugaa

SEQ ID NO: 251151 - RNA, 14 nt, Uukuniemi virus
cuagcacucucaaa

SEQ ID NO: 251152 - RNA, 13 nt, Uukuniemi virus
cuuuucucugcaa

SEQ ID NO: 251153 - RNA, 15 nt, Uukuniemi virus
cuuuucucugcaaug

SEQ ID NO: 251154 - RNA, 14 nt, Uukuniemi virus
cuuuuagaguccaa

SEQ ID NO: 251155 - RNA, 13 nt, Uukuniemi virus
gaucaaugaucug

SEQ ID NO: 251156 - RNA, 21 nt, Uukuniemi virus
gagucaggaaggagcuugcca

SEQ ID NO: 251157 - RNA, 15 nt, Uukuniemi virus
gaguuggauggacag

SEQ ID NO: 251158 - RNA, 18 nt, Uukuniemi virus
gaguuggauggacaguaa

SEQ ID NO: 251159 - RNA, 20 nt, Uukuniemi virus
ucaaaggugauccagugcuc

SEQ ID NO: 251160 - RNA, 15 nt, Uukuniemi virus
uauucacuuugccau

SEQ ID NO: 251161 - RNA, 13 nt, Uukuniemi virus
ucaggaaggagcu

SEQ ID NO: 251162 - RNA, 20 nt, Uukuniemi virus
ucaggaaggagcuugccaga

SEQ ID NO: 251163 - RNA, 15 nt, Uukuniemi virus
uccuggagaacucca

SEQ ID NO: 251164 - RNA, 13 nt, Uukuniemi virus
uccuuggccucca

SEQ ID NO: 251165 - RNA, 23 nt, Uukuniemi virus
uccagugcuccucaagguugacu

SEQ ID NO: 251166 - RNA, 20 nt, Uukuniemi virus
guccagcagucgcucccuag

SEQ ID NO: 251167 - RNA, 15 nt, Uukuniemi virus
guucaugugcuucuu

SEQ ID NO: 251168 - RNA, 19 nt, Uukuniemi virus
uuggguuggaugcuggcau

SEQ ID NO: 251169 - RNA, 15 nt, Uukuniemi virus
uuuaauucggccaaa

SEQ ID NO: 251170 - RNA, 15 nt, Uukuniemi virus
uugccagaccagccu

SEQ ID NO: 251171 - RNA, 19 nt, Uukuniemi virus
uugcucaauugcagugaag

SEQ ID NO: 251172 - RNA, 17 nt, Uukuniemi virus
uuggcauccaagaucuc

SEQ ID NO: 251173 - RNA, 17 nt, Uukuniemi virus
aagcccuuuuagagucc

SEQ ID NO: 251174 - RNA, 14 nt, Uukuniemi virus
aaggugauccagug

SEQ ID NO: 251175 - RNA, 14 nt, Uukuniemi virus
aacaugaaguucau

SEQ ID NO: 251176 - RNA, 23 nt, Uukuniemi virus
aacaugaaguucaugugcuucuu

SEQ ID NO: 251177 - RNA, 13 nt, Uukuniemi virus
aacuccagcagau

SEQ ID NO: 251178 - RNA, 14 nt, Uukuniemi virus
uggugaauguggug

SEQ ID NO: 251179 - RNA, 20 nt, Uukuniemi virus
ucuuuucuggagaucaagaa

SEQ ID NO: 251180 - RNA, 14 nt, Uukuniemi virus
ugaggacaguugca

SEQ ID NO: 251181 - RNA, 12 nt, Uukuniemi virus
ugcaaggugcuu

SEQ ID NO: 251182 - RNA, 22 nt, Uukuniemi virus
ugcaaggugcuugcucaauugc

SEQ ID NO: 251183 - RNA, 21 nt, Uukuniemi virus
ugaucugaggacaguugcagc

SEQ ID NO: 251184 - RNA, 22 nt, Uukuniemi virus
ugcuugcucaauugcagugaag

SEQ ID NO: 251185 - RNA, 14 nt, Uukuniemi virus
cuccuuggccucca

SEQ ID NO: 251186 - RNA, 14 nt, Uukuniemi virus
cucuaauuggacuc

SEQ ID NO: 251187 - RNA, 22 nt, Uukuniemi virus
cucucaaaggugauccagugcu

SEQ ID NO: 251188 - RNA, 23 nt, Uukuniemi virus
cucugcaauggucccccuuguga

SEQ ID NO: 251189 - RNA, 21 nt, Uukuniemi virus
cugcaauggucccccuuguga

SEQ ID NO: 251190 - RNA, 14 nt, Uukuniemi virus
cuggacggcuuuau

SEQ ID NO: 251191 - RNA, 18 nt, Uukuniemi virus
cuggacggcuuuauucac

SEQ ID NO: 251192 - RNA, 23 nt, Uukuniemi virus
cuggagaucaagaauguggagaa

SEQ ID NO: 251193 - RNA, 16 nt, Uukuniemi virus
aaacaccucagaucaa

SEQ ID NO: 251194 - RNA, 23 nt, Uukuniemi virus
cagugauccuacgacuggccaau

SEQ ID NO: 251195 - RNA, 23 nt, Uukuniemi virus
cagugaagaaccuuuucucugca

SEQ ID NO: 251196 - RNA, 24 nt, Uukuniemi virus
cagugaagaaccuuuucucugcaa

SEQ ID NO: 251197 - RNA, 22 nt, Uukuniemi virus
cagucgcucccuagcacucuca

SEQ ID NO: 251198 - RNA, 18 nt, Uukuniemi virus
cauaacgcuuagguucau

SEQ ID NO: 251199 - RNA, 20 nt, Uukuniemi virus
cauaacgcuuagguucauag

SEQ ID NO: 251200 - RNA, 16 nt, Uukuniemi virus
caggccagcaaaggca

SEQ ID NO: 251201 - RNA, 13 nt, Uukuniemi virus
cagguaagcucuc

SEQ ID NO: 251202 - RNA, 18 nt, Uukuniemi virus
cauuuccguccaccagcu

SEQ ID NO: 251203 - RNA, 18 nt, Uukuniemi virus
ccaaacuacagugauccu

SEQ ID NO: 251204 - RNA, 22 nt, Uukuniemi virus
cccuagcacucucaaaggugau

SEQ ID NO: 251205 - RNA, 15 nt, Uukuniemi virus
cccaaacuacaguga

SEQ ID NO: 251206 - RNA, 17 nt, Uukuniemi virus
cccaaacuacagugauc

SEQ ID NO: 251207 - RNA, 18 nt, Uukuniemi virus
ccuagcacucucaaaggu

SEQ ID NO: 251208 - RNA, 16 nt, Uukuniemi virus
cuuuucucugcaaugg

SEQ ID NO: 251209 - RNA, 22 nt, Uukuniemi virus
gaagcucagcagguaagcucuc

SEQ ID NO: 251210 - RNA, 14 nt, Uukuniemi virus
gaauguaucuuccu

SEQ ID NO: 251211 - RNA, 13 nt, Uukuniemi virus
gaguccucaggga

SEQ ID NO: 251212 - RNA, 14 nt, Uukuniemi virus
gaguccucagggag

SEQ ID NO: 251213 - RNA, 15 nt, Uukuniemi virus
gagcuugccagacca

SEQ ID NO: 251214 - RNA, 16 nt, Uukuniemi virus
gaucaagaauguggag

SEQ ID NO: 251215 - RNA, 16 nt, Uukuniemi virus
gagaucaagaaugugg

SEQ ID NO: 251216 - RNA, 14 nt, Uukuniemi virus
gacaguaagguucu

SEQ ID NO: 251217 - RNA, 24 nt, Uukuniemi virus
gaccagccugcagagcagagucau

SEQ ID NO: 251218 - RNA, 14 nt, Uukuniemi virus
gcuuuuacuaucuc

SEQ ID NO: 251219 - RNA, 18 nt, Uukuniemi virus
ggcccaaacuacagugau

SEQ ID NO: 251220 - RNA, 14 nt, Uukuniemi virus
gggcaucgaccagg

SEQ ID NO: 251221 - RNA, 19 nt, Uukuniemi virus
gccaauccuuggugaaugu

SEQ ID NO: 251222 - RNA, 16 nt, Uukuniemi virus
gccugcagagcagagu

SEQ ID NO: 251223 - RNA, 20 nt, Uukuniemi virus
gcaauggucccccuugugac

SEQ ID NO: 251224 - RNA, 17 nt, Uukuniemi virus
aaaacaccucagaucaa

SEQ ID NO: 251225 - RNA, 18 nt, Uukuniemi virus
acucucaaaggugaucca

SEQ ID NO: 251226 - RNA, 22 nt, Uukuniemi virus
acucucaaaggugauccagugc

SEQ ID NO: 251227 - RNA, 11 nt, Uukuniemi virus
acuacagugau

SEQ ID NO: 251228 - RNA, 12 nt, Uukuniemi virus
acuacagugauc

SEQ ID NO: 251229 - RNA, 14 nt, Uukuniemi virus
acuacagugauccu

SEQ ID NO: 251230 - RNA, 14 nt, Uukuniemi virus
agaauguggagaag

SEQ ID NO: 251231 - RNA, 14 nt, Uukuniemi virus
acaccucagaucaa

SEQ ID NO: 251232 - RNA, 13 nt, Uukuniemi virus
acaugaaguucau

SEQ ID NO: 251233 - RNA, 21 nt, Uukuniemi virus
acaugaaguucaugugcuucu

SEQ ID NO: 251234 - RNA, 16 nt, Uukuniemi virus
aauccuuggugaaugu

SEQ ID NO: 251235 - RNA, 14 nt, Uukuniemi virus
aauugcagugaaga

SEQ ID NO: 251236 - RNA, 14 nt, Uukuniemi virus
aaguucaugugcuu

SEQ ID NO: 251237 - RNA, 12 nt, Uukuniemi virus
aacuacagugau

SEQ ID NO: 251238 - RNA, 16 nt, Uukuniemi virus
aacuacagugauccua

SEQ ID NO: 251239 - RNA, 15 nt, Uukuniemi virus
aacgcuuagguucau

SEQ ID NO: 251240 - RNA, 17 nt, Uukuniemi virus
auuuaauucggccaaau

SEQ ID NO: 251241 - RNA, 21 nt, Uukuniemi virus
caaaacaccucagaucaauga

SEQ ID NO: 251242 - RNA, 21 nt, Uukuniemi virus
augguccuggagaacuccagc

SEQ ID NO: 251243 - RNA, 15 nt, Uukuniemi virus
aucuuccuuuacuuc

SEQ ID NO: 251244 - RNA, 17 nt, Uukuniemi virus
aucuuccuuuacuucca

SEQ ID NO: 251245 - RNA, 15 nt, Uukuniemi virus
auuaaaacucucuaa

SEQ ID NO: 251246 - RNA, 20 nt, Uukuniemi virus
cacagauccuucaccagauu

SEQ ID NO: 251247 - RNA, 20 nt, Uukuniemi virus
caccagcuugaagcucagca

SEQ ID NO: 251248 - RNA, 19 nt, Uukuniemi virus
cacucucaaaggugaucca

SEQ ID NO: 251249 - RNA, 23 nt, Uukuniemi virus
agugaagaaccuuuucucugcaa

SEQ ID NO: 251250 - RNA, 13 nt, Uukuniemi virus
auccagugcuccu

SEQ ID NO: 251251 - RNA, 22 nt, Uukuniemi virus
agucauuggcauccaagaucuc

SEQ ID NO: 251252 - RNA, 22 nt, Uukuniemi virus
agucaggaaggagcuugccaga

SEQ ID NO: 251253 - RNA, 20 nt, Uukuniemi virus
agggagggucucaucgauca

SEQ ID NO: 251254 - RNA, 19 nt, Uukuniemi virus
aggcauugugcaucaugca

SEQ ID NO: 251255 - RNA, 16 nt, Uukuniemi virus
aggcacagauccuuca

SEQ ID NO: 251256 - RNA, 21 nt, Uukuniemi virus
agauccuucaccagauucugc

SEQ ID NO: 251257 - RNA, 21 nt, Uukuniemi virus
agccugcagagcagagucauu

SEQ ID NO: 251258 - RNA, 19 nt, Uukuniemi virus
agcccuuuuagaguccaau

SEQ ID NO: 251259 - RNA, 16 nt, Uukuniemi virus
augugcuucuucuuca

SEQ ID NO: 251260 - RNA, 19 nt, Uukuniemi virus
auuccaaaacaccucagau

SEQ ID NO: 251261 - RNA, 15 nt, Uukuniemi virus
auuggcauccaagau

SEQ ID NO: 251262 - RNA, 16 nt, Uukuniemi virus
caaacaugaaguucau

SEQ ID NO: 251263 - RNA, 17 nt, Uukuniemi virus
caaaacaccucagauca

SEQ ID NO: 251264 - RNA, 14 nt, Uukuniemi virus
auuuaauucggcca

SEQ ID NO: 251265 - RNA, 16 nt, Uukuniemi virus
auuuaauucggccaaa

SEQ ID NO: 251266 - RNA, 14 nt, Uukuniemi virus
auuugauuuaauuc

SEQ ID NO: 251267 - RNA, 15 nt, Uukuniemi virus
cacucucaaagguga

SEQ ID NO: 251268 - RNA, 22 nt, Uukuniemi virus
cacucucaaaggugauccagug

SEQ ID NO: 251269 - RNA, 19 nt, Uukuniemi virus
caccagauucugcccagug

SEQ ID NO: 251270 - RNA, 21 nt, Uukuniemi virus
caccagauucugcccagugac

SEQ ID NO: 251271 - RNA, 21 nt, Uukuniemi virus
caauccuuggugaauguggug

SEQ ID NO: 251272 - RNA, 14 nt, Uukuniemi virus
caaugaucugagga

SEQ ID NO: 251273 - RNA, 14 nt, Uukuniemi virus
caaggugcuugcuc

SEQ ID NO: 251274 - RNA, 18 nt, Uukuniemi virus
cagauucugcccagugac

SEQ ID NO: 251275 - RNA, 19 nt, Uukuniemi virus
cagauucugcccagugacc

SEQ ID NO: 251276 - RNA, 22 nt, Uukuniemi virus
caugugcuucuucuucauccca

SEQ ID NO: 251277 - RNA, 15 nt, Uukuniemi virus
ccaaacuacagugau

SEQ ID NO: 251278 - RNA, 19 nt, Uukuniemi virus
cauuggcauccaagaucuc

SEQ ID NO: 251279 - RNA, 17 nt, Uukuniemi virus
cauugugcaucaugcac

SEQ ID NO: 251280 - RNA, 19 nt, Uukuniemi virus
ccagcuugaagcucagcag

SEQ ID NO: 251281 - RNA, 15 nt, Uukuniemi virus
ccuagcacucucaaa

SEQ ID NO: 251282 - RNA, 20 nt, Uukuniemi virus
ccuagcacucucaaagguga

SEQ ID NO: 251283 - RNA, 16 nt, Uukuniemi virus
ccucaagguugacuag

SEQ ID NO: 251284 - RNA, 13 nt, Uukuniemi virus
ccugcagagcaga

SEQ ID NO: 251285 - RNA, 17 nt, Uukuniemi virus
ccuuuucucugcaaugg

SEQ ID NO: 251286 - RNA, 18 nt, Uukuniemi virus
ccuuuucucugcaauggu

SEQ ID NO: 251287 - RNA, 20 nt, Uukuniemi virus
ccuucaccagauucugccca

SEQ ID NO: 251288 - RNA, 23 nt, Uukuniemi virus
ccuucaccagauucugcccagug

SEQ ID NO: 251289 - RNA, 19 nt, Uukuniemi virus
agaaccuuuucucugcaau

SEQ ID NO: 251290 - RNA, 21 nt, Uukuniemi virus
agaaccuuuucucugcaaugg

SEQ ID NO: 251291 - RNA, 16 nt, Uukuniemi virus
aucuccuuggccucca

SEQ ID NO: 251292 - RNA, 19 nt, Uukuniemi virus
aucuccuuggccuccauuc

SEQ ID NO: 251293 - RNA, 14 nt, Uukuniemi virus
aucgaucaggccag

SEQ ID NO: 251294 - RNA, 19 nt, Uukuniemi virus
auccuucaccagauucugc

SEQ ID NO: 251295 - RNA, 16 nt, Uukuniemi virus
auccagugcuccucaa

SEQ ID NO: 251296 - RNA, 19 nt, Uukuniemi virus
auccagugcuccucaaggu

SEQ ID NO: 251297 - RNA, 20 nt, Uukuniemi virus
agugauccuacgacuggcca

SEQ ID NO: 251298 - RNA, 22 nt, Uukuniemi virus
agugauccuacgacuggccaau

SEQ ID NO: 251299 - RNA, 20 nt, Uukuniemi virus
aguugcaaggugcuugcuca

SEQ ID NO: 251300 - RNA, 19 nt, Uukuniemi virus
agguugacuagaguuggau

SEQ ID NO: 251301 - RNA, 20 nt, Uukuniemi virus
cuggagaucaagaaugugga

SEQ ID NO: 251302 - RNA, 19 nt, Uukuniemi virus
cucucuaauuggacucuaa

SEQ ID NO: 251303 - RNA, 11 nt, Uukuniemi virus
cucugcaaugg

SEQ ID NO: 251304 - RNA, 15 nt, Uukuniemi virus
cucucucucuuugaa

SEQ ID NO: 251305 - RNA, 16 nt, Uukuniemi virus
cucccuagcacucuca

SEQ ID NO: 251306 - RNA, 14 nt, Uukuniemi virus
cucagaucaaugau

SEQ ID NO: 251307 - RNA, 16 nt, Uukuniemi virus
cucagaucaaugaucu

SEQ ID NO: 251308 - RNA, 20 nt, Uukuniemi virus
gccaaauuaaaacucucuaa

SEQ ID NO: 251309 - RNA, 17 nt, Uukuniemi virus
gcacucucaaaggugau

SEQ ID NO: 251310 - RNA, 19 nt, Uukuniemi virus
gaauguggagaaggcacag

SEQ ID NO: 251311 - RNA, 16 nt, Uukuniemi virus
gagcuugccagaccag

SEQ ID NO: 251312 - RNA, 21 nt, Uukuniemi virus
gagccugugggcaucgaccag

SEQ ID NO: 251313 - RNA, 13 nt, Uukuniemi virus
gcccagugaccug

SEQ ID NO: 251314 - RNA, 22 nt, Uukuniemi virus
ggugcuugcucaauugcaguga

SEQ ID NO: 251315 - RNA, 22 nt, Uukuniemi virus
gugcuugcucaauugcagugaa

SEQ ID NO: 251316 - RNA, 21 nt, Uukuniemi virus
guccuggagaacuccagcaga

SEQ ID NO: 251317 - RNA, 18 nt, Uukuniemi virus
ucaaaggugauccagugc

SEQ ID NO: 251318 - RNA, 21 nt, Uukuniemi virus
ucaaauuccaaaacaccucag

SEQ ID NO: 251319 - RNA, 13 nt, Uukuniemi virus
ucaauugcaguga

SEQ ID NO: 251320 - RNA, 19 nt, Uukuniemi virus
uaucucucucucuuugaau

SEQ ID NO: 251321 - RNA, 14 nt, Uukuniemi virus
uuucucugcaaugg

SEQ ID NO: 251322 - RNA, 13 nt, Uukuniemi virus
ugugcaucaugca

SEQ ID NO: 251323 - RNA, 17 nt, Uukuniemi virus
uggaugcuggcauugcu

SEQ ID NO: 251324 - RNA, 20 nt, Uukuniemi virus
uugcaaggugcuugcucaau

SEQ ID NO: 251325 - RNA, 22 nt, Uukuniemi virus
uugccauuuccguccaccagcu

SEQ ID NO: 251326 - RNA, 19 nt, Uukuniemi virus
uuccgcggugcuucacguu

SEQ ID NO: 251327 - RNA, 18 nt, Uukuniemi virus
uucauaguugcaaggugc

SEQ ID NO: 251328 - RNA, 19 nt, Uukuniemi virus
uucauaguugcaaggugcu

SEQ ID NO: 251329 - RNA, 21 nt, Uukuniemi virus
ucaugugcuucuucuucaucc

SEQ ID NO: 251330 - RNA, 14 nt, Uukuniemi virus
ucccccuugugacu

SEQ ID NO: 251331 - RNA, 14 nt, Uukuniemi virus
ucugcccagugacc

SEQ ID NO: 251332 - RNA, 22 nt, Uukuniemi virus
ucuaaaagggcuucggcccaaa

SEQ ID NO: 251333 - RNA, 16 nt, Uukuniemi virus
ucucaaaggugaucca

SEQ ID NO: 251334 - RNA, 20 nt, Uukuniemi virus
ucucaaaggugauccagugc

SEQ ID NO: 251335 - RNA, 23 nt, Uukuniemi virus
ugaauguaucuuccuuuacuucc

SEQ ID NO: 251336 - RNA, 20 nt, Uukuniemi virus
gagccugugggcaucgacca

SEQ ID NO: 251337 - RNA, 22 nt, Uukuniemi virus
gacuggccaauccuuggugaau

SEQ ID NO: 251338 - RNA, 14 nt, Uukuniemi virus
gauggaguccucag

SEQ ID NO: 251339 - RNA, 19 nt, Uukuniemi virus
gaucugauucaaacaugaa

SEQ ID NO: 251340 - RNA, 23 nt, Uukuniemi virus
aaaggcauugugcaucaugcaca

SEQ ID NO: 251341 - RNA, 15 nt, Uukuniemi virus
aaaggugauccagug

SEQ ID NO: 251342 - RNA, 15 nt, Uukuniemi virus
gcucaauugcaguga

SEQ ID NO: 251343 - RNA, 14 nt, Uukuniemi virus
gcaucgaccagggc

SEQ ID NO: 251344 - RNA, 11 nt, Uukuniemi virus
ggugaaugugg

SEQ ID NO: 251345 - RNA, 13 nt, Uukuniemi virus
ggugaauguggug

SEQ ID NO: 251346 - RNA, 17 nt, Uukuniemi virus
ggagcuugccagaccag

SEQ ID NO: 251347 - RNA, 23 nt, Uukuniemi virus
ggagggucucaucgaucaggcca

SEQ ID NO: 251348 - RNA, 19 nt, Uukuniemi virus
gcuugaagcucagcaggua

SEQ ID NO: 251349 - RNA, 18 nt, Uukuniemi virus
cauugugcaucaugcaca

SEQ ID NO: 251350 - RNA, 20 nt, Uukuniemi virus
ccauaacgcuuagguucaua

SEQ ID NO: 251351 - RNA, 12 nt, Uukuniemi virus
ccuugugacuag

SEQ ID NO: 251352 - RNA, 14 nt, Uukuniemi virus
ccuuuucucugcaa

SEQ ID NO: 251353 - RNA, 19 nt, Uukuniemi virus
cucaaaggugauccagugc

SEQ ID NO: 251354 - RNA, 18 nt, Uukuniemi virus
cucccuagcacucucaaa

SEQ ID NO: 251355 - RNA, 12 nt, Uukuniemi virus
cugggagucagg

SEQ ID NO: 251356 - RNA, 23 nt, Uukuniemi virus
cuggcauugcuuuuacuaucucu

SEQ ID NO: 251357 - RNA, 21 nt, Uukuniemi virus
cuuagguucauaguugcaagg

SEQ ID NO: 251358 - RNA, 23 nt, Uukuniemi virus
cuucaccagauucugcccaguga

SEQ ID NO: 251359 - RNA, 21 nt, Uukuniemi virus
cuucggcccaaacuacaguga

SEQ ID NO: 251360 - RNA, 22 nt, Uukuniemi virus
cuucggcccaaacuacagugau

SEQ ID NO: 251361 - RNA, 17 nt, Uukuniemi virus
cuugcucaauugcagug

SEQ ID NO: 251362 - RNA, 18 nt, Uukuniemi virus
cuugcucaauugcaguga

SEQ ID NO: 251363 - RNA, 22 nt, Uukuniemi virus
cuugcucaauugcagugaagaa

SEQ ID NO: 251364 - RNA, 15 nt, Uukuniemi virus
cuugccagaccagcc

SEQ ID NO: 251365 - RNA, 16 nt, Uukuniemi virus
cuugccagaccagccu

SEQ ID NO: 251366 - RNA, 14 nt, Uukuniemi virus
cuugauggaguccu

SEQ ID NO: 251367 - RNA, 20 nt, Uukuniemi virus
cuugauggaguccucaggga

SEQ ID NO: 251368 - RNA, 23 nt, Uukuniemi virus
ugggcaucgaccagggccuugau

SEQ ID NO: 251369 - RNA, 14 nt, Uukuniemi virus
ugggagucaggaag

SEQ ID NO: 251370 - RNA, 21 nt, Uukuniemi virus
uggcauugcuuuuacuaucuc

SEQ ID NO: 251371 - RNA, 17 nt, Uukuniemi virus
ugcucaauugcagugaa

SEQ ID NO: 251372 - RNA, 21 nt, Uukuniemi virus
uuagguucauaguugcaaggu

SEQ ID NO: 251373 - RNA, 21 nt, Uukuniemi virus
uucugacugggagucaggaag

SEQ ID NO: 251374 - RNA, 11 nt, Uukuniemi virus
uucucugcaau

SEQ ID NO: 251375 - RNA, 13 nt, Uukuniemi virus
uucucugcaaugg

SEQ ID NO: 251376 - RNA, 14 nt, Uukuniemi virus
uuccuuuacuucca

SEQ ID NO: 251377 - RNA, 14 nt, Uukuniemi virus
uuccguccaccagc

SEQ ID NO: 251378 - RNA, 23 nt, Uukuniemi virus
aauguaucuuccuuuacuuccau

SEQ ID NO: 251379 - RNA, 16 nt, Uukuniemi virus
uaccccuuucccuuau

SEQ ID NO: 251380 - RNA, 16 nt, Uukuniemi virus
uacuuccaucuuggcg

SEQ ID NO: 251381 - RNA, 14 nt, Uukuniemi virus
gugggcaucgacca

SEQ ID NO: 251382 - RNA, 16 nt, Uukuniemi virus
ucccuagcacucucaa

SEQ ID NO: 251383 - RNA, 17 nt, Uukuniemi virus
ucucaaaggugauccag

SEQ ID NO: 251384 - RNA, 19 nt, Uukuniemi virus
ucucaaaggugauccagug

SEQ ID NO: 251385 - RNA, 16 nt, Uukuniemi virus
ucucuuugaauguauc

SEQ ID NO: 251386 - RNA, 23 nt, Uukuniemi virus
ucuuccuuuacuuccaucuuggc

SEQ ID NO: 251387 - RNA, 14 nt, Uukuniemi virus
auuccaaaacaccu

SEQ ID NO: 251388 - RNA, 15 nt, Uukuniemi virus
auucugcccagugac

SEQ ID NO: 251389 - RNA, 14 nt, Uukuniemi virus
auuuccguccacca

SEQ ID NO: 251390 - RNA, 17 nt, Uukuniemi virus
auuuccguccaccagcu

SEQ ID NO: 251391 - RNA, 21 nt, Uukuniemi virus
caaacaugaaguucaugugcu

SEQ ID NO: 251392 - RNA, 13 nt, Uukuniemi virus
caaacuacaguga

SEQ ID NO: 251393 - RNA, 18 nt, Uukuniemi virus
caaacuacagugauccua

SEQ ID NO: 251394 - RNA, 21 nt, Uukuniemi virus
caaaggugauccagugcuccu

SEQ ID NO: 251395 - RNA, 22 nt, Uukuniemi virus
caaaggugauccagugcuccuc

SEQ ID NO: 251396 - RNA, 19 nt, Uukuniemi virus
cagagcagagucauuggca

SEQ ID NO: 251397 - RNA, 17 nt, Uukuniemi virus
cagauucugcccaguga

SEQ ID NO: 251398 - RNA, 21 nt, Uukuniemi virus
cagcaaaggcauugugcauca

SEQ ID NO: 251399 - RNA, 23 nt, Uukuniemi virus
cagagucauuggcauccaagauc

SEQ ID NO: 251400 - RNA, 17 nt, Uukuniemi virus
caggaaggagcuugcca

SEQ ID NO: 251401 - RNA, 21 nt, Uukuniemi virus
caggaaggagcuugccagacc

SEQ ID NO: 251402 - RNA, 14 nt, Uukuniemi virus
caauugcagugaag

SEQ ID NO: 251403 - RNA, 23 nt, Uukuniemi virus
auccuuggugaauguggugucca

SEQ ID NO: 251404 - RNA, 15 nt, Uukuniemi virus
agcuugccagaccag

SEQ ID NO: 251405 - RNA, 23 nt, Uukuniemi virus
agcagucgcucccuagcacucuc

SEQ ID NO: 251406 - RNA, 21 nt, Uukuniemi virus
agcagguaagcucucuucuga

SEQ ID NO: 251407 - RNA, 16 nt, Uukuniemi virus
agguucauaguugcaa

SEQ ID NO: 251408 - RNA, 14 nt, Uukuniemi virus
aggugauccagugc

SEQ ID NO: 251409 - RNA, 18 nt, Uukuniemi virus
aggugauccagugcuccu

SEQ ID NO: 251410 - RNA, 21 nt, Uukuniemi virus
aggugauccagugcuccucaa

SEQ ID NO: 251411 - RNA, 17 nt, Uukuniemi virus
aguugcaaggugcuugc

SEQ ID NO: 251412 - RNA, 22 nt, Uukuniemi virus
aguugcaaggugcuugcucaau

SEQ ID NO: 251413 - RNA, 17 nt, Uukuniemi virus
acggcuuuauucacuuu

SEQ ID NO: 251414 - RNA, 16 nt, Uukuniemi virus
agaaccuuuucucugc

SEQ ID NO: 251415 - RNA, 14 nt, Uukuniemi virus
agauucugcccagu

SEQ ID NO: 251416 - RNA, 20 nt, Uukuniemi virus
aaaggugauccagugcuccu

SEQ ID NO: 251417 - RNA, 16 nt, Uukuniemi virus
aaauuaaaacucucua

SEQ ID NO: 251418 - RNA, 20 nt, Uukuniemi virus
aacucucuaauuggacucua

SEQ ID NO: 251419 - RNA, 22 nt, Uukuniemi virus
aaggugauccagugcuccucaa

SEQ ID NO: 251420 - RNA, 15 nt, Uukuniemi virus
aaggugcuugcucaa

SEQ ID NO: 251421 - RNA, 23 nt, Uukuniemi virus
aaggugcuugcucaauugcagug

SEQ ID NO: 251422 - RNA, 16 nt, Uukuniemi virus
aaucaaauuccaaaac

SEQ ID NO: 251423 - RNA, 23 nt, Uukuniemi virus
aaucaaauuccaaaacaccucag

SEQ ID NO: 251424 - RNA, 23 nt, Venezuelan equine encephalitis virus
agcagcaauuggcaagcugcuua

SEQ ID NO: 251425 - RNA, 19 nt, Venezuelan equine encephalitis virus
cagcaauuggcaagcugcu

SEQ ID NO: 251426 - RNA, 20 nt, Venezuelan equine encephalitis virus
cgauuggcaugccgcuuuaa

SEQ ID NO: 251427 - RNA, 15 nt, Venezuelan equine encephalitis virus
ugcggcgauuggcau

SEQ ID NO: 251428 - RNA, 17 nt, Venezuelan equine encephalitis virus
ugcggcgauuggcaugc

SEQ ID NO: 251429 - RNA, 12 nt, Venezuelan equine encephalitis virus
ugccgcuuuaaa

SEQ ID NO: 251430 - RNA, 18 nt, Venezuelan equine encephalitis virus
uggcaagcugcuuauaua

SEQ ID NO: 251431 - RNA, 22 nt, Venezuelan equine encephalitis virus
gaacauagcagcaauuggcaag

SEQ ID NO: 251432 - RNA, 15 nt, Venezuelan equine encephalitis virus
gcaugccgcuuuaaa

SEQ ID NO: 251433 - RNA, 22 nt, Venezuelan equine encephalitis virus
ccgaaucggauuuuguuuuuaa

SEQ ID NO: 251434 - RNA, 19 nt, Venezuelan equine encephalitis virus
caagcugcuuauauagaac

SEQ ID NO: 251435 - RNA, 14 nt, Venezuelan equine encephalitis virus
auuggcaagcugcu

SEQ ID NO: 251436 - RNA, 20 nt, Venezuelan equine encephalitis virus
acauagcagcaauuggcaag

SEQ ID NO: 251437 - RNA, 20 nt, Venezuelan equine encephalitis virus
gcagcaauuggcaagcugcu

SEQ ID NO: 251438 - RNA, 15 nt, Venezuelan equine encephalitis virus
ggcaugccgcuuuaa

SEQ ID NO: 251439 - RNA, 14 nt, Venezuelan equine encephalitis virus
caugccgcuuuaaa

SEQ ID NO: 251440 - RNA, 16 nt, Venezuelan equine encephalitis virus
uuauauagaacuugcg

SEQ ID NO: 251441 - RNA, 16 nt, Venezuelan equine encephalitis virus
uagcagcaauuggcaa

SEQ ID NO: 251442 - RNA, 20 nt, Venezuelan equine encephalitis virus
agcaauuggcaagcugcuua

SEQ ID NO: 251443 - RNA, 19 nt, Venezuelan equine encephalitis virus
agcagcaauuggcaagcug

SEQ ID NO: 251444 - RNA, 16 nt, Venezuelan equine encephalitis virus
ugcuuauauagaacuu

SEQ ID NO: 251445 - RNA, 23 nt, Walleye dermal sarcoma virus
ugcagaagauauuaauaaagugu

SEQ ID NO: 251446 - RNA, 18 nt, Walleye dermal sarcoma virus
uggaacaguuggugcuga

SEQ ID NO: 251447 - RNA, 17 nt, Walleye dermal sarcoma virus
uucuucugauacaugcu

SEQ ID NO: 251448 - RNA, 20 nt, Walleye dermal sarcoma virus
uguuaaacuauguuauguaa

SEQ ID NO: 251449 - RNA, 20 nt, Walleye dermal sarcoma virus
uuagauaagugaauuugaau

SEQ ID NO: 251450 - RNA, 15 nt, Walleye dermal sarcoma virus
ucagaauuguacaaa

SEQ ID NO: 251451 - RNA, 22 nt, Walleye dermal sarcoma virus
uaugcauuucuucugauacaug

SEQ ID NO: 251452 - RNA, 23 nt, Walleye dermal sarcoma virus
uauguaaccgguuacugccagac

SEQ ID NO: 251453 - RNA, 13 nt, Walleye dermal sarcoma virus
ucauagugcugcu

SEQ ID NO: 251454 - RNA, 12 nt, Walleye dermal sarcoma virus
ucuucugauaca

SEQ ID NO: 251455 - RNA, 12 nt, Walleye dermal sarcoma virus
ugacucauaugu

SEQ ID NO: 251456 - RNA, 20 nt, Walleye dermal sarcoma virus
uuuuccccaccccuacaugu

SEQ ID NO: 251457 - RNA, 23 nt, Walleye dermal sarcoma virus
acucccucacaguugcuguggug

SEQ ID NO: 251458 - RNA, 22 nt, Walleye dermal sarcoma virus
acacuuaggaaagugcuguaua

SEQ ID NO: 251459 - RNA, 12 nt, Walleye dermal sarcoma virus
auuuuuguuauu

SEQ ID NO: 251460 - RNA, 23 nt, Walleye dermal sarcoma virus
caucuuuguguuguuaguacaaa

SEQ ID NO: 251461 - RNA, 16 nt, Walleye dermal sarcoma virus
caguauuuacuucuga

SEQ ID NO: 251462 - RNA, 16 nt, Walleye dermal sarcoma virus
cauuucuucugauaca

SEQ ID NO: 251463 - RNA, 18 nt, Walleye dermal sarcoma virus
uauacugacucauaugua

SEQ ID NO: 251464 - RNA, 21 nt, Walleye dermal sarcoma virus
uacaugcuuuuucuauguugu

SEQ ID NO: 251465 - RNA, 19 nt, Walleye dermal sarcoma virus
guuggugcugaaugcaugu

SEQ ID NO: 251466 - RNA, 12 nt, Walleye dermal sarcoma virus
guuaguacaaaa

SEQ ID NO: 251467 - RNA, 19 nt, Walleye dermal sarcoma virus
guauacugacucauaugua

SEQ ID NO: 251468 - RNA, 22 nt, Walleye dermal sarcoma virus
gauacaugcuuuuucuauguug

SEQ ID NO: 251469 - RNA, 20 nt, Walleye dermal sarcoma virus
cuuuguguuguuaguacaaa

SEQ ID NO: 251470 - RNA, 21 nt, Walleye dermal sarcoma virus
cuuuguguuguuaguacaaaa

SEQ ID NO: 251471 - RNA, 15 nt, Walleye dermal sarcoma virus
cuuuuucuauguugu

SEQ ID NO: 251472 - RNA, 21 nt, Walleye dermal sarcoma virus
cuguauacugacucauaugua

SEQ ID NO: 251473 - RNA, 22 nt, Walleye dermal sarcoma virus
cuguauacugacucauauguaa

SEQ ID NO: 251474 - RNA, 22 nt, Walleye dermal sarcoma virus
uguuaguaaggugacauaugca

SEQ ID NO: 251475 - RNA, 20 nt, Walleye dermal sarcoma virus
uuaaauuguuaguaagguga

SEQ ID NO: 251476 - RNA, 15 nt, Walleye dermal sarcoma virus
uguguuaaacuaugu

SEQ ID NO: 251477 - RNA, 17 nt, Walleye dermal sarcoma virus
ugccagacgcuguauac

SEQ ID NO: 251478 - RNA, 13 nt, Walleye dermal sarcoma virus
ugauacaugcuuu

SEQ ID NO: 251479 - RNA, 21 nt, Walleye dermal sarcoma virus
ugauacaugcuuuuucuaugu

SEQ ID NO: 251480 - RNA, 21 nt, Walleye dermal sarcoma virus
uuugucauuauauuguugaca

SEQ ID NO: 251481 - RNA, 21 nt, Walleye dermal sarcoma virus
guuauguaaccgguuacugcc

SEQ ID NO: 251482 - RNA, 17 nt, Walleye dermal sarcoma virus
gucauagugcugcugaa

SEQ ID NO: 251483 - RNA, 18 nt, Walleye dermal sarcoma virus
uaacagacaaaugugacu

SEQ ID NO: 251484 - RNA, 23 nt, Walleye dermal sarcoma virus
uccccaccccuacaugucauagu

SEQ ID NO: 251485 - RNA, 22 nt, Walleye dermal sarcoma virus
uacugccagacgcuguauacug

SEQ ID NO: 251486 - RNA, 18 nt, Walleye dermal sarcoma virus
uaugcauuucuucugaua

SEQ ID NO: 251487 - RNA, 19 nt, Walleye dermal sarcoma virus
cauuauauuguugacacuu

SEQ ID NO: 251488 - RNA, 15 nt, Walleye dermal sarcoma virus
cagaauuguacaaau

SEQ ID NO: 251489 - RNA, 15 nt, Walleye dermal sarcoma virus
cagacaaaugugacu

SEQ ID NO: 251490 - RNA, 23 nt, Walleye dermal sarcoma virus
ccuaaaguagaaauaacaacuga

SEQ ID NO: 251491 - RNA, 13 nt, Walleye dermal sarcoma virus
cuaccucaugucc

SEQ ID NO: 251492 - RNA, 18 nt, Walleye dermal sarcoma virus
cuauucuuaaauuguuag

SEQ ID NO: 251493 - RNA, 14 nt, Walleye dermal sarcoma virus
ggccuauaaaaaga

SEQ ID NO: 251494 - RNA, 23 nt, Walleye dermal sarcoma virus
gaaugcauguugccuucaaacag

SEQ ID NO: 251495 - RNA, 14 nt, Walleye dermal sarcoma virus
gaaagugcuguaua

SEQ ID NO: 251496 - RNA, 19 nt, Walleye dermal sarcoma virus
cuuaaauuguuaguaaggu

SEQ ID NO: 251497 - RNA, 15 nt, Walleye dermal sarcoma virus
acaaaucaacacauc

SEQ ID NO: 251498 - RNA, 18 nt, Walleye dermal sarcoma virus
auacugacucauauguaa

SEQ ID NO: 251499 - RNA, 19 nt, Walleye dermal sarcoma virus
auuaaaagaaucuaccuca

SEQ ID NO: 251500 - RNA, 12 nt, Walleye dermal sarcoma virus
auggauauaauu

SEQ ID NO: 251501 - RNA, 23 nt, Walleye dermal sarcoma virus
auguaaccguaaaggccuauaaa

SEQ ID NO: 251502 - RNA, 13 nt, Walleye dermal sarcoma virus
auuguacaaauca

SEQ ID NO: 251503 - RNA, 16 nt, Walleye dermal sarcoma virus
ccagacgcuguauacu

SEQ ID NO: 251504 - RNA, 18 nt, Walleye dermal sarcoma virus
ccagacgcuguauacuga

SEQ ID NO: 251505 - RNA, 14 nt, Walleye dermal sarcoma virus
agaauuguacaaau

SEQ ID NO: 251506 - RNA, 19 nt, Walleye dermal sarcoma virus
acgcuguauacugacucau

SEQ ID NO: 251507 - RNA, 14 nt, Walleye dermal sarcoma virus
gcauggugccagau

SEQ ID NO: 251508 - RNA, 15 nt, Walleye dermal sarcoma virus
gccagacgcuguaua

SEQ ID NO: 251509 - RNA, 21 nt, Walleye dermal sarcoma virus
gacacuuaggaaagugcugua

SEQ ID NO: 251510 - RNA, 14 nt, Walleye dermal sarcoma virus
gacucauauguaac

SEQ ID NO: 251511 - RNA, 15 nt, Walleye dermal sarcoma virus
cuucugauacaugcu

SEQ ID NO: 251512 - RNA, 16 nt, Walleye dermal sarcoma virus
ucaaacaguauuuacu

SEQ ID NO: 251513 - RNA, 20 nt, Walleye dermal sarcoma virus
uauuuuauuauguucuuaua

SEQ ID NO: 251514 - RNA, 16 nt, Walleye dermal sarcoma virus
uaaggugacauaugca

SEQ ID NO: 251515 - RNA, 16 nt, Walleye dermal sarcoma virus
gucauagugcugcuga

SEQ ID NO: 251516 - RNA, 14 nt, Walleye dermal sarcoma virus
ggugacauaugcau

SEQ ID NO: 251517 - RNA, 23 nt, Walleye dermal sarcoma virus
gcuguauacugacucauauguaa

SEQ ID NO: 251518 - RNA, 14 nt, Walleye dermal sarcoma virus
uguauaggccuaaa

SEQ ID NO: 251519 - RNA, 12 nt, Walleye dermal sarcoma virus
uguuaguacaaa

SEQ ID NO: 251520 - RNA, 13 nt, Walleye dermal sarcoma virus
uguuaguacaaaa

SEQ ID NO: 251521 - RNA, 12 nt, Walleye dermal sarcoma virus
uuaggaaagugc

SEQ ID NO: 251522 - RNA, 19 nt, Walleye dermal sarcoma virus
uuaggaaagugcuguauag

SEQ ID NO: 251523 - RNA, 20 nt, Walleye dermal sarcoma virus
uuacugccagacgcuguaua

SEQ ID NO: 251524 - RNA, 13 nt, Walleye dermal sarcoma virus
uuuauuauguucu

SEQ ID NO: 251525 - RNA, 22 nt, Walleye dermal sarcoma virus
uuggugcugaaugcauguugcc

SEQ ID NO: 251526 - RNA, 14 nt, Walleye dermal sarcoma virus
ucgugucugaugca

SEQ ID NO: 251527 - RNA, 19 nt, Walleye dermal sarcoma virus
uccccaccccuacauguca

SEQ ID NO: 251528 - RNA, 17 nt, Walleye dermal sarcoma virus
cccaccccuacauguca

SEQ ID NO: 251529 - RNA, 17 nt, Walleye dermal sarcoma virus
ccaccccuacaugucau

SEQ ID NO: 251530 - RNA, 17 nt, Walleye dermal sarcoma virus
caucuuuguguuguuag

SEQ ID NO: 251531 - RNA, 15 nt, Walleye dermal sarcoma virus
cugacucauauguaa

SEQ ID NO: 251532 - RNA, 16 nt, Walleye dermal sarcoma virus
cugaaugcauguugcc

SEQ ID NO: 251533 - RNA, 21 nt, Walleye dermal sarcoma virus
gcuauucuuaaauuguuagua

SEQ ID NO: 251534 - RNA, 16 nt, Walleye dermal sarcoma virus
aaacuauguuauguaa

SEQ ID NO: 251535 - RNA, 22 nt, Walleye dermal sarcoma virus
ugacacuuaggaaagugcugua

SEQ ID NO: 251536 - RNA, 12 nt, Walleye dermal sarcoma virus
ugacauaugcau

SEQ ID NO: 251537 - RNA, 23 nt, Walleye dermal sarcoma virus
ugaauuaacaugagaaacuaauu

SEQ ID NO: 251538 - RNA, 21 nt, Walleye dermal sarcoma virus
ucugagaauccaugaaaguau

SEQ ID NO: 251539 - RNA, 15 nt, Walleye dermal sarcoma virus
ucccucacaguugcu

SEQ ID NO: 251540 - RNA, 23 nt, Walleye dermal sarcoma virus
uauaauuaaaagaaucuaccuca

SEQ ID NO: 251541 - RNA, 21 nt, Walleye dermal sarcoma virus
guuaguaaggugacauaugca

SEQ ID NO: 251542 - RNA, 14 nt, Walleye dermal sarcoma virus
guuaguacaaaagg

SEQ ID NO: 251543 - RNA, 15 nt, Walleye dermal sarcoma virus
guuguuaguacaaaa

SEQ ID NO: 251544 - RNA, 19 nt, Walleye dermal sarcoma virus
uaguaaggugacauaugca

SEQ ID NO: 251545 - RNA, 22 nt, Walleye dermal sarcoma virus
aauuguuaguaaggugacauau

SEQ ID NO: 251546 - RNA, 21 nt, Walleye dermal sarcoma virus
uuuuucagaauuguacaaauc

SEQ ID NO: 251547 - RNA, 22 nt, Walleye dermal sarcoma virus
uuccuuucuucgaacauggaua

SEQ ID NO: 251548 - RNA, 23 nt, Walleye dermal sarcoma virus
uuaguaaggugacauaugcauuu

SEQ ID NO: 251549 - RNA, 12 nt, Walleye dermal sarcoma virus
uuagauaaguga

SEQ ID NO: 251550 - RNA, 13 nt, Walleye dermal sarcoma virus
uggaaauauaauu

SEQ ID NO: 251551 - RNA, 13 nt, Walleye dermal sarcoma virus
uguauaacagaca

SEQ ID NO: 251552 - RNA, 15 nt, Walleye dermal sarcoma virus
uguaaccguaaaggc

SEQ ID NO: 251553 - RNA, 17 nt, Walleye dermal sarcoma virus
augcauguugccuucaa

SEQ ID NO: 251554 - RNA, 17 nt, Walleye dermal sarcoma virus
acgcugaucccagauca

SEQ ID NO: 251555 - RNA, 15 nt, Walleye dermal sarcoma virus
acaguuggugcugaa

SEQ ID NO: 251556 - RNA, 11 nt, Walleye dermal sarcoma virus
aaacuauguua

SEQ ID NO: 251557 - RNA, 17 nt, Walleye dermal sarcoma virus
aaacuauguuauguaac

SEQ ID NO: 251558 - RNA, 19 nt, Homo sapiens
uguacuuucccuguguacc

SEQ ID NO: 251559 - RNA, 14 nt, Homo sapiens
ugugcagacacuca

SEQ ID NO: 251560 - RNA, 20 nt, Homo sapiens
uggcucagaguccaauguac

SEQ ID NO: 251561 - RNA, 17 nt, Homo sapiens
cugagccgaucuggucu

SEQ ID NO: 251562 - RNA, 18 nt, Homo sapiens
cucacacgcugccuccuc

SEQ ID NO: 251563 - RNA, 23 nt, Homo sapiens
agugcucuuuccaccccaaaggg

SEQ ID NO: 251564 - RNA, 18 nt, Homo sapiens
ugggagguggugucccuu

SEQ ID NO: 251565 - RNA, 22 nt, Homo sapiens
gggcuacgguuccauguucacc

SEQ ID NO: 251566 - RNA, 16 nt, Homo sapiens
cuccauuucugcucag

SEQ ID NO: 251567 - RNA, 15 nt, Homo sapiens
ucugcucugugcacu

SEQ ID NO: 251568 - RNA, 15 nt, Homo sapiens
cuuauuuuaggauua

SEQ ID NO: 251569 - RNA, 13 nt, Homo sapiens
aguggcauggucc

SEQ ID NO: 251570 - RNA, 15 nt, Homo sapiens
ggauguccucacucu

SEQ ID NO: 251571 - RNA, 20 nt, Homo sapiens
cucucuuacugcuucaugua

SEQ ID NO: 251572 - RNA, 12 nt, Homo sapiens
cagucacaugug

SEQ ID NO: 251573 - RNA, 17 nt, Homo sapiens
uucuugcuuugaaugca

SEQ ID NO: 251574 - RNA, 17 nt, Homo sapiens
caauguaccauguugcc

SEQ ID NO: 251575 - RNA, 23 nt, Homo sapiens
guaguugcuuugcggcaucucca

SEQ ID NO: 251576 - RNA, 16 nt, Homo sapiens
aggcagggucucacuc

SEQ ID NO: 251577 - RNA, 17 nt, Homo sapiens
ugucccuuucacacugu

SEQ ID NO: 251578 - RNA, 20 nt, Homo sapiens
ucaagcgauccuccuuccuc

SEQ ID NO: 251579 - RNA, 13 nt, Homo sapiens
ugcagcuccucug

SEQ ID NO: 251580 - RNA, 17 nt, Homo sapiens
cuugaggcagggucuca

SEQ ID NO: 251581 - RNA, 19 nt, Homo sapiens
aaagaucauugcugagaaa

SEQ ID NO: 251582 - RNA, 20 nt, Homo sapiens
cucucauggucaugggucug

SEQ ID NO: 251583 - RNA, 12 nt, Homo sapiens
cuuugugcucug

SEQ ID NO: 251584 - RNA, 14 nt, Homo sapiens
ugagugauccuccc

SEQ ID NO: 251585 - RNA, 21 nt, Homo sapiens
gcuggagugaaguggugugau

SEQ ID NO: 251586 - RNA, 21 nt, Homo sapiens
cuucauguucagucacaugug

SEQ ID NO: 251587 - RNA, 22 nt, Homo sapiens
ucaguuguggccucauucagca

SEQ ID NO: 251588 - RNA, 15 nt, Homo sapiens
ucccaagacugcucc

SEQ ID NO: 251589 - RNA, 17 nt, Homo sapiens
uacauggcuuggcauuu

SEQ ID NO: 251590 - RNA, 18 nt, Homo sapiens
cugacagagccauaugua

SEQ ID NO: 251591 - RNA, 17 nt, Homo sapiens
gaaggagaggauuuggc

SEQ ID NO: 251592 - RNA, 23 nt, Homo sapiens
gucagcacguaguuugcauucca

SEQ ID NO: 251593 - RNA, 19 nt, Homo sapiens
cacaucucuguagauacag

SEQ ID NO: 251594 - RNA, 13 nt, Homo sapiens
cagcuucgucuca

SEQ ID NO: 251595 - RNA, 15 nt, Homo sapiens
gcugcugucuucccc

SEQ ID NO: 251596 - RNA, 17 nt, Homo sapiens
aucuccauuucugcuca

SEQ ID NO: 251597 - RNA, 16 nt, Homo sapiens
uuccccccaucuccau

SEQ ID NO: 251598 - RNA, 17 nt, Homo sapiens
ucuacacucacaaucau

SEQ ID NO: 251599 - RNA, 17 nt, Homo sapiens
ucagcagccucacugca

SEQ ID NO: 251600 - RNA, 19 nt, Homo sapiens
ggcagggucucacucuguu

SEQ ID NO: 251601 - RNA, 23 nt, Homo sapiens
acagaaucuccauuucugcucag

SEQ ID NO: 251602 - RNA, 13 nt, Homo sapiens
aguugucuguccu

SEQ ID NO: 251603 - RNA, 15 nt, Homo sapiens
cauaaucucuuucca

SEQ ID NO: 251604 - RNA, 18 nt, Homo sapiens
uccauguaccuuguguac

SEQ ID NO: 251605 - RNA, 22 nt, Homo sapiens
uagauacaggggcaaaagucau

SEQ ID NO: 251606 - RNA, 18 nt, Homo sapiens
ucucaauaaaccagugaa

SEQ ID NO: 251607 - RNA, 22 nt, Homo sapiens
ucugugcccgagguuccuguca

SEQ ID NO: 251608 - RNA, 17 nt, Homo sapiens
cuccauugcauucaugu

SEQ ID NO: 251609 - RNA, 22 nt, Homo sapiens
auaucacucuuguugugcucuu

SEQ ID NO: 251610 - RNA, 12 nt, Homo sapiens
cagggucucacu

SEQ ID NO: 251611 - RNA, 14 nt, Homo sapiens
ucccagcucacugc

SEQ ID NO: 251612 - RNA, 12 nt, Homo sapiens
uggagagcugcu

SEQ ID NO: 251613 - RNA, 14 nt, Homo sapiens
uaaucucuuuccau

SEQ ID NO: 251614 - RNA, 14 nt, Homo sapiens
gacagggucucacu

SEQ ID NO: 251615 - RNA, 17 nt, Homo sapiens
cugcucacugcucacac

SEQ ID NO: 251616 - RNA, 15 nt, Homo sapiens
agggucucacugugu

SEQ ID NO: 251617 - RNA, 17 nt, Homo sapiens
gccacagcacucggccu

SEQ ID NO: 251618 - RNA, 19 nt, Homo sapiens
uccauugcauucauguacu

SEQ ID NO: 251619 - RNA, 16 nt, Homo sapiens
auccccagcugggaag

SEQ ID NO: 251620 - RNA, 16 nt, Homo sapiens
ugugugguauuuuggc

SEQ ID NO: 251621 - RNA, 13 nt, Homo sapiens
uccacagugauua

SEQ ID NO: 251622 - RNA, 17 nt, Homo sapiens
gaagauuauaaaagcca

SEQ ID NO: 251623 - RNA, 12 nt, Homo sapiens
cgacagucccag

SEQ ID NO: 251624 - RNA, 16 nt, Homo sapiens
cccacugaacaugcuc

SEQ ID NO: 251625 - RNA, 23 nt, Homo sapiens
agcuccucugccuuugugcucug

SEQ ID NO: 251626 - RNA, 14 nt, Homo sapiens
ucugacagagccau

SEQ ID NO: 251627 - RNA, 13 nt, Homo sapiens
agucagcacguag

SEQ ID NO: 251628 - RNA, 23 nt, Homo sapiens
aagaacaugcuauccaaucucau

SEQ ID NO: 251629 - RNA, 17 nt, Homo sapiens
cugcaccggaccauuga

SEQ ID NO: 251630 - RNA, 19 nt, Homo sapiens
cagccucacugcaucuuuc

SEQ ID NO: 251631 - RNA, 13 nt, Homo sapiens
ugcauucauguac

SEQ ID NO: 251632 - RNA, 22 nt, Homo sapiens
agcuccucugccuuugugcucu

SEQ ID NO: 251633 - RNA, 21 nt, Homo sapiens
uccuugucacagaaucuccau

SEQ ID NO: 251634 - RNA, 19 nt, Homo sapiens
cuauguccuggaagugugu

SEQ ID NO: 251635 - RNA, 17 nt, Homo sapiens
ugcagccucgaccuccc

SEQ ID NO: 251636 - RNA, 12 nt, Homo sapiens
cccugcauucac

SEQ ID NO: 251637 - RNA, 22 nt, Homo sapiens
uuccuugcuuaugagaccaaga

SEQ ID NO: 251638 - RNA, 15 nt, Homo sapiens
cagacauucagagau

SEQ ID NO: 251639 - RNA, 20 nt, Homo sapiens
aucuucucccaagacugcuc

SEQ ID NO: 251640 - RNA, 21 nt, Homo sapiens
uuugggucucucauaccucug

SEQ ID NO: 251641 - RNA, 19 nt, Homo sapiens
guggcugaccaggcccugc

SEQ ID NO: 251642 - RNA, 16 nt, Homo sapiens
cuuauccccagcuguu

SEQ ID NO: 251643 - RNA, 22 nt, Homo sapiens
auacgucuugaucagacauuca

SEQ ID NO: 251644 - RNA, 14 nt, Homo sapiens
ggaugcagccuuug

SEQ ID NO: 251645 - RNA, 15 nt, Homo sapiens
cugggauuacaggug

SEQ ID NO: 251646 - RNA, 22 nt, Homo sapiens
cauccacacccucuccuuguca

SEQ ID NO: 251647 - RNA, 21 nt, Homo sapiens
ucuccauugcauucauguacu

SEQ ID NO: 251648 - RNA, 16 nt, Homo sapiens
cagcagccucacugca

SEQ ID NO: 251649 - RNA, 20 nt, Homo sapiens
ugucagucuguccacgugga

SEQ ID NO: 251650 - RNA, 15 nt, Homo sapiens
ucgagugcauuugcu

SEQ ID NO: 251651 - RNA, 13 nt, Homo sapiens
cuccuugucacag

SEQ ID NO: 251652 - RNA, 14 nt, Homo sapiens
ccucacucucgcca

SEQ ID NO: 251653 - RNA, 20 nt, Homo sapiens
cgagcucccagcuccagcuu

SEQ ID NO: 251654 - RNA, 16 nt, Homo sapiens
gcgcaggcugaucacc

SEQ ID NO: 251655 - RNA, 12 nt, Homo sapiens
gaacucuuggcc

SEQ ID NO: 251656 - RNA, 18 nt, Homo sapiens
gucauaaucucuuuccau

SEQ ID NO: 251657 - RNA, 22 nt, Homo sapiens
uuuuguagagacagggucucac

SEQ ID NO: 251658 - RNA, 14 nt, Homo sapiens
accgugaacuggaa

SEQ ID NO: 251659 - RNA, 14 nt, Homo sapiens
auucuucugacaga

SEQ ID NO: 251660 - RNA, 10 nt, Homo sapiens
uccacuguca

SEQ ID NO: 251661 - RNA, 21 nt, Homo sapiens
cugcuguugauuccacugaaa

SEQ ID NO: 251662 - RNA, 14 nt, Homo sapiens
ggcucacaugcucc

SEQ ID NO: 251663 - RNA, 18 nt, Homo sapiens
ucaugggucugcccuuga

SEQ ID NO: 251664 - RNA, 16 nt, Homo sapiens
ucuuuccuauuugcac

SEQ ID NO: 251665 - RNA, 19 nt, Homo sapiens
accugaggcaggagggcau

SEQ ID NO: 251666 - RNA, 22 nt, Homo sapiens
agggucucacuguguugcccag

SEQ ID NO: 251667 - RNA, 13 nt, Homo sapiens
ugaagcugcucac

SEQ ID NO: 251668 - RNA, 18 nt, Homo sapiens
cacuuuuccccaauucau

SEQ ID NO: 251669 - RNA, 18 nt, Homo sapiens
aaaguaggaguggcugac

SEQ ID NO: 251670 - RNA, 23 nt, Homo sapiens
ugacugcugugggcugcucacug

SEQ ID NO: 251671 - RNA, 21 nt, Homo sapiens
gcucugugcacucacgcucag

SEQ ID NO: 251672 - RNA, 19 nt, Homo sapiens
cuucccuuaaaucauggua

SEQ ID NO: 251673 - RNA, 15 nt, Homo sapiens
ugcacacguccaugu

SEQ ID NO: 251674 - RNA, 23 nt, Homo sapiens
cuauccaaucucaucucuuguaa

SEQ ID NO: 251675 - RNA, 19 nt, Homo sapiens
gcacuuuuccccaauucau

SEQ ID NO: 251676 - RNA, 20 nt, Homo sapiens
aggaucuccccgaaucucaa

SEQ ID NO: 251677 - RNA, 19 nt, Homo sapiens
cuacgguuccauguucacc

SEQ ID NO: 251678 - RNA, 18 nt, Homo sapiens
caugaaggagaggauuug

SEQ ID NO: 251679 - RNA, 23 nt, Homo sapiens
auaguugaugagaauccugacca

SEQ ID NO: 251680 - RNA, 15 nt, Homo sapiens
ucauguucagucaca

SEQ ID NO: 251681 - RNA, 16 nt, Homo sapiens
ucuccauuucugcuca

SEQ ID NO: 251682 - RNA, 18 nt, Homo sapiens
guuccauguucaccaaga

SEQ ID NO: 251683 - RNA, 15 nt, Homo sapiens
ugaucccagcucacu

SEQ ID NO: 251684 - RNA, 22 nt, Homo sapiens
acacguccauguuuauccaugu

SEQ ID NO: 251685 - RNA, 20 nt, Homo sapiens
uuccacguaagucacugaaa

SEQ ID NO: 251686 - RNA, 17 nt, Homo sapiens
cuuucucuucccaugca

SEQ ID NO: 251687 - RNA, 13 nt, Homo sapiens
ugcccgagguucc

SEQ ID NO: 251688 - RNA, 15 nt, Homo sapiens
gaagcuguaugccac

SEQ ID NO: 251689 - RNA, 13 nt, Homo sapiens
agauccuguccca

SEQ ID NO: 251690 - RNA, 12 nt, Homo sapiens
acaugugcucuc

SEQ ID NO: 251691 - RNA, 16 nt, Homo sapiens
ugggaagaacaugcua

SEQ ID NO: 251692 - RNA, 22 nt, Homo sapiens
uguccuuuucuuuucuugaggc

SEQ ID NO: 251693 - RNA, 20 nt, Homo sapiens
ucuccacugucauaaucucu

SEQ ID NO: 251694 - RNA, 15 nt, Homo sapiens
ggugucccuuucaca

SEQ ID NO: 251695 - RNA, 16 nt, Homo sapiens
cuugaacucuuggccu

SEQ ID NO: 251696 - RNA, 13 nt, Homo sapiens
ugcucacugcuca

SEQ ID NO: 251697 - RNA, 23 nt, Homo sapiens
ucauuuggccgagucagcacgua

SEQ ID NO: 251698 - RNA, 20 nt, Homo sapiens
uuccuauuugcacacgucca

SEQ ID NO: 251699 - RNA, 14 nt, Homo sapiens
acacggacccugug

SEQ ID NO: 251700 - RNA, 22 nt, Homo sapiens
caugucuuuccuauuugcacac

SEQ ID NO: 251701 - RNA, 14 nt, Homo sapiens
ccacacggucuuca

SEQ ID NO: 251702 - RNA, 17 nt, Homo sapiens
uuccugucaauacaggu

SEQ ID NO: 251703 - RNA, 20 nt, Homo sapiens
cugcugugggcugcucacug

SEQ ID NO: 251704 - RNA, 21 nt, Homo sapiens
uguuggggggccccacggaga

SEQ ID NO: 251705 - RNA, 17 nt, Homo sapiens
ugugagccacagcacuc

SEQ ID NO: 251706 - RNA, 19 nt, Homo sapiens
uucccuguguacccuccau

SEQ ID NO: 251707 - RNA, 20 nt, Homo sapiens
cacugccugcagcugagauu

SEQ ID NO: 251708 - RNA, 21 nt, Homo sapiens
gugcugggauuacagguguga

SEQ ID NO: 251709 - RNA, 18 nt, Homo sapiens
acacccuggaguggcaug

SEQ ID NO: 251710 - RNA, 22 nt, Homo sapiens
aauguggcaguccugugccuca

SEQ ID NO: 251711 - RNA, 13 nt, Homo sapiens
cuuucucacaugu

SEQ ID NO: 251712 - RNA, 17 nt, Homo sapiens
agaagaucaaugaucac

SEQ ID NO: 251713 - RNA, 13 nt, Homo sapiens
cagcacacaugca

SEQ ID NO: 251714 - RNA, 21 nt, Homo sapiens
ugugaagauuauaaaagccaa

SEQ ID NO: 251715 - RNA, 16 nt, Homo sapiens
auuuuaggauuaccca

SEQ ID NO: 251716 - RNA, 18 nt, Homo sapiens
ugucaccaugauucuguc

SEQ ID NO: 251717 - RNA, 11 nt, Homo sapiens
aaguugcccuc

SEQ ID NO: 251718 - RNA, 13 nt, Homo sapiens
ugaacaugcucau

SEQ ID NO: 251719 - RNA, 18 nt, Homo sapiens
uuugaaugcaugugugaa

SEQ ID NO: 251720 - RNA, 22 nt, Homo sapiens
ucuccuuuucuccacugucaua

SEQ ID NO: 251721 - RNA, 12 nt, Homo sapiens
agguuccuguca

SEQ ID NO: 251722 - RNA, 14 nt, Homo sapiens
ggcagggucucacu

SEQ ID NO: 251723 - RNA, 16 nt, Homo sapiens
uguacccuccauguac

SEQ ID NO: 251724 - RNA, 17 nt, Homo sapiens
cauguacuuucccugug

SEQ ID NO: 251725 - RNA, 22 nt, Homo sapiens
ccaucuccauugcauucaugua

SEQ ID NO: 251726 - RNA, 18 nt, Homo sapiens
acaugcuauccaaucuca

SEQ ID NO: 251727 - RNA, 16 nt, Homo sapiens
gucacagaaucuccau

SEQ ID NO: 251728 - RNA, 16 nt, Homo sapiens
gcucccagcuccagcu

SEQ ID NO: 251729 - RNA, 17 nt, Homo sapiens
cuuugccucucuugcca

SEQ ID NO: 251730 - RNA, 21 nt, Homo sapiens
uccacugaaaccucuguucuc

SEQ ID NO: 251731 - RNA, 12 nt, Homo sapiens
uucgucugccag

SEQ ID NO: 251732 - RNA, 14 nt, Homo sapiens
agugcucuuuccac

SEQ ID NO: 251733 - RNA, 17 nt, Homo sapiens
ccugucaccaugauucu

SEQ ID NO: 251734 - RNA, 22 nt, Homo sapiens
uacgucuugaucagacauucag

SEQ ID NO: 251735 - RNA, 16 nt, Homo sapiens
acccucuccuugucac

SEQ ID NO: 251736 - RNA, 13 nt, Homo sapiens
uguguuucuugcu

SEQ ID NO: 251737 - RNA, 16 nt, Homo sapiens
ccugcuggugggcaug

SEQ ID NO: 251738 - RNA, 15 nt, Homo sapiens
uagguuuuucuugcu

SEQ ID NO: 251739 - RNA, 20 nt, Homo sapiens
uacaugaauacgucuugauc

SEQ ID NO: 251740 - RNA, 14 nt, Homo sapiens
cucuguuccugucc

SEQ ID NO: 251741 - RNA, 13 nt, Homo sapiens
ugcaugugugaag

SEQ ID NO: 251742 - RNA, 19 nt, Homo sapiens
cgugugcccacugaacaug

SEQ ID NO: 251743 - RNA, 14 nt, Homo sapiens
cucucuuaaauuca

SEQ ID NO: 251744 - RNA, 17 nt, Homo sapiens
gcaugugcagacacuca

SEQ ID NO: 251745 - RNA, 10 nt, Homo sapiens
aucacuugcc

SEQ ID NO: 251746 - RNA, 18 nt, Homo sapiens
uucccuguguacccucca

SEQ ID NO: 251747 - RNA, 23 nt, Homo sapiens
ugcucucgggugcccugcauuca

SEQ ID NO: 251748 - RNA, 18 nt, Homo sapiens
aacgacagucccaguucc

SEQ ID NO: 251749 - RNA, 15 nt, Homo sapiens
cugucaauacagguu

SEQ ID NO: 251750 - RNA, 14 nt, Homo sapiens
ugcacucacgcuca

SEQ ID NO: 251751 - RNA, 15 nt, Homo sapiens
aacgcccugugucca

SEQ ID NO: 251752 - RNA, 14 nt, Homo sapiens
agggucucacucug

SEQ ID NO: 251753 - RNA, 19 nt, Homo sapiens
ucgccaaggcucacaugcu

SEQ ID NO: 251754 - RNA, 11 nt, Homo sapiens
cgugugcccac

SEQ ID NO: 251755 - RNA, 15 nt, Homo sapiens
ucccuuucacacugu

SEQ ID NO: 251756 - RNA, 18 nt, Homo sapiens
cagccucacugcaucuuu

SEQ ID NO: 251757 - RNA, 13 nt, Homo sapiens
cacugaacaugcu

SEQ ID NO: 251758 - RNA, 14 nt, Homo sapiens
cuuguugugcucuu

SEQ ID NO: 251759 - RNA, 17 nt, Homo sapiens
uuacccacucaucagaa

SEQ ID NO: 251760 - RNA, 22 nt, Homo sapiens
ucagaaaaaaaaaaaaaagccu

SEQ ID NO: 251761 - RNA, 12 nt, Homo sapiens
ccuuuacaugaa

SEQ ID NO: 251762 - RNA, 14 nt, Homo sapiens
ugccucucuugcca

SEQ ID NO: 251763 - RNA, 12 nt, Homo sapiens
cuguccacgugg

SEQ ID NO: 251764 - RNA, 14 nt, Homo sapiens
uugcaguaucagag

SEQ ID NO: 251765 - RNA, 19 nt, Homo sapiens
cugugccucaucacugcuc

SEQ ID NO: 251766 - RNA, 16 nt, Homo sapiens
gcuuaugagaccaaga

SEQ ID NO: 251767 - RNA, 11 nt, Homo sapiens
uuucacaucuc

SEQ ID NO: 251768 - RNA, 23 nt, Homo sapiens
cuccuugccucugcucugugcac

SEQ ID NO: 251769 - RNA, 15 nt, Homo sapiens
gugcugggauuacag

SEQ ID NO: 251770 - RNA, 16 nt, Homo sapiens
cuguuccuguccagca

SEQ ID NO: 251771 - RNA, 17 nt, Homo sapiens
uucuauacuuucucaca

SEQ ID NO: 251772 - RNA, 20 nt, Homo sapiens
cucaucacugcuccugucac

SEQ ID NO: 251773 - RNA, 22 nt, Homo sapiens
cguccauguuuauccauguacu

SEQ ID NO: 251774 - RNA, 17 nt, Homo sapiens
uuguggccucauucagc

SEQ ID NO: 251775 - RNA, 18 nt, Homo sapiens
gaagauuauaaaagccaa

SEQ ID NO: 251776 - RNA, 16 nt, Homo sapiens
cuacccucagucuaca

SEQ ID NO: 251777 - RNA, 19 nt, Homo sapiens
auuuucagugcuuugcccu

SEQ ID NO: 251778 - RNA, 12 nt, Homo sapiens
uccauguucacc

SEQ ID NO: 251779 - RNA, 12 nt, Homo sapiens
acuuucuucccu

SEQ ID NO: 251780 - RNA, 21 nt, Homo sapiens
ucuccaugucuguaguugcuu

SEQ ID NO: 251781 - RNA, 17 nt, Homo sapiens
aagcugcucacugcuca

SEQ ID NO: 251782 - RNA, 17 nt, Homo sapiens
aucacugcuccugucac

SEQ ID NO: 251783 - RNA, 15 nt, Homo sapiens
uagaacaagccagag

SEQ ID NO: 251784 - RNA, 19 nt, Homo sapiens
cugcuuagauuucuagcag

SEQ ID NO: 251785 - RNA, 23 nt, Homo sapiens
auuacaggugugagccacagcac

SEQ ID NO: 251786 - RNA, 16 nt, Homo sapiens
uccugcgugugcccac

SEQ ID NO: 251787 - RNA, 20 nt, Homo sapiens
gggucucacuguguugccca

SEQ ID NO: 251788 - RNA, 13 nt, Homo sapiens
cuauuugcacacg

SEQ ID NO: 251789 - RNA, 16 nt, Homo sapiens
cugcucacugcucaca

SEQ ID NO: 251790 - RNA, 23 nt, Homo sapiens
cgcugugguuucucguacuuuca

SEQ ID NO: 251791 - RNA, 15 nt, Homo sapiens
augucagucugucca

SEQ ID NO: 251792 - RNA, 20 nt, Homo sapiens
acugcaucuuucucuuccca

SEQ ID NO: 251793 - RNA, 15 nt, Homo sapiens
ccauguucaccaaga

SEQ ID NO: 251794 - RNA, 18 nt, Homo sapiens
ucagugcuuugcccuuga

SEQ ID NO: 251795 - RNA, 19 nt, Homo sapiens
ucuucuaguuaccacggca

SEQ ID NO: 251796 - RNA, 14 nt, Homo sapiens
ucuguccuggucag

SEQ ID NO: 251797 - RNA, 17 nt, Homo sapiens
uguaagaggaugugguu

SEQ ID NO: 251798 - RNA, 16 nt, Homo sapiens
ucauguucagucacau

SEQ ID NO: 251799 - RNA, 18 nt, Homo sapiens
aacaagugcucuuuccac

SEQ ID NO: 251800 - RNA, 23 nt, Homo sapiens
ugcuuucuucauguucagucaca

SEQ ID NO: 251801 - RNA, 19 nt, Homo sapiens
cuugaggcagggucucacu

SEQ ID NO: 251802 - RNA, 20 nt, Homo sapiens
acaggcauuuccugcuuauu

SEQ ID NO: 251803 - RNA, 15 nt, Homo sapiens
agccacaggcauuuc

SEQ ID NO: 251804 - RNA, 22 nt, Homo sapiens
cuggagugaaguggugugaucc

SEQ ID NO: 251805 - RNA, 16 nt, Homo sapiens
acucuuguugugcucu

SEQ ID NO: 251806 - RNA, 15 nt, Homo sapiens
ggcugaccaggcccu

SEQ ID NO: 251807 - RNA, 18 nt, Homo sapiens
cccuggcuugagugaucc

SEQ ID NO: 251808 - RNA, 21 nt, Homo sapiens
uguuugguggggccauccaca

SEQ ID NO: 251809 - RNA, 14 nt, Homo sapiens
gcacgguugccuga

SEQ ID NO: 251810 - RNA, 21 nt, Homo sapiens
acgcaccaccgcgccuaccuu

SEQ ID NO: 251811 - RNA, 12 nt, Homo sapiens
ugcucuuuccac

SEQ ID NO: 251812 - RNA, 16 nt, Homo sapiens
agcugggggacacuuu

SEQ ID NO: 251813 - RNA, 16 nt, Homo sapiens
ucuccauugcauucau

SEQ ID NO: 251814 - RNA, 21 nt, Homo sapiens
caggccgcacaucucacuuca

SEQ ID NO: 251815 - RNA, 17 nt, Homo sapiens
acacccuggaguggcau

SEQ ID NO: 251816 - RNA, 18 nt, Homo sapiens
cccugaauuuugcuuccu

SEQ ID NO: 251817 - RNA, 22 nt, Homo sapiens
cugaacugcgccaucaacucca

SEQ ID NO: 251818 - RNA, 14 nt, Homo sapiens
aggcaggagggcau

SEQ ID NO: 251819 - RNA, 12 nt, Homo sapiens
ucccuggcuuga

SEQ ID NO: 251820 - RNA, 18 nt, Homo sapiens
cgccaaggcucacaugcu

SEQ ID NO: 251821 - RNA, 23 nt, Homo sapiens
uuacaugaauacgucuugaucag

SEQ ID NO: 251822 - RNA, 24 nt, Homo sapiens
ugcucucgggugcccugcauucac

SEQ ID NO: 251823 - RNA, 14 nt, Homo sapiens
gccgcacccuggcu

SEQ ID NO: 251824 - RNA, 18 nt, Homo sapiens
gcugaucauugcaguauc

SEQ ID NO: 251825 - RNA, 16 nt, Homo sapiens
ucgccaaggcucacau

SEQ ID NO: 251826 - RNA, 13 nt, Homo sapiens
uuauccauguacu

SEQ ID NO: 251827 - RNA, 17 nt, Homo sapiens
cucagcacacaugcauc

SEQ ID NO: 251828 - RNA, 13 nt, Homo sapiens
cgagugcauuugc

SEQ ID NO: 251829 - RNA, 16 nt, Homo sapiens
cagucuacacucacaa

SEQ ID NO: 251830 - RNA, 20 nt, Homo sapiens
ucuguuacccgcagauccug

SEQ ID NO: 251831 - RNA, 16 nt, Homo sapiens
ugaaguggugugaucc

SEQ ID NO: 251832 - RNA, 16 nt, Homo sapiens
uggcuuggcauuuucu

SEQ ID NO: 251833 - RNA, 12 nt, Homo sapiens
gaaugcaugugu

SEQ ID NO: 251834 - RNA, 20 nt, Homo sapiens
gaccucccuggcuugaguga

SEQ ID NO: 251835 - RNA, 13 nt, Homo sapiens
acuuucacaucuc

SEQ ID NO: 251836 - RNA, 21 nt, Homo sapiens
uggccucauucagcagaauga

SEQ ID NO: 251837 - RNA, 18 nt, Homo sapiens
aucuccauuucugcucag

SEQ ID NO: 251838 - RNA, 20 nt, Homo sapiens
agcacguaguuugcauucca

SEQ ID NO: 251839 - RNA, 12 nt, Homo sapiens
ccuggaguggca

SEQ ID NO: 251840 - RNA, 15 nt, Homo sapiens
ggacacggacccugu

SEQ ID NO: 251841 - RNA, 14 nt, Homo sapiens
caacaagugcucuu

SEQ ID NO: 251842 - RNA, 16 nt, Homo sapiens
gcaacacucacugccu

SEQ ID NO: 251843 - RNA, 19 nt, Homo sapiens
cgccccuggacaggcuucg

SEQ ID NO: 251844 - RNA, 16 nt, Homo sapiens
ccuucuauacuuucuc

SEQ ID NO: 251845 - RNA, 20 nt, Homo sapiens
ugauuagccucgucuuucag

SEQ ID NO: 251846 - RNA, 17 nt, Homo sapiens
cacucuuguugugcucu

SEQ ID NO: 251847 - RNA, 15 nt, Homo sapiens
ucagcacacaugcau

SEQ ID NO: 251848 - RNA, 19 nt, Homo sapiens
uaggcaugugcaauuuguc

SEQ ID NO: 251849 - RNA, 21 nt, Homo sapiens
cucuccuuuucuccacuguca

SEQ ID NO: 251850 - RNA, 14 nt, Homo sapiens
augucagucugucc

SEQ ID NO: 251851 - RNA, 16 nt, Homo sapiens
cugggacucaguucuu

SEQ ID NO: 251852 - RNA, 17 nt, Homo sapiens
acccucuccuugucaca

SEQ ID NO: 251853 - RNA, 18 nt, Homo sapiens
cuugaacucuuggccuca

SEQ ID NO: 251854 - RNA, 12 nt, Homo sapiens
ugcaacacccuc

SEQ ID NO: 251855 - RNA, 20 nt, Homo sapiens
agagcugggacucaguucuu

SEQ ID NO: 251856 - RNA, 23 nt, Homo sapiens
accaagaguguguccacugagaa

SEQ ID NO: 251857 - RNA, 20 nt, Homo sapiens
gcuuccuuugggagcucauu

SEQ ID NO: 251858 - RNA, 22 nt, Homo sapiens
agaaagaggagcgugucucuga

SEQ ID NO: 251859 - RNA, 19 nt, Homo sapiens
auuucacgggcaacacuca

SEQ ID NO: 251860 - RNA, 21 nt, Homo sapiens
ccacacccucuccuugucaca

SEQ ID NO: 251861 - RNA, 15 nt, Homo sapiens
ccagugaacagugug

SEQ ID NO: 251862 - RNA, 12 nt, Homo sapiens
ucuccauuucac

SEQ ID NO: 251863 - RNA, 19 nt, Homo sapiens
ccaucuccauugcauucau

SEQ ID NO: 251864 - RNA, 15 nt, Homo sapiens
ucacagaaucuccau

SEQ ID NO: 251865 - RNA, 13 nt, Homo sapiens
aguaggaguggcu

SEQ ID NO: 251866 - RNA, 15 nt, Homo sapiens
uucuccaugucugua

SEQ ID NO: 251867 - RNA, 22 nt, Homo sapiens
ugaacaugcucauguguacaca

SEQ ID NO: 251868 - RNA, 21 nt, Homo sapiens
uucuauacuuucucacaugug

SEQ ID NO: 251869 - RNA, 17 nt, Homo sapiens
aacaggccgcacaucuc

SEQ ID NO: 251870 - RNA, 18 nt, Homo sapiens
aggugcauuguccuuuuc

SEQ ID NO: 251871 - RNA, 12 nt, Homo sapiens
ccgcacaucuca

SEQ ID NO: 251872 - RNA, 21 nt, Homo sapiens
cugaacgacagucccaguucc

SEQ ID NO: 251873 - RNA, 17 nt, Homo sapiens
agacucuggaacccugg

SEQ ID NO: 251874 - RNA, 22 nt, Homo sapiens
acugaaaacaguaaaacaggcu

SEQ ID NO: 251875 - RNA, 22 nt, Homo sapiens
aggagggcaugugcagacacuc

SEQ ID NO: 251876 - RNA, 15 nt, Homo sapiens
acaagugcucuuucc

SEQ ID NO: 251877 - RNA, 18 nt, Homo sapiens
uggcauuuuggcucagag

SEQ ID NO: 251878 - RNA, 21 nt, Homo sapiens
gugugcccacugaacaugcuc

SEQ ID NO: 251879 - RNA, 13 nt, Homo sapiens
ugcuuagauuucu

SEQ ID NO: 251880 - RNA, 17 nt, Homo sapiens
uggcuaucuacaaugug

SEQ ID NO: 251881 - RNA, 20 nt, Homo sapiens
agaggauuuggcucgcugug

SEQ ID NO: 251882 - RNA, 17 nt, Homo sapiens
accucuguucucaugaa

SEQ ID NO: 251883 - RNA, 18 nt, Homo sapiens
cugcgugugcccacugaa

SEQ ID NO: 251884 - RNA, 14 nt, Homo sapiens
guaccuuguguacu

SEQ ID NO: 251885 - RNA, 14 nt, Homo sapiens
gccuuugugcucug

SEQ ID NO: 251886 - RNA, 21 nt, Homo sapiens
aagaugcgcaggcugaucacc

SEQ ID NO: 251887 - RNA, 12 nt, Homo sapiens
ccuuucugggaa

SEQ ID NO: 251888 - RNA, 18 nt, Homo sapiens
uggggcucgaugguuacc

SEQ ID NO: 251889 - RNA, 17 nt, Homo sapiens
uguaucaccucuucaca

SEQ ID NO: 251890 - RNA, 23 nt, Homo sapiens
agucugggcuacgguuccauguu

SEQ ID NO: 251891 - RNA, 21 nt, Homo sapiens
cacugucauaaucucuuucca

SEQ ID NO: 251892 - RNA, 20 nt, Homo sapiens
cuuuucccguaugcuuucuu

SEQ ID NO: 251893 - RNA, 17 nt, Homo sapiens
cugugugguauuuuggc

SEQ ID NO: 251894 - RNA, 19 nt, Homo sapiens
uccugugccucaucacugc

SEQ ID NO: 251895 - RNA, 12 nt, Homo sapiens
gccucacugcau

SEQ ID NO: 251896 - RNA, 15 nt, Homo sapiens
guccaauguaccaug

SEQ ID NO: 251897 - RNA, 15 nt, Homo sapiens
guugauuccacugaa

SEQ ID NO: 251898 - RNA, 22 nt, Homo sapiens
uaccauguugcccagaauuuca

SEQ ID NO: 251899 - RNA, 13 nt, Homo sapiens
ggcuggcggccau

SEQ ID NO: 251900 - RNA, 20 nt, Homo sapiens
ucacgggcaacacucacugc

SEQ ID NO: 251901 - RNA, 22 nt, Homo sapiens
uuuucgccaaggcucacaugcu

SEQ ID NO: 251902 - RNA, 20 nt, Homo sapiens
ccuuucacacuguggugucu

SEQ ID NO: 251903 - RNA, 21 nt, Homo sapiens
uauuuucagugcuuugcccuu

SEQ ID NO: 251904 - RNA, 18 nt, Homo sapiens
accuuguguacuuucuuc

SEQ ID NO: 251905 - RNA, 23 nt, Homo sapiens
uuucuucauguucagucacaugu

SEQ ID NO: 251906 - RNA, 22 nt, Homo sapiens
uuucacgggcaacacucacugc

SEQ ID NO: 251907 - RNA, 16 nt, Homo sapiens
ugcagccuuugccuuu

SEQ ID NO: 251908 - RNA, 16 nt, Homo sapiens
cuuacugcuucaugua

SEQ ID NO: 251909 - RNA, 18 nt, Homo sapiens
guccacacggucuucaca

SEQ ID NO: 251910 - RNA, 18 nt, Homo sapiens
cauucacagcuacgugug

SEQ ID NO: 251911 - RNA, 17 nt, Homo sapiens
ugcccacugaacaugcu

SEQ ID NO: 251912 - RNA, 23 nt, Homo sapiens
auccacacccucuccuugucaca

SEQ ID NO: 251913 - RNA, 13 nt, Homo sapiens
acaggcauuuccu

SEQ ID NO: 251914 - RNA, 21 nt, Homo sapiens
ccuggcuggaaugggggccag

SEQ ID NO: 251915 - RNA, 22 nt, Homo sapiens
acagguuuuauuuuaucacuug

SEQ ID NO: 251916 - RNA, 21 nt, Homo sapiens
ucugccccagcuggagcauug

SEQ ID NO: 251917 - RNA, 21 nt, Homo sapiens
uucgccaaggcucacaugcuc

SEQ ID NO: 251918 - RNA, 17 nt, Homo sapiens
aaacaggcugcuuagau

SEQ ID NO: 251919 - RNA, 18 nt, Homo sapiens
ucagcagccucacugcau

SEQ ID NO: 251920 - RNA, 17 nt, Homo sapiens
gcaucuuucucuuccca

SEQ ID NO: 251921 - RNA, 14 nt, Homo sapiens
uggcccuguuucuc

SEQ ID NO: 251922 - RNA, 14 nt, Homo sapiens
cuccaugucuguag

SEQ ID NO: 251923 - RNA, 22 nt, Homo sapiens
ugugcucucgggugcccugcau

SEQ ID NO: 251924 - RNA, 17 nt, Homo sapiens
cacccucuccuugucac

SEQ ID NO: 251925 - RNA, 18 nt, Homo sapiens
caauguggcaguccugug

SEQ ID NO: 251926 - RNA, 18 nt, Homo sapiens
ucucauaccucugggaaa

SEQ ID NO: 251927 - RNA, 14 nt, Homo sapiens
cuugaacucuuggc

SEQ ID NO: 251928 - RNA, 14 nt, Homo sapiens
cuacccugcacauu

SEQ ID NO: 251929 - RNA, 19 nt, Homo sapiens
uuccccccaucuccauugc

SEQ ID NO: 251930 - RNA, 18 nt, Homo sapiens
cauaaaauaggugcauug

SEQ ID NO: 251931 - RNA, 19 nt, Homo sapiens
cugggacucaguucuuggc

SEQ ID NO: 251932 - RNA, 15 nt, Homo sapiens
ugaaugcauguguga

SEQ ID NO: 251933 - RNA, 23 nt, Homo sapiens
augugguuauuuucuccaugucu

SEQ ID NO: 251934 - RNA, 14 nt, Homo sapiens
ccuuucgucugcca

SEQ ID NO: 251935 - RNA, 18 nt, Homo sapiens
uguccucacucucgccau

SEQ ID NO: 251936 - RNA, 19 nt, Homo sapiens
ucuccuuuucuccacuguc

SEQ ID NO: 251937 - RNA, 15 nt, Homo sapiens
ugcucacugcucaca

SEQ ID NO: 251938 - RNA, 22 nt, Homo sapiens
auuuucagugcuuugcccuuga

SEQ ID NO: 251939 - RNA, 11 nt, Homo sapiens
cauugcugaga

SEQ ID NO: 251940 - RNA, 18 nt, Homo sapiens
agcacucggccuaaauag

SEQ ID NO: 251941 - RNA, 14 nt, Homo sapiens
guggccucauucag

SEQ ID NO: 251942 - RNA, 13 nt, Homo sapiens
uacaggugugagc

SEQ ID NO: 251943 - RNA, 18 nt, Homo sapiens
acugcagccucgaccucc

SEQ ID NO: 251944 - RNA, 19 nt, Homo sapiens
uuugguggggccauccaca

SEQ ID NO: 251945 - RNA, 15 nt, Homo sapiens
acaggcuucgucuca

SEQ ID NO: 251946 - RNA, 11 nt, Homo sapiens
cucuuuccacc

SEQ ID NO: 251947 - RNA, 16 nt, Homo sapiens
gcccuggccacuggcc

SEQ ID NO: 251948 - RNA, 20 nt, Homo sapiens
gagcauugcagcuccaggaa

SEQ ID NO: 251949 - RNA, 20 nt, Homo sapiens
gaggcgcaggacaccaugaa

SEQ ID NO: 251950 - RNA, 12 nt, Homo sapiens
acccuccaugua

SEQ ID NO: 251951 - RNA, 20 nt, Homo sapiens
acagaaucuccauuucugcu

SEQ ID NO: 251952 - RNA, 23 nt, Homo sapiens
ugccuccucagcagccucacugc

SEQ ID NO: 251953 - RNA, 19 nt, Homo sapiens
ugaaguggugugaucccag

SEQ ID NO: 251954 - RNA, 15 nt, Homo sapiens
ucccagcucacugca

SEQ ID NO: 251955 - RNA, 16 nt, Homo sapiens
uuuuaucacuugccgu

SEQ ID NO: 251956 - RNA, 20 nt, Homo sapiens
cacugaaaccucuguucuca

SEQ ID NO: 251957 - RNA, 15 nt, Homo sapiens
cgcccuguguccaca

SEQ ID NO: 251958 - RNA, 16 nt, Homo sapiens
gagugaagugguguga

SEQ ID NO: 251959 - RNA, 14 nt, Homo sapiens
cucacuggcuuuag

SEQ ID NO: 251960 - RNA, 14 nt, Homo sapiens
aguuguggccucau

SEQ ID NO: 251961 - RNA, 18 nt, Homo sapiens
auuuucagugcuuugccc

SEQ ID NO: 251962 - RNA, 21 nt, Homo sapiens
auguuuauccauguacuuucc

SEQ ID NO: 251963 - RNA, 17 nt, Homo sapiens
caugcucauguguacac

SEQ ID NO: 251964 - RNA, 16 nt, Homo sapiens
ucaagagcccuuccag

SEQ ID NO: 251965 - RNA, 15 nt, Homo sapiens
ugaagcugcucacug

SEQ ID NO: 251966 - RNA, 16 nt, Homo sapiens
ugcccuggccacuggc

SEQ ID NO: 251967 - RNA, 14 nt, Homo sapiens
uuuccccaauucau

SEQ ID NO: 251968 - RNA, 17 nt, Homo sapiens
uuugcacacguccaugu

SEQ ID NO: 251969 - RNA, 14 nt, Homo sapiens
auaaucucuuucca

SEQ ID NO: 251970 - RNA, 19 nt, Homo sapiens
acuugguagaguuccuuuc

SEQ ID NO: 251971 - RNA, 17 nt, Homo sapiens
ucuccugcgugugccca

SEQ ID NO: 251972 - RNA, 22 nt, Homo sapiens
ucuccugcgugugcccacugaa

SEQ ID NO: 251973 - RNA, 12 nt, Homo sapiens
uaccauguugcc

SEQ ID NO: 251974 - RNA, 13 nt, Homo sapiens
uaggcaugugcaa

SEQ ID NO: 251975 - RNA, 16 nt, Homo sapiens
uugagacauuugccaa

SEQ ID NO: 251976 - RNA, 17 nt, Homo sapiens
cagucacaugugcucuc

SEQ ID NO: 251977 - RNA, 16 nt, Homo sapiens
ggucaguuuucacaga

SEQ ID NO: 251978 - RNA, 17 nt, Homo sapiens
gcccaggcuggucuuga

SEQ ID NO: 251979 - RNA, 17 nt, Homo sapiens
cauguugcccagaauuu

SEQ ID NO: 251980 - RNA, 20 nt, Homo sapiens
gucucccaacaagugcucuu

SEQ ID NO: 251981 - RNA, 13 nt, Homo sapiens
ucccaugcaacac

SEQ ID NO: 251982 - RNA, 14 nt, Homo sapiens
gcucacugcucaca

SEQ ID NO: 251983 - RNA, 13 nt, Homo sapiens
ugcugcugggaau

SEQ ID NO: 251984 - RNA, 20 nt, Homo sapiens
ugcaauuugucuagcaugcu

SEQ ID NO: 251985 - RNA, 16 nt, Homo sapiens
acaagugcucuuucca

SEQ ID NO: 251986 - RNA, 21 nt, Homo sapiens
accuuguguacuuucuucccu

SEQ ID NO: 251987 - RNA, 16 nt, Homo sapiens
caugugcagacacuca

SEQ ID NO: 251988 - RNA, 19 nt, Homo sapiens
ccucuggcuccugggccug

SEQ ID NO: 251989 - RNA, 21 nt, Homo sapiens
acccugugugguauuuuggca

SEQ ID NO: 251990 - RNA, 15 nt, Homo sapiens
cugcugcugcugcug

SEQ ID NO: 251991 - RNA, 23 nt, Homo sapiens
cccuuucacacuguggugucucu

SEQ ID NO: 251992 - RNA, 14 nt, Homo sapiens
uguuuauccaugua

SEQ ID NO: 251993 - RNA, 16 nt, Homo sapiens
cucuuguugugcucuu

SEQ ID NO: 251994 - RNA, 21 nt, Homo sapiens
uccucagcagccucacugcau

SEQ ID NO: 251995 - RNA, 18 nt, Homo sapiens
uccauugcauucauguac

SEQ ID NO: 251996 - RNA, 16 nt, Homo sapiens
ggagagaaguugcccu

SEQ ID NO: 251997 - RNA, 22 nt, Homo sapiens
ccuuuacaugaauacgucuuga

SEQ ID NO: 251998 - RNA, 24 nt, Homo sapiens
cuuugaaugcaugugugaagauua

SEQ ID NO: 251999 - RNA, 19 nt, Homo sapiens
cccgagagcugggacucag

SEQ ID NO: 252000 - RNA, 16 nt, Homo sapiens
gcaugcugagucaugu

SEQ ID NO: 252001 - RNA, 11 nt, Homo sapiens
ccgugaacugg

SEQ ID NO: 252002 - RNA, 17 nt, Homo sapiens
aacaugcucauguguac

SEQ ID NO: 252003 - RNA, 15 nt, Homo sapiens
ugcuccuugccucug

SEQ ID NO: 252004 - RNA, 13 nt, Homo sapiens
aaucaucuucucc

SEQ ID NO: 252005 - RNA, 18 nt, Homo sapiens
ugucauaaucucuuucca

SEQ ID NO: 252006 - RNA, 14 nt, Homo sapiens
uaagaggauguggu

SEQ ID NO: 252007 - RNA, 14 nt, Homo sapiens
cuuucacacugugg

SEQ ID NO: 252008 - RNA, 22 nt, Homo sapiens
ccucagcagccucacugcaucu

SEQ ID NO: 252009 - RNA, 16 nt, Homo sapiens
caagugcucuuuccac

SEQ ID NO: 252010 - RNA, 14 nt, Homo sapiens
aggaguugucuguc

SEQ ID NO: 252011 - RNA, 14 nt, Homo sapiens
acaggcuucgucuc

SEQ ID NO: 252012 - RNA, 17 nt, Homo sapiens
uguccucacucucgcca

SEQ ID NO: 252013 - RNA, 23 nt, Homo sapiens
ucucacauguggcucccccugaa

SEQ ID NO: 252014 - RNA, 20 nt, Homo sapiens
ggcugagccgaucuggucuc

SEQ ID NO: 252015 - RNA, 15 nt, Homo sapiens
cucagcacacaugca

SEQ ID NO: 252016 - RNA, 18 nt, Homo sapiens
ucguacuuucacaucucu

SEQ ID NO: 252017 - RNA, 18 nt, Homo sapiens
agagcccuaucuaugucc

SEQ ID NO: 252018 - RNA, 19 nt, Homo sapiens
ucucacucuguugaccagg

SEQ ID NO: 252019 - RNA, 21 nt, Homo sapiens
uuguagagacagggucucacu

SEQ ID NO: 252020 - RNA, 18 nt, Homo sapiens
ccuuugggagcucauucu

SEQ ID NO: 252021 - RNA, 15 nt, Homo sapiens
cagucacaugugcuc

SEQ ID NO: 252022 - RNA, 14 nt, Homo sapiens
agguuuuucuugcu

SEQ ID NO: 252023 - RNA, 17 nt, Homo sapiens
cauggcuuggcauuuuc

SEQ ID NO: 252024 - RNA, 18 nt, Homo sapiens
cauguucagucacaugug

SEQ ID NO: 252025 - RNA, 14 nt, Homo sapiens
guacuuucuucccu

SEQ ID NO: 252026 - RNA, 13 nt, Homo sapiens
cuguccuggucag

SEQ ID NO: 252027 - RNA, 22 nt, Homo sapiens
uauguacccuacccugcacauu

SEQ ID NO: 252028 - RNA, 18 nt, Homo sapiens
ugugguuauuuucuccau

SEQ ID NO: 252029 - RNA, 22 nt, Homo sapiens
cuggaaguguguguuucuugcu

SEQ ID NO: 252030 - RNA, 15 nt, Homo sapiens
agacagggucaucga

SEQ ID NO: 252031 - RNA, 18 nt, Homo sapiens
cuucucccaagacugcuc

SEQ ID NO: 252032 - RNA, 13 nt, Homo sapiens
gugcucuuuccac

SEQ ID NO: 252033 - RNA, 15 nt, Homo sapiens
gcuuugaaugcaugu

SEQ ID NO: 252034 - RNA, 15 nt, Homo sapiens
ccuucuauacuuucu

SEQ ID NO: 252035 - RNA, 15 nt, Homo sapiens
agaugucagucuguc

SEQ ID NO: 252036 - RNA, 21 nt, Homo sapiens
ucagauuccccccaucuccau

SEQ ID NO: 252037 - RNA, 19 nt, Homo sapiens
uauccaaucucaucucuug

SEQ ID NO: 252038 - RNA, 17 nt, Homo sapiens
guuuuauuuuaucacuu

SEQ ID NO: 252039 - RNA, 14 nt, Homo sapiens
agacagggucucac

SEQ ID NO: 252040 - RNA, 17 nt, Homo sapiens
uccagaacgcccugugu

SEQ ID NO: 252041 - RNA, 16 nt, Homo sapiens
cacccucuccuuguca

SEQ ID NO: 252042 - RNA, 17 nt, Homo sapiens
gaguggcugaccaggcc

SEQ ID NO: 252043 - RNA, 19 nt, Homo sapiens
cucaucacugcuccuguca

SEQ ID NO: 252044 - RNA, 15 nt, Homo sapiens
caugcucauguguac

SEQ ID NO: 252045 - RNA, 22 nt, Homo sapiens
cucaugaaggagaggauuuggc

SEQ ID NO: 252046 - RNA, 17 nt, Homo sapiens
caugcugagucaugucu

SEQ ID NO: 252047 - RNA, 12 nt, Homo sapiens
cugcagcuccuc

SEQ ID NO: 252048 - RNA, 13 nt, Homo sapiens
uuuuaucacuugc

SEQ ID NO: 252049 - RNA, 20 nt, Homo sapiens
ucacgcucagcacacaugca

SEQ ID NO: 252050 - RNA, 14 nt, Homo sapiens
uucucguacuuuca

SEQ ID NO: 252051 - RNA, 17 nt, Homo sapiens
aucagacauucagagau

SEQ ID NO: 252052 - RNA, 20 nt, Homo sapiens
uuucgccaaggcucacaugc

SEQ ID NO: 252053 - RNA, 13 nt, Homo sapiens
aucagacauucag

SEQ ID NO: 252054 - RNA, 21 nt, Homo sapiens
auguccucacucucgccaucu

SEQ ID NO: 252055 - RNA, 22 nt, Homo sapiens
cccuggacaggcuucgucucag

SEQ ID NO: 252056 - RNA, 18 nt, Homo sapiens
gcacauuguuaugcacuu

SEQ ID NO: 252057 - RNA, 22 nt, Homo sapiens
gcuccugggccugggcuuuagu

SEQ ID NO: 252058 - RNA, 20 nt, Homo sapiens
agaaucuccauuucugcuca

SEQ ID NO: 252059 - RNA, 15 nt, Homo sapiens
aagugcucuuuccac

SEQ ID NO: 252060 - RNA, 19 nt, Homo sapiens
gaacaggccgcacaucuca

SEQ ID NO: 252061 - RNA, 18 nt, Homo sapiens
aaguguguguuucuugcu

SEQ ID NO: 252062 - RNA, 21 nt, Homo sapiens
uuccuauuugcacacguccau

SEQ ID NO: 252063 - RNA, 23 nt, Homo sapiens
cucuccugcgugugcccacugaa

SEQ ID NO: 252064 - RNA, 17 nt, Homo sapiens
uuucucuucccaugcaa

SEQ ID NO: 252065 - RNA, 19 nt, Homo sapiens
ccacaggcauuuccugcuu

SEQ ID NO: 252066 - RNA, 17 nt, Homo sapiens
gagcugcuuccagugga

SEQ ID NO: 252067 - RNA, 15 nt, Homo sapiens
acucaguucuuggcc

SEQ ID NO: 252068 - RNA, 14 nt, Homo sapiens
cucacucuguugac

SEQ ID NO: 252069 - RNA, 15 nt, Homo sapiens
cucacauguggcucc

SEQ ID NO: 252070 - RNA, 22 nt, Homo sapiens
ugugcucuuauccccagcuguu

SEQ ID NO: 252071 - RNA, 21 nt, Homo sapiens
caggaagcaggggguccccau

SEQ ID NO: 252072 - RNA, 14 nt, Homo sapiens
ucagacauucagag

SEQ ID NO: 252073 - RNA, 17 nt, Homo sapiens
aagaguguguccacuga

SEQ ID NO: 252074 - RNA, 21 nt, Homo sapiens
cauuuggccgagucagcacgu

SEQ ID NO: 252075 - RNA, 23 nt, Homo sapiens
aagugcugggauuacagguguga

SEQ ID NO: 252076 - RNA, 15 nt, Homo sapiens
auuacaggugugagc

SEQ ID NO: 252077 - RNA, 21 nt, Homo sapiens
uccuucuaaagugcugggauu

SEQ ID NO: 252078 - RNA, 14 nt, Homo sapiens
uuccuauuugcaca

SEQ ID NO: 252079 - RNA, 16 nt, Homo sapiens
auccaaucucaucucu

SEQ ID NO: 252080 - RNA, 19 nt, Homo sapiens
uagaguuccuuucugggaa

SEQ ID NO: 252081 - RNA, 20 nt, Homo sapiens
aggcagggucucacucuguu

SEQ ID NO: 252082 - RNA, 15 nt, Homo sapiens
agucacaugugcucu

SEQ ID NO: 252083 - RNA, 16 nt, Homo sapiens
accuuguguacuuucu

SEQ ID NO: 252084 - RNA, 19 nt, Homo sapiens
cauguucaccaagauuugg

SEQ ID NO: 252085 - RNA, 13 nt, Homo sapiens
gccucucuugcca

SEQ ID NO: 252086 - RNA, 13 nt, Homo sapiens
agccacagcacuc

SEQ ID NO: 252087 - RNA, 17 nt, Homo sapiens
aagaucucggugcugaa

SEQ ID NO: 252088 - RNA, 15 nt, Homo sapiens
auugcauucauguac

SEQ ID NO: 252089 - RNA, 18 nt, Homo sapiens
cuuuuccccaauucaugu

SEQ ID NO: 252090 - RNA, 21 nt, Homo sapiens
ggucucccaacaagugcucuu

SEQ ID NO: 252091 - RNA, 18 nt, Homo sapiens
ucacucuuguugugcucu

SEQ ID NO: 252092 - RNA, 19 nt, Homo sapiens
cucugcaccggaccauuga

SEQ ID NO: 252093 - RNA, 23 nt, Homo sapiens
ccucagucuacacucacaaucau

SEQ ID NO: 252094 - RNA, 17 nt, Homo sapiens
gguuacaaggggcugcu

SEQ ID NO: 252095 - RNA, 22 nt, Homo sapiens
cuuuuggggaggaguugucugu

SEQ ID NO: 252096 - RNA, 19 nt, Homo sapiens
ccuucuauacuuucucaca

SEQ ID NO: 252097 - RNA, 13 nt, Homo sapiens
uccauugcauuca

SEQ ID NO: 252098 - RNA, 21 nt, Homo sapiens
uccccauccccagcugggaag

SEQ ID NO: 252099 - RNA, 18 nt, Homo sapiens
ucaacuccagucucggca

SEQ ID NO: 252100 - RNA, 22 nt, Homo sapiens
ugcaucuuucucuucccaugca

SEQ ID NO: 252101 - RNA, 15 nt, Homo sapiens
ugucauaaucucuuu

SEQ ID NO: 252102 - RNA, 18 nt, Homo sapiens
aucagacauucagagauu

SEQ ID NO: 252103 - RNA, 15 nt, Homo sapiens
gcuauccaaucucau

SEQ ID NO: 252104 - RNA, 18 nt, Homo sapiens
auguaccauguugcccag

SEQ ID NO: 252105 - RNA, 15 nt, Homo sapiens
ugguauucuucugac

SEQ ID NO: 252106 - RNA, 15 nt, Homo sapiens
cuggucaguuuucac

SEQ ID NO: 252107 - RNA, 20 nt, Homo sapiens
cauuucacgggcaacacuca

SEQ ID NO: 252108 - RNA, 19 nt, Homo sapiens
cugccugcagcugagauuc

SEQ ID NO: 252109 - RNA, 20 nt, Homo sapiens
cuggagugaaguggugugau

SEQ ID NO: 252110 - RNA, 13 nt, Homo sapiens
aucacugcuccug

SEQ ID NO: 252111 - RNA, 20 nt, Homo sapiens
gcuuagauuucuagcaguau

SEQ ID NO: 252112 - RNA, 20 nt, Homo sapiens
uggagaaggagaaccgugaa

SEQ ID NO: 252113 - RNA, 19 nt, Homo sapiens
ucaguuguggccucauuca

SEQ ID NO: 252114 - RNA, 17 nt, Homo sapiens
ugccucaucacugcucc

SEQ ID NO: 252115 - RNA, 17 nt, Homo sapiens
caggaugcagccuuugc

SEQ ID NO: 252116 - RNA, 15 nt, Homo sapiens
cucucgggugcccug

SEQ ID NO: 252117 - RNA, 21 nt, Homo sapiens
uccauguaccuuguguacuuu

SEQ ID NO: 252118 - RNA, 18 nt, Homo sapiens
uggacaggcuucgucuca

SEQ ID NO: 252119 - RNA, 20 nt, Homo sapiens
aaucuccauuucugcucaga

SEQ ID NO: 252120 - RNA, 16 nt, Homo sapiens
cacugaacaugcucau

SEQ ID NO: 252121 - RNA, 13 nt, Homo sapiens
ucaccucuucaca

SEQ ID NO: 252122 - RNA, 19 nt, Homo sapiens
uuuucgccaaggcucacau

SEQ ID NO: 252123 - RNA, 20 nt, Homo sapiens
uuccccccaucuccauugca

SEQ ID NO: 252124 - RNA, 16 nt, Homo sapiens
cucugcucugugcacu

SEQ ID NO: 252125 - RNA, 14 nt, Homo sapiens
ugcucacugcucac

SEQ ID NO: 252126 - RNA, 18 nt, Homo sapiens
cugcagcugagauuccag

SEQ ID NO: 252127 - RNA, 16 nt, Homo sapiens
ccuccuauaucacucu

SEQ ID NO: 252128 - RNA, 22 nt, Homo sapiens
acagaaucuccauuucugcuca

SEQ ID NO: 252129 - RNA, 18 nt, Homo sapiens
ccugaguagcugggacua

SEQ ID NO: 252130 - RNA, 20 nt, Homo sapiens
ccuccugaguagcugggacu

SEQ ID NO: 252131 - RNA, 18 nt, Homo sapiens
auuuucuccaugucugua

SEQ ID NO: 252132 - RNA, 18 nt, Homo sapiens
gggacucaguucuuggcc

SEQ ID NO: 252133 - RNA, 20 nt, Homo sapiens
gaccauugagacauuugcca

SEQ ID NO: 252134 - RNA, 15 nt, Homo sapiens
uccccagcugggaag

SEQ ID NO: 252135 - RNA, 18 nt, Homo sapiens
cacucuuguugugcucuu

SEQ ID NO: 252136 - RNA, 21 nt, Homo sapiens
cugugguuucucguacuuuca

SEQ ID NO: 252137 - RNA, 19 nt, Homo sapiens
guuccugucaauacagguu

SEQ ID NO: 252138 - RNA, 12 nt, Homo sapiens
aggcaugugcaa

SEQ ID NO: 252139 - RNA, 15 nt, Homo sapiens
agacagggucucacu

SEQ ID NO: 252140 - RNA, 22 nt, Homo sapiens
cuccuugucacagaaucuccau

SEQ ID NO: 252141 - RNA, 19 nt, Homo sapiens
ugcucauguguacacacgc

SEQ ID NO: 252142 - RNA, 15 nt, Homo sapiens
uguugauuccacuga

SEQ ID NO: 252143 - RNA, 17 nt, Homo sapiens
acaaucaucuucuccca

SEQ ID NO: 252144 - RNA, 18 nt, Homo sapiens
cauuguuaugcacuuuuc

SEQ ID NO: 252145 - RNA, 22 nt, Homo sapiens
gaaaaaaaaaaaaaagccuuug

SEQ ID NO: 252146 - RNA, 16 nt, Homo sapiens
agcugcugucuucccc

SEQ ID NO: 252147 - RNA, 19 nt, Homo sapiens
uauccauguacuuucccug

SEQ ID NO: 252148 - RNA, 15 nt, Homo sapiens
uguaccuuguguacu

SEQ ID NO: 252149 - RNA, 19 nt, Homo sapiens
ccugaggcaggagggcaug

SEQ ID NO: 252150 - RNA, 19 nt, Homo sapiens
uucuagcaguaugugugcu

SEQ ID NO: 252151 - RNA, 20 nt, Homo sapiens
cuugaagcugcucacugcuc

SEQ ID NO: 252152 - RNA, 17 nt, Homo sapiens
gcagauccugucccaug

SEQ ID NO: 252153 - RNA, 20 nt, Homo sapiens
ggguccacacggucuucaca

SEQ ID NO: 252154 - RNA, 14 nt, Homo sapiens
aaguaggaguggcu

SEQ ID NO: 252155 - RNA, 17 nt, Homo sapiens
aguaugugugcucuuau

SEQ ID NO: 252156 - RNA, 21 nt, Homo sapiens
ucuuggccucaagcgauccuc

SEQ ID NO: 252157 - RNA, 17 nt, Homo sapiens
gccaaggcucacaugcu

SEQ ID NO: 252158 - RNA, 16 nt, Homo sapiens
ucccaacaagugcucu

SEQ ID NO: 252159 - RNA, 21 nt, Homo sapiens
uucugggcugauuugggucuc

SEQ ID NO: 252160 - RNA, 16 nt, Homo sapiens
ucagagauuagucuua

SEQ ID NO: 252161 - RNA, 18 nt, Homo sapiens
ucuuucucuucccaugca

SEQ ID NO: 252162 - RNA, 18 nt, Homo sapiens
ucuccuuuucuccacugu

SEQ ID NO: 252163 - RNA, 22 nt, Homo sapiens
cuugccucugcucugugcacuc

SEQ ID NO: 252164 - RNA, 18 nt, Homo sapiens
uccacguaagucacugaa

SEQ ID NO: 252165 - RNA, 20 nt, Homo sapiens
aggcuggucuugaacucuug

SEQ ID NO: 252166 - RNA, 15 nt, Homo sapiens
ucuugaacucuuggc

SEQ ID NO: 252167 - RNA, 16 nt, Homo sapiens
uuuuguaucaccucuu

SEQ ID NO: 252168 - RNA, 17 nt, Homo sapiens
uuucucucuuacugcuu

SEQ ID NO: 252169 - RNA, 21 nt, Homo sapiens
ugacugcugugggcugcucac

SEQ ID NO: 252170 - RNA, 22 nt, Homo sapiens
caauuugucuagcaugcugagu

SEQ ID NO: 252171 - RNA, 15 nt, Homo sapiens
ugagccacagcacuc

SEQ ID NO: 252172 - RNA, 15 nt, Homo sapiens
ucagaaggcucuauc

SEQ ID NO: 252173 - RNA, 22 nt, Homo sapiens
gcugaacaggccgcacaucuca

SEQ ID NO: 252174 - RNA, 12 nt, Homo sapiens
gcauugcagcuc

SEQ ID NO: 252175 - RNA, 18 nt, Homo sapiens
auggucaugggucugccc

SEQ ID NO: 252176 - RNA, 22 nt, Homo sapiens
cccaacaagugcucuuuccacc

SEQ ID NO: 252177 - RNA, 17 nt, Homo sapiens
cucuccuugucacagaa

SEQ ID NO: 252178 - RNA, 18 nt, Homo sapiens
uguguacccuccauguac

SEQ ID NO: 252179 - RNA, 23 nt, Homo sapiens
uacccuccauguaccuuguguac

SEQ ID NO: 252180 - RNA, 17 nt, Homo sapiens
cucgcugugguuucucg

SEQ ID NO: 252181 - RNA, 14 nt, Homo sapiens
cugccuuugugcuc

SEQ ID NO: 252182 - RNA, 11 nt, Homo sapiens
ggaguggcaug

SEQ ID NO: 252183 - RNA, 14 nt, Homo sapiens
ucagucuacacuca

SEQ ID NO: 252184 - RNA, 13 nt, Homo sapiens
ugcagacacucaa

SEQ ID NO: 252185 - RNA, 21 nt, Homo sapiens
auuccagcgucugcuguugau

SEQ ID NO: 252186 - RNA, 14 nt, Homo sapiens
ccauccucuguuac

SEQ ID NO: 252187 - RNA, 22 nt, Homo sapiens
ugguccugugccccgaccccac

SEQ ID NO: 252188 - RNA, 13 nt, Homo sapiens
aacacucacugcc

SEQ ID NO: 252189 - RNA, 20 nt, Homo sapiens
gacaggcuucgucucagaag

SEQ ID NO: 252190 - RNA, 21 nt, Homo sapiens
aggcugcuuagauuucuagca

SEQ ID NO: 252191 - RNA, 21 nt, Homo sapiens
guccacugagaagaucaauga

SEQ ID NO: 252192 - RNA, 19 nt, Homo sapiens
aaggagaggauuuggcucg

SEQ ID NO: 252193 - RNA, 12 nt, Homo sapiens
uggaguggcaug

SEQ ID NO: 252194 - RNA, 16 nt, Homo sapiens
cuggaaugggggccag

SEQ ID NO: 252195 - RNA, 14 nt, Homo sapiens
aaaccucuguucuc

SEQ ID NO: 252196 - RNA, 20 nt, Homo sapiens
ugaacaugcucauguguaca

SEQ ID NO: 252197 - RNA, 21 nt, Homo sapiens
cucacgcucagcacacaugca

SEQ ID NO: 252198 - RNA, 18 nt, Homo sapiens
ugaauacgucuugaucag

SEQ ID NO: 252199 - RNA, 14 nt, Homo sapiens
acagggucucacug

SEQ ID NO: 252200 - RNA, 14 nt, Homo sapiens
cauaaucucuuucc

SEQ ID NO: 252201 - RNA, 22 nt, Homo sapiens
guagauacaggggcaaaaguca

SEQ ID NO: 252202 - RNA, 11 nt, Homo sapiens
guugugcucuu

SEQ ID NO: 252203 - RNA, 14 nt, Homo sapiens
cacguuaguaauac

SEQ ID NO: 252204 - RNA, 18 nt, Homo sapiens
agcugcucacugcucaca

SEQ ID NO: 252205 - RNA, 20 nt, Homo sapiens
ccaaaggaaggcacccuuga

SEQ ID NO: 252206 - RNA, 17 nt, Homo sapiens
cugagccacaggcauuu

SEQ ID NO: 252207 - RNA, 15 nt, Homo sapiens
agucuuagguuucca

SEQ ID NO: 252208 - RNA, 21 nt, Homo sapiens
guacccuccauguaccuugug

SEQ ID NO: 252209 - RNA, 17 nt, Homo sapiens
ggcaggagggcaugugc

SEQ ID NO: 252210 - RNA, 17 nt, Homo sapiens
aguuaggcugagccaca

SEQ ID NO: 252211 - RNA, 23 nt, Homo sapiens
uucgccaaggcucacaugcuccu

SEQ ID NO: 252212 - RNA, 22 nt, Homo sapiens
caugcuccuugccucugcucug

SEQ ID NO: 252213 - RNA, 22 nt, Homo sapiens
cuucaguuguggccucauucag

SEQ ID NO: 252214 - RNA, 14 nt, Homo sapiens
aggaggccaugccc

SEQ ID NO: 252215 - RNA, 20 nt, Homo sapiens
gcuacgguuccauguucacc

SEQ ID NO: 252216 - RNA, 17 nt, Homo sapiens
uggagcauugcagcucc

SEQ ID NO: 252217 - RNA, 16 nt, Homo sapiens
acuuucucacaugugg

SEQ ID NO: 252218 - RNA, 13 nt, Homo sapiens
gcucuaucugcug

SEQ ID NO: 252219 - RNA, 16 nt, Homo sapiens
uggggaggaguugucu

SEQ ID NO: 252220 - RNA, 23 nt, Homo sapiens
acugccugcagcugagauuccag

SEQ ID NO: 252221 - RNA, 21 nt, Homo sapiens
gcaguaucagaggguggagau

SEQ ID NO: 252222 - RNA, 22 nt, Homo sapiens
gugguuauuuucuccaugucug

SEQ ID NO: 252223 - RNA, 18 nt, Homo sapiens
aaggcucacaugcuccuu

SEQ ID NO: 252224 - RNA, 12 nt, Homo sapiens
aacaagugcucu

SEQ ID NO: 252225 - RNA, 18 nt, Homo sapiens
cuggaagcuguaugccac

SEQ ID NO: 252226 - RNA, 13 nt, Homo sapiens
guuugcauuccag

SEQ ID NO: 252227 - RNA, 18 nt, Homo sapiens
ucccuuaaaucaugguau

SEQ ID NO: 252228 - RNA, 19 nt, Homo sapiens
agagcugggacucaguucu

SEQ ID NO: 252229 - RNA, 17 nt, Homo sapiens
aauagguuuuucuugcu

SEQ ID NO: 252230 - RNA, 19 nt, Homo sapiens
acucaagagcccuuccagg

SEQ ID NO: 252231 - RNA, 15 nt, Homo sapiens
cauugagacauuugc

SEQ ID NO: 252232 - RNA, 16 nt, Homo sapiens
ccacacggucuucaca

SEQ ID NO: 252233 - RNA, 18 nt, Homo sapiens
caugcuauccaaucucau

SEQ ID NO: 252234 - RNA, 14 nt, Homo sapiens
cacacguccauguu

SEQ ID NO: 252235 - RNA, 23 nt, Homo sapiens
gaaacagaccuuuuucucucuua

SEQ ID NO: 252236 - RNA, 20 nt, Homo sapiens
auuucacgggcaacacucac

SEQ ID NO: 252237 - RNA, 15 nt, Homo sapiens
cugaaaacaguaaaa

SEQ ID NO: 252238 - RNA, 20 nt, Homo sapiens
ugcuuugaaugcauguguga

SEQ ID NO: 252239 - RNA, 17 nt, Homo sapiens
cuguguacccuccaugu

SEQ ID NO: 252240 - RNA, 19 nt, Homo sapiens
auuugucuagcaugcugag

SEQ ID NO: 252241 - RNA, 22 nt, Homo sapiens
uagcaguaugugugcucuuauc

SEQ ID NO: 252242 - RNA, 20 nt, Homo sapiens
uucgcuggcugaucauugca

SEQ ID NO: 252243 - RNA, 12 nt, Homo sapiens
agugauccuccc

SEQ ID NO: 252244 - RNA, 21 nt, Homo sapiens
ccccaucuccauugcauucau

SEQ ID NO: 252245 - RNA, 19 nt, Homo sapiens
gccugcuagcggcugaaca

SEQ ID NO: 252246 - RNA, 19 nt, Homo sapiens
cuuuagcugcugucuuccc

SEQ ID NO: 252247 - RNA, 12 nt, Homo sapiens
uuucacacugug

SEQ ID NO: 252248 - RNA, 20 nt, Homo sapiens
ucgggugcccugcauucaca

SEQ ID NO: 252249 - RNA, 21 nt, Homo sapiens
uucuccaugucuguaguugcu

SEQ ID NO: 252250 - RNA, 16 nt, Homo sapiens
ucacugaaaacaguaa

SEQ ID NO: 252251 - RNA, 21 nt, Homo sapiens
cgcccuguguccacagugauu

SEQ ID NO: 252252 - RNA, 18 nt, Homo sapiens
cacccucuccuugucaca

SEQ ID NO: 252253 - RNA, 23 nt, Homo sapiens
cccuucuauacuuucucacaugu

SEQ ID NO: 252254 - RNA, 15 nt, Homo sapiens
aagcuguaugccaca

SEQ ID NO: 252255 - RNA, 21 nt, Homo sapiens
ugcuauccaaucucaucucuu

SEQ ID NO: 252256 - RNA, 16 nt, Homo sapiens
cuugaucagacauuca

SEQ ID NO: 252257 - RNA, 22 nt, Homo sapiens
aguccugugccucaucacugcu

SEQ ID NO: 252258 - RNA, 18 nt, Homo sapiens
guuuccuuucgucugcca

SEQ ID NO: 252259 - RNA, 20 nt, Homo sapiens
ugaacaggccgcacaucuca

SEQ ID NO: 252260 - RNA, 17 nt, Homo sapiens
uuuccuuucgucugcca

SEQ ID NO: 252261 - RNA, 16 nt, Homo sapiens
cauuguuaugcacuuu

SEQ ID NO: 252262 - RNA, 18 nt, Homo sapiens
ccucugcucugugcacuc

SEQ ID NO: 252263 - RNA, 19 nt, Homo sapiens
cuggaaaagaucauugcug

SEQ ID NO: 252264 - RNA, 17 nt, Homo sapiens
caggccgcacaucucac

SEQ ID NO: 252265 - RNA, 15 nt, Homo sapiens
agguuuccacguaag

SEQ ID NO: 252266 - RNA, 14 nt, Homo sapiens
gcugcuuagauuuc

SEQ ID NO: 252267 - RNA, 15 nt, Homo sapiens
gcagcugagauucca

SEQ ID NO: 252268 - RNA, 17 nt, Homo sapiens
gggcaacacucacugcc

SEQ ID NO: 252269 - RNA, 19 nt, Homo sapiens
cauguucagucacaugugc

SEQ ID NO: 252270 - RNA, 15 nt, Homo sapiens
auccauguacuuucc

SEQ ID NO: 252271 - RNA, 19 nt, Homo sapiens
ggacaggcuucgucucaga

SEQ ID NO: 252272 - RNA, 18 nt, Homo sapiens
uaccuuguguacuuucuu

SEQ ID NO: 252273 - RNA, 16 nt, Homo sapiens
ucugccuuugugcucu

SEQ ID NO: 252274 - RNA, 20 nt, Homo sapiens
gaaucuccauuucugcucag

SEQ ID NO: 252275 - RNA, 22 nt, Homo sapiens
uuuucuugaggcagggucucac

SEQ ID NO: 252276 - RNA, 14 nt, Homo sapiens
cccucuccuuguca

SEQ ID NO: 252277 - RNA, 21 nt, Homo sapiens
ccucagcagccucacugcauc

SEQ ID NO: 252278 - RNA, 22 nt, Homo sapiens
ugcccuucuauacuuucucaca

SEQ ID NO: 252279 - RNA, 18 nt, Homo sapiens
cuggcuugagugauccuc

SEQ ID NO: 252280 - RNA, 20 nt, Homo sapiens
caugucuuuccuauuugcac

SEQ ID NO: 252281 - RNA, 21 nt, Homo sapiens
agaggguggagaugucagucu

SEQ ID NO: 252282 - RNA, 15 nt, Homo sapiens
gaucucggugcugaa

SEQ ID NO: 252283 - RNA, 15 nt, Homo sapiens
acugaacaugcucau

SEQ ID NO: 252284 - RNA, 13 nt, Homo sapiens
gauuuggggagaa

SEQ ID NO: 252285 - RNA, 21 nt, Homo sapiens
acguggagagaaguugcccuc

SEQ ID NO: 252286 - RNA, 16 nt, Homo sapiens
caucuccauugcauuc

SEQ ID NO: 252287 - RNA, 20 nt, Homo sapiens
aaaucaugguauucuucuga

SEQ ID NO: 252288 - RNA, 15 nt, Homo sapiens
auuuucuccaugucu

SEQ ID NO: 252289 - RNA, 20 nt, Homo sapiens
ccauguugcccagaauuuca

SEQ ID NO: 252290 - RNA, 18 nt, Homo sapiens
augcaacacccucuucua

SEQ ID NO: 252291 - RNA, 14 nt, Homo sapiens
cccucucaugguca

SEQ ID NO: 252292 - RNA, 15 nt, Homo sapiens
cuauacuuucucaca

SEQ ID NO: 252293 - RNA, 16 nt, Homo sapiens
ugcagcugagauucca

SEQ ID NO: 252294 - RNA, 24 nt, Homo sapiens
ugcacucacgcucagcacacaugc

SEQ ID NO: 252295 - RNA, 14 nt, Homo sapiens
uuagauuucuagca

SEQ ID NO: 252296 - RNA, 19 nt, Homo sapiens
acugaaaccucuguucuca

SEQ ID NO: 252297 - RNA, 23 nt, Homo sapiens
cagaaaaaaaaaaaaaagccuuu

SEQ ID NO: 252298 - RNA, 18 nt, Homo sapiens
cugcuccugucaccauga

SEQ ID NO: 252299 - RNA, 20 nt, Homo sapiens
ggacucaguucuuggccugc

SEQ ID NO: 252300 - RNA, 19 nt, Homo sapiens
gaggcacgcaccaccgcgc

SEQ ID NO: 252301 - RNA, 22 nt, Homo sapiens
uccacacccucuccuugucaca

SEQ ID NO: 252302 - RNA, 21 nt, Homo sapiens
accuggcuugaagcugcucac

SEQ ID NO: 252303 - RNA, 19 nt, Homo sapiens
uccauguuuauccauguac

SEQ ID NO: 252304 - RNA, 16 nt, Homo sapiens
ugaaaccucuguucuc

SEQ ID NO: 252305 - RNA, 14 nt, Homo sapiens
cuuucucacaugug

SEQ ID NO: 252306 - RNA, 23 nt, Homo sapiens
ucugggcuacgguuccauguuca

SEQ ID NO: 252307 - RNA, 20 nt, Homo sapiens
uccacguaagucacugaaaa

SEQ ID NO: 252308 - RNA, 17 nt, Homo sapiens
aguuccuuucugggaag

SEQ ID NO: 252309 - RNA, 18 nt, Homo sapiens
ccacuggcccuguuucuc

SEQ ID NO: 252310 - RNA, 15 nt, Homo sapiens
ccaggcuggagugaa

SEQ ID NO: 252311 - RNA, 15 nt, Homo sapiens
ccuuguguacuuucu

SEQ ID NO: 252312 - RNA, 22 nt, Homo sapiens
agaggguggagaugucagucug

SEQ ID NO: 252313 - RNA, 14 nt, Homo sapiens
ucauugcugacaga

SEQ ID NO: 252314 - RNA, 18 nt, Homo sapiens
cugggauuacagguguga

SEQ ID NO: 252315 - RNA, 14 nt, Homo sapiens
uugggucucucaua

SEQ ID NO: 252316 - RNA, 16 nt, Homo sapiens
ucccagcucacugcag

SEQ ID NO: 252317 - RNA, 15 nt, Homo sapiens
gucacaugugcucuc

SEQ ID NO: 252318 - RNA, 14 nt, Homo sapiens
uagaacaagccaga

SEQ ID NO: 252319 - RNA, 23 nt, Homo sapiens
auuuuaucacuugccgugucauc

SEQ ID NO: 252320 - RNA, 16 nt, Homo sapiens
cucccaagacugcucc

SEQ ID NO: 252321 - RNA, 15 nt, Homo sapiens
cucccagcuccagcu

SEQ ID NO: 252322 - RNA, 15 nt, Homo sapiens
agaaccgugaacugg

SEQ ID NO: 252323 - RNA, 19 nt, Homo sapiens
cucuuguaaauacaugucc

SEQ ID NO: 252324 - RNA, 20 nt, Homo sapiens
cuccucugccuuugugcucu

SEQ ID NO: 252325 - RNA, 17 nt, Homo sapiens
caaggcucacaugcucc

SEQ ID NO: 252326 - RNA, 19 nt, Homo sapiens
ucacaaucaucuucuccca

SEQ ID NO: 252327 - RNA, 14 nt, Homo sapiens
gacaggaggccaug

SEQ ID NO: 252328 - RNA, 23 nt, Homo sapiens
cuugaucagacauucagagauua

SEQ ID NO: 252329 - RNA, 16 nt, Homo sapiens
ugcucacuggcuuuag

SEQ ID NO: 252330 - RNA, 14 nt, Homo sapiens
acauuguuaugcac

SEQ ID NO: 252331 - RNA, 18 nt, Homo sapiens
gcaugugcagacacucaa

SEQ ID NO: 252332 - RNA, 14 nt, Homo sapiens
acucuuggccucaa

SEQ ID NO: 252333 - RNA, 15 nt, Homo sapiens
caagacugcucccuu

SEQ ID NO: 252334 - RNA, 21 nt, Homo sapiens
uucuugaggcagggucucacu

SEQ ID NO: 252335 - RNA, 13 nt, Homo sapiens
cugcuucauguaa

SEQ ID NO: 252336 - RNA, 23 nt, Homo sapiens
cauaaucucuuuccaucuuacuu

SEQ ID NO: 252337 - RNA, 19 nt, Homo sapiens
ggcaggagggcaugugcag

SEQ ID NO: 252338 - RNA, 21 nt, Homo sapiens
cccagcugggaagaacaugcu

SEQ ID NO: 252339 - RNA, 16 nt, Homo sapiens
cauguucagucacaug

SEQ ID NO: 252340 - RNA, 21 nt, Homo sapiens
cagaaucuccauuucugcuca

SEQ ID NO: 252341 - RNA, 15 nt, Homo sapiens
augugcagacacuca

SEQ ID NO: 252342 - RNA, 16 nt, Homo sapiens
aggaggccaugcccac

SEQ ID NO: 252343 - RNA, 14 nt, Homo sapiens
cccaacaagugcuc

SEQ ID NO: 252344 - RNA, 13 nt, Homo sapiens
cucacaugcuccu

SEQ ID NO: 252345 - RNA, 15 nt, Homo sapiens
uucacaucucuguag

SEQ ID NO: 252346 - RNA, 14 nt, Homo sapiens
cugcuccugucacc

SEQ ID NO: 252347 - RNA, 23 nt, Homo sapiens
cagauuccccccaucuccauugc

SEQ ID NO: 252348 - RNA, 20 nt, Homo sapiens
aggcuggagugaaguggugu

SEQ ID NO: 252349 - RNA, 22 nt, Homo sapiens
ucccaacaagugcucuuuccac

SEQ ID NO: 252350 - RNA, 14 nt, Homo sapiens
ucagcacacaugca

SEQ ID NO: 252351 - RNA, 15 nt, Homo sapiens
cugggggacacuuuc

SEQ ID NO: 252352 - RNA, 18 nt, Homo sapiens
cuauacuuucucacaugu

SEQ ID NO: 252353 - RNA, 21 nt, Homo sapiens
cucacugccugcagcugagau

SEQ ID NO: 252354 - RNA, 22 nt, Homo sapiens
ccacacccuggaguggcauggu

SEQ ID NO: 252355 - RNA, 18 nt, Homo sapiens
cugcuuagauuucuagca

SEQ ID NO: 252356 - RNA, 17 nt, Homo sapiens
gucacagaaucuccauu

SEQ ID NO: 252357 - RNA, 13 nt, Homo sapiens
ugucagucugucc

SEQ ID NO: 252358 - RNA, 19 nt, Homo sapiens
cuauacuuucucacaugug

SEQ ID NO: 252359 - RNA, 19 nt, Homo sapiens
uggggccauccacacccuc

SEQ ID NO: 252360 - RNA, 13 nt, Homo sapiens
caggcuucgucuc

SEQ ID NO: 252361 - RNA, 20 nt, Homo sapiens
acucacaaucaucuucuccc

SEQ ID NO: 252362 - RNA, 20 nt, Homo sapiens
auguacccuacccugcacau

SEQ ID NO: 252363 - RNA, 14 nt, Homo sapiens
agaaggcucuaucu

SEQ ID NO: 252364 - RNA, 15 nt, Homo sapiens
aauguaccauguugc

SEQ ID NO: 252365 - RNA, 17 nt, Homo sapiens
ucucacuguguugccca

SEQ ID NO: 252366 - RNA, 14 nt, Homo sapiens
uaguuugcauucca

SEQ ID NO: 252367 - RNA, 14 nt, Homo sapiens
caucucuguagaua

SEQ ID NO: 252368 - RNA, 14 nt, Homo sapiens
ucuguuccugucca

SEQ ID NO: 252369 - RNA, 14 nt, Homo sapiens
agagacagggucuc

SEQ ID NO: 252370 - RNA, 17 nt, Homo sapiens
cugaaaccucuguucuc

SEQ ID NO: 252371 - RNA, 17 nt, Homo sapiens
auccugucccaugggcu

SEQ ID NO: 252372 - RNA, 12 nt, Homo sapiens
uauuuucuccau

SEQ ID NO: 252373 - RNA, 23 nt, Homo sapiens
cugacugcugugggcugcucacu

SEQ ID NO: 252374 - RNA, 21 nt, Homo sapiens
uuagguuuccacguaagucac

SEQ ID NO: 252375 - RNA, 20 nt, Homo sapiens
uuuucucucuuacugcuuca

SEQ ID NO: 252376 - RNA, 15 nt, Homo sapiens
gcugaacgacagucc

SEQ ID NO: 252377 - RNA, 22 nt, Homo sapiens
gauuagccucgucuuucagcga

SEQ ID NO: 252378 - RNA, 14 nt, Homo sapiens
agggucucacugug

SEQ ID NO: 252379 - RNA, 16 nt, Homo sapiens
cuuuccuauuugcaca

SEQ ID NO: 252380 - RNA, 16 nt, Homo sapiens
acugucauaaucucuu

SEQ ID NO: 252381 - RNA, 15 nt, Homo sapiens
gaaguugcccuccag

SEQ ID NO: 252382 - RNA, 19 nt, Homo sapiens
uaguugcuuugcggcaucu

SEQ ID NO: 252383 - RNA, 17 nt, Homo sapiens
auguaccauguugccca

SEQ ID NO: 252384 - RNA, 18 nt, Homo sapiens
ucgggugcccugcauuca

SEQ ID NO: 252385 - RNA, 15 nt, Homo sapiens
ugaggcagggucuca

SEQ ID NO: 252386 - RNA, 19 nt, Homo sapiens
auuuuggcauuuuggcuca

SEQ ID NO: 252387 - RNA, 13 nt, Homo sapiens
agcugggggacac

SEQ ID NO: 252388 - RNA, 15 nt, Homo sapiens
acccuggaguggcau

SEQ ID NO: 252389 - RNA, 17 nt, Homo sapiens
ccuugccucugcucugu

SEQ ID NO: 252390 - RNA, 22 nt, Homo sapiens
ccuggacaggcuucgucucaga

SEQ ID NO: 252391 - RNA, 20 nt, Homo sapiens
uccagaacgcccugugucca

SEQ ID NO: 252392 - RNA, 13 nt, Homo sapiens
cacaugugcucuc

SEQ ID NO: 252393 - RNA, 17 nt, Homo sapiens
uuccuuugggagcucau

SEQ ID NO: 252394 - RNA, 12 nt, Homo sapiens
ugccucugcucu

SEQ ID NO: 252395 - RNA, 14 nt, Homo sapiens
cacggacccugugu

SEQ ID NO: 252396 - RNA, 19 nt, Homo sapiens
guuuccacguaagucacug

SEQ ID NO: 252397 - RNA, 17 nt, Homo sapiens
auuuuguaucaccucuu

SEQ ID NO: 252398 - RNA, 17 nt, Homo sapiens
ucuguuccuguccagca

SEQ ID NO: 252399 - RNA, 15 nt, Homo sapiens
cugcucacugcucac

SEQ ID NO: 252400 - RNA, 13 nt, Homo sapiens
cacggucuucaca

SEQ ID NO: 252401 - RNA, 16 nt, Homo sapiens
uuuggcucagagucca

SEQ ID NO: 252402 - RNA, 20 nt, Homo sapiens
cuucccaugcaacacccucu

SEQ ID NO: 252403 - RNA, 23 nt, Homo sapiens
cagaggguggagaugucagucug

SEQ ID NO: 252404 - RNA, 19 nt, Homo sapiens
cugucaauacagguuuuau

SEQ ID NO: 252405 - RNA, 15 nt, Homo sapiens
aucuuucucuuccca

SEQ ID NO: 252406 - RNA, 23 nt, Homo sapiens
uucacaucucuguagauacaggg

SEQ ID NO: 252407 - RNA, 14 nt, Homo sapiens
ugccucaucacugc

SEQ ID NO: 252408 - RNA, 20 nt, Homo sapiens
aaauacaugucccccuguga

SEQ ID NO: 252409 - RNA, 15 nt, Homo sapiens
agagcugggacucag

SEQ ID NO: 252410 - RNA, 13 nt, Homo sapiens
auuuugcuuccuu

SEQ ID NO: 252411 - RNA, 15 nt, Homo sapiens
ucacgcucagcacac

SEQ ID NO: 252412 - RNA, 13 nt, Homo sapiens
acgguugccugag

SEQ ID NO: 252413 - RNA, 19 nt, Homo sapiens
ugcuguugauuccacugaa

SEQ ID NO: 252414 - RNA, 21 nt, Homo sapiens
cugaaaccucuguucucauga

SEQ ID NO: 252415 - RNA, 13 nt, Homo sapiens
uaggauuacccac

SEQ ID NO: 252416 - RNA, 20 nt, Homo sapiens
uguugaccaggcuggaguga

SEQ ID NO: 252417 - RNA, 15 nt, Homo sapiens
caggggcaaaaguca

SEQ ID NO: 252418 - RNA, 15 nt, Homo sapiens
cuuuccuauuugcac

SEQ ID NO: 252419 - RNA, 20 nt, Homo sapiens
ucaguuguggccucauucag

SEQ ID NO: 252420 - RNA, 11 nt, Homo sapiens
uucacaucucu

SEQ ID NO: 252421 - RNA, 23 nt, Homo sapiens
gagaggauuuggcucgcuguggu

SEQ ID NO: 252422 - RNA, 18 nt, Homo sapiens
caucuccauugcauucau

SEQ ID NO: 252423 - RNA, 16 nt, Homo sapiens
uccuugccucugcucu

SEQ ID NO: 252424 - RNA, 22 nt, Homo sapiens
aaugacucuggaaccauccucu

SEQ ID NO: 252425 - RNA, 20 nt, Homo sapiens
gcagauccugucccaugggc

SEQ ID NO: 252426 - RNA, 15 nt, Homo sapiens
cagcacacaugcauc

SEQ ID NO: 252427 - RNA, 19 nt, Homo sapiens
aauguaccauguugcccag

SEQ ID NO: 252428 - RNA, 22 nt, Homo sapiens
uuuaucacuugccgugucaucc

SEQ ID NO: 252429 - RNA, 22 nt, Homo sapiens
cuccauguaccuuguguacuuu

SEQ ID NO: 252430 - RNA, 20 nt, Homo sapiens
ucccuguguacccuccaugu

SEQ ID NO: 252431 - RNA, 20 nt, Homo sapiens
cauguaccuuguguacuuuc

SEQ ID NO: 252432 - RNA, 13 nt, Homo sapiens
acggacccugugu

SEQ ID NO: 252433 - RNA, 16 nt, Homo sapiens
cccgagagcugggacu

SEQ ID NO: 252434 - RNA, 16 nt, Homo sapiens
accauccucuguuacc

SEQ ID NO: 252435 - RNA, 18 nt, Homo sapiens
uacuacccucagucuaca

SEQ ID NO: 252436 - RNA, 14 nt, Homo sapiens
acaucucuguagau

SEQ ID NO: 252437 - RNA, 23 nt, Homo sapiens
gcugaacaggccgcacaucucac

SEQ ID NO: 252438 - RNA, 19 nt, Homo sapiens
cuacacucacaaucaucuu

SEQ ID NO: 252439 - RNA, 17 nt, Homo sapiens
ugaucauugcaguauca

SEQ ID NO: 252440 - RNA, 14 nt, Homo sapiens
auaccucugggaaa

SEQ ID NO: 252441 - RNA, 13 nt, Homo sapiens
aagcgauccuccu

SEQ ID NO: 252442 - RNA, 20 nt, Homo sapiens
cgagagcugggacucaguuc

SEQ ID NO: 252443 - RNA, 16 nt, Homo sapiens
ggccacuggcccuguu

SEQ ID NO: 252444 - RNA, 14 nt, Homo sapiens
gcaucuccauuuca

SEQ ID NO: 252445 - RNA, 15 nt, Homo sapiens
ugcauuccagcgucu

SEQ ID NO: 252446 - RNA, 20 nt, Homo sapiens
aucaugguauucuucugaca

SEQ ID NO: 252447 - RNA, 20 nt, Homo sapiens
uaaaccagugaacaguguga

SEQ ID NO: 252448 - RNA, 15 nt, Homo sapiens
cacugaacaugcuca

SEQ ID NO: 252449 - RNA, 17 nt, Homo sapiens
cauuguuaugcacuuuu

SEQ ID NO: 252450 - RNA, 14 nt, Homo sapiens
acuguguugcccag

SEQ ID NO: 252451 - RNA, 17 nt, Homo sapiens
cguaguuugcauuccag

SEQ ID NO: 252452 - RNA, 17 nt, Homo sapiens
acaggccgcacaucuca

SEQ ID NO: 252453 - RNA, 15 nt, Homo sapiens
ugugaguucugggcu

SEQ ID NO: 252454 - RNA, 13 nt, Homo sapiens
ucauucagcagaa

SEQ ID NO: 252455 - RNA, 16 nt, Homo sapiens
cauguaccuuguguac

SEQ ID NO: 252456 - RNA, 13 nt, Homo sapiens
aaucucuuuccau

SEQ ID NO: 252457 - RNA, 21 nt, Homo sapiens
uuuuguaucaccucuucacaa

SEQ ID NO: 252458 - RNA, 20 nt, Homo sapiens
uaccuggcuugaagcugcuc

SEQ ID NO: 252459 - RNA, 13 nt, Homo sapiens
uuuagucugggcu

SEQ ID NO: 252460 - RNA, 14 nt, Homo sapiens
aggcagggucucac

SEQ ID NO: 252461 - RNA, 17 nt, Homo sapiens
gucauaaucucuuucca

SEQ ID NO: 252462 - RNA, 21 nt, Homo sapiens
auguucagucacaugugcucu

SEQ ID NO: 252463 - RNA, 18 nt, Homo sapiens
uggcuugaagcugcucac

SEQ ID NO: 252464 - RNA, 12 nt, Homo sapiens
ucagucugucca

SEQ ID NO: 252465 - RNA, 15 nt, Homo sapiens
ucucguacuuucaca

SEQ ID NO: 252466 - RNA, 17 nt, Homo sapiens
uucacgggcaacacuca

SEQ ID NO: 252467 - RNA, 15 nt, Homo sapiens
gccgcacaucucacu

SEQ ID NO: 252468 - RNA, 15 nt, Homo sapiens
cucugcucugugcac

SEQ ID NO: 252469 - RNA, 22 nt, Homo sapiens
ucugccuuugugcucuguuccu

SEQ ID NO: 252470 - RNA, 16 nt, Homo sapiens
cuuuucuccacuguca

SEQ ID NO: 252471 - RNA, 22 nt, Homo sapiens
auucacagcuacgugugccccu

SEQ ID NO: 252472 - RNA, 17 nt, Homo sapiens
caucacugcuccuguca

SEQ ID NO: 252473 - RNA, 14 nt, Homo sapiens
aaugacucuggaac

SEQ ID NO: 252474 - RNA, 20 nt, Homo sapiens
cccagcuggagcauugcagc

SEQ ID NO: 252475 - RNA, 19 nt, Homo sapiens
uucugggaagaaaguagga

SEQ ID NO: 252476 - RNA, 22 nt, Homo sapiens
gucuugaucagacauucagaga

SEQ ID NO: 252477 - RNA, 15 nt, Homo sapiens
ucugcuguugauucc

SEQ ID NO: 252478 - RNA, 13 nt, Homo sapiens
agaaugacucugg

SEQ ID NO: 252479 - RNA, 23 nt, Homo sapiens
gguggguccacacggucuucaca

SEQ ID NO: 252480 - RNA, 22 nt, Homo sapiens
acugagaagaucaaugaucacc

SEQ ID NO: 252481 - RNA, 14 nt, Homo sapiens
gaaugcauguguga

SEQ ID NO: 252482 - RNA, 22 nt, Homo sapiens
agaaugacucuggaaccauccu

SEQ ID NO: 252483 - RNA, 22 nt, Homo sapiens
cauguuuauccauguacuuucc

SEQ ID NO: 252484 - RNA, 14 nt, Homo sapiens
ugaacucuuggccu

SEQ ID NO: 252485 - RNA, 16 nt, Homo sapiens
agcaguaugugugcuc

SEQ ID NO: 252486 - RNA, 20 nt, Homo sapiens
gccaaggcucacaugcuccu

SEQ ID NO: 252487 - RNA, 13 nt, Homo sapiens
gaggcagggucuc

SEQ ID NO: 252488 - RNA, 18 nt, Homo sapiens
cuuuucgccaaggcucac

SEQ ID NO: 252489 - RNA, 17 nt, Homo sapiens
cucagucuacacucaca

SEQ ID NO: 252490 - RNA, 13 nt, Homo sapiens
cccuccauguacc

SEQ ID NO: 252491 - RNA, 22 nt, Homo sapiens
uccagaacgcccuguguccaca

SEQ ID NO: 252492 - RNA, 23 nt, Homo sapiens
cuccccucuccugcgugugccca

SEQ ID NO: 252493 - RNA, 18 nt, Homo sapiens
uagagacagggucucacu

SEQ ID NO: 252494 - RNA, 13 nt, Homo sapiens
cuuucacaucucu

SEQ ID NO: 252495 - RNA, 17 nt, Homo sapiens
ugggauuacagguguga

SEQ ID NO: 252496 - RNA, 13 nt, Homo sapiens
cacaucucacuuc

SEQ ID NO: 252497 - RNA, 16 nt, Homo sapiens
caguuguggccucauu

SEQ ID NO: 252498 - RNA, 16 nt, Homo sapiens
cucuguagauacaggg

SEQ ID NO: 252499 - RNA, 17 nt, Homo sapiens
cgcacccuggcuggaau

SEQ ID NO: 252500 - RNA, 15 nt, Homo sapiens
auccugaccaaagga

SEQ ID NO: 252501 - RNA, 12 nt, Homo sapiens
ugcccugcauuc

SEQ ID NO: 252502 - RNA, 14 nt, Homo sapiens
ucacucuguugacc

SEQ ID NO: 252503 - RNA, 16 nt, Homo sapiens
ucugcuguugauucca

SEQ ID NO: 252504 - RNA, 13 nt, Homo sapiens
ugagacauuugcc

SEQ ID NO: 252505 - RNA, 23 nt, Homo sapiens
ucuccugcgugugcccacugaac

SEQ ID NO: 252506 - RNA, 22 nt, Homo sapiens
uuucccuguguacccuccaugu

SEQ ID NO: 252507 - RNA, 17 nt, Homo sapiens
aggagugggucgcccac

SEQ ID NO: 252508 - RNA, 22 nt, Homo sapiens
ucucgggugcccugcauucaca

SEQ ID NO: 252509 - RNA, 19 nt, Homo sapiens
ucucccaacaagugcucuu

SEQ ID NO: 252510 - RNA, 19 nt, Homo sapiens
ccacuggcccuguuucucc

SEQ ID NO: 252511 - RNA, 12 nt, Homo sapiens
aaaaaaaagccu

SEQ ID NO: 252512 - RNA, 14 nt, Homo sapiens
ccucugggggccug

SEQ ID NO: 252513 - RNA, 13 nt, Homo sapiens
uauccaaucucau

SEQ ID NO: 252514 - RNA, 13 nt, Homo sapiens
gcugugggcugcu

SEQ ID NO: 252515 - RNA, 17 nt, Homo sapiens
cccaucuccauugcauu

SEQ ID NO: 252516 - RNA, 13 nt, Homo sapiens
auuccccccaucu

SEQ ID NO: 252517 - RNA, 18 nt, Homo sapiens
uagcugggacuagaggca

SEQ ID NO: 252518 - RNA, 15 nt, Homo sapiens
agauccugucccaug

SEQ ID NO: 252519 - RNA, 15 nt, Homo sapiens
ucucucuuacugcuu

SEQ ID NO: 252520 - RNA, 12 nt, Homo sapiens
aagcugcucacu

SEQ ID NO: 252521 - RNA, 12 nt, Homo sapiens
ccugaccaaagg

SEQ ID NO: 252522 - RNA, 16 nt, Homo sapiens
ucuccccgaaucucaa

SEQ ID NO: 252523 - RNA, 15 nt, Homo sapiens
uguaagaggaugugg

SEQ ID NO: 252524 - RNA, 21 nt, Homo sapiens
uguucagucacaugugcucuc

SEQ ID NO: 252525 - RNA, 21 nt, Homo sapiens
cuggagugaaguggugugauc

SEQ ID NO: 252526 - RNA, 14 nt, Homo sapiens
cagccuccugagua

SEQ ID NO: 252527 - RNA, 22 nt, Homo sapiens
aacccuggaagcuguaugccac

SEQ ID NO: 252528 - RNA, 21 nt, Homo sapiens
caaggcucacaugcuccuugc

SEQ ID NO: 252529 - RNA, 11 nt, Homo sapiens
ugagauuccag

SEQ ID NO: 252530 - RNA, 16 nt, Homo sapiens
gaggcaggagggcaug

SEQ ID NO: 252531 - RNA, 15 nt, Homo sapiens
ucuuagguuuccacg

SEQ ID NO: 252532 - RNA, 23 nt, Homo sapiens
uccccagcugggaagaacaugcu

SEQ ID NO: 252533 - RNA, 17 nt, Homo sapiens
ggcaaaagucauugcug

SEQ ID NO: 252534 - RNA, 16 nt, Homo sapiens
acaggccgcacaucuc

SEQ ID NO: 252535 - RNA, 16 nt, Homo sapiens
guaucaccucuucaca

SEQ ID NO: 252536 - RNA, 18 nt, Homo sapiens
gacagggucucacugugu

SEQ ID NO: 252537 - RNA, 18 nt, Homo sapiens
gcccacugaacaugcuca

SEQ ID NO: 252538 - RNA, 20 nt, Homo sapiens
uccucagcagccucacugca

SEQ ID NO: 252539 - RNA, 16 nt, Homo sapiens
ugcagcuccucugccu

SEQ ID NO: 252540 - RNA, 15 nt, Homo sapiens
ccuugccucugcucu

SEQ ID NO: 252541 - RNA, 17 nt, Homo sapiens
aacaagugcucuuucca

SEQ ID NO: 252542 - RNA, 19 nt, Homo sapiens
uggcccuguuucuccccac

SEQ ID NO: 252543 - RNA, 18 nt, Homo sapiens
cugccugcagcugagauu

SEQ ID NO: 252544 - RNA, 13 nt, Homo sapiens
uacuuucacaucu

SEQ ID NO: 252545 - RNA, 16 nt, Homo sapiens
cuacacucacaaucau

SEQ ID NO: 252546 - RNA, 21 nt, Homo sapiens
guucagucacaugugcucucg

SEQ ID NO: 252547 - RNA, 16 nt, Homo sapiens
aucuccauugcauuca

SEQ ID NO: 252548 - RNA, 17 nt, Homo sapiens
gucccuuucacacugug

SEQ ID NO: 252549 - RNA, 19 nt, Homo sapiens
ugaagcugcucacugcuca

SEQ ID NO: 252550 - RNA, 17 nt, Homo sapiens
ccucacugcaucuuucu

SEQ ID NO: 252551 - RNA, 16 nt, Homo sapiens
guaguuugcauuccag

SEQ ID NO: 252552 - RNA, 19 nt, Homo sapiens
cacagugauuagccucguc

SEQ ID NO: 252553 - RNA, 15 nt, Homo sapiens
auaaucucuuuccau

SEQ ID NO: 252554 - RNA, 23 nt, Homo sapiens
caauaaaccagugaacaguguga

SEQ ID NO: 252555 - RNA, 19 nt, Homo sapiens
uuauuuucuccaugucugu

SEQ ID NO: 252556 - RNA, 14 nt, Homo sapiens
ugcggcaucuccau

SEQ ID NO: 252557 - RNA, 20 nt, Homo sapiens
auguaccuuguguacuuucu

SEQ ID NO: 252558 - RNA, 16 nt, Homo sapiens
ugcucugugcacucac

SEQ ID NO: 252559 - RNA, 17 nt, Homo sapiens
ugcgugugcccacugaa

SEQ ID NO: 252560 - RNA, 17 nt, Homo sapiens
uguguacccuccaugua

SEQ ID NO: 252561 - RNA, 18 nt, Homo sapiens
cucuccugcgugugccca

SEQ ID NO: 252562 - RNA, 16 nt, Homo sapiens
caggccgcacaucuca

SEQ ID NO: 252563 - RNA, 19 nt, Homo sapiens
cgccaaggcucacaugcuc

SEQ ID NO: 252564 - RNA, 21 nt, Homo sapiens
aacaggccgcacaucucacuu

SEQ ID NO: 252565 - RNA, 19 nt, Homo sapiens
gccuuugccucucuugcca

SEQ ID NO: 252566 - RNA, 14 nt, Homo sapiens
uauguuauuuucag

SEQ ID NO: 252567 - RNA, 19 nt, Homo sapiens
uccuauuugcacacgucca

SEQ ID NO: 252568 - RNA, 17 nt, Homo sapiens
uagauuucuagcaguau

SEQ ID NO: 252569 - RNA, 19 nt, Homo sapiens
ugaagauuauaaaagccaa

SEQ ID NO: 252570 - RNA, 17 nt, Homo sapiens
cuaaagugcugggauua

SEQ ID NO: 252571 - RNA, 22 nt, Homo sapiens
accaguuuccuuucgucugcca

SEQ ID NO: 252572 - RNA, 22 nt, Homo sapiens
uguaccauguugcccagaauuu

SEQ ID NO: 252573 - RNA, 21 nt, Homo sapiens
agacagggucucacuguguug

SEQ ID NO: 252574 - RNA, 22 nt, Homo sapiens
ugaggcaggagggcaugugcag

SEQ ID NO: 252575 - RNA, 23 nt, Homo sapiens
uuccagaacgcccuguguccaca

SEQ ID NO: 252576 - RNA, 14 nt, Homo sapiens
uguacccuacccug

SEQ ID NO: 252577 - RNA, 16 nt, Homo sapiens
guccucacucucgcca

SEQ ID NO: 252578 - RNA, 21 nt, Homo sapiens
aggccgcacaucucacuucag

SEQ ID NO: 252579 - RNA, 20 nt, Homo sapiens
cuguccuggucaguuuucac

SEQ ID NO: 252580 - RNA, 14 nt, Homo sapiens
ccuuugugcucugu

SEQ ID NO: 252581 - RNA, 23 nt, Homo sapiens
cuugccucugcucugugcacuca

SEQ ID NO: 252582 - RNA, 13 nt, Homo sapiens
guaggaguggcug

SEQ ID NO: 252583 - RNA, 24 nt, Homo sapiens
aucauuuggccgagucagcacgua

SEQ ID NO: 252584 - RNA, 22 nt, Homo sapiens
caugcauccuccccucuccugc

SEQ ID NO: 252585 - RNA, 13 nt, Homo sapiens
gcucauguguaca

SEQ ID NO: 252586 - RNA, 17 nt, Homo sapiens
gcugcucacugcucaca

SEQ ID NO: 252587 - RNA, 22 nt, Homo sapiens
acugccugcagcugagauucca

SEQ ID NO: 252588 - RNA, 22 nt, Homo sapiens
ccccugcagcuccucugccuuu

SEQ ID NO: 252589 - RNA, 17 nt, Homo sapiens
cauguucagucacaugu

SEQ ID NO: 252590 - RNA, 19 nt, Homo sapiens
cugcaucuuucucuuccca

SEQ ID NO: 252591 - RNA, 21 nt, Homo sapiens
cagaaaaaaaaaaaaaagccu

SEQ ID NO: 252592 - RNA, 19 nt, Homo sapiens
auuugcacacguccauguu

SEQ ID NO: 252593 - RNA, 16 nt, Homo sapiens
ccgagagcugggacuc

SEQ ID NO: 252594 - RNA, 21 nt, Homo sapiens
uggcugaucauugcaguauca

SEQ ID NO: 252595 - RNA, 20 nt, Homo sapiens
cuacccucagucuacacuca

SEQ ID NO: 252596 - RNA, 21 nt, Homo sapiens
gcaguccugugccucaucacu

SEQ ID NO: 252597 - RNA, 19 nt, Homo sapiens
caacaagugcucuuuccac

SEQ ID NO: 252598 - RNA, 15 nt, Homo sapiens
cuagcaguaugugug

SEQ ID NO: 252599 - RNA, 20 nt, Homo sapiens
cauguacuuucccuguguac

SEQ ID NO: 252600 - RNA, 17 nt, Homo sapiens
aaguguguguuucuugc

SEQ ID NO: 252601 - RNA, 17 nt, Homo sapiens
cucuuguaaauacaugu

SEQ ID NO: 252602 - RNA, 16 nt, Homo sapiens
ucagucuacacucaca

SEQ ID NO: 252603 - RNA, 15 nt, Homo sapiens
ugcccugcauucaca

SEQ ID NO: 252604 - RNA, 14 nt, Homo sapiens
ccaucuccauugca

SEQ ID NO: 252605 - RNA, 15 nt, Homo sapiens
gacaggaggccaugc

SEQ ID NO: 252606 - RNA, 14 nt, Homo sapiens
ggcaggagggcaug

SEQ ID NO: 252607 - RNA, 20 nt, Homo sapiens
ugcugggauuacagguguga

SEQ ID NO: 252608 - RNA, 17 nt, Homo sapiens
uuccauguucaccaaga

SEQ ID NO: 252609 - RNA, 17 nt, Homo sapiens
aauguaccauguugccc

SEQ ID NO: 252610 - RNA, 22 nt, Homo sapiens
ccugucaccaugauucugucca

SEQ ID NO: 252611 - RNA, 16 nt, Homo sapiens
cccaggcuggucuuga

SEQ ID NO: 252612 - RNA, 20 nt, Homo sapiens
cuucuaaagugcugggauua

SEQ ID NO: 252613 - RNA, 11 nt, Homo sapiens
aagauguuggg

SEQ ID NO: 252614 - RNA, 15 nt, Homo sapiens
caggcuucgucucag

SEQ ID NO: 252615 - RNA, 13 nt, Homo sapiens
ugcggcaucucca

SEQ ID NO: 252616 - RNA, 15 nt, Homo sapiens
gagaguugacuuggu

SEQ ID NO: 252617 - RNA, 15 nt, Homo sapiens
caugguccugugccc

SEQ ID NO: 252618 - RNA, 22 nt, Homo sapiens
ugcccacugaacaugcucaugu

SEQ ID NO: 252619 - RNA, 22 nt, Homo sapiens
augaagacagggucaucgacca

SEQ ID NO: 252620 - RNA, 17 nt, Homo sapiens
aacaggcugcuuagauu

SEQ ID NO: 252621 - RNA, 13 nt, Homo sapiens
ucccaagacugcu

SEQ ID NO: 252622 - RNA, 17 nt, Homo sapiens
ucuaguuaccacggcaa

SEQ ID NO: 252623 - RNA, 19 nt, Homo sapiens
cucguacuuucacaucucu

SEQ ID NO: 252624 - RNA, 22 nt, Homo sapiens
cacugucauaaucucuuuccau

SEQ ID NO: 252625 - RNA, 20 nt, Homo sapiens
aggugugagccacagcacuc

SEQ ID NO: 252626 - RNA, 23 nt, Homo sapiens
cuacccugcacauuguuaugcac

SEQ ID NO: 252627 - RNA, 20 nt, Homo sapiens
ggaguggcugaccaggcccu

SEQ ID NO: 252628 - RNA, 18 nt, Homo sapiens
ugcucacugcucacacgc

SEQ ID NO: 252629 - RNA, 21 nt, Homo sapiens
gaaucucaauaaaccagugaa

SEQ ID NO: 252630 - RNA, 18 nt, Homo sapiens
ugcaucuuucucuuccca

SEQ ID NO: 252631 - RNA, 21 nt, Homo sapiens
uggcccgagagcugggacuca

SEQ ID NO: 252632 - RNA, 21 nt, Homo sapiens
ccuaaauagguuuuucuugcu

SEQ ID NO: 252633 - RNA, 17 nt, Homo sapiens
uccacacggucuucaca

SEQ ID NO: 252634 - RNA, 14 nt, Homo sapiens
aucaacuccagucu

SEQ ID NO: 252635 - RNA, 14 nt, Homo sapiens
cugaacaugcucau

SEQ ID NO: 252636 - RNA, 12 nt, Homo sapiens
cuuugugcccaa

SEQ ID NO: 252637 - RNA, 16 nt, Homo sapiens
cugcuguugauuccac

SEQ ID NO: 252638 - RNA, 19 nt, Homo sapiens
ucuugaucagacauucaga

SEQ ID NO: 252639 - RNA, 21 nt, Homo sapiens
uugcuuccuuugggagcucau

SEQ ID NO: 252640 - RNA, 16 nt, Homo sapiens
caucaacuccagucuc

SEQ ID NO: 252641 - RNA, 21 nt, Homo sapiens
ugcauucauguacuacccuca

SEQ ID NO: 252642 - RNA, 24 nt, Homo sapiens
ucauguacuacccucagucuacac

SEQ ID NO: 252643 - RNA, 18 nt, Homo sapiens
aagaucauugcugagaaa

SEQ ID NO: 252644 - RNA, 15 nt, Homo sapiens
ugggacucaguucuu

SEQ ID NO: 252645 - RNA, 22 nt, Homo sapiens
cugacugcugugggcugcucac

SEQ ID NO: 252646 - RNA, 16 nt, Homo sapiens
cccacggguguggcuc

SEQ ID NO: 252647 - RNA, 22 nt, Homo sapiens
cuuuucgccaaggcucacaugc

SEQ ID NO: 252648 - RNA, 13 nt, Homo sapiens
auuucugcucaga

SEQ ID NO: 252649 - RNA, 19 nt, Homo sapiens
ugaguuaggcugagccaca

SEQ ID NO: 252650 - RNA, 14 nt, Homo sapiens
ugaucagacauuca

SEQ ID NO: 252651 - RNA, 22 nt, Homo sapiens
ugggucucucauaccucuggga

SEQ ID NO: 252652 - RNA, 21 nt, Homo sapiens
uggaaguguguguuucuugcu

SEQ ID NO: 252653 - RNA, 19 nt, Homo sapiens
ugcuuugcggcaucuccau

SEQ ID NO: 252654 - RNA, 15 nt, Homo sapiens
aagucauugcugaca

SEQ ID NO: 252655 - RNA, 13 nt, Homo sapiens
uaccucugggaaa

SEQ ID NO: 252656 - RNA, 20 nt, Homo sapiens
cagauuccccccaucuccau

SEQ ID NO: 252657 - RNA, 15 nt, Homo sapiens
uaucaccucuucaca

SEQ ID NO: 252658 - RNA, 23 nt, Homo sapiens
ucagcacguaguuugcauuccag

SEQ ID NO: 252659 - RNA, 19 nt, Homo sapiens
gaucccagcucacugcagc

SEQ ID NO: 252660 - RNA, 14 nt, Homo sapiens
acuuucacaucucu

SEQ ID NO: 252661 - RNA, 20 nt, Homo sapiens
gccacaggcauuuccugcuu

SEQ ID NO: 252662 - RNA, 22 nt, Homo sapiens
guacccuacccugcacauuguu

SEQ ID NO: 252663 - RNA, 20 nt, Homo sapiens
auguucagucacaugugcuc

SEQ ID NO: 252664 - RNA, 14 nt, Homo sapiens
cauccacacccucu

SEQ ID NO: 252665 - RNA, 21 nt, Homo sapiens
aaggaucuccccgaaucucaa

SEQ ID NO: 252666 - RNA, 19 nt, Homo sapiens
cugcagcuccucugccuuu

SEQ ID NO: 252667 - RNA, 18 nt, Homo sapiens
gauuccccccaucuccau

SEQ ID NO: 252668 - RNA, 22 nt, Homo sapiens
cagcuacgugugccccucucau

SEQ ID NO: 252669 - RNA, 21 nt, Homo sapiens
cugacagagcccuaucuaugu

SEQ ID NO: 252670 - RNA, 16 nt, Homo sapiens
ucuugaacucuuggcc

SEQ ID NO: 252671 - RNA, 12 nt, Homo sapiens
uccccaauucau

SEQ ID NO: 252672 - RNA, 20 nt, Homo sapiens
cuacgugugccccucucaug

SEQ ID NO: 252673 - RNA, 21 nt, Homo sapiens
cagggucucacucuguugacc

SEQ ID NO: 252674 - RNA, 14 nt, Homo sapiens
uacgguuccauguu

SEQ ID NO: 252675 - RNA, 19 nt, Homo sapiens
uccugggccugggcuuuag

SEQ ID NO: 252676 - RNA, 18 nt, Homo sapiens
ugcucugugcacucacgc

SEQ ID NO: 252677 - RNA, 16 nt, Homo sapiens
aaaggggccucuccuu

SEQ ID NO: 252678 - RNA, 12 nt, Homo sapiens
gagcccuuccag

SEQ ID NO: 252679 - RNA, 12 nt, Homo sapiens
uuauccauguac

SEQ ID NO: 252680 - RNA, 21 nt, Homo sapiens
ucaucucuuguaaauacaugu

SEQ ID NO: 252681 - RNA, 13 nt, Homo sapiens
agaaguugcccuc

SEQ ID NO: 252682 - RNA, 19 nt, Homo sapiens
aucauuuggccgagucagc

SEQ ID NO: 252683 - RNA, 19 nt, Homo sapiens
gugcugggauuacaggugu

SEQ ID NO: 252684 - RNA, 19 nt, Homo sapiens
gagagcugggacucaguuc

SEQ ID NO: 252685 - RNA, 19 nt, Homo sapiens
cuuuccaucuuacuugccc

SEQ ID NO: 252686 - RNA, 13 nt, Homo sapiens
ucucauaccucug

SEQ ID NO: 252687 - RNA, 23 nt, Homo sapiens
uggugugaucccagcucacugca

SEQ ID NO: 252688 - RNA, 18 nt, Homo sapiens
gaucuccccgaaucucaa

SEQ ID NO: 252689 - RNA, 19 nt, Homo sapiens
cucccaacaagugcucuuu

SEQ ID NO: 252690 - RNA, 20 nt, Homo sapiens
uauguacccuacccugcaca

SEQ ID NO: 252691 - RNA, 17 nt, Homo sapiens
gucugcuguugauucca

SEQ ID NO: 252692 - RNA, 15 nt, Homo sapiens
uuccagcgucugcug

SEQ ID NO: 252693 - RNA, 20 nt, Homo sapiens
cuugccucugcucugugcac

SEQ ID NO: 252694 - RNA, 18 nt, Homo sapiens
aacaggccgcacaucuca

SEQ ID NO: 252695 - RNA, 19 nt, Homo sapiens
augucuuuccuauuugcac

SEQ ID NO: 252696 - RNA, 14 nt, Homo sapiens
cacacaugcauccu

SEQ ID NO: 252697 - RNA, 12 nt, Homo sapiens
gcccugcauuca

SEQ ID NO: 252698 - RNA, 14 nt, Homo sapiens
gugugcucuuaucc

SEQ ID NO: 252699 - RNA, 22 nt, Homo sapiens
cuguccagcaggggucucccaa

SEQ ID NO: 252700 - RNA, 22 nt, Homo sapiens
uggcauuuuggcucagagucca

SEQ ID NO: 252701 - RNA, 23 nt, Homo sapiens
uuuuggggaggaguugucugucc

SEQ ID NO: 252702 - RNA, 23 nt, Homo sapiens
ggucucacucuguugaccaggcu

SEQ ID NO: 252703 - RNA, 12 nt, Homo sapiens
cacaugugcucu

SEQ ID NO: 252704 - RNA, 15 nt, Homo sapiens
uuauccauguacuuu

SEQ ID NO: 252705 - RNA, 16 nt, Homo sapiens
cuccugcgugugccca

SEQ ID NO: 252706 - RNA, 19 nt, Homo sapiens
acccucuccuugucacaga

SEQ ID NO: 252707 - RNA, 18 nt, Homo sapiens
cuugcuauguuauuuuca

SEQ ID NO: 252708 - RNA, 21 nt, Homo sapiens
acaugugcucucgggugcccu

SEQ ID NO: 252709 - RNA, 21 nt, Homo sapiens
ucuccacugucauaaucucuu

SEQ ID NO: 252710 - RNA, 18 nt, Homo sapiens
acugcugugggcugcuca

SEQ ID NO: 252711 - RNA, 17 nt, Homo sapiens
gcucagcacacaugcau

SEQ ID NO: 252712 - RNA, 16 nt, Homo sapiens
caaggcucacaugcuc

SEQ ID NO: 252713 - RNA, 20 nt, Homo sapiens
ucuuuccuauuugcacacgu

SEQ ID NO: 252714 - RNA, 15 nt, Homo sapiens
ugcauucacagcuac

SEQ ID NO: 252715 - RNA, 14 nt, Homo sapiens
acacggucuucaca

SEQ ID NO: 252716 - RNA, 13 nt, Homo sapiens
agagcugcuucca

SEQ ID NO: 252717 - RNA, 19 nt, Homo sapiens
uuguaucaccucuucacaa

SEQ ID NO: 252718 - RNA, 20 nt, Homo sapiens
caguaugugugcucuuaucc

SEQ ID NO: 252719 - RNA, 19 nt, Homo sapiens
acugcugugggcugcucac

SEQ ID NO: 252720 - RNA, 16 nt, Homo sapiens
caggcauuuccugcuu

SEQ ID NO: 252721 - RNA, 20 nt, Homo sapiens
ugguuucucguacuuucaca

SEQ ID NO: 252722 - RNA, 15 nt, Homo sapiens
uuguggccucauuca

SEQ ID NO: 252723 - RNA, 16 nt, Homo sapiens
guccuggucaguuuuc

SEQ ID NO: 252724 - RNA, 20 nt, Homo sapiens
aaggcucuaucugcugggcu

SEQ ID NO: 252725 - RNA, 13 nt, Homo sapiens
ugcucuuuccacc

SEQ ID NO: 252726 - RNA, 18 nt, Homo sapiens
ucucuuaaauucauauca

SEQ ID NO: 252727 - RNA, 21 nt, Homo sapiens
gcuuuagcugcugucuucccc

SEQ ID NO: 252728 - RNA, 14 nt, Homo sapiens
aagauuuggugggu

SEQ ID NO: 252729 - RNA, 16 nt, Homo sapiens
gccaaggcucacaugc

SEQ ID NO: 252730 - RNA, 16 nt, Homo sapiens
ccuuugccuuugccuc

SEQ ID NO: 252731 - RNA, 15 nt, Homo sapiens
aggauuuggcucgcu

SEQ ID NO: 252732 - RNA, 13 nt, Homo sapiens
gucucugaacugc

SEQ ID NO: 252733 - RNA, 19 nt, Homo sapiens
cacucuuguugugcucuuu

SEQ ID NO: 252734 - RNA, 18 nt, Homo sapiens
cccacugaacaugcucau

SEQ ID NO: 252735 - RNA, 22 nt, Homo sapiens
ugugcccacugaacaugcucau

SEQ ID NO: 252736 - RNA, 16 nt, Homo sapiens
aguucguaccuggcuu

SEQ ID NO: 252737 - RNA, 18 nt, Homo sapiens
agaguccaauguaccaug

SEQ ID NO: 252738 - RNA, 15 nt, Homo sapiens
aacaugcucaugugu

SEQ ID NO: 252739 - RNA, 20 nt, Homo sapiens
ccacugaaaccucuguucuc

SEQ ID NO: 252740 - RNA, 15 nt, Homo sapiens
aggcagggucucacu

SEQ ID NO: 252741 - RNA, 13 nt, Homo sapiens
ucacuggcuuuag

SEQ ID NO: 252742 - RNA, 13 nt, Homo sapiens
gcuguuagcacgu

SEQ ID NO: 252743 - RNA, 15 nt, Homo sapiens
uugaucagacauuca

SEQ ID NO: 252744 - RNA, 14 nt, Homo sapiens
ucaagcgauccucc

SEQ ID NO: 252745 - RNA, 23 nt, Homo sapiens
ccugacugcugugggcugcucac

SEQ ID NO: 252746 - RNA, 17 nt, Homo sapiens
cacuuuuccccaauuca

SEQ ID NO: 252747 - RNA, 20 nt, Homo sapiens
uucuauacuuucucacaugu

SEQ ID NO: 252748 - RNA, 17 nt, Homo sapiens
cguacuuucacaucucu

SEQ ID NO: 252749 - RNA, 23 nt, Homo sapiens
ucuccuugucacagaaucuccau

SEQ ID NO: 252750 - RNA, 15 nt, Homo sapiens
agcugcucacugcuc

SEQ ID NO: 252751 - RNA, 22 nt, Homo sapiens
uccucacucucgccaucuggca

SEQ ID NO: 252752 - RNA, 18 nt, Homo sapiens
caguuguggccucauuca

SEQ ID NO: 252753 - RNA, 23 nt, Homo sapiens
gaaguguguguuucuugcuuuga

SEQ ID NO: 252754 - RNA, 16 nt, Homo sapiens
guguucgcuggcugau

SEQ ID NO: 252755 - RNA, 14 nt, Homo sapiens
ugacucuggaacca

SEQ ID NO: 252756 - RNA, 16 nt, Homo sapiens
uaucagaggguggaga

SEQ ID NO: 252757 - RNA, 17 nt, Homo sapiens
cuugaucagacauucag

SEQ ID NO: 252758 - RNA, 19 nt, Homo sapiens
ccaacaagugcucuuucca

SEQ ID NO: 252759 - RNA, 17 nt, Homo sapiens
cugaguagcugggacua

SEQ ID NO: 252760 - RNA, 18 nt, Homo sapiens
caugcucauguguacaca

SEQ ID NO: 252761 - RNA, 19 nt, Homo sapiens
auuccagaacgcccugugu

SEQ ID NO: 252762 - RNA, 17 nt, Homo sapiens
ggcuugaagcugcucac

SEQ ID NO: 252763 - RNA, 17 nt, Homo sapiens
auuguuaugcacuuuuc

SEQ ID NO: 252764 - RNA, 19 nt, Homo sapiens
cuuucuucauguucaguca

SEQ ID NO: 252765 - RNA, 17 nt, Homo sapiens
aguggcaugguccugug

SEQ ID NO: 252766 - RNA, 16 nt, Homo sapiens
acagggucucacugug

SEQ ID NO: 252767 - RNA, 12 nt, Homo sapiens
ccucucuugcca

SEQ ID NO: 252768 - RNA, 19 nt, Homo sapiens
ugcccacugaacaugcuca

SEQ ID NO: 252769 - RNA, 17 nt, Homo sapiens
cugagucaugucuuucc

SEQ ID NO: 252770 - RNA, 16 nt, Homo sapiens
uugcacacguccaugu

SEQ ID NO: 252771 - RNA, 18 nt, Homo sapiens
ccucugccuuugugcucu

SEQ ID NO: 252772 - RNA, 14 nt, Homo sapiens
ugucucugaacugc

SEQ ID NO: 252773 - RNA, 20 nt, Homo sapiens
uggcauuuucuaugguuaca

SEQ ID NO: 252774 - RNA, 17 nt, Homo sapiens
auaguuuuuaaagaucu

SEQ ID NO: 252775 - RNA, 17 nt, Homo sapiens
agcuguuagcacguuag

SEQ ID NO: 252776 - RNA, 12 nt, Homo sapiens
cucgucuuucag

SEQ ID NO: 252777 - RNA, 15 nt, Homo sapiens
caagugcucuuucca

SEQ ID NO: 252778 - RNA, 19 nt, Homo sapiens
ucacuggcuuuagcugcug

SEQ ID NO: 252779 - RNA, 23 nt, Homo sapiens
gaggaguugucuguccuggucag

SEQ ID NO: 252780 - RNA, 21 nt, Homo sapiens
cugaacaggccgcacaucuca

SEQ ID NO: 252781 - RNA, 20 nt, Homo sapiens
accuggcuugaagcugcuca

SEQ ID NO: 252782 - RNA, 18 nt, Homo sapiens
gccucgaccucccuggcu

SEQ ID NO: 252783 - RNA, 20 nt, Homo sapiens
gaaaaaaaaaaaaaagccuu

SEQ ID NO: 252784 - RNA, 18 nt, Homo sapiens
auacgucuugaucagaca

SEQ ID NO: 252785 - RNA, 15 nt, Homo sapiens
aaagucauugcugac

SEQ ID NO: 252786 - RNA, 17 nt, Homo sapiens
ugucuuuccuauuugca

SEQ ID NO: 252787 - RNA, 18 nt, Homo sapiens
acaugcucauguguacac

SEQ ID NO: 252788 - RNA, 19 nt, Homo sapiens
cugagccgaucuggucucg

SEQ ID NO: 252789 - RNA, 14 nt, Homo sapiens
cuaucuacaaugug

SEQ ID NO: 252790 - RNA, 17 nt, Homo sapiens
gaucagacauucagaga

SEQ ID NO: 252791 - RNA, 22 nt, Homo sapiens
ccuguccagcaggggucuccca

SEQ ID NO: 252792 - RNA, 21 nt, Homo sapiens
gcuuugcggcaucuccauuuc

SEQ ID NO: 252793 - RNA, 22 nt, Homo sapiens
gugugaagauuauaaaagccaa

SEQ ID NO: 252794 - RNA, 17 nt, Homo sapiens
cagcuacgugugccccu

SEQ ID NO: 252795 - RNA, 11 nt, Homo sapiens
gggcugcucac

SEQ ID NO: 252796 - RNA, 15 nt, Homo sapiens
agcugcuuccagugg

SEQ ID NO: 252797 - RNA, 13 nt, Homo sapiens
agagacagggucu

SEQ ID NO: 252798 - RNA, 16 nt, Homo sapiens
caggggcaaaagucau

SEQ ID NO: 252799 - RNA, 15 nt, Homo sapiens
uccucacucucgcca

SEQ ID NO: 252800 - RNA, 21 nt, Homo sapiens
ccauguuuauccauguacuuu

SEQ ID NO: 252801 - RNA, 15 nt, Homo sapiens
ggcaugguccugugc

SEQ ID NO: 252802 - RNA, 16 nt, Homo sapiens
guguacuuucuucccu

SEQ ID NO: 252803 - RNA, 14 nt, Homo sapiens
cacagaaucuccau

SEQ ID NO: 252804 - RNA, 17 nt, Homo sapiens
uguccuggucaguuuuc

SEQ ID NO: 252805 - RNA, 17 nt, Homo sapiens
ugucacagaaucuccau

SEQ ID NO: 252806 - RNA, 17 nt, Homo sapiens
uggccgagucagcacgu

SEQ ID NO: 252807 - RNA, 21 nt, Homo sapiens
ucagcacguaguuugcauucc

SEQ ID NO: 252808 - RNA, 18 nt, Homo sapiens
aauucauaucauuuggcc

SEQ ID NO: 252809 - RNA, 12 nt, Homo sapiens
ggagcucauucu

SEQ ID NO: 252810 - RNA, 14 nt, Homo sapiens
uccagcgucugcug

SEQ ID NO: 252811 - RNA, 20 nt, Homo sapiens
ucucccaagacugcucccuu

SEQ ID NO: 252812 - RNA, 16 nt, Homo sapiens
uggguaggcaugugca

SEQ ID NO: 252813 - RNA, 22 nt, Homo sapiens
cgugugcccacugaacaugcuc

SEQ ID NO: 252814 - RNA, 18 nt, Homo sapiens
cuguagauacaggggcaa

SEQ ID NO: 252815 - RNA, 17 nt, Homo sapiens
cagcacguaguuugcau

SEQ ID NO: 252816 - RNA, 14 nt, Homo sapiens
uccauuucugcuca

SEQ ID NO: 252817 - RNA, 16 nt, Homo sapiens
ggaaugggggccaggc

SEQ ID NO: 252818 - RNA, 23 nt, Homo sapiens
gaaagaggagcgugucucugaac

SEQ ID NO: 252819 - RNA, 18 nt, Homo sapiens
aaucuccauuucugcuca

SEQ ID NO: 252820 - RNA, 22 nt, Homo sapiens
uacaggugugagccacagcacu

SEQ ID NO: 252821 - RNA, 15 nt, Homo sapiens
cuugaggcagggucu

SEQ ID NO: 252822 - RNA, 15 nt, Homo sapiens
ucacaucucuguaga

SEQ ID NO: 252823 - RNA, 13 nt, Homo sapiens
uuuggcucagagu

SEQ ID NO: 252824 - RNA, 17 nt, Homo sapiens
caggacggucugugccc

SEQ ID NO: 252825 - RNA, 15 nt, Homo sapiens
uaccauguugcccag

SEQ ID NO: 252826 - RNA, 14 nt, Homo sapiens
uugguggggccauc

SEQ ID NO: 252827 - RNA, 22 nt, Homo sapiens
cuggacaggcuucgucucagaa

SEQ ID NO: 252828 - RNA, 22 nt, Homo sapiens
uucccuguguacccuccaugua

SEQ ID NO: 252829 - RNA, 19 nt, Homo sapiens
cagaaugacucuggaacca

SEQ ID NO: 252830 - RNA, 15 nt, Homo sapiens
cuugaagcugcucac

SEQ ID NO: 252831 - RNA, 14 nt, Homo sapiens
aguuugcauuccag

SEQ ID NO: 252832 - RNA, 18 nt, Homo sapiens
cucugccuuugugcucug

SEQ ID NO: 252833 - RNA, 13 nt, Homo sapiens
acaucucacuuca

SEQ ID NO: 252834 - RNA, 13 nt, Homo sapiens
gacaggaggccau

SEQ ID NO: 252835 - RNA, 17 nt, Homo sapiens
caccaugaagacagggu

SEQ ID NO: 252836 - RNA, 19 nt, Homo sapiens
cacugaacaugcucaugug

SEQ ID NO: 252837 - RNA, 13 nt, Homo sapiens
ccauugcauucau

SEQ ID NO: 252838 - RNA, 17 nt, Homo sapiens
uugaugagaauccugac

SEQ ID NO: 252839 - RNA, 21 nt, Homo sapiens
aagugcugggauuacaggugu

SEQ ID NO: 252840 - RNA, 16 nt, Homo sapiens
gcuccugucaccauga

SEQ ID NO: 252841 - RNA, 20 nt, Homo sapiens
ccugcagcuccucugccuuu

SEQ ID NO: 252842 - RNA, 20 nt, Homo sapiens
cuggcagaucguggacccuc

SEQ ID NO: 252843 - RNA, 19 nt, Homo sapiens
cgucuugaucagacauuca

SEQ ID NO: 252844 - RNA, 19 nt, Homo sapiens
cuggacaggcuucgucuca

SEQ ID NO: 252845 - RNA, 17 nt, Homo sapiens
gaaggagaaccgugaac

SEQ ID NO: 252846 - RNA, 15 nt, Homo sapiens
uggugucucuugggg

SEQ ID NO: 252847 - RNA, 14 nt, Homo sapiens
gugcagacacucaa

SEQ ID NO: 252848 - RNA, 17 nt, Homo sapiens
ucucguacuuucacauc

SEQ ID NO: 252849 - RNA, 21 nt, Homo sapiens
aagaguguguccacugagaag

SEQ ID NO: 252850 - RNA, 21 nt, Homo sapiens
ccaggccgacaggaggccaug

SEQ ID NO: 252851 - RNA, 16 nt, Homo sapiens
uagucuuagguuucca

SEQ ID NO: 252852 - RNA, 14 nt, Homo sapiens
ugcucauguguaca

SEQ ID NO: 252853 - RNA, 17 nt, Homo sapiens
auucauguuuggugggg

SEQ ID NO: 252854 - RNA, 19 nt, Homo sapiens
gcagacacucaagagcccu

SEQ ID NO: 252855 - RNA, 19 nt, Homo sapiens
uccaucuuacuugcccuuc

SEQ ID NO: 252856 - RNA, 17 nt, Homo sapiens
gcuuugcggcaucucca

SEQ ID NO: 252857 - RNA, 20 nt, Homo sapiens
uccacugagaagaucaauga

SEQ ID NO: 252858 - RNA, 16 nt, Homo sapiens
gcaaccccugcagcuc

SEQ ID NO: 252859 - RNA, 19 nt, Homo sapiens
uuguagagacagggucuca

SEQ ID NO: 252860 - RNA, 22 nt, Homo sapiens
ucagcacguaguuugcauucca

SEQ ID NO: 252861 - RNA, 19 nt, Homo sapiens
ucucacuguguugcccagg

SEQ ID NO: 252862 - RNA, 18 nt, Homo sapiens
uugacgucucuauucugc

SEQ ID NO: 252863 - RNA, 20 nt, Homo sapiens
uguacccuccauguaccuug

SEQ ID NO: 252864 - RNA, 13 nt, Homo sapiens
aacaagugcucuu

SEQ ID NO: 252865 - RNA, 14 nt, Homo sapiens
uucccguaugcuuu

SEQ ID NO: 252866 - RNA, 19 nt, Homo sapiens
uaaauagguuuuucuugcu

SEQ ID NO: 252867 - RNA, 14 nt, Homo sapiens
auccuucuaaagug

SEQ ID NO: 252868 - RNA, 22 nt, Homo sapiens
caucucuuguaaauacaugucc

SEQ ID NO: 252869 - RNA, 18 nt, Homo sapiens
cagcagccucacugcauc

SEQ ID NO: 252870 - RNA, 15 nt, Homo sapiens
cacaucucuguagau

SEQ ID NO: 252871 - RNA, 20 nt, Homo sapiens
accccgagcacgguugccug

SEQ ID NO: 252872 - RNA, 19 nt, Homo sapiens
uuucuucauguucagucac

SEQ ID NO: 252873 - RNA, 19 nt, Homo sapiens
uaucauuuggccgagucag

SEQ ID NO: 252874 - RNA, 14 nt, Homo sapiens
uucuagcaguaugu

SEQ ID NO: 252875 - RNA, 18 nt, Homo sapiens
caggcuggucuugaacuc

SEQ ID NO: 252876 - RNA, 22 nt, Homo sapiens
ugaacuggaaaagaucauugcu

SEQ ID NO: 252877 - RNA, 17 nt, Homo sapiens
ucacgcucagcacacau

SEQ ID NO: 252878 - RNA, 20 nt, Homo sapiens
agaguguguccacugagaag

SEQ ID NO: 252879 - RNA, 16 nt, Homo sapiens
cagaaugacucuggaa

SEQ ID NO: 252880 - RNA, 11 nt, Homo sapiens
gccacuggccc

SEQ ID NO: 252881 - RNA, 16 nt, Homo sapiens
cgagagcugggacuca

SEQ ID NO: 252882 - RNA, 20 nt, Homo sapiens
gcaaaagucauugcugacag

SEQ ID NO: 252883 - RNA, 23 nt, Homo sapiens
agucaugucuuuccuauuugcac

SEQ ID NO: 252884 - RNA, 23 nt, Homo sapiens
guauucuucugacagagccauau

SEQ ID NO: 252885 - RNA, 21 nt, Homo sapiens
guccauguuuauccauguacu

SEQ ID NO: 252886 - RNA, 19 nt, Homo sapiens
ucuuguaaauacauguccc

SEQ ID NO: 252887 - RNA, 18 nt, Homo sapiens
gcauuccagcgucugcug

SEQ ID NO: 252888 - RNA, 20 nt, Homo sapiens
ucagaaggcucuaucugcug

SEQ ID NO: 252889 - RNA, 20 nt, Homo sapiens
acaugaauacgucuugauca

SEQ ID NO: 252890 - RNA, 16 nt, Homo sapiens
uccugugccucaucac

SEQ ID NO: 252891 - RNA, 13 nt, Homo sapiens
cccucucaugguc

SEQ ID NO: 252892 - RNA, 14 nt, Homo sapiens
ccuuucacacugug

SEQ ID NO: 252893 - RNA, 16 nt, Homo sapiens
gcucacuggcuuuagc

SEQ ID NO: 252894 - RNA, 21 nt, Homo sapiens
ucacugccugcagcugagauu

SEQ ID NO: 252895 - RNA, 18 nt, Homo sapiens
auuuuguaucaccucuuc

SEQ ID NO: 252896 - RNA, 21 nt, Homo sapiens
acagugggccugcuggugggc

SEQ ID NO: 252897 - RNA, 19 nt, Homo sapiens
accauugagacauuugcca

SEQ ID NO: 252898 - RNA, 19 nt, Homo sapiens
cacacggucuucacaaaga

SEQ ID NO: 252899 - RNA, 16 nt, Homo sapiens
aaguggugugauccca

SEQ ID NO: 252900 - RNA, 14 nt, Homo sapiens
uccuauuugcacac

SEQ ID NO: 252901 - RNA, 13 nt, Homo sapiens
ucagcgagcauaa

SEQ ID NO: 252902 - RNA, 21 nt, Homo sapiens
acuugcccuucuauacuuucu

SEQ ID NO: 252903 - RNA, 19 nt, Homo sapiens
ucauguaauuuuguaucac

SEQ ID NO: 252904 - RNA, 21 nt, Homo sapiens
uggagagaaguugcccuccag

SEQ ID NO: 252905 - RNA, 23 nt, Homo sapiens
uuucccuguguacccuccaugua

SEQ ID NO: 252906 - RNA, 12 nt, Homo sapiens
aggauuacccac

SEQ ID NO: 252907 - RNA, 12 nt, Homo sapiens
auuucugcucag

SEQ ID NO: 252908 - RNA, 21 nt, Homo sapiens
ccugcacauuguuaugcacuu

SEQ ID NO: 252909 - RNA, 13 nt, Homo sapiens
ugcuuccagugga

SEQ ID NO: 252910 - RNA, 22 nt, Homo sapiens
cugaaaccucuguucucaugaa

SEQ ID NO: 252911 - RNA, 17 nt, Homo sapiens
ucuugaacucuuggccu

SEQ ID NO: 252912 - RNA, 16 nt, Homo sapiens
ucauaaucucuuucca

SEQ ID NO: 252913 - RNA, 18 nt, Homo sapiens
uuucagugcuuugcccuu

SEQ ID NO: 252914 - RNA, 15 nt, Homo sapiens
aaaccucuguucuca

SEQ ID NO: 252915 - RNA, 17 nt, Homo sapiens
guugucuguccugguca

SEQ ID NO: 252916 - RNA, 18 nt, Homo sapiens
uuuucagugcuuugcccu

SEQ ID NO: 252917 - RNA, 20 nt, Homo sapiens
ugcccacugaacaugcucau

SEQ ID NO: 252918 - RNA, 14 nt, Homo sapiens
guucagucacaugu

SEQ ID NO: 252919 - RNA, 15 nt, Homo sapiens
uuuggagagcugcuu

SEQ ID NO: 252920 - RNA, 20 nt, Homo sapiens
ccaagaguguguccacugag

SEQ ID NO: 252921 - RNA, 13 nt, Homo sapiens
ucagacauucaga

SEQ ID NO: 252922 - RNA, 12 nt, Homo sapiens
ugaacaguguga

SEQ ID NO: 252923 - RNA, 20 nt, Homo sapiens
ucucgggugcccugcauuca

SEQ ID NO: 252924 - RNA, 13 nt, Homo sapiens
cugcucacuggcu

SEQ ID NO: 252925 - RNA, 20 nt, Homo sapiens
cuccugcgugugcccacuga

SEQ ID NO: 252926 - RNA, 15 nt, Homo sapiens
gccucacugcaucuu

SEQ ID NO: 252927 - RNA, 12 nt, Homo sapiens
agaaggcucuau

SEQ ID NO: 252928 - RNA, 18 nt, Homo sapiens
ucucacuguguugcccag

SEQ ID NO: 252929 - RNA, 20 nt, Homo sapiens
acugaaaccucuguucucau

SEQ ID NO: 252930 - RNA, 13 nt, Homo sapiens
ggcugaacaggcc

SEQ ID NO: 252931 - RNA, 14 nt, Homo sapiens
uagcaguaugugug

SEQ ID NO: 252932 - RNA, 18 nt, Homo sapiens
uacccuacccugcacauu

SEQ ID NO: 252933 - RNA, 19 nt, Homo sapiens
acugcgccaucaacuccag

SEQ ID NO: 252934 - RNA, 14 nt, Homo sapiens
uccccaauucaugu

SEQ ID NO: 252935 - RNA, 15 nt, Homo sapiens
ccaggcccugcucau

SEQ ID NO: 252936 - RNA, 19 nt, Homo sapiens
gaagcugcucacugcucac

SEQ ID NO: 252937 - RNA, 20 nt, Homo sapiens
gcuggagugaagugguguga

SEQ ID NO: 252938 - RNA, 22 nt, Homo sapiens
aauuuuguaucaccucuucaca

SEQ ID NO: 252939 - RNA, 13 nt, Homo sapiens
agaggauuuggcu

SEQ ID NO: 252940 - RNA, 22 nt, Homo sapiens
cagcuccucugccuuugugcuc

SEQ ID NO: 252941 - RNA, 20 nt, Homo sapiens
acugcugugggcugcucacu

SEQ ID NO: 252942 - RNA, 22 nt, Homo sapiens
cucagauuccccccaucuccau

SEQ ID NO: 252943 - RNA, 14 nt, Homo sapiens
ugcccagaauuuca

SEQ ID NO: 252944 - RNA, 15 nt, Homo sapiens
gcagacacucaagag

SEQ ID NO: 252945 - RNA, 17 nt, Homo sapiens
acucuuguugugcucuu

SEQ ID NO: 252946 - RNA, 20 nt, Homo sapiens
cagggucucacuguguugcc

SEQ ID NO: 252947 - RNA, 19 nt, Homo sapiens
cagaggguggagaugucag

SEQ ID NO: 252948 - RNA, 21 nt, Homo sapiens
cucagcagccucacugcaucu

SEQ ID NO: 252949 - RNA, 14 nt, Homo sapiens
cucacuguguugcc

SEQ ID NO: 252950 - RNA, 23 nt, Homo sapiens
guuucucguacuuucacaucucu

SEQ ID NO: 252951 - RNA, 17 nt, Homo sapiens
aucccagcucacugcag

SEQ ID NO: 252952 - RNA, 14 nt, Homo sapiens
ucuuacuugcccuu

SEQ ID NO: 252953 - RNA, 18 nt, Homo sapiens
uuucacgggcaacacuca

SEQ ID NO: 252954 - RNA, 19 nt, Homo sapiens
uguuggggggccccacgga

SEQ ID NO: 252955 - RNA, 20 nt, Homo sapiens
uucuugcuuugaaugcaugu

SEQ ID NO: 252956 - RNA, 15 nt, Homo sapiens
cccaacaagugcucu

SEQ ID NO: 252957 - RNA, 13 nt, Homo sapiens
gccuuuacaugaa

SEQ ID NO: 252958 - RNA, 20 nt, Homo sapiens
uuccagaacgcccugugucc

SEQ ID NO: 252959 - RNA, 13 nt, Homo sapiens
ucacaugugcucu

SEQ ID NO: 252960 - RNA, 13 nt, Homo sapiens
ucguacuuucaca

SEQ ID NO: 252961 - RNA, 23 nt, Homo sapiens
uuuggggaggaguugucuguccu

SEQ ID NO: 252962 - RNA, 22 nt, Homo sapiens
uccagcgucugcuguugauucc

SEQ ID NO: 252963 - RNA, 22 nt, Homo sapiens
gguuuccacguaagucacugaa

SEQ ID NO: 252964 - RNA, 21 nt, Homo sapiens
uucaguuguggccucauucag

SEQ ID NO: 252965 - RNA, 16 nt, Homo sapiens
uggugucccuuucaca

SEQ ID NO: 252966 - RNA, 16 nt, Homo sapiens
guacuuucacaucucu

SEQ ID NO: 252967 - RNA, 16 nt, Homo sapiens
ucuugaucagacauuc

SEQ ID NO: 252968 - RNA, 22 nt, Homo sapiens
cagaaaaaaaaaaaaaagccuu

SEQ ID NO: 252969 - RNA, 20 nt, Homo sapiens
cugggauuacaggugugagc

SEQ ID NO: 252970 - RNA, 17 nt, Homo sapiens
aguguguguuucuugcu

SEQ ID NO: 252971 - RNA, 14 nt, Homo sapiens
accauguugcccag

SEQ ID NO: 252972 - RNA, 12 nt, Homo sapiens
uguugauuccac

SEQ ID NO: 252973 - RNA, 19 nt, Homo sapiens
cuuagauuucuagcaguau

SEQ ID NO: 252974 - RNA, 14 nt, Homo sapiens
ucuucauguucagu

SEQ ID NO: 252975 - RNA, 22 nt, Homo sapiens
gccugcagcugagauuccagaa

SEQ ID NO: 252976 - RNA, 20 nt, Homo sapiens
guguugcccaggcuggucuu

SEQ ID NO: 252977 - RNA, 16 nt, Homo sapiens
auguuuauccauguac

SEQ ID NO: 252978 - RNA, 19 nt, Homo sapiens
cucagcacacaugcauccu

SEQ ID NO: 252979 - RNA, 16 nt, Homo sapiens
cuguugauuccacuga

SEQ ID NO: 252980 - RNA, 21 nt, Homo sapiens
ccucacucucgccaucuggca

SEQ ID NO: 252981 - RNA, 17 nt, Homo sapiens
cgcucagcacacaugca

SEQ ID NO: 252982 - RNA, 19 nt, Homo sapiens
cgcccuguguccacaguga

SEQ ID NO: 252983 - RNA, 17 nt, Homo sapiens
ucaugggucugcccuug

SEQ ID NO: 252984 - RNA, 13 nt, Homo sapiens
uacccuccaugua

SEQ ID NO: 252985 - RNA, 13 nt, Homo sapiens
uugaagcugcuca

SEQ ID NO: 252986 - RNA, 21 nt, Homo sapiens
uucgcuggcugaucauugcag

SEQ ID NO: 252987 - RNA, 12 nt, Homo sapiens
cggucuucacaa

SEQ ID NO: 252988 - RNA, 15 nt, Homo sapiens
ggcaucuccauuuca

SEQ ID NO: 252989 - RNA, 17 nt, Homo sapiens
caaccccugcagcuccu

SEQ ID NO: 252990 - RNA, 22 nt, Homo sapiens
uucacagaggcgguuguaagag

SEQ ID NO: 252991 - RNA, 17 nt, West Nile virus
gacuggguuaacaaagg

SEQ ID NO: 252992 - RNA, 14 nt, West Nile virus
cugcgaggugaucc

SEQ ID NO: 252993 - RNA, 19 nt, West Nile virus
ggccagauuaaugcugcca

SEQ ID NO: 252994 - RNA, 16 nt, West Nile virus
ccagauuaaugcugcc

SEQ ID NO: 252995 - RNA, 16 nt, West Nile virus
cacacuuuaaugugcc

SEQ ID NO: 252996 - RNA, 14 nt, West Nile virus
aguagacggugcug

SEQ ID NO: 252997 - RNA, 18 nt, West Nile virus
aguuaguuuaguguaaau

SEQ ID NO: 252998 - RNA, 21 nt, West Nile virus
aggccagauuaaugcugccac

SEQ ID NO: 252999 - RNA, 18 nt, West Nile virus
accccaggaggacugggu

SEQ ID NO: 253000 - RNA, 22 nt, West Nile virus
agaccacacuuuaaugugccac

SEQ ID NO: 253001 - RNA, 15 nt, West Nile virus
acugggugaccaaag

SEQ ID NO: 253002 - RNA, 20 nt, West Nile virus
gaccacacuuuaaugugcca

SEQ ID NO: 253003 - RNA, 17 nt, West Nile virus
gccagauuaaugcugcc

SEQ ID NO: 253004 - RNA, 13 nt, West Nile virus
cggagagugcagu

SEQ ID NO: 253005 - RNA, 16 nt, West Nile virus
ccggaaguugaguaga

SEQ ID NO: 253006 - RNA, 16 nt, West Nile virus
cccaggaggacugggu

SEQ ID NO: 253007 - RNA, 16 nt, West Nile virus
cccagguggacugggu

SEQ ID NO: 253008 - RNA, 17 nt, West Nile virus
ccccaggaggacugggu

SEQ ID NO: 253009 - RNA, 17 nt, West Nile virus
ccccagguggacugggu

SEQ ID NO: 253010 - RNA, 15 nt, West Nile virus
guagacggugcugcc

SEQ ID NO: 253011 - RNA, 20 nt, West Nile virus
ugcgauagugccccaggugg

SEQ ID NO: 253012 - RNA, 15 nt, West Nile virus
ugcggagagugcagu

SEQ ID NO: 253013 - RNA, 15 nt, West Nile virus
ggcucaaccccagga

SEQ ID NO: 253014 - RNA, 15 nt, West Nile virus
acuggguuaacaaag

SEQ ID NO: 253015 - RNA, 22 nt, West Nile virus
agugccccagguggacuggguu

SEQ ID NO: 253016 - RNA, 19 nt, West Nile virus
aggaggaccccacgugcuu

SEQ ID NO: 253017 - RNA, 20 nt, West Nile virus
ccaggaggacugggugacca

SEQ ID NO: 253018 - RNA, 20 nt, West Nile virus
ccucaaagcccagugucaga

SEQ ID NO: 253019 - RNA, 20 nt, West Nile virus
cccgcguaaaaaagugcacg

SEQ ID NO: 253020 - RNA, 17 nt, West Nile virus
cccaggaggacugggug

SEQ ID NO: 253021 - RNA, 17 nt, West Nile virus
cccagguggacuggguu

SEQ ID NO: 253022 - RNA, 15 nt, West Nile virus
cagauuaaugcugcc

SEQ ID NO: 253023 - RNA, 20 nt, West Nile virus
agaggagaccccgcguaaaa

SEQ ID NO: 253024 - RNA, 18 nt, West Nile virus
aguagacggugcugccug

SEQ ID NO: 253025 - RNA, 22 nt, West Nile virus
agugcacggcccaacuuggcug

SEQ ID NO: 253026 - RNA, 13 nt, West Nile virus
agguggacugggu

SEQ ID NO: 253027 - RNA, 13 nt, West Nile virus
caaagcccagugu

SEQ ID NO: 253028 - RNA, 20 nt, West Nile virus
aaccccaggaggacugggug

SEQ ID NO: 253029 - RNA, 14 nt, West Nile virus
uagacggugcugcc

SEQ ID NO: 253030 - RNA, 14 nt, West Nile virus
guguuaaccaggga

SEQ ID NO: 253031 - RNA, 23 nt, West Nile virus
gucugcgauagugccccaggugg

SEQ ID NO: 253032 - RNA, 20 nt, West Nile virus
ugaccaaagcugcgagguga

SEQ ID NO: 253033 - RNA, 16 nt, West Nile virus
gacugggugaccaaag

SEQ ID NO: 253034 - RNA, 19 nt, West Nile virus
gccccagguggacuggguu

SEQ ID NO: 253035 - RNA, 17 nt, West Nile virus
gccucaaagcccagugu

SEQ ID NO: 253036 - RNA, 20 nt, West Nile virus
cuagagguuagaggagaccc

SEQ ID NO: 253037 - RNA, 16 nt, West Nile virus
cguaaaaaagugcacg

SEQ ID NO: 253038 - RNA, 17 nt, West Nile virus
ccagauuaaugcugcca

SEQ ID NO: 253039 - RNA, 16 nt, West Nile virus
cgauagugccccaggu

SEQ ID NO: 253040 - RNA, 15 nt, Homo sapiens
aagugagaacaaauu

SEQ ID NO: 253041 - RNA, 18 nt, Homo sapiens
gcucuuaaugauuuacag

SEQ ID NO: 253042 - RNA, 16 nt, Homo sapiens
ugaucaagcaauaaua

SEQ ID NO: 253043 - RNA, 18 nt, Homo sapiens
uccagggacauguggaaa

SEQ ID NO: 253044 - RNA, 16 nt, Homo sapiens
caucuauauauauaug

SEQ ID NO: 253045 - RNA, 23 nt, Homo sapiens
cuuauuccccugcccagguguga

SEQ ID NO: 253046 - RNA, 18 nt, Homo sapiens
ugggcagcuaagcagucu

SEQ ID NO: 253047 - RNA, 17 nt, Homo sapiens
aaauaaggaacaugaaa

SEQ ID NO: 253048 - RNA, 16 nt, Homo sapiens
aaguauuggcaaagau

SEQ ID NO: 253049 - RNA, 14 nt, Homo sapiens
cagaagaugugaug

SEQ ID NO: 253050 - RNA, 14 nt, Homo sapiens
uggcaacugcugau

SEQ ID NO: 253051 - RNA, 23 nt, Homo sapiens
augccacagaguaugaaggaaga

SEQ ID NO: 253052 - RNA, 19 nt, Homo sapiens
ucacaacccaucuaccccu

SEQ ID NO: 253053 - RNA, 21 nt, Homo sapiens
aucaauggagcaugugugcaa

SEQ ID NO: 253054 - RNA, 22 nt, Homo sapiens
gaacacuauaaaaacagcuccu

SEQ ID NO: 253055 - RNA, 23 nt, Homo sapiens
accaaggaggaguuuaaacugaa

SEQ ID NO: 253056 - RNA, 17 nt, Homo sapiens
guacuuugaagauguca

SEQ ID NO: 253057 - RNA, 20 nt, Homo sapiens
uauucugucuggcauuacaa

SEQ ID NO: 253058 - RNA, 17 nt, Homo sapiens
uggagcaugugugcaaa

SEQ ID NO: 253059 - RNA, 17 nt, Homo sapiens
ugucauugauacaugca

SEQ ID NO: 253060 - RNA, 17 nt, Homo sapiens
cuggcauuacaauugca

SEQ ID NO: 253061 - RNA, 16 nt, Homo sapiens
aauaagcagaagccau

SEQ ID NO: 253062 - RNA, 14 nt, Homo sapiens
cucuuguacuugau

SEQ ID NO: 253063 - RNA, 22 nt, Homo sapiens
aagauguggggaaaauucucau

SEQ ID NO: 253064 - RNA, 18 nt, Homo sapiens
guaggaaaaugaagaaga

SEQ ID NO: 253065 - RNA, 16 nt, Homo sapiens
uuugccuaauggcaaa

SEQ ID NO: 253066 - RNA, 19 nt, Homo sapiens
caauugucauugauacaug

SEQ ID NO: 253067 - RNA, 15 nt, Homo sapiens
uauggacacacaguc

SEQ ID NO: 253068 - RNA, 16 nt, Homo sapiens
cugaagauacaugucu

SEQ ID NO: 253069 - RNA, 14 nt, Homo sapiens
agguaaaacaaauc

SEQ ID NO: 253070 - RNA, 16 nt, Homo sapiens
ugcaacucaucuucac

SEQ ID NO: 253071 - RNA, 13 nt, Homo sapiens
caacccacaccaa

SEQ ID NO: 253072 - RNA, 17 nt, Homo sapiens
gcaagaaggagcucagu

SEQ ID NO: 253073 - RNA, 16 nt, Homo sapiens
agagucaacaguaucu

SEQ ID NO: 253074 - RNA, 13 nt, Homo sapiens
cuaaauucaggug

SEQ ID NO: 253075 - RNA, 17 nt, Homo sapiens
cuuucuauuuaugcaac

SEQ ID NO: 253076 - RNA, 12 nt, Homo sapiens
gacugaugccag

SEQ ID NO: 253077 - RNA, 20 nt, Homo sapiens
acagacugaugccagacaaa

SEQ ID NO: 253078 - RNA, 19 nt, Homo sapiens
ugucauugauacaugcauu

SEQ ID NO: 253079 - RNA, 19 nt, Homo sapiens
auuccaauauaaaggcagg

SEQ ID NO: 253080 - RNA, 17 nt, Homo sapiens
uugccuaauggcaaaac

SEQ ID NO: 253081 - RNA, 20 nt, Homo sapiens
acguaaaucuguucaaggaa

SEQ ID NO: 253082 - RNA, 13 nt, Homo sapiens
cuggaugaaguua

SEQ ID NO: 253083 - RNA, 16 nt, Homo sapiens
guuuucaggaugagau

SEQ ID NO: 253084 - RNA, 14 nt, Homo sapiens
uguaucguauugag

SEQ ID NO: 253085 - RNA, 20 nt, Homo sapiens
gcuccuggacucauugcuuc

SEQ ID NO: 253086 - RNA, 18 nt, Homo sapiens
ugguaaccucuacuauga

SEQ ID NO: 253087 - RNA, 18 nt, Homo sapiens
ucucuucugccuuuauga

SEQ ID NO: 253088 - RNA, 14 nt, Homo sapiens
aguuucuucaaucu

SEQ ID NO: 253089 - RNA, 15 nt, Homo sapiens
cuuuccuuuccauug

SEQ ID NO: 253090 - RNA, 13 nt, Homo sapiens
ucaggaacagucu

SEQ ID NO: 253091 - RNA, 23 nt, Homo sapiens
acaaaccuugggaagauguauca

SEQ ID NO: 253092 - RNA, 15 nt, Homo sapiens
acaugaaaagcaaau

SEQ ID NO: 253093 - RNA, 13 nt, Homo sapiens
aacucaucuucac

SEQ ID NO: 253094 - RNA, 14 nt, Homo sapiens
cuucagguagaaau

SEQ ID NO: 253095 - RNA, 14 nt, Homo sapiens
aagcagaagccaua

SEQ ID NO: 253096 - RNA, 13 nt, Homo sapiens
uuaucuagcuguc

SEQ ID NO: 253097 - RNA, 13 nt, Homo sapiens
cuucugaccucua

SEQ ID NO: 253098 - RNA, 19 nt, Homo sapiens
cugugaucaagcaauaaua

SEQ ID NO: 253099 - RNA, 22 nt, Homo sapiens
acaugcauugcucuuauucugu

SEQ ID NO: 253100 - RNA, 21 nt, Homo sapiens
auaaggaacaugaaaagcaaa

SEQ ID NO: 253101 - RNA, 17 nt, Homo sapiens
agaaaacuugaauucau

SEQ ID NO: 253102 - RNA, 15 nt, Homo sapiens
aaaacuaaacugcug

SEQ ID NO: 253103 - RNA, 22 nt, Homo sapiens
auguuuucagugcugugucauu

SEQ ID NO: 253104 - RNA, 15 nt, Homo sapiens
uggggauacuggcaa

SEQ ID NO: 253105 - RNA, 23 nt, Homo sapiens
aagaucaggccaaccccaaagaa

SEQ ID NO: 253106 - RNA, 18 nt, Homo sapiens
ucaaguauuggcaaagau

SEQ ID NO: 253107 - RNA, 23 nt, Homo sapiens
ugcaguuuugccuaauggcaaaa

SEQ ID NO: 253108 - RNA, 13 nt, Homo sapiens
ucaggaugagaug

SEQ ID NO: 253109 - RNA, 16 nt, Homo sapiens
auaauugccacugaga

SEQ ID NO: 253110 - RNA, 15 nt, Homo sapiens
ccugguuugaagaaa

SEQ ID NO: 253111 - RNA, 18 nt, Homo sapiens
guaacaauuauguuuuca

SEQ ID NO: 253112 - RNA, 21 nt, Homo sapiens
agacugaugccagacaaaccu

SEQ ID NO: 253113 - RNA, 22 nt, Homo sapiens
uuccugggaauaacauggugag

SEQ ID NO: 253114 - RNA, 23 nt, Homo sapiens
ccuggaguacuuugaagauguca

SEQ ID NO: 253115 - RNA, 20 nt, Homo sapiens
uaggcacccauccuagagaa

SEQ ID NO: 253116 - RNA, 15 nt, Homo sapiens
acugugcaguuuuca

SEQ ID NO: 253117 - RNA, 23 nt, Homo sapiens
auccuguaguacaagauuaucuu

SEQ ID NO: 253118 - RNA, 17 nt, Homo sapiens
auauuaugcaggggcaa

SEQ ID NO: 253119 - RNA, 20 nt, Homo sapiens
guuauacaaccaucaaagug

SEQ ID NO: 253120 - RNA, 13 nt, Homo sapiens
aguauuaaaacau

SEQ ID NO: 253121 - RNA, 20 nt, Homo sapiens
uuaugcucuuaaugauuuac

SEQ ID NO: 253122 - RNA, 23 nt, Homo sapiens
aaaaccugaagaguucacuuuug

SEQ ID NO: 253123 - RNA, 14 nt, Homo sapiens
guauuggcaaagau

SEQ ID NO: 253124 - RNA, 14 nt, Homo sapiens
gguaucccaaaaau

SEQ ID NO: 253125 - RNA, 14 nt, Homo sapiens
agaugguguaugcu

SEQ ID NO: 253126 - RNA, 24 nt, Homo sapiens
gaaggcuacauauacauaguugcu

SEQ ID NO: 253127 - RNA, 15 nt, Homo sapiens
ucaucccauugucuu

SEQ ID NO: 253128 - RNA, 18 nt, Homo sapiens
ugcuuauccuuccacgga

SEQ ID NO: 253129 - RNA, 17 nt, Homo sapiens
cuaaacugcugcaaaag

SEQ ID NO: 253130 - RNA, 15 nt, Homo sapiens
cuaaguauuaaaaca

SEQ ID NO: 253131 - RNA, 22 nt, Homo sapiens
aaccccaaagaagaagugacca

SEQ ID NO: 253132 - RNA, 17 nt, Homo sapiens
aaugagugaaucaccug

SEQ ID NO: 253133 - RNA, 19 nt, Homo sapiens
cagaaaauuguacaaccug

SEQ ID NO: 253134 - RNA, 21 nt, Homo sapiens
cuuucagguuuacuauguuua

SEQ ID NO: 253135 - RNA, 21 nt, Homo sapiens
uaggguagaggggaagucaga

SEQ ID NO: 253136 - RNA, 17 nt, Homo sapiens
gacugcauggagucuuc

SEQ ID NO: 253137 - RNA, 17 nt, Homo sapiens
agucaacaguaucugug

SEQ ID NO: 253138 - RNA, 20 nt, Homo sapiens
cucaaguuucuucaaucuga

SEQ ID NO: 253139 - RNA, 23 nt, Homo sapiens
uagauauuagcccagaaauguua

SEQ ID NO: 253140 - RNA, 18 nt, Homo sapiens
ugauacaugcauugcucu

SEQ ID NO: 253141 - RNA, 12 nt, Homo sapiens
agauacaugucu

SEQ ID NO: 253142 - RNA, 17 nt, Homo sapiens
aaucaaguauuggcaaa

SEQ ID NO: 253143 - RNA, 15 nt, Homo sapiens
uugcaguuuugccua

SEQ ID NO: 253144 - RNA, 22 nt, Homo sapiens
auugaguggcugcccugcagaa

SEQ ID NO: 253145 - RNA, 17 nt, Homo sapiens
gaaauacguccuuccac

SEQ ID NO: 253146 - RNA, 13 nt, Homo sapiens
ggcuacauauaca

SEQ ID NO: 253147 - RNA, 19 nt, Homo sapiens
uaugcuguauccacaaauc

SEQ ID NO: 253148 - RNA, 21 nt, Homo sapiens
aaaagagucaacaguaucugu

SEQ ID NO: 253149 - RNA, 22 nt, Homo sapiens
uacaauugcaguuuugccuaau

SEQ ID NO: 253150 - RNA, 22 nt, Homo sapiens
ucucgcucccuuucagguuuac

SEQ ID NO: 253151 - RNA, 21 nt, Homo sapiens
ccuggaguacuuugaagaugu

SEQ ID NO: 253152 - RNA, 15 nt, Homo sapiens
cauaagcuacugaug

SEQ ID NO: 253153 - RNA, 13 nt, Homo sapiens
ucccaaaaauaaa

SEQ ID NO: 253154 - RNA, 22 nt, Homo sapiens
ggccugauuuaucuagcugucc

SEQ ID NO: 253155 - RNA, 13 nt, Homo sapiens
cugcccaggugug

SEQ ID NO: 253156 - RNA, 15 nt, Homo sapiens
auuuuaggcacccau

SEQ ID NO: 253157 - RNA, 17 nt, Homo sapiens
guuuccaaugaugggau

SEQ ID NO: 253158 - RNA, 17 nt, Homo sapiens
aaggaagaucaggccaa

SEQ ID NO: 253159 - RNA, 12 nt, Homo sapiens
agaucugcuguc

SEQ ID NO: 253160 - RNA, 12 nt, Homo sapiens
uaaaaaugacaa

SEQ ID NO: 253161 - RNA, 20 nt, Homo sapiens
cuaggagcugguguggccaa

SEQ ID NO: 253162 - RNA, 15 nt, Homo sapiens
uacagacugaugcca

SEQ ID NO: 253163 - RNA, 17 nt, Homo sapiens
aaccaucaaaguggcaa

SEQ ID NO: 253164 - RNA, 23 nt, Homo sapiens
uggacucauugcuucacaaccca

SEQ ID NO: 253165 - RNA, 21 nt, Homo sapiens
uaaaccuuugguaaucuucaa

SEQ ID NO: 253166 - RNA, 16 nt, Homo sapiens
acuuugaagaugucau

SEQ ID NO: 253167 - RNA, 17 nt, Homo sapiens
cuuucuccagaucagac

SEQ ID NO: 253168 - RNA, 23 nt, Homo sapiens
ucuguguuuguacugugcaguuu

SEQ ID NO: 253169 - RNA, 21 nt, Homo sapiens
aaggcagggccugauuuaucu

SEQ ID NO: 253170 - RNA, 20 nt, Homo sapiens
ucuuuuccaacacaucuaua

SEQ ID NO: 253171 - RNA, 22 nt, Homo sapiens
caaucuggggauacuggcaaag

SEQ ID NO: 253172 - RNA, 11 nt, Homo sapiens
uugauacaugc

SEQ ID NO: 253173 - RNA, 22 nt, Homo sapiens
ucacucauucccauguugucaa

SEQ ID NO: 253174 - RNA, 21 nt, Homo sapiens
ucaauggagcaugugugcaaa

SEQ ID NO: 253175 - RNA, 16 nt, Homo sapiens
gacucuuguacuugau

SEQ ID NO: 253176 - RNA, 23 nt, Homo sapiens
auucucuguuugucuguugugga

SEQ ID NO: 253177 - RNA, 15 nt, Homo sapiens
cauuguagcucuuug

SEQ ID NO: 253178 - RNA, 15 nt, Homo sapiens
aagaaauaacaaauu

SEQ ID NO: 253179 - RNA, 18 nt, Homo sapiens
uaugcaacucaucuucac

SEQ ID NO: 253180 - RNA, 23 nt, Homo sapiens
gcagccugccuggaguacuuuga

SEQ ID NO: 253181 - RNA, 16 nt, Homo sapiens
ccucucaauugucauu

SEQ ID NO: 253182 - RNA, 16 nt, Homo sapiens
aaaauaaggaacauga

SEQ ID NO: 253183 - RNA, 17 nt, Homo sapiens
ugccacgcccccagaaa

SEQ ID NO: 253184 - RNA, 19 nt, Homo sapiens
caaccugugaucaagcaau

SEQ ID NO: 253185 - RNA, 16 nt, Homo sapiens
accccuggaugaaguu

SEQ ID NO: 253186 - RNA, 15 nt, Homo sapiens
ccuuuaugagauugg

SEQ ID NO: 253187 - RNA, 16 nt, Homo sapiens
ugcuaaauaaacaaca

SEQ ID NO: 253188 - RNA, 19 nt, Homo sapiens
uauucugucuggcauuaca

SEQ ID NO: 253189 - RNA, 20 nt, Homo sapiens
acuuuaauuucucugcauca

SEQ ID NO: 253190 - RNA, 22 nt, Homo sapiens
cuuuuguuccccagcccuaaga

SEQ ID NO: 253191 - RNA, 20 nt, Homo sapiens
uuaaacugaaugaacaaccu

SEQ ID NO: 253192 - RNA, 15 nt, Homo sapiens
auaauauacuaugca

SEQ ID NO: 253193 - RNA, 14 nt, Homo sapiens
cugagagaucugcu

SEQ ID NO: 253194 - RNA, 22 nt, Homo sapiens
ucuggcauuacaauugcaguuu

SEQ ID NO: 253195 - RNA, 14 nt, Homo sapiens
gauacaugucuuuc

SEQ ID NO: 253196 - RNA, 15 nt, Homo sapiens
agggacauguggaaa

SEQ ID NO: 253197 - RNA, 23 nt, Homo sapiens
gggccugauuuaucuagcugucc

SEQ ID NO: 253198 - RNA, 16 nt, Homo sapiens
uggcugcccugcagaa

SEQ ID NO: 253199 - RNA, 19 nt, Homo sapiens
aguauuggcaaagaugugg

SEQ ID NO: 253200 - RNA, 14 nt, Homo sapiens
caugugugcaaaaa

SEQ ID NO: 253201 - RNA, 18 nt, Homo sapiens
ucaugguccccauggcau

SEQ ID NO: 253202 - RNA, 18 nt, Homo sapiens
ucagggcagccugccugg

SEQ ID NO: 253203 - RNA, 23 nt, Homo sapiens
uugaagaugucaucccauugucu

SEQ ID NO: 253204 - RNA, 19 nt, Homo sapiens
aggcuacauauacauaguu

SEQ ID NO: 253205 - RNA, 14 nt, Homo sapiens
aucaggccaacccc

SEQ ID NO: 253206 - RNA, 12 nt, Homo sapiens
ucccaaggcagc

SEQ ID NO: 253207 - RNA, 17 nt, Homo sapiens
aaagauuuaaaauaauu

SEQ ID NO: 253208 - RNA, 18 nt, Homo sapiens
aagaucaggccaacccca

SEQ ID NO: 253209 - RNA, 19 nt, Homo sapiens
cuguaacaauuauguuuuc

SEQ ID NO: 253210 - RNA, 23 nt, Homo sapiens
ugcccaauaagcagaagccauaa

SEQ ID NO: 253211 - RNA, 19 nt, Homo sapiens
aggcuaguugggaugggca

SEQ ID NO: 253212 - RNA, 12 nt, Homo sapiens
uuauuaugcucu

SEQ ID NO: 253213 - RNA, 20 nt, Homo sapiens
caagauuaucuuauuccccu

SEQ ID NO: 253214 - RNA, 17 nt, Homo sapiens
caaguauuggcaaagau

SEQ ID NO: 253215 - RNA, 21 nt, Homo sapiens
uuacaauugcaguuuugccua

SEQ ID NO: 253216 - RNA, 23 nt, Homo sapiens
aaacagcuccucuauauuuccac

SEQ ID NO: 253217 - RNA, 22 nt, Homo sapiens
uaucaauggagcaugugugcaa

SEQ ID NO: 253218 - RNA, 17 nt, Homo sapiens
agcuaguucccaugacu

SEQ ID NO: 253219 - RNA, 18 nt, Homo sapiens
uuacaauugcaguuuugc

SEQ ID NO: 253220 - RNA, 20 nt, Homo sapiens
uaucuguguuuguacugugc

SEQ ID NO: 253221 - RNA, 14 nt, Homo sapiens
acaauugcaguuuu

SEQ ID NO: 253222 - RNA, 18 nt, Homo sapiens
acuuuuguuauuaugcuc

SEQ ID NO: 253223 - RNA, 16 nt, Homo sapiens
ucccauguugucaaua

SEQ ID NO: 253224 - RNA, 14 nt, Homo sapiens
ccugcagaagaugu

SEQ ID NO: 253225 - RNA, 13 nt, Homo sapiens
uccacggacucaa

SEQ ID NO: 253226 - RNA, 23 nt, Homo sapiens
agaaugagugaaucaccuguggu

SEQ ID NO: 253227 - RNA, 20 nt, Homo sapiens
aagcagucuucucuucugcc

SEQ ID NO: 253228 - RNA, 15 nt, Homo sapiens
aucuauguguaugca

SEQ ID NO: 253229 - RNA, 16 nt, Homo sapiens
uguggcaacugcugau

SEQ ID NO: 253230 - RNA, 22 nt, Homo sapiens
guuuucagugcugugucauucc

SEQ ID NO: 253231 - RNA, 14 nt, Homo sapiens
cugugaucaagcaa

SEQ ID NO: 253232 - RNA, 15 nt, Homo sapiens
aggaagaucaggcca

SEQ ID NO: 253233 - RNA, 13 nt, Homo sapiens
ccuguaguacaag

SEQ ID NO: 253234 - RNA, 19 nt, Homo sapiens
ucugaagauacaugucuuu

SEQ ID NO: 253235 - RNA, 21 nt, Homo sapiens
ggaugggcagcuaagcagucu

SEQ ID NO: 253236 - RNA, 16 nt, Homo sapiens
ucccauuggcaaaaga

SEQ ID NO: 253237 - RNA, 18 nt, Homo sapiens
uggggcauauucaucuac

SEQ ID NO: 253238 - RNA, 16 nt, Homo sapiens
augcaacucaucuuca

SEQ ID NO: 253239 - RNA, 22 nt, Homo sapiens
gaaaaugaagaagaaaauagaa

SEQ ID NO: 253240 - RNA, 14 nt, Homo sapiens
ugaaucaccugugg

SEQ ID NO: 253241 - RNA, 22 nt, Homo sapiens
acuuuuguuauuaugcucuuaa

SEQ ID NO: 253242 - RNA, 14 nt, Homo sapiens
gguuauaugucuua

SEQ ID NO: 253243 - RNA, 15 nt, Homo sapiens
augagaugacagaua

SEQ ID NO: 253244 - RNA, 19 nt, Homo sapiens
cauucccauguugucaaua

SEQ ID NO: 253245 - RNA, 15 nt, Homo sapiens
gauggggcauauuca

SEQ ID NO: 253246 - RNA, 14 nt, Homo sapiens
cugcaucaggugua

SEQ ID NO: 253247 - RNA, 20 nt, Homo sapiens
auaacaaauuaaaagcuaua

SEQ ID NO: 253248 - RNA, 17 nt, Homo sapiens
agauguuauacaaccau

SEQ ID NO: 253249 - RNA, 20 nt, Homo sapiens
aacagguuuguuugugcuuu

SEQ ID NO: 253250 - RNA, 21 nt, Homo sapiens
agcuguggagacucuuguacu

SEQ ID NO: 253251 - RNA, 15 nt, Homo sapiens
aaucuguucaaggaa

SEQ ID NO: 253252 - RNA, 12 nt, Homo sapiens
caauaagcagaa

SEQ ID NO: 253253 - RNA, 19 nt, Homo sapiens
agaugucaucccauugucu

SEQ ID NO: 253254 - RNA, 18 nt, Homo sapiens
agaugugaugaauuaucc

SEQ ID NO: 253255 - RNA, 17 nt, Homo sapiens
ccagaucagacuuuaau

SEQ ID NO: 253256 - RNA, 17 nt, Homo sapiens
aguguugccuaaguauu

SEQ ID NO: 253257 - RNA, 17 nt, Homo sapiens
auauaggggcaauguca

SEQ ID NO: 253258 - RNA, 14 nt, Homo sapiens
cuucacagauuguu

SEQ ID NO: 253259 - RNA, 12 nt, Homo sapiens
uacugugcaguu

SEQ ID NO: 253260 - RNA, 16 nt, Homo sapiens
acauacacacauuaga

SEQ ID NO: 253261 - RNA, 19 nt, Homo sapiens
uggaguacuuugaagaugu

SEQ ID NO: 253262 - RNA, 19 nt, Homo sapiens
accuugggaagauguauca

SEQ ID NO: 253263 - RNA, 22 nt, Homo sapiens
auugauacaugcauugcucuua

SEQ ID NO: 253264 - RNA, 16 nt, Homo sapiens
aaauaaaaauauuaaa

SEQ ID NO: 253265 - RNA, 14 nt, Homo sapiens
ugauagauccagau

SEQ ID NO: 253266 - RNA, 14 nt, Homo sapiens
cauggacuuuauaa

SEQ ID NO: 253267 - RNA, 19 nt, Homo sapiens
gaucagacuuuaauuucuc

SEQ ID NO: 253268 - RNA, 21 nt, Homo sapiens
uagguaggaaaaugaagaaga

SEQ ID NO: 253269 - RNA, 20 nt, Homo sapiens
uacugcaagaaggagcucag

SEQ ID NO: 253270 - RNA, 16 nt, Homo sapiens
uggcauuacaauugca

SEQ ID NO: 253271 - RNA, 22 nt, Homo sapiens
cccauccuagagaaaacuugaa

SEQ ID NO: 253272 - RNA, 12 nt, Homo sapiens
ucccauuggcaa

SEQ ID NO: 253273 - RNA, 14 nt, Homo sapiens
auuaugcucuuaau

SEQ ID NO: 253274 - RNA, 23 nt, Homo sapiens
uguaacaauuauguuuucagugc

SEQ ID NO: 253275 - RNA, 23 nt, Homo sapiens
guccaagcuguggagacucuugu

SEQ ID NO: 253276 - RNA, 19 nt, Homo sapiens
aggugagaguauagugcau

SEQ ID NO: 253277 - RNA, 15 nt, Homo sapiens
gaaugaacaaccucg

SEQ ID NO: 253278 - RNA, 21 nt, Homo sapiens
cacggacucaaguuucuucaa

SEQ ID NO: 253279 - RNA, 21 nt, Homo sapiens
gagcugguguggccaagcaca

SEQ ID NO: 253280 - RNA, 16 nt, Homo sapiens
guaagugagaacaaau

SEQ ID NO: 253281 - RNA, 18 nt, Homo sapiens
auauucaagguuauaugu

SEQ ID NO: 253282 - RNA, 15 nt, Homo sapiens
augagaaauuaccaa

SEQ ID NO: 253283 - RNA, 13 nt, Homo sapiens
aggaaucaggcaa

SEQ ID NO: 253284 - RNA, 20 nt, Homo sapiens
accucggcuccuggacucau

SEQ ID NO: 253285 - RNA, 20 nt, Homo sapiens
acaaccugugaucaagcaau

SEQ ID NO: 253286 - RNA, 19 nt, Homo sapiens
uaugcaggggcaaacaccu

SEQ ID NO: 253287 - RNA, 13 nt, Homo sapiens
aagauaguugaaa

SEQ ID NO: 253288 - RNA, 15 nt, Homo sapiens
acaagauuaucuuau

SEQ ID NO: 253289 - RNA, 12 nt, Homo sapiens
cacucauuccca

SEQ ID NO: 253290 - RNA, 12 nt, Homo sapiens
uacaaccuguga

SEQ ID NO: 253291 - RNA, 22 nt, Homo sapiens
uaguugcuucuuuccuuuccau

SEQ ID NO: 253292 - RNA, 15 nt, Homo sapiens
cugcagaagauguga

SEQ ID NO: 253293 - RNA, 19 nt, Homo sapiens
gauuucugacuuggggaaa

SEQ ID NO: 253294 - RNA, 17 nt, Homo sapiens
ucuauaauugccacuga

SEQ ID NO: 253295 - RNA, 22 nt, Homo sapiens
uucaaucugaagauacaugucu

SEQ ID NO: 253296 - RNA, 20 nt, Homo sapiens
auuucucugcaucaggugua

SEQ ID NO: 253297 - RNA, 14 nt, Homo sapiens
aagcaauaauaauu

SEQ ID NO: 253298 - RNA, 13 nt, Homo sapiens
guagcucuuugcc

SEQ ID NO: 253299 - RNA, 12 nt, Homo sapiens
augugugcaaaa

SEQ ID NO: 253300 - RNA, 14 nt, Homo sapiens
caacucaucuucac

SEQ ID NO: 253301 - RNA, 15 nt, Homo sapiens
cuucacagauuguuc

SEQ ID NO: 253302 - RNA, 19 nt, Homo sapiens
uaaacugaaugaacaaccu

SEQ ID NO: 253303 - RNA, 19 nt, Homo sapiens
gcaaaagagucaacaguau

SEQ ID NO: 253304 - RNA, 15 nt, Homo sapiens
ucaacaguaucugug

SEQ ID NO: 253305 - RNA, 18 nt, Homo sapiens
ucuggggauacuggcaaa

SEQ ID NO: 253306 - RNA, 14 nt, Homo sapiens
ucccauuggcaaaa

SEQ ID NO: 253307 - RNA, 17 nt, Homo sapiens
cuucuuuccuuuccauu

SEQ ID NO: 253308 - RNA, 13 nt, Homo sapiens
auauaggggcaau

SEQ ID NO: 253309 - RNA, 16 nt, Homo sapiens
cuucacaacccaucua

SEQ ID NO: 253310 - RNA, 15 nt, Homo sapiens
agcuaagcagucuuc

SEQ ID NO: 253311 - RNA, 12 nt, Homo sapiens
gaagauguauca

SEQ ID NO: 253312 - RNA, 14 nt, Homo sapiens
uguauccacaaauc

SEQ ID NO: 253313 - RNA, 21 nt, Homo sapiens
uccugguuugaagaaauaaca

SEQ ID NO: 253314 - RNA, 20 nt, Homo sapiens
augcaacucaucuucacaga

SEQ ID NO: 253315 - RNA, 23 nt, Homo sapiens
caaaaugguaaccucuacuauga

SEQ ID NO: 253316 - RNA, 17 nt, Homo sapiens
aaggaaaaaauccucac

SEQ ID NO: 253317 - RNA, 22 nt, Homo sapiens
gaaaauuguacaaccugugauc

SEQ ID NO: 253318 - RNA, 17 nt, Homo sapiens
ccugcugauguggcaac

SEQ ID NO: 253319 - RNA, 20 nt, Homo sapiens
aaacugaaugaacaaccucg

SEQ ID NO: 253320 - RNA, 14 nt, Homo sapiens
ccuugggaagaugu

SEQ ID NO: 253321 - RNA, 20 nt, Homo sapiens
agaucaugagaaauuaccaa

SEQ ID NO: 253322 - RNA, 13 nt, Homo sapiens
cugauguggcaac

SEQ ID NO: 253323 - RNA, 21 nt, Homo sapiens
auuggguagaaagauggggca

SEQ ID NO: 253324 - RNA, 17 nt, Homo sapiens
ucugucuggcauuacaa

SEQ ID NO: 253325 - RNA, 19 nt, Homo sapiens
ucagugcugugucauucca

SEQ ID NO: 253326 - RNA, 13 nt, Homo sapiens
uacguccuuccac

SEQ ID NO: 253327 - RNA, 20 nt, Homo sapiens
gaaagauggggcauauucau

SEQ ID NO: 253328 - RNA, 16 nt, Homo sapiens
ucaucccauugucuuc

SEQ ID NO: 253329 - RNA, 19 nt, Homo sapiens
agcuccucuauauuuccac

SEQ ID NO: 253330 - RNA, 18 nt, Homo sapiens
uguaaaauggacaguacu

SEQ ID NO: 253331 - RNA, 21 nt, Homo sapiens
ucucgcucccuuucagguuua

SEQ ID NO: 253332 - RNA, 23 nt, Homo sapiens
uaugcaggggcaaacaccugcug

SEQ ID NO: 253333 - RNA, 13 nt, Homo sapiens
ggcuucugaugau

SEQ ID NO: 253334 - RNA, 23 nt, Homo sapiens
auucucauaagcuacugaugaga

SEQ ID NO: 253335 - RNA, 15 nt, Homo sapiens
uucccauguugucaa

SEQ ID NO: 253336 - RNA, 22 nt, Homo sapiens
uagaaagauggggcauauucau

SEQ ID NO: 253337 - RNA, 17 nt, Homo sapiens
gacucaaguuucuucaa

SEQ ID NO: 253338 - RNA, 14 nt, Homo sapiens
aauuguacaaccug

SEQ ID NO: 253339 - RNA, 16 nt, Homo sapiens
caacucaucuucacag

SEQ ID NO: 253340 - RNA, 15 nt, Homo sapiens
caugaaaagcaaaua

SEQ ID NO: 253341 - RNA, 17 nt, Homo sapiens
ucccauuggcaaaagag

SEQ ID NO: 253342 - RNA, 15 nt, Homo sapiens
caugaaaaccugaag

SEQ ID NO: 253343 - RNA, 14 nt, Homo sapiens
gaagaucaggccaa

SEQ ID NO: 253344 - RNA, 19 nt, Homo sapiens
aaaaucaaguauuggcaaa

SEQ ID NO: 253345 - RNA, 16 nt, Homo sapiens
uuuccaacacaucuau

SEQ ID NO: 253346 - RNA, 15 nt, Homo sapiens
cuggaucuaugugua

SEQ ID NO: 253347 - RNA, 20 nt, Homo sapiens
cagaaggcuacauauacaua

SEQ ID NO: 253348 - RNA, 23 nt, Homo sapiens
cacagauuguucuaaaguaaaau

SEQ ID NO: 253349 - RNA, 17 nt, Homo sapiens
acaauugcaguuuugcc

SEQ ID NO: 253350 - RNA, 20 nt, Homo sapiens
aaucugaagauacaugucuu

SEQ ID NO: 253351 - RNA, 12 nt, Homo sapiens
cacaacccaucu

SEQ ID NO: 253352 - RNA, 22 nt, Homo sapiens
aauuccugguuugaagaaauaa

SEQ ID NO: 253353 - RNA, 21 nt, Homo sapiens
ucagucugcuuauccuuccac

SEQ ID NO: 253354 - RNA, 17 nt, Homo sapiens
agaucaggccaacccca

SEQ ID NO: 253355 - RNA, 17 nt, Homo sapiens
acaugcauugcucuuau

SEQ ID NO: 253356 - RNA, 17 nt, Homo sapiens
gguagaaagauggggca

SEQ ID NO: 253357 - RNA, 15 nt, Homo sapiens
ucaaaguggcaaaaa

SEQ ID NO: 253358 - RNA, 19 nt, Homo sapiens
uguaacaauuauguuuuca

SEQ ID NO: 253359 - RNA, 10 nt, Homo sapiens
ccaagcacag

SEQ ID NO: 253360 - RNA, 13 nt, Homo sapiens
augaacaaccucg

SEQ ID NO: 253361 - RNA, 13 nt, Homo sapiens
uuacaauugcagu

SEQ ID NO: 253362 - RNA, 15 nt, Homo sapiens
uuccaaugaugggau

SEQ ID NO: 253363 - RNA, 23 nt, Homo sapiens
ucaugaaaaccugaagaguucac

SEQ ID NO: 253364 - RNA, 14 nt, Homo sapiens
acugugcaguuuuc

SEQ ID NO: 253365 - RNA, 15 nt, Homo sapiens
cagacugaugccaga

SEQ ID NO: 253366 - RNA, 23 nt, Homo sapiens
uauauaaacgguuaacaauauua

SEQ ID NO: 253367 - RNA, 14 nt, Homo sapiens
gcuuauccuuccac

SEQ ID NO: 253368 - RNA, 16 nt, Homo sapiens
cuauguguaugcagaa

SEQ ID NO: 253369 - RNA, 18 nt, Homo sapiens
gcauggagucuucaggua

SEQ ID NO: 253370 - RNA, 18 nt, Homo sapiens
auugucuucugaccucua

SEQ ID NO: 253371 - RNA, 20 nt, Homo sapiens
cuaaaauauauauagaaaua

SEQ ID NO: 253372 - RNA, 19 nt, Homo sapiens
aagaggaaaaaaaguaaau

SEQ ID NO: 253373 - RNA, 13 nt, Homo sapiens
cagacaaaccuug

SEQ ID NO: 253374 - RNA, 21 nt, Homo sapiens
uugaaaaggaagaucaggcca

SEQ ID NO: 253375 - RNA, 12 nt, Homo sapiens
augaaaaccuga

SEQ ID NO: 253376 - RNA, 22 nt, Homo sapiens
cuaaacugcugcaaaaguucuc

SEQ ID NO: 253377 - RNA, 20 nt, Homo sapiens
aggaggaguuuaaacugaau

SEQ ID NO: 253378 - RNA, 15 nt, Homo sapiens
agcucagagugccac

SEQ ID NO: 253379 - RNA, 21 nt, Homo sapiens
aaaauccucacucauucccau

SEQ ID NO: 253380 - RNA, 18 nt, Homo sapiens
ucauuguuuggcauugaa

SEQ ID NO: 253381 - RNA, 15 nt, Homo sapiens
gaagugaccaaggag

SEQ ID NO: 253382 - RNA, 13 nt, Homo sapiens
ucaaaguggcaaa

SEQ ID NO: 253383 - RNA, 14 nt, Homo sapiens
gcugugucauucca

SEQ ID NO: 253384 - RNA, 22 nt, Homo sapiens
ucacacuuuucuuauaaugcaa

SEQ ID NO: 253385 - RNA, 14 nt, Homo sapiens
aauuuagaggacaa

SEQ ID NO: 253386 - RNA, 18 nt, Homo sapiens
ugauguggcaacugcuga

SEQ ID NO: 253387 - RNA, 14 nt, Homo sapiens
acaaaucaucugua

SEQ ID NO: 253388 - RNA, 16 nt, Homo sapiens
ugaagauacaugucuu

SEQ ID NO: 253389 - RNA, 23 nt, Homo sapiens
ucccaugacuccuggaucuaugu

SEQ ID NO: 253390 - RNA, 16 nt, Homo sapiens
uuaucuagcuguccag

SEQ ID NO: 253391 - RNA, 14 nt, Homo sapiens
auagaugguguaug

SEQ ID NO: 253392 - RNA, 20 nt, Homo sapiens
uaggagagagaucaugagaa

SEQ ID NO: 253393 - RNA, 14 nt, Homo sapiens
gccuaauggcaaaa

SEQ ID NO: 253394 - RNA, 14 nt, Homo sapiens
guguuuccaaugau

SEQ ID NO: 253395 - RNA, 18 nt, Homo sapiens
aagauaguugaaaagccu

SEQ ID NO: 253396 - RNA, 15 nt, Homo sapiens
caaccugugaucaag

SEQ ID NO: 253397 - RNA, 17 nt, Homo sapiens
uuuccauuguagcucuu

SEQ ID NO: 253398 - RNA, 22 nt, Homo sapiens
acucaaguuucuucaaucugaa

SEQ ID NO: 253399 - RNA, 15 nt, Homo sapiens
auggacacacaguca

SEQ ID NO: 253400 - RNA, 20 nt, Homo sapiens
ugcuauggaaugauugugga

SEQ ID NO: 253401 - RNA, 16 nt, Homo sapiens
uagcuuucuccagauc

SEQ ID NO: 253402 - RNA, 21 nt, Homo sapiens
aaacaccugcugauguggcaa

SEQ ID NO: 253403 - RNA, 21 nt, Homo sapiens
gacucaaguuucuucaaucug

SEQ ID NO: 253404 - RNA, 18 nt, Homo sapiens
aucugaagauacaugucu

SEQ ID NO: 253405 - RNA, 14 nt, Homo sapiens
cugugucauuccaa

SEQ ID NO: 253406 - RNA, 20 nt, Homo sapiens
cagucacgcaagcuaguucc

SEQ ID NO: 253407 - RNA, 14 nt, Homo sapiens
auggacacacaguc

SEQ ID NO: 253408 - RNA, 17 nt, Homo sapiens
aaccugugaucaagcaa

SEQ ID NO: 253409 - RNA, 23 nt, Homo sapiens
aauaaaccuuugguaaucuucaa

SEQ ID NO: 253410 - RNA, 17 nt, Homo sapiens
aaaucaaguauuggcaa

SEQ ID NO: 253411 - RNA, 21 nt, Homo sapiens
gugcauauuaauucaugcaaa

SEQ ID NO: 253412 - RNA, 19 nt, Homo sapiens
ugcuguauccacaaaucau

SEQ ID NO: 253413 - RNA, 19 nt, Homo sapiens
aaggaacaugaaaagcaaa

SEQ ID NO: 253414 - RNA, 17 nt, Homo sapiens
uuauucugucuggcauu

SEQ ID NO: 253415 - RNA, 16 nt, Homo sapiens
cuucaaucugaagaua

SEQ ID NO: 253416 - RNA, 16 nt, Homo sapiens
uauaaaaacagcuccu

SEQ ID NO: 253417 - RNA, 18 nt, Homo sapiens
uuuccauuguagcucuuu

SEQ ID NO: 253418 - RNA, 15 nt, Homo sapiens
uuugugcuuugucca

SEQ ID NO: 253419 - RNA, 22 nt, Homo sapiens
cucccuuucagguuuacuaugu

SEQ ID NO: 253420 - RNA, 21 nt, Homo sapiens
auaggagagagaucaugagaa

SEQ ID NO: 253421 - RNA, 22 nt, Homo sapiens
guacuuugaagaugucauccca

SEQ ID NO: 253422 - RNA, 23 nt, Homo sapiens
aucuguaacaauuauguuuucag

SEQ ID NO: 253423 - RNA, 17 nt, Homo sapiens
aauaggagagagaucau

SEQ ID NO: 253424 - RNA, 16 nt, Homo sapiens
gaggcacccucagaga

SEQ ID NO: 253425 - RNA, 14 nt, Homo sapiens
cucuauaauugcca

SEQ ID NO: 253426 - RNA, 14 nt, Homo sapiens
ucaggaacagucuu

SEQ ID NO: 253427 - RNA, 15 nt, Homo sapiens
cuuugaagaugucau

SEQ ID NO: 253428 - RNA, 21 nt, Homo sapiens
uccugggaauaacauggugag

SEQ ID NO: 253429 - RNA, 15 nt, Homo sapiens
ucacagauuguucua

SEQ ID NO: 253430 - RNA, 11 nt, Homo sapiens
aaacaaaaaua

SEQ ID NO: 253431 - RNA, 14 nt, Homo sapiens
guacugugcaguuu

SEQ ID NO: 253432 - RNA, 17 nt, Homo sapiens
auuacaauugcaguuuu

SEQ ID NO: 253433 - RNA, 22 nt, Homo sapiens
acucauucccauguugucaaua

SEQ ID NO: 253434 - RNA, 20 nt, Homo sapiens
aaaaaaucaaguauuggcaa

SEQ ID NO: 253435 - RNA, 20 nt, Homo sapiens
caccaauucuaaaguagcuu

SEQ ID NO: 253436 - RNA, 16 nt, Homo sapiens
gcagggccugauuuau

SEQ ID NO: 253437 - RNA, 20 nt, Homo sapiens
aguuuugccuaauggcaaaa

SEQ ID NO: 253438 - RNA, 15 nt, Homo sapiens
uuauccuuccacgga

SEQ ID NO: 253439 - RNA, 15 nt, Homo sapiens
cucauugcuucacaa

SEQ ID NO: 253440 - RNA, 15 nt, Homo sapiens
uuaucuggcuucaaa

SEQ ID NO: 253441 - RNA, 12 nt, Homo sapiens
acauacacacau

SEQ ID NO: 253442 - RNA, 18 nt, Homo sapiens
ccuggaugaaguuaucug

SEQ ID NO: 253443 - RNA, 15 nt, Homo sapiens
aucccauuggcaaaa

SEQ ID NO: 253444 - RNA, 19 nt, Homo sapiens
ucaaguuucuucaaucuga

SEQ ID NO: 253445 - RNA, 18 nt, Homo sapiens
gcaaugucagaugaaguc

SEQ ID NO: 253446 - RNA, 13 nt, Homo sapiens
cgcucccuuucag

SEQ ID NO: 253447 - RNA, 21 nt, Homo sapiens
uauuuaugcaacucaucuuca

SEQ ID NO: 253448 - RNA, 15 nt, Homo sapiens
caaguauuggcaaag

SEQ ID NO: 253449 - RNA, 17 nt, Homo sapiens
caacugcugaugcucau

SEQ ID NO: 253450 - RNA, 16 nt, Homo sapiens
cugaaugaacaaccuc

SEQ ID NO: 253451 - RNA, 12 nt, Homo sapiens
agcuacugauga

SEQ ID NO: 253452 - RNA, 16 nt, Homo sapiens
uucacagauuguucua

SEQ ID NO: 253453 - RNA, 14 nt, Homo sapiens
agaugaagucuugu

SEQ ID NO: 253454 - RNA, 18 nt, Homo sapiens
aaaauguccaccaauaga

SEQ ID NO: 253455 - RNA, 15 nt, Homo sapiens
ccugcagaagaugug

SEQ ID NO: 253456 - RNA, 21 nt, Homo sapiens
gacucauugcuucacaaccca

SEQ ID NO: 253457 - RNA, 14 nt, Homo sapiens
aagaugucauccca

SEQ ID NO: 253458 - RNA, 22 nt, Homo sapiens
aagaucaggccaaccccaaaga

SEQ ID NO: 253459 - RNA, 21 nt, Homo sapiens
aucuggggauacuggcaaagc

SEQ ID NO: 253460 - RNA, 13 nt, Homo sapiens
cuguauccacaaa

SEQ ID NO: 253461 - RNA, 21 nt, Homo sapiens
ucuuucuauuuaugcaacuca

SEQ ID NO: 253462 - RNA, 23 nt, Homo sapiens
acuaaacugcugcaaaaguucuc

SEQ ID NO: 253463 - RNA, 22 nt, Homo sapiens
gacugaugccagacaaaccuug

SEQ ID NO: 253464 - RNA, 16 nt, Homo sapiens
gcuacauauacauagu

SEQ ID NO: 253465 - RNA, 19 nt, Homo sapiens
auccuagagaaaacuugaa

SEQ ID NO: 253466 - RNA, 13 nt, Homo sapiens
gauacaugucuuu

SEQ ID NO: 253467 - RNA, 16 nt, Homo sapiens
aacugcugaugcucau

SEQ ID NO: 253468 - RNA, 20 nt, Homo sapiens
aaccugugaucaagcaauaa

SEQ ID NO: 253469 - RNA, 14 nt, Homo sapiens
auguguaugcagaa

SEQ ID NO: 253470 - RNA, 22 nt, Homo sapiens
gcccaacccacaccaaauaaga

SEQ ID NO: 253471 - RNA, 20 nt, Homo sapiens
augcuguauccacaaaucau

SEQ ID NO: 253472 - RNA, 18 nt, Homo sapiens
uaugcuguauccacaaau

SEQ ID NO: 253473 - RNA, 16 nt, Homo sapiens
cagccugccuggagua

SEQ ID NO: 253474 - RNA, 16 nt, Homo sapiens
uuauccuguaguacaa

SEQ ID NO: 253475 - RNA, 23 nt, Homo sapiens
uauuuaugcaacucaucuucaca

SEQ ID NO: 253476 - RNA, 14 nt, Homo sapiens
ucuuucuccaggga

SEQ ID NO: 253477 - RNA, 16 nt, Homo sapiens
aauugcaguuuugccu

SEQ ID NO: 253478 - RNA, 20 nt, Homo sapiens
guaugcagaaggcuacauau

SEQ ID NO: 253479 - RNA, 22 nt, Homo sapiens
auuuacagacugaugccagaca

SEQ ID NO: 253480 - RNA, 17 nt, Homo sapiens
uacugugcaguuuucag

SEQ ID NO: 253481 - RNA, 15 nt, Homo sapiens
ugccuaauggcaaaa

SEQ ID NO: 253482 - RNA, 23 nt, Homo sapiens
uacacguaaaucuguucaaggaa

SEQ ID NO: 253483 - RNA, 14 nt, Homo sapiens
aacacacaauauua

SEQ ID NO: 253484 - RNA, 21 nt, Homo sapiens
cauggagucuucagguagaaa

SEQ ID NO: 253485 - RNA, 13 nt, Homo sapiens
uucuaaaguaaaa

SEQ ID NO: 253486 - RNA, 15 nt, Homo sapiens
acaaccugugaucaa

SEQ ID NO: 253487 - RNA, 17 nt, Homo sapiens
augcaacucaucuucac

SEQ ID NO: 253488 - RNA, 21 nt, Homo sapiens
gcuaguucccaugacuccugg

SEQ ID NO: 253489 - RNA, 12 nt, Homo sapiens
uaaaguagcuuu

SEQ ID NO: 253490 - RNA, 22 nt, Homo sapiens
guuucuucaaucugaagauaca

SEQ ID NO: 253491 - RNA, 20 nt, Homo sapiens
cuguguuuguacugugcagu

SEQ ID NO: 253492 - RNA, 12 nt, Homo sapiens
guuaacaauauu

SEQ ID NO: 253493 - RNA, 18 nt, Homo sapiens
ggcuaguugggaugggca

SEQ ID NO: 253494 - RNA, 20 nt, Homo sapiens
guaaccucuacuaugaagug

SEQ ID NO: 253495 - RNA, 17 nt, Homo sapiens
aggcacccucagagaag

SEQ ID NO: 253496 - RNA, 22 nt, Homo sapiens
uuucagugcugugucauuccaa

SEQ ID NO: 253497 - RNA, 18 nt, Homo sapiens
aaacuugaauucauagaa

SEQ ID NO: 253498 - RNA, 21 nt, Homo sapiens
auacaugucuuucuccaggga

SEQ ID NO: 253499 - RNA, 16 nt, Homo sapiens
gcugcaaaaguucuca

SEQ ID NO: 253500 - RNA, 17 nt, Homo sapiens
caugguccccauggcau

SEQ ID NO: 253501 - RNA, 17 nt, Homo sapiens
auuauccuguaguacaa

SEQ ID NO: 253502 - RNA, 20 nt, Homo sapiens
aauagaugguguaugcugua

SEQ ID NO: 253503 - RNA, 14 nt, Homo sapiens
aggaacagucuugu

SEQ ID NO: 253504 - RNA, 23 nt, Homo sapiens
aaaagcaaauaguagauggcaaa

SEQ ID NO: 253505 - RNA, 18 nt, Homo sapiens
cauauuaauucaugcaaa

SEQ ID NO: 253506 - RNA, 17 nt, Homo sapiens
ccagggacauguggaaa

SEQ ID NO: 253507 - RNA, 11 nt, Homo sapiens
uagcccagaaa

SEQ ID NO: 253508 - RNA, 13 nt, Homo sapiens
ggacucauugcuu

SEQ ID NO: 253509 - RNA, 16 nt, Homo sapiens
uuauaaauuauuauga

SEQ ID NO: 253510 - RNA, 15 nt, Homo sapiens
uagaggaaagaaaga

SEQ ID NO: 253511 - RNA, 13 nt, Homo sapiens
agcuacugaugag

SEQ ID NO: 253512 - RNA, 14 nt, Homo sapiens
ccaucccauuggca

SEQ ID NO: 253513 - RNA, 16 nt, Homo sapiens
ggcaaugucagaugaa

SEQ ID NO: 253514 - RNA, 15 nt, Homo sapiens
aauugccacugagag

SEQ ID NO: 253515 - RNA, 15 nt, Homo sapiens
uccuuuccauuguag

SEQ ID NO: 253516 - RNA, 15 nt, Homo sapiens
aggcuacauauacau

SEQ ID NO: 253517 - RNA, 17 nt, Homo sapiens
gaagaagugaccaagga

SEQ ID NO: 253518 - RNA, 10 nt, Homo sapiens
guuguggaaa

SEQ ID NO: 253519 - RNA, 15 nt, Homo sapiens
uggguugcaaucugg

SEQ ID NO: 253520 - RNA, 13 nt, Homo sapiens
cugcugcaaaagu

SEQ ID NO: 253521 - RNA, 14 nt, Homo sapiens
acaaaucagacaua

SEQ ID NO: 253522 - RNA, 15 nt, Homo sapiens
auccacaaaucaucu

SEQ ID NO: 253523 - RNA, 15 nt, Homo sapiens
cugucagucugcuua

SEQ ID NO: 253524 - RNA, 19 nt, Homo sapiens
agccaucccauuggcaaaa

SEQ ID NO: 253525 - RNA, 19 nt, Homo sapiens
acacguaaaucuguucaag

SEQ ID NO: 253526 - RNA, 20 nt, Homo sapiens
ucuggcauuacaauugcagu

SEQ ID NO: 253527 - RNA, 15 nt, Homo sapiens
gguuuuuaaaccuuc

SEQ ID NO: 253528 - RNA, 17 nt, Homo sapiens
guugccuaaguauuaaa

SEQ ID NO: 253529 - RNA, 15 nt, Homo sapiens
aaacugaaugaacaa

SEQ ID NO: 253530 - RNA, 19 nt, Homo sapiens
aggaaaaaauccucacuca

SEQ ID NO: 253531 - RNA, 22 nt, Homo sapiens
uuacagacugaugccagacaaa

SEQ ID NO: 253532 - RNA, 14 nt, Homo sapiens
uauucaaccaugga

SEQ ID NO: 253533 - RNA, 21 nt, Homo sapiens
aaguucucaauguucuuuucc

SEQ ID NO: 253534 - RNA, 15 nt, Homo sapiens
uacaugcauugcucu

SEQ ID NO: 253535 - RNA, 15 nt, Homo sapiens
aaugacaacaaagua

SEQ ID NO: 253536 - RNA, 17 nt, Homo sapiens
auuguacaaccugugau

SEQ ID NO: 253537 - RNA, 13 nt, Homo sapiens
gcuuauauucaac

SEQ ID NO: 253538 - RNA, 21 nt, Homo sapiens
ccuguaguacaagauuaucuu

SEQ ID NO: 253539 - RNA, 21 nt, Homo sapiens
auggcaugggggccucagggc

SEQ ID NO: 253540 - RNA, 22 nt, Homo sapiens
cagaaauguuaguaacaagaaa

SEQ ID NO: 253541 - RNA, 12 nt, Homo sapiens
cuguucaaggaa

SEQ ID NO: 253542 - RNA, 17 nt, Homo sapiens
uugaagaugucauccca

SEQ ID NO: 253543 - RNA, 22 nt, Homo sapiens
aguuuucaggaugagaugacag

SEQ ID NO: 253544 - RNA, 14 nt, Homo sapiens
agugcugugucauu

SEQ ID NO: 253545 - RNA, 14 nt, Homo sapiens
gaaugaacaaccuc

SEQ ID NO: 253546 - RNA, 13 nt, Homo sapiens
gcaaaaguucuca

SEQ ID NO: 253547 - RNA, 16 nt, Homo sapiens
uaaacugaaugaacaa

SEQ ID NO: 253548 - RNA, 18 nt, Homo sapiens
aggaugagaugacagaua

SEQ ID NO: 253549 - RNA, 22 nt, Homo sapiens
ucaauggagcaugugugcaaaa

SEQ ID NO: 253550 - RNA, 14 nt, Homo sapiens
agcaugugugcaaa

SEQ ID NO: 253551 - RNA, 20 nt, Homo sapiens
uaauuuuaggcacccauccu

SEQ ID NO: 253552 - RNA, 23 nt, Homo sapiens
cucuuucuauuuaugcaacucau

SEQ ID NO: 253553 - RNA, 14 nt, Homo sapiens
aacccaucuacccc

SEQ ID NO: 253554 - RNA, 16 nt, Homo sapiens
cagggacauguggaaa

SEQ ID NO: 253555 - RNA, 21 nt, Homo sapiens
uaacagguuuguuugugcuuu

SEQ ID NO: 253556 - RNA, 22 nt, Homo sapiens
auggcaugggggccucagggca

SEQ ID NO: 253557 - RNA, 15 nt, Homo sapiens
aaauuguacaaccug

SEQ ID NO: 253558 - RNA, 22 nt, Homo sapiens
acaucauccagaagacacacau

SEQ ID NO: 253559 - RNA, 15 nt, Homo sapiens
auugucauugauaca

SEQ ID NO: 253560 - RNA, 23 nt, Homo sapiens
cagaagaugugaugaauuauccu

SEQ ID NO: 253561 - RNA, 15 nt, Homo sapiens
ucuuucuauuuaugc

SEQ ID NO: 253562 - RNA, 19 nt, Homo sapiens
ucaucuacccccaaaagaa

SEQ ID NO: 253563 - RNA, 14 nt, Homo sapiens
uagauccagaugag

SEQ ID NO: 253564 - RNA, 20 nt, Homo sapiens
cugcaaaaguucucaauguu

SEQ ID NO: 253565 - RNA, 20 nt, Homo sapiens
aucaauggagcaugugugca

SEQ ID NO: 253566 - RNA, 17 nt, Homo sapiens
aagauguuauacaacca

SEQ ID NO: 253567 - RNA, 17 nt, Homo sapiens
uaacaauuauguuuuca

SEQ ID NO: 253568 - RNA, 17 nt, Homo sapiens
uuccacaucauccagaa

SEQ ID NO: 253569 - RNA, 23 nt, Homo sapiens
ccucacucauucccauguuguca

SEQ ID NO: 253570 - RNA, 15 nt, Homo sapiens
agauggggcauauuc

SEQ ID NO: 253571 - RNA, 15 nt, Homo sapiens
ccuuccacggacuca

SEQ ID NO: 253572 - RNA, 19 nt, Homo sapiens
gaguacuuugaagauguca

SEQ ID NO: 253573 - RNA, 18 nt, Homo sapiens
auaagcuacugaugagaa

SEQ ID NO: 253574 - RNA, 15 nt, Homo sapiens
aggguagaggggaag

SEQ ID NO: 253575 - RNA, 21 nt, Homo sapiens
agaaaacuugaauucauagaa

SEQ ID NO: 253576 - RNA, 18 nt, Homo sapiens
aaccaucaaaguggcaaa

SEQ ID NO: 253577 - RNA, 15 nt, Homo sapiens
gaugagaugacagau

SEQ ID NO: 253578 - RNA, 16 nt, Homo sapiens
ccaucuaccccuggau

SEQ ID NO: 253579 - RNA, 16 nt, Homo sapiens
uuggguugcaaucugg

SEQ ID NO: 253580 - RNA, 15 nt, Homo sapiens
ugcugauguggcaac

SEQ ID NO: 253581 - RNA, 18 nt, Homo sapiens
gguaaccucuacuaugaa

SEQ ID NO: 253582 - RNA, 22 nt, Homo sapiens
cuuugccucucaauugucauug

SEQ ID NO: 253583 - RNA, 17 nt, Homo sapiens
uuguacugugcaguuuu

SEQ ID NO: 253584 - RNA, 17 nt, Homo sapiens
aaaauagaugguguaug

SEQ ID NO: 253585 - RNA, 15 nt, Homo sapiens
gcaaugucagaugaa

SEQ ID NO: 253586 - RNA, 12 nt, Homo sapiens
cucauugcuuca

SEQ ID NO: 253587 - RNA, 22 nt, Homo sapiens
ccagccaucccauuggcaaaag

SEQ ID NO: 253588 - RNA, 21 nt, Homo sapiens
ugauuuacagacugaugccag

SEQ ID NO: 253589 - RNA, 23 nt, Homo sapiens
cauucccauguugucaauaacag

SEQ ID NO: 253590 - RNA, 16 nt, Homo sapiens
auaagcagaagccaua

SEQ ID NO: 253591 - RNA, 23 nt, Homo sapiens
ccauggcaugggggccucagggc

SEQ ID NO: 253592 - RNA, 16 nt, Homo sapiens
aguuaucuggcuucaa

SEQ ID NO: 253593 - RNA, 16 nt, Homo sapiens
uguuuguacugugcag

SEQ ID NO: 253594 - RNA, 17 nt, Homo sapiens
uaaaaaaaaucaaguau

SEQ ID NO: 253595 - RNA, 16 nt, Homo sapiens
ucucaauugucauuga

SEQ ID NO: 253596 - RNA, 13 nt, Homo sapiens
guuauacaaccau

SEQ ID NO: 253597 - RNA, 17 nt, Homo sapiens
cucaucuucacagauug

SEQ ID NO: 253598 - RNA, 16 nt, Homo sapiens
ugcucaugguccccau

SEQ ID NO: 253599 - RNA, 14 nt, Homo sapiens
agaaauaacaaauu

SEQ ID NO: 253600 - RNA, 13 nt, Homo sapiens
uaauauacuaugc

SEQ ID NO: 253601 - RNA, 15 nt, Homo sapiens
cuuugguaaucuuca

SEQ ID NO: 253602 - RNA, 23 nt, Homo sapiens
uacaugucuuucuccagggacau

SEQ ID NO: 253603 - RNA, 14 nt, Homo sapiens
auacuggcaaagca

SEQ ID NO: 253604 - RNA, 15 nt, Homo sapiens
aaugcaauagaauaa

SEQ ID NO: 253605 - RNA, 17 nt, Homo sapiens
cgaaagagagagaaaca

SEQ ID NO: 253606 - RNA, 13 nt, Homo sapiens
agauuuuggcaaa

SEQ ID NO: 253607 - RNA, 23 nt, Homo sapiens
ucugucuggcauuacaauugcag

SEQ ID NO: 253608 - RNA, 19 nt, Homo sapiens
augucaucccauugucuuc

SEQ ID NO: 253609 - RNA, 20 nt, Homo sapiens
agguguaccaggaaaggauu

SEQ ID NO: 253610 - RNA, 19 nt, Homo sapiens
aguuuaagaggcaaguaaa

SEQ ID NO: 253611 - RNA, 17 nt, Homo sapiens
aguuuaaacugaaugaa

SEQ ID NO: 253612 - RNA, 14 nt, Homo sapiens
uuccuuuccauugu

SEQ ID NO: 253613 - RNA, 16 nt, Homo sapiens
accuucaugaaaaccu

SEQ ID NO: 253614 - RNA, 18 nt, Homo sapiens
auacaugucuuucuccag

SEQ ID NO: 253615 - RNA, 21 nt, Homo sapiens
guacaaccugugaucaagcaa

SEQ ID NO: 253616 - RNA, 19 nt, Homo sapiens
gauacaugcauugcucuua

SEQ ID NO: 253617 - RNA, 15 nt, Homo sapiens
gaugaauuauccugu

SEQ ID NO: 253618 - RNA, 15 nt, Homo sapiens
ccaucccauuggcaa

SEQ ID NO: 253619 - RNA, 14 nt, Homo sapiens
ccaauagaaugagu

SEQ ID NO: 253620 - RNA, 20 nt, Homo sapiens
uauaaaaacagcuccucuau

SEQ ID NO: 253621 - RNA, 15 nt, Homo sapiens
acaauugcaguuuug

SEQ ID NO: 253622 - RNA, 15 nt, Homo sapiens
agaucagacuuuaau

SEQ ID NO: 253623 - RNA, 17 nt, Homo sapiens
agaaaauuguacaaccu

SEQ ID NO: 253624 - RNA, 17 nt, Homo sapiens
acuaaacugcugcaaaa

SEQ ID NO: 253625 - RNA, 15 nt, Homo sapiens
auuuaugcaacucau

SEQ ID NO: 253626 - RNA, 17 nt, Homo sapiens
agacucuuguacuugau

SEQ ID NO: 253627 - RNA, 16 nt, Homo sapiens
cauuacaauugcaguu

SEQ ID NO: 253628 - RNA, 12 nt, Homo sapiens
ccacggacucaa

SEQ ID NO: 253629 - RNA, 14 nt, Homo sapiens
auaauauacuaugc

SEQ ID NO: 253630 - RNA, 14 nt, Homo sapiens
auaaugcaauagaa

SEQ ID NO: 253631 - RNA, 19 nt, Homo sapiens
ccauggcaugggggccuca

SEQ ID NO: 253632 - RNA, 18 nt, Homo sapiens
ugcugcaaaaguucucaa

SEQ ID NO: 253633 - RNA, 23 nt, Homo sapiens
auguggcaacugcugaugcucau

SEQ ID NO: 253634 - RNA, 21 nt, Homo sapiens
agaugguguaugcuguaucca

SEQ ID NO: 253635 - RNA, 18 nt, Homo sapiens
ugggaauaacauggugag

SEQ ID NO: 253636 - RNA, 18 nt, Homo sapiens
aggcacccauccuagaga

SEQ ID NO: 253637 - RNA, 15 nt, Homo sapiens
ugaaugaacaaccuc

SEQ ID NO: 253638 - RNA, 16 nt, Homo sapiens
acugagagaucugcug

SEQ ID NO: 253639 - RNA, 15 nt, Homo sapiens
aaauaacaaauuaaa

SEQ ID NO: 253640 - RNA, 14 nt, Homo sapiens
acuaaacugcugca

SEQ ID NO: 253641 - RNA, 19 nt, Homo sapiens
cugccuggaguacuuugaa

SEQ ID NO: 253642 - RNA, 19 nt, Homo sapiens
augcuguauccacaaauca

SEQ ID NO: 253643 - RNA, 18 nt, Homo sapiens
ugcugucagucugcuuau

SEQ ID NO: 253644 - RNA, 13 nt, Homo sapiens
agauguggggaaa

SEQ ID NO: 253645 - RNA, 15 nt, Homo sapiens
cucuacuaugaagug

SEQ ID NO: 253646 - RNA, 17 nt, Homo sapiens
uccuggacucauugcuu

SEQ ID NO: 253647 - RNA, 15 nt, Homo sapiens
ucaucuucacagauu

SEQ ID NO: 253648 - RNA, 19 nt, Homo sapiens
uucaagguuauaugucuua

SEQ ID NO: 253649 - RNA, 15 nt, Homo sapiens
ucccauguugucaau

SEQ ID NO: 253650 - RNA, 15 nt, Homo sapiens
agugaaucaccugug

SEQ ID NO: 253651 - RNA, 14 nt, Homo sapiens
caaugucagaugaa

SEQ ID NO: 253652 - RNA, 13 nt, Homo sapiens
aauauaggggcaa

SEQ ID NO: 253653 - RNA, 14 nt, Homo sapiens
gucuggcauuacaa

SEQ ID NO: 253654 - RNA, 20 nt, Homo sapiens
uaugcuguauccacaaauca

SEQ ID NO: 253655 - RNA, 12 nt, Homo sapiens
caauugucauug

SEQ ID NO: 253656 - RNA, 22 nt, Homo sapiens
uuuaaacugaaugaacaaccuc

SEQ ID NO: 253657 - RNA, 24 nt, Homo sapiens
aguuuucaggaugagaugacagau

SEQ ID NO: 253658 - RNA, 13 nt, Homo sapiens
ucuggcauuacaa

SEQ ID NO: 253659 - RNA, 24 nt, Homo sapiens
ucaaguuucuucaaucugaagaua

SEQ ID NO: 253660 - RNA, 13 nt, Homo sapiens
aacacacaauauu

SEQ ID NO: 253661 - RNA, 14 nt, Homo sapiens
ccucacucauuccc

SEQ ID NO: 253662 - RNA, 17 nt, Homo sapiens
aauuguacaaccuguga

SEQ ID NO: 253663 - RNA, 19 nt, Homo sapiens
uauaauugccacugagaga

SEQ ID NO: 253664 - RNA, 19 nt, Homo sapiens
aauuauccuguaguacaag

SEQ ID NO: 253665 - RNA, 16 nt, Homo sapiens
caacccacaccaaaua

SEQ ID NO: 253666 - RNA, 19 nt, Homo sapiens
gugcuaaauaaacaacaaa

SEQ ID NO: 253667 - RNA, 21 nt, Homo sapiens
acccccaaaagaacacuauaa

SEQ ID NO: 253668 - RNA, 17 nt, Homo sapiens
uggggcauauucaucua

SEQ ID NO: 253669 - RNA, 13 nt, Homo sapiens
auuaugacaccuu

SEQ ID NO: 253670 - RNA, 21 nt, Homo sapiens
ucuguguuuguacugugcagu

SEQ ID NO: 253671 - RNA, 23 nt, Homo sapiens
caucuguaacaauuauguuuuca

SEQ ID NO: 253672 - RNA, 18 nt, Homo sapiens
cauuacaauugcaguuuu

SEQ ID NO: 253673 - RNA, 18 nt, Homo sapiens
acauaguugcuucuuucc

SEQ ID NO: 253674 - RNA, 18 nt, Homo sapiens
caaauaguagauggcaaa

SEQ ID NO: 253675 - RNA, 15 nt, Homo sapiens
aucuguguuuguacu

SEQ ID NO: 253676 - RNA, 20 nt, Homo sapiens
aacugcugaugcucaugguc

SEQ ID NO: 253677 - RNA, 17 nt, Homo sapiens
ugugucauuccaaauaa

SEQ ID NO: 253678 - RNA, 19 nt, Homo sapiens
uaugcaacucaucuucaca

SEQ ID NO: 253679 - RNA, 16 nt, Homo sapiens
auauaaaggcagggaa

SEQ ID NO: 253680 - RNA, 16 nt, Homo sapiens
ugugaucaagcaauaa

SEQ ID NO: 253681 - RNA, 13 nt, Homo sapiens
aauugcaguuuug

SEQ ID NO: 253682 - RNA, 16 nt, Homo sapiens
uacagacugaugccag

SEQ ID NO: 253683 - RNA, 23 nt, Homo sapiens
gaaugagugaaucaccuguggua

SEQ ID NO: 253684 - RNA, 15 nt, Homo sapiens
ccacgcccccagaaa

SEQ ID NO: 253685 - RNA, 13 nt, Homo sapiens
augggggccucag

SEQ ID NO: 253686 - RNA, 12 nt, Homo sapiens
caugugugcaaa

SEQ ID NO: 253687 - RNA, 16 nt, Homo sapiens
acaaccugugaucaag

SEQ ID NO: 253688 - RNA, 21 nt, Homo sapiens
cuggaucuauguguaugcaga

SEQ ID NO: 253689 - RNA, 20 nt, Homo sapiens
auucugucuggcauuacaau

SEQ ID NO: 253690 - RNA, 20 nt, Homo sapiens
caaaauguccaccaauagaa

SEQ ID NO: 253691 - RNA, 15 nt, Homo sapiens
uguauccacaaauca

SEQ ID NO: 253692 - RNA, 20 nt, Homo sapiens
ggcaacugcugaugcucaug

SEQ ID NO: 253693 - RNA, 16 nt, Homo sapiens
gcaaauguaauauaau

SEQ ID NO: 253694 - RNA, 18 nt, Homo sapiens
aaggguaucccaaaaaua

SEQ ID NO: 253695 - RNA, 16 nt, Homo sapiens
agaaauuccaauauaa

SEQ ID NO: 253696 - RNA, 22 nt, Homo sapiens
acugcaagaaggagcucaguua

SEQ ID NO: 253697 - RNA, 20 nt, Homo sapiens
agaugguguaugcuguaucc

SEQ ID NO: 253698 - RNA, 21 nt, Homo sapiens
aauugucauugauacaugcau

SEQ ID NO: 253699 - RNA, 14 nt, Homo sapiens
ucagaugaagucuu

SEQ ID NO: 253700 - RNA, 11 nt, Homo sapiens
auuggcaaaga

SEQ ID NO: 253701 - RNA, 14 nt, Homo sapiens
uagauuuuggcaaa

SEQ ID NO: 253702 - RNA, 17 nt, Homo sapiens
cuggaucuauguguaug

SEQ ID NO: 253703 - RNA, 18 nt, Homo sapiens
uaccaaaauguccaccaa

SEQ ID NO: 253704 - RNA, 14 nt, Homo sapiens
ucauaagcuacuga

SEQ ID NO: 253705 - RNA, 13 nt, Homo sapiens
ucuguucaaggaa

SEQ ID NO: 253706 - RNA, 17 nt, Homo sapiens
ugauagauccagaugag

SEQ ID NO: 253707 - RNA, 17 nt, Homo sapiens
ucauaagcuacugauga

SEQ ID NO: 253708 - RNA, 18 nt, Homo sapiens
ucaggccaaccccaaaga

SEQ ID NO: 253709 - RNA, 17 nt, Homo sapiens
auaaacgguuaacaaua

SEQ ID NO: 253710 - RNA, 16 nt, Homo sapiens
cuuugguaaucuucaa

SEQ ID NO: 253711 - RNA, 12 nt, Homo sapiens
gauuuuggcaaa

SEQ ID NO: 253712 - RNA, 22 nt, Homo sapiens
cauugucuucugaccucuauaa

SEQ ID NO: 253713 - RNA, 22 nt, Homo sapiens
ggaaucauuguuuggcauugaa

SEQ ID NO: 253714 - RNA, 14 nt, Homo sapiens
ucuauguguaugca

SEQ ID NO: 253715 - RNA, 13 nt, Homo sapiens
acugugcaguuuu

SEQ ID NO: 253716 - RNA, 17 nt, Homo sapiens
augccacagaguaugaa

SEQ ID NO: 253717 - RNA, 14 nt, Homo sapiens
cccuaagauugaaa

SEQ ID NO: 253718 - RNA, 21 nt, Homo sapiens
cuggcauuacaauugcaguuu

SEQ ID NO: 253719 - RNA, 11 nt, Homo sapiens
auaauugccac

SEQ ID NO: 253720 - RNA, 18 nt, Homo sapiens
caugagaaauuaccaaaa

SEQ ID NO: 253721 - RNA, 16 nt, Homo sapiens
uguagcucuuugccuc

SEQ ID NO: 253722 - RNA, 22 nt, Homo sapiens
uaugcaacucaucuucacagau

SEQ ID NO: 253723 - RNA, 20 nt, Homo sapiens
caguuuugccuaauggcaaa

SEQ ID NO: 253724 - RNA, 21 nt, Homo sapiens
aaacugcugcaaaaguucuca

SEQ ID NO: 253725 - RNA, 19 nt, Homo sapiens
ccacaaaucaucuguaaca

SEQ ID NO: 253726 - RNA, 18 nt, Homo sapiens
aacugaaugaacaaccuc

SEQ ID NO: 253727 - RNA, 21 nt, Homo sapiens
uuuguuccccagcccuaagau

SEQ ID NO: 253728 - RNA, 21 nt, Homo sapiens
ggcaaaagagucaacaguauc

SEQ ID NO: 253729 - RNA, 15 nt, Homo sapiens
ugauacaugcauugc

SEQ ID NO: 253730 - RNA, 16 nt, Homo sapiens
auaguugcuucuuucc

SEQ ID NO: 253731 - RNA, 19 nt, Homo sapiens
ucuccagggacauguggaa

SEQ ID NO: 253732 - RNA, 18 nt, Homo sapiens
ccaccucuuucuauuuau

SEQ ID NO: 253733 - RNA, 16 nt, Homo sapiens
guacugugcaguuuuc

SEQ ID NO: 253734 - RNA, 23 nt, Homo sapiens
acagucacgcaagcuaguuccca

SEQ ID NO: 253735 - RNA, 17 nt, Homo sapiens
ucuauguguaugcagaa

SEQ ID NO: 253736 - RNA, 16 nt, Homo sapiens
uuccuuuccauuguag

SEQ ID NO: 253737 - RNA, 19 nt, Homo sapiens
aaagauccaacaaggccau

SEQ ID NO: 253738 - RNA, 21 nt, Homo sapiens
gaucaggccaaccccaaagaa

SEQ ID NO: 253739 - RNA, 22 nt, Homo sapiens
cuuaaugauuuacagacugaug

SEQ ID NO: 253740 - RNA, 22 nt, Homo sapiens
ccagaucagacuuuaauuucuc

SEQ ID NO: 253741 - RNA, 13 nt, Homo sapiens
cuauaauugccac

SEQ ID NO: 253742 - RNA, 13 nt, Homo sapiens
gaaauuaccaaaa

SEQ ID NO: 253743 - RNA, 21 nt, Homo sapiens
cuuauucugucuggcauuaca

SEQ ID NO: 253744 - RNA, 14 nt, Homo sapiens
gagagaaugccaca

SEQ ID NO: 253745 - RNA, 14 nt, Homo sapiens
cauugauacaugca

SEQ ID NO: 253746 - RNA, 14 nt, Homo sapiens
caaguauuggcaaa

SEQ ID NO: 253747 - RNA, 14 nt, Homo sapiens
ccugcccaggugug

SEQ ID NO: 253748 - RNA, 17 nt, Homo sapiens
gaaggcuacauauacau

SEQ ID NO: 253749 - RNA, 21 nt, Homo sapiens
ggaggaguuuaaacugaauga

SEQ ID NO: 253750 - RNA, 16 nt, Homo sapiens
auuuuggcaaagccag

SEQ ID NO: 253751 - RNA, 15 nt, Homo sapiens
cuguaacaauuaugu

SEQ ID NO: 253752 - RNA, 19 nt, Homo sapiens
ccaucaaaguggcaaaaau

SEQ ID NO: 253753 - RNA, 14 nt, Homo sapiens
gaagauacaugucu

SEQ ID NO: 253754 - RNA, 12 nt, Homo sapiens
ugggaagaugua

SEQ ID NO: 253755 - RNA, 16 nt, Homo sapiens
caaaucaucuguaaca

SEQ ID NO: 253756 - RNA, 12 nt, Homo sapiens
cugagagaucug

SEQ ID NO: 253757 - RNA, 17 nt, Homo sapiens
auacuggcaaagcagaa

SEQ ID NO: 253758 - RNA, 15 nt, Homo sapiens
gaagguaaaacaaau

SEQ ID NO: 253759 - RNA, 19 nt, Homo sapiens
aacacuauaaaaacagcuc

SEQ ID NO: 253760 - RNA, 19 nt, Homo sapiens
agauguuauacaaccauca

SEQ ID NO: 253761 - RNA, 14 nt, Homo sapiens
gcauuacaauugca

SEQ ID NO: 253762 - RNA, 15 nt, Homo sapiens
augaauuauccugua

SEQ ID NO: 253763 - RNA, 15 nt, Homo sapiens
caucaaaguggcaaa

SEQ ID NO: 253764 - RNA, 15 nt, Homo sapiens
cugacuuggggaaaa

SEQ ID NO: 253765 - RNA, 15 nt, Homo sapiens
ggcauauucaucuac

SEQ ID NO: 253766 - RNA, 19 nt, Homo sapiens
acuuuucuuauaaugcaau

SEQ ID NO: 253767 - RNA, 21 nt, Homo sapiens
uggggauacuggcaaagcaga

SEQ ID NO: 253768 - RNA, 20 nt, Homo sapiens
ucaucuucacagauuguucu

SEQ ID NO: 253769 - RNA, 14 nt, Homo sapiens
gugaucaagcaaua

SEQ ID NO: 253770 - RNA, 21 nt, Homo sapiens
ugucaucccauugucuucuga

SEQ ID NO: 253771 - RNA, 15 nt, Homo sapiens
auuguacaaccugug

SEQ ID NO: 253772 - RNA, 23 nt, Homo sapiens
uguaucaauggagcaugugugca

SEQ ID NO: 253773 - RNA, 20 nt, Homo sapiens
augaagucuuguucagggua

SEQ ID NO: 253774 - RNA, 17 nt, Homo sapiens
auaauugccacugagag

SEQ ID NO: 253775 - RNA, 17 nt, Homo sapiens
gaugaaguuaucuggcu

SEQ ID NO: 253776 - RNA, 15 nt, Homo sapiens
gaaggagcucaguua

SEQ ID NO: 253777 - RNA, 19 nt, Homo sapiens
aaaauaggagagagaucau

SEQ ID NO: 253778 - RNA, 20 nt, Homo sapiens
gauacaugcauugcucuuau

SEQ ID NO: 253779 - RNA, 12 nt, Homo sapiens
aggcuacauaua

SEQ ID NO: 253780 - RNA, 13 nt, Homo sapiens
cuauuuaugcaac

SEQ ID NO: 253781 - RNA, 13 nt, Homo sapiens
ucccauguuguca

SEQ ID NO: 253782 - RNA, 20 nt, Homo sapiens
aaccucggcuccuggacuca

SEQ ID NO: 253783 - RNA, 16 nt, Homo sapiens
agauguuauacaacca

SEQ ID NO: 253784 - RNA, 19 nt, Homo sapiens
uggugaaacauacgacaga

SEQ ID NO: 253785 - RNA, 20 nt, Homo sapiens
aaguagcuuucuccagauca

SEQ ID NO: 253786 - RNA, 13 nt, Homo sapiens
uucuucaaucuga

SEQ ID NO: 253787 - RNA, 13 nt, Homo sapiens
uugggaugggcag

SEQ ID NO: 253788 - RNA, 16 nt, Homo sapiens
gauuuaucuagcuguc

SEQ ID NO: 253789 - RNA, 14 nt, Homo sapiens
uccaaugaugggau

SEQ ID NO: 253790 - RNA, 19 nt, Homo sapiens
ggaguuuaaacugaaugaa

SEQ ID NO: 253791 - RNA, 15 nt, Homo sapiens
uauuaaaacauugga

SEQ ID NO: 253792 - RNA, 15 nt, Homo sapiens
gaagaaauaacaaau

SEQ ID NO: 253793 - RNA, 13 nt, Homo sapiens
gcauugcucuuau

SEQ ID NO: 253794 - RNA, 21 nt, Homo sapiens
caggggcaaacaccugcugau

SEQ ID NO: 253795 - RNA, 22 nt, Homo sapiens
ugaccucuauaauugccacuga

SEQ ID NO: 253796 - RNA, 17 nt, Homo sapiens
caaagauguggggaaaa

SEQ ID NO: 253797 - RNA, 15 nt, Homo sapiens
auccuguaguacaag

SEQ ID NO: 253798 - RNA, 14 nt, Homo sapiens
gauuuuggcaaagc

SEQ ID NO: 253799 - RNA, 19 nt, Homo sapiens
uuaggcacccauccuagag

SEQ ID NO: 253800 - RNA, 16 nt, Homo sapiens
uccacaaaucaucugu

SEQ ID NO: 253801 - RNA, 15 nt, Homo sapiens
cagaagaugugauga

SEQ ID NO: 253802 - RNA, 16 nt, Homo sapiens
auuaugcaggggcaaa

SEQ ID NO: 253803 - RNA, 21 nt, Homo sapiens
gaguacuuugaagaugucauc

SEQ ID NO: 253804 - RNA, 13 nt, Homo sapiens
aguucccaugacu

SEQ ID NO: 253805 - RNA, 19 nt, Homo sapiens
aaaauguccaccaauagaa

SEQ ID NO: 253806 - RNA, 15 nt, Homo sapiens
ccugugaucaagcaa

SEQ ID NO: 253807 - RNA, 21 nt, Homo sapiens
cuaggagcugguguggccaag

SEQ ID NO: 253808 - RNA, 20 nt, Homo sapiens
gguacacguaaaucuguuca

SEQ ID NO: 253809 - RNA, 13 nt, Homo sapiens
cugcugaugcuca

SEQ ID NO: 253810 - RNA, 20 nt, Homo sapiens
cuauaauugccacugagaga

SEQ ID NO: 253811 - RNA, 12 nt, Homo sapiens
cuggaugaaguu

SEQ ID NO: 253812 - RNA, 21 nt, Homo sapiens
aaaauaggagagagaucauga

SEQ ID NO: 253813 - RNA, 17 nt, Homo sapiens
caaugucagaugaaguc

SEQ ID NO: 253814 - RNA, 14 nt, Homo sapiens
aguucucaauguuc

SEQ ID NO: 253815 - RNA, 20 nt, Homo sapiens
uguugucaauaacagguuug

SEQ ID NO: 253816 - RNA, 16 nt, Homo sapiens
aaaccagccaucccau

SEQ ID NO: 253817 - RNA, 16 nt, Homo sapiens
gacucauugcuucaca

SEQ ID NO: 253818 - RNA, 22 nt, Homo sapiens
ugcuucuuuccuuuccauugua

SEQ ID NO: 253819 - RNA, 18 nt, Homo sapiens
cagaaggcuacauauaca

SEQ ID NO: 253820 - RNA, 14 nt, Homo sapiens
uauauucaagguua

SEQ ID NO: 253821 - RNA, 13 nt, Homo sapiens
caaauaaaccuuu

SEQ ID NO: 253822 - RNA, 12 nt, Homo sapiens
cauguugucaau

SEQ ID NO: 253823 - RNA, 23 nt, Homo sapiens
ugcaggggcaaacaccugcugau

SEQ ID NO: 253824 - RNA, 17 nt, Homo sapiens
cugcagaagaugugaug

SEQ ID NO: 253825 - RNA, 16 nt, Homo sapiens
aagaagaagugaccaa

SEQ ID NO: 253826 - RNA, 12 nt, Homo sapiens
ugggcacaacca

SEQ ID NO: 253827 - RNA, 20 nt, Homo sapiens
uucucaauguucuuuuccaa

SEQ ID NO: 253828 - RNA, 17 nt, Homo sapiens
ucauugcuucacaaccc

SEQ ID NO: 253829 - RNA, 17 nt, Homo sapiens
uggcauuacaauugcag

SEQ ID NO: 253830 - RNA, 14 nt, Homo sapiens
aaauuaaaagcuau

SEQ ID NO: 253831 - RNA, 14 nt, Homo sapiens
ccauuguagcucuu

SEQ ID NO: 253832 - RNA, 14 nt, Homo sapiens
acaauuauguuuuc

SEQ ID NO: 253833 - RNA, 20 nt, Homo sapiens
agggugguggugguggugaa

SEQ ID NO: 253834 - RNA, 14 nt, Homo sapiens
uaagcuacugauga

SEQ ID NO: 253835 - RNA, 13 nt, Homo sapiens
cagccugccugga

SEQ ID NO: 253836 - RNA, 17 nt, Homo sapiens
ucggcuccuggacucau

SEQ ID NO: 253837 - RNA, 13 nt, Homo sapiens
gaggaaagaaaga

SEQ ID NO: 253838 - RNA, 18 nt, Homo sapiens
auuuuaacaacacacaau

SEQ ID NO: 253839 - RNA, 15 nt, Homo sapiens
guuauacaaccauca

SEQ ID NO: 253840 - RNA, 17 nt, Homo sapiens
auccucacucauuccca

SEQ ID NO: 253841 - RNA, 18 nt, Homo sapiens
auauacgaacaaaacaca

SEQ ID NO: 253842 - RNA, 22 nt, Homo sapiens
aggaaagaaagagcaucaggaa

SEQ ID NO: 253843 - RNA, 16 nt, Homo sapiens
cugcccaggugugagc

SEQ ID NO: 253844 - RNA, 17 nt, Homo sapiens
gaaaauuguacaaccug

SEQ ID NO: 253845 - RNA, 21 nt, Homo sapiens
aagcagaaaauuguacaaccu

SEQ ID NO: 253846 - RNA, 16 nt, Homo sapiens
gucacgcaagcuaguu

SEQ ID NO: 253847 - RNA, 17 nt, Homo sapiens
caaccucggcuccugga

SEQ ID NO: 253848 - RNA, 16 nt, Homo sapiens
uaugcuguauccacaa

SEQ ID NO: 253849 - RNA, 17 nt, Homo sapiens
cucaauugucauugaua

SEQ ID NO: 253850 - RNA, 18 nt, Homo sapiens
caugggucucuguagaaa

SEQ ID NO: 253851 - RNA, 21 nt, Homo sapiens
ccacugagagaucugcuguca

SEQ ID NO: 253852 - RNA, 22 nt, Homo sapiens
cuggaguacuuugaagauguca

SEQ ID NO: 253853 - RNA, 20 nt, Homo sapiens
ucaugguccccauggcaugg

SEQ ID NO: 253854 - RNA, 21 nt, Homo sapiens
aaagauguuauacaaccauca

SEQ ID NO: 253855 - RNA, 24 nt, Homo sapiens
aagauacaugucuuucuccaggga

SEQ ID NO: 253856 - RNA, 16 nt, Homo sapiens
ccaucaaaguggcaaa

SEQ ID NO: 253857 - RNA, 13 nt, Homo sapiens
agaugucauccca

SEQ ID NO: 253858 - RNA, 20 nt, Homo sapiens
ggggauacuggcaaagcaga

SEQ ID NO: 253859 - RNA, 16 nt, Homo sapiens
gagaaauuaccaaaau

SEQ ID NO: 253860 - RNA, 13 nt, Homo sapiens
augcaacucaucu

SEQ ID NO: 253861 - RNA, 14 nt, Homo sapiens
ucaaguauuggcaa

SEQ ID NO: 253862 - RNA, 14 nt, Homo sapiens
auaaaaaugacaac

SEQ ID NO: 253863 - RNA, 18 nt, Homo sapiens
gcaugggggccucagggc

SEQ ID NO: 253864 - RNA, 18 nt, Homo sapiens
aggcagggccugauuuau

SEQ ID NO: 253865 - RNA, 20 nt, Homo sapiens
aaaguaaaauagauggugua

SEQ ID NO: 253866 - RNA, 19 nt, Homo sapiens
agaucaugagaaauuacca

SEQ ID NO: 253867 - RNA, 22 nt, Homo sapiens
aacaaccucggcuccuggacuc

SEQ ID NO: 253868 - RNA, 19 nt, Homo sapiens
augguaaccucuacuauga

SEQ ID NO: 253869 - RNA, 15 nt, Homo sapiens
ccuggaugaaguuau

SEQ ID NO: 253870 - RNA, 11 nt, Homo sapiens
guagcucuuug

SEQ ID NO: 253871 - RNA, 22 nt, Homo sapiens
aaaauguccaccaauagaauga

SEQ ID NO: 253872 - RNA, 16 nt, Homo sapiens
uagaaagauggggcau

SEQ ID NO: 253873 - RNA, 16 nt, Homo sapiens
auuguacaaccuguga

SEQ ID NO: 253874 - RNA, 15 nt, Homo sapiens
agaagaagugaccaa

SEQ ID NO: 253875 - RNA, 11 nt, Homo sapiens
gcuccuggacu

SEQ ID NO: 253876 - RNA, 22 nt, Homo sapiens
augaugggauaucugaggccau

SEQ ID NO: 253877 - RNA, 14 nt, Homo sapiens
acccaucuaccccu

SEQ ID NO: 253878 - RNA, 15 nt, Homo sapiens
cuuucuccagaucag

SEQ ID NO: 253879 - RNA, 16 nt, Homo sapiens
cagguuuacuauguuu

SEQ ID NO: 253880 - RNA, 16 nt, Homo sapiens
agucuucucuucugcc

SEQ ID NO: 253881 - RNA, 14 nt, Homo sapiens
uauuagcccagaaa

SEQ ID NO: 253882 - RNA, 21 nt, Homo sapiens
uaugcagaaggcuacauauac

SEQ ID NO: 253883 - RNA, 14 nt, Homo sapiens
guggcaacugcuga

SEQ ID NO: 253884 - RNA, 15 nt, Homo sapiens
gugcaguuuucagga

SEQ ID NO: 253885 - RNA, 12 nt, Homo sapiens
ggagcucaguua

SEQ ID NO: 253886 - RNA, 16 nt, Homo sapiens
gaucugcugucagucu

SEQ ID NO: 253887 - RNA, 19 nt, Homo sapiens
uuguacugugcaguuuuca

SEQ ID NO: 253888 - RNA, 19 nt, Homo sapiens
gaagaucaggccaacccca

SEQ ID NO: 253889 - RNA, 24 nt, Homo sapiens
agcagucuucucuucugccuuuau

SEQ ID NO: 253890 - RNA, 19 nt, Homo sapiens
ccaggaaaggauuuuauaa

SEQ ID NO: 253891 - RNA, 22 nt, Homo sapiens
ccuagagaaaacuugaauucau

SEQ ID NO: 253892 - RNA, 17 nt, Homo sapiens
cuccuggaucuaugugu

SEQ ID NO: 253893 - RNA, 16 nt, Homo sapiens
aagaagugaccaagga

SEQ ID NO: 253894 - RNA, 22 nt, Homo sapiens
cagugcugugucauuccaaaua

SEQ ID NO: 253895 - RNA, 13 nt, Homo sapiens
ucugaccucuaua

SEQ ID NO: 253896 - RNA, 13 nt, Homo sapiens
agucaacaguauc

SEQ ID NO: 253897 - RNA, 16 nt, Homo sapiens
cuauauuuccaccucu

SEQ ID NO: 253898 - RNA, 12 nt, Homo sapiens
ucaaaguggcaa

SEQ ID NO: 253899 - RNA, 14 nt, Homo sapiens
gagagaucugcugu

SEQ ID NO: 253900 - RNA, 17 nt, Homo sapiens
ugagugaaucaccugug

SEQ ID NO: 253901 - RNA, 20 nt, Homo sapiens
guaucaauggagcaugugug

SEQ ID NO: 253902 - RNA, 17 nt, Homo sapiens
uguaucguauugagugg

SEQ ID NO: 253903 - RNA, 23 nt, Homo sapiens
uaugcaacucaucuucacagauu

SEQ ID NO: 253904 - RNA, 23 nt, Homo sapiens
gagauacagcucagagugccacg

SEQ ID NO: 253905 - RNA, 14 nt, Homo sapiens
ugcauugcucuuau

SEQ ID NO: 253906 - RNA, 20 nt, Homo sapiens
uacaaccugugaucaagcaa

SEQ ID NO: 253907 - RNA, 23 nt, Homo sapiens
gaagaucaggccaaccccaaaga

SEQ ID NO: 253908 - RNA, 21 nt, Homo sapiens
ugcaauagaauaaaaaugaca

SEQ ID NO: 253909 - RNA, 14 nt, Homo sapiens
ggcuaguugggaug

SEQ ID NO: 253910 - RNA, 18 nt, Homo sapiens
agaagaagugaccaagga

SEQ ID NO: 253911 - RNA, 17 nt, Homo sapiens
auucccauguugucaau

SEQ ID NO: 253912 - RNA, 15 nt, Homo sapiens
ggcuggagguaggcu

SEQ ID NO: 253913 - RNA, 21 nt, Homo sapiens
acaaccugugaucaagcaaua

SEQ ID NO: 253914 - RNA, 13 nt, Homo sapiens
uaguaacaagaaa

SEQ ID NO: 253915 - RNA, 21 nt, Homo sapiens
ugcaguuuugccuaauggcaa

SEQ ID NO: 253916 - RNA, 17 nt, Homo sapiens
acaaauuaaaagcuaua

SEQ ID NO: 253917 - RNA, 17 nt, Homo sapiens
uaugcaacucaucuuca

SEQ ID NO: 253918 - RNA, 21 nt, Homo sapiens
auguucuuuuccaacacaucu

SEQ ID NO: 253919 - RNA, 21 nt, Homo sapiens
guacugcaagaaggagcucag

SEQ ID NO: 253920 - RNA, 19 nt, Homo sapiens
ggcauuacaauugcaguuu

SEQ ID NO: 253921 - RNA, 22 nt, Homo sapiens
ugaauucauagaaaaaguaggu

SEQ ID NO: 253922 - RNA, 15 nt, Homo sapiens
agggcugagugcccu

SEQ ID NO: 253923 - RNA, 19 nt, Homo sapiens
cuuauucugucuggcauua

SEQ ID NO: 253924 - RNA, 16 nt, Homo sapiens
ugcugugucauuccaa

SEQ ID NO: 253925 - RNA, 20 nt, Homo sapiens
aaccuugggaagauguauca

SEQ ID NO: 253926 - RNA, 15 nt, Homo sapiens
uauaauauacuaugc

SEQ ID NO: 253927 - RNA, 16 nt, Homo sapiens
guacaaccugugauca

SEQ ID NO: 253928 - RNA, 17 nt, Homo sapiens
aaaaauauuaaauagaa

SEQ ID NO: 253929 - RNA, 19 nt, Homo sapiens
uagaaugagugaaucaccu

SEQ ID NO: 253930 - RNA, 15 nt, Homo sapiens
aggguauggggcuag

SEQ ID NO: 253931 - RNA, 16 nt, Homo sapiens
auaggagagagaucau

SEQ ID NO: 253932 - RNA, 22 nt, Homo sapiens
aaugagugaaucaccuguggua

SEQ ID NO: 253933 - RNA, 18 nt, Homo sapiens
aauuuuaggcacccaucc

SEQ ID NO: 253934 - RNA, 20 nt, Homo sapiens
auagaaugagugaaucaccu

SEQ ID NO: 253935 - RNA, 14 nt, Homo sapiens
acaugcauugcucu

SEQ ID NO: 253936 - RNA, 17 nt, Homo sapiens
accucuauaauugccac

SEQ ID NO: 253937 - RNA, 15 nt, Homo sapiens
uugccucucaauugu

SEQ ID NO: 253938 - RNA, 19 nt, Homo sapiens
acucauucccauguuguca

SEQ ID NO: 253939 - RNA, 14 nt, Homo sapiens
aaguggcaaaaaua

SEQ ID NO: 253940 - RNA, 16 nt, Homo sapiens
aaggaagaucaggcca

SEQ ID NO: 253941 - RNA, 18 nt, Homo sapiens
cacguaaaucuguucaag

SEQ ID NO: 253942 - RNA, 15 nt, Homo sapiens
gccaaccccaaagaa

SEQ ID NO: 253943 - RNA, 23 nt, Homo sapiens
gcagucuucucuucugccuuuau

SEQ ID NO: 253944 - RNA, 19 nt, Homo sapiens
caguuuucaggaugagaug

SEQ ID NO: 253945 - RNA, 16 nt, Homo sapiens
cugccuuuaugagauu

SEQ ID NO: 253946 - RNA, 18 nt, Homo sapiens
uggaaaaaaaaaagaugu

SEQ ID NO: 253947 - RNA, 19 nt, Homo sapiens
aauuguacaaccugugauc

SEQ ID NO: 253948 - RNA, 22 nt, Homo sapiens
cauguggaaaaaaaaaagaugu

SEQ ID NO: 253949 - RNA, 18 nt, Homo sapiens
gaacaaccucggcuccug

SEQ ID NO: 253950 - RNA, 14 nt, Homo sapiens
ggaugcccaaagau

SEQ ID NO: 253951 - RNA, 21 nt, Homo sapiens
acagauuguucuaaaguaaaa

SEQ ID NO: 253952 - RNA, 17 nt, Homo sapiens
aaaguucucaauguucu

SEQ ID NO: 253953 - RNA, 20 nt, Homo sapiens
ucuggggauacuggcaaagc

SEQ ID NO: 253954 - RNA, 12 nt, Homo sapiens
cucuguagaaau

SEQ ID NO: 253955 - RNA, 14 nt, Homo sapiens
uaugagauugggua

SEQ ID NO: 253956 - RNA, 16 nt, Homo sapiens
guugcagaauguggag

SEQ ID NO: 253957 - RNA, 23 nt, Homo sapiens
accacuguaagugagaacaaauu

SEQ ID NO: 253958 - RNA, 23 nt, Homo sapiens
ugaccucuauaauugccacugag

SEQ ID NO: 253959 - RNA, 12 nt, Homo sapiens
ugcauugcucuu

SEQ ID NO: 253960 - RNA, 20 nt, Homo sapiens
gcagaaaauuguacaaccug

SEQ ID NO: 253961 - RNA, 14 nt, Homo sapiens
uggcaaaagaguca

SEQ ID NO: 253962 - RNA, 19 nt, Homo sapiens
uaggagagagaucaugaga

SEQ ID NO: 253963 - RNA, 14 nt, Homo sapiens
ugcuguauccacaa

SEQ ID NO: 253964 - RNA, 22 nt, Homo sapiens
aggacaaaauaaggaacaugaa

SEQ ID NO: 253965 - RNA, 16 nt, Homo sapiens
aaucuggggauacugg

SEQ ID NO: 253966 - RNA, 12 nt, Homo sapiens
ccuaauggcaaa

SEQ ID NO: 253967 - RNA, 15 nt, Homo sapiens
gcaagcuaguuccca

SEQ ID NO: 253968 - RNA, 20 nt, Homo sapiens
aaaauggggaagaguugaaa

SEQ ID NO: 253969 - RNA, 20 nt, Homo sapiens
gaaaaccugaagaguucacu

SEQ ID NO: 253970 - RNA, 22 nt, Homo sapiens
aaaucuguucaaggaaucauug

SEQ ID NO: 253971 - RNA, 13 nt, Homo sapiens
ucuauuuaugcaa

SEQ ID NO: 253972 - RNA, 20 nt, Homo sapiens
cagugcugugucauuccaaa

SEQ ID NO: 253973 - RNA, 17 nt, Homo sapiens
cuggacucauugcuuca

SEQ ID NO: 253974 - RNA, 14 nt, Homo sapiens
auccuuccacggac

SEQ ID NO: 253975 - RNA, 15 nt, Homo sapiens
uuuccuuuccauugu

SEQ ID NO: 253976 - RNA, 21 nt, Homo sapiens
cauccuagagaaaacuugaau

SEQ ID NO: 253977 - RNA, 22 nt, Homo sapiens
gaguacuuugaagaugucaucc

SEQ ID NO: 253978 - RNA, 16 nt, Homo sapiens
cagugcugugucauuc

SEQ ID NO: 253979 - RNA, 16 nt, Homo sapiens
ucuaaaguagcuuucu

SEQ ID NO: 253980 - RNA, 19 nt, Homo sapiens
auuccccugcccaggugug

SEQ ID NO: 253981 - RNA, 19 nt, Homo sapiens
ucuucugccuuuaugagau

SEQ ID NO: 253982 - RNA, 19 nt, Homo sapiens
uaaacgguuaacaauauua

SEQ ID NO: 253983 - RNA, 16 nt, Homo sapiens
auguaucaauggagca

SEQ ID NO: 253984 - RNA, 16 nt, Homo sapiens
agcucaguuacggggu

SEQ ID NO: 253985 - RNA, 15 nt, Homo sapiens
uaauugccacugaga

SEQ ID NO: 253986 - RNA, 15 nt, Western equine encephalomyelitis virus
ugacacuaaaacucg

SEQ ID NO: 253987 - RNA, 20 nt, Western equine encephalomyelitis virus
ucucuaauauacacuacaca

SEQ ID NO: 253988 - RNA, 15 nt, Western equine encephalomyelitis virus
uccaccgccaaagaa

SEQ ID NO: 253989 - RNA, 20 nt, Western equine encephalomyelitis virus
ucacauuaaucguauaucac

SEQ ID NO: 253990 - RNA, 17 nt, Western equine encephalomyelitis virus
uggagucggacaagaca

SEQ ID NO: 253991 - RNA, 17 nt, Western equine encephalomyelitis virus
ugcuccuaagccaaaac

SEQ ID NO: 253992 - RNA, 16 nt, Western equine encephalomyelitis virus
agucaacuugacuuuc

SEQ ID NO: 253993 - RNA, 16 nt, Western equine encephalomyelitis virus
auauuaacaacacuau

SEQ ID NO: 253994 - RNA, 14 nt, Western equine encephalomyelitis virus
agcagcaagccaag

SEQ ID NO: 253995 - RNA, 14 nt, Western equine encephalomyelitis virus
agccaaaaccuacu

SEQ ID NO: 253996 - RNA, 14 nt, Western equine encephalomyelitis virus
agcacagugcauaa

SEQ ID NO: 253997 - RNA, 15 nt, Western equine encephalomyelitis virus
agcacagugcauaau

SEQ ID NO: 253998 - RNA, 18 nt, Western equine encephalomyelitis virus
agagugcuccuaagccaa

SEQ ID NO: 253999 - RNA, 20 nt, Western equine encephalomyelitis virus
agagugcuccuaagccaaaa

SEQ ID NO: 254000 - RNA, 20 nt, Western equine encephalomyelitis virus
acauagcgguaaaacucgau

SEQ ID NO: 254001 - RNA, 18 nt, Western equine encephalomyelitis virus
acauauuaacaacacuau

SEQ ID NO: 254002 - RNA, 23 nt, Western equine encephalomyelitis virus
acauauuaacaacacuauaucac

SEQ ID NO: 254003 - RNA, 15 nt, Western equine encephalomyelitis virus
acaacacuauaucac

SEQ ID NO: 254004 - RNA, 18 nt, Western equine encephalomyelitis virus
acuuaaaaacacuauaca

SEQ ID NO: 254005 - RNA, 13 nt, Western equine encephalomyelitis virus
acuacacauauuu

SEQ ID NO: 254006 - RNA, 11 nt, Western equine encephalomyelitis virus
acuacauauua

SEQ ID NO: 254007 - RNA, 14 nt, Western equine encephalomyelitis virus
accuacucagccua

SEQ ID NO: 254008 - RNA, 14 nt, Western equine encephalomyelitis virus
auuaacaacacuau

SEQ ID NO: 254009 - RNA, 21 nt, Western equine encephalomyelitis virus
augcugugcagugucacauua

SEQ ID NO: 254010 - RNA, 24 nt, Western equine encephalomyelitis virus
ccaaagaagaagaagagugcuccu

SEQ ID NO: 254011 - RNA, 18 nt, Western equine encephalomyelitis virus
cagguccaccgccaaaga

SEQ ID NO: 254012 - RNA, 18 nt, Western equine encephalomyelitis virus
cauauuaacaacacuaua

SEQ ID NO: 254013 - RNA, 16 nt, Western equine encephalomyelitis virus
ggaagcguggugcaua

SEQ ID NO: 254014 - RNA, 16 nt, Western equine encephalomyelitis virus
ggaagcacagugcaua

SEQ ID NO: 254015 - RNA, 14 nt, Western equine encephalomyelitis virus
gcuccuaagccaaa

SEQ ID NO: 254016 - RNA, 17 nt, Western equine encephalomyelitis virus
uaacaacacuauaucac

SEQ ID NO: 254017 - RNA, 22 nt, Western equine encephalomyelitis virus
uacauauuaacaacacuauauc

SEQ ID NO: 254018 - RNA, 19 nt, Western equine encephalomyelitis virus
uacuuaaaaacacuauaca

SEQ ID NO: 254019 - RNA, 17 nt, Western equine encephalomyelitis virus
uauacacuacacauauu

SEQ ID NO: 254020 - RNA, 14 nt, Western equine encephalomyelitis virus
uauaucacacuaca

SEQ ID NO: 254021 - RNA, 16 nt, Western equine encephalomyelitis virus
uauaucacacuacaua

SEQ ID NO: 254022 - RNA, 19 nt, Western equine encephalomyelitis virus
uagacacgcaccuacccac

SEQ ID NO: 254023 - RNA, 16 nt, Western equine encephalomyelitis virus
cucuaauauacacuac

SEQ ID NO: 254024 - RNA, 17 nt, Western equine encephalomyelitis virus
cucuaauauacacuaca

SEQ ID NO: 254025 - RNA, 13 nt, Western equine encephalomyelitis virus
cuccuaagccaaa

SEQ ID NO: 254026 - RNA, 19 nt, Western equine encephalomyelitis virus
cuuuuaugagacucacuau

SEQ ID NO: 254027 - RNA, 16 nt, Western equine encephalomyelitis virus
gaagcacagugcauaa

SEQ ID NO: 254028 - RNA, 15 nt, Western equine encephalomyelitis virus
ugcuccuaagccaaa

SEQ ID NO: 254029 - RNA, 22 nt, Western equine encephalomyelitis virus
uuaacaacacuauaucacuuuu

SEQ ID NO: 254030 - RNA, 14 nt, Western equine encephalomyelitis virus
uuaaaaacacuaua

SEQ ID NO: 254031 - RNA, 14 nt, Western equine encephalomyelitis virus
aagcagcaagccaa

SEQ ID NO: 254032 - RNA, 17 nt, Western equine encephalomyelitis virus
guauaucacacuacaua

SEQ ID NO: 254033 - RNA, 13 nt, Western equine encephalomyelitis virus
uaacaacacuaua

SEQ ID NO: 254034 - RNA, 12 nt, Western equine encephalomyelitis virus
uauacacuacac

SEQ ID NO: 254035 - RNA, 14 nt, Western equine encephalomyelitis virus
uauuaacaacacua

SEQ ID NO: 254036 - RNA, 17 nt, Western equine encephalomyelitis virus
uccaccgccaaagaaga

SEQ ID NO: 254037 - RNA, 21 nt, Western equine encephalomyelitis virus
uccgaggaagcguggugcaua

SEQ ID NO: 254038 - RNA, 22 nt, Western equine encephalomyelitis virus
uccgaggaagcacagugcauaa

SEQ ID NO: 254039 - RNA, 16 nt, Western equine encephalomyelitis virus
caguuuacccuacaaa

SEQ ID NO: 254040 - RNA, 15 nt, Western equine encephalomyelitis virus
cagugucacauuaau

SEQ ID NO: 254041 - RNA, 21 nt, Western equine encephalomyelitis virus
cauuaaucguauaucacacua

SEQ ID NO: 254042 - RNA, 21 nt, Western equine encephalomyelitis virus
cguauaucacacuacauauua

SEQ ID NO: 254043 - RNA, 13 nt, Western equine encephalomyelitis virus
cguggugcauaau

SEQ ID NO: 254044 - RNA, 22 nt, Western equine encephalomyelitis virus
cuaugggucucuaauauacacu

SEQ ID NO: 254045 - RNA, 13 nt, Western equine encephalomyelitis virus
gcagcaagccaag

SEQ ID NO: 254046 - RNA, 19 nt, Western equine encephalomyelitis virus
gaggaagcguggugcauaa

SEQ ID NO: 254047 - RNA, 19 nt, Western equine encephalomyelitis virus
gagugcuccuaagccaaaa

SEQ ID NO: 254048 - RNA, 22 nt, Western equine encephalomyelitis virus
acuaugggucucuaauauacac

SEQ ID NO: 254049 - RNA, 15 nt, Western equine encephalomyelitis virus
agagugcuccuaagc

SEQ ID NO: 254050 - RNA, 16 nt, Western equine encephalomyelitis virus
agaagcagcaagccaa

SEQ ID NO: 254051 - RNA, 15 nt, Western equine encephalomyelitis virus
agaagagugcuccua

SEQ ID NO: 254052 - RNA, 16 nt, Western equine encephalomyelitis virus
agaagagugcuccuaa

SEQ ID NO: 254053 - RNA, 22 nt, Western equine encephalomyelitis virus
agaagagugcuccuaagccaaa

SEQ ID NO: 254054 - RNA, 19 nt, Western equine encephalomyelitis virus
acccucagcugaacuuucc

SEQ ID NO: 254055 - RNA, 16 nt, Western equine encephalomyelitis virus
acacuauacacacuuu

SEQ ID NO: 254056 - RNA, 15 nt, Western equine encephalomyelitis virus
acacuauaucacuuu

SEQ ID NO: 254057 - RNA, 19 nt, Western equine encephalomyelitis virus
acauagcgguaaaacucga

SEQ ID NO: 254058 - RNA, 22 nt, Western equine encephalomyelitis virus
aaguuggagucggacaagacau

SEQ ID NO: 254059 - RNA, 20 nt, Western equine encephalomyelitis virus
aagaagaagcagcaagccaa

SEQ ID NO: 254060 - RNA, 16 nt, Western equine encephalomyelitis virus
aagaagcagcaagcca

SEQ ID NO: 254061 - RNA, 13 nt, Western equine encephalomyelitis virus
agauccaaacccu

SEQ ID NO: 254062 - RNA, 19 nt, Western equine encephalomyelitis virus
agauccaaacccuccuagg

SEQ ID NO: 254063 - RNA, 14 nt, Western equine encephalomyelitis virus
agcguggugcauaa

SEQ ID NO: 254064 - RNA, 13 nt, Western equine encephalomyelitis virus
auacccucagcug

SEQ ID NO: 254065 - RNA, 14 nt, Western equine encephalomyelitis virus
auacacacuuuaua

SEQ ID NO: 254066 - RNA, 22 nt, Western equine encephalomyelitis virus
auauuuuacuuaaaaacacuau

SEQ ID NO: 254067 - RNA, 23 nt, Western equine encephalomyelitis virus
auauuuuacuuaaaaacacuaua

SEQ ID NO: 254068 - RNA, 16 nt, Western equine encephalomyelitis virus
auuaacaacacuauau

SEQ ID NO: 254069 - RNA, 13 nt, Western equine encephalomyelitis virus
cacuacacauauu

SEQ ID NO: 254070 - RNA, 13 nt, Western equine encephalomyelitis virus
cacagugcauaau

SEQ ID NO: 254071 - RNA, 16 nt, Western equine encephalomyelitis virus
caacuugacuuucaaa

SEQ ID NO: 254072 - RNA, 12 nt, Western equine encephalomyelitis virus
aaaacacuauac

SEQ ID NO: 254073 - RNA, 22 nt, Western equine encephalomyelitis virus
uccgaggaagcguggugcauaa

SEQ ID NO: 254074 - RNA, 21 nt, Western equine encephalomyelitis virus
uccgaggaagcacagugcaua

SEQ ID NO: 254075 - RNA, 18 nt, Western equine encephalomyelitis virus
uccaccaguuuacccuac

SEQ ID NO: 254076 - RNA, 18 nt, Western equine encephalomyelitis virus
ucuaauauacacuacaca

SEQ ID NO: 254077 - RNA, 16 nt, Western equine encephalomyelitis virus
uuccgaucaugcugaa

SEQ ID NO: 254078 - RNA, 18 nt, Western equine encephalomyelitis virus
uugacacuaaaacucgau

SEQ ID NO: 254079 - RNA, 17 nt, Western equine encephalomyelitis virus
uuaacaacacuauauca

SEQ ID NO: 254080 - RNA, 13 nt, Western equine encephalomyelitis virus
uuaaaaacacuau

SEQ ID NO: 254081 - RNA, 21 nt, Western equine encephalomyelitis virus
uggcuuaccgagauccaaacc

SEQ ID NO: 254082 - RNA, 13 nt, Western equine encephalomyelitis virus
cacuaaaacucga

SEQ ID NO: 254083 - RNA, 17 nt, Western equine encephalomyelitis virus
caacacuauaucacuuu

SEQ ID NO: 254084 - RNA, 20 nt, Western equine encephalomyelitis virus
caacacuauaucacuuuuau

SEQ ID NO: 254085 - RNA, 16 nt, Western equine encephalomyelitis virus
cgaaacgcaagccuaa

SEQ ID NO: 254086 - RNA, 12 nt, Western equine encephalomyelitis virus
cagcaagccaag

SEQ ID NO: 254087 - RNA, 22 nt, Western equine encephalomyelitis virus
cauagcgguaaaacucgaugua

SEQ ID NO: 254088 - RNA, 14 nt, Western equine encephalomyelitis virus
agcugaacuuucca

SEQ ID NO: 254089 - RNA, 14 nt, Western equine encephalomyelitis virus
auauacacuacaca

SEQ ID NO: 254090 - RNA, 21 nt, Western equine encephalomyelitis virus
auaucacacuacauauuaaca

SEQ ID NO: 254091 - RNA, 18 nt, Western equine encephalomyelitis virus
agaagcagcaagccaaga

SEQ ID NO: 254092 - RNA, 13 nt, Western equine encephalomyelitis virus
agacacgcaccua

SEQ ID NO: 254093 - RNA, 18 nt, Western equine encephalomyelitis virus
acauuaaucguauaucac

SEQ ID NO: 254094 - RNA, 18 nt, Western equine encephalomyelitis virus
acacuauaucacuuuuau

SEQ ID NO: 254095 - RNA, 17 nt, Western equine encephalomyelitis virus
uaaaaacacuauacaca

SEQ ID NO: 254096 - RNA, 23 nt, Western equine encephalomyelitis virus
uaaaaacacuauacacacuuuau

SEQ ID NO: 254097 - RNA, 21 nt, Western equine encephalomyelitis virus
uacccucagcugaacuuucca

SEQ ID NO: 254098 - RNA, 23 nt, Western equine encephalomyelitis virus
uacccaccggcagaauguuucca

SEQ ID NO: 254099 - RNA, 23 nt, Western equine encephalomyelitis virus
uauuuccgaggaagcacagugca

SEQ ID NO: 254100 - RNA, 13 nt, Western equine encephalomyelitis virus
uaucacacuacau

SEQ ID NO: 254101 - RNA, 19 nt, Western equine encephalomyelitis virus
cuuaaaaacacuauacaca

SEQ ID NO: 254102 - RNA, 12 nt, Western equine encephalomyelitis virus
cucagccuaaaa

SEQ ID NO: 254103 - RNA, 20 nt, Western equine encephalomyelitis virus
cucacuaugggucucuaaua

SEQ ID NO: 254104 - RNA, 15 nt, Western equine encephalomyelitis virus
cuauaucacuuuuau

SEQ ID NO: 254105 - RNA, 22 nt, Western equine encephalomyelitis virus
cuacauauuaacaacacuauau

SEQ ID NO: 254106 - RNA, 20 nt, Western equine encephalomyelitis virus
gaagagugcuccuaagccaa

SEQ ID NO: 254107 - RNA, 21 nt, Western equine encephalomyelitis virus
gaagagugcuccuaagccaaa

SEQ ID NO: 254108 - RNA, 19 nt, Western equine encephalomyelitis virus
cgaggaagcacagugcaua

SEQ ID NO: 254109 - RNA, 19 nt, Western equine encephalomyelitis virus
cgaggaagcguggugcaua

SEQ ID NO: 254110 - RNA, 20 nt, Western equine encephalomyelitis virus
ccgaggaagcguggugcaua

SEQ ID NO: 254111 - RNA, 21 nt, Western equine encephalomyelitis virus
ccgaggaagcguggugcauaa

SEQ ID NO: 254112 - RNA, 20 nt, Western equine encephalomyelitis virus
ccgaggaagcacagugcaua

SEQ ID NO: 254113 - RNA, 21 nt, Western equine encephalomyelitis virus
ccgaggaagcacagugcauaa

SEQ ID NO: 254114 - RNA, 20 nt, Western equine encephalomyelitis virus
cuaauauacacuacacauau

SEQ ID NO: 254115 - RNA, 22 nt, Western equine encephalomyelitis virus
cuaauauacacuacacauauuu

SEQ ID NO: 254116 - RNA, 13 nt, Western equine encephalomyelitis virus
cuacucagccuaa

SEQ ID NO: 254117 - RNA, 15 nt, Western equine encephalomyelitis virus
cuauacacacuuuau

SEQ ID NO: 254118 - RNA, 12 nt, Western equine encephalomyelitis virus
aaacucgaugua

SEQ ID NO: 254119 - RNA, 19 nt, Western equine encephalomyelitis virus
gacacuaaaacucgaugua

SEQ ID NO: 254120 - RNA, 15 nt, Western equine encephalomyelitis virus
gaagcagcaagccaa

SEQ ID NO: 254121 - RNA, 18 nt, Western equine encephalomyelitis virus
aaaccuacucagccuaaa

SEQ ID NO: 254122 - RNA, 15 nt, Western equine encephalomyelitis virus
aaacgcaagccuaaa

SEQ ID NO: 254123 - RNA, 17 nt, Western equine encephalomyelitis virus
ugacacuaaaacucgau

SEQ ID NO: 254124 - RNA, 20 nt, Western equine encephalomyelitis virus
ugacauagcgguaaaacucg

SEQ ID NO: 254125 - RNA, 22 nt, Western equine encephalomyelitis virus
ugacauagcgguaaaacucgau

SEQ ID NO: 254126 - RNA, 12 nt, Western equine encephalomyelitis virus
ucguauaucaca

SEQ ID NO: 254127 - RNA, 16 nt, Western equine encephalomyelitis virus
ucagccuaaaaagaag

SEQ ID NO: 254128 - RNA, 18 nt, Western equine encephalomyelitis virus
uagucaacuugacuuuca

SEQ ID NO: 254129 - RNA, 14 nt, Western equine encephalomyelitis virus
uaauauacacuaca

SEQ ID NO: 254130 - RNA, 16 nt, Western equine encephalomyelitis virus
uaauauacacuacaca

SEQ ID NO: 254131 - RNA, 13 nt, Western equine encephalomyelitis virus
uaaucguauauca

SEQ ID NO: 254132 - RNA, 14 nt, Western equine encephalomyelitis virus
aagcguggugcaua

SEQ ID NO: 254133 - RNA, 16 nt, Western equine encephalomyelitis virus
aagcguggugcauaau

SEQ ID NO: 254134 - RNA, 21 nt, Western equine encephalomyelitis virus
aagaagagugcuccuaagcca

SEQ ID NO: 254135 - RNA, 22 nt, Western equine encephalomyelitis virus
aagaagagugcuccuaagccaa

SEQ ID NO: 254136 - RNA, 22 nt, Western equine encephalomyelitis virus
uuccgaggaagcguggugcaua

SEQ ID NO: 254137 - RNA, 22 nt, Western equine encephalomyelitis virus
uuccgaggaagcacagugcaua

SEQ ID NO: 254138 - RNA, 19 nt, Western equine encephalomyelitis virus
uuccauacccucagcugaa

SEQ ID NO: 254139 - RNA, 20 nt, Western equine encephalomyelitis virus
auuuuacuuaaaaacacuau

SEQ ID NO: 254140 - RNA, 15 nt, Western equine encephalomyelitis virus
caacacuauaucacu

SEQ ID NO: 254141 - RNA, 17 nt, Western equine encephalomyelitis virus
cacuauacacacuuuau

SEQ ID NO: 254142 - RNA, 17 nt, Western equine encephalomyelitis virus
agugcuccuaagccaaa

SEQ ID NO: 254143 - RNA, 19 nt, Western equine encephalomyelitis virus
auauuaacaacacuauauc

SEQ ID NO: 254144 - RNA, 16 nt, Western equine encephalomyelitis virus
agacacgcaccuaccc

SEQ ID NO: 254145 - RNA, 11 nt, Western equine encephalomyelitis virus
agcaagccaag

SEQ ID NO: 254146 - RNA, 18 nt, Western equine encephalomyelitis virus
agaagaagcagcaagcca

SEQ ID NO: 254147 - RNA, 16 nt, Western equine encephalomyelitis virus
acauauuuuacuuaaa

SEQ ID NO: 254148 - RNA, 14 nt, Western equine encephalomyelitis virus
aagcacagugcaua

SEQ ID NO: 254149 - RNA, 15 nt, Western equine encephalomyelitis virus
aagcagcaagccaag

SEQ ID NO: 254150 - RNA, 15 nt, Western equine encephalomyelitis virus
acaacgaucaccuaa

SEQ ID NO: 254151 - RNA, 20 nt, Western equine encephalomyelitis virus
aaaaacacuauacacacuuu

SEQ ID NO: 254152 - RNA, 13 nt, Western equine encephalomyelitis virus
aaacacuauacac

SEQ ID NO: 254153 - RNA, 14 nt, Western equine encephalomyelitis virus
aaacacuauacaca

SEQ ID NO: 254154 - RNA, 20 nt, Western equine encephalomyelitis virus
aaacacuauacacacuuuau

SEQ ID NO: 254155 - RNA, 19 nt, Yellow fever virus
acaaccugaaaccgggaua

SEQ ID NO: 254156 - RNA, 17 nt, Yellow fever virus
aaaccugguuucuggga

SEQ ID NO: 254157 - RNA, 22 nt, Yellow fever virus
aaaccugguuucugggaccucc

SEQ ID NO: 254158 - RNA, 15 nt, Yellow fever virus
acacauugagacaga

SEQ ID NO: 254159 - RNA, 22 nt, Yellow fever virus
accgggauacaaaccacgggug

SEQ ID NO: 254160 - RNA, 14 nt, Yellow fever virus
agaaccggacucca

SEQ ID NO: 254161 - RNA, 12 nt, Yellow fever virus
auauaaaccacg

SEQ ID NO: 254162 - RNA, 15 nt, Yellow fever virus
auaaccgggauacaa

SEQ ID NO: 254163 - RNA, 16 nt, Yellow fever virus
auaaccgggauacaaa

SEQ ID NO: 254164 - RNA, 22 nt, Yellow fever virus
aggcugggacagccgaccucca

SEQ ID NO: 254165 - RNA, 16 nt, Yellow fever virus
aggaauaaccgggaua

SEQ ID NO: 254166 - RNA, 21 nt, Yellow fever virus
uuccuccagaggucugugagc

SEQ ID NO: 254167 - RNA, 23 nt, Yellow fever virus
uuagaggagacccuccagggaac

SEQ ID NO: 254168 - RNA, 22 nt, Yellow fever virus
ugguucucugcuuuuccuccag

SEQ ID NO: 254169 - RNA, 19 nt, Yellow fever virus
uggagaaccggacuccaca

SEQ ID NO: 254170 - RNA, 11 nt, Yellow fever virus
uuucugggacc

SEQ ID NO: 254171 - RNA, 19 nt, Yellow fever virus
uccagaggucugugagcac

SEQ ID NO: 254172 - RNA, 22 nt, Yellow fever virus
ugaaaccgggauauaaaccacg

SEQ ID NO: 254173 - RNA, 14 nt, Yellow fever virus
gacagccgaccucc

SEQ ID NO: 254174 - RNA, 16 nt, Yellow fever virus
gaccucccaccccaga

SEQ ID NO: 254175 - RNA, 21 nt, Yellow fever virus
gaccauauugacgccagggaa

SEQ ID NO: 254176 - RNA, 14 nt, Yellow fever virus
aaauagugggacca

SEQ ID NO: 254177 - RNA, 22 nt, Yellow fever virus
gagguuagaggagacccuccag

SEQ ID NO: 254178 - RNA, 19 nt, Yellow fever virus
cuaacaggaauaaccggga

SEQ ID NO: 254179 - RNA, 16 nt, Yellow fever virus
cgggauacaaaccacg

SEQ ID NO: 254180 - RNA, 16 nt, Yellow fever virus
ccgggauauaaaccac

SEQ ID NO: 254181 - RNA, 18 nt, Yellow fever virus
ccugaaaccgggauauaa

SEQ ID NO: 254182 - RNA, 23 nt, Yellow fever virus
ccaucuaacaggaauaaccggga

SEQ ID NO: 254183 - RNA, 20 nt, Yellow fever virus
gaagaaguugucagcccaga

SEQ ID NO: 254184 - RNA, 14 nt, Yellow fever virus
gacccuccagggaa

SEQ ID NO: 254185 - RNA, 23 nt, Yellow fever virus
uaacaggaauaaccgggauacaa

SEQ ID NO: 254186 - RNA, 19 nt, Yellow fever virus
gcugggacagccgaccucc

SEQ ID NO: 254187 - RNA, 14 nt, Yellow fever virus
gcuaagcugugagg

SEQ ID NO: 254188 - RNA, 14 nt, Yellow fever virus
acagccgaccucca

SEQ ID NO: 254189 - RNA, 22 nt, Yellow fever virus
acaggaauaaccgggauacaaa

SEQ ID NO: 254190 - RNA, 20 nt, Yellow fever virus
accucccaccccagaguaaa

SEQ ID NO: 254191 - RNA, 14 nt, Yellow fever virus
acccuccagggaac

SEQ ID NO: 254192 - RNA, 18 nt, Yellow fever virus
accgggauacaaaccacg

SEQ ID NO: 254193 - RNA, 18 nt, Yellow fever virus
accgggauauaaaccacg

SEQ ID NO: 254194 - RNA, 22 nt, Yellow fever virus
accgggauauaaaccacggcug

SEQ ID NO: 254195 - RNA, 18 nt, Yellow fever virus
agacccuccagggaacaa

SEQ ID NO: 254196 - RNA, 19 nt, Yellow fever virus
agacccuccagggaacaaa

SEQ ID NO: 254197 - RNA, 13 nt, Yellow fever virus
agaaaccgggaua

SEQ ID NO: 254198 - RNA, 16 nt, Yellow fever virus
agaaaccgggauaaaa

SEQ ID NO: 254199 - RNA, 13 nt, Yellow fever virus
aucuaacaggaau

SEQ ID NO: 254200 - RNA, 14 nt, Yellow fever virus
agaggucugugagc

SEQ ID NO: 254201 - RNA, 16 nt, Yellow fever virus
agaggucugugagcac

SEQ ID NO: 254202 - RNA, 20 nt, Yellow fever virus
ccacggcuggagaaccgggc

SEQ ID NO: 254203 - RNA, 20 nt, Yellow fever virus
ccucccacguggugguagaa

SEQ ID NO: 254204 - RNA, 13 nt, Yellow fever virus
cccuccagggaac

SEQ ID NO: 254205 - RNA, 12 nt, Yellow fever virus
cagaaaccggga

SEQ ID NO: 254206 - RNA, 23 nt, Yellow fever virus
uuaaaaugaaacagaaaccggga

SEQ ID NO: 254207 - RNA, 15 nt, Yellow fever virus
uugacgccagggaaa

SEQ ID NO: 254208 - RNA, 21 nt, Yellow fever virus
uccccacaaccugaaaccggg

SEQ ID NO: 254209 - RNA, 22 nt, Yellow fever virus
ugccacugcuaagcugugaggc

SEQ ID NO: 254210 - RNA, 17 nt, Yellow fever virus
ugaaacagaaaccggga

SEQ ID NO: 254211 - RNA, 12 nt, Yellow fever virus
uuucugggaccu

SEQ ID NO: 254212 - RNA, 12 nt, Yellow fever virus
agccgaccucca

SEQ ID NO: 254213 - RNA, 13 nt, Yellow fever virus
aauagugggacca

SEQ ID NO: 254214 - RNA, 22 nt, Yellow fever virus
aaccugguuucugggaccuccc

SEQ ID NO: 254215 - RNA, 13 nt, Yellow fever virus
acccuccagggaa

SEQ ID NO: 254216 - RNA, 20 nt, Yellow fever virus
accugguuucugggaccucc

SEQ ID NO: 254217 - RNA, 22 nt, Yellow fever virus
accugguuucugggaccuccca

SEQ ID NO: 254218 - RNA, 15 nt, Yellow fever virus
accaucuaacaggaa

SEQ ID NO: 254219 - RNA, 20 nt, Yellow fever virus
accauauugacgccagggaa

SEQ ID NO: 254220 - RNA, 21 nt, Yellow fever virus
accauauugacgccagggaaa

SEQ ID NO: 254221 - RNA, 12 nt, Yellow fever virus
acauugagacag

SEQ ID NO: 254222 - RNA, 18 nt, Yellow fever virus
agaccuuuggaugacaaa

SEQ ID NO: 254223 - RNA, 14 nt, Yellow fever virus
agacccuccaggga

SEQ ID NO: 254224 - RNA, 17 nt, Yellow fever virus
gagacccuccagggaac

SEQ ID NO: 254225 - RNA, 13 nt, Yellow fever virus
gacgccagggaaa

SEQ ID NO: 254226 - RNA, 19 nt, Yellow fever virus
ccacaaccugaaaccggga

SEQ ID NO: 254227 - RNA, 15 nt, Yellow fever virus
uccacacauugagac

SEQ ID NO: 254228 - RNA, 14 nt, Yellow fever virus
ugcaggcugggaca

SEQ ID NO: 254229 - RNA, 18 nt, Yellow fever virus
cuuuggaugacaaacaca

SEQ ID NO: 254230 - RNA, 12 nt, Yellow fever virus
gaaaaaccuggu

SEQ ID NO: 254231 - RNA, 20 nt, Yellow fever virus
cuagagguuagaggagaccc

SEQ ID NO: 254232 - RNA, 12 nt, Yellow fever virus
uaagcugugagg

SEQ ID NO: 254233 - RNA, 22 nt, Yellow fever virus
cagggaacaaauagugggacca

SEQ ID NO: 254234 - RNA, 14 nt, Yellow fever virus
cccacaaccugaaa

SEQ ID NO: 254235 - RNA, 17 nt, Yellow fever virus
ccgcacuuaaaaugaaa

SEQ ID NO: 254236 - RNA, 11 nt, Yellow fever virus
ccgggauacaa

SEQ ID NO: 254237 - RNA, 16 nt, Yellow fever virus
ccgggauacaaaccac

SEQ ID NO: 254238 - RNA, 17 nt, Yellow fever virus
acugcuaagcugugagg

SEQ ID NO: 254239 - RNA, 20 nt, Yellow fever virus
auauaaaccacggcuggaga

SEQ ID NO: 254240 - RNA, 12 nt, Yellow fever virus
auacaaaccacg

SEQ ID NO: 254241 - RNA, 19 nt, Yellow fever virus
agguuagaggagacccucc

SEQ ID NO: 254242 - RNA, 15 nt, Yellow fever virus
ugguuucugggaccu

SEQ ID NO: 254243 - RNA, 22 nt, Yellow fever virus
uccagguugcgaaaaaccuggu

SEQ ID NO: 254244 - RNA, 21 nt, Yellow fever virus
uugucagcccagaaccccaca

SEQ ID NO: 254245 - RNA, 12 nt, Homo sapiens
aauucuauuaca

SEQ ID NO: 254246 - RNA, 23 nt, Homo sapiens
ccgggaggcagagguugcagugu

SEQ ID NO: 254247 - RNA, 18 nt, Homo sapiens
aggcagagguugcagugu

SEQ ID NO: 254248 - RNA, 14 nt, Homo sapiens
aacaauccaucucu

SEQ ID NO: 254249 - RNA, 19 nt, Homo sapiens
aagaggcaccacuaaaaga

SEQ ID NO: 254250 - RNA, 18 nt, Homo sapiens
gaaaucuagaagacuguc

SEQ ID NO: 254251 - RNA, 22 nt, Homo sapiens
aaaaaccucuaugcaaucugag

SEQ ID NO: 254252 - RNA, 18 nt, Homo sapiens
aagacugucagcuuccaa

SEQ ID NO: 254253 - RNA, 19 nt, Homo sapiens
cacacuguucugaaaguga

SEQ ID NO: 254254 - RNA, 15 nt, Homo sapiens
auacacuaugaagau

SEQ ID NO: 254255 - RNA, 20 nt, Homo sapiens
ugaaaccccaucucuacuga

SEQ ID NO: 254256 - RNA, 20 nt, Homo sapiens
cuuccaaacauuaaugcaau

SEQ ID NO: 254257 - RNA, 14 nt, Homo sapiens
aaagacuguagaag

SEQ ID NO: 254258 - RNA, 22 nt, Homo sapiens
aacauagugaaaccccaucucu

SEQ ID NO: 254259 - RNA, 14 nt, Homo sapiens
cugaggcaagagaa

SEQ ID NO: 254260 - RNA, 16 nt, Homo sapiens
ugacucacuuauccca

SEQ ID NO: 254261 - RNA, 20 nt, Homo sapiens
ucuuucaggacucuaccuca

SEQ ID NO: 254262 - RNA, 16 nt, Homo sapiens
auucaguuuucaggau

SEQ ID NO: 254263 - RNA, 20 nt, Homo sapiens
uguagucccagcuacuugag

SEQ ID NO: 254264 - RNA, 14 nt, Homo sapiens
aucuagaagacugu

SEQ ID NO: 254265 - RNA, 19 nt, Homo sapiens
uagagcagccacaaccaaa

SEQ ID NO: 254266 - RNA, 17 nt, Homo sapiens
guuucaaaaaaucugac

SEQ ID NO: 254267 - RNA, 21 nt, Homo sapiens
agagcaacaauccaucucuca

SEQ ID NO: 254268 - RNA, 13 nt, Homo sapiens
auacacuaugaag

SEQ ID NO: 254269 - RNA, 19 nt, Homo sapiens
gaaaucuagaagacuguca

SEQ ID NO: 254270 - RNA, 19 nt, Homo sapiens
guguggugagaucaugcca

SEQ ID NO: 254271 - RNA, 17 nt, Homo sapiens
uggaaagaaaaagcaau

SEQ ID NO: 254272 - RNA, 17 nt, Homo sapiens
ucaaagugacuauucag

SEQ ID NO: 254273 - RNA, 14 nt, Homo sapiens
guuggcacaugccu

SEQ ID NO: 254274 - RNA, 22 nt, Homo sapiens
acuccuuguaaagacuguagaa

SEQ ID NO: 254275 - RNA, 14 nt, Homo sapiens
uagaagacugucag

SEQ ID NO: 254276 - RNA, 14 nt, Homo sapiens
caaaaaaucugacc

SEQ ID NO: 254277 - RNA, 17 nt, Homo sapiens
acucuaccucauaucag

SEQ ID NO: 254278 - RNA, 18 nt, Homo sapiens
agcagccacaaccaaaaa

SEQ ID NO: 254279 - RNA, 16 nt, Homo sapiens
cuuguaaagacuguag

SEQ ID NO: 254280 - RNA, 21 nt, Homo sapiens
ucuuucaggacucuaccucau

SEQ ID NO: 254281 - RNA, 12 nt, Homo sapiens
aauugcugaaag

SEQ ID NO: 254282 - RNA, 20 nt, Homo sapiens
gggaggcagagguugcagug

SEQ ID NO: 254283 - RNA, 21 nt, Homo sapiens
aaagacuguagaagaaagagc

SEQ ID NO: 254284 - RNA, 14 nt, Homo sapiens
cuaugcaaucugag

SEQ ID NO: 254285 - RNA, 19 nt, Homo sapiens
cuuuauaaucuacuccuug

SEQ ID NO: 254286 - RNA, 14 nt, Homo sapiens
ccacaaccaaaaaa

SEQ ID NO: 254287 - RNA, 15 nt, Homo sapiens
uacaacacacacugu

SEQ ID NO: 254288 - RNA, 15 nt, Homo sapiens
cuuaucccaagagaa

SEQ ID NO: 254289 - RNA, 12 nt, Homo sapiens
uuauaaucuacu

SEQ ID NO: 254290 - RNA, 16 nt, Homo sapiens
aaccucaaagugacua

SEQ ID NO: 254291 - RNA, 11 nt, Homo sapiens
caaaaaaucug

SEQ ID NO: 254292 - RNA, 19 nt, Homo sapiens
gagcagccacaaccaaaaa

SEQ ID NO: 254293 - RNA, 20 nt, Homo sapiens
ugaccaaaacaaacaaacag

SEQ ID NO: 254294 - RNA, 15 nt, Homo sapiens
ggacaacauccuuaa

SEQ ID NO: 254295 - RNA, 20 nt, Homo sapiens
acucacuuaucccaagagaa

SEQ ID NO: 254296 - RNA, 13 nt, Homo sapiens
cugaaaguacaaa

SEQ ID NO: 254297 - RNA, 17 nt, Homo sapiens
uaaccucaaagugacua

SEQ ID NO: 254298 - RNA, 17 nt, Homo sapiens
caugccuguagucccag

SEQ ID NO: 254299 - RNA, 22 nt, Homo sapiens
ccaucucuacugaaaguacaaa

SEQ ID NO: 254300 - RNA, 22 nt, Homo sapiens
aaacaaaaaaaccucuaugcaa

SEQ ID NO: 254301 - RNA, 16 nt, Homo sapiens
cagccacaaccaaaaa

SEQ ID NO: 254302 - RNA, 15 nt, Homo sapiens
caauccaucucucaa

SEQ ID NO: 254303 - RNA, 20 nt, Homo sapiens
gaagaaagagcaacaaucca

SEQ ID NO: 254304 - RNA, 20 nt, Homo sapiens
cuacuccuuguaaagacugu

SEQ ID NO: 254305 - RNA, 23 nt, Homo sapiens
acauagugaaaccccaucucuac

SEQ ID NO: 254306 - RNA, 19 nt, Homo sapiens
ucaagaccauagugaccaa

SEQ ID NO: 254307 - RNA, 14 nt, Homo sapiens
ugauacacuaugaa

SEQ ID NO: 254308 - RNA, 19 nt, Homo sapiens
aagacugucagcuuccaaa

SEQ ID NO: 254309 - RNA, 20 nt, Homo sapiens
acaaccaaaaaauucuacaa

SEQ ID NO: 254310 - RNA, 23 nt, Homo sapiens
aaaaaccucuaugcaaucugagu

SEQ ID NO: 254311 - RNA, 16 nt, Homo sapiens
gaugauacacuaugaa

SEQ ID NO: 254312 - RNA, 12 nt, Homo sapiens
cagccacaacca

SEQ ID NO: 254313 - RNA, 20 nt, Homo sapiens
acacuaugaagauguuucaa

SEQ ID NO: 254314 - RNA, 17 nt, Homo sapiens
gaaaucuagaagacugu

SEQ ID NO: 254315 - RNA, 15 nt, Homo sapiens
agccacaaccaaaaa

SEQ ID NO: 254316 - RNA, 23 nt, Homo sapiens
auuguuugaacccgggaggcaga

SEQ ID NO: 254317 - RNA, 17 nt, Homo sapiens
ggaaagaaaaagcaaua

SEQ ID NO: 254318 - RNA, 13 nt, Homo sapiens
cccagcuacuuga

SEQ ID NO: 254319 - RNA, 21 nt, Homo sapiens
uccagguuuccuuaagggaca

SEQ ID NO: 254320 - RNA, 21 nt, Homo sapiens
aguacguguuauuuuuuucaa

SEQ ID NO: 254321 - RNA, 14 nt, Homo sapiens
cuuucaggacucua

SEQ ID NO: 254322 - RNA, 16 nt, Homo sapiens
augaaauugcugaaag

SEQ ID NO: 254323 - RNA, 22 nt, Homo sapiens
cauagugaccaacauagugaaa

SEQ ID NO: 254324 - RNA, 13 nt, Homo sapiens
ccacaaccaaaaa

SEQ ID NO: 254325 - RNA, 20 nt, Homo sapiens
uagucccagcuacuugagag

SEQ ID NO: 254326 - RNA, 16 nt, Homo sapiens
acaauccaucucucaa

SEQ ID NO: 254327 - RNA, 14 nt, Homo sapiens
cgagaucaagagau

SEQ ID NO: 254328 - RNA, 19 nt, Homo sapiens
gauacacuaugaagauguu

SEQ ID NO: 254329 - RNA, 15 nt, Homo sapiens
aaacauuaaugcaau

SEQ ID NO: 254330 - RNA, 18 nt, Homo sapiens
cugucagcuuccaaacau

SEQ ID NO: 254331 - RNA, 16 nt, Homo sapiens
cugaaagaucuuucag

SEQ ID NO: 254332 - RNA, 13 nt, Homo sapiens
aaccucaaaguga

SEQ ID NO: 254333 - RNA, 11 nt, Homo sapiens
gccacaaccaa

SEQ ID NO: 254334 - RNA, 13 nt, Homo sapiens
uagcagaaaucua

SEQ ID NO: 254335 - RNA, 17 nt, Homo sapiens
ucaaaaaaucugaccaa

SEQ ID NO: 254336 - RNA, 23 nt, Homo sapiens
caguuuucaggaugauacacuau

SEQ ID NO: 254337 - RNA, 21 nt, Homo sapiens
cagaaaucuagaagacuguca

SEQ ID NO: 254338 - RNA, 15 nt, Homo sapiens
acaauccaucucuca

SEQ ID NO: 254339 - RNA, 17 nt, Homo sapiens
cacuuaucccaagagaa

SEQ ID NO: 254340 - RNA, 19 nt, Homo sapiens
gcagccacaaccaaaaaau

SEQ ID NO: 254341 - RNA, 17 nt, Homo sapiens
uccuuguaaagacugua

SEQ ID NO: 254342 - RNA, 13 nt, Homo sapiens
agaaaucuagaag

SEQ ID NO: 254343 - RNA, 16 nt, Homo sapiens
gcugaggcaagagaau

SEQ ID NO: 254344 - RNA, 12 nt, Homo sapiens
auaaucuacucc

SEQ ID NO: 254345 - RNA, 16 nt, Homo sapiens
agucaaaagagagaag

SEQ ID NO: 254346 - RNA, 15 nt, Homo sapiens
augauacacuaugaa

SEQ ID NO: 254347 - RNA, 12 nt, Homo sapiens
aucccaagagaa

SEQ ID NO: 254348 - RNA, 16 nt, Homo sapiens
agucccagcuacuuga

SEQ ID NO: 254349 - RNA, 19 nt, Homo sapiens
aaaacuucaguaaguacgu

SEQ ID NO: 254350 - RNA, 18 nt, Homo sapiens
cucaaagugacuauucag

SEQ ID NO: 254351 - RNA, 16 nt, Homo sapiens
agaucgcaguuugccu

SEQ ID NO: 254352 - RNA, 18 nt, Homo sapiens
agaaaucuagaagacugu

SEQ ID NO: 254353 - RNA, 13 nt, Homo sapiens
uaugcaaucugag

SEQ ID NO: 254354 - RNA, 16 nt, Homo sapiens
guguuggcacaugccu

SEQ ID NO: 254355 - RNA, 17 nt, Homo sapiens
caaugguuaacaucuuc

SEQ ID NO: 254356 - RNA, 14 nt, Homo sapiens
cagcuuccaaacau

SEQ ID NO: 254357 - RNA, 14 nt, Homo sapiens
gugagaucaugcca

SEQ ID NO: 254358 - RNA, 21 nt, Homo sapiens
aagagaaugaaauugcugaaa

SEQ ID NO: 254359 - RNA, 20 nt, Homo sapiens
uacuugagaggcugaggcaa

SEQ ID NO: 254360 - RNA, 14 nt, Homo sapiens
uccuuaagggacaa

SEQ ID NO: 254361 - RNA, 22 nt, Homo sapiens
acuuaucccaagagaaugaaau

SEQ ID NO: 254362 - RNA, 14 nt, Homo sapiens
guuugcuagcagaa

SEQ ID NO: 254363 - RNA, 18 nt, Homo sapiens
aucacgagaucaagagau

SEQ ID NO: 254364 - RNA, 12 nt, Homo sapiens
auccaucucuca

SEQ ID NO: 254365 - RNA, 17 nt, Homo sapiens
ucuuuauaaucuacucc

SEQ ID NO: 254366 - RNA, 14 nt, Homo sapiens
gccuggugcagugg

SEQ ID NO: 254367 - RNA, 23 nt, Homo sapiens
agcagaaaucuagaagacuguca

SEQ ID NO: 254368 - RNA, 17 nt, Homo sapiens
caaaaaaucugaccaaa

SEQ ID NO: 254369 - RNA, 13 nt, Homo sapiens
aagugacuauuca

SEQ ID NO: 254370 - RNA, 16 nt, Homo sapiens
aagcaauaaccucaaa

SEQ ID NO: 254371 - RNA, 18 nt, Homo sapiens
ucuuucaggacucuaccu

SEQ ID NO: 254372 - RNA, 11 nt, Homo sapiens
ugaaagaucuu

SEQ ID NO: 254373 - RNA, 15 nt, Homo sapiens
acaaacaaacagaaa

SEQ ID NO: 254374 - RNA, 20 nt, Homo sapiens
ucaaaaaaucugaccaaaac

SEQ ID NO: 254375 - RNA, 19 nt, Homo sapiens
aacacacacuguucugaaa

SEQ ID NO: 254376 - RNA, 21 nt, Homo sapiens
ccuuaagggacaacauccuua

SEQ ID NO: 254377 - RNA, 16 nt, Homo sapiens
ccauagugaccaacau

SEQ ID NO: 254378 - RNA, 15 nt, Homo sapiens
cccaucucuacugaa

SEQ ID NO: 254379 - RNA, 16 nt, Homo sapiens
ugucagcuuccaaaca

SEQ ID NO: 254380 - RNA, 18 nt, Homo sapiens
ucucuacugaaaguacaa

SEQ ID NO: 254381 - RNA, 17 nt, Homo sapiens
aucuagaagacugucag

SEQ ID NO: 254382 - RNA, 14 nt, Homo sapiens
gaccaaaacaaaca

SEQ ID NO: 254383 - RNA, 17 nt, Homo sapiens
acauccuuaagucaaaa

SEQ ID NO: 254384 - RNA, 22 nt, Homo sapiens
auaaccucaaagugacuauuca

SEQ ID NO: 254385 - RNA, 16 nt, Homo sapiens
uuucaaaaaaucugac

SEQ ID NO: 254386 - RNA, 18 nt, Homo sapiens
aaccucuaugcaaucuga

SEQ ID NO: 254387 - RNA, 13 nt, Homo sapiens
aaucugaccaaaa

SEQ ID NO: 254388 - RNA, 17 nt, Homo sapiens
caacaauccaucucuca

SEQ ID NO: 254389 - RNA, 11 nt, Homo sapiens
aaagacuguag

SEQ ID NO: 254390 - RNA, 17 nt, Homo sapiens
agacugucagcuuccaa

SEQ ID NO: 254391 - RNA, 17 nt, Homo sapiens
ccuuaagucaaaagaga

SEQ ID NO: 254392 - RNA, 21 nt, Homo sapiens
aaagaucuuucaggacucuac

SEQ ID NO: 254393 - RNA, 16 nt, Homo sapiens
acaaccaaaaaauucu

SEQ ID NO: 254394 - RNA, 14 nt, Homo sapiens
acaaacaaacagaa

SEQ ID NO: 254395 - RNA, 14 nt, Homo sapiens
cuagcagaaaucua

SEQ ID NO: 254396 - RNA, 13 nt, Homo sapiens
auguuucaaaaaa

SEQ ID NO: 254397 - RNA, 15 nt, Homo sapiens
ggcucacaccuguaa

SEQ ID NO: 254398 - RNA, 12 nt, Homo sapiens
aaaucuagaaga

SEQ ID NO: 254399 - RNA, 13 nt, Homo sapiens
gacuguagaagaa

SEQ ID NO: 254400 - RNA, 16 nt, Homo sapiens
aaaacuucaguaagua

SEQ ID NO: 254401 - RNA, 22 nt, Homo sapiens
acacuguucugaaagugacuca

SEQ ID NO: 254402 - RNA, 20 nt, Homo sapiens
uguaaucccaacauuuuggg

SEQ ID NO: 254403 - RNA, 21 nt, Homo sapiens
aguagagcagccacaaccaaa

SEQ ID NO: 254404 - RNA, 16 nt, Homo sapiens
agaucacgagaucaag

SEQ ID NO: 254405 - RNA, 16 nt, Homo sapiens
gcagccacaaccaaaa

SEQ ID NO: 254406 - RNA, 20 nt, Homo sapiens
uguagaagaaagagcaacaa

SEQ ID NO: 254407 - RNA, 20 nt, Homo sapiens
ucaaguaguguaucacagua

SEQ ID NO: 254408 - RNA, 12 nt, Homo sapiens
uaugcaaucuga

SEQ ID NO: 254409 - RNA, 16 nt, Homo sapiens
agcagccacaaccaaa

SEQ ID NO: 254410 - RNA, 20 nt, Homo sapiens
gcaauaaccucaaagugacu

SEQ ID NO: 254411 - RNA, 11 nt, Homo sapiens
cugaccaaaac

SEQ ID NO: 254412 - RNA, 22 nt, Homo sapiens
agagcaacaauccaucucucaa

SEQ ID NO: 254413 - RNA, 16 nt, Homo sapiens
agccuccagguuuccu

SEQ ID NO: 254414 - RNA, 17 nt, Homo sapiens
ccacaaccaaaaaauuc

SEQ ID NO: 254415 - RNA, 22 nt, Homo sapiens
aaucugaguagagcagccacaa

SEQ ID NO: 254416 - RNA, 16 nt, Homo sapiens
cacgagaucaagagau

SEQ ID NO: 254417 - RNA, 14 nt, Homo sapiens
aaccucuaugcaau

SEQ ID NO: 254418 - RNA, 21 nt, Homo sapiens
cucuacugaaaguacaaaaau

SEQ ID NO: 254419 - RNA, 13 nt, Homo sapiens
aguaaguacgugu

SEQ ID NO: 254420 - RNA, 14 nt, Homo sapiens
cucacuuaucccaa

SEQ ID NO: 254421 - RNA, 14 nt, Homo sapiens
aaucugaccaaaac

SEQ ID NO: 254422 - RNA, 13 nt, Homo sapiens
caacacacacugu

SEQ ID NO: 254423 - RNA, 14 nt, Homo sapiens
ccaucucuacugaa

SEQ ID NO: 254424 - RNA, 16 nt, Homo sapiens
uucaggacucuaccuc

SEQ ID NO: 254425 - RNA, 13 nt, Homo sapiens
cauuaaugcaaug

SEQ ID NO: 254426 - RNA, 13 nt, Homo sapiens
cuagaagacuguc

SEQ ID NO: 254427 - RNA, 14 nt, Homo sapiens
agacuugguuucaa

SEQ ID NO: 254428 - RNA, 15 nt, Homo sapiens
aaagugacuauucag

SEQ ID NO: 254429 - RNA, 22 nt, Homo sapiens
ucaguuugcuagcagaaaucua

SEQ ID NO: 254430 - RNA, 17 nt, Homo sapiens
aggcugaggcaagagaa

SEQ ID NO: 254431 - RNA, 16 nt, Homo sapiens
caaagugacuauucag

SEQ ID NO: 254432 - RNA, 21 nt, Homo sapiens
aaucugaccaaaacaaacaaa

SEQ ID NO: 254433 - RNA, 21 nt, Homo sapiens
aaagugacucacuuaucccaa

SEQ ID NO: 254434 - RNA, 16 nt, Homo sapiens
aaaucuagaagacugu

SEQ ID NO: 254435 - RNA, 16 nt, Homo sapiens
ccuuguaaagacugua

SEQ ID NO: 254436 - RNA, 16 nt, Homo sapiens
aaaaccucuaugcaau

SEQ ID NO: 254437 - RNA, 16 nt, Homo sapiens
agccacaaccaaaaaa

SEQ ID NO: 254438 - RNA, 19 nt, Homo sapiens
ugucuuuauaaucuacucc

SEQ ID NO: 254439 - RNA, 15 nt, Homo sapiens
cuuguaaagacugua

SEQ ID NO: 254440 - RNA, 21 nt, Homo sapiens
aaaauucuauuacaguauguc

SEQ ID NO: 254441 - RNA, 18 nt, Homo sapiens
uuugcuagcagaaaucua

SEQ ID NO: 254442 - RNA, 14 nt, Homo sapiens
cagaaaacaaaaaa

SEQ ID NO: 254443 - RNA, 22 nt, Homo sapiens
accucauaucaguuugcuagca

SEQ ID NO: 254444 - RNA, 15 nt, Homo sapiens
uguguuggcacaugc

SEQ ID NO: 254445 - RNA, 19 nt, Homo sapiens
cucacaccuguaaucccaa

SEQ ID NO: 254446 - RNA, 20 nt, Homo sapiens
caucucuacugaaaguacaa

SEQ ID NO: 254447 - RNA, 21 nt, Homo sapiens
aacaaaaaaaccucuaugcaa

SEQ ID NO: 254448 - RNA, 23 nt, Homo sapiens
agaucuuucaggacucuaccuca

SEQ ID NO: 254449 - RNA, 18 nt, Homo sapiens
ucuuuauaaucuacuccu

SEQ ID NO: 254450 - RNA, 15 nt, Homo sapiens
ucaagaccauaguga

SEQ ID NO: 254451 - RNA, 17 nt, Homo sapiens
aaaucuagaagacuguc

SEQ ID NO: 254452 - RNA, 19 nt, Homo sapiens
acuccuuguaaagacugua

SEQ ID NO: 254453 - RNA, 14 nt, Homo sapiens
uaagggacaacauc

SEQ ID NO: 254454 - RNA, 15 nt, Homo sapiens
cuauucaguuuucag

SEQ ID NO: 254455 - RNA, 24 nt, Homo sapiens
acaauccaucucucaaguagugua

SEQ ID NO: 254456 - RNA, 17 nt, Homo sapiens
ucugucuuuauaaucua

SEQ ID NO: 254457 - RNA, 16 nt, Homo sapiens
accccaucucuacuga

SEQ ID NO: 254458 - RNA, 23 nt, Homo sapiens
cuagcagaaaucuagaagacugu

SEQ ID NO: 254459 - RNA, 13 nt, Homo sapiens
ucugaccaaaaca

SEQ ID NO: 254460 - RNA, 15 nt, Homo sapiens
ucuagaagacuguca

SEQ ID NO: 254461 - RNA, 22 nt, Homo sapiens
ccuguagucccagcuacuugag

SEQ ID NO: 254462 - RNA, 23 nt, Homo sapiens
aagaaagagcaacaauccaucuc

SEQ ID NO: 254463 - RNA, 16 nt, Homo sapiens
cacuaaaagaucgcag

SEQ ID NO: 254464 - RNA, 20 nt, Homo sapiens
auaucaguuugcuagcagaa

SEQ ID NO: 254465 - RNA, 16 nt, Homo sapiens
cugaccaaaacaaaca

SEQ ID NO: 254466 - RNA, 19 nt, Homo sapiens
agaaaucuagaagacuguc

SEQ ID NO: 254467 - RNA, 20 nt, Homo sapiens
aaaauucuauuacaguaugu

SEQ ID NO: 254468 - RNA, 21 nt, Homo sapiens
caaaaaaaccucuaugcaauc

SEQ ID NO: 254469 - RNA, 20 nt, Homo sapiens
ucaggaugauacacuaugaa

SEQ ID NO: 254470 - RNA, 22 nt, Homo sapiens
agcagaaaucuagaagacuguc

SEQ ID NO: 254471 - RNA, 13 nt, Homo sapiens
aacacacacuguu

SEQ ID NO: 254472 - RNA, 20 nt, Homo sapiens
gaagauguuucaaaaaaucu

SEQ ID NO: 254473 - RNA, 19 nt, Homo sapiens
cacuaugaagauguuucaa

SEQ ID NO: 254474 - RNA, 21 nt, Homo sapiens
acccgggaggcagagguugca

SEQ ID NO: 254475 - RNA, 22 nt, Homo sapiens
uuucaaaaaaucugaccaaaac

SEQ ID NO: 254476 - RNA, 15 nt, Homo sapiens
uuugcuagcagaaau

SEQ ID NO: 254477 - RNA, 21 nt, Homo sapiens
gagaucaugccacuacacucc

SEQ ID NO: 254478 - RNA, 14 nt, Homo sapiens
cuuguaaagacugu

SEQ ID NO: 254479 - RNA, 22 nt, Homo sapiens
cacacacuguucugaaagugac

SEQ ID NO: 254480 - RNA, 12 nt, Homo sapiens
uauaaucuacuc

SEQ ID NO: 254481 - RNA, 14 nt, Homo sapiens
aaagcaauaaccuc

SEQ ID NO: 254482 - RNA, 12 nt, Homo sapiens
cacgagaucaag

SEQ ID NO: 254483 - RNA, 12 nt, Homo sapiens
cacaaccaaaaa

SEQ ID NO: 254484 - RNA, 22 nt, Homo sapiens
aucuacuccuuguaaagacugu

SEQ ID NO: 254485 - RNA, 21 nt, Homo sapiens
aaagagcaacaauccaucucu

SEQ ID NO: 254486 - RNA, 14 nt, Homo sapiens
gagcgagacuuggu

SEQ ID NO: 254487 - RNA, 18 nt, Homo sapiens
uguuucaaaaaaucugac

SEQ ID NO: 254488 - RNA, 17 nt, Homo sapiens
agcuggguguguuggca

SEQ ID NO: 254489 - RNA, 23 nt, Homo sapiens
aaagugacucacuuaucccaaga

SEQ ID NO: 254490 - RNA, 15 nt, Homo sapiens
aaaaccucuaugcaa

SEQ ID NO: 254491 - RNA, 16 nt, Homo sapiens
gaaagaaaaagcaaua

SEQ ID NO: 254492 - RNA, 20 nt, Homo sapiens
ccuggaaagaaaaagcaaua

SEQ ID NO: 254493 - RNA, 19 nt, Homo sapiens
aaccccaucucuacugaaa

SEQ ID NO: 254494 - RNA, 16 nt, Homo sapiens
acaaaaaaaccucuau

SEQ ID NO: 254495 - RNA, 16 nt, Homo sapiens
caacauccuuaaguca

SEQ ID NO: 254496 - RNA, 23 nt, Homo sapiens
ugaagauguuucaaaaaaucuga

SEQ ID NO: 254497 - RNA, 20 nt, Homo sapiens
cugaccuggaaagaaaaagc

SEQ ID NO: 254498 - RNA, 20 nt, Homo sapiens
ggcagagguugcaguguggu

SEQ ID NO: 254499 - RNA, 21 nt, Homo sapiens
caacaauccaucucucaagua

SEQ ID NO: 254500 - RNA, 20 nt, Homo sapiens
cugucuuuauaaucuacucc

SEQ ID NO: 254501 - RNA, 20 nt, Homo sapiens
cgagacuugguuucaaaaaa

SEQ ID NO: 254502 - RNA, 18 nt, Homo sapiens
uucugucuuuauaaucua

SEQ ID NO: 254503 - RNA, 12 nt, Homo sapiens
uacacuaugaag

SEQ ID NO: 254504 - RNA, 23 nt, Homo sapiens
acaauccaucucucaaguagugu

SEQ ID NO: 254505 - RNA, 13 nt, Homo sapiens
aaccucuaugcaa

SEQ ID NO: 254506 - RNA, 20 nt, Homo sapiens
acaaaaaaaccucuaugcaa

SEQ ID NO: 254507 - RNA, 18 nt, Homo sapiens
uccaaacauuaaugcaau

SEQ ID NO: 254508 - RNA, 13 nt, Homo sapiens
aagagcaacaauc

SEQ ID NO: 254509 - RNA, 12 nt, Homo sapiens
aaaaaaucugac

SEQ ID NO: 254510 - RNA, 14 nt, Homo sapiens
aaagugacuauuca

SEQ ID NO: 254511 - RNA, 14 nt, Homo sapiens
aaaguacaaaaauu

SEQ ID NO: 254512 - RNA, 19 nt, Homo sapiens
gcaauaaccucaaagugac

SEQ ID NO: 254513 - RNA, 16 nt, Homo sapiens
uguggugagaucaugc

SEQ ID NO: 254514 - RNA, 15 nt, Homo sapiens
guucugaaagugacu

SEQ ID NO: 254515 - RNA, 21 nt, Homo sapiens
uagagcagccacaaccaaaaa

SEQ ID NO: 254516 - RNA, 19 nt, Homo sapiens
acaacauccuuaagucaaa

SEQ ID NO: 254517 - RNA, 19 nt, Homo sapiens
aucucuacugaaaguacaa

SEQ ID NO: 254518 - RNA, 23 nt, Homo sapiens
agaagacugucagcuuccaaaca

SEQ ID NO: 254519 - RNA, 19 nt, Homo sapiens
caaaaaaaccucuaugcaa

SEQ ID NO: 254520 - RNA, 15 nt, Homo sapiens
agaccauagugacca

SEQ ID NO: 254521 - RNA, 23 nt, Homo sapiens
guuucaaaaaaucugaccaaaac

SEQ ID NO: 254522 - RNA, 13 nt, Homo sapiens
accucuaugcaau

SEQ ID NO: 254523 - RNA, 19 nt, Homo sapiens
auagugaaaccccaucucu

SEQ ID NO: 254524 - RNA, 24 nt, Homo sapiens
aagaucuuucaggacucuaccuca

SEQ ID NO: 254525 - RNA, 19 nt, Homo sapiens
cagaaaucuagaagacugu

SEQ ID NO: 254526 - RNA, 14 nt, Homo sapiens
aaaccucuaugcaa

SEQ ID NO: 254527 - RNA, 12 nt, Homo sapiens
uaaagacuguag

SEQ ID NO: 254528 - RNA, 18 nt, Homo sapiens
aagauguuucaaaaaauc

SEQ ID NO: 254529 - RNA, 18 nt, Homo sapiens
ccaaaacaaacaaacaga

SEQ ID NO: 254530 - RNA, 12 nt, Homo sapiens
guaaagacugua

SEQ ID NO: 254531 - RNA, 19 nt, Homo sapiens
cuccuuguaaagacuguag

SEQ ID NO: 254532 - RNA, 13 nt, Homo sapiens
aucugaccaaaac

SEQ ID NO: 254533 - RNA, 15 nt, Homo sapiens
gauguuucaaaaaau

SEQ ID NO: 254534 - RNA, 20 nt, Homo sapiens
gaucaugccacuacacucca

SEQ ID NO: 254535 - RNA, 15 nt, Homo sapiens
aucuagaagacuguc

SEQ ID NO: 254536 - RNA, 21 nt, Homo sapiens
aucuuucaggacucuaccuca

SEQ ID NO: 254537 - RNA, 15 nt, Homo sapiens
acacuguucugaaag

SEQ ID NO: 254538 - RNA, 18 nt, Homo sapiens
agugaaaccccaucucua

SEQ ID NO: 254539 - RNA, 15 nt, Homo sapiens
gagcagccacaacca

SEQ ID NO: 254540 - RNA, 22 nt, Zaire Ebola virus (ZEBOV)
uuucuucagauugcuucaugga

SEQ ID NO: 254541 - RNA, 16 nt, Zaire Ebola virus (ZEBOV)
uuugacaucaaucuag

SEQ ID NO: 254542 - RNA, 14 nt, Zaire Ebola virus (ZEBOV)
ucugggcucauauu

SEQ ID NO: 254543 - RNA, 23 nt, Zaire Ebola virus (ZEBOV)
ugacaucucugaggcaacucaag

SEQ ID NO: 254544 - RNA, 18 nt, Zaire Ebola virus (ZEBOV)
ugacaucucugcuuucau

SEQ ID NO: 254545 - RNA, 16 nt, Zaire Ebola virus (ZEBOV)
ugaauaagcauuuuau

SEQ ID NO: 254546 - RNA, 16 nt, Zaire Ebola virus (ZEBOV)
ugaaagaucauaacua

SEQ ID NO: 254547 - RNA, 20 nt, Zaire Ebola virus (ZEBOV)
ugauaauauaauacacugga

SEQ ID NO: 254548 - RNA, 19 nt, Zaire Ebola virus (ZEBOV)
ugauucuacaaucaugaca

SEQ ID NO: 254549 - RNA, 16 nt, Zaire Ebola virus (ZEBOV)
ugagcuaacucauaua

SEQ ID NO: 254550 - RNA, 17 nt, Zaire Ebola virus (ZEBOV)
ugcagugucgcaucuaa

SEQ ID NO: 254551 - RNA, 14 nt, Zaire Ebola virus (ZEBOV)
ugcaaccuaacaca

SEQ ID NO: 254552 - RNA, 20 nt, Zaire Ebola virus (ZEBOV)
ugccuacugcuccuccugaa

SEQ ID NO: 254553 - RNA, 22 nt, Zaire Ebola virus (ZEBOV)
uccguccauuagaggagacacu

SEQ ID NO: 254554 - RNA, 15 nt, Zaire Ebola virus (ZEBOV)
ucaugacaguugucu

SEQ ID NO: 254555 - RNA, 15 nt, Zaire Ebola virus (ZEBOV)
ucauccuugauucua

SEQ ID NO: 254556 - RNA, 16 nt, Zaire Ebola virus (ZEBOV)
ucucagggauagugau

SEQ ID NO: 254557 - RNA, 20 nt, Zaire Ebola virus (ZEBOV)
ucucauacaucauauugauc

SEQ ID NO: 254558 - RNA, 20 nt, Zaire Ebola virus (ZEBOV)
ucuaaauuaaauuacauuau

SEQ ID NO: 254559 - RNA, 14 nt, Zaire Ebola virus (ZEBOV)
ucuaacaacccuug

SEQ ID NO: 254560 - RNA, 23 nt, Zaire Ebola virus (ZEBOV)
ucuaacaacccuugccacaaucu

SEQ ID NO: 254561 - RNA, 22 nt, Zaire Ebola virus (ZEBOV)
ucuaaggugugaauuauuauca

SEQ ID NO: 254562 - RNA, 15 nt, Zaire Ebola virus (ZEBOV)
ucgcucguaauauaa

SEQ ID NO: 254563 - RNA, 16 nt, Zaire Ebola virus (ZEBOV)
uugccacaaucuccac

SEQ ID NO: 254564 - RNA, 23 nt, Zaire Ebola virus (ZEBOV)
uugaaucuaagauuacuugacaa

SEQ ID NO: 254565 - RNA, 20 nt, Zaire Ebola virus (ZEBOV)
uucucagggauagugauaac

SEQ ID NO: 254566 - RNA, 15 nt, Zaire Ebola virus (ZEBOV)
uucuacuugaucaca

SEQ ID NO: 254567 - RNA, 22 nt, Zaire Ebola virus (ZEBOV)
uuccuggaccccgccaccacaa

SEQ ID NO: 254568 - RNA, 15 nt, Zaire Ebola virus (ZEBOV)
uucauauugagcuaa

SEQ ID NO: 254569 - RNA, 20 nt, Zaire Ebola virus (ZEBOV)
uucauauugagcuaacucau

SEQ ID NO: 254570 - RNA, 19 nt, Zaire Ebola virus (ZEBOV)
uucaugacuuacuaaugau

SEQ ID NO: 254571 - RNA, 21 nt, Zaire Ebola virus (ZEBOV)
uucaucauccuuacgucaauu

SEQ ID NO: 254572 - RNA, 16 nt, Zaire Ebola virus (ZEBOV)
uuguaacucaauauuc

SEQ ID NO: 254573 - RNA, 13 nt, Zaire Ebola virus (ZEBOV)
uugugaguaucag

SEQ ID NO: 254574 - RNA, 19 nt, Zaire Ebola virus (ZEBOV)
uuuaaacauagccaaugug

SEQ ID NO: 254575 - RNA, 20 nt, Zaire Ebola virus (ZEBOV)
uuuaaccacagauaaauccu

SEQ ID NO: 254576 - RNA, 20 nt, Zaire Ebola virus (ZEBOV)
uuuaguugcaaccuaacaca

SEQ ID NO: 254577 - RNA, 16 nt, Zaire Ebola virus (ZEBOV)
uuuagugacaagggaa

SEQ ID NO: 254578 - RNA, 14 nt, Zaire Ebola virus (ZEBOV)
uuucacaguuguau

SEQ ID NO: 254579 - RNA, 20 nt, Zaire Ebola virus (ZEBOV)
uuaaacauagccaaugugau

SEQ ID NO: 254580 - RNA, 22 nt, Zaire Ebola virus (ZEBOV)
uuaaaacuuauucaguacuaua

SEQ ID NO: 254581 - RNA, 13 nt, Zaire Ebola virus (ZEBOV)
uuaaaaccuucau

SEQ ID NO: 254582 - RNA, 22 nt, Zaire Ebola virus (ZEBOV)
ugugcaugauugcccuaauaua

SEQ ID NO: 254583 - RNA, 20 nt, Zaire Ebola virus (ZEBOV)
uuaacaaaagacucauaaua

SEQ ID NO: 254584 - RNA, 20 nt, Zaire Ebola virus (ZEBOV)
uuaaccacagauaaauccuc

SEQ ID NO: 254585 - RNA, 18 nt, Zaire Ebola virus (ZEBOV)
uuacuaacucuauacucg

SEQ ID NO: 254586 - RNA, 15 nt, Zaire Ebola virus (ZEBOV)
uuacuaaugaucucu

SEQ ID NO: 254587 - RNA, 16 nt, Zaire Ebola virus (ZEBOV)
uuagguguaauaaccu

SEQ ID NO: 254588 - RNA, 21 nt, Zaire Ebola virus (ZEBOV)
uguaucaaacggagccaaaaa

SEQ ID NO: 254589 - RNA, 15 nt, Zaire Ebola virus (ZEBOV)
uguauaaacuugaca

SEQ ID NO: 254590 - RNA, 13 nt, Zaire Ebola virus (ZEBOV)
cagagaacaccaa

SEQ ID NO: 254591 - RNA, 13 nt, Zaire Ebola virus (ZEBOV)
cagaggcuucaac

SEQ ID NO: 254592 - RNA, 14 nt, Zaire Ebola virus (ZEBOV)
cacuauauaaccuu

SEQ ID NO: 254593 - RNA, 16 nt, Zaire Ebola virus (ZEBOV)
caauaaaagugauucu

SEQ ID NO: 254594 - RNA, 14 nt, Zaire Ebola virus (ZEBOV)
caaucuaguuaucu

SEQ ID NO: 254595 - RNA, 16 nt, Zaire Ebola virus (ZEBOV)
caaucccucacaacca

SEQ ID NO: 254596 - RNA, 19 nt, Zaire Ebola virus (ZEBOV)
caaucccucacaaccaaac

SEQ ID NO: 254597 - RNA, 19 nt, Zaire Ebola virus (ZEBOV)
cacauacuuuuugcccuua

SEQ ID NO: 254598 - RNA, 22 nt, Zaire Ebola virus (ZEBOV)
auuuaguaauccguccauuaga

SEQ ID NO: 254599 - RNA, 12 nt, Zaire Ebola virus (ZEBOV)
caaacaagagau

SEQ ID NO: 254600 - RNA, 14 nt, Zaire Ebola virus (ZEBOV)
caaacggagccaaa

SEQ ID NO: 254601 - RNA, 16 nt, Zaire Ebola virus (ZEBOV)
caacaaguccccaaaa

SEQ ID NO: 254602 - RNA, 20 nt, Zaire Ebola virus (ZEBOV)
caacaaguccccaaaaccac

SEQ ID NO: 254603 - RNA, 14 nt, Zaire Ebola virus (ZEBOV)
caacaacacucauc

SEQ ID NO: 254604 - RNA, 18 nt, Zaire Ebola virus (ZEBOV)
auucuaacuagcgauuua

SEQ ID NO: 254605 - RNA, 22 nt, Zaire Ebola virus (ZEBOV)
auucuaacuagcgauuuaucua

SEQ ID NO: 254606 - RNA, 19 nt, Zaire Ebola virus (ZEBOV)
auuauaaaaaacucauaaa

SEQ ID NO: 254607 - RNA, 13 nt, Zaire Ebola virus (ZEBOV)
augugauucuaac

SEQ ID NO: 254608 - RNA, 14 nt, Zaire Ebola virus (ZEBOV)
auuacauuaugcuu

SEQ ID NO: 254609 - RNA, 18 nt, Zaire Ebola virus (ZEBOV)
cccuccgaaagaggcgaa

SEQ ID NO: 254610 - RNA, 14 nt, Zaire Ebola virus (ZEBOV)
ccccaaucccucac

SEQ ID NO: 254611 - RNA, 21 nt, Zaire Ebola virus (ZEBOV)
ccccaaucccucacaaccaaa

SEQ ID NO: 254612 - RNA, 18 nt, Zaire Ebola virus (ZEBOV)
cccagggaccaacacaac

SEQ ID NO: 254613 - RNA, 15 nt, Zaire Ebola virus (ZEBOV)
ccagggaccaacaca

SEQ ID NO: 254614 - RNA, 17 nt, Zaire Ebola virus (ZEBOV)
ccagggaccaacacaac

SEQ ID NO: 254615 - RNA, 20 nt, Zaire Ebola virus (ZEBOV)
ccucaaacaagagauuccaa

SEQ ID NO: 254616 - RNA, 21 nt, Zaire Ebola virus (ZEBOV)
ccucaaauugccugcaugcuu

SEQ ID NO: 254617 - RNA, 13 nt, Zaire Ebola virus (ZEBOV)
ccucuugcacaaa

SEQ ID NO: 254618 - RNA, 21 nt, Zaire Ebola virus (ZEBOV)
ccuggauaauauaagucaauu

SEQ ID NO: 254619 - RNA, 21 nt, Zaire Ebola virus (ZEBOV)
ccacgaguccccaaucccuca

SEQ ID NO: 254620 - RNA, 21 nt, Zaire Ebola virus (ZEBOV)
cauugucuuuuuucucuccua

SEQ ID NO: 254621 - RNA, 14 nt, Zaire Ebola virus (ZEBOV)
cauuaaguagucaa

SEQ ID NO: 254622 - RNA, 16 nt, Zaire Ebola virus (ZEBOV)
cauuagauaaguagau

SEQ ID NO: 254623 - RNA, 14 nt, Zaire Ebola virus (ZEBOV)
cauaaucagauaua

SEQ ID NO: 254624 - RNA, 19 nt, Zaire Ebola virus (ZEBOV)
cauaauaaauaaauacuca

SEQ ID NO: 254625 - RNA, 15 nt, Zaire Ebola virus (ZEBOV)
cauaacuaauaacau

SEQ ID NO: 254626 - RNA, 22 nt, Zaire Ebola virus (ZEBOV)
cagcacagccuccgacacuccc

SEQ ID NO: 254627 - RNA, 13 nt, Zaire Ebola virus (ZEBOV)
caucuaacaaccc

SEQ ID NO: 254628 - RNA, 14 nt, Zaire Ebola virus (ZEBOV)
cauauuucuugaua

SEQ ID NO: 254629 - RNA, 15 nt, Zaire Ebola virus (ZEBOV)
cauaguauccugaua

SEQ ID NO: 254630 - RNA, 22 nt, Zaire Ebola virus (ZEBOV)
cauaguauccugauacuugcaa

SEQ ID NO: 254631 - RNA, 15 nt, Zaire Ebola virus (ZEBOV)
agcccuggauaauau

SEQ ID NO: 254632 - RNA, 14 nt, Zaire Ebola virus (ZEBOV)
agcgauuuaucuaa

SEQ ID NO: 254633 - RNA, 17 nt, Zaire Ebola virus (ZEBOV)
aggcuucaacugcugaa

SEQ ID NO: 254634 - RNA, 18 nt, Zaire Ebola virus (ZEBOV)
aggcuucaacugcugaac

SEQ ID NO: 254635 - RNA, 22 nt, Zaire Ebola virus (ZEBOV)
aggcuucaacugcugaacuaua

SEQ ID NO: 254636 - RNA, 13 nt, Zaire Ebola virus (ZEBOV)
agcuuaaaauaua

SEQ ID NO: 254637 - RNA, 13 nt, Zaire Ebola virus (ZEBOV)
agugccagcagcg

SEQ ID NO: 254638 - RNA, 23 nt, Zaire Ebola virus (ZEBOV)
aguuaucucuuugagaaugauaa

SEQ ID NO: 254639 - RNA, 21 nt, Zaire Ebola virus (ZEBOV)
aguuuuauagaaucuucucag

SEQ ID NO: 254640 - RNA, 12 nt, Zaire Ebola virus (ZEBOV)
agguaugauaca

SEQ ID NO: 254641 - RNA, 15 nt, Zaire Ebola virus (ZEBOV)
aggucugggcucaua

SEQ ID NO: 254642 - RNA, 17 nt, Zaire Ebola virus (ZEBOV)
agguccggacaacagca

SEQ ID NO: 254643 - RNA, 14 nt, Zaire Ebola virus (ZEBOV)
agggauagugauaa

SEQ ID NO: 254644 - RNA, 13 nt, Zaire Ebola virus (ZEBOV)
aucucguaucgcu

SEQ ID NO: 254645 - RNA, 17 nt, Zaire Ebola virus (ZEBOV)
aucucugacaguauuau

SEQ ID NO: 254646 - RNA, 14 nt, Zaire Ebola virus (ZEBOV)
auccuauauacuaa

SEQ ID NO: 254647 - RNA, 23 nt, Zaire Ebola virus (ZEBOV)
aucgcucguaauauaaccugcca

SEQ ID NO: 254648 - RNA, 17 nt, Zaire Ebola virus (ZEBOV)
aucccucacaaccaaac

SEQ ID NO: 254649 - RNA, 18 nt, Zaire Ebola virus (ZEBOV)
aucagauauauaagcaua

SEQ ID NO: 254650 - RNA, 16 nt, Zaire Ebola virus (ZEBOV)
auauauuacuaacucu

SEQ ID NO: 254651 - RNA, 12 nt, Zaire Ebola virus (ZEBOV)
auauaagucaau

SEQ ID NO: 254652 - RNA, 16 nt, Zaire Ebola virus (ZEBOV)
auagccaaugugauuc

SEQ ID NO: 254653 - RNA, 21 nt, Zaire Ebola virus (ZEBOV)
auagccauaauuguaacucaa

SEQ ID NO: 254654 - RNA, 17 nt, Zaire Ebola virus (ZEBOV)
auauugagcuaacucau

SEQ ID NO: 254655 - RNA, 17 nt, Zaire Ebola virus (ZEBOV)
aucaccgcagaacagac

SEQ ID NO: 254656 - RNA, 16 nt, Zaire Ebola virus (ZEBOV)
auaacacaacuucuua

SEQ ID NO: 254657 - RNA, 17 nt, Zaire Ebola virus (ZEBOV)
auaaauccucacuguaa

SEQ ID NO: 254658 - RNA, 22 nt, Zaire Ebola virus (ZEBOV)
auacuucauauugagcuaacuc

SEQ ID NO: 254659 - RNA, 18 nt, Zaire Ebola virus (ZEBOV)
agaaauaccuucuuuaca

SEQ ID NO: 254660 - RNA, 21 nt, Zaire Ebola virus (ZEBOV)
agaacagacaacgacagcaca

SEQ ID NO: 254661 - RNA, 17 nt, Zaire Ebola virus (ZEBOV)
agaaugauaaacuugau

SEQ ID NO: 254662 - RNA, 15 nt, Zaire Ebola virus (ZEBOV)
agaaucuucucaggg

SEQ ID NO: 254663 - RNA, 17 nt, Zaire Ebola virus (ZEBOV)
agaaucuucucagggau

SEQ ID NO: 254664 - RNA, 19 nt, Zaire Ebola virus (ZEBOV)
agacuagauaauaaucuuc

SEQ ID NO: 254665 - RNA, 18 nt, Zaire Ebola virus (ZEBOV)
acuguaagccagcuucca

SEQ ID NO: 254666 - RNA, 19 nt, Zaire Ebola virus (ZEBOV)
acuguaagccagcuuccaa

SEQ ID NO: 254667 - RNA, 17 nt, Zaire Ebola virus (ZEBOV)
acuuacuaaugaucucu

SEQ ID NO: 254668 - RNA, 17 nt, Zaire Ebola virus (ZEBOV)
acuuguuuuuaaaggau

SEQ ID NO: 254669 - RNA, 18 nt, Zaire Ebola virus (ZEBOV)
acuuauucaguacuauaa

SEQ ID NO: 254670 - RNA, 20 nt, Zaire Ebola virus (ZEBOV)
acucaauaguuaucuugaca

SEQ ID NO: 254671 - RNA, 14 nt, Zaire Ebola virus (ZEBOV)
acucaucaccaaga

SEQ ID NO: 254672 - RNA, 18 nt, Zaire Ebola virus (ZEBOV)
acucauaaauugcucuca

SEQ ID NO: 254673 - RNA, 22 nt, Zaire Ebola virus (ZEBOV)
acuauaggguacguuacauuaa

SEQ ID NO: 254674 - RNA, 19 nt, Zaire Ebola virus (ZEBOV)
acgucaauugaauucucua

SEQ ID NO: 254675 - RNA, 21 nt, Zaire Ebola virus (ZEBOV)
accgguagaguuuaguugcaa

SEQ ID NO: 254676 - RNA, 22 nt, Zaire Ebola virus (ZEBOV)
acccauuucuagguuguucaca

SEQ ID NO: 254677 - RNA, 17 nt, Zaire Ebola virus (ZEBOV)
accagguccggacaaca

SEQ ID NO: 254678 - RNA, 18 nt, Zaire Ebola virus (ZEBOV)
accagguccggacaacag

SEQ ID NO: 254679 - RNA, 14 nt, Zaire Ebola virus (ZEBOV)
acacuauauaaccu

SEQ ID NO: 254680 - RNA, 18 nt, Zaire Ebola virus (ZEBOV)
acacuauauaaccuucua

SEQ ID NO: 254681 - RNA, 16 nt, Zaire Ebola virus (ZEBOV)
acaucucugcuuucau

SEQ ID NO: 254682 - RNA, 21 nt, Zaire Ebola virus (ZEBOV)
accaggacucagaaucccuca

SEQ ID NO: 254683 - RNA, 15 nt, Zaire Ebola virus (ZEBOV)
accaaaagugaugaa

SEQ ID NO: 254684 - RNA, 16 nt, Zaire Ebola virus (ZEBOV)
accaaaagugaugaag

SEQ ID NO: 254685 - RNA, 20 nt, Zaire Ebola virus (ZEBOV)
gcuggcaacaacaacacuca

SEQ ID NO: 254686 - RNA, 15 nt, Zaire Ebola virus (ZEBOV)
ggugauagccuuaau

SEQ ID NO: 254687 - RNA, 16 nt, Zaire Ebola virus (ZEBOV)
guaaaauaagagauua

SEQ ID NO: 254688 - RNA, 20 nt, Zaire Ebola virus (ZEBOV)
gugaagaguugucuuucaca

SEQ ID NO: 254689 - RNA, 13 nt, Zaire Ebola virus (ZEBOV)
uaacagugaucaa

SEQ ID NO: 254690 - RNA, 17 nt, Zaire Ebola virus (ZEBOV)
uaacauuaaguagucaa

SEQ ID NO: 254691 - RNA, 15 nt, Zaire Ebola virus (ZEBOV)
uaacauuuuugucua

SEQ ID NO: 254692 - RNA, 12 nt, Zaire Ebola virus (ZEBOV)
uaaauacucaua

SEQ ID NO: 254693 - RNA, 22 nt, Zaire Ebola virus (ZEBOV)
uaaauacucauauuucuugaua

SEQ ID NO: 254694 - RNA, 23 nt, Zaire Ebola virus (ZEBOV)
uaaauacucauauuucuugauaa

SEQ ID NO: 254695 - RNA, 14 nt, Zaire Ebola virus (ZEBOV)
uaaauaaauacuca

SEQ ID NO: 254696 - RNA, 15 nt, Zaire Ebola virus (ZEBOV)
uaaauaaauacucau

SEQ ID NO: 254697 - RNA, 17 nt, Zaire Ebola virus (ZEBOV)
uaaguauuucaugacuu

SEQ ID NO: 254698 - RNA, 22 nt, Zaire Ebola virus (ZEBOV)
uaacgaaaggucugggcucaua

SEQ ID NO: 254699 - RNA, 14 nt, Zaire Ebola virus (ZEBOV)
uaagaaaaaagccu

SEQ ID NO: 254700 - RNA, 14 nt, Zaire Ebola virus (ZEBOV)
uaaaauuguucaua

SEQ ID NO: 254701 - RNA, 20 nt, Zaire Ebola virus (ZEBOV)
uaaacucacaguuaaucaua

SEQ ID NO: 254702 - RNA, 15 nt, Zaire Ebola virus (ZEBOV)
uaaacucugcacucu

SEQ ID NO: 254703 - RNA, 15 nt, Zaire Ebola virus (ZEBOV)
uaaacuugacaucuc

SEQ ID NO: 254704 - RNA, 14 nt, Zaire Ebola virus (ZEBOV)
uacggugauucaaa

SEQ ID NO: 254705 - RNA, 19 nt, Zaire Ebola virus (ZEBOV)
uacaccauugucuuuuuuc

SEQ ID NO: 254706 - RNA, 15 nt, Zaire Ebola virus (ZEBOV)
uacacccguguauaa

SEQ ID NO: 254707 - RNA, 15 nt, Zaire Ebola virus (ZEBOV)
uaaucuucguguuaa

SEQ ID NO: 254708 - RNA, 15 nt, Zaire Ebola virus (ZEBOV)
uaaucuuuguguaaa

SEQ ID NO: 254709 - RNA, 17 nt, Zaire Ebola virus (ZEBOV)
uaaucuuuguguaaaau

SEQ ID NO: 254710 - RNA, 20 nt, Zaire Ebola virus (ZEBOV)
uaauguuguaucaauauccu

SEQ ID NO: 254711 - RNA, 16 nt, Zaire Ebola virus (ZEBOV)
uaauuaucauuacuuu

SEQ ID NO: 254712 - RNA, 23 nt, Zaire Ebola virus (ZEBOV)
uaaucaaaaaauucacaaugcag

SEQ ID NO: 254713 - RNA, 18 nt, Zaire Ebola virus (ZEBOV)
uaaucaagacgauauccu

SEQ ID NO: 254714 - RNA, 17 nt, Zaire Ebola virus (ZEBOV)
uaauccuacuauaauca

SEQ ID NO: 254715 - RNA, 14 nt, Zaire Ebola virus (ZEBOV)
uaauaauguuguau

SEQ ID NO: 254716 - RNA, 18 nt, Zaire Ebola virus (ZEBOV)
uaauaaauaaauacucau

SEQ ID NO: 254717 - RNA, 21 nt, Zaire Ebola virus (ZEBOV)
uaucaaacggagccaaaaaca

SEQ ID NO: 254718 - RNA, 23 nt, Zaire Ebola virus (ZEBOV)
uagccuuaaucuuuguguaaaau

SEQ ID NO: 254719 - RNA, 17 nt, Zaire Ebola virus (ZEBOV)
uagccaaugugauucua

SEQ ID NO: 254720 - RNA, 18 nt, Zaire Ebola virus (ZEBOV)
uagccaaugugauucuaa

SEQ ID NO: 254721 - RNA, 18 nt, Zaire Ebola virus (ZEBOV)
uaguguuuugguugauaa

SEQ ID NO: 254722 - RNA, 15 nt, Zaire Ebola virus (ZEBOV)
uauucaguacuauaa

SEQ ID NO: 254723 - RNA, 16 nt, Zaire Ebola virus (ZEBOV)
uauucaguacuauaau

SEQ ID NO: 254724 - RNA, 23 nt, Zaire Ebola virus (ZEBOV)
uauuacuaacucuauacucguaa

SEQ ID NO: 254725 - RNA, 20 nt, Zaire Ebola virus (ZEBOV)
uauuaaguuguaauaaucag

SEQ ID NO: 254726 - RNA, 16 nt, Zaire Ebola virus (ZEBOV)
uauugagcuaacucau

SEQ ID NO: 254727 - RNA, 19 nt, Zaire Ebola virus (ZEBOV)
ucaauuaaacgaccaagau

SEQ ID NO: 254728 - RNA, 15 nt, Zaire Ebola virus (ZEBOV)
ucaaucuaguuaucu

SEQ ID NO: 254729 - RNA, 15 nt, Zaire Ebola virus (ZEBOV)
ucaaacggagccaaa

SEQ ID NO: 254730 - RNA, 12 nt, Zaire Ebola virus (ZEBOV)
gacccccaaaag

SEQ ID NO: 254731 - RNA, 14 nt, Zaire Ebola virus (ZEBOV)
gacccagggaccaa

SEQ ID NO: 254732 - RNA, 20 nt, Zaire Ebola virus (ZEBOV)
gacccagggaccaacacaac

SEQ ID NO: 254733 - RNA, 22 nt, Zaire Ebola virus (ZEBOV)
gacauauuacugccgcaaugaa

SEQ ID NO: 254734 - RNA, 17 nt, Zaire Ebola virus (ZEBOV)
gacaucucugcuuucau

SEQ ID NO: 254735 - RNA, 14 nt, Zaire Ebola virus (ZEBOV)
gagauuccaagaca

SEQ ID NO: 254736 - RNA, 14 nt, Zaire Ebola virus (ZEBOV)
gagcuuuaaacaua

SEQ ID NO: 254737 - RNA, 16 nt, Zaire Ebola virus (ZEBOV)
gaagaccacaaaauca

SEQ ID NO: 254738 - RNA, 18 nt, Zaire Ebola virus (ZEBOV)
gaauauauggaggccaua

SEQ ID NO: 254739 - RNA, 19 nt, Zaire Ebola virus (ZEBOV)
gacacuuuuaauugaucaa

SEQ ID NO: 254740 - RNA, 20 nt, Zaire Ebola virus (ZEBOV)
gacacuuuuaauugaucaau

SEQ ID NO: 254741 - RNA, 12 nt, Zaire Ebola virus (ZEBOV)
gacacucccucu

SEQ ID NO: 254742 - RNA, 13 nt, Zaire Ebola virus (ZEBOV)
gaaauccuauaua

SEQ ID NO: 254743 - RNA, 14 nt, Zaire Ebola virus (ZEBOV)
cuugaugaagauua

SEQ ID NO: 254744 - RNA, 23 nt, Zaire Ebola virus (ZEBOV)
cuuggauuggaaauguggagaaa

SEQ ID NO: 254745 - RNA, 14 nt, Zaire Ebola virus (ZEBOV)
gccaccacaacaag

SEQ ID NO: 254746 - RNA, 22 nt, Zaire Ebola virus (ZEBOV)
gcauaccucuugcacaaaguga

SEQ ID NO: 254747 - RNA, 20 nt, Zaire Ebola virus (ZEBOV)
gcauaauaaauaaauacuca

SEQ ID NO: 254748 - RNA, 13 nt, Zaire Ebola virus (ZEBOV)
gaucuaaucucaa

SEQ ID NO: 254749 - RNA, 23 nt, Zaire Ebola virus (ZEBOV)
gaucuaaucucaauaaacaacua

SEQ ID NO: 254750 - RNA, 14 nt, Zaire Ebola virus (ZEBOV)
cuaaucucaauaaa

SEQ ID NO: 254751 - RNA, 14 nt, Zaire Ebola virus (ZEBOV)
cuacaaucaugaca

SEQ ID NO: 254752 - RNA, 15 nt, Zaire Ebola virus (ZEBOV)
cuacuauaaucaaua

SEQ ID NO: 254753 - RNA, 19 nt, Zaire Ebola virus (ZEBOV)
cuacugcuccuccugaaua

SEQ ID NO: 254754 - RNA, 16 nt, Zaire Ebola virus (ZEBOV)
cuacuugaucacaaua

SEQ ID NO: 254755 - RNA, 20 nt, Zaire Ebola virus (ZEBOV)
cuauauauuacuaacucuau

SEQ ID NO: 254756 - RNA, 21 nt, Zaire Ebola virus (ZEBOV)
cuauaggguacguuacauuaa

SEQ ID NO: 254757 - RNA, 12 nt, Zaire Ebola virus (ZEBOV)
cucaaguugaac

SEQ ID NO: 254758 - RNA, 18 nt, Zaire Ebola virus (ZEBOV)
cucaaguugaacaacauc

SEQ ID NO: 254759 - RNA, 21 nt, Zaire Ebola virus (ZEBOV)
cucaaguugaacaacaucacc

SEQ ID NO: 254760 - RNA, 17 nt, Zaire Ebola virus (ZEBOV)
cucauaaauugcucuca

SEQ ID NO: 254761 - RNA, 14 nt, Zaire Ebola virus (ZEBOV)
cucauacaucauau

SEQ ID NO: 254762 - RNA, 15 nt, Zaire Ebola virus (ZEBOV)
cucaucaccaagaua

SEQ ID NO: 254763 - RNA, 19 nt, Zaire Ebola virus (ZEBOV)
cucauauuguuauugauau

SEQ ID NO: 254764 - RNA, 20 nt, Zaire Ebola virus (ZEBOV)
cucauauuguuauugauaua

SEQ ID NO: 254765 - RNA, 16 nt, Zaire Ebola virus (ZEBOV)
cuaaauuaaauuacau

SEQ ID NO: 254766 - RNA, 14 nt, Zaire Ebola virus (ZEBOV)
cguaauauaaccug

SEQ ID NO: 254767 - RNA, 20 nt, Zaire Ebola virus (ZEBOV)
cgacaaauagcuaacauuaa

SEQ ID NO: 254768 - RNA, 13 nt, Zaire Ebola virus (ZEBOV)
cgacacucccucu

SEQ ID NO: 254769 - RNA, 20 nt, Zaire Ebola virus (ZEBOV)
cuuacgucaauugaauucuc

SEQ ID NO: 254770 - RNA, 14 nt, Zaire Ebola virus (ZEBOV)
cuuacaucugagga

SEQ ID NO: 254771 - RNA, 16 nt, Zaire Ebola virus (ZEBOV)
cuugaaucuaagauua

SEQ ID NO: 254772 - RNA, 19 nt, Zaire Ebola virus (ZEBOV)
cuucuuaaaacaaaauuga

SEQ ID NO: 254773 - RNA, 20 nt, Zaire Ebola virus (ZEBOV)
cuucaucuuguaaacguuga

SEQ ID NO: 254774 - RNA, 20 nt, Zaire Ebola virus (ZEBOV)
cuuccgacccagggaccaac

SEQ ID NO: 254775 - RNA, 17 nt, Zaire Ebola virus (ZEBOV)
cuuauuauuacuagccg

SEQ ID NO: 254776 - RNA, 21 nt, Zaire Ebola virus (ZEBOV)
cuuauucaguacuauaaucac

SEQ ID NO: 254777 - RNA, 17 nt, Zaire Ebola virus (ZEBOV)
cuucagaaaauuccucu

SEQ ID NO: 254778 - RNA, 21 nt, Zaire Ebola virus (ZEBOV)
cucugacaguauuauaaucaa

SEQ ID NO: 254779 - RNA, 23 nt, Zaire Ebola virus (ZEBOV)
cucucccugcgugauaaucaaaa

SEQ ID NO: 254780 - RNA, 20 nt, Zaire Ebola virus (ZEBOV)
cugaacuauaggguacguua

SEQ ID NO: 254781 - RNA, 16 nt, Zaire Ebola virus (ZEBOV)
cuggcaacaacaacac

SEQ ID NO: 254782 - RNA, 17 nt, Zaire Ebola virus (ZEBOV)
cugcagugucgcaucua

SEQ ID NO: 254783 - RNA, 17 nt, Zaire Ebola virus (ZEBOV)
ccauaauuguaacucaa

SEQ ID NO: 254784 - RNA, 23 nt, Zaire Ebola virus (ZEBOV)
ccauaauuguaacucaauauucu

SEQ ID NO: 254785 - RNA, 21 nt, Zaire Ebola virus (ZEBOV)
ccaaaagcagagaacaccaac

SEQ ID NO: 254786 - RNA, 13 nt, Zaire Ebola virus (ZEBOV)
ccaaaaccacagc

SEQ ID NO: 254787 - RNA, 20 nt, Zaire Ebola virus (ZEBOV)
caucauauauuuaaucaaga

SEQ ID NO: 254788 - RNA, 11 nt, Zaire Ebola virus (ZEBOV)
caucagugguc

SEQ ID NO: 254789 - RNA, 16 nt, Zaire Ebola virus (ZEBOV)
cauauuguuauugaua

SEQ ID NO: 254790 - RNA, 20 nt, Zaire Ebola virus (ZEBOV)
cauauugagcuaacucauau

SEQ ID NO: 254791 - RNA, 21 nt, Zaire Ebola virus (ZEBOV)
cauauugagcuaacucauaua

SEQ ID NO: 254792 - RNA, 14 nt, Zaire Ebola virus (ZEBOV)
caggacuguaaaau

SEQ ID NO: 254793 - RNA, 19 nt, Zaire Ebola virus (ZEBOV)
ccugaauauauggaggcca

SEQ ID NO: 254794 - RNA, 16 nt, Zaire Ebola virus (ZEBOV)
ccucaaaucaaugaaa

SEQ ID NO: 254795 - RNA, 23 nt, Zaire Ebola virus (ZEBOV)
ccucacuguaagccagcuuccaa

SEQ ID NO: 254796 - RNA, 15 nt, Zaire Ebola virus (ZEBOV)
ccuauauacuaaaug

SEQ ID NO: 254797 - RNA, 18 nt, Zaire Ebola virus (ZEBOV)
cgacccagggaccaacac

SEQ ID NO: 254798 - RNA, 13 nt, Zaire Ebola virus (ZEBOV)
cgacagcacagcc

SEQ ID NO: 254799 - RNA, 20 nt, Zaire Ebola virus (ZEBOV)
ccuggaccccgccaccacaa

SEQ ID NO: 254800 - RNA, 15 nt, Zaire Ebola virus (ZEBOV)
cuaaauuaaauuaca

SEQ ID NO: 254801 - RNA, 21 nt, Zaire Ebola virus (ZEBOV)
cuauauauuacuaacucuaua

SEQ ID NO: 254802 - RNA, 23 nt, Zaire Ebola virus (ZEBOV)
cuagcgauuuaucuaaauuaaau

SEQ ID NO: 254803 - RNA, 19 nt, Zaire Ebola virus (ZEBOV)
cuagcagcuuaaaauauaa

SEQ ID NO: 254804 - RNA, 21 nt, Zaire Ebola virus (ZEBOV)
cuagccugcccaacauuuaca

SEQ ID NO: 254805 - RNA, 13 nt, Zaire Ebola virus (ZEBOV)
cucccucugccac

SEQ ID NO: 254806 - RNA, 16 nt, Zaire Ebola virus (ZEBOV)
cucauugcacauacuu

SEQ ID NO: 254807 - RNA, 14 nt, Zaire Ebola virus (ZEBOV)
cucagaaucccuca

SEQ ID NO: 254808 - RNA, 21 nt, Zaire Ebola virus (ZEBOV)
cucauauaugcugacucaaua

SEQ ID NO: 254809 - RNA, 12 nt, Zaire Ebola virus (ZEBOV)
cucaaaucaaug

SEQ ID NO: 254810 - RNA, 17 nt, Zaire Ebola virus (ZEBOV)
cuauuuaguaauccguc

SEQ ID NO: 254811 - RNA, 21 nt, Zaire Ebola virus (ZEBOV)
cugacaguauuauaaucaauu

SEQ ID NO: 254812 - RNA, 14 nt, Zaire Ebola virus (ZEBOV)
cuccgacacucccu

SEQ ID NO: 254813 - RNA, 23 nt, Zaire Ebola virus (ZEBOV)
cuccuaaauguagaacuuaacaa

SEQ ID NO: 254814 - RNA, 20 nt, Zaire Ebola virus (ZEBOV)
cuggaccccgccaccacaac

SEQ ID NO: 254815 - RNA, 18 nt, Zaire Ebola virus (ZEBOV)
cugcaugcuuacaucuga

SEQ ID NO: 254816 - RNA, 14 nt, Zaire Ebola virus (ZEBOV)
cuugaucacaauac

SEQ ID NO: 254817 - RNA, 19 nt, Zaire Ebola virus (ZEBOV)
cuucuacuugaucacaaua

SEQ ID NO: 254818 - RNA, 23 nt, Zaire Ebola virus (ZEBOV)
cuucucagggauagugauaacau

SEQ ID NO: 254819 - RNA, 21 nt, Zaire Ebola virus (ZEBOV)
cuucagauugcuucauggaaa

SEQ ID NO: 254820 - RNA, 16 nt, Zaire Ebola virus (ZEBOV)
cuuauuuuugaauuua

SEQ ID NO: 254821 - RNA, 16 nt, Zaire Ebola virus (ZEBOV)
cuuacgucaauugaau

SEQ ID NO: 254822 - RNA, 18 nt, Zaire Ebola virus (ZEBOV)
gauaaucaaaaaauucac

SEQ ID NO: 254823 - RNA, 18 nt, Zaire Ebola virus (ZEBOV)
gaucuuuaagauuaaguu

SEQ ID NO: 254824 - RNA, 18 nt, Zaire Ebola virus (ZEBOV)
gauucuacaaucaugaca

SEQ ID NO: 254825 - RNA, 14 nt, Zaire Ebola virus (ZEBOV)
gauucuaacuccuu

SEQ ID NO: 254826 - RNA, 22 nt, Zaire Ebola virus (ZEBOV)
gauucuaacuccuuuaaacuca

SEQ ID NO: 254827 - RNA, 16 nt, Zaire Ebola virus (ZEBOV)
gauuaucuuuaaucuu

SEQ ID NO: 254828 - RNA, 18 nt, Zaire Ebola virus (ZEBOV)
gauuaucuuuaaucuuca

SEQ ID NO: 254829 - RNA, 22 nt, Zaire Ebola virus (ZEBOV)
aaauguagaacuuaacaaaaga

SEQ ID NO: 254830 - RNA, 17 nt, Zaire Ebola virus (ZEBOV)
gacuuacuaaugaucuc

SEQ ID NO: 254831 - RNA, 23 nt, Zaire Ebola virus (ZEBOV)
gacccauuucuagguuguucaca

SEQ ID NO: 254832 - RNA, 16 nt, Zaire Ebola virus (ZEBOV)
gacccagggaccaaca

SEQ ID NO: 254833 - RNA, 19 nt, Zaire Ebola virus (ZEBOV)
gaccgcuggcaacaacaac

SEQ ID NO: 254834 - RNA, 17 nt, Zaire Ebola virus (ZEBOV)
aaacucacaguuaauca

SEQ ID NO: 254835 - RNA, 20 nt, Zaire Ebola virus (ZEBOV)
aaacuuauucaguacuauaa

SEQ ID NO: 254836 - RNA, 13 nt, Zaire Ebola virus (ZEBOV)
aaaggauugauug

SEQ ID NO: 254837 - RNA, 19 nt, Zaire Ebola virus (ZEBOV)
aaagcucagccucaaauca

SEQ ID NO: 254838 - RNA, 20 nt, Zaire Ebola virus (ZEBOV)
aaagcucagccucaaaucaa

SEQ ID NO: 254839 - RNA, 22 nt, Zaire Ebola virus (ZEBOV)
aaacggagccaaaaacaucagu

SEQ ID NO: 254840 - RNA, 17 nt, Zaire Ebola virus (ZEBOV)
gaacaccaacacgagca

SEQ ID NO: 254841 - RNA, 12 nt, Zaire Ebola virus (ZEBOV)
gccucaaaucaa

SEQ ID NO: 254842 - RNA, 14 nt, Zaire Ebola virus (ZEBOV)
gccucaaaucaaug

SEQ ID NO: 254843 - RNA, 15 nt, Zaire Ebola virus (ZEBOV)
gccuccgacacuccc

SEQ ID NO: 254844 - RNA, 21 nt, Zaire Ebola virus (ZEBOV)
gcaucuaacaacccuugccac

SEQ ID NO: 254845 - RNA, 16 nt, Zaire Ebola virus (ZEBOV)
gcaaauaggcguuaag

SEQ ID NO: 254846 - RNA, 18 nt, Zaire Ebola virus (ZEBOV)
gccaccacaacaaguccc

SEQ ID NO: 254847 - RNA, 19 nt, Zaire Ebola virus (ZEBOV)
ggagccaaaaacaucagug

SEQ ID NO: 254848 - RNA, 19 nt, Zaire Ebola virus (ZEBOV)
guaaucuuucgauuaucuu

SEQ ID NO: 254849 - RNA, 13 nt, Zaire Ebola virus (ZEBOV)
ugaacaacaucac

SEQ ID NO: 254850 - RNA, 15 nt, Zaire Ebola virus (ZEBOV)
ugaauucucuagcac

SEQ ID NO: 254851 - RNA, 14 nt, Zaire Ebola virus (ZEBOV)
ugaauuuaaagcua

SEQ ID NO: 254852 - RNA, 14 nt, Zaire Ebola virus (ZEBOV)
ugaauuauuaucac

SEQ ID NO: 254853 - RNA, 11 nt, Zaire Ebola virus (ZEBOV)
ugaauaagcau

SEQ ID NO: 254854 - RNA, 19 nt, Zaire Ebola virus (ZEBOV)
ugaauaagcauuuuaucac

SEQ ID NO: 254855 - RNA, 15 nt, Zaire Ebola virus (ZEBOV)
uccuauauacuaaau

SEQ ID NO: 254856 - RNA, 19 nt, Zaire Ebola virus (ZEBOV)
ucucuuugagaaugauaaa

SEQ ID NO: 254857 - RNA, 14 nt, Zaire Ebola virus (ZEBOV)
ucugacaguauuau

SEQ ID NO: 254858 - RNA, 21 nt, Zaire Ebola virus (ZEBOV)
ucuuaaaacaaaauugaucuu

SEQ ID NO: 254859 - RNA, 20 nt, Zaire Ebola virus (ZEBOV)
ucccucaaacaagagauucc

SEQ ID NO: 254860 - RNA, 18 nt, Zaire Ebola virus (ZEBOV)
ucauaaauugcucucaua

SEQ ID NO: 254861 - RNA, 19 nt, Zaire Ebola virus (ZEBOV)
ucauaaacaagguuugaca

SEQ ID NO: 254862 - RNA, 21 nt, Zaire Ebola virus (ZEBOV)
ucauauugagcuaacucauau

SEQ ID NO: 254863 - RNA, 17 nt, Zaire Ebola virus (ZEBOV)
ucaucauccuuacguca

SEQ ID NO: 254864 - RNA, 17 nt, Zaire Ebola virus (ZEBOV)
uauaaccuucuacuuga

SEQ ID NO: 254865 - RNA, 19 nt, Zaire Ebola virus (ZEBOV)
uauaacuuaccuacuagcc

SEQ ID NO: 254866 - RNA, 17 nt, Zaire Ebola virus (ZEBOV)
uauaaacuugacaucuc

SEQ ID NO: 254867 - RNA, 19 nt, Zaire Ebola virus (ZEBOV)
ucaaguugaacaacaucac

SEQ ID NO: 254868 - RNA, 13 nt, Zaire Ebola virus (ZEBOV)
ucaauacggugau

SEQ ID NO: 254869 - RNA, 18 nt, Zaire Ebola virus (ZEBOV)
ucaauacggugauucaaa

SEQ ID NO: 254870 - RNA, 14 nt, Zaire Ebola virus (ZEBOV)
ucaauauccuguca

SEQ ID NO: 254871 - RNA, 13 nt, Zaire Ebola virus (ZEBOV)
ucagcccuggaua

SEQ ID NO: 254872 - RNA, 17 nt, Zaire Ebola virus (ZEBOV)
ucagcccuggauaauau

SEQ ID NO: 254873 - RNA, 19 nt, Zaire Ebola virus (ZEBOV)
ucagcccuggauaauauaa

SEQ ID NO: 254874 - RNA, 22 nt, Zaire Ebola virus (ZEBOV)
uaaucaaaaaauucacaaugca

SEQ ID NO: 254875 - RNA, 23 nt, Zaire Ebola virus (ZEBOV)
uaauauacuuguuuuuaaaggau

SEQ ID NO: 254876 - RNA, 18 nt, Zaire Ebola virus (ZEBOV)
uaauagcagaggcuucaa

SEQ ID NO: 254877 - RNA, 12 nt, Zaire Ebola virus (ZEBOV)
uaaccacagaua

SEQ ID NO: 254878 - RNA, 20 nt, Zaire Ebola virus (ZEBOV)
uacaaauaauccuacuauaa

SEQ ID NO: 254879 - RNA, 18 nt, Zaire Ebola virus (ZEBOV)
aacaaugggaugauucaa

SEQ ID NO: 254880 - RNA, 21 nt, Zaire Ebola virus (ZEBOV)
aacaaguccccaaaaccacag

SEQ ID NO: 254881 - RNA, 22 nt, Zaire Ebola virus (ZEBOV)
aacaagguuugacaucaaucua

SEQ ID NO: 254882 - RNA, 23 nt, Zaire Ebola virus (ZEBOV)
aacaagguuugacaucaaucuag

SEQ ID NO: 254883 - RNA, 13 nt, Zaire Ebola virus (ZEBOV)
uacuauaaucacu

SEQ ID NO: 254884 - RNA, 22 nt, Zaire Ebola virus (ZEBOV)
uauaaaaaacucauaaauugcu

SEQ ID NO: 254885 - RNA, 16 nt, Zaire Ebola virus (ZEBOV)
uaggcuuaauuaccaa

SEQ ID NO: 254886 - RNA, 13 nt, Zaire Ebola virus (ZEBOV)
uagcuaacauuaa

SEQ ID NO: 254887 - RNA, 20 nt, Zaire Ebola virus (ZEBOV)
uagcuaacauuaaguaguca

SEQ ID NO: 254888 - RNA, 15 nt, Zaire Ebola virus (ZEBOV)
uagcgauuuaucuaa

SEQ ID NO: 254889 - RNA, 18 nt, Zaire Ebola virus (ZEBOV)
uagccugcccaacauuua

SEQ ID NO: 254890 - RNA, 22 nt, Zaire Ebola virus (ZEBOV)
uagccauaauuguaacucaaua

SEQ ID NO: 254891 - RNA, 13 nt, Zaire Ebola virus (ZEBOV)
uaaaucuauuucu

SEQ ID NO: 254892 - RNA, 17 nt, Zaire Ebola virus (ZEBOV)
uaaauguagaacuuaac

SEQ ID NO: 254893 - RNA, 16 nt, Zaire Ebola virus (ZEBOV)
uaaauccucacuguaa

SEQ ID NO: 254894 - RNA, 22 nt, Zaire Ebola virus (ZEBOV)
uaaagcuagcuuauuauuacua

SEQ ID NO: 254895 - RNA, 21 nt, Zaire Ebola virus (ZEBOV)
uaaaaauaaaucuauuucuuc

SEQ ID NO: 254896 - RNA, 14 nt, Zaire Ebola virus (ZEBOV)
uaaacaacuauuua

SEQ ID NO: 254897 - RNA, 13 nt, Zaire Ebola virus (ZEBOV)
uuuuaauugauca

SEQ ID NO: 254898 - RNA, 22 nt, Zaire Ebola virus (ZEBOV)
uuuuaaaggauugauugaugaa

SEQ ID NO: 254899 - RNA, 21 nt, Zaire Ebola virus (ZEBOV)
uuuaacgcaacauaauaaacu

SEQ ID NO: 254900 - RNA, 18 nt, Zaire Ebola virus (ZEBOV)
uucuuguacacaaauaau

SEQ ID NO: 254901 - RNA, 16 nt, Zaire Ebola virus (ZEBOV)
uuucaugacuuacuaa

SEQ ID NO: 254902 - RNA, 19 nt, Zaire Ebola virus (ZEBOV)
aacccgcaggucacaugug

SEQ ID NO: 254903 - RNA, 20 nt, Zaire Ebola virus (ZEBOV)
aacccuugccacaaucucca

SEQ ID NO: 254904 - RNA, 14 nt, Zaire Ebola virus (ZEBOV)
aacauuuacacgau

SEQ ID NO: 254905 - RNA, 12 nt, Zaire Ebola virus (ZEBOV)
aaccaaaccagg

SEQ ID NO: 254906 - RNA, 12 nt, Zaire Ebola virus (ZEBOV)
aacauuacaaau

SEQ ID NO: 254907 - RNA, 18 nt, Zaire Ebola virus (ZEBOV)
aacuaauaacauuacaaa

SEQ ID NO: 254908 - RNA, 21 nt, Zaire Ebola virus (ZEBOV)
aaccugccaagcauaccucuu

SEQ ID NO: 254909 - RNA, 14 nt, Zaire Ebola virus (ZEBOV)
aagacaacaucaua

SEQ ID NO: 254910 - RNA, 20 nt, Zaire Ebola virus (ZEBOV)
aagcuagcuuauuauuacua

SEQ ID NO: 254911 - RNA, 12 nt, Zaire Ebola virus (ZEBOV)
aauauaagucaa

SEQ ID NO: 254912 - RNA, 16 nt, Zaire Ebola virus (ZEBOV)
aauauaagucaauuaa

SEQ ID NO: 254913 - RNA, 17 nt, Zaire Ebola virus (ZEBOV)
aauauaauacacuggag

SEQ ID NO: 254914 - RNA, 20 nt, Zaire Ebola virus (ZEBOV)
aauaccuucuuuacaauaua

SEQ ID NO: 254915 - RNA, 17 nt, Zaire Ebola virus (ZEBOV)
aaucaugacaguugucu

SEQ ID NO: 254916 - RNA, 21 nt, Zaire Ebola virus (ZEBOV)
aaucauaaacaagguuugaca

SEQ ID NO: 254917 - RNA, 21 nt, Zaire Ebola virus (ZEBOV)
aauugaucaauauacuaaagg

SEQ ID NO: 254918 - RNA, 10 nt, Zaire Ebola virus (ZEBOV)
aauugaucuu

SEQ ID NO: 254919 - RNA, 19 nt, Zaire Ebola virus (ZEBOV)
aauugaucuuuaagauuaa

SEQ ID NO: 254920 - RNA, 15 nt, Zaire Ebola virus (ZEBOV)
aauuaaauuacauua

SEQ ID NO: 254921 - RNA, 19 nt, Zaire Ebola virus (ZEBOV)
aaugguucaagugcacagu

SEQ ID NO: 254922 - RNA, 22 nt, Zaire Ebola virus (ZEBOV)
aauguaauaggagcuauaucuc

SEQ ID NO: 254923 - RNA, 20 nt, Zaire Ebola virus (ZEBOV)
aaucucaauaaacaacuauu

SEQ ID NO: 254924 - RNA, 21 nt, Zaire Ebola virus (ZEBOV)
aaucucaauaaacaacuauuu

SEQ ID NO: 254925 - RNA, 14 nt, Zaire Ebola virus (ZEBOV)
aaucuaguuaucuc

SEQ ID NO: 254926 - RNA, 20 nt, Zaire Ebola virus (ZEBOV)
aaucuucguguuaaugauaa

SEQ ID NO: 254927 - RNA, 16 nt, Zaire Ebola virus (ZEBOV)
aaugaugaagauuaaa

SEQ ID NO: 254928 - RNA, 22 nt, Zaire Ebola virus (ZEBOV)
aaugcagcaugugugacauauu

SEQ ID NO: 254929 - RNA, 18 nt, Zaire Ebola virus (ZEBOV)
ugacuuacuaaugaucuc

SEQ ID NO: 254930 - RNA, 15 nt, Zaire Ebola virus (ZEBOV)
ugggaugauucaacc

SEQ ID NO: 254931 - RNA, 19 nt, Zaire Ebola virus (ZEBOV)
uguagaacuuaacaaaaga

SEQ ID NO: 254932 - RNA, 12 nt, Zaire Ebola virus (ZEBOV)
uguauaaacuug

SEQ ID NO: 254933 - RNA, 16 nt, Zaire Ebola virus (ZEBOV)
uggauaauauaaguca

SEQ ID NO: 254934 - RNA, 13 nt, Zaire Ebola virus (ZEBOV)
uuacuaacucuau

SEQ ID NO: 254935 - RNA, 18 nt, Zaire Ebola virus (ZEBOV)
uuaucaccagaaauccua

SEQ ID NO: 254936 - RNA, 16 nt, Zaire Ebola virus (ZEBOV)
uuaucuuuaaucuuca

SEQ ID NO: 254937 - RNA, 17 nt, Zaire Ebola virus (ZEBOV)
uuauucaguacuauaau

SEQ ID NO: 254938 - RNA, 20 nt, Zaire Ebola virus (ZEBOV)
ugucuaaggugugaauuauu

SEQ ID NO: 254939 - RNA, 22 nt, Zaire Ebola virus (ZEBOV)
uuaaauuacauuaugcuuuuau

SEQ ID NO: 254940 - RNA, 20 nt, Zaire Ebola virus (ZEBOV)
uuaaguaacccaaaccaaaa

SEQ ID NO: 254941 - RNA, 14 nt, Zaire Ebola virus (ZEBOV)
uuaaacgaccaaga

SEQ ID NO: 254942 - RNA, 18 nt, Zaire Ebola virus (ZEBOV)
uuaaagcuagcuuauuau

SEQ ID NO: 254943 - RNA, 18 nt, Zaire Ebola virus (ZEBOV)
uucuaacuagcgauuuau

SEQ ID NO: 254944 - RNA, 20 nt, Zaire Ebola virus (ZEBOV)
uucuaacuccuuuaaacuca

SEQ ID NO: 254945 - RNA, 21 nt, Zaire Ebola virus (ZEBOV)
uucuaacuccuuuaaacucac

SEQ ID NO: 254946 - RNA, 13 nt, Zaire Ebola virus (ZEBOV)
uucacagauucua

SEQ ID NO: 254947 - RNA, 17 nt, Zaire Ebola virus (ZEBOV)
uucauccuugauucuac

SEQ ID NO: 254948 - RNA, 18 nt, Zaire Ebola virus (ZEBOV)
uucaugacuuacuaauga

SEQ ID NO: 254949 - RNA, 19 nt, Zaire Ebola virus (ZEBOV)
aggaagggaagcugcagug

SEQ ID NO: 254950 - RNA, 14 nt, Zaire Ebola virus (ZEBOV)
agcaugugugacau

SEQ ID NO: 254951 - RNA, 23 nt, Zaire Ebola virus (ZEBOV)
aggugugaauuauuaucacaaua

SEQ ID NO: 254952 - RNA, 17 nt, Zaire Ebola virus (ZEBOV)
agguuucacagauucua

SEQ ID NO: 254953 - RNA, 22 nt, Zaire Ebola virus (ZEBOV)
auaaccugccaagcauaccucu

SEQ ID NO: 254954 - RNA, 13 nt, Zaire Ebola virus (ZEBOV)
auaaccuuaacau

SEQ ID NO: 254955 - RNA, 17 nt, Zaire Ebola virus (ZEBOV)
auaaccuucuacuugau

SEQ ID NO: 254956 - RNA, 17 nt, Zaire Ebola virus (ZEBOV)
auaaucaauacggugau

SEQ ID NO: 254957 - RNA, 16 nt, Zaire Ebola virus (ZEBOV)
auaaacaacuauuuaa

SEQ ID NO: 254958 - RNA, 19 nt, Zaire Ebola virus (ZEBOV)
auaaaauuguucauaucuc

SEQ ID NO: 254959 - RNA, 18 nt, Zaire Ebola virus (ZEBOV)
aguuaaucauaaacaagg

SEQ ID NO: 254960 - RNA, 14 nt, Zaire Ebola virus (ZEBOV)
aguuauagccauaa

SEQ ID NO: 254961 - RNA, 13 nt, Zaire Ebola virus (ZEBOV)
aguuaucuugaca

SEQ ID NO: 254962 - RNA, 17 nt, Zaire Ebola virus (ZEBOV)
aguacuauaaucacucu

SEQ ID NO: 254963 - RNA, 22 nt, Zaire Ebola virus (ZEBOV)
auaguguuuugguugauaacac

SEQ ID NO: 254964 - RNA, 14 nt, Zaire Ebola virus (ZEBOV)
auagcuaacauuaa

SEQ ID NO: 254965 - RNA, 16 nt, Zaire Ebola virus (ZEBOV)
auauuacuaacucuau

SEQ ID NO: 254966 - RNA, 15 nt, Zaire Ebola virus (ZEBOV)
auauauuacuaacuc

SEQ ID NO: 254967 - RNA, 16 nt, Zaire Ebola virus (ZEBOV)
auauauggaggccaua

SEQ ID NO: 254968 - RNA, 22 nt, Zaire Ebola virus (ZEBOV)
aucccucaaacaagagauucca

SEQ ID NO: 254969 - RNA, 14 nt, Zaire Ebola virus (ZEBOV)
aucauauugaucua

SEQ ID NO: 254970 - RNA, 16 nt, Zaire Ebola virus (ZEBOV)
auauugagcuaacuca

SEQ ID NO: 254971 - RNA, 18 nt, Zaire Ebola virus (ZEBOV)
auauugagcuaacucaua

SEQ ID NO: 254972 - RNA, 11 nt, Zaire Ebola virus (ZEBOV)
auauugaucua

SEQ ID NO: 254973 - RNA, 17 nt, Zaire Ebola virus (ZEBOV)
augaagagguaugauac

SEQ ID NO: 254974 - RNA, 21 nt, Zaire Ebola virus (ZEBOV)
augaauuuaacgcaacauaau

SEQ ID NO: 254975 - RNA, 16 nt, Zaire Ebola virus (ZEBOV)
cacgaguccccaaucc

SEQ ID NO: 254976 - RNA, 17 nt, Zaire Ebola virus (ZEBOV)
caccaacacgagcaaga

SEQ ID NO: 254977 - RNA, 16 nt, Zaire Ebola virus (ZEBOV)
caccacaacaaguccc

SEQ ID NO: 254978 - RNA, 14 nt, Zaire Ebola virus (ZEBOV)
caauugaauucucu

SEQ ID NO: 254979 - RNA, 20 nt, Zaire Ebola virus (ZEBOV)
caauuugagucuuaaugcaa

SEQ ID NO: 254980 - RNA, 12 nt, Zaire Ebola virus (ZEBOV)
cacaaccaaacc

SEQ ID NO: 254981 - RNA, 19 nt, Zaire Ebola virus (ZEBOV)
cacauguguuagguuucac

SEQ ID NO: 254982 - RNA, 17 nt, Zaire Ebola virus (ZEBOV)
cagauugcuucauggaa

SEQ ID NO: 254983 - RNA, 14 nt, Zaire Ebola virus (ZEBOV)
cagauaaauccuca

SEQ ID NO: 254984 - RNA, 22 nt, Zaire Ebola virus (ZEBOV)
cagaaaauuccucugcaauggu

SEQ ID NO: 254985 - RNA, 15 nt, Zaire Ebola virus (ZEBOV)
cagagaacaccaaca

SEQ ID NO: 254986 - RNA, 15 nt, Zaire Ebola virus (ZEBOV)
cagcuuaaaauauaa

SEQ ID NO: 254987 - RNA, 18 nt, Zaire Ebola virus (ZEBOV)
caaauagcuaacauuaag

SEQ ID NO: 254988 - RNA, 15 nt, Zaire Ebola virus (ZEBOV)
caaauaggcguuaag

SEQ ID NO: 254989 - RNA, 20 nt, Zaire Ebola virus (ZEBOV)
auuuuaucaccagaaauccu

SEQ ID NO: 254990 - RNA, 16 nt, Zaire Ebola virus (ZEBOV)
caaagaaaaucauaau

SEQ ID NO: 254991 - RNA, 21 nt, Zaire Ebola virus (ZEBOV)
auucaaccgacaaauagcuaa

SEQ ID NO: 254992 - RNA, 13 nt, Zaire Ebola virus (ZEBOV)
auuccaagacaac

SEQ ID NO: 254993 - RNA, 17 nt, Zaire Ebola virus (ZEBOV)
acugacggaacauaaau

SEQ ID NO: 254994 - RNA, 14 nt, Zaire Ebola virus (ZEBOV)
acugaucacaggcg

SEQ ID NO: 254995 - RNA, 17 nt, Zaire Ebola virus (ZEBOV)
acuuaacaaaagacuca

SEQ ID NO: 254996 - RNA, 15 nt, Zaire Ebola virus (ZEBOV)
acuucuuaaaacaaa

SEQ ID NO: 254997 - RNA, 17 nt, Zaire Ebola virus (ZEBOV)
acucauauuucuugaua

SEQ ID NO: 254998 - RNA, 13 nt, Zaire Ebola virus (ZEBOV)
acucaucaccaag

SEQ ID NO: 254999 - RNA, 14 nt, Zaire Ebola virus (ZEBOV)
agcagagaacacca

SEQ ID NO: 255000 - RNA, 19 nt, Zaire Ebola virus (ZEBOV)
agcagaggcuucaacugcu

SEQ ID NO: 255001 - RNA, 21 nt, Zaire Ebola virus (ZEBOV)
agauuccaagacaacaucaua

SEQ ID NO: 255002 - RNA, 16 nt, Zaire Ebola virus (ZEBOV)
agauauauaagcauaa

SEQ ID NO: 255003 - RNA, 21 nt, Zaire Ebola virus (ZEBOV)
accgcuggcaacaacaacacu

SEQ ID NO: 255004 - RNA, 14 nt, Zaire Ebola virus (ZEBOV)
acacaacuucuuaa

SEQ ID NO: 255005 - RNA, 20 nt, Zaire Ebola virus (ZEBOV)
acaucaaucuaguuaucucu

SEQ ID NO: 255006 - RNA, 14 nt, Zaire Ebola virus (ZEBOV)
acaucauauugauc

SEQ ID NO: 255007 - RNA, 20 nt, Zaire Ebola virus (ZEBOV)
acaguugucuuuagugacaa

SEQ ID NO: 255008 - RNA, 17 nt, Zaire Ebola virus (ZEBOV)
accaacacaacaacuga

SEQ ID NO: 255009 - RNA, 18 nt, Zaire Ebola virus (ZEBOV)
aaauaaguauuucaugac

SEQ ID NO: 255010 - RNA, 11 nt, Zaire Ebola virus (ZEBOV)
aaauguagaac

SEQ ID NO: 255011 - RNA, 13 nt, Zaire Ebola virus (ZEBOV)
aaauccucacugu

SEQ ID NO: 255012 - RNA, 14 nt, Zaire Ebola virus (ZEBOV)
aaauccucacugua

SEQ ID NO: 255013 - RNA, 15 nt, Zaire Ebola virus (ZEBOV)
aacacucaucaccaa

SEQ ID NO: 255014 - RNA, 16 nt, Zaire Ebola virus (ZEBOV)
aacucuauacucguaa

SEQ ID NO: 255015 - RNA, 20 nt, Zaire Ebola virus (ZEBOV)
aacgauccaucccaucaaaa

SEQ ID NO: 255016 - RNA, 18 nt, Zaire Ebola virus (ZEBOV)
aacauaauaaacucugca

SEQ ID NO: 255017 - RNA, 23 nt, Zaire Ebola virus (ZEBOV)
aacagugaucaaagaaaaucaua

SEQ ID NO: 255018 - RNA, 20 nt, Zaire Ebola virus (ZEBOV)
aagaaaaaacuaaugaugaa

SEQ ID NO: 255019 - RNA, 12 nt, Zaire Ebola virus (ZEBOV)
acaaaauugauc

SEQ ID NO: 255020 - RNA, 22 nt, Zaire Ebola virus (ZEBOV)
acaacacucaucaccaagauac

SEQ ID NO: 255021 - RNA, 19 nt, Zaire Ebola virus (ZEBOV)
acaauacuccguauaccua

SEQ ID NO: 255022 - RNA, 14 nt, Zaire Ebola virus (ZEBOV)
acaauaaaagugau

SEQ ID NO: 255023 - RNA, 16 nt, Zaire Ebola virus (ZEBOV)
acaauaaaagugauuc

SEQ ID NO: 255024 - RNA, 20 nt, Zaire Ebola virus (ZEBOV)
acaaguccccaaaaccacag

SEQ ID NO: 255025 - RNA, 15 nt, Zaire Ebola virus (ZEBOV)
acaaugggaugauuc

SEQ ID NO: 255026 - RNA, 16 nt, Zaire Ebola virus (ZEBOV)
aauuuaacgcaacaua

SEQ ID NO: 255027 - RNA, 15 nt, Zaire Ebola virus (ZEBOV)
aauuguucauaucuc

SEQ ID NO: 255028 - RNA, 16 nt, Zaire Ebola virus (ZEBOV)
aauuguucauaucucg

SEQ ID NO: 255029 - RNA, 12 nt, Zaire Ebola virus (ZEBOV)
aaugaaaccagg

SEQ ID NO: 255030 - RNA, 18 nt, Zaire Ebola virus (ZEBOV)
aaucuucauccuugauuc

SEQ ID NO: 255031 - RNA, 17 nt, Zaire Ebola virus (ZEBOV)
aauguuaaucuuucuca

SEQ ID NO: 255032 - RNA, 15 nt, Zaire Ebola virus (ZEBOV)
aauguuuuacucuac

SEQ ID NO: 255033 - RNA, 12 nt, Zaire Ebola virus (ZEBOV)
aauuaagcuuua

SEQ ID NO: 255034 - RNA, 16 nt, Zaire Ebola virus (ZEBOV)
aaggugugaauuauua

SEQ ID NO: 255035 - RNA, 17 nt, Zaire Ebola virus (ZEBOV)
aaucccucacaaccaaa

SEQ ID NO: 255036 - RNA, 17 nt, Zaire Ebola virus (ZEBOV)
aauaauguuuuacucua

SEQ ID NO: 255037 - RNA, 17 nt, Zaire Ebola virus (ZEBOV)
aauaaauaaauacucau

SEQ ID NO: 255038 - RNA, 16 nt, Zaire Ebola virus (ZEBOV)
aaacaaaauugaucuu

SEQ ID NO: 255039 - RNA, 21 nt, Zaire Ebola virus (ZEBOV)
aaaccagguccggacaacagc

SEQ ID NO: 255040 - RNA, 23 nt, Zaire Ebola virus (ZEBOV)
aaaccagguccggacaacagcac

SEQ ID NO: 255041 - RNA, 20 nt, Zaire Ebola virus (ZEBOV)
aaaaggcaggacuguaaaau

SEQ ID NO: 255042 - RNA, 21 nt, Zaire Ebola virus (ZEBOV)
aaaagcucagccucaaaucaa

SEQ ID NO: 255043 - RNA, 12 nt, Zaire Ebola virus (ZEBOV)
aaaaacaucagu

SEQ ID NO: 255044 - RNA, 23 nt, Zaire Ebola virus (ZEBOV)
uuuuauagaaucuucucagggau

SEQ ID NO: 255045 - RNA, 22 nt, Zaire Ebola virus (ZEBOV)
ucacagauucuauauauuacua

SEQ ID NO: 255046 - RNA, 16 nt, Zaire Ebola virus (ZEBOV)
ucagauauauaagcau

SEQ ID NO: 255047 - RNA, 13 nt, Zaire Ebola virus (ZEBOV)
ucagauggaauag

SEQ ID NO: 255048 - RNA, 18 nt, Zaire Ebola virus (ZEBOV)
ucagauugcuucauggaa

SEQ ID NO: 255049 - RNA, 22 nt, Zaire Ebola virus (ZEBOV)
ucagggauagugauaacaucua

SEQ ID NO: 255050 - RNA, 15 nt, Zaire Ebola virus (ZEBOV)
ucagccucaaaucaa

SEQ ID NO: 255051 - RNA, 20 nt, Zaire Ebola virus (ZEBOV)
ucauaacuaauaacauuaca

SEQ ID NO: 255052 - RNA, 15 nt, Zaire Ebola virus (ZEBOV)
ucaguacuauaauca

SEQ ID NO: 255053 - RNA, 21 nt, Zaire Ebola virus (ZEBOV)
ucucuccuaaauguagaacuu

SEQ ID NO: 255054 - RNA, 14 nt, Zaire Ebola virus (ZEBOV)
ucuacuugaucaca

SEQ ID NO: 255055 - RNA, 23 nt, Zaire Ebola virus (ZEBOV)
ucuucucagggauagugauaaca

SEQ ID NO: 255056 - RNA, 20 nt, Zaire Ebola virus (ZEBOV)
ucuucagauugcuucaugga

SEQ ID NO: 255057 - RNA, 15 nt, Zaire Ebola virus (ZEBOV)
ucugaggcaacucaa

SEQ ID NO: 255058 - RNA, 13 nt, Zaire Ebola virus (ZEBOV)
ucuuaaaacaaaa

SEQ ID NO: 255059 - RNA, 22 nt, Zaire Ebola virus (ZEBOV)
ucuuaaaacaaaauugaucuuu

SEQ ID NO: 255060 - RNA, 22 nt, Zaire Ebola virus (ZEBOV)
ugacaaaugauaauauaauaca

SEQ ID NO: 255061 - RNA, 16 nt, Zaire Ebola virus (ZEBOV)
ucuuucucauugcaca

SEQ ID NO: 255062 - RNA, 18 nt, Zaire Ebola virus (ZEBOV)
ugaucaaagaaaaucaua

SEQ ID NO: 255063 - RNA, 14 nt, Zaire Ebola virus (ZEBOV)
ugaucaauauacua

SEQ ID NO: 255064 - RNA, 18 nt, Zaire Ebola virus (ZEBOV)
ugaucaauauacuaaagg

SEQ ID NO: 255065 - RNA, 16 nt, Zaire Ebola virus (ZEBOV)
ugauagccuuaaucuu

SEQ ID NO: 255066 - RNA, 22 nt, Zaire Ebola virus (ZEBOV)
ugagaaugauaaacuugaugaa

SEQ ID NO: 255067 - RNA, 22 nt, Zaire Ebola virus (ZEBOV)
ugcaauaauugacucagaucca

SEQ ID NO: 255068 - RNA, 17 nt, Zaire Ebola virus (ZEBOV)
uggucgcacacaaaaau

SEQ ID NO: 255069 - RNA, 21 nt, Zaire Ebola virus (ZEBOV)
uguaauaggagcuauaucucu

SEQ ID NO: 255070 - RNA, 17 nt, Zaire Ebola virus (ZEBOV)
ugucuuucacaguugua

SEQ ID NO: 255071 - RNA, 13 nt, Zaire Ebola virus (ZEBOV)
ugcuuacaucuga

SEQ ID NO: 255072 - RNA, 19 nt, Zaire Ebola virus (ZEBOV)
uggaacaaugggaugauuc

SEQ ID NO: 255073 - RNA, 19 nt, Zaire Ebola virus (ZEBOV)
uuacgucaauugaauucuc

SEQ ID NO: 255074 - RNA, 21 nt, Zaire Ebola virus (ZEBOV)
uuaucacaauaaaagugauuc

SEQ ID NO: 255075 - RNA, 14 nt, Zaire Ebola virus (ZEBOV)
uuauuaacauacag

SEQ ID NO: 255076 - RNA, 15 nt, Zaire Ebola virus (ZEBOV)
uuauucaguacuaua

SEQ ID NO: 255077 - RNA, 16 nt, Zaire Ebola virus (ZEBOV)
uuauucaguacuauaa

SEQ ID NO: 255078 - RNA, 20 nt, Zaire Ebola virus (ZEBOV)
uugauaauuuguuuaaccac

SEQ ID NO: 255079 - RNA, 20 nt, Zaire Ebola virus (ZEBOV)
uucuuaaaacaaaauugauc

SEQ ID NO: 255080 - RNA, 21 nt, Zaire Ebola virus (ZEBOV)
uucuuaaaacaaaauugaucu

SEQ ID NO: 255081 - RNA, 22 nt, Zaire Ebola virus (ZEBOV)
uugaugucuaaggugugaauua

SEQ ID NO: 255082 - RNA, 13 nt, Zaire Ebola virus (ZEBOV)
uucaacugcugaa

SEQ ID NO: 255083 - RNA, 15 nt, Zaire Ebola virus (ZEBOV)
agucaaggaagggaa

SEQ ID NO: 255084 - RNA, 14 nt, Zaire Ebola virus (ZEBOV)
aguccccaaaacca

SEQ ID NO: 255085 - RNA, 16 nt, Zaire Ebola virus (ZEBOV)
agucuuaaugcaaaua

SEQ ID NO: 255086 - RNA, 19 nt, Zaire Ebola virus (ZEBOV)
auaaacuugaugaagauua

SEQ ID NO: 255087 - RNA, 17 nt, Zaire Ebola virus (ZEBOV)
auaacuaauaacauuac

SEQ ID NO: 255088 - RNA, 19 nt, Zaire Ebola virus (ZEBOV)
auaacuaauaacauuacaa

SEQ ID NO: 255089 - RNA, 16 nt, Zaire Ebola virus (ZEBOV)
auaauaaauaaauacu

SEQ ID NO: 255090 - RNA, 20 nt, Zaire Ebola virus (ZEBOV)
auaauaaauaaauacucaua

SEQ ID NO: 255091 - RNA, 19 nt, Zaire Ebola virus (ZEBOV)
auaauauaagucaauuaaa

SEQ ID NO: 255092 - RNA, 18 nt, Zaire Ebola virus (ZEBOV)
auaaucaaaaaauucaca

SEQ ID NO: 255093 - RNA, 19 nt, Zaire Ebola virus (ZEBOV)
auaaguauuucaugacuua

SEQ ID NO: 255094 - RNA, 21 nt, Zaire Ebola virus (ZEBOV)
auauaaccuucuacuugauca

SEQ ID NO: 255095 - RNA, 23 nt, Zaire Ebola virus (ZEBOV)
auauaaccuucuacuugaucaca

SEQ ID NO: 255096 - RNA, 19 nt, Zaire Ebola virus (ZEBOV)
auaucucugacaguauuau

SEQ ID NO: 255097 - RNA, 17 nt, Zaire Ebola virus (ZEBOV)
auauccuuuaaaacuua

SEQ ID NO: 255098 - RNA, 23 nt, Zaire Ebola virus (ZEBOV)
auaguguuuugguugauaacaca

SEQ ID NO: 255099 - RNA, 13 nt, Zaire Ebola virus (ZEBOV)
auagugauaacau

SEQ ID NO: 255100 - RNA, 17 nt, Zaire Ebola virus (ZEBOV)
auaccuaucaucauaua

SEQ ID NO: 255101 - RNA, 15 nt, Zaire Ebola virus (ZEBOV)
aucaauauccuguca

SEQ ID NO: 255102 - RNA, 14 nt, Zaire Ebola virus (ZEBOV)
aucaauauacuaaa

SEQ ID NO: 255103 - RNA, 15 nt, Zaire Ebola virus (ZEBOV)
agaaaaaccuaccuc

SEQ ID NO: 255104 - RNA, 23 nt, Zaire Ebola virus (ZEBOV)
agaguuuaguugcaaccuaacac

SEQ ID NO: 255105 - RNA, 18 nt, Zaire Ebola virus (ZEBOV)
agauauauaagcauaaua

SEQ ID NO: 255106 - RNA, 14 nt, Zaire Ebola virus (ZEBOV)
agcacccauaauac

SEQ ID NO: 255107 - RNA, 24 nt, Zaire Ebola virus (ZEBOV)
agauucuauauauuacuaacucua

SEQ ID NO: 255108 - RNA, 16 nt, Zaire Ebola virus (ZEBOV)
agccaaaaacaucagu

SEQ ID NO: 255109 - RNA, 22 nt, Zaire Ebola virus (ZEBOV)
agccaaugugauucuaacuccu

SEQ ID NO: 255110 - RNA, 20 nt, Zaire Ebola virus (ZEBOV)
agccauaauuguaacucaau

SEQ ID NO: 255111 - RNA, 17 nt, Zaire Ebola virus (ZEBOV)
agccacaguuauagcca

SEQ ID NO: 255112 - RNA, 16 nt, Zaire Ebola virus (ZEBOV)
agccuccgacacuccc

SEQ ID NO: 255113 - RNA, 23 nt, Zaire Ebola virus (ZEBOV)
agcagaggcuucaacugcugaac

SEQ ID NO: 255114 - RNA, 21 nt, Zaire Ebola virus (ZEBOV)
acuaaaugguuaauuguaacu

SEQ ID NO: 255115 - RNA, 15 nt, Zaire Ebola virus (ZEBOV)
accgcagaacagaca

SEQ ID NO: 255116 - RNA, 16 nt, Zaire Ebola virus (ZEBOV)
accgcagaacagacaa

SEQ ID NO: 255117 - RNA, 20 nt, Zaire Ebola virus (ZEBOV)
acccgcaggucacauguguu

SEQ ID NO: 255118 - RNA, 17 nt, Zaire Ebola virus (ZEBOV)
acgagcaagagcacuga

SEQ ID NO: 255119 - RNA, 19 nt, Zaire Ebola virus (ZEBOV)
acaacacucaucaccaaga

SEQ ID NO: 255120 - RNA, 20 nt, Zaire Ebola virus (ZEBOV)
acaacaucauagaauugcuu

SEQ ID NO: 255121 - RNA, 17 nt, Zaire Ebola virus (ZEBOV)
acaacuauuuaaauaac

SEQ ID NO: 255122 - RNA, 19 nt, Zaire Ebola virus (ZEBOV)
acaaaugauaauauaauac

SEQ ID NO: 255123 - RNA, 18 nt, Zaire Ebola virus (ZEBOV)
acaaauagcuaacauuaa

SEQ ID NO: 255124 - RNA, 13 nt, Zaire Ebola virus (ZEBOV)
acaacaacacuca

SEQ ID NO: 255125 - RNA, 19 nt, Zaire Ebola virus (ZEBOV)
aauuugagucuuaaugcaa

SEQ ID NO: 255126 - RNA, 19 nt, Zaire Ebola virus (ZEBOV)
acaaaagacucauaauaua

SEQ ID NO: 255127 - RNA, 20 nt, Zaire Ebola virus (ZEBOV)
acaucaccgcagaacagaca

SEQ ID NO: 255128 - RNA, 12 nt, Zaire Ebola virus (ZEBOV)
acagauaaaucc

SEQ ID NO: 255129 - RNA, 22 nt, Zaire Ebola virus (ZEBOV)
acacccguguauaaacuugaca

SEQ ID NO: 255130 - RNA, 14 nt, Zaire Ebola virus (ZEBOV)
ccaucccaucaaaa

SEQ ID NO: 255131 - RNA, 15 nt, Zaire Ebola virus (ZEBOV)
cagauauauaagcau

SEQ ID NO: 255132 - RNA, 18 nt, Zaire Ebola virus (ZEBOV)
cagaacagacaacgacag

SEQ ID NO: 255133 - RNA, 18 nt, Zaire Ebola virus (ZEBOV)
caucauccuuacgucaau

SEQ ID NO: 255134 - RNA, 23 nt, Zaire Ebola virus (ZEBOV)
caucauccuuacgucaauugaau

SEQ ID NO: 255135 - RNA, 16 nt, Zaire Ebola virus (ZEBOV)
caguauuauaaucaau

SEQ ID NO: 255136 - RNA, 18 nt, Zaire Ebola virus (ZEBOV)
caguugucuuuagugaca

SEQ ID NO: 255137 - RNA, 17 nt, Zaire Ebola virus (ZEBOV)
augcuuacaucugagga

SEQ ID NO: 255138 - RNA, 17 nt, Zaire Ebola virus (ZEBOV)
aucuucauccuugauuc

SEQ ID NO: 255139 - RNA, 16 nt, Zaire Ebola virus (ZEBOV)
aucuuucgauuaucuu

SEQ ID NO: 255140 - RNA, 21 nt, Zaire Ebola virus (ZEBOV)
aucuuucgauuaucuuuaauc

SEQ ID NO: 255141 - RNA, 15 nt, Zaire Ebola virus (ZEBOV)
augauaauauaauac

SEQ ID NO: 255142 - RNA, 14 nt, Zaire Ebola virus (ZEBOV)
auuaacauacagau

SEQ ID NO: 255143 - RNA, 17 nt, Zaire Ebola virus (ZEBOV)
auuauaugaauaagcau

SEQ ID NO: 255144 - RNA, 22 nt, Zaire Ebola virus (ZEBOV)
auuaucacaauaaaagugauuc

SEQ ID NO: 255145 - RNA, 16 nt, Zaire Ebola virus (ZEBOV)
auugagcuaacucaua

SEQ ID NO: 255146 - RNA, 16 nt, Zaire Ebola virus (ZEBOV)
auucacaaugcagcau

SEQ ID NO: 255147 - RNA, 18 nt, Zaire Ebola virus (ZEBOV)
auucaguacuauaaucac

SEQ ID NO: 255148 - RNA, 16 nt, Zaire Ebola virus (ZEBOV)
auucaaccgacaaaua

SEQ ID NO: 255149 - RNA, 15 nt, Zaire Ebola virus (ZEBOV)
auggauuacuugaau

SEQ ID NO: 255150 - RNA, 22 nt, Zaire Ebola virus (ZEBOV)
cacagauucuauauauuacuaa

SEQ ID NO: 255151 - RNA, 21 nt, Zaire Ebola virus (ZEBOV)
cacaacaaguccccaaaacca

SEQ ID NO: 255152 - RNA, 15 nt, Zaire Ebola virus (ZEBOV)
cacaacuucuuaaaa

SEQ ID NO: 255153 - RNA, 23 nt, Zaire Ebola virus (ZEBOV)
caauauacuaaaggugcuuuaca

SEQ ID NO: 255154 - RNA, 17 nt, Zaire Ebola virus (ZEBOV)
caauaguuaucuugaca

SEQ ID NO: 255155 - RNA, 14 nt, Zaire Ebola virus (ZEBOV)
caacugcugaacua

SEQ ID NO: 255156 - RNA, 16 nt, Zaire Ebola virus (ZEBOV)
caacugaagaccacaa

SEQ ID NO: 255157 - RNA, 21 nt, Zaire Ebola virus (ZEBOV)
caacucaaguugaacaacauc

SEQ ID NO: 255158 - RNA, 20 nt, Zaire Ebola virus (ZEBOV)
caacccuaacagugaucaaa

SEQ ID NO: 255159 - RNA, 17 nt, Zaire Ebola virus (ZEBOV)
caacgacagcacagccu

SEQ ID NO: 255160 - RNA, 19 nt, Zaire Ebola virus (ZEBOV)
caacgacagcacagccucc

SEQ ID NO: 255161 - RNA, 20 nt, Zaire Ebola virus (ZEBOV)
caacgauccaucccaucaaa

SEQ ID NO: 255162 - RNA, 19 nt, Zaire Ebola virus (ZEBOV)
caaguccccaaaaccacag

SEQ ID NO: 255163 - RNA, 13 nt, Zaire Ebola virus (ZEBOV)
auuuuugaauuua

SEQ ID NO: 255164 - RNA, 14 nt, Zaire Ebola virus (ZEBOV)
auugaucuaaucuc

SEQ ID NO: 255165 - RNA, 19 nt, Zaire Ebola virus (ZEBOV)
auugaucuaaucucaauaa

SEQ ID NO: 255166 - RNA, 15 nt, Zaire Ebola virus (ZEBOV)
caacagcacccauaa

SEQ ID NO: 255167 - RNA, 20 nt, Zaire Ebola virus (ZEBOV)
caacagcacccauaauacac

SEQ ID NO: 255168 - RNA, 15 nt, Zaire Ebola virus (ZEBOV)
caaagaaaaucauaa

SEQ ID NO: 255169 - RNA, 19 nt, Zaire Ebola virus (ZEBOV)
caaagaaaaucauaaucuc

SEQ ID NO: 255170 - RNA, 20 nt, Zaire Ebola virus (ZEBOV)
uaauugacucagauccaguu

SEQ ID NO: 255171 - RNA, 15 nt, Zaire Ebola virus (ZEBOV)
uaagcuacuauuuca

SEQ ID NO: 255172 - RNA, 16 nt, Zaire Ebola virus (ZEBOV)
uacaaucaugacaguu

SEQ ID NO: 255173 - RNA, 19 nt, Zaire Ebola virus (ZEBOV)
uacuaaaggugcuuuacac

SEQ ID NO: 255174 - RNA, 15 nt, Zaire Ebola virus (ZEBOV)
uacuauaaucacucu

SEQ ID NO: 255175 - RNA, 23 nt, Zaire Ebola virus (ZEBOV)
uacauuaugcuuuuauaacuuac

SEQ ID NO: 255176 - RNA, 16 nt, Zaire Ebola virus (ZEBOV)
uaccucggcugagaga

SEQ ID NO: 255177 - RNA, 14 nt, Zaire Ebola virus (ZEBOV)
uagaauacuucaua

SEQ ID NO: 255178 - RNA, 15 nt, Zaire Ebola virus (ZEBOV)
uagaauacuucauau

SEQ ID NO: 255179 - RNA, 22 nt, Zaire Ebola virus (ZEBOV)
uacuugacaaaugauaauauaa

SEQ ID NO: 255180 - RNA, 12 nt, Zaire Ebola virus (ZEBOV)
uagcuaacauua

SEQ ID NO: 255181 - RNA, 13 nt, Zaire Ebola virus (ZEBOV)
uauauuauauacu

SEQ ID NO: 255182 - RNA, 20 nt, Zaire Ebola virus (ZEBOV)
uauauauuacuaacucuaua

SEQ ID NO: 255183 - RNA, 15 nt, Zaire Ebola virus (ZEBOV)
uauagaaucuucuca

SEQ ID NO: 255184 - RNA, 22 nt, Zaire Ebola virus (ZEBOV)
uaguauccugauacuugcaaag

SEQ ID NO: 255185 - RNA, 16 nt, Zaire Ebola virus (ZEBOV)
uaaauugcucucauac

SEQ ID NO: 255186 - RNA, 19 nt, Zaire Ebola virus (ZEBOV)
uaacuaauaacauuacaaa

SEQ ID NO: 255187 - RNA, 16 nt, Zaire Ebola virus (ZEBOV)
uaacuagcgauuuauc

SEQ ID NO: 255188 - RNA, 19 nt, Zaire Ebola virus (ZEBOV)
uaaaauuguucauaucucg

SEQ ID NO: 255189 - RNA, 12 nt, Zaire Ebola virus (ZEBOV)
uaaacaacuauu

SEQ ID NO: 255190 - RNA, 12 nt, Zaire Ebola virus (ZEBOV)
guugcaaaaagg

SEQ ID NO: 255191 - RNA, 16 nt, Zaire Ebola virus (ZEBOV)
guuuugguugauaaca

SEQ ID NO: 255192 - RNA, 14 nt, Zaire Ebola virus (ZEBOV)
guuauuaacauaca

SEQ ID NO: 255193 - RNA, 16 nt, Zaire Ebola virus (ZEBOV)
guguauaaacuugaca

SEQ ID NO: 255194 - RNA, 16 nt, Zaire Ebola virus (ZEBOV)
guguaauaaccuuaac

SEQ ID NO: 255195 - RNA, 20 nt, Zaire Ebola virus (ZEBOV)
guccggacaacagcacccau

SEQ ID NO: 255196 - RNA, 12 nt, Zaire Ebola virus (ZEBOV)
guccccaaaacc

SEQ ID NO: 255197 - RNA, 15 nt, Zaire Ebola virus (ZEBOV)
gcucucauacaucau

SEQ ID NO: 255198 - RNA, 22 nt, Zaire Ebola virus (ZEBOV)
gcucguaauauaaccugccaag

SEQ ID NO: 255199 - RNA, 13 nt, Zaire Ebola virus (ZEBOV)
gcgugauaaucaa

SEQ ID NO: 255200 - RNA, 18 nt, Zaire Ebola virus (ZEBOV)
gccggacccccaaaagca

SEQ ID NO: 255201 - RNA, 23 nt, Zaire Ebola virus (ZEBOV)
gccuccgacacucccucugccac

SEQ ID NO: 255202 - RNA, 23 nt, Zaire Ebola virus (ZEBOV)
ggcggguuauauugccuacugcu

SEQ ID NO: 255203 - RNA, 18 nt, Zaire Ebola virus (ZEBOV)
gguucaagugcacaguca

SEQ ID NO: 255204 - RNA, 13 nt, Zaire Ebola virus (ZEBOV)
cuagcagcuuaaa

SEQ ID NO: 255205 - RNA, 23 nt, Zaire Ebola virus (ZEBOV)
cuagccguuuuucaaaguucaau

SEQ ID NO: 255206 - RNA, 22 nt, Zaire Ebola virus (ZEBOV)
cuagcuuauuauuacuagccgu

SEQ ID NO: 255207 - RNA, 18 nt, Zaire Ebola virus (ZEBOV)
cuaauaacauuacaaaua

SEQ ID NO: 255208 - RNA, 15 nt, Zaire Ebola virus (ZEBOV)
cuaagauuacuugac

SEQ ID NO: 255209 - RNA, 17 nt, Zaire Ebola virus (ZEBOV)
cuaagauuacuugacaa

SEQ ID NO: 255210 - RNA, 14 nt, Zaire Ebola virus (ZEBOV)
cuaacucauauaug

SEQ ID NO: 255211 - RNA, 13 nt, Zaire Ebola virus (ZEBOV)
cuccuccugaaua

SEQ ID NO: 255212 - RNA, 13 nt, Zaire Ebola virus (ZEBOV)
cuccuuuaaacuc

SEQ ID NO: 255213 - RNA, 16 nt, Zaire Ebola virus (ZEBOV)
cucacaguuaaucaua

SEQ ID NO: 255214 - RNA, 19 nt, Zaire Ebola virus (ZEBOV)
cucaauauucuaacuagcg

SEQ ID NO: 255215 - RNA, 21 nt, Zaire Ebola virus (ZEBOV)
cucaauauucuaacuagcgau

SEQ ID NO: 255216 - RNA, 18 nt, Zaire Ebola virus (ZEBOV)
cugacuaaaacacuauau

SEQ ID NO: 255217 - RNA, 13 nt, Zaire Ebola virus (ZEBOV)
cugcccaacauuu

SEQ ID NO: 255218 - RNA, 20 nt, Zaire Ebola virus (ZEBOV)
cuggcaacaacaacacucau

SEQ ID NO: 255219 - RNA, 16 nt, Zaire Ebola virus (ZEBOV)
cgauccaucccaucaa

SEQ ID NO: 255220 - RNA, 18 nt, Zaire Ebola virus (ZEBOV)
ccuaacagugaucaaaga

SEQ ID NO: 255221 - RNA, 15 nt, Zaire Ebola virus (ZEBOV)
cgcuggcaacaacaa

SEQ ID NO: 255222 - RNA, 18 nt, Zaire Ebola virus (ZEBOV)
cgggacccauuucuaggu

SEQ ID NO: 255223 - RNA, 19 nt, Zaire Ebola virus (ZEBOV)
cguauaccuaucaucauau

SEQ ID NO: 255224 - RNA, 22 nt, Zaire Ebola virus (ZEBOV)
cuugccacaaucuccacgaguc

SEQ ID NO: 255225 - RNA, 16 nt, Zaire Ebola virus (ZEBOV)
cuuucauaaucagaua

SEQ ID NO: 255226 - RNA, 19 nt, Zaire Ebola virus (ZEBOV)
gaagccuuuuuauuaaguu

SEQ ID NO: 255227 - RNA, 13 nt, Zaire Ebola virus (ZEBOV)
gacaaaugauaau

SEQ ID NO: 255228 - RNA, 16 nt, Zaire Ebola virus (ZEBOV)
gacaaaugauaauaua

SEQ ID NO: 255229 - RNA, 19 nt, Zaire Ebola virus (ZEBOV)
gaacccgcaggucacaugu

SEQ ID NO: 255230 - RNA, 14 nt, Zaire Ebola virus (ZEBOV)
gaaauguggagaaa

SEQ ID NO: 255231 - RNA, 15 nt, Zaire Ebola virus (ZEBOV)
gaaagaucauaacua

SEQ ID NO: 255232 - RNA, 15 nt, Zaire Ebola virus (ZEBOV)
gaaaaucauaaucuc

SEQ ID NO: 255233 - RNA, 22 nt, Zaire Ebola virus (ZEBOV)
gagaaugauaaacuugaugaag

SEQ ID NO: 255234 - RNA, 13 nt, Zaire Ebola virus (ZEBOV)
gacggaacauaaa

SEQ ID NO: 255235 - RNA, 12 nt, Zaire Ebola virus (ZEBOV)
gagccaaaaaca

SEQ ID NO: 255236 - RNA, 14 nt, Zaire Ebola virus (ZEBOV)
gaucacaauacucc

SEQ ID NO: 255237 - RNA, 18 nt, Zaire Ebola virus (ZEBOV)
gcaacaacaacacucauc

SEQ ID NO: 255238 - RNA, 15 nt, Zaire Ebola virus (ZEBOV)
gauugauugaugaaa

SEQ ID NO: 255239 - RNA, 15 nt, Zaire Ebola virus (ZEBOV)
gauucuacaaucaug

SEQ ID NO: 255240 - RNA, 23 nt, Zaire Ebola virus (ZEBOV)
gauuuaauuauauggauuacuug

SEQ ID NO: 255241 - RNA, 13 nt, Zaire Ebola virus (ZEBOV)
ugccacaaucucc

SEQ ID NO: 255242 - RNA, 14 nt, Zaire Ebola virus (ZEBOV)
ugcgugauaaucaa

SEQ ID NO: 255243 - RNA, 20 nt, Zaire Ebola virus (ZEBOV)
ugauacaacccuaacaguga

SEQ ID NO: 255244 - RNA, 22 nt, Zaire Ebola virus (ZEBOV)
ugauauaauaauguuguaucaa

SEQ ID NO: 255245 - RNA, 19 nt, Zaire Ebola virus (ZEBOV)
ugcaaagguugguuauuaa

SEQ ID NO: 255246 - RNA, 22 nt, Zaire Ebola virus (ZEBOV)
ugauucaaccgacaaauagcua

SEQ ID NO: 255247 - RNA, 15 nt, Zaire Ebola virus (ZEBOV)
uguuuugguugauaa

SEQ ID NO: 255248 - RNA, 13 nt, Zaire Ebola virus (ZEBOV)
uguuuuacucuac

SEQ ID NO: 255249 - RNA, 21 nt, Zaire Ebola virus (ZEBOV)
uuaaccacagauaaauccuca

SEQ ID NO: 255250 - RNA, 18 nt, Zaire Ebola virus (ZEBOV)
uguuagguuucacagauu

SEQ ID NO: 255251 - RNA, 22 nt, Zaire Ebola virus (ZEBOV)
uguuaaucuuucucauugcaca

SEQ ID NO: 255252 - RNA, 21 nt, Zaire Ebola virus (ZEBOV)
uucaaauguuaaucuuucuca

SEQ ID NO: 255253 - RNA, 23 nt, Zaire Ebola virus (ZEBOV)
uuauagccauaauuguaacucaa

SEQ ID NO: 255254 - RNA, 16 nt, Zaire Ebola virus (ZEBOV)
uuauagaaucuucuca

SEQ ID NO: 255255 - RNA, 12 nt, Zaire Ebola virus (ZEBOV)
uuacuugacaaa

SEQ ID NO: 255256 - RNA, 15 nt, Zaire Ebola virus (ZEBOV)
uuaagaaaaagguaa

SEQ ID NO: 255257 - RNA, 16 nt, Zaire Ebola virus (ZEBOV)
uuaagaaaaagguaau

SEQ ID NO: 255258 - RNA, 18 nt, Zaire Ebola virus (ZEBOV)
ugugaauuauuaucacaa

SEQ ID NO: 255259 - RNA, 20 nt, Zaire Ebola virus (ZEBOV)
uggcaacaacaacacucauc

SEQ ID NO: 255260 - RNA, 19 nt, Zaire Ebola virus (ZEBOV)
aagcagagaacaccaacac

SEQ ID NO: 255261 - RNA, 22 nt, Zaire Ebola virus (ZEBOV)
aagcauaauaaauaaauacuca

SEQ ID NO: 255262 - RNA, 21 nt, Zaire Ebola virus (ZEBOV)
aagcauaccucuugcacaaag

SEQ ID NO: 255263 - RNA, 14 nt, Zaire Ebola virus (ZEBOV)
aagccacaguuaua

SEQ ID NO: 255264 - RNA, 17 nt, Zaire Ebola virus (ZEBOV)
aaggugcuuuacaccau

SEQ ID NO: 255265 - RNA, 23 nt, Zaire Ebola virus (ZEBOV)
aaggugugaauuauuaucacaau

SEQ ID NO: 255266 - RNA, 22 nt, Zaire Ebola virus (ZEBOV)
aagguaaucuuucgauuaucuu

SEQ ID NO: 255267 - RNA, 13 nt, Zaire Ebola virus (ZEBOV)
aagugauucuuau

SEQ ID NO: 255268 - RNA, 18 nt, Zaire Ebola virus (ZEBOV)
aauaggagcuauaucucu

SEQ ID NO: 255269 - RNA, 13 nt, Zaire Ebola virus (ZEBOV)
aauaaacucugca

SEQ ID NO: 255270 - RNA, 16 nt, Zaire Ebola virus (ZEBOV)
aauaaacaacuauuua

SEQ ID NO: 255271 - RNA, 18 nt, Zaire Ebola virus (ZEBOV)
aacucauaaauugcucuc

SEQ ID NO: 255272 - RNA, 15 nt, Zaire Ebola virus (ZEBOV)
aacucugcacucuuu

SEQ ID NO: 255273 - RNA, 17 nt, Zaire Ebola virus (ZEBOV)
aacggugauagccuuaa

SEQ ID NO: 255274 - RNA, 20 nt, Zaire Ebola virus (ZEBOV)
aacaucaguggucagagucc

SEQ ID NO: 255275 - RNA, 19 nt, Zaire Ebola virus (ZEBOV)
aacaucaccgcagaacaga

SEQ ID NO: 255276 - RNA, 14 nt, Zaire Ebola virus (ZEBOV)
aacgacagcacagc

SEQ ID NO: 255277 - RNA, 14 nt, Zaire Ebola virus (ZEBOV)
aagauuacuugaca

SEQ ID NO: 255278 - RNA, 22 nt, Zaire Ebola virus (ZEBOV)
aagauuacuugacaaaugauaa

SEQ ID NO: 255279 - RNA, 17 nt, Zaire Ebola virus (ZEBOV)
aagagauuccaagacaa

SEQ ID NO: 255280 - RNA, 11 nt, Zaire Ebola virus (ZEBOV)
aacuuaccuac

SEQ ID NO: 255281 - RNA, 21 nt, Zaire Ebola virus (ZEBOV)
aacauaauaaacucugcacuc

SEQ ID NO: 255282 - RNA, 23 nt, Zaire Ebola virus (ZEBOV)
uuuaauuauauggauuacuugaa

SEQ ID NO: 255283 - RNA, 19 nt, Zaire Ebola virus (ZEBOV)
uuuaaucuucauccuugau

SEQ ID NO: 255284 - RNA, 22 nt, Zaire Ebola virus (ZEBOV)
uuuaaucuucauccuugauucu

SEQ ID NO: 255285 - RNA, 15 nt, Zaire Ebola virus (ZEBOV)
uuguaucaauauccu

SEQ ID NO: 255286 - RNA, 15 nt, Zaire Ebola virus (ZEBOV)
uuguacacaaauaau

SEQ ID NO: 255287 - RNA, 16 nt, Zaire Ebola virus (ZEBOV)
uugcaaccuaacacac

SEQ ID NO: 255288 - RNA, 21 nt, Zaire Ebola virus (ZEBOV)
uugaugucuaaggugugaauu

SEQ ID NO: 255289 - RNA, 23 nt, Zaire Ebola virus (ZEBOV)
uugacaucaaucuaguuaucucu

SEQ ID NO: 255290 - RNA, 13 nt, Zaire Ebola virus (ZEBOV)
uugagcuaacuca

SEQ ID NO: 255291 - RNA, 23 nt, Zaire Ebola virus (ZEBOV)
uccaguuuuauagaaucuucuca

SEQ ID NO: 255292 - RNA, 24 nt, Zaire Ebola virus (ZEBOV)
uccgacccagggaccaacacaaca

SEQ ID NO: 255293 - RNA, 16 nt, Zaire Ebola virus (ZEBOV)
ucuagguuguucacaa

SEQ ID NO: 255294 - RNA, 16 nt, Zaire Ebola virus (ZEBOV)
ucuaagauuacuugac

SEQ ID NO: 255295 - RNA, 16 nt, Zaire Ebola virus (ZEBOV)
ucucuuaaaauauuaa

SEQ ID NO: 255296 - RNA, 16 nt, Zaire Ebola virus (ZEBOV)
ucucugacaguauuau

SEQ ID NO: 255297 - RNA, 18 nt, Zaire Ebola virus (ZEBOV)
ucucucccugcgugauaa

SEQ ID NO: 255298 - RNA, 21 nt, Zaire Ebola virus (ZEBOV)
ucucucccugcgugauaauca

SEQ ID NO: 255299 - RNA, 20 nt, Zaire Ebola virus (ZEBOV)
uauuacuaacucuauacucg

SEQ ID NO: 255300 - RNA, 21 nt, Zaire Ebola virus (ZEBOV)
uauuacuaacucuauacucgu

SEQ ID NO: 255301 - RNA, 19 nt, Zaire Ebola virus (ZEBOV)
uauucaguacuauaaucac

SEQ ID NO: 255302 - RNA, 14 nt, Zaire Ebola virus (ZEBOV)
uauuauuacuagcc

SEQ ID NO: 255303 - RNA, 18 nt, Zaire Ebola virus (ZEBOV)
ucaaacaagagauuccaa

SEQ ID NO: 255304 - RNA, 20 nt, Zaire Ebola virus (ZEBOV)
ucaaagaaaaucauaaucuc

SEQ ID NO: 255305 - RNA, 15 nt, Zaire Ebola virus (ZEBOV)
ucaggucaaauucaa

SEQ ID NO: 255306 - RNA, 18 nt, Zaire Ebola virus (ZEBOV)
ucaccgcagaacagacaa

SEQ ID NO: 255307 - RNA, 12 nt, Zaire Ebola virus (ZEBOV)
ucaccaagauac

SEQ ID NO: 255308 - RNA, 17 nt, Zaire Ebola virus (ZEBOV)
uagaaucuucucaggga

SEQ ID NO: 255309 - RNA, 17 nt, Zaire Ebola virus (ZEBOV)
uaucaaacggagccaaa

SEQ ID NO: 255310 - RNA, 14 nt, Zaire Ebola virus (ZEBOV)
uauauuuagccucu

SEQ ID NO: 255311 - RNA, 22 nt, Zaire Ebola virus (ZEBOV)
uauaugaagagguaugauacaa

SEQ ID NO: 255312 - RNA, 12 nt, Zaire Ebola virus (ZEBOV)
uauauaagcaua

SEQ ID NO: 255313 - RNA, 14 nt, Zaire Ebola virus (ZEBOV)
uaugaauaagcauu

SEQ ID NO: 255314 - RNA, 13 nt, Zaire Ebola virus (ZEBOV)
uaucaucauauau

SEQ ID NO: 255315 - RNA, 16 nt, Zaire Ebola virus (ZEBOV)
uaucaauauccuguca

SEQ ID NO: 255316 - RNA, 22 nt, Zaire Ebola virus (ZEBOV)
uaacaacccuugccacaaucuc

SEQ ID NO: 255317 - RNA, 17 nt, Zaire Ebola virus (ZEBOV)
uaacucuauacucguaa

SEQ ID NO: 255318 - RNA, 14 nt, Zaire Ebola virus (ZEBOV)
uaacagugaucaaa

SEQ ID NO: 255319 - RNA, 22 nt, Zaire Ebola virus (ZEBOV)
uaagcauaauaaauaaauacuc

SEQ ID NO: 255320 - RNA, 15 nt, Zaire Ebola virus (ZEBOV)
uaagccagcuuccaa

SEQ ID NO: 255321 - RNA, 15 nt, Zaire Ebola virus (ZEBOV)
guugaacaacaucac

SEQ ID NO: 255322 - RNA, 17 nt, Zaire Ebola virus (ZEBOV)
uaaacuugaugaagauu

SEQ ID NO: 255323 - RNA, 14 nt, Zaire Ebola virus (ZEBOV)
uaaauacucauauu

SEQ ID NO: 255324 - RNA, 19 nt, Zaire Ebola virus (ZEBOV)
uaaaggugcuuuacaccau

SEQ ID NO: 255325 - RNA, 14 nt, Zaire Ebola virus (ZEBOV)
uacuccguauaccu

SEQ ID NO: 255326 - RNA, 16 nt, Zaire Ebola virus (ZEBOV)
uacaucauauugaucu

SEQ ID NO: 255327 - RNA, 13 nt, Zaire Ebola virus (ZEBOV)
uaccuacuagccu

SEQ ID NO: 255328 - RNA, 18 nt, Zaire Ebola virus (ZEBOV)
uaauguuguaucaauauc

SEQ ID NO: 255329 - RNA, 20 nt, Zaire Ebola virus (ZEBOV)
uaauuaagaaaaaacuaaug

SEQ ID NO: 255330 - RNA, 13 nt, Zaire Ebola virus (ZEBOV)
uaauaaauaaaua

SEQ ID NO: 255331 - RNA, 14 nt, Zaire Ebola virus (ZEBOV)
uaauaaacucugca

SEQ ID NO: 255332 - RNA, 18 nt, Zaire Ebola virus (ZEBOV)
guauaaacuugacaucuc

SEQ ID NO: 255333 - RNA, 22 nt, Zaire Ebola virus (ZEBOV)
guagaauacuucauauugagcu

SEQ ID NO: 255334 - RNA, 24 nt, Zaire Ebola virus (ZEBOV)
guaugauacaacccuaacagugau

SEQ ID NO: 255335 - RNA, 23 nt, Zaire Ebola virus (ZEBOV)
ccagaaauccuauauacuaaaug

SEQ ID NO: 255336 - RNA, 14 nt, Zaire Ebola virus (ZEBOV)
cccaaaagcagaga

SEQ ID NO: 255337 - RNA, 21 nt, Zaire Ebola virus (ZEBOV)
cccaaaagcagagaacaccaa

SEQ ID NO: 255338 - RNA, 14 nt, Zaire Ebola virus (ZEBOV)
cccaaaaccacagc

SEQ ID NO: 255339 - RNA, 17 nt, Zaire Ebola virus (ZEBOV)
cccccaaaagcagagaa

SEQ ID NO: 255340 - RNA, 15 nt, Zaire Ebola virus (ZEBOV)
cccagggaccaacac

SEQ ID NO: 255341 - RNA, 14 nt, Zaire Ebola virus (ZEBOV)
ccggacaacagcac

SEQ ID NO: 255342 - RNA, 15 nt, Zaire Ebola virus (ZEBOV)
cccuggauaauauaa

SEQ ID NO: 255343 - RNA, 14 nt, Zaire Ebola virus (ZEBOV)
ccuaaauguagaac

SEQ ID NO: 255344 - RNA, 20 nt, Zaire Ebola virus (ZEBOV)
ccuaaauguagaacuuaaca

SEQ ID NO: 255345 - RNA, 15 nt, Zaire Ebola virus (ZEBOV)
ccuaacacacauaaa

SEQ ID NO: 255346 - RNA, 22 nt, Zaire Ebola virus (ZEBOV)
ccuccgacacucccucugccac

SEQ ID NO: 255347 - RNA, 21 nt, Zaire Ebola virus (ZEBOV)
ccugucagauggaauaguguu

SEQ ID NO: 255348 - RNA, 19 nt, Zaire Ebola virus (ZEBOV)
aaaauuguuaaaaauauga

SEQ ID NO: 255349 - RNA, 20 nt, Zaire Ebola virus (ZEBOV)
cauuacaaauaauccuacua

SEQ ID NO: 255350 - RNA, 12 nt, Zaire Ebola virus (ZEBOV)
ccaaaccaaaag

SEQ ID NO: 255351 - RNA, 17 nt, Zaire Ebola virus (ZEBOV)
cauauauuuaaucaaga

SEQ ID NO: 255352 - RNA, 16 nt, Zaire Ebola virus (ZEBOV)
cauauaugcugacuca

SEQ ID NO: 255353 - RNA, 18 nt, Zaire Ebola virus (ZEBOV)
cauagaauugcuuuauua

SEQ ID NO: 255354 - RNA, 22 nt, Zaire Ebola virus (ZEBOV)
cauagaauugcuuuauuauaug

SEQ ID NO: 255355 - RNA, 20 nt, Zaire Ebola virus (ZEBOV)
caucuaacaacccuugccac

SEQ ID NO: 255356 - RNA, 13 nt, Zaire Ebola virus (ZEBOV)
cagugaucaaaga

SEQ ID NO: 255357 - RNA, 16 nt, Zaire Ebola virus (ZEBOV)
cauaauaaacucugca

SEQ ID NO: 255358 - RNA, 15 nt, Zaire Ebola virus (ZEBOV)
caguacuauaaucac

SEQ ID NO: 255359 - RNA, 20 nt, Zaire Ebola virus (ZEBOV)
cucaaguugaacaacaucac

SEQ ID NO: 255360 - RNA, 15 nt, Zaire Ebola virus (ZEBOV)
cucaauauucuaacu

SEQ ID NO: 255361 - RNA, 13 nt, Zaire Ebola virus (ZEBOV)
cucauaaauugcu

SEQ ID NO: 255362 - RNA, 21 nt, Zaire Ebola virus (ZEBOV)
cucauacaucauauugaucua

SEQ ID NO: 255363 - RNA, 23 nt, Zaire Ebola virus (ZEBOV)
cucauacaucauauugaucuaau

SEQ ID NO: 255364 - RNA, 15 nt, Zaire Ebola virus (ZEBOV)
cucugaggcaacuca

SEQ ID NO: 255365 - RNA, 14 nt, Zaire Ebola virus (ZEBOV)
cuggauaauauaag

SEQ ID NO: 255366 - RNA, 14 nt, Zaire Ebola virus (ZEBOV)
cugcugaacuauag

SEQ ID NO: 255367 - RNA, 22 nt, Zaire Ebola virus (ZEBOV)
cuggaccccgccaccacaacaa

SEQ ID NO: 255368 - RNA, 17 nt, Zaire Ebola virus (ZEBOV)
cuuaaaacaaaauugau

SEQ ID NO: 255369 - RNA, 12 nt, Zaire Ebola virus (ZEBOV)
cuaacucuauac

SEQ ID NO: 255370 - RNA, 15 nt, Zaire Ebola virus (ZEBOV)
cuaacucuauacucg

SEQ ID NO: 255371 - RNA, 13 nt, Zaire Ebola virus (ZEBOV)
cuaagauuacuug

SEQ ID NO: 255372 - RNA, 18 nt, Zaire Ebola virus (ZEBOV)
cuaagauuacuugacaaa

SEQ ID NO: 255373 - RNA, 14 nt, Zaire Ebola virus (ZEBOV)
cuaauaacauuaca

SEQ ID NO: 255374 - RNA, 17 nt, Zaire Ebola virus (ZEBOV)
cguauaccuaucaucau

SEQ ID NO: 255375 - RNA, 14 nt, Zaire Ebola virus (ZEBOV)
cgcagaacagacaa

SEQ ID NO: 255376 - RNA, 14 nt, Zaire Ebola virus (ZEBOV)
ccuuacaaaaacca

SEQ ID NO: 255377 - RNA, 18 nt, Zaire Ebola virus (ZEBOV)
aaauguuaaucuuucuca

SEQ ID NO: 255378 - RNA, 18 nt, Zaire Ebola virus (ZEBOV)
aaauaauguuuuacucua

SEQ ID NO: 255379 - RNA, 20 nt, Zaire Ebola virus (ZEBOV)
gacaaauagcuaacauuaag

SEQ ID NO: 255380 - RNA, 18 nt, Zaire Ebola virus (ZEBOV)
gaauuuaacgcaacauaa

SEQ ID NO: 255381 - RNA, 21 nt, Zaire Ebola virus (ZEBOV)
gacaucucugaggcaacucaa

SEQ ID NO: 255382 - RNA, 16 nt, Zaire Ebola virus (ZEBOV)
gagccaaaaacaucag

SEQ ID NO: 255383 - RNA, 18 nt, Zaire Ebola virus (ZEBOV)
gaguccccaaucccucac

SEQ ID NO: 255384 - RNA, 22 nt, Zaire Ebola virus (ZEBOV)
gaucaaagaaaaucauaaucuc

SEQ ID NO: 255385 - RNA, 12 nt, Zaire Ebola virus (ZEBOV)
gauaaauccuca

SEQ ID NO: 255386 - RNA, 22 nt, Zaire Ebola virus (ZEBOV)
cuuaacaaaagacucauaauau

SEQ ID NO: 255387 - RNA, 17 nt, Zaire Ebola virus (ZEBOV)
cuuaacauuuuugucua

SEQ ID NO: 255388 - RNA, 14 nt, Zaire Ebola virus (ZEBOV)
cuuaauuaccaaua

SEQ ID NO: 255389 - RNA, 14 nt, Zaire Ebola virus (ZEBOV)
cuuaccuacuagcc

SEQ ID NO: 255390 - RNA, 22 nt, Zaire Ebola virus (ZEBOV)
cuuugagaaugauaaacuugau

SEQ ID NO: 255391 - RNA, 14 nt, Zaire Ebola virus (ZEBOV)
cuuuuaauugauca

SEQ ID NO: 255392 - RNA, 17 nt, Zaire Ebola virus (ZEBOV)
cuuuuaauugaucaaua

SEQ ID NO: 255393 - RNA, 14 nt, Zaire Ebola virus (ZEBOV)
gaaagaggcgaaua

SEQ ID NO: 255394 - RNA, 19 nt, Zaire Ebola virus (ZEBOV)
gaaaauuccucugcaaugg

SEQ ID NO: 255395 - RNA, 16 nt, Zaire Ebola virus (ZEBOV)
gaaucuaagauuacuu

SEQ ID NO: 255396 - RNA, 20 nt, Zaire Ebola virus (ZEBOV)
gaaucuaagauuacuugaca

SEQ ID NO: 255397 - RNA, 18 nt, Zaire Ebola virus (ZEBOV)
gaagggaagcugcagugu

SEQ ID NO: 255398 - RNA, 12 nt, Zaire Ebola virus (ZEBOV)
gcagaacagaca

SEQ ID NO: 255399 - RNA, 21 nt, Zaire Ebola virus (ZEBOV)
gcacucuuuauaauuaagcuu

SEQ ID NO: 255400 - RNA, 16 nt, Zaire Ebola virus (ZEBOV)
gcagugucgcaucuaa

SEQ ID NO: 255401 - RNA, 19 nt, Zaire Ebola virus (ZEBOV)
gcauaccucuugcacaaag

SEQ ID NO: 255402 - RNA, 17 nt, Zaire Ebola virus (ZEBOV)
gcugacuaaaacacuau

SEQ ID NO: 255403 - RNA, 21 nt, Zaire Ebola virus (ZEBOV)
acuucauauugagcuaacuca

SEQ ID NO: 255404 - RNA, 22 nt, Zaire Ebola virus (ZEBOV)
acuucauauugagcuaacucau

SEQ ID NO: 255405 - RNA, 16 nt, Zaire Ebola virus (ZEBOV)
agaaaaagguaaucuu

SEQ ID NO: 255406 - RNA, 20 nt, Zaire Ebola virus (ZEBOV)
acucaaguugaacaacauca

SEQ ID NO: 255407 - RNA, 21 nt, Zaire Ebola virus (ZEBOV)
acucaaguugaacaacaucac

SEQ ID NO: 255408 - RNA, 19 nt, Zaire Ebola virus (ZEBOV)
acucucguuucaaauuaau

SEQ ID NO: 255409 - RNA, 10 nt, Zaire Ebola virus (ZEBOV)
acuguaaaau

SEQ ID NO: 255410 - RNA, 19 nt, Zaire Ebola virus (ZEBOV)
acuaaugaugaagauuaaa

SEQ ID NO: 255411 - RNA, 15 nt, Zaire Ebola virus (ZEBOV)
accccgccaccacaa

SEQ ID NO: 255412 - RNA, 20 nt, Zaire Ebola virus (ZEBOV)
acccagggaccaacacaaca

SEQ ID NO: 255413 - RNA, 19 nt, Zaire Ebola virus (ZEBOV)
accugccaagcauaccucu

SEQ ID NO: 255414 - RNA, 13 nt, Zaire Ebola virus (ZEBOV)
acauacuuuuugc

SEQ ID NO: 255415 - RNA, 15 nt, Zaire Ebola virus (ZEBOV)
acauuaaguagucaa

SEQ ID NO: 255416 - RNA, 18 nt, Zaire Ebola virus (ZEBOV)
acagauucuauauauuac

SEQ ID NO: 255417 - RNA, 15 nt, Zaire Ebola virus (ZEBOV)
acagauaaauccuca

SEQ ID NO: 255418 - RNA, 15 nt, Zaire Ebola virus (ZEBOV)
acacucccucugcca

SEQ ID NO: 255419 - RNA, 17 nt, Zaire Ebola virus (ZEBOV)
acacuugugaguaucag

SEQ ID NO: 255420 - RNA, 16 nt, Zaire Ebola virus (ZEBOV)
acacuuuuaauugauc

SEQ ID NO: 255421 - RNA, 21 nt, Zaire Ebola virus (ZEBOV)
acacgaucguuuuauaauuaa

SEQ ID NO: 255422 - RNA, 21 nt, Zaire Ebola virus (ZEBOV)
acaacugaagaccacaaaauc

SEQ ID NO: 255423 - RNA, 22 nt, Zaire Ebola virus (ZEBOV)
acaacugaagaccacaaaauca

SEQ ID NO: 255424 - RNA, 13 nt, Zaire Ebola virus (ZEBOV)
acaagagauucca

SEQ ID NO: 255425 - RNA, 15 nt, Zaire Ebola virus (ZEBOV)
aaccugccaagcaua

SEQ ID NO: 255426 - RNA, 16 nt, Zaire Ebola virus (ZEBOV)
aaccuaacacacauaa

SEQ ID NO: 255427 - RNA, 13 nt, Zaire Ebola virus (ZEBOV)
aacuaaugaugaa

SEQ ID NO: 255428 - RNA, 22 nt, Zaire Ebola virus (ZEBOV)
aacuauaggguacguuacauua

SEQ ID NO: 255429 - RNA, 13 nt, Zaire Ebola virus (ZEBOV)
aacaucaccgcag

SEQ ID NO: 255430 - RNA, 15 nt, Zaire Ebola virus (ZEBOV)
aacaaaauugaucuu

SEQ ID NO: 255431 - RNA, 16 nt, Zaire Ebola virus (ZEBOV)
aacaaaauugaucuuu

SEQ ID NO: 255432 - RNA, 20 nt, Zaire Ebola virus (ZEBOV)
aaauugccugcaugcuuaca

SEQ ID NO: 255433 - RNA, 13 nt, Zaire Ebola virus (ZEBOV)
aaauuccucugca

SEQ ID NO: 255434 - RNA, 12 nt, Zaire Ebola virus (ZEBOV)
aaauacucauau

SEQ ID NO: 255435 - RNA, 16 nt, Zaire Ebola virus (ZEBOV)
aaauagcuaacauuaa

SEQ ID NO: 255436 - RNA, 17 nt, Zaire Ebola virus (ZEBOV)
aaacuugacaucucuga

SEQ ID NO: 255437 - RNA, 22 nt, Zaire Ebola virus (ZEBOV)
aauaguguuuugguugauaaca

SEQ ID NO: 255438 - RNA, 13 nt, Zaire Ebola virus (ZEBOV)
aauauacuaaagg

SEQ ID NO: 255439 - RNA, 16 nt, Zaire Ebola virus (ZEBOV)
aauaguuaucuugaca

SEQ ID NO: 255440 - RNA, 21 nt, Zaire Ebola virus (ZEBOV)
aauauaaccugccaagcauac

SEQ ID NO: 255441 - RNA, 23 nt, Zaire Ebola virus (ZEBOV)
aauaggcguuaagccacaguuau

SEQ ID NO: 255442 - RNA, 14 nt, Zaire Ebola virus (ZEBOV)
aauccucacuguaa

SEQ ID NO: 255443 - RNA, 20 nt, Zaire Ebola virus (ZEBOV)
aauccucacuguaagccagc

SEQ ID NO: 255444 - RNA, 17 nt, Zaire Ebola virus (ZEBOV)
aaucuaguuaucucuuu

SEQ ID NO: 255445 - RNA, 13 nt, Zaire Ebola virus (ZEBOV)
aaugauacacuug

SEQ ID NO: 255446 - RNA, 17 nt, Zaire Ebola virus (ZEBOV)
aaugcaaauaggcguua

SEQ ID NO: 255447 - RNA, 22 nt, Zaire Ebola virus (ZEBOV)
aauugaucaauauacuaaaggu

SEQ ID NO: 255448 - RNA, 17 nt, Zaire Ebola virus (ZEBOV)
aauuauuaucacaauaa

SEQ ID NO: 255449 - RNA, 17 nt, Zaire Ebola virus (ZEBOV)
aauuaucauuacuuuaa

SEQ ID NO: 255450 - RNA, 18 nt, Zaire Ebola virus (ZEBOV)
aauguagaacuuaacaaa

SEQ ID NO: 255451 - RNA, 22 nt, Zaire Ebola virus (ZEBOV)
acaaauaauccuacuauaauca

SEQ ID NO: 255452 - RNA, 20 nt, Zaire Ebola virus (ZEBOV)
aauugcucucauacaucaua

SEQ ID NO: 255453 - RNA, 12 nt, Zaire Ebola virus (ZEBOV)
aagcauaccucu

SEQ ID NO: 255454 - RNA, 18 nt, Zaire Ebola virus (ZEBOV)
aagcauaccucuugcaca

SEQ ID NO: 255455 - RNA, 19 nt, Zaire Ebola virus (ZEBOV)
aagcauaauaaauaaauac

SEQ ID NO: 255456 - RNA, 17 nt, Zaire Ebola virus (ZEBOV)
aagcuagcuuauuauua

SEQ ID NO: 255457 - RNA, 16 nt, Zaire Ebola virus (ZEBOV)
aaguugaacaacauca

SEQ ID NO: 255458 - RNA, 17 nt, Zaire Ebola virus (ZEBOV)
aauacuccguauaccua

SEQ ID NO: 255459 - RNA, 19 nt, Zaire Ebola virus (ZEBOV)
aauacucauauuucuugau

SEQ ID NO: 255460 - RNA, 20 nt, Zaire Ebola virus (ZEBOV)
aauacucauauuucuugaua

SEQ ID NO: 255461 - RNA, 13 nt, Zaire Ebola virus (ZEBOV)
aaguccccaaaac

SEQ ID NO: 255462 - RNA, 23 nt, Zaire Ebola virus (ZEBOV)
agccucucucccugcgugauaau

SEQ ID NO: 255463 - RNA, 14 nt, Zaire Ebola virus (ZEBOV)
agaguuuaguugca

SEQ ID NO: 255464 - RNA, 20 nt, Zaire Ebola virus (ZEBOV)
agccaaugugauucuaacuc

SEQ ID NO: 255465 - RNA, 17 nt, Zaire Ebola virus (ZEBOV)
aggcaacucaaguugaa

SEQ ID NO: 255466 - RNA, 21 nt, Zaire Ebola virus (ZEBOV)
aguaagcuacuauuucauaca

SEQ ID NO: 255467 - RNA, 19 nt, Zaire Ebola virus (ZEBOV)
aucaaacggagccaaaaac

SEQ ID NO: 255468 - RNA, 14 nt, Zaire Ebola virus (ZEBOV)
auauggaggccaua

SEQ ID NO: 255469 - RNA, 15 nt, Zaire Ebola virus (ZEBOV)
auauuuaaucaagac

SEQ ID NO: 255470 - RNA, 20 nt, Zaire Ebola virus (ZEBOV)
auaugaagagguaugauaca

SEQ ID NO: 255471 - RNA, 18 nt, Zaire Ebola virus (ZEBOV)
aucaauacggugauucaa

SEQ ID NO: 255472 - RNA, 16 nt, Zaire Ebola virus (ZEBOV)
auccugauacuugcaa

SEQ ID NO: 255473 - RNA, 13 nt, Zaire Ebola virus (ZEBOV)
auccucacuguaa

SEQ ID NO: 255474 - RNA, 13 nt, Zaire Ebola virus (ZEBOV)
aucuaguuaucuc

SEQ ID NO: 255475 - RNA, 23 nt, Zaire Ebola virus (ZEBOV)
aucucguaucgcucguaauauaa

SEQ ID NO: 255476 - RNA, 18 nt, Zaire Ebola virus (ZEBOV)
aucucugaggcaacucaa

SEQ ID NO: 255477 - RNA, 14 nt, Zaire Ebola virus (ZEBOV)
auacagaaugauaa

SEQ ID NO: 255478 - RNA, 18 nt, Zaire Ebola virus (ZEBOV)
auacaucauauugaucua

SEQ ID NO: 255479 - RNA, 17 nt, Zaire Ebola virus (ZEBOV)
auacuccguauaccuau

SEQ ID NO: 255480 - RNA, 23 nt, Zaire Ebola virus (ZEBOV)
auacuucauauugagcuaacuca

SEQ ID NO: 255481 - RNA, 23 nt, Zaire Ebola virus (ZEBOV)
auagaauugcuuuauuauaugaa

SEQ ID NO: 255482 - RNA, 16 nt, Zaire Ebola virus (ZEBOV)
auaaaaaacucauaaa

SEQ ID NO: 255483 - RNA, 21 nt, Zaire Ebola virus (ZEBOV)
auaaccuucuacuugaucaca

SEQ ID NO: 255484 - RNA, 12 nt, Zaire Ebola virus (ZEBOV)
auaaauccucac

SEQ ID NO: 255485 - RNA, 17 nt, Zaire Ebola virus (ZEBOV)
caacugaagaccacaaa

SEQ ID NO: 255486 - RNA, 16 nt, Zaire Ebola virus (ZEBOV)
caacccuaacagugau

SEQ ID NO: 255487 - RNA, 21 nt, Zaire Ebola virus (ZEBOV)
caaaauuguuaaaaauaugag

SEQ ID NO: 255488 - RNA, 21 nt, Zaire Ebola virus (ZEBOV)
caacaacacucaucaccaaga

SEQ ID NO: 255489 - RNA, 21 nt, Zaire Ebola virus (ZEBOV)
caauauacuaaaggugcuuua

SEQ ID NO: 255490 - RNA, 18 nt, Zaire Ebola virus (ZEBOV)
caaucaugacaguugucu

SEQ ID NO: 255491 - RNA, 13 nt, Zaire Ebola virus (ZEBOV)
caaucccucacaa

SEQ ID NO: 255492 - RNA, 21 nt, Zaire Ebola virus (ZEBOV)
caauacuccguauaccuauca

SEQ ID NO: 255493 - RNA, 21 nt, Zaire Ebola virus (ZEBOV)
caagcauaccucuugcacaaa

SEQ ID NO: 255494 - RNA, 20 nt, Zaire Ebola virus (ZEBOV)
cacauaaagcauuggucaaa

SEQ ID NO: 255495 - RNA, 22 nt, Zaire Ebola virus (ZEBOV)
cacagauaaauccucacuguaa

SEQ ID NO: 255496 - RNA, 16 nt, Zaire Ebola virus (ZEBOV)
caaugggaugauucaa

SEQ ID NO: 255497 - RNA, 20 nt, Zaire Ebola virus (ZEBOV)
cagaaauaccuucuuuacaa

SEQ ID NO: 255498 - RNA, 15 nt, Zaire Ebola virus (ZEBOV)
auuaacauacagauu

SEQ ID NO: 255499 - RNA, 19 nt, Zaire Ebola virus (ZEBOV)
auuaaguuguaauaaucag

SEQ ID NO: 255500 - RNA, 16 nt, Zaire Ebola virus (ZEBOV)
augugauucuaacucc

SEQ ID NO: 255501 - RNA, 15 nt, Zaire Ebola virus (ZEBOV)
augucuaagguguga

SEQ ID NO: 255502 - RNA, 12 nt, Zaire Ebola virus (ZEBOV)
augggaugauuc

SEQ ID NO: 255503 - RNA, 16 nt, Zaire Ebola virus (ZEBOV)
caaaagcagagaacac

SEQ ID NO: 255504 - RNA, 18 nt, Zaire Ebola virus (ZEBOV)
caaaagcagagaacacca

SEQ ID NO: 255505 - RNA, 21 nt, Zaire Ebola virus (ZEBOV)
auuugagucuuaaugcaaaua

SEQ ID NO: 255506 - RNA, 15 nt, Zaire Ebola virus (ZEBOV)
auuguuauugauaua

SEQ ID NO: 255507 - RNA, 23 nt, Zaire Ebola virus (ZEBOV)
auugauauaauaauguuguauca

SEQ ID NO: 255508 - RNA, 16 nt, Zaire Ebola virus (ZEBOV)
auugaucuuuaagauu

SEQ ID NO: 255509 - RNA, 19 nt, Zaire Ebola virus (ZEBOV)
auugaugaaagaucauaac

SEQ ID NO: 255510 - RNA, 17 nt, Zaire Ebola virus (ZEBOV)
auucuacaaucaugaca

SEQ ID NO: 255511 - RNA, 17 nt, Zaire Ebola virus (ZEBOV)
auucuauauauuacuaa

SEQ ID NO: 255512 - RNA, 19 nt, Zaire Ebola virus (ZEBOV)
auugccugcaugcuuacau

SEQ ID NO: 255513 - RNA, 22 nt, Zaire Ebola virus (ZEBOV)
auugcuggagucgcaggacuga

SEQ ID NO: 255514 - RNA, 12 nt, Zaire Ebola virus (ZEBOV)
aaaacacuauau

SEQ ID NO: 255515 - RNA, 21 nt, Zaire Ebola virus (ZEBOV)
aaaacuaaugaugaagauuaa

SEQ ID NO: 255516 - RNA, 18 nt, Zaire Ebola virus (ZEBOV)
aaaacugacggaacauaa

SEQ ID NO: 255517 - RNA, 20 nt, Zaire Ebola virus (ZEBOV)
aaaagcagagaacaccaaca

SEQ ID NO: 255518 - RNA, 21 nt, Zaire Ebola virus (ZEBOV)
aaaacuuauucaguacuauaa

SEQ ID NO: 255519 - RNA, 19 nt, Zaire Ebola virus (ZEBOV)
aaaacggugauagccuuaa

SEQ ID NO: 255520 - RNA, 15 nt, Abelson murine leukemia virus
aaaaauacauaacug

SEQ ID NO: 255521 - RNA, 17 nt, Abelson murine leukemia virus
aaauacauaacugagaa

SEQ ID NO: 255522 - RNA, 20 nt, Abelson murine leukemia virus
aacagcugaauaugggccaa

SEQ ID NO: 255523 - RNA, 16 nt, Abelson murine leukemia virus
aauaugggccaaacag

SEQ ID NO: 255524 - RNA, 20 nt, Abelson murine leukemia virus
aauaugggccaaacaggaua

SEQ ID NO: 255525 - RNA, 13 nt, Abelson murine leukemia virus
acauaacugagaa

SEQ ID NO: 255526 - RNA, 18 nt, Abelson murine leukemia virus
agaucaaggucaggaaca

SEQ ID NO: 255527 - RNA, 18 nt, Abelson murine leukemia virus
aggaacagagaaacagcu

SEQ ID NO: 255528 - RNA, 16 nt, Abelson murine leukemia virus
agggccaagaacagau

SEQ ID NO: 255529 - RNA, 17 nt, Abelson murine leukemia virus
aguuccugccccggcuc

SEQ ID NO: 255530 - RNA, 22 nt, Abelson murine leukemia virus
aguuccugccccggcucagggc

SEQ ID NO: 255531 - RNA, 15 nt, Abelson murine leukemia virus
auaugggccaaacag

SEQ ID NO: 255532 - RNA, 20 nt, Abelson murine leukemia virus
aucugugguaagcaguuccu

SEQ ID NO: 255533 - RNA, 22 nt, Abelson murine leukemia virus
caaacaggauaugcugugguaa

SEQ ID NO: 255534 - RNA, 14 nt, Abelson murine leukemia virus
cagagaaacagcug

SEQ ID NO: 255535 - RNA, 18 nt, Abelson murine leukemia virus
cagcugaauaugggccaa

SEQ ID NO: 255536 - RNA, 16 nt, Abelson murine leukemia virus
caggauaucuguggua

SEQ ID NO: 255537 - RNA, 17 nt, Abelson murine leukemia virus
caguuccugccccggcu

SEQ ID NO: 255538 - RNA, 17 nt, Abelson murine leukemia virus
cauaacugagaauagag

SEQ ID NO: 255539 - RNA, 18 nt, Abelson murine leukemia virus
cauaacugagaauagaga

SEQ ID NO: 255540 - RNA, 22 nt, Abelson murine leukemia virus
ccaaacaggauaugcuguggua

SEQ ID NO: 255541 - RNA, 15 nt, Abelson murine leukemia virus
ccaucagauguuucc

SEQ ID NO: 255542 - RNA, 16 nt, Abelson murine leukemia virus
cccggcucagggccaa

SEQ ID NO: 255543 - RNA, 19 nt, Abelson murine leukemia virus
cccggcucagggccaagaa

SEQ ID NO: 255544 - RNA, 19 nt, Abelson murine leukemia virus
ccggcucagggccaagaac

SEQ ID NO: 255545 - RNA, 13 nt, Abelson murine leukemia virus
ccugccccggcuc

SEQ ID NO: 255546 - RNA, 19 nt, Abelson murine leukemia virus
ccugccccggcucagggcc

SEQ ID NO: 255547 - RNA, 21 nt, Abelson murine leukemia virus
ccugccccggcucagggccaa

SEQ ID NO: 255548 - RNA, 17 nt, Abelson murine leukemia virus
cugaauaugggccaaac

SEQ ID NO: 255549 - RNA, 20 nt, Abelson murine leukemia virus
cugaauaugggccaaacagg

SEQ ID NO: 255550 - RNA, 21 nt, Abelson murine leukemia virus
cugaauaugggccaaacagga

SEQ ID NO: 255551 - RNA, 22 nt, Abelson murine leukemia virus
cugccccggcucagggccaaga

SEQ ID NO: 255552 - RNA, 16 nt, Abelson murine leukemia virus
cugugguaagcaguuc

SEQ ID NO: 255553 - RNA, 17 nt, Abelson murine leukemia virus
gaacagagaaacagcug

SEQ ID NO: 255554 - RNA, 21 nt, Abelson murine leukemia virus
gaauagagaaguucagaucaa

SEQ ID NO: 255555 - RNA, 17 nt, Abelson murine leukemia virus
gaauaugggccaaacag

SEQ ID NO: 255556 - RNA, 21 nt, Abelson murine leukemia virus
gaauaugggccaaacaggaua

SEQ ID NO: 255557 - RNA, 12 nt, Abelson murine leukemia virus
gagaaacagcug

SEQ ID NO: 255558 - RNA, 16 nt, Abelson murine leukemia virus
gagaaacagcugaaua

SEQ ID NO: 255559 - RNA, 14 nt, Abelson murine leukemia virus
gauaugcuguggua

SEQ ID NO: 255560 - RNA, 17 nt, Abelson murine leukemia virus
gaucaaggucaggaaca

SEQ ID NO: 255561 - RNA, 23 nt, Abelson murine leukemia virus
gcaguuccugccccggcucaggg

SEQ ID NO: 255562 - RNA, 14 nt, Abelson murine leukemia virus
gccaaacaggauau

SEQ ID NO: 255563 - RNA, 18 nt, Abelson murine leukemia virus
gccccggcucagggccaa

SEQ ID NO: 255564 - RNA, 14 nt, Abelson murine leukemia virus
gcccucagcaguuu

SEQ ID NO: 255565 - RNA, 22 nt, Abelson murine leukemia virus
gcucaauaaaagagcccacaac

SEQ ID NO: 255566 - RNA, 12 nt, Abelson murine leukemia virus
gcucagggccaa

SEQ ID NO: 255567 - RNA, 17 nt, Abelson murine leukemia virus
gcucagggccaagaaca

SEQ ID NO: 255568 - RNA, 19 nt, Abelson murine leukemia virus
gcucagggccaagaacaga

SEQ ID NO: 255569 - RNA, 18 nt, Abelson murine leukemia virus
gcugaauaugggccaaac

SEQ ID NO: 255570 - RNA, 17 nt, Abelson murine leukemia virus
gcugugguaagcaguuc

SEQ ID NO: 255571 - RNA, 23 nt, Abelson murine leukemia virus
ggaaaaauacauaacugagaaua

SEQ ID NO: 255572 - RNA, 20 nt, Abelson murine leukemia virus
ggaacagagaaacagcugaa

SEQ ID NO: 255573 - RNA, 22 nt, Abelson murine leukemia virus
ggaacagcugaauaugggccaa

SEQ ID NO: 255574 - RNA, 12 nt, Abelson murine leukemia virus
ggaccugaaaug

SEQ ID NO: 255575 - RNA, 14 nt, Abelson murine leukemia virus
ggauaucuguggua

SEQ ID NO: 255576 - RNA, 22 nt, Abelson murine leukemia virus
ggauaucugugguaagcaguuc

SEQ ID NO: 255577 - RNA, 15 nt, Abelson murine leukemia virus
ggauaugcuguggua

SEQ ID NO: 255578 - RNA, 13 nt, Abelson murine leukemia virus
guaagcaguuccu

SEQ ID NO: 255579 - RNA, 21 nt, Abelson murine leukemia virus
guuccugccccggcucagggc

SEQ ID NO: 255580 - RNA, 13 nt, Abelson murine leukemia virus
uaagcaguuccug

SEQ ID NO: 255581 - RNA, 11 nt, Abelson murine leukemia virus
uaucuguggua

SEQ ID NO: 255582 - RNA, 12 nt, Abelson murine leukemia virus
uaucugugguaa

SEQ ID NO: 255583 - RNA, 18 nt, Abelson murine leukemia virus
uaucugugguaagcaguu

SEQ ID NO: 255584 - RNA, 12 nt, Abelson murine leukemia virus
uaugcuguggua

SEQ ID NO: 255585 - RNA, 18 nt, Abelson murine leukemia virus
uauuugaacuaaccaauc

SEQ ID NO: 255586 - RNA, 20 nt, Abelson murine leukemia virus
ucaggaacagagaaacagcu

SEQ ID NO: 255587 - RNA, 21 nt, Abelson murine leukemia virus
ucaggaacagagaaacagcug

SEQ ID NO: 255588 - RNA, 14 nt, Abelson murine leukemia virus
ucagggccaagaac

SEQ ID NO: 255589 - RNA, 16 nt, Abelson murine leukemia virus
ugaacuaaccaaucag

SEQ ID NO: 255590 - RNA, 15 nt, Abelson murine leukemia virus
ugaauaugggccaaa

SEQ ID NO: 255591 - RNA, 16 nt, Abelson murine leukemia virus
ugaauaugggccaaac

SEQ ID NO: 255592 - RNA, 18 nt, Abelson murine leukemia virus
ugaauaugggccaaacag

SEQ ID NO: 255593 - RNA, 21 nt, Abelson murine leukemia virus
ugaauaugggccaaacaggau

SEQ ID NO: 255594 - RNA, 16 nt, Abelson murine leukemia virus
ugccccggcucagggc

SEQ ID NO: 255595 - RNA, 11 nt, Abelson murine leukemia virus
ugcugugguaa

SEQ ID NO: 255596 - RNA, 20 nt, Abelson murine leukemia virus
ugcugugguaagcaguuccu

SEQ ID NO: 255597 - RNA, 13 nt, Abelson murine leukemia virus
uggaacagcugaa

SEQ ID NO: 255598 - RNA, 18 nt, Abelson murine leukemia virus
uggaacagcugaauaugg

SEQ ID NO: 255599 - RNA, 20 nt, Abelson murine leukemia virus
uuccugccccggcucagggc

SEQ ID NO: 255600 - RNA, 21 nt, Abelson murine leukemia virus
aaaagauuuuauuuagucucc

SEQ ID NO: 255601 - RNA, 13 nt, Abelson murine leukemia virus
aacagcugaauau

SEQ ID NO: 255602 - RNA, 19 nt, Abelson murine leukemia virus
aacaggauaucugugguaa

SEQ ID NO: 255603 - RNA, 20 nt, Abelson murine leukemia virus
aacaggauaugcugugguaa

SEQ ID NO: 255604 - RNA, 14 nt, Abelson murine leukemia virus
aagcaguuccugcc

SEQ ID NO: 255605 - RNA, 21 nt, Abelson murine leukemia virus
aagcaguuccugccccggcuc

SEQ ID NO: 255606 - RNA, 13 nt, Abelson murine leukemia virus
aauaugggccaaa

SEQ ID NO: 255607 - RNA, 15 nt, Abelson murine leukemia virus
aauaugggccaaaca

SEQ ID NO: 255608 - RNA, 23 nt, Abelson murine leukemia virus
acagcugaauaugggccaaacag

SEQ ID NO: 255609 - RNA, 16 nt, Abelson murine leukemia virus
acaguuggaacagcug

SEQ ID NO: 255610 - RNA, 23 nt, Abelson murine leukemia virus
agaaacagcugaauaugggccaa

SEQ ID NO: 255611 - RNA, 13 nt, Abelson murine leukemia virus
agagaaacagcug

SEQ ID NO: 255612 - RNA, 20 nt, Abelson murine leukemia virus
aguuccugccccggcucagg

SEQ ID NO: 255613 - RNA, 16 nt, Abelson murine leukemia virus
augggccaaacaggau

SEQ ID NO: 255614 - RNA, 20 nt, Abelson murine leukemia virus
caaacaggauaucuguggua

SEQ ID NO: 255615 - RNA, 21 nt, Abelson murine leukemia virus
caaacaggauaucugugguaa

SEQ ID NO: 255616 - RNA, 21 nt, Abelson murine leukemia virus
caaacaggauaugcuguggua

SEQ ID NO: 255617 - RNA, 21 nt, Abelson murine leukemia virus
caagaacaguuggaacagcug

SEQ ID NO: 255618 - RNA, 17 nt, Abelson murine leukemia virus
cagagaaacagcugaau

SEQ ID NO: 255619 - RNA, 21 nt, Abelson murine leukemia virus
cagagaaacagcugaauaugg

SEQ ID NO: 255620 - RNA, 23 nt, Abelson murine leukemia virus
cagaucaaggucaggaacagaga

SEQ ID NO: 255621 - RNA, 20 nt, Abelson murine leukemia virus
cagcugaauaugggccaaac

SEQ ID NO: 255622 - RNA, 17 nt, Abelson murine leukemia virus
caggauaugcuguggua

SEQ ID NO: 255623 - RNA, 19 nt, Abelson murine leukemia virus
caguuccugccccggcuca

SEQ ID NO: 255624 - RNA, 22 nt, Abelson murine leukemia virus
caguuccugccccggcucaggg

SEQ ID NO: 255625 - RNA, 23 nt, Abelson murine leukemia virus
caguuccugccccggcucagggc

SEQ ID NO: 255626 - RNA, 21 nt, Abelson murine leukemia virus
ccaaacaggauaucuguggua

SEQ ID NO: 255627 - RNA, 17 nt, Abelson murine leukemia virus
ccagcccucagcaguuu

SEQ ID NO: 255628 - RNA, 15 nt, Abelson murine leukemia virus
ccggcucagggccaa

SEQ ID NO: 255629 - RNA, 18 nt, Abelson murine leukemia virus
ccggcucagggccaagaa

SEQ ID NO: 255630 - RNA, 12 nt, Abelson murine leukemia virus
cucagcaguuuc

SEQ ID NO: 255631 - RNA, 12 nt, Abelson murine leukemia virus
cucagggccaag

SEQ ID NO: 255632 - RNA, 15 nt, Abelson murine leukemia virus
cucagggccaagaac

SEQ ID NO: 255633 - RNA, 14 nt, Abelson murine leukemia virus
cuccccgagcucaa

SEQ ID NO: 255634 - RNA, 18 nt, Abelson murine leukemia virus
cugccccggcucagggcc

SEQ ID NO: 255635 - RNA, 21 nt, Abelson murine leukemia virus
cugugguaagcaguuccugcc

SEQ ID NO: 255636 - RNA, 20 nt, Abelson murine leukemia virus
cuucugcuccccgagcucaa

SEQ ID NO: 255637 - RNA, 18 nt, Abelson murine leukemia virus
gaacaguuggaacagcug

SEQ ID NO: 255638 - RNA, 21 nt, Abelson murine leukemia virus
gaacuaaccaaucaguucgcu

SEQ ID NO: 255639 - RNA, 13 nt, Abelson murine leukemia virus
gaauaugggccaa

SEQ ID NO: 255640 - RNA, 13 nt, Abelson murine leukemia virus
gauaucuguggua

SEQ ID NO: 255641 - RNA, 21 nt, Abelson murine leukemia virus
gauaucugugguaagcaguuc

SEQ ID NO: 255642 - RNA, 23 nt, Abelson murine leukemia virus
gauaucugugguaagcaguuccu

SEQ ID NO: 255643 - RNA, 22 nt, Abelson murine leukemia virus
gauaugcugugguaagcaguuc

SEQ ID NO: 255644 - RNA, 22 nt, Abelson murine leukemia virus
gaucaaggucaggaacagagaa

SEQ ID NO: 255645 - RNA, 16 nt, Abelson murine leukemia virus
gcucagggccaagaac

SEQ ID NO: 255646 - RNA, 17 nt, Abelson murine leukemia virus
gcugaauaugggccaaa

SEQ ID NO: 255647 - RNA, 16 nt, Abelson murine leukemia virus
gcugugguaagcaguu

SEQ ID NO: 255648 - RNA, 19 nt, Abelson murine leukemia virus
gcugugguaagcaguuccu

SEQ ID NO: 255649 - RNA, 18 nt, Abelson murine leukemia virus
ggaacagagaaacagcug

SEQ ID NO: 255650 - RNA, 23 nt, Abelson murine leukemia virus
ggauaugcugugguaagcaguuc

SEQ ID NO: 255651 - RNA, 13 nt, Abelson murine leukemia virus
ggcucagggccaa

SEQ ID NO: 255652 - RNA, 16 nt, Abelson murine leukemia virus
ggcucagggccaagaa

SEQ ID NO: 255653 - RNA, 18 nt, Abelson murine leukemia virus
ggcucagggccaagaaca

SEQ ID NO: 255654 - RNA, 23 nt, Abelson murine leukemia virus
ggucaggaacagagaaacagcug

SEQ ID NO: 255655 - RNA, 21 nt, Abelson murine leukemia virus
gguccagcccucagcaguuuc

SEQ ID NO: 255656 - RNA, 13 nt, Abelson murine leukemia virus
gugguaagcaguu

SEQ ID NO: 255657 - RNA, 14 nt, Abelson murine leukemia virus
gugguaagcaguuc

SEQ ID NO: 255658 - RNA, 13 nt, Abelson murine leukemia virus
guuggaacagcug

SEQ ID NO: 255659 - RNA, 22 nt, Abelson murine leukemia virus
uaagcaguuccugccccggcuc

SEQ ID NO: 255660 - RNA, 21 nt, Abelson murine leukemia virus
uaucugugguaagcaguuccu

SEQ ID NO: 255661 - RNA, 19 nt, Abelson murine leukemia virus
uaugcugugguaagcaguu

SEQ ID NO: 255662 - RNA, 23 nt, Abelson murine leukemia virus
uccugccccggcucagggccaag

SEQ ID NO: 255663 - RNA, 22 nt, Abelson murine leukemia virus
ugaauaugggccaaacaggaua

SEQ ID NO: 255664 - RNA, 20 nt, Abelson murine leukemia virus
ugccccggcucagggccaag

SEQ ID NO: 255665 - RNA, 12 nt, Abelson murine leukemia virus
ugggccaaacag

SEQ ID NO: 255666 - RNA, 16 nt, Abelson murine leukemia virus
ugggccaaacaggaua

SEQ ID NO: 255667 - RNA, 17 nt, Abelson murine leukemia virus
ugggccaaacaggauau

SEQ ID NO: 255668 - RNA, 15 nt, Abelson murine leukemia virus
ugguaagcaguuccu

SEQ ID NO: 255669 - RNA, 23 nt, Abelson murine leukemia virus
uuccugccccggcucagggccaa

SEQ ID NO: 255670 - RNA, 12 nt, Abelson murine leukemia virus
uuggaacagcug

SEQ ID NO: 255671 - RNA, 16 nt, Abelson murine leukemia virus
uuucuagagaaccauc

SEQ ID NO: 255672 - RNA, 12 nt, Adeno-associated virus 2
accagauaccug

SEQ ID NO: 255673 - RNA, 13 nt, Adeno-associated virus 2
accagauaccuga

SEQ ID NO: 255674 - RNA, 13 nt, Adeno-associated virus 2
auuggcaccagau

SEQ ID NO: 255675 - RNA, 19 nt, Adeno-associated virus 2
auuggcaccagauaccuga

SEQ ID NO: 255676 - RNA, 22 nt, Adeno-associated virus 2
ccauuggcaccagauaccugac

SEQ ID NO: 255677 - RNA, 17 nt, Adeno-associated virus 2
ccccauuggcaccagau

SEQ ID NO: 255678 - RNA, 18 nt, Adeno-associated virus 2
cugacucguaaucuguaa

SEQ ID NO: 255679 - RNA, 22 nt, Adeno-associated virus 2
cuguaauugcuuguuaaucaau

SEQ ID NO: 255680 - RNA, 23 nt, Adeno-associated virus 2
gccucgccccauuggcaccagau

SEQ ID NO: 255681 - RNA, 20 nt, Adeno-associated virus 2
uaauugcuuguuaaucaaua

SEQ ID NO: 255682 - RNA, 21 nt, Adeno-associated virus 2
uggacuuaccguggauacuaa

SEQ ID NO: 255683 - RNA, 20 nt, Adeno-associated virus 2
uggauacuaauggcguguau

SEQ ID NO: 255684 - RNA, 22 nt, Adeno-associated virus 2
aaucguggacuuaccguggaua

SEQ ID NO: 255685 - RNA, 15 nt, Adeno-associated virus 2
acucguaaucuguaa

SEQ ID NO: 255686 - RNA, 22 nt, Adeno-associated virus 2
agagccucgccccauuggcacc

SEQ ID NO: 255687 - RNA, 14 nt, Adeno-associated virus 2
auuggcaccagaua

SEQ ID NO: 255688 - RNA, 14 nt, Adeno-associated virus 2
caccagauaccuga

SEQ ID NO: 255689 - RNA, 20 nt, Adeno-associated virus 2
cauuggcaccagauaccuga

SEQ ID NO: 255690 - RNA, 16 nt, Adeno-associated virus 2
cccauuggcaccagau

SEQ ID NO: 255691 - RNA, 17 nt, Adeno-associated virus 2
cuaauggcguguauuca

SEQ ID NO: 255692 - RNA, 23 nt, Adeno-associated virus 2
cuguaauugcuuguuaaucaaua

SEQ ID NO: 255693 - RNA, 15 nt, Adeno-associated virus 2
gcaccagauaccuga

SEQ ID NO: 255694 - RNA, 18 nt, Adeno-associated virus 2
gccccauuggcaccagau

SEQ ID NO: 255695 - RNA, 14 nt, Adeno-associated virus 2
uaccguggauacua

SEQ ID NO: 255696 - RNA, 21 nt, Adeno-associated virus 2
ucgccccauuggcaccagaua

SEQ ID NO: 255697 - RNA, 14 nt, Adeno-associated virus 2
uguaauugcuuguu

SEQ ID NO: 255698 - RNA, 14 nt, Avian myelocytomatosis virus
aaacuagacugaaa

SEQ ID NO: 255699 - RNA, 20 nt, Avian myelocytomatosis virus
aaacuagacugaaacuauga

SEQ ID NO: 255700 - RNA, 23 nt, Avian myelocytomatosis virus
aaauuuuguauuuaaggcauucc

SEQ ID NO: 255701 - RNA, 16 nt, Avian myelocytomatosis virus
aacagcacaacccuca

SEQ ID NO: 255702 - RNA, 19 nt, Avian myelocytomatosis virus
aacuagacugaaacuauga

SEQ ID NO: 255703 - RNA, 21 nt, Avian myelocytomatosis virus
aacuagacugaaacuaugaua

SEQ ID NO: 255704 - RNA, 16 nt, Avian myelocytomatosis virus
aacuaugauaaaauau

SEQ ID NO: 255705 - RNA, 13 nt, Avian myelocytomatosis virus
aacucuucaacuu

SEQ ID NO: 255706 - RNA, 13 nt, Avian myelocytomatosis virus
auaauugauacuu

SEQ ID NO: 255707 - RNA, 17 nt, Avian myelocytomatosis virus
auaccccaaacuagacu

SEQ ID NO: 255708 - RNA, 14 nt, Avian myelocytomatosis virus
auacuuugggcaua

SEQ ID NO: 255709 - RNA, 14 nt, Avian myelocytomatosis virus
auaucacucaugaa

SEQ ID NO: 255710 - RNA, 24 nt, Avian myelocytomatosis virus
auauuaguguuucuaauaucacuc

SEQ ID NO: 255711 - RNA, 15 nt, Avian myelocytomatosis virus
aucacucaugaacua

SEQ ID NO: 255712 - RNA, 18 nt, Avian myelocytomatosis virus
aucacucaugaacuacau

SEQ ID NO: 255713 - RNA, 12 nt, Avian myelocytomatosis virus
augaacuacauc

SEQ ID NO: 255714 - RNA, 18 nt, Avian myelocytomatosis virus
auuagguucccagucucu

SEQ ID NO: 255715 - RNA, 15 nt, Avian myelocytomatosis virus
auuuaaggcauuccu

SEQ ID NO: 255716 - RNA, 23 nt, Avian myelocytomatosis virus
caacuauuagguucccagucucu

SEQ ID NO: 255717 - RNA, 18 nt, Avian myelocytomatosis virus
caccuaucggaagguuuc

SEQ ID NO: 255718 - RNA, 13 nt, Avian myelocytomatosis virus
cacucaugaacua

SEQ ID NO: 255719 - RNA, 14 nt, Avian myelocytomatosis virus
cacucaugaacuac

SEQ ID NO: 255720 - RNA, 15 nt, Avian myelocytomatosis virus
cagaaccucaaaacu

SEQ ID NO: 255721 - RNA, 24 nt, Avian myelocytomatosis virus
cagcacaacccucaccuaucggaa

SEQ ID NO: 255722 - RNA, 14 nt, Avian myelocytomatosis virus
caucagaacuacaa

SEQ ID NO: 255723 - RNA, 13 nt, Avian myelocytomatosis virus
caugaacuacauc

SEQ ID NO: 255724 - RNA, 20 nt, Avian myelocytomatosis virus
caugaacuacaucaguccau

SEQ ID NO: 255725 - RNA, 19 nt, Avian myelocytomatosis virus
caugcuuggggaugaacuc

SEQ ID NO: 255726 - RNA, 21 nt, Avian myelocytomatosis virus
cauugaguauggaacuauugc

SEQ ID NO: 255727 - RNA, 22 nt, Avian myelocytomatosis virus
ccaaacuagacugaaacuauga

SEQ ID NO: 255728 - RNA, 23 nt, Avian myelocytomatosis virus
ccaaacuagacugaaacuaugau

SEQ ID NO: 255729 - RNA, 16 nt, Avian myelocytomatosis virus
ccaucagaacuacaac

SEQ ID NO: 255730 - RNA, 22 nt, Avian myelocytomatosis virus
ccaucagaacuacaacuauuag

SEQ ID NO: 255731 - RNA, 13 nt, Avian myelocytomatosis virus
ccccaaacuagac

SEQ ID NO: 255732 - RNA, 16 nt, Avian myelocytomatosis virus
ccucaccuaucggaag

SEQ ID NO: 255733 - RNA, 19 nt, Avian myelocytomatosis virus
cgagccaucagaacuacaa

SEQ ID NO: 255734 - RNA, 14 nt, Avian myelocytomatosis virus
cuaauaucacucau

SEQ ID NO: 255735 - RNA, 13 nt, Avian myelocytomatosis virus
cuacaucagucca

SEQ ID NO: 255736 - RNA, 17 nt, Avian myelocytomatosis virus
cuagacugaaacuauga

SEQ ID NO: 255737 - RNA, 12 nt, Avian myelocytomatosis virus
cuauuagguucc

SEQ ID NO: 255738 - RNA, 12 nt, Avian myelocytomatosis virus
cuauugcaacug

SEQ ID NO: 255739 - RNA, 14 nt, Avian myelocytomatosis virus
cucaugaacuacau

SEQ ID NO: 255740 - RNA, 15 nt, Avian myelocytomatosis virus
cucaugaacuacauc

SEQ ID NO: 255741 - RNA, 17 nt, Avian myelocytomatosis virus
cucaugaacuacaucag

SEQ ID NO: 255742 - RNA, 15 nt, Avian myelocytomatosis virus
cugauaacagcacaa

SEQ ID NO: 255743 - RNA, 20 nt, Avian myelocytomatosis virus
cugugcgacuuaacuugaga

SEQ ID NO: 255744 - RNA, 19 nt, Avian myelocytomatosis virus
cuuaacuugagacuacaca

SEQ ID NO: 255745 - RNA, 22 nt, Avian myelocytomatosis virus
cuucaugcuuggggaugaacuc

SEQ ID NO: 255746 - RNA, 23 nt, Avian myelocytomatosis virus
cuucaugcuuggggaugaacucu

SEQ ID NO: 255747 - RNA, 13 nt, Avian myelocytomatosis virus
cuuggggaugaac

SEQ ID NO: 255748 - RNA, 23 nt, Avian myelocytomatosis virus
cuuuagacgagccaucagaacua

SEQ ID NO: 255749 - RNA, 21 nt, Avian myelocytomatosis virus
gaacguuucucuuuagacgag

SEQ ID NO: 255750 - RNA, 22 nt, Avian myelocytomatosis virus
gacuuaacuugagacuacacaa

SEQ ID NO: 255751 - RNA, 16 nt, Avian myelocytomatosis virus
gagacuacacaaccuu

SEQ ID NO: 255752 - RNA, 21 nt, Avian myelocytomatosis virus
gagccaucagaacuacaacua

SEQ ID NO: 255753 - RNA, 15 nt, Avian myelocytomatosis virus
gaguauggaacuauu

SEQ ID NO: 255754 - RNA, 11 nt, Avian myelocytomatosis virus
gccagaaccuc

SEQ ID NO: 255755 - RNA, 19 nt, Avian myelocytomatosis virus
ggaacucuuggacaucacu

SEQ ID NO: 255756 - RNA, 12 nt, Avian myelocytomatosis virus
ggaugaacucuu

SEQ ID NO: 255757 - RNA, 16 nt, Avian myelocytomatosis virus
ggaugaacucuucaac

SEQ ID NO: 255758 - RNA, 12 nt, Avian myelocytomatosis virus
ggccagaaccuc

SEQ ID NO: 255759 - RNA, 19 nt, Avian myelocytomatosis virus
guggcccugauaacagcac

SEQ ID NO: 255760 - RNA, 23 nt, Avian myelocytomatosis virus
uaacagcacaacccucaccuauc

SEQ ID NO: 255761 - RNA, 15 nt, Avian myelocytomatosis virus
uaauaucacucauga

SEQ ID NO: 255762 - RNA, 16 nt, Avian myelocytomatosis virus
uagaauaccccaaacu

SEQ ID NO: 255763 - RNA, 11 nt, Avian myelocytomatosis virus
uauaacuaaua

SEQ ID NO: 255764 - RNA, 20 nt, Avian myelocytomatosis virus
uaucacucaugaacuacauc

SEQ ID NO: 255765 - RNA, 14 nt, Avian myelocytomatosis virus
uauuagguucccag

SEQ ID NO: 255766 - RNA, 17 nt, Avian myelocytomatosis virus
ucacucaugaacuacau

SEQ ID NO: 255767 - RNA, 18 nt, Avian myelocytomatosis virus
ucacuuagaauaccccaa

SEQ ID NO: 255768 - RNA, 13 nt, Avian myelocytomatosis virus
ucagaacuacaac

SEQ ID NO: 255769 - RNA, 15 nt, Avian myelocytomatosis virus
ucagaacuacaacua

SEQ ID NO: 255770 - RNA, 17 nt, Avian myelocytomatosis virus
ucagaacuacaacuauu

SEQ ID NO: 255771 - RNA, 20 nt, Avian myelocytomatosis virus
ucaguccauugaguauggaa

SEQ ID NO: 255772 - RNA, 23 nt, Avian myelocytomatosis virus
ucaguccauugaguauggaacua

SEQ ID NO: 255773 - RNA, 17 nt, Avian myelocytomatosis virus
ucggaagguuucgugcu

SEQ ID NO: 255774 - RNA, 18 nt, Avian myelocytomatosis virus
ucuaauaucacucaugaa

SEQ ID NO: 255775 - RNA, 20 nt, Avian myelocytomatosis virus
ucuccccauuauaacuaaua

SEQ ID NO: 255776 - RNA, 16 nt, Avian myelocytomatosis virus
ucuuggacaucacuua

SEQ ID NO: 255777 - RNA, 12 nt, Avian myelocytomatosis virus
ugauaacagcac

SEQ ID NO: 255778 - RNA, 20 nt, Avian myelocytomatosis virus
uggaacuauugcaacugcau

SEQ ID NO: 255779 - RNA, 23 nt, Avian myelocytomatosis virus
uggccagaaccucaaaacugccu

SEQ ID NO: 255780 - RNA, 18 nt, Avian myelocytomatosis virus
ugggacauucuucaugcu

SEQ ID NO: 255781 - RNA, 17 nt, Avian myelocytomatosis virus
uggggaugaacucuuca

SEQ ID NO: 255782 - RNA, 20 nt, Avian myelocytomatosis virus
ugugcgacuuaacuugagac

SEQ ID NO: 255783 - RNA, 17 nt, Avian myelocytomatosis virus
uuaacuugagacuacac

SEQ ID NO: 255784 - RNA, 13 nt, Avian myelocytomatosis virus
uugagacuacaca

SEQ ID NO: 255785 - RNA, 18 nt, Avian myelocytomatosis virus
uugagacuacacaaccuu

SEQ ID NO: 255786 - RNA, 23 nt, Avian myelocytomatosis virus
uugaguauggaacuauugcaacu

SEQ ID NO: 255787 - RNA, 14 nt, Avian myelocytomatosis virus
uuuaaggcauuccu

SEQ ID NO: 255788 - RNA, 15 nt, Avian myelocytomatosis virus
aaccucaaaacugcc

SEQ ID NO: 255789 - RNA, 21 nt, Avian myelocytomatosis virus
aacgguuuggccagaaccuca

SEQ ID NO: 255790 - RNA, 14 nt, Avian myelocytomatosis virus
aacuacaacuauua

SEQ ID NO: 255791 - RNA, 17 nt, Avian myelocytomatosis virus
aacuauugcaacugcau

SEQ ID NO: 255792 - RNA, 20 nt, Avian myelocytomatosis virus
acagcacaacccucaccuau

SEQ ID NO: 255793 - RNA, 21 nt, Avian myelocytomatosis virus
acaucacuuagaauaccccaa

SEQ ID NO: 255794 - RNA, 17 nt, Avian myelocytomatosis virus
acuaauauuacucggau

SEQ ID NO: 255795 - RNA, 14 nt, Avian myelocytomatosis virus
acuacaucagucca

SEQ ID NO: 255796 - RNA, 12 nt, Avian myelocytomatosis virus
acuagacugaaa

SEQ ID NO: 255797 - RNA, 13 nt, Avian myelocytomatosis virus
acuauuagguucc

SEQ ID NO: 255798 - RNA, 21 nt, Avian myelocytomatosis virus
acuauuagguucccagucucu

SEQ ID NO: 255799 - RNA, 14 nt, Avian myelocytomatosis virus
acugaaacuaugau

SEQ ID NO: 255800 - RNA, 18 nt, Avian myelocytomatosis virus
acugccucauaauugaua

SEQ ID NO: 255801 - RNA, 16 nt, Avian myelocytomatosis virus
acuuaacuugagacua

SEQ ID NO: 255802 - RNA, 16 nt, Avian myelocytomatosis virus
acuuagaauaccccaa

SEQ ID NO: 255803 - RNA, 21 nt, Avian myelocytomatosis virus
agccaucagaacuacaacuau

SEQ ID NO: 255804 - RNA, 19 nt, Avian myelocytomatosis virus
aguauggaacuauugcaac

SEQ ID NO: 255805 - RNA, 22 nt, Avian myelocytomatosis virus
aacucuuggacaucacuuagaa

SEQ ID NO: 255806 - RNA, 16 nt, Avian myelocytomatosis virus
aacuugagacuacaca

SEQ ID NO: 255807 - RNA, 13 nt, Avian myelocytomatosis virus
accccaaacuaga

SEQ ID NO: 255808 - RNA, 14 nt, Avian myelocytomatosis virus
accucaaaacugcc

SEQ ID NO: 255809 - RNA, 15 nt, Avian myelocytomatosis virus
acuagacugaaacua

SEQ ID NO: 255810 - RNA, 18 nt, Avian myelocytomatosis virus
acuauugcaacugcaugc

SEQ ID NO: 255811 - RNA, 17 nt, Avian myelocytomatosis virus
acucaugaacuacauca

SEQ ID NO: 255812 - RNA, 21 nt, Avian myelocytomatosis virus
acuuaacuugagacuacacaa

SEQ ID NO: 255813 - RNA, 18 nt, Avian myelocytomatosis virus
agaaccucaaaacugccu

SEQ ID NO: 255814 - RNA, 16 nt, Avian myelocytomatosis virus
agacugaaacuaugau

SEQ ID NO: 255815 - RNA, 17 nt, Avian myelocytomatosis virus
agacugaaacuaugaua

SEQ ID NO: 255816 - RNA, 14 nt, Avian myelocytomatosis virus
agccaucagaacua

SEQ ID NO: 255817 - RNA, 23 nt, Avian myelocytomatosis virus
aggcauuccugguggcccugaua

SEQ ID NO: 255818 - RNA, 15 nt, Avian myelocytomatosis virus
aguauggaacuauug

SEQ ID NO: 255819 - RNA, 17 nt, Avian myelocytomatosis virus
agucucuccccauuaua

SEQ ID NO: 255820 - RNA, 13 nt, Avian myelocytomatosis virus
auaacuaauauua

SEQ ID NO: 255821 - RNA, 16 nt, Avian myelocytomatosis virus
auaacuaauauuacuc

SEQ ID NO: 255822 - RNA, 16 nt, Avian myelocytomatosis virus
auaucacucaugaacu

SEQ ID NO: 255823 - RNA, 17 nt, Avian myelocytomatosis virus
auaucacucaugaacua

SEQ ID NO: 255824 - RNA, 13 nt, Avian myelocytomatosis virus
aucagaacuacaa

SEQ ID NO: 255825 - RNA, 18 nt, Avian myelocytomatosis virus
aucagaacuacaacuauu

SEQ ID NO: 255826 - RNA, 19 nt, Avian myelocytomatosis virus
augaacuacaucaguccau

SEQ ID NO: 255827 - RNA, 19 nt, Avian myelocytomatosis virus
augcuuggggaugaacucu

SEQ ID NO: 255828 - RNA, 14 nt, Avian myelocytomatosis virus
auggaacuauugca

SEQ ID NO: 255829 - RNA, 20 nt, Avian myelocytomatosis virus
auggaacuauugcaacugca

SEQ ID NO: 255830 - RNA, 21 nt, Avian myelocytomatosis virus
auggaacuauugcaacugcau

SEQ ID NO: 255831 - RNA, 13 nt, Avian myelocytomatosis virus
auuauaacuaaua

SEQ ID NO: 255832 - RNA, 23 nt, Avian myelocytomatosis virus
auugauacuuugggcauaaggga

SEQ ID NO: 255833 - RNA, 17 nt, Avian myelocytomatosis virus
auuuuguauuuaaggca

SEQ ID NO: 255834 - RNA, 16 nt, Avian myelocytomatosis virus
caaaacugccucauaa

SEQ ID NO: 255835 - RNA, 14 nt, Avian myelocytomatosis virus
caaacuagacugaa

SEQ ID NO: 255836 - RNA, 17 nt, Avian myelocytomatosis virus
cacucaugaacuacauc

SEQ ID NO: 255837 - RNA, 17 nt, Avian myelocytomatosis virus
cacuuagaauaccccaa

SEQ ID NO: 255838 - RNA, 18 nt, Avian myelocytomatosis virus
cagaacuacaacuauuag

SEQ ID NO: 255839 - RNA, 20 nt, Avian myelocytomatosis virus
caguccauugaguauggaac

SEQ ID NO: 255840 - RNA, 19 nt, Avian myelocytomatosis virus
cauaagggaugaugggaca

SEQ ID NO: 255841 - RNA, 17 nt, Avian myelocytomatosis virus
caucagaacuacaacua

SEQ ID NO: 255842 - RNA, 15 nt, Avian myelocytomatosis virus
caugaacuacaucag

SEQ ID NO: 255843 - RNA, 13 nt, Avian myelocytomatosis virus
cauugaguaugga

SEQ ID NO: 255844 - RNA, 17 nt, Avian myelocytomatosis virus
cauugaguauggaacua

SEQ ID NO: 255845 - RNA, 14 nt, Avian myelocytomatosis virus
ccaucagaacuaca

SEQ ID NO: 255846 - RNA, 15 nt, Avian myelocytomatosis virus
ccaucagaacuacaa

SEQ ID NO: 255847 - RNA, 21 nt, Avian myelocytomatosis virus
ccaucagaacuacaacuauua

SEQ ID NO: 255848 - RNA, 15 nt, Avian myelocytomatosis virus
ccauuauaacuaaua

SEQ ID NO: 255849 - RNA, 16 nt, Avian myelocytomatosis virus
cccagucucuccccau

SEQ ID NO: 255850 - RNA, 23 nt, Avian myelocytomatosis virus
cgacuuaacuugagacuacacaa

SEQ ID NO: 255851 - RNA, 12 nt, Avian myelocytomatosis virus
cuacaacuauua

SEQ ID NO: 255852 - RNA, 14 nt, Avian myelocytomatosis virus
cuagacugaaacua

SEQ ID NO: 255853 - RNA, 16 nt, Avian myelocytomatosis virus
cuauugcaacugcaug

SEQ ID NO: 255854 - RNA, 16 nt, Avian myelocytomatosis virus
cucaaaacugccucau

SEQ ID NO: 255855 - RNA, 22 nt, Avian myelocytomatosis virus
cucuuuagacgagccaucagaa

SEQ ID NO: 255856 - RNA, 16 nt, Avian myelocytomatosis virus
cugaaacuaugauaaa

SEQ ID NO: 255857 - RNA, 14 nt, Avian myelocytomatosis virus
cugauaacagcaca

SEQ ID NO: 255858 - RNA, 20 nt, Avian myelocytomatosis virus
cugcaugcugugcgacuuaa

SEQ ID NO: 255859 - RNA, 18 nt, Avian myelocytomatosis virus
cugguggcccugauaaca

SEQ ID NO: 255860 - RNA, 20 nt, Avian myelocytomatosis virus
cuuaacuugagacuacacaa

SEQ ID NO: 255861 - RNA, 21 nt, Avian myelocytomatosis virus
cuucaugcuuggggaugaacu

SEQ ID NO: 255862 - RNA, 14 nt, Avian myelocytomatosis virus
cuugagacuacaca

SEQ ID NO: 255863 - RNA, 15 nt, Avian myelocytomatosis virus
cuugagacuacacaa

SEQ ID NO: 255864 - RNA, 19 nt, Avian myelocytomatosis virus
gaaacuaugauaaaauauu

SEQ ID NO: 255865 - RNA, 17 nt, Avian myelocytomatosis virus
gaaccucaaaacugccu

SEQ ID NO: 255866 - RNA, 13 nt, Avian myelocytomatosis virus
gaacuacaucagu

SEQ ID NO: 255867 - RNA, 17 nt, Avian myelocytomatosis virus
gaacuauugcaacugca

SEQ ID NO: 255868 - RNA, 15 nt, Avian myelocytomatosis virus
gagacuacacaaccu

SEQ ID NO: 255869 - RNA, 15 nt, Avian myelocytomatosis virus
gagccaucagaacua

SEQ ID NO: 255870 - RNA, 23 nt, Avian myelocytomatosis virus
gagccaucagaacuacaacuauu

SEQ ID NO: 255871 - RNA, 13 nt, Avian myelocytomatosis virus
ggacaucacuuag

SEQ ID NO: 255872 - RNA, 10 nt, Avian myelocytomatosis virus
ggaugaacuc

SEQ ID NO: 255873 - RNA, 15 nt, Avian myelocytomatosis virus
uaaagcugaacguuu

SEQ ID NO: 255874 - RNA, 14 nt, Avian myelocytomatosis virus
uaacagcacaaccc

SEQ ID NO: 255875 - RNA, 18 nt, Avian myelocytomatosis virus
uaacagcacaacccucac

SEQ ID NO: 255876 - RNA, 17 nt, Avian myelocytomatosis virus
uaacuugagacuacaca

SEQ ID NO: 255877 - RNA, 13 nt, Avian myelocytomatosis virus
uaauaucacucau

SEQ ID NO: 255878 - RNA, 19 nt, Avian myelocytomatosis virus
uaauaucacucaugaacua

SEQ ID NO: 255879 - RNA, 21 nt, Avian myelocytomatosis virus
uaauaucacucaugaacuaca

SEQ ID NO: 255880 - RNA, 23 nt, Avian myelocytomatosis virus
uaauaucacucaugaacuacauc

SEQ ID NO: 255881 - RNA, 14 nt, Avian myelocytomatosis virus
uaccccaaacuaga

SEQ ID NO: 255882 - RNA, 16 nt, Avian myelocytomatosis virus
uaucacucaugaacua

SEQ ID NO: 255883 - RNA, 12 nt, Avian myelocytomatosis virus
uauggaacuauu

SEQ ID NO: 255884 - RNA, 19 nt, Avian myelocytomatosis virus
uauuagguucccagucucu

SEQ ID NO: 255885 - RNA, 14 nt, Avian myelocytomatosis virus
uauugcaacugcau

SEQ ID NO: 255886 - RNA, 16 nt, Avian myelocytomatosis virus
ucacucaugaacuaca

SEQ ID NO: 255887 - RNA, 20 nt, Avian myelocytomatosis virus
ucaugaacuacaucagucca

SEQ ID NO: 255888 - RNA, 21 nt, Avian myelocytomatosis virus
ucaugaacuacaucaguccau

SEQ ID NO: 255889 - RNA, 20 nt, Avian myelocytomatosis virus
ucaugcuuggggaugaacuc

SEQ ID NO: 255890 - RNA, 22 nt, Avian myelocytomatosis virus
ucaugcuuggggaugaacucuu

SEQ ID NO: 255891 - RNA, 22 nt, Avian myelocytomatosis virus
uccauugaguauggaacuauug

SEQ ID NO: 255892 - RNA, 18 nt, Avian myelocytomatosis virus
uccccauuauaacuaaua

SEQ ID NO: 255893 - RNA, 20 nt, Avian myelocytomatosis virus
ucuccgaacgguuuggccag

SEQ ID NO: 255894 - RNA, 12 nt, Avian myelocytomatosis virus
ugaaacuaugau

SEQ ID NO: 255895 - RNA, 14 nt, Avian myelocytomatosis virus
ugaacucuucaacu

SEQ ID NO: 255896 - RNA, 17 nt, Avian myelocytomatosis virus
ugagacuacacaaccuu

SEQ ID NO: 255897 - RNA, 19 nt, Avian myelocytomatosis virus
ugaguauggaacuauugca

SEQ ID NO: 255898 - RNA, 14 nt, Avian myelocytomatosis virus
ugcuuggggaugaa

SEQ ID NO: 255899 - RNA, 17 nt, Avian myelocytomatosis virus
ugcuuggggaugaacuc

SEQ ID NO: 255900 - RNA, 17 nt, Avian myelocytomatosis virus
ugggcauaagggaugau

SEQ ID NO: 255901 - RNA, 13 nt, Avian myelocytomatosis virus
uggggaugaacuc

SEQ ID NO: 255902 - RNA, 18 nt, Avian myelocytomatosis virus
uuaacuugagacuacaca

SEQ ID NO: 255903 - RNA, 22 nt, Avian myelocytomatosis virus
uuaacuugagacuacacaaccu

SEQ ID NO: 255904 - RNA, 18 nt, Avian myelocytomatosis virus
uuagaauaccccaaacua

SEQ ID NO: 255905 - RNA, 21 nt, Avian myelocytomatosis virus
uuagaauaccccaaacuagac

SEQ ID NO: 255906 - RNA, 22 nt, Avian myelocytomatosis virus
uuaguguuucuaauaucacuca

SEQ ID NO: 255907 - RNA, 14 nt, B19 virus
aaaaugcaguauua

SEQ ID NO: 255908 - RNA, 14 nt, B19 virus
gucauggacaguua

SEQ ID NO: 255909 - RNA, 22 nt, B19 virus
ucagccaggaugcguaacuaaa

SEQ ID NO: 255910 - RNA, 12 nt, B19 virus
uccuguaccuau

SEQ ID NO: 255911 - RNA, 12 nt, B19 virus
ucuccagacuua

SEQ ID NO: 255912 - RNA, 14 nt, B19 virus
ucuguuugacuuag

SEQ ID NO: 255913 - RNA, 14 nt, B19 virus
uggaacagacuuag

SEQ ID NO: 255914 - RNA, 22 nt, B19 virus
uguaccugcccccuccuguacc

SEQ ID NO: 255915 - RNA, 21 nt, B19 virus
uguaucagcaauuuguggaau

SEQ ID NO: 255916 - RNA, 12 nt, B19 virus
uuuccugugacg

SEQ ID NO: 255917 - RNA, 18 nt, B19 virus
aaaaacucuccagacuua

SEQ ID NO: 255918 - RNA, 17 nt, B19 virus
aaaacucuccagacuua

SEQ ID NO: 255919 - RNA, 17 nt, B19 virus
aaagauauagacaaugu

SEQ ID NO: 255920 - RNA, 22 nt, B19 virus
aaagucauggacaguuaucuga

SEQ ID NO: 255921 - RNA, 19 nt, B19 virus
aaauauuaaaagaucacua

SEQ ID NO: 255922 - RNA, 23 nt, B19 virus
aaauuuaaaagaagacaccaaau

SEQ ID NO: 255923 - RNA, 17 nt, B19 virus
acaaaagauauagacaa

SEQ ID NO: 255924 - RNA, 22 nt, B19 virus
accuagaggagaaaaugcagua

SEQ ID NO: 255925 - RNA, 13 nt, B19 virus
acuuagagcuuau

SEQ ID NO: 255926 - RNA, 18 nt, B19 virus
acuuaguugcucguauua

SEQ ID NO: 255927 - RNA, 23 nt, B19 virus
acuuccggugggcgggacuuccg

SEQ ID NO: 255928 - RNA, 12 nt, B19 virus
auauagucauca

SEQ ID NO: 255929 - RNA, 23 nt, B19 virus
auauuucuuuagauaauccccua

SEQ ID NO: 255930 - RNA, 21 nt, B19 virus
auccaguagcagucaugcaga

SEQ ID NO: 255931 - RNA, 20 nt, B19 virus
auccucucuguuugacuuag

SEQ ID NO: 255932 - RNA, 15 nt, B19 virus
augccuuaucaucca

SEQ ID NO: 255933 - RNA, 13 nt, B19 virus
auggcggacaauu

SEQ ID NO: 255934 - RNA, 17 nt, B19 virus
caccgugcccucagcca

SEQ ID NO: 255935 - RNA, 18 nt, B19 virus
ccaggaugcguaacuaaa

SEQ ID NO: 255936 - RNA, 22 nt, B19 virus
ccgccgguaggcgggacuuccg

SEQ ID NO: 255937 - RNA, 21 nt, B19 virus
ccuagaggagaaaaugcagua

SEQ ID NO: 255938 - RNA, 23 nt, B19 virus
cuagaggagaaaaugcaguauua

SEQ ID NO: 255939 - RNA, 19 nt, B19 virus
cuauguugggccuggcaau

SEQ ID NO: 255940 - RNA, 15 nt, B19 virus
cuccuguaccuauaa

SEQ ID NO: 255941 - RNA, 14 nt, B19 virus
cuggaacagacuua

SEQ ID NO: 255942 - RNA, 16 nt, B19 virus
gccuuaucauccagua

SEQ ID NO: 255943 - RNA, 19 nt, B19 virus
ggaacagacuuagagcuua

SEQ ID NO: 255944 - RNA, 22 nt, B19 virus
aaagguuacuggaacagacuua

SEQ ID NO: 255945 - RNA, 16 nt, B19 virus
aaauaaacauuuguug

SEQ ID NO: 255946 - RNA, 17 nt, B19 virus
aaaugcaguauuaucua

SEQ ID NO: 255947 - RNA, 23 nt, B19 virus
aaccuagaggagaaaaugcagua

SEQ ID NO: 255948 - RNA, 16 nt, B19 virus
aacucuccagacuuau

SEQ ID NO: 255949 - RNA, 15 nt, B19 virus
aagauauagacaaug

SEQ ID NO: 255950 - RNA, 16 nt, B19 virus
aauuacgucauuuccu

SEQ ID NO: 255951 - RNA, 15 nt, B19 virus
aauuuaaguacuuaa

SEQ ID NO: 255952 - RNA, 21 nt, B19 virus
acaauuacgucauuuccugug

SEQ ID NO: 255953 - RNA, 15 nt, B19 virus
acagccuaacacaaa

SEQ ID NO: 255954 - RNA, 17 nt, B19 virus
accacccccaugccuua

SEQ ID NO: 255955 - RNA, 15 nt, B19 virus
acgucauuuccugug

SEQ ID NO: 255956 - RNA, 20 nt, B19 virus
acuuaaccagauaugaacaa

SEQ ID NO: 255957 - RNA, 18 nt, B19 virus
aguacuuaaccagauaug

SEQ ID NO: 255958 - RNA, 16 nt, B19 virus
agucaugcagaaccua

SEQ ID NO: 255959 - RNA, 21 nt, B19 virus
auaaauuugcuaaagcugugu

SEQ ID NO: 255960 - RNA, 23 nt, B19 virus
aucugaccacccccaugccuuau

SEQ ID NO: 255961 - RNA, 19 nt, B19 virus
auuaucuagugaagacuua

SEQ ID NO: 255962 - RNA, 21 nt, B19 virus
auuuaaaagaagacaccaaau

SEQ ID NO: 255963 - RNA, 22 nt, B19 virus
auuuccugugacgucacuuccg

SEQ ID NO: 255964 - RNA, 18 nt, B19 virus
caaagucauggacaguua

SEQ ID NO: 255965 - RNA, 18 nt, B19 virus
caauuacgucauuuccug

SEQ ID NO: 255966 - RNA, 19 nt, B19 virus
cacaagccugggcaaguua

SEQ ID NO: 255967 - RNA, 21 nt, B19 virus
cagccuaacacaaaagauaua

SEQ ID NO: 255968 - RNA, 13 nt, B19 virus
ccuaacacaaaag

SEQ ID NO: 255969 - RNA, 20 nt, B19 virus
cuagaggagaaaaugcagua

SEQ ID NO: 255970 - RNA, 19 nt, B19 virus
gaccacccccaugccuuau

SEQ ID NO: 255971 - RNA, 19 nt, B19 virus
uaaacauuuguugugguua

SEQ ID NO: 255972 - RNA, 20 nt, B19 virus
uacaagauggcggacaauua

SEQ ID NO: 255973 - RNA, 20 nt, B19 virus
uagaggagaaaaugcaguau

SEQ ID NO: 255974 - RNA, 14 nt, B19 virus
uagugaagacuuac

SEQ ID NO: 255975 - RNA, 15 nt, B19 virus
uagugaagacuuaca

SEQ ID NO: 255976 - RNA, 21 nt, B19 virus
uccaguagcagucaugcagaa

SEQ ID NO: 255977 - RNA, 13 nt, B19 virus
ucuccagacuuau

SEQ ID NO: 255978 - RNA, 22 nt, B19 virus
ugaccacccccaugccuuauca

SEQ ID NO: 255979 - RNA, 14 nt, B19 virus
ugcguaacuaaacg

SEQ ID NO: 255980 - RNA, 22 nt, B19 virus
uuagaauguuaagauuguguaa

SEQ ID NO: 255981 - RNA, 20 nt, B19 virus
uuaucuagugaagacuuaca

SEQ ID NO: 255982 - RNA, 16 nt, B19 virus
uuuagaaaaauaaaca

SEQ ID NO: 255983 - RNA, 17 nt, Bacteriophage phig1e
aacaucuauauauucca

SEQ ID NO: 255984 - RNA, 22 nt, Bacteriophage phig1e
aacgauugcuuuaucucuaugu

SEQ ID NO: 255985 - RNA, 17 nt, Bacteriophage phig1e
aacugcuguuacugacu

SEQ ID NO: 255986 - RNA, 16 nt, Bacteriophage phig1e
aagucaugacuuuacu

SEQ ID NO: 255987 - RNA, 13 nt, Bacteriophage phig1e
acaacugcuguua

SEQ ID NO: 255988 - RNA, 14 nt, Bacteriophage phig1e
acuuuacuguuaga

SEQ ID NO: 255989 - RNA, 14 nt, Bacteriophage phig1e
agaucguggcugca

SEQ ID NO: 255990 - RNA, 14 nt, Bacteriophage phig1e
aucuguaugaauuu

SEQ ID NO: 255991 - RNA, 23 nt, Bacteriophage phig1e
augaauuugagcaggaaauugau

SEQ ID NO: 255992 - RNA, 17 nt, Bacteriophage phig1e
augcaccuuuaaauugg

SEQ ID NO: 255993 - RNA, 16 nt, Bacteriophage phig1e
auggcuugugcaugca

SEQ ID NO: 255994 - RNA, 14 nt, Bacteriophage phig1e
caacugcuguuacu

SEQ ID NO: 255995 - RNA, 14 nt, Bacteriophage phig1e
cuauaacgauugcu

SEQ ID NO: 255996 - RNA, 22 nt, Bacteriophage phig1e
gagaucaagucaugacuuuacu

SEQ ID NO: 255997 - RNA, 22 nt, Bacteriophage phig1e
gagauggcuugugcaugcaccu

SEQ ID NO: 255998 - RNA, 15 nt, Bacteriophage phig1e
gaucaagucaugacu

SEQ ID NO: 255999 - RNA, 20 nt, Bacteriophage phig1e
uacaacugcuguuacugacu

SEQ ID NO: 256000 - RNA, 11 nt, Bacteriophage phig1e
uauacgaugcg

SEQ ID NO: 256001 - RNA, 17 nt, Bacteriophage phig1e
ucaugacuuuacuguua

SEQ ID NO: 256002 - RNA, 23 nt, Bacteriophage phig1e
uccccaauuuauacgaugcguau

SEQ ID NO: 256003 - RNA, 15 nt, Bacteriophage phig1e
aagucaugacuuuac

SEQ ID NO: 256004 - RNA, 14 nt, Bacteriophage phig1e
acaacugcuguuac

SEQ ID NO: 256005 - RNA, 19 nt, Bacteriophage phig1e
agaucaagucaugacuuua

SEQ ID NO: 256006 - RNA, 17 nt, Bacteriophage phig1e
agucaugacuuuacugu

SEQ ID NO: 256007 - RNA, 17 nt, Bacteriophage phig1e
auaacgauugcuuuauc

SEQ ID NO: 256008 - RNA, 21 nt, Bacteriophage phig1e
auaacgauugcuuuaucucua

SEQ ID NO: 256009 - RNA, 22 nt, Bacteriophage phig1e
auaacgcccaauuuauggguuu

SEQ ID NO: 256010 - RNA, 19 nt, Bacteriophage phig1e
auacaacugcuguuacuga

SEQ ID NO: 256011 - RNA, 18 nt, Bacteriophage phig1e
auacgaugcguaucuuaa

SEQ ID NO: 256012 - RNA, 12 nt, Bacteriophage phig1e
aucaagucauga

SEQ ID NO: 256013 - RNA, 15 nt, Bacteriophage phig1e
augacuuuacuguua

SEQ ID NO: 256014 - RNA, 16 nt, Bacteriophage phig1e
augacuuuacuguuag

SEQ ID NO: 256015 - RNA, 23 nt, Bacteriophage phig1e
cauacaacugcuguuacugacua

SEQ ID NO: 256016 - RNA, 16 nt, Bacteriophage phig1e
caugacuuuacuguua

SEQ ID NO: 256017 - RNA, 23 nt, Bacteriophage phig1e
ccauacaacugcuguuacugacu

SEQ ID NO: 256018 - RNA, 24 nt, Bacteriophage phig1e
ccauacaacugcuguuacugacua

SEQ ID NO: 256019 - RNA, 15 nt, Bacteriophage phig1e
cccaauuuauggguu

SEQ ID NO: 256020 - RNA, 21 nt, Bacteriophage phig1e
cuaaauaucgagaucaaguca

SEQ ID NO: 256021 - RNA, 18 nt, Bacteriophage phig1e
gaaaaguagccaguuucu

SEQ ID NO: 256022 - RNA, 19 nt, Bacteriophage phig1e
gacuauaacgauugcuuua

SEQ ID NO: 256023 - RNA, 22 nt, Bacteriophage phig1e
uauaacgauugcuuuaucucua

SEQ ID NO: 256024 - RNA, 20 nt, Bacteriophage phig1e
uuauacgaugcguaucuuaa

SEQ ID NO: 256025 - RNA, 12 nt, Barmah Forest virus
aaaaauaguagu

SEQ ID NO: 256026 - RNA, 12 nt, Barmah Forest virus
aaaagacccaga

SEQ ID NO: 256027 - RNA, 14 nt, Barmah Forest virus
aaacagcuguuaga

SEQ ID NO: 256028 - RNA, 15 nt, Barmah Forest virus
aaaccgucugaagca

SEQ ID NO: 256029 - RNA, 23 nt, Barmah Forest virus
aaauaguaguucaaagggccaua

SEQ ID NO: 256030 - RNA, 20 nt, Barmah Forest virus
aaauaguucaaagggccaua

SEQ ID NO: 256031 - RNA, 17 nt, Barmah Forest virus
aaauucaugcaccaaag

SEQ ID NO: 256032 - RNA, 18 nt, Barmah Forest virus
aaauucaugcaccaaagu

SEQ ID NO: 256033 - RNA, 19 nt, Barmah Forest virus
aacaaaagcagguaccaau

SEQ ID NO: 256034 - RNA, 18 nt, Barmah Forest virus
aacccaagcagaaacaaa

SEQ ID NO: 256035 - RNA, 17 nt, Barmah Forest virus
aaccccaaccaccagcg

SEQ ID NO: 256036 - RNA, 14 nt, Barmah Forest virus
aacuagugaccuca

SEQ ID NO: 256037 - RNA, 17 nt, Barmah Forest virus
aagaaaccaacccaaaa

SEQ ID NO: 256038 - RNA, 23 nt, Barmah Forest virus
aagagaaaaacacaaaaauagua

SEQ ID NO: 256039 - RNA, 20 nt, Barmah Forest virus
aaggagcaaguaccaaauga

SEQ ID NO: 256040 - RNA, 15 nt, Barmah Forest virus
aauaugaaagcagag

SEQ ID NO: 256041 - RNA, 15 nt, Barmah Forest virus
accagcaccagucca

SEQ ID NO: 256042 - RNA, 20 nt, Barmah Forest virus
acccaagcagaaacaaaaaa

SEQ ID NO: 256043 - RNA, 18 nt, Barmah Forest virus
acccagaagccuaagaaa

SEQ ID NO: 256044 - RNA, 20 nt, Barmah Forest virus
accucagaggucugucuagu

SEQ ID NO: 256045 - RNA, 14 nt, Barmah Forest virus
agaaaccaacccaa

SEQ ID NO: 256046 - RNA, 17 nt, Barmah Forest virus
agaaaccaacccaaaag

SEQ ID NO: 256047 - RNA, 21 nt, Barmah Forest virus
agacaacuagucucggcaaca

SEQ ID NO: 256048 - RNA, 17 nt, Barmah Forest virus
agacaccaccaccaaaa

SEQ ID NO: 256049 - RNA, 15 nt, Barmah Forest virus
agaggaccaucucaa

SEQ ID NO: 256050 - RNA, 23 nt, Barmah Forest virus
agauaucuuaaggagcaaguacc

SEQ ID NO: 256051 - RNA, 19 nt, Barmah Forest virus
agcacagaagaagcccaag

SEQ ID NO: 256052 - RNA, 19 nt, Barmah Forest virus
agcauccaguugaaugcua

SEQ ID NO: 256053 - RNA, 17 nt, Barmah Forest virus
agcucuacaacccaagc

SEQ ID NO: 256054 - RNA, 20 nt, Barmah Forest virus
agcucuacaacccaagcaga

SEQ ID NO: 256055 - RNA, 19 nt, Barmah Forest virus
aggaccaucucaacuccaa

SEQ ID NO: 256056 - RNA, 22 nt, Barmah Forest virus
aggaccaucucaacuccaacag

SEQ ID NO: 256057 - RNA, 15 nt, Barmah Forest virus
aggagaggaccaucu

SEQ ID NO: 256058 - RNA, 18 nt, Barmah Forest virus
aguaaguauaguauuaua

SEQ ID NO: 256059 - RNA, 17 nt, Barmah Forest virus
aguccaaacccggcaaa

SEQ ID NO: 256060 - RNA, 22 nt, Barmah Forest virus
aguccagagauacauaccccaa

SEQ ID NO: 256061 - RNA, 18 nt, Barmah Forest virus
aguguagaaauaguucaa

SEQ ID NO: 256062 - RNA, 13 nt, Barmah Forest virus
auacauaccccaa

SEQ ID NO: 256063 - RNA, 16 nt, Barmah Forest virus
auaguucaaagggcca

SEQ ID NO: 256064 - RNA, 12 nt, Barmah Forest virus
augcaccaaagu

SEQ ID NO: 256065 - RNA, 17 nt, Barmah Forest virus
auguaguauuaaguaua

SEQ ID NO: 256066 - RNA, 15 nt, Barmah Forest virus
auuaguauagucaua

SEQ ID NO: 256067 - RNA, 22 nt, Barmah Forest virus
auugcacggcagaauguaucua

SEQ ID NO: 256068 - RNA, 14 nt, Barmah Forest virus
caaaaaagagcaca

SEQ ID NO: 256069 - RNA, 17 nt, Barmah Forest virus
caaaaauaguaguucaa

SEQ ID NO: 256070 - RNA, 11 nt, Barmah Forest virus
caaaaccaaaa

SEQ ID NO: 256071 - RNA, 17 nt, Barmah Forest virus
caaaagaagaaguccaa

SEQ ID NO: 256072 - RNA, 21 nt, Barmah Forest virus
caaacaaaagcagguaccaau

SEQ ID NO: 256073 - RNA, 17 nt, Barmah Forest virus
caacagcuuguggcugc

SEQ ID NO: 256074 - RNA, 20 nt, Barmah Forest virus
caacccaagcagaaacaaaa

SEQ ID NO: 256075 - RNA, 21 nt, Barmah Forest virus
caagaagacaccaccaccaaa

SEQ ID NO: 256076 - RNA, 14 nt, Barmah Forest virus
caaguaccaaauga

SEQ ID NO: 256077 - RNA, 17 nt, Barmah Forest virus
caaucuagaaaaguaga

SEQ ID NO: 256078 - RNA, 12 nt, Barmah Forest virus
caccaccaaaac

SEQ ID NO: 256079 - RNA, 14 nt, Barmah Forest virus
caccaccaaaacca

SEQ ID NO: 256080 - RNA, 21 nt, Barmah Forest virus
cagaaacaaaaaagagcacag

SEQ ID NO: 256081 - RNA, 22 nt, Barmah Forest virus
cagaggucugucuagugccaaa

SEQ ID NO: 256082 - RNA, 14 nt, Barmah Forest virus
cagcaccaguccag

SEQ ID NO: 256083 - RNA, 19 nt, Barmah Forest virus
cagcaccaguccagagaua

SEQ ID NO: 256084 - RNA, 17 nt, Barmah Forest virus
cauaccccaaccccaac

SEQ ID NO: 256085 - RNA, 14 nt, Barmah Forest virus
caucucaacuccaa

SEQ ID NO: 256086 - RNA, 15 nt, Barmah Forest virus
caucucaacuccaac

SEQ ID NO: 256087 - RNA, 13 nt, Barmah Forest virus
caugcaccaaagu

SEQ ID NO: 256088 - RNA, 23 nt, Barmah Forest virus
cauggauuucauccccacccaaa

SEQ ID NO: 256089 - RNA, 21 nt, Barmah Forest virus
ccaaaaccaaaaaagacccag

SEQ ID NO: 256090 - RNA, 21 nt, Barmah Forest virus
ccaacagcuuguggcugcauu

SEQ ID NO: 256091 - RNA, 11 nt, Barmah Forest virus
ccaacccaaaa

SEQ ID NO: 256092 - RNA, 13 nt, Barmah Forest virus
ccaacccaaaaga

SEQ ID NO: 256093 - RNA, 22 nt, Barmah Forest virus
ccaguugaaugcuaccgaauaa

SEQ ID NO: 256094 - RNA, 16 nt, Barmah Forest virus
ccugaauaguaacaaa

SEQ ID NO: 256095 - RNA, 17 nt, Barmah Forest virus
cgagaaugacugcaucu

SEQ ID NO: 256096 - RNA, 19 nt, Barmah Forest virus
cguaaguauguaguauuaa

SEQ ID NO: 256097 - RNA, 16 nt, Barmah Forest virus
cuacaacccaagcaga

SEQ ID NO: 256098 - RNA, 13 nt, Barmah Forest virus
cuacagcagagau

SEQ ID NO: 256099 - RNA, 15 nt, Barmah Forest virus
cuagaaaaaauucau

SEQ ID NO: 256100 - RNA, 18 nt, Barmah Forest virus
cucuacaacccaagcaga

SEQ ID NO: 256101 - RNA, 13 nt, Barmah Forest virus
cugaagcaaacaa

SEQ ID NO: 256102 - RNA, 20 nt, Barmah Forest virus
cugcaucuuuccggugaugc

SEQ ID NO: 256103 - RNA, 14 nt, Barmah Forest virus
gaaaccaacccaaa

SEQ ID NO: 256104 - RNA, 20 nt, Barmah Forest virus
gaaaccaacccaaaagaaga

SEQ ID NO: 256105 - RNA, 14 nt, Barmah Forest virus
gaagaagcccaaga

SEQ ID NO: 256106 - RNA, 13 nt, Barmah Forest virus
gaagaaguccaaa

SEQ ID NO: 256107 - RNA, 14 nt, Barmah Forest virus
gaagcccaagaaga

SEQ ID NO: 256108 - RNA, 21 nt, Barmah Forest virus
gaauaacguacccggugccua

SEQ ID NO: 256109 - RNA, 15 nt, Barmah Forest virus
gaauuaguauaguca

SEQ ID NO: 256110 - RNA, 17 nt, Barmah Forest virus
gaauuaguauagucaua

SEQ ID NO: 256111 - RNA, 16 nt, Barmah Forest virus
gacaccaccaccaaaa

SEQ ID NO: 256112 - RNA, 22 nt, Barmah Forest virus
gagaccagcaccaguccagaga

SEQ ID NO: 256113 - RNA, 14 nt, Barmah Forest virus
gagcaaguaccaaa

SEQ ID NO: 256114 - RNA, 22 nt, Barmah Forest virus
gagcacagaagaagcccaagaa

SEQ ID NO: 256115 - RNA, 21 nt, Barmah Forest virus
gagcauccaguugaaugcuac

SEQ ID NO: 256116 - RNA, 21 nt, Barmah Forest virus
gcagaaacaaaaaagagcaca

SEQ ID NO: 256117 - RNA, 15 nt, Barmah Forest virus
gcagguaccaaucua

SEQ ID NO: 256118 - RNA, 23 nt, Barmah Forest virus
gccauauaaccccugaauaguaa

SEQ ID NO: 256119 - RNA, 23 nt, Barmah Forest virus
gccauauuaccccugaauaguaa

SEQ ID NO: 256120 - RNA, 15 nt, Barmah Forest virus
gcccaagaagacacc

SEQ ID NO: 256121 - RNA, 18 nt, Barmah Forest virus
gcccaagaagacaccacc

SEQ ID NO: 256122 - RNA, 23 nt, Barmah Forest virus
gcccaagaagacaccaccaccaa

SEQ ID NO: 256123 - RNA, 21 nt, Barmah Forest virus
gccguaggagaggaccaucuc

SEQ ID NO: 256124 - RNA, 15 nt, Barmah Forest virus
gccuauauacucaac

SEQ ID NO: 256125 - RNA, 17 nt, Barmah Forest virus
gccuauauacucaacua

SEQ ID NO: 256126 - RNA, 20 nt, Barmah Forest virus
ggaccaucucaacuccaaca

SEQ ID NO: 256127 - RNA, 22 nt, Barmah Forest virus
ggcaaaacuagaaaaaauucau

SEQ ID NO: 256128 - RNA, 17 nt, Barmah Forest virus
guagccgaacucuacgg

SEQ ID NO: 256129 - RNA, 21 nt, Barmah Forest virus
guauagucauaguuaguguag

SEQ ID NO: 256130 - RNA, 12 nt, Barmah Forest virus
guauuaaguaua

SEQ ID NO: 256131 - RNA, 17 nt, Barmah Forest virus
guccagagauacauacc

SEQ ID NO: 256132 - RNA, 21 nt, Barmah Forest virus
uaaggagcaaguaccaaauga

SEQ ID NO: 256133 - RNA, 17 nt, Barmah Forest virus
uaaguauguaguauuaa

SEQ ID NO: 256134 - RNA, 15 nt, Barmah Forest virus
uagaaauaguucaaa

SEQ ID NO: 256135 - RNA, 20 nt, Barmah Forest virus
uagacaacuagucucggcaa

SEQ ID NO: 256136 - RNA, 18 nt, Barmah Forest virus
uaguaguucaaagggcca

SEQ ID NO: 256137 - RNA, 16 nt, Barmah Forest virus
uaguucaaagggccau

SEQ ID NO: 256138 - RNA, 23 nt, Barmah Forest virus
uauaaccccugaauaguaacaaa

SEQ ID NO: 256139 - RNA, 22 nt, Barmah Forest virus
uaucuuaaggagcaaguaccaa

SEQ ID NO: 256140 - RNA, 16 nt, Barmah Forest virus
ucaacuccaacagcuu

SEQ ID NO: 256141 - RNA, 14 nt, Barmah Forest virus
uccaaacccggcaa

SEQ ID NO: 256142 - RNA, 16 nt, Barmah Forest virus
ucuagaaaaguagaaa

SEQ ID NO: 256143 - RNA, 21 nt, Barmah Forest virus
ucugaagcaaacaaaagcagg

SEQ ID NO: 256144 - RNA, 22 nt, Barmah Forest virus
uggagaccagcaccaguccaga

SEQ ID NO: 256145 - RNA, 13 nt, Barmah Forest virus
ugggcaccgagca

SEQ ID NO: 256146 - RNA, 19 nt, Barmah Forest virus
uguaguaguaaguauagua

SEQ ID NO: 256147 - RNA, 23 nt, Barmah Forest virus
uguaguaguaaguauaguauuau

SEQ ID NO: 256148 - RNA, 23 nt, Barmah Forest virus
uguaguauuaaguauaguauuac

SEQ ID NO: 256149 - RNA, 17 nt, Barmah Forest virus
uuagaaaaacuuaauau

SEQ ID NO: 256150 - RNA, 12 nt, Barmah Forest virus
uuaguauaguca

SEQ ID NO: 256151 - RNA, 10 nt, Barmah Forest virus
aaaaccaaaa

SEQ ID NO: 256152 - RNA, 19 nt, Barmah Forest virus
aaaauucaugcaccaaagu

SEQ ID NO: 256153 - RNA, 23 nt, Barmah Forest virus
aaccaaggaagauaucuuaagga

SEQ ID NO: 256154 - RNA, 17 nt, Barmah Forest virus
aacguacccggugccua

SEQ ID NO: 256155 - RNA, 13 nt, Barmah Forest virus
aagaagcccaaga

SEQ ID NO: 256156 - RNA, 20 nt, Barmah Forest virus
aagagaaaaacacaaaaaua

SEQ ID NO: 256157 - RNA, 22 nt, Barmah Forest virus
aagauuaguuuguuauguaagu

SEQ ID NO: 256158 - RNA, 14 nt, Barmah Forest virus
aagcagguaccaau

SEQ ID NO: 256159 - RNA, 21 nt, Barmah Forest virus
aagcccaagaagacaccacca

SEQ ID NO: 256160 - RNA, 12 nt, Barmah Forest virus
aaguauaguauu

SEQ ID NO: 256161 - RNA, 15 nt, Barmah Forest virus
aaguauguaguagua

SEQ ID NO: 256162 - RNA, 14 nt, Barmah Forest virus
aaguauguaguauu

SEQ ID NO: 256163 - RNA, 21 nt, Barmah Forest virus
aaguauguaguauuaaguaua

SEQ ID NO: 256164 - RNA, 19 nt, Barmah Forest virus
aaguuggauaaaaccaagg

SEQ ID NO: 256165 - RNA, 16 nt, Barmah Forest virus
aauaguaacaaaaauc

SEQ ID NO: 256166 - RNA, 21 nt, Barmah Forest virus
aauaguaguucaaagggccau

SEQ ID NO: 256167 - RNA, 15 nt, Barmah Forest virus
aauuaguauagucau

SEQ ID NO: 256168 - RNA, 21 nt, Barmah Forest virus
aauucaugcaccaaaguugga

SEQ ID NO: 256169 - RNA, 20 nt, Barmah Forest virus
accaaucuagaaaaguagaa

SEQ ID NO: 256170 - RNA, 15 nt, Barmah Forest virus
acccagaagccuaag

SEQ ID NO: 256171 - RNA, 15 nt, Barmah Forest virus
acguaaguauguagu

SEQ ID NO: 256172 - RNA, 20 nt, Barmah Forest virus
acuagcucuacaacccaagc

SEQ ID NO: 256173 - RNA, 18 nt, Barmah Forest virus
agaaaaaauucaugcacc

SEQ ID NO: 256174 - RNA, 16 nt, Barmah Forest virus
agaaaccaacccaaaa

SEQ ID NO: 256175 - RNA, 13 nt, Barmah Forest virus
agaaauaguucaa

SEQ ID NO: 256176 - RNA, 21 nt, Barmah Forest virus
agaaauaguucaaagggccau

SEQ ID NO: 256177 - RNA, 15 nt, Barmah Forest virus
agaagaagcccaaga

SEQ ID NO: 256178 - RNA, 14 nt, Barmah Forest virus
agaggaccaucuca

SEQ ID NO: 256179 - RNA, 21 nt, Barmah Forest virus
agaggaccaucucaacuccaa

SEQ ID NO: 256180 - RNA, 20 nt, Barmah Forest virus
agaggucugucuagugccaa

SEQ ID NO: 256181 - RNA, 13 nt, Barmah Forest virus
agcaaguaccaaa

SEQ ID NO: 256182 - RNA, 22 nt, Barmah Forest virus
agcagagauccguuuuacaaaa

SEQ ID NO: 256183 - RNA, 23 nt, Barmah Forest virus
agcagagauccguuuuacaaaau

SEQ ID NO: 256184 - RNA, 17 nt, Barmah Forest virus
agccggcggguacauuu

SEQ ID NO: 256185 - RNA, 16 nt, Barmah Forest virus
agcuugcaaugcauuu

SEQ ID NO: 256186 - RNA, 14 nt, Barmah Forest virus
aguaguaaguauag

SEQ ID NO: 256187 - RNA, 16 nt, Barmah Forest virus
aguauguaguauuaag

SEQ ID NO: 256188 - RNA, 14 nt, Barmah Forest virus
aguauuaaguauag

SEQ ID NO: 256189 - RNA, 16 nt, Barmah Forest virus
aguccagagauacaua

SEQ ID NO: 256190 - RNA, 12 nt, Barmah Forest virus
auaguaguucaa

SEQ ID NO: 256191 - RNA, 16 nt, Barmah Forest virus
auaugaaagcagagau

SEQ ID NO: 256192 - RNA, 17 nt, Barmah Forest virus
auaugaaagcagagauc

SEQ ID NO: 256193 - RNA, 17 nt, Barmah Forest virus
aucuagaaaaguagaaa

SEQ ID NO: 256194 - RNA, 23 nt, Barmah Forest virus
aucuuaaggagcaaguaccaaau

SEQ ID NO: 256195 - RNA, 17 nt, Barmah Forest virus
auggauuucauccccac

SEQ ID NO: 256196 - RNA, 17 nt, Barmah Forest virus
auguaguaguaaguaua

SEQ ID NO: 256197 - RNA, 19 nt, Barmah Forest virus
auuucauccccacccaaac

SEQ ID NO: 256198 - RNA, 13 nt, Barmah Forest virus
caaaaaagaccca

SEQ ID NO: 256199 - RNA, 22 nt, Barmah Forest virus
caacccaaaagaagaaguccaa

SEQ ID NO: 256200 - RNA, 17 nt, Barmah Forest virus
caccuacagcagagauc

SEQ ID NO: 256201 - RNA, 15 nt, Barmah Forest virus
cacggcagaauguau

SEQ ID NO: 256202 - RNA, 17 nt, Barmah Forest virus
cagcaccaguccagaga

SEQ ID NO: 256203 - RNA, 21 nt, Barmah Forest virus
cagcuguuagagcuugcaaug

SEQ ID NO: 256204 - RNA, 22 nt, Barmah Forest virus
cauaccccaaccccaaccacca

SEQ ID NO: 256205 - RNA, 15 nt, Barmah Forest virus
cauccccacccaaac

SEQ ID NO: 256206 - RNA, 13 nt, Barmah Forest virus
ccaagaagacacc

SEQ ID NO: 256207 - RNA, 21 nt, Barmah Forest virus
cuaagaaaccaacccaaaaga

SEQ ID NO: 256208 - RNA, 22 nt, Barmah Forest virus
cugaagcaaacaaaagcaggua

SEQ ID NO: 256209 - RNA, 20 nt, Barmah Forest virus
cuuaaggagcaaguaccaaa

SEQ ID NO: 256210 - RNA, 12 nt, Barmah Forest virus
cuugcaaugcau

SEQ ID NO: 256211 - RNA, 21 nt, Barmah Forest virus
gaacucuacggagauguagga

SEQ ID NO: 256212 - RNA, 21 nt, Barmah Forest virus
gaacucuacggagauguaggc

SEQ ID NO: 256213 - RNA, 15 nt, Barmah Forest virus
gagaaugacugcauc

SEQ ID NO: 256214 - RNA, 20 nt, Barmah Forest virus
gagcaaguaccaaaugaaac

SEQ ID NO: 256215 - RNA, 20 nt, Barmah Forest virus
gaggucugucuagugccaaa

SEQ ID NO: 256216 - RNA, 16 nt, Barmah Forest virus
gauccguuuuacaaaa

SEQ ID NO: 256217 - RNA, 22 nt, Barmah Forest virus
gauggagaccagcaccagucca

SEQ ID NO: 256218 - RNA, 15 nt, Barmah Forest virus
gcaaguaccaaauga

SEQ ID NO: 256219 - RNA, 21 nt, Barmah Forest virus
gcacuagcucuacaacccaag

SEQ ID NO: 256220 - RNA, 22 nt, Barmah Forest virus
gcacuagcucuacaacccaagc

SEQ ID NO: 256221 - RNA, 17 nt, Barmah Forest virus
gcauccgaacucuacgg

SEQ ID NO: 256222 - RNA, 20 nt, Barmah Forest virus
gccuaagaaaccaacccaaa

SEQ ID NO: 256223 - RNA, 21 nt, Barmah Forest virus
gccuaagaaaccaacccaaaa

SEQ ID NO: 256224 - RNA, 15 nt, Barmah Forest virus
gcucuacaacccaag

SEQ ID NO: 256225 - RNA, 22 nt, Barmah Forest virus
gcugcauugggcgcacuagcuc

SEQ ID NO: 256226 - RNA, 23 nt, Barmah Forest virus
ggagaccagcaccaguccagaga

SEQ ID NO: 256227 - RNA, 18 nt, Barmah Forest virus
ggagcaaguaccaaauga

SEQ ID NO: 256228 - RNA, 21 nt, Barmah Forest virus
ggauuucauccccacccaaac

SEQ ID NO: 256229 - RNA, 21 nt, Barmah Forest virus
gguagacgauggagaccagca

SEQ ID NO: 256230 - RNA, 12 nt, Barmah Forest virus
guaaguauagua

SEQ ID NO: 256231 - RNA, 12 nt, Barmah Forest virus
guaaguauguag

SEQ ID NO: 256232 - RNA, 22 nt, Barmah Forest virus
guagaaaauaugaaagcagaga

SEQ ID NO: 256233 - RNA, 21 nt, Barmah Forest virus
guagacgauggagaccagcac

SEQ ID NO: 256234 - RNA, 15 nt, Barmah Forest virus
guauaguauuacagg

SEQ ID NO: 256235 - RNA, 19 nt, Barmah Forest virus
guauguaguaguaaguaua

SEQ ID NO: 256236 - RNA, 12 nt, Barmah Forest virus
uaaaaccaagga

SEQ ID NO: 256237 - RNA, 20 nt, Barmah Forest virus
uaagaaaccaacccaaaaga

SEQ ID NO: 256238 - RNA, 15 nt, Barmah Forest virus
uaaguauaguauuau

SEQ ID NO: 256239 - RNA, 13 nt, Barmah Forest virus
uaaguauguagua

SEQ ID NO: 256240 - RNA, 13 nt, Barmah Forest virus
uacaaaauugcac

SEQ ID NO: 256241 - RNA, 13 nt, Barmah Forest virus
uacguaaguaugu

SEQ ID NO: 256242 - RNA, 21 nt, Barmah Forest virus
uaguucaaagggccauauuac

SEQ ID NO: 256243 - RNA, 12 nt, Barmah Forest virus
uaugaaagcaga

SEQ ID NO: 256244 - RNA, 23 nt, Barmah Forest virus
uauuaccccugaauaguaacaaa

SEQ ID NO: 256245 - RNA, 23 nt, Barmah Forest virus
ucaaagggccauauaaccccuga

SEQ ID NO: 256246 - RNA, 23 nt, Barmah Forest virus
ucaaagggccauauuaccccuga

SEQ ID NO: 256247 - RNA, 22 nt, Barmah Forest virus
ucaaauucugccgaaccccaga

SEQ ID NO: 256248 - RNA, 21 nt, Barmah Forest virus
uccguuuuacaaaauugcacg

SEQ ID NO: 256249 - RNA, 14 nt, Barmah Forest virus
ucuagugccaaaac

SEQ ID NO: 256250 - RNA, 16 nt, Barmah Forest virus
ucucaacuccaacagc

SEQ ID NO: 256251 - RNA, 18 nt, Barmah Forest virus
ucugaagcaaacaaaagc

SEQ ID NO: 256252 - RNA, 20 nt, Barmah Forest virus
ucuuaaggagcaaguaccaa

SEQ ID NO: 256253 - RNA, 20 nt, Barmah Forest virus
ugcauugggcgcacuagcuc

SEQ ID NO: 256254 - RNA, 19 nt, Barmah Forest virus
uguaguauuaaguauagua

SEQ ID NO: 256255 - RNA, 18 nt, Barmah Forest virus
uguaucuacgaaccggca

SEQ ID NO: 256256 - RNA, 16 nt, Barmah Forest virus
uguuauguaaguaugu

SEQ ID NO: 256257 - RNA, 23 nt, Barmah Forest virus
uuaaggagcaaguaccaaaugaa

SEQ ID NO: 256258 - RNA, 12 nt, Barmah Forest virus
uuaaguauagua

SEQ ID NO: 256259 - RNA, 14 nt, Barmah Forest virus
uucaaagggccaua

SEQ ID NO: 256260 - RNA, 15 nt, Barmah Forest virus
uuuagaaaaacuuaa

SEQ ID NO: 256261 - RNA, 12 nt, BK polyomavirus
aaaaaguauaca

SEQ ID NO: 256262 - RNA, 13 nt, BK polyomavirus
aaaaauauucugu

SEQ ID NO: 256263 - RNA, 14 nt, BK polyomavirus
aaaaauauucugua

SEQ ID NO: 256264 - RNA, 22 nt, BK polyomavirus
aaaaccuuaggggcuuuagucu

SEQ ID NO: 256265 - RNA, 14 nt, BK polyomavirus
aaaagcaccuguuu

SEQ ID NO: 256266 - RNA, 17 nt, BK polyomavirus
aaaagcaccuguuuaaa

SEQ ID NO: 256267 - RNA, 15 nt, BK polyomavirus
aaaagcagcauuuau

SEQ ID NO: 256268 - RNA, 19 nt, BK polyomavirus
aaaagcagcauuuauuaaa

SEQ ID NO: 256269 - RNA, 13 nt, BK polyomavirus
aaaagugcaugag

SEQ ID NO: 256270 - RNA, 23 nt, BK polyomavirus
aaaaguggcuuauacaaaagcag

SEQ ID NO: 256271 - RNA, 13 nt, BK polyomavirus
aaaauauucugua

SEQ ID NO: 256272 - RNA, 19 nt, BK polyomavirus
aaaaugcuucccuguuaca

SEQ ID NO: 256273 - RNA, 19 nt, BK polyomavirus
aaaaugggaugaagauuua

SEQ ID NO: 256274 - RNA, 23 nt, BK polyomavirus
aaacauacaggcuaucagcuuua

SEQ ID NO: 256275 - RNA, 15 nt, BK polyomavirus
aaacuguuaguggua

SEQ ID NO: 256276 - RNA, 22 nt, BK polyomavirus
aaagcaccuguuuaaagcauuu

SEQ ID NO: 256277 - RNA, 20 nt, BK polyomavirus
aaagcucaaauucuguauaa

SEQ ID NO: 256278 - RNA, 12 nt, BK polyomavirus
aaaggcccuaag

SEQ ID NO: 256279 - RNA, 21 nt, BK polyomavirus
aaagguagaagacccuaaaga

SEQ ID NO: 256280 - RNA, 13 nt, BK polyomavirus
aaaguauacauac

SEQ ID NO: 256281 - RNA, 22 nt, BK polyomavirus
aaauaucuugcaaggccucucc

SEQ ID NO: 256282 - RNA, 17 nt, BK polyomavirus
aaaugacuuuagcagug

SEQ ID NO: 256283 - RNA, 18 nt, BK polyomavirus
aaaugcuucccuguuaca

SEQ ID NO: 256284 - RNA, 21 nt, BK polyomavirus
aaauugcaucccuugcuacug

SEQ ID NO: 256285 - RNA, 11 nt, BK polyomavirus
aaauugcugcu

SEQ ID NO: 256286 - RNA, 14 nt, BK polyomavirus
aacaaguaccucag

SEQ ID NO: 256287 - RNA, 22 nt, BK polyomavirus
aacaauucuagauuguauauca

SEQ ID NO: 256288 - RNA, 19 nt, BK polyomavirus
aacagagguuauuggaaua

SEQ ID NO: 256289 - RNA, 21 nt, BK polyomavirus
aacauacaggcuaucagcuuu

SEQ ID NO: 256290 - RNA, 22 nt, BK polyomavirus
aacauaugcuguaauugcuggu

SEQ ID NO: 256291 - RNA, 17 nt, BK polyomavirus
aaccuauucaaggcagu

SEQ ID NO: 256292 - RNA, 15 nt, BK polyomavirus
aaccuucaugcaggg

SEQ ID NO: 256293 - RNA, 23 nt, BK polyomavirus
aacuccucaaacauaugcuguaa

SEQ ID NO: 256294 - RNA, 19 nt, BK polyomavirus
aacuguacaaacagagguu

SEQ ID NO: 256295 - RNA, 17 nt, BK polyomavirus
aagauuuauuuugccau

SEQ ID NO: 256296 - RNA, 20 nt, BK polyomavirus
aagcaacagcagauucucaa

SEQ ID NO: 256297 - RNA, 12 nt, BK polyomavirus
aagcagcauuua

SEQ ID NO: 256298 - RNA, 14 nt, BK polyomavirus
aagcuaagugcuga

SEQ ID NO: 256299 - RNA, 14 nt, BK polyomavirus
aaggauucuuuaca

SEQ ID NO: 256300 - RNA, 21 nt, BK polyomavirus
aagguagaagacccuaaagac

SEQ ID NO: 256301 - RNA, 16 nt, BK polyomavirus
aagucuuucugugcca

SEQ ID NO: 256302 - RNA, 18 nt, BK polyomavirus
aagucuuucugugccauc

SEQ ID NO: 256303 - RNA, 15 nt, BK polyomavirus
aaguucaaauugcau

SEQ ID NO: 256304 - RNA, 15 nt, BK polyomavirus
aaguuuccacuguag

SEQ ID NO: 256305 - RNA, 13 nt, BK polyomavirus
aauaaaagcaccu

SEQ ID NO: 256306 - RNA, 13 nt, BK polyomavirus
aauaaaugcugcu

SEQ ID NO: 256307 - RNA, 21 nt, BK polyomavirus
aauacauuuccccaugcauau

SEQ ID NO: 256308 - RNA, 18 nt, BK polyomavirus
aauagaacccuugccugc

SEQ ID NO: 256309 - RNA, 15 nt, BK polyomavirus
aauaucaagaauaca

SEQ ID NO: 256310 - RNA, 14 nt, BK polyomavirus
aauaucagcagcug

SEQ ID NO: 256311 - RNA, 22 nt, BK polyomavirus
aauaucagcagcugaaacauac

SEQ ID NO: 256312 - RNA, 20 nt, BK polyomavirus
aauccagccuuuccuuccau

SEQ ID NO: 256313 - RNA, 22 nt, BK polyomavirus
aauccagccuuuccuuccauuc

SEQ ID NO: 256314 - RNA, 16 nt, BK polyomavirus
aaugcagggagugcua

SEQ ID NO: 256315 - RNA, 17 nt, BK polyomavirus
aauguauauguacaaua

SEQ ID NO: 256316 - RNA, 19 nt, BK polyomavirus
aauucuagauuguauauca

SEQ ID NO: 256317 - RNA, 19 nt, BK polyomavirus
aauugcaucccuugcuacu

SEQ ID NO: 256318 - RNA, 13 nt, BK polyomavirus
acaaaaagugcau

SEQ ID NO: 256319 - RNA, 13 nt, BK polyomavirus
acaaauaucagca

SEQ ID NO: 256320 - RNA, 22 nt, BK polyomavirus
acaauaaaagcaccuguuuaaa

SEQ ID NO: 256321 - RNA, 22 nt, BK polyomavirus
acaauucuagauuguauaucag

SEQ ID NO: 256322 - RNA, 23 nt, BK polyomavirus
acaauucuagauuguauaucagu

SEQ ID NO: 256323 - RNA, 21 nt, BK polyomavirus
acacaaaugcaacucuugacu

SEQ ID NO: 256324 - RNA, 18 nt, BK polyomavirus
acaggccacaaauaucag

SEQ ID NO: 256325 - RNA, 16 nt, BK polyomavirus
acaggcuaucagcuuu

SEQ ID NO: 256326 - RNA, 14 nt, BK polyomavirus
acauacuuaucuca

SEQ ID NO: 256327 - RNA, 15 nt, BK polyomavirus
acauacuuaucucag

SEQ ID NO: 256328 - RNA, 16 nt, BK polyomavirus
acauacuuaucucaga

SEQ ID NO: 256329 - RNA, 19 nt, BK polyomavirus
acauuuaauaaaugcugcu

SEQ ID NO: 256330 - RNA, 18 nt, BK polyomavirus
acauuuccccaugcauau

SEQ ID NO: 256331 - RNA, 19 nt, BK polyomavirus
accacccaaaaaaaaaaga

SEQ ID NO: 256332 - RNA, 11 nt, BK polyomavirus
acccuaaagac

SEQ ID NO: 256333 - RNA, 18 nt, BK polyomavirus
accuaguugccaguguau

SEQ ID NO: 256334 - RNA, 16 nt, BK polyomavirus
accuauucaaggcagu

SEQ ID NO: 256335 - RNA, 15 nt, BK polyomavirus
accucagaggcuaua

SEQ ID NO: 256336 - RNA, 19 nt, BK polyomavirus
accucagaggcuauagcug

SEQ ID NO: 256337 - RNA, 22 nt, BK polyomavirus
accucagaggcuauagcugcua

SEQ ID NO: 256338 - RNA, 23 nt, BK polyomavirus
accucagaggcuauagcugcuau

SEQ ID NO: 256339 - RNA, 21 nt, BK polyomavirus
acuccucaaacauaugcugua

SEQ ID NO: 256340 - RNA, 22 nt, BK polyomavirus
acugaugugggaggcuguaacu

SEQ ID NO: 256341 - RNA, 13 nt, BK polyomavirus
acuuaucucagaa

SEQ ID NO: 256342 - RNA, 17 nt, BK polyomavirus
acuuucccucugaucua

SEQ ID NO: 256343 - RNA, 21 nt, BK polyomavirus
agaacccuugccugcuuugcu

SEQ ID NO: 256344 - RNA, 21 nt, BK polyomavirus
agaacccuuggaaaugcaggg

SEQ ID NO: 256345 - RNA, 19 nt, BK polyomavirus
agagaaaaaugcuucccug

SEQ ID NO: 256346 - RNA, 18 nt, BK polyomavirus
agaggcuauagcugcuau

SEQ ID NO: 256347 - RNA, 19 nt, BK polyomavirus
agaggcuauagcugcuaua

SEQ ID NO: 256348 - RNA, 22 nt, BK polyomavirus
agagggcauaacaaguaccuca

SEQ ID NO: 256349 - RNA, 19 nt, BK polyomavirus
agauauguuugccagugau

SEQ ID NO: 256350 - RNA, 14 nt, BK polyomavirus
agauucucaacacu

SEQ ID NO: 256351 - RNA, 21 nt, BK polyomavirus
agauuuauuuugccaugaaga

SEQ ID NO: 256352 - RNA, 18 nt, BK polyomavirus
agcagcugaaacauacag

SEQ ID NO: 256353 - RNA, 23 nt, BK polyomavirus
agcaggggcugaaguaucugaga

SEQ ID NO: 256354 - RNA, 17 nt, BK polyomavirus
agcauuuugguuugcaa

SEQ ID NO: 256355 - RNA, 22 nt, BK polyomavirus
agccacuuuuaagcuuguguua

SEQ ID NO: 256356 - RNA, 18 nt, BK polyomavirus
agccuuuccuuccauuca

SEQ ID NO: 256357 - RNA, 15 nt, BK polyomavirus
agcucaaauucugua

SEQ ID NO: 256358 - RNA, 18 nt, BK polyomavirus
agcugaaacauacaggcu

SEQ ID NO: 256359 - RNA, 18 nt, BK polyomavirus
agcuguauuuaguaauag

SEQ ID NO: 256360 - RNA, 21 nt, BK polyomavirus
agcuuaaaaguggcuuauaca

SEQ ID NO: 256361 - RNA, 13 nt, BK polyomavirus
agcuuuacaaaga

SEQ ID NO: 256362 - RNA, 15 nt, BK polyomavirus
aggcccuaaguaauu

SEQ ID NO: 256363 - RNA, 14 nt, BK polyomavirus
aggccuaacuccuc

SEQ ID NO: 256364 - RNA, 17 nt, BK polyomavirus
aggccuuuuaaaacacu

SEQ ID NO: 256365 - RNA, 15 nt, BK polyomavirus
aggcuauagcugcua

SEQ ID NO: 256366 - RNA, 16 nt, BK polyomavirus
aggcuauagcugcuau

SEQ ID NO: 256367 - RNA, 17 nt, BK polyomavirus
aggcuaucagcuuuaca

SEQ ID NO: 256368 - RNA, 12 nt, BK polyomavirus
aggcugcugcug

SEQ ID NO: 256369 - RNA, 16 nt, BK polyomavirus
aggcugcugcugccac

SEQ ID NO: 256370 - RNA, 21 nt, BK polyomavirus
aggcugcugcugcuauagaag

SEQ ID NO: 256371 - RNA, 16 nt, BK polyomavirus
aggcuguaacuguaca

SEQ ID NO: 256372 - RNA, 18 nt, BK polyomavirus
agguucaugggugcugcu

SEQ ID NO: 256373 - RNA, 19 nt, BK polyomavirus
agguucaugggugcugcuc

SEQ ID NO: 256374 - RNA, 20 nt, BK polyomavirus
agguucaugggugcugcucu

SEQ ID NO: 256375 - RNA, 22 nt, BK polyomavirus
agguucaugggugcugcucuag

SEQ ID NO: 256376 - RNA, 21 nt, BK polyomavirus
agugaugaagaagcaacagca

SEQ ID NO: 256377 - RNA, 20 nt, BK polyomavirus
agugcuaaugaauuacaggu

SEQ ID NO: 256378 - RNA, 20 nt, BK polyomavirus
aguggcugaaauugcugcug

SEQ ID NO: 256379 - RNA, 15 nt, BK polyomavirus
auacaaaagcagcau

SEQ ID NO: 256380 - RNA, 19 nt, BK polyomavirus
auacaaaagcagcauuuau

SEQ ID NO: 256381 - RNA, 17 nt, BK polyomavirus
auacauacuuaucucag

SEQ ID NO: 256382 - RNA, 22 nt, BK polyomavirus
auacauacuuaucucagaaucc

SEQ ID NO: 256383 - RNA, 18 nt, BK polyomavirus
auacauuuccccaugcau

SEQ ID NO: 256384 - RNA, 22 nt, BK polyomavirus
auacuacuaaagaaaaagcuca

SEQ ID NO: 256385 - RNA, 13 nt, BK polyomavirus
auacuuaucucag

SEQ ID NO: 256386 - RNA, 21 nt, BK polyomavirus
auagaaguucaaauugcaucc

SEQ ID NO: 256387 - RNA, 22 nt, BK polyomavirus
auagcccagagagaaaaaugcu

SEQ ID NO: 256388 - RNA, 12 nt, BK polyomavirus
auagcugcuaua

SEQ ID NO: 256389 - RNA, 18 nt, BK polyomavirus
auaucaagaauacauuuc

SEQ ID NO: 256390 - RNA, 22 nt, BK polyomavirus
auaucagcagcugaaacauaca

SEQ ID NO: 256391 - RNA, 12 nt, BK polyomavirus
auaucaguugca

SEQ ID NO: 256392 - RNA, 16 nt, BK polyomavirus
auaucaguugcaaaau

SEQ ID NO: 256393 - RNA, 21 nt, BK polyomavirus
auaucaguugcaaaaucagcu

SEQ ID NO: 256394 - RNA, 18 nt, BK polyomavirus
auauguacaauaaaagca

SEQ ID NO: 256395 - RNA, 13 nt, BK polyomavirus
auauguuugccag

SEQ ID NO: 256396 - RNA, 14 nt, BK polyomavirus
auauuauauuucau

SEQ ID NO: 256397 - RNA, 16 nt, BK polyomavirus
aucacaaaguuuccac

SEQ ID NO: 256398 - RNA, 23 nt, BK polyomavirus
auccucuucucuuguaauaucaa

SEQ ID NO: 256399 - RNA, 19 nt, BK polyomavirus
auccuugaaaaaguauaca

SEQ ID NO: 256400 - RNA, 20 nt, BK polyomavirus
auccuugaaaaaguauacau

SEQ ID NO: 256401 - RNA, 14 nt, BK polyomavirus
aucucagaauccag

SEQ ID NO: 256402 - RNA, 14 nt, BK polyomavirus
aucugaggcugcug

SEQ ID NO: 256403 - RNA, 17 nt, BK polyomavirus
aucugaggcugcugcug

SEQ ID NO: 256404 - RNA, 12 nt, BK polyomavirus
augacuuuagca

SEQ ID NO: 256405 - RNA, 16 nt, BK polyomavirus
augaggaccuaaccug

SEQ ID NO: 256406 - RNA, 16 nt, BK polyomavirus
augcagggagugcuaa

SEQ ID NO: 256407 - RNA, 17 nt, BK polyomavirus
augcagggagugcuaau

SEQ ID NO: 256408 - RNA, 18 nt, BK polyomavirus
augcagggagugcuaaug

SEQ ID NO: 256409 - RNA, 16 nt, BK polyomavirus
augcagggucacaaaa

SEQ ID NO: 256410 - RNA, 23 nt, BK polyomavirus
augcugcuuuuguauaagccacu

SEQ ID NO: 256411 - RNA, 18 nt, BK polyomavirus
auggaaaaauauucugua

SEQ ID NO: 256412 - RNA, 12 nt, BK polyomavirus
augggaugaaga

SEQ ID NO: 256413 - RNA, 13 nt, BK polyomavirus
augggugcugcuc

SEQ ID NO: 256414 - RNA, 16 nt, BK polyomavirus
auguauauguacaaua

SEQ ID NO: 256415 - RNA, 14 nt, BK polyomavirus
auuauauuucaucc

SEQ ID NO: 256416 - RNA, 15 nt, BK polyomavirus
auucaacaauucuag

SEQ ID NO: 256417 - RNA, 23 nt, BK polyomavirus
auucagugcuugauccaugucca

SEQ ID NO: 256418 - RNA, 12 nt, BK polyomavirus
auuccauaccau

SEQ ID NO: 256419 - RNA, 14 nt, BK polyomavirus
auuccauaccauac

SEQ ID NO: 256420 - RNA, 12 nt, BK polyomavirus
auucucaacacu

SEQ ID NO: 256421 - RNA, 14 nt, BK polyomavirus
auucucaacacuca

SEQ ID NO: 256422 - RNA, 11 nt, BK polyomavirus
auucuuuacag

SEQ ID NO: 256423 - RNA, 18 nt, BK polyomavirus
auugcuggugcuccuggg

SEQ ID NO: 256424 - RNA, 23 nt, BK polyomavirus
auugcuggugcuccuggggcuau

SEQ ID NO: 256425 - RNA, 21 nt, BK polyomavirus
auugggaucacaaaguuucca

SEQ ID NO: 256426 - RNA, 18 nt, BK polyomavirus
auuuaauaaaugcugcuu

SEQ ID NO: 256427 - RNA, 15 nt, BK polyomavirus
auuuauuuugccaug

SEQ ID NO: 256428 - RNA, 17 nt, BK polyomavirus
auuucauccuugaaaaa

SEQ ID NO: 256429 - RNA, 20 nt, BK polyomavirus
auuuccccaugcauauauua

SEQ ID NO: 256430 - RNA, 12 nt, BK polyomavirus
caaaaagugcau

SEQ ID NO: 256431 - RNA, 15 nt, BK polyomavirus
caaacauaugcugua

SEQ ID NO: 256432 - RNA, 16 nt, BK polyomavirus
caaacauaugcuguaa

SEQ ID NO: 256433 - RNA, 17 nt, BK polyomavirus
caaaguuuccacuguag

SEQ ID NO: 256434 - RNA, 13 nt, BK polyomavirus
caaccuauggaac

SEQ ID NO: 256435 - RNA, 19 nt, BK polyomavirus
caaccuauggaacagaaga

SEQ ID NO: 256436 - RNA, 21 nt, BK polyomavirus
caagaauacauuuccccaugc

SEQ ID NO: 256437 - RNA, 22 nt, BK polyomavirus
caagaauacauuuccccaugca

SEQ ID NO: 256438 - RNA, 23 nt, BK polyomavirus
caagaauacauuuccccaugcau

SEQ ID NO: 256439 - RNA, 15 nt, BK polyomavirus
caaggccucuccacu

SEQ ID NO: 256440 - RNA, 19 nt, BK polyomavirus
caaguaccucagaggcuau

SEQ ID NO: 256441 - RNA, 20 nt, BK polyomavirus
caauucuagauuguauauca

SEQ ID NO: 256442 - RNA, 22 nt, BK polyomavirus
caauugucccuguuugucaaua

SEQ ID NO: 256443 - RNA, 16 nt, BK polyomavirus
cacaaaaagugcauga

SEQ ID NO: 256444 - RNA, 18 nt, BK polyomavirus
cagaggcuauagcugcua

SEQ ID NO: 256445 - RNA, 19 nt, BK polyomavirus
cagagguagaaugcuuccu

SEQ ID NO: 256446 - RNA, 14 nt, BK polyomavirus
cagaugaaaaccuu

SEQ ID NO: 256447 - RNA, 15 nt, BK polyomavirus
cagaugaaaaccuua

SEQ ID NO: 256448 - RNA, 23 nt, BK polyomavirus
cagcaggggcugaaguaucugag

SEQ ID NO: 256449 - RNA, 13 nt, BK polyomavirus
cagcugaaacaua

SEQ ID NO: 256450 - RNA, 15 nt, BK polyomavirus
cagcugaaacauaca

SEQ ID NO: 256451 - RNA, 23 nt, BK polyomavirus
caggcggaucuuaaaauaucuug

SEQ ID NO: 256452 - RNA, 19 nt, BK polyomavirus
caggcuaucagcuuuacaa

SEQ ID NO: 256453 - RNA, 14 nt, BK polyomavirus
cagggagugcuaau

SEQ ID NO: 256454 - RNA, 15 nt, BK polyomavirus
cagggagugcuaaug

SEQ ID NO: 256455 - RNA, 17 nt, BK polyomavirus
cagggagugcuaaugaa

SEQ ID NO: 256456 - RNA, 20 nt, BK polyomavirus
cagggagugcuaaugaauua

SEQ ID NO: 256457 - RNA, 20 nt, BK polyomavirus
cagugaugaagaagcaacag

SEQ ID NO: 256458 - RNA, 17 nt, BK polyomavirus
cagugcuugauccaugu

SEQ ID NO: 256459 - RNA, 19 nt, BK polyomavirus
cagugcuugauccaugucc

SEQ ID NO: 256460 - RNA, 21 nt, BK polyomavirus
caguggcugaaauugcugcug

SEQ ID NO: 256461 - RNA, 19 nt, BK polyomavirus
cauaggcugcccauccacu

SEQ ID NO: 256462 - RNA, 12 nt, BK polyomavirus
cauauacauuua

SEQ ID NO: 256463 - RNA, 15 nt, BK polyomavirus
caucccuugcuacug

SEQ ID NO: 256464 - RNA, 20 nt, BK polyomavirus
cauccuugaaaaaguauaca

SEQ ID NO: 256465 - RNA, 11 nt, BK polyomavirus
caugcauauau

SEQ ID NO: 256466 - RNA, 15 nt, BK polyomavirus
caugcuuaaccuuca

SEQ ID NO: 256467 - RNA, 13 nt, BK polyomavirus
caugggugcugcu

SEQ ID NO: 256468 - RNA, 18 nt, BK polyomavirus
cauuuaauaaaugcugcu

SEQ ID NO: 256469 - RNA, 16 nt, BK polyomavirus
ccacaaauaucagcag

SEQ ID NO: 256470 - RNA, 21 nt, BK polyomavirus
ccagagagaaaaaugcuuccc

SEQ ID NO: 256471 - RNA, 17 nt, BK polyomavirus
ccagaugaaaaccuuag

SEQ ID NO: 256472 - RNA, 21 nt, BK polyomavirus
ccagccuuuccuuccauucaa

SEQ ID NO: 256473 - RNA, 22 nt, BK polyomavirus
ccaugcauauauuauauuucau

SEQ ID NO: 256474 - RNA, 15 nt, BK polyomavirus
cccagagagaaaaau

SEQ ID NO: 256475 - RNA, 20 nt, BK polyomavirus
cccagagagaaaaaugcuuc

SEQ ID NO: 256476 - RNA, 23 nt, BK polyomavirus
cccuggaagucuuucugugccau

SEQ ID NO: 256477 - RNA, 20 nt, BK polyomavirus
ccucuucucuuguaauauca

SEQ ID NO: 256478 - RNA, 21 nt, BK polyomavirus
ccugggauuccauaccauaca

SEQ ID NO: 256479 - RNA, 17 nt, BK polyomavirus
ccuguuuaaagcauuuu

SEQ ID NO: 256480 - RNA, 12 nt, BK polyomavirus
ccuuagcucaag

SEQ ID NO: 256481 - RNA, 19 nt, BK polyomavirus
ccuugaaaaaguauacaua

SEQ ID NO: 256482 - RNA, 20 nt, BK polyomavirus
ccuugaaaaaguauacauac

SEQ ID NO: 256483 - RNA, 22 nt, BK polyomavirus
ccuuuacacaaaugcaacucuu

SEQ ID NO: 256484 - RNA, 21 nt, BK polyomavirus
ccuuuccuuccauucaacaau

SEQ ID NO: 256485 - RNA, 14 nt, BK polyomavirus
ccuuuuaaaacacu

SEQ ID NO: 256486 - RNA, 17 nt, BK polyomavirus
cggaucuuaaaauaucu

SEQ ID NO: 256487 - RNA, 17 nt, BK polyomavirus
cuaacuccucaaacaua

SEQ ID NO: 256488 - RNA, 21 nt, BK polyomavirus
cuaagugcugaaaaugacuuu

SEQ ID NO: 256489 - RNA, 18 nt, BK polyomavirus
cuaaugaauuacagguca

SEQ ID NO: 256490 - RNA, 22 nt, BK polyomavirus
cuaccugggauuccauaccaua

SEQ ID NO: 256491 - RNA, 14 nt, BK polyomavirus
cuacuguagagggc

SEQ ID NO: 256492 - RNA, 16 nt, BK polyomavirus
cuacuguagagggcau

SEQ ID NO: 256493 - RNA, 21 nt, BK polyomavirus
cuacuguagagggcauaacaa

SEQ ID NO: 256494 - RNA, 21 nt, BK polyomavirus
cuauagaaguucaaauugcau

SEQ ID NO: 256495 - RNA, 14 nt, BK polyomavirus
cuauagcugcuaua

SEQ ID NO: 256496 - RNA, 15 nt, BK polyomavirus
cuauagcugcuauag

SEQ ID NO: 256497 - RNA, 18 nt, BK polyomavirus
cuauagcugcuauaggcc

SEQ ID NO: 256498 - RNA, 19 nt, BK polyomavirus
cuaucagcuuuacaaagag

SEQ ID NO: 256499 - RNA, 19 nt, BK polyomavirus
cuauugcuggguuugcugc

SEQ ID NO: 256500 - RNA, 23 nt, BK polyomavirus
cucagaggcuauagcugcuauag

SEQ ID NO: 256501 - RNA, 21 nt, BK polyomavirus
cuccucaaacauaugcuguaa

SEQ ID NO: 256502 - RNA, 18 nt, BK polyomavirus
cucuaucagcaaucaggc

SEQ ID NO: 256503 - RNA, 14 nt, BK polyomavirus
cugaaauugcugcu

SEQ ID NO: 256504 - RNA, 15 nt, BK polyomavirus
cugaggcugcugcug

SEQ ID NO: 256505 - RNA, 17 nt, BK polyomavirus
cugcccauccacucucu

SEQ ID NO: 256506 - RNA, 10 nt, BK polyomavirus
cugcugcuau

SEQ ID NO: 256507 - RNA, 21 nt, BK polyomavirus
cugcugcuauagaaguucaaa

SEQ ID NO: 256508 - RNA, 13 nt, BK polyomavirus
cugcugcugcuau

SEQ ID NO: 256509 - RNA, 15 nt, BK polyomavirus
cugcugcugcuauag

SEQ ID NO: 256510 - RNA, 16 nt, BK polyomavirus
cugcugcugcuauaga

SEQ ID NO: 256511 - RNA, 18 nt, BK polyomavirus
cugcuggggaggcugcug

SEQ ID NO: 256512 - RNA, 12 nt, BK polyomavirus
cuggugcuccug

SEQ ID NO: 256513 - RNA, 15 nt, BK polyomavirus
cuguuacagcacagc

SEQ ID NO: 256514 - RNA, 12 nt, BK polyomavirus
cuguuugucaau

SEQ ID NO: 256515 - RNA, 21 nt, BK polyomavirus
cuguuugucaauauaucuuau

SEQ ID NO: 256516 - RNA, 17 nt, BK polyomavirus
cuuaaccuucaugcagg

SEQ ID NO: 256517 - RNA, 12 nt, BK polyomavirus
cuuagcaaaaag

SEQ ID NO: 256518 - RNA, 17 nt, BK polyomavirus
cuuagcucaaguagggu

SEQ ID NO: 256519 - RNA, 14 nt, BK polyomavirus
cuuaggggcuuuag

SEQ ID NO: 256520 - RNA, 17 nt, BK polyomavirus
cuuauacaaaagcagca

SEQ ID NO: 256521 - RNA, 22 nt, BK polyomavirus
cuuauacaaaagcagcauuuau

SEQ ID NO: 256522 - RNA, 23 nt, BK polyomavirus
cuuaucucagaauccagccuuuc

SEQ ID NO: 256523 - RNA, 14 nt, BK polyomavirus
cuugauccaugucc

SEQ ID NO: 256524 - RNA, 14 nt, BK polyomavirus
cuugcuacuguaga

SEQ ID NO: 256525 - RNA, 13 nt, BK polyomavirus
cuuggaaaugcag

SEQ ID NO: 256526 - RNA, 14 nt, BK polyomavirus
cuuggaaaugcagg

SEQ ID NO: 256527 - RNA, 23 nt, BK polyomavirus
cuuggaaaugcagggagugcuaa

SEQ ID NO: 256528 - RNA, 16 nt, BK polyomavirus
cuuguaauaucaagaa

SEQ ID NO: 256529 - RNA, 21 nt, BK polyomavirus
cuuuagcagugauagcccaga

SEQ ID NO: 256530 - RNA, 22 nt, BK polyomavirus
cuuugaugauugggaucacaaa

SEQ ID NO: 256531 - RNA, 19 nt, BK polyomavirus
gaaaaagcucaaauucugu

SEQ ID NO: 256532 - RNA, 14 nt, BK polyomavirus
gaaaaauauucugu

SEQ ID NO: 256533 - RNA, 16 nt, BK polyomavirus
gaaaaauauucuguaa

SEQ ID NO: 256534 - RNA, 15 nt, BK polyomavirus
gaaacauacaggcua

SEQ ID NO: 256535 - RNA, 16 nt, BK polyomavirus
gaagaagcaacagcag

SEQ ID NO: 256536 - RNA, 17 nt, BK polyomavirus
gaagucuuucugugcca

SEQ ID NO: 256537 - RNA, 23 nt, BK polyomavirus
gaagucuuucugugccaucaaac

SEQ ID NO: 256538 - RNA, 14 nt, BK polyomavirus
gaauccagccuuuc

SEQ ID NO: 256539 - RNA, 23 nt, BK polyomavirus
gaauccucuucucuuguaauauc

SEQ ID NO: 256540 - RNA, 19 nt, BK polyomavirus
gaccuaguugccaguguau

SEQ ID NO: 256541 - RNA, 22 nt, BK polyomavirus
gagcaugguggaggaaaaccua

SEQ ID NO: 256542 - RNA, 20 nt, BK polyomavirus
gagcuguuaguaaacaggcc

SEQ ID NO: 256543 - RNA, 15 nt, BK polyomavirus
gaggcuauagcugcu

SEQ ID NO: 256544 - RNA, 17 nt, BK polyomavirus
gaggcuauagcugcuau

SEQ ID NO: 256545 - RNA, 16 nt, BK polyomavirus
gaggcugcugcugcua

SEQ ID NO: 256546 - RNA, 17 nt, BK polyomavirus
gaggcugcugcugcuau

SEQ ID NO: 256547 - RNA, 22 nt, BK polyomavirus
gagggcauaacaaguaccucag

SEQ ID NO: 256548 - RNA, 15 nt, BK polyomavirus
gagucuucaguuucu

SEQ ID NO: 256549 - RNA, 13 nt, BK polyomavirus
gauauguuugcca

SEQ ID NO: 256550 - RNA, 21 nt, BK polyomavirus
gaucuuaaaauaucuugcaag

SEQ ID NO: 256551 - RNA, 15 nt, BK polyomavirus
gauucucaacacuca

SEQ ID NO: 256552 - RNA, 12 nt, BK polyomavirus
gauucuuuacag

SEQ ID NO: 256553 - RNA, 19 nt, BK polyomavirus
gcaaggccucuccacuguu

SEQ ID NO: 256554 - RNA, 20 nt, BK polyomavirus
gcaccuguuuaaagcauuuu

SEQ ID NO: 256555 - RNA, 18 nt, BK polyomavirus
gcagauucucaacacuca

SEQ ID NO: 256556 - RNA, 13 nt, BK polyomavirus
gcagggucacaaa

SEQ ID NO: 256557 - RNA, 22 nt, BK polyomavirus
gccaguguaucugaggcugcug

SEQ ID NO: 256558 - RNA, 15 nt, BK polyomavirus
gccucuaucagcaau

SEQ ID NO: 256559 - RNA, 20 nt, BK polyomavirus
gccuuuacacaaaugcaacu

SEQ ID NO: 256560 - RNA, 18 nt, BK polyomavirus
gcggaucuuaaaauaucu

SEQ ID NO: 256561 - RNA, 13 nt, BK polyomavirus
gcuaagugcugaa

SEQ ID NO: 256562 - RNA, 18 nt, BK polyomavirus
gcuaucagcuuuacaaag

SEQ ID NO: 256563 - RNA, 23 nt, BK polyomavirus
gcugcccauccacucucuggguu

SEQ ID NO: 256564 - RNA, 11 nt, BK polyomavirus
gcugcugcuau

SEQ ID NO: 256565 - RNA, 13 nt, BK polyomavirus
gcugcugcugcua

SEQ ID NO: 256566 - RNA, 15 nt, BK polyomavirus
gcugcugcugcuaua

SEQ ID NO: 256567 - RNA, 22 nt, BK polyomavirus
gcuuauacaaaagcagcauuua

SEQ ID NO: 256568 - RNA, 19 nt, BK polyomavirus
gcuuuuauuguacauauac

SEQ ID NO: 256569 - RNA, 21 nt, BK polyomavirus
gcuuuuauuguacauauacau

SEQ ID NO: 256570 - RNA, 19 nt, BK polyomavirus
gcuuuuguauaagccacuu

SEQ ID NO: 256571 - RNA, 16 nt, BK polyomavirus
ggaaaaauauucugua

SEQ ID NO: 256572 - RNA, 17 nt, BK polyomavirus
ggaaauuggguaaggau

SEQ ID NO: 256573 - RNA, 18 nt, BK polyomavirus
ggcuaucagcuuuacaaa

SEQ ID NO: 256574 - RNA, 20 nt, BK polyomavirus
ggcuaucagcuuuacaaaga

SEQ ID NO: 256575 - RNA, 23 nt, BK polyomavirus
ggcuuauacaaaagcagcauuua

SEQ ID NO: 256576 - RNA, 14 nt, BK polyomavirus
ggcuuuagucuaaa

SEQ ID NO: 256577 - RNA, 15 nt, BK polyomavirus
ggcuuuagucuaaag

SEQ ID NO: 256578 - RNA, 21 nt, BK polyomavirus
gggaggcugcugcugcuauag

SEQ ID NO: 256579 - RNA, 13 nt, BK polyomavirus
gggauucagugcu

SEQ ID NO: 256580 - RNA, 22 nt, BK polyomavirus
ggggaggcugcugcugcuauag

SEQ ID NO: 256581 - RNA, 20 nt, BK polyomavirus
gggucacaaaaagugcauga

SEQ ID NO: 256582 - RNA, 13 nt, BK polyomavirus
gguagaaugcuuc

SEQ ID NO: 256583 - RNA, 18 nt, BK polyomavirus
gguagaugcuauuacaga

SEQ ID NO: 256584 - RNA, 16 nt, BK polyomavirus
gguauuaguuccuuag

SEQ ID NO: 256585 - RNA, 14 nt, BK polyomavirus
ggucacuuagcaaa

SEQ ID NO: 256586 - RNA, 15 nt, BK polyomavirus
ggucacuuagcaaaa

SEQ ID NO: 256587 - RNA, 11 nt, BK polyomavirus
guaauugcugg

SEQ ID NO: 256588 - RNA, 22 nt, BK polyomavirus
guaccucagaggcuauagcugc

SEQ ID NO: 256589 - RNA, 20 nt, BK polyomavirus
guauuaguuccuuagcucaa

SEQ ID NO: 256590 - RNA, 15 nt, BK polyomavirus
gucugaccuuuggga

SEQ ID NO: 256591 - RNA, 21 nt, BK polyomavirus
gucuuucugugccaucaaaca

SEQ ID NO: 256592 - RNA, 21 nt, BK polyomavirus
gugaugaagaagcaacagcag

SEQ ID NO: 256593 - RNA, 15 nt, BK polyomavirus
guggaaaucuacuga

SEQ ID NO: 256594 - RNA, 15 nt, BK polyomavirus
guggaggaaaaccua

SEQ ID NO: 256595 - RNA, 17 nt, BK polyomavirus
guggcugaaauugcugc

SEQ ID NO: 256596 - RNA, 14 nt, BK polyomavirus
guucaugggugcug

SEQ ID NO: 256597 - RNA, 20 nt, BK polyomavirus
guucaugggugcugcucuag

SEQ ID NO: 256598 - RNA, 22 nt, BK polyomavirus
guucaugggugcugcucuagca

SEQ ID NO: 256599 - RNA, 22 nt, BK polyomavirus
guuccagagcuguuaguaaaca

SEQ ID NO: 256600 - RNA, 15 nt, BK polyomavirus
guuucugaauccucu

SEQ ID NO: 256601 - RNA, 19 nt, BK polyomavirus
uaaaaggcccuaaguaauu

SEQ ID NO: 256602 - RNA, 20 nt, BK polyomavirus
uaaaaggcccuaaguaauua

SEQ ID NO: 256603 - RNA, 18 nt, BK polyomavirus
uaaaaguggcuuauacaa

SEQ ID NO: 256604 - RNA, 17 nt, BK polyomavirus
uaaauguauauguacaa

SEQ ID NO: 256605 - RNA, 15 nt, BK polyomavirus
uaaggucacuuagca

SEQ ID NO: 256606 - RNA, 19 nt, BK polyomavirus
uaauaucaagaauacauuu

SEQ ID NO: 256607 - RNA, 17 nt, BK polyomavirus
uacaaaagcagcauuua

SEQ ID NO: 256608 - RNA, 21 nt, BK polyomavirus
uacaaaagcagcauuuauuaa

SEQ ID NO: 256609 - RNA, 13 nt, BK polyomavirus
uacauauacauuu

SEQ ID NO: 256610 - RNA, 17 nt, BK polyomavirus
uacauuuccccaugcau

SEQ ID NO: 256611 - RNA, 23 nt, BK polyomavirus
uaccucagaggcuauagcugcua

SEQ ID NO: 256612 - RNA, 22 nt, BK polyomavirus
uacuuaucucagaauccagccu

SEQ ID NO: 256613 - RNA, 19 nt, BK polyomavirus
uagaagacccuaaagacuu

SEQ ID NO: 256614 - RNA, 21 nt, BK polyomavirus
uagcagugauagcccagagag

SEQ ID NO: 256615 - RNA, 12 nt, BK polyomavirus
uagcugcuauag

SEQ ID NO: 256616 - RNA, 20 nt, BK polyomavirus
uaggugccaaccuauggaac

SEQ ID NO: 256617 - RNA, 14 nt, BK polyomavirus
uaguaaacaggcca

SEQ ID NO: 256618 - RNA, 23 nt, BK polyomavirus
uagucaagcuguauuuaguaaua

SEQ ID NO: 256619 - RNA, 22 nt, BK polyomavirus
uagucuaaagcuaagugcugaa

SEQ ID NO: 256620 - RNA, 19 nt, BK polyomavirus
uauaaaaaacuuauggaaa

SEQ ID NO: 256621 - RNA, 18 nt, BK polyomavirus
uauacaaaagcagcauuu

SEQ ID NO: 256622 - RNA, 12 nt, BK polyomavirus
uauagcugcuau

SEQ ID NO: 256623 - RNA, 13 nt, BK polyomavirus
uauagcugcuaua

SEQ ID NO: 256624 - RNA, 13 nt, BK polyomavirus
uauaucuuaucau

SEQ ID NO: 256625 - RNA, 13 nt, BK polyomavirus
uauauguacaaua

SEQ ID NO: 256626 - RNA, 14 nt, BK polyomavirus
uaucugaggcugcu

SEQ ID NO: 256627 - RNA, 17 nt, BK polyomavirus
uaucugaggcugcugcu

SEQ ID NO: 256628 - RNA, 12 nt, BK polyomavirus
uauguuugccag

SEQ ID NO: 256629 - RNA, 21 nt, BK polyomavirus
uauguuugccagugaugaaga

SEQ ID NO: 256630 - RNA, 20 nt, BK polyomavirus
uauugcuggguuugcugcuu

SEQ ID NO: 256631 - RNA, 19 nt, BK polyomavirus
uauuggaauaacuagcaug

SEQ ID NO: 256632 - RNA, 14 nt, BK polyomavirus
uauuguacauauac

SEQ ID NO: 256633 - RNA, 16 nt, BK polyomavirus
uauuuugccaugaaga

SEQ ID NO: 256634 - RNA, 16 nt, BK polyomavirus
ucaaacauaugcugua

SEQ ID NO: 256635 - RNA, 15 nt, BK polyomavirus
ucaaauucuguauaa

SEQ ID NO: 256636 - RNA, 22 nt, BK polyomavirus
ucaacaauucuagauuguauau

SEQ ID NO: 256637 - RNA, 15 nt, BK polyomavirus
ucaagaauacauuuc

SEQ ID NO: 256638 - RNA, 23 nt, BK polyomavirus
ucaagaauacauuuccccaugca

SEQ ID NO: 256639 - RNA, 15 nt, BK polyomavirus
ucacaaaaagugcau

SEQ ID NO: 256640 - RNA, 15 nt, BK polyomavirus
ucacuuagcaaaaag

SEQ ID NO: 256641 - RNA, 17 nt, BK polyomavirus
ucagcagcugaaacaua

SEQ ID NO: 256642 - RNA, 19 nt, BK polyomavirus
ucagcagcugaaacauaca

SEQ ID NO: 256643 - RNA, 12 nt, BK polyomavirus
ucaguugcaaaa

SEQ ID NO: 256644 - RNA, 15 nt, BK polyomavirus
ucaugggugcugcuc

SEQ ID NO: 256645 - RNA, 17 nt, BK polyomavirus
uccacuguuguguucca

SEQ ID NO: 256646 - RNA, 21 nt, BK polyomavirus
uccagagcuguuaguaaacag

SEQ ID NO: 256647 - RNA, 12 nt, BK polyomavirus
uccagagucuuc

SEQ ID NO: 256648 - RNA, 16 nt, BK polyomavirus
uccagaugaaaaccuu

SEQ ID NO: 256649 - RNA, 17 nt, BK polyomavirus
uccagaugaaaaccuua

SEQ ID NO: 256650 - RNA, 22 nt, BK polyomavirus
uccagccuuuccuuccauucaa

SEQ ID NO: 256651 - RNA, 22 nt, BK polyomavirus
uccagguucaugggugcugcuc

SEQ ID NO: 256652 - RNA, 14 nt, BK polyomavirus
uccauucaacaauu

SEQ ID NO: 256653 - RNA, 11 nt, BK polyomavirus
uccccaugcau

SEQ ID NO: 256654 - RNA, 19 nt, BK polyomavirus
uccucaaacauaugcugua

SEQ ID NO: 256655 - RNA, 18 nt, BK polyomavirus
ucuaaagcuaagugcuga

SEQ ID NO: 256656 - RNA, 23 nt, BK polyomavirus
ucuacugaugugggaggcuguaa

SEQ ID NO: 256657 - RNA, 14 nt, BK polyomavirus
ucucagaauccagc

SEQ ID NO: 256658 - RNA, 19 nt, BK polyomavirus
ucucagaauccagccuuuc

SEQ ID NO: 256659 - RNA, 17 nt, BK polyomavirus
ucuccacuguuguguuc

SEQ ID NO: 256660 - RNA, 21 nt, BK polyomavirus
ucugaauccucuucucuugua

SEQ ID NO: 256661 - RNA, 14 nt, BK polyomavirus
ucugagacuuggga

SEQ ID NO: 256662 - RNA, 15 nt, BK polyomavirus
ucugagacuugggaa

SEQ ID NO: 256663 - RNA, 13 nt, BK polyomavirus
ucuuaaaauaucu

SEQ ID NO: 256664 - RNA, 14 nt, BK polyomavirus
ucuuaucauaucug

SEQ ID NO: 256665 - RNA, 15 nt, BK polyomavirus
ucuucagcaggggcu

SEQ ID NO: 256666 - RNA, 20 nt, BK polyomavirus
ucuucaguuucugaauccuc

SEQ ID NO: 256667 - RNA, 16 nt, BK polyomavirus
ucuugacuaugggggu

SEQ ID NO: 256668 - RNA, 15 nt, BK polyomavirus
ucuuucugugccauc

SEQ ID NO: 256669 - RNA, 20 nt, BK polyomavirus
ucuuucugugccaucaaaca

SEQ ID NO: 256670 - RNA, 22 nt, BK polyomavirus
ugaaaaaguauacauacuuauc

SEQ ID NO: 256671 - RNA, 20 nt, BK polyomavirus
ugaaaaaugggaugaagauu

SEQ ID NO: 256672 - RNA, 13 nt, BK polyomavirus
ugaaauugcugcu

SEQ ID NO: 256673 - RNA, 20 nt, BK polyomavirus
ugaagaagcaacagcagauu

SEQ ID NO: 256674 - RNA, 14 nt, BK polyomavirus
ugaaguaucugaga

SEQ ID NO: 256675 - RNA, 15 nt, BK polyomavirus
ugaaguaucugagac

SEQ ID NO: 256676 - RNA, 14 nt, BK polyomavirus
ugaggcugcugcug

SEQ ID NO: 256677 - RNA, 16 nt, BK polyomavirus
ugauugggaucacaaa

SEQ ID NO: 256678 - RNA, 15 nt, BK polyomavirus
ugcagggagugcuaa

SEQ ID NO: 256679 - RNA, 17 nt, BK polyomavirus
ugcagggagugcuaaug

SEQ ID NO: 256680 - RNA, 22 nt, BK polyomavirus
ugcagggucacaaaaagugcau

SEQ ID NO: 256681 - RNA, 18 nt, BK polyomavirus
ugcaucccuugcuacugu

SEQ ID NO: 256682 - RNA, 14 nt, BK polyomavirus
ugcaugagcauggu

SEQ ID NO: 256683 - RNA, 16 nt, BK polyomavirus
ugccaaccuauggaac

SEQ ID NO: 256684 - RNA, 17 nt, BK polyomavirus
ugcccauccacucucug

SEQ ID NO: 256685 - RNA, 14 nt, BK polyomavirus
ugcuauaggccuaa

SEQ ID NO: 256686 - RNA, 14 nt, BK polyomavirus
ugcugcugcuauag

SEQ ID NO: 256687 - RNA, 17 nt, BK polyomavirus
ugcugcuuuuguauaag

SEQ ID NO: 256688 - RNA, 16 nt, BK polyomavirus
ugcuggguuugcugcu

SEQ ID NO: 256689 - RNA, 20 nt, BK polyomavirus
ugcuuaaccuucaugcaggg

SEQ ID NO: 256690 - RNA, 14 nt, BK polyomavirus
uggaggaaaaccua

SEQ ID NO: 256691 - RNA, 14 nt, BK polyomavirus
uggcugaaauugcu

SEQ ID NO: 256692 - RNA, 16 nt, BK polyomavirus
uggcugaaauugcugc

SEQ ID NO: 256693 - RNA, 17 nt, BK polyomavirus
uggcugaaauugcugcu

SEQ ID NO: 256694 - RNA, 18 nt, BK polyomavirus
uggcugaaauugcugcug

SEQ ID NO: 256695 - RNA, 22 nt, BK polyomavirus
uggggaggcugcugcugcuaua

SEQ ID NO: 256696 - RNA, 23 nt, BK polyomavirus
uggggaggcugcugcugcuauag

SEQ ID NO: 256697 - RNA, 18 nt, BK polyomavirus
ugggggaccuaguugcca

SEQ ID NO: 256698 - RNA, 22 nt, BK polyomavirus
ugggggauccagaugaaaaccu

SEQ ID NO: 256699 - RNA, 13 nt, BK polyomavirus
uguaauaucaaga

SEQ ID NO: 256700 - RNA, 20 nt, BK polyomavirus
uguaggccucuaucagcaau

SEQ ID NO: 256701 - RNA, 21 nt, BK polyomavirus
uguauaaaaaacuuauggaaa

SEQ ID NO: 256702 - RNA, 16 nt, BK polyomavirus
uguauauguacaauaa

SEQ ID NO: 256703 - RNA, 13 nt, BK polyomavirus
ugugauugggauu

SEQ ID NO: 256704 - RNA, 16 nt, BK polyomavirus
ugugauugggauucag

SEQ ID NO: 256705 - RNA, 14 nt, BK polyomavirus
uuaaaauaucuugc

SEQ ID NO: 256706 - RNA, 18 nt, BK polyomavirus
uuacagaucuuuuucuca

SEQ ID NO: 256707 - RNA, 19 nt, BK polyomavirus
uuauaaggucacuuagcaa

SEQ ID NO: 256708 - RNA, 15 nt, BK polyomavirus
uuauacaaaagcagc

SEQ ID NO: 256709 - RNA, 21 nt, BK polyomavirus
uuauacaaaagcagcauuuau

SEQ ID NO: 256710 - RNA, 17 nt, BK polyomavirus
uuauaggugccaaccua

SEQ ID NO: 256711 - RNA, 14 nt, BK polyomavirus
uuaucauaucuggg

SEQ ID NO: 256712 - RNA, 15 nt, BK polyomavirus
uuaucucagaaucca

SEQ ID NO: 256713 - RNA, 22 nt, BK polyomavirus
uuauggaaaaauauucuguaac

SEQ ID NO: 256714 - RNA, 11 nt, BK polyomavirus
uucaaauugca

SEQ ID NO: 256715 - RNA, 13 nt, BK polyomavirus
uuccauaccauac

SEQ ID NO: 256716 - RNA, 20 nt, BK polyomavirus
uucucaacacucaacaccac

SEQ ID NO: 256717 - RNA, 20 nt, BK polyomavirus
uugcugcuggggaggcugcu

SEQ ID NO: 256718 - RNA, 14 nt, BK polyomavirus
uugcuggugcuccu

SEQ ID NO: 256719 - RNA, 12 nt, BK polyomavirus
uugggaaucuuc

SEQ ID NO: 256720 - RNA, 14 nt, BK polyomavirus
uuguauaagccacu

SEQ ID NO: 256721 - RNA, 18 nt, BK polyomavirus
uuguauuuccagguucau

SEQ ID NO: 256722 - RNA, 19 nt, BK polyomavirus
uugucccuguuugucaaua

SEQ ID NO: 256723 - RNA, 23 nt, BK polyomavirus
uuucaguggcugaaauugcugcu

SEQ ID NO: 256724 - RNA, 22 nt, BK polyomavirus
uuuccacuguaggccucuauca

SEQ ID NO: 256725 - RNA, 17 nt, BK polyomavirus
uuuccccaugcauauau

SEQ ID NO: 256726 - RNA, 19 nt, BK polyomavirus
uuugcugcuuuaauucaaa

SEQ ID NO: 256727 - RNA, 23 nt, BK polyomavirus
uuugucaauauaucuuaucauau

SEQ ID NO: 256728 - RNA, 22 nt, BK polyomavirus
uuuauaggugccaaccuaugga

SEQ ID NO: 256729 - RNA, 17 nt, BK polyomavirus
uuuauuguacauauaca

SEQ ID NO: 256730 - RNA, 23 nt, BK polyomavirus
uuuccagguucaugggugcugcu

SEQ ID NO: 256731 - RNA, 19 nt, BK polyomavirus
uuuccccaugcauauauua

SEQ ID NO: 256732 - RNA, 22 nt, BK polyomavirus
uuucccucugaucuacaccagu

SEQ ID NO: 256733 - RNA, 19 nt, BK polyomavirus
aaaaagcucaaauucugua

SEQ ID NO: 256734 - RNA, 12 nt, BK polyomavirus
aaaaagugcaug

SEQ ID NO: 256735 - RNA, 17 nt, BK polyomavirus
aaaaagugcaugagcau

SEQ ID NO: 256736 - RNA, 17 nt, BK polyomavirus
aaaaaugggaugaagau

SEQ ID NO: 256737 - RNA, 17 nt, BK polyomavirus
aaaagcucaaauucugu

SEQ ID NO: 256738 - RNA, 18 nt, BK polyomavirus
aaaagcucaaauucugua

SEQ ID NO: 256739 - RNA, 22 nt, BK polyomavirus
aaaagcucaaauucuguauaaa

SEQ ID NO: 256740 - RNA, 13 nt, BK polyomavirus
aaaauaucuugca

SEQ ID NO: 256741 - RNA, 20 nt, BK polyomavirus
aaaauauucuguaacuuuua

SEQ ID NO: 256742 - RNA, 20 nt, BK polyomavirus
aaaaugacuuuagcagugau

SEQ ID NO: 256743 - RNA, 13 nt, BK polyomavirus
aaaaugcuucccu

SEQ ID NO: 256744 - RNA, 17 nt, BK polyomavirus
aaacacccuaaccucuu

SEQ ID NO: 256745 - RNA, 22 nt, BK polyomavirus
aaacacugaaagccuuuacaca

SEQ ID NO: 256746 - RNA, 16 nt, BK polyomavirus
aaacauaugcuguaau

SEQ ID NO: 256747 - RNA, 20 nt, BK polyomavirus
aaacuuauggaaaaauauuc

SEQ ID NO: 256748 - RNA, 18 nt, BK polyomavirus
aaagacuuucccucugau

SEQ ID NO: 256749 - RNA, 23 nt, BK polyomavirus
aaagcaccuguuuaaagcauuuu

SEQ ID NO: 256750 - RNA, 12 nt, BK polyomavirus
aaagcagcauuu

SEQ ID NO: 256751 - RNA, 13 nt, BK polyomavirus
aaagcagcauuua

SEQ ID NO: 256752 - RNA, 23 nt, BK polyomavirus
aaagccuuuacacaaaugcaacu

SEQ ID NO: 256753 - RNA, 17 nt, BK polyomavirus
aaagcucaaauucugua

SEQ ID NO: 256754 - RNA, 21 nt, BK polyomavirus
aaaguggcuuauacaaaagca

SEQ ID NO: 256755 - RNA, 16 nt, BK polyomavirus
aaaugacuuuagcagu

SEQ ID NO: 256756 - RNA, 17 nt, BK polyomavirus
aaaugcagggagugcua

SEQ ID NO: 256757 - RNA, 18 nt, BK polyomavirus
aaaugcagggagugcuaa

SEQ ID NO: 256758 - RNA, 18 nt, BK polyomavirus
aaaugcugcuuuuguaua

SEQ ID NO: 256759 - RNA, 19 nt, BK polyomavirus
aaauugcaucccuugcuac

SEQ ID NO: 256760 - RNA, 12 nt, BK polyomavirus
aaauugcugcug

SEQ ID NO: 256761 - RNA, 15 nt, BK polyomavirus
aacuguuagugguau

SEQ ID NO: 256762 - RNA, 14 nt, BK polyomavirus
aagaaaaagcucaa

SEQ ID NO: 256763 - RNA, 23 nt, BK polyomavirus
aagagcauugugauugggauuca

SEQ ID NO: 256764 - RNA, 17 nt, BK polyomavirus
aagauauguuugccagu

SEQ ID NO: 256765 - RNA, 22 nt, BK polyomavirus
aagccuuuacacaaaugcaacu

SEQ ID NO: 256766 - RNA, 15 nt, BK polyomavirus
aaggauucuuuacag

SEQ ID NO: 256767 - RNA, 23 nt, BK polyomavirus
aaggcaguaauuuccacuucuuu

SEQ ID NO: 256768 - RNA, 21 nt, BK polyomavirus
aaguucuuugaugauugggau

SEQ ID NO: 256769 - RNA, 15 nt, BK polyomavirus
aauaauaaaauauua

SEQ ID NO: 256770 - RNA, 14 nt, BK polyomavirus
aauacauuucccca

SEQ ID NO: 256771 - RNA, 22 nt, BK polyomavirus
aauacauuuccccaugcauaua

SEQ ID NO: 256772 - RNA, 19 nt, BK polyomavirus
aauaucaagaauacauuuc

SEQ ID NO: 256773 - RNA, 16 nt, BK polyomavirus
aauccucuucucuugu

SEQ ID NO: 256774 - RNA, 22 nt, BK polyomavirus
aauugcaucccuugcuacugua

SEQ ID NO: 256775 - RNA, 16 nt, BK polyomavirus
aauugcuggugcuccu

SEQ ID NO: 256776 - RNA, 14 nt, BK polyomavirus
acaaaagcagcauu

SEQ ID NO: 256777 - RNA, 13 nt, BK polyomavirus
acaaguaccucag

SEQ ID NO: 256778 - RNA, 20 nt, BK polyomavirus
acaaguaccucagaggcuau

SEQ ID NO: 256779 - RNA, 18 nt, BK polyomavirus
acaauaaaagcaccuguu

SEQ ID NO: 256780 - RNA, 20 nt, BK polyomavirus
acagagguagaaugcuuccu

SEQ ID NO: 256781 - RNA, 13 nt, BK polyomavirus
acaggccacaaau

SEQ ID NO: 256782 - RNA, 17 nt, BK polyomavirus
acaggccacaaauauca

SEQ ID NO: 256783 - RNA, 18 nt, BK polyomavirus
acaggcuaucagcuuuac

SEQ ID NO: 256784 - RNA, 20 nt, BK polyomavirus
acaggcuaucagcuuuacaa

SEQ ID NO: 256785 - RNA, 21 nt, BK polyomavirus
acauacaggcuaucagcuuua

SEQ ID NO: 256786 - RNA, 23 nt, BK polyomavirus
acauacaggcuaucagcuuuaca

SEQ ID NO: 256787 - RNA, 14 nt, BK polyomavirus
acauauacauuuaa

SEQ ID NO: 256788 - RNA, 18 nt, BK polyomavirus
acccuuggaaaugcaggg

SEQ ID NO: 256789 - RNA, 18 nt, BK polyomavirus
acuaacuuauauuuagau

SEQ ID NO: 256790 - RNA, 22 nt, BK polyomavirus
acuccucaaacauaugcuguaa

SEQ ID NO: 256791 - RNA, 19 nt, BK polyomavirus
acuuauauuuagauaaaua

SEQ ID NO: 256792 - RNA, 18 nt, BK polyomavirus
acuuaucucagaauccag

SEQ ID NO: 256793 - RNA, 15 nt, BK polyomavirus
acuuauggaaaaaua

SEQ ID NO: 256794 - RNA, 15 nt, BK polyomavirus
acuucuuugcuguag

SEQ ID NO: 256795 - RNA, 21 nt, BK polyomavirus
agaaaaagcucaaauucugua

SEQ ID NO: 256796 - RNA, 23 nt, BK polyomavirus
agaaagguagaagacccuaaaga

SEQ ID NO: 256797 - RNA, 23 nt, BK polyomavirus
agaaaugggggauccagaugaaa

SEQ ID NO: 256798 - RNA, 13 nt, BK polyomavirus
agaagacccuaaa

SEQ ID NO: 256799 - RNA, 16 nt, BK polyomavirus
agaagcaacagcagau

SEQ ID NO: 256800 - RNA, 15 nt, BK polyomavirus
agaauccagccuuuc

SEQ ID NO: 256801 - RNA, 18 nt, BK polyomavirus
agaauccagccuuuccuu

SEQ ID NO: 256802 - RNA, 21 nt, BK polyomavirus
agaaugcuuccuaaacccaga

SEQ ID NO: 256803 - RNA, 15 nt, BK polyomavirus
agacacaugugugcu

SEQ ID NO: 256804 - RNA, 16 nt, BK polyomavirus
agacccuaaagacuuu

SEQ ID NO: 256805 - RNA, 15 nt, BK polyomavirus
agagaaaaaugcuuc

SEQ ID NO: 256806 - RNA, 20 nt, BK polyomavirus
agagagaaaaaugcuucccu

SEQ ID NO: 256807 - RNA, 14 nt, BK polyomavirus
agagcauugugauu

SEQ ID NO: 256808 - RNA, 17 nt, BK polyomavirus
agaggcuauagcugcua

SEQ ID NO: 256809 - RNA, 16 nt, BK polyomavirus
agagguagaaugcuuc

SEQ ID NO: 256810 - RNA, 14 nt, BK polyomavirus
agauuguauaucag

SEQ ID NO: 256811 - RNA, 17 nt, BK polyomavirus
agcagugauagcccaga

SEQ ID NO: 256812 - RNA, 13 nt, BK polyomavirus
agcauugugauug

SEQ ID NO: 256813 - RNA, 17 nt, BK polyomavirus
agccuuuccuuccauuc

SEQ ID NO: 256814 - RNA, 14 nt, BK polyomavirus
aggauucuuuacag

SEQ ID NO: 256815 - RNA, 12 nt, BK polyomavirus
aggccacaaaua

SEQ ID NO: 256816 - RNA, 17 nt, BK polyomavirus
aggcuauagcugcuaua

SEQ ID NO: 256817 - RNA, 18 nt, BK polyomavirus
aggcuauagcugcuauag

SEQ ID NO: 256818 - RNA, 14 nt, BK polyomavirus
aggcuaucagcuuu

SEQ ID NO: 256819 - RNA, 20 nt, BK polyomavirus
aggcugcccauccacucucu

SEQ ID NO: 256820 - RNA, 15 nt, BK polyomavirus
aggcugcugcugcua

SEQ ID NO: 256821 - RNA, 16 nt, BK polyomavirus
aggcugcugcugcuau

SEQ ID NO: 256822 - RNA, 17 nt, BK polyomavirus
aggcugcugcugcuaua

SEQ ID NO: 256823 - RNA, 18 nt, BK polyomavirus
aggcugcugcugcuauag

SEQ ID NO: 256824 - RNA, 16 nt, BK polyomavirus
agguagaaugcuuccu

SEQ ID NO: 256825 - RNA, 23 nt, BK polyomavirus
aggugcuuuuauuguacauauac

SEQ ID NO: 256826 - RNA, 16 nt, BK polyomavirus
aguauacauacuuauc

SEQ ID NO: 256827 - RNA, 18 nt, BK polyomavirus
agucaagcuguauuuagu

SEQ ID NO: 256828 - RNA, 16 nt, BK polyomavirus
agucuuucugugccau

SEQ ID NO: 256829 - RNA, 22 nt, BK polyomavirus
agucuuucugugccaucaaaca

SEQ ID NO: 256830 - RNA, 18 nt, BK polyomavirus
agugcuugauccaugucc

SEQ ID NO: 256831 - RNA, 22 nt, BK polyomavirus
aguggcugaaauugcugcuggg

SEQ ID NO: 256832 - RNA, 23 nt, BK polyomavirus
agugguauuaguuccuuagcuca

SEQ ID NO: 256833 - RNA, 18 nt, BK polyomavirus
aguguaucugaggcugcu

SEQ ID NO: 256834 - RNA, 17 nt, BK polyomavirus
aguuucugaauccucuu

SEQ ID NO: 256835 - RNA, 14 nt, BK polyomavirus
auaaaaaacuuaug

SEQ ID NO: 256836 - RNA, 18 nt, BK polyomavirus
auaaaagcaccuguuuaa

SEQ ID NO: 256837 - RNA, 13 nt, BK polyomavirus
auaaaauauuaaa

SEQ ID NO: 256838 - RNA, 21 nt, BK polyomavirus
auaaaugcugcuuuuguauaa

SEQ ID NO: 256839 - RNA, 18 nt, BK polyomavirus
auacaaaagcagcauuua

SEQ ID NO: 256840 - RNA, 13 nt, BK polyomavirus
auacuacuaaaga

SEQ ID NO: 256841 - RNA, 14 nt, BK polyomavirus
auacuacuaaagaa

SEQ ID NO: 256842 - RNA, 13 nt, BK polyomavirus
auagcugcuauag

SEQ ID NO: 256843 - RNA, 17 nt, BK polyomavirus
auaggccuaacuccuca

SEQ ID NO: 256844 - RNA, 17 nt, BK polyomavirus
auaggugccaaccuaug

SEQ ID NO: 256845 - RNA, 12 nt, BK polyomavirus
auauacauuuaa

SEQ ID NO: 256846 - RNA, 22 nt, BK polyomavirus
auauguacaauaaaagcaccug

SEQ ID NO: 256847 - RNA, 14 nt, BK polyomavirus
auauguuugccagu

SEQ ID NO: 256848 - RNA, 17 nt, BK polyomavirus
auauguuugccagugau

SEQ ID NO: 256849 - RNA, 13 nt, BK polyomavirus
aucagcuuuacaa

SEQ ID NO: 256850 - RNA, 20 nt, BK polyomavirus
auccauguccagagucuuca

SEQ ID NO: 256851 - RNA, 17 nt, BK polyomavirus
aucccuugcuacuguag

SEQ ID NO: 256852 - RNA, 19 nt, BK polyomavirus
aucccuugcuacuguagag

SEQ ID NO: 256853 - RNA, 23 nt, BK polyomavirus
auccuugaaaaaguauacauacu

SEQ ID NO: 256854 - RNA, 19 nt, BK polyomavirus
aucugaggcugcugcugcc

SEQ ID NO: 256855 - RNA, 19 nt, BK polyomavirus
aucuuaucauaucuggguc

SEQ ID NO: 256856 - RNA, 17 nt, BK polyomavirus
augaagaagcaacagca

SEQ ID NO: 256857 - RNA, 22 nt, BK polyomavirus
augaggaccuaaccuguggaaa

SEQ ID NO: 256858 - RNA, 17 nt, BK polyomavirus
augauugggaucacaaa

SEQ ID NO: 256859 - RNA, 14 nt, BK polyomavirus
augcaacucuugac

SEQ ID NO: 256860 - RNA, 16 nt, BK polyomavirus
augcuauuacagaggu

SEQ ID NO: 256861 - RNA, 17 nt, BK polyomavirus
augcuauuacagaggua

SEQ ID NO: 256862 - RNA, 21 nt, BK polyomavirus
augcuucccuguuacagcaca

SEQ ID NO: 256863 - RNA, 21 nt, BK polyomavirus
auguccagagucuucaguuuc

SEQ ID NO: 256864 - RNA, 12 nt, BK polyomavirus
auguuugccagu

SEQ ID NO: 256865 - RNA, 18 nt, BK polyomavirus
auuaguuccuuagcucaa

SEQ ID NO: 256866 - RNA, 20 nt, BK polyomavirus
auucagugcuugauccaugu

SEQ ID NO: 256867 - RNA, 21 nt, BK polyomavirus
auucagugcuugauccauguc

SEQ ID NO: 256868 - RNA, 15 nt, BK polyomavirus
auuccauaccauaca

SEQ ID NO: 256869 - RNA, 16 nt, BK polyomavirus
auucuagauuguauau

SEQ ID NO: 256870 - RNA, 21 nt, BK polyomavirus
auugcaucccuugcuacugua

SEQ ID NO: 256871 - RNA, 19 nt, BK polyomavirus
auugcuggguuugcugcuu

SEQ ID NO: 256872 - RNA, 16 nt, BK polyomavirus
auugcuggugcuccug

SEQ ID NO: 256873 - RNA, 13 nt, BK polyomavirus
auugggaucacaa

SEQ ID NO: 256874 - RNA, 12 nt, BK polyomavirus
auuguacauaua

SEQ ID NO: 256875 - RNA, 16 nt, BK polyomavirus
auuguacauauacauu

SEQ ID NO: 256876 - RNA, 19 nt, BK polyomavirus
auugucccuguuugucaau

SEQ ID NO: 256877 - RNA, 16 nt, BK polyomavirus
auuuccccaugcauau

SEQ ID NO: 256878 - RNA, 13 nt, BK polyomavirus
caaaagcagcauu

SEQ ID NO: 256879 - RNA, 15 nt, BK polyomavirus
caaaagcagcauuua

SEQ ID NO: 256880 - RNA, 22 nt, BK polyomavirus
caaacacccuaaccucuucuac

SEQ ID NO: 256881 - RNA, 16 nt, BK polyomavirus
caaaguuuccacugua

SEQ ID NO: 256882 - RNA, 17 nt, BK polyomavirus
caaauaucagcagcuga

SEQ ID NO: 256883 - RNA, 13 nt, BK polyomavirus
caagaauacauuu

SEQ ID NO: 256884 - RNA, 14 nt, BK polyomavirus
caagaauacauuuc

SEQ ID NO: 256885 - RNA, 22 nt, BK polyomavirus
caagcuuaaaaguggcuuauac

SEQ ID NO: 256886 - RNA, 12 nt, BK polyomavirus
caaguaccucag

SEQ ID NO: 256887 - RNA, 12 nt, BK polyomavirus
caaguaggguau

SEQ ID NO: 256888 - RNA, 16 nt, BK polyomavirus
caauaaaagcaccugu

SEQ ID NO: 256889 - RNA, 12 nt, BK polyomavirus
caauauaucuua

SEQ ID NO: 256890 - RNA, 19 nt, BK polyomavirus
caauucuagauuguauauc

SEQ ID NO: 256891 - RNA, 14 nt, BK polyomavirus
cacaaaaagugcau

SEQ ID NO: 256892 - RNA, 19 nt, BK polyomavirus
cacaaaguuuccacuguag

SEQ ID NO: 256893 - RNA, 19 nt, BK polyomavirus
caccuguuuaaagcauuuu

SEQ ID NO: 256894 - RNA, 20 nt, BK polyomavirus
cagagagaaaaaugcuuccc

SEQ ID NO: 256895 - RNA, 13 nt, BK polyomavirus
cagagucuucagu

SEQ ID NO: 256896 - RNA, 19 nt, BK polyomavirus
cagccuuuccuuccauuca

SEQ ID NO: 256897 - RNA, 16 nt, BK polyomavirus
caggccacaaauauca

SEQ ID NO: 256898 - RNA, 20 nt, BK polyomavirus
cagggucacaaaaagugcau

SEQ ID NO: 256899 - RNA, 21 nt, BK polyomavirus
cagggucacaaaaagugcaug

SEQ ID NO: 256900 - RNA, 22 nt, BK polyomavirus
caggugcuuuuauuguacauau

SEQ ID NO: 256901 - RNA, 23 nt, BK polyomavirus
caggugcuuuuauuguacauaua

SEQ ID NO: 256902 - RNA, 20 nt, BK polyomavirus
cagguucaugggugcugcuc

SEQ ID NO: 256903 - RNA, 18 nt, BK polyomavirus
caguuucugaauccucuu

SEQ ID NO: 256904 - RNA, 19 nt, BK polyomavirus
cauacaggcuaucagcuuu

SEQ ID NO: 256905 - RNA, 14 nt, BK polyomavirus
cauacuuaucucag

SEQ ID NO: 256906 - RNA, 13 nt, BK polyomavirus
cauauacauuuaa

SEQ ID NO: 256907 - RNA, 17 nt, BK polyomavirus
caucccuugcuacugua

SEQ ID NO: 256908 - RNA, 18 nt, BK polyomavirus
caucccuugcuacuguag

SEQ ID NO: 256909 - RNA, 21 nt, BK polyomavirus
cauccuugaaaaaguauacau

SEQ ID NO: 256910 - RNA, 20 nt, BK polyomavirus
caugcagggucacaaaaagu

SEQ ID NO: 256911 - RNA, 16 nt, BK polyomavirus
caugggugcugcucua

SEQ ID NO: 256912 - RNA, 19 nt, BK polyomavirus
caugguggaggaaaaccua

SEQ ID NO: 256913 - RNA, 23 nt, BK polyomavirus
caugguggaggaaaaccuauuca

SEQ ID NO: 256914 - RNA, 21 nt, BK polyomavirus
cauguccagagucuucaguuu

SEQ ID NO: 256915 - RNA, 19 nt, BK polyomavirus
cauugugauugggauucag

SEQ ID NO: 256916 - RNA, 17 nt, BK polyomavirus
cauuuccccaugcauau

SEQ ID NO: 256917 - RNA, 14 nt, BK polyomavirus
ccaaccuauggaac

SEQ ID NO: 256918 - RNA, 20 nt, BK polyomavirus
ccacaggauuuucaguggcu

SEQ ID NO: 256919 - RNA, 16 nt, BK polyomavirus
ccacuucuuugcugua

SEQ ID NO: 256920 - RNA, 19 nt, BK polyomavirus
ccagagucuucaguuucug

SEQ ID NO: 256921 - RNA, 20 nt, BK polyomavirus
ccagguucaugggugcugcu

SEQ ID NO: 256922 - RNA, 21 nt, BK polyomavirus
ccaguguaucugaggcugcug

SEQ ID NO: 256923 - RNA, 14 nt, BK polyomavirus
cccuguuugucaau

SEQ ID NO: 256924 - RNA, 22 nt, BK polyomavirus
ccuaacuccucaaacauaugcu

SEQ ID NO: 256925 - RNA, 18 nt, BK polyomavirus
ccucuucucuuguaauau

SEQ ID NO: 256926 - RNA, 18 nt, BK polyomavirus
ccuguuacagcacagcaa

SEQ ID NO: 256927 - RNA, 11 nt, BK polyomavirus
ccuuagcucaa

SEQ ID NO: 256928 - RNA, 16 nt, BK polyomavirus
ccuucaugcaggguca

SEQ ID NO: 256929 - RNA, 21 nt, BK polyomavirus
ccuuccauucaacaauucuag

SEQ ID NO: 256930 - RNA, 21 nt, BK polyomavirus
ccuugaaaaaguauacauacu

SEQ ID NO: 256931 - RNA, 16 nt, BK polyomavirus
ccuuuacacaaaugca

SEQ ID NO: 256932 - RNA, 18 nt, BK polyomavirus
cuaaagaaaaagcucaaa

SEQ ID NO: 256933 - RNA, 21 nt, BK polyomavirus
cuacugaugugggaggcugua

SEQ ID NO: 256934 - RNA, 22 nt, BK polyomavirus
cuacugaugugggaggcuguaa

SEQ ID NO: 256935 - RNA, 17 nt, BK polyomavirus
cuacuguagagggcaua

SEQ ID NO: 256936 - RNA, 19 nt, BK polyomavirus
cuagauuguauaucaguug

SEQ ID NO: 256937 - RNA, 13 nt, BK polyomavirus
cuauagcugcuau

SEQ ID NO: 256938 - RNA, 20 nt, BK polyomavirus
cuauaggccuaacuccucaa

SEQ ID NO: 256939 - RNA, 13 nt, BK polyomavirus
cuaucagcuuuac

SEQ ID NO: 256940 - RNA, 15 nt, BK polyomavirus
cuaucagcuuuacaa

SEQ ID NO: 256941 - RNA, 20 nt, BK polyomavirus
cuauugcuggguuugcugcu

SEQ ID NO: 256942 - RNA, 16 nt, BK polyomavirus
cucaacaccacccaaa

SEQ ID NO: 256943 - RNA, 20 nt, BK polyomavirus
cucagaggcuauagcugcua

SEQ ID NO: 256944 - RNA, 23 nt, BK polyomavirus
cucaggcggaucuuaaaauaucu

SEQ ID NO: 256945 - RNA, 13 nt, BK polyomavirus
cugaaagccuuua

SEQ ID NO: 256946 - RNA, 15 nt, BK polyomavirus
cugaaauugcugcug

SEQ ID NO: 256947 - RNA, 12 nt, BK polyomavirus
cugaaguaucug

SEQ ID NO: 256948 - RNA, 22 nt, BK polyomavirus
cugaccuuugggaaucuucagc

SEQ ID NO: 256949 - RNA, 23 nt, BK polyomavirus
cugcuauagaaguucaaauugca

SEQ ID NO: 256950 - RNA, 11 nt, BK polyomavirus
cugcugcuaua

SEQ ID NO: 256951 - RNA, 14 nt, BK polyomavirus
cugcugcugcuaua

SEQ ID NO: 256952 - RNA, 21 nt, BK polyomavirus
cugcuggggaggcugcugcug

SEQ ID NO: 256953 - RNA, 15 nt, BK polyomavirus
cugcuuuaauucaaa

SEQ ID NO: 256954 - RNA, 21 nt, BK polyomavirus
cuggaagucuuucugugccau

SEQ ID NO: 256955 - RNA, 21 nt, BK polyomavirus
cuggggaggcugcugcugcua

SEQ ID NO: 256956 - RNA, 16 nt, BK polyomavirus
cuguacaaacagaggu

SEQ ID NO: 256957 - RNA, 22 nt, BK polyomavirus
cuguauaaaaaacuuauggaaa

SEQ ID NO: 256958 - RNA, 18 nt, BK polyomavirus
cuguggaaaucuacugau

SEQ ID NO: 256959 - RNA, 11 nt, BK polyomavirus
cuguguauacu

SEQ ID NO: 256960 - RNA, 20 nt, BK polyomavirus
cuguguauacuacuaaagaa

SEQ ID NO: 256961 - RNA, 18 nt, BK polyomavirus
cuuaaccuucaugcaggg

SEQ ID NO: 256962 - RNA, 13 nt, BK polyomavirus
cuuagcucaagua

SEQ ID NO: 256963 - RNA, 22 nt, BK polyomavirus
cuuaucucagaauccagccuuu

SEQ ID NO: 256964 - RNA, 22 nt, BK polyomavirus
cuucucuuguaauaucaagaau

SEQ ID NO: 256965 - RNA, 15 nt, BK polyomavirus
cuucuuugcuguagg

SEQ ID NO: 256966 - RNA, 16 nt, BK polyomavirus
cuugcaaggccucucc

SEQ ID NO: 256967 - RNA, 12 nt, BK polyomavirus
cuuuaauucaaa

SEQ ID NO: 256968 - RNA, 14 nt, BK polyomavirus
cuuuacagaucuuu

SEQ ID NO: 256969 - RNA, 22 nt, BK polyomavirus
cuuuuauuguacauauacauuu

SEQ ID NO: 256970 - RNA, 21 nt, BK polyomavirus
cuuuuguauaagccacuuuua

SEQ ID NO: 256971 - RNA, 23 nt, BK polyomavirus
gaaaaagcucaaauucuguauaa

SEQ ID NO: 256972 - RNA, 12 nt, BK polyomavirus
gaaaaauauucu

SEQ ID NO: 256973 - RNA, 15 nt, BK polyomavirus
gaaaaauauucugua

SEQ ID NO: 256974 - RNA, 22 nt, BK polyomavirus
gaaaaugacuuuagcagugaua

SEQ ID NO: 256975 - RNA, 14 nt, BK polyomavirus
gaaacauacaggcu

SEQ ID NO: 256976 - RNA, 11 nt, BK polyomavirus
gaaagccuuua

SEQ ID NO: 256977 - RNA, 19 nt, BK polyomavirus
gaaaugcagggagugcuaa

SEQ ID NO: 256978 - RNA, 23 nt, BK polyomavirus
gaaaugcagggagugcuaaugaa

SEQ ID NO: 256979 - RNA, 21 nt, BK polyomavirus
gaaaugggggauccagaugaa

SEQ ID NO: 256980 - RNA, 23 nt, BK polyomavirus
gaaauuggguaaggauucuuuac

SEQ ID NO: 256981 - RNA, 14 nt, BK polyomavirus
gaagacccuaaaga

SEQ ID NO: 256982 - RNA, 15 nt, BK polyomavirus
gaagacccuaaagac

SEQ ID NO: 256983 - RNA, 19 nt, BK polyomavirus
gaauacauuuccccaugca

SEQ ID NO: 256984 - RNA, 16 nt, BK polyomavirus
gaccuaaccuguggaa

SEQ ID NO: 256985 - RNA, 18 nt, BK polyomavirus
gaccuaguugccagugua

SEQ ID NO: 256986 - RNA, 15 nt, BK polyomavirus
gagaaaaaugcuucc

SEQ ID NO: 256987 - RNA, 17 nt, BK polyomavirus
gagagaaaaaugcuucc

SEQ ID NO: 256988 - RNA, 23 nt, BK polyomavirus
gaggaaaaccuauucaaggcagu

SEQ ID NO: 256989 - RNA, 19 nt, BK polyomavirus
gaggcuauagcugcuauag

SEQ ID NO: 256990 - RNA, 15 nt, BK polyomavirus
gaggcugcugcugcu

SEQ ID NO: 256991 - RNA, 18 nt, BK polyomavirus
gaggcugcugcugcuaua

SEQ ID NO: 256992 - RNA, 16 nt, BK polyomavirus
gagguagaaugcuucc

SEQ ID NO: 256993 - RNA, 19 nt, BK polyomavirus
gauaaauaauaaaauauua

SEQ ID NO: 256994 - RNA, 14 nt, BK polyomavirus
gauauguuugccag

SEQ ID NO: 256995 - RNA, 19 nt, BK polyomavirus
gaucuuaaaauaucuugca

SEQ ID NO: 256996 - RNA, 20 nt, BK polyomavirus
gaugaagauuuauuuugcca

SEQ ID NO: 256997 - RNA, 18 nt, BK polyomavirus
gaugauugggaucacaaa

SEQ ID NO: 256998 - RNA, 17 nt, BK polyomavirus
gaugugggaggcuguaa

SEQ ID NO: 256999 - RNA, 23 nt, BK polyomavirus
gauucagugcuugauccaugucc

SEQ ID NO: 257000 - RNA, 15 nt, BK polyomavirus
gauuuauuuugccau

SEQ ID NO: 257001 - RNA, 15 nt, BK polyomavirus
gcagggagugcuaau

SEQ ID NO: 257002 - RNA, 16 nt, BK polyomavirus
gcagggagugcuaaug

SEQ ID NO: 257003 - RNA, 17 nt, BK polyomavirus
gcagggagugcuaauga

SEQ ID NO: 257004 - RNA, 21 nt, BK polyomavirus
gcagggucacaaaaagugcau

SEQ ID NO: 257005 - RNA, 22 nt, BK polyomavirus
gcagggucacaaaaagugcaug

SEQ ID NO: 257006 - RNA, 16 nt, BK polyomavirus
gcaucccuugcuacug

SEQ ID NO: 257007 - RNA, 23 nt, BK polyomavirus
gcaugcuuaaccuucaugcaggg

SEQ ID NO: 257008 - RNA, 14 nt, BK polyomavirus
gccagugaugaaga

SEQ ID NO: 257009 - RNA, 17 nt, BK polyomavirus
gccugcuuugcugugua

SEQ ID NO: 257010 - RNA, 23 nt, BK polyomavirus
gcggaucuuaaaauaucuugcaa

SEQ ID NO: 257011 - RNA, 15 nt, BK polyomavirus
gcuauagaaguucaa

SEQ ID NO: 257012 - RNA, 14 nt, BK polyomavirus
gcuauagcugcuau

SEQ ID NO: 257013 - RNA, 15 nt, BK polyomavirus
gcuauagcugcuaua

SEQ ID NO: 257014 - RNA, 16 nt, BK polyomavirus
gcuauagcugcuauag

SEQ ID NO: 257015 - RNA, 16 nt, BK polyomavirus
gcuaucagcuuuacaa

SEQ ID NO: 257016 - RNA, 14 nt, BK polyomavirus
gcucaaauucugua

SEQ ID NO: 257017 - RNA, 13 nt, BK polyomavirus
gcugcucuagcac

SEQ ID NO: 257018 - RNA, 14 nt, BK polyomavirus
gcugcugcugccac

SEQ ID NO: 257019 - RNA, 14 nt, BK polyomavirus
gcugcugcugcuau

SEQ ID NO: 257020 - RNA, 14 nt, BK polyomavirus
gcuugauccauguc

SEQ ID NO: 257021 - RNA, 13 nt, BK polyomavirus
gcuuugcugugua

SEQ ID NO: 257022 - RNA, 21 nt, BK polyomavirus
gcuuugcuguguauacuacua

SEQ ID NO: 257023 - RNA, 21 nt, BK polyomavirus
ggaaaugcagggagugcuaau

SEQ ID NO: 257024 - RNA, 22 nt, BK polyomavirus
ggaaaugcagggagugcuaaug

SEQ ID NO: 257025 - RNA, 16 nt, BK polyomavirus
ggaagucuuucugugc

SEQ ID NO: 257026 - RNA, 18 nt, BK polyomavirus
ggaggcugcugcugcuau

SEQ ID NO: 257027 - RNA, 19 nt, BK polyomavirus
ggaggcugcugcugcuaua

SEQ ID NO: 257028 - RNA, 20 nt, BK polyomavirus
ggaggcuguaacuguacaaa

SEQ ID NO: 257029 - RNA, 20 nt, BK polyomavirus
ggaucuuaaaauaucuugca

SEQ ID NO: 257030 - RNA, 22 nt, BK polyomavirus
ggaugaagauuuauuuugccau

SEQ ID NO: 257031 - RNA, 16 nt, BK polyomavirus
ggccucuaucagcaau

SEQ ID NO: 257032 - RNA, 15 nt, BK polyomavirus
ggcuauagcugcuau

SEQ ID NO: 257033 - RNA, 15 nt, BK polyomavirus
ggcugaaauugcugc

SEQ ID NO: 257034 - RNA, 15 nt, BK polyomavirus
ggcugcugcugcuau

SEQ ID NO: 257035 - RNA, 16 nt, BK polyomavirus
ggcuguaacuguacaa

SEQ ID NO: 257036 - RNA, 15 nt, BK polyomavirus
ggcuuauacaaaagc

SEQ ID NO: 257037 - RNA, 22 nt, BK polyomavirus
ggcuuauacaaaagcagcauuu

SEQ ID NO: 257038 - RNA, 20 nt, BK polyomavirus
gggaccuaguugccagugua

SEQ ID NO: 257039 - RNA, 11 nt, BK polyomavirus
gggaucacaaa

SEQ ID NO: 257040 - RNA, 23 nt, BK polyomavirus
gggaucacaaaguuuccacugua

SEQ ID NO: 257041 - RNA, 21 nt, BK polyomavirus
ggggauccagaugaaaaccuu

SEQ ID NO: 257042 - RNA, 14 nt, BK polyomavirus
gguagaaugcuucc

SEQ ID NO: 257043 - RNA, 18 nt, BK polyomavirus
ggucacaaaaagugcaug

SEQ ID NO: 257044 - RNA, 13 nt, BK polyomavirus
ggugcugcucuag

SEQ ID NO: 257045 - RNA, 15 nt, BK polyomavirus
gguuugcugcuuuaa

SEQ ID NO: 257046 - RNA, 17 nt, BK polyomavirus
guaaggauucuuuacag

SEQ ID NO: 257047 - RNA, 17 nt, BK polyomavirus
guaauaucaagaauaca

SEQ ID NO: 257048 - RNA, 20 nt, BK polyomavirus
guaccucagaggcuauagcu

SEQ ID NO: 257049 - RNA, 16 nt, BK polyomavirus
guagaugcuauuacag

SEQ ID NO: 257050 - RNA, 15 nt, BK polyomavirus
gucaauauaucuuau

SEQ ID NO: 257051 - RNA, 15 nt, BK polyomavirus
gucacaaaaagugca

SEQ ID NO: 257052 - RNA, 15 nt, BK polyomavirus
gucacuuagcaaaaa

SEQ ID NO: 257053 - RNA, 18 nt, BK polyomavirus
gucuaaagcuaagugcug

SEQ ID NO: 257054 - RNA, 22 nt, BK polyomavirus
gugccaaccuauggaacagaag

SEQ ID NO: 257055 - RNA, 17 nt, BK polyomavirus
gugcuaaugaauuacag

SEQ ID NO: 257056 - RNA, 19 nt, BK polyomavirus
guucaugggugcugcucua

SEQ ID NO: 257057 - RNA, 20 nt, BK polyomavirus
uaaaacacugaaagccuuua

SEQ ID NO: 257058 - RNA, 22 nt, BK polyomavirus
uaaaagcaccuguuuaaagcau

SEQ ID NO: 257059 - RNA, 24 nt, BK polyomavirus
uaaaaguggcuuauacaaaagcag

SEQ ID NO: 257060 - RNA, 11 nt, BK polyomavirus
uaaagcauuuu

SEQ ID NO: 257061 - RNA, 16 nt, BK polyomavirus
uaaagcuaagugcuga

SEQ ID NO: 257062 - RNA, 22 nt, BK polyomavirus
uaacaaguaccucagaggcuau

SEQ ID NO: 257063 - RNA, 14 nt, BK polyomavirus
uaagcuuguguuau

SEQ ID NO: 257064 - RNA, 22 nt, BK polyomavirus
uaauucaaacuguuagugguau

SEQ ID NO: 257065 - RNA, 14 nt, BK polyomavirus
uacaaaagcagcau

SEQ ID NO: 257066 - RNA, 15 nt, BK polyomavirus
uacaccaguuucuua

SEQ ID NO: 257067 - RNA, 17 nt, BK polyomavirus
uacagaucuuuuucuca

SEQ ID NO: 257068 - RNA, 17 nt, BK polyomavirus
uacagcacagcaagaau

SEQ ID NO: 257069 - RNA, 20 nt, BK polyomavirus
uacagcacagcaagaauucc

SEQ ID NO: 257070 - RNA, 19 nt, BK polyomavirus
uacaggcuaucagcuuuac

SEQ ID NO: 257071 - RNA, 21 nt, BK polyomavirus
uacaggcuaucagcuuuacaa

SEQ ID NO: 257072 - RNA, 22 nt, BK polyomavirus
uaccucagaggcuauagcugcu

SEQ ID NO: 257073 - RNA, 13 nt, BK polyomavirus
uagaaugcuuccu

SEQ ID NO: 257074 - RNA, 14 nt, BK polyomavirus
uagagggcauaaca

SEQ ID NO: 257075 - RNA, 19 nt, BK polyomavirus
uagaugcuauuacagaggu

SEQ ID NO: 257076 - RNA, 15 nt, BK polyomavirus
uauacaaaagcagca

SEQ ID NO: 257077 - RNA, 22 nt, BK polyomavirus
uauaggccuaacuccucaaaca

SEQ ID NO: 257078 - RNA, 20 nt, BK polyomavirus
uauauguacaauaaaagcac

SEQ ID NO: 257079 - RNA, 11 nt, BK polyomavirus
uaucagcagcu

SEQ ID NO: 257080 - RNA, 18 nt, BK polyomavirus
uaucugaggcugcugcug

SEQ ID NO: 257081 - RNA, 17 nt, BK polyomavirus
uaugcuguaauugcugg

SEQ ID NO: 257082 - RNA, 19 nt, BK polyomavirus
uauggaaaaauauucugua

SEQ ID NO: 257083 - RNA, 20 nt, BK polyomavirus
uauuacagagguagaaugcu

SEQ ID NO: 257084 - RNA, 13 nt, BK polyomavirus
uauuguacauaua

SEQ ID NO: 257085 - RNA, 12 nt, BK polyomavirus
ucaaauucugua

SEQ ID NO: 257086 - RNA, 22 nt, BK polyomavirus
ucaaauugcaucccuugcuacu

SEQ ID NO: 257087 - RNA, 21 nt, BK polyomavirus
ucaagcuguauuuaguaauag

SEQ ID NO: 257088 - RNA, 16 nt, BK polyomavirus
ucagaauccagccuuu

SEQ ID NO: 257089 - RNA, 17 nt, BK polyomavirus
ucagaauccagccuuuc

SEQ ID NO: 257090 - RNA, 22 nt, BK polyomavirus
ucagaauccagccuuuccuucc

SEQ ID NO: 257091 - RNA, 21 nt, BK polyomavirus
ucagaggcuauagcugcuaua

SEQ ID NO: 257092 - RNA, 22 nt, BK polyomavirus
ucagaggcuauagcugcuauag

SEQ ID NO: 257093 - RNA, 18 nt, BK polyomavirus
ucagcaggggcugaagua

SEQ ID NO: 257094 - RNA, 16 nt, BK polyomavirus
ucagcuuuacaaagag

SEQ ID NO: 257095 - RNA, 20 nt, BK polyomavirus
ucaggcggaucuuaaaauau

SEQ ID NO: 257096 - RNA, 22 nt, BK polyomavirus
ucaguggcugaaauugcugcug

SEQ ID NO: 257097 - RNA, 14 nt, BK polyomavirus
ucaguuucugaauc

SEQ ID NO: 257098 - RNA, 17 nt, BK polyomavirus
ucaguuucugaauccuc

SEQ ID NO: 257099 - RNA, 15 nt, BK polyomavirus
ucauccuugaaaaag

SEQ ID NO: 257100 - RNA, 13 nt, BK polyomavirus
uccacucucuggg

SEQ ID NO: 257101 - RNA, 19 nt, BK polyomavirus
uccagagucuucaguuucu

SEQ ID NO: 257102 - RNA, 21 nt, BK polyomavirus
uccagccuuuccuuccauuca

SEQ ID NO: 257103 - RNA, 20 nt, BK polyomavirus
uccauucaacaauucuagau

SEQ ID NO: 257104 - RNA, 16 nt, BK polyomavirus
ucccuugcuacuguag

SEQ ID NO: 257105 - RNA, 23 nt, BK polyomavirus
ucccuuuuuuuuuguauuuccag

SEQ ID NO: 257106 - RNA, 20 nt, BK polyomavirus
uccuggggcuauugcugggu

SEQ ID NO: 257107 - RNA, 18 nt, BK polyomavirus
uccugguggaguuccuuu

SEQ ID NO: 257108 - RNA, 15 nt, BK polyomavirus
uccuuccauucaaca

SEQ ID NO: 257109 - RNA, 19 nt, BK polyomavirus
uccuugaaaaaguauacau

SEQ ID NO: 257110 - RNA, 18 nt, BK polyomavirus
ucucaacacucaacacca

SEQ ID NO: 257111 - RNA, 19 nt, BK polyomavirus
ucuccacuguuguguucca

SEQ ID NO: 257112 - RNA, 17 nt, BK polyomavirus
ucuucaguuucugaauc

SEQ ID NO: 257113 - RNA, 20 nt, BK polyomavirus
ucuucuaccugggauuccau

SEQ ID NO: 257114 - RNA, 13 nt, BK polyomavirus
ucuuguaauauca

SEQ ID NO: 257115 - RNA, 23 nt, BK polyomavirus
ucuuguaauaucaagaauacauu

SEQ ID NO: 257116 - RNA, 16 nt, BK polyomavirus
ugaaacauacaggcua

SEQ ID NO: 257117 - RNA, 12 nt, BK polyomavirus
ugaaagccuuua

SEQ ID NO: 257118 - RNA, 14 nt, BK polyomavirus
ugaaauugcugcug

SEQ ID NO: 257119 - RNA, 14 nt, BK polyomavirus
ugaauccucuucuc

SEQ ID NO: 257120 - RNA, 12 nt, BK polyomavirus
ugaauuacaggu

SEQ ID NO: 257121 - RNA, 16 nt, BK polyomavirus
ugaccuuugggaaucu

SEQ ID NO: 257122 - RNA, 14 nt, BK polyomavirus
ugcagggagugcua

SEQ ID NO: 257123 - RNA, 16 nt, BK polyomavirus
ugcagggagugcuaau

SEQ ID NO: 257124 - RNA, 22 nt, BK polyomavirus
ugccaguguaucugaggcugcu

SEQ ID NO: 257125 - RNA, 13 nt, BK polyomavirus
ugccaucaaacac

SEQ ID NO: 257126 - RNA, 18 nt, BK polyomavirus
ugcuaaugaauuacaggu

SEQ ID NO: 257127 - RNA, 13 nt, BK polyomavirus
ugcuacuguagag

SEQ ID NO: 257128 - RNA, 20 nt, BK polyomavirus
ugcuacuguagagggcauaa

SEQ ID NO: 257129 - RNA, 15 nt, BK polyomavirus
ugcuauuacagaggu

SEQ ID NO: 257130 - RNA, 12 nt, BK polyomavirus
ugcugcugcuau

SEQ ID NO: 257131 - RNA, 13 nt, BK polyomavirus
ugcugcugcuaua

SEQ ID NO: 257132 - RNA, 16 nt, BK polyomavirus
ugcugcugcuauagaa

SEQ ID NO: 257133 - RNA, 19 nt, BK polyomavirus
ugcugcuggggaggcugcu

SEQ ID NO: 257134 - RNA, 19 nt, BK polyomavirus
ugcuggugcuccuggggcu

SEQ ID NO: 257135 - RNA, 16 nt, BK polyomavirus
ugcuguaauugcuggu

SEQ ID NO: 257136 - RNA, 21 nt, BK polyomavirus
ugcuuaaccuucaugcagggu

SEQ ID NO: 257137 - RNA, 19 nt, BK polyomavirus
ugcuuuuauuguacauaua

SEQ ID NO: 257138 - RNA, 21 nt, BK polyomavirus
ugcuuuuauuguacauauaca

SEQ ID NO: 257139 - RNA, 22 nt, BK polyomavirus
uggaagucuuucugugccauca

SEQ ID NO: 257140 - RNA, 15 nt, BK polyomavirus
uggaauaacuagcau

SEQ ID NO: 257141 - RNA, 13 nt, BK polyomavirus
uggaggaaaaccu

SEQ ID NO: 257142 - RNA, 14 nt, BK polyomavirus
ugggaggcuguaac

SEQ ID NO: 257143 - RNA, 23 nt, BK polyomavirus
ugggaucacaaaguuuccacugu

SEQ ID NO: 257144 - RNA, 17 nt, BK polyomavirus
ugggauuccauaccaua

SEQ ID NO: 257145 - RNA, 23 nt, BK polyomavirus
ugggggaccuaguugccagugua

SEQ ID NO: 257146 - RNA, 18 nt, BK polyomavirus
ugggguagaugcuauuac

SEQ ID NO: 257147 - RNA, 16 nt, BK polyomavirus
uggguucuccuguuua

SEQ ID NO: 257148 - RNA, 17 nt, BK polyomavirus
uggguucuccuguuuau

SEQ ID NO: 257149 - RNA, 14 nt, BK polyomavirus
uggguuugcugcuu

SEQ ID NO: 257150 - RNA, 16 nt, BK polyomavirus
ugguggaggaaaaccu

SEQ ID NO: 257151 - RNA, 15 nt, BK polyomavirus
uguaacuguacaaac

SEQ ID NO: 257152 - RNA, 13 nt, BK polyomavirus
uguacauauacau

SEQ ID NO: 257153 - RNA, 18 nt, BK polyomavirus
uguacauauacauuuaau

SEQ ID NO: 257154 - RNA, 16 nt, BK polyomavirus
uguauacuacuaaaga

SEQ ID NO: 257155 - RNA, 17 nt, BK polyomavirus
uguauacuacuaaagaa

SEQ ID NO: 257156 - RNA, 14 nt, BK polyomavirus
uguauauguacaau

SEQ ID NO: 257157 - RNA, 24 nt, BK polyomavirus
uguauuuccagguucaugggugcu

SEQ ID NO: 257158 - RNA, 18 nt, BK polyomavirus
ugucccuguuugucaaua

SEQ ID NO: 257159 - RNA, 19 nt, BK polyomavirus
uguuccagagcuguuagua

SEQ ID NO: 257160 - RNA, 13 nt, BK polyomavirus
uguuguguuccag

SEQ ID NO: 257161 - RNA, 20 nt, BK polyomavirus
uuaaaacacugaaagccuuu

SEQ ID NO: 257162 - RNA, 12 nt, BK polyomavirus
uuaaagcauuuu

SEQ ID NO: 257163 - RNA, 18 nt, BK polyomavirus
uuagcucaaguaggguau

SEQ ID NO: 257164 - RNA, 17 nt, BK polyomavirus
uuauacaaaagcagcau

SEQ ID NO: 257165 - RNA, 14 nt, BK polyomavirus
uuauuguacauaua

SEQ ID NO: 257166 - RNA, 22 nt, BK polyomavirus
uucagcaggggcugaaguaucu

SEQ ID NO: 257167 - RNA, 16 nt, BK polyomavirus
uucaguuucugaaucc

SEQ ID NO: 257168 - RNA, 14 nt, BK polyomavirus
uucauccuugaaaa

SEQ ID NO: 257169 - RNA, 16 nt, BK polyomavirus
uucaugggugcugcuc

SEQ ID NO: 257170 - RNA, 21 nt, BK polyomavirus
uucaugggugcugcucuagca

SEQ ID NO: 257171 - RNA, 16 nt, BK polyomavirus
uuccagguucaugggu

SEQ ID NO: 257172 - RNA, 22 nt, BK polyomavirus
uuccagguucaugggugcugcu

SEQ ID NO: 257173 - RNA, 23 nt, BK polyomavirus
uuccagguucaugggugcugcuc

SEQ ID NO: 257174 - RNA, 12 nt, BK polyomavirus
uuccccaugcau

SEQ ID NO: 257175 - RNA, 17 nt, BK polyomavirus
uuccuaaacccagaaau

SEQ ID NO: 257176 - RNA, 13 nt, BK polyomavirus
uuccuuccauuca

SEQ ID NO: 257177 - RNA, 14 nt, BK polyomavirus
uuccuuccauucaa

SEQ ID NO: 257178 - RNA, 15 nt, BK polyomavirus
uucuaccugggauuc

SEQ ID NO: 257179 - RNA, 16 nt, BK polyomavirus
uucucuuguaauauca

SEQ ID NO: 257180 - RNA, 22 nt, BK polyomavirus
uucuguauaaaaaacuuaugga

SEQ ID NO: 257181 - RNA, 16 nt, BK polyomavirus
uugaaaaaguauacau

SEQ ID NO: 257182 - RNA, 19 nt, BK polyomavirus
uugcuacuguagagggcau

SEQ ID NO: 257183 - RNA, 17 nt, BK polyomavirus
uugcuggguuugcugcu

SEQ ID NO: 257184 - RNA, 18 nt, BK polyomavirus
uugcuggguuugcugcuu

SEQ ID NO: 257185 - RNA, 14 nt, BK polyomavirus
uuggaaaugcaggg

SEQ ID NO: 257186 - RNA, 22 nt, BK polyomavirus
uuggaaaugcagggagugcuaa

SEQ ID NO: 257187 - RNA, 21 nt, BK polyomavirus
uuggguaaggauucuuuacag

SEQ ID NO: 257188 - RNA, 15 nt, Black beetle virus
acacccguucuagcc

SEQ ID NO: 257189 - RNA, 16 nt, Black beetle virus
acacccguucuagccc

SEQ ID NO: 257190 - RNA, 17 nt, Black beetle virus
acccacacccguucuag

SEQ ID NO: 257191 - RNA, 21 nt, Black beetle virus
acccacacccguucuagcccg

SEQ ID NO: 257192 - RNA, 12 nt, Black beetle virus
aggagcacccac

SEQ ID NO: 257193 - RNA, 13 nt, Black beetle virus
aggagcacccaca

SEQ ID NO: 257194 - RNA, 22 nt, Black beetle virus
agguggcucuuaggagcaccca

SEQ ID NO: 257195 - RNA, 14 nt, Black beetle virus
cacccguucuagcc

SEQ ID NO: 257196 - RNA, 15 nt, Black beetle virus
cacccguucuagccc

SEQ ID NO: 257197 - RNA, 22 nt, Black beetle virus
ccacacccguucuagcccgaaa

SEQ ID NO: 257198 - RNA, 13 nt, Black beetle virus
cccgaaagggcag

SEQ ID NO: 257199 - RNA, 14 nt, Black beetle virus
cguucuagcccgaa

SEQ ID NO: 257200 - RNA, 15 nt, Black beetle virus
cuagcccgaaagggc

SEQ ID NO: 257201 - RNA, 22 nt, Black beetle virus
cucuuaggagcacccacacccg

SEQ ID NO: 257202 - RNA, 22 nt, Black beetle virus
gcacccacacccguucuagccc

SEQ ID NO: 257203 - RNA, 16 nt, Black beetle virus
gcucuuaggagcaccc

SEQ ID NO: 257204 - RNA, 17 nt, Black beetle virus
gcucuuaggagcaccca

SEQ ID NO: 257205 - RNA, 20 nt, Black beetle virus
acacccguucuagcccgaaa

SEQ ID NO: 257206 - RNA, 20 nt, Black beetle virus
acccacacccguucuagccc

SEQ ID NO: 257207 - RNA, 13 nt, Black beetle virus
acccguucuagcc

SEQ ID NO: 257208 - RNA, 17 nt, Black beetle virus
cacacccguucuagccc

SEQ ID NO: 257209 - RNA, 16 nt, Black beetle virus
cccacacccguucuag

SEQ ID NO: 257210 - RNA, 13 nt, Black beetle virus
cccguucuagccc

SEQ ID NO: 257211 - RNA, 11 nt, Black beetle virus
cguucuagccc

SEQ ID NO: 257212 - RNA, 17 nt, Black beetle virus
cuagcccgaaagggcag

SEQ ID NO: 257213 - RNA, 21 nt, Black beetle virus
gcacccacacccguucuagcc

SEQ ID NO: 257214 - RNA, 18 nt, Black beetle virus
ggagcacccacacccguu

SEQ ID NO: 257215 - RNA, 21 nt, Black beetle virus
guggcucuuaggagcacccac

SEQ ID NO: 257216 - RNA, 13 nt, Black beetle virus
guucuagcccgaa

SEQ ID NO: 257217 - RNA, 19 nt, Black beetle virus
guucuagcccgaaagggca

SEQ ID NO: 257218 - RNA, 14 nt, Black beetle virus
uagcccgaaagggc

SEQ ID NO: 257219 - RNA, 14 nt, Black beetle virus
uaggagcacccaca

SEQ ID NO: 257220 - RNA, 14 nt, Black beetle virus
ucuagcccgaaagg

SEQ ID NO: 257221 - RNA, 16 nt, Black beetle virus
ucuagcccgaaagggc

SEQ ID NO: 257222 - RNA, 17 nt, Black beetle virus
ucuagcccgaaagggca

SEQ ID NO: 257223 - RNA, 15 nt, Black beetle virus
ucuuaggagcaccca

SEQ ID NO: 257224 - RNA, 22 nt, Black beetle virus
ggagcacccacacccguucuag

SEQ ID NO: 257225 - RNA, 19 nt, Black beetle virus
ggcucuuaggagcacccac

SEQ ID NO: 257226 - RNA, 10 nt, Black beetle virus
guucuagccc

SEQ ID NO: 257227 - RNA, 21 nt, Black beetle virus
guucuagcccgaaagggcaga

SEQ ID NO: 257228 - RNA, 12 nt, Black beetle virus
uaggagcaccca

SEQ ID NO: 257229 - RNA, 15 nt, Black beetle virus
uaggagcacccacac

SEQ ID NO: 257230 - RNA, 19 nt, Black beetle virus
uaggagcacccacacccgu

SEQ ID NO: 257231 - RNA, 18 nt, Black beetle virus
ucuagcccgaaagggcag

SEQ ID NO: 257232 - RNA, 17 nt, Black beetle virus
ucuuaggagcacccaca

SEQ ID NO: 257233 - RNA, 17 nt, Bovine leukemia virus
aaaaugccggcccuguc

SEQ ID NO: 257234 - RNA, 15 nt, Bovine leukemia virus
acacccugagcugcu

SEQ ID NO: 257235 - RNA, 17 nt, Bovine leukemia virus
acccugagcugcugacc

SEQ ID NO: 257236 - RNA, 17 nt, Bovine leukemia virus
acucucucucuugccuc

SEQ ID NO: 257237 - RNA, 23 nt, Bovine leukemia virus
acucucucucuugccuccugacc

SEQ ID NO: 257238 - RNA, 23 nt, Bovine leukemia virus
agaagcguucuccuccugagacc

SEQ ID NO: 257239 - RNA, 15 nt, Bovine leukemia virus
agagaagcugcugac

SEQ ID NO: 257240 - RNA, 15 nt, Bovine leukemia virus
agcucucgguccuga

SEQ ID NO: 257241 - RNA, 19 nt, Bovine leukemia virus
agcucucgguccugagcuc

SEQ ID NO: 257242 - RNA, 21 nt, Bovine leukemia virus
agcucucgguccugagcucuc

SEQ ID NO: 257243 - RNA, 12 nt, Bovine leukemia virus
agcucucuugcu

SEQ ID NO: 257244 - RNA, 16 nt, Bovine leukemia virus
aucuccgguccucuga

SEQ ID NO: 257245 - RNA, 23 nt, Bovine leukemia virus
cagacagagacgucagcugccag

SEQ ID NO: 257246 - RNA, 23 nt, Bovine leukemia virus
cagcugccagagaagcugcugac

SEQ ID NO: 257247 - RNA, 19 nt, Bovine leukemia virus
caggccuaggcgccgccac

SEQ ID NO: 257248 - RNA, 17 nt, Bovine leukemia virus
ccagagaagcugcugac

SEQ ID NO: 257249 - RNA, 12 nt, Bovine leukemia virus
ccgcgagcucua

SEQ ID NO: 257250 - RNA, 10 nt, Bovine leukemia virus
ccuccugacc

SEQ ID NO: 257251 - RNA, 12 nt, Bovine leukemia virus
ccuccugagacc

SEQ ID NO: 257252 - RNA, 17 nt, Bovine leukemia virus
cgguccugagcucucuu

SEQ ID NO: 257253 - RNA, 17 nt, Bovine leukemia virus
cuagugcucagcucucg

SEQ ID NO: 257254 - RNA, 18 nt, Bovine leukemia virus
cucagcucucgguccuga

SEQ ID NO: 257255 - RNA, 13 nt, Bovine leukemia virus
cucggcugagacc

SEQ ID NO: 257256 - RNA, 21 nt, Bovine leukemia virus
cugguggcuagaauccccgua

SEQ ID NO: 257257 - RNA, 17 nt, Bovine leukemia virus
cuuucccgaaaaaucca

SEQ ID NO: 257258 - RNA, 22 nt, Bovine leukemia virus
gaagcguucuccuccugagacc

SEQ ID NO: 257259 - RNA, 19 nt, Bovine leukemia virus
gacccuagugcucagcucu

SEQ ID NO: 257260 - RNA, 14 nt, Bovine leukemia virus
gacggcagcuggug

SEQ ID NO: 257261 - RNA, 14 nt, Bovine leukemia virus
gagaagcugcugac

SEQ ID NO: 257262 - RNA, 21 nt, Bovine leukemia virus
gagacgucagcugccagagaa

SEQ ID NO: 257263 - RNA, 13 nt, Bovine leukemia virus
gagcucucuugcu

SEQ ID NO: 257264 - RNA, 15 nt, Bovine leukemia virus
gccccguaaaccaga

SEQ ID NO: 257265 - RNA, 20 nt, Bovine leukemia virus
gcugaccucaccugcugaua

SEQ ID NO: 257266 - RNA, 20 nt, Bovine leukemia virus
gcugccagagaagcugcuga

SEQ ID NO: 257267 - RNA, 20 nt, Bovine leukemia virus
gcugcugaccucaccugcug

SEQ ID NO: 257268 - RNA, 15 nt, Bovine leukemia virus
gguccugagcucucu

SEQ ID NO: 257269 - RNA, 16 nt, Bovine leukemia virus
gugguucucggcugag

SEQ ID NO: 257270 - RNA, 13 nt, Bovine leukemia virus
uaauaaaaugccg

SEQ ID NO: 257271 - RNA, 23 nt, Bovine leukemia virus
ucagcugccagagaagcugcuga

SEQ ID NO: 257272 - RNA, 15 nt, Bovine leukemia virus
uccugagcucucuug

SEQ ID NO: 257273 - RNA, 22 nt, Bovine leukemia virus
ucgguccugagcucucuugcuc

SEQ ID NO: 257274 - RNA, 14 nt, Bovine leukemia virus
ucuccgguccucug

SEQ ID NO: 257275 - RNA, 18 nt, Bovine leukemia virus
ucucgguccugagcucuc

SEQ ID NO: 257276 - RNA, 16 nt, Bovine leukemia virus
ucucuugccuccugac

SEQ ID NO: 257277 - RNA, 20 nt, Bovine leukemia virus
ugagaccgccgcgagcucua

SEQ ID NO: 257278 - RNA, 20 nt, Bovine leukemia virus
ugcaggccuaggcgccgcca

SEQ ID NO: 257279 - RNA, 16 nt, Bovine leukemia virus
ugccagagaagcugcu

SEQ ID NO: 257280 - RNA, 16 nt, Bovine leukemia virus
uggacucucucucuug

SEQ ID NO: 257281 - RNA, 13 nt, Bovine leukemia virus
acacccugagcug

SEQ ID NO: 257282 - RNA, 14 nt, Bovine leukemia virus
acccugagcugcug

SEQ ID NO: 257283 - RNA, 16 nt, Bovine leukemia virus
accgccgcgagcucua

SEQ ID NO: 257284 - RNA, 21 nt, Bovine leukemia virus
acguggacucucucucuugcc

SEQ ID NO: 257285 - RNA, 22 nt, Bovine leukemia virus
agaagcguucuccuccugagac

SEQ ID NO: 257286 - RNA, 18 nt, Bovine leukemia virus
agaccgccgcgagcucua

SEQ ID NO: 257287 - RNA, 13 nt, Bovine leukemia virus
agcugcugaccuc

SEQ ID NO: 257288 - RNA, 19 nt, Bovine leukemia virus
auccacacccugagcugcu

SEQ ID NO: 257289 - RNA, 22 nt, Bovine leukemia virus
auccacacccugagcugcugac

SEQ ID NO: 257290 - RNA, 17 nt, Bovine leukemia virus
aucuccgguccucugac

SEQ ID NO: 257291 - RNA, 14 nt, Bovine leukemia virus
augccggcccuguc

SEQ ID NO: 257292 - RNA, 16 nt, Bovine leukemia virus
cagagaagcugcugac

SEQ ID NO: 257293 - RNA, 18 nt, Bovine leukemia virus
cagagacgucagcugcca

SEQ ID NO: 257294 - RNA, 19 nt, Bovine leukemia virus
cagagacgucagcugccag

SEQ ID NO: 257295 - RNA, 18 nt, Bovine leukemia virus
cagcucucgguccugagc

SEQ ID NO: 257296 - RNA, 22 nt, Bovine leukemia virus
cagcucucgguccugagcucuc

SEQ ID NO: 257297 - RNA, 18 nt, Bovine leukemia virus
caggccuaggcgccgcca

SEQ ID NO: 257298 - RNA, 14 nt, Bovine leukemia virus
caugcaggccuagg

SEQ ID NO: 257299 - RNA, 17 nt, Bovine leukemia virus
ccacacccugagcugcu

SEQ ID NO: 257300 - RNA, 23 nt, Bovine leukemia virus
ccagaagcguucuccuccugaga

SEQ ID NO: 257301 - RNA, 14 nt, Bovine leukemia virus
cccugagcugcuga

SEQ ID NO: 257302 - RNA, 22 nt, Bovine leukemia virus
ccuccugagacccuagugcuca

SEQ ID NO: 257303 - RNA, 15 nt, Bovine leukemia virus
ccugagacccuagug

SEQ ID NO: 257304 - RNA, 14 nt, Bovine leukemia virus
ccugagcugcugac

SEQ ID NO: 257305 - RNA, 18 nt, Bovine leukemia virus
cgccgccaccgccccgua

SEQ ID NO: 257306 - RNA, 12 nt, Bovine leukemia virus
cgcgagcucuau

SEQ ID NO: 257307 - RNA, 21 nt, Bovine leukemia virus
cggcaccagaagcguucuccu

SEQ ID NO: 257308 - RNA, 15 nt, Bovine leukemia virus
cgguccugagcucuc

SEQ ID NO: 257309 - RNA, 16 nt, Bovine leukemia virus
cgguccugagcucucu

SEQ ID NO: 257310 - RNA, 17 nt, Bovine leukemia virus
cuauccggcagcgguca

SEQ ID NO: 257311 - RNA, 15 nt, Bovine leukemia virus
cucccgagaccuucu

SEQ ID NO: 257312 - RNA, 17 nt, Bovine leukemia virus
cugaccccgcgcuccaa

SEQ ID NO: 257313 - RNA, 14 nt, Bovine leukemia virus
cugagacccuagug

SEQ ID NO: 257314 - RNA, 15 nt, Bovine leukemia virus
cugagcucucuugcu

SEQ ID NO: 257315 - RNA, 17 nt, Bovine leukemia virus
cugccagagaagcugcu

SEQ ID NO: 257316 - RNA, 19 nt, Bovine leukemia virus
cugccagagaagcugcuga

SEQ ID NO: 257317 - RNA, 20 nt, Bovine leukemia virus
cugcugaccucaccugcuga

SEQ ID NO: 257318 - RNA, 23 nt, Bovine leukemia virus
cugcugaccucaccugcugauaa

SEQ ID NO: 257319 - RNA, 14 nt, Bovine leukemia virus
cuugccuccugacc

SEQ ID NO: 257320 - RNA, 21 nt, Bovine leukemia virus
gaagcguucuccuccugagac

SEQ ID NO: 257321 - RNA, 13 nt, Bovine leukemia virus
gaagcugcugacg

SEQ ID NO: 257322 - RNA, 19 nt, Bovine leukemia virus
gaauccccguaccucccca

SEQ ID NO: 257323 - RNA, 18 nt, Bovine leukemia virus
gaccgccgcgagcucuau

SEQ ID NO: 257324 - RNA, 18 nt, Bovine leukemia virus
gaccucaccugcugauaa

SEQ ID NO: 257325 - RNA, 21 nt, Bovine leukemia virus
gacggcagcugguggcuagaa

SEQ ID NO: 257326 - RNA, 16 nt, Bovine leukemia virus
gacucucucucuugcc

SEQ ID NO: 257327 - RNA, 11 nt, Bovine leukemia virus
gagcucucuug

SEQ ID NO: 257328 - RNA, 11 nt, Bovine leukemia virus
gagcugcugac

SEQ ID NO: 257329 - RNA, 12 nt, Bovine leukemia virus
gagcugcugacc

SEQ ID NO: 257330 - RNA, 23 nt, Bovine leukemia virus
gagggugguucucggcugagacc

SEQ ID NO: 257331 - RNA, 16 nt, Bovine leukemia virus
gagucauuuguaugaa

SEQ ID NO: 257332 - RNA, 19 nt, Bovine leukemia virus
gccagagaagcugcugacg

SEQ ID NO: 257333 - RNA, 17 nt, Bovine leukemia virus
gcguucuccuccugaga

SEQ ID NO: 257334 - RNA, 13 nt, Bovine leukemia virus
ggacucucucucu

SEQ ID NO: 257335 - RNA, 15 nt, Bovine leukemia virus
ggacucucucucuug

SEQ ID NO: 257336 - RNA, 19 nt, Bovine leukemia virus
ggacucucucucuugccuc

SEQ ID NO: 257337 - RNA, 20 nt, Bovine leukemia virus
gucagguaaggcaaaccacg

SEQ ID NO: 257338 - RNA, 19 nt, Bovine leukemia virus
guggacucucucucuugcc

SEQ ID NO: 257339 - RNA, 15 nt, Bovine leukemia virus
guucuccuccugaga

SEQ ID NO: 257340 - RNA, 15 nt, Bovine leukemia virus
guucucggcugagac

SEQ ID NO: 257341 - RNA, 16 nt, Bovine leukemia virus
guucucggcugagacc

SEQ ID NO: 257342 - RNA, 12 nt, Bovine leukemia virus
ucaccugcugau

SEQ ID NO: 257343 - RNA, 21 nt, Bovine leukemia virus
ucagcucucgguccugagcuc

SEQ ID NO: 257344 - RNA, 22 nt, Bovine leukemia virus
ucagcugccagagaagcugcug

SEQ ID NO: 257345 - RNA, 16 nt, Bovine leukemia virus
uccacacccugagcug

SEQ ID NO: 257346 - RNA, 18 nt, Bovine leukemia virus
uccacacccugagcugcu

SEQ ID NO: 257347 - RNA, 21 nt, Bovine leukemia virus
uccacacccugagcugcugac

SEQ ID NO: 257348 - RNA, 15 nt, Bovine leukemia virus
ucgguccugagcucu

SEQ ID NO: 257349 - RNA, 15 nt, Bovine leukemia virus
ucuugccuccugacc

SEQ ID NO: 257350 - RNA, 19 nt, Bovine leukemia virus
ugaccucaccugcugauaa

SEQ ID NO: 257351 - RNA, 19 nt, Bovine leukemia virus
ugagaccgccgcgagcucu

SEQ ID NO: 257352 - RNA, 12 nt, Bovine leukemia virus
ugagcugcugac

SEQ ID NO: 257353 - RNA, 19 nt, Bovine leukemia virus
ugccagagaagcugcugac

SEQ ID NO: 257354 - RNA, 21 nt, Bovine leukemia virus
ugcucagcucucgguccugag

SEQ ID NO: 257355 - RNA, 18 nt, Bovine leukemia virus
uguaugaaagaucaugca

SEQ ID NO: 257356 - RNA, 14 nt, Bovine leukemia virus
uucuccuccugaga

SEQ ID NO: 257357 - RNA, 22 nt, Bovine leukemia virus
uucuccuccugagacccuagug

SEQ ID NO: 257358 - RNA, 13 nt, Bunyamwera virus
aaagcacuaugug

SEQ ID NO: 257359 - RNA, 18 nt, Bunyamwera virus
aaugauaacagcauucaa

SEQ ID NO: 257360 - RNA, 22 nt, Bunyamwera virus
aaugcggcagagguacauggga

SEQ ID NO: 257361 - RNA, 16 nt, Bunyamwera virus
aaugggaucacuugga

SEQ ID NO: 257362 - RNA, 14 nt, Bunyamwera virus
aauuggacauucca

SEQ ID NO: 257363 - RNA, 17 nt, Bunyamwera virus
acuguuaguaaauugac

SEQ ID NO: 257364 - RNA, 14 nt, Bunyamwera virus
agacagcgggcuaa

SEQ ID NO: 257365 - RNA, 14 nt, Bunyamwera virus
agagguacauggga

SEQ ID NO: 257366 - RNA, 20 nt, Bunyamwera virus
agcauucaaaaaaguacaau

SEQ ID NO: 257367 - RNA, 23 nt, Bunyamwera virus
agcuuagguuggaagaaaaccaa

SEQ ID NO: 257368 - RNA, 15 nt, Bunyamwera virus
auuaauucauuguua

SEQ ID NO: 257369 - RNA, 16 nt, Bunyamwera virus
auuccaaaagcacuau

SEQ ID NO: 257370 - RNA, 13 nt, Bunyamwera virus
auuggacauucca

SEQ ID NO: 257371 - RNA, 14 nt, Bunyamwera virus
caaaaauaaucaac

SEQ ID NO: 257372 - RNA, 14 nt, Bunyamwera virus
caaaaaugauaaca

SEQ ID NO: 257373 - RNA, 19 nt, Bunyamwera virus
caaaaaugauaacagcauu

SEQ ID NO: 257374 - RNA, 23 nt, Bunyamwera virus
caaaaaugauaacagcauucaaa

SEQ ID NO: 257375 - RNA, 14 nt, Bunyamwera virus
cacauugugucaaa

SEQ ID NO: 257376 - RNA, 15 nt, Bunyamwera virus
cagucugcacugaca

SEQ ID NO: 257377 - RNA, 15 nt, Bunyamwera virus
cuauguggcaaaaau

SEQ ID NO: 257378 - RNA, 21 nt, Bunyamwera virus
gaaaaccaauguuagugcagc

SEQ ID NO: 257379 - RNA, 13 nt, Bunyamwera virus
gaaaagaauggga

SEQ ID NO: 257380 - RNA, 15 nt, Bunyamwera virus
gacauuccaaaagca

SEQ ID NO: 257381 - RNA, 19 nt, Bunyamwera virus
gacauuccaaaagcacuau

SEQ ID NO: 257382 - RNA, 15 nt, Bunyamwera virus
gauaacagcauucaa

SEQ ID NO: 257383 - RNA, 19 nt, Bunyamwera virus
gauaacagcauucaaaaaa

SEQ ID NO: 257384 - RNA, 22 nt, Bunyamwera virus
gaugcauuuuuaaucgggcuaa

SEQ ID NO: 257385 - RNA, 16 nt, Bunyamwera virus
gcagagguacauggga

SEQ ID NO: 257386 - RNA, 19 nt, Bunyamwera virus
gggaucuacaaaguucagc

SEQ ID NO: 257387 - RNA, 21 nt, Bunyamwera virus
guaagcagggaugcauuuuua

SEQ ID NO: 257388 - RNA, 16 nt, Bunyamwera virus
gucugcacugacaguu

SEQ ID NO: 257389 - RNA, 19 nt, Bunyamwera virus
uaaaucaaaaauaaucaac

SEQ ID NO: 257390 - RNA, 18 nt, Bunyamwera virus
uaacagcauucaaaaaag

SEQ ID NO: 257391 - RNA, 19 nt, Bunyamwera virus
uaauuggacauuccaaaag

SEQ ID NO: 257392 - RNA, 20 nt, Bunyamwera virus
uagugcagcugccagggacu

SEQ ID NO: 257393 - RNA, 22 nt, Bunyamwera virus
ucaacccuuuggcugaaaagaa

SEQ ID NO: 257394 - RNA, 16 nt, Bunyamwera virus
ucagugaaccagagaa

SEQ ID NO: 257395 - RNA, 22 nt, Bunyamwera virus
uccaaaagcacuauguggcaaa

SEQ ID NO: 257396 - RNA, 23 nt, Bunyamwera virus
ucuacaaaguucagcgcaaggaa

SEQ ID NO: 257397 - RNA, 10 nt, Bunyamwera virus
aaaaccaaug

SEQ ID NO: 257398 - RNA, 16 nt, Bunyamwera virus
aaaaugauaacagcau

SEQ ID NO: 257399 - RNA, 21 nt, Bunyamwera virus
aaagaaugggaucacuuggaa

SEQ ID NO: 257400 - RNA, 15 nt, Bunyamwera virus
aaauaccuugagaaa

SEQ ID NO: 257401 - RNA, 19 nt, Bunyamwera virus
aaaugauaacagcauucaa

SEQ ID NO: 257402 - RNA, 23 nt, Bunyamwera virus
aacagcauucaaaaaaguacaau

SEQ ID NO: 257403 - RNA, 22 nt, Bunyamwera virus
aauucauauugacacauugugu

SEQ ID NO: 257404 - RNA, 15 nt, Bunyamwera virus
aauuggacauuccaa

SEQ ID NO: 257405 - RNA, 17 nt, Bunyamwera virus
aauuuucuuauguagga

SEQ ID NO: 257406 - RNA, 14 nt, Bunyamwera virus
acaaaguucagcgc

SEQ ID NO: 257407 - RNA, 14 nt, Bunyamwera virus
acagaaguucaguc

SEQ ID NO: 257408 - RNA, 20 nt, Bunyamwera virus
agugaaccagagaaauugau

SEQ ID NO: 257409 - RNA, 19 nt, Bunyamwera virus
auaccuugagaaaacaaug

SEQ ID NO: 257410 - RNA, 15 nt, Bunyamwera virus
auguaagcagggaug

SEQ ID NO: 257411 - RNA, 13 nt, Bunyamwera virus
auguuagugcagc

SEQ ID NO: 257412 - RNA, 14 nt, Bunyamwera virus
auucauauugacac

SEQ ID NO: 257413 - RNA, 17 nt, Bunyamwera virus
auugacagaaguucagu

SEQ ID NO: 257414 - RNA, 18 nt, Bunyamwera virus
auuuaauuggacauucca

SEQ ID NO: 257415 - RNA, 21 nt, Bunyamwera virus
auuuaauuggacauuccaaaa

SEQ ID NO: 257416 - RNA, 15 nt, Bunyamwera virus
caauguuagugcagc

SEQ ID NO: 257417 - RNA, 18 nt, Bunyamwera virus
cauucaaaaaaguacaau

SEQ ID NO: 257418 - RNA, 14 nt, Bunyamwera virus
cauucaaaauucau

SEQ ID NO: 257419 - RNA, 17 nt, Bunyamwera virus
cauuccaaaagcacuau

SEQ ID NO: 257420 - RNA, 18 nt, Bunyamwera virus
cauuguuaaauacauuca

SEQ ID NO: 257421 - RNA, 16 nt, Bunyamwera virus
ccaauguuagugcagc

SEQ ID NO: 257422 - RNA, 19 nt, Bunyamwera virus
cgcaaggaaauggaaccaa

SEQ ID NO: 257423 - RNA, 17 nt, Bunyamwera virus
cuaaauucggaaucaac

SEQ ID NO: 257424 - RNA, 17 nt, Bunyamwera virus
cuguuaguaaauugaca

SEQ ID NO: 257425 - RNA, 23 nt, Bunyamwera virus
cuguuuuguuaucgguagcacac

SEQ ID NO: 257426 - RNA, 19 nt, Bunyamwera virus
cuuagcaaucgggaucuac

SEQ ID NO: 257427 - RNA, 22 nt, Bunyamwera virus
cuuaggaacuuucagauucuac

SEQ ID NO: 257428 - RNA, 21 nt, Bunyamwera virus
cuuucuucccaggaucagaga

SEQ ID NO: 257429 - RNA, 15 nt, Bunyamwera virus
gaaauggaaccaaaa

SEQ ID NO: 257430 - RNA, 17 nt, Bunyamwera virus
gaacuuucagauucuac

SEQ ID NO: 257431 - RNA, 13 nt, Bunyamwera virus
gaagaaaaccaau

SEQ ID NO: 257432 - RNA, 17 nt, Bunyamwera virus
gaagaaaaccaauguua

SEQ ID NO: 257433 - RNA, 14 nt, Bunyamwera virus
gacagaaguucagu

SEQ ID NO: 257434 - RNA, 16 nt, Bunyamwera virus
gagaaauugauuauua

SEQ ID NO: 257435 - RNA, 18 nt, Bunyamwera virus
gauaacagcauucaaaaa

SEQ ID NO: 257436 - RNA, 20 nt, Bunyamwera virus
gcaaggaaauggaaccaaaa

SEQ ID NO: 257437 - RNA, 15 nt, Bunyamwera virus
gcaaucgggaucuac

SEQ ID NO: 257438 - RNA, 18 nt, Bunyamwera virus
gcagcaacuuggacuguu

SEQ ID NO: 257439 - RNA, 19 nt, Bunyamwera virus
gcauucaaaaaaguacaau

SEQ ID NO: 257440 - RNA, 21 nt, Bunyamwera virus
gcgcaaggaaauggaaccaaa

SEQ ID NO: 257441 - RNA, 15 nt, Bunyamwera virus
ggaagaaaaccaaug

SEQ ID NO: 257442 - RNA, 18 nt, Bunyamwera virus
ggcugaaaagaaugggau

SEQ ID NO: 257443 - RNA, 13 nt, Bunyamwera virus
gggcuaaagucau

SEQ ID NO: 257444 - RNA, 15 nt, Bunyamwera virus
guuaaauacauucaa

SEQ ID NO: 257445 - RNA, 22 nt, Bunyamwera virus
guucagcgcaaggaaauggaac

SEQ ID NO: 257446 - RNA, 14 nt, Bunyamwera virus
uaaauacauucaaa

SEQ ID NO: 257447 - RNA, 15 nt, Bunyamwera virus
uaauuggacauucca

SEQ ID NO: 257448 - RNA, 17 nt, Bunyamwera virus
uacauucaaaauucaua

SEQ ID NO: 257449 - RNA, 19 nt, Bunyamwera virus
uagaagcagcaacuuggac

SEQ ID NO: 257450 - RNA, 22 nt, Bunyamwera virus
uaguaaauugacagaaguucag

SEQ ID NO: 257451 - RNA, 15 nt, Bunyamwera virus
ucaaaaaaguacaau

SEQ ID NO: 257452 - RNA, 15 nt, Bunyamwera virus
ucaaaaauaaucaac

SEQ ID NO: 257453 - RNA, 13 nt, Bunyamwera virus
ucaaaauucauau

SEQ ID NO: 257454 - RNA, 18 nt, Bunyamwera virus
ucaaaauucauauugaca

SEQ ID NO: 257455 - RNA, 19 nt, Bunyamwera virus
ucauuguuaaauacauuca

SEQ ID NO: 257456 - RNA, 14 nt, Bunyamwera virus
ucuacaaaguucag

SEQ ID NO: 257457 - RNA, 16 nt, Bunyamwera virus
ugauaacagcauucaa

SEQ ID NO: 257458 - RNA, 19 nt, Bunyamwera virus
ugcuaaauucggaaucaac

SEQ ID NO: 257459 - RNA, 20 nt, Bunyamwera virus
uggacuguuaguaaauugac

SEQ ID NO: 257460 - RNA, 14 nt, Bunyamwera virus
uguaagcagggaug

SEQ ID NO: 257461 - RNA, 12 nt, Bunyamwera virus
uguggcaaaaau

SEQ ID NO: 257462 - RNA, 12 nt, Bunyamwera virus
uguuagugcagc

SEQ ID NO: 257463 - RNA, 10 nt, Bunyamwera virus
uuagugcagc

SEQ ID NO: 257464 - RNA, 19 nt, Bunyamwera virus
uuaucucucuuucuuccca

SEQ ID NO: 257465 - RNA, 19 nt, Bunyamwera virus
uuauuaaaucaaaaauaau

SEQ ID NO: 257466 - RNA, 16 nt, Bunyamwera virus
uugacagaaguucagu

SEQ ID NO: 257467 - RNA, 22 nt, Bunyamwera virus
uuuaauuggacauuccaaaagc

SEQ ID NO: 257468 - RNA, 22 nt, Bunyamwera virus
uuuuuaaucgggcuaaagucau

SEQ ID NO: 257469 - RNA, 12 nt, Bunyamwera virus
ugacacauugug

SEQ ID NO: 257470 - RNA, 15 nt, Bunyamwera virus
ugacagaaguucagu

SEQ ID NO: 257471 - RNA, 17 nt, Bunyamwera virus
ugauaacagcauucaaa

SEQ ID NO: 257472 - RNA, 16 nt, Bunyamwera virus
uggaagaaaaccaaug

SEQ ID NO: 257473 - RNA, 15 nt, Bunyamwera virus
ugggaucacuuggaa

SEQ ID NO: 257474 - RNA, 21 nt, Bunyamwera virus
ugguuggggacagaaagacag

SEQ ID NO: 257475 - RNA, 17 nt, Bunyamwera virus
uguuaucgguagcacac

SEQ ID NO: 257476 - RNA, 20 nt, Bunyamwera virus
uucagcgcaaggaaauggaa

SEQ ID NO: 257477 - RNA, 20 nt, Bunyamwera virus
uucauuguuaaauacauuca

SEQ ID NO: 257478 - RNA, 15 nt, Bunyamwera virus
uuggcugaaaagaau

SEQ ID NO: 257479 - RNA, 18 nt, Bunyamwera virus
uuguuaaauacauucaaa

SEQ ID NO: 257480 - RNA, 14 nt, Bunyamwera virus
uuucuucccaggau

SEQ ID NO: 257481 - RNA, 22 nt, Bunyamwera virus
uuucuucccaggaucagagaug

SEQ ID NO: 257482 - RNA, 23 nt, Crimean-Congo hemorrhagic fever virus
aaguaagacgguuuauaccgugc

SEQ ID NO: 257483 - RNA, 18 nt, Crimean-Congo hemorrhagic fever virus
agccuuuaccauacuggu

SEQ ID NO: 257484 - RNA, 12 nt, Crimean-Congo hemorrhagic fever virus
auaaccauuuca

SEQ ID NO: 257485 - RNA, 17 nt, Crimean-Congo hemorrhagic fever virus
auaauugcaauacuuaa

SEQ ID NO: 257486 - RNA, 22 nt, Crimean-Congo hemorrhagic fever virus
auacaaacugcucuguacucaa

SEQ ID NO: 257487 - RNA, 11 nt, Crimean-Congo hemorrhagic fever virus
auacugcaauu

SEQ ID NO: 257488 - RNA, 17 nt, Crimean-Congo hemorrhagic fever virus
auacugguauucuacua

SEQ ID NO: 257489 - RNA, 18 nt, Crimean-Congo hemorrhagic fever virus
aucaugcuuuuuuacuug

SEQ ID NO: 257490 - RNA, 14 nt, Crimean-Congo hemorrhagic fever virus
auuacuuccagggu

SEQ ID NO: 257491 - RNA, 13 nt, Crimean-Congo hemorrhagic fever virus
auugcaauacuua

SEQ ID NO: 257492 - RNA, 19 nt, Crimean-Congo hemorrhagic fever virus
auuucaauuguuauacugc

SEQ ID NO: 257493 - RNA, 20 nt, Crimean-Congo hemorrhagic fever virus
auuucaauuguuauacugca

SEQ ID NO: 257494 - RNA, 14 nt, Crimean-Congo hemorrhagic fever virus
caauuauucauuag

SEQ ID NO: 257495 - RNA, 16 nt, Crimean-Congo hemorrhagic fever virus
caauucucucaauuau

SEQ ID NO: 257496 - RNA, 12 nt, Crimean-Congo hemorrhagic fever virus
caguuucauuac

SEQ ID NO: 257497 - RNA, 12 nt, Crimean-Congo hemorrhagic fever virus
cauaauugcaau

SEQ ID NO: 257498 - RNA, 13 nt, Crimean-Congo hemorrhagic fever virus
ccauaauugcaau

SEQ ID NO: 257499 - RNA, 14 nt, Crimean-Congo hemorrhagic fever virus
ccgugccauuugcu

SEQ ID NO: 257500 - RNA, 22 nt, Crimean-Congo hemorrhagic fever virus
ccuagucggcuggugugcacua

SEQ ID NO: 257501 - RNA, 19 nt, Crimean-Congo hemorrhagic fever virus
cgccauccauaauugcaau

SEQ ID NO: 257502 - RNA, 22 nt, Crimean-Congo hemorrhagic fever virus
cucaacuuccuuccuucugaac

SEQ ID NO: 257503 - RNA, 19 nt, Crimean-Congo hemorrhagic fever virus
cuuauaaccauuucaauug

SEQ ID NO: 257504 - RNA, 14 nt, Crimean-Congo hemorrhagic fever virus
cuuauuuuauuaac

SEQ ID NO: 257505 - RNA, 10 nt, Crimean-Congo hemorrhagic fever virus
gaaccgccau

SEQ ID NO: 257506 - RNA, 22 nt, Crimean-Congo hemorrhagic fever virus
gauaucuggaccauuaaccuag

SEQ ID NO: 257507 - RNA, 19 nt, Crimean-Congo hemorrhagic fever virus
gccauccauaauugcaaua

SEQ ID NO: 257508 - RNA, 19 nt, Crimean-Congo hemorrhagic fever virus
gccuuuaccauacugguau

SEQ ID NO: 257509 - RNA, 18 nt, Crimean-Congo hemorrhagic fever virus
gucuaagugagucaauaa

SEQ ID NO: 257510 - RNA, 21 nt, Crimean-Congo hemorrhagic fever virus
gugugcacuacuuauaaccau

SEQ ID NO: 257511 - RNA, 19 nt, Crimean-Congo hemorrhagic fever virus
uacuaucuuugcuguucau

SEQ ID NO: 257512 - RNA, 16 nt, Crimean-Congo hemorrhagic fever virus
uacugcaauucucuca

SEQ ID NO: 257513 - RNA, 18 nt, Crimean-Congo hemorrhagic fever virus
uacuuauaaccauuucaa

SEQ ID NO: 257514 - RNA, 19 nt, Crimean-Congo hemorrhagic fever virus
uauaccgugccauuugcug

SEQ ID NO: 257515 - RNA, 15 nt, Crimean-Congo hemorrhagic fever virus
uauacugcaauucuc

SEQ ID NO: 257516 - RNA, 18 nt, Crimean-Congo hemorrhagic fever virus
uauacugcaauucucuca

SEQ ID NO: 257517 - RNA, 12 nt, Crimean-Congo hemorrhagic fever virus
uauguaaccuua

SEQ ID NO: 257518 - RNA, 15 nt, Crimean-Congo hemorrhagic fever virus
ucaauuauucauuag

SEQ ID NO: 257519 - RNA, 16 nt, Crimean-Congo hemorrhagic fever virus
ucaauuguuauacugc

SEQ ID NO: 257520 - RNA, 23 nt, Crimean-Congo hemorrhagic fever virus
ucaauuguuauacugcaauucuc

SEQ ID NO: 257521 - RNA, 13 nt, Crimean-Congo hemorrhagic fever virus
ucaguuucauuac

SEQ ID NO: 257522 - RNA, 21 nt, Crimean-Congo hemorrhagic fever virus
ucaugucaguuucauuacuuc

SEQ ID NO: 257523 - RNA, 15 nt, Crimean-Congo hemorrhagic fever virus
ucuaagugagucaau

SEQ ID NO: 257524 - RNA, 16 nt, Crimean-Congo hemorrhagic fever virus
ucuacuaucuuugcug

SEQ ID NO: 257525 - RNA, 19 nt, Crimean-Congo hemorrhagic fever virus
ucugaaccgccauccauaa

SEQ ID NO: 257526 - RNA, 17 nt, Crimean-Congo hemorrhagic fever virus
ucuguacucaacuuccu

SEQ ID NO: 257527 - RNA, 18 nt, Crimean-Congo hemorrhagic fever virus
ucuuugcuguucauguca

SEQ ID NO: 257528 - RNA, 19 nt, Crimean-Congo hemorrhagic fever virus
ugccauuugcugauaucug

SEQ ID NO: 257529 - RNA, 14 nt, Crimean-Congo hemorrhagic fever virus
ugcuguucauguca

SEQ ID NO: 257530 - RNA, 17 nt, Crimean-Congo hemorrhagic fever virus
uguuucaaggucaagua

SEQ ID NO: 257531 - RNA, 13 nt, Crimean-Congo hemorrhagic fever virus
uuaaacacuuaaa

SEQ ID NO: 257532 - RNA, 14 nt, Crimean-Congo hemorrhagic fever virus
uucaugucaguuuc

SEQ ID NO: 257533 - RNA, 10 nt, Crimean-Congo hemorrhagic fever virus
aaacacuuaa

SEQ ID NO: 257534 - RNA, 13 nt, Crimean-Congo hemorrhagic fever virus
auacccuccaaug

SEQ ID NO: 257535 - RNA, 14 nt, Crimean-Congo hemorrhagic fever virus
auacccuccaaugu

SEQ ID NO: 257536 - RNA, 17 nt, Crimean-Congo hemorrhagic fever virus
auaccgugccauuugcu

SEQ ID NO: 257537 - RNA, 17 nt, Crimean-Congo hemorrhagic fever virus
auacugcaauucucuca

SEQ ID NO: 257538 - RNA, 21 nt, Crimean-Congo hemorrhagic fever virus
auccauaauugcaauacuuaa

SEQ ID NO: 257539 - RNA, 19 nt, Crimean-Congo hemorrhagic fever virus
aucuuugcuguucauguca

SEQ ID NO: 257540 - RNA, 17 nt, Crimean-Congo hemorrhagic fever virus
augcuuuuuuacuugcu

SEQ ID NO: 257541 - RNA, 17 nt, Crimean-Congo hemorrhagic fever virus
auuagccuuuaccauac

SEQ ID NO: 257542 - RNA, 22 nt, Crimean-Congo hemorrhagic fever virus
auuagccuuuaccauacuggua

SEQ ID NO: 257543 - RNA, 16 nt, Crimean-Congo hemorrhagic fever virus
auuguuauacugcaau

SEQ ID NO: 257544 - RNA, 17 nt, Crimean-Congo hemorrhagic fever virus
cauccauaauugcaaua

SEQ ID NO: 257545 - RNA, 21 nt, Crimean-Congo hemorrhagic fever virus
cuaucuuugcuguucauguca

SEQ ID NO: 257546 - RNA, 20 nt, Crimean-Congo hemorrhagic fever virus
cucucaauuauucauuagcc

SEQ ID NO: 257547 - RNA, 21 nt, Crimean-Congo hemorrhagic fever virus
cugucuaagugagucaauaau

SEQ ID NO: 257548 - RNA, 21 nt, Crimean-Congo hemorrhagic fever virus
cuguucaugucaguuucauua

SEQ ID NO: 257549 - RNA, 18 nt, Crimean-Congo hemorrhagic fever virus
cuuauuuuauuaaccuuu

SEQ ID NO: 257550 - RNA, 16 nt, Crimean-Congo hemorrhagic fever virus
cuuguuuuaaacacuu

SEQ ID NO: 257551 - RNA, 17 nt, Crimean-Congo hemorrhagic fever virus
cuuguuuuaaacacuua

SEQ ID NO: 257552 - RNA, 16 nt, Crimean-Congo hemorrhagic fever virus
uaaccuuauuuuauua

SEQ ID NO: 257553 - RNA, 14 nt, Crimean-Congo hemorrhagic fever virus
uacucaacuuccuu

SEQ ID NO: 257554 - RNA, 19 nt, Crimean-Congo hemorrhagic fever virus
uacuuauaaccauuucaau

SEQ ID NO: 257555 - RNA, 22 nt, Crimean-Congo hemorrhagic fever virus
uccaauguuucaaggucaagua

SEQ ID NO: 257556 - RNA, 16 nt, Crimean-Congo hemorrhagic fever virus
ucuaagugagucaaua

SEQ ID NO: 257557 - RNA, 11 nt, Crimean-Congo hemorrhagic fever virus
ugaaccgccau

SEQ ID NO: 257558 - RNA, 14 nt, Crimean-Congo hemorrhagic fever virus
ugcaauucucucaa

SEQ ID NO: 257559 - RNA, 20 nt, Crimean-Congo hemorrhagic fever virus
ugcucuguacucaacuuccu

SEQ ID NO: 257560 - RNA, 19 nt, Crimean-Congo hemorrhagic fever virus
ugcuguucaugucaguuuc

SEQ ID NO: 257561 - RNA, 16 nt, Crimean-Congo hemorrhagic fever virus
ugcuuuuuuacuugcu

SEQ ID NO: 257562 - RNA, 17 nt, Crimean-Congo hemorrhagic fever virus
ugguauucuacuaucuu

SEQ ID NO: 257563 - RNA, 16 nt, Crimean-Congo hemorrhagic fever virus
uguuuuaaacacuuaa

SEQ ID NO: 257564 - RNA, 15 nt, Crimean-Congo hemorrhagic fever virus
uuguuauacugcaau

SEQ ID NO: 257565 - RNA, 14 nt, Dengue virus
aaacagcauauuga

SEQ ID NO: 257566 - RNA, 17 nt, Dengue virus
aacuaugcuaccuguga

SEQ ID NO: 257567 - RNA, 21 nt, Dengue virus
aacugugcagccuguagcuca

SEQ ID NO: 257568 - RNA, 14 nt, Dengue virus
aagcuguagucuca

SEQ ID NO: 257569 - RNA, 16 nt, Dengue virus
accauggaagcuguac

SEQ ID NO: 257570 - RNA, 15 nt, Dengue virus
accugagaaggugua

SEQ ID NO: 257571 - RNA, 14 nt, Dengue virus
acuaugcuaccugu

SEQ ID NO: 257572 - RNA, 19 nt, Dengue virus
agaagucaggccacuuuga

SEQ ID NO: 257573 - RNA, 14 nt, Dengue virus
agaucgcagcaaca

SEQ ID NO: 257574 - RNA, 13 nt, Dengue virus
agcaaacugugca

SEQ ID NO: 257575 - RNA, 22 nt, Dengue virus
agccuguagcucaccugagaag

SEQ ID NO: 257576 - RNA, 20 nt, Dengue virus
aguacgggaaaaacuaugcu

SEQ ID NO: 257577 - RNA, 12 nt, Dengue virus
augaagcuguag

SEQ ID NO: 257578 - RNA, 13 nt, Dengue virus
auggaagcuguac

SEQ ID NO: 257579 - RNA, 18 nt, Dengue virus
augggggcccaaggugag

SEQ ID NO: 257580 - RNA, 12 nt, Dengue virus
auuaagccauag

SEQ ID NO: 257581 - RNA, 21 nt, Dengue virus
caaacugugcagccuguagcu

SEQ ID NO: 257582 - RNA, 17 nt, Dengue virus
caccugagaagguguaa

SEQ ID NO: 257583 - RNA, 18 nt, Dengue virus
cagcauauugacgcuggg

SEQ ID NO: 257584 - RNA, 22 nt, Dengue virus
cagccuguagcucaccugagaa

SEQ ID NO: 257585 - RNA, 22 nt, Dengue virus
caugaaacaaaacagaagucag

SEQ ID NO: 257586 - RNA, 18 nt, Dengue virus
cccguccaaggacguuaa

SEQ ID NO: 257587 - RNA, 20 nt, Dengue virus
cgcugggaaagaccagagau

SEQ ID NO: 257588 - RNA, 19 nt, Dengue virus
cgggaaaaacuaugcuacc

SEQ ID NO: 257589 - RNA, 16 nt, Dengue virus
cguuaaaagaagucag

SEQ ID NO: 257590 - RNA, 20 nt, Dengue virus
cuagagguuagaggagaccc

SEQ ID NO: 257591 - RNA, 20 nt, Dengue virus
cuagcgguuagaggagaccc

SEQ ID NO: 257592 - RNA, 21 nt, Dengue virus
cugugcagccuguagcucacc

SEQ ID NO: 257593 - RNA, 15 nt, Dengue virus
gagaugaagcuguag

SEQ ID NO: 257594 - RNA, 12 nt, Dengue virus
gaugaagcugua

SEQ ID NO: 257595 - RNA, 13 nt, Dengue virus
gcccaaggugaga

SEQ ID NO: 257596 - RNA, 17 nt, Dengue virus
gcuguagucucacugga

SEQ ID NO: 257597 - RNA, 16 nt, Dengue virus
ggauuaagccauagua

SEQ ID NO: 257598 - RNA, 17 nt, Dengue virus
ggccacaaaccauggaa

SEQ ID NO: 257599 - RNA, 21 nt, Dengue virus
gggaggccacaaaccauggaa

SEQ ID NO: 257600 - RNA, 17 nt, Dengue virus
gggcccaaggugagaug

SEQ ID NO: 257601 - RNA, 16 nt, Dengue virus
guagcucaccugagaa

SEQ ID NO: 257602 - RNA, 23 nt, Dengue virus
uaaaagaagucaggccacuuuga

SEQ ID NO: 257603 - RNA, 14 nt, Dengue virus
uaugcuaccuguga

SEQ ID NO: 257604 - RNA, 21 nt, Dengue virus
uccgggaggccacaaaccaug

SEQ ID NO: 257605 - RNA, 15 nt, Dengue virus
ucggauuaagccaua

SEQ ID NO: 257606 - RNA, 14 nt, Dengue virus
ugaagcuguagucu

SEQ ID NO: 257607 - RNA, 23 nt, Dengue virus
ugacgcugggaaagaccagagau

SEQ ID NO: 257608 - RNA, 13 nt, Dengue virus
ugagcaaacugug

SEQ ID NO: 257609 - RNA, 16 nt, Dengue virus
ugucuccucagcauca

SEQ ID NO: 257610 - RNA, 15 nt, Dengue virus
uugagcaaacugugc

SEQ ID NO: 257611 - RNA, 14 nt, Dengue virus
aaacuaugcuaccu

SEQ ID NO: 257612 - RNA, 15 nt, Dengue virus
accauggaagcugua

SEQ ID NO: 257613 - RNA, 16 nt, Dengue virus
acuuugaugccauagc

SEQ ID NO: 257614 - RNA, 18 nt, Dengue virus
agccuguagcucaccuga

SEQ ID NO: 257615 - RNA, 18 nt, Dengue virus
agcuguagucucacugga

SEQ ID NO: 257616 - RNA, 20 nt, Dengue virus
aggccacuuugaugccauag

SEQ ID NO: 257617 - RNA, 20 nt, Dengue virus
aggugagaugaagcuguagu

SEQ ID NO: 257618 - RNA, 15 nt, Dengue virus
augcuaccugugagc

SEQ ID NO: 257619 - RNA, 12 nt, Dengue virus
auggaagcugua

SEQ ID NO: 257620 - RNA, 13 nt, Dengue virus
auuaagccauagu

SEQ ID NO: 257621 - RNA, 15 nt, Dengue virus
caaaaaacagcauau

SEQ ID NO: 257622 - RNA, 21 nt, Dengue virus
cacaaaccauggaagcuguac

SEQ ID NO: 257623 - RNA, 13 nt, Dengue virus
cauggaagcugua

SEQ ID NO: 257624 - RNA, 22 nt, Dengue virus
ccauagcuugagcaaacugugc

SEQ ID NO: 257625 - RNA, 22 nt, Dengue virus
cccaaggugagaugaagcugua

SEQ ID NO: 257626 - RNA, 20 nt, Dengue virus
cugcugucuccucagcauca

SEQ ID NO: 257627 - RNA, 17 nt, Dengue virus
cuguagcucaccugaga

SEQ ID NO: 257628 - RNA, 14 nt, Dengue virus
cugugcagccugua

SEQ ID NO: 257629 - RNA, 19 nt, Dengue virus
cugugcagccuguagcuca

SEQ ID NO: 257630 - RNA, 22 nt, Dengue virus
gaagcuguagucucacuggaag

SEQ ID NO: 257631 - RNA, 15 nt, Dengue virus
gagcaaacugugcag

SEQ ID NO: 257632 - RNA, 23 nt, Dengue virus
gcaaacugugcagccuguagcuc

SEQ ID NO: 257633 - RNA, 24 nt, Dengue virus
gcaaacugugcagccuguagcuca

SEQ ID NO: 257634 - RNA, 19 nt, Dengue virus
gcaacaaugggggcccaag

SEQ ID NO: 257635 - RNA, 17 nt, Dengue virus
gcauauugacgcuggga

SEQ ID NO: 257636 - RNA, 18 nt, Dengue virus
gccacaaaccauggaagc

SEQ ID NO: 257637 - RNA, 15 nt, Dengue virus
gcccaaggugagaug

SEQ ID NO: 257638 - RNA, 19 nt, Dengue virus
gcucaccugagaaggugua

SEQ ID NO: 257639 - RNA, 14 nt, Dengue virus
ggauuaagccauag

SEQ ID NO: 257640 - RNA, 20 nt, Dengue virus
ggcccaaggugagaugaagc

SEQ ID NO: 257641 - RNA, 15 nt, Dengue virus
guggacuagcgguua

SEQ ID NO: 257642 - RNA, 23 nt, Dengue virus
uaaaaaauccgggaggccacaaa

SEQ ID NO: 257643 - RNA, 13 nt, Dengue virus
uaugcuaccugug

SEQ ID NO: 257644 - RNA, 20 nt, Dengue virus
ucaccugagaagguguaaaa

SEQ ID NO: 257645 - RNA, 16 nt, Dengue virus
uccaaggacguuaaaa

SEQ ID NO: 257646 - RNA, 12 nt, Dengue virus
ugcuaccuguga

SEQ ID NO: 257647 - RNA, 17 nt, Dengue virus
uguagcucaccugagaa

SEQ ID NO: 257648 - RNA, 21 nt, Dengue virus
uugaugccauagcuugagcaa

SEQ ID NO: 257649 - RNA, 14 nt, Dobrava virus
aacaacaacuaccu

SEQ ID NO: 257650 - RNA, 18 nt, Dobrava virus
aacaacuaccuaccucaa

SEQ ID NO: 257651 - RNA, 13 nt, Dobrava virus
aacacuaccucaa

SEQ ID NO: 257652 - RNA, 14 nt, Dobrava virus
aacacuaccucaac

SEQ ID NO: 257653 - RNA, 21 nt, Dobrava virus
aacacuaccucaacaacuacu

SEQ ID NO: 257654 - RNA, 22 nt, Dobrava virus
aacacuaccucaacaacuacua

SEQ ID NO: 257655 - RNA, 14 nt, Dobrava virus
aacuaccuaccuca

SEQ ID NO: 257656 - RNA, 16 nt, Dobrava virus
aacuaccuaccucaaa

SEQ ID NO: 257657 - RNA, 23 nt, Dobrava virus
aacugcuuggacuggaauuauua

SEQ ID NO: 257658 - RNA, 13 nt, Dobrava virus
aauguauuugcac

SEQ ID NO: 257659 - RNA, 18 nt, Dobrava virus
acaacaacacuaccucaa

SEQ ID NO: 257660 - RNA, 19 nt, Dobrava virus
acaacaacuaccuaccuca

SEQ ID NO: 257661 - RNA, 13 nt, Dobrava virus
acaacacuaccuc

SEQ ID NO: 257662 - RNA, 14 nt, Dobrava virus
acaacacuaccuca

SEQ ID NO: 257663 - RNA, 15 nt, Dobrava virus
acaacacuaccucaa

SEQ ID NO: 257664 - RNA, 16 nt, Dobrava virus
acaacuaccuaccuca

SEQ ID NO: 257665 - RNA, 21 nt, Dobrava virus
acacuaccucaacaacuacua

SEQ ID NO: 257666 - RNA, 16 nt, Dobrava virus
accucaacaacuacua

SEQ ID NO: 257667 - RNA, 22 nt, Dobrava virus
acguaugcugcauuaacugcuu

SEQ ID NO: 257668 - RNA, 23 nt, Dobrava virus
acuaacaacaacuaccuaccuca

SEQ ID NO: 257669 - RNA, 14 nt, Dobrava virus
acuaccuaccucaa

SEQ ID NO: 257670 - RNA, 19 nt, Dobrava virus
acuaccucauugauuugcu

SEQ ID NO: 257671 - RNA, 13 nt, Dobrava virus
auaacuccuucau

SEQ ID NO: 257672 - RNA, 12 nt, Dobrava virus
auuauacuacug

SEQ ID NO: 257673 - RNA, 13 nt, Dobrava virus
auuauacuacuga

SEQ ID NO: 257674 - RNA, 23 nt, Dobrava virus
auuuauccguuauguaaucucag

SEQ ID NO: 257675 - RNA, 18 nt, Dobrava virus
auuugaucuguacuaaca

SEQ ID NO: 257676 - RNA, 17 nt, Dobrava virus
auuuuccggagcauacu

SEQ ID NO: 257677 - RNA, 18 nt, Dobrava virus
caacaacuaccuaccuca

SEQ ID NO: 257678 - RNA, 12 nt, Dobrava virus
caacacuaccuc

SEQ ID NO: 257679 - RNA, 13 nt, Dobrava virus
caacacuaccuca

SEQ ID NO: 257680 - RNA, 20 nt, Dobrava virus
caacacuaccucaacaacua

SEQ ID NO: 257681 - RNA, 14 nt, Dobrava virus
caacuaccuaccuc

SEQ ID NO: 257682 - RNA, 15 nt, Dobrava virus
caacuaccuaccuca

SEQ ID NO: 257683 - RNA, 13 nt, Dobrava virus
caacuacuaccuc

SEQ ID NO: 257684 - RNA, 17 nt, Dobrava virus
cacuaccucaacaacua

SEQ ID NO: 257685 - RNA, 21 nt, Dobrava virus
cauuuuccggagcauacuacu

SEQ ID NO: 257686 - RNA, 22 nt, Dobrava virus
cauuuuccggagcauacuacua

SEQ ID NO: 257687 - RNA, 16 nt, Dobrava virus
ccguuauguaaucuca

SEQ ID NO: 257688 - RNA, 22 nt, Dobrava virus
ccucaaaacaacaacacuaccu

SEQ ID NO: 257689 - RNA, 23 nt, Dobrava virus
ccucaaaacaacaacacuaccuc

SEQ ID NO: 257690 - RNA, 18 nt, Dobrava virus
ccucaacaacuacuaccu

SEQ ID NO: 257691 - RNA, 20 nt, Dobrava virus
ccucaacaacuacuaccuca

SEQ ID NO: 257692 - RNA, 21 nt, Dobrava virus
ccucauugauuugcuuccuga

SEQ ID NO: 257693 - RNA, 16 nt, Dobrava virus
cuaacaacaacuaccu

SEQ ID NO: 257694 - RNA, 13 nt, Dobrava virus
cuaccuaccucaa

SEQ ID NO: 257695 - RNA, 22 nt, Dobrava virus
cucaaaacaacaacacuaccuc

SEQ ID NO: 257696 - RNA, 23 nt, Dobrava virus
cucaaaacaacaacacuaccuca

SEQ ID NO: 257697 - RNA, 13 nt, Dobrava virus
cucauugauuugc

SEQ ID NO: 257698 - RNA, 21 nt, Dobrava virus
cucuuuagggagucuacuacu

SEQ ID NO: 257699 - RNA, 22 nt, Dobrava virus
cucuuuagggagucuacuacua

SEQ ID NO: 257700 - RNA, 20 nt, Dobrava virus
cuggaauuauuauacuacug

SEQ ID NO: 257701 - RNA, 21 nt, Dobrava virus
cuuuacuaacaacaacuaccu

SEQ ID NO: 257702 - RNA, 22 nt, Dobrava virus
cuuuacuaacaacaacuaccua

SEQ ID NO: 257703 - RNA, 20 nt, Dobrava virus
cuuuagggagucuacuacua

SEQ ID NO: 257704 - RNA, 13 nt, Dobrava virus
ggagcauacuacu

SEQ ID NO: 257705 - RNA, 23 nt, Dobrava virus
ggccauuuauccguuauguaauc

SEQ ID NO: 257706 - RNA, 13 nt, Dobrava virus
guacuaacaucuu

SEQ ID NO: 257707 - RNA, 18 nt, Dobrava virus
guuuaaacuucuguacuu

SEQ ID NO: 257708 - RNA, 15 nt, Dobrava virus
uaacaacaacuaccu

SEQ ID NO: 257709 - RNA, 16 nt, Dobrava virus
uaacaacaacuaccua

SEQ ID NO: 257710 - RNA, 21 nt, Dobrava virus
uaacaacaacuaccuaccuca

SEQ ID NO: 257711 - RNA, 11 nt, Dobrava virus
uaccuaccuca

SEQ ID NO: 257712 - RNA, 12 nt, Dobrava virus
uaccuaccucaa

SEQ ID NO: 257713 - RNA, 17 nt, Dobrava virus
uaccucaacaacuacua

SEQ ID NO: 257714 - RNA, 22 nt, Dobrava virus
uaccucaacaacuacuaccuca

SEQ ID NO: 257715 - RNA, 16 nt, Dobrava virus
uaggacgucaccuuaa

SEQ ID NO: 257716 - RNA, 17 nt, Dobrava virus
uauaaaccuuaguccuu

SEQ ID NO: 257717 - RNA, 20 nt, Dobrava virus
uauauuuauuuucauuuucc

SEQ ID NO: 257718 - RNA, 19 nt, Dobrava virus
uaucaaccuaguuaucuaa

SEQ ID NO: 257719 - RNA, 20 nt, Dobrava virus
uaucccaugcuuuauguaau

SEQ ID NO: 257720 - RNA, 15 nt, Dobrava virus
uauccguuauguaau

SEQ ID NO: 257721 - RNA, 14 nt, Dobrava virus
uauuauacuacuga

SEQ ID NO: 257722 - RNA, 17 nt, Dobrava virus
ucaacaacuacuaccuc

SEQ ID NO: 257723 - RNA, 16 nt, Dobrava virus
uccuucauuacuauaa

SEQ ID NO: 257724 - RNA, 14 nt, Dobrava virus
ucuguacuuauuaa

SEQ ID NO: 257725 - RNA, 20 nt, Dobrava virus
ucuugcggagcauacuacua

SEQ ID NO: 257726 - RNA, 20 nt, Dobrava virus
ucuuuagggagucuacuacu

SEQ ID NO: 257727 - RNA, 21 nt, Dobrava virus
ucuuuagggagucuacuacua

SEQ ID NO: 257728 - RNA, 17 nt, Dobrava virus
ugauuggugaauguauu

SEQ ID NO: 257729 - RNA, 13 nt, Dobrava virus
ugcacuagggguu

SEQ ID NO: 257730 - RNA, 20 nt, Dobrava virus
uggauguagauuucauuuga

SEQ ID NO: 257731 - RNA, 17 nt, Dobrava virus
uggugaauguauuugca

SEQ ID NO: 257732 - RNA, 16 nt, Dobrava virus
uguugcauuaucccau

SEQ ID NO: 257733 - RNA, 17 nt, Dobrava virus
uuaucaaccuaguuauc

SEQ ID NO: 257734 - RNA, 13 nt, Dobrava virus
uucuuuacuaaca

SEQ ID NO: 257735 - RNA, 22 nt, Dobrava virus
uuguugcauuaucccaugcuuu

SEQ ID NO: 257736 - RNA, 15 nt, Dobrava virus
uuucauuugaucugu

SEQ ID NO: 257737 - RNA, 16 nt, Dobrava virus
uuuccggagcauacua

SEQ ID NO: 257738 - RNA, 20 nt, Dobrava virus
uuugcuuccugaaugucucu

SEQ ID NO: 257739 - RNA, 14 nt, Dobrava virus
aacaacacuaccuc

SEQ ID NO: 257740 - RNA, 15 nt, Dobrava virus
aacaacacuaccuca

SEQ ID NO: 257741 - RNA, 16 nt, Dobrava virus
aacaacacuaccucaa

SEQ ID NO: 257742 - RNA, 17 nt, Dobrava virus
aacaacuaccuaccuca

SEQ ID NO: 257743 - RNA, 13 nt, Dobrava virus
aacuacuaccuca

SEQ ID NO: 257744 - RNA, 20 nt, Dobrava virus
aauaacuccuucauuacuau

SEQ ID NO: 257745 - RNA, 14 nt, Dobrava virus
acaacaacuaccua

SEQ ID NO: 257746 - RNA, 18 nt, Dobrava virus
acaacaacuaccuaccuc

SEQ ID NO: 257747 - RNA, 20 nt, Dobrava virus
acaacaacuaccuaccucaa

SEQ ID NO: 257748 - RNA, 21 nt, Dobrava virus
acaacacuaccucaacaacua

SEQ ID NO: 257749 - RNA, 15 nt, Dobrava virus
acaacuacuaccuca

SEQ ID NO: 257750 - RNA, 12 nt, Dobrava virus
acacuaccucaa

SEQ ID NO: 257751 - RNA, 14 nt, Dobrava virus
acuaacaacaacua

SEQ ID NO: 257752 - RNA, 10 nt, Dobrava virus
acuaccucaa

SEQ ID NO: 257753 - RNA, 20 nt, Dobrava virus
acuaccucauugauuugcuu

SEQ ID NO: 257754 - RNA, 18 nt, Dobrava virus
acuccuucauuacuauaa

SEQ ID NO: 257755 - RNA, 20 nt, Dobrava virus
auauuagcuuguccuuguau

SEQ ID NO: 257756 - RNA, 21 nt, Dobrava virus
aucccacguaugcugcauuaa

SEQ ID NO: 257757 - RNA, 18 nt, Dobrava virus
augcugcauuaacugcuu

SEQ ID NO: 257758 - RNA, 15 nt, Dobrava virus
auguauuugcacuag

SEQ ID NO: 257759 - RNA, 23 nt, Dobrava virus
augucucuuuagggagucuacua

SEQ ID NO: 257760 - RNA, 19 nt, Dobrava virus
auuaacuuuuuacauuuau

SEQ ID NO: 257761 - RNA, 17 nt, Dobrava virus
auuaucccaugcuuuau

SEQ ID NO: 257762 - RNA, 20 nt, Dobrava virus
auuaucccaugcuuuaugua

SEQ ID NO: 257763 - RNA, 16 nt, Dobrava virus
auuuauccguuaugua

SEQ ID NO: 257764 - RNA, 17 nt, Dobrava virus
auuuauccguuauguaa

SEQ ID NO: 257765 - RNA, 15 nt, Dobrava virus
auuuuccggagcaua

SEQ ID NO: 257766 - RNA, 21 nt, Dobrava virus
auuuuccggagcauacuacua

SEQ ID NO: 257767 - RNA, 19 nt, Dobrava virus
caacaacuaccuaccucaa

SEQ ID NO: 257768 - RNA, 18 nt, Dobrava virus
caacaacuacuaccucau

SEQ ID NO: 257769 - RNA, 14 nt, Dobrava virus
caacacuaccucaa

SEQ ID NO: 257770 - RNA, 16 nt, Dobrava virus
caacuaccuaccucaa

SEQ ID NO: 257771 - RNA, 14 nt, Dobrava virus
caacuacuaccuca

SEQ ID NO: 257772 - RNA, 23 nt, Dobrava virus
cacguaugcugcauuaacugcuu

SEQ ID NO: 257773 - RNA, 11 nt, Dobrava virus
cacuaccucaa

SEQ ID NO: 257774 - RNA, 20 nt, Dobrava virus
cacuaccucaacaacuacua

SEQ ID NO: 257775 - RNA, 16 nt, Dobrava virus
caugcuuuauguaauc

SEQ ID NO: 257776 - RNA, 16 nt, Dobrava virus
cauuugaucuguacua

SEQ ID NO: 257777 - RNA, 17 nt, Dobrava virus
cauuugaucuguacuaa

SEQ ID NO: 257778 - RNA, 20 nt, Dobrava virus
ccaugcuuuauguaauccca

SEQ ID NO: 257779 - RNA, 18 nt, Dobrava virus
ccuaccucaaaacaacaa

SEQ ID NO: 257780 - RNA, 15 nt, Dobrava virus
ccucaacaacuacua

SEQ ID NO: 257781 - RNA, 20 nt, Dobrava virus
ccuuucuuuacuaacaacaa

SEQ ID NO: 257782 - RNA, 13 nt, Dobrava virus
cuaacaacaacua

SEQ ID NO: 257783 - RNA, 22 nt, Dobrava virus
cuaacaacaacuaccuaccuca

SEQ ID NO: 257784 - RNA, 23 nt, Dobrava virus
cuaacaacaacuaccuaccucaa

SEQ ID NO: 257785 - RNA, 12 nt, Dobrava virus
cuacuaccucau

SEQ ID NO: 257786 - RNA, 17 nt, Dobrava virus
cucaacaacuacuaccu

SEQ ID NO: 257787 - RNA, 19 nt, Dobrava virus
cucaacaacuacuaccuca

SEQ ID NO: 257788 - RNA, 20 nt, Dobrava virus
cucaacaacuacuaccucau

SEQ ID NO: 257789 - RNA, 21 nt, Dobrava virus
cuuuuccuuucuuuacuaaca

SEQ ID NO: 257790 - RNA, 13 nt, Dobrava virus
gacuggaauuauu

SEQ ID NO: 257791 - RNA, 15 nt, Dobrava virus
gaucuguacuaacau

SEQ ID NO: 257792 - RNA, 16 nt, Dobrava virus
gcugcauuaacugcuu

SEQ ID NO: 257793 - RNA, 17 nt, Dobrava virus
gcuuuauguaaucccac

SEQ ID NO: 257794 - RNA, 20 nt, Dobrava virus
guacguggguauuucuauau

SEQ ID NO: 257795 - RNA, 21 nt, Dobrava virus
guacuaacaucuuauuuccuu

SEQ ID NO: 257796 - RNA, 23 nt, Dobrava virus
guauauagcuuucaacaaugcaa

SEQ ID NO: 257797 - RNA, 14 nt, Dobrava virus
guuauguaaucuca

SEQ ID NO: 257798 - RNA, 18 nt, Dobrava virus
uaaaaaaaauaacuccuu

SEQ ID NO: 257799 - RNA, 22 nt, Dobrava virus
uaacaacaacuaccuaccucaa

SEQ ID NO: 257800 - RNA, 20 nt, Dobrava virus
uaacuccuucauuacuauaa

SEQ ID NO: 257801 - RNA, 23 nt, Dobrava virus
uaccucaacaacuacuaccucau

SEQ ID NO: 257802 - RNA, 19 nt, Dobrava virus
uaucccaugcuuuauguaa

SEQ ID NO: 257803 - RNA, 14 nt, Dobrava virus
uauccguuauguaa

SEQ ID NO: 257804 - RNA, 22 nt, Dobrava virus
uaucuugcggagcauacuacua

SEQ ID NO: 257805 - RNA, 22 nt, Dobrava virus
uauggauguagauuucauuuga

SEQ ID NO: 257806 - RNA, 16 nt, Dobrava virus
uauguaaucucagggu

SEQ ID NO: 257807 - RNA, 15 nt, Dobrava virus
uauuuucauuuuccg

SEQ ID NO: 257808 - RNA, 16 nt, Dobrava virus
ucaacaacuacuaccu

SEQ ID NO: 257809 - RNA, 19 nt, Dobrava virus
ucaacaacuacuaccucau

SEQ ID NO: 257810 - RNA, 23 nt, Dobrava virus
ucauuuuccggagcauacuacua

SEQ ID NO: 257811 - RNA, 19 nt, Dobrava virus
ucccaugcuuuauguaauc

SEQ ID NO: 257812 - RNA, 14 nt, Dobrava virus
uccguuauguaauc

SEQ ID NO: 257813 - RNA, 15 nt, Dobrava virus
uccguuauguaaucu

SEQ ID NO: 257814 - RNA, 15 nt, Dobrava virus
ucucuuuagggaguc

SEQ ID NO: 257815 - RNA, 20 nt, Dobrava virus
ucucuuuagggagucuacua

SEQ ID NO: 257816 - RNA, 21 nt, Dobrava virus
ugaauguauuugcacuagggg

SEQ ID NO: 257817 - RNA, 17 nt, Dobrava virus
ugauuugcuuccugaau

SEQ ID NO: 257818 - RNA, 15 nt, Dobrava virus
ugcuuggacuggaau

SEQ ID NO: 257819 - RNA, 15 nt, Dobrava virus
uggauguagauuuca

SEQ ID NO: 257820 - RNA, 18 nt, Dobrava virus
uggguauuucuauaucuu

SEQ ID NO: 257821 - RNA, 13 nt, Dobrava virus
uguauuugcacua

SEQ ID NO: 257822 - RNA, 20 nt, Dobrava virus
uuacuaacaacaacuaccua

SEQ ID NO: 257823 - RNA, 21 nt, Dobrava virus
uuauguaaucccacguaugcu

SEQ ID NO: 257824 - RNA, 21 nt, Dobrava virus
uucauuugaucuguacuaaca

SEQ ID NO: 257825 - RNA, 21 nt, Dobrava virus
uucauuuuccggagcauacua

SEQ ID NO: 257826 - RNA, 12 nt, Dobrava virus
uucuguacuuau

SEQ ID NO: 257827 - RNA, 14 nt, Dobrava virus
uuggugaauguauu

SEQ ID NO: 257828 - RNA, 14 nt, Dobrava virus
uuuauguaauccca

SEQ ID NO: 257829 - RNA, 19 nt, Dobrava virus
uuuccggagcauacuacua

SEQ ID NO: 257830 - RNA, 23 nt, Eastern equine encephalitis virus
aaacuacaauugugugcuucuga

SEQ ID NO: 257831 - RNA, 23 nt, Eastern equine encephalitis virus
aaacuccaguauccaauccugga

SEQ ID NO: 257832 - RNA, 20 nt, Eastern equine encephalitis virus
aacacuaagggcagugcaua

SEQ ID NO: 257833 - RNA, 21 nt, Eastern equine encephalitis virus
aacacuaagggcagugcauaa

SEQ ID NO: 257834 - RNA, 21 nt, Eastern equine encephalitis virus
aacacuauaggcaguguauaa

SEQ ID NO: 257835 - RNA, 22 nt, Eastern equine encephalitis virus
aacgccgccgaugcagugcaua

SEQ ID NO: 257836 - RNA, 19 nt, Eastern equine encephalitis virus
aaucuacgcggcaaugcaa

SEQ ID NO: 257837 - RNA, 14 nt, Eastern equine encephalitis virus
aaugcugcuccuaa

SEQ ID NO: 257838 - RNA, 14 nt, Eastern equine encephalitis virus
aauuuaauacacac

SEQ ID NO: 257839 - RNA, 15 nt, Eastern equine encephalitis virus
acaaaaucauauuaa

SEQ ID NO: 257840 - RNA, 22 nt, Eastern equine encephalitis virus
acacacuuuauaaucaggcaua

SEQ ID NO: 257841 - RNA, 18 nt, Eastern equine encephalitis virus
acacuaagggcagugcau

SEQ ID NO: 257842 - RNA, 19 nt, Eastern equine encephalitis virus
acacuaagggcagugcaua

SEQ ID NO: 257843 - RNA, 20 nt, Eastern equine encephalitis virus
acacuaagggcagugcauaa

SEQ ID NO: 257844 - RNA, 19 nt, Eastern equine encephalitis virus
acacuauaggcaguguaua

SEQ ID NO: 257845 - RNA, 17 nt, Eastern equine encephalitis virus
acauaacacuauaggca

SEQ ID NO: 257846 - RNA, 21 nt, Eastern equine encephalitis virus
acauuauaacacuaagggcag

SEQ ID NO: 257847 - RNA, 21 nt, Eastern equine encephalitis virus
accguugagcgucuacugcag

SEQ ID NO: 257848 - RNA, 17 nt, Eastern equine encephalitis virus
acuaagggcagugcaua

SEQ ID NO: 257849 - RNA, 17 nt, Eastern equine encephalitis virus
acuacaggcagcgcaua

SEQ ID NO: 257850 - RNA, 12 nt, Eastern equine encephalitis virus
agaaacuacaau

SEQ ID NO: 257851 - RNA, 18 nt, Eastern equine encephalitis virus
agaaccgcaaccaguuga

SEQ ID NO: 257852 - RNA, 13 nt, Eastern equine encephalitis virus
agcaacagcuucu

SEQ ID NO: 257853 - RNA, 21 nt, Eastern equine encephalitis virus
aggcauaauugccgcauauac

SEQ ID NO: 257854 - RNA, 17 nt, Eastern equine encephalitis virus
aguaauuuaauacacac

SEQ ID NO: 257855 - RNA, 19 nt, Eastern equine encephalitis virus
aguacugcaagcaacagcu

SEQ ID NO: 257856 - RNA, 11 nt, Eastern equine encephalitis virus
auaacacuaua

SEQ ID NO: 257857 - RNA, 12 nt, Eastern equine encephalitis virus
auaacacuauag

SEQ ID NO: 257858 - RNA, 17 nt, Eastern equine encephalitis virus
auaacacuauaggcagu

SEQ ID NO: 257859 - RNA, 22 nt, Eastern equine encephalitis virus
auaacacuauaggcaguguaua

SEQ ID NO: 257860 - RNA, 19 nt, Eastern equine encephalitis virus
auaacgccgccgaugcagu

SEQ ID NO: 257861 - RNA, 13 nt, Eastern equine encephalitis virus
auaaggcugcuau

SEQ ID NO: 257862 - RNA, 23 nt, Eastern equine encephalitis virus
auaaggcugcuauauuaccacau

SEQ ID NO: 257863 - RNA, 16 nt, Eastern equine encephalitis virus
auaaugcugcuccuaa

SEQ ID NO: 257864 - RNA, 16 nt, Eastern equine encephalitis virus
auaauugccgcauaua

SEQ ID NO: 257865 - RNA, 16 nt, Eastern equine encephalitis virus
auacaauuacacuaca

SEQ ID NO: 257866 - RNA, 20 nt, Eastern equine encephalitis virus
auauuaccacauuauaacac

SEQ ID NO: 257867 - RNA, 21 nt, Eastern equine encephalitis virus
aucuugucaaccacauaacac

SEQ ID NO: 257868 - RNA, 12 nt, Eastern equine encephalitis virus
augcagugcaua

SEQ ID NO: 257869 - RNA, 14 nt, Eastern equine encephalitis virus
augcagugcauaag

SEQ ID NO: 257870 - RNA, 17 nt, Eastern equine encephalitis virus
augcagugcauaaggcu

SEQ ID NO: 257871 - RNA, 14 nt, Eastern equine encephalitis virus
auuacacuacaggu

SEQ ID NO: 257872 - RNA, 13 nt, Eastern equine encephalitis virus
auuauaacacuaa

SEQ ID NO: 257873 - RNA, 15 nt, Eastern equine encephalitis virus
auucaaguacugcaa

SEQ ID NO: 257874 - RNA, 22 nt, Eastern equine encephalitis virus
caaaaaucuacgcggcaaugca

SEQ ID NO: 257875 - RNA, 14 nt, Eastern equine encephalitis virus
caacagcuucucau

SEQ ID NO: 257876 - RNA, 16 nt, Eastern equine encephalitis virus
caaccacauaacacua

SEQ ID NO: 257877 - RNA, 18 nt, Eastern equine encephalitis virus
caagggcaccugcaacaa

SEQ ID NO: 257878 - RNA, 21 nt, Eastern equine encephalitis virus
caauugugugcuucugaaggu

SEQ ID NO: 257879 - RNA, 20 nt, Eastern equine encephalitis virus
cacauaacacuauaggcagu

SEQ ID NO: 257880 - RNA, 13 nt, Eastern equine encephalitis virus
cacuaagggcagu

SEQ ID NO: 257881 - RNA, 17 nt, Eastern equine encephalitis virus
cacuaagggcagugcau

SEQ ID NO: 257882 - RNA, 17 nt, Eastern equine encephalitis virus
cacuacaggcagcgcau

SEQ ID NO: 257883 - RNA, 16 nt, Eastern equine encephalitis virus
cagaagaaacuacaau

SEQ ID NO: 257884 - RNA, 15 nt, Eastern equine encephalitis virus
cauaaggcugcuaua

SEQ ID NO: 257885 - RNA, 18 nt, Eastern equine encephalitis virus
cauaauugccgcauauac

SEQ ID NO: 257886 - RNA, 17 nt, Eastern equine encephalitis virus
cauauacaauuacacua

SEQ ID NO: 257887 - RNA, 20 nt, Eastern equine encephalitis virus
cauauacaauuacacuacag

SEQ ID NO: 257888 - RNA, 23 nt, Eastern equine encephalitis virus
cauauacaauuacacuacaggua

SEQ ID NO: 257889 - RNA, 20 nt, Eastern equine encephalitis virus
cauguauucaaguacugcaa

SEQ ID NO: 257890 - RNA, 17 nt, Eastern equine encephalitis virus
cauuuucucauccgaga

SEQ ID NO: 257891 - RNA, 21 nt, Eastern equine encephalitis virus
ccacauaacacuauaggcagu

SEQ ID NO: 257892 - RNA, 17 nt, Eastern equine encephalitis virus
ccaguugaaugcuacaa

SEQ ID NO: 257893 - RNA, 15 nt, Eastern equine encephalitis virus
ccgaugcagugcaua

SEQ ID NO: 257894 - RNA, 18 nt, Eastern equine encephalitis virus
ccgcauauacaauuacac

SEQ ID NO: 257895 - RNA, 13 nt, Eastern equine encephalitis virus
ccgccgaugcagu

SEQ ID NO: 257896 - RNA, 12 nt, Eastern equine encephalitis virus
cgccgaugcagu

SEQ ID NO: 257897 - RNA, 17 nt, Eastern equine encephalitis virus
cgccgaugcagugcaua

SEQ ID NO: 257898 - RNA, 19 nt, Eastern equine encephalitis virus
cguugagcgucuacugcag

SEQ ID NO: 257899 - RNA, 17 nt, Eastern equine encephalitis virus
cuaagggcagugcauaa

SEQ ID NO: 257900 - RNA, 13 nt, Eastern equine encephalitis virus
cuacagguaauau

SEQ ID NO: 257901 - RNA, 18 nt, Eastern equine encephalitis virus
cuauaaacacuacaggca

SEQ ID NO: 257902 - RNA, 15 nt, Eastern equine encephalitis virus
cuccuauaaacacua

SEQ ID NO: 257903 - RNA, 17 nt, Eastern equine encephalitis virus
cuccuauaaacacuaca

SEQ ID NO: 257904 - RNA, 14 nt, Eastern equine encephalitis virus
cugcagaaccgcaa

SEQ ID NO: 257905 - RNA, 19 nt, Eastern equine encephalitis virus
cugcuauauuaccacauua

SEQ ID NO: 257906 - RNA, 17 nt, Eastern equine encephalitis virus
cugucuuacuaaacacu

SEQ ID NO: 257907 - RNA, 19 nt, Eastern equine encephalitis virus
gaaugcuacaaaguuaccu

SEQ ID NO: 257908 - RNA, 17 nt, Eastern equine encephalitis virus
gagaacaugaaggcaau

SEQ ID NO: 257909 - RNA, 22 nt, Eastern equine encephalitis virus
gcaaccaguugaaugcuacaaa

SEQ ID NO: 257910 - RNA, 14 nt, Eastern equine encephalitis virus
gcaccugcaacaaa

SEQ ID NO: 257911 - RNA, 19 nt, Eastern equine encephalitis virus
gcauaauugccgcauauac

SEQ ID NO: 257912 - RNA, 16 nt, Eastern equine encephalitis virus
gccgaugcagugcaua

SEQ ID NO: 257913 - RNA, 13 nt, Eastern equine encephalitis virus
gcuauauuaccac

SEQ ID NO: 257914 - RNA, 11 nt, Eastern equine encephalitis virus
ggcagugcaua

SEQ ID NO: 257915 - RNA, 21 nt, Eastern equine encephalitis virus
ggcaguguauaaggcugucuu

SEQ ID NO: 257916 - RNA, 13 nt, Eastern equine encephalitis virus
guacugcaagcaa

SEQ ID NO: 257917 - RNA, 13 nt, Eastern equine encephalitis virus
guauucaaguacu

SEQ ID NO: 257918 - RNA, 16 nt, Eastern equine encephalitis virus
gugcauaaggcugcua

SEQ ID NO: 257919 - RNA, 18 nt, Eastern equine encephalitis virus
gugcauaaggcugcuaua

SEQ ID NO: 257920 - RNA, 12 nt, Eastern equine encephalitis virus
guguauaaggcu

SEQ ID NO: 257921 - RNA, 13 nt, Eastern equine encephalitis virus
uaaacacuacagg

SEQ ID NO: 257922 - RNA, 14 nt, Eastern equine encephalitis virus
uuacaaaaucauau

SEQ ID NO: 257923 - RNA, 13 nt, Eastern equine encephalitis virus
uuacacuacaggu

SEQ ID NO: 257924 - RNA, 16 nt, Eastern equine encephalitis virus
uuauaacacuaagggc

SEQ ID NO: 257925 - RNA, 17 nt, Eastern equine encephalitis virus
uucaaguacugcaagca

SEQ ID NO: 257926 - RNA, 14 nt, Eastern equine encephalitis virus
uuccguccaugaga

SEQ ID NO: 257927 - RNA, 14 nt, Eastern equine encephalitis virus
uugaaugcuacaaa

SEQ ID NO: 257928 - RNA, 13 nt, Eastern equine encephalitis virus
aaaaucauauuaa

SEQ ID NO: 257929 - RNA, 13 nt, Eastern equine encephalitis virus
aacacuaagggca

SEQ ID NO: 257930 - RNA, 13 nt, Eastern equine encephalitis virus
aacacuacaggca

SEQ ID NO: 257931 - RNA, 22 nt, Eastern equine encephalitis virus
aacacuacaggcagcgcauaau

SEQ ID NO: 257932 - RNA, 13 nt, Eastern equine encephalitis virus
aacacuauaggca

SEQ ID NO: 257933 - RNA, 20 nt, Eastern equine encephalitis virus
aacacuauaggcaguguaua

SEQ ID NO: 257934 - RNA, 12 nt, Eastern equine encephalitis virus
aacagcuucuca

SEQ ID NO: 257935 - RNA, 12 nt, Eastern equine encephalitis virus
aacuccaguauc

SEQ ID NO: 257936 - RNA, 22 nt, Eastern equine encephalitis virus
aagggcaccugcaacaaaaauc

SEQ ID NO: 257937 - RNA, 17 nt, Eastern equine encephalitis virus
aaguaauuuaauacaca

SEQ ID NO: 257938 - RNA, 17 nt, Eastern equine encephalitis virus
aaguuaccuauccugcu

SEQ ID NO: 257939 - RNA, 12 nt, Eastern equine encephalitis virus
aaucaggcauaa

SEQ ID NO: 257940 - RNA, 15 nt, Eastern equine encephalitis virus
aauuacacuacaggu

SEQ ID NO: 257941 - RNA, 18 nt, Eastern equine encephalitis virus
aauuuaauacacacuuua

SEQ ID NO: 257942 - RNA, 12 nt, Eastern equine encephalitis virus
acacuacaggca

SEQ ID NO: 257943 - RNA, 19 nt, Eastern equine encephalitis virus
acacuacagguaauauacc

SEQ ID NO: 257944 - RNA, 20 nt, Eastern equine encephalitis virus
acacuuuauaaucaggcaua

SEQ ID NO: 257945 - RNA, 19 nt, Eastern equine encephalitis virus
acauaacacuauaggcagu

SEQ ID NO: 257946 - RNA, 22 nt, Eastern equine encephalitis virus
accacauaacacuauaggcagu

SEQ ID NO: 257947 - RNA, 12 nt, Eastern equine encephalitis virus
acuaaacacuaa

SEQ ID NO: 257948 - RNA, 16 nt, Eastern equine encephalitis virus
acuaagggcagugcau

SEQ ID NO: 257949 - RNA, 19 nt, Eastern equine encephalitis virus
acuaagggcagugcauaau

SEQ ID NO: 257950 - RNA, 17 nt, Eastern equine encephalitis virus
acuauaggcaguguaua

SEQ ID NO: 257951 - RNA, 19 nt, Eastern equine encephalitis virus
agcgucuacugcaggggau

SEQ ID NO: 257952 - RNA, 23 nt, Eastern equine encephalitis virus
agcuauggugacgguggugcaua

SEQ ID NO: 257953 - RNA, 16 nt, Eastern equine encephalitis virus
aggcaaucaccguuga

SEQ ID NO: 257954 - RNA, 22 nt, Eastern equine encephalitis virus
aggcucauaucucucugcagaa

SEQ ID NO: 257955 - RNA, 14 nt, Eastern equine encephalitis virus
agggcagugcauaa

SEQ ID NO: 257956 - RNA, 22 nt, Eastern equine encephalitis virus
agggcagugcauaaugcugcuc

SEQ ID NO: 257957 - RNA, 23 nt, Eastern equine encephalitis virus
aggggauaggcucauaucucucu

SEQ ID NO: 257958 - RNA, 19 nt, Eastern equine encephalitis virus
agugcauaaggcugcuaua

SEQ ID NO: 257959 - RNA, 15 nt, Eastern equine encephalitis virus
auaaacacuacaggc

SEQ ID NO: 257960 - RNA, 22 nt, Eastern equine encephalitis virus
auaacacuaagggcagugcaua

SEQ ID NO: 257961 - RNA, 14 nt, Eastern equine encephalitis virus
auaaggcugcuaua

SEQ ID NO: 257962 - RNA, 22 nt, Eastern equine encephalitis virus
auaaugcugucuuuuauaucaa

SEQ ID NO: 257963 - RNA, 19 nt, Eastern equine encephalitis virus
auaauugccgcauauacaa

SEQ ID NO: 257964 - RNA, 20 nt, Eastern equine encephalitis virus
auaauugccgcauauacaau

SEQ ID NO: 257965 - RNA, 13 nt, Eastern equine encephalitis virus
auacaauuacacu

SEQ ID NO: 257966 - RNA, 14 nt, Eastern equine encephalitis virus
auaccgccuccuau

SEQ ID NO: 257967 - RNA, 23 nt, Eastern equine encephalitis virus
auaccgccuccuauaaacacuac

SEQ ID NO: 257968 - RNA, 14 nt, Eastern equine encephalitis virus
auauacaauuacac

SEQ ID NO: 257969 - RNA, 18 nt, Eastern equine encephalitis virus
auauaccgccuccuauaa

SEQ ID NO: 257970 - RNA, 12 nt, Eastern equine encephalitis virus
auauuaccacau

SEQ ID NO: 257971 - RNA, 16 nt, Eastern equine encephalitis virus
auauuaccacauuaua

SEQ ID NO: 257972 - RNA, 19 nt, Eastern equine encephalitis virus
auccugcucccauguauuc

SEQ ID NO: 257973 - RNA, 19 nt, Eastern equine encephalitis virus
aucuacgcggcaaugcaaa

SEQ ID NO: 257974 - RNA, 20 nt, Eastern equine encephalitis virus
aucuugucaaccacauaaca

SEQ ID NO: 257975 - RNA, 13 nt, Eastern equine encephalitis virus
augcagugcauaa

SEQ ID NO: 257976 - RNA, 22 nt, Eastern equine encephalitis virus
augcagugcauaaggcugcuau

SEQ ID NO: 257977 - RNA, 21 nt, Eastern equine encephalitis virus
auggugacgguggugcauaac

SEQ ID NO: 257978 - RNA, 19 nt, Eastern equine encephalitis virus
auguauucaaguacugcaa

SEQ ID NO: 257979 - RNA, 13 nt, Eastern equine encephalitis virus
auuaccacauuau

SEQ ID NO: 257980 - RNA, 16 nt, Eastern equine encephalitis virus
auugccgcauauacaa

SEQ ID NO: 257981 - RNA, 20 nt, Eastern equine encephalitis virus
auuuacaaaaucauauuaau

SEQ ID NO: 257982 - RNA, 13 nt, Eastern equine encephalitis virus
caaccacauaaca

SEQ ID NO: 257983 - RNA, 18 nt, Eastern equine encephalitis virus
caaccacauaacacuaua

SEQ ID NO: 257984 - RNA, 13 nt, Eastern equine encephalitis virus
caaguacugcaag

SEQ ID NO: 257985 - RNA, 22 nt, Eastern equine encephalitis virus
cacacuuuauaaucaggcauaa

SEQ ID NO: 257986 - RNA, 18 nt, Eastern equine encephalitis virus
cacuaagggcagugcaua

SEQ ID NO: 257987 - RNA, 20 nt, Eastern equine encephalitis virus
cacuaagggcagugcauaau

SEQ ID NO: 257988 - RNA, 13 nt, Eastern equine encephalitis virus
cacuauaggcagu

SEQ ID NO: 257989 - RNA, 18 nt, Eastern equine encephalitis virus
cacuuuauaaucaggcau

SEQ ID NO: 257990 - RNA, 14 nt, Eastern equine encephalitis virus
caggcagcgcauaa

SEQ ID NO: 257991 - RNA, 20 nt, Eastern equine encephalitis virus
cauaacgccgccgaugcagu

SEQ ID NO: 257992 - RNA, 22 nt, Eastern equine encephalitis virus
cauaaggcugcuauauuaccac

SEQ ID NO: 257993 - RNA, 17 nt, Eastern equine encephalitis virus
cauaauugccgcauaua

SEQ ID NO: 257994 - RNA, 19 nt, Eastern equine encephalitis virus
cauaauugccgcauauaca

SEQ ID NO: 257995 - RNA, 15 nt, Eastern equine encephalitis virus
cauauacaauuacac

SEQ ID NO: 257996 - RNA, 14 nt, Eastern equine encephalitis virus
caugaaggcaauca

SEQ ID NO: 257997 - RNA, 13 nt, Eastern equine encephalitis virus
cauuauaacacua

SEQ ID NO: 257998 - RNA, 14 nt, Eastern equine encephalitis virus
ccgaugcagugcau

SEQ ID NO: 257999 - RNA, 16 nt, Eastern equine encephalitis virus
ccgaugcagugcauaa

SEQ ID NO: 258000 - RNA, 21 nt, Eastern equine encephalitis virus
ccuaaguaauuuaauacacac

SEQ ID NO: 258001 - RNA, 19 nt, Eastern equine encephalitis virus
ccuauaaacacuacaggca

SEQ ID NO: 258002 - RNA, 15 nt, Eastern equine encephalitis virus
ccuccuauaaacacu

SEQ ID NO: 258003 - RNA, 23 nt, Eastern equine encephalitis virus
ccuccuauaaacacuacaggcag

SEQ ID NO: 258004 - RNA, 14 nt, Eastern equine encephalitis virus
cgaugcagugcaua

SEQ ID NO: 258005 - RNA, 16 nt, Eastern equine encephalitis virus
cgccgaugcagugcau

SEQ ID NO: 258006 - RNA, 20 nt, Eastern equine encephalitis virus
cgggacaagggcaccugcaa

SEQ ID NO: 258007 - RNA, 15 nt, Eastern equine encephalitis virus
cguacauuuucucau

SEQ ID NO: 258008 - RNA, 12 nt, Eastern equine encephalitis virus
cuaaacacuaaa

SEQ ID NO: 258009 - RNA, 16 nt, Eastern equine encephalitis virus
cuaagggcagugcaua

SEQ ID NO: 258010 - RNA, 17 nt, Eastern equine encephalitis virus
cuacaggcagcgcauaa

SEQ ID NO: 258011 - RNA, 22 nt, Eastern equine encephalitis virus
cuauauuaccacauuauaacac

SEQ ID NO: 258012 - RNA, 21 nt, Eastern equine encephalitis virus
cuauggugacgguggugcaua

SEQ ID NO: 258013 - RNA, 21 nt, Eastern equine encephalitis virus
cuccuaaguaauuuaauacac

SEQ ID NO: 258014 - RNA, 23 nt, Eastern equine encephalitis virus
cuccuaaguaauuuaauacacac

SEQ ID NO: 258015 - RNA, 20 nt, Eastern equine encephalitis virus
cugcuauauuaccacauuau

SEQ ID NO: 258016 - RNA, 14 nt, Eastern equine encephalitis virus
cuuacuaaacacua

SEQ ID NO: 258017 - RNA, 15 nt, Eastern equine encephalitis virus
cuucucaucagcaga

SEQ ID NO: 258018 - RNA, 18 nt, Eastern equine encephalitis virus
cuugucaaccacauaaca

SEQ ID NO: 258019 - RNA, 19 nt, Eastern equine encephalitis virus
cuugucaaccacauaacac

SEQ ID NO: 258020 - RNA, 15 nt, Eastern equine encephalitis virus
gaagcuguugcagaa

SEQ ID NO: 258021 - RNA, 18 nt, Eastern equine encephalitis virus
gaugcagugcauaaggcu

SEQ ID NO: 258022 - RNA, 13 nt, Eastern equine encephalitis virus
gcgucuacugcag

SEQ ID NO: 258023 - RNA, 22 nt, Eastern equine encephalitis virus
gcuauggugacgguggugcaua

SEQ ID NO: 258024 - RNA, 21 nt, Eastern equine encephalitis virus
ggcagcgcauaaugcugucuu

SEQ ID NO: 258025 - RNA, 20 nt, Eastern equine encephalitis virus
guaauauaccgccuccuaua

SEQ ID NO: 258026 - RNA, 17 nt, Eastern equine encephalitis virus
guaaucggagcagguau

SEQ ID NO: 258027 - RNA, 19 nt, Eastern equine encephalitis virus
gugcauaaggcugcuauau

SEQ ID NO: 258028 - RNA, 15 nt, Eastern equine encephalitis virus
gugcauaaugcugcu

SEQ ID NO: 258029 - RNA, 20 nt, Eastern equine encephalitis virus
gugcauaaugcugcuccuaa

SEQ ID NO: 258030 - RNA, 16 nt, Eastern equine encephalitis virus
uaacacuaagggcagu

SEQ ID NO: 258031 - RNA, 21 nt, Eastern equine encephalitis virus
uaacacuaagggcagugcaua

SEQ ID NO: 258032 - RNA, 16 nt, Eastern equine encephalitis virus
uaacacuauaggcagu

SEQ ID NO: 258033 - RNA, 18 nt, Eastern equine encephalitis virus
uaacgccgccgaugcagu

SEQ ID NO: 258034 - RNA, 22 nt, Eastern equine encephalitis virus
uaacgccgccgaugcagugcau

SEQ ID NO: 258035 - RNA, 22 nt, Eastern equine encephalitis virus
uaaugcugcuccuaaguaauuu

SEQ ID NO: 258036 - RNA, 20 nt, Eastern equine encephalitis virus
uaaugcugucuuuuauauca

SEQ ID NO: 258037 - RNA, 19 nt, Eastern equine encephalitis virus
uacaauuacacuacaggua

SEQ ID NO: 258038 - RNA, 11 nt, Eastern equine encephalitis virus
uacacuacagg

SEQ ID NO: 258039 - RNA, 15 nt, Eastern equine encephalitis virus
uacuaaacacuaaau

SEQ ID NO: 258040 - RNA, 14 nt, Eastern equine encephalitis virus
uauaaacacuacag

SEQ ID NO: 258041 - RNA, 20 nt, Eastern equine encephalitis virus
uauaaggcugucuuacuaaa

SEQ ID NO: 258042 - RNA, 15 nt, Eastern equine encephalitis virus
uauacaauuacacua

SEQ ID NO: 258043 - RNA, 22 nt, Eastern equine encephalitis virus
uauuaccacauuauaacacuaa

SEQ ID NO: 258044 - RNA, 18 nt, Eastern equine encephalitis virus
ucaaccacauaacacuau

SEQ ID NO: 258045 - RNA, 20 nt, Eastern equine encephalitis virus
uccuaaguaauuuaauacac

SEQ ID NO: 258046 - RNA, 14 nt, Eastern equine encephalitis virus
ucgagcgugagaag

SEQ ID NO: 258047 - RNA, 16 nt, Eastern equine encephalitis virus
ucuacgcggcaaugca

SEQ ID NO: 258048 - RNA, 17 nt, Eastern equine encephalitis virus
ucuacgcggcaaugcaa

SEQ ID NO: 258049 - RNA, 16 nt, Eastern equine encephalitis virus
ucuuacuaaacacuaa

SEQ ID NO: 258050 - RNA, 16 nt, Eastern equine encephalitis virus
ugacgguggugcauaa

SEQ ID NO: 258051 - RNA, 22 nt, Eastern equine encephalitis virus
ugcauaacgccgccgaugcagu

SEQ ID NO: 258052 - RNA, 18 nt, Eastern equine encephalitis virus
ugcauaaggcugcuauau

SEQ ID NO: 258053 - RNA, 21 nt, Eastern equine encephalitis virus
ugucaaccacauaacacuaua

SEQ ID NO: 258054 - RNA, 15 nt, Eastern equine encephalitis virus
ugucuuuuauaucaa

SEQ ID NO: 258055 - RNA, 18 nt, Eastern equine encephalitis virus
ugucuuuuauaucaauuu

SEQ ID NO: 258056 - RNA, 20 nt, Eastern equine encephalitis virus
uaauacacacuuuauaauca

SEQ ID NO: 258057 - RNA, 19 nt, Eastern equine encephalitis virus
uaauauaccgccuccuaua

SEQ ID NO: 258058 - RNA, 18 nt, Eastern equine encephalitis virus
uaauugccgcauauacaa

SEQ ID NO: 258059 - RNA, 16 nt, Eastern equine encephalitis virus
uacaauuacacuacag

SEQ ID NO: 258060 - RNA, 17 nt, Eastern equine encephalitis virus
uacaauuacacuacagg

SEQ ID NO: 258061 - RNA, 17 nt, Eastern equine encephalitis virus
uauaaacacuacaggca

SEQ ID NO: 258062 - RNA, 12 nt, Eastern equine encephalitis virus
uauauuaccaca

SEQ ID NO: 258063 - RNA, 24 nt, Eastern equine encephalitis virus
uaucagucucguaaaguagagaac

SEQ ID NO: 258064 - RNA, 17 nt, Eastern equine encephalitis virus
uccuauaaacacuacag

SEQ ID NO: 258065 - RNA, 19 nt, Eastern equine encephalitis virus
uccuauaaacacuacaggc

SEQ ID NO: 258066 - RNA, 15 nt, Eastern equine encephalitis virus
uccugcucccaugua

SEQ ID NO: 258067 - RNA, 12 nt, Eastern equine encephalitis virus
ugcagugcauaa

SEQ ID NO: 258068 - RNA, 14 nt, Eastern equine encephalitis virus
ugcauaaggcugcu

SEQ ID NO: 258069 - RNA, 14 nt, Eastern equine encephalitis virus
ugcauaaugcugcu

SEQ ID NO: 258070 - RNA, 14 nt, Eastern equine encephalitis virus
ugccgcauauacaa

SEQ ID NO: 258071 - RNA, 18 nt, Eastern equine encephalitis virus
uguauucaaguacugcaa

SEQ ID NO: 258072 - RNA, 16 nt, Eastern equine encephalitis virus
uugccgcauauacaau

SEQ ID NO: 258073 - RNA, 21 nt, Eastern equine encephalitis virus
uugucaaccacauaacacuau

SEQ ID NO: 258074 - RNA, 14 nt, Eastern equine encephalitis virus
uaaacacuacaggc

SEQ ID NO: 258075 - RNA, 22 nt, Eastern equine encephalitis virus
uaaaguagagaacaugaaggca

SEQ ID NO: 258076 - RNA, 20 nt, Eastern equine encephalitis virus
uaacacuaagggcagugcau

SEQ ID NO: 258077 - RNA, 22 nt, Eastern equine encephalitis virus
uaacacuaagggcagugcauaa

SEQ ID NO: 258078 - RNA, 21 nt, Eastern equine encephalitis virus
uaacacuauaggcaguguaua

SEQ ID NO: 258079 - RNA, 20 nt, Feline calicivirus
aucccuuugggcugccgcau

SEQ ID NO: 258080 - RNA, 19 nt, Feline calicivirus
auuugcgccuaaccccagg

SEQ ID NO: 258081 - RNA, 23 nt, Feline calicivirus
caaguaucccuuugggcugccgc

SEQ ID NO: 258082 - RNA, 14 nt, Feline calicivirus
cauuugcgccuaac

SEQ ID NO: 258083 - RNA, 20 nt, Feline calicivirus
ccuuugggcugccgcauuug

SEQ ID NO: 258084 - RNA, 14 nt, Feline calicivirus
cugccgcauuugcg

SEQ ID NO: 258085 - RNA, 16 nt, Feline calicivirus
gcauuugcgccuaacc

SEQ ID NO: 258086 - RNA, 20 nt, Feline calicivirus
gcauuugcgccuaaccccag

SEQ ID NO: 258087 - RNA, 14 nt, Feline calicivirus
gcgccuaaccccag

SEQ ID NO: 258088 - RNA, 15 nt, Feline calicivirus
ggcugccgcauuugc

SEQ ID NO: 258089 - RNA, 15 nt, Feline calicivirus
gggcugccgcauuug

SEQ ID NO: 258090 - RNA, 22 nt, Feline calicivirus
gggcugccgcauuugcgccuaa

SEQ ID NO: 258091 - RNA, 18 nt, Feline calicivirus
guaucccuuugggcugcc

SEQ ID NO: 258092 - RNA, 16 nt, Feline calicivirus
ugggcugccgcauuug

SEQ ID NO: 258093 - RNA, 19 nt, Feline calicivirus
uuugggcugccgcauuugc

SEQ ID NO: 258094 - RNA, 17 nt, Feline calicivirus
aguaucccuuugggcug

SEQ ID NO: 258095 - RNA, 23 nt, Feline calicivirus
cacaaguaucccuuugggcugcc

SEQ ID NO: 258096 - RNA, 20 nt, Feline calicivirus
cccuuugggcugccgcauuu

SEQ ID NO: 258097 - RNA, 22 nt, Feline calicivirus
cccuuugggcugccgcauuugc

SEQ ID NO: 258098 - RNA, 11 nt, Feline calicivirus
ccgcauuugcg

SEQ ID NO: 258099 - RNA, 23 nt, Feline calicivirus
ccgcauuugcgccuaaccccagg

SEQ ID NO: 258100 - RNA, 13 nt, Feline calicivirus
cugccgcauuugc

SEQ ID NO: 258101 - RNA, 18 nt, Feline calicivirus
cugccgcauuugcgccua

SEQ ID NO: 258102 - RNA, 20 nt, Feline calicivirus
cuuugggcugccgcauuugc

SEQ ID NO: 258103 - RNA, 21 nt, Feline calicivirus
gcauuugcgccuaaccccagg

SEQ ID NO: 258104 - RNA, 11 nt, Feline calicivirus
gccgcauuugc

SEQ ID NO: 258105 - RNA, 22 nt, Feline calicivirus
ggcugccgcauuugcgccuaac

SEQ ID NO: 258106 - RNA, 14 nt, Feline calicivirus
gggcugccgcauuu

SEQ ID NO: 258107 - RNA, 13 nt, Feline calicivirus
uaucccuuugggc

SEQ ID NO: 258108 - RNA, 23 nt, Feline calicivirus
uaucccuuugggcugccgcauuu

SEQ ID NO: 258109 - RNA, 12 nt, Feline calicivirus
ugccgcauuugc

SEQ ID NO: 258110 - RNA, 13 nt, Feline calicivirus
ugccgcauuugcg

SEQ ID NO: 258111 - RNA, 13 nt, Feline calicivirus
ugggcugccgcau

SEQ ID NO: 258112 - RNA, 17 nt, Feline calicivirus
ugggcugccgcauuugc

SEQ ID NO: 258113 - RNA, 18 nt, Feline calicivirus
ugggcugccgcauuugcg

SEQ ID NO: 258114 - RNA, 20 nt, Feline calicivirus
uugggcugccgcauuugcgc

SEQ ID NO: 258115 - RNA, 22 nt, Feline foamy virus
aaaaccauguauucuuuaguca

SEQ ID NO: 258116 - RNA, 12 nt, Feline foamy virus
aaaccauguauu

SEQ ID NO: 258117 - RNA, 22 nt, Feline foamy virus
aaaccauguauucuuuagucau

SEQ ID NO: 258118 - RNA, 13 nt, Feline foamy virus
aaacuauguaucc

SEQ ID NO: 258119 - RNA, 14 nt, Feline foamy virus
aaacugcaauagua

SEQ ID NO: 258120 - RNA, 11 nt, Feline foamy virus
aacucuuacau

SEQ ID NO: 258121 - RNA, 16 nt, Feline foamy virus
aacugcaauaguaacu

SEQ ID NO: 258122 - RNA, 23 nt, Feline foamy virus
aagauuuugauauguauuuugcu

SEQ ID NO: 258123 - RNA, 17 nt, Feline foamy virus
aaguacagcuuagucau

SEQ ID NO: 258124 - RNA, 13 nt, Feline foamy virus
aaguagauuuugc

SEQ ID NO: 258125 - RNA, 20 nt, Feline foamy virus
aauauuauuugccuugcuca

SEQ ID NO: 258126 - RNA, 22 nt, Feline foamy virus
aauccuuuuuuagguacuuagu

SEQ ID NO: 258127 - RNA, 20 nt, Feline foamy virus
accauguauucuuuagucau

SEQ ID NO: 258128 - RNA, 20 nt, Feline foamy virus
acugcaauaguaacuaucaa

SEQ ID NO: 258129 - RNA, 17 nt, Feline foamy virus
acuuucggcaugcaaca

SEQ ID NO: 258130 - RNA, 13 nt, Feline foamy virus
agagguguggaaa

SEQ ID NO: 258131 - RNA, 17 nt, Feline foamy virus
agagugguuauguaucu

SEQ ID NO: 258132 - RNA, 18 nt, Feline foamy virus
agauacuuagaguaugaa

SEQ ID NO: 258133 - RNA, 22 nt, Feline foamy virus
agcucuucucacagacuuggcu

SEQ ID NO: 258134 - RNA, 18 nt, Feline foamy virus
aggguagaggaaauguuc

SEQ ID NO: 258135 - RNA, 21 nt, Feline foamy virus
agucaccgucuuacaucuaga

SEQ ID NO: 258136 - RNA, 16 nt, Feline foamy virus
auacuuagaguaugaa

SEQ ID NO: 258137 - RNA, 14 nt, Feline foamy virus
auaguaacuaucaa

SEQ ID NO: 258138 - RNA, 17 nt, Feline foamy virus
aucaauguuaguaaaua

SEQ ID NO: 258139 - RNA, 21 nt, Feline foamy virus
auccuuuaaaaccauguauuc

SEQ ID NO: 258140 - RNA, 15 nt, Feline foamy virus
aucuagauacuuaga

SEQ ID NO: 258141 - RNA, 17 nt, Feline foamy virus
auguucaagacauauaa

SEQ ID NO: 258142 - RNA, 17 nt, Feline foamy virus
auguucuaaucuccuau

SEQ ID NO: 258143 - RNA, 14 nt, Feline foamy virus
cagcuuagucaucu

SEQ ID NO: 258144 - RNA, 16 nt, Feline foamy virus
cagcuuagucaucuga

SEQ ID NO: 258145 - RNA, 14 nt, Feline foamy virus
cauacucggggaaa

SEQ ID NO: 258146 - RNA, 15 nt, Feline foamy virus
cauauaaaaggguua

SEQ ID NO: 258147 - RNA, 20 nt, Feline foamy virus
cauaucgaaacuauguaucc

SEQ ID NO: 258148 - RNA, 23 nt, Feline foamy virus
cauaucgaaacuauguauccuuu

SEQ ID NO: 258149 - RNA, 14 nt, Feline foamy virus
caucuagagccuac

SEQ ID NO: 258150 - RNA, 16 nt, Feline foamy virus
cauguauucauaucga

SEQ ID NO: 258151 - RNA, 21 nt, Feline foamy virus
cauguauucuuuagucaucua

SEQ ID NO: 258152 - RNA, 19 nt, Feline foamy virus
cauguucaagacauauaaa

SEQ ID NO: 258153 - RNA, 16 nt, Feline foamy virus
cauguuucugcuauua

SEQ ID NO: 258154 - RNA, 21 nt, Feline foamy virus
ccagcuuggguaagauuuuga

SEQ ID NO: 258155 - RNA, 11 nt, Feline foamy virus
ccauguauucu

SEQ ID NO: 258156 - RNA, 15 nt, Feline foamy virus
ccuaucuuaaagggu

SEQ ID NO: 258157 - RNA, 17 nt, Feline foamy virus
ccuaucuuaaaggguug

SEQ ID NO: 258158 - RNA, 18 nt, Feline foamy virus
cgugcacaggaagcuccu

SEQ ID NO: 258159 - RNA, 22 nt, Feline foamy virus
cuaagucaccgucuuacaucua

SEQ ID NO: 258160 - RNA, 20 nt, Feline foamy virus
cuagagccuacucuucuuga

SEQ ID NO: 258161 - RNA, 17 nt, Feline foamy virus
cucucguucauguauuc

SEQ ID NO: 258162 - RNA, 18 nt, Feline foamy virus
cucucguucauguauuca

SEQ ID NO: 258163 - RNA, 20 nt, Feline foamy virus
cugacuaaacuuccugggga

SEQ ID NO: 258164 - RNA, 23 nt, Feline foamy virus
cugacuaaacuuccuggggacua

SEQ ID NO: 258165 - RNA, 15 nt, Feline foamy virus
cuggggacuagaggu

SEQ ID NO: 258166 - RNA, 16 nt, Feline foamy virus
cugucauacucgggga

SEQ ID NO: 258167 - RNA, 17 nt, Feline foamy virus
cuuaaaggguugcuuca

SEQ ID NO: 258168 - RNA, 18 nt, Feline foamy virus
cuugaacuguucgaaucc

SEQ ID NO: 258169 - RNA, 22 nt, Feline foamy virus
cuuuacauguucaagacauaua

SEQ ID NO: 258170 - RNA, 19 nt, Feline foamy virus
gaaacugcaauaguaacua

SEQ ID NO: 258171 - RNA, 18 nt, Feline foamy virus
gcacaggaagcuccuuua

SEQ ID NO: 258172 - RNA, 17 nt, Feline foamy virus
gcauaacuuuaaacuuu

SEQ ID NO: 258173 - RNA, 13 nt, Feline foamy virus
ggaacucuuacau

SEQ ID NO: 258174 - RNA, 11 nt, Feline foamy virus
ggaagcuccuu

SEQ ID NO: 258175 - RNA, 23 nt, Feline foamy virus
ggagcuaagucaccgucuuacau

SEQ ID NO: 258176 - RNA, 20 nt, Feline foamy virus
ggagcucuucucacagacuu

SEQ ID NO: 258177 - RNA, 23 nt, Feline foamy virus
gguggcagagugguuauguaucu

SEQ ID NO: 258178 - RNA, 22 nt, Feline foamy virus
gucacgagaaaagaaccuagaa

SEQ ID NO: 258179 - RNA, 13 nt, Feline foamy virus
guggaaacuuugc

SEQ ID NO: 258180 - RNA, 21 nt, Feline foamy virus
guucgaaacuguguacuggaa

SEQ ID NO: 258181 - RNA, 17 nt, Feline foamy virus
guugcauguuucugcua

SEQ ID NO: 258182 - RNA, 20 nt, Feline foamy virus
uaaaaggguuaugguagauu

SEQ ID NO: 258183 - RNA, 15 nt, Feline foamy virus
uaaaggguugcuuca

SEQ ID NO: 258184 - RNA, 13 nt, Feline foamy virus
uaaaguacagcuu

SEQ ID NO: 258185 - RNA, 16 nt, Feline foamy virus
uaagauaaguagugaa

SEQ ID NO: 258186 - RNA, 20 nt, Feline foamy virus
uaagauuuugauauguauuu

SEQ ID NO: 258187 - RNA, 22 nt, Feline foamy virus
uaaguagugaauaaauuacucu

SEQ ID NO: 258188 - RNA, 14 nt, Feline foamy virus
uaagucaccgucuu

SEQ ID NO: 258189 - RNA, 12 nt, Feline foamy virus
uacagcuuaguc

SEQ ID NO: 258190 - RNA, 13 nt, Feline foamy virus
uacagcuuaguca

SEQ ID NO: 258191 - RNA, 19 nt, Feline foamy virus
uacagcuuagucaucugau

SEQ ID NO: 258192 - RNA, 19 nt, Feline foamy virus
uagauacuuagaguaugaa

SEQ ID NO: 258193 - RNA, 14 nt, Feline foamy virus
uagcagcauauaaa

SEQ ID NO: 258194 - RNA, 13 nt, Feline foamy virus
uaguaacuaucaa

SEQ ID NO: 258195 - RNA, 14 nt, Feline foamy virus
uaguugcauguuuc

SEQ ID NO: 258196 - RNA, 19 nt, Feline foamy virus
uauaaaaggguuaugguag

SEQ ID NO: 258197 - RNA, 22 nt, Feline foamy virus
uauaaaaggguuaugguagauu

SEQ ID NO: 258198 - RNA, 14 nt, Feline foamy virus
uaucuuaaaggguu

SEQ ID NO: 258199 - RNA, 16 nt, Feline foamy virus
uauuagcagcauauaa

SEQ ID NO: 258200 - RNA, 15 nt, Feline foamy virus
uauuauuugccuugc

SEQ ID NO: 258201 - RNA, 18 nt, Feline foamy virus
ucaccgucuuacaucuag

SEQ ID NO: 258202 - RNA, 13 nt, Feline foamy virus
ucauacucgggga

SEQ ID NO: 258203 - RNA, 19 nt, Feline foamy virus
uccuuuaaaaccauguauu

SEQ ID NO: 258204 - RNA, 20 nt, Feline foamy virus
uccuuuuuuagguacuuagu

SEQ ID NO: 258205 - RNA, 16 nt, Feline foamy virus
ucgaaacuauguaucc

SEQ ID NO: 258206 - RNA, 12 nt, Feline foamy virus
ucgaauccuuuu

SEQ ID NO: 258207 - RNA, 14 nt, Feline foamy virus
ucggcaugcaacag

SEQ ID NO: 258208 - RNA, 13 nt, Feline foamy virus
ucguucauguauu

SEQ ID NO: 258209 - RNA, 22 nt, Feline foamy virus
ucguucauguauucauaucgaa

SEQ ID NO: 258210 - RNA, 18 nt, Feline foamy virus
ucuuaaaggguugcuuca

SEQ ID NO: 258211 - RNA, 17 nt, Feline foamy virus
ucuuuagucaucuagau

SEQ ID NO: 258212 - RNA, 14 nt, Feline foamy virus
ugaaaagcaugacu

SEQ ID NO: 258213 - RNA, 15 nt, Feline foamy virus
ugaaaagcaugacuc

SEQ ID NO: 258214 - RNA, 20 nt, Feline foamy virus
ugcacaggaagcuccuuuag

SEQ ID NO: 258215 - RNA, 20 nt, Feline foamy virus
ugcuauuagcagcauauaaa

SEQ ID NO: 258216 - RNA, 22 nt, Feline foamy virus
uggaaaaauauauuccugacua

SEQ ID NO: 258217 - RNA, 12 nt, Feline foamy virus
uggaacucuuac

SEQ ID NO: 258218 - RNA, 19 nt, Feline foamy virus
uggaacucuuacaucaccu

SEQ ID NO: 258219 - RNA, 20 nt, Feline foamy virus
uggaaguagauuuugcauaa

SEQ ID NO: 258220 - RNA, 18 nt, Feline foamy virus
uggauuaugcaacuuugu

SEQ ID NO: 258221 - RNA, 21 nt, Feline foamy virus
uggcagagugguuauguaucu

SEQ ID NO: 258222 - RNA, 21 nt, Feline foamy virus
ugguguaggagcuaagucacc

SEQ ID NO: 258223 - RNA, 23 nt, Feline foamy virus
uguaggagcuaagucaccgucuu

SEQ ID NO: 258224 - RNA, 19 nt, Feline foamy virus
uguauucuuuagucaucua

SEQ ID NO: 258225 - RNA, 17 nt, Feline foamy virus
ugucauacucggggaaa

SEQ ID NO: 258226 - RNA, 21 nt, Feline foamy virus
uguucaagacauauaaagggu

SEQ ID NO: 258227 - RNA, 14 nt, Feline foamy virus
uguucuaaucuccu

SEQ ID NO: 258228 - RNA, 11 nt, Feline foamy virus
uuaaaggguug

SEQ ID NO: 258229 - RNA, 21 nt, Feline foamy virus
uuagucaucugaugaugucac

SEQ ID NO: 258230 - RNA, 22 nt, Feline foamy virus
uucauuuaagguucgaaacugu

SEQ ID NO: 258231 - RNA, 12 nt, Feline foamy virus
uucgaauccuuu

SEQ ID NO: 258232 - RNA, 15 nt, Feline foamy virus
uucuuuagucaucua

SEQ ID NO: 258233 - RNA, 15 nt, Feline foamy virus
uuuaagagacugaaa

SEQ ID NO: 258234 - RNA, 21 nt, Feline foamy virus
uuugauauguauuuugcuuga

SEQ ID NO: 258235 - RNA, 18 nt, Feline foamy virus
uuuggaacucuuacauca

SEQ ID NO: 258236 - RNA, 12 nt, Feline foamy virus
uuuuagguacuu

SEQ ID NO: 258237 - RNA, 13 nt, Feline foamy virus
aaaaccauguauu

SEQ ID NO: 258238 - RNA, 23 nt, Feline foamy virus
aaaaccauguauucuuuagucau

SEQ ID NO: 258239 - RNA, 21 nt, Feline foamy virus
aaacuguguacuggaaguaga

SEQ ID NO: 258240 - RNA, 22 nt, Feline foamy virus
aaauaaaguacagcuuagucau

SEQ ID NO: 258241 - RNA, 17 nt, Feline foamy virus
aaauguucuaaucuccu

SEQ ID NO: 258242 - RNA, 12 nt, Feline foamy virus
aaccauguauuc

SEQ ID NO: 258243 - RNA, 14 nt, Feline foamy virus
aagagaagaacaac

SEQ ID NO: 258244 - RNA, 13 nt, Feline foamy virus
aagauaaguagug

SEQ ID NO: 258245 - RNA, 14 nt, Feline foamy virus
aaguagauuuugca

SEQ ID NO: 258246 - RNA, 17 nt, Feline foamy virus
aagucaccgucuuacau

SEQ ID NO: 258247 - RNA, 13 nt, Feline foamy virus
aauaaaguacagc

SEQ ID NO: 258248 - RNA, 15 nt, Feline foamy virus
aauaguaacuaucaa

SEQ ID NO: 258249 - RNA, 13 nt, Feline foamy virus
aauguucuaaucu

SEQ ID NO: 258250 - RNA, 13 nt, Feline foamy virus
acaggaagcuccu

SEQ ID NO: 258251 - RNA, 19 nt, Feline foamy virus
acauguucaagacauauaa

SEQ ID NO: 258252 - RNA, 18 nt, Feline foamy virus
accauguauucuuuaguc

SEQ ID NO: 258253 - RNA, 23 nt, Feline foamy virus
accuagaagagaagaacaacuuu

SEQ ID NO: 258254 - RNA, 17 nt, Feline foamy virus
acucucguucauguauu

SEQ ID NO: 258255 - RNA, 18 nt, Feline foamy virus
acugaaaagcaugacucg

SEQ ID NO: 258256 - RNA, 20 nt, Feline foamy virus
acuuugcugccucugcuuca

SEQ ID NO: 258257 - RNA, 14 nt, Feline foamy virus
agaaacugcaauag

SEQ ID NO: 258258 - RNA, 14 nt, Feline foamy virus
agaagaacaacuuu

SEQ ID NO: 258259 - RNA, 14 nt, Feline foamy virus
agauaaguagugaa

SEQ ID NO: 258260 - RNA, 15 nt, Feline foamy virus
aggaagcuccuuuag

SEQ ID NO: 258261 - RNA, 20 nt, Feline foamy virus
aguaaauaaaguacagcuua

SEQ ID NO: 258262 - RNA, 17 nt, Feline foamy virus
aguacagcuuagucauc

SEQ ID NO: 258263 - RNA, 20 nt, Feline foamy virus
aguacagcuuagucaucuga

SEQ ID NO: 258264 - RNA, 18 nt, Feline foamy virus
aguugcauguuucugcua

SEQ ID NO: 258265 - RNA, 21 nt, Feline foamy virus
aguugcauguuucugcuauua

SEQ ID NO: 258266 - RNA, 19 nt, Feline foamy virus
auaaaguacagcuuaguca

SEQ ID NO: 258267 - RNA, 20 nt, Feline foamy virus
auaaaguacagcuuagucau

SEQ ID NO: 258268 - RNA, 21 nt, Feline foamy virus
auaaaguacagcuuagucauc

SEQ ID NO: 258269 - RNA, 14 nt, Feline foamy virus
auaaguagugaaua

SEQ ID NO: 258270 - RNA, 14 nt, Feline foamy virus
auauaaaaggguua

SEQ ID NO: 258271 - RNA, 16 nt, Feline foamy virus
auaucgaaacuaugua

SEQ ID NO: 258272 - RNA, 14 nt, Feline foamy virus
auauguauuuugcu

SEQ ID NO: 258273 - RNA, 13 nt, Feline foamy virus
auguauccuuuaa

SEQ ID NO: 258274 - RNA, 15 nt, Feline foamy virus
auguauucauaucga

SEQ ID NO: 258275 - RNA, 18 nt, Feline foamy virus
auguauucuuuagucauc

SEQ ID NO: 258276 - RNA, 22 nt, Feline foamy virus
auguauucuuuagucaucuaga

SEQ ID NO: 258277 - RNA, 13 nt, Feline foamy virus
auguuucugcuau

SEQ ID NO: 258278 - RNA, 20 nt, Feline foamy virus
auuacucucguucauguauu

SEQ ID NO: 258279 - RNA, 21 nt, Feline foamy virus
auuacucucguucauguauuc

SEQ ID NO: 258280 - RNA, 17 nt, Feline foamy virus
auuauuugccuugcuca

SEQ ID NO: 258281 - RNA, 21 nt, Feline foamy virus
auuguacgggagcucuucuca

SEQ ID NO: 258282 - RNA, 14 nt, Feline foamy virus
auuugccuugcuca

SEQ ID NO: 258283 - RNA, 20 nt, Feline foamy virus
caaaauuaaauaaauuggcu

SEQ ID NO: 258284 - RNA, 17 nt, Feline foamy virus
caacuuucggcaugcaa

SEQ ID NO: 258285 - RNA, 22 nt, Feline foamy virus
caagacauauaaaggguggaaa

SEQ ID NO: 258286 - RNA, 23 nt, Feline foamy virus
caagacauauaaaggguggaaaa

SEQ ID NO: 258287 - RNA, 16 nt, Feline foamy virus
caauaguaacuaucaa

SEQ ID NO: 258288 - RNA, 18 nt, Feline foamy virus
cagagugguuauguaucu

SEQ ID NO: 258289 - RNA, 23 nt, Feline foamy virus
caucuagauacuuagaguaugaa

SEQ ID NO: 258290 - RNA, 19 nt, Feline foamy virus
caugacucgugcacaggaa

SEQ ID NO: 258291 - RNA, 23 nt, Feline foamy virus
cauguucaagacauauaaagggu

SEQ ID NO: 258292 - RNA, 21 nt, Feline foamy virus
cauuuaagguucgaaacugug

SEQ ID NO: 258293 - RNA, 18 nt, Feline foamy virus
cgaaacuguguacuggaa

SEQ ID NO: 258294 - RNA, 13 nt, Feline foamy virus
cuagauacuuaga

SEQ ID NO: 258295 - RNA, 18 nt, Feline foamy virus
cuauuagcagcauauaaa

SEQ ID NO: 258296 - RNA, 20 nt, Feline foamy virus
cugcuauuagcagcauauaa

SEQ ID NO: 258297 - RNA, 19 nt, Feline foamy virus
cugucauacucggggaaag

SEQ ID NO: 258298 - RNA, 16 nt, Feline foamy virus
cuuagucaucugauga

SEQ ID NO: 258299 - RNA, 18 nt, Feline foamy virus
cuuuaaaaccauguauuc

SEQ ID NO: 258300 - RNA, 12 nt, Feline foamy virus
cuuuagucaucu

SEQ ID NO: 258301 - RNA, 13 nt, Feline foamy virus
cuuuagucaucua

SEQ ID NO: 258302 - RNA, 18 nt, Feline foamy virus
gaaguagauuuugcauaa

SEQ ID NO: 258303 - RNA, 21 nt, Feline foamy virus
gacuagagguguggaaacuuu

SEQ ID NO: 258304 - RNA, 14 nt, Feline foamy virus
gagaaaagaaccua

SEQ ID NO: 258305 - RNA, 12 nt, Feline foamy virus
gagcuaagucac

SEQ ID NO: 258306 - RNA, 13 nt, Feline foamy virus
gaggaaauguucu

SEQ ID NO: 258307 - RNA, 15 nt, Feline foamy virus
gccuacucuucuuga

SEQ ID NO: 258308 - RNA, 16 nt, Feline foamy virus
gcuccuuuaggguaga

SEQ ID NO: 258309 - RNA, 14 nt, Feline foamy virus
gcuuagucaucuga

SEQ ID NO: 258310 - RNA, 22 nt, Feline foamy virus
ggaaauguucuaaucuccuauc

SEQ ID NO: 258311 - RNA, 22 nt, Feline foamy virus
gggagcuugguguaggagcuaa

SEQ ID NO: 258312 - RNA, 11 nt, Feline foamy virus
ggggaaaguuu

SEQ ID NO: 258313 - RNA, 21 nt, Feline foamy virus
guagauuguacgggagcucuu

SEQ ID NO: 258314 - RNA, 18 nt, Feline foamy virus
gucaucuagauacuuaga

SEQ ID NO: 258315 - RNA, 13 nt, Feline foamy virus
guugcauguuucu

SEQ ID NO: 258316 - RNA, 15 nt, Feline foamy virus
uaaaaccauguauuc

SEQ ID NO: 258317 - RNA, 18 nt, Feline foamy virus
uaaaguacagcuuaguca

SEQ ID NO: 258318 - RNA, 18 nt, Feline foamy virus
uacagcuuagucaucuga

SEQ ID NO: 258319 - RNA, 18 nt, Feline foamy virus
uaccuggauuaugcaacu

SEQ ID NO: 258320 - RNA, 19 nt, Feline foamy virus
uacucucguucauguauuc

SEQ ID NO: 258321 - RNA, 15 nt, Feline foamy virus
uacuggaaguagauu

SEQ ID NO: 258322 - RNA, 16 nt, Feline foamy virus
uagaggaaauguucua

SEQ ID NO: 258323 - RNA, 18 nt, Feline foamy virus
uaguaacuaucaauguua

SEQ ID NO: 258324 - RNA, 18 nt, Feline foamy virus
uaugaaaaaagaaacugc

SEQ ID NO: 258325 - RNA, 23 nt, Feline foamy virus
uauuagcagcauauaaaaggguu

SEQ ID NO: 258326 - RNA, 18 nt, Feline foamy virus
uauuauuugccuugcuca

SEQ ID NO: 258327 - RNA, 20 nt, Feline foamy virus
uauuauuugccuugcucaaa

SEQ ID NO: 258328 - RNA, 20 nt, Feline foamy virus
uccuuuaaaaccauguauuc

SEQ ID NO: 258329 - RNA, 22 nt, Feline foamy virus
uccuuuaggguagaggaaaugu

SEQ ID NO: 258330 - RNA, 20 nt, Feline foamy virus
ucgaaacuauguauccuuua

SEQ ID NO: 258331 - RNA, 20 nt, Feline foamy virus
ucgaaacuguguacuggaag

SEQ ID NO: 258332 - RNA, 13 nt, Feline foamy virus
ucuuacaucuaga

SEQ ID NO: 258333 - RNA, 16 nt, Feline foamy virus
ucuuuagucaucuaga

SEQ ID NO: 258334 - RNA, 19 nt, Feline foamy virus
ugacuaaacuuccugggga

SEQ ID NO: 258335 - RNA, 22 nt, Feline foamy virus
ugacuaaacuuccuggggacua

SEQ ID NO: 258336 - RNA, 16 nt, Feline foamy virus
ugagacucuccagcuu

SEQ ID NO: 258337 - RNA, 15 nt, Feline foamy virus
ugagauugagacucu

SEQ ID NO: 258338 - RNA, 19 nt, Feline foamy virus
ugauauguauuuugcuuga

SEQ ID NO: 258339 - RNA, 21 nt, Feline foamy virus
ugaugucacgagaaaagaacc

SEQ ID NO: 258340 - RNA, 14 nt, Feline foamy virus
ugcguccaggguga

SEQ ID NO: 258341 - RNA, 20 nt, Feline foamy virus
ugcuugaauauuauuugccu

SEQ ID NO: 258342 - RNA, 17 nt, Feline foamy virus
uggaacucuuacaucac

SEQ ID NO: 258343 - RNA, 19 nt, Feline foamy virus
uggaaguagauuuugcaua

SEQ ID NO: 258344 - RNA, 16 nt, Feline foamy virus
uguaggagcuaaguca

SEQ ID NO: 258345 - RNA, 15 nt, Feline foamy virus
uguauucuuuaguca

SEQ ID NO: 258346 - RNA, 16 nt, Feline foamy virus
uguucaagacauauaa

SEQ ID NO: 258347 - RNA, 17 nt, Feline foamy virus
uguucaagacauauaaa

SEQ ID NO: 258348 - RNA, 22 nt, Feline foamy virus
uguucaagacauauaaagggug

SEQ ID NO: 258349 - RNA, 14 nt, Feline foamy virus
uuaaaaccauguau

SEQ ID NO: 258350 - RNA, 14 nt, Feline foamy virus
uuaaaggguugcuu

SEQ ID NO: 258351 - RNA, 18 nt, Feline foamy virus
uuacucucguucauguau

SEQ ID NO: 258352 - RNA, 14 nt, Feline foamy virus
uuagucaucuagau

SEQ ID NO: 258353 - RNA, 16 nt, Feline foamy virus
uuagucaucugaugau

SEQ ID NO: 258354 - RNA, 16 nt, Feline foamy virus
uuauuugccuugcuca

SEQ ID NO: 258355 - RNA, 15 nt, Feline foamy virus
uucaagacauauaaa

SEQ ID NO: 258356 - RNA, 13 nt, Feline foamy virus
uucuuuagucauc

SEQ ID NO: 258357 - RNA, 14 nt, Feline foamy virus
uuuagucaucuaga

SEQ ID NO: 258358 - RNA, 21 nt, Feline foamy virus
uuuaguugcauguuucugcua

SEQ ID NO: 258359 - RNA, 18 nt, Feline foamy virus
uuugcugccucugcuuca

SEQ ID NO: 258360 - RNA, 19 nt, Feline foamy virus
uuuggaacucuuacaucac

SEQ ID NO: 258361 - RNA, 21 nt, Fujinami sarcoma virus
aacuauauaagccauuguaac

SEQ ID NO: 258362 - RNA, 20 nt, Fujinami sarcoma virus
aagacaucucggaugucauu

SEQ ID NO: 258363 - RNA, 23 nt, Fujinami sarcoma virus
acaagacaucucggaugucauug

SEQ ID NO: 258364 - RNA, 22 nt, Fujinami sarcoma virus
acauaagacagucuaaaguccu

SEQ ID NO: 258365 - RNA, 19 nt, Fujinami sarcoma virus
accuuaugggcaaggcuaa

SEQ ID NO: 258366 - RNA, 15 nt, Fujinami sarcoma virus
aggaaaaacaagaca

SEQ ID NO: 258367 - RNA, 15 nt, Fujinami sarcoma virus
agucaucauugccac

SEQ ID NO: 258368 - RNA, 16 nt, Fujinami sarcoma virus
aucauuacauaagaca

SEQ ID NO: 258369 - RNA, 19 nt, Fujinami sarcoma virus
auguugccaguuagucauc

SEQ ID NO: 258370 - RNA, 11 nt, Fujinami sarcoma virus
caagacaucuc

SEQ ID NO: 258371 - RNA, 20 nt, Fujinami sarcoma virus
caaggcuaaagcugugcaua

SEQ ID NO: 258372 - RNA, 12 nt, Fujinami sarcoma virus
caggagugagua

SEQ ID NO: 258373 - RNA, 17 nt, Fujinami sarcoma virus
cauaacuauauaagcca

SEQ ID NO: 258374 - RNA, 17 nt, Fujinami sarcoma virus
cauaagacagucuaaag

SEQ ID NO: 258375 - RNA, 16 nt, Fujinami sarcoma virus
caucucggaugucauu

SEQ ID NO: 258376 - RNA, 14 nt, Fujinami sarcoma virus
cuaaaguccuaaaa

SEQ ID NO: 258377 - RNA, 14 nt, Fujinami sarcoma virus
cugaugucgugaua

SEQ ID NO: 258378 - RNA, 22 nt, Fujinami sarcoma virus
ggagauguugccaguuagucau

SEQ ID NO: 258379 - RNA, 22 nt, Fujinami sarcoma virus
ggcaaggcuaaagcugugcaua

SEQ ID NO: 258380 - RNA, 13 nt, Fujinami sarcoma virus
gguuagggguccc

SEQ ID NO: 258381 - RNA, 17 nt, Fujinami sarcoma virus
guaacccagaaggccau

SEQ ID NO: 258382 - RNA, 16 nt, Fujinami sarcoma virus
gucaucauugccacuu

SEQ ID NO: 258383 - RNA, 15 nt, Fujinami sarcoma virus
guccuaaaaaggaaa

SEQ ID NO: 258384 - RNA, 19 nt, Fujinami sarcoma virus
guguaacccagaaggccau

SEQ ID NO: 258385 - RNA, 22 nt, Fujinami sarcoma virus
guuguacgcgguuagggguccc

SEQ ID NO: 258386 - RNA, 22 nt, Fujinami sarcoma virus
uaaagcugugcauaacuauaua

SEQ ID NO: 258387 - RNA, 16 nt, Fujinami sarcoma virus
uaacccagaaggccau

SEQ ID NO: 258388 - RNA, 20 nt, Fujinami sarcoma virus
uaagacagucuaaaguccua

SEQ ID NO: 258389 - RNA, 21 nt, Fujinami sarcoma virus
uagucaucauuacauaagaca

SEQ ID NO: 258390 - RNA, 13 nt, Fujinami sarcoma virus
uauauaagccauu

SEQ ID NO: 258391 - RNA, 14 nt, Fujinami sarcoma virus
uaugggcaaggcua

SEQ ID NO: 258392 - RNA, 20 nt, Fujinami sarcoma virus
ucauuggcugcaaccaguaa

SEQ ID NO: 258393 - RNA, 18 nt, Fujinami sarcoma virus
uccuaaaaaggaaaaaca

SEQ ID NO: 258394 - RNA, 21 nt, Fujinami sarcoma virus
ugcaaccaguaaggaaguagu

SEQ ID NO: 258395 - RNA, 16 nt, Fujinami sarcoma virus
ugccacuuagucauca

SEQ ID NO: 258396 - RNA, 20 nt, Fujinami sarcoma virus
uggcagcugaugucgugaua

SEQ ID NO: 258397 - RNA, 17 nt, Fujinami sarcoma virus
uuagucaucauuacaua

SEQ ID NO: 258398 - RNA, 16 nt, Fujinami sarcoma virus
uucgcgauguacgggu

SEQ ID NO: 258399 - RNA, 23 nt, Fujinami sarcoma virus
uucgguuguacgcgguuaggggu

SEQ ID NO: 258400 - RNA, 14 nt, Fujinami sarcoma virus
aaccaguaaggaag

SEQ ID NO: 258401 - RNA, 16 nt, Fujinami sarcoma virus
aacccagaaggccauu

SEQ ID NO: 258402 - RNA, 15 nt, Fujinami sarcoma virus
aacuauauaagccau

SEQ ID NO: 258403 - RNA, 16 nt, Fujinami sarcoma virus
aacuauauaagccauu

SEQ ID NO: 258404 - RNA, 12 nt, Fujinami sarcoma virus
aaggaaguagug

SEQ ID NO: 258405 - RNA, 16 nt, Fujinami sarcoma virus
acagucuaaaguccua

SEQ ID NO: 258406 - RNA, 16 nt, Fujinami sarcoma virus
acccagaaggccauug

SEQ ID NO: 258407 - RNA, 17 nt, Fujinami sarcoma virus
agacaucucggauguca

SEQ ID NO: 258408 - RNA, 23 nt, Fujinami sarcoma virus
agccauuguaaccuucuaauaaa

SEQ ID NO: 258409 - RNA, 11 nt, Fujinami sarcoma virus
aggaaguagua

SEQ ID NO: 258410 - RNA, 20 nt, Fujinami sarcoma virus
agucaucauuacauaagaca

SEQ ID NO: 258411 - RNA, 19 nt, Fujinami sarcoma virus
agucuaaaguccuaaaaag

SEQ ID NO: 258412 - RNA, 16 nt, Fujinami sarcoma virus
auaacugaggggacca

SEQ ID NO: 258413 - RNA, 20 nt, Fujinami sarcoma virus
auugguggcagcugaugucg

SEQ ID NO: 258414 - RNA, 15 nt, Fujinami sarcoma virus
cacuuagucaucauu

SEQ ID NO: 258415 - RNA, 13 nt, Fujinami sarcoma virus
caggaaguaguaa

SEQ ID NO: 258416 - RNA, 22 nt, Fujinami sarcoma virus
caggagugaguaguauaacuga

SEQ ID NO: 258417 - RNA, 17 nt, Fujinami sarcoma virus
caucauuacauaagaca

SEQ ID NO: 258418 - RNA, 22 nt, Fujinami sarcoma virus
caucauuacauaagacagucua

SEQ ID NO: 258419 - RNA, 19 nt, Fujinami sarcoma virus
cauugccacuuagucauca

SEQ ID NO: 258420 - RNA, 17 nt, Fujinami sarcoma virus
ccaguaaggaaguagug

SEQ ID NO: 258421 - RNA, 22 nt, Fujinami sarcoma virus
ccuaaaaaggaaaaacaagaca

SEQ ID NO: 258422 - RNA, 21 nt, Fujinami sarcoma virus
cgggucaggagugaguaguau

SEQ ID NO: 258423 - RNA, 19 nt, Fujinami sarcoma virus
cuaaagcugugcauaacua

SEQ ID NO: 258424 - RNA, 18 nt, Fujinami sarcoma virus
cugcggaaauuugacuga

SEQ ID NO: 258425 - RNA, 18 nt, Fujinami sarcoma virus
cuuagucaucauuacaua

SEQ ID NO: 258426 - RNA, 15 nt, Fujinami sarcoma virus
gaaguaguggcguga

SEQ ID NO: 258427 - RNA, 15 nt, Fujinami sarcoma virus
gcaaccaguaaggaa

SEQ ID NO: 258428 - RNA, 22 nt, Fujinami sarcoma virus
gccauugguggcagcugauguc

SEQ ID NO: 258429 - RNA, 21 nt, Fujinami sarcoma virus
gccauuguaaccuucuaauaa

SEQ ID NO: 258430 - RNA, 15 nt, Fujinami sarcoma virus
gccgcggugcgcugc

SEQ ID NO: 258431 - RNA, 16 nt, Fujinami sarcoma virus
gcuguuucgcgaugua

SEQ ID NO: 258432 - RNA, 18 nt, Fujinami sarcoma virus
ggaaaaacaagacaucuc

SEQ ID NO: 258433 - RNA, 13 nt, Fujinami sarcoma virus
ggcaaggcuaaag

SEQ ID NO: 258434 - RNA, 14 nt, Fujinami sarcoma virus
ggcuuuugcgcugu

SEQ ID NO: 258435 - RNA, 18 nt, Fujinami sarcoma virus
ggggaccaugguauguau

SEQ ID NO: 258436 - RNA, 15 nt, Fujinami sarcoma virus
ggguccccucaggaa

SEQ ID NO: 258437 - RNA, 19 nt, Fujinami sarcoma virus
guacgcgguuagggguccc

SEQ ID NO: 258438 - RNA, 18 nt, Fujinami sarcoma virus
guauaacugaggggacca

SEQ ID NO: 258439 - RNA, 21 nt, Fujinami sarcoma virus
gugcauaacuauauaagccau

SEQ ID NO: 258440 - RNA, 22 nt, Fujinami sarcoma virus
gugcauaacuauauaagccauu

SEQ ID NO: 258441 - RNA, 20 nt, Fujinami sarcoma virus
uaaaaaggaaaaacaagaca

SEQ ID NO: 258442 - RNA, 16 nt, Fujinami sarcoma virus
uaacuauauaagccau

SEQ ID NO: 258443 - RNA, 18 nt, Fujinami sarcoma virus
uaagccauuguaaccuuc

SEQ ID NO: 258444 - RNA, 12 nt, Fujinami sarcoma virus
ucaggaaguagu

SEQ ID NO: 258445 - RNA, 13 nt, Fujinami sarcoma virus
ucaggaaguagua

SEQ ID NO: 258446 - RNA, 14 nt, Fujinami sarcoma virus
ucaggaaguaguaa

SEQ ID NO: 258447 - RNA, 13 nt, Fujinami sarcoma virus
ucaggagugagua

SEQ ID NO: 258448 - RNA, 21 nt, Fujinami sarcoma virus
ugaugucgugauaucaccuua

SEQ ID NO: 258449 - RNA, 19 nt, Fujinami sarcoma virus
ugcgcugcugcgaaauaaa

SEQ ID NO: 258450 - RNA, 24 nt, Fujinami sarcoma virus
ugggcaaggcuaaagcugugcaua

SEQ ID NO: 258451 - RNA, 16 nt, Fujinami sarcoma virus
uggguguaacccagaa

SEQ ID NO: 258452 - RNA, 19 nt, Fujinami sarcoma virus
uguugccaguuagucauca

SEQ ID NO: 258453 - RNA, 14 nt, Hepatitis A virus
aaauuucugagguu

SEQ ID NO: 258454 - RNA, 16 nt, Hepatitis A virus
aauuucugagguuugu

SEQ ID NO: 258455 - RNA, 14 nt, Hepatitis A virus
acaaauuuucuuaa

SEQ ID NO: 258456 - RNA, 20 nt, Hepatitis A virus
auuucugagguuuguuuauu

SEQ ID NO: 258457 - RNA, 21 nt, Hepatitis A virus
caaauuuucuuaaaauuucug

SEQ ID NO: 258458 - RNA, 17 nt, Hepatitis A virus
cuuaaaauuucugaggu

SEQ ID NO: 258459 - RNA, 20 nt, Hepatitis A virus
guuuaaacaaauuuucuuaa

SEQ ID NO: 258460 - RNA, 20 nt, Hepatitis A virus
uaaaauuucugagguuuguu

SEQ ID NO: 258461 - RNA, 14 nt, Hepatitis A virus
uauuucuuuuauca

SEQ ID NO: 258462 - RNA, 14 nt, Hepatitis A virus
ucuuuuaucaguaa

SEQ ID NO: 258463 - RNA, 19 nt, Hepatitis A virus
uuucugagguuuguuuauu

SEQ ID NO: 258464 - RNA, 15 nt, Hepatitis A virus
acaaauuuucuuaaa

SEQ ID NO: 258465 - RNA, 21 nt, Hepatitis A virus
agguuuguuuauuucuuuuau

SEQ ID NO: 258466 - RNA, 21 nt, Hepatitis A virus
auuucugagguuuguuuauuu

SEQ ID NO: 258467 - RNA, 13 nt, Hepatitis A virus
auuucuuuuauca

SEQ ID NO: 258468 - RNA, 14 nt, Hepatitis A virus
caaauuuucuuaaa

SEQ ID NO: 258469 - RNA, 15 nt, Hepatitis A virus
caaauuuucuuaaaa

SEQ ID NO: 258470 - RNA, 17 nt, Hepatitis A virus
ucugagguuuguuuauu

SEQ ID NO: 258471 - RNA, 19 nt, Hepatitis A virus
ucuuaaaauuucugagguu

SEQ ID NO: 258472 - RNA, 18 nt, Hepatitis A virus
uuaaacaaauuuucuuaa

SEQ ID NO: 258473 - RNA, 15 nt, Hepatitis A virus
uuucuuaaaauuucu

SEQ ID NO: 258474 - RNA, 20 nt, Hepatitis B virus
aaaacuaggcauuauuuaca

SEQ ID NO: 258475 - RNA, 14 nt, Hepatitis B virus
aaaaggagauuaaa

SEQ ID NO: 258476 - RNA, 19 nt, Hepatitis B virus
aaaccaaacguuggggcua

SEQ ID NO: 258477 - RNA, 16 nt, Hepatitis B virus
aaauuagacaacuauu

SEQ ID NO: 258478 - RNA, 17 nt, Hepatitis B virus
aacauuguucaccucac

SEQ ID NO: 258479 - RNA, 16 nt, Hepatitis B virus
aaguaauuuggaagac

SEQ ID NO: 258480 - RNA, 17 nt, Hepatitis B virus
aauauuugcccuuggac

SEQ ID NO: 258481 - RNA, 20 nt, Hepatitis B virus
aauuaguagucagcuauguc

SEQ ID NO: 258482 - RNA, 14 nt, Hepatitis B virus
acaaaggcauuaaa

SEQ ID NO: 258483 - RNA, 13 nt, Hepatitis B virus
acaaggccuuucu

SEQ ID NO: 258484 - RNA, 19 nt, Hepatitis B virus
acaccgccucugcucugua

SEQ ID NO: 258485 - RNA, 13 nt, Hepatitis B virus
acauucauuuaca

SEQ ID NO: 258486 - RNA, 20 nt, Hepatitis B virus
aaacuaggcauuauuuacau

SEQ ID NO: 258487 - RNA, 20 nt, Hepatitis B virus
aaacuuuacugggcuuuauu

SEQ ID NO: 258488 - RNA, 16 nt, Hepatitis B virus
aacuuacaaggccuuu

SEQ ID NO: 258489 - RNA, 21 nt, Hepatitis B virus
aacuuuacugggcuuuauucu

SEQ ID NO: 258490 - RNA, 14 nt, Hepatitis B virus
aaggcuggcauucu

SEQ ID NO: 258491 - RNA, 15 nt, Hepatitis B virus
aaguugggguacuuu

SEQ ID NO: 258492 - RNA, 19 nt, Hepatitis B virus
aauaugugggcccucugac

SEQ ID NO: 258493 - RNA, 20 nt, Hepatitis B virus
accucaccauacagcacuca

SEQ ID NO: 258494 - RNA, 14 nt, Hepatitis B virus
acuaggcauuauuu

SEQ ID NO: 258495 - RNA, 16 nt, Hepatitis B virus
acuguaccugucuuua

SEQ ID NO: 258496 - RNA, 18 nt, Hepatitis B virus
acuucaugggauauguaa

SEQ ID NO: 258497 - RNA, 16 nt, Hepatitis B virus
acuuuacugggcuuua

SEQ ID NO: 258498 - RNA, 13 nt, Hepatitis B virus
acuuuuggaagag

SEQ ID NO: 258499 - RNA, 18 nt, Hepatitis B virus
agcaggcuuucacuuucu

SEQ ID NO: 258500 - RNA, 16 nt, Hepatitis B virus
aggcauuaaaccguau

SEQ ID NO: 258501 - RNA, 23 nt, Hepatitis B virus
auauuguacaaaaacucaagcaa

SEQ ID NO: 258502 - RNA, 15 nt, Hepatitis B virus
augcauguauacaau

SEQ ID NO: 258503 - RNA, 23 nt, Hepatitis B virus
auguuuucgaaaauugccuguaa

SEQ ID NO: 258504 - RNA, 14 nt, Hepatitis B virus
auugugguuucaca

SEQ ID NO: 258505 - RNA, 15 nt, Hepatitis B virus
caaaaacucaagcaa

SEQ ID NO: 258506 - RNA, 15 nt, Hepatitis B virus
caaaacuaggcauua

SEQ ID NO: 258507 - RNA, 21 nt, Hepatitis B virus
caaaacuaggcauuauuuaca

SEQ ID NO: 258508 - RNA, 20 nt, Hepatitis B virus
caacuuacaaggccuuucug

SEQ ID NO: 258509 - RNA, 15 nt, Hepatitis B virus
cacauucauuuacag

SEQ ID NO: 258510 - RNA, 17 nt, Hepatitis B virus
cacucaggcaagcuauu

SEQ ID NO: 258511 - RNA, 18 nt, Hepatitis B virus
cagcuaugucaauguuaa

SEQ ID NO: 258512 - RNA, 16 nt, Hepatitis B virus
cauguccuacuguuca

SEQ ID NO: 258513 - RNA, 15 nt, Hepatitis B virus
ccagcauccagggaa

SEQ ID NO: 258514 - RNA, 17 nt, Hepatitis B virus
ccggaacauuguucacc

SEQ ID NO: 258515 - RNA, 12 nt, Hepatitis B virus
ccuacuguucaa

SEQ ID NO: 258516 - RNA, 18 nt, Hepatitis B virus
ccucacauucauuuacag

SEQ ID NO: 258517 - RNA, 18 nt, Hepatitis B virus
ccugucuuuaauccugau

SEQ ID NO: 258518 - RNA, 17 nt, Hepatitis B virus
ccuuuccucacauucau

SEQ ID NO: 258519 - RNA, 21 nt, Hepatitis B virus
cgcaggaacauauuguacaaa

SEQ ID NO: 258520 - RNA, 13 nt, Hepatitis B virus
cguauuauccuga

SEQ ID NO: 258521 - RNA, 14 nt, Hepatitis B virus
cguauuauccugaa

SEQ ID NO: 258522 - RNA, 13 nt, Hepatitis B virus
cuaaaccuuuacc

SEQ ID NO: 258523 - RNA, 17 nt, Hepatitis B virus
cuaggcauuauuuacau

SEQ ID NO: 258524 - RNA, 19 nt, Hepatitis B virus
cugccccuuuuacacaaug

SEQ ID NO: 258525 - RNA, 12 nt, Hepatitis B virus
cugggcuuuauu

SEQ ID NO: 258526 - RNA, 22 nt, Hepatitis B virus
cuguggaaggcuggcauucuau

SEQ ID NO: 258527 - RNA, 22 nt, Hepatitis B virus
cuuaacuucaugggauauguaa

SEQ ID NO: 258528 - RNA, 21 nt, Hepatitis B virus
cuucuacuguaccugucuuua

SEQ ID NO: 258529 - RNA, 16 nt, Hepatitis B virus
cuucuguggaguuacu

SEQ ID NO: 258530 - RNA, 17 nt, Hepatitis B virus
cuuggacaaaggcauua

SEQ ID NO: 258531 - RNA, 20 nt, Hepatitis B virus
cuuggacaaaggcauuaaac

SEQ ID NO: 258532 - RNA, 20 nt, Hepatitis B virus
gaaacuuuacugggcuuuau

SEQ ID NO: 258533 - RNA, 17 nt, Hepatitis B virus
gaaggcuggcauucuau

SEQ ID NO: 258534 - RNA, 14 nt, Hepatitis B virus
gaauaugcaguuaa

SEQ ID NO: 258535 - RNA, 14 nt, Hepatitis B virus
gaauugugggucuu

SEQ ID NO: 258536 - RNA, 14 nt, Hepatitis B virus
gacaacuauugugg

SEQ ID NO: 258537 - RNA, 17 nt, Hepatitis B virus
gacccguauaaagaauu

SEQ ID NO: 258538 - RNA, 13 nt, Hepatitis B virus
gaggacauuauua

SEQ ID NO: 258539 - RNA, 17 nt, Hepatitis B virus
gcaguuaaucauuacuu

SEQ ID NO: 258540 - RNA, 18 nt, Hepatitis B virus
gccuuacuuuuggaagag

SEQ ID NO: 258541 - RNA, 16 nt, Hepatitis B virus
gccuuuauaugcaugu

SEQ ID NO: 258542 - RNA, 20 nt, Hepatitis B virus
gccuuucuguguaaacaaua

SEQ ID NO: 258543 - RNA, 21 nt, Hepatitis B virus
gcucuguaucgggaggccuua

SEQ ID NO: 258544 - RNA, 15 nt, Hepatitis B virus
gcugccccuuuuaca

SEQ ID NO: 258545 - RNA, 19 nt, Hepatitis B virus
gcugccccuuuuacacaau

SEQ ID NO: 258546 - RNA, 13 nt, Hepatitis B virus
gcuggcauucuau

SEQ ID NO: 258547 - RNA, 19 nt, Hepatitis B virus
ggaaggcuggcauucuaua

SEQ ID NO: 258548 - RNA, 13 nt, Hepatitis B virus
ggaaguaauuugg

SEQ ID NO: 258549 - RNA, 19 nt, Hepatitis B virus
ggaauuaguagucagcuau

SEQ ID NO: 258550 - RNA, 14 nt, Hepatitis B virus
ggacauuauuaaua

SEQ ID NO: 258551 - RNA, 17 nt, Hepatitis B virus
guauacaaucuaagcag

SEQ ID NO: 258552 - RNA, 12 nt, Hepatitis B virus
gucaauguuaau

SEQ ID NO: 258553 - RNA, 13 nt, Hepatitis B virus
guccuacuguuca

SEQ ID NO: 258554 - RNA, 19 nt, Hepatitis B virus
gucuccggaacauuguuca

SEQ ID NO: 258555 - RNA, 18 nt, Hepatitis B virus
guuacucucuuuuuugcc

SEQ ID NO: 258556 - RNA, 18 nt, Hepatitis B virus
uaauuuggaagacccagc

SEQ ID NO: 258557 - RNA, 17 nt, Hepatitis B virus
uaccgcaggaacauauu

SEQ ID NO: 258558 - RNA, 16 nt, Hepatitis B virus
uaucgggaggccuuag

SEQ ID NO: 258559 - RNA, 17 nt, Hepatitis B virus
uaucgggaggccuuaga

SEQ ID NO: 258560 - RNA, 21 nt, Hepatitis B virus
uauugauuggaaaguauguca

SEQ ID NO: 258561 - RNA, 14 nt, Hepatitis B virus
ucacauuuccugcc

SEQ ID NO: 258562 - RNA, 17 nt, Hepatitis B virus
ucacauuuccugccuua

SEQ ID NO: 258563 - RNA, 16 nt, Hepatitis B virus
uccaagcugugccuug

SEQ ID NO: 258564 - RNA, 15 nt, Hepatitis B virus
uccugaauaugcagu

SEQ ID NO: 258565 - RNA, 22 nt, Hepatitis B virus
ucuguggaaggcuggcauucua

SEQ ID NO: 258566 - RNA, 21 nt, Hepatitis B virus
ugaauaugcaguuaaucauua

SEQ ID NO: 258567 - RNA, 22 nt, Hepatitis B virus
ugcccuuggacaaaggcauuaa

SEQ ID NO: 258568 - RNA, 14 nt, Hepatitis B virus
uggaaaguauguca

SEQ ID NO: 258569 - RNA, 19 nt, Hepatitis B virus
ugggcccucugacaguuaa

SEQ ID NO: 258570 - RNA, 21 nt, Hepatitis B virus
uguaccugucuuuaauccuga

SEQ ID NO: 258571 - RNA, 17 nt, Hepatitis B virus
uguaucgggaggccuua

SEQ ID NO: 258572 - RNA, 18 nt, Hepatitis B virus
uguaucgggaggccuuag

SEQ ID NO: 258573 - RNA, 14 nt, Hepatitis B virus
uuaauagaugucaa

SEQ ID NO: 258574 - RNA, 22 nt, Hepatitis B virus
uuacugggcuuuauucuucuac

SEQ ID NO: 258575 - RNA, 20 nt, Hepatitis B virus
uucaaaacuaggcauuauuu

SEQ ID NO: 258576 - RNA, 17 nt, Hepatitis B virus
uucacauuuccugccuu

SEQ ID NO: 258577 - RNA, 17 nt, Hepatitis B virus
uucugacuucuuuccuu

SEQ ID NO: 258578 - RNA, 13 nt, Hepatitis B virus
uuggagcuucugu

SEQ ID NO: 258579 - RNA, 14 nt, Hepatitis B virus
uuuacauacucugu

SEQ ID NO: 258580 - RNA, 12 nt, Hepatitis B virus
uuuccugccuua

SEQ ID NO: 258581 - RNA, 13 nt, Hepatitis B virus
uuuccugccuuac

SEQ ID NO: 258582 - RNA, 16 nt, Hepatitis B virus
acauuuccugccuuac

SEQ ID NO: 258583 - RNA, 17 nt, Hepatitis B virus
accccguugcccggcaa

SEQ ID NO: 258584 - RNA, 20 nt, Hepatitis B virus
acuguucaagccuccaagcu

SEQ ID NO: 258585 - RNA, 16 nt, Hepatitis B virus
acuucaaaacuaggca

SEQ ID NO: 258586 - RNA, 13 nt, Hepatitis B virus
acuuuacugggcu

SEQ ID NO: 258587 - RNA, 14 nt, Hepatitis B virus
agacccagcaucca

SEQ ID NO: 258588 - RNA, 14 nt, Hepatitis B virus
agaucuccucgaca

SEQ ID NO: 258589 - RNA, 20 nt, Hepatitis B virus
agccuccaagcugugccuug

SEQ ID NO: 258590 - RNA, 14 nt, Hepatitis B virus
aguagucagcuaug

SEQ ID NO: 258591 - RNA, 18 nt, Hepatitis B virus
auaaggugggaaacuuua

SEQ ID NO: 258592 - RNA, 14 nt, Hepatitis B virus
auacaaucuaagca

SEQ ID NO: 258593 - RNA, 18 nt, Hepatitis B virus
auaugcauguauacaauc

SEQ ID NO: 258594 - RNA, 21 nt, Hepatitis B virus
auauuguacaaaaacucaagc

SEQ ID NO: 258595 - RNA, 23 nt, Hepatitis B virus
aucuaagcaggcuuucacuuucu

SEQ ID NO: 258596 - RNA, 14 nt, Hepatitis B virus
auguauacaaucua

SEQ ID NO: 258597 - RNA, 17 nt, Hepatitis B virus
auguauacaaucuaagc

SEQ ID NO: 258598 - RNA, 18 nt, Hepatitis B virus
auuaaaccguauuauccu

SEQ ID NO: 258599 - RNA, 20 nt, Hepatitis B virus
auuguacaaaaacucaagca

SEQ ID NO: 258600 - RNA, 14 nt, Hepatitis B virus
caaaaacucaagca

SEQ ID NO: 258601 - RNA, 17 nt, Hepatitis B virus
caaaacuaggcauuauu

SEQ ID NO: 258602 - RNA, 16 nt, Hepatitis B virus
caaauauuugcccuug

SEQ ID NO: 258603 - RNA, 21 nt, Hepatitis B virus
caacaauaugugggcccucug

SEQ ID NO: 258604 - RNA, 14 nt, Hepatitis B virus
cacauucauuuaca

SEQ ID NO: 258605 - RNA, 14 nt, Hepatitis B virus
caccauauucuugg

SEQ ID NO: 258606 - RNA, 14 nt, Hepatitis B virus
cacuuucucgccaa

SEQ ID NO: 258607 - RNA, 19 nt, Hepatitis B virus
caucucauguucauguccu

SEQ ID NO: 258608 - RNA, 12 nt, Hepatitis B virus
cauuacuucaaa

SEQ ID NO: 258609 - RNA, 20 nt, Hepatitis B virus
ccuucuauucgagaucuccu

SEQ ID NO: 258610 - RNA, 19 nt, Hepatitis B virus
cuacucccuuaacuucaug

SEQ ID NO: 258611 - RNA, 21 nt, Hepatitis B virus
cuagguucuauccuaaccuua

SEQ ID NO: 258612 - RNA, 18 nt, Hepatitis B virus
cuauccuaaccuuaccaa

SEQ ID NO: 258613 - RNA, 14 nt, Hepatitis B virus
cucacauucauuua

SEQ ID NO: 258614 - RNA, 18 nt, Hepatitis B virus
cucaccauacagcacuca

SEQ ID NO: 258615 - RNA, 23 nt, Hepatitis B virus
cucaccauacagcacucaggcaa

SEQ ID NO: 258616 - RNA, 19 nt, Hepatitis B virus
cuccggaacauuguucacc

SEQ ID NO: 258617 - RNA, 20 nt, Hepatitis B virus
cucucuuuuuugccuucuga

SEQ ID NO: 258618 - RNA, 18 nt, Hepatitis B virus
cugaauaugcaguuaauc

SEQ ID NO: 258619 - RNA, 22 nt, Hepatitis B virus
cugaauaugcaguuaaucauua

SEQ ID NO: 258620 - RNA, 16 nt, Hepatitis B virus
cugucuuuaauccuga

SEQ ID NO: 258621 - RNA, 16 nt, Hepatitis B virus
cuucuacuguaccugu

SEQ ID NO: 258622 - RNA, 21 nt, Hepatitis B virus
cuuuacugggcuuuauucuuc

SEQ ID NO: 258623 - RNA, 16 nt, Hepatitis B virus
gaaaaaaggagauuaa

SEQ ID NO: 258624 - RNA, 22 nt, Hepatitis B virus
gccuuucuguguaaacaauauc

SEQ ID NO: 258625 - RNA, 22 nt, Hepatitis B virus
gcucuguaucgggaggccuuag

SEQ ID NO: 258626 - RNA, 15 nt, Hepatitis B virus
gcuuuauucuucuac

SEQ ID NO: 258627 - RNA, 18 nt, Hepatitis B virus
ggaaaguaugucaaagaa

SEQ ID NO: 258628 - RNA, 17 nt, Hepatitis B virus
ggagauuaaaauuaauu

SEQ ID NO: 258629 - RNA, 14 nt, Hepatitis B virus
ggaggacauuauua

SEQ ID NO: 258630 - RNA, 23 nt, Hepatitis B virus
ggccaccugggugggaaguaauu

SEQ ID NO: 258631 - RNA, 14 nt, Hepatitis B virus
guaauuuggaagac

SEQ ID NO: 258632 - RNA, 20 nt, Hepatitis B virus
guacaaaaacucaagcaaug

SEQ ID NO: 258633 - RNA, 21 nt, Hepatitis B virus
guacaaaaacucaagcaaugu

SEQ ID NO: 258634 - RNA, 15 nt, Hepatitis B virus
guccuacuguucaag

SEQ ID NO: 258635 - RNA, 15 nt, Hepatitis B virus
guuaauaugggccua

SEQ ID NO: 258636 - RNA, 17 nt, Hepatitis B virus
guuucacauuuccugcc

SEQ ID NO: 258637 - RNA, 17 nt, Hepatitis B virus
uaaaauuaauuaugccu

SEQ ID NO: 258638 - RNA, 18 nt, Hepatitis B virus
uaauagaugucaacaaua

SEQ ID NO: 258639 - RNA, 13 nt, Hepatitis B virus
uaauuaugccugc

SEQ ID NO: 258640 - RNA, 21 nt, Hepatitis B virus
uacagcacucaggcaagcuau

SEQ ID NO: 258641 - RNA, 13 nt, Hepatitis B virus
uaccugucuuuaa

SEQ ID NO: 258642 - RNA, 22 nt, Hepatitis B virus
uacuuuaccgcaggaacauauu

SEQ ID NO: 258643 - RNA, 14 nt, Hepatitis B virus
uaguagucagcuau

SEQ ID NO: 258644 - RNA, 19 nt, Hepatitis B virus
uaugccugcuagguucuau

SEQ ID NO: 258645 - RNA, 22 nt, Hepatitis B virus
uauucuucuacuguaccugucu

SEQ ID NO: 258646 - RNA, 17 nt, Hepatitis B virus
ucaaaacuaggcauuau

SEQ ID NO: 258647 - RNA, 18 nt, Hepatitis B virus
ucaaaacuaggcauuauu

SEQ ID NO: 258648 - RNA, 14 nt, Hepatitis B virus
ucagcuaugucaau

SEQ ID NO: 258649 - RNA, 21 nt, Hepatitis B virus
ucauguccuacuguucaagcc

SEQ ID NO: 258650 - RNA, 14 nt, Hepatitis B virus
uccuacuguucaag

SEQ ID NO: 258651 - RNA, 15 nt, Hepatitis B virus
ucgccaacuuacaag

SEQ ID NO: 258652 - RNA, 15 nt, Hepatitis B virus
ucuauccuaaccuua

SEQ ID NO: 258653 - RNA, 16 nt, Hepatitis B virus
ucucuuuuuugccuuc

SEQ ID NO: 258654 - RNA, 16 nt, Hepatitis B virus
ucuuuuuugccuucug

SEQ ID NO: 258655 - RNA, 18 nt, Hepatitis B virus
ugaugccuuuauaugcau

SEQ ID NO: 258656 - RNA, 17 nt, Hepatitis B virus
ugccuugaugccuuuau

SEQ ID NO: 258657 - RNA, 15 nt, Hepatitis B virus
uggacaaaggcauua

SEQ ID NO: 258658 - RNA, 13 nt, Hepatitis B virus
uguaaacaauauc

SEQ ID NO: 258659 - RNA, 21 nt, Hepatitis B virus
uguggaaggcuggcauucuau

SEQ ID NO: 258660 - RNA, 14 nt, Hepatitis B virus
uuaaaccguauuau

SEQ ID NO: 258661 - RNA, 16 nt, Hepatitis B virus
uuaaucauuacuucaa

SEQ ID NO: 258662 - RNA, 17 nt, Hepatitis B virus
uuaccgcaggaacauau

SEQ ID NO: 258663 - RNA, 19 nt, Hepatitis B virus
uuauaugcauguauacaau

SEQ ID NO: 258664 - RNA, 17 nt, Hepatitis B virus
uucaaaacuaggcauua

SEQ ID NO: 258665 - RNA, 12 nt, Hepatitis B virus
uucaagccucca

SEQ ID NO: 258666 - RNA, 23 nt, Hepatitis B virus
uucaagccuccaagcugugccuu

SEQ ID NO: 258667 - RNA, 23 nt, Hepatitis B virus
uucaccucaccauacagcacuca

SEQ ID NO: 258668 - RNA, 16 nt, Hepatitis B virus
uucuguguaaacaaua

SEQ ID NO: 258669 - RNA, 18 nt, Hepatitis B virus
uuggaagacccagcaucc

SEQ ID NO: 258670 - RNA, 17 nt, Hepatitis B virus
uuggacaaaggcauuaa

SEQ ID NO: 258671 - RNA, 20 nt, Hepatitis B virus
uuuacugggcuuuauucuuc

SEQ ID NO: 258672 - RNA, 20 nt, Hepatitis B virus
uuucacauuuccugccuuac

SEQ ID NO: 258673 - RNA, 23 nt, Hepatitis B virus
uuugugggucaccauauucuugg

SEQ ID NO: 258674 - RNA, 13 nt, Hepatitis B virus
uuuuuugccuucu

SEQ ID NO: 258675 - RNA, 16 nt, Hepatitis C virus
accaugucaccaauga

SEQ ID NO: 258676 - RNA, 18 nt, Hepatitis C virus
aggguaacgccucgaggu

SEQ ID NO: 258677 - RNA, 19 nt, Hepatitis C virus
auccugcacacuccggggu

SEQ ID NO: 258678 - RNA, 12 nt, Hepatitis C virus
auuccucggggc

SEQ ID NO: 258679 - RNA, 19 nt, Hepatitis C virus
auuccucggggcuuuacca

SEQ ID NO: 258680 - RNA, 17 nt, Hepatitis C virus
ccgaugccauccugcac

SEQ ID NO: 258681 - RNA, 17 nt, Hepatitis C virus
cgucauaucgaucugcu

SEQ ID NO: 258682 - RNA, 20 nt, Hepatitis C virus
gacugugcccgcuucagccu

SEQ ID NO: 258683 - RNA, 15 nt, Hepatitis C virus
gcgccacccucugcu

SEQ ID NO: 258684 - RNA, 19 nt, Hepatitis C virus
guuggucaacuguuuaccu

SEQ ID NO: 258685 - RNA, 18 nt, Hepatitis C virus
ucaccaaugauugcccua

SEQ ID NO: 258686 - RNA, 16 nt, Hepatitis C virus
ucagccuaccaagugc

SEQ ID NO: 258687 - RNA, 17 nt, Hepatitis C virus
uccuuccuucuuuaaug

SEQ ID NO: 258688 - RNA, 14 nt, Hepatitis C virus
uccuucuggcccug

SEQ ID NO: 258689 - RNA, 21 nt, Hepatitis C virus
ucuggcccugcucucuugccu

SEQ ID NO: 258690 - RNA, 13 nt, Hepatitis C virus
uugccugacugug

SEQ ID NO: 258691 - RNA, 13 nt, Hepatitis C virus
acgccucgaggug

SEQ ID NO: 258692 - RNA, 13 nt, Hepatitis C virus
auaucgaucugcu

SEQ ID NO: 258693 - RNA, 19 nt, Hepatitis C virus
augccauccugcacacucc

SEQ ID NO: 258694 - RNA, 17 nt, Hepatitis C virus
cagggacggcaaacucc

SEQ ID NO: 258695 - RNA, 22 nt, Hepatitis C virus
ccagggacggcaaacuccccac

SEQ ID NO: 258696 - RNA, 15 nt, Hepatitis C virus
cgaugccauccugca

SEQ ID NO: 258697 - RNA, 19 nt, Hepatitis C virus
cugcucggcccucuacgug

SEQ ID NO: 258698 - RNA, 14 nt, Hepatitis C virus
gcaauuccucgggg

SEQ ID NO: 258699 - RNA, 17 nt, Hepatitis C virus
uacgugggggaccugug

SEQ ID NO: 258700 - RNA, 16 nt, Hepatitis C virus
ucaacuguuuaccuuc

SEQ ID NO: 258701 - RNA, 23 nt, Hepatitis C virus
ugguugcucuuucucuaucuucc

SEQ ID NO: 258702 - RNA, 13 nt, Hepatitis D virus
acguccacucgga

SEQ ID NO: 258703 - RNA, 19 nt, Hepatitis D virus
cagcgaggaggcugggacc

SEQ ID NO: 258704 - RNA, 15 nt, Hepatitis D virus
cucuccccagaguug

SEQ ID NO: 258705 - RNA, 22 nt, Hepatitis D virus
ucgcagguuugcgucucgcguc

SEQ ID NO: 258706 - RNA, 12 nt, Hepatitis D virus
uucucucgcuuc

SEQ ID NO: 258707 - RNA, 19 nt, Hepatitis D virus
acgcggacccugcagagug

SEQ ID NO: 258708 - RNA, 14 nt, Hepatitis D virus
acgguccccucgga

SEQ ID NO: 258709 - RNA, 16 nt, Hepatitis D virus
ccucuccccagaguug

SEQ ID NO: 258710 - RNA, 14 nt, Hepatitis D virus
cuucucucugggaa

SEQ ID NO: 258711 - RNA, 18 nt, Hepatitis D virus
uuuccacucgcagguuug

SEQ ID NO: 258712 - RNA, 12 nt, Hepatitis E virus
aggacggcacca

SEQ ID NO: 258713 - RNA, 21 nt, Hepatitis E virus
auguugacucccgcggcgcca

SEQ ID NO: 258714 - RNA, 15 nt, Hepatitis E virus
auuaugcccaguacc

SEQ ID NO: 258715 - RNA, 13 nt, Hepatitis E virus
auuucucauuucu

SEQ ID NO: 258716 - RNA, 18 nt, Hepatitis E virus
caugaauucaauaaccuc

SEQ ID NO: 258717 - RNA, 18 nt, Hepatitis E virus
caugucuucugcugcgcc

SEQ ID NO: 258718 - RNA, 22 nt, Hepatitis E virus
cauguuucugccuaugcugccc

SEQ ID NO: 258719 - RNA, 22 nt, Hepatitis E virus
cccccgaugucaccgcugcggc

SEQ ID NO: 258720 - RNA, 19 nt, Hepatitis E virus
cccuucuuucuguugcuua

SEQ ID NO: 258721 - RNA, 15 nt, Hepatitis E virus
ccgcccgcugguccc

SEQ ID NO: 258722 - RNA, 17 nt, Hepatitis E virus
ccuucuuucuguugcuu

SEQ ID NO: 258723 - RNA, 14 nt, Hepatitis E virus
cgcgcucccugaaa

SEQ ID NO: 258724 - RNA, 17 nt, Hepatitis E virus
cguuccgcgcucccuga

SEQ ID NO: 258725 - RNA, 19 nt, Hepatitis E virus
cguuccgcgcucccugaaa

SEQ ID NO: 258726 - RNA, 16 nt, Hepatitis E virus
cuuucuguugcuuauu

SEQ ID NO: 258727 - RNA, 22 nt, Hepatitis E virus
gaccgggcugauucucagcccu

SEQ ID NO: 258728 - RNA, 23 nt, Hepatitis E virus
gcaguauaaccuaucaacaucuc

SEQ ID NO: 258729 - RNA, 17 nt, Hepatitis E virus
gcccaugacaccccgcc

SEQ ID NO: 258730 - RNA, 16 nt, Hepatitis E virus
uaauuaugcccaguac

SEQ ID NO: 258731 - RNA, 21 nt, Hepatitis E virus
uauaaccuaucaacaucuccc

SEQ ID NO: 258732 - RNA, 14 nt, Hepatitis E virus
uccguugacaugaa

SEQ ID NO: 258733 - RNA, 21 nt, Hepatitis E virus
ucugcguuccgcgcucccuga

SEQ ID NO: 258734 - RNA, 12 nt, Hepatitis E virus
ucuguugcuuau

SEQ ID NO: 258735 - RNA, 22 nt, Hepatitis E virus
ucuuucuguugcuuauuucuca

SEQ ID NO: 258736 - RNA, 17 nt, Hepatitis E virus
ugccccccuucuuucug

SEQ ID NO: 258737 - RNA, 16 nt, Hepatitis E virus
uggccaccgguacaaa

SEQ ID NO: 258738 - RNA, 16 nt, Hepatitis E virus
ugguggcuacgccauc

SEQ ID NO: 258739 - RNA, 17 nt, Hepatitis E virus
uuccgcgcucccugaaa

SEQ ID NO: 258740 - RNA, 18 nt, Hepatitis E virus
uuccgcgcucccugaaaa

SEQ ID NO: 258741 - RNA, 23 nt, Hepatitis E virus
uucugcguuccgcgcucccugaa

SEQ ID NO: 258742 - RNA, 21 nt, Hepatitis E virus
uugcuugugccccccuucuuu

SEQ ID NO: 258743 - RNA, 13 nt, Hepatitis E virus
aaccucgacugau

SEQ ID NO: 258744 - RNA, 15 nt, Hepatitis E virus
aaccucgacugaugu

SEQ ID NO: 258745 - RNA, 22 nt, Hepatitis E virus
acaccccgccagugccugaugu

SEQ ID NO: 258746 - RNA, 17 nt, Hepatitis E virus
aggacggcaccaauacu

SEQ ID NO: 258747 - RNA, 12 nt, Hepatitis E virus
caguauaaccua

SEQ ID NO: 258748 - RNA, 19 nt, Hepatitis E virus
ccacucggcuccgcuuggc

SEQ ID NO: 258749 - RNA, 20 nt, Hepatitis E virus
cccccuucuuucuguugcuu

SEQ ID NO: 258750 - RNA, 19 nt, Hepatitis E virus
ccccgaugucaccgcugcg

SEQ ID NO: 258751 - RNA, 13 nt, Hepatitis E virus
ccccgccgcugcc

SEQ ID NO: 258752 - RNA, 16 nt, Hepatitis E virus
ccuucuuucuguugcu

SEQ ID NO: 258753 - RNA, 12 nt, Hepatitis E virus
cgccaacccgcc

SEQ ID NO: 258754 - RNA, 16 nt, Hepatitis E virus
cggucgcuccggccca

SEQ ID NO: 258755 - RNA, 19 nt, Hepatitis E virus
cuccaucucguucuggcca

SEQ ID NO: 258756 - RNA, 20 nt, Hepatitis E virus
cugcguuccgcgcucccuga

SEQ ID NO: 258757 - RNA, 17 nt, Hepatitis E virus
cuguugcuuauuucuca

SEQ ID NO: 258758 - RNA, 15 nt, Hepatitis E virus
cuucugcugcgccca

SEQ ID NO: 258759 - RNA, 15 nt, Hepatitis E virus
cuuucuguugcuuau

SEQ ID NO: 258760 - RNA, 18 nt, Hepatitis E virus
gcccagcgccccgccgcu

SEQ ID NO: 258761 - RNA, 19 nt, Hepatitis E virus
gcguuccgcgcucccugaa

SEQ ID NO: 258762 - RNA, 14 nt, Hepatitis E virus
uaccccuccaggac

SEQ ID NO: 258763 - RNA, 17 nt, Hepatitis E virus
ucucauuucugcguucc

SEQ ID NO: 258764 - RNA, 17 nt, Hepatitis E virus
ucuuagcccgcuucuac

SEQ ID NO: 258765 - RNA, 19 nt, Hepatitis E virus
ugcguuccgcgcucccuga

SEQ ID NO: 258766 - RNA, 18 nt, Hepatitis E virus
ugcuuauuucucauuucu

SEQ ID NO: 258767 - RNA, 19 nt, Hepatitis E virus
uggcuacagaagcuucuaa

SEQ ID NO: 258768 - RNA, 15 nt, Hepatitis E virus
uggcuacgccaucuc

SEQ ID NO: 258769 - RNA, 17 nt, Hepatitis E virus
uggcuacgccaucucca

SEQ ID NO: 258770 - RNA, 14 nt, Hepatitis E virus
uucuguugcuuauu

SEQ ID NO: 258771 - RNA, 16 nt, Hepatitis E virus
uuguucgugcuacaau

SEQ ID NO: 258772 - RNA, 15 nt, Hepatitis GB virus A
ccucccucugcagau

SEQ ID NO: 258773 - RNA, 17 nt, Hepatitis GB virus A
cuccucccucugcagau

SEQ ID NO: 258774 - RNA, 14 nt, Hepatitis GB virus A
cucugcagaucucu

SEQ ID NO: 258775 - RNA, 15 nt, Hepatitis GB virus A
gcagaucucuagcuc

SEQ ID NO: 258776 - RNA, 23 nt, Hepatitis GB virus A
aacgaucgcuccucccucugcag

SEQ ID NO: 258777 - RNA, 15 nt, Hepatitis GB virus A
cagaucucuagcucg

SEQ ID NO: 258778 - RNA, 16 nt, Hepatitis GB virus A
ccucugcagaucucua

SEQ ID NO: 258779 - RNA, 13 nt, Hepatitis GB virus A
cugcagaucucua

SEQ ID NO: 258780 - RNA, 14 nt, Hepatitis GB virus A
gauggcgugguggu

SEQ ID NO: 258781 - RNA, 22 nt, Hepatitis GB virus A
gggaaacgaucgcuccucccuc

SEQ ID NO: 258782 - RNA, 15 nt, Hepatitis GB virus A
guggcggccuaccgc

SEQ ID NO: 258783 - RNA, 17 nt, Hepatitis GB virus A
ucccucugcagaucucu

SEQ ID NO: 258784 - RNA, 17 nt, Hepatitis GB virus B
ccgucucggguggguga

SEQ ID NO: 258785 - RNA, 14 nt, Hepatitis GB virus B
uggucugaagggga

SEQ ID NO: 258786 - RNA, 23 nt, Hepatitis GB virus B
uuuagggcagcggcaacagggga

SEQ ID NO: 258787 - RNA, 19 nt, Hepatitis GB virus B
caggggagaccccgggcuu

SEQ ID NO: 258788 - RNA, 16 nt, Hepatitis GB virus B
ccgucgugugugguga

SEQ ID NO: 258789 - RNA, 12 nt, Homo sapiens
aaaaaaaauccc

SEQ ID NO: 258790 - RNA, 12 nt, Homo sapiens
aaaaaaacguau

SEQ ID NO: 258791 - RNA, 20 nt, Homo sapiens
aaaaaacguauugcauuuaa

SEQ ID NO: 258792 - RNA, 20 nt, Homo sapiens
aaaaaaucaaguauuggcaa

SEQ ID NO: 258793 - RNA, 22 nt, Homo sapiens
aaaaaccucuaugcaaucugag

SEQ ID NO: 258794 - RNA, 14 nt, Homo sapiens
aaaaacguauugca

SEQ ID NO: 258795 - RNA, 15 nt, Homo sapiens
aaaaacguauugcau

SEQ ID NO: 258796 - RNA, 21 nt, Homo sapiens
aaaaagcccuuaaaaauaugu

SEQ ID NO: 258797 - RNA, 16 nt, Homo sapiens
aaaaaggaugcacaga

SEQ ID NO: 258798 - RNA, 20 nt, Homo sapiens
aaaaaggaugcauucccuac

SEQ ID NO: 258799 - RNA, 12 nt, Homo sapiens
aaaaagucauaa

SEQ ID NO: 258800 - RNA, 15 nt, Homo sapiens
aaaaauaacacugua

SEQ ID NO: 258801 - RNA, 21 nt, Homo sapiens
aaaaauagccugccucuucuc

SEQ ID NO: 258802 - RNA, 17 nt, Homo sapiens
aaaaauauuaaauagaa

SEQ ID NO: 258803 - RNA, 15 nt, Homo sapiens
aaaaaucagugaaua

SEQ ID NO: 258804 - RNA, 22 nt, Homo sapiens
aaaaaugcuugcuucaacccca

SEQ ID NO: 258805 - RNA, 20 nt, Homo sapiens
aaaaauguauaugcacuuau

SEQ ID NO: 258806 - RNA, 17 nt, Homo sapiens
aaaaaugugacucaaga

SEQ ID NO: 258807 - RNA, 17 nt, Homo sapiens
aaaacaaaaaaacacaa

SEQ ID NO: 258808 - RNA, 16 nt, Homo sapiens
aaaacaagcauucaca

SEQ ID NO: 258809 - RNA, 13 nt, Homo sapiens
aaaacacugugca

SEQ ID NO: 258810 - RNA, 15 nt, Homo sapiens
aaaacacugugcaca

SEQ ID NO: 258811 - RNA, 23 nt, Homo sapiens
aaaacauuuuacuuuaaaaggag

SEQ ID NO: 258812 - RNA, 23 nt, Homo sapiens
aaaaccaccaccaucaccagaca

SEQ ID NO: 258813 - RNA, 17 nt, Homo sapiens
aaaaccagcgugugacu

SEQ ID NO: 258814 - RNA, 15 nt, Homo sapiens
aaaaccucuaugcaa

SEQ ID NO: 258815 - RNA, 16 nt, Homo sapiens
aaaaccucuaugcaau

SEQ ID NO: 258816 - RNA, 13 nt, Homo sapiens
aaaacuacauuga

SEQ ID NO: 258817 - RNA, 14 nt, Homo sapiens
aaaacugucccuuu

SEQ ID NO: 258818 - RNA, 22 nt, Homo sapiens
aaaacuguggguagagacuuug

SEQ ID NO: 258819 - RNA, 19 nt, Homo sapiens
aaaacuucaguaaguacgu

SEQ ID NO: 258820 - RNA, 22 nt, Homo sapiens
aaaacuugauguguuaucucuu

SEQ ID NO: 258821 - RNA, 18 nt, Homo sapiens
aaaacuuuaaucccacuu

SEQ ID NO: 258822 - RNA, 13 nt, Homo sapiens
aaaagacugacca

SEQ ID NO: 258823 - RNA, 14 nt, Homo sapiens
aaaagacugaccaa

SEQ ID NO: 258824 - RNA, 16 nt, Homo sapiens
aaaagaggcuauguga

SEQ ID NO: 258825 - RNA, 21 nt, Homo sapiens
aaaagagucaacaguaucugu

SEQ ID NO: 258826 - RNA, 18 nt, Homo sapiens
aaaagaugaagcugagau

SEQ ID NO: 258827 - RNA, 23 nt, Homo sapiens
aaaagcaaauaguagauggcaaa

SEQ ID NO: 258828 - RNA, 19 nt, Homo sapiens
aaaagcaucuaugugagac

SEQ ID NO: 258829 - RNA, 13 nt, Homo sapiens
aaaagcugggcag

SEQ ID NO: 258830 - RNA, 20 nt, Homo sapiens
aaaaggacucucaggaccaa

SEQ ID NO: 258831 - RNA, 18 nt, Homo sapiens
aaaaguauccugcuucug

SEQ ID NO: 258832 - RNA, 10 nt, Homo sapiens
aaaagugaug

SEQ ID NO: 258833 - RNA, 18 nt, Homo sapiens
aaaaguuuaaaaagcuca

SEQ ID NO: 258834 - RNA, 15 nt, Homo sapiens
aaaaguuuuguaaau

SEQ ID NO: 258835 - RNA, 22 nt, Homo sapiens
aaaauaaauauaucuaccccag

SEQ ID NO: 258836 - RNA, 13 nt, Homo sapiens
aaaauacaugaca

SEQ ID NO: 258837 - RNA, 18 nt, Homo sapiens
aaaauacaugacauuuau

SEQ ID NO: 258838 - RNA, 21 nt, Homo sapiens
aaaauacuuguugcugucaca

SEQ ID NO: 258839 - RNA, 17 nt, Homo sapiens
aaaauagaugguguaug

SEQ ID NO: 258840 - RNA, 19 nt, Homo sapiens
aaaauagcaugccuuucuc

SEQ ID NO: 258841 - RNA, 21 nt, Homo sapiens
aaaauaggagagagaucauga

SEQ ID NO: 258842 - RNA, 14 nt, Homo sapiens
aaaauauagcugua

SEQ ID NO: 258843 - RNA, 20 nt, Homo sapiens
aaaauauagcuguacaaaua

SEQ ID NO: 258844 - RNA, 11 nt, Homo sapiens
aaaauaugcau

SEQ ID NO: 258845 - RNA, 20 nt, Homo sapiens
aaaaucaaacaauucaggga

SEQ ID NO: 258846 - RNA, 19 nt, Homo sapiens
aaaaucaaguauuggcaaa

SEQ ID NO: 258847 - RNA, 22 nt, Homo sapiens
aaaaucacacagccaagccagu

SEQ ID NO: 258848 - RNA, 21 nt, Homo sapiens
aaaaucauuuuauaugucaaa

SEQ ID NO: 258849 - RNA, 20 nt, Homo sapiens
aaaauggggaagaguugaaa

SEQ ID NO: 258850 - RNA, 20 nt, Homo sapiens
aaaaugguguuuuaucuucu

SEQ ID NO: 258851 - RNA, 14 nt, Homo sapiens
aaaaugucaucuca

SEQ ID NO: 258852 - RNA, 23 nt, Homo sapiens
aaaaugucauuguucuugugaac

SEQ ID NO: 258853 - RNA, 19 nt, Homo sapiens
aaaauguccaccaauagaa

SEQ ID NO: 258854 - RNA, 22 nt, Homo sapiens
aaaauguccaccaauagaauga

SEQ ID NO: 258855 - RNA, 12 nt, Homo sapiens
aaaaugugacuc

SEQ ID NO: 258856 - RNA, 16 nt, Homo sapiens
aaaauguucaccuaga

SEQ ID NO: 258857 - RNA, 15 nt, Homo sapiens
aaaauuacugaugca

SEQ ID NO: 258858 - RNA, 21 nt, Homo sapiens
aaaauucuauuacaguauguc

SEQ ID NO: 258859 - RNA, 17 nt, Homo sapiens
aaaauugugaucagacc

SEQ ID NO: 258860 - RNA, 22 nt, Homo sapiens
aaacaaaaaaaccucuaugcaa

SEQ ID NO: 258861 - RNA, 11 nt, Homo sapiens
aaacaaaaaua

SEQ ID NO: 258862 - RNA, 13 nt, Homo sapiens
aaacaaacaugac

SEQ ID NO: 258863 - RNA, 14 nt, Homo sapiens
aaacaaucuuguca

SEQ ID NO: 258864 - RNA, 12 nt, Homo sapiens
aaacacauuaaa

SEQ ID NO: 258865 - RNA, 22 nt, Homo sapiens
aaacacauuaaagguacuuugc

SEQ ID NO: 258866 - RNA, 12 nt, Homo sapiens
aaacacuccacc

SEQ ID NO: 258867 - RNA, 16 nt, Homo sapiens
aaacagaaaaccugau

SEQ ID NO: 258868 - RNA, 23 nt, Homo sapiens
aaacagcuccucuauauuuccac

SEQ ID NO: 258869 - RNA, 14 nt, Homo sapiens
aaacagcugagggu

SEQ ID NO: 258870 - RNA, 18 nt, Homo sapiens
aaacaggugcuaauuugu

SEQ ID NO: 258871 - RNA, 14 nt, Homo sapiens
aaacaucauuucaa

SEQ ID NO: 258872 - RNA, 15 nt, Homo sapiens
aaacauuaaugcaau

SEQ ID NO: 258873 - RNA, 21 nt, Homo sapiens
aaacauugguucuuguauuaa

SEQ ID NO: 258874 - RNA, 15 nt, Homo sapiens
aaacauuucauuucc

SEQ ID NO: 258875 - RNA, 16 nt, Homo sapiens
aaaccaaauauuccag

SEQ ID NO: 258876 - RNA, 17 nt, Homo sapiens
aaaccaaaucauacuuu

SEQ ID NO: 258877 - RNA, 19 nt, Homo sapiens
aaaccaagccguggcuucc

SEQ ID NO: 258878 - RNA, 16 nt, Homo sapiens
aaaccagccaucccau

SEQ ID NO: 258879 - RNA, 15 nt, Homo sapiens
aaaccgaauuuucac

SEQ ID NO: 258880 - RNA, 15 nt, Homo sapiens
aaaccucuguucuca

SEQ ID NO: 258881 - RNA, 18 nt, Homo sapiens
aaaccugaugcuggggac

SEQ ID NO: 258882 - RNA, 16 nt, Homo sapiens
aaaccuguuucugcag

SEQ ID NO: 258883 - RNA, 22 nt, Homo sapiens
aaacgauaaaauguggauuaaa

SEQ ID NO: 258884 - RNA, 17 nt, Homo sapiens
aaacguauugcauuuaa

SEQ ID NO: 258885 - RNA, 13 nt, Homo sapiens
aaacuacauugac

SEQ ID NO: 258886 - RNA, 17 nt, Homo sapiens
aaacuaccuuccaguuc

SEQ ID NO: 258887 - RNA, 17 nt, Homo sapiens
aaacuauguaacaugua

SEQ ID NO: 258888 - RNA, 18 nt, Homo sapiens
aaacuauguaacauguag

SEQ ID NO: 258889 - RNA, 13 nt, Homo sapiens
aaacucaccugcc

SEQ ID NO: 258890 - RNA, 14 nt, Homo sapiens
aaacucaccugccc

SEQ ID NO: 258891 - RNA, 18 nt, Homo sapiens
aaacuccugggcucaggc

SEQ ID NO: 258892 - RNA, 18 nt, Homo sapiens
aaacucuacuuaauccaa

SEQ ID NO: 258893 - RNA, 20 nt, Homo sapiens
aaacucuugaccucagguga

SEQ ID NO: 258894 - RNA, 23 nt, Homo sapiens
aaacugaacuucagagcaugaaa

SEQ ID NO: 258895 - RNA, 15 nt, Homo sapiens
aaacugaaugaacaa

SEQ ID NO: 258896 - RNA, 20 nt, Homo sapiens
aaacugaaugaacaaccucg

SEQ ID NO: 258897 - RNA, 19 nt, Homo sapiens
aaacugauuacaacugcua

SEQ ID NO: 258898 - RNA, 21 nt, Homo sapiens
aaacugcugcaaaaguucuca

SEQ ID NO: 258899 - RNA, 23 nt, Homo sapiens
aaacuggaaaguacguuaugaua

SEQ ID NO: 258900 - RNA, 13 nt, Homo sapiens
aaacuguggugcu

SEQ ID NO: 258901 - RNA, 20 nt, Homo sapiens
aaacuuauccuccaugaaua

SEQ ID NO: 258902 - RNA, 10 nt, Homo sapiens
aaacuuguau

SEQ ID NO: 258903 - RNA, 19 nt, Homo sapiens
aaacuuuuuuucuguacca

SEQ ID NO: 258904 - RNA, 23 nt, Homo sapiens
aaacuuuuuuucuguaccaguua

SEQ ID NO: 258905 - RNA, 16 nt, Homo sapiens
aaagaaaugcccaucu

SEQ ID NO: 258906 - RNA, 13 nt, Homo sapiens
aaagaaauuucca

SEQ ID NO: 258907 - RNA, 14 nt, Homo sapiens
aaagaacuuggaaa

SEQ ID NO: 258908 - RNA, 18 nt, Homo sapiens
aaagacaccuacugagug

SEQ ID NO: 258909 - RNA, 18 nt, Homo sapiens
aaagacaggguuucacca

SEQ ID NO: 258910 - RNA, 20 nt, Homo sapiens
aaagacauucugacaucuua

SEQ ID NO: 258911 - RNA, 23 nt, Homo sapiens
aaagaccgugugugaaauucucu

SEQ ID NO: 258912 - RNA, 19 nt, Homo sapiens
aaagacuguacaaaguaga

SEQ ID NO: 258913 - RNA, 11 nt, Homo sapiens
aaagacuguag

SEQ ID NO: 258914 - RNA, 14 nt, Homo sapiens
aaagacuguagaag

SEQ ID NO: 258915 - RNA, 17 nt, Homo sapiens
aaagagagggcuuuaau

SEQ ID NO: 258916 - RNA, 21 nt, Homo sapiens
aaagagcaacaauccaucucu

SEQ ID NO: 258917 - RNA, 15 nt, Homo sapiens
aaagagcacuuaaga

SEQ ID NO: 258918 - RNA, 15 nt, Homo sapiens
aaagaggcuauguga

SEQ ID NO: 258919 - RNA, 17 nt, Homo sapiens
aaagaggcuaugugagc

SEQ ID NO: 258920 - RNA, 15 nt, Homo sapiens
aaagaguaggaagac

SEQ ID NO: 258921 - RNA, 19 nt, Homo sapiens
aaagaucauugcugagaaa

SEQ ID NO: 258922 - RNA, 19 nt, Homo sapiens
aaagauccaacaaggccau

SEQ ID NO: 258923 - RNA, 16 nt, Homo sapiens
aaagaugaaaaguaua

SEQ ID NO: 258924 - RNA, 18 nt, Homo sapiens
aaagaugaagcugagaug

SEQ ID NO: 258925 - RNA, 17 nt, Homo sapiens
aaagauuuaaaauaauu

SEQ ID NO: 258926 - RNA, 18 nt, Homo sapiens
aaagcaggggaguaugca

SEQ ID NO: 258927 - RNA, 15 nt, Homo sapiens
aaagcaggugcccag

SEQ ID NO: 258928 - RNA, 12 nt, Homo sapiens
aaagcagugcau

SEQ ID NO: 258929 - RNA, 20 nt, Homo sapiens
aaagcaguggcuccauuggu

SEQ ID NO: 258930 - RNA, 18 nt, Homo sapiens
aaagcaucuaugugagac

SEQ ID NO: 258931 - RNA, 22 nt, Homo sapiens
aaagccaaucucaaucccucaa

SEQ ID NO: 258932 - RNA, 22 nt, Homo sapiens
uuuggaccaaaaaccaguauug

SEQ ID NO: 258933 - RNA, 15 nt, Homo sapiens
uuuggagagcugcuu

SEQ ID NO: 258934 - RNA, 15 nt, Homo sapiens
uuuggagguauucaa

SEQ ID NO: 258935 - RNA, 22 nt, Homo sapiens
uuuggcauuccccacuugagaa

SEQ ID NO: 258936 - RNA, 15 nt, Homo sapiens
uuuggccuccuccag

SEQ ID NO: 258937 - RNA, 13 nt, Homo sapiens
uuuggcucagagu

SEQ ID NO: 258938 - RNA, 10 nt, Homo sapiens
uuugggcucu

SEQ ID NO: 258939 - RNA, 23 nt, Homo sapiens
uuuggggaggaguugucuguccu

SEQ ID NO: 258940 - RNA, 20 nt, Homo sapiens
uuuggggcucagaguggggu

SEQ ID NO: 258941 - RNA, 21 nt, Homo sapiens
uuugggucucucauaccucug

SEQ ID NO: 258942 - RNA, 22 nt, Homo sapiens
uuuggguucacagaagcacagc

SEQ ID NO: 258943 - RNA, 19 nt, Homo sapiens
uuugguggggccauccaca

SEQ ID NO: 258944 - RNA, 21 nt, Homo sapiens
uuuguagagccagggucucac

SEQ ID NO: 258945 - RNA, 17 nt, Homo sapiens
uuuguauaaaaguguga

SEQ ID NO: 258946 - RNA, 16 nt, Homo sapiens
uuuguaucauuaugaa

SEQ ID NO: 258947 - RNA, 21 nt, Homo sapiens
uuugucauauaagauucauau

SEQ ID NO: 258948 - RNA, 12 nt, Homo sapiens
uuugucuuuaug

SEQ ID NO: 258949 - RNA, 15 nt, Homo sapiens
uuugugcuuugucca

SEQ ID NO: 258950 - RNA, 22 nt, Homo sapiens
uuuguuaguaugaggcauuugu

SEQ ID NO: 258951 - RNA, 12 nt, Homo sapiens
uuuguugcccag

SEQ ID NO: 258952 - RNA, 12 nt, Homo sapiens
uuuguuuaccag

SEQ ID NO: 258953 - RNA, 20 nt, Homo sapiens
uuuguuuuguaucauuauga

SEQ ID NO: 258954 - RNA, 21 nt, Homo sapiens
uuuuaaaaaaaucccauuuaa

SEQ ID NO: 258955 - RNA, 15 nt, Homo sapiens
uuuuaaaugcaccug

SEQ ID NO: 258956 - RNA, 17 nt, Homo sapiens
uuuuaacaacuaugauu

SEQ ID NO: 258957 - RNA, 23 nt, Homo sapiens
uuuuacaauaaaacuuugcugcc

SEQ ID NO: 258958 - RNA, 19 nt, Homo sapiens
uuuuacuggggauucuuga

SEQ ID NO: 258959 - RNA, 13 nt, Homo sapiens
uuuuagacagagu

SEQ ID NO: 258960 - RNA, 19 nt, Homo sapiens
uuuuagacccuauugcugc

SEQ ID NO: 258961 - RNA, 20 nt, Homo sapiens
uuuuauaaugucccuucaca

SEQ ID NO: 258962 - RNA, 23 nt, Homo sapiens
uuuuaugagaaaugccagugugc

SEQ ID NO: 258963 - RNA, 19 nt, Homo sapiens
uuuuauggcuuuugugcau

SEQ ID NO: 258964 - RNA, 23 nt, Homo sapiens
uuuuauuuuuagacagagucuca

SEQ ID NO: 258965 - RNA, 21 nt, Homo sapiens
uuuucacugcuggcugccuua

SEQ ID NO: 258966 - RNA, 20 nt, Homo sapiens
uuuucagcaaaguacaaaaa

SEQ ID NO: 258967 - RNA, 18 nt, Homo sapiens
uuuucagugcuuugcccu

SEQ ID NO: 258968 - RNA, 18 nt, Homo sapiens
uuuuccuggcucaucucu

SEQ ID NO: 258969 - RNA, 15 nt, Homo sapiens
uuuuccuguucuuaa

SEQ ID NO: 258970 - RNA, 22 nt, Homo sapiens
uuuucgccaaggcucacaugcu

SEQ ID NO: 258971 - RNA, 23 nt, Homo sapiens
uuuucggccccauguaucucagu

SEQ ID NO: 258972 - RNA, 16 nt, Homo sapiens
uuuucucucccuccuu

SEQ ID NO: 258973 - RNA, 20 nt, Homo sapiens
uuuucucucuuacugcuuca

SEQ ID NO: 258974 - RNA, 15 nt, Homo sapiens
uuuucugauaaaaga

SEQ ID NO: 258975 - RNA, 22 nt, Homo sapiens
uuuucuugaggcagggucucac

SEQ ID NO: 258976 - RNA, 16 nt, Homo sapiens
uuuugaaaaugggcuc

SEQ ID NO: 258977 - RNA, 14 nt, Homo sapiens
uuuugaaaugucaa

SEQ ID NO: 258978 - RNA, 17 nt, Homo sapiens
uuuugaaauuaaccucu

SEQ ID NO: 258979 - RNA, 18 nt, Homo sapiens
uuuugcccacacuuggga

SEQ ID NO: 258980 - RNA, 19 nt, Homo sapiens
uuuugcuggucacugccau

SEQ ID NO: 258981 - RNA, 13 nt, Homo sapiens
uuuugcuguagaa

SEQ ID NO: 258982 - RNA, 15 nt, Homo sapiens
uuuuggagguauuca

SEQ ID NO: 258983 - RNA, 23 nt, Homo sapiens
uuuuggggaggaguugucugucc

SEQ ID NO: 258984 - RNA, 16 nt, Homo sapiens
uuuugguugcuuuaau

SEQ ID NO: 258985 - RNA, 16 nt, Homo sapiens
uuuuguaucaccucuu

SEQ ID NO: 258986 - RNA, 13 nt, Homo sapiens
uuuugugauugcc

SEQ ID NO: 258987 - RNA, 18 nt, Homo sapiens
uuuuguuccacaaguuaa

SEQ ID NO: 258988 - RNA, 13 nt, Homo sapiens
uuuuguuuggacc

SEQ ID NO: 258989 - RNA, 19 nt, Homo sapiens
uuuuuaagugcugcauuua

SEQ ID NO: 258990 - RNA, 20 nt, Homo sapiens
uuuuuacuaaucuuucugca

SEQ ID NO: 258991 - RNA, 22 nt, Homo sapiens
uuuuuauauucucagcagagug

SEQ ID NO: 258992 - RNA, 22 nt, Homo sapiens
uuuuuaucuccccuucacaugc

SEQ ID NO: 258993 - RNA, 22 nt, Homo sapiens
uuuuucuuugagacugggucuc

SEQ ID NO: 258994 - RNA, 18 nt, Homo sapiens
uuuuuguucaaagccagc

SEQ ID NO: 258995 - RNA, 12 nt, Homo sapiens
aaaaaaaagccu

SEQ ID NO: 258996 - RNA, 12 nt, Homo sapiens
aaaaaaaagggg

SEQ ID NO: 258997 - RNA, 12 nt, Homo sapiens
aaaaaaacauug

SEQ ID NO: 258998 - RNA, 12 nt, Homo sapiens
aaaaaacagugg

SEQ ID NO: 258999 - RNA, 12 nt, Homo sapiens
aaaaaaucugac

SEQ ID NO: 259000 - RNA, 20 nt, Homo sapiens
aaaaacaacugaccaguugu

SEQ ID NO: 259001 - RNA, 13 nt, Homo sapiens
aaaaacauucuua

SEQ ID NO: 259002 - RNA, 23 nt, Homo sapiens
aaaaaccucuaugcaaucugagu

SEQ ID NO: 259003 - RNA, 18 nt, Homo sapiens
aaaaacuaacacccaguc

SEQ ID NO: 259004 - RNA, 15 nt, Homo sapiens
aaaaagaaugcagag

SEQ ID NO: 259005 - RNA, 14 nt, Homo sapiens
aaaaagccagggcu

SEQ ID NO: 259006 - RNA, 17 nt, Homo sapiens
aaaaauaaagcacuuau

SEQ ID NO: 259007 - RNA, 12 nt, Homo sapiens
aaaaauaguaaa

SEQ ID NO: 259008 - RNA, 15 nt, Homo sapiens
aaaaaucccuuaccu

SEQ ID NO: 259009 - RNA, 15 nt, Homo sapiens
aaaaauccuacaagg

SEQ ID NO: 259010 - RNA, 16 nt, Homo sapiens
aaaaaucguccaggga

SEQ ID NO: 259011 - RNA, 15 nt, Homo sapiens
aaaaaugucaucuca

SEQ ID NO: 259012 - RNA, 15 nt, Homo sapiens
aaaaauguccaagau

SEQ ID NO: 259013 - RNA, 14 nt, Homo sapiens
aaaaaugugacuca

SEQ ID NO: 259014 - RNA, 19 nt, Homo sapiens
aaaaauuccuuaaacagug

SEQ ID NO: 259015 - RNA, 15 nt, Homo sapiens
aaaacaaucuuguca

SEQ ID NO: 259016 - RNA, 17 nt, Homo sapiens
aaaacacaaaaguuucu

SEQ ID NO: 259017 - RNA, 12 nt, Homo sapiens
aaaacacaacau

SEQ ID NO: 259018 - RNA, 11 nt, Homo sapiens
aaaacacugug

SEQ ID NO: 259019 - RNA, 14 nt, Homo sapiens
aaaacacugugcac

SEQ ID NO: 259020 - RNA, 18 nt, Homo sapiens
aaaacauuaagaaaauca

SEQ ID NO: 259021 - RNA, 13 nt, Homo sapiens
aaaacauuuuacu

SEQ ID NO: 259022 - RNA, 24 nt, Homo sapiens
aaaaccaauguucucucuucucca

SEQ ID NO: 259023 - RNA, 19 nt, Homo sapiens
aaaacccacaaaaguacaa

SEQ ID NO: 259024 - RNA, 23 nt, Homo sapiens
aaaaccccaucucuacaaaaagc

SEQ ID NO: 259025 - RNA, 23 nt, Homo sapiens
aaaaccguaugagggaacugugu

SEQ ID NO: 259026 - RNA, 23 nt, Homo sapiens
aaaaccugaagaguucacuuuug

SEQ ID NO: 259027 - RNA, 14 nt, Homo sapiens
aaaacguauugcau

SEQ ID NO: 259028 - RNA, 15 nt, Homo sapiens
aaaacuaaacugcug

SEQ ID NO: 259029 - RNA, 15 nt, Homo sapiens
aaaacuacauugaca

SEQ ID NO: 259030 - RNA, 23 nt, Homo sapiens
aaaacuucaacguaagacugugu

SEQ ID NO: 259031 - RNA, 16 nt, Homo sapiens
aaaacuucaguaagua

SEQ ID NO: 259032 - RNA, 14 nt, Homo sapiens
aaaacuugcugccu

SEQ ID NO: 259033 - RNA, 17 nt, Homo sapiens
aaaacuugcugccugaa

SEQ ID NO: 259034 - RNA, 18 nt, Homo sapiens
aaaacuuuucuaauacuc

SEQ ID NO: 259035 - RNA, 23 nt, Homo sapiens
aaaacuuuucuaauacucuaccc

SEQ ID NO: 259036 - RNA, 14 nt, Homo sapiens
aaaagaaacuugug

SEQ ID NO: 259037 - RNA, 18 nt, Homo sapiens
aaaagacaacauaacuca

SEQ ID NO: 259038 - RNA, 17 nt, Homo sapiens
aaaagacaagacuucag

SEQ ID NO: 259039 - RNA, 22 nt, Homo sapiens
aaaagaugcauuaucuaugaua

SEQ ID NO: 259040 - RNA, 23 nt, Homo sapiens
aaaagaugcuucucacugccaug

SEQ ID NO: 259041 - RNA, 13 nt, Homo sapiens
aaaagcaaaauca

SEQ ID NO: 259042 - RNA, 16 nt, Homo sapiens
aaaagcaucuauguga

SEQ ID NO: 259043 - RNA, 22 nt, Homo sapiens
aaaagccagggcuggagaacaa

SEQ ID NO: 259044 - RNA, 14 nt, Homo sapiens
aaaaggcagaguac

SEQ ID NO: 259045 - RNA, 16 nt, Homo sapiens
aaaagggaacugaaca

SEQ ID NO: 259046 - RNA, 16 nt, Homo sapiens
aaaaggggggugggag

SEQ ID NO: 259047 - RNA, 17 nt, Homo sapiens
aaaaguuuaauauuaaa

SEQ ID NO: 259048 - RNA, 21 nt, Homo sapiens
aaaaguuuuguaaauuucucu

SEQ ID NO: 259049 - RNA, 16 nt, Homo sapiens
aaaauaaggaacauga

SEQ ID NO: 259050 - RNA, 20 nt, Homo sapiens
aaaauaaucaguguuuccaa

SEQ ID NO: 259051 - RNA, 16 nt, Homo sapiens
aaaauaccagccagua

SEQ ID NO: 259052 - RNA, 18 nt, Homo sapiens
aaaauagagccugaggga

SEQ ID NO: 259053 - RNA, 13 nt, Homo sapiens
aaaauagcaacac

SEQ ID NO: 259054 - RNA, 19 nt, Homo sapiens
aaaauaggagagagaucau

SEQ ID NO: 259055 - RNA, 12 nt, Homo sapiens
aaaauaguaaaa

SEQ ID NO: 259056 - RNA, 22 nt, Homo sapiens
aaaauaugacacucuagucaaa

SEQ ID NO: 259057 - RNA, 15 nt, Homo sapiens
aaaaucacacugucu

SEQ ID NO: 259058 - RNA, 19 nt, Homo sapiens
aaaaucagccugcuccagc

SEQ ID NO: 259059 - RNA, 21 nt, Homo sapiens
aaaauccucacucauucccau

SEQ ID NO: 259060 - RNA, 14 nt, Homo sapiens
aaaaugagguacuc

SEQ ID NO: 259061 - RNA, 18 nt, Homo sapiens
aaaaugccucaguguauu

SEQ ID NO: 259062 - RNA, 21 nt, Homo sapiens
aaaauggacguguuaugacuc

SEQ ID NO: 259063 - RNA, 19 nt, Homo sapiens
aaaauggcacuugggggac

SEQ ID NO: 259064 - RNA, 13 nt, Homo sapiens
aaaauguccaaaa

SEQ ID NO: 259065 - RNA, 18 nt, Homo sapiens
aaaauguccaccaauaga

SEQ ID NO: 259066 - RNA, 13 nt, Homo sapiens
aaaaugugacuca

SEQ ID NO: 259067 - RNA, 13 nt, Homo sapiens
aaaauguggcagg

SEQ ID NO: 259068 - RNA, 21 nt, Homo sapiens
aaaauuaagaaauucacuucc

SEQ ID NO: 259069 - RNA, 14 nt, Homo sapiens
aaaauuaugccaua

SEQ ID NO: 259070 - RNA, 18 nt, Homo sapiens
aaaauuauuugcauaaca

SEQ ID NO: 259071 - RNA, 20 nt, Homo sapiens
aaaauucuauuacaguaugu

SEQ ID NO: 259072 - RNA, 14 nt, Homo sapiens
aaaauucuccuuga

SEQ ID NO: 259073 - RNA, 17 nt, Homo sapiens
aaacaaauguauuucaa

SEQ ID NO: 259074 - RNA, 12 nt, Homo sapiens
aaacaacucuuu

SEQ ID NO: 259075 - RNA, 19 nt, Homo sapiens
aaacacacauuucuuugaa

SEQ ID NO: 259076 - RNA, 22 nt, Homo sapiens
aaacacauacaggaagguagaa

SEQ ID NO: 259077 - RNA, 14 nt, Homo sapiens
aaacacaucaucaa

SEQ ID NO: 259078 - RNA, 21 nt, Homo sapiens
aaacaccugcugauguggcaa

SEQ ID NO: 259079 - RNA, 17 nt, Homo sapiens
aaacagccccucuggac

SEQ ID NO: 259080 - RNA, 21 nt, Homo sapiens
aaacagccccucuggacacag

SEQ ID NO: 259081 - RNA, 17 nt, Homo sapiens
aaacaggcugcuuagau

SEQ ID NO: 259082 - RNA, 21 nt, Homo sapiens
aaacagguuauaacaguguuu

SEQ ID NO: 259083 - RNA, 13 nt, Homo sapiens
aaacaucauuuca

SEQ ID NO: 259084 - RNA, 20 nt, Homo sapiens
aaacaugguggguccauggg

SEQ ID NO: 259085 - RNA, 23 nt, Homo sapiens
aaacauuuaaauuauacaaucau

SEQ ID NO: 259086 - RNA, 22 nt, Homo sapiens
aaacauuuguuuguggucuaua

SEQ ID NO: 259087 - RNA, 16 nt, Homo sapiens
aaaccaguauuguaca

SEQ ID NO: 259088 - RNA, 22 nt, Homo sapiens
aaaccaucauaguacagguaag

SEQ ID NO: 259089 - RNA, 22 nt, Homo sapiens
aaaccauuuuguuauugacuaa

SEQ ID NO: 259090 - RNA, 22 nt, Homo sapiens
aaacccaguaguggugacugug

SEQ ID NO: 259091 - RNA, 14 nt, Homo sapiens
aaaccucuaugcaa

SEQ ID NO: 259092 - RNA, 14 nt, Homo sapiens
aaaccucuguucuc

SEQ ID NO: 259093 - RNA, 16 nt, Homo sapiens
aaacguccuacuguau

SEQ ID NO: 259094 - RNA, 16 nt, Homo sapiens
aaacuaacacccaguc

SEQ ID NO: 259095 - RNA, 21 nt, Homo sapiens
aaacuaccagcccuacaccau

SEQ ID NO: 259096 - RNA, 18 nt, Homo sapiens
aaacuacccucuggagau

SEQ ID NO: 259097 - RNA, 19 nt, Homo sapiens
aaacuacccucuggagaua

SEQ ID NO: 259098 - RNA, 18 nt, Homo sapiens
aaacucuccucugcugcu

SEQ ID NO: 259099 - RNA, 22 nt, Homo sapiens
aaacugauuacaacugcuacag

SEQ ID NO: 259100 - RNA, 12 nt, Homo sapiens
aaacugcacugu

SEQ ID NO: 259101 - RNA, 22 nt, Homo sapiens
aaacuggcaaaauaguucugca

SEQ ID NO: 259102 - RNA, 19 nt, Homo sapiens
aaacuggguuccugcaaug

SEQ ID NO: 259103 - RNA, 21 nt, Homo sapiens
aaacugugacugcagugcugu

SEQ ID NO: 259104 - RNA, 12 nt, Homo sapiens
aaacugugcacc

SEQ ID NO: 259105 - RNA, 13 nt, Homo sapiens
aaacuucaagggu

SEQ ID NO: 259106 - RNA, 18 nt, Homo sapiens
aaacuugaauucauagaa

SEQ ID NO: 259107 - RNA, 23 nt, Homo sapiens
aaacuuggcucgaaucucugugc

SEQ ID NO: 259108 - RNA, 19 nt, Homo sapiens
aaacuuucacaccccagac

SEQ ID NO: 259109 - RNA, 20 nt, Homo sapiens
aaacuuuucuaauacucuac

SEQ ID NO: 259110 - RNA, 18 nt, Homo sapiens
aaagaaagccucagagaa

SEQ ID NO: 259111 - RNA, 18 nt, Homo sapiens
aaagaaauuguauuauca

SEQ ID NO: 259112 - RNA, 16 nt, Homo sapiens
aaagaagauucugugg

SEQ ID NO: 259113 - RNA, 13 nt, Homo sapiens
aaagaagguuuca

SEQ ID NO: 259114 - RNA, 14 nt, Homo sapiens
aaagaaguggggac

SEQ ID NO: 259115 - RNA, 16 nt, Homo sapiens
aaagaaugcucuuuac

SEQ ID NO: 259116 - RNA, 9 nt, Homo sapiens
aaagacaga

SEQ ID NO: 259117 - RNA, 21 nt, Homo sapiens
aaagcccuuaaaaauaugugu

SEQ ID NO: 259118 - RNA, 17 nt, Homo sapiens
aaagccugccucuucca

SEQ ID NO: 259119 - RNA, 18 nt, Homo sapiens
aaagccugccucuuccag

SEQ ID NO: 259120 - RNA, 20 nt, Homo sapiens
aaagccugccucuuccagga

SEQ ID NO: 259121 - RNA, 19 nt, Homo sapiens
aaagcgugguggacaugca

SEQ ID NO: 259122 - RNA, 21 nt, Homo sapiens
aaagcuagaaaguguaugugu

SEQ ID NO: 259123 - RNA, 13 nt, Homo sapiens
aaagcucaucuca

SEQ ID NO: 259124 - RNA, 13 nt, Homo sapiens
aaagcugcugaca

SEQ ID NO: 259125 - RNA, 20 nt, Homo sapiens
aaagcuuaccaaggggaaug

SEQ ID NO: 259126 - RNA, 16 nt, Homo sapiens
aaagcuucacaguacc

SEQ ID NO: 259127 - RNA, 23 nt, Homo sapiens
aaagcuuucauguaaacugugca

SEQ ID NO: 259128 - RNA, 14 nt, Homo sapiens
aaagcuuugugcag

SEQ ID NO: 259129 - RNA, 21 nt, Homo sapiens
aaaggaacauugguugcuuug

SEQ ID NO: 259130 - RNA, 23 nt, Homo sapiens
aaaggcucgauuuuguaucugca

SEQ ID NO: 259131 - RNA, 16 nt, Homo sapiens
aaagggagaagaggga

SEQ ID NO: 259132 - RNA, 17 nt, Homo sapiens
aaagggagcacuggguu

SEQ ID NO: 259133 - RNA, 18 nt, Homo sapiens
aaagggaggaggugcaca

SEQ ID NO: 259134 - RNA, 22 nt, Homo sapiens
aaagggaggaggugcacagcac

SEQ ID NO: 259135 - RNA, 18 nt, Homo sapiens
aaagggcccagagagggu

SEQ ID NO: 259136 - RNA, 21 nt, Homo sapiens
aaagguagcuuuucccaaacu

SEQ ID NO: 259137 - RNA, 14 nt, Homo sapiens
aaagguccuggcaa

SEQ ID NO: 259138 - RNA, 16 nt, Homo sapiens
aaaggugaccaaugau

SEQ ID NO: 259139 - RNA, 20 nt, Homo sapiens
aaaguaaaauagauggugua

SEQ ID NO: 259140 - RNA, 14 nt, Homo sapiens
aaaguacuucucca

SEQ ID NO: 259141 - RNA, 15 nt, Homo sapiens
aaaguaguccuguga

SEQ ID NO: 259142 - RNA, 19 nt, Homo sapiens
aaagucacacagagugccu

SEQ ID NO: 259143 - RNA, 9 nt, Homo sapiens
aaagugaug

SEQ ID NO: 259144 - RNA, 21 nt, Homo sapiens
aaaguggugagaggcauccag

SEQ ID NO: 259145 - RNA, 12 nt, Homo sapiens
aaaguguguauu

SEQ ID NO: 259146 - RNA, 17 nt, Homo sapiens
aaaguucucaauguucu

SEQ ID NO: 259147 - RNA, 19 nt, Homo sapiens
aaaguuuaaaaagcucaca

SEQ ID NO: 259148 - RNA, 11 nt, Homo sapiens
aaauaaauuau

SEQ ID NO: 259149 - RNA, 15 nt, Homo sapiens
aaauaacaaauuaaa

SEQ ID NO: 259150 - RNA, 13 nt, Homo sapiens
aaauaacacugua

SEQ ID NO: 259151 - RNA, 23 nt, Homo sapiens
aaauaacuaaaagguaugcaauc

SEQ ID NO: 259152 - RNA, 17 nt, Homo sapiens
aaauaaggaacaugaaa

SEQ ID NO: 259153 - RNA, 21 nt, Homo sapiens
aaauacaauaaacuuacuaua

SEQ ID NO: 259154 - RNA, 17 nt, Homo sapiens
aaauacagauagauaua

SEQ ID NO: 259155 - RNA, 22 nt, Homo sapiens
aaauacuguuugagguuuuuaa

SEQ ID NO: 259156 - RNA, 15 nt, Homo sapiens
aaauacuucuugaag

SEQ ID NO: 259157 - RNA, 19 nt, Homo sapiens
aaauacuucuugaagccga

SEQ ID NO: 259158 - RNA, 16 nt, Homo sapiens
aaauagaugacauuga

SEQ ID NO: 259159 - RNA, 19 nt, Homo sapiens
aaauagcaugccuuucucu

SEQ ID NO: 259160 - RNA, 16 nt, Homo sapiens
aaauauaguucacaau

SEQ ID NO: 259161 - RNA, 15 nt, Homo sapiens
aaauauauaugauau

SEQ ID NO: 259162 - RNA, 23 nt, Homo sapiens
aaauauuuugacuuguugagggu

SEQ ID NO: 259163 - RNA, 15 nt, Homo sapiens
aaauauuuugucuaa

SEQ ID NO: 259164 - RNA, 21 nt, Homo sapiens
aaaucaaguuggcuucuaauc

SEQ ID NO: 259165 - RNA, 22 nt, Homo sapiens
aaaucacacagccaagccaguc

SEQ ID NO: 259166 - RNA, 22 nt, Homo sapiens
aaaucagaagucaucuugcuac

SEQ ID NO: 259167 - RNA, 17 nt, Homo sapiens
aaaucagcugcuacuac

SEQ ID NO: 259168 - RNA, 20 nt, Homo sapiens
aaaucagcugcuacuacucc

SEQ ID NO: 259169 - RNA, 16 nt, Homo sapiens
aaaucauacuuucucu

SEQ ID NO: 259170 - RNA, 17 nt, Homo sapiens
aaaucccuccuucaucc

SEQ ID NO: 259171 - RNA, 21 nt, Homo sapiens
aaaucgugacaacacuugugu

SEQ ID NO: 259172 - RNA, 12 nt, Homo sapiens
aaaucuagaaga

SEQ ID NO: 259173 - RNA, 17 nt, Homo sapiens
aaaucuagaagacuguc

SEQ ID NO: 259174 - RNA, 18 nt, Homo sapiens
aaaucuaugaaauaucau

SEQ ID NO: 259175 - RNA, 22 nt, Homo sapiens
aaaucuguucaaggaaucauug

SEQ ID NO: 259176 - RNA, 15 nt, Homo sapiens
aaaucuugacuacag

SEQ ID NO: 259177 - RNA, 17 nt, Homo sapiens
aaaugaaaaugucuugu

SEQ ID NO: 259178 - RNA, 20 nt, Homo sapiens
aaaugccacacggcucucac

SEQ ID NO: 259179 - RNA, 12 nt, Homo sapiens
aaaugccagugu

SEQ ID NO: 259180 - RNA, 14 nt, Homo sapiens
aaaugccagugugc

SEQ ID NO: 259181 - RNA, 20 nt, Homo sapiens
aaaugcuguauuagucacag

SEQ ID NO: 259182 - RNA, 16 nt, Homo sapiens
aaaugcuuuuccucaa

SEQ ID NO: 259183 - RNA, 14 nt, Homo sapiens
aaauggaagacagc

SEQ ID NO: 259184 - RNA, 23 nt, Homo sapiens
aaauggacguguuaugacuccag

SEQ ID NO: 259185 - RNA, 16 nt, Homo sapiens
aaauggccaaugagau

SEQ ID NO: 259186 - RNA, 15 nt, Homo sapiens
aaauggguuuauuca

SEQ ID NO: 259187 - RNA, 22 nt, Homo sapiens
aaaugguccaggagaaggccaa

SEQ ID NO: 259188 - RNA, 16 nt, Homo sapiens
aaauguacauuaauua

SEQ ID NO: 259189 - RNA, 13 nt, Homo sapiens
aaaugucaucuca

SEQ ID NO: 259190 - RNA, 12 nt, Homo sapiens
aaauguccaaaa

SEQ ID NO: 259191 - RNA, 21 nt, Homo sapiens
aaaugucucuuuaaugucaca

SEQ ID NO: 259192 - RNA, 21 nt, Homo sapiens
aaaugugacucaagacuucca

SEQ ID NO: 259193 - RNA, 13 nt, Homo sapiens
aaaugugaugaau

SEQ ID NO: 259194 - RNA, 22 nt, Homo sapiens
aaauguuauuuuuuaauuauua

SEQ ID NO: 259195 - RNA, 19 nt, Homo sapiens
aaauguuguuuuaggaaua

SEQ ID NO: 259196 - RNA, 17 nt, Homo sapiens
aaauguuuugaguguua

SEQ ID NO: 259197 - RNA, 22 nt, Homo sapiens
aaauguuuugaguguuauuuca

SEQ ID NO: 259198 - RNA, 14 nt, Homo sapiens
aaauuaaaagcuau

SEQ ID NO: 259199 - RNA, 13 nt, Homo sapiens
aaauuaaagcuga

SEQ ID NO: 259200 - RNA, 21 nt, Homo sapiens
aaauuaagaaauucacuuccc

SEQ ID NO: 259201 - RNA, 14 nt, Homo sapiens
aaauuaccugugga

SEQ ID NO: 259202 - RNA, 14 nt, Homo sapiens
aaauuaugccauag

SEQ ID NO: 259203 - RNA, 14 nt, Homo sapiens
aaauucaugcugcu

SEQ ID NO: 259204 - RNA, 19 nt, Homo sapiens
aaauucccuggccuuucau

SEQ ID NO: 259205 - RNA, 23 nt, Homo sapiens
aaauuccuuagcuuagaccucag

SEQ ID NO: 259206 - RNA, 21 nt, Homo sapiens
aaauucuguuuuucuaggccu

SEQ ID NO: 259207 - RNA, 23 nt, Homo sapiens
aaauucuucuccacuuucuagcc

SEQ ID NO: 259208 - RNA, 12 nt, Homo sapiens
aaauucuugaua

SEQ ID NO: 259209 - RNA, 20 nt, Homo sapiens
aaauuguaucaaaugugaca

SEQ ID NO: 259210 - RNA, 22 nt, Homo sapiens
aaauuguaucaaaugugacauu

SEQ ID NO: 259211 - RNA, 14 nt, Homo sapiens
aaauuguauuauca

SEQ ID NO: 259212 - RNA, 15 nt, Homo sapiens
aaauuguauuaucaa

SEQ ID NO: 259213 - RNA, 18 nt, Homo sapiens
aaauuuaaaacuguugga

SEQ ID NO: 259214 - RNA, 18 nt, Homo sapiens
aaauuuggccucuggccu

SEQ ID NO: 259215 - RNA, 23 nt, Homo sapiens
aaauuuucuuuuuauacuauuaa

SEQ ID NO: 259216 - RNA, 16 nt, Homo sapiens
aaauuuuuguuuauaa

SEQ ID NO: 259217 - RNA, 21 nt, Homo sapiens
aacaaaaaaaccucuaugcaa

SEQ ID NO: 259218 - RNA, 16 nt, Homo sapiens
aacaaagucacccacu

SEQ ID NO: 259219 - RNA, 13 nt, Homo sapiens
aacaaaucugcac

SEQ ID NO: 259220 - RNA, 15 nt, Homo sapiens
aacaaauguauuuca

SEQ ID NO: 259221 - RNA, 16 nt, Homo sapiens
aacaacagauucucuu

SEQ ID NO: 259222 - RNA, 15 nt, Homo sapiens
aacaacugaccaguu

SEQ ID NO: 259223 - RNA, 14 nt, Homo sapiens
aacaagaacuuuaa

SEQ ID NO: 259224 - RNA, 17 nt, Homo sapiens
aacaagugcucuuucca

SEQ ID NO: 259225 - RNA, 23 nt, Homo sapiens
aacaauuuuaggaggaccagagc

SEQ ID NO: 259226 - RNA, 20 nt, Homo sapiens
aacacaaacgggcucagcaa

SEQ ID NO: 259227 - RNA, 14 nt, Homo sapiens
aacacacaauauua

SEQ ID NO: 259228 - RNA, 13 nt, Homo sapiens
aacacacacuguu

SEQ ID NO: 259229 - RNA, 13 nt, Homo sapiens
aacacaucaucaa

SEQ ID NO: 259230 - RNA, 13 nt, Homo sapiens
aacaccucugcac

SEQ ID NO: 259231 - RNA, 19 nt, Homo sapiens
aacacuauaaaaacagcuc

SEQ ID NO: 259232 - RNA, 15 nt, Homo sapiens
aacacuguacugcaa

SEQ ID NO: 259233 - RNA, 23 nt, Homo sapiens
aacacuuuacaauguucauccca

SEQ ID NO: 259234 - RNA, 15 nt, Homo sapiens
aacagaauucacuug

SEQ ID NO: 259235 - RNA, 13 nt, Homo sapiens
aacagacuugaau

SEQ ID NO: 259236 - RNA, 20 nt, Homo sapiens
aacagauuuuguuggcauag

SEQ ID NO: 259237 - RNA, 20 nt, Homo sapiens
aacagccccucuggacacag

SEQ ID NO: 259238 - RNA, 17 nt, Homo sapiens
aacagcccucaggucag

SEQ ID NO: 259239 - RNA, 18 nt, Homo sapiens
aacaggaauucugaauua

SEQ ID NO: 259240 - RNA, 19 nt, Homo sapiens
aacaggauuagacagucaa

SEQ ID NO: 259241 - RNA, 18 nt, Homo sapiens
aacaggccgcacaucuca

SEQ ID NO: 259242 - RNA, 17 nt, Homo sapiens
aacaggcugcuuagauu

SEQ ID NO: 259243 - RNA, 20 nt, Homo sapiens
aacagguuuguuugugcuuu

SEQ ID NO: 259244 - RNA, 15 nt, Homo sapiens
aacaguaacauagcu

SEQ ID NO: 259245 - RNA, 16 nt, Homo sapiens
aacaguaacugccauc

SEQ ID NO: 259246 - RNA, 20 nt, Homo sapiens
aacauacccgccuagcugcu

SEQ ID NO: 259247 - RNA, 16 nt, Homo sapiens
aacauacuucagcuca

SEQ ID NO: 259248 - RNA, 14 nt, Homo sapiens
aacaucauuucaau

SEQ ID NO: 259249 - RNA, 18 nt, Homo sapiens
aacaucuuuuacauucug

SEQ ID NO: 259250 - RNA, 20 nt, Homo sapiens
aacaucuuuuucuacucgag

SEQ ID NO: 259251 - RNA, 20 nt, Homo sapiens
aacaugccagccacugugau

SEQ ID NO: 259252 - RNA, 15 nt, Homo sapiens
aacaugcucaugugu

SEQ ID NO: 259253 - RNA, 17 nt, Homo sapiens
aacaugcucauguguac

SEQ ID NO: 259254 - RNA, 16 nt, Homo sapiens
aacaugcuugcauuau

SEQ ID NO: 259255 - RNA, 22 nt, Homo sapiens
aacaugguaaacgcugucccua

SEQ ID NO: 259256 - RNA, 21 nt, Homo sapiens
aacaugugacaacaugcaaga

SEQ ID NO: 259257 - RNA, 12 nt, Homo sapiens
aacaugugccag

SEQ ID NO: 259258 - RNA, 14 nt, Homo sapiens
aacaugugcucagg

SEQ ID NO: 259259 - RNA, 16 nt, Homo sapiens
aacaugugcucaggga

SEQ ID NO: 259260 - RNA, 12 nt, Homo sapiens
aacauucaggaa

SEQ ID NO: 259261 - RNA, 20 nt, Homo sapiens
aaccaaauacuuuaauguau

SEQ ID NO: 259262 - RNA, 19 nt, Homo sapiens
aaccaaauauuccagagac

SEQ ID NO: 259263 - RNA, 18 nt, Homo sapiens
aaccaaaucauacuuucu

SEQ ID NO: 259264 - RNA, 22 nt, Homo sapiens
aaccaagaggcugguuuuggca

SEQ ID NO: 259265 - RNA, 18 nt, Homo sapiens
aaccacaggcagcauuua

SEQ ID NO: 259266 - RNA, 17 nt, Homo sapiens
aaccaccaccaaccacu

SEQ ID NO: 259267 - RNA, 13 nt, Homo sapiens
aaccaccuuucag

SEQ ID NO: 259268 - RNA, 19 nt, Homo sapiens
aaccacuaagagucucuau

SEQ ID NO: 259269 - RNA, 18 nt, Homo sapiens
aaccacugcgaccacaag

SEQ ID NO: 259270 - RNA, 14 nt, Homo sapiens
aaccacuucagcug

SEQ ID NO: 259271 - RNA, 22 nt, Homo sapiens
aaccacuucagcugacuuuucu

SEQ ID NO: 259272 - RNA, 16 nt, Homo sapiens
aaccagagcagcucac

SEQ ID NO: 259273 - RNA, 17 nt, Homo sapiens
aaccagagccugagugu

SEQ ID NO: 259274 - RNA, 21 nt, Homo sapiens
aaccagagccugaguguugcc

SEQ ID NO: 259275 - RNA, 18 nt, Homo sapiens
aaccaucaaaguggcaaa

SEQ ID NO: 259276 - RNA, 16 nt, Homo sapiens
aaccaucaucuugcca

SEQ ID NO: 259277 - RNA, 22 nt, Homo sapiens
aaccaugagaccacuguuauca

SEQ ID NO: 259278 - RNA, 23 nt, Homo sapiens
aacccaaagugugacucauuaaa

SEQ ID NO: 259279 - RNA, 19 nt, Homo sapiens
aacccaggaguucaggguc

SEQ ID NO: 259280 - RNA, 21 nt, Homo sapiens
aacccaggaguucagggucau

SEQ ID NO: 259281 - RNA, 14 nt, Homo sapiens
aacccaucuacccc

SEQ ID NO: 259282 - RNA, 22 nt, Homo sapiens
aaccccaaagaagaagugacca

SEQ ID NO: 259283 - RNA, 16 nt, Homo sapiens
aaccccaucucuacaa

SEQ ID NO: 259284 - RNA, 19 nt, Homo sapiens
aaccccaucucuacugaaa

SEQ ID NO: 259285 - RNA, 19 nt, Homo sapiens
aacccuauugguaaagaau

SEQ ID NO: 259286 - RNA, 14 nt, Homo sapiens
aaccggcuuugugg

SEQ ID NO: 259287 - RNA, 15 nt, Homo sapiens
aaccguacacugugu

SEQ ID NO: 259288 - RNA, 17 nt, Homo sapiens
aaccguacacuguguuu

SEQ ID NO: 259289 - RNA, 23 nt, Homo sapiens
aaccuacaguuuuaacuguggau

SEQ ID NO: 259290 - RNA, 13 nt, Homo sapiens
aaccucaaaguga

SEQ ID NO: 259291 - RNA, 16 nt, Homo sapiens
aaccucaaagugacua

SEQ ID NO: 259292 - RNA, 15 nt, Homo sapiens
aaccucauuaucagu

SEQ ID NO: 259293 - RNA, 18 nt, Homo sapiens
aaccucgagguuucucaa

SEQ ID NO: 259294 - RNA, 18 nt, Homo sapiens
aaccucuaugcaaucuga

SEQ ID NO: 259295 - RNA, 22 nt, Homo sapiens
aaccucuuugucuacaccauua

SEQ ID NO: 259296 - RNA, 21 nt, Homo sapiens
aaccugaauuaucuauuucau

SEQ ID NO: 259297 - RNA, 23 nt, Homo sapiens
aaccuguaaagcaggugcccagg

SEQ ID NO: 259298 - RNA, 12 nt, Homo sapiens
aaccugucucac

SEQ ID NO: 259299 - RNA, 22 nt, Homo sapiens
aaccuugaaaaaaaacagugga

SEQ ID NO: 259300 - RNA, 18 nt, Homo sapiens
aacgacgggggcaggugc

SEQ ID NO: 259301 - RNA, 15 nt, Homo sapiens
aacgcccugugucca

SEQ ID NO: 259302 - RNA, 18 nt, Homo sapiens
aacggugagcauuguggc

SEQ ID NO: 259303 - RNA, 16 nt, Homo sapiens
aacguaagacugugua

SEQ ID NO: 259304 - RNA, 14 nt, Homo sapiens
aacguggcacuggu

SEQ ID NO: 259305 - RNA, 12 nt, Homo sapiens
aacguggcugcu

SEQ ID NO: 259306 - RNA, 13 nt, Homo sapiens
aacuaaaauguuc

SEQ ID NO: 259307 - RNA, 15 nt, Homo sapiens
aacuaaaauguucua

SEQ ID NO: 259308 - RNA, 14 nt, Homo sapiens
aacuaaauaaagcu

SEQ ID NO: 259309 - RNA, 23 nt, Homo sapiens
aacuaacaggcuuagugauguaa

SEQ ID NO: 259310 - RNA, 17 nt, Homo sapiens
aacuaagaaauaugcac

SEQ ID NO: 259311 - RNA, 19 nt, Homo sapiens
aacuaagaaauaugcacaa

SEQ ID NO: 259312 - RNA, 17 nt, Homo sapiens
aacuaagaugcugccug

SEQ ID NO: 259313 - RNA, 14 nt, Homo sapiens
aacuacucagggaa

SEQ ID NO: 259314 - RNA, 19 nt, Homo sapiens
aacuagggaagauaauauu

SEQ ID NO: 259315 - RNA, 16 nt, Homo sapiens
aacuaguguugcuugg

SEQ ID NO: 259316 - RNA, 16 nt, Homo sapiens
aacuauguaacaugua

SEQ ID NO: 259317 - RNA, 16 nt, Homo sapiens
aacucaaacucuuaaa

SEQ ID NO: 259318 - RNA, 16 nt, Homo sapiens
aacucauuucuagcag

SEQ ID NO: 259319 - RNA, 21 nt, Homo sapiens
aacucccuuucaacagaauuc

SEQ ID NO: 259320 - RNA, 20 nt, Homo sapiens
aacucuacccuggcacuaua

SEQ ID NO: 259321 - RNA, 19 nt, Homo sapiens
aacucugauuaugaauaca

SEQ ID NO: 259322 - RNA, 14 nt, Homo sapiens
aacucugcauucua

SEQ ID NO: 259323 - RNA, 14 nt, Homo sapiens
aacucuuaaaaccc

SEQ ID NO: 259324 - RNA, 14 nt, Homo sapiens
aacucuugaccuca

SEQ ID NO: 259325 - RNA, 16 nt, Homo sapiens
aacucuugaccucagg

SEQ ID NO: 259326 - RNA, 18 nt, Homo sapiens
aacucuuggcuccaagug

SEQ ID NO: 259327 - RNA, 15 nt, Homo sapiens
aacugaacauuccag

SEQ ID NO: 259328 - RNA, 14 nt, Homo sapiens
aacugaagccagaa

SEQ ID NO: 259329 - RNA, 15 nt, Homo sapiens
aacugaccaguuguu

SEQ ID NO: 259330 - RNA, 22 nt, Homo sapiens
aacugcaggcccuggccucccc

SEQ ID NO: 259331 - RNA, 22 nt, Homo sapiens
aacugcaucaagaugugacaug

SEQ ID NO: 259332 - RNA, 20 nt, Homo sapiens
aacugcugaugcucaugguc

SEQ ID NO: 259333 - RNA, 22 nt, Homo sapiens
aacuggaaaguacguuaugaua

SEQ ID NO: 259334 - RNA, 19 nt, Homo sapiens
aacuggaggaguuccuuga

SEQ ID NO: 259335 - RNA, 20 nt, Homo sapiens
aacuggaggaguuccuugau

SEQ ID NO: 259336 - RNA, 21 nt, Homo sapiens
aacuggaggaguuccuugauc

SEQ ID NO: 259337 - RNA, 18 nt, Homo sapiens
aacuggguuccugcaaug

SEQ ID NO: 259338 - RNA, 21 nt, Homo sapiens
aacuguuggcaaggugacauu

SEQ ID NO: 259339 - RNA, 18 nt, Homo sapiens
aacuuacuuaguguuaug

SEQ ID NO: 259340 - RNA, 21 nt, Homo sapiens
aacuucaacguaagacugugu

SEQ ID NO: 259341 - RNA, 15 nt, Homo sapiens
aacuuccaauuuaca

SEQ ID NO: 259342 - RNA, 12 nt, Homo sapiens
aacuucugccuc

SEQ ID NO: 259343 - RNA, 18 nt, Homo sapiens
aacuucuugcuucuuucu

SEQ ID NO: 259344 - RNA, 14 nt, Homo sapiens
aacuugacccccuu

SEQ ID NO: 259345 - RNA, 20 nt, Homo sapiens
aacuugauguguuaucucuu

SEQ ID NO: 259346 - RNA, 23 nt, Homo sapiens
aacuugcacaaaaucacacagcc

SEQ ID NO: 259347 - RNA, 15 nt, Homo sapiens
aacuugcugcugagu

SEQ ID NO: 259348 - RNA, 22 nt, Homo sapiens
aacuuggaaauagugauuucca

SEQ ID NO: 259349 - RNA, 23 nt, Homo sapiens
aacuuggaaauagugauuuccac

SEQ ID NO: 259350 - RNA, 12 nt, Homo sapiens
aacuuuccuuca

SEQ ID NO: 259351 - RNA, 20 nt, Homo sapiens
aacuuuccuucauucaaccc

SEQ ID NO: 259352 - RNA, 23 nt, Homo sapiens
aacuuugacaaccaugagaccac

SEQ ID NO: 259353 - RNA, 20 nt, Homo sapiens
aacuuuguuuagcccaaaac

SEQ ID NO: 259354 - RNA, 23 nt, Homo sapiens
aacuuuguuuagcccaaaaccaa

SEQ ID NO: 259355 - RNA, 19 nt, Homo sapiens
aacuuuuugcaaggcauuu

SEQ ID NO: 259356 - RNA, 22 nt, Homo sapiens
aagaaaaguuuuguaaauuucu

SEQ ID NO: 259357 - RNA, 14 nt, Homo sapiens
aagaaaaucauauu

SEQ ID NO: 259358 - RNA, 14 nt, Homo sapiens
aagaaacauugccu

SEQ ID NO: 259359 - RNA, 15 nt, Homo sapiens
aagaaagacuuauca

SEQ ID NO: 259360 - RNA, 12 nt, Homo sapiens
aagaaaguguau

SEQ ID NO: 259361 - RNA, 23 nt, Homo sapiens
aagaacaugcuauccaaucucau

SEQ ID NO: 259362 - RNA, 21 nt, Homo sapiens
aagaaccuuuugagugccuua

SEQ ID NO: 259363 - RNA, 14 nt, Homo sapiens
aagaagauggauug

SEQ ID NO: 259364 - RNA, 15 nt, Homo sapiens
aagaagccacagacc

SEQ ID NO: 259365 - RNA, 22 nt, Homo sapiens
aagaagcccaggaaaggcucca

SEQ ID NO: 259366 - RNA, 16 nt, Homo sapiens
aagaagugaccaagga

SEQ ID NO: 259367 - RNA, 18 nt, Homo sapiens
aagaauguguuuaaacuu

SEQ ID NO: 259368 - RNA, 15 nt, Homo sapiens
aagaauguuuaugaa

SEQ ID NO: 259369 - RNA, 19 nt, Homo sapiens
aagaauugaaaaaccauuu

SEQ ID NO: 259370 - RNA, 16 nt, Homo sapiens
aagaauuuucagcaaa

SEQ ID NO: 259371 - RNA, 23 nt, Homo sapiens
aagaauuuuuauauccacuaaaa

SEQ ID NO: 259372 - RNA, 15 nt, Homo sapiens
aagacaucaagcaca

SEQ ID NO: 259373 - RNA, 20 nt, Homo sapiens
aagacccuuguggucccacc

SEQ ID NO: 259374 - RNA, 19 nt, Homo sapiens
aagaccugacaccuuucau

SEQ ID NO: 259375 - RNA, 20 nt, Homo sapiens
aagaccugacaccuuucaua

SEQ ID NO: 259376 - RNA, 18 nt, Homo sapiens
aagaccuucuccuucacc

SEQ ID NO: 259377 - RNA, 23 nt, Homo sapiens
aagacgucacccuccauucugca

SEQ ID NO: 259378 - RNA, 23 nt, Homo sapiens
aagacgugauuuugcuguagaag

SEQ ID NO: 259379 - RNA, 22 nt, Homo sapiens
aagacucuacccauauuacaga

SEQ ID NO: 259380 - RNA, 21 nt, Homo sapiens
aagacugaguacguugugcau

SEQ ID NO: 259381 - RNA, 22 nt, Homo sapiens
aagacugaguacguugugcauu

SEQ ID NO: 259382 - RNA, 18 nt, Homo sapiens
aagacugucagcuuccaa

SEQ ID NO: 259383 - RNA, 22 nt, Homo sapiens
aagacuguggcugcuagcacuu

SEQ ID NO: 259384 - RNA, 17 nt, Homo sapiens
aagacuuaucaacauuu

SEQ ID NO: 259385 - RNA, 20 nt, Homo sapiens
aagacuucaguauguuguca

SEQ ID NO: 259386 - RNA, 19 nt, Homo sapiens
aagacuuuggaaagacuuu

SEQ ID NO: 259387 - RNA, 19 nt, Homo sapiens
aagagaaaaaauauuuucc

SEQ ID NO: 259388 - RNA, 18 nt, Homo sapiens
aagagaaaauaagcagga

SEQ ID NO: 259389 - RNA, 16 nt, Homo sapiens
aagagaaccauaucaa

SEQ ID NO: 259390 - RNA, 18 nt, Homo sapiens
aagagaaguuuucuugac

SEQ ID NO: 259391 - RNA, 21 nt, Homo sapiens
aagagaaugaaauugcugaaa

SEQ ID NO: 259392 - RNA, 13 nt, Homo sapiens
aagagcaacaauc

SEQ ID NO: 259393 - RNA, 18 nt, Homo sapiens
aagagccccccacugcag

SEQ ID NO: 259394 - RNA, 19 nt, Homo sapiens
aagaggaaaaaaaguaaau

SEQ ID NO: 259395 - RNA, 21 nt, Homo sapiens
aagaggaaggccucuguggca

SEQ ID NO: 259396 - RNA, 14 nt, Homo sapiens
aagaggcagggucu

SEQ ID NO: 259397 - RNA, 19 nt, Homo sapiens
aagaguaggaagacuuugg

SEQ ID NO: 259398 - RNA, 17 nt, Homo sapiens
aagaguguguccacuga

SEQ ID NO: 259399 - RNA, 21 nt, Homo sapiens
aagaguguguccacugagaag

SEQ ID NO: 259400 - RNA, 19 nt, Homo sapiens
aagauaagaugaaucauuu

SEQ ID NO: 259401 - RNA, 22 nt, Homo sapiens
aagauacagugucugacuauaa

SEQ ID NO: 259402 - RNA, 24 nt, Homo sapiens
aagauacaugucuuucuccaggga

SEQ ID NO: 259403 - RNA, 18 nt, Homo sapiens
aagauaguugaaaagccu

SEQ ID NO: 259404 - RNA, 18 nt, Homo sapiens
aagaucaggccaacccca

SEQ ID NO: 259405 - RNA, 22 nt, Homo sapiens
aagaucaggccaaccccaaaga

SEQ ID NO: 259406 - RNA, 23 nt, Homo sapiens
aagaucaggccaaccccaaagaa

SEQ ID NO: 259407 - RNA, 18 nt, Homo sapiens
aagaucauugcugagaaa

SEQ ID NO: 259408 - RNA, 17 nt, Homo sapiens
aagaucguucucugccu

SEQ ID NO: 259409 - RNA, 17 nt, Homo sapiens
aagaucucggugcugaa

SEQ ID NO: 259410 - RNA, 24 nt, Homo sapiens
aagaucuuucaggacucuaccuca

SEQ ID NO: 259411 - RNA, 12 nt, Homo sapiens
aagaugaagcug

SEQ ID NO: 259412 - RNA, 14 nt, Homo sapiens
aagaugaaucacuu

SEQ ID NO: 259413 - RNA, 20 nt, Homo sapiens
aaagaccugacaccuuucau

SEQ ID NO: 259414 - RNA, 15 nt, Homo sapiens
aaagacuggauccaa

SEQ ID NO: 259415 - RNA, 17 nt, Homo sapiens
aaagacuguacaaagua

SEQ ID NO: 259416 - RNA, 20 nt, Homo sapiens
aaagacuguacaaaguagaa

SEQ ID NO: 259417 - RNA, 21 nt, Homo sapiens
aaagacuguagaagaaagagc

SEQ ID NO: 259418 - RNA, 19 nt, Homo sapiens
aaagacuuuccucuuaguc

SEQ ID NO: 259419 - RNA, 18 nt, Homo sapiens
aaagaggggaagagacuu

SEQ ID NO: 259420 - RNA, 13 nt, Homo sapiens
aaagauacaguua

SEQ ID NO: 259421 - RNA, 21 nt, Homo sapiens
aaagaucuuucaggacucuac

SEQ ID NO: 259422 - RNA, 22 nt, Homo sapiens
aaagaugcauuaucuaugauau

SEQ ID NO: 259423 - RNA, 23 nt, Homo sapiens
aaagauggccauauuaccccuuu

SEQ ID NO: 259424 - RNA, 21 nt, Homo sapiens
aaagauguuauacaaccauca

SEQ ID NO: 259425 - RNA, 17 nt, Homo sapiens
aaagauucuacaaagcu

SEQ ID NO: 259426 - RNA, 14 nt, Homo sapiens
aaagcaauaaccuc

SEQ ID NO: 259427 - RNA, 13 nt, Homo sapiens
aaagcagugcaug

SEQ ID NO: 259428 - RNA, 23 nt, Homo sapiens
aaagcagugcaugcugucccuua

SEQ ID NO: 259429 - RNA, 19 nt, Homo sapiens
aaagcaguggacaccagga

SEQ ID NO: 259430 - RNA, 14 nt, Homo sapiens
aaagcaugugagac

SEQ ID NO: 259431 - RNA, 18 nt, Homo sapiens
aaagccauguuuauuaca

SEQ ID NO: 259432 - RNA, 21 nt, Homo sapiens
aaagcgugguggacaugcaca

SEQ ID NO: 259433 - RNA, 11 nt, Homo sapiens
aaagcugccag

SEQ ID NO: 259434 - RNA, 17 nt, Homo sapiens
aaagcugcugacagugu

SEQ ID NO: 259435 - RNA, 20 nt, Homo sapiens
aaagcuggagucugucaaug

SEQ ID NO: 259436 - RNA, 17 nt, Homo sapiens
aaagcuguuaggcucac

SEQ ID NO: 259437 - RNA, 12 nt, Homo sapiens
aaagcuucacag

SEQ ID NO: 259438 - RNA, 19 nt, Homo sapiens
aaagcuugagcugcucugc

SEQ ID NO: 259439 - RNA, 16 nt, Homo sapiens
aaagcuuugugcagau

SEQ ID NO: 259440 - RNA, 13 nt, Homo sapiens
aaaggaggggaua

SEQ ID NO: 259441 - RNA, 16 nt, Homo sapiens
aaaggagggucaggaa

SEQ ID NO: 259442 - RNA, 18 nt, Homo sapiens
aaaggaugcacagaguug

SEQ ID NO: 259443 - RNA, 16 nt, Homo sapiens
aaaggaugcccaaaga

SEQ ID NO: 259444 - RNA, 13 nt, Homo sapiens
aaaggcaguuuuc

SEQ ID NO: 259445 - RNA, 16 nt, Homo sapiens
aaagggauuuucagcc

SEQ ID NO: 259446 - RNA, 16 nt, Homo sapiens
aaaggggccucuccuu

SEQ ID NO: 259447 - RNA, 11 nt, Homo sapiens
aaaggugacca

SEQ ID NO: 259448 - RNA, 16 nt, Homo sapiens
aaagguugaagcacca

SEQ ID NO: 259449 - RNA, 15 nt, Homo sapiens
aaaguaaacgauaaa

SEQ ID NO: 259450 - RNA, 13 nt, Homo sapiens
aaaguaagccaug

SEQ ID NO: 259451 - RNA, 14 nt, Homo sapiens
aaaguacaaaaauu

SEQ ID NO: 259452 - RNA, 14 nt, Homo sapiens
aaaguagacuucau

SEQ ID NO: 259453 - RNA, 18 nt, Homo sapiens
aaaguaggaguggcugac

SEQ ID NO: 259454 - RNA, 16 nt, Homo sapiens
aaaguaguccugugaa

SEQ ID NO: 259455 - RNA, 15 nt, Homo sapiens
aaagucauugcugac

SEQ ID NO: 259456 - RNA, 18 nt, Homo sapiens
aaagucuacuuuaccuaa

SEQ ID NO: 259457 - RNA, 14 nt, Homo sapiens
aaagugacuauuca

SEQ ID NO: 259458 - RNA, 15 nt, Homo sapiens
aaagugacuauucag

SEQ ID NO: 259459 - RNA, 21 nt, Homo sapiens
aaagugacucacuuaucccaa

SEQ ID NO: 259460 - RNA, 23 nt, Homo sapiens
aaagugacucacuuaucccaaga

SEQ ID NO: 259461 - RNA, 16 nt, Homo sapiens
aaagugauccauacuu

SEQ ID NO: 259462 - RNA, 16 nt, Homo sapiens
aaaguguucauuguuu

SEQ ID NO: 259463 - RNA, 22 nt, Homo sapiens
aaaguucugacuugacuuuagu

SEQ ID NO: 259464 - RNA, 17 nt, Homo sapiens
aaaguuucucuuuucaa

SEQ ID NO: 259465 - RNA, 23 nt, Homo sapiens
aaaguuuuaugagaaaugccagu

SEQ ID NO: 259466 - RNA, 16 nt, Homo sapiens
aaauaaaaauauuaaa

SEQ ID NO: 259467 - RNA, 12 nt, Homo sapiens
aaauaacacugu

SEQ ID NO: 259468 - RNA, 15 nt, Homo sapiens
aaauaacacuguacu

SEQ ID NO: 259469 - RNA, 19 nt, Homo sapiens
aaauaacacuguacugcaa

SEQ ID NO: 259470 - RNA, 17 nt, Homo sapiens
aaauaaucaguguuucc

SEQ ID NO: 259471 - RNA, 15 nt, Homo sapiens
aaauacagucuucca

SEQ ID NO: 259472 - RNA, 21 nt, Homo sapiens
aaauacagucuuccauuugca

SEQ ID NO: 259473 - RNA, 20 nt, Homo sapiens
aaauacaugucccccuguga

SEQ ID NO: 259474 - RNA, 15 nt, Homo sapiens
aaauaccagccagua

SEQ ID NO: 259475 - RNA, 17 nt, Homo sapiens
aaauagagccugaggga

SEQ ID NO: 259476 - RNA, 18 nt, Homo sapiens
aaauagcaugccuuucuc

SEQ ID NO: 259477 - RNA, 24 nt, Homo sapiens
aaauagcauguccuaaugcuugcu

SEQ ID NO: 259478 - RNA, 20 nt, Homo sapiens
aaauauaaaacugcguuaaa

SEQ ID NO: 259479 - RNA, 17 nt, Homo sapiens
aaauauaauucuguuuc

SEQ ID NO: 259480 - RNA, 14 nt, Homo sapiens
aaauauaauugaca

SEQ ID NO: 259481 - RNA, 17 nt, Homo sapiens
aaauauguggaguucau

SEQ ID NO: 259482 - RNA, 15 nt, Homo sapiens
aaauauuucccucac

SEQ ID NO: 259483 - RNA, 16 nt, Homo sapiens
aaauauuuugucuaaa

SEQ ID NO: 259484 - RNA, 17 nt, Homo sapiens
aaaucaaguauuggcaa

SEQ ID NO: 259485 - RNA, 15 nt, Homo sapiens
aaaucauacuuucuc

SEQ ID NO: 259486 - RNA, 18 nt, Homo sapiens
aaaucauacuuucucuuc

SEQ ID NO: 259487 - RNA, 20 nt, Homo sapiens
aaaucauacuuucucuucaa

SEQ ID NO: 259488 - RNA, 21 nt, Homo sapiens
aaaucauacuuuuucuuugaa

SEQ ID NO: 259489 - RNA, 13 nt, Homo sapiens
aaaucauagcugg

SEQ ID NO: 259490 - RNA, 20 nt, Homo sapiens
aaaucaugguauucuucuga

SEQ ID NO: 259491 - RNA, 15 nt, Homo sapiens
aaaucccuccuucau

SEQ ID NO: 259492 - RNA, 11 nt, Homo sapiens
aaauccuugau

SEQ ID NO: 259493 - RNA, 12 nt, Homo sapiens
aaauccuugaua

SEQ ID NO: 259494 - RNA, 14 nt, Homo sapiens
aaaucguccaggga

SEQ ID NO: 259495 - RNA, 16 nt, Homo sapiens
aaaucuagaagacugu

SEQ ID NO: 259496 - RNA, 12 nt, Homo sapiens
aaaucuaugaaa

SEQ ID NO: 259497 - RNA, 20 nt, Homo sapiens
aaaucugcaccccacuucag

SEQ ID NO: 259498 - RNA, 23 nt, Homo sapiens
aaaucuuuuaauacaguuuauua

SEQ ID NO: 259499 - RNA, 21 nt, Homo sapiens
aaaucuuuuuuguucaaagau

SEQ ID NO: 259500 - RNA, 13 nt, Homo sapiens
aaaugaaagugag

SEQ ID NO: 259501 - RNA, 22 nt, Homo sapiens
aaaugacaaccugaauuaucua

SEQ ID NO: 259502 - RNA, 14 nt, Homo sapiens
aaaugagaacauga

SEQ ID NO: 259503 - RNA, 15 nt, Homo sapiens
aaaugagaacaugaa

SEQ ID NO: 259504 - RNA, 20 nt, Homo sapiens
aaaugagaagucucacugau

SEQ ID NO: 259505 - RNA, 18 nt, Homo sapiens
aaaugauuucacagugug

SEQ ID NO: 259506 - RNA, 11 nt, Homo sapiens
aaaugcaacuu

SEQ ID NO: 259507 - RNA, 23 nt, Homo sapiens
aaaugcccagcuuaaaggggcua

SEQ ID NO: 259508 - RNA, 21 nt, Homo sapiens
aaaugcccaucuaugucccuu

SEQ ID NO: 259509 - RNA, 16 nt, Homo sapiens
aaaugcugguuuuuca

SEQ ID NO: 259510 - RNA, 23 nt, Homo sapiens
aaaugcugguuuuucaguuuuca

SEQ ID NO: 259511 - RNA, 22 nt, Homo sapiens
aaaugcuguauuagucacagag

SEQ ID NO: 259512 - RNA, 15 nt, Homo sapiens
aaaugcuuuuccuca

SEQ ID NO: 259513 - RNA, 18 nt, Homo sapiens
aaaugggggugcauuuga

SEQ ID NO: 259514 - RNA, 13 nt, Homo sapiens
aaauguacagcaa

SEQ ID NO: 259515 - RNA, 23 nt, Homo sapiens
aaauguacuuuuucuuccagaaa

SEQ ID NO: 259516 - RNA, 22 nt, Homo sapiens
aaaugucauuguucuugugaac

SEQ ID NO: 259517 - RNA, 23 nt, Homo sapiens
aaaugucuuuccuuuugcucuua

SEQ ID NO: 259518 - RNA, 13 nt, Homo sapiens
aaauguggauuaa

SEQ ID NO: 259519 - RNA, 16 nt, Homo sapiens
aaauuaacaugugcca

SEQ ID NO: 259520 - RNA, 16 nt, Homo sapiens
aagaauguuuaugaau

SEQ ID NO: 259521 - RNA, 13 nt, Homo sapiens
aagaauuuaauga

SEQ ID NO: 259522 - RNA, 22 nt, Homo sapiens
aagaauuuucagcaaaguacaa

SEQ ID NO: 259523 - RNA, 21 nt, Homo sapiens
aagaauuuuuauauccacuaa

SEQ ID NO: 259524 - RNA, 19 nt, Homo sapiens
aagaauuuuugaagugacu

SEQ ID NO: 259525 - RNA, 22 nt, Homo sapiens
aagacaccaaauugaacucacu

SEQ ID NO: 259526 - RNA, 23 nt, Homo sapiens
aagacaggacccugggaccacag

SEQ ID NO: 259527 - RNA, 22 nt, Homo sapiens
aagacauggggaggaaggacaa

SEQ ID NO: 259528 - RNA, 14 nt, Homo sapiens
aagacccaggaggc

SEQ ID NO: 259529 - RNA, 13 nt, Homo sapiens
aagacuacugaau

SEQ ID NO: 259530 - RNA, 11 nt, Homo sapiens
aagacugacca

SEQ ID NO: 259531 - RNA, 19 nt, Homo sapiens
aagacugucagcuuccaaa

SEQ ID NO: 259532 - RNA, 22 nt, Homo sapiens
aagacuucaguauguugucaaa

SEQ ID NO: 259533 - RNA, 13 nt, Homo sapiens
aagacuucauccc

SEQ ID NO: 259534 - RNA, 16 nt, Homo sapiens
aagacuuuucuuucag

SEQ ID NO: 259535 - RNA, 14 nt, Homo sapiens
aagagaaaugagcu

SEQ ID NO: 259536 - RNA, 15 nt, Homo sapiens
aagagaaaugagcug

SEQ ID NO: 259537 - RNA, 15 nt, Homo sapiens
aagagaaaugagcuu

SEQ ID NO: 259538 - RNA, 22 nt, Homo sapiens
aagagacuuggaaaugggagac

SEQ ID NO: 259539 - RNA, 21 nt, Homo sapiens
aagagauaggaaccagcagga

SEQ ID NO: 259540 - RNA, 16 nt, Homo sapiens
aagagccccccacugc

SEQ ID NO: 259541 - RNA, 18 nt, Homo sapiens
aagagccgggaacagaga

SEQ ID NO: 259542 - RNA, 19 nt, Homo sapiens
aagagccgggaacagagaa

SEQ ID NO: 259543 - RNA, 19 nt, Homo sapiens
aagaggcaccacuaaaaga

SEQ ID NO: 259544 - RNA, 20 nt, Homo sapiens
aagagggagggagggcucca

SEQ ID NO: 259545 - RNA, 16 nt, Homo sapiens
aagagggucugaggaa

SEQ ID NO: 259546 - RNA, 20 nt, Homo sapiens
aagagggugauugcuggggc

SEQ ID NO: 259547 - RNA, 21 nt, Homo sapiens
aagagguuuuaaaaaaauccc

SEQ ID NO: 259548 - RNA, 18 nt, Homo sapiens
aagaguaggaagacuuug

SEQ ID NO: 259549 - RNA, 14 nt, Homo sapiens
aagagucucuauua

SEQ ID NO: 259550 - RNA, 14 nt, Homo sapiens
aagaguggaaccaa

SEQ ID NO: 259551 - RNA, 14 nt, Homo sapiens
aagauaaaugugcu

SEQ ID NO: 259552 - RNA, 19 nt, Homo sapiens
aagauaaaugugcugaaug

SEQ ID NO: 259553 - RNA, 17 nt, Homo sapiens
aagauacagaacucuuu

SEQ ID NO: 259554 - RNA, 13 nt, Homo sapiens
aagauaguugaaa

SEQ ID NO: 259555 - RNA, 19 nt, Homo sapiens
aagaucaacgccucacuga

SEQ ID NO: 259556 - RNA, 20 nt, Homo sapiens
aagaugaaacaucauuucaa

SEQ ID NO: 259557 - RNA, 22 nt, Homo sapiens
aagaugaaucauuuaauaccgu

SEQ ID NO: 259558 - RNA, 22 nt, Homo sapiens
aagaugaaugagcaaaaccaaa

SEQ ID NO: 259559 - RNA, 18 nt, Homo sapiens
aagaugagagaacuggag

SEQ ID NO: 259560 - RNA, 14 nt, Homo sapiens
aagaugaucaucuc

SEQ ID NO: 259561 - RNA, 22 nt, Homo sapiens
aagaugcuucucacugccaugc

SEQ ID NO: 259562 - RNA, 12 nt, Homo sapiens
aagauggcauaa

SEQ ID NO: 259563 - RNA, 21 nt, Homo sapiens
aagauggcauaaccugucuca

SEQ ID NO: 259564 - RNA, 17 nt, Homo sapiens
aagauguuauacaacca

SEQ ID NO: 259565 - RNA, 11 nt, Homo sapiens
aagauguuggg

SEQ ID NO: 259566 - RNA, 18 nt, Homo sapiens
aagauguuucaaaaaauc

SEQ ID NO: 259567 - RNA, 20 nt, Homo sapiens
aagauucauauuuacuucuu

SEQ ID NO: 259568 - RNA, 22 nt, Homo sapiens
aagaugaaucacuuaauaccgu

SEQ ID NO: 259569 - RNA, 14 nt, Homo sapiens
aagaugaaucauuu

SEQ ID NO: 259570 - RNA, 20 nt, Homo sapiens
aagaugcauuaucuaugaua

SEQ ID NO: 259571 - RNA, 21 nt, Homo sapiens
aagaugcgcaggcugaucacc

SEQ ID NO: 259572 - RNA, 20 nt, Homo sapiens
aagaugcuucucacugccau

SEQ ID NO: 259573 - RNA, 20 nt, Homo sapiens
aagauggaugcgacccaaga

SEQ ID NO: 259574 - RNA, 20 nt, Homo sapiens
aagauggcacuuauaaccaa

SEQ ID NO: 259575 - RNA, 14 nt, Homo sapiens
aagaugucauccca

SEQ ID NO: 259576 - RNA, 22 nt, Homo sapiens
aagauguggggaaaauucucau

SEQ ID NO: 259577 - RNA, 21 nt, Homo sapiens
aagauuucagauuugugacca

SEQ ID NO: 259578 - RNA, 14 nt, Homo sapiens
aagauuuggugggu

SEQ ID NO: 259579 - RNA, 13 nt, Homo sapiens
aagcacacuugac

SEQ ID NO: 259580 - RNA, 13 nt, Homo sapiens
aagcacagcaccc

SEQ ID NO: 259581 - RNA, 13 nt, Homo sapiens
aagcacaucugca

SEQ ID NO: 259582 - RNA, 21 nt, Homo sapiens
aagcagaaaauuguacaaccu

SEQ ID NO: 259583 - RNA, 14 nt, Homo sapiens
aagcagaagccaua

SEQ ID NO: 259584 - RNA, 15 nt, Homo sapiens
aagcagaccacugau

SEQ ID NO: 259585 - RNA, 20 nt, Homo sapiens
aagcaggaaaugaaaauguc

SEQ ID NO: 259586 - RNA, 19 nt, Homo sapiens
aagcaggacuaaaugucua

SEQ ID NO: 259587 - RNA, 22 nt, Homo sapiens
aagcaggcgugaccugccaggc

SEQ ID NO: 259588 - RNA, 16 nt, Homo sapiens
aagcagguucuuguua

SEQ ID NO: 259589 - RNA, 20 nt, Homo sapiens
aagcagucgugccugugucc

SEQ ID NO: 259590 - RNA, 20 nt, Homo sapiens
aagcagucuucucuucugcc

SEQ ID NO: 259591 - RNA, 22 nt, Homo sapiens
aagcagugcaugcugucccuua

SEQ ID NO: 259592 - RNA, 15 nt, Homo sapiens
aagcaguuaguuccu

SEQ ID NO: 259593 - RNA, 15 nt, Homo sapiens
aagcauaaugacaga

SEQ ID NO: 259594 - RNA, 20 nt, Homo sapiens
aagcaucauuauuugcagag

SEQ ID NO: 259595 - RNA, 17 nt, Homo sapiens
aagcaugugagacuggu

SEQ ID NO: 259596 - RNA, 13 nt, Homo sapiens
aagcauucuucaa

SEQ ID NO: 259597 - RNA, 18 nt, Homo sapiens
aagcauugagcaaagggg

SEQ ID NO: 259598 - RNA, 23 nt, Homo sapiens
aagcauuuuauaaaucgcuuuug

SEQ ID NO: 259599 - RNA, 23 nt, Homo sapiens
aagccaauaccguguggcccaag

SEQ ID NO: 259600 - RNA, 22 nt, Homo sapiens
aagccagggcuggagaacaaga

SEQ ID NO: 259601 - RNA, 17 nt, Homo sapiens
aagccauugagcucucc

SEQ ID NO: 259602 - RNA, 21 nt, Homo sapiens
aagcccaaguucaugcagcug

SEQ ID NO: 259603 - RNA, 21 nt, Homo sapiens
aagcccacauauaaauguacu

SEQ ID NO: 259604 - RNA, 15 nt, Homo sapiens
aagcccuuuacuuga

SEQ ID NO: 259605 - RNA, 15 nt, Homo sapiens
aagccgugauuuuca

SEQ ID NO: 259606 - RNA, 20 nt, Homo sapiens
aagccuagcccuucucucau

SEQ ID NO: 259607 - RNA, 21 nt, Homo sapiens
aagccucagagaauugcugau

SEQ ID NO: 259608 - RNA, 13 nt, Homo sapiens
aagccuugguaaa

SEQ ID NO: 259609 - RNA, 22 nt, Homo sapiens
aagccuugguaaaauaaucagu

SEQ ID NO: 259610 - RNA, 17 nt, Homo sapiens
aagccuuuggcucuucu

SEQ ID NO: 259611 - RNA, 13 nt, Homo sapiens
aagcgauccuccu

SEQ ID NO: 259612 - RNA, 22 nt, Homo sapiens
aagcgugguggacaugcacagc

SEQ ID NO: 259613 - RNA, 20 nt, Homo sapiens
aagcuaaaauuagaugaacu

SEQ ID NO: 259614 - RNA, 22 nt, Homo sapiens
aagcuaaaauuagaugaacuca

SEQ ID NO: 259615 - RNA, 18 nt, Homo sapiens
aagcucaucucagcuccu

SEQ ID NO: 259616 - RNA, 22 nt, Homo sapiens
aagcucaucucagcuccugaaa

SEQ ID NO: 259617 - RNA, 23 nt, Homo sapiens
aagcucugcuccucuccccagca

SEQ ID NO: 259618 - RNA, 17 nt, Homo sapiens
aagcuggagucugucaa

SEQ ID NO: 259619 - RNA, 16 nt, Homo sapiens
aagcugggagaaccaa

SEQ ID NO: 259620 - RNA, 21 nt, Homo sapiens
aagcugggagaaccaaaaaga

SEQ ID NO: 259621 - RNA, 14 nt, Homo sapiens
aagcugggagcaca

SEQ ID NO: 259622 - RNA, 21 nt, Homo sapiens
aagcugucccucacuguugaa

SEQ ID NO: 259623 - RNA, 20 nt, Homo sapiens
aagcuuacaugccuaccaau

SEQ ID NO: 259624 - RNA, 17 nt, Homo sapiens
aagcuuccuuggcuuuu

SEQ ID NO: 259625 - RNA, 22 nt, Homo sapiens
aagcuuucauguaaacugugca

SEQ ID NO: 259626 - RNA, 12 nt, Homo sapiens
aaggaaacuggg

SEQ ID NO: 259627 - RNA, 18 nt, Homo sapiens
aaggaaacuggguuccug

SEQ ID NO: 259628 - RNA, 17 nt, Homo sapiens
aaggaaagaggcucugg

SEQ ID NO: 259629 - RNA, 15 nt, Homo sapiens
aaggaaaucucaccc

SEQ ID NO: 259630 - RNA, 19 nt, Homo sapiens
aaggaacaugaaaagcaaa

SEQ ID NO: 259631 - RNA, 17 nt, Homo sapiens
aaggaagacuucauccc

SEQ ID NO: 259632 - RNA, 14 nt, Homo sapiens
aaggaagcacaugc

SEQ ID NO: 259633 - RNA, 18 nt, Homo sapiens
aaggacacuagaagauuu

SEQ ID NO: 259634 - RNA, 23 nt, Homo sapiens
aaggacgugggccuccagaguug

SEQ ID NO: 259635 - RNA, 14 nt, Homo sapiens
aaggagagcauagg

SEQ ID NO: 259636 - RNA, 19 nt, Homo sapiens
aaggagaggauuuggcucg

SEQ ID NO: 259637 - RNA, 13 nt, Homo sapiens
aaggagauuuaca

SEQ ID NO: 259638 - RNA, 16 nt, Homo sapiens
aaggagccccauuccu

SEQ ID NO: 259639 - RNA, 15 nt, Homo sapiens
aaggagcugauacuu

SEQ ID NO: 259640 - RNA, 20 nt, Homo sapiens
aaggagggcagaucacuuca

SEQ ID NO: 259641 - RNA, 23 nt, Homo sapiens
aaggauacuguaacacuuuacaa

SEQ ID NO: 259642 - RNA, 19 nt, Homo sapiens
aaggaucccaugagcuccu

SEQ ID NO: 259643 - RNA, 18 nt, Homo sapiens
aaggauccuccaaaguca

SEQ ID NO: 259644 - RNA, 23 nt, Homo sapiens
aaggaugaucuaggaagacuuug

SEQ ID NO: 259645 - RNA, 15 nt, Homo sapiens
aaggaugcccaaaga

SEQ ID NO: 259646 - RNA, 23 nt, Homo sapiens
aaggauggagccagcucugcauu

SEQ ID NO: 259647 - RNA, 15 nt, Homo sapiens
aaggauggaugcaga

SEQ ID NO: 259648 - RNA, 14 nt, Homo sapiens
aaggaugggaagga

SEQ ID NO: 259649 - RNA, 17 nt, Homo sapiens
aaggaugggaaggaggg

SEQ ID NO: 259650 - RNA, 21 nt, Homo sapiens
aaggcagggccugauuuaucu

SEQ ID NO: 259651 - RNA, 14 nt, Homo sapiens
aaggccucuaggga

SEQ ID NO: 259652 - RNA, 13 nt, Homo sapiens
aaggccucugugg

SEQ ID NO: 259653 - RNA, 16 nt, Homo sapiens
aaggccuucuucccaa

SEQ ID NO: 259654 - RNA, 18 nt, Homo sapiens
aaggcuggcagugacaga

SEQ ID NO: 259655 - RNA, 20 nt, Homo sapiens
aaggcugucaauuacaggaa

SEQ ID NO: 259656 - RNA, 18 nt, Homo sapiens
aagggacaccaagccuug

SEQ ID NO: 259657 - RNA, 17 nt, Homo sapiens
aagggacauauucauuu

SEQ ID NO: 259658 - RNA, 20 nt, Homo sapiens
aagggccagcuggaggugaa

SEQ ID NO: 259659 - RNA, 19 nt, Homo sapiens
aagggcuuggacucaagca

SEQ ID NO: 259660 - RNA, 18 nt, Homo sapiens
aaggggagaguaacccug

SEQ ID NO: 259661 - RNA, 18 nt, Homo sapiens
aaggggcccaaauucuuu

SEQ ID NO: 259662 - RNA, 16 nt, Homo sapiens
aaggggcccaagagag

SEQ ID NO: 259663 - RNA, 22 nt, Homo sapiens
aaggguucaccaggucagggag

SEQ ID NO: 259664 - RNA, 20 nt, Homo sapiens
aaggguucagagacucaggg

SEQ ID NO: 259665 - RNA, 17 nt, Homo sapiens
aaggugaaccaugucag

SEQ ID NO: 259666 - RNA, 17 nt, Homo sapiens
aaggugagcaaagggcu

SEQ ID NO: 259667 - RNA, 24 nt, Homo sapiens
aaggugugcucugaucauccacug

SEQ ID NO: 259668 - RNA, 23 nt, Homo sapiens
aagguuuuauaaggcugauguca

SEQ ID NO: 259669 - RNA, 17 nt, Homo sapiens
aagguuuuuacugugag

SEQ ID NO: 259670 - RNA, 20 nt, Homo sapiens
aaguaaaacuugcugccuga

SEQ ID NO: 259671 - RNA, 20 nt, Homo sapiens
aaguaaauauagcucaggua

SEQ ID NO: 259672 - RNA, 22 nt, Homo sapiens
aaguaagccauguaucucagga

SEQ ID NO: 259673 - RNA, 15 nt, Homo sapiens
aaguaaggcaugguu

SEQ ID NO: 259674 - RNA, 17 nt, Homo sapiens
aaguaaguuugauuuca

SEQ ID NO: 259675 - RNA, 18 nt, Homo sapiens
aaguaauccaccugccuc

SEQ ID NO: 259676 - RNA, 22 nt, Homo sapiens
aaguagacuucauuuuuccuaa

SEQ ID NO: 259677 - RNA, 17 nt, Homo sapiens
aaguaucccuacuguaa

SEQ ID NO: 259678 - RNA, 19 nt, Homo sapiens
aaguauugcaucuguauaa

SEQ ID NO: 259679 - RNA, 16 nt, Homo sapiens
aaguauuggcaaagau

SEQ ID NO: 259680 - RNA, 14 nt, Homo sapiens
aagucaaagacauu

SEQ ID NO: 259681 - RNA, 14 nt, Homo sapiens
aagucaaccugccu

SEQ ID NO: 259682 - RNA, 12 nt, Homo sapiens
aagucacacagu

SEQ ID NO: 259683 - RNA, 13 nt, Homo sapiens
aagucacugcaca

SEQ ID NO: 259684 - RNA, 16 nt, Homo sapiens
aagucauaccaaugaa

SEQ ID NO: 259685 - RNA, 20 nt, Homo sapiens
aagucauccucccaccucag

SEQ ID NO: 259686 - RNA, 13 nt, Homo sapiens
aagucaucuugcu

SEQ ID NO: 259687 - RNA, 15 nt, Homo sapiens
aagucaucuugcuac

SEQ ID NO: 259688 - RNA, 15 nt, Homo sapiens
aagucauugcugaca

SEQ ID NO: 259689 - RNA, 21 nt, Homo sapiens
aagucuguuuuaugacuucau

SEQ ID NO: 259690 - RNA, 15 nt, Homo sapiens
aagugagaacaaauu

SEQ ID NO: 259691 - RNA, 20 nt, Homo sapiens
aagugagacccugucucaaa

SEQ ID NO: 259692 - RNA, 22 nt, Homo sapiens
aagugagacccugucucaaaaa

SEQ ID NO: 259693 - RNA, 20 nt, Homo sapiens
aagugauccucccaccucag

SEQ ID NO: 259694 - RNA, 15 nt, Homo sapiens
aagugcucuuuccac

SEQ ID NO: 259695 - RNA, 21 nt, Homo sapiens
aagugcugggauuacaggugu

SEQ ID NO: 259696 - RNA, 23 nt, Homo sapiens
aagugcugggauuacagguguga

SEQ ID NO: 259697 - RNA, 11 nt, Homo sapiens
aagugcuguuu

SEQ ID NO: 259698 - RNA, 19 nt, Homo sapiens
aagugguacuaacuuuccu

SEQ ID NO: 259699 - RNA, 15 nt, Homo sapiens
aagugugugaucugu

SEQ ID NO: 259700 - RNA, 21 nt, Homo sapiens
aaguucucaauguucuuuucc

SEQ ID NO: 259701 - RNA, 17 nt, Homo sapiens
aaguugcugaugaacuc

SEQ ID NO: 259702 - RNA, 20 nt, Homo sapiens
aaguugcugaugaacucuua

SEQ ID NO: 259703 - RNA, 20 nt, Homo sapiens
aaguuuaauauuaaagccau

SEQ ID NO: 259704 - RNA, 16 nt, Homo sapiens
aaguuuaauugacuua

SEQ ID NO: 259705 - RNA, 23 nt, Homo sapiens
aaguuuuuauggcuuuugugcau

SEQ ID NO: 259706 - RNA, 12 nt, Homo sapiens
aauaaaacaaca

SEQ ID NO: 259707 - RNA, 14 nt, Homo sapiens
aauaaaauuguaca

SEQ ID NO: 259708 - RNA, 20 nt, Homo sapiens
aauaaaccaucaucuugcca

SEQ ID NO: 259709 - RNA, 23 nt, Homo sapiens
aauaaaccuuugguaaucuucaa

SEQ ID NO: 259710 - RNA, 14 nt, Homo sapiens
aauaaagcuugcaa

SEQ ID NO: 259711 - RNA, 18 nt, Homo sapiens
aauaaaguucuguacuca

SEQ ID NO: 259712 - RNA, 16 nt, Homo sapiens
aauaaauguacauuaa

SEQ ID NO: 259713 - RNA, 22 nt, Homo sapiens
aauaaauucccuggccuuucau

SEQ ID NO: 259714 - RNA, 14 nt, Homo sapiens
aauaaauuugcaaa

SEQ ID NO: 259715 - RNA, 13 nt, Homo sapiens
aauaacacuguac

SEQ ID NO: 259716 - RNA, 13 nt, Homo sapiens
aauaaccaauccu

SEQ ID NO: 259717 - RNA, 15 nt, Homo sapiens
aauaaccauugucau

SEQ ID NO: 259718 - RNA, 17 nt, Homo sapiens
aauaaccauugucauaa

SEQ ID NO: 259719 - RNA, 23 nt, Homo sapiens
aauaacuaaaagguaugcaauca

SEQ ID NO: 259720 - RNA, 16 nt, Homo sapiens
aauaagcagaagccau

SEQ ID NO: 259721 - RNA, 15 nt, Homo sapiens
aauaaauuugcaaau

SEQ ID NO: 259722 - RNA, 18 nt, Homo sapiens
aauaaauuuguaugcuca

SEQ ID NO: 259723 - RNA, 22 nt, Homo sapiens
aauaaauuuguaugcucaauua

SEQ ID NO: 259724 - RNA, 12 nt, Homo sapiens
aauaacacugua

SEQ ID NO: 259725 - RNA, 17 nt, Homo sapiens
aauaacacuguacugca

SEQ ID NO: 259726 - RNA, 19 nt, Homo sapiens
aauaacacuguacugcaau

SEQ ID NO: 259727 - RNA, 13 nt, Homo sapiens
aauaacauguaau

SEQ ID NO: 259728 - RNA, 16 nt, Homo sapiens
aauaagaugaaucacu

SEQ ID NO: 259729 - RNA, 17 nt, Homo sapiens
aauaagcaggacagagg

SEQ ID NO: 259730 - RNA, 23 nt, Homo sapiens
aauaagcaggcgugaccugccag

SEQ ID NO: 259731 - RNA, 13 nt, Homo sapiens
aauaagcugccuu

SEQ ID NO: 259732 - RNA, 15 nt, Homo sapiens
aauaaguacugugua

SEQ ID NO: 259733 - RNA, 19 nt, Homo sapiens
aauaaguacuguguacaga

SEQ ID NO: 259734 - RNA, 20 nt, Homo sapiens
aauaauaagaggugcuacug

SEQ ID NO: 259735 - RNA, 13 nt, Homo sapiens
aauaauccagaaa

SEQ ID NO: 259736 - RNA, 15 nt, Homo sapiens
aauaaugacauaaaa

SEQ ID NO: 259737 - RNA, 14 nt, Homo sapiens
aauaauguacaucu

SEQ ID NO: 259738 - RNA, 22 nt, Homo sapiens
aauaauuagguauuuucuccaa

SEQ ID NO: 259739 - RNA, 23 nt, Homo sapiens
aauacagauagauauaugcucug

SEQ ID NO: 259740 - RNA, 18 nt, Homo sapiens
aauacagauauaagaaau

SEQ ID NO: 259741 - RNA, 14 nt, Homo sapiens
aauacaguaucuca

SEQ ID NO: 259742 - RNA, 21 nt, Homo sapiens
aauacagucuuccauuugcaa

SEQ ID NO: 259743 - RNA, 21 nt, Homo sapiens
aauacaguuuauuauguacua

SEQ ID NO: 259744 - RNA, 22 nt, Homo sapiens
aauacauaaaguaugugcauau

SEQ ID NO: 259745 - RNA, 24 nt, Homo sapiens
aauacauaaaguaugugcauauuu

SEQ ID NO: 259746 - RNA, 12 nt, Homo sapiens
aauacauucacc

SEQ ID NO: 259747 - RNA, 14 nt, Homo sapiens
aauacauucaccca

SEQ ID NO: 259748 - RNA, 18 nt, Homo sapiens
aauaccaaaauuauuuca

SEQ ID NO: 259749 - RNA, 17 nt, Homo sapiens
aauaccguguggcccaa

SEQ ID NO: 259750 - RNA, 18 nt, Homo sapiens
aauaccguguggcccaag

SEQ ID NO: 259751 - RNA, 18 nt, Homo sapiens
aauacugccaaccagagc

SEQ ID NO: 259752 - RNA, 23 nt, Homo sapiens
aauacugccaaccagagcagcuc

SEQ ID NO: 259753 - RNA, 12 nt, Homo sapiens
aauagauaugaa

SEQ ID NO: 259754 - RNA, 12 nt, Homo sapiens
aauagaugacau

SEQ ID NO: 259755 - RNA, 20 nt, Homo sapiens
aauagaugguguaugcugua

SEQ ID NO: 259756 - RNA, 20 nt, Homo sapiens
aauagcaaccuuuuuaucuc

SEQ ID NO: 259757 - RNA, 20 nt, Homo sapiens
aauagcuagacuggugacug

SEQ ID NO: 259758 - RNA, 21 nt, Homo sapiens
aauagcugggacuacaggugu

SEQ ID NO: 259759 - RNA, 17 nt, Homo sapiens
aauaggagagagaucau

SEQ ID NO: 259760 - RNA, 15 nt, Homo sapiens
aauagugauuuccac

SEQ ID NO: 259761 - RNA, 21 nt, Homo sapiens
aauaguuguuauucuguaguu

SEQ ID NO: 259762 - RNA, 14 nt, Homo sapiens
aauauaacugccuu

SEQ ID NO: 259763 - RNA, 19 nt, Homo sapiens
aauauaauucuguuucuga

SEQ ID NO: 259764 - RNA, 15 nt, Homo sapiens
aauauagcucaggua

SEQ ID NO: 259765 - RNA, 15 nt, Homo sapiens
aauauagcuguacaa

SEQ ID NO: 259766 - RNA, 16 nt, Homo sapiens
aauauagcuguacaaa

SEQ ID NO: 259767 - RNA, 13 nt, Homo sapiens
aauauaggggcaa

SEQ ID NO: 259768 - RNA, 13 nt, Homo sapiens
aauauaucaguaa

SEQ ID NO: 259769 - RNA, 16 nt, Homo sapiens
aauauaucuaccccag

SEQ ID NO: 259770 - RNA, 14 nt, Homo sapiens
aauauugcugaugg

SEQ ID NO: 259771 - RNA, 23 nt, Homo sapiens
aauauuguccauuguccaauccu

SEQ ID NO: 259772 - RNA, 14 nt, Homo sapiens
aauauuuaccagac

SEQ ID NO: 259773 - RNA, 18 nt, Homo sapiens
aauauuugcugacagcug

SEQ ID NO: 259774 - RNA, 14 nt, Homo sapiens
aaucaaaugcaauu

SEQ ID NO: 259775 - RNA, 15 nt, Homo sapiens
aaucaaugcuauaac

SEQ ID NO: 259776 - RNA, 20 nt, Homo sapiens
aaucacacagccaagccagu

SEQ ID NO: 259777 - RNA, 20 nt, Homo sapiens
aaucacacgucuggcuucac

SEQ ID NO: 259778 - RNA, 11 nt, Homo sapiens
aaucacacugu

SEQ ID NO: 259779 - RNA, 12 nt, Homo sapiens
aaucacaguaua

SEQ ID NO: 259780 - RNA, 18 nt, Homo sapiens
aaucacugaccagccuug

SEQ ID NO: 259781 - RNA, 14 nt, Homo sapiens
aaucagcauucuca

SEQ ID NO: 259782 - RNA, 17 nt, Homo sapiens
aaucagcauucucacuc

SEQ ID NO: 259783 - RNA, 18 nt, Homo sapiens
aaucaggaauauuuucca

SEQ ID NO: 259784 - RNA, 19 nt, Homo sapiens
aaucaggaauauuuuccaa

SEQ ID NO: 259785 - RNA, 15 nt, Homo sapiens
aaucaguguuuccaa

SEQ ID NO: 259786 - RNA, 22 nt, Homo sapiens
aaucaguguuuccaaucugucc

SEQ ID NO: 259787 - RNA, 16 nt, Homo sapiens
aaucauaaaacuugau

SEQ ID NO: 259788 - RNA, 19 nt, Homo sapiens
aaucauaaaacuugaugug

SEQ ID NO: 259789 - RNA, 14 nt, Homo sapiens
aaucauacuuucuc

SEQ ID NO: 259790 - RNA, 19 nt, Homo sapiens
aaucauacuuucucuucaa

SEQ ID NO: 259791 - RNA, 19 nt, Homo sapiens
aaucauauaauaaauguac

SEQ ID NO: 259792 - RNA, 13 nt, Homo sapiens
aaucaucuucucc

SEQ ID NO: 259793 - RNA, 17 nt, Homo sapiens
aaucauuuuaauuauua

SEQ ID NO: 259794 - RNA, 19 nt, Homo sapiens
aauccaauggguuuuuccc

SEQ ID NO: 259795 - RNA, 17 nt, Homo sapiens
aauccagagagcagugu

SEQ ID NO: 259796 - RNA, 20 nt, Homo sapiens
aaucccuagucuucaagcag

SEQ ID NO: 259797 - RNA, 14 nt, Homo sapiens
aaucccuccuucau

SEQ ID NO: 259798 - RNA, 20 nt, Homo sapiens
aauccuguccucagcuucuu

SEQ ID NO: 259799 - RNA, 22 nt, Homo sapiens
aauccuguccucagcuucuuaa

SEQ ID NO: 259800 - RNA, 19 nt, Homo sapiens
aauccuucuuauguuucua

SEQ ID NO: 259801 - RNA, 15 nt, Homo sapiens
aauccuuuacuguua

SEQ ID NO: 259802 - RNA, 21 nt, Homo sapiens
aaucgcuccaccuugcagcuc

SEQ ID NO: 259803 - RNA, 20 nt, Homo sapiens
aaucuaaauggaaccacucu

SEQ ID NO: 259804 - RNA, 18 nt, Homo sapiens
aaucucaaauaacuaaaa

SEQ ID NO: 259805 - RNA, 12 nt, Homo sapiens
aaucucuaguug

SEQ ID NO: 259806 - RNA, 16 nt, Homo sapiens
aaucucuccauucccg

SEQ ID NO: 259807 - RNA, 14 nt, Homo sapiens
aaucucuugcacuc

SEQ ID NO: 259808 - RNA, 15 nt, Homo sapiens
aaugacaacaaagua

SEQ ID NO: 259809 - RNA, 15 nt, Homo sapiens
aaugacacagucuug

SEQ ID NO: 259810 - RNA, 20 nt, Homo sapiens
aaugacagagagaggcagau

SEQ ID NO: 259811 - RNA, 22 nt, Homo sapiens
aaugacucuggaaccauccucu

SEQ ID NO: 259812 - RNA, 20 nt, Homo sapiens
aaugacuuaagcacacuuga

SEQ ID NO: 259813 - RNA, 14 nt, Homo sapiens
aaugagacuuacuu

SEQ ID NO: 259814 - RNA, 16 nt, Homo sapiens
aaugagaucauuguga

SEQ ID NO: 259815 - RNA, 15 nt, Homo sapiens
aaugagccuggcaag

SEQ ID NO: 259816 - RNA, 21 nt, Homo sapiens
aaugagcugcacuccaugagu

SEQ ID NO: 259817 - RNA, 17 nt, Homo sapiens
aaugagugaaucaccug

SEQ ID NO: 259818 - RNA, 14 nt, Homo sapiens
aaugaugggucagu

SEQ ID NO: 259819 - RNA, 17 nt, Homo sapiens
aaugauuaaaauagcau

SEQ ID NO: 259820 - RNA, 15 nt, Homo sapiens
aaugauuucacagug

SEQ ID NO: 259821 - RNA, 23 nt, Homo sapiens
aaugauuucacagugugugguca

SEQ ID NO: 259822 - RNA, 23 nt, Homo sapiens
aaugcaaagcuugagcugcucug

SEQ ID NO: 259823 - RNA, 11 nt, Homo sapiens
aaugcaacuuc

SEQ ID NO: 259824 - RNA, 15 nt, Homo sapiens
aaugcaauagaauaa

SEQ ID NO: 259825 - RNA, 14 nt, Homo sapiens
aaugcaauuuccaa

SEQ ID NO: 259826 - RNA, 17 nt, Homo sapiens
aaugcaauuuccaacac

SEQ ID NO: 259827 - RNA, 13 nt, Homo sapiens
aaugcaccuggaa

SEQ ID NO: 259828 - RNA, 22 nt, Homo sapiens
aaugcacugacauuguuggcca

SEQ ID NO: 259829 - RNA, 13 nt, Homo sapiens
aaugcacuuuguu

SEQ ID NO: 259830 - RNA, 11 nt, Homo sapiens
aaugcagagau

SEQ ID NO: 259831 - RNA, 19 nt, Homo sapiens
aaugcagggacaaaugcca

SEQ ID NO: 259832 - RNA, 20 nt, Homo sapiens
aaugcagggacaaaugccac

SEQ ID NO: 259833 - RNA, 20 nt, Homo sapiens
aaugcauauccaacaugugc

SEQ ID NO: 259834 - RNA, 19 nt, Homo sapiens
aaugccacacggcucucac

SEQ ID NO: 259835 - RNA, 13 nt, Homo sapiens
aaugccagugugc

SEQ ID NO: 259836 - RNA, 21 nt, Homo sapiens
aaugcccagccccuucugacc

SEQ ID NO: 259837 - RNA, 23 nt, Homo sapiens
aaugcccagugaccagucacuga

SEQ ID NO: 259838 - RNA, 17 nt, Homo sapiens
aaugcuauaacuauguu

SEQ ID NO: 259839 - RNA, 20 nt, Homo sapiens
aaugcucuuuacuucaugga

SEQ ID NO: 259840 - RNA, 17 nt, Homo sapiens
aaugcuggcauuugcac

SEQ ID NO: 259841 - RNA, 21 nt, Homo sapiens
aaugcugguuuuucaguuuuc

SEQ ID NO: 259842 - RNA, 14 nt, Homo sapiens
aaugcuugcugcug

SEQ ID NO: 259843 - RNA, 20 nt, Homo sapiens
aauggagggaauaauaccua

SEQ ID NO: 259844 - RNA, 16 nt, Homo sapiens
aauggcaaagacugga

SEQ ID NO: 259845 - RNA, 20 nt, Homo sapiens
aauggcaaagacuggaucca

SEQ ID NO: 259846 - RNA, 15 nt, Homo sapiens
aaugggagacggggg

SEQ ID NO: 259847 - RNA, 15 nt, Homo sapiens
aaugggggugcauuu

SEQ ID NO: 259848 - RNA, 22 nt, Homo sapiens
aaugguuuucuuguguguuuau

SEQ ID NO: 259849 - RNA, 23 nt, Homo sapiens
aauguaagaucguucucugccuc

SEQ ID NO: 259850 - RNA, 15 nt, Homo sapiens
aauguaccauguugc

SEQ ID NO: 259851 - RNA, 17 nt, Homo sapiens
aauguaccauguugccc

SEQ ID NO: 259852 - RNA, 19 nt, Homo sapiens
aauguaccauguugcccag

SEQ ID NO: 259853 - RNA, 23 nt, Homo sapiens
aauguacuuuuccuuccagaaaa

SEQ ID NO: 259854 - RNA, 23 nt, Homo sapiens
aauguacuuuuucuuccagaaaa

SEQ ID NO: 259855 - RNA, 15 nt, Homo sapiens
aauguagaaagugau

SEQ ID NO: 259856 - RNA, 18 nt, Homo sapiens
aauguagaaagugaucca

SEQ ID NO: 259857 - RNA, 14 nt, Homo sapiens
aauguaugugcaca

SEQ ID NO: 259858 - RNA, 15 nt, Homo sapiens
aauguaugugcacau

SEQ ID NO: 259859 - RNA, 13 nt, Homo sapiens
aauguauugaacu

SEQ ID NO: 259860 - RNA, 17 nt, Homo sapiens
aaugucagugugacuga

SEQ ID NO: 259861 - RNA, 19 nt, Homo sapiens
aaugucuugaugcaugcac

SEQ ID NO: 259862 - RNA, 23 nt, Homo sapiens
aaugucuuuauuaaauguagaaa

SEQ ID NO: 259863 - RNA, 22 nt, Homo sapiens
aaugucuuuccuuuugcucuua

SEQ ID NO: 259864 - RNA, 22 nt, Homo sapiens
aaugugaaaaugguccaggaga

SEQ ID NO: 259865 - RNA, 20 nt, Homo sapiens
aaugugacauuauaugcacu

SEQ ID NO: 259866 - RNA, 15 nt, Homo sapiens
aaugugacucaagac

SEQ ID NO: 259867 - RNA, 23 nt, Homo sapiens
aaugugacuugagcccagaguga

SEQ ID NO: 259868 - RNA, 12 nt, Homo sapiens
aaugugauugca

SEQ ID NO: 259869 - RNA, 15 nt, Homo sapiens
aaugugauugcagcu

SEQ ID NO: 259870 - RNA, 20 nt, Homo sapiens
aauguggauuaaagugccca

SEQ ID NO: 259871 - RNA, 21 nt, Homo sapiens
aauguguucggugauuucaga

SEQ ID NO: 259872 - RNA, 23 nt, Homo sapiens
aauguuaaguugauggugaugaa

SEQ ID NO: 259873 - RNA, 16 nt, Homo sapiens
aauguuacauuauuau

SEQ ID NO: 259874 - RNA, 15 nt, Homo sapiens
aauguucacuuuuga

SEQ ID NO: 259875 - RNA, 13 nt, Homo sapiens
aauguucauccca

SEQ ID NO: 259876 - RNA, 20 nt, Homo sapiens
aauguuuccuuuaauuuuuu

SEQ ID NO: 259877 - RNA, 18 nt, Homo sapiens
aauguuugucucauccca

SEQ ID NO: 259878 - RNA, 19 nt, Homo sapiens
aauguuugucucaucccau

SEQ ID NO: 259879 - RNA, 21 nt, Homo sapiens
aauguuuuagaaugagacuua

SEQ ID NO: 259880 - RNA, 19 nt, Homo sapiens
aauuaaaauccucaaucca

SEQ ID NO: 259881 - RNA, 13 nt, Homo sapiens
aauuaagcagcuc

SEQ ID NO: 259882 - RNA, 22 nt, Homo sapiens
aauuaaggguaugauuaacucu

SEQ ID NO: 259883 - RNA, 16 nt, Homo sapiens
aauuacaggaaguacu

SEQ ID NO: 259884 - RNA, 11 nt, Homo sapiens
aauuaccaugc

SEQ ID NO: 259885 - RNA, 18 nt, Homo sapiens
aauuaccaugcuucacaa

SEQ ID NO: 259886 - RNA, 15 nt, Homo sapiens
aauuacuaccagagc

SEQ ID NO: 259887 - RNA, 13 nt, Homo sapiens
aauuagaugaacu

SEQ ID NO: 259888 - RNA, 15 nt, Homo sapiens
aauuaguaacaugug

SEQ ID NO: 259889 - RNA, 21 nt, Homo sapiens
aauuaguuccucauuagcauu

SEQ ID NO: 259890 - RNA, 19 nt, Homo sapiens
aauuauccuguaguacaag

SEQ ID NO: 259891 - RNA, 21 nt, Homo sapiens
aauuauuauuuauauauguau

SEQ ID NO: 259892 - RNA, 16 nt, Homo sapiens
aauuauugauguuuuc

SEQ ID NO: 259893 - RNA, 22 nt, Homo sapiens
aauuauuugcauaacaauuccu

SEQ ID NO: 259894 - RNA, 18 nt, Homo sapiens
aauucagggagugggcua

SEQ ID NO: 259895 - RNA, 18 nt, Homo sapiens
aauuccaaacacauacag

SEQ ID NO: 259896 - RNA, 22 nt, Homo sapiens
aauuccuuagcuuagaccucag

SEQ ID NO: 259897 - RNA, 23 nt, Homo sapiens
aauuccuuagcuuagaccucagc

SEQ ID NO: 259898 - RNA, 14 nt, Homo sapiens
aauucuacuuugag

SEQ ID NO: 259899 - RNA, 20 nt, Homo sapiens
aauucuagcuuugagcuuaa

SEQ ID NO: 259900 - RNA, 12 nt, Homo sapiens
aauucuauuaca

SEQ ID NO: 259901 - RNA, 17 nt, Homo sapiens
aauucucauuugucaca

SEQ ID NO: 259902 - RNA, 18 nt, Homo sapiens
aauucucauuugucacac

SEQ ID NO: 259903 - RNA, 15 nt, Homo sapiens
aauucucuauuuuuu

SEQ ID NO: 259904 - RNA, 21 nt, Homo sapiens
aauucucuuauccaacaucaa

SEQ ID NO: 259905 - RNA, 23 nt, Homo sapiens
aauucucuuuccuguagucccau

SEQ ID NO: 259906 - RNA, 19 nt, Homo sapiens
aauucugaauuaagcacag

SEQ ID NO: 259907 - RNA, 15 nt, Homo sapiens
aauucuuucaguggc

SEQ ID NO: 259908 - RNA, 14 nt, Homo sapiens
aauugaaaaaccau

SEQ ID NO: 259909 - RNA, 13 nt, Homo sapiens
aauugacaggauu

SEQ ID NO: 259910 - RNA, 21 nt, Homo sapiens
aauugcugcuuguacacucau

SEQ ID NO: 259911 - RNA, 23 nt, Homo sapiens
aauugggccaaagaaacauugcc

SEQ ID NO: 259912 - RNA, 19 nt, Homo sapiens
aauuguacaaccugugauc

SEQ ID NO: 259913 - RNA, 12 nt, Homo sapiens
aauuuaacaaga

SEQ ID NO: 259914 - RNA, 16 nt, Homo sapiens
aauuuagcaaccuaga

SEQ ID NO: 259915 - RNA, 22 nt, Homo sapiens
aauuuagcaaccuagaaacaca

SEQ ID NO: 259916 - RNA, 14 nt, Homo sapiens
aauuuauucuuggu

SEQ ID NO: 259917 - RNA, 15 nt, Homo sapiens
aauuuauuggcuuuu

SEQ ID NO: 259918 - RNA, 23 nt, Homo sapiens
aauuucacauuaauauuugcuga

SEQ ID NO: 259919 - RNA, 14 nt, Homo sapiens
aauuucuacuuuga

SEQ ID NO: 259920 - RNA, 12 nt, Homo sapiens
aauuuguacaua

SEQ ID NO: 259921 - RNA, 21 nt, Homo sapiens
aauuuguggaaaauaacucac

SEQ ID NO: 259922 - RNA, 18 nt, Homo sapiens
aauuuuaggcacccaucc

SEQ ID NO: 259923 - RNA, 23 nt, Homo sapiens
aauuuuauguuuaguugcacaaa

SEQ ID NO: 259924 - RNA, 16 nt, Homo sapiens
aauuuugucuuuauga

SEQ ID NO: 259925 - RNA, 14 nt, Homo sapiens
aauuuuuacuuuaa

SEQ ID NO: 259926 - RNA, 12 nt, Homo sapiens
aauuuuucuucc

SEQ ID NO: 259927 - RNA, 22 nt, Homo sapiens
aauuuuuuuaaccaaaggugaa

SEQ ID NO: 259928 - RNA, 15 nt, Homo sapiens
acaaaaaacaacuga

SEQ ID NO: 259929 - RNA, 16 nt, Homo sapiens
acaaaauauauuuugu

SEQ ID NO: 259930 - RNA, 12 nt, Homo sapiens
acaaaaucacac

SEQ ID NO: 259931 - RNA, 14 nt, Homo sapiens
acaaacaaacagaa

SEQ ID NO: 259932 - RNA, 16 nt, Homo sapiens
acaaagcagauccuca

SEQ ID NO: 259933 - RNA, 15 nt, Homo sapiens
acaaagccaaucuca

SEQ ID NO: 259934 - RNA, 23 nt, Homo sapiens
acaaagcgugguggacaugcaca

SEQ ID NO: 259935 - RNA, 24 nt, Homo sapiens
acaaagcgugguggacaugcacag

SEQ ID NO: 259936 - RNA, 15 nt, Homo sapiens
acaaagcuuuugcau

SEQ ID NO: 259937 - RNA, 15 nt, Homo sapiens
acaaaguaagccaug

SEQ ID NO: 259938 - RNA, 14 nt, Homo sapiens
acaaaucagacaua

SEQ ID NO: 259939 - RNA, 14 nt, Homo sapiens
acaaaucaucugua

SEQ ID NO: 259940 - RNA, 17 nt, Homo sapiens
acaaauuaaaagcuaua

SEQ ID NO: 259941 - RNA, 18 nt, Homo sapiens
acaaauugggccaaagaa

SEQ ID NO: 259942 - RNA, 15 nt, Homo sapiens
acaacagauucucuu

SEQ ID NO: 259943 - RNA, 21 nt, Homo sapiens
acaaccaugagaccacuguua

SEQ ID NO: 259944 - RNA, 16 nt, Homo sapiens
acaacuaugauuugga

SEQ ID NO: 259945 - RNA, 16 nt, Homo sapiens
acaagaacacugaaaa

SEQ ID NO: 259946 - RNA, 22 nt, Homo sapiens
acaagaagccacagaccuagga

SEQ ID NO: 259947 - RNA, 15 nt, Homo sapiens
acaagacaccaaauu

SEQ ID NO: 259948 - RNA, 23 nt, Homo sapiens
acaagaucacaagucagcacuac

SEQ ID NO: 259949 - RNA, 20 nt, Homo sapiens
acaagcgugagccacugcac

SEQ ID NO: 259950 - RNA, 16 nt, Homo sapiens
acaagcugcacccuca

SEQ ID NO: 259951 - RNA, 18 nt, Homo sapiens
acaaggcuggcagugaca

SEQ ID NO: 259952 - RNA, 21 nt, Homo sapiens
acaacaaaccuguuucugcag

SEQ ID NO: 259953 - RNA, 19 nt, Homo sapiens
acaacauccuuaagucaaa

SEQ ID NO: 259954 - RNA, 16 nt, Homo sapiens
acaaccaaaaaauucu

SEQ ID NO: 259955 - RNA, 20 nt, Homo sapiens
acaaccaaaaaauucuacaa

SEQ ID NO: 259956 - RNA, 19 nt, Homo sapiens
acaaccucauuuuaacuca

SEQ ID NO: 259957 - RNA, 15 nt, Homo sapiens
acaaccugugaucaa

SEQ ID NO: 259958 - RNA, 16 nt, Homo sapiens
acaaccugugaucaag

SEQ ID NO: 259959 - RNA, 20 nt, Homo sapiens
acaaccugugaucaagcaau

SEQ ID NO: 259960 - RNA, 21 nt, Homo sapiens
acaaccugugaucaagcaaua

SEQ ID NO: 259961 - RNA, 16 nt, Homo sapiens
acaagaaacagccacu

SEQ ID NO: 259962 - RNA, 20 nt, Homo sapiens
acaagaacuuuaaauugugu

SEQ ID NO: 259963 - RNA, 12 nt, Homo sapiens
acaagaagccac

SEQ ID NO: 259964 - RNA, 19 nt, Homo sapiens
acaagacaccaaauugaac

SEQ ID NO: 259965 - RNA, 22 nt, Homo sapiens
acaagacaggacccugggacca

SEQ ID NO: 259966 - RNA, 15 nt, Homo sapiens
acaagauuaucuuau

SEQ ID NO: 259967 - RNA, 14 nt, Homo sapiens
acaaguccucagug

SEQ ID NO: 259968 - RNA, 16 nt, Homo sapiens
acaagugcucuuucca

SEQ ID NO: 259969 - RNA, 21 nt, Homo sapiens
acaauaaacgguacuugucau

SEQ ID NO: 259970 - RNA, 16 nt, Homo sapiens
acaauauacuuguaua

SEQ ID NO: 259971 - RNA, 16 nt, Homo sapiens
acaauauugacuuugu

SEQ ID NO: 259972 - RNA, 14 nt, Homo sapiens
acaaucagcuccuu

SEQ ID NO: 259973 - RNA, 15 nt, Homo sapiens
acaauccaucucuca

SEQ ID NO: 259974 - RNA, 16 nt, Homo sapiens
acaauccaucucucaa

SEQ ID NO: 259975 - RNA, 23 nt, Homo sapiens
acaauccaucucucaaguagugu

SEQ ID NO: 259976 - RNA, 24 nt, Homo sapiens
acaauccaucucucaaguagugua

SEQ ID NO: 259977 - RNA, 16 nt, Homo sapiens
acaauccuugccacag

SEQ ID NO: 259978 - RNA, 13 nt, Homo sapiens
acaaugugaaaag

SEQ ID NO: 259979 - RNA, 14 nt, Homo sapiens
acaauguucauccc

SEQ ID NO: 259980 - RNA, 20 nt, Homo sapiens
acaauuauuaccaucucucc

SEQ ID NO: 259981 - RNA, 14 nt, Homo sapiens
acaauugcaguuuu

SEQ ID NO: 259982 - RNA, 15 nt, Homo sapiens
acaauugcaguuuug

SEQ ID NO: 259983 - RNA, 13 nt, Homo sapiens
acaauuuaccagc

SEQ ID NO: 259984 - RNA, 13 nt, Homo sapiens
acacaaucugaaa

SEQ ID NO: 259985 - RNA, 15 nt, Homo sapiens
acacaaucugaaaca

SEQ ID NO: 259986 - RNA, 18 nt, Homo sapiens
acacaaucugaaacagcu

SEQ ID NO: 259987 - RNA, 12 nt, Homo sapiens
acacacagcucu

SEQ ID NO: 259988 - RNA, 12 nt, Homo sapiens
acacacaguacg

SEQ ID NO: 259989 - RNA, 14 nt, Homo sapiens
acacaccuugacaa

SEQ ID NO: 259990 - RNA, 15 nt, Homo sapiens
acacagcaucagcuc

SEQ ID NO: 259991 - RNA, 16 nt, Homo sapiens
acacagcaucagcuca

SEQ ID NO: 259992 - RNA, 17 nt, Homo sapiens
acacagccaagccaguc

SEQ ID NO: 259993 - RNA, 17 nt, Homo sapiens
acacagccccauguaca

SEQ ID NO: 259994 - RNA, 21 nt, Homo sapiens
acacagcucuucuccaggcug

SEQ ID NO: 259995 - RNA, 17 nt, Homo sapiens
acacagcugcagagaca

SEQ ID NO: 259996 - RNA, 22 nt, Homo sapiens
acacagcugcagagacagagag

SEQ ID NO: 259997 - RNA, 17 nt, Homo sapiens
acacaguauuacuucug

SEQ ID NO: 259998 - RNA, 12 nt, Homo sapiens
acacaguggaga

SEQ ID NO: 259999 - RNA, 20 nt, Homo sapiens
acacauuucuuugaauuuag

SEQ ID NO: 260000 - RNA, 23 nt, Homo sapiens
acaccauuccuucugcccugcuu

SEQ ID NO: 260001 - RNA, 19 nt, Homo sapiens
acacccagucuguucccca

SEQ ID NO: 260002 - RNA, 23 nt, Homo sapiens
acacccuauauuuugcauaguac

SEQ ID NO: 260003 - RNA, 17 nt, Homo sapiens
acacccuggaguggcau

SEQ ID NO: 260004 - RNA, 18 nt, Homo sapiens
acacccuggaguggcaug

SEQ ID NO: 260005 - RNA, 11 nt, Homo sapiens
acacccuguga

SEQ ID NO: 260006 - RNA, 14 nt, Homo sapiens
acaccuccucucac

SEQ ID NO: 260007 - RNA, 17 nt, Homo sapiens
acaccuguaaucccagc

SEQ ID NO: 260008 - RNA, 19 nt, Homo sapiens
acaccuugacagggcacac

SEQ ID NO: 260009 - RNA, 20 nt, Homo sapiens
acacgagguaugaggucuag

SEQ ID NO: 260010 - RNA, 14 nt, Homo sapiens
acacggucuucaca

SEQ ID NO: 260011 - RNA, 19 nt, Homo sapiens
acacguaaaucuguucaag

SEQ ID NO: 260012 - RNA, 22 nt, Homo sapiens
acacguccauguuuauccaugu

SEQ ID NO: 260013 - RNA, 15 nt, Homo sapiens
acacuaaaaggugac

SEQ ID NO: 260014 - RNA, 14 nt, Homo sapiens
acacuaacauauaa

SEQ ID NO: 260015 - RNA, 15 nt, Homo sapiens
acacuaacauauaau

SEQ ID NO: 260016 - RNA, 23 nt, Homo sapiens
acacuaacgauuuguuaaugaua

SEQ ID NO: 260017 - RNA, 20 nt, Homo sapiens
acacuacaaauuuauucuug

SEQ ID NO: 260018 - RNA, 20 nt, Homo sapiens
acacuaugaagauguuucaa

SEQ ID NO: 260019 - RNA, 16 nt, Homo sapiens
acacucaaaagcuggg

SEQ ID NO: 260020 - RNA, 15 nt, Homo sapiens
acacucacauuuauu

SEQ ID NO: 260021 - RNA, 20 nt, Homo sapiens
acacucccacuuggcaucau

SEQ ID NO: 260022 - RNA, 16 nt, Homo sapiens
acacucuugguagaag

SEQ ID NO: 260023 - RNA, 19 nt, Homo sapiens
acacugcauguuugugauu

SEQ ID NO: 260024 - RNA, 21 nt, Homo sapiens
acacugggcuucuagaaccag

SEQ ID NO: 260025 - RNA, 17 nt, Homo sapiens
acacuguacugcaauaa

SEQ ID NO: 260026 - RNA, 15 nt, Homo sapiens
acacugucuucugau

SEQ ID NO: 260027 - RNA, 22 nt, Homo sapiens
acacugugcugagucugaaggc

SEQ ID NO: 260028 - RNA, 22 nt, Homo sapiens
acacuguucugaaagugacuca

SEQ ID NO: 260029 - RNA, 16 nt, Homo sapiens
acacuugggagcaaaa

SEQ ID NO: 260030 - RNA, 23 nt, Homo sapiens
acagacacucccacuuggcauca

SEQ ID NO: 260031 - RNA, 20 nt, Homo sapiens
acagaccuaggauuucauga

SEQ ID NO: 260032 - RNA, 21 nt, Homo sapiens
acagacgucccuccacguuca

SEQ ID NO: 260033 - RNA, 24 nt, Homo sapiens
acagacuaugucacccaaugcaua

SEQ ID NO: 260034 - RNA, 16 nt, Homo sapiens
acagacuggaagcaca

SEQ ID NO: 260035 - RNA, 16 nt, Homo sapiens
acagacuugaaugcua

SEQ ID NO: 260036 - RNA, 20 nt, Homo sapiens
acagagagggggccaccucc

SEQ ID NO: 260037 - RNA, 20 nt, Homo sapiens
acagagauaauucuagcuuu

SEQ ID NO: 260038 - RNA, 18 nt, Homo sapiens
acagagcagaacuuucac

SEQ ID NO: 260039 - RNA, 23 nt, Homo sapiens
acagagcugguugggaagacaug

SEQ ID NO: 260040 - RNA, 18 nt, Homo sapiens
acagagcuucccugacuc

SEQ ID NO: 260041 - RNA, 22 nt, Homo sapiens
acagagggcaggaacuugcaca

SEQ ID NO: 260042 - RNA, 19 nt, Homo sapiens
acagaguuggggagauaaa

SEQ ID NO: 260043 - RNA, 14 nt, Homo sapiens
acagaguuguuaca

SEQ ID NO: 260044 - RNA, 22 nt, Homo sapiens
acagaugugugauucacagugu

SEQ ID NO: 260045 - RNA, 21 nt, Homo sapiens
acagauuuuuggagaaaggau

SEQ ID NO: 260046 - RNA, 14 nt, Homo sapiens
acagcaaacaggug

SEQ ID NO: 260047 - RNA, 19 nt, Homo sapiens
acagcaacaugugacaaca

SEQ ID NO: 260048 - RNA, 18 nt, Homo sapiens
acagcagcucaggcacac

SEQ ID NO: 260049 - RNA, 15 nt, Homo sapiens
acagcaucagcucaa

SEQ ID NO: 260050 - RNA, 15 nt, Homo sapiens
acagcccagagccug

SEQ ID NO: 260051 - RNA, 18 nt, Homo sapiens
acagcccuuaugcgguua

SEQ ID NO: 260052 - RNA, 23 nt, Homo sapiens
acagccucccacccccaucucuc

SEQ ID NO: 260053 - RNA, 14 nt, Homo sapiens
acagcuaacaugga

SEQ ID NO: 260054 - RNA, 18 nt, Homo sapiens
acagcucuucuccaggcu

SEQ ID NO: 260055 - RNA, 20 nt, Homo sapiens
acaggaaguacuggagaaaa

SEQ ID NO: 260056 - RNA, 16 nt, Homo sapiens
acaggaccccagcucu

SEQ ID NO: 260057 - RNA, 20 nt, Homo sapiens
acaggacccugggaccacag

SEQ ID NO: 260058 - RNA, 21 nt, Homo sapiens
acaggacccugggaccacaga

SEQ ID NO: 260059 - RNA, 15 nt, Homo sapiens
acaggaucaaaguug

SEQ ID NO: 260060 - RNA, 19 nt, Homo sapiens
acaggauuauuggaaauuu

SEQ ID NO: 260061 - RNA, 14 nt, Homo sapiens
acaggcaagcaccu

SEQ ID NO: 260062 - RNA, 23 nt, Homo sapiens
acaggcaaugcuggcuguuggcu

SEQ ID NO: 260063 - RNA, 13 nt, Homo sapiens
acaggcacccacc

SEQ ID NO: 260064 - RNA, 13 nt, Homo sapiens
acaggcauuuccu

SEQ ID NO: 260065 - RNA, 20 nt, Homo sapiens
acaggcauuuccugcuuauu

SEQ ID NO: 260066 - RNA, 19 nt, Homo sapiens
acaggcccggcuccaggcu

SEQ ID NO: 260067 - RNA, 16 nt, Homo sapiens
acaggcccuuccucuc

SEQ ID NO: 260068 - RNA, 21 nt, Homo sapiens
acaggcccuuccucuccacug

SEQ ID NO: 260069 - RNA, 22 nt, Homo sapiens
acaggcccuuccucuccacugc

SEQ ID NO: 260070 - RNA, 19 nt, Homo sapiens
acagggaggacgcucucug

SEQ ID NO: 260071 - RNA, 13 nt, Homo sapiens
acagggugagcac

SEQ ID NO: 260072 - RNA, 20 nt, Homo sapiens
acaggugcaacagacuugaa

SEQ ID NO: 260073 - RNA, 15 nt, Homo sapiens
acaggugugagucac

SEQ ID NO: 260074 - RNA, 18 nt, Homo sapiens
acagguuauaacaguguu

SEQ ID NO: 260075 - RNA, 17 nt, Homo sapiens
acaguaaaaggacagag

SEQ ID NO: 260076 - RNA, 14 nt, Homo sapiens
acaguaacugccau

SEQ ID NO: 260077 - RNA, 15 nt, Homo sapiens
acaguaguugcaaug

SEQ ID NO: 260078 - RNA, 17 nt, Homo sapiens
acaguauacgcuccauc

SEQ ID NO: 260079 - RNA, 14 nt, Homo sapiens
acaguaucucaggg

SEQ ID NO: 260080 - RNA, 15 nt, Homo sapiens
acaguccucccaucu

SEQ ID NO: 260081 - RNA, 18 nt, Homo sapiens
acagucuuccauuugcaa

SEQ ID NO: 260082 - RNA, 22 nt, Homo sapiens
acagucuuguauuaaguuguua

SEQ ID NO: 260083 - RNA, 21 nt, Homo sapiens
acagugagucgaggacaggga

SEQ ID NO: 260084 - RNA, 17 nt, Homo sapiens
acaguggugagaucaca

SEQ ID NO: 260085 - RNA, 14 nt, Homo sapiens
acaguguugcccag

SEQ ID NO: 260086 - RNA, 15 nt, Homo sapiens
acaguguuucuggcu

SEQ ID NO: 260087 - RNA, 20 nt, Homo sapiens
acaguuaagagaaaugagcu

SEQ ID NO: 260088 - RNA, 22 nt, Homo sapiens
acaguucaauucucauuuguca

SEQ ID NO: 260089 - RNA, 23 nt, Homo sapiens
acaguucaauucucauuugucac

SEQ ID NO: 260090 - RNA, 14 nt, Homo sapiens
acaguucugugguu

SEQ ID NO: 260091 - RNA, 18 nt, Homo sapiens
acaguuuauuauguacua

SEQ ID NO: 260092 - RNA, 14 nt, Homo sapiens
acaguuuuaacugu

SEQ ID NO: 260093 - RNA, 20 nt, Homo sapiens
acaguuuugguugcuuuaau

SEQ ID NO: 260094 - RNA, 16 nt, Homo sapiens
acauaaaucugugaac

SEQ ID NO: 260095 - RNA, 15 nt, Homo sapiens
acauacauccaacau

SEQ ID NO: 260096 - RNA, 22 nt, Homo sapiens
acaggguuuugccauguuggcc

SEQ ID NO: 260097 - RNA, 13 nt, Homo sapiens
acaggugugaacc

SEQ ID NO: 260098 - RNA, 22 nt, Homo sapiens
acagguuuuauuuuaucacuug

SEQ ID NO: 260099 - RNA, 18 nt, Homo sapiens
acaguaaaaggacagaga

SEQ ID NO: 260100 - RNA, 14 nt, Homo sapiens
acaguaacauagcu

SEQ ID NO: 260101 - RNA, 17 nt, Homo sapiens
acaguaacugccaucaa

SEQ ID NO: 260102 - RNA, 18 nt, Homo sapiens
acaguacccaaacugcuu

SEQ ID NO: 260103 - RNA, 16 nt, Homo sapiens
acaguagauuuuccaa

SEQ ID NO: 260104 - RNA, 12 nt, Homo sapiens
acaguaucucag

SEQ ID NO: 260105 - RNA, 15 nt, Homo sapiens
acaguauuacuucug

SEQ ID NO: 260106 - RNA, 23 nt, Homo sapiens
acagucacgcaagcuaguuccca

SEQ ID NO: 260107 - RNA, 20 nt, Homo sapiens
acagucucccuuccuaugcu

SEQ ID NO: 260108 - RNA, 20 nt, Homo sapiens
acagugacuccacucugagu

SEQ ID NO: 260109 - RNA, 21 nt, Homo sapiens
acagugcucuuuucuccucac

SEQ ID NO: 260110 - RNA, 21 nt, Homo sapiens
acagugggccugcuggugggc

SEQ ID NO: 260111 - RNA, 21 nt, Homo sapiens
acaguuaagagaaaugagcuu

SEQ ID NO: 260112 - RNA, 22 nt, Homo sapiens
acaguugaaaaacagcugaggg

SEQ ID NO: 260113 - RNA, 22 nt, Homo sapiens
acaguuuauuauguacuauuca

SEQ ID NO: 260114 - RNA, 17 nt, Homo sapiens
acaguuuuaacugugga

SEQ ID NO: 260115 - RNA, 18 nt, Homo sapiens
acaguuuuaacuguggau

SEQ ID NO: 260116 - RNA, 19 nt, Homo sapiens
acaguuuugguugcuuuaa

SEQ ID NO: 260117 - RNA, 17 nt, Homo sapiens
acauaaaaguuggcuca

SEQ ID NO: 260118 - RNA, 17 nt, Homo sapiens
acauaaggaaacugggu

SEQ ID NO: 260119 - RNA, 17 nt, Homo sapiens
acauaaugcgugcauac

SEQ ID NO: 260120 - RNA, 20 nt, Homo sapiens
acauacaauuccaaacacau

SEQ ID NO: 260121 - RNA, 12 nt, Homo sapiens
acauacacacau

SEQ ID NO: 260122 - RNA, 16 nt, Homo sapiens
acauacacacauuaga

SEQ ID NO: 260123 - RNA, 15 nt, Homo sapiens
acauaccaugugcca

SEQ ID NO: 260124 - RNA, 23 nt, Homo sapiens
acauaccuggcccugugccuugg

SEQ ID NO: 260125 - RNA, 12 nt, Homo sapiens
acauacucccau

SEQ ID NO: 260126 - RNA, 21 nt, Homo sapiens
acauacucugcuuagaauuug

SEQ ID NO: 260127 - RNA, 23 nt, Homo sapiens
acauagugaaaccccaucucuac

SEQ ID NO: 260128 - RNA, 18 nt, Homo sapiens
acauaguugcuucuuucc

SEQ ID NO: 260129 - RNA, 23 nt, Homo sapiens
acaucaacugcaucaagauguga

SEQ ID NO: 260130 - RNA, 20 nt, Homo sapiens
acaucaaucuaaagauacag

SEQ ID NO: 260131 - RNA, 22 nt, Homo sapiens
acaucauccagaagacacacau

SEQ ID NO: 260132 - RNA, 16 nt, Homo sapiens
acauccaagcuuccuu

SEQ ID NO: 260133 - RNA, 22 nt, Homo sapiens
acauccucugucuauuugagac

SEQ ID NO: 260134 - RNA, 17 nt, Homo sapiens
acauccuuaagucaaaa

SEQ ID NO: 260135 - RNA, 13 nt, Homo sapiens
acaucucacuuca

SEQ ID NO: 260136 - RNA, 14 nt, Homo sapiens
acaucucuguagau

SEQ ID NO: 260137 - RNA, 15 nt, Homo sapiens
acaucugcauuuuca

SEQ ID NO: 260138 - RNA, 18 nt, Homo sapiens
acaucuugcucugcugac

SEQ ID NO: 260139 - RNA, 19 nt, Homo sapiens
acaucuugcucugcugaca

SEQ ID NO: 260140 - RNA, 13 nt, Homo sapiens
acaucuuuuacau

SEQ ID NO: 260141 - RNA, 19 nt, Homo sapiens
acaucuuuuacauucugca

SEQ ID NO: 260142 - RNA, 15 nt, Homo sapiens
acaugaaaagcaaau

SEQ ID NO: 260143 - RNA, 15 nt, Homo sapiens
acaugaaaguccuca

SEQ ID NO: 260144 - RNA, 14 nt, Homo sapiens
acaugaagaagcua

SEQ ID NO: 260145 - RNA, 20 nt, Homo sapiens
acaugaauacgucuugauca

SEQ ID NO: 260146 - RNA, 23 nt, Homo sapiens
acaugaauugcauuuuacuuuaa

SEQ ID NO: 260147 - RNA, 17 nt, Homo sapiens
acaugagaucuagguga

SEQ ID NO: 260148 - RNA, 18 nt, Homo sapiens
acaugaucuucuuuauaa

SEQ ID NO: 260149 - RNA, 15 nt, Homo sapiens
acaugcacgugugug

SEQ ID NO: 260150 - RNA, 22 nt, Homo sapiens
acaugcauugcucuuauucugu

SEQ ID NO: 260151 - RNA, 18 nt, Homo sapiens
acaugccucucucaggcc

SEQ ID NO: 260152 - RNA, 20 nt, Homo sapiens
acaugccucucucaggccaa

SEQ ID NO: 260153 - RNA, 18 nt, Homo sapiens
acaugcuauccaaucuca

SEQ ID NO: 260154 - RNA, 18 nt, Homo sapiens
acaugcucauguguacac

SEQ ID NO: 260155 - RNA, 18 nt, Homo sapiens
acaugcugaacaucacag

SEQ ID NO: 260156 - RNA, 16 nt, Homo sapiens
acaugcuguacauacu

SEQ ID NO: 260157 - RNA, 16 nt, Homo sapiens
acaugcuugcauuaua

SEQ ID NO: 260158 - RNA, 18 nt, Homo sapiens
acauggaauaacauguaa

SEQ ID NO: 260159 - RNA, 18 nt, Homo sapiens
acauggcuguguuugcag

SEQ ID NO: 260160 - RNA, 13 nt, Homo sapiens
acaugugcacaug

SEQ ID NO: 260161 - RNA, 12 nt, Homo sapiens
acaugugcucuc

SEQ ID NO: 260162 - RNA, 21 nt, Homo sapiens
acaugugcucucgggugcccu

SEQ ID NO: 260163 - RNA, 13 nt, Homo sapiens
acaugugguggga

SEQ ID NO: 260164 - RNA, 23 nt, Homo sapiens
acauguggugggacagggaccca

SEQ ID NO: 260165 - RNA, 14 nt, Homo sapiens
acauguuaaaccau

SEQ ID NO: 260166 - RNA, 22 nt, Homo sapiens
acauguuuuucuucucccucag

SEQ ID NO: 260167 - RNA, 17 nt, Homo sapiens
acauuaagaaaaucaua

SEQ ID NO: 260168 - RNA, 15 nt, Homo sapiens
acauuagccuaugug

SEQ ID NO: 260169 - RNA, 17 nt, Homo sapiens
acauuccugaugcuucu

SEQ ID NO: 260170 - RNA, 20 nt, Homo sapiens
acauucugcaagcacaucug

SEQ ID NO: 260171 - RNA, 14 nt, Homo sapiens
acauugacagauug

SEQ ID NO: 260172 - RNA, 14 nt, Homo sapiens
acauuguuaugcac

SEQ ID NO: 260173 - RNA, 13 nt, Homo sapiens
acauuuccaugca

SEQ ID NO: 260174 - RNA, 19 nt, Homo sapiens
acauuuguuguucuguuaa

SEQ ID NO: 260175 - RNA, 22 nt, Homo sapiens
acauuuguuuuagucugaacaa

SEQ ID NO: 260176 - RNA, 23 nt, Homo sapiens
acauuuuacuuuuuccuggcuca

SEQ ID NO: 260177 - RNA, 14 nt, Homo sapiens
acauuuuguauauu

SEQ ID NO: 260178 - RNA, 23 nt, Homo sapiens
acauuuuuaagugcugcauuuaa

SEQ ID NO: 260179 - RNA, 16 nt, Homo sapiens
acauuuuuguacuaac

SEQ ID NO: 260180 - RNA, 20 nt, Homo sapiens
accaaauacuuuaauguaua

SEQ ID NO: 260181 - RNA, 23 nt, Homo sapiens
accaaaucauacuuuuucuuuga

SEQ ID NO: 260182 - RNA, 19 nt, Homo sapiens
accaaaucuggaagccaaa

SEQ ID NO: 260183 - RNA, 16 nt, Homo sapiens
accaucccagcacugc

SEQ ID NO: 260184 - RNA, 12 nt, Homo sapiens
accaucccugaa

SEQ ID NO: 260185 - RNA, 16 nt, Homo sapiens
accauccucuguuacc

SEQ ID NO: 260186 - RNA, 20 nt, Homo sapiens
accaucucuuuaccuccuaa

SEQ ID NO: 260187 - RNA, 19 nt, Homo sapiens
accaugagaccacuguuau

SEQ ID NO: 260188 - RNA, 21 nt, Homo sapiens
accaugagaccacuguuauca

SEQ ID NO: 260189 - RNA, 22 nt, Homo sapiens
accaugagaccacuguuaucaa

SEQ ID NO: 260190 - RNA, 23 nt, Homo sapiens
accaugauuaaccacuucagcug

SEQ ID NO: 260191 - RNA, 24 nt, Homo sapiens
accaugauuaaccacuucagcuga

SEQ ID NO: 260192 - RNA, 14 nt, Homo sapiens
accaugcuucacaa

SEQ ID NO: 260193 - RNA, 20 nt, Homo sapiens
accauguacaugaagaagcu

SEQ ID NO: 260194 - RNA, 14 nt, Homo sapiens
accauguugcccag

SEQ ID NO: 260195 - RNA, 18 nt, Homo sapiens
accauuagcauuugucaa

SEQ ID NO: 260196 - RNA, 13 nt, Homo sapiens
accauucaggaca

SEQ ID NO: 260197 - RNA, 18 nt, Homo sapiens
accauucaggacacaggg

SEQ ID NO: 260198 - RNA, 19 nt, Homo sapiens
accauucaggacacaggga

SEQ ID NO: 260199 - RNA, 18 nt, Homo sapiens
accauuuagcacacugcu

SEQ ID NO: 260200 - RNA, 21 nt, Homo sapiens
accauuuuguuauugacuaac

SEQ ID NO: 260201 - RNA, 18 nt, Homo sapiens
accauuuuugaaaccaaa

SEQ ID NO: 260202 - RNA, 17 nt, Homo sapiens
acccacaaaaguacaau

SEQ ID NO: 260203 - RNA, 16 nt, Homo sapiens
acccaccaucaugucu

SEQ ID NO: 260204 - RNA, 14 nt, Homo sapiens
acccaccccagugc

SEQ ID NO: 260205 - RNA, 17 nt, Homo sapiens
acccagaguggcccaag

SEQ ID NO: 260206 - RNA, 20 nt, Homo sapiens
acccaggacuuccauuugcu

SEQ ID NO: 260207 - RNA, 23 nt, Homo sapiens
acccagucagaguugugcacaug

SEQ ID NO: 260208 - RNA, 16 nt, Homo sapiens
acccaguuagcucuca

SEQ ID NO: 260209 - RNA, 17 nt, Homo sapiens
acccaguuagcucucaa

SEQ ID NO: 260210 - RNA, 14 nt, Homo sapiens
acccaucuaccccu

SEQ ID NO: 260211 - RNA, 14 nt, Homo sapiens
accccacagaguug

SEQ ID NO: 260212 - RNA, 16 nt, Homo sapiens
accccaggcagccacu

SEQ ID NO: 260213 - RNA, 21 nt, Homo sapiens
acccccaaaagaacacuauaa

SEQ ID NO: 260214 - RNA, 18 nt, Homo sapiens
accccccuauugcugcug

SEQ ID NO: 260215 - RNA, 21 nt, Homo sapiens
acccccugaauuucucacaaa

SEQ ID NO: 260216 - RNA, 20 nt, Homo sapiens
accccgagcacgguugccug

SEQ ID NO: 260217 - RNA, 20 nt, Homo sapiens
accccggaagccaaaccucu

SEQ ID NO: 260218 - RNA, 14 nt, Homo sapiens
accccugagcugaa

SEQ ID NO: 260219 - RNA, 22 nt, Homo sapiens
accccugcuccccugagcugaa

SEQ ID NO: 260220 - RNA, 16 nt, Homo sapiens
acccgagguuugcaaa

SEQ ID NO: 260221 - RNA, 17 nt, Homo sapiens
acccgagguuugcaaau

SEQ ID NO: 260222 - RNA, 16 nt, Homo sapiens
acccuaaaucuugacu

SEQ ID NO: 260223 - RNA, 20 nt, Homo sapiens
acccuaugugggugggacca

SEQ ID NO: 260224 - RNA, 22 nt, Homo sapiens
acccuaugugggugggaccaca

SEQ ID NO: 260225 - RNA, 19 nt, Homo sapiens
acccucagaugcacaugag

SEQ ID NO: 260226 - RNA, 14 nt, Homo sapiens
acccucaucuuucu

SEQ ID NO: 260227 - RNA, 18 nt, Homo sapiens
acccucaucuuucuucca

SEQ ID NO: 260228 - RNA, 19 nt, Homo sapiens
acccucaucuuucuuccaa

SEQ ID NO: 260229 - RNA, 12 nt, Homo sapiens
acccuccaugua

SEQ ID NO: 260230 - RNA, 11 nt, Homo sapiens
acccucccacu

SEQ ID NO: 260231 - RNA, 16 nt, Homo sapiens
acccucccacugccaa

SEQ ID NO: 260232 - RNA, 22 nt, Homo sapiens
acccuccuuucaccacaugugc

SEQ ID NO: 260233 - RNA, 16 nt, Homo sapiens
acccucuaagggaccu

SEQ ID NO: 260234 - RNA, 18 nt, Homo sapiens
acccucuccccacugcuc

SEQ ID NO: 260235 - RNA, 19 nt, Homo sapiens
acccucuccccacugcuca

SEQ ID NO: 260236 - RNA, 17 nt, Homo sapiens
acccucuccuugucaca

SEQ ID NO: 260237 - RNA, 19 nt, Homo sapiens
acccucuccuugucacaga

SEQ ID NO: 260238 - RNA, 15 nt, Homo sapiens
acccucuggagauaa

SEQ ID NO: 260239 - RNA, 19 nt, Homo sapiens
acccucuggagauaaaaua

SEQ ID NO: 260240 - RNA, 16 nt, Homo sapiens
acccugcuucaaauau

SEQ ID NO: 260241 - RNA, 15 nt, Homo sapiens
acccuggaguggcau

SEQ ID NO: 260242 - RNA, 14 nt, Homo sapiens
acccugggaccaca

SEQ ID NO: 260243 - RNA, 21 nt, Homo sapiens
acccugugugguauuuuggca

SEQ ID NO: 260244 - RNA, 16 nt, Homo sapiens
acccuuagccacuuca

SEQ ID NO: 260245 - RNA, 14 nt, Homo sapiens
acccuuaggccagc

SEQ ID NO: 260246 - RNA, 22 nt, Homo sapiens
acccuuaggccagcaccaucuc

SEQ ID NO: 260247 - RNA, 17 nt, Homo sapiens
acccuucagauuugccu

SEQ ID NO: 260248 - RNA, 15 nt, Homo sapiens
acccuuccucaccac

SEQ ID NO: 260249 - RNA, 23 nt, Homo sapiens
acccuucuccuuagaaguggaag

SEQ ID NO: 260250 - RNA, 19 nt, Homo sapiens
acccuuggagccaauggag

SEQ ID NO: 260251 - RNA, 15 nt, Homo sapiens
accgagcacauacca

SEQ ID NO: 260252 - RNA, 19 nt, Homo sapiens
accgaggcagggaaggauc

SEQ ID NO: 260253 - RNA, 21 nt, Homo sapiens
accgagucucuucuccacugg

SEQ ID NO: 260254 - RNA, 21 nt, Homo sapiens
accgaugggcuuagagcucuc

SEQ ID NO: 260255 - RNA, 22 nt, Homo sapiens
accgaugggcuuagagcucuca

SEQ ID NO: 260256 - RNA, 19 nt, Homo sapiens
accgcaggauuugggcucu

SEQ ID NO: 260257 - RNA, 21 nt, Homo sapiens
accgcgcccagccucaucucu

SEQ ID NO: 260258 - RNA, 21 nt, Homo sapiens
accgggcacucagaagacacu

SEQ ID NO: 260259 - RNA, 14 nt, Homo sapiens
accguacacugugu

SEQ ID NO: 260260 - RNA, 20 nt, Homo sapiens
accguaugagggaacugugu

SEQ ID NO: 260261 - RNA, 15 nt, Homo sapiens
accguguggcccaag

SEQ ID NO: 260262 - RNA, 18 nt, Homo sapiens
accguguggcccaagacc

SEQ ID NO: 260263 - RNA, 18 nt, Homo sapiens
accuaaauaugagcccag

SEQ ID NO: 260264 - RNA, 21 nt, Homo sapiens
accuaaauaugagcccagaaa

SEQ ID NO: 260265 - RNA, 22 nt, Homo sapiens
accuaaauccuucuuauguuuc

SEQ ID NO: 260266 - RNA, 20 nt, Homo sapiens
accuaaauggccucaugugg

SEQ ID NO: 260267 - RNA, 17 nt, Homo sapiens
accuaacgagaaauaga

SEQ ID NO: 260268 - RNA, 13 nt, Homo sapiens
accuacaguguac

SEQ ID NO: 260269 - RNA, 14 nt, Homo sapiens
accuacaguguaca

SEQ ID NO: 260270 - RNA, 20 nt, Homo sapiens
accuagaaacacacauuucu

SEQ ID NO: 260271 - RNA, 21 nt, Homo sapiens
accuagccuuagaagucacac

SEQ ID NO: 260272 - RNA, 13 nt, Homo sapiens
accuaggauuuca

SEQ ID NO: 260273 - RNA, 22 nt, Homo sapiens
accuagguggggccugggguag

SEQ ID NO: 260274 - RNA, 21 nt, Homo sapiens
accucaccccacuguggcuga

SEQ ID NO: 260275 - RNA, 23 nt, Homo sapiens
accucaggccugggggcugggca

SEQ ID NO: 260276 - RNA, 12 nt, Homo sapiens
accucaguuuua

SEQ ID NO: 260277 - RNA, 12 nt, Homo sapiens
accucauuauca

SEQ ID NO: 260278 - RNA, 15 nt, Homo sapiens
accuccacauaccug

SEQ ID NO: 260279 - RNA, 23 nt, Homo sapiens
accuccuaauuccacacccucac

SEQ ID NO: 260280 - RNA, 21 nt, Homo sapiens
accucgagguuucucaaagaa

SEQ ID NO: 260281 - RNA, 20 nt, Homo sapiens
accucggcuccuggacucau

SEQ ID NO: 260282 - RNA, 17 nt, Homo sapiens
accucuauaauugccac

SEQ ID NO: 260283 - RNA, 13 nt, Homo sapiens
accucuaugcaau

SEQ ID NO: 260284 - RNA, 13 nt, Homo sapiens
accucucucacuc

SEQ ID NO: 260285 - RNA, 15 nt, Homo sapiens
accucugcacaagcu

SEQ ID NO: 260286 - RNA, 20 nt, Homo sapiens
accucugccugaagucacac

SEQ ID NO: 260287 - RNA, 23 nt, Homo sapiens
accucugccugaagucacacagu

SEQ ID NO: 260288 - RNA, 17 nt, Homo sapiens
accucuuggcugccuug

SEQ ID NO: 260289 - RNA, 18 nt, Homo sapiens
accugaaaacacugugca

SEQ ID NO: 260290 - RNA, 15 nt, Homo sapiens
accugaaacaaccca

SEQ ID NO: 260291 - RNA, 18 nt, Homo sapiens
accugaaauaaaauucau

SEQ ID NO: 260292 - RNA, 11 nt, Homo sapiens
accugaagucu

SEQ ID NO: 260293 - RNA, 13 nt, Homo sapiens
accugauucucac

SEQ ID NO: 260294 - RNA, 19 nt, Homo sapiens
accugccaggaagccagca

SEQ ID NO: 260295 - RNA, 19 nt, Homo sapiens
accugccaggcacacugag

SEQ ID NO: 260296 - RNA, 15 nt, Homo sapiens
accuggcaucuuaca

SEQ ID NO: 260297 - RNA, 19 nt, Homo sapiens
accuggcccugugccuugg

SEQ ID NO: 260298 - RNA, 18 nt, Homo sapiens
accuggccucugcacucc

SEQ ID NO: 260299 - RNA, 21 nt, Homo sapiens
accuggcuugaagcugcucac

SEQ ID NO: 260300 - RNA, 15 nt, Homo sapiens
accugggcaaagccu

SEQ ID NO: 260301 - RNA, 18 nt, Homo sapiens
accugggcaauauagcaa

SEQ ID NO: 260302 - RNA, 13 nt, Homo sapiens
accuguauuccca

SEQ ID NO: 260303 - RNA, 17 nt, Homo sapiens
accuguccccacccucc

SEQ ID NO: 260304 - RNA, 21 nt, Homo sapiens
accugugcacguuggaacuuu

SEQ ID NO: 260305 - RNA, 13 nt, Homo sapiens
accuguuucugca

SEQ ID NO: 260306 - RNA, 22 nt, Homo sapiens
accuuacauuugaaaucuauga

SEQ ID NO: 260307 - RNA, 23 nt, Homo sapiens
accuuacauuugaaaucuaugaa

SEQ ID NO: 260308 - RNA, 21 nt, Homo sapiens
accuucaguugucucugaugu

SEQ ID NO: 260309 - RNA, 16 nt, Homo sapiens
accuucaugaaaaccu

SEQ ID NO: 260310 - RNA, 14 nt, Homo sapiens
accuucuaccucuu

SEQ ID NO: 260311 - RNA, 20 nt, Homo sapiens
accuucuguggcucacagaa

SEQ ID NO: 260312 - RNA, 15 nt, Homo sapiens
accuugaacacuggg

SEQ ID NO: 260313 - RNA, 18 nt, Homo sapiens
accuugaaugaugccaug

SEQ ID NO: 260314 - RNA, 20 nt, Homo sapiens
accuugcacaaacagccccu

SEQ ID NO: 260315 - RNA, 12 nt, Homo sapiens
accuugugagag

SEQ ID NO: 260316 - RNA, 16 nt, Homo sapiens
accuuguguacuuucu

SEQ ID NO: 260317 - RNA, 21 nt, Homo sapiens
accuuguguacuuucuucccu

SEQ ID NO: 260318 - RNA, 22 nt, Homo sapiens
accuuuguauucucuccuguac

SEQ ID NO: 260319 - RNA, 18 nt, Homo sapiens
accuuuuuuauacauaaa

SEQ ID NO: 260320 - RNA, 14 nt, Homo sapiens
acgaugacaguguu

SEQ ID NO: 260321 - RNA, 14 nt, Homo sapiens
acgcacacugucug

SEQ ID NO: 260322 - RNA, 17 nt, Homo sapiens
acgcacacugucugccc

SEQ ID NO: 260323 - RNA, 21 nt, Homo sapiens
acgccacugcacuauagccua

SEQ ID NO: 260324 - RNA, 15 nt, Homo sapiens
acgccagacuuccca

SEQ ID NO: 260325 - RNA, 21 nt, Homo sapiens
acgccucacugaaacauggcu

SEQ ID NO: 260326 - RNA, 16 nt, Homo sapiens
acgccuguaauccuag

SEQ ID NO: 260327 - RNA, 12 nt, Homo sapiens
acgcgugcacac

SEQ ID NO: 260328 - RNA, 20 nt, Homo sapiens
acgcuuguagaacucacucu

SEQ ID NO: 260329 - RNA, 12 nt, Homo sapiens
acggacacucaa

SEQ ID NO: 260330 - RNA, 17 nt, Homo sapiens
acggacacucaaaagcu

SEQ ID NO: 260331 - RNA, 13 nt, Homo sapiens
acggacccugugu

SEQ ID NO: 260332 - RNA, 19 nt, Homo sapiens
accaaaugcuuuuccucaa

SEQ ID NO: 260333 - RNA, 18 nt, Homo sapiens
accaacauacucccaucu

SEQ ID NO: 260334 - RNA, 12 nt, Homo sapiens
accaaccacugc

SEQ ID NO: 260335 - RNA, 11 nt, Homo sapiens
accaaccuggg

SEQ ID NO: 260336 - RNA, 18 nt, Homo sapiens
accaacuauagaauguau

SEQ ID NO: 260337 - RNA, 23 nt, Homo sapiens
accaagccuuggcucuacccuga

SEQ ID NO: 260338 - RNA, 20 nt, Homo sapiens
accaauauuguacaguuuuu

SEQ ID NO: 260339 - RNA, 13 nt, Homo sapiens
accaaugucuuga

SEQ ID NO: 260340 - RNA, 13 nt, Homo sapiens
accaauguucucu

SEQ ID NO: 260341 - RNA, 17 nt, Homo sapiens
accacaagaaggaugau

SEQ ID NO: 260342 - RNA, 17 nt, Homo sapiens
accacagguucaugcca

SEQ ID NO: 260343 - RNA, 12 nt, Homo sapiens
accacauggcuu

SEQ ID NO: 260344 - RNA, 18 nt, Homo sapiens
accaccaaccacugcgac

SEQ ID NO: 260345 - RNA, 15 nt, Homo sapiens
accacccagaguggc

SEQ ID NO: 260346 - RNA, 14 nt, Homo sapiens
accaccccccaugc

SEQ ID NO: 260347 - RNA, 12 nt, Homo sapiens
accaccuuucag

SEQ ID NO: 260348 - RNA, 16 nt, Homo sapiens
accacuguguauuuaa

SEQ ID NO: 260349 - RNA, 14 nt, Homo sapiens
accacuucagcuga

SEQ ID NO: 260350 - RNA, 23 nt, Homo sapiens
accagagaagggcuuggacucaa

SEQ ID NO: 260351 - RNA, 17 nt, Homo sapiens
accagagccguuacuac

SEQ ID NO: 260352 - RNA, 13 nt, Homo sapiens
accagagcucaga

SEQ ID NO: 260353 - RNA, 13 nt, Homo sapiens
accagagcugcca

SEQ ID NO: 260354 - RNA, 14 nt, Homo sapiens
accagagcugccac

SEQ ID NO: 260355 - RNA, 19 nt, Homo sapiens
accagagcugccaccugcc

SEQ ID NO: 260356 - RNA, 13 nt, Homo sapiens
accagaggacaaa

SEQ ID NO: 260357 - RNA, 14 nt, Homo sapiens
accagaggacaaag

SEQ ID NO: 260358 - RNA, 21 nt, Homo sapiens
accagcagagcaccuuagaca

SEQ ID NO: 260359 - RNA, 21 nt, Homo sapiens
accagcccuacaccauuccuu

SEQ ID NO: 260360 - RNA, 13 nt, Homo sapiens
accagccuugaca

SEQ ID NO: 260361 - RNA, 18 nt, Homo sapiens
accagcgugugacuacuc

SEQ ID NO: 260362 - RNA, 16 nt, Homo sapiens
accaggccaccucccc

SEQ ID NO: 260363 - RNA, 13 nt, Homo sapiens
accaggucaggga

SEQ ID NO: 260364 - RNA, 13 nt, Homo sapiens
accaggucucaua

SEQ ID NO: 260365 - RNA, 20 nt, Homo sapiens
accaguauuguuuacccaau

SEQ ID NO: 260366 - RNA, 16 nt, Homo sapiens
accaguuguugauaac

SEQ ID NO: 260367 - RNA, 21 nt, Homo sapiens
accaguuugaaccaagaacuu

SEQ ID NO: 260368 - RNA, 14 nt, Homo sapiens
accaucaagccacc

SEQ ID NO: 260369 - RNA, 20 nt, Homo sapiens
accaucccagcacugcaccc

SEQ ID NO: 260370 - RNA, 21 nt, Homo sapiens
accaucucuccuccuuuucac

SEQ ID NO: 260371 - RNA, 17 nt, Homo sapiens
accaucucuuuaccucc

SEQ ID NO: 260372 - RNA, 20 nt, Homo sapiens
accaugauuaaccacuucag

SEQ ID NO: 260373 - RNA, 13 nt, Homo sapiens
accauguacauga

SEQ ID NO: 260374 - RNA, 17 nt, Homo sapiens
accaugucagcaaaaag

SEQ ID NO: 260375 - RNA, 14 nt, Homo sapiens
accaugugccacac

SEQ ID NO: 260376 - RNA, 23 nt, Homo sapiens
accaugugccacacaccuugaca

SEQ ID NO: 260377 - RNA, 22 nt, Homo sapiens
accauucuccaccugccaggga

SEQ ID NO: 260378 - RNA, 22 nt, Homo sapiens
accauucugacucgguuucucc

SEQ ID NO: 260379 - RNA, 19 nt, Homo sapiens
accauugagacauuugcca

SEQ ID NO: 260380 - RNA, 20 nt, Homo sapiens
accauuuagcacacugcuug

SEQ ID NO: 260381 - RNA, 19 nt, Homo sapiens
accauuuugggguacccac

SEQ ID NO: 260382 - RNA, 21 nt, Homo sapiens
accauuuugggguacccacug

SEQ ID NO: 260383 - RNA, 19 nt, Homo sapiens
accauuuuugaaaccaaac

SEQ ID NO: 260384 - RNA, 17 nt, Homo sapiens
acucagcuguccugcag

SEQ ID NO: 260385 - RNA, 16 nt, Homo sapiens
acucaggggucauuca

SEQ ID NO: 260386 - RNA, 17 nt, Homo sapiens
acucaggggucauucau

SEQ ID NO: 260387 - RNA, 13 nt, Homo sapiens
acucauucaggga

SEQ ID NO: 260388 - RNA, 14 nt, Homo sapiens
acucauucauuacu

SEQ ID NO: 260389 - RNA, 15 nt, Homo sapiens
acucauuucuagcag

SEQ ID NO: 260390 - RNA, 21 nt, Homo sapiens
acuccagaauuucccaaagca

SEQ ID NO: 260391 - RNA, 21 nt, Homo sapiens
acuccauuuagaaaauguuca

SEQ ID NO: 260392 - RNA, 21 nt, Homo sapiens
acuccauuuggaaaauguuca

SEQ ID NO: 260393 - RNA, 14 nt, Homo sapiens
acuccuaaaucaag

SEQ ID NO: 260394 - RNA, 19 nt, Homo sapiens
acuccuuguaaagacugua

SEQ ID NO: 260395 - RNA, 22 nt, Homo sapiens
acuccuuguaaagacuguagaa

SEQ ID NO: 260396 - RNA, 15 nt, Homo sapiens
acucgugucuggcac

SEQ ID NO: 260397 - RNA, 23 nt, Homo sapiens
acucuauuuuuguaaaaagggaa

SEQ ID NO: 260398 - RNA, 20 nt, Homo sapiens
acucucagcagcuaugguag

SEQ ID NO: 260399 - RNA, 12 nt, Homo sapiens
acucugugucag

SEQ ID NO: 260400 - RNA, 23 nt, Homo sapiens
acucuuaguuacucauucaggga

SEQ ID NO: 260401 - RNA, 21 nt, Homo sapiens
acucuuccccauaaucacuga

SEQ ID NO: 260402 - RNA, 22 nt, Homo sapiens
acucuuccccauaaucacugac

SEQ ID NO: 260403 - RNA, 14 nt, Homo sapiens
acucuuggccucaa

SEQ ID NO: 260404 - RNA, 16 nt, Homo sapiens
acucuuguugugcucu

SEQ ID NO: 260405 - RNA, 19 nt, Homo sapiens
acugaaaccucuguucuca

SEQ ID NO: 260406 - RNA, 16 nt, Homo sapiens
acugaaccaggccaga

SEQ ID NO: 260407 - RNA, 19 nt, Homo sapiens
acugaaugaaacccccaca

SEQ ID NO: 260408 - RNA, 18 nt, Homo sapiens
acugaccagccuugacac

SEQ ID NO: 260409 - RNA, 20 nt, Homo sapiens
acugacccuggucaccagag

SEQ ID NO: 260410 - RNA, 15 nt, Homo sapiens
acugacuuucucagc

SEQ ID NO: 260411 - RNA, 18 nt, Homo sapiens
acugacuuucucagccuc

SEQ ID NO: 260412 - RNA, 22 nt, Homo sapiens
acugagaagaucaaugaucacc

SEQ ID NO: 260413 - RNA, 16 nt, Homo sapiens
acugagagaucugcug

SEQ ID NO: 260414 - RNA, 22 nt, Homo sapiens
acugaguacguugugcauuugg

SEQ ID NO: 260415 - RNA, 20 nt, Homo sapiens
acugagugagcaucauggag

SEQ ID NO: 260416 - RNA, 16 nt, Homo sapiens
acugcaacuucugccu

SEQ ID NO: 260417 - RNA, 14 nt, Homo sapiens
acugcaagcacugc

SEQ ID NO: 260418 - RNA, 21 nt, Homo sapiens
acugcaagcacugcaugggca

SEQ ID NO: 260419 - RNA, 10 nt, Homo sapiens
acugcaauaa

SEQ ID NO: 260420 - RNA, 19 nt, Homo sapiens
acugcacagugcaucucag

SEQ ID NO: 260421 - RNA, 20 nt, Homo sapiens
acugcaccgggccacagaga

SEQ ID NO: 260422 - RNA, 18 nt, Homo sapiens
acugcagccucgaccucc

SEQ ID NO: 260423 - RNA, 23 nt, Homo sapiens
acugcagggaaaauuauuugcau

SEQ ID NO: 260424 - RNA, 22 nt, Homo sapiens
acugcagugcuguaaacuuaac

SEQ ID NO: 260425 - RNA, 20 nt, Homo sapiens
acugcauaccaaccugggca

SEQ ID NO: 260426 - RNA, 20 nt, Homo sapiens
acugcauagcagaccacaca

SEQ ID NO: 260427 - RNA, 22 nt, Homo sapiens
acugcaucguuucaucuuccaa

SEQ ID NO: 260428 - RNA, 20 nt, Homo sapiens
acugcaucuuucucuuccca

SEQ ID NO: 260429 - RNA, 12 nt, Homo sapiens
acugccaaagaa

SEQ ID NO: 260430 - RNA, 21 nt, Homo sapiens
acugccaucaagaugagagaa

SEQ ID NO: 260431 - RNA, 15 nt, Homo sapiens
acugccaugccagcu

SEQ ID NO: 260432 - RNA, 18 nt, Homo sapiens
acugccauggaggcacac

SEQ ID NO: 260433 - RNA, 22 nt, Homo sapiens
acugccauggaggcacacagcu

SEQ ID NO: 260434 - RNA, 20 nt, Homo sapiens
acugccucucccucuggucc

SEQ ID NO: 260435 - RNA, 22 nt, Homo sapiens
acugccugcagcugagauucca

SEQ ID NO: 260436 - RNA, 15 nt, Homo sapiens
acugccugcccagug

SEQ ID NO: 260437 - RNA, 19 nt, Homo sapiens
acugccugcccagugccau

SEQ ID NO: 260438 - RNA, 20 nt, Homo sapiens
acugccuucgcuucuugccu

SEQ ID NO: 260439 - RNA, 19 nt, Homo sapiens
acugcugcaaauacuguau

SEQ ID NO: 260440 - RNA, 23 nt, Homo sapiens
acugcugccucuugaaugcaggg

SEQ ID NO: 260441 - RNA, 16 nt, Homo sapiens
acugcugggcuuggca

SEQ ID NO: 260442 - RNA, 18 nt, Homo sapiens
acugcugugggcugcuca

SEQ ID NO: 260443 - RNA, 19 nt, Homo sapiens
acugcugugggcugcucac

SEQ ID NO: 260444 - RNA, 14 nt, Homo sapiens
acugcuugaggaaa

SEQ ID NO: 260445 - RNA, 15 nt, Homo sapiens
acugcuuuuggucug

SEQ ID NO: 260446 - RNA, 17 nt, Homo sapiens
acuggaacacuaaugag

SEQ ID NO: 260447 - RNA, 21 nt, Homo sapiens
acuggaacacuaaugaggaaa

SEQ ID NO: 260448 - RNA, 19 nt, Homo sapiens
acuggauccaaacccaucu

SEQ ID NO: 260449 - RNA, 14 nt, Homo sapiens
acuggcugcaaagg

SEQ ID NO: 260450 - RNA, 23 nt, Homo sapiens
acugggacuaaguguaccagaga

SEQ ID NO: 260451 - RNA, 13 nt, Homo sapiens
acugggcuucuag

SEQ ID NO: 260452 - RNA, 12 nt, Homo sapiens
acugggggcaac

SEQ ID NO: 260453 - RNA, 17 nt, Homo sapiens
acugguagguugggaca

SEQ ID NO: 260454 - RNA, 16 nt, Homo sapiens
acuguaauuugugaua

SEQ ID NO: 260455 - RNA, 12 nt, Homo sapiens
acuguacaugaa

SEQ ID NO: 260456 - RNA, 13 nt, Homo sapiens
acuguacuccucc

SEQ ID NO: 260457 - RNA, 16 nt, Homo sapiens
acugucauaaucucuu

SEQ ID NO: 260458 - RNA, 17 nt, Homo sapiens
acugucauccucaaaga

SEQ ID NO: 260459 - RNA, 13 nt, Homo sapiens
acuguccaaagac

SEQ ID NO: 260460 - RNA, 16 nt, Homo sapiens
acuguccuacccaccc

SEQ ID NO: 260461 - RNA, 20 nt, Homo sapiens
acuguccuauuauauucauu

SEQ ID NO: 260462 - RNA, 12 nt, Homo sapiens
acugucucaaga

SEQ ID NO: 260463 - RNA, 13 nt, Homo sapiens
acugucuccaugg

SEQ ID NO: 260464 - RNA, 22 nt, Homo sapiens
acugugaagagaaccauaucaa

SEQ ID NO: 260465 - RNA, 15 nt, Homo sapiens
acugugcaguuuuca

SEQ ID NO: 260466 - RNA, 18 nt, Homo sapiens
acugugccaugugccagg

SEQ ID NO: 260467 - RNA, 20 nt, Homo sapiens
acuguuagucauuugcugag

SEQ ID NO: 260468 - RNA, 18 nt, Homo sapiens
acuguuauuuauaaucac

SEQ ID NO: 260469 - RNA, 18 nt, Homo sapiens
acuguucccccugugcag

SEQ ID NO: 260470 - RNA, 17 nt, Homo sapiens
acuguucuuugccagaa

SEQ ID NO: 260471 - RNA, 13 nt, Homo sapiens
acuguugcccagg

SEQ ID NO: 260472 - RNA, 21 nt, Homo sapiens
acuguuuugguuuugcucaca

SEQ ID NO: 260473 - RNA, 13 nt, Homo sapiens
acuuaagcacacu

SEQ ID NO: 260474 - RNA, 19 nt, Homo sapiens
acuuaaggauggagccagc

SEQ ID NO: 260475 - RNA, 21 nt, Homo sapiens
acuuacagauggcagcaguga

SEQ ID NO: 260476 - RNA, 11 nt, Homo sapiens
acuuacuguac

SEQ ID NO: 260477 - RNA, 16 nt, Homo sapiens
acuuacuuaguguuau

SEQ ID NO: 260478 - RNA, 17 nt, Homo sapiens
acuuagcaugucccuac

SEQ ID NO: 260479 - RNA, 16 nt, Homo sapiens
acuuagguguggggga

SEQ ID NO: 260480 - RNA, 14 nt, Homo sapiens
acuuaucaacauuu

SEQ ID NO: 260481 - RNA, 22 nt, Homo sapiens
acuuaucccaagagaaugaaau

SEQ ID NO: 260482 - RNA, 22 nt, Homo sapiens
acuuauggggccaaaauagcau

SEQ ID NO: 260483 - RNA, 19 nt, Homo sapiens
acuucaagaucugaauuug

SEQ ID NO: 260484 - RNA, 13 nt, Homo sapiens
acuucaaggguuu

SEQ ID NO: 260485 - RNA, 18 nt, Homo sapiens
acuucacgcccuuggcca

SEQ ID NO: 260486 - RNA, 19 nt, Homo sapiens
accuugggaagauguauca

SEQ ID NO: 260487 - RNA, 18 nt, Homo sapiens
accuuguguacuuucuuc

SEQ ID NO: 260488 - RNA, 13 nt, Homo sapiens
accuuguuucccu

SEQ ID NO: 260489 - RNA, 20 nt, Homo sapiens
accuuuaagagaaaugagcu

SEQ ID NO: 260490 - RNA, 21 nt, Homo sapiens
accuuucagauaacuguuauu

SEQ ID NO: 260491 - RNA, 15 nt, Homo sapiens
accuuuccugaggaa

SEQ ID NO: 260492 - RNA, 23 nt, Homo sapiens
accuuucuccuuuguacuuugug

SEQ ID NO: 260493 - RNA, 20 nt, Homo sapiens
acgacgggggcaggugcaag

SEQ ID NO: 260494 - RNA, 17 nt, Homo sapiens
acgacugucuccauggc

SEQ ID NO: 260495 - RNA, 12 nt, Homo sapiens
acgagcagggau

SEQ ID NO: 260496 - RNA, 14 nt, Homo sapiens
acgauucacuccuu

SEQ ID NO: 260497 - RNA, 19 nt, Homo sapiens
acgcaaccaccaccaacca

SEQ ID NO: 260498 - RNA, 21 nt, Homo sapiens
acgcaccaccgcgccuaccuu

SEQ ID NO: 260499 - RNA, 11 nt, Homo sapiens
acgccacugca

SEQ ID NO: 260500 - RNA, 20 nt, Homo sapiens
acgccagauucuuuccugag

SEQ ID NO: 260501 - RNA, 22 nt, Homo sapiens
acgccauuuccuuuuccuucaa

SEQ ID NO: 260502 - RNA, 20 nt, Homo sapiens
acgcgugcacacaccagagc

SEQ ID NO: 260503 - RNA, 20 nt, Homo sapiens
acgcuccuauaggaccaaga

SEQ ID NO: 260504 - RNA, 20 nt, Homo sapiens
acggagccacuccucugacu

SEQ ID NO: 260505 - RNA, 15 nt, Homo sapiens
acggcucucaccagu

SEQ ID NO: 260506 - RNA, 17 nt, Homo sapiens
acggcuuccaucugccc

SEQ ID NO: 260507 - RNA, 16 nt, Homo sapiens
acggugaauggcuuug

SEQ ID NO: 260508 - RNA, 11 nt, Homo sapiens
acgguggugcc

SEQ ID NO: 260509 - RNA, 13 nt, Homo sapiens
acgguugccugag

SEQ ID NO: 260510 - RNA, 20 nt, Homo sapiens
acguaaaucuguucaaggaa

SEQ ID NO: 260511 - RNA, 14 nt, Homo sapiens
acguaagacugugu

SEQ ID NO: 260512 - RNA, 21 nt, Homo sapiens
acgucuggcuaaucuuuuuau

SEQ ID NO: 260513 - RNA, 19 nt, Homo sapiens
acgugggccuccagaguug

SEQ ID NO: 260514 - RNA, 17 nt, Homo sapiens
acgugggcggcagagag

SEQ ID NO: 260515 - RNA, 18 nt, Homo sapiens
acguggggcagcacagag

SEQ ID NO: 260516 - RNA, 20 nt, Homo sapiens
acgugugugcacguacacac

SEQ ID NO: 260517 - RNA, 19 nt, Homo sapiens
acguguuaugacuccagaa

SEQ ID NO: 260518 - RNA, 23 nt, Homo sapiens
acguuguuuugguuguacuuugg

SEQ ID NO: 260519 - RNA, 22 nt, Homo sapiens
acguuucuaaaggcuaccuuug

SEQ ID NO: 260520 - RNA, 16 nt, Homo sapiens
acuaaaaaaaagauga

SEQ ID NO: 260521 - RNA, 19 nt, Homo sapiens
acuaaaagguaugcaauca

SEQ ID NO: 260522 - RNA, 14 nt, Homo sapiens
acuaaaauguucua

SEQ ID NO: 260523 - RNA, 14 nt, Homo sapiens
acuaaacugcugca

SEQ ID NO: 260524 - RNA, 17 nt, Homo sapiens
acuaaacugcugcaaaa

SEQ ID NO: 260525 - RNA, 23 nt, Homo sapiens
acuaaacugcugcaaaaguucuc

SEQ ID NO: 260526 - RNA, 15 nt, Homo sapiens
acuaagagucucuau

SEQ ID NO: 260527 - RNA, 16 nt, Homo sapiens
acuaaggaaucuuucu

SEQ ID NO: 260528 - RNA, 23 nt, Homo sapiens
acuuugaccucugcagcaauaaa

SEQ ID NO: 260529 - RNA, 18 nt, Homo sapiens
acuuugggaggccaagga

SEQ ID NO: 260530 - RNA, 22 nt, Homo sapiens
acuuuguuuagcccaaaaccaa

SEQ ID NO: 260531 - RNA, 17 nt, Homo sapiens
acuuuuaaguugcugau

SEQ ID NO: 260532 - RNA, 22 nt, Homo sapiens
acuuuuaaguugcugaugaacu

SEQ ID NO: 260533 - RNA, 19 nt, Homo sapiens
acuuuucuuauaaugcaau

SEQ ID NO: 260534 - RNA, 20 nt, Homo sapiens
acuuuucuuucagccaagaa

SEQ ID NO: 260535 - RNA, 18 nt, Homo sapiens
acuuuugaaaacaaaaua

SEQ ID NO: 260536 - RNA, 17 nt, Homo sapiens
agaaaaaggaugcacag

SEQ ID NO: 260537 - RNA, 13 nt, Homo sapiens
agaaaaauuuccc

SEQ ID NO: 260538 - RNA, 18 nt, Homo sapiens
agaaaacuguuugggaaa

SEQ ID NO: 260539 - RNA, 17 nt, Homo sapiens
agaaaacuugaauucau

SEQ ID NO: 260540 - RNA, 21 nt, Homo sapiens
agaaaacuugaauucauagaa

SEQ ID NO: 260541 - RNA, 12 nt, Homo sapiens
agaaaagacaug

SEQ ID NO: 260542 - RNA, 16 nt, Homo sapiens
agaaaagcaguggcuc

SEQ ID NO: 260543 - RNA, 19 nt, Homo sapiens
agaaaagcccaaguucaug

SEQ ID NO: 260544 - RNA, 20 nt, Homo sapiens
agaaaauaguggugugauuu

SEQ ID NO: 260545 - RNA, 17 nt, Homo sapiens
agaaaauuguacaaccu

SEQ ID NO: 260546 - RNA, 17 nt, Homo sapiens
agaaacaaagauguuau

SEQ ID NO: 260547 - RNA, 13 nt, Homo sapiens
agaaacacugggc

SEQ ID NO: 260548 - RNA, 19 nt, Homo sapiens
agaaacaguugguaacuuu

SEQ ID NO: 260549 - RNA, 12 nt, Homo sapiens
agaaacugacac

SEQ ID NO: 260550 - RNA, 15 nt, Homo sapiens
agaaagacuaucuaa

SEQ ID NO: 260551 - RNA, 22 nt, Homo sapiens
agaaagaggagcgugucucuga

SEQ ID NO: 260552 - RNA, 14 nt, Homo sapiens
agaaagcucaucuc

SEQ ID NO: 260553 - RNA, 14 nt, Homo sapiens
agaaaguacuucuu

SEQ ID NO: 260554 - RNA, 15 nt, Homo sapiens
agaaagugauccaua

SEQ ID NO: 260555 - RNA, 14 nt, Homo sapiens
agaaaguguauuug

SEQ ID NO: 260556 - RNA, 14 nt, Homo sapiens
agaaauaacaaauu

SEQ ID NO: 260557 - RNA, 19 nt, Homo sapiens
agaaauaucugaaaaugua

SEQ ID NO: 260558 - RNA, 13 nt, Homo sapiens
agaaaucuagaag

SEQ ID NO: 260559 - RNA, 19 nt, Homo sapiens
agaaaucuagaagacuguc

SEQ ID NO: 260560 - RNA, 18 nt, Homo sapiens
agaaaugagcugcacucc

SEQ ID NO: 260561 - RNA, 14 nt, Homo sapiens
agaaauguguuauc

SEQ ID NO: 260562 - RNA, 16 nt, Homo sapiens
agaaauuaaguaucug

SEQ ID NO: 260563 - RNA, 22 nt, Homo sapiens
agaaauuaaguaucugacaucu

SEQ ID NO: 260564 - RNA, 17 nt, Homo sapiens
agaaauuaccuguggau

SEQ ID NO: 260565 - RNA, 16 nt, Homo sapiens
agaaauuccaauauaa

SEQ ID NO: 260566 - RNA, 22 nt, Homo sapiens
agaaauugcauuuccugacaga

SEQ ID NO: 260567 - RNA, 17 nt, Homo sapiens
agaacaguaacugccau

SEQ ID NO: 260568 - RNA, 19 nt, Homo sapiens
agaacaguaacugccauca

SEQ ID NO: 260569 - RNA, 19 nt, Homo sapiens
agaaccaaaaagaggcuau

SEQ ID NO: 260570 - RNA, 18 nt, Homo sapiens
agaaccagagcucagaga

SEQ ID NO: 260571 - RNA, 18 nt, Homo sapiens
agaaccuuuugagugccu

SEQ ID NO: 260572 - RNA, 16 nt, Homo sapiens
agaacgaagccaccuu

SEQ ID NO: 260573 - RNA, 18 nt, Homo sapiens
agaagaaaauaguggugu

SEQ ID NO: 260574 - RNA, 23 nt, Homo sapiens
agaagaccuugggccaagaugcu

SEQ ID NO: 260575 - RNA, 23 nt, Homo sapiens
agaagacugucagcuuccaaaca

SEQ ID NO: 260576 - RNA, 17 nt, Homo sapiens
agaagaucaaugaucac

SEQ ID NO: 260577 - RNA, 13 nt, Homo sapiens
agaagaugaauga

SEQ ID NO: 260578 - RNA, 20 nt, Homo sapiens
agaagcacccaggacuucca

SEQ ID NO: 260579 - RNA, 16 nt, Homo sapiens
agaagccaacuaugau

SEQ ID NO: 260580 - RNA, 16 nt, Homo sapiens
agaagccauugagcuc

SEQ ID NO: 260581 - RNA, 23 nt, Homo sapiens
agaagcccuucuaccuuccugca

SEQ ID NO: 260582 - RNA, 23 nt, Homo sapiens
agaagccucacugcaagcacugc

SEQ ID NO: 260583 - RNA, 21 nt, Homo sapiens
agaaggacucacuagacucag

SEQ ID NO: 260584 - RNA, 18 nt, Homo sapiens
agaaggagggagacauga

SEQ ID NO: 260585 - RNA, 22 nt, Homo sapiens
agaaggauccuccaaagucaca

SEQ ID NO: 260586 - RNA, 15 nt, Homo sapiens
agaaggcuaugggga

SEQ ID NO: 260587 - RNA, 12 nt, Homo sapiens
agaaggcucuau

SEQ ID NO: 260588 - RNA, 19 nt, Homo sapiens
agaaguaaauauagcucag

SEQ ID NO: 260589 - RNA, 17 nt, Homo sapiens
agaaguacugccaauac

SEQ ID NO: 260590 - RNA, 11 nt, Homo sapiens
agaaguggaag

SEQ ID NO: 260591 - RNA, 13 nt, Homo sapiens
agaaguugcccuc

SEQ ID NO: 260592 - RNA, 21 nt, Homo sapiens
agaauauuuuaaguauugcau

SEQ ID NO: 260593 - RNA, 13 nt, Homo sapiens
agaaucaaaugca

SEQ ID NO: 260594 - RNA, 20 nt, Homo sapiens
agaaucuccauuucugcuca

SEQ ID NO: 260595 - RNA, 18 nt, Homo sapiens
agaaucuguuaccagagg

SEQ ID NO: 260596 - RNA, 11 nt, Homo sapiens
agaaugcacaa

SEQ ID NO: 260597 - RNA, 11 nt, Homo sapiens
agaauggagcu

SEQ ID NO: 260598 - RNA, 23 nt, Homo sapiens
agaauguucuuauguugcccagu

SEQ ID NO: 260599 - RNA, 21 nt, Homo sapiens
agaauguuuucaaauguucuc

SEQ ID NO: 260600 - RNA, 18 nt, Homo sapiens
agaauucacuuguggcua

SEQ ID NO: 260601 - RNA, 19 nt, Homo sapiens
agaauuucccaaagcagug

SEQ ID NO: 260602 - RNA, 18 nt, Homo sapiens
agaauuugagugcucuga

SEQ ID NO: 260603 - RNA, 21 nt, Homo sapiens
agaauuuucagcaaaguacaa

SEQ ID NO: 260604 - RNA, 19 nt, Homo sapiens
agacaaaaucuuaaaugcc

SEQ ID NO: 260605 - RNA, 22 nt, Homo sapiens
agacaaugugaaaagaaaaaug

SEQ ID NO: 260606 - RNA, 17 nt, Homo sapiens
agacacaggcccggcuc

SEQ ID NO: 260607 - RNA, 12 nt, Homo sapiens
agacaccaaauu

SEQ ID NO: 260608 - RNA, 17 nt, Homo sapiens
agacaccuugacagggc

SEQ ID NO: 260609 - RNA, 23 nt, Homo sapiens
agacacucccacuuggcaucauu

SEQ ID NO: 260610 - RNA, 14 nt, Homo sapiens
agacagaagccuca

SEQ ID NO: 260611 - RNA, 20 nt, Homo sapiens
agacagaguuuucacucuua

SEQ ID NO: 260612 - RNA, 22 nt, Homo sapiens
agacagaguuuucacucuuauu

SEQ ID NO: 260613 - RNA, 22 nt, Homo sapiens
agacagcacagccaaccuagcu

SEQ ID NO: 260614 - RNA, 17 nt, Homo sapiens
agacaggacccugggac

SEQ ID NO: 260615 - RNA, 15 nt, Homo sapiens
agacagggucucacu

SEQ ID NO: 260616 - RNA, 18 nt, Homo sapiens
agacaggguuuugccaug

SEQ ID NO: 260617 - RNA, 17 nt, Homo sapiens
agacauacuaaccagca

SEQ ID NO: 260618 - RNA, 13 nt, Homo sapiens
agacaugaauaug

SEQ ID NO: 260619 - RNA, 18 nt, Homo sapiens
agacaugagcauggcuga

SEQ ID NO: 260620 - RNA, 18 nt, Homo sapiens
agacauuugcuaugagcu

SEQ ID NO: 260621 - RNA, 21 nt, Homo sapiens
agaccacgcccguccugccug

SEQ ID NO: 260622 - RNA, 15 nt, Homo sapiens
agaccacuguuauca

SEQ ID NO: 260623 - RNA, 13 nt, Homo sapiens
agaccagaaccag

SEQ ID NO: 260624 - RNA, 15 nt, Homo sapiens
agaccauaauguuac

SEQ ID NO: 260625 - RNA, 20 nt, Homo sapiens
agaccccucucccagcuauu

SEQ ID NO: 260626 - RNA, 12 nt, Homo sapiens
agacccggcugc

SEQ ID NO: 260627 - RNA, 21 nt, Homo sapiens
agacccucaugcugccaauau

SEQ ID NO: 260628 - RNA, 15 nt, Homo sapiens
agaccgugugugaaa

SEQ ID NO: 260629 - RNA, 16 nt, Homo sapiens
agaccuaggauuucau

SEQ ID NO: 260630 - RNA, 20 nt, Homo sapiens
agaccucggugggcauucac

SEQ ID NO: 260631 - RNA, 21 nt, Homo sapiens
agaccucggugggcauucaca

SEQ ID NO: 260632 - RNA, 18 nt, Homo sapiens
agaccuguguuacuaaaa

SEQ ID NO: 260633 - RNA, 15 nt, Homo sapiens
agaccuucuccuuca

SEQ ID NO: 260634 - RNA, 21 nt, Homo sapiens
agacgggcccuggugguggcu

SEQ ID NO: 260635 - RNA, 19 nt, Homo sapiens
agacgugauuuugcuguag

SEQ ID NO: 260636 - RNA, 17 nt, Homo sapiens
agacucacauccugacc

SEQ ID NO: 260637 - RNA, 21 nt, Homo sapiens
agacucagggccccagcacua

SEQ ID NO: 260638 - RNA, 16 nt, Homo sapiens
agacucccaagcugga

SEQ ID NO: 260639 - RNA, 17 nt, Homo sapiens
agacucccaagcuggac

SEQ ID NO: 260640 - RNA, 15 nt, Homo sapiens
agacuccugugcaac

SEQ ID NO: 260641 - RNA, 20 nt, Homo sapiens
agacucgauaguggugguga

SEQ ID NO: 260642 - RNA, 20 nt, Homo sapiens
agacucuacagaggccaugg

SEQ ID NO: 260643 - RNA, 17 nt, Homo sapiens
agacucuggaacccugg

SEQ ID NO: 260644 - RNA, 14 nt, Homo sapiens
agacucugucucaa

SEQ ID NO: 260645 - RNA, 17 nt, Homo sapiens
agacucuuguacuugau

SEQ ID NO: 260646 - RNA, 20 nt, Homo sapiens
agacugaguacguugugcau

SEQ ID NO: 260647 - RNA, 21 nt, Homo sapiens
agacugggucucgcuuuguug

SEQ ID NO: 260648 - RNA, 22 nt, Homo sapiens
agacuguggcugcuagcacuug

SEQ ID NO: 260649 - RNA, 14 nt, Homo sapiens
agacuucaucccuc

SEQ ID NO: 260650 - RNA, 12 nt, Homo sapiens
agacuuugacuc

SEQ ID NO: 260651 - RNA, 20 nt, Homo sapiens
agacuuugacucuccagaaa

SEQ ID NO: 260652 - RNA, 23 nt, Homo sapiens
agacuuuuccaacccucaucacc

SEQ ID NO: 260653 - RNA, 16 nt, Homo sapiens
agagaaaguacuucuc

SEQ ID NO: 260654 - RNA, 22 nt, Homo sapiens
agagaagaccuugggccaagau

SEQ ID NO: 260655 - RNA, 15 nt, Homo sapiens
agagaaggggcccaa

SEQ ID NO: 260656 - RNA, 17 nt, Homo sapiens
agagaaguguggggaag

SEQ ID NO: 260657 - RNA, 20 nt, Homo sapiens
agagaaugcacaaacagagg

SEQ ID NO: 260658 - RNA, 13 nt, Homo sapiens
agagacagggucu

SEQ ID NO: 260659 - RNA, 14 nt, Homo sapiens
agagacagggucuc

SEQ ID NO: 260660 - RNA, 23 nt, Homo sapiens
agagacgggcccuggugguggcu

SEQ ID NO: 260661 - RNA, 19 nt, Homo sapiens
agagacuuugacucuccag

SEQ ID NO: 260662 - RNA, 15 nt, Homo sapiens
agagaggacuguuga

SEQ ID NO: 260663 - RNA, 14 nt, Homo sapiens
agagagugcuauug

SEQ ID NO: 260664 - RNA, 20 nt, Homo sapiens
agagauggggucucacagug

SEQ ID NO: 260665 - RNA, 15 nt, Homo sapiens
agagaugugccccca

SEQ ID NO: 260666 - RNA, 22 nt, Homo sapiens
agagcaacaauccaucucucaa

SEQ ID NO: 260667 - RNA, 19 nt, Homo sapiens
agagcacacuguagcauua

SEQ ID NO: 260668 - RNA, 12 nt, Homo sapiens
agagcagcucac

SEQ ID NO: 260669 - RNA, 12 nt, Homo sapiens
agagcagugugg

SEQ ID NO: 260670 - RNA, 16 nt, Homo sapiens
agagccccacccucag

SEQ ID NO: 260671 - RNA, 18 nt, Homo sapiens
agagccccacccucagau

SEQ ID NO: 260672 - RNA, 14 nt, Homo sapiens
acuuauuuauauaa

SEQ ID NO: 260673 - RNA, 22 nt, Homo sapiens
acuucaaggguuuguugaacaa

SEQ ID NO: 260674 - RNA, 13 nt, Homo sapiens
acuucaagugacc

SEQ ID NO: 260675 - RNA, 14 nt, Homo sapiens
acuucacacacagg

SEQ ID NO: 260676 - RNA, 19 nt, Homo sapiens
acuucaguauguugucaaa

SEQ ID NO: 260677 - RNA, 16 nt, Homo sapiens
acuuccacugccaucc

SEQ ID NO: 260678 - RNA, 16 nt, Homo sapiens
acuuccaugacauaag

SEQ ID NO: 260679 - RNA, 13 nt, Homo sapiens
acuuccauuugcu

SEQ ID NO: 260680 - RNA, 16 nt, Homo sapiens
acuucccuacauggag

SEQ ID NO: 260681 - RNA, 11 nt, Homo sapiens
acuucccugaa

SEQ ID NO: 260682 - RNA, 17 nt, Homo sapiens
acuucucuauuaucuca

SEQ ID NO: 260683 - RNA, 18 nt, Homo sapiens
acuucucuauuaucucaa

SEQ ID NO: 260684 - RNA, 13 nt, Homo sapiens
acuucucucagga

SEQ ID NO: 260685 - RNA, 17 nt, Homo sapiens
acuucuuauacauuuga

SEQ ID NO: 260686 - RNA, 19 nt, Homo sapiens
acuugaaugcuaguuauac

SEQ ID NO: 260687 - RNA, 20 nt, Homo sapiens
acuugcacaaaaucacacag

SEQ ID NO: 260688 - RNA, 21 nt, Homo sapiens
acuugcacaaaaucacacagc

SEQ ID NO: 260689 - RNA, 14 nt, Homo sapiens
acuugcugccugaa

SEQ ID NO: 260690 - RNA, 23 nt, Homo sapiens
acuugcugcugagugcaccacuu

SEQ ID NO: 260691 - RNA, 16 nt, Homo sapiens
acuugcuucucuagcu

SEQ ID NO: 260692 - RNA, 23 nt, Homo sapiens
acuuggcucgaaucucugugccu

SEQ ID NO: 260693 - RNA, 20 nt, Homo sapiens
acuugggccacugugaagag

SEQ ID NO: 260694 - RNA, 19 nt, Homo sapiens
acuugguagaguuccuuuc

SEQ ID NO: 260695 - RNA, 14 nt, Homo sapiens
acuuggucugugag

SEQ ID NO: 260696 - RNA, 14 nt, Homo sapiens
acuugucccgggac

SEQ ID NO: 260697 - RNA, 19 nt, Homo sapiens
acuugucccgggacaccua

SEQ ID NO: 260698 - RNA, 23 nt, Homo sapiens
acuugucccgggacaccuaggcu

SEQ ID NO: 260699 - RNA, 15 nt, Homo sapiens
acuuguuuuaugcuc

SEQ ID NO: 260700 - RNA, 19 nt, Homo sapiens
acuuuaaucccacuugccc

SEQ ID NO: 260701 - RNA, 20 nt, Homo sapiens
acuuuaauuucucugcauca

SEQ ID NO: 260702 - RNA, 16 nt, Homo sapiens
acuuuaccugaaacaa

SEQ ID NO: 260703 - RNA, 12 nt, Homo sapiens
acuuuaccuuuu

SEQ ID NO: 260704 - RNA, 13 nt, Homo sapiens
acuuucacaucuc

SEQ ID NO: 260705 - RNA, 14 nt, Homo sapiens
acuuucacaucucu

SEQ ID NO: 260706 - RNA, 15 nt, Homo sapiens
acuuuccucuuccac

SEQ ID NO: 260707 - RNA, 16 nt, Homo sapiens
acuuucucacaugugg

SEQ ID NO: 260708 - RNA, 12 nt, Homo sapiens
acuuucugccag

SEQ ID NO: 260709 - RNA, 17 nt, Homo sapiens
acuuucugccagcaucu

SEQ ID NO: 260710 - RNA, 16 nt, Homo sapiens
acuuugaagaugucau

SEQ ID NO: 260711 - RNA, 14 nt, Homo sapiens
acuuugacaguguu

SEQ ID NO: 260712 - RNA, 13 nt, Homo sapiens
acuuugaccucug

SEQ ID NO: 260713 - RNA, 12 nt, Homo sapiens
acuuugauacca

SEQ ID NO: 260714 - RNA, 18 nt, Homo sapiens
acuuuguggucgacauca

SEQ ID NO: 260715 - RNA, 14 nt, Homo sapiens
acuuuguguucacc

SEQ ID NO: 260716 - RNA, 23 nt, Homo sapiens
acuuuuaaguugcugaugaacuc

SEQ ID NO: 260717 - RNA, 18 nt, Homo sapiens
acuuuuguuauuaugcuc

SEQ ID NO: 260718 - RNA, 22 nt, Homo sapiens
acuuuuguuauuaugcucuuaa

SEQ ID NO: 260719 - RNA, 18 nt, Homo sapiens
acuuuuuaccuaguacaa

SEQ ID NO: 260720 - RNA, 17 nt, Homo sapiens
acuuuuuccuggcucau

SEQ ID NO: 260721 - RNA, 21 nt, Homo sapiens
acuuuuuccuggcucaucucu

SEQ ID NO: 260722 - RNA, 11 nt, Homo sapiens
agaaaaaccac

SEQ ID NO: 260723 - RNA, 16 nt, Homo sapiens
agaaaaaggaugcauu

SEQ ID NO: 260724 - RNA, 15 nt, Homo sapiens
agaaaacuguuaaua

SEQ ID NO: 260725 - RNA, 19 nt, Homo sapiens
agaaaagcaguggcuccau

SEQ ID NO: 260726 - RNA, 19 nt, Homo sapiens
agaaaaggccuucuuccca

SEQ ID NO: 260727 - RNA, 20 nt, Homo sapiens
agaaaaggccuucuucccaa

SEQ ID NO: 260728 - RNA, 17 nt, Homo sapiens
agaaaauggaagacagc

SEQ ID NO: 260729 - RNA, 19 nt, Homo sapiens
agaaaauggacguguuaug

SEQ ID NO: 260730 - RNA, 18 nt, Homo sapiens
agaaaauggguuuauuca

SEQ ID NO: 260731 - RNA, 13 nt, Homo sapiens
agaaaauguucac

SEQ ID NO: 260732 - RNA, 12 nt, Homo sapiens
agaaacagccac

SEQ ID NO: 260733 - RNA, 16 nt, Homo sapiens
agaaacugacacaugc

SEQ ID NO: 260734 - RNA, 22 nt, Homo sapiens
agaaagacuuaucaacauuugu

SEQ ID NO: 260735 - RNA, 12 nt, Homo sapiens
agaaagccucag

SEQ ID NO: 260736 - RNA, 15 nt, Homo sapiens
agaaagcucaucuca

SEQ ID NO: 260737 - RNA, 17 nt, Homo sapiens
agaaagcucaucucagc

SEQ ID NO: 260738 - RNA, 14 nt, Homo sapiens
agaaaguacuucuc

SEQ ID NO: 260739 - RNA, 22 nt, Homo sapiens
agaaaguacuucuccacccugc

SEQ ID NO: 260740 - RNA, 12 nt, Homo sapiens
agaaagugaucc

SEQ ID NO: 260741 - RNA, 13 nt, Homo sapiens
agaaagugaucca

SEQ ID NO: 260742 - RNA, 17 nt, Homo sapiens
agaaaguggcuugaaau

SEQ ID NO: 260743 - RNA, 14 nt, Homo sapiens
agaaauagaauuau

SEQ ID NO: 260744 - RNA, 15 nt, Homo sapiens
agaaauccaauugga

SEQ ID NO: 260745 - RNA, 18 nt, Homo sapiens
agaaaucuagaagacugu

SEQ ID NO: 260746 - RNA, 12 nt, Homo sapiens
agaaauguacaa

SEQ ID NO: 260747 - RNA, 12 nt, Homo sapiens
agaacagccgcu

SEQ ID NO: 260748 - RNA, 15 nt, Homo sapiens
agaaccaaaaagagg

SEQ ID NO: 260749 - RNA, 23 nt, Homo sapiens
agaaccaaaaagaggcuauguga

SEQ ID NO: 260750 - RNA, 18 nt, Homo sapiens
agaacccuuggagccaau

SEQ ID NO: 260751 - RNA, 15 nt, Homo sapiens
agaaccgugaacugg

SEQ ID NO: 260752 - RNA, 19 nt, Homo sapiens
agaaccucgagguuucuca

SEQ ID NO: 260753 - RNA, 21 nt, Homo sapiens
agaacuaagaugaucaucucc

SEQ ID NO: 260754 - RNA, 15 nt, Homo sapiens
agaacucacucuggg

SEQ ID NO: 260755 - RNA, 22 nt, Homo sapiens
agaacuggaggaguuccuugau

SEQ ID NO: 260756 - RNA, 14 nt, Homo sapiens
agaacuugaccccc

SEQ ID NO: 260757 - RNA, 14 nt, Homo sapiens
agaacuuuccagga

SEQ ID NO: 260758 - RNA, 14 nt, Homo sapiens
agaagaaacuaccc

SEQ ID NO: 260759 - RNA, 15 nt, Homo sapiens
agaagaagugaccaa

SEQ ID NO: 260760 - RNA, 18 nt, Homo sapiens
agaagaagugaccaagga

SEQ ID NO: 260761 - RNA, 19 nt, Homo sapiens
agaagacacugaugggcaa

SEQ ID NO: 260762 - RNA, 17 nt, Homo sapiens
agaagaccuugggccaa

SEQ ID NO: 260763 - RNA, 18 nt, Homo sapiens
agaagaccuugggccaag

SEQ ID NO: 260764 - RNA, 11 nt, Homo sapiens
agaagaugaau

SEQ ID NO: 260765 - RNA, 22 nt, Homo sapiens
agaagauggcacuuauaaccaa

SEQ ID NO: 260766 - RNA, 13 nt, Homo sapiens
agaagccagcuuu

SEQ ID NO: 260767 - RNA, 23 nt, Homo sapiens
agaagcuaaauccuuuacuguua

SEQ ID NO: 260768 - RNA, 13 nt, Homo sapiens
agaaggaaaaaug

SEQ ID NO: 260769 - RNA, 13 nt, Homo sapiens
agaaggagggaga

SEQ ID NO: 260770 - RNA, 14 nt, Homo sapiens
agaaggcucuaucu

SEQ ID NO: 260771 - RNA, 22 nt, Homo sapiens
agaaggguaccuugaacacugg

SEQ ID NO: 260772 - RNA, 18 nt, Homo sapiens
agaagguugagggcaaug

SEQ ID NO: 260773 - RNA, 23 nt, Homo sapiens
agaagguugagggcaauggacaa

SEQ ID NO: 260774 - RNA, 17 nt, Homo sapiens
agaagguuuacucugug

SEQ ID NO: 260775 - RNA, 13 nt, Homo sapiens
agaaguuucugcc

SEQ ID NO: 260776 - RNA, 17 nt, Homo sapiens
agaauaaaggcaguuuu

SEQ ID NO: 260777 - RNA, 14 nt, Homo sapiens
agaauaaauacugu

SEQ ID NO: 260778 - RNA, 18 nt, Homo sapiens
agaauauaaaaauaaagc

SEQ ID NO: 260779 - RNA, 23 nt, Homo sapiens
agaauauuauuggaaaauucucu

SEQ ID NO: 260780 - RNA, 20 nt, Homo sapiens
agaauauuuuaaguauugca

SEQ ID NO: 260781 - RNA, 18 nt, Homo sapiens
agaaucccuagucuucaa

SEQ ID NO: 260782 - RNA, 14 nt, Homo sapiens
agaaucucaaauaa

SEQ ID NO: 260783 - RNA, 22 nt, Homo sapiens
agaaucuguuaccagaggacaa

SEQ ID NO: 260784 - RNA, 13 nt, Homo sapiens
agaaugacucugg

SEQ ID NO: 260785 - RNA, 22 nt, Homo sapiens
agaaugacucuggaaccauccu

SEQ ID NO: 260786 - RNA, 23 nt, Homo sapiens
agaaugagugaaucaccuguggu

SEQ ID NO: 260787 - RNA, 18 nt, Homo sapiens
agaaugcaguacuaacau

SEQ ID NO: 260788 - RNA, 16 nt, Homo sapiens
agaaugcccagugacc

SEQ ID NO: 260789 - RNA, 11 nt, Homo sapiens
agaaugcucuu

SEQ ID NO: 260790 - RNA, 15 nt, Homo sapiens
agaauggaaggugga

SEQ ID NO: 260791 - RNA, 12 nt, Homo sapiens
agaauggagcug

SEQ ID NO: 260792 - RNA, 15 nt, Homo sapiens
agaaugugacaggca

SEQ ID NO: 260793 - RNA, 13 nt, Homo sapiens
agaauguuuucaa

SEQ ID NO: 260794 - RNA, 15 nt, Homo sapiens
agaauuauaacugua

SEQ ID NO: 260795 - RNA, 21 nt, Homo sapiens
agaauuauaauuaguuccuca

SEQ ID NO: 260796 - RNA, 23 nt, Homo sapiens
agaauucugcuaccucacugggg

SEQ ID NO: 260797 - RNA, 17 nt, Homo sapiens
agaauugaaaaaccauu

SEQ ID NO: 260798 - RNA, 18 nt, Homo sapiens
agaauugaaaaaccauuu

SEQ ID NO: 260799 - RNA, 16 nt, Homo sapiens
agacaacauaacucaa

SEQ ID NO: 260800 - RNA, 12 nt, Homo sapiens
agacaaugacuu

SEQ ID NO: 260801 - RNA, 19 nt, Homo sapiens
agacaaugacuuacuguac

SEQ ID NO: 260802 - RNA, 18 nt, Homo sapiens
agacaccuugacagggca

SEQ ID NO: 260803 - RNA, 21 nt, Homo sapiens
agacaccuuggacauccuccu

SEQ ID NO: 260804 - RNA, 15 nt, Homo sapiens
agacacuauuuaucu

SEQ ID NO: 260805 - RNA, 16 nt, Homo sapiens
agacaggacccuggga

SEQ ID NO: 260806 - RNA, 15 nt, Homo sapiens
agacagggucaucga

SEQ ID NO: 260807 - RNA, 14 nt, Homo sapiens
agacagggucucac

SEQ ID NO: 260808 - RNA, 21 nt, Homo sapiens
agacagggucucacuguguug

SEQ ID NO: 260809 - RNA, 18 nt, Homo sapiens
agacaggguuuggcugug

SEQ ID NO: 260810 - RNA, 19 nt, Homo sapiens
agacaggguuuugccaugu

SEQ ID NO: 260811 - RNA, 23 nt, Homo sapiens
agacagucccugccaauggacua

SEQ ID NO: 260812 - RNA, 19 nt, Homo sapiens
agacaguguuuucugggau

SEQ ID NO: 260813 - RNA, 15 nt, Homo sapiens
agacauuauauagca

SEQ ID NO: 260814 - RNA, 19 nt, Homo sapiens
agacauuugcuaugagcug

SEQ ID NO: 260815 - RNA, 22 nt, Homo sapiens
agaccacgcccguccugccugu

SEQ ID NO: 260816 - RNA, 14 nt, Homo sapiens
agaccacugauaaa

SEQ ID NO: 260817 - RNA, 14 nt, Homo sapiens
agaccauaauguua

SEQ ID NO: 260818 - RNA, 14 nt, Homo sapiens
agcaugagugccgu

SEQ ID NO: 260819 - RNA, 16 nt, Homo sapiens
agcauggagcauggga

SEQ ID NO: 260820 - RNA, 14 nt, Homo sapiens
agcauggcugccaa

SEQ ID NO: 260821 - RNA, 13 nt, Homo sapiens
agcauguccuaau

SEQ ID NO: 260822 - RNA, 15 nt, Homo sapiens
agcauuacagugggu

SEQ ID NO: 260823 - RNA, 18 nt, Homo sapiens
agcauuuagcacauacua

SEQ ID NO: 260824 - RNA, 20 nt, Homo sapiens
agccaaauuuaaaacuguug

SEQ ID NO: 260825 - RNA, 14 nt, Homo sapiens
agccaacuuuugca

SEQ ID NO: 260826 - RNA, 23 nt, Homo sapiens
agccaacuuuugcauguuuugua

SEQ ID NO: 260827 - RNA, 23 nt, Homo sapiens
agccaagaauucuuaaauaugug

SEQ ID NO: 260828 - RNA, 15 nt, Homo sapiens
agccaagccagucaa

SEQ ID NO: 260829 - RNA, 15 nt, Homo sapiens
agccaaguuaagaau

SEQ ID NO: 260830 - RNA, 16 nt, Homo sapiens
agccacaaccaaaaaa

SEQ ID NO: 260831 - RNA, 20 nt, Homo sapiens
agccacagggugagcacucu

SEQ ID NO: 260832 - RNA, 14 nt, Homo sapiens
agccaccaguucuc

SEQ ID NO: 260833 - RNA, 18 nt, Homo sapiens
agccacuggacugacgac

SEQ ID NO: 260834 - RNA, 15 nt, Homo sapiens
agccacuuucugcca

SEQ ID NO: 260835 - RNA, 22 nt, Homo sapiens
agccacuuucugccagcaucug

SEQ ID NO: 260836 - RNA, 24 nt, Homo sapiens
agccacuuucugccagcaucugca

SEQ ID NO: 260837 - RNA, 17 nt, Homo sapiens
agccagaggucuggccc

SEQ ID NO: 260838 - RNA, 19 nt, Homo sapiens
agccagcaggcucucaggc

SEQ ID NO: 260839 - RNA, 15 nt, Homo sapiens
agccagguucugacu

SEQ ID NO: 260840 - RNA, 13 nt, Homo sapiens
agccauaugaaug

SEQ ID NO: 260841 - RNA, 17 nt, Homo sapiens
agccauaugaaugucag

SEQ ID NO: 260842 - RNA, 19 nt, Homo sapiens
agccaucccauuggcaaaa

SEQ ID NO: 260843 - RNA, 18 nt, Homo sapiens
agccauuccuguucccau

SEQ ID NO: 260844 - RNA, 22 nt, Homo sapiens
agccauuccuguucccaugaga

SEQ ID NO: 260845 - RNA, 14 nt, Homo sapiens
agcccaaguucaug

SEQ ID NO: 260846 - RNA, 13 nt, Homo sapiens
agcccaccccuca

SEQ ID NO: 260847 - RNA, 22 nt, Homo sapiens
agcccagggcuccugcacuuac

SEQ ID NO: 260848 - RNA, 14 nt, Homo sapiens
agccccaauucgau

SEQ ID NO: 260849 - RNA, 22 nt, Homo sapiens
agccccacccugccucacccac

SEQ ID NO: 260850 - RNA, 20 nt, Homo sapiens
agccccaucccaaacccuuc

SEQ ID NO: 260851 - RNA, 20 nt, Homo sapiens
agccccuggaugcagccuca

SEQ ID NO: 260852 - RNA, 21 nt, Homo sapiens
agcccuaggauaaaaagccag

SEQ ID NO: 260853 - RNA, 17 nt, Homo sapiens
agcccucaggucagggu

SEQ ID NO: 260854 - RNA, 13 nt, Homo sapiens
agcccucaucccg

SEQ ID NO: 260855 - RNA, 19 nt, Homo sapiens
agcccuccucugcacuccc

SEQ ID NO: 260856 - RNA, 15 nt, Homo sapiens
agcccugagcuuucu

SEQ ID NO: 260857 - RNA, 18 nt, Homo sapiens
agcccuuaggaagaauuu

SEQ ID NO: 260858 - RNA, 14 nt, Homo sapiens
agcccuuuacuuga

SEQ ID NO: 260859 - RNA, 15 nt, Homo sapiens
agcccuuuacuugac

SEQ ID NO: 260860 - RNA, 21 nt, Homo sapiens
agccgagaucacgccacugca

SEQ ID NO: 260861 - RNA, 20 nt, Homo sapiens
agccgagauugcaccacugc

SEQ ID NO: 260862 - RNA, 17 nt, Homo sapiens
agccgggagccugaccc

SEQ ID NO: 260863 - RNA, 20 nt, Homo sapiens
agccguuacuacacacaaag

SEQ ID NO: 260864 - RNA, 18 nt, Homo sapiens
agccuagccgaccucagc

SEQ ID NO: 260865 - RNA, 22 nt, Homo sapiens
agccuaggaaagccaguuacau

SEQ ID NO: 260866 - RNA, 18 nt, Homo sapiens
agccuaggugacagagug

SEQ ID NO: 260867 - RNA, 22 nt, Homo sapiens
agccucacugcaagcacugcau

SEQ ID NO: 260868 - RNA, 12 nt, Homo sapiens
agccucaucucu

SEQ ID NO: 260869 - RNA, 16 nt, Homo sapiens
agccuccagguuuccu

SEQ ID NO: 260870 - RNA, 18 nt, Homo sapiens
agccuccauccuaccccc

SEQ ID NO: 260871 - RNA, 16 nt, Homo sapiens
agccucugaaaaccaa

SEQ ID NO: 260872 - RNA, 14 nt, Homo sapiens
agccucugaauaug

SEQ ID NO: 260873 - RNA, 17 nt, Homo sapiens
agccucugaauaugaac

SEQ ID NO: 260874 - RNA, 15 nt, Homo sapiens
agccugcacggugaa

SEQ ID NO: 260875 - RNA, 19 nt, Homo sapiens
agccugcucuagugggaca

SEQ ID NO: 260876 - RNA, 20 nt, Homo sapiens
agccugcucuagugggacag

SEQ ID NO: 260877 - RNA, 14 nt, Homo sapiens
agccuggacccugu

SEQ ID NO: 260878 - RNA, 21 nt, Homo sapiens
agccuggcacagggcaguggg

SEQ ID NO: 260879 - RNA, 14 nt, Homo sapiens
agccuuagaaguca

SEQ ID NO: 260880 - RNA, 11 nt, Homo sapiens
agccuuccagg

SEQ ID NO: 260881 - RNA, 17 nt, Homo sapiens
agccuuggcucuacccu

SEQ ID NO: 260882 - RNA, 18 nt, Homo sapiens
agccuuggcucuacccug

SEQ ID NO: 260883 - RNA, 14 nt, Homo sapiens
agccuuugccuccc

SEQ ID NO: 260884 - RNA, 19 nt, Homo sapiens
agcgaggaggcuccagagg

SEQ ID NO: 260885 - RNA, 15 nt, Homo sapiens
agcgauuaauaacag

SEQ ID NO: 260886 - RNA, 13 nt, Homo sapiens
agcgugagccacu

SEQ ID NO: 260887 - RNA, 16 nt, Homo sapiens
agcgugagccacugca

SEQ ID NO: 260888 - RNA, 16 nt, Homo sapiens
agcgugugacuacucc

SEQ ID NO: 260889 - RNA, 22 nt, Homo sapiens
agcuaacauggaaguacuauaa

SEQ ID NO: 260890 - RNA, 15 nt, Homo sapiens
agcuaagcagucuuc

SEQ ID NO: 260891 - RNA, 14 nt, Homo sapiens
agcuacugacuaug

SEQ ID NO: 260892 - RNA, 13 nt, Homo sapiens
agcuacugaugag

SEQ ID NO: 260893 - RNA, 22 nt, Homo sapiens
agcuacuguuuauuauuuuauu

SEQ ID NO: 260894 - RNA, 18 nt, Homo sapiens
agcuaggccuggccagau

SEQ ID NO: 260895 - RNA, 22 nt, Homo sapiens
agcuaggccuggccagaugcac

SEQ ID NO: 260896 - RNA, 17 nt, Homo sapiens
agcuaguucccaugacu

SEQ ID NO: 260897 - RNA, 20 nt, Homo sapiens
agcucacauagauaugacuu

SEQ ID NO: 260898 - RNA, 12 nt, Homo sapiens
agcucaccagcc

SEQ ID NO: 260899 - RNA, 16 nt, Homo sapiens
agcucaccucucccuu

SEQ ID NO: 260900 - RNA, 21 nt, Homo sapiens
agcucagagaggcuagaugau

SEQ ID NO: 260901 - RNA, 18 nt, Homo sapiens
agcucagguagcacuuua

SEQ ID NO: 260902 - RNA, 22 nt, Homo sapiens
agcucaggugucccugcacuug

SEQ ID NO: 260903 - RNA, 16 nt, Homo sapiens
agcucaguuacggggu

SEQ ID NO: 260904 - RNA, 12 nt, Homo sapiens
agcucaucucag

SEQ ID NO: 260905 - RNA, 19 nt, Homo sapiens
agcuccucuauauuuccac

SEQ ID NO: 260906 - RNA, 15 nt, Homo sapiens
agcuccuuaaggcuc

SEQ ID NO: 260907 - RNA, 23 nt, Homo sapiens
agcuccuucuguccuacucugug

SEQ ID NO: 260908 - RNA, 19 nt, Homo sapiens
agcuccuugucugucucca

SEQ ID NO: 260909 - RNA, 15 nt, Homo sapiens
agcucgguggaccca

SEQ ID NO: 260910 - RNA, 12 nt, Homo sapiens
agcucucuaggc

SEQ ID NO: 260911 - RNA, 20 nt, Homo sapiens
agcucugaaaccaguguuag

SEQ ID NO: 260912 - RNA, 23 nt, Homo sapiens
agcucugaaaccaguguuaggga

SEQ ID NO: 260913 - RNA, 13 nt, Homo sapiens
agcugagcaggga

SEQ ID NO: 260914 - RNA, 14 nt, Homo sapiens
agcugauacuuuga

SEQ ID NO: 260915 - RNA, 14 nt, Homo sapiens
agcugccaccugcc

SEQ ID NO: 260916 - RNA, 15 nt, Homo sapiens
agcugccuguacaca

SEQ ID NO: 260917 - RNA, 15 nt, Homo sapiens
agcugcucacugcuc

SEQ ID NO: 260918 - RNA, 17 nt, Homo sapiens
agcugcucagugcaacu

SEQ ID NO: 260919 - RNA, 15 nt, Homo sapiens
agcugcuuccagugg

SEQ ID NO: 260920 - RNA, 20 nt, Homo sapiens
agcugcuugggcuucauccu

SEQ ID NO: 260921 - RNA, 18 nt, Homo sapiens
agcuggaaaaaguguccu

SEQ ID NO: 260922 - RNA, 22 nt, Homo sapiens
agcuggaagggucaacaucuuu

SEQ ID NO: 260923 - RNA, 22 nt, Homo sapiens
agcuggagucugucaauguccu

SEQ ID NO: 260924 - RNA, 18 nt, Homo sapiens
agcugggacuacaggcac

SEQ ID NO: 260925 - RNA, 17 nt, Homo sapiens
agcugggacuacaggug

SEQ ID NO: 260926 - RNA, 20 nt, Homo sapiens
agcugggagaaccaaaaaga

SEQ ID NO: 260927 - RNA, 19 nt, Homo sapiens
agcuggggaugucucucau

SEQ ID NO: 260928 - RNA, 17 nt, Homo sapiens
agcuggguguguuggca

SEQ ID NO: 260929 - RNA, 19 nt, Homo sapiens
agcugguugggaagacaug

SEQ ID NO: 260930 - RNA, 20 nt, Homo sapiens
agcuguaaaguugcagguug

SEQ ID NO: 260931 - RNA, 23 nt, Homo sapiens
agcuguccugcagcaaacacucc

SEQ ID NO: 260932 - RNA, 21 nt, Homo sapiens
agcuguggagacucuuguacu

SEQ ID NO: 260933 - RNA, 16 nt, Homo sapiens
agcuuaagccacugcc

SEQ ID NO: 260934 - RNA, 20 nt, Homo sapiens
agcuuacaagccagcuggag

SEQ ID NO: 260935 - RNA, 18 nt, Homo sapiens
agcuuagacuaaggccau

SEQ ID NO: 260936 - RNA, 12 nt, Homo sapiens
agcuuaucucag

SEQ ID NO: 260937 - RNA, 14 nt, Homo sapiens
agcuuaucucaggg

SEQ ID NO: 260938 - RNA, 17 nt, Homo sapiens
agcuugagcugcucugc

SEQ ID NO: 260939 - RNA, 22 nt, Homo sapiens
agcuuucauguaaacugugcac

SEQ ID NO: 260940 - RNA, 21 nt, Homo sapiens
agcuuugagcuuaagaauuuu

SEQ ID NO: 260941 - RNA, 16 nt, Homo sapiens
agcuuugcugggagag

SEQ ID NO: 260942 - RNA, 19 nt, Homo sapiens
aggaaaaaauccucacuca

SEQ ID NO: 260943 - RNA, 15 nt, Homo sapiens
aggaaaaauguguaa

SEQ ID NO: 260944 - RNA, 22 nt, Homo sapiens
aggaaacuggguuccugcaaug

SEQ ID NO: 260945 - RNA, 22 nt, Homo sapiens
aggaaagaaagagcaucaggaa

SEQ ID NO: 260946 - RNA, 17 nt, Homo sapiens
aggaaaggaaacuuuga

SEQ ID NO: 260947 - RNA, 13 nt, Homo sapiens
aggaacacuccuu

SEQ ID NO: 260948 - RNA, 15 nt, Homo sapiens
aggaacauacuucag

SEQ ID NO: 260949 - RNA, 15 nt, Homo sapiens
aggaaccagcaggau

SEQ ID NO: 260950 - RNA, 19 nt, Homo sapiens
agauguuauacaaccauca

SEQ ID NO: 260951 - RNA, 19 nt, Homo sapiens
agauguucuaagucuuucc

SEQ ID NO: 260952 - RNA, 12 nt, Homo sapiens
agauguuuauuu

SEQ ID NO: 260953 - RNA, 22 nt, Homo sapiens
agauucuaauggcuuuauugca

SEQ ID NO: 260954 - RNA, 18 nt, Homo sapiens
agauucucuuggcucaua

SEQ ID NO: 260955 - RNA, 16 nt, Homo sapiens
agauuguuaaaauaac

SEQ ID NO: 260956 - RNA, 17 nt, Homo sapiens
agauuucagauuuguga

SEQ ID NO: 260957 - RNA, 13 nt, Homo sapiens
agauuugccuuau

SEQ ID NO: 260958 - RNA, 13 nt, Homo sapiens
agauuuuggcaaa

SEQ ID NO: 260959 - RNA, 16 nt, Homo sapiens
agcaaaaagcaaaauc

SEQ ID NO: 260960 - RNA, 22 nt, Homo sapiens
agcaaaaccaaauauuccagag

SEQ ID NO: 260961 - RNA, 20 nt, Homo sapiens
agcaaaauacaugacauuua

SEQ ID NO: 260962 - RNA, 16 nt, Homo sapiens
agcaaaauuacuacca

SEQ ID NO: 260963 - RNA, 21 nt, Homo sapiens
aggaccucccucccccuggca

SEQ ID NO: 260964 - RNA, 20 nt, Homo sapiens
aggacgcugaccguggagcu

SEQ ID NO: 260965 - RNA, 17 nt, Homo sapiens
aggacucacuagacuca

SEQ ID NO: 260966 - RNA, 17 nt, Homo sapiens
aggacuguugacaucca

SEQ ID NO: 260967 - RNA, 16 nt, Homo sapiens
aggacuuccauuugcu

SEQ ID NO: 260968 - RNA, 21 nt, Homo sapiens
aggacuuccauuugcuuuguc

SEQ ID NO: 260969 - RNA, 20 nt, Homo sapiens
aggagagcuagcagcaggga

SEQ ID NO: 260970 - RNA, 18 nt, Homo sapiens
aggagaggggcacagggu

SEQ ID NO: 260971 - RNA, 22 nt, Homo sapiens
aggagaggggcagaacagccgc

SEQ ID NO: 260972 - RNA, 18 nt, Homo sapiens
aggagccaccaguucuca

SEQ ID NO: 260973 - RNA, 14 nt, Homo sapiens
aggaggccaugccc

SEQ ID NO: 260974 - RNA, 14 nt, Homo sapiens
aggagggaggugcu

SEQ ID NO: 260975 - RNA, 18 nt, Homo sapiens
aggagggaggugcuucua

SEQ ID NO: 260976 - RNA, 18 nt, Homo sapiens
aggagggcagaucacuuc

SEQ ID NO: 260977 - RNA, 15 nt, Homo sapiens
aggagggcaggcauc

SEQ ID NO: 260978 - RNA, 22 nt, Homo sapiens
aggagggcaugugcagacacuc

SEQ ID NO: 260979 - RNA, 17 nt, Homo sapiens
aggaggggugugggcac

SEQ ID NO: 260980 - RNA, 21 nt, Homo sapiens
aggagggucaggaaggaugag

SEQ ID NO: 260981 - RNA, 22 nt, Homo sapiens
aggaggugcuaucgcaccacug

SEQ ID NO: 260982 - RNA, 23 nt, Homo sapiens
aggaggugcuaucgcaccacugu

SEQ ID NO: 260983 - RNA, 21 nt, Homo sapiens
aggaggugggauaucacuucc

SEQ ID NO: 260984 - RNA, 17 nt, Homo sapiens
aggagguuuaggucaag

SEQ ID NO: 260985 - RNA, 21 nt, Homo sapiens
aggagucccugccaucauguu

SEQ ID NO: 260986 - RNA, 17 nt, Homo sapiens
aggagugccacuucaug

SEQ ID NO: 260987 - RNA, 17 nt, Homo sapiens
aggagugggucgcccac

SEQ ID NO: 260988 - RNA, 13 nt, Homo sapiens
aggaguuccuuga

SEQ ID NO: 260989 - RNA, 14 nt, Homo sapiens
aggaguugucuguc

SEQ ID NO: 260990 - RNA, 21 nt, Homo sapiens
aggaguuugggguaugggaga

SEQ ID NO: 260991 - RNA, 23 nt, Homo sapiens
aggauauaguuaucaaucucuag

SEQ ID NO: 260992 - RNA, 21 nt, Homo sapiens
aggaucaaaguugaugaaaua

SEQ ID NO: 260993 - RNA, 21 nt, Homo sapiens
aggauccacuuggucugugag

SEQ ID NO: 260994 - RNA, 18 nt, Homo sapiens
aggauccccucucuuccu

SEQ ID NO: 260995 - RNA, 22 nt, Homo sapiens
aggauccugagccagauuucac

SEQ ID NO: 260996 - RNA, 20 nt, Homo sapiens
aggaucuccccgaaucucaa

SEQ ID NO: 260997 - RNA, 17 nt, Homo sapiens
aggaucuuuugaaccca

SEQ ID NO: 260998 - RNA, 18 nt, Homo sapiens
aggaugagaugacagaua

SEQ ID NO: 260999 - RNA, 15 nt, Homo sapiens
aggaugagcauuuag

SEQ ID NO: 261000 - RNA, 21 nt, Homo sapiens
aggaugagcauuuagggcaag

SEQ ID NO: 261001 - RNA, 17 nt, Homo sapiens
aggauggcaggggcaaa

SEQ ID NO: 261002 - RNA, 16 nt, Homo sapiens
aggaugggaaggaggg

SEQ ID NO: 261003 - RNA, 22 nt, Homo sapiens
aggaugugucuuggggugggca

SEQ ID NO: 261004 - RNA, 14 nt, Homo sapiens
aggauguucuagca

SEQ ID NO: 261005 - RNA, 17 nt, Homo sapiens
aggauguucugggacac

SEQ ID NO: 261006 - RNA, 12 nt, Homo sapiens
aggauuacccac

SEQ ID NO: 261007 - RNA, 14 nt, Homo sapiens
aggauugcuacugu

SEQ ID NO: 261008 - RNA, 15 nt, Homo sapiens
aggauuucaugauuu

SEQ ID NO: 261009 - RNA, 15 nt, Homo sapiens
aggauuuggcucgcu

SEQ ID NO: 261010 - RNA, 17 nt, Homo sapiens
aggauuuuaugcuuuaa

SEQ ID NO: 261011 - RNA, 15 nt, Homo sapiens
aggauuuugauccaa

SEQ ID NO: 261012 - RNA, 12 nt, Homo sapiens
aggcaagcacuu

SEQ ID NO: 261013 - RNA, 13 nt, Homo sapiens
aggcacagaugaa

SEQ ID NO: 261014 - RNA, 17 nt, Homo sapiens
aggcacccucagagaag

SEQ ID NO: 261015 - RNA, 14 nt, Homo sapiens
aggcacccuuagcc

SEQ ID NO: 261016 - RNA, 17 nt, Homo sapiens
aggcagauuucagggaa

SEQ ID NO: 261017 - RNA, 14 nt, Homo sapiens
aggcagcaccugau

SEQ ID NO: 261018 - RNA, 20 nt, Homo sapiens
aggcagcaccugauucucac

SEQ ID NO: 261019 - RNA, 17 nt, Homo sapiens
aggcagccacuccuagc

SEQ ID NO: 261020 - RNA, 18 nt, Homo sapiens
aggcagccacuccuagcc

SEQ ID NO: 261021 - RNA, 18 nt, Homo sapiens
aggcagccggccaaggcc

SEQ ID NO: 261022 - RNA, 22 nt, Homo sapiens
aggcagcgcugcaguugcucag

SEQ ID NO: 261023 - RNA, 20 nt, Homo sapiens
aggcaggaggaucacuugag

SEQ ID NO: 261024 - RNA, 20 nt, Homo sapiens
aggcaggauauuccaagggc

SEQ ID NO: 261025 - RNA, 21 nt, Homo sapiens
aggcagggaaggaucccauga

SEQ ID NO: 261026 - RNA, 18 nt, Homo sapiens
aggcagggccugauuuau

SEQ ID NO: 261027 - RNA, 14 nt, Homo sapiens
aggcagggucucac

SEQ ID NO: 261028 - RNA, 16 nt, Homo sapiens
aggcagggucucacuc

SEQ ID NO: 261029 - RNA, 19 nt, Homo sapiens
aggcauaagaaaacuaaga

SEQ ID NO: 261030 - RNA, 18 nt, Homo sapiens
aggcauccaguaucuuga

SEQ ID NO: 261031 - RNA, 22 nt, Homo sapiens
aggcauccaguaucuugaagac

SEQ ID NO: 261032 - RNA, 12 nt, Homo sapiens
aggcaugugcaa

SEQ ID NO: 261033 - RNA, 20 nt, Homo sapiens
aggccagagggagugacaga

SEQ ID NO: 261034 - RNA, 21 nt, Homo sapiens
aggccagagggagugacagag

SEQ ID NO: 261035 - RNA, 15 nt, Homo sapiens
aggccagcaccaucu

SEQ ID NO: 261036 - RNA, 17 nt, Homo sapiens
aggccagcaccaucucu

SEQ ID NO: 261037 - RNA, 16 nt, Homo sapiens
aggccaggcagauccc

SEQ ID NO: 261038 - RNA, 17 nt, Homo sapiens
aggccagugggacccca

SEQ ID NO: 261039 - RNA, 15 nt, Homo sapiens
aggccauugucccug

SEQ ID NO: 261040 - RNA, 15 nt, Homo sapiens
aggcccagcugcuca

SEQ ID NO: 261041 - RNA, 17 nt, Homo sapiens
aggcccagcugcucagu

SEQ ID NO: 261042 - RNA, 16 nt, Homo sapiens
aggcccccacuugccu

SEQ ID NO: 261043 - RNA, 21 nt, Homo sapiens
aggccgcacaucucacuucag

SEQ ID NO: 261044 - RNA, 14 nt, Homo sapiens
aggccguggcugcc

SEQ ID NO: 261045 - RNA, 19 nt, Homo sapiens
aggccuccuuauuccccau

SEQ ID NO: 261046 - RNA, 19 nt, Homo sapiens
aggccucuccaguuugcac

SEQ ID NO: 261047 - RNA, 23 nt, Homo sapiens
aggccuggccagaugcaccagcc

SEQ ID NO: 261048 - RNA, 22 nt, Homo sapiens
aggcgauccaccugucucagcc

SEQ ID NO: 261049 - RNA, 21 nt, Homo sapiens
aggcgccccuucccccuccaa

SEQ ID NO: 261050 - RNA, 13 nt, Homo sapiens
aggcggugagcaa

SEQ ID NO: 261051 - RNA, 12 nt, Homo sapiens
aggcuacauaua

SEQ ID NO: 261052 - RNA, 15 nt, Homo sapiens
aggcuacauauacau

SEQ ID NO: 261053 - RNA, 12 nt, Homo sapiens
aggcuagaugau

SEQ ID NO: 261054 - RNA, 13 nt, Homo sapiens
aggcuaugugagc

SEQ ID NO: 261055 - RNA, 17 nt, Homo sapiens
aggcuaugugagcacaa

SEQ ID NO: 261056 - RNA, 22 nt, Homo sapiens
aggcuccagagggcacucugcu

SEQ ID NO: 261057 - RNA, 20 nt, Homo sapiens
aggcuccaggagcagccaca

SEQ ID NO: 261058 - RNA, 15 nt, Homo sapiens
aggcucuccaggugg

SEQ ID NO: 261059 - RNA, 16 nt, Homo sapiens
aggcuggagugcaaug

SEQ ID NO: 261060 - RNA, 15 nt, Homo sapiens
aggcuggcagugaca

SEQ ID NO: 261061 - RNA, 22 nt, Homo sapiens
aggcuggcagugacagaacuaa

SEQ ID NO: 261062 - RNA, 15 nt, Homo sapiens
aggcuggccagucca

SEQ ID NO: 261063 - RNA, 20 nt, Homo sapiens
aggcugggagagccuuccag

SEQ ID NO: 261064 - RNA, 13 nt, Homo sapiens
aggcuggucucaa

SEQ ID NO: 261065 - RNA, 15 nt, Homo sapiens
aggcuucuggggcuu

SEQ ID NO: 261066 - RNA, 21 nt, Homo sapiens
aggcuucuuccccccaaaacu

SEQ ID NO: 261067 - RNA, 13 nt, Homo sapiens
agggaaaaaccag

SEQ ID NO: 261068 - RNA, 18 nt, Homo sapiens
agggaaaauuauuugcau

SEQ ID NO: 261069 - RNA, 19 nt, Homo sapiens
agggaacugaacauuccag

SEQ ID NO: 261070 - RNA, 22 nt, Homo sapiens
agggaagagccccccacugcag

SEQ ID NO: 261071 - RNA, 16 nt, Homo sapiens
agggaaggaucccaug

SEQ ID NO: 261072 - RNA, 15 nt, Homo sapiens
agggaauaauccaga

SEQ ID NO: 261073 - RNA, 15 nt, Homo sapiens
agggacauguggaaa

SEQ ID NO: 261074 - RNA, 14 nt, Homo sapiens
agggacccacuuca

SEQ ID NO: 261075 - RNA, 18 nt, Homo sapiens
agggacuugaaguuguua

SEQ ID NO: 261076 - RNA, 15 nt, Homo sapiens
agggagaagagggaa

SEQ ID NO: 261077 - RNA, 16 nt, Homo sapiens
agggagagagugcuau

SEQ ID NO: 261078 - RNA, 21 nt, Homo sapiens
agggaggcaggggaggggugc

SEQ ID NO: 261079 - RNA, 19 nt, Homo sapiens
agggagggcuccagacaca

SEQ ID NO: 261080 - RNA, 17 nt, Homo sapiens
agggauagcacugagca

SEQ ID NO: 261081 - RNA, 18 nt, Homo sapiens
agggauuuggggcucaga

SEQ ID NO: 261082 - RNA, 15 nt, Homo sapiens
agggauuuucagccc

SEQ ID NO: 261083 - RNA, 19 nt, Homo sapiens
agggauuuucagcccucag

SEQ ID NO: 261084 - RNA, 14 nt, Homo sapiens
agggcacugggcug

SEQ ID NO: 261085 - RNA, 23 nt, Homo sapiens
agggcagggcugaggccucucau

SEQ ID NO: 261086 - RNA, 17 nt, Homo sapiens
agggcauggccaggugg

SEQ ID NO: 261087 - RNA, 16 nt, Homo sapiens
agggccccagcacuaa

SEQ ID NO: 261088 - RNA, 19 nt, Homo sapiens
agggcuccugcacuuacuu

SEQ ID NO: 261089 - RNA, 15 nt, Homo sapiens
agggcugagugcccu

SEQ ID NO: 261090 - RNA, 15 nt, Homo sapiens
agggcugccuuugga

SEQ ID NO: 261091 - RNA, 19 nt, Homo sapiens
agggcuuggacucaagcaa

SEQ ID NO: 261092 - RNA, 16 nt, Homo sapiens
aggggaagagacuugg

SEQ ID NO: 261093 - RNA, 18 nt, Homo sapiens
aggggagaguaacccugu

SEQ ID NO: 261094 - RNA, 23 nt, Homo sapiens
aggggagcaaaaucgaugcagug

SEQ ID NO: 261095 - RNA, 21 nt, Homo sapiens
aggggauagagagagaccacu

SEQ ID NO: 261096 - RNA, 13 nt, Homo sapiens
aggggcacagggu

SEQ ID NO: 261097 - RNA, 22 nt, Homo sapiens
aggggcccaaauucuuucagug

SEQ ID NO: 261098 - RNA, 16 nt, Homo sapiens
aggggcccaagagaga

SEQ ID NO: 261099 - RNA, 16 nt, Homo sapiens
aggggccggccagugg

SEQ ID NO: 261100 - RNA, 20 nt, Homo sapiens
aggggccuuagggcacuggg

SEQ ID NO: 261101 - RNA, 15 nt, Homo sapiens
aggggcucucucaug

SEQ ID NO: 261102 - RNA, 19 nt, Homo sapiens
agggggccaggugcacaga

SEQ ID NO: 261103 - RNA, 15 nt, Homo sapiens
agggggugcccuccc

SEQ ID NO: 261104 - RNA, 12 nt, Homo sapiens
agcuacugauga

SEQ ID NO: 261105 - RNA, 16 nt, Homo sapiens
agcuagcaacauuugu

SEQ ID NO: 261106 - RNA, 21 nt, Homo sapiens
agcuagcaacauuuguuuuag

SEQ ID NO: 261107 - RNA, 14 nt, Homo sapiens
agugcucuuuccac

SEQ ID NO: 261108 - RNA, 14 nt, Homo sapiens
agugcugugucauu

SEQ ID NO: 261109 - RNA, 22 nt, Homo sapiens
agugcuuguuccucucaucucc

SEQ ID NO: 261110 - RNA, 17 nt, Homo sapiens
aguggcucacaccugua

SEQ ID NO: 261111 - RNA, 18 nt, Homo sapiens
aguggcuugaaaucuuuu

SEQ ID NO: 261112 - RNA, 19 nt, Homo sapiens
aguggcuugaaaucuuuuu

SEQ ID NO: 261113 - RNA, 20 nt, Homo sapiens
agugggagcugaguggggga

SEQ ID NO: 261114 - RNA, 22 nt, Homo sapiens
aggccucuccaguuugcaccug

SEQ ID NO: 261115 - RNA, 15 nt, Homo sapiens
aggccucuguggcac

SEQ ID NO: 261116 - RNA, 18 nt, Homo sapiens
aggccuggccagaugcac

SEQ ID NO: 261117 - RNA, 20 nt, Homo sapiens
aggccuggccagaugcacca

SEQ ID NO: 261118 - RNA, 18 nt, Homo sapiens
aggccugggccgcugcca

SEQ ID NO: 261119 - RNA, 21 nt, Homo sapiens
aggccugggccgcugccacgu

SEQ ID NO: 261120 - RNA, 15 nt, Homo sapiens
aggcgauccaccugu

SEQ ID NO: 261121 - RNA, 19 nt, Homo sapiens
aggcgauccaccugucuca

SEQ ID NO: 261122 - RNA, 12 nt, Homo sapiens
aggcggugagca

SEQ ID NO: 261123 - RNA, 19 nt, Homo sapiens
aggcuacauauacauaguu

SEQ ID NO: 261124 - RNA, 19 nt, Homo sapiens
aggcuaguugggaugggca

SEQ ID NO: 261125 - RNA, 16 nt, Homo sapiens
aggcucacaguuacag

SEQ ID NO: 261126 - RNA, 21 nt, Homo sapiens
aggcuccacuuggucugugag

SEQ ID NO: 261127 - RNA, 22 nt, Homo sapiens
aggcuccacuuggucugugaga

SEQ ID NO: 261128 - RNA, 15 nt, Homo sapiens
aggcucgagcaugcc

SEQ ID NO: 261129 - RNA, 17 nt, Homo sapiens
aggcucguugacuggcu

SEQ ID NO: 261130 - RNA, 12 nt, Homo sapiens
aggcucucaggc

SEQ ID NO: 261131 - RNA, 16 nt, Homo sapiens
aggcucucaggccagc

SEQ ID NO: 261132 - RNA, 12 nt, Homo sapiens
aggcucuucucc

SEQ ID NO: 261133 - RNA, 17 nt, Homo sapiens
aggcugaggcaagagaa

SEQ ID NO: 261134 - RNA, 21 nt, Homo sapiens
aggcugcuuagauuucuagca

SEQ ID NO: 261135 - RNA, 20 nt, Homo sapiens
aggcuggagugaaguggugu

SEQ ID NO: 261136 - RNA, 20 nt, Homo sapiens
aggcuggucuugaacucuug

SEQ ID NO: 261137 - RNA, 11 nt, Homo sapiens
aggcuguaacu

SEQ ID NO: 261138 - RNA, 19 nt, Homo sapiens
aggcugucaauuacaggaa

SEQ ID NO: 261139 - RNA, 19 nt, Homo sapiens
aggcugugccaucagcucc

SEQ ID NO: 261140 - RNA, 19 nt, Homo sapiens
aggcuguggcuggugagcc

SEQ ID NO: 261141 - RNA, 18 nt, Homo sapiens
aggcuuaaucacaccguc

SEQ ID NO: 261142 - RNA, 21 nt, Homo sapiens
agggaacccucuaagggaccu

SEQ ID NO: 261143 - RNA, 15 nt, Homo sapiens
agggaaccugugucc

SEQ ID NO: 261144 - RNA, 16 nt, Homo sapiens
agggaagaggggugca

SEQ ID NO: 261145 - RNA, 18 nt, Homo sapiens
agggaagcugucccucac

SEQ ID NO: 261146 - RNA, 21 nt, Homo sapiens
agggaagcugucccucacugu

SEQ ID NO: 261147 - RNA, 22 nt, Homo sapiens
agggaagcugucccucacuguu

SEQ ID NO: 261148 - RNA, 15 nt, Homo sapiens
agggaaguccuugca

SEQ ID NO: 261149 - RNA, 17 nt, Homo sapiens
agggaauaauccagaaa

SEQ ID NO: 261150 - RNA, 20 nt, Homo sapiens
agggacaccaagccuuggcu

SEQ ID NO: 261151 - RNA, 15 nt, Homo sapiens
agggacagagcauug

SEQ ID NO: 261152 - RNA, 16 nt, Homo sapiens
agggacgccugggggu

SEQ ID NO: 261153 - RNA, 15 nt, Homo sapiens
agggagaagaaagaa

SEQ ID NO: 261154 - RNA, 14 nt, Homo sapiens
agggagcacugggu

SEQ ID NO: 261155 - RNA, 14 nt, Homo sapiens
agggagcuggaaaa

SEQ ID NO: 261156 - RNA, 17 nt, Homo sapiens
agggagugggcuaagca

SEQ ID NO: 261157 - RNA, 18 nt, Homo sapiens
agggcaauggacaaggaa

SEQ ID NO: 261158 - RNA, 15 nt, Homo sapiens
agggcagacagcaga

SEQ ID NO: 261159 - RNA, 16 nt, Homo sapiens
agggcaggaacuugca

SEQ ID NO: 261160 - RNA, 14 nt, Homo sapiens
agggccacauggga

SEQ ID NO: 261161 - RNA, 16 nt, Homo sapiens
agggccacaugggagg

SEQ ID NO: 261162 - RNA, 15 nt, Homo sapiens
agggcucaaggguga

SEQ ID NO: 261163 - RNA, 14 nt, Homo sapiens
aggggcaguggugg

SEQ ID NO: 261164 - RNA, 23 nt, Homo sapiens
aggggcccaaauucuuucagugg

SEQ ID NO: 261165 - RNA, 21 nt, Homo sapiens
aggggccuuagggcacugggc

SEQ ID NO: 261166 - RNA, 14 nt, Homo sapiens
aggggcucucucau

SEQ ID NO: 261167 - RNA, 13 nt, Homo sapiens
aggggucauucau

SEQ ID NO: 261168 - RNA, 14 nt, Homo sapiens
aggggucauucaug

SEQ ID NO: 261169 - RNA, 13 nt, Homo sapiens
aggggugggacac

SEQ ID NO: 261170 - RNA, 15 nt, Homo sapiens
aggguaaggcugugg

SEQ ID NO: 261171 - RNA, 16 nt, Homo sapiens
aggguaccuugaacac

SEQ ID NO: 261172 - RNA, 21 nt, Homo sapiens
aggguaccuugaacacugggg

SEQ ID NO: 261173 - RNA, 20 nt, Homo sapiens
aggguaucaggugcugccau

SEQ ID NO: 261174 - RNA, 15 nt, Homo sapiens
aggguauggggcuag

SEQ ID NO: 261175 - RNA, 20 nt, Homo sapiens
aggguauguuuuauauagca

SEQ ID NO: 261176 - RNA, 13 nt, Homo sapiens
agggucauagcau

SEQ ID NO: 261177 - RNA, 15 nt, Homo sapiens
agggucccucugugu

SEQ ID NO: 261178 - RNA, 16 nt, Homo sapiens
agggucccucugugua

SEQ ID NO: 261179 - RNA, 14 nt, Homo sapiens
agggucucacugug

SEQ ID NO: 261180 - RNA, 22 nt, Homo sapiens
agggucucacuguguugcccag

SEQ ID NO: 261181 - RNA, 13 nt, Homo sapiens
agggugacggggg

SEQ ID NO: 261182 - RNA, 20 nt, Homo sapiens
agggugguggugguggugaa

SEQ ID NO: 261183 - RNA, 20 nt, Homo sapiens
agggugugggccaccagaga

SEQ ID NO: 261184 - RNA, 14 nt, Homo sapiens
aggguuacaaaucu

SEQ ID NO: 261185 - RNA, 14 nt, Homo sapiens
agguaaaacaaauc

SEQ ID NO: 261186 - RNA, 18 nt, Homo sapiens
agguaaggaauaccuguc

SEQ ID NO: 261187 - RNA, 16 nt, Homo sapiens
agguaaggugagggaa

SEQ ID NO: 261188 - RNA, 19 nt, Homo sapiens
agguagaaauaucugaaaa

SEQ ID NO: 261189 - RNA, 18 nt, Homo sapiens
agguaugcaaucaaaucu

SEQ ID NO: 261190 - RNA, 21 nt, Homo sapiens
agguaugguuaauaaguuuca

SEQ ID NO: 261191 - RNA, 22 nt, Homo sapiens
agguauucguaaggaugggaag

SEQ ID NO: 261192 - RNA, 15 nt, Homo sapiens
aggucauugguggca

SEQ ID NO: 261193 - RNA, 15 nt, Homo sapiens
agguccagcucugga

SEQ ID NO: 261194 - RNA, 16 nt, Homo sapiens
agguccuggugguauu

SEQ ID NO: 261195 - RNA, 14 nt, Homo sapiens
aggucuccaagacc

SEQ ID NO: 261196 - RNA, 21 nt, Homo sapiens
aggucuccagagggugaaagc

SEQ ID NO: 261197 - RNA, 16 nt, Homo sapiens
aggugaggaagcaaaa

SEQ ID NO: 261198 - RNA, 21 nt, Homo sapiens
aggugaggauugauuaccuag

SEQ ID NO: 261199 - RNA, 18 nt, Homo sapiens
aggugcauuguccuuuuc

SEQ ID NO: 261200 - RNA, 20 nt, Homo sapiens
agguggauuccgagugguga

SEQ ID NO: 261201 - RNA, 22 nt, Homo sapiens
agguggauuccgaguggugaca

SEQ ID NO: 261202 - RNA, 20 nt, Homo sapiens
aggugggaggauugcuugag

SEQ ID NO: 261203 - RNA, 14 nt, Homo sapiens
agguggggcagcuu

SEQ ID NO: 261204 - RNA, 15 nt, Homo sapiens
agguggggucacucu

SEQ ID NO: 261205 - RNA, 20 nt, Homo sapiens
aggugguauguuugggagac

SEQ ID NO: 261206 - RNA, 21 nt, Homo sapiens
agguggucagagggcccagug

SEQ ID NO: 261207 - RNA, 20 nt, Homo sapiens
agguguaccaggaaaggauu

SEQ ID NO: 261208 - RNA, 20 nt, Homo sapiens
aggugugagccacagcacuc

SEQ ID NO: 261209 - RNA, 20 nt, Homo sapiens
agguguucuucauuaccuca

SEQ ID NO: 261210 - RNA, 17 nt, Homo sapiens
agguugaagccaugucu

SEQ ID NO: 261211 - RNA, 17 nt, Homo sapiens
agguugagggcaaugga

SEQ ID NO: 261212 - RNA, 15 nt, Homo sapiens
agguuuccacguaag

SEQ ID NO: 261213 - RNA, 17 nt, Homo sapiens
agguuucucaaagaaau

SEQ ID NO: 261214 - RNA, 19 nt, Homo sapiens
agguuucuggcagccagua

SEQ ID NO: 261215 - RNA, 21 nt, Homo sapiens
agguuuguuuagaagaagugu

SEQ ID NO: 261216 - RNA, 18 nt, Homo sapiens
agguuuuuaagccuuaaa

SEQ ID NO: 261217 - RNA, 15 nt, Homo sapiens
agguuuuuacuguga

SEQ ID NO: 261218 - RNA, 17 nt, Homo sapiens
aguaaaaggacagagau

SEQ ID NO: 261219 - RNA, 19 nt, Homo sapiens
aguaaacgauaaaaugugg

SEQ ID NO: 261220 - RNA, 15 nt, Homo sapiens
aguaacauagcugug

SEQ ID NO: 261221 - RNA, 11 nt, Homo sapiens
aguaacaugug

SEQ ID NO: 261222 - RNA, 16 nt, Homo sapiens
aguaaccagaauccaa

SEQ ID NO: 261223 - RNA, 20 nt, Homo sapiens
aguaacccugucuaaugaaa

SEQ ID NO: 261224 - RNA, 17 nt, Homo sapiens
aguaagcaaagacuuuc

SEQ ID NO: 261225 - RNA, 13 nt, Homo sapiens
aguaaguacgugu

SEQ ID NO: 261226 - RNA, 22 nt, Homo sapiens
aguaaguacuuaauaaacugug

SEQ ID NO: 261227 - RNA, 14 nt, Homo sapiens
aguaaguggugaga

SEQ ID NO: 261228 - RNA, 16 nt, Homo sapiens
aguaaguggugagaac

SEQ ID NO: 261229 - RNA, 17 nt, Homo sapiens
aguaauaugcacacauu

SEQ ID NO: 261230 - RNA, 17 nt, Homo sapiens
aguacgaaccuacaguu

SEQ ID NO: 261231 - RNA, 18 nt, Homo sapiens
aguacguugugcauuugg

SEQ ID NO: 261232 - RNA, 15 nt, Homo sapiens
aguacugccaauacu

SEQ ID NO: 261233 - RNA, 20 nt, Homo sapiens
aguacugccaauacugccaa

SEQ ID NO: 261234 - RNA, 14 nt, Homo sapiens
aguacuggcauggu

SEQ ID NO: 261235 - RNA, 20 nt, Homo sapiens
aguacuuaauaaacuguggu

SEQ ID NO: 261236 - RNA, 23 nt, Homo sapiens
aguacuuaauaaacuguggugcu

SEQ ID NO: 261237 - RNA, 21 nt, Homo sapiens
aguagacuucauuuuuccuaa

SEQ ID NO: 261238 - RNA, 14 nt, Homo sapiens
aguagagacagggu

SEQ ID NO: 261239 - RNA, 21 nt, Homo sapiens
aguagagcagccacaaccaaa

SEQ ID NO: 261240 - RNA, 15 nt, Homo sapiens
aguagagucacugga

SEQ ID NO: 261241 - RNA, 16 nt, Homo sapiens
aguagcuggauuacag

SEQ ID NO: 261242 - RNA, 15 nt, Homo sapiens
aguaggaagacuuug

SEQ ID NO: 261243 - RNA, 13 nt, Homo sapiens
aguagucauuuca

SEQ ID NO: 261244 - RNA, 19 nt, Homo sapiens
aguauaauuaacauguuaa

SEQ ID NO: 261245 - RNA, 21 nt, Homo sapiens
aguauauucaaccaaauacuu

SEQ ID NO: 261246 - RNA, 19 nt, Homo sapiens
aguauccugcuucugauau

SEQ ID NO: 261247 - RNA, 16 nt, Homo sapiens
aguaugaaaaugucau

SEQ ID NO: 261248 - RNA, 18 nt, Homo sapiens
aguaugaaaaugucauug

SEQ ID NO: 261249 - RNA, 16 nt, Homo sapiens
aguaugaggcauuugu

SEQ ID NO: 261250 - RNA, 12 nt, Homo sapiens
aguaugcaaaag

SEQ ID NO: 261251 - RNA, 13 nt, Homo sapiens
aguauuaaaacau

SEQ ID NO: 261252 - RNA, 14 nt, Homo sapiens
auacaguaucucag

SEQ ID NO: 261253 - RNA, 15 nt, Homo sapiens
auacaguaucucagg

SEQ ID NO: 261254 - RNA, 16 nt, Homo sapiens
auacaguaucucaggg

SEQ ID NO: 261255 - RNA, 12 nt, Homo sapiens
auacagugucug

SEQ ID NO: 261256 - RNA, 21 nt, Homo sapiens
auacauaaacaagaccacguu

SEQ ID NO: 261257 - RNA, 22 nt, Homo sapiens
auacauucacccagauaaucau

SEQ ID NO: 261258 - RNA, 16 nt, Homo sapiens
auaccaugugccacac

SEQ ID NO: 261259 - RNA, 13 nt, Homo sapiens
auacccaucccau

SEQ ID NO: 261260 - RNA, 17 nt, Homo sapiens
auaccguaucuucuaaa

SEQ ID NO: 261261 - RNA, 17 nt, Homo sapiens
auaccgugucuucuaaa

SEQ ID NO: 261262 - RNA, 16 nt, Homo sapiens
auaccguguggcccaa

SEQ ID NO: 261263 - RNA, 20 nt, Homo sapiens
auaccuggcccugugccuug

SEQ ID NO: 261264 - RNA, 14 nt, Homo sapiens
auacgguaugauau

SEQ ID NO: 261265 - RNA, 18 nt, Homo sapiens
auacgucuugaucagaca

SEQ ID NO: 261266 - RNA, 14 nt, Homo sapiens
auacuacacauuca

SEQ ID NO: 261267 - RNA, 15 nt, Homo sapiens
auacuagaguucaug

SEQ ID NO: 261268 - RNA, 20 nt, Homo sapiens
auacuagaguucauggauau

SEQ ID NO: 261269 - RNA, 14 nt, Homo sapiens
agucacugcacagu

SEQ ID NO: 261270 - RNA, 23 nt, Homo sapiens
agucacugcacagugcaucucag

SEQ ID NO: 261271 - RNA, 13 nt, Homo sapiens
agucagcacguag

SEQ ID NO: 261272 - RNA, 16 nt, Homo sapiens
agucauccucagauca

SEQ ID NO: 261273 - RNA, 20 nt, Homo sapiens
agucaugagcugagcaggga

SEQ ID NO: 261274 - RNA, 20 nt, Homo sapiens
agucaugcguuuaaucacau

SEQ ID NO: 261275 - RNA, 14 nt, Homo sapiens
agucauucuucccu

SEQ ID NO: 261276 - RNA, 21 nt, Homo sapiens
agucauucuucccuaaucuuc

SEQ ID NO: 261277 - RNA, 19 nt, Homo sapiens
agucauuugcugagcaugu

SEQ ID NO: 261278 - RNA, 17 nt, Homo sapiens
agucccugccaucaugu

SEQ ID NO: 261279 - RNA, 17 nt, Homo sapiens
aguccuacaagcuaaaa

SEQ ID NO: 261280 - RNA, 20 nt, Homo sapiens
aguccucagugguuggcaau

SEQ ID NO: 261281 - RNA, 15 nt, Homo sapiens
agucgaacaauucau

SEQ ID NO: 261282 - RNA, 23 nt, Homo sapiens
agucgaggacagggaggugaccc

SEQ ID NO: 261283 - RNA, 15 nt, Homo sapiens
agucgcugugccaca

SEQ ID NO: 261284 - RNA, 16 nt, Homo sapiens
agucucacuguugccc

SEQ ID NO: 261285 - RNA, 16 nt, Homo sapiens
agucucuugauucaua

SEQ ID NO: 261286 - RNA, 17 nt, Homo sapiens
agucugauucccaagcu

SEQ ID NO: 261287 - RNA, 13 nt, Homo sapiens
agucugcaaaaug

SEQ ID NO: 261288 - RNA, 24 nt, Homo sapiens
agucuggcagacuuucuucucuau

SEQ ID NO: 261289 - RNA, 17 nt, Homo sapiens
agucuuagagcuuuacc

SEQ ID NO: 261290 - RNA, 15 nt, Homo sapiens
agucuuagguuucca

SEQ ID NO: 261291 - RNA, 17 nt, Homo sapiens
agucuuauuuccucaac

SEQ ID NO: 261292 - RNA, 13 nt, Homo sapiens
agucuucuuccau

SEQ ID NO: 261293 - RNA, 16 nt, Homo sapiens
agucuuguauuaaguu

SEQ ID NO: 261294 - RNA, 23 nt, Homo sapiens
agucuuguuguuuucccaaagag

SEQ ID NO: 261295 - RNA, 11 nt, Homo sapiens
agugacagagg

SEQ ID NO: 261296 - RNA, 13 nt, Homo sapiens
agugagacccugu

SEQ ID NO: 261297 - RNA, 14 nt, Homo sapiens
agugagacuguguu

SEQ ID NO: 261298 - RNA, 24 nt, Homo sapiens
agugagacuuugaggguguauauu

SEQ ID NO: 261299 - RNA, 15 nt, Homo sapiens
agugagcaucaugga

SEQ ID NO: 261300 - RNA, 15 nt, Homo sapiens
agugagggucagaga

SEQ ID NO: 261301 - RNA, 12 nt, Homo sapiens
agugauccuccc

SEQ ID NO: 261302 - RNA, 19 nt, Homo sapiens
agugauccucccaccucag

SEQ ID NO: 261303 - RNA, 19 nt, Homo sapiens
agugauucuccugccucag

SEQ ID NO: 261304 - RNA, 22 nt, Homo sapiens
agugauugauagaguguuauca

SEQ ID NO: 261305 - RNA, 16 nt, Homo sapiens
agugauuggcucugug

SEQ ID NO: 261306 - RNA, 19 nt, Homo sapiens
agugcaaacuucagaguuc

SEQ ID NO: 261307 - RNA, 21 nt, Homo sapiens
agugcagugagccgagaucac

SEQ ID NO: 261308 - RNA, 18 nt, Homo sapiens
agugccaaaaacaacaac

SEQ ID NO: 261309 - RNA, 21 nt, Homo sapiens
agugccacuuaauguauguua

SEQ ID NO: 261310 - RNA, 17 nt, Homo sapiens
agugccucuuucaucca

SEQ ID NO: 261311 - RNA, 15 nt, Homo sapiens
agugcuauugcagag

SEQ ID NO: 261312 - RNA, 15 nt, Homo sapiens
agugcuauuguagag

SEQ ID NO: 261313 - RNA, 23 nt, Homo sapiens
agugcucuuuccaccccaaaggg

SEQ ID NO: 261314 - RNA, 22 nt, Homo sapiens
agugcugaauuaagcagcucac

SEQ ID NO: 261315 - RNA, 17 nt, Homo sapiens
agugcugggauuacaau

SEQ ID NO: 261316 - RNA, 21 nt, Homo sapiens
agugcugggauuacaggugug

SEQ ID NO: 261317 - RNA, 17 nt, Homo sapiens
agugcuuguuccucuca

SEQ ID NO: 261318 - RNA, 19 nt, Homo sapiens
aguggcaggggacaggagu

SEQ ID NO: 261319 - RNA, 13 nt, Homo sapiens
aguggcauggucc

SEQ ID NO: 261320 - RNA, 17 nt, Homo sapiens
aguggcaugguccugug

SEQ ID NO: 261321 - RNA, 18 nt, Homo sapiens
aguggcuaccuacauaca

SEQ ID NO: 261322 - RNA, 20 nt, Homo sapiens
aguggcuaccuacauacaau

SEQ ID NO: 261323 - RNA, 23 nt, Homo sapiens
aguggcucacaccuguaauccca

SEQ ID NO: 261324 - RNA, 14 nt, Homo sapiens
aguggggucagggc

SEQ ID NO: 261325 - RNA, 20 nt, Homo sapiens
agugggugccccccuugcca

SEQ ID NO: 261326 - RNA, 21 nt, Homo sapiens
aguggugcgaucuggguucac

SEQ ID NO: 261327 - RNA, 14 nt, Homo sapiens
agugguggugaaca

SEQ ID NO: 261328 - RNA, 15 nt, Homo sapiens
aguguaccagagaag

SEQ ID NO: 261329 - RNA, 15 nt, Homo sapiens
aguguagguaucauu

SEQ ID NO: 261330 - RNA, 17 nt, Homo sapiens
aguguaugacugcacau

SEQ ID NO: 261331 - RNA, 13 nt, Homo sapiens
aguguaugauuac

SEQ ID NO: 261332 - RNA, 17 nt, Homo sapiens
aguguaugauuacuggc

SEQ ID NO: 261333 - RNA, 15 nt, Homo sapiens
agugugacucauuaa

SEQ ID NO: 261334 - RNA, 15 nt, Homo sapiens
agugugacugaucuc

SEQ ID NO: 261335 - RNA, 17 nt, Homo sapiens
aguguguguuucuugcu

SEQ ID NO: 261336 - RNA, 17 nt, Homo sapiens
aguguuaucagucauaa

SEQ ID NO: 261337 - RNA, 21 nt, Homo sapiens
aguguugaugcuuucgucucc

SEQ ID NO: 261338 - RNA, 12 nt, Homo sapiens
aguguugcccag

SEQ ID NO: 261339 - RNA, 23 nt, Homo sapiens
aguguugcccaggcuggucucaa

SEQ ID NO: 261340 - RNA, 12 nt, Homo sapiens
aguguugcuugg

SEQ ID NO: 261341 - RNA, 19 nt, Homo sapiens
aguguuuggguauauucau

SEQ ID NO: 261342 - RNA, 23 nt, Homo sapiens
aguguuuggguauauucauuuca

SEQ ID NO: 261343 - RNA, 12 nt, Homo sapiens
aguuaaggguua

SEQ ID NO: 261344 - RNA, 13 nt, Homo sapiens
aguuacacuaaaa

SEQ ID NO: 261345 - RNA, 23 nt, Homo sapiens
aguuaccuuauaguuacugugua

SEQ ID NO: 261346 - RNA, 13 nt, Homo sapiens
aguuacucauuca

SEQ ID NO: 261347 - RNA, 18 nt, Homo sapiens
aguuacucauucagggau

SEQ ID NO: 261348 - RNA, 12 nt, Homo sapiens
aguuacugugua

SEQ ID NO: 261349 - RNA, 17 nt, Homo sapiens
aguuaggcugagccaca

SEQ ID NO: 261350 - RNA, 16 nt, Homo sapiens
aguuaucuggcuucaa

SEQ ID NO: 261351 - RNA, 13 nt, Homo sapiens
aguucagacuuuu

SEQ ID NO: 261352 - RNA, 19 nt, Homo sapiens
aguucauacccuguuacca

SEQ ID NO: 261353 - RNA, 17 nt, Homo sapiens
aguucauaggucuccaa

SEQ ID NO: 261354 - RNA, 20 nt, Homo sapiens
aguucauaggucuccaagac

SEQ ID NO: 261355 - RNA, 21 nt, Homo sapiens
aguucauaggucuccaagacc

SEQ ID NO: 261356 - RNA, 17 nt, Homo sapiens
aguucauauguaccaug

SEQ ID NO: 261357 - RNA, 18 nt, Homo sapiens
aguucauauguaccaugu

SEQ ID NO: 261358 - RNA, 15 nt, Homo sapiens
aguucaucuugaauu

SEQ ID NO: 261359 - RNA, 18 nt, Homo sapiens
aguucaugcucccagcca

SEQ ID NO: 261360 - RNA, 15 nt, Homo sapiens
aguucauggauaugu

SEQ ID NO: 261361 - RNA, 15 nt, Homo sapiens
aguuccgacugccau

SEQ ID NO: 261362 - RNA, 23 nt, Homo sapiens
aguuccucauuuuugaauacagg

SEQ ID NO: 261363 - RNA, 11 nt, Homo sapiens
aguuccuucac

SEQ ID NO: 261364 - RNA, 18 nt, Homo sapiens
aguuccuugaucuguaua

SEQ ID NO: 261365 - RNA, 21 nt, Homo sapiens
aguucucauggguggcacuca

SEQ ID NO: 261366 - RNA, 21 nt, Homo sapiens
aguucugcagguugaagccau

SEQ ID NO: 261367 - RNA, 13 nt, Homo sapiens
aguugaaacaaga

SEQ ID NO: 261368 - RNA, 20 nt, Homo sapiens
aguugaauuuauuggcuuuu

SEQ ID NO: 261369 - RNA, 19 nt, Homo sapiens
aguugaugaaauaucaaga

SEQ ID NO: 261370 - RNA, 11 nt, Homo sapiens
aguugcacaaa

SEQ ID NO: 261371 - RNA, 14 nt, Homo sapiens
aguugccagucacc

SEQ ID NO: 261372 - RNA, 19 nt, Homo sapiens
aguugccuaaauccauuug

SEQ ID NO: 261373 - RNA, 11 nt, Homo sapiens
aguugcucagg

SEQ ID NO: 261374 - RNA, 17 nt, Homo sapiens
aguugcugaugaacucu

SEQ ID NO: 261375 - RNA, 13 nt, Homo sapiens
aguugcuguaugu

SEQ ID NO: 261376 - RNA, 18 nt, Homo sapiens
aguuggaagugugugauc

SEQ ID NO: 261377 - RNA, 15 nt, Homo sapiens
aguugggugauaugu

SEQ ID NO: 261378 - RNA, 13 nt, Homo sapiens
aguuggguguauu

SEQ ID NO: 261379 - RNA, 13 nt, Homo sapiens
aguugucuguccu

SEQ ID NO: 261380 - RNA, 22 nt, Homo sapiens
aguuguuuuaauaacuuaucua

SEQ ID NO: 261381 - RNA, 17 nt, Homo sapiens
aguuuaaacugaaugaa

SEQ ID NO: 261382 - RNA, 19 nt, Homo sapiens
aguuuaagaggcaaguaaa

SEQ ID NO: 261383 - RNA, 18 nt, Homo sapiens
aguuuaauauuaaagcca

SEQ ID NO: 261384 - RNA, 19 nt, Homo sapiens
aguuuauacuucucuauua

SEQ ID NO: 261385 - RNA, 16 nt, Homo sapiens
aguuuauuauguacua

SEQ ID NO: 261386 - RNA, 15 nt, Homo sapiens
aguuuauugacaaua

SEQ ID NO: 261387 - RNA, 17 nt, Homo sapiens
aguuuauugacaauaau

SEQ ID NO: 261388 - RNA, 14 nt, Homo sapiens
aguuucacugacuu

SEQ ID NO: 261389 - RNA, 20 nt, Homo sapiens
aguuuccaaauuauggcaaa

SEQ ID NO: 261390 - RNA, 14 nt, Homo sapiens
aguuugaaccaaga

SEQ ID NO: 261391 - RNA, 13 nt, Homo sapiens
aguuugauuucau

SEQ ID NO: 261392 - RNA, 11 nt, Homo sapiens
aguuugcaguu

SEQ ID NO: 261393 - RNA, 14 nt, Homo sapiens
aguuugcauuccag

SEQ ID NO: 261394 - RNA, 20 nt, Homo sapiens
aguuugggguaugggagaga

SEQ ID NO: 261395 - RNA, 14 nt, Homo sapiens
aguuuuaacugugg

SEQ ID NO: 261396 - RNA, 24 nt, Homo sapiens
aguuuucaggaugagaugacagau

SEQ ID NO: 261397 - RNA, 20 nt, Homo sapiens
aguuuugccuaauggcaaaa

SEQ ID NO: 261398 - RNA, 15 nt, Homo sapiens
auccagacccggcug

SEQ ID NO: 261399 - RNA, 18 nt, Homo sapiens
auccagagagcagugugg

SEQ ID NO: 261400 - RNA, 19 nt, Homo sapiens
auccagguaauccaagaua

SEQ ID NO: 261401 - RNA, 22 nt, Homo sapiens
auccauagcaccuccacauacc

SEQ ID NO: 261402 - RNA, 12 nt, Homo sapiens
auccaucucuca

SEQ ID NO: 261403 - RNA, 17 nt, Homo sapiens
auccaugaaccaagacc

SEQ ID NO: 261404 - RNA, 15 nt, Homo sapiens
auccauguacuuucc

SEQ ID NO: 261405 - RNA, 12 nt, Homo sapiens
aucccaagagaa

SEQ ID NO: 261406 - RNA, 15 nt, Homo sapiens
aucccagcacugcac

SEQ ID NO: 261407 - RNA, 17 nt, Homo sapiens
aucccagcucacugcag

SEQ ID NO: 261408 - RNA, 11 nt, Homo sapiens
aucccaugagc

SEQ ID NO: 261409 - RNA, 15 nt, Homo sapiens
aucccaugagcuccu

SEQ ID NO: 261410 - RNA, 17 nt, Homo sapiens
aucccauucugcgucau

SEQ ID NO: 261411 - RNA, 19 nt, Homo sapiens
aucccccagccucaagucu

SEQ ID NO: 261412 - RNA, 13 nt, Homo sapiens
aucccuacuguaa

SEQ ID NO: 261413 - RNA, 14 nt, Homo sapiens
aucccucauccuca

SEQ ID NO: 261414 - RNA, 16 nt, Homo sapiens
aucccuuaccucggug

SEQ ID NO: 261415 - RNA, 15 nt, Homo sapiens
auccgaggcaggguc

SEQ ID NO: 261416 - RNA, 15 nt, Homo sapiens
auccgucagaucucu

SEQ ID NO: 261417 - RNA, 22 nt, Homo sapiens
auccuacaaggcuggcagugac

SEQ ID NO: 261418 - RNA, 19 nt, Homo sapiens
auccuagagaaaacuugaa

SEQ ID NO: 261419 - RNA, 15 nt, Homo sapiens
auccuagcacuuugg

SEQ ID NO: 261420 - RNA, 15 nt, Homo sapiens
auccuaggcauuugc

SEQ ID NO: 261421 - RNA, 17 nt, Homo sapiens
auccucacucauuccca

SEQ ID NO: 261422 - RNA, 13 nt, Homo sapiens
auccuccaaaguc

SEQ ID NO: 261423 - RNA, 22 nt, Homo sapiens
auccuccaaagucacacagagu

SEQ ID NO: 261424 - RNA, 13 nt, Homo sapiens
auccucccaccuc

SEQ ID NO: 261425 - RNA, 23 nt, Homo sapiens
auaaccucaagucacaugagaau

SEQ ID NO: 261426 - RNA, 14 nt, Homo sapiens
auaaccuuguucca

SEQ ID NO: 261427 - RNA, 18 nt, Homo sapiens
auaacuaguguugcuugg

SEQ ID NO: 261428 - RNA, 15 nt, Homo sapiens
auaacuauguugaua

SEQ ID NO: 261429 - RNA, 23 nt, Homo sapiens
auaacucuacccuggcacuauaa

SEQ ID NO: 261430 - RNA, 12 nt, Homo sapiens
auaacuguuauu

SEQ ID NO: 261431 - RNA, 21 nt, Homo sapiens
auaacuuuuuuuuaaguuaca

SEQ ID NO: 261432 - RNA, 23 nt, Homo sapiens
auaagaaccuuuugagugccuua

SEQ ID NO: 261433 - RNA, 14 nt, Homo sapiens
auaagacuacugaa

SEQ ID NO: 261434 - RNA, 17 nt, Homo sapiens
auaagaggugcuacuga

SEQ ID NO: 261435 - RNA, 18 nt, Homo sapiens
auaagcaggacagaggau

SEQ ID NO: 261436 - RNA, 20 nt, Homo sapiens
auaagcagucauccucagau

SEQ ID NO: 261437 - RNA, 23 nt, Homo sapiens
auaagcagucauccucagaucau

SEQ ID NO: 261438 - RNA, 14 nt, Homo sapiens
auaagcccacauau

SEQ ID NO: 261439 - RNA, 13 nt, Homo sapiens
auaaggacacuga

SEQ ID NO: 261440 - RNA, 15 nt, Homo sapiens
auaagugcaugacau

SEQ ID NO: 261441 - RNA, 16 nt, Homo sapiens
auaaguuaacuuccaa

SEQ ID NO: 261442 - RNA, 14 nt, Homo sapiens
auaaguuucacuga

SEQ ID NO: 261443 - RNA, 17 nt, Homo sapiens
auaauacaguaucucag

SEQ ID NO: 261444 - RNA, 15 nt, Homo sapiens
auaauauacuaugca

SEQ ID NO: 261445 - RNA, 18 nt, Homo sapiens
auaaucacaacccuucag

SEQ ID NO: 261446 - RNA, 13 nt, Homo sapiens
auaaucacugacc

SEQ ID NO: 261447 - RNA, 15 nt, Homo sapiens
auaaucacugaccag

SEQ ID NO: 261448 - RNA, 14 nt, Homo sapiens
auaaucucuuucca

SEQ ID NO: 261449 - RNA, 12 nt, Homo sapiens
auaaucuuugcu

SEQ ID NO: 261450 - RNA, 20 nt, Homo sapiens
auaaugacuuaagcacacuu

SEQ ID NO: 261451 - RNA, 17 nt, Homo sapiens
auaaugucccuucacaa

SEQ ID NO: 261452 - RNA, 16 nt, Homo sapiens
auaauguuacauuauu

SEQ ID NO: 261453 - RNA, 17 nt, Homo sapiens
auaauguuacauuauua

SEQ ID NO: 261454 - RNA, 21 nt, Homo sapiens
auaauguuacauuauuaucaa

SEQ ID NO: 261455 - RNA, 15 nt, Homo sapiens
auaauuaguuccuca

SEQ ID NO: 261456 - RNA, 16 nt, Homo sapiens
auaauucuguuucuga

SEQ ID NO: 261457 - RNA, 11 nt, Homo sapiens
auaauugccac

SEQ ID NO: 261458 - RNA, 16 nt, Homo sapiens
auaauuuaccuaagau

SEQ ID NO: 261459 - RNA, 13 nt, Homo sapiens
auacaauuccaaa

SEQ ID NO: 261460 - RNA, 19 nt, Homo sapiens
auacaauuccaaacacaua

SEQ ID NO: 261461 - RNA, 22 nt, Homo sapiens
auacacacacacgcgugcacac

SEQ ID NO: 261462 - RNA, 13 nt, Homo sapiens
auacacuuacacu

SEQ ID NO: 261463 - RNA, 15 nt, Homo sapiens
auacacuuacacuuu

SEQ ID NO: 261464 - RNA, 17 nt, Homo sapiens
auacaucaagccaauac

SEQ ID NO: 261465 - RNA, 18 nt, Homo sapiens
auacaugucuuucuccag

SEQ ID NO: 261466 - RNA, 21 nt, Homo sapiens
auacaugucuuucuccaggga

SEQ ID NO: 261467 - RNA, 15 nt, Homo sapiens
auacauucacccaga

SEQ ID NO: 261468 - RNA, 15 nt, Homo sapiens
auacauuugauaaag

SEQ ID NO: 261469 - RNA, 13 nt, Homo sapiens
auaccaugugcca

SEQ ID NO: 261470 - RNA, 14 nt, Homo sapiens
auaccucugggaaa

SEQ ID NO: 261471 - RNA, 17 nt, Homo sapiens
auaccugaagcugucac

SEQ ID NO: 261472 - RNA, 17 nt, Homo sapiens
auaccugucccccugac

SEQ ID NO: 261473 - RNA, 22 nt, Homo sapiens
auacgucuugaucagacauuca

SEQ ID NO: 261474 - RNA, 16 nt, Homo sapiens
auacucccaucuguga

SEQ ID NO: 261475 - RNA, 19 nt, Homo sapiens
auacugcucaucauuccuu

SEQ ID NO: 261476 - RNA, 21 nt, Homo sapiens
auacugcucaucauuccuuga

SEQ ID NO: 261477 - RNA, 14 nt, Homo sapiens
auacuggcaaagca

SEQ ID NO: 261478 - RNA, 17 nt, Homo sapiens
auacuggcaaagcagaa

SEQ ID NO: 261479 - RNA, 19 nt, Homo sapiens
auacuguaacauucaggaa

SEQ ID NO: 261480 - RNA, 23 nt, Homo sapiens
auacuguuuuacuguccaaagac

SEQ ID NO: 261481 - RNA, 19 nt, Homo sapiens
auacuucucuauuaucuca

SEQ ID NO: 261482 - RNA, 17 nt, Homo sapiens
auacuuguugcugucac

SEQ ID NO: 261483 - RNA, 16 nt, Homo sapiens
auacuuucucuucaaa

SEQ ID NO: 261484 - RNA, 21 nt, Homo sapiens
auacuuuuucuuugaauuuag

SEQ ID NO: 261485 - RNA, 23 nt, Homo sapiens
auacuuuuucuuugaauuuagca

SEQ ID NO: 261486 - RNA, 12 nt, Homo sapiens
auagaaagccaa

SEQ ID NO: 261487 - RNA, 15 nt, Homo sapiens
auagaacacaguuug

SEQ ID NO: 261488 - RNA, 20 nt, Homo sapiens
auagaaugagugaaucaccu

SEQ ID NO: 261489 - RNA, 14 nt, Homo sapiens
auagaauucaguca

SEQ ID NO: 261490 - RNA, 15 nt, Homo sapiens
auagaauucagucaa

SEQ ID NO: 261491 - RNA, 13 nt, Homo sapiens
auagacaauuuau

SEQ ID NO: 261492 - RNA, 22 nt, Homo sapiens
auagagggucuaagauucaucc

SEQ ID NO: 261493 - RNA, 21 nt, Homo sapiens
auagagguucuuuauugcuca

SEQ ID NO: 261494 - RNA, 20 nt, Homo sapiens
auagauauaugcucugcaug

SEQ ID NO: 261495 - RNA, 14 nt, Homo sapiens
auagaugguguaug

SEQ ID NO: 261496 - RNA, 13 nt, Homo sapiens
auagauguugcua

SEQ ID NO: 261497 - RNA, 15 nt, Homo sapiens
auagcaagaucccau

SEQ ID NO: 261498 - RNA, 15 nt, Homo sapiens
auagcaccuccacau

SEQ ID NO: 261499 - RNA, 18 nt, Homo sapiens
auagcaccuccacauacc

SEQ ID NO: 261500 - RNA, 20 nt, Homo sapiens
auagcaccuccacauaccug

SEQ ID NO: 261501 - RNA, 21 nt, Homo sapiens
auagcagcccucaauugugaa

SEQ ID NO: 261502 - RNA, 15 nt, Homo sapiens
auagccaaggccaaa

SEQ ID NO: 261503 - RNA, 17 nt, Homo sapiens
auagccaaggccaaagg

SEQ ID NO: 261504 - RNA, 17 nt, Homo sapiens
auagccuaggugacaga

SEQ ID NO: 261505 - RNA, 12 nt, Homo sapiens
auagcucagaau

SEQ ID NO: 261506 - RNA, 22 nt, Homo sapiens
auagcucuggggugggcaguuu

SEQ ID NO: 261507 - RNA, 21 nt, Homo sapiens
auaggagagagaucaugagaa

SEQ ID NO: 261508 - RNA, 18 nt, Homo sapiens
auaggaggccaacccaaa

SEQ ID NO: 261509 - RNA, 16 nt, Homo sapiens
auaggucuccaagacc

SEQ ID NO: 261510 - RNA, 13 nt, Homo sapiens
auaguacuggcau

SEQ ID NO: 261511 - RNA, 22 nt, Homo sapiens
auagucaucaucaagaauuuaa

SEQ ID NO: 261512 - RNA, 14 nt, Homo sapiens
auaguccgucucug

SEQ ID NO: 261513 - RNA, 20 nt, Homo sapiens
auaguccgucucugcuuauc

SEQ ID NO: 261514 - RNA, 23 nt, Homo sapiens
auagugauugauagaguguuauc

SEQ ID NO: 261515 - RNA, 17 nt, Homo sapiens
auaguguagcugaggag

SEQ ID NO: 261516 - RNA, 23 nt, Homo sapiens
auaguugaugagaauccugacca

SEQ ID NO: 261517 - RNA, 16 nt, Homo sapiens
auaguugcuucuuucc

SEQ ID NO: 261518 - RNA, 11 nt, Homo sapiens
auaguuuccaa

SEQ ID NO: 261519 - RNA, 19 nt, Homo sapiens
auauaaaaauaaagcacuu

SEQ ID NO: 261520 - RNA, 19 nt, Homo sapiens
auauaaaguaguccuguga

SEQ ID NO: 261521 - RNA, 21 nt, Homo sapiens
auauaaaugugauugcagcuu

SEQ ID NO: 261522 - RNA, 12 nt, Homo sapiens
auauaacugccu

SEQ ID NO: 261523 - RNA, 15 nt, Homo sapiens
auauacaauaacaua

SEQ ID NO: 261524 - RNA, 18 nt, Homo sapiens
auauacgaacaaaacaca

SEQ ID NO: 261525 - RNA, 23 nt, Homo sapiens
auauacuuauagaauucagucaa

SEQ ID NO: 261526 - RNA, 13 nt, Homo sapiens
auauaggggcaau

SEQ ID NO: 261527 - RNA, 17 nt, Homo sapiens
auauaggggcaauguca

SEQ ID NO: 261528 - RNA, 15 nt, Homo sapiens
auauaucuaccccag

SEQ ID NO: 261529 - RNA, 14 nt, Homo sapiens
auaucacauuccca

SEQ ID NO: 261530 - RNA, 22 nt, Homo sapiens
auaucacucuuguugugcucuu

SEQ ID NO: 261531 - RNA, 17 nt, Homo sapiens
auauccaacaugugcuc

SEQ ID NO: 261532 - RNA, 22 nt, Homo sapiens
auauccaacaugugcucaggga

SEQ ID NO: 261533 - RNA, 13 nt, Homo sapiens
auaucgaucucuu

SEQ ID NO: 261534 - RNA, 14 nt, Homo sapiens
auaucgaucucuua

SEQ ID NO: 261535 - RNA, 13 nt, Homo sapiens
auaucuaccccag

SEQ ID NO: 261536 - RNA, 17 nt, Homo sapiens
auaugaaugucaguagu

SEQ ID NO: 261537 - RNA, 17 nt, Homo sapiens
auaugacacucuaguca

SEQ ID NO: 261538 - RNA, 18 nt, Homo sapiens
auaugacacucuagucaa

SEQ ID NO: 261539 - RNA, 16 nt, Homo sapiens
auaugauuaguaaaga

SEQ ID NO: 261540 - RNA, 15 nt, Homo sapiens
auaugauugugcaca

SEQ ID NO: 261541 - RNA, 16 nt, Homo sapiens
auaugauugugcacau

SEQ ID NO: 261542 - RNA, 11 nt, Homo sapiens
auaugcaauau

SEQ ID NO: 261543 - RNA, 11 nt, Homo sapiens
auaugcacaaa

SEQ ID NO: 261544 - RNA, 13 nt, Homo sapiens
augauagucauca

SEQ ID NO: 261545 - RNA, 17 nt, Homo sapiens
augauagucaucaucaa

SEQ ID NO: 261546 - RNA, 14 nt, Homo sapiens
augaucacggcuca

SEQ ID NO: 261547 - RNA, 20 nt, Homo sapiens
augaucacggcucacugcag

SEQ ID NO: 261548 - RNA, 14 nt, Homo sapiens
augaucaguaugaa

SEQ ID NO: 261549 - RNA, 22 nt, Homo sapiens
augaucaucacaaucaucauca

SEQ ID NO: 261550 - RNA, 22 nt, Homo sapiens
augauccuaaugaaugcauaaa

SEQ ID NO: 261551 - RNA, 16 nt, Homo sapiens
augaucgucaucauca

SEQ ID NO: 261552 - RNA, 17 nt, Homo sapiens
augaucuggauccacca

SEQ ID NO: 261553 - RNA, 19 nt, Homo sapiens
augaugauagucaucauca

SEQ ID NO: 261554 - RNA, 23 nt, Homo sapiens
augaugccaugaggaacaaggca

SEQ ID NO: 261555 - RNA, 19 nt, Homo sapiens
augaugucguuugaaucac

SEQ ID NO: 261556 - RNA, 12 nt, Homo sapiens
augauuaguaaa

SEQ ID NO: 261557 - RNA, 16 nt, Homo sapiens
augauugugcacauac

SEQ ID NO: 261558 - RNA, 14 nt, Homo sapiens
augcaaagaugaag

SEQ ID NO: 261559 - RNA, 22 nt, Homo sapiens
augcaaauaaccauugucauaa

SEQ ID NO: 261560 - RNA, 13 nt, Homo sapiens
augcaacucaucu

SEQ ID NO: 261561 - RNA, 20 nt, Homo sapiens
augcaacucaucuucacaga

SEQ ID NO: 261562 - RNA, 21 nt, Homo sapiens
augcaagcaagaaacacuggg

SEQ ID NO: 261563 - RNA, 15 nt, Homo sapiens
augcaaggucauuuu

SEQ ID NO: 261564 - RNA, 22 nt, Homo sapiens
augcaauuagucugucacucca

SEQ ID NO: 261565 - RNA, 18 nt, Homo sapiens
augcacagcuaacaugga

SEQ ID NO: 261566 - RNA, 19 nt, Homo sapiens
augcacagcuaacauggaa

SEQ ID NO: 261567 - RNA, 22 nt, Homo sapiens
augcacuguucccccugugcag

SEQ ID NO: 261568 - RNA, 16 nt, Homo sapiens
augcagcaucuaagua

SEQ ID NO: 261569 - RNA, 23 nt, Homo sapiens
augcagcuguggcagaguuacag

SEQ ID NO: 261570 - RNA, 13 nt, Homo sapiens
augcagggacaaa

SEQ ID NO: 261571 - RNA, 14 nt, Homo sapiens
augcagggacaaau

SEQ ID NO: 261572 - RNA, 18 nt, Homo sapiens
augcagugguaugaucac

SEQ ID NO: 261573 - RNA, 16 nt, Homo sapiens
augcaguuuuccuuaa

SEQ ID NO: 261574 - RNA, 15 nt, Homo sapiens
augcauaaaauguua

SEQ ID NO: 261575 - RNA, 14 nt, Homo sapiens
augcauacacacac

SEQ ID NO: 261576 - RNA, 22 nt, Homo sapiens
augcaucaaguuauugacaaac

SEQ ID NO: 261577 - RNA, 12 nt, Homo sapiens
augcauucugag

SEQ ID NO: 261578 - RNA, 21 nt, Homo sapiens
augccaacucagcccccugac

SEQ ID NO: 261579 - RNA, 22 nt, Homo sapiens
augccacacggcucucaccagu

SEQ ID NO: 261580 - RNA, 16 nt, Homo sapiens
augccagcuuaucuca

SEQ ID NO: 261581 - RNA, 23 nt, Homo sapiens
aucacaguuuugguugcuuuaau

SEQ ID NO: 261582 - RNA, 19 nt, Homo sapiens
aucacauucgaguguuuca

SEQ ID NO: 261583 - RNA, 11 nt, Homo sapiens
aucaccagaca

SEQ ID NO: 261584 - RNA, 20 nt, Homo sapiens
aucaccgugggcucccugac

SEQ ID NO: 261585 - RNA, 18 nt, Homo sapiens
aucacgagaucaagagau

SEQ ID NO: 261586 - RNA, 17 nt, Homo sapiens
aucacggcucacugcag

SEQ ID NO: 261587 - RNA, 22 nt, Homo sapiens
aucacggcucacugcagccuca

SEQ ID NO: 261588 - RNA, 19 nt, Homo sapiens
aucacugcgccacugcucc

SEQ ID NO: 261589 - RNA, 10 nt, Homo sapiens
aucacuugcc

SEQ ID NO: 261590 - RNA, 16 nt, Homo sapiens
aucagaacuguuggca

SEQ ID NO: 261591 - RNA, 13 nt, Homo sapiens
aucagacauucag

SEQ ID NO: 261592 - RNA, 17 nt, Homo sapiens
aucagacauucagagau

SEQ ID NO: 261593 - RNA, 18 nt, Homo sapiens
aucagacauucagagauu

SEQ ID NO: 261594 - RNA, 16 nt, Homo sapiens
aucagaccauaauguu

SEQ ID NO: 261595 - RNA, 22 nt, Homo sapiens
aucagaccauaauguuacauua

SEQ ID NO: 261596 - RNA, 18 nt, Homo sapiens
aucagacuccugugcaac

SEQ ID NO: 261597 - RNA, 17 nt, Homo sapiens
aucagccugcuccagcu

SEQ ID NO: 261598 - RNA, 14 nt, Homo sapiens
aucagcugcuacua

SEQ ID NO: 261599 - RNA, 18 nt, Homo sapiens
aucaggaauauuuuccaa

SEQ ID NO: 261600 - RNA, 19 nt, Homo sapiens
aucaggaauauuuuccaaa

SEQ ID NO: 261601 - RNA, 14 nt, Homo sapiens
aucaggccaacccc

SEQ ID NO: 261602 - RNA, 17 nt, Homo sapiens
aucagggaggucauuuu

SEQ ID NO: 261603 - RNA, 16 nt, Homo sapiens
aucagucauaacuaaa

SEQ ID NO: 261604 - RNA, 17 nt, Homo sapiens
aucaguccaaagggcau

SEQ ID NO: 261605 - RNA, 19 nt, Homo sapiens
aucagugaauaaaccauca

SEQ ID NO: 261606 - RNA, 23 nt, Homo sapiens
aucauauaauaaauguacauuaa

SEQ ID NO: 261607 - RNA, 16 nt, Homo sapiens
aucaucaagaauuuaa

SEQ ID NO: 261608 - RNA, 19 nt, Homo sapiens
aucauccacugugccaugu

SEQ ID NO: 261609 - RNA, 13 nt, Homo sapiens
aucaucuccaguu

SEQ ID NO: 261610 - RNA, 20 nt, Homo sapiens
aucaugguauucuucugaca

SEQ ID NO: 261611 - RNA, 15 nt, Homo sapiens
aucauguguguccac

SEQ ID NO: 261612 - RNA, 16 nt, Homo sapiens
aucauuaaaauuaaca

SEQ ID NO: 261613 - RNA, 23 nt, Homo sapiens
aucauuaaaauuaacaugugcca

SEQ ID NO: 261614 - RNA, 15 nt, Homo sapiens
aucauuaucagccug

SEQ ID NO: 261615 - RNA, 15 nt, Homo sapiens
aucauuaugaaguca

SEQ ID NO: 261616 - RNA, 13 nt, Homo sapiens
aucauuccuugag

SEQ ID NO: 261617 - RNA, 15 nt, Homo sapiens
aucauuugacuaaga

SEQ ID NO: 261618 - RNA, 24 nt, Homo sapiens
aucauuuggccgagucagcacgua

SEQ ID NO: 261619 - RNA, 17 nt, Homo sapiens
auccaacaugugcucag

SEQ ID NO: 261620 - RNA, 20 nt, Homo sapiens
auccaacaugugcucaggga

SEQ ID NO: 261621 - RNA, 16 nt, Homo sapiens
auccaaucucaucucu

SEQ ID NO: 261622 - RNA, 14 nt, Homo sapiens
auccaauugcugcu

SEQ ID NO: 261623 - RNA, 15 nt, Homo sapiens
auccaauugcugcuu

SEQ ID NO: 261624 - RNA, 15 nt, Homo sapiens
auccacaaaucaucu

SEQ ID NO: 261625 - RNA, 23 nt, Homo sapiens
auccacacccucuccuugucaca

SEQ ID NO: 261626 - RNA, 21 nt, Homo sapiens
auccacacggcugaccucaua

SEQ ID NO: 261627 - RNA, 16 nt, Homo sapiens
auccacacugagcuga

SEQ ID NO: 261628 - RNA, 12 nt, Homo sapiens
auccacauggga

SEQ ID NO: 261629 - RNA, 14 nt, Homo sapiens
auccacccaccuca

SEQ ID NO: 261630 - RNA, 15 nt, Homo sapiens
auccacccaccucag

SEQ ID NO: 261631 - RNA, 16 nt, Homo sapiens
auccacccaccucagc

SEQ ID NO: 261632 - RNA, 16 nt, Homo sapiens
auccacuaaaaucaaa

SEQ ID NO: 261633 - RNA, 18 nt, Homo sapiens
auccacuucucucaggau

SEQ ID NO: 261634 - RNA, 19 nt, Homo sapiens
auccauggggcugauugua

SEQ ID NO: 261635 - RNA, 20 nt, Homo sapiens
aucccacuugccccuguuac

SEQ ID NO: 261636 - RNA, 12 nt, Homo sapiens
aucccagcacug

SEQ ID NO: 261637 - RNA, 18 nt, Homo sapiens
aucccauaugccugggca

SEQ ID NO: 261638 - RNA, 15 nt, Homo sapiens
aucccaugagccuca

SEQ ID NO: 261639 - RNA, 21 nt, Homo sapiens
aucccaugauguagugccucu

SEQ ID NO: 261640 - RNA, 15 nt, Homo sapiens
aucccauuggcaaaa

SEQ ID NO: 261641 - RNA, 16 nt, Homo sapiens
auccccagcugggaag

SEQ ID NO: 261642 - RNA, 15 nt, Homo sapiens
aucccccagccucaa

SEQ ID NO: 261643 - RNA, 19 nt, Homo sapiens
aucccccgcugguggcaga

SEQ ID NO: 261644 - RNA, 22 nt, Homo sapiens
auccccuaagcagaccacugau

SEQ ID NO: 261645 - RNA, 15 nt, Homo sapiens
auccccucucuuccu

SEQ ID NO: 261646 - RNA, 17 nt, Homo sapiens
aucccgucgacguagaa

SEQ ID NO: 261647 - RNA, 22 nt, Homo sapiens
aucccucaaaacaaucuuguca

SEQ ID NO: 261648 - RNA, 22 nt, Homo sapiens
auccgaggcagggucaggagag

SEQ ID NO: 261649 - RNA, 21 nt, Homo sapiens
auccuaauaaaaaggugacca

SEQ ID NO: 261650 - RNA, 20 nt, Homo sapiens
auccuacaaggcuggcagug

SEQ ID NO: 261651 - RNA, 21 nt, Homo sapiens
auccuacccccugugccuugu

SEQ ID NO: 261652 - RNA, 23 nt, Homo sapiens
auccuacccccugugccuuguca

SEQ ID NO: 261653 - RNA, 14 nt, Homo sapiens
auccuagcacuuug

SEQ ID NO: 261654 - RNA, 14 nt, Homo sapiens
auccuaggcauuug

SEQ ID NO: 261655 - RNA, 15 nt, Homo sapiens
auccuagucauucuu

SEQ ID NO: 261656 - RNA, 17 nt, Homo sapiens
auccuagucauucuucc

SEQ ID NO: 261657 - RNA, 14 nt, Homo sapiens
auccucccaccuca

SEQ ID NO: 261658 - RNA, 15 nt, Homo sapiens
auccucccaccucag

SEQ ID NO: 261659 - RNA, 22 nt, Homo sapiens
auccucugagugugaccaggca

SEQ ID NO: 261660 - RNA, 17 nt, Homo sapiens
auccuggggaacauaga

SEQ ID NO: 261661 - RNA, 21 nt, Homo sapiens
auccugguugguguugcagaa

SEQ ID NO: 261662 - RNA, 17 nt, Homo sapiens
auccugucccaugggcu

SEQ ID NO: 261663 - RNA, 22 nt, Homo sapiens
auccugucuggccuucaguuuc

SEQ ID NO: 261664 - RNA, 21 nt, Homo sapiens
auccuucaugucuuaaccuac

SEQ ID NO: 261665 - RNA, 18 nt, Homo sapiens
auccuucuuauguuucua

SEQ ID NO: 261666 - RNA, 13 nt, Homo sapiens
auccuuuacuguu

SEQ ID NO: 261667 - RNA, 14 nt, Homo sapiens
aucgcaguguucaa

SEQ ID NO: 261668 - RNA, 17 nt, Homo sapiens
aucgcaguguucaaggc

SEQ ID NO: 261669 - RNA, 15 nt, Homo sapiens
aucgcugucaucuca

SEQ ID NO: 261670 - RNA, 16 nt, Homo sapiens
aucgcugucaucucag

SEQ ID NO: 261671 - RNA, 21 nt, Homo sapiens
aucgucacugcuuaacuucac

SEQ ID NO: 261672 - RNA, 23 nt, Homo sapiens
aucuacccuccgauuguuccuga

SEQ ID NO: 261673 - RNA, 22 nt, Homo sapiens
aucuacuccuuguaaagacugu

SEQ ID NO: 261674 - RNA, 14 nt, Homo sapiens
aucuagaagacugu

SEQ ID NO: 261675 - RNA, 16 nt, Homo sapiens
aucuaggaagacuuug

SEQ ID NO: 261676 - RNA, 22 nt, Homo sapiens
aucuaugaaauaucaugcucca

SEQ ID NO: 261677 - RNA, 16 nt, Homo sapiens
aucuaugauaugcuaa

SEQ ID NO: 261678 - RNA, 15 nt, Homo sapiens
aucucaaacuacugg

SEQ ID NO: 261679 - RNA, 21 nt, Homo sapiens
aucucaaacuacuggcaauuu

SEQ ID NO: 261680 - RNA, 22 nt, Homo sapiens
aucucaaacuacuggcaauuug

SEQ ID NO: 261681 - RNA, 15 nt, Homo sapiens
aucucaguaccccau

SEQ ID NO: 261682 - RNA, 22 nt, Homo sapiens
aucucauuggacccuuccaugg

SEQ ID NO: 261683 - RNA, 17 nt, Homo sapiens
aucucauuuaauccucu

SEQ ID NO: 261684 - RNA, 15 nt, Homo sapiens
aucuccauucucuca

SEQ ID NO: 261685 - RNA, 16 nt, Homo sapiens
aucuccauugcauuca

SEQ ID NO: 261686 - RNA, 18 nt, Homo sapiens
aucuccauuucugcucag

SEQ ID NO: 261687 - RNA, 16 nt, Homo sapiens
aucuccccuucacaug

SEQ ID NO: 261688 - RNA, 18 nt, Homo sapiens
auguuagccacaguguau

SEQ ID NO: 261689 - RNA, 23 nt, Homo sapiens
auguuaggaaaauuucacauuaa

SEQ ID NO: 261690 - RNA, 16 nt, Homo sapiens
auguuaguuaccuuau

SEQ ID NO: 261691 - RNA, 14 nt, Homo sapiens
auguucaacuggag

SEQ ID NO: 261692 - RNA, 21 nt, Homo sapiens
auguucagucacaugugcucu

SEQ ID NO: 261693 - RNA, 17 nt, Homo sapiens
auguucucugaggacac

SEQ ID NO: 261694 - RNA, 14 nt, Homo sapiens
auguucugggacac

SEQ ID NO: 261695 - RNA, 20 nt, Homo sapiens
auguucugggacacaguuca

SEQ ID NO: 261696 - RNA, 17 nt, Homo sapiens
auguucuuucacccuuu

SEQ ID NO: 261697 - RNA, 21 nt, Homo sapiens
auguucuuuuccaacacaucu

SEQ ID NO: 261698 - RNA, 17 nt, Homo sapiens
auguugaaagaucaaaa

SEQ ID NO: 261699 - RNA, 12 nt, Homo sapiens
auguugaugaaa

SEQ ID NO: 261700 - RNA, 20 nt, Homo sapiens
auguugaugaaaaauagcaa

SEQ ID NO: 261701 - RNA, 14 nt, Homo sapiens
auguugcccaggca

SEQ ID NO: 261702 - RNA, 14 nt, Homo sapiens
auguugcccagugu

SEQ ID NO: 261703 - RNA, 16 nt, Homo sapiens
auguugcccagugugu

SEQ ID NO: 261704 - RNA, 20 nt, Homo sapiens
auguugcccaguguguuucu

SEQ ID NO: 261705 - RNA, 18 nt, Homo sapiens
auguugggaaacuuggcu

SEQ ID NO: 261706 - RNA, 13 nt, Homo sapiens
auguuucaaaaaa

SEQ ID NO: 261707 - RNA, 19 nt, Homo sapiens
auuaaaaggaagcuuacau

SEQ ID NO: 261708 - RNA, 21 nt, Homo sapiens
auuaacuuuuauaaacuuuac

SEQ ID NO: 261709 - RNA, 18 nt, Homo sapiens
auuaagaaagacuaucua

SEQ ID NO: 261710 - RNA, 20 nt, Homo sapiens
auuaagaucagcaaagggag

SEQ ID NO: 261711 - RNA, 22 nt, Homo sapiens
auuaaggauuuuaugcuuuaaa

SEQ ID NO: 261712 - RNA, 17 nt, Homo sapiens
auuaauacauucaccca

SEQ ID NO: 261713 - RNA, 13 nt, Homo sapiens
auuaauauuugcu

SEQ ID NO: 261714 - RNA, 19 nt, Homo sapiens
auuaaucuuaguguaugau

SEQ ID NO: 261715 - RNA, 21 nt, Homo sapiens
auuacaacugcuacagagcag

SEQ ID NO: 261716 - RNA, 23 nt, Homo sapiens
auuacaggugugaaccaccacac

SEQ ID NO: 261717 - RNA, 15 nt, Homo sapiens
auuacaggugugagc

SEQ ID NO: 261718 - RNA, 19 nt, Homo sapiens
auuaccuaguagucauuuc

SEQ ID NO: 261719 - RNA, 14 nt, Homo sapiens
auuaccuugugcua

SEQ ID NO: 261720 - RNA, 13 nt, Homo sapiens
auuagaugaacuc

SEQ ID NO: 261721 - RNA, 16 nt, Homo sapiens
auuagaugaacucaac

SEQ ID NO: 261722 - RNA, 20 nt, Homo sapiens
auuagcauuugucaacaaag

SEQ ID NO: 261723 - RNA, 18 nt, Homo sapiens
auuagcauuuugcuaaau

SEQ ID NO: 261724 - RNA, 18 nt, Homo sapiens
auuagcuccacaaagcca

SEQ ID NO: 261725 - RNA, 18 nt, Homo sapiens
auuaggcuguaacuacuu

SEQ ID NO: 261726 - RNA, 19 nt, Homo sapiens
auuauaaaugacaaccuga

SEQ ID NO: 261727 - RNA, 18 nt, Homo sapiens
auuauaauuaguuccuca

SEQ ID NO: 261728 - RNA, 16 nt, Homo sapiens
auuauaugcacuagca

SEQ ID NO: 261729 - RNA, 14 nt, Homo sapiens
auuauauucauucu

SEQ ID NO: 261730 - RNA, 16 nt, Homo sapiens
auuaucaacagcauuu

SEQ ID NO: 261731 - RNA, 17 nt, Homo sapiens
auuauccuguaguacaa

SEQ ID NO: 261732 - RNA, 13 nt, Homo sapiens
auuaugacaccuu

SEQ ID NO: 261733 - RNA, 18 nt, Homo sapiens
auuaugccauagcaagau

SEQ ID NO: 261734 - RNA, 16 nt, Homo sapiens
auuauguaaaucccau

SEQ ID NO: 261735 - RNA, 13 nt, Homo sapiens
auuauucccauga

SEQ ID NO: 261736 - RNA, 13 nt, Homo sapiens
augaacaaccucg

SEQ ID NO: 261737 - RNA, 23 nt, Homo sapiens
augaaccacccagaguggcccaa

SEQ ID NO: 261738 - RNA, 15 nt, Homo sapiens
augaacucuuaauca

SEQ ID NO: 261739 - RNA, 16 nt, Homo sapiens
augaacucuuaaucaa

SEQ ID NO: 261740 - RNA, 22 nt, Homo sapiens
augaagacagggucaucgacca

SEQ ID NO: 261741 - RNA, 21 nt, Homo sapiens
augaagacccccuccaaagag

SEQ ID NO: 261742 - RNA, 20 nt, Homo sapiens
augaagucuuguucagggua

SEQ ID NO: 261743 - RNA, 15 nt, Homo sapiens
augaauaguuuccaa

SEQ ID NO: 261744 - RNA, 22 nt, Homo sapiens
augaaucaaucaauucauaucu

SEQ ID NO: 261745 - RNA, 13 nt, Homo sapiens
augaaucacuuaa

SEQ ID NO: 261746 - RNA, 13 nt, Homo sapiens
augaaucauuuaa

SEQ ID NO: 261747 - RNA, 14 nt, Homo sapiens
augaaugcccagug

SEQ ID NO: 261748 - RNA, 17 nt, Homo sapiens
augaaugggagugaggg

SEQ ID NO: 261749 - RNA, 15 nt, Homo sapiens
augaauuauccugua

SEQ ID NO: 261750 - RNA, 19 nt, Homo sapiens
augaauugcauuuuacuuu

SEQ ID NO: 261751 - RNA, 14 nt, Homo sapiens
augacaaagacuga

SEQ ID NO: 261752 - RNA, 12 nt, Homo sapiens
augacacagucu

SEQ ID NO: 261753 - RNA, 21 nt, Homo sapiens
augacacucuagucaaagccu

SEQ ID NO: 261754 - RNA, 19 nt, Homo sapiens
augacaucagcaauacaga

SEQ ID NO: 261755 - RNA, 17 nt, Homo sapiens
augacaucugucuagga

SEQ ID NO: 261756 - RNA, 19 nt, Homo sapiens
augacauucccugcuaaua

SEQ ID NO: 261757 - RNA, 22 nt, Homo sapiens
augaccccuccccuaaugccug

SEQ ID NO: 261758 - RNA, 21 nt, Homo sapiens
augaccuugaaugaugccaug

SEQ ID NO: 261759 - RNA, 21 nt, Homo sapiens
augacuauucaguggcuaacu

SEQ ID NO: 261760 - RNA, 23 nt, Homo sapiens
augacuccagaauuucccaaagc

SEQ ID NO: 261761 - RNA, 14 nt, Homo sapiens
augacuuacuguac

SEQ ID NO: 261762 - RNA, 18 nt, Homo sapiens
augagaaaaugucuuuau

SEQ ID NO: 261763 - RNA, 16 nt, Homo sapiens
augagaaggaauuuga

SEQ ID NO: 261764 - RNA, 22 nt, Homo sapiens
augagaauuugagugcucugau

SEQ ID NO: 261765 - RNA, 16 nt, Homo sapiens
augagaccacuguuau

SEQ ID NO: 261766 - RNA, 20 nt, Homo sapiens
augagaggaaaucaccgaaa

SEQ ID NO: 261767 - RNA, 13 nt, Homo sapiens
augagaugaugcc

SEQ ID NO: 261768 - RNA, 16 nt, Homo sapiens
augagcaaaaccaaau

SEQ ID NO: 261769 - RNA, 12 nt, Homo sapiens
augagcauuuag

SEQ ID NO: 261770 - RNA, 20 nt, Homo sapiens
augagccuggcaagaaugug

SEQ ID NO: 261771 - RNA, 20 nt, Homo sapiens
augagcugcacuccaugagu

SEQ ID NO: 261772 - RNA, 23 nt, Homo sapiens
augagcuggggaugucucucaug

SEQ ID NO: 261773 - RNA, 16 nt, Homo sapiens
augaggaaacugcacu

SEQ ID NO: 261774 - RNA, 17 nt, Homo sapiens
augagggaacuguguag

SEQ ID NO: 261775 - RNA, 15 nt, Homo sapiens
augagguacucuccu

SEQ ID NO: 261776 - RNA, 16 nt, Homo sapiens
augauagucaucauca

SEQ ID NO: 261777 - RNA, 16 nt, Homo sapiens
augauccuaaugaaug

SEQ ID NO: 261778 - RNA, 18 nt, Homo sapiens
augauccuaaugaaugca

SEQ ID NO: 261779 - RNA, 22 nt, Homo sapiens
augauccuaggcauuugcugaa

SEQ ID NO: 261780 - RNA, 13 nt, Homo sapiens
augaucgucauca

SEQ ID NO: 261781 - RNA, 18 nt, Homo sapiens
augaucuaggaagacuuu

SEQ ID NO: 261782 - RNA, 20 nt, Homo sapiens
augaucuuugcagacaggca

SEQ ID NO: 261783 - RNA, 22 nt, Homo sapiens
augaugagguuuucuuaacuua

SEQ ID NO: 261784 - RNA, 20 nt, Homo sapiens
augaugaucgucaucaucaa

SEQ ID NO: 261785 - RNA, 12 nt, Homo sapiens
augaugaucugg

SEQ ID NO: 261786 - RNA, 22 nt, Homo sapiens
augaugggauaucugaggccau

SEQ ID NO: 261787 - RNA, 14 nt, Homo sapiens
augauugugcacau

SEQ ID NO: 261788 - RNA, 16 nt, Homo sapiens
augauuucacagugug

SEQ ID NO: 261789 - RNA, 22 nt, Homo sapiens
augauuucuaugcugaguuugu

SEQ ID NO: 261790 - RNA, 21 nt, Homo sapiens
augcaaaaguucugacuugac

SEQ ID NO: 261791 - RNA, 18 nt, Homo sapiens
augcaacacccucuucua

SEQ ID NO: 261792 - RNA, 16 nt, Homo sapiens
augcaacucaucuuca

SEQ ID NO: 261793 - RNA, 17 nt, Homo sapiens
augcaacucaucuucac

SEQ ID NO: 261794 - RNA, 18 nt, Homo sapiens
augcaagaaguacugcca

SEQ ID NO: 261795 - RNA, 9 nt, Homo sapiens
augcacaaa

SEQ ID NO: 261796 - RNA, 13 nt, Homo sapiens
augcagcaucuaa

SEQ ID NO: 261797 - RNA, 14 nt, Homo sapiens
augcagcaucuaag

SEQ ID NO: 261798 - RNA, 13 nt, Homo sapiens
augcagguggugu

SEQ ID NO: 261799 - RNA, 15 nt, Homo sapiens
augcagugcuuccaa

SEQ ID NO: 261800 - RNA, 14 nt, Homo sapiens
augcauaaaugcga

SEQ ID NO: 261801 - RNA, 16 nt, Homo sapiens
augcauaaaugcgauc

SEQ ID NO: 261802 - RNA, 17 nt, Homo sapiens
augcauacaaguuucau

SEQ ID NO: 261803 - RNA, 15 nt, Homo sapiens
augcauacacacaca

SEQ ID NO: 261804 - RNA, 23 nt, Homo sapiens
augcauauccaacaugugcucag

SEQ ID NO: 261805 - RNA, 20 nt, Homo sapiens
augcaucaaguuauugacaa

SEQ ID NO: 261806 - RNA, 18 nt, Homo sapiens
augcauucccuacagauu

SEQ ID NO: 261807 - RNA, 14 nt, Homo sapiens
augccaacucagcc

SEQ ID NO: 261808 - RNA, 17 nt, Homo sapiens
augccacagaguaugaa

SEQ ID NO: 261809 - RNA, 23 nt, Homo sapiens
augccacagaguaugaaggaaga

SEQ ID NO: 261810 - RNA, 19 nt, Homo sapiens
augccagccacugugauag

SEQ ID NO: 261811 - RNA, 17 nt, Homo sapiens
augccagcuuaucucag

SEQ ID NO: 261812 - RNA, 18 nt, Homo sapiens
augccagcuuaucucagg

SEQ ID NO: 261813 - RNA, 19 nt, Homo sapiens
augccagcuuaucucaggg

SEQ ID NO: 261814 - RNA, 15 nt, Homo sapiens
augccauagcaagau

SEQ ID NO: 261815 - RNA, 21 nt, Homo sapiens
augccaugggcccucucagca

SEQ ID NO: 261816 - RNA, 19 nt, Homo sapiens
augccucauuaccuugugc

SEQ ID NO: 261817 - RNA, 22 nt, Homo sapiens
augccucauuaccuugugcuaa

SEQ ID NO: 261818 - RNA, 20 nt, Homo sapiens
augccuuucucucuuucucu

SEQ ID NO: 261819 - RNA, 15 nt, Homo sapiens
augcgacccaagacc

SEQ ID NO: 261820 - RNA, 16 nt, Homo sapiens
augcguuuaaucacau

SEQ ID NO: 261821 - RNA, 18 nt, Homo sapiens
augcuauaacuauguuga

SEQ ID NO: 261822 - RNA, 14 nt, Homo sapiens
augcucagggucaa

SEQ ID NO: 261823 - RNA, 16 nt, Homo sapiens
augcucugcauguuac

SEQ ID NO: 261824 - RNA, 13 nt, Homo sapiens
augcugacuguac

SEQ ID NO: 261825 - RNA, 23 nt, Homo sapiens
augcuggcauuugcaccuaccuc

SEQ ID NO: 261826 - RNA, 18 nt, Homo sapiens
augcuggggacacagcau

SEQ ID NO: 261827 - RNA, 20 nt, Homo sapiens
augcugguuuuucaguuuuc

SEQ ID NO: 261828 - RNA, 19 nt, Homo sapiens
augcuguauccacaaauca

SEQ ID NO: 261829 - RNA, 19 nt, Homo sapiens
augcugugauugugccuac

SEQ ID NO: 261830 - RNA, 22 nt, Homo sapiens
augcuguucacuggacacuuca

SEQ ID NO: 261831 - RNA, 23 nt, Homo sapiens
augcuguucacuggacacuucac

SEQ ID NO: 261832 - RNA, 17 nt, Homo sapiens
auuguuuucaguguaca

SEQ ID NO: 261833 - RNA, 23 nt, Homo sapiens
auuuaaaaacaaaaaaacacaaa

SEQ ID NO: 261834 - RNA, 23 nt, Homo sapiens
auuuaaagcauuccuuucuuuaa

SEQ ID NO: 261835 - RNA, 19 nt, Homo sapiens
auuuaacagaaauguacag

SEQ ID NO: 261836 - RNA, 16 nt, Homo sapiens
auuuacaaagugugua

SEQ ID NO: 261837 - RNA, 20 nt, Homo sapiens
auuuacauacucugcuuaga

SEQ ID NO: 261838 - RNA, 13 nt, Homo sapiens
auuuacauugccu

SEQ ID NO: 261839 - RNA, 18 nt, Homo sapiens
auuuaccuucuaccucuu

SEQ ID NO: 261840 - RNA, 22 nt, Homo sapiens
auuuagaaaauguucaccuaga

SEQ ID NO: 261841 - RNA, 18 nt, Homo sapiens
auuuagacccugcauuua

SEQ ID NO: 261842 - RNA, 14 nt, Homo sapiens
auuuagcaaccuag

SEQ ID NO: 261843 - RNA, 13 nt, Homo sapiens
auuuagcacauac

SEQ ID NO: 261844 - RNA, 17 nt, Homo sapiens
auuuaggugauaccuaa

SEQ ID NO: 261845 - RNA, 18 nt, Homo sapiens
auuuaggugauaccuaaa

SEQ ID NO: 261846 - RNA, 17 nt, Homo sapiens
auuuauaaucacuuuuu

SEQ ID NO: 261847 - RNA, 12 nt, Homo sapiens
auuuauauaugu

SEQ ID NO: 261848 - RNA, 15 nt, Homo sapiens
auuuaucugugcaaa

SEQ ID NO: 261849 - RNA, 19 nt, Homo sapiens
auuuaucugugcaaauccu

SEQ ID NO: 261850 - RNA, 15 nt, Homo sapiens
auuuaugcaacucau

SEQ ID NO: 261851 - RNA, 21 nt, Homo sapiens
auuuaugguucucaggccuga

SEQ ID NO: 261852 - RNA, 20 nt, Homo sapiens
auuuauucuuggugaagaug

SEQ ID NO: 261853 - RNA, 17 nt, Homo sapiens
auuuauugaaaugauuu

SEQ ID NO: 261854 - RNA, 13 nt, Homo sapiens
auuucaacugaag

SEQ ID NO: 261855 - RNA, 13 nt, Homo sapiens
auuucacagugug

SEQ ID NO: 261856 - RNA, 13 nt, Homo sapiens
auuucacauuaau

SEQ ID NO: 261857 - RNA, 20 nt, Homo sapiens
auuucacgggcaacacucac

SEQ ID NO: 261858 - RNA, 18 nt, Homo sapiens
auuucagggaagcccuga

SEQ ID NO: 261859 - RNA, 23 nt, Homo sapiens
auuucagguuuuguaaagaugcc

SEQ ID NO: 261860 - RNA, 21 nt, Homo sapiens
auuuccugacagaaggacuca

SEQ ID NO: 261861 - RNA, 16 nt, Homo sapiens
auuucuccuccauggg

SEQ ID NO: 261862 - RNA, 19 nt, Homo sapiens
auuucuccuccaugggaga

SEQ ID NO: 261863 - RNA, 17 nt, Homo sapiens
auuucucuacugucuca

SEQ ID NO: 261864 - RNA, 20 nt, Homo sapiens
auuucucugcaucaggugua

SEQ ID NO: 261865 - RNA, 12 nt, Homo sapiens
auuucugcucag

SEQ ID NO: 261866 - RNA, 13 nt, Homo sapiens
auuucugcucaga

SEQ ID NO: 261867 - RNA, 15 nt, Homo sapiens
auuucuuaacuucuu

SEQ ID NO: 261868 - RNA, 13 nt, Homo sapiens
auuucuucacuca

SEQ ID NO: 261869 - RNA, 14 nt, Homo sapiens
auuucuucacucaa

SEQ ID NO: 261870 - RNA, 16 nt, Homo sapiens
auuugaaacacugguu

SEQ ID NO: 261871 - RNA, 21 nt, Homo sapiens
auuugacauagucuggcugua

SEQ ID NO: 261872 - RNA, 17 nt, Homo sapiens
auuugacuaagagucuc

SEQ ID NO: 261873 - RNA, 19 nt, Homo sapiens
auuugcacacguccauguu

SEQ ID NO: 261874 - RNA, 14 nt, Homo sapiens
auuugcagagacag

SEQ ID NO: 261875 - RNA, 13 nt, Homo sapiens
auuugcuaugagc

SEQ ID NO: 261876 - RNA, 19 nt, Homo sapiens
auuugcugagcauguacug

SEQ ID NO: 261877 - RNA, 18 nt, Homo sapiens
auuuggaaaauaaaucaa

SEQ ID NO: 261878 - RNA, 21 nt, Homo sapiens
auuugucaacaaagucaccca

SEQ ID NO: 261879 - RNA, 15 nt, Homo sapiens
auuugugagacugua

SEQ ID NO: 261880 - RNA, 18 nt, Homo sapiens
auuuuaacaacacacaau

SEQ ID NO: 261881 - RNA, 16 nt, Homo sapiens
auuuuaggauuaccca

SEQ ID NO: 261882 - RNA, 15 nt, Homo sapiens
auuuuaggcacccau

SEQ ID NO: 261883 - RNA, 17 nt, Homo sapiens
auuuuauaaaacaaaua

SEQ ID NO: 261884 - RNA, 14 nt, Homo sapiens
auuuuaugauccag

SEQ ID NO: 261885 - RNA, 19 nt, Homo sapiens
auuuuauguuuaguugcac

SEQ ID NO: 261886 - RNA, 15 nt, Homo sapiens
auuuuauuaugcaug

SEQ ID NO: 261887 - RNA, 20 nt, Homo sapiens
auuuuauuauguaaauccca

SEQ ID NO: 261888 - RNA, 18 nt, Homo sapiens
auuuuauuuuucucauga

SEQ ID NO: 261889 - RNA, 19 nt, Homo sapiens
auuuucagcaaaguacaaa

SEQ ID NO: 261890 - RNA, 18 nt, Homo sapiens
auuuucagugcuuugccc

SEQ ID NO: 261891 - RNA, 23 nt, Homo sapiens
augucaaagcaggggaguaugca

SEQ ID NO: 261892 - RNA, 14 nt, Homo sapiens
augucaagccauaa

SEQ ID NO: 261893 - RNA, 16 nt, Homo sapiens
augucagugugacuga

SEQ ID NO: 261894 - RNA, 19 nt, Homo sapiens
augucauuguucuugugaa

SEQ ID NO: 261895 - RNA, 23 nt, Homo sapiens
augucccuugcugugagcaagaa

SEQ ID NO: 261896 - RNA, 19 nt, Homo sapiens
augucguuugaaucacagu

SEQ ID NO: 261897 - RNA, 19 nt, Homo sapiens
augucucuuuaaugucaca

SEQ ID NO: 261898 - RNA, 20 nt, Homo sapiens
augucucuuuaaugucacag

SEQ ID NO: 261899 - RNA, 17 nt, Homo sapiens
augucuuaaccuaccug

SEQ ID NO: 261900 - RNA, 21 nt, Homo sapiens
augucuuuauuaaauguagaa

SEQ ID NO: 261901 - RNA, 19 nt, Homo sapiens
augucuuuccuauuugcac

SEQ ID NO: 261902 - RNA, 15 nt, Homo sapiens
augugaaaguuacaa

SEQ ID NO: 261903 - RNA, 17 nt, Homo sapiens
augugaaaguuacaaau

SEQ ID NO: 261904 - RNA, 16 nt, Homo sapiens
augugaacuugaagaa

SEQ ID NO: 261905 - RNA, 18 nt, Homo sapiens
augugacaacaugcaaga

SEQ ID NO: 261906 - RNA, 19 nt, Homo sapiens
augugacucaagacuucca

SEQ ID NO: 261907 - RNA, 15 nt, Homo sapiens
augugacucuuucca

SEQ ID NO: 261908 - RNA, 16 nt, Homo sapiens
augugacucuuuccaa

SEQ ID NO: 261909 - RNA, 20 nt, Homo sapiens
augugagaccauuuagcaca

SEQ ID NO: 261910 - RNA, 22 nt, Homo sapiens
augugauaaaaccccaucucua

SEQ ID NO: 261911 - RNA, 11 nt, Homo sapiens
augugaugaau

SEQ ID NO: 261912 - RNA, 14 nt, Homo sapiens
augugauugcagcu

SEQ ID NO: 261913 - RNA, 14 nt, Homo sapiens
augugcacaugcac

SEQ ID NO: 261914 - RNA, 15 nt, Homo sapiens
augugcagacacuca

SEQ ID NO: 261915 - RNA, 15 nt, Homo sapiens
augugcccccagacg

SEQ ID NO: 261916 - RNA, 14 nt, Homo sapiens
augugcucagggaa

SEQ ID NO: 261917 - RNA, 21 nt, Homo sapiens
augugcucagggaauaaucca

SEQ ID NO: 261918 - RNA, 23 nt, Homo sapiens
auguggcaacugcugaugcucau

SEQ ID NO: 261919 - RNA, 19 nt, Homo sapiens
auguggcaggcuggaguua

SEQ ID NO: 261920 - RNA, 20 nt, Homo sapiens
auguggcuggaagauccugc

SEQ ID NO: 261921 - RNA, 21 nt, Homo sapiens
augugggggucuguguguuua

SEQ ID NO: 261922 - RNA, 19 nt, Homo sapiens
augugggugggaccacaga

SEQ ID NO: 261923 - RNA, 14 nt, Homo sapiens
auguguaugcagaa

SEQ ID NO: 261924 - RNA, 12 nt, Homo sapiens
augugugauuca

SEQ ID NO: 261925 - RNA, 16 nt, Homo sapiens
augugugauucacagu

SEQ ID NO: 261926 - RNA, 12 nt, Homo sapiens
augugugcaaaa

SEQ ID NO: 261927 - RNA, 16 nt, Homo sapiens
auguguguguguugug

SEQ ID NO: 261928 - RNA, 14 nt, Homo sapiens
auguguuuccauau

SEQ ID NO: 261929 - RNA, 19 nt, Homo sapiens
auguuaggaaaauuucaca

SEQ ID NO: 261930 - RNA, 13 nt, Homo sapiens
auguucacuggua

SEQ ID NO: 261931 - RNA, 22 nt, Homo sapiens
auguucacuuuugacaaaggca

SEQ ID NO: 261932 - RNA, 20 nt, Homo sapiens
auguucagucacaugugcuc

SEQ ID NO: 261933 - RNA, 16 nt, Homo sapiens
auguucugggacacag

SEQ ID NO: 261934 - RNA, 15 nt, Homo sapiens
auguugaugaaaaau

SEQ ID NO: 261935 - RNA, 13 nt, Homo sapiens
auguugcuaacag

SEQ ID NO: 261936 - RNA, 16 nt, Homo sapiens
auguuuauccauguac

SEQ ID NO: 261937 - RNA, 21 nt, Homo sapiens
auguuuauccauguacuuucc

SEQ ID NO: 261938 - RNA, 16 nt, Homo sapiens
auguuugucucauccc

SEQ ID NO: 261939 - RNA, 17 nt, Homo sapiens
auguuugucucauccca

SEQ ID NO: 261940 - RNA, 19 nt, Homo sapiens
auguuuuagaaugagacuu

SEQ ID NO: 261941 - RNA, 21 nt, Homo sapiens
auguuuuauagacccugggaa

SEQ ID NO: 261942 - RNA, 22 nt, Homo sapiens
auguuuucagugcugugucauu

SEQ ID NO: 261943 - RNA, 20 nt, Homo sapiens
auguuuuucuucucccucag

SEQ ID NO: 261944 - RNA, 11 nt, Homo sapiens
auuaaagccau

SEQ ID NO: 261945 - RNA, 22 nt, Homo sapiens
auuaaauguagaaagugaucca

SEQ ID NO: 261946 - RNA, 14 nt, Homo sapiens
auuaacaugugcca

SEQ ID NO: 261947 - RNA, 16 nt, Homo sapiens
auuaaccacuucagcu

SEQ ID NO: 261948 - RNA, 20 nt, Homo sapiens
auuaacuuuuauaaacuuua

SEQ ID NO: 261949 - RNA, 18 nt, Homo sapiens
auuaagaaauucacuucc

SEQ ID NO: 261950 - RNA, 21 nt, Homo sapiens
auuaauauccaauugcugcuu

SEQ ID NO: 261951 - RNA, 23 nt, Homo sapiens
auuacaagcgugagccacugcac

SEQ ID NO: 261952 - RNA, 17 nt, Homo sapiens
auuacaauugcaguuuu

SEQ ID NO: 261953 - RNA, 14 nt, Homo sapiens
auuacaauugugag

SEQ ID NO: 261954 - RNA, 19 nt, Homo sapiens
auuacaggaaguacuggag

SEQ ID NO: 261955 - RNA, 23 nt, Homo sapiens
auuacaggugugagccacagcac

SEQ ID NO: 261956 - RNA, 18 nt, Homo sapiens
auuacauggggucuagaa

SEQ ID NO: 261957 - RNA, 17 nt, Homo sapiens
auuaccgcguuguaaaa

SEQ ID NO: 261958 - RNA, 16 nt, Homo sapiens
auuaccuaguagucau

SEQ ID NO: 261959 - RNA, 16 nt, Homo sapiens
auuaccuccugagaaa

SEQ ID NO: 261960 - RNA, 22 nt, Homo sapiens
auuaccuugugcuaauccucuu

SEQ ID NO: 261961 - RNA, 21 nt, Homo sapiens
auuacuggccuuuuucauuua

SEQ ID NO: 261962 - RNA, 14 nt, Homo sapiens
auuacuucugcuac

SEQ ID NO: 261963 - RNA, 13 nt, Homo sapiens
auuagacagucaa

SEQ ID NO: 261964 - RNA, 17 nt, Homo sapiens
auuagccaaguguggua

SEQ ID NO: 261965 - RNA, 23 nt, Homo sapiens
auuagccaagugugguagagugu

SEQ ID NO: 261966 - RNA, 19 nt, Homo sapiens
auuagccuaugugcaugca

SEQ ID NO: 261967 - RNA, 17 nt, Homo sapiens
auuagucugucacucca

SEQ ID NO: 261968 - RNA, 14 nt, Homo sapiens
auuauaacuguaaa

SEQ ID NO: 261969 - RNA, 17 nt, Homo sapiens
auuauaauauacuauau

SEQ ID NO: 261970 - RNA, 17 nt, Homo sapiens
auuauaugcacuagcaa

SEQ ID NO: 261971 - RNA, 13 nt, Homo sapiens
auuaucaacagca

SEQ ID NO: 261972 - RNA, 19 nt, Homo sapiens
auuaucuaaaaucugcuag

SEQ ID NO: 261973 - RNA, 18 nt, Homo sapiens
auuaucuagauacuguau

SEQ ID NO: 261974 - RNA, 18 nt, Homo sapiens
auuaucuaugauaugcua

SEQ ID NO: 261975 - RNA, 13 nt, Homo sapiens
auuaugaagucau

SEQ ID NO: 261976 - RNA, 16 nt, Homo sapiens
auuaugcaggggcaaa

SEQ ID NO: 261977 - RNA, 11 nt, Homo sapiens
caaauguucuc

SEQ ID NO: 261978 - RNA, 18 nt, Homo sapiens
caaauuuagcaaccuaga

SEQ ID NO: 261979 - RNA, 19 nt, Homo sapiens
caacaagugcucuuuccac

SEQ ID NO: 261980 - RNA, 17 nt, Homo sapiens
caacaauccaucucuca

SEQ ID NO: 261981 - RNA, 13 nt, Homo sapiens
caacagauucucu

SEQ ID NO: 261982 - RNA, 11 nt, Homo sapiens
caacagcauuu

SEQ ID NO: 261983 - RNA, 15 nt, Homo sapiens
caacagcauuuucaa

SEQ ID NO: 261984 - RNA, 22 nt, Homo sapiens
caacagcccucaggucagggug

SEQ ID NO: 261985 - RNA, 18 nt, Homo sapiens
caacaguuuuuuaugcua

SEQ ID NO: 261986 - RNA, 16 nt, Homo sapiens
caacauccuuaaguca

SEQ ID NO: 261987 - RNA, 18 nt, Homo sapiens
caacaugccagccacugu

SEQ ID NO: 261988 - RNA, 18 nt, Homo sapiens
caacauuuguuccaugag

SEQ ID NO: 261989 - RNA, 22 nt, Homo sapiens
caaccacugcgaccacaagaag

SEQ ID NO: 261990 - RNA, 14 nt, Homo sapiens
caaccagagcagcu

SEQ ID NO: 261991 - RNA, 13 nt, Homo sapiens
caacccacaccaa

SEQ ID NO: 261992 - RNA, 16 nt, Homo sapiens
caacccacaccaaaua

SEQ ID NO: 261993 - RNA, 13 nt, Homo sapiens
caaccccaugaga

SEQ ID NO: 261994 - RNA, 20 nt, Homo sapiens
caaccccuucgcuccugugu

SEQ ID NO: 261995 - RNA, 22 nt, Homo sapiens
caacccgucuggcccaccaggg

SEQ ID NO: 261996 - RNA, 16 nt, Homo sapiens
caaccuagaaacacac

SEQ ID NO: 261997 - RNA, 21 nt, Homo sapiens
caaccuagaaacacacauuuc

SEQ ID NO: 261998 - RNA, 18 nt, Homo sapiens
caaccucauuuuaacuca

SEQ ID NO: 261999 - RNA, 17 nt, Homo sapiens
caaccucggcuccugga

SEQ ID NO: 262000 - RNA, 19 nt, Homo sapiens
caaccugugaucaagcaau

SEQ ID NO: 262001 - RNA, 18 nt, Homo sapiens
caacgccucacugaaaca

SEQ ID NO: 262002 - RNA, 19 nt, Homo sapiens
caacguggggcagcacaga

SEQ ID NO: 262003 - RNA, 13 nt, Homo sapiens
caacuacuaauag

SEQ ID NO: 262004 - RNA, 16 nt, Homo sapiens
caacucaucuucacag

SEQ ID NO: 262005 - RNA, 13 nt, Homo sapiens
caacucuauuuaa

SEQ ID NO: 262006 - RNA, 19 nt, Homo sapiens
caacugaaguucuauuuau

SEQ ID NO: 262007 - RNA, 13 nt, Homo sapiens
caacugaccaguu

SEQ ID NO: 262008 - RNA, 23 nt, Homo sapiens
caacugcaucaagaugugacaug

SEQ ID NO: 262009 - RNA, 13 nt, Homo sapiens
caacuguggcuua

SEQ ID NO: 262010 - RNA, 17 nt, Homo sapiens
caacuugggaacuagac

SEQ ID NO: 262011 - RNA, 12 nt, Homo sapiens
caacuuugacaa

SEQ ID NO: 262012 - RNA, 16 nt, Homo sapiens
caagaaguacugccaa

SEQ ID NO: 262013 - RNA, 20 nt, Homo sapiens
caagacgcugugcugcccug

SEQ ID NO: 262014 - RNA, 20 nt, Homo sapiens
caagacucuuuggacacuca

SEQ ID NO: 262015 - RNA, 14 nt, Homo sapiens
caagaucugaauuu

SEQ ID NO: 262016 - RNA, 21 nt, Homo sapiens
caagauggaugcgacccaaga

SEQ ID NO: 262017 - RNA, 22 nt, Homo sapiens
caagauggaugcgacccaagac

SEQ ID NO: 262018 - RNA, 14 nt, Homo sapiens
caagcaaauggcca

SEQ ID NO: 262019 - RNA, 15 nt, Homo sapiens
caagcacagaaggag

SEQ ID NO: 262020 - RNA, 23 nt, Homo sapiens
caagcaguuaguuccuucaugau

SEQ ID NO: 262021 - RNA, 21 nt, Homo sapiens
caagccuagcccuucucucau

SEQ ID NO: 262022 - RNA, 11 nt, Homo sapiens
caagcucugcu

SEQ ID NO: 262023 - RNA, 16 nt, Homo sapiens
caagcuggacuauggc

SEQ ID NO: 262024 - RNA, 17 nt, Homo sapiens
caagcugggagcacagg

SEQ ID NO: 262025 - RNA, 20 nt, Homo sapiens
caagcuuggcuguagaagga

SEQ ID NO: 262026 - RNA, 22 nt, Homo sapiens
caaggacgugggccuccagagu

SEQ ID NO: 262027 - RNA, 21 nt, Homo sapiens
caaggauggaugcagauccag

SEQ ID NO: 262028 - RNA, 16 nt, Homo sapiens
caaggcaaggcuguca

SEQ ID NO: 262029 - RNA, 11 nt, Homo sapiens
caaggccaaag

SEQ ID NO: 262030 - RNA, 19 nt, Homo sapiens
caaggcccauaucugugaa

SEQ ID NO: 262031 - RNA, 16 nt, Homo sapiens
caaggcucacaugcuc

SEQ ID NO: 262032 - RNA, 14 nt, Homo sapiens
caaggcugcaguga

SEQ ID NO: 262033 - RNA, 15 nt, Homo sapiens
caaggcugcagugag

SEQ ID NO: 262034 - RNA, 21 nt, Homo sapiens
caagggccagcuggaggugaa

SEQ ID NO: 262035 - RNA, 21 nt, Homo sapiens
caagggcuuuguuuugcacac

SEQ ID NO: 262036 - RNA, 18 nt, Homo sapiens
caaggucuccagagggug

SEQ ID NO: 262037 - RNA, 15 nt, Homo sapiens
caaguagcacccugg

SEQ ID NO: 262038 - RNA, 20 nt, Homo sapiens
caagucuuuacagaaucaaa

SEQ ID NO: 262039 - RNA, 15 nt, Homo sapiens
caagugccuuagcaa

SEQ ID NO: 262040 - RNA, 16 nt, Homo sapiens
caagugcucuuuccac

SEQ ID NO: 262041 - RNA, 18 nt, Homo sapiens
caaguguagguaucauuu

SEQ ID NO: 262042 - RNA, 15 nt, Homo sapiens
caaguuaguucaauc

SEQ ID NO: 262043 - RNA, 21 nt, Homo sapiens
caaguucaugcagcuguggca

SEQ ID NO: 262044 - RNA, 20 nt, Homo sapiens
caaguuggcuucuaaucaaa

SEQ ID NO: 262045 - RNA, 21 nt, Homo sapiens
caauaaacauuucauuuccca

SEQ ID NO: 262046 - RNA, 14 nt, Homo sapiens
auugauuaccaagu

SEQ ID NO: 262047 - RNA, 22 nt, Homo sapiens
auugauugggcacaucauuuca

SEQ ID NO: 262048 - RNA, 18 nt, Homo sapiens
auugcaauagaaauccaa

SEQ ID NO: 262049 - RNA, 16 nt, Homo sapiens
auugcaccuggaugua

SEQ ID NO: 262050 - RNA, 16 nt, Homo sapiens
auugcaggagucccug

SEQ ID NO: 262051 - RNA, 15 nt, Homo sapiens
auugcauucauguac

SEQ ID NO: 262052 - RNA, 18 nt, Homo sapiens
auuggaaauuuguuauaa

SEQ ID NO: 262053 - RNA, 19 nt, Homo sapiens
auuggaccagucagcacag

SEQ ID NO: 262054 - RNA, 15 nt, Homo sapiens
auuggauuuccuaau

SEQ ID NO: 262055 - RNA, 22 nt, Homo sapiens
auuggauuuccuaauacuguca

SEQ ID NO: 262056 - RNA, 17 nt, Homo sapiens
auuggcuuuucugaucc

SEQ ID NO: 262057 - RNA, 21 nt, Homo sapiens
auugguccgaucuuugacucu

SEQ ID NO: 262058 - RNA, 22 nt, Homo sapiens
auugguuuuccaaucauuugac

SEQ ID NO: 262059 - RNA, 18 nt, Homo sapiens
auuguaaggaaugauuaa

SEQ ID NO: 262060 - RNA, 16 nt, Homo sapiens
auuguacaaccuguga

SEQ ID NO: 262061 - RNA, 17 nt, Homo sapiens
auuguacaaccugugau

SEQ ID NO: 262062 - RNA, 19 nt, Homo sapiens
auuguaucaaaugugacau

SEQ ID NO: 262063 - RNA, 15 nt, Homo sapiens
auugucauugauaca

SEQ ID NO: 262064 - RNA, 12 nt, Homo sapiens
auugucccugaa

SEQ ID NO: 262065 - RNA, 15 nt, Homo sapiens
auugugagccaccac

SEQ ID NO: 262066 - RNA, 18 nt, Homo sapiens
auugugaucagaccauaa

SEQ ID NO: 262067 - RNA, 21 nt, Homo sapiens
auugugccuacgaauagccac

SEQ ID NO: 262068 - RNA, 16 nt, Homo sapiens
auuguuaaaauaacua

SEQ ID NO: 262069 - RNA, 14 nt, Homo sapiens
auuguuagucucuu

SEQ ID NO: 262070 - RNA, 13 nt, Homo sapiens
auuguuuacccaa

SEQ ID NO: 262071 - RNA, 14 nt, Homo sapiens
auuguuucuuucaa

SEQ ID NO: 262072 - RNA, 23 nt, Homo sapiens
auuguuugaacccgggaggcaga

SEQ ID NO: 262073 - RNA, 14 nt, Homo sapiens
auuguuuucagugu

SEQ ID NO: 262074 - RNA, 22 nt, Homo sapiens
auuguuuucaguguacauggaa

SEQ ID NO: 262075 - RNA, 21 nt, Homo sapiens
auuuaaaaaacuaacacccag

SEQ ID NO: 262076 - RNA, 15 nt, Homo sapiens
auuuaauccucucaa

SEQ ID NO: 262077 - RNA, 22 nt, Homo sapiens
auuuacagacugaugccagaca

SEQ ID NO: 262078 - RNA, 21 nt, Homo sapiens
auuuacaugaauugcauuuua

SEQ ID NO: 262079 - RNA, 17 nt, Homo sapiens
auuuaccugaagucuuu

SEQ ID NO: 262080 - RNA, 17 nt, Homo sapiens
auuuaccuucuaccucu

SEQ ID NO: 262081 - RNA, 22 nt, Homo sapiens
auuuacuuuaaacuacauuagg

SEQ ID NO: 262082 - RNA, 17 nt, Homo sapiens
auuuagaaaauguucac

SEQ ID NO: 262083 - RNA, 19 nt, Homo sapiens
auuuagaagccaacuauga

SEQ ID NO: 262084 - RNA, 23 nt, Homo sapiens
auuuagaagccaacuaugauuau

SEQ ID NO: 262085 - RNA, 21 nt, Homo sapiens
auuuaggccaugggacaggga

SEQ ID NO: 262086 - RNA, 22 nt, Homo sapiens
auuuaguuugauuauucagugu

SEQ ID NO: 262087 - RNA, 22 nt, Homo sapiens
auuuaucuauaauuuaccuaag

SEQ ID NO: 262088 - RNA, 14 nt, Homo sapiens
auuuaucugugcaa

SEQ ID NO: 262089 - RNA, 23 nt, Homo sapiens
auuuaucugugcaaauccuugau

SEQ ID NO: 262090 - RNA, 20 nt, Homo sapiens
auuuaugccucuguauuuaa

SEQ ID NO: 262091 - RNA, 19 nt, Homo sapiens
auuuauggccgggcagggu

SEQ ID NO: 262092 - RNA, 15 nt, Homo sapiens
auuuaugguucucag

SEQ ID NO: 262093 - RNA, 13 nt, Homo sapiens
auuuaugugaugg

SEQ ID NO: 262094 - RNA, 13 nt, Homo sapiens
auuuauucugcuc

SEQ ID NO: 262095 - RNA, 21 nt, Homo sapiens
auuuauugaaaugauuucaca

SEQ ID NO: 262096 - RNA, 14 nt, Homo sapiens
auuuauuuauucau

SEQ ID NO: 262097 - RNA, 19 nt, Homo sapiens
auuucacgggcaacacuca

SEQ ID NO: 262098 - RNA, 13 nt, Homo sapiens
auuucauacugua

SEQ ID NO: 262099 - RNA, 14 nt, Homo sapiens
auuucauacuguaa

SEQ ID NO: 262100 - RNA, 15 nt, Homo sapiens
auuucauacuguaac

SEQ ID NO: 262101 - RNA, 12 nt, Homo sapiens
auuucaucucuu

SEQ ID NO: 262102 - RNA, 20 nt, Homo sapiens
auuucaugauuucauuucaa

SEQ ID NO: 262103 - RNA, 15 nt, Homo sapiens
auuuccggccaacag

SEQ ID NO: 262104 - RNA, 17 nt, Homo sapiens
auuuccuaauacuguca

SEQ ID NO: 262105 - RNA, 22 nt, Homo sapiens
auuuccucauuuuuauaauguc

SEQ ID NO: 262106 - RNA, 13 nt, Homo sapiens
auuuccugacaga

SEQ ID NO: 262107 - RNA, 23 nt, Homo sapiens
auuuccugugucuuuuuucacua

SEQ ID NO: 262108 - RNA, 17 nt, Homo sapiens
auuuccuuuuccuucaa

SEQ ID NO: 262109 - RNA, 18 nt, Homo sapiens
auuucuaaaucuccaaaa

SEQ ID NO: 262110 - RNA, 13 nt, Homo sapiens
auuucucucugac

SEQ ID NO: 262111 - RNA, 16 nt, Homo sapiens
auuucucucugacccu

SEQ ID NO: 262112 - RNA, 22 nt, Homo sapiens
auuucugaggagccugcaacau

SEQ ID NO: 262113 - RNA, 13 nt, Homo sapiens
auuucuguguugc

SEQ ID NO: 262114 - RNA, 14 nt, Homo sapiens
auuucuguucuucc

SEQ ID NO: 262115 - RNA, 19 nt, Homo sapiens
auuucuucacucaaucucu

SEQ ID NO: 262116 - RNA, 16 nt, Homo sapiens
auuucuuugaauuuag

SEQ ID NO: 262117 - RNA, 19 nt, Homo sapiens
auuugaacucuucaaucuc

SEQ ID NO: 262118 - RNA, 23 nt, Homo sapiens
auuugaauuuuguguuagagauu

SEQ ID NO: 262119 - RNA, 13 nt, Homo sapiens
auuugagugcucu

SEQ ID NO: 262120 - RNA, 21 nt, Homo sapiens
auuugauacauuuuuguacua

SEQ ID NO: 262121 - RNA, 21 nt, Homo sapiens
auuugcaagggaaaagucucu

SEQ ID NO: 262122 - RNA, 19 nt, Homo sapiens
cacacggucuucacaaaga

SEQ ID NO: 262123 - RNA, 14 nt, Homo sapiens
cacacguccauguu

SEQ ID NO: 262124 - RNA, 13 nt, Homo sapiens
cacacugcuugug

SEQ ID NO: 262125 - RNA, 21 nt, Homo sapiens
cacacuguagcauuacagugg

SEQ ID NO: 262126 - RNA, 16 nt, Homo sapiens
cacacuguccuauuau

SEQ ID NO: 262127 - RNA, 13 nt, Homo sapiens
cacacuguuaaaa

SEQ ID NO: 262128 - RNA, 17 nt, Homo sapiens
cacacuugggagcaaaa

SEQ ID NO: 262129 - RNA, 18 nt, Homo sapiens
cacacuugggagcaaaag

SEQ ID NO: 262130 - RNA, 12 nt, Homo sapiens
cacacuuugcca

SEQ ID NO: 262131 - RNA, 19 nt, Homo sapiens
cacagaaaauggaagacag

SEQ ID NO: 262132 - RNA, 22 nt, Homo sapiens
cacagaagggugugggccacca

SEQ ID NO: 262133 - RNA, 16 nt, Homo sapiens
cacagacccugcccug

SEQ ID NO: 262134 - RNA, 21 nt, Homo sapiens
cacagagauaauucuagcuuu

SEQ ID NO: 262135 - RNA, 13 nt, Homo sapiens
cacagaggcugcc

SEQ ID NO: 262136 - RNA, 16 nt, Homo sapiens
cacagaugugugauuc

SEQ ID NO: 262137 - RNA, 21 nt, Homo sapiens
cacagcaagucacuggccagu

SEQ ID NO: 262138 - RNA, 22 nt, Homo sapiens
cacagcacaaauuaguuguaua

SEQ ID NO: 262139 - RNA, 15 nt, Homo sapiens
cacagcaucagcuca

SEQ ID NO: 262140 - RNA, 13 nt, Homo sapiens
cacagcauuguau

SEQ ID NO: 262141 - RNA, 20 nt, Homo sapiens
cacagccacacacacagaaa

SEQ ID NO: 262142 - RNA, 22 nt, Homo sapiens
cacaggcagcauuuagcacaua

SEQ ID NO: 262143 - RNA, 14 nt, Homo sapiens
cacaggcccggcuc

SEQ ID NO: 262144 - RNA, 14 nt, Homo sapiens
cacagggacuugaa

SEQ ID NO: 262145 - RNA, 16 nt, Homo sapiens
cacagguucaugccac

SEQ ID NO: 262146 - RNA, 23 nt, Homo sapiens
cacaguauuacuucugcuacaua

SEQ ID NO: 262147 - RNA, 15 nt, Homo sapiens
cacagucuuggcuca

SEQ ID NO: 262148 - RNA, 13 nt, Homo sapiens
cacagugcaucuc

SEQ ID NO: 262149 - RNA, 12 nt, Homo sapiens
cacagugugaau

SEQ ID NO: 262150 - RNA, 19 nt, Homo sapiens
cacaguuuugguugcuuua

SEQ ID NO: 262151 - RNA, 16 nt, Homo sapiens
cacauaccaugugcca

SEQ ID NO: 262152 - RNA, 17 nt, Homo sapiens
cacauacuugagacugu

SEQ ID NO: 262153 - RNA, 21 nt, Homo sapiens
cacauauaaauguacuuuucc

SEQ ID NO: 262154 - RNA, 20 nt, Homo sapiens
cacauccucugucuauuuga

SEQ ID NO: 262155 - RNA, 21 nt, Homo sapiens
cacauccucugucuauuugag

SEQ ID NO: 262156 - RNA, 17 nt, Homo sapiens
cacauccugaccuugca

SEQ ID NO: 262157 - RNA, 19 nt, Homo sapiens
cacaucucuguagauacag

SEQ ID NO: 262158 - RNA, 13 nt, Homo sapiens
cacaucugcauuu

SEQ ID NO: 262159 - RNA, 14 nt, Homo sapiens
cacaucuugcucug

SEQ ID NO: 262160 - RNA, 17 nt, Homo sapiens
cacaugcaaggucauuu

SEQ ID NO: 262161 - RNA, 14 nt, Homo sapiens
cacaugcacgugug

SEQ ID NO: 262162 - RNA, 11 nt, Homo sapiens
cacaugcuuuu

SEQ ID NO: 262163 - RNA, 14 nt, Homo sapiens
cacaugugcacaug

SEQ ID NO: 262164 - RNA, 17 nt, Homo sapiens
cacaugugcacaugcac

SEQ ID NO: 262165 - RNA, 12 nt, Homo sapiens
cacaugugcucu

SEQ ID NO: 262166 - RNA, 13 nt, Homo sapiens
cacaugugcucuc

SEQ ID NO: 262167 - RNA, 16 nt, Homo sapiens
cacauucaauaagcau

SEQ ID NO: 262168 - RNA, 12 nt, Homo sapiens
cacauuccugau

SEQ ID NO: 262169 - RNA, 19 nt, Homo sapiens
cacauuuauucugcucaca

SEQ ID NO: 262170 - RNA, 14 nt, Homo sapiens
cacauuucuuugaa

SEQ ID NO: 262171 - RNA, 17 nt, Homo sapiens
cacauuuuucagauaua

SEQ ID NO: 262172 - RNA, 23 nt, Homo sapiens
caccaaaucagcugcuacuacuc

SEQ ID NO: 262173 - RNA, 15 nt, Homo sapiens
caccaaccacugcga

SEQ ID NO: 262174 - RNA, 19 nt, Homo sapiens
caccaacuauagaauguau

SEQ ID NO: 262175 - RNA, 17 nt, Homo sapiens
caccacagccagcaccu

SEQ ID NO: 262176 - RNA, 14 nt, Homo sapiens
caccacaugugcac

SEQ ID NO: 262177 - RNA, 14 nt, Homo sapiens
caccaccaaccacu

SEQ ID NO: 262178 - RNA, 16 nt, Homo sapiens
caccagaggcugcaau

SEQ ID NO: 262179 - RNA, 15 nt, Homo sapiens
caccaggucagggag

SEQ ID NO: 262180 - RNA, 18 nt, Homo sapiens
caccauaaaucacaucau

SEQ ID NO: 262181 - RNA, 13 nt, Homo sapiens
cacccaugcaccu

SEQ ID NO: 262182 - RNA, 16 nt, Homo sapiens
cacccuccauucugca

SEQ ID NO: 262183 - RNA, 17 nt, Homo sapiens
cacccucuccuugucac

SEQ ID NO: 262184 - RNA, 18 nt, Homo sapiens
cacccucuccuugucaca

SEQ ID NO: 262185 - RNA, 16 nt, Homo sapiens
cacccuggaggauuuc

SEQ ID NO: 262186 - RNA, 21 nt, Homo sapiens
cacccuggaggauuucaucuc

SEQ ID NO: 262187 - RNA, 15 nt, Homo sapiens
cacccuuagccacuu

SEQ ID NO: 262188 - RNA, 21 nt, Homo sapiens
cacccuuccccuccuucuccc

SEQ ID NO: 262189 - RNA, 16 nt, Homo sapiens
caccucugcacaagcu

SEQ ID NO: 262190 - RNA, 18 nt, Homo sapiens
caccugacacaccaggcg

SEQ ID NO: 262191 - RNA, 16 nt, Homo sapiens
caccugcagauguucu

SEQ ID NO: 262192 - RNA, 19 nt, Homo sapiens
caccuggauguacuaucca

SEQ ID NO: 262193 - RNA, 14 nt, Homo sapiens
caccuugacagggc

SEQ ID NO: 262194 - RNA, 16 nt, Homo sapiens
cacgaauauugcugau

SEQ ID NO: 262195 - RNA, 22 nt, Homo sapiens
cacgaauauugcugauggugca

SEQ ID NO: 262196 - RNA, 19 nt, Homo sapiens
cacgacugcccggcagggu

SEQ ID NO: 262197 - RNA, 20 nt, Homo sapiens
cacgcuccuauaggaccaag

SEQ ID NO: 262198 - RNA, 17 nt, Homo sapiens
cacgcuggagugcagug

SEQ ID NO: 262199 - RNA, 21 nt, Homo sapiens
cacggacucaaguuucuucaa

SEQ ID NO: 262200 - RNA, 13 nt, Homo sapiens
cacggucuucaca

SEQ ID NO: 262201 - RNA, 12 nt, Homo sapiens
cacgguggugcc

SEQ ID NO: 262202 - RNA, 20 nt, Homo sapiens
caaagcaggggaguaugcaa

SEQ ID NO: 262203 - RNA, 21 nt, Homo sapiens
caaagcaggggaguaugcaaa

SEQ ID NO: 262204 - RNA, 23 nt, Homo sapiens
caaagcaggggaguaugcaaaag

SEQ ID NO: 262205 - RNA, 20 nt, Homo sapiens
caaagcauugagcaaagggg

SEQ ID NO: 262206 - RNA, 23 nt, Homo sapiens
caaagccuccuccagccgccaug

SEQ ID NO: 262207 - RNA, 20 nt, Homo sapiens
caaagccuuuggcucuucua

SEQ ID NO: 262208 - RNA, 18 nt, Homo sapiens
caaagcgugguggacaug

SEQ ID NO: 262209 - RNA, 21 nt, Homo sapiens
caaagcgugguggacaugcac

SEQ ID NO: 262210 - RNA, 23 nt, Homo sapiens
caaagcgugguggacaugcacag

SEQ ID NO: 262211 - RNA, 23 nt, Homo sapiens
caaagcucuuuugagcauuuaga

SEQ ID NO: 262212 - RNA, 22 nt, Homo sapiens
caaagcuuucauguaaacugug

SEQ ID NO: 262213 - RNA, 18 nt, Homo sapiens
caaaggagggucaggaag

SEQ ID NO: 262214 - RNA, 14 nt, Homo sapiens
caaaggauacugua

SEQ ID NO: 262215 - RNA, 15 nt, Homo sapiens
caaaggauacuguaa

SEQ ID NO: 262216 - RNA, 20 nt, Homo sapiens
caaagggaggaggugcacag

SEQ ID NO: 262217 - RNA, 17 nt, Homo sapiens
caaaggugauugugcca

SEQ ID NO: 262218 - RNA, 13 nt, Homo sapiens
caaaguaagccau

SEQ ID NO: 262219 - RNA, 16 nt, Homo sapiens
caaagugacuauucag

SEQ ID NO: 262220 - RNA, 19 nt, Homo sapiens
caaagugcugggauuacag

SEQ ID NO: 262221 - RNA, 11 nt, Homo sapiens
caaagugugac

SEQ ID NO: 262222 - RNA, 13 nt, Homo sapiens
caaauaaaccuuu

SEQ ID NO: 262223 - RNA, 18 nt, Homo sapiens
caaauaguagauggcaaa

SEQ ID NO: 262224 - RNA, 16 nt, Homo sapiens
caaauauuccagagac

SEQ ID NO: 262225 - RNA, 15 nt, Homo sapiens
caaaucagcugcuac

SEQ ID NO: 262226 - RNA, 14 nt, Homo sapiens
caaaucauacuuuc

SEQ ID NO: 262227 - RNA, 21 nt, Homo sapiens
caaaucauacuuucucuucaa

SEQ ID NO: 262228 - RNA, 20 nt, Homo sapiens
caaaucauacuuuuucuuug

SEQ ID NO: 262229 - RNA, 21 nt, Homo sapiens
caaaucauacuuuuucuuuga

SEQ ID NO: 262230 - RNA, 16 nt, Homo sapiens
caaaucaucuguaaca

SEQ ID NO: 262231 - RNA, 17 nt, Homo sapiens
caaaucuggaagccaaa

SEQ ID NO: 262232 - RNA, 15 nt, Homo sapiens
caaaugccacacggc

SEQ ID NO: 262233 - RNA, 13 nt, Homo sapiens
caaauguauuuca

SEQ ID NO: 262234 - RNA, 16 nt, Homo sapiens
caaauguucacuggua

SEQ ID NO: 262235 - RNA, 15 nt, Homo sapiens
caaauuaaggcauaa

SEQ ID NO: 262236 - RNA, 17 nt, Homo sapiens
caaauugggccaaagaa

SEQ ID NO: 262237 - RNA, 19 nt, Homo sapiens
caacaaacuucaaggguuu

SEQ ID NO: 262238 - RNA, 15 nt, Homo sapiens
caacaaagucaccca

SEQ ID NO: 262239 - RNA, 17 nt, Homo sapiens
caacaaagucacccacu

SEQ ID NO: 262240 - RNA, 14 nt, Homo sapiens
caacaagugcucuu

SEQ ID NO: 262241 - RNA, 21 nt, Homo sapiens
caacaauccaucucucaagua

SEQ ID NO: 262242 - RNA, 13 nt, Homo sapiens
caacacacacugu

SEQ ID NO: 262243 - RNA, 22 nt, Homo sapiens
caacaccucugcacaagcugca

SEQ ID NO: 262244 - RNA, 24 nt, Homo sapiens
caacacucacauuuauucugcuca

SEQ ID NO: 262245 - RNA, 13 nt, Homo sapiens
caacagacuugaa

SEQ ID NO: 262246 - RNA, 18 nt, Homo sapiens
caacaggguuuuuuucca

SEQ ID NO: 262247 - RNA, 19 nt, Homo sapiens
caacaugccagccacugug

SEQ ID NO: 262248 - RNA, 17 nt, Homo sapiens
caacaugugcucaggga

SEQ ID NO: 262249 - RNA, 18 nt, Homo sapiens
caacaugugcucagggaa

SEQ ID NO: 262250 - RNA, 16 nt, Homo sapiens
caacauuuguuuuagu

SEQ ID NO: 262251 - RNA, 19 nt, Homo sapiens
caaccacaggcagcauuua

SEQ ID NO: 262252 - RNA, 16 nt, Homo sapiens
caaccagagcagcuca

SEQ ID NO: 262253 - RNA, 19 nt, Homo sapiens
caaccaguuugaaccaaga

SEQ ID NO: 262254 - RNA, 20 nt, Homo sapiens
caacccaauaguuguugauu

SEQ ID NO: 262255 - RNA, 17 nt, Homo sapiens
caaccccugcagcuccu

SEQ ID NO: 262256 - RNA, 12 nt, Homo sapiens
caacccugugac

SEQ ID NO: 262257 - RNA, 18 nt, Homo sapiens
caaccggcuuuguggcac

SEQ ID NO: 262258 - RNA, 13 nt, Homo sapiens
caaccuaugguau

SEQ ID NO: 262259 - RNA, 12 nt, Homo sapiens
caaccucaguga

SEQ ID NO: 262260 - RNA, 20 nt, Homo sapiens
caaccucgcuggacucucag

SEQ ID NO: 262261 - RNA, 18 nt, Homo sapiens
caaccugccugacauuug

SEQ ID NO: 262262 - RNA, 15 nt, Homo sapiens
caaccugugaucaag

SEQ ID NO: 262263 - RNA, 14 nt, Homo sapiens
caacgaguacuuca

SEQ ID NO: 262264 - RNA, 13 nt, Homo sapiens
caacuaugauuau

SEQ ID NO: 262265 - RNA, 13 nt, Homo sapiens
caacucaucuuag

SEQ ID NO: 262266 - RNA, 14 nt, Homo sapiens
caacucaucuucac

SEQ ID NO: 262267 - RNA, 15 nt, Homo sapiens
caacucuuugagaaa

SEQ ID NO: 262268 - RNA, 13 nt, Homo sapiens
cacuuuucaaugu

SEQ ID NO: 262269 - RNA, 18 nt, Homo sapiens
cacuuuuccccaauucau

SEQ ID NO: 262270 - RNA, 21 nt, Homo sapiens
cagaaaaaaaaaaaaaagccu

SEQ ID NO: 262271 - RNA, 15 nt, Homo sapiens
cagaaaaauucuccu

SEQ ID NO: 262272 - RNA, 14 nt, Homo sapiens
cagaaaacaaaaaa

SEQ ID NO: 262273 - RNA, 19 nt, Homo sapiens
cagaaaauuguacaaccug

SEQ ID NO: 262274 - RNA, 18 nt, Homo sapiens
cagaaagcuagaaagugu

SEQ ID NO: 262275 - RNA, 19 nt, Homo sapiens
cagaaaucuagaagacugu

SEQ ID NO: 262276 - RNA, 21 nt, Homo sapiens
cagaaaucuagaagacuguca

SEQ ID NO: 262277 - RNA, 14 nt, Homo sapiens
cagaaauguguuau

SEQ ID NO: 262278 - RNA, 18 nt, Homo sapiens
cagaaauuaaaugaauuu

SEQ ID NO: 262279 - RNA, 18 nt, Homo sapiens
cagaacacaagacaccaa

SEQ ID NO: 262280 - RNA, 15 nt, Homo sapiens
cagaaccagagcuca

SEQ ID NO: 262281 - RNA, 14 nt, Homo sapiens
cagaagaugugaug

SEQ ID NO: 262282 - RNA, 15 nt, Homo sapiens
cagaagaugugauga

SEQ ID NO: 262283 - RNA, 12 nt, Homo sapiens
cagaagccucac

SEQ ID NO: 262284 - RNA, 17 nt, Homo sapiens
cagaaggaagacuucau

SEQ ID NO: 262285 - RNA, 13 nt, Homo sapiens
cagaaggacucag

SEQ ID NO: 262286 - RNA, 16 nt, Homo sapiens
cagaaggcaaacccau

SEQ ID NO: 262287 - RNA, 22 nt, Homo sapiens
cagaagggugugggccaccaga

SEQ ID NO: 262288 - RNA, 21 nt, Homo sapiens
cagaaguuugagaucagccug

SEQ ID NO: 262289 - RNA, 14 nt, Homo sapiens
cagaauaauaagag

SEQ ID NO: 262290 - RNA, 17 nt, Homo sapiens
cagaauauugugcccca

SEQ ID NO: 262291 - RNA, 18 nt, Homo sapiens
cagaauauugugccccau

SEQ ID NO: 262292 - RNA, 17 nt, Homo sapiens
cagaaucgcuccaccuu

SEQ ID NO: 262293 - RNA, 15 nt, Homo sapiens
cagaaucucaaauaa

SEQ ID NO: 262294 - RNA, 17 nt, Homo sapiens
cagaaucucaaauaacu

SEQ ID NO: 262295 - RNA, 17 nt, Homo sapiens
cagaaucuguuaccaga

SEQ ID NO: 262296 - RNA, 16 nt, Homo sapiens
cagaaugacucuggaa

SEQ ID NO: 262297 - RNA, 19 nt, Homo sapiens
cagaaugacucuggaacca

SEQ ID NO: 262298 - RNA, 16 nt, Homo sapiens
cagacaggaccaggga

SEQ ID NO: 262299 - RNA, 15 nt, Homo sapiens
cagacauucagagau

SEQ ID NO: 262300 - RNA, 20 nt, Homo sapiens
cagaccacugauaaaaccau

SEQ ID NO: 262301 - RNA, 15 nt, Homo sapiens
cagaccauucaggac

SEQ ID NO: 262302 - RNA, 16 nt, Homo sapiens
cagaccauucaggaca

SEQ ID NO: 262303 - RNA, 19 nt, Homo sapiens
cagaccauucaggacacag

SEQ ID NO: 262304 - RNA, 23 nt, Homo sapiens
cagaccauucaggacacagggaa

SEQ ID NO: 262305 - RNA, 17 nt, Homo sapiens
cagacccugcccugugg

SEQ ID NO: 262306 - RNA, 13 nt, Homo sapiens
cagaccucggugg

SEQ ID NO: 262307 - RNA, 17 nt, Homo sapiens
cagaccucggugggcau

SEQ ID NO: 262308 - RNA, 21 nt, Homo sapiens
cagacuacuucuuccccagau

SEQ ID NO: 262309 - RNA, 23 nt, Homo sapiens
cagacuaugucacccaaugcaua

SEQ ID NO: 262310 - RNA, 17 nt, Homo sapiens
cagacucacauccugac

SEQ ID NO: 262311 - RNA, 20 nt, Homo sapiens
cagacuggauaguccgucuc

SEQ ID NO: 262312 - RNA, 14 nt, Homo sapiens
cagacuucccugaa

SEQ ID NO: 262313 - RNA, 21 nt, Homo sapiens
cagagaagauucuuguauuua

SEQ ID NO: 262314 - RNA, 20 nt, Homo sapiens
cagagaauucucuuauccaa

SEQ ID NO: 262315 - RNA, 15 nt, Homo sapiens
cagagacacaagccu

SEQ ID NO: 262316 - RNA, 15 nt, Homo sapiens
cagagaccaucccug

SEQ ID NO: 262317 - RNA, 13 nt, Homo sapiens
cagagacugggac

SEQ ID NO: 262318 - RNA, 16 nt, Homo sapiens
cagagaggacuguuga

SEQ ID NO: 262319 - RNA, 15 nt, Homo sapiens
cagagaggagucaga

SEQ ID NO: 262320 - RNA, 15 nt, Homo sapiens
cagagagggggccac

SEQ ID NO: 262321 - RNA, 14 nt, Homo sapiens
cagagauggccaug

SEQ ID NO: 262322 - RNA, 16 nt, Homo sapiens
cagagaugugccccca

SEQ ID NO: 262323 - RNA, 13 nt, Homo sapiens
cagagcaagugag

SEQ ID NO: 262324 - RNA, 16 nt, Homo sapiens
cagagcagaacuuuca

SEQ ID NO: 262325 - RNA, 20 nt, Homo sapiens
cagagcagagaggcugaaua

SEQ ID NO: 262326 - RNA, 13 nt, Homo sapiens
cagagcugccacc

SEQ ID NO: 262327 - RNA, 15 nt, Homo sapiens
cagagcuucccugac

SEQ ID NO: 262328 - RNA, 20 nt, Homo sapiens
cagagcuugaacacagucuc

SEQ ID NO: 262329 - RNA, 13 nt, Homo sapiens
cagaggacaguau

SEQ ID NO: 262330 - RNA, 18 nt, Homo sapiens
cagaggagagaggacccc

SEQ ID NO: 262331 - RNA, 17 nt, Homo sapiens
cagaggcuuaaucacac

SEQ ID NO: 262332 - RNA, 23 nt, Homo sapiens
cagagguuucuggcagccaguac

SEQ ID NO: 262333 - RNA, 16 nt, Homo sapiens
cagagucccugccugg

SEQ ID NO: 262334 - RNA, 18 nt, Homo sapiens
cagagucucacuguugcc

SEQ ID NO: 262335 - RNA, 21 nt, Homo sapiens
cagagucucgcucuguugccc

SEQ ID NO: 262336 - RNA, 20 nt, Homo sapiens
cagagugaacacucuuggua

SEQ ID NO: 262337 - RNA, 22 nt, Homo sapiens
cagagugagacccagcccucau

SEQ ID NO: 262338 - RNA, 23 nt, Homo sapiens
cagagugagacccagcccucauc

SEQ ID NO: 262339 - RNA, 17 nt, Homo sapiens
cagaguggauucuugaa

SEQ ID NO: 262340 - RNA, 17 nt, Homo sapiens
cagaguggcccaagacu

SEQ ID NO: 262341 - RNA, 18 nt, Homo sapiens
cagaguuccgacugccau

SEQ ID NO: 262342 - RNA, 23 nt, Homo sapiens
cagaguuggggagauaaaggaac

SEQ ID NO: 262343 - RNA, 13 nt, Homo sapiens
cagaguugugcac

SEQ ID NO: 262344 - RNA, 19 nt, Homo sapiens
cagauacugucucuuucau

SEQ ID NO: 262345 - RNA, 17 nt, Homo sapiens
cagauagauauaugcuc

SEQ ID NO: 262346 - RNA, 18 nt, Homo sapiens
cagauagauauaugcucu

SEQ ID NO: 262347 - RNA, 22 nt, Homo sapiens
cagaucacuucaggucaggagu

SEQ ID NO: 262348 - RNA, 18 nt, Homo sapiens
cagaucccacuugcagcc

SEQ ID NO: 262349 - RNA, 14 nt, Homo sapiens
cagaugaaugggag

SEQ ID NO: 262350 - RNA, 14 nt, Homo sapiens
cagaugcaccagcc

SEQ ID NO: 262351 - RNA, 16 nt, Homo sapiens
cagauggcagcaguga

SEQ ID NO: 262352 - RNA, 20 nt, Homo sapiens
cagauguccuugaugcucau

SEQ ID NO: 262353 - RNA, 13 nt, Homo sapiens
cagaugugugauu

SEQ ID NO: 262354 - RNA, 15 nt, Homo sapiens
cagauuauuauugaa

SEQ ID NO: 262355 - RNA, 23 nt, Homo sapiens
cagauuccccccaucuccauugc

SEQ ID NO: 262356 - RNA, 20 nt, Homo sapiens
caauuauuaccaucucucca

SEQ ID NO: 262357 - RNA, 22 nt, Homo sapiens
caauuauuuauuaaaugcccag

SEQ ID NO: 262358 - RNA, 13 nt, Homo sapiens
caauuauuuugca

SEQ ID NO: 262359 - RNA, 13 nt, Homo sapiens
caauugaaguaaa

SEQ ID NO: 262360 - RNA, 12 nt, Homo sapiens
caauugucauug

SEQ ID NO: 262361 - RNA, 19 nt, Homo sapiens
caauugucauugauacaug

SEQ ID NO: 262362 - RNA, 21 nt, Homo sapiens
caauuuccggccaacaguuaa

SEQ ID NO: 262363 - RNA, 15 nt, Homo sapiens
cacaaauuaguugua

SEQ ID NO: 262364 - RNA, 12 nt, Homo sapiens
cacaaccaaaaa

SEQ ID NO: 262365 - RNA, 14 nt, Homo sapiens
cacaacccaaaagg

SEQ ID NO: 262366 - RNA, 20 nt, Homo sapiens
cacaauagcaguugaaacaa

SEQ ID NO: 262367 - RNA, 14 nt, Homo sapiens
cacaaucugaaaca

SEQ ID NO: 262368 - RNA, 21 nt, Homo sapiens
cacaaucugaaacagcuucau

SEQ ID NO: 262369 - RNA, 18 nt, Homo sapiens
cacaauguuaaguuauau

SEQ ID NO: 262370 - RNA, 18 nt, Homo sapiens
cacacaccuguagcacuu

SEQ ID NO: 262371 - RNA, 22 nt, Homo sapiens
cacacacuguucugaaagugac

SEQ ID NO: 262372 - RNA, 20 nt, Homo sapiens
cacacagaaaauauacugua

SEQ ID NO: 262373 - RNA, 20 nt, Homo sapiens
cacacaguauuacuucugcu

SEQ ID NO: 262374 - RNA, 12 nt, Homo sapiens
cacacaugcaua

SEQ ID NO: 262375 - RNA, 22 nt, Homo sapiens
cacacccagcccacuucugcca

SEQ ID NO: 262376 - RNA, 17 nt, Homo sapiens
cacaccccagacgaugu

SEQ ID NO: 262377 - RNA, 21 nt, Homo sapiens
cacacgucuggcuucacagau

SEQ ID NO: 262378 - RNA, 15 nt, Homo sapiens
cacacguuccacgac

SEQ ID NO: 262379 - RNA, 17 nt, Homo sapiens
cacacugagcugagggg

SEQ ID NO: 262380 - RNA, 19 nt, Homo sapiens
cacacuguucugaaaguga

SEQ ID NO: 262381 - RNA, 20 nt, Homo sapiens
cacagaaaauggaagacagc

SEQ ID NO: 262382 - RNA, 14 nt, Homo sapiens
cacagaagaugaag

SEQ ID NO: 262383 - RNA, 13 nt, Homo sapiens
cacagaagggugu

SEQ ID NO: 262384 - RNA, 17 nt, Homo sapiens
cacagaagguccuggug

SEQ ID NO: 262385 - RNA, 14 nt, Homo sapiens
cacagaaucuccau

SEQ ID NO: 262386 - RNA, 16 nt, Homo sapiens
cacagaggaucugcuu

SEQ ID NO: 262387 - RNA, 14 nt, Homo sapiens
cacagagugcauug

SEQ ID NO: 262388 - RNA, 23 nt, Homo sapiens
cacagagugcauugugaggguua

SEQ ID NO: 262389 - RNA, 12 nt, Homo sapiens
cacagagugccu

SEQ ID NO: 262390 - RNA, 14 nt, Homo sapiens
cacagaguuguuac

SEQ ID NO: 262391 - RNA, 23 nt, Homo sapiens
cacagauuguucuaaaguaaaau

SEQ ID NO: 262392 - RNA, 13 nt, Homo sapiens
cacagcacccaug

SEQ ID NO: 262393 - RNA, 19 nt, Homo sapiens
cacagcaucagcucaagac

SEQ ID NO: 262394 - RNA, 16 nt, Homo sapiens
cacagccaaccuagcu

SEQ ID NO: 262395 - RNA, 23 nt, Homo sapiens
cacagccaaccuagcuagcaaca

SEQ ID NO: 262396 - RNA, 17 nt, Homo sapiens
cacagccuccccugcca

SEQ ID NO: 262397 - RNA, 15 nt, Homo sapiens
cacagcuaacaugga

SEQ ID NO: 262398 - RNA, 23 nt, Homo sapiens
cacagcuaacauggaaguacuau

SEQ ID NO: 262399 - RNA, 21 nt, Homo sapiens
cacagcugcagagacagagag

SEQ ID NO: 262400 - RNA, 19 nt, Homo sapiens
cacagcugggguggggacc

SEQ ID NO: 262401 - RNA, 23 nt, Homo sapiens
cacagcugggguggggaccucag

SEQ ID NO: 262402 - RNA, 20 nt, Homo sapiens
cacagcuucauuuccugugu

SEQ ID NO: 262403 - RNA, 16 nt, Homo sapiens
cacaggcacugcagga

SEQ ID NO: 262404 - RNA, 15 nt, Homo sapiens
cacaggcagcauuua

SEQ ID NO: 262405 - RNA, 16 nt, Homo sapiens
cacaggcagcauuuag

SEQ ID NO: 262406 - RNA, 18 nt, Homo sapiens
cacaggcagguccagggu

SEQ ID NO: 262407 - RNA, 14 nt, Homo sapiens
cacaguacccggug

SEQ ID NO: 262408 - RNA, 22 nt, Homo sapiens
cacagugagucgaggacaggga

SEQ ID NO: 262409 - RNA, 19 nt, Homo sapiens
cacagugauuagccucguc

SEQ ID NO: 262410 - RNA, 15 nt, Homo sapiens
cacagugcaucucag

SEQ ID NO: 262411 - RNA, 23 nt, Homo sapiens
cacagugugaaucuuggugucua

SEQ ID NO: 262412 - RNA, 15 nt, Homo sapiens
cacaguucauugcag

SEQ ID NO: 262413 - RNA, 18 nt, Homo sapiens
cagcugcuugggcuucau

SEQ ID NO: 262414 - RNA, 21 nt, Homo sapiens
cagcugcuugggcuucauccu

SEQ ID NO: 262415 - RNA, 19 nt, Homo sapiens
cagcuggaagggucaacau

SEQ ID NO: 262416 - RNA, 15 nt, Homo sapiens
cagcuggaucuccau

SEQ ID NO: 262417 - RNA, 23 nt, Homo sapiens
cagcuggguuggaaaacaguauu

SEQ ID NO: 262418 - RNA, 13 nt, Homo sapiens
cagcuuauauuca

SEQ ID NO: 262419 - RNA, 13 nt, Homo sapiens
cagcuuaucucag

SEQ ID NO: 262420 - RNA, 22 nt, Homo sapiens
cagcuuaucucaggggugugcg

SEQ ID NO: 262421 - RNA, 19 nt, Homo sapiens
cagcuuguaaauagcucag

SEQ ID NO: 262422 - RNA, 20 nt, Homo sapiens
cagcuuuccucaucaggcca

SEQ ID NO: 262423 - RNA, 20 nt, Homo sapiens
caggaaagcuguuaggcuca

SEQ ID NO: 262424 - RNA, 17 nt, Homo sapiens
caggaaauccuugcacc

SEQ ID NO: 262425 - RNA, 15 nt, Homo sapiens
caggaaccucagggc

SEQ ID NO: 262426 - RNA, 23 nt, Homo sapiens
caggaaccucagggcugugugua

SEQ ID NO: 262427 - RNA, 15 nt, Homo sapiens
caggaacuugcacaa

SEQ ID NO: 262428 - RNA, 23 nt, Homo sapiens
caggaacuugcacaaaaucacac

SEQ ID NO: 262429 - RNA, 13 nt, Homo sapiens
caggaagcucagg

SEQ ID NO: 262430 - RNA, 13 nt, Homo sapiens
caggaagcuguga

SEQ ID NO: 262431 - RNA, 21 nt, Homo sapiens
caggacagaggauuugcucug

SEQ ID NO: 262432 - RNA, 17 nt, Homo sapiens
caggacggucugugccc

SEQ ID NO: 262433 - RNA, 13 nt, Homo sapiens
caggagucccugc

SEQ ID NO: 262434 - RNA, 18 nt, Homo sapiens
caggagucccugccauca

SEQ ID NO: 262435 - RNA, 18 nt, Homo sapiens
caggaguuggaagugugu

SEQ ID NO: 262436 - RNA, 17 nt, Homo sapiens
caggauuagacagucaa

SEQ ID NO: 262437 - RNA, 19 nt, Homo sapiens
caggauuauugucaaagaa

SEQ ID NO: 262438 - RNA, 13 nt, Homo sapiens
caggcaagcaccu

SEQ ID NO: 262439 - RNA, 16 nt, Homo sapiens
caggcaagcaccuccu

SEQ ID NO: 262440 - RNA, 17 nt, Homo sapiens
caggcacccaccaucau

SEQ ID NO: 262441 - RNA, 12 nt, Homo sapiens
caggcacugaga

SEQ ID NO: 262442 - RNA, 20 nt, Homo sapiens
caggcagaucccacuugcag

SEQ ID NO: 262443 - RNA, 22 nt, Homo sapiens
caggcagcauuuagcacauacu

SEQ ID NO: 262444 - RNA, 13 nt, Homo sapiens
caggcauugccaa

SEQ ID NO: 262445 - RNA, 16 nt, Homo sapiens
caggcauuuccugcuu

SEQ ID NO: 262446 - RNA, 13 nt, Homo sapiens
caggccagcugcu

SEQ ID NO: 262447 - RNA, 22 nt, Homo sapiens
caggcccuggccuccccugcca

SEQ ID NO: 262448 - RNA, 18 nt, Homo sapiens
caggcccuuccucuccac

SEQ ID NO: 262449 - RNA, 21 nt, Homo sapiens
caggcccuuccucuccacugc

SEQ ID NO: 262450 - RNA, 17 nt, Homo sapiens
caggccgcacaucucac

SEQ ID NO: 262451 - RNA, 21 nt, Homo sapiens
caggccgcacaucucacuuca

SEQ ID NO: 262452 - RNA, 18 nt, Homo sapiens
caggccuccccagcaccu

SEQ ID NO: 262453 - RNA, 20 nt, Homo sapiens
caggcgauccaccugucuca

SEQ ID NO: 262454 - RNA, 15 nt, Homo sapiens
caggcgugaccugcc

SEQ ID NO: 262455 - RNA, 18 nt, Homo sapiens
caggcgugaccugccagg

SEQ ID NO: 262456 - RNA, 14 nt, Homo sapiens
caggcucucaggcc

SEQ ID NO: 262457 - RNA, 16 nt, Homo sapiens
caggcucuccaggugg

SEQ ID NO: 262458 - RNA, 19 nt, Homo sapiens
caggcucuccaggugguca

SEQ ID NO: 262459 - RNA, 13 nt, Homo sapiens
caggcucuucucc

SEQ ID NO: 262460 - RNA, 17 nt, Homo sapiens
caggcuggagugcaaug

SEQ ID NO: 262461 - RNA, 20 nt, Homo sapiens
caggcuggagugcaaugaca

SEQ ID NO: 262462 - RNA, 18 nt, Homo sapiens
caggcuggucuugaacuc

SEQ ID NO: 262463 - RNA, 13 nt, Homo sapiens
caggcuucgucuc

SEQ ID NO: 262464 - RNA, 15 nt, Homo sapiens
caggcuucgucucag

SEQ ID NO: 262465 - RNA, 20 nt, Homo sapiens
cagggaaaucaggguuacaa

SEQ ID NO: 262466 - RNA, 14 nt, Homo sapiens
cagggaagcccuga

SEQ ID NO: 262467 - RNA, 20 nt, Homo sapiens
cagggaagcccugacugugu

SEQ ID NO: 262468 - RNA, 14 nt, Homo sapiens
cagggaaugaaggu

SEQ ID NO: 262469 - RNA, 11 nt, Homo sapiens
cagggacccac

SEQ ID NO: 262470 - RNA, 15 nt, Homo sapiens
cagggacccacuuca

SEQ ID NO: 262471 - RNA, 17 nt, Homo sapiens
cagggacccacuucaca

SEQ ID NO: 262472 - RNA, 12 nt, Homo sapiens
cagggacuugaa

SEQ ID NO: 262473 - RNA, 23 nt, Homo sapiens
cagggacuugaaguuguuacuaa

SEQ ID NO: 262474 - RNA, 14 nt, Homo sapiens
cagggaggugaccc

SEQ ID NO: 262475 - RNA, 18 nt, Homo sapiens
cagggagugggcuaagca

SEQ ID NO: 262476 - RNA, 15 nt, Homo sapiens
cagggauagcacuga

SEQ ID NO: 262477 - RNA, 20 nt, Homo sapiens
cagggauucuuccugcuuag

SEQ ID NO: 262478 - RNA, 13 nt, Homo sapiens
cagggccagucuu

SEQ ID NO: 262479 - RNA, 12 nt, Homo sapiens
cagggccagugc

SEQ ID NO: 262480 - RNA, 18 nt, Homo sapiens
cagggcucagccuggugg

SEQ ID NO: 262481 - RNA, 21 nt, Homo sapiens
cagggcucagccuggugggcc

SEQ ID NO: 262482 - RNA, 16 nt, Homo sapiens
cagggcuccugcacuu

SEQ ID NO: 262483 - RNA, 15 nt, Homo sapiens
cagggcuguguguac

SEQ ID NO: 262484 - RNA, 14 nt, Homo sapiens
caggggaggggugc

SEQ ID NO: 262485 - RNA, 16 nt, Homo sapiens
caggggaguaugcaaa

SEQ ID NO: 262486 - RNA, 18 nt, Homo sapiens
caggggaguguucagggc

SEQ ID NO: 262487 - RNA, 15 nt, Homo sapiens
caggggcaaaaguca

SEQ ID NO: 262488 - RNA, 16 nt, Homo sapiens
caggggcaaaagucau

SEQ ID NO: 262489 - RNA, 14 nt, Homo sapiens
caggggcaaagggc

SEQ ID NO: 262490 - RNA, 18 nt, Homo sapiens
caggggccggccaguggc

SEQ ID NO: 262491 - RNA, 14 nt, Homo sapiens
cagggucauagcau

SEQ ID NO: 262492 - RNA, 18 nt, Homo sapiens
cagggucccucuguguau

SEQ ID NO: 262493 - RNA, 12 nt, Homo sapiens
cagggucucacu

SEQ ID NO: 262494 - RNA, 20 nt, Homo sapiens
cagggucucacuauguugcc

SEQ ID NO: 262495 - RNA, 21 nt, Homo sapiens
cagggucucacuauguugccc

SEQ ID NO: 262496 - RNA, 21 nt, Homo sapiens
cagggucucacucugucgccc

SEQ ID NO: 262497 - RNA, 21 nt, Homo sapiens
cagggucucacucuguugacc

SEQ ID NO: 262498 - RNA, 20 nt, Homo sapiens
cagggucucacuguguugcc

SEQ ID NO: 262499 - RNA, 15 nt, Homo sapiens
cagggugagcacucu

SEQ ID NO: 262500 - RNA, 21 nt, Homo sapiens
caggguuacaaaucuucuuga

SEQ ID NO: 262501 - RNA, 20 nt, Homo sapiens
caggguuucaccauguuggc

SEQ ID NO: 262502 - RNA, 20 nt, Homo sapiens
caggguuuugccauguuggc

SEQ ID NO: 262503 - RNA, 13 nt, Homo sapiens
cagguaaggugag

SEQ ID NO: 262504 - RNA, 17 nt, Homo sapiens
cagguaaggugagggaa

SEQ ID NO: 262505 - RNA, 21 nt, Homo sapiens
caggugauccacccaccucag

SEQ ID NO: 262506 - RNA, 19 nt, Homo sapiens
caggugcaacagacuugaa

SEQ ID NO: 262507 - RNA, 15 nt, Homo sapiens
caggugcugccaucc

SEQ ID NO: 262508 - RNA, 19 nt, Homo sapiens
caggugugaaccaccacac

SEQ ID NO: 262509 - RNA, 14 nt, Homo sapiens
caggugugagucac

SEQ ID NO: 262510 - RNA, 21 nt, Homo sapiens
cagguguucuucauuaccuca

SEQ ID NO: 262511 - RNA, 24 nt, Homo sapiens
cacugcuuaacuucacauauugau

SEQ ID NO: 262512 - RNA, 23 nt, Homo sapiens
cacugcuugaggaaaacaagcau

SEQ ID NO: 262513 - RNA, 14 nt, Homo sapiens
cacugggcuucuag

SEQ ID NO: 262514 - RNA, 22 nt, Homo sapiens
cacugggcuucuagaaccaggc

SEQ ID NO: 262515 - RNA, 19 nt, Homo sapiens
cacugguuuguucccugug

SEQ ID NO: 262516 - RNA, 22 nt, Homo sapiens
cacugucauaaucucuuuccau

SEQ ID NO: 262517 - RNA, 22 nt, Homo sapiens
cacugugcugagucugaaggcu

SEQ ID NO: 262518 - RNA, 19 nt, Homo sapiens
cacuguguuuuuuuguaua

SEQ ID NO: 262519 - RNA, 14 nt, Homo sapiens
cacuguugcccagg

SEQ ID NO: 262520 - RNA, 17 nt, Homo sapiens
cacuguugcccaggcug

SEQ ID NO: 262521 - RNA, 22 nt, Homo sapiens
cacuuagguccaaggucuccag

SEQ ID NO: 262522 - RNA, 13 nt, Homo sapiens
cacuucauucccc

SEQ ID NO: 262523 - RNA, 16 nt, Homo sapiens
cacuucccuacaugga

SEQ ID NO: 262524 - RNA, 12 nt, Homo sapiens
cacuucucucag

SEQ ID NO: 262525 - RNA, 14 nt, Homo sapiens
cacuucucucagga

SEQ ID NO: 262526 - RNA, 21 nt, Homo sapiens
cacuucuuguuccccacugac

SEQ ID NO: 262527 - RNA, 13 nt, Homo sapiens
cacuugacaucaa

SEQ ID NO: 262528 - RNA, 21 nt, Homo sapiens
cacuugcagacucuacagagg

SEQ ID NO: 262529 - RNA, 14 nt, Homo sapiens
cacuugcagccucc

SEQ ID NO: 262530 - RNA, 20 nt, Homo sapiens
cacuugccccuguuaccuaa

SEQ ID NO: 262531 - RNA, 18 nt, Homo sapiens
cacuugggagcaaaagau

SEQ ID NO: 262532 - RNA, 14 nt, Homo sapiens
cacuuggucuguga

SEQ ID NO: 262533 - RNA, 21 nt, Homo sapiens
cacuugugcaguguugacagu

SEQ ID NO: 262534 - RNA, 17 nt, Homo sapiens
cacuuuauuucucucau

SEQ ID NO: 262535 - RNA, 13 nt, Homo sapiens
cacuuucugccag

SEQ ID NO: 262536 - RNA, 17 nt, Homo sapiens
cacuuuuccccaauuca

SEQ ID NO: 262537 - RNA, 22 nt, Homo sapiens
cagaaaaaaaaaaaaaagccuu

SEQ ID NO: 262538 - RNA, 23 nt, Homo sapiens
cagaaaaaaaaaaaaaagccuuu

SEQ ID NO: 262539 - RNA, 14 nt, Homo sapiens
cagaaaaacugugg

SEQ ID NO: 262540 - RNA, 17 nt, Homo sapiens
cagaaaaacugugggua

SEQ ID NO: 262541 - RNA, 13 nt, Homo sapiens
cagaaaaagaagg

SEQ ID NO: 262542 - RNA, 18 nt, Homo sapiens
cagaaaagcccaaguuca

SEQ ID NO: 262543 - RNA, 19 nt, Homo sapiens
cagaaagaccgugugugaa

SEQ ID NO: 262544 - RNA, 16 nt, Homo sapiens
cagaaagcucaucuca

SEQ ID NO: 262545 - RNA, 19 nt, Homo sapiens
cagaaaugccuuacccuca

SEQ ID NO: 262546 - RNA, 22 nt, Homo sapiens
cagaaauguuaguaacaagaaa

SEQ ID NO: 262547 - RNA, 15 nt, Homo sapiens
cagaaauuaaaugaa

SEQ ID NO: 262548 - RNA, 14 nt, Homo sapiens
cagaacucuuucaa

SEQ ID NO: 262549 - RNA, 20 nt, Homo sapiens
cagaacuuaaggauggagcc

SEQ ID NO: 262550 - RNA, 15 nt, Homo sapiens
cagaagaaacuaccc

SEQ ID NO: 262551 - RNA, 23 nt, Homo sapiens
cagaagaugugaugaauuauccu

SEQ ID NO: 262552 - RNA, 19 nt, Homo sapiens
cagaaggaaaaauguguaa

SEQ ID NO: 262553 - RNA, 20 nt, Homo sapiens
cagaaggaagacuucauccc

SEQ ID NO: 262554 - RNA, 18 nt, Homo sapiens
cagaaggcuacauauaca

SEQ ID NO: 262555 - RNA, 20 nt, Homo sapiens
cagaaggcuacauauacaua

SEQ ID NO: 262556 - RNA, 16 nt, Homo sapiens
cagaaguuugagauca

SEQ ID NO: 262557 - RNA, 17 nt, Homo sapiens
cagaaucaaaugcaauu

SEQ ID NO: 262558 - RNA, 13 nt, Homo sapiens
caguguacagucu

SEQ ID NO: 262559 - RNA, 14 nt, Homo sapiens
caguguacagucuu

SEQ ID NO: 262560 - RNA, 13 nt, Homo sapiens
caguguacaugga

SEQ ID NO: 262561 - RNA, 14 nt, Homo sapiens
caguguacauggaa

SEQ ID NO: 262562 - RNA, 12 nt, Homo sapiens
cagugugacaag

SEQ ID NO: 262563 - RNA, 12 nt, Homo sapiens
caguguguuucu

SEQ ID NO: 262564 - RNA, 19 nt, Homo sapiens
caguguguuucugaucuga

SEQ ID NO: 262565 - RNA, 12 nt, Homo sapiens
caguguuuccaa

SEQ ID NO: 262566 - RNA, 22 nt, Homo sapiens
caguguuuuaggagcaugagug

SEQ ID NO: 262567 - RNA, 20 nt, Homo sapiens
caguuaagagaaaugagcuu

SEQ ID NO: 262568 - RNA, 20 nt, Homo sapiens
caguuauuuuuaaacuguaa

SEQ ID NO: 262569 - RNA, 14 nt, Homo sapiens
caguuccuucacuu

SEQ ID NO: 262570 - RNA, 23 nt, Homo sapiens
caguuggcuaagaagugacucuu

SEQ ID NO: 262571 - RNA, 16 nt, Homo sapiens
caguuguggccucauu

SEQ ID NO: 262572 - RNA, 22 nt, Homo sapiens
caguuguugauaaccacuaaga

SEQ ID NO: 262573 - RNA, 22 nt, Homo sapiens
caguuuaucuguucauauggau

SEQ ID NO: 262574 - RNA, 16 nt, Homo sapiens
caguuucuuucaaaga

SEQ ID NO: 262575 - RNA, 21 nt, Homo sapiens
caguuugauuguuguuuauaa

SEQ ID NO: 262576 - RNA, 19 nt, Homo sapiens
caguuuucaggaugagaug

SEQ ID NO: 262577 - RNA, 23 nt, Homo sapiens
cauaaauuuaugguucucaggcc

SEQ ID NO: 262578 - RNA, 13 nt, Homo sapiens
cauaacaauuccu

SEQ ID NO: 262579 - RNA, 14 nt, Homo sapiens
cauaaccugucuca

SEQ ID NO: 262580 - RNA, 16 nt, Homo sapiens
cauaagaaaacuaaga

SEQ ID NO: 262581 - RNA, 17 nt, Homo sapiens
cauaagauaaaugugcu

SEQ ID NO: 262582 - RNA, 15 nt, Homo sapiens
cauaagcuacugaug

SEQ ID NO: 262583 - RNA, 18 nt, Homo sapiens
cauaagugcaugacauau

SEQ ID NO: 262584 - RNA, 15 nt, Homo sapiens
cauaaucacugacca

SEQ ID NO: 262585 - RNA, 23 nt, Homo sapiens
cauaaucucuuuccaucuuacuu

SEQ ID NO: 262586 - RNA, 15 nt, Homo sapiens
cauaaugacagagag

SEQ ID NO: 262587 - RNA, 18 nt, Homo sapiens
cauaauguuacauuauua

SEQ ID NO: 262588 - RNA, 16 nt, Homo sapiens
cauaauuguucuuagu

SEQ ID NO: 262589 - RNA, 18 nt, Homo sapiens
cauaauuucuucacucaa

SEQ ID NO: 262590 - RNA, 22 nt, Homo sapiens
cauaauuuguacauauguaaaa

SEQ ID NO: 262591 - RNA, 14 nt, Homo sapiens
cauacaaguuucau

SEQ ID NO: 262592 - RNA, 13 nt, Homo sapiens
cauacaauuccaa

SEQ ID NO: 262593 - RNA, 22 nt, Homo sapiens
cauacacacacacgcgugcaca

SEQ ID NO: 262594 - RNA, 14 nt, Homo sapiens
cauacacagccugg

SEQ ID NO: 262595 - RNA, 22 nt, Homo sapiens
cauaccaaugaaaaaauguaua

SEQ ID NO: 262596 - RNA, 13 nt, Homo sapiens
cauaccaugugcc

SEQ ID NO: 262597 - RNA, 15 nt, Homo sapiens
cauacccuguuacca

SEQ ID NO: 262598 - RNA, 21 nt, Homo sapiens
cauaccuggcccugugccuug

SEQ ID NO: 262599 - RNA, 22 nt, Homo sapiens
cauaccuggcccugugccuugg

SEQ ID NO: 262600 - RNA, 22 nt, Homo sapiens
cauacgguaugauauugcagcu

SEQ ID NO: 262601 - RNA, 16 nt, Homo sapiens
cauacuacacauucaa

SEQ ID NO: 262602 - RNA, 17 nt, Homo sapiens
cauacuagaguucaugg

SEQ ID NO: 262603 - RNA, 15 nt, Homo sapiens
cauacuuucucuuca

SEQ ID NO: 262604 - RNA, 22 nt, Homo sapiens
cauacuuucucuucaaauuuag

SEQ ID NO: 262605 - RNA, 20 nt, Homo sapiens
cauacuuuuucuuugaauuu

SEQ ID NO: 262606 - RNA, 22 nt, Homo sapiens
cauagaggugagggaagccuga

SEQ ID NO: 262607 - RNA, 17 nt, Homo sapiens
cauagaguucagacuuu

SEQ ID NO: 262608 - RNA, 17 nt, Homo sapiens
cauagcaagauugcuua

SEQ ID NO: 262609 - RNA, 15 nt, Homo sapiens
cauaggucuccaaga

SEQ ID NO: 262610 - RNA, 22 nt, Homo sapiens
cauagugaccaacauagugaaa

SEQ ID NO: 262611 - RNA, 23 nt, Homo sapiens
cauauauuugaaguggagccaua

SEQ ID NO: 262612 - RNA, 15 nt, Homo sapiens
cauauauuuguauga

SEQ ID NO: 262613 - RNA, 23 nt, Homo sapiens
cauauauuuuuauauuuacuaaa

SEQ ID NO: 262614 - RNA, 14 nt, Homo sapiens
cauauccaacaugu

SEQ ID NO: 262615 - RNA, 18 nt, Homo sapiens
cauauccaacaugugcuc

SEQ ID NO: 262616 - RNA, 16 nt, Homo sapiens
cauauuaccacagaca

SEQ ID NO: 262617 - RNA, 21 nt, Homo sapiens
cauauucaggaagcucagggc

SEQ ID NO: 262618 - RNA, 16 nt, Homo sapiens
cauauucuguuggcca

SEQ ID NO: 262619 - RNA, 18 nt, Homo sapiens
cauauugaugugugucua

SEQ ID NO: 262620 - RNA, 13 nt, Homo sapiens
cauauuuacuucu

SEQ ID NO: 262621 - RNA, 20 nt, Homo sapiens
cauauuucuuuucuaucuca

SEQ ID NO: 262622 - RNA, 19 nt, Homo sapiens
cauauuuuauuauagucac

SEQ ID NO: 262623 - RNA, 15 nt, Homo sapiens
caucaaaguggcaaa

SEQ ID NO: 262624 - RNA, 16 nt, Homo sapiens
caucaacuccagucuc

SEQ ID NO: 262625 - RNA, 22 nt, Homo sapiens
caucaagaugagagaacuggag

SEQ ID NO: 262626 - RNA, 14 nt, Homo sapiens
caucaagaugugac

SEQ ID NO: 262627 - RNA, 21 nt, Homo sapiens
caucaauaaaauagugacaua

SEQ ID NO: 262628 - RNA, 23 nt, Homo sapiens
caucaaucuaaagauacaguguc

SEQ ID NO: 262629 - RNA, 13 nt, Homo sapiens
caucacaguuuug

SEQ ID NO: 262630 - RNA, 16 nt, Homo sapiens
caucacguuagcuguc

SEQ ID NO: 262631 - RNA, 17 nt, Homo sapiens
caucacugcuccuguca

SEQ ID NO: 262632 - RNA, 12 nt, Homo sapiens
caucacuuugac

SEQ ID NO: 262633 - RNA, 21 nt, Homo sapiens
caucagacuccugugcaacuu

SEQ ID NO: 262634 - RNA, 18 nt, Homo sapiens
caucaguauugaagcauu

SEQ ID NO: 262635 - RNA, 17 nt, Homo sapiens
caucagugcucccucac

SEQ ID NO: 262636 - RNA, 13 nt, Homo sapiens
caucauaguacag

SEQ ID NO: 262637 - RNA, 20 nt, Homo sapiens
caucauccuaagcuauucag

SEQ ID NO: 262638 - RNA, 17 nt, Homo sapiens
caucaucuccugccuuc

SEQ ID NO: 262639 - RNA, 14 nt, Homo sapiens
caucaugucuggcu

SEQ ID NO: 262640 - RNA, 13 nt, Homo sapiens
caucauuccuuga

SEQ ID NO: 262641 - RNA, 17 nt, Homo sapiens
caucauucucugucuca

SEQ ID NO: 262642 - RNA, 14 nt, Homo sapiens
caucauuucaaucg

SEQ ID NO: 262643 - RNA, 13 nt, Homo sapiens
caucauuuccauu

SEQ ID NO: 262644 - RNA, 19 nt, Homo sapiens
cauccaacauuaaaagcca

SEQ ID NO: 262645 - RNA, 14 nt, Homo sapiens
cauccaagcuuccu

SEQ ID NO: 262646 - RNA, 14 nt, Homo sapiens
cauccacacccucu

SEQ ID NO: 262647 - RNA, 22 nt, Homo sapiens
cauccacacccucuccuuguca

SEQ ID NO: 262648 - RNA, 16 nt, Homo sapiens
cauccacugugccaug

SEQ ID NO: 262649 - RNA, 16 nt, Homo sapiens
cauccagguucagcuu

SEQ ID NO: 262650 - RNA, 16 nt, Homo sapiens
cauccaucaucaugug

SEQ ID NO: 262651 - RNA, 21 nt, Homo sapiens
cauccauuuauuuggcaucug

SEQ ID NO: 262652 - RNA, 14 nt, Homo sapiens
caucccagcacugc

SEQ ID NO: 262653 - RNA, 18 nt, Homo sapiens
caucccgucgacguagaa

SEQ ID NO: 262654 - RNA, 21 nt, Homo sapiens
caucccucuggggcuguucac

SEQ ID NO: 262655 - RNA, 14 nt, Homo sapiens
caucccugaaggcc

SEQ ID NO: 262656 - RNA, 21 nt, Homo sapiens
cauccuagagaaaacuugaau

SEQ ID NO: 262657 - RNA, 18 nt, Homo sapiens
cauccuccagauagugua

SEQ ID NO: 262658 - RNA, 17 nt, Homo sapiens
cauccugaccuugcaca

SEQ ID NO: 262659 - RNA, 18 nt, Homo sapiens
cauccugaggcuccacuu

SEQ ID NO: 262660 - RNA, 16 nt, Homo sapiens
caucuauauauauaug

SEQ ID NO: 262661 - RNA, 13 nt, Homo sapiens
caucuaugugaga

SEQ ID NO: 262662 - RNA, 16 nt, Homo sapiens
caucuccauugcauuc

SEQ ID NO: 262663 - RNA, 18 nt, Homo sapiens
caucuccauugcauucau

SEQ ID NO: 262664 - RNA, 13 nt, Homo sapiens
caucucuacaaaa

SEQ ID NO: 262665 - RNA, 20 nt, Homo sapiens
cagccugggugacagagcaa

SEQ ID NO: 262666 - RNA, 16 nt, Homo sapiens
cagcgagcccuggugg

SEQ ID NO: 262667 - RNA, 18 nt, Homo sapiens
cagcgccagugacaguca

SEQ ID NO: 262668 - RNA, 12 nt, Homo sapiens
cagcuaacaugg

SEQ ID NO: 262669 - RNA, 14 nt, Homo sapiens
cagcuaaugggaca

SEQ ID NO: 262670 - RNA, 17 nt, Homo sapiens
cagcuacgugugccccu

SEQ ID NO: 262671 - RNA, 18 nt, Homo sapiens
cagcuagcaaaauuacua

SEQ ID NO: 262672 - RNA, 21 nt, Homo sapiens
cagcuagcaaaauuacuacca

SEQ ID NO: 262673 - RNA, 14 nt, Homo sapiens
cagcucacacauga

SEQ ID NO: 262674 - RNA, 13 nt, Homo sapiens
cagcuccuggacc

SEQ ID NO: 262675 - RNA, 15 nt, Homo sapiens
cagcuccuucugucc

SEQ ID NO: 262676 - RNA, 11 nt, Homo sapiens
cagcucugcaa

SEQ ID NO: 262677 - RNA, 21 nt, Homo sapiens
cagcucugcauuaucugaggu

SEQ ID NO: 262678 - RNA, 17 nt, Homo sapiens
cagcucuguccugggag

SEQ ID NO: 262679 - RNA, 24 nt, Homo sapiens
cagcugacuuuucuguccgagcuu

SEQ ID NO: 262680 - RNA, 19 nt, Homo sapiens
cagcugcagccacuuucug

SEQ ID NO: 262681 - RNA, 19 nt, Homo sapiens
cagcugcgguccacccagg

SEQ ID NO: 262682 - RNA, 21 nt, Homo sapiens
cagcuggaagggucaacaucu

SEQ ID NO: 262683 - RNA, 12 nt, Homo sapiens
cagcugggacac

SEQ ID NO: 262684 - RNA, 16 nt, Homo sapiens
cagcuguccugcagca

SEQ ID NO: 262685 - RNA, 20 nt, Homo sapiens
cagcuguggcagaguuacag

SEQ ID NO: 262686 - RNA, 16 nt, Homo sapiens
cagcuguuagagucca

SEQ ID NO: 262687 - RNA, 13 nt, Homo sapiens
cagcuguuuaugc

SEQ ID NO: 262688 - RNA, 20 nt, Homo sapiens
cagcuguuuaugcauagaua

SEQ ID NO: 262689 - RNA, 17 nt, Homo sapiens
cagcuuauauucaucca

SEQ ID NO: 262690 - RNA, 14 nt, Homo sapiens
cagcuuccaaacau

SEQ ID NO: 262691 - RNA, 13 nt, Homo sapiens
cagcuucgucuca

SEQ ID NO: 262692 - RNA, 22 nt, Homo sapiens
cagcuuguaaauagcucaggug

SEQ ID NO: 262693 - RNA, 23 nt, Homo sapiens
cagcuuuguuuguugucagcuga

SEQ ID NO: 262694 - RNA, 17 nt, Homo sapiens
caggaaaggcuccagga

SEQ ID NO: 262695 - RNA, 18 nt, Homo sapiens
caggaaauaacccacaaa

SEQ ID NO: 262696 - RNA, 14 nt, Homo sapiens
caggaacuugcaca

SEQ ID NO: 262697 - RNA, 21 nt, Homo sapiens
caggaagcaggggguccccau

SEQ ID NO: 262698 - RNA, 21 nt, Homo sapiens
caggaagccagcaggcucuca

SEQ ID NO: 262699 - RNA, 20 nt, Homo sapiens
caggaagcugugagagcagu

SEQ ID NO: 262700 - RNA, 15 nt, Homo sapiens
caggaagguagaaau

SEQ ID NO: 262701 - RNA, 13 nt, Homo sapiens
caggaaguacugg

SEQ ID NO: 262702 - RNA, 14 nt, Homo sapiens
caggaaguacugga

SEQ ID NO: 262703 - RNA, 18 nt, Homo sapiens
caugcuauccaaucucau

SEQ ID NO: 262704 - RNA, 15 nt, Homo sapiens
caugcucauguguac

SEQ ID NO: 262705 - RNA, 13 nt, Homo sapiens
cauggaaguacua

SEQ ID NO: 262706 - RNA, 19 nt, Homo sapiens
cauggacaaggaugaucua

SEQ ID NO: 262707 - RNA, 14 nt, Homo sapiens
cauggacuuuauaa

SEQ ID NO: 262708 - RNA, 16 nt, Homo sapiens
cauggagcaugggacu

SEQ ID NO: 262709 - RNA, 21 nt, Homo sapiens
cauggccagguggccacucca

SEQ ID NO: 262710 - RNA, 17 nt, Homo sapiens
cauggcuuggcauuuuc

SEQ ID NO: 262711 - RNA, 21 nt, Homo sapiens
caugggaaugaaugucagugu

SEQ ID NO: 262712 - RNA, 19 nt, Homo sapiens
caugggagacacugaugua

SEQ ID NO: 262713 - RNA, 17 nt, Homo sapiens
caugggauaaaugccau

SEQ ID NO: 262714 - RNA, 16 nt, Homo sapiens
cauggggcugauugua

SEQ ID NO: 262715 - RNA, 19 nt, Homo sapiens
cauggguggcacucagucu

SEQ ID NO: 262716 - RNA, 15 nt, Homo sapiens
caugguccugugccc

SEQ ID NO: 262717 - RNA, 12 nt, Homo sapiens
cauggugaaggu

SEQ ID NO: 262718 - RNA, 16 nt, Homo sapiens
cauguaaacugugcac

SEQ ID NO: 262719 - RNA, 20 nt, Homo sapiens
cauguaccuuguguacuuuc

SEQ ID NO: 262720 - RNA, 17 nt, Homo sapiens
cauguacuuucccugug

SEQ ID NO: 262721 - RNA, 16 nt, Homo sapiens
cauguauuuguuugca

SEQ ID NO: 262722 - RNA, 14 nt, Homo sapiens
cauguccaagaagc

SEQ ID NO: 262723 - RNA, 22 nt, Homo sapiens
cauguccuaaugcuugcugcug

SEQ ID NO: 262724 - RNA, 20 nt, Homo sapiens
caugucuuuccuauuugcac

SEQ ID NO: 262725 - RNA, 22 nt, Homo sapiens
caugucuuuccuauuugcacac

SEQ ID NO: 262726 - RNA, 19 nt, Homo sapiens
cauguggugggacagggac

SEQ ID NO: 262727 - RNA, 16 nt, Homo sapiens
cauguguguucaugca

SEQ ID NO: 262728 - RNA, 22 nt, Homo sapiens
cauguguguucaugcacacuug

SEQ ID NO: 262729 - RNA, 21 nt, Homo sapiens
cauguuaggaaaauuucacau

SEQ ID NO: 262730 - RNA, 16 nt, Homo sapiens
cauguucagucacaug

SEQ ID NO: 262731 - RNA, 17 nt, Homo sapiens
cauguucagucacaugu

SEQ ID NO: 262732 - RNA, 17 nt, Homo sapiens
cauguugcccagaauuu

SEQ ID NO: 262733 - RNA, 22 nt, Homo sapiens
cauguuggccaggcuggucuca

SEQ ID NO: 262734 - RNA, 24 nt, Homo sapiens
cauguuggccaggcuggucucaaa

SEQ ID NO: 262735 - RNA, 12 nt, Homo sapiens
cauguugucaau

SEQ ID NO: 262736 - RNA, 17 nt, Homo sapiens
cauguuuuucuucuccc

SEQ ID NO: 262737 - RNA, 22 nt, Homo sapiens
cauuaaaugacucuucccucaa

SEQ ID NO: 262738 - RNA, 20 nt, Homo sapiens
cauuaauaauaaauucccug

SEQ ID NO: 262739 - RNA, 16 nt, Homo sapiens
cauuaauauuugcuga

SEQ ID NO: 262740 - RNA, 13 nt, Homo sapiens
cauuaaugcaaug

SEQ ID NO: 262741 - RNA, 18 nt, Homo sapiens
cauuacaauugcaguuuu

SEQ ID NO: 262742 - RNA, 19 nt, Homo sapiens
cauuaccgcguuguaaaau

SEQ ID NO: 262743 - RNA, 16 nt, Homo sapiens
cauuaccuugugcuaa

SEQ ID NO: 262744 - RNA, 15 nt, Homo sapiens
cauuauauagcagua

SEQ ID NO: 262745 - RNA, 13 nt, Homo sapiens
cauuaucuaugau

SEQ ID NO: 262746 - RNA, 18 nt, Homo sapiens
cauuauuucucucugacc

SEQ ID NO: 262747 - RNA, 18 nt, Homo sapiens
cauucacagcuacgugug

SEQ ID NO: 262748 - RNA, 23 nt, Homo sapiens
cauucccauguugucaauaacag

SEQ ID NO: 262749 - RNA, 21 nt, Homo sapiens
cauucccguggaacguuuuuc

SEQ ID NO: 262750 - RNA, 18 nt, Homo sapiens
cauuccuguucccaugag

SEQ ID NO: 262751 - RNA, 19 nt, Homo sapiens
cauuccuguucccaugaga

SEQ ID NO: 262752 - RNA, 20 nt, Homo sapiens
cauuccuguucccaugagau

SEQ ID NO: 262753 - RNA, 15 nt, Homo sapiens
cauucgaguguuuca

SEQ ID NO: 262754 - RNA, 13 nt, Homo sapiens
cauucuagguagg

SEQ ID NO: 262755 - RNA, 17 nt, Homo sapiens
cauucuccuuguguuac

SEQ ID NO: 262756 - RNA, 14 nt, Homo sapiens
cauucugacaucuu

SEQ ID NO: 262757 - RNA, 15 nt, Homo sapiens
cauucugcacucaga

SEQ ID NO: 262758 - RNA, 23 nt, Homo sapiens
cauucugcacucagaaaauggca

SEQ ID NO: 262759 - RNA, 17 nt, Homo sapiens
cauucugccugcccagg

SEQ ID NO: 262760 - RNA, 21 nt, Homo sapiens
cauucuucccuaaucuuccac

SEQ ID NO: 262761 - RNA, 13 nt, Homo sapiens
cauucuuggccca

SEQ ID NO: 262762 - RNA, 19 nt, Homo sapiens
cauucuuuuaaaagacaag

SEQ ID NO: 262763 - RNA, 20 nt, Homo sapiens
cauucuuuuugaaaugucaa

SEQ ID NO: 262764 - RNA, 14 nt, Homo sapiens
cauugauacaugca

SEQ ID NO: 262765 - RNA, 19 nt, Homo sapiens
cauugcaauagaaauccaa

SEQ ID NO: 262766 - RNA, 11 nt, Homo sapiens
cauugcugaga

SEQ ID NO: 262767 - RNA, 12 nt, Homo sapiens
cauugucccuga

SEQ ID NO: 262768 - RNA, 15 nt, Homo sapiens
cauugugaggguuaa

SEQ ID NO: 262769 - RNA, 16 nt, Homo sapiens
cauuguuaugcacuuu

SEQ ID NO: 262770 - RNA, 20 nt, Homo sapiens
cauuguucuugugaacccaa

SEQ ID NO: 262771 - RNA, 19 nt, Homo sapiens
cauuguuucguaacacagc

SEQ ID NO: 262772 - RNA, 22 nt, Homo sapiens
cauuuaauaauuauaugcuauu

SEQ ID NO: 262773 - RNA, 13 nt, Homo sapiens
cauuuacauugcc

SEQ ID NO: 262774 - RNA, 22 nt, Homo sapiens
cauuuagaaaauguucaccuag

SEQ ID NO: 262775 - RNA, 13 nt, Homo sapiens
cauuuauagcaua

SEQ ID NO: 262776 - RNA, 15 nt, Homo sapiens
cauuuauucugcuca

SEQ ID NO: 262777 - RNA, 13 nt, Homo sapiens
cauuucaaaggga

SEQ ID NO: 262778 - RNA, 20 nt, Homo sapiens
cauuucacgggcaacacuca

SEQ ID NO: 262779 - RNA, 17 nt, Homo sapiens
cauuuccaugcauaaau

SEQ ID NO: 262780 - RNA, 16 nt, Homo sapiens
cauuucugagaucaaa

SEQ ID NO: 262781 - RNA, 20 nt, Homo sapiens
cauuucugagaucaaaacgg

SEQ ID NO: 262782 - RNA, 13 nt, Homo sapiens
cauuucuuugaau

SEQ ID NO: 262783 - RNA, 15 nt, Homo sapiens
cauuucuuugaauuu

SEQ ID NO: 262784 - RNA, 16 nt, Homo sapiens
cauuucuuugaauuua

SEQ ID NO: 262785 - RNA, 16 nt, Homo sapiens
cauuugaaaucuauga

SEQ ID NO: 262786 - RNA, 23 nt, Homo sapiens
cauuugaaaucuaugaaauauca

SEQ ID NO: 262787 - RNA, 13 nt, Homo sapiens
cauuugcaccuac

SEQ ID NO: 262788 - RNA, 14 nt, Homo sapiens
cauuugcuuugucc

SEQ ID NO: 262789 - RNA, 18 nt, Homo sapiens
cauuuguuuuagucugaa

SEQ ID NO: 262790 - RNA, 13 nt, Homo sapiens
cauuuguuuucac

SEQ ID NO: 262791 - RNA, 23 nt, Homo sapiens
cauuuguuuugccaauuugcaca

SEQ ID NO: 262792 - RNA, 14 nt, Homo sapiens
cauuuucaccccac

SEQ ID NO: 262793 - RNA, 20 nt, Homo sapiens
cauuuucccccacuacugca

SEQ ID NO: 262794 - RNA, 16 nt, Homo sapiens
cauuuucugcauuuaa

SEQ ID NO: 262795 - RNA, 22 nt, Homo sapiens
cauuuuggauucuuauggacaa

SEQ ID NO: 262796 - RNA, 21 nt, Homo sapiens
cauuuuuaguagagacagggu

SEQ ID NO: 262797 - RNA, 15 nt, Homo sapiens
cauuuuuuaaaugca

SEQ ID NO: 262798 - RNA, 20 nt, Homo sapiens
ccaaaaaaugcuugcuucaa

SEQ ID NO: 262799 - RNA, 16 nt, Homo sapiens
ccaaaaauuacuuugg

SEQ ID NO: 262800 - RNA, 18 nt, Homo sapiens
ccaaaacaaacaaacaga

SEQ ID NO: 262801 - RNA, 20 nt, Homo sapiens
ccaaaauaagaugaaucacu

SEQ ID NO: 262802 - RNA, 14 nt, Homo sapiens
ccaaacucaccugc

SEQ ID NO: 262803 - RNA, 15 nt, Homo sapiens
ccaaacucaccugcc

SEQ ID NO: 262804 - RNA, 18 nt, Homo sapiens
ccaaagaaacauugccuu

SEQ ID NO: 262805 - RNA, 14 nt, Homo sapiens
ccaaaggaagcaca

SEQ ID NO: 262806 - RNA, 17 nt, Homo sapiens
ccaaaggaagcacaugc

SEQ ID NO: 262807 - RNA, 18 nt, Homo sapiens
ccaaaggaagcacaugcc

SEQ ID NO: 262808 - RNA, 20 nt, Homo sapiens
ccaaaggaaggcacccuuga

SEQ ID NO: 262809 - RNA, 17 nt, Homo sapiens
ccaaagugcugggauua

SEQ ID NO: 262810 - RNA, 17 nt, Homo sapiens
ccaaauauuccagagac

SEQ ID NO: 262811 - RNA, 14 nt, Homo sapiens
ccaaauuauggcaa

SEQ ID NO: 262812 - RNA, 19 nt, Homo sapiens
ccaacaagugcucuuucca

SEQ ID NO: 262813 - RNA, 14 nt, Homo sapiens
ccaacaugugcuca

SEQ ID NO: 262814 - RNA, 18 nt, Homo sapiens
ccaacaugugcucaggga

SEQ ID NO: 262815 - RNA, 22 nt, Homo sapiens
ccaacccgucuggcccaccagg

SEQ ID NO: 262816 - RNA, 18 nt, Homo sapiens
ccaacgucugugccauuu

SEQ ID NO: 262817 - RNA, 21 nt, Homo sapiens
ccaacguggggcagcacagag

SEQ ID NO: 262818 - RNA, 13 nt, Homo sapiens
ccaacuuuugcau

SEQ ID NO: 262819 - RNA, 15 nt, Homo sapiens
ccaagaccacccucc

SEQ ID NO: 262820 - RNA, 16 nt, Homo sapiens
cauaaaaguuggcuca

SEQ ID NO: 262821 - RNA, 20 nt, Homo sapiens
cauaaaaguuggcucaggag

SEQ ID NO: 262822 - RNA, 18 nt, Homo sapiens
cauaaaauaggugcauug

SEQ ID NO: 262823 - RNA, 14 nt, Homo sapiens
cauaaaauguuaag

SEQ ID NO: 262824 - RNA, 16 nt, Homo sapiens
cauaaaguaugugcau

SEQ ID NO: 262825 - RNA, 17 nt, Homo sapiens
cauaaaguaugugcaua

SEQ ID NO: 262826 - RNA, 14 nt, Homo sapiens
cauaaaucugugaa

SEQ ID NO: 262827 - RNA, 16 nt, Homo sapiens
cauaacaggagugcca

SEQ ID NO: 262828 - RNA, 19 nt, Homo sapiens
cauaaccccggaagccaaa

SEQ ID NO: 262829 - RNA, 15 nt, Homo sapiens
cauaaccugucucac

SEQ ID NO: 262830 - RNA, 14 nt, Homo sapiens
cauaacucugauua

SEQ ID NO: 262831 - RNA, 18 nt, Homo sapiens
cauaaguuaacuuccaau

SEQ ID NO: 262832 - RNA, 14 nt, Homo sapiens
cauaaucucuuucc

SEQ ID NO: 262833 - RNA, 15 nt, Homo sapiens
cauaaucucuuucca

SEQ ID NO: 262834 - RNA, 18 nt, Homo sapiens
cauaaugacuuaagcaca

SEQ ID NO: 262835 - RNA, 19 nt, Homo sapiens
cauaaugacuuaagcacac

SEQ ID NO: 262836 - RNA, 19 nt, Homo sapiens
cauaaugcauguggcacuu

SEQ ID NO: 262837 - RNA, 15 nt, Homo sapiens
cauaaugcgugcaua

SEQ ID NO: 262838 - RNA, 16 nt, Homo sapiens
cauaauguuacauuau

SEQ ID NO: 262839 - RNA, 21 nt, Homo sapiens
cauaauguuacauuauuauca

SEQ ID NO: 262840 - RNA, 21 nt, Homo sapiens
cauaauguuucuggauuucau

SEQ ID NO: 262841 - RNA, 23 nt, Homo sapiens
cauaauuucuucacucaaucucu

SEQ ID NO: 262842 - RNA, 19 nt, Homo sapiens
cauaauuuguacauaugua

SEQ ID NO: 262843 - RNA, 18 nt, Homo sapiens
cauacaauuccaaacaca

SEQ ID NO: 262844 - RNA, 14 nt, Homo sapiens
cauacaucaagcca

SEQ ID NO: 262845 - RNA, 22 nt, Homo sapiens
cauacccgccuagcugcuguca

SEQ ID NO: 262846 - RNA, 21 nt, Homo sapiens
cauacuauuaaacaugcugua

SEQ ID NO: 262847 - RNA, 13 nt, Homo sapiens
cauacucaccuca

SEQ ID NO: 262848 - RNA, 20 nt, Homo sapiens
ccaaugagaucauugugaag

SEQ ID NO: 262849 - RNA, 13 nt, Homo sapiens
ccaaugaugguca

SEQ ID NO: 262850 - RNA, 14 nt, Homo sapiens
ccaaugauggucac

SEQ ID NO: 262851 - RNA, 17 nt, Homo sapiens
ccaauuugcacauuaaa

SEQ ID NO: 262852 - RNA, 14 nt, Homo sapiens
ccaauuuuuuauaa

SEQ ID NO: 262853 - RNA, 14 nt, Homo sapiens
ccacaaaaguacaa

SEQ ID NO: 262854 - RNA, 15 nt, Homo sapiens
ccacaaaaguacaau

SEQ ID NO: 262855 - RNA, 19 nt, Homo sapiens
ccacaaaucaucuguaaca

SEQ ID NO: 262856 - RNA, 22 nt, Homo sapiens
ccacaagacccuugugguccca

SEQ ID NO: 262857 - RNA, 21 nt, Homo sapiens
ccacaauagcagacaguguuu

SEQ ID NO: 262858 - RNA, 21 nt, Homo sapiens
ccacacccucuccuugucaca

SEQ ID NO: 262859 - RNA, 17 nt, Homo sapiens
ccacacggcugaccuca

SEQ ID NO: 262860 - RNA, 17 nt, Homo sapiens
ccacaggcagcauuuag

SEQ ID NO: 262861 - RNA, 19 nt, Homo sapiens
ccacaggcauuuccugcuu

SEQ ID NO: 262862 - RNA, 18 nt, Homo sapiens
ccacagggugagcacucu

SEQ ID NO: 262863 - RNA, 20 nt, Homo sapiens
ccacagugacuccacucuga

SEQ ID NO: 262864 - RNA, 14 nt, Homo sapiens
ccacaguggaacca

SEQ ID NO: 262865 - RNA, 14 nt, Homo sapiens
ccacauaccuggcc

SEQ ID NO: 262866 - RNA, 17 nt, Homo sapiens
ccacauauaaauguacu

SEQ ID NO: 262867 - RNA, 20 nt, Homo sapiens
ccacauauaaauguacuuuu

SEQ ID NO: 262868 - RNA, 21 nt, Homo sapiens
ccacaucuugcucugcugaca

SEQ ID NO: 262869 - RNA, 14 nt, Homo sapiens
ccacaugugcacau

SEQ ID NO: 262870 - RNA, 17 nt, Homo sapiens
ccacauuccugaugcuu

SEQ ID NO: 262871 - RNA, 20 nt, Homo sapiens
ccaccaacagcccucagguc

SEQ ID NO: 262872 - RNA, 15 nt, Homo sapiens
ccaccaacauacucc

SEQ ID NO: 262873 - RNA, 15 nt, Homo sapiens
ccaccaucaccagac

SEQ ID NO: 262874 - RNA, 17 nt, Homo sapiens
ccaccccuaaagagaua

SEQ ID NO: 262875 - RNA, 18 nt, Homo sapiens
ccacccucccacugccaa

SEQ ID NO: 262876 - RNA, 18 nt, Homo sapiens
ccaccucuuucuauuuau

SEQ ID NO: 262877 - RNA, 16 nt, Homo sapiens
ccaccugacacaccag

SEQ ID NO: 262878 - RNA, 13 nt, Homo sapiens
ccaccugucucag

SEQ ID NO: 262879 - RNA, 22 nt, Homo sapiens
ccacgagcuguuuacuagggau

SEQ ID NO: 262880 - RNA, 14 nt, Homo sapiens
ccacuacugcagca

SEQ ID NO: 262881 - RNA, 18 nt, Homo sapiens
ccacucaggggucauuca

SEQ ID NO: 262882 - RNA, 19 nt, Homo sapiens
ccacucaggggucauucau

SEQ ID NO: 262883 - RNA, 11 nt, Homo sapiens
ccacucagguc

SEQ ID NO: 262884 - RNA, 21 nt, Homo sapiens
ccacugacccuggucaccaga

SEQ ID NO: 262885 - RNA, 21 nt, Homo sapiens
ccacugagagaucugcuguca

SEQ ID NO: 262886 - RNA, 21 nt, Homo sapiens
ccacugccaaagaacuuggaa

SEQ ID NO: 262887 - RNA, 22 nt, Homo sapiens
ccacugccuucgcuucuugccu

SEQ ID NO: 262888 - RNA, 19 nt, Homo sapiens
ccacugugaagagaaccau

SEQ ID NO: 262889 - RNA, 15 nt, Homo sapiens
ccacuguguauuuaa

SEQ ID NO: 262890 - RNA, 23 nt, Homo sapiens
ccacuguuaagccauguguucca

SEQ ID NO: 262891 - RNA, 19 nt, Homo sapiens
ccacuuagaaauugcauuu

SEQ ID NO: 262892 - RNA, 16 nt, Homo sapiens
ccacuucucucaggau

SEQ ID NO: 262893 - RNA, 12 nt, Homo sapiens
ccacuucugcca

SEQ ID NO: 262894 - RNA, 17 nt, Homo sapiens
ccacuugccccuguuac

SEQ ID NO: 262895 - RNA, 17 nt, Homo sapiens
ccacuuggcaucauuca

SEQ ID NO: 262896 - RNA, 17 nt, Homo sapiens
ccacuuucugccagcau

SEQ ID NO: 262897 - RNA, 21 nt, Homo sapiens
ccacuuucugccagcaucugc

SEQ ID NO: 262898 - RNA, 23 nt, Homo sapiens
ccacuuucugccagcaucugcag

SEQ ID NO: 262899 - RNA, 14 nt, Homo sapiens
ccagaaaaauuucc

SEQ ID NO: 262900 - RNA, 18 nt, Homo sapiens
ccagaaugccuccugcag

SEQ ID NO: 262901 - RNA, 20 nt, Homo sapiens
ccagacuucccacggcuccu

SEQ ID NO: 262902 - RNA, 17 nt, Homo sapiens
ccagagaaaaagggagg

SEQ ID NO: 262903 - RNA, 14 nt, Homo sapiens
ccagagacugggac

SEQ ID NO: 262904 - RNA, 20 nt, Homo sapiens
ccagagaggguggugaccuc

SEQ ID NO: 262905 - RNA, 15 nt, Homo sapiens
ccagagaguggcucc

SEQ ID NO: 262906 - RNA, 15 nt, Homo sapiens
ccagagcaaacagaa

SEQ ID NO: 262907 - RNA, 12 nt, Homo sapiens
ccagagcagcuc

SEQ ID NO: 262908 - RNA, 23 nt, Homo sapiens
ccagagccguuacuacacacaaa

SEQ ID NO: 262909 - RNA, 17 nt, Homo sapiens
ccagagccucaaaugag

SEQ ID NO: 262910 - RNA, 13 nt, Homo sapiens
ccagagcugccac

SEQ ID NO: 262911 - RNA, 14 nt, Homo sapiens
ccagaggacaaagc

SEQ ID NO: 262912 - RNA, 20 nt, Homo sapiens
ccagaggauugcugccccau

SEQ ID NO: 262913 - RNA, 18 nt, Homo sapiens
ccagaggcuuaaucacac

SEQ ID NO: 262914 - RNA, 14 nt, Homo sapiens
ccagagucccugcc

SEQ ID NO: 262915 - RNA, 13 nt, Homo sapiens
ccagaguggccca

SEQ ID NO: 262916 - RNA, 16 nt, Homo sapiens
ccagaguuggacccga

SEQ ID NO: 262917 - RNA, 21 nt, Homo sapiens
ccagaguuggacccgacccca

SEQ ID NO: 262918 - RNA, 17 nt, Homo sapiens
ccagaucagacuuuaau

SEQ ID NO: 262919 - RNA, 22 nt, Homo sapiens
ccagaucagacuuuaauuucuc

SEQ ID NO: 262920 - RNA, 16 nt, Homo sapiens
ccagcacuuugggagg

SEQ ID NO: 262921 - RNA, 18 nt, Homo sapiens
ccagcaggcucucaggcc

SEQ ID NO: 262922 - RNA, 18 nt, Homo sapiens
ccagcgugugacuacucc

SEQ ID NO: 262923 - RNA, 14 nt, Homo sapiens
ccagcuagcaaaau

SEQ ID NO: 262924 - RNA, 15 nt, Homo sapiens
ccagcucugguccau

SEQ ID NO: 262925 - RNA, 19 nt, Homo sapiens
ccaggaaaggauuuuauaa

SEQ ID NO: 262926 - RNA, 14 nt, Homo sapiens
ccaggaagccagca

SEQ ID NO: 262927 - RNA, 12 nt, Homo sapiens
ccaggaccaguc

SEQ ID NO: 262928 - RNA, 15 nt, Homo sapiens
ccaggagcagccaca

SEQ ID NO: 262929 - RNA, 20 nt, Homo sapiens
ccaggauuauugucaaagaa

SEQ ID NO: 262930 - RNA, 18 nt, Homo sapiens
ccaggcaacuugggaacu

SEQ ID NO: 262931 - RNA, 14 nt, Homo sapiens
ccaggcagauccca

SEQ ID NO: 262932 - RNA, 17 nt, Homo sapiens
ccaggcagccacuccua

SEQ ID NO: 262933 - RNA, 22 nt, Homo sapiens
ccaggcaggauauuccaagggc

SEQ ID NO: 262934 - RNA, 18 nt, Homo sapiens
ccaggcaggucuugaacu

SEQ ID NO: 262935 - RNA, 15 nt, Homo sapiens
ccaggcccugcucau

SEQ ID NO: 262936 - RNA, 21 nt, Homo sapiens
ccaggccgacaggaggccaug

SEQ ID NO: 262937 - RNA, 18 nt, Homo sapiens
ccaggccuguugcuauag

SEQ ID NO: 262938 - RNA, 15 nt, Homo sapiens
ccaggcuggagugaa

SEQ ID NO: 262939 - RNA, 16 nt, Homo sapiens
ccaggcuggagugcaa

SEQ ID NO: 262940 - RNA, 17 nt, Homo sapiens
ccaggcuggagugcaau

SEQ ID NO: 262941 - RNA, 20 nt, Homo sapiens
ccaggcuggcgugcaguggu

SEQ ID NO: 262942 - RNA, 13 nt, Homo sapiens
ccaggcugggcug

SEQ ID NO: 262943 - RNA, 16 nt, Homo sapiens
ccaggcuggucucaaa

SEQ ID NO: 262944 - RNA, 18 nt, Homo sapiens
ccagggaugacauguccc

SEQ ID NO: 262945 - RNA, 17 nt, Homo sapiens
ccaggggccggccagug

SEQ ID NO: 262946 - RNA, 13 nt, Homo sapiens
ccagggucucacu

SEQ ID NO: 262947 - RNA, 12 nt, Homo sapiens
ccaggugcacag

SEQ ID NO: 262948 - RNA, 22 nt, Homo sapiens
ccaggugcuaggaacacuccuu

SEQ ID NO: 262949 - RNA, 20 nt, Homo sapiens
ccagguuuuuggucugaccc

SEQ ID NO: 262950 - RNA, 20 nt, Homo sapiens
ccaguaaaugggggugcauu

SEQ ID NO: 262951 - RNA, 23 nt, Homo sapiens
ccaguaguggugacugugggcuc

SEQ ID NO: 262952 - RNA, 13 nt, Homo sapiens
ccaguaucuugaa

SEQ ID NO: 262953 - RNA, 17 nt, Homo sapiens
ccagucauuauguuaau

SEQ ID NO: 262954 - RNA, 15 nt, Homo sapiens
ccagugaacagugug

SEQ ID NO: 262955 - RNA, 15 nt, Homo sapiens
ccagugaccagucac

SEQ ID NO: 262956 - RNA, 14 nt, Homo sapiens
ccagugagacugug

SEQ ID NO: 262957 - RNA, 15 nt, Homo sapiens
ccagugagacugugu

SEQ ID NO: 262958 - RNA, 21 nt, Homo sapiens
ccaguggcuggaucugugagg

SEQ ID NO: 262959 - RNA, 14 nt, Homo sapiens
ccagugggacccca

SEQ ID NO: 262960 - RNA, 20 nt, Homo sapiens
ccaguguguuucugaucuga

SEQ ID NO: 262961 - RNA, 20 nt, Homo sapiens
ccaguuugcaccugucccca

SEQ ID NO: 262962 - RNA, 17 nt, Homo sapiens
ccauagaggugagggaa

SEQ ID NO: 262963 - RNA, 19 nt, Homo sapiens
ccauagcaagauugcuuaa

SEQ ID NO: 262964 - RNA, 22 nt, Homo sapiens
ccauaggaggccaacccaaaau

SEQ ID NO: 262965 - RNA, 16 nt, Homo sapiens
ccauagugaccaacau

SEQ ID NO: 262966 - RNA, 15 nt, Homo sapiens
ccauaugaauaacau

SEQ ID NO: 262967 - RNA, 20 nt, Homo sapiens
ccauauuuucaccauuugau

SEQ ID NO: 262968 - RNA, 16 nt, Homo sapiens
ccaucaaaguggcaaa

SEQ ID NO: 262969 - RNA, 19 nt, Homo sapiens
ccaucaaaguggcaaaaau

SEQ ID NO: 262970 - RNA, 14 nt, Homo sapiens
ccaucagugcuccc

SEQ ID NO: 262971 - RNA, 22 nt, Homo sapiens
ccauccacacggcugaccucau

SEQ ID NO: 262972 - RNA, 12 nt, Homo sapiens
ccauccagguuc

SEQ ID NO: 262973 - RNA, 23 nt, Homo sapiens
ccaucccagcugaaauacugagg

SEQ ID NO: 262974 - RNA, 14 nt, Homo sapiens
ccaucccauuggca

SEQ ID NO: 262975 - RNA, 20 nt, Homo sapiens
cauguaucucaguaccccau

SEQ ID NO: 262976 - RNA, 15 nt, Homo sapiens
cauguauuaccugaa

SEQ ID NO: 262977 - RNA, 14 nt, Homo sapiens
caugucagcaaaaa

SEQ ID NO: 262978 - RNA, 21 nt, Homo sapiens
caugucuauuagcuccacaaa

SEQ ID NO: 262979 - RNA, 19 nt, Homo sapiens
caugucuuuucuugcauga

SEQ ID NO: 262980 - RNA, 14 nt, Homo sapiens
caugugcacaugca

SEQ ID NO: 262981 - RNA, 17 nt, Homo sapiens
caugugcacaugcacgu

SEQ ID NO: 262982 - RNA, 16 nt, Homo sapiens
caugugcagacacuca

SEQ ID NO: 262983 - RNA, 22 nt, Homo sapiens
caugugccagguuuuuggucug

SEQ ID NO: 262984 - RNA, 15 nt, Homo sapiens
caugugcucagggaa

SEQ ID NO: 262985 - RNA, 22 nt, Homo sapiens
cauguggaaaaaaaaaagaugu

SEQ ID NO: 262986 - RNA, 12 nt, Homo sapiens
caugugugcaaa

SEQ ID NO: 262987 - RNA, 14 nt, Homo sapiens
caugugugcaaaaa

SEQ ID NO: 262988 - RNA, 18 nt, Homo sapiens
cauguguguucaugcaca

SEQ ID NO: 262989 - RNA, 14 nt, Homo sapiens
cauguuaguuaccu

SEQ ID NO: 262990 - RNA, 19 nt, Homo sapiens
cauguucaccaagauuugg

SEQ ID NO: 262991 - RNA, 18 nt, Homo sapiens
cauguucagucacaugug

SEQ ID NO: 262992 - RNA, 19 nt, Homo sapiens
cauguucagucacaugugc

SEQ ID NO: 262993 - RNA, 21 nt, Homo sapiens
ccauggggcugauuguauuua

SEQ ID NO: 262994 - RNA, 16 nt, Homo sapiens
ccauggugugaucguc

SEQ ID NO: 262995 - RNA, 16 nt, Homo sapiens
ccauguacaugaagaa

SEQ ID NO: 262996 - RNA, 20 nt, Homo sapiens
ccaugucagcaaaaagcaaa

SEQ ID NO: 262997 - RNA, 18 nt, Homo sapiens
ccaugugccacacaccuu

SEQ ID NO: 262998 - RNA, 21 nt, Homo sapiens
ccauuagcauuugucaacaaa

SEQ ID NO: 262999 - RNA, 14 nt, Homo sapiens
ccauuguagcucuu

SEQ ID NO: 263000 - RNA, 22 nt, Homo sapiens
ccauuugcuuagaaagucugau

SEQ ID NO: 263001 - RNA, 19 nt, Homo sapiens
ccauuuggaaaucuuuaaa

SEQ ID NO: 263002 - RNA, 16 nt, Homo sapiens
ccauuuuugaaaccaa

SEQ ID NO: 263003 - RNA, 17 nt, Homo sapiens
ccauuuuugaaaccaaa

SEQ ID NO: 263004 - RNA, 17 nt, Homo sapiens
cccaaaaauuacuuugg

SEQ ID NO: 263005 - RNA, 23 nt, Homo sapiens
cccaaacccauuuuagagacaga

SEQ ID NO: 263006 - RNA, 18 nt, Homo sapiens
cccaaauucuuucagugg

SEQ ID NO: 263007 - RNA, 14 nt, Homo sapiens
cccaacaagugcuc

SEQ ID NO: 263008 - RNA, 15 nt, Homo sapiens
cccaacaagugcucu

SEQ ID NO: 263009 - RNA, 22 nt, Homo sapiens
cccaacaagugcucuuuccacc

SEQ ID NO: 263010 - RNA, 16 nt, Homo sapiens
cccaaguuccacugcu

SEQ ID NO: 263011 - RNA, 16 nt, Homo sapiens
cccaauucacaucuaa

SEQ ID NO: 263012 - RNA, 16 nt, Homo sapiens
cccacaaaaguacaau

SEQ ID NO: 263013 - RNA, 19 nt, Homo sapiens
cccacacccucccuuaccc

SEQ ID NO: 263014 - RNA, 12 nt, Homo sapiens
cccacagaguug

SEQ ID NO: 263015 - RNA, 16 nt, Homo sapiens
cccaccccugagcuga

SEQ ID NO: 263016 - RNA, 21 nt, Homo sapiens
cccacgacugcccggcagggu

SEQ ID NO: 263017 - RNA, 13 nt, Homo sapiens
cccacgagggugc

SEQ ID NO: 263018 - RNA, 19 nt, Homo sapiens
cccacgcuggagugcagug

SEQ ID NO: 263019 - RNA, 16 nt, Homo sapiens
cccacugaacaugcuc

SEQ ID NO: 263020 - RNA, 16 nt, Homo sapiens
cccacugcucugguua

SEQ ID NO: 263021 - RNA, 20 nt, Homo sapiens
cccacuggaggcaugugaug

SEQ ID NO: 263022 - RNA, 20 nt, Homo sapiens
cccacuguggcugauuugga

SEQ ID NO: 263023 - RNA, 19 nt, Homo sapiens
cccacuuggcaucauucac

SEQ ID NO: 263024 - RNA, 23 nt, Homo sapiens
cccagaaucucauuaaagcuuau

SEQ ID NO: 263025 - RNA, 18 nt, Homo sapiens
cccagaaugccuccugca

SEQ ID NO: 263026 - RNA, 17 nt, Homo sapiens
cccagacuagauguagu

SEQ ID NO: 263027 - RNA, 18 nt, Homo sapiens
cccagacuagauguagua

SEQ ID NO: 263028 - RNA, 22 nt, Homo sapiens
cccagaggagccaccaguucuc

SEQ ID NO: 263029 - RNA, 22 nt, Homo sapiens
cccagagugcugggauuacaau

SEQ ID NO: 263030 - RNA, 12 nt, Homo sapiens
cccagauugcaa

SEQ ID NO: 263031 - RNA, 11 nt, Homo sapiens
cccagcacugc

SEQ ID NO: 263032 - RNA, 20 nt, Homo sapiens
cccagccaaacccugucuga

SEQ ID NO: 263033 - RNA, 20 nt, Homo sapiens
cccagcucugguccauagag

SEQ ID NO: 263034 - RNA, 14 nt, Homo sapiens
cccagcugcucagu

SEQ ID NO: 263035 - RNA, 21 nt, Homo sapiens
cccagcugggaagaacaugcu

SEQ ID NO: 263036 - RNA, 23 nt, Homo sapiens
cccaggagcugaggauaaagggc

SEQ ID NO: 263037 - RNA, 20 nt, Homo sapiens
cccaggcuggagugcaauga

SEQ ID NO: 263038 - RNA, 19 nt, Homo sapiens
cccaggcuggcgugcagug

SEQ ID NO: 263039 - RNA, 16 nt, Homo sapiens
cccaggcuggucuuga

SEQ ID NO: 263040 - RNA, 19 nt, Homo sapiens
cccaggggccggccagugg

SEQ ID NO: 263041 - RNA, 18 nt, Homo sapiens
cccaggucccuuguccca

SEQ ID NO: 263042 - RNA, 12 nt, Homo sapiens
cccaguggugcc

SEQ ID NO: 263043 - RNA, 14 nt, Homo sapiens
cccaguguguuucu

SEQ ID NO: 263044 - RNA, 21 nt, Homo sapiens
cccaguguguuucugaucuga

SEQ ID NO: 263045 - RNA, 16 nt, Homo sapiens
cccaguuagcucucaa

SEQ ID NO: 263046 - RNA, 14 nt, Homo sapiens
cccauaucugugaa

SEQ ID NO: 263047 - RNA, 15 nt, Homo sapiens
cccauaucugugaaa

SEQ ID NO: 263048 - RNA, 17 nt, Homo sapiens
cccauaucugugaaaug

SEQ ID NO: 263049 - RNA, 23 nt, Homo sapiens
cccauaucugugaaaugcuggca

SEQ ID NO: 263050 - RNA, 22 nt, Homo sapiens
cccauccuagagaaaacuugaa

SEQ ID NO: 263051 - RNA, 20 nt, Homo sapiens
cccaugccaccggcuccacu

SEQ ID NO: 263052 - RNA, 17 nt, Homo sapiens
cccaugggaagggucca

SEQ ID NO: 263053 - RNA, 21 nt, Homo sapiens
cccaugucacugcagauugag

SEQ ID NO: 263054 - RNA, 16 nt, Homo sapiens
cccauugauguacuuu

SEQ ID NO: 263055 - RNA, 22 nt, Homo sapiens
cccauuugcuuacuuugcauuu

SEQ ID NO: 263056 - RNA, 14 nt, Homo sapiens
ccccaauccaugaa

SEQ ID NO: 263057 - RNA, 15 nt, Homo sapiens
ccccaggauccacuu

SEQ ID NO: 263058 - RNA, 16 nt, Homo sapiens
ccccaggcugggcugu

SEQ ID NO: 263059 - RNA, 16 nt, Homo sapiens
ccccaggguccuguag

SEQ ID NO: 263060 - RNA, 17 nt, Homo sapiens
ccccauaaucacugacc

SEQ ID NO: 263061 - RNA, 20 nt, Homo sapiens
ccccaucugccacguguauu

SEQ ID NO: 263062 - RNA, 14 nt, Homo sapiens
ccccaucuggucca

SEQ ID NO: 263063 - RNA, 23 nt, Homo sapiens
ccccauguaucucaguaccccau

SEQ ID NO: 263064 - RNA, 12 nt, Homo sapiens
cccccugugcag

SEQ ID NO: 263065 - RNA, 12 nt, Homo sapiens
cccccuugaggg

SEQ ID NO: 263066 - RNA, 22 nt, Homo sapiens
ccccgcacugggcuuggggacc

SEQ ID NO: 263067 - RNA, 17 nt, Homo sapiens
ccccugagcugaauaaa

SEQ ID NO: 263068 - RNA, 22 nt, Homo sapiens
ccccugcagcuccucugccuuu

SEQ ID NO: 263069 - RNA, 14 nt, Homo sapiens
ccccuggcuuuuca

SEQ ID NO: 263070 - RNA, 17 nt, Homo sapiens
ccccugugccuugucac

SEQ ID NO: 263071 - RNA, 15 nt, Homo sapiens
ccccuguucuggcag

SEQ ID NO: 263072 - RNA, 18 nt, Homo sapiens
ccccuugccagacaugug

SEQ ID NO: 263073 - RNA, 22 nt, Homo sapiens
ccccuuuuauuaauacauucac

SEQ ID NO: 263074 - RNA, 13 nt, Homo sapiens
cccgacagccugg

SEQ ID NO: 263075 - RNA, 22 nt, Homo sapiens
cccgccacccucccacugccaa

SEQ ID NO: 263076 - RNA, 12 nt, Homo sapiens
cccggcccagug

SEQ ID NO: 263077 - RNA, 14 nt, Homo sapiens
cccuaagauugaaa

SEQ ID NO: 263078 - RNA, 18 nt, Homo sapiens
cccuaagcagaccacuga

SEQ ID NO: 263079 - RNA, 20 nt, Homo sapiens
cccuaggauaaaaagccagg

SEQ ID NO: 263080 - RNA, 23 nt, Homo sapiens
cccuaugugggugggaccacaga

SEQ ID NO: 263081 - RNA, 15 nt, Homo sapiens
cccucacuguugaau

SEQ ID NO: 263082 - RNA, 18 nt, Homo sapiens
cccucaucuuucuuccaa

SEQ ID NO: 263083 - RNA, 13 nt, Homo sapiens
cccuccaauccca

SEQ ID NO: 263084 - RNA, 14 nt, Homo sapiens
cccuccacguucac

SEQ ID NO: 263085 - RNA, 13 nt, Homo sapiens
cccuccauguacc

SEQ ID NO: 263086 - RNA, 22 nt, Homo sapiens
cccucccacugccaaagaacuu

SEQ ID NO: 263087 - RNA, 15 nt, Homo sapiens
cccuccccugccauu

SEQ ID NO: 263088 - RNA, 15 nt, Homo sapiens
cccucuaagggaccu

SEQ ID NO: 263089 - RNA, 18 nt, Homo sapiens
cccucuccccacugcuca

SEQ ID NO: 263090 - RNA, 22 nt, Homo sapiens
cccugaaguaagcaaagacuuu

SEQ ID NO: 263091 - RNA, 18 nt, Homo sapiens
cccugaauuuugcuuccu

SEQ ID NO: 263092 - RNA, 21 nt, Homo sapiens
cccugacagggccagugcagu

SEQ ID NO: 263093 - RNA, 18 nt, Homo sapiens
cccugagcuuucugcuau

SEQ ID NO: 263094 - RNA, 12 nt, Homo sapiens
cccugcauuuau

SEQ ID NO: 263095 - RNA, 22 nt, Homo sapiens
cccuggacaggcuucgucucag

SEQ ID NO: 263096 - RNA, 19 nt, Homo sapiens
cccuggccuccccugccac

SEQ ID NO: 263097 - RNA, 18 nt, Homo sapiens
cccuggcuugagugaucc

SEQ ID NO: 263098 - RNA, 16 nt, Homo sapiens
cccuggucaccagagg

SEQ ID NO: 263099 - RNA, 16 nt, Homo sapiens
cccugguggcagcuca

SEQ ID NO: 263100 - RNA, 14 nt, Homo sapiens
cccugucucaaaaa

SEQ ID NO: 263101 - RNA, 17 nt, Homo sapiens
cccugugccagaccuca

SEQ ID NO: 263102 - RNA, 18 nt, Homo sapiens
cccugugccagaccucaa

SEQ ID NO: 263103 - RNA, 15 nt, Homo sapiens
cccugugucauuuca

SEQ ID NO: 263104 - RNA, 14 nt, Homo sapiens
cccuguuaccuaau

SEQ ID NO: 263105 - RNA, 19 nt, Homo sapiens
cccuguucauucugcauuc

SEQ ID NO: 263106 - RNA, 22 nt, Homo sapiens
cccuucaaccauuccccauggg

SEQ ID NO: 263107 - RNA, 21 nt, Homo sapiens
cccuucauccuucuggaauaa

SEQ ID NO: 263108 - RNA, 23 nt, Homo sapiens
cccuucuauacuuucucacaugu

SEQ ID NO: 263109 - RNA, 13 nt, Homo sapiens
cccuucucuguau

SEQ ID NO: 263110 - RNA, 19 nt, Homo sapiens
cccuucuuacaaugcauuc

SEQ ID NO: 263111 - RNA, 20 nt, Homo sapiens
cccuugaggaaaaaugucca

SEQ ID NO: 263112 - RNA, 19 nt, Homo sapiens
cccuuucaacagaauucac

SEQ ID NO: 263113 - RNA, 11 nt, Homo sapiens
cccuuucacaa

SEQ ID NO: 263114 - RNA, 23 nt, Homo sapiens
cccuuucacacuguggugucucu

SEQ ID NO: 263115 - RNA, 21 nt, Homo sapiens
ccgaccacggggccgacauug

SEQ ID NO: 263116 - RNA, 22 nt, Homo sapiens
ccgacuuuuguuuaccagagaa

SEQ ID NO: 263117 - RNA, 16 nt, Homo sapiens
ccgagagcugggacuc

SEQ ID NO: 263118 - RNA, 22 nt, Homo sapiens
ccgagcuuugaaaauucagugg

SEQ ID NO: 263119 - RNA, 20 nt, Homo sapiens
ccgagucucuucuccacugg

SEQ ID NO: 263120 - RNA, 12 nt, Homo sapiens
ccgauaccaugc

SEQ ID NO: 263121 - RNA, 19 nt, Homo sapiens
ccgcaaaagacaagucuuu

SEQ ID NO: 263122 - RNA, 23 nt, Homo sapiens
ccgcaacaguuuuuuaugcuaau

SEQ ID NO: 263123 - RNA, 21 nt, Homo sapiens
ccgccacccucccacugccaa

SEQ ID NO: 263124 - RNA, 19 nt, Homo sapiens
ccggccuccugucccucau

SEQ ID NO: 263125 - RNA, 11 nt, Homo sapiens
ccgggacaccu

SEQ ID NO: 263126 - RNA, 23 nt, Homo sapiens
ccgggaggcagagguugcagugu

SEQ ID NO: 263127 - RNA, 20 nt, Homo sapiens
ccgggucaucuguaccucug

SEQ ID NO: 263128 - RNA, 15 nt, Homo sapiens
ccacaguguggggca

SEQ ID NO: 263129 - RNA, 22 nt, Homo sapiens
ccacauauaaauguacuuuucc

SEQ ID NO: 263130 - RNA, 21 nt, Homo sapiens
ccacauccuccacguucugcu

SEQ ID NO: 263131 - RNA, 23 nt, Homo sapiens
ccacauccuccacguucugcuca

SEQ ID NO: 263132 - RNA, 17 nt, Homo sapiens
ccacaucuugcucugcu

SEQ ID NO: 263133 - RNA, 18 nt, Homo sapiens
ccaccaccaucaccagac

SEQ ID NO: 263134 - RNA, 10 nt, Homo sapiens
ccaccagaga

SEQ ID NO: 263135 - RNA, 13 nt, Homo sapiens
ccaccaguucuca

SEQ ID NO: 263136 - RNA, 19 nt, Homo sapiens
ccaccauaaaucacaucau

SEQ ID NO: 263137 - RNA, 16 nt, Homo sapiens
ccguguggcccaagac

SEQ ID NO: 263138 - RNA, 14 nt, Homo sapiens
ccuaaaaacuggca

SEQ ID NO: 263139 - RNA, 21 nt, Homo sapiens
ccuaaauagguuuuucuugcu

SEQ ID NO: 263140 - RNA, 22 nt, Homo sapiens
ccuaaaucaaguuggcuucuaa

SEQ ID NO: 263141 - RNA, 19 nt, Homo sapiens
ccuaacaggauuagacagu

SEQ ID NO: 263142 - RNA, 16 nt, Homo sapiens
ccuaacuaucacuggu

SEQ ID NO: 263143 - RNA, 17 nt, Homo sapiens
ccuaacuaucacugguu

SEQ ID NO: 263144 - RNA, 20 nt, Homo sapiens
ccuaauacugucauccucaa

SEQ ID NO: 263145 - RNA, 22 nt, Homo sapiens
ccuaaucuauggucgggagaca

SEQ ID NO: 263146 - RNA, 18 nt, Homo sapiens
ccuaaucuuccacuugag

SEQ ID NO: 263147 - RNA, 17 nt, Homo sapiens
ccuaauuccacacccuc

SEQ ID NO: 263148 - RNA, 21 nt, Homo sapiens
ccuacaaggcuggcagugaca

SEQ ID NO: 263149 - RNA, 23 nt, Homo sapiens
ccuacaguugaaaaacagcugag

SEQ ID NO: 263150 - RNA, 13 nt, Homo sapiens
ccuacugagacag

SEQ ID NO: 263151 - RNA, 13 nt, Homo sapiens
ccuagaaacugac

SEQ ID NO: 263152 - RNA, 17 nt, Homo sapiens
ccuagcacacacuuuug

SEQ ID NO: 263153 - RNA, 15 nt, Homo sapiens
ccuagccgaccucag

SEQ ID NO: 263154 - RNA, 23 nt, Homo sapiens
ccuaggaaagccaguuacauaaa

SEQ ID NO: 263155 - RNA, 15 nt, Homo sapiens
ccuaggcauuugcug

SEQ ID NO: 263156 - RNA, 15 nt, Homo sapiens
ccuaggcuagggugg

SEQ ID NO: 263157 - RNA, 11 nt, Homo sapiens
ccuaguacaag

SEQ ID NO: 263158 - RNA, 16 nt, Homo sapiens
ccuaguuccaccauca

SEQ ID NO: 263159 - RNA, 14 nt, Homo sapiens
ccuauguaugccau

SEQ ID NO: 263160 - RNA, 18 nt, Homo sapiens
ccuaugugggugggacca

SEQ ID NO: 263161 - RNA, 22 nt, Homo sapiens
ccuaugugggugggaccacaga

SEQ ID NO: 263162 - RNA, 19 nt, Homo sapiens
ccucaaaacaaucuuguca

SEQ ID NO: 263163 - RNA, 18 nt, Homo sapiens
ccucaaccuccugggcua

SEQ ID NO: 263164 - RNA, 20 nt, Homo sapiens
ccucacagagugcauuguga

SEQ ID NO: 263165 - RNA, 23 nt, Homo sapiens
ccucacagagugcauugugaggg

SEQ ID NO: 263166 - RNA, 15 nt, Homo sapiens
ccucaccccacugug

SEQ ID NO: 263167 - RNA, 23 nt, Homo sapiens
ccucacucauucccauguuguca

SEQ ID NO: 263168 - RNA, 14 nt, Homo sapiens
ccucacucucgcca

SEQ ID NO: 263169 - RNA, 21 nt, Homo sapiens
ccucagcagccucacugcauc

SEQ ID NO: 263170 - RNA, 22 nt, Homo sapiens
ccucagccucccaaagugcugg

SEQ ID NO: 263171 - RNA, 21 nt, Homo sapiens
ccucagccuccugaguagcua

SEQ ID NO: 263172 - RNA, 10 nt, Homo sapiens
ccucagggcu

SEQ ID NO: 263173 - RNA, 16 nt, Homo sapiens
ccucagucccaacucc

SEQ ID NO: 263174 - RNA, 16 nt, Homo sapiens
ccucagugagaagcca

SEQ ID NO: 263175 - RNA, 17 nt, Homo sapiens
ccucaguuuuaucauuu

SEQ ID NO: 263176 - RNA, 20 nt, Homo sapiens
ccucaguuuuaucauuuuca

SEQ ID NO: 263177 - RNA, 18 nt, Homo sapiens
ccucaucccgagcaccuc

SEQ ID NO: 263178 - RNA, 20 nt, Homo sapiens
ccucauuagcauuuugcuaa

SEQ ID NO: 263179 - RNA, 13 nt, Homo sapiens
ccuccaaguccac

SEQ ID NO: 263180 - RNA, 15 nt, Homo sapiens
ccuccaggugcacaa

SEQ ID NO: 263181 - RNA, 19 nt, Homo sapiens
ccucccaaccccagugccu

SEQ ID NO: 263182 - RNA, 12 nt, Homo sapiens
ccucccauguca

SEQ ID NO: 263183 - RNA, 13 nt, Homo sapiens
ccucccucaggcc

SEQ ID NO: 263184 - RNA, 15 nt, Homo sapiens
ccucccuggucccuu

SEQ ID NO: 263185 - RNA, 15 nt, Homo sapiens
ccuccgcccugccac

SEQ ID NO: 263186 - RNA, 17 nt, Homo sapiens
ccuccuaaaguagacuu

SEQ ID NO: 263187 - RNA, 16 nt, Homo sapiens
ccuccuauaucacucu

SEQ ID NO: 263188 - RNA, 23 nt, Homo sapiens
ccuccuccagccgccaugcuccu

SEQ ID NO: 263189 - RNA, 21 nt, Homo sapiens
ccuccucuacaauuugccauu

SEQ ID NO: 263190 - RNA, 16 nt, Homo sapiens
ccuccucugcccggga

SEQ ID NO: 263191 - RNA, 20 nt, Homo sapiens
ccuccugaguagcugggacu

SEQ ID NO: 263192 - RNA, 16 nt, Homo sapiens
ccuccugggcccucuc

SEQ ID NO: 263193 - RNA, 15 nt, Homo sapiens
ccuccugucccucau

SEQ ID NO: 263194 - RNA, 14 nt, Homo sapiens
ccucucaaccaccu

SEQ ID NO: 263195 - RNA, 21 nt, Homo sapiens
ccucucagauuguaccauuga

SEQ ID NO: 263196 - RNA, 12 nt, Homo sapiens
ccucucauucca

SEQ ID NO: 263197 - RNA, 13 nt, Homo sapiens
ccucuccacucau

SEQ ID NO: 263198 - RNA, 16 nt, Homo sapiens
ccucuccaguuugcac

SEQ ID NO: 263199 - RNA, 18 nt, Homo sapiens
ccucuccccacugcucau

SEQ ID NO: 263200 - RNA, 15 nt, Homo sapiens
ccucucccucugguc

SEQ ID NO: 263201 - RNA, 12 nt, Homo sapiens
ccucucuugcca

SEQ ID NO: 263202 - RNA, 14 nt, Homo sapiens
ccucugaaaaccaa

SEQ ID NO: 263203 - RNA, 12 nt, Homo sapiens
ccucugacucag

SEQ ID NO: 263204 - RNA, 18 nt, Homo sapiens
ccucugccuuugugcucu

SEQ ID NO: 263205 - RNA, 18 nt, Homo sapiens
ccucugcucugugcacuc

SEQ ID NO: 263206 - RNA, 15 nt, Homo sapiens
ccucuggacacagcc

SEQ ID NO: 263207 - RNA, 19 nt, Homo sapiens
ccucuggcuccugggccug

SEQ ID NO: 263208 - RNA, 21 nt, Homo sapiens
ccucugggccaagucaaagac

SEQ ID NO: 263209 - RNA, 14 nt, Homo sapiens
ccucugggggccug

SEQ ID NO: 263210 - RNA, 15 nt, Homo sapiens
ccucuggucccacaa

SEQ ID NO: 263211 - RNA, 21 nt, Homo sapiens
ccucuggucgcuccugcccac

SEQ ID NO: 263212 - RNA, 17 nt, Homo sapiens
ccucuuggcugccuugu

SEQ ID NO: 263213 - RNA, 13 nt, Homo sapiens
ccucuuucaucca

SEQ ID NO: 263214 - RNA, 17 nt, Homo sapiens
ccucuuugagugaagcu

SEQ ID NO: 263215 - RNA, 16 nt, Homo sapiens
ccucuuuuucuagucu

SEQ ID NO: 263216 - RNA, 21 nt, Homo sapiens
ccugaagaacaguaacugcca

SEQ ID NO: 263217 - RNA, 14 nt, Homo sapiens
ccugaagucacaca

SEQ ID NO: 263218 - RNA, 20 nt, Homo sapiens
ccugaagucacacagugagu

SEQ ID NO: 263219 - RNA, 23 nt, Homo sapiens
ccugacaacacucauugaccuga

SEQ ID NO: 263220 - RNA, 14 nt, Homo sapiens
ccugacaccuuuca

SEQ ID NO: 263221 - RNA, 18 nt, Homo sapiens
ccugacagaaggacucag

SEQ ID NO: 263222 - RNA, 22 nt, Homo sapiens
ccugacccucaucuuucuucca

SEQ ID NO: 263223 - RNA, 15 nt, Homo sapiens
ccugagagggaaccc

SEQ ID NO: 263224 - RNA, 18 nt, Homo sapiens
ccugaggacugauuucag

SEQ ID NO: 263225 - RNA, 19 nt, Homo sapiens
ccugaggcaggagggcaug

SEQ ID NO: 263226 - RNA, 15 nt, Homo sapiens
ccugagguuugccag

SEQ ID NO: 263227 - RNA, 20 nt, Homo sapiens
ccugagguuugccagcauuu

SEQ ID NO: 263228 - RNA, 22 nt, Homo sapiens
ccugagguuugccagcauuuag

SEQ ID NO: 263229 - RNA, 18 nt, Homo sapiens
ccugaguagcugggacua

SEQ ID NO: 263230 - RNA, 21 nt, Homo sapiens
ccugaucagagccgugguccu

SEQ ID NO: 263231 - RNA, 21 nt, Homo sapiens
ccugaugcuggggacacagca

SEQ ID NO: 263232 - RNA, 22 nt, Homo sapiens
ccugauuccuuuaaaugaauau

SEQ ID NO: 263233 - RNA, 17 nt, Homo sapiens
ccugcaaaaggacucuc

SEQ ID NO: 263234 - RNA, 21 nt, Homo sapiens
ccugcaaccugauugugucuc

SEQ ID NO: 263235 - RNA, 21 nt, Homo sapiens
ccugcacauuguuaugcacuu

SEQ ID NO: 263236 - RNA, 15 nt, Homo sapiens
ccugcagaagaugug

SEQ ID NO: 263237 - RNA, 14 nt, Homo sapiens
ccugcagauguucu

SEQ ID NO: 263238 - RNA, 20 nt, Homo sapiens
ccugcagcuccucugccuuu

SEQ ID NO: 263239 - RNA, 16 nt, Homo sapiens
ccugcaggaccucgug

SEQ ID NO: 263240 - RNA, 21 nt, Homo sapiens
ccugcaguuauuaacacuaac

SEQ ID NO: 263241 - RNA, 15 nt, Homo sapiens
ccugccaggaagcca

SEQ ID NO: 263242 - RNA, 10 nt, Homo sapiens
ccugccccaa

SEQ ID NO: 263243 - RNA, 21 nt, Homo sapiens
ccugcccuuaccugccaggaa

SEQ ID NO: 263244 - RNA, 16 nt, Homo sapiens
ccugccuccugguccc

SEQ ID NO: 263245 - RNA, 19 nt, Homo sapiens
ccugccuguggcgccgucu

SEQ ID NO: 263246 - RNA, 19 nt, Homo sapiens
ccugcggaguugugcacgu

SEQ ID NO: 263247 - RNA, 21 nt, Homo sapiens
ccugcuuuggucuugccccau

SEQ ID NO: 263248 - RNA, 16 nt, Homo sapiens
ccuggaccaggucuca

SEQ ID NO: 263249 - RNA, 14 nt, Homo sapiens
ccuggagauccucc

SEQ ID NO: 263250 - RNA, 23 nt, Homo sapiens
ccuggaguacuuugaagauguca

SEQ ID NO: 263251 - RNA, 23 nt, Homo sapiens
ccuggaguguaugacugcacaug

SEQ ID NO: 263252 - RNA, 18 nt, Homo sapiens
ccuggaugaaguuaucug

SEQ ID NO: 263253 - RNA, 22 nt, Homo sapiens
ccuggaugcagccucacagucc

SEQ ID NO: 263254 - RNA, 21 nt, Homo sapiens
ccuggcaaagaugaucaguau

SEQ ID NO: 263255 - RNA, 12 nt, Homo sapiens
ccuggcaagaau

SEQ ID NO: 263256 - RNA, 19 nt, Homo sapiens
ccuggcacugguuuguucc

SEQ ID NO: 263257 - RNA, 15 nt, Homo sapiens
ccuggcucucccagc

SEQ ID NO: 263258 - RNA, 12 nt, Homo sapiens
ccuggcuggcau

SEQ ID NO: 263259 - RNA, 21 nt, Homo sapiens
ccuggcuggcauggaggguga

SEQ ID NO: 263260 - RNA, 14 nt, Homo sapiens
ccugggaccacaga

SEQ ID NO: 263261 - RNA, 18 nt, Homo sapiens
ccugggaucuggugguca

SEQ ID NO: 263262 - RNA, 19 nt, Homo sapiens
ccuggggagucugggcaca

SEQ ID NO: 263263 - RNA, 16 nt, Homo sapiens
ccugggggugccagga

SEQ ID NO: 263264 - RNA, 17 nt, Homo sapiens
ccuggguaacuagggaa

SEQ ID NO: 263265 - RNA, 18 nt, Homo sapiens
ccugggugugugaagcug

SEQ ID NO: 263266 - RNA, 22 nt, Homo sapiens
ccuggugggccuccucugucca

SEQ ID NO: 263267 - RNA, 15 nt, Homo sapiens
ccugguuugaagaaa

SEQ ID NO: 263268 - RNA, 16 nt, Homo sapiens
ccuguaccugugcacg

SEQ ID NO: 263269 - RNA, 13 nt, Homo sapiens
ccuguaguacaag

SEQ ID NO: 263270 - RNA, 21 nt, Homo sapiens
ccuguaguacaagauuaucuu

SEQ ID NO: 263271 - RNA, 22 nt, Homo sapiens
ccuguagucccagcuacuugag

SEQ ID NO: 263272 - RNA, 19 nt, Homo sapiens
ccuguagucccauugaugu

SEQ ID NO: 263273 - RNA, 17 nt, Homo sapiens
ccugucaccaugauucu

SEQ ID NO: 263274 - RNA, 22 nt, Homo sapiens
ccuguccagcaggggucuccca

SEQ ID NO: 263275 - RNA, 22 nt, Homo sapiens
ccugucugccagccagcagcca

SEQ ID NO: 263276 - RNA, 16 nt, Homo sapiens
ccugugacugacaugu

SEQ ID NO: 263277 - RNA, 24 nt, Homo sapiens
ccugugacugacauguacgauuca

SEQ ID NO: 263278 - RNA, 19 nt, Homo sapiens
ccugugaguacuacagucc

SEQ ID NO: 263279 - RNA, 16 nt, Homo sapiens
ccugugccagaccuca

SEQ ID NO: 263280 - RNA, 14 nt, Homo sapiens
ccuguguugcccag

SEQ ID NO: 263281 - RNA, 17 nt, Homo sapiens
ccuaaugcuugcugcug

SEQ ID NO: 263282 - RNA, 12 nt, Homo sapiens
ccuaauggcaaa

SEQ ID NO: 263283 - RNA, 16 nt, Homo sapiens
ccuaauguguuuagau

SEQ ID NO: 263284 - RNA, 23 nt, Homo sapiens
ccuacaaggcuggcagugacaga

SEQ ID NO: 263285 - RNA, 19 nt, Homo sapiens
ccuacccccugugccuugu

SEQ ID NO: 263286 - RNA, 21 nt, Homo sapiens
ccuaccucacagagugcauug

SEQ ID NO: 263287 - RNA, 21 nt, Homo sapiens
ccuuaagaauuuuugaaguga

SEQ ID NO: 263288 - RNA, 21 nt, Homo sapiens
ccuuaagggacaacauccuua

SEQ ID NO: 263289 - RNA, 22 nt, Homo sapiens
ccuuacauuugaaaucuaugaa

SEQ ID NO: 263290 - RNA, 15 nt, Homo sapiens
ccuuagaagucacac

SEQ ID NO: 263291 - RNA, 15 nt, Homo sapiens
ccuuagaaguggaag

SEQ ID NO: 263292 - RNA, 14 nt, Homo sapiens
ccuuagacaguccc

SEQ ID NO: 263293 - RNA, 23 nt, Homo sapiens
ccuuagauguucuaagucuuucc

SEQ ID NO: 263294 - RNA, 18 nt, Homo sapiens
ccuuagcuuagaccucag

SEQ ID NO: 263295 - RNA, 20 nt, Homo sapiens
ccuuauuagagugucuuucc

SEQ ID NO: 263296 - RNA, 14 nt, Homo sapiens
ccuucagauuugcc

SEQ ID NO: 263297 - RNA, 22 nt, Homo sapiens
ccuucagugccaaaaacaacaa

SEQ ID NO: 263298 - RNA, 22 nt, Homo sapiens
ccuucaguuuccauccccagga

SEQ ID NO: 263299 - RNA, 17 nt, Homo sapiens
ccuucaugaucaucaca

SEQ ID NO: 263300 - RNA, 12 nt, Homo sapiens
ccuuccacugag

SEQ ID NO: 263301 - RNA, 17 nt, Homo sapiens
ccuuccaggggugggac

SEQ ID NO: 263302 - RNA, 18 nt, Homo sapiens
ccuuccuaugcuguucac

SEQ ID NO: 263303 - RNA, 18 nt, Homo sapiens
ccuuccucaccacuuccc

SEQ ID NO: 263304 - RNA, 17 nt, Homo sapiens
ccuucgcuucuugccuc

SEQ ID NO: 263305 - RNA, 12 nt, Homo sapiens
ccuucuaccucu

SEQ ID NO: 263306 - RNA, 16 nt, Homo sapiens
ccuucuauacuuucuc

SEQ ID NO: 263307 - RNA, 19 nt, Homo sapiens
ccuucuauacuuucucaca

SEQ ID NO: 263308 - RNA, 20 nt, Homo sapiens
ccuucucucaccuccuaaag

SEQ ID NO: 263309 - RNA, 14 nt, Homo sapiens
ccuucuguggcuca

SEQ ID NO: 263310 - RNA, 15 nt, Homo sapiens
ccuucuuauguuucu

SEQ ID NO: 263311 - RNA, 17 nt, Homo sapiens
ccuucuuauguuucuaa

SEQ ID NO: 263312 - RNA, 13 nt, Homo sapiens
ccuucuugcugcc

SEQ ID NO: 263313 - RNA, 22 nt, Homo sapiens
ccuugaaaacacuguucucugc

SEQ ID NO: 263314 - RNA, 15 nt, Homo sapiens
ccuugaaaagacauc

SEQ ID NO: 263315 - RNA, 20 nt, Homo sapiens
ccuugaggaaaaauguccaa

SEQ ID NO: 263316 - RNA, 22 nt, Homo sapiens
ccuugcaagcuaauucuuugac

SEQ ID NO: 263317 - RNA, 15 nt, Homo sapiens
ccuugccagacaugu

SEQ ID NO: 263318 - RNA, 14 nt, Homo sapiens
ccuugggaagaugu

SEQ ID NO: 263319 - RNA, 14 nt, Homo sapiens
ccuugggccaagau

SEQ ID NO: 263320 - RNA, 15 nt, Homo sapiens
ccuuggugugcugua

SEQ ID NO: 263321 - RNA, 19 nt, Homo sapiens
ccuugguucccccacugau

SEQ ID NO: 263322 - RNA, 21 nt, Homo sapiens
ccuuguguacaguuauuuaug

SEQ ID NO: 263323 - RNA, 22 nt, Homo sapiens
ccuuuacaugaauacgucuuga

SEQ ID NO: 263324 - RNA, 19 nt, Homo sapiens
ccuuucaauaggaaaaacu

SEQ ID NO: 263325 - RNA, 16 nt, Homo sapiens
ccuuucaccacaugug

SEQ ID NO: 263326 - RNA, 17 nt, Homo sapiens
ccuuucacuaaaacaca

SEQ ID NO: 263327 - RNA, 22 nt, Homo sapiens
ccuuuccaaaugcccagcuuaa

SEQ ID NO: 263328 - RNA, 16 nt, Homo sapiens
ccuuucccaucuucca

SEQ ID NO: 263329 - RNA, 17 nt, Homo sapiens
ccuuuccccucccucag

SEQ ID NO: 263330 - RNA, 14 nt, Homo sapiens
ccuuucgucugcca

SEQ ID NO: 263331 - RNA, 15 nt, Homo sapiens
ccuuucuuacauuag

SEQ ID NO: 263332 - RNA, 18 nt, Homo sapiens
ccuuugccucaaggacuu

SEQ ID NO: 263333 - RNA, 16 nt, Homo sapiens
ccuuugccuuugccuc

SEQ ID NO: 263334 - RNA, 18 nt, Homo sapiens
ccuuugggagcucauucu

SEQ ID NO: 263335 - RNA, 14 nt, Homo sapiens
ccuuugugcucugu

SEQ ID NO: 263336 - RNA, 13 nt, Homo sapiens
ccuuuugccaucc

SEQ ID NO: 263337 - RNA, 19 nt, Homo sapiens
cgaaaagaggggaagagac

SEQ ID NO: 263338 - RNA, 16 nt, Homo sapiens
cgaacaauucauauau

SEQ ID NO: 263339 - RNA, 17 nt, Homo sapiens
cgaaccuacaguuuuaa

SEQ ID NO: 263340 - RNA, 16 nt, Homo sapiens
cgaauagccacugcau

SEQ ID NO: 263341 - RNA, 15 nt, Homo sapiens
cgacaacuugcacgu

SEQ ID NO: 263342 - RNA, 13 nt, Homo sapiens
cgacauugucucc

SEQ ID NO: 263343 - RNA, 13 nt, Homo sapiens
cgaccagacaccu

SEQ ID NO: 263344 - RNA, 12 nt, Homo sapiens
cgacccaagacc

SEQ ID NO: 263345 - RNA, 20 nt, Homo sapiens
cgagacuugguuucaaaaaa

SEQ ID NO: 263346 - RNA, 20 nt, Homo sapiens
cgagagcugggacucaguuc

SEQ ID NO: 263347 - RNA, 22 nt, Homo sapiens
cgagauagccaaggccaaagga

SEQ ID NO: 263348 - RNA, 18 nt, Homo sapiens
cgagcacauaccaugugc

SEQ ID NO: 263349 - RNA, 19 nt, Homo sapiens
cgagccaaguuaagaaugu

SEQ ID NO: 263350 - RNA, 19 nt, Homo sapiens
cgaggacagggaggugacc

SEQ ID NO: 263351 - RNA, 19 nt, Homo sapiens
cgagucucuucuccacugg

SEQ ID NO: 263352 - RNA, 20 nt, Homo sapiens
cgaucuggguucacugcaac

SEQ ID NO: 263353 - RNA, 14 nt, Homo sapiens
cgaugacaguguuc

SEQ ID NO: 263354 - RNA, 17 nt, Homo sapiens
cgaugcagugcuuccaa

SEQ ID NO: 263355 - RNA, 13 nt, Homo sapiens
cgcaacaguuuuu

SEQ ID NO: 263356 - RNA, 16 nt, Homo sapiens
cgcaccacuguguauu

SEQ ID NO: 263357 - RNA, 18 nt, Homo sapiens
cgcagauguccuugaugc

SEQ ID NO: 263358 - RNA, 18 nt, Homo sapiens
cgccaaggcucacaugcu

SEQ ID NO: 263359 - RNA, 19 nt, Homo sapiens
cgccaaggcucacaugcuc

SEQ ID NO: 263360 - RNA, 20 nt, Homo sapiens
cgccacccucccacugccaa

SEQ ID NO: 263361 - RNA, 19 nt, Homo sapiens
cgccagauucuuuccugag

SEQ ID NO: 263362 - RNA, 23 nt, Homo sapiens
cgccagauucuuuccugaggcug

SEQ ID NO: 263363 - RNA, 21 nt, Homo sapiens
cgcccagucuggaaugcagug

SEQ ID NO: 263364 - RNA, 20 nt, Homo sapiens
cgccccccccuccccaugca

SEQ ID NO: 263365 - RNA, 15 nt, Homo sapiens
cgcccuguguccaca

SEQ ID NO: 263366 - RNA, 19 nt, Homo sapiens
cgcccuguguccacaguga

SEQ ID NO: 263367 - RNA, 11 nt, Homo sapiens
cgcgugcacac

SEQ ID NO: 263368 - RNA, 17 nt, Homo sapiens
cgcuaauucaaggaauu

SEQ ID NO: 263369 - RNA, 17 nt, Homo sapiens
cgcucagcacacaugca

SEQ ID NO: 263370 - RNA, 13 nt, Homo sapiens
cgcucccuuucag

SEQ ID NO: 263371 - RNA, 22 nt, Homo sapiens
cgcugagcgaggagaugcuccu

SEQ ID NO: 263372 - RNA, 23 nt, Homo sapiens
cgcugugguuucucguacuuuca

SEQ ID NO: 263373 - RNA, 22 nt, Homo sapiens
cgcuuuugcuggucacugccau

SEQ ID NO: 263374 - RNA, 11 nt, Homo sapiens
cggaagccaaa

SEQ ID NO: 263375 - RNA, 13 nt, Homo sapiens
cggaaguuuucaa

SEQ ID NO: 263376 - RNA, 13 nt, Homo sapiens
cggaguugugcac

SEQ ID NO: 263377 - RNA, 21 nt, Homo sapiens
cggccccugcugguucagggu

SEQ ID NO: 263378 - RNA, 16 nt, Homo sapiens
cggccuccauccugag

SEQ ID NO: 263379 - RNA, 11 nt, Homo sapiens
cggcugaccau

SEQ ID NO: 263380 - RNA, 18 nt, Homo sapiens
cgggagccugacccucau

SEQ ID NO: 263381 - RNA, 22 nt, Homo sapiens
cgggaggauguucugggacaca

SEQ ID NO: 263382 - RNA, 15 nt, Homo sapiens
cggggcuccacugaa

SEQ ID NO: 263383 - RNA, 16 nt, Homo sapiens
cgguggacccagggau

SEQ ID NO: 263384 - RNA, 23 nt, Homo sapiens
cguaacagauuuuguuggcauag

SEQ ID NO: 263385 - RNA, 14 nt, Homo sapiens
cgucagcugggaca

SEQ ID NO: 263386 - RNA, 16 nt, Homo sapiens
cgucaugcuuguguua

SEQ ID NO: 263387 - RNA, 20 nt, Homo sapiens
cguccagcuggaagggucaa

SEQ ID NO: 263388 - RNA, 20 nt, Homo sapiens
cguccagggagcauuuuccu

SEQ ID NO: 263389 - RNA, 17 nt, Homo sapiens
cgucccuccacguucac

SEQ ID NO: 263390 - RNA, 16 nt, Homo sapiens
cgucgguccuggugcc

SEQ ID NO: 263391 - RNA, 17 nt, Homo sapiens
cgucuaagucaugagcu

SEQ ID NO: 263392 - RNA, 15 nt, Homo sapiens
cgugaggaugggaag

SEQ ID NO: 263393 - RNA, 16 nt, Homo sapiens
cgugauuuugcuguag

SEQ ID NO: 263394 - RNA, 16 nt, Homo sapiens
cgugcacacaccagag

SEQ ID NO: 263395 - RNA, 17 nt, Homo sapiens
cgugcacacaccagagc

SEQ ID NO: 263396 - RNA, 13 nt, Homo sapiens
cgugggcucccug

SEQ ID NO: 263397 - RNA, 21 nt, Homo sapiens
cgugggucuucagggggccag

SEQ ID NO: 263398 - RNA, 11 nt, Homo sapiens
cgugugcccac

SEQ ID NO: 263399 - RNA, 22 nt, Homo sapiens
cgugugcccacugaacaugcuc

SEQ ID NO: 263400 - RNA, 16 nt, Homo sapiens
cguguggcccaagacc

SEQ ID NO: 263401 - RNA, 14 nt, Homo sapiens
cguguuaugacucc

SEQ ID NO: 263402 - RNA, 21 nt, Homo sapiens
cguucccggguagccacugga

SEQ ID NO: 263403 - RNA, 14 nt, Homo sapiens
cguugugcauuugg

SEQ ID NO: 263404 - RNA, 22 nt, Homo sapiens
cguuguuuugguuguacuuugg

SEQ ID NO: 263405 - RNA, 13 nt, Homo sapiens
cguuuaaucacau

SEQ ID NO: 263406 - RNA, 19 nt, Homo sapiens
cguuucuaugacacaugca

SEQ ID NO: 263407 - RNA, 16 nt, Homo sapiens
cguuucugguggucug

SEQ ID NO: 263408 - RNA, 17 nt, Homo sapiens
cuaaaaggaaaucucac

SEQ ID NO: 263409 - RNA, 16 nt, Homo sapiens
cuaaaagguaugcaau

SEQ ID NO: 263410 - RNA, 21 nt, Homo sapiens
cuaaaaggugaccaaugaugg

SEQ ID NO: 263411 - RNA, 17 nt, Homo sapiens
cuaaaaguuaauagggu

SEQ ID NO: 263412 - RNA, 14 nt, Homo sapiens
cuaaaauguucuaa

SEQ ID NO: 263413 - RNA, 22 nt, Homo sapiens
cuaaaauuguaucaaaugugac

SEQ ID NO: 263414 - RNA, 22 nt, Homo sapiens
cuaaacugcugcaaaaguucuc

SEQ ID NO: 263415 - RNA, 22 nt, Homo sapiens
cuaaagaagguuucagaaagaa

SEQ ID NO: 263416 - RNA, 12 nt, Homo sapiens
cuaaaguagacu

SEQ ID NO: 263417 - RNA, 13 nt, Homo sapiens
cuaaauaugagcc

SEQ ID NO: 263418 - RNA, 16 nt, Homo sapiens
cuaaauaugagcccag

SEQ ID NO: 263419 - RNA, 13 nt, Homo sapiens
cuaaauucaggug

SEQ ID NO: 263420 - RNA, 17 nt, Homo sapiens
cuaaauuugaaauauaa

SEQ ID NO: 263421 - RNA, 22 nt, Homo sapiens
cuaaauuuugugauucuauaaa

SEQ ID NO: 263422 - RNA, 17 nt, Homo sapiens
cuaacagcaacacaaag

SEQ ID NO: 263423 - RNA, 22 nt, Homo sapiens
cuaacagcccuccucugcacuc

SEQ ID NO: 263424 - RNA, 15 nt, Homo sapiens
cuaacaggccaaaga

SEQ ID NO: 263425 - RNA, 17 nt, Homo sapiens
cuaacuagcauuguaaa

SEQ ID NO: 263426 - RNA, 20 nt, Homo sapiens
ccuuagcagggaaacagcua

SEQ ID NO: 263427 - RNA, 23 nt, Homo sapiens
ccuuaguguuuggguauauucau

SEQ ID NO: 263428 - RNA, 11 nt, Homo sapiens
ccuucacuuac

SEQ ID NO: 263429 - RNA, 22 nt, Homo sapiens
ccuucaugaucaucacaaucau

SEQ ID NO: 263430 - RNA, 11 nt, Homo sapiens
ccuucaugucu

SEQ ID NO: 263431 - RNA, 15 nt, Homo sapiens
ccuuccacggacuca

SEQ ID NO: 263432 - RNA, 24 nt, Homo sapiens
ccuuccuaugcuguucacuggaca

SEQ ID NO: 263433 - RNA, 15 nt, Homo sapiens
ccuucuauacuuucu

SEQ ID NO: 263434 - RNA, 15 nt, Homo sapiens
ccuucuccagacaaa

SEQ ID NO: 263435 - RNA, 19 nt, Homo sapiens
ccuucuccauccacauggg

SEQ ID NO: 263436 - RNA, 16 nt, Homo sapiens
ccuucuuacaaugcau

SEQ ID NO: 263437 - RNA, 22 nt, Homo sapiens
ccuucuuacuuaaccugaagcu

SEQ ID NO: 263438 - RNA, 18 nt, Homo sapiens
ccuucuuuuuguucuuca

SEQ ID NO: 263439 - RNA, 19 nt, Homo sapiens
ccuugaaaacacuguucuc

SEQ ID NO: 263440 - RNA, 13 nt, Homo sapiens
ccuugaaggguuc

SEQ ID NO: 263441 - RNA, 14 nt, Homo sapiens
ccuugaugcucaua

SEQ ID NO: 263442 - RNA, 13 nt, Homo sapiens
cuaaguaaauaca

SEQ ID NO: 263443 - RNA, 15 nt, Homo sapiens
cuaaguauuaaaaca

SEQ ID NO: 263444 - RNA, 17 nt, Homo sapiens
cuaaguguaccagagaa

SEQ ID NO: 263445 - RNA, 19 nt, Homo sapiens
cuaauacagacuaugucac

SEQ ID NO: 263446 - RNA, 17 nt, Homo sapiens
cuaauauguaacaagcc

SEQ ID NO: 263447 - RNA, 16 nt, Homo sapiens
cuaaucagcauucuca

SEQ ID NO: 263448 - RNA, 17 nt, Homo sapiens
cuaaucagcauucucac

SEQ ID NO: 263449 - RNA, 21 nt, Homo sapiens
cuaauccucuuuuucuagucu

SEQ ID NO: 263450 - RNA, 23 nt, Homo sapiens
cuaaugccugcggaguugugcac

SEQ ID NO: 263451 - RNA, 12 nt, Homo sapiens
cuaaugggacac

SEQ ID NO: 263452 - RNA, 17 nt, Homo sapiens
cuaauuagagcagauga

SEQ ID NO: 263453 - RNA, 17 nt, Homo sapiens
cuaauucacagugcucu

SEQ ID NO: 263454 - RNA, 17 nt, Homo sapiens
cuaauuccacacccuca

SEQ ID NO: 263455 - RNA, 14 nt, Homo sapiens
cuacaauuugccau

SEQ ID NO: 263456 - RNA, 22 nt, Homo sapiens
cuacacauucaauaagcaucaa

SEQ ID NO: 263457 - RNA, 16 nt, Homo sapiens
cuacacucacaaucau

SEQ ID NO: 263458 - RNA, 19 nt, Homo sapiens
cuacacucaccugcacuaa

SEQ ID NO: 263459 - RNA, 19 nt, Homo sapiens
cuacagagcagacaguuaa

SEQ ID NO: 263460 - RNA, 22 nt, Homo sapiens
cuacagagcuucccugacucau

SEQ ID NO: 263461 - RNA, 16 nt, Homo sapiens
cuacagguaugugcca

SEQ ID NO: 263462 - RNA, 14 nt, Homo sapiens
cuaccaaaacaguu

SEQ ID NO: 263463 - RNA, 9 nt, Homo sapiens
cuaccccag

SEQ ID NO: 263464 - RNA, 20 nt, Homo sapiens
cuacccccugugccuuguca

SEQ ID NO: 263465 - RNA, 21 nt, Homo sapiens
cuacccccugugccuugucac

SEQ ID NO: 263466 - RNA, 19 nt, Homo sapiens
cuacccgagguuugcaaau

SEQ ID NO: 263467 - RNA, 14 nt, Homo sapiens
cuacccugcacauu

SEQ ID NO: 263468 - RNA, 23 nt, Homo sapiens
cuacccugcacauuguuaugcac

SEQ ID NO: 263469 - RNA, 16 nt, Homo sapiens
cuacccuggcacuaua

SEQ ID NO: 263470 - RNA, 23 nt, Homo sapiens
cuaccgagucucuucuccacugg

SEQ ID NO: 263471 - RNA, 22 nt, Homo sapiens
cuaccuugguucccccacugau

SEQ ID NO: 263472 - RNA, 19 nt, Homo sapiens
cuacgguuccauguucacc

SEQ ID NO: 263473 - RNA, 20 nt, Homo sapiens
cuacgugugccccucucaug

SEQ ID NO: 263474 - RNA, 12 nt, Homo sapiens
cuacucagggaa

SEQ ID NO: 263475 - RNA, 20 nt, Homo sapiens
cuacuccuuguaaagacugu

SEQ ID NO: 263476 - RNA, 15 nt, Homo sapiens
cuacucgaguuacag

SEQ ID NO: 263477 - RNA, 17 nt, Homo sapiens
cuacucgaguuacagac

SEQ ID NO: 263478 - RNA, 17 nt, Homo sapiens
cuacugcagcaccucca

SEQ ID NO: 263479 - RNA, 18 nt, Homo sapiens
cuacugcagcaccuccag

SEQ ID NO: 263480 - RNA, 18 nt, Homo sapiens
cuacuguaauuugugaua

SEQ ID NO: 263481 - RNA, 17 nt, Homo sapiens
cuagaaacacacauuuc

SEQ ID NO: 263482 - RNA, 21 nt, Homo sapiens
cuagaaacacacauuucuuug

SEQ ID NO: 263483 - RNA, 18 nt, Homo sapiens
cuagaaagagaaacaguu

SEQ ID NO: 263484 - RNA, 13 nt, Homo sapiens
cuagaagacuguc

SEQ ID NO: 263485 - RNA, 13 nt, Homo sapiens
cuagaaggacuca

SEQ ID NO: 263486 - RNA, 22 nt, Homo sapiens
cuagaguucauggauauguuau

SEQ ID NO: 263487 - RNA, 13 nt, Homo sapiens
cuagauacuguau

SEQ ID NO: 263488 - RNA, 17 nt, Homo sapiens
cuagaugauugauuacc

SEQ ID NO: 263489 - RNA, 20 nt, Homo sapiens
cuagaugauugauuaccaag

SEQ ID NO: 263490 - RNA, 16 nt, Homo sapiens
cuagauuuaugaauac

SEQ ID NO: 263491 - RNA, 19 nt, Homo sapiens
cuagcaacauuuguuuuag

SEQ ID NO: 263492 - RNA, 20 nt, Homo sapiens
cuagcacuuugggaggccaa

SEQ ID NO: 263493 - RNA, 14 nt, Homo sapiens
cuagcagaaaucua

SEQ ID NO: 263494 - RNA, 15 nt, Homo sapiens
cuagcaguaugugug

SEQ ID NO: 263495 - RNA, 12 nt, Homo sapiens
cuagcauuguaa

SEQ ID NO: 263496 - RNA, 14 nt, Homo sapiens
cuagccgaccucag

SEQ ID NO: 263497 - RNA, 20 nt, Homo sapiens
cuaggagcugguguggccaa

SEQ ID NO: 263498 - RNA, 21 nt, Homo sapiens
cuaggagcugguguggccaag

SEQ ID NO: 263499 - RNA, 22 nt, Homo sapiens
cuaggcuaggguggggagagac

SEQ ID NO: 263500 - RNA, 14 nt, Homo sapiens
cuagggaucccuca

SEQ ID NO: 263501 - RNA, 15 nt, Homo sapiens
cuagggaucccucau

SEQ ID NO: 263502 - RNA, 16 nt, Homo sapiens
cuagggccaagcccag

SEQ ID NO: 263503 - RNA, 15 nt, Homo sapiens
cuagguaggggccca

SEQ ID NO: 263504 - RNA, 16 nt, Homo sapiens
cuagguucgaauccag

SEQ ID NO: 263505 - RNA, 20 nt, Homo sapiens
cuagguucuaaaaauuguga

SEQ ID NO: 263506 - RNA, 23 nt, Homo sapiens
cuagguucuaaaaauugugauca

SEQ ID NO: 263507 - RNA, 15 nt, Homo sapiens
cuaguaaaagccauc

SEQ ID NO: 263508 - RNA, 13 nt, Homo sapiens
cuaguucugccag

SEQ ID NO: 263509 - RNA, 23 nt, Homo sapiens
cuaguuguaauuuuuuuguggga

SEQ ID NO: 263510 - RNA, 16 nt, Homo sapiens
cuaguugucacuuucc

SEQ ID NO: 263511 - RNA, 13 nt, Homo sapiens
cuauaaaacacau

SEQ ID NO: 263512 - RNA, 21 nt, Homo sapiens
cuauaaaacacaucaucaaua

SEQ ID NO: 263513 - RNA, 20 nt, Homo sapiens
cuauaaaaugagaagucuca

SEQ ID NO: 263514 - RNA, 16 nt, Homo sapiens
cuauaacuauguugau

SEQ ID NO: 263515 - RNA, 21 nt, Homo sapiens
cuauaauuuaccuaagauuac

SEQ ID NO: 263516 - RNA, 15 nt, Homo sapiens
cuauacuuucucaca

SEQ ID NO: 263517 - RNA, 23 nt, Homo sapiens
cuauagccuaggugacagaguga

SEQ ID NO: 263518 - RNA, 14 nt, Homo sapiens
cuaucgcaccacug

SEQ ID NO: 263519 - RNA, 15 nt, Homo sapiens
cuaucgcaccacugu

SEQ ID NO: 263520 - RNA, 14 nt, Homo sapiens
cuaucuacaaugug

SEQ ID NO: 263521 - RNA, 13 nt, Homo sapiens
cuaugaaauauca

SEQ ID NO: 263522 - RNA, 16 nt, Homo sapiens
cuaugaggcaaccaca

SEQ ID NO: 263523 - RNA, 21 nt, Homo sapiens
cuaugauuguccguaggccca

SEQ ID NO: 263524 - RNA, 16 nt, Homo sapiens
cuauggcacccaugca

SEQ ID NO: 263525 - RNA, 17 nt, Homo sapiens
cuauggcucuacuuuca

SEQ ID NO: 263526 - RNA, 18 nt, Homo sapiens
cuauggcucuacuuucag

SEQ ID NO: 263527 - RNA, 11 nt, Homo sapiens
cuaugguucuc

SEQ ID NO: 263528 - RNA, 14 nt, Homo sapiens
cuauguaacaugua

SEQ ID NO: 263529 - RNA, 20 nt, Homo sapiens
cuaugucacccaaugcauau

SEQ ID NO: 263530 - RNA, 15 nt, Homo sapiens
cuaugugagcacaaa

SEQ ID NO: 263531 - RNA, 21 nt, Homo sapiens
cuaugugcaugcagcaucuaa

SEQ ID NO: 263532 - RNA, 21 nt, Homo sapiens
cuaugugggugggaccacaga

SEQ ID NO: 263533 - RNA, 16 nt, Homo sapiens
cuauguguaugcagaa

SEQ ID NO: 263534 - RNA, 14 nt, Homo sapiens
cuauguuauauuga

SEQ ID NO: 263535 - RNA, 13 nt, Homo sapiens
cuauguucuuagu

SEQ ID NO: 263536 - RNA, 13 nt, Homo sapiens
cuauguugauaaa

SEQ ID NO: 263537 - RNA, 19 nt, Homo sapiens
cuauguugcccaggcaggu

SEQ ID NO: 263538 - RNA, 22 nt, Homo sapiens
cuauguuuuuguucaaagccag

SEQ ID NO: 263539 - RNA, 13 nt, Homo sapiens
cuauuauauucau

SEQ ID NO: 263540 - RNA, 14 nt, Homo sapiens
cuauuauauucauu

SEQ ID NO: 263541 - RNA, 15 nt, Homo sapiens
cuauuauauucauuc

SEQ ID NO: 263542 - RNA, 12 nt, Homo sapiens
cuauuaucucaa

SEQ ID NO: 263543 - RNA, 18 nt, Homo sapiens
cuauucaaucuuuacaca

SEQ ID NO: 263544 - RNA, 16 nt, Homo sapiens
cuauucaguggcuaac

SEQ ID NO: 263545 - RNA, 15 nt, Homo sapiens
cuauucaguuuucag

SEQ ID NO: 263546 - RNA, 17 nt, Homo sapiens
cuauugaccgagcacau

SEQ ID NO: 263547 - RNA, 22 nt, Homo sapiens
cuauugaccgagcacauaccau

SEQ ID NO: 263548 - RNA, 17 nt, Homo sapiens
cuauugcuggcaaagac

SEQ ID NO: 263549 - RNA, 16 nt, Homo sapiens
cuauuguuucuuucaa

SEQ ID NO: 263550 - RNA, 13 nt, Homo sapiens
cuauuuaugcaac

SEQ ID NO: 263551 - RNA, 21 nt, Homo sapiens
cuauuuauuugugagacugua

SEQ ID NO: 263552 - RNA, 13 nt, Homo sapiens
cuauuugcacacg

SEQ ID NO: 263553 - RNA, 19 nt, Homo sapiens
cuauuuuauaaaacaaaua

SEQ ID NO: 263554 - RNA, 18 nt, Homo sapiens
cuauuuuuuguaaugugu

SEQ ID NO: 263555 - RNA, 19 nt, Homo sapiens
cuauuuuuuuucuguuaua

SEQ ID NO: 263556 - RNA, 13 nt, Homo sapiens
cucaaacuaacag

SEQ ID NO: 263557 - RNA, 19 nt, Homo sapiens
cucaaacucuuaaaaccca

SEQ ID NO: 263558 - RNA, 22 nt, Homo sapiens
cucaaacucuugaccucaggug

SEQ ID NO: 263559 - RNA, 14 nt, Homo sapiens
cucaaagaaagugu

SEQ ID NO: 263560 - RNA, 18 nt, Homo sapiens
cucaaagaaauuuccacu

SEQ ID NO: 263561 - RNA, 15 nt, Homo sapiens
cucaaauaacuaaaa

SEQ ID NO: 263562 - RNA, 14 nt, Homo sapiens
cucaaccuauggua

SEQ ID NO: 263563 - RNA, 18 nt, Homo sapiens
cucaacguugcuccccau

SEQ ID NO: 263564 - RNA, 16 nt, Homo sapiens
cucaagaugaaggcaa

SEQ ID NO: 263565 - RNA, 16 nt, Homo sapiens
cucaagggaugucuca

SEQ ID NO: 263566 - RNA, 22 nt, Homo sapiens
cucaagugauucuccugccuca

SEQ ID NO: 263567 - RNA, 20 nt, Homo sapiens
cucaaguuucuucaaucuga

SEQ ID NO: 263568 - RNA, 16 nt, Homo sapiens
cucaauaaacauuuca

SEQ ID NO: 263569 - RNA, 17 nt, Homo sapiens
cucaauugucauugaua

SEQ ID NO: 263570 - RNA, 10 nt, Homo sapiens
cucacaaaag

SEQ ID NO: 263571 - RNA, 18 nt, Homo sapiens
cuaaacuuucacacccca

SEQ ID NO: 263572 - RNA, 15 nt, Homo sapiens
cuaaagaagguuuca

SEQ ID NO: 263573 - RNA, 15 nt, Homo sapiens
cuaaagcaauaugca

SEQ ID NO: 263574 - RNA, 13 nt, Homo sapiens
cuaaagcugccag

SEQ ID NO: 263575 - RNA, 17 nt, Homo sapiens
cuaaagugcugggauua

SEQ ID NO: 263576 - RNA, 21 nt, Homo sapiens
cuaaaguguauuuuuuuacua

SEQ ID NO: 263577 - RNA, 18 nt, Homo sapiens
cuaaauccuuuacuguua

SEQ ID NO: 263578 - RNA, 21 nt, Homo sapiens
cuaaaugaaaaucgugacaac

SEQ ID NO: 263579 - RNA, 18 nt, Homo sapiens
cuaaaugaauguuuacac

SEQ ID NO: 263580 - RNA, 22 nt, Homo sapiens
cuaaaugugaaugaugauccua

SEQ ID NO: 263581 - RNA, 23 nt, Homo sapiens
cuaaauuauuuacugcaaaaaga

SEQ ID NO: 263582 - RNA, 19 nt, Homo sapiens
cuaaauuuugugauucuau

SEQ ID NO: 263583 - RNA, 22 nt, Homo sapiens
cuaacaaguagcacccuggauu

SEQ ID NO: 263584 - RNA, 23 nt, Homo sapiens
cuaacacccagucuguuccccau

SEQ ID NO: 263585 - RNA, 21 nt, Homo sapiens
cuaacaggauuagacagucaa

SEQ ID NO: 263586 - RNA, 15 nt, Homo sapiens
cuaacaguaguugca

SEQ ID NO: 263587 - RNA, 16 nt, Homo sapiens
cuaacaguaguugcaa

SEQ ID NO: 263588 - RNA, 22 nt, Homo sapiens
cuaaccugccgagaguccauca

SEQ ID NO: 263589 - RNA, 15 nt, Homo sapiens
cuaacuagcauugua

SEQ ID NO: 263590 - RNA, 17 nt, Homo sapiens
cuaacuucaaggcccau

SEQ ID NO: 263591 - RNA, 18 nt, Homo sapiens
cuaacuuuccuucauuca

SEQ ID NO: 263592 - RNA, 21 nt, Homo sapiens
cuaagaagcagauaauggugu

SEQ ID NO: 263593 - RNA, 16 nt, Homo sapiens
cuaagagaacaaugug

SEQ ID NO: 263594 - RNA, 23 nt, Homo sapiens
cuaagagggagggagggcuccag

SEQ ID NO: 263595 - RNA, 13 nt, Homo sapiens
cuaagaugaucau

SEQ ID NO: 263596 - RNA, 20 nt, Homo sapiens
cuaagcacgggccauaugaa

SEQ ID NO: 263597 - RNA, 19 nt, Homo sapiens
cucagaaucgcuccaccuu

SEQ ID NO: 263598 - RNA, 18 nt, Homo sapiens
cucagaggguguccugca

SEQ ID NO: 263599 - RNA, 23 nt, Homo sapiens
cucagaucauuaucagccugugc

SEQ ID NO: 263600 - RNA, 14 nt, Homo sapiens
cucagaugcacaug

SEQ ID NO: 263601 - RNA, 19 nt, Homo sapiens
cucagaugcacaugagcug

SEQ ID NO: 263602 - RNA, 15 nt, Homo sapiens
cucagcacacaugca

SEQ ID NO: 263603 - RNA, 17 nt, Homo sapiens
cucagcacacaugcauc

SEQ ID NO: 263604 - RNA, 21 nt, Homo sapiens
cucagcagccucacugcaucu

SEQ ID NO: 263605 - RNA, 14 nt, Homo sapiens
cucagcccccugac

SEQ ID NO: 263606 - RNA, 18 nt, Homo sapiens
cucagccucccaaagugc

SEQ ID NO: 263607 - RNA, 15 nt, Homo sapiens
cucagcuguccugca

SEQ ID NO: 263608 - RNA, 18 nt, Homo sapiens
cucagcuguccugcagca

SEQ ID NO: 263609 - RNA, 16 nt, Homo sapiens
cucaggaaccgaggca

SEQ ID NO: 263610 - RNA, 15 nt, Homo sapiens
cucaggcagaucuca

SEQ ID NO: 263611 - RNA, 23 nt, Homo sapiens
cucagucaauaaauuugcaaauu

SEQ ID NO: 263612 - RNA, 18 nt, Homo sapiens
cucagucucugagcagug

SEQ ID NO: 263613 - RNA, 11 nt, Homo sapiens
cucagugccac

SEQ ID NO: 263614 - RNA, 17 nt, Homo sapiens
cucauacaucaagccaa

SEQ ID NO: 263615 - RNA, 14 nt, Homo sapiens
cucauacucaccuc

SEQ ID NO: 263616 - RNA, 13 nt, Homo sapiens
cucauaguauggu

SEQ ID NO: 263617 - RNA, 20 nt, Homo sapiens
cucauaugauugugcacaua

SEQ ID NO: 263618 - RNA, 22 nt, Homo sapiens
cucauauuucuuuucuaucuca

SEQ ID NO: 263619 - RNA, 19 nt, Homo sapiens
cucaucacugcuccuguca

SEQ ID NO: 263620 - RNA, 23 nt, Homo sapiens
cucaucaggccauugucccugaa

SEQ ID NO: 263621 - RNA, 14 nt, Homo sapiens
cucaucauuccuug

SEQ ID NO: 263622 - RNA, 15 nt, Homo sapiens
cucauccucauaccc

SEQ ID NO: 263623 - RNA, 17 nt, Homo sapiens
cucaucuucacagauug

SEQ ID NO: 263624 - RNA, 22 nt, Homo sapiens
cucaugaaggagaggauuuggc

SEQ ID NO: 263625 - RNA, 17 nt, Homo sapiens
cucaugaugcuacccga

SEQ ID NO: 263626 - RNA, 11 nt, Homo sapiens
cucaugcugcc

SEQ ID NO: 263627 - RNA, 18 nt, Homo sapiens
cucauuaccuugugcuaa

SEQ ID NO: 263628 - RNA, 24 nt, Homo sapiens
cucauucagggauagcacugagca

SEQ ID NO: 263629 - RNA, 15 nt, Homo sapiens
cucauugcuucacaa

SEQ ID NO: 263630 - RNA, 19 nt, Homo sapiens
cucauuugucacacacuuu

SEQ ID NO: 263631 - RNA, 14 nt, Homo sapiens
cucauuuuaacuca

SEQ ID NO: 263632 - RNA, 13 nt, Homo sapiens
cuccaaacugaag

SEQ ID NO: 263633 - RNA, 18 nt, Homo sapiens
cuccaagaccuucuccuu

SEQ ID NO: 263634 - RNA, 16 nt, Homo sapiens
cuccaauuaaggauuu

SEQ ID NO: 263635 - RNA, 20 nt, Homo sapiens
cuccaccccacaacccaaaa

SEQ ID NO: 263636 - RNA, 23 nt, Homo sapiens
cuccacucaugugacucuuucca

SEQ ID NO: 263637 - RNA, 16 nt, Homo sapiens
cuccacugccuucgau

SEQ ID NO: 263638 - RNA, 16 nt, Homo sapiens
cuccacuuggucugug

SEQ ID NO: 263639 - RNA, 19 nt, Homo sapiens
cuccacuuggucugugaga

SEQ ID NO: 263640 - RNA, 19 nt, Homo sapiens
cuccagaaagcucaucuca

SEQ ID NO: 263641 - RNA, 17 nt, Homo sapiens
cuccagaccauucagga

SEQ ID NO: 263642 - RNA, 11 nt, Homo sapiens
cuccagaguug

SEQ ID NO: 263643 - RNA, 14 nt, Homo sapiens
cuccagcacccaga

SEQ ID NO: 263644 - RNA, 22 nt, Homo sapiens
cuccagcuagcaaaauuacuac

SEQ ID NO: 263645 - RNA, 22 nt, Homo sapiens
cuccagcucaccagccccagug

SEQ ID NO: 263646 - RNA, 22 nt, Homo sapiens
cuccaggcugucuuucacugaa

SEQ ID NO: 263647 - RNA, 20 nt, Homo sapiens
cuccaguuuauagaccagaa

SEQ ID NO: 263648 - RNA, 16 nt, Homo sapiens
cuccaucgcaguguuc

SEQ ID NO: 263649 - RNA, 17 nt, Homo sapiens
cuccaugagugcagcuc

SEQ ID NO: 263650 - RNA, 22 nt, Homo sapiens
cuccauguaccuuguguacuuu

SEQ ID NO: 263651 - RNA, 14 nt, Homo sapiens
cuccauguuugaug

SEQ ID NO: 263652 - RNA, 16 nt, Homo sapiens
cuccauguuugaugua

SEQ ID NO: 263653 - RNA, 18 nt, Homo sapiens
cuccauugguguugacau

SEQ ID NO: 263654 - RNA, 21 nt, Homo sapiens
cuccauuuagaaaauguucac

SEQ ID NO: 263655 - RNA, 19 nt, Homo sapiens
cucccaaagugcugggauu

SEQ ID NO: 263656 - RNA, 19 nt, Homo sapiens
cucccaacaagugcucuuu

SEQ ID NO: 263657 - RNA, 16 nt, Homo sapiens
cucccaagacugcucc

SEQ ID NO: 263658 - RNA, 14 nt, Homo sapiens
cucccacaaaggag

SEQ ID NO: 263659 - RNA, 17 nt, Homo sapiens
cucccagauaaugugaa

SEQ ID NO: 263660 - RNA, 15 nt, Homo sapiens
cuccccacugcucau

SEQ ID NO: 263661 - RNA, 12 nt, Homo sapiens
cuccccauuugc

SEQ ID NO: 263662 - RNA, 19 nt, Homo sapiens
cuccccgggcagcagagag

SEQ ID NO: 263663 - RNA, 23 nt, Homo sapiens
cuccccucuccugcgugugccca

SEQ ID NO: 263664 - RNA, 20 nt, Homo sapiens
cuccccuguucauucugcau

SEQ ID NO: 263665 - RNA, 17 nt, Homo sapiens
cuccccuucacucccac

SEQ ID NO: 263666 - RNA, 17 nt, Homo sapiens
cucccugaaguaagcaa

SEQ ID NO: 263667 - RNA, 19 nt, Homo sapiens
cucccugaaguaagcaaag

SEQ ID NO: 263668 - RNA, 22 nt, Homo sapiens
cucccuuucagguuuacuaugu

SEQ ID NO: 263669 - RNA, 20 nt, Homo sapiens
cuccgagaggugggccaguc

SEQ ID NO: 263670 - RNA, 20 nt, Homo sapiens
cuccgucuaagucaugagcu

SEQ ID NO: 263671 - RNA, 12 nt, Homo sapiens
cuccuagccuug

SEQ ID NO: 263672 - RNA, 15 nt, Homo sapiens
cuccucgagauccca

SEQ ID NO: 263673 - RNA, 17 nt, Homo sapiens
cuccucgagaucccaac

SEQ ID NO: 263674 - RNA, 19 nt, Homo sapiens
cuccucuacaauuugccau

SEQ ID NO: 263675 - RNA, 12 nt, Homo sapiens
cuccucugcacu

SEQ ID NO: 263676 - RNA, 15 nt, Homo sapiens
cuccugaagccacag

SEQ ID NO: 263677 - RNA, 20 nt, Homo sapiens
cuccugaccucaaguaaucc

SEQ ID NO: 263678 - RNA, 18 nt, Homo sapiens
cuccugccccaugcugcc

SEQ ID NO: 263679 - RNA, 16 nt, Homo sapiens
cuccugcgugugccca

SEQ ID NO: 263680 - RNA, 17 nt, Homo sapiens
cuccuggaucuaugugu

SEQ ID NO: 263681 - RNA, 16 nt, Homo sapiens
cuccuggcccacugca

SEQ ID NO: 263682 - RNA, 18 nt, Homo sapiens
cuccugggcuaagugauc

SEQ ID NO: 263683 - RNA, 13 nt, Homo sapiens
cuccugggcucag

SEQ ID NO: 263684 - RNA, 19 nt, Homo sapiens
cuccugguguggaagagcu

SEQ ID NO: 263685 - RNA, 18 nt, Homo sapiens
cuccugugucuugcaaug

SEQ ID NO: 263686 - RNA, 15 nt, Homo sapiens
cuccuguucgccucc

SEQ ID NO: 263687 - RNA, 23 nt, Homo sapiens
cuccuugccucugcucugugcac

SEQ ID NO: 263688 - RNA, 13 nt, Homo sapiens
cuccuugucacag

SEQ ID NO: 263689 - RNA, 22 nt, Homo sapiens
cuccuugucacagaaucuccau

SEQ ID NO: 263690 - RNA, 13 nt, Homo sapiens
cuccuuguguuac

SEQ ID NO: 263691 - RNA, 16 nt, Homo sapiens
cuccuuugagucuuug

SEQ ID NO: 263692 - RNA, 17 nt, Homo sapiens
cucgaaucucugugccu

SEQ ID NO: 263693 - RNA, 13 nt, Homo sapiens
cucgagaucccaa

SEQ ID NO: 263694 - RNA, 16 nt, Homo sapiens
cucgagcaguccugcc

SEQ ID NO: 263695 - RNA, 19 nt, Homo sapiens
cucgagguuucucaaagaa

SEQ ID NO: 263696 - RNA, 17 nt, Homo sapiens
cucgcgacaaugcaaac

SEQ ID NO: 263697 - RNA, 17 nt, Homo sapiens
cucgcugugguuucucg

SEQ ID NO: 263698 - RNA, 17 nt, Homo sapiens
cucgcuuuguugcccag

SEQ ID NO: 263699 - RNA, 19 nt, Homo sapiens
cucguacuuucacaucucu

SEQ ID NO: 263700 - RNA, 19 nt, Homo sapiens
cucgugguaggacuguaga

SEQ ID NO: 263701 - RNA, 20 nt, Homo sapiens
cucgugguaggacuguagaa

SEQ ID NO: 263702 - RNA, 12 nt, Homo sapiens
cucuaacuucaa

SEQ ID NO: 263703 - RNA, 16 nt, Homo sapiens
cucuaagggaccucaa

SEQ ID NO: 263704 - RNA, 18 nt, Homo sapiens
cucuaauucacagugcuc

SEQ ID NO: 263705 - RNA, 12 nt, Homo sapiens
cucuacaaaaag

SEQ ID NO: 263706 - RNA, 13 nt, Homo sapiens
cucuacaaaaagc

SEQ ID NO: 263707 - RNA, 17 nt, Homo sapiens
cucuaccugcacacugu

SEQ ID NO: 263708 - RNA, 21 nt, Homo sapiens
cucuacucuagggaaaaacca

SEQ ID NO: 263709 - RNA, 21 nt, Homo sapiens
cucuacugaaaguacaaaaau

SEQ ID NO: 263710 - RNA, 15 nt, Homo sapiens
cucuacuuaauccaa

SEQ ID NO: 263711 - RNA, 12 nt, Homo sapiens
cucuagcucucu

SEQ ID NO: 263712 - RNA, 21 nt, Homo sapiens
cucuagguacgaugacagugu

SEQ ID NO: 263713 - RNA, 22 nt, Homo sapiens
cucuagguacgaugacaguguu

SEQ ID NO: 263714 - RNA, 16 nt, Homo sapiens
cucuauuaaaauuacu

SEQ ID NO: 263715 - RNA, 16 nt, Homo sapiens
cucacacaugagaucu

SEQ ID NO: 263716 - RNA, 19 nt, Homo sapiens
cucacaccuguaaucccaa

SEQ ID NO: 263717 - RNA, 19 nt, Homo sapiens
cucacaccuguaaucccag

SEQ ID NO: 263718 - RNA, 18 nt, Homo sapiens
cucacacgcugccuccuc

SEQ ID NO: 263719 - RNA, 14 nt, Homo sapiens
cucacagagugcau

SEQ ID NO: 263720 - RNA, 20 nt, Homo sapiens
cucacagagugcauugugag

SEQ ID NO: 263721 - RNA, 20 nt, Homo sapiens
cucacagcaacaugugacaa

SEQ ID NO: 263722 - RNA, 17 nt, Homo sapiens
cucacauaucugucauu

SEQ ID NO: 263723 - RNA, 18 nt, Homo sapiens
cucacauccucugucuau

SEQ ID NO: 263724 - RNA, 15 nt, Homo sapiens
cucacauguggcucc

SEQ ID NO: 263725 - RNA, 17 nt, Homo sapiens
cucacauuuauucugcu

SEQ ID NO: 263726 - RNA, 19 nt, Homo sapiens
cucacauuuauucugcuca

SEQ ID NO: 263727 - RNA, 13 nt, Homo sapiens
cucaccuccuaaa

SEQ ID NO: 263728 - RNA, 12 nt, Homo sapiens
cucacgccugua

SEQ ID NO: 263729 - RNA, 21 nt, Homo sapiens
cucacgcucagcacacaugca

SEQ ID NO: 263730 - RNA, 13 nt, Homo sapiens
cucacuagacuca

SEQ ID NO: 263731 - RNA, 17 nt, Homo sapiens
cucacugcaagcacugc

SEQ ID NO: 263732 - RNA, 21 nt, Homo sapiens
cucacugcugcaaauacugua

SEQ ID NO: 263733 - RNA, 22 nt, Homo sapiens
cucacugcugcaaauacuguau

SEQ ID NO: 263734 - RNA, 17 nt, Homo sapiens
cucacuguugaauuuuc

SEQ ID NO: 263735 - RNA, 18 nt, Homo sapiens
cucacuugugcaguguug

SEQ ID NO: 263736 - RNA, 22 nt, Homo sapiens
cucagaagacacugaugggcaa

SEQ ID NO: 263737 - RNA, 17 nt, Homo sapiens
cucagagagggugggag

SEQ ID NO: 263738 - RNA, 15 nt, Homo sapiens
cucagaggguguccu

SEQ ID NO: 263739 - RNA, 15 nt, Homo sapiens
cucagaucauuauca

SEQ ID NO: 263740 - RNA, 13 nt, Homo sapiens
cucagaugcacau

SEQ ID NO: 263741 - RNA, 22 nt, Homo sapiens
cucagauuccccccaucuccau

SEQ ID NO: 263742 - RNA, 13 nt, Homo sapiens
cucagcaaaagau

SEQ ID NO: 263743 - RNA, 19 nt, Homo sapiens
cucagcacacaugcauccu

SEQ ID NO: 263744 - RNA, 18 nt, Homo sapiens
cucagcaggggaggguag

SEQ ID NO: 263745 - RNA, 16 nt, Homo sapiens
cucagcuggaucucca

SEQ ID NO: 263746 - RNA, 17 nt, Homo sapiens
cucagcuggaucuccau

SEQ ID NO: 263747 - RNA, 19 nt, Homo sapiens
cucagcuguccugcagcaa

SEQ ID NO: 263748 - RNA, 14 nt, Homo sapiens
cucagcuucuuaau

SEQ ID NO: 263749 - RNA, 18 nt, Homo sapiens
cucaggaguuugagacca

SEQ ID NO: 263750 - RNA, 16 nt, Homo sapiens
cucaggggucauucau

SEQ ID NO: 263751 - RNA, 13 nt, Homo sapiens
cucaggucagggu

SEQ ID NO: 263752 - RNA, 21 nt, Homo sapiens
cucuguauuccuagaaacuga

SEQ ID NO: 263753 - RNA, 14 nt, Homo sapiens
cucugugaccaaug

SEQ ID NO: 263754 - RNA, 18 nt, Homo sapiens
cucugugggcuccaugua

SEQ ID NO: 263755 - RNA, 14 nt, Homo sapiens
cucuguuccugucc

SEQ ID NO: 263756 - RNA, 16 nt, Homo sapiens
cucuuagaaaaaccac

SEQ ID NO: 263757 - RNA, 17 nt, Homo sapiens
cucuuauccaacaucaa

SEQ ID NO: 263758 - RNA, 16 nt, Homo sapiens
cucuucaaucucuugc

SEQ ID NO: 263759 - RNA, 20 nt, Homo sapiens
cucuuccccauaaucacuga

SEQ ID NO: 263760 - RNA, 23 nt, Homo sapiens
cucuucuccaccucccacaaagg

SEQ ID NO: 263761 - RNA, 14 nt, Homo sapiens
cucuucuccacugg

SEQ ID NO: 263762 - RNA, 19 nt, Homo sapiens
cucuugaaaucuguuaaaa

SEQ ID NO: 263763 - RNA, 13 nt, Homo sapiens
cucuugcacucaa

SEQ ID NO: 263764 - RNA, 13 nt, Homo sapiens
cucuuggguucaa

SEQ ID NO: 263765 - RNA, 20 nt, Homo sapiens
cucuuggguucaagugauuc

SEQ ID NO: 263766 - RNA, 14 nt, Homo sapiens
cucuuguacuugau

SEQ ID NO: 263767 - RNA, 18 nt, Homo sapiens
cucuuguauaugaugauc

SEQ ID NO: 263768 - RNA, 11 nt, Homo sapiens
cucuugucucc

SEQ ID NO: 263769 - RNA, 12 nt, Homo sapiens
cucuugucuccc

SEQ ID NO: 263770 - RNA, 16 nt, Homo sapiens
cucuuguugugcucuu

SEQ ID NO: 263771 - RNA, 13 nt, Homo sapiens
cucuuuaccuccu

SEQ ID NO: 263772 - RNA, 11 nt, Homo sapiens
cucuuuccacc

SEQ ID NO: 263773 - RNA, 19 nt, Homo sapiens
cucuuucccucccuuccuc

SEQ ID NO: 263774 - RNA, 11 nt, Homo sapiens
cugaaaaccaa

SEQ ID NO: 263775 - RNA, 19 nt, Homo sapiens
cugaaaaccaauguucucu

SEQ ID NO: 263776 - RNA, 17 nt, Homo sapiens
cugaaaccucuguucuc

SEQ ID NO: 263777 - RNA, 21 nt, Homo sapiens
cugaaaccucuguucucauga

SEQ ID NO: 263778 - RNA, 13 nt, Homo sapiens
cugaacacuccaa

SEQ ID NO: 263779 - RNA, 21 nt, Homo sapiens
cugaacaggccgcacaucuca

SEQ ID NO: 263780 - RNA, 21 nt, Homo sapiens
cugaacgacagucccaguucc

SEQ ID NO: 263781 - RNA, 22 nt, Homo sapiens
cugaacugcgccaucaacucca

SEQ ID NO: 263782 - RNA, 18 nt, Homo sapiens
cugaacuucagagcauga

SEQ ID NO: 263783 - RNA, 17 nt, Homo sapiens
cugaacuuuguggucga

SEQ ID NO: 263784 - RNA, 22 nt, Homo sapiens
cugaacuuuguggucgacauca

SEQ ID NO: 263785 - RNA, 20 nt, Homo sapiens
cugaagaacaguaacugcca

SEQ ID NO: 263786 - RNA, 19 nt, Homo sapiens
cugaaggagccccauuccu

SEQ ID NO: 263787 - RNA, 16 nt, Homo sapiens
cugaaguaagcaaaga

SEQ ID NO: 263788 - RNA, 17 nt, Homo sapiens
cugaaguaagcaaagac

SEQ ID NO: 263789 - RNA, 21 nt, Homo sapiens
cugaagucagaucugccuaag

SEQ ID NO: 263790 - RNA, 21 nt, Homo sapiens
cugaagucuuuguacagacaa

SEQ ID NO: 263791 - RNA, 19 nt, Homo sapiens
cugaaguucaugcucccag

SEQ ID NO: 263792 - RNA, 11 nt, Homo sapiens
cugaauaugaa

SEQ ID NO: 263793 - RNA, 16 nt, Homo sapiens
cugaaugaacaaccuc

SEQ ID NO: 263794 - RNA, 15 nt, Homo sapiens
cugaaugguuuucaa

SEQ ID NO: 263795 - RNA, 21 nt, Homo sapiens
cugacaaguuaaaaaggucua

SEQ ID NO: 263796 - RNA, 19 nt, Homo sapiens
cugacacaccaggcgcuaa

SEQ ID NO: 263797 - RNA, 18 nt, Homo sapiens
cugacagaaggacucagg

SEQ ID NO: 263798 - RNA, 21 nt, Homo sapiens
cugacagagcccuaucuaugu

SEQ ID NO: 263799 - RNA, 16 nt, Homo sapiens
cugacagggccagugc

SEQ ID NO: 263800 - RNA, 20 nt, Homo sapiens
cugacauguacgauucacuc

SEQ ID NO: 263801 - RNA, 11 nt, Homo sapiens
cugaccaaaac

SEQ ID NO: 263802 - RNA, 16 nt, Homo sapiens
cugaccaaaacaaaca

SEQ ID NO: 263803 - RNA, 15 nt, Homo sapiens
cugaccaauauugua

SEQ ID NO: 263804 - RNA, 20 nt, Homo sapiens
cugaccaauauuguacaguu

SEQ ID NO: 263805 - RNA, 21 nt, Homo sapiens
cugaccaauauuguacaguuu

SEQ ID NO: 263806 - RNA, 13 nt, Homo sapiens
cugaccagccuug

SEQ ID NO: 263807 - RNA, 13 nt, Homo sapiens
cugacccacugcu

SEQ ID NO: 263808 - RNA, 21 nt, Homo sapiens
cugacccaugcugcccuguga

SEQ ID NO: 263809 - RNA, 19 nt, Homo sapiens
cugacccuggucaccagag

SEQ ID NO: 263810 - RNA, 23 nt, Homo sapiens
cugaccguggagcuuaagccacu

SEQ ID NO: 263811 - RNA, 21 nt, Homo sapiens
cugaccuugcugauggugaca

SEQ ID NO: 263812 - RNA, 23 nt, Homo sapiens
cugacugcugugggcugcucacu

SEQ ID NO: 263813 - RNA, 16 nt, Homo sapiens
cugacuguacuccucc

SEQ ID NO: 263814 - RNA, 15 nt, Homo sapiens
cugacuuggggaaaa

SEQ ID NO: 263815 - RNA, 22 nt, Homo sapiens
cugagagaggccauucuuuccc

SEQ ID NO: 263816 - RNA, 12 nt, Homo sapiens
cugagagaucug

SEQ ID NO: 263817 - RNA, 23 nt, Homo sapiens
cugagcagguguucuucauuacc

SEQ ID NO: 263818 - RNA, 17 nt, Homo sapiens
cugagccacaggcauuu

SEQ ID NO: 263819 - RNA, 17 nt, Homo sapiens
cugagccgaucuggucu

SEQ ID NO: 263820 - RNA, 19 nt, Homo sapiens
cugagccgaucuggucucg

SEQ ID NO: 263821 - RNA, 18 nt, Homo sapiens
cugagccuggucccacga

SEQ ID NO: 263822 - RNA, 17 nt, Homo sapiens
cugagcucgguggaccc

SEQ ID NO: 263823 - RNA, 13 nt, Homo sapiens
cugagcugugcag

SEQ ID NO: 263824 - RNA, 19 nt, Homo sapiens
cugaggagccugcaacaug

SEQ ID NO: 263825 - RNA, 22 nt, Homo sapiens
cugaggagccugcaacaugcca

SEQ ID NO: 263826 - RNA, 14 nt, Homo sapiens
cugaggcaagagaa

SEQ ID NO: 263827 - RNA, 12 nt, Homo sapiens
cugaggugggag

SEQ ID NO: 263828 - RNA, 20 nt, Homo sapiens
cugaggugggaggaucucuu

SEQ ID NO: 263829 - RNA, 19 nt, Homo sapiens
cugaguacguugugcauuu

SEQ ID NO: 263830 - RNA, 19 nt, Homo sapiens
cugaguagcuggauuacag

SEQ ID NO: 263831 - RNA, 17 nt, Homo sapiens
cugaguagcugggacua

SEQ ID NO: 263832 - RNA, 22 nt, Homo sapiens
cugagucccuuagccaagcagu

SEQ ID NO: 263833 - RNA, 22 nt, Homo sapiens
cugagugcaccacuucaaguga

SEQ ID NO: 263834 - RNA, 18 nt, Homo sapiens
cugaguggcaggggacag

SEQ ID NO: 263835 - RNA, 18 nt, Homo sapiens
cugauacuuugacagugu

SEQ ID NO: 263836 - RNA, 21 nt, Homo sapiens
cugaucauccacugugccaug

SEQ ID NO: 263837 - RNA, 14 nt, Homo sapiens
cugaugcagaaaga

SEQ ID NO: 263838 - RNA, 19 nt, Homo sapiens
cugaugcagaaagaccgug

SEQ ID NO: 263839 - RNA, 14 nt, Homo sapiens
cugauggugacauu

SEQ ID NO: 263840 - RNA, 17 nt, Homo sapiens
cugauguagcuuauaca

SEQ ID NO: 263841 - RNA, 19 nt, Homo sapiens
cugauguagcuuauacaaa

SEQ ID NO: 263842 - RNA, 13 nt, Homo sapiens
cugauguggcaac

SEQ ID NO: 263843 - RNA, 21 nt, Homo sapiens
cugauucccaagcucugcucc

SEQ ID NO: 263844 - RNA, 15 nt, Homo sapiens
cugauuuaaacacau

SEQ ID NO: 263845 - RNA, 14 nt, Homo sapiens
cugcaagcacugca

SEQ ID NO: 263846 - RNA, 23 nt, Homo sapiens
cugcaauucaggccgcaagcagc

SEQ ID NO: 263847 - RNA, 21 nt, Homo sapiens
cugcacacuguccuauuauau

SEQ ID NO: 263848 - RNA, 18 nt, Homo sapiens
cugcacagugcaucucag

SEQ ID NO: 263849 - RNA, 17 nt, Homo sapiens
cugcaccggaccauuga

SEQ ID NO: 263850 - RNA, 23 nt, Homo sapiens
cugcacuauagccuaggugacag

SEQ ID NO: 263851 - RNA, 14 nt, Homo sapiens
cugcacuccagccu

SEQ ID NO: 263852 - RNA, 13 nt, Homo sapiens
cugcacuccauga

SEQ ID NO: 263853 - RNA, 15 nt, Homo sapiens
cugcagccugcagga

SEQ ID NO: 263854 - RNA, 19 nt, Homo sapiens
cugcagcuccucugccuuu

SEQ ID NO: 263855 - RNA, 18 nt, Homo sapiens
cugcagcugagauuccag

SEQ ID NO: 263856 - RNA, 21 nt, Homo sapiens
cugcagcuuuguuuguuguca

SEQ ID NO: 263857 - RNA, 23 nt, Homo sapiens
cugcaggagagaaugcccaguga

SEQ ID NO: 263858 - RNA, 12 nt, Homo sapiens
cugcagguugaa

SEQ ID NO: 263859 - RNA, 19 nt, Homo sapiens
cugcagguugaagccaugu

SEQ ID NO: 263860 - RNA, 13 nt, Homo sapiens
cucuauuaucuca

SEQ ID NO: 263861 - RNA, 14 nt, Homo sapiens
cucucaccuccuaa

SEQ ID NO: 263862 - RNA, 17 nt, Homo sapiens
cucucacuauaccagua

SEQ ID NO: 263863 - RNA, 19 nt, Homo sapiens
cucucacuccccagccugg

SEQ ID NO: 263864 - RNA, 15 nt, Homo sapiens
cucucaggccaaacu

SEQ ID NO: 263865 - RNA, 18 nt, Homo sapiens
cucucaggccaaacucac

SEQ ID NO: 263866 - RNA, 14 nt, Homo sapiens
cucucaggccagcu

SEQ ID NO: 263867 - RNA, 21 nt, Homo sapiens
cucucagucucugagcaguga

SEQ ID NO: 263868 - RNA, 20 nt, Homo sapiens
cucucauggucaugggucug

SEQ ID NO: 263869 - RNA, 16 nt, Homo sapiens
cucuccagcugacuaa

SEQ ID NO: 263870 - RNA, 20 nt, Homo sapiens
cucuccagguggucagaggg

SEQ ID NO: 263871 - RNA, 17 nt, Homo sapiens
cucuccccagcaaguga

SEQ ID NO: 263872 - RNA, 17 nt, Homo sapiens
cucuccccuucucugua

SEQ ID NO: 263873 - RNA, 15 nt, Homo sapiens
cucuccgaccagaca

SEQ ID NO: 263874 - RNA, 23 nt, Homo sapiens
cucuccugcgugugcccacugaa

SEQ ID NO: 263875 - RNA, 17 nt, Homo sapiens
cucuccuugucacagaa

SEQ ID NO: 263876 - RNA, 15 nt, Homo sapiens
cucucgggugcccug

SEQ ID NO: 263877 - RNA, 13 nt, Homo sapiens
cucucucaugaua

SEQ ID NO: 263878 - RNA, 14 nt, Homo sapiens
cucucuuaaauuca

SEQ ID NO: 263879 - RNA, 14 nt, Homo sapiens
cucucuucucucca

SEQ ID NO: 263880 - RNA, 13 nt, Homo sapiens
cucugaaaaccaa

SEQ ID NO: 263881 - RNA, 15 nt, Homo sapiens
cucugaaaccagugu

SEQ ID NO: 263882 - RNA, 17 nt, Homo sapiens
cucugaaaccaguguua

SEQ ID NO: 263883 - RNA, 15 nt, Homo sapiens
cucugacacacagcu

SEQ ID NO: 263884 - RNA, 18 nt, Homo sapiens
cucugacucagggcuccu

SEQ ID NO: 263885 - RNA, 19 nt, Homo sapiens
cucugagacucgcgacaau

SEQ ID NO: 263886 - RNA, 21 nt, Homo sapiens
cucugagacucgcgacaaugc

SEQ ID NO: 263887 - RNA, 21 nt, Homo sapiens
cucugagaguagagucacugg

SEQ ID NO: 263888 - RNA, 15 nt, Homo sapiens
cucugagcugugcag

SEQ ID NO: 263889 - RNA, 21 nt, Homo sapiens
cucugagguuuccgaaaucag

SEQ ID NO: 263890 - RNA, 21 nt, Homo sapiens
cucugauguagcuuauacaaa

SEQ ID NO: 263891 - RNA, 22 nt, Homo sapiens
cucugcacaagcugcacccuca

SEQ ID NO: 263892 - RNA, 14 nt, Homo sapiens
cucugccugaaguc

SEQ ID NO: 263893 - RNA, 19 nt, Homo sapiens
cucugcgucgguccuggug

SEQ ID NO: 263894 - RNA, 16 nt, Homo sapiens
cucugcucugugcacu

SEQ ID NO: 263895 - RNA, 15 nt, Homo sapiens
cucuggacacagccc

SEQ ID NO: 263896 - RNA, 21 nt, Homo sapiens
cucuggacacagccccaugua

SEQ ID NO: 263897 - RNA, 19 nt, Homo sapiens
cucuggccuccaaguccac

SEQ ID NO: 263898 - RNA, 16 nt, Homo sapiens
cucugggccaagucaa

SEQ ID NO: 263899 - RNA, 21 nt, Homo sapiens
cucugggccaagucaaagaca

SEQ ID NO: 263900 - RNA, 10 nt, Homo sapiens
cucuguccag

SEQ ID NO: 263901 - RNA, 14 nt, Homo sapiens
cucugugucaggug

SEQ ID NO: 263902 - RNA, 20 nt, Homo sapiens
cucuuaauaagcccacauau

SEQ ID NO: 263903 - RNA, 21 nt, Homo sapiens
cucuuaauaagcccacauaua

SEQ ID NO: 263904 - RNA, 17 nt, Homo sapiens
cucuuaaucaaauagca

SEQ ID NO: 263905 - RNA, 15 nt, Homo sapiens
cucuuauauugccau

SEQ ID NO: 263906 - RNA, 20 nt, Homo sapiens
cucuuccacuuugauaccau

SEQ ID NO: 263907 - RNA, 21 nt, Homo sapiens
cugcucuagugggacagccca

SEQ ID NO: 263908 - RNA, 18 nt, Homo sapiens
cugcucuccgaccagaca

SEQ ID NO: 263909 - RNA, 13 nt, Homo sapiens
cugcugacagugu

SEQ ID NO: 263910 - RNA, 18 nt, Homo sapiens
cugcugagugcaccacuu

SEQ ID NO: 263911 - RNA, 16 nt, Homo sapiens
cugcuguugauuccac

SEQ ID NO: 263912 - RNA, 19 nt, Homo sapiens
cugcuuagauuucuagcag

SEQ ID NO: 263913 - RNA, 22 nt, Homo sapiens
cugcuugaggaaaacaagcauu

SEQ ID NO: 263914 - RNA, 19 nt, Homo sapiens
cuggaaaagaucauugcug

SEQ ID NO: 263915 - RNA, 23 nt, Homo sapiens
cuggaagaagccauugagcucuc

SEQ ID NO: 263916 - RNA, 16 nt, Homo sapiens
cuggaagcauggagca

SEQ ID NO: 263917 - RNA, 12 nt, Homo sapiens
cuggaagccaaa

SEQ ID NO: 263918 - RNA, 18 nt, Homo sapiens
cuggaagcuguaugccac

SEQ ID NO: 263919 - RNA, 22 nt, Homo sapiens
cuggaaguguguguuucuugcu

SEQ ID NO: 263920 - RNA, 16 nt, Homo sapiens
cuggaaugggggccag

SEQ ID NO: 263921 - RNA, 20 nt, Homo sapiens
cuggaauguaaucaauguuu

SEQ ID NO: 263922 - RNA, 18 nt, Homo sapiens
cuggacacagccccaugu

SEQ ID NO: 263923 - RNA, 17 nt, Homo sapiens
cuggacucauugcuuca

SEQ ID NO: 263924 - RNA, 13 nt, Homo sapiens
cuggacucucagu

SEQ ID NO: 263925 - RNA, 19 nt, Homo sapiens
cuggagaaaauggacgugu

SEQ ID NO: 263926 - RNA, 12 nt, Homo sapiens
cuggagauccuc

SEQ ID NO: 263927 - RNA, 17 nt, Homo sapiens
cuggaggaguuccuuga

SEQ ID NO: 263928 - RNA, 22 nt, Homo sapiens
cuggaguacuuugaagauguca

SEQ ID NO: 263929 - RNA, 13 nt, Homo sapiens
cuggagucgggac

SEQ ID NO: 263930 - RNA, 21 nt, Homo sapiens
cuggagucgggacuaacccag

SEQ ID NO: 263931 - RNA, 15 nt, Homo sapiens
cuggagucugucaau

SEQ ID NO: 263932 - RNA, 20 nt, Homo sapiens
cuggagugaaguggugugau

SEQ ID NO: 263933 - RNA, 21 nt, Homo sapiens
cuggagugaaguggugugauc

SEQ ID NO: 263934 - RNA, 22 nt, Homo sapiens
cuggagugaaguggugugaucc

SEQ ID NO: 263935 - RNA, 13 nt, Homo sapiens
cuggagugcagug

SEQ ID NO: 263936 - RNA, 18 nt, Homo sapiens
cuggaguuauugaagcag

SEQ ID NO: 263937 - RNA, 13 nt, Homo sapiens
cuggaucuaccug

SEQ ID NO: 263938 - RNA, 17 nt, Homo sapiens
cuggaucuauguguaug

SEQ ID NO: 263939 - RNA, 20 nt, Homo sapiens
cuggaucugugaggggcucu

SEQ ID NO: 263940 - RNA, 12 nt, Homo sapiens
cuggaugaaguu

SEQ ID NO: 263941 - RNA, 13 nt, Homo sapiens
cuggaugaaguua

SEQ ID NO: 263942 - RNA, 15 nt, Homo sapiens
cuggaugcagccuca

SEQ ID NO: 263943 - RNA, 22 nt, Homo sapiens
cuggaugcagccucacaguccu

SEQ ID NO: 263944 - RNA, 15 nt, Homo sapiens
cuggaugcccaggaa

SEQ ID NO: 263945 - RNA, 18 nt, Homo sapiens
cuggauuucauacuguaa

SEQ ID NO: 263946 - RNA, 21 nt, Homo sapiens
cuggcaacaacagauucucuu

SEQ ID NO: 263947 - RNA, 17 nt, Homo sapiens
cuggcacuauaauguaa

SEQ ID NO: 263948 - RNA, 20 nt, Homo sapiens
cuggcacugcuuccagugag

SEQ ID NO: 263949 - RNA, 20 nt, Homo sapiens
cuggcagaguugaagacaga

SEQ ID NO: 263950 - RNA, 20 nt, Homo sapiens
cuggcagaucguggacccuc

SEQ ID NO: 263951 - RNA, 19 nt, Homo sapiens
cuggcagccgugccuucag

SEQ ID NO: 263952 - RNA, 19 nt, Homo sapiens
cuggcaguggaacuaagaa

SEQ ID NO: 263953 - RNA, 21 nt, Homo sapiens
cuggcaugggaaugaauguca

SEQ ID NO: 263954 - RNA, 21 nt, Homo sapiens
cuggcauuacaauugcaguuu

SEQ ID NO: 263955 - RNA, 19 nt, Homo sapiens
cuggcauuugcaccuaccu

SEQ ID NO: 263956 - RNA, 19 nt, Homo sapiens
cuggccagaugcaccagcc

SEQ ID NO: 263957 - RNA, 14 nt, Homo sapiens
cuggcccagccaaa

SEQ ID NO: 263958 - RNA, 17 nt, Homo sapiens
cuggcccugugccuugg

SEQ ID NO: 263959 - RNA, 17 nt, Homo sapiens
cuggccuccaaguccac

SEQ ID NO: 263960 - RNA, 13 nt, Homo sapiens
cuggcgugcagug

SEQ ID NO: 263961 - RNA, 16 nt, Homo sapiens
cuggcuaugcauuuga

SEQ ID NO: 263962 - RNA, 13 nt, Homo sapiens
cuggcucaucucu

SEQ ID NO: 263963 - RNA, 23 nt, Homo sapiens
cuggcugcaaaggguaucaggug

SEQ ID NO: 263964 - RNA, 13 nt, Homo sapiens
cugggaccacaga

SEQ ID NO: 263965 - RNA, 16 nt, Homo sapiens
cugggacucaguucuu

SEQ ID NO: 263966 - RNA, 17 nt, Homo sapiens
cugggagaaccaaaaag

SEQ ID NO: 263967 - RNA, 18 nt, Homo sapiens
cugggagaaccaaaaaga

SEQ ID NO: 263968 - RNA, 17 nt, Homo sapiens
cugggagagccuuccag

SEQ ID NO: 263969 - RNA, 15 nt, Homo sapiens
cugggagcacaggca

SEQ ID NO: 263970 - RNA, 18 nt, Homo sapiens
cugggagcacaggcacug

SEQ ID NO: 263971 - RNA, 20 nt, Homo sapiens
cugggagcacaggcacugca

SEQ ID NO: 263972 - RNA, 22 nt, Homo sapiens
cugggauuacagggaugagcca

SEQ ID NO: 263973 - RNA, 15 nt, Homo sapiens
cugggauuacaggug

SEQ ID NO: 263974 - RNA, 20 nt, Homo sapiens
cugggauuacaggugugaac

SEQ ID NO: 263975 - RNA, 15 nt, Homo sapiens
cugggcaauauagca

SEQ ID NO: 263976 - RNA, 22 nt, Homo sapiens
cugggcagaggaaagcaaagga

SEQ ID NO: 263977 - RNA, 13 nt, Homo sapiens
cugggccaaguca

SEQ ID NO: 263978 - RNA, 19 nt, Homo sapiens
cugggccaagucaaagaca

SEQ ID NO: 263979 - RNA, 16 nt, Homo sapiens
cugggccgcugccacg

SEQ ID NO: 263980 - RNA, 22 nt, Homo sapiens
cugggcuaaguaaauaggaauu

SEQ ID NO: 263981 - RNA, 17 nt, Homo sapiens
cugggcugaacacucca

SEQ ID NO: 263982 - RNA, 13 nt, Homo sapiens
cugggcuguaacg

SEQ ID NO: 263983 - RNA, 23 nt, Homo sapiens
cugggcuguaacguggcacuggu

SEQ ID NO: 263984 - RNA, 19 nt, Homo sapiens
cuggggaugucucucauga

SEQ ID NO: 263985 - RNA, 15 nt, Homo sapiens
cugggggacacuuuc

SEQ ID NO: 263986 - RNA, 16 nt, Homo sapiens
cugggggccucagugc

SEQ ID NO: 263987 - RNA, 12 nt, Homo sapiens
cuggggugggag

SEQ ID NO: 263988 - RNA, 17 nt, Homo sapiens
cuggggugggcaguuuu

SEQ ID NO: 263989 - RNA, 14 nt, Homo sapiens
cuggguuccugcaa

SEQ ID NO: 263990 - RNA, 17 nt, Homo sapiens
cugguagguugggacac

SEQ ID NO: 263991 - RNA, 14 nt, Homo sapiens
cuggucaccagagg

SEQ ID NO: 263992 - RNA, 15 nt, Homo sapiens
cuggucaguuuucac

SEQ ID NO: 263993 - RNA, 23 nt, Homo sapiens
cugguccaguuccuucacuuaca

SEQ ID NO: 263994 - RNA, 16 nt, Homo sapiens
cuggucccacucaguc

SEQ ID NO: 263995 - RNA, 15 nt, Homo sapiens
cuggucucaaacucc

SEQ ID NO: 263996 - RNA, 23 nt, Homo sapiens
cuggucucaaacuccugggcuca

SEQ ID NO: 263997 - RNA, 19 nt, Homo sapiens
cuggugaccagcaccaucu

SEQ ID NO: 263998 - RNA, 16 nt, Homo sapiens
cuggugagucaccacu

SEQ ID NO: 263999 - RNA, 19 nt, Homo sapiens
cugguggcccgacagccug

SEQ ID NO: 264000 - RNA, 13 nt, Homo sapiens
cugguuagguaga

SEQ ID NO: 264001 - RNA, 17 nt, Homo sapiens
cugguuagguagaggga

SEQ ID NO: 264002 - RNA, 21 nt, Homo sapiens
cugguugguguugcagaaggu

SEQ ID NO: 264003 - RNA, 15 nt, Homo sapiens
cugguugguuuugcc

SEQ ID NO: 264004 - RNA, 16 nt, Homo sapiens
cuguaaaacagguuau

SEQ ID NO: 264005 - RNA, 18 nt, Homo sapiens
cugcacucccaccugaca

SEQ ID NO: 264006 - RNA, 14 nt, Homo sapiens
cugcacuugcagac

SEQ ID NO: 264007 - RNA, 15 nt, Homo sapiens
cugcagaagauguga

SEQ ID NO: 264008 - RNA, 17 nt, Homo sapiens
cugcagaagaugugaug

SEQ ID NO: 264009 - RNA, 18 nt, Homo sapiens
cugcagagggcacagaaa

SEQ ID NO: 264010 - RNA, 23 nt, Homo sapiens
cugcagagggcacagaaaaugga

SEQ ID NO: 264011 - RNA, 13 nt, Homo sapiens
cugcagcaaacac

SEQ ID NO: 264012 - RNA, 19 nt, Homo sapiens
cugcagccugcaggaccuc

SEQ ID NO: 264013 - RNA, 12 nt, Homo sapiens
cugcagcuccuc

SEQ ID NO: 264014 - RNA, 16 nt, Homo sapiens
cugcagggacagagca

SEQ ID NO: 264015 - RNA, 19 nt, Homo sapiens
cugcagggacagagcauug

SEQ ID NO: 264016 - RNA, 21 nt, Homo sapiens
cugcauaccaaccugggcaau

SEQ ID NO: 264017 - RNA, 15 nt, Homo sapiens
cugcaucaagaugug

SEQ ID NO: 264018 - RNA, 16 nt, Homo sapiens
cugcaucaagauguga

SEQ ID NO: 264019 - RNA, 20 nt, Homo sapiens
cugcaucaagaugugacaug

SEQ ID NO: 264020 - RNA, 12 nt, Homo sapiens
cugcauguuaca

SEQ ID NO: 264021 - RNA, 14 nt, Homo sapiens
cugccaaccagagc

SEQ ID NO: 264022 - RNA, 20 nt, Homo sapiens
cugccaaccagagcagcuca

SEQ ID NO: 264023 - RNA, 18 nt, Homo sapiens
cugccaauauccuaauaa

SEQ ID NO: 264024 - RNA, 16 nt, Homo sapiens
cugccacccuggggag

SEQ ID NO: 264025 - RNA, 12 nt, Homo sapiens
cugccagcaucu

SEQ ID NO: 264026 - RNA, 13 nt, Homo sapiens
cugccagcaucug

SEQ ID NO: 264027 - RNA, 15 nt, Homo sapiens
cugccagcaucugca

SEQ ID NO: 264028 - RNA, 16 nt, Homo sapiens
cugccagcaucugcag

SEQ ID NO: 264029 - RNA, 13 nt, Homo sapiens
cugccagggccag

SEQ ID NO: 264030 - RNA, 18 nt, Homo sapiens
cugccagggccagucuug

SEQ ID NO: 264031 - RNA, 16 nt, Homo sapiens
cugcccaggugugagc

SEQ ID NO: 264032 - RNA, 15 nt, Homo sapiens
cugcccagugcacac

SEQ ID NO: 264033 - RNA, 14 nt, Homo sapiens
cugcccagugccau

SEQ ID NO: 264034 - RNA, 13 nt, Homo sapiens
cugccccaugcug

SEQ ID NO: 264035 - RNA, 14 nt, Homo sapiens
cugccgagagucca

SEQ ID NO: 264036 - RNA, 15 nt, Homo sapiens
cugccugaagucaca

SEQ ID NO: 264037 - RNA, 16 nt, Homo sapiens
cugccugaagucacac

SEQ ID NO: 264038 - RNA, 19 nt, Homo sapiens
cugccugcagcugagauuc

SEQ ID NO: 264039 - RNA, 19 nt, Homo sapiens
cugccugcggaccagauga

SEQ ID NO: 264040 - RNA, 21 nt, Homo sapiens
cugccuucaccuccucuuuca

SEQ ID NO: 264041 - RNA, 14 nt, Homo sapiens
cugccuuguguaca

SEQ ID NO: 264042 - RNA, 16 nt, Homo sapiens
cugccuuuaugagauu

SEQ ID NO: 264043 - RNA, 14 nt, Homo sapiens
cugcuaccaaaaca

SEQ ID NO: 264044 - RNA, 17 nt, Homo sapiens
cugcuaccucacugggg

SEQ ID NO: 264045 - RNA, 17 nt, Homo sapiens
cugcuagggaauaucaa

SEQ ID NO: 264046 - RNA, 15 nt, Homo sapiens
cugcucacugcucac

SEQ ID NO: 264047 - RNA, 16 nt, Homo sapiens
cugcucacugcucaca

SEQ ID NO: 264048 - RNA, 13 nt, Homo sapiens
cugcucacuggcu

SEQ ID NO: 264049 - RNA, 15 nt, Homo sapiens
cugcuccccacguca

SEQ ID NO: 264050 - RNA, 22 nt, Homo sapiens
cugcuccccacgucagcuggga

SEQ ID NO: 264051 - RNA, 14 nt, Homo sapiens
cugcuccugucacc

SEQ ID NO: 264052 - RNA, 12 nt, Homo sapiens
cugcucugcaag

SEQ ID NO: 264053 - RNA, 14 nt, Homo sapiens
cugcugacaguguu

SEQ ID NO: 264054 - RNA, 19 nt, Homo sapiens
cugcugagugcaccacuuc

SEQ ID NO: 264055 - RNA, 15 nt, Homo sapiens
cugcugaugaacaaa

SEQ ID NO: 264056 - RNA, 13 nt, Homo sapiens
cugcugaugcuca

SEQ ID NO: 264057 - RNA, 13 nt, Homo sapiens
cugcugcaaaagu

SEQ ID NO: 264058 - RNA, 15 nt, Homo sapiens
cugcugcugcugcug

SEQ ID NO: 264059 - RNA, 20 nt, Homo sapiens
cugcugugggcugcucacug

SEQ ID NO: 264060 - RNA, 21 nt, Homo sapiens
cugcuguugauuccacugaaa

SEQ ID NO: 264061 - RNA, 18 nt, Homo sapiens
cugcuuagauuucuagca

SEQ ID NO: 264062 - RNA, 16 nt, Homo sapiens
cugcuucaaauauuuc

SEQ ID NO: 264063 - RNA, 21 nt, Homo sapiens
cuguguugccaagcuccaagc

SEQ ID NO: 264064 - RNA, 13 nt, Homo sapiens
cuguuacacaaag

SEQ ID NO: 264065 - RNA, 13 nt, Homo sapiens
cuguuaccagagg

SEQ ID NO: 264066 - RNA, 13 nt, Homo sapiens
cuguuagagucca

SEQ ID NO: 264067 - RNA, 18 nt, Homo sapiens
cuguuaggcucacaguua

SEQ ID NO: 264068 - RNA, 14 nt, Homo sapiens
cuguuauagagggu

SEQ ID NO: 264069 - RNA, 12 nt, Homo sapiens
cuguucaaggaa

SEQ ID NO: 264070 - RNA, 17 nt, Homo sapiens
cuguucagcugguugag

SEQ ID NO: 264071 - RNA, 13 nt, Homo sapiens
cuguucccaugag

SEQ ID NO: 264072 - RNA, 17 nt, Homo sapiens
cuguucucugcccucca

SEQ ID NO: 264073 - RNA, 18 nt, Homo sapiens
cuguucugucucauauga

SEQ ID NO: 264074 - RNA, 15 nt, Homo sapiens
cuguucuuuccaaag

SEQ ID NO: 264075 - RNA, 14 nt, Homo sapiens
cuguucuuucuggc

SEQ ID NO: 264076 - RNA, 13 nt, Homo sapiens
cuguugacaucca

SEQ ID NO: 264077 - RNA, 16 nt, Homo sapiens
cuguuggccaguguga

SEQ ID NO: 264078 - RNA, 19 nt, Homo sapiens
cuguuggcugggggccuca

SEQ ID NO: 264079 - RNA, 19 nt, Homo sapiens
cuguuuagaugaaugucag

SEQ ID NO: 264080 - RNA, 17 nt, Homo sapiens
cuguuucugcagccacu

SEQ ID NO: 264081 - RNA, 19 nt, Homo sapiens
cuguuucugcagccacuau

SEQ ID NO: 264082 - RNA, 18 nt, Homo sapiens
cuuaaaagaacauguaua

SEQ ID NO: 264083 - RNA, 14 nt, Homo sapiens
cuuaaaauagccau

SEQ ID NO: 264084 - RNA, 16 nt, Homo sapiens
cuuaaaauagccauaa

SEQ ID NO: 264085 - RNA, 23 nt, Homo sapiens
cuuaaaccgccaaggcuggggga

SEQ ID NO: 264086 - RNA, 20 nt, Homo sapiens
cuuaaaccuuaagauacuaa

SEQ ID NO: 264087 - RNA, 14 nt, Homo sapiens
cuuaaccuaccugg

SEQ ID NO: 264088 - RNA, 20 nt, Homo sapiens
cuuaagaaauuuguggaaaa

SEQ ID NO: 264089 - RNA, 22 nt, Homo sapiens
cuuaagacgugauuuugcugua

SEQ ID NO: 264090 - RNA, 23 nt, Homo sapiens
cuuaaguuguggagagugcaaca

SEQ ID NO: 264091 - RNA, 11 nt, Homo sapiens
cuuaaucacac

SEQ ID NO: 264092 - RNA, 16 nt, Homo sapiens
cuuacaucauguguug

SEQ ID NO: 264093 - RNA, 23 nt, Homo sapiens
cuuaccagcagagcaccuuagac

SEQ ID NO: 264094 - RNA, 18 nt, Homo sapiens
cuuacccuccuccagacc

SEQ ID NO: 264095 - RNA, 21 nt, Homo sapiens
cuuaccugccaggaagccagc

SEQ ID NO: 264096 - RNA, 15 nt, Homo sapiens
cuuacuguacaugaa

SEQ ID NO: 264097 - RNA, 15 nt, Homo sapiens
cuuacuuaaccugaa

SEQ ID NO: 264098 - RNA, 19 nt, Homo sapiens
cuuacuuaaccugaagcua

SEQ ID NO: 264099 - RNA, 15 nt, Homo sapiens
cuuacuuaggugugg

SEQ ID NO: 264100 - RNA, 14 nt, Homo sapiens
cuuagaaaaaccac

SEQ ID NO: 264101 - RNA, 21 nt, Homo sapiens
cuuagacccucaugcugccaa

SEQ ID NO: 264102 - RNA, 22 nt, Homo sapiens
cuuagacccucaugcugccaau

SEQ ID NO: 264103 - RNA, 13 nt, Homo sapiens
cuuagagcucuca

SEQ ID NO: 264104 - RNA, 18 nt, Homo sapiens
cuuagagcuuuaccuaaa

SEQ ID NO: 264105 - RNA, 13 nt, Homo sapiens
cuuagcauguccc

SEQ ID NO: 264106 - RNA, 17 nt, Homo sapiens
cuuagccaagcaguuuc

SEQ ID NO: 264107 - RNA, 18 nt, Homo sapiens
cuuagguccaaggucucc

SEQ ID NO: 264108 - RNA, 15 nt, Homo sapiens
cuuagugugugcaau

SEQ ID NO: 264109 - RNA, 22 nt, Homo sapiens
cuuaguguuuggguauauucau

SEQ ID NO: 264110 - RNA, 13 nt, Homo sapiens
cuuaguugcugua

SEQ ID NO: 264111 - RNA, 15 nt, Homo sapiens
cuuauacauuugaua

SEQ ID NO: 264112 - RNA, 18 nt, Homo sapiens
cuuauauucauccaugcc

SEQ ID NO: 264113 - RNA, 19 nt, Homo sapiens
cuuaucaacauuuguucca

SEQ ID NO: 264114 - RNA, 23 nt, Homo sapiens
cuuaucaacauuuguuccaugag

SEQ ID NO: 264115 - RNA, 15 nt, Homo sapiens
cuuaucccaagagaa

SEQ ID NO: 264116 - RNA, 16 nt, Homo sapiens
cuuauccccagcuguu

SEQ ID NO: 264117 - RNA, 19 nt, Homo sapiens
cuuauccguuagccguggu

SEQ ID NO: 264118 - RNA, 15 nt, Homo sapiens
cuuauccuccaugaa

SEQ ID NO: 264119 - RNA, 23 nt, Homo sapiens
cuuauuccccugcccagguguga

SEQ ID NO: 264120 - RNA, 21 nt, Homo sapiens
cuuauucugucuggcauuaca

SEQ ID NO: 264121 - RNA, 16 nt, Homo sapiens
cuuauuuaaugaaaga

SEQ ID NO: 264122 - RNA, 21 nt, Homo sapiens
cuucaaauuuagcaaccuaga

SEQ ID NO: 264123 - RNA, 17 nt, Homo sapiens
cuucaaccccaugagac

SEQ ID NO: 264124 - RNA, 23 nt, Homo sapiens
cuucaagccuagcccuucucuca

SEQ ID NO: 264125 - RNA, 22 nt, Homo sapiens
cuucaaggcccauaucugugaa

SEQ ID NO: 264126 - RNA, 19 nt, Homo sapiens
cuucaaucucuugcacuca

SEQ ID NO: 264127 - RNA, 17 nt, Homo sapiens
cuucacgcccuuggcca

SEQ ID NO: 264128 - RNA, 16 nt, Homo sapiens
cuucagauuugccuua

SEQ ID NO: 264129 - RNA, 21 nt, Homo sapiens
cuucagccuagccgaccucag

SEQ ID NO: 264130 - RNA, 23 nt, Homo sapiens
cuucagcucacacaugagaucua

SEQ ID NO: 264131 - RNA, 23 nt, Homo sapiens
cuucagggggccaggugcacaga

SEQ ID NO: 264132 - RNA, 14 nt, Homo sapiens
cuucagguagaaau

SEQ ID NO: 264133 - RNA, 16 nt, Homo sapiens
cuucaguauguuguca

SEQ ID NO: 264134 - RNA, 21 nt, Homo sapiens
cuucaguauguugucaaagag

SEQ ID NO: 264135 - RNA, 17 nt, Homo sapiens
cuucagucuuuuccaug

SEQ ID NO: 264136 - RNA, 22 nt, Homo sapiens
cuucaguuguggccucauucag

SEQ ID NO: 264137 - RNA, 23 nt, Homo sapiens
cuucaguuuccauccccaggauc

SEQ ID NO: 264138 - RNA, 17 nt, Homo sapiens
cuucaguuugcagagua

SEQ ID NO: 264139 - RNA, 22 nt, Homo sapiens
cuucauccucugagugugacca

SEQ ID NO: 264140 - RNA, 21 nt, Homo sapiens
cuucauguucagucacaugug

SEQ ID NO: 264141 - RNA, 13 nt, Homo sapiens
cuucauuaccuca

SEQ ID NO: 264142 - RNA, 14 nt, Homo sapiens
cuucauuaccucag

SEQ ID NO: 264143 - RNA, 14 nt, Homo sapiens
cuuccaaacaggcu

SEQ ID NO: 264144 - RNA, 19 nt, Homo sapiens
cuuccaaggguacuaagga

SEQ ID NO: 264145 - RNA, 14 nt, Homo sapiens
cuuccacugagggc

SEQ ID NO: 264146 - RNA, 22 nt, Homo sapiens
cuuccaugacauaagugcuauu

SEQ ID NO: 264147 - RNA, 11 nt, Homo sapiens
cuuccauuugc

SEQ ID NO: 264148 - RNA, 12 nt, Homo sapiens
cuuccauuugcu

SEQ ID NO: 264149 - RNA, 22 nt, Homo sapiens
cuuccauuuucccccacuacug

SEQ ID NO: 264150 - RNA, 15 nt, Homo sapiens
cuucccacggcuccu

SEQ ID NO: 264151 - RNA, 16 nt, Homo sapiens
cuguaccugugcacgu

SEQ ID NO: 264152 - RNA, 18 nt, Homo sapiens
cuguaccugugcacguug

SEQ ID NO: 264153 - RNA, 22 nt, Homo sapiens
cuguagaaaagggaacugaaca

SEQ ID NO: 264154 - RNA, 21 nt, Homo sapiens
cuguagacauuugcuaugagc

SEQ ID NO: 264155 - RNA, 19 nt, Homo sapiens
cuguauauacaauaacaua

SEQ ID NO: 264156 - RNA, 16 nt, Homo sapiens
cuguaugauuccuuga

SEQ ID NO: 264157 - RNA, 12 nt, Homo sapiens
cuguauuccuag

SEQ ID NO: 264158 - RNA, 20 nt, Homo sapiens
cugucaauguccuacugaga

SEQ ID NO: 264159 - RNA, 16 nt, Homo sapiens
cugucaauuacaggaa

SEQ ID NO: 264160 - RNA, 19 nt, Homo sapiens
cugucacguagaacuugga

SEQ ID NO: 264161 - RNA, 15 nt, Homo sapiens
cugucagucugcuua

SEQ ID NO: 264162 - RNA, 12 nt, Homo sapiens
cuguccaaagac

SEQ ID NO: 264163 - RNA, 12 nt, Homo sapiens
cuguccacgugg

SEQ ID NO: 264164 - RNA, 19 nt, Homo sapiens
cugucccucauccauagca

SEQ ID NO: 264165 - RNA, 17 nt, Homo sapiens
cuguccuauuauauuca

SEQ ID NO: 264166 - RNA, 22 nt, Homo sapiens
cuguccugcagcaaacacucca

SEQ ID NO: 264167 - RNA, 13 nt, Homo sapiens
cuguccuggucag

SEQ ID NO: 264168 - RNA, 20 nt, Homo sapiens
cuguccuggucaguuuucac

SEQ ID NO: 264169 - RNA, 14 nt, Homo sapiens
cugucgcccagucu

SEQ ID NO: 264170 - RNA, 13 nt, Homo sapiens
cugucucauauga

SEQ ID NO: 264171 - RNA, 21 nt, Homo sapiens
cugucucauaugauugugcac

SEQ ID NO: 264172 - RNA, 19 nt, Homo sapiens
cugucucuuucaugaguuu

SEQ ID NO: 264173 - RNA, 14 nt, Homo sapiens
cugucugacaaccu

SEQ ID NO: 264174 - RNA, 17 nt, Homo sapiens
cugucuucguacuggga

SEQ ID NO: 264175 - RNA, 20 nt, Homo sapiens
cugucuuuauaaucuacucc

SEQ ID NO: 264176 - RNA, 15 nt, Homo sapiens
cugucuuucacugaa

SEQ ID NO: 264177 - RNA, 14 nt, Homo sapiens
cugugaucaagcaa

SEQ ID NO: 264178 - RNA, 19 nt, Homo sapiens
cugugaucaagcaauaaua

SEQ ID NO: 264179 - RNA, 13 nt, Homo sapiens
cugugauggggcc

SEQ ID NO: 264180 - RNA, 22 nt, Homo sapiens
cugugcagguggggagacuggg

SEQ ID NO: 264181 - RNA, 16 nt, Homo sapiens
cugugccaucagcucc

SEQ ID NO: 264182 - RNA, 20 nt, Homo sapiens
cugugccuuggugugcugua

SEQ ID NO: 264183 - RNA, 14 nt, Homo sapiens
cugugccuuuugcc

SEQ ID NO: 264184 - RNA, 15 nt, Homo sapiens
cuguggccaaguucu

SEQ ID NO: 264185 - RNA, 21 nt, Homo sapiens
cuguggcugcuagcacuugga

SEQ ID NO: 264186 - RNA, 22 nt, Homo sapiens
cugugggucgcgugaugcgcau

SEQ ID NO: 264187 - RNA, 23 nt, Homo sapiens
cuguggguuucuaaagcugccag

SEQ ID NO: 264188 - RNA, 21 nt, Homo sapiens
cuguguacagaauucugcuac

SEQ ID NO: 264189 - RNA, 22 nt, Homo sapiens
cuguguacagaauucugcuacc

SEQ ID NO: 264190 - RNA, 21 nt, Homo sapiens
cuguguauuuaacugccuugu

SEQ ID NO: 264191 - RNA, 13 nt, Homo sapiens
cugugucauuuca

SEQ ID NO: 264192 - RNA, 20 nt, Homo sapiens
cugugucuuuuuucacuaca

SEQ ID NO: 264193 - RNA, 13 nt, Homo sapiens
cugugugaugaug

SEQ ID NO: 264194 - RNA, 20 nt, Homo sapiens
cuguguuuguacugugcagu

SEQ ID NO: 264195 - RNA, 15 nt, Homo sapiens
cuguuaccagaggac

SEQ ID NO: 264196 - RNA, 16 nt, Homo sapiens
cuguuagucauuugcu

SEQ ID NO: 264197 - RNA, 14 nt, Homo sapiens
cuguucccaugaga

SEQ ID NO: 264198 - RNA, 16 nt, Homo sapiens
cuguuccuguccagca

SEQ ID NO: 264199 - RNA, 20 nt, Homo sapiens
cuguucuaaggcugugccau

SEQ ID NO: 264200 - RNA, 16 nt, Homo sapiens
cuguucuuuuguccca

SEQ ID NO: 264201 - RNA, 16 nt, Homo sapiens
cuguugauuccacuga

SEQ ID NO: 264202 - RNA, 17 nt, Homo sapiens
cuguuggcaaggugaca

SEQ ID NO: 264203 - RNA, 19 nt, Homo sapiens
cuguuggccagugugacaa

SEQ ID NO: 264204 - RNA, 21 nt, Homo sapiens
cuguuggccagugugacaagg

SEQ ID NO: 264205 - RNA, 16 nt, Homo sapiens
cuguuuccuagcugug

SEQ ID NO: 264206 - RNA, 19 nt, Homo sapiens
cuguuuuaaaugaaccaaa

SEQ ID NO: 264207 - RNA, 22 nt, Homo sapiens
cuguuuugguuuugcucacaaa

SEQ ID NO: 264208 - RNA, 22 nt, Homo sapiens
cuuaaaagaaagagaaguuuuc

SEQ ID NO: 264209 - RNA, 23 nt, Homo sapiens
cuuaaaggaagguucugguguga

SEQ ID NO: 264210 - RNA, 20 nt, Homo sapiens
cuuaaauauguggaguucau

SEQ ID NO: 264211 - RNA, 21 nt, Homo sapiens
cuuaagcacacuugacaucaa

SEQ ID NO: 264212 - RNA, 14 nt, Homo sapiens
cuuaauaaacugug

SEQ ID NO: 264213 - RNA, 22 nt, Homo sapiens
cuuaauaaacuguggugcuuuu

SEQ ID NO: 264214 - RNA, 21 nt, Homo sapiens
cuuaauaagcccacauauaaa

SEQ ID NO: 264215 - RNA, 22 nt, Homo sapiens
cuuaaugauuuacagacugaug

SEQ ID NO: 264216 - RNA, 21 nt, Homo sapiens
cuuaauuauugauguuuucau

SEQ ID NO: 264217 - RNA, 19 nt, Homo sapiens
cuugauucauaaugacuua

SEQ ID NO: 264218 - RNA, 14 nt, Homo sapiens
cuugcaaaccaucc

SEQ ID NO: 264219 - RNA, 23 nt, Homo sapiens
cuugcaaaguaucccuacuguaa

SEQ ID NO: 264220 - RNA, 12 nt, Homo sapiens
cuugcacaaaca

SEQ ID NO: 264221 - RNA, 18 nt, Homo sapiens
cuugccccuguuaccuaa

SEQ ID NO: 264222 - RNA, 22 nt, Homo sapiens
cuugccccuguuaccuaauuag

SEQ ID NO: 264223 - RNA, 16 nt, Homo sapiens
cuugccgucuaccuga

SEQ ID NO: 264224 - RNA, 23 nt, Homo sapiens
cuugccucugcucugugcacuca

SEQ ID NO: 264225 - RNA, 11 nt, Homo sapiens
cuugccucuuc

SEQ ID NO: 264226 - RNA, 18 nt, Homo sapiens
cuugcuauguuauuuuca

SEQ ID NO: 264227 - RNA, 12 nt, Homo sapiens
cuugcugccaaa

SEQ ID NO: 264228 - RNA, 13 nt, Homo sapiens
cuugcugccugaa

SEQ ID NO: 264229 - RNA, 16 nt, Homo sapiens
cuugcugcugagugca

SEQ ID NO: 264230 - RNA, 19 nt, Homo sapiens
cuugcuucaaccccaugag

SEQ ID NO: 264231 - RNA, 19 nt, Homo sapiens
cuugcuucucuagcucucu

SEQ ID NO: 264232 - RNA, 20 nt, Homo sapiens
cuuggagacaaaaucuuaaa

SEQ ID NO: 264233 - RNA, 19 nt, Homo sapiens
cuuggcagcccgggucauc

SEQ ID NO: 264234 - RNA, 22 nt, Homo sapiens
cuuggcuuacugcagccuuugc

SEQ ID NO: 264235 - RNA, 13 nt, Homo sapiens
cuugggagcaaaa

SEQ ID NO: 264236 - RNA, 13 nt, Homo sapiens
cuugggcucccug

SEQ ID NO: 264237 - RNA, 17 nt, Homo sapiens
cuuggguucaagugauu

SEQ ID NO: 264238 - RNA, 24 nt, Homo sapiens
cuugguaaaauaaucaguguuucc

SEQ ID NO: 264239 - RNA, 22 nt, Homo sapiens
cuuggucugugagaugcuagaa

SEQ ID NO: 264240 - RNA, 20 nt, Homo sapiens
cuuggugucgggcaugacac

SEQ ID NO: 264241 - RNA, 16 nt, Homo sapiens
cuuguaaagacuguag

SEQ ID NO: 264242 - RNA, 17 nt, Homo sapiens
cuuguaaaugugguaaa

SEQ ID NO: 264243 - RNA, 21 nt, Homo sapiens
cuugucacgccagacuuccca

SEQ ID NO: 264244 - RNA, 18 nt, Homo sapiens
cuugucuuuggacccuga

SEQ ID NO: 264245 - RNA, 15 nt, Homo sapiens
cuugugaacccaaag

SEQ ID NO: 264246 - RNA, 16 nt, Homo sapiens
cuuguuccccacugac

SEQ ID NO: 264247 - RNA, 16 nt, Homo sapiens
cuuguuuuaugcucag

SEQ ID NO: 264248 - RNA, 16 nt, Homo sapiens
cuuguuuuugcacaug

SEQ ID NO: 264249 - RNA, 19 nt, Homo sapiens
cuuuaaaacuuauccucca

SEQ ID NO: 264250 - RNA, 19 nt, Homo sapiens
cuuuaaagccugccucuuc

SEQ ID NO: 264251 - RNA, 15 nt, Homo sapiens
cuuuaagaacuaaaa

SEQ ID NO: 264252 - RNA, 19 nt, Homo sapiens
cuuuaagcagcgccaguga

SEQ ID NO: 264253 - RNA, 13 nt, Homo sapiens
cuuuacuguggaa

SEQ ID NO: 264254 - RNA, 18 nt, Homo sapiens
cuuuacuguuagucauuu

SEQ ID NO: 264255 - RNA, 11 nt, Homo sapiens
cuuuacuugac

SEQ ID NO: 264256 - RNA, 15 nt, Homo sapiens
cuuuagcgcccaguu

SEQ ID NO: 264257 - RNA, 19 nt, Homo sapiens
cuuuagcugcugucuuccc

SEQ ID NO: 264258 - RNA, 16 nt, Homo sapiens
cuuuagucugcaaaau

SEQ ID NO: 264259 - RNA, 19 nt, Homo sapiens
cuuuagucugcaaaaugag

SEQ ID NO: 264260 - RNA, 21 nt, Homo sapiens
cuuuauaaauguaccagagag

SEQ ID NO: 264261 - RNA, 21 nt, Homo sapiens
cuuuauuucucucaucuguua

SEQ ID NO: 264262 - RNA, 19 nt, Homo sapiens
cuuucagauaacuguuauu

SEQ ID NO: 264263 - RNA, 23 nt, Homo sapiens
cuuucagauacuggauuguacuu

SEQ ID NO: 264264 - RNA, 14 nt, Homo sapiens
cuuucaggacucua

SEQ ID NO: 264265 - RNA, 21 nt, Homo sapiens
cuuucaggccacauggcuaaa

SEQ ID NO: 264266 - RNA, 20 nt, Homo sapiens
cuuucauccacuagugcaaa

SEQ ID NO: 264267 - RNA, 21 nt, Homo sapiens
cuuucauccacuagugcaaau

SEQ ID NO: 264268 - RNA, 18 nt, Homo sapiens
cuuucaugaguuuuuccc

SEQ ID NO: 264269 - RNA, 16 nt, Homo sapiens
cuuuccaaccggcuuu

SEQ ID NO: 264270 - RNA, 23 nt, Homo sapiens
cuuuccaggaaggcuaaagggaa

SEQ ID NO: 264271 - RNA, 19 nt, Homo sapiens
cuuuccaucuuacuugccc

SEQ ID NO: 264272 - RNA, 16 nt, Homo sapiens
cuuucccaucuuccaa

SEQ ID NO: 264273 - RNA, 16 nt, Homo sapiens
cuuuccccucccucag

SEQ ID NO: 264274 - RNA, 20 nt, Homo sapiens
cuuucccgggcuguccacua

SEQ ID NO: 264275 - RNA, 18 nt, Homo sapiens
cuuucccucccuuccucu

SEQ ID NO: 264276 - RNA, 15 nt, Homo sapiens
cuuuccuauuugcac

SEQ ID NO: 264277 - RNA, 16 nt, Homo sapiens
cuuuccuauuugcaca

SEQ ID NO: 264278 - RNA, 17 nt, Homo sapiens
cuuuccuguagucccau

SEQ ID NO: 264279 - RNA, 14 nt, Homo sapiens
cuuuccuucauuca

SEQ ID NO: 264280 - RNA, 15 nt, Homo sapiens
cuuuccuucauucaa

SEQ ID NO: 264281 - RNA, 17 nt, Homo sapiens
cuuucuagccagaggag

SEQ ID NO: 264282 - RNA, 17 nt, Homo sapiens
cuuucuauuuaugcaac

SEQ ID NO: 264283 - RNA, 13 nt, Homo sapiens
cuuucucacaugu

SEQ ID NO: 264284 - RNA, 14 nt, Homo sapiens
cuuucucacaugug

SEQ ID NO: 264285 - RNA, 17 nt, Homo sapiens
cuuucucaucuugauga

SEQ ID NO: 264286 - RNA, 17 nt, Homo sapiens
cuuucucuucccaugca

SEQ ID NO: 264287 - RNA, 16 nt, Homo sapiens
cuuucugccagcaucu

SEQ ID NO: 264288 - RNA, 20 nt, Homo sapiens
cuuucugccagcaucugcag

SEQ ID NO: 264289 - RNA, 19 nt, Homo sapiens
cuuucugcuaucaaagagg

SEQ ID NO: 264290 - RNA, 22 nt, Homo sapiens
cuuucuuacauuagcaguuugc

SEQ ID NO: 264291 - RNA, 13 nt, Homo sapiens
cuuucuuccaaac

SEQ ID NO: 264292 - RNA, 11 nt, Homo sapiens
cuuucuucccu

SEQ ID NO: 264293 - RNA, 15 nt, Homo sapiens
cuuugaagaugucau

SEQ ID NO: 264294 - RNA, 24 nt, Homo sapiens
cuuugaaugcaugugugaagauua

SEQ ID NO: 264295 - RNA, 19 nt, Homo sapiens
cuuccuugaagaacugcag

SEQ ID NO: 264296 - RNA, 14 nt, Homo sapiens
cuucuaaucaaagc

SEQ ID NO: 264297 - RNA, 17 nt, Homo sapiens
cuucuaaucaaagcuuu

SEQ ID NO: 264298 - RNA, 23 nt, Homo sapiens
cuucuaccucuuggcugccuugu

SEQ ID NO: 264299 - RNA, 17 nt, Homo sapiens
cuucuaccuuccugcaa

SEQ ID NO: 264300 - RNA, 13 nt, Homo sapiens
cuucuagaaccag

SEQ ID NO: 264301 - RNA, 16 nt, Homo sapiens
cuucuaguucugccag

SEQ ID NO: 264302 - RNA, 12 nt, Homo sapiens
cuucucauuucu

SEQ ID NO: 264303 - RNA, 14 nt, Homo sapiens
cuucuccacuggau

SEQ ID NO: 264304 - RNA, 13 nt, Homo sapiens
cuucuccuuagaa

SEQ ID NO: 264305 - RNA, 19 nt, Homo sapiens
cuucucucaccuccuaaag

SEQ ID NO: 264306 - RNA, 19 nt, Homo sapiens
cuucucuccagcugacuaa

SEQ ID NO: 264307 - RNA, 17 nt, Homo sapiens
cuucugaaaaaguaucc

SEQ ID NO: 264308 - RNA, 13 nt, Homo sapiens
cuucugaccucua

SEQ ID NO: 264309 - RNA, 10 nt, Homo sapiens
cuucugccau

SEQ ID NO: 264310 - RNA, 15 nt, Homo sapiens
cuucuguccuacucu

SEQ ID NO: 264311 - RNA, 21 nt, Homo sapiens
cuucuuaauauaacugccuua

SEQ ID NO: 264312 - RNA, 22 nt, Homo sapiens
cuucuuaauauaacugccuuaa

SEQ ID NO: 264313 - RNA, 16 nt, Homo sapiens
cuucuuacaaugcauu

SEQ ID NO: 264314 - RNA, 19 nt, Homo sapiens
cuucuuccccccgcuguca

SEQ ID NO: 264315 - RNA, 13 nt, Homo sapiens
cuucuuguucccc

SEQ ID NO: 264316 - RNA, 18 nt, Homo sapiens
cuucuuuacuuaguucaa

SEQ ID NO: 264317 - RNA, 17 nt, Homo sapiens
cuucuuuccuuuccauu

SEQ ID NO: 264318 - RNA, 18 nt, Homo sapiens
cuugaaaaaaaacagugg

SEQ ID NO: 264319 - RNA, 22 nt, Homo sapiens
cuugaaagaaaauaugcaucua

SEQ ID NO: 264320 - RNA, 15 nt, Homo sapiens
cuugaaaucaagggc

SEQ ID NO: 264321 - RNA, 14 nt, Homo sapiens
cuugaacacagucu

SEQ ID NO: 264322 - RNA, 14 nt, Homo sapiens
cuugaacacugggg

SEQ ID NO: 264323 - RNA, 18 nt, Homo sapiens
cuugaacucuuggccuca

SEQ ID NO: 264324 - RNA, 17 nt, Homo sapiens
cuugaaugaugccauga

SEQ ID NO: 264325 - RNA, 18 nt, Homo sapiens
cuugacccccuugagggu

SEQ ID NO: 264326 - RNA, 18 nt, Homo sapiens
cuugaccgugaggccaga

SEQ ID NO: 264327 - RNA, 19 nt, Homo sapiens
cuugaccucaggugaucca

SEQ ID NO: 264328 - RNA, 21 nt, Homo sapiens
cuugacuuuagucugcaaaau

SEQ ID NO: 264329 - RNA, 21 nt, Homo sapiens
cuugagaauuacccuuuugcc

SEQ ID NO: 264330 - RNA, 22 nt, Homo sapiens
cuugagaggguggaauauccaa

SEQ ID NO: 264331 - RNA, 18 nt, Homo sapiens
cuugagcccagagugaac

SEQ ID NO: 264332 - RNA, 15 nt, Homo sapiens
cuugaggcagggucu

SEQ ID NO: 264333 - RNA, 17 nt, Homo sapiens
cuugaggcagggucuca

SEQ ID NO: 264334 - RNA, 19 nt, Homo sapiens
cuugaggcagggucucacu

SEQ ID NO: 264335 - RNA, 16 nt, Homo sapiens
cuugaucagacauuca

SEQ ID NO: 264336 - RNA, 17 nt, Homo sapiens
cuugaucagacauucag

SEQ ID NO: 264337 - RNA, 21 nt, Homo sapiens
cuugauccacuucucucagga

SEQ ID NO: 264338 - RNA, 17 nt, Homo sapiens
cuugaugaugaucguca

SEQ ID NO: 264339 - RNA, 18 nt, Homo sapiens
cuugauggagauauuuac

SEQ ID NO: 264340 - RNA, 23 nt, Homo sapiens
cuugcaaaccaucccagcacugc

SEQ ID NO: 264341 - RNA, 13 nt, Homo sapiens
cuugcacaaacca

SEQ ID NO: 264342 - RNA, 15 nt, Homo sapiens
cuugcacccaugugu

SEQ ID NO: 264343 - RNA, 17 nt, Homo sapiens
cuugcaguuaaggguua

SEQ ID NO: 264344 - RNA, 18 nt, Homo sapiens
cuugcaguuaaggguuag

SEQ ID NO: 264345 - RNA, 13 nt, Homo sapiens
cuugccacagugu

SEQ ID NO: 264346 - RNA, 12 nt, Homo sapiens
cuugccagacau

SEQ ID NO: 264347 - RNA, 20 nt, Homo sapiens
cuugccucugcucugugcac

SEQ ID NO: 264348 - RNA, 22 nt, Homo sapiens
cuugccucugcucugugcacuc

SEQ ID NO: 264349 - RNA, 17 nt, Homo sapiens
cuugcuaccaguauuua

SEQ ID NO: 264350 - RNA, 21 nt, Homo sapiens
cuugcugauggugacauugca

SEQ ID NO: 264351 - RNA, 22 nt, Homo sapiens
cuugcugauggugacauugcac

SEQ ID NO: 264352 - RNA, 18 nt, Homo sapiens
cuugcugccaaaagccuu

SEQ ID NO: 264353 - RNA, 12 nt, Homo sapiens
cuugcugugagc

SEQ ID NO: 264354 - RNA, 16 nt, Homo sapiens
cuugcuugcaauaggu

SEQ ID NO: 264355 - RNA, 23 nt, Homo sapiens
cuuggaauccuggggaacauaga

SEQ ID NO: 264356 - RNA, 19 nt, Homo sapiens
cuuggacuauuauaauuua

SEQ ID NO: 264357 - RNA, 22 nt, Homo sapiens
cuuggagaaaauggguuuauuc

SEQ ID NO: 264358 - RNA, 23 nt, Homo sapiens
cuuggcccaggauuauugucaaa

SEQ ID NO: 264359 - RNA, 16 nt, Homo sapiens
cuuggcgcugccccug

SEQ ID NO: 264360 - RNA, 18 nt, Homo sapiens
cuugggagaccuguaauc

SEQ ID NO: 264361 - RNA, 21 nt, Homo sapiens
cuuggggaccagagcugccac

SEQ ID NO: 264362 - RNA, 16 nt, Homo sapiens
cuugguaaaauaauca

SEQ ID NO: 264363 - RNA, 16 nt, Homo sapiens
cuugguucccauuugc

SEQ ID NO: 264364 - RNA, 14 nt, Homo sapiens
cuuguaaagacugu

SEQ ID NO: 264365 - RNA, 15 nt, Homo sapiens
cuuguaaagacugua

SEQ ID NO: 264366 - RNA, 23 nt, Homo sapiens
cuuguaaauagcucagguguccc

SEQ ID NO: 264367 - RNA, 23 nt, Homo sapiens
cuuguaaaugugguaaagaguua

SEQ ID NO: 264368 - RNA, 19 nt, Homo sapiens
cuuguaaggcauacugccu

SEQ ID NO: 264369 - RNA, 18 nt, Homo sapiens
cuuguaauucuaaaugaa

SEQ ID NO: 264370 - RNA, 21 nt, Homo sapiens
cuuguacauaaugcgugcaua

SEQ ID NO: 264371 - RNA, 16 nt, Homo sapiens
cuuguauagcaguuuc

SEQ ID NO: 264372 - RNA, 22 nt, Homo sapiens
gaaaauuguacaaccugugauc

SEQ ID NO: 264373 - RNA, 14 nt, Homo sapiens
gaaacacacauuuc

SEQ ID NO: 264374 - RNA, 18 nt, Homo sapiens
gaaacacugggcuucuag

SEQ ID NO: 264375 - RNA, 23 nt, Homo sapiens
gaaacagaccuuuuucucucuua

SEQ ID NO: 264376 - RNA, 12 nt, Homo sapiens
gaaacagccacu

SEQ ID NO: 264377 - RNA, 19 nt, Homo sapiens
gaaacaguugguaacuuuu

SEQ ID NO: 264378 - RNA, 14 nt, Homo sapiens
gaaacaucauuuca

SEQ ID NO: 264379 - RNA, 15 nt, Homo sapiens
gaaacugacacaugc

SEQ ID NO: 264380 - RNA, 13 nt, Homo sapiens
gaaacugcacugu

SEQ ID NO: 264381 - RNA, 16 nt, Homo sapiens
gaaagaaaaagcaaua

SEQ ID NO: 264382 - RNA, 14 nt, Homo sapiens
gaaagaaaugccca

SEQ ID NO: 264383 - RNA, 18 nt, Homo sapiens
gaaagaccgugugugaaa

SEQ ID NO: 264384 - RNA, 20 nt, Homo sapiens
gaaagauggggcauauucau

SEQ ID NO: 264385 - RNA, 15 nt, Homo sapiens
gaaaggaaacuuuga

SEQ ID NO: 264386 - RNA, 17 nt, Homo sapiens
gaaaggaaacuuugaac

SEQ ID NO: 264387 - RNA, 15 nt, Homo sapiens
gaaagugaccauguu

SEQ ID NO: 264388 - RNA, 18 nt, Homo sapiens
gaaauaaaguuggugaca

SEQ ID NO: 264389 - RNA, 19 nt, Homo sapiens
gaaauaaaguuggugacag

SEQ ID NO: 264390 - RNA, 17 nt, Homo sapiens
gaaauacguccuuccac

SEQ ID NO: 264391 - RNA, 20 nt, Homo sapiens
gaaauacugaggggucucca

SEQ ID NO: 264392 - RNA, 12 nt, Homo sapiens
gaaaucaagggc

SEQ ID NO: 264393 - RNA, 18 nt, Homo sapiens
gaaaucuagaagacuguc

SEQ ID NO: 264394 - RNA, 19 nt, Homo sapiens
gaaaucuagaagacuguca

SEQ ID NO: 264395 - RNA, 13 nt, Homo sapiens
gaaaucuaugaaa

SEQ ID NO: 264396 - RNA, 19 nt, Homo sapiens
gaaaucuaugaaauaucau

SEQ ID NO: 264397 - RNA, 17 nt, Homo sapiens
gaaaugagcugcacucc

SEQ ID NO: 264398 - RNA, 13 nt, Homo sapiens
gaaaugccagugu

SEQ ID NO: 264399 - RNA, 13 nt, Homo sapiens
gaaauuaccaaaa

SEQ ID NO: 264400 - RNA, 21 nt, Homo sapiens
gaaauucacuuccccucuagg

SEQ ID NO: 264401 - RNA, 17 nt, Homo sapiens
gaaauuugaauuuugug

SEQ ID NO: 264402 - RNA, 14 nt, Homo sapiens
gaacaaaucugcac

SEQ ID NO: 264403 - RNA, 17 nt, Homo sapiens
gaacaaggcaaggcugu

SEQ ID NO: 264404 - RNA, 19 nt, Homo sapiens
gaacaaguuguuucauuga

SEQ ID NO: 264405 - RNA, 23 nt, Homo sapiens
gaacacuaaugaggaaacugcac

SEQ ID NO: 264406 - RNA, 20 nt, Homo sapiens
gaacacugggggaggggaca

SEQ ID NO: 264407 - RNA, 23 nt, Homo sapiens
gaacagccgcuccugucugccag

SEQ ID NO: 264408 - RNA, 20 nt, Homo sapiens
gaacagguuuaaaaaucccc

SEQ ID NO: 264409 - RNA, 20 nt, Homo sapiens
gaaccaaaucuggaagccaa

SEQ ID NO: 264410 - RNA, 12 nt, Homo sapiens
gaaccaagaacu

SEQ ID NO: 264411 - RNA, 21 nt, Homo sapiens
gaaccaagaacuuuccaggaa

SEQ ID NO: 264412 - RNA, 21 nt, Homo sapiens
gaaccacucuaucaaguauua

SEQ ID NO: 264413 - RNA, 18 nt, Homo sapiens
gaaccagauucuauccuc

SEQ ID NO: 264414 - RNA, 16 nt, Homo sapiens
gaaccaggcaacuugg

SEQ ID NO: 264415 - RNA, 18 nt, Homo sapiens
gaaccaggcaacuuggga

SEQ ID NO: 264416 - RNA, 12 nt, Homo sapiens
gaaccaggccag

SEQ ID NO: 264417 - RNA, 18 nt, Homo sapiens
gaaccaggccagagcaaa

SEQ ID NO: 264418 - RNA, 12 nt, Homo sapiens
gaaccauaucaa

SEQ ID NO: 264419 - RNA, 22 nt, Homo sapiens
gaacccuuggagccaauggaga

SEQ ID NO: 264420 - RNA, 13 nt, Homo sapiens
gaacuagacuccc

SEQ ID NO: 264421 - RNA, 17 nt, Homo sapiens
gaacuccuuggcuucuu

SEQ ID NO: 264422 - RNA, 21 nt, Homo sapiens
gaacucuucaaucucuugcac

SEQ ID NO: 264423 - RNA, 12 nt, Homo sapiens
gaacucuuggcc

SEQ ID NO: 264424 - RNA, 15 nt, Homo sapiens
gaacugaacauucca

SEQ ID NO: 264425 - RNA, 16 nt, Homo sapiens
gaacuggguacuugug

SEQ ID NO: 264426 - RNA, 16 nt, Homo sapiens
gaacuuucaccuucau

SEQ ID NO: 264427 - RNA, 13 nt, Homo sapiens
gaagaaaaaggau

SEQ ID NO: 264428 - RNA, 14 nt, Homo sapiens
gaagaaaaauaucu

SEQ ID NO: 264429 - RNA, 23 nt, Homo sapiens
gaagaaaauaguggugugauuug

SEQ ID NO: 264430 - RNA, 15 nt, Homo sapiens
gaagaaauaacaaau

SEQ ID NO: 264431 - RNA, 19 nt, Homo sapiens
gaagaacaguaacugccau

SEQ ID NO: 264432 - RNA, 15 nt, Homo sapiens
gaagaacgaagccac

SEQ ID NO: 264433 - RNA, 17 nt, Homo sapiens
gaagaagugaccaagga

SEQ ID NO: 264434 - RNA, 17 nt, Homo sapiens
gaagaauugaaaaacca

SEQ ID NO: 264435 - RNA, 17 nt, Homo sapiens
gaagacaaugacuuacu

SEQ ID NO: 264436 - RNA, 22 nt, Homo sapiens
gaagacagcucuuauauugcca

SEQ ID NO: 264437 - RNA, 12 nt, Homo sapiens
gaagacuguggc

SEQ ID NO: 264438 - RNA, 16 nt, Homo sapiens
gaagacuucaucccuc

SEQ ID NO: 264439 - RNA, 13 nt, Homo sapiens
gaagagaagggca

SEQ ID NO: 264440 - RNA, 15 nt, Homo sapiens
cuuuguaugcacuuu

SEQ ID NO: 264441 - RNA, 17 nt, Homo sapiens
cuuuguaugcacuuugu

SEQ ID NO: 264442 - RNA, 17 nt, Homo sapiens
cuuugucccggggcucc

SEQ ID NO: 264443 - RNA, 23 nt, Homo sapiens
cuuugucccggggcuccacugaa

SEQ ID NO: 264444 - RNA, 19 nt, Homo sapiens
cuuugugcagauucuuuac

SEQ ID NO: 264445 - RNA, 12 nt, Homo sapiens
cuuugugcucug

SEQ ID NO: 264446 - RNA, 18 nt, Homo sapiens
cuuuguggucgacaucaa

SEQ ID NO: 264447 - RNA, 21 nt, Homo sapiens
cuuuuaaacccuauugguaaa

SEQ ID NO: 264448 - RNA, 15 nt, Homo sapiens
cuuuuaaacucugag

SEQ ID NO: 264449 - RNA, 13 nt, Homo sapiens
cuuuuaaguugcu

SEQ ID NO: 264450 - RNA, 23 nt, Homo sapiens
cuuuuaaguugcugaugaacucu

SEQ ID NO: 264451 - RNA, 17 nt, Homo sapiens
cuuuuacugaagccuuu

SEQ ID NO: 264452 - RNA, 20 nt, Homo sapiens
cuuuuauaaacuuuaccuuu

SEQ ID NO: 264453 - RNA, 19 nt, Homo sapiens
cuuuucaauguuagccaca

SEQ ID NO: 264454 - RNA, 18 nt, Homo sapiens
cuuuucauaaccuagccu

SEQ ID NO: 264455 - RNA, 17 nt, Homo sapiens
cuuuucccaaacugauc

SEQ ID NO: 264456 - RNA, 20 nt, Homo sapiens
cuuuucccguaugcuuucuu

SEQ ID NO: 264457 - RNA, 23 nt, Homo sapiens
cuuuucggccccauguaucucag

SEQ ID NO: 264458 - RNA, 16 nt, Homo sapiens
cuuuucuccacuguca

SEQ ID NO: 264459 - RNA, 22 nt, Homo sapiens
cuuuucuccucacuguauccag

SEQ ID NO: 264460 - RNA, 14 nt, Homo sapiens
cuuuucugauccag

SEQ ID NO: 264461 - RNA, 13 nt, Homo sapiens
cuuuucuuucuca

SEQ ID NO: 264462 - RNA, 15 nt, Homo sapiens
cuuuugagugccuua

SEQ ID NO: 264463 - RNA, 16 nt, Homo sapiens
cuuuugagugccuuac

SEQ ID NO: 264464 - RNA, 21 nt, Homo sapiens
cuuuugcauaagugcaugaca

SEQ ID NO: 264465 - RNA, 22 nt, Homo sapiens
cuuuugcccacacuugggagca

SEQ ID NO: 264466 - RNA, 20 nt, Homo sapiens
cuuuugcuggucacugccau

SEQ ID NO: 264467 - RNA, 16 nt, Homo sapiens
cuuuuggagguauuca

SEQ ID NO: 264468 - RNA, 20 nt, Homo sapiens
cuuuuuaauauugauaugcu

SEQ ID NO: 264469 - RNA, 13 nt, Homo sapiens
cuuuuucuuugaa

SEQ ID NO: 264470 - RNA, 21 nt, Homo sapiens
cuuuuuuggcugcugaaggcu

SEQ ID NO: 264471 - RNA, 17 nt, Homo sapiens
cuuuuuuucuguaccag

SEQ ID NO: 264472 - RNA, 18 nt, Homo sapiens
cuuuuuuuuaaguuacac

SEQ ID NO: 264473 - RNA, 23 nt, Homo sapiens
cuuuuuuuuuuuuuaaagacaga

SEQ ID NO: 264474 - RNA, 16 nt, Homo sapiens
gaaaaaauaacacugu

SEQ ID NO: 264475 - RNA, 13 nt, Homo sapiens
gaaaaaauggaug

SEQ ID NO: 264476 - RNA, 19 nt, Homo sapiens
gaaaaaccaccaccaucac

SEQ ID NO: 264477 - RNA, 16 nt, Homo sapiens
gaaaaacuuaaauauu

SEQ ID NO: 264478 - RNA, 15 nt, Homo sapiens
gaaaaauguguaauu

SEQ ID NO: 264479 - RNA, 15 nt, Homo sapiens
gaaaacacugugcac

SEQ ID NO: 264480 - RNA, 16 nt, Homo sapiens
gaaaacacugugcaca

SEQ ID NO: 264481 - RNA, 19 nt, Homo sapiens
gaaaacacugugcacaucu

SEQ ID NO: 264482 - RNA, 10 nt, Homo sapiens
gaaaacagaa

SEQ ID NO: 264483 - RNA, 11 nt, Homo sapiens
gaaaacagaaa

SEQ ID NO: 264484 - RNA, 17 nt, Homo sapiens
gaaaacaguauuuucca

SEQ ID NO: 264485 - RNA, 21 nt, Homo sapiens
gaaaacaugcuacacacugca

SEQ ID NO: 264486 - RNA, 20 nt, Homo sapiens
gaaaagaaucggcaauguuu

SEQ ID NO: 264487 - RNA, 10 nt, Homo sapiens
gaaaagcagg

SEQ ID NO: 264488 - RNA, 19 nt, Homo sapiens
gaaaagcaguggcuccauu

SEQ ID NO: 264489 - RNA, 15 nt, Homo sapiens
gaaaagcugcugaca

SEQ ID NO: 264490 - RNA, 20 nt, Homo sapiens
gaaaagcugcugacaguguu

SEQ ID NO: 264491 - RNA, 17 nt, Homo sapiens
gaaaaggccuucuuccc

SEQ ID NO: 264492 - RNA, 18 nt, Homo sapiens
gaaaaggccuucuuccca

SEQ ID NO: 264493 - RNA, 15 nt, Homo sapiens
gaaaaguaacuguuu

SEQ ID NO: 264494 - RNA, 12 nt, Homo sapiens
gaaaaucauauu

SEQ ID NO: 264495 - RNA, 22 nt, Homo sapiens
gaaaaugaagaagaaaauagaa

SEQ ID NO: 264496 - RNA, 21 nt, Homo sapiens
gaaaaugcuguauuagucaca

SEQ ID NO: 264497 - RNA, 14 nt, Homo sapiens
gaaaauuauuugca

SEQ ID NO: 264498 - RNA, 22 nt, Homo sapiens
gaaaauugggaauaugcacaaa

SEQ ID NO: 264499 - RNA, 22 nt, Homo sapiens
gaaacaacaauuucuacuuuga

SEQ ID NO: 264500 - RNA, 23 nt, Homo sapiens
gaaacaacaauuucuacuuugaa

SEQ ID NO: 264501 - RNA, 13 nt, Homo sapiens
gaaacaacucuuu

SEQ ID NO: 264502 - RNA, 18 nt, Homo sapiens
gaaacacacauuucuuug

SEQ ID NO: 264503 - RNA, 13 nt, Homo sapiens
gaaacagcuucau

SEQ ID NO: 264504 - RNA, 18 nt, Homo sapiens
gaaaccacacagacuugg

SEQ ID NO: 264505 - RNA, 14 nt, Homo sapiens
gaaagaagugggga

SEQ ID NO: 264506 - RNA, 20 nt, Homo sapiens
gaaagaauagaacacaguuu

SEQ ID NO: 264507 - RNA, 23 nt, Homo sapiens
gaaagaggagcgugucucugaac

SEQ ID NO: 264508 - RNA, 14 nt, Homo sapiens
gaaagauggaacuu

SEQ ID NO: 264509 - RNA, 23 nt, Homo sapiens
gaaagcaucauuauuugcagaga

SEQ ID NO: 264510 - RNA, 17 nt, Homo sapiens
gaaaguacguuaugaua

SEQ ID NO: 264511 - RNA, 12 nt, Homo sapiens
gaaagugauauc

SEQ ID NO: 264512 - RNA, 22 nt, Homo sapiens
gaaauagugauuuccacaguga

SEQ ID NO: 264513 - RNA, 13 nt, Homo sapiens
gaaauauaauucu

SEQ ID NO: 264514 - RNA, 16 nt, Homo sapiens
gaaauauaauucuguu

SEQ ID NO: 264515 - RNA, 17 nt, Homo sapiens
gaaauaucaugcuccau

SEQ ID NO: 264516 - RNA, 17 nt, Homo sapiens
gaaaucuagaagacugu

SEQ ID NO: 264517 - RNA, 16 nt, Homo sapiens
gaaaucuuaaaccuua

SEQ ID NO: 264518 - RNA, 14 nt, Homo sapiens
gaaaugauuucaca

SEQ ID NO: 264519 - RNA, 21 nt, Homo sapiens
gaaaugcccaucuaugucccu

SEQ ID NO: 264520 - RNA, 23 nt, Homo sapiens
gaaaugcccaucuaugucccuug

SEQ ID NO: 264521 - RNA, 23 nt, Homo sapiens
gaaaugcugguuuuucaguuuuc

SEQ ID NO: 264522 - RNA, 15 nt, Homo sapiens
gaaauggggaacuac

SEQ ID NO: 264523 - RNA, 19 nt, Homo sapiens
gaaauugcauuuccugaca

SEQ ID NO: 264524 - RNA, 15 nt, Homo sapiens
gaaauuuuuacuuua

SEQ ID NO: 264525 - RNA, 18 nt, Homo sapiens
gaacaaaaaaaucugcag

SEQ ID NO: 264526 - RNA, 18 nt, Homo sapiens
gaacaaccucggcuccug

SEQ ID NO: 264527 - RNA, 15 nt, Homo sapiens
gaacaauauugacuu

SEQ ID NO: 264528 - RNA, 15 nt, Homo sapiens
gacagagcaagugag

SEQ ID NO: 264529 - RNA, 19 nt, Homo sapiens
gacagagcagaacuuucac

SEQ ID NO: 264530 - RNA, 14 nt, Homo sapiens
gacagagucucacu

SEQ ID NO: 264531 - RNA, 21 nt, Homo sapiens
gacagcacagccaaccuagcu

SEQ ID NO: 264532 - RNA, 13 nt, Homo sapiens
gacagccuggcac

SEQ ID NO: 264533 - RNA, 20 nt, Homo sapiens
gacagcuccuggaccaggcc

SEQ ID NO: 264534 - RNA, 12 nt, Homo sapiens
gacagcucuuau

SEQ ID NO: 264535 - RNA, 17 nt, Homo sapiens
gacagcugccugggauc

SEQ ID NO: 264536 - RNA, 16 nt, Homo sapiens
gacagcuuccuuuccu

SEQ ID NO: 264537 - RNA, 18 nt, Homo sapiens
gacagggucucacugugu

SEQ ID NO: 264538 - RNA, 17 nt, Homo sapiens
gacaguguuuucuggga

SEQ ID NO: 264539 - RNA, 21 nt, Homo sapiens
gacaguuaagagaaaugagcu

SEQ ID NO: 264540 - RNA, 17 nt, Homo sapiens
gacaucaagcacagaag

SEQ ID NO: 264541 - RNA, 12 nt, Homo sapiens
gacauugucucc

SEQ ID NO: 264542 - RNA, 14 nt, Homo sapiens
gacauugucucccg

SEQ ID NO: 264543 - RNA, 16 nt, Homo sapiens
gacauuguuggccaaa

SEQ ID NO: 264544 - RNA, 14 nt, Homo sapiens
gaccaaaacaaaca

SEQ ID NO: 264545 - RNA, 20 nt, Homo sapiens
gaccaaaugcuuuuccucaa

SEQ ID NO: 264546 - RNA, 21 nt, Homo sapiens
gaccaagauggaugcgaccca

SEQ ID NO: 264547 - RNA, 19 nt, Homo sapiens
gaccaaugucuugaugcau

SEQ ID NO: 264548 - RNA, 16 nt, Homo sapiens
gaccacagacucacau

SEQ ID NO: 264549 - RNA, 14 nt, Homo sapiens
gaccagaaccagag

SEQ ID NO: 264550 - RNA, 22 nt, Homo sapiens
gaccagaaccagagcucagaga

SEQ ID NO: 264551 - RNA, 14 nt, Homo sapiens
gaccagagcugcca

SEQ ID NO: 264552 - RNA, 18 nt, Homo sapiens
gaccagggauuuccauga

SEQ ID NO: 264553 - RNA, 19 nt, Homo sapiens
gaccagggauuuccaugau

SEQ ID NO: 264554 - RNA, 24 nt, Homo sapiens
gaccagucacugacccugugcaga

SEQ ID NO: 264555 - RNA, 19 nt, Homo sapiens
gaccaguuguugauaacca

SEQ ID NO: 264556 - RNA, 22 nt, Homo sapiens
gaccauaaccccggaagccaaa

SEQ ID NO: 264557 - RNA, 21 nt, Homo sapiens
gaccaugcucaucugcugguc

SEQ ID NO: 264558 - RNA, 17 nt, Homo sapiens
gaccauucaggacacag

SEQ ID NO: 264559 - RNA, 23 nt, Homo sapiens
gacccacggagcccuuaugacau

SEQ ID NO: 264560 - RNA, 15 nt, Homo sapiens
gacccaggaggccca

SEQ ID NO: 264561 - RNA, 18 nt, Homo sapiens
gacccagggaugacaugu

SEQ ID NO: 264562 - RNA, 23 nt, Homo sapiens
gacccagucagaguugugcacau

SEQ ID NO: 264563 - RNA, 18 nt, Homo sapiens
gacccaugcugcccugug

SEQ ID NO: 264564 - RNA, 17 nt, Homo sapiens
gaccccccuauugcugc

SEQ ID NO: 264565 - RNA, 14 nt, Homo sapiens
gacccuauugcugc

SEQ ID NO: 264566 - RNA, 15 nt, Homo sapiens
gaccgugaggccaga

SEQ ID NO: 264567 - RNA, 15 nt, Homo sapiens
gaccgugugugaaau

SEQ ID NO: 264568 - RNA, 11 nt, Homo sapiens
gaccucaggug

SEQ ID NO: 264569 - RNA, 20 nt, Homo sapiens
gaccucaggugauccaccca

SEQ ID NO: 264570 - RNA, 20 nt, Homo sapiens
gaccucccuggcuugaguga

SEQ ID NO: 264571 - RNA, 18 nt, Homo sapiens
gaccucugccugaaguca

SEQ ID NO: 264572 - RNA, 14 nt, Homo sapiens
gaccugacaccuuu

SEQ ID NO: 264573 - RNA, 15 nt, Homo sapiens
gaccugacaccuuuc

SEQ ID NO: 264574 - RNA, 17 nt, Homo sapiens
gaccugaggcugugguc

SEQ ID NO: 264575 - RNA, 14 nt, Homo sapiens
gaccuguugggagu

SEQ ID NO: 264576 - RNA, 20 nt, Homo sapiens
gaccuucuccuucaccuuug

SEQ ID NO: 264577 - RNA, 12 nt, Homo sapiens
gaccuugcacaa

SEQ ID NO: 264578 - RNA, 19 nt, Homo sapiens
gaccuugcugauggugaca

SEQ ID NO: 264579 - RNA, 22 nt, Homo sapiens
gaccuugcugauggugacauug

SEQ ID NO: 264580 - RNA, 15 nt, Homo sapiens
gaccuugggccaaga

SEQ ID NO: 264581 - RNA, 19 nt, Homo sapiens
gacgaggggugucuugggc

SEQ ID NO: 264582 - RNA, 22 nt, Homo sapiens
gacgccaucccagccccaauga

SEQ ID NO: 264583 - RNA, 21 nt, Homo sapiens
gacgucacccuccauucugca

SEQ ID NO: 264584 - RNA, 22 nt, Homo sapiens
gaagcauuuuauaaaucgcuuu

SEQ ID NO: 264585 - RNA, 21 nt, Homo sapiens
gaagccagcaggcucucaggc

SEQ ID NO: 264586 - RNA, 17 nt, Homo sapiens
gaagccagcuuuccuca

SEQ ID NO: 264587 - RNA, 17 nt, Homo sapiens
gaagccuauguaugcca

SEQ ID NO: 264588 - RNA, 22 nt, Homo sapiens
gaagcucccugaaguaagcaaa

SEQ ID NO: 264589 - RNA, 15 nt, Homo sapiens
gaagcuguaugccac

SEQ ID NO: 264590 - RNA, 21 nt, Homo sapiens
gaagcuuacaugccuaccaau

SEQ ID NO: 264591 - RNA, 16 nt, Homo sapiens
gaagcuuccuuggcuu

SEQ ID NO: 264592 - RNA, 14 nt, Homo sapiens
gaaggaauuauucc

SEQ ID NO: 264593 - RNA, 17 nt, Homo sapiens
gaaggagaaccgugaac

SEQ ID NO: 264594 - RNA, 15 nt, Homo sapiens
gaaggagcucaguua

SEQ ID NO: 264595 - RNA, 19 nt, Homo sapiens
gaaggaggagucagggaga

SEQ ID NO: 264596 - RNA, 14 nt, Homo sapiens
gaaggcaaacccau

SEQ ID NO: 264597 - RNA, 16 nt, Homo sapiens
gaaggcaaaugacuuu

SEQ ID NO: 264598 - RNA, 15 nt, Homo sapiens
gaagggacauauuca

SEQ ID NO: 264599 - RNA, 22 nt, Homo sapiens
gaaggguucaccaggucaggga

SEQ ID NO: 264600 - RNA, 15 nt, Homo sapiens
gaagguaaaacaaau

SEQ ID NO: 264601 - RNA, 20 nt, Homo sapiens
gaagguucuacgccagggga

SEQ ID NO: 264602 - RNA, 13 nt, Homo sapiens
gaagguugcaccu

SEQ ID NO: 264603 - RNA, 19 nt, Homo sapiens
gaaguaagcaaagacuuuc

SEQ ID NO: 264604 - RNA, 21 nt, Homo sapiens
gaaguaagcaaagacuuuccu

SEQ ID NO: 264605 - RNA, 14 nt, Homo sapiens
gaagucacacagua

SEQ ID NO: 264606 - RNA, 16 nt, Homo sapiens
gaagucacugcacagu

SEQ ID NO: 264607 - RNA, 15 nt, Homo sapiens
gaagucaugcguuua

SEQ ID NO: 264608 - RNA, 12 nt, Homo sapiens
gaagucauucuu

SEQ ID NO: 264609 - RNA, 16 nt, Homo sapiens
gaagucuuuguacaga

SEQ ID NO: 264610 - RNA, 17 nt, Homo sapiens
gaagugugggucugugu

SEQ ID NO: 264611 - RNA, 23 nt, Homo sapiens
gaaguguguguuucuugcuuuga

SEQ ID NO: 264612 - RNA, 20 nt, Homo sapiens
gaaguuuguuuaaaugacag

SEQ ID NO: 264613 - RNA, 15 nt, Homo sapiens
gaauacauaaaguau

SEQ ID NO: 264614 - RNA, 15 nt, Homo sapiens
gaauagaugcugacu

SEQ ID NO: 264615 - RNA, 15 nt, Homo sapiens
gaauaguaaguggug

SEQ ID NO: 264616 - RNA, 18 nt, Homo sapiens
gaauauaacuuuuuccaa

SEQ ID NO: 264617 - RNA, 14 nt, Homo sapiens
gaauaugaacggug

SEQ ID NO: 264618 - RNA, 13 nt, Homo sapiens
gaauaugcacaaa

SEQ ID NO: 264619 - RNA, 15 nt, Homo sapiens
gaauauugugcccca

SEQ ID NO: 264620 - RNA, 12 nt, Homo sapiens
gaaucacuuaau

SEQ ID NO: 264621 - RNA, 20 nt, Homo sapiens
gaaucaggaauauuuuccaa

SEQ ID NO: 264622 - RNA, 16 nt, Homo sapiens
gaauccagacccggcu

SEQ ID NO: 264623 - RNA, 23 nt, Homo sapiens
gaauccagagagcaguguggaaa

SEQ ID NO: 264624 - RNA, 21 nt, Homo sapiens
gaaucucaauaaaccagugaa

SEQ ID NO: 264625 - RNA, 15 nt, Homo sapiens
gaaucucugugccuu

SEQ ID NO: 264626 - RNA, 20 nt, Homo sapiens
gaaucucuuuuugcuuucga

SEQ ID NO: 264627 - RNA, 22 nt, Homo sapiens
gaaucuguuaccagaggacaaa

SEQ ID NO: 264628 - RNA, 15 nt, Homo sapiens
gaaugaacaaccucg

SEQ ID NO: 264629 - RNA, 20 nt, Homo sapiens
gaaugaaugucagugugacu

SEQ ID NO: 264630 - RNA, 19 nt, Homo sapiens
gaaugagcaaaaccaaaua

SEQ ID NO: 264631 - RNA, 14 nt, Homo sapiens
gaaugauauaaggu

SEQ ID NO: 264632 - RNA, 21 nt, Homo sapiens
gaaugauuaauuaaaacacaa

SEQ ID NO: 264633 - RNA, 14 nt, Homo sapiens
gaaugauucagugu

SEQ ID NO: 264634 - RNA, 19 nt, Homo sapiens
gaaugcagagaugugcccc

SEQ ID NO: 264635 - RNA, 15 nt, Homo sapiens
gaaugcagggacaaa

SEQ ID NO: 264636 - RNA, 16 nt, Homo sapiens
gaaugcagugguauga

SEQ ID NO: 264637 - RNA, 12 nt, Homo sapiens
gaaugcaugugu

SEQ ID NO: 264638 - RNA, 14 nt, Homo sapiens
gaaugcauguguga

SEQ ID NO: 264639 - RNA, 15 nt, Homo sapiens
gaaugccacugccuu

SEQ ID NO: 264640 - RNA, 15 nt, Homo sapiens
gaaugcgggggagca

SEQ ID NO: 264641 - RNA, 17 nt, Homo sapiens
gaauggagcuggcccuc

SEQ ID NO: 264642 - RNA, 21 nt, Homo sapiens
gaaugguccgugcuaaggacu

SEQ ID NO: 264643 - RNA, 15 nt, Homo sapiens
gaauguaaugguggc

SEQ ID NO: 264644 - RNA, 16 nt, Homo sapiens
gaauguagcagauccc

SEQ ID NO: 264645 - RNA, 17 nt, Homo sapiens
gaauguagcagaucccc

SEQ ID NO: 264646 - RNA, 20 nt, Homo sapiens
gaauguauugaacuuggaaa

SEQ ID NO: 264647 - RNA, 17 nt, Homo sapiens
gaauguuuacacucuuu

SEQ ID NO: 264648 - RNA, 14 nt, Homo sapiens
gaauguuugccucu

SEQ ID NO: 264649 - RNA, 19 nt, Homo sapiens
gaauguuugucucauccca

SEQ ID NO: 264650 - RNA, 20 nt, Homo sapiens
gaauguuuucaaauguucuc

SEQ ID NO: 264651 - RNA, 13 nt, Homo sapiens
gaauuaagcacag

SEQ ID NO: 264652 - RNA, 21 nt, Homo sapiens
gaauuaggcuguaacuacuuu

SEQ ID NO: 264653 - RNA, 16 nt, Homo sapiens
gaauuauaacuguaaa

SEQ ID NO: 264654 - RNA, 20 nt, Homo sapiens
gaauuauaauuaguuccuca

SEQ ID NO: 264655 - RNA, 15 nt, Homo sapiens
gaauuaucuauuuca

SEQ ID NO: 264656 - RNA, 21 nt, Homo sapiens
gaauucagucaaagauacaca

SEQ ID NO: 264657 - RNA, 22 nt, Homo sapiens
gaauucugcuaccucacugggg

SEQ ID NO: 264658 - RNA, 12 nt, Homo sapiens
gaauuucucaca

SEQ ID NO: 264659 - RNA, 13 nt, Homo sapiens
gaauuugccuaau

SEQ ID NO: 264660 - RNA, 18 nt, Homo sapiens
gaauuuggguaugaacag

SEQ ID NO: 264661 - RNA, 20 nt, Homo sapiens
gaauuuucagcaaaguacaa

SEQ ID NO: 264662 - RNA, 19 nt, Homo sapiens
gaauuuucucuaacuucaa

SEQ ID NO: 264663 - RNA, 20 nt, Homo sapiens
gaauuuucucuaacuucaag

SEQ ID NO: 264664 - RNA, 16 nt, Homo sapiens
gaauuuuuacugggga

SEQ ID NO: 264665 - RNA, 21 nt, Homo sapiens
gaauuuuuauauccacuaaaa

SEQ ID NO: 264666 - RNA, 14 nt, Homo sapiens
gaauuuuugaagug

SEQ ID NO: 264667 - RNA, 16 nt, Homo sapiens
gacaaauaauaagcaa

SEQ ID NO: 264668 - RNA, 18 nt, Homo sapiens
gacaaaugccacacggcu

SEQ ID NO: 264669 - RNA, 15 nt, Homo sapiens
gacaaccucauuuua

SEQ ID NO: 264670 - RNA, 21 nt, Homo sapiens
gacacagcucuucuccaggcu

SEQ ID NO: 264671 - RNA, 16 nt, Homo sapiens
gacacaggcccggcuc

SEQ ID NO: 264672 - RNA, 24 nt, Homo sapiens
gacacaugcugaacaucacagcuu

SEQ ID NO: 264673 - RNA, 11 nt, Homo sapiens
gacaccaaauu

SEQ ID NO: 264674 - RNA, 16 nt, Homo sapiens
gacaccuaggcuaggg

SEQ ID NO: 264675 - RNA, 17 nt, Homo sapiens
gacaccuugacagggca

SEQ ID NO: 264676 - RNA, 20 nt, Homo sapiens
gacacuauuuaucugugcaa

SEQ ID NO: 264677 - RNA, 21 nt, Homo sapiens
gacacuauuuaucugugcaaa

SEQ ID NO: 264678 - RNA, 14 nt, Homo sapiens
gacagaagcguaua

SEQ ID NO: 264679 - RNA, 21 nt, Homo sapiens
gacagagccccacccucagau

SEQ ID NO: 264680 - RNA, 19 nt, Homo sapiens
gacagagugagacucuguc

SEQ ID NO: 264681 - RNA, 22 nt, Homo sapiens
gacagccacggccaggccagag

SEQ ID NO: 264682 - RNA, 14 nt, Homo sapiens
gacaggaccaggga

SEQ ID NO: 264683 - RNA, 18 nt, Homo sapiens
gagccuauaucuucaucu

SEQ ID NO: 264684 - RNA, 23 nt, Homo sapiens
gagccuauaucuucaucugugaa

SEQ ID NO: 264685 - RNA, 21 nt, Homo sapiens
gagccucaaaugagaaaaugu

SEQ ID NO: 264686 - RNA, 17 nt, Homo sapiens
gagccuccugcccuuac

SEQ ID NO: 264687 - RNA, 23 nt, Homo sapiens
gagccuccugcccuuaccugcca

SEQ ID NO: 264688 - RNA, 14 nt, Homo sapiens
gagccugacccuca

SEQ ID NO: 264689 - RNA, 12 nt, Homo sapiens
gagccugcaguu

SEQ ID NO: 264690 - RNA, 16 nt, Homo sapiens
gagccuggcaagaaug

SEQ ID NO: 264691 - RNA, 13 nt, Homo sapiens
gagccugguccca

SEQ ID NO: 264692 - RNA, 21 nt, Homo sapiens
gagccuuaaaacccacaaaag

SEQ ID NO: 264693 - RNA, 14 nt, Homo sapiens
gagcgagacuuggu

SEQ ID NO: 264694 - RNA, 15 nt, Homo sapiens
gagcuccuaagccau

SEQ ID NO: 264695 - RNA, 21 nt, Homo sapiens
gagcucgguggacccagggau

SEQ ID NO: 264696 - RNA, 16 nt, Homo sapiens
gagcugauacuuugac

SEQ ID NO: 264697 - RNA, 21 nt, Homo sapiens
gagcugauacuuugacagugu

SEQ ID NO: 264698 - RNA, 11 nt, Homo sapiens
gagcugggaug

SEQ ID NO: 264699 - RNA, 22 nt, Homo sapiens
gagcuggggaugucucucauga

SEQ ID NO: 264700 - RNA, 16 nt, Homo sapiens
gaggaaacugcacugu

SEQ ID NO: 264701 - RNA, 13 nt, Homo sapiens
gaggaaagaaaga

SEQ ID NO: 264702 - RNA, 15 nt, Homo sapiens
gaggaaagcaaagga

SEQ ID NO: 264703 - RNA, 20 nt, Homo sapiens
gaggaaugcuggacuggagg

SEQ ID NO: 264704 - RNA, 18 nt, Homo sapiens
gaggacacuaaccacgcu

SEQ ID NO: 264705 - RNA, 13 nt, Homo sapiens
gaggcacacagcu

SEQ ID NO: 264706 - RNA, 22 nt, Homo sapiens
gaggcagccccauucugccugc

SEQ ID NO: 264707 - RNA, 15 nt, Homo sapiens
gaggcagccggccaa

SEQ ID NO: 264708 - RNA, 13 nt, Homo sapiens
gaggcagggucuc

SEQ ID NO: 264709 - RNA, 14 nt, Homo sapiens
gaggcaucuggaaa

SEQ ID NO: 264710 - RNA, 18 nt, Homo sapiens
gaggccaggcagauccca

SEQ ID NO: 264711 - RNA, 17 nt, Homo sapiens
gaggccauucuuuccca

SEQ ID NO: 264712 - RNA, 16 nt, Homo sapiens
gaggccucucauucca

SEQ ID NO: 264713 - RNA, 20 nt, Homo sapiens
gaggcgcaggacaccaugaa

SEQ ID NO: 264714 - RNA, 22 nt, Homo sapiens
gaggcuccacuuggucugugag

SEQ ID NO: 264715 - RNA, 23 nt, Homo sapiens
gaggcuccacuuggucugugaga

SEQ ID NO: 264716 - RNA, 16 nt, Homo sapiens
gagggcagaucacuuc

SEQ ID NO: 264717 - RNA, 16 nt, Homo sapiens
gagggcagucgauaga

SEQ ID NO: 264718 - RNA, 17 nt, Homo sapiens
gagggccacaugggagg

SEQ ID NO: 264719 - RNA, 13 nt, Homo sapiens
gagguacucuccu

SEQ ID NO: 264720 - RNA, 21 nt, Homo sapiens
gagguauucaauauccuuugc

SEQ ID NO: 264721 - RNA, 17 nt, Homo sapiens
gaggucaucacuuugac

SEQ ID NO: 264722 - RNA, 14 nt, Homo sapiens
gaggucuaaucuag

SEQ ID NO: 264723 - RNA, 14 nt, Homo sapiens
gaggucucuguggc

SEQ ID NO: 264724 - RNA, 17 nt, Homo sapiens
gaggugagggaagccug

SEQ ID NO: 264725 - RNA, 13 nt, Homo sapiens
gagguuugcaaau

SEQ ID NO: 264726 - RNA, 18 nt, Homo sapiens
gaguacuacaguccuccc

SEQ ID NO: 264727 - RNA, 22 nt, Homo sapiens
gaguacuuugaagaugucaucc

SEQ ID NO: 264728 - RNA, 16 nt, Homo sapiens
gaguaggaagacuuug

SEQ ID NO: 264729 - RNA, 15 nt, Homo sapiens
gaccucggugggcau

SEQ ID NO: 264730 - RNA, 17 nt, Homo sapiens
gaccugacaccuuucau

SEQ ID NO: 264731 - RNA, 19 nt, Homo sapiens
gaccugccaggcacacuga

SEQ ID NO: 264732 - RNA, 20 nt, Homo sapiens
gaccugccaggcacacugag

SEQ ID NO: 264733 - RNA, 17 nt, Homo sapiens
gaccuggugcugccucu

SEQ ID NO: 264734 - RNA, 17 nt, Homo sapiens
gaccuguaaucauauaa

SEQ ID NO: 264735 - RNA, 16 nt, Homo sapiens
gaccuguuuuaaauga

SEQ ID NO: 264736 - RNA, 14 nt, Homo sapiens
gaccuucuccuuca

SEQ ID NO: 264737 - RNA, 18 nt, Homo sapiens
gaccuugaaugaugccau

SEQ ID NO: 264738 - RNA, 19 nt, Homo sapiens
gaccuuuaagagaaaugag

SEQ ID NO: 264739 - RNA, 18 nt, Homo sapiens
gacggugcccaagccaga

SEQ ID NO: 264740 - RNA, 17 nt, Homo sapiens
gacgugauuuugcugua

SEQ ID NO: 264741 - RNA, 20 nt, Homo sapiens
gacgugauuuugcuguagaa

SEQ ID NO: 264742 - RNA, 20 nt, Homo sapiens
gacgugcacgcacacugucu

SEQ ID NO: 264743 - RNA, 17 nt, Homo sapiens
gacguguuaugacucca

SEQ ID NO: 264744 - RNA, 13 nt, Homo sapiens
gacuaaaacuaca

SEQ ID NO: 264745 - RNA, 12 nt, Homo sapiens
gacuacaggugu

SEQ ID NO: 264746 - RNA, 18 nt, Homo sapiens
gacuagauguaguauuuu

SEQ ID NO: 264747 - RNA, 20 nt, Homo sapiens
gacuauggcucuacuuucag

SEQ ID NO: 264748 - RNA, 21 nt, Homo sapiens
gacucaagacuuccagagccu

SEQ ID NO: 264749 - RNA, 12 nt, Homo sapiens
gacucaagcaag

SEQ ID NO: 264750 - RNA, 21 nt, Homo sapiens
gacucaaguuucuucaaucug

SEQ ID NO: 264751 - RNA, 12 nt, Homo sapiens
gacucaaugcac

SEQ ID NO: 264752 - RNA, 17 nt, Homo sapiens
gacucaaugcacugaca

SEQ ID NO: 264753 - RNA, 21 nt, Homo sapiens
gacucacuagacucaggaaag

SEQ ID NO: 264754 - RNA, 19 nt, Homo sapiens
gacucagggccccagcacu

SEQ ID NO: 264755 - RNA, 15 nt, Homo sapiens
gacucaucauuucca

SEQ ID NO: 264756 - RNA, 13 nt, Homo sapiens
gacuccugugcaa

SEQ ID NO: 264757 - RNA, 17 nt, Homo sapiens
gacuccugugcaacuuu

SEQ ID NO: 264758 - RNA, 22 nt, Homo sapiens
gacucgauagugguggugaaca

SEQ ID NO: 264759 - RNA, 16 nt, Homo sapiens
gacucgguuucuccaa

SEQ ID NO: 264760 - RNA, 13 nt, Homo sapiens
gacucuaacagua

SEQ ID NO: 264761 - RNA, 17 nt, Homo sapiens
gacucuacagaggccau

SEQ ID NO: 264762 - RNA, 22 nt, Homo sapiens
gacucuauuaaaaucuucaaua

SEQ ID NO: 264763 - RNA, 23 nt, Homo sapiens
gacucuccagaaagcucaucuca

SEQ ID NO: 264764 - RNA, 17 nt, Homo sapiens
gacucuuggcacagcau

SEQ ID NO: 264765 - RNA, 16 nt, Homo sapiens
gacucuuguacuugau

SEQ ID NO: 264766 - RNA, 18 nt, Homo sapiens
gacucuuuccaaccggcu

SEQ ID NO: 264767 - RNA, 17 nt, Homo sapiens
gacucuuuggacacuca

SEQ ID NO: 264768 - RNA, 17 nt, Homo sapiens
gacugcauggagucuuc

SEQ ID NO: 264769 - RNA, 22 nt, Homo sapiens
gacuggccaagguuuggggaag

SEQ ID NO: 264770 - RNA, 20 nt, Homo sapiens
gacuggguuuugugauugcc

SEQ ID NO: 264771 - RNA, 18 nt, Homo sapiens
gacugguugguuuugcca

SEQ ID NO: 264772 - RNA, 20 nt, Homo sapiens
gacuguggcugcuagcacuu

SEQ ID NO: 264773 - RNA, 21 nt, Homo sapiens
gacuguguggagcuaaggaca

SEQ ID NO: 264774 - RNA, 18 nt, Homo sapiens
gacuguucuuuuacaaga

SEQ ID NO: 264775 - RNA, 20 nt, Homo sapiens
gacuuaagcacacuugacau

SEQ ID NO: 264776 - RNA, 12 nt, Homo sapiens
gacuuaucaaca

SEQ ID NO: 264777 - RNA, 17 nt, Homo sapiens
gacuucauuuuuccuaa

SEQ ID NO: 264778 - RNA, 20 nt, Homo sapiens
gacuucauuuuuccuaacag

SEQ ID NO: 264779 - RNA, 19 nt, Homo sapiens
gacuuccauuugcuuuguc

SEQ ID NO: 264780 - RNA, 9 nt, Homo sapiens
gacuuggaa

SEQ ID NO: 264781 - RNA, 14 nt, Homo sapiens
gacuuggaaauggg

SEQ ID NO: 264782 - RNA, 20 nt, Homo sapiens
gacuugucccgggacaccua

SEQ ID NO: 264783 - RNA, 19 nt, Homo sapiens
gacuuugaggguguauauu

SEQ ID NO: 264784 - RNA, 12 nt, Homo sapiens
gagaaaugagcu

SEQ ID NO: 264785 - RNA, 17 nt, Homo sapiens
gagaaaugccagugugc

SEQ ID NO: 264786 - RNA, 14 nt, Homo sapiens
gagaacaagaaagg

SEQ ID NO: 264787 - RNA, 19 nt, Homo sapiens
gagaacaagaaagggccag

SEQ ID NO: 264788 - RNA, 13 nt, Homo sapiens
gagaacuacucag

SEQ ID NO: 264789 - RNA, 19 nt, Homo sapiens
gagaagauucuuguauuua

SEQ ID NO: 264790 - RNA, 13 nt, Homo sapiens
gagaaugucagua

SEQ ID NO: 264791 - RNA, 21 nt, Homo sapiens
gagacaaaaucuuaaaugcca

SEQ ID NO: 264792 - RNA, 22 nt, Homo sapiens
gagacacuauuuaucugugcaa

SEQ ID NO: 264793 - RNA, 19 nt, Homo sapiens
gagacagaguuuucacucu

SEQ ID NO: 264794 - RNA, 23 nt, Homo sapiens
gagacagcacagccaaccuagcu

SEQ ID NO: 264795 - RNA, 21 nt, Homo sapiens
gagacagcacaggcagcccca

SEQ ID NO: 264796 - RNA, 15 nt, Homo sapiens
gagaccaucccugaa

SEQ ID NO: 264797 - RNA, 21 nt, Homo sapiens
gagacugucucaagagggcac

SEQ ID NO: 264798 - RNA, 20 nt, Homo sapiens
gagacuuugacucuccagaa

SEQ ID NO: 264799 - RNA, 13 nt, Homo sapiens
gagagaacuggag

SEQ ID NO: 264800 - RNA, 15 nt, Homo sapiens
gagagaaggggccca

SEQ ID NO: 264801 - RNA, 14 nt, Homo sapiens
gagagaaugccaca

SEQ ID NO: 264802 - RNA, 14 nt, Homo sapiens
gagagagugcuauu

SEQ ID NO: 264803 - RNA, 13 nt, Homo sapiens
gagagccuuccag

SEQ ID NO: 264804 - RNA, 23 nt, Homo sapiens
gagaggauuuggcucgcuguggu

SEQ ID NO: 264805 - RNA, 19 nt, Homo sapiens
gagaggcagauuucaggga

SEQ ID NO: 264806 - RNA, 12 nt, Homo sapiens
gagagggggcca

SEQ ID NO: 264807 - RNA, 14 nt, Homo sapiens
gagaguccaucagc

SEQ ID NO: 264808 - RNA, 20 nt, Homo sapiens
gagaguccaucagccuccau

SEQ ID NO: 264809 - RNA, 16 nt, Homo sapiens
gagaguggcuccuccc

SEQ ID NO: 264810 - RNA, 15 nt, Homo sapiens
gagaguugacuuggu

SEQ ID NO: 264811 - RNA, 18 nt, Homo sapiens
gagauagccaaggccaaa

SEQ ID NO: 264812 - RNA, 13 nt, Homo sapiens
gagauauuuacau

SEQ ID NO: 264813 - RNA, 21 nt, Homo sapiens
gagaucacgccacugcacuau

SEQ ID NO: 264814 - RNA, 16 nt, Homo sapiens
gagaucccaacacugc

SEQ ID NO: 264815 - RNA, 11 nt, Homo sapiens
gagauccuccu

SEQ ID NO: 264816 - RNA, 19 nt, Homo sapiens
gagaucuauauauguauaa

SEQ ID NO: 264817 - RNA, 17 nt, Homo sapiens
gagauuaccuccugaga

SEQ ID NO: 264818 - RNA, 12 nt, Homo sapiens
gagcaaacagaa

SEQ ID NO: 264819 - RNA, 13 nt, Homo sapiens
gagcaaacagaaa

SEQ ID NO: 264820 - RNA, 21 nt, Homo sapiens
gagcaaggaaacguaauuugg

SEQ ID NO: 264821 - RNA, 18 nt, Homo sapiens
gagcaagugagacccugu

SEQ ID NO: 264822 - RNA, 11 nt, Homo sapiens
gagcacacugu

SEQ ID NO: 264823 - RNA, 21 nt, Homo sapiens
gagcacuggguugacuuucag

SEQ ID NO: 264824 - RNA, 17 nt, Homo sapiens
gagcaguccugccucag

SEQ ID NO: 264825 - RNA, 21 nt, Homo sapiens
gagcagugaaugauucagugu

SEQ ID NO: 264826 - RNA, 21 nt, Homo sapiens
gagcaguuugguuucuagcau

SEQ ID NO: 264827 - RNA, 20 nt, Homo sapiens
gagcauugcagcuccaggaa

SEQ ID NO: 264828 - RNA, 20 nt, Homo sapiens
gagccaccacguccagcugg

SEQ ID NO: 264829 - RNA, 15 nt, Homo sapiens
gagccaccaguucuc

SEQ ID NO: 264830 - RNA, 17 nt, Homo sapiens
gagccaccccuaaagag

SEQ ID NO: 264831 - RNA, 18 nt, Homo sapiens
gagccacugcaccgggcc

SEQ ID NO: 264832 - RNA, 14 nt, Homo sapiens
gagccauauaggca

SEQ ID NO: 264833 - RNA, 13 nt, Homo sapiens
gagccauaugaau

SEQ ID NO: 264834 - RNA, 17 nt, Homo sapiens
gagccccccacugcaga

SEQ ID NO: 264835 - RNA, 22 nt, Homo sapiens
gagcccugucuccucucucugu

SEQ ID NO: 264836 - RNA, 14 nt, Homo sapiens
gagcccuuaugaca

SEQ ID NO: 264837 - RNA, 17 nt, Homo sapiens
gagccgggucugccucu

SEQ ID NO: 264838 - RNA, 22 nt, Homo sapiens
gauuagccucgucuuucagcga

SEQ ID NO: 264839 - RNA, 21 nt, Homo sapiens
gauuauuggaaauuuguuaua

SEQ ID NO: 264840 - RNA, 14 nt, Homo sapiens
gauucaguguuaaa

SEQ ID NO: 264841 - RNA, 14 nt, Homo sapiens
gauucauaaugacu

SEQ ID NO: 264842 - RNA, 21 nt, Homo sapiens
gauucuaugaggcaaccacag

SEQ ID NO: 264843 - RNA, 13 nt, Homo sapiens
gauucuauguuaa

SEQ ID NO: 264844 - RNA, 15 nt, Homo sapiens
gauucuccugccuca

SEQ ID NO: 264845 - RNA, 17 nt, Homo sapiens
gauucugguuccagggu

SEQ ID NO: 264846 - RNA, 16 nt, Homo sapiens
gauucuuccugcuuag

SEQ ID NO: 264847 - RNA, 17 nt, Homo sapiens
gauucuuucccaauuca

SEQ ID NO: 264848 - RNA, 19 nt, Homo sapiens
gauugauagaguguuauca

SEQ ID NO: 264849 - RNA, 15 nt, Homo sapiens
gauugauuaccaagu

SEQ ID NO: 264850 - RNA, 23 nt, Homo sapiens
gauugccucugaagccuauguau

SEQ ID NO: 264851 - RNA, 18 nt, Homo sapiens
gauugcuuaaaauagcaa

SEQ ID NO: 264852 - RNA, 18 nt, Homo sapiens
gauuggcaggaguuggaa

SEQ ID NO: 264853 - RNA, 19 nt, Homo sapiens
gauuucugacuuggggaaa

SEQ ID NO: 264854 - RNA, 15 nt, Homo sapiens
gauuucuguuuagau

SEQ ID NO: 264855 - RNA, 17 nt, Homo sapiens
gauuugggcucuuggaa

SEQ ID NO: 264856 - RNA, 16 nt, Homo sapiens
gauuuuaugcuuuaaa

SEQ ID NO: 264857 - RNA, 20 nt, Homo sapiens
gauuuugaaauuuuuauuaa

SEQ ID NO: 264858 - RNA, 16 nt, Homo sapiens
gauuuugcuguagaag

SEQ ID NO: 264859 - RNA, 19 nt, Homo sapiens
gcaaaaagcaaaaucauuu

SEQ ID NO: 264860 - RNA, 23 nt, Homo sapiens
gcaaaaccaaauauuccagagac

SEQ ID NO: 264861 - RNA, 19 nt, Homo sapiens
gcaaaagagucaacaguau

SEQ ID NO: 264862 - RNA, 20 nt, Homo sapiens
gcaaaagucauugcugacag

SEQ ID NO: 264863 - RNA, 19 nt, Homo sapiens
gcaaaauacaugacauuua

SEQ ID NO: 264864 - RNA, 16 nt, Homo sapiens
gcaaaauaguucugca

SEQ ID NO: 264865 - RNA, 18 nt, Homo sapiens
gcaaacagaaaaagaagg

SEQ ID NO: 264866 - RNA, 21 nt, Homo sapiens
gcaaacuucagaguucuugcc

SEQ ID NO: 264867 - RNA, 12 nt, Homo sapiens
gcaaagaugaag

SEQ ID NO: 264868 - RNA, 21 nt, Homo sapiens
gcaaagcauugagcaaagggg

SEQ ID NO: 264869 - RNA, 18 nt, Homo sapiens
gcaaagggagcacugggu

SEQ ID NO: 264870 - RNA, 20 nt, Homo sapiens
gcaaaguaucccuacuguaa

SEQ ID NO: 264871 - RNA, 13 nt, Homo sapiens
gcaaauacuguau

SEQ ID NO: 264872 - RNA, 17 nt, Homo sapiens
gcaaauggccaaugaga

SEQ ID NO: 264873 - RNA, 14 nt, Homo sapiens
gcaacagacuugaa

SEQ ID NO: 264874 - RNA, 22 nt, Homo sapiens
gaggcugggcucccuucccacc

SEQ ID NO: 264875 - RNA, 19 nt, Homo sapiens
gaggcuggguucauuugug

SEQ ID NO: 264876 - RNA, 16 nt, Homo sapiens
gagggaaaacagaaaa

SEQ ID NO: 264877 - RNA, 24 nt, Homo sapiens
gagggaacccucuaagggaccuca

SEQ ID NO: 264878 - RNA, 15 nt, Homo sapiens
gagggaacuguguag

SEQ ID NO: 264879 - RNA, 13 nt, Homo sapiens
gagggaagccuga

SEQ ID NO: 264880 - RNA, 14 nt, Homo sapiens
gagggagugacaga

SEQ ID NO: 264881 - RNA, 22 nt, Homo sapiens
gagggauaguggggucagggcu

SEQ ID NO: 264882 - RNA, 21 nt, Homo sapiens
gagggcacagaaaauggaaga

SEQ ID NO: 264883 - RNA, 17 nt, Homo sapiens
gagggcccaguggugcc

SEQ ID NO: 264884 - RNA, 19 nt, Homo sapiens
gaggggugcagaggcugug

SEQ ID NO: 264885 - RNA, 14 nt, Homo sapiens
gagguacgaaaaga

SEQ ID NO: 264886 - RNA, 20 nt, Homo sapiens
gaggucaaggcugcagugag

SEQ ID NO: 264887 - RNA, 15 nt, Homo sapiens
gaggugggauccucc

SEQ ID NO: 264888 - RNA, 14 nt, Homo sapiens
gagguuugcaaauc

SEQ ID NO: 264889 - RNA, 17 nt, Homo sapiens
gagguuugccagcauuu

SEQ ID NO: 264890 - RNA, 19 nt, Homo sapiens
gaguacaaaguaagccaug

SEQ ID NO: 264891 - RNA, 19 nt, Homo sapiens
gaguacuuugaagauguca

SEQ ID NO: 264892 - RNA, 21 nt, Homo sapiens
gaguacuuugaagaugucauc

SEQ ID NO: 264893 - RNA, 12 nt, Homo sapiens
gaguagcuggau

SEQ ID NO: 264894 - RNA, 14 nt, Homo sapiens
gagucgcugugcca

SEQ ID NO: 264895 - RNA, 14 nt, Homo sapiens
gagucuacagagaa

SEQ ID NO: 264896 - RNA, 18 nt, Homo sapiens
gagucucuucuccacugg

SEQ ID NO: 264897 - RNA, 13 nt, Homo sapiens
gagugagcugguu

SEQ ID NO: 264898 - RNA, 20 nt, Homo sapiens
gagugcaccacuucaaguga

SEQ ID NO: 264899 - RNA, 13 nt, Homo sapiens
gagugccugccuc

SEQ ID NO: 264900 - RNA, 12 nt, Homo sapiens
gaguggcccaag

SEQ ID NO: 264901 - RNA, 15 nt, Homo sapiens
gaguggcccaagacu

SEQ ID NO: 264902 - RNA, 23 nt, Homo sapiens
gagugggcccaaugcacuuuguu

SEQ ID NO: 264903 - RNA, 15 nt, Homo sapiens
gagugggcuaagcac

SEQ ID NO: 264904 - RNA, 20 nt, Homo sapiens
gagugggguagguugggaga

SEQ ID NO: 264905 - RNA, 13 nt, Homo sapiens
gaguggugacagg

SEQ ID NO: 264906 - RNA, 15 nt, Homo sapiens
gagugucaagcugac

SEQ ID NO: 264907 - RNA, 21 nt, Homo sapiens
gaguuaauauauagaagggua

SEQ ID NO: 264908 - RNA, 16 nt, Homo sapiens
gaguuacagacaaagc

SEQ ID NO: 264909 - RNA, 14 nt, Homo sapiens
gaguuacaguucug

SEQ ID NO: 264910 - RNA, 16 nt, Homo sapiens
gaguuaguuugaguua

SEQ ID NO: 264911 - RNA, 21 nt, Homo sapiens
gaguuauuuuuauuuauuuaa

SEQ ID NO: 264912 - RNA, 20 nt, Homo sapiens
gaguucauacccuguuacca

SEQ ID NO: 264913 - RNA, 20 nt, Homo sapiens
gaguucauggauauguuaua

SEQ ID NO: 264914 - RNA, 21 nt, Homo sapiens
gaguucauggauauguuauac

SEQ ID NO: 264915 - RNA, 16 nt, Homo sapiens
gaguuccgacugccau

SEQ ID NO: 264916 - RNA, 14 nt, Homo sapiens
gaguugaagacaga

SEQ ID NO: 264917 - RNA, 21 nt, Homo sapiens
gaguuugggaacugcaauaac

SEQ ID NO: 264918 - RNA, 20 nt, Homo sapiens
gauaaguaaguuugauuuca

SEQ ID NO: 264919 - RNA, 18 nt, Homo sapiens
gauaaucucuccauuccc

SEQ ID NO: 264920 - RNA, 18 nt, Homo sapiens
gauacaggaaaagcugcu

SEQ ID NO: 264921 - RNA, 20 nt, Homo sapiens
gauacagugucugacuauaa

SEQ ID NO: 264922 - RNA, 19 nt, Homo sapiens
gauacaugcauugcucuua

SEQ ID NO: 264923 - RNA, 14 nt, Homo sapiens
gauacaugucuuuc

SEQ ID NO: 264924 - RNA, 14 nt, Homo sapiens
gauacccaucccau

SEQ ID NO: 264925 - RNA, 20 nt, Homo sapiens
gauacccaucccauaugccu

SEQ ID NO: 264926 - RNA, 17 nt, Homo sapiens
gauacugcgacuuucug

SEQ ID NO: 264927 - RNA, 19 nt, Homo sapiens
gauacugcgacuuucugcc

SEQ ID NO: 264928 - RNA, 22 nt, Homo sapiens
gauacuguaucaugacaaagac

SEQ ID NO: 264929 - RNA, 15 nt, Homo sapiens
gauagauauaugcuc

SEQ ID NO: 264930 - RNA, 20 nt, Homo sapiens
gauagauauaugcucugcau

SEQ ID NO: 264931 - RNA, 15 nt, Homo sapiens
gauagccaaggccaa

SEQ ID NO: 264932 - RNA, 21 nt, Homo sapiens
gauaggguuucuaaugguuau

SEQ ID NO: 264933 - RNA, 13 nt, Homo sapiens
gauauaugcucug

SEQ ID NO: 264934 - RNA, 13 nt, Homo sapiens
gauaucacuucca

SEQ ID NO: 264935 - RNA, 18 nt, Homo sapiens
gauaucugcagggacaga

SEQ ID NO: 264936 - RNA, 19 nt, Homo sapiens
gauaucugcagggacagag

SEQ ID NO: 264937 - RNA, 22 nt, Homo sapiens
gauaucugcagggacagagcau

SEQ ID NO: 264938 - RNA, 13 nt, Homo sapiens
gauaugcuguauu

SEQ ID NO: 264939 - RNA, 23 nt, Homo sapiens
gauauguuauacugaaccaggcc

SEQ ID NO: 264940 - RNA, 13 nt, Homo sapiens
gauauugcagcuu

SEQ ID NO: 264941 - RNA, 17 nt, Homo sapiens
gauauuuuuuacuuuag

SEQ ID NO: 264942 - RNA, 16 nt, Homo sapiens
gaucaaaguugaugaa

SEQ ID NO: 264943 - RNA, 23 nt, Homo sapiens
gaucacagccucugaaaaccaau

SEQ ID NO: 264944 - RNA, 19 nt, Homo sapiens
gaucagacuuuaauuucuc

SEQ ID NO: 264945 - RNA, 22 nt, Homo sapiens
gaucagcuaccaggcaggauau

SEQ ID NO: 264946 - RNA, 21 nt, Homo sapiens
gaucaggccaaccccaaagaa

SEQ ID NO: 264947 - RNA, 18 nt, Homo sapiens
gaucauccacugugccau

SEQ ID NO: 264948 - RNA, 20 nt, Homo sapiens
gaucaugccacuacacucca

SEQ ID NO: 264949 - RNA, 18 nt, Homo sapiens
gauccaaacccaucuucc

SEQ ID NO: 264950 - RNA, 21 nt, Homo sapiens
gauccaccugucucagccucc

SEQ ID NO: 264951 - RNA, 14 nt, Homo sapiens
gauccacuucucuc

SEQ ID NO: 264952 - RNA, 16 nt, Homo sapiens
gaucccaacacugcca

SEQ ID NO: 264953 - RNA, 19 nt, Homo sapiens
gaucccagcucacugcagc

SEQ ID NO: 264954 - RNA, 12 nt, Homo sapiens
gaucccaugagc

SEQ ID NO: 264955 - RNA, 21 nt, Homo sapiens
gauccgucuuuggccuccucc

SEQ ID NO: 264956 - RNA, 21 nt, Homo sapiens
gauccugucuggccuucaguu

SEQ ID NO: 264957 - RNA, 18 nt, Homo sapiens
gaucguucucugccucac

SEQ ID NO: 264958 - RNA, 17 nt, Homo sapiens
gaucuaggaagacuuug

SEQ ID NO: 264959 - RNA, 15 nt, Homo sapiens
gaucucggugcugaa

SEQ ID NO: 264960 - RNA, 16 nt, Homo sapiens
gaucugccuaaggacu

SEQ ID NO: 264961 - RNA, 19 nt, Homo sapiens
gaugaaaaaauaacacugu

SEQ ID NO: 264962 - RNA, 18 nt, Homo sapiens
gaugaaacaucauuucaa

SEQ ID NO: 264963 - RNA, 17 nt, Homo sapiens
gaugaacaaaucugcac

SEQ ID NO: 264964 - RNA, 17 nt, Homo sapiens
gaugaagcacacaggaa

SEQ ID NO: 264965 - RNA, 17 nt, Homo sapiens
gaugaaguuaucuggcu

SEQ ID NO: 264966 - RNA, 13 nt, Homo sapiens
gaugaaucacuua

SEQ ID NO: 264967 - RNA, 12 nt, Homo sapiens
gaugacauuccc

SEQ ID NO: 264968 - RNA, 13 nt, Homo sapiens
gaugacauucccu

SEQ ID NO: 264969 - RNA, 19 nt, Homo sapiens
gaugaccuugaaugaugcc

SEQ ID NO: 264970 - RNA, 13 nt, Homo sapiens
gaugacuauucag

SEQ ID NO: 264971 - RNA, 16 nt, Homo sapiens
gaugagaggaaaucac

SEQ ID NO: 264972 - RNA, 15 nt, Homo sapiens
gaugagaugacagau

SEQ ID NO: 264973 - RNA, 14 nt, Homo sapiens
gaugagcaguaccg

SEQ ID NO: 264974 - RNA, 16 nt, Homo sapiens
gaugauaaaacacaaa

SEQ ID NO: 264975 - RNA, 16 nt, Homo sapiens
gaugauacacuaugaa

SEQ ID NO: 264976 - RNA, 21 nt, Homo sapiens
gaugaucuaggaagacuuugg

SEQ ID NO: 264977 - RNA, 15 nt, Homo sapiens
gaugcagugcuucca

SEQ ID NO: 264978 - RNA, 16 nt, Homo sapiens
gaugccuucuccagac

SEQ ID NO: 264979 - RNA, 22 nt, Homo sapiens
gaugcugucuucguacugggaa

SEQ ID NO: 264980 - RNA, 13 nt, Homo sapiens
gaugcugugaaga

SEQ ID NO: 264981 - RNA, 19 nt, Homo sapiens
gauggagauauuuacauga

SEQ ID NO: 264982 - RNA, 18 nt, Homo sapiens
gauggagccagcucugca

SEQ ID NO: 264983 - RNA, 13 nt, Homo sapiens
gauggauuuccag

SEQ ID NO: 264984 - RNA, 21 nt, Homo sapiens
gauggccauguauuaccugaa

SEQ ID NO: 264985 - RNA, 18 nt, Homo sapiens
gaugggcuuagagcucuc

SEQ ID NO: 264986 - RNA, 19 nt, Homo sapiens
gaugggcuuagagcucuca

SEQ ID NO: 264987 - RNA, 15 nt, Homo sapiens
gauggggcauauuca

SEQ ID NO: 264988 - RNA, 20 nt, Homo sapiens
gauguaccagcaucucccag

SEQ ID NO: 264989 - RNA, 14 nt, Homo sapiens
gauguagugccucu

SEQ ID NO: 264990 - RNA, 18 nt, Homo sapiens
gaugucguuugaaucaca

SEQ ID NO: 264991 - RNA, 23 nt, Homo sapiens
gaugucucacauccucugucuau

SEQ ID NO: 264992 - RNA, 18 nt, Homo sapiens
gcauaaguuaacuuccaa

SEQ ID NO: 264993 - RNA, 16 nt, Homo sapiens
gcauaaguuucuggga

SEQ ID NO: 264994 - RNA, 21 nt, Homo sapiens
gcauaaguuucugggaccuca

SEQ ID NO: 264995 - RNA, 21 nt, Homo sapiens
gcauaauguuucuggauuuca

SEQ ID NO: 264996 - RNA, 22 nt, Homo sapiens
gcauacacacacacacacagcc

SEQ ID NO: 264997 - RNA, 20 nt, Homo sapiens
gcauacgguaugauauugca

SEQ ID NO: 264998 - RNA, 23 nt, Homo sapiens
gcauacgguaugauauugcagcu

SEQ ID NO: 264999 - RNA, 15 nt, Homo sapiens
gcauagcagaccaca

SEQ ID NO: 265000 - RNA, 16 nt, Homo sapiens
gcauagcagaccacac

SEQ ID NO: 265001 - RNA, 16 nt, Homo sapiens
gcaucaagaugugaca

SEQ ID NO: 265002 - RNA, 11 nt, Homo sapiens
gcaucauucac

SEQ ID NO: 265003 - RNA, 21 nt, Homo sapiens
gcauccagagucccugccugg

SEQ ID NO: 265004 - RNA, 18 nt, Homo sapiens
gcauccuggcacccggcc

SEQ ID NO: 265005 - RNA, 12 nt, Homo sapiens
gcaucugcagcc

SEQ ID NO: 265006 - RNA, 16 nt, Homo sapiens
gcaucugcagccacuu

SEQ ID NO: 265007 - RNA, 17 nt, Homo sapiens
gcaucugcagccacuuu

SEQ ID NO: 265008 - RNA, 17 nt, Homo sapiens
gcaucuuucucuuccca

SEQ ID NO: 265009 - RNA, 16 nt, Homo sapiens
gcaugaaccacccaga

SEQ ID NO: 265010 - RNA, 21 nt, Homo sapiens
gcaugacacgaauauugcuga

SEQ ID NO: 265011 - RNA, 16 nt, Homo sapiens
gcaugcugagucaugu

SEQ ID NO: 265012 - RNA, 20 nt, Homo sapiens
gcauggcugccaaugggagc

SEQ ID NO: 265013 - RNA, 18 nt, Homo sapiens
gcaugggggccucagggc

SEQ ID NO: 265014 - RNA, 21 nt, Homo sapiens
gcaugugaugagaggaaauca

SEQ ID NO: 265015 - RNA, 17 nt, Homo sapiens
gcaugugcagacacuca

SEQ ID NO: 265016 - RNA, 13 nt, Homo sapiens
gcauguguguuca

SEQ ID NO: 265017 - RNA, 22 nt, Homo sapiens
gcauuaucuaugauaugcuaau

SEQ ID NO: 265018 - RNA, 23 nt, Homo sapiens
gccuucuccagacaaaccagaag

SEQ ID NO: 265019 - RNA, 13 nt, Homo sapiens
gccuuggcugcag

SEQ ID NO: 265020 - RNA, 13 nt, Homo sapiens
gccuuuacaugaa

SEQ ID NO: 265021 - RNA, 18 nt, Homo sapiens
gccuuuacugcauagcag

SEQ ID NO: 265022 - RNA, 14 nt, Homo sapiens
gccuuugugcucug

SEQ ID NO: 265023 - RNA, 17 nt, Homo sapiens
gcgaaaaaaucagugaa

SEQ ID NO: 265024 - RNA, 16 nt, Homo sapiens
gcgcaggcugaucacc

SEQ ID NO: 265025 - RNA, 14 nt, Homo sapiens
gcgccagugacagu

SEQ ID NO: 265026 - RNA, 16 nt, Homo sapiens
gcgcccagccucaucu

SEQ ID NO: 265027 - RNA, 22 nt, Homo sapiens
gcgccccccccuccccaugcag

SEQ ID NO: 265028 - RNA, 14 nt, Homo sapiens
gcgcgguggcucac

SEQ ID NO: 265029 - RNA, 18 nt, Homo sapiens
gcgcucauucuauuuuau

SEQ ID NO: 265030 - RNA, 17 nt, Homo sapiens
gcggauccaagcaaaug

SEQ ID NO: 265031 - RNA, 17 nt, Homo sapiens
gcggccccggccggggu

SEQ ID NO: 265032 - RNA, 13 nt, Homo sapiens
gcggcuggcagcc

SEQ ID NO: 265033 - RNA, 18 nt, Homo sapiens
gcgggggagcaggcagug

SEQ ID NO: 265034 - RNA, 16 nt, Homo sapiens
gcgugagccacugcac

SEQ ID NO: 265035 - RNA, 12 nt, Homo sapiens
gcgugcacacac

SEQ ID NO: 265036 - RNA, 23 nt, Homo sapiens
gcguggaacucgugucuggcaca

SEQ ID NO: 265037 - RNA, 12 nt, Homo sapiens
gcuaaagggaaa

SEQ ID NO: 265038 - RNA, 14 nt, Homo sapiens
gcuaauauugcaau

SEQ ID NO: 265039 - RNA, 20 nt, Homo sapiens
gcuacaccuuucuccuuugu

SEQ ID NO: 265040 - RNA, 16 nt, Homo sapiens
gcuacauauacauagu

SEQ ID NO: 265041 - RNA, 20 nt, Homo sapiens
gcuacccgagguuugcaaau

SEQ ID NO: 265042 - RNA, 15 nt, Homo sapiens
gcuagaaggacucac

SEQ ID NO: 265043 - RNA, 15 nt, Homo sapiens
gcuagggaauaucaa

SEQ ID NO: 265044 - RNA, 15 nt, Homo sapiens
gcuauccaaucucau

SEQ ID NO: 265045 - RNA, 14 nt, Homo sapiens
gcuaugcauuugaa

SEQ ID NO: 265046 - RNA, 20 nt, Homo sapiens
gcuauggggauagaugugug

SEQ ID NO: 265047 - RNA, 18 nt, Homo sapiens
gcuaugguucucucgcaa

SEQ ID NO: 265048 - RNA, 18 nt, Homo sapiens
gcucaccagccccagugc

SEQ ID NO: 265049 - RNA, 14 nt, Homo sapiens
gcucacugcagccu

SEQ ID NO: 265050 - RNA, 19 nt, Homo sapiens
gcucauauuucuuuucuau

SEQ ID NO: 265051 - RNA, 13 nt, Homo sapiens
gcucauguguaca

SEQ ID NO: 265052 - RNA, 13 nt, Homo sapiens
gcuccacugaaca

SEQ ID NO: 265053 - RNA, 21 nt, Homo sapiens
gcuccacuuggucugugagau

SEQ ID NO: 265054 - RNA, 21 nt, Homo sapiens
gcuccaucgcugucaucucag

SEQ ID NO: 265055 - RNA, 20 nt, Homo sapiens
gcuccauguagaagccacua

SEQ ID NO: 265056 - RNA, 16 nt, Homo sapiens
gcuccauucaaaguga

SEQ ID NO: 265057 - RNA, 17 nt, Homo sapiens
gcuccauucaaagugag

SEQ ID NO: 265058 - RNA, 20 nt, Homo sapiens
gcuccauugguguugacaua

SEQ ID NO: 265059 - RNA, 16 nt, Homo sapiens
gcucccagcuccagcu

SEQ ID NO: 265060 - RNA, 23 nt, Homo sapiens
gcucccccucccccacugccaua

SEQ ID NO: 265061 - RNA, 15 nt, Homo sapiens
gcuccuauaggacca

SEQ ID NO: 265062 - RNA, 15 nt, Homo sapiens
gcuccugucugccag

SEQ ID NO: 265063 - RNA, 15 nt, Homo sapiens
gcucgagcaguccug

SEQ ID NO: 265064 - RNA, 16 nt, Homo sapiens
gcucgcuuugagugac

SEQ ID NO: 265065 - RNA, 14 nt, Homo sapiens
gcucucaggccagc

SEQ ID NO: 265066 - RNA, 21 nt, Homo sapiens
gcucucaugaugcuacccgag

SEQ ID NO: 265067 - RNA, 18 nt, Homo sapiens
gcucuccccuucucugua

SEQ ID NO: 265068 - RNA, 18 nt, Homo sapiens
gcucugaucauccacugu

SEQ ID NO: 265069 - RNA, 18 nt, Homo sapiens
gcucuuaaugauuuacag

SEQ ID NO: 265070 - RNA, 22 nt, Homo sapiens
gcugaacaggccgcacaucuca

SEQ ID NO: 265071 - RNA, 23 nt, Homo sapiens
gcugaacaggccgcacaucucac

SEQ ID NO: 265072 - RNA, 15 nt, Homo sapiens
gcugaacgacagucc

SEQ ID NO: 265073 - RNA, 18 nt, Homo sapiens
gcugacuguacuccuccc

SEQ ID NO: 265074 - RNA, 16 nt, Homo sapiens
gcugaggcaagagaau

SEQ ID NO: 265075 - RNA, 18 nt, Homo sapiens
gcugaggccucucauucc

SEQ ID NO: 265076 - RNA, 23 nt, Homo sapiens
gcugagggugagugggugaauaa

SEQ ID NO: 265077 - RNA, 16 nt, Homo sapiens
gcugagugcaccacuu

SEQ ID NO: 265078 - RNA, 19 nt, Homo sapiens
gcugagugcaccacuucaa

SEQ ID NO: 265079 - RNA, 21 nt, Homo sapiens
gcugaugaacucuuaaucaaa

SEQ ID NO: 265080 - RNA, 13 nt, Homo sapiens
gcugauggugaca

SEQ ID NO: 265081 - RNA, 15 nt, Homo sapiens
gcugauggugacauu

SEQ ID NO: 265082 - RNA, 19 nt, Homo sapiens
gcugauggugacauugcac

SEQ ID NO: 265083 - RNA, 16 nt, Homo sapiens
gcugcaaaaguucuca

SEQ ID NO: 265084 - RNA, 16 nt, Homo sapiens
gcugcaagguacucug

SEQ ID NO: 265085 - RNA, 14 nt, Homo sapiens
gcugcacuccauga

SEQ ID NO: 265086 - RNA, 15 nt, Homo sapiens
gcugcacuccaugag

SEQ ID NO: 265087 - RNA, 22 nt, Homo sapiens
gcugcaguuuuuuuccuucaag

SEQ ID NO: 265088 - RNA, 11 nt, Homo sapiens
gcugccucuug

SEQ ID NO: 265089 - RNA, 20 nt, Homo sapiens
gcugccucuugaaugcaggg

SEQ ID NO: 265090 - RNA, 18 nt, Homo sapiens
gcugcuacuacuccugua

SEQ ID NO: 265091 - RNA, 13 nt, Homo sapiens
gcugcuagcacuu

SEQ ID NO: 265092 - RNA, 17 nt, Homo sapiens
gcugcucacugcucaca

SEQ ID NO: 265093 - RNA, 12 nt, Homo sapiens
gcugcugucaca

SEQ ID NO: 265094 - RNA, 15 nt, Homo sapiens
gcugcugucuucccc

SEQ ID NO: 265095 - RNA, 19 nt, Homo sapiens
gcugcuuccuccuggaaau

SEQ ID NO: 265096 - RNA, 17 nt, Homo sapiens
gcuggagucgggacuaa

SEQ ID NO: 265097 - RNA, 21 nt, Homo sapiens
gcuggagugaaguggugugau

SEQ ID NO: 265098 - RNA, 14 nt, Homo sapiens
gcuggagugcagug

SEQ ID NO: 265099 - RNA, 23 nt, Homo sapiens
gcuggaguuauugaagcagagug

SEQ ID NO: 265100 - RNA, 22 nt, Homo sapiens
gcuggauuacaggcaugugcca

SEQ ID NO: 265101 - RNA, 13 nt, Homo sapiens
gcuggcagugaca

SEQ ID NO: 265102 - RNA, 20 nt, Homo sapiens
gcuggcgugcaguggugcga

SEQ ID NO: 265103 - RNA, 19 nt, Homo sapiens
gcugggaauaagugccagg

SEQ ID NO: 265104 - RNA, 17 nt, Homo sapiens
gcugggagagccuucca

SEQ ID NO: 265105 - RNA, 13 nt, Homo sapiens
gcugggauuacag

SEQ ID NO: 265106 - RNA, 14 nt, Homo sapiens
gcugggcagcuguu

SEQ ID NO: 265107 - RNA, 18 nt, Homo sapiens
gcugggcuucaguggcag

SEQ ID NO: 265108 - RNA, 17 nt, Homo sapiens
gcugguugagguuucaa

SEQ ID NO: 265109 - RNA, 19 nt, Homo sapiens
gcuguagacauuugcuaug

SEQ ID NO: 265110 - RNA, 17 nt, Homo sapiens
gcuguauccauccaugg

SEQ ID NO: 265111 - RNA, 15 nt, Homo sapiens
gcugucuuucacuga

SEQ ID NO: 265112 - RNA, 18 nt, Homo sapiens
gcuguggcagaguuacag

SEQ ID NO: 265113 - RNA, 16 nt, Homo sapiens
gcuguggcauccagag

SEQ ID NO: 265114 - RNA, 14 nt, Homo sapiens
gcugugucauucca

SEQ ID NO: 265115 - RNA, 13 nt, Homo sapiens
gcuguguuugcag

SEQ ID NO: 265116 - RNA, 23 nt, Homo sapiens
gcuguguuugcagccugcucuag

SEQ ID NO: 265117 - RNA, 15 nt, Homo sapiens
gcuguuguuccauug

SEQ ID NO: 265118 - RNA, 21 nt, Homo sapiens
gcuuaauuauugauguuuuca

SEQ ID NO: 265119 - RNA, 14 nt, Homo sapiens
gcuuacaugccuac

SEQ ID NO: 265120 - RNA, 14 nt, Homo sapiens
gcuuagaacaaagg

SEQ ID NO: 265121 - RNA, 20 nt, Homo sapiens
gcuuagauuucuagcaguau

SEQ ID NO: 265122 - RNA, 20 nt, Homo sapiens
gcuuagcuaauauugcaaug

SEQ ID NO: 265123 - RNA, 14 nt, Homo sapiens
gcuuagcuugaggg

SEQ ID NO: 265124 - RNA, 16 nt, Homo sapiens
gcuuaguuuguguguu

SEQ ID NO: 265125 - RNA, 21 nt, Homo sapiens
gcuuauacacuuacacuuuau

SEQ ID NO: 265126 - RNA, 13 nt, Homo sapiens
gcuuauauucaac

SEQ ID NO: 265127 - RNA, 12 nt, Homo sapiens
gcuuauauucau

SEQ ID NO: 265128 - RNA, 14 nt, Homo sapiens
gcuuauccuuccac

SEQ ID NO: 265129 - RNA, 16 nt, Homo sapiens
gcuuaugagaccaaga

SEQ ID NO: 265130 - RNA, 19 nt, Homo sapiens
gcuucacagaugugugauu

SEQ ID NO: 265131 - RNA, 15 nt, Homo sapiens
gcuucaguggcagcu

SEQ ID NO: 265132 - RNA, 16 nt, Homo sapiens
gcuucauuuccugugu

SEQ ID NO: 265133 - RNA, 14 nt, Homo sapiens
gcuuccaucugccc

SEQ ID NO: 265134 - RNA, 15 nt, Homo sapiens
gcuucccuaaucuau

SEQ ID NO: 265135 - RNA, 19 nt, Homo sapiens
gcuucccuaaucuaugguc

SEQ ID NO: 265136 - RNA, 17 nt, Homo sapiens
gcuucuagaaccaggca

SEQ ID NO: 265137 - RNA, 22 nt, Homo sapiens
gcuucucacugccaugccagcu

SEQ ID NO: 265138 - RNA, 19 nt, Homo sapiens
gcuucuuaaaauagccaua

SEQ ID NO: 265139 - RNA, 21 nt, Homo sapiens
gcuucuuaauauaacugccuu

SEQ ID NO: 265140 - RNA, 14 nt, Homo sapiens
gcuucuugccucug

SEQ ID NO: 265141 - RNA, 20 nt, Homo sapiens
gcuucuugccucugugcugu

SEQ ID NO: 265142 - RNA, 18 nt, Homo sapiens
gcuugaccgugaggccag

SEQ ID NO: 265143 - RNA, 15 nt, Homo sapiens
gcuugggcuucaucc

SEQ ID NO: 265144 - RNA, 19 nt, Homo sapiens
gcuuuaaaacuuauccucc

SEQ ID NO: 265145 - RNA, 20 nt, Homo sapiens
gcuuucauguaaacugugca

SEQ ID NO: 265146 - RNA, 21 nt, Homo sapiens
gcuuucauguaaacugugcac

SEQ ID NO: 265147 - RNA, 16 nt, Homo sapiens
gcuuucuacccagcga

SEQ ID NO: 265148 - RNA, 15 nt, Homo sapiens
gcuuugaaaauucag

SEQ ID NO: 265149 - RNA, 15 nt, Homo sapiens
gcuuugaaugcaugu

SEQ ID NO: 265150 - RNA, 14 nt, Homo sapiens
gcuuugguggcacg

SEQ ID NO: 265151 - RNA, 12 nt, Homo sapiens
gcuuuguggcac

SEQ ID NO: 265152 - RNA, 14 nt, Homo sapiens
gcuuuguugcccag

SEQ ID NO: 265153 - RNA, 13 nt, Homo sapiens
gcauaaccugucu

SEQ ID NO: 265154 - RNA, 19 nt, Homo sapiens
gcauacugccuuguuuaau

SEQ ID NO: 265155 - RNA, 18 nt, Homo sapiens
gcauagaguucagacuuu

SEQ ID NO: 265156 - RNA, 19 nt, Homo sapiens
gcauagaguucagacuuuu

SEQ ID NO: 265157 - RNA, 18 nt, Homo sapiens
gcauaugaggaugcagag

SEQ ID NO: 265158 - RNA, 15 nt, Homo sapiens
gcaucaagaugugac

SEQ ID NO: 265159 - RNA, 18 nt, Homo sapiens
gcaucaagaugugacaug

SEQ ID NO: 265160 - RNA, 22 nt, Homo sapiens
gcaucauuauuugcagagacag

SEQ ID NO: 265161 - RNA, 14 nt, Homo sapiens
gcaucuccauuuca

SEQ ID NO: 265162 - RNA, 17 nt, Homo sapiens
gcaucucccaguucaua

SEQ ID NO: 265163 - RNA, 16 nt, Homo sapiens
gcaucugcagccagca

SEQ ID NO: 265164 - RNA, 12 nt, Homo sapiens
ggaaaauucucu

SEQ ID NO: 265165 - RNA, 20 nt, Homo sapiens
ggaaacagcuaaugggacac

SEQ ID NO: 265166 - RNA, 15 nt, Homo sapiens
ggaaacugcacuguu

SEQ ID NO: 265167 - RNA, 17 nt, Homo sapiens
ggaaagaaaaagcaaua

SEQ ID NO: 265168 - RNA, 11 nt, Homo sapiens
ggaaagcaaau

SEQ ID NO: 265169 - RNA, 16 nt, Homo sapiens
ggaacacucugagacu

SEQ ID NO: 265170 - RNA, 18 nt, Homo sapiens
ggaacuaagaaagcccuu

SEQ ID NO: 265171 - RNA, 13 nt, Homo sapiens
ggaacuccugacu

SEQ ID NO: 265172 - RNA, 13 nt, Homo sapiens
ggaacugcaauaa

SEQ ID NO: 265173 - RNA, 11 nt, Homo sapiens
ggaacugugua

SEQ ID NO: 265174 - RNA, 10 nt, Homo sapiens
ggaagagcuc

SEQ ID NO: 265175 - RNA, 17 nt, Homo sapiens
ggaagagggugauugcu

SEQ ID NO: 265176 - RNA, 21 nt, Homo sapiens
ggaagcacaugccucucucag

SEQ ID NO: 265177 - RNA, 21 nt, Homo sapiens
ggaagccaaaccucugugagc

SEQ ID NO: 265178 - RNA, 19 nt, Homo sapiens
ggaagccacagggugagca

SEQ ID NO: 265179 - RNA, 20 nt, Homo sapiens
ggaagccagcaggcucucag

SEQ ID NO: 265180 - RNA, 22 nt, Homo sapiens
ggaagccucccacgacugcccg

SEQ ID NO: 265181 - RNA, 14 nt, Homo sapiens
ggaagcgagcuuug

SEQ ID NO: 265182 - RNA, 21 nt, Homo sapiens
ggaagcuccgcuuucuaccca

SEQ ID NO: 265183 - RNA, 18 nt, Homo sapiens
ggaagcugugagagcagu

SEQ ID NO: 265184 - RNA, 17 nt, Homo sapiens
ggaagggggcugggaca

SEQ ID NO: 265185 - RNA, 18 nt, Homo sapiens
ggaaggugccucuggaug

SEQ ID NO: 265186 - RNA, 17 nt, Homo sapiens
ggaagguucuacgccag

SEQ ID NO: 265187 - RNA, 19 nt, Homo sapiens
ggaagguucuggugugaac

SEQ ID NO: 265188 - RNA, 17 nt, Homo sapiens
ggaagugugugaucugu

SEQ ID NO: 265189 - RNA, 14 nt, Homo sapiens
ggaauaauccagaa

SEQ ID NO: 265190 - RNA, 17 nt, Homo sapiens
ggaauccagacccggcu

SEQ ID NO: 265191 - RNA, 21 nt, Homo sapiens
ggaauccuggggaacauagaa

SEQ ID NO: 265192 - RNA, 16 nt, Homo sapiens
ggaaugaaugucagug

SEQ ID NO: 265193 - RNA, 16 nt, Homo sapiens
ggaaugggggccaggc

SEQ ID NO: 265194 - RNA, 17 nt, Homo sapiens
ggaauguaugugcacau

SEQ ID NO: 265195 - RNA, 16 nt, Homo sapiens
ggacaaccucauuuua

SEQ ID NO: 265196 - RNA, 17 nt, Homo sapiens
ggacaaggcuagaucau

SEQ ID NO: 265197 - RNA, 15 nt, Homo sapiens
ggacaccaagccuug

SEQ ID NO: 265198 - RNA, 15 nt, Homo sapiens
ggacacggacccugu

SEQ ID NO: 265199 - RNA, 21 nt, Homo sapiens
ggacagagauuaagaucagca

SEQ ID NO: 265200 - RNA, 24 nt, Homo sapiens
ggacagcuccuggaccaggcccau

SEQ ID NO: 265201 - RNA, 22 nt, Homo sapiens
ggacagcuccuggaccaggucu

SEQ ID NO: 265202 - RNA, 15 nt, Homo sapiens
ggacaggcauguucu

SEQ ID NO: 265203 - RNA, 18 nt, Homo sapiens
ggacauugcggacagcca

SEQ ID NO: 265204 - RNA, 15 nt, Homo sapiens
ggaccagagcugcca

SEQ ID NO: 265205 - RNA, 16 nt, Homo sapiens
ggaccagccucuccac

SEQ ID NO: 265206 - RNA, 14 nt, Homo sapiens
ggaccucaguuuua

SEQ ID NO: 265207 - RNA, 19 nt, Homo sapiens
ggacuaaguguaccagaga

SEQ ID NO: 265208 - RNA, 20 nt, Homo sapiens
ggacuaaguguaccagagaa

SEQ ID NO: 265209 - RNA, 13 nt, Homo sapiens
ggacuacaggcac

SEQ ID NO: 265210 - RNA, 17 nt, Homo sapiens
ggacuacaggcacccac

SEQ ID NO: 265211 - RNA, 21 nt, Homo sapiens
ggacuauggcucuacuuucag

SEQ ID NO: 265212 - RNA, 22 nt, Homo sapiens
ggacuauuauaauuuaaugcau

SEQ ID NO: 265213 - RNA, 12 nt, Homo sapiens
ggacucaaugca

SEQ ID NO: 265214 - RNA, 23 nt, Homo sapiens
ggacucaaugcacugacauuguu

SEQ ID NO: 265215 - RNA, 23 nt, Homo sapiens
ggacucagguugucugaagucac

SEQ ID NO: 265216 - RNA, 13 nt, Homo sapiens
ggacucauugcuu

SEQ ID NO: 265217 - RNA, 15 nt, Homo sapiens
ggacuuggaagcucc

SEQ ID NO: 265218 - RNA, 13 nt, Homo sapiens
ggagaaaauggac

SEQ ID NO: 265219 - RNA, 18 nt, Homo sapiens
ggagaaacccuugaaaag

SEQ ID NO: 265220 - RNA, 22 nt, Homo sapiens
ggagaaauaugguacucauuaa

SEQ ID NO: 265221 - RNA, 13 nt, Homo sapiens
ggagaacuagaga

SEQ ID NO: 265222 - RNA, 21 nt, Homo sapiens
ggagacagagcugguugggaa

SEQ ID NO: 265223 - RNA, 14 nt, Homo sapiens
ggagacgggggcag

SEQ ID NO: 265224 - RNA, 15 nt, Homo sapiens
ggagacuagauuuau

SEQ ID NO: 265225 - RNA, 21 nt, Homo sapiens
ggagacuagauuuaugaauac

SEQ ID NO: 265226 - RNA, 13 nt, Homo sapiens
ggagacugcugag

SEQ ID NO: 265227 - RNA, 16 nt, Homo sapiens
ggagacugucucaaga

SEQ ID NO: 265228 - RNA, 15 nt, Homo sapiens
ggagagagugcuauu

SEQ ID NO: 265229 - RNA, 13 nt, Homo sapiens
ggagaggggcaca

SEQ ID NO: 265230 - RNA, 22 nt, Homo sapiens
ggagaguaacccugucuaauga

SEQ ID NO: 265231 - RNA, 14 nt, Homo sapiens
ggagagugcaacag

SEQ ID NO: 265232 - RNA, 17 nt, Homo sapiens
ggagauuuacaacuggg

SEQ ID NO: 265233 - RNA, 20 nt, Homo sapiens
ggagcaaaaucgaugcagug

SEQ ID NO: 265234 - RNA, 13 nt, Homo sapiens
ggagcacuggguu

SEQ ID NO: 265235 - RNA, 19 nt, Homo sapiens
ggagcccugucuccucucu

SEQ ID NO: 265236 - RNA, 14 nt, Homo sapiens
ggagccugcaacau

SEQ ID NO: 265237 - RNA, 12 nt, Homo sapiens
ggagcucaguua

SEQ ID NO: 265238 - RNA, 12 nt, Homo sapiens
ggagcucauucu

SEQ ID NO: 265239 - RNA, 16 nt, Homo sapiens
ggagcuggcccucucc

SEQ ID NO: 265240 - RNA, 20 nt, Homo sapiens
ggagcuuuugguaugugaca

SEQ ID NO: 265241 - RNA, 15 nt, Homo sapiens
ggaggaccagagcua

SEQ ID NO: 265242 - RNA, 15 nt, Homo sapiens
ggaggacgcucucug

SEQ ID NO: 265243 - RNA, 20 nt, Homo sapiens
ggaggauguucugggacaca

SEQ ID NO: 265244 - RNA, 17 nt, Homo sapiens
ggaggcagccggccaag

SEQ ID NO: 265245 - RNA, 18 nt, Homo sapiens
ggaggccauuuguguuua

SEQ ID NO: 265246 - RNA, 13 nt, Homo sapiens
ggagggcaggcau

SEQ ID NO: 265247 - RNA, 15 nt, Homo sapiens
ggagggcuccagaca

SEQ ID NO: 265248 - RNA, 18 nt, Homo sapiens
ggagggucugcagggaau

SEQ ID NO: 265249 - RNA, 20 nt, Homo sapiens
ggagggugguucaacaaaga

SEQ ID NO: 265250 - RNA, 20 nt, Homo sapiens
ggaggugaccccagguuucu

SEQ ID NO: 265251 - RNA, 16 nt, Homo sapiens
ggaguaggacauacca

SEQ ID NO: 265252 - RNA, 13 nt, Homo sapiens
ggaguaugcaaaa

SEQ ID NO: 265253 - RNA, 22 nt, Homo sapiens
ggagucuuagagcuuuaccuaa

SEQ ID NO: 265254 - RNA, 19 nt, Homo sapiens
ggaguuuaaacugaaugaa

SEQ ID NO: 265255 - RNA, 18 nt, Homo sapiens
ggauacgacaacuugcac

SEQ ID NO: 265256 - RNA, 18 nt, Homo sapiens
ggauacuguaacacuuua

SEQ ID NO: 265257 - RNA, 18 nt, Homo sapiens
ggauaguccgucucugcu

SEQ ID NO: 265258 - RNA, 18 nt, Homo sapiens
ggauaucacuuccaugac

SEQ ID NO: 265259 - RNA, 20 nt, Homo sapiens
ggaucaaaguugaugaaaua

SEQ ID NO: 265260 - RNA, 20 nt, Homo sapiens
ggaucaucuauugcuggcaa

SEQ ID NO: 265261 - RNA, 20 nt, Homo sapiens
ggauccacuuggucugugag

SEQ ID NO: 265262 - RNA, 22 nt, Homo sapiens
ggaugaaaaaauaacacuguac

SEQ ID NO: 265263 - RNA, 22 nt, Homo sapiens
ggaugaaggccucccugucuaa

SEQ ID NO: 265264 - RNA, 15 nt, Homo sapiens
ggaugcagagucagc

SEQ ID NO: 265265 - RNA, 20 nt, Homo sapiens
ggaugcauucccuacagauu

SEQ ID NO: 265266 - RNA, 14 nt, Homo sapiens
ggaugcccaaagau

SEQ ID NO: 265267 - RNA, 21 nt, Homo sapiens
ggaugggcagcuaagcagucu

SEQ ID NO: 265268 - RNA, 16 nt, Homo sapiens
ggauguaccagcaucu

SEQ ID NO: 265269 - RNA, 15 nt, Homo sapiens
ggauguccucacucu

SEQ ID NO: 265270 - RNA, 23 nt, Homo sapiens
ggauuaaagugcccagcacaaag

SEQ ID NO: 265271 - RNA, 13 nt, Homo sapiens
ggauuacaggcau

SEQ ID NO: 265272 - RNA, 17 nt, Homo sapiens
ggauucuuauggacaau

SEQ ID NO: 265273 - RNA, 21 nt, Homo sapiens
ggauugcuacuguccuaccca

SEQ ID NO: 265274 - RNA, 16 nt, Homo sapiens
ggauuucauacuguaa

SEQ ID NO: 265275 - RNA, 14 nt, Homo sapiens
ggauuuuucuuuaa

SEQ ID NO: 265276 - RNA, 20 nt, Homo sapiens
ggcaacugcugaugcucaug

SEQ ID NO: 265277 - RNA, 23 nt, Homo sapiens
ggcaacuugggaacuagacuccc

SEQ ID NO: 265278 - RNA, 17 nt, Homo sapiens
ggcaagguuaagccuuu

SEQ ID NO: 265279 - RNA, 18 nt, Homo sapiens
ggcaauauagcaagaucc

SEQ ID NO: 265280 - RNA, 16 nt, Homo sapiens
ggcaaugucagaugaa

SEQ ID NO: 265281 - RNA, 15 nt, Homo sapiens
ggcacaccgggcacu

SEQ ID NO: 265282 - RNA, 17 nt, Homo sapiens
ggcacacugagccagca

SEQ ID NO: 265283 - RNA, 20 nt, Homo sapiens
ggcacagcauggagucacag

SEQ ID NO: 265284 - RNA, 21 nt, Homo sapiens
ggcacagccuggcuguggccu

SEQ ID NO: 265285 - RNA, 9 nt, Homo sapiens
ggcacauug

SEQ ID NO: 265286 - RNA, 19 nt, Homo sapiens
ggcacccggccccugcugg

SEQ ID NO: 265287 - RNA, 23 nt, Homo sapiens
ggcacgaggccaggcagauccca

SEQ ID NO: 265288 - RNA, 18 nt, Homo sapiens
ggcacucagaagacacug

SEQ ID NO: 265289 - RNA, 19 nt, Homo sapiens
ggcacucagaagacacuga

SEQ ID NO: 265290 - RNA, 20 nt, Homo sapiens
ggcacucagaagacacugau

SEQ ID NO: 265291 - RNA, 20 nt, Homo sapiens
ggcagacacagggacuugaa

SEQ ID NO: 265292 - RNA, 16 nt, Homo sapiens
ggcagacuuucuucuc

SEQ ID NO: 265293 - RNA, 20 nt, Homo sapiens
ggcagagguugcaguguggu

SEQ ID NO: 265294 - RNA, 23 nt, Homo sapiens
ggcagaguacaaaguaagccaug

SEQ ID NO: 265295 - RNA, 21 nt, Homo sapiens
ggcagauacugucucuuucau

SEQ ID NO: 265296 - RNA, 12 nt, Homo sapiens
ggcagcauuuag

SEQ ID NO: 265297 - RNA, 17 nt, Homo sapiens
ggcagcauuuagcacau

SEQ ID NO: 265298 - RNA, 14 nt, Homo sapiens
ggcagcucagagag

SEQ ID NO: 265299 - RNA, 16 nt, Homo sapiens
ggcaggaacuugcaca

SEQ ID NO: 265300 - RNA, 14 nt, Homo sapiens
ggcagggucucacu

SEQ ID NO: 265301 - RNA, 19 nt, Homo sapiens
ggcagggucucacucuguu

SEQ ID NO: 265302 - RNA, 12 nt, Homo sapiens
ggcagggugugg

SEQ ID NO: 265303 - RNA, 20 nt, Homo sapiens
ggcagucugagagaggccau

SEQ ID NO: 265304 - RNA, 10 nt, Homo sapiens
ggcaguuuuu

SEQ ID NO: 265305 - RNA, 17 nt, Homo sapiens
ggcauagcucuggggug

SEQ ID NO: 265306 - RNA, 15 nt, Homo sapiens
ggcauauucaucuac

SEQ ID NO: 265307 - RNA, 18 nt, Homo sapiens
ggcauggccagguggcca

SEQ ID NO: 265308 - RNA, 22 nt, Homo sapiens
gccugcagcugagauuccagaa

SEQ ID NO: 265309 - RNA, 19 nt, Homo sapiens
gcuuccuccugguguggaa

SEQ ID NO: 265310 - RNA, 21 nt, Homo sapiens
gcuuccuccugguguggaaga

SEQ ID NO: 265311 - RNA, 20 nt, Homo sapiens
gcuuccuuugggagcucauu

SEQ ID NO: 265312 - RNA, 18 nt, Homo sapiens
gcuucucugacuucugcc

SEQ ID NO: 265313 - RNA, 15 nt, Homo sapiens
ggcaugguccugugc

SEQ ID NO: 265314 - RNA, 14 nt, Homo sapiens
ggcaugguggccca

SEQ ID NO: 265315 - RNA, 15 nt, Homo sapiens
ggcauucacaccacc

SEQ ID NO: 265316 - RNA, 14 nt, Homo sapiens
ggccaagaugcuaa

SEQ ID NO: 265317 - RNA, 12 nt, Homo sapiens
ggccaagcauaa

SEQ ID NO: 265318 - RNA, 20 nt, Homo sapiens
ggccaaggagggcagaucac

SEQ ID NO: 265319 - RNA, 18 nt, Homo sapiens
ggccacagugcaauuuua

SEQ ID NO: 265320 - RNA, 11 nt, Homo sapiens
ggccaccagag

SEQ ID NO: 265321 - RNA, 13 nt, Homo sapiens
ggccacccaggaa

SEQ ID NO: 265322 - RNA, 21 nt, Homo sapiens
ggccacccaggaacuccugac

SEQ ID NO: 265323 - RNA, 16 nt, Homo sapiens
ggccacuggcccuguu

SEQ ID NO: 265324 - RNA, 18 nt, Homo sapiens
ggccagagggagugacag

SEQ ID NO: 265325 - RNA, 19 nt, Homo sapiens
ggccagagggagugacaga

SEQ ID NO: 265326 - RNA, 16 nt, Homo sapiens
ggccagcaccaucucu

SEQ ID NO: 265327 - RNA, 13 nt, Homo sapiens
ggccagguggcca

SEQ ID NO: 265328 - RNA, 12 nt, Homo sapiens
ggccaguggccu

SEQ ID NO: 265329 - RNA, 11 nt, Homo sapiens
ggccaguguga

SEQ ID NO: 265330 - RNA, 12 nt, Homo sapiens
ggccauguauua

SEQ ID NO: 265331 - RNA, 16 nt, Homo sapiens
ggccauucuuucccaa

SEQ ID NO: 265332 - RNA, 16 nt, Homo sapiens
ggcccaaugcacuuug

SEQ ID NO: 265333 - RNA, 22 nt, Homo sapiens
ggcccagagggccugcaaggga

SEQ ID NO: 265334 - RNA, 19 nt, Homo sapiens
ggcccgacagccuggcaca

SEQ ID NO: 265335 - RNA, 15 nt, Homo sapiens
ggcccugagcucggu

SEQ ID NO: 265336 - RNA, 16 nt, Homo sapiens
ggcccugccuccuuug

SEQ ID NO: 265337 - RNA, 23 nt, Homo sapiens
ggcccuggccuagcauacguaca

SEQ ID NO: 265338 - RNA, 23 nt, Homo sapiens
ggcccuucccacaggacauuucu

SEQ ID NO: 265339 - RNA, 23 nt, Homo sapiens
ggcccuuccucuccacugccuuc

SEQ ID NO: 265340 - RNA, 15 nt, Homo sapiens
ggccgggcagggugu

SEQ ID NO: 265341 - RNA, 19 nt, Homo sapiens
ggccgggcgcgguggcuca

SEQ ID NO: 265342 - RNA, 14 nt, Homo sapiens
ggccugacucucag

SEQ ID NO: 265343 - RNA, 22 nt, Homo sapiens
ggccugauuuaucuagcugucc

SEQ ID NO: 265344 - RNA, 17 nt, Homo sapiens
ggccuggcaagugggug

SEQ ID NO: 265345 - RNA, 16 nt, Homo sapiens
ggccuggccagaugca

SEQ ID NO: 265346 - RNA, 17 nt, Homo sapiens
ggccuggucguuuucaa

SEQ ID NO: 265347 - RNA, 14 nt, Homo sapiens
ggccuuaaccauga

SEQ ID NO: 265348 - RNA, 16 nt, Homo sapiens
ggccuucaguuuccau

SEQ ID NO: 265349 - RNA, 12 nt, Homo sapiens
ggcgugaucuug

SEQ ID NO: 265350 - RNA, 22 nt, Homo sapiens
ggcuaagaagugacucuugcaa

SEQ ID NO: 265351 - RNA, 22 nt, Homo sapiens
ggcuaagcacgggccauaugaa

SEQ ID NO: 265352 - RNA, 23 nt, Homo sapiens
ggcuaauuuaacaagaacuuuaa

SEQ ID NO: 265353 - RNA, 13 nt, Homo sapiens
ggcuagaucauga

SEQ ID NO: 265354 - RNA, 17 nt, Homo sapiens
ggcuaguaaaagccauc

SEQ ID NO: 265355 - RNA, 18 nt, Homo sapiens
ggcuaguugggaugggca

SEQ ID NO: 265356 - RNA, 15 nt, Homo sapiens
ggcucacaccuguaa

SEQ ID NO: 265357 - RNA, 14 nt, Homo sapiens
ggcucacaugcucc

SEQ ID NO: 265358 - RNA, 21 nt, Homo sapiens
ggcuccucgagaucccaacac

SEQ ID NO: 265359 - RNA, 19 nt, Homo sapiens
ggcucuaauucacagugcu

SEQ ID NO: 265360 - RNA, 12 nt, Homo sapiens
ggcucucaggcc

SEQ ID NO: 265361 - RNA, 16 nt, Homo sapiens
ggcucucaggccagcu

SEQ ID NO: 265362 - RNA, 17 nt, Homo sapiens
ggcucucccagccaggu

SEQ ID NO: 265363 - RNA, 15 nt, Homo sapiens
ggcugaccaugcuca

SEQ ID NO: 265364 - RNA, 20 nt, Homo sapiens
ggcugaggccucucauucca

SEQ ID NO: 265365 - RNA, 11 nt, Homo sapiens
ggcugcaguuu

SEQ ID NO: 265366 - RNA, 18 nt, Homo sapiens
ggcugcccacacacccca

SEQ ID NO: 265367 - RNA, 15 nt, Homo sapiens
ggcuggagguaggcu

SEQ ID NO: 265368 - RNA, 22 nt, Homo sapiens
ggcuggagugugaggguccugc

SEQ ID NO: 265369 - RNA, 13 nt, Homo sapiens
ggcuggcggccau

SEQ ID NO: 265370 - RNA, 22 nt, Homo sapiens
ggcugggggccucagugccacu

SEQ ID NO: 265371 - RNA, 22 nt, Homo sapiens
ggcugucagauauaaguaacuu

SEQ ID NO: 265372 - RNA, 17 nt, Homo sapiens
ggcugugccaucagcuc

SEQ ID NO: 265373 - RNA, 21 nt, Homo sapiens
ggcuucagucuuuuccaugaa

SEQ ID NO: 265374 - RNA, 15 nt, Homo sapiens
ggcuuccaucugccc

SEQ ID NO: 265375 - RNA, 17 nt, Homo sapiens
ggcuugaagcugcucac

SEQ ID NO: 265376 - RNA, 13 nt, Homo sapiens
ggcuugcugccaa

SEQ ID NO: 265377 - RNA, 14 nt, Homo sapiens
ggcuuggggaccag

SEQ ID NO: 265378 - RNA, 24 nt, Homo sapiens
ggcuuuaaaacuuauccuccauga

SEQ ID NO: 265379 - RNA, 21 nt, Homo sapiens
ggcuuuuacugaagccuuucu

SEQ ID NO: 265380 - RNA, 19 nt, Homo sapiens
gggaaaauacguugaggga

SEQ ID NO: 265381 - RNA, 15 nt, Homo sapiens
gggaaaucaggguua

SEQ ID NO: 265382 - RNA, 18 nt, Homo sapiens
gggaacagagaagugugg

SEQ ID NO: 265383 - RNA, 14 nt, Homo sapiens
gggaagacuguggc

SEQ ID NO: 265384 - RNA, 15 nt, Homo sapiens
gggaagaggggugca

SEQ ID NO: 265385 - RNA, 14 nt, Homo sapiens
gggaagcccugacu

SEQ ID NO: 265386 - RNA, 20 nt, Homo sapiens
gggacuaaguguaccagaga

SEQ ID NO: 265387 - RNA, 16 nt, Homo sapiens
gggagaaugucaguau

SEQ ID NO: 265388 - RNA, 19 nt, Homo sapiens
gggagacugggcugaggga

SEQ ID NO: 265389 - RNA, 20 nt, Homo sapiens
gggaggcagagguugcagug

SEQ ID NO: 265390 - RNA, 13 nt, Homo sapiens
gggaggcagggga

SEQ ID NO: 265391 - RNA, 20 nt, Homo sapiens
gggaguaggacauaccagcu

SEQ ID NO: 265392 - RNA, 12 nt, Homo sapiens
gggagucugggc

SEQ ID NO: 265393 - RNA, 15 nt, Homo sapiens
gggaguuuagggugg

SEQ ID NO: 265394 - RNA, 23 nt, Homo sapiens
gggauaaguaaguuugauuucau

SEQ ID NO: 265395 - RNA, 17 nt, Homo sapiens
gggcaacacucacugcc

SEQ ID NO: 265396 - RNA, 16 nt, Homo sapiens
gggcaacccuggugac

SEQ ID NO: 265397 - RNA, 20 nt, Homo sapiens
gggcacagaaaauggaagac

SEQ ID NO: 265398 - RNA, 22 nt, Homo sapiens
gggcacaguacccggugacucu

SEQ ID NO: 265399 - RNA, 13 nt, Homo sapiens
gggcacugguggc

SEQ ID NO: 265400 - RNA, 13 nt, Homo sapiens
gggcagcacagag

SEQ ID NO: 265401 - RNA, 14 nt, Homo sapiens
gggcagucauuauc

SEQ ID NO: 265402 - RNA, 22 nt, Homo sapiens
gggccacucaggggucauucau

SEQ ID NO: 265403 - RNA, 12 nt, Homo sapiens
gggccaugccuc

SEQ ID NO: 265404 - RNA, 21 nt, Homo sapiens
gggcccaaauucuuucagugg

SEQ ID NO: 265405 - RNA, 23 nt, Homo sapiens
gggcccaucucccugcuuugguc

SEQ ID NO: 265406 - RNA, 16 nt, Homo sapiens
gggcucagaguggggu

SEQ ID NO: 265407 - RNA, 12 nt, Homo sapiens
gggcucagcaaa

SEQ ID NO: 265408 - RNA, 15 nt, Homo sapiens
gggcuccauguagaa

SEQ ID NO: 265409 - RNA, 20 nt, Homo sapiens
gggcucccuucccaccucuc

SEQ ID NO: 265410 - RNA, 21 nt, Homo sapiens
gggcucccuucccaccucucu

SEQ ID NO: 265411 - RNA, 14 nt, Homo sapiens
gggcucgugcccug

SEQ ID NO: 265412 - RNA, 14 nt, Homo sapiens
gggcucucucauga

SEQ ID NO: 265413 - RNA, 15 nt, Homo sapiens
gggcugcccuggugc

SEQ ID NO: 265414 - RNA, 11 nt, Homo sapiens
gggcugcucac

SEQ ID NO: 265415 - RNA, 16 nt, Homo sapiens
gggcuguucacucucu

SEQ ID NO: 265416 - RNA, 16 nt, Homo sapiens
gggcuuagagcucuca

SEQ ID NO: 265417 - RNA, 19 nt, Homo sapiens
gggcuucuagaaccaggca

SEQ ID NO: 265418 - RNA, 18 nt, Homo sapiens
ggggaagaaaaacucuau

SEQ ID NO: 265419 - RNA, 14 nt, Homo sapiens
ggggaaggaggccg

SEQ ID NO: 265420 - RNA, 16 nt, Homo sapiens
ggggacacagcaucag

SEQ ID NO: 265421 - RNA, 20 nt, Homo sapiens
ggggauacuggcaaagcaga

SEQ ID NO: 265422 - RNA, 12 nt, Homo sapiens
ggggcagcacag

SEQ ID NO: 265423 - RNA, 13 nt, Homo sapiens
ggggcagcacaga

SEQ ID NO: 265424 - RNA, 16 nt, Homo sapiens
ggggccaggugcacag

SEQ ID NO: 265425 - RNA, 13 nt, Homo sapiens
ggggcucucucau

SEQ ID NO: 265426 - RNA, 17 nt, Homo sapiens
gggggcuccagggggug

SEQ ID NO: 265427 - RNA, 20 nt, Homo sapiens
gggguagaaggauccuccaa

SEQ ID NO: 265428 - RNA, 20 nt, Homo sapiens
ggggucccauagaggugagg

SEQ ID NO: 265429 - RNA, 13 nt, Homo sapiens
ggguaaauucucu

SEQ ID NO: 265430 - RNA, 22 nt, Homo sapiens
ggguaggcgggaaggaggguua

SEQ ID NO: 265431 - RNA, 13 nt, Homo sapiens
gggucaacaucuu

SEQ ID NO: 265432 - RNA, 22 nt, Homo sapiens
gggucccauagaggugagggaa

SEQ ID NO: 265433 - RNA, 19 nt, Homo sapiens
ggguccuuuugacacugcu

SEQ ID NO: 265434 - RNA, 20 nt, Homo sapiens
gggucucacuauguugccca

SEQ ID NO: 265435 - RNA, 19 nt, Homo sapiens
gggucucgcuuuguugccc

SEQ ID NO: 265436 - RNA, 20 nt, Homo sapiens
gggucucgcuuuguugccca

SEQ ID NO: 265437 - RNA, 21 nt, Homo sapiens
gggucucgcuuuguugcccag

SEQ ID NO: 265438 - RNA, 10 nt, Homo sapiens
gggucugugu

SEQ ID NO: 265439 - RNA, 16 nt, Homo sapiens
gggucuuugaacccuu

SEQ ID NO: 265440 - RNA, 19 nt, Homo sapiens
gggugacagagcaagugag

SEQ ID NO: 265441 - RNA, 12 nt, Homo sapiens
gggugggaccac

SEQ ID NO: 265442 - RNA, 21 nt, Homo sapiens
ggguuaguuuacaaucagcca

SEQ ID NO: 265443 - RNA, 13 nt, Homo sapiens
ggguucacugcaa

SEQ ID NO: 265444 - RNA, 17 nt, Homo sapiens
ggguuggacaaccucau

SEQ ID NO: 265445 - RNA, 19 nt, Homo sapiens
ggguuucuaaagcugccag

SEQ ID NO: 265446 - RNA, 18 nt, Homo sapiens
gguaaccucuacuaugaa

SEQ ID NO: 265447 - RNA, 18 nt, Homo sapiens
gguaauuaguaacaugug

SEQ ID NO: 265448 - RNA, 22 nt, Homo sapiens
gguacaguauggggguuguaaa

SEQ ID NO: 265449 - RNA, 16 nt, Homo sapiens
gguacgaugacagugu

SEQ ID NO: 265450 - RNA, 20 nt, Homo sapiens
gguauaaugguugacugggu

SEQ ID NO: 265451 - RNA, 21 nt, Homo sapiens
gguaucauuuucugcauuuaa

SEQ ID NO: 265452 - RNA, 18 nt, Homo sapiens
gguaugaucacggcucac

SEQ ID NO: 265453 - RNA, 23 nt, Homo sapiens
gguaugaucacggcucacugcag

SEQ ID NO: 265454 - RNA, 11 nt, Homo sapiens
ggccagcacca

SEQ ID NO: 265455 - RNA, 17 nt, Homo sapiens
ggccaggcuggucucaa

SEQ ID NO: 265456 - RNA, 22 nt, Homo sapiens
ggccagugggaccccacagagu

SEQ ID NO: 265457 - RNA, 13 nt, Homo sapiens
ggccauauuaccc

SEQ ID NO: 265458 - RNA, 11 nt, Homo sapiens
ggcccaagacu

SEQ ID NO: 265459 - RNA, 17 nt, Homo sapiens
ggcccacuucaccguac

SEQ ID NO: 265460 - RNA, 16 nt, Homo sapiens
ggcccauaucugugaa

SEQ ID NO: 265461 - RNA, 14 nt, Homo sapiens
ggccccucaggguc

SEQ ID NO: 265462 - RNA, 16 nt, Homo sapiens
ggccccugcccggcug

SEQ ID NO: 265463 - RNA, 19 nt, Homo sapiens
ggcccugacucuuccccau

SEQ ID NO: 265464 - RNA, 15 nt, Homo sapiens
ggcccugugccuugg

SEQ ID NO: 265465 - RNA, 12 nt, Homo sapiens
ggccucaaggga

SEQ ID NO: 265466 - RNA, 20 nt, Homo sapiens
ggccucaagggaugucucac

SEQ ID NO: 265467 - RNA, 17 nt, Homo sapiens
ggccuccugucccucau

SEQ ID NO: 265468 - RNA, 16 nt, Homo sapiens
ggccuccugugugugc

SEQ ID NO: 265469 - RNA, 18 nt, Homo sapiens
ggccucuccaguuugcac

SEQ ID NO: 265470 - RNA, 24 nt, Homo sapiens
ggucuaggaacauacuucagcuca

SEQ ID NO: 265471 - RNA, 13 nt, Homo sapiens
ggucuccaagacc

SEQ ID NO: 265472 - RNA, 23 nt, Homo sapiens
ggucugugagaugcuagaacucc

SEQ ID NO: 265473 - RNA, 14 nt, Homo sapiens
ggucugugugauga

SEQ ID NO: 265474 - RNA, 16 nt, Homo sapiens
ggugaaagauggaacu

SEQ ID NO: 265475 - RNA, 13 nt, Homo sapiens
ggugaacagaaca

SEQ ID NO: 265476 - RNA, 16 nt, Homo sapiens
ggugacauugcaccug

SEQ ID NO: 265477 - RNA, 15 nt, Homo sapiens
ggugaccagcaccau

SEQ ID NO: 265478 - RNA, 23 nt, Homo sapiens
ggugcuacacccuuuuccagcug

SEQ ID NO: 265479 - RNA, 19 nt, Homo sapiens
gguggaaugcgggggagca

SEQ ID NO: 265480 - RNA, 12 nt, Homo sapiens
gguggacaugca

SEQ ID NO: 265481 - RNA, 13 nt, Homo sapiens
gguggaugccugg

SEQ ID NO: 265482 - RNA, 19 nt, Homo sapiens
gguggccgcugaguggcag

SEQ ID NO: 265483 - RNA, 14 nt, Homo sapiens
ggugggacagggac

SEQ ID NO: 265484 - RNA, 19 nt, Homo sapiens
ggugggccuccucugucca

SEQ ID NO: 265485 - RNA, 11 nt, Homo sapiens
gguggggaccu

SEQ ID NO: 265486 - RNA, 20 nt, Homo sapiens
gguggggguaaggugcaucu

SEQ ID NO: 265487 - RNA, 23 nt, Homo sapiens
gguggguccacacggucuucaca

SEQ ID NO: 265488 - RNA, 15 nt, Homo sapiens
ggugucccuuucaca

SEQ ID NO: 265489 - RNA, 20 nt, Homo sapiens
ggugugaaccaccacaccca

SEQ ID NO: 265490 - RNA, 14 nt, Homo sapiens
ggugugugaagcug

SEQ ID NO: 265491 - RNA, 19 nt, Homo sapiens
gguuaauaaguuucacuga

SEQ ID NO: 265492 - RNA, 20 nt, Homo sapiens
gguuacaagaaacagccacu

SEQ ID NO: 265493 - RNA, 21 nt, Homo sapiens
gguuacaagaaacagccacug

SEQ ID NO: 265494 - RNA, 17 nt, Homo sapiens
gguuauaacaguguuua

SEQ ID NO: 265495 - RNA, 19 nt, Homo sapiens
gguucaccaggucagggag

SEQ ID NO: 265496 - RNA, 15 nt, Homo sapiens
gguuccggaauccug

SEQ ID NO: 265497 - RNA, 19 nt, Homo sapiens
gguuccuaauccucuagga

SEQ ID NO: 265498 - RNA, 16 nt, Homo sapiens
gguucuacccaggugc

SEQ ID NO: 265499 - RNA, 22 nt, Homo sapiens
gguuggaaaacaguauuuucca

SEQ ID NO: 265500 - RNA, 17 nt, Homo sapiens
gguugucagcugcagcc

SEQ ID NO: 265501 - RNA, 20 nt, Homo sapiens
gguugucagcugcagccacu

SEQ ID NO: 265502 - RNA, 19 nt, Homo sapiens
gguuucauguuaguuaccu

SEQ ID NO: 265503 - RNA, 12 nt, Homo sapiens
gguuucauucug

SEQ ID NO: 265504 - RNA, 16 nt, Homo sapiens
gguuucuaaagcugcc

SEQ ID NO: 265505 - RNA, 14 nt, Homo sapiens
gguuucucuguaua

SEQ ID NO: 265506 - RNA, 15 nt, Homo sapiens
gguuuuacugcagcu

SEQ ID NO: 265507 - RNA, 21 nt, Homo sapiens
gguuuuauaaggcugauguca

SEQ ID NO: 265508 - RNA, 22 nt, Homo sapiens
guaaaauaaucaguguuuccaa

SEQ ID NO: 265509 - RNA, 13 nt, Homo sapiens
guaaacugugcac

SEQ ID NO: 265510 - RNA, 14 nt, Homo sapiens
guaaacugugcacc

SEQ ID NO: 265511 - RNA, 12 nt, Homo sapiens
guaaagacugua

SEQ ID NO: 265512 - RNA, 18 nt, Homo sapiens
guaaagaguuaguuugag

SEQ ID NO: 265513 - RNA, 16 nt, Homo sapiens
guaaagcuuugugcag

SEQ ID NO: 265514 - RNA, 17 nt, Homo sapiens
guaaauagcucaggugu

SEQ ID NO: 265515 - RNA, 18 nt, Homo sapiens
guaaaugggggugcauuu

SEQ ID NO: 265516 - RNA, 20 nt, Homo sapiens
guaaaugggggugcauuuga

SEQ ID NO: 265517 - RNA, 15 nt, Homo sapiens
guaaauguuuagguu

SEQ ID NO: 265518 - RNA, 21 nt, Homo sapiens
guaaauuucucuacugucuca

SEQ ID NO: 265519 - RNA, 23 nt, Homo sapiens
guaacuguuuagaugaaugucag

SEQ ID NO: 265520 - RNA, 22 nt, Homo sapiens
guaacuguuuugguuuugcuca

SEQ ID NO: 265521 - RNA, 18 nt, Homo sapiens
guaagcaaagacuuuccu

SEQ ID NO: 265522 - RNA, 12 nt, Homo sapiens
guaaggcugugg

SEQ ID NO: 265523 - RNA, 16 nt, Homo sapiens
guaagugagaacaaau

SEQ ID NO: 265524 - RNA, 22 nt, Homo sapiens
guaaguuacaugaaggcagcag

SEQ ID NO: 265525 - RNA, 22 nt, Homo sapiens
guaauaaacucauuucuagcag

SEQ ID NO: 265526 - RNA, 21 nt, Homo sapiens
guaauuaugguuaguagaggu

SEQ ID NO: 265527 - RNA, 23 nt, Homo sapiens
guaauucuaaaugaauguuuaca

SEQ ID NO: 265528 - RNA, 18 nt, Homo sapiens
guaauuuaaaauugugau

SEQ ID NO: 265529 - RNA, 20 nt, Homo sapiens
guaauuugugauacaaugcu

SEQ ID NO: 265530 - RNA, 23 nt, Homo sapiens
guaauuuuuuuaucgucacugcu

SEQ ID NO: 265531 - RNA, 14 nt, Homo sapiens
guacaaaguauuaa

SEQ ID NO: 265532 - RNA, 17 nt, Homo sapiens
guacaaauauaagaaua

SEQ ID NO: 265533 - RNA, 16 nt, Homo sapiens
guacaaccugugauca

SEQ ID NO: 265534 - RNA, 17 nt, Homo sapiens
guacagaauucugcuac

SEQ ID NO: 265535 - RNA, 22 nt, Homo sapiens
guacagaauucugcuaccucac

SEQ ID NO: 265536 - RNA, 12 nt, Homo sapiens
guacagacacuc

SEQ ID NO: 265537 - RNA, 13 nt, Homo sapiens
guacagacacucc

SEQ ID NO: 265538 - RNA, 18 nt, Homo sapiens
guacaguggugagaucac

SEQ ID NO: 265539 - RNA, 12 nt, Homo sapiens
guacaucuggcc

SEQ ID NO: 265540 - RNA, 17 nt, Homo sapiens
guacauguuaaacuuac

SEQ ID NO: 265541 - RNA, 15 nt, Homo sapiens
guaccccauggagcu

SEQ ID NO: 265542 - RNA, 20 nt, Homo sapiens
guacccggugacucuugggg

SEQ ID NO: 265543 - RNA, 22 nt, Homo sapiens
guacccuacccugcacauuguu

SEQ ID NO: 265544 - RNA, 18 nt, Homo sapiens
guaccugcccccaaucca

SEQ ID NO: 265545 - RNA, 13 nt, Homo sapiens
guaccugugcacg

SEQ ID NO: 265546 - RNA, 18 nt, Homo sapiens
guaccuugaacacugggg

SEQ ID NO: 265547 - RNA, 15 nt, Homo sapiens
guacguugugcauuu

SEQ ID NO: 265548 - RNA, 20 nt, Homo sapiens
guacuaacuagcauuguaaa

SEQ ID NO: 265549 - RNA, 13 nt, Homo sapiens
guacuacaguccu

SEQ ID NO: 265550 - RNA, 18 nt, Homo sapiens
guacuacaguccucccau

SEQ ID NO: 265551 - RNA, 16 nt, Homo sapiens
guacuauguaucaaug

SEQ ID NO: 265552 - RNA, 18 nt, Homo sapiens
guacucuguccaguuccu

SEQ ID NO: 265553 - RNA, 21 nt, Homo sapiens
guacugccaauacugccaacc

SEQ ID NO: 265554 - RNA, 14 nt, Homo sapiens
guacugugcaguuu

SEQ ID NO: 265555 - RNA, 16 nt, Homo sapiens
guacugugcaguuuuc

SEQ ID NO: 265556 - RNA, 14 nt, Homo sapiens
guacuuucuucccu

SEQ ID NO: 265557 - RNA, 17 nt, Homo sapiens
guacuuugaagauguca

SEQ ID NO: 265558 - RNA, 22 nt, Homo sapiens
guacuuugaagaugucauccca

SEQ ID NO: 265559 - RNA, 13 nt, Homo sapiens
guacuuuuaagac

SEQ ID NO: 265560 - RNA, 21 nt, Homo sapiens
guacuuuuuggcauaacauaa

SEQ ID NO: 265561 - RNA, 22 nt, Homo sapiens
guagaaaauuuguuauuuugca

SEQ ID NO: 265562 - RNA, 15 nt, Homo sapiens
guagaaagugaucca

SEQ ID NO: 265563 - RNA, 22 nt, Homo sapiens
guagaacucacucugggcugua

SEQ ID NO: 265564 - RNA, 13 nt, Homo sapiens
guagaacuuggau

SEQ ID NO: 265565 - RNA, 16 nt, Homo sapiens
guagacauuugcuaug

SEQ ID NO: 265566 - RNA, 20 nt, Homo sapiens
guagagacaggguuuugcca

SEQ ID NO: 265567 - RNA, 22 nt, Homo sapiens
guagagacaggguuuugccaug

SEQ ID NO: 265568 - RNA, 21 nt, Homo sapiens
guagagagagaaaaguaacug

SEQ ID NO: 265569 - RNA, 22 nt, Homo sapiens
guagagggaguugucaagucuc

SEQ ID NO: 265570 - RNA, 15 nt, Homo sapiens
guagagucacuggaa

SEQ ID NO: 265571 - RNA, 21 nt, Homo sapiens
guagcagauccccagccucug

SEQ ID NO: 265572 - RNA, 15 nt, Homo sapiens
guagcuagccugaga

SEQ ID NO: 265573 - RNA, 14 nt, Homo sapiens
guaggaacugcugg

SEQ ID NO: 265574 - RNA, 15 nt, Homo sapiens
guaggaagacuuugg

SEQ ID NO: 265575 - RNA, 13 nt, Homo sapiens
guaggacauacca

SEQ ID NO: 265576 - RNA, 16 nt, Homo sapiens
guaggcuuaguuugug

SEQ ID NO: 265577 - RNA, 17 nt, Homo sapiens
guaggggcccacuucac

SEQ ID NO: 265578 - RNA, 22 nt, Homo sapiens
guagucaggugccucaagagaa

SEQ ID NO: 265579 - RNA, 15 nt, Homo sapiens
guagugccacuguug

SEQ ID NO: 265580 - RNA, 16 nt, Homo sapiens
guaguuugcauuccag

SEQ ID NO: 265581 - RNA, 21 nt, Homo sapiens
guauaaauauguauuuuguca

SEQ ID NO: 265582 - RNA, 18 nt, Homo sapiens
guauaaugguugacuggg

SEQ ID NO: 265583 - RNA, 19 nt, Homo sapiens
guauaaugguugacugggu

SEQ ID NO: 265584 - RNA, 15 nt, Homo sapiens
guauaguacuggcau

SEQ ID NO: 265585 - RNA, 21 nt, Homo sapiens
guauaguuaaccacuaccgaa

SEQ ID NO: 265586 - RNA, 13 nt, Homo sapiens
guauaugcaauau

SEQ ID NO: 265587 - RNA, 20 nt, Homo sapiens
guauauucaaccaaauacuu

SEQ ID NO: 265588 - RNA, 14 nt, Homo sapiens
guaucaaaugugac

SEQ ID NO: 265589 - RNA, 21 nt, Homo sapiens
guaucaaaugugacauuauau

SEQ ID NO: 265590 - RNA, 14 nt, Homo sapiens
guaucaaugaguaa

SEQ ID NO: 265591 - RNA, 20 nt, Homo sapiens
guaucaauggagcaugugug

SEQ ID NO: 265592 - RNA, 16 nt, Homo sapiens
guaucaccucuucaca

SEQ ID NO: 265593 - RNA, 15 nt, Homo sapiens
guaucaggacccaga

SEQ ID NO: 265594 - RNA, 16 nt, Homo sapiens
guaucaggugcugcca

SEQ ID NO: 265595 - RNA, 18 nt, Homo sapiens
guaucccaugagccucag

SEQ ID NO: 265596 - RNA, 14 nt, Homo sapiens
guaugaggcauuug

SEQ ID NO: 265597 - RNA, 15 nt, Homo sapiens
guaugaggcauuugu

SEQ ID NO: 265598 - RNA, 23 nt, Homo sapiens
guaugaggucuaggaacauacuu

SEQ ID NO: 265599 - RNA, 13 nt, Homo sapiens
ggugcccuggaug

SEQ ID NO: 265600 - RNA, 13 nt, Homo sapiens
ggugccuugggga

SEQ ID NO: 265601 - RNA, 20 nt, Homo sapiens
ggugcuaucgcaccacugug

SEQ ID NO: 265602 - RNA, 13 nt, Homo sapiens
gguggagggccac

SEQ ID NO: 265603 - RNA, 21 nt, Homo sapiens
gguggaugccugguggcagcu

SEQ ID NO: 265604 - RNA, 19 nt, Homo sapiens
gguggauuccgagugguga

SEQ ID NO: 265605 - RNA, 23 nt, Homo sapiens
gguggcagaaucuguuaccagag

SEQ ID NO: 265606 - RNA, 18 nt, Homo sapiens
ggugggaccacagacuca

SEQ ID NO: 265607 - RNA, 20 nt, Homo sapiens
ggugggagugggcccaaugc

SEQ ID NO: 265608 - RNA, 12 nt, Homo sapiens
ggugugcuguau

SEQ ID NO: 265609 - RNA, 18 nt, Homo sapiens
gguguucugguaaacuga

SEQ ID NO: 265610 - RNA, 17 nt, Homo sapiens
gguuacaaggggcugcu

SEQ ID NO: 265611 - RNA, 13 nt, Homo sapiens
gguuauauguaua

SEQ ID NO: 265612 - RNA, 14 nt, Homo sapiens
gguuauaugucuua

SEQ ID NO: 265613 - RNA, 13 nt, Homo sapiens
gguucaagugauu

SEQ ID NO: 265614 - RNA, 22 nt, Homo sapiens
gguucacagaagcacagcaccc

SEQ ID NO: 265615 - RNA, 22 nt, Homo sapiens
gguuccagggucccucugugua

SEQ ID NO: 265616 - RNA, 11 nt, Homo sapiens
gguucucaggc

SEQ ID NO: 265617 - RNA, 19 nt, Homo sapiens
gguugcuuuaauaucauca

SEQ ID NO: 265618 - RNA, 18 nt, Homo sapiens
gguugcuuugguggcacg

SEQ ID NO: 265619 - RNA, 14 nt, Homo sapiens
gguuuaggucaaga

SEQ ID NO: 265620 - RNA, 22 nt, Homo sapiens
gguuuccacguaagucacugaa

SEQ ID NO: 265621 - RNA, 21 nt, Homo sapiens
gguuucuggcagccaguaccu

SEQ ID NO: 265622 - RNA, 20 nt, Homo sapiens
gguuucuguacaacuaccuc

SEQ ID NO: 265623 - RNA, 15 nt, Homo sapiens
gguuuuuaaaccuuc

SEQ ID NO: 265624 - RNA, 13 nt, Homo sapiens
guaaaaagggaaa

SEQ ID NO: 265625 - RNA, 19 nt, Homo sapiens
gucacacagagugccugcc

SEQ ID NO: 265626 - RNA, 19 nt, Homo sapiens
gucacagaggaucugcuug

SEQ ID NO: 265627 - RNA, 18 nt, Homo sapiens
gucacagccacuugggau

SEQ ID NO: 265628 - RNA, 22 nt, Homo sapiens
gucaccaaaucagcugcuacua

SEQ ID NO: 265629 - RNA, 12 nt, Homo sapiens
gucagacuggau

SEQ ID NO: 265630 - RNA, 20 nt, Homo sapiens
gucagauuugaacucuucaa

SEQ ID NO: 265631 - RNA, 23 nt, Homo sapiens
gucagcacguaguuugcauucca

SEQ ID NO: 265632 - RNA, 18 nt, Homo sapiens
gucagcugcagccacuuu

SEQ ID NO: 265633 - RNA, 15 nt, Homo sapiens
gucaguauguggaag

SEQ ID NO: 265634 - RNA, 21 nt, Homo sapiens
gucagugcugccuguccccau

SEQ ID NO: 265635 - RNA, 18 nt, Homo sapiens
gucaguuggcuaagaagu

SEQ ID NO: 265636 - RNA, 18 nt, Homo sapiens
gucauaaucucuuuccau

SEQ ID NO: 265637 - RNA, 18 nt, Homo sapiens
gucauacuugaaaauaug

SEQ ID NO: 265638 - RNA, 14 nt, Homo sapiens
gucaucacuuugac

SEQ ID NO: 265639 - RNA, 16 nt, Homo sapiens
gucauccucccaccuc

SEQ ID NO: 265640 - RNA, 16 nt, Homo sapiens
gucaucuguaccucug

SEQ ID NO: 265641 - RNA, 18 nt, Homo sapiens
gucaugcguuuaaucaca

SEQ ID NO: 265642 - RNA, 18 nt, Homo sapiens
guccacacggucuucaca

SEQ ID NO: 265643 - RNA, 24 nt, Homo sapiens
guccacgagcuguuuacuagggau

SEQ ID NO: 265644 - RNA, 21 nt, Homo sapiens
guccacugagaagaucaauga

SEQ ID NO: 265645 - RNA, 14 nt, Homo sapiens
guccaucagccucc

SEQ ID NO: 265646 - RNA, 21 nt, Homo sapiens
guccaucccgucgacguagaa

SEQ ID NO: 265647 - RNA, 17 nt, Homo sapiens
guccauuguccaauccu

SEQ ID NO: 265648 - RNA, 23 nt, Homo sapiens
gucccagaaugccuccugcaggg

SEQ ID NO: 265649 - RNA, 15 nt, Homo sapiens
gucccauugauguac

SEQ ID NO: 265650 - RNA, 16 nt, Homo sapiens
gucccauugauguacu

SEQ ID NO: 265651 - RNA, 17 nt, Homo sapiens
guccccacccuccacuc

SEQ ID NO: 265652 - RNA, 21 nt, Homo sapiens
guccccacccuccacucagcu

SEQ ID NO: 265653 - RNA, 13 nt, Homo sapiens
gucccccuuccau

SEQ ID NO: 265654 - RNA, 20 nt, Homo sapiens
gucccggggcuccacugaac

SEQ ID NO: 265655 - RNA, 13 nt, Homo sapiens
gucccuuggagac

SEQ ID NO: 265656 - RNA, 17 nt, Homo sapiens
gucccuuucacacugug

SEQ ID NO: 265657 - RNA, 13 nt, Homo sapiens
guccgagcuuuga

SEQ ID NO: 265658 - RNA, 19 nt, Homo sapiens
guccuaaugcuugcugcug

SEQ ID NO: 265659 - RNA, 16 nt, Homo sapiens
guccuauuauauucau

SEQ ID NO: 265660 - RNA, 16 nt, Homo sapiens
guccucacucucgcca

SEQ ID NO: 265661 - RNA, 17 nt, Homo sapiens
guccugccucagccucc

SEQ ID NO: 265662 - RNA, 21 nt, Homo sapiens
guccuucucucaccuccuaaa

SEQ ID NO: 265663 - RNA, 14 nt, Homo sapiens
guccuugaugcuca

SEQ ID NO: 265664 - RNA, 15 nt, Homo sapiens
gucuaaaaugccuca

SEQ ID NO: 265665 - RNA, 17 nt, Homo sapiens
gucuacguuaccaggca

SEQ ID NO: 265666 - RNA, 18 nt, Homo sapiens
gucuaugggacucaaugc

SEQ ID NO: 265667 - RNA, 13 nt, Homo sapiens
gucuauuagcucc

SEQ ID NO: 265668 - RNA, 21 nt, Homo sapiens
gucucaaacuccugaccucaa

SEQ ID NO: 265669 - RNA, 23 nt, Homo sapiens
gucucaccuggacuuaagcaucu

SEQ ID NO: 265670 - RNA, 17 nt, Homo sapiens
gucucacuauguugccc

SEQ ID NO: 265671 - RNA, 23 nt, Homo sapiens
gucucaguuuacauuuuguauau

SEQ ID NO: 265672 - RNA, 23 nt, Homo sapiens
gucucauaaugcauguggcacuu

SEQ ID NO: 265673 - RNA, 20 nt, Homo sapiens
gucucauaugauugugcaca

SEQ ID NO: 265674 - RNA, 13 nt, Homo sapiens
gucuccaagacca

SEQ ID NO: 265675 - RNA, 20 nt, Homo sapiens
gucucccgccccccacacuu

SEQ ID NO: 265676 - RNA, 16 nt, Homo sapiens
gucuccucucucugua

SEQ ID NO: 265677 - RNA, 19 nt, Homo sapiens
gucuccucucucuguaaua

SEQ ID NO: 265678 - RNA, 23 nt, Homo sapiens
gucucgugguaggacuguagaaa

SEQ ID NO: 265679 - RNA, 13 nt, Homo sapiens
gucucugaacugc

SEQ ID NO: 265680 - RNA, 21 nt, Homo sapiens
gucucugaagugaaacugcuu

SEQ ID NO: 265681 - RNA, 14 nt, Homo sapiens
gucugaacaauaua

SEQ ID NO: 265682 - RNA, 20 nt, Homo sapiens
gucugaacaauauauacuua

SEQ ID NO: 265683 - RNA, 18 nt, Homo sapiens
gucugauuguagcuauga

SEQ ID NO: 265684 - RNA, 18 nt, Homo sapiens
gucugccagccagcagcc

SEQ ID NO: 265685 - RNA, 17 nt, Homo sapiens
gucugcuguugauucca

SEQ ID NO: 265686 - RNA, 14 nt, Homo sapiens
gucuggcauuacaa

SEQ ID NO: 265687 - RNA, 15 nt, Homo sapiens
gucuggcccaccagg

SEQ ID NO: 265688 - RNA, 16 nt, Homo sapiens
gucugggcacagucag

SEQ ID NO: 265689 - RNA, 17 nt, Homo sapiens
gucugggccacucaggg

SEQ ID NO: 265690 - RNA, 20 nt, Homo sapiens
gucugucaauguccuacuga

SEQ ID NO: 265691 - RNA, 11 nt, Homo sapiens
gucuguuggca

SEQ ID NO: 265692 - RNA, 14 nt, Homo sapiens
gucuuaaccuaccu

SEQ ID NO: 265693 - RNA, 15 nt, Homo sapiens
gucuuaaccuaccug

SEQ ID NO: 265694 - RNA, 14 nt, Homo sapiens
gucuucaagcagau

SEQ ID NO: 265695 - RNA, 20 nt, Homo sapiens
gucuucagggggccaggugc

SEQ ID NO: 265696 - RNA, 13 nt, Homo sapiens
gucuucccuguau

SEQ ID NO: 265697 - RNA, 16 nt, Homo sapiens
gucuucguacugggaa

SEQ ID NO: 265698 - RNA, 23 nt, Homo sapiens
gucuucuaaauuugaaauauaau

SEQ ID NO: 265699 - RNA, 12 nt, Homo sapiens
gucuugaacucc

SEQ ID NO: 265700 - RNA, 17 nt, Homo sapiens
gucuugcaauggcagcc

SEQ ID NO: 265701 - RNA, 12 nt, Homo sapiens
gucuuggcucac

SEQ ID NO: 265702 - RNA, 15 nt, Homo sapiens
gucuuggggugggca

SEQ ID NO: 265703 - RNA, 13 nt, Homo sapiens
gucuuguguuucu

SEQ ID NO: 265704 - RNA, 12 nt, Homo sapiens
gucuuucacuga

SEQ ID NO: 265705 - RNA, 14 nt, Homo sapiens
gucuuugaacccuu

SEQ ID NO: 265706 - RNA, 19 nt, Homo sapiens
gucuuuggugaacauugca

SEQ ID NO: 265707 - RNA, 21 nt, Homo sapiens
gucuuuggugaacauugcaau

SEQ ID NO: 265708 - RNA, 19 nt, Homo sapiens
gugaaaugcuggcauuugc

SEQ ID NO: 265709 - RNA, 17 nt, Homo sapiens
gugaaccuuaguaccua

SEQ ID NO: 265710 - RNA, 21 nt, Homo sapiens
gugaagaucacguuccuuccc

SEQ ID NO: 265711 - RNA, 15 nt, Homo sapiens
gugaagcugggagaa

SEQ ID NO: 265712 - RNA, 11 nt, Homo sapiens
gugaaggaaua

SEQ ID NO: 265713 - RNA, 16 nt, Homo sapiens
gugaauaaaccaucau

SEQ ID NO: 265714 - RNA, 23 nt, Homo sapiens
gugaauaaaccaucaucuugcca

SEQ ID NO: 265715 - RNA, 14 nt, Homo sapiens
gugaauggcuuugu

SEQ ID NO: 265716 - RNA, 16 nt, Homo sapiens
gugaauuaggcuguaa

SEQ ID NO: 265717 - RNA, 21 nt, Homo sapiens
gugaauuaggcuguaacuacu

SEQ ID NO: 265718 - RNA, 16 nt, Homo sapiens
gugacauuuccaugca

SEQ ID NO: 265719 - RNA, 17 nt, Homo sapiens
gugacauuuccaugcau

SEQ ID NO: 265720 - RNA, 19 nt, Homo sapiens
gugacauuuccaugcauaa

SEQ ID NO: 265721 - RNA, 21 nt, Homo sapiens
gugaccucugccugaagucac

SEQ ID NO: 265722 - RNA, 22 nt, Homo sapiens
gugaccugccaggcacacugag

SEQ ID NO: 265723 - RNA, 13 nt, Homo sapiens
gugacucuugggg

SEQ ID NO: 265724 - RNA, 20 nt, Homo sapiens
gugagaacuacucagggaau

SEQ ID NO: 265725 - RNA, 18 nt, Homo sapiens
gugagacuguaaguuaca

SEQ ID NO: 265726 - RNA, 20 nt, Homo sapiens
gugagacuguaaguuacaug

SEQ ID NO: 265727 - RNA, 23 nt, Homo sapiens
gugagacuguguuguacagcuag

SEQ ID NO: 265728 - RNA, 23 nt, Homo sapiens
gugagacuuugaggguguauauu

SEQ ID NO: 265729 - RNA, 15 nt, Homo sapiens
gugagaggacucuga

SEQ ID NO: 265730 - RNA, 14 nt, Homo sapiens
gugagaucaugcca

SEQ ID NO: 265731 - RNA, 20 nt, Homo sapiens
gugagcaauccugcaagaac

SEQ ID NO: 265732 - RNA, 21 nt, Homo sapiens
gugagcacuaaggugugcucu

SEQ ID NO: 265733 - RNA, 23 nt, Homo sapiens
gugagggauaguggggucagggc

SEQ ID NO: 265734 - RNA, 14 nt, Homo sapiens
gugaggggcucucu

SEQ ID NO: 265735 - RNA, 13 nt, Homo sapiens
gugauacaaugcu

SEQ ID NO: 265736 - RNA, 13 nt, Homo sapiens
gugauauguuggu

SEQ ID NO: 265737 - RNA, 14 nt, Homo sapiens
gugaucaagcaaua

SEQ ID NO: 265738 - RNA, 22 nt, Homo sapiens
gugaucagaccauaauguuaca

SEQ ID NO: 265739 - RNA, 13 nt, Homo sapiens
gugauccacccac

SEQ ID NO: 265740 - RNA, 21 nt, Homo sapiens
gugaugaugaaaugaggucag

SEQ ID NO: 265741 - RNA, 21 nt, Homo sapiens
gugauguguccugauaagcug

SEQ ID NO: 265742 - RNA, 15 nt, Homo sapiens
gugauguguuuccau

SEQ ID NO: 265743 - RNA, 16 nt, Homo sapiens
gugcacaucugugucu

SEQ ID NO: 265744 - RNA, 15 nt, Homo sapiens
gucacucuggcagcu

SEQ ID NO: 265745 - RNA, 14 nt, Homo sapiens
gucacuuuccucuu

SEQ ID NO: 265746 - RNA, 18 nt, Homo sapiens
gucacuuuccucuuccac

SEQ ID NO: 265747 - RNA, 13 nt, Homo sapiens
gucagacuggaua

SEQ ID NO: 265748 - RNA, 21 nt, Homo sapiens
gucagagggcccaguggugcc

SEQ ID NO: 265749 - RNA, 20 nt, Homo sapiens
gucagaguuccgacugccau

SEQ ID NO: 265750 - RNA, 16 nt, Homo sapiens
gucagaguugugcaca

SEQ ID NO: 265751 - RNA, 17 nt, Homo sapiens
gucagcaaaaagcaaaa

SEQ ID NO: 265752 - RNA, 14 nt, Homo sapiens
gucagcacuaccuc

SEQ ID NO: 265753 - RNA, 20 nt, Homo sapiens
gucagcaggaagcaacgaag

SEQ ID NO: 265754 - RNA, 17 nt, Homo sapiens
gucagcugcagccacuu

SEQ ID NO: 265755 - RNA, 18 nt, Homo sapiens
gucagggaaggugccucu

SEQ ID NO: 265756 - RNA, 19 nt, Homo sapiens
gucaggugccucaagagaa

SEQ ID NO: 265757 - RNA, 16 nt, Homo sapiens
gucagucuucuuccau

SEQ ID NO: 265758 - RNA, 14 nt, Homo sapiens
gucauaacuagaac

SEQ ID NO: 265759 - RNA, 17 nt, Homo sapiens
gucauaaucucuuucca

SEQ ID NO: 265760 - RNA, 14 nt, Homo sapiens
gucauuauguuaau

SEQ ID NO: 265761 - RNA, 23 nt, Homo sapiens
guccaaaauaagaugaaucacuu

SEQ ID NO: 265762 - RNA, 23 nt, Homo sapiens
guccaagcuguggagacucuugu

SEQ ID NO: 265763 - RNA, 13 nt, Homo sapiens
guccaaggucucc

SEQ ID NO: 265764 - RNA, 15 nt, Homo sapiens
guccaauguaccaug

SEQ ID NO: 265765 - RNA, 14 nt, Homo sapiens
guccacaguggaac

SEQ ID NO: 265766 - RNA, 16 nt, Homo sapiens
guccaggcacugagau

SEQ ID NO: 265767 - RNA, 21 nt, Homo sapiens
guccauguuuauccauguacu

SEQ ID NO: 265768 - RNA, 18 nt, Homo sapiens
gucccauucccugggauc

SEQ ID NO: 265769 - RNA, 16 nt, Homo sapiens
guccccgcacugggcu

SEQ ID NO: 265770 - RNA, 17 nt, Homo sapiens
gucccuugcugugagca

SEQ ID NO: 265771 - RNA, 15 nt, Homo sapiens
guccgaucuuugacu

SEQ ID NO: 265772 - RNA, 18 nt, Homo sapiens
guccuacucugugucagg

SEQ ID NO: 265773 - RNA, 19 nt, Homo sapiens
guccuccacgccauuuccu

SEQ ID NO: 265774 - RNA, 21 nt, Homo sapiens
guccucccaucucacacauga

SEQ ID NO: 265775 - RNA, 20 nt, Homo sapiens
guccugcagcaaacacucca

SEQ ID NO: 265776 - RNA, 16 nt, Homo sapiens
guccuggucaguuuuc

SEQ ID NO: 265777 - RNA, 20 nt, Homo sapiens
guccuuagccccaucugcca

SEQ ID NO: 265778 - RNA, 14 nt, Homo sapiens
guccuuuugacacu

SEQ ID NO: 265779 - RNA, 16 nt, Homo sapiens
guggggcagcacagag

SEQ ID NO: 265780 - RNA, 21 nt, Homo sapiens
guggggguaaggugcaucugu

SEQ ID NO: 265781 - RNA, 20 nt, Homo sapiens
guggguacucaauguguacu

SEQ ID NO: 265782 - RNA, 22 nt, Homo sapiens
gugggugccccccuugccagac

SEQ ID NO: 265783 - RNA, 21 nt, Homo sapiens
guggguuucuaaagcugccag

SEQ ID NO: 265784 - RNA, 18 nt, Homo sapiens
guggucagcccuaggaua

SEQ ID NO: 265785 - RNA, 17 nt, Homo sapiens
gugguccuuugggguga

SEQ ID NO: 265786 - RNA, 15 nt, Homo sapiens
guggucuaaacaaaa

SEQ ID NO: 265787 - RNA, 17 nt, Homo sapiens
guggugaacagaacaaa

SEQ ID NO: 265788 - RNA, 22 nt, Homo sapiens
gugguuauuuucuccaugucug

SEQ ID NO: 265789 - RNA, 17 nt, Homo sapiens
guguaauuuuguucuag

SEQ ID NO: 265790 - RNA, 19 nt, Homo sapiens
guguacagucuuguauuaa

SEQ ID NO: 265791 - RNA, 16 nt, Homo sapiens
guguacuuucuucccu

SEQ ID NO: 265792 - RNA, 23 nt, Homo sapiens
guguauuuaaccuugaaggguuc

SEQ ID NO: 265793 - RNA, 23 nt, Homo sapiens
guguccccugacagggccagugc

SEQ ID NO: 265794 - RNA, 14 nt, Homo sapiens
guguccugcaccgg

SEQ ID NO: 265795 - RNA, 14 nt, Homo sapiens
gugucgggcaugac

SEQ ID NO: 265796 - RNA, 11 nt, Homo sapiens
gugucuucuaa

SEQ ID NO: 265797 - RNA, 19 nt, Homo sapiens
gugucuuggggugggcaca

SEQ ID NO: 265798 - RNA, 15 nt, Homo sapiens
gugugaagaucacgu

SEQ ID NO: 265799 - RNA, 14 nt, Homo sapiens
gugugacucauuaa

SEQ ID NO: 265800 - RNA, 21 nt, Homo sapiens
gugugcccacugaacaugcuc

SEQ ID NO: 265801 - RNA, 22 nt, Homo sapiens
guguggagcuaaggacacagug

SEQ ID NO: 265802 - RNA, 12 nt, Homo sapiens
guguggcccaag

SEQ ID NO: 265803 - RNA, 16 nt, Homo sapiens
gugugggaguguguaa

SEQ ID NO: 265804 - RNA, 19 nt, Homo sapiens
gugugugggaguguguaau

SEQ ID NO: 265805 - RNA, 14 nt, Homo sapiens
guguuaaaugugau

SEQ ID NO: 265806 - RNA, 14 nt, Homo sapiens
guguucuucauuac

SEQ ID NO: 265807 - RNA, 19 nt, Homo sapiens
guguucuucauuaccucag

SEQ ID NO: 265808 - RNA, 23 nt, Homo sapiens
guguucuucauuaccucagugag

SEQ ID NO: 265809 - RNA, 16 nt, Homo sapiens
guguuggcacaugccu

SEQ ID NO: 265810 - RNA, 14 nt, Homo sapiens
guguuuccaaugau

SEQ ID NO: 265811 - RNA, 22 nt, Homo sapiens
guguuuuuaauaaagacagggu

SEQ ID NO: 265812 - RNA, 20 nt, Homo sapiens
guuaaaauaaaauuguacau

SEQ ID NO: 265813 - RNA, 18 nt, Homo sapiens
guuaagagaaaugagcuu

SEQ ID NO: 265814 - RNA, 19 nt, Homo sapiens
guuaauuuugaagugcugu

SEQ ID NO: 265815 - RNA, 20 nt, Homo sapiens
guuacaagaaacagccacug

SEQ ID NO: 265816 - RNA, 20 nt, Homo sapiens
guuacagacaaagcguggug

SEQ ID NO: 265817 - RNA, 14 nt, Homo sapiens
guuacauaagauaa

SEQ ID NO: 265818 - RNA, 21 nt, Homo sapiens
guuaccugaaaacacugugca

SEQ ID NO: 265819 - RNA, 22 nt, Homo sapiens
guuaccugaaaacacugugcac

SEQ ID NO: 265820 - RNA, 23 nt, Homo sapiens
guuaggaaaauuucacauuaaua

SEQ ID NO: 265821 - RNA, 14 nt, Homo sapiens
guuaggcucacagu

SEQ ID NO: 265822 - RNA, 22 nt, Homo sapiens
guuauaauaauguuaacaugga

SEQ ID NO: 265823 - RNA, 13 nt, Homo sapiens
guuauacaaccau

SEQ ID NO: 265824 - RNA, 15 nt, Homo sapiens
guuauacaaccauca

SEQ ID NO: 265825 - RNA, 20 nt, Homo sapiens
guuauacaaccaucaaagug

SEQ ID NO: 265826 - RNA, 19 nt, Homo sapiens
guuauacuuauuuguauau

SEQ ID NO: 265827 - RNA, 18 nt, Homo sapiens
guuaucuaauauguaaca

SEQ ID NO: 265828 - RNA, 19 nt, Homo sapiens
guuauuuaugccucuguau

SEQ ID NO: 265829 - RNA, 21 nt, Homo sapiens
guucaaucuggauucauauuu

SEQ ID NO: 265830 - RNA, 13 nt, Homo sapiens
guucaccagguca

SEQ ID NO: 265831 - RNA, 17 nt, Homo sapiens
guucacucuacuuagca

SEQ ID NO: 265832 - RNA, 21 nt, Homo sapiens
guucagucacaugugcucucg

SEQ ID NO: 265833 - RNA, 22 nt, Homo sapiens
guucauggauauguuauacuga

SEQ ID NO: 265834 - RNA, 23 nt, Homo sapiens
guucauggauauguuauacugaa

SEQ ID NO: 265835 - RNA, 18 nt, Homo sapiens
guuccauguucaccaaga

SEQ ID NO: 265836 - RNA, 13 nt, Homo sapiens
guucccaugagau

SEQ ID NO: 265837 - RNA, 12 nt, Homo sapiens
guucccauuugc

SEQ ID NO: 265838 - RNA, 20 nt, Homo sapiens
guuccccacugacagccucc

SEQ ID NO: 265839 - RNA, 14 nt, Homo sapiens
guucccccacugau

SEQ ID NO: 265840 - RNA, 14 nt, Homo sapiens
guucccccugugca

SEQ ID NO: 265841 - RNA, 14 nt, Homo sapiens
guuccccucuuguc

SEQ ID NO: 265842 - RNA, 18 nt, Homo sapiens
guucccggguagccacug

SEQ ID NO: 265843 - RNA, 14 nt, Homo sapiens
guucccugugucau

SEQ ID NO: 265844 - RNA, 14 nt, Homo sapiens
guuccgacugccau

SEQ ID NO: 265845 - RNA, 13 nt, Homo sapiens
guucucugccuca

SEQ ID NO: 265846 - RNA, 19 nt, Homo sapiens
guucuggcucuuccaggcu

SEQ ID NO: 265847 - RNA, 15 nt, Homo sapiens
guucugggacacagu

SEQ ID NO: 265848 - RNA, 17 nt, Homo sapiens
guucuuaguuugcaguu

SEQ ID NO: 265849 - RNA, 21 nt, Homo sapiens
guugaagccaugucuacauga

SEQ ID NO: 265850 - RNA, 18 nt, Homo sapiens
guugagggcaauggacaa

SEQ ID NO: 265851 - RNA, 16 nt, Homo sapiens
guugaugaaauaucaa

SEQ ID NO: 265852 - RNA, 19 nt, Homo sapiens
guugauucagcucugcaag

SEQ ID NO: 265853 - RNA, 15 nt, Homo sapiens
guugauuccacugaa

SEQ ID NO: 265854 - RNA, 16 nt, Homo sapiens
guugcagaauguggag

SEQ ID NO: 265855 - RNA, 18 nt, Homo sapiens
guuggccugcacuggugu

SEQ ID NO: 265856 - RNA, 13 nt, Homo sapiens
guuggcucaggag

SEQ ID NO: 265857 - RNA, 12 nt, Homo sapiens
guuggcuucuaa

SEQ ID NO: 265858 - RNA, 16 nt, Homo sapiens
guuggucccccuucca

SEQ ID NO: 265859 - RNA, 17 nt, Homo sapiens
guugucuguccugguca

SEQ ID NO: 265860 - RNA, 10 nt, Homo sapiens
guuguggaaa

SEQ ID NO: 265861 - RNA, 18 nt, Homo sapiens
guugugugugcuuucuaa

SEQ ID NO: 265862 - RNA, 16 nt, Homo sapiens
guuguuaaaaauguca

SEQ ID NO: 265863 - RNA, 19 nt, Homo sapiens
guuguuaauaaaaguacau

SEQ ID NO: 265864 - RNA, 21 nt, Homo sapiens
guuguuaauaaaaguacaugu

SEQ ID NO: 265865 - RNA, 13 nt, Homo sapiens
guuuaaagucuca

SEQ ID NO: 265866 - RNA, 12 nt, Homo sapiens
guuuaccagaga

SEQ ID NO: 265867 - RNA, 17 nt, Homo sapiens
guuuagaugaaugucag

SEQ ID NO: 265868 - RNA, 18 nt, Homo sapiens
guuuagcccaaaaccaag

SEQ ID NO: 265869 - RNA, 14 nt, Homo sapiens
guuuagugaucuga

SEQ ID NO: 265870 - RNA, 18 nt, Homo sapiens
guuuauaaaagaugcauu

SEQ ID NO: 265871 - RNA, 19 nt, Homo sapiens
guuuauacccguuucacau

SEQ ID NO: 265872 - RNA, 15 nt, Homo sapiens
guuuauagaccagaa

SEQ ID NO: 265873 - RNA, 22 nt, Homo sapiens
guuuaugcauagauaaucucuc

SEQ ID NO: 265874 - RNA, 22 nt, Homo sapiens
guuuauuucaggcauuggauau

SEQ ID NO: 265875 - RNA, 19 nt, Homo sapiens
guuucaccauguuggccag

SEQ ID NO: 265876 - RNA, 22 nt, Homo sapiens
guuucauauugaugugugucua

SEQ ID NO: 265877 - RNA, 17 nt, Homo sapiens
guuuccaaugaugggau

SEQ ID NO: 265878 - RNA, 19 nt, Homo sapiens
guuuccacguaagucacug

SEQ ID NO: 265879 - RNA, 19 nt, Homo sapiens
guuuccuagcugugugaau

SEQ ID NO: 265880 - RNA, 22 nt, Homo sapiens
guuuccugccugcggaccagau

SEQ ID NO: 265881 - RNA, 18 nt, Homo sapiens
guuuccuuucgucugcca

SEQ ID NO: 265882 - RNA, 13 nt, Homo sapiens
guuucuccaagca

SEQ ID NO: 265883 - RNA, 20 nt, Homo sapiens
guuucugaucugaugcaagc

SEQ ID NO: 265884 - RNA, 16 nt, Homo sapiens
guuucuggcagccagu

SEQ ID NO: 265885 - RNA, 17 nt, Homo sapiens
guuucugguggucuguu

SEQ ID NO: 265886 - RNA, 21 nt, Homo sapiens
guuucuuuuuucggcuaaaaa

SEQ ID NO: 265887 - RNA, 16 nt, Homo sapiens
guuugaaccaagaacu

SEQ ID NO: 265888 - RNA, 14 nt, Homo sapiens
guggccucauucag

SEQ ID NO: 265889 - RNA, 19 nt, Homo sapiens
guggcugaccaggcccugc

SEQ ID NO: 265890 - RNA, 22 nt, Homo sapiens
guggcuggaucugugaggggcu

SEQ ID NO: 265891 - RNA, 18 nt, Homo sapiens
guggcuucccgcucagcc

SEQ ID NO: 265892 - RNA, 22 nt, Homo sapiens
gugggagcuuuugguaugugac

SEQ ID NO: 265893 - RNA, 17 nt, Homo sapiens
gugggaggggaagaaaa

SEQ ID NO: 265894 - RNA, 14 nt, Homo sapiens
gugggauccuccag

SEQ ID NO: 265895 - RNA, 22 nt, Homo sapiens
gugggcuaagcacgggccauau

SEQ ID NO: 265896 - RNA, 20 nt, Homo sapiens
gugggcucccugacugggag

SEQ ID NO: 265897 - RNA, 18 nt, Homo sapiens
guggugaacagaacaaaa

SEQ ID NO: 265898 - RNA, 20 nt, Homo sapiens
guggugaacagaacaaaagg

SEQ ID NO: 265899 - RNA, 17 nt, Homo sapiens
guggugagaggcaucca

SEQ ID NO: 265900 - RNA, 23 nt, Homo sapiens
guggugccccagcacgguggugc

SEQ ID NO: 265901 - RNA, 13 nt, Homo sapiens
guguaccagagaa

SEQ ID NO: 265902 - RNA, 13 nt, Homo sapiens
gugucacccuuag

SEQ ID NO: 265903 - RNA, 15 nt, Homo sapiens
gugucaccugugcuu

SEQ ID NO: 265904 - RNA, 14 nt, Homo sapiens
guguccaaggagca

SEQ ID NO: 265905 - RNA, 22 nt, Homo sapiens
gugugaagauuauaaaagccaa

SEQ ID NO: 265906 - RNA, 14 nt, Homo sapiens
gugugcucuuaucc

SEQ ID NO: 265907 - RNA, 14 nt, Homo sapiens
guguggggccaugc

SEQ ID NO: 265908 - RNA, 19 nt, Homo sapiens
gugugggggaagcaccaua

SEQ ID NO: 265909 - RNA, 19 nt, Homo sapiens
guguggugagaucaugcca

SEQ ID NO: 265910 - RNA, 22 nt, Homo sapiens
gugugugcacguacacacacau

SEQ ID NO: 265911 - RNA, 13 nt, Homo sapiens
guguguguguaug

SEQ ID NO: 265912 - RNA, 21 nt, Homo sapiens
guguuaucagucauaacuaaa

SEQ ID NO: 265913 - RNA, 16 nt, Homo sapiens
guguucgcuggcugau

SEQ ID NO: 265914 - RNA, 20 nt, Homo sapiens
guguugcccaggcuggucuu

SEQ ID NO: 265915 - RNA, 20 nt, Homo sapiens
guguuuauauauaagccaaa

SEQ ID NO: 265916 - RNA, 15 nt, Homo sapiens
guguuuauugucaaa

SEQ ID NO: 265917 - RNA, 23 nt, Homo sapiens
guguuuccuggcacugcuuccag

SEQ ID NO: 265918 - RNA, 20 nt, Homo sapiens
guuaaaaguuguguuuugaa

SEQ ID NO: 265919 - RNA, 12 nt, Homo sapiens
guuaacaauauu

SEQ ID NO: 265920 - RNA, 18 nt, Homo sapiens
guuaaggguuaguuuaca

SEQ ID NO: 265921 - RNA, 19 nt, Homo sapiens
guuaauaaaggaacauuaa

SEQ ID NO: 265922 - RNA, 18 nt, Homo sapiens
guuaauaaguuucacuga

SEQ ID NO: 265923 - RNA, 20 nt, Homo sapiens
guuaauuuuuccaacuacua

SEQ ID NO: 265924 - RNA, 22 nt, Homo sapiens
guuacauaagauaaaugugcug

SEQ ID NO: 265925 - RNA, 19 nt, Homo sapiens
guuacaugaaggcagcaga

SEQ ID NO: 265926 - RNA, 10 nt, Homo sapiens
guuaccuaau

SEQ ID NO: 265927 - RNA, 14 nt, Homo sapiens
guuacugucuucag

SEQ ID NO: 265928 - RNA, 13 nt, Homo sapiens
guuacuugggagg

SEQ ID NO: 265929 - RNA, 17 nt, Homo sapiens
guuaggaaaauuucaca

SEQ ID NO: 265930 - RNA, 15 nt, Homo sapiens
guuagugauggagcu

SEQ ID NO: 265931 - RNA, 14 nt, Homo sapiens
guuaguuccuucau

SEQ ID NO: 265932 - RNA, 22 nt, Homo sapiens
guuaucaaaaaaaaaaaaaugu

SEQ ID NO: 265933 - RNA, 20 nt, Homo sapiens
guuauuuauaaucacuuuuu

SEQ ID NO: 265934 - RNA, 18 nt, Homo sapiens
uaaaauuaugccauagca

SEQ ID NO: 265935 - RNA, 13 nt, Homo sapiens
uaaaauuauuuca

SEQ ID NO: 265936 - RNA, 14 nt, Homo sapiens
uaaacaugcuugca

SEQ ID NO: 265937 - RNA, 16 nt, Homo sapiens
uaaacauuucauuucc

SEQ ID NO: 265938 - RNA, 17 nt, Homo sapiens
uaaaccaucaucuugcc

SEQ ID NO: 265939 - RNA, 16 nt, Homo sapiens
uaaaccguacacugug

SEQ ID NO: 265940 - RNA, 18 nt, Homo sapiens
uaaaccguacacuguguu

SEQ ID NO: 265941 - RNA, 16 nt, Homo sapiens
uaaacgcugucccuag

SEQ ID NO: 265942 - RNA, 16 nt, Homo sapiens
uaaacuauaaccucuc

SEQ ID NO: 265943 - RNA, 19 nt, Homo sapiens
uaaacugauugcuggcaac

SEQ ID NO: 265944 - RNA, 13 nt, Homo sapiens
uaaacugugcacc

SEQ ID NO: 265945 - RNA, 21 nt, Homo sapiens
uaaacuuaccugggcauucuu

SEQ ID NO: 265946 - RNA, 23 nt, Homo sapiens
uaaacuuuuuuucuguaccaguu

SEQ ID NO: 265947 - RNA, 19 nt, Homo sapiens
uaaagaaaaguuuuguaaa

SEQ ID NO: 265948 - RNA, 20 nt, Homo sapiens
uaaagaaauauauaugauau

SEQ ID NO: 265949 - RNA, 10 nt, Homo sapiens
uaaagacaga

SEQ ID NO: 265950 - RNA, 12 nt, Homo sapiens
uaaagacuguag

SEQ ID NO: 265951 - RNA, 15 nt, Homo sapiens
uaaagauacaguguc

SEQ ID NO: 265952 - RNA, 17 nt, Homo sapiens
uaaagauguuuauuuca

SEQ ID NO: 265953 - RNA, 22 nt, Homo sapiens
uaaagcugccggcacagaacuu

SEQ ID NO: 265954 - RNA, 16 nt, Homo sapiens
uaaagcuuugugcaga

SEQ ID NO: 265955 - RNA, 15 nt, Homo sapiens
uaaaggcaguuuucu

SEQ ID NO: 265956 - RNA, 18 nt, Homo sapiens
uaaaggcucgauuuugua

SEQ ID NO: 265957 - RNA, 22 nt, Homo sapiens
uaaagggagauaacaaucugua

SEQ ID NO: 265958 - RNA, 17 nt, Homo sapiens
uaaagguccuggcaaag

SEQ ID NO: 265959 - RNA, 12 nt, Homo sapiens
uaaaguagcuuu

SEQ ID NO: 265960 - RNA, 18 nt, Homo sapiens
uaaaguaguccugugaau

SEQ ID NO: 265961 - RNA, 14 nt, Homo sapiens
uaaaguaugugcau

SEQ ID NO: 265962 - RNA, 15 nt, Homo sapiens
uaaaguaugugcaua

SEQ ID NO: 265963 - RNA, 16 nt, Homo sapiens
uaaaguaugugcauau

SEQ ID NO: 265964 - RNA, 16 nt, Homo sapiens
uaaagugcccagcaca

SEQ ID NO: 265965 - RNA, 22 nt, Homo sapiens
uaaaguuucuguugauaaucau

SEQ ID NO: 265966 - RNA, 12 nt, Homo sapiens
uaaauacuguuu

SEQ ID NO: 265967 - RNA, 19 nt, Homo sapiens
uaaauagguuuuucuugcu

SEQ ID NO: 265968 - RNA, 20 nt, Homo sapiens
uaaauauauauaaaccuaaa

SEQ ID NO: 265969 - RNA, 18 nt, Homo sapiens
uaaauauaucuaccccag

SEQ ID NO: 265970 - RNA, 15 nt, Homo sapiens
uaaaucaaugcuaua

SEQ ID NO: 265971 - RNA, 19 nt, Homo sapiens
uaaaugccaggccuggcaa

SEQ ID NO: 265972 - RNA, 14 nt, Homo sapiens
uaaauguacauuaa

SEQ ID NO: 265973 - RNA, 14 nt, Homo sapiens
uaaauguacuuuuc

SEQ ID NO: 265974 - RNA, 12 nt, Homo sapiens
uaaaugugaaug

SEQ ID NO: 265975 - RNA, 21 nt, Homo sapiens
uaaaugugaaugaugauccua

SEQ ID NO: 265976 - RNA, 16 nt, Homo sapiens
uaaauuauuuacugca

SEQ ID NO: 265977 - RNA, 21 nt, Homo sapiens
uaaauuuaugguucucaggcc

SEQ ID NO: 265978 - RNA, 16 nt, Homo sapiens
uaaauuuaugugaugg

SEQ ID NO: 265979 - RNA, 20 nt, Homo sapiens
uaaauuucucuacugucuca

SEQ ID NO: 265980 - RNA, 22 nt, Homo sapiens
uaaauuucucuacugucucagu

SEQ ID NO: 265981 - RNA, 13 nt, Homo sapiens
uaaauuugcaaau

SEQ ID NO: 265982 - RNA, 20 nt, Homo sapiens
uaaauuuuuuauaaaagugu

SEQ ID NO: 265983 - RNA, 14 nt, Homo sapiens
uaacaaacucugag

SEQ ID NO: 265984 - RNA, 14 nt, Homo sapiens
uaacaccaugauua

SEQ ID NO: 265985 - RNA, 14 nt, Homo sapiens
uaacacuguacugc

SEQ ID NO: 265986 - RNA, 16 nt, Homo sapiens
uaacaggaaaauuuua

SEQ ID NO: 265987 - RNA, 17 nt, Homo sapiens
uaacaggagugccacuu

SEQ ID NO: 265988 - RNA, 16 nt, Homo sapiens
uaacaggauuagacag

SEQ ID NO: 265989 - RNA, 16 nt, Homo sapiens
uaacaggcagauacag

SEQ ID NO: 265990 - RNA, 22 nt, Homo sapiens
uaacauaauuuguacauaugua

SEQ ID NO: 265991 - RNA, 16 nt, Homo sapiens
uaacauggaaguacua

SEQ ID NO: 265992 - RNA, 15 nt, Homo sapiens
uaacauggugugcuu

SEQ ID NO: 265993 - RNA, 20 nt, Homo sapiens
uaacauguaauuaaguacua

SEQ ID NO: 265994 - RNA, 21 nt, Homo sapiens
uaacauguaauuaaguacuau

SEQ ID NO: 265995 - RNA, 16 nt, Homo sapiens
uaacauguuaaaccau

SEQ ID NO: 265996 - RNA, 16 nt, Homo sapiens
uaacauuuauuugagu

SEQ ID NO: 265997 - RNA, 19 nt, Homo sapiens
uaaccaguguuguggauuu

SEQ ID NO: 265998 - RNA, 17 nt, Homo sapiens
uaaccucaaagugacua

SEQ ID NO: 265999 - RNA, 22 nt, Homo sapiens
uaaccuugaaaaaaaacagugg

SEQ ID NO: 266000 - RNA, 16 nt, Homo sapiens
uaacgagaaauagaaa

SEQ ID NO: 266001 - RNA, 21 nt, Homo sapiens
uaacuaaaagguaugcaauca

SEQ ID NO: 266002 - RNA, 22 nt, Homo sapiens
uaacucagucuuuaaucugaga

SEQ ID NO: 266003 - RNA, 18 nt, Homo sapiens
uaacucuaccugcacacu

SEQ ID NO: 266004 - RNA, 17 nt, Homo sapiens
uaacugccuuguguaca

SEQ ID NO: 266005 - RNA, 20 nt, Homo sapiens
uaacuucaaggcccauaucu

SEQ ID NO: 266006 - RNA, 19 nt, Homo sapiens
uaagaaaaaggaugcacag

SEQ ID NO: 266007 - RNA, 14 nt, Homo sapiens
uaagaaaacuaaga

SEQ ID NO: 266008 - RNA, 12 nt, Homo sapiens
uaagaaaaucau

SEQ ID NO: 266009 - RNA, 13 nt, Homo sapiens
uaagaaagacuau

SEQ ID NO: 266010 - RNA, 15 nt, Homo sapiens
uaagaaauucacuuc

SEQ ID NO: 266011 - RNA, 22 nt, Homo sapiens
uaagaaccuuuugagugccuua

SEQ ID NO: 266012 - RNA, 19 nt, Homo sapiens
uaagaacuaaaauguucua

SEQ ID NO: 266013 - RNA, 21 nt, Homo sapiens
uaagaagcagauaaugguguu

SEQ ID NO: 266014 - RNA, 19 nt, Homo sapiens
uaagaauuuuugaagugac

SEQ ID NO: 266015 - RNA, 12 nt, Homo sapiens
uaagagaaauga

SEQ ID NO: 266016 - RNA, 18 nt, Homo sapiens
uaagagaaaugagcugca

SEQ ID NO: 266017 - RNA, 15 nt, Homo sapiens
uaagagaacaaugug

SEQ ID NO: 266018 - RNA, 24 nt, Homo sapiens
uaagaguggaaccaacacuaacau

SEQ ID NO: 266019 - RNA, 21 nt, Homo sapiens
uaagaucguucucugccucac

SEQ ID NO: 266020 - RNA, 12 nt, Homo sapiens
uaagaugaaaca

SEQ ID NO: 266021 - RNA, 20 nt, Homo sapiens
uaagaugaaacaucauuuca

SEQ ID NO: 266022 - RNA, 13 nt, Homo sapiens
uaagaugaucauc

SEQ ID NO: 266023 - RNA, 18 nt, Homo sapiens
uaagaugaucaucuccag

SEQ ID NO: 266024 - RNA, 20 nt, Homo sapiens
uaagcacacuugacaucaac

SEQ ID NO: 266025 - RNA, 17 nt, Homo sapiens
uaagcagcgccagugac

SEQ ID NO: 266026 - RNA, 20 nt, Homo sapiens
uaagccacugccucucccuc

SEQ ID NO: 266027 - RNA, 16 nt, Homo sapiens
uaagccauguguucca

SEQ ID NO: 266028 - RNA, 15 nt, Homo sapiens
uaagcccacauauaa

SEQ ID NO: 266029 - RNA, 20 nt, Homo sapiens
uaagcucuacugaggugcua

SEQ ID NO: 266030 - RNA, 15 nt, Homo sapiens
uaaggaauaccuguc

SEQ ID NO: 266031 - RNA, 20 nt, Homo sapiens
uaaggguuaguuuacaauca

SEQ ID NO: 266032 - RNA, 13 nt, Homo sapiens
uaaggugagggaa

SEQ ID NO: 266033 - RNA, 15 nt, Homo sapiens
uaaaacauuaagaaa

SEQ ID NO: 266034 - RNA, 18 nt, Homo sapiens
uaaaacccaagugccuua

SEQ ID NO: 266035 - RNA, 20 nt, Homo sapiens
uaaaacccacaaaaguacaa

SEQ ID NO: 266036 - RNA, 22 nt, Homo sapiens
uaaaacuuuaaucccacuugcc

SEQ ID NO: 266037 - RNA, 11 nt, Homo sapiens
uaaaagccauc

SEQ ID NO: 266038 - RNA, 18 nt, Homo sapiens
uaaaaggacagagauuaa

SEQ ID NO: 266039 - RNA, 16 nt, Homo sapiens
uaaaagguaugcaauc

SEQ ID NO: 266040 - RNA, 23 nt, Homo sapiens
uaaaaguacauguuaaacuuacu

SEQ ID NO: 266041 - RNA, 23 nt, Homo sapiens
uaaaaguuggcucaggagucuua

SEQ ID NO: 266042 - RNA, 21 nt, Homo sapiens
uaaaauaaucaguguuuccaa

SEQ ID NO: 266043 - RNA, 16 nt, Homo sapiens
uaaaaucccuccuuca

SEQ ID NO: 266044 - RNA, 22 nt, Homo sapiens
uaaaauggacuguggugacuuu

SEQ ID NO: 266045 - RNA, 20 nt, Homo sapiens
uaaaauguugaaaagucaaa

SEQ ID NO: 266046 - RNA, 16 nt, Homo sapiens
uaaaauuacugaugca

SEQ ID NO: 266047 - RNA, 14 nt, Homo sapiens
uaaaauugugaugu

SEQ ID NO: 266048 - RNA, 22 nt, Homo sapiens
uaaacauugguucuuguauuaa

SEQ ID NO: 266049 - RNA, 15 nt, Homo sapiens
uaaacauuucauuuc

SEQ ID NO: 266050 - RNA, 17 nt, Homo sapiens
uaaacauuucauuuccc

SEQ ID NO: 266051 - RNA, 20 nt, Homo sapiens
uaaaccagugaacaguguga

SEQ ID NO: 266052 - RNA, 17 nt, Homo sapiens
uaaaccguacacugugu

SEQ ID NO: 266053 - RNA, 21 nt, Homo sapiens
uaaaccuuugguaaucuucaa

SEQ ID NO: 266054 - RNA, 19 nt, Homo sapiens
uaaacgguuaacaauauua

SEQ ID NO: 266055 - RNA, 16 nt, Homo sapiens
uaaacugaaugaacaa

SEQ ID NO: 266056 - RNA, 19 nt, Homo sapiens
uaaacugaaugaacaaccu

SEQ ID NO: 266057 - RNA, 23 nt, Homo sapiens
uaaacugauugcuggcaacaaca

SEQ ID NO: 266058 - RNA, 20 nt, Homo sapiens
uaaacuuacuuaguguuaug

SEQ ID NO: 266059 - RNA, 20 nt, Homo sapiens
uaaagaccugacaccuuuca

SEQ ID NO: 266060 - RNA, 15 nt, Homo sapiens
uaaagaucauguaaa

SEQ ID NO: 266061 - RNA, 18 nt, Homo sapiens
uaaagcaauaugcauuua

SEQ ID NO: 266062 - RNA, 16 nt, Homo sapiens
uaaagcaggugcccag

SEQ ID NO: 266063 - RNA, 16 nt, Homo sapiens
uaaagcugaaaacugc

SEQ ID NO: 266064 - RNA, 12 nt, Homo sapiens
uaaagcugccag

SEQ ID NO: 266065 - RNA, 15 nt, Homo sapiens
uaaagcuuugugcag

SEQ ID NO: 266066 - RNA, 17 nt, Homo sapiens
uaaagcuuugugcagau

SEQ ID NO: 266067 - RNA, 15 nt, Homo sapiens
uaaauacagucuucc

SEQ ID NO: 266068 - RNA, 23 nt, Homo sapiens
uaaauagcuagacuggugacuga

SEQ ID NO: 266069 - RNA, 12 nt, Homo sapiens
uaaauagcucag

SEQ ID NO: 266070 - RNA, 17 nt, Homo sapiens
uaaauauagcucaggua

SEQ ID NO: 266071 - RNA, 15 nt, Homo sapiens
uaaauauaucuaccc

SEQ ID NO: 266072 - RNA, 14 nt, Homo sapiens
uaaaucaaugcuau

SEQ ID NO: 266073 - RNA, 15 nt, Homo sapiens
uaaaucccauuauuc

SEQ ID NO: 266074 - RNA, 20 nt, Homo sapiens
uaaauccuucuuauguuucu

SEQ ID NO: 266075 - RNA, 19 nt, Homo sapiens
uaaaugacucuucccucaa

SEQ ID NO: 266076 - RNA, 17 nt, Homo sapiens
uaaaugggggugcauuu

SEQ ID NO: 266077 - RNA, 19 nt, Homo sapiens
uaaaugggggugcauuuga

SEQ ID NO: 266078 - RNA, 13 nt, Homo sapiens
uaaauguagaaag

SEQ ID NO: 266079 - RNA, 21 nt, Homo sapiens
uaaauguagaaagugauccau

SEQ ID NO: 266080 - RNA, 22 nt, Homo sapiens
uaaaugucucuuuaaugucaca

SEQ ID NO: 266081 - RNA, 15 nt, Homo sapiens
uaaauucaugcugcu

SEQ ID NO: 266082 - RNA, 20 nt, Homo sapiens
uaaauucccuggccuuucau

SEQ ID NO: 266083 - RNA, 15 nt, Homo sapiens
uaaauuuaugugaug

SEQ ID NO: 266084 - RNA, 20 nt, Homo sapiens
uaaauuuugugauucuauaa

SEQ ID NO: 266085 - RNA, 14 nt, Homo sapiens
uaacaacuaugauu

SEQ ID NO: 266086 - RNA, 20 nt, Homo sapiens
uaacaaguagcacccuggau

SEQ ID NO: 266087 - RNA, 17 nt, Homo sapiens
uaacaauuauguuuuca

SEQ ID NO: 266088 - RNA, 19 nt, Homo sapiens
uaacaccaugauuaaccac

SEQ ID NO: 266089 - RNA, 20 nt, Homo sapiens
uacacaaucugaaacagcuu

SEQ ID NO: 266090 - RNA, 20 nt, Homo sapiens
uacacacacacacacagcca

SEQ ID NO: 266091 - RNA, 21 nt, Homo sapiens
uacacacacacgcgugcacac

SEQ ID NO: 266092 - RNA, 20 nt, Homo sapiens
uacacauuuuucagauauaa

SEQ ID NO: 266093 - RNA, 17 nt, Homo sapiens
uacaccauuaugugcgc

SEQ ID NO: 266094 - RNA, 12 nt, Homo sapiens
uacacuaugaag

SEQ ID NO: 266095 - RNA, 14 nt, Homo sapiens
uacagaacucuuuc

SEQ ID NO: 266096 - RNA, 16 nt, Homo sapiens
uacagacugaugccag

SEQ ID NO: 266097 - RNA, 15 nt, Homo sapiens
uacagauagauauau

SEQ ID NO: 266098 - RNA, 13 nt, Homo sapiens
uacagaugggcaa

SEQ ID NO: 266099 - RNA, 22 nt, Homo sapiens
uacagcuaaucagcauucucac

SEQ ID NO: 266100 - RNA, 14 nt, Homo sapiens
uacaggaaguacug

SEQ ID NO: 266101 - RNA, 15 nt, Homo sapiens
uacaggagugagcac

SEQ ID NO: 266102 - RNA, 20 nt, Homo sapiens
uacaggcauagaguucagac

SEQ ID NO: 266103 - RNA, 15 nt, Homo sapiens
uacagguaugugcca

SEQ ID NO: 266104 - RNA, 18 nt, Homo sapiens
uacagguaugugccacca

SEQ ID NO: 266105 - RNA, 22 nt, Homo sapiens
uacaggugugagccacagcacu

SEQ ID NO: 266106 - RNA, 14 nt, Homo sapiens
uacaggugugaguc

SEQ ID NO: 266107 - RNA, 16 nt, Homo sapiens
uacaggugugagucac

SEQ ID NO: 266108 - RNA, 22 nt, Homo sapiens
uacaguaggagcccagcucuga

SEQ ID NO: 266109 - RNA, 16 nt, Homo sapiens
uacaguaucucagggc

SEQ ID NO: 266110 - RNA, 20 nt, Homo sapiens
uacaguuacucagaauucuc

SEQ ID NO: 266111 - RNA, 14 nt, Homo sapiens
uacaguuuaucuau

SEQ ID NO: 266112 - RNA, 23 nt, Homo sapiens
uacaguuuauuauguacuauuca

SEQ ID NO: 266113 - RNA, 15 nt, Homo sapiens
uacauaaaguaugug

SEQ ID NO: 266114 - RNA, 19 nt, Homo sapiens
uacauaaaguaugugcaua

SEQ ID NO: 266115 - RNA, 20 nt, Homo sapiens
uacauaaaguaugugcauau

SEQ ID NO: 266116 - RNA, 14 nt, Homo sapiens
uacauacuuuuugg

SEQ ID NO: 266117 - RNA, 11 nt, Homo sapiens
uacaucuggcc

SEQ ID NO: 266118 - RNA, 20 nt, Homo sapiens
uacaugaauacgucuugauc

SEQ ID NO: 266119 - RNA, 13 nt, Homo sapiens
uacaugacauuua

SEQ ID NO: 266120 - RNA, 15 nt, Homo sapiens
uacauucaacagaga

SEQ ID NO: 266121 - RNA, 18 nt, Homo sapiens
uaccaaaauguccaccaa

SEQ ID NO: 266122 - RNA, 15 nt, Homo sapiens
uaccagcaucuccca

SEQ ID NO: 266123 - RNA, 12 nt, Homo sapiens
uaccauguugcc

SEQ ID NO: 266124 - RNA, 15 nt, Homo sapiens
uaccauguugcccag

SEQ ID NO: 266125 - RNA, 22 nt, Homo sapiens
uaccauguugcccagaauuuca

SEQ ID NO: 266126 - RNA, 18 nt, Homo sapiens
uacccgagguuugcaaau

SEQ ID NO: 266127 - RNA, 20 nt, Homo sapiens
uacccguuucacaugcuuuu

SEQ ID NO: 266128 - RNA, 18 nt, Homo sapiens
uacccuacccugcacauu

SEQ ID NO: 266129 - RNA, 13 nt, Homo sapiens
uacccuccaugua

SEQ ID NO: 266130 - RNA, 13 nt, Homo sapiens
uaccggcaauuuc

SEQ ID NO: 266131 - RNA, 16 nt, Homo sapiens
uaccguguggcccaag

SEQ ID NO: 266132 - RNA, 15 nt, Homo sapiens
uaccuaguagucauu

SEQ ID NO: 266133 - RNA, 18 nt, Homo sapiens
uaccuaguagucauuuca

SEQ ID NO: 266134 - RNA, 23 nt, Homo sapiens
uaccucacagagugcauugugag

SEQ ID NO: 266135 - RNA, 23 nt, Homo sapiens
uaccuccuaauuccacacccuca

SEQ ID NO: 266136 - RNA, 14 nt, Homo sapiens
uaccucuuggcugc

SEQ ID NO: 266137 - RNA, 19 nt, Homo sapiens
uaccucuuggcugccuugu

SEQ ID NO: 266138 - RNA, 21 nt, Homo sapiens
uaccugaaaacacugugcaca

SEQ ID NO: 266139 - RNA, 20 nt, Homo sapiens
uaccugaaauaaaauucauu

SEQ ID NO: 266140 - RNA, 22 nt, Homo sapiens
uaccugaagucuuuguacagac

SEQ ID NO: 266141 - RNA, 14 nt, Homo sapiens
uaccugacacuccc

SEQ ID NO: 266142 - RNA, 14 nt, Homo sapiens
uaccugcacacugu

SEQ ID NO: 266143 - RNA, 21 nt, Homo sapiens
uaccugcccccaauccaugaa

SEQ ID NO: 266144 - RNA, 19 nt, Homo sapiens
uaccuggcccugugccuug

SEQ ID NO: 266145 - RNA, 13 nt, Homo sapiens
uaccugggcauuc

SEQ ID NO: 266146 - RNA, 21 nt, Homo sapiens
uaccugggcauucuuguuuca

SEQ ID NO: 266147 - RNA, 14 nt, Homo sapiens
uaccuucuaccucu

SEQ ID NO: 266148 - RNA, 15 nt, Homo sapiens
uaccuucuaccucuu

SEQ ID NO: 266149 - RNA, 21 nt, Homo sapiens
uaccuugguucccccacugau

SEQ ID NO: 266150 - RNA, 13 nt, Homo sapiens
uaccuugugcuaa

SEQ ID NO: 266151 - RNA, 22 nt, Homo sapiens
uaccuuuuauuuuaauguuucc

SEQ ID NO: 266152 - RNA, 22 nt, Homo sapiens
uacgucuugaucagacauucag

SEQ ID NO: 266153 - RNA, 15 nt, Homo sapiens
uacguuaccaggcag

SEQ ID NO: 266154 - RNA, 20 nt, Homo sapiens
uacguuaugauaguguccca

SEQ ID NO: 266155 - RNA, 12 nt, Homo sapiens
uacguugugcau

SEQ ID NO: 266156 - RNA, 13 nt, Homo sapiens
uacguugugcauu

SEQ ID NO: 266157 - RNA, 16 nt, Homo sapiens
uacguugugcauuugg

SEQ ID NO: 266158 - RNA, 20 nt, Homo sapiens
uacuaacuuuccuucauuca

SEQ ID NO: 266159 - RNA, 17 nt, Homo sapiens
uacuaaggaaucuuucu

SEQ ID NO: 266160 - RNA, 15 nt, Homo sapiens
uacuacacauucaau

SEQ ID NO: 266161 - RNA, 18 nt, Homo sapiens
uacuacccucagucuaca

SEQ ID NO: 266162 - RNA, 14 nt, Homo sapiens
uacuauauauguga

SEQ ID NO: 266163 - RNA, 14 nt, Homo sapiens
uacuaucaugucaa

SEQ ID NO: 266164 - RNA, 15 nt, Homo sapiens
uacuauccaaucugu

SEQ ID NO: 266165 - RNA, 17 nt, Homo sapiens
uacuauucaaucuuuac

SEQ ID NO: 266166 - RNA, 22 nt, Homo sapiens
uacuauucaaucuuuacacaau

SEQ ID NO: 266167 - RNA, 21 nt, Homo sapiens
uacuauuuuuacuaaucuuuc

SEQ ID NO: 266168 - RNA, 16 nt, Homo sapiens
uacucaccucacccca

SEQ ID NO: 266169 - RNA, 20 nt, Homo sapiens
uacucaccucaccccacugu

SEQ ID NO: 266170 - RNA, 16 nt, Homo sapiens
uacucgaguuacagac

SEQ ID NO: 266171 - RNA, 22 nt, Homo sapiens
uacugaggugcuauguucuuag

SEQ ID NO: 266172 - RNA, 23 nt, Homo sapiens
uacugcagcuuuguuuguuguca

SEQ ID NO: 266173 - RNA, 16 nt, Homo sapiens
uacugccaaccagagc

SEQ ID NO: 266174 - RNA, 22 nt, Homo sapiens
uacugcuggcaguggaacuaag

SEQ ID NO: 266175 - RNA, 19 nt, Homo sapiens
uacuggagaaaauggacgu

SEQ ID NO: 266176 - RNA, 14 nt, Homo sapiens
uacuggcaauuugu

SEQ ID NO: 266177 - RNA, 15 nt, Homo sapiens
uacaacacacacugu

SEQ ID NO: 266178 - RNA, 20 nt, Homo sapiens
uacaaccugugaucaagcaa

SEQ ID NO: 266179 - RNA, 19 nt, Homo sapiens
uacaacucuauuuaauuaa

SEQ ID NO: 266180 - RNA, 23 nt, Homo sapiens
uacaacuuuuuaccuaguacaag

SEQ ID NO: 266181 - RNA, 14 nt, Homo sapiens
uacaagcgugagcc

SEQ ID NO: 266182 - RNA, 21 nt, Homo sapiens
uacaauaaaacuuugcugcca

SEQ ID NO: 266183 - RNA, 23 nt, Homo sapiens
uacaauaacauaauuuguacaua

SEQ ID NO: 266184 - RNA, 19 nt, Homo sapiens
uacaaucagccacauucua

SEQ ID NO: 266185 - RNA, 16 nt, Homo sapiens
uacaauguucauccca

SEQ ID NO: 266186 - RNA, 13 nt, Homo sapiens
uacaauuugccau

SEQ ID NO: 266187 - RNA, 11 nt, Homo sapiens
uacaauuuugu

SEQ ID NO: 266188 - RNA, 22 nt, Homo sapiens
uacacacacacacacagccaca

SEQ ID NO: 266189 - RNA, 19 nt, Homo sapiens
uacacgagguaugaggucu

SEQ ID NO: 266190 - RNA, 23 nt, Homo sapiens
uacacguaaaucuguucaaggaa

SEQ ID NO: 266191 - RNA, 21 nt, Homo sapiens
uacacuaaaaggugaccaaug

SEQ ID NO: 266192 - RNA, 20 nt, Homo sapiens
uacagaagccccacccugcc

SEQ ID NO: 266193 - RNA, 19 nt, Homo sapiens
uacagaaucaaaugcaauu

SEQ ID NO: 266194 - RNA, 20 nt, Homo sapiens
uacagaaucaaaugcaauuu

SEQ ID NO: 266195 - RNA, 23 nt, Homo sapiens
uacagacaaagcgugguggacau

SEQ ID NO: 266196 - RNA, 13 nt, Homo sapiens
uacagacaacaaa

SEQ ID NO: 266197 - RNA, 19 nt, Homo sapiens
uacagacaacaaaccuguu

SEQ ID NO: 266198 - RNA, 21 nt, Homo sapiens
uacagacacucccacuuggca

SEQ ID NO: 266199 - RNA, 15 nt, Homo sapiens
uacagacugaugcca

SEQ ID NO: 266200 - RNA, 13 nt, Homo sapiens
uacagagaagauu

SEQ ID NO: 266201 - RNA, 18 nt, Homo sapiens
uacagagaagauucuugu

SEQ ID NO: 266202 - RNA, 14 nt, Homo sapiens
uacagaggacagua

SEQ ID NO: 266203 - RNA, 20 nt, Homo sapiens
uacagauagauauaugcucu

SEQ ID NO: 266204 - RNA, 19 nt, Homo sapiens
uacaggaagguagaaauau

SEQ ID NO: 266205 - RNA, 13 nt, Homo sapiens
uacaggaaguacu

SEQ ID NO: 266206 - RNA, 13 nt, Homo sapiens
uacaggugugaac

SEQ ID NO: 266207 - RNA, 13 nt, Homo sapiens
uacaggugugagc

SEQ ID NO: 266208 - RNA, 17 nt, Homo sapiens
uacaggugugagucacc

SEQ ID NO: 266209 - RNA, 18 nt, Homo sapiens
uacagucuuccauuugca

SEQ ID NO: 266210 - RNA, 16 nt, Homo sapiens
uacagucuuguauuaa

SEQ ID NO: 266211 - RNA, 17 nt, Homo sapiens
uacaguucugugguuuc

SEQ ID NO: 266212 - RNA, 20 nt, Homo sapiens
uacaguuuuuauugcuuguu

SEQ ID NO: 266213 - RNA, 17 nt, Homo sapiens
uacauaaugcgugcaua

SEQ ID NO: 266214 - RNA, 15 nt, Homo sapiens
uacaugaauugcauu

SEQ ID NO: 266215 - RNA, 15 nt, Homo sapiens
uacaugcauugcucu

SEQ ID NO: 266216 - RNA, 11 nt, Homo sapiens
uacauggaaua

SEQ ID NO: 266217 - RNA, 20 nt, Homo sapiens
uacauggaauaacauguaau

SEQ ID NO: 266218 - RNA, 17 nt, Homo sapiens
uacauggcuuggcauuu

SEQ ID NO: 266219 - RNA, 23 nt, Homo sapiens
uacaugucuuucuccagggacau

SEQ ID NO: 266220 - RNA, 15 nt, Homo sapiens
uacauuaauuaccuu

SEQ ID NO: 266221 - RNA, 15 nt, Homo sapiens
uacauucacccagau

SEQ ID NO: 266222 - RNA, 20 nt, Homo sapiens
uacauucugcaagcacaucu

SEQ ID NO: 266223 - RNA, 22 nt, Homo sapiens
uacauucugcaagcacaucugc

SEQ ID NO: 266224 - RNA, 16 nt, Homo sapiens
uaccaaaauuauuuca

SEQ ID NO: 266225 - RNA, 13 nt, Homo sapiens
uaccaaucauuuu

SEQ ID NO: 266226 - RNA, 14 nt, Homo sapiens
uaccaaucauuuua

SEQ ID NO: 266227 - RNA, 19 nt, Homo sapiens
uaccagagccguuacuaca

SEQ ID NO: 266228 - RNA, 21 nt, Homo sapiens
uaccaguauaauugaguuuuc

SEQ ID NO: 266229 - RNA, 17 nt, Homo sapiens
uaccaucucuccagcua

SEQ ID NO: 266230 - RNA, 20 nt, Homo sapiens
uaccccagacuagauguagu

SEQ ID NO: 266231 - RNA, 17 nt, Homo sapiens
uacccccugugccuugu

SEQ ID NO: 266232 - RNA, 23 nt, Homo sapiens
uacccuccauguaccuuguguac

SEQ ID NO: 266233 - RNA, 15 nt, Homo sapiens
uacccucuggagaua

SEQ ID NO: 266234 - RNA, 18 nt, Homo sapiens
uacccuuccucaccacuu

SEQ ID NO: 266235 - RNA, 18 nt, Homo sapiens
uaccuaguacaaggcaac

SEQ ID NO: 266236 - RNA, 19 nt, Homo sapiens
uaccuaguagucauuucau

SEQ ID NO: 266237 - RNA, 19 nt, Homo sapiens
uaccucacagagugcauug

SEQ ID NO: 266238 - RNA, 14 nt, Homo sapiens
uaccucacuggggu

SEQ ID NO: 266239 - RNA, 14 nt, Homo sapiens
uaccuccugagaaa

SEQ ID NO: 266240 - RNA, 13 nt, Homo sapiens
uaccucugggaaa

SEQ ID NO: 266241 - RNA, 23 nt, Homo sapiens
uaccugaagucuuuguacagaca

SEQ ID NO: 266242 - RNA, 20 nt, Homo sapiens
uaccuggcccugugccuugg

SEQ ID NO: 266243 - RNA, 20 nt, Homo sapiens
uaccuggcuugaagcugcuc

SEQ ID NO: 266244 - RNA, 16 nt, Homo sapiens
uagcugggacuacagg

SEQ ID NO: 266245 - RNA, 17 nt, Homo sapiens
uagcugggacuacaggc

SEQ ID NO: 266246 - RNA, 14 nt, Homo sapiens
uagcuuagaccuca

SEQ ID NO: 266247 - RNA, 16 nt, Homo sapiens
uagcuuauacaaaaca

SEQ ID NO: 266248 - RNA, 17 nt, Homo sapiens
uagcuuauacaaaacau

SEQ ID NO: 266249 - RNA, 14 nt, Homo sapiens
uaggaaaauuucac

SEQ ID NO: 266250 - RNA, 12 nt, Homo sapiens
uaggaacauacu

SEQ ID NO: 266251 - RNA, 21 nt, Homo sapiens
uaggaacugcugggcuuggca

SEQ ID NO: 266252 - RNA, 22 nt, Homo sapiens
uaggaagaauuuuuauauccac

SEQ ID NO: 266253 - RNA, 13 nt, Homo sapiens
uaggaaguaggaa

SEQ ID NO: 266254 - RNA, 18 nt, Homo sapiens
uaggagcaugagugccgu

SEQ ID NO: 266255 - RNA, 18 nt, Homo sapiens
uaggaggaacagguuuaa

SEQ ID NO: 266256 - RNA, 20 nt, Homo sapiens
uaggagggcuggcaacuuag

SEQ ID NO: 266257 - RNA, 13 nt, Homo sapiens
uaggauuacccac

SEQ ID NO: 266258 - RNA, 20 nt, Homo sapiens
uaggcacccauccuagagaa

SEQ ID NO: 266259 - RNA, 16 nt, Homo sapiens
uaggcagacacaggga

SEQ ID NO: 266260 - RNA, 13 nt, Homo sapiens
uaggcaugugcaa

SEQ ID NO: 266261 - RNA, 14 nt, Homo sapiens
uaggcauuugcuga

SEQ ID NO: 266262 - RNA, 15 nt, Homo sapiens
uaggcauuugcugaa

SEQ ID NO: 266263 - RNA, 20 nt, Homo sapiens
uaggccagcaccaucucuuu

SEQ ID NO: 266264 - RNA, 14 nt, Homo sapiens
uagggaucccucau

SEQ ID NO: 266265 - RNA, 21 nt, Homo sapiens
uaggguagaggggaagucaga

SEQ ID NO: 266266 - RNA, 17 nt, Homo sapiens
uaggugaggaagcaaaa

SEQ ID NO: 266267 - RNA, 15 nt, Homo sapiens
uagguuuuucuugcu

SEQ ID NO: 266268 - RNA, 23 nt, Homo sapiens
uaguaaaagccaucuauguauau

SEQ ID NO: 266269 - RNA, 18 nt, Homo sapiens
uaguaaaauauaaaaaca

SEQ ID NO: 266270 - RNA, 19 nt, Homo sapiens
uaguaaagugauaauuucu

SEQ ID NO: 266271 - RNA, 23 nt, Homo sapiens
uaguaaguacuuaauaaacugug

SEQ ID NO: 266272 - RNA, 22 nt, Homo sapiens
uagucacagagauaauucuagc

SEQ ID NO: 266273 - RNA, 13 nt, Homo sapiens
uagucaucaucaa

SEQ ID NO: 266274 - RNA, 22 nt, Homo sapiens
uagucccauugauguacuuuac

SEQ ID NO: 266275 - RNA, 22 nt, Homo sapiens
uagucugaacaauauauacuua

SEQ ID NO: 266276 - RNA, 17 nt, Homo sapiens
uagugaaucacguaaag

SEQ ID NO: 266277 - RNA, 22 nt, Homo sapiens
uagugaaucacguaaagcuaga

SEQ ID NO: 266278 - RNA, 14 nt, Homo sapiens
uagugauggagcuu

SEQ ID NO: 266279 - RNA, 14 nt, Homo sapiens
uaguggugacugug

SEQ ID NO: 266280 - RNA, 21 nt, Homo sapiens
uaguggugacugugggcucca

SEQ ID NO: 266281 - RNA, 14 nt, Homo sapiens
uaguggugugauuu

SEQ ID NO: 266282 - RNA, 18 nt, Homo sapiens
uaguuaccuuauaguuac

SEQ ID NO: 266283 - RNA, 18 nt, Homo sapiens
uaguuacucauucaggga

SEQ ID NO: 266284 - RNA, 13 nt, Homo sapiens
uaguucugccagg

SEQ ID NO: 266285 - RNA, 22 nt, Homo sapiens
uaguugcuucuuuccuuuccau

SEQ ID NO: 266286 - RNA, 21 nt, Homo sapiens
uaguugucacuuuccucuucc

SEQ ID NO: 266287 - RNA, 19 nt, Homo sapiens
uaguuugcaguuacacuaa

SEQ ID NO: 266288 - RNA, 14 nt, Homo sapiens
uaguuugcauucca

SEQ ID NO: 266289 - RNA, 20 nt, Homo sapiens
uauaaaaacagcuccucuau

SEQ ID NO: 266290 - RNA, 16 nt, Homo sapiens
uauaaaacacaucauc

SEQ ID NO: 266291 - RNA, 18 nt, Homo sapiens
uauaaaacacaucaucaa

SEQ ID NO: 266292 - RNA, 16 nt, Homo sapiens
uauaaaagacugacca

SEQ ID NO: 266293 - RNA, 23 nt, Homo sapiens
uauaaacuauaaccucuccuuca

SEQ ID NO: 266294 - RNA, 23 nt, Homo sapiens
uauaaagauacagaacucuuuca

SEQ ID NO: 266295 - RNA, 17 nt, Homo sapiens
uauaaauguaccagaga

SEQ ID NO: 266296 - RNA, 17 nt, Homo sapiens
uauaaauguacuuuucc

SEQ ID NO: 266297 - RNA, 11 nt, Homo sapiens
uauaacagugu

SEQ ID NO: 266298 - RNA, 23 nt, Homo sapiens
uauaacuacuccggagacagggu

SEQ ID NO: 266299 - RNA, 16 nt, Homo sapiens
uauaacuauguugaua

SEQ ID NO: 266300 - RNA, 18 nt, Homo sapiens
uauaacuauguugauaaa

SEQ ID NO: 266301 - RNA, 13 nt, Homo sapiens
uauaagaaauaca

SEQ ID NO: 266302 - RNA, 19 nt, Homo sapiens
uauaagauucauauuuacu

SEQ ID NO: 266303 - RNA, 13 nt, Homo sapiens
uauaagccaaaaa

SEQ ID NO: 266304 - RNA, 17 nt, Homo sapiens
uauaaggacacugaagc

SEQ ID NO: 266305 - RNA, 15 nt, Homo sapiens
uauaauauacuaugc

SEQ ID NO: 266306 - RNA, 12 nt, Homo sapiens
uauaaucuacuc

SEQ ID NO: 266307 - RNA, 16 nt, Homo sapiens
uauaauguaagcucua

SEQ ID NO: 266308 - RNA, 17 nt, Homo sapiens
uauaauguaagcucuac

SEQ ID NO: 266309 - RNA, 20 nt, Homo sapiens
uauacccguuucacaugcuu

SEQ ID NO: 266310 - RNA, 10 nt, Homo sapiens
uauacuguaa

SEQ ID NO: 266311 - RNA, 11 nt, Homo sapiens
uauacuguaaa

SEQ ID NO: 266312 - RNA, 12 nt, Homo sapiens
uauacuguaaag

SEQ ID NO: 266313 - RNA, 20 nt, Homo sapiens
uauacuucucuauuaucuca

SEQ ID NO: 266314 - RNA, 16 nt, Homo sapiens
uauagaaaugcugguu

SEQ ID NO: 266315 - RNA, 21 nt, Homo sapiens
uauagaaggguaccuugaaca

SEQ ID NO: 266316 - RNA, 17 nt, Homo sapiens
uauagagccuaccugua

SEQ ID NO: 266317 - RNA, 14 nt, Homo sapiens
uauagauguugcua

SEQ ID NO: 266318 - RNA, 17 nt, Homo sapiens
uauagcaagacauuaua

SEQ ID NO: 266319 - RNA, 17 nt, Homo sapiens
uauagucacuaguugua

SEQ ID NO: 266320 - RNA, 20 nt, Homo sapiens
uauaguuaucaaucucuagu

SEQ ID NO: 266321 - RNA, 16 nt, Homo sapiens
uauaguuuauugacaa

SEQ ID NO: 266322 - RNA, 16 nt, Homo sapiens
uagacagagucucacu

SEQ ID NO: 266323 - RNA, 20 nt, Homo sapiens
uagaccagaaccagagcuca

SEQ ID NO: 266324 - RNA, 14 nt, Homo sapiens
uagacuaaggccau

SEQ ID NO: 266325 - RNA, 14 nt, Homo sapiens
uagacucaggaaag

SEQ ID NO: 266326 - RNA, 21 nt, Homo sapiens
uagacuggugacugauucuuc

SEQ ID NO: 266327 - RNA, 21 nt, Homo sapiens
uagagacaggguuuugccaug

SEQ ID NO: 266328 - RNA, 22 nt, Homo sapiens
uagagaccaguuuucucuggaa

SEQ ID NO: 266329 - RNA, 18 nt, Homo sapiens
uagagauuaccuccugag

SEQ ID NO: 266330 - RNA, 21 nt, Homo sapiens
uagagcagccacaaccaaaaa

SEQ ID NO: 266331 - RNA, 18 nt, Homo sapiens
uagagccagggucucacu

SEQ ID NO: 266332 - RNA, 14 nt, Homo sapiens
uagagcugccugug

SEQ ID NO: 266333 - RNA, 16 nt, Homo sapiens
uagagggaacagggcg

SEQ ID NO: 266334 - RNA, 18 nt, Homo sapiens
uagaguguuaucagucau

SEQ ID NO: 266335 - RNA, 15 nt, Homo sapiens
uagaguucagacuuu

SEQ ID NO: 266336 - RNA, 16 nt, Homo sapiens
uagaguucagacuuuu

SEQ ID NO: 266337 - RNA, 19 nt, Homo sapiens
uagaguuccuuucugggaa

SEQ ID NO: 266338 - RNA, 14 nt, Homo sapiens
uagaguugauacua

SEQ ID NO: 266339 - RNA, 20 nt, Homo sapiens
uagauaaucucuccauuccc

SEQ ID NO: 266340 - RNA, 12 nt, Homo sapiens
uagauacuguau

SEQ ID NO: 266341 - RNA, 15 nt, Homo sapiens
uagauauaugcucug

SEQ ID NO: 266342 - RNA, 14 nt, Homo sapiens
uagauccagaugag

SEQ ID NO: 266343 - RNA, 19 nt, Homo sapiens
uagaucuaguucacucucc

SEQ ID NO: 266344 - RNA, 14 nt, Homo sapiens
uagaugaaugucag

SEQ ID NO: 266345 - RNA, 17 nt, Homo sapiens
uagauguauauauuucc

SEQ ID NO: 266346 - RNA, 23 nt, Homo sapiens
uagauuuuagacccuauugcugc

SEQ ID NO: 266347 - RNA, 16 nt, Homo sapiens
uagcacagacccugcc

SEQ ID NO: 266348 - RNA, 13 nt, Homo sapiens
uagcagaaaucua

SEQ ID NO: 266349 - RNA, 22 nt, Homo sapiens
uagcagcagggagggcuucugc

SEQ ID NO: 266350 - RNA, 23 nt, Homo sapiens
uagcaggaagcugugagagcagu

SEQ ID NO: 266351 - RNA, 14 nt, Homo sapiens
uagcaguaugugug

SEQ ID NO: 266352 - RNA, 22 nt, Homo sapiens
uagcaguaugugugcucuuauc

SEQ ID NO: 266353 - RNA, 15 nt, Homo sapiens
uagcauggcugccaa

SEQ ID NO: 266354 - RNA, 17 nt, Homo sapiens
uagcauuugucaacaaa

SEQ ID NO: 266355 - RNA, 14 nt, Homo sapiens
uagccaaggccaaa

SEQ ID NO: 266356 - RNA, 15 nt, Homo sapiens
uagccaaguguggua

SEQ ID NO: 266357 - RNA, 14 nt, Homo sapiens
uagcccaaaaccaa

SEQ ID NO: 266358 - RNA, 11 nt, Homo sapiens
uagcccagaaa

SEQ ID NO: 266359 - RNA, 14 nt, Homo sapiens
uagccgaccucagc

SEQ ID NO: 266360 - RNA, 17 nt, Homo sapiens
uagccgaccucagccuu

SEQ ID NO: 266361 - RNA, 22 nt, Homo sapiens
uagccugccucuucucuacucu

SEQ ID NO: 266362 - RNA, 17 nt, Homo sapiens
uagccuuagaagucaca

SEQ ID NO: 266363 - RNA, 15 nt, Homo sapiens
uagccuuugucccag

SEQ ID NO: 266364 - RNA, 14 nt, Homo sapiens
uagcuccacaaagc

SEQ ID NO: 266365 - RNA, 17 nt, Homo sapiens
uagcugggacuacaggu

SEQ ID NO: 266366 - RNA, 18 nt, Homo sapiens
uagcugggacuacaggug

SEQ ID NO: 266367 - RNA, 18 nt, Homo sapiens
uagcugggacuagaggca

SEQ ID NO: 266368 - RNA, 15 nt, Homo sapiens
uagcuuagaccucag

SEQ ID NO: 266369 - RNA, 16 nt, Homo sapiens
uagcuuagaccucagc

SEQ ID NO: 266370 - RNA, 19 nt, Homo sapiens
uagcuuagaccucagccug

SEQ ID NO: 266371 - RNA, 16 nt, Homo sapiens
uagcuuucuccagauc

SEQ ID NO: 266372 - RNA, 16 nt, Homo sapiens
uaggaacacuccuuca

SEQ ID NO: 266373 - RNA, 15 nt, Homo sapiens
uaggaagacuuugga

SEQ ID NO: 266374 - RNA, 19 nt, Homo sapiens
uaggaagguuaauguucau

SEQ ID NO: 266375 - RNA, 12 nt, Homo sapiens
uaggaccaagau

SEQ ID NO: 266376 - RNA, 19 nt, Homo sapiens
uaggagagagaucaugaga

SEQ ID NO: 266377 - RNA, 20 nt, Homo sapiens
uaggagagagaucaugagaa

SEQ ID NO: 266378 - RNA, 15 nt, Homo sapiens
uaggaggccaaccca

SEQ ID NO: 266379 - RNA, 19 nt, Homo sapiens
uaggcaugugcaauuuguc

SEQ ID NO: 266380 - RNA, 21 nt, Homo sapiens
uaggcauuugcugaauacaga

SEQ ID NO: 266381 - RNA, 17 nt, Homo sapiens
uaggccagcaccaucuc

SEQ ID NO: 266382 - RNA, 18 nt, Homo sapiens
uaggccaugggacaggga

SEQ ID NO: 266383 - RNA, 22 nt, Homo sapiens
uaggccuggggacggcuuuuac

SEQ ID NO: 266384 - RNA, 14 nt, Homo sapiens
uagggaaaaaccag

SEQ ID NO: 266385 - RNA, 21 nt, Homo sapiens
uagguaggaaaaugaagaaga

SEQ ID NO: 266386 - RNA, 20 nt, Homo sapiens
uagguaggggcccacuucac

SEQ ID NO: 266387 - RNA, 13 nt, Homo sapiens
uaggucaagaaga

SEQ ID NO: 266388 - RNA, 15 nt, Homo sapiens
uaggucuccaagacc

SEQ ID NO: 266389 - RNA, 19 nt, Homo sapiens
uaggucuccaagaccaccc

SEQ ID NO: 266390 - RNA, 20 nt, Homo sapiens
uaggugacagagugagacuc

SEQ ID NO: 266391 - RNA, 14 nt, Homo sapiens
uaguaaaagccauc

SEQ ID NO: 266392 - RNA, 13 nt, Homo sapiens
uaguaacaagaaa

SEQ ID NO: 266393 - RNA, 12 nt, Homo sapiens
uaguaacaugug

SEQ ID NO: 266394 - RNA, 23 nt, Homo sapiens
uaguacuugggagaccuguaauc

SEQ ID NO: 266395 - RNA, 17 nt, Homo sapiens
uaguaugaggcauuugu

SEQ ID NO: 266396 - RNA, 20 nt, Homo sapiens
uagucaagugcguccacgag

SEQ ID NO: 266397 - RNA, 17 nt, Homo sapiens
uagucauuucauggguu

SEQ ID NO: 266398 - RNA, 20 nt, Homo sapiens
uagucccagcuacuugagag

SEQ ID NO: 266399 - RNA, 21 nt, Homo sapiens
uagucccauugauguacuuua

SEQ ID NO: 266400 - RNA, 15 nt, Homo sapiens
uaugguucucaggcc

SEQ ID NO: 266401 - RNA, 17 nt, Homo sapiens
uaugguucucucgcaag

SEQ ID NO: 266402 - RNA, 13 nt, Homo sapiens
uauguaacaugua

SEQ ID NO: 266403 - RNA, 22 nt, Homo sapiens
uauguacccuacccugcacauu

SEQ ID NO: 266404 - RNA, 15 nt, Homo sapiens
uauguacuauucaau

SEQ ID NO: 266405 - RNA, 22 nt, Homo sapiens
uauguagcaaaauacaugacau

SEQ ID NO: 266406 - RNA, 19 nt, Homo sapiens
uaugucacccaaugcauau

SEQ ID NO: 266407 - RNA, 20 nt, Homo sapiens
uaugucacccaaugcauauc

SEQ ID NO: 266408 - RNA, 11 nt, Homo sapiens
uaugugagcac

SEQ ID NO: 266409 - RNA, 23 nt, Homo sapiens
uauguggaagugugggucugugu

SEQ ID NO: 266410 - RNA, 20 nt, Homo sapiens
uauguggaguucaucuugaa

SEQ ID NO: 266411 - RNA, 16 nt, Homo sapiens
uaugugggggucugug

SEQ ID NO: 266412 - RNA, 17 nt, Homo sapiens
uaugugggggucugugu

SEQ ID NO: 266413 - RNA, 16 nt, Homo sapiens
uaugugggugggacca

SEQ ID NO: 266414 - RNA, 20 nt, Homo sapiens
uaugugggugggaccacaga

SEQ ID NO: 266415 - RNA, 12 nt, Homo sapiens
uauguugcccag

SEQ ID NO: 266416 - RNA, 17 nt, Homo sapiens
uauguugcccagugugu

SEQ ID NO: 266417 - RNA, 22 nt, Homo sapiens
uauuaaagccauguuuauuaca

SEQ ID NO: 266418 - RNA, 16 nt, Homo sapiens
uauuaauacauucacc

SEQ ID NO: 266419 - RNA, 18 nt, Homo sapiens
uauuaauacauucaccca

SEQ ID NO: 266420 - RNA, 19 nt, Homo sapiens
uauuaauacauucacccag

SEQ ID NO: 266421 - RNA, 20 nt, Homo sapiens
uauuacaguuuaucuauggc

SEQ ID NO: 266422 - RNA, 16 nt, Homo sapiens
uauuaccaucucucca

SEQ ID NO: 266423 - RNA, 18 nt, Homo sapiens
uauuagagcugccugugc

SEQ ID NO: 266424 - RNA, 12 nt, Homo sapiens
uauuauggaaaa

SEQ ID NO: 266425 - RNA, 14 nt, Homo sapiens
uauucaaccaugga

SEQ ID NO: 266426 - RNA, 17 nt, Homo sapiens
uauucacugauuugaca

SEQ ID NO: 266427 - RNA, 18 nt, Homo sapiens
uauucaguaauaacucua

SEQ ID NO: 266428 - RNA, 12 nt, Homo sapiens
uauuccagagac

SEQ ID NO: 266429 - RNA, 21 nt, Homo sapiens
uauucccaaaaauuacuuugg

SEQ ID NO: 266430 - RNA, 12 nt, Homo sapiens
uauucccaugag

SEQ ID NO: 266431 - RNA, 13 nt, Homo sapiens
uauucgugcagca

SEQ ID NO: 266432 - RNA, 20 nt, Homo sapiens
uauucugucuggcauuacaa

SEQ ID NO: 266433 - RNA, 22 nt, Homo sapiens
uauucuguuggccagugugaca

SEQ ID NO: 266434 - RNA, 16 nt, Homo sapiens
uauugaacuuaugcaa

SEQ ID NO: 266435 - RNA, 17 nt, Homo sapiens
uauugaacuuaugcaaa

SEQ ID NO: 266436 - RNA, 19 nt, Homo sapiens
uauugcagcuuauauucau

SEQ ID NO: 266437 - RNA, 16 nt, Homo sapiens
uauugcauacuauuaa

SEQ ID NO: 266438 - RNA, 13 nt, Homo sapiens
uauuuaccagacc

SEQ ID NO: 266439 - RNA, 16 nt, Homo sapiens
uauuuaccagaccaca

SEQ ID NO: 266440 - RNA, 17 nt, Homo sapiens
uauuuaccagaccacaa

SEQ ID NO: 266441 - RNA, 12 nt, Homo sapiens
uauuuaccugaa

SEQ ID NO: 266442 - RNA, 18 nt, Homo sapiens
uauuuaccuucuaccucu

SEQ ID NO: 266443 - RNA, 21 nt, Homo sapiens
uauuuauagucgaacaauuca

SEQ ID NO: 266444 - RNA, 16 nt, Homo sapiens
uauuuaucugugcaaa

SEQ ID NO: 266445 - RNA, 21 nt, Homo sapiens
uauuuaugcaacucaucuuca

SEQ ID NO: 266446 - RNA, 23 nt, Homo sapiens
uauuuaugcaacucaucuucaca

SEQ ID NO: 266447 - RNA, 18 nt, Homo sapiens
uauuucccucaccuuucc

SEQ ID NO: 266448 - RNA, 17 nt, Homo sapiens
uauuuccuucuccuccu

SEQ ID NO: 266449 - RNA, 14 nt, Homo sapiens
uauuugcauaacaa

SEQ ID NO: 266450 - RNA, 16 nt, Homo sapiens
uauuuuaaguauugca

SEQ ID NO: 266451 - RNA, 19 nt, Homo sapiens
uauuuuauucccuuucaca

SEQ ID NO: 266452 - RNA, 21 nt, Homo sapiens
uauuuucagugcuuugcccuu

SEQ ID NO: 266453 - RNA, 12 nt, Homo sapiens
uauuuuccaaag

SEQ ID NO: 266454 - RNA, 18 nt, Homo sapiens
uauuuugcauaguaccaa

SEQ ID NO: 266455 - RNA, 16 nt, Homo sapiens
uauuuuuagacagagu

SEQ ID NO: 266456 - RNA, 21 nt, Homo sapiens
uauuuuuagacagagucucac

SEQ ID NO: 266457 - RNA, 14 nt, Homo sapiens
uauuuuugugcaca

SEQ ID NO: 266458 - RNA, 20 nt, Homo sapiens
ucaaaaaaaaaaaaauguga

SEQ ID NO: 266459 - RNA, 17 nt, Homo sapiens
ucaaaaaaucugaccaa

SEQ ID NO: 266460 - RNA, 20 nt, Homo sapiens
ucaaaaaaucugaccaaaac

SEQ ID NO: 266461 - RNA, 13 nt, Homo sapiens
ucaaaaacauucu

SEQ ID NO: 266462 - RNA, 17 nt, Homo sapiens
ucaaaacaaucuuguca

SEQ ID NO: 266463 - RNA, 22 nt, Homo sapiens
ucaaaagguuaauaaaguaauu

SEQ ID NO: 266464 - RNA, 17 nt, Homo sapiens
ucaaaauaaaaaugagg

SEQ ID NO: 266465 - RNA, 16 nt, Homo sapiens
ucaaacaaaaagucau

SEQ ID NO: 266466 - RNA, 22 nt, Homo sapiens
ucaaacaaaaagucauaaaagu

SEQ ID NO: 266467 - RNA, 19 nt, Homo sapiens
uaucauuuucugcauuuaa

SEQ ID NO: 266468 - RNA, 14 nt, Homo sapiens
uauccaacaugugc

SEQ ID NO: 266469 - RNA, 21 nt, Homo sapiens
uauccaacaugugcucaggga

SEQ ID NO: 266470 - RNA, 13 nt, Homo sapiens
uauccaaucucau

SEQ ID NO: 266471 - RNA, 15 nt, Homo sapiens
uauccaaucugugau

SEQ ID NO: 266472 - RNA, 16 nt, Homo sapiens
uauccaaucugugaug

SEQ ID NO: 266473 - RNA, 19 nt, Homo sapiens
uauccaaucugugaugaca

SEQ ID NO: 266474 - RNA, 23 nt, Homo sapiens
uauccaaucugugaugacauucc

SEQ ID NO: 266475 - RNA, 16 nt, Homo sapiens
uauccuagucauucuu

SEQ ID NO: 266476 - RNA, 17 nt, Homo sapiens
uauccuagucauucuuc

SEQ ID NO: 266477 - RNA, 18 nt, Homo sapiens
uauccuccaugaauauca

SEQ ID NO: 266478 - RNA, 13 nt, Homo sapiens
uaucgaucucuua

SEQ ID NO: 266479 - RNA, 15 nt, Homo sapiens
uaucuaaaaucugcu

SEQ ID NO: 266480 - RNA, 23 nt, Homo sapiens
uaucuaauauguaacaagccacc

SEQ ID NO: 266481 - RNA, 12 nt, Homo sapiens
uaucuaccccag

SEQ ID NO: 266482 - RNA, 15 nt, Homo sapiens
uaucucaucuugaug

SEQ ID NO: 266483 - RNA, 22 nt, Homo sapiens
uaucugugaaaugcuggcauuu

SEQ ID NO: 266484 - RNA, 15 nt, Homo sapiens
uaugaaaaugucauu

SEQ ID NO: 266485 - RNA, 21 nt, Homo sapiens
uaugaacagauugccugcuuu

SEQ ID NO: 266486 - RNA, 16 nt, Homo sapiens
uaugaauaguuuccaa

SEQ ID NO: 266487 - RNA, 22 nt, Homo sapiens
uaugagcuggggaugucucuca

SEQ ID NO: 266488 - RNA, 23 nt, Homo sapiens
uaugagcuggggaugucucucau

SEQ ID NO: 266489 - RNA, 22 nt, Homo sapiens
uaugaggcauuuguuugaacug

SEQ ID NO: 266490 - RNA, 15 nt, Homo sapiens
uaugauauugcagcu

SEQ ID NO: 266491 - RNA, 17 nt, Homo sapiens
uaugaucacggcucacu

SEQ ID NO: 266492 - RNA, 20 nt, Homo sapiens
uaugauccagcagauuauuc

SEQ ID NO: 266493 - RNA, 14 nt, Homo sapiens
uaugauugugcaca

SEQ ID NO: 266494 - RNA, 19 nt, Homo sapiens
uaugauugugcacauacuu

SEQ ID NO: 266495 - RNA, 10 nt, Homo sapiens
uaugcaaaag

SEQ ID NO: 266496 - RNA, 17 nt, Homo sapiens
uaugcaacucaucuuca

SEQ ID NO: 266497 - RNA, 19 nt, Homo sapiens
uaugcaacucaucuucaca

SEQ ID NO: 266498 - RNA, 22 nt, Homo sapiens
uaugcaacucaucuucacagau

SEQ ID NO: 266499 - RNA, 12 nt, Homo sapiens
uaugcaaucuga

SEQ ID NO: 266500 - RNA, 13 nt, Homo sapiens
uaugcaaucugag

SEQ ID NO: 266501 - RNA, 22 nt, Homo sapiens
uaugcacaaacuuggcuucuuu

SEQ ID NO: 266502 - RNA, 21 nt, Homo sapiens
uaugcagaaggcuacauauac

SEQ ID NO: 266503 - RNA, 19 nt, Homo sapiens
uaugcaggggcaaacaccu

SEQ ID NO: 266504 - RNA, 23 nt, Homo sapiens
uaugcaggggcaaacaccugcug

SEQ ID NO: 266505 - RNA, 11 nt, Homo sapiens
uaugcauuuga

SEQ ID NO: 266506 - RNA, 12 nt, Homo sapiens
uaugccauagca

SEQ ID NO: 266507 - RNA, 21 nt, Homo sapiens
uaugccauugggguaguugug

SEQ ID NO: 266508 - RNA, 15 nt, Homo sapiens
uaugccucuguauuu

SEQ ID NO: 266509 - RNA, 22 nt, Homo sapiens
uaugcucagggucaauuucuuu

SEQ ID NO: 266510 - RNA, 19 nt, Homo sapiens
uaugcugaguuugugcugg

SEQ ID NO: 266511 - RNA, 19 nt, Homo sapiens
uaugcuguauccacaaauc

SEQ ID NO: 266512 - RNA, 17 nt, Homo sapiens
uauggcuuuugugcauu

SEQ ID NO: 266513 - RNA, 20 nt, Homo sapiens
uauggcuuuugugcauuauc

SEQ ID NO: 266514 - RNA, 18 nt, Homo sapiens
uauggguuggacaaccuc

SEQ ID NO: 266515 - RNA, 22 nt, Homo sapiens
uaugguuaauaaguuucacuga

SEQ ID NO: 266516 - RNA, 19 nt, Homo sapiens
uauguaccauguacaugaa

SEQ ID NO: 266517 - RNA, 20 nt, Homo sapiens
uauguacccuacccugcaca

SEQ ID NO: 266518 - RNA, 21 nt, Homo sapiens
uauguacuauucaaucuuuac

SEQ ID NO: 266519 - RNA, 14 nt, Homo sapiens
uaugugagcacaaa

SEQ ID NO: 266520 - RNA, 12 nt, Homo sapiens
uaugugcacauc

SEQ ID NO: 266521 - RNA, 15 nt, Homo sapiens
uaugugcacaucugu

SEQ ID NO: 266522 - RNA, 22 nt, Homo sapiens
uauguggaagugugggucugug

SEQ ID NO: 266523 - RNA, 19 nt, Homo sapiens
uaugugggugggaccacag

SEQ ID NO: 266524 - RNA, 13 nt, Homo sapiens
uauguguaaguau

SEQ ID NO: 266525 - RNA, 14 nt, Homo sapiens
uauguuauuuucag

SEQ ID NO: 266526 - RNA, 22 nt, Homo sapiens
uauguucaacuggagacacuau

SEQ ID NO: 266527 - RNA, 15 nt, Homo sapiens
uauuaaaacauugga

SEQ ID NO: 266528 - RNA, 15 nt, Homo sapiens
uauuaagccacuuaa

SEQ ID NO: 266529 - RNA, 20 nt, Homo sapiens
uauuaaggaagacaauguga

SEQ ID NO: 266530 - RNA, 22 nt, Homo sapiens
uauuacaguuuaucuauggcac

SEQ ID NO: 266531 - RNA, 20 nt, Homo sapiens
uauuacugggacugugcuca

SEQ ID NO: 266532 - RNA, 21 nt, Homo sapiens
uauuagagcugccugugccuu

SEQ ID NO: 266533 - RNA, 14 nt, Homo sapiens
uauuagcccagaaa

SEQ ID NO: 266534 - RNA, 19 nt, Homo sapiens
uauuaucugucagcugcaa

SEQ ID NO: 266535 - RNA, 17 nt, Homo sapiens
uauuauucuucauaaca

SEQ ID NO: 266536 - RNA, 18 nt, Homo sapiens
uauuauucuucauaacaa

SEQ ID NO: 266537 - RNA, 21 nt, Homo sapiens
uauucucagcagagugcuuua

SEQ ID NO: 266538 - RNA, 19 nt, Homo sapiens
uauucugucuggcauuaca

SEQ ID NO: 266539 - RNA, 15 nt, Homo sapiens
uauucuucauaacaa

SEQ ID NO: 266540 - RNA, 22 nt, Homo sapiens
uauugaaaugauuucacagugu

SEQ ID NO: 266541 - RNA, 18 nt, Homo sapiens
uauugacaauaauuucag

SEQ ID NO: 266542 - RNA, 15 nt, Homo sapiens
uauugcagcuuauau

SEQ ID NO: 266543 - RNA, 21 nt, Homo sapiens
uauugcugcuggggcucccca

SEQ ID NO: 266544 - RNA, 14 nt, Homo sapiens
uauuggcagcucua

SEQ ID NO: 266545 - RNA, 16 nt, Homo sapiens
uauuguuucaauugca

SEQ ID NO: 266546 - RNA, 21 nt, Homo sapiens
uauuuaaauagaugacauuga

SEQ ID NO: 266547 - RNA, 22 nt, Homo sapiens
uauuuagaagccaacuaugauu

SEQ ID NO: 266548 - RNA, 15 nt, Homo sapiens
uauuuauaaucacuu

SEQ ID NO: 266549 - RNA, 12 nt, Homo sapiens
uauuuauagucg

SEQ ID NO: 266550 - RNA, 14 nt, Homo sapiens
uauuuaugccucug

SEQ ID NO: 266551 - RNA, 17 nt, Homo sapiens
uauuuaugccucuguau

SEQ ID NO: 266552 - RNA, 12 nt, Homo sapiens
uauuuauuuucc

SEQ ID NO: 266553 - RNA, 19 nt, Homo sapiens
uauuuggaaauaaagucag

SEQ ID NO: 266554 - RNA, 21 nt, Homo sapiens
ucacuaggcccccacuugccu

SEQ ID NO: 266555 - RNA, 22 nt, Homo sapiens
ucacuaggcccccacuugccuc

SEQ ID NO: 266556 - RNA, 18 nt, Homo sapiens
ucacucaaucucugauuc

SEQ ID NO: 266557 - RNA, 14 nt, Homo sapiens
ucacucuguugacc

SEQ ID NO: 266558 - RNA, 18 nt, Homo sapiens
ucacucuuguugugcucu

SEQ ID NO: 266559 - RNA, 16 nt, Homo sapiens
ucacugaaaacaguaa

SEQ ID NO: 266560 - RNA, 14 nt, Homo sapiens
ucacugcaaccucc

SEQ ID NO: 266561 - RNA, 18 nt, Homo sapiens
ucacugcaacuucugccu

SEQ ID NO: 266562 - RNA, 15 nt, Homo sapiens
ucacugcagccucaa

SEQ ID NO: 266563 - RNA, 20 nt, Homo sapiens
ucacugcugcaaauacugua

SEQ ID NO: 266564 - RNA, 21 nt, Homo sapiens
ucacugcugcaaauacuguau

SEQ ID NO: 266565 - RNA, 18 nt, Homo sapiens
ucacugcuggcugccuua

SEQ ID NO: 266566 - RNA, 16 nt, Homo sapiens
ucacugcuguagacau

SEQ ID NO: 266567 - RNA, 16 nt, Homo sapiens
ucacugcuuaacuuca

SEQ ID NO: 266568 - RNA, 19 nt, Homo sapiens
ucacuggcuuuagcugcug

SEQ ID NO: 266569 - RNA, 18 nt, Homo sapiens
ucacuucccuacauggag

SEQ ID NO: 266570 - RNA, 22 nt, Homo sapiens
ucagaaaaaaaaaaaaaagccu

SEQ ID NO: 266571 - RNA, 18 nt, Homo sapiens
ucagaaaauggcacuugg

SEQ ID NO: 266572 - RNA, 18 nt, Homo sapiens
ucagaaggcaaaugacuu

SEQ ID NO: 266573 - RNA, 15 nt, Homo sapiens
ucagaaggcucuauc

SEQ ID NO: 266574 - RNA, 19 nt, Homo sapiens
ucagacagcugccugggau

SEQ ID NO: 266575 - RNA, 13 nt, Homo sapiens
ucagacauucaga

SEQ ID NO: 266576 - RNA, 22 nt, Homo sapiens
ucagaccucggugggcauucac

SEQ ID NO: 266577 - RNA, 23 nt, Homo sapiens
ucagaccucggugggcauucaca

SEQ ID NO: 266578 - RNA, 16 nt, Homo sapiens
ucagacuccugugcaa

SEQ ID NO: 266579 - RNA, 17 nt, Homo sapiens
ucagacuccugugcaac

SEQ ID NO: 266580 - RNA, 19 nt, Homo sapiens
ucagacuccugugcaacuu

SEQ ID NO: 266581 - RNA, 21 nt, Homo sapiens
ucagacuccugugcaacuuuc

SEQ ID NO: 266582 - RNA, 16 nt, Homo sapiens
ucagagauuagucuua

SEQ ID NO: 266583 - RNA, 20 nt, Homo sapiens
ucagagggcccaguggugcc

SEQ ID NO: 266584 - RNA, 23 nt, Homo sapiens
ucagagugacuacacacaguacg

SEQ ID NO: 266585 - RNA, 14 nt, Homo sapiens
ucagaguugugcac

SEQ ID NO: 266586 - RNA, 15 nt, Homo sapiens
ucagaguugugcaca

SEQ ID NO: 266587 - RNA, 16 nt, Homo sapiens
ucagaguugugcacau

SEQ ID NO: 266588 - RNA, 14 nt, Homo sapiens
ucagaucauuauca

SEQ ID NO: 266589 - RNA, 17 nt, Homo sapiens
ucagaucucuaacuuca

SEQ ID NO: 266590 - RNA, 14 nt, Homo sapiens
ucagaugaagucuu

SEQ ID NO: 266591 - RNA, 22 nt, Homo sapiens
ucagaugcauccuuucauaaga

SEQ ID NO: 266592 - RNA, 21 nt, Homo sapiens
ucagauuccccccaucuccau

SEQ ID NO: 266593 - RNA, 12 nt, Homo sapiens
ucagauuugccu

SEQ ID NO: 266594 - RNA, 20 nt, Homo sapiens
ucagcaaaaagcaaaaucau

SEQ ID NO: 266595 - RNA, 23 nt, Homo sapiens
ucagcaaaaauauuuuaugaucc

SEQ ID NO: 266596 - RNA, 19 nt, Homo sapiens
ucagcaauacagacuacuu

SEQ ID NO: 266597 - RNA, 16 nt, Homo sapiens
ucagcaccuacagugu

SEQ ID NO: 266598 - RNA, 22 nt, Homo sapiens
ucagcacguaguuugcauucca

SEQ ID NO: 266599 - RNA, 19 nt, Homo sapiens
ucagcacguguggccuguu

SEQ ID NO: 266600 - RNA, 17 nt, Homo sapiens
ucagcagccucacugca

SEQ ID NO: 266601 - RNA, 18 nt, Homo sapiens
ucagcagccucacugcau

SEQ ID NO: 266602 - RNA, 18 nt, Homo sapiens
ucagcauucucacuccua

SEQ ID NO: 266603 - RNA, 14 nt, Homo sapiens
ucagccacauucua

SEQ ID NO: 266604 - RNA, 18 nt, Homo sapiens
ucagccuagccgaccuca

SEQ ID NO: 266605 - RNA, 14 nt, Homo sapiens
ucagccucccaaag

SEQ ID NO: 266606 - RNA, 15 nt, Homo sapiens
ucagcugaaccuggg

SEQ ID NO: 266607 - RNA, 23 nt, Homo sapiens
ucagcugcagccacuuucugcca

SEQ ID NO: 266608 - RNA, 14 nt, Homo sapiens
ucagcuggaucucc

SEQ ID NO: 266609 - RNA, 17 nt, Homo sapiens
ucagcuucuuaauauaa

SEQ ID NO: 266610 - RNA, 19 nt, Homo sapiens
ucagcuuguaaauagcuca

SEQ ID NO: 266611 - RNA, 14 nt, Homo sapiens
ucaagcgauccucc

SEQ ID NO: 266612 - RNA, 20 nt, Homo sapiens
ucaagcgauccuccuuccuc

SEQ ID NO: 266613 - RNA, 21 nt, Homo sapiens
ucaaggcccauaucugugaaa

SEQ ID NO: 266614 - RNA, 20 nt, Homo sapiens
ucaaguaguguaucacagua

SEQ ID NO: 266615 - RNA, 18 nt, Homo sapiens
ucaaguauuggcaaagau

SEQ ID NO: 266616 - RNA, 19 nt, Homo sapiens
ucaaguccuacaagcuaaa

SEQ ID NO: 266617 - RNA, 16 nt, Homo sapiens
ucaaguuggcuucuaa

SEQ ID NO: 266618 - RNA, 20 nt, Homo sapiens
ucaaguuggcuucuaaucaa

SEQ ID NO: 266619 - RNA, 22 nt, Homo sapiens
ucaaguuggcuucuaaucaaag

SEQ ID NO: 266620 - RNA, 24 nt, Homo sapiens
ucaaguuucuucaaucugaagaua

SEQ ID NO: 266621 - RNA, 19 nt, Homo sapiens
ucaauaaaaaauuaugaca

SEQ ID NO: 266622 - RNA, 20 nt, Homo sapiens
ucaauaaaaaauuaugacau

SEQ ID NO: 266623 - RNA, 21 nt, Homo sapiens
ucaauaaaauaaugacauaaa

SEQ ID NO: 266624 - RNA, 17 nt, Homo sapiens
ucaauaaauuugcaaau

SEQ ID NO: 266625 - RNA, 13 nt, Homo sapiens
ucaauaggcaaag

SEQ ID NO: 266626 - RNA, 18 nt, Homo sapiens
ucaauauccuuugccuca

SEQ ID NO: 266627 - RNA, 17 nt, Homo sapiens
ucaaucccucaaaacaa

SEQ ID NO: 266628 - RNA, 18 nt, Homo sapiens
ucaaucucugauucuguc

SEQ ID NO: 266629 - RNA, 12 nt, Homo sapiens
ucaaugcuauaa

SEQ ID NO: 266630 - RNA, 22 nt, Homo sapiens
ucaaugcuauaacuauguugau

SEQ ID NO: 266631 - RNA, 20 nt, Homo sapiens
ucaauuccaccugcaaucaa

SEQ ID NO: 266632 - RNA, 10 nt, Homo sapiens
ucacaaagug

SEQ ID NO: 266633 - RNA, 19 nt, Homo sapiens
ucacaagucagcacuaccu

SEQ ID NO: 266634 - RNA, 21 nt, Homo sapiens
ucacaaucaucaucauucuca

SEQ ID NO: 266635 - RNA, 14 nt, Homo sapiens
ucacacagagugcc

SEQ ID NO: 266636 - RNA, 15 nt, Homo sapiens
ucacacagagugccu

SEQ ID NO: 266637 - RNA, 16 nt, Homo sapiens
ucacacagagugccug

SEQ ID NO: 266638 - RNA, 21 nt, Homo sapiens
ucacacagccaagccagucaa

SEQ ID NO: 266639 - RNA, 16 nt, Homo sapiens
ucacacugucuucuga

SEQ ID NO: 266640 - RNA, 22 nt, Homo sapiens
ucacacuuuucuuauaaugcaa

SEQ ID NO: 266641 - RNA, 15 nt, Homo sapiens
ucacagaagaugaag

SEQ ID NO: 266642 - RNA, 18 nt, Homo sapiens
ucacagagugcauuguga

SEQ ID NO: 266643 - RNA, 18 nt, Homo sapiens
ucacagccacuugggaua

SEQ ID NO: 266644 - RNA, 21 nt, Homo sapiens
ucacaggcagguccaggguuu

SEQ ID NO: 266645 - RNA, 16 nt, Homo sapiens
ucacaguguugcccag

SEQ ID NO: 266646 - RNA, 16 nt, Homo sapiens
ucacaguucauugcag

SEQ ID NO: 266647 - RNA, 20 nt, Homo sapiens
ucacaguuuugguugcuuua

SEQ ID NO: 266648 - RNA, 21 nt, Homo sapiens
ucacaguuuugguugcuuuaa

SEQ ID NO: 266649 - RNA, 15 nt, Homo sapiens
ucacaucucuguaga

SEQ ID NO: 266650 - RNA, 17 nt, Homo sapiens
ucacaugucaguaccuu

SEQ ID NO: 266651 - RNA, 13 nt, Homo sapiens
ucacaugugcucu

SEQ ID NO: 266652 - RNA, 18 nt, Homo sapiens
ucacauuaauauuugcug

SEQ ID NO: 266653 - RNA, 18 nt, Homo sapiens
ucacauucgaguguuuca

SEQ ID NO: 266654 - RNA, 19 nt, Homo sapiens
ucacauucgaguguuucag

SEQ ID NO: 266655 - RNA, 18 nt, Homo sapiens
ucacauuuauucugcuca

SEQ ID NO: 266656 - RNA, 19 nt, Homo sapiens
ucacauuuauucugcucac

SEQ ID NO: 266657 - RNA, 19 nt, Homo sapiens
ucaccaacgucugugccau

SEQ ID NO: 266658 - RNA, 15 nt, Homo sapiens
ucaccaagcccaguu

SEQ ID NO: 266659 - RNA, 17 nt, Homo sapiens
ucaccacaugugcacau

SEQ ID NO: 266660 - RNA, 13 nt, Homo sapiens
ucaccacuucccu

SEQ ID NO: 266661 - RNA, 16 nt, Homo sapiens
ucaccaggucagggag

SEQ ID NO: 266662 - RNA, 23 nt, Homo sapiens
ucaccauuuggcaaugccaucau

SEQ ID NO: 266663 - RNA, 14 nt, Homo sapiens
ucacccaaugcaua

SEQ ID NO: 266664 - RNA, 18 nt, Homo sapiens
ucaccucaccccacugug

SEQ ID NO: 266665 - RNA, 13 nt, Homo sapiens
ucaccucuucaca

SEQ ID NO: 266666 - RNA, 19 nt, Homo sapiens
ucacgaaguuuguucauca

SEQ ID NO: 266667 - RNA, 14 nt, Homo sapiens
ucacgccacugcac

SEQ ID NO: 266668 - RNA, 15 nt, Homo sapiens
ucacgcucagcacac

SEQ ID NO: 266669 - RNA, 17 nt, Homo sapiens
ucacgcucagcacacau

SEQ ID NO: 266670 - RNA, 20 nt, Homo sapiens
ucacgcucagcacacaugca

SEQ ID NO: 266671 - RNA, 20 nt, Homo sapiens
ucacgggcaacacucacugc

SEQ ID NO: 266672 - RNA, 20 nt, Homo sapiens
ucacuaaaacacacaggugc

SEQ ID NO: 266673 - RNA, 22 nt, Homo sapiens
ucacucaaucucugauucuguc

SEQ ID NO: 266674 - RNA, 22 nt, Homo sapiens
ucacucauucccauguugucaa

SEQ ID NO: 266675 - RNA, 17 nt, Homo sapiens
ucacucuuauugcccac

SEQ ID NO: 266676 - RNA, 14 nt, Homo sapiens
ucacugauuugaca

SEQ ID NO: 266677 - RNA, 21 nt, Homo sapiens
ucacugccugcagcugagauu

SEQ ID NO: 266678 - RNA, 22 nt, Homo sapiens
ucacugcugcaaauacuguaua

SEQ ID NO: 266679 - RNA, 14 nt, Homo sapiens
ucacuggaacacua

SEQ ID NO: 266680 - RNA, 13 nt, Homo sapiens
ucacuggcuuuag

SEQ ID NO: 266681 - RNA, 23 nt, Homo sapiens
ucacugguuugguucuggacuaa

SEQ ID NO: 266682 - RNA, 13 nt, Homo sapiens
ucacuuccaugac

SEQ ID NO: 266683 - RNA, 20 nt, Homo sapiens
ucacuugugcaguguugaca

SEQ ID NO: 266684 - RNA, 14 nt, Homo sapiens
ucagaaauguacaa

SEQ ID NO: 266685 - RNA, 17 nt, Homo sapiens
ucagaaauguguuauca

SEQ ID NO: 266686 - RNA, 22 nt, Homo sapiens
ucagaagacacugaugggcaac

SEQ ID NO: 266687 - RNA, 20 nt, Homo sapiens
ucagaaggcucuaucugcug

SEQ ID NO: 266688 - RNA, 18 nt, Homo sapiens
ucagaagucaucuugcua

SEQ ID NO: 266689 - RNA, 14 nt, Homo sapiens
ucagacauucagag

SEQ ID NO: 266690 - RNA, 15 nt, Homo sapiens
ucagagccaccccua

SEQ ID NO: 266691 - RNA, 16 nt, Homo sapiens
ucagagggcccagugg

SEQ ID NO: 266692 - RNA, 19 nt, Homo sapiens
ucagaguuccgacugccau

SEQ ID NO: 266693 - RNA, 18 nt, Homo sapiens
ucagauaccgacuggggc

SEQ ID NO: 266694 - RNA, 23 nt, Homo sapiens
ucagauauaaaagacugaccaau

SEQ ID NO: 266695 - RNA, 19 nt, Homo sapiens
ucagcaaaagaugcuucuc

SEQ ID NO: 266696 - RNA, 14 nt, Homo sapiens
ucagcacacaugca

SEQ ID NO: 266697 - RNA, 15 nt, Homo sapiens
ucagcacacaugcau

SEQ ID NO: 266698 - RNA, 22 nt, Homo sapiens
ucagcaccuacaguguacaguc

SEQ ID NO: 266699 - RNA, 21 nt, Homo sapiens
ucagcacguaguuugcauucc

SEQ ID NO: 266700 - RNA, 23 nt, Homo sapiens
ucagcacguaguuugcauuccag

SEQ ID NO: 266701 - RNA, 22 nt, Homo sapiens
ucagccauuccuguucccauga

SEQ ID NO: 266702 - RNA, 20 nt, Homo sapiens
ucagccuagccgaccucagc

SEQ ID NO: 266703 - RNA, 19 nt, Homo sapiens
ucagccucccgaauagcug

SEQ ID NO: 266704 - RNA, 13 nt, Homo sapiens
ucagcgagcauaa

SEQ ID NO: 266705 - RNA, 19 nt, Homo sapiens
ucagcugcaagguacucug

SEQ ID NO: 266706 - RNA, 15 nt, Homo sapiens
ucagcuggaucucca

SEQ ID NO: 266707 - RNA, 17 nt, Homo sapiens
ucauuuucugcauuuaa

SEQ ID NO: 266708 - RNA, 15 nt, Homo sapiens
uccaaaauaagauga

SEQ ID NO: 266709 - RNA, 18 nt, Homo sapiens
uccaaacauuaaugcaau

SEQ ID NO: 266710 - RNA, 19 nt, Homo sapiens
uccaaacuaccuuccaguu

SEQ ID NO: 266711 - RNA, 21 nt, Homo sapiens
uccaaagggcauggguuuuau

SEQ ID NO: 266712 - RNA, 17 nt, Homo sapiens
uccaaaguacacuguuu

SEQ ID NO: 266713 - RNA, 19 nt, Homo sapiens
uccaaaguacacuguuuca

SEQ ID NO: 266714 - RNA, 16 nt, Homo sapiens
uccaaaugcccagcuu

SEQ ID NO: 266715 - RNA, 14 nt, Homo sapiens
uccaacaugugcuc

SEQ ID NO: 266716 - RNA, 15 nt, Homo sapiens
uccaacaugugcuca

SEQ ID NO: 266717 - RNA, 17 nt, Homo sapiens
uccaacauuaaaagcca

SEQ ID NO: 266718 - RNA, 20 nt, Homo sapiens
uccaacguggggcagcacag

SEQ ID NO: 266719 - RNA, 17 nt, Homo sapiens
uccaaggguacuaagga

SEQ ID NO: 266720 - RNA, 20 nt, Homo sapiens
uccaauauucgcugugucag

SEQ ID NO: 266721 - RNA, 12 nt, Homo sapiens
uccaaucagaac

SEQ ID NO: 266722 - RNA, 13 nt, Homo sapiens
uccaaucugugau

SEQ ID NO: 266723 - RNA, 15 nt, Homo sapiens
uccaaucugugauga

SEQ ID NO: 266724 - RNA, 14 nt, Homo sapiens
uccaaugaugggau

SEQ ID NO: 266725 - RNA, 14 nt, Homo sapiens
uccaauugcugcuu

SEQ ID NO: 266726 - RNA, 17 nt, Homo sapiens
uccacacggucuucaca

SEQ ID NO: 266727 - RNA, 13 nt, Homo sapiens
uccacagugacuc

SEQ ID NO: 266728 - RNA, 15 nt, Homo sapiens
uccacagugacucca

SEQ ID NO: 266729 - RNA, 13 nt, Homo sapiens
uccacagugauua

SEQ ID NO: 266730 - RNA, 15 nt, Homo sapiens
uccaccugccaggga

SEQ ID NO: 266731 - RNA, 13 nt, Homo sapiens
uccacggacucaa

SEQ ID NO: 266732 - RNA, 18 nt, Homo sapiens
uccacguaagucacugaa

SEQ ID NO: 266733 - RNA, 20 nt, Homo sapiens
uccacguaagucacugaaaa

SEQ ID NO: 266734 - RNA, 19 nt, Homo sapiens
uccacguucugcucaucau

SEQ ID NO: 266735 - RNA, 14 nt, Homo sapiens
uccacuagugcaaa

SEQ ID NO: 266736 - RNA, 22 nt, Homo sapiens
uccacucagcuguccugcagca

SEQ ID NO: 266737 - RNA, 20 nt, Homo sapiens
uccacugagaagaucaauga

SEQ ID NO: 266738 - RNA, 10 nt, Homo sapiens
uccacuguca

SEQ ID NO: 266739 - RNA, 19 nt, Homo sapiens
uccacuucuuguuccccac

SEQ ID NO: 266740 - RNA, 23 nt, Homo sapiens
uccacuucuuguuccccacugac

SEQ ID NO: 266741 - RNA, 17 nt, Homo sapiens
uccagaacgcccugugu

SEQ ID NO: 266742 - RNA, 22 nt, Homo sapiens
uccagaacgcccuguguccaca

SEQ ID NO: 266743 - RNA, 12 nt, Homo sapiens
uccagacacaug

SEQ ID NO: 266744 - RNA, 18 nt, Homo sapiens
uccagaccauucaggaca

SEQ ID NO: 266745 - RNA, 14 nt, Homo sapiens
uccagacccggcug

SEQ ID NO: 266746 - RNA, 17 nt, Homo sapiens
uccagagagcagugugg

SEQ ID NO: 266747 - RNA, 18 nt, Homo sapiens
uccagagucccugccugg

SEQ ID NO: 266748 - RNA, 13 nt, Homo sapiens
uccagcacccaga

SEQ ID NO: 266749 - RNA, 13 nt, Homo sapiens
uccagccccugga

SEQ ID NO: 266750 - RNA, 14 nt, Homo sapiens
uccagcgucugcug

SEQ ID NO: 266751 - RNA, 18 nt, Homo sapiens
uccagggacauguggaaa

SEQ ID NO: 266752 - RNA, 20 nt, Homo sapiens
uccaggggugggacacccug

SEQ ID NO: 266753 - RNA, 23 nt, Homo sapiens
uccaggggugggacacccuguga

SEQ ID NO: 266754 - RNA, 18 nt, Homo sapiens
uccaucgcugucaucuca

SEQ ID NO: 266755 - RNA, 22 nt, Homo sapiens
ucauaugauugugcacauacuu

SEQ ID NO: 266756 - RNA, 22 nt, Homo sapiens
ucauauuucuuuucuaucucau

SEQ ID NO: 266757 - RNA, 22 nt, Homo sapiens
ucauauuucuuuucuuucucau

SEQ ID NO: 266758 - RNA, 14 nt, Homo sapiens
ucaucaagaauuua

SEQ ID NO: 266759 - RNA, 15 nt, Homo sapiens
ucaucaagaauuuaa

SEQ ID NO: 266760 - RNA, 22 nt, Homo sapiens
ucaucaauaaaauagugacaua

SEQ ID NO: 266761 - RNA, 18 nt, Homo sapiens
ucaucauucucugucuca

SEQ ID NO: 266762 - RNA, 18 nt, Homo sapiens
ucaucuugaugaugauag

SEQ ID NO: 266763 - RNA, 15 nt, Homo sapiens
ucaucuuucuuccaa

SEQ ID NO: 266764 - RNA, 23 nt, Homo sapiens
ucaugaaaaccugaagaguucac

SEQ ID NO: 266765 - RNA, 23 nt, Homo sapiens
ucaugaagaaccuugacggcauu

SEQ ID NO: 266766 - RNA, 14 nt, Homo sapiens
ucaugaucaucaca

SEQ ID NO: 266767 - RNA, 16 nt, Homo sapiens
ucaugaugcuacccga

SEQ ID NO: 266768 - RNA, 23 nt, Homo sapiens
ucaugccaccauggccagccaac

SEQ ID NO: 266769 - RNA, 20 nt, Homo sapiens
ucaugcugcuuagaugacau

SEQ ID NO: 266770 - RNA, 21 nt, Homo sapiens
ucauggauauguuauacugaa

SEQ ID NO: 266771 - RNA, 17 nt, Homo sapiens
ucaugggucugcccuug

SEQ ID NO: 266772 - RNA, 18 nt, Homo sapiens
ucaugggucugcccuuga

SEQ ID NO: 266773 - RNA, 18 nt, Homo sapiens
ucaugguccccauggcau

SEQ ID NO: 266774 - RNA, 17 nt, Homo sapiens
ucauguaaacugugcac

SEQ ID NO: 266775 - RNA, 24 nt, Homo sapiens
ucauguacuacccucagucuacac

SEQ ID NO: 266776 - RNA, 18 nt, Homo sapiens
ucaugugacucuuuccaa

SEQ ID NO: 266777 - RNA, 16 nt, Homo sapiens
ucauguucagucacau

SEQ ID NO: 266778 - RNA, 19 nt, Homo sapiens
ucauguuuacagaggacag

SEQ ID NO: 266779 - RNA, 11 nt, Homo sapiens
ucauuaccuca

SEQ ID NO: 266780 - RNA, 14 nt, Homo sapiens
ucauuauguuaaua

SEQ ID NO: 266781 - RNA, 15 nt, Homo sapiens
ucauuauuugcagag

SEQ ID NO: 266782 - RNA, 13 nt, Homo sapiens
ucauucaacccac

SEQ ID NO: 266783 - RNA, 13 nt, Homo sapiens
ucauucagcagaa

SEQ ID NO: 266784 - RNA, 12 nt, Homo sapiens
ucauucagggau

SEQ ID NO: 266785 - RNA, 23 nt, Homo sapiens
ucauuccccugaugggcccugac

SEQ ID NO: 266786 - RNA, 21 nt, Homo sapiens
ucauucuuuuugaaaugucaa

SEQ ID NO: 266787 - RNA, 17 nt, Homo sapiens
ucauugcuucacaaccc

SEQ ID NO: 266788 - RNA, 16 nt, Homo sapiens
ucauuguaaaaagccc

SEQ ID NO: 266789 - RNA, 22 nt, Homo sapiens
ucauuguucuugugaacccaaa

SEQ ID NO: 266790 - RNA, 18 nt, Homo sapiens
ucauuguuuggcauugaa

SEQ ID NO: 266791 - RNA, 14 nt, Homo sapiens
ucauuucaaaggga

SEQ ID NO: 266792 - RNA, 12 nt, Homo sapiens
ucauuucuagca

SEQ ID NO: 266793 - RNA, 23 nt, Homo sapiens
ucauuuggccgagucagcacgua

SEQ ID NO: 266794 - RNA, 14 nt, Homo sapiens
uccaaagacauguu

SEQ ID NO: 266795 - RNA, 16 nt, Homo sapiens
uccaacaugugcucag

SEQ ID NO: 266796 - RNA, 20 nt, Homo sapiens
uccaacaugugcucagggaa

SEQ ID NO: 266797 - RNA, 23 nt, Homo sapiens
uccaagauaagaugaaucauuua

SEQ ID NO: 266798 - RNA, 19 nt, Homo sapiens
uccaaggauggaccacaca

SEQ ID NO: 266799 - RNA, 22 nt, Homo sapiens
uccaaggcauuuuagcggggag

SEQ ID NO: 266800 - RNA, 20 nt, Homo sapiens
uccaagggcuuagagaugaa

SEQ ID NO: 266801 - RNA, 14 nt, Homo sapiens
uccaaggguacuaa

SEQ ID NO: 266802 - RNA, 12 nt, Homo sapiens
uccaaucuguga

SEQ ID NO: 266803 - RNA, 24 nt, Homo sapiens
uccaauuaaggauuuuaugcuuua

SEQ ID NO: 266804 - RNA, 15 nt, Homo sapiens
uccaauugcugcuug

SEQ ID NO: 266805 - RNA, 13 nt, Homo sapiens
uccacaaagccaa

SEQ ID NO: 266806 - RNA, 16 nt, Homo sapiens
uccacaaaucaucugu

SEQ ID NO: 266807 - RNA, 17 nt, Homo sapiens
uccacacccucacugcu

SEQ ID NO: 266808 - RNA, 22 nt, Homo sapiens
uccacacccucuccuugucaca

SEQ ID NO: 266809 - RNA, 17 nt, Homo sapiens
uccacagugacuccacu

SEQ ID NO: 266810 - RNA, 13 nt, Homo sapiens
uccacaguggaac

SEQ ID NO: 266811 - RNA, 19 nt, Homo sapiens
uccacauuuguuuugccaa

SEQ ID NO: 266812 - RNA, 19 nt, Homo sapiens
uccacccuuggacuuucuu

SEQ ID NO: 266813 - RNA, 13 nt, Homo sapiens
uccaccugucuca

SEQ ID NO: 266814 - RNA, 12 nt, Homo sapiens
uccaccuuccau

SEQ ID NO: 266815 - RNA, 23 nt, Homo sapiens
uccacggagccacuccucugacu

SEQ ID NO: 266816 - RNA, 21 nt, Homo sapiens
uccacucaggucuguuuuccg

SEQ ID NO: 266817 - RNA, 23 nt, Homo sapiens
uccacucaugugacucuuuccaa

SEQ ID NO: 266818 - RNA, 21 nt, Homo sapiens
uccacugaaaccucuguucuc

SEQ ID NO: 266819 - RNA, 14 nt, Homo sapiens
uccacugugccaug

SEQ ID NO: 266820 - RNA, 15 nt, Homo sapiens
uccacugugccaugu

SEQ ID NO: 266821 - RNA, 11 nt, Homo sapiens
uccacuuagaa

SEQ ID NO: 266822 - RNA, 20 nt, Homo sapiens
uccacuuagaaauugcauuu

SEQ ID NO: 266823 - RNA, 19 nt, Homo sapiens
uccacuugagugucaagcu

SEQ ID NO: 266824 - RNA, 19 nt, Homo sapiens
uccacuuggucugugagau

SEQ ID NO: 266825 - RNA, 20 nt, Homo sapiens
uccagaacgcccugugucca

SEQ ID NO: 266826 - RNA, 24 nt, Homo sapiens
uccagacaaaccagaagcaacaga

SEQ ID NO: 266827 - RNA, 14 nt, Homo sapiens
uccagaccauucag

SEQ ID NO: 266828 - RNA, 17 nt, Homo sapiens
uccagaccauucaggac

SEQ ID NO: 266829 - RNA, 18 nt, Homo sapiens
uccagagacugggacuaa

SEQ ID NO: 266830 - RNA, 15 nt, Homo sapiens
uccagagaguggcuc

SEQ ID NO: 266831 - RNA, 22 nt, Homo sapiens
uccagcgucugcuguugauucc

SEQ ID NO: 266832 - RNA, 15 nt, Homo sapiens
uccagcucaccagcc

SEQ ID NO: 266833 - RNA, 23 nt, Homo sapiens
uccagcuggaagggucaacaucu

SEQ ID NO: 266834 - RNA, 16 nt, Homo sapiens
uccaggagaaggccaa

SEQ ID NO: 266835 - RNA, 18 nt, Homo sapiens
uccagggucccucugugu

SEQ ID NO: 266836 - RNA, 21 nt, Homo sapiens
uccagguuuccuuaagggaca

SEQ ID NO: 266837 - RNA, 16 nt, Homo sapiens
uccaguuugcaccugu

SEQ ID NO: 266838 - RNA, 18 nt, Homo sapiens
uccaucacguuagcuguc

SEQ ID NO: 266839 - RNA, 18 nt, Homo sapiens
uccaucagccuccauccu

SEQ ID NO: 266840 - RNA, 20 nt, Homo sapiens
uccauccauggggcugauug

SEQ ID NO: 266841 - RNA, 23 nt, Homo sapiens
uccaucgcaguguucaaggccau

SEQ ID NO: 266842 - RNA, 19 nt, Homo sapiens
uccaucuuacuugcccuuc

SEQ ID NO: 266843 - RNA, 19 nt, Homo sapiens
uccaugauguuuuccauga

SEQ ID NO: 266844 - RNA, 19 nt, Homo sapiens
uccauguuuauccauguac

SEQ ID NO: 266845 - RNA, 20 nt, Homo sapiens
uccauguuugauguaucuga

SEQ ID NO: 266846 - RNA, 17 nt, Homo sapiens
uccauugguguugacau

SEQ ID NO: 266847 - RNA, 19 nt, Homo sapiens
uccauuuacccuucuuuuc

SEQ ID NO: 266848 - RNA, 15 nt, Homo sapiens
uccauuugcuuuguc

SEQ ID NO: 266849 - RNA, 10 nt, Homo sapiens
ucccaaagag

SEQ ID NO: 266850 - RNA, 13 nt, Homo sapiens
ucccaagacugcu

SEQ ID NO: 266851 - RNA, 17 nt, Homo sapiens
ucccacccccaucucuc

SEQ ID NO: 266852 - RNA, 15 nt, Homo sapiens
ucccacucaguccau

SEQ ID NO: 266853 - RNA, 12 nt, Homo sapiens
ucccacugccaa

SEQ ID NO: 266854 - RNA, 22 nt, Homo sapiens
ucccacuggaggcaugugauga

SEQ ID NO: 266855 - RNA, 13 nt, Homo sapiens
ucccacuuggcau

SEQ ID NO: 266856 - RNA, 22 nt, Homo sapiens
ucccagacccccuugcccaggc

SEQ ID NO: 266857 - RNA, 21 nt, Homo sapiens
ucccagaggagccaccaguuc

SEQ ID NO: 266858 - RNA, 15 nt, Homo sapiens
ucccagcucacugca

SEQ ID NO: 266859 - RNA, 16 nt, Homo sapiens
ucccagcucacugcag

SEQ ID NO: 266860 - RNA, 21 nt, Homo sapiens
ucccagcugaaauacugaggg

SEQ ID NO: 266861 - RNA, 16 nt, Homo sapiens
ucccauagccaggaaa

SEQ ID NO: 266862 - RNA, 21 nt, Homo sapiens
uccucagcagccucacugcau

SEQ ID NO: 266863 - RNA, 21 nt, Homo sapiens
uccucauuagcauuuugcuaa

SEQ ID NO: 266864 - RNA, 18 nt, Homo sapiens
uccuccagaauggagcug

SEQ ID NO: 266865 - RNA, 12 nt, Homo sapiens
uccuccaggugc

SEQ ID NO: 266866 - RNA, 14 nt, Homo sapiens
uccucccaccucag

SEQ ID NO: 266867 - RNA, 15 nt, Homo sapiens
uccucccaccucagc

SEQ ID NO: 266868 - RNA, 18 nt, Homo sapiens
uccuccccuguucauucu

SEQ ID NO: 266869 - RNA, 23 nt, Homo sapiens
uccucucaaccaccuuucagaua

SEQ ID NO: 266870 - RNA, 13 nt, Homo sapiens
uccucuccacugc

SEQ ID NO: 266871 - RNA, 13 nt, Homo sapiens
uccucugacucag

SEQ ID NO: 266872 - RNA, 16 nt, Homo sapiens
uccucugugaccaaug

SEQ ID NO: 266873 - RNA, 16 nt, Homo sapiens
uccucuuucaaccuca

SEQ ID NO: 266874 - RNA, 19 nt, Homo sapiens
uccugacagaaggacucag

SEQ ID NO: 266875 - RNA, 20 nt, Homo sapiens
uccugaggcuccacuugguc

SEQ ID NO: 266876 - RNA, 23 nt, Homo sapiens
uccugauuccuuuaaaugaauau

SEQ ID NO: 266877 - RNA, 12 nt, Homo sapiens
uccugcaaugaa

SEQ ID NO: 266878 - RNA, 19 nt, Homo sapiens
uccugcagcaaacacucca

SEQ ID NO: 266879 - RNA, 19 nt, Homo sapiens
uccugccugcggaccagau

SEQ ID NO: 266880 - RNA, 15 nt, Homo sapiens
uccugcuucugauau

SEQ ID NO: 266881 - RNA, 17 nt, Homo sapiens
uccuggacucauugcuu

SEQ ID NO: 266882 - RNA, 23 nt, Homo sapiens
uccuggcaaagaugaucaguaug

SEQ ID NO: 266883 - RNA, 21 nt, Homo sapiens
uccugggaauaacauggugag

SEQ ID NO: 266884 - RNA, 16 nt, Homo sapiens
uccugggagugagcug

SEQ ID NO: 266885 - RNA, 13 nt, Homo sapiens
uccugggcccucu

SEQ ID NO: 266886 - RNA, 16 nt, Homo sapiens
uccuggggaacauaga

SEQ ID NO: 266887 - RNA, 16 nt, Homo sapiens
uccugucccucaucca

SEQ ID NO: 266888 - RNA, 17 nt, Homo sapiens
uccugucggagcccugu

SEQ ID NO: 266889 - RNA, 13 nt, Homo sapiens
uccugucugccag

SEQ ID NO: 266890 - RNA, 20 nt, Homo sapiens
uccugugaaugccacugccu

SEQ ID NO: 266891 - RNA, 11 nt, Homo sapiens
uccugugcaac

SEQ ID NO: 266892 - RNA, 16 nt, Homo sapiens
uccugugccucaucac

SEQ ID NO: 266893 - RNA, 19 nt, Homo sapiens
uccugugccucaucacugc

SEQ ID NO: 266894 - RNA, 20 nt, Homo sapiens
uccugugucuugcaauggca

SEQ ID NO: 266895 - RNA, 20 nt, Homo sapiens
uccuguguguacucugucca

SEQ ID NO: 266896 - RNA, 16 nt, Homo sapiens
uccuguucccaugaga

SEQ ID NO: 266897 - RNA, 14 nt, Homo sapiens
uccuuaagggacaa

SEQ ID NO: 266898 - RNA, 22 nt, Homo sapiens
uccuuaccagcagagcaccuua

SEQ ID NO: 266899 - RNA, 22 nt, Homo sapiens
ucccuguacaguagauuuucca

SEQ ID NO: 266900 - RNA, 14 nt, Homo sapiens
ucccugugccagac

SEQ ID NO: 266901 - RNA, 18 nt, Homo sapiens
ucccugugucauuucaaa

SEQ ID NO: 266902 - RNA, 18 nt, Homo sapiens
ucccuuaaaucaugguau

SEQ ID NO: 266903 - RNA, 18 nt, Homo sapiens
ucccuuacccuccuccag

SEQ ID NO: 266904 - RNA, 15 nt, Homo sapiens
ucccuucuuacuuaa

SEQ ID NO: 266905 - RNA, 15 nt, Homo sapiens
ucccuuucacuaaaa

SEQ ID NO: 266906 - RNA, 18 nt, Homo sapiens
ucccuuugaaaugaauau

SEQ ID NO: 266907 - RNA, 23 nt, Homo sapiens
ucccuuuuuauaucccauuuuua

SEQ ID NO: 266908 - RNA, 20 nt, Homo sapiens
uccggccuccugucccucau

SEQ ID NO: 266909 - RNA, 17 nt, Homo sapiens
uccuaaaguagacuuca

SEQ ID NO: 266910 - RNA, 22 nt, Homo sapiens
uccuaacaggauuagacaguca

SEQ ID NO: 266911 - RNA, 16 nt, Homo sapiens
uccuaagcuauucagu

SEQ ID NO: 266912 - RNA, 13 nt, Homo sapiens
uccuaauacuguc

SEQ ID NO: 266913 - RNA, 19 nt, Homo sapiens
uccuaaugaaugcauaaaa

SEQ ID NO: 266914 - RNA, 17 nt, Homo sapiens
uccuaaugcuugcugcu

SEQ ID NO: 266915 - RNA, 18 nt, Homo sapiens
uccuacucugugucaggu

SEQ ID NO: 266916 - RNA, 17 nt, Homo sapiens
uccuagaaacugacaca

SEQ ID NO: 266917 - RNA, 17 nt, Homo sapiens
uccuagcugugugaaua

SEQ ID NO: 266918 - RNA, 13 nt, Homo sapiens
uccuagucauucu

SEQ ID NO: 266919 - RNA, 17 nt, Homo sapiens
uccuaguuccaccauca

SEQ ID NO: 266920 - RNA, 12 nt, Homo sapiens
uccuauguguaa

SEQ ID NO: 266921 - RNA, 19 nt, Homo sapiens
uccuauuugcacacgucca

SEQ ID NO: 266922 - RNA, 18 nt, Homo sapiens
uccucaauaaacauuuca

SEQ ID NO: 266923 - RNA, 14 nt, Homo sapiens
uccucaauccagcu

SEQ ID NO: 266924 - RNA, 14 nt, Homo sapiens
uccucaccacuucc

SEQ ID NO: 266925 - RNA, 15 nt, Homo sapiens
uccucacucucgcca

SEQ ID NO: 266926 - RNA, 22 nt, Homo sapiens
uccucacucucgccaucuggca

SEQ ID NO: 266927 - RNA, 17 nt, Homo sapiens
uccucagaucauuauca

SEQ ID NO: 266928 - RNA, 20 nt, Homo sapiens
uccucagcagccucacugca

SEQ ID NO: 266929 - RNA, 22 nt, Homo sapiens
uccucauuuuugaauacaggca

SEQ ID NO: 266930 - RNA, 17 nt, Homo sapiens
uccuccacaauagcaga

SEQ ID NO: 266931 - RNA, 14 nt, Homo sapiens
uccuccagaccauu

SEQ ID NO: 266932 - RNA, 22 nt, Homo sapiens
uccuccaugaauaucaguuauu

SEQ ID NO: 266933 - RNA, 14 nt, Homo sapiens
uccuccaugggaga

SEQ ID NO: 266934 - RNA, 15 nt, Homo sapiens
uccuccccuguucau

SEQ ID NO: 266935 - RNA, 18 nt, Homo sapiens
uccucgagaucccaacac

SEQ ID NO: 266936 - RNA, 20 nt, Homo sapiens
uccucucaaccaccuuucag

SEQ ID NO: 266937 - RNA, 16 nt, Homo sapiens
uccucuccacugccuu

SEQ ID NO: 266938 - RNA, 18 nt, Homo sapiens
uccucuccacugccuucg

SEQ ID NO: 266939 - RNA, 19 nt, Homo sapiens
uccucuccccagcaaguga

SEQ ID NO: 266940 - RNA, 21 nt, Homo sapiens
uccucugacagaagaacccca

SEQ ID NO: 266941 - RNA, 20 nt, Homo sapiens
uccucugcccgggagcucag

SEQ ID NO: 266942 - RNA, 19 nt, Homo sapiens
uccucugugaccaaugucu

SEQ ID NO: 266943 - RNA, 18 nt, Homo sapiens
uccugaccucaaguaauc

SEQ ID NO: 266944 - RNA, 23 nt, Homo sapiens
uccugaccucaaguaauccaccu

SEQ ID NO: 266945 - RNA, 22 nt, Homo sapiens
uccugaggaagagggacuguuc

SEQ ID NO: 266946 - RNA, 19 nt, Homo sapiens
uccugaguagcuggauuac

SEQ ID NO: 266947 - RNA, 15 nt, Homo sapiens
uccugauuccuuuaa

SEQ ID NO: 266948 - RNA, 16 nt, Homo sapiens
uccugccccaugcugc

SEQ ID NO: 266949 - RNA, 17 nt, Homo sapiens
uccugccgcaacaguuu

SEQ ID NO: 266950 - RNA, 16 nt, Homo sapiens
uccugcgugugcccac

SEQ ID NO: 266951 - RNA, 19 nt, Homo sapiens
uccuggaggugacacuuga

SEQ ID NO: 266952 - RNA, 16 nt, Homo sapiens
uccuggccucaaguga

SEQ ID NO: 266953 - RNA, 19 nt, Homo sapiens
uccugggccugggcuuuag

SEQ ID NO: 266954 - RNA, 17 nt, Homo sapiens
uccugggcuaagugauc

SEQ ID NO: 266955 - RNA, 18 nt, Homo sapiens
uccuggggaacauagaac

SEQ ID NO: 266956 - RNA, 23 nt, Homo sapiens
uccuggggaacauagaacucaug

SEQ ID NO: 266957 - RNA, 21 nt, Homo sapiens
uccugguuugaagaaauaaca

SEQ ID NO: 266958 - RNA, 16 nt, Homo sapiens
uccuguagucccauug

SEQ ID NO: 266959 - RNA, 13 nt, Homo sapiens
uccugucccucau

SEQ ID NO: 266960 - RNA, 19 nt, Homo sapiens
uccugucccucauccauag

SEQ ID NO: 266961 - RNA, 17 nt, Homo sapiens
uccuguguguacucugu

SEQ ID NO: 266962 - RNA, 22 nt, Homo sapiens
uccugugugugcgccuacagga

SEQ ID NO: 266963 - RNA, 15 nt, Homo sapiens
uccuguuacaaaaga

SEQ ID NO: 266964 - RNA, 19 nt, Homo sapiens
uccuuagcuuagaccucag

SEQ ID NO: 266965 - RNA, 20 nt, Homo sapiens
uccuuagcuuagaccucagc

SEQ ID NO: 266966 - RNA, 21 nt, Homo sapiens
uccuucuaaagugcugggauu

SEQ ID NO: 266967 - RNA, 11 nt, Homo sapiens
uccuucuuccc

SEQ ID NO: 266968 - RNA, 17 nt, Homo sapiens
uccuugauacugcucau

SEQ ID NO: 266969 - RNA, 21 nt, Homo sapiens
uccuugucacagaaucuccau

SEQ ID NO: 266970 - RNA, 15 nt, Homo sapiens
uccuuucacaaccuu

SEQ ID NO: 266971 - RNA, 17 nt, Homo sapiens
uccuuuccccucccuca

SEQ ID NO: 266972 - RNA, 18 nt, Homo sapiens
uccuuuccccucccucag

SEQ ID NO: 266973 - RNA, 21 nt, Homo sapiens
uccuuuccccucccucaggcc

SEQ ID NO: 266974 - RNA, 23 nt, Homo sapiens
uccuuuguuuuuuuuuccugucc

SEQ ID NO: 266975 - RNA, 22 nt, Homo sapiens
ucgaauccagagagcagugugg

SEQ ID NO: 266976 - RNA, 17 nt, Homo sapiens
ucgaaucucugugccuu

SEQ ID NO: 266977 - RNA, 21 nt, Homo sapiens
ucgagccacaaccgaccagau

SEQ ID NO: 266978 - RNA, 15 nt, Homo sapiens
ucgagugcauuugcu

SEQ ID NO: 266979 - RNA, 12 nt, Homo sapiens
ucgaguguuuca

SEQ ID NO: 266980 - RNA, 21 nt, Homo sapiens
ucgauccccugucacgugugg

SEQ ID NO: 266981 - RNA, 19 nt, Homo sapiens
ucgccaaggcucacaugcu

SEQ ID NO: 266982 - RNA, 14 nt, Homo sapiens
ucgccguggcugcg

SEQ ID NO: 266983 - RNA, 23 nt, Homo sapiens
ucgccuccucuacaauuugccau

SEQ ID NO: 266984 - RNA, 14 nt, Homo sapiens
ucgcgugaugcgca

SEQ ID NO: 266985 - RNA, 22 nt, Homo sapiens
ucgcuccugugucuugcaaugg

SEQ ID NO: 266986 - RNA, 15 nt, Homo sapiens
ucgcugucaucucag

SEQ ID NO: 266987 - RNA, 13 nt, Homo sapiens
ucgcuucuugccu

SEQ ID NO: 266988 - RNA, 14 nt, Homo sapiens
ucgcuucuugccuc

SEQ ID NO: 266989 - RNA, 16 nt, Homo sapiens
ucgcuuuguugcccag

SEQ ID NO: 266990 - RNA, 17 nt, Homo sapiens
ucggcuccuggacucau

SEQ ID NO: 266991 - RNA, 17 nt, Homo sapiens
ucggcucuggccuccaa

SEQ ID NO: 266992 - RNA, 15 nt, Homo sapiens
ucggcugaccaugcu

SEQ ID NO: 266993 - RNA, 15 nt, Homo sapiens
ucgggacuaacccag

SEQ ID NO: 266994 - RNA, 18 nt, Homo sapiens
ucgggugcccugcauuca

SEQ ID NO: 266995 - RNA, 20 nt, Homo sapiens
ucgggugcccugcauucaca

SEQ ID NO: 266996 - RNA, 16 nt, Homo sapiens
ucggugggcauucaca

SEQ ID NO: 266997 - RNA, 12 nt, Homo sapiens
ucggugugcacc

SEQ ID NO: 266998 - RNA, 15 nt, Homo sapiens
ucguucucugccuca

SEQ ID NO: 266999 - RNA, 15 nt, Homo sapiens
ucguuugaaucacag

SEQ ID NO: 267000 - RNA, 19 nt, Homo sapiens
ucguuugaaucacaguaua

SEQ ID NO: 267001 - RNA, 15 nt, Homo sapiens
ucuaaaaucugcuag

SEQ ID NO: 267002 - RNA, 22 nt, Homo sapiens
ucuaaacaaaaaaaggcgguga

SEQ ID NO: 267003 - RNA, 12 nt, Homo sapiens
ucuaaagcugcc

SEQ ID NO: 267004 - RNA, 14 nt, Homo sapiens
ucuaaagcugccag

SEQ ID NO: 267005 - RNA, 22 nt, Homo sapiens
ucuaaauaauaauaaaacaaca

SEQ ID NO: 267006 - RNA, 20 nt, Homo sapiens
ucuaaauuuugugauucuau

SEQ ID NO: 267007 - RNA, 21 nt, Homo sapiens
ucuaaauuuugugauucuaua

SEQ ID NO: 267008 - RNA, 15 nt, Homo sapiens
ucuaagaaagaaauu

SEQ ID NO: 267009 - RNA, 21 nt, Homo sapiens
ucuaaggcugugccaucagcu

SEQ ID NO: 267010 - RNA, 22 nt, Homo sapiens
ucuaaggcugugccaucagcuc

SEQ ID NO: 267011 - RNA, 17 nt, Homo sapiens
ucuaaguaaugaugucg

SEQ ID NO: 267012 - RNA, 14 nt, Homo sapiens
ucuaagucuuucca

SEQ ID NO: 267013 - RNA, 23 nt, Homo sapiens
ucuaaugaaaccugugucucuga

SEQ ID NO: 267014 - RNA, 14 nt, Homo sapiens
ucuaauggcuuuau

SEQ ID NO: 267015 - RNA, 17 nt, Homo sapiens
ucuacaauuugccauug

SEQ ID NO: 267016 - RNA, 20 nt, Homo sapiens
ucuacagagaagauucuugu

SEQ ID NO: 267017 - RNA, 18 nt, Homo sapiens
ucuccaguuugcaccugu

SEQ ID NO: 267018 - RNA, 21 nt, Homo sapiens
ucuccaugucuguaguugcuu

SEQ ID NO: 267019 - RNA, 16 nt, Homo sapiens
ucuccauugcauucau

SEQ ID NO: 267020 - RNA, 21 nt, Homo sapiens
ucuccauugcauucauguacu

SEQ ID NO: 267021 - RNA, 12 nt, Homo sapiens
ucuccauuucac

SEQ ID NO: 267022 - RNA, 16 nt, Homo sapiens
ucuccauuucugcuca

SEQ ID NO: 267023 - RNA, 19 nt, Homo sapiens
ucucccaacaagugcucuu

SEQ ID NO: 267024 - RNA, 21 nt, Homo sapiens
ucucccagccagguucugacu

SEQ ID NO: 267025 - RNA, 16 nt, Homo sapiens
ucuccccgaaucucaa

SEQ ID NO: 267026 - RNA, 16 nt, Homo sapiens
ucucccuccucugccc

SEQ ID NO: 267027 - RNA, 16 nt, Homo sapiens
ucucccugcuuugguc

SEQ ID NO: 267028 - RNA, 14 nt, Homo sapiens
ucucccuucauccu

SEQ ID NO: 267029 - RNA, 23 nt, Homo sapiens
ucucccuuccuaugcuguucacu

SEQ ID NO: 267030 - RNA, 17 nt, Homo sapiens
ucuccucucucuguaau

SEQ ID NO: 267031 - RNA, 23 nt, Homo sapiens
ucuccucucucuguaauaaacuc

SEQ ID NO: 267032 - RNA, 23 nt, Homo sapiens
ucuccugcgugugcccacugaac

SEQ ID NO: 267033 - RNA, 17 nt, Homo sapiens
ucuccuuagaaguggaa

SEQ ID NO: 267034 - RNA, 18 nt, Homo sapiens
ucuccuuuucuccacugu

SEQ ID NO: 267035 - RNA, 22 nt, Homo sapiens
ucuccuuuucuccacugucaua

SEQ ID NO: 267036 - RNA, 21 nt, Homo sapiens
ucucgcucccuuucagguuua

SEQ ID NO: 267037 - RNA, 22 nt, Homo sapiens
ucucgcucccuuucagguuuac

SEQ ID NO: 267038 - RNA, 12 nt, Homo sapiens
ucucgcuuuguu

SEQ ID NO: 267039 - RNA, 17 nt, Homo sapiens
ucucguacuuucacauc

SEQ ID NO: 267040 - RNA, 22 nt, Homo sapiens
ucucgugauugauaagaaccuu

SEQ ID NO: 267041 - RNA, 18 nt, Homo sapiens
ucucuacugaaaguacaa

SEQ ID NO: 267042 - RNA, 19 nt, Homo sapiens
ucucuaguuuccagaggcu

SEQ ID NO: 267043 - RNA, 18 nt, Homo sapiens
ucucaauaaaccagugaa

SEQ ID NO: 267044 - RNA, 16 nt, Homo sapiens
ucucaauugucauuga

SEQ ID NO: 267045 - RNA, 18 nt, Homo sapiens
ucucacaguguugcccag

SEQ ID NO: 267046 - RNA, 15 nt, Homo sapiens
ucucacuauaccagu

SEQ ID NO: 267047 - RNA, 20 nt, Homo sapiens
ucucacucugucgcccaguc

SEQ ID NO: 267048 - RNA, 19 nt, Homo sapiens
ucucacucuguugaccagg

SEQ ID NO: 267049 - RNA, 19 nt, Homo sapiens
ucucacuguguugcccagg

SEQ ID NO: 267050 - RNA, 18 nt, Homo sapiens
ucucacuugugcaguguu

SEQ ID NO: 267051 - RNA, 19 nt, Homo sapiens
ucucagauuguaccauuga

SEQ ID NO: 267052 - RNA, 14 nt, Homo sapiens
ucucaggaccaaag

SEQ ID NO: 267053 - RNA, 16 nt, Homo sapiens
ucucaggccagcugcu

SEQ ID NO: 267054 - RNA, 13 nt, Homo sapiens
ucucauccaucau

SEQ ID NO: 267055 - RNA, 17 nt, Homo sapiens
ucucaugaccaaaugcu

SEQ ID NO: 267056 - RNA, 19 nt, Homo sapiens
ucucauggguggcacucag

SEQ ID NO: 267057 - RNA, 13 nt, Homo sapiens
ucucauuccagag

SEQ ID NO: 267058 - RNA, 15 nt, Homo sapiens
ucucauuugucacac

SEQ ID NO: 267059 - RNA, 20 nt, Homo sapiens
ucuccacugucauaaucucu

SEQ ID NO: 267060 - RNA, 16 nt, Homo sapiens
ucuccagaaagcucau

SEQ ID NO: 267061 - RNA, 20 nt, Homo sapiens
ucuccagucauuauguuaau

SEQ ID NO: 267062 - RNA, 22 nt, Homo sapiens
ucuccauguuugauguaucuga

SEQ ID NO: 267063 - RNA, 20 nt, Homo sapiens
ucucccaagacugcucccuu

SEQ ID NO: 267064 - RNA, 22 nt, Homo sapiens
ucuccccacugcucauuuggau

SEQ ID NO: 267065 - RNA, 17 nt, Homo sapiens
ucucccccguguucccc

SEQ ID NO: 267066 - RNA, 15 nt, Homo sapiens
ucuccccuguucccc

SEQ ID NO: 267067 - RNA, 17 nt, Homo sapiens
ucuccccuucucuguau

SEQ ID NO: 267068 - RNA, 19 nt, Homo sapiens
ucucccuccccugccauuu

SEQ ID NO: 267069 - RNA, 13 nt, Homo sapiens
ucucccugcuuug

SEQ ID NO: 267070 - RNA, 18 nt, Homo sapiens
ucucccuggaucuaccug

SEQ ID NO: 267071 - RNA, 23 nt, Homo sapiens
ucucccuguuggucgguggguug

SEQ ID NO: 267072 - RNA, 17 nt, Homo sapiens
ucuccugcgugugccca

SEQ ID NO: 267073 - RNA, 22 nt, Homo sapiens
ucuccugcgugugcccacugaa

SEQ ID NO: 267074 - RNA, 23 nt, Homo sapiens
ucuccuugucacagaaucuccau

SEQ ID NO: 267075 - RNA, 19 nt, Homo sapiens
ucuccuuuucuccacuguc

SEQ ID NO: 267076 - RNA, 18 nt, Homo sapiens
ucucgcuuuguugcccag

SEQ ID NO: 267077 - RNA, 20 nt, Homo sapiens
ucucgggugcccugcauuca

SEQ ID NO: 267078 - RNA, 22 nt, Homo sapiens
ucucgggugcccugcauucaca

SEQ ID NO: 267079 - RNA, 15 nt, Homo sapiens
ucucguacuuucaca

SEQ ID NO: 267080 - RNA, 18 nt, Homo sapiens
ucucgugguaggacugua

SEQ ID NO: 267081 - RNA, 16 nt, Homo sapiens
ucucuaggccucucca

SEQ ID NO: 267082 - RNA, 16 nt, Homo sapiens
ucucucgcaagggaag

SEQ ID NO: 267083 - RNA, 13 nt, Homo sapiens
ucucucuucucca

SEQ ID NO: 267084 - RNA, 14 nt, Homo sapiens
ucucucuucuccac

SEQ ID NO: 267085 - RNA, 14 nt, Homo sapiens
ucucucuucuuuuc

SEQ ID NO: 267086 - RNA, 19 nt, Homo sapiens
ucucugagcagugaaugau

SEQ ID NO: 267087 - RNA, 17 nt, Homo sapiens
ucucugaggacacuaac

SEQ ID NO: 267088 - RNA, 16 nt, Homo sapiens
ucucugcccuccaaga

SEQ ID NO: 267089 - RNA, 21 nt, Homo sapiens
ucucugcuuuggaaaucacac

SEQ ID NO: 267090 - RNA, 17 nt, Homo sapiens
ucucuguauuccuagaa

SEQ ID NO: 267091 - RNA, 18 nt, Homo sapiens
ucucuuaaauucauauca

SEQ ID NO: 267092 - RNA, 12 nt, Homo sapiens
ucucuugauuca

SEQ ID NO: 267093 - RNA, 23 nt, Homo sapiens
ucucuugauucauaaugacuuaa

SEQ ID NO: 267094 - RNA, 15 nt, Homo sapiens
ucucuuucguuacag

SEQ ID NO: 267095 - RNA, 16 nt, Homo sapiens
ucucuuucucuuaaua

SEQ ID NO: 267096 - RNA, 12 nt, Homo sapiens
ucugaaaaccaa

SEQ ID NO: 267097 - RNA, 13 nt, Homo sapiens
ucugaaacagcuu

SEQ ID NO: 267098 - RNA, 21 nt, Homo sapiens
ucugaacaauauauacuuaua

SEQ ID NO: 267099 - RNA, 19 nt, Homo sapiens
ucugaagauacaugucuuu

SEQ ID NO: 267100 - RNA, 21 nt, Homo sapiens
ucugaaggagccccauuccug

SEQ ID NO: 267101 - RNA, 15 nt, Homo sapiens
ucugaagucacugca

SEQ ID NO: 267102 - RNA, 14 nt, Homo sapiens
ucugacacacagcu

SEQ ID NO: 267103 - RNA, 14 nt, Homo sapiens
ucugacagagccau

SEQ ID NO: 267104 - RNA, 15 nt, Homo sapiens
ucugacccacugcuu

SEQ ID NO: 267105 - RNA, 20 nt, Homo sapiens
ucugacucuuggcacagcau

SEQ ID NO: 267106 - RNA, 21 nt, Homo sapiens
ucugagacucgcgacaaugca

SEQ ID NO: 267107 - RNA, 19 nt, Homo sapiens
ucugagcagugaaugauuc

SEQ ID NO: 267108 - RNA, 23 nt, Homo sapiens
ucugagcagugaaugauucagug

SEQ ID NO: 267109 - RNA, 14 nt, Homo sapiens
ucugagcugugcag

SEQ ID NO: 267110 - RNA, 21 nt, Homo sapiens
ucugaggcuucuggggcuuca

SEQ ID NO: 267111 - RNA, 18 nt, Homo sapiens
ucugauaaaagauggcca

SEQ ID NO: 267112 - RNA, 16 nt, Homo sapiens
ucugaugcaagcaaga

SEQ ID NO: 267113 - RNA, 21 nt, Homo sapiens
ucugaugcaagcaagaaacac

SEQ ID NO: 267114 - RNA, 21 nt, Homo sapiens
ucugcaagcacaucugcauuu

SEQ ID NO: 267115 - RNA, 17 nt, Homo sapiens
ucugcaccccacuucag

SEQ ID NO: 267116 - RNA, 19 nt, Homo sapiens
ucugcauguuacauaagau

SEQ ID NO: 267117 - RNA, 18 nt, Homo sapiens
ucugcauucucuagucag

SEQ ID NO: 267118 - RNA, 21 nt, Homo sapiens
ucugccccagcuggagcauug

SEQ ID NO: 267119 - RNA, 20 nt, Homo sapiens
ucugccuccccuucacuccc

SEQ ID NO: 267120 - RNA, 21 nt, Homo sapiens
ucugccuccccuucacuccca

SEQ ID NO: 267121 - RNA, 23 nt, Homo sapiens
ucugccucugcagcccacugccu

SEQ ID NO: 267122 - RNA, 16 nt, Homo sapiens
ucugccugaagucaca

SEQ ID NO: 267123 - RNA, 22 nt, Homo sapiens
ucugccuuugugcucuguuccu

SEQ ID NO: 267124 - RNA, 18 nt, Homo sapiens
ucugcuaccucacugggg

SEQ ID NO: 267125 - RNA, 20 nt, Homo sapiens
ucugcucacauaucugucau

SEQ ID NO: 267126 - RNA, 14 nt, Homo sapiens
ucugcucaucauuc

SEQ ID NO: 267127 - RNA, 15 nt, Homo sapiens
ucugcucugugcacu

SEQ ID NO: 267128 - RNA, 23 nt, Homo sapiens
ucugcuuuuuaaagaaugcucuu

SEQ ID NO: 267129 - RNA, 14 nt, Homo sapiens
ucuggacacagccc

SEQ ID NO: 267130 - RNA, 19 nt, Homo sapiens
ucuggacacagccccaugu

SEQ ID NO: 267131 - RNA, 21 nt, Homo sapiens
ucuggagauaaaauaaaaaga

SEQ ID NO: 267132 - RNA, 15 nt, Homo sapiens
ucuggaugcugugaa

SEQ ID NO: 267133 - RNA, 13 nt, Homo sapiens
ucuggcauuacaa

SEQ ID NO: 267134 - RNA, 17 nt, Homo sapiens
ucuggccuccaagucca

SEQ ID NO: 267135 - RNA, 20 nt, Homo sapiens
ucuggccuugaaaccaccuu

SEQ ID NO: 267136 - RNA, 18 nt, Homo sapiens
ucuggcucuaauucacag

SEQ ID NO: 267137 - RNA, 15 nt, Homo sapiens
ucuggcucuuccagg

SEQ ID NO: 267138 - RNA, 18 nt, Homo sapiens
ucuggggauacuggcaaa

SEQ ID NO: 267139 - RNA, 20 nt, Homo sapiens
ucuggggauacuggcaaagc

SEQ ID NO: 267140 - RNA, 16 nt, Homo sapiens
ucuggucgcuccugcc

SEQ ID NO: 267141 - RNA, 14 nt, Homo sapiens
ucugguuugcagag

SEQ ID NO: 267142 - RNA, 15 nt, Homo sapiens
ucuguacaacuaccu

SEQ ID NO: 267143 - RNA, 16 nt, Homo sapiens
ucuguacaacuaccuc

SEQ ID NO: 267144 - RNA, 18 nt, Homo sapiens
ucuguacuuuuuggcaua

SEQ ID NO: 267145 - RNA, 22 nt, Homo sapiens
ucuguauuccuagaaacugaca

SEQ ID NO: 267146 - RNA, 15 nt, Homo sapiens
ucugucaaugucuug

SEQ ID NO: 267147 - RNA, 14 nt, Homo sapiens
ucugucagcugcaa

SEQ ID NO: 267148 - RNA, 20 nt, Homo sapiens
ucugucccauucccugggau

SEQ ID NO: 267149 - RNA, 17 nt, Homo sapiens
ucuguccuacucugugu

SEQ ID NO: 267150 - RNA, 16 nt, Homo sapiens
ucugucucauaugauu

SEQ ID NO: 267151 - RNA, 17 nt, Homo sapiens
ucugucuggcauuacaa

SEQ ID NO: 267152 - RNA, 17 nt, Homo sapiens
ucugucuuuauaaucua

SEQ ID NO: 267153 - RNA, 21 nt, Homo sapiens
ucuguggaucagagaugcacc

SEQ ID NO: 267154 - RNA, 17 nt, Homo sapiens
ucuguggcacucagaua

SEQ ID NO: 267155 - RNA, 19 nt, Homo sapiens
ucugugggcuccauguaga

SEQ ID NO: 267156 - RNA, 23 nt, Homo sapiens
ucuguggguuucuaaagcugcca

SEQ ID NO: 267157 - RNA, 19 nt, Homo sapiens
ucuguguguguguaugugg

SEQ ID NO: 267158 - RNA, 23 nt, Homo sapiens
ucuguguguguguaugugggggu

SEQ ID NO: 267159 - RNA, 14 nt, Homo sapiens
ucuguuaccagagg

SEQ ID NO: 267160 - RNA, 13 nt, Homo sapiens
ucuguucaaggaa

SEQ ID NO: 267161 - RNA, 17 nt, Homo sapiens
ucuguuccuguccagca

SEQ ID NO: 267162 - RNA, 17 nt, Homo sapiens
ucuguuggccaguguga

SEQ ID NO: 267163 - RNA, 14 nt, Homo sapiens
ucuguuugugaccu

SEQ ID NO: 267164 - RNA, 15 nt, Homo sapiens
ucuguuuuguguacu

SEQ ID NO: 267165 - RNA, 22 nt, Homo sapiens
ucuuaaacuaaaugugcaauag

SEQ ID NO: 267166 - RNA, 13 nt, Homo sapiens
ucuuaaccuaccu

SEQ ID NO: 267167 - RNA, 20 nt, Homo sapiens
ucuuaauaagcccacauaua

SEQ ID NO: 267168 - RNA, 17 nt, Homo sapiens
ucuuaauucuuagcuca

SEQ ID NO: 267169 - RNA, 16 nt, Homo sapiens
ucuuagaaaaaccacc

SEQ ID NO: 267170 - RNA, 21 nt, Homo sapiens
ucuuagauguauauauuuccu

SEQ ID NO: 267171 - RNA, 19 nt, Homo sapiens
ucuugacuacagucaggaa

SEQ ID NO: 267172 - RNA, 16 nt, Homo sapiens
ucuugaucagacauuc

SEQ ID NO: 267173 - RNA, 19 nt, Homo sapiens
ucuugaucagacauucaga

SEQ ID NO: 267174 - RNA, 17 nt, Homo sapiens
ucuugaugcaugcacug

SEQ ID NO: 267175 - RNA, 14 nt, Homo sapiens
ucuugcuaccagua

SEQ ID NO: 267176 - RNA, 21 nt, Homo sapiens
ucuugcuauggggagaaaaga

SEQ ID NO: 267177 - RNA, 21 nt, Homo sapiens
ucuuggccucaagcgauccuc

SEQ ID NO: 267178 - RNA, 22 nt, Homo sapiens
ucuugguugaggaaacaaacau

SEQ ID NO: 267179 - RNA, 22 nt, Homo sapiens
ucuuguaaagguccuggcaaag

SEQ ID NO: 267180 - RNA, 16 nt, Homo sapiens
ucuuguguuaccugaa

SEQ ID NO: 267181 - RNA, 17 nt, Homo sapiens
ucuuguuccccacugac

SEQ ID NO: 267182 - RNA, 17 nt, Homo sapiens
ucuuuaaugucacaggc

SEQ ID NO: 267183 - RNA, 18 nt, Homo sapiens
ucuuuauaaucuacuccu

SEQ ID NO: 267184 - RNA, 13 nt, Homo sapiens
ucuuuauaauucu

SEQ ID NO: 267185 - RNA, 22 nt, Homo sapiens
ucuuucagccaagaauucuuaa

SEQ ID NO: 267186 - RNA, 18 nt, Homo sapiens
ucuuucaggacucuaccu

SEQ ID NO: 267187 - RNA, 14 nt, Homo sapiens
ucuucauguucagu

SEQ ID NO: 267188 - RNA, 20 nt, Homo sapiens
ucuucauuaccucagugaga

SEQ ID NO: 267189 - RNA, 12 nt, Homo sapiens
ucuuccaaacag

SEQ ID NO: 267190 - RNA, 15 nt, Homo sapiens
ucuuccacuuugaua

SEQ ID NO: 267191 - RNA, 13 nt, Homo sapiens
ucuuccccagaua

SEQ ID NO: 267192 - RNA, 18 nt, Homo sapiens
ucuuccccauaaucacug

SEQ ID NO: 267193 - RNA, 23 nt, Homo sapiens
ucuucccuguaugauuccuugau

SEQ ID NO: 267194 - RNA, 15 nt, Homo sapiens
ucuucuaaauggcaa

SEQ ID NO: 267195 - RNA, 13 nt, Homo sapiens
ucuucuccacugg

SEQ ID NO: 267196 - RNA, 14 nt, Homo sapiens
ucuucuccacugga

SEQ ID NO: 267197 - RNA, 19 nt, Homo sapiens
ucuucuccacuuucuagcc

SEQ ID NO: 267198 - RNA, 18 nt, Homo sapiens
ucuucucuauuucuggau

SEQ ID NO: 267199 - RNA, 19 nt, Homo sapiens
ucuucucuauuucuggaug

SEQ ID NO: 267200 - RNA, 22 nt, Homo sapiens
ucuugaaauauaggaacuuaaa

SEQ ID NO: 267201 - RNA, 15 nt, Homo sapiens
ucuugaacucuuggc

SEQ ID NO: 267202 - RNA, 16 nt, Homo sapiens
ucuugaacucuuggcc

SEQ ID NO: 267203 - RNA, 17 nt, Homo sapiens
ucuugaacucuuggccu

SEQ ID NO: 267204 - RNA, 16 nt, Homo sapiens
ucuugaguuuagugau

SEQ ID NO: 267205 - RNA, 13 nt, Homo sapiens
ucuugaugaugau

SEQ ID NO: 267206 - RNA, 17 nt, Homo sapiens
ucuugauucauaaugac

SEQ ID NO: 267207 - RNA, 17 nt, Homo sapiens
ucuuggaauccugggga

SEQ ID NO: 267208 - RNA, 23 nt, Homo sapiens
ucuuggggggguggccgcugagu

SEQ ID NO: 267209 - RNA, 18 nt, Homo sapiens
ucuuggguucaagugauu

SEQ ID NO: 267210 - RNA, 13 nt, Homo sapiens
ucuuggugaagau

SEQ ID NO: 267211 - RNA, 19 nt, Homo sapiens
ucuuguaaauacauguccc

SEQ ID NO: 267212 - RNA, 22 nt, Homo sapiens
ucuuguuucaauuccaccugca

SEQ ID NO: 267213 - RNA, 22 nt, Homo sapiens
ucuuguuuuuuuuuuccacuua

SEQ ID NO: 267214 - RNA, 22 nt, Homo sapiens
ucuuuaaccacuuuucaauguc

SEQ ID NO: 267215 - RNA, 15 nt, Homo sapiens
ucuuuaauuuuggaa

SEQ ID NO: 267216 - RNA, 12 nt, Homo sapiens
ucuuuaccuccu

SEQ ID NO: 267217 - RNA, 14 nt, Homo sapiens
ucuuuacuguggaa

SEQ ID NO: 267218 - RNA, 17 nt, Homo sapiens
ucuuuauaaucuacucc

SEQ ID NO: 267219 - RNA, 21 nt, Homo sapiens
ucuuucagccaagaauucuua

SEQ ID NO: 267220 - RNA, 20 nt, Homo sapiens
ucuuuccuauuugcacacgu

SEQ ID NO: 267221 - RNA, 23 nt, Homo sapiens
ucuuuccuguagucccauugaug

SEQ ID NO: 267222 - RNA, 21 nt, Homo sapiens
ucuuucuauuuaugcaacuca

SEQ ID NO: 267223 - RNA, 14 nt, Homo sapiens
ucuuucuccaggga

SEQ ID NO: 267224 - RNA, 20 nt, Homo sapiens
ucuuugaacccuugcuugca

SEQ ID NO: 267225 - RNA, 21 nt, Homo sapiens
ucuuugaauuuaggugauacc

SEQ ID NO: 267226 - RNA, 20 nt, Homo sapiens
ucuuugcagacaggcaagca

SEQ ID NO: 267227 - RNA, 14 nt, Homo sapiens
ucuuuggugaacau

SEQ ID NO: 267228 - RNA, 22 nt, Homo sapiens
ucuuuguaaagaaaguggcuug

SEQ ID NO: 267229 - RNA, 17 nt, Homo sapiens
ucuuuuaagcccaucaa

SEQ ID NO: 267230 - RNA, 16 nt, Homo sapiens
ucuuuugaacccagga

SEQ ID NO: 267231 - RNA, 16 nt, Homo sapiens
ucuuuugagcauuuag

SEQ ID NO: 267232 - RNA, 13 nt, Homo sapiens
ucuuuuugcuuca

SEQ ID NO: 267233 - RNA, 21 nt, Homo sapiens
ugaaaaaaaaaaacacaaaaa

SEQ ID NO: 267234 - RNA, 16 nt, Homo sapiens
ugaaaaaaaacagugg

SEQ ID NO: 267235 - RNA, 12 nt, Homo sapiens
ugaaaaaugccu

SEQ ID NO: 267236 - RNA, 18 nt, Homo sapiens
ugaaaauaugacacucua

SEQ ID NO: 267237 - RNA, 19 nt, Homo sapiens
ugaaaaugguccaggagaa

SEQ ID NO: 267238 - RNA, 13 nt, Homo sapiens
ugaaaauucuuga

SEQ ID NO: 267239 - RNA, 15 nt, Homo sapiens
ugaaaauucuugaua

SEQ ID NO: 267240 - RNA, 16 nt, Homo sapiens
ugaaaauucuugauaa

SEQ ID NO: 267241 - RNA, 16 nt, Homo sapiens
ugaaacauggcugugu

SEQ ID NO: 267242 - RNA, 21 nt, Homo sapiens
ugaaacauggcuguguuugca

SEQ ID NO: 267243 - RNA, 16 nt, Homo sapiens
ugaaaccucuguucuc

SEQ ID NO: 267244 - RNA, 23 nt, Homo sapiens
ugaaaggaaagaggcucuggcua

SEQ ID NO: 267245 - RNA, 17 nt, Homo sapiens
ugaaagugagacuuuga

SEQ ID NO: 267246 - RNA, 21 nt, Homo sapiens
ugaaauaucaagagagguuaa

SEQ ID NO: 267247 - RNA, 13 nt, Homo sapiens
ugaaaucuaugaa

SEQ ID NO: 267248 - RNA, 22 nt, Homo sapiens
ugaaaucuuuuuuguucaaaga

SEQ ID NO: 267249 - RNA, 15 nt, Homo sapiens
ugaaaugcuggcauu

SEQ ID NO: 267250 - RNA, 12 nt, Homo sapiens
ugaacacugggg

SEQ ID NO: 267251 - RNA, 13 nt, Homo sapiens
ugaacacuggggg

SEQ ID NO: 267252 - RNA, 15 nt, Homo sapiens
ugaacagaacaaaag

SEQ ID NO: 267253 - RNA, 20 nt, Homo sapiens
ugaacaggccgcacaucuca

SEQ ID NO: 267254 - RNA, 12 nt, Homo sapiens
ugaacaguguga

SEQ ID NO: 267255 - RNA, 13 nt, Homo sapiens
ugaacaugcucau

SEQ ID NO: 267256 - RNA, 20 nt, Homo sapiens
ugaacaugcucauguguaca

SEQ ID NO: 267257 - RNA, 11 nt, Homo sapiens
ugaacauucca

SEQ ID NO: 267258 - RNA, 19 nt, Homo sapiens
ugaacauugcaauagaaau

SEQ ID NO: 267259 - RNA, 18 nt, Homo sapiens
ugaaccaaaccaaaucau

SEQ ID NO: 267260 - RNA, 13 nt, Homo sapiens
ugaaccacaucuu

SEQ ID NO: 267261 - RNA, 23 nt, Homo sapiens
ugaaccacccagaguggcccaag

SEQ ID NO: 267262 - RNA, 19 nt, Homo sapiens
ugaacuauuagagcugccu

SEQ ID NO: 267263 - RNA, 14 nt, Homo sapiens
ugaacucuuggccu

SEQ ID NO: 267264 - RNA, 18 nt, Homo sapiens
ugaagaacaguaacugcc

SEQ ID NO: 267265 - RNA, 19 nt, Homo sapiens
ugaagaagagaaugugaca

SEQ ID NO: 267266 - RNA, 21 nt, Homo sapiens
ugaagaagguugucagcugca

SEQ ID NO: 267267 - RNA, 19 nt, Homo sapiens
ugaagacccccuccaaaga

SEQ ID NO: 267268 - RNA, 16 nt, Homo sapiens
ugaagauacaugucuu

SEQ ID NO: 267269 - RNA, 23 nt, Homo sapiens
ugaagaugauaccugaagcuguc

SEQ ID NO: 267270 - RNA, 13 nt, Homo sapiens
ugaagcugcucac

SEQ ID NO: 267271 - RNA, 15 nt, Homo sapiens
ugaagcugcucacug

SEQ ID NO: 267272 - RNA, 18 nt, Homo sapiens
ugaaggcagcagaauauu

SEQ ID NO: 267273 - RNA, 23 nt, Homo sapiens
ugaaggguucaccaggucaggga

SEQ ID NO: 267274 - RNA, 17 nt, Homo sapiens
ugaaguaauaugcacac

SEQ ID NO: 267275 - RNA, 15 nt, Homo sapiens
ugaagucacacagug

SEQ ID NO: 267276 - RNA, 16 nt, Homo sapiens
ugaagucacacaguga

SEQ ID NO: 267277 - RNA, 22 nt, Homo sapiens
ugaagucaugcguuuaaucaca

SEQ ID NO: 267278 - RNA, 23 nt, Homo sapiens
ugaagucaugcguuuaaucacau

SEQ ID NO: 267279 - RNA, 19 nt, Homo sapiens
ugaagucccagauacuugg

SEQ ID NO: 267280 - RNA, 18 nt, Homo sapiens
ugaagucucugaagugaa

SEQ ID NO: 267281 - RNA, 16 nt, Homo sapiens
ugaaguggugugaucc

SEQ ID NO: 267282 - RNA, 16 nt, Homo sapiens
ugaaguuuaauugacu

SEQ ID NO: 267283 - RNA, 22 nt, Homo sapiens
ugaauaaaccaucaucuugcca

SEQ ID NO: 267284 - RNA, 16 nt, Homo sapiens
ugaauaauacaguauc

SEQ ID NO: 267285 - RNA, 18 nt, Homo sapiens
ugaauacgucuugaucag

SEQ ID NO: 267286 - RNA, 14 nt, Homo sapiens
ugaauaguuuccaa

SEQ ID NO: 267287 - RNA, 15 nt, Homo sapiens
ugaauaucaguuauu

SEQ ID NO: 267288 - RNA, 20 nt, Homo sapiens
ugaauaugaacggugagcau

SEQ ID NO: 267289 - RNA, 17 nt, Homo sapiens
ugaauaugauuaguaaa

SEQ ID NO: 267290 - RNA, 14 nt, Homo sapiens
ugaauaugccacuu

SEQ ID NO: 267291 - RNA, 14 nt, Homo sapiens
ugaaucacaguaua

SEQ ID NO: 267292 - RNA, 17 nt, Homo sapiens
ugaaucuuggugucuac

SEQ ID NO: 267293 - RNA, 16 nt, Homo sapiens
ugaaugagcaaaacca

SEQ ID NO: 267294 - RNA, 15 nt, Homo sapiens
ugaaugaugccauga

SEQ ID NO: 267295 - RNA, 15 nt, Homo sapiens
ugaaugccacucugu

SEQ ID NO: 267296 - RNA, 16 nt, Homo sapiens
ugaaugccacucugua

SEQ ID NO: 267297 - RNA, 16 nt, Homo sapiens
ugaaugcugggacuca

SEQ ID NO: 267298 - RNA, 17 nt, Homo sapiens
ugaauuguaaggaauga

SEQ ID NO: 267299 - RNA, 21 nt, Homo sapiens
ugaauuuaggugauaccuaaa

SEQ ID NO: 267300 - RNA, 16 nt, Homo sapiens
ugaauuuuggcugugu

SEQ ID NO: 267301 - RNA, 17 nt, Homo sapiens
ugaauuuuggcuguguc

SEQ ID NO: 267302 - RNA, 12 nt, Homo sapiens
ugacaaccucuu

SEQ ID NO: 267303 - RNA, 19 nt, Homo sapiens
ugacaaccugaauuaucua

SEQ ID NO: 267304 - RNA, 13 nt, Homo sapiens
ugacacacagcuc

SEQ ID NO: 267305 - RNA, 14 nt, Homo sapiens
ugacacaugcugaa

SEQ ID NO: 267306 - RNA, 14 nt, Homo sapiens
ugacaccuuucaua

SEQ ID NO: 267307 - RNA, 20 nt, Homo sapiens
ugacacucuagucaaagccu

SEQ ID NO: 267308 - RNA, 17 nt, Homo sapiens
ugacacuuuucaugugu

SEQ ID NO: 267309 - RNA, 15 nt, Homo sapiens
ugacagagagaggca

SEQ ID NO: 267310 - RNA, 12 nt, Homo sapiens
ugacagccuccc

SEQ ID NO: 267311 - RNA, 14 nt, Homo sapiens
ugacaggcaaugcu

SEQ ID NO: 267312 - RNA, 16 nt, Homo sapiens
ugacauaagugcuauu

SEQ ID NO: 267313 - RNA, 16 nt, Homo sapiens
ugacauacauccaaca

SEQ ID NO: 267314 - RNA, 14 nt, Homo sapiens
ugacauccaagcuu

SEQ ID NO: 267315 - RNA, 16 nt, Homo sapiens
ugacaucucugcaauc

SEQ ID NO: 267316 - RNA, 14 nt, Homo sapiens
ugacauuauaugca

SEQ ID NO: 267317 - RNA, 13 nt, Homo sapiens
ugacauugacuau

SEQ ID NO: 267318 - RNA, 18 nt, Homo sapiens
ugacauugcaccuggaug

SEQ ID NO: 267319 - RNA, 14 nt, Homo sapiens
ugacauuguuggcc

SEQ ID NO: 267320 - RNA, 20 nt, Homo sapiens
ugaccaaaacaaacaaacag

SEQ ID NO: 267321 - RNA, 22 nt, Homo sapiens
ugaccaggcauccuccacaaua

SEQ ID NO: 267322 - RNA, 16 nt, Homo sapiens
ugaccaguuguugaua

SEQ ID NO: 267323 - RNA, 19 nt, Homo sapiens
ugacccuggucaccagagg

SEQ ID NO: 267324 - RNA, 22 nt, Homo sapiens
ugaccucuauaauugccacuga

SEQ ID NO: 267325 - RNA, 23 nt, Homo sapiens
ugaccucuauaauugccacugag

SEQ ID NO: 267326 - RNA, 16 nt, Homo sapiens
ugaccugccaggcaca

SEQ ID NO: 267327 - RNA, 21 nt, Homo sapiens
ugaccugccaggcacacugag

SEQ ID NO: 267328 - RNA, 19 nt, Homo sapiens
ugaccuugaaugaugccau

SEQ ID NO: 267329 - RNA, 20 nt, Homo sapiens
ugaccuugcacaaacagccc

SEQ ID NO: 267330 - RNA, 17 nt, Homo sapiens
ugacuauggcuaccaaa

SEQ ID NO: 267331 - RNA, 16 nt, Homo sapiens
ugacucucagcagcua

SEQ ID NO: 267332 - RNA, 14 nt, Homo sapiens
ugaccuugcugaug

SEQ ID NO: 267333 - RNA, 20 nt, Homo sapiens
ugaccuugcugauggugaca

SEQ ID NO: 267334 - RNA, 22 nt, Homo sapiens
ugaccuugcugauggugacauu

SEQ ID NO: 267335 - RNA, 15 nt, Homo sapiens
ugacuaagagucucc

SEQ ID NO: 267336 - RNA, 19 nt, Homo sapiens
ugacuauggcuaccaaaaa

SEQ ID NO: 267337 - RNA, 22 nt, Homo sapiens
ugacucaagacuuccagagccu

SEQ ID NO: 267338 - RNA, 16 nt, Homo sapiens
ugacucacuuauccca

SEQ ID NO: 267339 - RNA, 14 nt, Homo sapiens
ugacucuccagaaa

SEQ ID NO: 267340 - RNA, 20 nt, Homo sapiens
ugacucuccagaaagcucau

SEQ ID NO: 267341 - RNA, 14 nt, Homo sapiens
ugacucuggaacca

SEQ ID NO: 267342 - RNA, 14 nt, Homo sapiens
ugacucuuggcaca

SEQ ID NO: 267343 - RNA, 12 nt, Homo sapiens
ugacucuugggg

SEQ ID NO: 267344 - RNA, 15 nt, Homo sapiens
ugacuguguggagcu

SEQ ID NO: 267345 - RNA, 14 nt, Homo sapiens
ugagaaaaugucuu

SEQ ID NO: 267346 - RNA, 18 nt, Homo sapiens
ugagaaagagcacuuaag

SEQ ID NO: 267347 - RNA, 18 nt, Homo sapiens
ugagaaaugccagugugc

SEQ ID NO: 267348 - RNA, 16 nt, Homo sapiens
ugagacagcacagcca

SEQ ID NO: 267349 - RNA, 15 nt, Homo sapiens
ugagaccaaccuggg

SEQ ID NO: 267350 - RNA, 16 nt, Homo sapiens
ugagacccugucucaa

SEQ ID NO: 267351 - RNA, 17 nt, Homo sapiens
ugagacucugucucaaa

SEQ ID NO: 267352 - RNA, 13 nt, Homo sapiens
ugagacuguguug

SEQ ID NO: 267353 - RNA, 21 nt, Homo sapiens
ugagacuuacuucucugcuau

SEQ ID NO: 267354 - RNA, 22 nt, Homo sapiens
ugagacuuugaggguguauauu

SEQ ID NO: 267355 - RNA, 19 nt, Homo sapiens
ugagaggagagagacucca

SEQ ID NO: 267356 - RNA, 19 nt, Homo sapiens
ugagaggccacagugcaau

SEQ ID NO: 267357 - RNA, 18 nt, Homo sapiens
ugagaggggaacagacug

SEQ ID NO: 267358 - RNA, 15 nt, Homo sapiens
ugagaucauugugaa

SEQ ID NO: 267359 - RNA, 11 nt, Homo sapiens
ugagauuccag

SEQ ID NO: 267360 - RNA, 14 nt, Homo sapiens
ugagcaaaaccaaa

SEQ ID NO: 267361 - RNA, 21 nt, Homo sapiens
ugagcaaaaccaaauauucca

SEQ ID NO: 267362 - RNA, 22 nt, Homo sapiens
ugagcaauccugcaagaacaag

SEQ ID NO: 267363 - RNA, 15 nt, Homo sapiens
ugagcagguguucuu

SEQ ID NO: 267364 - RNA, 23 nt, Homo sapiens
ugagcagguguucuucauuaccu

SEQ ID NO: 267365 - RNA, 20 nt, Homo sapiens
ugagcauuuagacucucgac

SEQ ID NO: 267366 - RNA, 15 nt, Homo sapiens
ugagccacagcacuc

SEQ ID NO: 267367 - RNA, 13 nt, Homo sapiens
ugagccacugcac

SEQ ID NO: 267368 - RNA, 21 nt, Homo sapiens
ugagcuggcgggauugaagga

SEQ ID NO: 267369 - RNA, 20 nt, Homo sapiens
ugagcuggggaugucucuca

SEQ ID NO: 267370 - RNA, 22 nt, Homo sapiens
ugagcuggggaugucucucaug

SEQ ID NO: 267371 - RNA, 21 nt, Homo sapiens
ugagcuuaagaauuuugagca

SEQ ID NO: 267372 - RNA, 17 nt, Homo sapiens
ugaggaaacugcacugu

SEQ ID NO: 267373 - RNA, 15 nt, Homo sapiens
ugaggacugauuuca

SEQ ID NO: 267374 - RNA, 16 nt, Homo sapiens
ugaggaugcagaguca

SEQ ID NO: 267375 - RNA, 18 nt, Homo sapiens
ugaggaugcagagucagc

SEQ ID NO: 267376 - RNA, 17 nt, Homo sapiens
ugaggcaaccacaggca

SEQ ID NO: 267377 - RNA, 20 nt, Homo sapiens
ugaggcaaccacaggcagca

SEQ ID NO: 267378 - RNA, 18 nt, Homo sapiens
ugaggcaauuagacacuu

SEQ ID NO: 267379 - RNA, 22 nt, Homo sapiens
ugaggcagacagcagcucaggc

SEQ ID NO: 267380 - RNA, 22 nt, Homo sapiens
ugaggcaggagggcaugugcag

SEQ ID NO: 267381 - RNA, 15 nt, Homo sapiens
ugaggcagggucuca

SEQ ID NO: 267382 - RNA, 14 nt, Homo sapiens
ugaggcuccacuug

SEQ ID NO: 267383 - RNA, 15 nt, Homo sapiens
ugaggcugggcuccc

SEQ ID NO: 267384 - RNA, 19 nt, Homo sapiens
ugagggagccuggccccau

SEQ ID NO: 267385 - RNA, 16 nt, Homo sapiens
ugaggggcucucucau

SEQ ID NO: 267386 - RNA, 18 nt, Homo sapiens
ugaggggcucucucauga

SEQ ID NO: 267387 - RNA, 20 nt, Homo sapiens
ugagggugacuauggagcug

SEQ ID NO: 267388 - RNA, 12 nt, Homo sapiens
ugaggguguaua

SEQ ID NO: 267389 - RNA, 15 nt, Homo sapiens
ugaggguuaaugaaa

SEQ ID NO: 267390 - RNA, 17 nt, Homo sapiens
ugaggucucuguggcag

SEQ ID NO: 267391 - RNA, 17 nt, Homo sapiens
ugaguacguugugcauu

SEQ ID NO: 267392 - RNA, 18 nt, Homo sapiens
ugaguacguugugcauuu

SEQ ID NO: 267393 - RNA, 16 nt, Homo sapiens
ugaguacuacaguccu

SEQ ID NO: 267394 - RNA, 19 nt, Homo sapiens
ugaguacuacaguccuccc

SEQ ID NO: 267395 - RNA, 19 nt, Homo sapiens
ugagucccagagccaauca

SEQ ID NO: 267396 - RNA, 15 nt, Homo sapiens
ugaguccuggcaugg

SEQ ID NO: 267397 - RNA, 14 nt, Homo sapiens
ugagucgaggacag

SEQ ID NO: 267398 - RNA, 14 nt, Homo sapiens
ugagucugugccac

SEQ ID NO: 267399 - RNA, 17 nt, Homo sapiens
ugagugaaucaccugug

SEQ ID NO: 267400 - RNA, 12 nt, Homo sapiens
ugaguggaguua

SEQ ID NO: 267401 - RNA, 17 nt, Homo sapiens
ugaguguugcucucuag

SEQ ID NO: 267402 - RNA, 19 nt, Homo sapiens
ugaguuacuaucaugucaa

SEQ ID NO: 267403 - RNA, 19 nt, Homo sapiens
ugaguuaggcugagccaca

SEQ ID NO: 267404 - RNA, 15 nt, Homo sapiens
ugaguuugugcuggu

SEQ ID NO: 267405 - RNA, 17 nt, Homo sapiens
ugauaagcugagcuccu

SEQ ID NO: 267406 - RNA, 19 nt, Homo sapiens
ugauacauuuuuguacuaa

SEQ ID NO: 267407 - RNA, 17 nt, Homo sapiens
ugauacuuugacagugu

SEQ ID NO: 267408 - RNA, 18 nt, Homo sapiens
ugauacuuugacaguguu

SEQ ID NO: 267409 - RNA, 16 nt, Homo sapiens
ugauagaguguuauca

SEQ ID NO: 267410 - RNA, 17 nt, Homo sapiens
ugauagauccagaugag

SEQ ID NO: 267411 - RNA, 15 nt, Homo sapiens
ugauagucaucauca

SEQ ID NO: 267412 - RNA, 18 nt, Homo sapiens
ugauaucccccagccuca

SEQ ID NO: 267413 - RNA, 19 nt, Homo sapiens
ugauauguucaacuggaga

SEQ ID NO: 267414 - RNA, 20 nt, Homo sapiens
ugauauguugguagauucua

SEQ ID NO: 267415 - RNA, 12 nt, Homo sapiens
ugauauugcagc

SEQ ID NO: 267416 - RNA, 13 nt, Homo sapiens
ugauauugcagcu

SEQ ID NO: 267417 - RNA, 15 nt, Homo sapiens
ugauauugcagcuua

SEQ ID NO: 267418 - RNA, 19 nt, Homo sapiens
ugaucacggcucacugcag

SEQ ID NO: 267419 - RNA, 14 nt, Homo sapiens
ugaucagacauuca

SEQ ID NO: 267420 - RNA, 20 nt, Homo sapiens
ugaucagcgccgcaccagcc

SEQ ID NO: 267421 - RNA, 18 nt, Homo sapiens
ugaucaguaugaaaaugu

SEQ ID NO: 267422 - RNA, 17 nt, Homo sapiens
ugauccacccaccucag

SEQ ID NO: 267423 - RNA, 16 nt, Homo sapiens
ugauccacuucucuca

SEQ ID NO: 267424 - RNA, 17 nt, Homo sapiens
ugauccacuucucucag

SEQ ID NO: 267425 - RNA, 18 nt, Homo sapiens
ugaucccuucuuacuuaa

SEQ ID NO: 267426 - RNA, 18 nt, Homo sapiens
ugauccuaaugaaugcau

SEQ ID NO: 267427 - RNA, 23 nt, Homo sapiens
ugaucggagccuccucucucaaa

SEQ ID NO: 267428 - RNA, 12 nt, Homo sapiens
ugaucugaugca

SEQ ID NO: 267429 - RNA, 18 nt, Homo sapiens
ugaugaaauguaaauacu

SEQ ID NO: 267430 - RNA, 18 nt, Homo sapiens
ugaugauagucaucauca

SEQ ID NO: 267431 - RNA, 17 nt, Homo sapiens
ugaugaucgucaucauc

SEQ ID NO: 267432 - RNA, 20 nt, Homo sapiens
ugaugcaagcaagaaacacu

SEQ ID NO: 267433 - RNA, 21 nt, Homo sapiens
ugaugccaugggcccucucag

SEQ ID NO: 267434 - RNA, 23 nt, Homo sapiens
ugaugcuacccgagguuugcaaa

SEQ ID NO: 267435 - RNA, 21 nt, Homo sapiens
ugauggagauauuuacaugaa

SEQ ID NO: 267436 - RNA, 17 nt, Homo sapiens
ugaugucguuugaauca

SEQ ID NO: 267437 - RNA, 18 nt, Homo sapiens
ugauguggcaacugcuga

SEQ ID NO: 267438 - RNA, 20 nt, Homo sapiens
ugauuagccucgucuuucag

SEQ ID NO: 267439 - RNA, 15 nt, Homo sapiens
ugauuaugaauacag

SEQ ID NO: 267440 - RNA, 15 nt, Homo sapiens
ugauucacaguguga

SEQ ID NO: 267441 - RNA, 16 nt, Homo sapiens
ugauucagacagcugc

SEQ ID NO: 267442 - RNA, 22 nt, Homo sapiens
ugauucuccugccucagccucc

SEQ ID NO: 267443 - RNA, 16 nt, Homo sapiens
ugauucugucaauguc

SEQ ID NO: 267444 - RNA, 21 nt, Homo sapiens
ugauucuuuugcccacacuug

SEQ ID NO: 267445 - RNA, 14 nt, Homo sapiens
ugauugcuggcaac

SEQ ID NO: 267446 - RNA, 21 nt, Homo sapiens
ugauuuacagacugaugccag

SEQ ID NO: 267447 - RNA, 15 nt, Homo sapiens
ugauuucacagugug

SEQ ID NO: 267448 - RNA, 22 nt, Homo sapiens
ugauuucagcaccuacagugua

SEQ ID NO: 267449 - RNA, 22 nt, Homo sapiens
ugcaaaaggacucucaggacca

SEQ ID NO: 267450 - RNA, 20 nt, Homo sapiens
ugcaaaaguucugacuugac

SEQ ID NO: 267451 - RNA, 14 nt, Homo sapiens
ugcaaaccauccca

SEQ ID NO: 267452 - RNA, 21 nt, Homo sapiens
ugcaaauccuugauacugcuc

SEQ ID NO: 267453 - RNA, 12 nt, Homo sapiens
ugcaacacccuc

SEQ ID NO: 267454 - RNA, 13 nt, Homo sapiens
ugcaacuuguaaa

SEQ ID NO: 267455 - RNA, 22 nt, Homo sapiens
ugcaagaauugaagcaggacua

SEQ ID NO: 267456 - RNA, 19 nt, Homo sapiens
ugcaagcaagaaacacugg

SEQ ID NO: 267457 - RNA, 15 nt, Homo sapiens
ugcaagcacaucugc

SEQ ID NO: 267458 - RNA, 19 nt, Homo sapiens
ugcaagcacaucugcauuu

SEQ ID NO: 267459 - RNA, 22 nt, Homo sapiens
ugcaagguacucuggugaguca

SEQ ID NO: 267460 - RNA, 13 nt, Homo sapiens
ugcaaggucauuu

SEQ ID NO: 267461 - RNA, 21 nt, Homo sapiens
ugcaauagaauaaaaaugaca

SEQ ID NO: 267462 - RNA, 18 nt, Homo sapiens
ugcaauaggugugcguca

SEQ ID NO: 267463 - RNA, 21 nt, Homo sapiens
ugcaaucuucucagaaggcaa

SEQ ID NO: 267464 - RNA, 18 nt, Homo sapiens
ugcaaugacacagucuug

SEQ ID NO: 267465 - RNA, 15 nt, Homo sapiens
ugcacaaaccaauua

SEQ ID NO: 267466 - RNA, 13 nt, Homo sapiens
ugcacacaccaga

SEQ ID NO: 267467 - RNA, 15 nt, Homo sapiens
ugcacacguccaugu

SEQ ID NO: 267468 - RNA, 13 nt, Homo sapiens
ugcacacuuugcc

SEQ ID NO: 267469 - RNA, 17 nt, Homo sapiens
ugcacagcuaacaugga

SEQ ID NO: 267470 - RNA, 14 nt, Homo sapiens
ugcaccaccaagcc

SEQ ID NO: 267471 - RNA, 17 nt, Homo sapiens
ugcaccaccaagccaag

SEQ ID NO: 267472 - RNA, 14 nt, Homo sapiens
ugcaccacugcacu

SEQ ID NO: 267473 - RNA, 17 nt, Homo sapiens
ugcaccacuucaaguga

SEQ ID NO: 267474 - RNA, 13 nt, Homo sapiens
ugcacccaugugu

SEQ ID NO: 267475 - RNA, 20 nt, Homo sapiens
ugcaccccaggcagccacuc

SEQ ID NO: 267476 - RNA, 14 nt, Homo sapiens
ugcaccuggaugua

SEQ ID NO: 267477 - RNA, 18 nt, Homo sapiens
ugcuuauccuuccacgga

SEQ ID NO: 267478 - RNA, 19 nt, Homo sapiens
ugcuucaaaaacauucuua

SEQ ID NO: 267479 - RNA, 13 nt, Homo sapiens
ugcuucagccucc

SEQ ID NO: 267480 - RNA, 16 nt, Homo sapiens
ugcuucgcagaugucc

SEQ ID NO: 267481 - RNA, 23 nt, Homo sapiens
ugcuucuuugaaacuuguaugaa

SEQ ID NO: 267482 - RNA, 16 nt, Homo sapiens
ugcuugagcucaggag

SEQ ID NO: 267483 - RNA, 17 nt, Homo sapiens
ugcuugcacaaaccaau

SEQ ID NO: 267484 - RNA, 12 nt, Homo sapiens
ugcuuggaugua

SEQ ID NO: 267485 - RNA, 12 nt, Homo sapiens
ugcuuguucccu

SEQ ID NO: 267486 - RNA, 23 nt, Homo sapiens
ugcuuucuucauguucagucaca

SEQ ID NO: 267487 - RNA, 21 nt, Homo sapiens
ugcacuguucccccugugcag

SEQ ID NO: 267488 - RNA, 21 nt, Homo sapiens
ugcagaaagaccgugugugaa

SEQ ID NO: 267489 - RNA, 13 nt, Homo sapiens
ugcagacacucaa

SEQ ID NO: 267490 - RNA, 14 nt, Homo sapiens
ugcagacaugaccc

SEQ ID NO: 267491 - RNA, 15 nt, Homo sapiens
ugcagccacuguuaa

SEQ ID NO: 267492 - RNA, 20 nt, Homo sapiens
ugcagccacuguuaagccau

SEQ ID NO: 267493 - RNA, 13 nt, Homo sapiens
ugcagccacuuuc

SEQ ID NO: 267494 - RNA, 20 nt, Homo sapiens
ugcagccacuuucugccagc

SEQ ID NO: 267495 - RNA, 17 nt, Homo sapiens
ugcagccucgaccuccc

SEQ ID NO: 267496 - RNA, 17 nt, Homo sapiens
ugcagccuuugccuccc

SEQ ID NO: 267497 - RNA, 23 nt, Homo sapiens
ugcagcucuggagguacgaaaag

SEQ ID NO: 267498 - RNA, 16 nt, Homo sapiens
ugcagcugagauucca

SEQ ID NO: 267499 - RNA, 19 nt, Homo sapiens
ugcaggaccucgugccacc

SEQ ID NO: 267500 - RNA, 13 nt, Homo sapiens
ugcagugcuucca

SEQ ID NO: 267501 - RNA, 18 nt, Homo sapiens
ugcagugguaugaucacg

SEQ ID NO: 267502 - RNA, 23 nt, Homo sapiens
ugcagugguaugaucacggcuca

SEQ ID NO: 267503 - RNA, 14 nt, Homo sapiens
ugcaguugcucagg

SEQ ID NO: 267504 - RNA, 17 nt, Homo sapiens
ugcaguugcucaggaca

SEQ ID NO: 267505 - RNA, 21 nt, Homo sapiens
ugcaguuuugccuaauggcaa

SEQ ID NO: 267506 - RNA, 20 nt, Homo sapiens
ugcaguuuuuuucuugucua

SEQ ID NO: 267507 - RNA, 22 nt, Homo sapiens
ugcauaaaugcgauccacagaa

SEQ ID NO: 267508 - RNA, 16 nt, Homo sapiens
ugcauaagugcaugac

SEQ ID NO: 267509 - RNA, 20 nt, Homo sapiens
ugcauaagugcaugacauau

SEQ ID NO: 267510 - RNA, 22 nt, Homo sapiens
ugcauaauguuucuggauuuca

SEQ ID NO: 267511 - RNA, 16 nt, Homo sapiens
ugcauacacacacaca

SEQ ID NO: 267512 - RNA, 23 nt, Homo sapiens
ugcauaccacuuuuguucuuggu

SEQ ID NO: 267513 - RNA, 22 nt, Homo sapiens
ugcauaggugaucucauuuaau

SEQ ID NO: 267514 - RNA, 20 nt, Homo sapiens
ugcauauccaacaugugcuc

SEQ ID NO: 267515 - RNA, 21 nt, Homo sapiens
ugcauauccaacaugugcuca

SEQ ID NO: 267516 - RNA, 15 nt, Homo sapiens
ugcauauucuuaugu

SEQ ID NO: 267517 - RNA, 18 nt, Homo sapiens
ugcaucuuucucuuccca

SEQ ID NO: 267518 - RNA, 22 nt, Homo sapiens
ugcaucuuucucuucccaugca

SEQ ID NO: 267519 - RNA, 17 nt, Homo sapiens
ugcaugaaguaauaugc

SEQ ID NO: 267520 - RNA, 18 nt, Homo sapiens
ugcaugaaguaauaugca

SEQ ID NO: 267521 - RNA, 16 nt, Homo sapiens
ugcaugcagcaucuaa

SEQ ID NO: 267522 - RNA, 13 nt, Homo sapiens
ugcaugugugaag

SEQ ID NO: 267523 - RNA, 21 nt, Homo sapiens
ugcauguuacauaagauaaau

SEQ ID NO: 267524 - RNA, 13 nt, Homo sapiens
ugcauucauguac

SEQ ID NO: 267525 - RNA, 21 nt, Homo sapiens
ugcauucauguacuacccuca

SEQ ID NO: 267526 - RNA, 15 nt, Homo sapiens
ugcauuccagcgucu

SEQ ID NO: 267527 - RNA, 23 nt, Homo sapiens
ugcauucugagguaaccucauua

SEQ ID NO: 267528 - RNA, 12 nt, Homo sapiens
ugcauugcucuu

SEQ ID NO: 267529 - RNA, 16 nt, Homo sapiens
ugcauugugaggguua

SEQ ID NO: 267530 - RNA, 13 nt, Homo sapiens
ugcauuuauagca

SEQ ID NO: 267531 - RNA, 21 nt, Homo sapiens
ugcauuugugcccacucucca

SEQ ID NO: 267532 - RNA, 13 nt, Homo sapiens
ugccaaccagagc

SEQ ID NO: 267533 - RNA, 12 nt, Homo sapiens
ugccacagugug

SEQ ID NO: 267534 - RNA, 19 nt, Homo sapiens
ugccaccacgucuggcuaa

SEQ ID NO: 267535 - RNA, 14 nt, Homo sapiens
ugccacugccuucg

SEQ ID NO: 267536 - RNA, 18 nt, Homo sapiens
ugccacuuaauguauguu

SEQ ID NO: 267537 - RNA, 12 nt, Homo sapiens
ugccagacaugu

SEQ ID NO: 267538 - RNA, 14 nt, Homo sapiens
ugccagacaugugg

SEQ ID NO: 267539 - RNA, 13 nt, Homo sapiens
ugccagcaucugc

SEQ ID NO: 267540 - RNA, 20 nt, Homo sapiens
ugccagcaucugcagccacu

SEQ ID NO: 267541 - RNA, 21 nt, Homo sapiens
ugccagcauuuagacccugca

SEQ ID NO: 267542 - RNA, 16 nt, Homo sapiens
ugccagccacugugau

SEQ ID NO: 267543 - RNA, 16 nt, Homo sapiens
ugccagcuuaucucag

SEQ ID NO: 267544 - RNA, 16 nt, Homo sapiens
ugccaggaagccagca

SEQ ID NO: 267545 - RNA, 15 nt, Homo sapiens
ugccaggccuggcaa

SEQ ID NO: 267546 - RNA, 14 nt, Homo sapiens
ugccagggccaguc

SEQ ID NO: 267547 - RNA, 11 nt, Homo sapiens
ugccaggggag

SEQ ID NO: 267548 - RNA, 16 nt, Homo sapiens
ugccauaaaacauuaa

SEQ ID NO: 267549 - RNA, 14 nt, Homo sapiens
ugccauagcaagau

SEQ ID NO: 267550 - RNA, 18 nt, Homo sapiens
ugccauauucuguuggcc

SEQ ID NO: 267551 - RNA, 23 nt, Homo sapiens
ugccauccucccaaggggcccaa

SEQ ID NO: 267552 - RNA, 15 nt, Homo sapiens
ugccaugccagcuua

SEQ ID NO: 267553 - RNA, 23 nt, Homo sapiens
ugccaugccagcuuaucucaggg

SEQ ID NO: 267554 - RNA, 23 nt, Homo sapiens
ugcccaauaagcagaagccauaa

SEQ ID NO: 267555 - RNA, 22 nt, Homo sapiens
ugcccacacuugggagcaaaag

SEQ ID NO: 267556 - RNA, 20 nt, Homo sapiens
ugcccacgcuggagugcagu

SEQ ID NO: 267557 - RNA, 19 nt, Homo sapiens
ugcccacugaacaugcuca

SEQ ID NO: 267558 - RNA, 19 nt, Homo sapiens
ugcccaggaaccucagggc

SEQ ID NO: 267559 - RNA, 20 nt, Homo sapiens
ugcccaggcuggaguggagu

SEQ ID NO: 267560 - RNA, 20 nt, Homo sapiens
ugcccaggcuggcgugcagu

SEQ ID NO: 267561 - RNA, 16 nt, Homo sapiens
ugcccagugaccaguc

SEQ ID NO: 267562 - RNA, 18 nt, Homo sapiens
ugcccagugaccagucac

SEQ ID NO: 267563 - RNA, 19 nt, Homo sapiens
ugcccagugagacuguguu

SEQ ID NO: 267564 - RNA, 21 nt, Homo sapiens
ugcccagugagacuguguugu

SEQ ID NO: 267565 - RNA, 13 nt, Homo sapiens
ugcccagugccau

SEQ ID NO: 267566 - RNA, 12 nt, Homo sapiens
ugcccagugugu

SEQ ID NO: 267567 - RNA, 21 nt, Homo sapiens
ugccccaucacugcgccacug

SEQ ID NO: 267568 - RNA, 17 nt, Homo sapiens
ugcccccaauccaugaa

SEQ ID NO: 267569 - RNA, 13 nt, Homo sapiens
ugcccgagguucc

SEQ ID NO: 267570 - RNA, 15 nt, Homo sapiens
ugcccgggagcucag

SEQ ID NO: 267571 - RNA, 17 nt, Homo sapiens
ugcccuccaagaccuuc

SEQ ID NO: 267572 - RNA, 12 nt, Homo sapiens
ugcccucuccca

SEQ ID NO: 267573 - RNA, 12 nt, Homo sapiens
ugcccugcauuc

SEQ ID NO: 267574 - RNA, 15 nt, Homo sapiens
ugcccugcauucaca

SEQ ID NO: 267575 - RNA, 12 nt, Homo sapiens
ugccgcauuugg

SEQ ID NO: 267576 - RNA, 18 nt, Homo sapiens
ugccgucuaccugagggg

SEQ ID NO: 267577 - RNA, 22 nt, Homo sapiens
ugccuacgaauagccacugcau

SEQ ID NO: 267578 - RNA, 22 nt, Homo sapiens
ugccucagccucccaaagugcu

SEQ ID NO: 267579 - RNA, 17 nt, Homo sapiens
ugccucaucacugcucc

SEQ ID NO: 267580 - RNA, 22 nt, Homo sapiens
ugccucauuaccuugugcuaau

SEQ ID NO: 267581 - RNA, 23 nt, Homo sapiens
ugccuccucagcagccucacugc

SEQ ID NO: 267582 - RNA, 18 nt, Homo sapiens
ugccucgaacuggcugca

SEQ ID NO: 267583 - RNA, 18 nt, Homo sapiens
ugccucugacacacagcu

SEQ ID NO: 267584 - RNA, 17 nt, Homo sapiens
ugccucugccucugaca

SEQ ID NO: 267585 - RNA, 15 nt, Homo sapiens
ugccucuguauuuaa

SEQ ID NO: 267586 - RNA, 15 nt, Homo sapiens
ugccugaagucacac

SEQ ID NO: 267587 - RNA, 13 nt, Homo sapiens
ugccugacauuug

SEQ ID NO: 267588 - RNA, 22 nt, Homo sapiens
ugccugcggaguugugcacgua

SEQ ID NO: 267589 - RNA, 15 nt, Homo sapiens
ugccuucaccuccuc

SEQ ID NO: 267590 - RNA, 18 nt, Homo sapiens
ugccuucuccagacaaac

SEQ ID NO: 267591 - RNA, 15 nt, Homo sapiens
ugcgacccaagaccc

SEQ ID NO: 267592 - RNA, 17 nt, Homo sapiens
ugcgaucuggguucacu

SEQ ID NO: 267593 - RNA, 21 nt, Homo sapiens
ugcgaucuggguucacugcaa

SEQ ID NO: 267594 - RNA, 16 nt, Homo sapiens
ugcggaguugugcacg

SEQ ID NO: 267595 - RNA, 18 nt, Homo sapiens
ugcggccuuuggcuucac

SEQ ID NO: 267596 - RNA, 16 nt, Homo sapiens
ugcgucucauacucac

SEQ ID NO: 267597 - RNA, 16 nt, Homo sapiens
ugcuaaauaaacaaca

SEQ ID NO: 267598 - RNA, 22 nt, Homo sapiens
ugcuaauccucuuuuucuaguc

SEQ ID NO: 267599 - RNA, 17 nt, Homo sapiens
ugcuaccaaaacaguua

SEQ ID NO: 267600 - RNA, 17 nt, Homo sapiens
ugcuaccucacuggggu

SEQ ID NO: 267601 - RNA, 15 nt, Homo sapiens
ugcuagaacucccuu

SEQ ID NO: 267602 - RNA, 17 nt, Homo sapiens
ugcuauaacuauguuga

SEQ ID NO: 267603 - RNA, 19 nt, Homo sapiens
ugcuauagagccuaccugu

SEQ ID NO: 267604 - RNA, 21 nt, Homo sapiens
ugcuauuguagagccagaggu

SEQ ID NO: 267605 - RNA, 18 nt, Homo sapiens
ugcucaaucccugaggac

SEQ ID NO: 267606 - RNA, 22 nt, Homo sapiens
ugcucacgucaaaugcauacaa

SEQ ID NO: 267607 - RNA, 13 nt, Homo sapiens
ugcucacugcuca

SEQ ID NO: 267608 - RNA, 14 nt, Homo sapiens
ugcucacugcucac

SEQ ID NO: 267609 - RNA, 15 nt, Homo sapiens
ugcucacugcucaca

SEQ ID NO: 267610 - RNA, 16 nt, Homo sapiens
ugcucacuggcuuuag

SEQ ID NO: 267611 - RNA, 22 nt, Homo sapiens
ugcucagggaauaauccagaaa

SEQ ID NO: 267612 - RNA, 16 nt, Homo sapiens
ugcucaugguccccau

SEQ ID NO: 267613 - RNA, 14 nt, Homo sapiens
ugcucauguguaca

SEQ ID NO: 267614 - RNA, 15 nt, Homo sapiens
ugcuccuugccucug

SEQ ID NO: 267615 - RNA, 23 nt, Homo sapiens
ugcucucgggugcccugcauuca

SEQ ID NO: 267616 - RNA, 18 nt, Homo sapiens
ugcucugugcacucacgc

SEQ ID NO: 267617 - RNA, 17 nt, Homo sapiens
ugcucuuaaguugugga

SEQ ID NO: 267618 - RNA, 14 nt, Homo sapiens
ugcugaacaucaca

SEQ ID NO: 267619 - RNA, 15 nt, Homo sapiens
ugcugauguggcaac

SEQ ID NO: 267620 - RNA, 17 nt, Homo sapiens
ugcuggagucgggacua

SEQ ID NO: 267621 - RNA, 21 nt, Homo sapiens
ugcuggcaacaacagauucuc

SEQ ID NO: 267622 - RNA, 19 nt, Homo sapiens
ugggcccccaaauggaaau

SEQ ID NO: 267623 - RNA, 16 nt, Homo sapiens
ugggcuuagagcucuc

SEQ ID NO: 267624 - RNA, 11 nt, Homo sapiens
ugggcuucuag

SEQ ID NO: 267625 - RNA, 13 nt, Homo sapiens
ugggcuucuagaa

SEQ ID NO: 267626 - RNA, 14 nt, Homo sapiens
uggggaagacugug

SEQ ID NO: 267627 - RNA, 15 nt, Homo sapiens
uggggacacagcauc

SEQ ID NO: 267628 - RNA, 20 nt, Homo sapiens
uggggacacagcaucagcuc

SEQ ID NO: 267629 - RNA, 22 nt, Homo sapiens
uggggacagagcagaacuuuca

SEQ ID NO: 267630 - RNA, 19 nt, Homo sapiens
uggggaccagagcugccac

SEQ ID NO: 267631 - RNA, 15 nt, Homo sapiens
uggggaccucaggcc

SEQ ID NO: 267632 - RNA, 15 nt, Homo sapiens
uggggagaaaagaca

SEQ ID NO: 267633 - RNA, 18 nt, Homo sapiens
uggggagaaaagacauga

SEQ ID NO: 267634 - RNA, 19 nt, Homo sapiens
uggggagaaaagacaugaa

SEQ ID NO: 267635 - RNA, 22 nt, Homo sapiens
uggggagaaaagacaugaauau

SEQ ID NO: 267636 - RNA, 16 nt, Homo sapiens
uggggagaaaguacuu

SEQ ID NO: 267637 - RNA, 16 nt, Homo sapiens
uggggaggaguugucu

SEQ ID NO: 267638 - RNA, 19 nt, Homo sapiens
uggggaguaggacauacca

SEQ ID NO: 267639 - RNA, 15 nt, Homo sapiens
uggggauacuggcaa

SEQ ID NO: 267640 - RNA, 16 nt, Homo sapiens
uggggauaugauuuaa

SEQ ID NO: 267641 - RNA, 18 nt, Homo sapiens
uggggaugucucucauga

SEQ ID NO: 267642 - RNA, 13 nt, Homo sapiens
ugcuuacuuugca

SEQ ID NO: 267643 - RNA, 18 nt, Homo sapiens
ugcuucaaccccaugaga

SEQ ID NO: 267644 - RNA, 13 nt, Homo sapiens
ugcuuccagugga

SEQ ID NO: 267645 - RNA, 22 nt, Homo sapiens
ugcuucuaguucugccaggaga

SEQ ID NO: 267646 - RNA, 18 nt, Homo sapiens
ugcuucucuagcucucua

SEQ ID NO: 267647 - RNA, 19 nt, Homo sapiens
ugcuucuuaaaauagccau

SEQ ID NO: 267648 - RNA, 22 nt, Homo sapiens
ugcuucuuuccuuuccauugua

SEQ ID NO: 267649 - RNA, 16 nt, Homo sapiens
ugcuuguacauaaugc

SEQ ID NO: 267650 - RNA, 14 nt, Homo sapiens
ugcuuguuauuaga

SEQ ID NO: 267651 - RNA, 20 nt, Homo sapiens
ugcuuugaaugcauguguga

SEQ ID NO: 267652 - RNA, 19 nt, Homo sapiens
uggaaaacaguauuuucca

SEQ ID NO: 267653 - RNA, 17 nt, Homo sapiens
uggaaaggaaugcaaag

SEQ ID NO: 267654 - RNA, 18 nt, Homo sapiens
uggaaauagugauuucca

SEQ ID NO: 267655 - RNA, 14 nt, Homo sapiens
uggaacacuaauga

SEQ ID NO: 267656 - RNA, 13 nt, Homo sapiens
uggaaccagccca

SEQ ID NO: 267657 - RNA, 21 nt, Homo sapiens
uggaacuuuuauuacuggggu

SEQ ID NO: 267658 - RNA, 22 nt, Homo sapiens
uggaagaagccauugagcucuc

SEQ ID NO: 267659 - RNA, 11 nt, Homo sapiens
uggaagacagc

SEQ ID NO: 267660 - RNA, 16 nt, Homo sapiens
uggaagacagcucuua

SEQ ID NO: 267661 - RNA, 15 nt, Homo sapiens
uggaagauggcauaa

SEQ ID NO: 267662 - RNA, 12 nt, Homo sapiens
uggaagggucaa

SEQ ID NO: 267663 - RNA, 18 nt, Homo sapiens
uggaagugugggucugug

SEQ ID NO: 267664 - RNA, 21 nt, Homo sapiens
uggaaguguguguuucuugcu

SEQ ID NO: 267665 - RNA, 14 nt, Homo sapiens
uggaauaacaugua

SEQ ID NO: 267666 - RNA, 17 nt, Homo sapiens
uggaauaaggagaauga

SEQ ID NO: 267667 - RNA, 21 nt, Homo sapiens
uggaauauuguccauugucca

SEQ ID NO: 267668 - RNA, 13 nt, Homo sapiens
uggaauguaauca

SEQ ID NO: 267669 - RNA, 12 nt, Homo sapiens
uggacacagccc

SEQ ID NO: 267670 - RNA, 22 nt, Homo sapiens
uggacacuucacgcccuuggcc

SEQ ID NO: 267671 - RNA, 16 nt, Homo sapiens
uggacaugcacagcua

SEQ ID NO: 267672 - RNA, 17 nt, Homo sapiens
uggaccagccucuccac

SEQ ID NO: 267673 - RNA, 23 nt, Homo sapiens
uggaccauaaccccggaagccaa

SEQ ID NO: 267674 - RNA, 19 nt, Homo sapiens
uggacccugaggcccagag

SEQ ID NO: 267675 - RNA, 21 nt, Homo sapiens
uggacuauggcucuacuuuca

SEQ ID NO: 267676 - RNA, 20 nt, Homo sapiens
uggacucaagcaagauuuca

SEQ ID NO: 267677 - RNA, 19 nt, Homo sapiens
uggacuuccacugccaucc

SEQ ID NO: 267678 - RNA, 12 nt, Homo sapiens
uggacuuguccc

SEQ ID NO: 267679 - RNA, 20 nt, Homo sapiens
uggagaaggagaaccgugaa

SEQ ID NO: 267680 - RNA, 17 nt, Homo sapiens
uggagcaugugugcaaa

SEQ ID NO: 267681 - RNA, 17 nt, Homo sapiens
uggagcauugcagcucc

SEQ ID NO: 267682 - RNA, 22 nt, Homo sapiens
uggagguauucaauauccuuug

SEQ ID NO: 267683 - RNA, 19 nt, Homo sapiens
uggaguacuuugaagaugu

SEQ ID NO: 267684 - RNA, 18 nt, Homo sapiens
uggaguccgaugauucuc

SEQ ID NO: 267685 - RNA, 12 nt, Homo sapiens
uggaguggcaug

SEQ ID NO: 267686 - RNA, 16 nt, Homo sapiens
uggaucaucuauugcu

SEQ ID NO: 267687 - RNA, 17 nt, Homo sapiens
uggauccaaacccaucu

SEQ ID NO: 267688 - RNA, 19 nt, Homo sapiens
uggaucuccauucucucag

SEQ ID NO: 267689 - RNA, 14 nt, Homo sapiens
uggaugcagaucca

SEQ ID NO: 267690 - RNA, 20 nt, Homo sapiens
uggaugcagccucacagucc

SEQ ID NO: 267691 - RNA, 18 nt, Homo sapiens
uggaugcgacccaagacc

SEQ ID NO: 267692 - RNA, 22 nt, Homo sapiens
uggauguucugacccugcuuca

SEQ ID NO: 267693 - RNA, 20 nt, Homo sapiens
uggauuaaacuuaaucuaaa

SEQ ID NO: 267694 - RNA, 22 nt, Homo sapiens
uggauuuaaaagccugcucaau

SEQ ID NO: 267695 - RNA, 17 nt, Homo sapiens
uggauuucauacuguaa

SEQ ID NO: 267696 - RNA, 22 nt, Homo sapiens
uggauuugucuuuggugaacau

SEQ ID NO: 267697 - RNA, 18 nt, Homo sapiens
uggauuuuucuuuaacug

SEQ ID NO: 267698 - RNA, 14 nt, Homo sapiens
uggcaaaagaguca

SEQ ID NO: 267699 - RNA, 11 nt, Homo sapiens
uggcaaagaca

SEQ ID NO: 267700 - RNA, 19 nt, Homo sapiens
uggcaacaacagauucucu

SEQ ID NO: 267701 - RNA, 14 nt, Homo sapiens
uggcaacugcugau

SEQ ID NO: 267702 - RNA, 15 nt, Homo sapiens
uggcaaggugacauu

SEQ ID NO: 267703 - RNA, 15 nt, Homo sapiens
uggcacccaugcacc

SEQ ID NO: 267704 - RNA, 16 nt, Homo sapiens
uggcacccaugcaccu

SEQ ID NO: 267705 - RNA, 15 nt, Homo sapiens
uggcacguaagcucc

SEQ ID NO: 267706 - RNA, 15 nt, Homo sapiens
uggcacucagucucu

SEQ ID NO: 267707 - RNA, 17 nt, Homo sapiens
uggcacuuauaaccaaa

SEQ ID NO: 267708 - RNA, 19 nt, Homo sapiens
uggcagaguuacaguucug

SEQ ID NO: 267709 - RNA, 14 nt, Homo sapiens
uggcagccaguacc

SEQ ID NO: 267710 - RNA, 17 nt, Homo sapiens
uggcagccgugccuuca

SEQ ID NO: 267711 - RNA, 15 nt, Homo sapiens
uggcauaaccugucu

SEQ ID NO: 267712 - RNA, 17 nt, Homo sapiens
uggcauaaccugucuca

SEQ ID NO: 267713 - RNA, 18 nt, Homo sapiens
uggcaugggaaugaaugu

SEQ ID NO: 267714 - RNA, 16 nt, Homo sapiens
uggcauuacaauugca

SEQ ID NO: 267715 - RNA, 18 nt, Homo sapiens
uggcauuuuggcucagag

SEQ ID NO: 267716 - RNA, 22 nt, Homo sapiens
uggcauuuuggcucagagucca

SEQ ID NO: 267717 - RNA, 13 nt, Homo sapiens
uggccaaugagau

SEQ ID NO: 267718 - RNA, 21 nt, Homo sapiens
uggccaaugagaucauuguga

SEQ ID NO: 267719 - RNA, 14 nt, Homo sapiens
uggccagaagucaa

SEQ ID NO: 267720 - RNA, 17 nt, Homo sapiens
uggccaugggucccauu

SEQ ID NO: 267721 - RNA, 13 nt, Homo sapiens
uggcccaagacuc

SEQ ID NO: 267722 - RNA, 13 nt, Homo sapiens
uggcccacgcacu

SEQ ID NO: 267723 - RNA, 21 nt, Homo sapiens
uggcccgagagcugggacuca

SEQ ID NO: 267724 - RNA, 17 nt, Homo sapiens
uggccgagucagcacgu

SEQ ID NO: 267725 - RNA, 19 nt, Homo sapiens
uggccuaaaaaugcaacuu

SEQ ID NO: 267726 - RNA, 15 nt, Homo sapiens
uggccucccaacuca

SEQ ID NO: 267727 - RNA, 14 nt, Homo sapiens
uggccugcacuggu

SEQ ID NO: 267728 - RNA, 16 nt, Homo sapiens
uggccuggggcuucug

SEQ ID NO: 267729 - RNA, 22 nt, Homo sapiens
uggccuguucuucuauggguug

SEQ ID NO: 267730 - RNA, 12 nt, Homo sapiens
uggccuuucaua

SEQ ID NO: 267731 - RNA, 19 nt, Homo sapiens
uggcuaaaaccaucauagu

SEQ ID NO: 267732 - RNA, 14 nt, Homo sapiens
uggcuaaauucaug

SEQ ID NO: 267733 - RNA, 18 nt, Homo sapiens
uggcuaguaaaagccauc

SEQ ID NO: 267734 - RNA, 19 nt, Homo sapiens
uggcuagugguggguacuc

SEQ ID NO: 267735 - RNA, 17 nt, Homo sapiens
uggcuaucuacaaugug

SEQ ID NO: 267736 - RNA, 20 nt, Homo sapiens
uggcucagaguccaauguac

SEQ ID NO: 267737 - RNA, 12 nt, Homo sapiens
uggcucaucucu

SEQ ID NO: 267738 - RNA, 14 nt, Homo sapiens
uggcucaucucuuu

SEQ ID NO: 267739 - RNA, 16 nt, Homo sapiens
uggcugcccugcagaa

SEQ ID NO: 267740 - RNA, 15 nt, Homo sapiens
uggcuggaucuguga

SEQ ID NO: 267741 - RNA, 21 nt, Homo sapiens
uggcugggaauaagugccagg

SEQ ID NO: 267742 - RNA, 19 nt, Homo sapiens
uggcugggggccucagugc

SEQ ID NO: 267743 - RNA, 20 nt, Homo sapiens
uggcuguagaaggagacaga

SEQ ID NO: 267744 - RNA, 12 nt, Homo sapiens
uggcuguggcau

SEQ ID NO: 267745 - RNA, 17 nt, Homo sapiens
uggcuguguuugcagcc

SEQ ID NO: 267746 - RNA, 23 nt, Homo sapiens
uggcuuacuacaugugggagcuu

SEQ ID NO: 267747 - RNA, 21 nt, Homo sapiens
uggcuucacagaugugugauu

SEQ ID NO: 267748 - RNA, 15 nt, Homo sapiens
uggcuucuuuacuua

SEQ ID NO: 267749 - RNA, 22 nt, Homo sapiens
uggcuucuuuacuuaguucaag

SEQ ID NO: 267750 - RNA, 18 nt, Homo sapiens
uggcuugaagcugcucac

SEQ ID NO: 267751 - RNA, 16 nt, Homo sapiens
uggcuuggcauuuucu

SEQ ID NO: 267752 - RNA, 14 nt, Homo sapiens
uggcuuuugugcau

SEQ ID NO: 267753 - RNA, 15 nt, Homo sapiens
uggcuuuugugcauu

SEQ ID NO: 267754 - RNA, 13 nt, Homo sapiens
ugggaacuccuaa

SEQ ID NO: 267755 - RNA, 12 nt, Homo sapiens
ugggaagaugua

SEQ ID NO: 267756 - RNA, 18 nt, Homo sapiens
ugggaauaacauggugag

SEQ ID NO: 267757 - RNA, 16 nt, Homo sapiens
ugggacacccugugau

SEQ ID NO: 267758 - RNA, 18 nt, Homo sapiens
ugggacaugggaaagggg

SEQ ID NO: 267759 - RNA, 13 nt, Homo sapiens
ugggaccacagac

SEQ ID NO: 267760 - RNA, 14 nt, Homo sapiens
ugggacuacaggca

SEQ ID NO: 267761 - RNA, 15 nt, Homo sapiens
ugggagaaccaaaaa

SEQ ID NO: 267762 - RNA, 14 nt, Homo sapiens
ugggagacacugau

SEQ ID NO: 267763 - RNA, 18 nt, Homo sapiens
ugggagacugcugaguca

SEQ ID NO: 267764 - RNA, 14 nt, Homo sapiens
ugggagcacaggca

SEQ ID NO: 267765 - RNA, 18 nt, Homo sapiens
ugggagguggugucccuu

SEQ ID NO: 267766 - RNA, 15 nt, Homo sapiens
ugggauaucacuucc

SEQ ID NO: 267767 - RNA, 17 nt, Homo sapiens
ugggauaucacuuccau

SEQ ID NO: 267768 - RNA, 18 nt, Homo sapiens
uguccucacucucgccau

SEQ ID NO: 267769 - RNA, 17 nt, Homo sapiens
uguccuggucaguuuuc

SEQ ID NO: 267770 - RNA, 15 nt, Homo sapiens
uguccuguuacaaaa

SEQ ID NO: 267771 - RNA, 16 nt, Homo sapiens
ugucuacaccauuaug

SEQ ID NO: 267772 - RNA, 12 nt, Homo sapiens
ugucucauauga

SEQ ID NO: 267773 - RNA, 18 nt, Homo sapiens
ugucucuuuaaugucaca

SEQ ID NO: 267774 - RNA, 16 nt, Homo sapiens
ugucugacaaccucuu

SEQ ID NO: 267775 - RNA, 15 nt, Homo sapiens
ugucuuaaccuaccu

SEQ ID NO: 267776 - RNA, 23 nt, Homo sapiens
ugucuucuaaauuugaaauauaa

SEQ ID NO: 267777 - RNA, 22 nt, Homo sapiens
ugucuuggggugggcacaguac

SEQ ID NO: 267778 - RNA, 19 nt, Homo sapiens
ugucuuuauaaucuacucc

SEQ ID NO: 267779 - RNA, 10 nt, Homo sapiens
ugucuuuauu

SEQ ID NO: 267780 - RNA, 13 nt, Homo sapiens
ugucuuucacuga

SEQ ID NO: 267781 - RNA, 17 nt, Homo sapiens
ugucuuuccuauuugca

SEQ ID NO: 267782 - RNA, 18 nt, Homo sapiens
ugucuuuuuucacuacau

SEQ ID NO: 267783 - RNA, 23 nt, Homo sapiens
ugugaaacuggauuaaacuuaau

SEQ ID NO: 267784 - RNA, 15 nt, Homo sapiens
ugugaaccaccacac

SEQ ID NO: 267785 - RNA, 16 nt, Homo sapiens
ugugaacccaaagugu

SEQ ID NO: 267786 - RNA, 18 nt, Homo sapiens
ugugaacccaaaguguga

SEQ ID NO: 267787 - RNA, 16 nt, Homo sapiens
ugugaagcaaacucua

SEQ ID NO: 267788 - RNA, 18 nt, Homo sapiens
ugugaaguuuaauugacu

SEQ ID NO: 267789 - RNA, 23 nt, Homo sapiens
ugugaaugaugauccuaggcauu

SEQ ID NO: 267790 - RNA, 19 nt, Homo sapiens
ugugacaacaugcaagaag

SEQ ID NO: 267791 - RNA, 20 nt, Homo sapiens
ugugaccaaugucuugaugc

SEQ ID NO: 267792 - RNA, 21 nt, Homo sapiens
ugugaccaaugucuugaugca

SEQ ID NO: 267793 - RNA, 21 nt, Homo sapiens
ugugaccauuagcauuuguca

SEQ ID NO: 267794 - RNA, 13 nt, Homo sapiens
ugugacugaucuc

SEQ ID NO: 267795 - RNA, 14 nt, Homo sapiens
ugugagacuguaag

SEQ ID NO: 267796 - RNA, 23 nt, Homo sapiens
ugugagacuguaaguuacaugaa

SEQ ID NO: 267797 - RNA, 22 nt, Homo sapiens
uggggacacagcaucagcucaa

SEQ ID NO: 267798 - RNA, 23 nt, Homo sapiens
uggggacagagcagaacuuucac

SEQ ID NO: 267799 - RNA, 16 nt, Homo sapiens
uggggagaaaagacau

SEQ ID NO: 267800 - RNA, 21 nt, Homo sapiens
uggggauacuggcaaagcaga

SEQ ID NO: 267801 - RNA, 16 nt, Homo sapiens
uggggaugucucucau

SEQ ID NO: 267802 - RNA, 17 nt, Homo sapiens
uggggcauauucaucua

SEQ ID NO: 267803 - RNA, 14 nt, Homo sapiens
uggggccaugccuc

SEQ ID NO: 267804 - RNA, 15 nt, Homo sapiens
uggggcugauuguau

SEQ ID NO: 267805 - RNA, 16 nt, Homo sapiens
uggggcuggaagcaga

SEQ ID NO: 267806 - RNA, 22 nt, Homo sapiens
ugggggaucacagccucugaaa

SEQ ID NO: 267807 - RNA, 18 nt, Homo sapiens
ugggguacccacugcucu

SEQ ID NO: 267808 - RNA, 21 nt, Homo sapiens
ugggguacccacugcucuggu

SEQ ID NO: 267809 - RNA, 18 nt, Homo sapiens
ugggguaguuguguuuca

SEQ ID NO: 267810 - RNA, 14 nt, Homo sapiens
ugggguaugggaga

SEQ ID NO: 267811 - RNA, 16 nt, Homo sapiens
uggggugggcacauug

SEQ ID NO: 267812 - RNA, 13 nt, Homo sapiens
uggguaccuguau

SEQ ID NO: 267813 - RNA, 18 nt, Homo sapiens
uggguacuuguggacaca

SEQ ID NO: 267814 - RNA, 16 nt, Homo sapiens
uggguaggcaugugca

SEQ ID NO: 267815 - RNA, 16 nt, Homo sapiens
ugggucccauucuugg

SEQ ID NO: 267816 - RNA, 22 nt, Homo sapiens
ugggucgcgugaugcgcauguc

SEQ ID NO: 267817 - RNA, 22 nt, Homo sapiens
ugggucucucauaccucuggga

SEQ ID NO: 267818 - RNA, 19 nt, Homo sapiens
ugggucuucagggggccag

SEQ ID NO: 267819 - RNA, 20 nt, Homo sapiens
ugggugacagagcaagugag

SEQ ID NO: 267820 - RNA, 12 nt, Homo sapiens
ugggugggacca

SEQ ID NO: 267821 - RNA, 16 nt, Homo sapiens
ugggugggaccacaga

SEQ ID NO: 267822 - RNA, 20 nt, Homo sapiens
ugggugucaagagggucuga

SEQ ID NO: 267823 - RNA, 15 nt, Homo sapiens
uggguucaagugauu

SEQ ID NO: 267824 - RNA, 23 nt, Homo sapiens
uggguucacagaagcacagcacc

SEQ ID NO: 267825 - RNA, 23 nt, Homo sapiens
uggguugcaggaccucaggugag

SEQ ID NO: 267826 - RNA, 19 nt, Homo sapiens
uggguuggaaaacaguauu

SEQ ID NO: 267827 - RNA, 20 nt, Homo sapiens
uggguuuugggucuuugaac

SEQ ID NO: 267828 - RNA, 14 nt, Homo sapiens
ugguaaaauacuuc

SEQ ID NO: 267829 - RNA, 18 nt, Homo sapiens
ugguaaccucuacuauga

SEQ ID NO: 267830 - RNA, 22 nt, Homo sapiens
ugguauaaacguccuacuguau

SEQ ID NO: 267831 - RNA, 12 nt, Homo sapiens
ugguaugugaca

SEQ ID NO: 267832 - RNA, 15 nt, Homo sapiens
ugguauucuucugac

SEQ ID NO: 267833 - RNA, 13 nt, Homo sapiens
uggucaccaaauc

SEQ ID NO: 267834 - RNA, 18 nt, Homo sapiens
uggucagagggcccagug

SEQ ID NO: 267835 - RNA, 15 nt, Homo sapiens
uggucccccuuccau

SEQ ID NO: 267836 - RNA, 14 nt, Homo sapiens
uggucuacacugug

SEQ ID NO: 267837 - RNA, 13 nt, Homo sapiens
uggucugacccac

SEQ ID NO: 267838 - RNA, 19 nt, Homo sapiens
uggugaaacauacgacaga

SEQ ID NO: 267839 - RNA, 21 nt, Homo sapiens
uggugacauugcaccuggaug

SEQ ID NO: 267840 - RNA, 15 nt, Homo sapiens
uggugacuuuggaua

SEQ ID NO: 267841 - RNA, 19 nt, Homo sapiens
uggugagaucacaguucau

SEQ ID NO: 267842 - RNA, 13 nt, Homo sapiens
uggugauuuagca

SEQ ID NO: 267843 - RNA, 16 nt, Homo sapiens
ugguggacaugcacag

SEQ ID NO: 267844 - RNA, 12 nt, Homo sapiens
ugguggcagcuc

SEQ ID NO: 267845 - RNA, 16 nt, Homo sapiens
uggugucccuuucaca

SEQ ID NO: 267846 - RNA, 15 nt, Homo sapiens
uggugucucuugggg

SEQ ID NO: 267847 - RNA, 12 nt, Homo sapiens
ugguuacaagaa

SEQ ID NO: 267848 - RNA, 15 nt, Homo sapiens
ugguuauauguauau

SEQ ID NO: 267849 - RNA, 20 nt, Homo sapiens
ugguuaucuaauauguaaca

SEQ ID NO: 267850 - RNA, 15 nt, Homo sapiens
ugguucccauuugcu

SEQ ID NO: 267851 - RNA, 19 nt, Homo sapiens
ugguucccccacugaucac

SEQ ID NO: 267852 - RNA, 20 nt, Homo sapiens
ugguugaguguugcucucua

SEQ ID NO: 267853 - RNA, 18 nt, Homo sapiens
ugguuucuagcaugaaga

SEQ ID NO: 267854 - RNA, 20 nt, Homo sapiens
ugguuucucguacuuucaca

SEQ ID NO: 267855 - RNA, 22 nt, Homo sapiens
ugguuuuuaaaaaacugcugac

SEQ ID NO: 267856 - RNA, 18 nt, Homo sapiens
ugguuuuucaguuuucag

SEQ ID NO: 267857 - RNA, 18 nt, Homo sapiens
uguaaaauggacaguacu

SEQ ID NO: 267858 - RNA, 15 nt, Homo sapiens
uguaaaauuauuuca

SEQ ID NO: 267859 - RNA, 19 nt, Homo sapiens
uguaaagauguuuauuuca

SEQ ID NO: 267860 - RNA, 20 nt, Homo sapiens
uguaaauacuguuuuuaaca

SEQ ID NO: 267861 - RNA, 16 nt, Homo sapiens
uguaaauuuaugugau

SEQ ID NO: 267862 - RNA, 21 nt, Homo sapiens
uguaaauuucucuacugucuc

SEQ ID NO: 267863 - RNA, 15 nt, Homo sapiens
uguaagaggaugugg

SEQ ID NO: 267864 - RNA, 17 nt, Homo sapiens
uguaagaggaugugguu

SEQ ID NO: 267865 - RNA, 23 nt, Homo sapiens
uguaagaucguucucugccucac

SEQ ID NO: 267866 - RNA, 22 nt, Homo sapiens
uguaagcucuacugaggugcua

SEQ ID NO: 267867 - RNA, 14 nt, Homo sapiens
uguaaucauauaau

SEQ ID NO: 267868 - RNA, 20 nt, Homo sapiens
uguaaucccaacauuuuggg

SEQ ID NO: 267869 - RNA, 12 nt, Homo sapiens
uguaauugcaaa

SEQ ID NO: 267870 - RNA, 18 nt, Homo sapiens
uguaauuuaaaauuguga

SEQ ID NO: 267871 - RNA, 20 nt, Homo sapiens
uguaauuugugauacaaugc

SEQ ID NO: 267872 - RNA, 14 nt, Homo sapiens
uguacaacuaccuc

SEQ ID NO: 267873 - RNA, 20 nt, Homo sapiens
uguacaguagauuuuccaaa

SEQ ID NO: 267874 - RNA, 16 nt, Homo sapiens
uguacagucuuguauu

SEQ ID NO: 267875 - RNA, 17 nt, Homo sapiens
uguacauggaauaacau

SEQ ID NO: 267876 - RNA, 12 nt, Homo sapiens
uguaccagagaa

SEQ ID NO: 267877 - RNA, 14 nt, Homo sapiens
uguacccuacccug

SEQ ID NO: 267878 - RNA, 15 nt, Homo sapiens
uguaccugugcacgu

SEQ ID NO: 267879 - RNA, 15 nt, Homo sapiens
uguaccuuguguacu

SEQ ID NO: 267880 - RNA, 18 nt, Homo sapiens
uguacgucugacaggcaa

SEQ ID NO: 267881 - RNA, 20 nt, Homo sapiens
uguacuauccaaucugugau

SEQ ID NO: 267882 - RNA, 18 nt, Homo sapiens
uguacuauucaaucuuua

SEQ ID NO: 267883 - RNA, 18 nt, Homo sapiens
uguacuugccuuauuaga

SEQ ID NO: 267884 - RNA, 12 nt, Homo sapiens
uguagaaaguga

SEQ ID NO: 267885 - RNA, 20 nt, Homo sapiens
uguagaagaaagagcaacaa

SEQ ID NO: 267886 - RNA, 22 nt, Homo sapiens
uguagagagagaaaaguaacug

SEQ ID NO: 267887 - RNA, 20 nt, Homo sapiens
uguagucccagcuacuugag

SEQ ID NO: 267888 - RNA, 19 nt, Homo sapiens
uguauauucaggacuugaa

SEQ ID NO: 267889 - RNA, 23 nt, Homo sapiens
uguauauuuucugugcagccacu

SEQ ID NO: 267890 - RNA, 16 nt, Homo sapiens
uguaucaaaugugaca

SEQ ID NO: 267891 - RNA, 12 nt, Homo sapiens
uguaucaugaca

SEQ ID NO: 267892 - RNA, 18 nt, Homo sapiens
uguaucauuaugaaguca

SEQ ID NO: 267893 - RNA, 14 nt, Homo sapiens
uguauccacaaauc

SEQ ID NO: 267894 - RNA, 15 nt, Homo sapiens
uguauccacaaauca

SEQ ID NO: 267895 - RNA, 14 nt, Homo sapiens
uguaucguauugag

SEQ ID NO: 267896 - RNA, 17 nt, Homo sapiens
uguaucguauugagugg

SEQ ID NO: 267897 - RNA, 21 nt, Homo sapiens
uguaugauccuaaugaaugca

SEQ ID NO: 267898 - RNA, 21 nt, Homo sapiens
uguauucucugagcugugcag

SEQ ID NO: 267899 - RNA, 19 nt, Homo sapiens
uguauugugcgcuaaacuu

SEQ ID NO: 267900 - RNA, 22 nt, Homo sapiens
ugucaauguccuacugagacag

SEQ ID NO: 267901 - RNA, 12 nt, Homo sapiens
ugucaaugucuu

SEQ ID NO: 267902 - RNA, 17 nt, Homo sapiens
ugucacagaaucuccau

SEQ ID NO: 267903 - RNA, 15 nt, Homo sapiens
ugucacccaaugcau

SEQ ID NO: 267904 - RNA, 19 nt, Homo sapiens
ugucacgccagacuuccca

SEQ ID NO: 267905 - RNA, 24 nt, Homo sapiens
ugucacuuuccucuuccacuuuga

SEQ ID NO: 267906 - RNA, 13 nt, Homo sapiens
ugucagcaaaaag

SEQ ID NO: 267907 - RNA, 16 nt, Homo sapiens
ugucagcuuccaaaca

SEQ ID NO: 267908 - RNA, 13 nt, Homo sapiens
ugucaguauuuca

SEQ ID NO: 267909 - RNA, 13 nt, Homo sapiens
ugucagucugucc

SEQ ID NO: 267910 - RNA, 15 nt, Homo sapiens
ugucauaaucucuuu

SEQ ID NO: 267911 - RNA, 17 nt, Homo sapiens
ugucauauaagauucau

SEQ ID NO: 267912 - RNA, 21 nt, Homo sapiens
ugucauccucaaagaaagugu

SEQ ID NO: 267913 - RNA, 22 nt, Homo sapiens
uuaaauguagaaagugauccau

SEQ ID NO: 267914 - RNA, 21 nt, Homo sapiens
uuaacuuaaaagaacauguau

SEQ ID NO: 267915 - RNA, 18 nt, Homo sapiens
uuaacuuccaauuuacau

SEQ ID NO: 267916 - RNA, 21 nt, Homo sapiens
uuaacuuccaauuuacauacu

SEQ ID NO: 267917 - RNA, 20 nt, Homo sapiens
uuaagaauguucuuauguug

SEQ ID NO: 267918 - RNA, 22 nt, Homo sapiens
uuaagacuuugguuauuuuacu

SEQ ID NO: 267919 - RNA, 14 nt, Homo sapiens
uuaagagaaaugag

SEQ ID NO: 267920 - RNA, 20 nt, Homo sapiens
uuaagaggcagggucucacu

SEQ ID NO: 267921 - RNA, 17 nt, Homo sapiens
uuaagcacacuugacau

SEQ ID NO: 267922 - RNA, 20 nt, Homo sapiens
uuaagcacacuugacaucaa

SEQ ID NO: 267923 - RNA, 18 nt, Homo sapiens
uuaagcagcgccagugac

SEQ ID NO: 267924 - RNA, 19 nt, Homo sapiens
uuaaggauuuuaugcuuua

SEQ ID NO: 267925 - RNA, 20 nt, Homo sapiens
uuaaggauuuuaugcuuuaa

SEQ ID NO: 267926 - RNA, 22 nt, Homo sapiens
uuaaguuacacauuuuucagau

SEQ ID NO: 267927 - RNA, 16 nt, Homo sapiens
uuaaguugauggugau

SEQ ID NO: 267928 - RNA, 14 nt, Homo sapiens
uuaauaaaaguaca

SEQ ID NO: 267929 - RNA, 16 nt, Homo sapiens
uuaauaaagacagggu

SEQ ID NO: 267930 - RNA, 14 nt, Homo sapiens
uuaauacauucacc

SEQ ID NO: 267931 - RNA, 20 nt, Homo sapiens
uuaauaggguaaauucucua

SEQ ID NO: 267932 - RNA, 19 nt, Homo sapiens
uuaauauccaauugcugcu

SEQ ID NO: 267933 - RNA, 21 nt, Homo sapiens
uuaaucuuaguguaugauuac

SEQ ID NO: 267934 - RNA, 20 nt, Homo sapiens
uuaauuuauugaggcuuuaa

SEQ ID NO: 267935 - RNA, 15 nt, Homo sapiens
uuacaaaguguguau

SEQ ID NO: 267936 - RNA, 20 nt, Homo sapiens
uuacaaucagccacauucua

SEQ ID NO: 267937 - RNA, 20 nt, Homo sapiens
uuacaaugcauucugaggua

SEQ ID NO: 267938 - RNA, 18 nt, Homo sapiens
uuacaauugcaguuuugc

SEQ ID NO: 267939 - RNA, 21 nt, Homo sapiens
uuacaauugcaguuuugccua

SEQ ID NO: 267940 - RNA, 13 nt, Homo sapiens
uuacaauugugag

SEQ ID NO: 267941 - RNA, 11 nt, Homo sapiens
uuacaguucug

SEQ ID NO: 267942 - RNA, 23 nt, Homo sapiens
uuacaugaauacgucuugaucag

SEQ ID NO: 267943 - RNA, 12 nt, Homo sapiens
uuacauugccuu

SEQ ID NO: 267944 - RNA, 18 nt, Homo sapiens
uuaccaauugaaguaaaa

SEQ ID NO: 267945 - RNA, 15 nt, Homo sapiens
uuaccccucacaauc

SEQ ID NO: 267946 - RNA, 20 nt, Homo sapiens
uuaccccucacaauccuugc

SEQ ID NO: 267947 - RNA, 21 nt, Homo sapiens
uuaccugccaggaagccagca

SEQ ID NO: 267948 - RNA, 16 nt, Homo sapiens
uuaccuugugcuaauc

SEQ ID NO: 267949 - RNA, 22 nt, Homo sapiens
uuaccuuuuauuuuaauguuuc

SEQ ID NO: 267950 - RNA, 15 nt, Homo sapiens
uuacuaucaugucaa

SEQ ID NO: 267951 - RNA, 23 nt, Homo sapiens
uuacucuauacauucaacagaga

SEQ ID NO: 267952 - RNA, 20 nt, Homo sapiens
ugugaaaguuacaaauugcu

SEQ ID NO: 267953 - RNA, 17 nt, Homo sapiens
ugugaaauucucuuucc

SEQ ID NO: 267954 - RNA, 19 nt, Homo sapiens
ugugaacuaaacuuucaca

SEQ ID NO: 267955 - RNA, 16 nt, Homo sapiens
ugugaacuugaagaag

SEQ ID NO: 267956 - RNA, 21 nt, Homo sapiens
ugugaagauuauaaaagccaa

SEQ ID NO: 267957 - RNA, 23 nt, Homo sapiens
ugugaaggaauuauucccaugag

SEQ ID NO: 267958 - RNA, 20 nt, Homo sapiens
ugugaaggcaggggaaugua

SEQ ID NO: 267959 - RNA, 17 nt, Homo sapiens
ugugaauuaggcuguaa

SEQ ID NO: 267960 - RNA, 19 nt, Homo sapiens
ugugaauuaggcuguaacu

SEQ ID NO: 267961 - RNA, 18 nt, Homo sapiens
ugugacaacaugcaagaa

SEQ ID NO: 267962 - RNA, 22 nt, Homo sapiens
ugugacauuauaugcacuagca

SEQ ID NO: 267963 - RNA, 15 nt, Homo sapiens
ugugacucuuuccaa

SEQ ID NO: 267964 - RNA, 17 nt, Homo sapiens
ugugagccacagcacuc

SEQ ID NO: 267965 - RNA, 15 nt, Homo sapiens
ugugaguucugggcu

SEQ ID NO: 267966 - RNA, 13 nt, Homo sapiens
ugugauaaaaccc

SEQ ID NO: 267967 - RNA, 16 nt, Homo sapiens
ugugaucaagcaauaa

SEQ ID NO: 267968 - RNA, 17 nt, Homo sapiens
ugugauucacaguguga

SEQ ID NO: 267969 - RNA, 11 nt, Homo sapiens
ugugauucuau

SEQ ID NO: 267970 - RNA, 20 nt, Homo sapiens
ugugauugacgggacuguug

SEQ ID NO: 267971 - RNA, 11 nt, Homo sapiens
ugugcacauuu

SEQ ID NO: 267972 - RNA, 15 nt, Homo sapiens
ugugcagaaccuccu

SEQ ID NO: 267973 - RNA, 21 nt, Homo sapiens
ugugcaguguugacaguucau

SEQ ID NO: 267974 - RNA, 23 nt, Homo sapiens
ugugcauuaucuagauacuguau

SEQ ID NO: 267975 - RNA, 14 nt, Homo sapiens
ugugccaccacguc

SEQ ID NO: 267976 - RNA, 14 nt, Homo sapiens
ugugccaucagcuc

SEQ ID NO: 267977 - RNA, 14 nt, Homo sapiens
ugugccaugugcca

SEQ ID NO: 267978 - RNA, 22 nt, Homo sapiens
ugugcccacugaacaugcucau

SEQ ID NO: 267979 - RNA, 17 nt, Homo sapiens
ugugccugaagucccag

SEQ ID NO: 267980 - RNA, 18 nt, Homo sapiens
ugugccuuggugugcugu

SEQ ID NO: 267981 - RNA, 15 nt, Homo sapiens
ugugcgccuacagga

SEQ ID NO: 267982 - RNA, 18 nt, Homo sapiens
ugugcucagagaccccuc

SEQ ID NO: 267983 - RNA, 12 nt, Homo sapiens
ugugcucaggga

SEQ ID NO: 267984 - RNA, 13 nt, Homo sapiens
ugugcucagggaa

SEQ ID NO: 267985 - RNA, 22 nt, Homo sapiens
ugugcucuuauccccagcuguu

SEQ ID NO: 267986 - RNA, 13 nt, Homo sapiens
uguggacacagcu

SEQ ID NO: 267987 - RNA, 23 nt, Homo sapiens
uguggagcuaaggacacagugga

SEQ ID NO: 267988 - RNA, 16 nt, Homo sapiens
uguggcaacugcugau

SEQ ID NO: 267989 - RNA, 17 nt, Homo sapiens
uguggcugcuagcacuu

SEQ ID NO: 267990 - RNA, 21 nt, Homo sapiens
uguggcugcuagcacuuggag

SEQ ID NO: 267991 - RNA, 15 nt, Homo sapiens
ugugggccaccagag

SEQ ID NO: 267992 - RNA, 16 nt, Homo sapiens
ugugggccaccagaga

SEQ ID NO: 267993 - RNA, 17 nt, Homo sapiens
ugugggccaccagagaa

SEQ ID NO: 267994 - RNA, 15 nt, Homo sapiens
ugugggcuccaugua

SEQ ID NO: 267995 - RNA, 18 nt, Homo sapiens
uguggggugggcacauug

SEQ ID NO: 267996 - RNA, 14 nt, Homo sapiens
uguggguaccugua

SEQ ID NO: 267997 - RNA, 15 nt, Homo sapiens
uguggguaccuguau

SEQ ID NO: 267998 - RNA, 14 nt, Homo sapiens
ugugggugggacca

SEQ ID NO: 267999 - RNA, 18 nt, Homo sapiens
ugugggugggaccacaga

SEQ ID NO: 268000 - RNA, 13 nt, Homo sapiens
uguggguuucuaa

SEQ ID NO: 268001 - RNA, 16 nt, Homo sapiens
uguggugagaucaugc

SEQ ID NO: 268002 - RNA, 14 nt, Homo sapiens
ugugguuacaagaa

SEQ ID NO: 268003 - RNA, 15 nt, Homo sapiens
uguguaaauacaauu

SEQ ID NO: 268004 - RNA, 20 nt, Homo sapiens
uguguacuuuuggguucaca

SEQ ID NO: 268005 - RNA, 19 nt, Homo sapiens
ugugugaaauucucuuucc

SEQ ID NO: 268006 - RNA, 13 nt, Homo sapiens
ugugugaagauca

SEQ ID NO: 268007 - RNA, 12 nt, Homo sapiens
ugugugaucugu

SEQ ID NO: 268008 - RNA, 18 nt, Homo sapiens
ugugugaucugugggcac

SEQ ID NO: 268009 - RNA, 21 nt, Homo sapiens
ugugugaucugugggcacauu

SEQ ID NO: 268010 - RNA, 17 nt, Homo sapiens
uguguggggugggcaca

SEQ ID NO: 268011 - RNA, 16 nt, Homo sapiens
ugugugguauuuuggc

SEQ ID NO: 268012 - RNA, 15 nt, Homo sapiens
uguguucaugcacac

SEQ ID NO: 268013 - RNA, 15 nt, Homo sapiens
uguguuggcacaugc

SEQ ID NO: 268014 - RNA, 14 nt, Homo sapiens
uguguuuuuaauaa

SEQ ID NO: 268015 - RNA, 13 nt, Homo sapiens
uguuaaaauaacu

SEQ ID NO: 268016 - RNA, 21 nt, Homo sapiens
uguuaacauggacaugaucuu

SEQ ID NO: 268017 - RNA, 14 nt, Homo sapiens
uguuaacugaaugc

SEQ ID NO: 268018 - RNA, 23 nt, Homo sapiens
uguuaccugaaaacacugugcac

SEQ ID NO: 268019 - RNA, 16 nt, Homo sapiens
uguuauacugaaccag

SEQ ID NO: 268020 - RNA, 14 nt, Homo sapiens
uguuaucagucaua

SEQ ID NO: 268021 - RNA, 12 nt, Homo sapiens
uguuaugacucc

SEQ ID NO: 268022 - RNA, 13 nt, Homo sapiens
uguucagaugcuu

SEQ ID NO: 268023 - RNA, 17 nt, Homo sapiens
uguucagcuccagcuca

SEQ ID NO: 268024 - RNA, 21 nt, Homo sapiens
uguucagucacaugugcucuc

SEQ ID NO: 268025 - RNA, 16 nt, Homo sapiens
uguucaugcacacuug

SEQ ID NO: 268026 - RNA, 17 nt, Homo sapiens
uguucaugcacacuugc

SEQ ID NO: 268027 - RNA, 21 nt, Homo sapiens
uguucaugcacacuugcaccc

SEQ ID NO: 268028 - RNA, 13 nt, Homo sapiens
uguucccaugaga

SEQ ID NO: 268029 - RNA, 14 nt, Homo sapiens
uguuccccacugac

SEQ ID NO: 268030 - RNA, 15 nt, Homo sapiens
uguucccuauuuugc

SEQ ID NO: 268031 - RNA, 23 nt, Homo sapiens
uguucccuauuuugccaguggga

SEQ ID NO: 268032 - RNA, 22 nt, Homo sapiens
uguucuaagucuuuccauugga

SEQ ID NO: 268033 - RNA, 16 nt, Homo sapiens
uguucucugaggacac

SEQ ID NO: 268034 - RNA, 13 nt, Homo sapiens
uguucugggacac

SEQ ID NO: 268035 - RNA, 20 nt, Homo sapiens
uguucugguuacuguucuaa

SEQ ID NO: 268036 - RNA, 17 nt, Homo sapiens
uguugacauccaagcuu

SEQ ID NO: 268037 - RNA, 18 nt, Homo sapiens
uguugacauucugaaugc

SEQ ID NO: 268038 - RNA, 15 nt, Homo sapiens
uguugauuccacuga

SEQ ID NO: 268039 - RNA, 21 nt, Homo sapiens
uguugcccaggcuggucucaa

SEQ ID NO: 268040 - RNA, 23 nt, Homo sapiens
uguugcuauagagccuaccugua

SEQ ID NO: 268041 - RNA, 16 nt, Homo sapiens
uguuggcauagcucug

SEQ ID NO: 268042 - RNA, 20 nt, Homo sapiens
uguuggccaaagccaaagcu

SEQ ID NO: 268043 - RNA, 20 nt, Homo sapiens
uguuguuuuaggaauacaua

SEQ ID NO: 268044 - RNA, 21 nt, Homo sapiens
uguuguuuuaggaauacauaa

SEQ ID NO: 268045 - RNA, 18 nt, Homo sapiens
uguuuagcccaaaaccaa

SEQ ID NO: 268046 - RNA, 14 nt, Homo sapiens
uguuuauccaugua

SEQ ID NO: 268047 - RNA, 21 nt, Homo sapiens
uguuuaugaauaguuuccaaa

SEQ ID NO: 268048 - RNA, 23 nt, Homo sapiens
uguuuauuucaggcauuggauau

SEQ ID NO: 268049 - RNA, 17 nt, Homo sapiens
uguuucaaacaaaaagu

SEQ ID NO: 268050 - RNA, 20 nt, Homo sapiens
uguuucaaacaaaaagucau

SEQ ID NO: 268051 - RNA, 23 nt, Homo sapiens
uguuucuaaauuuugugauucua

SEQ ID NO: 268052 - RNA, 19 nt, Homo sapiens
uguuucugcagccacuauu

SEQ ID NO: 268053 - RNA, 20 nt, Homo sapiens
uguuucugcagccacuauug

SEQ ID NO: 268054 - RNA, 13 nt, Homo sapiens
uguuucuguacuu

SEQ ID NO: 268055 - RNA, 23 nt, Homo sapiens
uguuuggaccaaaaaccaguauu

SEQ ID NO: 268056 - RNA, 12 nt, Homo sapiens
uguuugugauug

SEQ ID NO: 268057 - RNA, 21 nt, Homo sapiens
uucaguauguugucaaagaga

SEQ ID NO: 268058 - RNA, 16 nt, Homo sapiens
uucagugcuucgcaga

SEQ ID NO: 268059 - RNA, 14 nt, Homo sapiens
uucaguggcagcug

SEQ ID NO: 268060 - RNA, 22 nt, Homo sapiens
uucaguggcuaccuacauacaa

SEQ ID NO: 268061 - RNA, 16 nt, Homo sapiens
uucaguuugcagagua

SEQ ID NO: 268062 - RNA, 17 nt, Homo sapiens
uucaguuugcagaguag

SEQ ID NO: 268063 - RNA, 15 nt, Homo sapiens
uucaguuuucaggag

SEQ ID NO: 268064 - RNA, 19 nt, Homo sapiens
uucauaauuucuucacuca

SEQ ID NO: 268065 - RNA, 17 nt, Homo sapiens
uucauaccuacauguau

SEQ ID NO: 268066 - RNA, 18 nt, Homo sapiens
uucauauauuuguaugau

SEQ ID NO: 268067 - RNA, 20 nt, Homo sapiens
uucauauauuuguaugaucc

SEQ ID NO: 268068 - RNA, 20 nt, Homo sapiens
uucauauguaccauguacau

SEQ ID NO: 268069 - RNA, 20 nt, Homo sapiens
uucaucagacuccugugcaa

SEQ ID NO: 268070 - RNA, 11 nt, Homo sapiens
uucaucucuug

SEQ ID NO: 268071 - RNA, 13 nt, Homo sapiens
uucaugcugcuua

SEQ ID NO: 268072 - RNA, 23 nt, Homo sapiens
uucauggauauguuauacugaac

SEQ ID NO: 268073 - RNA, 18 nt, Homo sapiens
uucauuaauacagggcau

SEQ ID NO: 268074 - RNA, 12 nt, Homo sapiens
uucauuaccuca

SEQ ID NO: 268075 - RNA, 13 nt, Homo sapiens
uucauuacuaaaa

SEQ ID NO: 268076 - RNA, 22 nt, Homo sapiens
uucauucucccuuucacuaaaa

SEQ ID NO: 268077 - RNA, 19 nt, Homo sapiens
uucauucuuuuugaaaugu

SEQ ID NO: 268078 - RNA, 21 nt, Homo sapiens
uucauuuaggugaggaagcaa

SEQ ID NO: 268079 - RNA, 14 nt, Homo sapiens
uucauuuaucuaua

SEQ ID NO: 268080 - RNA, 23 nt, Homo sapiens
uucauuuggcauuccccacuuga

SEQ ID NO: 268081 - RNA, 15 nt, Homo sapiens
uuccaaacacauaca

SEQ ID NO: 268082 - RNA, 19 nt, Homo sapiens
uuccaaacacauacaggaa

SEQ ID NO: 268083 - RNA, 19 nt, Homo sapiens
uuccaaacaggcucagagg

SEQ ID NO: 268084 - RNA, 19 nt, Homo sapiens
uuccaaggguacuaaggaa

SEQ ID NO: 268085 - RNA, 23 nt, Homo sapiens
uuccaaucuguccuguuacaaaa

SEQ ID NO: 268086 - RNA, 15 nt, Homo sapiens
uuccaaugaugggau

SEQ ID NO: 268087 - RNA, 18 nt, Homo sapiens
uuccaaugcuuugauccc

SEQ ID NO: 268088 - RNA, 17 nt, Homo sapiens
uuccacaaguuaaauaa

SEQ ID NO: 268089 - RNA, 17 nt, Homo sapiens
uuccacaucauccagaa

SEQ ID NO: 268090 - RNA, 20 nt, Homo sapiens
uuccacguaagucacugaaa

SEQ ID NO: 268091 - RNA, 10 nt, Homo sapiens
uuccacugag

SEQ ID NO: 268092 - RNA, 12 nt, Homo sapiens
uuccacugcugc

SEQ ID NO: 268093 - RNA, 23 nt, Homo sapiens
uuccacuuagaaauugcauuucc

SEQ ID NO: 268094 - RNA, 17 nt, Homo sapiens
uuccacuuugauaccau

SEQ ID NO: 268095 - RNA, 17 nt, Homo sapiens
uuccagaaaaauuuccc

SEQ ID NO: 268096 - RNA, 20 nt, Homo sapiens
uuccagaacgcccugugucc

SEQ ID NO: 268097 - RNA, 23 nt, Homo sapiens
uuccagaacgcccuguguccaca

SEQ ID NO: 268098 - RNA, 15 nt, Homo sapiens
uuccagcgucugcug

SEQ ID NO: 268099 - RNA, 16 nt, Homo sapiens
uuccaguaaugagcuu

SEQ ID NO: 268100 - RNA, 14 nt, Homo sapiens
uuccagugaggcuc

SEQ ID NO: 268101 - RNA, 15 nt, Homo sapiens
uuccauggacuuugu

SEQ ID NO: 268102 - RNA, 17 nt, Homo sapiens
uuccauguucaccaaga

SEQ ID NO: 268103 - RNA, 13 nt, Homo sapiens
uucccaaacugau

SEQ ID NO: 268104 - RNA, 17 nt, Homo sapiens
uucccacaggacauuuc

SEQ ID NO: 268105 - RNA, 17 nt, Homo sapiens
uucccagcuacaccuuu

SEQ ID NO: 268106 - RNA, 14 nt, Homo sapiens
uuccccacuugaga

SEQ ID NO: 268107 - RNA, 20 nt, Homo sapiens
uuaauacagggcauuuuggu

SEQ ID NO: 268108 - RNA, 19 nt, Homo sapiens
uuaauaccguaucuucuaa

SEQ ID NO: 268109 - RNA, 14 nt, Homo sapiens
uuaauauaacugcc

SEQ ID NO: 268110 - RNA, 19 nt, Homo sapiens
uuaauaucaucaguauuga

SEQ ID NO: 268111 - RNA, 17 nt, Homo sapiens
uuaauauggaucuguau

SEQ ID NO: 268112 - RNA, 15 nt, Homo sapiens
uuaauauuucugagg

SEQ ID NO: 268113 - RNA, 20 nt, Homo sapiens
uuaaucacaccguccuccac

SEQ ID NO: 268114 - RNA, 15 nt, Homo sapiens
uuaaucccacuugcc

SEQ ID NO: 268115 - RNA, 18 nt, Homo sapiens
uuaaucugagaggccaca

SEQ ID NO: 268116 - RNA, 18 nt, Homo sapiens
uuaaugaagaaaguggaa

SEQ ID NO: 268117 - RNA, 19 nt, Homo sapiens
uuacaaucagccacauucu

SEQ ID NO: 268118 - RNA, 13 nt, Homo sapiens
uuacaauugcagu

SEQ ID NO: 268119 - RNA, 18 nt, Homo sapiens
uuacaauuuacaaagugu

SEQ ID NO: 268120 - RNA, 12 nt, Homo sapiens
uuacacaauggu

SEQ ID NO: 268121 - RNA, 22 nt, Homo sapiens
uuacagacugaugccagacaaa

SEQ ID NO: 268122 - RNA, 23 nt, Homo sapiens
uuacaguaggagcccagcucuga

SEQ ID NO: 268123 - RNA, 19 nt, Homo sapiens
uuacaguuuaucuauggca

SEQ ID NO: 268124 - RNA, 17 nt, Homo sapiens
uuacauuugaaaucuau

SEQ ID NO: 268125 - RNA, 19 nt, Homo sapiens
uuacauuugaaaucuauga

SEQ ID NO: 268126 - RNA, 16 nt, Homo sapiens
uuacauuuuguauauu

SEQ ID NO: 268127 - RNA, 16 nt, Homo sapiens
uuaccagagaaaaagg

SEQ ID NO: 268128 - RNA, 17 nt, Homo sapiens
uuacccacucaucagaa

SEQ ID NO: 268129 - RNA, 20 nt, Homo sapiens
uuacccccugggagccccaa

SEQ ID NO: 268130 - RNA, 22 nt, Homo sapiens
uuaccccuuuucggccccaugu

SEQ ID NO: 268131 - RNA, 14 nt, Homo sapiens
uuaccuaguacaag

SEQ ID NO: 268132 - RNA, 19 nt, Homo sapiens
uuaccuaguagucauuuca

SEQ ID NO: 268133 - RNA, 22 nt, Homo sapiens
uuaccugaaauaaaauucauua

SEQ ID NO: 268134 - RNA, 22 nt, Homo sapiens
uuaccugggcauucuuguuuca

SEQ ID NO: 268135 - RNA, 20 nt, Homo sapiens
uuaccuucuaccucuuggcu

SEQ ID NO: 268136 - RNA, 15 nt, Homo sapiens
uuacgagcagggaug

SEQ ID NO: 268137 - RNA, 16 nt, Homo sapiens
uuacuaacuaaacucu

SEQ ID NO: 268138 - RNA, 13 nt, Homo sapiens
uuacuaaucuuuc

SEQ ID NO: 268139 - RNA, 20 nt, Homo sapiens
uuacuacaugugggagcuuu

SEQ ID NO: 268140 - RNA, 14 nt, Homo sapiens
uuacuaucauguca

SEQ ID NO: 268141 - RNA, 16 nt, Homo sapiens
uuacuaucaugucaaa

SEQ ID NO: 268142 - RNA, 17 nt, Homo sapiens
uuacuaucaugucaaac

SEQ ID NO: 268143 - RNA, 22 nt, Homo sapiens
uuacugcauagcagaccacaca

SEQ ID NO: 268144 - RNA, 15 nt, Homo sapiens
uuacuguccaaagac

SEQ ID NO: 268145 - RNA, 19 nt, Homo sapiens
uuacuuuuuccuggcucau

SEQ ID NO: 268146 - RNA, 19 nt, Homo sapiens
uuacuuuuuggaaaagaau

SEQ ID NO: 268147 - RNA, 15 nt, Homo sapiens
uuagaaauugcauuu

SEQ ID NO: 268148 - RNA, 14 nt, Homo sapiens
uuagaagucacaca

SEQ ID NO: 268149 - RNA, 16 nt, Homo sapiens
uuagaagucacacagu

SEQ ID NO: 268150 - RNA, 17 nt, Homo sapiens
uuagacagagucucacu

SEQ ID NO: 268151 - RNA, 15 nt, Homo sapiens
uuagacagucccugc

SEQ ID NO: 268152 - RNA, 16 nt, Homo sapiens
uuagagcugccugugc

SEQ ID NO: 268153 - RNA, 15 nt, Homo sapiens
uuagaugaaugucag

SEQ ID NO: 268154 - RNA, 20 nt, Homo sapiens
uuagauuguuaaaauaacua

SEQ ID NO: 268155 - RNA, 14 nt, Homo sapiens
uuagauuucuagca

SEQ ID NO: 268156 - RNA, 12 nt, Homo sapiens
uuagggcacugg

SEQ ID NO: 268157 - RNA, 16 nt, Homo sapiens
uuagguugugaaugca

SEQ ID NO: 268158 - RNA, 21 nt, Homo sapiens
uuagguuuccacguaagucac

SEQ ID NO: 268159 - RNA, 18 nt, Homo sapiens
uuaguauuugcauauucu

SEQ ID NO: 268160 - RNA, 15 nt, Homo sapiens
uuagucgagccaagu

SEQ ID NO: 268161 - RNA, 16 nt, Homo sapiens
uuagucugucacucca

SEQ ID NO: 268162 - RNA, 15 nt, Homo sapiens
uuagucuugucucag

SEQ ID NO: 268163 - RNA, 17 nt, Homo sapiens
uuagugcacagcacaaa

SEQ ID NO: 268164 - RNA, 19 nt, Homo sapiens
uuagugguuacccaguuag

SEQ ID NO: 268165 - RNA, 17 nt, Homo sapiens
uuauaaaagaugcauua

SEQ ID NO: 268166 - RNA, 24 nt, Homo sapiens
uuauaaaagaugcauuaucuauga

SEQ ID NO: 268167 - RNA, 23 nt, Homo sapiens
uuauaaagggagauaacaaucug

SEQ ID NO: 268168 - RNA, 14 nt, Homo sapiens
uuauaauauacuau

SEQ ID NO: 268169 - RNA, 19 nt, Homo sapiens
uuauacaauauacuuguau

SEQ ID NO: 268170 - RNA, 20 nt, Homo sapiens
uuauagaccagaaccagagc

SEQ ID NO: 268171 - RNA, 15 nt, Homo sapiens
uuauaguuacugugu

SEQ ID NO: 268172 - RNA, 16 nt, Homo sapiens
uuauauagcaguaaaa

SEQ ID NO: 268173 - RNA, 19 nt, Homo sapiens
uuauauauaagccaaaaaa

SEQ ID NO: 268174 - RNA, 21 nt, Homo sapiens
uuauauguauaucacauuccc

SEQ ID NO: 268175 - RNA, 13 nt, Homo sapiens
uuauauucaucca

SEQ ID NO: 268176 - RNA, 22 nt, Homo sapiens
uuauauugccauuucuuccaca

SEQ ID NO: 268177 - RNA, 18 nt, Homo sapiens
uuaucaccgugggcuccc

SEQ ID NO: 268178 - RNA, 22 nt, Homo sapiens
uuaucaccgugggcucccugac

SEQ ID NO: 268179 - RNA, 17 nt, Homo sapiens
uuaucagaauucucaga

SEQ ID NO: 268180 - RNA, 14 nt, Homo sapiens
uuaucagccugugc

SEQ ID NO: 268181 - RNA, 14 nt, Homo sapiens
uuaucagucauaac

SEQ ID NO: 268182 - RNA, 22 nt, Homo sapiens
uuaucauuaaaaggaaagcaga

SEQ ID NO: 268183 - RNA, 13 nt, Homo sapiens
uuauccauguacu

SEQ ID NO: 268184 - RNA, 16 nt, Homo sapiens
uuauccuagucauucu

SEQ ID NO: 268185 - RNA, 16 nt, Homo sapiens
uuauccuguaguacaa

SEQ ID NO: 268186 - RNA, 15 nt, Homo sapiens
uuauccuuccacgga

SEQ ID NO: 268187 - RNA, 16 nt, Homo sapiens
uuaucuagcuguccag

SEQ ID NO: 268188 - RNA, 13 nt, Homo sapiens
uuaucucaggggu

SEQ ID NO: 268189 - RNA, 15 nt, Homo sapiens
uuaucuggcuucaaa

SEQ ID NO: 268190 - RNA, 12 nt, Homo sapiens
uuaucugugcaa

SEQ ID NO: 268191 - RNA, 15 nt, Homo sapiens
uuaugaauaguuucc

SEQ ID NO: 268192 - RNA, 13 nt, Homo sapiens
uuaugacuccaga

SEQ ID NO: 268193 - RNA, 17 nt, Homo sapiens
uuaugacuccagaauuu

SEQ ID NO: 268194 - RNA, 16 nt, Homo sapiens
uuaugacuucauuaau

SEQ ID NO: 268195 - RNA, 14 nt, Homo sapiens
uuauggcaaauuca

SEQ ID NO: 268196 - RNA, 22 nt, Homo sapiens
uuauguaugugaaaguuacaaa

SEQ ID NO: 268197 - RNA, 20 nt, Homo sapiens
uuauuaaauguagaaaguga

SEQ ID NO: 268198 - RNA, 15 nt, Homo sapiens
uuauuacucuauaca

SEQ ID NO: 268199 - RNA, 19 nt, Homo sapiens
uuauuagagugucuuucca

SEQ ID NO: 268200 - RNA, 12 nt, Homo sapiens
uuauuaugcucu

SEQ ID NO: 268201 - RNA, 17 nt, Homo sapiens
uuauuauguacuauuca

SEQ ID NO: 268202 - RNA, 21 nt, Homo sapiens
uucuugaggcagggucucacu

SEQ ID NO: 268203 - RNA, 21 nt, Homo sapiens
uucuugaguuuagugaucuga

SEQ ID NO: 268204 - RNA, 15 nt, Homo sapiens
uucuuggcccaggau

SEQ ID NO: 268205 - RNA, 15 nt, Homo sapiens
uucuuguaaggcaua

SEQ ID NO: 268206 - RNA, 15 nt, Homo sapiens
uucuuucaaagaagc

SEQ ID NO: 268207 - RNA, 18 nt, Homo sapiens
uucuuucaaagaagccag

SEQ ID NO: 268208 - RNA, 17 nt, Homo sapiens
uucuuucccaacaccuc

SEQ ID NO: 268209 - RNA, 12 nt, Homo sapiens
uucuuuccugag

SEQ ID NO: 268210 - RNA, 13 nt, Homo sapiens
uucuuugaauuua

SEQ ID NO: 268211 - RNA, 14 nt, Homo sapiens
uucuuugaauuuag

SEQ ID NO: 268212 - RNA, 13 nt, Homo sapiens
uucuuuucugacu

SEQ ID NO: 268213 - RNA, 15 nt, Homo sapiens
uucuuuucuuuacaa

SEQ ID NO: 268214 - RNA, 19 nt, Homo sapiens
uucuuuuuccccaauaaau

SEQ ID NO: 268215 - RNA, 18 nt, Homo sapiens
uucuuuuugaaaugucaa

SEQ ID NO: 268216 - RNA, 21 nt, Homo sapiens
uugaaaaggaagaucaggcca

SEQ ID NO: 268217 - RNA, 13 nt, Homo sapiens
uugaaaaugggcu

SEQ ID NO: 268218 - RNA, 15 nt, Homo sapiens
uugaaagaaauggug

SEQ ID NO: 268219 - RNA, 20 nt, Homo sapiens
uugaaagaucaaaagguuaa

SEQ ID NO: 268220 - RNA, 12 nt, Homo sapiens
uugaaaugucaa

SEQ ID NO: 268221 - RNA, 23 nt, Homo sapiens
uugaagaugucaucccauugucu

SEQ ID NO: 268222 - RNA, 13 nt, Homo sapiens
uugaagcugcuca

SEQ ID NO: 268223 - RNA, 20 nt, Homo sapiens
uugaaguauauucaaccaaa

SEQ ID NO: 268224 - RNA, 15 nt, Homo sapiens
uugaaugcagggaca

SEQ ID NO: 268225 - RNA, 19 nt, Homo sapiens
uugaauuuagcaaccuaga

SEQ ID NO: 268226 - RNA, 22 nt, Homo sapiens
uugaauuuaggugauaccuaaa

SEQ ID NO: 268227 - RNA, 15 nt, Homo sapiens
uugacaauaauuuca

SEQ ID NO: 268228 - RNA, 15 nt, Homo sapiens
uugacacugcucuaa

SEQ ID NO: 268229 - RNA, 13 nt, Homo sapiens
uugacaggauuau

SEQ ID NO: 268230 - RNA, 15 nt, Homo sapiens
uugacucuccagaaa

SEQ ID NO: 268231 - RNA, 20 nt, Homo sapiens
uugagaaauuaaguaucuga

SEQ ID NO: 268232 - RNA, 21 nt, Homo sapiens
uugagaaauuuuuuuuuccag

SEQ ID NO: 268233 - RNA, 20 nt, Homo sapiens
uugagaauuacccuuuugcc

SEQ ID NO: 268234 - RNA, 13 nt, Homo sapiens
uugagacagaguu

SEQ ID NO: 268235 - RNA, 16 nt, Homo sapiens
uugagacauuugccaa

SEQ ID NO: 268236 - RNA, 17 nt, Homo sapiens
uugagccuuaaaaccca

SEQ ID NO: 268237 - RNA, 20 nt, Homo sapiens
uugagcucaggaguuugaga

SEQ ID NO: 268238 - RNA, 17 nt, Homo sapiens
uugaggauuuugaucca

SEQ ID NO: 268239 - RNA, 15 nt, Homo sapiens
uugagggcaauggac

SEQ ID NO: 268240 - RNA, 20 nt, Homo sapiens
uugaguccagaaguuugaga

SEQ ID NO: 268241 - RNA, 13 nt, Homo sapiens
uugagucuuugga

SEQ ID NO: 268242 - RNA, 16 nt, Homo sapiens
uugagugucaagcuga

SEQ ID NO: 268243 - RNA, 21 nt, Homo sapiens
uugaucagggaccaugaaaag

SEQ ID NO: 268244 - RNA, 14 nt, Homo sapiens
uugauggugaugaa

SEQ ID NO: 268245 - RNA, 13 nt, Homo sapiens
uugauuaccuagu

SEQ ID NO: 268246 - RNA, 15 nt, Homo sapiens
uugauuucauuaaua

SEQ ID NO: 268247 - RNA, 22 nt, Homo sapiens
uugcaaccucgcuggacucuca

SEQ ID NO: 268248 - RNA, 14 nt, Homo sapiens
uugcaauggcagcc

SEQ ID NO: 268249 - RNA, 18 nt, Homo sapiens
uugcacaaauugggccaa

SEQ ID NO: 268250 - RNA, 22 nt, Homo sapiens
uugcacaaauugggccaaagaa

SEQ ID NO: 268251 - RNA, 16 nt, Homo sapiens
uugcacacguccaugu

SEQ ID NO: 268252 - RNA, 14 nt, Homo sapiens
uugcacagccaaau

SEQ ID NO: 268253 - RNA, 20 nt, Homo sapiens
uugcaccuguccccacccuc

SEQ ID NO: 268254 - RNA, 20 nt, Homo sapiens
uugcagcuuauauucaucca

SEQ ID NO: 268255 - RNA, 20 nt, Homo sapiens
uugcaggaccucaggugaga

SEQ ID NO: 268256 - RNA, 14 nt, Homo sapiens
uugcaguaucagag

SEQ ID NO: 268257 - RNA, 15 nt, Homo sapiens
uugcaguuuugccua

SEQ ID NO: 268258 - RNA, 20 nt, Homo sapiens
uugcauaguaccaaucauuu

SEQ ID NO: 268259 - RNA, 23 nt, Homo sapiens
uugcauuuaauuuauugaggcuu

SEQ ID NO: 268260 - RNA, 16 nt, Homo sapiens
uugccacuacccccuc

SEQ ID NO: 268261 - RNA, 19 nt, Homo sapiens
uugccauuaaacuuaccug

SEQ ID NO: 268262 - RNA, 16 nt, Homo sapiens
uucaugcucccagcca

SEQ ID NO: 268263 - RNA, 19 nt, Homo sapiens
uucauguuaguuaccuuau

SEQ ID NO: 268264 - RNA, 18 nt, Homo sapiens
uucauuauuuuauuauga

SEQ ID NO: 268265 - RNA, 13 nt, Homo sapiens
uucauuccccuga

SEQ ID NO: 268266 - RNA, 22 nt, Homo sapiens
uucauuuaggugaggaagcaaa

SEQ ID NO: 268267 - RNA, 23 nt, Homo sapiens
uucauuuaggugaggaagcaaaa

SEQ ID NO: 268268 - RNA, 16 nt, Homo sapiens
uuccaaacacauacag

SEQ ID NO: 268269 - RNA, 15 nt, Homo sapiens
uuccaaccggcuuug

SEQ ID NO: 268270 - RNA, 19 nt, Homo sapiens
uuccaaugcuuugaucccu

SEQ ID NO: 268271 - RNA, 14 nt, Homo sapiens
uuccaauuuacaua

SEQ ID NO: 268272 - RNA, 20 nt, Homo sapiens
uuccaauuuacauacucugc

SEQ ID NO: 268273 - RNA, 21 nt, Homo sapiens
uuccacacccucacugcugua

SEQ ID NO: 268274 - RNA, 17 nt, Homo sapiens
uuccacuugagugucaa

SEQ ID NO: 268275 - RNA, 22 nt, Homo sapiens
uuccauugaagccgacucuggc

SEQ ID NO: 268276 - RNA, 23 nt, Homo sapiens
uuccauugaagccgacucuggcc

SEQ ID NO: 268277 - RNA, 16 nt, Homo sapiens
uuccauuugcaaggga

SEQ ID NO: 268278 - RNA, 23 nt, Homo sapiens
uucccaauagcaaggcugugcau

SEQ ID NO: 268279 - RNA, 16 nt, Homo sapiens
uucccacaggacauuu

SEQ ID NO: 268280 - RNA, 20 nt, Homo sapiens
uucccaucuuccaaggguac

SEQ ID NO: 268281 - RNA, 15 nt, Homo sapiens
uucccauguugucaa

SEQ ID NO: 268282 - RNA, 16 nt, Homo sapiens
uucccauuaaagaagu

SEQ ID NO: 268283 - RNA, 12 nt, Homo sapiens
uuccccacugac

SEQ ID NO: 268284 - RNA, 17 nt, Homo sapiens
uuccccccaaaacugau

SEQ ID NO: 268285 - RNA, 16 nt, Homo sapiens
uuccccccaucuccau

SEQ ID NO: 268286 - RNA, 19 nt, Homo sapiens
uuccccccaucuccauugc

SEQ ID NO: 268287 - RNA, 20 nt, Homo sapiens
uuccccccaucuccauugca

SEQ ID NO: 268288 - RNA, 16 nt, Homo sapiens
uuccccuuccacugag

SEQ ID NO: 268289 - RNA, 23 nt, Homo sapiens
uuccccuuuuauuaauacauuca

SEQ ID NO: 268290 - RNA, 18 nt, Homo sapiens
uucccgggcuguccacua

SEQ ID NO: 268291 - RNA, 17 nt, Homo sapiens
uucccuacaguugaaaa

SEQ ID NO: 268292 - RNA, 18 nt, Homo sapiens
uucccuccucccauguca

SEQ ID NO: 268293 - RNA, 14 nt, Homo sapiens
uucccuccugcuuu

SEQ ID NO: 268294 - RNA, 17 nt, Homo sapiens
uucccugugucauuuca

SEQ ID NO: 268295 - RNA, 21 nt, Homo sapiens
uucccuuuuuuggcugcugaa

SEQ ID NO: 268296 - RNA, 12 nt, Homo sapiens
uuccgucucccc

SEQ ID NO: 268297 - RNA, 17 nt, Homo sapiens
uuccuacccuuccucac

SEQ ID NO: 268298 - RNA, 16 nt, Homo sapiens
uuccuacugggggcaa

SEQ ID NO: 268299 - RNA, 16 nt, Homo sapiens
uuccuagaaacugaca

SEQ ID NO: 268300 - RNA, 21 nt, Homo sapiens
uuccuagaaacugacacaugc

SEQ ID NO: 268301 - RNA, 12 nt, Homo sapiens
uuccuagcugug

SEQ ID NO: 268302 - RNA, 20 nt, Homo sapiens
uuccuauuugcacacgucca

SEQ ID NO: 268303 - RNA, 21 nt, Homo sapiens
uuccuauuugcacacguccau

SEQ ID NO: 268304 - RNA, 16 nt, Homo sapiens
uuccuccccuguucau

SEQ ID NO: 268305 - RNA, 18 nt, Homo sapiens
uuccucuuuccaucuacc

SEQ ID NO: 268306 - RNA, 17 nt, Homo sapiens
uuccugaaccgaugaga

SEQ ID NO: 268307 - RNA, 22 nt, Homo sapiens
uuccugaagaauugaaaaacca

SEQ ID NO: 268308 - RNA, 12 nt, Homo sapiens
uuccugaggcug

SEQ ID NO: 268309 - RNA, 17 nt, Homo sapiens
uuccugauuccuuuaaa

SEQ ID NO: 268310 - RNA, 22 nt, Homo sapiens
uuccugggaauaacauggugag

SEQ ID NO: 268311 - RNA, 17 nt, Homo sapiens
uuccugucaauacaggu

SEQ ID NO: 268312 - RNA, 17 nt, Homo sapiens
uuccuguucccaugaga

SEQ ID NO: 268313 - RNA, 22 nt, Homo sapiens
uuccuuagcuuagaccucagcc

SEQ ID NO: 268314 - RNA, 11 nt, Homo sapiens
uuccuugagaa

SEQ ID NO: 268315 - RNA, 17 nt, Homo sapiens
uuccuugaucuguauau

SEQ ID NO: 268316 - RNA, 21 nt, Homo sapiens
uuccuugauggagauauuuac

SEQ ID NO: 268317 - RNA, 22 nt, Homo sapiens
uuccuugcuuaugagaccaaga

SEQ ID NO: 268318 - RNA, 14 nt, Homo sapiens
uuccuuuccauugu

SEQ ID NO: 268319 - RNA, 16 nt, Homo sapiens
uuccuuuccauuguag

SEQ ID NO: 268320 - RNA, 17 nt, Homo sapiens
uuccuuugggagcucau

SEQ ID NO: 268321 - RNA, 23 nt, Homo sapiens
uucgauacaccgggccuggagaa

SEQ ID NO: 268322 - RNA, 20 nt, Homo sapiens
uucgcaggauucuuccuccc

SEQ ID NO: 268323 - RNA, 23 nt, Homo sapiens
uucgccaaggcucacaugcuccu

SEQ ID NO: 268324 - RNA, 12 nt, Homo sapiens
uucgucugccag

SEQ ID NO: 268325 - RNA, 23 nt, Homo sapiens
uucuaaagauggaaaaaccaccc

SEQ ID NO: 268326 - RNA, 23 nt, Homo sapiens
uucuaaaugaauguuuacacucu

SEQ ID NO: 268327 - RNA, 14 nt, Homo sapiens
uucuacccaggugc

SEQ ID NO: 268328 - RNA, 23 nt, Homo sapiens
uucuaccuuccugcaacaccuug

SEQ ID NO: 268329 - RNA, 20 nt, Homo sapiens
uucuacucgaguuacagaca

SEQ ID NO: 268330 - RNA, 22 nt, Homo sapiens
uucuacucgaguuacagacaaa

SEQ ID NO: 268331 - RNA, 14 nt, Homo sapiens
uucuagcaguaugu

SEQ ID NO: 268332 - RNA, 18 nt, Homo sapiens
uucuagcauggcugccaa

SEQ ID NO: 268333 - RNA, 17 nt, Homo sapiens
uucuauacuuucucaca

SEQ ID NO: 268334 - RNA, 20 nt, Homo sapiens
uucuauacuuucucacaugu

SEQ ID NO: 268335 - RNA, 21 nt, Homo sapiens
uucuauggguuggacaaccuc

SEQ ID NO: 268336 - RNA, 21 nt, Homo sapiens
uucuauuuuauaaaacaaaua

SEQ ID NO: 268337 - RNA, 22 nt, Homo sapiens
uucucagaaucuacccaaagga

SEQ ID NO: 268338 - RNA, 21 nt, Homo sapiens
uucucagaaucucaaauaacu

SEQ ID NO: 268339 - RNA, 20 nt, Homo sapiens
uucucauuucuguagccuga

SEQ ID NO: 268340 - RNA, 17 nt, Homo sapiens
uucuccaagcaggacau

SEQ ID NO: 268341 - RNA, 14 nt, Homo sapiens
uucuccagacaaac

SEQ ID NO: 268342 - RNA, 21 nt, Homo sapiens
uucuccaugucuguaguugcu

SEQ ID NO: 268343 - RNA, 13 nt, Homo sapiens
uucuccugccuca

SEQ ID NO: 268344 - RNA, 14 nt, Homo sapiens
uucucguacuuuca

SEQ ID NO: 268345 - RNA, 20 nt, Homo sapiens
uucucucaccuccuaaagua

SEQ ID NO: 268346 - RNA, 19 nt, Homo sapiens
uuguuguuuauaaagggag

SEQ ID NO: 268347 - RNA, 14 nt, Homo sapiens
uuguuuaccagaga

SEQ ID NO: 268348 - RNA, 20 nt, Homo sapiens
uuguuuagucuugucucaga

SEQ ID NO: 268349 - RNA, 18 nt, Homo sapiens
uuguuucaaccaguuuga

SEQ ID NO: 268350 - RNA, 22 nt, Homo sapiens
uuguuugagaaauuaaguaucu

SEQ ID NO: 268351 - RNA, 19 nt, Homo sapiens
uuguuugcauaggugaucu

SEQ ID NO: 268352 - RNA, 16 nt, Homo sapiens
uuguuuguggucuaua

SEQ ID NO: 268353 - RNA, 11 nt, Homo sapiens
uuuaaagacag

SEQ ID NO: 268354 - RNA, 23 nt, Homo sapiens
uuuaaauacagucuuccauuugc

SEQ ID NO: 268355 - RNA, 21 nt, Homo sapiens
uuuaaauagaugacauugacu

SEQ ID NO: 268356 - RNA, 12 nt, Homo sapiens
uuuaaaucugag

SEQ ID NO: 268357 - RNA, 17 nt, Homo sapiens
uuuaaaugaaagugaga

SEQ ID NO: 268358 - RNA, 18 nt, Homo sapiens
uuuaaaugaaagugagac

SEQ ID NO: 268359 - RNA, 15 nt, Homo sapiens
uuuaaaugaaccaaa

SEQ ID NO: 268360 - RNA, 16 nt, Homo sapiens
uuuaaaugcaccugga

SEQ ID NO: 268361 - RNA, 11 nt, Homo sapiens
uuuaaccaaga

SEQ ID NO: 268362 - RNA, 18 nt, Homo sapiens
uuuaagagaaaugagcug

SEQ ID NO: 268363 - RNA, 17 nt, Homo sapiens
uuuaagcagcgccagug

SEQ ID NO: 268364 - RNA, 19 nt, Homo sapiens
uuuaagguuuuuacuguga

SEQ ID NO: 268365 - RNA, 19 nt, Homo sapiens
uuuaauaaaaauuccuuaa

SEQ ID NO: 268366 - RNA, 14 nt, Homo sapiens
uuuaaucacauucg

SEQ ID NO: 268367 - RNA, 11 nt, Homo sapiens
uuuaauuuugg

SEQ ID NO: 268368 - RNA, 12 nt, Homo sapiens
uuuacaacuggg

SEQ ID NO: 268369 - RNA, 17 nt, Homo sapiens
uuuacaauguucauccc

SEQ ID NO: 268370 - RNA, 23 nt, Homo sapiens
uuuacagaaucaaaugcaauuuu

SEQ ID NO: 268371 - RNA, 11 nt, Homo sapiens
uuuacaguguu

SEQ ID NO: 268372 - RNA, 21 nt, Homo sapiens
uuuaccugaaauaaaauucau

SEQ ID NO: 268373 - RNA, 16 nt, Homo sapiens
uuuacuuuaaaaagua

SEQ ID NO: 268374 - RNA, 18 nt, Homo sapiens
uuuagacccugcauuuau

SEQ ID NO: 268375 - RNA, 21 nt, Homo sapiens
uuuagaccuguguuacuaaaa

SEQ ID NO: 268376 - RNA, 15 nt, Homo sapiens
uuuagaugaauguca

SEQ ID NO: 268377 - RNA, 13 nt, Homo sapiens
uuuagauuguuaa

SEQ ID NO: 268378 - RNA, 15 nt, Homo sapiens
uuuagcuucccuuaa

SEQ ID NO: 268379 - RNA, 13 nt, Homo sapiens
uuuagucugggcu

SEQ ID NO: 268380 - RNA, 16 nt, Homo sapiens
uuuauaaaaguguuca

SEQ ID NO: 268381 - RNA, 18 nt, Homo sapiens
uuuauaaggcugauguca

SEQ ID NO: 268382 - RNA, 23 nt, Homo sapiens
uuuauacucaggcagaucucagc

SEQ ID NO: 268383 - RNA, 18 nt, Homo sapiens
uuuauauuuuuauagaca

SEQ ID NO: 268384 - RNA, 14 nt, Homo sapiens
uuuauccuagucau

SEQ ID NO: 268385 - RNA, 13 nt, Homo sapiens
uuuaucugugcaa

SEQ ID NO: 268386 - RNA, 14 nt, Homo sapiens
uuuaucugugcaaa

SEQ ID NO: 268387 - RNA, 20 nt, Homo sapiens
uuuaugagaaaugccagugu

SEQ ID NO: 268388 - RNA, 12 nt, Homo sapiens
uuuaugguucuc

SEQ ID NO: 268389 - RNA, 15 nt, Homo sapiens
uuuauuaaucuuagu

SEQ ID NO: 268390 - RNA, 21 nt, Homo sapiens
uuuauuacaguuuaucuaugg

SEQ ID NO: 268391 - RNA, 13 nt, Homo sapiens
uuuauuauauaua

SEQ ID NO: 268392 - RNA, 18 nt, Homo sapiens
uuuauuauuaacaaaaca

SEQ ID NO: 268393 - RNA, 12 nt, Homo sapiens
uuuauucuuggu

SEQ ID NO: 268394 - RNA, 16 nt, Homo sapiens
uuuauuuuucucauga

SEQ ID NO: 268395 - RNA, 19 nt, Homo sapiens
uuuauuuuuguagagccag

SEQ ID NO: 268396 - RNA, 16 nt, Homo sapiens
uuucaaaaaaucugac

SEQ ID NO: 268397 - RNA, 22 nt, Homo sapiens
uuucaaaaaaucugaccaaaac

SEQ ID NO: 268398 - RNA, 12 nt, Homo sapiens
uuucaaacuuua

SEQ ID NO: 268399 - RNA, 12 nt, Homo sapiens
uuucaauugcau

SEQ ID NO: 268400 - RNA, 12 nt, Homo sapiens
uuucacacugug

SEQ ID NO: 268401 - RNA, 11 nt, Homo sapiens
uuucaccacau

SEQ ID NO: 268402 - RNA, 17 nt, Homo sapiens
uuucaccacaugugcac

SEQ ID NO: 268403 - RNA, 13 nt, Homo sapiens
uuucaccauuuga

SEQ ID NO: 268404 - RNA, 14 nt, Homo sapiens
uuucaccuucauau

SEQ ID NO: 268405 - RNA, 20 nt, Homo sapiens
uuucacgccugaggcaauua

SEQ ID NO: 268406 - RNA, 22 nt, Homo sapiens
uuucacgggcaacacucacugc

SEQ ID NO: 268407 - RNA, 23 nt, Homo sapiens
uuucagagugacuacacacagua

SEQ ID NO: 268408 - RNA, 21 nt, Homo sapiens
uuucaggccacauggcuaaag

SEQ ID NO: 268409 - RNA, 18 nt, Homo sapiens
uuucagguuccaaucaga

SEQ ID NO: 268410 - RNA, 20 nt, Homo sapiens
uuucauacuguaacauucag

SEQ ID NO: 268411 - RNA, 19 nt, Homo sapiens
uuucauccacuagugcaaa

SEQ ID NO: 268412 - RNA, 18 nt, Homo sapiens
uuucauuuaggugaggaa

SEQ ID NO: 268413 - RNA, 16 nt, Homo sapiens
uuuccaacacaucuau

SEQ ID NO: 268414 - RNA, 17 nt, Homo sapiens
uuuccauuguagcucuu

SEQ ID NO: 268415 - RNA, 18 nt, Homo sapiens
uuuccauuguagcucuuu

SEQ ID NO: 268416 - RNA, 14 nt, Homo sapiens
uuuccccaauucau

SEQ ID NO: 268417 - RNA, 23 nt, Homo sapiens
uugacaaacucucccuucacucc

SEQ ID NO: 268418 - RNA, 17 nt, Homo sapiens
uugacaaccaugagacc

SEQ ID NO: 268419 - RNA, 20 nt, Homo sapiens
uugacagauugaauuugccu

SEQ ID NO: 268420 - RNA, 22 nt, Homo sapiens
uugacagauugaauuugccuaa

SEQ ID NO: 268421 - RNA, 19 nt, Homo sapiens
uugacaguucauauguacc

SEQ ID NO: 268422 - RNA, 16 nt, Homo sapiens
uugacauucugaaugc

SEQ ID NO: 268423 - RNA, 19 nt, Homo sapiens
uugaccgagcacauaccau

SEQ ID NO: 268424 - RNA, 17 nt, Homo sapiens
uugaccgugaggccaga

SEQ ID NO: 268425 - RNA, 12 nt, Homo sapiens
uugaccucaggu

SEQ ID NO: 268426 - RNA, 18 nt, Homo sapiens
uugacgucucuauucugc

SEQ ID NO: 268427 - RNA, 22 nt, Homo sapiens
uugacuggguuucucuguauag

SEQ ID NO: 268428 - RNA, 11 nt, Homo sapiens
uugacuuuguc

SEQ ID NO: 268429 - RNA, 17 nt, Homo sapiens
uugagcugcucugcaag

SEQ ID NO: 268430 - RNA, 19 nt, Homo sapiens
uugagcugcucugcaagag

SEQ ID NO: 268431 - RNA, 19 nt, Homo sapiens
uugagcuuaagaauuuuga

SEQ ID NO: 268432 - RNA, 21 nt, Homo sapiens
uugaguuugucgcucaugugu

SEQ ID NO: 268433 - RNA, 20 nt, Homo sapiens
uugauaaucaacugggcuga

SEQ ID NO: 268434 - RNA, 11 nt, Homo sapiens
uugauacaugc

SEQ ID NO: 268435 - RNA, 15 nt, Homo sapiens
uugaucagacauuca

SEQ ID NO: 268436 - RNA, 17 nt, Homo sapiens
uugaugagaauccugac

SEQ ID NO: 268437 - RNA, 14 nt, Homo sapiens
uugaugcaugcacu

SEQ ID NO: 268438 - RNA, 14 nt, Homo sapiens
uugauguacuuuac

SEQ ID NO: 268439 - RNA, 15 nt, Homo sapiens
uugauguucuuucac

SEQ ID NO: 268440 - RNA, 16 nt, Homo sapiens
uugauugggcacauca

SEQ ID NO: 268441 - RNA, 16 nt, Homo sapiens
uugcaaaccaucccag

SEQ ID NO: 268442 - RNA, 21 nt, Homo sapiens
uugcaaaguaucccuacugua

SEQ ID NO: 268443 - RNA, 14 nt, Homo sapiens
uugcaaccucgcug

SEQ ID NO: 268444 - RNA, 13 nt, Homo sapiens
uugcaaggcauuu

SEQ ID NO: 268445 - RNA, 15 nt, Homo sapiens
uugcaauguggcuug

SEQ ID NO: 268446 - RNA, 18 nt, Homo sapiens
uugcaauguggcuugaau

SEQ ID NO: 268447 - RNA, 19 nt, Homo sapiens
uugcacaaaaucacacagc

SEQ ID NO: 268448 - RNA, 21 nt, Homo sapiens
uugcacaaaaucacacagcca

SEQ ID NO: 268449 - RNA, 14 nt, Homo sapiens
uugcaccacugcac

SEQ ID NO: 268450 - RNA, 14 nt, Homo sapiens
uugcagacaggcaa

SEQ ID NO: 268451 - RNA, 21 nt, Homo sapiens
uugcagcuuauauucauccau

SEQ ID NO: 268452 - RNA, 18 nt, Homo sapiens
uugcaggaccucagguga

SEQ ID NO: 268453 - RNA, 13 nt, Homo sapiens
uugcaugaggcua

SEQ ID NO: 268454 - RNA, 14 nt, Homo sapiens
uugccauguuggcc

SEQ ID NO: 268455 - RNA, 21 nt, Homo sapiens
uugcccacacuugggagcaaa

SEQ ID NO: 268456 - RNA, 22 nt, Homo sapiens
uugcccacacuugggagcaaaa

SEQ ID NO: 268457 - RNA, 21 nt, Homo sapiens
uugcccaggcuggagugcaau

SEQ ID NO: 268458 - RNA, 17 nt, Homo sapiens
uugccuaauggcaaaac

SEQ ID NO: 268459 - RNA, 15 nt, Homo sapiens
uugccucucaauugu

SEQ ID NO: 268460 - RNA, 21 nt, Homo sapiens
uugccucugaagccuauguau

SEQ ID NO: 268461 - RNA, 20 nt, Homo sapiens
uugccuuauuggcagcucua

SEQ ID NO: 268462 - RNA, 13 nt, Homo sapiens
uugcggacagcca

SEQ ID NO: 268463 - RNA, 23 nt, Homo sapiens
uugcuauggggagaaaagacaug

SEQ ID NO: 268464 - RNA, 16 nt, Homo sapiens
uugcucuggacagaga

SEQ ID NO: 268465 - RNA, 23 nt, Homo sapiens
uugcugcugauuuaaacacauua

SEQ ID NO: 268466 - RNA, 15 nt, Homo sapiens
uugcuggcaaagaca

SEQ ID NO: 268467 - RNA, 16 nt, Homo sapiens
uugcuggcaaagacag

SEQ ID NO: 268468 - RNA, 17 nt, Homo sapiens
uugcuggcaacaacaga

SEQ ID NO: 268469 - RNA, 23 nt, Homo sapiens
uugcuggggcucgugcccugcau

SEQ ID NO: 268470 - RNA, 17 nt, Homo sapiens
uugcuggucacugccau

SEQ ID NO: 268471 - RNA, 13 nt, Homo sapiens
uugcugugagcaa

SEQ ID NO: 268472 - RNA, 21 nt, Homo sapiens
uugcuuccuuugggagcucau

SEQ ID NO: 268473 - RNA, 14 nt, Homo sapiens
uugcuucucuagcu

SEQ ID NO: 268474 - RNA, 19 nt, Homo sapiens
uugcuugcacaaaccaauu

SEQ ID NO: 268475 - RNA, 14 nt, Homo sapiens
uuggaaaaucaaga

SEQ ID NO: 268476 - RNA, 12 nt, Homo sapiens
uuggaaaucaca

SEQ ID NO: 268477 - RNA, 17 nt, Homo sapiens
uuggagggugucccaaa

SEQ ID NO: 268478 - RNA, 19 nt, Homo sapiens
uuggauacgacaacuugca

SEQ ID NO: 268479 - RNA, 15 nt, Homo sapiens
uuggauuguccccga

SEQ ID NO: 268480 - RNA, 13 nt, Homo sapiens
uuggcaaugccau

SEQ ID NO: 268481 - RNA, 23 nt, Homo sapiens
uuggcauaacauaaaucugugaa

SEQ ID NO: 268482 - RNA, 15 nt, Homo sapiens
uuggccagugugaca

SEQ ID NO: 268483 - RNA, 12 nt, Homo sapiens
uuggcccaggau

SEQ ID NO: 268484 - RNA, 23 nt, Homo sapiens
uuggccugucuuuggauuguuaa

SEQ ID NO: 268485 - RNA, 15 nt, Homo sapiens
uuggcucuacccuga

SEQ ID NO: 268486 - RNA, 16 nt, Homo sapiens
uuggcuucuaaucaaa

SEQ ID NO: 268487 - RNA, 14 nt, Homo sapiens
uuggcuuuuacuga

SEQ ID NO: 268488 - RNA, 21 nt, Homo sapiens
uugggaaaauacguugaggga

SEQ ID NO: 268489 - RNA, 13 nt, Homo sapiens
uugggaagacaug

SEQ ID NO: 268490 - RNA, 23 nt, Homo sapiens
uugggagggugguucaacaaaga

SEQ ID NO: 268491 - RNA, 13 nt, Homo sapiens
uugggaugggcag

SEQ ID NO: 268492 - RNA, 13 nt, Homo sapiens
uuuucaccccacc

SEQ ID NO: 268493 - RNA, 10 nt, Homo sapiens
uuuucacugc

SEQ ID NO: 268494 - RNA, 12 nt, Homo sapiens
uuuucacuugua

SEQ ID NO: 268495 - RNA, 14 nt, Homo sapiens
uuuuccaacuacua

SEQ ID NO: 268496 - RNA, 13 nt, Homo sapiens
uuuuccacuuaga

SEQ ID NO: 268497 - RNA, 14 nt, Homo sapiens
uuuuccugccaggc

SEQ ID NO: 268498 - RNA, 19 nt, Homo sapiens
uuuucgccaaggcucacau

SEQ ID NO: 268499 - RNA, 21 nt, Homo sapiens
uuuucuaagaaagaaauugua

SEQ ID NO: 268500 - RNA, 15 nt, Homo sapiens
uuuucuagucuucau

SEQ ID NO: 268501 - RNA, 14 nt, Homo sapiens
uuuucucaugauga

SEQ ID NO: 268502 - RNA, 19 nt, Homo sapiens
uuuucuucuuuuugcuuca

SEQ ID NO: 268503 - RNA, 14 nt, Homo sapiens
uuuucuugucuaua

SEQ ID NO: 268504 - RNA, 20 nt, Homo sapiens
uuuugaagauucuauguuaa

SEQ ID NO: 268505 - RNA, 18 nt, Homo sapiens
uuuugcacacuuugccau

SEQ ID NO: 268506 - RNA, 18 nt, Homo sapiens
uuuugcuggucacugcca

SEQ ID NO: 268507 - RNA, 20 nt, Homo sapiens
uuuugcuggucacugccaug

SEQ ID NO: 268508 - RNA, 21 nt, Homo sapiens
uuuugguugcuuuaauaucau

SEQ ID NO: 268509 - RNA, 22 nt, Homo sapiens
uuuuguagagacagggucucac

SEQ ID NO: 268510 - RNA, 21 nt, Homo sapiens
uuuuguaucaccucuucacaa

SEQ ID NO: 268511 - RNA, 19 nt, Homo sapiens
uuuugucuaugggacucaa

SEQ ID NO: 268512 - RNA, 13 nt, Homo sapiens
uuuugugauucua

SEQ ID NO: 268513 - RNA, 17 nt, Homo sapiens
uuuuguuggcauagcuc

SEQ ID NO: 268514 - RNA, 18 nt, Homo sapiens
uuuuuaaaaaacugcuga

SEQ ID NO: 268515 - RNA, 15 nt, Homo sapiens
uuuuuccuaacagga

SEQ ID NO: 268516 - RNA, 18 nt, Homo sapiens
uuucaaauuggagcuuca

SEQ ID NO: 268517 - RNA, 17 nt, Homo sapiens
uuucaacagaauucacu

SEQ ID NO: 268518 - RNA, 15 nt, Homo sapiens
uuucaaccaguuuga

SEQ ID NO: 268519 - RNA, 23 nt, Homo sapiens
uuucaaugaugggcgagcgugca

SEQ ID NO: 268520 - RNA, 11 nt, Homo sapiens
uuucacaucuc

SEQ ID NO: 268521 - RNA, 18 nt, Homo sapiens
uuucacgggcaacacuca

SEQ ID NO: 268522 - RNA, 16 nt, Homo sapiens
uuucaggccacauggc

SEQ ID NO: 268523 - RNA, 19 nt, Homo sapiens
uuucagguuccaaucagaa

SEQ ID NO: 268524 - RNA, 22 nt, Homo sapiens
uuucagugcugugucauuccaa

SEQ ID NO: 268525 - RNA, 18 nt, Homo sapiens
uuucagugcuuugcccuu

SEQ ID NO: 268526 - RNA, 23 nt, Homo sapiens
uuucaguggcuaccuacauacaa

SEQ ID NO: 268527 - RNA, 18 nt, Homo sapiens
uuucauaaccuagccuua

SEQ ID NO: 268528 - RNA, 16 nt, Homo sapiens
uuucauaucacacugu

SEQ ID NO: 268529 - RNA, 14 nt, Homo sapiens
uuucaugugugauu

SEQ ID NO: 268530 - RNA, 12 nt, Homo sapiens
uuucauugcugg

SEQ ID NO: 268531 - RNA, 17 nt, Homo sapiens
uuucauuuaucuauaau

SEQ ID NO: 268532 - RNA, 17 nt, Homo sapiens
uuuccaaauuauggcaa

SEQ ID NO: 268533 - RNA, 14 nt, Homo sapiens
uuuccaaccggcuu

SEQ ID NO: 268534 - RNA, 15 nt, Homo sapiens
uuuccaacuacuaau

SEQ ID NO: 268535 - RNA, 23 nt, Homo sapiens
uuuccacauaaggaaacuggguu

SEQ ID NO: 268536 - RNA, 10 nt, Homo sapiens
uuuccaugau

SEQ ID NO: 268537 - RNA, 12 nt, Homo sapiens
uuucccaaagag

SEQ ID NO: 268538 - RNA, 15 nt, Homo sapiens
uuucccaacaccucu

SEQ ID NO: 268539 - RNA, 16 nt, Homo sapiens
uuucccaacaccucuu

SEQ ID NO: 268540 - RNA, 22 nt, Homo sapiens
uuucccuguguacccuccaugu

SEQ ID NO: 268541 - RNA, 15 nt, Homo sapiens
uuuccgaaaucagaa

SEQ ID NO: 268542 - RNA, 18 nt, Homo sapiens
uuuccuucauucaaccca

SEQ ID NO: 268543 - RNA, 15 nt, Homo sapiens
uuuccuuuccauugu

SEQ ID NO: 268544 - RNA, 22 nt, Homo sapiens
uuucuacuuugaagucauacca

SEQ ID NO: 268545 - RNA, 18 nt, Homo sapiens
uuucuaugacacaugcaa

SEQ ID NO: 268546 - RNA, 18 nt, Homo sapiens
uuucucuucaaauuuagc

SEQ ID NO: 268547 - RNA, 17 nt, Homo sapiens
uuucucuucccaugcaa

SEQ ID NO: 268548 - RNA, 21 nt, Homo sapiens
uuucugauaaaagauggccau

SEQ ID NO: 268549 - RNA, 22 nt, Homo sapiens
uuucuggaugaaugcccaguga

SEQ ID NO: 268550 - RNA, 23 nt, Homo sapiens
uuucuggaugaaugcccagugag

SEQ ID NO: 268551 - RNA, 17 nt, Homo sapiens
uuucuggcagccaguac

SEQ ID NO: 268552 - RNA, 19 nt, Homo sapiens
uuucuggcuaugcauuuga

SEQ ID NO: 268553 - RNA, 14 nt, Homo sapiens
uuucuuacauuagc

SEQ ID NO: 268554 - RNA, 19 nt, Homo sapiens
uuucuucauguucagucac

SEQ ID NO: 268555 - RNA, 23 nt, Homo sapiens
uuucuucauguucagucacaugu

SEQ ID NO: 268556 - RNA, 23 nt, Homo sapiens
uuucuuguaaggcauacugccuu

SEQ ID NO: 268557 - RNA, 20 nt, Homo sapiens
uuucuugucuauaaagcauu

SEQ ID NO: 268558 - RNA, 21 nt, Homo sapiens
uuucuuugaauuuaggugaua

SEQ ID NO: 268559 - RNA, 17 nt, Homo sapiens
uuucuuuuguauguaaa

SEQ ID NO: 268560 - RNA, 14 nt, Homo sapiens
uuugaaaucuauga

SEQ ID NO: 268561 - RNA, 15 nt, Homo sapiens
uuugaaaucuaugaa

SEQ ID NO: 268562 - RNA, 19 nt, Homo sapiens
uuugaacccuugcuugcaa

SEQ ID NO: 268563 - RNA, 12 nt, Homo sapiens
uuugaauuuugu

SEQ ID NO: 268564 - RNA, 14 nt, Homo sapiens
uuugacaaccauga

SEQ ID NO: 268565 - RNA, 14 nt, Homo sapiens
uuugagacuuagaa

SEQ ID NO: 268566 - RNA, 15 nt, Homo sapiens
uuugaggguguauau

SEQ ID NO: 268567 - RNA, 17 nt, Homo sapiens
uuugauuaaagacucca

SEQ ID NO: 268568 - RNA, 15 nt, Homo sapiens
uuugauuauucagug

SEQ ID NO: 268569 - RNA, 14 nt, Homo sapiens
uuugauucagacag

SEQ ID NO: 268570 - RNA, 20 nt, Homo sapiens
uuugcaagggaaaagucucu

SEQ ID NO: 268571 - RNA, 17 nt, Homo sapiens
uuugcacacguccaugu

SEQ ID NO: 268572 - RNA, 14 nt, Homo sapiens
uuugcagacaggca

SEQ ID NO: 268573 - RNA, 14 nt, Homo sapiens
uuugcauauugcau

SEQ ID NO: 268574 - RNA, 23 nt, Homo sapiens
uuugccauauuuucaccauuuga

SEQ ID NO: 268575 - RNA, 15 nt, Homo sapiens
uuugcuagcagaaau

SEQ ID NO: 268576 - RNA, 18 nt, Homo sapiens
uuugcuagcagaaaucua

SEQ ID NO: 268577 - RNA, 22 nt, Homo sapiens
uuuggaaaucacacgucuggcu

SEQ ID NO: 268578 - RNA, 14 nt, Homo sapiens
aaauucacuucccc

SEQ ID NO: 268579 - RNA, 16 nt, Homo sapiens
aaauucaugcugcuua

SEQ ID NO: 268580 - RNA, 21 nt, Homo sapiens
aaauucauuaguuguuaguga

SEQ ID NO: 268581 - RNA, 21 nt, Homo sapiens
aaauucucuuuccuguagucc

SEQ ID NO: 268582 - RNA, 12 nt, Homo sapiens
aaauucuuucag

SEQ ID NO: 268583 - RNA, 15 nt, Homo sapiens
aaauuguacaaccug

SEQ ID NO: 268584 - RNA, 22 nt, Homo sapiens
aaauuguauuaucaacagcauu

SEQ ID NO: 268585 - RNA, 13 nt, Homo sapiens
aaauuuaugugau

SEQ ID NO: 268586 - RNA, 15 nt, Homo sapiens
aaauuucucuacugu

SEQ ID NO: 268587 - RNA, 19 nt, Homo sapiens
aaauuucucuacugucuca

SEQ ID NO: 268588 - RNA, 21 nt, Homo sapiens
aaauuucuguaaaacagguua

SEQ ID NO: 268589 - RNA, 16 nt, Homo sapiens
aaauuuguaugcucaa

SEQ ID NO: 268590 - RNA, 20 nt, Homo sapiens
aacaaaaauuaaaauccuca

SEQ ID NO: 268591 - RNA, 23 nt, Homo sapiens
aacaaaucugcaccccacuucag

SEQ ID NO: 268592 - RNA, 16 nt, Homo sapiens
aacaaauguauuucaa

SEQ ID NO: 268593 - RNA, 22 nt, Homo sapiens
aacaaccucggcuccuggacuc

SEQ ID NO: 268594 - RNA, 12 nt, Homo sapiens
aacaagugcucu

SEQ ID NO: 268595 - RNA, 13 nt, Homo sapiens
aacaagugcucuu

SEQ ID NO: 268596 - RNA, 18 nt, Homo sapiens
aacaagugcucuuuccac

SEQ ID NO: 268597 - RNA, 14 nt, Homo sapiens
aacaauccaucucu

SEQ ID NO: 268598 - RNA, 21 nt, Homo sapiens
aacaaucuugucauacuugaa

SEQ ID NO: 268599 - RNA, 13 nt, Homo sapiens
aacacaacaucuu

SEQ ID NO: 268600 - RNA, 13 nt, Homo sapiens
aacacacaauauu

SEQ ID NO: 268601 - RNA, 19 nt, Homo sapiens
aacacacacuguucugaaa

SEQ ID NO: 268602 - RNA, 21 nt, Homo sapiens
aacacacaggugcaacagacu

SEQ ID NO: 268603 - RNA, 14 nt, Homo sapiens
aacacauacaggaa

SEQ ID NO: 268604 - RNA, 18 nt, Homo sapiens
aacaccaacauguuggga

SEQ ID NO: 268605 - RNA, 23 nt, Homo sapiens
aacacuaaugaggaaacugcacu

SEQ ID NO: 268606 - RNA, 23 nt, Homo sapiens
aacacucacauuuauucugcuca

SEQ ID NO: 268607 - RNA, 13 nt, Homo sapiens
aacacucacugcc

SEQ ID NO: 268608 - RNA, 22 nt, Homo sapiens
aacacuuuacaauguucauccc

SEQ ID NO: 268609 - RNA, 22 nt, Homo sapiens
aacagaauugauaacugagcaa

SEQ ID NO: 268610 - RNA, 12 nt, Homo sapiens
aacagacuugaa

SEQ ID NO: 268611 - RNA, 14 nt, Homo sapiens
aacagagacugaau

SEQ ID NO: 268612 - RNA, 17 nt, Homo sapiens
aacagcaacacaaagcu

SEQ ID NO: 268613 - RNA, 22 nt, Homo sapiens
aacagcaacacaaagcuuuugc

SEQ ID NO: 268614 - RNA, 19 nt, Homo sapiens
aacagccaaaaaggacuuu

SEQ ID NO: 268615 - RNA, 18 nt, Homo sapiens
aacagcccuccucugcac

SEQ ID NO: 268616 - RNA, 16 nt, Homo sapiens
aacagcuggugcccug

SEQ ID NO: 268617 - RNA, 17 nt, Homo sapiens
aacaggccgcacaucuc

SEQ ID NO: 268618 - RNA, 21 nt, Homo sapiens
aacaggccgcacaucucacuu

SEQ ID NO: 268619 - RNA, 18 nt, Homo sapiens
aacagguuauaacagugu

SEQ ID NO: 268620 - RNA, 21 nt, Homo sapiens
aacagguuuaaaaauccccaa

SEQ ID NO: 268621 - RNA, 19 nt, Homo sapiens
aacagguuuuccugaagaa

SEQ ID NO: 268622 - RNA, 15 nt, Homo sapiens
aacaguaacugccau

SEQ ID NO: 268623 - RNA, 23 nt, Homo sapiens
aacaguaguugcaauguuuuaga

SEQ ID NO: 268624 - RNA, 22 nt, Homo sapiens
aacaguuuuuuaugcuaaucag

SEQ ID NO: 268625 - RNA, 22 nt, Homo sapiens
aacauagugaaaccccaucucu

SEQ ID NO: 268626 - RNA, 21 nt, Homo sapiens
aacaucuuggucagauuugaa

SEQ ID NO: 268627 - RNA, 17 nt, Homo sapiens
aacaucuuuuacauucu

SEQ ID NO: 268628 - RNA, 19 nt, Homo sapiens
aacaugccagccacuguga

SEQ ID NO: 268629 - RNA, 17 nt, Homo sapiens
aacaugcuugcauuaua

SEQ ID NO: 268630 - RNA, 14 nt, Homo sapiens
aacauggaaguacu

SEQ ID NO: 268631 - RNA, 19 nt, Homo sapiens
aacauguaauuaaguacua

SEQ ID NO: 268632 - RNA, 13 nt, Homo sapiens
aacaugugcucag

SEQ ID NO: 268633 - RNA, 15 nt, Homo sapiens
aacauguuaaaccau

SEQ ID NO: 268634 - RNA, 15 nt, Homo sapiens
aacauugcaauagaa

SEQ ID NO: 268635 - RNA, 22 nt, Homo sapiens
aacauuuguuuuagucugaaca

SEQ ID NO: 268636 - RNA, 20 nt, Homo sapiens
aaccaaaccaaaucauacuu

SEQ ID NO: 268637 - RNA, 18 nt, Homo sapiens
aaccaaaggugaaggaau

SEQ ID NO: 268638 - RNA, 20 nt, Homo sapiens
aaccaaaucuggaagccaaa

SEQ ID NO: 268639 - RNA, 14 nt, Homo sapiens
aaccaacacuaaca

SEQ ID NO: 268640 - RNA, 19 nt, Homo sapiens
aaccacaggcagcauuuag

SEQ ID NO: 268641 - RNA, 14 nt, Homo sapiens
aaccacccagagug

SEQ ID NO: 268642 - RNA, 17 nt, Homo sapiens
aaccaucaaaguggcaa

SEQ ID NO: 268643 - RNA, 19 nt, Homo sapiens
aaccaugggauaaaugcca

SEQ ID NO: 268644 - RNA, 11 nt, Homo sapiens
aacccaaagug

SEQ ID NO: 268645 - RNA, 19 nt, Homo sapiens
aacccaaagugugacucau

SEQ ID NO: 268646 - RNA, 19 nt, Homo sapiens
aacccaucuuccuggaccu

SEQ ID NO: 268647 - RNA, 21 nt, Homo sapiens
aacccaucuuccuggaccuga

SEQ ID NO: 268648 - RNA, 15 nt, Homo sapiens
aacccauuuuagaga

SEQ ID NO: 268649 - RNA, 19 nt, Homo sapiens
aacccucuaagggaccuca

SEQ ID NO: 268650 - RNA, 22 nt, Homo sapiens
aacccuggaagcuguaugccac

SEQ ID NO: 268651 - RNA, 12 nt, Homo sapiens
aacccugucuga

SEQ ID NO: 268652 - RNA, 20 nt, Homo sapiens
aacccuucagauuugccuua

SEQ ID NO: 268653 - RNA, 14 nt, Homo sapiens
aacccuugcuugca

SEQ ID NO: 268654 - RNA, 21 nt, Homo sapiens
aaccggcuuuguggcacuggg

SEQ ID NO: 268655 - RNA, 21 nt, Homo sapiens
aaccguaugagggaacugugu

SEQ ID NO: 268656 - RNA, 22 nt, Homo sapiens
aaccguaugagggaacugugua

SEQ ID NO: 268657 - RNA, 13 nt, Homo sapiens
aaccuacaguuuu

SEQ ID NO: 268658 - RNA, 22 nt, Homo sapiens
aaccuagccuuagaagucacac

SEQ ID NO: 268659 - RNA, 14 nt, Homo sapiens
aaccuagcuagcaa

SEQ ID NO: 268660 - RNA, 20 nt, Homo sapiens
aaccuaggcaaagaguauau

SEQ ID NO: 268661 - RNA, 11 nt, Homo sapiens
aaccucagggc

SEQ ID NO: 268662 - RNA, 23 nt, Homo sapiens
aaccucagugauuggcucugugg

SEQ ID NO: 268663 - RNA, 20 nt, Homo sapiens
aaccucggcuccuggacuca

SEQ ID NO: 268664 - RNA, 13 nt, Homo sapiens
aaccucuaugcaa

SEQ ID NO: 268665 - RNA, 14 nt, Homo sapiens
aaccucuaugcaau

SEQ ID NO: 268666 - RNA, 16 nt, Homo sapiens
aaccucuuugucuaca

SEQ ID NO: 268667 - RNA, 20 nt, Homo sapiens
aaccuggguaacuagggaag

SEQ ID NO: 268668 - RNA, 17 nt, Homo sapiens
aaccugugaucaagcaa

SEQ ID NO: 268669 - RNA, 20 nt, Homo sapiens
aaccugugaucaagcaauaa

SEQ ID NO: 268670 - RNA, 20 nt, Homo sapiens
aaccuugggaagauguauca

SEQ ID NO: 268671 - RNA, 18 nt, Homo sapiens
aaccuuuugagugccuua

SEQ ID NO: 268672 - RNA, 21 nt, Homo sapiens
aaccuuuugagugccuuacac

SEQ ID NO: 268673 - RNA, 18 nt, Homo sapiens
aacgacagucccaguucc

SEQ ID NO: 268674 - RNA, 22 nt, Homo sapiens
aacgccuguaggaagaaaaagg

SEQ ID NO: 268675 - RNA, 15 nt, Homo sapiens
aacguggcacuggua

SEQ ID NO: 268676 - RNA, 14 nt, Homo sapiens
aacguggggcagca

SEQ ID NO: 268677 - RNA, 21 nt, Homo sapiens
aacguggggcagcacagagag

SEQ ID NO: 268678 - RNA, 11 nt, Homo sapiens
aacguuuuucc

SEQ ID NO: 268679 - RNA, 14 nt, Homo sapiens
aacuaaacuuucac

SEQ ID NO: 268680 - RNA, 16 nt, Homo sapiens
aacuacccucuggaga

SEQ ID NO: 268681 - RNA, 15 nt, Homo sapiens
aacuacuggcaauuu

SEQ ID NO: 268682 - RNA, 20 nt, Homo sapiens
aacucaaacucuuaaaaccc

SEQ ID NO: 268683 - RNA, 16 nt, Homo sapiens
aacucaacuuugacaa

SEQ ID NO: 268684 - RNA, 15 nt, Homo sapiens
aacucacucugggcu

SEQ ID NO: 268685 - RNA, 16 nt, Homo sapiens
aacucacucugggcug

SEQ ID NO: 268686 - RNA, 13 nt, Homo sapiens
aacucaucuucac

SEQ ID NO: 268687 - RNA, 11 nt, Homo sapiens
aacuccugacu

SEQ ID NO: 268688 - RNA, 17 nt, Homo sapiens
aacucgggcucccgggu

SEQ ID NO: 268689 - RNA, 16 nt, Homo sapiens
aacucuaccugcacac

SEQ ID NO: 268690 - RNA, 23 nt, Homo sapiens
aacucuauuuuuguaaaaaggga

SEQ ID NO: 268691 - RNA, 18 nt, Homo sapiens
aacugaaugaacaaccuc

SEQ ID NO: 268692 - RNA, 19 nt, Homo sapiens
aacugaaugccacucugua

SEQ ID NO: 268693 - RNA, 13 nt, Homo sapiens
aacugacaugccc

SEQ ID NO: 268694 - RNA, 16 nt, Homo sapiens
aacugcugaugcucau

SEQ ID NO: 268695 - RNA, 11 nt, Homo sapiens
aacuggcugca

SEQ ID NO: 268696 - RNA, 15 nt, Homo sapiens
aacugggguggauuu

SEQ ID NO: 268697 - RNA, 19 nt, Homo sapiens
aacuggguacuuguggaca

SEQ ID NO: 268698 - RNA, 22 nt, Homo sapiens
aacugugacugcagugcuguaa

SEQ ID NO: 268699 - RNA, 22 nt, Homo sapiens
aacuguuauuuauaaucacuuu

SEQ ID NO: 268700 - RNA, 19 nt, Homo sapiens
aacuuaacuguucuuugcc

SEQ ID NO: 268701 - RNA, 16 nt, Homo sapiens
aacuuacuuaguguua

SEQ ID NO: 268702 - RNA, 23 nt, Homo sapiens
aacuucagagcaugaaaaucaca

SEQ ID NO: 268703 - RNA, 19 nt, Homo sapiens
aacuuggauguaccugccc

SEQ ID NO: 268704 - RNA, 12 nt, Homo sapiens
aacuugggccac

SEQ ID NO: 268705 - RNA, 22 nt, Homo sapiens
aacuuuuauaaacuuuaccuuu

SEQ ID NO: 268706 - RNA, 16 nt, Homo sapiens
aacuuuuauuacuggg

SEQ ID NO: 268707 - RNA, 18 nt, Homo sapiens
aagaaaauaugcaucuaa

SEQ ID NO: 268708 - RNA, 12 nt, Homo sapiens
aagaaacuaccc

SEQ ID NO: 268709 - RNA, 13 nt, Homo sapiens
aagaaacuacccu

SEQ ID NO: 268710 - RNA, 14 nt, Homo sapiens
aagaaagacuaucu

SEQ ID NO: 268711 - RNA, 23 nt, Homo sapiens
aagaaagagcaacaauccaucuc

SEQ ID NO: 268712 - RNA, 15 nt, Homo sapiens
aagaaagggccagga

SEQ ID NO: 268713 - RNA, 15 nt, Homo sapiens
aagaaauaacaaauu

SEQ ID NO: 268714 - RNA, 21 nt, Homo sapiens
aagaacaauauugacuuuguc

SEQ ID NO: 268715 - RNA, 17 nt, Homo sapiens
aagaacaguaacugcca

SEQ ID NO: 268716 - RNA, 20 nt, Homo sapiens
aagaacaguaacugccauca

SEQ ID NO: 268717 - RNA, 16 nt, Homo sapiens
aagaagaagugaccaa

SEQ ID NO: 268718 - RNA, 22 nt, Homo sapiens
aagaagagcgagagaucaaaga

SEQ ID NO: 268719 - RNA, 15 nt, Homo sapiens
aagaagcucucuccu

SEQ ID NO: 268720 - RNA, 20 nt, Homo sapiens
aagaaucggcaauguuucaa

SEQ ID NO: 268721 - RNA, 12 nt, Homo sapiens
aagaaugcucuu

SEQ ID NO: 268722 - RNA, 22 nt, Homo sapiens
aaggguaccuugaacacugggg

SEQ ID NO: 268723 - RNA, 23 nt, Homo sapiens
aaggguaccuugaacacuggggg

SEQ ID NO: 268724 - RNA, 18 nt, Homo sapiens
aaggguucaccaggucag

SEQ ID NO: 268725 - RNA, 12 nt, Homo sapiens
aagguaugcaau

SEQ ID NO: 268726 - RNA, 16 nt, Homo sapiens
aagguaugcaaucaaa

SEQ ID NO: 268727 - RNA, 16 nt, Homo sapiens
aagguugagggcaaug

SEQ ID NO: 268728 - RNA, 22 nt, Homo sapiens
aagguugucagcugcagccacu

SEQ ID NO: 268729 - RNA, 12 nt, Homo sapiens
aaguaagccaug

SEQ ID NO: 268730 - RNA, 18 nt, Homo sapiens
aaguacauguuaaacuua

SEQ ID NO: 268731 - RNA, 18 nt, Homo sapiens
aaguacuucuccacccug

SEQ ID NO: 268732 - RNA, 23 nt, Homo sapiens
aaguagacuucauuuuuccuaac

SEQ ID NO: 268733 - RNA, 17 nt, Homo sapiens
aaguagcacccuggauu

SEQ ID NO: 268734 - RNA, 20 nt, Homo sapiens
aaguagcuuucuccagauca

SEQ ID NO: 268735 - RNA, 14 nt, Homo sapiens
aaguaggaguggcu

SEQ ID NO: 268736 - RNA, 14 nt, Homo sapiens
aaguaugugcauau

SEQ ID NO: 268737 - RNA, 23 nt, Homo sapiens
aagucacugcacagugcaucuca

SEQ ID NO: 268738 - RNA, 15 nt, Homo sapiens
aagucacuggccagu

SEQ ID NO: 268739 - RNA, 20 nt, Homo sapiens
aagucacuggccaguggcug

SEQ ID NO: 268740 - RNA, 16 nt, Homo sapiens
aagucagcacuaccuc

SEQ ID NO: 268741 - RNA, 16 nt, Homo sapiens
aaguccacaguggaac

SEQ ID NO: 268742 - RNA, 19 nt, Homo sapiens
aaguccuacaagcuaaaau

SEQ ID NO: 268743 - RNA, 17 nt, Homo sapiens
aagucuuauuuccucaa

SEQ ID NO: 268744 - RNA, 13 nt, Homo sapiens
aagugaaacugcu

SEQ ID NO: 268745 - RNA, 17 nt, Homo sapiens
aagugaagacaaugacu

SEQ ID NO: 268746 - RNA, 13 nt, Homo sapiens
aagugacuauuca

SEQ ID NO: 268747 - RNA, 19 nt, Homo sapiens
aagugagacccugucucaa

SEQ ID NO: 268748 - RNA, 16 nt, Homo sapiens
aagugagagaggggga

SEQ ID NO: 268749 - RNA, 20 nt, Homo sapiens
aagugagcuccuaagccaug

SEQ ID NO: 268750 - RNA, 22 nt, Homo sapiens
aagugagcuccuaagccauggg

SEQ ID NO: 268751 - RNA, 13 nt, Homo sapiens
aagugaggaugaa

SEQ ID NO: 268752 - RNA, 22 nt, Homo sapiens
aagugauaucccccagccucaa

SEQ ID NO: 268753 - RNA, 19 nt, Homo sapiens
aagugauccucccaccuca

SEQ ID NO: 268754 - RNA, 14 nt, Homo sapiens
aaguggcaaaaaua

SEQ ID NO: 268755 - RNA, 23 nt, Homo sapiens
aagugggggaguggccacagaaa

SEQ ID NO: 268756 - RNA, 21 nt, Homo sapiens
aaguggugagaacuacucagg

SEQ ID NO: 268757 - RNA, 16 nt, Homo sapiens
aaguggugugauccca

SEQ ID NO: 268758 - RNA, 12 nt, Homo sapiens
aagugugugauc

SEQ ID NO: 268759 - RNA, 17 nt, Homo sapiens
aaguguguguuucuugc

SEQ ID NO: 268760 - RNA, 18 nt, Homo sapiens
aaguguguguuucuugcu

SEQ ID NO: 268761 - RNA, 15 nt, Homo sapiens
aaguuaacuuccaau

SEQ ID NO: 268762 - RNA, 20 nt, Homo sapiens
aaguucaugcagcuguggca

SEQ ID NO: 268763 - RNA, 21 nt, Homo sapiens
aaguucuauuuauuugugaga

SEQ ID NO: 268764 - RNA, 15 nt, Homo sapiens
aaguucugacuugac

SEQ ID NO: 268765 - RNA, 18 nt, Homo sapiens
aaguucuuaguugcugua

SEQ ID NO: 268766 - RNA, 11 nt, Homo sapiens
aaguugcccuc

SEQ ID NO: 268767 - RNA, 17 nt, Homo sapiens
aaguugccuaaauccau

SEQ ID NO: 268768 - RNA, 14 nt, Homo sapiens
aaguuggcuucuaa

SEQ ID NO: 268769 - RNA, 16 nt, Homo sapiens
aaguuucacugacuua

SEQ ID NO: 268770 - RNA, 13 nt, Homo sapiens
aaguuugagauca

SEQ ID NO: 268771 - RNA, 23 nt, Homo sapiens
aaguuuuaugagaaaugccagug

SEQ ID NO: 268772 - RNA, 20 nt, Homo sapiens
aauaaaauagugacauaaaa

SEQ ID NO: 268773 - RNA, 12 nt, Homo sapiens
aauaaagacagg

SEQ ID NO: 268774 - RNA, 16 nt, Homo sapiens
aauaaauucaucagau

SEQ ID NO: 268775 - RNA, 21 nt, Homo sapiens
aagauucauauuuacuucuua

SEQ ID NO: 268776 - RNA, 15 nt, Homo sapiens
aagauucauccauuu

SEQ ID NO: 268777 - RNA, 16 nt, Homo sapiens
aagauucuauguuaau

SEQ ID NO: 268778 - RNA, 14 nt, Homo sapiens
aagcaaaaucauuu

SEQ ID NO: 268779 - RNA, 14 nt, Homo sapiens
aagcaaauggccaa

SEQ ID NO: 268780 - RNA, 16 nt, Homo sapiens
aagcaauaaccucaaa

SEQ ID NO: 268781 - RNA, 14 nt, Homo sapiens
aagcaauaauaauu

SEQ ID NO: 268782 - RNA, 14 nt, Homo sapiens
aagcacagcccuua

SEQ ID NO: 268783 - RNA, 19 nt, Homo sapiens
aagcacaugccucucucag

SEQ ID NO: 268784 - RNA, 20 nt, Homo sapiens
aagcacaugccucucucagg

SEQ ID NO: 268785 - RNA, 21 nt, Homo sapiens
aagcacaugccucucucaggc

SEQ ID NO: 268786 - RNA, 12 nt, Homo sapiens
aagcacuugugg

SEQ ID NO: 268787 - RNA, 13 nt, Homo sapiens
aagcaggacagag

SEQ ID NO: 268788 - RNA, 14 nt, Homo sapiens
aagcagucgugccu

SEQ ID NO: 268789 - RNA, 20 nt, Homo sapiens
aagcauaaaaauuagccaag

SEQ ID NO: 268790 - RNA, 15 nt, Homo sapiens
aagcaucuggcucua

SEQ ID NO: 268791 - RNA, 19 nt, Homo sapiens
aagcauucacaacuuguuu

SEQ ID NO: 268792 - RNA, 14 nt, Homo sapiens
aagcauuuacuuug

SEQ ID NO: 268793 - RNA, 18 nt, Homo sapiens
aagccaacccugugacug

SEQ ID NO: 268794 - RNA, 12 nt, Homo sapiens
aagccacugccu

SEQ ID NO: 268795 - RNA, 18 nt, Homo sapiens
aagccagcaggcucucag

SEQ ID NO: 268796 - RNA, 19 nt, Homo sapiens
aagccagcaggcucucagg

SEQ ID NO: 268797 - RNA, 20 nt, Homo sapiens
aagccagcaggcucucaggc

SEQ ID NO: 268798 - RNA, 16 nt, Homo sapiens
aagccagcuuuccuca

SEQ ID NO: 268799 - RNA, 15 nt, Homo sapiens
aagccauguaucuca

SEQ ID NO: 268800 - RNA, 15 nt, Homo sapiens
aagccauguguucca

SEQ ID NO: 268801 - RNA, 19 nt, Homo sapiens
aagccauguguuccaaggc

SEQ ID NO: 268802 - RNA, 16 nt, Homo sapiens
aagccauugagcucuc

SEQ ID NO: 268803 - RNA, 22 nt, Homo sapiens
aagcccaggggccggccagugg

SEQ ID NO: 268804 - RNA, 19 nt, Homo sapiens
aagccccacccugccucac

SEQ ID NO: 268805 - RNA, 18 nt, Homo sapiens
aagccuagcccuucucuc

SEQ ID NO: 268806 - RNA, 19 nt, Homo sapiens
aagccuagcccuucucuca

SEQ ID NO: 268807 - RNA, 18 nt, Homo sapiens
aagccuauguaugccaug

SEQ ID NO: 268808 - RNA, 17 nt, Homo sapiens
aagccugauuaaagaau

SEQ ID NO: 268809 - RNA, 17 nt, Homo sapiens
aagcgugagccacugca

SEQ ID NO: 268810 - RNA, 18 nt, Homo sapiens
aagcgugagccacugcac

SEQ ID NO: 268811 - RNA, 18 nt, Homo sapiens
aagcgugguggacaugca

SEQ ID NO: 268812 - RNA, 22 nt, Homo sapiens
aagcuaaauccuuuacuguuag

SEQ ID NO: 268813 - RNA, 13 nt, Homo sapiens
aagcucaucucag

SEQ ID NO: 268814 - RNA, 22 nt, Homo sapiens
aagcugagaugggacaggauca

SEQ ID NO: 268815 - RNA, 12 nt, Homo sapiens
aagcugcucacu

SEQ ID NO: 268816 - RNA, 17 nt, Homo sapiens
aagcugcucacugcuca

SEQ ID NO: 268817 - RNA, 12 nt, Homo sapiens
aagcugggagaa

SEQ ID NO: 268818 - RNA, 20 nt, Homo sapiens
aagcugggagaaccaaaaag

SEQ ID NO: 268819 - RNA, 16 nt, Homo sapiens
aagcugggagcacagg

SEQ ID NO: 268820 - RNA, 22 nt, Homo sapiens
aagcugggagcacaggcacugc

SEQ ID NO: 268821 - RNA, 15 nt, Homo sapiens
aagcuguaugccaca

SEQ ID NO: 268822 - RNA, 18 nt, Homo sapiens
aagcugucaccucuugau

SEQ ID NO: 268823 - RNA, 16 nt, Homo sapiens
aagcuguuaggcucac

SEQ ID NO: 268824 - RNA, 17 nt, Homo sapiens
aaggaaaaaauccucac

SEQ ID NO: 268825 - RNA, 21 nt, Homo sapiens
aaggaaacuggguuccugcaa

SEQ ID NO: 268826 - RNA, 23 nt, Homo sapiens
aaggaaacuggguuccugcaaug

SEQ ID NO: 268827 - RNA, 14 nt, Homo sapiens
aaggaaacuuugaa

SEQ ID NO: 268828 - RNA, 17 nt, Homo sapiens
aaggaagacaaugugaa

SEQ ID NO: 268829 - RNA, 16 nt, Homo sapiens
aaggaagaucaggcca

SEQ ID NO: 268830 - RNA, 17 nt, Homo sapiens
aaggaagaucaggccaa

SEQ ID NO: 268831 - RNA, 13 nt, Homo sapiens
aaggaagguucug

SEQ ID NO: 268832 - RNA, 23 nt, Homo sapiens
aaggaagguucuggugugaacua

SEQ ID NO: 268833 - RNA, 17 nt, Homo sapiens
aaggacacaguggagau

SEQ ID NO: 268834 - RNA, 11 nt, Homo sapiens
aaggacucuca

SEQ ID NO: 268835 - RNA, 13 nt, Homo sapiens
aaggauccuccaa

SEQ ID NO: 268836 - RNA, 21 nt, Homo sapiens
aaggaucuccccgaaucucaa

SEQ ID NO: 268837 - RNA, 16 nt, Homo sapiens
aaggaugagcauuuag

SEQ ID NO: 268838 - RNA, 19 nt, Homo sapiens
aaggaugaucuaggaagac

SEQ ID NO: 268839 - RNA, 13 nt, Homo sapiens
aaggauggaccac

SEQ ID NO: 268840 - RNA, 18 nt, Homo sapiens
aaggauggagccagcucu

SEQ ID NO: 268841 - RNA, 19 nt, Homo sapiens
aaggauuuuaugcuuuaaa

SEQ ID NO: 268842 - RNA, 15 nt, Homo sapiens
aaggcagaguacaaa

SEQ ID NO: 268843 - RNA, 18 nt, Homo sapiens
aaggcccauaucugugaa

SEQ ID NO: 268844 - RNA, 23 nt, Homo sapiens
aaggccucccugucuaaaauccc

SEQ ID NO: 268845 - RNA, 15 nt, Homo sapiens
aaggcggugagcaau

SEQ ID NO: 268846 - RNA, 20 nt, Homo sapiens
aaggcuaccuuuguauucuc

SEQ ID NO: 268847 - RNA, 17 nt, Homo sapiens
aaggcuagaucaugaag

SEQ ID NO: 268848 - RNA, 18 nt, Homo sapiens
aaggcucacaugcuccuu

SEQ ID NO: 268849 - RNA, 23 nt, Homo sapiens
aaggcucgauuuuguaucugcag

SEQ ID NO: 268850 - RNA, 20 nt, Homo sapiens
aaggcucuaucugcugggcu

SEQ ID NO: 268851 - RNA, 14 nt, Homo sapiens
aaggcucuuuugua

SEQ ID NO: 268852 - RNA, 20 nt, Homo sapiens
aaggcugugccaucagcucc

SEQ ID NO: 268853 - RNA, 20 nt, Homo sapiens
aaggcuuagacccucaugcu

SEQ ID NO: 268854 - RNA, 23 nt, Homo sapiens
aaggcuuagacccucaugcugcc

SEQ ID NO: 268855 - RNA, 20 nt, Homo sapiens
aagggaauucggugugcacc

SEQ ID NO: 268856 - RNA, 19 nt, Homo sapiens
aagggacaccaagccuugg

SEQ ID NO: 268857 - RNA, 16 nt, Homo sapiens
aagggacauauucauu

SEQ ID NO: 268858 - RNA, 21 nt, Homo sapiens
aagggauggaagaaguaaaua

SEQ ID NO: 268859 - RNA, 18 nt, Homo sapiens
aagggaugucucacaucc

SEQ ID NO: 268860 - RNA, 21 nt, Homo sapiens
aagggauuuucagcccucaga

SEQ ID NO: 268861 - RNA, 22 nt, Homo sapiens
aagggccagcuggaggugaaga

SEQ ID NO: 268862 - RNA, 18 nt, Homo sapiens
aagggcucacgcauucag

SEQ ID NO: 268863 - RNA, 18 nt, Homo sapiens
aaggguaucccaaaaaua

SEQ ID NO: 268864 - RNA, 15 nt, Homo sapiens
aaggguaucugguga

SEQ ID NO: 268865 - RNA, 21 nt, Homo sapiens
aagggugugggccaccagaga

SEQ ID NO: 268866 - RNA, 16 nt, Homo sapiens
aaucucuugcacucaa

SEQ ID NO: 268867 - RNA, 13 nt, Homo sapiens
aaucucuuuccau

SEQ ID NO: 268868 - RNA, 20 nt, Homo sapiens
aaucugaagauacaugucuu

SEQ ID NO: 268869 - RNA, 14 nt, Homo sapiens
aaucugaccaaaac

SEQ ID NO: 268870 - RNA, 23 nt, Homo sapiens
aaucugagaggccacagugcaau

SEQ ID NO: 268871 - RNA, 22 nt, Homo sapiens
aaucugaguagagcagccacaa

SEQ ID NO: 268872 - RNA, 13 nt, Homo sapiens
aaucuggauucau

SEQ ID NO: 268873 - RNA, 20 nt, Homo sapiens
aaucugugaugacauucccu

SEQ ID NO: 268874 - RNA, 15 nt, Homo sapiens
aaucuguucaaggaa

SEQ ID NO: 268875 - RNA, 20 nt, Homo sapiens
aaucuucuugauccacuucu

SEQ ID NO: 268876 - RNA, 14 nt, Homo sapiens
aaucuuuacacaau

SEQ ID NO: 268877 - RNA, 15 nt, Homo sapiens
aaucuuuacacaaug

SEQ ID NO: 268878 - RNA, 16 nt, Homo sapiens
aaucuuuacacaaugu

SEQ ID NO: 268879 - RNA, 20 nt, Homo sapiens
aaucuuucugcagaaacaga

SEQ ID NO: 268880 - RNA, 22 nt, Homo sapiens
aaugaaaccugugucucugaga

SEQ ID NO: 268881 - RNA, 12 nt, Homo sapiens
aaugaaagugag

SEQ ID NO: 268882 - RNA, 17 nt, Homo sapiens
aaugaaugucaguguga

SEQ ID NO: 268883 - RNA, 20 nt, Homo sapiens
aaugacacagucuuggcuca

SEQ ID NO: 268884 - RNA, 14 nt, Homo sapiens
aaugacucuggaac

SEQ ID NO: 268885 - RNA, 16 nt, Homo sapiens
aaugacuuaagcacac

SEQ ID NO: 268886 - RNA, 21 nt, Homo sapiens
aaugacuuacuguacaugaaa

SEQ ID NO: 268887 - RNA, 23 nt, Homo sapiens
aaugagcaaaaccaaauauucca

SEQ ID NO: 268888 - RNA, 16 nt, Homo sapiens
aaugaggaaacugcac

SEQ ID NO: 268889 - RNA, 17 nt, Homo sapiens
aaugaggaaacugcacu

SEQ ID NO: 268890 - RNA, 19 nt, Homo sapiens
aaugaggaaacugcacugu

SEQ ID NO: 268891 - RNA, 22 nt, Homo sapiens
aaugagugaaucaccuguggua

SEQ ID NO: 268892 - RNA, 21 nt, Homo sapiens
aaugauccccagcuguuuaug

SEQ ID NO: 268893 - RNA, 19 nt, Homo sapiens
aaugaugauccuaggcauu

SEQ ID NO: 268894 - RNA, 19 nt, Homo sapiens
aaugaugucguuugaauca

SEQ ID NO: 268895 - RNA, 21 nt, Homo sapiens
aaugaugucguuugaaucaca

SEQ ID NO: 268896 - RNA, 17 nt, Homo sapiens
aaugauuucacagugug

SEQ ID NO: 268897 - RNA, 19 nt, Homo sapiens
aaugcauauccaacaugug

SEQ ID NO: 268898 - RNA, 23 nt, Homo sapiens
aaugcauauccaacaugugcuca

SEQ ID NO: 268899 - RNA, 16 nt, Homo sapiens
aaugccacucuguaau

SEQ ID NO: 268900 - RNA, 22 nt, Homo sapiens
aaugccacucuguaauugcaaa

SEQ ID NO: 268901 - RNA, 14 nt, Homo sapiens
aaugcccagugacc

SEQ ID NO: 268902 - RNA, 13 nt, Homo sapiens
aaugcccagugag

SEQ ID NO: 268903 - RNA, 16 nt, Homo sapiens
aaugcucuuuacuuca

SEQ ID NO: 268904 - RNA, 14 nt, Homo sapiens
aaugcuggacugga

SEQ ID NO: 268905 - RNA, 16 nt, Homo sapiens
aaugcuggcauuugca

SEQ ID NO: 268906 - RNA, 18 nt, Homo sapiens
aaugcugggacucagccu

SEQ ID NO: 268907 - RNA, 15 nt, Homo sapiens
aaugcugguuuuuca

SEQ ID NO: 268908 - RNA, 17 nt, Homo sapiens
aaugcuucugacuucau

SEQ ID NO: 268909 - RNA, 13 nt, Homo sapiens
aauggaagacagc

SEQ ID NO: 268910 - RNA, 18 nt, Homo sapiens
aauggcuuuguauagaac

SEQ ID NO: 268911 - RNA, 20 nt, Homo sapiens
aaugguaguuuuacaguguu

SEQ ID NO: 268912 - RNA, 21 nt, Homo sapiens
aauguacaacuuuuuaccuag

SEQ ID NO: 268913 - RNA, 15 nt, Homo sapiens
aauguauuugcuaua

SEQ ID NO: 268914 - RNA, 15 nt, Homo sapiens
aaugucacgggacca

SEQ ID NO: 268915 - RNA, 17 nt, Homo sapiens
aaugucaguauguggaa

SEQ ID NO: 268916 - RNA, 15 nt, Homo sapiens
aaugucaguauuuca

SEQ ID NO: 268917 - RNA, 18 nt, Homo sapiens
aaugucagugugacugau

SEQ ID NO: 268918 - RNA, 18 nt, Homo sapiens
aauguccuacugagacag

SEQ ID NO: 268919 - RNA, 12 nt, Homo sapiens
aaugucuuuauu

SEQ ID NO: 268920 - RNA, 22 nt, Homo sapiens
aaugugacuugagcccagagug

SEQ ID NO: 268921 - RNA, 22 nt, Homo sapiens
aauguggcaguccugugccuca

SEQ ID NO: 268922 - RNA, 21 nt, Homo sapiens
aauguggcuugaauguaggua

SEQ ID NO: 268923 - RNA, 15 nt, Homo sapiens
aauguuacauuauua

SEQ ID NO: 268924 - RNA, 18 nt, Homo sapiens
aauguuacauuauuauca

SEQ ID NO: 268925 - RNA, 21 nt, Homo sapiens
aauguuauuuuuuaauuauua

SEQ ID NO: 268926 - RNA, 22 nt, Homo sapiens
aauguuauuuuuuaauuauuau

SEQ ID NO: 268927 - RNA, 13 nt, Homo sapiens
aauguucacuggu

SEQ ID NO: 268928 - RNA, 21 nt, Homo sapiens
aauguucuccagucauuaugu

SEQ ID NO: 268929 - RNA, 12 nt, Homo sapiens
aauaagugccag

SEQ ID NO: 268930 - RNA, 20 nt, Homo sapiens
aauaauacaguaucucaggg

SEQ ID NO: 268931 - RNA, 14 nt, Homo sapiens
aauaauaccuaagc

SEQ ID NO: 268932 - RNA, 20 nt, Homo sapiens
aauaauccagaaaaacugug

SEQ ID NO: 268933 - RNA, 16 nt, Homo sapiens
aauaauguacaucugg

SEQ ID NO: 268934 - RNA, 18 nt, Homo sapiens
aauacaccacuacauucu

SEQ ID NO: 268935 - RNA, 21 nt, Homo sapiens
aauacagacuacuucuucccc

SEQ ID NO: 268936 - RNA, 20 nt, Homo sapiens
aauacagauagauauaugcu

SEQ ID NO: 268937 - RNA, 17 nt, Homo sapiens
aauacaguaucucaggg

SEQ ID NO: 268938 - RNA, 20 nt, Homo sapiens
aauacagucuuccauuugca

SEQ ID NO: 268939 - RNA, 20 nt, Homo sapiens
aauacauaaaguaugugcau

SEQ ID NO: 268940 - RNA, 15 nt, Homo sapiens
aauacauucacccag

SEQ ID NO: 268941 - RNA, 16 nt, Homo sapiens
aauaccguaucuucua

SEQ ID NO: 268942 - RNA, 20 nt, Homo sapiens
aauaccucaaccuaugguau

SEQ ID NO: 268943 - RNA, 13 nt, Homo sapiens
aauagaacacagu

SEQ ID NO: 268944 - RNA, 13 nt, Homo sapiens
aauagccacugca

SEQ ID NO: 268945 - RNA, 13 nt, Homo sapiens
aauagccauaaag

SEQ ID NO: 268946 - RNA, 12 nt, Homo sapiens
aauagcucagaa

SEQ ID NO: 268947 - RNA, 23 nt, Homo sapiens
aauagcugggacuacagguguga

SEQ ID NO: 268948 - RNA, 17 nt, Homo sapiens
aauagguuuuucuugcu

SEQ ID NO: 268949 - RNA, 14 nt, Homo sapiens
aauagugauuucca

SEQ ID NO: 268950 - RNA, 19 nt, Homo sapiens
aauagugauuuccacagug

SEQ ID NO: 268951 - RNA, 16 nt, Homo sapiens
aauauaacugccuuaa

SEQ ID NO: 268952 - RNA, 12 nt, Homo sapiens
aauauacuguaa

SEQ ID NO: 268953 - RNA, 15 nt, Homo sapiens
aauauauaaccagug

SEQ ID NO: 268954 - RNA, 18 nt, Homo sapiens
aauaucaagagagguuaa

SEQ ID NO: 268955 - RNA, 15 nt, Homo sapiens
aauaucaugcuccau

SEQ ID NO: 268956 - RNA, 17 nt, Homo sapiens
aauauccaauugcugcu

SEQ ID NO: 268957 - RNA, 23 nt, Homo sapiens
aauaucccuuggacauuuuaugu

SEQ ID NO: 268958 - RNA, 13 nt, Homo sapiens
aauauccuuugcc

SEQ ID NO: 268959 - RNA, 18 nt, Homo sapiens
aauaugacacucuaguca

SEQ ID NO: 268960 - RNA, 19 nt, Homo sapiens
aauaugcacaauagcaguu

SEQ ID NO: 268961 - RNA, 14 nt, Homo sapiens
aauauuaaagccau

SEQ ID NO: 268962 - RNA, 22 nt, Homo sapiens
aauauuccagagacugggacua

SEQ ID NO: 268963 - RNA, 14 nt, Homo sapiens
aauauugugcccca

SEQ ID NO: 268964 - RNA, 20 nt, Homo sapiens
aauauuucccucaccuuucc

SEQ ID NO: 268965 - RNA, 13 nt, Homo sapiens
aaucaaauagcau

SEQ ID NO: 268966 - RNA, 17 nt, Homo sapiens
aaucaaguauuggcaaa

SEQ ID NO: 268967 - RNA, 18 nt, Homo sapiens
aaucaaguuggcuucuaa

SEQ ID NO: 268968 - RNA, 22 nt, Homo sapiens
aaucaaguuggcuucuaaucaa

SEQ ID NO: 268969 - RNA, 18 nt, Homo sapiens
aaucacacagccaagcca

SEQ ID NO: 268970 - RNA, 23 nt, Homo sapiens
aaucacacgucuggcuucacaga

SEQ ID NO: 268971 - RNA, 15 nt, Homo sapiens
aaucacacugucuuc

SEQ ID NO: 268972 - RNA, 12 nt, Homo sapiens
aaucacugacca

SEQ ID NO: 268973 - RNA, 17 nt, Homo sapiens
aaucagaacuguuggca

SEQ ID NO: 268974 - RNA, 15 nt, Homo sapiens
aaucagccacauucu

SEQ ID NO: 268975 - RNA, 16 nt, Homo sapiens
aaucagccacauucua

SEQ ID NO: 268976 - RNA, 20 nt, Homo sapiens
aaucagcugcuacuacuccu

SEQ ID NO: 268977 - RNA, 23 nt, Homo sapiens
aaucaguguuuccaaucuguccu

SEQ ID NO: 268978 - RNA, 19 nt, Homo sapiens
aaucauuuuauaugucaaa

SEQ ID NO: 268979 - RNA, 16 nt, Homo sapiens
aauccagacccggcug

SEQ ID NO: 268980 - RNA, 19 nt, Homo sapiens
aauccagagagcagugugg

SEQ ID NO: 268981 - RNA, 12 nt, Homo sapiens
aauccaugaacc

SEQ ID NO: 268982 - RNA, 20 nt, Homo sapiens
aauccaugaaccaagaccau

SEQ ID NO: 268983 - RNA, 18 nt, Homo sapiens
aauccccaaaaaagcgaa

SEQ ID NO: 268984 - RNA, 23 nt, Homo sapiens
aaucccucaaaacaaucuuguca

SEQ ID NO: 268985 - RNA, 24 nt, Homo sapiens
aaucccucaaaacaaucuugucau

SEQ ID NO: 268986 - RNA, 16 nt, Homo sapiens
aauccuguccucagcu

SEQ ID NO: 268987 - RNA, 12 nt, Homo sapiens
aauccuucaugu

SEQ ID NO: 268988 - RNA, 17 nt, Homo sapiens
aauccuugccacagugu

SEQ ID NO: 268989 - RNA, 18 nt, Homo sapiens
aauccuuuacuguuaguc

SEQ ID NO: 268990 - RNA, 19 nt, Homo sapiens
aauccuuuacuguuaguca

SEQ ID NO: 268991 - RNA, 18 nt, Homo sapiens
aaucgcuccaccuugcag

SEQ ID NO: 268992 - RNA, 13 nt, Homo sapiens
aaucuaaauggaa

SEQ ID NO: 268993 - RNA, 18 nt, Homo sapiens
aaucucaccccaucccac

SEQ ID NO: 268994 - RNA, 18 nt, Homo sapiens
aaucuccauuucugcuca

SEQ ID NO: 268995 - RNA, 20 nt, Homo sapiens
aaucuccauuucugcucaga

SEQ ID NO: 268996 - RNA, 16 nt, Homo sapiens
aaucucuaguugucac

SEQ ID NO: 268997 - RNA, 13 nt, Homo sapiens
aaucugaccaaaa

SEQ ID NO: 268998 - RNA, 21 nt, Homo sapiens
aaucugaccaaaacaaacaaa

SEQ ID NO: 268999 - RNA, 18 nt, Homo sapiens
aaucugcaccccacuuca

SEQ ID NO: 269000 - RNA, 16 nt, Homo sapiens
aaucuggggauacugg

SEQ ID NO: 269001 - RNA, 14 nt, Homo sapiens
aaucugugaugaca

SEQ ID NO: 269002 - RNA, 17 nt, Homo sapiens
aaucugugaugacauuc

SEQ ID NO: 269003 - RNA, 21 nt, Homo sapiens
aaucuguuaccagaggacaaa

SEQ ID NO: 269004 - RNA, 18 nt, Homo sapiens
aaucuucuugauccacuu

SEQ ID NO: 269005 - RNA, 22 nt, Homo sapiens
aaucuucuugauccacuucucu

SEQ ID NO: 269006 - RNA, 17 nt, Homo sapiens
aaugaaaaaaaaagggg

SEQ ID NO: 269007 - RNA, 17 nt, Homo sapiens
aaugaaccaaaccaaau

SEQ ID NO: 269008 - RNA, 22 nt, Homo sapiens
aaugaauaugaaacacuacaaa

SEQ ID NO: 269009 - RNA, 14 nt, Homo sapiens
aaugaauguuuaca

SEQ ID NO: 269010 - RNA, 22 nt, Homo sapiens
acaagggggaagggaugcaggg

SEQ ID NO: 269011 - RNA, 15 nt, Homo sapiens
acaagugcucuuucc

SEQ ID NO: 269012 - RNA, 17 nt, Homo sapiens
acaaguuaaaaaggucu

SEQ ID NO: 269013 - RNA, 15 nt, Homo sapiens
acaauagaaaccugu

SEQ ID NO: 269014 - RNA, 18 nt, Homo sapiens
acaauagugauugauaga

SEQ ID NO: 269015 - RNA, 15 nt, Homo sapiens
acaauauacuuguau

SEQ ID NO: 269016 - RNA, 19 nt, Homo sapiens
acaaucaucaucauucuca

SEQ ID NO: 269017 - RNA, 17 nt, Homo sapiens
acaaucaucuucuccca

SEQ ID NO: 269018 - RNA, 14 nt, Homo sapiens
acaaucugaaacag

SEQ ID NO: 269019 - RNA, 15 nt, Homo sapiens
acaaucuguauauaa

SEQ ID NO: 269020 - RNA, 12 nt, Homo sapiens
acaaucuuguca

SEQ ID NO: 269021 - RNA, 15 nt, Homo sapiens
acaaucuugucauac

SEQ ID NO: 269022 - RNA, 19 nt, Homo sapiens
acaaucuugucauacuuga

SEQ ID NO: 269023 - RNA, 17 nt, Homo sapiens
acaaugacuuacuguac

SEQ ID NO: 269024 - RNA, 11 nt, Homo sapiens
acaaugcauuc

SEQ ID NO: 269025 - RNA, 15 nt, Homo sapiens
acaauguucauccca

SEQ ID NO: 269026 - RNA, 14 nt, Homo sapiens
acaauuauguuuuc

SEQ ID NO: 269027 - RNA, 17 nt, Homo sapiens
acaauugcaguuuugcc

SEQ ID NO: 269028 - RNA, 20 nt, Homo sapiens
acacaaacgggcucagcaaa

SEQ ID NO: 269029 - RNA, 16 nt, Homo sapiens
acacaaucugaaacag

SEQ ID NO: 269030 - RNA, 22 nt, Homo sapiens
acacaaucugaaacagcuucau

SEQ ID NO: 269031 - RNA, 20 nt, Homo sapiens
acacacaaaggcuauugacc

SEQ ID NO: 269032 - RNA, 11 nt, Homo sapiens
acacacacaga

SEQ ID NO: 269033 - RNA, 22 nt, Homo sapiens
acacacagaaaauauacuguaa

SEQ ID NO: 269034 - RNA, 13 nt, Homo sapiens
acacagagugccu

SEQ ID NO: 269035 - RNA, 14 nt, Homo sapiens
acacagagugccug

SEQ ID NO: 269036 - RNA, 12 nt, Homo sapiens
acacagcaucag

SEQ ID NO: 269037 - RNA, 14 nt, Homo sapiens
acacagcaucagcu

SEQ ID NO: 269038 - RNA, 14 nt, Homo sapiens
acacagcauuguau

SEQ ID NO: 269039 - RNA, 18 nt, Homo sapiens
acacagccaagccaguca

SEQ ID NO: 269040 - RNA, 11 nt, Homo sapiens
acacagccaca

SEQ ID NO: 269041 - RNA, 20 nt, Homo sapiens
acacagcucuucuccaggcu

SEQ ID NO: 269042 - RNA, 21 nt, Homo sapiens
acacagcugcagagacagaga

SEQ ID NO: 269043 - RNA, 21 nt, Homo sapiens
acacaggcccggcuccaggcu

SEQ ID NO: 269044 - RNA, 19 nt, Homo sapiens
acacagucuuggcucacug

SEQ ID NO: 269045 - RNA, 16 nt, Homo sapiens
acacaguucaauucuc

SEQ ID NO: 269046 - RNA, 15 nt, Homo sapiens
acacaugagaucuag

SEQ ID NO: 269047 - RNA, 20 nt, Homo sapiens
acacaugcugaacaucacag

SEQ ID NO: 269048 - RNA, 22 nt, Homo sapiens
acacauuucuuugaauuuaggu

SEQ ID NO: 269049 - RNA, 18 nt, Homo sapiens
acacauuuuucuuaggga

SEQ ID NO: 269050 - RNA, 20 nt, Homo sapiens
acacauuuuuuaaaugcacc

SEQ ID NO: 269051 - RNA, 21 nt, Homo sapiens
acacauuuuuuaaaugcaccu

SEQ ID NO: 269052 - RNA, 17 nt, Homo sapiens
acaccaugauuaaccac

SEQ ID NO: 269053 - RNA, 18 nt, Homo sapiens
acaccauuaugugcgcug

SEQ ID NO: 269054 - RNA, 19 nt, Homo sapiens
acaccguccuccacgccau

SEQ ID NO: 269055 - RNA, 15 nt, Homo sapiens
acaccuguaauccca

SEQ ID NO: 269056 - RNA, 16 nt, Homo sapiens
acaccuugacaaaauc

SEQ ID NO: 269057 - RNA, 15 nt, Homo sapiens
acaccuugacagggc

SEQ ID NO: 269058 - RNA, 14 nt, Homo sapiens
acacgcgugcacac

SEQ ID NO: 269059 - RNA, 14 nt, Homo sapiens
acacggacccugug

SEQ ID NO: 269060 - RNA, 18 nt, Homo sapiens
acacuaacauauaauguu

SEQ ID NO: 269061 - RNA, 20 nt, Homo sapiens
acacuauuuaucugugcaaa

SEQ ID NO: 269062 - RNA, 23 nt, Homo sapiens
acacucaccugcacuaacagagu

SEQ ID NO: 269063 - RNA, 17 nt, Homo sapiens
acacucccacuuggcau

SEQ ID NO: 269064 - RNA, 13 nt, Homo sapiens
acacucgccagcu

SEQ ID NO: 269065 - RNA, 15 nt, Homo sapiens
acacucuugguagaa

SEQ ID NO: 269066 - RNA, 20 nt, Homo sapiens
acacugcauguuugugauug

SEQ ID NO: 269067 - RNA, 13 nt, Homo sapiens
acacugcuuguga

SEQ ID NO: 269068 - RNA, 14 nt, Homo sapiens
acacugcuugugaa

SEQ ID NO: 269069 - RNA, 15 nt, Homo sapiens
acacuguacugcaau

SEQ ID NO: 269070 - RNA, 15 nt, Homo sapiens
acacuguucugaaag

SEQ ID NO: 269071 - RNA, 15 nt, Homo sapiens
acacuuacacuuuau

SEQ ID NO: 269072 - RNA, 19 nt, Homo sapiens
acacuugacaucaacugca

SEQ ID NO: 269073 - RNA, 15 nt, Homo sapiens
acacuugcacccaug

SEQ ID NO: 269074 - RNA, 17 nt, Homo sapiens
acagaaaaaaucgucuc

SEQ ID NO: 269075 - RNA, 13 nt, Homo sapiens
acagaaaauggaa

SEQ ID NO: 269076 - RNA, 16 nt, Homo sapiens
acagaacuaagaugau

SEQ ID NO: 269077 - RNA, 23 nt, Homo sapiens
acagaagaaacuacccucuggag

SEQ ID NO: 269078 - RNA, 20 nt, Homo sapiens
acagaaucuccauuucugcu

SEQ ID NO: 269079 - RNA, 22 nt, Homo sapiens
acagaaucuccauuucugcuca

SEQ ID NO: 269080 - RNA, 23 nt, Homo sapiens
acagaaucuccauuucugcucag

SEQ ID NO: 269081 - RNA, 15 nt, Homo sapiens
acagaauucacuugu

SEQ ID NO: 269082 - RNA, 12 nt, Homo sapiens
acagacaaagcg

SEQ ID NO: 269083 - RNA, 20 nt, Homo sapiens
acagacacucccacuuggca

SEQ ID NO: 269084 - RNA, 17 nt, Homo sapiens
aauguucuccagucauu

SEQ ID NO: 269085 - RNA, 22 nt, Homo sapiens
aauguuguuuuaggaauacaua

SEQ ID NO: 269086 - RNA, 14 nt, Homo sapiens
aauguuuacacucu

SEQ ID NO: 269087 - RNA, 22 nt, Homo sapiens
aauguuuaugaauaguuuccaa

SEQ ID NO: 269088 - RNA, 14 nt, Homo sapiens
aauuaccuguggau

SEQ ID NO: 269089 - RNA, 14 nt, Homo sapiens
aauuagaugaacuc

SEQ ID NO: 269090 - RNA, 15 nt, Homo sapiens
aauuaggcuguaacu

SEQ ID NO: 269091 - RNA, 22 nt, Homo sapiens
aauuauaucugaggaauucugu

SEQ ID NO: 269092 - RNA, 12 nt, Homo sapiens
aauuaugccaua

SEQ ID NO: 269093 - RNA, 13 nt, Homo sapiens
aauuauuaccauc

SEQ ID NO: 269094 - RNA, 18 nt, Homo sapiens
aauuauuaccaucucucc

SEQ ID NO: 269095 - RNA, 20 nt, Homo sapiens
aauucacagugcucuuuucu

SEQ ID NO: 269096 - RNA, 21 nt, Homo sapiens
aauucaggccgcaagcagcug

SEQ ID NO: 269097 - RNA, 18 nt, Homo sapiens
aauucauaucauuuggcc

SEQ ID NO: 269098 - RNA, 15 nt, Homo sapiens
aauucauaucuauuu

SEQ ID NO: 269099 - RNA, 14 nt, Homo sapiens
aauucaucagauaa

SEQ ID NO: 269100 - RNA, 19 nt, Homo sapiens
aauucauuuuuuaaauucc

SEQ ID NO: 269101 - RNA, 18 nt, Homo sapiens
aauucccuggccuuucau

SEQ ID NO: 269102 - RNA, 13 nt, Homo sapiens
aauuccuaacuau

SEQ ID NO: 269103 - RNA, 22 nt, Homo sapiens
aauuccugguuugaagaaauaa

SEQ ID NO: 269104 - RNA, 15 nt, Homo sapiens
aauucggugugcacc

SEQ ID NO: 269105 - RNA, 13 nt, Homo sapiens
aauucuacuuuga

SEQ ID NO: 269106 - RNA, 16 nt, Homo sapiens
aauucucagaaucuca

SEQ ID NO: 269107 - RNA, 20 nt, Homo sapiens
aauucucauuugucacacac

SEQ ID NO: 269108 - RNA, 20 nt, Homo sapiens
aauucucuaguuugauuaaa

SEQ ID NO: 269109 - RNA, 14 nt, Homo sapiens
aauucuguauagau

SEQ ID NO: 269110 - RNA, 17 nt, Homo sapiens
aauucuuagucacaaaa

SEQ ID NO: 269111 - RNA, 12 nt, Homo sapiens
aauucuucucca

SEQ ID NO: 269112 - RNA, 13 nt, Homo sapiens
aauugcaguuuug

SEQ ID NO: 269113 - RNA, 16 nt, Homo sapiens
aauugcaguuuugccu

SEQ ID NO: 269114 - RNA, 12 nt, Homo sapiens
aauugcauuucc

SEQ ID NO: 269115 - RNA, 15 nt, Homo sapiens
aauugccacugagag

SEQ ID NO: 269116 - RNA, 12 nt, Homo sapiens
aauugcugaaag

SEQ ID NO: 269117 - RNA, 16 nt, Homo sapiens
aauugcuucaagcauu

SEQ ID NO: 269118 - RNA, 18 nt, Homo sapiens
aauugggaauaugcacaa

SEQ ID NO: 269119 - RNA, 15 nt, Homo sapiens
aauugggccaaagaa

SEQ ID NO: 269120 - RNA, 14 nt, Homo sapiens
aauuguacaaccug

SEQ ID NO: 269121 - RNA, 17 nt, Homo sapiens
aauuguacaaccuguga

SEQ ID NO: 269122 - RNA, 18 nt, Homo sapiens
aauuguaucaaaugugac

SEQ ID NO: 269123 - RNA, 21 nt, Homo sapiens
aauugucauugauacaugcau

SEQ ID NO: 269124 - RNA, 17 nt, Homo sapiens
aauugugaucagaccau

SEQ ID NO: 269125 - RNA, 19 nt, Homo sapiens
aauugugaucagaccauaa

SEQ ID NO: 269126 - RNA, 15 nt, Homo sapiens
aauuguuuggggaug

SEQ ID NO: 269127 - RNA, 19 nt, Homo sapiens
aauuuaccuaagauuacaa

SEQ ID NO: 269128 - RNA, 19 nt, Homo sapiens
aauuuacuuuaaacuacau

SEQ ID NO: 269129 - RNA, 19 nt, Homo sapiens
aauuuagaaauauaauuga

SEQ ID NO: 269130 - RNA, 14 nt, Homo sapiens
aauuuagaggacaa

SEQ ID NO: 269131 - RNA, 20 nt, Homo sapiens
aauuucccaaagcagugcau

SEQ ID NO: 269132 - RNA, 20 nt, Homo sapiens
aauuuccggccaacaguuaa

SEQ ID NO: 269133 - RNA, 18 nt, Homo sapiens
aauuucucuacugucuca

SEQ ID NO: 269134 - RNA, 16 nt, Homo sapiens
aauuugccuaauauga

SEQ ID NO: 269135 - RNA, 21 nt, Homo sapiens
aauuuuauguuuaguugcaca

SEQ ID NO: 269136 - RNA, 18 nt, Homo sapiens
aauuuucacagccaugau

SEQ ID NO: 269137 - RNA, 22 nt, Homo sapiens
aauuuuguaucaccucuucaca

SEQ ID NO: 269138 - RNA, 17 nt, Homo sapiens
aauuuuuauuaaauuau

SEQ ID NO: 269139 - RNA, 16 nt, Homo sapiens
acaaaaaaaccucuau

SEQ ID NO: 269140 - RNA, 20 nt, Homo sapiens
acaaaaaaaccucuaugcaa

SEQ ID NO: 269141 - RNA, 20 nt, Homo sapiens
acaaaauaaccaauccugga

SEQ ID NO: 269142 - RNA, 15 nt, Homo sapiens
acaaacaaacagaaa

SEQ ID NO: 269143 - RNA, 14 nt, Homo sapiens
acaaaccauuuugu

SEQ ID NO: 269144 - RNA, 23 nt, Homo sapiens
acaaaccuugggaagauguauca

SEQ ID NO: 269145 - RNA, 19 nt, Homo sapiens
acaaacucucccuucacuc

SEQ ID NO: 269146 - RNA, 15 nt, Homo sapiens
acaaagaaacaaaga

SEQ ID NO: 269147 - RNA, 24 nt, Homo sapiens
acaaaggagagcuagcagcaggga

SEQ ID NO: 269148 - RNA, 18 nt, Homo sapiens
acaaaggcuauugaccga

SEQ ID NO: 269149 - RNA, 14 nt, Homo sapiens
acaaaguaagccau

SEQ ID NO: 269150 - RNA, 19 nt, Homo sapiens
acaaaguaagccauguauc

SEQ ID NO: 269151 - RNA, 17 nt, Homo sapiens
acaaaguguguauuaaa

SEQ ID NO: 269152 - RNA, 21 nt, Homo sapiens
acaaaucugcaccccacuuca

SEQ ID NO: 269153 - RNA, 22 nt, Homo sapiens
acaaaugccacacggcucucac

SEQ ID NO: 269154 - RNA, 13 nt, Homo sapiens
acaaauugcuuga

SEQ ID NO: 269155 - RNA, 17 nt, Homo sapiens
acaaauugcuugaaaga

SEQ ID NO: 269156 - RNA, 22 nt, Homo sapiens
acauaccuggcccugugccuug

SEQ ID NO: 269157 - RNA, 14 nt, Homo sapiens
acauacucccaucu

SEQ ID NO: 269158 - RNA, 14 nt, Homo sapiens
acauacuucagcuc

SEQ ID NO: 269159 - RNA, 13 nt, Homo sapiens
acauaucugucau

SEQ ID NO: 269160 - RNA, 13 nt, Homo sapiens
acaucaacugcau

SEQ ID NO: 269161 - RNA, 12 nt, Homo sapiens
acaucaagcaca

SEQ ID NO: 269162 - RNA, 13 nt, Homo sapiens
acaucaagcacag

SEQ ID NO: 269163 - RNA, 15 nt, Homo sapiens
acaucacagcuuauu

SEQ ID NO: 269164 - RNA, 13 nt, Homo sapiens
acaucauuucaag

SEQ ID NO: 269165 - RNA, 20 nt, Homo sapiens
acauccuccagauaguguag

SEQ ID NO: 269166 - RNA, 20 nt, Homo sapiens
acauccugaccuugcacaaa

SEQ ID NO: 269167 - RNA, 14 nt, Homo sapiens
acaucucugcaauc

SEQ ID NO: 269168 - RNA, 22 nt, Homo sapiens
acaucuggccuugaaaccaccu

SEQ ID NO: 269169 - RNA, 15 nt, Homo sapiens
acaucugugucuugu

SEQ ID NO: 269170 - RNA, 18 nt, Homo sapiens
acaucuuggucagauuug

SEQ ID NO: 269171 - RNA, 23 nt, Homo sapiens
acaucuuggucagauuugaacuc

SEQ ID NO: 269172 - RNA, 17 nt, Homo sapiens
acaucuuuuacauucug

SEQ ID NO: 269173 - RNA, 14 nt, Homo sapiens
acaugaaaacagaa

SEQ ID NO: 269174 - RNA, 10 nt, Homo sapiens
acaugaauau

SEQ ID NO: 269175 - RNA, 17 nt, Homo sapiens
acaugcacagcuaacau

SEQ ID NO: 269176 - RNA, 14 nt, Homo sapiens
acaugcauugcucu

SEQ ID NO: 269177 - RNA, 17 nt, Homo sapiens
acaugcauugcucuuau

SEQ ID NO: 269178 - RNA, 18 nt, Homo sapiens
acaugccagccacuguga

SEQ ID NO: 269179 - RNA, 17 nt, Homo sapiens
acaugccucucucaggc

SEQ ID NO: 269180 - RNA, 21 nt, Homo sapiens
acauggcuaaagaagguuuca

SEQ ID NO: 269181 - RNA, 10 nt, Homo sapiens
acaugggagc

SEQ ID NO: 269182 - RNA, 19 nt, Homo sapiens
acauguaauuaaguacuau

SEQ ID NO: 269183 - RNA, 17 nt, Homo sapiens
acauguacgauucacuc

SEQ ID NO: 269184 - RNA, 12 nt, Homo sapiens
acaugugcacau

SEQ ID NO: 269185 - RNA, 16 nt, Homo sapiens
acaugugcacaugcac

SEQ ID NO: 269186 - RNA, 16 nt, Homo sapiens
acauucgaguguuuca

SEQ ID NO: 269187 - RNA, 23 nt, Homo sapiens
acauucugcaagcacaucugcau

SEQ ID NO: 269188 - RNA, 14 nt, Homo sapiens
acauucuguuaauc

SEQ ID NO: 269189 - RNA, 11 nt, Homo sapiens
acauugaacaa

SEQ ID NO: 269190 - RNA, 18 nt, Homo sapiens
acauuuauucugcucaca

SEQ ID NO: 269191 - RNA, 22 nt, Homo sapiens
acauuugaaaucuaugaaauau

SEQ ID NO: 269192 - RNA, 12 nt, Homo sapiens
acauuuguucca

SEQ ID NO: 269193 - RNA, 14 nt, Homo sapiens
acauuuguuccaug

SEQ ID NO: 269194 - RNA, 18 nt, Homo sapiens
acauuuguuuguggucua

SEQ ID NO: 269195 - RNA, 12 nt, Homo sapiens
accaaaggugaa

SEQ ID NO: 269196 - RNA, 19 nt, Homo sapiens
accaaauacuuuaauguau

SEQ ID NO: 269197 - RNA, 17 nt, Homo sapiens
accaaaucagcugcuac

SEQ ID NO: 269198 - RNA, 17 nt, Homo sapiens
accaaaucauacuuucu

SEQ ID NO: 269199 - RNA, 16 nt, Homo sapiens
accaaaucauacuuuu

SEQ ID NO: 269200 - RNA, 18 nt, Homo sapiens
accaaaugcuuuuccuca

SEQ ID NO: 269201 - RNA, 20 nt, Homo sapiens
accaaauugaacucacugcu

SEQ ID NO: 269202 - RNA, 14 nt, Homo sapiens
accaaccacugcga

SEQ ID NO: 269203 - RNA, 15 nt, Homo sapiens
accaacccucagagc

SEQ ID NO: 269204 - RNA, 23 nt, Homo sapiens
accaagaguguguccacugagaa

SEQ ID NO: 269205 - RNA, 23 nt, Homo sapiens
accaaggaggaguuuaaacugaa

SEQ ID NO: 269206 - RNA, 13 nt, Homo sapiens
accaauauuguac

SEQ ID NO: 269207 - RNA, 16 nt, Homo sapiens
accaauauuguacagu

SEQ ID NO: 269208 - RNA, 16 nt, Homo sapiens
accacaaaacuuuucu

SEQ ID NO: 269209 - RNA, 18 nt, Homo sapiens
accacaggcagcauuuag

SEQ ID NO: 269210 - RNA, 23 nt, Homo sapiens
accacaggcagcauuuagcacau

SEQ ID NO: 269211 - RNA, 18 nt, Homo sapiens
accacaucuugcucugcu

SEQ ID NO: 269212 - RNA, 15 nt, Homo sapiens
accacaugugcacau

SEQ ID NO: 269213 - RNA, 18 nt, Homo sapiens
accacaugugcacaugca

SEQ ID NO: 269214 - RNA, 14 nt, Homo sapiens
accaccaaccacug

SEQ ID NO: 269215 - RNA, 14 nt, Homo sapiens
accaccaagccaag

SEQ ID NO: 269216 - RNA, 15 nt, Homo sapiens
accaccaccaucacc

SEQ ID NO: 269217 - RNA, 18 nt, Homo sapiens
accacccagaguggccca

SEQ ID NO: 269218 - RNA, 19 nt, Homo sapiens
accacccagaguggcccaa

SEQ ID NO: 269219 - RNA, 23 nt, Homo sapiens
accacggggccgacauugucucc

SEQ ID NO: 269220 - RNA, 17 nt, Homo sapiens
accacugauaaaaccau

SEQ ID NO: 269221 - RNA, 23 nt, Homo sapiens
accacuguaagugagaacaaauu

SEQ ID NO: 269222 - RNA, 22 nt, Homo sapiens
accagagaagggcuuggacuca

SEQ ID NO: 269223 - RNA, 14 nt, Homo sapiens
accagagcagcuca

SEQ ID NO: 269224 - RNA, 19 nt, Homo sapiens
accagagccguuacuacac

SEQ ID NO: 269225 - RNA, 18 nt, Homo sapiens
accagaggacaaagccuu

SEQ ID NO: 269226 - RNA, 20 nt, Homo sapiens
accagcaggauggcaggggc

SEQ ID NO: 269227 - RNA, 23 nt, Homo sapiens
accagccucccucccugugccag

SEQ ID NO: 269228 - RNA, 17 nt, Homo sapiens
accagccucuccacuca

SEQ ID NO: 269229 - RNA, 15 nt, Homo sapiens
accagggguuucucg

SEQ ID NO: 269230 - RNA, 22 nt, Homo sapiens
accaggguccuuuugacacugc

SEQ ID NO: 269231 - RNA, 20 nt, Homo sapiens
accaggguugaccccagagg

SEQ ID NO: 269232 - RNA, 14 nt, Homo sapiens
accaggucagggag

SEQ ID NO: 269233 - RNA, 19 nt, Homo sapiens
accaggucucauaaugcau

SEQ ID NO: 269234 - RNA, 16 nt, Homo sapiens
accaguauuguacaaa

SEQ ID NO: 269235 - RNA, 18 nt, Homo sapiens
accaguuaauuuuuccaa

SEQ ID NO: 269236 - RNA, 22 nt, Homo sapiens
accaguuuccuuucgucugcca

SEQ ID NO: 269237 - RNA, 13 nt, Homo sapiens
accauaauguuac

SEQ ID NO: 269238 - RNA, 14 nt, Homo sapiens
accauaauguuaca

SEQ ID NO: 269239 - RNA, 15 nt, Homo sapiens
accaucauaguacag

SEQ ID NO: 269240 - RNA, 17 nt, Homo sapiens
acacuugggagcaaaag

SEQ ID NO: 269241 - RNA, 15 nt, Homo sapiens
acagaaaacgguuaa

SEQ ID NO: 269242 - RNA, 22 nt, Homo sapiens
acagaacuaagaugaucaucuc

SEQ ID NO: 269243 - RNA, 22 nt, Homo sapiens
acagaagcacagcacccauggg

SEQ ID NO: 269244 - RNA, 18 nt, Homo sapiens
acagaagccucacugcaa

SEQ ID NO: 269245 - RNA, 12 nt, Homo sapiens
acagaagguccu

SEQ ID NO: 269246 - RNA, 13 nt, Homo sapiens
acagaauucacuu

SEQ ID NO: 269247 - RNA, 22 nt, Homo sapiens
acagacaaagcgugguggacau

SEQ ID NO: 269248 - RNA, 18 nt, Homo sapiens
acagacaacaaaccuguu

SEQ ID NO: 269249 - RNA, 15 nt, Homo sapiens
acagacacucccacu

SEQ ID NO: 269250 - RNA, 17 nt, Homo sapiens
acagacuaugucaccca

SEQ ID NO: 269251 - RNA, 14 nt, Homo sapiens
acagacucacaucc

SEQ ID NO: 269252 - RNA, 20 nt, Homo sapiens
acagacugaugccagacaaa

SEQ ID NO: 269253 - RNA, 15 nt, Homo sapiens
acagagcagaacuuu

SEQ ID NO: 269254 - RNA, 17 nt, Homo sapiens
acagagcagaacuuuca

SEQ ID NO: 269255 - RNA, 19 nt, Homo sapiens
acagagccccacccucaga

SEQ ID NO: 269256 - RNA, 16 nt, Homo sapiens
acagagcuucccugac

SEQ ID NO: 269257 - RNA, 19 nt, Homo sapiens
acagagcuucccugacuca

SEQ ID NO: 269258 - RNA, 15 nt, Homo sapiens
acagaggaucugcuu

SEQ ID NO: 269259 - RNA, 18 nt, Homo sapiens
acagaggauuugcucugg

SEQ ID NO: 269260 - RNA, 23 nt, Homo sapiens
acagagggcaggaacuugcacaa

SEQ ID NO: 269261 - RNA, 20 nt, Homo sapiens
acagagugagacucugucuc

SEQ ID NO: 269262 - RNA, 13 nt, Homo sapiens
acagagugcauug

SEQ ID NO: 269263 - RNA, 17 nt, Homo sapiens
acagagugcauugugag

SEQ ID NO: 269264 - RNA, 12 nt, Homo sapiens
acagagugccug

SEQ ID NO: 269265 - RNA, 21 nt, Homo sapiens
acagauuguucuaaaguaaaa

SEQ ID NO: 269266 - RNA, 16 nt, Homo sapiens
acagcaacacaaagcu

SEQ ID NO: 269267 - RNA, 14 nt, Homo sapiens
acagcaucagcuca

SEQ ID NO: 269268 - RNA, 22 nt, Homo sapiens
acagcauggagucacagccacu

SEQ ID NO: 269269 - RNA, 14 nt, Homo sapiens
acagccacuuggga

SEQ ID NO: 269270 - RNA, 12 nt, Homo sapiens
acagccaugauu

SEQ ID NO: 269271 - RNA, 22 nt, Homo sapiens
acagccaugauucuuuugccca

SEQ ID NO: 269272 - RNA, 18 nt, Homo sapiens
acagccccucuggacaca

SEQ ID NO: 269273 - RNA, 19 nt, Homo sapiens
acagccccucuggacacag

SEQ ID NO: 269274 - RNA, 20 nt, Homo sapiens
acagccgcuccugucugcca

SEQ ID NO: 269275 - RNA, 21 nt, Homo sapiens
acagccucccacccccaucuc

SEQ ID NO: 269276 - RNA, 18 nt, Homo sapiens
acagccucugaaaaccaa

SEQ ID NO: 269277 - RNA, 14 nt, Homo sapiens
acagccuggcacag

SEQ ID NO: 269278 - RNA, 18 nt, Homo sapiens
acagccuggcacagggca

SEQ ID NO: 269279 - RNA, 15 nt, Homo sapiens
acagcuaacauggaa

SEQ ID NO: 269280 - RNA, 16 nt, Homo sapiens
acagcuccuucugucc

SEQ ID NO: 269281 - RNA, 20 nt, Homo sapiens
acagcucgggcccucuguga

SEQ ID NO: 269282 - RNA, 23 nt, Homo sapiens
acagcucgggcccucugugagau

SEQ ID NO: 269283 - RNA, 14 nt, Homo sapiens
acagcucuucucca

SEQ ID NO: 269284 - RNA, 14 nt, Homo sapiens
acagcugcagagac

SEQ ID NO: 269285 - RNA, 19 nt, Homo sapiens
acagcugggguggggaccu

SEQ ID NO: 269286 - RNA, 23 nt, Homo sapiens
acaggaagguagaaauaucugaa

SEQ ID NO: 269287 - RNA, 18 nt, Homo sapiens
acaggacccugggaccac

SEQ ID NO: 269288 - RNA, 21 nt, Homo sapiens
acaggcaacugaggcagacag

SEQ ID NO: 269289 - RNA, 14 nt, Homo sapiens
acaggcagcauuua

SEQ ID NO: 269290 - RNA, 15 nt, Homo sapiens
acaggcagcauuuag

SEQ ID NO: 269291 - RNA, 16 nt, Homo sapiens
acaggccgcacaucuc

SEQ ID NO: 269292 - RNA, 17 nt, Homo sapiens
acaggccgcacaucuca

SEQ ID NO: 269293 - RNA, 14 nt, Homo sapiens
acaggcuucgucuc

SEQ ID NO: 269294 - RNA, 15 nt, Homo sapiens
acaggcuucgucuca

SEQ ID NO: 269295 - RNA, 15 nt, Homo sapiens
acagggaggugaccc

SEQ ID NO: 269296 - RNA, 15 nt, Homo sapiens
acagggcauggccag

SEQ ID NO: 269297 - RNA, 12 nt, Homo sapiens
acagggccagug

SEQ ID NO: 269298 - RNA, 17 nt, Homo sapiens
acagggccagugcaguu

SEQ ID NO: 269299 - RNA, 14 nt, Homo sapiens
acagggucucacug

SEQ ID NO: 269300 - RNA, 16 nt, Homo sapiens
acagggucucacugug

SEQ ID NO: 269301 - RNA, 15 nt, Homo sapiens
acagggugagcacuc

SEQ ID NO: 269302 - RNA, 22 nt, Homo sapiens
acccaaaagaaacugacaugcc

SEQ ID NO: 269303 - RNA, 10 nt, Homo sapiens
acccaagggc

SEQ ID NO: 269304 - RNA, 18 nt, Homo sapiens
acccaauaguuguugauu

SEQ ID NO: 269305 - RNA, 19 nt, Homo sapiens
acccaauauuuaccagacc

SEQ ID NO: 269306 - RNA, 12 nt, Homo sapiens
acccaccucagc

SEQ ID NO: 269307 - RNA, 14 nt, Homo sapiens
acccaccucagccu

SEQ ID NO: 269308 - RNA, 21 nt, Homo sapiens
acccacugcuuuuggucugug

SEQ ID NO: 269309 - RNA, 14 nt, Homo sapiens
acccagaaucucau

SEQ ID NO: 269310 - RNA, 20 nt, Homo sapiens
acccagaguggcccaagacu

SEQ ID NO: 269311 - RNA, 16 nt, Homo sapiens
acccagcuaugguucu

SEQ ID NO: 269312 - RNA, 21 nt, Homo sapiens
acccagucagaguugugcaca

SEQ ID NO: 269313 - RNA, 22 nt, Homo sapiens
acccagucagaguugugcacau

SEQ ID NO: 269314 - RNA, 23 nt, Homo sapiens
acccaguguuuuaggagcaugag

SEQ ID NO: 269315 - RNA, 14 nt, Homo sapiens
acccauauuacaga

SEQ ID NO: 269316 - RNA, 18 nt, Homo sapiens
acccaugggaagggucca

SEQ ID NO: 269317 - RNA, 21 nt, Homo sapiens
accccaauggaugaagacccc

SEQ ID NO: 269318 - RNA, 20 nt, Homo sapiens
accccagacgaugucuucau

SEQ ID NO: 269319 - RNA, 22 nt, Homo sapiens
accccagugcuuguuccucuca

SEQ ID NO: 269320 - RNA, 16 nt, Homo sapiens
accccaucucuacuga

SEQ ID NO: 269321 - RNA, 16 nt, Homo sapiens
accccucaacaccucu

SEQ ID NO: 269322 - RNA, 18 nt, Homo sapiens
accccuccccuaaugccu

SEQ ID NO: 269323 - RNA, 19 nt, Homo sapiens
accccuccccuaaugccug

SEQ ID NO: 269324 - RNA, 20 nt, Homo sapiens
accccugcuccccugagcug

SEQ ID NO: 269325 - RNA, 16 nt, Homo sapiens
accccuggaugaaguu

SEQ ID NO: 269326 - RNA, 16 nt, Homo sapiens
acccgaguaacuuucu

SEQ ID NO: 269327 - RNA, 20 nt, Homo sapiens
acccgccuagcugcugucac

SEQ ID NO: 269328 - RNA, 20 nt, Homo sapiens
acccggcugcagaggccaga

SEQ ID NO: 269329 - RNA, 21 nt, Homo sapiens
acccgggaggcagagguugca

SEQ ID NO: 269330 - RNA, 21 nt, Homo sapiens
acccuaugugggugggaccac

SEQ ID NO: 269331 - RNA, 16 nt, Homo sapiens
acccucagaugcacau

SEQ ID NO: 269332 - RNA, 15 nt, Homo sapiens
acccuccacucagcu

SEQ ID NO: 269333 - RNA, 19 nt, Homo sapiens
acccuccacucagcugucc

SEQ ID NO: 269334 - RNA, 21 nt, Homo sapiens
acccuccacucagcuguccug

SEQ ID NO: 269335 - RNA, 16 nt, Homo sapiens
acccucuccuugucac

SEQ ID NO: 269336 - RNA, 19 nt, Homo sapiens
acccucuuagaaaaaccac

SEQ ID NO: 269337 - RNA, 13 nt, Homo sapiens
acccugaguucau

SEQ ID NO: 269338 - RNA, 17 nt, Homo sapiens
acccugcucuccgacca

SEQ ID NO: 269339 - RNA, 16 nt, Homo sapiens
acccugggaccacaga

SEQ ID NO: 269340 - RNA, 23 nt, Homo sapiens
acccuggugaccagcaccaucuc

SEQ ID NO: 269341 - RNA, 21 nt, Homo sapiens
acccugucuaaugaaaccugu

SEQ ID NO: 269342 - RNA, 16 nt, Homo sapiens
acccugugcagaaccu

SEQ ID NO: 269343 - RNA, 17 nt, Homo sapiens
acccuuagccacuucau

SEQ ID NO: 269344 - RNA, 16 nt, Homo sapiens
acccuucuccuuagaa

SEQ ID NO: 269345 - RNA, 17 nt, Homo sapiens
acccuucuuuucugacu

SEQ ID NO: 269346 - RNA, 17 nt, Homo sapiens
acccuugaaaagacauc

SEQ ID NO: 269347 - RNA, 23 nt, Homo sapiens
acccuugcgcuuuugcuggucac

SEQ ID NO: 269348 - RNA, 18 nt, Homo sapiens
accgagcacauaccaugu

SEQ ID NO: 269349 - RNA, 16 nt, Homo sapiens
accgagucucuucucc

SEQ ID NO: 269350 - RNA, 16 nt, Homo sapiens
accgcgcccagccuca

SEQ ID NO: 269351 - RNA, 16 nt, Homo sapiens
accggcuccacuuucc

SEQ ID NO: 269352 - RNA, 16 nt, Homo sapiens
accggggccugggcag

SEQ ID NO: 269353 - RNA, 20 nt, Homo sapiens
accgucaauaggcaaagggg

SEQ ID NO: 269354 - RNA, 14 nt, Homo sapiens
accgugaacuggaa

SEQ ID NO: 269355 - RNA, 23 nt, Homo sapiens
accguggagcuuaagccacugcc

SEQ ID NO: 269356 - RNA, 17 nt, Homo sapiens
accgugggcucccugac

SEQ ID NO: 269357 - RNA, 23 nt, Homo sapiens
accuaaaaggaaaucucacccca

SEQ ID NO: 269358 - RNA, 17 nt, Homo sapiens
accuaaauaugagccca

SEQ ID NO: 269359 - RNA, 20 nt, Homo sapiens
accuaccuggaagaagccau

SEQ ID NO: 269360 - RNA, 12 nt, Homo sapiens
accuaguacaag

SEQ ID NO: 269361 - RNA, 17 nt, Homo sapiens
accuaguagucauuuca

SEQ ID NO: 269362 - RNA, 18 nt, Homo sapiens
accuaguagucauuucau

SEQ ID NO: 269363 - RNA, 14 nt, Homo sapiens
accucaaaggugau

SEQ ID NO: 269364 - RNA, 17 nt, Homo sapiens
accucaaccuaugguau

SEQ ID NO: 269365 - RNA, 12 nt, Homo sapiens
accucacugggg

SEQ ID NO: 269366 - RNA, 19 nt, Homo sapiens
accucagccucccaaagug

SEQ ID NO: 269367 - RNA, 11 nt, Homo sapiens
accucagggcu

SEQ ID NO: 269368 - RNA, 22 nt, Homo sapiens
accucagggcuguguguacuaa

SEQ ID NO: 269369 - RNA, 20 nt, Homo sapiens
accucaggugagaagcagag

SEQ ID NO: 269370 - RNA, 22 nt, Homo sapiens
accucaguuuuaucauuuucaa

SEQ ID NO: 269371 - RNA, 22 nt, Homo sapiens
accucauaucaguuugcuagca

SEQ ID NO: 269372 - RNA, 11 nt, Homo sapiens
accucaucucc

SEQ ID NO: 269373 - RNA, 17 nt, Homo sapiens
accucgcuggacucuca

SEQ ID NO: 269374 - RNA, 13 nt, Homo sapiens
accucgugccacc

SEQ ID NO: 269375 - RNA, 22 nt, Homo sapiens
accucuccuucaugacagccuc

SEQ ID NO: 269376 - RNA, 17 nt, Homo sapiens
accucugccugaaguca

SEQ ID NO: 269377 - RNA, 22 nt, Homo sapiens
accucugccugaagucacacag

SEQ ID NO: 269378 - RNA, 17 nt, Homo sapiens
accucuguucucaugaa

SEQ ID NO: 269379 - RNA, 17 nt, Homo sapiens
accucuugagccuugaa

SEQ ID NO: 269380 - RNA, 19 nt, Homo sapiens
accugaaaacacugugcac

SEQ ID NO: 269381 - RNA, 20 nt, Homo sapiens
accugaaaacacugugcaca

SEQ ID NO: 269382 - RNA, 22 nt, Homo sapiens
accugaaauaaaauucauuagu

SEQ ID NO: 269383 - RNA, 19 nt, Homo sapiens
accugaagcugucaccucu

SEQ ID NO: 269384 - RNA, 19 nt, Homo sapiens
accugaggcaggagggcau

SEQ ID NO: 269385 - RNA, 19 nt, Homo sapiens
accugauucucacagcaac

SEQ ID NO: 269386 - RNA, 16 nt, Homo sapiens
accugcagauguucug

SEQ ID NO: 269387 - RNA, 16 nt, Homo sapiens
accugccgagagucca

SEQ ID NO: 269388 - RNA, 18 nt, Homo sapiens
accuggcccugugccuug

SEQ ID NO: 269389 - RNA, 20 nt, Homo sapiens
accuggcuugaagcugcuca

SEQ ID NO: 269390 - RNA, 16 nt, Homo sapiens
accuguaaucauauaa

SEQ ID NO: 269391 - RNA, 16 nt, Homo sapiens
accugucccccugaca

SEQ ID NO: 269392 - RNA, 19 nt, Homo sapiens
accuguggccaaguucuua

SEQ ID NO: 269393 - RNA, 18 nt, Homo sapiens
accuuauaguuacugugu

SEQ ID NO: 269394 - RNA, 16 nt, Homo sapiens
accuugaacacugggg

SEQ ID NO: 269395 - RNA, 12 nt, Homo sapiens
accuugacaaaa

SEQ ID NO: 269396 - RNA, 14 nt, Homo sapiens
accuugacaaaauc

SEQ ID NO: 269397 - RNA, 17 nt, Homo sapiens
accuugacggcauugcu

SEQ ID NO: 269398 - RNA, 16 nt, Homo sapiens
accuuggacauccucc

SEQ ID NO: 269399 - RNA, 22 nt, Homo sapiens
acggagccacuccucugacuca

SEQ ID NO: 269400 - RNA, 14 nt, Homo sapiens
acggcucacugcag

SEQ ID NO: 269401 - RNA, 14 nt, Homo sapiens
acgggcucagcaaa

SEQ ID NO: 269402 - RNA, 16 nt, Homo sapiens
acguaagacuguguaa

SEQ ID NO: 269403 - RNA, 19 nt, Homo sapiens
acguaagcuccuugucugu

SEQ ID NO: 269404 - RNA, 18 nt, Homo sapiens
acgucagcugggacaccc

SEQ ID NO: 269405 - RNA, 14 nt, Homo sapiens
acgucugacaggca

SEQ ID NO: 269406 - RNA, 18 nt, Homo sapiens
acgugauuuugcuguaga

SEQ ID NO: 269407 - RNA, 17 nt, Homo sapiens
acgugcacgcacacugu

SEQ ID NO: 269408 - RNA, 21 nt, Homo sapiens
acguggagagaaguugcccuc

SEQ ID NO: 269409 - RNA, 13 nt, Homo sapiens
acguggcacuggu

SEQ ID NO: 269410 - RNA, 15 nt, Homo sapiens
acguggggcagcaca

SEQ ID NO: 269411 - RNA, 13 nt, Homo sapiens
acguugugcauuu

SEQ ID NO: 269412 - RNA, 17 nt, Homo sapiens
acuaaaacacacaggug

SEQ ID NO: 269413 - RNA, 16 nt, Homo sapiens
acuaaaaggugaccaa

SEQ ID NO: 269414 - RNA, 22 nt, Homo sapiens
acuaaaauuguaucaaauguga

SEQ ID NO: 269415 - RNA, 16 nt, Homo sapiens
acuaacaggccaaaga

SEQ ID NO: 269416 - RNA, 15 nt, Homo sapiens
acuaagaaauaugca

SEQ ID NO: 269417 - RNA, 14 nt, Homo sapiens
acuaagaagcagau

SEQ ID NO: 269418 - RNA, 20 nt, Homo sapiens
acuaagaugaucaucuccag

SEQ ID NO: 269419 - RNA, 22 nt, Homo sapiens
acuaaggugugcucugaucauc

SEQ ID NO: 269420 - RNA, 16 nt, Homo sapiens
acuaauacagacuaug

SEQ ID NO: 269421 - RNA, 22 nt, Homo sapiens
acuaauagaauaaaggcaguuu

SEQ ID NO: 269422 - RNA, 23 nt, Homo sapiens
acuaaugaggaaacugcacuguu

SEQ ID NO: 269423 - RNA, 22 nt, Homo sapiens
acuacacauucaauaagcauca

SEQ ID NO: 269424 - RNA, 23 nt, Homo sapiens
acuacacauucaauaagcaucaa

SEQ ID NO: 269425 - RNA, 17 nt, Homo sapiens
acuacagguaugugcca

SEQ ID NO: 269426 - RNA, 23 nt, Homo sapiens
acuaccuugguucccccacugau

SEQ ID NO: 269427 - RNA, 15 nt, Homo sapiens
acuacuggcaauuug

SEQ ID NO: 269428 - RNA, 20 nt, Homo sapiens
acuaggcccccacuugccuc

SEQ ID NO: 269429 - RNA, 15 nt, Homo sapiens
acuagggaucccuca

SEQ ID NO: 269430 - RNA, 22 nt, Homo sapiens
acuauagccuaggugacagagu

SEQ ID NO: 269431 - RNA, 18 nt, Homo sapiens
acuaucaaacugaagcca

SEQ ID NO: 269432 - RNA, 13 nt, Homo sapiens
acuaucacugguu

SEQ ID NO: 269433 - RNA, 18 nt, Homo sapiens
acuauggcucuacuuuca

SEQ ID NO: 269434 - RNA, 12 nt, Homo sapiens
acuauuacuggg

SEQ ID NO: 269435 - RNA, 18 nt, Homo sapiens
acuauugaaguugcagau

SEQ ID NO: 269436 - RNA, 16 nt, Homo sapiens
acuauugcuugcacaa

SEQ ID NO: 269437 - RNA, 17 nt, Homo sapiens
acuauuuaucugugcaa

SEQ ID NO: 269438 - RNA, 19 nt, Homo sapiens
acucaagagcccuuccagg

SEQ ID NO: 269439 - RNA, 13 nt, Homo sapiens
acucaaucucuga

SEQ ID NO: 269440 - RNA, 23 nt, Homo sapiens
acucacacggacacucaaaagcu

SEQ ID NO: 269441 - RNA, 17 nt, Homo sapiens
acucaccugcacuaaca

SEQ ID NO: 269442 - RNA, 23 nt, Homo sapiens
acucacugcugcaaauacuguau

SEQ ID NO: 269443 - RNA, 20 nt, Homo sapiens
acucacuuaucccaagagaa

SEQ ID NO: 269444 - RNA, 16 nt, Homo sapiens
acucagaagacacuga

SEQ ID NO: 269445 - RNA, 17 nt, Homo sapiens
acucagaagacacugau

SEQ ID NO: 269446 - RNA, 17 nt, Homo sapiens
acuaaggugugcucuga

SEQ ID NO: 269447 - RNA, 23 nt, Homo sapiens
acuaauagaauaaaggcaguuuu

SEQ ID NO: 269448 - RNA, 20 nt, Homo sapiens
acuaaugaggaaacugcacu

SEQ ID NO: 269449 - RNA, 22 nt, Homo sapiens
acuagacucaggaaagcuguua

SEQ ID NO: 269450 - RNA, 11 nt, Homo sapiens
acuagggccaa

SEQ ID NO: 269451 - RNA, 18 nt, Homo sapiens
acuauaauguaagcucua

SEQ ID NO: 269452 - RNA, 22 nt, Homo sapiens
acuauccaaucugugaugacau

SEQ ID NO: 269453 - RNA, 14 nt, Homo sapiens
acuaugauuauuaa

SEQ ID NO: 269454 - RNA, 21 nt, Homo sapiens
acuauggagcugagcaggugu

SEQ ID NO: 269455 - RNA, 19 nt, Homo sapiens
acuauggcucuacuuucag

SEQ ID NO: 269456 - RNA, 15 nt, Homo sapiens
acuauguaacaugua

SEQ ID NO: 269457 - RNA, 15 nt, Homo sapiens
acuauguugcccagg

SEQ ID NO: 269458 - RNA, 18 nt, Homo sapiens
acuauguugcccaggcag

SEQ ID NO: 269459 - RNA, 21 nt, Homo sapiens
acuauucaaucuuuacacaau

SEQ ID NO: 269460 - RNA, 21 nt, Homo sapiens
acuauugaaguugcagauuca

SEQ ID NO: 269461 - RNA, 22 nt, Homo sapiens
acucaaguuucuucaaucugaa

SEQ ID NO: 269462 - RNA, 21 nt, Homo sapiens
acucaaucucugauucuguca

SEQ ID NO: 269463 - RNA, 20 nt, Homo sapiens
acucacaaucaucuucuccc

SEQ ID NO: 269464 - RNA, 21 nt, Homo sapiens
acucacacggacacucaaaag

SEQ ID NO: 269465 - RNA, 20 nt, Homo sapiens
acucacauccugaccuugca

SEQ ID NO: 269466 - RNA, 15 nt, Homo sapiens
acucaccugcacuaa

SEQ ID NO: 269467 - RNA, 16 nt, Homo sapiens
acucaccugcacuaac

SEQ ID NO: 269468 - RNA, 14 nt, Homo sapiens
acucacuagacuca

SEQ ID NO: 269469 - RNA, 16 nt, Homo sapiens
acucaggcagaucuca

SEQ ID NO: 269470 - RNA, 19 nt, Homo sapiens
acucagggccccagcacua

SEQ ID NO: 269471 - RNA, 13 nt, Homo sapiens
acucagggcuccu

SEQ ID NO: 269472 - RNA, 14 nt, Homo sapiens
acucaggggucauu

SEQ ID NO: 269473 - RNA, 18 nt, Homo sapiens
acucagucucucuucucu

SEQ ID NO: 269474 - RNA, 18 nt, Homo sapiens
acucagucuuuaaucuga

SEQ ID NO: 269475 - RNA, 15 nt, Homo sapiens
acucaguucuuggcc

SEQ ID NO: 269476 - RNA, 23 nt, Homo sapiens
acucauagcgggggccuaaaaaa

SEQ ID NO: 269477 - RNA, 15 nt, Homo sapiens
acucaucauuuccau

SEQ ID NO: 269478 - RNA, 19 nt, Homo sapiens
acucaugugacucuuucca

SEQ ID NO: 269479 - RNA, 20 nt, Homo sapiens
acucaugugacucuuuccaa

SEQ ID NO: 269480 - RNA, 19 nt, Homo sapiens
acucauucccauguuguca

SEQ ID NO: 269481 - RNA, 22 nt, Homo sapiens
acucauucccauguugucaaua

SEQ ID NO: 269482 - RNA, 22 nt, Homo sapiens
acucauucuucuguacgucuga

SEQ ID NO: 269483 - RNA, 23 nt, Homo sapiens
acuccacccuccaccuuccauuu

SEQ ID NO: 269484 - RNA, 18 nt, Homo sapiens
acuccaggcugucuuuca

SEQ ID NO: 269485 - RNA, 15 nt, Homo sapiens
acucccaacccuggc

SEQ ID NO: 269486 - RNA, 15 nt, Homo sapiens
acucccacuuggcau

SEQ ID NO: 269487 - RNA, 20 nt, Homo sapiens
acuccgagagcaugcuuaau

SEQ ID NO: 269488 - RNA, 13 nt, Homo sapiens
acuccuaaaucaa

SEQ ID NO: 269489 - RNA, 19 nt, Homo sapiens
acuccuguaggaagguuaa

SEQ ID NO: 269490 - RNA, 20 nt, Homo sapiens
acucuaacaguaguugcaau

SEQ ID NO: 269491 - RNA, 17 nt, Homo sapiens
acucuaccucauaucag

SEQ ID NO: 269492 - RNA, 18 nt, Homo sapiens
acucuagggaaaaaccag

SEQ ID NO: 269493 - RNA, 22 nt, Homo sapiens
acucuauuuuuguaaaaaggga

SEQ ID NO: 269494 - RNA, 22 nt, Homo sapiens
acucuccagaaagcucaucuca

SEQ ID NO: 269495 - RNA, 20 nt, Homo sapiens
acucugagugcaaacuucag

SEQ ID NO: 269496 - RNA, 21 nt, Homo sapiens
acucuggagguuuguuuagaa

SEQ ID NO: 269497 - RNA, 23 nt, Homo sapiens
acucugggcuguaacguggcacu

SEQ ID NO: 269498 - RNA, 19 nt, Homo sapiens
acucuuaguuacucauuca

SEQ ID NO: 269499 - RNA, 17 nt, Homo sapiens
acucuuguugugcucuu

SEQ ID NO: 269500 - RNA, 22 nt, Homo sapiens
acugaaaacaguaaaacaggcu

SEQ ID NO: 269501 - RNA, 20 nt, Homo sapiens
acugaaaccucuguucucau

SEQ ID NO: 269502 - RNA, 15 nt, Homo sapiens
acugaacaugcucau

SEQ ID NO: 269503 - RNA, 14 nt, Homo sapiens
acugaacauuccag

SEQ ID NO: 269504 - RNA, 16 nt, Homo sapiens
acugaacuucagagca

SEQ ID NO: 269505 - RNA, 14 nt, Homo sapiens
acugaagccuuucu

SEQ ID NO: 269506 - RNA, 22 nt, Homo sapiens
acugaauagauaugaaagcuga

SEQ ID NO: 269507 - RNA, 19 nt, Homo sapiens
acugaaucugcuaccaaaa

SEQ ID NO: 269508 - RNA, 16 nt, Homo sapiens
acugaauuuugucuuu

SEQ ID NO: 269509 - RNA, 18 nt, Homo sapiens
acugaauuuugucuuuau

SEQ ID NO: 269510 - RNA, 14 nt, Homo sapiens
acugacacaugcug

SEQ ID NO: 269511 - RNA, 21 nt, Homo sapiens
acugacauguacgauucacuc

SEQ ID NO: 269512 - RNA, 16 nt, Homo sapiens
acugacauuguuggcc

SEQ ID NO: 269513 - RNA, 11 nt, Homo sapiens
acugaccaguu

SEQ ID NO: 269514 - RNA, 17 nt, Homo sapiens
acugagcaaagcauuga

SEQ ID NO: 269515 - RNA, 12 nt, Homo sapiens
acugagccagca

SEQ ID NO: 269516 - RNA, 14 nt, Homo sapiens
acugaggcagacag

SEQ ID NO: 269517 - RNA, 20 nt, Homo sapiens
acugaggcagacagcagcuc

SEQ ID NO: 269518 - RNA, 19 nt, Homo sapiens
acugaguacguugugcauu

SEQ ID NO: 269519 - RNA, 20 nt, Homo sapiens
acugauccaguauaagacua

SEQ ID NO: 269520 - RNA, 19 nt, Homo sapiens
acugaugggcaacccccag

SEQ ID NO: 269521 - RNA, 22 nt, Homo sapiens
acugcaagaaggagcucaguua

SEQ ID NO: 269522 - RNA, 15 nt, Homo sapiens
acugcaagcacugca

SEQ ID NO: 269523 - RNA, 18 nt, Homo sapiens
acugcacagugcaucuca

SEQ ID NO: 269524 - RNA, 15 nt, Homo sapiens
acugcaccccaggca

SEQ ID NO: 269525 - RNA, 20 nt, Homo sapiens
acugcacuauagccuaggug

SEQ ID NO: 269526 - RNA, 21 nt, Homo sapiens
acugcacuauagccuagguga

SEQ ID NO: 269527 - RNA, 20 nt, Homo sapiens
acugcacuccagccugggug

SEQ ID NO: 269528 - RNA, 16 nt, Homo sapiens
acugcagcaccuccag

SEQ ID NO: 269529 - RNA, 13 nt, Homo sapiens
acugcagcuuugu

SEQ ID NO: 269530 - RNA, 22 nt, Homo sapiens
acugcagggaaaauuauuugca

SEQ ID NO: 269531 - RNA, 17 nt, Homo sapiens
acugcauagcagaccac

SEQ ID NO: 269532 - RNA, 21 nt, Homo sapiens
acugcauaugaaaggacacua

SEQ ID NO: 269533 - RNA, 20 nt, Homo sapiens
acugcaucaagaugugacau

SEQ ID NO: 269534 - RNA, 18 nt, Homo sapiens
acugccaaagaacuugga

SEQ ID NO: 269535 - RNA, 15 nt, Homo sapiens
acugccaaccagagc

SEQ ID NO: 269536 - RNA, 21 nt, Homo sapiens
acugccaucuuggacuuguca

SEQ ID NO: 269537 - RNA, 23 nt, Homo sapiens
acugccugcagcugagauuccag

SEQ ID NO: 269538 - RNA, 16 nt, Homo sapiens
acugccugcccagugc

SEQ ID NO: 269539 - RNA, 21 nt, Homo sapiens
acugccuucgcuucuugccuc

SEQ ID NO: 269540 - RNA, 14 nt, Homo sapiens
acugcgccacugcu

SEQ ID NO: 269541 - RNA, 19 nt, Homo sapiens
acugcgccaucaacuccag

SEQ ID NO: 269542 - RNA, 17 nt, Homo sapiens
acugcucaucauuccuu

SEQ ID NO: 269543 - RNA, 20 nt, Homo sapiens
acugcucauuuggaucccag

SEQ ID NO: 269544 - RNA, 17 nt, Homo sapiens
acugcugggcuuggcag

SEQ ID NO: 269545 - RNA, 13 nt, Homo sapiens
acugcuguagaca

SEQ ID NO: 269546 - RNA, 20 nt, Homo sapiens
acugcuguagacauuugcua

SEQ ID NO: 269547 - RNA, 20 nt, Homo sapiens
acugcugugggcugcucacu

SEQ ID NO: 269548 - RNA, 15 nt, Homo sapiens
acuggaagcacagcu

SEQ ID NO: 269549 - RNA, 22 nt, Homo sapiens
acuggauccaaacccaucuucc

SEQ ID NO: 269550 - RNA, 13 nt, Homo sapiens
acugggaugaggu

SEQ ID NO: 269551 - RNA, 19 nt, Homo sapiens
acugggcgcaguuggucuu

SEQ ID NO: 269552 - RNA, 18 nt, Homo sapiens
acuucagagcaugaaaau

SEQ ID NO: 269553 - RNA, 20 nt, Homo sapiens
acuucagcucacacaugaga

SEQ ID NO: 269554 - RNA, 18 nt, Homo sapiens
acuucaguauguugucaa

SEQ ID NO: 269555 - RNA, 13 nt, Homo sapiens
acuuccaugacau

SEQ ID NO: 269556 - RNA, 14 nt, Homo sapiens
acuuccaugacaua

SEQ ID NO: 269557 - RNA, 14 nt, Homo sapiens
acuuccauuugcuu

SEQ ID NO: 269558 - RNA, 14 nt, Homo sapiens
acuucccacggcuc

SEQ ID NO: 269559 - RNA, 16 nt, Homo sapiens
acuucccacggcuccu

SEQ ID NO: 269560 - RNA, 16 nt, Homo sapiens
acuucucucaggaucc

SEQ ID NO: 269561 - RNA, 18 nt, Homo sapiens
acuucuuauacauuugau

SEQ ID NO: 269562 - RNA, 19 nt, Homo sapiens
acuucuuauacauuugaua

SEQ ID NO: 269563 - RNA, 19 nt, Homo sapiens
acuucuugcuucuuucuag

SEQ ID NO: 269564 - RNA, 21 nt, Homo sapiens
acuugaaagaaauggugaaug

SEQ ID NO: 269565 - RNA, 17 nt, Homo sapiens
acuugacaucaacugca

SEQ ID NO: 269566 - RNA, 16 nt, Homo sapiens
acuugagaauuacccu

SEQ ID NO: 269567 - RNA, 17 nt, Homo sapiens
acuugauguguuaucuc

SEQ ID NO: 269568 - RNA, 19 nt, Homo sapiens
acuugauguguuaucucuu

SEQ ID NO: 269569 - RNA, 11 nt, Homo sapiens
acuugcacaaa

SEQ ID NO: 269570 - RNA, 15 nt, Homo sapiens
acuugcacaaaauca

SEQ ID NO: 269571 - RNA, 16 nt, Homo sapiens
acuugcacccaugugu

SEQ ID NO: 269572 - RNA, 21 nt, Homo sapiens
acuugcccuucuauacuuucu

SEQ ID NO: 269573 - RNA, 17 nt, Homo sapiens
acuuggaaaugggagac

SEQ ID NO: 269574 - RNA, 15 nt, Homo sapiens
acuuggcaucauuca

SEQ ID NO: 269575 - RNA, 13 nt, Homo sapiens
acuugggaacuag

SEQ ID NO: 269576 - RNA, 14 nt, Homo sapiens
acuugggagcaaaa

SEQ ID NO: 269577 - RNA, 15 nt, Homo sapiens
acuuggucugugaga

SEQ ID NO: 269578 - RNA, 23 nt, Homo sapiens
acuuggucugugagaugcuagaa

SEQ ID NO: 269579 - RNA, 14 nt, Homo sapiens
acuuguggacacag

SEQ ID NO: 269580 - RNA, 16 nt, Homo sapiens
acuuguggacacagcu

SEQ ID NO: 269581 - RNA, 18 nt, Homo sapiens
acuuguggacacagcucu

SEQ ID NO: 269582 - RNA, 17 nt, Homo sapiens
acuuguuuuugcacaug

SEQ ID NO: 269583 - RNA, 19 nt, Homo sapiens
acuuuaaaaaguaaccaga

SEQ ID NO: 269584 - RNA, 18 nt, Homo sapiens
acuuucagguacuaaaua

SEQ ID NO: 269585 - RNA, 20 nt, Homo sapiens
acuuucagguacuaaauacc

SEQ ID NO: 269586 - RNA, 13 nt, Homo sapiens
acuuucugccagc

SEQ ID NO: 269587 - RNA, 21 nt, Homo sapiens
acuuucugccagcaucugcag

SEQ ID NO: 269588 - RNA, 12 nt, Homo sapiens
acuuucuucccu

SEQ ID NO: 269589 - RNA, 13 nt, Homo sapiens
acuuugaccuaaa

SEQ ID NO: 269590 - RNA, 12 nt, Homo sapiens
agagccuuccag

SEQ ID NO: 269591 - RNA, 18 nt, Homo sapiens
agagcucucaugaugcua

SEQ ID NO: 269592 - RNA, 11 nt, Homo sapiens
agagcugccac

SEQ ID NO: 269593 - RNA, 13 nt, Homo sapiens
agagcugcuucca

SEQ ID NO: 269594 - RNA, 16 nt, Homo sapiens
agagcuggaggcaccc

SEQ ID NO: 269595 - RNA, 15 nt, Homo sapiens
agagcugggacucag

SEQ ID NO: 269596 - RNA, 19 nt, Homo sapiens
agagcugggacucaguucu

SEQ ID NO: 269597 - RNA, 20 nt, Homo sapiens
agagcugggacucaguucuu

SEQ ID NO: 269598 - RNA, 16 nt, Homo sapiens
agagcugggugucaag

SEQ ID NO: 269599 - RNA, 13 nt, Homo sapiens
agagcugguuggg

SEQ ID NO: 269600 - RNA, 14 nt, Homo sapiens
agaggacaguauuu

SEQ ID NO: 269601 - RNA, 17 nt, Homo sapiens
agaggagccaccaguuc

SEQ ID NO: 269602 - RNA, 19 nt, Homo sapiens
agaggagccaccaguucuc

SEQ ID NO: 269603 - RNA, 20 nt, Homo sapiens
agaggagccaccaguucuca

SEQ ID NO: 269604 - RNA, 20 nt, Homo sapiens
agaggauuuggcucgcugug

SEQ ID NO: 269605 - RNA, 15 nt, Homo sapiens
agagggaaaacagaa

SEQ ID NO: 269606 - RNA, 18 nt, Homo sapiens
agagggcccaguggugcc

SEQ ID NO: 269607 - RNA, 20 nt, Homo sapiens
agaggggaacagacuggaag

SEQ ID NO: 269608 - RNA, 13 nt, Homo sapiens
agaggggguagcu

SEQ ID NO: 269609 - RNA, 19 nt, Homo sapiens
agaggggguagcuagccug

SEQ ID NO: 269610 - RNA, 21 nt, Homo sapiens
agaggguggagaugucagucu

SEQ ID NO: 269611 - RNA, 22 nt, Homo sapiens
agaggguggagaugucagucug

SEQ ID NO: 269612 - RNA, 21 nt, Homo sapiens
agagguuucuggcagccagua

SEQ ID NO: 269613 - RNA, 14 nt, Homo sapiens
agaguaacccuguc

SEQ ID NO: 269614 - RNA, 17 nt, Homo sapiens
agaguaggaagacuuug

SEQ ID NO: 269615 - RNA, 16 nt, Homo sapiens
agagucaacaguaucu

SEQ ID NO: 269616 - RNA, 14 nt, Homo sapiens
agagucacuggaac

SEQ ID NO: 269617 - RNA, 23 nt, Homo sapiens
agagucacuggaacacuaaugag

SEQ ID NO: 269618 - RNA, 16 nt, Homo sapiens
agagucgcugugccac

SEQ ID NO: 269619 - RNA, 17 nt, Homo sapiens
agagucgcugugccaca

SEQ ID NO: 269620 - RNA, 20 nt, Homo sapiens
agagugagacucugucucaa

SEQ ID NO: 269621 - RNA, 16 nt, Homo sapiens
agagugcuuuaccaau

SEQ ID NO: 269622 - RNA, 22 nt, Homo sapiens
agaguggaaccaacacuaacau

SEQ ID NO: 269623 - RNA, 13 nt, Homo sapiens
agaguggcccaag

SEQ ID NO: 269624 - RNA, 20 nt, Homo sapiens
agaguguguccacugagaag

SEQ ID NO: 269625 - RNA, 19 nt, Homo sapiens
agaguguuaucagucauaa

SEQ ID NO: 269626 - RNA, 12 nt, Homo sapiens
agaguugugcac

SEQ ID NO: 269627 - RNA, 14 nt, Homo sapiens
agaguugugcacau

SEQ ID NO: 269628 - RNA, 13 nt, Homo sapiens
agauaaaugugcu

SEQ ID NO: 269629 - RNA, 20 nt, Homo sapiens
agauaacaaucuguauauaa

SEQ ID NO: 269630 - RNA, 19 nt, Homo sapiens
agauaaccucaagucacau

SEQ ID NO: 269631 - RNA, 17 nt, Homo sapiens
agauaauucuagcuuug

SEQ ID NO: 269632 - RNA, 12 nt, Homo sapiens
agauacaugucu

SEQ ID NO: 269633 - RNA, 19 nt, Homo sapiens
agauacugucucuuucaug

SEQ ID NO: 269634 - RNA, 17 nt, Homo sapiens
agauagccaaggccaaa

SEQ ID NO: 269635 - RNA, 19 nt, Homo sapiens
agauagccaaggccaaagg

SEQ ID NO: 269636 - RNA, 20 nt, Homo sapiens
agauagccaaggccaaagga

SEQ ID NO: 269637 - RNA, 16 nt, Homo sapiens
agauaggaaccagcag

SEQ ID NO: 269638 - RNA, 13 nt, Homo sapiens
agauauaugcucu

SEQ ID NO: 269639 - RNA, 21 nt, Homo sapiens
agauauuuugcuuugugauuu

SEQ ID NO: 269640 - RNA, 13 nt, Homo sapiens
agaucagcaaagg

SEQ ID NO: 269641 - RNA, 21 nt, Homo sapiens
agaucagccugggcaauguga

SEQ ID NO: 269642 - RNA, 19 nt, Homo sapiens
agaucaugagaaauuacca

SEQ ID NO: 269643 - RNA, 13 nt, Homo sapiens
agaucccaacacu

SEQ ID NO: 269644 - RNA, 15 nt, Homo sapiens
agauccugguuggug

SEQ ID NO: 269645 - RNA, 13 nt, Homo sapiens
agauccuguccca

SEQ ID NO: 269646 - RNA, 16 nt, Homo sapiens
agaucucuaacuucac

SEQ ID NO: 269647 - RNA, 12 nt, Homo sapiens
agaucugcuguc

SEQ ID NO: 269648 - RNA, 14 nt, Homo sapiens
agaugaaucauuua

SEQ ID NO: 269649 - RNA, 14 nt, Homo sapiens
agaugaaugggagu

SEQ ID NO: 269650 - RNA, 20 nt, Homo sapiens
agaugaauguagcagauccc

SEQ ID NO: 269651 - RNA, 14 nt, Homo sapiens
agaugaucaucucc

SEQ ID NO: 269652 - RNA, 22 nt, Homo sapiens
agaugaugccaugggcccucuc

SEQ ID NO: 269653 - RNA, 19 nt, Homo sapiens
agaugcauuaucuaugaua

SEQ ID NO: 269654 - RNA, 20 nt, Homo sapiens
agaugcauuaucuaugauau

SEQ ID NO: 269655 - RNA, 20 nt, Homo sapiens
agaugccuucuccagacaaa

SEQ ID NO: 269656 - RNA, 13 nt, Homo sapiens
agauggaggccuc

SEQ ID NO: 269657 - RNA, 15 nt, Homo sapiens
agauggcagcaguga

SEQ ID NO: 269658 - RNA, 20 nt, Homo sapiens
agauggcauaaccugucuca

SEQ ID NO: 269659 - RNA, 12 nt, Homo sapiens
agauggccauau

SEQ ID NO: 269660 - RNA, 14 nt, Homo sapiens
agaugguguaugcu

SEQ ID NO: 269661 - RNA, 22 nt, Homo sapiens
agauguaagaaauguucuugca

SEQ ID NO: 269662 - RNA, 17 nt, Homo sapiens
agauguauauauuuccu

SEQ ID NO: 269663 - RNA, 15 nt, Homo sapiens
agaugucagucuguc

SEQ ID NO: 269664 - RNA, 13 nt, Homo sapiens
agaugucauccca

SEQ ID NO: 269665 - RNA, 22 nt, Homo sapiens
agaugugugauucacaguguga

SEQ ID NO: 269666 - RNA, 14 nt, Homo sapiens
agauguuuauuuca

SEQ ID NO: 269667 - RNA, 15 nt, Homo sapiens
agauuagaauucugu

SEQ ID NO: 269668 - RNA, 17 nt, Homo sapiens
agauuagagaguguuga

SEQ ID NO: 269669 - RNA, 20 nt, Homo sapiens
agauuucagggaagcccuga

SEQ ID NO: 269670 - RNA, 13 nt, Homo sapiens
agcaaaaccaaau

SEQ ID NO: 269671 - RNA, 14 nt, Homo sapiens
agcaaaagauucua

SEQ ID NO: 269672 - RNA, 12 nt, Homo sapiens
agcaaagacuuu

SEQ ID NO: 269673 - RNA, 15 nt, Homo sapiens
agcaacaugugacaa

SEQ ID NO: 269674 - RNA, 20 nt, Homo sapiens
agcaacauuuguuuuagucu

SEQ ID NO: 269675 - RNA, 18 nt, Homo sapiens
agcaagaucccaucucuu

SEQ ID NO: 269676 - RNA, 19 nt, Homo sapiens
agcaagaucccaucucuuu

SEQ ID NO: 269677 - RNA, 19 nt, Homo sapiens
agcaagucacuggccagug

SEQ ID NO: 269678 - RNA, 21 nt, Homo sapiens
agcaagugcuggagucgggac

SEQ ID NO: 269679 - RNA, 15 nt, Homo sapiens
agcaauaaaaugcua

SEQ ID NO: 269680 - RNA, 18 nt, Homo sapiens
agcaauacagacuacuuc

SEQ ID NO: 269681 - RNA, 17 nt, Homo sapiens
agcaauccugcaagaac

SEQ ID NO: 269682 - RNA, 18 nt, Homo sapiens
agcacaaagguagcuuuu

SEQ ID NO: 269683 - RNA, 17 nt, Homo sapiens
agcacagcacccauggg

SEQ ID NO: 269684 - RNA, 18 nt, Homo sapiens
agcacagcacccauggga

SEQ ID NO: 269685 - RNA, 18 nt, Homo sapiens
agcacaggcacugcagga

SEQ ID NO: 269686 - RNA, 18 nt, Homo sapiens
agcacauaccaugugcca

SEQ ID NO: 269687 - RNA, 20 nt, Homo sapiens
agcacaugccucucucaggc

SEQ ID NO: 269688 - RNA, 23 nt, Homo sapiens
agcaccuacaguguacagucuug

SEQ ID NO: 269689 - RNA, 21 nt, Homo sapiens
agcaccugauucucacagcaa

SEQ ID NO: 269690 - RNA, 14 nt, Homo sapiens
agcacgguggugcc

SEQ ID NO: 269691 - RNA, 21 nt, Homo sapiens
agcacgguggugcccaagcca

SEQ ID NO: 269692 - RNA, 20 nt, Homo sapiens
agcacguaguuugcauucca

SEQ ID NO: 269693 - RNA, 17 nt, Homo sapiens
agcacguguggccuguu

SEQ ID NO: 269694 - RNA, 15 nt, Homo sapiens
agcacuaaagcagug

SEQ ID NO: 269695 - RNA, 17 nt, Homo sapiens
agcacuaaagcagugga

SEQ ID NO: 269696 - RNA, 19 nt, Homo sapiens
agcacuaaggugugcucug

SEQ ID NO: 269697 - RNA, 20 nt, Homo sapiens
agcacugagcaaagcauuga

SEQ ID NO: 269698 - RNA, 23 nt, Homo sapiens
agcacugcaccccaggcagccac

SEQ ID NO: 269699 - RNA, 12 nt, Homo sapiens
agcacuggguug

SEQ ID NO: 269700 - RNA, 23 nt, Homo sapiens
agcagaaaucuagaagacuguca

SEQ ID NO: 269701 - RNA, 14 nt, Homo sapiens
agcagaaaugccuu

SEQ ID NO: 269702 - RNA, 22 nt, Homo sapiens
agcagagcaccuuagacagucc

SEQ ID NO: 269703 - RNA, 14 nt, Homo sapiens
agcagagguuggga

SEQ ID NO: 269704 - RNA, 14 nt, Homo sapiens
agcagagugcuuua

SEQ ID NO: 269705 - RNA, 20 nt, Homo sapiens
agcagaguggcagucuucag

SEQ ID NO: 269706 - RNA, 21 nt, Homo sapiens
agcagaugaccccuccccuaa

SEQ ID NO: 269707 - RNA, 15 nt, Homo sapiens
agcagcgccagugac

SEQ ID NO: 269708 - RNA, 18 nt, Homo sapiens
acugguugguuuugccau

SEQ ID NO: 269709 - RNA, 21 nt, Homo sapiens
acuguaaagcuuugugcagau

SEQ ID NO: 269710 - RNA, 16 nt, Homo sapiens
acuguaacacuuuaca

SEQ ID NO: 269711 - RNA, 22 nt, Homo sapiens
acuguauauucaggacuugaaa

SEQ ID NO: 269712 - RNA, 18 nt, Homo sapiens
acuguaugugggaauuua

SEQ ID NO: 269713 - RNA, 14 nt, Homo sapiens
acuguccuacccac

SEQ ID NO: 269714 - RNA, 13 nt, Homo sapiens
acugugcaguuuu

SEQ ID NO: 269715 - RNA, 14 nt, Homo sapiens
acugugcaguuuuc

SEQ ID NO: 269716 - RNA, 20 nt, Homo sapiens
acuguggcugcuagcacuug

SEQ ID NO: 269717 - RNA, 22 nt, Homo sapiens
acuguggcugcuagcacuugga

SEQ ID NO: 269718 - RNA, 12 nt, Homo sapiens
acugugggcucc

SEQ ID NO: 269719 - RNA, 21 nt, Homo sapiens
acuguguaauuagugccacuu

SEQ ID NO: 269720 - RNA, 14 nt, Homo sapiens
acuguguugcccag

SEQ ID NO: 269721 - RNA, 24 nt, Homo sapiens
acuguucuuugccagaacacaaga

SEQ ID NO: 269722 - RNA, 18 nt, Homo sapiens
acuguugacauccaagcu

SEQ ID NO: 269723 - RNA, 19 nt, Homo sapiens
acuguuggcaaggugacau

SEQ ID NO: 269724 - RNA, 20 nt, Homo sapiens
acuguuuagaugaaugucag

SEQ ID NO: 269725 - RNA, 17 nt, Homo sapiens
acuuaaaagaacaugua

SEQ ID NO: 269726 - RNA, 15 nt, Homo sapiens
acuuaaccugaagcu

SEQ ID NO: 269727 - RNA, 19 nt, Homo sapiens
acuuaagcacacuugacau

SEQ ID NO: 269728 - RNA, 21 nt, Homo sapiens
acuuaagcaucuggcucuaau

SEQ ID NO: 269729 - RNA, 15 nt, Homo sapiens
acuuacaucaugugu

SEQ ID NO: 269730 - RNA, 17 nt, Homo sapiens
acuuacuucucugcuau

SEQ ID NO: 269731 - RNA, 22 nt, Homo sapiens
acuuagaaauugcauuuccuga

SEQ ID NO: 269732 - RNA, 23 nt, Homo sapiens
acuuagaaauugcauuuccugac

SEQ ID NO: 269733 - RNA, 12 nt, Homo sapiens
acuuaguucaag

SEQ ID NO: 269734 - RNA, 22 nt, Homo sapiens
acuuauagaauucagucaaaga

SEQ ID NO: 269735 - RNA, 16 nt, Homo sapiens
agaccauaauguuaca

SEQ ID NO: 269736 - RNA, 15 nt, Homo sapiens
agaccauagugacca

SEQ ID NO: 269737 - RNA, 17 nt, Homo sapiens
agaccaucccugaaggc

SEQ ID NO: 269738 - RNA, 21 nt, Homo sapiens
agaccauucaggacacaggga

SEQ ID NO: 269739 - RNA, 18 nt, Homo sapiens
agaccugacaccuuucau

SEQ ID NO: 269740 - RNA, 19 nt, Homo sapiens
agaccugacaccuuucaua

SEQ ID NO: 269741 - RNA, 19 nt, Homo sapiens
agaccuguaaucauauaau

SEQ ID NO: 269742 - RNA, 20 nt, Homo sapiens
agaccuguguuacuaaaaaa

SEQ ID NO: 269743 - RNA, 21 nt, Homo sapiens
agacgugauuuugcuguagaa

SEQ ID NO: 269744 - RNA, 13 nt, Homo sapiens
agacuaaggccau

SEQ ID NO: 269745 - RNA, 19 nt, Homo sapiens
agacuagauguaguauuuu

SEQ ID NO: 269746 - RNA, 15 nt, Homo sapiens
agacuaugucaccca

SEQ ID NO: 269747 - RNA, 20 nt, Homo sapiens
agacucagggccccagcacu

SEQ ID NO: 269748 - RNA, 22 nt, Homo sapiens
agacucgauagugguggugaac

SEQ ID NO: 269749 - RNA, 21 nt, Homo sapiens
agacugaugccagacaaaccu

SEQ ID NO: 269750 - RNA, 21 nt, Homo sapiens
agacugcccagcuaaagcaau

SEQ ID NO: 269751 - RNA, 15 nt, Homo sapiens
agacuggaagcacag

SEQ ID NO: 269752 - RNA, 17 nt, Homo sapiens
agacuggaagcacagcu

SEQ ID NO: 269753 - RNA, 16 nt, Homo sapiens
agacugggcugaggga

SEQ ID NO: 269754 - RNA, 20 nt, Homo sapiens
agacugggucucgcuuuguu

SEQ ID NO: 269755 - RNA, 17 nt, Homo sapiens
agacugucagcuuccaa

SEQ ID NO: 269756 - RNA, 19 nt, Homo sapiens
agacugucucaagagggca

SEQ ID NO: 269757 - RNA, 20 nt, Homo sapiens
agacuuagaaaaauccuaca

SEQ ID NO: 269758 - RNA, 21 nt, Homo sapiens
agacuuagaaaaauccuacaa

SEQ ID NO: 269759 - RNA, 13 nt, Homo sapiens
agacuucccugaa

SEQ ID NO: 269760 - RNA, 14 nt, Homo sapiens
agacuugguuucaa

SEQ ID NO: 269761 - RNA, 15 nt, Homo sapiens
agacuuucuucucua

SEQ ID NO: 269762 - RNA, 14 nt, Homo sapiens
agagaaaugagcug

SEQ ID NO: 269763 - RNA, 14 nt, Homo sapiens
agagaaaugagcuu

SEQ ID NO: 269764 - RNA, 22 nt, Homo sapiens
agagaacaaugugcuaugugaa

SEQ ID NO: 269765 - RNA, 13 nt, Homo sapiens
agagaacuggagg

SEQ ID NO: 269766 - RNA, 14 nt, Homo sapiens
agagaaggggccca

SEQ ID NO: 269767 - RNA, 17 nt, Homo sapiens
agagaaugcccagugac

SEQ ID NO: 269768 - RNA, 20 nt, Homo sapiens
agagaauucucuuauccaac

SEQ ID NO: 269769 - RNA, 13 nt, Homo sapiens
agagacagaagaa

SEQ ID NO: 269770 - RNA, 21 nt, Homo sapiens
agagacaggguuuugccaugu

SEQ ID NO: 269771 - RNA, 22 nt, Homo sapiens
agagagaaaaguaacuguuuug

SEQ ID NO: 269772 - RNA, 14 nt, Homo sapiens
agagagggggccac

SEQ ID NO: 269773 - RNA, 17 nt, Homo sapiens
agagaggguggugaccu

SEQ ID NO: 269774 - RNA, 13 nt, Homo sapiens
agagaguggcucc

SEQ ID NO: 269775 - RNA, 16 nt, Homo sapiens
agagaugaaugcccag

SEQ ID NO: 269776 - RNA, 21 nt, Homo sapiens
agagcaacaauccaucucuca

SEQ ID NO: 269777 - RNA, 13 nt, Homo sapiens
agagcacacugua

SEQ ID NO: 269778 - RNA, 15 nt, Homo sapiens
agagcacacuguagc

SEQ ID NO: 269779 - RNA, 14 nt, Homo sapiens
agagcaguguggaa

SEQ ID NO: 269780 - RNA, 16 nt, Homo sapiens
agagcaguguggaaaa

SEQ ID NO: 269781 - RNA, 22 nt, Homo sapiens
agagcaguuugguuucuagcau

SEQ ID NO: 269782 - RNA, 22 nt, Homo sapiens
agagcaugaaaaucacacuguc

SEQ ID NO: 269783 - RNA, 13 nt, Homo sapiens
agagccagggucu

SEQ ID NO: 269784 - RNA, 18 nt, Homo sapiens
agagcccuaucuaugucc

SEQ ID NO: 269785 - RNA, 16 nt, Homo sapiens
agagccguuacuacac

SEQ ID NO: 269786 - RNA, 21 nt, Homo sapiens
agagccugaguguugccuaau

SEQ ID NO: 269787 - RNA, 20 nt, Homo sapiens
agagcgcaagcugggagcac

SEQ ID NO: 269788 - RNA, 18 nt, Homo sapiens
agagcuacacaggggaaa

SEQ ID NO: 269789 - RNA, 13 nt, Homo sapiens
agagcucucauga

SEQ ID NO: 269790 - RNA, 17 nt, Homo sapiens
agagcugaacuauuaga

SEQ ID NO: 269791 - RNA, 23 nt, Homo sapiens
agagcugccugugccuuuugcca

SEQ ID NO: 269792 - RNA, 13 nt, Homo sapiens
agagcuggaggca

SEQ ID NO: 269793 - RNA, 14 nt, Homo sapiens
agagcuucccugac

SEQ ID NO: 269794 - RNA, 13 nt, Homo sapiens
agagcuuuaccua

SEQ ID NO: 269795 - RNA, 15 nt, Homo sapiens
agaggagaaggaggg

SEQ ID NO: 269796 - RNA, 21 nt, Homo sapiens
agaggagagagacuccagcug

SEQ ID NO: 269797 - RNA, 15 nt, Homo sapiens
agaggauuugcucug

SEQ ID NO: 269798 - RNA, 13 nt, Homo sapiens
agaggauuuggcu

SEQ ID NO: 269799 - RNA, 19 nt, Homo sapiens
agaggcagggucucacucu

SEQ ID NO: 269800 - RNA, 17 nt, Homo sapiens
agaggcuguggcuggug

SEQ ID NO: 269801 - RNA, 13 nt, Homo sapiens
agagggaugcuug

SEQ ID NO: 269802 - RNA, 17 nt, Homo sapiens
agagggcugccuuugga

SEQ ID NO: 269803 - RNA, 20 nt, Homo sapiens
agaggggagagagacuggag

SEQ ID NO: 269804 - RNA, 17 nt, Homo sapiens
agaggguguccugcacc

SEQ ID NO: 269805 - RNA, 21 nt, Homo sapiens
agagguguucugguaaacuga

SEQ ID NO: 269806 - RNA, 21 nt, Homo sapiens
agaguaacccugucuaaugaa

SEQ ID NO: 269807 - RNA, 14 nt, Homo sapiens
agaguagagucacu

SEQ ID NO: 269808 - RNA, 18 nt, Homo sapiens
agaguccaauguaccaug

SEQ ID NO: 269809 - RNA, 16 nt, Homo sapiens
agagucccugccugga

SEQ ID NO: 269810 - RNA, 15 nt, Homo sapiens
agagucuccaguuua

SEQ ID NO: 269811 - RNA, 21 nt, Homo sapiens
agagugggguagguugggaga

SEQ ID NO: 269812 - RNA, 13 nt, Homo sapiens
agagugucuuucc

SEQ ID NO: 269813 - RNA, 15 nt, Homo sapiens
agaguuacaguucug

SEQ ID NO: 269814 - RNA, 15 nt, Homo sapiens
agaguugaagacaga

SEQ ID NO: 269815 - RNA, 14 nt, Homo sapiens
agauaaaugugcug

SEQ ID NO: 269816 - RNA, 23 nt, Homo sapiens
agauaacuguuauuuauaaucac

SEQ ID NO: 269817 - RNA, 16 nt, Homo sapiens
agauaagaugaaucau

SEQ ID NO: 269818 - RNA, 15 nt, Homo sapiens
agauaauacaccacu

SEQ ID NO: 269819 - RNA, 19 nt, Homo sapiens
agauaaucucuccauuccc

SEQ ID NO: 269820 - RNA, 17 nt, Homo sapiens
agauaauuauaauauac

SEQ ID NO: 269821 - RNA, 22 nt, Homo sapiens
agauacacaaucugaaacagcu

SEQ ID NO: 269822 - RNA, 18 nt, Homo sapiens
agauacugucucuuucau

SEQ ID NO: 269823 - RNA, 16 nt, Homo sapiens
agauagauauaugcuc

SEQ ID NO: 269824 - RNA, 18 nt, Homo sapiens
agauagccaaggccaaag

SEQ ID NO: 269825 - RNA, 16 nt, Homo sapiens
agaucacgagaucaag

SEQ ID NO: 269826 - RNA, 12 nt, Homo sapiens
agaucacgccac

SEQ ID NO: 269827 - RNA, 15 nt, Homo sapiens
agaucacgccacugc

SEQ ID NO: 269828 - RNA, 17 nt, Homo sapiens
agaucacgccacugcac

SEQ ID NO: 269829 - RNA, 22 nt, Homo sapiens
agaucacuucaggucaggaguu

SEQ ID NO: 269830 - RNA, 15 nt, Homo sapiens
agaucagacuuuaau

SEQ ID NO: 269831 - RNA, 15 nt, Homo sapiens
agaucagcaaaggga

SEQ ID NO: 269832 - RNA, 17 nt, Homo sapiens
agaucaggccaacccca

SEQ ID NO: 269833 - RNA, 20 nt, Homo sapiens
agaucaugagaaauuaccaa

SEQ ID NO: 269834 - RNA, 22 nt, Homo sapiens
agauccucaauaaacauuucau

SEQ ID NO: 269835 - RNA, 15 nt, Homo sapiens
agauccugucccaug

SEQ ID NO: 269836 - RNA, 16 nt, Homo sapiens
agaucgcaguuugccu

SEQ ID NO: 269837 - RNA, 19 nt, Homo sapiens
agaucguucucugccucac

SEQ ID NO: 269838 - RNA, 22 nt, Homo sapiens
agaucuaguucacucuccauuu

SEQ ID NO: 269839 - RNA, 23 nt, Homo sapiens
agaucuuucaggacucuaccuca

SEQ ID NO: 269840 - RNA, 21 nt, Homo sapiens
agaucuuuguguccagaguuu

SEQ ID NO: 269841 - RNA, 14 nt, Homo sapiens
agaugaaacaucau

SEQ ID NO: 269842 - RNA, 19 nt, Homo sapiens
agaugaaacaucauuucaa

SEQ ID NO: 269843 - RNA, 14 nt, Homo sapiens
agaugaagucuugu

SEQ ID NO: 269844 - RNA, 13 nt, Homo sapiens
agaugaaugucag

SEQ ID NO: 269845 - RNA, 14 nt, Homo sapiens
agaugauaccugaa

SEQ ID NO: 269846 - RNA, 17 nt, Homo sapiens
agaugcauccuuucaua

SEQ ID NO: 269847 - RNA, 10 nt, Homo sapiens
agaugcauua

SEQ ID NO: 269848 - RNA, 20 nt, Homo sapiens
agaugcugacuguacuccuc

SEQ ID NO: 269849 - RNA, 13 nt, Homo sapiens
agauggccaugua

SEQ ID NO: 269850 - RNA, 22 nt, Homo sapiens
agaugggcaaauuaaggcauaa

SEQ ID NO: 269851 - RNA, 15 nt, Homo sapiens
agauggggcauauuc

SEQ ID NO: 269852 - RNA, 21 nt, Homo sapiens
agauggggucucacaguguug

SEQ ID NO: 269853 - RNA, 20 nt, Homo sapiens
agaugguguaugcuguaucc

SEQ ID NO: 269854 - RNA, 21 nt, Homo sapiens
agaugguguaugcuguaucca

SEQ ID NO: 269855 - RNA, 16 nt, Homo sapiens
agauguauauauuucc

SEQ ID NO: 269856 - RNA, 19 nt, Homo sapiens
agaugucaucccauugucu

SEQ ID NO: 269857 - RNA, 19 nt, Homo sapiens
agauguccuugaugcucau

SEQ ID NO: 269858 - RNA, 16 nt, Homo sapiens
agaugugaacuugaag

SEQ ID NO: 269859 - RNA, 18 nt, Homo sapiens
agaugugaugaauuaucc

SEQ ID NO: 269860 - RNA, 13 nt, Homo sapiens
agauguggggaaa

SEQ ID NO: 269861 - RNA, 16 nt, Homo sapiens
agauguuauacaacca

SEQ ID NO: 269862 - RNA, 17 nt, Homo sapiens
agauguuauacaaccau

SEQ ID NO: 269863 - RNA, 22 nt, Homo sapiens
agcaggaagcugugagagcagu

SEQ ID NO: 269864 - RNA, 15 nt, Homo sapiens
agcaggacauggaca

SEQ ID NO: 269865 - RNA, 18 nt, Homo sapiens
agcaggcucucaggccag

SEQ ID NO: 269866 - RNA, 14 nt, Homo sapiens
agcagggaugaagg

SEQ ID NO: 269867 - RNA, 18 nt, Homo sapiens
agcaguaccggccaagca

SEQ ID NO: 269868 - RNA, 15 nt, Homo sapiens
agcagucgugccugu

SEQ ID NO: 269869 - RNA, 20 nt, Homo sapiens
agcagugaaugauucagugu

SEQ ID NO: 269870 - RNA, 16 nt, Homo sapiens
agcaguggcuccauug

SEQ ID NO: 269871 - RNA, 20 nt, Homo sapiens
agcaguuaguuccuucauga

SEQ ID NO: 269872 - RNA, 21 nt, Homo sapiens
agcaguugaaacaagaagcca

SEQ ID NO: 269873 - RNA, 23 nt, Homo sapiens
agcaguuugguuucuagcaugaa

SEQ ID NO: 269874 - RNA, 18 nt, Homo sapiens
agcauaaguuucugggac

SEQ ID NO: 269875 - RNA, 21 nt, Homo sapiens
agcauacgguaugauauugca

SEQ ID NO: 269876 - RNA, 15 nt, Homo sapiens
agcaucacaguuuug

SEQ ID NO: 269877 - RNA, 16 nt, Homo sapiens
agcaucuaugugagac

SEQ ID NO: 269878 - RNA, 16 nt, Homo sapiens
agcaucugcagccacu

SEQ ID NO: 269879 - RNA, 16 nt, Homo sapiens
agcaucuggcucuaau

SEQ ID NO: 269880 - RNA, 15 nt, Homo sapiens
agcaaacauaaugcu

SEQ ID NO: 269881 - RNA, 18 nt, Homo sapiens
agcaaagggagcacuggg

SEQ ID NO: 269882 - RNA, 13 nt, Homo sapiens
agcaaagggcuca

SEQ ID NO: 269883 - RNA, 12 nt, Homo sapiens
agcaacacaaag

SEQ ID NO: 269884 - RNA, 21 nt, Homo sapiens
agcaacacucuauauuuagau

SEQ ID NO: 269885 - RNA, 16 nt, Homo sapiens
agcaagucacuggcca

SEQ ID NO: 269886 - RNA, 16 nt, Homo sapiens
agcaauaugcauuuaa

SEQ ID NO: 269887 - RNA, 20 nt, Homo sapiens
agcacaaagcagauccucaa

SEQ ID NO: 269888 - RNA, 14 nt, Homo sapiens
agcacacacuuuug

SEQ ID NO: 269889 - RNA, 18 nt, Homo sapiens
agcacacugcuugugaaa

SEQ ID NO: 269890 - RNA, 11 nt, Homo sapiens
agcacacugua

SEQ ID NO: 269891 - RNA, 13 nt, Homo sapiens
agcacacuguagc

SEQ ID NO: 269892 - RNA, 17 nt, Homo sapiens
agcacacuugacaucaa

SEQ ID NO: 269893 - RNA, 16 nt, Homo sapiens
agcacagcuugaccug

SEQ ID NO: 269894 - RNA, 19 nt, Homo sapiens
agcacagcuugaccugagg

SEQ ID NO: 269895 - RNA, 16 nt, Homo sapiens
agcaccauaacuuugu

SEQ ID NO: 269896 - RNA, 21 nt, Homo sapiens
agcaccaucucuuuaccuccu

SEQ ID NO: 269897 - RNA, 19 nt, Homo sapiens
agcaccuacaguguacagu

SEQ ID NO: 269898 - RNA, 18 nt, Homo sapiens
agcaccuuagacaguccc

SEQ ID NO: 269899 - RNA, 21 nt, Homo sapiens
agcaccuuagacagucccugc

SEQ ID NO: 269900 - RNA, 15 nt, Homo sapiens
agcacgguggugccc

SEQ ID NO: 269901 - RNA, 23 nt, Homo sapiens
agcacuaaggugugcucugauca

SEQ ID NO: 269902 - RNA, 18 nt, Homo sapiens
agcacucggccuaaauag

SEQ ID NO: 269903 - RNA, 17 nt, Homo sapiens
agcacugagcaaagcau

SEQ ID NO: 269904 - RNA, 19 nt, Homo sapiens
agcacugagcaaagcauug

SEQ ID NO: 269905 - RNA, 22 nt, Homo sapiens
agcagaaaucuagaagacuguc

SEQ ID NO: 269906 - RNA, 13 nt, Homo sapiens
agcagaaaugccu

SEQ ID NO: 269907 - RNA, 14 nt, Homo sapiens
agcagaacuuucac

SEQ ID NO: 269908 - RNA, 22 nt, Homo sapiens
agcagaccacacagaagggugu

SEQ ID NO: 269909 - RNA, 13 nt, Homo sapiens
agcagauaauggu

SEQ ID NO: 269910 - RNA, 17 nt, Homo sapiens
agcagauccucaauaaa

SEQ ID NO: 269911 - RNA, 22 nt, Homo sapiens
agcagaugguggagcugaauau

SEQ ID NO: 269912 - RNA, 16 nt, Homo sapiens
agcagccacaaccaaa

SEQ ID NO: 269913 - RNA, 18 nt, Homo sapiens
agcagccacaaccaaaaa

SEQ ID NO: 269914 - RNA, 14 nt, Homo sapiens
agcagcgccaguga

SEQ ID NO: 269915 - RNA, 21 nt, Homo sapiens
agcagcgccccucccaagagg

SEQ ID NO: 269916 - RNA, 15 nt, Homo sapiens
agcaggcucucaggc

SEQ ID NO: 269917 - RNA, 18 nt, Homo sapiens
agcaggggaguaugcaaa

SEQ ID NO: 269918 - RNA, 20 nt, Homo sapiens
agcaggggaguaugcaaaag

SEQ ID NO: 269919 - RNA, 16 nt, Homo sapiens
agcaguaugugugcuc

SEQ ID NO: 269920 - RNA, 24 nt, Homo sapiens
agcagucuucucuucugccuuuau

SEQ ID NO: 269921 - RNA, 13 nt, Homo sapiens
agcagugugauug

SEQ ID NO: 269922 - RNA, 22 nt, Homo sapiens
agcaguuugcuuuguaugcacu

SEQ ID NO: 269923 - RNA, 18 nt, Homo sapiens
agcauacgguaugauauu

SEQ ID NO: 269924 - RNA, 16 nt, Homo sapiens
agcauacguacacauu

SEQ ID NO: 269925 - RNA, 21 nt, Homo sapiens
agcauacguacacauuuuauu

SEQ ID NO: 269926 - RNA, 20 nt, Homo sapiens
agcauaggaaaccacacaga

SEQ ID NO: 269927 - RNA, 12 nt, Homo sapiens
agcaucagcuca

SEQ ID NO: 269928 - RNA, 17 nt, Homo sapiens
agcaucucccaguucau

SEQ ID NO: 269929 - RNA, 22 nt, Homo sapiens
agcaucucccaguucauaauca

SEQ ID NO: 269930 - RNA, 21 nt, Homo sapiens
agcaugaaaaucacacugucu

SEQ ID NO: 269931 - RNA, 17 nt, Homo sapiens
agcaugaaccacccaga

SEQ ID NO: 269932 - RNA, 21 nt, Homo sapiens
agcaugcugugauugugccua

SEQ ID NO: 269933 - RNA, 14 nt, Homo sapiens
agcaugugugcaaa

SEQ ID NO: 269934 - RNA, 14 nt, Homo sapiens
agcauuacaguggg

SEQ ID NO: 269935 - RNA, 17 nt, Homo sapiens
agcauugagcaaagggg

SEQ ID NO: 269936 - RNA, 21 nt, Homo sapiens
agcauuguaaaauuauuucau

SEQ ID NO: 269937 - RNA, 17 nt, Homo sapiens
agcauuuagacccugca

SEQ ID NO: 269938 - RNA, 15 nt, Homo sapiens
agcauuuagacucuc

SEQ ID NO: 269939 - RNA, 16 nt, Homo sapiens
agcauuuagcacauac

SEQ ID NO: 269940 - RNA, 20 nt, Homo sapiens
agcauuuugcuaaaugugaa

SEQ ID NO: 269941 - RNA, 21 nt, Homo sapiens
agccaaccuagcuagcaacau

SEQ ID NO: 269942 - RNA, 20 nt, Homo sapiens
agccaagaauucuuaaauau

SEQ ID NO: 269943 - RNA, 16 nt, Homo sapiens
agccaaggccaaagga

SEQ ID NO: 269944 - RNA, 22 nt, Homo sapiens
agccaaggccaaaggaagcaca

SEQ ID NO: 269945 - RNA, 15 nt, Homo sapiens
agccacaaccaaaaa

SEQ ID NO: 269946 - RNA, 13 nt, Homo sapiens
agccacagcacuc

SEQ ID NO: 269947 - RNA, 15 nt, Homo sapiens
agccacaggcauuuc

SEQ ID NO: 269948 - RNA, 15 nt, Homo sapiens
agccaccaagaggga

SEQ ID NO: 269949 - RNA, 16 nt, Homo sapiens
agccaccaguucucau

SEQ ID NO: 269950 - RNA, 23 nt, Homo sapiens
agccaccgcgcccagccucaucu

SEQ ID NO: 269951 - RNA, 23 nt, Homo sapiens
agccacuauuguuagucucuuga

SEQ ID NO: 269952 - RNA, 21 nt, Homo sapiens
agccacugcauaccaaccugg

SEQ ID NO: 269953 - RNA, 11 nt, Homo sapiens
agccacuucau

SEQ ID NO: 269954 - RNA, 16 nt, Homo sapiens
agccacuuucugccag

SEQ ID NO: 269955 - RNA, 11 nt, Homo sapiens
agccagaggag

SEQ ID NO: 269956 - RNA, 15 nt, Homo sapiens
agccagcagccagcu

SEQ ID NO: 269957 - RNA, 18 nt, Homo sapiens
agccagcagccagcucuc

SEQ ID NO: 269958 - RNA, 19 nt, Homo sapiens
agccagcagccagcucuca

SEQ ID NO: 269959 - RNA, 16 nt, Homo sapiens
agccagcucugcauua

SEQ ID NO: 269960 - RNA, 14 nt, Homo sapiens
agccagggucucac

SEQ ID NO: 269961 - RNA, 14 nt, Homo sapiens
agccaguuacauaa

SEQ ID NO: 269962 - RNA, 21 nt, Homo sapiens
agccauauaggcagcaccuga

SEQ ID NO: 269963 - RNA, 19 nt, Homo sapiens
agccaugggagacacugau

SEQ ID NO: 269964 - RNA, 15 nt, Homo sapiens
agccauguaucucag

SEQ ID NO: 269965 - RNA, 16 nt, Homo sapiens
agccauugagcucucc

SEQ ID NO: 269966 - RNA, 19 nt, Homo sapiens
agcccaccccucaacaccu

SEQ ID NO: 269967 - RNA, 16 nt, Homo sapiens
agcccaccuuggcuca

SEQ ID NO: 269968 - RNA, 18 nt, Homo sapiens
agcccagagugaacacuc

SEQ ID NO: 269969 - RNA, 20 nt, Homo sapiens
agcccaggggccggccagug

SEQ ID NO: 269970 - RNA, 17 nt, Homo sapiens
agccccagccuaggaaa

SEQ ID NO: 269971 - RNA, 14 nt, Homo sapiens
agccccauccucug

SEQ ID NO: 269972 - RNA, 22 nt, Homo sapiens
agccccauucugccugcccagg

SEQ ID NO: 269973 - RNA, 19 nt, Homo sapiens
agccccucuggacacagcc

SEQ ID NO: 269974 - RNA, 23 nt, Homo sapiens
agcccgggucaucuguaccucug

SEQ ID NO: 269975 - RNA, 18 nt, Homo sapiens
agcccucaggucagggug

SEQ ID NO: 269976 - RNA, 22 nt, Homo sapiens
agcccugacuguguggagcuaa

SEQ ID NO: 269977 - RNA, 18 nt, Homo sapiens
agcccugccccacaccuc

SEQ ID NO: 269978 - RNA, 16 nt, Homo sapiens
agcccuuagcagggaa

SEQ ID NO: 269979 - RNA, 12 nt, Homo sapiens
agccgaccucag

SEQ ID NO: 269980 - RNA, 13 nt, Homo sapiens
agccgaccucagc

SEQ ID NO: 269981 - RNA, 13 nt, Homo sapiens
agccgacucuggc

SEQ ID NO: 269982 - RNA, 16 nt, Homo sapiens
agccgaggccuacccc

SEQ ID NO: 269983 - RNA, 17 nt, Homo sapiens
agccuagcccuucucuc

SEQ ID NO: 269984 - RNA, 19 nt, Homo sapiens
agccuagcccuucucucau

SEQ ID NO: 269985 - RNA, 16 nt, Homo sapiens
agccuagccgaccuca

SEQ ID NO: 269986 - RNA, 17 nt, Homo sapiens
agccuagccgaccucag

SEQ ID NO: 269987 - RNA, 16 nt, Homo sapiens
agccuaggugacagag

SEQ ID NO: 269988 - RNA, 15 nt, Homo sapiens
agccuauaucuucau

SEQ ID NO: 269989 - RNA, 22 nt, Homo sapiens
agccuauaucuucaucugugaa

SEQ ID NO: 269990 - RNA, 21 nt, Homo sapiens
agccuauguaugccauggagg

SEQ ID NO: 269991 - RNA, 23 nt, Homo sapiens
agccuauguaugccauggaggca

SEQ ID NO: 269992 - RNA, 16 nt, Homo sapiens
agccucaagaugaagg

SEQ ID NO: 269993 - RNA, 12 nt, Homo sapiens
agccucaagucu

SEQ ID NO: 269994 - RNA, 23 nt, Homo sapiens
agccucaagucuuauuuccucaa

SEQ ID NO: 269995 - RNA, 14 nt, Homo sapiens
agccucacaguccu

SEQ ID NO: 269996 - RNA, 18 nt, Homo sapiens
agccucacugcaagcacu

SEQ ID NO: 269997 - RNA, 13 nt, Homo sapiens
agccucaucucuu

SEQ ID NO: 269998 - RNA, 14 nt, Homo sapiens
agccucaucucuuu

SEQ ID NO: 269999 - RNA, 15 nt, Homo sapiens
agccuccucucucaa

SEQ ID NO: 270000 - RNA, 23 nt, Homo sapiens
agccugcacggugaauggcuuug

SEQ ID NO: 270001 - RNA, 23 nt, Homo sapiens
agccugcaguuauuaacacuaac

SEQ ID NO: 270002 - RNA, 16 nt, Homo sapiens
agccugccucuuccag

SEQ ID NO: 270003 - RNA, 18 nt, Homo sapiens
agccugccucuuccagga

SEQ ID NO: 270004 - RNA, 17 nt, Homo sapiens
agccugcuccagcuguu

SEQ ID NO: 270005 - RNA, 16 nt, Homo sapiens
agccuggccaacaugg

SEQ ID NO: 270006 - RNA, 21 nt, Homo sapiens
agccuggcugcccaucaugug

SEQ ID NO: 270007 - RNA, 15 nt, Homo sapiens
agccugggcaaugug

SEQ ID NO: 270008 - RNA, 21 nt, Homo sapiens
agccuggucccacgagggugc

SEQ ID NO: 270009 - RNA, 12 nt, Homo sapiens
agccuggugggc

SEQ ID NO: 270010 - RNA, 19 nt, Homo sapiens
agccuuagaagucacacag

SEQ ID NO: 270011 - RNA, 18 nt, Homo sapiens
agcgaggaggcuccagag

SEQ ID NO: 270012 - RNA, 23 nt, Homo sapiens
agcggcuggcagcccaccccuca

SEQ ID NO: 270013 - RNA, 24 nt, Homo sapiens
agcgugcauaaguuaacuuccaau

SEQ ID NO: 270014 - RNA, 17 nt, Homo sapiens
agcuaaggacacagugg

SEQ ID NO: 270015 - RNA, 21 nt, Homo sapiens
agcuacaccuuucuccuuugu

SEQ ID NO: 270016 - RNA, 23 nt, Homo sapiens
aggaagccagcaggcucucaggc

SEQ ID NO: 270017 - RNA, 12 nt, Homo sapiens
aggaagcucagg

SEQ ID NO: 270018 - RNA, 19 nt, Homo sapiens
aggaagcugugagagcagu

SEQ ID NO: 270019 - RNA, 14 nt, Homo sapiens
aggaaggaugagca

SEQ ID NO: 270020 - RNA, 21 nt, Homo sapiens
aggaagguagaaauaucugaa

SEQ ID NO: 270021 - RNA, 19 nt, Homo sapiens
aggaauacauaaaguaugu

SEQ ID NO: 270022 - RNA, 13 nt, Homo sapiens
aggacauggacaa

SEQ ID NO: 270023 - RNA, 14 nt, Homo sapiens
aggaccaagcaucu

SEQ ID NO: 270024 - RNA, 15 nt, Homo sapiens
agcucagagugccac

SEQ ID NO: 270025 - RNA, 22 nt, Homo sapiens
agcucaggaaccgaggcaggga

SEQ ID NO: 270026 - RNA, 15 nt, Homo sapiens
agcucaggcacacuu

SEQ ID NO: 270027 - RNA, 16 nt, Homo sapiens
agcucaggcacacuuc

SEQ ID NO: 270028 - RNA, 12 nt, Homo sapiens
agcucagguguc

SEQ ID NO: 270029 - RNA, 13 nt, Homo sapiens
agcucaucucagc

SEQ ID NO: 270030 - RNA, 18 nt, Homo sapiens
agcuccgcuuucuaccca

SEQ ID NO: 270031 - RNA, 22 nt, Homo sapiens
agcuccucugccuuugugcucu

SEQ ID NO: 270032 - RNA, 23 nt, Homo sapiens
agcuccucugccuuugugcucug

SEQ ID NO: 270033 - RNA, 20 nt, Homo sapiens
agcucgggcccucugugaga

SEQ ID NO: 270034 - RNA, 13 nt, Homo sapiens
agcucuacucugg

SEQ ID NO: 270035 - RNA, 14 nt, Homo sapiens
agcucuacugaggu

SEQ ID NO: 270036 - RNA, 21 nt, Homo sapiens
agcucucaugaugcuacccga

SEQ ID NO: 270037 - RNA, 19 nt, Homo sapiens
agcucugcuccucucccca

SEQ ID NO: 270038 - RNA, 20 nt, Homo sapiens
agcucuggggugggcaguuu

SEQ ID NO: 270039 - RNA, 22 nt, Homo sapiens
agcucuggggugggcaguuuuu

SEQ ID NO: 270040 - RNA, 15 nt, Homo sapiens
agcucuuuugagcau

SEQ ID NO: 270041 - RNA, 13 nt, Homo sapiens
agcugaaccuggg

SEQ ID NO: 270042 - RNA, 13 nt, Homo sapiens
agcugcacccuca

SEQ ID NO: 270043 - RNA, 17 nt, Homo sapiens
agcugcacuccaugagu

SEQ ID NO: 270044 - RNA, 16 nt, Homo sapiens
agcugcagccacuuuc

SEQ ID NO: 270045 - RNA, 15 nt, Homo sapiens
agcugccaccugccu

SEQ ID NO: 270046 - RNA, 18 nt, Homo sapiens
agcugccugggaucccuc

SEQ ID NO: 270047 - RNA, 18 nt, Homo sapiens
agcugcucacugcucaca

SEQ ID NO: 270048 - RNA, 16 nt, Homo sapiens
agcugcucugcaagag

SEQ ID NO: 270049 - RNA, 16 nt, Homo sapiens
agcugcugucuucccc

SEQ ID NO: 270050 - RNA, 23 nt, Homo sapiens
agcuggaagggucaacaucuuuu

SEQ ID NO: 270051 - RNA, 14 nt, Homo sapiens
agcuggagucuguc

SEQ ID NO: 270052 - RNA, 18 nt, Homo sapiens
agcuggagucugucaaug

SEQ ID NO: 270053 - RNA, 17 nt, Homo sapiens
agcuggauuacaggcau

SEQ ID NO: 270054 - RNA, 15 nt, Homo sapiens
agcugggacuggcag

SEQ ID NO: 270055 - RNA, 19 nt, Homo sapiens
agcugggagaaccaaaaag

SEQ ID NO: 270056 - RNA, 14 nt, Homo sapiens
agcugggagcacag

SEQ ID NO: 270057 - RNA, 22 nt, Homo sapiens
agcugggagcacaggcacugca

SEQ ID NO: 270058 - RNA, 13 nt, Homo sapiens
agcugggggacac

SEQ ID NO: 270059 - RNA, 16 nt, Homo sapiens
agcugggggacacuuu

SEQ ID NO: 270060 - RNA, 17 nt, Homo sapiens
agcugggguggggaccu

SEQ ID NO: 270061 - RNA, 22 nt, Homo sapiens
agcugggguggggaccucaggc

SEQ ID NO: 270062 - RNA, 23 nt, Homo sapiens
agcugggguggggaccucaggcc

SEQ ID NO: 270063 - RNA, 21 nt, Homo sapiens
agcuggguuggaaaacaguau

SEQ ID NO: 270064 - RNA, 22 nt, Homo sapiens
agcuggguuggaaaacaguauu

SEQ ID NO: 270065 - RNA, 16 nt, Homo sapiens
agcugucccacaucac

SEQ ID NO: 270066 - RNA, 19 nt, Homo sapiens
agcugucccucacuguuga

SEQ ID NO: 270067 - RNA, 17 nt, Homo sapiens
agcuguuagcacguuag

SEQ ID NO: 270068 - RNA, 13 nt, Homo sapiens
agcuguucagcug

SEQ ID NO: 270069 - RNA, 16 nt, Homo sapiens
agcuguuuaugcauag

SEQ ID NO: 270070 - RNA, 20 nt, Homo sapiens
agcuguuuaugcauagauaa

SEQ ID NO: 270071 - RNA, 16 nt, Homo sapiens
agcuguuuuguugaca

SEQ ID NO: 270072 - RNA, 13 nt, Homo sapiens
agcuuaagaauuu

SEQ ID NO: 270073 - RNA, 13 nt, Homo sapiens
agcuuagaccuca

SEQ ID NO: 270074 - RNA, 14 nt, Homo sapiens
agcuucacaguacc

SEQ ID NO: 270075 - RNA, 21 nt, Homo sapiens
agcuucuuaaaugagaaggaa

SEQ ID NO: 270076 - RNA, 21 nt, Homo sapiens
agcuucuuaauauaacugccu

SEQ ID NO: 270077 - RNA, 22 nt, Homo sapiens
agcuucuuaauauaacugccuu

SEQ ID NO: 270078 - RNA, 20 nt, Homo sapiens
agcuugaccgugaggccaga

SEQ ID NO: 270079 - RNA, 21 nt, Homo sapiens
agcuugaccgugaggccagag

SEQ ID NO: 270080 - RNA, 21 nt, Homo sapiens
agcuugagggugacuauggag

SEQ ID NO: 270081 - RNA, 14 nt, Homo sapiens
agcuugcaacaaaa

SEQ ID NO: 270082 - RNA, 19 nt, Homo sapiens
agcuuggcuguagaaggag

SEQ ID NO: 270083 - RNA, 17 nt, Homo sapiens
agcuuguaaauagcuca

SEQ ID NO: 270084 - RNA, 19 nt, Homo sapiens
agcuuuccucaucaggcca

SEQ ID NO: 270085 - RNA, 19 nt, Homo sapiens
agcuuucugcuaucaaaga

SEQ ID NO: 270086 - RNA, 16 nt, Homo sapiens
agcuuugaaaauucag

SEQ ID NO: 270087 - RNA, 12 nt, Homo sapiens
agcuuuucccaa

SEQ ID NO: 270088 - RNA, 15 nt, Homo sapiens
aggaaaauuucacau

SEQ ID NO: 270089 - RNA, 16 nt, Homo sapiens
aggaaacugcacuguu

SEQ ID NO: 270090 - RNA, 14 nt, Homo sapiens
aggaaaggcuccag

SEQ ID NO: 270091 - RNA, 14 nt, Homo sapiens
aggaacagucuugu

SEQ ID NO: 270092 - RNA, 14 nt, Homo sapiens
aggaaccucagggc

SEQ ID NO: 270093 - RNA, 15 nt, Homo sapiens
aggaagacaauguga

SEQ ID NO: 270094 - RNA, 14 nt, Homo sapiens
aggaagacuuugga

SEQ ID NO: 270095 - RNA, 15 nt, Homo sapiens
aggaagaucaggcca

SEQ ID NO: 270096 - RNA, 23 nt, Homo sapiens
aggaagcaaaagcaucuauguga

SEQ ID NO: 270097 - RNA, 15 nt, Homo sapiens
aggaagcacaugccu

SEQ ID NO: 270098 - RNA, 20 nt, Homo sapiens
aggaagccucccacgacugc

SEQ ID NO: 270099 - RNA, 16 nt, Homo sapiens
aggaagccugauuaaa

SEQ ID NO: 270100 - RNA, 14 nt, Homo sapiens
aggaauaccugucc

SEQ ID NO: 270101 - RNA, 22 nt, Homo sapiens
aggaauauauggcagaguugua

SEQ ID NO: 270102 - RNA, 13 nt, Homo sapiens
aggaaucaggcaa

SEQ ID NO: 270103 - RNA, 14 nt, Homo sapiens
aggaauugguuuca

SEQ ID NO: 270104 - RNA, 19 nt, Homo sapiens
aggaauuucuuaacuucuu

SEQ ID NO: 270105 - RNA, 22 nt, Homo sapiens
aggacaaaauaaggaacaugaa

SEQ ID NO: 270106 - RNA, 12 nt, Homo sapiens
aggacaaagccu

SEQ ID NO: 270107 - RNA, 12 nt, Homo sapiens
aggacacagugg

SEQ ID NO: 270108 - RNA, 21 nt, Homo sapiens
aggacacuagaagauuuugaa

SEQ ID NO: 270109 - RNA, 18 nt, Homo sapiens
aggacagggaggugaccc

SEQ ID NO: 270110 - RNA, 21 nt, Homo sapiens
aggacagggaggugaccccag

SEQ ID NO: 270111 - RNA, 20 nt, Homo sapiens
aggacauugcggacagccac

SEQ ID NO: 270112 - RNA, 13 nt, Homo sapiens
aggaccagagcua

SEQ ID NO: 270113 - RNA, 16 nt, Homo sapiens
aggacccugggaccac

SEQ ID NO: 270114 - RNA, 15 nt, Homo sapiens
aggaccuuuccacca

SEQ ID NO: 270115 - RNA, 16 nt, Homo sapiens
aggacgugggccucca

SEQ ID NO: 270116 - RNA, 12 nt, Homo sapiens
aggacuguagaa

SEQ ID NO: 270117 - RNA, 13 nt, Homo sapiens
aggacuguagaaa

SEQ ID NO: 270118 - RNA, 18 nt, Homo sapiens
aggacuguugacauccaa

SEQ ID NO: 270119 - RNA, 17 nt, Homo sapiens
aggagcaugagugccgu

SEQ ID NO: 270120 - RNA, 19 nt, Homo sapiens
aggagccaccaguucucau

SEQ ID NO: 270121 - RNA, 18 nt, Homo sapiens
aggagcugauacuuugac

SEQ ID NO: 270122 - RNA, 23 nt, Homo sapiens
aggagcugauacuuugacagugu

SEQ ID NO: 270123 - RNA, 20 nt, Homo sapiens
aggaggaguuuaaacugaau

SEQ ID NO: 270124 - RNA, 16 nt, Homo sapiens
aggaggccaugcccac

SEQ ID NO: 270125 - RNA, 16 nt, Homo sapiens
aggaggcccagcugcu

SEQ ID NO: 270126 - RNA, 20 nt, Homo sapiens
aggaggcccagcugcucagu

SEQ ID NO: 270127 - RNA, 19 nt, Homo sapiens
aggaggggugugggcaccc

SEQ ID NO: 270128 - RNA, 19 nt, Homo sapiens
aggagggguuaaagcugcc

SEQ ID NO: 270129 - RNA, 14 nt, Homo sapiens
aggagucagggaga

SEQ ID NO: 270130 - RNA, 15 nt, Homo sapiens
aggagucccugccau

SEQ ID NO: 270131 - RNA, 18 nt, Homo sapiens
aggaguuugagaccaacc

SEQ ID NO: 270132 - RNA, 16 nt, Homo sapiens
aggauaaaaagccagg

SEQ ID NO: 270133 - RNA, 21 nt, Homo sapiens
aggauauaguuaucaaucucu

SEQ ID NO: 270134 - RNA, 20 nt, Homo sapiens
aggauccccucucuuccuac

SEQ ID NO: 270135 - RNA, 21 nt, Homo sapiens
aggaugaaagugaccauguuu

SEQ ID NO: 270136 - RNA, 22 nt, Homo sapiens
aggaugaucuaggaagacuuug

SEQ ID NO: 270137 - RNA, 17 nt, Homo sapiens
aggaugcuuguacauaa

SEQ ID NO: 270138 - RNA, 17 nt, Homo sapiens
aggaugggaaggaggga

SEQ ID NO: 270139 - RNA, 23 nt, Homo sapiens
aggaugugucuuggggugggcac

SEQ ID NO: 270140 - RNA, 15 nt, Homo sapiens
aggauuagacaguca

SEQ ID NO: 270141 - RNA, 14 nt, Homo sapiens
aggauuauugucaa

SEQ ID NO: 270142 - RNA, 21 nt, Homo sapiens
aggauuugcucuggacagaga

SEQ ID NO: 270143 - RNA, 19 nt, Homo sapiens
aggauuugggcucuuggaa

SEQ ID NO: 270144 - RNA, 15 nt, Homo sapiens
aggcaaccacaggca

SEQ ID NO: 270145 - RNA, 23 nt, Homo sapiens
aggcaacugaggcagacagcagc

SEQ ID NO: 270146 - RNA, 13 nt, Homo sapiens
aggcaacugcauu

SEQ ID NO: 270147 - RNA, 18 nt, Homo sapiens
aggcacccauccuagaga

SEQ ID NO: 270148 - RNA, 18 nt, Homo sapiens
aggcagagguugcagugu

SEQ ID NO: 270149 - RNA, 18 nt, Homo sapiens
aggcagaucccacuugca

SEQ ID NO: 270150 - RNA, 15 nt, Homo sapiens
aggcagcagugugag

SEQ ID NO: 270151 - RNA, 15 nt, Homo sapiens
aggcagccacuccua

SEQ ID NO: 270152 - RNA, 23 nt, Homo sapiens
aggcagcgcugcaguugcucagg

SEQ ID NO: 270153 - RNA, 14 nt, Homo sapiens
aggcaggagggcau

SEQ ID NO: 270154 - RNA, 16 nt, Homo sapiens
aggcaggggaauguau

SEQ ID NO: 270155 - RNA, 15 nt, Homo sapiens
aggcagggucucacu

SEQ ID NO: 270156 - RNA, 20 nt, Homo sapiens
aggcagggucucacucuguc

SEQ ID NO: 270157 - RNA, 20 nt, Homo sapiens
aggcagggucucacucuguu

SEQ ID NO: 270158 - RNA, 20 nt, Homo sapiens
aggcauacugccuuguuuaa

SEQ ID NO: 270159 - RNA, 18 nt, Homo sapiens
aggccaaacucaccugcc

SEQ ID NO: 270160 - RNA, 21 nt, Homo sapiens
aggccaaaggaagcacaugcc

SEQ ID NO: 270161 - RNA, 17 nt, Homo sapiens
aggccacagugcaauuu

SEQ ID NO: 270162 - RNA, 12 nt, Homo sapiens
aggccagagcaa

SEQ ID NO: 270163 - RNA, 21 nt, Homo sapiens
aggccagugggaccccacaga

SEQ ID NO: 270164 - RNA, 19 nt, Homo sapiens
aggccauucuuucccaaca

SEQ ID NO: 270165 - RNA, 16 nt, Homo sapiens
aggccauuuguguuua

SEQ ID NO: 270166 - RNA, 17 nt, Homo sapiens
aggcccccacuugccuc

SEQ ID NO: 270167 - RNA, 12 nt, Homo sapiens
aggcccucgcug

SEQ ID NO: 270168 - RNA, 22 nt, Homo sapiens
aggcccuuccucuccacugccu

SEQ ID NO: 270169 - RNA, 23 nt, Homo sapiens
aggcccuuccucuccacugccuu

SEQ ID NO: 270170 - RNA, 16 nt, Homo sapiens
aggcccuucucuccag

SEQ ID NO: 270171 - RNA, 20 nt, Homo sapiens
aggggucccauagaggugag

SEQ ID NO: 270172 - RNA, 23 nt, Homo sapiens
aggggugcggcggucccagcucc

SEQ ID NO: 270173 - RNA, 14 nt, Homo sapiens
aggguaaauucucu

SEQ ID NO: 270174 - RNA, 15 nt, Homo sapiens
aggguagaggggaag

SEQ ID NO: 270175 - RNA, 14 nt, Homo sapiens
agggucucacucug

SEQ ID NO: 270176 - RNA, 15 nt, Homo sapiens
agggucucacugugu

SEQ ID NO: 270177 - RNA, 18 nt, Homo sapiens
agggugaaagcuggaguc

SEQ ID NO: 270178 - RNA, 14 nt, Homo sapiens
agggugacuaugga

SEQ ID NO: 270179 - RNA, 13 nt, Homo sapiens
aggguggugaccu

SEQ ID NO: 270180 - RNA, 19 nt, Homo sapiens
agggugugggccaccagag

SEQ ID NO: 270181 - RNA, 21 nt, Homo sapiens
aggguucaccaggucagggag

SEQ ID NO: 270182 - RNA, 22 nt, Homo sapiens
aggguucaccaggucagggaga

SEQ ID NO: 270183 - RNA, 19 nt, Homo sapiens
aggguugggcuggugucac

SEQ ID NO: 270184 - RNA, 15 nt, Homo sapiens
agguaaggugaggga

SEQ ID NO: 270185 - RNA, 15 nt, Homo sapiens
agguacgaaaagagg

SEQ ID NO: 270186 - RNA, 20 nt, Homo sapiens
agguacgaaaagaggggaag

SEQ ID NO: 270187 - RNA, 17 nt, Homo sapiens
agguacgaugacagugu

SEQ ID NO: 270188 - RNA, 19 nt, Homo sapiens
agguaggggcccacuucac

SEQ ID NO: 270189 - RNA, 22 nt, Homo sapiens
agguaucauuuucugcauuuaa

SEQ ID NO: 270190 - RNA, 22 nt, Homo sapiens
aggucagagccugcaguuauua

SEQ ID NO: 270191 - RNA, 15 nt, Homo sapiens
aggucagggugagga

SEQ ID NO: 270192 - RNA, 16 nt, Homo sapiens
aggucagucuucuucc

SEQ ID NO: 270193 - RNA, 20 nt, Homo sapiens
aggucauugguggcagagug

SEQ ID NO: 270194 - RNA, 23 nt, Homo sapiens
aggucccuugucccaaguuccac

SEQ ID NO: 270195 - RNA, 23 nt, Homo sapiens
agguccuggcaaagaugaucagu

SEQ ID NO: 270196 - RNA, 18 nt, Homo sapiens
aggucuaggaacauacuu

SEQ ID NO: 270197 - RNA, 21 nt, Homo sapiens
aggucuaggaacauacuucag

SEQ ID NO: 270198 - RNA, 13 nt, Homo sapiens
aggugacagagug

SEQ ID NO: 270199 - RNA, 19 nt, Homo sapiens
aggugagaguauagugcau

SEQ ID NO: 270200 - RNA, 17 nt, Homo sapiens
aggugaggaagcaaaag

SEQ ID NO: 270201 - RNA, 16 nt, Homo sapiens
aggugauccacccacc

SEQ ID NO: 270202 - RNA, 20 nt, Homo sapiens
aggugauccacccaccucag

SEQ ID NO: 270203 - RNA, 22 nt, Homo sapiens
aggugcccaggaaccucagggc

SEQ ID NO: 270204 - RNA, 15 nt, Homo sapiens
aggugcuacugacuu

SEQ ID NO: 270205 - RNA, 19 nt, Homo sapiens
aggugcuaucgcaccacug

SEQ ID NO: 270206 - RNA, 21 nt, Homo sapiens
aggugcuauguucuuagugga

SEQ ID NO: 270207 - RNA, 15 nt, Homo sapiens
agguggccacuccag

SEQ ID NO: 270208 - RNA, 20 nt, Homo sapiens
aggugggaggaucucuugag

SEQ ID NO: 270209 - RNA, 20 nt, Homo sapiens
aggugggccagucuguggau

SEQ ID NO: 270210 - RNA, 21 nt, Homo sapiens
agguguucuucauuaccucag

SEQ ID NO: 270211 - RNA, 23 nt, Homo sapiens
agguguucuucauuaccucagug

SEQ ID NO: 270212 - RNA, 17 nt, Homo sapiens
agguuagcugcucccca

SEQ ID NO: 270213 - RNA, 12 nt, Homo sapiens
agguuccuguca

SEQ ID NO: 270214 - RNA, 19 nt, Homo sapiens
agguucuggugugaacuaa

SEQ ID NO: 270215 - RNA, 13 nt, Homo sapiens
agguugagggcaa

SEQ ID NO: 270216 - RNA, 14 nt, Homo sapiens
agguuggcaaaaag

SEQ ID NO: 270217 - RNA, 18 nt, Homo sapiens
agguugucugaagucacu

SEQ ID NO: 270218 - RNA, 21 nt, Homo sapiens
agguugucugaagucacugca

SEQ ID NO: 270219 - RNA, 23 nt, Homo sapiens
agguugucugaagucacugcaca

SEQ ID NO: 270220 - RNA, 17 nt, Homo sapiens
agguuuaggucaagaag

SEQ ID NO: 270221 - RNA, 15 nt, Homo sapiens
agguuugccagcauu

SEQ ID NO: 270222 - RNA, 16 nt, Homo sapiens
agguuugccagcauuu

SEQ ID NO: 270223 - RNA, 15 nt, Homo sapiens
agguuuuaaagaccu

SEQ ID NO: 270224 - RNA, 21 nt, Homo sapiens
agguuuuccugaagaauugaa

SEQ ID NO: 270225 - RNA, 14 nt, Homo sapiens
agguuuuucuugcu

SEQ ID NO: 270226 - RNA, 16 nt, Homo sapiens
agguuuuuggucugac

SEQ ID NO: 270227 - RNA, 22 nt, Homo sapiens
agguuuuuggucugacccacug

SEQ ID NO: 270228 - RNA, 13 nt, Homo sapiens
aguaaaagccauc

SEQ ID NO: 270229 - RNA, 15 nt, Homo sapiens
aguaacauguguuaa

SEQ ID NO: 270230 - RNA, 19 nt, Homo sapiens
aguaacccugucuaaugaa

SEQ ID NO: 270231 - RNA, 11 nt, Homo sapiens
aguaagccaug

SEQ ID NO: 270232 - RNA, 23 nt, Homo sapiens
aguaaguacuuaauaaacugugg

SEQ ID NO: 270233 - RNA, 22 nt, Homo sapiens
aguaaguuugauuucauuaaua

SEQ ID NO: 270234 - RNA, 14 nt, Homo sapiens
aguaauaugcacac

SEQ ID NO: 270235 - RNA, 13 nt, Homo sapiens
aguaaugaugucg

SEQ ID NO: 270236 - RNA, 23 nt, Homo sapiens
aguacacuguuucaaacuuuacu

SEQ ID NO: 270237 - RNA, 10 nt, Homo sapiens
aguaccccau

SEQ ID NO: 270238 - RNA, 17 nt, Homo sapiens
aguaccggccaagcaua

SEQ ID NO: 270239 - RNA, 21 nt, Homo sapiens
aguacguguuauuuuuuucaa

SEQ ID NO: 270240 - RNA, 14 nt, Homo sapiens
aguacguugugcau

SEQ ID NO: 270241 - RNA, 17 nt, Homo sapiens
aguacuggcaugguacg

SEQ ID NO: 270242 - RNA, 18 nt, Homo sapiens
aguagagguacacuugug

SEQ ID NO: 270243 - RNA, 14 nt, Homo sapiens
aguagagucacugg

SEQ ID NO: 270244 - RNA, 21 nt, Homo sapiens
aguagagucacuggaacacua

SEQ ID NO: 270245 - RNA, 21 nt, Homo sapiens
aguagcuggauuacaggcaug

SEQ ID NO: 270246 - RNA, 14 nt, Homo sapiens
aguagcugggacua

SEQ ID NO: 270247 - RNA, 20 nt, Homo sapiens
aguagcugggacuacaggca

SEQ ID NO: 270248 - RNA, 18 nt, Homo sapiens
aguaggaagacuuuggaa

SEQ ID NO: 270249 - RNA, 13 nt, Homo sapiens
aguaggaguggcu

SEQ ID NO: 270250 - RNA, 17 nt, Homo sapiens
aguauauugauaaccuu

SEQ ID NO: 270251 - RNA, 16 nt, Homo sapiens
aguaucccuacuguaa

SEQ ID NO: 270252 - RNA, 13 nt, Homo sapiens
aguaugugcauau

SEQ ID NO: 270253 - RNA, 15 nt, Homo sapiens
aguauguggaagugu

SEQ ID NO: 270254 - RNA, 17 nt, Homo sapiens
aguaugugugcucuuau

SEQ ID NO: 270255 - RNA, 16 nt, Homo sapiens
aguauuuagaagccaa

SEQ ID NO: 270256 - RNA, 20 nt, Homo sapiens
aguauuuagaagccaacuau

SEQ ID NO: 270257 - RNA, 16 nt, Homo sapiens
aguauuugcauauucu

SEQ ID NO: 270258 - RNA, 16 nt, Homo sapiens
agucaaaagagagaag

SEQ ID NO: 270259 - RNA, 23 nt, Homo sapiens
agucaaggauggaugcagaucca

SEQ ID NO: 270260 - RNA, 19 nt, Homo sapiens
agucaauaaauuugcaaau

SEQ ID NO: 270261 - RNA, 20 nt, Homo sapiens
agucacuggucuguuugcau

SEQ ID NO: 270262 - RNA, 17 nt, Homo sapiens
agucagaguugugcaca

SEQ ID NO: 270263 - RNA, 19 nt, Homo sapiens
agucagggaaggugccucu

SEQ ID NO: 270264 - RNA, 12 nt, Homo sapiens
agucaucaucaa

SEQ ID NO: 270265 - RNA, 13 nt, Homo sapiens
agucauccucaga

SEQ ID NO: 270266 - RNA, 23 nt, Homo sapiens
agucaucuugcuaccaguauuua

SEQ ID NO: 270267 - RNA, 23 nt, Homo sapiens
agucaugucuuuccuauuugcac

SEQ ID NO: 270268 - RNA, 21 nt, Homo sapiens
agucauuugcugagcauguac

SEQ ID NO: 270269 - RNA, 18 nt, Homo sapiens
agucccaccuuggcugca

SEQ ID NO: 270270 - RNA, 16 nt, Homo sapiens
agucccagcuacuuga

SEQ ID NO: 270271 - RNA, 16 nt, Homo sapiens
agucccauugauguac

SEQ ID NO: 270272 - RNA, 22 nt, Homo sapiens
aguccugugccucaucacugcu

SEQ ID NO: 270273 - RNA, 18 nt, Homo sapiens
agucguggggugugcugg

SEQ ID NO: 270274 - RNA, 15 nt, Homo sapiens
agucucccuuccuau

SEQ ID NO: 270275 - RNA, 22 nt, Homo sapiens
agucucugaagugaaacugcuu

SEQ ID NO: 270276 - RNA, 15 nt, Homo sapiens
agucucuugauucau

SEQ ID NO: 270277 - RNA, 15 nt, Homo sapiens
agucugaacaauaua

SEQ ID NO: 270278 - RNA, 16 nt, Homo sapiens
agucugauuguagcua

SEQ ID NO: 270279 - RNA, 23 nt, Homo sapiens
agucugggcuacgguuccauguu

SEQ ID NO: 270280 - RNA, 17 nt, Homo sapiens
agucugucaauguccua

SEQ ID NO: 270281 - RNA, 17 nt, Homo sapiens
agucuguuuuaugacuu

SEQ ID NO: 270282 - RNA, 19 nt, Homo sapiens
agucuuagagcuuuaccua

SEQ ID NO: 270283 - RNA, 14 nt, Homo sapiens
agucuucaagcaga

SEQ ID NO: 270284 - RNA, 22 nt, Homo sapiens
agucuucauaauuucuucacuc

SEQ ID NO: 270285 - RNA, 13 nt, Homo sapiens
agucuucuauuua

SEQ ID NO: 270286 - RNA, 14 nt, Homo sapiens
agucuucuauuuau

SEQ ID NO: 270287 - RNA, 16 nt, Homo sapiens
agucuucucuucugcc

SEQ ID NO: 270288 - RNA, 17 nt, Homo sapiens
agucuuuguacagacaa

SEQ ID NO: 270289 - RNA, 18 nt, Homo sapiens
agugaaaccccaucucua

SEQ ID NO: 270290 - RNA, 16 nt, Homo sapiens
agugaagcugggagaa

SEQ ID NO: 270291 - RNA, 22 nt, Homo sapiens
agugaagcugggagaaccaaaa

SEQ ID NO: 270292 - RNA, 19 nt, Homo sapiens
agugaauaaaccaucaucu

SEQ ID NO: 270293 - RNA, 15 nt, Homo sapiens
agugaaucaccugug

SEQ ID NO: 270294 - RNA, 20 nt, Homo sapiens
agugaaucacguaaagcuag

SEQ ID NO: 270295 - RNA, 12 nt, Homo sapiens
agugacagucag

SEQ ID NO: 270296 - RNA, 22 nt, Homo sapiens
agugacugggcaggcagcagaa

SEQ ID NO: 270297 - RNA, 13 nt, Homo sapiens
agugagaagccag

SEQ ID NO: 270298 - RNA, 17 nt, Homo sapiens
agugagcuccuaagcca

SEQ ID NO: 270299 - RNA, 19 nt, Homo sapiens
agugagucgaggacaggga

SEQ ID NO: 270300 - RNA, 21 nt, Homo sapiens
agugauaucccccagccucaa

SEQ ID NO: 270301 - RNA, 22 nt, Homo sapiens
agugauaucccccagccucaag

SEQ ID NO: 270302 - RNA, 12 nt, Homo sapiens
agugauggagcu

SEQ ID NO: 270303 - RNA, 12 nt, Homo sapiens
agugauguaauc

SEQ ID NO: 270304 - RNA, 16 nt, Homo sapiens
agugauucuccugccu

SEQ ID NO: 270305 - RNA, 17 nt, Homo sapiens
agugauugauagagugu

SEQ ID NO: 270306 - RNA, 12 nt, Homo sapiens
agugauuuccac

SEQ ID NO: 270307 - RNA, 12 nt, Homo sapiens
agugcaccacuu

SEQ ID NO: 270308 - RNA, 20 nt, Homo sapiens
agugcaguuugguguguccu

SEQ ID NO: 270309 - RNA, 20 nt, Homo sapiens
agugcaguuuuuuucuuguc

SEQ ID NO: 270310 - RNA, 21 nt, Homo sapiens
agugcaguuuuuuucuugucu

SEQ ID NO: 270311 - RNA, 14 nt, Homo sapiens
agugcaucucagcc

SEQ ID NO: 270312 - RNA, 13 nt, Homo sapiens
agugcgguuuacu

SEQ ID NO: 270313 - RNA, 19 nt, Homo sapiens
aguauuggcaaagaugugg

SEQ ID NO: 270314 - RNA, 20 nt, Homo sapiens
aguauuguacaaaguauuaa

SEQ ID NO: 270315 - RNA, 13 nt, Homo sapiens
agucaaagacauu

SEQ ID NO: 270316 - RNA, 13 nt, Homo sapiens
agucaacaguauc

SEQ ID NO: 270317 - RNA, 17 nt, Homo sapiens
agucaacaguaucugug

SEQ ID NO: 270318 - RNA, 21 nt, Homo sapiens
agucaaccugccugacauuug

SEQ ID NO: 270319 - RNA, 13 nt, Homo sapiens
agucacagagaua

SEQ ID NO: 270320 - RNA, 20 nt, Homo sapiens
agucacagagauaauucuag

SEQ ID NO: 270321 - RNA, 15 nt, Homo sapiens
agucacaugugcucu

SEQ ID NO: 270322 - RNA, 18 nt, Homo sapiens
agucacuaguuguaauuu

SEQ ID NO: 270323 - RNA, 13 nt, Homo sapiens
agucacugacccu

SEQ ID NO: 270324 - RNA, 19 nt, Homo sapiens
agucacugacccugugcag

SEQ ID NO: 270325 - RNA, 18 nt, Homo sapiens
agugggcccaaugcacuu

SEQ ID NO: 270326 - RNA, 19 nt, Homo sapiens
aguggggcuggaagcagaa

SEQ ID NO: 270327 - RNA, 15 nt, Homo sapiens
agugggggaucacag

SEQ ID NO: 270328 - RNA, 15 nt, Homo sapiens
agugggguagguugg

SEQ ID NO: 270329 - RNA, 13 nt, Homo sapiens
agugggugaauaa

SEQ ID NO: 270330 - RNA, 19 nt, Homo sapiens
agugggugaauaauacagu

SEQ ID NO: 270331 - RNA, 21 nt, Homo sapiens
aguggugccccagcacggugg

SEQ ID NO: 270332 - RNA, 22 nt, Homo sapiens
agugguggugaacagaacaaaa

SEQ ID NO: 270333 - RNA, 23 nt, Homo sapiens
agugguggugaacagaacaaaag

SEQ ID NO: 270334 - RNA, 13 nt, Homo sapiens
agugguuacccag

SEQ ID NO: 270335 - RNA, 12 nt, Homo sapiens
aguguacaugga

SEQ ID NO: 270336 - RNA, 13 nt, Homo sapiens
aguguacauggaa

SEQ ID NO: 270337 - RNA, 18 nt, Homo sapiens
aguguaugacugcacaug

SEQ ID NO: 270338 - RNA, 22 nt, Homo sapiens
aguguuaucagucauaacuaaa

SEQ ID NO: 270339 - RNA, 21 nt, Homo sapiens
aguguuauuucagagagcaaa

SEQ ID NO: 270340 - RNA, 20 nt, Homo sapiens
aguguuccccgauaccaugc

SEQ ID NO: 270341 - RNA, 16 nt, Homo sapiens
aguguuccccuuccac

SEQ ID NO: 270342 - RNA, 20 nt, Homo sapiens
aguguuccccuuccacugag

SEQ ID NO: 270343 - RNA, 23 nt, Homo sapiens
aguguuccccuuccacugagggc

SEQ ID NO: 270344 - RNA, 22 nt, Homo sapiens
aguguugcccaggcuggucuca

SEQ ID NO: 270345 - RNA, 17 nt, Homo sapiens
aguguugccuaaguauu

SEQ ID NO: 270346 - RNA, 15 nt, Homo sapiens
aguguugcucucuag

SEQ ID NO: 270347 - RNA, 18 nt, Homo sapiens
aguuacaguucugugguu

SEQ ID NO: 270348 - RNA, 23 nt, Homo sapiens
aguuacaguucugugguuucaug

SEQ ID NO: 270349 - RNA, 22 nt, Homo sapiens
aguuaccuuauaguuacugugu

SEQ ID NO: 270350 - RNA, 17 nt, Homo sapiens
aguucacucuccauuua

SEQ ID NO: 270351 - RNA, 21 nt, Homo sapiens
aguucagccugggugugugaa

SEQ ID NO: 270352 - RNA, 16 nt, Homo sapiens
aguucauaggucucca

SEQ ID NO: 270353 - RNA, 16 nt, Homo sapiens
aguucauauguaccau

SEQ ID NO: 270354 - RNA, 14 nt, Homo sapiens
aguucaucuugaau

SEQ ID NO: 270355 - RNA, 13 nt, Homo sapiens
aguucaucuuuug

SEQ ID NO: 270356 - RNA, 19 nt, Homo sapiens
aguucaugcagcuguggca

SEQ ID NO: 270357 - RNA, 14 nt, Homo sapiens
aguuccaccaucaa

SEQ ID NO: 270358 - RNA, 13 nt, Homo sapiens
aguuccacugcug

SEQ ID NO: 270359 - RNA, 13 nt, Homo sapiens
aguucccaugacu

SEQ ID NO: 270360 - RNA, 22 nt, Homo sapiens
aguuccgacugccaucuuggac

SEQ ID NO: 270361 - RNA, 21 nt, Homo sapiens
aguuccucauuagcauuuugc

SEQ ID NO: 270362 - RNA, 21 nt, Homo sapiens
aguuccuucacuuacagaugg

SEQ ID NO: 270363 - RNA, 17 nt, Homo sapiens
aguuccuuucugggaag

SEQ ID NO: 270364 - RNA, 16 nt, Homo sapiens
aguucguaccuggcuu

SEQ ID NO: 270365 - RNA, 14 nt, Homo sapiens
aguucucaauguuc

SEQ ID NO: 270366 - RNA, 13 nt, Homo sapiens
aguugaagacaga

SEQ ID NO: 270367 - RNA, 17 nt, Homo sapiens
aguugauggugaugaaa

SEQ ID NO: 270368 - RNA, 14 nt, Homo sapiens
aguugauucagcuc

SEQ ID NO: 270369 - RNA, 15 nt, Homo sapiens
aguugauucagcucu

SEQ ID NO: 270370 - RNA, 16 nt, Homo sapiens
aguugcaauguuuuag

SEQ ID NO: 270371 - RNA, 15 nt, Homo sapiens
aguugcucaggacac

SEQ ID NO: 270372 - RNA, 16 nt, Homo sapiens
aguugcugaugaacuc

SEQ ID NO: 270373 - RNA, 11 nt, Homo sapiens
aguugcuguau

SEQ ID NO: 270374 - RNA, 18 nt, Homo sapiens
aguuggucccccuuccau

SEQ ID NO: 270375 - RNA, 12 nt, Homo sapiens
aguugugcacau

SEQ ID NO: 270376 - RNA, 14 nt, Homo sapiens
aguuguggccucau

SEQ ID NO: 270377 - RNA, 15 nt, Homo sapiens
aguuguuaauaaaag

SEQ ID NO: 270378 - RNA, 16 nt, Homo sapiens
aguuuacaaucagcca

SEQ ID NO: 270379 - RNA, 19 nt, Homo sapiens
aguuuacauuuuguauauu

SEQ ID NO: 270380 - RNA, 19 nt, Homo sapiens
aguuuauacccguuucaca

SEQ ID NO: 270381 - RNA, 15 nt, Homo sapiens
aguuuauacuucucu

SEQ ID NO: 270382 - RNA, 23 nt, Homo sapiens
aguuuauagaccagaaccagagc

SEQ ID NO: 270383 - RNA, 15 nt, Homo sapiens
aguuuauuauguacu

SEQ ID NO: 270384 - RNA, 14 nt, Homo sapiens
aguuucuucaaucu

SEQ ID NO: 270385 - RNA, 19 nt, Homo sapiens
aguuugagaccaaccuggg

SEQ ID NO: 270386 - RNA, 23 nt, Homo sapiens
aguuugaguuacuaucaugucaa

SEQ ID NO: 270387 - RNA, 18 nt, Homo sapiens
aguuugauuauucagugu

SEQ ID NO: 270388 - RNA, 19 nt, Homo sapiens
aguuugauuguuguuuaua

SEQ ID NO: 270389 - RNA, 17 nt, Homo sapiens
aguuugcuuuguaugca

SEQ ID NO: 270390 - RNA, 19 nt, Homo sapiens
aguuugcuuuguaugcacu

SEQ ID NO: 270391 - RNA, 16 nt, Homo sapiens
aguuugguuucuagca

SEQ ID NO: 270392 - RNA, 12 nt, Homo sapiens
aguuuuaugaga

SEQ ID NO: 270393 - RNA, 18 nt, Homo sapiens
aguuuuauuuuuguagag

SEQ ID NO: 270394 - RNA, 22 nt, Homo sapiens
aguuuucaggaugagaugacag

SEQ ID NO: 270395 - RNA, 22 nt, Homo sapiens
aguuuuuauggcuuuugugcau

SEQ ID NO: 270396 - RNA, 14 nt, Homo sapiens
auaaaaagccaggg

SEQ ID NO: 270397 - RNA, 14 nt, Homo sapiens
auaaaaaugacaac

SEQ ID NO: 270398 - RNA, 17 nt, Homo sapiens
auaaaacacaucaucaa

SEQ ID NO: 270399 - RNA, 16 nt, Homo sapiens
auaaaaguuggcucag

SEQ ID NO: 270400 - RNA, 15 nt, Homo sapiens
auaaaauaaugacau

SEQ ID NO: 270401 - RNA, 21 nt, Homo sapiens
auaaaauuaaagcugaaaacu

SEQ ID NO: 270402 - RNA, 15 nt, Homo sapiens
auaaaauuaugccau

SEQ ID NO: 270403 - RNA, 20 nt, Homo sapiens
auaaaauuaugccauagcaa

SEQ ID NO: 270404 - RNA, 17 nt, Homo sapiens
auaaacgguuaacaaua

SEQ ID NO: 270405 - RNA, 11 nt, Homo sapiens
auaaagacagg

SEQ ID NO: 270406 - RNA, 15 nt, Homo sapiens
auaaagacaggguuu

SEQ ID NO: 270407 - RNA, 18 nt, Homo sapiens
auaaaggcaguuuucuaa

SEQ ID NO: 270408 - RNA, 20 nt, Homo sapiens
auaaaggggagggacucauc

SEQ ID NO: 270409 - RNA, 15 nt, Homo sapiens
auaaaguaugugcau

SEQ ID NO: 270410 - RNA, 17 nt, Homo sapiens
auaaaguuggugacaga

SEQ ID NO: 270411 - RNA, 18 nt, Homo sapiens
auaaaguuuuaugagaaa

SEQ ID NO: 270412 - RNA, 19 nt, Homo sapiens
auaaauauaucuaccccag

SEQ ID NO: 270413 - RNA, 22 nt, Homo sapiens
auaaaucgcuuuugauaaucaa

SEQ ID NO: 270414 - RNA, 23 nt, Homo sapiens
auaaauguaccagagagaguugu

SEQ ID NO: 270415 - RNA, 23 nt, Homo sapiens
auaaauguacuuuuucuuccaga

SEQ ID NO: 270416 - RNA, 20 nt, Homo sapiens
auaacaaauuaaaagcuaua

SEQ ID NO: 270417 - RNA, 19 nt, Homo sapiens
auaacacuguacugcaaua

SEQ ID NO: 270418 - RNA, 11 nt, Homo sapiens
auaacaguguu

SEQ ID NO: 270419 - RNA, 21 nt, Homo sapiens
auaacauggugugcuucuuaa

SEQ ID NO: 270420 - RNA, 22 nt, Homo sapiens
auaaccucaaagugacuauuca

SEQ ID NO: 270421 - RNA, 20 nt, Homo sapiens
auaacuuuguuuagcccaaa

SEQ ID NO: 270422 - RNA, 14 nt, Homo sapiens
auaacuuuuuccaa

SEQ ID NO: 270423 - RNA, 21 nt, Homo sapiens
auaagacuacugaaucugcua

SEQ ID NO: 270424 - RNA, 16 nt, Homo sapiens
auaagaugaaucacuu

SEQ ID NO: 270425 - RNA, 23 nt, Homo sapiens
auaagcaaagggagcacuggguu

SEQ ID NO: 270426 - RNA, 16 nt, Homo sapiens
auaagcagaagccaua

SEQ ID NO: 270427 - RNA, 13 nt, Homo sapiens
auaagcaggacag

SEQ ID NO: 270428 - RNA, 15 nt, Homo sapiens
auaagcccacauaua

SEQ ID NO: 270429 - RNA, 16 nt, Homo sapiens
auaagcccacauauaa

SEQ ID NO: 270430 - RNA, 18 nt, Homo sapiens
auaagcuacugaugagaa

SEQ ID NO: 270431 - RNA, 21 nt, Homo sapiens
auaaggaacaugaaaagcaaa

SEQ ID NO: 270432 - RNA, 14 nt, Homo sapiens
auaaggacacugaa

SEQ ID NO: 270433 - RNA, 17 nt, Homo sapiens
auaagugcuauugcaga

SEQ ID NO: 270434 - RNA, 17 nt, Homo sapiens
auaauaaagaucaugua

SEQ ID NO: 270435 - RNA, 16 nt, Homo sapiens
auaauacaguaucuca

SEQ ID NO: 270436 - RNA, 14 nt, Homo sapiens
auaauauacuaugc

SEQ ID NO: 270437 - RNA, 23 nt, Homo sapiens
auaauauuaaggaagacaaugug

SEQ ID NO: 270438 - RNA, 14 nt, Homo sapiens
auaaucaacugggc

SEQ ID NO: 270439 - RNA, 13 nt, Homo sapiens
auaaucacuuuuu

SEQ ID NO: 270440 - RNA, 19 nt, Homo sapiens
auaaucauuaaaauuaaca

SEQ ID NO: 270441 - RNA, 12 nt, Homo sapiens
auaaucuacucc

SEQ ID NO: 270442 - RNA, 15 nt, Homo sapiens
auaaucucuuuccau

SEQ ID NO: 270443 - RNA, 17 nt, Homo sapiens
auaaugacuuaagcaca

SEQ ID NO: 270444 - RNA, 14 nt, Homo sapiens
auaaugcaauagaa

SEQ ID NO: 270445 - RNA, 21 nt, Homo sapiens
auaaugcgugcauaccacuuu

SEQ ID NO: 270446 - RNA, 18 nt, Homo sapiens
auaaugguugacuggguu

SEQ ID NO: 270447 - RNA, 19 nt, Homo sapiens
auaaugguugacuggguuu

SEQ ID NO: 270448 - RNA, 16 nt, Homo sapiens
auaaugucccuucaca

SEQ ID NO: 270449 - RNA, 19 nt, Homo sapiens
auaauguuaacauggacau

SEQ ID NO: 270450 - RNA, 16 nt, Homo sapiens
auaauucuacuuugag

SEQ ID NO: 270451 - RNA, 16 nt, Homo sapiens
auaauugccacugaga

SEQ ID NO: 270452 - RNA, 17 nt, Homo sapiens
auaauugccacugagag

SEQ ID NO: 270453 - RNA, 19 nt, Homo sapiens
auacacacacacacacagc

SEQ ID NO: 270454 - RNA, 13 nt, Homo sapiens
auacacuaugaag

SEQ ID NO: 270455 - RNA, 15 nt, Homo sapiens
auacacuaugaagau

SEQ ID NO: 270456 - RNA, 20 nt, Homo sapiens
auacagacagagauggccau

SEQ ID NO: 270457 - RNA, 16 nt, Homo sapiens
auacagauagauauau

SEQ ID NO: 270458 - RNA, 19 nt, Homo sapiens
aguuuuuuuccuucaagaa

SEQ ID NO: 270459 - RNA, 20 nt, Homo sapiens
aguuuuuuucuugucuauaa

SEQ ID NO: 270460 - RNA, 18 nt, Homo sapiens
auaaaacacaucaucaau

SEQ ID NO: 270461 - RNA, 17 nt, Homo sapiens
auaaaaccccaucucua

SEQ ID NO: 270462 - RNA, 18 nt, Homo sapiens
auaaaaguguucauuguu

SEQ ID NO: 270463 - RNA, 21 nt, Homo sapiens
auaaaauguugaaaagucaaa

SEQ ID NO: 270464 - RNA, 16 nt, Homo sapiens
auaaaauuaugccaua

SEQ ID NO: 270465 - RNA, 16 nt, Homo sapiens
auaaaauucauuaguu

SEQ ID NO: 270466 - RNA, 18 nt, Homo sapiens
auaaacaugcuugcauua

SEQ ID NO: 270467 - RNA, 16 nt, Homo sapiens
auaaacauuucauuuc

SEQ ID NO: 270468 - RNA, 19 nt, Homo sapiens
auaaacauuucauuuccca

SEQ ID NO: 270469 - RNA, 17 nt, Homo sapiens
auaaacguccuacugua

SEQ ID NO: 270470 - RNA, 14 nt, Homo sapiens
auaaagcagcguuu

SEQ ID NO: 270471 - RNA, 18 nt, Homo sapiens
auaaaguaguccugugaa

SEQ ID NO: 270472 - RNA, 23 nt, Homo sapiens
auaaaguuucuguugauaaucau

SEQ ID NO: 270473 - RNA, 13 nt, Homo sapiens
auaaaucauaaaa

SEQ ID NO: 270474 - RNA, 17 nt, Homo sapiens
auaaauguacauuaauu

SEQ ID NO: 270475 - RNA, 16 nt, Homo sapiens
auaaauguaccagaga

SEQ ID NO: 270476 - RNA, 23 nt, Homo sapiens
auaaauguacuuuuccuuccaga

SEQ ID NO: 270477 - RNA, 21 nt, Homo sapiens
auaacacuguacugcaauaag

SEQ ID NO: 270478 - RNA, 14 nt, Homo sapiens
auaaccuagccuua

SEQ ID NO: 270479 - RNA, 13 nt, Homo sapiens
auacucaccucac

SEQ ID NO: 270480 - RNA, 18 nt, Homo sapiens
auacucaccucaccccac

SEQ ID NO: 270481 - RNA, 18 nt, Homo sapiens
auacugaaccaggccaga

SEQ ID NO: 270482 - RNA, 18 nt, Homo sapiens
auacuguauauucaggac

SEQ ID NO: 270483 - RNA, 14 nt, Homo sapiens
auacuuauagaauu

SEQ ID NO: 270484 - RNA, 20 nt, Homo sapiens
auacuuauagaauucaguca

SEQ ID NO: 270485 - RNA, 23 nt, Homo sapiens
auacuuucucuucaaauuuagca

SEQ ID NO: 270486 - RNA, 18 nt, Homo sapiens
auagaauaaaggcaguuu

SEQ ID NO: 270487 - RNA, 13 nt, Homo sapiens
auagagccugagg

SEQ ID NO: 270488 - RNA, 15 nt, Homo sapiens
auagaugacauugac

SEQ ID NO: 270489 - RNA, 18 nt, Homo sapiens
auagcaguugaaacaaga

SEQ ID NO: 270490 - RNA, 23 nt, Homo sapiens
auagcaguugaaacaagaagcca

SEQ ID NO: 270491 - RNA, 23 nt, Homo sapiens
auagcucuggggugggcaguuuu

SEQ ID NO: 270492 - RNA, 22 nt, Homo sapiens
auaggaaaccacacagacuugg

SEQ ID NO: 270493 - RNA, 16 nt, Homo sapiens
auaggagagagaucau

SEQ ID NO: 270494 - RNA, 13 nt, Homo sapiens
auaggcaaagggg

SEQ ID NO: 270495 - RNA, 23 nt, Homo sapiens
auaguacagguaaggugagggaa

SEQ ID NO: 270496 - RNA, 11 nt, Homo sapiens
auaguacuggc

SEQ ID NO: 270497 - RNA, 19 nt, Homo sapiens
auaguacuggcaugguacg

SEQ ID NO: 270498 - RNA, 19 nt, Homo sapiens
auagugaaaccccaucucu

SEQ ID NO: 270499 - RNA, 17 nt, Homo sapiens
auaguggggucagggcu

SEQ ID NO: 270500 - RNA, 23 nt, Homo sapiens
auagugguggugaacagaacaaa

SEQ ID NO: 270501 - RNA, 15 nt, Homo sapiens
auaguggugugauuu

SEQ ID NO: 270502 - RNA, 16 nt, Homo sapiens
auagugucccacggug

SEQ ID NO: 270503 - RNA, 13 nt, Homo sapiens
auaguuacugugu

SEQ ID NO: 270504 - RNA, 15 nt, Homo sapiens
auaguuacuguguaa

SEQ ID NO: 270505 - RNA, 17 nt, Homo sapiens
auaguuuuuaaagaucu

SEQ ID NO: 270506 - RNA, 18 nt, Homo sapiens
auauaaacaugcuugcau

SEQ ID NO: 270507 - RNA, 16 nt, Homo sapiens
auauaaaggcagggaa

SEQ ID NO: 270508 - RNA, 13 nt, Homo sapiens
auauaacugccuu

SEQ ID NO: 270509 - RNA, 13 nt, Homo sapiens
auauaacuuuuuc

SEQ ID NO: 270510 - RNA, 17 nt, Homo sapiens
auauacaauaacauaau

SEQ ID NO: 270511 - RNA, 13 nt, Homo sapiens
auauacuuauaga

SEQ ID NO: 270512 - RNA, 22 nt, Homo sapiens
auauacuuauagaauucaguca

SEQ ID NO: 270513 - RNA, 16 nt, Homo sapiens
auauagcaagauccca

SEQ ID NO: 270514 - RNA, 14 nt, Homo sapiens
auauauaagccaaa

SEQ ID NO: 270515 - RNA, 15 nt, Homo sapiens
auauauaagccaaaa

SEQ ID NO: 270516 - RNA, 19 nt, Homo sapiens
auauauauuuuugugcaca

SEQ ID NO: 270517 - RNA, 20 nt, Homo sapiens
auauauauuuuugugcacau

SEQ ID NO: 270518 - RNA, 23 nt, Homo sapiens
auauaugauauauaaaugugauu

SEQ ID NO: 270519 - RNA, 20 nt, Homo sapiens
auauauuuuugugcacauuu

SEQ ID NO: 270520 - RNA, 16 nt, Homo sapiens
auaucacuuccaugac

SEQ ID NO: 270521 - RNA, 17 nt, Homo sapiens
auaucacuuccaugaca

SEQ ID NO: 270522 - RNA, 20 nt, Homo sapiens
auaucaguuugcuagcagaa

SEQ ID NO: 270523 - RNA, 13 nt, Homo sapiens
auaucaugcucca

SEQ ID NO: 270524 - RNA, 14 nt, Homo sapiens
auaucaugcuccau

SEQ ID NO: 270525 - RNA, 17 nt, Homo sapiens
auauccaauugcugcuu

SEQ ID NO: 270526 - RNA, 19 nt, Homo sapiens
auauccuuugccucaagga

SEQ ID NO: 270527 - RNA, 16 nt, Homo sapiens
auaucugaaaauguau

SEQ ID NO: 270528 - RNA, 16 nt, Homo sapiens
auaugaacggugagca

SEQ ID NO: 270529 - RNA, 20 nt, Homo sapiens
auaugauauauaaaugugau

SEQ ID NO: 270530 - RNA, 20 nt, Homo sapiens
auaugaugaucuggauccac

SEQ ID NO: 270531 - RNA, 14 nt, Homo sapiens
auaugauugugcac

SEQ ID NO: 270532 - RNA, 18 nt, Homo sapiens
auaugcuaauauauguau

SEQ ID NO: 270533 - RNA, 14 nt, Homo sapiens
auauguaccaugua

SEQ ID NO: 270534 - RNA, 18 nt, Homo sapiens
auauguauaucacauucc

SEQ ID NO: 270535 - RNA, 15 nt, Homo sapiens
auauguggaguucau

SEQ ID NO: 270536 - RNA, 16 nt, Homo sapiens
auauguucaacuggag

SEQ ID NO: 270537 - RNA, 23 nt, Homo sapiens
auauguugaugaaaaauagcaac

SEQ ID NO: 270538 - RNA, 17 nt, Homo sapiens
auauuaugcaggggcaa

SEQ ID NO: 270539 - RNA, 18 nt, Homo sapiens
auauucaagguuauaugu

SEQ ID NO: 270540 - RNA, 16 nt, Homo sapiens
auauucaggacuugaa

SEQ ID NO: 270541 - RNA, 12 nt, Homo sapiens
auauucauuuca

SEQ ID NO: 270542 - RNA, 20 nt, Homo sapiens
auauugcagcuuauauucau

SEQ ID NO: 270543 - RNA, 14 nt, Homo sapiens
auauugugccccau

SEQ ID NO: 270544 - RNA, 16 nt, Homo sapiens
auauuguuuucagugu

SEQ ID NO: 270545 - RNA, 19 nt, Homo sapiens
auauuuacuaaaauggacu

SEQ ID NO: 270546 - RNA, 19 nt, Homo sapiens
auauuucuuuucuaucuca

SEQ ID NO: 270547 - RNA, 19 nt, Homo sapiens
auauuucuuuucuuucuca

SEQ ID NO: 270548 - RNA, 19 nt, Homo sapiens
auauuuuaaaaucugucac

SEQ ID NO: 270549 - RNA, 19 nt, Homo sapiens
auauuuuauuauagucacu

SEQ ID NO: 270550 - RNA, 16 nt, Homo sapiens
auauuuugcauaguac

SEQ ID NO: 270551 - RNA, 19 nt, Homo sapiens
auauuuugcuuugugauuu

SEQ ID NO: 270552 - RNA, 15 nt, Homo sapiens
auauuuuguuuacaa

SEQ ID NO: 270553 - RNA, 15 nt, Homo sapiens
auauuuuugugcaca

SEQ ID NO: 270554 - RNA, 17 nt, Homo sapiens
auauuuuugugcacauu

SEQ ID NO: 270555 - RNA, 23 nt, Homo sapiens
aucaaaucugcuuuuuaaagaau

SEQ ID NO: 270556 - RNA, 22 nt, Homo sapiens
aucaaaugugacauuauaugca

SEQ ID NO: 270557 - RNA, 18 nt, Homo sapiens
aucaacaucuuggucaga

SEQ ID NO: 270558 - RNA, 17 nt, Homo sapiens
aucaacauuuguuccau

SEQ ID NO: 270559 - RNA, 16 nt, Homo sapiens
aucaacgaguacuuca

SEQ ID NO: 270560 - RNA, 20 nt, Homo sapiens
aucaacgccucacugaaaca

SEQ ID NO: 270561 - RNA, 14 nt, Homo sapiens
aucaacuccagucu

SEQ ID NO: 270562 - RNA, 21 nt, Homo sapiens
aucaacugcaucaagauguga

SEQ ID NO: 270563 - RNA, 17 nt, Homo sapiens
aucaagcccuuuacuug

SEQ ID NO: 270564 - RNA, 20 nt, Homo sapiens
aucaauggagcaugugugca

SEQ ID NO: 270565 - RNA, 19 nt, Homo sapiens
aucaauuauagaaagccaa

SEQ ID NO: 270566 - RNA, 20 nt, Homo sapiens
aucacaagucagcacuaccu

SEQ ID NO: 270567 - RNA, 21 nt, Homo sapiens
aucacaagucagcacuaccuc

SEQ ID NO: 270568 - RNA, 18 nt, Homo sapiens
aucacauucccauuugcu

SEQ ID NO: 270569 - RNA, 15 nt, Homo sapiens
aucacgccacugcac

SEQ ID NO: 270570 - RNA, 23 nt, Homo sapiens
aucacggcucacugcagccucaa

SEQ ID NO: 270571 - RNA, 13 nt, Homo sapiens
aucacugcuccug

SEQ ID NO: 270572 - RNA, 17 nt, Homo sapiens
aucacugcuccugucac

SEQ ID NO: 270573 - RNA, 17 nt, Homo sapiens
aucacuuaauaccguau

SEQ ID NO: 270574 - RNA, 15 nt, Homo sapiens
aucacuucaggucag

SEQ ID NO: 270575 - RNA, 18 nt, Homo sapiens
aucacuucccuacaugga

SEQ ID NO: 270576 - RNA, 11 nt, Homo sapiens
aucacuuugac

SEQ ID NO: 270577 - RNA, 17 nt, Homo sapiens
aucagacuccugugcaa

SEQ ID NO: 270578 - RNA, 15 nt, Homo sapiens
aucagccacauucua

SEQ ID NO: 270579 - RNA, 21 nt, Homo sapiens
aucagccugggcaaugugaua

SEQ ID NO: 270580 - RNA, 18 nt, Homo sapiens
aucagcgccgcaccagcc

SEQ ID NO: 270581 - RNA, 15 nt, Homo sapiens
aucaggacccagagg

SEQ ID NO: 270582 - RNA, 14 nt, Homo sapiens
aucaguagccagca

SEQ ID NO: 270583 - RNA, 13 nt, Homo sapiens
aucaguccaaagg

SEQ ID NO: 270584 - RNA, 14 nt, Homo sapiens
aucaguguuuccaa

SEQ ID NO: 270585 - RNA, 16 nt, Homo sapiens
aucauaaaacuugaug

SEQ ID NO: 270586 - RNA, 16 nt, Homo sapiens
aucaucaucauucuca

SEQ ID NO: 270587 - RNA, 13 nt, Homo sapiens
aucaucauucuca

SEQ ID NO: 270588 - RNA, 14 nt, Homo sapiens
aucaucauucucau

SEQ ID NO: 270589 - RNA, 18 nt, Homo sapiens
aucaucuccugccuuccu

SEQ ID NO: 270590 - RNA, 14 nt, Homo sapiens
aucauuccuugaga

SEQ ID NO: 270591 - RNA, 16 nt, Homo sapiens
aucauucucauucuca

SEQ ID NO: 270592 - RNA, 17 nt, Homo sapiens
aucauucucugucucau

SEQ ID NO: 270593 - RNA, 22 nt, Homo sapiens
aucauuucuauuucuccuccau

SEQ ID NO: 270594 - RNA, 19 nt, Homo sapiens
aucauuuggccgagucagc

SEQ ID NO: 270595 - RNA, 18 nt, Homo sapiens
aucauuuucugcauuuaa

SEQ ID NO: 270596 - RNA, 15 nt, Homo sapiens
auccaaucugugaug

SEQ ID NO: 270597 - RNA, 18 nt, Homo sapiens
auccaauggguuuuuccc

SEQ ID NO: 270598 - RNA, 14 nt, Homo sapiens
auccacaugggagc

SEQ ID NO: 270599 - RNA, 13 nt, Homo sapiens
auccacugugcca

SEQ ID NO: 270600 - RNA, 15 nt, Homo sapiens
auccacugugccaug

SEQ ID NO: 270601 - RNA, 14 nt, Homo sapiens
auccacuucucuca

SEQ ID NO: 270602 - RNA, 15 nt, Homo sapiens
auccacuucucucag

SEQ ID NO: 270603 - RNA, 21 nt, Homo sapiens
auaugcacaauagcaguugaa

SEQ ID NO: 270604 - RNA, 20 nt, Homo sapiens
auaugcuuauacacuuacac

SEQ ID NO: 270605 - RNA, 22 nt, Homo sapiens
auauguugaugaaaaauagcaa

SEQ ID NO: 270606 - RNA, 21 nt, Homo sapiens
auauguuuuaagaggcagggu

SEQ ID NO: 270607 - RNA, 21 nt, Homo sapiens
auauuaagaaagacuaucuaa

SEQ ID NO: 270608 - RNA, 21 nt, Homo sapiens
auauuaaggaagacaauguga

SEQ ID NO: 270609 - RNA, 13 nt, Homo sapiens
auauucauuucaa

SEQ ID NO: 270610 - RNA, 18 nt, Homo sapiens
auauucauuucaaaggga

SEQ ID NO: 270611 - RNA, 13 nt, Homo sapiens
auauucauuugga

SEQ ID NO: 270612 - RNA, 19 nt, Homo sapiens
auauugcagcuuauauuca

SEQ ID NO: 270613 - RNA, 17 nt, Homo sapiens
auauugccauuucuucc

SEQ ID NO: 270614 - RNA, 18 nt, Homo sapiens
auauugccauuucuucca

SEQ ID NO: 270615 - RNA, 17 nt, Homo sapiens
auauugcugauggugca

SEQ ID NO: 270616 - RNA, 16 nt, Homo sapiens
auauugcuucuucucc

SEQ ID NO: 270617 - RNA, 17 nt, Homo sapiens
auauuuaccagaccaca

SEQ ID NO: 270618 - RNA, 22 nt, Homo sapiens
auauuuauuuauuuucccugag

SEQ ID NO: 270619 - RNA, 22 nt, Homo sapiens
auauuuguaugauccuaaugaa

SEQ ID NO: 270620 - RNA, 15 nt, Homo sapiens
auauuuucaccauuu

SEQ ID NO: 270621 - RNA, 13 nt, Homo sapiens
aucaacagcauuu

SEQ ID NO: 270622 - RNA, 18 nt, Homo sapiens
aucaacauuuguuccaug

SEQ ID NO: 270623 - RNA, 15 nt, Homo sapiens
aucaagaugugacau

SEQ ID NO: 270624 - RNA, 16 nt, Homo sapiens
aucaagaugugacaug

SEQ ID NO: 270625 - RNA, 14 nt, Homo sapiens
aucaagccaauacc

SEQ ID NO: 270626 - RNA, 14 nt, Homo sapiens
aucaaguccuacaa

SEQ ID NO: 270627 - RNA, 13 nt, Homo sapiens
aucaaucucuagu

SEQ ID NO: 270628 - RNA, 21 nt, Homo sapiens
aucaauggagcaugugugcaa

SEQ ID NO: 270629 - RNA, 12 nt, Homo sapiens
aucaauguuucu

SEQ ID NO: 270630 - RNA, 14 nt, Homo sapiens
aucacaagucagca

SEQ ID NO: 270631 - RNA, 23 nt, Homo sapiens
aucacaccguccuccacgccauu

SEQ ID NO: 270632 - RNA, 23 nt, Homo sapiens
aucacacgucuggcuucacagau

SEQ ID NO: 270633 - RNA, 16 nt, Homo sapiens
aucacagccucugaaa

SEQ ID NO: 270634 - RNA, 18 nt, Homo sapiens
aucacaguuuugguugcu

SEQ ID NO: 270635 - RNA, 16 nt, Homo sapiens
auccucccaccucagc

SEQ ID NO: 270636 - RNA, 15 nt, Homo sapiens
auccugaccaaagga

SEQ ID NO: 270637 - RNA, 17 nt, Homo sapiens
auccugaccuugcacaa

SEQ ID NO: 270638 - RNA, 22 nt, Homo sapiens
auccugaggcuccacuuggucu

SEQ ID NO: 270639 - RNA, 14 nt, Homo sapiens
auccuggaguucug

SEQ ID NO: 270640 - RNA, 15 nt, Homo sapiens
auccuguaguacaag

SEQ ID NO: 270641 - RNA, 23 nt, Homo sapiens
auccuguaguacaagauuaucuu

SEQ ID NO: 270642 - RNA, 14 nt, Homo sapiens
auccuuccacggac

SEQ ID NO: 270643 - RNA, 14 nt, Homo sapiens
auccuucuaaagug

SEQ ID NO: 270644 - RNA, 15 nt, Homo sapiens
auccuuuacuguuag

SEQ ID NO: 270645 - RNA, 17 nt, Homo sapiens
auccuuugccucaagga

SEQ ID NO: 270646 - RNA, 21 nt, Homo sapiens
aucgacuuguuuuugcacaug

SEQ ID NO: 270647 - RNA, 17 nt, Homo sapiens
aucgaugcagugcuucc

SEQ ID NO: 270648 - RNA, 22 nt, Homo sapiens
aucgcugucaucucagcuggau

SEQ ID NO: 270649 - RNA, 18 nt, Homo sapiens
aucgcuuuugauaaucaa

SEQ ID NO: 270650 - RNA, 20 nt, Homo sapiens
aucgucacugcuuaacuuca

SEQ ID NO: 270651 - RNA, 17 nt, Homo sapiens
aucguucucugccucac

SEQ ID NO: 270652 - RNA, 15 nt, Homo sapiens
aucuaaaaucugcua

SEQ ID NO: 270653 - RNA, 15 nt, Homo sapiens
aucuagaagacuguc

SEQ ID NO: 270654 - RNA, 17 nt, Homo sapiens
aucuagaagacugucag

SEQ ID NO: 270655 - RNA, 15 nt, Homo sapiens
aucuagauacuguau

SEQ ID NO: 270656 - RNA, 14 nt, Homo sapiens
aucuagaucugaac

SEQ ID NO: 270657 - RNA, 19 nt, Homo sapiens
aucuaggaagacuuuggaa

SEQ ID NO: 270658 - RNA, 19 nt, Homo sapiens
aucuauaauuuaccuaaga

SEQ ID NO: 270659 - RNA, 15 nt, Homo sapiens
aucuauguguaugca

SEQ ID NO: 270660 - RNA, 16 nt, Homo sapiens
aucucaccccauccca

SEQ ID NO: 270661 - RNA, 23 nt, Homo sapiens
aucucagcuccugaaaaaugccu

SEQ ID NO: 270662 - RNA, 19 nt, Homo sapiens
aucucagcuggaucuccau

SEQ ID NO: 270663 - RNA, 20 nt, Homo sapiens
aucucauuggacccuuccau

SEQ ID NO: 270664 - RNA, 23 nt, Homo sapiens
aucucauuggacccuuccauggu

SEQ ID NO: 270665 - RNA, 20 nt, Homo sapiens
aucuccaaaauaaaacuuuu

SEQ ID NO: 270666 - RNA, 21 nt, Homo sapiens
aucuccaguuuauagaccaga

SEQ ID NO: 270667 - RNA, 17 nt, Homo sapiens
aucuccauuucugcuca

SEQ ID NO: 270668 - RNA, 19 nt, Homo sapiens
aucucuacugaaaguacaa

SEQ ID NO: 270669 - RNA, 19 nt, Homo sapiens
aucucuccagcuagcaaaa

SEQ ID NO: 270670 - RNA, 14 nt, Homo sapiens
aucucucgugauug

SEQ ID NO: 270671 - RNA, 22 nt, Homo sapiens
aucucugauucugucaaugucu

SEQ ID NO: 270672 - RNA, 19 nt, Homo sapiens
aucucugugguuacaagaa

SEQ ID NO: 270673 - RNA, 16 nt, Homo sapiens
aucucuuauuuuacaa

SEQ ID NO: 270674 - RNA, 19 nt, Homo sapiens
aucucuugcacucaaagcu

SEQ ID NO: 270675 - RNA, 23 nt, Homo sapiens
aucucuuguauaugaugaucugg

SEQ ID NO: 270676 - RNA, 14 nt, Homo sapiens
aucucuuuaccucc

SEQ ID NO: 270677 - RNA, 14 nt, Homo sapiens
aucugaaaauguau

SEQ ID NO: 270678 - RNA, 13 nt, Homo sapiens
aucugaacuccuu

SEQ ID NO: 270679 - RNA, 17 nt, Homo sapiens
aucugagaggccacagu

SEQ ID NO: 270680 - RNA, 23 nt, Homo sapiens
aucugaggaauucuguauagauu

SEQ ID NO: 270681 - RNA, 18 nt, Homo sapiens
aucugcaccccacuucag

SEQ ID NO: 270682 - RNA, 16 nt, Homo sapiens
aucugcagccacuuuc

SEQ ID NO: 270683 - RNA, 18 nt, Homo sapiens
aucugcauuuucacccca

SEQ ID NO: 270684 - RNA, 21 nt, Homo sapiens
aucugccuccccuucacuccc

SEQ ID NO: 270685 - RNA, 20 nt, Homo sapiens
aucugcuagggaauaucaau

SEQ ID NO: 270686 - RNA, 21 nt, Homo sapiens
aucuggggauacuggcaaagc

SEQ ID NO: 270687 - RNA, 17 nt, Homo sapiens
aucuggguucacugcaa

SEQ ID NO: 270688 - RNA, 20 nt, Homo sapiens
aucugguccaguuccuucac

SEQ ID NO: 270689 - RNA, 16 nt, Homo sapiens
aucuguauauacaaua

SEQ ID NO: 270690 - RNA, 23 nt, Homo sapiens
aucuguauauacaauaacauaau

SEQ ID NO: 270691 - RNA, 17 nt, Homo sapiens
aucugugcaaauccuug

SEQ ID NO: 270692 - RNA, 22 nt, Homo sapiens
aucugugcaaauccuugauacu

SEQ ID NO: 270693 - RNA, 15 nt, Homo sapiens
aucuguguuuguacu

SEQ ID NO: 270694 - RNA, 15 nt, Homo sapiens
aucuguuacacaaag

SEQ ID NO: 270695 - RNA, 20 nt, Homo sapiens
aucuguuaccagaggacaaa

SEQ ID NO: 270696 - RNA, 15 nt, Homo sapiens
aucuucaucugugaa

SEQ ID NO: 270697 - RNA, 18 nt, Homo sapiens
aucuuccaaggguacuaa

SEQ ID NO: 270698 - RNA, 20 nt, Homo sapiens
aucuucucccaagacugcuc

SEQ ID NO: 270699 - RNA, 16 nt, Homo sapiens
aucuucuucaccauuu

SEQ ID NO: 270700 - RNA, 17 nt, Homo sapiens
aucuugagggcagacag

SEQ ID NO: 270701 - RNA, 15 nt, Homo sapiens
aucuugcuaccagua

SEQ ID NO: 270702 - RNA, 20 nt, Homo sapiens
aucuugcuucugcuucucau

SEQ ID NO: 270703 - RNA, 12 nt, Homo sapiens
aucuuuacacaa

SEQ ID NO: 270704 - RNA, 17 nt, Homo sapiens
aucuuuacacaauguca

SEQ ID NO: 270705 - RNA, 21 nt, Homo sapiens
aucuuucuuccaaacaggcuc

SEQ ID NO: 270706 - RNA, 15 nt, Homo sapiens
aucuuuuaagcccau

SEQ ID NO: 270707 - RNA, 15 nt, Homo sapiens
aucuuuucauuuagg

SEQ ID NO: 270708 - RNA, 18 nt, Homo sapiens
augaaaaaauaacacugu

SEQ ID NO: 270709 - RNA, 12 nt, Homo sapiens
augaaaaccuga

SEQ ID NO: 270710 - RNA, 14 nt, Homo sapiens
augaaaauucuuga

SEQ ID NO: 270711 - RNA, 13 nt, Homo sapiens
augaaacaucauu

SEQ ID NO: 270712 - RNA, 16 nt, Homo sapiens
augaaacauuuuguca

SEQ ID NO: 270713 - RNA, 19 nt, Homo sapiens
augaaacccccacacacac

SEQ ID NO: 270714 - RNA, 21 nt, Homo sapiens
augaaaccugugucucugaga

SEQ ID NO: 270715 - RNA, 16 nt, Homo sapiens
augaaagggcaaagac

SEQ ID NO: 270716 - RNA, 16 nt, Homo sapiens
augaaauugcugaaag

SEQ ID NO: 270717 - RNA, 14 nt, Homo sapiens
augaacggugagca

SEQ ID NO: 270718 - RNA, 13 nt, Homo sapiens
augaauacagaua

SEQ ID NO: 270719 - RNA, 23 nt, Homo sapiens
augaaugcccaggagcugaggau

SEQ ID NO: 270720 - RNA, 23 nt, Homo sapiens
augaauguuuacacucuuuguaa

SEQ ID NO: 270721 - RNA, 11 nt, Homo sapiens
augacacgaau

SEQ ID NO: 270722 - RNA, 16 nt, Homo sapiens
augacacucuagucaa

SEQ ID NO: 270723 - RNA, 15 nt, Homo sapiens
augacauaagugcua

SEQ ID NO: 270724 - RNA, 14 nt, Homo sapiens
augacaucagcaau

SEQ ID NO: 270725 - RNA, 20 nt, Homo sapiens
augaccuugaaugaugccau

SEQ ID NO: 270726 - RNA, 13 nt, Homo sapiens
augacugcacaug

SEQ ID NO: 270727 - RNA, 14 nt, Homo sapiens
augagaaaugccag

SEQ ID NO: 270728 - RNA, 15 nt, Homo sapiens
augagaaauuaccaa

SEQ ID NO: 270729 - RNA, 13 nt, Homo sapiens
augagaacaugaa

SEQ ID NO: 270730 - RNA, 17 nt, Homo sapiens
augagaaggaauuugag

SEQ ID NO: 270731 - RNA, 17 nt, Homo sapiens
augagaccacuguuauc

SEQ ID NO: 270732 - RNA, 14 nt, Homo sapiens
augagagaacugga

SEQ ID NO: 270733 - RNA, 15 nt, Homo sapiens
augagagaacuggag

SEQ ID NO: 270734 - RNA, 18 nt, Homo sapiens
augagaucuaggugagga

SEQ ID NO: 270735 - RNA, 15 nt, Homo sapiens
augagaugacagaua

SEQ ID NO: 270736 - RNA, 15 nt, Homo sapiens
augagcaaaaccaaa

SEQ ID NO: 270737 - RNA, 11 nt, Homo sapiens
augagcauuua

SEQ ID NO: 270738 - RNA, 21 nt, Homo sapiens
augagccucagcauccuggca

SEQ ID NO: 270739 - RNA, 18 nt, Homo sapiens
augagcuccuuaaggcuc

SEQ ID NO: 270740 - RNA, 22 nt, Homo sapiens
augagcuggggaugucucucau

SEQ ID NO: 270741 - RNA, 22 nt, Homo sapiens
augaggaauuucuguucuucca

SEQ ID NO: 270742 - RNA, 13 nt, Homo sapiens
augaggcauuugu

SEQ ID NO: 270743 - RNA, 16 nt, Homo sapiens
augagggaacugugua

SEQ ID NO: 270744 - RNA, 20 nt, Homo sapiens
augagguacucuccuggaaa

SEQ ID NO: 270745 - RNA, 16 nt, Homo sapiens
augaguaacaggaaaa

SEQ ID NO: 270746 - RNA, 15 nt, Homo sapiens
augauacacuaugaa

SEQ ID NO: 270747 - RNA, 14 nt, Homo sapiens
augauagcuacugu

SEQ ID NO: 270748 - RNA, 13 nt, Homo sapiens
aucucccugcuuu

SEQ ID NO: 270749 - RNA, 22 nt, Homo sapiens
aucucccugcuuuggucuugcc

SEQ ID NO: 270750 - RNA, 22 nt, Homo sapiens
aucucucccuccccugccauuu

SEQ ID NO: 270751 - RNA, 22 nt, Homo sapiens
aucucugcuuuggaaaucacac

SEQ ID NO: 270752 - RNA, 17 nt, Homo sapiens
aucucuuauuuuacaau

SEQ ID NO: 270753 - RNA, 15 nt, Homo sapiens
aucucuuuaccuccu

SEQ ID NO: 270754 - RNA, 18 nt, Homo sapiens
aucugaaacagcuucaug

SEQ ID NO: 270755 - RNA, 19 nt, Homo sapiens
aucugaacagaaauaccaa

SEQ ID NO: 270756 - RNA, 18 nt, Homo sapiens
aucugaagauacaugucu

SEQ ID NO: 270757 - RNA, 17 nt, Homo sapiens
aucugacaucucugcaa

SEQ ID NO: 270758 - RNA, 19 nt, Homo sapiens
aucugacaucucugcaauc

SEQ ID NO: 270759 - RNA, 13 nt, Homo sapiens
aucugaccaaaac

SEQ ID NO: 270760 - RNA, 12 nt, Homo sapiens
aucugaggaauu

SEQ ID NO: 270761 - RNA, 19 nt, Homo sapiens
aucugcaccccacuucaga

SEQ ID NO: 270762 - RNA, 15 nt, Homo sapiens
aucugccacguguau

SEQ ID NO: 270763 - RNA, 23 nt, Homo sapiens
aucuguaacaauuauguuuucag

SEQ ID NO: 270764 - RNA, 13 nt, Homo sapiens
aucuguaccucug

SEQ ID NO: 270765 - RNA, 21 nt, Homo sapiens
aucuguauguguucuauucag

SEQ ID NO: 270766 - RNA, 15 nt, Homo sapiens
aucuguccuguuaca

SEQ ID NO: 270767 - RNA, 23 nt, Homo sapiens
aucugugaggggcucucucauga

SEQ ID NO: 270768 - RNA, 17 nt, Homo sapiens
aucugugaugacauucc

SEQ ID NO: 270769 - RNA, 14 nt, Homo sapiens
aucuguuacacaaa

SEQ ID NO: 270770 - RNA, 14 nt, Homo sapiens
aucuuaaaugccag

SEQ ID NO: 270771 - RNA, 18 nt, Homo sapiens
aucuuaguauuugcauau

SEQ ID NO: 270772 - RNA, 13 nt, Homo sapiens
aucuuccaagggu

SEQ ID NO: 270773 - RNA, 21 nt, Homo sapiens
aucuuccaaggguacuaagga

SEQ ID NO: 270774 - RNA, 22 nt, Homo sapiens
aucuuccaaggguacuaaggaa

SEQ ID NO: 270775 - RNA, 22 nt, Homo sapiens
aucuucuuuauaauucuacuuu

SEQ ID NO: 270776 - RNA, 21 nt, Homo sapiens
aucuugaauuguaaggaauga

SEQ ID NO: 270777 - RNA, 19 nt, Homo sapiens
aucuugcuaccaguauuua

SEQ ID NO: 270778 - RNA, 17 nt, Homo sapiens
aucuugcucugcugaca

SEQ ID NO: 270779 - RNA, 19 nt, Homo sapiens
aucuuuacacaaugucacg

SEQ ID NO: 270780 - RNA, 21 nt, Homo sapiens
aucuuucaggacucuaccuca

SEQ ID NO: 270781 - RNA, 15 nt, Homo sapiens
aucuuucucuuccca

SEQ ID NO: 270782 - RNA, 13 nt, Homo sapiens
aucuuucuuccaa

SEQ ID NO: 270783 - RNA, 12 nt, Homo sapiens
aucuuugcagac

SEQ ID NO: 270784 - RNA, 22 nt, Homo sapiens
aucuuugcuuuauaaaagaaca

SEQ ID NO: 270785 - RNA, 13 nt, Homo sapiens
augaaaaugucau

SEQ ID NO: 270786 - RNA, 16 nt, Homo sapiens
augaaauaucaugcuc

SEQ ID NO: 270787 - RNA, 17 nt, Homo sapiens
augaaauaucaugcucc

SEQ ID NO: 270788 - RNA, 22 nt, Homo sapiens
augaaaugaggucagagccugc

SEQ ID NO: 270789 - RNA, 16 nt, Homo sapiens
augaaauguaaauacu

SEQ ID NO: 270790 - RNA, 12 nt, Homo sapiens
augccagugugc

SEQ ID NO: 270791 - RNA, 23 nt, Homo sapiens
augccauagcaagauugcuuaaa

SEQ ID NO: 270792 - RNA, 20 nt, Homo sapiens
augccaugaggaacaaggca

SEQ ID NO: 270793 - RNA, 19 nt, Homo sapiens
augcccuguaccugugcac

SEQ ID NO: 270794 - RNA, 15 nt, Homo sapiens
augccucucucaggc

SEQ ID NO: 270795 - RNA, 19 nt, Homo sapiens
augccucucucaggccaaa

SEQ ID NO: 270796 - RNA, 20 nt, Homo sapiens
augccucucucaggccaaac

SEQ ID NO: 270797 - RNA, 16 nt, Homo sapiens
augccucuguauuuaa

SEQ ID NO: 270798 - RNA, 17 nt, Homo sapiens
augccugguggcagcug

SEQ ID NO: 270799 - RNA, 23 nt, Homo sapiens
augccuuucucucuuucucuuaa

SEQ ID NO: 270800 - RNA, 18 nt, Homo sapiens
augcgggcugggcagcug

SEQ ID NO: 270801 - RNA, 15 nt, Homo sapiens
augcguuuaaucaca

SEQ ID NO: 270802 - RNA, 21 nt, Homo sapiens
augcuaaaugggaaugcaaag

SEQ ID NO: 270803 - RNA, 22 nt, Homo sapiens
augcuacccgagguuugcaaau

SEQ ID NO: 270804 - RNA, 17 nt, Homo sapiens
augcucugcauguuaca

SEQ ID NO: 270805 - RNA, 16 nt, Homo sapiens
augcucuuuacuucau

SEQ ID NO: 270806 - RNA, 16 nt, Homo sapiens
augcugaacaucacag

SEQ ID NO: 270807 - RNA, 15 nt, Homo sapiens
augcuggcauuugca

SEQ ID NO: 270808 - RNA, 16 nt, Homo sapiens
augcuggcuguuggcu

SEQ ID NO: 270809 - RNA, 20 nt, Homo sapiens
augcuggggacacagcauca

SEQ ID NO: 270810 - RNA, 20 nt, Homo sapiens
augcuguauccacaaaucau

SEQ ID NO: 270811 - RNA, 15 nt, Homo sapiens
augcugucccuuacg

SEQ ID NO: 270812 - RNA, 20 nt, Homo sapiens
augcugucuucguacuggga

SEQ ID NO: 270813 - RNA, 16 nt, Homo sapiens
augcuucugacuucau

SEQ ID NO: 270814 - RNA, 13 nt, Homo sapiens
augcuugcugcug

SEQ ID NO: 270815 - RNA, 20 nt, Homo sapiens
augcuugcuucaaccccaug

SEQ ID NO: 270816 - RNA, 23 nt, Homo sapiens
augcuugcuucaaccccaugaga

SEQ ID NO: 270817 - RNA, 14 nt, Homo sapiens
augcuuggauguaa

SEQ ID NO: 270818 - RNA, 20 nt, Homo sapiens
auggaaaaaaaacauugcaa

SEQ ID NO: 270819 - RNA, 15 nt, Homo sapiens
auggacaaugaccca

SEQ ID NO: 270820 - RNA, 15 nt, Homo sapiens
auggacacacaguca

SEQ ID NO: 270821 - RNA, 20 nt, Homo sapiens
auggacuuccacugccaucc

SEQ ID NO: 270822 - RNA, 21 nt, Homo sapiens
auggagauauuuacaugaauu

SEQ ID NO: 270823 - RNA, 14 nt, Homo sapiens
auggaggcacacag

SEQ ID NO: 270824 - RNA, 14 nt, Homo sapiens
auggaggccuccuu

SEQ ID NO: 270825 - RNA, 15 nt, Homo sapiens
auggagggagaagaa

SEQ ID NO: 270826 - RNA, 16 nt, Homo sapiens
auggaguauaugucaa

SEQ ID NO: 270827 - RNA, 20 nt, Homo sapiens
auggauuuuucuuuaacugc

SEQ ID NO: 270828 - RNA, 20 nt, Homo sapiens
auggcaaaggaagguggaug

SEQ ID NO: 270829 - RNA, 16 nt, Homo sapiens
auggcaggacagcucc

SEQ ID NO: 270830 - RNA, 16 nt, Homo sapiens
auggcaggggcaaagg

SEQ ID NO: 270831 - RNA, 18 nt, Homo sapiens
auggcaggggcaaagggc

SEQ ID NO: 270832 - RNA, 21 nt, Homo sapiens
auggcaugggggccucagggc

SEQ ID NO: 270833 - RNA, 22 nt, Homo sapiens
auggcaugggggccucagggca

SEQ ID NO: 270834 - RNA, 13 nt, Homo sapiens
auggccagccaac

SEQ ID NO: 270835 - RNA, 17 nt, Homo sapiens
auggcccugcaaaagga

SEQ ID NO: 270836 - RNA, 16 nt, Homo sapiens
auggcucuacuuucag

SEQ ID NO: 270837 - RNA, 16 nt, Homo sapiens
auggcuguguuugcag

SEQ ID NO: 270838 - RNA, 19 nt, Homo sapiens
auggcuuggggggcuccag

SEQ ID NO: 270839 - RNA, 16 nt, Homo sapiens
auggcuuuugugcauu

SEQ ID NO: 270840 - RNA, 17 nt, Homo sapiens
augggaaccccuucauc

SEQ ID NO: 270841 - RNA, 15 nt, Homo sapiens
augggaaggguccau

SEQ ID NO: 270842 - RNA, 20 nt, Homo sapiens
augggaaggguccaucucag

SEQ ID NO: 270843 - RNA, 13 nt, Homo sapiens
augggacagggag

SEQ ID NO: 270844 - RNA, 16 nt, Homo sapiens
augggacucaaugcac

SEQ ID NO: 270845 - RNA, 19 nt, Homo sapiens
augggcagagcccaaggga

SEQ ID NO: 270846 - RNA, 18 nt, Homo sapiens
augggcuuagagcucuca

SEQ ID NO: 270847 - RNA, 18 nt, Homo sapiens
auggggagaaaagacaug

SEQ ID NO: 270848 - RNA, 14 nt, Homo sapiens
auguaaaacugaac

SEQ ID NO: 270849 - RNA, 15 nt, Homo sapiens
auguaaacugugcac

SEQ ID NO: 270850 - RNA, 16 nt, Homo sapiens
auguaaacugugcacc

SEQ ID NO: 270851 - RNA, 18 nt, Homo sapiens
auguacaugaagaagcua

SEQ ID NO: 270852 - RNA, 21 nt, Homo sapiens
auguacaugaagaagcuaaau

SEQ ID NO: 270853 - RNA, 14 nt, Homo sapiens
auguaccagcaucu

SEQ ID NO: 270854 - RNA, 15 nt, Homo sapiens
auguaccagcaucuc

SEQ ID NO: 270855 - RNA, 18 nt, Homo sapiens
auguaccauguugcccag

SEQ ID NO: 270856 - RNA, 20 nt, Homo sapiens
auguaccuuguguacuuucu

SEQ ID NO: 270857 - RNA, 17 nt, Homo sapiens
auguacgauucacuccu

SEQ ID NO: 270858 - RNA, 13 nt, Homo sapiens
auguacuauccaa

SEQ ID NO: 270859 - RNA, 16 nt, Homo sapiens
auguacuauccaaucu

SEQ ID NO: 270860 - RNA, 17 nt, Homo sapiens
auguagcagauccccag

SEQ ID NO: 270861 - RNA, 15 nt, Homo sapiens
auguauaugcaauau

SEQ ID NO: 270862 - RNA, 14 nt, Homo sapiens
auguauaugcacuu

SEQ ID NO: 270863 - RNA, 19 nt, Homo sapiens
auguaucucaguaccccau

SEQ ID NO: 270864 - RNA, 14 nt, Homo sapiens
augucaagagucgc

SEQ ID NO: 270865 - RNA, 19 nt, Homo sapiens
augucacgggaccaguauu

SEQ ID NO: 270866 - RNA, 14 nt, Homo sapiens
augucagucugucc

SEQ ID NO: 270867 - RNA, 15 nt, Homo sapiens
augucagucugucca

SEQ ID NO: 270868 - RNA, 19 nt, Homo sapiens
augucaucccauugucuuc

SEQ ID NO: 270869 - RNA, 22 nt, Homo sapiens
auguccaagaagcccaggaaag

SEQ ID NO: 270870 - RNA, 21 nt, Homo sapiens
auguccuacugagacagcaca

SEQ ID NO: 270871 - RNA, 21 nt, Homo sapiens
auguccucacucucgccaucu

SEQ ID NO: 270872 - RNA, 17 nt, Homo sapiens
augucguuugaaucaca

SEQ ID NO: 270873 - RNA, 21 nt, Homo sapiens
augucguuugaaucacaguau

SEQ ID NO: 270874 - RNA, 13 nt, Homo sapiens
augucucucauga

SEQ ID NO: 270875 - RNA, 18 nt, Homo sapiens
augucuuaaccuaccugg

SEQ ID NO: 270876 - RNA, 20 nt, Homo sapiens
augucuuuccuuuugcucuu

SEQ ID NO: 270877 - RNA, 19 nt, Homo sapiens
augugacauuauaugcacu

SEQ ID NO: 270878 - RNA, 21 nt, Homo sapiens
augugacuugagcccagagug

SEQ ID NO: 270879 - RNA, 23 nt, Homo sapiens
augugagaccauuuagcacacug

SEQ ID NO: 270880 - RNA, 14 nt, Homo sapiens
augugaugaucuac

SEQ ID NO: 270881 - RNA, 22 nt, Homo sapiens
augugcugaaugguuuucaaaa

SEQ ID NO: 270882 - RNA, 22 nt, Homo sapiens
auguggccuaaaaaugcaacuu

SEQ ID NO: 270883 - RNA, 16 nt, Homo sapiens
augugggugggaccac

SEQ ID NO: 270884 - RNA, 18 nt, Homo sapiens
augugggugggaccacag

SEQ ID NO: 270885 - RNA, 23 nt, Homo sapiens
augugguuauuuucuccaugucu

SEQ ID NO: 270886 - RNA, 14 nt, Homo sapiens
auguguaaggugaa

SEQ ID NO: 270887 - RNA, 13 nt, Homo sapiens
augugugauucac

SEQ ID NO: 270888 - RNA, 13 nt, Homo sapiens
auguguguucaug

SEQ ID NO: 270889 - RNA, 15 nt, Homo sapiens
auguguguucaugca

SEQ ID NO: 270890 - RNA, 16 nt, Homo sapiens
auguguguucaugcac

SEQ ID NO: 270891 - RNA, 13 nt, Homo sapiens
auguguuccaagg

SEQ ID NO: 270892 - RNA, 22 nt, Homo sapiens
augcuucugacuucauagauuu

SEQ ID NO: 270893 - RNA, 15 nt, Homo sapiens
augcuugcauuauau

SEQ ID NO: 270894 - RNA, 15 nt, Homo sapiens
augcuuguacauaau

SEQ ID NO: 270895 - RNA, 20 nt, Homo sapiens
augcuuuaaacauugguucu

SEQ ID NO: 270896 - RNA, 14 nt, Homo sapiens
auggacacacaguc

SEQ ID NO: 270897 - RNA, 18 nt, Homo sapiens
auggacaugaucuucuuu

SEQ ID NO: 270898 - RNA, 12 nt, Homo sapiens
auggacuuuguu

SEQ ID NO: 270899 - RNA, 18 nt, Homo sapiens
auggagccagcucugcau

SEQ ID NO: 270900 - RNA, 18 nt, Homo sapiens
auggaggaaagugauauc

SEQ ID NO: 270901 - RNA, 16 nt, Homo sapiens
auggaggcacacagcu

SEQ ID NO: 270902 - RNA, 18 nt, Homo sapiens
auggaugcgacccaagac

SEQ ID NO: 270903 - RNA, 14 nt, Homo sapiens
auggauuuccagcc

SEQ ID NO: 270904 - RNA, 19 nt, Homo sapiens
auggcaaagacuggaucca

SEQ ID NO: 270905 - RNA, 16 nt, Homo sapiens
auggcacccaugcacc

SEQ ID NO: 270906 - RNA, 17 nt, Homo sapiens
auggcacccaugcaccu

SEQ ID NO: 270907 - RNA, 18 nt, Homo sapiens
auggcauaaccugucuca

SEQ ID NO: 270908 - RNA, 17 nt, Homo sapiens
auggccucauguggcug

SEQ ID NO: 270909 - RNA, 16 nt, Homo sapiens
auggcuaccaaaaaga

SEQ ID NO: 270910 - RNA, 18 nt, Homo sapiens
auggcugccaaugggagc

SEQ ID NO: 270911 - RNA, 23 nt, Homo sapiens
auggcugccaaugggagcucaug

SEQ ID NO: 270912 - RNA, 15 nt, Homo sapiens
auggcuuuugugcau

SEQ ID NO: 270913 - RNA, 18 nt, Homo sapiens
augggaaggguccaucuc

SEQ ID NO: 270914 - RNA, 23 nt, Homo sapiens
augggacagggaggacgcucucu

SEQ ID NO: 270915 - RNA, 15 nt, Homo sapiens
augggagacacugau

SEQ ID NO: 270916 - RNA, 23 nt, Homo sapiens
augggauggcuuggggggcucca

SEQ ID NO: 270917 - RNA, 20 nt, Homo sapiens
augggcaaauuaaggcauaa

SEQ ID NO: 270918 - RNA, 17 nt, Homo sapiens
augggcuuagagcucuc

SEQ ID NO: 270919 - RNA, 13 nt, Homo sapiens
augggggccucag

SEQ ID NO: 270920 - RNA, 16 nt, Homo sapiens
augggggugcauuuga

SEQ ID NO: 270921 - RNA, 22 nt, Homo sapiens
augggugcuuaguaaguacuua

SEQ ID NO: 270922 - RNA, 19 nt, Homo sapiens
augguaaccucuacuauga

SEQ ID NO: 270923 - RNA, 19 nt, Homo sapiens
augguaguuuuacaguguu

SEQ ID NO: 270924 - RNA, 18 nt, Homo sapiens
auggucaugggucugccc

SEQ ID NO: 270925 - RNA, 14 nt, Homo sapiens
auggugaugaaaug

SEQ ID NO: 270926 - RNA, 23 nt, Homo sapiens
augguggagggccacaugggagg

SEQ ID NO: 270927 - RNA, 17 nt, Homo sapiens
augguggccuggggcuu

SEQ ID NO: 270928 - RNA, 14 nt, Homo sapiens
auguaaacugugca

SEQ ID NO: 270929 - RNA, 13 nt, Homo sapiens
auguaaauacugu

SEQ ID NO: 270930 - RNA, 14 nt, Homo sapiens
auguaaaugugcau

SEQ ID NO: 270931 - RNA, 23 nt, Homo sapiens
auguaacauguaggaaguaggaa

SEQ ID NO: 270932 - RNA, 18 nt, Homo sapiens
auguaagaucguucucug

SEQ ID NO: 270933 - RNA, 15 nt, Homo sapiens
auguaagcucuacug

SEQ ID NO: 270934 - RNA, 19 nt, Homo sapiens
auguacaucuggccuugaa

SEQ ID NO: 270935 - RNA, 17 nt, Homo sapiens
auguaccauguugccca

SEQ ID NO: 270936 - RNA, 20 nt, Homo sapiens
auguacccuacccugcacau

SEQ ID NO: 270937 - RNA, 23 nt, Homo sapiens
auguacuauccaaucugugauga

SEQ ID NO: 270938 - RNA, 22 nt, Homo sapiens
auguacuauucaaucuuuacac

SEQ ID NO: 270939 - RNA, 21 nt, Homo sapiens
auguacuuuuucuuccagaaa

SEQ ID NO: 270940 - RNA, 17 nt, Homo sapiens
auguagaaagugaucca

SEQ ID NO: 270941 - RNA, 18 nt, Homo sapiens
auguaucaaugaguaaca

SEQ ID NO: 270942 - RNA, 16 nt, Homo sapiens
auguaucaauggagca

SEQ ID NO: 270943 - RNA, 12 nt, Homo sapiens
auguaucucagg

SEQ ID NO: 270944 - RNA, 14 nt, Homo sapiens
auguaucucaggaa

SEQ ID NO: 270945 - RNA, 11 nt, Homo sapiens
auucaaaguga

SEQ ID NO: 270946 - RNA, 21 nt, Homo sapiens
auucaaaguugccuaaaucca

SEQ ID NO: 270947 - RNA, 20 nt, Homo sapiens
auucaacagagacugaauag

SEQ ID NO: 270948 - RNA, 16 nt, Homo sapiens
auucaaucuuuacaca

SEQ ID NO: 270949 - RNA, 18 nt, Homo sapiens
auucacagcaagucacug

SEQ ID NO: 270950 - RNA, 22 nt, Homo sapiens
auucacagcuacgugugccccu

SEQ ID NO: 270951 - RNA, 21 nt, Homo sapiens
auucacuagguucgaauccag

SEQ ID NO: 270952 - RNA, 13 nt, Homo sapiens
auucaggacacag

SEQ ID NO: 270953 - RNA, 14 nt, Homo sapiens
auucaggacuugaa

SEQ ID NO: 270954 - RNA, 16 nt, Homo sapiens
auucaguuuucaggau

SEQ ID NO: 270955 - RNA, 19 nt, Homo sapiens
auucauaaugacuuaagca

SEQ ID NO: 270956 - RNA, 22 nt, Homo sapiens
auucauauuuacuucuuauaca

SEQ ID NO: 270957 - RNA, 13 nt, Homo sapiens
auucaugcugcuu

SEQ ID NO: 270958 - RNA, 17 nt, Homo sapiens
auucauguuuggugggg

SEQ ID NO: 270959 - RNA, 23 nt, Homo sapiens
auucauuuuucuuucugauguca

SEQ ID NO: 270960 - RNA, 15 nt, Homo sapiens
auuccacacccucac

SEQ ID NO: 270961 - RNA, 23 nt, Homo sapiens
auuccacacccucacugcuguag

SEQ ID NO: 270962 - RNA, 19 nt, Homo sapiens
auuccagaacgcccugugu

SEQ ID NO: 270963 - RNA, 16 nt, Homo sapiens
auuccccacccugaaa

SEQ ID NO: 270964 - RNA, 21 nt, Homo sapiens
auuccccugaugggcccugac

SEQ ID NO: 270965 - RNA, 16 nt, Homo sapiens
auuccuaacuaucacu

SEQ ID NO: 270966 - RNA, 14 nt, Homo sapiens
auuccuagaaacug

SEQ ID NO: 270967 - RNA, 20 nt, Homo sapiens
auuccuauauaguuuauuga

SEQ ID NO: 270968 - RNA, 19 nt, Homo sapiens
auuccuguucccaugagau

SEQ ID NO: 270969 - RNA, 20 nt, Homo sapiens
auuccuuagcuuagaccuca

SEQ ID NO: 270970 - RNA, 17 nt, Homo sapiens
auucgcugugucagcau

SEQ ID NO: 270971 - RNA, 12 nt, Homo sapiens
auucgugcagca

SEQ ID NO: 270972 - RNA, 20 nt, Homo sapiens
auucuaaaugaauguuuaca

SEQ ID NO: 270973 - RNA, 13 nt, Homo sapiens
auucuaguacuug

SEQ ID NO: 270974 - RNA, 18 nt, Homo sapiens
auucuauaaaacacauca

SEQ ID NO: 270975 - RNA, 21 nt, Homo sapiens
auucuauaaaacacaucauca

SEQ ID NO: 270976 - RNA, 22 nt, Homo sapiens
auucuauaaaacacaucaucaa

SEQ ID NO: 270977 - RNA, 22 nt, Homo sapiens
auucuauuuuauaaaacaaaua

SEQ ID NO: 270978 - RNA, 14 nt, Homo sapiens
auucucacuccuac

SEQ ID NO: 270979 - RNA, 15 nt, Homo sapiens
auucucagcagagug

SEQ ID NO: 270980 - RNA, 16 nt, Homo sapiens
auucucauuugucaca

SEQ ID NO: 270981 - RNA, 17 nt, Homo sapiens
auucucauuugucacac

SEQ ID NO: 270982 - RNA, 17 nt, Homo sapiens
auucucccuuucacuaa

SEQ ID NO: 270983 - RNA, 15 nt, Homo sapiens
auucucuagucaguu

SEQ ID NO: 270984 - RNA, 14 nt, Homo sapiens
auucucuccuguac

SEQ ID NO: 270985 - RNA, 19 nt, Homo sapiens
auucucuccuguaccucuu

SEQ ID NO: 270986 - RNA, 18 nt, Homo sapiens
auucucugagcugugcag

SEQ ID NO: 270987 - RNA, 17 nt, Homo sapiens
auucucugucucaucca

SEQ ID NO: 270988 - RNA, 19 nt, Homo sapiens
auucucugucucauccauc

SEQ ID NO: 270989 - RNA, 23 nt, Homo sapiens
auucucuguuugucuguugugga

SEQ ID NO: 270990 - RNA, 13 nt, Homo sapiens
auucugcacucag

SEQ ID NO: 270991 - RNA, 15 nt, Homo sapiens
auucuguaguuucac

SEQ ID NO: 270992 - RNA, 16 nt, Homo sapiens
auucugucaaugucuu

SEQ ID NO: 270993 - RNA, 18 nt, Homo sapiens
auucuguuggccagugug

SEQ ID NO: 270994 - RNA, 23 nt, Homo sapiens
auucuuaaauauguggaguucau

SEQ ID NO: 270995 - RNA, 17 nt, Homo sapiens
auucuuacauuuuacuu

SEQ ID NO: 270996 - RNA, 20 nt, Homo sapiens
auucuuacauuuuacuuuuu

SEQ ID NO: 270997 - RNA, 14 nt, Homo sapiens
auucuucugacaga

SEQ ID NO: 270998 - RNA, 13 nt, Homo sapiens
auucuucugcuuc

SEQ ID NO: 270999 - RNA, 18 nt, Homo sapiens
auucuuuacccccuggga

SEQ ID NO: 271000 - RNA, 15 nt, Homo sapiens
auucuuugaccuguu

SEQ ID NO: 271001 - RNA, 16 nt, Homo sapiens
auugaaggaugcuguc

SEQ ID NO: 271002 - RNA, 16 nt, Homo sapiens
auugaauauaacuuuu

SEQ ID NO: 271003 - RNA, 20 nt, Homo sapiens
auugacuaacaggccaaaga

SEQ ID NO: 271004 - RNA, 17 nt, Homo sapiens
auugacuaucaaacuga

SEQ ID NO: 271005 - RNA, 12 nt, Homo sapiens
auugacuuuguc

SEQ ID NO: 271006 - RNA, 11 nt, Homo sapiens
auugagcucuc

SEQ ID NO: 271007 - RNA, 19 nt, Homo sapiens
auugaggcuuuaaaacuua

SEQ ID NO: 271008 - RNA, 22 nt, Homo sapiens
auugaguggcugcccugcagaa

SEQ ID NO: 271009 - RNA, 16 nt, Homo sapiens
auugaguuuucagugg

SEQ ID NO: 271010 - RNA, 15 nt, Homo sapiens
auugauaagaaccuu

SEQ ID NO: 271011 - RNA, 18 nt, Homo sapiens
auugauagaguguuauca

SEQ ID NO: 271012 - RNA, 14 nt, Homo sapiens
auugauguacuuua

SEQ ID NO: 271013 - RNA, 13 nt, Homo sapiens
auugcaauagaaa

SEQ ID NO: 271014 - RNA, 20 nt, Homo sapiens
auugcagcgauuaauaacag

SEQ ID NO: 271015 - RNA, 14 nt, Homo sapiens
auugcucauuuuuu

SEQ ID NO: 271016 - RNA, 22 nt, Homo sapiens
auugcugccccaucagugcucc

SEQ ID NO: 271017 - RNA, 19 nt, Homo sapiens
auugcuggcaacaacagau

SEQ ID NO: 271018 - RNA, 12 nt, Homo sapiens
auugcuugcaca

SEQ ID NO: 271019 - RNA, 19 nt, Homo sapiens
auugcuugcacaaaccaau

SEQ ID NO: 271020 - RNA, 11 nt, Homo sapiens
auuggcaaaga

SEQ ID NO: 271021 - RNA, 14 nt, Homo sapiens
auugggccaaagaa

SEQ ID NO: 271022 - RNA, 18 nt, Homo sapiens
auuggggaagacuguggc

SEQ ID NO: 271023 - RNA, 21 nt, Homo sapiens
auuggguagaaagauggggca

SEQ ID NO: 271024 - RNA, 18 nt, Homo sapiens
auugguguugacauacau

SEQ ID NO: 271025 - RNA, 15 nt, Homo sapiens
auuguacaaccugug

SEQ ID NO: 271026 - RNA, 14 nt, Homo sapiens
auuguagcuaugau

SEQ ID NO: 271027 - RNA, 20 nt, Homo sapiens
auuguaucaaaugugacauu

SEQ ID NO: 271028 - RNA, 21 nt, Homo sapiens
auuguauuuaccuucuaccuc

SEQ ID NO: 271029 - RNA, 18 nt, Homo sapiens
auugucuucugaccucua

SEQ ID NO: 271030 - RNA, 10 nt, Homo sapiens
auugugaugu

SEQ ID NO: 271031 - RNA, 11 nt, Homo sapiens
auugugcacau

SEQ ID NO: 271032 - RNA, 19 nt, Homo sapiens
auugugcacauacuugaga

SEQ ID NO: 271033 - RNA, 15 nt, Homo sapiens
auugugccccaugcu

SEQ ID NO: 271034 - RNA, 15 nt, Homo sapiens
auuguuaaaauaacu

SEQ ID NO: 271035 - RNA, 21 nt, Homo sapiens
auuguuagucucuugauucau

SEQ ID NO: 271036 - RNA, 17 nt, Homo sapiens
auuguuaugcacuuuuc

SEQ ID NO: 271037 - RNA, 14 nt, Homo sapiens
auuaugcucuuaau

SEQ ID NO: 271038 - RNA, 18 nt, Homo sapiens
auuauuaccaucucucca

SEQ ID NO: 271039 - RNA, 18 nt, Homo sapiens
auuauuauucuucauaac

SEQ ID NO: 271040 - RNA, 12 nt, Homo sapiens
auuauucccaug

SEQ ID NO: 271041 - RNA, 20 nt, Homo sapiens
auuauugucaaagaagucau

SEQ ID NO: 271042 - RNA, 23 nt, Homo sapiens
auucaacagguuuuccugaagaa

SEQ ID NO: 271043 - RNA, 11 nt, Homo sapiens
auucacaccac

SEQ ID NO: 271044 - RNA, 13 nt, Homo sapiens
auucacagcaagu

SEQ ID NO: 271045 - RNA, 20 nt, Homo sapiens
auucacagcaagucacuggc

SEQ ID NO: 271046 - RNA, 14 nt, Homo sapiens
auucacagugcucu

SEQ ID NO: 271047 - RNA, 13 nt, Homo sapiens
auucacaguguga

SEQ ID NO: 271048 - RNA, 16 nt, Homo sapiens
auucagccaggagaug

SEQ ID NO: 271049 - RNA, 14 nt, Homo sapiens
auucagcucugcaa

SEQ ID NO: 271050 - RNA, 17 nt, Homo sapiens
auucagcucugcaagaa

SEQ ID NO: 271051 - RNA, 17 nt, Homo sapiens
auucagggagugggcua

SEQ ID NO: 271052 - RNA, 12 nt, Homo sapiens
auucaguguuaa

SEQ ID NO: 271053 - RNA, 16 nt, Homo sapiens
auucauaaugacuuaa

SEQ ID NO: 271054 - RNA, 17 nt, Homo sapiens
auucauauuuacuucuu

SEQ ID NO: 271055 - RNA, 22 nt, Homo sapiens
auucaugcugcuuagaugacau

SEQ ID NO: 271056 - RNA, 23 nt, Homo sapiens
auucauucuuuuugaaaugucaa

SEQ ID NO: 271057 - RNA, 16 nt, Homo sapiens
auucauuucaaaggga

SEQ ID NO: 271058 - RNA, 21 nt, Homo sapiens
auuccaaacacauacaggaag

SEQ ID NO: 271059 - RNA, 19 nt, Homo sapiens
auuccaauauaaaggcagg

SEQ ID NO: 271060 - RNA, 20 nt, Homo sapiens
auuccacaaccugguuugcc

SEQ ID NO: 271061 - RNA, 17 nt, Homo sapiens
auuccaccugcaaucaa

SEQ ID NO: 271062 - RNA, 21 nt, Homo sapiens
auuccagcgucugcuguugau

SEQ ID NO: 271063 - RNA, 17 nt, Homo sapiens
auucccauguugucaau

SEQ ID NO: 271064 - RNA, 13 nt, Homo sapiens
auuccccccaucu

SEQ ID NO: 271065 - RNA, 19 nt, Homo sapiens
auuccccugcccaggugug

SEQ ID NO: 271066 - RNA, 19 nt, Homo sapiens
auuccuauauaguuuauug

SEQ ID NO: 271067 - RNA, 18 nt, Homo sapiens
auuccuguucccaugaga

SEQ ID NO: 271068 - RNA, 16 nt, Homo sapiens
auucgauccccuguca

SEQ ID NO: 271069 - RNA, 19 nt, Homo sapiens
auucuauaaaacacaucau

SEQ ID NO: 271070 - RNA, 11 nt, Homo sapiens
auucuaugagg

SEQ ID NO: 271071 - RNA, 23 nt, Homo sapiens
auucucauaagcuacugaugaga

SEQ ID NO: 271072 - RNA, 13 nt, Homo sapiens
auucucauucuca

SEQ ID NO: 271073 - RNA, 19 nt, Homo sapiens
auucucauuugucacacac

SEQ ID NO: 271074 - RNA, 22 nt, Homo sapiens
auucuccaccugccagggacag

SEQ ID NO: 271075 - RNA, 15 nt, Homo sapiens
auucuccugccucag

SEQ ID NO: 271076 - RNA, 14 nt, Homo sapiens
auucuccuugagga

SEQ ID NO: 271077 - RNA, 21 nt, Homo sapiens
auucucuagucaguuggcuaa

SEQ ID NO: 271078 - RNA, 21 nt, Homo sapiens
auucucucaggcuugcugcca

SEQ ID NO: 271079 - RNA, 17 nt, Homo sapiens
auucucuggcacucuga

SEQ ID NO: 271080 - RNA, 20 nt, Homo sapiens
auucugagaugacuauucag

SEQ ID NO: 271081 - RNA, 21 nt, Homo sapiens
auucugagguaaccucauuau

SEQ ID NO: 271082 - RNA, 23 nt, Homo sapiens
auucugagguaaccucauuauca

SEQ ID NO: 271083 - RNA, 20 nt, Homo sapiens
auucugcuaccucacugggg

SEQ ID NO: 271084 - RNA, 20 nt, Homo sapiens
auucugucuggcauuacaau

SEQ ID NO: 271085 - RNA, 13 nt, Homo sapiens
auucuuccugcuu

SEQ ID NO: 271086 - RNA, 21 nt, Homo sapiens
auucuucuccacuuucuagcc

SEQ ID NO: 271087 - RNA, 12 nt, Homo sapiens
auucuucuguac

SEQ ID NO: 271088 - RNA, 11 nt, Homo sapiens
auucuuggccc

SEQ ID NO: 271089 - RNA, 13 nt, Homo sapiens
auucuuucccaac

SEQ ID NO: 271090 - RNA, 17 nt, Homo sapiens
auucuuucccaacaccu

SEQ ID NO: 271091 - RNA, 19 nt, Homo sapiens
auucuuucccaacaccucu

SEQ ID NO: 271092 - RNA, 20 nt, Homo sapiens
auucuuucccaauucacauc

SEQ ID NO: 271093 - RNA, 19 nt, Homo sapiens
auucuuuuugaaaugucaa

SEQ ID NO: 271094 - RNA, 13 nt, Homo sapiens
auugaaaaaccau

SEQ ID NO: 271095 - RNA, 16 nt, Homo sapiens
auugaaaugauuucac

SEQ ID NO: 271096 - RNA, 15 nt, Homo sapiens
auugaacuuaugcaa

SEQ ID NO: 271097 - RNA, 19 nt, Homo sapiens
auugaccgagcacauacca

SEQ ID NO: 271098 - RNA, 14 nt, Homo sapiens
auugagcaaagggg

SEQ ID NO: 271099 - RNA, 22 nt, Homo sapiens
auugauacaugcauugcucuua

SEQ ID NO: 271100 - RNA, 17 nt, Homo sapiens
auugauaugcuuauaca

SEQ ID NO: 271101 - RNA, 19 nt, Homo sapiens
auuuucagugcuuugcccu

SEQ ID NO: 271102 - RNA, 22 nt, Homo sapiens
auuuucccccacuacugcagca

SEQ ID NO: 271103 - RNA, 23 nt, Homo sapiens
auuuuccuccaucgcaguguuca

SEQ ID NO: 271104 - RNA, 15 nt, Homo sapiens
auuuucugcauuuaa

SEQ ID NO: 271105 - RNA, 17 nt, Homo sapiens
auuuucuuuuuauacua

SEQ ID NO: 271106 - RNA, 15 nt, Homo sapiens
auuuugaagugcugu

SEQ ID NO: 271107 - RNA, 19 nt, Homo sapiens
auuuuggcauuuuggcuca

SEQ ID NO: 271108 - RNA, 17 nt, Homo sapiens
auuuuguaucaccucuu

SEQ ID NO: 271109 - RNA, 18 nt, Homo sapiens
auuuuguaucaccucuuc

SEQ ID NO: 271110 - RNA, 19 nt, Homo sapiens
auuuuguuauugacuaaca

SEQ ID NO: 271111 - RNA, 18 nt, Homo sapiens
auuuuguucuaguuuuca

SEQ ID NO: 271112 - RNA, 21 nt, Homo sapiens
auuuuguuuuugucuuaaaaa

SEQ ID NO: 271113 - RNA, 16 nt, Homo sapiens
auuuuuagacagaguc

SEQ ID NO: 271114 - RNA, 15 nt, Homo sapiens
auuuuuccaacuacu

SEQ ID NO: 271115 - RNA, 14 nt, Homo sapiens
auuuuugaaaccaa

SEQ ID NO: 271116 - RNA, 13 nt, Homo sapiens
auuuuugugcaca

SEQ ID NO: 271117 - RNA, 14 nt, Homo sapiens
auuuuugugcacau

SEQ ID NO: 271118 - RNA, 15 nt, Homo sapiens
auuuuuuugagacag

SEQ ID NO: 271119 - RNA, 14 nt, Homo sapiens
auuuuuuugcaagu

SEQ ID NO: 271120 - RNA, 19 nt, Homo sapiens
caaaaaaaccucuaugcaa

SEQ ID NO: 271121 - RNA, 21 nt, Homo sapiens
caaaaaaaccucuaugcaauc

SEQ ID NO: 271122 - RNA, 16 nt, Homo sapiens
caaaaaaagaaaaaga

SEQ ID NO: 271123 - RNA, 19 nt, Homo sapiens
caaaaaaaggcggugagca

SEQ ID NO: 271124 - RNA, 11 nt, Homo sapiens
caaaaaaucug

SEQ ID NO: 271125 - RNA, 14 nt, Homo sapiens
caaaaaaucugacc

SEQ ID NO: 271126 - RNA, 13 nt, Homo sapiens
caaaaacaacaac

SEQ ID NO: 271127 - RNA, 18 nt, Homo sapiens
caaaaagaggcuauguga

SEQ ID NO: 271128 - RNA, 21 nt, Homo sapiens
caaaaagaggcuaugugagca

SEQ ID NO: 271129 - RNA, 12 nt, Homo sapiens
caaaacauuugu

SEQ ID NO: 271130 - RNA, 17 nt, Homo sapiens
caaaacauuuuacuuua

SEQ ID NO: 271131 - RNA, 13 nt, Homo sapiens
caaaaccaaauau

SEQ ID NO: 271132 - RNA, 19 nt, Homo sapiens
caaaaccaaauauuccaga

SEQ ID NO: 271133 - RNA, 22 nt, Homo sapiens
caaaaccaaauauuccagagac

SEQ ID NO: 271134 - RNA, 15 nt, Homo sapiens
caaaagauucuacaa

SEQ ID NO: 271135 - RNA, 20 nt, Homo sapiens
caaaaguuuaaaaagcucac

SEQ ID NO: 271136 - RNA, 23 nt, Homo sapiens
caaaauaagaugaaucacuuaau

SEQ ID NO: 271137 - RNA, 15 nt, Homo sapiens
caaaauaguucugca

SEQ ID NO: 271138 - RNA, 15 nt, Homo sapiens
caaaaucacacagcc

SEQ ID NO: 271139 - RNA, 23 nt, Homo sapiens
caaaaugguaaccucuacuauga

SEQ ID NO: 271140 - RNA, 17 nt, Homo sapiens
caaacacuccacccucc

SEQ ID NO: 271141 - RNA, 21 nt, Homo sapiens
caaacagccccucuggacaca

SEQ ID NO: 271142 - RNA, 22 nt, Homo sapiens
caaacagccccucuggacacag

SEQ ID NO: 271143 - RNA, 19 nt, Homo sapiens
caaaccaaaucauacuuuu

SEQ ID NO: 271144 - RNA, 13 nt, Homo sapiens
caaaccaucccag

SEQ ID NO: 271145 - RNA, 21 nt, Homo sapiens
caaacuacuggcaauuuguaa

SEQ ID NO: 271146 - RNA, 15 nt, Homo sapiens
caaacucaccugccc

SEQ ID NO: 271147 - RNA, 15 nt, Homo sapiens
caaacucucccuuca

SEQ ID NO: 271148 - RNA, 21 nt, Homo sapiens
caaacugcuuuuuccaacuca

SEQ ID NO: 271149 - RNA, 21 nt, Homo sapiens
caaacuggggccucccugguc

SEQ ID NO: 271150 - RNA, 13 nt, Homo sapiens
caaagaagccagc

SEQ ID NO: 271151 - RNA, 16 nt, Homo sapiens
caaagacaaaggugag

SEQ ID NO: 271152 - RNA, 13 nt, Homo sapiens
caaagacauucug

SEQ ID NO: 271153 - RNA, 23 nt, Homo sapiens
caaagacugaguacguugugcau

SEQ ID NO: 271154 - RNA, 13 nt, Homo sapiens
caaagacuuuccu

SEQ ID NO: 271155 - RNA, 14 nt, Homo sapiens
caaagagaccagcc

SEQ ID NO: 271156 - RNA, 22 nt, Homo sapiens
caaagauacacaaucugaaaca

SEQ ID NO: 271157 - RNA, 17 nt, Homo sapiens
caaagauguggggaaaa

SEQ ID NO: 271158 - RNA, 23 nt, Homo sapiens
caaagcaaggaaacuauguaaca

SEQ ID NO: 271159 - RNA, 18 nt, Homo sapiens
caaagcacgaaauguuau

SEQ ID NO: 271160 - RNA, 13 nt, Homo sapiens
caaagcagugcau

SEQ ID NO: 271161 - RNA, 17 nt, Homo sapiens
caaagcuuucauguaaa

SEQ ID NO: 271162 - RNA, 14 nt, Homo sapiens
caaaggaagcacau

SEQ ID NO: 271163 - RNA, 15 nt, Homo sapiens
caaaggaagcacaug

SEQ ID NO: 271164 - RNA, 20 nt, Homo sapiens
caaaggagggucaggaagga

SEQ ID NO: 271165 - RNA, 17 nt, Homo sapiens
caaagggcucaagggug

SEQ ID NO: 271166 - RNA, 14 nt, Homo sapiens
caaaguaagccaug

SEQ ID NO: 271167 - RNA, 15 nt, Homo sapiens
caaaguagaagucuu

SEQ ID NO: 271168 - RNA, 14 nt, Homo sapiens
caaaguugccuaaa

SEQ ID NO: 271169 - RNA, 21 nt, Homo sapiens
caaauacuguauauucaggac

SEQ ID NO: 271170 - RNA, 15 nt, Homo sapiens
caaauauuccagaga

SEQ ID NO: 271171 - RNA, 12 nt, Homo sapiens
caaauauuuccc

SEQ ID NO: 271172 - RNA, 21 nt, Homo sapiens
caaaucagcugcuacuacucc

SEQ ID NO: 271173 - RNA, 16 nt, Homo sapiens
caaaucugcaccccac

SEQ ID NO: 271174 - RNA, 22 nt, Homo sapiens
caaaucuucuugauccacuucu

SEQ ID NO: 271175 - RNA, 19 nt, Homo sapiens
caaaugcaauuuccaacac

SEQ ID NO: 271176 - RNA, 13 nt, Homo sapiens
caaaugcaauuuu

SEQ ID NO: 271177 - RNA, 20 nt, Homo sapiens
caaaugcauacaaguuucau

SEQ ID NO: 271178 - RNA, 14 nt, Homo sapiens
caaaugcccagcuu

SEQ ID NO: 271179 - RNA, 16 nt, Homo sapiens
caaaugcuuuuccuca

SEQ ID NO: 271180 - RNA, 18 nt, Homo sapiens
caaauggcaaagacugga

SEQ ID NO: 271181 - RNA, 13 nt, Homo sapiens
caaaugugacauu

SEQ ID NO: 271182 - RNA, 13 nt, Homo sapiens
auuugcacauuaa

SEQ ID NO: 271183 - RNA, 19 nt, Homo sapiens
auuugcauaacaauuccuc

SEQ ID NO: 271184 - RNA, 16 nt, Homo sapiens
auuugcugaauacaga

SEQ ID NO: 271185 - RNA, 20 nt, Homo sapiens
auuugcuuagaaagucugau

SEQ ID NO: 271186 - RNA, 16 nt, Homo sapiens
auuuggcaaugccauc

SEQ ID NO: 271187 - RNA, 20 nt, Homo sapiens
auuuguaaauuuaugugaug

SEQ ID NO: 271188 - RNA, 13 nt, Homo sapiens
auuugucaacaaa

SEQ ID NO: 271189 - RNA, 17 nt, Homo sapiens
auuugucaacaaaguca

SEQ ID NO: 271190 - RNA, 19 nt, Homo sapiens
auuugucuagcaugcugag

SEQ ID NO: 271191 - RNA, 17 nt, Homo sapiens
auuuguuuucacuuuuu

SEQ ID NO: 271192 - RNA, 21 nt, Homo sapiens
auuuuaaugaagaaaguggaa

SEQ ID NO: 271193 - RNA, 16 nt, Homo sapiens
auuuuaauguuuccuu

SEQ ID NO: 271194 - RNA, 21 nt, Homo sapiens
auuuuacuuuuuccuggcuca

SEQ ID NO: 271195 - RNA, 18 nt, Homo sapiens
auuuuagagacagaagaa

SEQ ID NO: 271196 - RNA, 15 nt, Homo sapiens
auuuuagcuacuaua

SEQ ID NO: 271197 - RNA, 23 nt, Homo sapiens
auuuuaucacuugccgugucauc

SEQ ID NO: 271198 - RNA, 15 nt, Homo sapiens
auuuuaugcuuuaaa

SEQ ID NO: 271199 - RNA, 18 nt, Homo sapiens
auuuuauucccuuucaca

SEQ ID NO: 271200 - RNA, 22 nt, Homo sapiens
auuuucagugcuuugcccuuga

SEQ ID NO: 271201 - RNA, 15 nt, Homo sapiens
auuuucuccaugucu

SEQ ID NO: 271202 - RNA, 18 nt, Homo sapiens
auuuucuccaugucugua

SEQ ID NO: 271203 - RNA, 15 nt, Homo sapiens
auuuugauccaagcu

SEQ ID NO: 271204 - RNA, 17 nt, Homo sapiens
auuuugcauaguaccaa

SEQ ID NO: 271205 - RNA, 19 nt, Homo sapiens
auuuugcuaaaugugaaug

SEQ ID NO: 271206 - RNA, 13 nt, Homo sapiens
auuuugcuuccuu

SEQ ID NO: 271207 - RNA, 16 nt, Homo sapiens
auuuuggcaaagccag

SEQ ID NO: 271208 - RNA, 20 nt, Homo sapiens
auuuugggguacccacugcu

SEQ ID NO: 271209 - RNA, 23 nt, Homo sapiens
auuuugugauucuauaaaacaca

SEQ ID NO: 271210 - RNA, 19 nt, Homo sapiens
auuuuguuuuugucuuaaa

SEQ ID NO: 271211 - RNA, 17 nt, Homo sapiens
auuuuuauagacaaaua

SEQ ID NO: 271212 - RNA, 18 nt, Homo sapiens
auuuuucagauauaaaag

SEQ ID NO: 271213 - RNA, 13 nt, Homo sapiens
auuuuugaauaca

SEQ ID NO: 271214 - RNA, 19 nt, Homo sapiens
auuuuugaauacaggcaua

SEQ ID NO: 271215 - RNA, 19 nt, Homo sapiens
auuuuuguagagccagggu

SEQ ID NO: 271216 - RNA, 13 nt, Homo sapiens
auuuuuguuuaua

SEQ ID NO: 271217 - RNA, 18 nt, Homo sapiens
auuuuuuugagacagagu

SEQ ID NO: 271218 - RNA, 22 nt, Homo sapiens
auuuuuuugugggaaauccaca

SEQ ID NO: 271219 - RNA, 17 nt, Homo sapiens
auuuuuuuucuguuaua

SEQ ID NO: 271220 - RNA, 15 nt, Homo sapiens
caaaaaaaucugcag

SEQ ID NO: 271221 - RNA, 12 nt, Homo sapiens
caaaaaacaacu

SEQ ID NO: 271222 - RNA, 17 nt, Homo sapiens
caaaaaacaacugacca

SEQ ID NO: 271223 - RNA, 21 nt, Homo sapiens
caaaaaagcgaaccgugagga

SEQ ID NO: 271224 - RNA, 17 nt, Homo sapiens
caaaaaaucugaccaaa

SEQ ID NO: 271225 - RNA, 22 nt, Homo sapiens
caaaaacauucuuacauuuuac

SEQ ID NO: 271226 - RNA, 17 nt, Homo sapiens
caaaaagaggcuaugug

SEQ ID NO: 271227 - RNA, 17 nt, Homo sapiens
caaaaauugucccuuaa

SEQ ID NO: 271228 - RNA, 11 nt, Homo sapiens
caaaaccaaau

SEQ ID NO: 271229 - RNA, 15 nt, Homo sapiens
caaaaggacucucag

SEQ ID NO: 271230 - RNA, 16 nt, Homo sapiens
caaaaguuuaaaaagc

SEQ ID NO: 271231 - RNA, 21 nt, Homo sapiens
caaaauaagaugaaucacuua

SEQ ID NO: 271232 - RNA, 21 nt, Homo sapiens
caaaauauauuuuguuuacaa

SEQ ID NO: 271233 - RNA, 14 nt, Homo sapiens
caaaaucacacagc

SEQ ID NO: 271234 - RNA, 16 nt, Homo sapiens
caaaaucacacagcca

SEQ ID NO: 271235 - RNA, 21 nt, Homo sapiens
caaaaucauuuuauaugucaa

SEQ ID NO: 271236 - RNA, 20 nt, Homo sapiens
caaaauguccaccaauagaa

SEQ ID NO: 271237 - RNA, 19 nt, Homo sapiens
caaacagccccucuggaca

SEQ ID NO: 271238 - RNA, 23 nt, Homo sapiens
caaacagccccucuggacacagc

SEQ ID NO: 271239 - RNA, 14 nt, Homo sapiens
caaaccaaaucaua

SEQ ID NO: 271240 - RNA, 20 nt, Homo sapiens
caaaccaaaucauacuuucu

SEQ ID NO: 271241 - RNA, 17 nt, Homo sapiens
caaaccucugugagcau

SEQ ID NO: 271242 - RNA, 14 nt, Homo sapiens
caaacuaccuucca

SEQ ID NO: 271243 - RNA, 23 nt, Homo sapiens
caaacuaccuuccaguuccucau

SEQ ID NO: 271244 - RNA, 17 nt, Homo sapiens
caaacuccugaccucaa

SEQ ID NO: 271245 - RNA, 18 nt, Homo sapiens
caaacucuaaaauuauaa

SEQ ID NO: 271246 - RNA, 22 nt, Homo sapiens
caaacucuuaguuacucauuca

SEQ ID NO: 271247 - RNA, 23 nt, Homo sapiens
caaacugcuuuuuccaacucaga

SEQ ID NO: 271248 - RNA, 14 nt, Homo sapiens
caaacuucaagggu

SEQ ID NO: 271249 - RNA, 14 nt, Homo sapiens
caaagaaaguguau

SEQ ID NO: 271250 - RNA, 13 nt, Homo sapiens
caaagaaauuucc

SEQ ID NO: 271251 - RNA, 22 nt, Homo sapiens
caaagaacuuggaaauagugau

SEQ ID NO: 271252 - RNA, 11 nt, Homo sapiens
caaagacagaa

SEQ ID NO: 271253 - RNA, 19 nt, Homo sapiens
caaagaugaucaguaugaa

SEQ ID NO: 271254 - RNA, 23 nt, Homo sapiens
caaagauguuaugguguuuagau

SEQ ID NO: 271255 - RNA, 19 nt, Homo sapiens
caauaaagcagcguuucua

SEQ ID NO: 271256 - RNA, 17 nt, Homo sapiens
caauaaauuugcaaauu

SEQ ID NO: 271257 - RNA, 13 nt, Homo sapiens
caauaagcaucaa

SEQ ID NO: 271258 - RNA, 22 nt, Homo sapiens
caauaaggggagaguaacccug

SEQ ID NO: 271259 - RNA, 14 nt, Homo sapiens
caauaauuucaggu

SEQ ID NO: 271260 - RNA, 22 nt, Homo sapiens
caauaccguguggcccaagacc

SEQ ID NO: 271261 - RNA, 14 nt, Homo sapiens
caauagauauuuac

SEQ ID NO: 271262 - RNA, 15 nt, Homo sapiens
caauaguuguugauu

SEQ ID NO: 271263 - RNA, 14 nt, Homo sapiens
caauauacuuguau

SEQ ID NO: 271264 - RNA, 18 nt, Homo sapiens
caauauagcaagauccca

SEQ ID NO: 271265 - RNA, 22 nt, Homo sapiens
caauauauacuuauagaauuca

SEQ ID NO: 271266 - RNA, 15 nt, Homo sapiens
caauauugacuuugu

SEQ ID NO: 271267 - RNA, 22 nt, Homo sapiens
caaucaauucauaucuauuuau

SEQ ID NO: 271268 - RNA, 17 nt, Homo sapiens
caaucagccacauucua

SEQ ID NO: 271269 - RNA, 19 nt, Homo sapiens
caaucaguagccagcaucu

SEQ ID NO: 271270 - RNA, 23 nt, Homo sapiens
caaucaguagccagcaucugccu

SEQ ID NO: 271271 - RNA, 18 nt, Homo sapiens
caauccagcuauguuaua

SEQ ID NO: 271272 - RNA, 15 nt, Homo sapiens
caauccaucucucaa

SEQ ID NO: 271273 - RNA, 13 nt, Homo sapiens
caaucccucaaaa

SEQ ID NO: 271274 - RNA, 22 nt, Homo sapiens
caaucccugaggacugauuuca

SEQ ID NO: 271275 - RNA, 13 nt, Homo sapiens
caauccuauguuu

SEQ ID NO: 271276 - RNA, 18 nt, Homo sapiens
caauccuugccacagugu

SEQ ID NO: 271277 - RNA, 19 nt, Homo sapiens
caauccuugccacagugug

SEQ ID NO: 271278 - RNA, 19 nt, Homo sapiens
caaucucaaucccucaaaa

SEQ ID NO: 271279 - RNA, 18 nt, Homo sapiens
caaucucugauucuguca

SEQ ID NO: 271280 - RNA, 18 nt, Homo sapiens
caaucugaaacagcuuca

SEQ ID NO: 271281 - RNA, 22 nt, Homo sapiens
caaucuggggauacuggcaaag

SEQ ID NO: 271282 - RNA, 21 nt, Homo sapiens
caaucuguccuguuacaaaag

SEQ ID NO: 271283 - RNA, 13 nt, Homo sapiens
caaucuucucaga

SEQ ID NO: 271284 - RNA, 12 nt, Homo sapiens
caaucuuuacac

SEQ ID NO: 271285 - RNA, 16 nt, Homo sapiens
caaugagaucauugug

SEQ ID NO: 271286 - RNA, 17 nt, Homo sapiens
caaugagaucauuguga

SEQ ID NO: 271287 - RNA, 17 nt, Homo sapiens
caaugaguaacaggaaa

SEQ ID NO: 271288 - RNA, 16 nt, Homo sapiens
caaugcauucugaggu

SEQ ID NO: 271289 - RNA, 16 nt, Homo sapiens
caaugcuuugaucccu

SEQ ID NO: 271290 - RNA, 14 nt, Homo sapiens
caaugucuaaaaac

SEQ ID NO: 271291 - RNA, 18 nt, Homo sapiens
caauguggcaguccugug

SEQ ID NO: 271292 - RNA, 14 nt, Homo sapiens
caauguuuuagaau

SEQ ID NO: 271293 - RNA, 22 nt, Homo sapiens
caauuaaggauuuuaugcuuua

SEQ ID NO: 271294 - RNA, 20 nt, Homo sapiens
caauuagucugucacuccau

SEQ ID NO: 271295 - RNA, 22 nt, Homo sapiens
caauuagucugucacuccauuu

SEQ ID NO: 271296 - RNA, 18 nt, Homo sapiens
caauuauagaaagccaaa

SEQ ID NO: 271297 - RNA, 12 nt, Homo sapiens
caauuauuacca

SEQ ID NO: 271298 - RNA, 13 nt, Homo sapiens
caauuauuaccau

SEQ ID NO: 271299 - RNA, 22 nt, Homo sapiens
caauucauauauuugaagugga

SEQ ID NO: 271300 - RNA, 17 nt, Homo sapiens
caauugcugcuuguaca

SEQ ID NO: 271301 - RNA, 13 nt, Homo sapiens
caauuugcacauu

SEQ ID NO: 271302 - RNA, 18 nt, Homo sapiens
caauuugccauuguuucu

SEQ ID NO: 271303 - RNA, 22 nt, Homo sapiens
caauuugucuagcaugcugagu

SEQ ID NO: 271304 - RNA, 17 nt, Homo sapiens
caauuuuaaaucugaga

SEQ ID NO: 271305 - RNA, 17 nt, Homo sapiens
cacaaaagucuacuuua

SEQ ID NO: 271306 - RNA, 18 nt, Homo sapiens
cacaaaauaaccaauccu

SEQ ID NO: 271307 - RNA, 13 nt, Homo sapiens
cacaaaaucacac

SEQ ID NO: 271308 - RNA, 20 nt, Homo sapiens
cacaaaauguaggguuauaa

SEQ ID NO: 271309 - RNA, 16 nt, Homo sapiens
cacaaagaaccaccag

SEQ ID NO: 271310 - RNA, 23 nt, Homo sapiens
cacaaagcuuuugcauauugcau

SEQ ID NO: 271311 - RNA, 12 nt, Homo sapiens
cacaacccaucu

SEQ ID NO: 271312 - RNA, 23 nt, Homo sapiens
cacaacccuucagauuugccuua

SEQ ID NO: 271313 - RNA, 16 nt, Homo sapiens
cacaauccuugccaca

SEQ ID NO: 271314 - RNA, 21 nt, Homo sapiens
cacaauccuugccacagugug

SEQ ID NO: 271315 - RNA, 19 nt, Homo sapiens
cacaauuauuaccaucucu

SEQ ID NO: 271316 - RNA, 13 nt, Homo sapiens
cacacacauacac

SEQ ID NO: 271317 - RNA, 19 nt, Homo sapiens
cacacagaaaauauacugu

SEQ ID NO: 271318 - RNA, 22 nt, Homo sapiens
cacacagaaaauauacuguaaa

SEQ ID NO: 271319 - RNA, 14 nt, Homo sapiens
cacacaugcauccu

SEQ ID NO: 271320 - RNA, 22 nt, Homo sapiens
cacaccccagacgaugucuuca

SEQ ID NO: 271321 - RNA, 20 nt, Homo sapiens
cacacccuggaggauuucau

SEQ ID NO: 271322 - RNA, 16 nt, Homo sapiens
cacaccuugacaaaau

SEQ ID NO: 271323 - RNA, 14 nt, Homo sapiens
cacacgcgugcaca

SEQ ID NO: 271324 - RNA, 16 nt, Homo sapiens
cacacgcgugcacaca

SEQ ID NO: 271325 - RNA, 17 nt, Homo sapiens
cacacggcugaccucau

SEQ ID NO: 271326 - RNA, 19 nt, Homo sapiens
caacugcaucaagauguga

SEQ ID NO: 271327 - RNA, 17 nt, Homo sapiens
caacugcugaugcucau

SEQ ID NO: 271328 - RNA, 20 nt, Homo sapiens
caacuugggaacuagacucc

SEQ ID NO: 271329 - RNA, 20 nt, Homo sapiens
caacuuuuuaccuaguacaa

SEQ ID NO: 271330 - RNA, 17 nt, Homo sapiens
caagaagucaaaguaaa

SEQ ID NO: 271331 - RNA, 23 nt, Homo sapiens
caagaauagaugcugacuguacu

SEQ ID NO: 271332 - RNA, 12 nt, Homo sapiens
caagacaccaaa

SEQ ID NO: 271333 - RNA, 17 nt, Homo sapiens
caagacaccaaauugaa

SEQ ID NO: 271334 - RNA, 16 nt, Homo sapiens
caagaccacguuucua

SEQ ID NO: 271335 - RNA, 21 nt, Homo sapiens
caagacccaggaggcccagcu

SEQ ID NO: 271336 - RNA, 19 nt, Homo sapiens
caagacucccagaucagcu

SEQ ID NO: 271337 - RNA, 15 nt, Homo sapiens
caagacugcucccuu

SEQ ID NO: 271338 - RNA, 17 nt, Homo sapiens
caagagagacagcacag

SEQ ID NO: 271339 - RNA, 20 nt, Homo sapiens
caagaggcugguuuuggcau

SEQ ID NO: 271340 - RNA, 14 nt, Homo sapiens
caagaugugacaug

SEQ ID NO: 271341 - RNA, 20 nt, Homo sapiens
caagauuaucuuauuccccu

SEQ ID NO: 271342 - RNA, 18 nt, Homo sapiens
caagcacugcaugggcaa

SEQ ID NO: 271343 - RNA, 14 nt, Homo sapiens
caagcauaaugaca

SEQ ID NO: 271344 - RNA, 20 nt, Homo sapiens
caagccuagcccuucucuca

SEQ ID NO: 271345 - RNA, 22 nt, Homo sapiens
caagcuaaaauuagaugaacuc

SEQ ID NO: 271346 - RNA, 17 nt, Homo sapiens
caagcugaccuugcuga

SEQ ID NO: 271347 - RNA, 21 nt, Homo sapiens
caagcuggucccacucagucc

SEQ ID NO: 271348 - RNA, 13 nt, Homo sapiens
caaggaagucaaa

SEQ ID NO: 271349 - RNA, 20 nt, Homo sapiens
caaggagggcagaucacuuc

SEQ ID NO: 271350 - RNA, 16 nt, Homo sapiens
caaggauccugagcca

SEQ ID NO: 271351 - RNA, 20 nt, Homo sapiens
caaggccaaaggaagcacau

SEQ ID NO: 271352 - RNA, 22 nt, Homo sapiens
caaggcccauaucugugaaaug

SEQ ID NO: 271353 - RNA, 17 nt, Homo sapiens
caaggcucacaugcucc

SEQ ID NO: 271354 - RNA, 21 nt, Homo sapiens
caaggcucacaugcuccuugc

SEQ ID NO: 271355 - RNA, 16 nt, Homo sapiens
caaggcuggcagugac

SEQ ID NO: 271356 - RNA, 19 nt, Homo sapiens
caaggcuggcagugacaga

SEQ ID NO: 271357 - RNA, 19 nt, Homo sapiens
caaggcugggggaagaagc

SEQ ID NO: 271358 - RNA, 21 nt, Homo sapiens
caagggaauucggugugcacc

SEQ ID NO: 271359 - RNA, 14 nt, Homo sapiens
caagggaugucuca

SEQ ID NO: 271360 - RNA, 16 nt, Homo sapiens
caaggguuuguugaac

SEQ ID NO: 271361 - RNA, 17 nt, Homo sapiens
caaggugacauuuccau

SEQ ID NO: 271362 - RNA, 14 nt, Homo sapiens
caaguauuggcaaa

SEQ ID NO: 271363 - RNA, 15 nt, Homo sapiens
caaguauuggcaaag

SEQ ID NO: 271364 - RNA, 17 nt, Homo sapiens
caaguauuggcaaagau

SEQ ID NO: 271365 - RNA, 18 nt, Homo sapiens
caagucaagugaaaaagg

SEQ ID NO: 271366 - RNA, 18 nt, Homo sapiens
caagucagcacuaccucc

SEQ ID NO: 271367 - RNA, 22 nt, Homo sapiens
caaguccucagugguuggcaau

SEQ ID NO: 271368 - RNA, 12 nt, Homo sapiens
caagugaagguu

SEQ ID NO: 271369 - RNA, 15 nt, Homo sapiens
caagugcucuuucca

SEQ ID NO: 271370 - RNA, 22 nt, Homo sapiens
caaguucauaggucuccaagac

SEQ ID NO: 271371 - RNA, 20 nt, Homo sapiens
caaguucuuaguugcuguau

SEQ ID NO: 271372 - RNA, 21 nt, Homo sapiens
caaguucuuaguugcuguaug

SEQ ID NO: 271373 - RNA, 17 nt, Homo sapiens
caaguuguuugagaaau

SEQ ID NO: 271374 - RNA, 23 nt, Homo sapiens
caauaaaccagugaacaguguga

SEQ ID NO: 271375 - RNA, 14 nt, Homo sapiens
caauaaauuugcaa

SEQ ID NO: 271376 - RNA, 12 nt, Homo sapiens
caauaagcagaa

SEQ ID NO: 271377 - RNA, 14 nt, Homo sapiens
caauagaaauccaa

SEQ ID NO: 271378 - RNA, 22 nt, Homo sapiens
caauauacuuguauagcaguuu

SEQ ID NO: 271379 - RNA, 19 nt, Homo sapiens
caauauauacuuauagaau

SEQ ID NO: 271380 - RNA, 14 nt, Homo sapiens
caauauccuaauaa

SEQ ID NO: 271381 - RNA, 12 nt, Homo sapiens
caauaugcauuu

SEQ ID NO: 271382 - RNA, 16 nt, Homo sapiens
caauauuguacaguuu

SEQ ID NO: 271383 - RNA, 19 nt, Homo sapiens
caaucaucaucauucucau

SEQ ID NO: 271384 - RNA, 16 nt, Homo sapiens
caauccagcuauguua

SEQ ID NO: 271385 - RNA, 13 nt, Homo sapiens
caaucguaaaauu

SEQ ID NO: 271386 - RNA, 19 nt, Homo sapiens
caaucuaaagauacagugu

SEQ ID NO: 271387 - RNA, 20 nt, Homo sapiens
caaucuaaagauacaguguc

SEQ ID NO: 271388 - RNA, 15 nt, Homo sapiens
caaucugaaacagcu

SEQ ID NO: 271389 - RNA, 21 nt, Homo sapiens
caaucugaaacagcuucaugg

SEQ ID NO: 271390 - RNA, 17 nt, Homo sapiens
caaucuguccuguuaca

SEQ ID NO: 271391 - RNA, 19 nt, Homo sapiens
caaucugugaugacauucc

SEQ ID NO: 271392 - RNA, 20 nt, Homo sapiens
caaucuucucagaaggcaaa

SEQ ID NO: 271393 - RNA, 20 nt, Homo sapiens
caaucuuuacacaaugucac

SEQ ID NO: 271394 - RNA, 16 nt, Homo sapiens
caaugaagucucugaa

SEQ ID NO: 271395 - RNA, 15 nt, Homo sapiens
caaugacacagucuu

SEQ ID NO: 271396 - RNA, 16 nt, Homo sapiens
caaugacuuacuguac

SEQ ID NO: 271397 - RNA, 22 nt, Homo sapiens
caaugcuauaacuauguugaua

SEQ ID NO: 271398 - RNA, 23 nt, Homo sapiens
caaugcuauaacuauguugauaa

SEQ ID NO: 271399 - RNA, 16 nt, Homo sapiens
caauggagacugucuc

SEQ ID NO: 271400 - RNA, 17 nt, Homo sapiens
caaugguuaacaucuuc

SEQ ID NO: 271401 - RNA, 17 nt, Homo sapiens
caauguaccauguugcc

SEQ ID NO: 271402 - RNA, 14 nt, Homo sapiens
caaugucagaugaa

SEQ ID NO: 271403 - RNA, 17 nt, Homo sapiens
caaugucagaugaaguc

SEQ ID NO: 271404 - RNA, 14 nt, Homo sapiens
caauguuagccaca

SEQ ID NO: 271405 - RNA, 15 nt, Homo sapiens
caauguucaucccau

SEQ ID NO: 271406 - RNA, 19 nt, Homo sapiens
caauguuucaaacaaaaag

SEQ ID NO: 271407 - RNA, 19 nt, Homo sapiens
caauuacaggaaguacugg

SEQ ID NO: 271408 - RNA, 19 nt, Homo sapiens
caauuagucugucacucca

SEQ ID NO: 271409 - RNA, 18 nt, Homo sapiens
cacguacacacacauaca

SEQ ID NO: 271410 - RNA, 22 nt, Homo sapiens
cacguaguagggucaggccacg

SEQ ID NO: 271411 - RNA, 14 nt, Homo sapiens
cacguuaguaauac

SEQ ID NO: 271412 - RNA, 19 nt, Homo sapiens
cacguuccacgacagauga

SEQ ID NO: 271413 - RNA, 15 nt, Homo sapiens
cacguucugcucauc

SEQ ID NO: 271414 - RNA, 16 nt, Homo sapiens
cacuaaccacgcugga

SEQ ID NO: 271415 - RNA, 17 nt, Homo sapiens
cacuaaggugugcucug

SEQ ID NO: 271416 - RNA, 19 nt, Homo sapiens
cacuaaugaggaaacugca

SEQ ID NO: 271417 - RNA, 21 nt, Homo sapiens
cacuagcaauaaaaugcuaau

SEQ ID NO: 271418 - RNA, 20 nt, Homo sapiens
cacuauaauguaagcucuac

SEQ ID NO: 271419 - RNA, 21 nt, Homo sapiens
cacuauagccuaggugacaga

SEQ ID NO: 271420 - RNA, 23 nt, Homo sapiens
cacuauagccuaggugacagagu

SEQ ID NO: 271421 - RNA, 21 nt, Homo sapiens
cacucacauuuauucugcuca

SEQ ID NO: 271422 - RNA, 13 nt, Homo sapiens
cacucagcugucc

SEQ ID NO: 271423 - RNA, 12 nt, Homo sapiens
cacucauuccca

SEQ ID NO: 271424 - RNA, 23 nt, Homo sapiens
cacucugaggucucuguggcagg

SEQ ID NO: 271425 - RNA, 17 nt, Homo sapiens
cacucuggcagcucaga

SEQ ID NO: 271426 - RNA, 17 nt, Homo sapiens
cacucugggcuguaacg

SEQ ID NO: 271427 - RNA, 18 nt, Homo sapiens
cacucuguaauugcaaaa

SEQ ID NO: 271428 - RNA, 18 nt, Homo sapiens
cacucuuguugugcucuu

SEQ ID NO: 271429 - RNA, 19 nt, Homo sapiens
cacucuuguugugcucuuu

SEQ ID NO: 271430 - RNA, 13 nt, Homo sapiens
cacugaacaugcu

SEQ ID NO: 271431 - RNA, 15 nt, Homo sapiens
cacugaacaugcuca

SEQ ID NO: 271432 - RNA, 22 nt, Homo sapiens
cacugacccuggucaccagagg

SEQ ID NO: 271433 - RNA, 15 nt, Homo sapiens
cacugagcaaagcau

SEQ ID NO: 271434 - RNA, 19 nt, Homo sapiens
cacugagcaaagcauugag

SEQ ID NO: 271435 - RNA, 12 nt, Homo sapiens
cacugcaagcac

SEQ ID NO: 271436 - RNA, 13 nt, Homo sapiens
cacugcaagcacu

SEQ ID NO: 271437 - RNA, 15 nt, Homo sapiens
cacugcaagcacugc

SEQ ID NO: 271438 - RNA, 20 nt, Homo sapiens
cacugcacagugcaucucag

SEQ ID NO: 271439 - RNA, 21 nt, Homo sapiens
cacugcaccgggccacagaga

SEQ ID NO: 271440 - RNA, 13 nt, Homo sapiens
cacugcauaccaa

SEQ ID NO: 271441 - RNA, 21 nt, Homo sapiens
cacugccaaagaacuuggaaa

SEQ ID NO: 271442 - RNA, 20 nt, Homo sapiens
cacugccugcagcugagauu

SEQ ID NO: 271443 - RNA, 20 nt, Homo sapiens
cacugccugcccagugccau

SEQ ID NO: 271444 - RNA, 21 nt, Homo sapiens
cacugcucauuuggaucccag

SEQ ID NO: 271445 - RNA, 16 nt, Homo sapiens
cacugcugccucuuga

SEQ ID NO: 271446 - RNA, 11 nt, Homo sapiens
cacugcuguag

SEQ ID NO: 271447 - RNA, 16 nt, Homo sapiens
cacugcuuaacuucac

SEQ ID NO: 271448 - RNA, 15 nt, Homo sapiens
cacugcuugaggaaa

SEQ ID NO: 271449 - RNA, 13 nt, Homo sapiens
cacuggacacuuc

SEQ ID NO: 271450 - RNA, 20 nt, Homo sapiens
cacuggacugacgacuugag

SEQ ID NO: 271451 - RNA, 13 nt, Homo sapiens
cacuggguugacu

SEQ ID NO: 271452 - RNA, 21 nt, Homo sapiens
cacugucauaaucucuuucca

SEQ ID NO: 271453 - RNA, 23 nt, Homo sapiens
cacugugaagagaaccauaucaa

SEQ ID NO: 271454 - RNA, 19 nt, Homo sapiens
cacugugccaugugccagg

SEQ ID NO: 271455 - RNA, 14 nt, Homo sapiens
cacuguuaagccau

SEQ ID NO: 271456 - RNA, 23 nt, Homo sapiens
cacuguuaagccauguguuccaa

SEQ ID NO: 271457 - RNA, 23 nt, Homo sapiens
cacuguuuuauuuuaauucaguu

SEQ ID NO: 271458 - RNA, 22 nt, Homo sapiens
cacuuaauaccguaucuucuaa

SEQ ID NO: 271459 - RNA, 18 nt, Homo sapiens
cacuuacacuuuaugcac

SEQ ID NO: 271460 - RNA, 16 nt, Homo sapiens
cacuuacagauggcag

SEQ ID NO: 271461 - RNA, 19 nt, Homo sapiens
cacuuagguccaaggucuc

SEQ ID NO: 271462 - RNA, 17 nt, Homo sapiens
cacuuaucccaagagaa

SEQ ID NO: 271463 - RNA, 21 nt, Homo sapiens
cacuucccacuauugcuugca

SEQ ID NO: 271464 - RNA, 17 nt, Homo sapiens
cacuucccuacauggag

SEQ ID NO: 271465 - RNA, 15 nt, Homo sapiens
cacuucucucaggau

SEQ ID NO: 271466 - RNA, 21 nt, Homo sapiens
cacuugccccuguuaccuaau

SEQ ID NO: 271467 - RNA, 19 nt, Homo sapiens
cacuugggucuucccugua

SEQ ID NO: 271468 - RNA, 20 nt, Homo sapiens
cacuuucugccagcaucugc

SEQ ID NO: 271469 - RNA, 16 nt, Homo sapiens
cacuuugauaccauug

SEQ ID NO: 271470 - RNA, 21 nt, Homo sapiens
cacaguuuugguugcuuuaau

SEQ ID NO: 271471 - RNA, 23 nt, Homo sapiens
cacauaccuggcccugugccuug

SEQ ID NO: 271472 - RNA, 17 nt, Homo sapiens
cacauacuacacauuca

SEQ ID NO: 271473 - RNA, 15 nt, Homo sapiens
cacauauaaauguac

SEQ ID NO: 271474 - RNA, 16 nt, Homo sapiens
cacauauaaauguacu

SEQ ID NO: 271475 - RNA, 20 nt, Homo sapiens
cacauccugaccuugcacaa

SEQ ID NO: 271476 - RNA, 16 nt, Homo sapiens
cacaucuaaccucauc

SEQ ID NO: 271477 - RNA, 13 nt, Homo sapiens
cacaucucacuuc

SEQ ID NO: 271478 - RNA, 15 nt, Homo sapiens
cacaucucuguagau

SEQ ID NO: 271479 - RNA, 19 nt, Homo sapiens
cacaugcacgugugugcac

SEQ ID NO: 271480 - RNA, 18 nt, Homo sapiens
cacaugccucucucaggc

SEQ ID NO: 271481 - RNA, 17 nt, Homo sapiens
cacaugucaguaccuuc

SEQ ID NO: 271482 - RNA, 19 nt, Homo sapiens
cacauguccaagaagccca

SEQ ID NO: 271483 - RNA, 16 nt, Homo sapiens
cacaugugcacaugca

SEQ ID NO: 271484 - RNA, 17 nt, Homo sapiens
cacauucgaguguuuca

SEQ ID NO: 271485 - RNA, 20 nt, Homo sapiens
cacauugguguuguacucaa

SEQ ID NO: 271486 - RNA, 13 nt, Homo sapiens
cacauuucuuuga

SEQ ID NO: 271487 - RNA, 14 nt, Homo sapiens
caccaagcccaguu

SEQ ID NO: 271488 - RNA, 20 nt, Homo sapiens
caccaauucuaaaguagcuu

SEQ ID NO: 271489 - RNA, 15 nt, Homo sapiens
caccacaugugcaca

SEQ ID NO: 271490 - RNA, 15 nt, Homo sapiens
caccagaggcugcaa

SEQ ID NO: 271491 - RNA, 13 nt, Homo sapiens
caccagcagccug

SEQ ID NO: 271492 - RNA, 11 nt, Homo sapiens
caccaguucuc

SEQ ID NO: 271493 - RNA, 22 nt, Homo sapiens
caccauauuaccacagacauac

SEQ ID NO: 271494 - RNA, 18 nt, Homo sapiens
caccaucaccagacaggu

SEQ ID NO: 271495 - RNA, 18 nt, Homo sapiens
caccaucucuuuaccucc

SEQ ID NO: 271496 - RNA, 19 nt, Homo sapiens
caccaucucuuuaccuccu

SEQ ID NO: 271497 - RNA, 17 nt, Homo sapiens
caccaugaagacagggu

SEQ ID NO: 271498 - RNA, 14 nt, Homo sapiens
cacccaaugcauau

SEQ ID NO: 271499 - RNA, 12 nt, Homo sapiens
caccccacugug

SEQ ID NO: 271500 - RNA, 16 nt, Homo sapiens
caccccgagggcugag

SEQ ID NO: 271501 - RNA, 15 nt, Homo sapiens
caccccuaaagagau

SEQ ID NO: 271502 - RNA, 17 nt, Homo sapiens
cacccucccacugccaa

SEQ ID NO: 271503 - RNA, 22 nt, Homo sapiens
cacccuccuuucaccacaugug

SEQ ID NO: 271504 - RNA, 16 nt, Homo sapiens
cacccucuccuuguca

SEQ ID NO: 271505 - RNA, 15 nt, Homo sapiens
cacccugaaagcccu

SEQ ID NO: 271506 - RNA, 22 nt, Homo sapiens
caccgcgcccagccucaucucu

SEQ ID NO: 271507 - RNA, 13 nt, Homo sapiens
caccucugcacaa

SEQ ID NO: 271508 - RNA, 19 nt, Homo sapiens
caccucugcacaagcugca

SEQ ID NO: 271509 - RNA, 22 nt, Homo sapiens
caccucuugauuaucuaaacua

SEQ ID NO: 271510 - RNA, 23 nt, Homo sapiens
caccugguuccggaauccugucc

SEQ ID NO: 271511 - RNA, 14 nt, Homo sapiens
caccuguaauccca

SEQ ID NO: 271512 - RNA, 12 nt, Homo sapiens
caccuugacaaa

SEQ ID NO: 271513 - RNA, 19 nt, Homo sapiens
caccuugacaaaaucuuuu

SEQ ID NO: 271514 - RNA, 23 nt, Homo sapiens
caccuuucauaaucuuugcuuua

SEQ ID NO: 271515 - RNA, 12 nt, Homo sapiens
cacgagaucaag

SEQ ID NO: 271516 - RNA, 16 nt, Homo sapiens
cacgagaucaagagau

SEQ ID NO: 271517 - RNA, 13 nt, Homo sapiens
cacgcgugcacac

SEQ ID NO: 271518 - RNA, 16 nt, Homo sapiens
cacgcuggagugcagu

SEQ ID NO: 271519 - RNA, 14 nt, Homo sapiens
cacggacccugugu

SEQ ID NO: 271520 - RNA, 22 nt, Homo sapiens
cacggacgacgcgagggcccca

SEQ ID NO: 271521 - RNA, 17 nt, Homo sapiens
cacggcucucaccagug

SEQ ID NO: 271522 - RNA, 18 nt, Homo sapiens
cacguaaaucuguucaag

SEQ ID NO: 271523 - RNA, 18 nt, Homo sapiens
cacgucuggcuucacaga

SEQ ID NO: 271524 - RNA, 19 nt, Homo sapiens
cacgugguccuaaucuucu

SEQ ID NO: 271525 - RNA, 23 nt, Homo sapiens
cacguuucuaaaggcuaccuuug

SEQ ID NO: 271526 - RNA, 16 nt, Homo sapiens
cacuaaaagaucgcag

SEQ ID NO: 271527 - RNA, 16 nt, Homo sapiens
cacuaacaaacucuga

SEQ ID NO: 271528 - RNA, 16 nt, Homo sapiens
cacuaaggugugcucu

SEQ ID NO: 271529 - RNA, 21 nt, Homo sapiens
cacuaaggugugcucugauca

SEQ ID NO: 271530 - RNA, 18 nt, Homo sapiens
cacuaauggggcggugag

SEQ ID NO: 271531 - RNA, 19 nt, Homo sapiens
cacuauaauguaagcucua

SEQ ID NO: 271532 - RNA, 19 nt, Homo sapiens
cacuauagccuaggugaca

SEQ ID NO: 271533 - RNA, 19 nt, Homo sapiens
cacuaugaagauguuucaa

SEQ ID NO: 271534 - RNA, 14 nt, Homo sapiens
cacuauuacuggga

SEQ ID NO: 271535 - RNA, 19 nt, Homo sapiens
cacuauuuaucugugcaaa

SEQ ID NO: 271536 - RNA, 21 nt, Homo sapiens
cacucacacggacacucaaaa

SEQ ID NO: 271537 - RNA, 13 nt, Homo sapiens
cacucagaaaaug

SEQ ID NO: 271538 - RNA, 12 nt, Homo sapiens
cacucagucucu

SEQ ID NO: 271539 - RNA, 11 nt, Homo sapiens
cacuccaugag

SEQ ID NO: 271540 - RNA, 12 nt, Homo sapiens
cacuccaugagu

SEQ ID NO: 271541 - RNA, 23 nt, Homo sapiens
cacucccaccugacacaccaggc

SEQ ID NO: 271542 - RNA, 23 nt, Homo sapiens
cacuccgagaggugggccagucu

SEQ ID NO: 271543 - RNA, 19 nt, Homo sapiens
cacucuccauuuaauaauu

SEQ ID NO: 271544 - RNA, 22 nt, Homo sapiens
cacucuuauugcccacgcugga

SEQ ID NO: 271545 - RNA, 17 nt, Homo sapiens
cacucuuguugugcucu

SEQ ID NO: 271546 - RNA, 20 nt, Homo sapiens
cacugaaaccucuguucuca

SEQ ID NO: 271547 - RNA, 16 nt, Homo sapiens
cacugaacaugcucau

SEQ ID NO: 271548 - RNA, 19 nt, Homo sapiens
cacugaacaugcucaugug

SEQ ID NO: 271549 - RNA, 14 nt, Homo sapiens
cacugagcugaggg

SEQ ID NO: 271550 - RNA, 15 nt, Homo sapiens
cacugauaaaaccau

SEQ ID NO: 271551 - RNA, 18 nt, Homo sapiens
cacugaugggcaaccccc

SEQ ID NO: 271552 - RNA, 13 nt, Homo sapiens
cacugauguauga

SEQ ID NO: 271553 - RNA, 19 nt, Homo sapiens
cacugcacuauagccuagg

SEQ ID NO: 271554 - RNA, 14 nt, Homo sapiens
cacugcagacauga

SEQ ID NO: 271555 - RNA, 14 nt, Homo sapiens
cacugcauaccaac

SEQ ID NO: 271556 - RNA, 19 nt, Homo sapiens
cacugcauaccaaccuggg

SEQ ID NO: 271557 - RNA, 12 nt, Homo sapiens
cacugccaaaga

SEQ ID NO: 271558 - RNA, 18 nt, Homo sapiens
cacugccauggaggcaca

SEQ ID NO: 271559 - RNA, 16 nt, Homo sapiens
cacugccugcccagug

SEQ ID NO: 271560 - RNA, 21 nt, Homo sapiens
cacugccugcccagugccauc

SEQ ID NO: 271561 - RNA, 15 nt, Homo sapiens
cacugcgaccacaag

SEQ ID NO: 271562 - RNA, 14 nt, Homo sapiens
cacugcucauuugg

SEQ ID NO: 271563 - RNA, 17 nt, Homo sapiens
cagauucucuuggcuca

SEQ ID NO: 271564 - RNA, 19 nt, Homo sapiens
cagauugaauuugccuaau

SEQ ID NO: 271565 - RNA, 17 nt, Homo sapiens
cagauuguaccauugag

SEQ ID NO: 271566 - RNA, 21 nt, Homo sapiens
cagauuucagggaagcccuga

SEQ ID NO: 271567 - RNA, 11 nt, Homo sapiens
cagcaaaggga

SEQ ID NO: 271568 - RNA, 22 nt, Homo sapiens
cagcaaagggaggaggugcaca

SEQ ID NO: 271569 - RNA, 21 nt, Homo sapiens
cagcaccaucucuuuaccucc

SEQ ID NO: 271570 - RNA, 15 nt, Homo sapiens
cagcacccaugggaa

SEQ ID NO: 271571 - RNA, 17 nt, Homo sapiens
cagcaccugauucucac

SEQ ID NO: 271572 - RNA, 21 nt, Homo sapiens
cagcacgguggugcccaagcc

SEQ ID NO: 271573 - RNA, 21 nt, Homo sapiens
cagcacuaaagcaguggacac

SEQ ID NO: 271574 - RNA, 18 nt, Homo sapiens
cagcagaaauuaaaugaa

SEQ ID NO: 271575 - RNA, 17 nt, Homo sapiens
cagcagccagcucucag

SEQ ID NO: 271576 - RNA, 17 nt, Homo sapiens
cagcagcccugccccac

SEQ ID NO: 271577 - RNA, 21 nt, Homo sapiens
cagcagcucaggcacacuucu

SEQ ID NO: 271578 - RNA, 14 nt, Homo sapiens
cagcaggcucucag

SEQ ID NO: 271579 - RNA, 14 nt, Homo sapiens
cagcaucuaaguaa

SEQ ID NO: 271580 - RNA, 15 nt, Homo sapiens
cagcauggagucaca

SEQ ID NO: 271581 - RNA, 15 nt, Homo sapiens
cagccaacuuuugca

SEQ ID NO: 271582 - RNA, 20 nt, Homo sapiens
cagccaagccagucaaggau

SEQ ID NO: 271583 - RNA, 12 nt, Homo sapiens
cagccacaacca

SEQ ID NO: 271584 - RNA, 16 nt, Homo sapiens
cagccacaaccaaaaa

SEQ ID NO: 271585 - RNA, 20 nt, Homo sapiens
cagccaccccaccccugagc

SEQ ID NO: 271586 - RNA, 16 nt, Homo sapiens
cagccagguucugacu

SEQ ID NO: 271587 - RNA, 13 nt, Homo sapiens
cagcccccugacc

SEQ ID NO: 271588 - RNA, 17 nt, Homo sapiens
cagcccccugaccugga

SEQ ID NO: 271589 - RNA, 13 nt, Homo sapiens
cagccucaagucu

SEQ ID NO: 271590 - RNA, 18 nt, Homo sapiens
cagccucacugcaucuuu

SEQ ID NO: 271591 - RNA, 19 nt, Homo sapiens
cagccucccgaguagcugg

SEQ ID NO: 271592 - RNA, 23 nt, Homo sapiens
cagccucccucccugugccagac

SEQ ID NO: 271593 - RNA, 22 nt, Homo sapiens
cagccucugaaaaccaauguuc

SEQ ID NO: 271594 - RNA, 13 nt, Homo sapiens
cagccugccugga

SEQ ID NO: 271595 - RNA, 15 nt, Homo sapiens
cagccugcuccagcu

SEQ ID NO: 271596 - RNA, 17 nt, Homo sapiens
cagccugcucuaguggg

SEQ ID NO: 271597 - RNA, 17 nt, Homo sapiens
cagccuggccaacaugg

SEQ ID NO: 271598 - RNA, 17 nt, Homo sapiens
cagccugggcccaucuc

SEQ ID NO: 271599 - RNA, 19 nt, Homo sapiens
cagccugggugacagagca

SEQ ID NO: 271600 - RNA, 13 nt, Homo sapiens
cagcgcugcaguu

SEQ ID NO: 271601 - RNA, 22 nt, Homo sapiens
cagcguuucuaugacacaugca

SEQ ID NO: 271602 - RNA, 13 nt, Homo sapiens
cagcuaaagcaau

SEQ ID NO: 271603 - RNA, 19 nt, Homo sapiens
cagcuaacauggaaguacu

SEQ ID NO: 271604 - RNA, 21 nt, Homo sapiens
cagcuaacauggaaguacuau

SEQ ID NO: 271605 - RNA, 22 nt, Homo sapiens
cagcuacgugugccccucucau

SEQ ID NO: 271606 - RNA, 20 nt, Homo sapiens
cagcuagaaaaggccuucuu

SEQ ID NO: 271607 - RNA, 13 nt, Homo sapiens
cagcucaccaucc

SEQ ID NO: 271608 - RNA, 22 nt, Homo sapiens
cagcuccucugccuuugugcuc

SEQ ID NO: 271609 - RNA, 14 nt, Homo sapiens
cagcuccuggacca

SEQ ID NO: 271610 - RNA, 19 nt, Homo sapiens
cagcucgggcccucuguga

SEQ ID NO: 271611 - RNA, 18 nt, Homo sapiens
cagcucuccccuucucug

SEQ ID NO: 271612 - RNA, 15 nt, Homo sapiens
cagcucugcaagaau

SEQ ID NO: 271613 - RNA, 20 nt, Homo sapiens
cagcugaccuuugucaucuu

SEQ ID NO: 271614 - RNA, 13 nt, Homo sapiens
cagcugacuaaac

SEQ ID NO: 271615 - RNA, 21 nt, Homo sapiens
cagaaucuccauuucugcuca

SEQ ID NO: 271616 - RNA, 21 nt, Homo sapiens
cagaaucucucuucuuuucaa

SEQ ID NO: 271617 - RNA, 19 nt, Homo sapiens
cagaaucuguuaccagagg

SEQ ID NO: 271618 - RNA, 12 nt, Homo sapiens
cagaauggagcu

SEQ ID NO: 271619 - RNA, 20 nt, Homo sapiens
cagaauucucagaaucucaa

SEQ ID NO: 271620 - RNA, 13 nt, Homo sapiens
cagacaaaccuug

SEQ ID NO: 271621 - RNA, 18 nt, Homo sapiens
cagacacaggcccggcuc

SEQ ID NO: 271622 - RNA, 21 nt, Homo sapiens
cagacagcagaauuccucuua

SEQ ID NO: 271623 - RNA, 17 nt, Homo sapiens
cagacauguggugggac

SEQ ID NO: 271624 - RNA, 12 nt, Homo sapiens
cagaccacugau

SEQ ID NO: 271625 - RNA, 22 nt, Homo sapiens
cagaccucggugggcauucaca

SEQ ID NO: 271626 - RNA, 20 nt, Homo sapiens
cagacgcacgugggucuuca

SEQ ID NO: 271627 - RNA, 16 nt, Homo sapiens
cagacuagaguacagu

SEQ ID NO: 271628 - RNA, 15 nt, Homo sapiens
cagacuccugugcaa

SEQ ID NO: 271629 - RNA, 16 nt, Homo sapiens
cagacuccugugcaac

SEQ ID NO: 271630 - RNA, 18 nt, Homo sapiens
cagacuccugugcaacuu

SEQ ID NO: 271631 - RNA, 20 nt, Homo sapiens
cagacucuacagaggccaug

SEQ ID NO: 271632 - RNA, 21 nt, Homo sapiens
cagacucuacagaggccaugg

SEQ ID NO: 271633 - RNA, 15 nt, Homo sapiens
cagacugaugccaga

SEQ ID NO: 271634 - RNA, 16 nt, Homo sapiens
cagacuucccacggcu

SEQ ID NO: 271635 - RNA, 20 nt, Homo sapiens
cagacuucccugaauguauu

SEQ ID NO: 271636 - RNA, 21 nt, Homo sapiens
cagacuugaaugcuaguuaua

SEQ ID NO: 271637 - RNA, 14 nt, Homo sapiens
cagagaaaguacuu

SEQ ID NO: 271638 - RNA, 21 nt, Homo sapiens
cagagaagggcuuggacucaa

SEQ ID NO: 271639 - RNA, 16 nt, Homo sapiens
cagagacugaauagau

SEQ ID NO: 271640 - RNA, 16 nt, Homo sapiens
cagagagcagugugga

SEQ ID NO: 271641 - RNA, 23 nt, Homo sapiens
cagagaggacuguugacauccaa

SEQ ID NO: 271642 - RNA, 19 nt, Homo sapiens
cagagauaauucuagcuuu

SEQ ID NO: 271643 - RNA, 21 nt, Homo sapiens
cagagauaauucuagcuuuga

SEQ ID NO: 271644 - RNA, 23 nt, Homo sapiens
cagagaugcaccaccaagccaag

SEQ ID NO: 271645 - RNA, 13 nt, Homo sapiens
cagagcaaacaga

SEQ ID NO: 271646 - RNA, 17 nt, Homo sapiens
cagagcagaacuuucac

SEQ ID NO: 271647 - RNA, 13 nt, Homo sapiens
cagagcagcucac

SEQ ID NO: 271648 - RNA, 15 nt, Homo sapiens
cagagcccaagggaa

SEQ ID NO: 271649 - RNA, 22 nt, Homo sapiens
cagagccguggccacccaggaa

SEQ ID NO: 271650 - RNA, 15 nt, Homo sapiens
cagagccucaaauga

SEQ ID NO: 271651 - RNA, 20 nt, Homo sapiens
cagagcgcaagcugggagca

SEQ ID NO: 271652 - RNA, 11 nt, Homo sapiens
cagagcugcca

SEQ ID NO: 271653 - RNA, 17 nt, Homo sapiens
cagagcugccaccugcc

SEQ ID NO: 271654 - RNA, 18 nt, Homo sapiens
cagagcugccaccugccu

SEQ ID NO: 271655 - RNA, 19 nt, Homo sapiens
cagaggagccaccaguucu

SEQ ID NO: 271656 - RNA, 21 nt, Homo sapiens
cagaggagccaccaguucuca

SEQ ID NO: 271657 - RNA, 19 nt, Homo sapiens
cagaggguggagaugucag

SEQ ID NO: 271658 - RNA, 23 nt, Homo sapiens
cagaggguggagaugucagucug

SEQ ID NO: 271659 - RNA, 12 nt, Homo sapiens
cagagucucacu

SEQ ID NO: 271660 - RNA, 19 nt, Homo sapiens
cagagucucacuguugccc

SEQ ID NO: 271661 - RNA, 20 nt, Homo sapiens
cagagucucgcucuguugcc

SEQ ID NO: 271662 - RNA, 20 nt, Homo sapiens
cagagugagacucugucuca

SEQ ID NO: 271663 - RNA, 12 nt, Homo sapiens
cagaguggcagu

SEQ ID NO: 271664 - RNA, 16 nt, Homo sapiens
cagaguggcccaagac

SEQ ID NO: 271665 - RNA, 16 nt, Homo sapiens
cagaguugaagacaga

SEQ ID NO: 271666 - RNA, 13 nt, Homo sapiens
cagauaaugugaa

SEQ ID NO: 271667 - RNA, 20 nt, Homo sapiens
cagauacugucucuuucaug

SEQ ID NO: 271668 - RNA, 12 nt, Homo sapiens
cagauacuuggg

SEQ ID NO: 271669 - RNA, 15 nt, Homo sapiens
cagaucccacuugca

SEQ ID NO: 271670 - RNA, 20 nt, Homo sapiens
cagaucccacuugcagccuc

SEQ ID NO: 271671 - RNA, 15 nt, Homo sapiens
cagauccccagccuc

SEQ ID NO: 271672 - RNA, 12 nt, Homo sapiens
cagaugcacaug

SEQ ID NO: 271673 - RNA, 20 nt, Homo sapiens
cagauguucugguaaacuga

SEQ ID NO: 271674 - RNA, 20 nt, Homo sapiens
cagauuccccccaucuccau

SEQ ID NO: 271675 - RNA, 19 nt, Homo sapiens
cagauugcaacaggcuggg

SEQ ID NO: 271676 - RNA, 22 nt, Homo sapiens
cagcaaacaggugcuaauuugu

SEQ ID NO: 271677 - RNA, 13 nt, Homo sapiens
cagcaacacaaag

SEQ ID NO: 271678 - RNA, 18 nt, Homo sapiens
cagcaagugagagcuggg

SEQ ID NO: 271679 - RNA, 13 nt, Homo sapiens
cagcacacaugca

SEQ ID NO: 271680 - RNA, 15 nt, Homo sapiens
cagcacacaugcauc

SEQ ID NO: 271681 - RNA, 15 nt, Homo sapiens
cagcaccuacagugu

SEQ ID NO: 271682 - RNA, 22 nt, Homo sapiens
cagcaccugauucucacagcaa

SEQ ID NO: 271683 - RNA, 17 nt, Homo sapiens
cagcacguaguuugcau

SEQ ID NO: 271684 - RNA, 23 nt, Homo sapiens
cagcacguguggccuguucuucu

SEQ ID NO: 271685 - RNA, 11 nt, Homo sapiens
cagcacugcac

SEQ ID NO: 271686 - RNA, 17 nt, Homo sapiens
cagcagaaauuaaauga

SEQ ID NO: 271687 - RNA, 20 nt, Homo sapiens
cagcagccagcucucagcca

SEQ ID NO: 271688 - RNA, 16 nt, Homo sapiens
cagcagccucacugca

SEQ ID NO: 271689 - RNA, 18 nt, Homo sapiens
cagcagccucacugcauc

SEQ ID NO: 271690 - RNA, 16 nt, Homo sapiens
cagcaggcucucaggc

SEQ ID NO: 271691 - RNA, 13 nt, Homo sapiens
cagcaucagcuca

SEQ ID NO: 271692 - RNA, 12 nt, Homo sapiens
cagcaucugcag

SEQ ID NO: 271693 - RNA, 16 nt, Homo sapiens
cagcauggagucacag

SEQ ID NO: 271694 - RNA, 17 nt, Homo sapiens
cagcauucucacuccua

SEQ ID NO: 271695 - RNA, 21 nt, Homo sapiens
cagcauuuagacccugcauuu

SEQ ID NO: 271696 - RNA, 11 nt, Homo sapiens
cagcauuuccc

SEQ ID NO: 271697 - RNA, 17 nt, Homo sapiens
cagccaaaaaggacuuu

SEQ ID NO: 271698 - RNA, 18 nt, Homo sapiens
cagccaaacccugucuga

SEQ ID NO: 271699 - RNA, 13 nt, Homo sapiens
cagccacauucua

SEQ ID NO: 271700 - RNA, 16 nt, Homo sapiens
cagccacuuucugcca

SEQ ID NO: 271701 - RNA, 17 nt, Homo sapiens
cagccacuuucugccag

SEQ ID NO: 271702 - RNA, 16 nt, Homo sapiens
cagccaugauucuuuu

SEQ ID NO: 271703 - RNA, 16 nt, Homo sapiens
cagccccagugcccac

SEQ ID NO: 271704 - RNA, 18 nt, Homo sapiens
cagcccgggucaucugua

SEQ ID NO: 271705 - RNA, 15 nt, Homo sapiens
cagccucacaguccu

SEQ ID NO: 271706 - RNA, 19 nt, Homo sapiens
cagccucacugcaucuuuc

SEQ ID NO: 271707 - RNA, 13 nt, Homo sapiens
cagccucaucucu

SEQ ID NO: 271708 - RNA, 19 nt, Homo sapiens
cagccucccgaauagcugg

SEQ ID NO: 271709 - RNA, 20 nt, Homo sapiens
cagccucccgaauagcuggg

SEQ ID NO: 271710 - RNA, 20 nt, Homo sapiens
cagccucccgaguagcuggg

SEQ ID NO: 271711 - RNA, 14 nt, Homo sapiens
cagccuccugagua

SEQ ID NO: 271712 - RNA, 20 nt, Homo sapiens
cagccuccugaguagcugga

SEQ ID NO: 271713 - RNA, 16 nt, Homo sapiens
cagccucuccacucau

SEQ ID NO: 271714 - RNA, 16 nt, Homo sapiens
cagccugccuggagua

SEQ ID NO: 271715 - RNA, 20 nt, Homo sapiens
cagccugcucuagugggaca

SEQ ID NO: 271716 - RNA, 18 nt, Homo sapiens
cagccugggcaaugugau

SEQ ID NO: 271717 - RNA, 17 nt, Homo sapiens
cagguuauaacaguguu

SEQ ID NO: 271718 - RNA, 22 nt, Homo sapiens
cagguucaugccaccauggcca

SEQ ID NO: 271719 - RNA, 21 nt, Homo sapiens
cagguucugacucuuggcaca

SEQ ID NO: 271720 - RNA, 18 nt, Homo sapiens
cagguugaagccaugucu

SEQ ID NO: 271721 - RNA, 15 nt, Homo sapiens
cagguuuuuggucug

SEQ ID NO: 271722 - RNA, 20 nt, Homo sapiens
caguaaaaggacagagauua

SEQ ID NO: 271723 - RNA, 14 nt, Homo sapiens
caguaccuccugcc

SEQ ID NO: 271724 - RNA, 14 nt, Homo sapiens
caguagauuuucca

SEQ ID NO: 271725 - RNA, 12 nt, Homo sapiens
caguagccagca

SEQ ID NO: 271726 - RNA, 17 nt, Homo sapiens
caguaguggugacugug

SEQ ID NO: 271727 - RNA, 13 nt, Homo sapiens
caguaguugcaau

SEQ ID NO: 271728 - RNA, 17 nt, Homo sapiens
caguaugaaaaugucau

SEQ ID NO: 271729 - RNA, 20 nt, Homo sapiens
caguaugugugcucuuaucc

SEQ ID NO: 271730 - RNA, 17 nt, Homo sapiens
caguauuacuucugcua

SEQ ID NO: 271731 - RNA, 15 nt, Homo sapiens
caguauuguacaaag

SEQ ID NO: 271732 - RNA, 18 nt, Homo sapiens
cagucaaggaguggcuua

SEQ ID NO: 271733 - RNA, 19 nt, Homo sapiens
cagucaaggaguggcuuac

SEQ ID NO: 271734 - RNA, 15 nt, Homo sapiens
cagucaaggauggau

SEQ ID NO: 271735 - RNA, 18 nt, Homo sapiens
cagucaaggauggaugca

SEQ ID NO: 271736 - RNA, 15 nt, Homo sapiens
cagucacaugugcuc

SEQ ID NO: 271737 - RNA, 20 nt, Homo sapiens
cagucacgcaagcuaguucc

SEQ ID NO: 271738 - RNA, 17 nt, Homo sapiens
cagucagaguugugcac

SEQ ID NO: 271739 - RNA, 20 nt, Homo sapiens
cagucagaguugugcacaug

SEQ ID NO: 271740 - RNA, 14 nt, Homo sapiens
cagucuuccauuug

SEQ ID NO: 271741 - RNA, 17 nt, Homo sapiens
cagucuuccauuugcaa

SEQ ID NO: 271742 - RNA, 22 nt, Homo sapiens
cagucuucuuccaugucuauua

SEQ ID NO: 271743 - RNA, 19 nt, Homo sapiens
cagucuuggcucacugcaa

SEQ ID NO: 271744 - RNA, 21 nt, Homo sapiens
cagugaaugauucaguguuaa

SEQ ID NO: 271745 - RNA, 23 nt, Homo sapiens
cagugacagaacuaagaugauca

SEQ ID NO: 271746 - RNA, 16 nt, Homo sapiens
cagugaccagucacug

SEQ ID NO: 271747 - RNA, 19 nt, Homo sapiens
cagugaccagucacugacc

SEQ ID NO: 271748 - RNA, 18 nt, Homo sapiens
cagugacuccacucugag

SEQ ID NO: 271749 - RNA, 17 nt, Homo sapiens
cagugagaagccagcuu

SEQ ID NO: 271750 - RNA, 16 nt, Homo sapiens
cagugccaaaaacaac

SEQ ID NO: 271751 - RNA, 15 nt, Homo sapiens
cagugcccccuggug

SEQ ID NO: 271752 - RNA, 21 nt, Homo sapiens
cagugcuguaaacuuaacugu

SEQ ID NO: 271753 - RNA, 14 nt, Homo sapiens
caguggacaccagg

SEQ ID NO: 271754 - RNA, 14 nt, Homo sapiens
caguggcuaccuac

SEQ ID NO: 271755 - RNA, 18 nt, Homo sapiens
caguggcuggaucuguga

SEQ ID NO: 271756 - RNA, 21 nt, Homo sapiens
cagugggaccccacagaguug

SEQ ID NO: 271757 - RNA, 15 nt, Homo sapiens
cagugguaugaucac

SEQ ID NO: 271758 - RNA, 22 nt, Homo sapiens
caguggugagaucacaguucau

SEQ ID NO: 271759 - RNA, 21 nt, Homo sapiens
cagugguuggcaauuguuuca

SEQ ID NO: 271760 - RNA, 15 nt, Homo sapiens
caggaauauuuucca

SEQ ID NO: 271761 - RNA, 22 nt, Homo sapiens
caggacacagggaaaucagggu

SEQ ID NO: 271762 - RNA, 17 nt, Homo sapiens
caggacagcuccuggac

SEQ ID NO: 271763 - RNA, 16 nt, Homo sapiens
caggacccugggacca

SEQ ID NO: 271764 - RNA, 20 nt, Homo sapiens
caggacccugggaccacaga

SEQ ID NO: 271765 - RNA, 20 nt, Homo sapiens
caggacuuccauuugcuuug

SEQ ID NO: 271766 - RNA, 21 nt, Homo sapiens
caggagagaaugcccagugac

SEQ ID NO: 271767 - RNA, 22 nt, Homo sapiens
caggagaggggcagaacagccg

SEQ ID NO: 271768 - RNA, 21 nt, Homo sapiens
caggagcugaggauaaagggc

SEQ ID NO: 271769 - RNA, 21 nt, Homo sapiens
caggagggguuaaagcugccg

SEQ ID NO: 271770 - RNA, 17 nt, Homo sapiens
caggaggugcuaucgca

SEQ ID NO: 271771 - RNA, 14 nt, Homo sapiens
caggaguucagggu

SEQ ID NO: 271772 - RNA, 21 nt, Homo sapiens
caggaguucagggucauagca

SEQ ID NO: 271773 - RNA, 23 nt, Homo sapiens
caggaguuggaagugugugaucu

SEQ ID NO: 271774 - RNA, 17 nt, Homo sapiens
caggaugcagccuuugc

SEQ ID NO: 271775 - RNA, 14 nt, Homo sapiens
caggcaacugaggc

SEQ ID NO: 271776 - RNA, 13 nt, Homo sapiens
caggcacacugag

SEQ ID NO: 271777 - RNA, 19 nt, Homo sapiens
caggcagaucccacuugca

SEQ ID NO: 271778 - RNA, 14 nt, Homo sapiens
caggcagcauuuag

SEQ ID NO: 271779 - RNA, 16 nt, Homo sapiens
caggcagguccagggu

SEQ ID NO: 271780 - RNA, 22 nt, Homo sapiens
caggcaugugccacccacccaa

SEQ ID NO: 271781 - RNA, 15 nt, Homo sapiens
caggcauguucucug

SEQ ID NO: 271782 - RNA, 19 nt, Homo sapiens
caggccaaacucaccugcc

SEQ ID NO: 271783 - RNA, 15 nt, Homo sapiens
caggccacauggcua

SEQ ID NO: 271784 - RNA, 18 nt, Homo sapiens
caggccauugucccugaa

SEQ ID NO: 271785 - RNA, 20 nt, Homo sapiens
caggccauugucccugaaga

SEQ ID NO: 271786 - RNA, 14 nt, Homo sapiens
caggccccugccac

SEQ ID NO: 271787 - RNA, 18 nt, Homo sapiens
caggcccggcuccaggcu

SEQ ID NO: 271788 - RNA, 16 nt, Homo sapiens
caggccgcacaucuca

SEQ ID NO: 271789 - RNA, 23 nt, Homo sapiens
caggcgugaccugccaggcacac

SEQ ID NO: 271790 - RNA, 21 nt, Homo sapiens
caggcucucaggccagcugcu

SEQ ID NO: 271791 - RNA, 16 nt, Homo sapiens
caggcuggagugcaau

SEQ ID NO: 271792 - RNA, 14 nt, Homo sapiens
caggcuggccaguc

SEQ ID NO: 271793 - RNA, 15 nt, Homo sapiens
caggcuggccagucc

SEQ ID NO: 271794 - RNA, 20 nt, Homo sapiens
caggcugggcuucaguggca

SEQ ID NO: 271795 - RNA, 13 nt, Homo sapiens
caggcuggucuca

SEQ ID NO: 271796 - RNA, 19 nt, Homo sapiens
cagggaaaauuauuugcau

SEQ ID NO: 271797 - RNA, 19 nt, Homo sapiens
cagggaagcugucccucac

SEQ ID NO: 271798 - RNA, 16 nt, Homo sapiens
cagggacauguggaaa

SEQ ID NO: 271799 - RNA, 15 nt, Homo sapiens
cagggacuugaaguu

SEQ ID NO: 271800 - RNA, 18 nt, Homo sapiens
cagggauucuuccugcuu

SEQ ID NO: 271801 - RNA, 20 nt, Homo sapiens
cagggcacaccgggcacuca

SEQ ID NO: 271802 - RNA, 18 nt, Homo sapiens
cagggcauuuugguccaa

SEQ ID NO: 271803 - RNA, 20 nt, Homo sapiens
cagggcccugagcucggugg

SEQ ID NO: 271804 - RNA, 22 nt, Homo sapiens
cagggcucagccuggugggccu

SEQ ID NO: 271805 - RNA, 19 nt, Homo sapiens
cagggcugaggccucucau

SEQ ID NO: 271806 - RNA, 20 nt, Homo sapiens
cagggcuuuacuccguaaca

SEQ ID NO: 271807 - RNA, 18 nt, Homo sapiens
caggggaguaugcaaaag

SEQ ID NO: 271808 - RNA, 21 nt, Homo sapiens
caggggcaaacaccugcugau

SEQ ID NO: 271809 - RNA, 19 nt, Homo sapiens
cagggucucacucugucgc

SEQ ID NO: 271810 - RNA, 21 nt, Homo sapiens
caggguuucaccauguuggcc

SEQ ID NO: 271811 - RNA, 21 nt, Homo sapiens
caggguuuugccauguuggcc

SEQ ID NO: 271812 - RNA, 15 nt, Homo sapiens
caggugcaaguucau

SEQ ID NO: 271813 - RNA, 11 nt, Homo sapiens
caggugcacag

SEQ ID NO: 271814 - RNA, 13 nt, Homo sapiens
caggugcacagac

SEQ ID NO: 271815 - RNA, 17 nt, Homo sapiens
caggugccucaagagaa

SEQ ID NO: 271816 - RNA, 14 nt, Homo sapiens
caggugcugccauc

SEQ ID NO: 271817 - RNA, 16 nt, Homo sapiens
caggugugaaccacca

SEQ ID NO: 271818 - RNA, 16 nt, Homo sapiens
cagguuccaaucagaa

SEQ ID NO: 271819 - RNA, 17 nt, Homo sapiens
cagguucugacucuugg

SEQ ID NO: 271820 - RNA, 15 nt, Homo sapiens
cagguuggugggggc

SEQ ID NO: 271821 - RNA, 16 nt, Homo sapiens
cagguuuacuauguuu

SEQ ID NO: 271822 - RNA, 16 nt, Homo sapiens
caguaacauagcugug

SEQ ID NO: 271823 - RNA, 20 nt, Homo sapiens
caguaccuccugccccaugc

SEQ ID NO: 271824 - RNA, 16 nt, Homo sapiens
caguagucagacugga

SEQ ID NO: 271825 - RNA, 19 nt, Homo sapiens
caguaguggugacuguggg

SEQ ID NO: 271826 - RNA, 14 nt, Homo sapiens
caguaguugcaaug

SEQ ID NO: 271827 - RNA, 23 nt, Homo sapiens
caguauuuagaagccaacuauga

SEQ ID NO: 271828 - RNA, 22 nt, Homo sapiens
caguauuuuccaaacuaccuuc

SEQ ID NO: 271829 - RNA, 23 nt, Homo sapiens
cagucaaagauacacaaucugaa

SEQ ID NO: 271830 - RNA, 13 nt, Homo sapiens
cagucaaccuggg

SEQ ID NO: 271831 - RNA, 12 nt, Homo sapiens
cagucacaugug

SEQ ID NO: 271832 - RNA, 17 nt, Homo sapiens
cagucacaugugcucuc

SEQ ID NO: 271833 - RNA, 18 nt, Homo sapiens
cagucagaguugugcaca

SEQ ID NO: 271834 - RNA, 19 nt, Homo sapiens
cagucagaguugugcacau

SEQ ID NO: 271835 - RNA, 21 nt, Homo sapiens
cagucauaacuaaauaaagcu

SEQ ID NO: 271836 - RNA, 16 nt, Homo sapiens
caguccauagcagaga

SEQ ID NO: 271837 - RNA, 19 nt, Homo sapiens
caguccugccucagccucc

SEQ ID NO: 271838 - RNA, 16 nt, Homo sapiens
cagucuacacucacaa

SEQ ID NO: 271839 - RNA, 13 nt, Homo sapiens
cagucucccuucc

SEQ ID NO: 271840 - RNA, 22 nt, Homo sapiens
cagucuuccauuugcaagggaa

SEQ ID NO: 271841 - RNA, 17 nt, Homo sapiens
cagugacagucagggaa

SEQ ID NO: 271842 - RNA, 19 nt, Homo sapiens
cagugcaacugacaaguua

SEQ ID NO: 271843 - RNA, 19 nt, Homo sapiens
cagugccaaaaacaacaac

SEQ ID NO: 271844 - RNA, 22 nt, Homo sapiens
cagugcccacaggaucagucug

SEQ ID NO: 271845 - RNA, 12 nt, Homo sapiens
cagugcucccuc

SEQ ID NO: 271846 - RNA, 16 nt, Homo sapiens
cagugcuguaaacuua

SEQ ID NO: 271847 - RNA, 16 nt, Homo sapiens
cagugcugugucauuc

SEQ ID NO: 271848 - RNA, 20 nt, Homo sapiens
cagugcugugucauuccaaa

SEQ ID NO: 271849 - RNA, 22 nt, Homo sapiens
cagugcugugucauuccaaaua

SEQ ID NO: 271850 - RNA, 14 nt, Homo sapiens
caguggaacuaaga

SEQ ID NO: 271851 - RNA, 19 nt, Homo sapiens
caguggcuggaucugugag

SEQ ID NO: 271852 - RNA, 21 nt, Homo sapiens
cagugggugccccccuugcca

SEQ ID NO: 271853 - RNA, 16 nt, Homo sapiens
cagugguuggcaauug

SEQ ID NO: 271854 - RNA, 22 nt, Homo sapiens
cagugguuggcaauuguuucaa

SEQ ID NO: 271855 - RNA, 20 nt, Homo sapiens
caguguguuucugaucugau

SEQ ID NO: 271856 - RNA, 20 nt, Homo sapiens
caguguuaaaugugaugaau

SEQ ID NO: 271857 - RNA, 11 nt, Homo sapiens
caguguugccc

SEQ ID NO: 271858 - RNA, 18 nt, Homo sapiens
caguuaagagaaaugagc

SEQ ID NO: 271859 - RNA, 14 nt, Homo sapiens
caguuagcucucaa

SEQ ID NO: 271860 - RNA, 15 nt, Homo sapiens
caguuccuucacuua

SEQ ID NO: 271861 - RNA, 13 nt, Homo sapiens
caguucugugguu

SEQ ID NO: 271862 - RNA, 23 nt, Homo sapiens
caguugcagcuguuuuguugaca

SEQ ID NO: 271863 - RNA, 18 nt, Homo sapiens
caguuguggccucauuca

SEQ ID NO: 271864 - RNA, 14 nt, Homo sapiens
caguuuccaucccc

SEQ ID NO: 271865 - RNA, 15 nt, Homo sapiens
caguuugcaccuguc

SEQ ID NO: 271866 - RNA, 20 nt, Homo sapiens
caguuugcuuuguaugcacu

SEQ ID NO: 271867 - RNA, 19 nt, Homo sapiens
caguuugguguguccuccg

SEQ ID NO: 271868 - RNA, 17 nt, Homo sapiens
caguuugguuucuagca

SEQ ID NO: 271869 - RNA, 23 nt, Homo sapiens
caguuuucaggaugauacacuau

SEQ ID NO: 271870 - RNA, 20 nt, Homo sapiens
caguuuugccuaauggcaaa

SEQ ID NO: 271871 - RNA, 11 nt, Homo sapiens
caucucuccag

SEQ ID NO: 271872 - RNA, 11 nt, Homo sapiens
caucucugcaa

SEQ ID NO: 271873 - RNA, 14 nt, Homo sapiens
caucucuguagaua

SEQ ID NO: 271874 - RNA, 22 nt, Homo sapiens
caucucuuguaaauacaugucc

SEQ ID NO: 271875 - RNA, 14 nt, Homo sapiens
caucucuuguauau

SEQ ID NO: 271876 - RNA, 23 nt, Homo sapiens
caucucuuuaccuccuaauucca

SEQ ID NO: 271877 - RNA, 19 nt, Homo sapiens
caucugcagccacuuucug

SEQ ID NO: 271878 - RNA, 23 nt, Homo sapiens
caucuguaacaauuauguuuuca

SEQ ID NO: 271879 - RNA, 14 nt, Homo sapiens
caucuguaccucug

SEQ ID NO: 271880 - RNA, 16 nt, Homo sapiens
caucuguuacacaaag

SEQ ID NO: 271881 - RNA, 14 nt, Homo sapiens
caucuuccaacuca

SEQ ID NO: 271882 - RNA, 13 nt, Homo sapiens
caucuuccuggac

SEQ ID NO: 271883 - RNA, 14 nt, Homo sapiens
caucuugcuaccag

SEQ ID NO: 271884 - RNA, 16 nt, Homo sapiens
caucuugcuaccagua

SEQ ID NO: 271885 - RNA, 22 nt, Homo sapiens
caucuugcucugcugacagaca

SEQ ID NO: 271886 - RNA, 23 nt, Homo sapiens
caucuugcucugcugacagacac

SEQ ID NO: 271887 - RNA, 23 nt, Homo sapiens
caucuuggucagauuugaacucu

SEQ ID NO: 271888 - RNA, 21 nt, Homo sapiens
caucuuucuuccaaacaggcu

SEQ ID NO: 271889 - RNA, 21 nt, Homo sapiens
caucuuucuucuauuuuauuc

SEQ ID NO: 271890 - RNA, 19 nt, Homo sapiens
caugaaguaauaugcacac

SEQ ID NO: 271891 - RNA, 12 nt, Homo sapiens
caugaauaugau

SEQ ID NO: 271892 - RNA, 20 nt, Homo sapiens
caugacauauuuuugcuuua

SEQ ID NO: 271893 - RNA, 18 nt, Homo sapiens
caugagaaauuaccaaaa

SEQ ID NO: 271894 - RNA, 21 nt, Homo sapiens
caugagccucagcauccuggc

SEQ ID NO: 271895 - RNA, 17 nt, Homo sapiens
caugaguuggcugggaa

SEQ ID NO: 271896 - RNA, 17 nt, Homo sapiens
caugaucaucacaauca

SEQ ID NO: 271897 - RNA, 18 nt, Homo sapiens
caugaucaucacaaucau

SEQ ID NO: 271898 - RNA, 22 nt, Homo sapiens
caugauuucauuucaacuguuu

SEQ ID NO: 271899 - RNA, 20 nt, Homo sapiens
caugcaagaaguacugccaa

SEQ ID NO: 271900 - RNA, 21 nt, Homo sapiens
caugcagcuguggcagaguua

SEQ ID NO: 271901 - RNA, 20 nt, Homo sapiens
caugccucucucaggccaaa

SEQ ID NO: 271902 - RNA, 17 nt, Homo sapiens
caugcguuuaaucacau

SEQ ID NO: 271903 - RNA, 17 nt, Homo sapiens
cauacucugcuuagaau

SEQ ID NO: 271904 - RNA, 22 nt, Homo sapiens
cauacuuuuucuuugaauuuag

SEQ ID NO: 271905 - RNA, 22 nt, Homo sapiens
cauagagaauauaaaaauaaag

SEQ ID NO: 271906 - RNA, 22 nt, Homo sapiens
cauagagagcaagacgcugugc

SEQ ID NO: 271907 - RNA, 15 nt, Homo sapiens
cauagaggugaggga

SEQ ID NO: 271908 - RNA, 23 nt, Homo sapiens
cauagaggugagggaagccugaa

SEQ ID NO: 271909 - RNA, 21 nt, Homo sapiens
cauagcagaccacacagaagg

SEQ ID NO: 271910 - RNA, 23 nt, Homo sapiens
cauaguacagguaaggugaggga

SEQ ID NO: 271911 - RNA, 21 nt, Homo sapiens
cauaguaugguggcuggguug

SEQ ID NO: 271912 - RNA, 13 nt, Homo sapiens
cauauaauguugu

SEQ ID NO: 271913 - RNA, 19 nt, Homo sapiens
cauauaauguuguuauuua

SEQ ID NO: 271914 - RNA, 20 nt, Homo sapiens
cauauccaacaugugcucag

SEQ ID NO: 271915 - RNA, 14 nt, Homo sapiens
cauaugaauaacau

SEQ ID NO: 271916 - RNA, 15 nt, Homo sapiens
cauaugauugugcac

SEQ ID NO: 271917 - RNA, 16 nt, Homo sapiens
cauaugauugugcaca

SEQ ID NO: 271918 - RNA, 18 nt, Homo sapiens
cauaugauugugcacaua

SEQ ID NO: 271919 - RNA, 21 nt, Homo sapiens
cauaugauugugcacauacuu

SEQ ID NO: 271920 - RNA, 17 nt, Homo sapiens
cauauguaccauguaca

SEQ ID NO: 271921 - RNA, 18 nt, Homo sapiens
cauauuaauucaugcaaa

SEQ ID NO: 271922 - RNA, 19 nt, Homo sapiens
cauauucaggaagcucagg

SEQ ID NO: 271923 - RNA, 23 nt, Homo sapiens
cauauucuuauguaugugaaagu

SEQ ID NO: 271924 - RNA, 17 nt, Homo sapiens
caucaagaauuuaauga

SEQ ID NO: 271925 - RNA, 21 nt, Homo sapiens
caucaagaugagagaacugga

SEQ ID NO: 271926 - RNA, 17 nt, Homo sapiens
caucaagaugugacaug

SEQ ID NO: 271927 - RNA, 12 nt, Homo sapiens
caucaagcacag

SEQ ID NO: 271928 - RNA, 17 nt, Homo sapiens
caucacuucccuacaug

SEQ ID NO: 271929 - RNA, 18 nt, Homo sapiens
caucagacuccugugcaa

SEQ ID NO: 271930 - RNA, 19 nt, Homo sapiens
caucaucuccugccuuccu

SEQ ID NO: 271931 - RNA, 22 nt, Homo sapiens
caucauggagggagaagaaaga

SEQ ID NO: 271932 - RNA, 16 nt, Homo sapiens
cauccacuagugcaaa

SEQ ID NO: 271933 - RNA, 14 nt, Homo sapiens
cauccacugugcca

SEQ ID NO: 271934 - RNA, 21 nt, Homo sapiens
cauccagagucccugccugga

SEQ ID NO: 271935 - RNA, 13 nt, Homo sapiens
cauccaguaucuu

SEQ ID NO: 271936 - RNA, 16 nt, Homo sapiens
cauccaguaucuugaa

SEQ ID NO: 271937 - RNA, 17 nt, Homo sapiens
cauccauagcaccucca

SEQ ID NO: 271938 - RNA, 18 nt, Homo sapiens
cauccccaggauccacuu

SEQ ID NO: 271939 - RNA, 21 nt, Homo sapiens
cauccuacccccugugccuug

SEQ ID NO: 271940 - RNA, 17 nt, Homo sapiens
cauccuccacaauagca

SEQ ID NO: 271941 - RNA, 19 nt, Homo sapiens
cauccugaccuugcacaaa

SEQ ID NO: 271942 - RNA, 21 nt, Homo sapiens
caucgcaguguucaaggccau

SEQ ID NO: 271943 - RNA, 22 nt, Homo sapiens
caucuaaccucaucuucuucac

SEQ ID NO: 271944 - RNA, 11 nt, Homo sapiens
caucuauguga

SEQ ID NO: 271945 - RNA, 22 nt, Homo sapiens
caucuaugugagaccauuuagc

SEQ ID NO: 271946 - RNA, 21 nt, Homo sapiens
caucucccagauaaugugaaa

SEQ ID NO: 271947 - RNA, 20 nt, Homo sapiens
caucucuacugaaaguacaa

SEQ ID NO: 271948 - RNA, 20 nt, Homo sapiens
caucucuccagcuagcaaaa

SEQ ID NO: 271949 - RNA, 23 nt, Homo sapiens
caucucucccuccccugccauuu

SEQ ID NO: 271950 - RNA, 13 nt, Homo sapiens
caucucugcaauc

SEQ ID NO: 271951 - RNA, 16 nt, Homo sapiens
caucucuuuaccuccu

SEQ ID NO: 271952 - RNA, 22 nt, Homo sapiens
caucugccuccccuucacuccc

SEQ ID NO: 271953 - RNA, 15 nt, Homo sapiens
caucugguccaguuc

SEQ ID NO: 271954 - RNA, 17 nt, Homo sapiens
caucuuaguauuugcau

SEQ ID NO: 271955 - RNA, 11 nt, Homo sapiens
caucuuccaag

SEQ ID NO: 271956 - RNA, 16 nt, Homo sapiens
caucuugaauuguaag

SEQ ID NO: 271957 - RNA, 18 nt, Homo sapiens
caucuuuuacauucugca

SEQ ID NO: 271958 - RNA, 23 nt, Homo sapiens
caucuuuuuuugguucuuugguc

SEQ ID NO: 271959 - RNA, 14 nt, Homo sapiens
caugaaaacagaaa

SEQ ID NO: 271960 - RNA, 15 nt, Homo sapiens
caugaaaaccugaag

SEQ ID NO: 271961 - RNA, 15 nt, Homo sapiens
caugaaaagcaaaua

SEQ ID NO: 271962 - RNA, 16 nt, Homo sapiens
caugaagauucuuucc

SEQ ID NO: 271963 - RNA, 18 nt, Homo sapiens
caugaaggagaggauuug

SEQ ID NO: 271964 - RNA, 16 nt, Homo sapiens
caugaauaucaguuau

SEQ ID NO: 271965 - RNA, 13 nt, Homo sapiens
caugaauaugauu

SEQ ID NO: 271966 - RNA, 20 nt, Homo sapiens
caugacacgaauauugcuga

SEQ ID NO: 271967 - RNA, 23 nt, Homo sapiens
caugaccaaaugcuuuuccucaa

SEQ ID NO: 271968 - RNA, 21 nt, Homo sapiens
caugacucggggguggggaaa

SEQ ID NO: 271969 - RNA, 18 nt, Homo sapiens
caugagaccacuguuauc

SEQ ID NO: 271970 - RNA, 19 nt, Homo sapiens
caugagaccacuguuauca

SEQ ID NO: 271971 - RNA, 17 nt, Homo sapiens
caugagaucuaggugag

SEQ ID NO: 271972 - RNA, 19 nt, Homo sapiens
caugagaucuaggugagga

SEQ ID NO: 271973 - RNA, 14 nt, Homo sapiens
caugagaugaugcc

SEQ ID NO: 271974 - RNA, 22 nt, Homo sapiens
caugagauggaggccuccuuau

SEQ ID NO: 271975 - RNA, 21 nt, Homo sapiens
caugagcuccuuaaggcucuu

SEQ ID NO: 271976 - RNA, 20 nt, Homo sapiens
caugagcuggcgggauugaa

SEQ ID NO: 271977 - RNA, 15 nt, Homo sapiens
caugaggaccaggug

SEQ ID NO: 271978 - RNA, 15 nt, Homo sapiens
caugagugccgugug

SEQ ID NO: 271979 - RNA, 14 nt, Homo sapiens
caugaucaucacaa

SEQ ID NO: 271980 - RNA, 21 nt, Homo sapiens
caugaugcuacccgagguuug

SEQ ID NO: 271981 - RNA, 17 nt, Homo sapiens
caugauguuuuccauga

SEQ ID NO: 271982 - RNA, 16 nt, Homo sapiens
caugauuucauuucaa

SEQ ID NO: 271983 - RNA, 19 nt, Homo sapiens
caugcacagcuaacaugga

SEQ ID NO: 271984 - RNA, 16 nt, Homo sapiens
caugcauaaaugcgau

SEQ ID NO: 271985 - RNA, 22 nt, Homo sapiens
caugcauccuccccucuccugc

SEQ ID NO: 271986 - RNA, 17 nt, Homo sapiens
caugcccuguaccugug

SEQ ID NO: 271987 - RNA, 16 nt, Homo sapiens
caugccuccucaggag

SEQ ID NO: 271988 - RNA, 17 nt, Homo sapiens
caugccucucucaggcc

SEQ ID NO: 271989 - RNA, 17 nt, Homo sapiens
caugccuggauggggcu

SEQ ID NO: 271990 - RNA, 17 nt, Homo sapiens
caugccuguagucccag

SEQ ID NO: 271991 - RNA, 16 nt, Homo sapiens
caugcuacacacugca

SEQ ID NO: 271992 - RNA, 17 nt, Homo sapiens
caugcucauguguacac

SEQ ID NO: 271993 - RNA, 18 nt, Homo sapiens
caugcucauguguacaca

SEQ ID NO: 271994 - RNA, 22 nt, Homo sapiens
caugcuccuggcccacugcauc

SEQ ID NO: 271995 - RNA, 22 nt, Homo sapiens
caugcuccuugccucugcucug

SEQ ID NO: 271996 - RNA, 20 nt, Homo sapiens
caugcugaacaucacagcuu

SEQ ID NO: 271997 - RNA, 17 nt, Homo sapiens
caugcugagucaugucu

SEQ ID NO: 271998 - RNA, 15 nt, Homo sapiens
caugcugcccuguga

SEQ ID NO: 271999 - RNA, 22 nt, Homo sapiens
caugcuugcauuauauuuguaa

SEQ ID NO: 272000 - RNA, 14 nt, Homo sapiens
cauggaaguacuau

SEQ ID NO: 272001 - RNA, 22 nt, Homo sapiens
cauggaaguacuauaauuuacc

SEQ ID NO: 272002 - RNA, 17 nt, Homo sapiens
cauggagucacagccac

SEQ ID NO: 272003 - RNA, 21 nt, Homo sapiens
cauggagucuucagguagaaa

SEQ ID NO: 272004 - RNA, 19 nt, Homo sapiens
cauggauauguuauacuga

SEQ ID NO: 272005 - RNA, 23 nt, Homo sapiens
cauggauauguuauacugaacca

SEQ ID NO: 272006 - RNA, 21 nt, Homo sapiens
cauggcagaaggcaaacccau

SEQ ID NO: 272007 - RNA, 17 nt, Homo sapiens
cauggcuguguuugcag

SEQ ID NO: 272008 - RNA, 22 nt, Homo sapiens
cauggcuuaguuuucauacaca

SEQ ID NO: 272009 - RNA, 21 nt, Homo sapiens
caugggaaggguccaucucag

SEQ ID NO: 272010 - RNA, 17 nt, Homo sapiens
caugggaaugaauguca

SEQ ID NO: 272011 - RNA, 18 nt, Homo sapiens
caugggucucuguagaaa

SEQ ID NO: 272012 - RNA, 17 nt, Homo sapiens
caugguccccauggcau

SEQ ID NO: 272013 - RNA, 17 nt, Homo sapiens
caugguggguccauggg

SEQ ID NO: 272014 - RNA, 17 nt, Homo sapiens
cauguaaacugugcacc

SEQ ID NO: 272015 - RNA, 19 nt, Homo sapiens
cauguaauuaaguacuaug

SEQ ID NO: 272016 - RNA, 22 nt, Homo sapiens
cauguacacggccucaagggau

SEQ ID NO: 272017 - RNA, 12 nt, Homo sapiens
cauguacaugaa

SEQ ID NO: 272018 - RNA, 16 nt, Homo sapiens
cauguaccuuguguac

SEQ ID NO: 272019 - RNA, 16 nt, Homo sapiens
cauguacgauucacuc

SEQ ID NO: 272020 - RNA, 18 nt, Homo sapiens
cauguacgauucacuccu

SEQ ID NO: 272021 - RNA, 20 nt, Homo sapiens
cauguacuuucccuguguac

SEQ ID NO: 272022 - RNA, 15 nt, Homo sapiens
cauguaucucaguac

SEQ ID NO: 272023 - RNA, 20 nt, Homo sapiens
ccaagaguguguccacugag

SEQ ID NO: 272024 - RNA, 20 nt, Homo sapiens
ccaagauggaugcgacccaa

SEQ ID NO: 272025 - RNA, 22 nt, Homo sapiens
ccaagcaggaaaugaaaauguc

SEQ ID NO: 272026 - RNA, 19 nt, Homo sapiens
ccaagcaguuucuuucaaa

SEQ ID NO: 272027 - RNA, 14 nt, Homo sapiens
ccaaggccaaagga

SEQ ID NO: 272028 - RNA, 15 nt, Homo sapiens
ccaaggccaaaggaa

SEQ ID NO: 272029 - RNA, 18 nt, Homo sapiens
ccaaggguacuaaggaau

SEQ ID NO: 272030 - RNA, 14 nt, Homo sapiens
ccaagguauuuuua

SEQ ID NO: 272031 - RNA, 11 nt, Homo sapiens
ccaaggucucc

SEQ ID NO: 272032 - RNA, 12 nt, Homo sapiens
ccaaggugggag

SEQ ID NO: 272033 - RNA, 16 nt, Homo sapiens
ccaagucaaagacauu

SEQ ID NO: 272034 - RNA, 18 nt, Homo sapiens
ccaaguccacaguggaac

SEQ ID NO: 272035 - RNA, 21 nt, Homo sapiens
ccaaguucuuaguugcuguau

SEQ ID NO: 272036 - RNA, 19 nt, Homo sapiens
ccaauaccguguggcccaa

SEQ ID NO: 272037 - RNA, 22 nt, Homo sapiens
ccaauaccguguggcccaagac

SEQ ID NO: 272038 - RNA, 18 nt, Homo sapiens
ccaauacugccaaccaga

SEQ ID NO: 272039 - RNA, 23 nt, Homo sapiens
ccaauacugccaaccagagcagc

SEQ ID NO: 272040 - RNA, 17 nt, Homo sapiens
ccaauagcaaggcugug

SEQ ID NO: 272041 - RNA, 20 nt, Homo sapiens
ccaauagcaaggcugugcau

SEQ ID NO: 272042 - RNA, 17 nt, Homo sapiens
ccaauauuuaccagacc

SEQ ID NO: 272043 - RNA, 21 nt, Homo sapiens
ccaauauuuaccagaccacaa

SEQ ID NO: 272044 - RNA, 14 nt, Homo sapiens
ccaaucauuuuaau

SEQ ID NO: 272045 - RNA, 19 nt, Homo sapiens
ccaaucccaccaacccuca

SEQ ID NO: 272046 - RNA, 22 nt, Homo sapiens
cauguuuauccauguacuuucc

SEQ ID NO: 272047 - RNA, 15 nt, Homo sapiens
cauuaaacuuaccug

SEQ ID NO: 272048 - RNA, 16 nt, Homo sapiens
cauuacaauugcaguu

SEQ ID NO: 272049 - RNA, 20 nt, Homo sapiens
cauuagccuaugugcaugca

SEQ ID NO: 272050 - RNA, 23 nt, Homo sapiens
cauuaguuguuagugauggagcu

SEQ ID NO: 272051 - RNA, 14 nt, Homo sapiens
cauuauaugcacua

SEQ ID NO: 272052 - RNA, 20 nt, Homo sapiens
cauuauaugcacuagcaaua

SEQ ID NO: 272053 - RNA, 20 nt, Homo sapiens
cauuaucagccugugccacg

SEQ ID NO: 272054 - RNA, 13 nt, Homo sapiens
cauuaucagucca

SEQ ID NO: 272055 - RNA, 19 nt, Homo sapiens
cauuaucuagauacuguau

SEQ ID NO: 272056 - RNA, 12 nt, Homo sapiens
cauuaucuauga

SEQ ID NO: 272057 - RNA, 18 nt, Homo sapiens
cauucaacagagacugaa

SEQ ID NO: 272058 - RNA, 22 nt, Homo sapiens
cauucacagcaagucacuggcc

SEQ ID NO: 272059 - RNA, 17 nt, Homo sapiens
cauucagggauagcacu

SEQ ID NO: 272060 - RNA, 19 nt, Homo sapiens
cauucagggauagcacuga

SEQ ID NO: 272061 - RNA, 9 nt, Homo sapiens
cauucaguc

SEQ ID NO: 272062 - RNA, 19 nt, Homo sapiens
cauucccauguugucaaua

SEQ ID NO: 272063 - RNA, 21 nt, Homo sapiens
cauuccccugaugggcccuga

SEQ ID NO: 272064 - RNA, 23 nt, Homo sapiens
cauuccccugaugggcccugacu

SEQ ID NO: 272065 - RNA, 17 nt, Homo sapiens
cauucuaguacuuggga

SEQ ID NO: 272066 - RNA, 19 nt, Homo sapiens
cauucuccuuguguuacua

SEQ ID NO: 272067 - RNA, 12 nt, Homo sapiens
cauucucugucu

SEQ ID NO: 272068 - RNA, 18 nt, Homo sapiens
cauucugcaagcacaucu

SEQ ID NO: 272069 - RNA, 20 nt, Homo sapiens
cauucuuucccaacaccucu

SEQ ID NO: 272070 - RNA, 21 nt, Homo sapiens
cauucuuucccaacaccucuu

SEQ ID NO: 272071 - RNA, 10 nt, Homo sapiens
cauugaacaa

SEQ ID NO: 272072 - RNA, 19 nt, Homo sapiens
cauugaagccgacucuggc

SEQ ID NO: 272073 - RNA, 15 nt, Homo sapiens
cauugagacauuugc

SEQ ID NO: 272074 - RNA, 12 nt, Homo sapiens
cauugagcucuc

SEQ ID NO: 272075 - RNA, 13 nt, Homo sapiens
cauugagcucucc

SEQ ID NO: 272076 - RNA, 14 nt, Homo sapiens
cauugaucugggau

SEQ ID NO: 272077 - RNA, 21 nt, Homo sapiens
cauuggaccuuuccugaggaa

SEQ ID NO: 272078 - RNA, 12 nt, Homo sapiens
cauugguguuga

SEQ ID NO: 272079 - RNA, 19 nt, Homo sapiens
cauugguguugacauacau

SEQ ID NO: 272080 - RNA, 15 nt, Homo sapiens
cauuguagcucuuug

SEQ ID NO: 272081 - RNA, 11 nt, Homo sapiens
cauugucuccc

SEQ ID NO: 272082 - RNA, 22 nt, Homo sapiens
cauugucuucugaccucuauaa

SEQ ID NO: 272083 - RNA, 17 nt, Homo sapiens
cauuguuaugcacuuuu

SEQ ID NO: 272084 - RNA, 18 nt, Homo sapiens
cauuguuaugcacuuuuc

SEQ ID NO: 272085 - RNA, 19 nt, Homo sapiens
cauuguucagaugcuucuu

SEQ ID NO: 272086 - RNA, 21 nt, Homo sapiens
cauuguucuugugaacccaaa

SEQ ID NO: 272087 - RNA, 18 nt, Homo sapiens
cauuuaaaaaaaaucccu

SEQ ID NO: 272088 - RNA, 19 nt, Homo sapiens
cauuuaagcugccuguaca

SEQ ID NO: 272089 - RNA, 16 nt, Homo sapiens
cauuuaauccucucaa

SEQ ID NO: 272090 - RNA, 12 nt, Homo sapiens
cauuuagcacau

SEQ ID NO: 272091 - RNA, 16 nt, Homo sapiens
cauuuagcacauacua

SEQ ID NO: 272092 - RNA, 21 nt, Homo sapiens
cauuuaggugaggaagcaaaa

SEQ ID NO: 272093 - RNA, 22 nt, Homo sapiens
cauuuaguuugauuauucagug

SEQ ID NO: 272094 - RNA, 15 nt, Homo sapiens
cauuucaaacagucu

SEQ ID NO: 272095 - RNA, 12 nt, Homo sapiens
cauuuccaugca

SEQ ID NO: 272096 - RNA, 15 nt, Homo sapiens
cauuuccaugcauaa

SEQ ID NO: 272097 - RNA, 19 nt, Homo sapiens
cauuuccugacagaaggac

SEQ ID NO: 272098 - RNA, 22 nt, Homo sapiens
cauuuccuuuuccuucaagccu

SEQ ID NO: 272099 - RNA, 22 nt, Homo sapiens
cauuucuauuucuccuccaugg

SEQ ID NO: 272100 - RNA, 16 nt, Homo sapiens
cauuucucauguugaa

SEQ ID NO: 272101 - RNA, 15 nt, Homo sapiens
cauuugcaccuaccu

SEQ ID NO: 272102 - RNA, 16 nt, Homo sapiens
cauuugcaccuaccuc

SEQ ID NO: 272103 - RNA, 18 nt, Homo sapiens
cauuugcuuacuuugcau

SEQ ID NO: 272104 - RNA, 23 nt, Homo sapiens
cauuugcuuacuuugcauuugug

SEQ ID NO: 272105 - RNA, 16 nt, Homo sapiens
cauuuggcaaugccau

SEQ ID NO: 272106 - RNA, 21 nt, Homo sapiens
cauuuggccgagucagcacgu

SEQ ID NO: 272107 - RNA, 14 nt, Homo sapiens
cauuugucaacaaa

SEQ ID NO: 272108 - RNA, 22 nt, Homo sapiens
cauuugucaacaaagucaccca

SEQ ID NO: 272109 - RNA, 11 nt, Homo sapiens
cauuugugccc

SEQ ID NO: 272110 - RNA, 14 nt, Homo sapiens
cauuuguuccauga

SEQ ID NO: 272111 - RNA, 15 nt, Homo sapiens
cauuuucugcauuua

SEQ ID NO: 272112 - RNA, 16 nt, Homo sapiens
cauuuuugaaaccaaa

SEQ ID NO: 272113 - RNA, 15 nt, Homo sapiens
ccaaaaauuacuuug

SEQ ID NO: 272114 - RNA, 14 nt, Homo sapiens
ccaaaacaguuaau

SEQ ID NO: 272115 - RNA, 16 nt, Homo sapiens
ccaaaagaaacugaca

SEQ ID NO: 272116 - RNA, 18 nt, Homo sapiens
ccaaacacauacaggaag

SEQ ID NO: 272117 - RNA, 19 nt, Homo sapiens
ccaaacugauccaguauaa

SEQ ID NO: 272118 - RNA, 15 nt, Homo sapiens
ccaaagacauguuua

SEQ ID NO: 272119 - RNA, 18 nt, Homo sapiens
ccaaagagaccagccucc

SEQ ID NO: 272120 - RNA, 19 nt, Homo sapiens
ccaaagcagugcaugcugu

SEQ ID NO: 272121 - RNA, 19 nt, Homo sapiens
ccaaagcccaaagugguau

SEQ ID NO: 272122 - RNA, 17 nt, Homo sapiens
ccaaagcuuucauguaa

SEQ ID NO: 272123 - RNA, 17 nt, Homo sapiens
ccaaagggccccuuucu

SEQ ID NO: 272124 - RNA, 14 nt, Homo sapiens
ccaaagugguauag

SEQ ID NO: 272125 - RNA, 15 nt, Homo sapiens
ccaaaucagcugcua

SEQ ID NO: 272126 - RNA, 21 nt, Homo sapiens
ccaaaucauacuuuuucuuug

SEQ ID NO: 272127 - RNA, 23 nt, Homo sapiens
ccaaaucauacuuuuucuuugaa

SEQ ID NO: 272128 - RNA, 16 nt, Homo sapiens
ccaaauguucacuggu

SEQ ID NO: 272129 - RNA, 15 nt, Homo sapiens
ccaaauuauggcaaa

SEQ ID NO: 272130 - RNA, 14 nt, Homo sapiens
ccaaauugaacuca

SEQ ID NO: 272131 - RNA, 18 nt, Homo sapiens
ccaaauugaacucacugc

SEQ ID NO: 272132 - RNA, 18 nt, Homo sapiens
ccaacacugccagcauuu

SEQ ID NO: 272133 - RNA, 20 nt, Homo sapiens
ccaacaucaacaucuugguc

SEQ ID NO: 272134 - RNA, 21 nt, Homo sapiens
ccaacauuaaaagccaccccc

SEQ ID NO: 272135 - RNA, 21 nt, Homo sapiens
ccaaccccagugccucaguca

SEQ ID NO: 272136 - RNA, 20 nt, Homo sapiens
ccaacguggggcagcacaga

SEQ ID NO: 272137 - RNA, 23 nt, Homo sapiens
ccaacguggggcagcacagagag

SEQ ID NO: 272138 - RNA, 18 nt, Homo sapiens
ccaagacucccagaucag

SEQ ID NO: 272139 - RNA, 23 nt, Homo sapiens
ccaagauaagaugaaucauuuaa

SEQ ID NO: 272140 - RNA, 22 nt, Homo sapiens
ccaagauggaugcgacccaaga

SEQ ID NO: 272141 - RNA, 10 nt, Homo sapiens
ccaagcacag

SEQ ID NO: 272142 - RNA, 16 nt, Homo sapiens
ccaagccaacccugug

SEQ ID NO: 272143 - RNA, 12 nt, Homo sapiens
ccaagcucugcu

SEQ ID NO: 272144 - RNA, 23 nt, Homo sapiens
ccaaggagggcagaucacuucag

SEQ ID NO: 272145 - RNA, 18 nt, Homo sapiens
ccaaggauggaccacaca

SEQ ID NO: 272146 - RNA, 14 nt, Homo sapiens
ccaagucauccucc

SEQ ID NO: 272147 - RNA, 22 nt, Homo sapiens
ccaagucauccucccaccucag

SEQ ID NO: 272148 - RNA, 17 nt, Homo sapiens
ccaagugccggacuagc

SEQ ID NO: 272149 - RNA, 14 nt, Homo sapiens
ccaaguuccacugc

SEQ ID NO: 272150 - RNA, 14 nt, Homo sapiens
ccaauagaaugagu

SEQ ID NO: 272151 - RNA, 16 nt, Homo sapiens
ccaauauuuaccagac

SEQ ID NO: 272152 - RNA, 17 nt, Homo sapiens
ccaauccuggacaugaa

SEQ ID NO: 272153 - RNA, 19 nt, Homo sapiens
ccaaugagaucauugugaa

SEQ ID NO: 272154 - RNA, 11 nt, Homo sapiens
ccaaugcuuug

SEQ ID NO: 272155 - RNA, 22 nt, Homo sapiens
ccaauggaugaagacccccucc

SEQ ID NO: 272156 - RNA, 15 nt, Homo sapiens
ccaaugggagcucau

SEQ ID NO: 272157 - RNA, 13 nt, Homo sapiens
ccaauugaaguaa

SEQ ID NO: 272158 - RNA, 22 nt, Homo sapiens
ccaauuuaaagaaaacuguuaa

SEQ ID NO: 272159 - RNA, 14 nt, Homo sapiens
ccaauuuacauacu

SEQ ID NO: 272160 - RNA, 13 nt, Homo sapiens
ccacaaccaaaaa

SEQ ID NO: 272161 - RNA, 14 nt, Homo sapiens
ccacaaccaaaaaa

SEQ ID NO: 272162 - RNA, 17 nt, Homo sapiens
ccacaaccaaaaaauuc

SEQ ID NO: 272163 - RNA, 16 nt, Homo sapiens
ccacaaccgaccagau

SEQ ID NO: 272164 - RNA, 18 nt, Homo sapiens
ccacaaccgaccagaugc

SEQ ID NO: 272165 - RNA, 18 nt, Homo sapiens
ccacacacacacacaugc

SEQ ID NO: 272166 - RNA, 20 nt, Homo sapiens
ccacacacacacacaugcau

SEQ ID NO: 272167 - RNA, 16 nt, Homo sapiens
ccacacccucacugcu

SEQ ID NO: 272168 - RNA, 22 nt, Homo sapiens
ccacacccuggaggauuucauc

SEQ ID NO: 272169 - RNA, 22 nt, Homo sapiens
ccacacccuggaguggcauggu

SEQ ID NO: 272170 - RNA, 18 nt, Homo sapiens
ccacacggcugaccucau

SEQ ID NO: 272171 - RNA, 14 nt, Homo sapiens
ccacacggucuuca

SEQ ID NO: 272172 - RNA, 16 nt, Homo sapiens
ccacacggucuucaca

SEQ ID NO: 272173 - RNA, 20 nt, Homo sapiens
ccacagaccuaggauuucau

SEQ ID NO: 272174 - RNA, 11 nt, Homo sapiens
ccacagacuca

SEQ ID NO: 272175 - RNA, 14 nt, Homo sapiens
ccacaggacauuuc

SEQ ID NO: 272176 - RNA, 16 nt, Homo sapiens
ccacaggcagcauuua

SEQ ID NO: 272177 - RNA, 13 nt, Homo sapiens
ccacagggugagc

SEQ ID NO: 272178 - RNA, 14 nt, Homo sapiens
ccauccucuguuac

SEQ ID NO: 272179 - RNA, 16 nt, Homo sapiens
ccaucuaccccuggau

SEQ ID NO: 272180 - RNA, 22 nt, Homo sapiens
ccaucuccauugcauucaugua

SEQ ID NO: 272181 - RNA, 14 nt, Homo sapiens
ccaucucuacugaa

SEQ ID NO: 272182 - RNA, 22 nt, Homo sapiens
ccaucucuacugaaaguacaaa

SEQ ID NO: 272183 - RNA, 13 nt, Homo sapiens
ccaucucuuuacc

SEQ ID NO: 272184 - RNA, 19 nt, Homo sapiens
ccaugaaccaagaccauug

SEQ ID NO: 272185 - RNA, 23 nt, Homo sapiens
ccaugagcuccuuaaggcucuuu

SEQ ID NO: 272186 - RNA, 19 nt, Homo sapiens
ccaugcugcccgcuucuca

SEQ ID NO: 272187 - RNA, 17 nt, Homo sapiens
ccauggacccaauauuu

SEQ ID NO: 272188 - RNA, 19 nt, Homo sapiens
ccauggcaugggggccuca

SEQ ID NO: 272189 - RNA, 23 nt, Homo sapiens
ccauggcaugggggccucagggc

SEQ ID NO: 272190 - RNA, 15 nt, Homo sapiens
ccaugggacagggag

SEQ ID NO: 272191 - RNA, 23 nt, Homo sapiens
ccacccccaaauuuucuuuuuau

SEQ ID NO: 272192 - RNA, 20 nt, Homo sapiens
ccacccuccuuucaccacau

SEQ ID NO: 272193 - RNA, 18 nt, Homo sapiens
ccaccucucucacuccuu

SEQ ID NO: 272194 - RNA, 17 nt, Homo sapiens
ccaccuuggcucaaguc

SEQ ID NO: 272195 - RNA, 13 nt, Homo sapiens
ccacgagggugcc

SEQ ID NO: 272196 - RNA, 16 nt, Homo sapiens
ccacgagggugccgug

SEQ ID NO: 272197 - RNA, 15 nt, Homo sapiens
ccacgcccccagaaa

SEQ ID NO: 272198 - RNA, 18 nt, Homo sapiens
ccacgcuggagugcagug

SEQ ID NO: 272199 - RNA, 12 nt, Homo sapiens
ccacggacucaa

SEQ ID NO: 272200 - RNA, 15 nt, Homo sapiens
ccacggccaggccag

SEQ ID NO: 272201 - RNA, 23 nt, Homo sapiens
ccacgggcccggguugggucacc

SEQ ID NO: 272202 - RNA, 22 nt, Homo sapiens
ccacguccagcuggaaggguca

SEQ ID NO: 272203 - RNA, 12 nt, Homo sapiens
ccacuacugcag

SEQ ID NO: 272204 - RNA, 18 nt, Homo sapiens
ccacuagugcaaaucaua

SEQ ID NO: 272205 - RNA, 19 nt, Homo sapiens
ccacuauugcuugcacaaa

SEQ ID NO: 272206 - RNA, 18 nt, Homo sapiens
ccacucaugugacucuuu

SEQ ID NO: 272207 - RNA, 16 nt, Homo sapiens
ccacuccucugacuca

SEQ ID NO: 272208 - RNA, 20 nt, Homo sapiens
ccacugaaaccucuguucuc

SEQ ID NO: 272209 - RNA, 14 nt, Homo sapiens
ccacugccaaagaa

SEQ ID NO: 272210 - RNA, 15 nt, Homo sapiens
ccacugccaaagaac

SEQ ID NO: 272211 - RNA, 19 nt, Homo sapiens
ccacugccugcccagugcc

SEQ ID NO: 272212 - RNA, 15 nt, Homo sapiens
ccacugcgaccacaa

SEQ ID NO: 272213 - RNA, 18 nt, Homo sapiens
ccacuggcccuguuucuc

SEQ ID NO: 272214 - RNA, 19 nt, Homo sapiens
ccacuggcccuguuucucc

SEQ ID NO: 272215 - RNA, 19 nt, Homo sapiens
ccacuuggucugugagaug

SEQ ID NO: 272216 - RNA, 19 nt, Homo sapiens
ccacuuucuagccagagga

SEQ ID NO: 272217 - RNA, 15 nt, Homo sapiens
ccacuuucugccagc

SEQ ID NO: 272218 - RNA, 15 nt, Homo sapiens
ccacuuugauaccau

SEQ ID NO: 272219 - RNA, 17 nt, Homo sapiens
ccagaaaagcaguggcu

SEQ ID NO: 272220 - RNA, 17 nt, Homo sapiens
ccagaaagcucaucuca

SEQ ID NO: 272221 - RNA, 12 nt, Homo sapiens
ccagaauuuccc

SEQ ID NO: 272222 - RNA, 16 nt, Homo sapiens
ccagacacauguccaa

SEQ ID NO: 272223 - RNA, 20 nt, Homo sapiens
ccagaccauucaggacacag

SEQ ID NO: 272224 - RNA, 13 nt, Homo sapiens
ccagacccggcug

SEQ ID NO: 272225 - RNA, 19 nt, Homo sapiens
ccagagaggguggugaccu

SEQ ID NO: 272226 - RNA, 18 nt, Homo sapiens
ccagagcguguagugaau

SEQ ID NO: 272227 - RNA, 16 nt, Homo sapiens
ccagagcuacugacua

SEQ ID NO: 272228 - RNA, 11 nt, Homo sapiens
ccagagcucag

SEQ ID NO: 272229 - RNA, 20 nt, Homo sapiens
ccagaggaagggacaccaag

SEQ ID NO: 272230 - RNA, 13 nt, Homo sapiens
ccagaggacaaag

SEQ ID NO: 272231 - RNA, 21 nt, Homo sapiens
ccagaggagccaccaguucuc

SEQ ID NO: 272232 - RNA, 15 nt, Homo sapiens
ccagagggcacucug

SEQ ID NO: 272233 - RNA, 18 nt, Homo sapiens
ccagaggucuggcccuau

SEQ ID NO: 272234 - RNA, 14 nt, Homo sapiens
ccagaguggcccaa

SEQ ID NO: 272235 - RNA, 17 nt, Homo sapiens
ccagaguggcccaagac

SEQ ID NO: 272236 - RNA, 22 nt, Homo sapiens
ccagaguuggacccgaccccaa

SEQ ID NO: 272237 - RNA, 13 nt, Homo sapiens
ccagaugccaggg

SEQ ID NO: 272238 - RNA, 22 nt, Homo sapiens
ccagaugccuucuccagacaaa

SEQ ID NO: 272239 - RNA, 12 nt, Homo sapiens
ccagauugcaac

SEQ ID NO: 272240 - RNA, 12 nt, Homo sapiens
ccagcacccaga

SEQ ID NO: 272241 - RNA, 18 nt, Homo sapiens
ccagcacccagaaucuca

SEQ ID NO: 272242 - RNA, 16 nt, Homo sapiens
ccagcacgguggugcc

SEQ ID NO: 272243 - RNA, 24 nt, Homo sapiens
ccagcacugcaccccaggcagcca

SEQ ID NO: 272244 - RNA, 20 nt, Homo sapiens
ccagcacuuugggaggccaa

SEQ ID NO: 272245 - RNA, 23 nt, Homo sapiens
ccagcaggauggcaggggcaaag

SEQ ID NO: 272246 - RNA, 19 nt, Homo sapiens
ccagcaucucccaguucau

SEQ ID NO: 272247 - RNA, 12 nt, Homo sapiens
ccagcaucugca

SEQ ID NO: 272248 - RNA, 13 nt, Homo sapiens
ccagcaucugcag

SEQ ID NO: 272249 - RNA, 14 nt, Homo sapiens
ccagccacugugau

SEQ ID NO: 272250 - RNA, 22 nt, Homo sapiens
ccagccaucccauuggcaaaag

SEQ ID NO: 272251 - RNA, 14 nt, Homo sapiens
ccagccucaucucu

SEQ ID NO: 272252 - RNA, 22 nt, Homo sapiens
ccagccugcuaauuccccagau

SEQ ID NO: 272253 - RNA, 20 nt, Homo sapiens
ccagccugggugacagagca

SEQ ID NO: 272254 - RNA, 12 nt, Homo sapiens
ccagccuugacc

SEQ ID NO: 272255 - RNA, 16 nt, Homo sapiens
ccagcuacaccuuucu

SEQ ID NO: 272256 - RNA, 13 nt, Homo sapiens
ccagcugcuuggg

SEQ ID NO: 272257 - RNA, 14 nt, Homo sapiens
ccagcuuaucucag

SEQ ID NO: 272258 - RNA, 14 nt, Homo sapiens
ccagcuuuccucau

SEQ ID NO: 272259 - RNA, 17 nt, Homo sapiens
ccagcuuuccucaucag

SEQ ID NO: 272260 - RNA, 16 nt, Homo sapiens
ccaggaaccucagggc

SEQ ID NO: 272261 - RNA, 19 nt, Homo sapiens
ccaggagcugaggauaaag

SEQ ID NO: 272262 - RNA, 21 nt, Homo sapiens
ccaggccaccuccccagcauu

SEQ ID NO: 272263 - RNA, 18 nt, Homo sapiens
ccaggcuggagugcaaug

SEQ ID NO: 272264 - RNA, 20 nt, Homo sapiens
ccaggcuggagugcaaugac

SEQ ID NO: 272265 - RNA, 18 nt, Homo sapiens
ccaggcuggcgugcagug

SEQ ID NO: 272266 - RNA, 20 nt, Homo sapiens
ccagggaagaagaucaacgc

SEQ ID NO: 272267 - RNA, 17 nt, Homo sapiens
ccagggacauguggaaa

SEQ ID NO: 272268 - RNA, 15 nt, Homo sapiens
ccagggaugacaugu

SEQ ID NO: 272269 - RNA, 13 nt, Homo sapiens
ccaggggagaccc

SEQ ID NO: 272270 - RNA, 13 nt, Homo sapiens
ccaggucagggag

SEQ ID NO: 272271 - RNA, 21 nt, Homo sapiens
ccaguaaaugggggugcauuu

SEQ ID NO: 272272 - RNA, 16 nt, Homo sapiens
ccaguaauugguccga

SEQ ID NO: 272273 - RNA, 18 nt, Homo sapiens
ccaguauaagacuacuga

SEQ ID NO: 272274 - RNA, 20 nt, Homo sapiens
ccagugaggcucugcccuug

SEQ ID NO: 272275 - RNA, 16 nt, Homo sapiens
ccaguguuguggauuu

SEQ ID NO: 272276 - RNA, 12 nt, Homo sapiens
ccaguuacauaa

SEQ ID NO: 272277 - RNA, 16 nt, Homo sapiens
ccaguuccuucacuua

SEQ ID NO: 272278 - RNA, 13 nt, Homo sapiens
ccaguucuuuuaa

SEQ ID NO: 272279 - RNA, 11 nt, Homo sapiens
ccaguuugcac

SEQ ID NO: 272280 - RNA, 19 nt, Homo sapiens
ccaguuuuguuuggaccaa

SEQ ID NO: 272281 - RNA, 21 nt, Homo sapiens
ccauaaaggggagggacucau

SEQ ID NO: 272282 - RNA, 20 nt, Homo sapiens
ccauaaccccggaagccaaa

SEQ ID NO: 272283 - RNA, 13 nt, Homo sapiens
ccauaauguuaca

SEQ ID NO: 272284 - RNA, 14 nt, Homo sapiens
ccauaauguuacau

SEQ ID NO: 272285 - RNA, 22 nt, Homo sapiens
ccauacuagaguucauggauau

SEQ ID NO: 272286 - RNA, 20 nt, Homo sapiens
ccauagcaagauugcuuaaa

SEQ ID NO: 272287 - RNA, 14 nt, Homo sapiens
ccauagcaccucca

SEQ ID NO: 272288 - RNA, 16 nt, Homo sapiens
ccauaucugugaaaug

SEQ ID NO: 272289 - RNA, 12 nt, Homo sapiens
ccauauuuucac

SEQ ID NO: 272290 - RNA, 13 nt, Homo sapiens
ccaucaagccacc

SEQ ID NO: 272291 - RNA, 12 nt, Homo sapiens
ccaucaccagac

SEQ ID NO: 272292 - RNA, 14 nt, Homo sapiens
ccaucaccagacag

SEQ ID NO: 272293 - RNA, 23 nt, Homo sapiens
ccaucagugcucccucacauguc

SEQ ID NO: 272294 - RNA, 16 nt, Homo sapiens
ccaucccagcacugca

SEQ ID NO: 272295 - RNA, 15 nt, Homo sapiens
ccaucccauuggcaa

SEQ ID NO: 272296 - RNA, 15 nt, Homo sapiens
ccaucuaugucccuu

SEQ ID NO: 272297 - RNA, 14 nt, Homo sapiens
ccaucuccauugca

SEQ ID NO: 272298 - RNA, 19 nt, Homo sapiens
ccaucuccauugcauucau

SEQ ID NO: 272299 - RNA, 19 nt, Homo sapiens
ccaucucuacaaaaagcau

SEQ ID NO: 272300 - RNA, 16 nt, Homo sapiens
ccaucucuuuaccucc

SEQ ID NO: 272301 - RNA, 16 nt, Homo sapiens
ccaugagaugaugcca

SEQ ID NO: 272302 - RNA, 20 nt, Homo sapiens
ccaugcugcccgcuucucac

SEQ ID NO: 272303 - RNA, 10 nt, Homo sapiens
ccauggacuu

SEQ ID NO: 272304 - RNA, 13 nt, Homo sapiens
ccauggaggcaca

SEQ ID NO: 272305 - RNA, 23 nt, Homo sapiens
ccaugggaaggguccaucucaga

SEQ ID NO: 272306 - RNA, 14 nt, Homo sapiens
ccaugggacaggga

SEQ ID NO: 272307 - RNA, 20 nt, Homo sapiens
ccauguaagcaccccuucau

SEQ ID NO: 272308 - RNA, 15 nt, Homo sapiens
ccauguucaccaaga

SEQ ID NO: 272309 - RNA, 20 nt, Homo sapiens
ccauguugcccagaauuuca

SEQ ID NO: 272310 - RNA, 17 nt, Homo sapiens
ccauguuggccaggcug

SEQ ID NO: 272311 - RNA, 21 nt, Homo sapiens
ccauguuuauccauguacuuu

SEQ ID NO: 272312 - RNA, 22 nt, Homo sapiens
ccauuagcauuugucaacaaag

SEQ ID NO: 272313 - RNA, 12 nt, Homo sapiens
ccauucaggaca

SEQ ID NO: 272314 - RNA, 13 nt, Homo sapiens
ccauugcauucau

SEQ ID NO: 272315 - RNA, 15 nt, Homo sapiens
ccauugguguugaca

SEQ ID NO: 272316 - RNA, 18 nt, Homo sapiens
ccauuuagaaaauguuca

SEQ ID NO: 272317 - RNA, 19 nt, Homo sapiens
ccauuuagcacacugcuug

SEQ ID NO: 272318 - RNA, 17 nt, Homo sapiens
ccauuucugagaucaaa

SEQ ID NO: 272319 - RNA, 18 nt, Homo sapiens
ccauuuggaaaauguuca

SEQ ID NO: 272320 - RNA, 21 nt, Homo sapiens
ccauuuggcaaugccaucauc

SEQ ID NO: 272321 - RNA, 16 nt, Homo sapiens
cccaaacccuucagug

SEQ ID NO: 272322 - RNA, 17 nt, Homo sapiens
cccaaagugugacucau

SEQ ID NO: 272323 - RNA, 13 nt, Homo sapiens
cccaacccuggcu

SEQ ID NO: 272324 - RNA, 22 nt, Homo sapiens
cccaagggccuggccugagcug

SEQ ID NO: 272325 - RNA, 17 nt, Homo sapiens
cccaaguucaugcagcu

SEQ ID NO: 272326 - RNA, 17 nt, Homo sapiens
cccaauauuuaccagac

SEQ ID NO: 272327 - RNA, 22 nt, Homo sapiens
cccacacccuggaggauuucau

SEQ ID NO: 272328 - RNA, 21 nt, Homo sapiens
cccacagaguuggggagauaa

SEQ ID NO: 272329 - RNA, 23 nt, Homo sapiens
cccacauauaaauguacuuuucc

SEQ ID NO: 272330 - RNA, 15 nt, Homo sapiens
cccaccaucaugucu

SEQ ID NO: 272331 - RNA, 15 nt, Homo sapiens
cccacccaacuaauu

SEQ ID NO: 272332 - RNA, 21 nt, Homo sapiens
cccacccuccuuucaccacau

SEQ ID NO: 272333 - RNA, 13 nt, Homo sapiens
ccgucagaucucu

SEQ ID NO: 272334 - RNA, 11 nt, Homo sapiens
ccgugaacugg

SEQ ID NO: 272335 - RNA, 11 nt, Homo sapiens
ccgugccuuca

SEQ ID NO: 272336 - RNA, 22 nt, Homo sapiens
ccgugucuucuaaauuugaaau

SEQ ID NO: 272337 - RNA, 13 nt, Homo sapiens
ccuguucccauga

SEQ ID NO: 272338 - RNA, 17 nt, Homo sapiens
cccacgagggugccgug

SEQ ID NO: 272339 - RNA, 16 nt, Homo sapiens
cccacggguguggcuc

SEQ ID NO: 272340 - RNA, 18 nt, Homo sapiens
cccacugaacaugcucau

SEQ ID NO: 272341 - RNA, 21 nt, Homo sapiens
cccacugccaaagaacuugga

SEQ ID NO: 272342 - RNA, 14 nt, Homo sapiens
cccacugcucauuu

SEQ ID NO: 272343 - RNA, 19 nt, Homo sapiens
cccacuggaggcaugugau

SEQ ID NO: 272344 - RNA, 17 nt, Homo sapiens
cccacuguggcugauuu

SEQ ID NO: 272345 - RNA, 15 nt, Homo sapiens
cccacuucugccaua

SEQ ID NO: 272346 - RNA, 14 nt, Homo sapiens
cccacuuggcauca

SEQ ID NO: 272347 - RNA, 20 nt, Homo sapiens
cccagagaggguggugaccu

SEQ ID NO: 272348 - RNA, 17 nt, Homo sapiens
cccagagugaacacucu

SEQ ID NO: 272349 - RNA, 14 nt, Homo sapiens
cccagaguggccca

SEQ ID NO: 272350 - RNA, 21 nt, Homo sapiens
cccagauagcuggcugggugg

SEQ ID NO: 272351 - RNA, 20 nt, Homo sapiens
cccagcccacuucugccaua

SEQ ID NO: 272352 - RNA, 23 nt, Homo sapiens
cccagcccagggcuccugcacuu

SEQ ID NO: 272353 - RNA, 21 nt, Homo sapiens
cccagccccuucugacccaug

SEQ ID NO: 272354 - RNA, 15 nt, Homo sapiens
cccagccucaucucu

SEQ ID NO: 272355 - RNA, 13 nt, Homo sapiens
cccagcuacuuga

SEQ ID NO: 272356 - RNA, 18 nt, Homo sapiens
cccagcugcucagugcaa

SEQ ID NO: 272357 - RNA, 20 nt, Homo sapiens
cccagcuggagcauugcagc

SEQ ID NO: 272358 - RNA, 22 nt, Homo sapiens
cccaggaggcccagcugcucag

SEQ ID NO: 272359 - RNA, 13 nt, Homo sapiens
cccaggauccacu

SEQ ID NO: 272360 - RNA, 14 nt, Homo sapiens
cccaggcagccacu

SEQ ID NO: 272361 - RNA, 19 nt, Homo sapiens
cccaggccuccccagcacc

SEQ ID NO: 272362 - RNA, 20 nt, Homo sapiens
cccaggccuccccagcaccu

SEQ ID NO: 272363 - RNA, 19 nt, Homo sapiens
cccaggcuggagugcaaug

SEQ ID NO: 272364 - RNA, 19 nt, Homo sapiens
cccagggcuccugcacuua

SEQ ID NO: 272365 - RNA, 18 nt, Homo sapiens
cccaggggccggccagug

SEQ ID NO: 272366 - RNA, 22 nt, Homo sapiens
cccaggugguuauggagagggu

SEQ ID NO: 272367 - RNA, 22 nt, Homo sapiens
cccagucagaguugugcacaug

SEQ ID NO: 272368 - RNA, 19 nt, Homo sapiens
cccagucuggaaugcagug

SEQ ID NO: 272369 - RNA, 10 nt, Homo sapiens
cccagugugu

SEQ ID NO: 272370 - RNA, 17 nt, Homo sapiens
cccauaugccugggcag

SEQ ID NO: 272371 - RNA, 20 nt, Homo sapiens
cccaucacugcgccacugcu

SEQ ID NO: 272372 - RNA, 23 nt, Homo sapiens
cccauccauuaggccagcaacgc

SEQ ID NO: 272373 - RNA, 22 nt, Homo sapiens
cccaucccacacccuggaggau

SEQ ID NO: 272374 - RNA, 17 nt, Homo sapiens
cccaucuccauugcauu

SEQ ID NO: 272375 - RNA, 15 nt, Homo sapiens
cccaucucccugcuu

SEQ ID NO: 272376 - RNA, 16 nt, Homo sapiens
cccaucucccugcuuu

SEQ ID NO: 272377 - RNA, 13 nt, Homo sapiens
cccaucucuacaa

SEQ ID NO: 272378 - RNA, 15 nt, Homo sapiens
cccaucucuacugaa

SEQ ID NO: 272379 - RNA, 14 nt, Homo sapiens
cccaugcuuaacau

SEQ ID NO: 272380 - RNA, 13 nt, Homo sapiens
cccauggccacuu

SEQ ID NO: 272381 - RNA, 23 nt, Homo sapiens
cccauguaagcaccccuucauuu

SEQ ID NO: 272382 - RNA, 24 nt, Homo sapiens
cccauucccugggaucuggugguc

SEQ ID NO: 272383 - RNA, 17 nt, Homo sapiens
ccccaaguuaguucaau

SEQ ID NO: 272384 - RNA, 11 nt, Homo sapiens
ccccacugaca

SEQ ID NO: 272385 - RNA, 19 nt, Homo sapiens
ccccacugcagacaugacc

SEQ ID NO: 272386 - RNA, 23 nt, Homo sapiens
ccccagacgcacgugggucuuca

SEQ ID NO: 272387 - RNA, 22 nt, Homo sapiens
ccccaggagggaggcaggggag

SEQ ID NO: 272388 - RNA, 15 nt, Homo sapiens
ccccaggcauugcca

SEQ ID NO: 272389 - RNA, 23 nt, Homo sapiens
ccccaggcugggcuguucacucu

SEQ ID NO: 272390 - RNA, 15 nt, Homo sapiens
ccccagugcccacag

SEQ ID NO: 272391 - RNA, 15 nt, Homo sapiens
ccccauaaucacuga

SEQ ID NO: 272392 - RNA, 21 nt, Homo sapiens
ccccaucuccauugcauucau

SEQ ID NO: 272393 - RNA, 17 nt, Homo sapiens
ccccaucugguccaguu

SEQ ID NO: 272394 - RNA, 22 nt, Homo sapiens
ccccaugccaccggcuccacuu

SEQ ID NO: 272395 - RNA, 15 nt, Homo sapiens
ccccauuccugggaa

SEQ ID NO: 272396 - RNA, 23 nt, Homo sapiens
cccccacugcagacaugacccga

SEQ ID NO: 272397 - RNA, 15 nt, Homo sapiens
cccccuuccauggac

SEQ ID NO: 272398 - RNA, 14 nt, Homo sapiens
ccccgaugggaugg

SEQ ID NO: 272399 - RNA, 18 nt, Homo sapiens
ccccucaacaccucugca

SEQ ID NO: 272400 - RNA, 17 nt, Homo sapiens
ccccucacaauccuugc

SEQ ID NO: 272401 - RNA, 22 nt, Homo sapiens
ccccuguagagugggagcugag

SEQ ID NO: 272402 - RNA, 19 nt, Homo sapiens
ccccuucauuuggcauucc

SEQ ID NO: 272403 - RNA, 16 nt, Homo sapiens
cccgagagcugggacu

SEQ ID NO: 272404 - RNA, 19 nt, Homo sapiens
cccgagagcugggacucag

SEQ ID NO: 272405 - RNA, 13 nt, Homo sapiens
cccgcaaugugcc

SEQ ID NO: 272406 - RNA, 17 nt, Homo sapiens
cccggggcuccacugaa

SEQ ID NO: 272407 - RNA, 15 nt, Homo sapiens
cccgucgacguagaa

SEQ ID NO: 272408 - RNA, 17 nt, Homo sapiens
cccuaaaucuugacuac

SEQ ID NO: 272409 - RNA, 11 nt, Homo sapiens
cccuacaugga

SEQ ID NO: 272410 - RNA, 19 nt, Homo sapiens
cccuaugugggugggacca

SEQ ID NO: 272411 - RNA, 22 nt, Homo sapiens
cccuaugugggugggaccacag

SEQ ID NO: 272412 - RNA, 21 nt, Homo sapiens
cccuauugcugcuugaggcaa

SEQ ID NO: 272413 - RNA, 19 nt, Homo sapiens
cccuauugguaaagaaugg

SEQ ID NO: 272414 - RNA, 18 nt, Homo sapiens
cccucaacaccucugcac

SEQ ID NO: 272415 - RNA, 23 nt, Homo sapiens
cccucaacaccucugcacaagcu

SEQ ID NO: 272416 - RNA, 15 nt, Homo sapiens
cccuccaccuuccau

SEQ ID NO: 272417 - RNA, 16 nt, Homo sapiens
cccuccauucugcacu

SEQ ID NO: 272418 - RNA, 13 nt, Homo sapiens
cccuccccaugca

SEQ ID NO: 272419 - RNA, 20 nt, Homo sapiens
cccuccuccagaccauucag

SEQ ID NO: 272420 - RNA, 13 nt, Homo sapiens
cccuccuucaucc

SEQ ID NO: 272421 - RNA, 20 nt, Homo sapiens
cccuccuuucauuugcuaga

SEQ ID NO: 272422 - RNA, 19 nt, Homo sapiens
cccucuaggaggugaugau

SEQ ID NO: 272423 - RNA, 13 nt, Homo sapiens
cccucucaugguc

SEQ ID NO: 272424 - RNA, 14 nt, Homo sapiens
cccucucaugguca

SEQ ID NO: 272425 - RNA, 19 nt, Homo sapiens
cccucuccucucuuccucc

SEQ ID NO: 272426 - RNA, 14 nt, Homo sapiens
cccucuccuuguca

SEQ ID NO: 272427 - RNA, 18 nt, Homo sapiens
cccugacagggccagugc

SEQ ID NO: 272428 - RNA, 21 nt, Homo sapiens
cccugacugggaguugaucgc

SEQ ID NO: 272429 - RNA, 12 nt, Homo sapiens
cccugcauucac

SEQ ID NO: 272430 - RNA, 11 nt, Homo sapiens
cccugccauca

SEQ ID NO: 272431 - RNA, 13 nt, Homo sapiens
cccugcccggcug

SEQ ID NO: 272432 - RNA, 15 nt, Homo sapiens
cccuggccuagcaua

SEQ ID NO: 272433 - RNA, 14 nt, Homo sapiens
cccugggaccacag

SEQ ID NO: 272434 - RNA, 20 nt, Homo sapiens
cccuggggagucugggcaca

SEQ ID NO: 272435 - RNA, 23 nt, Homo sapiens
cccugguggaaugcgggggagca

SEQ ID NO: 272436 - RNA, 17 nt, Homo sapiens
cccuguaccugugcacg

SEQ ID NO: 272437 - RNA, 14 nt, Homo sapiens
cccuguaugauucc

SEQ ID NO: 272438 - RNA, 17 nt, Homo sapiens
cccugucuaaaaauuca

SEQ ID NO: 272439 - RNA, 13 nt, Homo sapiens
cccugugccagac

SEQ ID NO: 272440 - RNA, 20 nt, Homo sapiens
cccugugccagaccucaaaa

SEQ ID NO: 272441 - RNA, 20 nt, Homo sapiens
cccugugucauuucaaacag

SEQ ID NO: 272442 - RNA, 12 nt, Homo sapiens
cccuucucugua

SEQ ID NO: 272443 - RNA, 14 nt, Homo sapiens
cccuucucuguauu

SEQ ID NO: 272444 - RNA, 16 nt, Homo sapiens
cccuucuuuucugacu

SEQ ID NO: 272445 - RNA, 15 nt, Homo sapiens
cccuuggacauuuua

SEQ ID NO: 272446 - RNA, 16 nt, Homo sapiens
cccuuggagccaaugg

SEQ ID NO: 272447 - RNA, 20 nt, Homo sapiens
cccuuggccaugggucccau

SEQ ID NO: 272448 - RNA, 20 nt, Homo sapiens
cccuuucaacagaauucacu

SEQ ID NO: 272449 - RNA, 20 nt, Homo sapiens
cccuuucugugugaagauca

SEQ ID NO: 272450 - RNA, 22 nt, Homo sapiens
cccuuuuauuaauacauucacc

SEQ ID NO: 272451 - RNA, 22 nt, Homo sapiens
cccuuuuuuggcugcugaaggc

SEQ ID NO: 272452 - RNA, 13 nt, Homo sapiens
ccgaaaucagaag

SEQ ID NO: 272453 - RNA, 17 nt, Homo sapiens
ccgaauagcugggacua

SEQ ID NO: 272454 - RNA, 11 nt, Homo sapiens
ccgacucuggc

SEQ ID NO: 272455 - RNA, 18 nt, Homo sapiens
ccgacugccaucuuggac

SEQ ID NO: 272456 - RNA, 15 nt, Homo sapiens
ccgagucucuucucc

SEQ ID NO: 272457 - RNA, 13 nt, Homo sapiens
ccgcaagcagcug

SEQ ID NO: 272458 - RNA, 12 nt, Homo sapiens
ccgcacaucuca

SEQ ID NO: 272459 - RNA, 16 nt, Homo sapiens
ccgcacugggcuuggg

SEQ ID NO: 272460 - RNA, 18 nt, Homo sapiens
ccgcauuuggauuggaug

SEQ ID NO: 272461 - RNA, 12 nt, Homo sapiens
ccggaagccaaa

SEQ ID NO: 272462 - RNA, 12 nt, Homo sapiens
ccggcugcgugg

SEQ ID NO: 272463 - RNA, 20 nt, Homo sapiens
ccgggaacagagaagugugg

SEQ ID NO: 272464 - RNA, 20 nt, Homo sapiens
ccgggaagagggugauugcu

SEQ ID NO: 272465 - RNA, 16 nt, Homo sapiens
ccggggcuccacugaa

SEQ ID NO: 272466 - RNA, 22 nt, Homo sapiens
ccguaucuucuaaauuugaaau

SEQ ID NO: 272467 - RNA, 19 nt, Homo sapiens
ccgucaauaggcaaagggg

SEQ ID NO: 272468 - RNA, 15 nt, Homo sapiens
ccgucagaucucugu

SEQ ID NO: 272469 - RNA, 16 nt, Homo sapiens
ccgugaggccagagac

SEQ ID NO: 272470 - RNA, 19 nt, Homo sapiens
ccgugaggccagagacaca

SEQ ID NO: 272471 - RNA, 21 nt, Homo sapiens
ccguguggcccaagaccccca

SEQ ID NO: 272472 - RNA, 18 nt, Homo sapiens
ccgugugugaaauucucu

SEQ ID NO: 272473 - RNA, 18 nt, Homo sapiens
ccuaaaaggaaaucucac

SEQ ID NO: 272474 - RNA, 21 nt, Homo sapiens
ccuaaaaggcagaguacaaag

SEQ ID NO: 272475 - RNA, 18 nt, Homo sapiens
ccuaagcagaccacugau

SEQ ID NO: 272476 - RNA, 23 nt, Homo sapiens
ccuaagccaugggagacacugau

SEQ ID NO: 272477 - RNA, 18 nt, Homo sapiens
ccuaaggacuucuuuaau

SEQ ID NO: 272478 - RNA, 15 nt, Homo sapiens
ccuaauccucuagga

SEQ ID NO: 272479 - RNA, 12 nt, Homo sapiens
ccuaaucuucca

SEQ ID NO: 272480 - RNA, 18 nt, Homo sapiens
ccuaaugaaugcauaaaa

SEQ ID NO: 272481 - RNA, 16 nt, Homo sapiens
ccuaaugcuugcugcu

SEQ ID NO: 272482 - RNA, 17 nt, Homo sapiens
cuaacuugucuuuggac

SEQ ID NO: 272483 - RNA, 15 nt, Homo sapiens
cuaacuuuccuucau

SEQ ID NO: 272484 - RNA, 23 nt, Homo sapiens
cuaacuuuccuucauucaaccca

SEQ ID NO: 272485 - RNA, 19 nt, Homo sapiens
cuaagaaauaugcacaaua

SEQ ID NO: 272486 - RNA, 16 nt, Homo sapiens
cuaagagucucuauua

SEQ ID NO: 272487 - RNA, 17 nt, Homo sapiens
cuaagcacgggccauau

SEQ ID NO: 272488 - RNA, 15 nt, Homo sapiens
cuaagcagaccacug

SEQ ID NO: 272489 - RNA, 21 nt, Homo sapiens
cuaagcgcucauucuauuuua

SEQ ID NO: 272490 - RNA, 15 nt, Homo sapiens
cuaaggacacagugg

SEQ ID NO: 272491 - RNA, 21 nt, Homo sapiens
cuaaggagcugauacuuugac

SEQ ID NO: 272492 - RNA, 14 nt, Homo sapiens
cuaaggugugcucu

SEQ ID NO: 272493 - RNA, 14 nt, Homo sapiens
ccuacucuguguca

SEQ ID NO: 272494 - RNA, 13 nt, Homo sapiens
ccuagaaacacac

SEQ ID NO: 272495 - RNA, 22 nt, Homo sapiens
ccuagagaaaacuugaauucau

SEQ ID NO: 272496 - RNA, 15 nt, Homo sapiens
ccuagagcacacugu

SEQ ID NO: 272497 - RNA, 20 nt, Homo sapiens
ccuagcacuuugggaggcca

SEQ ID NO: 272498 - RNA, 16 nt, Homo sapiens
ccuagcccuucucuca

SEQ ID NO: 272499 - RNA, 17 nt, Homo sapiens
ccuagcccuucucucau

SEQ ID NO: 272500 - RNA, 21 nt, Homo sapiens
ccuagccuuagaagucacaca

SEQ ID NO: 272501 - RNA, 20 nt, Homo sapiens
ccuaggauuucaugauuuca

SEQ ID NO: 272502 - RNA, 17 nt, Homo sapiens
ccuaggcauuugcugaa

SEQ ID NO: 272503 - RNA, 17 nt, Homo sapiens
ccuauaucuucaucugu

SEQ ID NO: 272504 - RNA, 16 nt, Homo sapiens
ccuauauuguuuucag

SEQ ID NO: 272505 - RNA, 19 nt, Homo sapiens
ccuauauuguuuucagugu

SEQ ID NO: 272506 - RNA, 23 nt, Homo sapiens
ccuauguuuuuguucaaagccag

SEQ ID NO: 272507 - RNA, 22 nt, Homo sapiens
ccucaaaugagaaaaugucuuu

SEQ ID NO: 272508 - RNA, 14 nt, Homo sapiens
ccucacucauuccc

SEQ ID NO: 272509 - RNA, 21 nt, Homo sapiens
ccucacucucgccaucuggca

SEQ ID NO: 272510 - RNA, 17 nt, Homo sapiens
ccucacugcaucuuucu

SEQ ID NO: 272511 - RNA, 22 nt, Homo sapiens
ccucacugcuguagacauuugc

SEQ ID NO: 272512 - RNA, 23 nt, Homo sapiens
ccucacugcuguagacauuugcu

SEQ ID NO: 272513 - RNA, 16 nt, Homo sapiens
ccucagaugcacauga

SEQ ID NO: 272514 - RNA, 22 nt, Homo sapiens
ccucagcagccucacugcaucu

SEQ ID NO: 272515 - RNA, 14 nt, Homo sapiens
ccucaggcaggugg

SEQ ID NO: 272516 - RNA, 17 nt, Homo sapiens
ccucaggcaggugggau

SEQ ID NO: 272517 - RNA, 23 nt, Homo sapiens
ccucagggucccugguggcagcu

SEQ ID NO: 272518 - RNA, 13 nt, Homo sapiens
ccucaggugaucc

SEQ ID NO: 272519 - RNA, 23 nt, Homo sapiens
ccucagucuacacucacaaucau

SEQ ID NO: 272520 - RNA, 14 nt, Homo sapiens
ccucauccauagca

SEQ ID NO: 272521 - RNA, 19 nt, Homo sapiens
ccucaucuccuaaaaggca

SEQ ID NO: 272522 - RNA, 16 nt, Homo sapiens
ccucaucuuucuucca

SEQ ID NO: 272523 - RNA, 20 nt, Homo sapiens
ccucaucuuuuuuugguucu

SEQ ID NO: 272524 - RNA, 14 nt, Homo sapiens
ccucaugcugccaa

SEQ ID NO: 272525 - RNA, 20 nt, Homo sapiens
ccucauuaccuugugcuaau

SEQ ID NO: 272526 - RNA, 13 nt, Homo sapiens
ccucauuagcauu

SEQ ID NO: 272527 - RNA, 19 nt, Homo sapiens
ccucauuagcauuuugcua

SEQ ID NO: 272528 - RNA, 21 nt, Homo sapiens
ccuccaaguccacaguggaac

SEQ ID NO: 272529 - RNA, 13 nt, Homo sapiens
ccuccacgccauu

SEQ ID NO: 272530 - RNA, 16 nt, Homo sapiens
ccuccacgccauuucc

SEQ ID NO: 272531 - RNA, 16 nt, Homo sapiens
ccuccagaauggagcu

SEQ ID NO: 272532 - RNA, 12 nt, Homo sapiens
ccuccagaguug

SEQ ID NO: 272533 - RNA, 13 nt, Homo sapiens
ccuccauccugag

SEQ ID NO: 272534 - RNA, 19 nt, Homo sapiens
ccuccaugaauaucaguua

SEQ ID NO: 272535 - RNA, 21 nt, Homo sapiens
ccucccaaagugcugggauua

SEQ ID NO: 272536 - RNA, 18 nt, Homo sapiens
ccucccacugccaaagaa

SEQ ID NO: 272537 - RNA, 11 nt, Homo sapiens
ccuccccaugc

SEQ ID NO: 272538 - RNA, 18 nt, Homo sapiens
ccuccugaagccacagca

SEQ ID NO: 272539 - RNA, 18 nt, Homo sapiens
ccuccugucccucaucca

SEQ ID NO: 272540 - RNA, 13 nt, Homo sapiens
ccucgagauccca

SEQ ID NO: 272541 - RNA, 20 nt, Homo sapiens
ccucgagaucccaacacugc

SEQ ID NO: 272542 - RNA, 14 nt, Homo sapiens
ccucgcugccagcu

SEQ ID NO: 272543 - RNA, 15 nt, Homo sapiens
ccucgcuggacucuc

SEQ ID NO: 272544 - RNA, 17 nt, Homo sapiens
ccucggugggcauucac

SEQ ID NO: 272545 - RNA, 15 nt, Homo sapiens
ccucuacaauuugcc

SEQ ID NO: 272546 - RNA, 16 nt, Homo sapiens
ccucuacaauuugcca

SEQ ID NO: 272547 - RNA, 16 nt, Homo sapiens
ccucucaauugucauu

SEQ ID NO: 272548 - RNA, 22 nt, Homo sapiens
ccucuccacucaugugacucuu

SEQ ID NO: 272549 - RNA, 13 nt, Homo sapiens
ccucucucaggcc

SEQ ID NO: 272550 - RNA, 12 nt, Homo sapiens
ccucucucugua

SEQ ID NO: 272551 - RNA, 13 nt, Homo sapiens
ccucucucuguaa

SEQ ID NO: 272552 - RNA, 12 nt, Homo sapiens
ccucucugcucu

SEQ ID NO: 272553 - RNA, 18 nt, Homo sapiens
ccucugggccaagucaaa

SEQ ID NO: 272554 - RNA, 18 nt, Homo sapiens
ccucuguccaggcacuga

SEQ ID NO: 272555 - RNA, 17 nt, Homo sapiens
ccucuuagaaaaaccac

SEQ ID NO: 272556 - RNA, 13 nt, Homo sapiens
ccucuuccacuuu

SEQ ID NO: 272557 - RNA, 21 nt, Homo sapiens
ccucuucucuacucuagggaa

SEQ ID NO: 272558 - RNA, 13 nt, Homo sapiens
ccucuuucccucc

SEQ ID NO: 272559 - RNA, 20 nt, Homo sapiens
ccucuuucccucccuuccuc

SEQ ID NO: 272560 - RNA, 20 nt, Homo sapiens
ccucuuuuucuagucuucau

SEQ ID NO: 272561 - RNA, 17 nt, Homo sapiens
ccugaaacaacccaaag

SEQ ID NO: 272562 - RNA, 21 nt, Homo sapiens
ccugaaguaagcaaagacuuu

SEQ ID NO: 272563 - RNA, 22 nt, Homo sapiens
ccugaaguaagcaaagacuuuc

SEQ ID NO: 272564 - RNA, 13 nt, Homo sapiens
ccugaagucacac

SEQ ID NO: 272565 - RNA, 22 nt, Homo sapiens
ccugaagucuuuguacagacaa

SEQ ID NO: 272566 - RNA, 19 nt, Homo sapiens
ccugaauuaucuauuucau

SEQ ID NO: 272567 - RNA, 20 nt, Homo sapiens
ccugaauuucucacaaagga

SEQ ID NO: 272568 - RNA, 16 nt, Homo sapiens
ccugacagggccagug

SEQ ID NO: 272569 - RNA, 20 nt, Homo sapiens
ccugacagggccagugcagu

SEQ ID NO: 272570 - RNA, 12 nt, Homo sapiens
ccugaccaaagg

SEQ ID NO: 272571 - RNA, 22 nt, Homo sapiens
ccugaccucaaguaauccaccu

SEQ ID NO: 272572 - RNA, 17 nt, Homo sapiens
ccugacucuuccccaua

SEQ ID NO: 272573 - RNA, 23 nt, Homo sapiens
ccugacugcugugggcugcucac

SEQ ID NO: 272574 - RNA, 20 nt, Homo sapiens
ccugagcucgguggacccag

SEQ ID NO: 272575 - RNA, 19 nt, Homo sapiens
ccugauuccuuuaaaugaa

SEQ ID NO: 272576 - RNA, 14 nt, Homo sapiens
ccugcagaagaugu

SEQ ID NO: 272577 - RNA, 18 nt, Homo sapiens
ccugcagauguucuggua

SEQ ID NO: 272578 - RNA, 18 nt, Homo sapiens
ccugcagcaaacacucca

SEQ ID NO: 272579 - RNA, 15 nt, Homo sapiens
ccugccaggcacacu

SEQ ID NO: 272580 - RNA, 18 nt, Homo sapiens
ccugccaggcacacugag

SEQ ID NO: 272581 - RNA, 14 nt, Homo sapiens
ccugcccaggugug

SEQ ID NO: 272582 - RNA, 16 nt, Homo sapiens
ccugcccagugcacac

SEQ ID NO: 272583 - RNA, 22 nt, Homo sapiens
ccugcccuuaccugccaggaag

SEQ ID NO: 272584 - RNA, 16 nt, Homo sapiens
ccugcggugcuaucuc

SEQ ID NO: 272585 - RNA, 17 nt, Homo sapiens
ccugcugauguggcaac

SEQ ID NO: 272586 - RNA, 16 nt, Homo sapiens
ccugcuggugggcaug

SEQ ID NO: 272587 - RNA, 20 nt, Homo sapiens
ccuggaaagaaaaagcaaua

SEQ ID NO: 272588 - RNA, 22 nt, Homo sapiens
ccuggacaggcuucgucucaga

SEQ ID NO: 272589 - RNA, 21 nt, Homo sapiens
ccuggaguacuuugaagaugu

SEQ ID NO: 272590 - RNA, 12 nt, Homo sapiens
ccuggaguggca

SEQ ID NO: 272591 - RNA, 22 nt, Homo sapiens
ccuggaguguaugacugcacau

SEQ ID NO: 272592 - RNA, 15 nt, Homo sapiens
ccuggaugaaguuau

SEQ ID NO: 272593 - RNA, 17 nt, Homo sapiens
ccuggauguacuaucca

SEQ ID NO: 272594 - RNA, 18 nt, Homo sapiens
ccuggcaagugggugaaa

SEQ ID NO: 272595 - RNA, 20 nt, Homo sapiens
ccuggcccacugcaucguuu

SEQ ID NO: 272596 - RNA, 16 nt, Homo sapiens
ccuggccccucagggu

SEQ ID NO: 272597 - RNA, 14 nt, Homo sapiens
ccuggccucaagug

SEQ ID NO: 272598 - RNA, 14 nt, Homo sapiens
ccuggcucaucucu

SEQ ID NO: 272599 - RNA, 21 nt, Homo sapiens
ccuggcuggaaugggggccag

SEQ ID NO: 272600 - RNA, 13 nt, Homo sapiens
ccugggaccacag

SEQ ID NO: 272601 - RNA, 14 nt, Homo sapiens
ccugggcaaagccu

SEQ ID NO: 272602 - RNA, 14 nt, Homo sapiens
ccugggcaauguga

SEQ ID NO: 272603 - RNA, 15 nt, Homo sapiens
ccugggcaaugugau

SEQ ID NO: 272604 - RNA, 14 nt, Homo sapiens
ccuggggcuucuga

SEQ ID NO: 272605 - RNA, 18 nt, Homo sapiens
ccuggguaacuagggaag

SEQ ID NO: 272606 - RNA, 22 nt, Homo sapiens
ccugggugacagagcaagugag

SEQ ID NO: 272607 - RNA, 14 nt, Homo sapiens
ccuggucaggcucu

SEQ ID NO: 272608 - RNA, 18 nt, Homo sapiens
ccuggucccuuggagaca

SEQ ID NO: 272609 - RNA, 19 nt, Homo sapiens
ccuggucccuuggagacaa

SEQ ID NO: 272610 - RNA, 22 nt, Homo sapiens
ccugucaccaugauucugucca

SEQ ID NO: 272611 - RNA, 16 nt, Homo sapiens
ccuguccccacccucc

SEQ ID NO: 272612 - RNA, 16 nt, Homo sapiens
ccugucuaaaaauuca

SEQ ID NO: 272613 - RNA, 13 nt, Homo sapiens
ccugugaaugcca

SEQ ID NO: 272614 - RNA, 14 nt, Homo sapiens
ccugugaaugccac

SEQ ID NO: 272615 - RNA, 20 nt, Homo sapiens
ccugugaguacuacaguccu

SEQ ID NO: 272616 - RNA, 15 nt, Homo sapiens
ccugugaucaagcaa

SEQ ID NO: 272617 - RNA, 18 nt, Homo sapiens
ccugugcaacuuucccaa

SEQ ID NO: 272618 - RNA, 17 nt, Homo sapiens
ccugugccagaccucaa

SEQ ID NO: 272619 - RNA, 15 nt, Homo sapiens
ccugugccuuuugcc

SEQ ID NO: 272620 - RNA, 14 nt, Homo sapiens
ccuguucacucuac

SEQ ID NO: 272621 - RNA, 20 nt, Homo sapiens
ccuguuuuaaaugaaccaaa

SEQ ID NO: 272622 - RNA, 13 nt, Homo sapiens
ccuuaaggcucuu

SEQ ID NO: 272623 - RNA, 17 nt, Homo sapiens
ccuuaagucaaaagaga

SEQ ID NO: 272624 - RNA, 14 nt, Homo sapiens
ccuuacaguaggag

SEQ ID NO: 272625 - RNA, 13 nt, Homo sapiens
ccuuagacagucc

SEQ ID NO: 272626 - RNA, 22 nt, Homo sapiens
ccuuagauguucuaagucuuuc

SEQ ID NO: 272627 - RNA, 13 nt, Homo sapiens
cucacaccuguaa

SEQ ID NO: 272628 - RNA, 20 nt, Homo sapiens
cucacaccuguaaucccagc

SEQ ID NO: 272629 - RNA, 22 nt, Homo sapiens
cucacacggacacucaaaagcu

SEQ ID NO: 272630 - RNA, 18 nt, Homo sapiens
cucacagaagaugaagca

SEQ ID NO: 272631 - RNA, 19 nt, Homo sapiens
cucacagagugcauuguga

SEQ ID NO: 272632 - RNA, 21 nt, Homo sapiens
cucacagagugcauugugagg

SEQ ID NO: 272633 - RNA, 14 nt, Homo sapiens
cucacaguguugcc

SEQ ID NO: 272634 - RNA, 15 nt, Homo sapiens
cucacauaucuguca

SEQ ID NO: 272635 - RNA, 13 nt, Homo sapiens
cucacaugcuccu

SEQ ID NO: 272636 - RNA, 14 nt, Homo sapiens
cucaccugccccuc

SEQ ID NO: 272637 - RNA, 22 nt, Homo sapiens
cucacuaggcccccacuugccu

SEQ ID NO: 272638 - RNA, 10 nt, Homo sapiens
cucacuccuu

SEQ ID NO: 272639 - RNA, 22 nt, Homo sapiens
cucacucugggcuguaacgugg

SEQ ID NO: 272640 - RNA, 14 nt, Homo sapiens
cucacucuguugac

SEQ ID NO: 272641 - RNA, 15 nt, Homo sapiens
cucacugaaacaugg

SEQ ID NO: 272642 - RNA, 21 nt, Homo sapiens
cucacugccugcagcugagau

SEQ ID NO: 272643 - RNA, 23 nt, Homo sapiens
cucacugcugcaaauacuguaua

SEQ ID NO: 272644 - RNA, 14 nt, Homo sapiens
cucacuggcuuuag

SEQ ID NO: 272645 - RNA, 14 nt, Homo sapiens
cucacuguauccag

SEQ ID NO: 272646 - RNA, 14 nt, Homo sapiens
cucacuguguugcc

SEQ ID NO: 272647 - RNA, 14 nt, Homo sapiens
cucacuuaucccaa

SEQ ID NO: 272648 - RNA, 13 nt, Homo sapiens
cucagaaggcaaa

SEQ ID NO: 272649 - RNA, 22 nt, Homo sapiens
ccuugauggagauauuuacaug

SEQ ID NO: 272650 - RNA, 20 nt, Homo sapiens
ccuugcaaaccaucccagca

SEQ ID NO: 272651 - RNA, 15 nt, Homo sapiens
ccuugccucugcucu

SEQ ID NO: 272652 - RNA, 17 nt, Homo sapiens
ccuugccucugcucugu

SEQ ID NO: 272653 - RNA, 22 nt, Homo sapiens
ccuugcugauggugacauugca

SEQ ID NO: 272654 - RNA, 22 nt, Homo sapiens
ccuuggccaugggucccauucu

SEQ ID NO: 272655 - RNA, 19 nt, Homo sapiens
ccuuggcuaguaaaagcca

SEQ ID NO: 272656 - RNA, 21 nt, Homo sapiens
ccuuggcuaguaaaagccauc

SEQ ID NO: 272657 - RNA, 22 nt, Homo sapiens
ccuuggcuuuuacugaagccuu

SEQ ID NO: 272658 - RNA, 23 nt, Homo sapiens
ccuuggugugcuguauccaucca

SEQ ID NO: 272659 - RNA, 16 nt, Homo sapiens
ccuuguaaagacugua

SEQ ID NO: 272660 - RNA, 19 nt, Homo sapiens
ccuuguaauucuaaaugaa

SEQ ID NO: 272661 - RNA, 13 nt, Homo sapiens
ccuugugaaggaa

SEQ ID NO: 272662 - RNA, 15 nt, Homo sapiens
ccuuguguacuuucu

SEQ ID NO: 272663 - RNA, 12 nt, Homo sapiens
ccuuuacaugaa

SEQ ID NO: 272664 - RNA, 15 nt, Homo sapiens
ccuuuaugagauugg

SEQ ID NO: 272665 - RNA, 14 nt, Homo sapiens
ccuuucacacugug

SEQ ID NO: 272666 - RNA, 20 nt, Homo sapiens
ccuuucacacuguggugucu

SEQ ID NO: 272667 - RNA, 20 nt, Homo sapiens
ccuuucaccacaugugcaca

SEQ ID NO: 272668 - RNA, 18 nt, Homo sapiens
ccuuucuccuuuguacuu

SEQ ID NO: 272669 - RNA, 12 nt, Homo sapiens
ccuuucugggaa

SEQ ID NO: 272670 - RNA, 18 nt, Homo sapiens
ccuuucuucagacacuga

SEQ ID NO: 272671 - RNA, 15 nt, Homo sapiens
ccuuugaaaugaaua

SEQ ID NO: 272672 - RNA, 16 nt, Homo sapiens
ccuuugaaaugaauau

SEQ ID NO: 272673 - RNA, 15 nt, Homo sapiens
ccuuugccugguaca

SEQ ID NO: 272674 - RNA, 20 nt, Homo sapiens
ccuuuggacuugucccggga

SEQ ID NO: 272675 - RNA, 22 nt, Homo sapiens
ccuuuggacuugucccgggaca

SEQ ID NO: 272676 - RNA, 21 nt, Homo sapiens
ccuuuggggugaacuaccuug

SEQ ID NO: 272677 - RNA, 14 nt, Homo sapiens
ccuuuguacuuugu

SEQ ID NO: 272678 - RNA, 15 nt, Homo sapiens
ccuuuguacuuugug

SEQ ID NO: 272679 - RNA, 14 nt, Homo sapiens
ccuuugucccagaa

SEQ ID NO: 272680 - RNA, 20 nt, Homo sapiens
ccuuuuauuaauacauucac

SEQ ID NO: 272681 - RNA, 16 nt, Homo sapiens
ccuuuugagugccuua

SEQ ID NO: 272682 - RNA, 17 nt, Homo sapiens
cgaaagagagagaaaca

SEQ ID NO: 272683 - RNA, 14 nt, Homo sapiens
cgaacaauucauau

SEQ ID NO: 272684 - RNA, 21 nt, Homo sapiens
cgaacaauucauauauuugaa

SEQ ID NO: 272685 - RNA, 22 nt, Homo sapiens
cgaauauaucaguaauuucaga

SEQ ID NO: 272686 - RNA, 23 nt, Homo sapiens
cgaauuuucacagccaugauucu

SEQ ID NO: 272687 - RNA, 12 nt, Homo sapiens
cgacagucccag

SEQ ID NO: 272688 - RNA, 19 nt, Homo sapiens
cgacuuguuuuugcacaug

SEQ ID NO: 272689 - RNA, 18 nt, Homo sapiens
cgacuuucugccuggagu

SEQ ID NO: 272690 - RNA, 19 nt, Homo sapiens
cgagaccagccuggccaac

SEQ ID NO: 272691 - RNA, 16 nt, Homo sapiens
cgagagcugggacuca

SEQ ID NO: 272692 - RNA, 17 nt, Homo sapiens
cgagaggugggccaguc

SEQ ID NO: 272693 - RNA, 14 nt, Homo sapiens
cgagaucaagagau

SEQ ID NO: 272694 - RNA, 19 nt, Homo sapiens
cgagaucacgccacugcac

SEQ ID NO: 272695 - RNA, 20 nt, Homo sapiens
cgagauugcaccacugcacu

SEQ ID NO: 272696 - RNA, 21 nt, Homo sapiens
cgagcaugccuggauggggcu

SEQ ID NO: 272697 - RNA, 20 nt, Homo sapiens
cgagcucccagcuccagcuu

SEQ ID NO: 272698 - RNA, 15 nt, Homo sapiens
cgagguuugcaaauc

SEQ ID NO: 272699 - RNA, 10 nt, Homo sapiens
cgaguacuuc

SEQ ID NO: 272700 - RNA, 14 nt, Homo sapiens
cgagucucuucucc

SEQ ID NO: 272701 - RNA, 13 nt, Homo sapiens
cgagugcauuugc

SEQ ID NO: 272702 - RNA, 11 nt, Homo sapiens
cgaguuacaga

SEQ ID NO: 272703 - RNA, 14 nt, Homo sapiens
cgaguuacagacaa

SEQ ID NO: 272704 - RNA, 15 nt, Homo sapiens
cgaguuacagacaaa

SEQ ID NO: 272705 - RNA, 17 nt, Homo sapiens
cgauagugguggugaac

SEQ ID NO: 272706 - RNA, 14 nt, Homo sapiens
cgauccccugucac

SEQ ID NO: 272707 - RNA, 12 nt, Homo sapiens
cgaucuggguuc

SEQ ID NO: 272708 - RNA, 18 nt, Homo sapiens
cgaucuggguucacugca

SEQ ID NO: 272709 - RNA, 13 nt, Homo sapiens
cgaugacaguguu

SEQ ID NO: 272710 - RNA, 18 nt, Homo sapiens
cgauuaauaacaggcaaa

SEQ ID NO: 272711 - RNA, 13 nt, Homo sapiens
cgauucacuccuu

SEQ ID NO: 272712 - RNA, 19 nt, Homo sapiens
cgauugcaggagucccugc

SEQ ID NO: 272713 - RNA, 18 nt, Homo sapiens
cgauuguuccugaaccga

SEQ ID NO: 272714 - RNA, 17 nt, Homo sapiens
cgauuuuguaucugcag

SEQ ID NO: 272715 - RNA, 21 nt, Homo sapiens
cgcaaccaccaccaaccacug

SEQ ID NO: 272716 - RNA, 17 nt, Homo sapiens
cgcacccuggcuggaau

SEQ ID NO: 272717 - RNA, 14 nt, Homo sapiens
cgccagacuuccca

SEQ ID NO: 272718 - RNA, 19 nt, Homo sapiens
cgccccccccuccccaugc

SEQ ID NO: 272719 - RNA, 19 nt, Homo sapiens
cgcccccuccgcccugcca

SEQ ID NO: 272720 - RNA, 19 nt, Homo sapiens
cgccccuggacaggcuucg

SEQ ID NO: 272721 - RNA, 21 nt, Homo sapiens
cgcccuguguccacagugauu

SEQ ID NO: 272722 - RNA, 18 nt, Homo sapiens
cgccucacugaaacaugg

SEQ ID NO: 272723 - RNA, 18 nt, Homo sapiens
cgccuucccuccugcuuu

SEQ ID NO: 272724 - RNA, 22 nt, Homo sapiens
cgcuaaaugaaaaucgugacaa

SEQ ID NO: 272725 - RNA, 20 nt, Homo sapiens
cgcuacccgggaagggggcu

SEQ ID NO: 272726 - RNA, 16 nt, Homo sapiens
cgcuggaccuugaacu

SEQ ID NO: 272727 - RNA, 15 nt, Homo sapiens
cgcuggagugcagug

SEQ ID NO: 272728 - RNA, 18 nt, Homo sapiens
cgcugugucagcauagaa

SEQ ID NO: 272729 - RNA, 12 nt, Homo sapiens
cgcuucuugccu

SEQ ID NO: 272730 - RNA, 15 nt, Homo sapiens
cgcuuuguugcccag

SEQ ID NO: 272731 - RNA, 12 nt, Homo sapiens
cggaaguuuuca

SEQ ID NO: 272732 - RNA, 20 nt, Homo sapiens
cggaaugaaccacaucuugc

SEQ ID NO: 272733 - RNA, 23 nt, Homo sapiens
cggagacggagucccaccuuggc

SEQ ID NO: 272734 - RNA, 19 nt, Homo sapiens
cggagcccugucuccucuc

SEQ ID NO: 272735 - RNA, 17 nt, Homo sapiens
cggagccuccucucuca

SEQ ID NO: 272736 - RNA, 18 nt, Homo sapiens
cggccuccugucccucau

SEQ ID NO: 272737 - RNA, 17 nt, Homo sapiens
cggcucucaccaguggc

SEQ ID NO: 272738 - RNA, 16 nt, Homo sapiens
cggcuuccaucugccc

SEQ ID NO: 272739 - RNA, 15 nt, Homo sapiens
cgggacaccuaggcu

SEQ ID NO: 272740 - RNA, 19 nt, Homo sapiens
cgggcacucagaagacacu

SEQ ID NO: 272741 - RNA, 21 nt, Homo sapiens
cgggcaggguguggggccaug

SEQ ID NO: 272742 - RNA, 21 nt, Homo sapiens
cgggccuggagaacuagagaa

SEQ ID NO: 272743 - RNA, 13 nt, Homo sapiens
cggguugggucac

SEQ ID NO: 272744 - RNA, 12 nt, Homo sapiens
cggucuucacaa

SEQ ID NO: 272745 - RNA, 13 nt, Homo sapiens
cggugagcauugu

SEQ ID NO: 272746 - RNA, 17 nt, Homo sapiens
cguacuuucacaucucu

SEQ ID NO: 272747 - RNA, 17 nt, Homo sapiens
cguaguuugcauuccag

SEQ ID NO: 272748 - RNA, 15 nt, Homo sapiens
cgucagcugggacac

SEQ ID NO: 272749 - RNA, 12 nt, Homo sapiens
cgucaucaucaa

SEQ ID NO: 272750 - RNA, 22 nt, Homo sapiens
cguccauguuuauccauguacu

SEQ ID NO: 272751 - RNA, 13 nt, Homo sapiens
cguccuacuguau

SEQ ID NO: 272752 - RNA, 15 nt, Homo sapiens
cgucgacguagaacc

SEQ ID NO: 272753 - RNA, 19 nt, Homo sapiens
cgucuugaucagacauuca

SEQ ID NO: 272754 - RNA, 16 nt, Homo sapiens
cgugaaaaugcuguau

SEQ ID NO: 272755 - RNA, 18 nt, Homo sapiens
cgugaccugccaggcaca

SEQ ID NO: 272756 - RNA, 23 nt, Homo sapiens
cgugaccugccaggcacacugag

SEQ ID NO: 272757 - RNA, 19 nt, Homo sapiens
cgugauuuugcuguagaag

SEQ ID NO: 272758 - RNA, 17 nt, Homo sapiens
cgugcacgcacacuguc

SEQ ID NO: 272759 - RNA, 19 nt, Homo sapiens
cgugguaggacuguagaaa

SEQ ID NO: 272760 - RNA, 15 nt, Homo sapiens
cgugugacuacuccc

SEQ ID NO: 272761 - RNA, 19 nt, Homo sapiens
cgugugcccacugaacaug

SEQ ID NO: 272762 - RNA, 16 nt, Homo sapiens
cgugugggcaauguuc

SEQ ID NO: 272763 - RNA, 20 nt, Homo sapiens
cguguuccccucuugucucc

SEQ ID NO: 272764 - RNA, 18 nt, Homo sapiens
cguuaugauaguguccca

SEQ ID NO: 272765 - RNA, 12 nt, Homo sapiens
cguuuaaucaca

SEQ ID NO: 272766 - RNA, 14 nt, Homo sapiens
cguuugaaucacag

SEQ ID NO: 272767 - RNA, 15 nt, Homo sapiens
cuaaaaaugcaacuu

SEQ ID NO: 272768 - RNA, 14 nt, Homo sapiens
cuaaaaccaucaua

SEQ ID NO: 272769 - RNA, 20 nt, Homo sapiens
cuaaaauauauauagaaaua

SEQ ID NO: 272770 - RNA, 15 nt, Homo sapiens
cuaaaauuagaugaa

SEQ ID NO: 272771 - RNA, 19 nt, Homo sapiens
cuaaaauuagaugaacuca

SEQ ID NO: 272772 - RNA, 17 nt, Homo sapiens
cuaaacugcugcaaaag

SEQ ID NO: 272773 - RNA, 16 nt, Homo sapiens
cucucaccuccuaaag

SEQ ID NO: 272774 - RNA, 18 nt, Homo sapiens
cucuccccacugcucauu

SEQ ID NO: 272775 - RNA, 18 nt, Homo sapiens
cucuccugcgugugccca

SEQ ID NO: 272776 - RNA, 21 nt, Homo sapiens
cucuccuuuucuccacuguca

SEQ ID NO: 272777 - RNA, 23 nt, Homo sapiens
cucucgcaagggaaguccuugca

SEQ ID NO: 272778 - RNA, 15 nt, Homo sapiens
cucucuaguuuccag

SEQ ID NO: 272779 - RNA, 11 nt, Homo sapiens
cucucucauga

SEQ ID NO: 272780 - RNA, 20 nt, Homo sapiens
cucucuuacugcuucaugua

SEQ ID NO: 272781 - RNA, 15 nt, Homo sapiens
cucucuucucuccag

SEQ ID NO: 272782 - RNA, 14 nt, Homo sapiens
cucugaaaccagug

SEQ ID NO: 272783 - RNA, 21 nt, Homo sapiens
cucugaggacacuaaccacgc

SEQ ID NO: 272784 - RNA, 19 nt, Homo sapiens
cucugagucccagagccaa

SEQ ID NO: 272785 - RNA, 13 nt, Homo sapiens
cucugaucccucu

SEQ ID NO: 272786 - RNA, 13 nt, Homo sapiens
cucugcacaagcu

SEQ ID NO: 272787 - RNA, 19 nt, Homo sapiens
cucugcaccggaccauuga

SEQ ID NO: 272788 - RNA, 14 nt, Homo sapiens
cucugcauguuaca

SEQ ID NO: 272789 - RNA, 20 nt, Homo sapiens
cucugcauuaucugagguca

SEQ ID NO: 272790 - RNA, 15 nt, Homo sapiens
cucugcauucuagua

SEQ ID NO: 272791 - RNA, 13 nt, Homo sapiens
cucugcccgggag

SEQ ID NO: 272792 - RNA, 22 nt, Homo sapiens
cucugccugaagucacacagug

SEQ ID NO: 272793 - RNA, 18 nt, Homo sapiens
cucugccuuugugcucug

SEQ ID NO: 272794 - RNA, 15 nt, Homo sapiens
cucugcucugugcac

SEQ ID NO: 272795 - RNA, 20 nt, Homo sapiens
cucuggacaggcauguucuc

SEQ ID NO: 272796 - RNA, 17 nt, Homo sapiens
cucuggcacucugaggu

SEQ ID NO: 272797 - RNA, 18 nt, Homo sapiens
cucuggcuaaauucaugc

SEQ ID NO: 272798 - RNA, 19 nt, Homo sapiens
cucuggcuaaauucaugcu

SEQ ID NO: 272799 - RNA, 17 nt, Homo sapiens
cucugggccaagucaaa

SEQ ID NO: 272800 - RNA, 22 nt, Homo sapiens
cucugggccaagucaaagacau

SEQ ID NO: 272801 - RNA, 14 nt, Homo sapiens
cucugguccauaga

SEQ ID NO: 272802 - RNA, 15 nt, Homo sapiens
cucuguaauugcaaa

SEQ ID NO: 272803 - RNA, 12 nt, Homo sapiens
cucuguagaaau

SEQ ID NO: 272804 - RNA, 16 nt, Homo sapiens
cucuguagauacaggg

SEQ ID NO: 272805 - RNA, 17 nt, Homo sapiens
cuaagcagaccacugau

SEQ ID NO: 272806 - RNA, 16 nt, Homo sapiens
cuaagcuauucaguaa

SEQ ID NO: 272807 - RNA, 18 nt, Homo sapiens
cuaagcuauucaguaaua

SEQ ID NO: 272808 - RNA, 20 nt, Homo sapiens
cuaagcucaaggcgugagga

SEQ ID NO: 272809 - RNA, 23 nt, Homo sapiens
cuaagugaggaugaaaaaauaac

SEQ ID NO: 272810 - RNA, 23 nt, Homo sapiens
cuaagugauccucccaccucagc

SEQ ID NO: 272811 - RNA, 16 nt, Homo sapiens
cuaaguguaccagaga

SEQ ID NO: 272812 - RNA, 20 nt, Homo sapiens
cuaauaaaaaacaccuucua

SEQ ID NO: 272813 - RNA, 22 nt, Homo sapiens
cuaauagaauaaaggcaguuuu

SEQ ID NO: 272814 - RNA, 22 nt, Homo sapiens
cuaaucagcauucucacuccua

SEQ ID NO: 272815 - RNA, 15 nt, Homo sapiens
cuaaugaaaccugug

SEQ ID NO: 272816 - RNA, 15 nt, Homo sapiens
cuaauuccacacccu

SEQ ID NO: 272817 - RNA, 22 nt, Homo sapiens
cuaauuuguuuucccuucuuac

SEQ ID NO: 272818 - RNA, 19 nt, Homo sapiens
cuacaaggcuggcagugac

SEQ ID NO: 272819 - RNA, 13 nt, Homo sapiens
cuacaauuugcca

SEQ ID NO: 272820 - RNA, 14 nt, Homo sapiens
cuacacacaguacg

SEQ ID NO: 272821 - RNA, 19 nt, Homo sapiens
cuacacucacaaucaucuu

SEQ ID NO: 272822 - RNA, 13 nt, Homo sapiens
cuacagagcagac

SEQ ID NO: 272823 - RNA, 14 nt, Homo sapiens
cuacagaggccaug

SEQ ID NO: 272824 - RNA, 17 nt, Homo sapiens
cuacaguuuuaacugug

SEQ ID NO: 272825 - RNA, 19 nt, Homo sapiens
cuacauggaguauauguca

SEQ ID NO: 272826 - RNA, 16 nt, Homo sapiens
cuacccucagucuaca

SEQ ID NO: 272827 - RNA, 20 nt, Homo sapiens
cuacccucagucuacacuca

SEQ ID NO: 272828 - RNA, 22 nt, Homo sapiens
cuacccuuccucaccacuuccc

SEQ ID NO: 272829 - RNA, 13 nt, Homo sapiens
cuaccucuuggcu

SEQ ID NO: 272830 - RNA, 14 nt, Homo sapiens
cuacuagaugugaa

SEQ ID NO: 272831 - RNA, 18 nt, Homo sapiens
cuacucgaguuacagaca

SEQ ID NO: 272832 - RNA, 20 nt, Homo sapiens
cuacucuagggaaaaaccag

SEQ ID NO: 272833 - RNA, 16 nt, Homo sapiens
cuacugaggugcuaug

SEQ ID NO: 272834 - RNA, 18 nt, Homo sapiens
cuacugggggcaacccug

SEQ ID NO: 272835 - RNA, 12 nt, Homo sapiens
cuagaaacacac

SEQ ID NO: 272836 - RNA, 14 nt, Homo sapiens
cuagaaacacacau

SEQ ID NO: 272837 - RNA, 23 nt, Homo sapiens
cuagaaacacacauuucuuugaa

SEQ ID NO: 272838 - RNA, 17 nt, Homo sapiens
cuagaaacugacacaug

SEQ ID NO: 272839 - RNA, 19 nt, Homo sapiens
cuagagaaggacccggagg

SEQ ID NO: 272840 - RNA, 18 nt, Homo sapiens
cuagagcacacuguagca

SEQ ID NO: 272841 - RNA, 15 nt, Homo sapiens
cuagaguucauggau

SEQ ID NO: 272842 - RNA, 17 nt, Homo sapiens
cuagaguucauggauau

SEQ ID NO: 272843 - RNA, 15 nt, Homo sapiens
cuagauuuaugaaua

SEQ ID NO: 272844 - RNA, 18 nt, Homo sapiens
cuagcaaaauuacuacca

SEQ ID NO: 272845 - RNA, 16 nt, Homo sapiens
cuagcacuuggagcca

SEQ ID NO: 272846 - RNA, 23 nt, Homo sapiens
cuagcagaaaucuagaagacugu

SEQ ID NO: 272847 - RNA, 16 nt, Homo sapiens
cuagcauggcugccaa

SEQ ID NO: 272848 - RNA, 23 nt, Homo sapiens
cuagcauuguaaaauuauuucau

SEQ ID NO: 272849 - RNA, 19 nt, Homo sapiens
cuaggaaucaugugccaag

SEQ ID NO: 272850 - RNA, 14 nt, Homo sapiens
cuaggaggucucua

SEQ ID NO: 272851 - RNA, 17 nt, Homo sapiens
cuaggcauuugcugaau

SEQ ID NO: 272852 - RNA, 21 nt, Homo sapiens
cuaggccucuccaguuugcac

SEQ ID NO: 272853 - RNA, 17 nt, Homo sapiens
cuagguaggggcccacu

SEQ ID NO: 272854 - RNA, 16 nt, Homo sapiens
cuaguagucauuucau

SEQ ID NO: 272855 - RNA, 14 nt, Homo sapiens
cuagucaguuggcu

SEQ ID NO: 272856 - RNA, 15 nt, Homo sapiens
cuagucaguuggcua

SEQ ID NO: 272857 - RNA, 16 nt, Homo sapiens
cuagucauucuucccu

SEQ ID NO: 272858 - RNA, 23 nt, Homo sapiens
cuagugcaguuuuuuucuugucu

SEQ ID NO: 272859 - RNA, 17 nt, Homo sapiens
cuagugguggguacuca

SEQ ID NO: 272860 - RNA, 14 nt, Homo sapiens
cuaguguugcuugg

SEQ ID NO: 272861 - RNA, 17 nt, Homo sapiens
cuaguucugccaggaga

SEQ ID NO: 272862 - RNA, 20 nt, Homo sapiens
cuaguucugccaggagacag

SEQ ID NO: 272863 - RNA, 14 nt, Homo sapiens
cuauaaaacacauc

SEQ ID NO: 272864 - RNA, 17 nt, Homo sapiens
cuauaaaacacaucauc

SEQ ID NO: 272865 - RNA, 20 nt, Homo sapiens
cuauaacuauguugauaaaa

SEQ ID NO: 272866 - RNA, 18 nt, Homo sapiens
cuauaagaugaaacauca

SEQ ID NO: 272867 - RNA, 20 nt, Homo sapiens
cuauaagaugaaacaucauu

SEQ ID NO: 272868 - RNA, 13 nt, Homo sapiens
cuauaauugccac

SEQ ID NO: 272869 - RNA, 20 nt, Homo sapiens
cuauaauugccacugagaga

SEQ ID NO: 272870 - RNA, 18 nt, Homo sapiens
cuauacuuucucacaugu

SEQ ID NO: 272871 - RNA, 19 nt, Homo sapiens
cuauacuuucucacaugug

SEQ ID NO: 272872 - RNA, 18 nt, Homo sapiens
cuauagccuaggugacag

SEQ ID NO: 272873 - RNA, 23 nt, Homo sapiens
cuauauaguuuauugacaauaau

SEQ ID NO: 272874 - RNA, 18 nt, Homo sapiens
cuauauuuagauuguuaa

SEQ ID NO: 272875 - RNA, 16 nt, Homo sapiens
cuauauuuccaccucu

SEQ ID NO: 272876 - RNA, 20 nt, Homo sapiens
cuaucaaguauuauaccuuu

SEQ ID NO: 272877 - RNA, 23 nt, Homo sapiens
cuauccaaucucaucucuuguaa

SEQ ID NO: 272878 - RNA, 15 nt, Homo sapiens
cuauccaaucuguga

SEQ ID NO: 272879 - RNA, 21 nt, Homo sapiens
cuaucucaucuugaugaugau

SEQ ID NO: 272880 - RNA, 20 nt, Homo sapiens
cuaugaaauaucaugcucca

SEQ ID NO: 272881 - RNA, 21 nt, Homo sapiens
cuaugaaauaucaugcuccau

SEQ ID NO: 272882 - RNA, 15 nt, Homo sapiens
cuaugauaugcuaau

SEQ ID NO: 272883 - RNA, 16 nt, Homo sapiens
cuaugauaugcuaaua

SEQ ID NO: 272884 - RNA, 23 nt, Homo sapiens
cuaugaucuugagggcagacagc

SEQ ID NO: 272885 - RNA, 14 nt, Homo sapiens
cuaugcaaucugag

SEQ ID NO: 272886 - RNA, 12 nt, Homo sapiens
cuaugcauuuga

SEQ ID NO: 272887 - RNA, 16 nt, Homo sapiens
cuaugcuguucacugg

SEQ ID NO: 272888 - RNA, 20 nt, Homo sapiens
cuauggcacccaugcaccuu

SEQ ID NO: 272889 - RNA, 11 nt, Homo sapiens
cuaugggacuc

SEQ ID NO: 272890 - RNA, 12 nt, Homo sapiens
cuaugggacuca

SEQ ID NO: 272891 - RNA, 19 nt, Homo sapiens
cuauguccuggaagugugu

SEQ ID NO: 272892 - RNA, 14 nt, Homo sapiens
cuaugugagcacaa

SEQ ID NO: 272893 - RNA, 13 nt, Homo sapiens
cuaugugcaugca

SEQ ID NO: 272894 - RNA, 14 nt, Homo sapiens
cuaugugcaugcag

SEQ ID NO: 272895 - RNA, 20 nt, Homo sapiens
cuaugugggugggaccacag

SEQ ID NO: 272896 - RNA, 14 nt, Homo sapiens
cuauguugcccagg

SEQ ID NO: 272897 - RNA, 23 nt, Homo sapiens
cuauuagagcugccugugccuuu

SEQ ID NO: 272898 - RNA, 16 nt, Homo sapiens
cuauuagcuccacaaa

SEQ ID NO: 272899 - RNA, 18 nt, Homo sapiens
cuauugaccgagcacaua

SEQ ID NO: 272900 - RNA, 18 nt, Homo sapiens
cuauugcuggcaaagaca

SEQ ID NO: 272901 - RNA, 21 nt, Homo sapiens
cuauuuauuuauuuauucauu

SEQ ID NO: 272902 - RNA, 22 nt, Homo sapiens
cuauuuauuuauuuauucauua

SEQ ID NO: 272903 - RNA, 22 nt, Homo sapiens
cuauuuccuucuccuccugucu

SEQ ID NO: 272904 - RNA, 15 nt, Homo sapiens
cuauuuuauucccuu

SEQ ID NO: 272905 - RNA, 21 nt, Homo sapiens
cucaaaagcugggcagguugg

SEQ ID NO: 272906 - RNA, 20 nt, Homo sapiens
cucaaacucuugaccucagg

SEQ ID NO: 272907 - RNA, 16 nt, Homo sapiens
cucaaagaaauuucca

SEQ ID NO: 272908 - RNA, 17 nt, Homo sapiens
cucaaagaaauuuccac

SEQ ID NO: 272909 - RNA, 18 nt, Homo sapiens
cucaaagugacuauucag

SEQ ID NO: 272910 - RNA, 16 nt, Homo sapiens
cucaaccaccuuucag

SEQ ID NO: 272911 - RNA, 22 nt, Homo sapiens
cucaaccuccugggcuaaguga

SEQ ID NO: 272912 - RNA, 21 nt, Homo sapiens
cucaagucuggcagacuuucu

SEQ ID NO: 272913 - RNA, 19 nt, Homo sapiens
cucaaucccugaggacuga

SEQ ID NO: 272914 - RNA, 12 nt, Homo sapiens
cucaaucucuga

SEQ ID NO: 272915 - RNA, 15 nt, Homo sapiens
cucaaugcacugaca

SEQ ID NO: 272916 - RNA, 15 nt, Homo sapiens
cucacacaugagauc

SEQ ID NO: 272917 - RNA, 21 nt, Homo sapiens
cugcauagcagaccacacaga

SEQ ID NO: 272918 - RNA, 18 nt, Homo sapiens
cugcaucaagaugugaca

SEQ ID NO: 272919 - RNA, 14 nt, Homo sapiens
cugcaucaggugua

SEQ ID NO: 272920 - RNA, 19 nt, Homo sapiens
cugcaucuuucucuuccca

SEQ ID NO: 272921 - RNA, 15 nt, Homo sapiens
cugcauguuacauaa

SEQ ID NO: 272922 - RNA, 22 nt, Homo sapiens
cugcauuuauagcauacgguau

SEQ ID NO: 272923 - RNA, 17 nt, Homo sapiens
cugccagcaucugcagc

SEQ ID NO: 272924 - RNA, 16 nt, Homo sapiens
cugccagcauuucccu

SEQ ID NO: 272925 - RNA, 19 nt, Homo sapiens
cugccagccgagauagcca

SEQ ID NO: 272926 - RNA, 23 nt, Homo sapiens
cugccaggcacacugagccagca

SEQ ID NO: 272927 - RNA, 19 nt, Homo sapiens
cugccauauucuguuggcc

SEQ ID NO: 272928 - RNA, 23 nt, Homo sapiens
cugccaucauguuuacagaggac

SEQ ID NO: 272929 - RNA, 15 nt, Homo sapiens
cugccaugccagcuu

SEQ ID NO: 272930 - RNA, 18 nt, Homo sapiens
cugccauuucugagauca

SEQ ID NO: 272931 - RNA, 13 nt, Homo sapiens
cugcccaggugug

SEQ ID NO: 272932 - RNA, 16 nt, Homo sapiens
cugcccccaauccaug

SEQ ID NO: 272933 - RNA, 16 nt, Homo sapiens
cugcccuagagcacac

SEQ ID NO: 272934 - RNA, 14 nt, Homo sapiens
cugcccuccaagac

SEQ ID NO: 272935 - RNA, 16 nt, Homo sapiens
cugcccuuaccugcca

SEQ ID NO: 272936 - RNA, 15 nt, Homo sapiens
cugccgagaguccau

SEQ ID NO: 272937 - RNA, 18 nt, Homo sapiens
cugccgagaguccaucag

SEQ ID NO: 272938 - RNA, 17 nt, Homo sapiens
cugccuauuaucuguca

SEQ ID NO: 272939 - RNA, 23 nt, Homo sapiens
cugccuccuuuccccucccucag

SEQ ID NO: 272940 - RNA, 15 nt, Homo sapiens
cugccucugacacac

SEQ ID NO: 272941 - RNA, 17 nt, Homo sapiens
cugccugaagucacaca

SEQ ID NO: 272942 - RNA, 18 nt, Homo sapiens
cugccugcagcugagauu

SEQ ID NO: 272943 - RNA, 19 nt, Homo sapiens
cugccuggaguacuuugaa

SEQ ID NO: 272944 - RNA, 16 nt, Homo sapiens
cugccuguccccaugc

SEQ ID NO: 272945 - RNA, 18 nt, Homo sapiens
cugccuguugggccagga

SEQ ID NO: 272946 - RNA, 14 nt, Homo sapiens
cugccuuugugcuc

SEQ ID NO: 272947 - RNA, 20 nt, Homo sapiens
cugcggcacccuugcgcuuu

SEQ ID NO: 272948 - RNA, 23 nt, Homo sapiens
cugcggguggggcuuggggcuca

SEQ ID NO: 272949 - RNA, 18 nt, Homo sapiens
cugcgucucauacucacc

SEQ ID NO: 272950 - RNA, 17 nt, Homo sapiens
cugcgugguugaugauc

SEQ ID NO: 272951 - RNA, 18 nt, Homo sapiens
cugcgugugcccacugaa

SEQ ID NO: 272952 - RNA, 12 nt, Homo sapiens
cugcuaccucac

SEQ ID NO: 272953 - RNA, 16 nt, Homo sapiens
cugcuaccucacuggg

SEQ ID NO: 272954 - RNA, 17 nt, Homo sapiens
cugcucacugcucacac

SEQ ID NO: 272955 - RNA, 12 nt, Homo sapiens
cugcuccagcug

SEQ ID NO: 272956 - RNA, 21 nt, Homo sapiens
cugcuccguggaggagguugg

SEQ ID NO: 272957 - RNA, 18 nt, Homo sapiens
cugcuccugucaccauga

SEQ ID NO: 272958 - RNA, 13 nt, Homo sapiens
cucaguaccccau

SEQ ID NO: 272959 - RNA, 16 nt, Homo sapiens
cucaguagucagacug

SEQ ID NO: 272960 - RNA, 22 nt, Homo sapiens
cucagucaauaaauuugcaaau

SEQ ID NO: 272961 - RNA, 17 nt, Homo sapiens
cucagucuacacucaca

SEQ ID NO: 272962 - RNA, 17 nt, Homo sapiens
cucauaugauugugcac

SEQ ID NO: 272963 - RNA, 19 nt, Homo sapiens
cucauaugauugugcacau

SEQ ID NO: 272964 - RNA, 20 nt, Homo sapiens
cucaucacugcuccugucac

SEQ ID NO: 272965 - RNA, 14 nt, Homo sapiens
cucaucaggccauu

SEQ ID NO: 272966 - RNA, 14 nt, Homo sapiens
cucaucauuuccau

SEQ ID NO: 272967 - RNA, 17 nt, Homo sapiens
cucaucccgagcaccuc

SEQ ID NO: 272968 - RNA, 22 nt, Homo sapiens
cucaucuuagguuggcaaaaag

SEQ ID NO: 272969 - RNA, 18 nt, Homo sapiens
cucaucuugaugaugaua

SEQ ID NO: 272970 - RNA, 15 nt, Homo sapiens
cucaucuuucuucca

SEQ ID NO: 272971 - RNA, 16 nt, Homo sapiens
cucaucuuucuuccaa

SEQ ID NO: 272972 - RNA, 23 nt, Homo sapiens
cucauggguggcacucagucucu

SEQ ID NO: 272973 - RNA, 18 nt, Homo sapiens
cucaugugacucuuucca

SEQ ID NO: 272974 - RNA, 19 nt, Homo sapiens
cucauucagggauagcacu

SEQ ID NO: 272975 - RNA, 21 nt, Homo sapiens
cucauucagggauagcacuga

SEQ ID NO: 272976 - RNA, 15 nt, Homo sapiens
cucauuccagaggaa

SEQ ID NO: 272977 - RNA, 12 nt, Homo sapiens
cucauugcuuca

SEQ ID NO: 272978 - RNA, 21 nt, Homo sapiens
cucauuggacccuuccauggu

SEQ ID NO: 272979 - RNA, 13 nt, Homo sapiens
cucauuugucaca

SEQ ID NO: 272980 - RNA, 14 nt, Homo sapiens
cuccaaagagacca

SEQ ID NO: 272981 - RNA, 16 nt, Homo sapiens
cuccaaagagaccagc

SEQ ID NO: 272982 - RNA, 19 nt, Homo sapiens
cuccaaagucacacagagu

SEQ ID NO: 272983 - RNA, 12 nt, Homo sapiens
cuccaagaccac

SEQ ID NO: 272984 - RNA, 15 nt, Homo sapiens
cuccaagaccacccu

SEQ ID NO: 272985 - RNA, 19 nt, Homo sapiens
cuccacaaagccaaucuca

SEQ ID NO: 272986 - RNA, 23 nt, Homo sapiens
cuccacaauagcagacaguguuu

SEQ ID NO: 272987 - RNA, 12 nt, Homo sapiens
cuccacauaccu

SEQ ID NO: 272988 - RNA, 17 nt, Homo sapiens
cuccacccuuggacuuu

SEQ ID NO: 272989 - RNA, 15 nt, Homo sapiens
cuccacgccauuucc

SEQ ID NO: 272990 - RNA, 17 nt, Homo sapiens
cuccacucugaguccca

SEQ ID NO: 272991 - RNA, 17 nt, Homo sapiens
cuccacuuucuagccag

SEQ ID NO: 272992 - RNA, 21 nt, Homo sapiens
cuccacuuucuagccagagga

SEQ ID NO: 272993 - RNA, 20 nt, Homo sapiens
cuccagauaguguagcugag

SEQ ID NO: 272994 - RNA, 20 nt, Homo sapiens
cuccagcuagcaaaauuacu

SEQ ID NO: 272995 - RNA, 16 nt, Homo sapiens
cuccagcucaccagcc

SEQ ID NO: 272996 - RNA, 14 nt, Homo sapiens
cuccagggggugcc

SEQ ID NO: 272997 - RNA, 22 nt, Homo sapiens
cuccaguuuacccuucagguug

SEQ ID NO: 272998 - RNA, 19 nt, Homo sapiens
cuccauguagaagccacua

SEQ ID NO: 272999 - RNA, 21 nt, Homo sapiens
cuccauguagaagccacuauu

SEQ ID NO: 273000 - RNA, 14 nt, Homo sapiens
cuccaugucuguag

SEQ ID NO: 273001 - RNA, 17 nt, Homo sapiens
cuccauugcauucaugu

SEQ ID NO: 273002 - RNA, 22 nt, Homo sapiens
cuccauugguguugacauacau

SEQ ID NO: 273003 - RNA, 20 nt, Homo sapiens
cuccauuguucagaugcuuc

SEQ ID NO: 273004 - RNA, 16 nt, Homo sapiens
cuccauuucugcucag

SEQ ID NO: 273005 - RNA, 21 nt, Homo sapiens
cuccauuuggaaaauguucac

SEQ ID NO: 273006 - RNA, 11 nt, Homo sapiens
cucccaaagug

SEQ ID NO: 273007 - RNA, 22 nt, Homo sapiens
cucccagaggagccaccaguuc

SEQ ID NO: 273008 - RNA, 18 nt, Homo sapiens
cucccagccagguucuga

SEQ ID NO: 273009 - RNA, 15 nt, Homo sapiens
cucccagcuccagcu

SEQ ID NO: 273010 - RNA, 16 nt, Homo sapiens
cucccaggcauucccc

SEQ ID NO: 273011 - RNA, 11 nt, Homo sapiens
cucccauguca

SEQ ID NO: 273012 - RNA, 18 nt, Homo sapiens
cuccccagcaagugagag

SEQ ID NO: 273013 - RNA, 14 nt, Homo sapiens
cuccccgggcagca

SEQ ID NO: 273014 - RNA, 15 nt, Homo sapiens
cuccccuucacaugc

SEQ ID NO: 273015 - RNA, 16 nt, Homo sapiens
cuccccuucacuccca

SEQ ID NO: 273016 - RNA, 23 nt, Homo sapiens
cucccuauuuuuuuucuguuaua

SEQ ID NO: 273017 - RNA, 19 nt, Homo sapiens
cucccucccccuggcacug

SEQ ID NO: 273018 - RNA, 14 nt, Homo sapiens
cucccuuacccucc

SEQ ID NO: 273019 - RNA, 19 nt, Homo sapiens
cuccgcuuucuacccagcg

SEQ ID NO: 273020 - RNA, 20 nt, Homo sapiens
cuccucacuguauccagguu

SEQ ID NO: 273021 - RNA, 17 nt, Homo sapiens
cuccuccagaccauuca

SEQ ID NO: 273022 - RNA, 14 nt, Homo sapiens
cuccucccauguca

SEQ ID NO: 273023 - RNA, 22 nt, Homo sapiens
cuccucgagaucccaacacugc

SEQ ID NO: 273024 - RNA, 16 nt, Homo sapiens
cuccucuccccagcaa

SEQ ID NO: 273025 - RNA, 20 nt, Homo sapiens
cuccucugccuuugugcucu

SEQ ID NO: 273026 - RNA, 22 nt, Homo sapiens
cuccucuuucaaccucagugau

SEQ ID NO: 273027 - RNA, 14 nt, Homo sapiens
cuccugaagccaca

SEQ ID NO: 273028 - RNA, 19 nt, Homo sapiens
cuccugaguagcuggauua

SEQ ID NO: 273029 - RNA, 13 nt, Homo sapiens
cuccugcagggau

SEQ ID NO: 273030 - RNA, 17 nt, Homo sapiens
cuccugccucagccucc

SEQ ID NO: 273031 - RNA, 20 nt, Homo sapiens
cuccugcgugugcccacuga

SEQ ID NO: 273032 - RNA, 19 nt, Homo sapiens
cuccuggaagcgagcuuug

SEQ ID NO: 273033 - RNA, 17 nt, Homo sapiens
cuccuggaccaggucuc

SEQ ID NO: 273034 - RNA, 19 nt, Homo sapiens
cuccuggaccaggucucau

SEQ ID NO: 273035 - RNA, 20 nt, Homo sapiens
cuccuggccucaagugauuc

SEQ ID NO: 273036 - RNA, 21 nt, Homo sapiens
cuccugguguggaagagcucc

SEQ ID NO: 273037 - RNA, 18 nt, Homo sapiens
cuccugucccucauccau

SEQ ID NO: 273038 - RNA, 14 nt, Homo sapiens
cuccugugcaacuu

SEQ ID NO: 273039 - RNA, 16 nt, Homo sapiens
cuccuguuuugcacag

SEQ ID NO: 273040 - RNA, 15 nt, Homo sapiens
cuccuuagaagugga

SEQ ID NO: 273041 - RNA, 20 nt, Homo sapiens
cuccuucaccuuugucccca

SEQ ID NO: 273042 - RNA, 22 nt, Homo sapiens
cuccuuggcuucuuuacuuagu

SEQ ID NO: 273043 - RNA, 19 nt, Homo sapiens
cuccuuguaaagacuguag

SEQ ID NO: 273044 - RNA, 24 nt, Homo sapiens
cuccuuucaccacaugugcacaug

SEQ ID NO: 273045 - RNA, 16 nt, Homo sapiens
cucgaguuacagacaa

SEQ ID NO: 273046 - RNA, 21 nt, Homo sapiens
cucgcaagggaaguccuugca

SEQ ID NO: 273047 - RNA, 12 nt, Homo sapiens
cucgucuuucag

SEQ ID NO: 273048 - RNA, 18 nt, Homo sapiens
cucuaacaguaguugcaa

SEQ ID NO: 273049 - RNA, 14 nt, Homo sapiens
cucuacaaaaagca

SEQ ID NO: 273050 - RNA, 22 nt, Homo sapiens
cucuacccucuuagaaaaacca

SEQ ID NO: 273051 - RNA, 12 nt, Homo sapiens
cucuacccugag

SEQ ID NO: 273052 - RNA, 20 nt, Homo sapiens
cucuacccuggcacuauaau

SEQ ID NO: 273053 - RNA, 15 nt, Homo sapiens
cucuacuaugaagug

SEQ ID NO: 273054 - RNA, 14 nt, Homo sapiens
cucuacucuaggga

SEQ ID NO: 273055 - RNA, 20 nt, Homo sapiens
cucuacucuggagguuuguu

SEQ ID NO: 273056 - RNA, 22 nt, Homo sapiens
cucuacugaggugcuauguucu

SEQ ID NO: 273057 - RNA, 23 nt, Homo sapiens
cucuaggccucuccaguuugcac

SEQ ID NO: 273058 - RNA, 14 nt, Homo sapiens
cucuagugggacag

SEQ ID NO: 273059 - RNA, 18 nt, Homo sapiens
cucuaguuuccagaggcu

SEQ ID NO: 273060 - RNA, 14 nt, Homo sapiens
cucuauaauugcca

SEQ ID NO: 273061 - RNA, 19 nt, Homo sapiens
cuguaacaauuauguuuuc

SEQ ID NO: 273062 - RNA, 21 nt, Homo sapiens
cuguaauccuagcacuuuggg

SEQ ID NO: 273063 - RNA, 20 nt, Homo sapiens
cuguaauuccuaacuaucac

SEQ ID NO: 273064 - RNA, 17 nt, Homo sapiens
cuguacaaaguagaagu

SEQ ID NO: 273065 - RNA, 15 nt, Homo sapiens
cuguaccaguuaauu

SEQ ID NO: 273066 - RNA, 18 nt, Homo sapiens
cuguagauacaggggcaa

SEQ ID NO: 273067 - RNA, 18 nt, Homo sapiens
cuguagcauuacaguggg

SEQ ID NO: 273068 - RNA, 16 nt, Homo sapiens
cuguauaguacuggca

SEQ ID NO: 273069 - RNA, 16 nt, Homo sapiens
cuguauauacaauaac

SEQ ID NO: 273070 - RNA, 14 nt, Homo sapiens
cuguaucaugacaa

SEQ ID NO: 273071 - RNA, 13 nt, Homo sapiens
cuguauccacaaa

SEQ ID NO: 273072 - RNA, 22 nt, Homo sapiens
cuguaugucaauaaacaacagc

SEQ ID NO: 273073 - RNA, 17 nt, Homo sapiens
cuguaugucucguggua

SEQ ID NO: 273074 - RNA, 16 nt, Homo sapiens
cuguauuaagccacuu

SEQ ID NO: 273075 - RNA, 14 nt, Homo sapiens
cuguauuagucaca

SEQ ID NO: 273076 - RNA, 17 nt, Homo sapiens
cuguauuagucacagag

SEQ ID NO: 273077 - RNA, 18 nt, Homo sapiens
cuguauucccaguuacuu

SEQ ID NO: 273078 - RNA, 21 nt, Homo sapiens
cuguauucccaguuacuuggg

SEQ ID NO: 273079 - RNA, 15 nt, Homo sapiens
cugucaauacagguu

SEQ ID NO: 273080 - RNA, 19 nt, Homo sapiens
cugucaauacagguuuuau

SEQ ID NO: 273081 - RNA, 22 nt, Homo sapiens
cugucaauguccuacugagaca

SEQ ID NO: 273082 - RNA, 18 nt, Homo sapiens
cugucacgugugggcaau

SEQ ID NO: 273083 - RNA, 13 nt, Homo sapiens
cugucagcugcaa

SEQ ID NO: 273084 - RNA, 18 nt, Homo sapiens
cugucagcuuccaaacau

SEQ ID NO: 273085 - RNA, 18 nt, Homo sapiens
cuguccacuagaccagug

SEQ ID NO: 273086 - RNA, 22 nt, Homo sapiens
cuguccagcaggggucucccaa

SEQ ID NO: 273087 - RNA, 14 nt, Homo sapiens
cugucucagccucc

SEQ ID NO: 273088 - RNA, 13 nt, Homo sapiens
cugucuccauggc

SEQ ID NO: 273089 - RNA, 14 nt, Homo sapiens
cugucuuucacuga

SEQ ID NO: 273090 - RNA, 21 nt, Homo sapiens
cugugaaaugcuggcauuugc

SEQ ID NO: 273091 - RNA, 22 nt, Homo sapiens
cugugaaaugcuggcauuugca

SEQ ID NO: 273092 - RNA, 12 nt, Homo sapiens
cugugacugaca

SEQ ID NO: 273093 - RNA, 21 nt, Homo sapiens
cugugaggggcucucucauga

SEQ ID NO: 273094 - RNA, 12 nt, Homo sapiens
cugugaugacau

SEQ ID NO: 273095 - RNA, 15 nt, Homo sapiens
cugugaugacauucc

SEQ ID NO: 273096 - RNA, 18 nt, Homo sapiens
cugugcaaauccuugaua

SEQ ID NO: 273097 - RNA, 18 nt, Homo sapiens
cugugcaucuagccucaa

SEQ ID NO: 273098 - RNA, 15 nt, Homo sapiens
cugugccagaccuca

SEQ ID NO: 273099 - RNA, 19 nt, Homo sapiens
cugugccucaucacugcuc

SEQ ID NO: 273100 - RNA, 21 nt, Homo sapiens
cugugccuuggugugcuguau

SEQ ID NO: 273101 - RNA, 18 nt, Homo sapiens
cuguggaugauaaaacac

SEQ ID NO: 273102 - RNA, 14 nt, Homo sapiens
cuguggcagaguua

SEQ ID NO: 273103 - RNA, 15 nt, Homo sapiens
cuguggcagaguuac

SEQ ID NO: 273104 - RNA, 15 nt, Homo sapiens
cuguggcugcuagca

SEQ ID NO: 273105 - RNA, 23 nt, Homo sapiens
cuguggugugucccccucugucc

SEQ ID NO: 273106 - RNA, 20 nt, Homo sapiens
cugugguuacaagaaacagc

SEQ ID NO: 273107 - RNA, 21 nt, Homo sapiens
cugugguuucucguacuuuca

SEQ ID NO: 273108 - RNA, 17 nt, Homo sapiens
cuguguacccuccaugu

SEQ ID NO: 273109 - RNA, 14 nt, Homo sapiens
cugugucauuccaa

SEQ ID NO: 273110 - RNA, 20 nt, Homo sapiens
cugugucuugcaauggcagc

SEQ ID NO: 273111 - RNA, 17 nt, Homo sapiens
cugugugguauuuuggc

SEQ ID NO: 273112 - RNA, 17 nt, Homo sapiens
cuguguguacuaauaca

SEQ ID NO: 273113 - RNA, 22 nt, Homo sapiens
cucuuccacuuugauaccauug

SEQ ID NO: 273114 - RNA, 18 nt, Homo sapiens
cucuuccccauaaucacu

SEQ ID NO: 273115 - RNA, 21 nt, Homo sapiens
cucuuccccauaaucacugac

SEQ ID NO: 273116 - RNA, 22 nt, Homo sapiens
cucuuccccauaaucacugacc

SEQ ID NO: 273117 - RNA, 19 nt, Homo sapiens
cucuuccuacccuuccuca

SEQ ID NO: 273118 - RNA, 20 nt, Homo sapiens
cucuucuaaucagagcgcaa

SEQ ID NO: 273119 - RNA, 21 nt, Homo sapiens
cucuugagccugggaggucaa

SEQ ID NO: 273120 - RNA, 22 nt, Homo sapiens
cucuugauucauaaugacuuaa

SEQ ID NO: 273121 - RNA, 17 nt, Homo sapiens
cucuuguaaauacaugu

SEQ ID NO: 273122 - RNA, 19 nt, Homo sapiens
cucuuguaaauacaugucc

SEQ ID NO: 273123 - RNA, 17 nt, Homo sapiens
cucuuguauaugaugau

SEQ ID NO: 273124 - RNA, 21 nt, Homo sapiens
cucuuguauaugaugaucugg

SEQ ID NO: 273125 - RNA, 15 nt, Homo sapiens
cucuuuaaugucaca

SEQ ID NO: 273126 - RNA, 12 nt, Homo sapiens
cucuuuaccucc

SEQ ID NO: 273127 - RNA, 23 nt, Homo sapiens
cucuuucuauuuaugcaacucau

SEQ ID NO: 273128 - RNA, 16 nt, Homo sapiens
cucuuucucuuaauaa

SEQ ID NO: 273129 - RNA, 18 nt, Homo sapiens
cucuuugggccuggcucc

SEQ ID NO: 273130 - RNA, 17 nt, Homo sapiens
cucuuuucaaaacauuu

SEQ ID NO: 273131 - RNA, 15 nt, Homo sapiens
cucuuuuucuagucu

SEQ ID NO: 273132 - RNA, 19 nt, Homo sapiens
cugaaaacacugugcacau

SEQ ID NO: 273133 - RNA, 15 nt, Homo sapiens
cugaaaacaguaaaa

SEQ ID NO: 273134 - RNA, 22 nt, Homo sapiens
cugaaaccucuguucucaugaa

SEQ ID NO: 273135 - RNA, 16 nt, Homo sapiens
cugaaagaucuuucag

SEQ ID NO: 273136 - RNA, 13 nt, Homo sapiens
cugaaaguacaaa

SEQ ID NO: 273137 - RNA, 17 nt, Homo sapiens
cugaaauaaaauucauu

SEQ ID NO: 273138 - RNA, 20 nt, Homo sapiens
cugaacaauauauacuuaua

SEQ ID NO: 273139 - RNA, 16 nt, Homo sapiens
cugaacaucacagcuu

SEQ ID NO: 273140 - RNA, 14 nt, Homo sapiens
cugaacaugcucau

SEQ ID NO: 273141 - RNA, 15 nt, Homo sapiens
cugaagaacaguaac

SEQ ID NO: 273142 - RNA, 22 nt, Homo sapiens
cugaagaacaguaacugccauc

SEQ ID NO: 273143 - RNA, 16 nt, Homo sapiens
cugaagauacaugucu

SEQ ID NO: 273144 - RNA, 13 nt, Homo sapiens
cugaagucacaca

SEQ ID NO: 273145 - RNA, 18 nt, Homo sapiens
cugaagucuuuguacaga

SEQ ID NO: 273146 - RNA, 20 nt, Homo sapiens
cugaagucuuuguacagaca

SEQ ID NO: 273147 - RNA, 23 nt, Homo sapiens
cugaauagcagaagguugcaccu

SEQ ID NO: 273148 - RNA, 16 nt, Homo sapiens
cugaaucugcuaccaa

SEQ ID NO: 273149 - RNA, 20 nt, Homo sapiens
cugaauguauugaacuugga

SEQ ID NO: 273150 - RNA, 16 nt, Homo sapiens
cugaauuaagcagcuc

SEQ ID NO: 273151 - RNA, 23 nt, Homo sapiens
cugaauuaagcagcucaccaucc

SEQ ID NO: 273152 - RNA, 18 nt, Homo sapiens
cugaauuaucuauuucau

SEQ ID NO: 273153 - RNA, 19 nt, Homo sapiens
cugaauuucucacaaagga

SEQ ID NO: 273154 - RNA, 18 nt, Homo sapiens
cugacacacagcucuguc

SEQ ID NO: 273155 - RNA, 14 nt, Homo sapiens
cugacaccuuucau

SEQ ID NO: 273156 - RNA, 18 nt, Homo sapiens
cugacagagccauaugua

SEQ ID NO: 273157 - RNA, 15 nt, Homo sapiens
cugacagggccagug

SEQ ID NO: 273158 - RNA, 19 nt, Homo sapiens
cugacagggccagugcagu

SEQ ID NO: 273159 - RNA, 17 nt, Homo sapiens
cugaccagccuugacac

SEQ ID NO: 273160 - RNA, 22 nt, Homo sapiens
cugacccucaucuuucuuccaa

SEQ ID NO: 273161 - RNA, 19 nt, Homo sapiens
cugacccugcuucaaauau

SEQ ID NO: 273162 - RNA, 20 nt, Homo sapiens
cugaccuggaaagaaaaagc

SEQ ID NO: 273163 - RNA, 14 nt, Homo sapiens
cugaccuugcacaa

SEQ ID NO: 273164 - RNA, 21 nt, Homo sapiens
cugacuauugaaguugcagau

SEQ ID NO: 273165 - RNA, 22 nt, Homo sapiens
cugacugcugugggcugcucac

SEQ ID NO: 273166 - RNA, 14 nt, Homo sapiens
cugagagaggccau

SEQ ID NO: 273167 - RNA, 14 nt, Homo sapiens
cugagagaucugcu

SEQ ID NO: 273168 - RNA, 14 nt, Homo sapiens
cugagauaccagcg

SEQ ID NO: 273169 - RNA, 17 nt, Homo sapiens
cugagaugacuauucag

SEQ ID NO: 273170 - RNA, 20 nt, Homo sapiens
cugagaugggacaggaucaa

SEQ ID NO: 273171 - RNA, 16 nt, Homo sapiens
cugagcaaagcauuga

SEQ ID NO: 273172 - RNA, 22 nt, Homo sapiens
cugagcaaagcauugagcaaag

SEQ ID NO: 273173 - RNA, 19 nt, Homo sapiens
cugagcagguguucuucau

SEQ ID NO: 273174 - RNA, 22 nt, Homo sapiens
cugagcagugaaugauucagug

SEQ ID NO: 273175 - RNA, 17 nt, Homo sapiens
cugaggcagacagcagc

SEQ ID NO: 273176 - RNA, 19 nt, Homo sapiens
cugagguuugccagcauuu

SEQ ID NO: 273177 - RNA, 17 nt, Homo sapiens
cugaguacguugugcau

SEQ ID NO: 273178 - RNA, 17 nt, Homo sapiens
cugagucaugucuuucc

SEQ ID NO: 273179 - RNA, 15 nt, Homo sapiens
cugagugcaccacuu

SEQ ID NO: 273180 - RNA, 18 nt, Homo sapiens
cugagugggggaucacag

SEQ ID NO: 273181 - RNA, 19 nt, Homo sapiens
cugauacuuugacaguguu

SEQ ID NO: 273182 - RNA, 20 nt, Homo sapiens
cugaucucucgugauugaua

SEQ ID NO: 273183 - RNA, 13 nt, Homo sapiens
cugaucugaugca

SEQ ID NO: 273184 - RNA, 13 nt, Homo sapiens
cugaugcaagcaa

SEQ ID NO: 273185 - RNA, 21 nt, Homo sapiens
cugaugcuggggacacagcau

SEQ ID NO: 273186 - RNA, 17 nt, Homo sapiens
cugauggugacauugca

SEQ ID NO: 273187 - RNA, 13 nt, Homo sapiens
cugauggugcaau

SEQ ID NO: 273188 - RNA, 15 nt, Homo sapiens
cugauggugcaauga

SEQ ID NO: 273189 - RNA, 16 nt, Homo sapiens
cugauggugcaaugac

SEQ ID NO: 273190 - RNA, 19 nt, Homo sapiens
cugauucccaagcucugcu

SEQ ID NO: 273191 - RNA, 22 nt, Homo sapiens
cugauucugucaaugucuugaa

SEQ ID NO: 273192 - RNA, 23 nt, Homo sapiens
cugauugcuggcaacaacagauu

SEQ ID NO: 273193 - RNA, 20 nt, Homo sapiens
cugcaaaaguucucaauguu

SEQ ID NO: 273194 - RNA, 14 nt, Homo sapiens
cugcaaauacugua

SEQ ID NO: 273195 - RNA, 15 nt, Homo sapiens
cugcaaauacuguau

SEQ ID NO: 273196 - RNA, 23 nt, Homo sapiens
cugcaacaugccagccacuguga

SEQ ID NO: 273197 - RNA, 16 nt, Homo sapiens
cugcaagcacaucugc

SEQ ID NO: 273198 - RNA, 13 nt, Homo sapiens
cugcaagcacugc

SEQ ID NO: 273199 - RNA, 23 nt, Homo sapiens
cugcaaucuucucagaaggcaaa

SEQ ID NO: 273200 - RNA, 12 nt, Homo sapiens
cugcacacuguc

SEQ ID NO: 273201 - RNA, 17 nt, Homo sapiens
cugcacagugcaucuca

SEQ ID NO: 273202 - RNA, 19 nt, Homo sapiens
cugcaccggggccugggca

SEQ ID NO: 273203 - RNA, 15 nt, Homo sapiens
cugcacuccaugagu

SEQ ID NO: 273204 - RNA, 21 nt, Homo sapiens
cugcacuccaugagugcagcu

SEQ ID NO: 273205 - RNA, 21 nt, Homo sapiens
cuucccacggcuccucgagau

SEQ ID NO: 273206 - RNA, 23 nt, Homo sapiens
cuucccacuggaggcaugugaug

SEQ ID NO: 273207 - RNA, 17 nt, Homo sapiens
cuucccuaaucuuccac

SEQ ID NO: 273208 - RNA, 15 nt, Homo sapiens
cuucccuacauggag

SEQ ID NO: 273209 - RNA, 19 nt, Homo sapiens
cuucccuccucccauguca

SEQ ID NO: 273210 - RNA, 22 nt, Homo sapiens
cuucccugucugccagggccag

SEQ ID NO: 273211 - RNA, 16 nt, Homo sapiens
cuuccuacccuuccuc

SEQ ID NO: 273212 - RNA, 23 nt, Homo sapiens
cuuccuccccuguucauucugca

SEQ ID NO: 273213 - RNA, 15 nt, Homo sapiens
cuuccucuccacugc

SEQ ID NO: 273214 - RNA, 15 nt, Homo sapiens
cuuccucuccugucu

SEQ ID NO: 273215 - RNA, 18 nt, Homo sapiens
cuuccugauuccuuuaaa

SEQ ID NO: 273216 - RNA, 14 nt, Homo sapiens
cuuccuggaccuga

SEQ ID NO: 273217 - RNA, 19 nt, Homo sapiens
cuuccuggaggugacacuu

SEQ ID NO: 273218 - RNA, 23 nt, Homo sapiens
cuucgauacaccgggccuggaga

SEQ ID NO: 273219 - RNA, 20 nt, Homo sapiens
cuucuaaagugcugggauua

SEQ ID NO: 273220 - RNA, 17 nt, Homo sapiens
cuucuaaguaaauacaa

SEQ ID NO: 273221 - RNA, 20 nt, Homo sapiens
cuucuaguucugccaggaga

SEQ ID NO: 273222 - RNA, 21 nt, Homo sapiens
cuucucacccuaugugggugg

SEQ ID NO: 273223 - RNA, 22 nt, Homo sapiens
cuucucagaaggcaaaugacuu

SEQ ID NO: 273224 - RNA, 18 nt, Homo sapiens
cuucuccauccacauggg

SEQ ID NO: 273225 - RNA, 18 nt, Homo sapiens
cuucucccaagacugcuc

SEQ ID NO: 273226 - RNA, 19 nt, Homo sapiens
cuucucuauuucuggauga

SEQ ID NO: 273227 - RNA, 14 nt, Homo sapiens
cuucucuccagcug

SEQ ID NO: 273228 - RNA, 23 nt, Homo sapiens
cuucucugcuaucuagaucugaa

SEQ ID NO: 273229 - RNA, 13 nt, Homo sapiens
cuucugcuucuca

SEQ ID NO: 273230 - RNA, 17 nt, Homo sapiens
cuucuguccuacucugu

SEQ ID NO: 273231 - RNA, 16 nt, Homo sapiens
cuucuucaccauuugg

SEQ ID NO: 273232 - RNA, 22 nt, Homo sapiens
cuucuuccccccaaaacugauu

SEQ ID NO: 273233 - RNA, 11 nt, Homo sapiens
cuucuugccuc

SEQ ID NO: 273234 - RNA, 20 nt, Homo sapiens
cuucuugccucugugcugug

SEQ ID NO: 273235 - RNA, 16 nt, Homo sapiens
cuucuuuuugcuucaa

SEQ ID NO: 273236 - RNA, 17 nt, Homo sapiens
cuucuuuuugcuucaaa

SEQ ID NO: 273237 - RNA, 17 nt, Homo sapiens
cuucuuuuuguucuuca

SEQ ID NO: 273238 - RNA, 18 nt, Homo sapiens
cuugaaaacacuguucuc

SEQ ID NO: 273239 - RNA, 15 nt, Homo sapiens
cuugaaaagacauca

SEQ ID NO: 273240 - RNA, 21 nt, Homo sapiens
cuugaaaagacaucaagcaca

SEQ ID NO: 273241 - RNA, 23 nt, Homo sapiens
cuugaaaagacaucaagcacaga

SEQ ID NO: 273242 - RNA, 19 nt, Homo sapiens
cuugaaagaaaauaugcau

SEQ ID NO: 273243 - RNA, 13 nt, Homo sapiens
cuugaacacuggg

SEQ ID NO: 273244 - RNA, 14 nt, Homo sapiens
cuugaacucuuggc

SEQ ID NO: 273245 - RNA, 16 nt, Homo sapiens
cuugaacucuuggccu

SEQ ID NO: 273246 - RNA, 15 nt, Homo sapiens
cuugaagcugcucac

SEQ ID NO: 273247 - RNA, 20 nt, Homo sapiens
cuugaagcugcucacugcuc

SEQ ID NO: 273248 - RNA, 16 nt, Homo sapiens
cuugaaugaugccaug

SEQ ID NO: 273249 - RNA, 15 nt, Homo sapiens
cuugaaugcagggac

SEQ ID NO: 273250 - RNA, 14 nt, Homo sapiens
cuugacagggcaca

SEQ ID NO: 273251 - RNA, 21 nt, Homo sapiens
cuugaccgugaggccagagac

SEQ ID NO: 273252 - RNA, 20 nt, Homo sapiens
cuugaccucaggugauccac

SEQ ID NO: 273253 - RNA, 14 nt, Homo sapiens
cuugacggcauugc

SEQ ID NO: 273254 - RNA, 18 nt, Homo sapiens
cuugacuuuugaaaacaa

SEQ ID NO: 273255 - RNA, 15 nt, Homo sapiens
cuugagccaguaauu

SEQ ID NO: 273256 - RNA, 20 nt, Homo sapiens
cuugagccaguaauuggucc

SEQ ID NO: 273257 - RNA, 22 nt, Homo sapiens
cuugaggaaaaauguccaaaau

SEQ ID NO: 273258 - RNA, 18 nt, Homo sapiens
cuugaggaaaacaagcau

SEQ ID NO: 273259 - RNA, 16 nt, Homo sapiens
cuugaggcaacucauc

SEQ ID NO: 273260 - RNA, 20 nt, Homo sapiens
cuugagggugcuuguucccu

SEQ ID NO: 273261 - RNA, 20 nt, Homo sapiens
cuugaguuuagugaucugaa

SEQ ID NO: 273262 - RNA, 23 nt, Homo sapiens
cuugaucagacauucagagauua

SEQ ID NO: 273263 - RNA, 16 nt, Homo sapiens
cuugauccacuucucu

SEQ ID NO: 273264 - RNA, 13 nt, Homo sapiens
cuugaucuguaua

SEQ ID NO: 273265 - RNA, 18 nt, Homo sapiens
cuugaucuguauauacaa

SEQ ID NO: 273266 - RNA, 13 nt, Homo sapiens
cugcuucauguaa

SEQ ID NO: 273267 - RNA, 17 nt, Homo sapiens
cugcuuccagugaggcu

SEQ ID NO: 273268 - RNA, 16 nt, Homo sapiens
cugcuucugauaugca

SEQ ID NO: 273269 - RNA, 17 nt, Homo sapiens
cugcuuuggaaaucaca

SEQ ID NO: 273270 - RNA, 16 nt, Homo sapiens
cugcuuuggucuugcc

SEQ ID NO: 273271 - RNA, 13 nt, Homo sapiens
cuggacacuucac

SEQ ID NO: 273272 - RNA, 19 nt, Homo sapiens
cuggacaggcuucgucuca

SEQ ID NO: 273273 - RNA, 22 nt, Homo sapiens
cuggacaggcuucgucucagaa

SEQ ID NO: 273274 - RNA, 18 nt, Homo sapiens
cuggaccagccucuccac

SEQ ID NO: 273275 - RNA, 15 nt, Homo sapiens
cuggaccaggucuca

SEQ ID NO: 273276 - RNA, 14 nt, Homo sapiens
cuggaccugaaguu

SEQ ID NO: 273277 - RNA, 17 nt, Homo sapiens
cuggacuaaaacuacau

SEQ ID NO: 273278 - RNA, 20 nt, Homo sapiens
cuggagaacuagagaaggac

SEQ ID NO: 273279 - RNA, 14 nt, Homo sapiens
cuggaggcacccuu

SEQ ID NO: 273280 - RNA, 15 nt, Homo sapiens
cuggagucgggacua

SEQ ID NO: 273281 - RNA, 20 nt, Homo sapiens
cuggaguggaguggcgugau

SEQ ID NO: 273282 - RNA, 22 nt, Homo sapiens
cuggaguuauugaagcagagug

SEQ ID NO: 273283 - RNA, 15 nt, Homo sapiens
cuggaucuaugugua

SEQ ID NO: 273284 - RNA, 21 nt, Homo sapiens
cuggaucuauguguaugcaga

SEQ ID NO: 273285 - RNA, 22 nt, Homo sapiens
cuggauguacuauccaaucugu

SEQ ID NO: 273286 - RNA, 20 nt, Homo sapiens
cuggauuacaggcaugugcc

SEQ ID NO: 273287 - RNA, 17 nt, Homo sapiens
cuggauuucauacugua

SEQ ID NO: 273288 - RNA, 15 nt, Homo sapiens
cuggcaagaaugugu

SEQ ID NO: 273289 - RNA, 16 nt, Homo sapiens
cuggcaagaugcuuua

SEQ ID NO: 273290 - RNA, 19 nt, Homo sapiens
cuggcacucugaggucucu

SEQ ID NO: 273291 - RNA, 19 nt, Homo sapiens
cuggcacugcuuccaguga

SEQ ID NO: 273292 - RNA, 20 nt, Homo sapiens
cuggcaugggaaugaauguc

SEQ ID NO: 273293 - RNA, 17 nt, Homo sapiens
cuggcauuacaauugca

SEQ ID NO: 273294 - RNA, 21 nt, Homo sapiens
cuggccccucagggucccugg

SEQ ID NO: 273295 - RNA, 12 nt, Homo sapiens
cuggcccugugc

SEQ ID NO: 273296 - RNA, 14 nt, Homo sapiens
cuggccuccaaguc

SEQ ID NO: 273297 - RNA, 18 nt, Homo sapiens
cuggccuugagcuucuaa

SEQ ID NO: 273298 - RNA, 20 nt, Homo sapiens
cuggcgugcaguggugcgau

SEQ ID NO: 273299 - RNA, 13 nt, Homo sapiens
cuggcucccaugu

SEQ ID NO: 273300 - RNA, 20 nt, Homo sapiens
cuggcuguggccuaaccugc

SEQ ID NO: 273301 - RNA, 20 nt, Homo sapiens
cuggcuucacagauguguga

SEQ ID NO: 273302 - RNA, 18 nt, Homo sapiens
cuggcuugagugauccuc

SEQ ID NO: 273303 - RNA, 23 nt, Homo sapiens
cuggcuuggggucaagaaacagc

SEQ ID NO: 273304 - RNA, 19 nt, Homo sapiens
cugggacuaaguguaccag

SEQ ID NO: 273305 - RNA, 17 nt, Homo sapiens
cugggacuacaggugug

SEQ ID NO: 273306 - RNA, 19 nt, Homo sapiens
cugggacucaguucuuggc

SEQ ID NO: 273307 - RNA, 19 nt, Homo sapiens
cugggacugugcucagaga

SEQ ID NO: 273308 - RNA, 20 nt, Homo sapiens
cugggagagccuuccagggg

SEQ ID NO: 273309 - RNA, 17 nt, Homo sapiens
cugggaucuggugguca

SEQ ID NO: 273310 - RNA, 18 nt, Homo sapiens
cugggauuacaagcguga

SEQ ID NO: 273311 - RNA, 22 nt, Homo sapiens
cugggauuacaauugugagcca

SEQ ID NO: 273312 - RNA, 18 nt, Homo sapiens
cugggauuacagguguga

SEQ ID NO: 273313 - RNA, 20 nt, Homo sapiens
cugggauuacaggugugagc

SEQ ID NO: 273314 - RNA, 14 nt, Homo sapiens
cugggcacagucag

SEQ ID NO: 273315 - RNA, 21 nt, Homo sapiens
cugggcagaaggaagacuuca

SEQ ID NO: 273316 - RNA, 16 nt, Homo sapiens
cugggccaagucaaag

SEQ ID NO: 273317 - RNA, 22 nt, Homo sapiens
cugggcccucucugcucugcgu

SEQ ID NO: 273318 - RNA, 16 nt, Homo sapiens
cugggcuuggggacca

SEQ ID NO: 273319 - RNA, 15 nt, Homo sapiens
cugggcuugucugua

SEQ ID NO: 273320 - RNA, 21 nt, Homo sapiens
cuggggaugucucucaugacc

SEQ ID NO: 273321 - RNA, 22 nt, Homo sapiens
cugggggaggggacauugaaca

SEQ ID NO: 273322 - RNA, 17 nt, Homo sapiens
cugggguggggaccuca

SEQ ID NO: 273323 - RNA, 21 nt, Homo sapiens
cugggguggggaccucaggcc

SEQ ID NO: 273324 - RNA, 21 nt, Homo sapiens
cugggucucgcuuuguugccc

SEQ ID NO: 273325 - RNA, 23 nt, Homo sapiens
cugggucucgcuuuguugcccag

SEQ ID NO: 273326 - RNA, 16 nt, Homo sapiens
cuggguuccugcaaug

SEQ ID NO: 273327 - RNA, 17 nt, Homo sapiens
cuggguuucucuguaua

SEQ ID NO: 273328 - RNA, 22 nt, Homo sapiens
cuggguuuuguauucucugagc

SEQ ID NO: 273329 - RNA, 20 nt, Homo sapiens
cugguaauuuaagauuccag

SEQ ID NO: 273330 - RNA, 17 nt, Homo sapiens
cuggucaggcucuccag

SEQ ID NO: 273331 - RNA, 20 nt, Homo sapiens
cugguccaguuccuucacuu

SEQ ID NO: 273332 - RNA, 15 nt, Homo sapiens
cuggugacccaguca

SEQ ID NO: 273333 - RNA, 16 nt, Homo sapiens
cuggugacccagucag

SEQ ID NO: 273334 - RNA, 17 nt, Homo sapiens
cugguggggcugccagg

SEQ ID NO: 273335 - RNA, 18 nt, Homo sapiens
cuggugguggcucgggag

SEQ ID NO: 273336 - RNA, 17 nt, Homo sapiens
cugguguggaagagcuc

SEQ ID NO: 273337 - RNA, 23 nt, Homo sapiens
cuguaaacuuaacuguucuuugc

SEQ ID NO: 273338 - RNA, 21 nt, Homo sapiens
cuguaaagauguuuauuucag

SEQ ID NO: 273339 - RNA, 20 nt, Homo sapiens
cuguaaagcuuugugcagau

SEQ ID NO: 273340 - RNA, 15 nt, Homo sapiens
cuguaacaauuaugu

SEQ ID NO: 273341 - RNA, 14 nt, Homo sapiens
cuguaaccucuuca

SEQ ID NO: 273342 - RNA, 12 nt, Homo sapiens
cuguaacuacuu

SEQ ID NO: 273343 - RNA, 17 nt, Homo sapiens
cuguaaucccagcacuu

SEQ ID NO: 273344 - RNA, 21 nt, Homo sapiens
cuguaaucccagcacuuuggg

SEQ ID NO: 273345 - RNA, 23 nt, Homo sapiens
cuguacaaaguagaagucuuaga

SEQ ID NO: 273346 - RNA, 14 nt, Homo sapiens
cuguacaacuaccu

SEQ ID NO: 273347 - RNA, 12 nt, Homo sapiens
cuguaccaguua

SEQ ID NO: 273348 - RNA, 13 nt, Homo sapiens
cuuugacaguguu

SEQ ID NO: 273349 - RNA, 14 nt, Homo sapiens
cuuugacaguguuu

SEQ ID NO: 273350 - RNA, 12 nt, Homo sapiens
cuuugagugaag

SEQ ID NO: 273351 - RNA, 17 nt, Homo sapiens
cuuugccucucuugcca

SEQ ID NO: 273352 - RNA, 13 nt, Homo sapiens
cuuuggacacuca

SEQ ID NO: 273353 - RNA, 14 nt, Homo sapiens
cuuuguacagacaa

SEQ ID NO: 273354 - RNA, 13 nt, Homo sapiens
cuuugucccagaa

SEQ ID NO: 273355 - RNA, 12 nt, Homo sapiens
cuuugugcccaa

SEQ ID NO: 273356 - RNA, 16 nt, Homo sapiens
cuuuguggcacugggg

SEQ ID NO: 273357 - RNA, 15 nt, Homo sapiens
cuuuguguccagagu

SEQ ID NO: 273358 - RNA, 17 nt, Homo sapiens
cuuuguguccagaguuu

SEQ ID NO: 273359 - RNA, 11 nt, Homo sapiens
cuuuguugccc

SEQ ID NO: 273360 - RNA, 21 nt, Homo sapiens
cuuuguuuagcccaaaaccaa

SEQ ID NO: 273361 - RNA, 21 nt, Homo sapiens
cuuuguuuguugucagcugaa

SEQ ID NO: 273362 - RNA, 13 nt, Homo sapiens
cuuuuacauucug

SEQ ID NO: 273363 - RNA, 12 nt, Homo sapiens
cuuuuauuacau

SEQ ID NO: 273364 - RNA, 15 nt, Homo sapiens
cuuuuauuacugggg

SEQ ID NO: 273365 - RNA, 23 nt, Homo sapiens
cuuuucacugcuggcugccuuag

SEQ ID NO: 273366 - RNA, 15 nt, Homo sapiens
cuuuucauaaccuag

SEQ ID NO: 273367 - RNA, 18 nt, Homo sapiens
cuuuuccccaauucaugu

SEQ ID NO: 273368 - RNA, 19 nt, Homo sapiens
cuuuucgcaggauucuucc

SEQ ID NO: 273369 - RNA, 21 nt, Homo sapiens
cuuuucgcaggauucuuccuc

SEQ ID NO: 273370 - RNA, 18 nt, Homo sapiens
cuuuucgccaaggcucac

SEQ ID NO: 273371 - RNA, 22 nt, Homo sapiens
cuuuucgccaaggcucacaugc

SEQ ID NO: 273372 - RNA, 22 nt, Homo sapiens
cuuuucggccccauguaucuca

SEQ ID NO: 273373 - RNA, 21 nt, Homo sapiens
cuuuucuccucacuguaucca

SEQ ID NO: 273374 - RNA, 19 nt, Homo sapiens
cuuuucuggaauguaauca

SEQ ID NO: 273375 - RNA, 21 nt, Homo sapiens
cuuuucuguccgagcuuugaa

SEQ ID NO: 273376 - RNA, 15 nt, Homo sapiens
cuuuugaacccagga

SEQ ID NO: 273377 - RNA, 17 nt, Homo sapiens
cuuuugacaaaggcaag

SEQ ID NO: 273378 - RNA, 20 nt, Homo sapiens
cuuuugacacugcucuaaca

SEQ ID NO: 273379 - RNA, 21 nt, Homo sapiens
cuuuugagugccuuacacaau

SEQ ID NO: 273380 - RNA, 19 nt, Homo sapiens
cuuuugcauaagugcauga

SEQ ID NO: 273381 - RNA, 22 nt, Homo sapiens
cuuuuggggaggaguugucugu

SEQ ID NO: 273382 - RNA, 15 nt, Homo sapiens
cuuuugguaugugac

SEQ ID NO: 273383 - RNA, 16 nt, Homo sapiens
cuuuugguaugugaca

SEQ ID NO: 273384 - RNA, 13 nt, Homo sapiens
cuuuugucccaga

SEQ ID NO: 273385 - RNA, 14 nt, Homo sapiens
cuuuugucccagaa

SEQ ID NO: 273386 - RNA, 23 nt, Homo sapiens
cuuuugugaauuaggcuguaacu

SEQ ID NO: 273387 - RNA, 11 nt, Homo sapiens
cuuuugugcau

SEQ ID NO: 273388 - RNA, 13 nt, Homo sapiens
cuuuugugcauua

SEQ ID NO: 273389 - RNA, 22 nt, Homo sapiens
cuuuuguuccccagcccuaaga

SEQ ID NO: 273390 - RNA, 17 nt, Homo sapiens
cuuuuguuuaccagaga

SEQ ID NO: 273391 - RNA, 18 nt, Homo sapiens
cuuuuuaaagaaugcucu

SEQ ID NO: 273392 - RNA, 15 nt, Homo sapiens
cuuuuuauacuauua

SEQ ID NO: 273393 - RNA, 20 nt, Homo sapiens
cuuuuuccuggcucaucucu

SEQ ID NO: 273394 - RNA, 18 nt, Homo sapiens
cuuuuucuagucuucaua

SEQ ID NO: 273395 - RNA, 17 nt, Homo sapiens
cuuuuucuuugaauuua

SEQ ID NO: 273396 - RNA, 13 nt, Homo sapiens
cuuuuucuuugag

SEQ ID NO: 273397 - RNA, 21 nt, Homo sapiens
cuuuuuucacggaaguuuuca

SEQ ID NO: 273398 - RNA, 16 nt, Homo sapiens
cuuuuuuucuguacca

SEQ ID NO: 273399 - RNA, 20 nt, Homo sapiens
gaaaaaaaaaaaaaagccuu

SEQ ID NO: 273400 - RNA, 22 nt, Homo sapiens
gaaaaaaaaaaaaaagccuuug

SEQ ID NO: 273401 - RNA, 16 nt, Homo sapiens
gaaaaaaaacauugca

SEQ ID NO: 273402 - RNA, 18 nt, Homo sapiens
gaaaaaauaacacuguac

SEQ ID NO: 273403 - RNA, 23 nt, Homo sapiens
gaaaaaauuuacuuuaaacuaca

SEQ ID NO: 273404 - RNA, 22 nt, Homo sapiens
gaaaaagaagguugagggcaau

SEQ ID NO: 273405 - RNA, 14 nt, Homo sapiens
gaaaacacugugca

SEQ ID NO: 273406 - RNA, 12 nt, Homo sapiens
gaaaacacuguu

SEQ ID NO: 273407 - RNA, 17 nt, Homo sapiens
gaaaacacuguucucug

SEQ ID NO: 273408 - RNA, 20 nt, Homo sapiens
gaaaaccugaagaguucacu

SEQ ID NO: 273409 - RNA, 15 nt, Homo sapiens
gaaaacugcaacuug

SEQ ID NO: 273410 - RNA, 22 nt, Homo sapiens
gaaaagaaucggcaauguuuca

SEQ ID NO: 273411 - RNA, 23 nt, Homo sapiens
gaaaagaaucggcaauguuucaa

SEQ ID NO: 273412 - RNA, 22 nt, Homo sapiens
gaaaagaggggaagagacuugg

SEQ ID NO: 273413 - RNA, 17 nt, Homo sapiens
gaaaagggaacugaaca

SEQ ID NO: 273414 - RNA, 13 nt, Homo sapiens
gaaaaguuuugua

SEQ ID NO: 273415 - RNA, 19 nt, Homo sapiens
gaaaauaguggugugauuu

SEQ ID NO: 273416 - RNA, 16 nt, Homo sapiens
gaaaaucacacugucu

SEQ ID NO: 273417 - RNA, 22 nt, Homo sapiens
gaaaaucgugacaacacuugug

SEQ ID NO: 273418 - RNA, 16 nt, Homo sapiens
gaaaauggaagacagc

SEQ ID NO: 273419 - RNA, 17 nt, Homo sapiens
gaaaauuguacaaccug

SEQ ID NO: 273420 - RNA, 18 nt, Homo sapiens
cuuacacuuuaugcacaa

SEQ ID NO: 273421 - RNA, 20 nt, Homo sapiens
cuuacacuuuaugcacaaaa

SEQ ID NO: 273422 - RNA, 20 nt, Homo sapiens
cuuacauuugaaaucuauga

SEQ ID NO: 273423 - RNA, 11 nt, Homo sapiens
cuuaccugcca

SEQ ID NO: 273424 - RNA, 15 nt, Homo sapiens
cuuaccugccaggaa

SEQ ID NO: 273425 - RNA, 16 nt, Homo sapiens
cuuacugcuucaugua

SEQ ID NO: 273426 - RNA, 15 nt, Homo sapiens
cuuacuuaguguuau

SEQ ID NO: 273427 - RNA, 14 nt, Homo sapiens
cuuagaaagucuga

SEQ ID NO: 273428 - RNA, 18 nt, Homo sapiens
cuuagaaauugcauuucc

SEQ ID NO: 273429 - RNA, 12 nt, Homo sapiens
cuuagaacaaag

SEQ ID NO: 273430 - RNA, 19 nt, Homo sapiens
cuuagaauuugggggaaaa

SEQ ID NO: 273431 - RNA, 13 nt, Homo sapiens
cuuagacaguccc

SEQ ID NO: 273432 - RNA, 16 nt, Homo sapiens
cuuagacagucccugc

SEQ ID NO: 273433 - RNA, 13 nt, Homo sapiens
cuuagaccucagc

SEQ ID NO: 273434 - RNA, 16 nt, Homo sapiens
cuuagagcucucauga

SEQ ID NO: 273435 - RNA, 23 nt, Homo sapiens
cuuagagcuuuaccuaaauauga

SEQ ID NO: 273436 - RNA, 17 nt, Homo sapiens
cuuagaggagugaaaug

SEQ ID NO: 273437 - RNA, 19 nt, Homo sapiens
cuuagauuucuagcaguau

SEQ ID NO: 273438 - RNA, 17 nt, Homo sapiens
cuuagcuuagaccucag

SEQ ID NO: 273439 - RNA, 15 nt, Homo sapiens
cuuaggccagcacca

SEQ ID NO: 273440 - RNA, 17 nt, Homo sapiens
cuuagguuggcaaaaag

SEQ ID NO: 273441 - RNA, 14 nt, Homo sapiens
cuuaguauuugcau

SEQ ID NO: 273442 - RNA, 21 nt, Homo sapiens
cuuaguuacucauucagggau

SEQ ID NO: 273443 - RNA, 14 nt, Homo sapiens
cuuauacauuugau

SEQ ID NO: 273444 - RNA, 13 nt, Homo sapiens
cuuauauacagac

SEQ ID NO: 273445 - RNA, 14 nt, Homo sapiens
cuuauauucaucca

SEQ ID NO: 273446 - RNA, 19 nt, Homo sapiens
cuuaugcaaauaaccauug

SEQ ID NO: 273447 - RNA, 19 nt, Homo sapiens
cuuauucugucuggcauua

SEQ ID NO: 273448 - RNA, 13 nt, Homo sapiens
cuuauuuccucau

SEQ ID NO: 273449 - RNA, 15 nt, Homo sapiens
cuuauuuuaggauua

SEQ ID NO: 273450 - RNA, 15 nt, Homo sapiens
cuucaaauauuuccc

SEQ ID NO: 273451 - RNA, 16 nt, Homo sapiens
cuucaaccccaugaga

SEQ ID NO: 273452 - RNA, 21 nt, Homo sapiens
cuucaaucucuugcacucaaa

SEQ ID NO: 273453 - RNA, 16 nt, Homo sapiens
cuucaaucugaagaua

SEQ ID NO: 273454 - RNA, 16 nt, Homo sapiens
cuucacaacccaucua

SEQ ID NO: 273455 - RNA, 23 nt, Homo sapiens
cuucacagaugugugauucacag

SEQ ID NO: 273456 - RNA, 14 nt, Homo sapiens
cuucacagauuguu

SEQ ID NO: 273457 - RNA, 15 nt, Homo sapiens
cuucacagauuguuc

SEQ ID NO: 273458 - RNA, 12 nt, Homo sapiens
cuucacaguacc

SEQ ID NO: 273459 - RNA, 17 nt, Homo sapiens
cuucacaguacccaaac

SEQ ID NO: 273460 - RNA, 15 nt, Homo sapiens
cuucacaugcaucaa

SEQ ID NO: 273461 - RNA, 15 nt, Homo sapiens
cuucacucaaucucu

SEQ ID NO: 273462 - RNA, 17 nt, Homo sapiens
cuucacucaaucucuga

SEQ ID NO: 273463 - RNA, 14 nt, Homo sapiens
cuucacuuacagau

SEQ ID NO: 273464 - RNA, 20 nt, Homo sapiens
cuucagaucucuaacuucac

SEQ ID NO: 273465 - RNA, 14 nt, Homo sapiens
cuucagauuugccu

SEQ ID NO: 273466 - RNA, 22 nt, Homo sapiens
cuucagccuagccgaccucagc

SEQ ID NO: 273467 - RNA, 21 nt, Homo sapiens
cuucagugccaaaaacaacaa

SEQ ID NO: 273468 - RNA, 21 nt, Homo sapiens
cuucaguuuccauccccagga

SEQ ID NO: 273469 - RNA, 20 nt, Homo sapiens
cuucauaauuucuucacuca

SEQ ID NO: 273470 - RNA, 21 nt, Homo sapiens
cuucauccucugagugugacc

SEQ ID NO: 273471 - RNA, 16 nt, Homo sapiens
cuucaucugugaaaug

SEQ ID NO: 273472 - RNA, 21 nt, Homo sapiens
cuucaugaucaucacaaucau

SEQ ID NO: 273473 - RNA, 15 nt, Homo sapiens
cuucauggacuucca

SEQ ID NO: 273474 - RNA, 20 nt, Homo sapiens
cuucaugucuuaaccuaccu

SEQ ID NO: 273475 - RNA, 17 nt, Homo sapiens
cuucauuaccucaguga

SEQ ID NO: 273476 - RNA, 16 nt, Homo sapiens
cuucauuuuuccuaac

SEQ ID NO: 273477 - RNA, 20 nt, Homo sapiens
cuuccaaacauuaaugcaau

SEQ ID NO: 273478 - RNA, 21 nt, Homo sapiens
cuuccaacucaaacucuuaaa

SEQ ID NO: 273479 - RNA, 11 nt, Homo sapiens
cuuccaaggau

SEQ ID NO: 273480 - RNA, 21 nt, Homo sapiens
cuuccaauuuacauacucugc

SEQ ID NO: 273481 - RNA, 14 nt, Homo sapiens
cuuccaucaccucc

SEQ ID NO: 273482 - RNA, 23 nt, Homo sapiens
cuuccaugacauaagugcuauug

SEQ ID NO: 273483 - RNA, 18 nt, Homo sapiens
cuuccauuugcaagggaa

SEQ ID NO: 273484 - RNA, 12 nt, Homo sapiens
cuucccacggcu

SEQ ID NO: 273485 - RNA, 20 nt, Homo sapiens
cuucccaugcaacacccucu

SEQ ID NO: 273486 - RNA, 15 nt, Homo sapiens
cuuccccccaaaacu

SEQ ID NO: 273487 - RNA, 13 nt, Homo sapiens
cuuccccuugccc

SEQ ID NO: 273488 - RNA, 16 nt, Homo sapiens
cuucccuaaucuucca

SEQ ID NO: 273489 - RNA, 22 nt, Homo sapiens
cuucccuccucccaugucacug

SEQ ID NO: 273490 - RNA, 19 nt, Homo sapiens
cuucccuuaaaucauggua

SEQ ID NO: 273491 - RNA, 23 nt, Homo sapiens
cuuccgucucccccguguucccc

SEQ ID NO: 273492 - RNA, 14 nt, Homo sapiens
cuuccucaccacuu

SEQ ID NO: 273493 - RNA, 16 nt, Homo sapiens
gaagagaaugugacag

SEQ ID NO: 273494 - RNA, 23 nt, Homo sapiens
gaagagccuugcggaagguucua

SEQ ID NO: 273495 - RNA, 14 nt, Homo sapiens
gaagauacaugucu

SEQ ID NO: 273496 - RNA, 21 nt, Homo sapiens
gaagaucaacgccucacugaa

SEQ ID NO: 273497 - RNA, 15 nt, Homo sapiens
gaagaugauaccuga

SEQ ID NO: 273498 - RNA, 21 nt, Homo sapiens
gaagauggauugguguaaaag

SEQ ID NO: 273499 - RNA, 18 nt, Homo sapiens
gaagauuauaaaagccaa

SEQ ID NO: 273500 - RNA, 15 nt, Homo sapiens
gaagauucuauguua

SEQ ID NO: 273501 - RNA, 12 nt, Homo sapiens
gaagcacagcuu

SEQ ID NO: 273502 - RNA, 17 nt, Homo sapiens
gaagcauuuacuuugug

SEQ ID NO: 273503 - RNA, 20 nt, Homo sapiens
gaagccacuauuacugggac

SEQ ID NO: 273504 - RNA, 12 nt, Homo sapiens
gaagccaugucu

SEQ ID NO: 273505 - RNA, 21 nt, Homo sapiens
gaagccucacugcaagcacug

SEQ ID NO: 273506 - RNA, 17 nt, Homo sapiens
gaagcguuguccucagc

SEQ ID NO: 273507 - RNA, 19 nt, Homo sapiens
gaagcugcucacugcucac

SEQ ID NO: 273508 - RNA, 15 nt, Homo sapiens
gaaggaauuauuccc

SEQ ID NO: 273509 - RNA, 17 nt, Homo sapiens
gaaggagaggauuuggc

SEQ ID NO: 273510 - RNA, 12 nt, Homo sapiens
gaaggagggaga

SEQ ID NO: 273511 - RNA, 12 nt, Homo sapiens
gaaggaucccau

SEQ ID NO: 273512 - RNA, 14 nt, Homo sapiens
gaaggaugcugucu

SEQ ID NO: 273513 - RNA, 17 nt, Homo sapiens
gaaggcuacauauacau

SEQ ID NO: 273514 - RNA, 24 nt, Homo sapiens
gaaggcuacauauacauaguugcu

SEQ ID NO: 273515 - RNA, 14 nt, Homo sapiens
gaaggcuaugggga

SEQ ID NO: 273516 - RNA, 23 nt, Homo sapiens
gaagggcuuggacucaagcaaga

SEQ ID NO: 273517 - RNA, 23 nt, Homo sapiens
gaaggguaccuugaacacugggg

SEQ ID NO: 273518 - RNA, 12 nt, Homo sapiens
gaaggugccucu

SEQ ID NO: 273519 - RNA, 19 nt, Homo sapiens
gaagucacacaguauuacu

SEQ ID NO: 273520 - RNA, 15 nt, Homo sapiens
gaagucuucuauuua

SEQ ID NO: 273521 - RNA, 18 nt, Homo sapiens
gaagucuuuguacagaca

SEQ ID NO: 273522 - RNA, 19 nt, Homo sapiens
gaagugacaccaguucuuu

SEQ ID NO: 273523 - RNA, 15 nt, Homo sapiens
gaagugaccaaggag

SEQ ID NO: 273524 - RNA, 22 nt, Homo sapiens
gaagugugucacccuuaggcca

SEQ ID NO: 273525 - RNA, 13 nt, Homo sapiens
gaagugugugauc

SEQ ID NO: 273526 - RNA, 16 nt, Homo sapiens
gaagugugugaucugu

SEQ ID NO: 273527 - RNA, 15 nt, Homo sapiens
gaaguugcccuccag

SEQ ID NO: 273528 - RNA, 16 nt, Homo sapiens
gaaguuuaauugacuu

SEQ ID NO: 273529 - RNA, 16 nt, Homo sapiens
gaaguuuucuugacuu

SEQ ID NO: 273530 - RNA, 21 nt, Homo sapiens
gaauaaaccaucaucuugcca

SEQ ID NO: 273531 - RNA, 13 nt, Homo sapiens
gaauaaagagggu

SEQ ID NO: 273532 - RNA, 17 nt, Homo sapiens
gaauaaaggcaguuuuc

SEQ ID NO: 273533 - RNA, 22 nt, Homo sapiens
gaauaacauggugugcuucuua

SEQ ID NO: 273534 - RNA, 18 nt, Homo sapiens
gaauaauacaguaucuca

SEQ ID NO: 273535 - RNA, 14 nt, Homo sapiens
gaauaauaccuaag

SEQ ID NO: 273536 - RNA, 13 nt, Homo sapiens
gaauaauccagaa

SEQ ID NO: 273537 - RNA, 14 nt, Homo sapiens
gaauaauccagaaa

SEQ ID NO: 273538 - RNA, 17 nt, Homo sapiens
gaauacauaaaguaugu

SEQ ID NO: 273539 - RNA, 13 nt, Homo sapiens
gaauaguuuccaa

SEQ ID NO: 273540 - RNA, 16 nt, Homo sapiens
gaauaugauuaguaaa

SEQ ID NO: 273541 - RNA, 19 nt, Homo sapiens
gaauauuauuggaaaauuc

SEQ ID NO: 273542 - RNA, 16 nt, Homo sapiens
gaaucaaaugcaauuu

SEQ ID NO: 273543 - RNA, 23 nt, Homo sapiens
gaaucacguaaagcuagaaauga

SEQ ID NO: 273544 - RNA, 20 nt, Homo sapiens
gaaucuccauuucugcucag

SEQ ID NO: 273545 - RNA, 12 nt, Homo sapiens
gaaucucucuuc

SEQ ID NO: 273546 - RNA, 15 nt, Homo sapiens
gaaucuguuaccaga

SEQ ID NO: 273547 - RNA, 14 nt, Homo sapiens
gaaugaacaaccuc

SEQ ID NO: 273548 - RNA, 19 nt, Homo sapiens
gaaugaaugucagugugac

SEQ ID NO: 273549 - RNA, 22 nt, Homo sapiens
gaaugaaugucagugugacuga

SEQ ID NO: 273550 - RNA, 15 nt, Homo sapiens
gaaugagacuuacuu

SEQ ID NO: 273551 - RNA, 17 nt, Homo sapiens
gaaugagcaaaaccaaa

SEQ ID NO: 273552 - RNA, 23 nt, Homo sapiens
gaaugagugaaucaccuguggua

SEQ ID NO: 273553 - RNA, 18 nt, Homo sapiens
gaaugcaaagaugaaggu

SEQ ID NO: 273554 - RNA, 14 nt, Homo sapiens
gaaugcagggacaa

SEQ ID NO: 273555 - RNA, 14 nt, Homo sapiens
gaaugcccagugag

SEQ ID NO: 273556 - RNA, 21 nt, Homo sapiens
gaaugcucuuuacuucaugga

SEQ ID NO: 273557 - RNA, 15 nt, Homo sapiens
gaauguaugugcaca

SEQ ID NO: 273558 - RNA, 18 nt, Homo sapiens
gaauguuugucucauccc

SEQ ID NO: 273559 - RNA, 19 nt, Homo sapiens
gaauucuuaaauaugugga

SEQ ID NO: 273560 - RNA, 21 nt, Homo sapiens
gaauuucccaaagcagugcau

SEQ ID NO: 273561 - RNA, 17 nt, Homo sapiens
gaauuucucacaaagga

SEQ ID NO: 273562 - RNA, 17 nt, Homo sapiens
gaauuucuguucuucca

SEQ ID NO: 273563 - RNA, 12 nt, Homo sapiens
gaauuugagugc

SEQ ID NO: 273564 - RNA, 18 nt, Homo sapiens
gaauuugaguuggaucau

SEQ ID NO: 273565 - RNA, 16 nt, Homo sapiens
gaauuuuucuuccuga

SEQ ID NO: 273566 - RNA, 22 nt, Homo sapiens
gacaaaccagaagcaacagaaa

SEQ ID NO: 273567 - RNA, 22 nt, Homo sapiens
gacaaagcgugguggacaugca

SEQ ID NO: 273568 - RNA, 16 nt, Homo sapiens
gacaaccucauuuuaa

SEQ ID NO: 273569 - RNA, 16 nt, Homo sapiens
gacacagcaucagcuc

SEQ ID NO: 273570 - RNA, 17 nt, Homo sapiens
gacacaugcaaggucau

SEQ ID NO: 273571 - RNA, 20 nt, Homo sapiens
gacacaugcugaacaucaca

SEQ ID NO: 273572 - RNA, 16 nt, Homo sapiens
gacacauguccaagaa

SEQ ID NO: 273573 - RNA, 21 nt, Homo sapiens
gacacucacacggacacucaa

SEQ ID NO: 273574 - RNA, 14 nt, Homo sapiens
gacagaacuaagau

SEQ ID NO: 273575 - RNA, 19 nt, Homo sapiens
gacagaagaaacuacccuc

SEQ ID NO: 273576 - RNA, 16 nt, Homo sapiens
cuugucucacuugugc

SEQ ID NO: 273577 - RNA, 19 nt, Homo sapiens
cuugucuccccuguucccc

SEQ ID NO: 273578 - RNA, 15 nt, Homo sapiens
cuuguguuaugaagc

SEQ ID NO: 273579 - RNA, 21 nt, Homo sapiens
cuuguuagugcacagcacaaa

SEQ ID NO: 273580 - RNA, 22 nt, Homo sapiens
cuuguuagugcacagcacaaau

SEQ ID NO: 273581 - RNA, 23 nt, Homo sapiens
cuuguuccccacugacagccucc

SEQ ID NO: 273582 - RNA, 14 nt, Homo sapiens
cuuguugugcucuu

SEQ ID NO: 273583 - RNA, 20 nt, Homo sapiens
cuuguuguuuucccaaagag

SEQ ID NO: 273584 - RNA, 15 nt, Homo sapiens
cuuuaaaacuuaucc

SEQ ID NO: 273585 - RNA, 20 nt, Homo sapiens
cuuuaagagaaaugagcugc

SEQ ID NO: 273586 - RNA, 21 nt, Homo sapiens
cuuuaagcagcgccagugaca

SEQ ID NO: 273587 - RNA, 19 nt, Homo sapiens
cuuuaauuuuuuacuauuu

SEQ ID NO: 273588 - RNA, 19 nt, Homo sapiens
cuuuaccuaaauaugagcc

SEQ ID NO: 273589 - RNA, 15 nt, Homo sapiens
cuuuacuccguaaca

SEQ ID NO: 273590 - RNA, 20 nt, Homo sapiens
cuuuacuccguaacagauuu

SEQ ID NO: 273591 - RNA, 19 nt, Homo sapiens
cuuuacuguuagucauuug

SEQ ID NO: 273592 - RNA, 20 nt, Homo sapiens
cuuuacuucauggacuucca

SEQ ID NO: 273593 - RNA, 13 nt, Homo sapiens
cuuuagucugcaa

SEQ ID NO: 273594 - RNA, 22 nt, Homo sapiens
cuuuaguuuuugugaaguuuaa

SEQ ID NO: 273595 - RNA, 19 nt, Homo sapiens
cuuuauaaucuacuccuug

SEQ ID NO: 273596 - RNA, 15 nt, Homo sapiens
cuuuauacucaggca

SEQ ID NO: 273597 - RNA, 22 nt, Homo sapiens
cuuuauuacaguuuaucuaugg

SEQ ID NO: 273598 - RNA, 13 nt, Homo sapiens
cuuuauugcucau

SEQ ID NO: 273599 - RNA, 18 nt, Homo sapiens
cuuucaacagaauucacu

SEQ ID NO: 273600 - RNA, 19 nt, Homo sapiens
cuuucaacagaauucacuu

SEQ ID NO: 273601 - RNA, 16 nt, Homo sapiens
cuuucaaccucaguga

SEQ ID NO: 273602 - RNA, 20 nt, Homo sapiens
cuuucaagcagucgugccug

SEQ ID NO: 273603 - RNA, 14 nt, Homo sapiens
cuuucacacugugg

SEQ ID NO: 273604 - RNA, 13 nt, Homo sapiens
cuuucacaucucu

SEQ ID NO: 273605 - RNA, 19 nt, Homo sapiens
cuuucaccacaugugcaca

SEQ ID NO: 273606 - RNA, 16 nt, Homo sapiens
cuuucagauacuggau

SEQ ID NO: 273607 - RNA, 24 nt, Homo sapiens
cuuucaggccacauggcuaaagaa

SEQ ID NO: 273608 - RNA, 21 nt, Homo sapiens
cuuucagguuuacuauguuua

SEQ ID NO: 273609 - RNA, 14 nt, Homo sapiens
cuuucauaaucuuu

SEQ ID NO: 273610 - RNA, 14 nt, Homo sapiens
cuuuccaaccggcu

SEQ ID NO: 273611 - RNA, 23 nt, Homo sapiens
cuuucccucccuuccucuuucca

SEQ ID NO: 273612 - RNA, 18 nt, Homo sapiens
cuuucccuuaaauaacac

SEQ ID NO: 273613 - RNA, 16 nt, Homo sapiens
cuuuccucaucaggcc

SEQ ID NO: 273614 - RNA, 19 nt, Homo sapiens
cuuuccuguagucccauug

SEQ ID NO: 273615 - RNA, 15 nt, Homo sapiens
cuuuccuuuccauug

SEQ ID NO: 273616 - RNA, 14 nt, Homo sapiens
cuuucuacccagcg

SEQ ID NO: 273617 - RNA, 15 nt, Homo sapiens
cuuucuccagaucag

SEQ ID NO: 273618 - RNA, 17 nt, Homo sapiens
cuuucuccagaucagac

SEQ ID NO: 273619 - RNA, 18 nt, Homo sapiens
cuuucugcuaucaaagag

SEQ ID NO: 273620 - RNA, 19 nt, Homo sapiens
cuuucuucauguucaguca

SEQ ID NO: 273621 - RNA, 16 nt, Homo sapiens
cuuucuuccaaacagg

SEQ ID NO: 273622 - RNA, 20 nt, Homo sapiens
cuuucuucccuacaguugaa

SEQ ID NO: 273623 - RNA, 15 nt, Homo sapiens
cuuugacaguguuuu

SEQ ID NO: 273624 - RNA, 20 nt, Homo sapiens
cuuugaccuaaauuauuuac

SEQ ID NO: 273625 - RNA, 17 nt, Homo sapiens
cuuugagacugggucuc

SEQ ID NO: 273626 - RNA, 16 nt, Homo sapiens
cuuugagugacugggu

SEQ ID NO: 273627 - RNA, 22 nt, Homo sapiens
cuuugccucucaauugucauug

SEQ ID NO: 273628 - RNA, 15 nt, Homo sapiens
cuuuggaaaucacac

SEQ ID NO: 273629 - RNA, 18 nt, Homo sapiens
cuuuggaagauggcauaa

SEQ ID NO: 273630 - RNA, 22 nt, Homo sapiens
cuuuggacuugucccgggacac

SEQ ID NO: 273631 - RNA, 16 nt, Homo sapiens
cuuuggcaugagaugg

SEQ ID NO: 273632 - RNA, 15 nt, Homo sapiens
cuuugguaaucuuca

SEQ ID NO: 273633 - RNA, 16 nt, Homo sapiens
cuuugguaaucuucaa

SEQ ID NO: 273634 - RNA, 23 nt, Homo sapiens
cuuuggugaacauugcaauagaa

SEQ ID NO: 273635 - RNA, 21 nt, Homo sapiens
cuuuguaaagaaaguggcuug

SEQ ID NO: 273636 - RNA, 15 nt, Homo sapiens
cuuuguacuuugugc

SEQ ID NO: 273637 - RNA, 18 nt, Homo sapiens
gacgugauuuugcuguag

SEQ ID NO: 273638 - RNA, 19 nt, Homo sapiens
gacgugauuuugcuguaga

SEQ ID NO: 273639 - RNA, 19 nt, Homo sapiens
gacuaaguguaccagagaa

SEQ ID NO: 273640 - RNA, 17 nt, Homo sapiens
gacuacaggcacccacc

SEQ ID NO: 273641 - RNA, 12 nt, Homo sapiens
gacuauggagcu

SEQ ID NO: 273642 - RNA, 17 nt, Homo sapiens
gacuauggcuaccaaaa

SEQ ID NO: 273643 - RNA, 22 nt, Homo sapiens
gacuaugucacccaaugcauau

SEQ ID NO: 273644 - RNA, 17 nt, Homo sapiens
gacucaaguuucuucaa

SEQ ID NO: 273645 - RNA, 12 nt, Homo sapiens
gacucacauccu

SEQ ID NO: 273646 - RNA, 21 nt, Homo sapiens
gacucagggccccagcacuaa

SEQ ID NO: 273647 - RNA, 16 nt, Homo sapiens
gacucaucauuuccau

SEQ ID NO: 273648 - RNA, 16 nt, Homo sapiens
gacucauugcuucaca

SEQ ID NO: 273649 - RNA, 21 nt, Homo sapiens
gacucauugcuucacaaccca

SEQ ID NO: 273650 - RNA, 13 nt, Homo sapiens
gacuccaguuaaa

SEQ ID NO: 273651 - RNA, 20 nt, Homo sapiens
gacucuaacaguaguugcaa

SEQ ID NO: 273652 - RNA, 14 nt, Homo sapiens
gacucucagcagcu

SEQ ID NO: 273653 - RNA, 19 nt, Homo sapiens
gacucuccagaaagcucau

SEQ ID NO: 273654 - RNA, 22 nt, Homo sapiens
gacugaguacguugugcauuug

SEQ ID NO: 273655 - RNA, 12 nt, Homo sapiens
gacugaugccag

SEQ ID NO: 273656 - RNA, 22 nt, Homo sapiens
gacugaugccagacaaaccuug

SEQ ID NO: 273657 - RNA, 12 nt, Homo sapiens
gacugauuucag

SEQ ID NO: 273658 - RNA, 17 nt, Homo sapiens
gacugcagugcuguaaa

SEQ ID NO: 273659 - RNA, 14 nt, Homo sapiens
gacugcugagucaa

SEQ ID NO: 273660 - RNA, 12 nt, Homo sapiens
gacugguugguu

SEQ ID NO: 273661 - RNA, 14 nt, Homo sapiens
gacuguacuccucc

SEQ ID NO: 273662 - RNA, 13 nt, Homo sapiens
gacuguagaagaa

SEQ ID NO: 273663 - RNA, 16 nt, Homo sapiens
gacuuagaaaaauccu

SEQ ID NO: 273664 - RNA, 17 nt, Homo sapiens
gacuucugccuggagac

SEQ ID NO: 273665 - RNA, 21 nt, Homo sapiens
gacuugagcccagagugaaca

SEQ ID NO: 273666 - RNA, 20 nt, Homo sapiens
gacuuguuuuaugcucaggg

SEQ ID NO: 273667 - RNA, 21 nt, Homo sapiens
gacuuuugaaaacaaaauaug

SEQ ID NO: 273668 - RNA, 20 nt, Homo sapiens
gacuuuuuuuaaauaguaaa

SEQ ID NO: 273669 - RNA, 23 nt, Homo sapiens
gagaaaaaauauuuuccugccag

SEQ ID NO: 273670 - RNA, 14 nt, Homo sapiens
gagaaaaagggagg

SEQ ID NO: 273671 - RNA, 23 nt, Homo sapiens
gagaaagagcacuuaagagaaua

SEQ ID NO: 273672 - RNA, 13 nt, Homo sapiens
gagaaaugagcug

SEQ ID NO: 273673 - RNA, 16 nt, Homo sapiens
gagaaauuaccaaaau

SEQ ID NO: 273674 - RNA, 16 nt, Homo sapiens
gagaacaaugugcuau

SEQ ID NO: 273675 - RNA, 18 nt, Homo sapiens
gagaagagaaugcacaaa

SEQ ID NO: 273676 - RNA, 15 nt, Homo sapiens
gagaagauucuugua

SEQ ID NO: 273677 - RNA, 20 nt, Homo sapiens
gagaagccagcuuuccucau

SEQ ID NO: 273678 - RNA, 21 nt, Homo sapiens
gagaagccagcuuuccucauc

SEQ ID NO: 273679 - RNA, 20 nt, Homo sapiens
gagaaggcaaccuugacucu

SEQ ID NO: 273680 - RNA, 13 nt, Homo sapiens
gagaaggggccca

SEQ ID NO: 273681 - RNA, 21 nt, Homo sapiens
gagaauuuacgagcagggaug

SEQ ID NO: 273682 - RNA, 23 nt, Homo sapiens
gagacacuauuuaucugugcaaa

SEQ ID NO: 273683 - RNA, 15 nt, Homo sapiens
gagacagcacaggca

SEQ ID NO: 273684 - RNA, 12 nt, Homo sapiens
gagacaggguuu

SEQ ID NO: 273685 - RNA, 24 nt, Homo sapiens
gagacaggguuuggcugugucuaa

SEQ ID NO: 273686 - RNA, 19 nt, Homo sapiens
gagacaugagcauggcuga

SEQ ID NO: 273687 - RNA, 20 nt, Homo sapiens
gagaccccgggagccgggga

SEQ ID NO: 273688 - RNA, 23 nt, Homo sapiens
gagacucagggccccagcacuaa

SEQ ID NO: 273689 - RNA, 13 nt, Homo sapiens
gagacucugucuc

SEQ ID NO: 273690 - RNA, 15 nt, Homo sapiens
gagacugcugaguca

SEQ ID NO: 273691 - RNA, 13 nt, Homo sapiens
gagacugggucuc

SEQ ID NO: 273692 - RNA, 20 nt, Homo sapiens
gagacuguaaguuacaugaa

SEQ ID NO: 273693 - RNA, 20 nt, Homo sapiens
gagagaaucccuagucuuca

SEQ ID NO: 273694 - RNA, 14 nt, Homo sapiens
gagagaucugcugu

SEQ ID NO: 273695 - RNA, 16 nt, Homo sapiens
gagagcaaauggcaaa

SEQ ID NO: 273696 - RNA, 13 nt, Homo sapiens
gagagcagugugg

SEQ ID NO: 273697 - RNA, 16 nt, Homo sapiens
gagagccaccaagagg

SEQ ID NO: 273698 - RNA, 22 nt, Homo sapiens
gagagcucgcuuugagugacug

SEQ ID NO: 273699 - RNA, 19 nt, Homo sapiens
gagagcugggacucaguuc

SEQ ID NO: 273700 - RNA, 23 nt, Homo sapiens
gagaggagaaggagggagacaug

SEQ ID NO: 273701 - RNA, 19 nt, Homo sapiens
gagaggccacagugcaauu

SEQ ID NO: 273702 - RNA, 16 nt, Homo sapiens
gagagggggauguuuc

SEQ ID NO: 273703 - RNA, 13 nt, Homo sapiens
gagagggggccac

SEQ ID NO: 273704 - RNA, 13 nt, Homo sapiens
gagaguccaucag

SEQ ID NO: 273705 - RNA, 18 nt, Homo sapiens
gagauaauucuagcuuug

SEQ ID NO: 273706 - RNA, 23 nt, Homo sapiens
gagauacagcucagagugccacg

SEQ ID NO: 273707 - RNA, 21 nt, Homo sapiens
gagaucaugccacuacacucc

SEQ ID NO: 273708 - RNA, 11 nt, Homo sapiens
gagaucccaac

SEQ ID NO: 273709 - RNA, 15 nt, Homo sapiens
gagaucuaggugagg

SEQ ID NO: 273710 - RNA, 17 nt, Homo sapiens
gagauggaggaaaguga

SEQ ID NO: 273711 - RNA, 14 nt, Homo sapiens
gagauggccaugua

SEQ ID NO: 273712 - RNA, 20 nt, Homo sapiens
gagauucucuggcacucuga

SEQ ID NO: 273713 - RNA, 19 nt, Homo sapiens
gagcaaaaucgaugcagug

SEQ ID NO: 273714 - RNA, 19 nt, Homo sapiens
gagcacauaccaugugcca

SEQ ID NO: 273715 - RNA, 15 nt, Homo sapiens
gagcagaacuuucac

SEQ ID NO: 273716 - RNA, 15 nt, Homo sapiens
gagcagccacaacca

SEQ ID NO: 273717 - RNA, 19 nt, Homo sapiens
gagcagccacaaccaaaaa

SEQ ID NO: 273718 - RNA, 13 nt, Homo sapiens
gagcaggcuucuu

SEQ ID NO: 273719 - RNA, 16 nt, Homo sapiens
gagcaguaccggccaa

SEQ ID NO: 273720 - RNA, 23 nt, Homo sapiens
gagcaucacaguuuugguugcuu

SEQ ID NO: 273721 - RNA, 17 nt, Homo sapiens
gagcaugggacuguucu

SEQ ID NO: 273722 - RNA, 21 nt, Homo sapiens
gagcauuguggcugucagcag

SEQ ID NO: 273723 - RNA, 13 nt, Homo sapiens
gagccaaggguuc

SEQ ID NO: 273724 - RNA, 18 nt, Homo sapiens
gagccagauuucacucuc

SEQ ID NO: 273725 - RNA, 23 nt, Homo sapiens
gagcccacgcccccacuggugac

SEQ ID NO: 273726 - RNA, 16 nt, Homo sapiens
gagccccccacugcag

SEQ ID NO: 273727 - RNA, 12 nt, Homo sapiens
gagcccuuccag

SEQ ID NO: 273728 - RNA, 21 nt, Homo sapiens
gagccgagauugcaccacugc

SEQ ID NO: 273729 - RNA, 16 nt, Homo sapiens
gagccgggagccugac

SEQ ID NO: 273730 - RNA, 16 nt, Homo sapiens
gagccguuacuacaca

SEQ ID NO: 273731 - RNA, 19 nt, Homo sapiens
gaacaauauugacuuuguc

SEQ ID NO: 273732 - RNA, 21 nt, Homo sapiens
gaacacuaaugaggaaacugc

SEQ ID NO: 273733 - RNA, 22 nt, Homo sapiens
gaacacuauaaaaacagcuccu

SEQ ID NO: 273734 - RNA, 14 nt, Homo sapiens
gaacacuccuucac

SEQ ID NO: 273735 - RNA, 12 nt, Homo sapiens
gaacacuggggg

SEQ ID NO: 273736 - RNA, 19 nt, Homo sapiens
gaacaggccgcacaucuca

SEQ ID NO: 273737 - RNA, 21 nt, Homo sapiens
gaacagguuuaaaaaucccca

SEQ ID NO: 273738 - RNA, 15 nt, Homo sapiens
gaacaguaacugcca

SEQ ID NO: 273739 - RNA, 16 nt, Homo sapiens
gaacaguaacugccau

SEQ ID NO: 273740 - RNA, 20 nt, Homo sapiens
gaacauguuuuucuucuccc

SEQ ID NO: 273741 - RNA, 17 nt, Homo sapiens
gaaccaaaaagaggcua

SEQ ID NO: 273742 - RNA, 18 nt, Homo sapiens
gaaccaaaccaaaucaua

SEQ ID NO: 273743 - RNA, 21 nt, Homo sapiens
gaaccaaaucuggaagccaaa

SEQ ID NO: 273744 - RNA, 17 nt, Homo sapiens
gaaccagagcucagaga

SEQ ID NO: 273745 - RNA, 15 nt, Homo sapiens
gaaccaggcaacuug

SEQ ID NO: 273746 - RNA, 16 nt, Homo sapiens
gaaccgaggcagggaa

SEQ ID NO: 273747 - RNA, 12 nt, Homo sapiens
gaaccucagggc

SEQ ID NO: 273748 - RNA, 15 nt, Homo sapiens
gaacgaagccaccuu

SEQ ID NO: 273749 - RNA, 20 nt, Homo sapiens
gaacguuuuuccuguucuua

SEQ ID NO: 273750 - RNA, 15 nt, Homo sapiens
gaacuagagaaggac

SEQ ID NO: 273751 - RNA, 14 nt, Homo sapiens
gaacucccuuucaa

SEQ ID NO: 273752 - RNA, 16 nt, Homo sapiens
gaacugaacauuccag

SEQ ID NO: 273753 - RNA, 19 nt, Homo sapiens
gaacuggaggaguuccuug

SEQ ID NO: 273754 - RNA, 13 nt, Homo sapiens
gaacuuaugcaaa

SEQ ID NO: 273755 - RNA, 14 nt, Homo sapiens
gaacuucagagcau

SEQ ID NO: 273756 - RNA, 12 nt, Homo sapiens
gaacuugcacaa

SEQ ID NO: 273757 - RNA, 13 nt, Homo sapiens
gaacuugcacaaa

SEQ ID NO: 273758 - RNA, 20 nt, Homo sapiens
gaacuugcugcugagugcac

SEQ ID NO: 273759 - RNA, 21 nt, Homo sapiens
gaacuuuguggucgacaucaa

SEQ ID NO: 273760 - RNA, 20 nt, Homo sapiens
gaagaaagagcaacaaucca

SEQ ID NO: 273761 - RNA, 13 nt, Homo sapiens
gaagaacaguaac

SEQ ID NO: 273762 - RNA, 20 nt, Homo sapiens
gaagaacaguaacugccauc

SEQ ID NO: 273763 - RNA, 19 nt, Homo sapiens
gaagaagaucaacgccuca

SEQ ID NO: 273764 - RNA, 20 nt, Homo sapiens
gaagaagccauugagcucuc

SEQ ID NO: 273765 - RNA, 12 nt, Homo sapiens
gaagaagcuaaa

SEQ ID NO: 273766 - RNA, 13 nt, Homo sapiens
gaagacaauguga

SEQ ID NO: 273767 - RNA, 14 nt, Homo sapiens
gaagacuucauccc

SEQ ID NO: 273768 - RNA, 17 nt, Homo sapiens
gaagagaaugugacagg

SEQ ID NO: 273769 - RNA, 18 nt, Homo sapiens
gaagagccccccacugca

SEQ ID NO: 273770 - RNA, 20 nt, Homo sapiens
gaagagccccccacugcaga

SEQ ID NO: 273771 - RNA, 16 nt, Homo sapiens
gaagagcuccuugaua

SEQ ID NO: 273772 - RNA, 14 nt, Homo sapiens
gaagaucaggccaa

SEQ ID NO: 273773 - RNA, 19 nt, Homo sapiens
gaagaucaggccaacccca

SEQ ID NO: 273774 - RNA, 23 nt, Homo sapiens
gaagaucaggccaaccccaaaga

SEQ ID NO: 273775 - RNA, 12 nt, Homo sapiens
gaagauguauca

SEQ ID NO: 273776 - RNA, 20 nt, Homo sapiens
gaagauguuucaaaaaaucu

SEQ ID NO: 273777 - RNA, 17 nt, Homo sapiens
gaagauuauaaaagcca

SEQ ID NO: 273778 - RNA, 17 nt, Homo sapiens
gaagauucuauguuaau

SEQ ID NO: 273779 - RNA, 22 nt, Homo sapiens
gaagcacaugccucucucaggc

SEQ ID NO: 273780 - RNA, 12 nt, Homo sapiens
gaagcauuuacu

SEQ ID NO: 273781 - RNA, 15 nt, Homo sapiens
gaagcauuuacuuug

SEQ ID NO: 273782 - RNA, 17 nt, Homo sapiens
gagucagcagaacuggg

SEQ ID NO: 273783 - RNA, 14 nt, Homo sapiens
gaguccacuuuguu

SEQ ID NO: 273784 - RNA, 17 nt, Homo sapiens
gagucgaggacagggag

SEQ ID NO: 273785 - RNA, 16 nt, Homo sapiens
gagucgcugugccaca

SEQ ID NO: 273786 - RNA, 13 nt, Homo sapiens
gagucgggacuaa

SEQ ID NO: 273787 - RNA, 17 nt, Homo sapiens
gagucgggacuaaccca

SEQ ID NO: 273788 - RNA, 17 nt, Homo sapiens
gagucucacuguugccc

SEQ ID NO: 273789 - RNA, 17 nt, Homo sapiens
gagucucuucuccacug

SEQ ID NO: 273790 - RNA, 16 nt, Homo sapiens
gagugaagugguguga

SEQ ID NO: 273791 - RNA, 20 nt, Homo sapiens
gagugacuacacacaguacg

SEQ ID NO: 273792 - RNA, 19 nt, Homo sapiens
gagugagacucugucucaa

SEQ ID NO: 273793 - RNA, 19 nt, Homo sapiens
gagugcauugugaggguua

SEQ ID NO: 273794 - RNA, 22 nt, Homo sapiens
gaguggaguuacugaacaguaa

SEQ ID NO: 273795 - RNA, 22 nt, Homo sapiens
gaguggcccaagacucccagau

SEQ ID NO: 273796 - RNA, 17 nt, Homo sapiens
gaguggcugaccaggcc

SEQ ID NO: 273797 - RNA, 19 nt, Homo sapiens
gagugggcccaaugcacuu

SEQ ID NO: 273798 - RNA, 23 nt, Homo sapiens
gagugucuuuccacggagccacu

SEQ ID NO: 273799 - RNA, 21 nt, Homo sapiens
gaguguuccccuuccacugag

SEQ ID NO: 273800 - RNA, 22 nt, Homo sapiens
gaguguuccccuuccacugagg

SEQ ID NO: 273801 - RNA, 15 nt, Homo sapiens
gaguuauugaagcag

SEQ ID NO: 273802 - RNA, 16 nt, Homo sapiens
gaguucaucuugaauu

SEQ ID NO: 273803 - RNA, 21 nt, Homo sapiens
gaguugauucagcucugcaag

SEQ ID NO: 273804 - RNA, 17 nt, Homo sapiens
gaguugucaagucucug

SEQ ID NO: 273805 - RNA, 14 nt, Homo sapiens
gaguuuggccagaa

SEQ ID NO: 273806 - RNA, 13 nt, Homo sapiens
gaguuuucagugg

SEQ ID NO: 273807 - RNA, 23 nt, Homo sapiens
gauaaaauaaaaagaugaagcug

SEQ ID NO: 273808 - RNA, 21 nt, Homo sapiens
gauacacaaucugaaacagcu

SEQ ID NO: 273809 - RNA, 19 nt, Homo sapiens
gauacacuaugaagauguu

SEQ ID NO: 273810 - RNA, 15 nt, Homo sapiens
gauacagaacucuuu

SEQ ID NO: 273811 - RNA, 19 nt, Homo sapiens
gauacaggaaaagcugcug

SEQ ID NO: 273812 - RNA, 20 nt, Homo sapiens
gauacaugcauugcucuuau

SEQ ID NO: 273813 - RNA, 13 nt, Homo sapiens
gauacaugucuuu

SEQ ID NO: 273814 - RNA, 13 nt, Homo sapiens
gauacgacaacuu

SEQ ID NO: 273815 - RNA, 22 nt, Homo sapiens
gauacugcucaucauuccuuga

SEQ ID NO: 273816 - RNA, 21 nt, Homo sapiens
gauacuggauuguacuuugug

SEQ ID NO: 273817 - RNA, 18 nt, Homo sapiens
gauacuguaacacuuuac

SEQ ID NO: 273818 - RNA, 17 nt, Homo sapiens
gauacugucucuuucau

SEQ ID NO: 273819 - RNA, 11 nt, Homo sapiens
gauacuuugac

SEQ ID NO: 273820 - RNA, 16 nt, Homo sapiens
gauacuuugacagugu

SEQ ID NO: 273821 - RNA, 14 nt, Homo sapiens
gauagaaggcuaug

SEQ ID NO: 273822 - RNA, 17 nt, Homo sapiens
gauaguggggucagggc

SEQ ID NO: 273823 - RNA, 15 nt, Homo sapiens
gauauaaaagacuga

SEQ ID NO: 273824 - RNA, 15 nt, Homo sapiens
gauauaagaaauaca

SEQ ID NO: 273825 - RNA, 22 nt, Homo sapiens
gauauaugcucugcauguuaca

SEQ ID NO: 273826 - RNA, 21 nt, Homo sapiens
gauaucacuuccaugacauaa

SEQ ID NO: 273827 - RNA, 17 nt, Homo sapiens
gauauguucaacuggag

SEQ ID NO: 273828 - RNA, 15 nt, Homo sapiens
gauauuccaagggcu

SEQ ID NO: 273829 - RNA, 18 nt, Homo sapiens
gauauuuauuuauuuucc

SEQ ID NO: 273830 - RNA, 18 nt, Homo sapiens
gaucaacgccucacugaa

SEQ ID NO: 273831 - RNA, 17 nt, Homo sapiens
gaucacgccacugcacu

SEQ ID NO: 273832 - RNA, 19 nt, Homo sapiens
gaucacuucaggucaggag

SEQ ID NO: 273833 - RNA, 17 nt, Homo sapiens
gaucagacauucagaga

SEQ ID NO: 273834 - RNA, 19 nt, Homo sapiens
gaucagccugggcaaugug

SEQ ID NO: 273835 - RNA, 20 nt, Homo sapiens
gaucagccugggcaauguga

SEQ ID NO: 273836 - RNA, 16 nt, Homo sapiens
gaucagcuaccaggca

SEQ ID NO: 273837 - RNA, 18 nt, Homo sapiens
gaucauuaucagccugug

SEQ ID NO: 273838 - RNA, 23 nt, Homo sapiens
gaucauuaucagccugugccacg

SEQ ID NO: 273839 - RNA, 13 nt, Homo sapiens
gaucauugugaag

SEQ ID NO: 273840 - RNA, 14 nt, Homo sapiens
gauccaagcugguc

SEQ ID NO: 273841 - RNA, 16 nt, Homo sapiens
gauccacccaccucag

SEQ ID NO: 273842 - RNA, 15 nt, Homo sapiens
gauccacuucucuca

SEQ ID NO: 273843 - RNA, 18 nt, Homo sapiens
gauccacuucucucagga

SEQ ID NO: 273844 - RNA, 19 nt, Homo sapiens
gaucccaggggaguguuca

SEQ ID NO: 273845 - RNA, 19 nt, Homo sapiens
gaucccccgccccauccuc

SEQ ID NO: 273846 - RNA, 16 nt, Homo sapiens
gauccccucucuuccu

SEQ ID NO: 273847 - RNA, 17 nt, Homo sapiens
gauccuaguuccaccau

SEQ ID NO: 273848 - RNA, 12 nt, Homo sapiens
gauccuccaggu

SEQ ID NO: 273849 - RNA, 14 nt, Homo sapiens
gauccuccaggugc

SEQ ID NO: 273850 - RNA, 16 nt, Homo sapiens
gauccucccaccucag

SEQ ID NO: 273851 - RNA, 20 nt, Homo sapiens
gaucggagccuccucucuca

SEQ ID NO: 273852 - RNA, 10 nt, Homo sapiens
gaucuaccug

SEQ ID NO: 273853 - RNA, 18 nt, Homo sapiens
gaucuaggaagacuuugg

SEQ ID NO: 273854 - RNA, 18 nt, Homo sapiens
gaucuccccgaaucucaa

SEQ ID NO: 273855 - RNA, 22 nt, Homo sapiens
gaucucugcuuuggaaaucaca

SEQ ID NO: 273856 - RNA, 23 nt, Homo sapiens
gaucugaacagaaauaccaaaau

SEQ ID NO: 273857 - RNA, 17 nt, Homo sapiens
gaucugaugcaagcaag

SEQ ID NO: 273858 - RNA, 16 nt, Homo sapiens
gaucugcugucagucu

SEQ ID NO: 273859 - RNA, 15 nt, Homo sapiens
gaucuuugacucuuu

SEQ ID NO: 273860 - RNA, 23 nt, Homo sapiens
gaugaacaaaucugcaccccacu

SEQ ID NO: 273861 - RNA, 15 nt, Homo sapiens
gaugaauuauccugu

SEQ ID NO: 273862 - RNA, 23 nt, Homo sapiens
gaugaccccuccccuaaugccug

SEQ ID NO: 273863 - RNA, 12 nt, Homo sapiens
gaugagcauuua

SEQ ID NO: 273864 - RNA, 13 nt, Homo sapiens
gaugauaaaacac

SEQ ID NO: 273865 - RNA, 13 nt, Homo sapiens
gaugaucaucucc

SEQ ID NO: 273866 - RNA, 21 nt, Homo sapiens
gaugaucuggauccaccaaga

SEQ ID NO: 273867 - RNA, 13 nt, Homo sapiens
gaugcaagcaaga

SEQ ID NO: 273868 - RNA, 18 nt, Homo sapiens
gaugcacaugagcuggcg

SEQ ID NO: 273869 - RNA, 16 nt, Homo sapiens
gaugcagagucagcag

SEQ ID NO: 273870 - RNA, 15 nt, Homo sapiens
gaugcagauccagag

SEQ ID NO: 273871 - RNA, 16 nt, Homo sapiens
gaugccagggacccac

SEQ ID NO: 273872 - RNA, 21 nt, Homo sapiens
gaugcugccugcccagugcac

SEQ ID NO: 273873 - RNA, 17 nt, Homo sapiens
gaugcuggggacacagc

SEQ ID NO: 273874 - RNA, 13 nt, Homo sapiens
gaugcugucuucg

SEQ ID NO: 273875 - RNA, 9 nt, Homo sapiens
gauggagcu

SEQ ID NO: 273876 - RNA, 24 nt, Homo sapiens
gaugggauggcuuggggggcucca

SEQ ID NO: 273877 - RNA, 16 nt, Homo sapiens
gaugggcccugacucu

SEQ ID NO: 273878 - RNA, 18 nt, Homo sapiens
gauggugacauugcaccu

SEQ ID NO: 273879 - RNA, 18 nt, Homo sapiens
gauguaaaacugaacuuc

SEQ ID NO: 273880 - RNA, 23 nt, Homo sapiens
gauguacuuuaccugaaacaacc

SEQ ID NO: 273881 - RNA, 15 nt, Homo sapiens
gaugucucacauccu

SEQ ID NO: 273882 - RNA, 14 nt, Homo sapiens
gaugugucuugggg

SEQ ID NO: 273883 - RNA, 13 nt, Homo sapiens
gauuaaacuuaau

SEQ ID NO: 273884 - RNA, 22 nt, Homo sapiens
gauuaagaucagcaaagggagg

SEQ ID NO: 273885 - RNA, 22 nt, Homo sapiens
gauuacaagcgugagccacugc

SEQ ID NO: 273886 - RNA, 22 nt, Homo sapiens
gacaggacccugggaccacaga

SEQ ID NO: 273887 - RNA, 13 nt, Homo sapiens
gacaggaggccau

SEQ ID NO: 273888 - RNA, 14 nt, Homo sapiens
gacaggaggccaug

SEQ ID NO: 273889 - RNA, 15 nt, Homo sapiens
gacaggaggccaugc

SEQ ID NO: 273890 - RNA, 23 nt, Homo sapiens
gacaggcacagaugaaugggagu

SEQ ID NO: 273891 - RNA, 20 nt, Homo sapiens
gacaggcuucgucucagaag

SEQ ID NO: 273892 - RNA, 17 nt, Homo sapiens
gacagggccagugcagu

SEQ ID NO: 273893 - RNA, 18 nt, Homo sapiens
gacagggccagugcaguu

SEQ ID NO: 273894 - RNA, 14 nt, Homo sapiens
gacagggucucacu

SEQ ID NO: 273895 - RNA, 19 nt, Homo sapiens
gacagucccugccaaugga

SEQ ID NO: 273896 - RNA, 19 nt, Homo sapiens
gacaguuaagagaaaugag

SEQ ID NO: 273897 - RNA, 17 nt, Homo sapiens
gacauagucuggcugua

SEQ ID NO: 273898 - RNA, 16 nt, Homo sapiens
gacaucugucuaggaa

SEQ ID NO: 273899 - RNA, 21 nt, Homo sapiens
gacaugcgggcugggcagcug

SEQ ID NO: 273900 - RNA, 18 nt, Homo sapiens
gacauugcggacagccac

SEQ ID NO: 273901 - RNA, 18 nt, Homo sapiens
gacauuuuaugucuuucu

SEQ ID NO: 273902 - RNA, 21 nt, Homo sapiens
gaccaauauuguacaguuuuu

SEQ ID NO: 273903 - RNA, 19 nt, Homo sapiens
gaccacagagggcaggaac

SEQ ID NO: 273904 - RNA, 17 nt, Homo sapiens
gaccacuguuaucaaaa

SEQ ID NO: 273905 - RNA, 15 nt, Homo sapiens
gaccagccuugacac

SEQ ID NO: 273906 - RNA, 13 nt, Homo sapiens
gaccaggaccucc

SEQ ID NO: 273907 - RNA, 12 nt, Homo sapiens
gaccaggucuca

SEQ ID NO: 273908 - RNA, 19 nt, Homo sapiens
gaccaguauuguuuaccca

SEQ ID NO: 273909 - RNA, 17 nt, Homo sapiens
gaccaguuguugauaac

SEQ ID NO: 273910 - RNA, 21 nt, Homo sapiens
gaccauaaccccggaagccaa

SEQ ID NO: 273911 - RNA, 13 nt, Homo sapiens
gaccaucccugaa

SEQ ID NO: 273912 - RNA, 15 nt, Homo sapiens
gaccauuagcauuug

SEQ ID NO: 273913 - RNA, 20 nt, Homo sapiens
gaccauugagacauuugcca

SEQ ID NO: 273914 - RNA, 11 nt, Homo sapiens
gacccaagacc

SEQ ID NO: 273915 - RNA, 16 nt, Homo sapiens
gacccagggaugacau

SEQ ID NO: 273916 - RNA, 13 nt, Homo sapiens
gacccaugcugcc

SEQ ID NO: 273917 - RNA, 19 nt, Homo sapiens
gaccccagaggauugcugc

SEQ ID NO: 273918 - RNA, 20 nt, Homo sapiens
gacccggaggggccuggcag

SEQ ID NO: 273919 - RNA, 13 nt, Homo sapiens
gacccugggacca

SEQ ID NO: 273920 - RNA, 15 nt, Homo sapiens
gacccugggaccaca

SEQ ID NO: 273921 - RNA, 17 nt, Homo sapiens
gacccuggucaccagag

SEQ ID NO: 273922 - RNA, 22 nt, Homo sapiens
gaccuaaauuauuuacugcaaa

SEQ ID NO: 273923 - RNA, 15 nt, Homo sapiens
gaccuaggauuucau

SEQ ID NO: 273924 - RNA, 21 nt, Homo sapiens
gaccucaaaggugauugugcc

SEQ ID NO: 273925 - RNA, 14 nt, Homo sapiens
gaccucagccugug

SEQ ID NO: 273926 - RNA, 22 nt, Homo sapiens
gaccucaggugauccacccacc

SEQ ID NO: 273927 - RNA, 12 nt, Homo sapiens
gcaacaguuuuu

SEQ ID NO: 273928 - RNA, 20 nt, Homo sapiens
gcaacaugccagccacugug

SEQ ID NO: 273929 - RNA, 21 nt, Homo sapiens
gcaacaugccagccacuguga

SEQ ID NO: 273930 - RNA, 23 nt, Homo sapiens
gcaaccuagaaacacacauuucu

SEQ ID NO: 273931 - RNA, 18 nt, Homo sapiens
gcaagaagucaaaguaaa

SEQ ID NO: 273932 - RNA, 23 nt, Homo sapiens
gcaagacauuauauagcaguaaa

SEQ ID NO: 273933 - RNA, 18 nt, Homo sapiens
gcaagaucccaucucuuu

SEQ ID NO: 273934 - RNA, 23 nt, Homo sapiens
gcaagcugggacuggcaggaaau

SEQ ID NO: 273935 - RNA, 23 nt, Homo sapiens
gcaaggaaacuauguaacaugua

SEQ ID NO: 273936 - RNA, 19 nt, Homo sapiens
gcaauaaccucaaagugac

SEQ ID NO: 273937 - RNA, 20 nt, Homo sapiens
gcaauaaccucaaagugacu

SEQ ID NO: 273938 - RNA, 17 nt, Homo sapiens
gcaauacagacuacuuc

SEQ ID NO: 273939 - RNA, 22 nt, Homo sapiens
gcaauacagacuacuucuuccc

SEQ ID NO: 273940 - RNA, 17 nt, Homo sapiens
gcaauccugcaagaaca

SEQ ID NO: 273941 - RNA, 17 nt, Homo sapiens
gcaauggacaaggaagg

SEQ ID NO: 273942 - RNA, 15 nt, Homo sapiens
gcaaugucagaugaa

SEQ ID NO: 273943 - RNA, 18 nt, Homo sapiens
gcaaugucagaugaaguc

SEQ ID NO: 273944 - RNA, 23 nt, Homo sapiens
gcaaugugcccccagacgcacgu

SEQ ID NO: 273945 - RNA, 18 nt, Homo sapiens
gcaauuuccggccaacag

SEQ ID NO: 273946 - RNA, 22 nt, Homo sapiens
gcacaaaccaauuaaacccagu

SEQ ID NO: 273947 - RNA, 20 nt, Homo sapiens
gcacaaauugggccaaagaa

SEQ ID NO: 273948 - RNA, 18 nt, Homo sapiens
gcacacagcugcagagac

SEQ ID NO: 273949 - RNA, 17 nt, Homo sapiens
gcacacaggaaccuaau

SEQ ID NO: 273950 - RNA, 22 nt, Homo sapiens
gcacacugcuugugaaaggaaa

SEQ ID NO: 273951 - RNA, 14 nt, Homo sapiens
gcacacugucugcc

SEQ ID NO: 273952 - RNA, 18 nt, Homo sapiens
gcacagacccugcccugu

SEQ ID NO: 273953 - RNA, 19 nt, Homo sapiens
gcacagacccugcccugug

SEQ ID NO: 273954 - RNA, 18 nt, Homo sapiens
gcacagagagggggccac

SEQ ID NO: 273955 - RNA, 21 nt, Homo sapiens
gcacagcugggguggggaccu

SEQ ID NO: 273956 - RNA, 15 nt, Homo sapiens
gcacaguacccggug

SEQ ID NO: 273957 - RNA, 19 nt, Homo sapiens
gcacaugccucucucaggc

SEQ ID NO: 273958 - RNA, 21 nt, Homo sapiens
gcacaugccucucucaggcca

SEQ ID NO: 273959 - RNA, 22 nt, Homo sapiens
gcacaugccucucucaggccaa

SEQ ID NO: 273960 - RNA, 22 nt, Homo sapiens
gcacauuagccuaugugcaugc

SEQ ID NO: 273961 - RNA, 18 nt, Homo sapiens
gcacauuguuaugcacuu

SEQ ID NO: 273962 - RNA, 16 nt, Homo sapiens
gcaccaccaagccaag

SEQ ID NO: 273963 - RNA, 19 nt, Homo sapiens
gcaccacuguguauuuaac

SEQ ID NO: 273964 - RNA, 13 nt, Homo sapiens
gcaccauucugac

SEQ ID NO: 273965 - RNA, 17 nt, Homo sapiens
gcaccccaggcagccac

SEQ ID NO: 273966 - RNA, 21 nt, Homo sapiens
gcacccccggcccagugcccc

SEQ ID NO: 273967 - RNA, 14 nt, Homo sapiens
gcacccuugcgcuu

SEQ ID NO: 273968 - RNA, 12 nt, Homo sapiens
gcaccuaccuca

SEQ ID NO: 273969 - RNA, 13 nt, Homo sapiens
gcaccuaccucac

SEQ ID NO: 273970 - RNA, 16 nt, Homo sapiens
gcaccugauucucaca

SEQ ID NO: 273971 - RNA, 16 nt, Homo sapiens
gcaccuggauguacua

SEQ ID NO: 273972 - RNA, 11 nt, Homo sapiens
gcaccuggcau

SEQ ID NO: 273973 - RNA, 23 nt, Homo sapiens
gcacguaguagggucaggccacg

SEQ ID NO: 273974 - RNA, 22 nt, Homo sapiens
gcacguguggccuguucuucua

SEQ ID NO: 273975 - RNA, 20 nt, Homo sapiens
gcacucagaaaauggcacuu

SEQ ID NO: 273976 - RNA, 13 nt, Homo sapiens
gcacuccaugagu

SEQ ID NO: 273977 - RNA, 19 nt, Homo sapiens
gcacuccaugagugcagcu

SEQ ID NO: 273978 - RNA, 21 nt, Homo sapiens
gcacugacauuguuggccaaa

SEQ ID NO: 273979 - RNA, 19 nt, Homo sapiens
gcacugagcaaagcauuga

SEQ ID NO: 273980 - RNA, 19 nt, Homo sapiens
gcacugggcuuggggacca

SEQ ID NO: 273981 - RNA, 22 nt, Homo sapiens
gcacuggguugacuuucaggua

SEQ ID NO: 273982 - RNA, 16 nt, Homo sapiens
gcacuuuaaacauuua

SEQ ID NO: 273983 - RNA, 20 nt, Homo sapiens
gcacuuugggaggccaagga

SEQ ID NO: 273984 - RNA, 19 nt, Homo sapiens
gcacuuuuccccaauucau

SEQ ID NO: 273985 - RNA, 20 nt, Homo sapiens
gcagaaaauuguacaaccug

SEQ ID NO: 273986 - RNA, 16 nt, Homo sapiens
gcagaaccuccuggaa

SEQ ID NO: 273987 - RNA, 13 nt, Homo sapiens
gcagaacuuucac

SEQ ID NO: 273988 - RNA, 20 nt, Homo sapiens
gcagaaggaagacuucaucc

SEQ ID NO: 273989 - RNA, 21 nt, Homo sapiens
gcagaaucuguuaccagagga

SEQ ID NO: 273990 - RNA, 19 nt, Homo sapiens
gcagacacucaagagcccu

SEQ ID NO: 273991 - RNA, 18 nt, Homo sapiens
gcagacaguuaagagaaa

SEQ ID NO: 273992 - RNA, 14 nt, Homo sapiens
gcagaccacugaua

SEQ ID NO: 273993 - RNA, 21 nt, Homo sapiens
gcagaccacugauaaaaccau

SEQ ID NO: 273994 - RNA, 16 nt, Homo sapiens
gcagagaggcugaaua

SEQ ID NO: 273995 - RNA, 22 nt, Homo sapiens
gcagagcagagaccaucccuga

SEQ ID NO: 273996 - RNA, 21 nt, Homo sapiens
gcagagcuugaacacagucuc

SEQ ID NO: 273997 - RNA, 19 nt, Homo sapiens
gcagagguugggaggccau

SEQ ID NO: 273998 - RNA, 16 nt, Homo sapiens
gcagaguacaaaguaa

SEQ ID NO: 273999 - RNA, 17 nt, Homo sapiens
gcagaguuacaguucug

SEQ ID NO: 274000 - RNA, 21 nt, Homo sapiens
gcagauacugucucuuucaug

SEQ ID NO: 274001 - RNA, 13 nt, Homo sapiens
gcagauccagagg

SEQ ID NO: 274002 - RNA, 20 nt, Homo sapiens
gcagaugguggagcugaaua

SEQ ID NO: 274003 - RNA, 17 nt, Homo sapiens
gcagcaccugauucuca

SEQ ID NO: 274004 - RNA, 22 nt, Homo sapiens
gcagcagggagggcuucugcca

SEQ ID NO: 274005 - RNA, 16 nt, Homo sapiens
gcagccacaaccaaaa

SEQ ID NO: 274006 - RNA, 19 nt, Homo sapiens
gcagccacaaccaaaaaau

SEQ ID NO: 274007 - RNA, 17 nt, Homo sapiens
gcagccacuuucugcca

SEQ ID NO: 274008 - RNA, 18 nt, Homo sapiens
gcagccacuuucugccag

SEQ ID NO: 274009 - RNA, 20 nt, Homo sapiens
gcagccucacaguccuuacc

SEQ ID NO: 274010 - RNA, 23 nt, Homo sapiens
gcagccugccuggaguacuuuga

SEQ ID NO: 274011 - RNA, 17 nt, Homo sapiens
gcagccuugacuucuca

SEQ ID NO: 274012 - RNA, 22 nt, Homo sapiens
gcagcgauuaauaacaggcaaa

SEQ ID NO: 274013 - RNA, 15 nt, Homo sapiens
gcagcgccagugaca

SEQ ID NO: 274014 - RNA, 13 nt, Homo sapiens
gcagcucuacucu

SEQ ID NO: 274015 - RNA, 15 nt, Homo sapiens
gcagcuuagggcccu

SEQ ID NO: 274016 - RNA, 21 nt, Homo sapiens
gcaggaagcaacgaagggaaa

SEQ ID NO: 274017 - RNA, 15 nt, Homo sapiens
gcaggacagcuccug

SEQ ID NO: 274018 - RNA, 12 nt, Homo sapiens
gcaggaccucag

SEQ ID NO: 274019 - RNA, 13 nt, Homo sapiens
gcaggauucuucc

SEQ ID NO: 274020 - RNA, 22 nt, Homo sapiens
gcaggauuugggcucuuggaau

SEQ ID NO: 274021 - RNA, 16 nt, Homo sapiens
gcaggcucucaggcca

SEQ ID NO: 274022 - RNA, 17 nt, Homo sapiens
gcaggcucucaggccag

SEQ ID NO: 274023 - RNA, 18 nt, Homo sapiens
gcaggcucucaggccagc

SEQ ID NO: 274024 - RNA, 14 nt, Homo sapiens
gcaggcuggaguua

SEQ ID NO: 274025 - RNA, 23 nt, Homo sapiens
gcaggcuucuuccccccaaaacu

SEQ ID NO: 274026 - RNA, 20 nt, Homo sapiens
gcagggaagaggggugcaga

SEQ ID NO: 274027 - RNA, 14 nt, Homo sapiens
gcaggggaggggug

SEQ ID NO: 274028 - RNA, 16 nt, Homo sapiens
gcaggggccuggagau

SEQ ID NO: 274029 - RNA, 20 nt, Homo sapiens
gcagguggggagacugggcu

SEQ ID NO: 274030 - RNA, 23 nt, Homo sapiens
gcagguuggugggggccucggug

SEQ ID NO: 274031 - RNA, 19 nt, Homo sapiens
gcaguccugccucagccuc

SEQ ID NO: 274032 - RNA, 17 nt, Homo sapiens
gcagucgugccuguguc

SEQ ID NO: 274033 - RNA, 23 nt, Homo sapiens
gcagucuucucuucugccuuuau

SEQ ID NO: 274034 - RNA, 13 nt, Homo sapiens
gcaguggaacuaa

SEQ ID NO: 274035 - RNA, 18 nt, Homo sapiens
gcaguuuuuuucuugucu

SEQ ID NO: 274036 - RNA, 23 nt, Homo sapiens
gcauaaagucagggguucccuuu

SEQ ID NO: 274037 - RNA, 19 nt, Homo sapiens
gcauaagaaaacuaagaaa

SEQ ID NO: 274038 - RNA, 12 nt, Homo sapiens
gagccuggacaa

SEQ ID NO: 274039 - RNA, 14 nt, Homo sapiens
gagccuuccagggg

SEQ ID NO: 274040 - RNA, 12 nt, Homo sapiens
gagcucagagag

SEQ ID NO: 274041 - RNA, 18 nt, Homo sapiens
gagcucagagaggcuaga

SEQ ID NO: 274042 - RNA, 17 nt, Homo sapiens
gagcuccuuagccuuug

SEQ ID NO: 274043 - RNA, 17 nt, Homo sapiens
gagcugcuuccagugga

SEQ ID NO: 274044 - RNA, 21 nt, Homo sapiens
gagcugguguggccaagcaca

SEQ ID NO: 274045 - RNA, 11 nt, Homo sapiens
gagcugugcag

SEQ ID NO: 274046 - RNA, 21 nt, Homo sapiens
gagcuucccugacucauucug

SEQ ID NO: 274047 - RNA, 14 nt, Homo sapiens
gagcuuucugcuau

SEQ ID NO: 274048 - RNA, 20 nt, Homo sapiens
gagcuuuugguaugugacau

SEQ ID NO: 274049 - RNA, 12 nt, Homo sapiens
gaggaagggaca

SEQ ID NO: 274050 - RNA, 19 nt, Homo sapiens
gaggacuguugacauccaa

SEQ ID NO: 274051 - RNA, 17 nt, Homo sapiens
gaggacuuuucuuugug

SEQ ID NO: 274052 - RNA, 16 nt, Homo sapiens
gaggagccaccaguuc

SEQ ID NO: 274053 - RNA, 16 nt, Homo sapiens
gaggagccugcaacau

SEQ ID NO: 274054 - RNA, 14 nt, Homo sapiens
gaggaguuccuuga

SEQ ID NO: 274055 - RNA, 23 nt, Homo sapiens
gaggaguugucuguccuggucag

SEQ ID NO: 274056 - RNA, 13 nt, Homo sapiens
gaggauaaagggc

SEQ ID NO: 274057 - RNA, 19 nt, Homo sapiens
gaggauugcuugagcucag

SEQ ID NO: 274058 - RNA, 16 nt, Homo sapiens
gaggauuucaucucuu

SEQ ID NO: 274059 - RNA, 16 nt, Homo sapiens
gaggcacccucagaga

SEQ ID NO: 274060 - RNA, 19 nt, Homo sapiens
gaggcacgcaccaccgcgc

SEQ ID NO: 274061 - RNA, 18 nt, Homo sapiens
gaggcagacagcagcuca

SEQ ID NO: 274062 - RNA, 20 nt, Homo sapiens
gaggcaggaggaucacuuga

SEQ ID NO: 274063 - RNA, 16 nt, Homo sapiens
gaggcaggagggcaug

SEQ ID NO: 274064 - RNA, 14 nt, Homo sapiens
gaggcaugugauga

SEQ ID NO: 274065 - RNA, 16 nt, Homo sapiens
gaggcccagcugcuca

SEQ ID NO: 274066 - RNA, 19 nt, Homo sapiens
gaggccccuggagccagau

SEQ ID NO: 274067 - RNA, 15 nt, Homo sapiens
gaggccucgacccac

SEQ ID NO: 274068 - RNA, 23 nt, Homo sapiens
gaggcgacggcuuccaucugccc

SEQ ID NO: 274069 - RNA, 11 nt, Homo sapiens
gaggcuaugug

SEQ ID NO: 274070 - RNA, 13 nt, Homo sapiens
gcauucucuaguc

SEQ ID NO: 274071 - RNA, 12 nt, Homo sapiens
gcauugcagcuc

SEQ ID NO: 274072 - RNA, 13 nt, Homo sapiens
gcauugcucuuau

SEQ ID NO: 274073 - RNA, 23 nt, Homo sapiens
gcauuuaaccgucaauaggcaaa

SEQ ID NO: 274074 - RNA, 20 nt, Homo sapiens
gcauuuagacccugcauuua

SEQ ID NO: 274075 - RNA, 19 nt, Homo sapiens
gcauuuggugguuucagaa

SEQ ID NO: 274076 - RNA, 16 nt, Homo sapiens
gcauuugucaacaaag

SEQ ID NO: 274077 - RNA, 19 nt, Homo sapiens
gcauuugugcccacucucc

SEQ ID NO: 274078 - RNA, 17 nt, Homo sapiens
gcauuuucaagcaguua

SEQ ID NO: 274079 - RNA, 13 nt, Homo sapiens
gccaaaagccuuu

SEQ ID NO: 274080 - RNA, 15 nt, Homo sapiens
gccaaccccaaagaa

SEQ ID NO: 274081 - RNA, 13 nt, Homo sapiens
gccaacccuguga

SEQ ID NO: 274082 - RNA, 17 nt, Homo sapiens
gccaagcauaaugacag

SEQ ID NO: 274083 - RNA, 11 nt, Homo sapiens
gccaagccagu

SEQ ID NO: 274084 - RNA, 17 nt, Homo sapiens
gccaagccagucaagga

SEQ ID NO: 274085 - RNA, 21 nt, Homo sapiens
gccaaggagggcagaucacuu

SEQ ID NO: 274086 - RNA, 20 nt, Homo sapiens
gccaaggcucacaugcuccu

SEQ ID NO: 274087 - RNA, 19 nt, Homo sapiens
gccaagggaaccugugucc

SEQ ID NO: 274088 - RNA, 23 nt, Homo sapiens
gccaagguuuggggaagaacgaa

SEQ ID NO: 274089 - RNA, 22 nt, Homo sapiens
gccaauaccguguggcccaaga

SEQ ID NO: 274090 - RNA, 16 nt, Homo sapiens
gccaaugggagcucau

SEQ ID NO: 274091 - RNA, 11 nt, Homo sapiens
gccacaaccaa

SEQ ID NO: 274092 - RNA, 14 nt, Homo sapiens
gccacacacacaga

SEQ ID NO: 274093 - RNA, 15 nt, Homo sapiens
gccacacacacagaa

SEQ ID NO: 274094 - RNA, 20 nt, Homo sapiens
gccacaggcauuuccugcuu

SEQ ID NO: 274095 - RNA, 14 nt, Homo sapiens
gccacagugcaauu

SEQ ID NO: 274096 - RNA, 20 nt, Homo sapiens
gccacccaggaacuccugac

SEQ ID NO: 274097 - RNA, 18 nt, Homo sapiens
gccacccucccacugcca

SEQ ID NO: 274098 - RNA, 13 nt, Homo sapiens
gccacggcagccu

SEQ ID NO: 274099 - RNA, 20 nt, Homo sapiens
gccacuccagaccccuggcu

SEQ ID NO: 274100 - RNA, 20 nt, Homo sapiens
gccacucuguaauugcaaaa

SEQ ID NO: 274101 - RNA, 18 nt, Homo sapiens
gccacugccucucccucu

SEQ ID NO: 274102 - RNA, 18 nt, Homo sapiens
gccacuggacugacgacu

SEQ ID NO: 274103 - RNA, 11 nt, Homo sapiens
gccagaccuca

SEQ ID NO: 274104 - RNA, 12 nt, Homo sapiens
gccagacuuccc

SEQ ID NO: 274105 - RNA, 18 nt, Homo sapiens
gccagacuucccacggcu

SEQ ID NO: 274106 - RNA, 18 nt, Homo sapiens
gccagcaggcucucaggc

SEQ ID NO: 274107 - RNA, 21 nt, Homo sapiens
gccagcucaccccaucauccc

SEQ ID NO: 274108 - RNA, 17 nt, Homo sapiens
gccagcuuaucucaggg

SEQ ID NO: 274109 - RNA, 13 nt, Homo sapiens
gccaggcagaucc

SEQ ID NO: 274110 - RNA, 15 nt, Homo sapiens
gccaggcagauccca

SEQ ID NO: 274111 - RNA, 21 nt, Homo sapiens
gccaggcagaucccacuugca

SEQ ID NO: 274112 - RNA, 23 nt, Homo sapiens
gccaggccagagggagugacaga

SEQ ID NO: 274113 - RNA, 14 nt, Homo sapiens
gccagggucucacu

SEQ ID NO: 274114 - RNA, 21 nt, Homo sapiens
gccaggucuagcaaacauaau

SEQ ID NO: 274115 - RNA, 15 nt, Homo sapiens
gccaggugcacagac

SEQ ID NO: 274116 - RNA, 12 nt, Homo sapiens
gccagguggcca

SEQ ID NO: 274117 - RNA, 20 nt, Homo sapiens
gccagguucugacucuuggc

SEQ ID NO: 274118 - RNA, 22 nt, Homo sapiens
gccaguaccuccugccccaugc

SEQ ID NO: 274119 - RNA, 15 nt, Homo sapiens
gccaguuacauaaaa

SEQ ID NO: 274120 - RNA, 20 nt, Homo sapiens
gccauaaaacauuaagaaaa

SEQ ID NO: 274121 - RNA, 22 nt, Homo sapiens
gccauaaaggggagggacucau

SEQ ID NO: 274122 - RNA, 13 nt, Homo sapiens
gccauaugaauaa

SEQ ID NO: 274123 - RNA, 22 nt, Homo sapiens
gccauaugaaugucaguaguuu

SEQ ID NO: 274124 - RNA, 14 nt, Homo sapiens
gccauauuaccccu

SEQ ID NO: 274125 - RNA, 18 nt, Homo sapiens
gccaugggccuccugugu

SEQ ID NO: 274126 - RNA, 14 nt, Homo sapiens
gccauucuuuccca

SEQ ID NO: 274127 - RNA, 18 nt, Homo sapiens
gccauuguuucuccuggg

SEQ ID NO: 274128 - RNA, 16 nt, Homo sapiens
gcccaaauucuuucag

SEQ ID NO: 274129 - RNA, 12 nt, Homo sapiens
gcccacacuugg

SEQ ID NO: 274130 - RNA, 16 nt, Homo sapiens
gcccacacuugggagc

SEQ ID NO: 274131 - RNA, 12 nt, Homo sapiens
gcccacauauaa

SEQ ID NO: 274132 - RNA, 18 nt, Homo sapiens
gcccacugaacaugcuca

SEQ ID NO: 274133 - RNA, 14 nt, Homo sapiens
gcccacugccugcc

SEQ ID NO: 274134 - RNA, 19 nt, Homo sapiens
gcccacugccugcccagug

SEQ ID NO: 274135 - RNA, 20 nt, Homo sapiens
gcccacugccugcccagugc

SEQ ID NO: 274136 - RNA, 16 nt, Homo sapiens
gcccacuucugccaua

SEQ ID NO: 274137 - RNA, 14 nt, Homo sapiens
gcccagcugcucag

SEQ ID NO: 274138 - RNA, 22 nt, Homo sapiens
gcccagcugcucagugcaacug

SEQ ID NO: 274139 - RNA, 21 nt, Homo sapiens
gcccaggaaaggcuccaggag

SEQ ID NO: 274140 - RNA, 20 nt, Homo sapiens
gcccaggcuggagugcaaug

SEQ ID NO: 274141 - RNA, 20 nt, Homo sapiens
gcccaggcuggaguggagug

SEQ ID NO: 274142 - RNA, 17 nt, Homo sapiens
gcccaggcuggucuuga

SEQ ID NO: 274143 - RNA, 15 nt, Homo sapiens
gcccaguguguuucu

SEQ ID NO: 274144 - RNA, 18 nt, Homo sapiens
gcccaguuggguggaugc

SEQ ID NO: 274145 - RNA, 13 nt, Homo sapiens
gccccaauucgau

SEQ ID NO: 274146 - RNA, 15 nt, Homo sapiens
gccccaauucgaucc

SEQ ID NO: 274147 - RNA, 23 nt, Homo sapiens
gccccagcacuaaagcaguggac

SEQ ID NO: 274148 - RNA, 16 nt, Homo sapiens
gccccaggcauugcca

SEQ ID NO: 274149 - RNA, 19 nt, Homo sapiens
gccccaggcauugccaagg

SEQ ID NO: 274150 - RNA, 14 nt, Homo sapiens
gcccccugaccugg

SEQ ID NO: 274151 - RNA, 15 nt, Homo sapiens
gccccugcccggcug

SEQ ID NO: 274152 - RNA, 15 nt, Homo sapiens
gccccuguuaccuaa

SEQ ID NO: 274153 - RNA, 18 nt, Homo sapiens
gcccgacagccuggcaca

SEQ ID NO: 274154 - RNA, 22 nt, Homo sapiens
gcccucagaaucgcuccaccuu

SEQ ID NO: 274155 - RNA, 18 nt, Homo sapiens
gcccuccucugcacuccc

SEQ ID NO: 274156 - RNA, 12 nt, Homo sapiens
gcccugcauuca

SEQ ID NO: 274157 - RNA, 18 nt, Homo sapiens
gcccuggaugcccaggaa

SEQ ID NO: 274158 - RNA, 16 nt, Homo sapiens
gcccuggccacuggcc

SEQ ID NO: 274159 - RNA, 15 nt, Homo sapiens
gcccuuaaaaauaug

SEQ ID NO: 274160 - RNA, 21 nt, Homo sapiens
gcccuucccacaggacauuuc

SEQ ID NO: 274161 - RNA, 16 nt, Homo sapiens
gccgagaguccaucag

SEQ ID NO: 274162 - RNA, 21 nt, Homo sapiens
gccgagaguccaucagccucc

SEQ ID NO: 274163 - RNA, 21 nt, Homo sapiens
gccgagaucacgccacugcac

SEQ ID NO: 274164 - RNA, 21 nt, Homo sapiens
gccgagauugcaccacugcac

SEQ ID NO: 274165 - RNA, 21 nt, Homo sapiens
gccggccaaggccucuaggga

SEQ ID NO: 274166 - RNA, 22 nt, Homo sapiens
gccggggaaggaggccguccau

SEQ ID NO: 274167 - RNA, 21 nt, Homo sapiens
gccguacucuuuggggcagcu

SEQ ID NO: 274168 - RNA, 19 nt, Homo sapiens
gccgugccuucagcucuac

SEQ ID NO: 274169 - RNA, 12 nt, Homo sapiens
gccguggcugcg

SEQ ID NO: 274170 - RNA, 17 nt, Homo sapiens
gccuaauaugaugacug

SEQ ID NO: 274171 - RNA, 19 nt, Homo sapiens
gccuacaggagugagcacu

SEQ ID NO: 274172 - RNA, 18 nt, Homo sapiens
gccuagcugcugucacau

SEQ ID NO: 274173 - RNA, 22 nt, Homo sapiens
gccuaggaaagccaguuacaua

SEQ ID NO: 274174 - RNA, 21 nt, Homo sapiens
gccuauaucuucaucugugaa

SEQ ID NO: 274175 - RNA, 22 nt, Homo sapiens
gccuauuaucugucagcugcaa

SEQ ID NO: 274176 - RNA, 12 nt, Homo sapiens
gccucacugcau

SEQ ID NO: 274177 - RNA, 15 nt, Homo sapiens
gccucacugcaucuu

SEQ ID NO: 274178 - RNA, 13 nt, Homo sapiens
gccucagugccac

SEQ ID NO: 274179 - RNA, 20 nt, Homo sapiens
gccuccaaguccacagugga

SEQ ID NO: 274180 - RNA, 19 nt, Homo sapiens
gccuccucuacaauuugcc

SEQ ID NO: 274181 - RNA, 21 nt, Homo sapiens
gccuccucucucaaacugggg

SEQ ID NO: 274182 - RNA, 21 nt, Homo sapiens
gccuccucuguccagggcccu

SEQ ID NO: 274183 - RNA, 21 nt, Homo sapiens
gccuccuuuccccucccucag

SEQ ID NO: 274184 - RNA, 18 nt, Homo sapiens
gccucgaccucccuggcu

SEQ ID NO: 274185 - RNA, 17 nt, Homo sapiens
gccucuccaguuugcac

SEQ ID NO: 274186 - RNA, 15 nt, Homo sapiens
gccucucccaucacu

SEQ ID NO: 274187 - RNA, 13 nt, Homo sapiens
gccucucucaggc

SEQ ID NO: 274188 - RNA, 17 nt, Homo sapiens
gccucucucaggccaaa

SEQ ID NO: 274189 - RNA, 17 nt, Homo sapiens
gccucuggaugcuguga

SEQ ID NO: 274190 - RNA, 14 nt, Homo sapiens
gccucuuccaggaa

SEQ ID NO: 274191 - RNA, 14 nt, Homo sapiens
gccucuuucaucca

SEQ ID NO: 274192 - RNA, 17 nt, Homo sapiens
gccugagguuugccagc

SEQ ID NO: 274193 - RNA, 21 nt, Homo sapiens
gccugagguuugccagcauuu

SEQ ID NO: 274194 - RNA, 13 nt, Homo sapiens
gauguguggacac

SEQ ID NO: 274195 - RNA, 20 nt, Homo sapiens
gauguucugacccugcuuca

SEQ ID NO: 274196 - RNA, 15 nt, Homo sapiens
gauguucugggacac

SEQ ID NO: 274197 - RNA, 18 nt, Homo sapiens
gauguucugguaaacuga

SEQ ID NO: 274198 - RNA, 15 nt, Homo sapiens
gauguuucaaaaaau

SEQ ID NO: 274199 - RNA, 15 nt, Homo sapiens
gauguuuccaaugcu

SEQ ID NO: 274200 - RNA, 14 nt, Homo sapiens
gauuaaagugccca

SEQ ID NO: 274201 - RNA, 18 nt, Homo sapiens
gauuaauuaaaacacaac

SEQ ID NO: 274202 - RNA, 21 nt, Homo sapiens
gauuaauuaaaacacaacauc

SEQ ID NO: 274203 - RNA, 21 nt, Homo sapiens
gauuacaaaucagaagucauc

SEQ ID NO: 274204 - RNA, 18 nt, Homo sapiens
gauuacaggugugaacca

SEQ ID NO: 274205 - RNA, 21 nt, Homo sapiens
gauuaccuaguagucauuuca

SEQ ID NO: 274206 - RNA, 14 nt, Homo sapiens
gauuagacagucaa

SEQ ID NO: 274207 - RNA, 13 nt, Homo sapiens
gauuauucagugu

SEQ ID NO: 274208 - RNA, 14 nt, Homo sapiens
gauucacaguguga

SEQ ID NO: 274209 - RNA, 19 nt, Homo sapiens
gauucacuccuuugagucu

SEQ ID NO: 274210 - RNA, 21 nt, Homo sapiens
gauucauauuuacuucuuaua

SEQ ID NO: 274211 - RNA, 12 nt, Homo sapiens
gauuccagagag

SEQ ID NO: 274212 - RNA, 18 nt, Homo sapiens
gauuccccccaucuccau

SEQ ID NO: 274213 - RNA, 21 nt, Homo sapiens
gauucuauaaaacacaucauc

SEQ ID NO: 274214 - RNA, 23 nt, Homo sapiens
gauucuauaaaacacaucaucaa

SEQ ID NO: 274215 - RNA, 16 nt, Homo sapiens
gauucuccugccucag

SEQ ID NO: 274216 - RNA, 13 nt, Homo sapiens
gauuguacuuugu

SEQ ID NO: 274217 - RNA, 19 nt, Homo sapiens
gauugugcgugcaugugug

SEQ ID NO: 274218 - RNA, 23 nt, Homo sapiens
gauuuaaaaacaaaaaaacacaa

SEQ ID NO: 274219 - RNA, 19 nt, Homo sapiens
gauuuagcaggaagcugug

SEQ ID NO: 274220 - RNA, 16 nt, Homo sapiens
gauuuaucuagcuguc

SEQ ID NO: 274221 - RNA, 15 nt, Homo sapiens
gauuucaugauuuca

SEQ ID NO: 274222 - RNA, 14 nt, Homo sapiens
gauuuccacaguga

SEQ ID NO: 274223 - RNA, 13 nt, Homo sapiens
gauuuggggagaa

SEQ ID NO: 274224 - RNA, 15 nt, Homo sapiens
gauuuuaugcuuuaa

SEQ ID NO: 274225 - RNA, 12 nt, Homo sapiens
gauuuuggcaaa

SEQ ID NO: 274226 - RNA, 14 nt, Homo sapiens
gauuuuggcaaagc

SEQ ID NO: 274227 - RNA, 19 nt, Homo sapiens
gauuuuuaugccaccugaa

SEQ ID NO: 274228 - RNA, 22 nt, Homo sapiens
gauuuuuuuuaauuaccaugcu

SEQ ID NO: 274229 - RNA, 12 nt, Homo sapiens
gcaaaaccaaau

SEQ ID NO: 274230 - RNA, 13 nt, Homo sapiens
gcaaaaccaaaua

SEQ ID NO: 274231 - RNA, 22 nt, Homo sapiens
gcaaaaccaaauauuccagaga

SEQ ID NO: 274232 - RNA, 21 nt, Homo sapiens
gcaaaacucuacuuaauccaa

SEQ ID NO: 274233 - RNA, 18 nt, Homo sapiens
gcaaaagcaucuauguga

SEQ ID NO: 274234 - RNA, 13 nt, Homo sapiens
gcaaaaguucuca

SEQ ID NO: 274235 - RNA, 18 nt, Homo sapiens
gcaaaauacaugacauuu

SEQ ID NO: 274236 - RNA, 21 nt, Homo sapiens
gcaaaccaucccagcacugca

SEQ ID NO: 274237 - RNA, 16 nt, Homo sapiens
gcaaagacuuuccucu

SEQ ID NO: 274238 - RNA, 14 nt, Homo sapiens
gcaaagaugaaggu

SEQ ID NO: 274239 - RNA, 17 nt, Homo sapiens
gcaaagaugaucaguau

SEQ ID NO: 274240 - RNA, 17 nt, Homo sapiens
gcaaagggagcacuggg

SEQ ID NO: 274241 - RNA, 20 nt, Homo sapiens
gcaaaggggggaagggacau

SEQ ID NO: 274242 - RNA, 21 nt, Homo sapiens
gcaaauccuugauacugcuca

SEQ ID NO: 274243 - RNA, 16 nt, Homo sapiens
gcaaauggccaaugag

SEQ ID NO: 274244 - RNA, 16 nt, Homo sapiens
gcaaauguaauauaau

SEQ ID NO: 274245 - RNA, 15 nt, Homo sapiens
gcaacaacagauucu

SEQ ID NO: 274246 - RNA, 16 nt, Homo sapiens
gcaacacucacugccu

SEQ ID NO: 274247 - RNA, 18 nt, Homo sapiens
gcaacagcaaacaggugc

SEQ ID NO: 274248 - RNA, 14 nt, Homo sapiens
gcaacaguagcaua

SEQ ID NO: 274249 - RNA, 16 nt, Homo sapiens
gcaaccccugcagcuc

SEQ ID NO: 274250 - RNA, 15 nt, Homo sapiens
gcaacugaggcagac

SEQ ID NO: 274251 - RNA, 22 nt, Homo sapiens
gcaacugaggcagacagcagcu

SEQ ID NO: 274252 - RNA, 14 nt, Homo sapiens
gcaagaaacacugg

SEQ ID NO: 274253 - RNA, 17 nt, Homo sapiens
gcaagaaggagcucagu

SEQ ID NO: 274254 - RNA, 22 nt, Homo sapiens
gcaagagaaaauaagcaggaca

SEQ ID NO: 274255 - RNA, 21 nt, Homo sapiens
gcaagcaagaaacacugggcu

SEQ ID NO: 274256 - RNA, 15 nt, Homo sapiens
gcaagcacaucugca

SEQ ID NO: 274257 - RNA, 15 nt, Homo sapiens
gcaagcuaguuccca

SEQ ID NO: 274258 - RNA, 22 nt, Homo sapiens
gcaagcugggacuggcaggaaa

SEQ ID NO: 274259 - RNA, 15 nt, Homo sapiens
gcaaggaaacguaau

SEQ ID NO: 274260 - RNA, 16 nt, Homo sapiens
gcaaggaaacuaugua

SEQ ID NO: 274261 - RNA, 19 nt, Homo sapiens
gcaaggagaccaccaacag

SEQ ID NO: 274262 - RNA, 13 nt, Homo sapiens
gcaaggugacauu

SEQ ID NO: 274263 - RNA, 14 nt, Homo sapiens
gcaagucacuggcc

SEQ ID NO: 274264 - RNA, 17 nt, Homo sapiens
gcaagugagacccuguc

SEQ ID NO: 274265 - RNA, 16 nt, Homo sapiens
gcaauagaaauccaau

SEQ ID NO: 274266 - RNA, 23 nt, Homo sapiens
gcaaucaaguccuacaagcuaaa

SEQ ID NO: 274267 - RNA, 20 nt, Homo sapiens
gcaaucuucucagaaggcaa

SEQ ID NO: 274268 - RNA, 21 nt, Homo sapiens
gcaaucuucucagaaggcaaa

SEQ ID NO: 274269 - RNA, 20 nt, Homo sapiens
gcaaugugcccccagacgca

SEQ ID NO: 274270 - RNA, 21 nt, Homo sapiens
gcacacuugcacccaugugua

SEQ ID NO: 274271 - RNA, 23 nt, Homo sapiens
gcacagagagggggccaccuccc

SEQ ID NO: 274272 - RNA, 17 nt, Homo sapiens
gcacagcacccauggga

SEQ ID NO: 274273 - RNA, 13 nt, Homo sapiens
gcacagccuggcu

SEQ ID NO: 274274 - RNA, 17 nt, Homo sapiens
gcacagcuaacauggaa

SEQ ID NO: 274275 - RNA, 17 nt, Homo sapiens
gcacagggucucuacca

SEQ ID NO: 274276 - RNA, 17 nt, Homo sapiens
gcacaguacccggugac

SEQ ID NO: 274277 - RNA, 22 nt, Homo sapiens
gcacaucugcauuuucacccca

SEQ ID NO: 274278 - RNA, 16 nt, Homo sapiens
gcacaugccucucuca

SEQ ID NO: 274279 - RNA, 20 nt, Homo sapiens
gcaccacugcacuccagccu

SEQ ID NO: 274280 - RNA, 15 nt, Homo sapiens
gcaccacuguguauu

SEQ ID NO: 274281 - RNA, 22 nt, Homo sapiens
gcacccaggacuuccauuugcu

SEQ ID NO: 274282 - RNA, 15 nt, Homo sapiens
gcaccccacuucaga

SEQ ID NO: 274283 - RNA, 12 nt, Homo sapiens
gcacccuggauu

SEQ ID NO: 274284 - RNA, 21 nt, Homo sapiens
gcacccuggauugaucggagc

SEQ ID NO: 274285 - RNA, 14 nt, Homo sapiens
gcacccuuagccac

SEQ ID NO: 274286 - RNA, 23 nt, Homo sapiens
gcaccgaugggcuuagagcucuc

SEQ ID NO: 274287 - RNA, 18 nt, Homo sapiens
gcaccgggccacagagaa

SEQ ID NO: 274288 - RNA, 19 nt, Homo sapiens
gcaccuacacucaccugca

SEQ ID NO: 274289 - RNA, 15 nt, Homo sapiens
gcaccuacaguguac

SEQ ID NO: 274290 - RNA, 13 nt, Homo sapiens
gcaccugauucuc

SEQ ID NO: 274291 - RNA, 13 nt, Homo sapiens
gcacgguggugcc

SEQ ID NO: 274292 - RNA, 17 nt, Homo sapiens
gcacgguggugcccaag

SEQ ID NO: 274293 - RNA, 14 nt, Homo sapiens
gcacgguugccuga

SEQ ID NO: 274294 - RNA, 15 nt, Homo sapiens
gcacguaagcuccuu

SEQ ID NO: 274295 - RNA, 21 nt, Homo sapiens
gcacuauaauguaagcucuac

SEQ ID NO: 274296 - RNA, 18 nt, Homo sapiens
gcacucaaagcuuguuaa

SEQ ID NO: 274297 - RNA, 19 nt, Homo sapiens
gcacucagaagacacugau

SEQ ID NO: 274298 - RNA, 20 nt, Homo sapiens
gcacuguucccccugugcag

SEQ ID NO: 274299 - RNA, 22 nt, Homo sapiens
gcacuuuguucuggcucuucca

SEQ ID NO: 274300 - RNA, 20 nt, Homo sapiens
gcagaaucuguuaccagagg

SEQ ID NO: 274301 - RNA, 15 nt, Homo sapiens
gcagacacucaagag

SEQ ID NO: 274302 - RNA, 13 nt, Homo sapiens
gcagaccacugau

SEQ ID NO: 274303 - RNA, 21 nt, Homo sapiens
gcagacucuacagaggccaug

SEQ ID NO: 274304 - RNA, 22 nt, Homo sapiens
gcagagcuugaacacagucuca

SEQ ID NO: 274305 - RNA, 14 nt, Homo sapiens
gcagaggccagagg

SEQ ID NO: 274306 - RNA, 21 nt, Homo sapiens
gcagaguacaaaguaagccau

SEQ ID NO: 274307 - RNA, 18 nt, Homo sapiens
gcagagugcuuuaccaau

SEQ ID NO: 274308 - RNA, 22 nt, Homo sapiens
gcagaguugaagacagagcuac

SEQ ID NO: 274309 - RNA, 19 nt, Homo sapiens
gcagauacaggaaaagcug

SEQ ID NO: 274310 - RNA, 18 nt, Homo sapiens
gcagauccagagguuucu

SEQ ID NO: 274311 - RNA, 17 nt, Homo sapiens
gcagauccugucccaug

SEQ ID NO: 274312 - RNA, 20 nt, Homo sapiens
gcagauccugucccaugggc

SEQ ID NO: 274313 - RNA, 16 nt, Homo sapiens
gcagccacauuccuga

SEQ ID NO: 274314 - RNA, 20 nt, Homo sapiens
gcagccacuuucugccagca

SEQ ID NO: 274315 - RNA, 15 nt, Homo sapiens
gcagcccacugccug

SEQ ID NO: 274316 - RNA, 18 nt, Homo sapiens
gcagccuggggucugaca

SEQ ID NO: 274317 - RNA, 19 nt, Homo sapiens
gcagccuggggucugacaa

SEQ ID NO: 274318 - RNA, 16 nt, Homo sapiens
gcagcgccagugacag

SEQ ID NO: 274319 - RNA, 19 nt, Homo sapiens
gcagcgcugcaguugcuca

SEQ ID NO: 274320 - RNA, 18 nt, Homo sapiens
gcagcucaggcacacuuc

SEQ ID NO: 274321 - RNA, 15 nt, Homo sapiens
gcagcugagauucca

SEQ ID NO: 274322 - RNA, 20 nt, Homo sapiens
gcagcuuagacuaaggccau

SEQ ID NO: 274323 - RNA, 18 nt, Homo sapiens
gcaggaaaugaaaauguc

SEQ ID NO: 274324 - RNA, 21 nt, Homo sapiens
gcaggaacuugcacaaaauca

SEQ ID NO: 274325 - RNA, 18 nt, Homo sapiens
gcaggacuaaaugucuag

SEQ ID NO: 274326 - RNA, 23 nt, Homo sapiens
gcaggagagaaugcccagugacc

SEQ ID NO: 274327 - RNA, 14 nt, Homo sapiens
gcaggcucucaggc

SEQ ID NO: 274328 - RNA, 15 nt, Homo sapiens
gcagggaaacagcua

SEQ ID NO: 274329 - RNA, 18 nt, Homo sapiens
gcagggaagaggggugca

SEQ ID NO: 274330 - RNA, 20 nt, Homo sapiens
gcagggaaggaucccaugag

SEQ ID NO: 274331 - RNA, 14 nt, Homo sapiens
gcagggauucuucc

SEQ ID NO: 274332 - RNA, 16 nt, Homo sapiens
gcagggccugauuuau

SEQ ID NO: 274333 - RNA, 19 nt, Homo sapiens
gcagguguucuucauuacc

SEQ ID NO: 274334 - RNA, 21 nt, Homo sapiens
gcaguaucagaggguggagau

SEQ ID NO: 274335 - RNA, 21 nt, Homo sapiens
gcaguccugugccucaucacu

SEQ ID NO: 274336 - RNA, 15 nt, Homo sapiens
gcagugacagaacua

SEQ ID NO: 274337 - RNA, 16 nt, Homo sapiens
gcaguggaacuaagaa

SEQ ID NO: 274338 - RNA, 12 nt, Homo sapiens
gcaguguggaaa

SEQ ID NO: 274339 - RNA, 17 nt, Homo sapiens
gcaguguucaaggccau

SEQ ID NO: 274340 - RNA, 22 nt, Homo sapiens
gcaguugaaacaagaagccaca

SEQ ID NO: 274341 - RNA, 13 nt, Homo sapiens
gcaguugcucagg

SEQ ID NO: 274342 - RNA, 21 nt, Homo sapiens
gcaguuugcuuuguaugcacu

SEQ ID NO: 274343 - RNA, 14 nt, Homo sapiens
gccugcggaccaga

SEQ ID NO: 274344 - RNA, 20 nt, Homo sapiens
gccugcggaguugugcacgu

SEQ ID NO: 274345 - RNA, 19 nt, Homo sapiens
gccugcuagcggcugaaca

SEQ ID NO: 274346 - RNA, 19 nt, Homo sapiens
gccuggcaagugggugaaa

SEQ ID NO: 274347 - RNA, 22 nt, Homo sapiens
gccuggcuguggccuaaccugc

SEQ ID NO: 274348 - RNA, 16 nt, Homo sapiens
gccugggggauguacc

SEQ ID NO: 274349 - RNA, 22 nt, Homo sapiens
gccugggggcugggcagaggaa

SEQ ID NO: 274350 - RNA, 21 nt, Homo sapiens
gccuggucccacgagggugcc

SEQ ID NO: 274351 - RNA, 14 nt, Homo sapiens
gccuggugcagugg

SEQ ID NO: 274352 - RNA, 14 nt, Homo sapiens
gccuguccccaugc

SEQ ID NO: 274353 - RNA, 12 nt, Homo sapiens
gccugugccuuu

SEQ ID NO: 274354 - RNA, 23 nt, Homo sapiens
gccuguggcgccgucuccagggg

SEQ ID NO: 274355 - RNA, 15 nt, Homo sapiens
gccuuaaccaugagg

SEQ ID NO: 274356 - RNA, 11 nt, Homo sapiens
gccuuacacaa

SEQ ID NO: 274357 - RNA, 15 nt, Homo sapiens
gccuuauuggcagcu

SEQ ID NO: 274358 - RNA, 23 nt, Homo sapiens
gccuuccuggaggugacacuuga

SEQ ID NO: 274359 - RNA, 23 nt, Homo sapiens
gcaucuggaaauuuuuacuuuaa

SEQ ID NO: 274360 - RNA, 18 nt, Homo sapiens
gcaugaaguaauaugcac

SEQ ID NO: 274361 - RNA, 15 nt, Homo sapiens
gcauggagcauggga

SEQ ID NO: 274362 - RNA, 18 nt, Homo sapiens
gcauggagucuucaggua

SEQ ID NO: 274363 - RNA, 18 nt, Homo sapiens
gcaugugcagacacucaa

SEQ ID NO: 274364 - RNA, 15 nt, Homo sapiens
gcauguuugugauug

SEQ ID NO: 274365 - RNA, 14 nt, Homo sapiens
gcauuacaauugca

SEQ ID NO: 274366 - RNA, 22 nt, Homo sapiens
gcauucacaccaccccccaugc

SEQ ID NO: 274367 - RNA, 16 nt, Homo sapiens
gcauucagccaggaga

SEQ ID NO: 274368 - RNA, 20 nt, Homo sapiens
gcauuccagccccucugguc

SEQ ID NO: 274369 - RNA, 18 nt, Homo sapiens
gcauuccagcgucugcug

SEQ ID NO: 274370 - RNA, 16 nt, Homo sapiens
gcauugagcaaagggg

SEQ ID NO: 274371 - RNA, 19 nt, Homo sapiens
gcauuuacuuuguguucac

SEQ ID NO: 274372 - RNA, 23 nt, Homo sapiens
gcauuuagacucucgacuggcca

SEQ ID NO: 274373 - RNA, 19 nt, Homo sapiens
gcauuugucaacaaaguca

SEQ ID NO: 274374 - RNA, 20 nt, Homo sapiens
gcauuugugcccacucucca

SEQ ID NO: 274375 - RNA, 13 nt, Homo sapiens
gcauuuguuugaa

SEQ ID NO: 274376 - RNA, 18 nt, Homo sapiens
gccaaaaaaugcuugcuu

SEQ ID NO: 274377 - RNA, 17 nt, Homo sapiens
gccaacccugugacuga

SEQ ID NO: 274378 - RNA, 20 nt, Homo sapiens
gccaagcagagguugggagg

SEQ ID NO: 274379 - RNA, 12 nt, Homo sapiens
gccaagcaguuu

SEQ ID NO: 274380 - RNA, 16 nt, Homo sapiens
gccaaggcucacaugc

SEQ ID NO: 274381 - RNA, 17 nt, Homo sapiens
gccaaggcucacaugcu

SEQ ID NO: 274382 - RNA, 19 nt, Homo sapiens
gccaauaccguguggccca

SEQ ID NO: 274383 - RNA, 18 nt, Homo sapiens
gccaaucaguagccagca

SEQ ID NO: 274384 - RNA, 18 nt, Homo sapiens
gccaauggagacugucuc

SEQ ID NO: 274385 - RNA, 16 nt, Homo sapiens
gccacacggcucucac

SEQ ID NO: 274386 - RNA, 19 nt, Homo sapiens
gccacacggcucucaccag

SEQ ID NO: 274387 - RNA, 21 nt, Homo sapiens
gccacagaccuaggauuucau

SEQ ID NO: 274388 - RNA, 17 nt, Homo sapiens
gccacagcacucggccu

SEQ ID NO: 274389 - RNA, 17 nt, Homo sapiens
gccacagggugagcacu

SEQ ID NO: 274390 - RNA, 11 nt, Homo sapiens
gccacauggga

SEQ ID NO: 274391 - RNA, 19 nt, Homo sapiens
gccaccaacauacucccau

SEQ ID NO: 274392 - RNA, 10 nt, Homo sapiens
gccaccagag

SEQ ID NO: 274393 - RNA, 13 nt, Homo sapiens
gccaccaguucuc

SEQ ID NO: 274394 - RNA, 19 nt, Homo sapiens
gccacccucccacugccaa

SEQ ID NO: 274395 - RNA, 19 nt, Homo sapiens
gccaccuccccaggccgug

SEQ ID NO: 274396 - RNA, 15 nt, Homo sapiens
gccaccuuugaagaa

SEQ ID NO: 274397 - RNA, 16 nt, Homo sapiens
gccacuauuacuggga

SEQ ID NO: 274398 - RNA, 19 nt, Homo sapiens
gccacucaggggucauuca

SEQ ID NO: 274399 - RNA, 11 nt, Homo sapiens
gccacuggccc

SEQ ID NO: 274400 - RNA, 16 nt, Homo sapiens
gccacuguuaagccau

SEQ ID NO: 274401 - RNA, 13 nt, Homo sapiens
gccacuuucugcc

SEQ ID NO: 274402 - RNA, 14 nt, Homo sapiens
gccacuuucugcca

SEQ ID NO: 274403 - RNA, 16 nt, Homo sapiens
gccagagcaaacagaa

SEQ ID NO: 274404 - RNA, 18 nt, Homo sapiens
gccagagcaaacagaaaa

SEQ ID NO: 274405 - RNA, 17 nt, Homo sapiens
gccagcaggcucucagg

SEQ ID NO: 274406 - RNA, 13 nt, Homo sapiens
gccagcaucugca

SEQ ID NO: 274407 - RNA, 14 nt, Homo sapiens
gccagcaucugcag

SEQ ID NO: 274408 - RNA, 20 nt, Homo sapiens
gccagcaucugcagccacuu

SEQ ID NO: 274409 - RNA, 14 nt, Homo sapiens
gccagcaucugccu

SEQ ID NO: 274410 - RNA, 21 nt, Homo sapiens
gccagcauuucccuuccuucc

SEQ ID NO: 274411 - RNA, 19 nt, Homo sapiens
gccagcuuaucucaggggu

SEQ ID NO: 274412 - RNA, 13 nt, Homo sapiens
gccaggaagccag

SEQ ID NO: 274413 - RNA, 18 nt, Homo sapiens
gccaggcaugguggccca

SEQ ID NO: 274414 - RNA, 22 nt, Homo sapiens
gccaguaaaugggggugcauuu

SEQ ID NO: 274415 - RNA, 21 nt, Homo sapiens
gccaguggcuggaucugugag

SEQ ID NO: 274416 - RNA, 16 nt, Homo sapiens
gccagugggaccccac

SEQ ID NO: 274417 - RNA, 21 nt, Homo sapiens
gccaguuggucccccuuccau

SEQ ID NO: 274418 - RNA, 22 nt, Homo sapiens
gccauauucuguuggccagugu

SEQ ID NO: 274419 - RNA, 17 nt, Homo sapiens
gccaucaggaugagcag

SEQ ID NO: 274420 - RNA, 17 nt, Homo sapiens
gccauccucccaagggg

SEQ ID NO: 274421 - RNA, 18 nt, Homo sapiens
gccaugaggaacaaggca

SEQ ID NO: 274422 - RNA, 18 nt, Homo sapiens
gccaugccuccucaggag

SEQ ID NO: 274423 - RNA, 22 nt, Homo sapiens
gccauuuuggguuuugggucuu

SEQ ID NO: 274424 - RNA, 19 nt, Homo sapiens
gccauuuuguuguguguau

SEQ ID NO: 274425 - RNA, 22 nt, Homo sapiens
gcccaacccacaccaaauaaga

SEQ ID NO: 274426 - RNA, 14 nt, Homo sapiens
gcccaagaauagau

SEQ ID NO: 274427 - RNA, 14 nt, Homo sapiens
gcccaaugcacuuu

SEQ ID NO: 274428 - RNA, 22 nt, Homo sapiens
gcccacauauaaauguacuuuu

SEQ ID NO: 274429 - RNA, 20 nt, Homo sapiens
gcccacgcuggagugcagug

SEQ ID NO: 274430 - RNA, 22 nt, Homo sapiens
gcccacuucaccguacuaacca

SEQ ID NO: 274431 - RNA, 22 nt, Homo sapiens
gcccagacccuucuccuuagaa

SEQ ID NO: 274432 - RNA, 15 nt, Homo sapiens
gcccagagccuggcu

SEQ ID NO: 274433 - RNA, 16 nt, Homo sapiens
gcccagccucaucucu

SEQ ID NO: 274434 - RNA, 16 nt, Homo sapiens
gcccagcuaaagcaau

SEQ ID NO: 274435 - RNA, 17 nt, Homo sapiens
gcccaggauuauuguca

SEQ ID NO: 274436 - RNA, 17 nt, Homo sapiens
gcccaggcaggucuuga

SEQ ID NO: 274437 - RNA, 18 nt, Homo sapiens
gcccaggcuggagugcaa

SEQ ID NO: 274438 - RNA, 19 nt, Homo sapiens
gcccaggcuggagugcaau

SEQ ID NO: 274439 - RNA, 20 nt, Homo sapiens
gcccaggcuggcgugcagug

SEQ ID NO: 274440 - RNA, 13 nt, Homo sapiens
gcccagugcacac

SEQ ID NO: 274441 - RNA, 13 nt, Homo sapiens
gcccagugccauc

SEQ ID NO: 274442 - RNA, 14 nt, Homo sapiens
gcccauaucuguga

SEQ ID NO: 274443 - RNA, 18 nt, Homo sapiens
gcccauaucugugaaaug

SEQ ID NO: 274444 - RNA, 18 nt, Homo sapiens
gcccaucaauuauagaaa

SEQ ID NO: 274445 - RNA, 15 nt, Homo sapiens
gccccagccuaggaa

SEQ ID NO: 274446 - RNA, 12 nt, Homo sapiens
gccccaucacug

SEQ ID NO: 274447 - RNA, 22 nt, Homo sapiens
gccccaugcugcccgcuucuca

SEQ ID NO: 274448 - RNA, 13 nt, Homo sapiens
gccccauguaucu

SEQ ID NO: 274449 - RNA, 20 nt, Homo sapiens
gccccccuugccagacaugu

SEQ ID NO: 274450 - RNA, 15 nt, Homo sapiens
gcccccugguggaau

SEQ ID NO: 274451 - RNA, 16 nt, Homo sapiens
gcccgggagcucagga

SEQ ID NO: 274452 - RNA, 17 nt, Homo sapiens
gcccuagagcacacugu

SEQ ID NO: 274453 - RNA, 15 nt, Homo sapiens
gcccuggaggcggug

SEQ ID NO: 274454 - RNA, 19 nt, Homo sapiens
gcccuggaugcccaggaau

SEQ ID NO: 274455 - RNA, 15 nt, Homo sapiens
gcccuggugcugcca

SEQ ID NO: 274456 - RNA, 23 nt, Homo sapiens
gcccugugggcccccaaauggaa

SEQ ID NO: 274457 - RNA, 14 nt, Homo sapiens
gcccuuaccugcca

SEQ ID NO: 274458 - RNA, 22 nt, Homo sapiens
gcccuuacuugcuucucuagcu

SEQ ID NO: 274459 - RNA, 18 nt, Homo sapiens
gcccuuccucuccacugc

SEQ ID NO: 274460 - RNA, 20 nt, Homo sapiens
gcccuucuaccuuccugcaa

SEQ ID NO: 274461 - RNA, 22 nt, Homo sapiens
gcccuucucucauuauuucucu

SEQ ID NO: 274462 - RNA, 21 nt, Homo sapiens
gccgagauagccaaggccaaa

SEQ ID NO: 274463 - RNA, 15 nt, Homo sapiens
gccgcacaucucacu

SEQ ID NO: 274464 - RNA, 14 nt, Homo sapiens
gccgcacccuggcu

SEQ ID NO: 274465 - RNA, 14 nt, Homo sapiens
gccgggaacagaga

SEQ ID NO: 274466 - RNA, 20 nt, Homo sapiens
gccgggcaggguguggggcc

SEQ ID NO: 274467 - RNA, 20 nt, Homo sapiens
gccgugauuuucauugcugg

SEQ ID NO: 274468 - RNA, 22 nt, Homo sapiens
gccguggggccgccgccucuuu

SEQ ID NO: 274469 - RNA, 17 nt, Homo sapiens
gccuaaaaaugcaacuu

SEQ ID NO: 274470 - RNA, 14 nt, Homo sapiens
gccuaauggcaaaa

SEQ ID NO: 274471 - RNA, 16 nt, Homo sapiens
gccuagccgaccucag

SEQ ID NO: 274472 - RNA, 14 nt, Homo sapiens
gccuaggugacaga

SEQ ID NO: 274473 - RNA, 14 nt, Homo sapiens
gccuauaucuucau

SEQ ID NO: 274474 - RNA, 14 nt, Homo sapiens
gccuaugugcaugc

SEQ ID NO: 274475 - RNA, 19 nt, Homo sapiens
gccucaagaugaaggcaaa

SEQ ID NO: 274476 - RNA, 13 nt, Homo sapiens
gccucaaggacuu

SEQ ID NO: 274477 - RNA, 13 nt, Homo sapiens
gccucacaguccu

SEQ ID NO: 274478 - RNA, 19 nt, Homo sapiens
gccucacugaaacauggcu

SEQ ID NO: 274479 - RNA, 11 nt, Homo sapiens
gccucaucucu

SEQ ID NO: 274480 - RNA, 19 nt, Homo sapiens
gccucccacccccaucucu

SEQ ID NO: 274481 - RNA, 15 nt, Homo sapiens
gccuccccagcaccu

SEQ ID NO: 274482 - RNA, 20 nt, Homo sapiens
gccuccccagcaccuaggug

SEQ ID NO: 274483 - RNA, 24 nt, Homo sapiens
gccucccucccugugccagaccuc

SEQ ID NO: 274484 - RNA, 20 nt, Homo sapiens
gccuccuccagaauggagcu

SEQ ID NO: 274485 - RNA, 16 nt, Homo sapiens
gccuccugucccucau

SEQ ID NO: 274486 - RNA, 14 nt, Homo sapiens
gccucucucaggcc

SEQ ID NO: 274487 - RNA, 16 nt, Homo sapiens
gccucucucaggccaa

SEQ ID NO: 274488 - RNA, 13 nt, Homo sapiens
gccucucuugcca

SEQ ID NO: 274489 - RNA, 14 nt, Homo sapiens
gccucugaagccua

SEQ ID NO: 274490 - RNA, 16 nt, Homo sapiens
gccucugcacuccccu

SEQ ID NO: 274491 - RNA, 10 nt, Homo sapiens
gccucugugc

SEQ ID NO: 274492 - RNA, 14 nt, Homo sapiens
gccucuguggcacu

SEQ ID NO: 274493 - RNA, 17 nt, Homo sapiens
gccugaagaacaguaac

SEQ ID NO: 274494 - RNA, 15 nt, Homo sapiens
gccugaagucacaca

SEQ ID NO: 274495 - RNA, 13 nt, Homo sapiens
gccugaggcaauu

SEQ ID NO: 274496 - RNA, 22 nt, Homo sapiens
gccugaggcaauuagacacuuu

SEQ ID NO: 274497 - RNA, 22 nt, Homo sapiens
gccugaucagcgccgcaccagc

SEQ ID NO: 274498 - RNA, 19 nt, Homo sapiens
gcuuuuacugaagccuuuc

SEQ ID NO: 274499 - RNA, 20 nt, Homo sapiens
gcuuuugcuggucacugcca

SEQ ID NO: 274500 - RNA, 14 nt, Homo sapiens
gcuuuugugcauua

SEQ ID NO: 274501 - RNA, 12 nt, Homo sapiens
ggaaaaaugucc

SEQ ID NO: 274502 - RNA, 15 nt, Homo sapiens
ggaaaacaagcauuc

SEQ ID NO: 274503 - RNA, 20 nt, Homo sapiens
ggaaaagcugcugacagugu

SEQ ID NO: 274504 - RNA, 17 nt, Homo sapiens
gccugcaggaccucgug

SEQ ID NO: 274505 - RNA, 12 nt, Homo sapiens
gccugcccuccc

SEQ ID NO: 274506 - RNA, 14 nt, Homo sapiens
gccugccucuucca

SEQ ID NO: 274507 - RNA, 14 nt, Homo sapiens
gccugccucuucuc

SEQ ID NO: 274508 - RNA, 20 nt, Homo sapiens
gccugcggaccagaugaaug

SEQ ID NO: 274509 - RNA, 17 nt, Homo sapiens
gccuggaccagccucuc

SEQ ID NO: 274510 - RNA, 14 nt, Homo sapiens
gccuggacccugug

SEQ ID NO: 274511 - RNA, 20 nt, Homo sapiens
gccuggaguguaugacugca

SEQ ID NO: 274512 - RNA, 20 nt, Homo sapiens
gccuggcagccgugccuuca

SEQ ID NO: 274513 - RNA, 17 nt, Homo sapiens
gccuggccccucagggu

SEQ ID NO: 274514 - RNA, 15 nt, Homo sapiens
gccugggaucccuca

SEQ ID NO: 274515 - RNA, 17 nt, Homo sapiens
gccuggggucugacaau

SEQ ID NO: 274516 - RNA, 23 nt, Homo sapiens
gccuggggucugacaauaccucg

SEQ ID NO: 274517 - RNA, 16 nt, Homo sapiens
gccuggucguuuucaa

SEQ ID NO: 274518 - RNA, 14 nt, Homo sapiens
gccugguggcagcu

SEQ ID NO: 274519 - RNA, 14 nt, Homo sapiens
gccuuaccaggaga

SEQ ID NO: 274520 - RNA, 16 nt, Homo sapiens
gccuuagggcacuggg

SEQ ID NO: 274521 - RNA, 23 nt, Homo sapiens
gccuucaguuuccauccccagga

SEQ ID NO: 274522 - RNA, 16 nt, Homo sapiens
gccuugaaaccaccuu

SEQ ID NO: 274523 - RNA, 20 nt, Homo sapiens
gccuugucacgccagacuuc

SEQ ID NO: 274524 - RNA, 17 nt, Homo sapiens
gccuuucucucuuucuc

SEQ ID NO: 274525 - RNA, 22 nt, Homo sapiens
gccuuucucucuuucucuuaau

SEQ ID NO: 274526 - RNA, 19 nt, Homo sapiens
gccuuugccucucuugcca

SEQ ID NO: 274527 - RNA, 14 nt, Homo sapiens
gccuuuuguguuuu

SEQ ID NO: 274528 - RNA, 19 nt, Homo sapiens
gcgaagcguuguccucagc

SEQ ID NO: 274529 - RNA, 13 nt, Homo sapiens
gcgacccaagacc

SEQ ID NO: 274530 - RNA, 19 nt, Homo sapiens
gcgacggcuuccaucugcc

SEQ ID NO: 274531 - RNA, 20 nt, Homo sapiens
gcgagcccugguggcagugg

SEQ ID NO: 274532 - RNA, 22 nt, Homo sapiens
gcgauccaccugucucagccuc

SEQ ID NO: 274533 - RNA, 20 nt, Homo sapiens
gcgaucuggguucacugcaa

SEQ ID NO: 274534 - RNA, 15 nt, Homo sapiens
gcgcaagcugggagc

SEQ ID NO: 274535 - RNA, 22 nt, Homo sapiens
gcgcaguuggucuuuaaccacu

SEQ ID NO: 274536 - RNA, 18 nt, Homo sapiens
gcgcccagccucaucucu

SEQ ID NO: 274537 - RNA, 14 nt, Homo sapiens
gcgcucagggccau

SEQ ID NO: 274538 - RNA, 14 nt, Homo sapiens
gcggaguugugcac

SEQ ID NO: 274539 - RNA, 18 nt, Homo sapiens
gcgucaugcuuguguuau

SEQ ID NO: 274540 - RNA, 15 nt, Homo sapiens
gcgucgguccuggug

SEQ ID NO: 274541 - RNA, 20 nt, Homo sapiens
gcuaaaauuagaugaacuca

SEQ ID NO: 274542 - RNA, 12 nt, Homo sapiens
gcuacaccuuuc

SEQ ID NO: 274543 - RNA, 14 nt, Homo sapiens
gcuaccaguauuua

SEQ ID NO: 274544 - RNA, 17 nt, Homo sapiens
gcuacccgagguuugca

SEQ ID NO: 274545 - RNA, 17 nt, Homo sapiens
gcuaccuacauacaauu

SEQ ID NO: 274546 - RNA, 16 nt, Homo sapiens
gcuaccucacuggggu

SEQ ID NO: 274547 - RNA, 20 nt, Homo sapiens
gcuacgguuccauguucacc

SEQ ID NO: 274548 - RNA, 22 nt, Homo sapiens
gcuacugacuauggcuaccaaa

SEQ ID NO: 274549 - RNA, 22 nt, Homo sapiens
gcuagaaaaggccuucuuccca

SEQ ID NO: 274550 - RNA, 14 nt, Homo sapiens
gcuagacuggugac

SEQ ID NO: 274551 - RNA, 14 nt, Homo sapiens
gcuaggaacacucc

SEQ ID NO: 274552 - RNA, 18 nt, Homo sapiens
gcuaggaacacuccuuca

SEQ ID NO: 274553 - RNA, 15 nt, Homo sapiens
gcuaguaaaagccau

SEQ ID NO: 274554 - RNA, 16 nt, Homo sapiens
gcuaguaaaagccauc

SEQ ID NO: 274555 - RNA, 21 nt, Homo sapiens
gcuaguucccaugacuccugg

SEQ ID NO: 274556 - RNA, 17 nt, Homo sapiens
gcuauaacuauguugau

SEQ ID NO: 274557 - RNA, 17 nt, Homo sapiens
gcuaucgcaccacugug

SEQ ID NO: 274558 - RNA, 13 nt, Homo sapiens
gcuaugcauuuga

SEQ ID NO: 274559 - RNA, 20 nt, Homo sapiens
gcuauggggagaaaagacau

SEQ ID NO: 274560 - RNA, 22 nt, Homo sapiens
gcuaugugaagaguaagucaac

SEQ ID NO: 274561 - RNA, 16 nt, Homo sapiens
gcuaugugagcacaaa

SEQ ID NO: 274562 - RNA, 17 nt, Homo sapiens
gcuauugaccgagcaca

SEQ ID NO: 274563 - RNA, 15 nt, Homo sapiens
gcuauuguagagcca

SEQ ID NO: 274564 - RNA, 17 nt, Homo sapiens
gcucacacaugagaucu

SEQ ID NO: 274565 - RNA, 14 nt, Homo sapiens
gcucacaccuguaa

SEQ ID NO: 274566 - RNA, 18 nt, Homo sapiens
gcucacauaucugucauu

SEQ ID NO: 274567 - RNA, 14 nt, Homo sapiens
gcucacugcucaca

SEQ ID NO: 274568 - RNA, 16 nt, Homo sapiens
gcucacuggcuuuagc

SEQ ID NO: 274569 - RNA, 22 nt, Homo sapiens
gcucagcaaaagaugcuucuca

SEQ ID NO: 274570 - RNA, 17 nt, Homo sapiens
gcucagcacacaugcau

SEQ ID NO: 274571 - RNA, 19 nt, Homo sapiens
gcucagcggggacagcucc

SEQ ID NO: 274572 - RNA, 19 nt, Homo sapiens
gcucagggaauaauccaga

SEQ ID NO: 274573 - RNA, 20 nt, Homo sapiens
gcucaggugucccugcacuu

SEQ ID NO: 274574 - RNA, 21 nt, Homo sapiens
gcucaguagucagacuggaua

SEQ ID NO: 274575 - RNA, 18 nt, Homo sapiens
gcucauauuguucccuau

SEQ ID NO: 274576 - RNA, 13 nt, Homo sapiens
gcucaucauucuc

SEQ ID NO: 274577 - RNA, 15 nt, Homo sapiens
gcucaucauucucug

SEQ ID NO: 274578 - RNA, 21 nt, Homo sapiens
gcuccaagugauacuucugcc

SEQ ID NO: 274579 - RNA, 11 nt, Homo sapiens
gcuccacugaa

SEQ ID NO: 274580 - RNA, 18 nt, Homo sapiens
gcuccacuuggucuguga

SEQ ID NO: 274581 - RNA, 20 nt, Homo sapiens
gcuccaucgcugucaucuca

SEQ ID NO: 274582 - RNA, 13 nt, Homo sapiens
gcuccauguagaa

SEQ ID NO: 274583 - RNA, 21 nt, Homo sapiens
gcuccccacgucagcugggac

SEQ ID NO: 274584 - RNA, 14 nt, Homo sapiens
gcuccuaagccaug

SEQ ID NO: 274585 - RNA, 11 nt, Homo sapiens
gcuccuggacu

SEQ ID NO: 274586 - RNA, 20 nt, Homo sapiens
gcuccuggacucauugcuuc

SEQ ID NO: 274587 - RNA, 22 nt, Homo sapiens
gcuccugggccugggcuuuagu

SEQ ID NO: 274588 - RNA, 16 nt, Homo sapiens
gcuccugucaccauga

SEQ ID NO: 274589 - RNA, 15 nt, Homo sapiens
gcuccuucuguccua

SEQ ID NO: 274590 - RNA, 20 nt, Homo sapiens
gcucuaauucacagugcucu

SEQ ID NO: 274591 - RNA, 19 nt, Homo sapiens
gcucuacccugaguucaua

SEQ ID NO: 274592 - RNA, 13 nt, Homo sapiens
gcucuaucugcug

SEQ ID NO: 274593 - RNA, 18 nt, Homo sapiens
gcucuccggcugcaucua

SEQ ID NO: 274594 - RNA, 14 nt, Homo sapiens
gcucugccucccau

SEQ ID NO: 274595 - RNA, 18 nt, Homo sapiens
gcucugcgucgguccugg

SEQ ID NO: 274596 - RNA, 16 nt, Homo sapiens
gcucugcugacagaca

SEQ ID NO: 274597 - RNA, 14 nt, Homo sapiens
gcucuggacaggca

SEQ ID NO: 274598 - RNA, 21 nt, Homo sapiens
gcucugugcacucacgcucag

SEQ ID NO: 274599 - RNA, 17 nt, Homo sapiens
gcucuuuugagcauuua

SEQ ID NO: 274600 - RNA, 20 nt, Homo sapiens
gcugaaaacugcaacuugua

SEQ ID NO: 274601 - RNA, 17 nt, Homo sapiens
gcugaaauaaaaauaca

SEQ ID NO: 274602 - RNA, 23 nt, Homo sapiens
gcugagcagguguucuucauuac

SEQ ID NO: 274603 - RNA, 17 nt, Homo sapiens
gcugagccuggucccac

SEQ ID NO: 274604 - RNA, 22 nt, Homo sapiens
gcugaggccucucauuccagag

SEQ ID NO: 274605 - RNA, 18 nt, Homo sapiens
gcugaucauugcaguauc

SEQ ID NO: 274606 - RNA, 17 nt, Homo sapiens
gcugauggugcaaugac

SEQ ID NO: 274607 - RNA, 18 nt, Homo sapiens
gcugccagcucuguauca

SEQ ID NO: 274608 - RNA, 16 nt, Homo sapiens
gcugccucuaccugac

SEQ ID NO: 274609 - RNA, 19 nt, Homo sapiens
gcugccucuaccugacacu

SEQ ID NO: 274610 - RNA, 22 nt, Homo sapiens
gcugccucuugaaugcagggac

SEQ ID NO: 274611 - RNA, 13 nt, Homo sapiens
gcugccugggauc

SEQ ID NO: 274612 - RNA, 18 nt, Homo sapiens
gcugccuguccccaugcu

SEQ ID NO: 274613 - RNA, 19 nt, Homo sapiens
gcugccuuuggacuugucc

SEQ ID NO: 274614 - RNA, 14 nt, Homo sapiens
gcugcuuagauuuc

SEQ ID NO: 274615 - RNA, 17 nt, Homo sapiens
gcuggaggaugugggca

SEQ ID NO: 274616 - RNA, 20 nt, Homo sapiens
gcuggagugaagugguguga

SEQ ID NO: 274617 - RNA, 12 nt, Homo sapiens
gcuggagugcaa

SEQ ID NO: 274618 - RNA, 15 nt, Homo sapiens
gcuggagugcaguga

SEQ ID NO: 274619 - RNA, 15 nt, Homo sapiens
gcuggcccagccaaa

SEQ ID NO: 274620 - RNA, 14 nt, Homo sapiens
gcuggcgugcagug

SEQ ID NO: 274621 - RNA, 16 nt, Homo sapiens
gcugggacuacaggug

SEQ ID NO: 274622 - RNA, 14 nt, Homo sapiens
gcugggagaaccaa

SEQ ID NO: 274623 - RNA, 16 nt, Homo sapiens
gcugggauuacaggug

SEQ ID NO: 274624 - RNA, 20 nt, Homo sapiens
gcugggcagaggaaagcaaa

SEQ ID NO: 274625 - RNA, 15 nt, Homo sapiens
gcugggcuucagugg

SEQ ID NO: 274626 - RNA, 14 nt, Homo sapiens
gcuggggaugucuc

SEQ ID NO: 274627 - RNA, 20 nt, Homo sapiens
gcuguaacguggcacuggua

SEQ ID NO: 274628 - RNA, 14 nt, Homo sapiens
gcuguaacuacuuu

SEQ ID NO: 274629 - RNA, 14 nt, Homo sapiens
gcuguagaagaugg

SEQ ID NO: 274630 - RNA, 22 nt, Homo sapiens
gcugucacaauuauuaccaucu

SEQ ID NO: 274631 - RNA, 13 nt, Homo sapiens
gcugucaucucag

SEQ ID NO: 274632 - RNA, 14 nt, Homo sapiens
gcuguccugcagca

SEQ ID NO: 274633 - RNA, 19 nt, Homo sapiens
gcuguggccuaaccugccg

SEQ ID NO: 274634 - RNA, 13 nt, Homo sapiens
gcugugggcugcu

SEQ ID NO: 274635 - RNA, 13 nt, Homo sapiens
gcuguuagcacgu

SEQ ID NO: 274636 - RNA, 19 nt, Homo sapiens
gcuguucacucucucgucu

SEQ ID NO: 274637 - RNA, 18 nt, Homo sapiens
gcuuaaaacaacacucac

SEQ ID NO: 274638 - RNA, 20 nt, Homo sapiens
gcuuaaaggggcuagaguga

SEQ ID NO: 274639 - RNA, 23 nt, Homo sapiens
gcuuaagccacugccucucccuc

SEQ ID NO: 274640 - RNA, 13 nt, Homo sapiens
gcuuagaccucag

SEQ ID NO: 274641 - RNA, 21 nt, Homo sapiens
gcuuagacuaaggccauuauu

SEQ ID NO: 274642 - RNA, 15 nt, Homo sapiens
gcuucaaccccauga

SEQ ID NO: 274643 - RNA, 13 nt, Homo sapiens
gcuucacaguacc

SEQ ID NO: 274644 - RNA, 11 nt, Homo sapiens
gcuucacuggu

SEQ ID NO: 274645 - RNA, 22 nt, Homo sapiens
gcuucacugguugaguguugcu

SEQ ID NO: 274646 - RNA, 18 nt, Homo sapiens
gcuucaguggcagcugcu

SEQ ID NO: 274647 - RNA, 13 nt, Homo sapiens
gcuuccaucugcc

SEQ ID NO: 274648 - RNA, 15 nt, Homo sapiens
gcuucccugacucau

SEQ ID NO: 274649 - RNA, 12 nt, Homo sapiens
gguaugauuaac

SEQ ID NO: 274650 - RNA, 12 nt, Homo sapiens
gguauuuagcca

SEQ ID NO: 274651 - RNA, 15 nt, Homo sapiens
ggucaagaaacagcc

SEQ ID NO: 274652 - RNA, 23 nt, Homo sapiens
ggucaccagacggggcuggagug

SEQ ID NO: 274653 - RNA, 17 nt, Homo sapiens
ggucagagggcccagug

SEQ ID NO: 274654 - RNA, 18 nt, Homo sapiens
ggucagagggcccagugg

SEQ ID NO: 274655 - RNA, 21 nt, Homo sapiens
ggucagaguuccgacugccau

SEQ ID NO: 274656 - RNA, 14 nt, Homo sapiens
ggucaucacuuuga

SEQ ID NO: 274657 - RNA, 15 nt, Homo sapiens
gguccaaggucucca

SEQ ID NO: 274658 - RNA, 23 nt, Homo sapiens
gguccugcagccugcaggaccuc

SEQ ID NO: 274659 - RNA, 14 nt, Homo sapiens
gcuucugauaugca

SEQ ID NO: 274660 - RNA, 11 nt, Homo sapiens
gcuucugccau

SEQ ID NO: 274661 - RNA, 13 nt, Homo sapiens
gcuucuuuacuua

SEQ ID NO: 274662 - RNA, 19 nt, Homo sapiens
gcuucuuugaaacuuguau

SEQ ID NO: 274663 - RNA, 19 nt, Homo sapiens
gcuugaccuuuaagagaaa

SEQ ID NO: 274664 - RNA, 12 nt, Homo sapiens
gcuuggacucaa

SEQ ID NO: 274665 - RNA, 16 nt, Homo sapiens
gcuugggcuucauccu

SEQ ID NO: 274666 - RNA, 20 nt, Homo sapiens
gcuuguaaauagcucaggug

SEQ ID NO: 274667 - RNA, 21 nt, Homo sapiens
gcuuuaauuuuuuuaaccaaa

SEQ ID NO: 274668 - RNA, 21 nt, Homo sapiens
gcuuuagcugcugucuucccc

SEQ ID NO: 274669 - RNA, 17 nt, Homo sapiens
gcuuugcggcaucucca

SEQ ID NO: 274670 - RNA, 21 nt, Homo sapiens
gcuuugcggcaucuccauuuc

SEQ ID NO: 274671 - RNA, 15 nt, Homo sapiens
gcuuuguggcacugg

SEQ ID NO: 274672 - RNA, 21 nt, Homo sapiens
gcuuuucuuuucuaaccaaga

SEQ ID NO: 274673 - RNA, 13 nt, Homo sapiens
ggaaaacaguauu

SEQ ID NO: 274674 - RNA, 20 nt, Homo sapiens
ggaaaauaaaucaaugcuau

SEQ ID NO: 274675 - RNA, 17 nt, Homo sapiens
ggaaaauuucacauuaa

SEQ ID NO: 274676 - RNA, 22 nt, Homo sapiens
ggaaaauuuuaaaaauacagau

SEQ ID NO: 274677 - RNA, 16 nt, Homo sapiens
ggaaagaaaugcccau

SEQ ID NO: 274678 - RNA, 16 nt, Homo sapiens
ggaaagccaguuacau

SEQ ID NO: 274679 - RNA, 16 nt, Homo sapiens
ggaaaggcuccaggag

SEQ ID NO: 274680 - RNA, 18 nt, Homo sapiens
ggaaauagugauuuccac

SEQ ID NO: 274681 - RNA, 21 nt, Homo sapiens
ggaaauauuaagaaagacuau

SEQ ID NO: 274682 - RNA, 11 nt, Homo sapiens
ggaaaucacac

SEQ ID NO: 274683 - RNA, 13 nt, Homo sapiens
ggaaaugggagac

SEQ ID NO: 274684 - RNA, 13 nt, Homo sapiens
ggaaccagcccag

SEQ ID NO: 274685 - RNA, 16 nt, Homo sapiens
ggaacccucuaaggga

SEQ ID NO: 274686 - RNA, 19 nt, Homo sapiens
ggaacuuuuauuacugggg

SEQ ID NO: 274687 - RNA, 15 nt, Homo sapiens
ggaagacaaugugaa

SEQ ID NO: 274688 - RNA, 14 nt, Homo sapiens
ggaagauggcauaa

SEQ ID NO: 274689 - RNA, 23 nt, Homo sapiens
ggaagcacaugccucucucaggc

SEQ ID NO: 274690 - RNA, 23 nt, Homo sapiens
ggaagcgagcuuugcugggagag

SEQ ID NO: 274691 - RNA, 16 nt, Homo sapiens
ggaagcugucccucac

SEQ ID NO: 274692 - RNA, 22 nt, Homo sapiens
ggaaggagaggagaggggcaca

SEQ ID NO: 274693 - RNA, 13 nt, Homo sapiens
ggaagggacacca

SEQ ID NO: 274694 - RNA, 11 nt, Homo sapiens
ggaagggucaa

SEQ ID NO: 274695 - RNA, 22 nt, Homo sapiens
ggaaucauuguuuggcauugaa

SEQ ID NO: 274696 - RNA, 16 nt, Homo sapiens
ggaauuauucccauga

SEQ ID NO: 274697 - RNA, 19 nt, Homo sapiens
ggaauuucuguucuuccau

SEQ ID NO: 274698 - RNA, 18 nt, Homo sapiens
ggaauuucuuaacuucuu

SEQ ID NO: 274699 - RNA, 14 nt, Homo sapiens
ggacaaagccuuug

SEQ ID NO: 274700 - RNA, 15 nt, Homo sapiens
ggacaacauccuuaa

SEQ ID NO: 274701 - RNA, 20 nt, Homo sapiens
ggacaaggaugaucuaggaa

SEQ ID NO: 274702 - RNA, 23 nt, Homo sapiens
ggacaaggaugaucuaggaagac

SEQ ID NO: 274703 - RNA, 19 nt, Homo sapiens
ggacaggcuucgucucaga

SEQ ID NO: 274704 - RNA, 15 nt, Homo sapiens
ggacagggaggugac

SEQ ID NO: 274705 - RNA, 17 nt, Homo sapiens
ggacaugaagauucuuu

SEQ ID NO: 274706 - RNA, 16 nt, Homo sapiens
ggaccagagcugccac

SEQ ID NO: 274707 - RNA, 20 nt, Homo sapiens
ggaccagccucuccacucau

SEQ ID NO: 274708 - RNA, 15 nt, Homo sapiens
ggaccaggucucaua

SEQ ID NO: 274709 - RNA, 12 nt, Homo sapiens
ggaccucaaagg

SEQ ID NO: 274710 - RNA, 13 nt, Homo sapiens
ggaccucgugcca

SEQ ID NO: 274711 - RNA, 15 nt, Homo sapiens
ggaccucgugccacc

SEQ ID NO: 274712 - RNA, 10 nt, Homo sapiens
ggacuauuau

SEQ ID NO: 274713 - RNA, 18 nt, Homo sapiens
ggacucaagcaagauuuc

SEQ ID NO: 274714 - RNA, 22 nt, Homo sapiens
ggacucaaugcacugacauugu

SEQ ID NO: 274715 - RNA, 20 nt, Homo sapiens
ggacucaguucuuggccugc

SEQ ID NO: 274716 - RNA, 18 nt, Homo sapiens
ggacuguggugacuuugg

SEQ ID NO: 274717 - RNA, 15 nt, Homo sapiens
ggacuuccauuugcu

SEQ ID NO: 274718 - RNA, 10 nt, Homo sapiens
ggacuuuguu

SEQ ID NO: 274719 - RNA, 14 nt, Homo sapiens
ggagaacuagagaa

SEQ ID NO: 274720 - RNA, 23 nt, Homo sapiens
ggagacacuauuuaucugugcaa

SEQ ID NO: 274721 - RNA, 12 nt, Homo sapiens
ggagacacugau

SEQ ID NO: 274722 - RNA, 16 nt, Homo sapiens
ggagagaaguugcccu

SEQ ID NO: 274723 - RNA, 14 nt, Homo sapiens
ggagagagacucca

SEQ ID NO: 274724 - RNA, 20 nt, Homo sapiens
ggagagcuggggaagcuucu

SEQ ID NO: 274725 - RNA, 18 nt, Homo sapiens
ggagauaaaauaaaaaga

SEQ ID NO: 274726 - RNA, 12 nt, Homo sapiens
ggagcacugggu

SEQ ID NO: 274727 - RNA, 16 nt, Homo sapiens
ggagcaugagugccgu

SEQ ID NO: 274728 - RNA, 18 nt, Homo sapiens
ggagccccugcucuggug

SEQ ID NO: 274729 - RNA, 19 nt, Homo sapiens
ggagcugccuguucagcuc

SEQ ID NO: 274730 - RNA, 21 nt, Homo sapiens
ggaggaguuuaaacugaauga

SEQ ID NO: 274731 - RNA, 14 nt, Homo sapiens
ggaggaugugggca

SEQ ID NO: 274732 - RNA, 12 nt, Homo sapiens
ggaggauguucu

SEQ ID NO: 274733 - RNA, 20 nt, Homo sapiens
ggaggcacccuuagccacuu

SEQ ID NO: 274734 - RNA, 21 nt, Homo sapiens
ggaggcuccagagggcacucu

SEQ ID NO: 274735 - RNA, 16 nt, Homo sapiens
ggagggagaagaaaga

SEQ ID NO: 274736 - RNA, 22 nt, Homo sapiens
ggagggcuccagacacaugucc

SEQ ID NO: 274737 - RNA, 17 nt, Homo sapiens
ggagguacgaaaagagg

SEQ ID NO: 274738 - RNA, 23 nt, Homo sapiens
ggagugaggaugucugggccacu

SEQ ID NO: 274739 - RNA, 11 nt, Homo sapiens
ggaguggcaug

SEQ ID NO: 274740 - RNA, 20 nt, Homo sapiens
ggaguggcugaccaggcccu

SEQ ID NO: 274741 - RNA, 22 nt, Homo sapiens
ggagugggcccaaugcacuuug

SEQ ID NO: 274742 - RNA, 21 nt, Homo sapiens
ggaguguucagggccagcccu

SEQ ID NO: 274743 - RNA, 11 nt, Homo sapiens
ggauagcacug

SEQ ID NO: 274744 - RNA, 19 nt, Homo sapiens
ggauaucacuuccaugaca

SEQ ID NO: 274745 - RNA, 17 nt, Homo sapiens
ggauauuuuuuacuuua

SEQ ID NO: 274746 - RNA, 24 nt, Homo sapiens
ggauccuccaggugcacaagcucc

SEQ ID NO: 274747 - RNA, 20 nt, Homo sapiens
ggaugaaaaaauaacacugu

SEQ ID NO: 274748 - RNA, 19 nt, Homo sapiens
ggaugcagccucacagucc

SEQ ID NO: 274749 - RNA, 14 nt, Homo sapiens
ggaugcagccuuug

SEQ ID NO: 274750 - RNA, 15 nt, Homo sapiens
ggaugcgacccaaga

SEQ ID NO: 274751 - RNA, 17 nt, Homo sapiens
ggauggaugcagaucca

SEQ ID NO: 274752 - RNA, 22 nt, Homo sapiens
ggaugggugcuuaguaaguacu

SEQ ID NO: 274753 - RNA, 17 nt, Homo sapiens
ggaugguggagggccac

SEQ ID NO: 274754 - RNA, 12 nt, Homo sapiens
ggaugucucuca

SEQ ID NO: 274755 - RNA, 15 nt, Homo sapiens
ggaugucucucauga

SEQ ID NO: 274756 - RNA, 13 nt, Homo sapiens
ggauguucuagca

SEQ ID NO: 274757 - RNA, 23 nt, Homo sapiens
ggauguucuagcauggcugccaa

SEQ ID NO: 274758 - RNA, 16 nt, Homo sapiens
ggauguucugggacac

SEQ ID NO: 274759 - RNA, 13 nt, Homo sapiens
ggauuacagggau

SEQ ID NO: 274760 - RNA, 19 nt, Homo sapiens
ggauucuuaaaguugaauu

SEQ ID NO: 274761 - RNA, 15 nt, Homo sapiens
ggauuuggguuggaa

SEQ ID NO: 274762 - RNA, 21 nt, Homo sapiens
ggcaaaagagucaacaguauc

SEQ ID NO: 274763 - RNA, 17 nt, Homo sapiens
ggcaaaagucauugcug

SEQ ID NO: 274764 - RNA, 15 nt, Homo sapiens
ggcaaagccuaguga

SEQ ID NO: 274765 - RNA, 22 nt, Homo sapiens
ggcaaccacaggcagcauuuag

SEQ ID NO: 274766 - RNA, 21 nt, Homo sapiens
ggcaauguucccccucuccuc

SEQ ID NO: 274767 - RNA, 17 nt, Homo sapiens
ggcacaguacccgguga

SEQ ID NO: 274768 - RNA, 18 nt, Homo sapiens
ggcacaucauuucaagaa

SEQ ID NO: 274769 - RNA, 15 nt, Homo sapiens
ggcacccuuagccac

SEQ ID NO: 274770 - RNA, 17 nt, Homo sapiens
ggcacccuuagccacuu

SEQ ID NO: 274771 - RNA, 14 nt, Homo sapiens
ggcacucagucucu

SEQ ID NO: 274772 - RNA, 22 nt, Homo sapiens
ggcacucugaggucucuguggc

SEQ ID NO: 274773 - RNA, 20 nt, Homo sapiens
ggcacuuagguccaaggucu

SEQ ID NO: 274774 - RNA, 13 nt, Homo sapiens
ggcagacuuucuu

SEQ ID NO: 274775 - RNA, 17 nt, Homo sapiens
ggcagagaggacuguug

SEQ ID NO: 274776 - RNA, 20 nt, Homo sapiens
ggcagagaggacuguugaca

SEQ ID NO: 274777 - RNA, 19 nt, Homo sapiens
ggcagaucccacuugcagc

SEQ ID NO: 274778 - RNA, 16 nt, Homo sapiens
ggcagcauuuagcaca

SEQ ID NO: 274779 - RNA, 13 nt, Homo sapiens
ggcaggacagcuc

SEQ ID NO: 274780 - RNA, 17 nt, Homo sapiens
ggcaggaccuguggcca

SEQ ID NO: 274781 - RNA, 14 nt, Homo sapiens
ggcaggagggcaug

SEQ ID NO: 274782 - RNA, 17 nt, Homo sapiens
ggcaggagggcaugugc

SEQ ID NO: 274783 - RNA, 19 nt, Homo sapiens
ggcaggagggcaugugcag

SEQ ID NO: 274784 - RNA, 21 nt, Homo sapiens
ggcagggcugaggccucucau

SEQ ID NO: 274785 - RNA, 23 nt, Homo sapiens
ggcagugacagaacuaagaugau

SEQ ID NO: 274786 - RNA, 17 nt, Homo sapiens
ggcaguggaugggugcu

SEQ ID NO: 274787 - RNA, 13 nt, Homo sapiens
ggcauccaguauc

SEQ ID NO: 274788 - RNA, 15 nt, Homo sapiens
ggcaucuccauuuca

SEQ ID NO: 274789 - RNA, 18 nt, Homo sapiens
ggcaugggaaugaauguc

SEQ ID NO: 274790 - RNA, 19 nt, Homo sapiens
ggcauuacaauugcaguuu

SEQ ID NO: 274791 - RNA, 20 nt, Homo sapiens
ggcauuugcaccuaccucac

SEQ ID NO: 274792 - RNA, 21 nt, Homo sapiens
ggccaaagagucuccaguuua

SEQ ID NO: 274793 - RNA, 20 nt, Homo sapiens
ggccagaagucaaggcuuag

SEQ ID NO: 274794 - RNA, 23 nt, Homo sapiens
guauguuugggagacugcugagu

SEQ ID NO: 274795 - RNA, 20 nt, Homo sapiens
guauuaaaaaaaacaaaaag

SEQ ID NO: 274796 - RNA, 12 nt, Homo sapiens
guauuagucaca

SEQ ID NO: 274797 - RNA, 15 nt, Homo sapiens
guauucuuauuuaau

SEQ ID NO: 274798 - RNA, 23 nt, Homo sapiens
guauucuucugacagagccauau

SEQ ID NO: 274799 - RNA, 19 nt, Homo sapiens
guauuuauuacaacucuau

SEQ ID NO: 274800 - RNA, 18 nt, Homo sapiens
guauuugaaacacugguu

SEQ ID NO: 274801 - RNA, 21 nt, Homo sapiens
guauuuggaaauaaagucaga

SEQ ID NO: 274802 - RNA, 20 nt, Homo sapiens
guauuuuguuuuugucuuaa

SEQ ID NO: 274803 - RNA, 18 nt, Homo sapiens
gucaaagaagucauucuu

SEQ ID NO: 274804 - RNA, 20 nt, Homo sapiens
gucaaagauacacaaucuga

SEQ ID NO: 274805 - RNA, 22 nt, Homo sapiens
gucaaaguaaaacuugcugccu

SEQ ID NO: 274806 - RNA, 20 nt, Homo sapiens
gucaacaaagucacccacuu

SEQ ID NO: 274807 - RNA, 22 nt, Homo sapiens
gucaacccaauaguuguugauu

SEQ ID NO: 274808 - RNA, 19 nt, Homo sapiens
gucaaccugccugacauuu

SEQ ID NO: 274809 - RNA, 18 nt, Homo sapiens
gucaagaaacagccagca

SEQ ID NO: 274810 - RNA, 22 nt, Homo sapiens
gucaaggauggaugcagaucca

SEQ ID NO: 274811 - RNA, 18 nt, Homo sapiens
gucaauaaacaacagcug

SEQ ID NO: 274812 - RNA, 17 nt, Homo sapiens
gucaauguccuacugag

SEQ ID NO: 274813 - RNA, 23 nt, Homo sapiens
gucaauguccuacugagacagca

SEQ ID NO: 274814 - RNA, 15 nt, Homo sapiens
ggccugcacuggugu

SEQ ID NO: 274815 - RNA, 18 nt, Homo sapiens
ggccuucaguuuccaucc

SEQ ID NO: 274816 - RNA, 18 nt, Homo sapiens
ggccuucggccuccaucc

SEQ ID NO: 274817 - RNA, 18 nt, Homo sapiens
ggcgacggcuuccaucug

SEQ ID NO: 274818 - RNA, 13 nt, Homo sapiens
ggcggugagcaau

SEQ ID NO: 274819 - RNA, 15 nt, Homo sapiens
ggcuaaaaccaucau

SEQ ID NO: 274820 - RNA, 12 nt, Homo sapiens
ggcuaagugauc

SEQ ID NO: 274821 - RNA, 13 nt, Homo sapiens
ggcuacauauaca

SEQ ID NO: 274822 - RNA, 13 nt, Homo sapiens
ggcuaccuacaua

SEQ ID NO: 274823 - RNA, 14 nt, Homo sapiens
ggcuaguugggaug

SEQ ID NO: 274824 - RNA, 15 nt, Homo sapiens
ggcuaugugagcaca

SEQ ID NO: 274825 - RNA, 19 nt, Homo sapiens
ggcucagcggggacagcuc

SEQ ID NO: 274826 - RNA, 17 nt, Homo sapiens
ggcucauauuucuuuuc

SEQ ID NO: 274827 - RNA, 23 nt, Homo sapiens
ggcucauauuucuuuucuuucuc

SEQ ID NO: 274828 - RNA, 11 nt, Homo sapiens
ggcucaucucu

SEQ ID NO: 274829 - RNA, 17 nt, Homo sapiens
ggcucccaugucaagag

SEQ ID NO: 274830 - RNA, 24 nt, Homo sapiens
ggcucccaugucaagagucgcugu

SEQ ID NO: 274831 - RNA, 21 nt, Homo sapiens
ggcucuaauucacagugcucu

SEQ ID NO: 274832 - RNA, 19 nt, Homo sapiens
ggcucuucuaaucagagcg

SEQ ID NO: 274833 - RNA, 13 nt, Homo sapiens
ggcugaacaggcc

SEQ ID NO: 274834 - RNA, 15 nt, Homo sapiens
ggcugaccaggcccu

SEQ ID NO: 274835 - RNA, 20 nt, Homo sapiens
ggcugagccgaucuggucuc

SEQ ID NO: 274836 - RNA, 19 nt, Homo sapiens
ggcugcccacacaccccaa

SEQ ID NO: 274837 - RNA, 11 nt, Homo sapiens
ggcugccuugu

SEQ ID NO: 274838 - RNA, 15 nt, Homo sapiens
ggcuggagugcaaug

SEQ ID NO: 274839 - RNA, 20 nt, Homo sapiens
ggcuggagugcaaugacaca

SEQ ID NO: 274840 - RNA, 19 nt, Homo sapiens
ggcuggaguggaguggcgu

SEQ ID NO: 274841 - RNA, 14 nt, Homo sapiens
ggcuggguggcacc

SEQ ID NO: 274842 - RNA, 22 nt, Homo sapiens
ggcugguuagagguucccuuug

SEQ ID NO: 274843 - RNA, 15 nt, Homo sapiens
ggcuguaucccauga

SEQ ID NO: 274844 - RNA, 18 nt, Homo sapiens
ggcuguggccuaaccugc

SEQ ID NO: 274845 - RNA, 16 nt, Homo sapiens
ggcuucaguggcagcu

SEQ ID NO: 274846 - RNA, 16 nt, Homo sapiens
ggcuucauccuccuca

SEQ ID NO: 274847 - RNA, 13 nt, Homo sapiens
ggcuucugaugau

SEQ ID NO: 274848 - RNA, 13 nt, Homo sapiens
ggcuuggggacca

SEQ ID NO: 274849 - RNA, 19 nt, Homo sapiens
ggcuuuaaaacuuauccuc

SEQ ID NO: 274850 - RNA, 14 nt, Homo sapiens
ggcuuuguggcacu

SEQ ID NO: 274851 - RNA, 13 nt, Homo sapiens
ggcuuuugugcau

SEQ ID NO: 274852 - RNA, 22 nt, Homo sapiens
gggaaagggauuuucagcccuc

SEQ ID NO: 274853 - RNA, 22 nt, Homo sapiens
gggaaggaggccguccaucccg

SEQ ID NO: 274854 - RNA, 21 nt, Homo sapiens
gggaaggguccaucucagaga

SEQ ID NO: 274855 - RNA, 22 nt, Homo sapiens
gggaaugaaugucagugugacu

SEQ ID NO: 274856 - RNA, 20 nt, Homo sapiens
gggacagagcagaacuuuca

SEQ ID NO: 274857 - RNA, 16 nt, Homo sapiens
gggaccacagacucac

SEQ ID NO: 274858 - RNA, 21 nt, Homo sapiens
gggaccacagacucacauccu

SEQ ID NO: 274859 - RNA, 17 nt, Homo sapiens
gggaccagagcugccac

SEQ ID NO: 274860 - RNA, 13 nt, Homo sapiens
gggaccucaggcc

SEQ ID NO: 274861 - RNA, 16 nt, Homo sapiens
gggacucaaugcacug

SEQ ID NO: 274862 - RNA, 18 nt, Homo sapiens
gggacucaguucuuggcc

SEQ ID NO: 274863 - RNA, 13 nt, Homo sapiens
gggagacacugau

SEQ ID NO: 274864 - RNA, 16 nt, Homo sapiens
gggagagagugcuauu

SEQ ID NO: 274865 - RNA, 15 nt, Homo sapiens
gggagagccuuccag

SEQ ID NO: 274866 - RNA, 18 nt, Homo sapiens
gggagccugacccucauc

SEQ ID NO: 274867 - RNA, 15 nt, Homo sapiens
gggaggggaagaaaa

SEQ ID NO: 274868 - RNA, 18 nt, Homo sapiens
gggagguauucgugcagc

SEQ ID NO: 274869 - RNA, 20 nt, Homo sapiens
gggaggucaaggcugcagug

SEQ ID NO: 274870 - RNA, 14 nt, Homo sapiens
gggaguguguaauu

SEQ ID NO: 274871 - RNA, 20 nt, Homo sapiens
gggaugcagggggaggcagc

SEQ ID NO: 274872 - RNA, 19 nt, Homo sapiens
gggauggcuaaaaccauca

SEQ ID NO: 274873 - RNA, 17 nt, Homo sapiens
gggauuggggaagacug

SEQ ID NO: 274874 - RNA, 20 nt, Homo sapiens
gggauuuucagcccucagaa

SEQ ID NO: 274875 - RNA, 18 nt, Homo sapiens
gggccaggugcacagacg

SEQ ID NO: 274876 - RNA, 13 nt, Homo sapiens
gggccagugcagu

SEQ ID NO: 274877 - RNA, 22 nt, Homo sapiens
gggccaguuggucccccuucca

SEQ ID NO: 274878 - RNA, 16 nt, Homo sapiens
gggcccgcaccgacca

SEQ ID NO: 274879 - RNA, 11 nt, Homo sapiens
gggcccugacu

SEQ ID NO: 274880 - RNA, 14 nt, Homo sapiens
gggccggccagugg

SEQ ID NO: 274881 - RNA, 23 nt, Homo sapiens
gggccugauuuaucuagcugucc

SEQ ID NO: 274882 - RNA, 22 nt, Homo sapiens
gggccuggccugagcugggaug

SEQ ID NO: 274883 - RNA, 22 nt, Homo sapiens
gggcuacgguuccauguucacc

SEQ ID NO: 274884 - RNA, 14 nt, Homo sapiens
gggcucagccuggu

SEQ ID NO: 274885 - RNA, 19 nt, Homo sapiens
gggcucucucaugauagaa

SEQ ID NO: 274886 - RNA, 17 nt, Homo sapiens
gggcugaggccucucau

SEQ ID NO: 274887 - RNA, 19 nt, Homo sapiens
gggcugauuguauuuaccu

SEQ ID NO: 274888 - RNA, 15 nt, Homo sapiens
gggcuggaagcagaa

SEQ ID NO: 274889 - RNA, 18 nt, Homo sapiens
gggcuguccacuagacca

SEQ ID NO: 274890 - RNA, 21 nt, Homo sapiens
ggggacacagcaucagcucaa

SEQ ID NO: 274891 - RNA, 15 nt, Homo sapiens
ggggaugucucucau

SEQ ID NO: 274892 - RNA, 22 nt, Homo sapiens
ggggcccaaauucuuucagugg

SEQ ID NO: 274893 - RNA, 13 nt, Homo sapiens
gggguaugggaga

SEQ ID NO: 274894 - RNA, 11 nt, Homo sapiens
ggggugcccuc

SEQ ID NO: 274895 - RNA, 14 nt, Homo sapiens
ggguaucuggugac

SEQ ID NO: 274896 - RNA, 19 nt, Homo sapiens
gggucagagaggagucaga

SEQ ID NO: 274897 - RNA, 20 nt, Homo sapiens
ggguccacacggucuucaca

SEQ ID NO: 274898 - RNA, 17 nt, Homo sapiens
ggguccaucucagagaa

SEQ ID NO: 274899 - RNA, 19 nt, Homo sapiens
gggucucacaguguugccc

SEQ ID NO: 274900 - RNA, 20 nt, Homo sapiens
gggucucacaguguugccca

SEQ ID NO: 274901 - RNA, 20 nt, Homo sapiens
gggucucacuguguugccca

SEQ ID NO: 274902 - RNA, 18 nt, Homo sapiens
ggguggcacucagucucu

SEQ ID NO: 274903 - RNA, 14 nt, Homo sapiens
gggugggcacagua

SEQ ID NO: 274904 - RNA, 21 nt, Homo sapiens
ggguguggcgcagcauauuca

SEQ ID NO: 274905 - RNA, 20 nt, Homo sapiens
gggugugggccaccagagaa

SEQ ID NO: 274906 - RNA, 15 nt, Homo sapiens
ggguuaggaagaaaa

SEQ ID NO: 274907 - RNA, 14 nt, Homo sapiens
ggguucaagugauu

SEQ ID NO: 274908 - RNA, 20 nt, Homo sapiens
ggguucaccaggucagggag

SEQ ID NO: 274909 - RNA, 18 nt, Homo sapiens
ggguuucaccauguuggc

SEQ ID NO: 274910 - RNA, 21 nt, Homo sapiens
gguaaaauaaucaguguuucc

SEQ ID NO: 274911 - RNA, 19 nt, Homo sapiens
gguaauaaguacuguguac

SEQ ID NO: 274912 - RNA, 20 nt, Homo sapiens
gguacacguaaaucuguuca

SEQ ID NO: 274913 - RNA, 21 nt, Homo sapiens
gguacagacacucccacuugg

SEQ ID NO: 274914 - RNA, 17 nt, Homo sapiens
gguagaaagauggggca

SEQ ID NO: 274915 - RNA, 13 nt, Homo sapiens
gguagaagcccuu

SEQ ID NO: 274916 - RNA, 19 nt, Homo sapiens
gguagagacuuugacucuc

SEQ ID NO: 274917 - RNA, 11 nt, Homo sapiens
gguagccacug

SEQ ID NO: 274918 - RNA, 15 nt, Homo sapiens
gguagguugggacac

SEQ ID NO: 274919 - RNA, 14 nt, Homo sapiens
gguagguugggaga

SEQ ID NO: 274920 - RNA, 21 nt, Homo sapiens
gguauaaugguugacuggguu

SEQ ID NO: 274921 - RNA, 13 nt, Homo sapiens
gguauagaaaugc

SEQ ID NO: 274922 - RNA, 21 nt, Homo sapiens
gguauauucauuucaaaggga

SEQ ID NO: 274923 - RNA, 13 nt, Homo sapiens
gguaucaggugcu

SEQ ID NO: 274924 - RNA, 14 nt, Homo sapiens
gguaucccaaaaau

SEQ ID NO: 274925 - RNA, 14 nt, Homo sapiens
gguaugauauugca

SEQ ID NO: 274926 - RNA, 23 nt, Homo sapiens
ggucaggaaggaugagcauuuag

SEQ ID NO: 274927 - RNA, 16 nt, Homo sapiens
ggucaguuuucacaga

SEQ ID NO: 274928 - RNA, 15 nt, Homo sapiens
gguccaucucagaga

SEQ ID NO: 274929 - RNA, 16 nt, Homo sapiens
ggucccacgagggugc

SEQ ID NO: 274930 - RNA, 13 nt, Homo sapiens
gguccuggugccc

SEQ ID NO: 274931 - RNA, 20 nt, Homo sapiens
ggucucacaguguugcccag

SEQ ID NO: 274932 - RNA, 23 nt, Homo sapiens
ggucucacucuguugaccaggcu

SEQ ID NO: 274933 - RNA, 21 nt, Homo sapiens
ggucucccaacaagugcucuu

SEQ ID NO: 274934 - RNA, 20 nt, Homo sapiens
ggucucgcuuuguugcccag

SEQ ID NO: 274935 - RNA, 22 nt, Homo sapiens
ggucuuaggaugugucuugggg

SEQ ID NO: 274936 - RNA, 20 nt, Homo sapiens
ggugaaccuuaguaccuaaa

SEQ ID NO: 274937 - RNA, 24 nt, Homo sapiens
ggugaucucauuuaauccucucaa

SEQ ID NO: 274938 - RNA, 14 nt, Homo sapiens
gugcagacacucaa

SEQ ID NO: 274939 - RNA, 20 nt, Homo sapiens
gugcagugagccgagaucac

SEQ ID NO: 274940 - RNA, 16 nt, Homo sapiens
gugcaguuuggugugu

SEQ ID NO: 274941 - RNA, 21 nt, Homo sapiens
gugcauauuaauucaugcaaa

SEQ ID NO: 274942 - RNA, 17 nt, Homo sapiens
gugcaugcagcaucuaa

SEQ ID NO: 274943 - RNA, 20 nt, Homo sapiens
gugcaugcagcaucuaagua

SEQ ID NO: 274944 - RNA, 23 nt, Homo sapiens
gugccaagcagagguugggaggc

SEQ ID NO: 274945 - RNA, 13 nt, Homo sapiens
gugccagaccuca

SEQ ID NO: 274946 - RNA, 16 nt, Homo sapiens
gugccaggauggaaug

SEQ ID NO: 274947 - RNA, 13 nt, Homo sapiens
gugccaucagcuc

SEQ ID NO: 274948 - RNA, 20 nt, Homo sapiens
gugcccccacccccacccuc

SEQ ID NO: 274949 - RNA, 22 nt, Homo sapiens
gugccucugggacuggacaauu

SEQ ID NO: 274950 - RNA, 20 nt, Homo sapiens
gugccuuauggaacacucug

SEQ ID NO: 274951 - RNA, 18 nt, Homo sapiens
gugccuuggugugcugua

SEQ ID NO: 274952 - RNA, 21 nt, Homo sapiens
gugcuaauuuguuuuggauau

SEQ ID NO: 274953 - RNA, 17 nt, Homo sapiens
gugcucugaucauccac

SEQ ID NO: 274954 - RNA, 15 nt, Homo sapiens
gugcugggauuacag

SEQ ID NO: 274955 - RNA, 19 nt, Homo sapiens
gugcugggauuacagggau

SEQ ID NO: 274956 - RNA, 19 nt, Homo sapiens
gugcugggauuacaggugu

SEQ ID NO: 274957 - RNA, 21 nt, Homo sapiens
gugcugggauuacagguguga

SEQ ID NO: 274958 - RNA, 23 nt, Homo sapiens
gugcuuuaccaauugaaguaaaa

SEQ ID NO: 274959 - RNA, 18 nt, Homo sapiens
guggaaccaacacuaaca

SEQ ID NO: 274960 - RNA, 23 nt, Homo sapiens
guggacucuaacaguaguugcaa

SEQ ID NO: 274961 - RNA, 16 nt, Homo sapiens
guggauuggauuuguc

SEQ ID NO: 274962 - RNA, 14 nt, Homo sapiens
guggcaacugcuga

SEQ ID NO: 274963 - RNA, 16 nt, Homo sapiens
guggcacucagucucu

SEQ ID NO: 274964 - RNA, 13 nt, Homo sapiens
guggcauccagag

SEQ ID NO: 274965 - RNA, 13 nt, Homo sapiens
guggcccaagacu

SEQ ID NO: 274966 - RNA, 17 nt, Homo sapiens
gugggaccacagacuca

SEQ ID NO: 274967 - RNA, 17 nt, Homo sapiens
gugggauaucacuucca

SEQ ID NO: 274968 - RNA, 21 nt, Homo sapiens
guaaaacugaacuucagagca

SEQ ID NO: 274969 - RNA, 12 nt, Homo sapiens
guaaaagccauc

SEQ ID NO: 274970 - RNA, 20 nt, Homo sapiens
guaaaauauagcuguacaaa

SEQ ID NO: 274971 - RNA, 14 nt, Homo sapiens
guaaaauuauuuca

SEQ ID NO: 274972 - RNA, 23 nt, Homo sapiens
guaaaauuucccauuaaagaagu

SEQ ID NO: 274973 - RNA, 20 nt, Homo sapiens
guaaacuuaacuguucuuug

SEQ ID NO: 274974 - RNA, 22 nt, Homo sapiens
guaaacuuaacuguucuuugcc

SEQ ID NO: 274975 - RNA, 21 nt, Homo sapiens
guaaagaaauauauaugauau

SEQ ID NO: 274976 - RNA, 17 nt, Homo sapiens
guaaagcuuugugcaga

SEQ ID NO: 274977 - RNA, 19 nt, Homo sapiens
guaaauauagcucagguag

SEQ ID NO: 274978 - RNA, 21 nt, Homo sapiens
guaaaugggggugcauuugag

SEQ ID NO: 274979 - RNA, 13 nt, Homo sapiens
guaaaugugcauu

SEQ ID NO: 274980 - RNA, 18 nt, Homo sapiens
guaacaauuauguuuuca

SEQ ID NO: 274981 - RNA, 22 nt, Homo sapiens
guaacagauuuuguuggcauag

SEQ ID NO: 274982 - RNA, 20 nt, Homo sapiens
guaaccucuacuaugaagug

SEQ ID NO: 274983 - RNA, 20 nt, Homo sapiens
guaacucuguaauuccuaac

SEQ ID NO: 274984 - RNA, 13 nt, Homo sapiens
guaacuuacuuag

SEQ ID NO: 274985 - RNA, 15 nt, Homo sapiens
guaacuuucugcuga

SEQ ID NO: 274986 - RNA, 16 nt, Homo sapiens
guaacuuucugcugau

SEQ ID NO: 274987 - RNA, 23 nt, Homo sapiens
guaacuuucugcugaugaacaaa

SEQ ID NO: 274988 - RNA, 13 nt, Homo sapiens
guaagacugugua

SEQ ID NO: 274989 - RNA, 22 nt, Homo sapiens
guaagaucguucucugccucac

SEQ ID NO: 274990 - RNA, 14 nt, Homo sapiens
guaagcucuacuga

SEQ ID NO: 274991 - RNA, 22 nt, Homo sapiens
guaagcucuacugaggugcuau

SEQ ID NO: 274992 - RNA, 15 nt, Homo sapiens
guaaggaauaccugu

SEQ ID NO: 274993 - RNA, 15 nt, Homo sapiens
guaaggugagggaau

SEQ ID NO: 274994 - RNA, 17 nt, Homo sapiens
guaaggugcaucuguuu

SEQ ID NO: 274995 - RNA, 16 nt, Homo sapiens
guaaucccagcacuuu

SEQ ID NO: 274996 - RNA, 20 nt, Homo sapiens
guaauuaaguacuauguauc

SEQ ID NO: 274997 - RNA, 22 nt, Homo sapiens
guaauuccuaacuaucacuggu

SEQ ID NO: 274998 - RNA, 23 nt, Homo sapiens
guaauuccuaacuaucacugguu

SEQ ID NO: 274999 - RNA, 22 nt, Homo sapiens
guaauuuuguucuaguuuucag

SEQ ID NO: 275000 - RNA, 17 nt, Homo sapiens
guacaaaguaagccaug

SEQ ID NO: 275001 - RNA, 21 nt, Homo sapiens
guacaaccugugaucaagcaa

SEQ ID NO: 275002 - RNA, 16 nt, Homo sapiens
guacaacguguccuca

SEQ ID NO: 275003 - RNA, 18 nt, Homo sapiens
guacaaggcaacauauag

SEQ ID NO: 275004 - RNA, 12 nt, Homo sapiens
guacacuguguu

SEQ ID NO: 275005 - RNA, 21 nt, Homo sapiens
guacacuguuucaaacuuuac

SEQ ID NO: 275006 - RNA, 17 nt, Homo sapiens
guacagguaaggugagg

SEQ ID NO: 275007 - RNA, 18 nt, Homo sapiens
guacaguagauuuuccaa

SEQ ID NO: 275008 - RNA, 21 nt, Homo sapiens
guacauggaauaacauguaau

SEQ ID NO: 275009 - RNA, 22 nt, Homo sapiens
guacauggaauaacauguaauu

SEQ ID NO: 275010 - RNA, 11 nt, Homo sapiens
guaccaguuaa

SEQ ID NO: 275011 - RNA, 21 nt, Homo sapiens
guacccuccauguaccuugug

SEQ ID NO: 275012 - RNA, 21 nt, Homo sapiens
guaccuucaaacuagggccaa

SEQ ID NO: 275013 - RNA, 14 nt, Homo sapiens
guaccuuguguacu

SEQ ID NO: 275014 - RNA, 15 nt, Homo sapiens
guacgaugacagugu

SEQ ID NO: 275015 - RNA, 14 nt, Homo sapiens
guacgggaggguaa

SEQ ID NO: 275016 - RNA, 17 nt, Homo sapiens
guacguugugcauuugg

SEQ ID NO: 275017 - RNA, 21 nt, Homo sapiens
guacuaauacagacuauguca

SEQ ID NO: 275018 - RNA, 23 nt, Homo sapiens
guacuauccaaucugugaugaca

SEQ ID NO: 275019 - RNA, 21 nt, Homo sapiens
guacuauucaaucuuuacaca

SEQ ID NO: 275020 - RNA, 13 nt, Homo sapiens
guacucuccugga

SEQ ID NO: 275021 - RNA, 21 nt, Homo sapiens
guacugcaagaaggagcucag

SEQ ID NO: 275022 - RNA, 20 nt, Homo sapiens
guacugccaauacugccaac

SEQ ID NO: 275023 - RNA, 19 nt, Homo sapiens
guacuggagaaaauggacg

SEQ ID NO: 275024 - RNA, 20 nt, Homo sapiens
guacuggagaaaauggacgu

SEQ ID NO: 275025 - RNA, 16 nt, Homo sapiens
guacuuucacaucucu

SEQ ID NO: 275026 - RNA, 19 nt, Homo sapiens
guagaaaagggaacugaac

SEQ ID NO: 275027 - RNA, 12 nt, Homo sapiens
guagaaagugau

SEQ ID NO: 275028 - RNA, 20 nt, Homo sapiens
guagaaagugauccauacuu

SEQ ID NO: 275029 - RNA, 17 nt, Homo sapiens
guagaagccacuauuac

SEQ ID NO: 275030 - RNA, 22 nt, Homo sapiens
guagauacaggggcaaaaguca

SEQ ID NO: 275031 - RNA, 12 nt, Homo sapiens
guagcuagccug

SEQ ID NO: 275032 - RNA, 11 nt, Homo sapiens
guagcucuuug

SEQ ID NO: 275033 - RNA, 13 nt, Homo sapiens
guagcucuuugcc

SEQ ID NO: 275034 - RNA, 19 nt, Homo sapiens
guagcugggacuacaggca

SEQ ID NO: 275035 - RNA, 21 nt, Homo sapiens
guagcuuuucccaaacugauc

SEQ ID NO: 275036 - RNA, 18 nt, Homo sapiens
guaggaaaaugaagaaga

SEQ ID NO: 275037 - RNA, 21 nt, Homo sapiens
guaggaccaagcaucuugggg

SEQ ID NO: 275038 - RNA, 13 nt, Homo sapiens
guaggaguggcug

SEQ ID NO: 275039 - RNA, 15 nt, Homo sapiens
guaggugguuuugaa

SEQ ID NO: 275040 - RNA, 15 nt, Homo sapiens
guagucagacuggau

SEQ ID NO: 275041 - RNA, 13 nt, Homo sapiens
guagucauuucau

SEQ ID NO: 275042 - RNA, 23 nt, Homo sapiens
guaguugcuuugcggcaucucca

SEQ ID NO: 275043 - RNA, 14 nt, Homo sapiens
guauagauguugcu

SEQ ID NO: 275044 - RNA, 17 nt, Homo sapiens
guauagauguugcuaac

SEQ ID NO: 275045 - RNA, 15 nt, Homo sapiens
guauauacaauaaca

SEQ ID NO: 275046 - RNA, 15 nt, Homo sapiens
guauauucauuucaa

SEQ ID NO: 275047 - RNA, 15 nt, Homo sapiens
guaucaaaugugaca

SEQ ID NO: 275048 - RNA, 19 nt, Homo sapiens
guauccccccaucuugcuu

SEQ ID NO: 275049 - RNA, 17 nt, Homo sapiens
guaucucaguaccccau

SEQ ID NO: 275050 - RNA, 15 nt, Homo sapiens
guaugacugcacaug

SEQ ID NO: 275051 - RNA, 17 nt, Homo sapiens
guaugaucacggcucac

SEQ ID NO: 275052 - RNA, 19 nt, Homo sapiens
guaugauccuaaugaaugc

SEQ ID NO: 275053 - RNA, 23 nt, Homo sapiens
guaugauccuaaugaaugcauaa

SEQ ID NO: 275054 - RNA, 20 nt, Homo sapiens
guaugcagaaggcuacauau

SEQ ID NO: 275055 - RNA, 21 nt, Homo sapiens
guaugcucaauuauuuugcau

SEQ ID NO: 275056 - RNA, 14 nt, Homo sapiens
guaugguaggguaa

SEQ ID NO: 275057 - RNA, 22 nt, Homo sapiens
guaugugugaagugagugaguu

SEQ ID NO: 275058 - RNA, 17 nt, Homo sapiens
guauguguucuauucag

SEQ ID NO: 275059 - RNA, 15 nt, Homo sapiens
guauguuugggagac

SEQ ID NO: 275060 - RNA, 21 nt, Homo sapiens
guauguuugggagacugcuga

SEQ ID NO: 275061 - RNA, 15 nt, Homo sapiens
guauuaaguuguuaa

SEQ ID NO: 275062 - RNA, 14 nt, Homo sapiens
guauuauaccuuuu

SEQ ID NO: 275063 - RNA, 22 nt, Homo sapiens
guauucccaaaaauuacuuugg

SEQ ID NO: 275064 - RNA, 23 nt, Homo sapiens
guauuccuagaaacugacacaug

SEQ ID NO: 275065 - RNA, 14 nt, Homo sapiens
guauuggcaaagau

SEQ ID NO: 275066 - RNA, 21 nt, Homo sapiens
guauuucaacugaaguucuau

SEQ ID NO: 275067 - RNA, 18 nt, Homo sapiens
guauuuuuucacuuguac

SEQ ID NO: 275068 - RNA, 17 nt, Homo sapiens
gucaaagccuugguaaa

SEQ ID NO: 275069 - RNA, 21 nt, Homo sapiens
gucaacaucuuuuacauucug

SEQ ID NO: 275070 - RNA, 12 nt, Homo sapiens
gucaacauuucu

SEQ ID NO: 275071 - RNA, 22 nt, Homo sapiens
gucaaccccaaguuaguucaau

SEQ ID NO: 275072 - RNA, 18 nt, Homo sapiens
gucaauaaauuugcaaau

SEQ ID NO: 275073 - RNA, 17 nt, Homo sapiens
gucaauaggcaaagggg

SEQ ID NO: 275074 - RNA, 18 nt, Homo sapiens
gucacacacuuuggcuau

SEQ ID NO: 275075 - RNA, 17 nt, Homo sapiens
gucacacagagugccug

SEQ ID NO: 275076 - RNA, 16 nt, Homo sapiens
gucacagaaucuccau

SEQ ID NO: 275077 - RNA, 17 nt, Homo sapiens
gucacagaaucuccauu

SEQ ID NO: 275078 - RNA, 13 nt, Homo sapiens
gucacagccacuu

SEQ ID NO: 275079 - RNA, 15 nt, Homo sapiens
gucacaugugcucuc

SEQ ID NO: 275080 - RNA, 11 nt, Homo sapiens
gucaccagagg

SEQ ID NO: 275081 - RNA, 16 nt, Homo sapiens
gucacgcaagcuaguu

SEQ ID NO: 275082 - RNA, 17 nt, Homo sapiens
guuugaaucacaguaua

SEQ ID NO: 275083 - RNA, 14 nt, Homo sapiens
guuugaguuacuau

SEQ ID NO: 275084 - RNA, 13 nt, Homo sapiens
guuugcauuccag

SEQ ID NO: 275085 - RNA, 14 nt, Homo sapiens
guuugcuagcagaa

SEQ ID NO: 275086 - RNA, 16 nt, Homo sapiens
guuugguucaugguga

SEQ ID NO: 275087 - RNA, 15 nt, Homo sapiens
guuugguuucuagca

SEQ ID NO: 275088 - RNA, 23 nt, Homo sapiens
guuuguucccugugucauuucaa

SEQ ID NO: 275089 - RNA, 22 nt, Homo sapiens
guuuuaagaggcagggucucac

SEQ ID NO: 275090 - RNA, 14 nt, Homo sapiens
guuuuacugcagcu

SEQ ID NO: 275091 - RNA, 18 nt, Homo sapiens
guuuuacuguccaaagac

SEQ ID NO: 275092 - RNA, 17 nt, Homo sapiens
guuuuauuuuaucacuu

SEQ ID NO: 275093 - RNA, 22 nt, Homo sapiens
guuuucagugcugugucauucc

SEQ ID NO: 275094 - RNA, 14 nt, Homo sapiens
guuuucaguguaca

SEQ ID NO: 275095 - RNA, 16 nt, Homo sapiens
guuuugguugcuuuaa

SEQ ID NO: 275096 - RNA, 15 nt, Homo sapiens
guuuuuaagccuuaa

SEQ ID NO: 275097 - RNA, 22 nt, Homo sapiens
guuuuuauggcuuuugugcauu

SEQ ID NO: 275098 - RNA, 23 nt, Homo sapiens
guuuuuuuuuuccacuuagaaau

SEQ ID NO: 275099 - RNA, 23 nt, Homo sapiens
uaaaaaaaaaaaaaaaagugaug

SEQ ID NO: 275100 - RNA, 22 nt, Homo sapiens
uaaaaacaaaaaaacacaaaaa

SEQ ID NO: 275101 - RNA, 15 nt, Homo sapiens
uaaaaauccccaaaa

SEQ ID NO: 275102 - RNA, 23 nt, Homo sapiens
uaaaaauggcaggggguggaauu

SEQ ID NO: 275103 - RNA, 16 nt, Homo sapiens
uaaaaaugucaucuca

SEQ ID NO: 275104 - RNA, 23 nt, Homo sapiens
uaaaaauugugaucagaccauaa

SEQ ID NO: 275105 - RNA, 22 nt, Homo sapiens
uaaaacaaauaaauuagucucu

SEQ ID NO: 275106 - RNA, 20 nt, Homo sapiens
uaaaacaacacucacauuua

SEQ ID NO: 275107 - RNA, 14 nt, Homo sapiens
uaaaacacaucauc

SEQ ID NO: 275108 - RNA, 21 nt, Homo sapiens
uaaaacagguuauaacagugu

SEQ ID NO: 275109 - RNA, 18 nt, Homo sapiens
uaaaaccaucauaguaca

SEQ ID NO: 275110 - RNA, 16 nt, Homo sapiens
uaaaacccaagugccu

SEQ ID NO: 275111 - RNA, 23 nt, Homo sapiens
uaaaacugaacuucagagcauga

SEQ ID NO: 275112 - RNA, 21 nt, Homo sapiens
uaaaagaugcauuaucuauga

SEQ ID NO: 275113 - RNA, 23 nt, Homo sapiens
uaaaagaugcauuaucuaugaua

SEQ ID NO: 275114 - RNA, 12 nt, Homo sapiens
uaaaaguuggcu

SEQ ID NO: 275115 - RNA, 22 nt, Homo sapiens
uaaaauaaauuuguaugcucaa

SEQ ID NO: 275116 - RNA, 20 nt, Homo sapiens
uaaaauagcaugccuuucuc

SEQ ID NO: 275117 - RNA, 14 nt, Homo sapiens
uaaaauagccauaa

SEQ ID NO: 275118 - RNA, 19 nt, Homo sapiens
uaaaauauagcuguacaaa

SEQ ID NO: 275119 - RNA, 18 nt, Homo sapiens
uaaaauuaacaugugcca

SEQ ID NO: 275120 - RNA, 18 nt, Homo sapiens
uaaaauuagaugaacuca

SEQ ID NO: 275121 - RNA, 15 nt, Homo sapiens
uaaaauuaugccaua

SEQ ID NO: 275122 - RNA, 21 nt, Homo sapiens
guccuuuugacacugcucuaa

SEQ ID NO: 275123 - RNA, 16 nt, Homo sapiens
gucgaacaauucauau

SEQ ID NO: 275124 - RNA, 15 nt, Homo sapiens
gucggaaaacaugcu

SEQ ID NO: 275125 - RNA, 16 nt, Homo sapiens
gucuaaaaacauuugu

SEQ ID NO: 275126 - RNA, 13 nt, Homo sapiens
gucuaagucauga

SEQ ID NO: 275127 - RNA, 12 nt, Homo sapiens
gucuacacugug

SEQ ID NO: 275128 - RNA, 18 nt, Homo sapiens
gucuaggaacauacuuca

SEQ ID NO: 275129 - RNA, 17 nt, Homo sapiens
gucuaggaaucaugugc

SEQ ID NO: 275130 - RNA, 19 nt, Homo sapiens
gucuauuugagacuuagaa

SEQ ID NO: 275131 - RNA, 19 nt, Homo sapiens
gucucaagagggcacuggu

SEQ ID NO: 275132 - RNA, 17 nt, Homo sapiens
gucucacaguguugccc

SEQ ID NO: 275133 - RNA, 14 nt, Homo sapiens
gucucauacucacc

SEQ ID NO: 275134 - RNA, 17 nt, Homo sapiens
gucucauacucaccuca

SEQ ID NO: 275135 - RNA, 21 nt, Homo sapiens
gucucauaugauugugcacau

SEQ ID NO: 275136 - RNA, 18 nt, Homo sapiens
gucuccaagaccacccuc

SEQ ID NO: 275137 - RNA, 20 nt, Homo sapiens
gucucccaacaagugcucuu

SEQ ID NO: 275138 - RNA, 23 nt, Homo sapiens
gucucccuuccuaugcuguucac

SEQ ID NO: 275139 - RNA, 13 nt, Homo sapiens
gucucgcuuuguu

SEQ ID NO: 275140 - RNA, 17 nt, Homo sapiens
gucucgcuuuguugccc

SEQ ID NO: 275141 - RNA, 22 nt, Homo sapiens
gucucuguggcaggccugguca

SEQ ID NO: 275142 - RNA, 22 nt, Homo sapiens
gucucuuguaauccgaaucucu

SEQ ID NO: 275143 - RNA, 21 nt, Homo sapiens
gucucuuuaaugucacaggca

SEQ ID NO: 275144 - RNA, 19 nt, Homo sapiens
gucugaacaauauauacuu

SEQ ID NO: 275145 - RNA, 12 nt, Homo sapiens
gucugacaggca

SEQ ID NO: 275146 - RNA, 16 nt, Homo sapiens
gucuggaaugcagugg

SEQ ID NO: 275147 - RNA, 16 nt, Homo sapiens
gucugggccacucagg

SEQ ID NO: 275148 - RNA, 17 nt, Homo sapiens
gucugucacuccauuua

SEQ ID NO: 275149 - RNA, 18 nt, Homo sapiens
gucugugagaugcuagaa

SEQ ID NO: 275150 - RNA, 19 nt, Homo sapiens
gucuguguguuuaugugug

SEQ ID NO: 275151 - RNA, 13 nt, Homo sapiens
gucuguuugcauu

SEQ ID NO: 275152 - RNA, 21 nt, Homo sapiens
gucuuaaacuaaaugugcaau

SEQ ID NO: 275153 - RNA, 15 nt, Homo sapiens
gucuuagauguauau

SEQ ID NO: 275154 - RNA, 21 nt, Homo sapiens
gucuuaggaugugucuugggg

SEQ ID NO: 275155 - RNA, 23 nt, Homo sapiens
gucuucagccuagccgaccucag

SEQ ID NO: 275156 - RNA, 22 nt, Homo sapiens
gucuucauaauuucuucacuca

SEQ ID NO: 275157 - RNA, 21 nt, Homo sapiens
gucuucuaaauuugaaauaua

SEQ ID NO: 275158 - RNA, 22 nt, Homo sapiens
gucuugaucagacauucagaga

SEQ ID NO: 275159 - RNA, 22 nt, Homo sapiens
gucuuggcucacugcaacuucu

SEQ ID NO: 275160 - RNA, 14 nt, Homo sapiens
gucuuuaaccacuu

SEQ ID NO: 275161 - RNA, 15 nt, Homo sapiens
gucuuuacagaauca

SEQ ID NO: 275162 - RNA, 16 nt, Homo sapiens
gucuuuguacagacaa

SEQ ID NO: 275163 - RNA, 15 nt, Homo sapiens
gugaaaggaaagagg

SEQ ID NO: 275164 - RNA, 14 nt, Homo sapiens
gugaaaugcuggca

SEQ ID NO: 275165 - RNA, 20 nt, Homo sapiens
gugaaaugcuggcauuugca

SEQ ID NO: 275166 - RNA, 17 nt, Homo sapiens
gugaacagaacaaaagg

SEQ ID NO: 275167 - RNA, 23 nt, Homo sapiens
gugaaccaccacacccagcccac

SEQ ID NO: 275168 - RNA, 23 nt, Homo sapiens
gugaagacaaugacuuacuguac

SEQ ID NO: 275169 - RNA, 14 nt, Homo sapiens
gugaagagucuaca

SEQ ID NO: 275170 - RNA, 23 nt, Homo sapiens
gugaagcugggagaaccaaaaag

SEQ ID NO: 275171 - RNA, 15 nt, Homo sapiens
gugaauaaaccauca

SEQ ID NO: 275172 - RNA, 16 nt, Homo sapiens
gugaaugauucagugu

SEQ ID NO: 275173 - RNA, 14 nt, Homo sapiens
gugaauuaggcugu

SEQ ID NO: 275174 - RNA, 19 nt, Homo sapiens
gugacaacacuuguguuau

SEQ ID NO: 275175 - RNA, 14 nt, Homo sapiens
gugacucuuuccaa

SEQ ID NO: 275176 - RNA, 12 nt, Homo sapiens
gugagacccagc

SEQ ID NO: 275177 - RNA, 18 nt, Homo sapiens
gugagaugcuagaacucc

SEQ ID NO: 275178 - RNA, 16 nt, Homo sapiens
gugagcaaagggcuca

SEQ ID NO: 275179 - RNA, 23 nt, Homo sapiens
gugagcaauccugcaagaacaag

SEQ ID NO: 275180 - RNA, 15 nt, Homo sapiens
gugagcacaaaggua

SEQ ID NO: 275181 - RNA, 15 nt, Homo sapiens
gugagcacuaaggug

SEQ ID NO: 275182 - RNA, 14 nt, Homo sapiens
gugaggaagcaaaa

SEQ ID NO: 275183 - RNA, 15 nt, Homo sapiens
gugaggaagcaaaag

SEQ ID NO: 275184 - RNA, 22 nt, Homo sapiens
gugaggaugucugggccacuca

SEQ ID NO: 275185 - RNA, 21 nt, Homo sapiens
gugagggaacagagagguuaa

SEQ ID NO: 275186 - RNA, 17 nt, Homo sapiens
gugaggggcucucucau

SEQ ID NO: 275187 - RNA, 15 nt, Homo sapiens
gugagucaccacuuc

SEQ ID NO: 275188 - RNA, 18 nt, Homo sapiens
gugauccacccaccucag

SEQ ID NO: 275189 - RNA, 13 nt, Homo sapiens
gugauccucccac

SEQ ID NO: 275190 - RNA, 18 nt, Homo sapiens
gugauccucccaccucag

SEQ ID NO: 275191 - RNA, 16 nt, Homo sapiens
gugaucugaacagaaa

SEQ ID NO: 275192 - RNA, 14 nt, Homo sapiens
gugaugacauuccc

SEQ ID NO: 275193 - RNA, 22 nt, Homo sapiens
gugaugacauucccugcuaaua

SEQ ID NO: 275194 - RNA, 13 nt, Homo sapiens
gugauugugccag

SEQ ID NO: 275195 - RNA, 17 nt, Homo sapiens
gugauuuucauugcugg

SEQ ID NO: 275196 - RNA, 15 nt, Homo sapiens
gugcacagcacacgu

SEQ ID NO: 275197 - RNA, 18 nt, Homo sapiens
gugcaccacuucaaguga

SEQ ID NO: 275198 - RNA, 15 nt, Homo sapiens
gugcacgcacacugu

SEQ ID NO: 275199 - RNA, 18 nt, Homo sapiens
gugcacguacacacacau

SEQ ID NO: 275200 - RNA, 14 nt, Homo sapiens
gugcagcucuggag

SEQ ID NO: 275201 - RNA, 15 nt, Homo sapiens
gugcaguuuucagga

SEQ ID NO: 275202 - RNA, 20 nt, Homo sapiens
gugccacacaccuugacaaa

SEQ ID NO: 275203 - RNA, 16 nt, Homo sapiens
gugccaucagcuccuu

SEQ ID NO: 275204 - RNA, 21 nt, Homo sapiens
gugccaucaggaugagcagua

SEQ ID NO: 275205 - RNA, 20 nt, Homo sapiens
gugcccccagacgcacgugg

SEQ ID NO: 275206 - RNA, 13 nt, Homo sapiens
gugcccccaugua

SEQ ID NO: 275207 - RNA, 19 nt, Homo sapiens
gugcccugcaucccucucc

SEQ ID NO: 275208 - RNA, 23 nt, Homo sapiens
gugccucagucaauaaauuugca

SEQ ID NO: 275209 - RNA, 14 nt, Homo sapiens
gugccuuacacaau

SEQ ID NO: 275210 - RNA, 22 nt, Homo sapiens
gugccuugucacgccagacuuc

SEQ ID NO: 275211 - RNA, 15 nt, Homo sapiens
gugcggcggucccag

SEQ ID NO: 275212 - RNA, 19 nt, Homo sapiens
gugcuaaauaaacaacaaa

SEQ ID NO: 275213 - RNA, 23 nt, Homo sapiens
gugcuaggaacacuccuucacag

SEQ ID NO: 275214 - RNA, 17 nt, Homo sapiens
gugcuaucgcaccacug

SEQ ID NO: 275215 - RNA, 20 nt, Homo sapiens
gugcuaucgcaccacugugu

SEQ ID NO: 275216 - RNA, 13 nt, Homo sapiens
gugcucuuuccac

SEQ ID NO: 275217 - RNA, 18 nt, Homo sapiens
gugcugggauuacaggug

SEQ ID NO: 275218 - RNA, 22 nt, Homo sapiens
gugcuucuuaaaauagccauaa

SEQ ID NO: 275219 - RNA, 23 nt, Homo sapiens
guggagauucucuggcacucuga

SEQ ID NO: 275220 - RNA, 20 nt, Homo sapiens
guggauuaaagugcccagca

SEQ ID NO: 275221 - RNA, 18 nt, Homo sapiens
guggauuccgagugguga

SEQ ID NO: 275222 - RNA, 17 nt, Homo sapiens
guggcagcucaccucuc

SEQ ID NO: 275223 - RNA, 21 nt, Homo sapiens
guggcagcugcuuuugucuau

SEQ ID NO: 275224 - RNA, 13 nt, Homo sapiens
guggcccaagacc

SEQ ID NO: 275225 - RNA, 18 nt, Homo sapiens
uaaguaaguuugauuuca

SEQ ID NO: 275226 - RNA, 15 nt, Homo sapiens
uaaguaaugaugucg

SEQ ID NO: 275227 - RNA, 13 nt, Homo sapiens
uaaguacuaugua

SEQ ID NO: 275228 - RNA, 20 nt, Homo sapiens
uaaguacuauguaucaauga

SEQ ID NO: 275229 - RNA, 23 nt, Homo sapiens
uaaguacuauguaucaaugagua

SEQ ID NO: 275230 - RNA, 22 nt, Homo sapiens
uaagucaaccugccugacauuu

SEQ ID NO: 275231 - RNA, 14 nt, Homo sapiens
uaagugcaugacau

SEQ ID NO: 275232 - RNA, 19 nt, Homo sapiens
uaaguguuagagggaacag

SEQ ID NO: 275233 - RNA, 19 nt, Homo sapiens
uaaguugauggugaugaaa

SEQ ID NO: 275234 - RNA, 13 nt, Homo sapiens
uaaguuucacuga

SEQ ID NO: 275235 - RNA, 16 nt, Homo sapiens
uaauaaaaguacaugu

SEQ ID NO: 275236 - RNA, 15 nt, Homo sapiens
uaauaaagacagggu

SEQ ID NO: 275237 - RNA, 12 nt, Homo sapiens
uaauaacuuauc

SEQ ID NO: 275238 - RNA, 14 nt, Homo sapiens
uaauaacuuaucua

SEQ ID NO: 275239 - RNA, 18 nt, Homo sapiens
uaauaagcccacauauaa

SEQ ID NO: 275240 - RNA, 17 nt, Homo sapiens
uaauaauaaaacaacag

SEQ ID NO: 275241 - RNA, 15 nt, Homo sapiens
uaauacagggcauuu

SEQ ID NO: 275242 - RNA, 12 nt, Homo sapiens
uaauacauucac

SEQ ID NO: 275243 - RNA, 13 nt, Homo sapiens
uaauacauucacc

SEQ ID NO: 275244 - RNA, 16 nt, Homo sapiens
uaauacauucacccag

SEQ ID NO: 275245 - RNA, 15 nt, Homo sapiens
uaauauaacugccuu

SEQ ID NO: 275246 - RNA, 13 nt, Homo sapiens
uaauauacuaugc

SEQ ID NO: 275247 - RNA, 18 nt, Homo sapiens
uaauaucaucaguauuga

SEQ ID NO: 275248 - RNA, 15 nt, Homo sapiens
uaauauuaaagccau

SEQ ID NO: 275249 - RNA, 22 nt, Homo sapiens
uaaucagggaggucauuuuggu

SEQ ID NO: 275250 - RNA, 16 nt, Homo sapiens
uaaucaguguuuccaa

SEQ ID NO: 275251 - RNA, 16 nt, Homo sapiens
uaaucugagaggccac

SEQ ID NO: 275252 - RNA, 22 nt, Homo sapiens
uaaugaaagacuguacaaagua

SEQ ID NO: 275253 - RNA, 17 nt, Homo sapiens
uaaugacuuaagcacac

SEQ ID NO: 275254 - RNA, 21 nt, Homo sapiens
uaaugacuuaagcacacuuga

SEQ ID NO: 275255 - RNA, 15 nt, Homo sapiens
uaaugcuugcugcug

SEQ ID NO: 275256 - RNA, 13 nt, Homo sapiens
uaaugggacacua

SEQ ID NO: 275257 - RNA, 16 nt, Homo sapiens
uaaugguuauauguau

SEQ ID NO: 275258 - RNA, 14 nt, Homo sapiens
uaauguacaucugg

SEQ ID NO: 275259 - RNA, 20 nt, Homo sapiens
uaauuaaugucaguauuuca

SEQ ID NO: 275260 - RNA, 12 nt, Homo sapiens
uaauuaccaugc

SEQ ID NO: 275261 - RNA, 16 nt, Homo sapiens
uaauucuagcuuugag

SEQ ID NO: 275262 - RNA, 15 nt, Homo sapiens
uaauugccacugaga

SEQ ID NO: 275263 - RNA, 15 nt, Homo sapiens
uaauuguguggauuc

SEQ ID NO: 275264 - RNA, 19 nt, Homo sapiens
uaauuuaccugaagucuuu

SEQ ID NO: 275265 - RNA, 18 nt, Homo sapiens
uaauuuuuuuaaccaaag

SEQ ID NO: 275266 - RNA, 20 nt, Homo sapiens
uaauuuuuuugagacagagu

SEQ ID NO: 275267 - RNA, 12 nt, Homo sapiens
uacaaccuguga

SEQ ID NO: 275268 - RNA, 23 nt, Homo sapiens
uacaagacaggacccugggacca

SEQ ID NO: 275269 - RNA, 16 nt, Homo sapiens
uacaauauacuuguau

SEQ ID NO: 275270 - RNA, 20 nt, Homo sapiens
uacaaucagccacauucuag

SEQ ID NO: 275271 - RNA, 19 nt, Homo sapiens
uacaaugcauucugaggua

SEQ ID NO: 275272 - RNA, 22 nt, Homo sapiens
uacaauugcaguuuugccuaau

SEQ ID NO: 275273 - RNA, 11 nt, Homo sapiens
uacaauuguga

SEQ ID NO: 275274 - RNA, 12 nt, Homo sapiens
uacaauugugag

SEQ ID NO: 275275 - RNA, 13 nt, Homo sapiens
uacaauugugagc

SEQ ID NO: 275276 - RNA, 17 nt, Homo sapiens
uacaauuuacaaagugu

SEQ ID NO: 275277 - RNA, 12 nt, Homo sapiens
guucaaagccag

SEQ ID NO: 275278 - RNA, 23 nt, Homo sapiens
guucaauucucauuugucacaca

SEQ ID NO: 275279 - RNA, 18 nt, Homo sapiens
guucacuggacacuucac

SEQ ID NO: 275280 - RNA, 14 nt, Homo sapiens
guucagaugcuucu

SEQ ID NO: 275281 - RNA, 14 nt, Homo sapiens
guucagggucauag

SEQ ID NO: 275282 - RNA, 16 nt, Homo sapiens
guucagguaacaggca

SEQ ID NO: 275283 - RNA, 14 nt, Homo sapiens
guucagucacaugu

SEQ ID NO: 275284 - RNA, 20 nt, Homo sapiens
guucauaggucuccaagacc

SEQ ID NO: 275285 - RNA, 21 nt, Homo sapiens
guucaucagacuccugugcaa

SEQ ID NO: 275286 - RNA, 23 nt, Homo sapiens
guucaucauccuaagcuauucag

SEQ ID NO: 275287 - RNA, 16 nt, Homo sapiens
guucaugcacacuugc

SEQ ID NO: 275288 - RNA, 12 nt, Homo sapiens
guucauucugca

SEQ ID NO: 275289 - RNA, 13 nt, Homo sapiens
guuccccacugac

SEQ ID NO: 275290 - RNA, 14 nt, Homo sapiens
guuccccacugaca

SEQ ID NO: 275291 - RNA, 18 nt, Homo sapiens
guuccccgauaccaugcu

SEQ ID NO: 275292 - RNA, 16 nt, Homo sapiens
guucccuauuuugcca

SEQ ID NO: 275293 - RNA, 19 nt, Homo sapiens
guuccugucaauacagguu

SEQ ID NO: 275294 - RNA, 17 nt, Homo sapiens
guucuaaggcugugcca

SEQ ID NO: 275295 - RNA, 15 nt, Homo sapiens
guucuacccaggugc

SEQ ID NO: 275296 - RNA, 11 nt, Homo sapiens
guucucaggcc

SEQ ID NO: 275297 - RNA, 20 nt, Homo sapiens
guucucauggguggcacuca

SEQ ID NO: 275298 - RNA, 21 nt, Homo sapiens
guucuccagucauuauguuaa

SEQ ID NO: 275299 - RNA, 15 nt, Homo sapiens
guucugaaagugacu

SEQ ID NO: 275300 - RNA, 17 nt, Homo sapiens
guucugguuacuguucu

SEQ ID NO: 275301 - RNA, 16 nt, Homo sapiens
guucugucucauauga

SEQ ID NO: 275302 - RNA, 16 nt, Homo sapiens
guucuucauuaccuca

SEQ ID NO: 275303 - RNA, 15 nt, Homo sapiens
guugaaagaucaaaa

SEQ ID NO: 275304 - RNA, 19 nt, Homo sapiens
guugaagccaugucuacau

SEQ ID NO: 275305 - RNA, 23 nt, Homo sapiens
guugauuucagcaccuacagugu

SEQ ID NO: 275306 - RNA, 19 nt, Homo sapiens
guugcaggaccucagguga

SEQ ID NO: 275307 - RNA, 14 nt, Homo sapiens
guugcccagugugu

SEQ ID NO: 275308 - RNA, 17 nt, Homo sapiens
guugccuaaguauuaaa

SEQ ID NO: 275309 - RNA, 15 nt, Homo sapiens
guugcuguaugucuc

SEQ ID NO: 275310 - RNA, 20 nt, Homo sapiens
guuggaagugagggucagag

SEQ ID NO: 275311 - RNA, 14 nt, Homo sapiens
guuggcacaugccu

SEQ ID NO: 275312 - RNA, 22 nt, Homo sapiens
guuggccagugugacaaggauu

SEQ ID NO: 275313 - RNA, 20 nt, Homo sapiens
guugucagcugcagccacuu

SEQ ID NO: 275314 - RNA, 21 nt, Homo sapiens
guugucugaagucacugcaca

SEQ ID NO: 275315 - RNA, 11 nt, Homo sapiens
guugugcucuu

SEQ ID NO: 275316 - RNA, 19 nt, Homo sapiens
guuguggagagugcaacag

SEQ ID NO: 275317 - RNA, 14 nt, Homo sapiens
guugugugugcuuu

SEQ ID NO: 275318 - RNA, 22 nt, Homo sapiens
guuguuugauucagacagcugc

SEQ ID NO: 275319 - RNA, 17 nt, Homo sapiens
guuguuuucccaaagag

SEQ ID NO: 275320 - RNA, 19 nt, Homo sapiens
guuuaaaaauccccaaaaa

SEQ ID NO: 275321 - RNA, 22 nt, Homo sapiens
guuuaaagucucaguuucuugc

SEQ ID NO: 275322 - RNA, 18 nt, Homo sapiens
guuuacauuuuguauauu

SEQ ID NO: 275323 - RNA, 14 nt, Homo sapiens
guuuaguugcacaa

SEQ ID NO: 275324 - RNA, 20 nt, Homo sapiens
guuuaugcauagauaaucuc

SEQ ID NO: 275325 - RNA, 19 nt, Homo sapiens
guuuauuauguacuauuca

SEQ ID NO: 275326 - RNA, 19 nt, Homo sapiens
guuuauugucaaaguggug

SEQ ID NO: 275327 - RNA, 17 nt, Homo sapiens
guuucaaaaaaucugac

SEQ ID NO: 275328 - RNA, 23 nt, Homo sapiens
guuucaaaaaaucugaccaaaac

SEQ ID NO: 275329 - RNA, 15 nt, Homo sapiens
guuuccaaucugucc

SEQ ID NO: 275330 - RNA, 22 nt, Homo sapiens
guuuccauccccaggauccacu

SEQ ID NO: 275331 - RNA, 17 nt, Homo sapiens
guuuccuggcacugcuu

SEQ ID NO: 275332 - RNA, 21 nt, Homo sapiens
guuucguaacacagcauugua

SEQ ID NO: 275333 - RNA, 23 nt, Homo sapiens
guuucucguacuuucacaucucu

SEQ ID NO: 275334 - RNA, 23 nt, Homo sapiens
guuucuggauuucauacuguaac

SEQ ID NO: 275335 - RNA, 23 nt, Homo sapiens
guuucuggcagccaguaccuccu

SEQ ID NO: 275336 - RNA, 18 nt, Homo sapiens
guuucuguacaacuaccu

SEQ ID NO: 275337 - RNA, 22 nt, Homo sapiens
guuucuucaaucugaagauaca

SEQ ID NO: 275338 - RNA, 22 nt, Homo sapiens
guuugaagaugccgcauuugga

SEQ ID NO: 275339 - RNA, 17 nt, Homo sapiens
guuugauuauucagugu

SEQ ID NO: 275340 - RNA, 12 nt, Homo sapiens
guuugcagagua

SEQ ID NO: 275341 - RNA, 18 nt, Homo sapiens
guuugguucauggugaag

SEQ ID NO: 275342 - RNA, 23 nt, Homo sapiens
guuugugcugguguaugugugaa

SEQ ID NO: 275343 - RNA, 19 nt, Homo sapiens
guuuguguguugucucuug

SEQ ID NO: 275344 - RNA, 17 nt, Homo sapiens
guuuuaacuguggauau

SEQ ID NO: 275345 - RNA, 21 nt, Homo sapiens
guuuuacaguguuucuggcuu

SEQ ID NO: 275346 - RNA, 21 nt, Homo sapiens
guuuuacuguccaaagacaug

SEQ ID NO: 275347 - RNA, 22 nt, Homo sapiens
guuuuaugagaaaugccagugu

SEQ ID NO: 275348 - RNA, 16 nt, Homo sapiens
guuuucaggaugagau

SEQ ID NO: 275349 - RNA, 11 nt, Homo sapiens
guuuucagugu

SEQ ID NO: 275350 - RNA, 14 nt, Homo sapiens
guuuucccaaagag

SEQ ID NO: 275351 - RNA, 23 nt, Homo sapiens
guuuuguagagauggggucucac

SEQ ID NO: 275352 - RNA, 15 nt, Homo sapiens
guuuuguauucucug

SEQ ID NO: 275353 - RNA, 19 nt, Homo sapiens
guuuuuaaaaaacugcuga

SEQ ID NO: 275354 - RNA, 16 nt, Homo sapiens
guuuuuaaaacccagu

SEQ ID NO: 275355 - RNA, 13 nt, Homo sapiens
guuuuuacuguga

SEQ ID NO: 275356 - RNA, 23 nt, Homo sapiens
guuuuuauggcuuuugugcauua

SEQ ID NO: 275357 - RNA, 22 nt, Homo sapiens
uaaaaaaaaaacguauugcauu

SEQ ID NO: 275358 - RNA, 23 nt, Homo sapiens
uaaaaaaaaaacguauugcauuu

SEQ ID NO: 275359 - RNA, 22 nt, Homo sapiens
uaaaaaaaacaaaaagaacaaa

SEQ ID NO: 275360 - RNA, 17 nt, Homo sapiens
uaaaaaaaaucaaguau

SEQ ID NO: 275361 - RNA, 12 nt, Homo sapiens
uaaaaaugacaa

SEQ ID NO: 275362 - RNA, 14 nt, Homo sapiens
uaaaaaugcaacuu

SEQ ID NO: 275363 - RNA, 15 nt, Homo sapiens
uaaaaaugcaacuuc

SEQ ID NO: 275364 - RNA, 15 nt, Homo sapiens
uaaaaauugugauca

SEQ ID NO: 275365 - RNA, 14 nt, Homo sapiens
uaaaacacaacauc

SEQ ID NO: 275366 - RNA, 12 nt, Homo sapiens
uaaaacacauca

SEQ ID NO: 275367 - RNA, 15 nt, Homo sapiens
uaaaacacaucauca

SEQ ID NO: 275368 - RNA, 16 nt, Homo sapiens
uaaaacacaucaucaa

SEQ ID NO: 275369 - RNA, 22 nt, Homo sapiens
uaaaacagguuauaacaguguu

SEQ ID NO: 275370 - RNA, 17 nt, Homo sapiens
uacugggacugugcuca

SEQ ID NO: 275371 - RNA, 12 nt, Homo sapiens
uacugugcaguu

SEQ ID NO: 275372 - RNA, 17 nt, Homo sapiens
uacugugcaguuuucag

SEQ ID NO: 275373 - RNA, 16 nt, Homo sapiens
uacuuaauaaacugug

SEQ ID NO: 275374 - RNA, 14 nt, Homo sapiens
uacuuaguucaagc

SEQ ID NO: 275375 - RNA, 18 nt, Homo sapiens
uacuuauagaauucaguc

SEQ ID NO: 275376 - RNA, 16 nt, Homo sapiens
uacuucaagaucugaa

SEQ ID NO: 275377 - RNA, 21 nt, Homo sapiens
uacuucagcucacacaugaga

SEQ ID NO: 275378 - RNA, 14 nt, Homo sapiens
uacuucucugcuau

SEQ ID NO: 275379 - RNA, 13 nt, Homo sapiens
uacuugagacugu

SEQ ID NO: 275380 - RNA, 17 nt, Homo sapiens
uacuuguggacacagcu

SEQ ID NO: 275381 - RNA, 21 nt, Homo sapiens
uacuuugaagucauaccaaug

SEQ ID NO: 275382 - RNA, 22 nt, Homo sapiens
uacuuuuuccuggcucaucucu

SEQ ID NO: 275383 - RNA, 10 nt, Homo sapiens
uacuuuuugg

SEQ ID NO: 275384 - RNA, 12 nt, Homo sapiens
uagaaaaaccac

SEQ ID NO: 275385 - RNA, 22 nt, Homo sapiens
uagaaaaggccuucuucccaau

SEQ ID NO: 275386 - RNA, 16 nt, Homo sapiens
uagaaaagggaacuga

SEQ ID NO: 275387 - RNA, 17 nt, Homo sapiens
uagaaacacacauuucu

SEQ ID NO: 275388 - RNA, 23 nt, Homo sapiens
uagaaacacacauuucuuugaau

SEQ ID NO: 275389 - RNA, 15 nt, Homo sapiens
uagaaagaagaugaa

SEQ ID NO: 275390 - RNA, 14 nt, Homo sapiens
uagaacaagccaga

SEQ ID NO: 275391 - RNA, 22 nt, Homo sapiens
uagaaccucgagguuucucaaa

SEQ ID NO: 275392 - RNA, 14 nt, Homo sapiens
uagaagauggcacu

SEQ ID NO: 275393 - RNA, 21 nt, Homo sapiens
uagaagccacuauuacuggga

SEQ ID NO: 275394 - RNA, 22 nt, Homo sapiens
uagaagccacuauuacugggac

SEQ ID NO: 275395 - RNA, 18 nt, Homo sapiens
uagaaugagacuuacuuc

SEQ ID NO: 275396 - RNA, 19 nt, Homo sapiens
uagaaugagugaaucaccu

SEQ ID NO: 275397 - RNA, 20 nt, Homo sapiens
uagaauuugggggaaaauuu

SEQ ID NO: 275398 - RNA, 21 nt, Homo sapiens
uagacccugcauuuauagcau

SEQ ID NO: 275399 - RNA, 21 nt, Homo sapiens
uagacgagcaggcuucuuccc

SEQ ID NO: 275400 - RNA, 18 nt, Homo sapiens
uagagacagggucucacu

SEQ ID NO: 275401 - RNA, 22 nt, Homo sapiens
uagagauggggucucacagugu

SEQ ID NO: 275402 - RNA, 14 nt, Homo sapiens
uagagcacacugua

SEQ ID NO: 275403 - RNA, 19 nt, Homo sapiens
uagagcagccacaaccaaa

SEQ ID NO: 275404 - RNA, 15 nt, Homo sapiens
uagaggaaagaaaga

SEQ ID NO: 275405 - RNA, 18 nt, Homo sapiens
uagagguacacuugugaa

SEQ ID NO: 275406 - RNA, 14 nt, Homo sapiens
uagaggugagggaa

SEQ ID NO: 275407 - RNA, 22 nt, Homo sapiens
uagaguccaacguggggcagca

SEQ ID NO: 275408 - RNA, 13 nt, Homo sapiens
uagaguguuauca

SEQ ID NO: 275409 - RNA, 22 nt, Homo sapiens
uagauacaggggcaaaagucau

SEQ ID NO: 275410 - RNA, 23 nt, Homo sapiens
uagauauuagcccagaaauguua

SEQ ID NO: 275411 - RNA, 16 nt, Homo sapiens
uagaucugaacuccuu

SEQ ID NO: 275412 - RNA, 17 nt, Homo sapiens
uagaugcugacuguacu

SEQ ID NO: 275413 - RNA, 17 nt, Homo sapiens
uagauuucuagcaguau

SEQ ID NO: 275414 - RNA, 14 nt, Homo sapiens
uagauuuuggcaaa

SEQ ID NO: 275415 - RNA, 20 nt, Homo sapiens
uagcaaaauacaugacauuu

SEQ ID NO: 275416 - RNA, 18 nt, Homo sapiens
uagcaaaauuacuaccag

SEQ ID NO: 275417 - RNA, 20 nt, Homo sapiens
uagcaaggcugugcaucuag

SEQ ID NO: 275418 - RNA, 12 nt, Homo sapiens
uagcacauacua

SEQ ID NO: 275419 - RNA, 18 nt, Homo sapiens
uagcaccuccacauaccu

SEQ ID NO: 275420 - RNA, 14 nt, Homo sapiens
uagcagacaguguu

SEQ ID NO: 275421 - RNA, 18 nt, Homo sapiens
uagcaggaagcugugaga

SEQ ID NO: 275422 - RNA, 18 nt, Homo sapiens
uagcagggaaacagcuaa

SEQ ID NO: 275423 - RNA, 13 nt, Homo sapiens
uagcauacgguau

SEQ ID NO: 275424 - RNA, 18 nt, Homo sapiens
uagcauacgguaugauau

SEQ ID NO: 275425 - RNA, 15 nt, Homo sapiens
uagcaugaaccaccc

SEQ ID NO: 275426 - RNA, 14 nt, Homo sapiens
uagcaugcugugau

SEQ ID NO: 275427 - RNA, 18 nt, Homo sapiens
uagcauuugucaacaaag

SEQ ID NO: 275428 - RNA, 22 nt, Homo sapiens
uagccacugcauaccaaccugg

SEQ ID NO: 275429 - RNA, 18 nt, Homo sapiens
uagccuuagaagucacac

SEQ ID NO: 275430 - RNA, 19 nt, Homo sapiens
uagcggggaggggguuauc

SEQ ID NO: 275431 - RNA, 15 nt, Homo sapiens
uagcugggacuacag

SEQ ID NO: 275432 - RNA, 14 nt, Homo sapiens
uaacagaaauguac

SEQ ID NO: 275433 - RNA, 16 nt, Homo sapiens
uaacagaaauguacag

SEQ ID NO: 275434 - RNA, 21 nt, Homo sapiens
uaacagguuuguuugugcuuu

SEQ ID NO: 275435 - RNA, 17 nt, Homo sapiens
uaacauggaaguacuau

SEQ ID NO: 275436 - RNA, 22 nt, Homo sapiens
uaaccaaagcccaaagugguau

SEQ ID NO: 275437 - RNA, 18 nt, Homo sapiens
uaaccagcagaaaugccu

SEQ ID NO: 275438 - RNA, 14 nt, Homo sapiens
uaaccauugucaua

SEQ ID NO: 275439 - RNA, 22 nt, Homo sapiens
uaaccgucaauaggcaaagggg

SEQ ID NO: 275440 - RNA, 12 nt, Homo sapiens
uaaccuaccugg

SEQ ID NO: 275441 - RNA, 14 nt, Homo sapiens
uaacguggcacugg

SEQ ID NO: 275442 - RNA, 14 nt, Homo sapiens
uaacuauguugaua

SEQ ID NO: 275443 - RNA, 17 nt, Homo sapiens
uaagaagugacucuugc

SEQ ID NO: 275444 - RNA, 13 nt, Homo sapiens
uaagaaugaaaua

SEQ ID NO: 275445 - RNA, 19 nt, Homo sapiens
uaagacccucucaaacuaa

SEQ ID NO: 275446 - RNA, 12 nt, Homo sapiens
uaagacugugua

SEQ ID NO: 275447 - RNA, 15 nt, Homo sapiens
uaagagaaaugagcu

SEQ ID NO: 275448 - RNA, 16 nt, Homo sapiens
uaagagaaaugagcug

SEQ ID NO: 275449 - RNA, 14 nt, Homo sapiens
uaagaggauguggu

SEQ ID NO: 275450 - RNA, 21 nt, Homo sapiens
uaagagggagggagggcucca

SEQ ID NO: 275451 - RNA, 14 nt, Homo sapiens
uaagagucucuauu

SEQ ID NO: 275452 - RNA, 17 nt, Homo sapiens
uaagaugaaucauuuaa

SEQ ID NO: 275453 - RNA, 17 nt, Homo sapiens
uaagaugaucaucucca

SEQ ID NO: 275454 - RNA, 13 nt, Homo sapiens
uaagauucaucca

SEQ ID NO: 275455 - RNA, 14 nt, Homo sapiens
uaagauucauccau

SEQ ID NO: 275456 - RNA, 15 nt, Homo sapiens
uaagcaaagacuuuc

SEQ ID NO: 275457 - RNA, 21 nt, Homo sapiens
uaagcacgggccauaugaaua

SEQ ID NO: 275458 - RNA, 16 nt, Homo sapiens
uaagcagaccacugau

SEQ ID NO: 275459 - RNA, 12 nt, Homo sapiens
uaagccaaaaaa

SEQ ID NO: 275460 - RNA, 19 nt, Homo sapiens
uaagccaaaaaaugcuugc

SEQ ID NO: 275461 - RNA, 14 nt, Homo sapiens
uaagcuacugauga

SEQ ID NO: 275462 - RNA, 20 nt, Homo sapiens
uaagcugagcuccuuagccu

SEQ ID NO: 275463 - RNA, 22 nt, Homo sapiens
uaagcugccuguacacaacuca

SEQ ID NO: 275464 - RNA, 14 nt, Homo sapiens
uaaggaaacugggu

SEQ ID NO: 275465 - RNA, 14 nt, Homo sapiens
uaagggacaacauc

SEQ ID NO: 275466 - RNA, 13 nt, Homo sapiens
uaagggaccucaa

SEQ ID NO: 275467 - RNA, 22 nt, Homo sapiens
uaaguacuauguaucaaugagu

SEQ ID NO: 275468 - RNA, 17 nt, Homo sapiens
uaagucaaccugccuga

SEQ ID NO: 275469 - RNA, 19 nt, Homo sapiens
uaagucuguuuuaugacuu

SEQ ID NO: 275470 - RNA, 23 nt, Homo sapiens
uaagugaggaugaaaaaauaaca

SEQ ID NO: 275471 - RNA, 19 nt, Homo sapiens
uaaguuacacauuuuucag

SEQ ID NO: 275472 - RNA, 14 nt, Homo sapiens
uaaguuucugggac

SEQ ID NO: 275473 - RNA, 15 nt, Homo sapiens
uaaguuugauuucau

SEQ ID NO: 275474 - RNA, 13 nt, Homo sapiens
uaauaaagacagg

SEQ ID NO: 275475 - RNA, 21 nt, Homo sapiens
uaauaagcaaagggagcacug

SEQ ID NO: 275476 - RNA, 14 nt, Homo sapiens
uaauaaguacugug

SEQ ID NO: 275477 - RNA, 16 nt, Homo sapiens
uaauaaguuucacuga

SEQ ID NO: 275478 - RNA, 18 nt, Homo sapiens
uaauaaguuucacugacu

SEQ ID NO: 275479 - RNA, 18 nt, Homo sapiens
uaauacagacuaugucac

SEQ ID NO: 275480 - RNA, 14 nt, Homo sapiens
uaauauaacugccu

SEQ ID NO: 275481 - RNA, 22 nt, Homo sapiens
uaauauauguauaugcaauaua

SEQ ID NO: 275482 - RNA, 14 nt, Homo sapiens
uaauaucaucagua

SEQ ID NO: 275483 - RNA, 19 nt, Homo sapiens
uaauauccaauugcugcuu

SEQ ID NO: 275484 - RNA, 16 nt, Homo sapiens
uaauauuaaagccaug

SEQ ID NO: 275485 - RNA, 13 nt, Homo sapiens
uaaucaacugggc

SEQ ID NO: 275486 - RNA, 18 nt, Homo sapiens
uaauccagaaaaacugug

SEQ ID NO: 275487 - RNA, 19 nt, Homo sapiens
uaauccucuuuuucuaguc

SEQ ID NO: 275488 - RNA, 14 nt, Homo sapiens
uaaucucuuuccau

SEQ ID NO: 275489 - RNA, 21 nt, Homo sapiens
uaaucugagaggccacagugc

SEQ ID NO: 275490 - RNA, 14 nt, Homo sapiens
uaaucuuugcuuua

SEQ ID NO: 275491 - RNA, 17 nt, Homo sapiens
uaaugaaaccugugucu

SEQ ID NO: 275492 - RNA, 22 nt, Homo sapiens
uaaugaaauaauguacaucugg

SEQ ID NO: 275493 - RNA, 13 nt, Homo sapiens
uaaugaaugcaua

SEQ ID NO: 275494 - RNA, 19 nt, Homo sapiens
uaaugacuuaagcacacuu

SEQ ID NO: 275495 - RNA, 15 nt, Homo sapiens
uaaugauagcuacug

SEQ ID NO: 275496 - RNA, 23 nt, Homo sapiens
uaaugaugucguuugaaucacag

SEQ ID NO: 275497 - RNA, 18 nt, Homo sapiens
uaaugcauguggcacuua

SEQ ID NO: 275498 - RNA, 21 nt, Homo sapiens
uaaugguaguuuuacaguguu

SEQ ID NO: 275499 - RNA, 16 nt, Homo sapiens
uaaugguugacugggu

SEQ ID NO: 275500 - RNA, 14 nt, Homo sapiens
uaauguaagcucua

SEQ ID NO: 275501 - RNA, 13 nt, Homo sapiens
uaauguuacauua

SEQ ID NO: 275502 - RNA, 15 nt, Homo sapiens
uaauuaaaacacaac

SEQ ID NO: 275503 - RNA, 16 nt, Homo sapiens
uaauuaguaacaugug

SEQ ID NO: 275504 - RNA, 14 nt, Homo sapiens
uaauuaguuccuca

SEQ ID NO: 275505 - RNA, 23 nt, Homo sapiens
uaauuccacacccucacugcugu

SEQ ID NO: 275506 - RNA, 19 nt, Homo sapiens
uaauucuuagcucauucuc

SEQ ID NO: 275507 - RNA, 14 nt, Homo sapiens
uaauuuaaugcaug

SEQ ID NO: 275508 - RNA, 20 nt, Homo sapiens
uaauuuuaggcacccauccu

SEQ ID NO: 275509 - RNA, 23 nt, Homo sapiens
uaauuuuuuugugggaaauccac

SEQ ID NO: 275510 - RNA, 15 nt, Homo sapiens
uacaaaagcauguga

SEQ ID NO: 275511 - RNA, 22 nt, Homo sapiens
uacaaaaguuuaaaaagcucac

SEQ ID NO: 275512 - RNA, 23 nt, Homo sapiens
uacaaaccauuuuguuauugacu

SEQ ID NO: 275513 - RNA, 16 nt, Homo sapiens
uacaaaguaagccaug

SEQ ID NO: 275514 - RNA, 19 nt, Homo sapiens
uacaaaguaagccauguau

SEQ ID NO: 275515 - RNA, 21 nt, Homo sapiens
uauaguuuauugacaauaauu

SEQ ID NO: 275516 - RNA, 21 nt, Homo sapiens
uauauaaaugugauugcagcu

SEQ ID NO: 275517 - RNA, 16 nt, Homo sapiens
uauauaacaacaaacu

SEQ ID NO: 275518 - RNA, 13 nt, Homo sapiens
uauauaagccaaa

SEQ ID NO: 275519 - RNA, 16 nt, Homo sapiens
uauauaagccaaaaaa

SEQ ID NO: 275520 - RNA, 18 nt, Homo sapiens
uauauauuuuugugcaca

SEQ ID NO: 275521 - RNA, 20 nt, Homo sapiens
uauauauuuuugugcacauu

SEQ ID NO: 275522 - RNA, 14 nt, Homo sapiens
uauaucgaucucuu

SEQ ID NO: 275523 - RNA, 14 nt, Homo sapiens
uauaucuaccccag

SEQ ID NO: 275524 - RNA, 12 nt, Homo sapiens
uauaugcaauau

SEQ ID NO: 275525 - RNA, 19 nt, Homo sapiens
uauauguauaucacauucc

SEQ ID NO: 275526 - RNA, 16 nt, Homo sapiens
uauauguauaugcaau

SEQ ID NO: 275527 - RNA, 13 nt, Homo sapiens
uauauucauuuca

SEQ ID NO: 275528 - RNA, 19 nt, Homo sapiens
uauauuguuuucaguguac

SEQ ID NO: 275529 - RNA, 19 nt, Homo sapiens
uauauuugaaguggagcca

SEQ ID NO: 275530 - RNA, 15 nt, Homo sapiens
uauauuuuugugcac

SEQ ID NO: 275531 - RNA, 22 nt, Homo sapiens
uaucaauggagcaugugugcaa

SEQ ID NO: 275532 - RNA, 17 nt, Homo sapiens
uaucaccgugggcuccc

SEQ ID NO: 275533 - RNA, 15 nt, Homo sapiens
uaucaccucuucaca

SEQ ID NO: 275534 - RNA, 14 nt, Homo sapiens
uaucagaauucuca

SEQ ID NO: 275535 - RNA, 16 nt, Homo sapiens
uaucagaggguggaga

SEQ ID NO: 275536 - RNA, 19 nt, Homo sapiens
uaucagccugugccacgau

SEQ ID NO: 275537 - RNA, 14 nt, Homo sapiens
uaucaucaguauug

SEQ ID NO: 275538 - RNA, 19 nt, Homo sapiens
uauccaaucucaucucuug

SEQ ID NO: 275539 - RNA, 16 nt, Homo sapiens
uauccaauugcugcuu

SEQ ID NO: 275540 - RNA, 19 nt, Homo sapiens
uauccaauugcugcuugua

SEQ ID NO: 275541 - RNA, 13 nt, Homo sapiens
uauccauccaugg

SEQ ID NO: 275542 - RNA, 19 nt, Homo sapiens
uauccauguacuuucccug

SEQ ID NO: 275543 - RNA, 14 nt, Homo sapiens
uaucccuacuguaa

SEQ ID NO: 275544 - RNA, 19 nt, Homo sapiens
uauccuagucauucuuccc

SEQ ID NO: 275545 - RNA, 16 nt, Homo sapiens
uaucuagauacuguau

SEQ ID NO: 275546 - RNA, 21 nt, Homo sapiens
uaucuauggcacccaugcacc

SEQ ID NO: 275547 - RNA, 16 nt, Homo sapiens
uaucucaaacuacugg

SEQ ID NO: 275548 - RNA, 23 nt, Homo sapiens
uaucucaaacuacuggcaauuug

SEQ ID NO: 275549 - RNA, 16 nt, Homo sapiens
uaucucaguaccccau

SEQ ID NO: 275550 - RNA, 21 nt, Homo sapiens
uaucucaucuugaugaugaua

SEQ ID NO: 275551 - RNA, 14 nt, Homo sapiens
uaucugaggucaca

SEQ ID NO: 275552 - RNA, 22 nt, Homo sapiens
uaucugcagggacagagcauug

SEQ ID NO: 275553 - RNA, 11 nt, Homo sapiens
uaucugugaaa

SEQ ID NO: 275554 - RNA, 20 nt, Homo sapiens
uaucuguguuuguacugugc

SEQ ID NO: 275555 - RNA, 15 nt, Homo sapiens
uaucuucaucuguga

SEQ ID NO: 275556 - RNA, 24 nt, Homo sapiens
uaucuucaucugugaaauggggau

SEQ ID NO: 275557 - RNA, 22 nt, Homo sapiens
uaucuugaagacuuuucuuuca

SEQ ID NO: 275558 - RNA, 17 nt, Homo sapiens
uaugacacucuagucaa

SEQ ID NO: 275559 - RNA, 15 nt, Homo sapiens
uaugacaucagcaau

SEQ ID NO: 275560 - RNA, 16 nt, Homo sapiens
uaugacuccagaauuu

SEQ ID NO: 275561 - RNA, 14 nt, Homo sapiens
uaugagauugggua

SEQ ID NO: 275562 - RNA, 23 nt, Homo sapiens
uaugaggaugcagagucagcaga

SEQ ID NO: 275563 - RNA, 14 nt, Homo sapiens
uaugaggcauuugu

SEQ ID NO: 275564 - RNA, 21 nt, Homo sapiens
uaugauuauuaacgaugucca

SEQ ID NO: 275565 - RNA, 22 nt, Homo sapiens
uaugauuguccguaggcccaua

SEQ ID NO: 275566 - RNA, 15 nt, Homo sapiens
uaugauugugcacau

SEQ ID NO: 275567 - RNA, 18 nt, Homo sapiens
uaugcaacucaucuucac

SEQ ID NO: 275568 - RNA, 23 nt, Homo sapiens
uaugcaacucaucuucacagauu

SEQ ID NO: 275569 - RNA, 13 nt, Homo sapiens
uaugcacaaacuu

SEQ ID NO: 275570 - RNA, 20 nt, Homo sapiens
uaugcaugaaguaauaugca

SEQ ID NO: 275571 - RNA, 22 nt, Homo sapiens
uaugcaugaaguaauaugcaca

SEQ ID NO: 275572 - RNA, 18 nt, Homo sapiens
uaugccauagcaagauug

SEQ ID NO: 275573 - RNA, 21 nt, Homo sapiens
uaugccauggaggcacuaaca

SEQ ID NO: 275574 - RNA, 18 nt, Homo sapiens
uaugcucagggucaauuu

SEQ ID NO: 275575 - RNA, 16 nt, Homo sapiens
uaugcuguauccacaa

SEQ ID NO: 275576 - RNA, 18 nt, Homo sapiens
uaugcuguauccacaaau

SEQ ID NO: 275577 - RNA, 20 nt, Homo sapiens
uaugcuguauccacaaauca

SEQ ID NO: 275578 - RNA, 15 nt, Homo sapiens
uauggacacacaguc

SEQ ID NO: 275579 - RNA, 16 nt, Homo sapiens
uauggcacccaugcac

SEQ ID NO: 275580 - RNA, 18 nt, Homo sapiens
uauggcacccaugcaccu

SEQ ID NO: 275581 - RNA, 17 nt, Homo sapiens
uauggcucuacuuucag

SEQ ID NO: 275582 - RNA, 18 nt, Homo sapiens
uauggcuuuugugcauua

SEQ ID NO: 275583 - RNA, 18 nt, Homo sapiens
uauggggccaaaauagca

SEQ ID NO: 275584 - RNA, 20 nt, Homo sapiens
uauggguuggacaaccucau

SEQ ID NO: 275585 - RNA, 22 nt, Homo sapiens
uaugguaggaacugcugggcuu

SEQ ID NO: 275586 - RNA, 14 nt, Homo sapiens
uaugguucucaggc

SEQ ID NO: 275587 - RNA, 21 nt, Homo sapiens
uaccuucuaccucuuggcugc

SEQ ID NO: 275588 - RNA, 17 nt, Homo sapiens
uaccuugaacacugggg

SEQ ID NO: 275589 - RNA, 17 nt, Homo sapiens
uaccuugagccaguaau

SEQ ID NO: 275590 - RNA, 18 nt, Homo sapiens
uaccuuguguacuuucuu

SEQ ID NO: 275591 - RNA, 14 nt, Homo sapiens
uacgacaacuugca

SEQ ID NO: 275592 - RNA, 15 nt, Homo sapiens
uacgaugacaguguu

SEQ ID NO: 275593 - RNA, 14 nt, Homo sapiens
uacgauucacuccu

SEQ ID NO: 275594 - RNA, 13 nt, Homo sapiens
uacgccaggggaa

SEQ ID NO: 275595 - RNA, 20 nt, Homo sapiens
uacgcuccaucgcugucauc

SEQ ID NO: 275596 - RNA, 13 nt, Homo sapiens
uacgggaggguaa

SEQ ID NO: 275597 - RNA, 14 nt, Homo sapiens
uacgguuccauguu

SEQ ID NO: 275598 - RNA, 13 nt, Homo sapiens
uacguccuuccac

SEQ ID NO: 275599 - RNA, 18 nt, Homo sapiens
uacgugaguccuggcaug

SEQ ID NO: 275600 - RNA, 14 nt, Homo sapiens
uacguugugcauuu

SEQ ID NO: 275601 - RNA, 16 nt, Homo sapiens
uacuaaggaaucuuuc

SEQ ID NO: 275602 - RNA, 13 nt, Homo sapiens
uacuaaucuuucu

SEQ ID NO: 275603 - RNA, 19 nt, Homo sapiens
uacuacaguccucccaucu

SEQ ID NO: 275604 - RNA, 15 nt, Homo sapiens
uacuaucaugucaaa

SEQ ID NO: 275605 - RNA, 19 nt, Homo sapiens
uacuauccaaucugugaug

SEQ ID NO: 275606 - RNA, 16 nt, Homo sapiens
uacuauuuuuacuaau

SEQ ID NO: 275607 - RNA, 22 nt, Homo sapiens
uacucaccucaccccacugugg

SEQ ID NO: 275608 - RNA, 15 nt, Homo sapiens
uacucauucagggau

SEQ ID NO: 275609 - RNA, 22 nt, Homo sapiens
uacucauucagggauagcacug

SEQ ID NO: 275610 - RNA, 23 nt, Homo sapiens
uacucccaucugugaaaggaaag

SEQ ID NO: 275611 - RNA, 18 nt, Homo sapiens
uacucgaguuacagacaa

SEQ ID NO: 275612 - RNA, 19 nt, Homo sapiens
uacucgaguuacagacaaa

SEQ ID NO: 275613 - RNA, 21 nt, Homo sapiens
uacucgaguuacagacaaagc

SEQ ID NO: 275614 - RNA, 20 nt, Homo sapiens
uacugaaucugcuaccaaaa

SEQ ID NO: 275615 - RNA, 21 nt, Homo sapiens
uacugaugcagaaagaccgug

SEQ ID NO: 275616 - RNA, 20 nt, Homo sapiens
uacugcaagaaggagcucag

SEQ ID NO: 275617 - RNA, 16 nt, Homo sapiens
uacugcagcaccucca

SEQ ID NO: 275618 - RNA, 22 nt, Homo sapiens
uacugcucaucauuccuugaga

SEQ ID NO: 275619 - RNA, 21 nt, Homo sapiens
uacugggacugugcucagaga

SEQ ID NO: 275620 - RNA, 21 nt, Homo sapiens
uacugggguuuuucuaagaaa

SEQ ID NO: 275621 - RNA, 18 nt, Homo sapiens
uacuguaauuugugauac

SEQ ID NO: 275622 - RNA, 14 nt, Homo sapiens
uacuguccaaagac

SEQ ID NO: 275623 - RNA, 17 nt, Homo sapiens
uacugucucuuucauga

SEQ ID NO: 275624 - RNA, 20 nt, Homo sapiens
uacuuauugauuuaaaaaca

SEQ ID NO: 275625 - RNA, 17 nt, Homo sapiens
uacuucauggacuucca

SEQ ID NO: 275626 - RNA, 18 nt, Homo sapiens
uacuucuuauacauuuga

SEQ ID NO: 275627 - RNA, 20 nt, Homo sapiens
uacuugagaggcugaggcaa

SEQ ID NO: 275628 - RNA, 15 nt, Homo sapiens
uacuugcuucucuag

SEQ ID NO: 275629 - RNA, 19 nt, Homo sapiens
uacuugggagaccuguaau

SEQ ID NO: 275630 - RNA, 14 nt, Homo sapiens
uacuuguggacaca

SEQ ID NO: 275631 - RNA, 15 nt, Homo sapiens
uacuuuaauguauaa

SEQ ID NO: 275632 - RNA, 13 nt, Homo sapiens
uacuuucacaucu

SEQ ID NO: 275633 - RNA, 14 nt, Homo sapiens
uacuuugacagugu

SEQ ID NO: 275634 - RNA, 13 nt, Homo sapiens
uacuuugugcugg

SEQ ID NO: 275635 - RNA, 15 nt, Homo sapiens
uacuuugugcuugua

SEQ ID NO: 275636 - RNA, 21 nt, Homo sapiens
uacuuuugcccuuugauuaaa

SEQ ID NO: 275637 - RNA, 16 nt, Homo sapiens
uacuuuuucuuugaau

SEQ ID NO: 275638 - RNA, 13 nt, Homo sapiens
uagaaaaaccacc

SEQ ID NO: 275639 - RNA, 19 nt, Homo sapiens
uagaaaauguucaccuaga

SEQ ID NO: 275640 - RNA, 16 nt, Homo sapiens
uagaaacacacauuuc

SEQ ID NO: 275641 - RNA, 21 nt, Homo sapiens
uagaaacacacauuucuuuga

SEQ ID NO: 275642 - RNA, 17 nt, Homo sapiens
uagaaagagaaacaguu

SEQ ID NO: 275643 - RNA, 16 nt, Homo sapiens
uagaaagauggggcau

SEQ ID NO: 275644 - RNA, 22 nt, Homo sapiens
uagaaagauggggcauauucau

SEQ ID NO: 275645 - RNA, 16 nt, Homo sapiens
uagaaauccaauugga

SEQ ID NO: 275646 - RNA, 14 nt, Homo sapiens
uagaaauuccccac

SEQ ID NO: 275647 - RNA, 15 nt, Homo sapiens
uagaacaagccagag

SEQ ID NO: 275648 - RNA, 15 nt, Homo sapiens
uagaacacaguuugu

SEQ ID NO: 275649 - RNA, 13 nt, Homo sapiens
uagaaccaggcaa

SEQ ID NO: 275650 - RNA, 14 nt, Homo sapiens
uagaagacugucag

SEQ ID NO: 275651 - RNA, 15 nt, Homo sapiens
uagaaggagacagag

SEQ ID NO: 275652 - RNA, 15 nt, Homo sapiens
uagaaggauccucca

SEQ ID NO: 275653 - RNA, 20 nt, Homo sapiens
uagaaggguaccuugaacac

SEQ ID NO: 275654 - RNA, 12 nt, Homo sapiens
uagaagucacac

SEQ ID NO: 275655 - RNA, 16 nt, Homo sapiens
uagaagucacacagua

SEQ ID NO: 275656 - RNA, 17 nt, Homo sapiens
uagaagucuuagaugua

SEQ ID NO: 275657 - RNA, 14 nt, Homo sapiens
uagaaugagacuua

SEQ ID NO: 275658 - RNA, 18 nt, Homo sapiens
uagaauuauaacuguaaa

SEQ ID NO: 275659 - RNA, 14 nt, Homo sapiens
uagaauucagucaa

SEQ ID NO: 275660 - RNA, 22 nt, Homo sapiens
ucaaacgugaaaaugcuguauu

SEQ ID NO: 275661 - RNA, 14 nt, Homo sapiens
ucaaacuacuggca

SEQ ID NO: 275662 - RNA, 14 nt, Homo sapiens
ucaaagaaagugua

SEQ ID NO: 275663 - RNA, 22 nt, Homo sapiens
ucaaagaaauuuccacucaggu

SEQ ID NO: 275664 - RNA, 20 nt, Homo sapiens
ucaaaggugauugugccagg

SEQ ID NO: 275665 - RNA, 22 nt, Homo sapiens
ucaaaggugauugugccaggcu

SEQ ID NO: 275666 - RNA, 16 nt, Homo sapiens
ucaaaguaaaacuugc

SEQ ID NO: 275667 - RNA, 17 nt, Homo sapiens
ucaaagugacuauucag

SEQ ID NO: 275668 - RNA, 22 nt, Homo sapiens
ucaaagugagcuccuaagccau

SEQ ID NO: 275669 - RNA, 13 nt, Homo sapiens
ucaaaguggcaaa

SEQ ID NO: 275670 - RNA, 14 nt, Homo sapiens
ucaaauagcauaag

SEQ ID NO: 275671 - RNA, 23 nt, Homo sapiens
ucaaaugagaaaaugucuuuauu

SEQ ID NO: 275672 - RNA, 18 nt, Homo sapiens
ucaaaugugacauuauau

SEQ ID NO: 275673 - RNA, 12 nt, Homo sapiens
ucaaauguucuc

SEQ ID NO: 275674 - RNA, 14 nt, Homo sapiens
ucaaauuuagcaac

SEQ ID NO: 275675 - RNA, 14 nt, Homo sapiens
ucaacagaauucac

SEQ ID NO: 275676 - RNA, 15 nt, Homo sapiens
ucaacagaauucacu

SEQ ID NO: 275677 - RNA, 16 nt, Homo sapiens
ucaacagaauucacuu

SEQ ID NO: 275678 - RNA, 22 nt, Homo sapiens
ucaacagcauuuucaagcaguu

SEQ ID NO: 275679 - RNA, 15 nt, Homo sapiens
ucaacaguaucugug

SEQ ID NO: 275680 - RNA, 20 nt, Homo sapiens
ucaacaucuuuuacauucug

SEQ ID NO: 275681 - RNA, 15 nt, Homo sapiens
ucaaccccaugagac

SEQ ID NO: 275682 - RNA, 16 nt, Homo sapiens
ucaacugaaguucuau

SEQ ID NO: 275683 - RNA, 23 nt, Homo sapiens
ucaacuggagacacuauuuaucu

SEQ ID NO: 275684 - RNA, 22 nt, Homo sapiens
ucaagacgucacccuccauucu

SEQ ID NO: 275685 - RNA, 16 nt, Homo sapiens
ucaagagcccuuccag

SEQ ID NO: 275686 - RNA, 14 nt, Homo sapiens
ucaagaugugacau

SEQ ID NO: 275687 - RNA, 15 nt, Homo sapiens
ucaagaugugacaug

SEQ ID NO: 275688 - RNA, 16 nt, Homo sapiens
ucaagcagucgugccu

SEQ ID NO: 275689 - RNA, 21 nt, Homo sapiens
ucaagccuagcccuucucuca

SEQ ID NO: 275690 - RNA, 22 nt, Homo sapiens
ucaagccuagcccuucucucau

SEQ ID NO: 275691 - RNA, 15 nt, Homo sapiens
ucaaggcugcaguga

SEQ ID NO: 275692 - RNA, 16 nt, Homo sapiens
ucaaggcugcagugag

SEQ ID NO: 275693 - RNA, 13 nt, Homo sapiens
ucaaguaauccac

SEQ ID NO: 275694 - RNA, 21 nt, Homo sapiens
ucaaguaauccaccugccucg

SEQ ID NO: 275695 - RNA, 14 nt, Homo sapiens
ucaaguauuggcaa

SEQ ID NO: 275696 - RNA, 19 nt, Homo sapiens
ucaagugauucuccugccu

SEQ ID NO: 275697 - RNA, 21 nt, Homo sapiens
ucaagugauucuccugccuca

SEQ ID NO: 275698 - RNA, 22 nt, Homo sapiens
ucaagugauucuccugccucag

SEQ ID NO: 275699 - RNA, 19 nt, Homo sapiens
ucaaguuucuucaaucuga

SEQ ID NO: 275700 - RNA, 21 nt, Homo sapiens
ucaauaaaauagugacauaaa

SEQ ID NO: 275701 - RNA, 17 nt, Homo sapiens
ucaauaaacaacagcug

SEQ ID NO: 275702 - RNA, 22 nt, Homo sapiens
ucaauaaacaacagcugaagca

SEQ ID NO: 275703 - RNA, 12 nt, Homo sapiens
ucaauccagcua

SEQ ID NO: 275704 - RNA, 13 nt, Homo sapiens
ucaaucucuaguu

SEQ ID NO: 275705 - RNA, 16 nt, Homo sapiens
ucaaucucugauucug

SEQ ID NO: 275706 - RNA, 17 nt, Homo sapiens
ucaaucuggauucauau

SEQ ID NO: 275707 - RNA, 21 nt, Homo sapiens
ucaaucuuuacacaaugucac

SEQ ID NO: 275708 - RNA, 21 nt, Homo sapiens
ucaauggagcaugugugcaaa

SEQ ID NO: 275709 - RNA, 22 nt, Homo sapiens
ucaauggagcaugugugcaaaa

SEQ ID NO: 275710 - RNA, 16 nt, Homo sapiens
ucaauguccuacugag

SEQ ID NO: 275711 - RNA, 17 nt, Homo sapiens
ucaauguccuacugaga

SEQ ID NO: 275712 - RNA, 18 nt, Homo sapiens
ucaauuacaggaaguacu

SEQ ID NO: 275713 - RNA, 19 nt, Homo sapiens
ucacaacccaucuaccccu

SEQ ID NO: 275714 - RNA, 22 nt, Homo sapiens
ucacaaucaucaucauucucau

SEQ ID NO: 275715 - RNA, 19 nt, Homo sapiens
ucacaaucaucuucuccca

SEQ ID NO: 275716 - RNA, 23 nt, Homo sapiens
ucacaauuauuaccaucucucca

SEQ ID NO: 275717 - RNA, 11 nt, Homo sapiens
ucacacacagg

SEQ ID NO: 275718 - RNA, 20 nt, Homo sapiens
ucacaccaccccccaugcca

SEQ ID NO: 275719 - RNA, 13 nt, Homo sapiens
ucacaccuguaau

SEQ ID NO: 275720 - RNA, 18 nt, Homo sapiens
ucacagaagcacagcacc

SEQ ID NO: 275721 - RNA, 15 nt, Homo sapiens
ucacagaaucuccau

SEQ ID NO: 275722 - RNA, 21 nt, Homo sapiens
ucacagagauaauucuagcuu

SEQ ID NO: 275723 - RNA, 15 nt, Homo sapiens
ucacagagugcauug

SEQ ID NO: 275724 - RNA, 16 nt, Homo sapiens
ucacagagugcauugu

SEQ ID NO: 275725 - RNA, 16 nt, Homo sapiens
ucacagaugugugauu

SEQ ID NO: 275726 - RNA, 18 nt, Homo sapiens
ucacagaugugugauuca

SEQ ID NO: 275727 - RNA, 15 nt, Homo sapiens
ucacagauuguucua

SEQ ID NO: 275728 - RNA, 20 nt, Homo sapiens
ucacagcaagucacuggcca

SEQ ID NO: 275729 - RNA, 14 nt, Homo sapiens
ucacagccucugaa

SEQ ID NO: 275730 - RNA, 17 nt, Homo sapiens
ucacaguucauugcagc

SEQ ID NO: 275731 - RNA, 19 nt, Homo sapiens
ucacauugguguuguacuc

SEQ ID NO: 275732 - RNA, 18 nt, Homo sapiens
ucaccaaaucagcugcua

SEQ ID NO: 275733 - RNA, 19 nt, Homo sapiens
ucaccaaaucagcugcuac

SEQ ID NO: 275734 - RNA, 12 nt, Homo sapiens
ucaccaagccca

SEQ ID NO: 275735 - RNA, 16 nt, Homo sapiens
ucaccacaugugcaca

SEQ ID NO: 275736 - RNA, 19 nt, Homo sapiens
ucaccauuuggcaaugcca

SEQ ID NO: 275737 - RNA, 20 nt, Homo sapiens
ucaccauuuggcaaugccau

SEQ ID NO: 275738 - RNA, 21 nt, Homo sapiens
ucaccuggacuuaagcaucug

SEQ ID NO: 275739 - RNA, 16 nt, Homo sapiens
ucacggcucacugcag

SEQ ID NO: 275740 - RNA, 17 nt, Homo sapiens
ucacgggaccaguauug

SEQ ID NO: 275741 - RNA, 16 nt, Homo sapiens
ucacguaaagcuagaa

SEQ ID NO: 275742 - RNA, 17 nt, Homo sapiens
uagucgaacaauucaua

SEQ ID NO: 275743 - RNA, 22 nt, Homo sapiens
uagucucuggcaagaugcuuua

SEQ ID NO: 275744 - RNA, 17 nt, Homo sapiens
uagucucuugauucaua

SEQ ID NO: 275745 - RNA, 16 nt, Homo sapiens
uagucuuagguuucca

SEQ ID NO: 275746 - RNA, 19 nt, Homo sapiens
uagugauuuccacagugac

SEQ ID NO: 275747 - RNA, 23 nt, Homo sapiens
uagugauuuccacagugacucca

SEQ ID NO: 275748 - RNA, 19 nt, Homo sapiens
uagugcacagcacaaauua

SEQ ID NO: 275749 - RNA, 16 nt, Homo sapiens
uaguggggucagggcu

SEQ ID NO: 275750 - RNA, 14 nt, Homo sapiens
uagugguuacccag

SEQ ID NO: 275751 - RNA, 15 nt, Homo sapiens
uagugugugcaauuu

SEQ ID NO: 275752 - RNA, 19 nt, Homo sapiens
uaguucaaucuggauucau

SEQ ID NO: 275753 - RNA, 16 nt, Homo sapiens
uaguucugccaggaga

SEQ ID NO: 275754 - RNA, 12 nt, Homo sapiens
uaguugcuguau

SEQ ID NO: 275755 - RNA, 19 nt, Homo sapiens
uaguugcuuugcggcaucu

SEQ ID NO: 275756 - RNA, 22 nt, Homo sapiens
uaguuguaauuuuuuuguggga

SEQ ID NO: 275757 - RNA, 13 nt, Homo sapiens
uaguuuucauaca

SEQ ID NO: 275758 - RNA, 16 nt, Homo sapiens
uauaaaaacagcuccu

SEQ ID NO: 275759 - RNA, 22 nt, Homo sapiens
uauaaaacacaucaucaauaaa

SEQ ID NO: 275760 - RNA, 13 nt, Homo sapiens
uauaaaauucuug

SEQ ID NO: 275761 - RNA, 19 nt, Homo sapiens
uauaaaccuaaaaaagaua

SEQ ID NO: 275762 - RNA, 13 nt, Homo sapiens
uauaaaugugauu

SEQ ID NO: 275763 - RNA, 21 nt, Homo sapiens
uauaaaugugauugcagcuuu

SEQ ID NO: 275764 - RNA, 12 nt, Homo sapiens
uauaacaguguu

SEQ ID NO: 275765 - RNA, 13 nt, Homo sapiens
uauaacaguguuu

SEQ ID NO: 275766 - RNA, 17 nt, Homo sapiens
uauaaccuuguuccaaa

SEQ ID NO: 275767 - RNA, 14 nt, Homo sapiens
uauaacuaacaugu

SEQ ID NO: 275768 - RNA, 12 nt, Homo sapiens
uauaacuguaaa

SEQ ID NO: 275769 - RNA, 14 nt, Homo sapiens
uauaaggacacuga

SEQ ID NO: 275770 - RNA, 14 nt, Homo sapiens
uauaaugguugacu

SEQ ID NO: 275771 - RNA, 23 nt, Homo sapiens
uauaauuaacauguuaaaccaug

SEQ ID NO: 275772 - RNA, 14 nt, Homo sapiens
uauaauucuguuuc

SEQ ID NO: 275773 - RNA, 16 nt, Homo sapiens
uauaauugaguuuuca

SEQ ID NO: 275774 - RNA, 19 nt, Homo sapiens
uauaauugccacugagaga

SEQ ID NO: 275775 - RNA, 14 nt, Homo sapiens
uauacaauauacuu

SEQ ID NO: 275776 - RNA, 23 nt, Homo sapiens
uauacacuuacacuuuaugcaca

SEQ ID NO: 275777 - RNA, 17 nt, Homo sapiens
uauacauaaacaagacc

SEQ ID NO: 275778 - RNA, 12 nt, Homo sapiens
uauacauuugau

SEQ ID NO: 275779 - RNA, 17 nt, Homo sapiens
uauagaaccucuuuguc

SEQ ID NO: 275780 - RNA, 15 nt, Homo sapiens
uauagacaaauaaua

SEQ ID NO: 275781 - RNA, 15 nt, Homo sapiens
uauagauguugcuaa

SEQ ID NO: 275782 - RNA, 16 nt, Homo sapiens
uauagcaagaucccau

SEQ ID NO: 275783 - RNA, 14 nt, Homo sapiens
uauaggaccaagau

SEQ ID NO: 275784 - RNA, 14 nt, Homo sapiens
uauaguacuggcau

SEQ ID NO: 275785 - RNA, 17 nt, Homo sapiens
uauaguauaagcagugu

SEQ ID NO: 275786 - RNA, 22 nt, Homo sapiens
uauagucgaacaauucauauau

SEQ ID NO: 275787 - RNA, 23 nt, Homo sapiens
uauauaaacgguuaacaauauua

SEQ ID NO: 275788 - RNA, 18 nt, Homo sapiens
uauauaaaugugauugca

SEQ ID NO: 275789 - RNA, 20 nt, Homo sapiens
uauauacccguacaacgugu

SEQ ID NO: 275790 - RNA, 17 nt, Homo sapiens
uauauaugugaugaucu

SEQ ID NO: 275791 - RNA, 21 nt, Homo sapiens
uauauauuuuugugcacauuu

SEQ ID NO: 275792 - RNA, 15 nt, Homo sapiens
uauaucuaccccaga

SEQ ID NO: 275793 - RNA, 11 nt, Homo sapiens
uauaugcucug

SEQ ID NO: 275794 - RNA, 24 nt, Homo sapiens
uauauguuuugugggaacagaugu

SEQ ID NO: 275795 - RNA, 14 nt, Homo sapiens
uauauucaagguua

SEQ ID NO: 275796 - RNA, 16 nt, Homo sapiens
uauauucauccaugcc

SEQ ID NO: 275797 - RNA, 14 nt, Homo sapiens
uaucaacagcauuu

SEQ ID NO: 275798 - RNA, 20 nt, Homo sapiens
uaucaaugaguaacaggaaa

SEQ ID NO: 275799 - RNA, 15 nt, Homo sapiens
uaucagaauucucag

SEQ ID NO: 275800 - RNA, 15 nt, Homo sapiens
uaucaggguauucca

SEQ ID NO: 275801 - RNA, 14 nt, Homo sapiens
uaucaggugcugcc

SEQ ID NO: 275802 - RNA, 14 nt, Homo sapiens
uaucagucauaacu

SEQ ID NO: 275803 - RNA, 13 nt, Homo sapiens
uaucaguccaaag

SEQ ID NO: 275804 - RNA, 19 nt, Homo sapiens
uaucauuuggccgagucag

SEQ ID NO: 275805 - RNA, 16 nt, Homo sapiens
ucaggaagcucagggc

SEQ ID NO: 275806 - RNA, 23 nt, Homo sapiens
ucaggagaggggcagaacagccg

SEQ ID NO: 275807 - RNA, 13 nt, Homo sapiens
ucaggaugagaug

SEQ ID NO: 275808 - RNA, 18 nt, Homo sapiens
ucaggccaaccccaaaga

SEQ ID NO: 275809 - RNA, 18 nt, Homo sapiens
ucaggccauugucccuga

SEQ ID NO: 275810 - RNA, 23 nt, Homo sapiens
ucaggcgauccaccugucucagc

SEQ ID NO: 275811 - RNA, 20 nt, Homo sapiens
ucagggagaguuugggaacu

SEQ ID NO: 275812 - RNA, 16 nt, Homo sapiens
ucagggagugggcuaa

SEQ ID NO: 275813 - RNA, 16 nt, Homo sapiens
ucagggauagcacuga

SEQ ID NO: 275814 - RNA, 23 nt, Homo sapiens
ucagggauagcacugagcaaagc

SEQ ID NO: 275815 - RNA, 22 nt, Homo sapiens
ucaggugucccugcacuugcag

SEQ ID NO: 275816 - RNA, 15 nt, Homo sapiens
ucaguaauaacucua

SEQ ID NO: 275817 - RNA, 12 nt, Homo sapiens
ucaguaccccau

SEQ ID NO: 275818 - RNA, 14 nt, Homo sapiens
ucaguaccccaugg

SEQ ID NO: 275819 - RNA, 16 nt, Homo sapiens
ucaguauuucaacuga

SEQ ID NO: 275820 - RNA, 21 nt, Homo sapiens
ucagucaauaaauuugcaaau

SEQ ID NO: 275821 - RNA, 17 nt, Homo sapiens
ucaguccaaagggcaug

SEQ ID NO: 275822 - RNA, 14 nt, Homo sapiens
ucagucuacacuca

SEQ ID NO: 275823 - RNA, 16 nt, Homo sapiens
ucagucuacacucaca

SEQ ID NO: 275824 - RNA, 13 nt, Homo sapiens
ucagucucugagc

SEQ ID NO: 275825 - RNA, 12 nt, Homo sapiens
ucagucugucca

SEQ ID NO: 275826 - RNA, 18 nt, Homo sapiens
ucagucuuuaaucugaga

SEQ ID NO: 275827 - RNA, 18 nt, Homo sapiens
ucagugaauaaaccauca

SEQ ID NO: 275828 - RNA, 21 nt, Homo sapiens
ucagugccaaaaacaacaaca

SEQ ID NO: 275829 - RNA, 21 nt, Homo sapiens
ucagugccuuauggaacacuc

SEQ ID NO: 275830 - RNA, 19 nt, Homo sapiens
ucagugcugugucauucca

SEQ ID NO: 275831 - RNA, 15 nt, Homo sapiens
ucaguguacauggaa

SEQ ID NO: 275832 - RNA, 14 nt, Homo sapiens
ucaguguauuugua

SEQ ID NO: 275833 - RNA, 15 nt, Homo sapiens
ucaguguuaaaugug

SEQ ID NO: 275834 - RNA, 19 nt, Homo sapiens
ucaguuguggccucauuca

SEQ ID NO: 275835 - RNA, 20 nt, Homo sapiens
ucaguuguggccucauucag

SEQ ID NO: 275836 - RNA, 22 nt, Homo sapiens
ucaguuguggccucauucagca

SEQ ID NO: 275837 - RNA, 22 nt, Homo sapiens
ucaguuuaucuguucauaugga

SEQ ID NO: 275838 - RNA, 22 nt, Homo sapiens
ucaguuugcuagcagaaaucua

SEQ ID NO: 275839 - RNA, 14 nt, Homo sapiens
ucauaagcuacuga

SEQ ID NO: 275840 - RNA, 17 nt, Homo sapiens
ucauaagcuacugauga

SEQ ID NO: 275841 - RNA, 17 nt, Homo sapiens
ucauaaucuuugcuuua

SEQ ID NO: 275842 - RNA, 14 nt, Homo sapiens
ucauaaugacuuaa

SEQ ID NO: 275843 - RNA, 15 nt, Homo sapiens
ucauacucaccucac

SEQ ID NO: 275844 - RNA, 20 nt, Homo sapiens
ucauacuugaaaauaugaca

SEQ ID NO: 275845 - RNA, 19 nt, Homo sapiens
ucauacuuuuucuuugaau

SEQ ID NO: 275846 - RNA, 16 nt, Homo sapiens
ucauaugauugugcac

SEQ ID NO: 275847 - RNA, 18 nt, Homo sapiens
ucauaugauugugcacau

SEQ ID NO: 275848 - RNA, 10 nt, Homo sapiens
ucauauugau

SEQ ID NO: 275849 - RNA, 20 nt, Homo sapiens
ucauauugaugugugucuag

SEQ ID NO: 275850 - RNA, 14 nt, Homo sapiens
ucauauuucuuuuc

SEQ ID NO: 275851 - RNA, 22 nt, Homo sapiens
ucaucaagaauuuaaugauuaa

SEQ ID NO: 275852 - RNA, 13 nt, Homo sapiens
ucaucacuuugac

SEQ ID NO: 275853 - RNA, 12 nt, Homo sapiens
ucaucaggccau

SEQ ID NO: 275854 - RNA, 22 nt, Homo sapiens
ucaucaguauugaagcauuuua

SEQ ID NO: 275855 - RNA, 18 nt, Homo sapiens
ucaucaucaagaauuuaa

SEQ ID NO: 275856 - RNA, 16 nt, Homo sapiens
ucaucaugugugucca

SEQ ID NO: 275857 - RNA, 13 nt, Homo sapiens
ucaucauuuccau

SEQ ID NO: 275858 - RNA, 16 nt, Homo sapiens
ucauccacuagugcaa

SEQ ID NO: 275859 - RNA, 16 nt, Homo sapiens
ucauccacugugccau

SEQ ID NO: 275860 - RNA, 15 nt, Homo sapiens
ucaucccauugucuu

SEQ ID NO: 275861 - RNA, 16 nt, Homo sapiens
ucaucccauugucuuc

SEQ ID NO: 275862 - RNA, 21 nt, Homo sapiens
ucaucccgagcaccuccacau

SEQ ID NO: 275863 - RNA, 17 nt, Homo sapiens
ucauccucccaccucag

SEQ ID NO: 275864 - RNA, 19 nt, Homo sapiens
ucaucuacccccaaaagaa

SEQ ID NO: 275865 - RNA, 21 nt, Homo sapiens
ucaucucuuguaaauacaugu

SEQ ID NO: 275866 - RNA, 14 nt, Homo sapiens
ucaucucuuuauuc

SEQ ID NO: 275867 - RNA, 15 nt, Homo sapiens
ucaucuguaccucug

SEQ ID NO: 275868 - RNA, 15 nt, Homo sapiens
ucaucuucacagauu

SEQ ID NO: 275869 - RNA, 20 nt, Homo sapiens
ucaucuucacagauuguucu

SEQ ID NO: 275870 - RNA, 12 nt, Homo sapiens
ucaucuugccac

SEQ ID NO: 275871 - RNA, 15 nt, Homo sapiens
ucaucuugcuaccag

SEQ ID NO: 275872 - RNA, 17 nt, Homo sapiens
ucaugagugcaacugug

SEQ ID NO: 275873 - RNA, 16 nt, Homo sapiens
ucaugauuucauuuca

SEQ ID NO: 275874 - RNA, 20 nt, Homo sapiens
ucauggagggagaagaaaga

SEQ ID NO: 275875 - RNA, 15 nt, Homo sapiens
ucauggauauguuau

SEQ ID NO: 275876 - RNA, 21 nt, Homo sapiens
ucaugggguggacucuaacag

SEQ ID NO: 275877 - RNA, 20 nt, Homo sapiens
ucaugguccccauggcaugg

SEQ ID NO: 275878 - RNA, 19 nt, Homo sapiens
ucauguaauuuuguaucac

SEQ ID NO: 275879 - RNA, 16 nt, Homo sapiens
ucaugugacucuuucc

SEQ ID NO: 275880 - RNA, 17 nt, Homo sapiens
ucaugugacucuuucca

SEQ ID NO: 275881 - RNA, 23 nt, Homo sapiens
ucauguguguccacgacugucuc

SEQ ID NO: 275882 - RNA, 15 nt, Homo sapiens
ucauguucagucaca

SEQ ID NO: 275883 - RNA, 21 nt, Homo sapiens
ucauuaaaauuaacaugugcc

SEQ ID NO: 275884 - RNA, 17 nt, Homo sapiens
ucauuagcauuuugcua

SEQ ID NO: 275885 - RNA, 17 nt, Homo sapiens
ucauuaucaguccaaag

SEQ ID NO: 275886 - RNA, 20 nt, Homo sapiens
ucauucagggauagcacuga

SEQ ID NO: 275887 - RNA, 15 nt, Homo sapiens
ucauucucauucuca

SEQ ID NO: 275888 - RNA, 21 nt, Homo sapiens
ucauucucugucucauccauc

SEQ ID NO: 275889 - RNA, 22 nt, Homo sapiens
ucauucugcauucucuagucag

SEQ ID NO: 275890 - RNA, 20 nt, Homo sapiens
ucauugaccugaggcccuuc

SEQ ID NO: 275891 - RNA, 14 nt, Homo sapiens
ucauugacuaucaa

SEQ ID NO: 275892 - RNA, 14 nt, Homo sapiens
ucauugcugacaga

SEQ ID NO: 275893 - RNA, 17 nt, Homo sapiens
ucauuguucuugugaac

SEQ ID NO: 275894 - RNA, 22 nt, Homo sapiens
ucauuuaggugaggaagcaaaa

SEQ ID NO: 275895 - RNA, 21 nt, Homo sapiens
ucauuugacuaagagucucca

SEQ ID NO: 275896 - RNA, 17 nt, Homo sapiens
ucauuuuauaugucaaa

SEQ ID NO: 275897 - RNA, 14 nt, Homo sapiens
uauuuuaugaucca

SEQ ID NO: 275898 - RNA, 20 nt, Homo sapiens
uauuuuauucccuuucacaa

SEQ ID NO: 275899 - RNA, 12 nt, Homo sapiens
uauuuucuccau

SEQ ID NO: 275900 - RNA, 22 nt, Homo sapiens
uauuuugcauaguaccaaucau

SEQ ID NO: 275901 - RNA, 22 nt, Homo sapiens
uauuuugccagugggaacuccu

SEQ ID NO: 275902 - RNA, 12 nt, Homo sapiens
uauuuuuacuaa

SEQ ID NO: 275903 - RNA, 14 nt, Homo sapiens
uauuuuucucauga

SEQ ID NO: 275904 - RNA, 14 nt, Homo sapiens
ucaaaaacauucuu

SEQ ID NO: 275905 - RNA, 15 nt, Homo sapiens
ucaaaaacauucuua

SEQ ID NO: 275906 - RNA, 19 nt, Homo sapiens
ucaaaacaaucuugucaua

SEQ ID NO: 275907 - RNA, 22 nt, Homo sapiens
ucaaaauaaaaaugagguacuc

SEQ ID NO: 275908 - RNA, 17 nt, Homo sapiens
ucaaacuccugaccuca

SEQ ID NO: 275909 - RNA, 19 nt, Homo sapiens
ucaaacucuugaccucagg

SEQ ID NO: 275910 - RNA, 22 nt, Homo sapiens
ucaaagaaaguguauugguuua

SEQ ID NO: 275911 - RNA, 20 nt, Homo sapiens
ucaaagaagucauucuuuaa

SEQ ID NO: 275912 - RNA, 13 nt, Homo sapiens
ucaaagacauucu

SEQ ID NO: 275913 - RNA, 20 nt, Homo sapiens
ucaaagauauuuugcuuugu

SEQ ID NO: 275914 - RNA, 10 nt, Homo sapiens
ucaaagccag

SEQ ID NO: 275915 - RNA, 16 nt, Homo sapiens
ucaaagccuugguaaa

SEQ ID NO: 275916 - RNA, 20 nt, Homo sapiens
ucaaagggagagagugcuau

SEQ ID NO: 275917 - RNA, 22 nt, Homo sapiens
ucaaagggagagagugcuauug

SEQ ID NO: 275918 - RNA, 15 nt, Homo sapiens
ucaaaguaaaacuug

SEQ ID NO: 275919 - RNA, 18 nt, Homo sapiens
ucaaaguaaaacuugcug

SEQ ID NO: 275920 - RNA, 13 nt, Homo sapiens
ucaaagugagcuc

SEQ ID NO: 275921 - RNA, 12 nt, Homo sapiens
ucaaaguggcaa

SEQ ID NO: 275922 - RNA, 15 nt, Homo sapiens
ucaaaguggcaaaaa

SEQ ID NO: 275923 - RNA, 20 nt, Homo sapiens
ucaaaguugccuaaauccau

SEQ ID NO: 275924 - RNA, 14 nt, Homo sapiens
ucaaauaacuaaaa

SEQ ID NO: 275925 - RNA, 13 nt, Homo sapiens
ucaaauagcauaa

SEQ ID NO: 275926 - RNA, 12 nt, Homo sapiens
ucaaaugagaaa

SEQ ID NO: 275927 - RNA, 18 nt, Homo sapiens
ucaaauguucuccaguca

SEQ ID NO: 275928 - RNA, 16 nt, Homo sapiens
ucaaauuggagcuuca

SEQ ID NO: 275929 - RNA, 19 nt, Homo sapiens
ucaaauuuagcaaccuaga

SEQ ID NO: 275930 - RNA, 14 nt, Homo sapiens
ucaacaaagucacc

SEQ ID NO: 275931 - RNA, 16 nt, Homo sapiens
ucaacaaagucaccca

SEQ ID NO: 275932 - RNA, 16 nt, Homo sapiens
ucaacaccucugcaca

SEQ ID NO: 275933 - RNA, 17 nt, Homo sapiens
ucaacagaauucacuug

SEQ ID NO: 275934 - RNA, 22 nt, Homo sapiens
ucaacaucuuggucagauuuga

SEQ ID NO: 275935 - RNA, 19 nt, Homo sapiens
ucaacaucuuuuacauucu

SEQ ID NO: 275936 - RNA, 12 nt, Homo sapiens
ucaaccccauga

SEQ ID NO: 275937 - RNA, 21 nt, Homo sapiens
ucaaccuccugggcuaaguga

SEQ ID NO: 275938 - RNA, 18 nt, Homo sapiens
ucaaccugggcaaagccu

SEQ ID NO: 275939 - RNA, 18 nt, Homo sapiens
ucaacuccagucucggca

SEQ ID NO: 275940 - RNA, 15 nt, Homo sapiens
ucaacucuccuccag

SEQ ID NO: 275941 - RNA, 12 nt, Homo sapiens
ucaacuuugaca

SEQ ID NO: 275942 - RNA, 20 nt, Homo sapiens
ucaagaaacagccagcaaga

SEQ ID NO: 275943 - RNA, 16 nt, Homo sapiens
ucaagaagaagaugga

SEQ ID NO: 275944 - RNA, 15 nt, Homo sapiens
ucaagaccauaguga

SEQ ID NO: 275945 - RNA, 19 nt, Homo sapiens
ucaagaccauagugaccaa

SEQ ID NO: 275946 - RNA, 21 nt, Homo sapiens
ucaagacgucacccuccauuc

SEQ ID NO: 275947 - RNA, 18 nt, Homo sapiens
ucaagaugagagaacugg

SEQ ID NO: 275948 - RNA, 13 nt, Homo sapiens
ucaagaugugaca

SEQ ID NO: 275949 - RNA, 18 nt, Homo sapiens
ucaagcccuuuacuugac

SEQ ID NO: 275950 - RNA, 16 nt, Homo sapiens
uccaugauguuuucca

SEQ ID NO: 275951 - RNA, 18 nt, Homo sapiens
uccauguaccuuguguac

SEQ ID NO: 275952 - RNA, 21 nt, Homo sapiens
uccauguaccuuguguacuuu

SEQ ID NO: 275953 - RNA, 12 nt, Homo sapiens
uccauguucacc

SEQ ID NO: 275954 - RNA, 13 nt, Homo sapiens
uccauugcauuca

SEQ ID NO: 275955 - RNA, 18 nt, Homo sapiens
uccauugcauucauguac

SEQ ID NO: 275956 - RNA, 19 nt, Homo sapiens
uccauugcauucauguacu

SEQ ID NO: 275957 - RNA, 14 nt, Homo sapiens
uccauuucugcuca

SEQ ID NO: 275958 - RNA, 13 nt, Homo sapiens
ucccaaaaauaaa

SEQ ID NO: 275959 - RNA, 12 nt, Homo sapiens
ucccaaacccuu

SEQ ID NO: 275960 - RNA, 16 nt, Homo sapiens
ucccaaagcagugcau

SEQ ID NO: 275961 - RNA, 19 nt, Homo sapiens
ucccaaagugcugaauuaa

SEQ ID NO: 275962 - RNA, 16 nt, Homo sapiens
ucccaacaagugcucu

SEQ ID NO: 275963 - RNA, 22 nt, Homo sapiens
ucccaacaagugcucuuuccac

SEQ ID NO: 275964 - RNA, 15 nt, Homo sapiens
ucccaacucacccca

SEQ ID NO: 275965 - RNA, 15 nt, Homo sapiens
ucccaagacugcucc

SEQ ID NO: 275966 - RNA, 12 nt, Homo sapiens
ucccaaggcagc

SEQ ID NO: 275967 - RNA, 13 nt, Homo sapiens
ucccacaggacau

SEQ ID NO: 275968 - RNA, 16 nt, Homo sapiens
ucccacaggcccuucc

SEQ ID NO: 275969 - RNA, 18 nt, Homo sapiens
ucccacccccaucucucc

SEQ ID NO: 275970 - RNA, 14 nt, Homo sapiens
ucccaccucagccu

SEQ ID NO: 275971 - RNA, 15 nt, Homo sapiens
ucccacgagggugcc

SEQ ID NO: 275972 - RNA, 20 nt, Homo sapiens
ucccagaggagccaccaguu

SEQ ID NO: 275973 - RNA, 18 nt, Homo sapiens
ucccagcuacaccuuucu

SEQ ID NO: 275974 - RNA, 19 nt, Homo sapiens
ucccagcuauuccuacucu

SEQ ID NO: 275975 - RNA, 14 nt, Homo sapiens
ucccagcucacugc

SEQ ID NO: 275976 - RNA, 9 nt, Homo sapiens
ucccagugc

SEQ ID NO: 275977 - RNA, 16 nt, Homo sapiens
ucccaguggagccaua

SEQ ID NO: 275978 - RNA, 15 nt, Homo sapiens
ucccaucacuucccu

SEQ ID NO: 275979 - RNA, 22 nt, Homo sapiens
ucccaucacuucccuacaugga

SEQ ID NO: 275980 - RNA, 16 nt, Homo sapiens
ucccaucucacacaug

SEQ ID NO: 275981 - RNA, 15 nt, Homo sapiens
ucccaucugugaaag

SEQ ID NO: 275982 - RNA, 23 nt, Homo sapiens
ucccaugacuccuggaucuaugu

SEQ ID NO: 275983 - RNA, 15 nt, Homo sapiens
ucccauguugucaau

SEQ ID NO: 275984 - RNA, 16 nt, Homo sapiens
ucccauguugucaaua

SEQ ID NO: 275985 - RNA, 12 nt, Homo sapiens
ucccauucuugg

SEQ ID NO: 275986 - RNA, 12 nt, Homo sapiens
ucccauuggcaa

SEQ ID NO: 275987 - RNA, 14 nt, Homo sapiens
ucccauuggcaaaa

SEQ ID NO: 275988 - RNA, 16 nt, Homo sapiens
ucccauuggcaaaaga

SEQ ID NO: 275989 - RNA, 14 nt, Homo sapiens
uccccaauucaugu

SEQ ID NO: 275990 - RNA, 12 nt, Homo sapiens
uccccacugcuc

SEQ ID NO: 275991 - RNA, 15 nt, Homo sapiens
uccccacugcucauu

SEQ ID NO: 275992 - RNA, 15 nt, Homo sapiens
uccccagcugggaag

SEQ ID NO: 275993 - RNA, 23 nt, Homo sapiens
uccccagcugggaagaacaugcu

SEQ ID NO: 275994 - RNA, 17 nt, Homo sapiens
uccccauaaucacugac

SEQ ID NO: 275995 - RNA, 18 nt, Homo sapiens
uccccauaaucacugacc

SEQ ID NO: 275996 - RNA, 12 nt, Homo sapiens
ucccccacugau

SEQ ID NO: 275997 - RNA, 17 nt, Homo sapiens
ucccccagccucaaguc

SEQ ID NO: 275998 - RNA, 18 nt, Homo sapiens
ucccccugacaacacuca

SEQ ID NO: 275999 - RNA, 12 nt, Homo sapiens
uccccucuagga

SEQ ID NO: 276000 - RNA, 18 nt, Homo sapiens
uccccucuccuccacauu

SEQ ID NO: 276001 - RNA, 17 nt, Homo sapiens
uccccugacagggccag

SEQ ID NO: 276002 - RNA, 22 nt, Homo sapiens
uccccugacagggccagugcag

SEQ ID NO: 276003 - RNA, 19 nt, Homo sapiens
uccccugaugggcccugac

SEQ ID NO: 276004 - RNA, 20 nt, Homo sapiens
uccccuggggagucugggca

SEQ ID NO: 276005 - RNA, 21 nt, Homo sapiens
uccccuggggagucugggcac

SEQ ID NO: 276006 - RNA, 22 nt, Homo sapiens
uccccuggggagucugggcaca

SEQ ID NO: 276007 - RNA, 23 nt, Homo sapiens
uccccugucacgugugggcaaug

SEQ ID NO: 276008 - RNA, 14 nt, Homo sapiens
uccccuucacuccc

SEQ ID NO: 276009 - RNA, 22 nt, Homo sapiens
uccccuugcccagggcucagcc

SEQ ID NO: 276010 - RNA, 20 nt, Homo sapiens
ucccgggacaccuaggcuag

SEQ ID NO: 276011 - RNA, 18 nt, Homo sapiens
ucccggggcuccacugaa

SEQ ID NO: 276012 - RNA, 13 nt, Homo sapiens
ucccucaaaacaa

SEQ ID NO: 276013 - RNA, 18 nt, Homo sapiens
ucccucacuguugaauuu

SEQ ID NO: 276014 - RNA, 15 nt, Homo sapiens
ucccucaucuguccc

SEQ ID NO: 276015 - RNA, 16 nt, Homo sapiens
ucccuccccugccauu

SEQ ID NO: 276016 - RNA, 17 nt, Homo sapiens
ucccucccugugccaga

SEQ ID NO: 276017 - RNA, 20 nt, Homo sapiens
ucccugaagagaagggcagg

SEQ ID NO: 276018 - RNA, 15 nt, Homo sapiens
ucccugccaauggac

SEQ ID NO: 276019 - RNA, 19 nt, Homo sapiens
ucccugugccagaccucaa

SEQ ID NO: 276020 - RNA, 20 nt, Homo sapiens
ucccuguguacccuccaugu

SEQ ID NO: 276021 - RNA, 16 nt, Homo sapiens
ucccugugucauuuca

SEQ ID NO: 276022 - RNA, 22 nt, Homo sapiens
ucccuucuuuuuguucuucauc

SEQ ID NO: 276023 - RNA, 13 nt, Homo sapiens
ucccuuggacauu

SEQ ID NO: 276024 - RNA, 15 nt, Homo sapiens
ucccuuucacacugu

SEQ ID NO: 276025 - RNA, 22 nt, Homo sapiens
ucccuuucugugugaagaucac

SEQ ID NO: 276026 - RNA, 13 nt, Homo sapiens
ucccuuucuuccc

SEQ ID NO: 276027 - RNA, 19 nt, Homo sapiens
ucccuuugacgccauccca

SEQ ID NO: 276028 - RNA, 17 nt, Homo sapiens
ucccuuuuuauauccca

SEQ ID NO: 276029 - RNA, 19 nt, Homo sapiens
uccgagaggugggccaguc

SEQ ID NO: 276030 - RNA, 14 nt, Homo sapiens
uccgcccugccacu

SEQ ID NO: 276031 - RNA, 15 nt, Homo sapiens
uccggaauccugucc

SEQ ID NO: 276032 - RNA, 18 nt, Homo sapiens
uccggaauccuguccuca

SEQ ID NO: 276033 - RNA, 19 nt, Homo sapiens
uccggccuccugucccuca

SEQ ID NO: 276034 - RNA, 19 nt, Homo sapiens
uccuaaaguagacuucauu

SEQ ID NO: 276035 - RNA, 20 nt, Homo sapiens
uccuaacaaguagcacccug

SEQ ID NO: 276036 - RNA, 19 nt, Homo sapiens
uccuaagccaugggagaca

SEQ ID NO: 276037 - RNA, 22 nt, Homo sapiens
uccuaagccaugggagacacug

SEQ ID NO: 276038 - RNA, 14 nt, Homo sapiens
uccuaauacuguca

SEQ ID NO: 276039 - RNA, 18 nt, Homo sapiens
uccuaaugcuugcugcug

SEQ ID NO: 276040 - RNA, 14 nt, Homo sapiens
uccuacaagcuaaa

SEQ ID NO: 276041 - RNA, 22 nt, Homo sapiens
uccuacccccugugccuuguca

SEQ ID NO: 276042 - RNA, 18 nt, Homo sapiens
uccuacuguaugugggaa

SEQ ID NO: 276043 - RNA, 20 nt, Homo sapiens
uccuagaaacugacacaugc

SEQ ID NO: 276044 - RNA, 13 nt, Homo sapiens
uccuagcacuuug

SEQ ID NO: 276045 - RNA, 18 nt, Homo sapiens
uccuagcugugugaauac

SEQ ID NO: 276046 - RNA, 18 nt, Homo sapiens
uccuaggcauuugcugaa

SEQ ID NO: 276047 - RNA, 17 nt, Homo sapiens
uccuagucauucuuccc

SEQ ID NO: 276048 - RNA, 17 nt, Homo sapiens
uccuaugcuguucacug

SEQ ID NO: 276049 - RNA, 14 nt, Homo sapiens
uccuauuugcacac

SEQ ID NO: 276050 - RNA, 14 nt, Homo sapiens
uccucaaagggaga

SEQ ID NO: 276051 - RNA, 22 nt, Homo sapiens
uccucaaagggagagagugcua

SEQ ID NO: 276052 - RNA, 16 nt, Homo sapiens
uccucacuguauccag

SEQ ID NO: 276053 - RNA, 18 nt, Homo sapiens
ucagcuggaucuccauuc

SEQ ID NO: 276054 - RNA, 21 nt, Homo sapiens
ucagcuggaucuccauucucu

SEQ ID NO: 276055 - RNA, 13 nt, Homo sapiens
ucaggaacagucu

SEQ ID NO: 276056 - RNA, 14 nt, Homo sapiens
ucaggaacagucuu

SEQ ID NO: 276057 - RNA, 20 nt, Homo sapiens
ucaggaaggaugagcauuua

SEQ ID NO: 276058 - RNA, 21 nt, Homo sapiens
ucaggaaggaugagcauuuag

SEQ ID NO: 276059 - RNA, 18 nt, Homo sapiens
ucaggaguucgagaccag

SEQ ID NO: 276060 - RNA, 20 nt, Homo sapiens
ucaggaugauacacuaugaa

SEQ ID NO: 276061 - RNA, 16 nt, Homo sapiens
ucaggcagaucucagc

SEQ ID NO: 276062 - RNA, 23 nt, Homo sapiens
ucaggccacauggcuaaagaagg

SEQ ID NO: 276063 - RNA, 15 nt, Homo sapiens
ucagggaagcccuga

SEQ ID NO: 276064 - RNA, 18 nt, Homo sapiens
ucagggcagccugccugg

SEQ ID NO: 276065 - RNA, 18 nt, Homo sapiens
ucagggcugagaggagaa

SEQ ID NO: 276066 - RNA, 19 nt, Homo sapiens
ucagggggccaggugcaca

SEQ ID NO: 276067 - RNA, 13 nt, Homo sapiens
ucagggucccugg

SEQ ID NO: 276068 - RNA, 16 nt, Homo sapiens
ucagguggggcagcuu

SEQ ID NO: 276069 - RNA, 11 nt, Homo sapiens
ucaguaugugg

SEQ ID NO: 276070 - RNA, 12 nt, Homo sapiens
ucaguaugugga

SEQ ID NO: 276071 - RNA, 20 nt, Homo sapiens
ucagucaauaaauuugcaaa

SEQ ID NO: 276072 - RNA, 19 nt, Homo sapiens
ucagucucugagcagugaa

SEQ ID NO: 276073 - RNA, 21 nt, Homo sapiens
ucagucugcuuauccuuccac

SEQ ID NO: 276074 - RNA, 17 nt, Homo sapiens
ucagucuuuuccaugaa

SEQ ID NO: 276075 - RNA, 20 nt, Homo sapiens
ucagucuuuuccaugaacuu

SEQ ID NO: 276076 - RNA, 21 nt, Homo sapiens
ucagugcucccucacauguca

SEQ ID NO: 276077 - RNA, 11 nt, Homo sapiens
ucagugcugcc

SEQ ID NO: 276078 - RNA, 21 nt, Homo sapiens
ucagugcuucgcagauguccu

SEQ ID NO: 276079 - RNA, 18 nt, Homo sapiens
ucagugcuuugcccuuga

SEQ ID NO: 276080 - RNA, 14 nt, Homo sapiens
ucaguguacaugga

SEQ ID NO: 276081 - RNA, 23 nt, Homo sapiens
ucaguuguuauuuauugaaauga

SEQ ID NO: 276082 - RNA, 18 nt, Homo sapiens
ucauaaaagucacuuuau

SEQ ID NO: 276083 - RNA, 15 nt, Homo sapiens
ucauaaucacaaccc

SEQ ID NO: 276084 - RNA, 16 nt, Homo sapiens
ucauaaucucuuucca

SEQ ID NO: 276085 - RNA, 13 nt, Homo sapiens
ucauaaugacuua

SEQ ID NO: 276086 - RNA, 22 nt, Homo sapiens
ucauaaugacuuaagcacacuu

SEQ ID NO: 276087 - RNA, 18 nt, Homo sapiens
ucauaauuucuucacuca

SEQ ID NO: 276088 - RNA, 19 nt, Homo sapiens
ucauaauuucuucacucaa

SEQ ID NO: 276089 - RNA, 14 nt, Homo sapiens
ucauacucaccuca

SEQ ID NO: 276090 - RNA, 16 nt, Homo sapiens
ucauacucaccucacc

SEQ ID NO: 276091 - RNA, 19 nt, Homo sapiens
ucauacucaccucacccca

SEQ ID NO: 276092 - RNA, 12 nt, Homo sapiens
ucauacuguaac

SEQ ID NO: 276093 - RNA, 22 nt, Homo sapiens
ucauaguggcuuaaaacaacac

SEQ ID NO: 276094 - RNA, 21 nt, Homo sapiens
ucauaugauugugcacauacu

SEQ ID NO: 276095 - RNA, 16 nt, Homo sapiens
uccuuagaaguggaag

SEQ ID NO: 276096 - RNA, 22 nt, Homo sapiens
uccuuagccuuugucccagaau

SEQ ID NO: 276097 - RNA, 18 nt, Homo sapiens
uccuuagcuuagaccuca

SEQ ID NO: 276098 - RNA, 18 nt, Homo sapiens
uccuucaagccuagcccu

SEQ ID NO: 276099 - RNA, 19 nt, Homo sapiens
uccuucacagaugggugcu

SEQ ID NO: 276100 - RNA, 12 nt, Homo sapiens
uccuucacuuac

SEQ ID NO: 276101 - RNA, 18 nt, Homo sapiens
uccuucaugaucaucaca

SEQ ID NO: 276102 - RNA, 15 nt, Homo sapiens
uccuucauucaaccc

SEQ ID NO: 276103 - RNA, 17 nt, Homo sapiens
uccuucauucaacccac

SEQ ID NO: 276104 - RNA, 16 nt, Homo sapiens
uccuucuuauguuucu

SEQ ID NO: 276105 - RNA, 16 nt, Homo sapiens
uccuugccucugcucu

SEQ ID NO: 276106 - RNA, 20 nt, Homo sapiens
uccuuggcuucuuuacuuag

SEQ ID NO: 276107 - RNA, 16 nt, Homo sapiens
uccuuggcuuuuacug

SEQ ID NO: 276108 - RNA, 17 nt, Homo sapiens
uccuuguaaagacugua

SEQ ID NO: 276109 - RNA, 20 nt, Homo sapiens
uccuuguauuuaaauauuaa

SEQ ID NO: 276110 - RNA, 17 nt, Homo sapiens
uccuuuagcgcccaguu

SEQ ID NO: 276111 - RNA, 14 nt, Homo sapiens
uccuuucaccacau

SEQ ID NO: 276112 - RNA, 15 nt, Homo sapiens
uccuuuccauuguag

SEQ ID NO: 276113 - RNA, 16 nt, Homo sapiens
uccuuuucccuauuuc

SEQ ID NO: 276114 - RNA, 22 nt, Homo sapiens
uccuuuuuuuuuuauccuaguc

SEQ ID NO: 276115 - RNA, 15 nt, Homo sapiens
ucgaacaauucauau

SEQ ID NO: 276116 - RNA, 17 nt, Homo sapiens
ucgaugcagugcuucca

SEQ ID NO: 276117 - RNA, 20 nt, Homo sapiens
ucgcaguguucaaggccauc

SEQ ID NO: 276118 - RNA, 16 nt, Homo sapiens
ucgccaaggcucacau

SEQ ID NO: 276119 - RNA, 13 nt, Homo sapiens
ucgcugugccaca

SEQ ID NO: 276120 - RNA, 23 nt, Homo sapiens
ucggcgccuuaaggauguucuag

SEQ ID NO: 276121 - RNA, 21 nt, Homo sapiens
ucgguauccccccaucuugcu

SEQ ID NO: 276122 - RNA, 14 nt, Homo sapiens
ucgguccuggugcc

SEQ ID NO: 276123 - RNA, 13 nt, Homo sapiens
ucguacuuucaca

SEQ ID NO: 276124 - RNA, 18 nt, Homo sapiens
ucguacuuucacaucucu

SEQ ID NO: 276125 - RNA, 15 nt, Homo sapiens
ucgugacaacacuug

SEQ ID NO: 276126 - RNA, 19 nt, Homo sapiens
ucgugguaggacuguagaa

SEQ ID NO: 276127 - RNA, 15 nt, Homo sapiens
ucuaaaaacauuugu

SEQ ID NO: 276128 - RNA, 20 nt, Homo sapiens
ucuaaagauacagugucuga

SEQ ID NO: 276129 - RNA, 20 nt, Homo sapiens
ucuaaagauggaaaaaccac

SEQ ID NO: 276130 - RNA, 22 nt, Homo sapiens
ucuaaagauggaaaaaccaccc

SEQ ID NO: 276131 - RNA, 13 nt, Homo sapiens
ucuaaagcugcca

SEQ ID NO: 276132 - RNA, 18 nt, Homo sapiens
ucuaaaggcuaccuuugu

SEQ ID NO: 276133 - RNA, 16 nt, Homo sapiens
ucuaaaguagcuuucu

SEQ ID NO: 276134 - RNA, 18 nt, Homo sapiens
ucuaacagcccuccucug

SEQ ID NO: 276135 - RNA, 23 nt, Homo sapiens
ucuaaccaagaggcugguuuugg

SEQ ID NO: 276136 - RNA, 20 nt, Homo sapiens
ucuaagagaacaaugugcua

SEQ ID NO: 276137 - RNA, 20 nt, Homo sapiens
ucuaagccuucugguuuuau

SEQ ID NO: 276138 - RNA, 14 nt, Homo sapiens
ucuaagggaccuca

SEQ ID NO: 276139 - RNA, 14 nt, Homo sapiens
ucuaaguaaauaca

SEQ ID NO: 276140 - RNA, 20 nt, Homo sapiens
ucuaauaaaaaacaccuucu

SEQ ID NO: 276141 - RNA, 17 nt, Homo sapiens
ucuacacucacaaucau

SEQ ID NO: 276142 - RNA, 19 nt, Homo sapiens
ucuacagagcuucccugac

SEQ ID NO: 276143 - RNA, 15 nt, Homo sapiens
ucuacccaaaggaua

SEQ ID NO: 276144 - RNA, 13 nt, Homo sapiens
ucuacccaggugc

SEQ ID NO: 276145 - RNA, 15 nt, Homo sapiens
ucuacccuggcacua

SEQ ID NO: 276146 - RNA, 14 nt, Homo sapiens
ucuacgccagggga

SEQ ID NO: 276147 - RNA, 15 nt, Homo sapiens
ucuacuaacaaucag

SEQ ID NO: 276148 - RNA, 21 nt, Homo sapiens
ucuacuaacaaucagcuccuu

SEQ ID NO: 276149 - RNA, 16 nt, Homo sapiens
ucuacugaggugcuau

SEQ ID NO: 276150 - RNA, 23 nt, Homo sapiens
ucuacuuugagugcugucuccau

SEQ ID NO: 276151 - RNA, 13 nt, Homo sapiens
ucuagaacuugac

SEQ ID NO: 276152 - RNA, 15 nt, Homo sapiens
ucuagaagacuguca

SEQ ID NO: 276153 - RNA, 17 nt, Homo sapiens
ucuagcauggcugccaa

SEQ ID NO: 276154 - RNA, 15 nt, Homo sapiens
ucuaggaacauacuu

SEQ ID NO: 276155 - RNA, 22 nt, Homo sapiens
ucuagguaggggcccacuucac

SEQ ID NO: 276156 - RNA, 14 nt, Homo sapiens
ucuauaaaacacau

SEQ ID NO: 276157 - RNA, 18 nt, Homo sapiens
ucuauaaaacacaucauc

SEQ ID NO: 276158 - RNA, 14 nt, Homo sapiens
ucuauaauuuaccu

SEQ ID NO: 276159 - RNA, 15 nt, Homo sapiens
ucuauauccauaacu

SEQ ID NO: 276160 - RNA, 14 nt, Homo sapiens
ucuaugacacaugc

SEQ ID NO: 276161 - RNA, 15 nt, Homo sapiens
ucuaugacacaugca

SEQ ID NO: 276162 - RNA, 17 nt, Homo sapiens
ucuaugaucuugagggc

SEQ ID NO: 276163 - RNA, 16 nt, Homo sapiens
ucuauggcacccaugc

SEQ ID NO: 276164 - RNA, 18 nt, Homo sapiens
ucuauggcacccaugcac

SEQ ID NO: 276165 - RNA, 20 nt, Homo sapiens
ucuauggcacccaugcaccu

SEQ ID NO: 276166 - RNA, 14 nt, Homo sapiens
ucuauguguaugca

SEQ ID NO: 276167 - RNA, 17 nt, Homo sapiens
ucuauguguaugcagaa

SEQ ID NO: 276168 - RNA, 11 nt, Homo sapiens
ucuauguuaau

SEQ ID NO: 276169 - RNA, 13 nt, Homo sapiens
ucuauuaucucaa

SEQ ID NO: 276170 - RNA, 13 nt, Homo sapiens
ucuauuuaugcaa

SEQ ID NO: 276171 - RNA, 16 nt, Homo sapiens
ucucaaacuacuggca

SEQ ID NO: 276172 - RNA, 20 nt, Homo sapiens
ucucaaacuccugaccucaa

SEQ ID NO: 276173 - RNA, 20 nt, Homo sapiens
ucucaaacucuugaccucag

SEQ ID NO: 276174 - RNA, 16 nt, Homo sapiens
ucucaaccaccuuuca

SEQ ID NO: 276175 - RNA, 21 nt, Homo sapiens
ucucaaccaccuuucagauaa

SEQ ID NO: 276176 - RNA, 17 nt, Homo sapiens
ucucaacugagugagca

SEQ ID NO: 276177 - RNA, 18 nt, Homo sapiens
ucucaaguuaucagggua

SEQ ID NO: 276178 - RNA, 18 nt, Homo sapiens
ucucacacaugagcauca

SEQ ID NO: 276179 - RNA, 13 nt, Homo sapiens
ucucacagcaaca

SEQ ID NO: 276180 - RNA, 23 nt, Homo sapiens
ucucacauguggcucccccugaa

SEQ ID NO: 276181 - RNA, 18 nt, Homo sapiens
ucucacuauguugcccag

SEQ ID NO: 276182 - RNA, 20 nt, Homo sapiens
ucucacuauguugcccaggc

SEQ ID NO: 276183 - RNA, 17 nt, Homo sapiens
ucucacuguguugccca

SEQ ID NO: 276184 - RNA, 18 nt, Homo sapiens
ucucacuguguugcccag

SEQ ID NO: 276185 - RNA, 16 nt, Homo sapiens
ucucacuguugcccag

SEQ ID NO: 276186 - RNA, 18 nt, Homo sapiens
ucucacuguugcccaggc

SEQ ID NO: 276187 - RNA, 14 nt, Homo sapiens
ucucacuugucuca

SEQ ID NO: 276188 - RNA, 14 nt, Homo sapiens
ucucagccucugaa

SEQ ID NO: 276189 - RNA, 21 nt, Homo sapiens
ucucagcuggaucuccauucu

SEQ ID NO: 276190 - RNA, 19 nt, Homo sapiens
ucucaggaccaaagcuuuc

SEQ ID NO: 276191 - RNA, 20 nt, Homo sapiens
ucucaggaccaaagcuuuca

SEQ ID NO: 276192 - RNA, 13 nt, Homo sapiens
ucucaggccaaac

SEQ ID NO: 276193 - RNA, 12 nt, Homo sapiens
ucucaggccagc

SEQ ID NO: 276194 - RNA, 18 nt, Homo sapiens
ucucaggccugacucuca

SEQ ID NO: 276195 - RNA, 20 nt, Homo sapiens
ucucaguaccccauggagcu

SEQ ID NO: 276196 - RNA, 13 nt, Homo sapiens
ucucauaccucug

SEQ ID NO: 276197 - RNA, 18 nt, Homo sapiens
ucucauaccucugggaaa

SEQ ID NO: 276198 - RNA, 17 nt, Homo sapiens
ucucauacucaccucac

SEQ ID NO: 276199 - RNA, 12 nt, Homo sapiens
ucucauaugauu

SEQ ID NO: 276200 - RNA, 22 nt, Homo sapiens
ucucauaugauugugcacauac

SEQ ID NO: 276201 - RNA, 17 nt, Homo sapiens
ucucaugauagaaggcu

SEQ ID NO: 276202 - RNA, 10 nt, Homo sapiens
ucucauuucu

SEQ ID NO: 276203 - RNA, 17 nt, Homo sapiens
ucuccaccugccaggga

SEQ ID NO: 276204 - RNA, 18 nt, Homo sapiens
ucuccacucaugugacuc

SEQ ID NO: 276205 - RNA, 21 nt, Homo sapiens
ucuccacugucauaaucucuu

SEQ ID NO: 276206 - RNA, 19 nt, Homo sapiens
ucuccacuucuuguucccc

SEQ ID NO: 276207 - RNA, 20 nt, Homo sapiens
ucuccagaaagcucaucuca

SEQ ID NO: 276208 - RNA, 19 nt, Homo sapiens
ucuccagggacauguggaa

SEQ ID NO: 276209 - RNA, 16 nt, Homo sapiens
ucccaucccagcugaa

SEQ ID NO: 276210 - RNA, 10 nt, Homo sapiens
ucccaugagc

SEQ ID NO: 276211 - RNA, 13 nt, Homo sapiens
ucccaugcaacac

SEQ ID NO: 276212 - RNA, 13 nt, Homo sapiens
ucccauguuguca

SEQ ID NO: 276213 - RNA, 17 nt, Homo sapiens
ucccauuggcaaaagag

SEQ ID NO: 276214 - RNA, 14 nt, Homo sapiens
ucccauuugcuccu

SEQ ID NO: 276215 - RNA, 16 nt, Homo sapiens
uccccaagcaguguga

SEQ ID NO: 276216 - RNA, 12 nt, Homo sapiens
uccccaauucau

SEQ ID NO: 276217 - RNA, 21 nt, Homo sapiens
uccccauccccagcugggaag

SEQ ID NO: 276218 - RNA, 17 nt, Homo sapiens
uccccauuugcuuacuu

SEQ ID NO: 276219 - RNA, 17 nt, Homo sapiens
ucccccagcagccuggg

SEQ ID NO: 276220 - RNA, 14 nt, Homo sapiens
ucccccuuccaugg

SEQ ID NO: 276221 - RNA, 13 nt, Homo sapiens
uccccucaaccca

SEQ ID NO: 276222 - RNA, 13 nt, Homo sapiens
uccccucccucag

SEQ ID NO: 276223 - RNA, 20 nt, Homo sapiens
uccccugacagggccagugc

SEQ ID NO: 276224 - RNA, 20 nt, Homo sapiens
uccccugaugggcccugacu

SEQ ID NO: 276225 - RNA, 15 nt, Homo sapiens
uccccuuccacugag

SEQ ID NO: 276226 - RNA, 22 nt, Homo sapiens
uccccuuuuauuaauacauuca

SEQ ID NO: 276227 - RNA, 20 nt, Homo sapiens
ucccuacauggaguauaugu

SEQ ID NO: 276228 - RNA, 22 nt, Homo sapiens
ucccuauuuuuuuucuguuaua

SEQ ID NO: 276229 - RNA, 22 nt, Homo sapiens
ucccucaaaacaaucuugucau

SEQ ID NO: 276230 - RNA, 11 nt, Homo sapiens
ucccucaggcc

SEQ ID NO: 276231 - RNA, 19 nt, Homo sapiens
ucccucaggccgaaggagg

SEQ ID NO: 276232 - RNA, 14 nt, Homo sapiens
ucccucauccauag

SEQ ID NO: 276233 - RNA, 13 nt, Homo sapiens
ucccucauccuca

SEQ ID NO: 276234 - RNA, 23 nt, Homo sapiens
ucccucccagaggagccaccagu

SEQ ID NO: 276235 - RNA, 14 nt, Homo sapiens
ucccuccugcuuug

SEQ ID NO: 276236 - RNA, 18 nt, Homo sapiens
ucccugaagagaagggca

SEQ ID NO: 276237 - RNA, 23 nt, Homo sapiens
ucccugaaguaagcaaagacuuu

SEQ ID NO: 276238 - RNA, 14 nt, Homo sapiens
ucccugcaaccuga

SEQ ID NO: 276239 - RNA, 12 nt, Homo sapiens
ucccuggcuuga

SEQ ID NO: 276240 - RNA, 14 nt, Homo sapiens
ucccuguaaccucu

SEQ ID NO: 276241 - RNA, 17 nt, Homo sapiens
ucucuauuucuggauga

SEQ ID NO: 276242 - RNA, 13 nt, Homo sapiens
ucucucaugacca

SEQ ID NO: 276243 - RNA, 17 nt, Homo sapiens
ucucuccagcugacuaa

SEQ ID NO: 276244 - RNA, 14 nt, Homo sapiens
ucucucgugauuga

SEQ ID NO: 276245 - RNA, 15 nt, Homo sapiens
ucucucuuacugcuu

SEQ ID NO: 276246 - RNA, 16 nt, Homo sapiens
ucucucuucucuccag

SEQ ID NO: 276247 - RNA, 14 nt, Homo sapiens
ucucugagcaguga

SEQ ID NO: 276248 - RNA, 15 nt, Homo sapiens
ucucugagcagugaa

SEQ ID NO: 276249 - RNA, 14 nt, Homo sapiens
ucucugcuaucuag

SEQ ID NO: 276250 - RNA, 12 nt, Homo sapiens
ucucugcucugc

SEQ ID NO: 276251 - RNA, 14 nt, Homo sapiens
ucucugugccuucg

SEQ ID NO: 276252 - RNA, 19 nt, Homo sapiens
ucucuucaaauuuagcaac

SEQ ID NO: 276253 - RNA, 15 nt, Homo sapiens
ucucuuccuacccuu

SEQ ID NO: 276254 - RNA, 18 nt, Homo sapiens
ucucuucugccuuuauga

SEQ ID NO: 276255 - RNA, 18 nt, Homo sapiens
ucucuugcacucaaagcu

SEQ ID NO: 276256 - RNA, 15 nt, Homo sapiens
ucucuuuaccuccua

SEQ ID NO: 276257 - RNA, 20 nt, Homo sapiens
ucugaaaaaguauccugcuu

SEQ ID NO: 276258 - RNA, 17 nt, Homo sapiens
ucugaagucacugcaca

SEQ ID NO: 276259 - RNA, 13 nt, Homo sapiens
ucugacacacagc

SEQ ID NO: 276260 - RNA, 13 nt, Homo sapiens
ucugaccaaaaca

SEQ ID NO: 276261 - RNA, 13 nt, Homo sapiens
ucugaccucuaua

SEQ ID NO: 276262 - RNA, 20 nt, Homo sapiens
ucugacuauaaccuuguucc

SEQ ID NO: 276263 - RNA, 17 nt, Homo sapiens
ucugacucagggcuccu

SEQ ID NO: 276264 - RNA, 13 nt, Homo sapiens
ucugagcugugca

SEQ ID NO: 276265 - RNA, 21 nt, Homo sapiens
ucugauaaaagauggccauau

SEQ ID NO: 276266 - RNA, 22 nt, Homo sapiens
ucugauaugcaguuuuccuuaa

SEQ ID NO: 276267 - RNA, 22 nt, Homo sapiens
ucugaucauccacugugccaug

SEQ ID NO: 276268 - RNA, 22 nt, Homo sapiens
ucugauccuaguuccaccauca

SEQ ID NO: 276269 - RNA, 16 nt, Homo sapiens
ucugaucugaugcaag

SEQ ID NO: 276270 - RNA, 13 nt, Homo sapiens
ucugaugcaagca

SEQ ID NO: 276271 - RNA, 18 nt, Homo sapiens
ucugcagguugaagccau

SEQ ID NO: 276272 - RNA, 21 nt, Homo sapiens
ucugcauuaucugaggucaca

SEQ ID NO: 276273 - RNA, 16 nt, Homo sapiens
ucugcauucucuaguc

SEQ ID NO: 276274 - RNA, 13 nt, Homo sapiens
ucugccagcaucu

SEQ ID NO: 276275 - RNA, 22 nt, Homo sapiens
ucugccagcaucugcagccacu

SEQ ID NO: 276276 - RNA, 18 nt, Homo sapiens
ucugccagccagcagcca

SEQ ID NO: 276277 - RNA, 17 nt, Homo sapiens
ucugcccgggagcucag

SEQ ID NO: 276278 - RNA, 14 nt, Homo sapiens
ucugccucugacac

SEQ ID NO: 276279 - RNA, 19 nt, Homo sapiens
ucugccucugacacacagc

SEQ ID NO: 276280 - RNA, 17 nt, Homo sapiens
ucugccugaagucacac

SEQ ID NO: 276281 - RNA, 16 nt, Homo sapiens
ucugccuuugugcucu

SEQ ID NO: 276282 - RNA, 20 nt, Homo sapiens
ucugcgugucaccugugcuu

SEQ ID NO: 276283 - RNA, 12 nt, Homo sapiens
ucugcuagggaa

SEQ ID NO: 276284 - RNA, 18 nt, Homo sapiens
ucugcucaucauucucug

SEQ ID NO: 276285 - RNA, 18 nt, Homo sapiens
ucugcugacagacacagg

SEQ ID NO: 276286 - RNA, 15 nt, Homo sapiens
ucugcuguugauucc

SEQ ID NO: 276287 - RNA, 16 nt, Homo sapiens
ucugcuguugauucca

SEQ ID NO: 276288 - RNA, 21 nt, Homo sapiens
ucuggaaauuuuuacuuuaaa

SEQ ID NO: 276289 - RNA, 11 nt, Homo sapiens
ucuggacacag

SEQ ID NO: 276290 - RNA, 18 nt, Homo sapiens
ucuggagguacgaaaaga

SEQ ID NO: 276291 - RNA, 16 nt, Homo sapiens
ucuggaugcugugaag

SEQ ID NO: 276292 - RNA, 12 nt, Homo sapiens
ucuggauuucau

SEQ ID NO: 276293 - RNA, 20 nt, Homo sapiens
ucuggauuucauacuguaac

SEQ ID NO: 276294 - RNA, 17 nt, Homo sapiens
ucuggcacucugagguc

SEQ ID NO: 276295 - RNA, 11 nt, Homo sapiens
ucuggcagcuc

SEQ ID NO: 276296 - RNA, 12 nt, Homo sapiens
ucuggcagcuca

SEQ ID NO: 276297 - RNA, 20 nt, Homo sapiens
ucuggcauuacaauugcagu

SEQ ID NO: 276298 - RNA, 22 nt, Homo sapiens
ucuggcauuacaauugcaguuu

SEQ ID NO: 276299 - RNA, 17 nt, Homo sapiens
ucuggcuaugcauuuga

SEQ ID NO: 276300 - RNA, 18 nt, Homo sapiens
ucugggccaagucaaaga

SEQ ID NO: 276301 - RNA, 23 nt, Homo sapiens
ucugggcuacgguuccauguuca

SEQ ID NO: 276302 - RNA, 13 nt, Homo sapiens
ucuggugugaacu

SEQ ID NO: 276303 - RNA, 18 nt, Homo sapiens
ucuguacgucugacaggc

SEQ ID NO: 276304 - RNA, 16 nt, Homo sapiens
ucuguauuccuagaaa

SEQ ID NO: 276305 - RNA, 14 nt, Homo sapiens
ucuguccuggucag

SEQ ID NO: 276306 - RNA, 23 nt, Homo sapiens
ucugucuggcauuacaauugcag

SEQ ID NO: 276307 - RNA, 21 nt, Homo sapiens
ucugugaggggcucucucaug

SEQ ID NO: 276308 - RNA, 17 nt, Homo sapiens
ucugugaugacauuccc

SEQ ID NO: 276309 - RNA, 22 nt, Homo sapiens
ucugugcaaauccuugauacug

SEQ ID NO: 276310 - RNA, 22 nt, Homo sapiens
ucugugcccgagguuccuguca

SEQ ID NO: 276311 - RNA, 20 nt, Homo sapiens
ucuguggucuaaacaaaaaa

SEQ ID NO: 276312 - RNA, 21 nt, Homo sapiens
ucuguguuuguacugugcagu

SEQ ID NO: 276313 - RNA, 23 nt, Homo sapiens
ucuguguuuguacugugcaguuu

SEQ ID NO: 276314 - RNA, 20 nt, Homo sapiens
ucuguuacacaaagaaccac

SEQ ID NO: 276315 - RNA, 20 nt, Homo sapiens
ucuguuacccgcagauccug

SEQ ID NO: 276316 - RNA, 17 nt, Homo sapiens
ucuguuccccauggcca

SEQ ID NO: 276317 - RNA, 14 nt, Homo sapiens
ucuguuccugucca

SEQ ID NO: 276318 - RNA, 15 nt, Homo sapiens
ucuguucuuccauca

SEQ ID NO: 276319 - RNA, 22 nt, Homo sapiens
ucuguuggcaggcuggccaguc

SEQ ID NO: 276320 - RNA, 20 nt, Homo sapiens
ucuguuggccagugugacaa

SEQ ID NO: 276321 - RNA, 17 nt, Homo sapiens
ucuuaaaauagccauaa

SEQ ID NO: 276322 - RNA, 21 nt, Homo sapiens
ucuuaaacuaaaugugcaaua

SEQ ID NO: 276323 - RNA, 14 nt, Homo sapiens
ucuuaaaguugaau

SEQ ID NO: 276324 - RNA, 14 nt, Homo sapiens
ucuuaaccuaccug

SEQ ID NO: 276325 - RNA, 16 nt, Homo sapiens
ucuuaacuucuugcuu

SEQ ID NO: 276326 - RNA, 13 nt, Homo sapiens
ucuuaagacguga

SEQ ID NO: 276327 - RNA, 23 nt, Homo sapiens
ucuuaagacgugauuuugcugua

SEQ ID NO: 276328 - RNA, 22 nt, Homo sapiens
ucuuaaguuguggagagugcaa

SEQ ID NO: 276329 - RNA, 22 nt, Homo sapiens
ucuuaauaagcccacauauaaa

SEQ ID NO: 276330 - RNA, 18 nt, Homo sapiens
ucuuaauauaacugccuu

SEQ ID NO: 276331 - RNA, 14 nt, Homo sapiens
ucuuaauucuuagc

SEQ ID NO: 276332 - RNA, 19 nt, Homo sapiens
ucuuacaaugcauucugag

SEQ ID NO: 276333 - RNA, 15 nt, Homo sapiens
ucuuacauuagcagu

SEQ ID NO: 276334 - RNA, 14 nt, Homo sapiens
ucuuacuugcccuu

SEQ ID NO: 276335 - RNA, 16 nt, Homo sapiens
ucuuagucgagccaag

SEQ ID NO: 276336 - RNA, 22 nt, Homo sapiens
ucuuaguguaugauuacuggcc

SEQ ID NO: 276337 - RNA, 14 nt, Homo sapiens
ucuuaguugcugua

SEQ ID NO: 276338 - RNA, 14 nt, Homo sapiens
ucuuauauugccau

SEQ ID NO: 276339 - RNA, 23 nt, Homo sapiens
ucuuauauugccauuucuuccac

SEQ ID NO: 276340 - RNA, 16 nt, Homo sapiens
ucuuauuuaaugaaag

SEQ ID NO: 276341 - RNA, 23 nt, Homo sapiens
ucuuauuuaaugaaagacuguac

SEQ ID NO: 276342 - RNA, 13 nt, Homo sapiens
ucuucaagcagau

SEQ ID NO: 276343 - RNA, 14 nt, Homo sapiens
ucuucaccauuugg

SEQ ID NO: 276344 - RNA, 15 nt, Homo sapiens
ucuucagggggccag

SEQ ID NO: 276345 - RNA, 16 nt, Homo sapiens
ucuucauaauuucuuc

SEQ ID NO: 276346 - RNA, 12 nt, Homo sapiens
ucuucauuaccu

SEQ ID NO: 276347 - RNA, 14 nt, Homo sapiens
ucuucauuaccuca

SEQ ID NO: 276348 - RNA, 15 nt, Homo sapiens
ucuucauuaccucag

SEQ ID NO: 276349 - RNA, 18 nt, Homo sapiens
ucuuccaaacaggcucag

SEQ ID NO: 276350 - RNA, 13 nt, Homo sapiens
ucuuccaucaccu

SEQ ID NO: 276351 - RNA, 17 nt, Homo sapiens
ucuuccauuugcaaggg

SEQ ID NO: 276352 - RNA, 14 nt, Homo sapiens
ucuuccccauaauc

SEQ ID NO: 276353 - RNA, 21 nt, Homo sapiens
ucuuccccauaaucacugacc

SEQ ID NO: 276354 - RNA, 14 nt, Homo sapiens
ucuuccucccugga

SEQ ID NO: 276355 - RNA, 16 nt, Homo sapiens
ucuuccucccuggaau

SEQ ID NO: 276356 - RNA, 16 nt, Homo sapiens
ucuuccugauuccuuu

SEQ ID NO: 276357 - RNA, 19 nt, Homo sapiens
ucuucuaguuaccacggca

SEQ ID NO: 276358 - RNA, 22 nt, Homo sapiens
ucuucuauggguuggacaaccu

SEQ ID NO: 276359 - RNA, 23 nt, Homo sapiens
ucuucuccaggcuguaucccaug

SEQ ID NO: 276360 - RNA, 13 nt, Homo sapiens
ucuucucuacucu

SEQ ID NO: 276361 - RNA, 14 nt, Homo sapiens
ucuucucuacucua

SEQ ID NO: 276362 - RNA, 19 nt, Homo sapiens
ucuucugccuuuaugagau

SEQ ID NO: 276363 - RNA, 13 nt, Homo sapiens
ucuugaagacuuu

SEQ ID NO: 276364 - RNA, 22 nt, Homo sapiens
ucuugaccucaggugauccacc

SEQ ID NO: 276365 - RNA, 14 nt, Homo sapiens
ucuacagaggccau

SEQ ID NO: 276366 - RNA, 21 nt, Homo sapiens
ucuacccaaaggauacuguaa

SEQ ID NO: 276367 - RNA, 10 nt, Homo sapiens
ucuaccccag

SEQ ID NO: 276368 - RNA, 20 nt, Homo sapiens
ucuaccucuuggcugccuug

SEQ ID NO: 276369 - RNA, 15 nt, Homo sapiens
ucuacugaggugcua

SEQ ID NO: 276370 - RNA, 20 nt, Homo sapiens
ucuacugucucaguuuacau

SEQ ID NO: 276371 - RNA, 20 nt, Homo sapiens
ucuagaaccaggcaacuugg

SEQ ID NO: 276372 - RNA, 16 nt, Homo sapiens
ucuagauacuguauca

SEQ ID NO: 276373 - RNA, 18 nt, Homo sapiens
ucuagcauggcugccaau

SEQ ID NO: 276374 - RNA, 16 nt, Homo sapiens
ucuagggaaaaaccag

SEQ ID NO: 276375 - RNA, 17 nt, Homo sapiens
ucuaguuaccacggcaa

SEQ ID NO: 276376 - RNA, 13 nt, Homo sapiens
ucuauaaaacaca

SEQ ID NO: 276377 - RNA, 17 nt, Homo sapiens
ucuauaauugccacuga

SEQ ID NO: 276378 - RNA, 17 nt, Homo sapiens
ucuaugaaauaucaugc

SEQ ID NO: 276379 - RNA, 19 nt, Homo sapiens
ucuaugaaauaucaugcuc

SEQ ID NO: 276380 - RNA, 16 nt, Homo sapiens
ucuaugacacaugcaa

SEQ ID NO: 276381 - RNA, 18 nt, Homo sapiens
ucuaugggacucaaugca

SEQ ID NO: 276382 - RNA, 23 nt, Homo sapiens
ucuaugggacucaaugcacugac

SEQ ID NO: 276383 - RNA, 19 nt, Homo sapiens
ucuauggguuggacaaccu

SEQ ID NO: 276384 - RNA, 22 nt, Homo sapiens
ucuauugcuggcaaagacagaa

SEQ ID NO: 276385 - RNA, 19 nt, Homo sapiens
ucuauuucuccuccauggg

SEQ ID NO: 276386 - RNA, 20 nt, Homo sapiens
ucuuucaggacucuaccuca

SEQ ID NO: 276387 - RNA, 21 nt, Homo sapiens
ucuuucaggacucuaccucau

SEQ ID NO: 276388 - RNA, 21 nt, Homo sapiens
ucuuucaguggcuaccuacau

SEQ ID NO: 276389 - RNA, 9 nt, Homo sapiens
ucuuuccau

SEQ ID NO: 276390 - RNA, 13 nt, Homo sapiens
ucuuucccaacac

SEQ ID NO: 276391 - RNA, 14 nt, Homo sapiens
ucuuucccaauuca

SEQ ID NO: 276392 - RNA, 17 nt, Homo sapiens
ucuuucccaauucacau

SEQ ID NO: 276393 - RNA, 16 nt, Homo sapiens
ucuuuccuauuugcac

SEQ ID NO: 276394 - RNA, 15 nt, Homo sapiens
ucuuucuauuuaugc

SEQ ID NO: 276395 - RNA, 18 nt, Homo sapiens
ucuuucucuucccaugca

SEQ ID NO: 276396 - RNA, 13 nt, Homo sapiens
ucuuugaauuuag

SEQ ID NO: 276397 - RNA, 18 nt, Homo sapiens
ucuuugaauuuaggugau

SEQ ID NO: 276398 - RNA, 14 nt, Homo sapiens
ucuuuggacccuga

SEQ ID NO: 276399 - RNA, 21 nt, Homo sapiens
ucuuuguaagaguggaaccaa

SEQ ID NO: 276400 - RNA, 15 nt, Homo sapiens
ucuuuguacagacaa

SEQ ID NO: 276401 - RNA, 16 nt, Homo sapiens
ucuuuuacauucugca

SEQ ID NO: 276402 - RNA, 20 nt, Homo sapiens
ucuuuuccaacacaucuaua

SEQ ID NO: 276403 - RNA, 14 nt, Homo sapiens
ucuuuuccaugaac

SEQ ID NO: 276404 - RNA, 17 nt, Homo sapiens
ucuuuucgccguggcug

SEQ ID NO: 276405 - RNA, 20 nt, Homo sapiens
ucuuuucuaucucaucuuga

SEQ ID NO: 276406 - RNA, 21 nt, Homo sapiens
ucuuuucuggaauguaaucaa

SEQ ID NO: 276407 - RNA, 19 nt, Homo sapiens
ucuuuucuugcaugaggcu

SEQ ID NO: 276408 - RNA, 14 nt, Homo sapiens
ucuuuugucccaga

SEQ ID NO: 276409 - RNA, 16 nt, Homo sapiens
ucuuuugucccagaaa

SEQ ID NO: 276410 - RNA, 13 nt, Homo sapiens
ugaaaaaauaaca

SEQ ID NO: 276411 - RNA, 17 nt, Homo sapiens
ugaaaaaauaacacugu

SEQ ID NO: 276412 - RNA, 19 nt, Homo sapiens
ugaaaaaauaacacuguac

SEQ ID NO: 276413 - RNA, 13 nt, Homo sapiens
ugaaaaaugccuc

SEQ ID NO: 276414 - RNA, 16 nt, Homo sapiens
ugaaaacacugugcac

SEQ ID NO: 276415 - RNA, 17 nt, Homo sapiens
ugaaaacacugugcaca

SEQ ID NO: 276416 - RNA, 13 nt, Homo sapiens
ugaaaacacuguu

SEQ ID NO: 276417 - RNA, 23 nt, Homo sapiens
ugaaaagaaucggcaauguuuca

SEQ ID NO: 276418 - RNA, 12 nt, Homo sapiens
ugaaaagucaaa

SEQ ID NO: 276419 - RNA, 20 nt, Homo sapiens
ugaaaaugcuguauuaguca

SEQ ID NO: 276420 - RNA, 22 nt, Homo sapiens
ugaaaaugcuguauuagucaca

SEQ ID NO: 276421 - RNA, 22 nt, Homo sapiens
ugaaaauguauguguaaguauu

SEQ ID NO: 276422 - RNA, 15 nt, Homo sapiens
ugaaacaacccaaag

SEQ ID NO: 276423 - RNA, 12 nt, Homo sapiens
ugaaacaucauu

SEQ ID NO: 276424 - RNA, 14 nt, Homo sapiens
ugaaacaucauuuc

SEQ ID NO: 276425 - RNA, 20 nt, Homo sapiens
ugaaaccccaucucuacuga

SEQ ID NO: 276426 - RNA, 22 nt, Homo sapiens
ugaaacgcaaccaccaccaacc

SEQ ID NO: 276427 - RNA, 11 nt, Homo sapiens
ugaaagaucuu

SEQ ID NO: 276428 - RNA, 20 nt, Homo sapiens
ugaaagcuggagucugucaa

SEQ ID NO: 276429 - RNA, 17 nt, Homo sapiens
ugaaauaaggaaugaua

SEQ ID NO: 276430 - RNA, 19 nt, Homo sapiens
ugaaauaauguacaucugg

SEQ ID NO: 276431 - RNA, 16 nt, Homo sapiens
ugaaauaucaugcucc

SEQ ID NO: 276432 - RNA, 16 nt, Homo sapiens
ugaaaugcuggcauuu

SEQ ID NO: 276433 - RNA, 18 nt, Homo sapiens
ugaaaugcuggcauuugc

SEQ ID NO: 276434 - RNA, 19 nt, Homo sapiens
ugaaaugcuggcauuugca

SEQ ID NO: 276435 - RNA, 13 nt, Homo sapiens
ugaacacucuugg

SEQ ID NO: 276436 - RNA, 15 nt, Homo sapiens
ugaacacucuuggua

SEQ ID NO: 276437 - RNA, 13 nt, Homo sapiens
ugaacagaacaaa

SEQ ID NO: 276438 - RNA, 13 nt, Homo sapiens
ugaacaguaacau

SEQ ID NO: 276439 - RNA, 22 nt, Homo sapiens
ugaacaugcucauguguacaca

SEQ ID NO: 276440 - RNA, 12 nt, Homo sapiens
ugaacauuccag

SEQ ID NO: 276441 - RNA, 13 nt, Homo sapiens
ugaacauugcaau

SEQ ID NO: 276442 - RNA, 22 nt, Homo sapiens
ugaaccaagaccauugaauucu

SEQ ID NO: 276443 - RNA, 17 nt, Homo sapiens
ugaacggugagcauugu

SEQ ID NO: 276444 - RNA, 16 nt, Homo sapiens
ugaacuaaacuuucac

SEQ ID NO: 276445 - RNA, 21 nt, Homo sapiens
ugaacuccuggccucaaguga

SEQ ID NO: 276446 - RNA, 18 nt, Homo sapiens
ugaacucuucaaucucuu

SEQ ID NO: 276447 - RNA, 22 nt, Homo sapiens
ugaacuggaaaagaucauugcu

SEQ ID NO: 276448 - RNA, 22 nt, Homo sapiens
ugaacuggguacuuguggacac

SEQ ID NO: 276449 - RNA, 21 nt, Homo sapiens
ugaacuuggaaagaaaugccc

SEQ ID NO: 276450 - RNA, 24 nt, Homo sapiens
ugaacuuggaaagaaaugcccauc

SEQ ID NO: 276451 - RNA, 22 nt, Homo sapiens
ugaagaacaguaacugccauca

SEQ ID NO: 276452 - RNA, 23 nt, Homo sapiens
ugaagaacugcaggcccuggccu

SEQ ID NO: 276453 - RNA, 14 nt, Homo sapiens
ugaagacaaugacu

SEQ ID NO: 276454 - RNA, 20 nt, Homo sapiens
ugaagacagagcuacacagg

SEQ ID NO: 276455 - RNA, 23 nt, Homo sapiens
ugaagauguuucaaaaaaucuga

SEQ ID NO: 276456 - RNA, 19 nt, Homo sapiens
ugaagauuauaaaagccaa

SEQ ID NO: 276457 - RNA, 13 nt, Homo sapiens
ugaagccacagca

SEQ ID NO: 276458 - RNA, 13 nt, Homo sapiens
ugaagccaugucu

SEQ ID NO: 276459 - RNA, 16 nt, Homo sapiens
ugaagccaugucuaca

SEQ ID NO: 276460 - RNA, 18 nt, Homo sapiens
ugaagccuauguaugcca

SEQ ID NO: 276461 - RNA, 13 nt, Homo sapiens
ugaagcugagaug

SEQ ID NO: 276462 - RNA, 19 nt, Homo sapiens
ugaagcugcucacugcuca

SEQ ID NO: 276463 - RNA, 21 nt, Homo sapiens
ugaagcugggagaaccaaaaa

SEQ ID NO: 276464 - RNA, 15 nt, Homo sapiens
ugaagcuuccuuggc

SEQ ID NO: 276465 - RNA, 19 nt, Homo sapiens
ugaagguagaauguuuuca

SEQ ID NO: 276466 - RNA, 14 nt, Homo sapiens
ugaaguaagcaaag

SEQ ID NO: 276467 - RNA, 14 nt, Homo sapiens
ugaagucacacagu

SEQ ID NO: 276468 - RNA, 16 nt, Homo sapiens
ugaagucagaucugcc

SEQ ID NO: 276469 - RNA, 20 nt, Homo sapiens
ugaagucagaucugccuaag

SEQ ID NO: 276470 - RNA, 19 nt, Homo sapiens
ugaaguggugugaucccag

SEQ ID NO: 276471 - RNA, 18 nt, Homo sapiens
ugaaguuuaauugacuua

SEQ ID NO: 276472 - RNA, 13 nt, Homo sapiens
ugaauaauacagu

SEQ ID NO: 276473 - RNA, 20 nt, Homo sapiens
ugaauaauacaguaucucag

SEQ ID NO: 276474 - RNA, 22 nt, Homo sapiens
ugaauaauacaguaucucaggg

SEQ ID NO: 276475 - RNA, 23 nt, Homo sapiens
ugaauacacgagguaugaggucu

SEQ ID NO: 276476 - RNA, 14 nt, Homo sapiens
ugaauacaggcaua

SEQ ID NO: 276477 - RNA, 23 nt, Homo sapiens
ugaauaugauuaguaaagaaaug

SEQ ID NO: 276478 - RNA, 12 nt, Homo sapiens
ugaaucacagua

SEQ ID NO: 276479 - RNA, 22 nt, Homo sapiens
ugaaucacaguauacgcuccau

SEQ ID NO: 276480 - RNA, 14 nt, Homo sapiens
ugaaucaccugugg

SEQ ID NO: 276481 - RNA, 21 nt, Homo sapiens
ugaaugaaacccccacacaca

SEQ ID NO: 276482 - RNA, 15 nt, Homo sapiens
ugaaugaacaaccuc

SEQ ID NO: 276483 - RNA, 18 nt, Homo sapiens
ugaaugaugccaugagga

SEQ ID NO: 276484 - RNA, 14 nt, Homo sapiens
ugaaugcagggaca

SEQ ID NO: 276485 - RNA, 15 nt, Homo sapiens
ugaaugcauguguga

SEQ ID NO: 276486 - RNA, 19 nt, Homo sapiens
ugaaugccuaugguggauc

SEQ ID NO: 276487 - RNA, 15 nt, Homo sapiens
ugaaugucaguguga

SEQ ID NO: 276488 - RNA, 22 nt, Homo sapiens
ugaauucauagaaaaaguaggu

SEQ ID NO: 276489 - RNA, 18 nt, Homo sapiens
ugaauuuagcaaccuaga

SEQ ID NO: 276490 - RNA, 17 nt, Homo sapiens
ugaauuuugucuuuaug

SEQ ID NO: 276491 - RNA, 22 nt, Homo sapiens
ugacaaggggcaguggugguuu

SEQ ID NO: 276492 - RNA, 15 nt, Homo sapiens
ugacaauaauuucag

SEQ ID NO: 276493 - RNA, 12 nt, Homo sapiens
ugacacacagcu

SEQ ID NO: 276494 - RNA, 13 nt, Homo sapiens
ugacacagucuug

SEQ ID NO: 276495 - RNA, 20 nt, Homo sapiens
ugacacucccuugggcuccc

SEQ ID NO: 276496 - RNA, 15 nt, Homo sapiens
ugacacugcucuaac

SEQ ID NO: 276497 - RNA, 16 nt, Homo sapiens
ugacagacacaggccc

SEQ ID NO: 276498 - RNA, 12 nt, Homo sapiens
ugacagaucucu

SEQ ID NO: 276499 - RNA, 22 nt, Homo sapiens
ugacagcugaccuuugucaucu

SEQ ID NO: 276500 - RNA, 14 nt, Homo sapiens
ugacagggccagug

SEQ ID NO: 276501 - RNA, 15 nt, Homo sapiens
ugacagggccagugc

SEQ ID NO: 276502 - RNA, 15 nt, Homo sapiens
ugacauaagugcuau

SEQ ID NO: 276503 - RNA, 18 nt, Homo sapiens
ugacaucagcaauacaga

SEQ ID NO: 276504 - RNA, 18 nt, Homo sapiens
ugacauccaagcuuccuu

SEQ ID NO: 276505 - RNA, 17 nt, Homo sapiens
ugacauguacgauucac

SEQ ID NO: 276506 - RNA, 15 nt, Homo sapiens
ugacauuauaugcac

SEQ ID NO: 276507 - RNA, 17 nt, Homo sapiens
ugacauuauaugcacua

SEQ ID NO: 276508 - RNA, 19 nt, Homo sapiens
ugaccaauauuguacaguu

SEQ ID NO: 276509 - RNA, 15 nt, Homo sapiens
ugaccagccuugaca

SEQ ID NO: 276510 - RNA, 19 nt, Homo sapiens
ugaccagccuugacacucc

SEQ ID NO: 276511 - RNA, 16 nt, Homo sapiens
ugacccagucagaguu

SEQ ID NO: 276512 - RNA, 22 nt, Homo sapiens
ugacccagucagaguugugcac

SEQ ID NO: 276513 - RNA, 21 nt, Homo sapiens
ugacccaugcugcccugugag

SEQ ID NO: 276514 - RNA, 19 nt, Homo sapiens
ugacccgaguaacuuucug

SEQ ID NO: 276515 - RNA, 21 nt, Homo sapiens
ugacccucaucuuucuuccaa

SEQ ID NO: 276516 - RNA, 18 nt, Homo sapiens
ugacccucuccccacugc

SEQ ID NO: 276517 - RNA, 14 nt, Homo sapiens
ugaccuaaauuauu

SEQ ID NO: 276518 - RNA, 23 nt, Homo sapiens
ugaccuaaauuauuuacugcaaa

SEQ ID NO: 276519 - RNA, 14 nt, Homo sapiens
ugaccucaggugau

SEQ ID NO: 276520 - RNA, 15 nt, Homo sapiens
ucuuagguuuccacg

SEQ ID NO: 276521 - RNA, 15 nt, Homo sapiens
ucuuaguguaugauu

SEQ ID NO: 276522 - RNA, 14 nt, Homo sapiens
ucuuaguuugcagu

SEQ ID NO: 276523 - RNA, 21 nt, Homo sapiens
ucuuauccaacaucaacaucu

SEQ ID NO: 276524 - RNA, 14 nt, Homo sapiens
ucuuauuuccucaa

SEQ ID NO: 276525 - RNA, 24 nt, Homo sapiens
ucuucaccauuuggcaaugccauc

SEQ ID NO: 276526 - RNA, 18 nt, Homo sapiens
ucuucacucaaucucuga

SEQ ID NO: 276527 - RNA, 12 nt, Homo sapiens
ucuucagccuag

SEQ ID NO: 276528 - RNA, 23 nt, Homo sapiens
ucuucagggggccaggugcacag

SEQ ID NO: 276529 - RNA, 21 nt, Homo sapiens
ucuucauaauuucuucacuca

SEQ ID NO: 276530 - RNA, 14 nt, Homo sapiens
ucuucauaccuaca

SEQ ID NO: 276531 - RNA, 23 nt, Homo sapiens
ugacucuccagaaagcucaucuc

SEQ ID NO: 276532 - RNA, 20 nt, Homo sapiens
ugacucuuccccauaaucac

SEQ ID NO: 276533 - RNA, 21 nt, Homo sapiens
ugacucuuccccauaaucacu

SEQ ID NO: 276534 - RNA, 21 nt, Homo sapiens
ugacugcugugggcugcucac

SEQ ID NO: 276535 - RNA, 23 nt, Homo sapiens
ugacugcugugggcugcucacug

SEQ ID NO: 276536 - RNA, 15 nt, Homo sapiens
ugacuuaagcacacu

SEQ ID NO: 276537 - RNA, 16 nt, Homo sapiens
ugacuuaagcacacuu

SEQ ID NO: 276538 - RNA, 23 nt, Homo sapiens
ugacuuaagcacacuugacauca

SEQ ID NO: 276539 - RNA, 13 nt, Homo sapiens
ugacuuacuguac

SEQ ID NO: 276540 - RNA, 21 nt, Homo sapiens
ugacuucucaacgccaaguca

SEQ ID NO: 276541 - RNA, 14 nt, Homo sapiens
ugacuugacuuuag

SEQ ID NO: 276542 - RNA, 17 nt, Homo sapiens
ugagaaagagcacuuaa

SEQ ID NO: 276543 - RNA, 22 nt, Homo sapiens
ugagaaagagcacuuaagagaa

SEQ ID NO: 276544 - RNA, 17 nt, Homo sapiens
ugagaacuacucaggga

SEQ ID NO: 276545 - RNA, 18 nt, Homo sapiens
ugagaacuacucagggaa

SEQ ID NO: 276546 - RNA, 18 nt, Homo sapiens
ugagaagccagcuuuccu

SEQ ID NO: 276547 - RNA, 13 nt, Homo sapiens
ugagacauuugcc

SEQ ID NO: 276548 - RNA, 17 nt, Homo sapiens
ugagaccacuguuauca

SEQ ID NO: 276549 - RNA, 23 nt, Homo sapiens
ugagaggagagagacuccagcug

SEQ ID NO: 276550 - RNA, 19 nt, Homo sapiens
ugagcacaaagguagcuuu

SEQ ID NO: 276551 - RNA, 21 nt, Homo sapiens
ugagcauuguggcugucagca

SEQ ID NO: 276552 - RNA, 11 nt, Homo sapiens
ugagcauuuag

SEQ ID NO: 276553 - RNA, 16 nt, Homo sapiens
ugagccuauaucuuca

SEQ ID NO: 276554 - RNA, 17 nt, Homo sapiens
ugagcuggggaugucuc

SEQ ID NO: 276555 - RNA, 18 nt, Homo sapiens
ugagcuggggaugucucu

SEQ ID NO: 276556 - RNA, 12 nt, Homo sapiens
ugagcugugcag

SEQ ID NO: 276557 - RNA, 15 nt, Homo sapiens
ugaggaacccuuaca

SEQ ID NO: 276558 - RNA, 14 nt, Homo sapiens
ugaggaauguauau

SEQ ID NO: 276559 - RNA, 22 nt, Homo sapiens
ugaggaauucuguauagauuag

SEQ ID NO: 276560 - RNA, 19 nt, Homo sapiens
ugaggaauuucuguucuuc

SEQ ID NO: 276561 - RNA, 21 nt, Homo sapiens
ugaggaauuucuguucuucca

SEQ ID NO: 276562 - RNA, 23 nt, Homo sapiens
ugaggaugaaaaaauaacacugu

SEQ ID NO: 276563 - RNA, 20 nt, Homo sapiens
ugaggauuuugauccaagcu

SEQ ID NO: 276564 - RNA, 13 nt, Homo sapiens
ugaggccucucau

SEQ ID NO: 276565 - RNA, 14 nt, Homo sapiens
ugaggccucucauu

SEQ ID NO: 276566 - RNA, 22 nt, Homo sapiens
ugaggcuuuaaaacuuauccuc

SEQ ID NO: 276567 - RNA, 15 nt, Homo sapiens
ugaggggcucucuca

SEQ ID NO: 276568 - RNA, 22 nt, Homo sapiens
ugaggguauguuuuauauagca

SEQ ID NO: 276569 - RNA, 13 nt, Homo sapiens
ugagggucagaga

SEQ ID NO: 276570 - RNA, 19 nt, Homo sapiens
ugagggugacuauggagcu

SEQ ID NO: 276571 - RNA, 12 nt, Homo sapiens
ugagguaaccuc

SEQ ID NO: 276572 - RNA, 17 nt, Homo sapiens
ugaggugacuauucuga

SEQ ID NO: 276573 - RNA, 16 nt, Homo sapiens
ugaguacguugugcau

SEQ ID NO: 276574 - RNA, 20 nt, Homo sapiens
ugaguagcuggauuacaggc

SEQ ID NO: 276575 - RNA, 22 nt, Homo sapiens
ugaguagcuggauuacaggcau

SEQ ID NO: 276576 - RNA, 20 nt, Homo sapiens
ugagucaccaagcccaguua

SEQ ID NO: 276577 - RNA, 16 nt, Homo sapiens
ugagucccagagccaa

SEQ ID NO: 276578 - RNA, 16 nt, Homo sapiens
ugagucuuuggaugcc

SEQ ID NO: 276579 - RNA, 14 nt, Homo sapiens
ugagugauccuccc

SEQ ID NO: 276580 - RNA, 12 nt, Homo sapiens
ugagugccuuac

SEQ ID NO: 276581 - RNA, 15 nt, Homo sapiens
ugagugggugaauaa

SEQ ID NO: 276582 - RNA, 21 nt, Homo sapiens
ugagugugaccaggcauccuc

SEQ ID NO: 276583 - RNA, 22 nt, Homo sapiens
ugaguuggguguauugugcgcu

SEQ ID NO: 276584 - RNA, 15 nt, Homo sapiens
ugaguuuagugaucu

SEQ ID NO: 276585 - RNA, 14 nt, Homo sapiens
ugaguuuucagugg

SEQ ID NO: 276586 - RNA, 16 nt, Homo sapiens
ugauaaaagauggcca

SEQ ID NO: 276587 - RNA, 14 nt, Homo sapiens
ugauaaccacuaag

SEQ ID NO: 276588 - RNA, 14 nt, Homo sapiens
ugauacacuaugaa

SEQ ID NO: 276589 - RNA, 15 nt, Homo sapiens
ugauacaugcauugc

SEQ ID NO: 276590 - RNA, 18 nt, Homo sapiens
ugauacaugcauugcucu

SEQ ID NO: 276591 - RNA, 12 nt, Homo sapiens
ugauacuuugac

SEQ ID NO: 276592 - RNA, 23 nt, Homo sapiens
ugauagagguucuuuauugcuca

SEQ ID NO: 276593 - RNA, 14 nt, Homo sapiens
ugauagauccagau

SEQ ID NO: 276594 - RNA, 23 nt, Homo sapiens
ugauagugucccacggugccuug

SEQ ID NO: 276595 - RNA, 17 nt, Homo sapiens
ugauauauaaaugugau

SEQ ID NO: 276596 - RNA, 21 nt, Homo sapiens
ugauauauaaaugugauugca

SEQ ID NO: 276597 - RNA, 17 nt, Homo sapiens
ugauaucugcagggaca

SEQ ID NO: 276598 - RNA, 16 nt, Homo sapiens
ugaucaagcaauaaua

SEQ ID NO: 276599 - RNA, 18 nt, Homo sapiens
ugaucacggcucacugca

SEQ ID NO: 276600 - RNA, 17 nt, Homo sapiens
ugaucauugcaguauca

SEQ ID NO: 276601 - RNA, 21 nt, Homo sapiens
ugauccaguuuuguuuggacc

SEQ ID NO: 276602 - RNA, 15 nt, Homo sapiens
ugaucccagcucacu

SEQ ID NO: 276603 - RNA, 20 nt, Homo sapiens
ugauccuaaugaaugcauaa

SEQ ID NO: 276604 - RNA, 19 nt, Homo sapiens
ugauccuaggcauuugcug

SEQ ID NO: 276605 - RNA, 16 nt, Homo sapiens
ugaucgucaucaucaa

SEQ ID NO: 276606 - RNA, 14 nt, Homo sapiens
ugaucuuugcagac

SEQ ID NO: 276607 - RNA, 13 nt, Homo sapiens
ugaugacauuccc

SEQ ID NO: 276608 - RNA, 14 nt, Homo sapiens
ugaugacauucccu

SEQ ID NO: 276609 - RNA, 17 nt, Homo sapiens
ugaugauagucaucauc

SEQ ID NO: 276610 - RNA, 18 nt, Homo sapiens
ugaugaucgucaucauca

SEQ ID NO: 276611 - RNA, 13 nt, Homo sapiens
ugaugaucuuugc

SEQ ID NO: 276612 - RNA, 17 nt, Homo sapiens
ugaugaugauagucauc

SEQ ID NO: 276613 - RNA, 21 nt, Homo sapiens
ugaugcuggggacacagcauc

SEQ ID NO: 276614 - RNA, 19 nt, Homo sapiens
ugauggugacauugcaccu

SEQ ID NO: 276615 - RNA, 15 nt, Homo sapiens
ugauuaaauucuugc

SEQ ID NO: 276616 - RNA, 24 nt, Homo sapiens
ugauuagaaauuaccuguggauau

SEQ ID NO: 276617 - RNA, 20 nt, Homo sapiens
ugauuaguaaagaaaugaca

SEQ ID NO: 276618 - RNA, 13 nt, Homo sapiens
ugauucacagugu

SEQ ID NO: 276619 - RNA, 21 nt, Homo sapiens
ugauucuauaaaacacaucau

SEQ ID NO: 276620 - RNA, 24 nt, Homo sapiens
ugauucuauaaaacacaucaucaa

SEQ ID NO: 276621 - RNA, 13 nt, Homo sapiens
ugauuguagcuau

SEQ ID NO: 276622 - RNA, 15 nt, Homo sapiens
ugauuguauuuaccu

SEQ ID NO: 276623 - RNA, 16 nt, Homo sapiens
ugauugugccuacgaa

SEQ ID NO: 276624 - RNA, 17 nt, Homo sapiens
ugauuuaaacacauuaa

SEQ ID NO: 276625 - RNA, 14 nt, Homo sapiens
ugauuuaaaucagc

SEQ ID NO: 276626 - RNA, 14 nt, Homo sapiens
ugauuucauuucaa

SEQ ID NO: 276627 - RNA, 16 nt, Homo sapiens
ugcaaaaggacucuca

SEQ ID NO: 276628 - RNA, 14 nt, Homo sapiens
ugcaaauacuguau

SEQ ID NO: 276629 - RNA, 19 nt, Homo sapiens
ugcaaauacuguauauuca

SEQ ID NO: 276630 - RNA, 16 nt, Homo sapiens
ugcaaauccuucaugu

SEQ ID NO: 276631 - RNA, 15 nt, Homo sapiens
ugcaacagacuugaa

SEQ ID NO: 276632 - RNA, 16 nt, Homo sapiens
ugcaacaguagcauag

SEQ ID NO: 276633 - RNA, 23 nt, Homo sapiens
ugcaacaugccagccacugugau

SEQ ID NO: 276634 - RNA, 16 nt, Homo sapiens
ugcaacucaucuucac

SEQ ID NO: 276635 - RNA, 19 nt, Homo sapiens
ugcaaguucauaggucucc

SEQ ID NO: 276636 - RNA, 16 nt, Homo sapiens
ugcaaugacacagucu

SEQ ID NO: 276637 - RNA, 13 nt, Homo sapiens
ugcaauguuuuag

SEQ ID NO: 276638 - RNA, 14 nt, Homo sapiens
ugcaauguuuuaga

SEQ ID NO: 276639 - RNA, 16 nt, Homo sapiens
ugcaauuuccaacaca

SEQ ID NO: 276640 - RNA, 20 nt, Homo sapiens
ugcaauuugucuagcaugcu

SEQ ID NO: 276641 - RNA, 14 nt, Homo sapiens
ugcacaaacagagg

SEQ ID NO: 276642 - RNA, 21 nt, Homo sapiens
ugcacaaauugggccaaagaa

SEQ ID NO: 276643 - RNA, 23 nt, Homo sapiens
ugcacacauuuuuuaaaugcacc

SEQ ID NO: 276644 - RNA, 14 nt, Homo sapiens
ugcacacuuugcca

SEQ ID NO: 276645 - RNA, 23 nt, Homo sapiens
ugcacagcuaacauggaaguacu

SEQ ID NO: 276646 - RNA, 19 nt, Homo sapiens
ugcacauacuugagacugu

SEQ ID NO: 276647 - RNA, 17 nt, Homo sapiens
ugcacaugcacgugugu

SEQ ID NO: 276648 - RNA, 16 nt, Homo sapiens
ugcaccaagcaggaaa

SEQ ID NO: 276649 - RNA, 15 nt, Homo sapiens
ugcaccccacuucag

SEQ ID NO: 276650 - RNA, 14 nt, Homo sapiens
ugcacgcacacugu

SEQ ID NO: 276651 - RNA, 14 nt, Homo sapiens
ugcacgugugugca

SEQ ID NO: 276652 - RNA, 14 nt, Homo sapiens
ugcacuaacagagu

SEQ ID NO: 276653 - RNA, 24 nt, Homo sapiens
ugcacucacgcucagcacacaugc

SEQ ID NO: 276654 - RNA, 14 nt, Homo sapiens
ugcacuccaugagu

SEQ ID NO: 276655 - RNA, 15 nt, Homo sapiens
ugcacucccaccuga

SEQ ID NO: 276656 - RNA, 14 nt, Homo sapiens
ugcacuuacuugcu

SEQ ID NO: 276657 - RNA, 24 nt, Homo sapiens
ugcacuuuguucuggcucuuccag

SEQ ID NO: 276658 - RNA, 20 nt, Homo sapiens
ugcagacucuacagaggcca

SEQ ID NO: 276659 - RNA, 13 nt, Homo sapiens
ugcagagacagag

SEQ ID NO: 276660 - RNA, 16 nt, Homo sapiens
ugcagcaaacacucca

SEQ ID NO: 276661 - RNA, 21 nt, Homo sapiens
ugcagcaaacacuccacccuc

SEQ ID NO: 276662 - RNA, 14 nt, Homo sapiens
ugcagcaccuccag

SEQ ID NO: 276663 - RNA, 19 nt, Homo sapiens
ugcagccacuuucugccag

SEQ ID NO: 276664 - RNA, 13 nt, Homo sapiens
ugcagcccacugc

SEQ ID NO: 276665 - RNA, 16 nt, Homo sapiens
ugcagcccacugccug

SEQ ID NO: 276666 - RNA, 16 nt, Homo sapiens
ugcagccucaaccucc

SEQ ID NO: 276667 - RNA, 23 nt, Homo sapiens
ugcagccucacaguccuuaccag

SEQ ID NO: 276668 - RNA, 18 nt, Homo sapiens
ugcagccuccccaggugu

SEQ ID NO: 276669 - RNA, 17 nt, Homo sapiens
ugcagccuugacuucuc

SEQ ID NO: 276670 - RNA, 16 nt, Homo sapiens
ugcagccuuugccuuu

SEQ ID NO: 276671 - RNA, 13 nt, Homo sapiens
ugcagcuccucug

SEQ ID NO: 276672 - RNA, 16 nt, Homo sapiens
ugcagcuccucugccu

SEQ ID NO: 276673 - RNA, 15 nt, Homo sapiens
ugcagcuuauauuca

SEQ ID NO: 276674 - RNA, 19 nt, Homo sapiens
ugcagcuuauauucaucca

SEQ ID NO: 276675 - RNA, 16 nt, Homo sapiens
ugcaggaccucaggug

SEQ ID NO: 276676 - RNA, 15 nt, Homo sapiens
ugcaccuggauguac

SEQ ID NO: 276677 - RNA, 21 nt, Homo sapiens
ugcaccuguccccacccucca

SEQ ID NO: 276678 - RNA, 14 nt, Homo sapiens
ugcacguauuuuaa

SEQ ID NO: 276679 - RNA, 14 nt, Homo sapiens
ugcacucacgcuca

SEQ ID NO: 276680 - RNA, 16 nt, Homo sapiens
ugcacuccagccuggg

SEQ ID NO: 276681 - RNA, 21 nt, Homo sapiens
ugcaggagucccugccaucau

SEQ ID NO: 276682 - RNA, 23 nt, Homo sapiens
ugcaggggcaaacaccugcugau

SEQ ID NO: 276683 - RNA, 12 nt, Homo sapiens
ugcagguggugu

SEQ ID NO: 276684 - RNA, 23 nt, Homo sapiens
ugcaguuuugccuaauggcaaaa

SEQ ID NO: 276685 - RNA, 19 nt, Homo sapiens
ugcaguuuuuuucuugucu

SEQ ID NO: 276686 - RNA, 20 nt, Homo sapiens
ugcauaaaauguuaaguuga

SEQ ID NO: 276687 - RNA, 18 nt, Homo sapiens
ugcauaagugcaugacau

SEQ ID NO: 276688 - RNA, 22 nt, Homo sapiens
ugcauacacacacacacacagc

SEQ ID NO: 276689 - RNA, 20 nt, Homo sapiens
ugcauagcagaccacacaga

SEQ ID NO: 276690 - RNA, 16 nt, Homo sapiens
ugcauauuuuauuaua

SEQ ID NO: 276691 - RNA, 20 nt, Homo sapiens
ugcauauuuuauuauaguca

SEQ ID NO: 276692 - RNA, 18 nt, Homo sapiens
ugcaucaagaugugacau

SEQ ID NO: 276693 - RNA, 19 nt, Homo sapiens
ugcaucguuucaucuucca

SEQ ID NO: 276694 - RNA, 21 nt, Homo sapiens
ugcaucuguauaaguaagaaa

SEQ ID NO: 276695 - RNA, 16 nt, Homo sapiens
ugcaugcugucccuua

SEQ ID NO: 276696 - RNA, 15 nt, Homo sapiens
ugcauguggcacuua

SEQ ID NO: 276697 - RNA, 12 nt, Homo sapiens
ugcauuaucuau

SEQ ID NO: 276698 - RNA, 14 nt, Homo sapiens
ugcauuaucuauga

SEQ ID NO: 276699 - RNA, 17 nt, Homo sapiens
ugcauuaucuaugauau

SEQ ID NO: 276700 - RNA, 15 nt, Homo sapiens
ugcauucacagcuac

SEQ ID NO: 276701 - RNA, 16 nt, Homo sapiens
ugcauucucuagucag

SEQ ID NO: 276702 - RNA, 20 nt, Homo sapiens
ugcauucugagguaaccuca

SEQ ID NO: 276703 - RNA, 14 nt, Homo sapiens
ugcauugcucuuau

SEQ ID NO: 276704 - RNA, 23 nt, Homo sapiens
ugcauuuaaauacagucuuccau

SEQ ID NO: 276705 - RNA, 17 nt, Homo sapiens
ugcauuuaauuuauuga

SEQ ID NO: 276706 - RNA, 15 nt, Homo sapiens
ugcauuuggugguuu

SEQ ID NO: 276707 - RNA, 14 nt, Homo sapiens
ugccaaaaacaaca

SEQ ID NO: 276708 - RNA, 15 nt, Homo sapiens
ugccaaaaacaacaa

SEQ ID NO: 276709 - RNA, 14 nt, Homo sapiens
ugccaaagaacuug

SEQ ID NO: 276710 - RNA, 20 nt, Homo sapiens
ugccaaccagagcagcucac

SEQ ID NO: 276711 - RNA, 18 nt, Homo sapiens
ugccaauuugcacauuaa

SEQ ID NO: 276712 - RNA, 16 nt, Homo sapiens
ugccacacggcucuca

SEQ ID NO: 276713 - RNA, 23 nt, Homo sapiens
ugccacagccuccccugccaggg

SEQ ID NO: 276714 - RNA, 20 nt, Homo sapiens
ugccaccauggccagccaac

SEQ ID NO: 276715 - RNA, 17 nt, Homo sapiens
ugccacgcccccagaaa

SEQ ID NO: 276716 - RNA, 21 nt, Homo sapiens
ugccacucuguaauugcaaaa

SEQ ID NO: 276717 - RNA, 15 nt, Homo sapiens
ugccagcaucugcag

SEQ ID NO: 276718 - RNA, 21 nt, Homo sapiens
ugccagcaucugcagccacuu

SEQ ID NO: 276719 - RNA, 14 nt, Homo sapiens
ugccagcauuuccc

SEQ ID NO: 276720 - RNA, 15 nt, Homo sapiens
ugccagcauuucccu

SEQ ID NO: 276721 - RNA, 19 nt, Homo sapiens
ugccagcuuaucucagggg

SEQ ID NO: 276722 - RNA, 20 nt, Homo sapiens
ugccagcuuaucucaggggu

SEQ ID NO: 276723 - RNA, 16 nt, Homo sapiens
ugccaggcacacugag

SEQ ID NO: 276724 - RNA, 17 nt, Homo sapiens
ugccagugggaacuccu

SEQ ID NO: 276725 - RNA, 23 nt, Homo sapiens
ugccaucaagaugagagaacugg

SEQ ID NO: 276726 - RNA, 22 nt, Homo sapiens
ugccaucaauaaaaaauuauga

SEQ ID NO: 276727 - RNA, 19 nt, Homo sapiens
ugccaucuuggacuuguca

SEQ ID NO: 276728 - RNA, 23 nt, Homo sapiens
ugccauggaggcacacagcugca

SEQ ID NO: 276729 - RNA, 13 nt, Homo sapiens
ugcccacacuugg

SEQ ID NO: 276730 - RNA, 19 nt, Homo sapiens
ugcccacgcuggagugcag

SEQ ID NO: 276731 - RNA, 14 nt, Homo sapiens
ugcccacucuccac

SEQ ID NO: 276732 - RNA, 17 nt, Homo sapiens
ugcccacugaacaugcu

SEQ ID NO: 276733 - RNA, 20 nt, Homo sapiens
ugcccacugaacaugcucau

SEQ ID NO: 276734 - RNA, 22 nt, Homo sapiens
ugcccacugaacaugcucaugu

SEQ ID NO: 276735 - RNA, 14 nt, Homo sapiens
ugcccagaauuuca

SEQ ID NO: 276736 - RNA, 20 nt, Homo sapiens
ugcccaggcuggagugcaau

SEQ ID NO: 276737 - RNA, 21 nt, Homo sapiens
ugcccaggcuggagugcaaug

SEQ ID NO: 276738 - RNA, 17 nt, Homo sapiens
ugcccaggcuggucuca

SEQ ID NO: 276739 - RNA, 15 nt, Homo sapiens
ugcccagggcucagc

SEQ ID NO: 276740 - RNA, 20 nt, Homo sapiens
ugcccagggcucagccuggu

SEQ ID NO: 276741 - RNA, 19 nt, Homo sapiens
ugcccagugaccagucacu

SEQ ID NO: 276742 - RNA, 16 nt, Homo sapiens
ugcccaguguguuucu

SEQ ID NO: 276743 - RNA, 16 nt, Homo sapiens
ugccccccuugccaga

SEQ ID NO: 276744 - RNA, 17 nt, Homo sapiens
ugccccccuugccagac

SEQ ID NO: 276745 - RNA, 22 nt, Homo sapiens
ugccccucaacucuccuccaga

SEQ ID NO: 276746 - RNA, 18 nt, Homo sapiens
ugcccggcaggguccuag

SEQ ID NO: 276747 - RNA, 17 nt, Homo sapiens
ugcccuaaaguguauuu

SEQ ID NO: 276748 - RNA, 16 nt, Homo sapiens
ugcccuggccacuggc

SEQ ID NO: 276749 - RNA, 19 nt, Homo sapiens
ugcccuguaccugugcacg

SEQ ID NO: 276750 - RNA, 22 nt, Homo sapiens
ugcccuucuauacuuucucaca

SEQ ID NO: 276751 - RNA, 15 nt, Homo sapiens
ugccuaauggcaaaa

SEQ ID NO: 276752 - RNA, 14 nt, Homo sapiens
ugccucaucacugc

SEQ ID NO: 276753 - RNA, 21 nt, Homo sapiens
ugccucauuaccuugugcuaa

SEQ ID NO: 276754 - RNA, 13 nt, Homo sapiens
ugccucucucagg

SEQ ID NO: 276755 - RNA, 14 nt, Homo sapiens
ugccucucuugcca

SEQ ID NO: 276756 - RNA, 20 nt, Homo sapiens
ugccucugacacacagcucu

SEQ ID NO: 276757 - RNA, 19 nt, Homo sapiens
ugccucugcagcccacugc

SEQ ID NO: 276758 - RNA, 12 nt, Homo sapiens
ugccucugcucu

SEQ ID NO: 276759 - RNA, 13 nt, Homo sapiens
ugccucuggaugc

SEQ ID NO: 276760 - RNA, 23 nt, Homo sapiens
ugccucuugaaugcagggacaaa

SEQ ID NO: 276761 - RNA, 16 nt, Homo sapiens
ugccugguggcagcug

SEQ ID NO: 276762 - RNA, 18 nt, Homo sapiens
ugccugugccuuuugcca

SEQ ID NO: 276763 - RNA, 22 nt, Homo sapiens
ugccuuauggaacacucugaga

SEQ ID NO: 276764 - RNA, 14 nt, Homo sapiens
ugccuuggggacaa

SEQ ID NO: 276765 - RNA, 16 nt, Homo sapiens
ugccuuggugugcugu

SEQ ID NO: 276766 - RNA, 18 nt, Homo sapiens
ugccuuucucucuuucuc

SEQ ID NO: 276767 - RNA, 17 nt, Homo sapiens
ugccuuuggacuugucc

SEQ ID NO: 276768 - RNA, 13 nt, Homo sapiens
ugcgacccaagac

SEQ ID NO: 276769 - RNA, 20 nt, Homo sapiens
ugcggaaugaaccacaucuu

SEQ ID NO: 276770 - RNA, 13 nt, Homo sapiens
ugcggcaucucca

SEQ ID NO: 276771 - RNA, 14 nt, Homo sapiens
ugcggcaucuccau

SEQ ID NO: 276772 - RNA, 17 nt, Homo sapiens
ugcgugugcccacugaa

SEQ ID NO: 276773 - RNA, 13 nt, Homo sapiens
ugcuaaaugugaa

SEQ ID NO: 276774 - RNA, 23 nt, Homo sapiens
ugcuaauauauguauaugcaaua

SEQ ID NO: 276775 - RNA, 21 nt, Homo sapiens
ugcuaaucagggaggucauuu

SEQ ID NO: 276776 - RNA, 16 nt, Homo sapiens
ugcuaccucacugggg

SEQ ID NO: 276777 - RNA, 21 nt, Homo sapiens
ugcuauaacuauguugauaaa

SEQ ID NO: 276778 - RNA, 21 nt, Homo sapiens
ugcuauccaaucucaucucuu

SEQ ID NO: 276779 - RNA, 15 nt, Homo sapiens
ugcuaucgcaccacu

SEQ ID NO: 276780 - RNA, 20 nt, Homo sapiens
ugcuauggaaugauugugga

SEQ ID NO: 276781 - RNA, 19 nt, Homo sapiens
ugcuauuguagagccagag

SEQ ID NO: 276782 - RNA, 15 nt, Homo sapiens
ugcuauuucuauauu

SEQ ID NO: 276783 - RNA, 13 nt, Homo sapiens
ugcucacaaaagu

SEQ ID NO: 276784 - RNA, 19 nt, Homo sapiens
ugcucacauaucugucauu

SEQ ID NO: 276785 - RNA, 18 nt, Homo sapiens
ugcucacugcucacacgc

SEQ ID NO: 276786 - RNA, 21 nt, Homo sapiens
ugcucaguagucagacuggau

SEQ ID NO: 276787 - RNA, 19 nt, Homo sapiens
ugcucauguguacacacgc

SEQ ID NO: 276788 - RNA, 22 nt, Homo sapiens
ugcuccgucuaagucaugagcu

SEQ ID NO: 276789 - RNA, 19 nt, Homo sapiens
ugcuccuugggcccuuuga

SEQ ID NO: 276790 - RNA, 24 nt, Homo sapiens
ugcucucgggugcccugcauucac

SEQ ID NO: 276791 - RNA, 16 nt, Homo sapiens
ugcucugugcacucac

SEQ ID NO: 276792 - RNA, 12 nt, Homo sapiens
ugcucuuuccac

SEQ ID NO: 276793 - RNA, 13 nt, Homo sapiens
ugcucuuuccacc

SEQ ID NO: 276794 - RNA, 18 nt, Homo sapiens
ugcugaacaucacagcuu

SEQ ID NO: 276795 - RNA, 15 nt, Homo sapiens
ugcugagcauguacu

SEQ ID NO: 276796 - RNA, 23 nt, Homo sapiens
ugcugagugcaccacuucaagug

SEQ ID NO: 276797 - RNA, 20 nt, Homo sapiens
ugcugaguuugugcuggugu

SEQ ID NO: 276798 - RNA, 23 nt, Homo sapiens
ugcugaguuugugcugguguaug

SEQ ID NO: 276799 - RNA, 18 nt, Homo sapiens
ugcugauuuaaacacauu

SEQ ID NO: 276800 - RNA, 18 nt, Homo sapiens
ugcugcaaaaguucucaa

SEQ ID NO: 276801 - RNA, 17 nt, Homo sapiens
ugcugcaaauacuguau

SEQ ID NO: 276802 - RNA, 19 nt, Homo sapiens
ugcugcugagugcaccacu

SEQ ID NO: 276803 - RNA, 23 nt, Homo sapiens
ugcugcugagugcaccacuucaa

SEQ ID NO: 276804 - RNA, 23 nt, Homo sapiens
ugcugcugauuuaaacacauuaa

SEQ ID NO: 276805 - RNA, 13 nt, Homo sapiens
ugcugcugggaau

SEQ ID NO: 276806 - RNA, 19 nt, Homo sapiens
ugcugcuugaggcaacuca

SEQ ID NO: 276807 - RNA, 16 nt, Homo sapiens
ugcuggcaaagacaga

SEQ ID NO: 276808 - RNA, 13 nt, Homo sapiens
ugcuggcauuugc

SEQ ID NO: 276809 - RNA, 14 nt, Homo sapiens
ugcuggcauuugca

SEQ ID NO: 276810 - RNA, 15 nt, Homo sapiens
ugcuggcauuugcac

SEQ ID NO: 276811 - RNA, 13 nt, Homo sapiens
ugcugggguuauc

SEQ ID NO: 276812 - RNA, 21 nt, Homo sapiens
ugcuguagaagauggcacuua

SEQ ID NO: 276813 - RNA, 21 nt, Homo sapiens
ugcuguagacauuugcuauga

SEQ ID NO: 276814 - RNA, 19 nt, Homo sapiens
ugcuguauccacaaaucau

SEQ ID NO: 276815 - RNA, 15 nt, Homo sapiens
ugcuguauccaucca

SEQ ID NO: 276816 - RNA, 19 nt, Homo sapiens
ugcuguugauuccacugaa

SEQ ID NO: 276817 - RNA, 14 nt, Homo sapiens
ugcuuaaucuugcu

SEQ ID NO: 276818 - RNA, 13 nt, Homo sapiens
ugcuuagauuucu

SEQ ID NO: 276819 - RNA, 23 nt, Homo sapiens
ugcuuagcuugagggugacuaug

SEQ ID NO: 276820 - RNA, 20 nt, Homo sapiens
ugcuggcaguggaacuaaga

SEQ ID NO: 276821 - RNA, 22 nt, Homo sapiens
ugcuggcauuugcaccuaccuc

SEQ ID NO: 276822 - RNA, 14 nt, Homo sapiens
ugcuggcugccuua

SEQ ID NO: 276823 - RNA, 21 nt, Homo sapiens
ugcugggagaggggguagcua

SEQ ID NO: 276824 - RNA, 20 nt, Homo sapiens
ugcugggauuacagguguga

SEQ ID NO: 276825 - RNA, 15 nt, Homo sapiens
ugcugggcuuggcag

SEQ ID NO: 276826 - RNA, 16 nt, Homo sapiens
ugcuggucacugccau

SEQ ID NO: 276827 - RNA, 18 nt, Homo sapiens
ugcuguagacauuugcua

SEQ ID NO: 276828 - RNA, 20 nt, Homo sapiens
ugcuguagacauuugcuaug

SEQ ID NO: 276829 - RNA, 14 nt, Homo sapiens
ugcuguauccacaa

SEQ ID NO: 276830 - RNA, 18 nt, Homo sapiens
ugcuguauccauccaugg

SEQ ID NO: 276831 - RNA, 14 nt, Homo sapiens
ugcuguaugucucg

SEQ ID NO: 276832 - RNA, 18 nt, Homo sapiens
ugcugucagucugcuuau

SEQ ID NO: 276833 - RNA, 16 nt, Homo sapiens
ugcugugucauuccaa

SEQ ID NO: 276834 - RNA, 14 nt, Homo sapiens
ugcuuaaaauagca

SEQ ID NO: 276835 - RNA, 19 nt, Homo sapiens
ugcuuugcggcaucuccau

SEQ ID NO: 276836 - RNA, 16 nt, Homo sapiens
ugcuuuggaaaucaca

SEQ ID NO: 276837 - RNA, 17 nt, Homo sapiens
ugcuuuguaugcacuuu

SEQ ID NO: 276838 - RNA, 13 nt, Homo sapiens
ugcuuugugauuu

SEQ ID NO: 276839 - RNA, 21 nt, Homo sapiens
ugcuuuuuaaagaaugcucuu

SEQ ID NO: 276840 - RNA, 18 nt, Homo sapiens
uggaaaaaaaaaagaugu

SEQ ID NO: 276841 - RNA, 18 nt, Homo sapiens
uggaaaaaaaacauugca

SEQ ID NO: 276842 - RNA, 14 nt, Homo sapiens
uggaaaauaaauca

SEQ ID NO: 276843 - RNA, 12 nt, Homo sapiens
uggaaaauguuc

SEQ ID NO: 276844 - RNA, 17 nt, Homo sapiens
uggaaagaaaaagcaau

SEQ ID NO: 276845 - RNA, 18 nt, Homo sapiens
uggaaagaguaggaagac

SEQ ID NO: 276846 - RNA, 14 nt, Homo sapiens
uggaaauaaaguca

SEQ ID NO: 276847 - RNA, 21 nt, Homo sapiens
uggaaauaaagucagauggaa

SEQ ID NO: 276848 - RNA, 16 nt, Homo sapiens
uggaaauagugauuuc

SEQ ID NO: 276849 - RNA, 19 nt, Homo sapiens
uggaaauagugauuuccac

SEQ ID NO: 276850 - RNA, 23 nt, Homo sapiens
uggaaccaacacuaacauauaau

SEQ ID NO: 276851 - RNA, 23 nt, Homo sapiens
uggaagaagccauugagcucucc

SEQ ID NO: 276852 - RNA, 19 nt, Homo sapiens
uggaagagcuccuugauau

SEQ ID NO: 276853 - RNA, 12 nt, Homo sapiens
uggaagauggca

SEQ ID NO: 276854 - RNA, 14 nt, Homo sapiens
uggaagcacagcuu

SEQ ID NO: 276855 - RNA, 15 nt, Homo sapiens
uggaagcacagcuuc

SEQ ID NO: 276856 - RNA, 15 nt, Homo sapiens
uggaagugugugauc

SEQ ID NO: 276857 - RNA, 13 nt, Homo sapiens
uggaaucuuguaa

SEQ ID NO: 276858 - RNA, 22 nt, Homo sapiens
uggaauuuugugcccccaugua

SEQ ID NO: 276859 - RNA, 12 nt, Homo sapiens
uggacacagcuc

SEQ ID NO: 276860 - RNA, 18 nt, Homo sapiens
uggacaggcuucgucuca

SEQ ID NO: 276861 - RNA, 23 nt, Homo sapiens
uggacucauugcuucacaaccca

SEQ ID NO: 276862 - RNA, 18 nt, Homo sapiens
uggacugguugguuuugc

SEQ ID NO: 276863 - RNA, 20 nt, Homo sapiens
uggagaaaauggacguguua

SEQ ID NO: 276864 - RNA, 22 nt, Homo sapiens
uggagaaaauggguuuauucac

SEQ ID NO: 276865 - RNA, 23 nt, Homo sapiens
uggagaaacccuugaaaagacau

SEQ ID NO: 276866 - RNA, 13 nt, Homo sapiens
uggagaagcuccc

SEQ ID NO: 276867 - RNA, 21 nt, Homo sapiens
uggagagaaguugcccuccag

SEQ ID NO: 276868 - RNA, 12 nt, Homo sapiens
uggagagccacc

SEQ ID NO: 276869 - RNA, 12 nt, Homo sapiens
uggagagcugcu

SEQ ID NO: 276870 - RNA, 24 nt, Homo sapiens
uggagcugagcagguguucuucau

SEQ ID NO: 276871 - RNA, 14 nt, Homo sapiens
uggagcugggcuaa

SEQ ID NO: 276872 - RNA, 18 nt, Homo sapiens
uggaggaaagugauaucc

SEQ ID NO: 276873 - RNA, 16 nt, Homo sapiens
uggaggcacacagcug

SEQ ID NO: 276874 - RNA, 19 nt, Homo sapiens
uggaggggggaggugggau

SEQ ID NO: 276875 - RNA, 24 nt, Homo sapiens
uggagguauucaauauccuuugcc

SEQ ID NO: 276876 - RNA, 21 nt, Homo sapiens
uggagguuuguuuagaagaag

SEQ ID NO: 276877 - RNA, 13 nt, Homo sapiens
uggagucugucaa

SEQ ID NO: 276878 - RNA, 18 nt, Homo sapiens
uggauauuuuuuacuuua

SEQ ID NO: 276879 - RNA, 13 nt, Homo sapiens
uggaucuaccugg

SEQ ID NO: 276880 - RNA, 18 nt, Homo sapiens
uggaucuccauucucuca

SEQ ID NO: 276881 - RNA, 12 nt, Homo sapiens
uggaucugugag

SEQ ID NO: 276882 - RNA, 20 nt, Homo sapiens
uggaugaaugcccagugaga

SEQ ID NO: 276883 - RNA, 14 nt, Homo sapiens
uggaugcugugaag

SEQ ID NO: 276884 - RNA, 20 nt, Homo sapiens
uggaugcugugaagagucua

SEQ ID NO: 276885 - RNA, 13 nt, Homo sapiens
uggauguucugac

SEQ ID NO: 276886 - RNA, 21 nt, Homo sapiens
uggauuacaggcaugugccac

SEQ ID NO: 276887 - RNA, 20 nt, Homo sapiens
uggauucuuuaaacgcucua

SEQ ID NO: 276888 - RNA, 23 nt, Homo sapiens
uggauugugccuaauguguuuga

SEQ ID NO: 276889 - RNA, 23 nt, Homo sapiens
uggauuuggguuggaagugaggg

SEQ ID NO: 276890 - RNA, 15 nt, Homo sapiens
uggauuugucuuugg

SEQ ID NO: 276891 - RNA, 19 nt, Homo sapiens
uggcaaagaugaucaguau

SEQ ID NO: 276892 - RNA, 12 nt, Homo sapiens
uggcaccagcag

SEQ ID NO: 276893 - RNA, 19 nt, Homo sapiens
uggcacugguuuguucccu

SEQ ID NO: 276894 - RNA, 16 nt, Homo sapiens
uggcagccgugccuuc

SEQ ID NO: 276895 - RNA, 13 nt, Homo sapiens
uggcagcucagag

SEQ ID NO: 276896 - RNA, 16 nt, Homo sapiens
uggcaggacagcuccu

SEQ ID NO: 276897 - RNA, 21 nt, Homo sapiens
uggcaguggaacuaagaaagc

SEQ ID NO: 276898 - RNA, 21 nt, Homo sapiens
uggcagugggagcugccuguu

SEQ ID NO: 276899 - RNA, 21 nt, Homo sapiens
uggcauaacauaaaucuguga

SEQ ID NO: 276900 - RNA, 17 nt, Homo sapiens
uggcaucuuacaucuga

SEQ ID NO: 276901 - RNA, 17 nt, Homo sapiens
uggcauuacaauugcag

SEQ ID NO: 276902 - RNA, 20 nt, Homo sapiens
uggcauuuucuaugguuaca

SEQ ID NO: 276903 - RNA, 13 nt, Homo sapiens
uggccaaagccaa

SEQ ID NO: 276904 - RNA, 18 nt, Homo sapiens
uggccaggcuggucucaa

SEQ ID NO: 276905 - RNA, 12 nt, Homo sapiens
uggcccaagacc

SEQ ID NO: 276906 - RNA, 13 nt, Homo sapiens
uggcccaagaccc

SEQ ID NO: 276907 - RNA, 16 nt, Homo sapiens
uggcccacgcacuucg

SEQ ID NO: 276908 - RNA, 13 nt, Homo sapiens
uggcccacugcau

SEQ ID NO: 276909 - RNA, 13 nt, Homo sapiens
uggcccagccaaa

SEQ ID NO: 276910 - RNA, 18 nt, Homo sapiens
uggcccccuuucccgggc

SEQ ID NO: 276911 - RNA, 17 nt, Homo sapiens
uggccccugcccggcug

SEQ ID NO: 276912 - RNA, 14 nt, Homo sapiens
uggcccuaugcuuc

SEQ ID NO: 276913 - RNA, 14 nt, Homo sapiens
uggcccuguuucuc

SEQ ID NO: 276914 - RNA, 19 nt, Homo sapiens
uggcccuguuucuccccac

SEQ ID NO: 276915 - RNA, 14 nt, Homo sapiens
uggccgggcagggu

SEQ ID NO: 276916 - RNA, 15 nt, Homo sapiens
uggccucaagugauu

SEQ ID NO: 276917 - RNA, 21 nt, Homo sapiens
uggccucauucagcagaauga

SEQ ID NO: 276918 - RNA, 17 nt, Homo sapiens
uggccuccccugccacc

SEQ ID NO: 276919 - RNA, 22 nt, Homo sapiens
uggccuccccugccaccaggcc

SEQ ID NO: 276920 - RNA, 11 nt, Homo sapiens
uggccuggggc

SEQ ID NO: 276921 - RNA, 14 nt, Homo sapiens
uggccugucuuugg

SEQ ID NO: 276922 - RNA, 17 nt, Homo sapiens
uggccuugaaaccaccu

SEQ ID NO: 276923 - RNA, 18 nt, Homo sapiens
uggccuugaaaccaccuu

SEQ ID NO: 276924 - RNA, 16 nt, Homo sapiens
uggcucacaccuguaa

SEQ ID NO: 276925 - RNA, 13 nt, Homo sapiens
uggcucaucucuu

SEQ ID NO: 276926 - RNA, 15 nt, Homo sapiens
uggcucuacuuucag

SEQ ID NO: 276927 - RNA, 16 nt, Homo sapiens
uggcucuguuggcaga

SEQ ID NO: 276928 - RNA, 21 nt, Homo sapiens
uggcugaucauugcaguauca

SEQ ID NO: 276929 - RNA, 14 nt, Homo sapiens
uggcugccuuagaa

SEQ ID NO: 276930 - RNA, 12 nt, Homo sapiens
uggcugccuugu

SEQ ID NO: 276931 - RNA, 15 nt, Homo sapiens
uggcugcuagcacuu

SEQ ID NO: 276932 - RNA, 23 nt, Homo sapiens
uggcuucacagaugugugauuca

SEQ ID NO: 276933 - RNA, 20 nt, Homo sapiens
uggcuuuucugauccaguuu

SEQ ID NO: 276934 - RNA, 16 nt, Homo sapiens
uggcuuuugugcauua

SEQ ID NO: 276935 - RNA, 18 nt, Homo sapiens
ugggaacuagacucccaa

SEQ ID NO: 276936 - RNA, 17 nt, Homo sapiens
ugggaacuccuaaauca

SEQ ID NO: 276937 - RNA, 15 nt, Homo sapiens
ugggaacugcaauaa

SEQ ID NO: 276938 - RNA, 16 nt, Homo sapiens
ugggaagaacaugcua

SEQ ID NO: 276939 - RNA, 22 nt, Homo sapiens
ugggaaggguccaucucagaga

SEQ ID NO: 276940 - RNA, 12 nt, Homo sapiens
ugggacacaguu

SEQ ID NO: 276941 - RNA, 15 nt, Homo sapiens
ugggacacccuguga

SEQ ID NO: 276942 - RNA, 12 nt, Homo sapiens
ugggaccacaga

SEQ ID NO: 276943 - RNA, 16 nt, Homo sapiens
ugggaccacagacuca

SEQ ID NO: 276944 - RNA, 13 nt, Homo sapiens
ugggaccacagag

SEQ ID NO: 276945 - RNA, 18 nt, Homo sapiens
ugggaccccacagaguug

SEQ ID NO: 276946 - RNA, 23 nt, Homo sapiens
ugggaccucaguuuuaucauuuu

SEQ ID NO: 276947 - RNA, 22 nt, Homo sapiens
ugggacuacaggugugagucac

SEQ ID NO: 276948 - RNA, 15 nt, Homo sapiens
ugggacucaguucuu

SEQ ID NO: 276949 - RNA, 17 nt, Homo sapiens
ugggagaaugucaguau

SEQ ID NO: 276950 - RNA, 17 nt, Homo sapiens
ugggagacacugaugua

SEQ ID NO: 276951 - RNA, 16 nt, Homo sapiens
ugggaggccaaggugg

SEQ ID NO: 276952 - RNA, 15 nt, Homo sapiens
ugggaggccauuugu

SEQ ID NO: 276953 - RNA, 14 nt, Homo sapiens
ugggagugagggau

SEQ ID NO: 276954 - RNA, 13 nt, Homo sapiens
ugggauuacaggg

SEQ ID NO: 276955 - RNA, 14 nt, Homo sapiens
ugggauuacaggga

SEQ ID NO: 276956 - RNA, 15 nt, Homo sapiens
ugggauuacagggau

SEQ ID NO: 276957 - RNA, 17 nt, Homo sapiens
ugggauuacagguguga

SEQ ID NO: 276958 - RNA, 12 nt, Homo sapiens
ugggcacaacca

SEQ ID NO: 276959 - RNA, 16 nt, Homo sapiens
ugggcagagcagagac

SEQ ID NO: 276960 - RNA, 13 nt, Homo sapiens
ugggcagagccca

SEQ ID NO: 276961 - RNA, 18 nt, Homo sapiens
ugggcagcuaagcagucu

SEQ ID NO: 276962 - RNA, 13 nt, Homo sapiens
ugggcauucacac

SEQ ID NO: 276963 - RNA, 18 nt, Homo sapiens
ugggccaagucaaagaca

SEQ ID NO: 276964 - RNA, 14 nt, Homo sapiens
ugggccaccagaga

SEQ ID NO: 276965 - RNA, 18 nt, Homo sapiens
ugggcccaaugcacuuug

SEQ ID NO: 276966 - RNA, 23 nt, Homo sapiens
ugggauaucacuuccaugacaua

SEQ ID NO: 276967 - RNA, 15 nt, Homo sapiens
ugggauggauuucca

SEQ ID NO: 276968 - RNA, 19 nt, Homo sapiens
ugggauuacaggugugaac

SEQ ID NO: 276969 - RNA, 16 nt, Homo sapiens
ugggcaauauagcaag

SEQ ID NO: 276970 - RNA, 18 nt, Homo sapiens
ugggcaauauagcaagau

SEQ ID NO: 276971 - RNA, 14 nt, Homo sapiens
ugggcaaugugaua

SEQ ID NO: 276972 - RNA, 21 nt, Homo sapiens
ugggcagagcagagaccaucc

SEQ ID NO: 276973 - RNA, 14 nt, Homo sapiens
ugggcagagcccaa

SEQ ID NO: 276974 - RNA, 12 nt, Homo sapiens
ugggcagaggaa

SEQ ID NO: 276975 - RNA, 13 nt, Homo sapiens
ugggcagcuguua

SEQ ID NO: 276976 - RNA, 21 nt, Homo sapiens
ugggcagcuguuagaguccaa

SEQ ID NO: 276977 - RNA, 18 nt, Homo sapiens
ugggcaggguacagacac

SEQ ID NO: 276978 - RNA, 12 nt, Homo sapiens
ugggcauucaca

SEQ ID NO: 276979 - RNA, 18 nt, Homo sapiens
ugggcauucuuguuucaa

SEQ ID NO: 276980 - RNA, 12 nt, Homo sapiens
ugggccaaagaa

SEQ ID NO: 276981 - RNA, 19 nt, Homo sapiens
ugggccaagucaaagacau

SEQ ID NO: 276982 - RNA, 13 nt, Homo sapiens
ugggccaccagag

SEQ ID NO: 276983 - RNA, 22 nt, Homo sapiens
ugggccacucaggggucauuca

SEQ ID NO: 276984 - RNA, 14 nt, Homo sapiens
ugggccacugugaa

SEQ ID NO: 276985 - RNA, 16 nt, Homo sapiens
ugggcccuuugagugc

SEQ ID NO: 276986 - RNA, 14 nt, Homo sapiens
ugggccuggcuccc

SEQ ID NO: 276987 - RNA, 19 nt, Homo sapiens
ugggcuggugucaccugaa

SEQ ID NO: 276988 - RNA, 23 nt, Homo sapiens
ugggcuguaacguggcacuggua

SEQ ID NO: 276989 - RNA, 16 nt, Homo sapiens
uggggaagcuucuuaa

SEQ ID NO: 276990 - RNA, 21 nt, Homo sapiens
uggggacacagcaucagcuca

SEQ ID NO: 276991 - RNA, 20 nt, Homo sapiens
uggggcagcuugaggguugg

SEQ ID NO: 276992 - RNA, 18 nt, Homo sapiens
uggggcauauucaucuac

SEQ ID NO: 276993 - RNA, 19 nt, Homo sapiens
uggggccauccacacccuc

SEQ ID NO: 276994 - RNA, 18 nt, Homo sapiens
uggggcucgaugguuacc

SEQ ID NO: 276995 - RNA, 21 nt, Homo sapiens
uggggcugccaggggagaccc

SEQ ID NO: 276996 - RNA, 23 nt, Homo sapiens
ugggguagaaggauccuccaaag

SEQ ID NO: 276997 - RNA, 23 nt, Homo sapiens
ugggucagaguuccgacugccau

SEQ ID NO: 276998 - RNA, 14 nt, Homo sapiens
ugggucaguuguau

SEQ ID NO: 276999 - RNA, 18 nt, Homo sapiens
ugggucuucagggggcca

SEQ ID NO: 277000 - RNA, 15 nt, Homo sapiens
ugggucuucccugua

SEQ ID NO: 277001 - RNA, 21 nt, Homo sapiens
ugggucuucccuguaugauuc

SEQ ID NO: 277002 - RNA, 20 nt, Homo sapiens
ugggugaauaauacaguauc

SEQ ID NO: 277003 - RNA, 22 nt, Homo sapiens
ugggugcuuaguaaguacuuaa

SEQ ID NO: 277004 - RNA, 15 nt, Homo sapiens
uggguugcaaucugg

SEQ ID NO: 277005 - RNA, 17 nt, Homo sapiens
uggguuggacaaccuca

SEQ ID NO: 277006 - RNA, 19 nt, Homo sapiens
ugguaauaaguacugugua

SEQ ID NO: 277007 - RNA, 11 nt, Homo sapiens
ugguacucugc

SEQ ID NO: 277008 - RNA, 21 nt, Homo sapiens
ugguaguuuuacaguguuucu

SEQ ID NO: 277009 - RNA, 21 nt, Homo sapiens
ugguauaaacguccuacugua

SEQ ID NO: 277010 - RNA, 12 nt, Homo sapiens
ugguaugaucac

SEQ ID NO: 277011 - RNA, 22 nt, Homo sapiens
uggucaccaaaucagcugcuac

SEQ ID NO: 277012 - RNA, 14 nt, Homo sapiens
uggucagauuugaa

SEQ ID NO: 277013 - RNA, 16 nt, Homo sapiens
uggucagcccuaggau

SEQ ID NO: 277014 - RNA, 23 nt, Homo sapiens
uggucaggcucuccaggugguca

SEQ ID NO: 277015 - RNA, 20 nt, Homo sapiens
ugguccauagagagcaagac

SEQ ID NO: 277016 - RNA, 18 nt, Homo sapiens
uggucccccuuccaugga

SEQ ID NO: 277017 - RNA, 14 nt, Homo sapiens
ugguccgaucuuug

SEQ ID NO: 277018 - RNA, 22 nt, Homo sapiens
ugguccugugccccgaccccac

SEQ ID NO: 277019 - RNA, 20 nt, Homo sapiens
ugguccuuagccccaucugc

SEQ ID NO: 277020 - RNA, 20 nt, Homo sapiens
uggucguuuucaacagaauu

SEQ ID NO: 277021 - RNA, 12 nt, Homo sapiens
uggucugugaga

SEQ ID NO: 277022 - RNA, 13 nt, Homo sapiens
uggucugugagau

SEQ ID NO: 277023 - RNA, 18 nt, Homo sapiens
uggucuguuugcauuuga

SEQ ID NO: 277024 - RNA, 14 nt, Homo sapiens
uggugacauugcac

SEQ ID NO: 277025 - RNA, 18 nt, Homo sapiens
uggugacccagucagagu

SEQ ID NO: 277026 - RNA, 17 nt, Homo sapiens
uggugacugugggcucc

SEQ ID NO: 277027 - RNA, 21 nt, Homo sapiens
uggugagaacuacucagggaa

SEQ ID NO: 277028 - RNA, 14 nt, Homo sapiens
ugguggacaugcac

SEQ ID NO: 277029 - RNA, 20 nt, Homo sapiens
ugguggacaugcacagcuaa

SEQ ID NO: 277030 - RNA, 15 nt, Homo sapiens
ugguggagggccaca

SEQ ID NO: 277031 - RNA, 23 nt, Homo sapiens
ugguggcagaguggauucuugaa

SEQ ID NO: 277032 - RNA, 23 nt, Homo sapiens
uggugugaucccagcucacugca

SEQ ID NO: 277033 - RNA, 11 nt, Homo sapiens
uggugugauuu

SEQ ID NO: 277034 - RNA, 13 nt, Homo sapiens
uggugugcuguau

SEQ ID NO: 277035 - RNA, 16 nt, Homo sapiens
ugguguugacauacau

SEQ ID NO: 277036 - RNA, 20 nt, Homo sapiens
ugguuaauaaguuucacuga

SEQ ID NO: 277037 - RNA, 14 nt, Homo sapiens
ugguucaggguugg

SEQ ID NO: 277038 - RNA, 23 nt, Homo sapiens
ugguuccggaauccuguccucag

SEQ ID NO: 277039 - RNA, 15 nt, Homo sapiens
ugguugagguuucaa

SEQ ID NO: 277040 - RNA, 18 nt, Homo sapiens
ugguuguauuaaagcagg

SEQ ID NO: 277041 - RNA, 21 nt, Homo sapiens
ugguuucuguacaacuaccuc

SEQ ID NO: 277042 - RNA, 21 nt, Homo sapiens
ugguuuugcucacaaaagucu

SEQ ID NO: 277043 - RNA, 15 nt, Homo sapiens
uguaaacugugcacc

SEQ ID NO: 277044 - RNA, 15 nt, Homo sapiens
uguaaagcaggugcc

SEQ ID NO: 277045 - RNA, 21 nt, Homo sapiens
uguaaagcaggugcccaggaa

SEQ ID NO: 277046 - RNA, 16 nt, Homo sapiens
uguaaaucccauuauu

SEQ ID NO: 277047 - RNA, 13 nt, Homo sapiens
uguaaaugugcau

SEQ ID NO: 277048 - RNA, 19 nt, Homo sapiens
uguaacaauuauguuuuca

SEQ ID NO: 277049 - RNA, 23 nt, Homo sapiens
uguaacaauuauguuuucagugc

SEQ ID NO: 277050 - RNA, 16 nt, Homo sapiens
uguaacguggcacugg

SEQ ID NO: 277051 - RNA, 17 nt, Homo sapiens
uguaagcaccccuucau

SEQ ID NO: 277052 - RNA, 22 nt, Homo sapiens
uguaauaaacucauuucuagca

SEQ ID NO: 277053 - RNA, 15 nt, Homo sapiens
uguacaaaguauuaa

SEQ ID NO: 277054 - RNA, 18 nt, Homo sapiens
uguacaaauauaagaaua

SEQ ID NO: 277055 - RNA, 20 nt, Homo sapiens
uguacaacuuuuuaccuagu

SEQ ID NO: 277056 - RNA, 15 nt, Homo sapiens
uguacagacaacaaa

SEQ ID NO: 277057 - RNA, 21 nt, Homo sapiens
uguacaguagauuuuccaaau

SEQ ID NO: 277058 - RNA, 14 nt, Homo sapiens
uguacagucuugua

SEQ ID NO: 277059 - RNA, 22 nt, Homo sapiens
uguacaguuuuuauugcuuguu

SEQ ID NO: 277060 - RNA, 13 nt, Homo sapiens
uguaccauguaca

SEQ ID NO: 277061 - RNA, 22 nt, Homo sapiens
uguaccauguugcccagaauuu

SEQ ID NO: 277062 - RNA, 16 nt, Homo sapiens
uguacccuccauguac

SEQ ID NO: 277063 - RNA, 20 nt, Homo sapiens
uguacccuccauguaccuug

SEQ ID NO: 277064 - RNA, 14 nt, Homo sapiens
uguaccugugcacg

SEQ ID NO: 277065 - RNA, 13 nt, Homo sapiens
uguacgauucacu

SEQ ID NO: 277066 - RNA, 17 nt, Homo sapiens
uguacgauucacuccuu

SEQ ID NO: 277067 - RNA, 15 nt, Homo sapiens
uguacuugccuuauu

SEQ ID NO: 277068 - RNA, 19 nt, Homo sapiens
uguacuuucccuguguacc

SEQ ID NO: 277069 - RNA, 14 nt, Homo sapiens
uguacuuuuuggca

SEQ ID NO: 277070 - RNA, 14 nt, Homo sapiens
uguagaaagugauc

SEQ ID NO: 277071 - RNA, 18 nt, Homo sapiens
uguagaagauggcacuua

SEQ ID NO: 277072 - RNA, 17 nt, Homo sapiens
uguagaagccacuauua

SEQ ID NO: 277073 - RNA, 20 nt, Homo sapiens
uguagagauggggucucaca

SEQ ID NO: 277074 - RNA, 10 nt, Homo sapiens
uguagagugg

SEQ ID NO: 277075 - RNA, 16 nt, Homo sapiens
uguagcucuuugccuc

SEQ ID NO: 277076 - RNA, 20 nt, Homo sapiens
uguauagguuuuaaagaccu

SEQ ID NO: 277077 - RNA, 15 nt, Homo sapiens
uguaucaaaugugac

SEQ ID NO: 277078 - RNA, 18 nt, Homo sapiens
uguaucaaaugugacauu

SEQ ID NO: 277079 - RNA, 23 nt, Homo sapiens
uguaucaauggagcaugugugca

SEQ ID NO: 277080 - RNA, 17 nt, Homo sapiens
uguaucaccucuucaca

SEQ ID NO: 277081 - RNA, 14 nt, Homo sapiens
uguauccauccaug

SEQ ID NO: 277082 - RNA, 19 nt, Homo sapiens
uguauccauccauggggcu

SEQ ID NO: 277083 - RNA, 13 nt, Homo sapiens
uguaucucaggaa

SEQ ID NO: 277084 - RNA, 12 nt, Homo sapiens
uguaugcacuuu

SEQ ID NO: 277085 - RNA, 17 nt, Homo sapiens
uguauuagucacagaga

SEQ ID NO: 277086 - RNA, 19 nt, Homo sapiens
uguauuuaaaugaaaguga

SEQ ID NO: 277087 - RNA, 21 nt, Homo sapiens
uguauuuaaaugaaagugaga

SEQ ID NO: 277088 - RNA, 15 nt, Homo sapiens
uguauuuaacugccu

SEQ ID NO: 277089 - RNA, 20 nt, Homo sapiens
uguauuuaccuucuaccucu

SEQ ID NO: 277090 - RNA, 14 nt, Homo sapiens
ugucaagagucgcu

SEQ ID NO: 277091 - RNA, 17 nt, Homo sapiens
ugucacaauuauuacca

SEQ ID NO: 277092 - RNA, 18 nt, Homo sapiens
ugucaccaugauucuguc

SEQ ID NO: 277093 - RNA, 21 nt, Homo sapiens
ugucagccauuccuguuccca

SEQ ID NO: 277094 - RNA, 20 nt, Homo sapiens
ugucagucuguccacgugga

SEQ ID NO: 277095 - RNA, 18 nt, Homo sapiens
ugucauaaucucuuucca

SEQ ID NO: 277096 - RNA, 21 nt, Homo sapiens
ugucaucccauugucuucuga

SEQ ID NO: 277097 - RNA, 11 nt, Homo sapiens
ugucaucucag

SEQ ID NO: 277098 - RNA, 21 nt, Homo sapiens
ugucaucucagcuggaucucc

SEQ ID NO: 277099 - RNA, 22 nt, Homo sapiens
ugucauuucaaacagucucccu

SEQ ID NO: 277100 - RNA, 12 nt, Homo sapiens
uguccagaguuu

SEQ ID NO: 277101 - RNA, 17 nt, Homo sapiens
uguccaggcacugagau

SEQ ID NO: 277102 - RNA, 15 nt, Homo sapiens
ugucccaaguuccac

SEQ ID NO: 277103 - RNA, 18 nt, Homo sapiens
ugucccagaaugccuccu

SEQ ID NO: 277104 - RNA, 16 nt, Homo sapiens
uguccccugacagggc

SEQ ID NO: 277105 - RNA, 19 nt, Homo sapiens
uguccccugacagggccag

SEQ ID NO: 277106 - RNA, 16 nt, Homo sapiens
ugucccgggacaccua

SEQ ID NO: 277107 - RNA, 20 nt, Homo sapiens
ugucccggggcuccacugaa

SEQ ID NO: 277108 - RNA, 12 nt, Homo sapiens
ugucccuaguaa

SEQ ID NO: 277109 - RNA, 15 nt, Homo sapiens
ugucccucauccaua

SEQ ID NO: 277110 - RNA, 17 nt, Homo sapiens
ugucccuuucacacugu

SEQ ID NO: 277111 - RNA, 17 nt, Homo sapiens
ugucauugauacaugca

SEQ ID NO: 277112 - RNA, 19 nt, Homo sapiens
ugucauugauacaugcauu

SEQ ID NO: 277113 - RNA, 11 nt, Homo sapiens
uguccaaagac

SEQ ID NO: 277114 - RNA, 15 nt, Homo sapiens
uguccaagauaagau

SEQ ID NO: 277115 - RNA, 15 nt, Homo sapiens
ugucccagaaaagca

SEQ ID NO: 277116 - RNA, 16 nt, Homo sapiens
ugucccagaaugccuc

SEQ ID NO: 277117 - RNA, 21 nt, Homo sapiens
ugucccagaaugccuccugca

SEQ ID NO: 277118 - RNA, 21 nt, Homo sapiens
uguccccugacagggccagug

SEQ ID NO: 277119 - RNA, 16 nt, Homo sapiens
ugucccucacuguuga

SEQ ID NO: 277120 - RNA, 22 nt, Homo sapiens
ugucccucauccauagcaccuc

SEQ ID NO: 277121 - RNA, 16 nt, Homo sapiens
ugucccugcacuugca

SEQ ID NO: 277122 - RNA, 19 nt, Homo sapiens
uguccggucccugucccag

SEQ ID NO: 277123 - RNA, 13 nt, Homo sapiens
uguccuaaugcuu

SEQ ID NO: 277124 - RNA, 20 nt, Homo sapiens
uguccuaaugcuugcugcug

SEQ ID NO: 277125 - RNA, 17 nt, Homo sapiens
uguccuacccacccucc

SEQ ID NO: 277126 - RNA, 17 nt, Homo sapiens
uguccuacucuguguca

SEQ ID NO: 277127 - RNA, 17 nt, Homo sapiens
uguccucacucucgcca

SEQ ID NO: 277128 - RNA, 22 nt, Homo sapiens
uguccuuuucuuuucuugaggc

SEQ ID NO: 277129 - RNA, 18 nt, Homo sapiens
ugucgggcccuucuugcu

SEQ ID NO: 277130 - RNA, 17 nt, Homo sapiens
ugucuaaaaucccuccu

SEQ ID NO: 277131 - RNA, 17 nt, Homo sapiens
ugucuaaaaugccucag

SEQ ID NO: 277132 - RNA, 22 nt, Homo sapiens
ugucuacaccauuaugugcgcu

SEQ ID NO: 277133 - RNA, 18 nt, Homo sapiens
ugucuacguuaccaggca

SEQ ID NO: 277134 - RNA, 14 nt, Homo sapiens
ugucucagccuccc

SEQ ID NO: 277135 - RNA, 23 nt, Homo sapiens
ugucucgugguaggacuguagaa

SEQ ID NO: 277136 - RNA, 12 nt, Homo sapiens
ugucucucauga

SEQ ID NO: 277137 - RNA, 15 nt, Homo sapiens
ugucucucaugacca

SEQ ID NO: 277138 - RNA, 14 nt, Homo sapiens
ugucucugaacugc

SEQ ID NO: 277139 - RNA, 14 nt, Homo sapiens
ugucugacaaccuc

SEQ ID NO: 277140 - RNA, 19 nt, Homo sapiens
ugucugccagccagcagcc

SEQ ID NO: 277141 - RNA, 22 nt, Homo sapiens
ugucugucuccagcacccagaa

SEQ ID NO: 277142 - RNA, 16 nt, Homo sapiens
ugucuuaaccuaccug

SEQ ID NO: 277143 - RNA, 21 nt, Homo sapiens
ugucuugccuuuuucauuauu

SEQ ID NO: 277144 - RNA, 20 nt, Homo sapiens
ugucuuuggugaacauugca

SEQ ID NO: 277145 - RNA, 13 nt, Homo sapiens
ugugagaugcuag

SEQ ID NO: 277146 - RNA, 12 nt, Homo sapiens
ugugagcaagaa

SEQ ID NO: 277147 - RNA, 16 nt, Homo sapiens
ugugagccaccacguc

SEQ ID NO: 277148 - RNA, 16 nt, Homo sapiens
ugugauggcaaagaag

SEQ ID NO: 277149 - RNA, 14 nt, Homo sapiens
ugugauguguccug

SEQ ID NO: 277150 - RNA, 21 nt, Homo sapiens
ugugauucuauaaaacacauc

SEQ ID NO: 277151 - RNA, 24 nt, Homo sapiens
ugugauucuauaaaacacaucauc

SEQ ID NO: 277152 - RNA, 14 nt, Homo sapiens
ugugcagacacuca

SEQ ID NO: 277153 - RNA, 18 nt, Homo sapiens
ugugccacacaccuugac

SEQ ID NO: 277154 - RNA, 19 nt, Homo sapiens
ugugccacacaccuugaca

SEQ ID NO: 277155 - RNA, 22 nt, Homo sapiens
ugugcucucgggugcccugcau

SEQ ID NO: 277156 - RNA, 24 nt, Homo sapiens
ugugcucugaucauccacugugcc

SEQ ID NO: 277157 - RNA, 21 nt, Homo sapiens
ugugcuucuuaaaauagccau

SEQ ID NO: 277158 - RNA, 17 nt, Homo sapiens
uguggaugauaaaacac

SEQ ID NO: 277159 - RNA, 18 nt, Homo sapiens
uguggaugauaaaacaca

SEQ ID NO: 277160 - RNA, 14 nt, Homo sapiens
uguggcgcagcaua

SEQ ID NO: 277161 - RNA, 18 nt, Homo sapiens
uguggcuggaagauccug

SEQ ID NO: 277162 - RNA, 15 nt, Homo sapiens
ugugggaaauccaca

SEQ ID NO: 277163 - RNA, 15 nt, Homo sapiens
ugugggcuccauuca

SEQ ID NO: 277164 - RNA, 21 nt, Homo sapiens
uguggggagggauuuggggcu

SEQ ID NO: 277165 - RNA, 22 nt, Homo sapiens
ugugggugggaccacagacuca

SEQ ID NO: 277166 - RNA, 17 nt, Homo sapiens
uguggugacuuuggaua

SEQ ID NO: 277167 - RNA, 18 nt, Homo sapiens
ugugguuauuuucuccau

SEQ ID NO: 277168 - RNA, 16 nt, Homo sapiens
uguguaauuagugcca

SEQ ID NO: 277169 - RNA, 17 nt, Homo sapiens
uguguacccuccaugua

SEQ ID NO: 277170 - RNA, 18 nt, Homo sapiens
uguguacccuccauguac

SEQ ID NO: 277171 - RNA, 17 nt, Homo sapiens
uguguauuuaacugccu

SEQ ID NO: 277172 - RNA, 12 nt, Homo sapiens
ugugucagcaua

SEQ ID NO: 277173 - RNA, 17 nt, Homo sapiens
ugugucauuccaaauaa

SEQ ID NO: 277174 - RNA, 14 nt, Homo sapiens
uguguccagaguuu

SEQ ID NO: 277175 - RNA, 18 nt, Homo sapiens
ugugucccccucugucca

SEQ ID NO: 277176 - RNA, 19 nt, Homo sapiens
ugugucccccucuguccag

SEQ ID NO: 277177 - RNA, 16 nt, Homo sapiens
ugugugcacguacaca

SEQ ID NO: 277178 - RNA, 21 nt, Homo sapiens
ugugugcacguacacacacau

SEQ ID NO: 277179 - RNA, 19 nt, Homo sapiens
uguguggucaacauuucuc

SEQ ID NO: 277180 - RNA, 13 nt, Homo sapiens
uguguguacucug

SEQ ID NO: 277181 - RNA, 14 nt, Homo sapiens
uguguuaucucuua

SEQ ID NO: 277182 - RNA, 20 nt, Homo sapiens
uguguucaugcacacuugca

SEQ ID NO: 277183 - RNA, 13 nt, Homo sapiens
uguguuucuugcu

SEQ ID NO: 277184 - RNA, 13 nt, Homo sapiens
uguguuucuuuag

SEQ ID NO: 277185 - RNA, 19 nt, Homo sapiens
uguguuuuguuuuguauca

SEQ ID NO: 277186 - RNA, 20 nt, Homo sapiens
uguguuuuuaauaaagacag

SEQ ID NO: 277187 - RNA, 21 nt, Homo sapiens
uguguuuuuaauaaagacagg

SEQ ID NO: 277188 - RNA, 17 nt, Homo sapiens
uguuaaaccaugggaua

SEQ ID NO: 277189 - RNA, 18 nt, Homo sapiens
uguuaacauggacaugau

SEQ ID NO: 277190 - RNA, 19 nt, Homo sapiens
uguuaagccauguguucca

SEQ ID NO: 277191 - RNA, 23 nt, Homo sapiens
uguuaagccauguguuccaaggc

SEQ ID NO: 277192 - RNA, 13 nt, Homo sapiens
uguuaaguugaug

SEQ ID NO: 277193 - RNA, 20 nt, Homo sapiens
uguuaauaaaaguacauguu

SEQ ID NO: 277194 - RNA, 20 nt, Homo sapiens
uguuaccugaaaacacugug

SEQ ID NO: 277195 - RNA, 15 nt, Homo sapiens
uguuacugucuucag

SEQ ID NO: 277196 - RNA, 17 nt, Homo sapiens
uguuagugguuacccag

SEQ ID NO: 277197 - RNA, 20 nt, Homo sapiens
uguuaucagucauaacuaaa

SEQ ID NO: 277198 - RNA, 16 nt, Homo sapiens
uguucccccugugcag

SEQ ID NO: 277199 - RNA, 18 nt, Homo sapiens
uguuccccuuccacugag

SEQ ID NO: 277200 - RNA, 20 nt, Homo sapiens
uguuccugaaccgaugagaa

SEQ ID NO: 277201 - RNA, 20 nt, Homo sapiens
uguucugacccugcuucaaa

SEQ ID NO: 277202 - RNA, 16 nt, Homo sapiens
uguucugggacacagu

SEQ ID NO: 277203 - RNA, 23 nt, Homo sapiens
uguucuucauuaccucagugaga

SEQ ID NO: 277204 - RNA, 12 nt, Homo sapiens
uguucuugugaa

SEQ ID NO: 277205 - RNA, 13 nt, Homo sapiens
uguugaacaauag

SEQ ID NO: 277206 - RNA, 13 nt, Homo sapiens
uguugacauccaa

SEQ ID NO: 277207 - RNA, 20 nt, Homo sapiens
uguugaccaggcuggaguga

SEQ ID NO: 277208 - RNA, 12 nt, Homo sapiens
uguugauuccac

SEQ ID NO: 277209 - RNA, 20 nt, Homo sapiens
uguugcucucuaguuuccag

SEQ ID NO: 277210 - RNA, 15 nt, Homo sapiens
uguuggccaguguga

SEQ ID NO: 277211 - RNA, 19 nt, Homo sapiens
uguuggggggccccacgga

SEQ ID NO: 277212 - RNA, 21 nt, Homo sapiens
uguuggggggccccacggaga

SEQ ID NO: 277213 - RNA, 20 nt, Homo sapiens
uguugucaauaacagguuug

SEQ ID NO: 277214 - RNA, 18 nt, Homo sapiens
uguuguuuucccaaagag

SEQ ID NO: 277215 - RNA, 19 nt, Homo sapiens
uguuuacagaggacaguau

SEQ ID NO: 277216 - RNA, 15 nt, Homo sapiens
uguuuauagugcucu

SEQ ID NO: 277217 - RNA, 18 nt, Homo sapiens
uguuucaaaaaaucugac

SEQ ID NO: 277218 - RNA, 22 nt, Homo sapiens
uguuucaaacaaaaagucauaa

SEQ ID NO: 277219 - RNA, 20 nt, Homo sapiens
uguuucaauugcaucuccca

SEQ ID NO: 277220 - RNA, 19 nt, Homo sapiens
uguuuccuagcacacacuu

SEQ ID NO: 277221 - RNA, 22 nt, Homo sapiens
uguuuccuuuaauuuuuuacua

SEQ ID NO: 277222 - RNA, 22 nt, Homo sapiens
uguuucuaaauuuugugauucu

SEQ ID NO: 277223 - RNA, 15 nt, Homo sapiens
uguuucugaaaggga

SEQ ID NO: 277224 - RNA, 14 nt, Homo sapiens
uguuucugaucuga

SEQ ID NO: 277225 - RNA, 18 nt, Homo sapiens
uguuucugaucugaugca

SEQ ID NO: 277226 - RNA, 18 nt, Homo sapiens
uguuucuuuuguauguaa

SEQ ID NO: 277227 - RNA, 19 nt, Homo sapiens
uguuucuuuuguauguaaa

SEQ ID NO: 277228 - RNA, 21 nt, Homo sapiens
uguuuggguauauucauuuca

SEQ ID NO: 277229 - RNA, 21 nt, Homo sapiens
uguuugguggggccauccaca

SEQ ID NO: 277230 - RNA, 16 nt, Homo sapiens
uguuuguacugugcag

SEQ ID NO: 277231 - RNA, 22 nt, Homo sapiens
uguuuuaaaugaaccaaaccaa

SEQ ID NO: 277232 - RNA, 12 nt, Homo sapiens
uguuuuccauga

SEQ ID NO: 277233 - RNA, 23 nt, Homo sapiens
uguuuugccaauuugcacauuaa

SEQ ID NO: 277234 - RNA, 20 nt, Homo sapiens
uguuuuuguucaaagccagc

SEQ ID NO: 277235 - RNA, 23 nt, Homo sapiens
uuaaaaaaaacaaaaagaacaaa

SEQ ID NO: 277236 - RNA, 22 nt, Homo sapiens
uuaaaaaauggacucuugaaau

SEQ ID NO: 277237 - RNA, 20 nt, Homo sapiens
uuaaaacaacacucacauuu

SEQ ID NO: 277238 - RNA, 22 nt, Homo sapiens
uuaaaacaacacucacauuuau

SEQ ID NO: 277239 - RNA, 23 nt, Homo sapiens
uuaaaaggaaagcagauggugga

SEQ ID NO: 277240 - RNA, 21 nt, Homo sapiens
uuaaaauagcaugccuuucuc

SEQ ID NO: 277241 - RNA, 16 nt, Homo sapiens
uuaaaauagccauaaa

SEQ ID NO: 277242 - RNA, 21 nt, Homo sapiens
uuaaacccuauugguaaagaa

SEQ ID NO: 277243 - RNA, 18 nt, Homo sapiens
uuaaaccuuaagauacua

SEQ ID NO: 277244 - RNA, 18 nt, Homo sapiens
uuaaacucugagugcaaa

SEQ ID NO: 277245 - RNA, 21 nt, Homo sapiens
uuaaagcagggauaugcugua

SEQ ID NO: 277246 - RNA, 17 nt, Homo sapiens
uuaaauaaaucauaaaa

SEQ ID NO: 277247 - RNA, 14 nt, Homo sapiens
uuaaauagaugaca

SEQ ID NO: 277248 - RNA, 20 nt, Homo sapiens
uuaaauagaugacauugacu

SEQ ID NO: 277249 - RNA, 12 nt, Homo sapiens
uuaaauaguaaa

SEQ ID NO: 277250 - RNA, 15 nt, Homo sapiens
uuaaauauuuugacu

SEQ ID NO: 277251 - RNA, 14 nt, Homo sapiens
uuaaaugaaccaaa

SEQ ID NO: 277252 - RNA, 19 nt, Homo sapiens
uuaaauguagaaagugauc

SEQ ID NO: 277253 - RNA, 21 nt, Homo sapiens
uuaaauguagaaagugaucca

SEQ ID NO: 277254 - RNA, 18 nt, Homo sapiens
uguuuuaaaugaaccaaa

SEQ ID NO: 277255 - RNA, 20 nt, Homo sapiens
uguuuuauagacccugggaa

SEQ ID NO: 277256 - RNA, 14 nt, Homo sapiens
uguuuucucuugag

SEQ ID NO: 277257 - RNA, 19 nt, Homo sapiens
uguuuuuaauaaagacagg

SEQ ID NO: 277258 - RNA, 19 nt, Homo sapiens
uguuuuuuuuuuccacuua

SEQ ID NO: 277259 - RNA, 13 nt, Homo sapiens
uuaaaaaacagag

SEQ ID NO: 277260 - RNA, 15 nt, Homo sapiens
uuaaaaauaugugua

SEQ ID NO: 277261 - RNA, 22 nt, Homo sapiens
uuaaaacccacaaaaguacaau

SEQ ID NO: 277262 - RNA, 22 nt, Homo sapiens
uuaaaagacaagacuucaguau

SEQ ID NO: 277263 - RNA, 22 nt, Homo sapiens
uuaaaauaaauuuguaugcuca

SEQ ID NO: 277264 - RNA, 13 nt, Homo sapiens
uuaaaaucuguca

SEQ ID NO: 277265 - RNA, 18 nt, Homo sapiens
uuaaaaucugucacguag

SEQ ID NO: 277266 - RNA, 14 nt, Homo sapiens
uuaaacaugcugua

SEQ ID NO: 277267 - RNA, 17 nt, Homo sapiens
uuaaaccguacacugug

SEQ ID NO: 277268 - RNA, 18 nt, Homo sapiens
uuaaaccguacacugugu

SEQ ID NO: 277269 - RNA, 20 nt, Homo sapiens
uuaaacugaaugaacaaccu

SEQ ID NO: 277270 - RNA, 18 nt, Homo sapiens
uuaaacuuaccugggcau

SEQ ID NO: 277271 - RNA, 14 nt, Homo sapiens
uuaaacuuacuuag

SEQ ID NO: 277272 - RNA, 13 nt, Homo sapiens
uuaaagaaagugu

SEQ ID NO: 277273 - RNA, 19 nt, Homo sapiens
uuaaagcugaaaacugcaa

SEQ ID NO: 277274 - RNA, 17 nt, Homo sapiens
uuaaagguacuuugcag

SEQ ID NO: 277275 - RNA, 23 nt, Homo sapiens
uuaaauaaaucauaaaacuugau

SEQ ID NO: 277276 - RNA, 20 nt, Homo sapiens
uuaaauaaugugaaacugga

SEQ ID NO: 277277 - RNA, 17 nt, Homo sapiens
uuaaauacagucuucca

SEQ ID NO: 277278 - RNA, 21 nt, Homo sapiens
uuaaaucaacgaguacuucaa

SEQ ID NO: 277279 - RNA, 24 nt, Homo sapiens
uuaaaucagccguguaaccaugga

SEQ ID NO: 277280 - RNA, 15 nt, Homo sapiens
uuaaaugaaagugag

SEQ ID NO: 277281 - RNA, 18 nt, Homo sapiens
uuaaaugaaccaaaccaa

SEQ ID NO: 277282 - RNA, 19 nt, Homo sapiens
uuaaaugaauuuuucuucc

SEQ ID NO: 277283 - RNA, 18 nt, Homo sapiens
uuaacauggacaugaucu

SEQ ID NO: 277284 - RNA, 12 nt, Homo sapiens
uuaacugaaugc

SEQ ID NO: 277285 - RNA, 12 nt, Homo sapiens
uuaagaaauuca

SEQ ID NO: 277286 - RNA, 18 nt, Homo sapiens
uuaagaaauucacuuccc

SEQ ID NO: 277287 - RNA, 17 nt, Homo sapiens
uuaagagaaaugagcug

SEQ ID NO: 277288 - RNA, 17 nt, Homo sapiens
uuaagagaaaugagcuu

SEQ ID NO: 277289 - RNA, 22 nt, Homo sapiens
uuaagagaauauuuuaaguauu

SEQ ID NO: 277290 - RNA, 11 nt, Homo sapiens
uuaagcagcuc

SEQ ID NO: 277291 - RNA, 13 nt, Homo sapiens
uuaagcagcucac

SEQ ID NO: 277292 - RNA, 18 nt, Homo sapiens
uuaagccauguguuccaa

SEQ ID NO: 277293 - RNA, 12 nt, Homo sapiens
uuaagccuuaaa

SEQ ID NO: 277294 - RNA, 19 nt, Homo sapiens
uuaaggaugcuuguacaua

SEQ ID NO: 277295 - RNA, 17 nt, Homo sapiens
uuaaguugauggugaug

SEQ ID NO: 277296 - RNA, 19 nt, Homo sapiens
uuaaguugauggugaugaa

SEQ ID NO: 277297 - RNA, 20 nt, Homo sapiens
uuaaguugauggugaugaaa

SEQ ID NO: 277298 - RNA, 18 nt, Homo sapiens
uuaauaagcccacauaua

SEQ ID NO: 277299 - RNA, 14 nt, Homo sapiens
uuacugcauagcag

SEQ ID NO: 277300 - RNA, 23 nt, Homo sapiens
uuacuguucuaaggcugugccau

SEQ ID NO: 277301 - RNA, 16 nt, Homo sapiens
uuacuuuguguucacc

SEQ ID NO: 277302 - RNA, 23 nt, Homo sapiens
uuacuuuuuccuggcucaucucu

SEQ ID NO: 277303 - RNA, 13 nt, Homo sapiens
uuagaaaaaccac

SEQ ID NO: 277304 - RNA, 19 nt, Homo sapiens
uuagaaaaaccaccaccau

SEQ ID NO: 277305 - RNA, 21 nt, Homo sapiens
uuagaaaaauccuacaaggcu

SEQ ID NO: 277306 - RNA, 18 nt, Homo sapiens
uuagaagccaacuaugau

SEQ ID NO: 277307 - RNA, 23 nt, Homo sapiens
uuagacagucaaggaguggcuua

SEQ ID NO: 277308 - RNA, 20 nt, Homo sapiens
uuagacccucaugcugccaa

SEQ ID NO: 277309 - RNA, 15 nt, Homo sapiens
uuagacccugcauuu

SEQ ID NO: 277310 - RNA, 17 nt, Homo sapiens
uuagaccuguguuacua

SEQ ID NO: 277311 - RNA, 11 nt, Homo sapiens
uuagagcucuc

SEQ ID NO: 277312 - RNA, 12 nt, Homo sapiens
uuagagcucuca

SEQ ID NO: 277313 - RNA, 20 nt, Homo sapiens
uuagagcugccugugccuuu

SEQ ID NO: 277314 - RNA, 16 nt, Homo sapiens
uuagagcuuuaccuaa

SEQ ID NO: 277315 - RNA, 17 nt, Homo sapiens
uuagagugucuuuccac

SEQ ID NO: 277316 - RNA, 23 nt, Homo sapiens
uuagauguucuaagucuuuccau

SEQ ID NO: 277317 - RNA, 15 nt, Homo sapiens
uuagcauuuugcuaa

SEQ ID NO: 277318 - RNA, 15 nt, Homo sapiens
uuagcccaaaaccaa

SEQ ID NO: 277319 - RNA, 17 nt, Homo sapiens
uuagcuuagaccucagc

SEQ ID NO: 277320 - RNA, 19 nt, Homo sapiens
uuaggcacccauccuagag

SEQ ID NO: 277321 - RNA, 12 nt, Homo sapiens
uuagguugugaa

SEQ ID NO: 277322 - RNA, 15 nt, Homo sapiens
uuagugauggagcuu

SEQ ID NO: 277323 - RNA, 20 nt, Homo sapiens
uuaguuuacaaucagccaca

SEQ ID NO: 277324 - RNA, 15 nt, Homo sapiens
uuauaaaagaugcau

SEQ ID NO: 277325 - RNA, 15 nt, Homo sapiens
uuauaaaucgcuuuu

SEQ ID NO: 277326 - RNA, 16 nt, Homo sapiens
uuauaaauuauuauga

SEQ ID NO: 277327 - RNA, 13 nt, Homo sapiens
uuauaacaguguu

SEQ ID NO: 277328 - RNA, 13 nt, Homo sapiens
uuauaacuguaaa

SEQ ID NO: 277329 - RNA, 12 nt, Homo sapiens
uuauaaucuacu

SEQ ID NO: 277330 - RNA, 13 nt, Homo sapiens
uuauacauuugau

SEQ ID NO: 277331 - RNA, 22 nt, Homo sapiens
uuauacccguuucacaugcuuu

SEQ ID NO: 277332 - RNA, 21 nt, Homo sapiens
uuauacuucucuauuaucuca

SEQ ID NO: 277333 - RNA, 14 nt, Homo sapiens
uuauauucauucuu

SEQ ID NO: 277334 - RNA, 23 nt, Homo sapiens
uuauauuuguaaauuuaugugau

SEQ ID NO: 277335 - RNA, 19 nt, Homo sapiens
uuaucaaucucuaguuguc

SEQ ID NO: 277336 - RNA, 12 nt, Homo sapiens
uuaucaguccaa

SEQ ID NO: 277337 - RNA, 12 nt, Homo sapiens
uuauccauguac

SEQ ID NO: 277338 - RNA, 15 nt, Homo sapiens
uuauccauguacuuu

SEQ ID NO: 277339 - RNA, 18 nt, Homo sapiens
uuauccuagucauucuuc

SEQ ID NO: 277340 - RNA, 13 nt, Homo sapiens
uuaucuagcuguc

SEQ ID NO: 277341 - RNA, 13 nt, Homo sapiens
uuaucuauggcac

SEQ ID NO: 277342 - RNA, 13 nt, Homo sapiens
uuaucugugcaaa

SEQ ID NO: 277343 - RNA, 17 nt, Homo sapiens
uuaugaauaguuuccaa

SEQ ID NO: 277344 - RNA, 20 nt, Homo sapiens
uuaugagaaaugccagugug

SEQ ID NO: 277345 - RNA, 21 nt, Homo sapiens
uuaugagaaaugccagugugc

SEQ ID NO: 277346 - RNA, 23 nt, Homo sapiens
uuaugccaccugaauaaagaaug

SEQ ID NO: 277347 - RNA, 23 nt, Homo sapiens
uuaugccauagcaagauugcuua

SEQ ID NO: 277348 - RNA, 20 nt, Homo sapiens
uuaugcucuuaaugauuuac

SEQ ID NO: 277349 - RNA, 18 nt, Homo sapiens
uuauggcuuuugugcauu

SEQ ID NO: 277350 - RNA, 21 nt, Homo sapiens
uuauuaaauguagaaagugau

SEQ ID NO: 277351 - RNA, 17 nt, Homo sapiens
uuauuacauggggucua

SEQ ID NO: 277352 - RNA, 19 nt, Homo sapiens
uuauuacauggggucuaga

SEQ ID NO: 277353 - RNA, 17 nt, Homo sapiens
uuauuauggcacaucag

SEQ ID NO: 277354 - RNA, 23 nt, Homo sapiens
uuauucuguaguuucacucucau

SEQ ID NO: 277355 - RNA, 17 nt, Homo sapiens
uuauucugucuggcauu

SEQ ID NO: 277356 - RNA, 18 nt, Homo sapiens
uuauuucagagagcaaau

SEQ ID NO: 277357 - RNA, 19 nt, Homo sapiens
uuauuuucuccaugucugu

SEQ ID NO: 277358 - RNA, 15 nt, Homo sapiens
uucaaauguucucca

SEQ ID NO: 277359 - RNA, 20 nt, Homo sapiens
uucaaauuuagcaaccuaga

SEQ ID NO: 277360 - RNA, 15 nt, Homo sapiens
uucaacagagacuga

SEQ ID NO: 277361 - RNA, 14 nt, Homo sapiens
uucaaccaguuuga

SEQ ID NO: 277362 - RNA, 21 nt, Homo sapiens
uucaagaaugcaguacuaaca

SEQ ID NO: 277363 - RNA, 11 nt, Homo sapiens
uucaagugauu

SEQ ID NO: 277364 - RNA, 12 nt, Homo sapiens
uucaaucucuug

SEQ ID NO: 277365 - RNA, 16 nt, Homo sapiens
uucaaucuggauucau

SEQ ID NO: 277366 - RNA, 21 nt, Homo sapiens
uucacaccaccccccaugcca

SEQ ID NO: 277367 - RNA, 22 nt, Homo sapiens
uucacagaggcgguuguaagag

SEQ ID NO: 277368 - RNA, 12 nt, Homo sapiens
uucacaguguga

SEQ ID NO: 277369 - RNA, 16 nt, Homo sapiens
uucacaucuaaccuca

SEQ ID NO: 277370 - RNA, 23 nt, Homo sapiens
uucacaucucuguagauacaggg

SEQ ID NO: 277371 - RNA, 18 nt, Homo sapiens
uucaccacaugugcacau

SEQ ID NO: 277372 - RNA, 17 nt, Homo sapiens
uucaccuagagguguuc

SEQ ID NO: 277373 - RNA, 18 nt, Homo sapiens
uucaccugcagauguucu

SEQ ID NO: 277374 - RNA, 14 nt, Homo sapiens
uucacucaaucucu

SEQ ID NO: 277375 - RNA, 12 nt, Homo sapiens
uucacucccacc

SEQ ID NO: 277376 - RNA, 16 nt, Homo sapiens
uucacugauuugacau

SEQ ID NO: 277377 - RNA, 16 nt, Homo sapiens
uucacuggacacuuca

SEQ ID NO: 277378 - RNA, 15 nt, Homo sapiens
uucacuuuugacaaa

SEQ ID NO: 277379 - RNA, 13 nt, Homo sapiens
uucagaaucucuc

SEQ ID NO: 277380 - RNA, 21 nt, Homo sapiens
uucagagacuccugcaggcag

SEQ ID NO: 277381 - RNA, 17 nt, Homo sapiens
uucagauaacuguuauu

SEQ ID NO: 277382 - RNA, 21 nt, Homo sapiens
uucagauacuggauuguacuu

SEQ ID NO: 277383 - RNA, 23 nt, Homo sapiens
uucagauauaaaagacugaccaa

SEQ ID NO: 277384 - RNA, 14 nt, Homo sapiens
uucagauuugccuu

SEQ ID NO: 277385 - RNA, 15 nt, Homo sapiens
uucagauuugccuua

SEQ ID NO: 277386 - RNA, 14 nt, Homo sapiens
uucagccaggagau

SEQ ID NO: 277387 - RNA, 14 nt, Homo sapiens
uucagcccucagaa

SEQ ID NO: 277388 - RNA, 15 nt, Homo sapiens
uucagcccucagaau

SEQ ID NO: 277389 - RNA, 20 nt, Homo sapiens
uucagccuagccgaccucag

SEQ ID NO: 277390 - RNA, 21 nt, Homo sapiens
uucagccuagccgaccucagc

SEQ ID NO: 277391 - RNA, 18 nt, Homo sapiens
uucagcucacacaugaga

SEQ ID NO: 277392 - RNA, 20 nt, Homo sapiens
uucagcuccagcucaccagc

SEQ ID NO: 277393 - RNA, 13 nt, Homo sapiens
uucagcucuacag

SEQ ID NO: 277394 - RNA, 14 nt, Homo sapiens
uucagcucugcaag

SEQ ID NO: 277395 - RNA, 16 nt, Homo sapiens
uucaggacucuaccuc

SEQ ID NO: 277396 - RNA, 21 nt, Homo sapiens
uucaggccgcaagcagcugcc

SEQ ID NO: 277397 - RNA, 17 nt, Homo sapiens
uucagggauagcacuga

SEQ ID NO: 277398 - RNA, 13 nt, Homo sapiens
uucaguaauaacu

SEQ ID NO: 277399 - RNA, 15 nt, Homo sapiens
uuauucccuuucaca

SEQ ID NO: 277400 - RNA, 16 nt, Homo sapiens
uuauugaagcagagug

SEQ ID NO: 277401 - RNA, 13 nt, Homo sapiens
uuauugacuaaca

SEQ ID NO: 277402 - RNA, 16 nt, Homo sapiens
uuauugauguuuucau

SEQ ID NO: 277403 - RNA, 23 nt, Homo sapiens
uuauuuaccugaaauaaaauuca

SEQ ID NO: 277404 - RNA, 16 nt, Homo sapiens
uuauuuauuuauucau

SEQ ID NO: 277405 - RNA, 12 nt, Homo sapiens
uucaaacuuuac

SEQ ID NO: 277406 - RNA, 21 nt, Homo sapiens
uucaaauuuagcaaccuagaa

SEQ ID NO: 277407 - RNA, 19 nt, Homo sapiens
uucaacaaagaaacaaaga

SEQ ID NO: 277408 - RNA, 22 nt, Homo sapiens
uucaaccaguuugaaccaagaa

SEQ ID NO: 277409 - RNA, 15 nt, Homo sapiens
uucaaccccaugaga

SEQ ID NO: 277410 - RNA, 17 nt, Homo sapiens
uucaacguaagacugug

SEQ ID NO: 277411 - RNA, 16 nt, Homo sapiens
uucaacugaaguucua

SEQ ID NO: 277412 - RNA, 11 nt, Homo sapiens
uucaacuggag

SEQ ID NO: 277413 - RNA, 23 nt, Homo sapiens
uucaagcagucgugccugugucc

SEQ ID NO: 277414 - RNA, 19 nt, Homo sapiens
uucaagguuauaugucuua

SEQ ID NO: 277415 - RNA, 16 nt, Homo sapiens
uucaauaacuggaaca

SEQ ID NO: 277416 - RNA, 23 nt, Homo sapiens
uucaauauccccaagcaguguga

SEQ ID NO: 277417 - RNA, 22 nt, Homo sapiens
uucaaucugaagauacaugucu

SEQ ID NO: 277418 - RNA, 22 nt, Homo sapiens
uucaauucucauuugucacaca

SEQ ID NO: 277419 - RNA, 17 nt, Homo sapiens
uucaauugcaucuccca

SEQ ID NO: 277420 - RNA, 16 nt, Homo sapiens
uucacagaugugugau

SEQ ID NO: 277421 - RNA, 17 nt, Homo sapiens
uucacagaugugugauu

SEQ ID NO: 277422 - RNA, 16 nt, Homo sapiens
uucacagauuguucua

SEQ ID NO: 277423 - RNA, 15 nt, Homo sapiens
uucacagccaugauu

SEQ ID NO: 277424 - RNA, 23 nt, Homo sapiens
uucacaguucucuccuucuuccc

SEQ ID NO: 277425 - RNA, 11 nt, Homo sapiens
uucacaucucu

SEQ ID NO: 277426 - RNA, 15 nt, Homo sapiens
uucacaucucuguag

SEQ ID NO: 277427 - RNA, 17 nt, Homo sapiens
uucaccacaugugcaca

SEQ ID NO: 277428 - RNA, 17 nt, Homo sapiens
uucacgggcaacacuca

SEQ ID NO: 277429 - RNA, 12 nt, Homo sapiens
uucacuacauua

SEQ ID NO: 277430 - RNA, 13 nt, Homo sapiens
uucagaaagaagu

SEQ ID NO: 277431 - RNA, 17 nt, Homo sapiens
uucagagugacuacaca

SEQ ID NO: 277432 - RNA, 16 nt, Homo sapiens
uucagccaagaauucu

SEQ ID NO: 277433 - RNA, 15 nt, Homo sapiens
uucagcugguugagg

SEQ ID NO: 277434 - RNA, 20 nt, Homo sapiens
uucaggacacagggaaauca

SEQ ID NO: 277435 - RNA, 16 nt, Homo sapiens
uucaggccgcaagcag

SEQ ID NO: 277436 - RNA, 13 nt, Homo sapiens
uucagggggccag

SEQ ID NO: 277437 - RNA, 23 nt, Homo sapiens
uucagggggccaggugcacagac

SEQ ID NO: 277438 - RNA, 18 nt, Homo sapiens
uucagguacuaaauaccu

SEQ ID NO: 277439 - RNA, 22 nt, Homo sapiens
uucagucaaagauacacaaucu

SEQ ID NO: 277440 - RNA, 23 nt, Homo sapiens
uucagucaaagauacacaaucug

SEQ ID NO: 277441 - RNA, 16 nt, Homo sapiens
uucagugccaaaaaca

SEQ ID NO: 277442 - RNA, 19 nt, Homo sapiens
uucagugccaaaaacaaca

SEQ ID NO: 277443 - RNA, 16 nt, Homo sapiens
uucaguguacauggaa

SEQ ID NO: 277444 - RNA, 22 nt, Homo sapiens
uucaguguacauggaauaacau

SEQ ID NO: 277445 - RNA, 21 nt, Homo sapiens
uucaguuguggccucauucag

SEQ ID NO: 277446 - RNA, 12 nt, Homo sapiens
uucaguuugcag

SEQ ID NO: 277447 - RNA, 16 nt, Homo sapiens
uucauaaguauuucaa

SEQ ID NO: 277448 - RNA, 16 nt, Homo sapiens
uucauacccuguuacc

SEQ ID NO: 277449 - RNA, 12 nt, Homo sapiens
uucauacuguaa

SEQ ID NO: 277450 - RNA, 18 nt, Homo sapiens
uucauaggucuccaagac

SEQ ID NO: 277451 - RNA, 22 nt, Homo sapiens
uucaucagacuccugugcaacu

SEQ ID NO: 277452 - RNA, 21 nt, Homo sapiens
uucaugaguuuuucccagcua

SEQ ID NO: 277453 - RNA, 15 nt, Homo sapiens
uucaugaucaucaca

SEQ ID NO: 277454 - RNA, 19 nt, Homo sapiens
uucccccacuacugcagca

SEQ ID NO: 277455 - RNA, 13 nt, Homo sapiens
uucccccacugau

SEQ ID NO: 277456 - RNA, 15 nt, Homo sapiens
uucccccgcaaugug

SEQ ID NO: 277457 - RNA, 16 nt, Homo sapiens
uuccccucuugucucc

SEQ ID NO: 277458 - RNA, 21 nt, Homo sapiens
uuccccuugcccagggcucag

SEQ ID NO: 277459 - RNA, 21 nt, Homo sapiens
uucccggguagccacuggacu

SEQ ID NO: 277460 - RNA, 14 nt, Homo sapiens
uucccguaugcuuu

SEQ ID NO: 277461 - RNA, 22 nt, Homo sapiens
uucccuacaguugaaaaacagc

SEQ ID NO: 277462 - RNA, 20 nt, Homo sapiens
uucccuauuuugccaguggg

SEQ ID NO: 277463 - RNA, 21 nt, Homo sapiens
uucccuauuuugccaguggga

SEQ ID NO: 277464 - RNA, 21 nt, Homo sapiens
uucccuccucccaugucacug

SEQ ID NO: 277465 - RNA, 22 nt, Homo sapiens
uucccugaauguauugaacuug

SEQ ID NO: 277466 - RNA, 20 nt, Homo sapiens
uucccuguaugauuccuuga

SEQ ID NO: 277467 - RNA, 18 nt, Homo sapiens
uucccuguguacccucca

SEQ ID NO: 277468 - RNA, 19 nt, Homo sapiens
uucccuguguacccuccau

SEQ ID NO: 277469 - RNA, 22 nt, Homo sapiens
uucccuguguacccuccaugua

SEQ ID NO: 277470 - RNA, 22 nt, Homo sapiens
uucccuugaggaaaaaugucca

SEQ ID NO: 277471 - RNA, 21 nt, Homo sapiens
uuccggccuccugucccucau

SEQ ID NO: 277472 - RNA, 22 nt, Homo sapiens
uuccuaacaggauuagacaguc

SEQ ID NO: 277473 - RNA, 15 nt, Homo sapiens
uuccuaauacuguca

SEQ ID NO: 277474 - RNA, 22 nt, Homo sapiens
uuccuaugcuguucacuggaca

SEQ ID NO: 277475 - RNA, 14 nt, Homo sapiens
uuccuauuugcaca

SEQ ID NO: 277476 - RNA, 18 nt, Homo sapiens
uuccucauuagcauuuug

SEQ ID NO: 277477 - RNA, 23 nt, Homo sapiens
uuccucauuagcauuuugcuaaa

SEQ ID NO: 277478 - RNA, 17 nt, Homo sapiens
uuccucuuccacuuuga

SEQ ID NO: 277479 - RNA, 11 nt, Homo sapiens
uuccugcaaug

SEQ ID NO: 277480 - RNA, 21 nt, Homo sapiens
uuccugcaaugaagucucuga

SEQ ID NO: 277481 - RNA, 22 nt, Homo sapiens
uuccugccugcggaccagauga

SEQ ID NO: 277482 - RNA, 22 nt, Homo sapiens
uuccuggcacugcuuccaguga

SEQ ID NO: 277483 - RNA, 15 nt, Homo sapiens
uuccuguagucccau

SEQ ID NO: 277484 - RNA, 21 nt, Homo sapiens
uuccuucaugaucaucacaau

SEQ ID NO: 277485 - RNA, 16 nt, Homo sapiens
uuccuuuaaaugaaua

SEQ ID NO: 277486 - RNA, 15 nt, Homo sapiens
uucgaauccagagag

SEQ ID NO: 277487 - RNA, 21 nt, Homo sapiens
uucgaauccagagagcagugu

SEQ ID NO: 277488 - RNA, 23 nt, Homo sapiens
uucgaauccagagagcagugugg

SEQ ID NO: 277489 - RNA, 20 nt, Homo sapiens
uucgagaccagccuggccaa

SEQ ID NO: 277490 - RNA, 21 nt, Homo sapiens
uucgccaaggcucacaugcuc

SEQ ID NO: 277491 - RNA, 20 nt, Homo sapiens
uucgcuggcugaucauugca

SEQ ID NO: 277492 - RNA, 21 nt, Homo sapiens
uucgcuggcugaucauugcag

SEQ ID NO: 277493 - RNA, 12 nt, Homo sapiens
uucggccuccau

SEQ ID NO: 277494 - RNA, 16 nt, Homo sapiens
uucuaaaggcuaccuu

SEQ ID NO: 277495 - RNA, 13 nt, Homo sapiens
uucuaaaguaaaa

SEQ ID NO: 277496 - RNA, 13 nt, Homo sapiens
uucuaaucaaagc

SEQ ID NO: 277497 - RNA, 20 nt, Homo sapiens
uucuaccucuuggcugccuu

SEQ ID NO: 277498 - RNA, 19 nt, Homo sapiens
uucuagcaguaugugugcu

SEQ ID NO: 277499 - RNA, 17 nt, Homo sapiens
uucuagguaggggccca

SEQ ID NO: 277500 - RNA, 15 nt, Homo sapiens
uucuaguucugccag

SEQ ID NO: 277501 - RNA, 19 nt, Homo sapiens
uucuaguucugccaggaga

SEQ ID NO: 277502 - RNA, 15 nt, Homo sapiens
uucuauaaaacacau

SEQ ID NO: 277503 - RNA, 21 nt, Homo sapiens
uucuauacuuucucacaugug

SEQ ID NO: 277504 - RNA, 14 nt, Homo sapiens
uucuaugaggcaac

SEQ ID NO: 277505 - RNA, 21 nt, Homo sapiens
uucuaugcugaguuugugcug

SEQ ID NO: 277506 - RNA, 20 nt, Homo sapiens
uucucaauguucuuuuccaa

SEQ ID NO: 277507 - RNA, 20 nt, Homo sapiens
uucucacuccuaccugguaa

SEQ ID NO: 277508 - RNA, 14 nt, Homo sapiens
uucucagcagagug

SEQ ID NO: 277509 - RNA, 15 nt, Homo sapiens
uucucauuugucaca

SEQ ID NO: 277510 - RNA, 24 nt, Homo sapiens
uucuccaagcaggacauggacaag

SEQ ID NO: 277511 - RNA, 17 nt, Homo sapiens
uucuccaccugccaggg

SEQ ID NO: 277512 - RNA, 11 nt, Homo sapiens
uucuccacugg

SEQ ID NO: 277513 - RNA, 20 nt, Homo sapiens
uucuccacuuucuagccaga

SEQ ID NO: 277514 - RNA, 15 nt, Homo sapiens
uucuccaugucugua

SEQ ID NO: 277515 - RNA, 16 nt, Homo sapiens
uucucccucagucugg

SEQ ID NO: 277516 - RNA, 15 nt, Homo sapiens
uucuccucacuguau

SEQ ID NO: 277517 - RNA, 13 nt, Homo sapiens
uucuccuccaugg

SEQ ID NO: 277518 - RNA, 17 nt, Homo sapiens
uucuccuccugucuuua

SEQ ID NO: 277519 - RNA, 19 nt, Homo sapiens
uucucuauuucuggaugaa

SEQ ID NO: 277520 - RNA, 15 nt, Homo sapiens
uucucucuucuccac

SEQ ID NO: 277521 - RNA, 16 nt, Homo sapiens
uucucuucaaauuuag

SEQ ID NO: 277522 - RNA, 22 nt, Homo sapiens
uucucuugagaggguggaauau

SEQ ID NO: 277523 - RNA, 15 nt, Homo sapiens
uucugaaaaaguauc

SEQ ID NO: 277524 - RNA, 23 nt, Homo sapiens
uucugacuugacuuuagucugca

SEQ ID NO: 277525 - RNA, 11 nt, Homo sapiens
uucugagauca

SEQ ID NO: 277526 - RNA, 16 nt, Homo sapiens
uucugagguaaccuca

SEQ ID NO: 277527 - RNA, 23 nt, Homo sapiens
uucugcagguugaagccaugucu

SEQ ID NO: 277528 - RNA, 13 nt, Homo sapiens
uucuggacuaaaa

SEQ ID NO: 277529 - RNA, 19 nt, Homo sapiens
uucugggaagaaaguagga

SEQ ID NO: 277530 - RNA, 13 nt, Homo sapiens
uucugggacacag

SEQ ID NO: 277531 - RNA, 16 nt, Homo sapiens
uucuguacaacuaccu

SEQ ID NO: 277532 - RNA, 12 nt, Homo sapiens
uucuguggcuca

SEQ ID NO: 277533 - RNA, 19 nt, Homo sapiens
uucugugguuucauguuag

SEQ ID NO: 277534 - RNA, 15 nt, Homo sapiens
uucuguguugccaag

SEQ ID NO: 277535 - RNA, 21 nt, Homo sapiens
uucuguucugucucauaugau

SEQ ID NO: 277536 - RNA, 21 nt, Homo sapiens
uucuuaaauaauaaagaucau

SEQ ID NO: 277537 - RNA, 19 nt, Homo sapiens
uucuuaauauaacugccuu

SEQ ID NO: 277538 - RNA, 14 nt, Homo sapiens
uucuuaggccacau

SEQ ID NO: 277539 - RNA, 17 nt, Homo sapiens
uucuuagucacaaaaua

SEQ ID NO: 277540 - RNA, 13 nt, Homo sapiens
uucuucaaucuga

SEQ ID NO: 277541 - RNA, 12 nt, Homo sapiens
uucuucuauggg

SEQ ID NO: 277542 - RNA, 18 nt, Homo sapiens
uucuugaacaaacuggaa

SEQ ID NO: 277543 - RNA, 22 nt, Homo sapiens
uucucucugacccucuccccac

SEQ ID NO: 277544 - RNA, 14 nt, Homo sapiens
uucucugaaggaca

SEQ ID NO: 277545 - RNA, 12 nt, Homo sapiens
uucucugccuca

SEQ ID NO: 277546 - RNA, 13 nt, Homo sapiens
uucugaaagggac

SEQ ID NO: 277547 - RNA, 23 nt, Homo sapiens
uucugacccaugcugcccuguga

SEQ ID NO: 277548 - RNA, 16 nt, Homo sapiens
uucugaggauugcaga

SEQ ID NO: 277549 - RNA, 20 nt, Homo sapiens
uucugauaaaagauggccau

SEQ ID NO: 277550 - RNA, 16 nt, Homo sapiens
uucugaucugaugcaa

SEQ ID NO: 277551 - RNA, 18 nt, Homo sapiens
uucugcauucucuaguca

SEQ ID NO: 277552 - RNA, 12 nt, Homo sapiens
uucugcauuuaa

SEQ ID NO: 277553 - RNA, 19 nt, Homo sapiens
uucugcauuuaaccgucaa

SEQ ID NO: 277554 - RNA, 20 nt, Homo sapiens
uucugcccugcuuuugcuag

SEQ ID NO: 277555 - RNA, 19 nt, Homo sapiens
uucugcuaccucacugggg

SEQ ID NO: 277556 - RNA, 13 nt, Homo sapiens
uucugcucacaua

SEQ ID NO: 277557 - RNA, 14 nt, Homo sapiens
uucuggaauguaau

SEQ ID NO: 277558 - RNA, 22 nt, Homo sapiens
uucuggaugaaugcccagugag

SEQ ID NO: 277559 - RNA, 20 nt, Homo sapiens
uucuggauuucauacuguaa

SEQ ID NO: 277560 - RNA, 16 nt, Homo sapiens
uucugggacacaguuc

SEQ ID NO: 277561 - RNA, 21 nt, Homo sapiens
uucugggcugauuugggucuc

SEQ ID NO: 277562 - RNA, 14 nt, Homo sapiens
uucuggggcuucag

SEQ ID NO: 277563 - RNA, 16 nt, Homo sapiens
uucuguaaaacagguu

SEQ ID NO: 277564 - RNA, 13 nt, Homo sapiens
uucuguaccaguu

SEQ ID NO: 277565 - RNA, 15 nt, Homo sapiens
uucuguacucaaaug

SEQ ID NO: 277566 - RNA, 20 nt, Homo sapiens
uucuguccgagcuuugaaaa

SEQ ID NO: 277567 - RNA, 16 nt, Homo sapiens
uucugucucauaugau

SEQ ID NO: 277568 - RNA, 18 nt, Homo sapiens
uucugucuuuauaaucua

SEQ ID NO: 277569 - RNA, 17 nt, Homo sapiens
uucuuauguugcccagu

SEQ ID NO: 277570 - RNA, 17 nt, Homo sapiens
uucuucacucaaucucu

SEQ ID NO: 277571 - RNA, 19 nt, Homo sapiens
uucuucagagacuccugca

SEQ ID NO: 277572 - RNA, 16 nt, Homo sapiens
uucuucauuaccucag

SEQ ID NO: 277573 - RNA, 17 nt, Homo sapiens
uucuuccaaacaggcuc

SEQ ID NO: 277574 - RNA, 13 nt, Homo sapiens
uucuuccacaaga

SEQ ID NO: 277575 - RNA, 17 nt, Homo sapiens
uucuuccaugucuauua

SEQ ID NO: 277576 - RNA, 22 nt, Homo sapiens
uucuuccccccaaaacugauua

SEQ ID NO: 277577 - RNA, 16 nt, Homo sapiens
uucuucccuacaguug

SEQ ID NO: 277578 - RNA, 13 nt, Homo sapiens
uucuucuuuuugc

SEQ ID NO: 277579 - RNA, 21 nt, Homo sapiens
uucuugauaaagaagauucug

SEQ ID NO: 277580 - RNA, 17 nt, Homo sapiens
uucuugcuuugaaugca

SEQ ID NO: 277581 - RNA, 20 nt, Homo sapiens
uucuugcuuugaaugcaugu

SEQ ID NO: 277582 - RNA, 22 nt, Homo sapiens
uucuuuaagcagcgccagugac

SEQ ID NO: 277583 - RNA, 23 nt, Homo sapiens
uucuuuaagcagcgccagugaca

SEQ ID NO: 277584 - RNA, 18 nt, Homo sapiens
uucuuucucaucuugaug

SEQ ID NO: 277585 - RNA, 21 nt, Homo sapiens
uugaaaaaaaaaaacacaaaa

SEQ ID NO: 277586 - RNA, 20 nt, Homo sapiens
uugaaaaaaaacaguggauc

SEQ ID NO: 277587 - RNA, 13 nt, Homo sapiens
uugaaaagacauc

SEQ ID NO: 277588 - RNA, 13 nt, Homo sapiens
uugaaaagucaaa

SEQ ID NO: 277589 - RNA, 15 nt, Homo sapiens
uugaaaaugggcuca

SEQ ID NO: 277590 - RNA, 22 nt, Homo sapiens
uugaaacggaugauuucuaugc

SEQ ID NO: 277591 - RNA, 13 nt, Homo sapiens
uugaaacuuguau

SEQ ID NO: 277592 - RNA, 20 nt, Homo sapiens
uugaaauauaauucuguuuc

SEQ ID NO: 277593 - RNA, 20 nt, Homo sapiens
uugaaauauaggaacuuaaa

SEQ ID NO: 277594 - RNA, 13 nt, Homo sapiens
uugaaaucuauga

SEQ ID NO: 277595 - RNA, 13 nt, Homo sapiens
uugaacaaacugg

SEQ ID NO: 277596 - RNA, 12 nt, Homo sapiens
uugaacuuggaa

SEQ ID NO: 277597 - RNA, 13 nt, Homo sapiens
uugaacuuugacc

SEQ ID NO: 277598 - RNA, 21 nt, Homo sapiens
uugaagacagagcuacacagg

SEQ ID NO: 277599 - RNA, 22 nt, Homo sapiens
uugaagacuuuucuuucagcca

SEQ ID NO: 277600 - RNA, 23 nt, Homo sapiens
uugaagacuuuucuuucagccaa

SEQ ID NO: 277601 - RNA, 17 nt, Homo sapiens
uugaagaugucauccca

SEQ ID NO: 277602 - RNA, 13 nt, Homo sapiens
uugaagauucuau

SEQ ID NO: 277603 - RNA, 13 nt, Homo sapiens
uugaaugaugcca

SEQ ID NO: 277604 - RNA, 20 nt, Homo sapiens
uugaauuuagcaaccuagaa

SEQ ID NO: 277605 - RNA, 14 nt, Homo sapiens
uugaauuuagguga

SEQ ID NO: 277606 - RNA, 16 nt, Homo sapiens
uugaauuuaggugaua

SEQ ID NO: 277607 - RNA, 15 nt, Homo sapiens
uugacaaaaucuuuu

SEQ ID NO: 277608 - RNA, 20 nt, Homo sapiens
uugcccaggcuggagugcaa

SEQ ID NO: 277609 - RNA, 20 nt, Homo sapiens
uugcccaggcuggucucaaa

SEQ ID NO: 277610 - RNA, 13 nt, Homo sapiens
uugcccagugugu

SEQ ID NO: 277611 - RNA, 15 nt, Homo sapiens
uugccucugugcugu

SEQ ID NO: 277612 - RNA, 13 nt, Homo sapiens
uugcuaccaguau

SEQ ID NO: 277613 - RNA, 15 nt, Homo sapiens
uugcuauagagccua

SEQ ID NO: 277614 - RNA, 14 nt, Homo sapiens
uugcucacaaaagu

SEQ ID NO: 277615 - RNA, 22 nt, Homo sapiens
uugcucuggacagagauggaag

SEQ ID NO: 277616 - RNA, 13 nt, Homo sapiens
uugcugaugguga

SEQ ID NO: 277617 - RNA, 18 nt, Homo sapiens
uugcugcuuguacacuca

SEQ ID NO: 277618 - RNA, 11 nt, Homo sapiens
uugcuguagaa

SEQ ID NO: 277619 - RNA, 16 nt, Homo sapiens
uugcugucccuuuucc

SEQ ID NO: 277620 - RNA, 16 nt, Homo sapiens
uugcuugcacaaacca

SEQ ID NO: 277621 - RNA, 17 nt, Homo sapiens
uuggaaaauaaaucaau

SEQ ID NO: 277622 - RNA, 15 nt, Homo sapiens
uuggaaaggaaugca

SEQ ID NO: 277623 - RNA, 21 nt, Homo sapiens
uuggaacuuuuauuacugggg

SEQ ID NO: 277624 - RNA, 14 nt, Homo sapiens
uuggaagauggcau

SEQ ID NO: 277625 - RNA, 19 nt, Homo sapiens
uuggaagugugugaucugu

SEQ ID NO: 277626 - RNA, 18 nt, Homo sapiens
uuggaauuuuccuccuuu

SEQ ID NO: 277627 - RNA, 15 nt, Homo sapiens
uuggaauuuugugcc

SEQ ID NO: 277628 - RNA, 16 nt, Homo sapiens
uuggaauuuugugccc

SEQ ID NO: 277629 - RNA, 14 nt, Homo sapiens
uuggacaaccucau

SEQ ID NO: 277630 - RNA, 21 nt, Homo sapiens
uuggacucaagcaagauuuca

SEQ ID NO: 277631 - RNA, 15 nt, Homo sapiens
uuggagaaaaugggu

SEQ ID NO: 277632 - RNA, 23 nt, Homo sapiens
uuggagaaacccuugaaaagaca

SEQ ID NO: 277633 - RNA, 14 nt, Homo sapiens
uuggagaaaggauu

SEQ ID NO: 277634 - RNA, 17 nt, Homo sapiens
uuggauguaaaacugaa

SEQ ID NO: 277635 - RNA, 16 nt, Homo sapiens
uuggcagcucuacucu

SEQ ID NO: 277636 - RNA, 23 nt, Homo sapiens
uuggcagcucuacucuggagguu

SEQ ID NO: 277637 - RNA, 18 nt, Homo sapiens
uuggcaggcuggccaguc

SEQ ID NO: 277638 - RNA, 23 nt, Homo sapiens
uuggccaugggucccauucuugg

SEQ ID NO: 277639 - RNA, 20 nt, Homo sapiens
uuggcccaggauuauuguca

SEQ ID NO: 277640 - RNA, 19 nt, Homo sapiens
uuggcuaguaaaagccauc

SEQ ID NO: 277641 - RNA, 22 nt, Homo sapiens
uuggcuguagaaggagacagag

SEQ ID NO: 277642 - RNA, 18 nt, Homo sapiens
uuggcuuguuuggagcau

SEQ ID NO: 277643 - RNA, 15 nt, Homo sapiens
uugggaacugcaaua

SEQ ID NO: 277644 - RNA, 16 nt, Homo sapiens
uugggaggccauuugu

SEQ ID NO: 277645 - RNA, 20 nt, Homo sapiens
uugggauugagucugugcca

SEQ ID NO: 277646 - RNA, 22 nt, Homo sapiens
uugggcagagcuggcucugagc

SEQ ID NO: 277647 - RNA, 15 nt, Homo sapiens
uugggcccuuugagu

SEQ ID NO: 277648 - RNA, 10 nt, Homo sapiens
uuggggacca

SEQ ID NO: 277649 - RNA, 20 nt, Homo sapiens
uuggggaugagaaagguuga

SEQ ID NO: 277650 - RNA, 20 nt, Homo sapiens
uugggggauggcuaaaacca

SEQ ID NO: 277651 - RNA, 14 nt, Homo sapiens
uugggucucucaua

SEQ ID NO: 277652 - RNA, 13 nt, Homo sapiens
uugggucuuugaa

SEQ ID NO: 277653 - RNA, 16 nt, Homo sapiens
uuggguugcaaucugg

SEQ ID NO: 277654 - RNA, 15 nt, Homo sapiens
uuggugaacauugca

SEQ ID NO: 277655 - RNA, 23 nt, Homo sapiens
uugguggcagaguggauucuuga

SEQ ID NO: 277656 - RNA, 14 nt, Homo sapiens
uugguggggccauc

SEQ ID NO: 277657 - RNA, 14 nt, Homo sapiens
uugguucuuugguc

SEQ ID NO: 277658 - RNA, 18 nt, Homo sapiens
uugguuuaaagaaagugu

SEQ ID NO: 277659 - RNA, 17 nt, Homo sapiens
uugguuuugcucacaaa

SEQ ID NO: 277660 - RNA, 17 nt, Homo sapiens
uuguaaaauuauuucau

SEQ ID NO: 277661 - RNA, 20 nt, Homo sapiens
uuguaagaguggaaccaaca

SEQ ID NO: 277662 - RNA, 17 nt, Homo sapiens
uuguacugugcaguuuu

SEQ ID NO: 277663 - RNA, 16 nt, Homo sapiens
uuguacuuugugcugg

SEQ ID NO: 277664 - RNA, 19 nt, Homo sapiens
uuguagagacagggucuca

SEQ ID NO: 277665 - RNA, 21 nt, Homo sapiens
uuguagagauggggucucaca

SEQ ID NO: 277666 - RNA, 22 nt, Homo sapiens
uuguagagauggggucucacag

SEQ ID NO: 277667 - RNA, 21 nt, Homo sapiens
uuguagagccagggucucacu

SEQ ID NO: 277668 - RNA, 17 nt, Homo sapiens
uuguauagaaccucuuu

SEQ ID NO: 277669 - RNA, 20 nt, Homo sapiens
uuguaucaaaugugacauua

SEQ ID NO: 277670 - RNA, 15 nt, Homo sapiens
uuguaugagguuuga

SEQ ID NO: 277671 - RNA, 18 nt, Homo sapiens
uuguaugauccuaaugaa

SEQ ID NO: 277672 - RNA, 17 nt, Homo sapiens
uuguauuaucaacagca

SEQ ID NO: 277673 - RNA, 19 nt, Homo sapiens
uuguauucucuccuguacc

SEQ ID NO: 277674 - RNA, 16 nt, Homo sapiens
uuguauuuaccuucua

SEQ ID NO: 277675 - RNA, 20 nt, Homo sapiens
uuguauuuaccuucuaccuc

SEQ ID NO: 277676 - RNA, 18 nt, Homo sapiens
uugucagcugcagccacu

SEQ ID NO: 277677 - RNA, 22 nt, Homo sapiens
uugucugucuccagcacccaga

SEQ ID NO: 277678 - RNA, 21 nt, Homo sapiens
uugugaaaaaauuuacuuuaa

SEQ ID NO: 277679 - RNA, 15 nt, Homo sapiens
uugugagccaccacg

SEQ ID NO: 277680 - RNA, 18 nt, Homo sapiens
uugugcauaaaaacaaga

SEQ ID NO: 277681 - RNA, 12 nt, Homo sapiens
uugugcauuugg

SEQ ID NO: 277682 - RNA, 17 nt, Homo sapiens
uuguggccucauucagc

SEQ ID NO: 277683 - RNA, 14 nt, Homo sapiens
uugugguuaaucug

SEQ ID NO: 277684 - RNA, 15 nt, Homo sapiens
uuguucagaugcuuc

SEQ ID NO: 277685 - RNA, 13 nt, Homo sapiens
uuguucuugugaa

SEQ ID NO: 277686 - RNA, 14 nt, Homo sapiens
uuguugcugucaca

SEQ ID NO: 277687 - RNA, 17 nt, Homo sapiens
uuguuggccaaagccaa

SEQ ID NO: 277688 - RNA, 16 nt, Homo sapiens
uugggcuggugucacc

SEQ ID NO: 277689 - RNA, 14 nt, Homo sapiens
uugggcuucauccu

SEQ ID NO: 277690 - RNA, 20 nt, Homo sapiens
uuggggcuaauuuaacaaga

SEQ ID NO: 277691 - RNA, 21 nt, Homo sapiens
uuggguuaggaagaaaauaau

SEQ ID NO: 277692 - RNA, 14 nt, Homo sapiens
uuggguucacagaa

SEQ ID NO: 277693 - RNA, 22 nt, Homo sapiens
uuggguucacagaagcacagca

SEQ ID NO: 277694 - RNA, 22 nt, Homo sapiens
uuggguuuauuuggaaaggaau

SEQ ID NO: 277695 - RNA, 15 nt, Homo sapiens
uugguaacucuguaa

SEQ ID NO: 277696 - RNA, 14 nt, Homo sapiens
uugguaugugacau

SEQ ID NO: 277697 - RNA, 16 nt, Homo sapiens
uuggucccccuuccau

SEQ ID NO: 277698 - RNA, 15 nt, Homo sapiens
uugguuguacuuugg

SEQ ID NO: 277699 - RNA, 17 nt, Homo sapiens
uuguaaauagcucaggu

SEQ ID NO: 277700 - RNA, 12 nt, Homo sapiens
uuguaauucuuu

SEQ ID NO: 277701 - RNA, 16 nt, Homo sapiens
uuguacagacaacaaa

SEQ ID NO: 277702 - RNA, 21 nt, Homo sapiens
uuguacauaaugcgugcauac

SEQ ID NO: 277703 - RNA, 19 nt, Homo sapiens
uuguacugugcaguuuuca

SEQ ID NO: 277704 - RNA, 21 nt, Homo sapiens
uuguagagacagggucucacu

SEQ ID NO: 277705 - RNA, 19 nt, Homo sapiens
uuguagagauggggucuca

SEQ ID NO: 277706 - RNA, 19 nt, Homo sapiens
uuguaucaccucuucacaa

SEQ ID NO: 277707 - RNA, 20 nt, Homo sapiens
uuguauuuaaaugaaaguga

SEQ ID NO: 277708 - RNA, 19 nt, Homo sapiens
uugucaaagaagucauucu

SEQ ID NO: 277709 - RNA, 13 nt, Homo sapiens
uugucaacaaagu

SEQ ID NO: 277710 - RNA, 22 nt, Homo sapiens
uugucaacaaagucacccacuu

SEQ ID NO: 277711 - RNA, 18 nt, Homo sapiens
uugucacuuuccucuucc

SEQ ID NO: 277712 - RNA, 21 nt, Homo sapiens
uugucagcugcagccacuuuc

SEQ ID NO: 277713 - RNA, 19 nt, Homo sapiens
uugucccaaguuccacugc

SEQ ID NO: 277714 - RNA, 17 nt, Homo sapiens
uugucgcucaugugugc

SEQ ID NO: 277715 - RNA, 17 nt, Homo sapiens
uugucuugagacagggu

SEQ ID NO: 277716 - RNA, 18 nt, Homo sapiens
uugugaauuaggcuguaa

SEQ ID NO: 277717 - RNA, 20 nt, Homo sapiens
uugugauacaaugcugugcc

SEQ ID NO: 277718 - RNA, 16 nt, Homo sapiens
uugugauguguccuga

SEQ ID NO: 277719 - RNA, 12 nt, Homo sapiens
uugugauugccu

SEQ ID NO: 277720 - RNA, 21 nt, Homo sapiens
uugugcauuaucuagauacug

SEQ ID NO: 277721 - RNA, 15 nt, Homo sapiens
uuguggccucauuca

SEQ ID NO: 277722 - RNA, 22 nt, Homo sapiens
uuguguuuauauauaagccaaa

SEQ ID NO: 277723 - RNA, 20 nt, Homo sapiens
uuguguuuuguuuuguauca

SEQ ID NO: 277724 - RNA, 17 nt, Homo sapiens
uuguuacuucugaggua

SEQ ID NO: 277725 - RNA, 21 nt, Homo sapiens
uuguuaguaugaggcauuugu

SEQ ID NO: 277726 - RNA, 18 nt, Homo sapiens
uuguuauucuguaguuuc

SEQ ID NO: 277727 - RNA, 23 nt, Homo sapiens
uuguucaucagacuccugugcaa

SEQ ID NO: 277728 - RNA, 16 nt, Homo sapiens
uuguuccccacugaca

SEQ ID NO: 277729 - RNA, 15 nt, Homo sapiens
uuguucuaguuuuca

SEQ ID NO: 277730 - RNA, 13 nt, Homo sapiens
uuguuuacccaau

SEQ ID NO: 277731 - RNA, 21 nt, Homo sapiens
uuguuuuaugcucagggucaa

SEQ ID NO: 277732 - RNA, 14 nt, Homo sapiens
uuuaaaaucuguca

SEQ ID NO: 277733 - RNA, 14 nt, Homo sapiens
uuuaaaauugugau

SEQ ID NO: 277734 - RNA, 22 nt, Homo sapiens
uuuaaacugaaugaacaaccuc

SEQ ID NO: 277735 - RNA, 12 nt, Homo sapiens
uuuaaagacaga

SEQ ID NO: 277736 - RNA, 22 nt, Homo sapiens
uuuaaaucaacgaguacuucaa

SEQ ID NO: 277737 - RNA, 15 nt, Homo sapiens
uuuaacaacuaugau

SEQ ID NO: 277738 - RNA, 21 nt, Homo sapiens
uuuaagaaaaaggaugcacag

SEQ ID NO: 277739 - RNA, 15 nt, Homo sapiens
uuuaauagcgucaua

SEQ ID NO: 277740 - RNA, 16 nt, Homo sapiens
uuuaaucccacuugcc

SEQ ID NO: 277741 - RNA, 21 nt, Homo sapiens
uuuaaucuuuuaugauugccu

SEQ ID NO: 277742 - RNA, 16 nt, Homo sapiens
uuuaauguuuccuuua

SEQ ID NO: 277743 - RNA, 17 nt, Homo sapiens
uuuaauguuuccuuuaa

SEQ ID NO: 277744 - RNA, 23 nt, Homo sapiens
uuuacaauaaaacuuugcugcca

SEQ ID NO: 277745 - RNA, 18 nt, Homo sapiens
uuuacaauguucauccca

SEQ ID NO: 277746 - RNA, 14 nt, Homo sapiens
uuuacauucugcaa

SEQ ID NO: 277747 - RNA, 21 nt, Homo sapiens
uuuaccccucacaauccuugc

SEQ ID NO: 277748 - RNA, 16 nt, Homo sapiens
uuuacuguccaaagac

SEQ ID NO: 277749 - RNA, 11 nt, Homo sapiens
uuuacuuuaaa

SEQ ID NO: 277750 - RNA, 12 nt, Homo sapiens
uuuagucuuguc

SEQ ID NO: 277751 - RNA, 15 nt, Homo sapiens
uuuagucuugucuca

SEQ ID NO: 277752 - RNA, 23 nt, Homo sapiens
uuuauaaagggagauaacaaucu

SEQ ID NO: 277753 - RNA, 21 nt, Homo sapiens
uuuauagaccagaaccagagc

SEQ ID NO: 277754 - RNA, 20 nt, Homo sapiens
uuuauagucgaacaauucau

SEQ ID NO: 277755 - RNA, 22 nt, Homo sapiens
uuuaucacuugccgugucaucc

SEQ ID NO: 277756 - RNA, 18 nt, Homo sapiens
uuuaucuauggcacccau

SEQ ID NO: 277757 - RNA, 21 nt, Homo sapiens
uuuaucuauggcacccaugca

SEQ ID NO: 277758 - RNA, 13 nt, Homo sapiens
uuuaugcuuuaaa

SEQ ID NO: 277759 - RNA, 11 nt, Homo sapiens
uuuaugguucu

SEQ ID NO: 277760 - RNA, 14 nt, Homo sapiens
uuuauugcuuguug

SEQ ID NO: 277761 - RNA, 21 nt, Homo sapiens
uuuauuggcuuuucugaucca

SEQ ID NO: 277762 - RNA, 16 nt, Homo sapiens
uuucaaaaccuuuuga

SEQ ID NO: 277763 - RNA, 23 nt, Homo sapiens
uuucccuguguacccuccaugua

SEQ ID NO: 277764 - RNA, 19 nt, Homo sapiens
uuucccuucuuacaaugca

SEQ ID NO: 277765 - RNA, 24 nt, Homo sapiens
uuuccuggcacugcuuccagugag

SEQ ID NO: 277766 - RNA, 19 nt, Homo sapiens
uuuccuguagucccauuga

SEQ ID NO: 277767 - RNA, 20 nt, Homo sapiens
uuuccuguagucccauugau

SEQ ID NO: 277768 - RNA, 20 nt, Homo sapiens
uuuccuucauucaacccacc

SEQ ID NO: 277769 - RNA, 17 nt, Homo sapiens
uuuccuuucgucugcca

SEQ ID NO: 277770 - RNA, 20 nt, Homo sapiens
uuucgccaaggcucacaugc

SEQ ID NO: 277771 - RNA, 14 nt, Homo sapiens
uuucuaaauuuugu

SEQ ID NO: 277772 - RNA, 12 nt, Homo sapiens
uuucuacccagc

SEQ ID NO: 277773 - RNA, 13 nt, Homo sapiens
uuucuacucgagu

SEQ ID NO: 277774 - RNA, 20 nt, Homo sapiens
uuucuccucacuguauccag

SEQ ID NO: 277775 - RNA, 17 nt, Homo sapiens
uuucucucuuacugcuu

SEQ ID NO: 277776 - RNA, 15 nt, Homo sapiens
uuucucuguauagua

SEQ ID NO: 277777 - RNA, 16 nt, Homo sapiens
uuucugaucugaugca

SEQ ID NO: 277778 - RNA, 17 nt, Homo sapiens
uuucugcaaacaccaac

SEQ ID NO: 277779 - RNA, 15 nt, Homo sapiens
uuucuguacaacuac

SEQ ID NO: 277780 - RNA, 13 nt, Homo sapiens
uuucuugcaugag

SEQ ID NO: 277781 - RNA, 19 nt, Homo sapiens
uuucuuucaaagaagccag

SEQ ID NO: 277782 - RNA, 11 nt, Homo sapiens
uuucuuugaau

SEQ ID NO: 277783 - RNA, 23 nt, Homo sapiens
uuugaaaaugggcucaaccagaa

SEQ ID NO: 277784 - RNA, 17 nt, Homo sapiens
uuugaaaccaaaccaga

SEQ ID NO: 277785 - RNA, 18 nt, Homo sapiens
uuugaaauuaaccucuca

SEQ ID NO: 277786 - RNA, 18 nt, Homo sapiens
uuugaagguagaauguuu

SEQ ID NO: 277787 - RNA, 19 nt, Homo sapiens
uuugaauacaggcauagag

SEQ ID NO: 277788 - RNA, 16 nt, Homo sapiens
uuugaaucacaguaua

SEQ ID NO: 277789 - RNA, 18 nt, Homo sapiens
uuugaaugcaugugugaa

SEQ ID NO: 277790 - RNA, 20 nt, Homo sapiens
uuugaauuuagcaaccuaga

SEQ ID NO: 277791 - RNA, 21 nt, Homo sapiens
uuugaauuuagcaaccuagaa

SEQ ID NO: 277792 - RNA, 14 nt, Homo sapiens
uuugacacugcucu

SEQ ID NO: 277793 - RNA, 14 nt, Homo sapiens
uuugaggguguaua

SEQ ID NO: 277794 - RNA, 14 nt, Homo sapiens
uuugaugcuucuuu

SEQ ID NO: 277795 - RNA, 15 nt, Homo sapiens
uuugcaaauucauga

SEQ ID NO: 277796 - RNA, 19 nt, Homo sapiens
uuugcauaagugcaugaca

SEQ ID NO: 277797 - RNA, 15 nt, Homo sapiens
uuugcauguuuugua

SEQ ID NO: 277798 - RNA, 18 nt, Homo sapiens
uuugccagugggaacucc

SEQ ID NO: 277799 - RNA, 16 nt, Homo sapiens
uuugccuaauggcaaa

SEQ ID NO: 277800 - RNA, 19 nt, Homo sapiens
uuugcuaaaugugaaugau

SEQ ID NO: 277801 - RNA, 21 nt, Homo sapiens
uuugcuaaaugugaaugauga

SEQ ID NO: 277802 - RNA, 18 nt, Homo sapiens
uuugcuaagugaggauga

SEQ ID NO: 277803 - RNA, 16 nt, Homo sapiens
uuugcuggucacugcc

SEQ ID NO: 277804 - RNA, 11 nt, Homo sapiens
uuugcuguaga

SEQ ID NO: 277805 - RNA, 12 nt, Homo sapiens
uuugcuguagaa

SEQ ID NO: 277806 - RNA, 19 nt, Homo sapiens
uuugcuucaaaaacauucu

SEQ ID NO: 277807 - RNA, 17 nt, Homo sapiens
uuuggaauauuguccau

SEQ ID NO: 277808 - RNA, 16 nt, Homo sapiens
uuuggcucagagucca

SEQ ID NO: 277809 - RNA, 21 nt, Homo sapiens
uuuggcucuucuaaucagagc

SEQ ID NO: 277810 - RNA, 20 nt, Homo sapiens
uuugggaacugcaauaaccu

SEQ ID NO: 277811 - RNA, 11 nt, Homo sapiens
uuuggggcuca

SEQ ID NO: 277812 - RNA, 17 nt, Homo sapiens
uuuggguuuugggucuu

SEQ ID NO: 277813 - RNA, 16 nt, Homo sapiens
uuugguaugugacaug

SEQ ID NO: 277814 - RNA, 13 nt, Homo sapiens
uuugguugcuuua

SEQ ID NO: 277815 - RNA, 20 nt, Homo sapiens
uuuguaucauuaugaaguca

SEQ ID NO: 277816 - RNA, 14 nt, Homo sapiens
uuugucaacaaagu

SEQ ID NO: 277817 - RNA, 22 nt, Homo sapiens
uuugucccggggcuccacugaa

SEQ ID NO: 277818 - RNA, 14 nt, Homo sapiens
uuugucucauccca

SEQ ID NO: 277819 - RNA, 17 nt, Homo sapiens
uuugugggaaauccaca

SEQ ID NO: 277820 - RNA, 13 nt, Homo sapiens
uuuguuccaugag

SEQ ID NO: 277821 - RNA, 21 nt, Homo sapiens
uuuguuccccagcccuaagau

SEQ ID NO: 277822 - RNA, 10 nt, Homo sapiens
uuuguucccu

SEQ ID NO: 277823 - RNA, 20 nt, Homo sapiens
uuuuaaacucugagugcaaa

SEQ ID NO: 277824 - RNA, 21 nt, Homo sapiens
uuuuaagaaaaaggaugcaca

SEQ ID NO: 277825 - RNA, 21 nt, Homo sapiens
uuuuaauaacuuaucuauaaa

SEQ ID NO: 277826 - RNA, 12 nt, Homo sapiens
uuuuauauccac

SEQ ID NO: 277827 - RNA, 12 nt, Homo sapiens
uuuuauauguca

SEQ ID NO: 277828 - RNA, 13 nt, Homo sapiens
uuuuaucacuugc

SEQ ID NO: 277829 - RNA, 16 nt, Homo sapiens
uuuuaucacuugccgu

SEQ ID NO: 277830 - RNA, 20 nt, Homo sapiens
uuuuauccuagucauucuuc

SEQ ID NO: 277831 - RNA, 15 nt, Homo sapiens
uuuucaaugucuaaa

SEQ ID NO: 277832 - RNA, 23 nt, Homo sapiens
uuuucaauguuagccacagugua

SEQ ID NO: 277833 - RNA, 15 nt, Human adenovirus A
aaggucagauucuuc

SEQ ID NO: 277834 - RNA, 21 nt, Human adenovirus A
aaggucagauucuucuuccca

SEQ ID NO: 277835 - RNA, 22 nt, Human adenovirus A
aaggucuagccaacauccagug

SEQ ID NO: 277836 - RNA, 13 nt, Human adenovirus A
aaguagguccaua

SEQ ID NO: 277837 - RNA, 13 nt, Human adenovirus A
aaguauuaccugc

SEQ ID NO: 277838 - RNA, 22 nt, Human adenovirus A
aaguauuccaugagcccgggga

SEQ ID NO: 277839 - RNA, 18 nt, Human adenovirus A
aagucaacccaaacugua

SEQ ID NO: 277840 - RNA, 22 nt, Human adenovirus A
aagucgggacacggcugccugc

SEQ ID NO: 277841 - RNA, 14 nt, Human adenovirus A
aaguuaaaagacca

SEQ ID NO: 277842 - RNA, 21 nt, Human adenovirus A
aaguucaccggugaagaugau

SEQ ID NO: 277843 - RNA, 14 nt, Human adenovirus A
aaguugacuggcau

SEQ ID NO: 277844 - RNA, 14 nt, Human adenovirus A
aaguuuaaacuaca

SEQ ID NO: 277845 - RNA, 23 nt, Human adenovirus A
aauaaacaauaaguacgcaauuu

SEQ ID NO: 277846 - RNA, 23 nt, Human adenovirus A
aauaaagaguuaauugauuuaca

SEQ ID NO: 277847 - RNA, 19 nt, Human adenovirus A
aauaaguauacugaugauc

SEQ ID NO: 277848 - RNA, 17 nt, Human adenovirus A
aauacaugaguguaugu

SEQ ID NO: 277849 - RNA, 13 nt, Human adenovirus A
aauagcacuuugg

SEQ ID NO: 277850 - RNA, 21 nt, Human adenovirus A
aauagucugacuuuacauaau

SEQ ID NO: 277851 - RNA, 16 nt, Human adenovirus A
aauauuguauuuccag

SEQ ID NO: 277852 - RNA, 23 nt, Human adenovirus A
aaucaaccuuucgaucccucaua

SEQ ID NO: 277853 - RNA, 22 nt, Human adenovirus A
aaucccuacccaccaucuucau

SEQ ID NO: 277854 - RNA, 22 nt, Human adenovirus A
aaucccucgcccgcacagucac

SEQ ID NO: 277855 - RNA, 16 nt, Human adenovirus A
aaucgcacacuugcua

SEQ ID NO: 277856 - RNA, 17 nt, Human adenovirus A
aaucgcagucaccacca

SEQ ID NO: 277857 - RNA, 14 nt, Human adenovirus A
aaucggcaacagca

SEQ ID NO: 277858 - RNA, 18 nt, Human adenovirus A
aaucugaaaauacaucau

SEQ ID NO: 277859 - RNA, 14 nt, Human adenovirus A
aaucuuaaauggaa

SEQ ID NO: 277860 - RNA, 20 nt, Human adenovirus A
aaucuuaaauggaaggucag

SEQ ID NO: 277861 - RNA, 18 nt, Human adenovirus A
aaucuuuuaccaaugaau

SEQ ID NO: 277862 - RNA, 22 nt, Human adenovirus A
aaugccgcuugagugacugugc

SEQ ID NO: 277863 - RNA, 16 nt, Human adenovirus A
aaugcgccugcuuaaa

SEQ ID NO: 277864 - RNA, 23 nt, Human adenovirus A
aaugcuuuguuggauagcaaagc

SEQ ID NO: 277865 - RNA, 13 nt, Human adenovirus A
aauggacuuugag

SEQ ID NO: 277866 - RNA, 23 nt, Human adenovirus A
aauggaguuguagacauagccaa

SEQ ID NO: 277867 - RNA, 17 nt, Human adenovirus A
aaugggaaggaggcagu

SEQ ID NO: 277868 - RNA, 20 nt, Human adenovirus A
aaugggaaggaggcaguuua

SEQ ID NO: 277869 - RNA, 21 nt, Human adenovirus A
aauguaagaaaaggagcagga

SEQ ID NO: 277870 - RNA, 15 nt, Human adenovirus A
aauguguuccaguau

SEQ ID NO: 277871 - RNA, 12 nt, Human adenovirus A
aauguuuguaca

SEQ ID NO: 277872 - RNA, 18 nt, Human adenovirus A
aauuaacaaaagguguuu

SEQ ID NO: 277873 - RNA, 22 nt, Human adenovirus A
aauuaauggacuuugagcaccu

SEQ ID NO: 277874 - RNA, 14 nt, Human adenovirus A
aauuauuacauggu

SEQ ID NO: 277875 - RNA, 18 nt, Human adenovirus A
aauugauacacaccucau

SEQ ID NO: 277876 - RNA, 14 nt, Human adenovirus A
aauugcguacuuau

SEQ ID NO: 277877 - RNA, 15 nt, Human adenovirus A
aauuuauacaauuca

SEQ ID NO: 277878 - RNA, 15 nt, Human adenovirus A
aauuucccucuuccc

SEQ ID NO: 277879 - RNA, 16 nt, Human adenovirus A
aauuucccucuuccca

SEQ ID NO: 277880 - RNA, 14 nt, Human adenovirus A
acaaacagugccug

SEQ ID NO: 277881 - RNA, 18 nt, Human adenovirus A
acaaaccacuuaguuuua

SEQ ID NO: 277882 - RNA, 20 nt, Human adenovirus A
acaaaccuuuacugcaaugg

SEQ ID NO: 277883 - RNA, 12 nt, Human adenovirus A
acaaacuacaua

SEQ ID NO: 277884 - RNA, 16 nt, Human adenovirus A
acaacaagucuucuga

SEQ ID NO: 277885 - RNA, 22 nt, Human adenovirus A
acaacaggugcaagaaggccau

SEQ ID NO: 277886 - RNA, 18 nt, Human adenovirus A
acaacagucaguguccau

SEQ ID NO: 277887 - RNA, 21 nt, Human adenovirus A
acaacgcugggcauggugauu

SEQ ID NO: 277888 - RNA, 15 nt, Human adenovirus A
acaacugcacuugaa

SEQ ID NO: 277889 - RNA, 21 nt, Human adenovirus A
acaagcuugacuguuuuauua

SEQ ID NO: 277890 - RNA, 18 nt, Human adenovirus A
acaaggucuagccaacau

SEQ ID NO: 277891 - RNA, 18 nt, Human adenovirus A
acaaguaccaacuaccgc

SEQ ID NO: 277892 - RNA, 13 nt, Human adenovirus A
acaaugcauuaau

SEQ ID NO: 277893 - RNA, 17 nt, Human adenovirus A
acacaaagaaaacauca

SEQ ID NO: 277894 - RNA, 23 nt, Human adenovirus A
acacccccuuuuacuucuuccaa

SEQ ID NO: 277895 - RNA, 11 nt, Human adenovirus A
acaccuacuuc

SEQ ID NO: 277896 - RNA, 21 nt, Human adenovirus A
acaccucauuaaauuuuucac

SEQ ID NO: 277897 - RNA, 20 nt, Human adenovirus A
acaccugcuccagaaacugu

SEQ ID NO: 277898 - RNA, 13 nt, Human adenovirus A
acacgcugcccac

SEQ ID NO: 277899 - RNA, 16 nt, Human adenovirus A
aacuauuaacuuugau

SEQ ID NO: 277900 - RNA, 21 nt, Human adenovirus A
aacugauuaugagauguuuau

SEQ ID NO: 277901 - RNA, 16 nt, Human adenovirus A
aacuuuacaaaccacu

SEQ ID NO: 277902 - RNA, 17 nt, Human adenovirus A
aagaaaaaccaccaggu

SEQ ID NO: 277903 - RNA, 19 nt, Human adenovirus A
aagaaaaaccaccaggugu

SEQ ID NO: 277904 - RNA, 15 nt, Human adenovirus A
aagaaaaugaugacu

SEQ ID NO: 277905 - RNA, 18 nt, Human adenovirus A
aagaaacaaacuacauag

SEQ ID NO: 277906 - RNA, 12 nt, Human adenovirus A
aagaaacugugu

SEQ ID NO: 277907 - RNA, 21 nt, Human adenovirus A
aagaaaucuuuuaccaaugaa

SEQ ID NO: 277908 - RNA, 16 nt, Human adenovirus A
aagaacacgaacugaa

SEQ ID NO: 277909 - RNA, 18 nt, Human adenovirus A
aagaaccuaacugucauc

SEQ ID NO: 277910 - RNA, 15 nt, Human adenovirus A
aagaccgaugcguua

SEQ ID NO: 277911 - RNA, 17 nt, Human adenovirus A
aagagcucgacaaggaa

SEQ ID NO: 277912 - RNA, 15 nt, Human adenovirus A
aagaggcauuccuuc

SEQ ID NO: 277913 - RNA, 11 nt, Human adenovirus A
aagcagugaaa

SEQ ID NO: 277914 - RNA, 20 nt, Human adenovirus A
aagcauuuuggauuugauuc

SEQ ID NO: 277915 - RNA, 19 nt, Human adenovirus A
aagccauggcgaccagugu

SEQ ID NO: 277916 - RNA, 13 nt, Human adenovirus A
aagccgcucucac

SEQ ID NO: 277917 - RNA, 19 nt, Human adenovirus A
aagcgcagcagaacccagu

SEQ ID NO: 277918 - RNA, 16 nt, Human adenovirus A
aagcuacguugaguac

SEQ ID NO: 277919 - RNA, 20 nt, Human adenovirus A
aagcuacguugaguacuucg

SEQ ID NO: 277920 - RNA, 17 nt, Human adenovirus A
aagcucuugaccaccgu

SEQ ID NO: 277921 - RNA, 19 nt, Human adenovirus A
aagcucuugaccaccguuc

SEQ ID NO: 277922 - RNA, 18 nt, Human adenovirus A
aaggagcaggauggugua

SEQ ID NO: 277923 - RNA, 15 nt, Human adenovirus A
aagggcuucauguuc

SEQ ID NO: 277924 - RNA, 22 nt, Human adenovirus A
aaguacgugagacuuaccauuu

SEQ ID NO: 277925 - RNA, 17 nt, Human adenovirus A
aaguagguccauagugg

SEQ ID NO: 277926 - RNA, 14 nt, Human adenovirus A
aaguauacugauga

SEQ ID NO: 277927 - RNA, 19 nt, Human adenovirus A
aaguauuaccugcaccucc

SEQ ID NO: 277928 - RNA, 20 nt, Human adenovirus A
aaguauuaccugcaccucca

SEQ ID NO: 277929 - RNA, 13 nt, Human adenovirus A
aaguauuccauga

SEQ ID NO: 277930 - RNA, 23 nt, Human adenovirus A
aagucgaaauauucaagugcagu

SEQ ID NO: 277931 - RNA, 18 nt, Human adenovirus A
aagugacgucacaacaag

SEQ ID NO: 277932 - RNA, 19 nt, Human adenovirus A
aaguuacucaauuauuaca

SEQ ID NO: 277933 - RNA, 15 nt, Human adenovirus A
aaguuuugauuguau

SEQ ID NO: 277934 - RNA, 22 nt, Human adenovirus A
aauaaaagcauacuuaccaaag

SEQ ID NO: 277935 - RNA, 13 nt, Human adenovirus A
aauaaaauugcuc

SEQ ID NO: 277936 - RNA, 14 nt, Human adenovirus A
aauaaguauacuga

SEQ ID NO: 277937 - RNA, 14 nt, Human adenovirus A
aauaauaaaaccau

SEQ ID NO: 277938 - RNA, 16 nt, Human adenovirus A
aauacaugaguguaug

SEQ ID NO: 277939 - RNA, 19 nt, Human adenovirus A
aauacuauauuaacuuuau

SEQ ID NO: 277940 - RNA, 17 nt, Human adenovirus A
aauacugcuagaacaag

SEQ ID NO: 277941 - RNA, 16 nt, Human adenovirus A
aauauucaagugcagu

SEQ ID NO: 277942 - RNA, 15 nt, Human adenovirus A
aauauuguauuucca

SEQ ID NO: 277943 - RNA, 20 nt, Human adenovirus A
aaucagcugccauacugcga

SEQ ID NO: 277944 - RNA, 17 nt, Human adenovirus A
aaucugaaaauacauca

SEQ ID NO: 277945 - RNA, 17 nt, Human adenovirus A
aaucuggacaugcaggu

SEQ ID NO: 277946 - RNA, 12 nt, Human adenovirus A
aaugcauugugu

SEQ ID NO: 277947 - RNA, 20 nt, Human adenovirus A
aaugccauuaaaugcaacuu

SEQ ID NO: 277948 - RNA, 15 nt, Human adenovirus A
aaugcgccugcuuaa

SEQ ID NO: 277949 - RNA, 18 nt, Human adenovirus A
aauggaacccuuacacuc

SEQ ID NO: 277950 - RNA, 17 nt, Human adenovirus A
aauggaaggucagauuc

SEQ ID NO: 277951 - RNA, 19 nt, Human adenovirus A
aauggaguuguagacauag

SEQ ID NO: 277952 - RNA, 12 nt, Human adenovirus A
aauggucuucaa

SEQ ID NO: 277953 - RNA, 18 nt, Human adenovirus A
aauguuauccacauugcu

SEQ ID NO: 277954 - RNA, 21 nt, Human adenovirus A
aauguugaugaauuugcaggu

SEQ ID NO: 277955 - RNA, 17 nt, Human adenovirus A
aauuaauggacuuugag

SEQ ID NO: 277956 - RNA, 16 nt, Human adenovirus A
aauuacuaaaacagua

SEQ ID NO: 277957 - RNA, 17 nt, Human adenovirus A
aauuauuacauggucau

SEQ ID NO: 277958 - RNA, 19 nt, Human adenovirus A
aauucuggaauaacaagcc

SEQ ID NO: 277959 - RNA, 15 nt, Human adenovirus A
aauucuuuauggccu

SEQ ID NO: 277960 - RNA, 23 nt, Human adenovirus A
aauugagaugguguuaugaaucu

SEQ ID NO: 277961 - RNA, 23 nt, Human adenovirus A
aauugcuaauggaagaccuuuag

SEQ ID NO: 277962 - RNA, 15 nt, Human adenovirus A
aauuggaacaguauc

SEQ ID NO: 277963 - RNA, 17 nt, Human adenovirus A
aauuucccucuucccaa

SEQ ID NO: 277964 - RNA, 22 nt, Human adenovirus A
acaaaaaggacgaggugcgaua

SEQ ID NO: 277965 - RNA, 20 nt, Human adenovirus A
acaaaccacuuaguuuuaaa

SEQ ID NO: 277966 - RNA, 14 nt, Human adenovirus A
acaaaccgugcauc

SEQ ID NO: 277967 - RNA, 16 nt, Human adenovirus A
acaaagaccccauugu

SEQ ID NO: 277968 - RNA, 23 nt, Human adenovirus A
acaaauacaguuuugaacaauua

SEQ ID NO: 277969 - RNA, 10 nt, Human adenovirus A
acaaauugcg

SEQ ID NO: 277970 - RNA, 16 nt, Human adenovirus A
acaacagcugcuguca

SEQ ID NO: 277971 - RNA, 14 nt, Human adenovirus A
acaagccgcucuca

SEQ ID NO: 277972 - RNA, 21 nt, Human adenovirus A
acaaggaaccgaccugcaaca

SEQ ID NO: 277973 - RNA, 15 nt, Human adenovirus A
acaaucacuuggcuu

SEQ ID NO: 277974 - RNA, 22 nt, Human adenovirus A
acacaaagaaaacaucacucua

SEQ ID NO: 277975 - RNA, 23 nt, Human adenovirus A
acacaaugcauuaauaauaaaac

SEQ ID NO: 277976 - RNA, 20 nt, Human adenovirus A
acaccaccucccucuuacga

SEQ ID NO: 277977 - RNA, 21 nt, Human adenovirus A
acacccccuuuuacuucuucc

SEQ ID NO: 277978 - RNA, 22 nt, Human adenovirus A
acacccccuuuuacuucuucca

SEQ ID NO: 277979 - RNA, 20 nt, Human adenovirus A
acaccuacuucacccuggga

SEQ ID NO: 277980 - RNA, 16 nt, Human adenovirus A
acaccugcuccagaaa

SEQ ID NO: 277981 - RNA, 15 nt, Human adenovirus A
acacggauacuuaau

SEQ ID NO: 277982 - RNA, 10 nt, Human adenovirus A
acacugugcg

SEQ ID NO: 277983 - RNA, 21 nt, Human adenovirus A
acacuuuaauaaaaacacugu

SEQ ID NO: 277984 - RNA, 21 nt, Human adenovirus A
acagaggcuccucacugaucg

SEQ ID NO: 277985 - RNA, 14 nt, Human adenovirus A
acagcuggcgcaca

SEQ ID NO: 277986 - RNA, 13 nt, Human adenovirus A
acaguacaaauac

SEQ ID NO: 277987 - RNA, 22 nt, Human adenovirus A
acagugcugcaggaauggccaa

SEQ ID NO: 277988 - RNA, 16 nt, Human adenovirus A
acauaaaccauggaau

SEQ ID NO: 277989 - RNA, 17 nt, Human adenovirus A
acauaaaccauggaauu

SEQ ID NO: 277990 - RNA, 16 nt, Human adenovirus A
acauaauguaagugag

SEQ ID NO: 277991 - RNA, 22 nt, Human adenovirus A
acaucaacugugcuacacgcug

SEQ ID NO: 277992 - RNA, 19 nt, Human adenovirus A
acaucaccgaggcaguuuc

SEQ ID NO: 277993 - RNA, 19 nt, Human adenovirus A
acaucaugauuugaagaua

SEQ ID NO: 277994 - RNA, 23 nt, Human adenovirus A
acaugggcaccuggaacgagauc

SEQ ID NO: 277995 - RNA, 17 nt, Human adenovirus A
acauguggagcuuucaa

SEQ ID NO: 277996 - RNA, 13 nt, Human adenovirus A
accaaauacugcu

SEQ ID NO: 277997 - RNA, 15 nt, Human adenovirus A
accaacaaacacgga

SEQ ID NO: 277998 - RNA, 19 nt, Human adenovirus A
accacguaaucaacuuaac

SEQ ID NO: 277999 - RNA, 15 nt, Human adenovirus A
accacugucgccaac

SEQ ID NO: 278000 - RNA, 19 nt, Human adenovirus A
accacugucgccaaccuca

SEQ ID NO: 278001 - RNA, 14 nt, Human adenovirus A
accagguccaugau

SEQ ID NO: 278002 - RNA, 21 nt, Human adenovirus A
accagguguauuagcacuuaa

SEQ ID NO: 278003 - RNA, 22 nt, Human adenovirus A
accaguggucguacgugguuuu

SEQ ID NO: 278004 - RNA, 19 nt, Human adenovirus A
accauacaacaaguaccaa

SEQ ID NO: 278005 - RNA, 19 nt, Human adenovirus A
acccacugguuagagccau

SEQ ID NO: 278006 - RNA, 19 nt, Human adenovirus A
acccaguaugcugaagaaa

SEQ ID NO: 278007 - RNA, 14 nt, Human adenovirus A
acccauuugacaca

SEQ ID NO: 278008 - RNA, 12 nt, Human adenovirus A
accccaguaagu

SEQ ID NO: 278009 - RNA, 14 nt, Human adenovirus A
acccccaggaugau

SEQ ID NO: 278010 - RNA, 21 nt, Human adenovirus A
acccccuuuuacuucuuccaa

SEQ ID NO: 278011 - RNA, 22 nt, Human adenovirus A
acccugaauguuuguacacuuu

SEQ ID NO: 278012 - RNA, 14 nt, Human adenovirus A
accgaggcaguuuc

SEQ ID NO: 278013 - RNA, 13 nt, Human adenovirus A
accgccugaagaa

SEQ ID NO: 278014 - RNA, 13 nt, Human adenovirus A
accgcugcucagc

SEQ ID NO: 278015 - RNA, 18 nt, Human adenovirus A
acgcugaugccacuugaa

SEQ ID NO: 278016 - RNA, 23 nt, Human adenovirus A
acgcugcguuuugugcccgugga

SEQ ID NO: 278017 - RNA, 17 nt, Human adenovirus A
acgcugggcauggugau

SEQ ID NO: 278018 - RNA, 16 nt, Human adenovirus A
acgguccuuguacagu

SEQ ID NO: 278019 - RNA, 22 nt, Human adenovirus A
acuaaagaaacaaacuacauag

SEQ ID NO: 278020 - RNA, 17 nt, Human adenovirus A
acuaaauggaagacauc

SEQ ID NO: 278021 - RNA, 18 nt, Human adenovirus A
acuaaauggaagacauca

SEQ ID NO: 278022 - RNA, 21 nt, Human adenovirus A
acuaacgcuggggcacagcuu

SEQ ID NO: 278023 - RNA, 20 nt, Human adenovirus A
acuacacaaagaaaacauca

SEQ ID NO: 278024 - RNA, 22 nt, Human adenovirus A
acuacacaaagaaaacaucacu

SEQ ID NO: 278025 - RNA, 17 nt, Human adenovirus A
acuacaguguaugucag

SEQ ID NO: 278026 - RNA, 17 nt, Human adenovirus A
acuaccgcugcucagcu

SEQ ID NO: 278027 - RNA, 16 nt, Human adenovirus A
acuauauuaacuuuau

SEQ ID NO: 278028 - RNA, 23 nt, Human adenovirus A
acucaagcggcauuccccaucca

SEQ ID NO: 278029 - RNA, 14 nt, Human adenovirus A
acugaaaaaccaac

SEQ ID NO: 278030 - RNA, 17 nt, Human adenovirus A
acugaaaauggaacccu

SEQ ID NO: 278031 - RNA, 15 nt, Human adenovirus A
acugagcacaucacc

SEQ ID NO: 278032 - RNA, 18 nt, Human adenovirus A
acugauuggccuugucua

SEQ ID NO: 278033 - RNA, 14 nt, Human adenovirus A
acugcugaagcaaa

SEQ ID NO: 278034 - RNA, 16 nt, Human adenovirus A
acuggauuugcgcacu

SEQ ID NO: 278035 - RNA, 16 nt, Human adenovirus A
acuggcauuuggucua

SEQ ID NO: 278036 - RNA, 19 nt, Human adenovirus A
acugggggcguacacuggc

SEQ ID NO: 278037 - RNA, 18 nt, Human adenovirus A
acuggucgcaccacugua

SEQ ID NO: 278038 - RNA, 17 nt, Human adenovirus A
acugucauccgcauuua

SEQ ID NO: 278039 - RNA, 17 nt, Human adenovirus A
acuguuaaucugauguc

SEQ ID NO: 278040 - RNA, 13 nt, Human adenovirus A
acuuauuacuggu

SEQ ID NO: 278041 - RNA, 18 nt, Human adenovirus A
acuucuuccaauggucuu

SEQ ID NO: 278042 - RNA, 21 nt, Human adenovirus A
acuugaauucuggaauaacaa

SEQ ID NO: 278043 - RNA, 22 nt, Human adenovirus A
acuuguuuuuucugacauggua

SEQ ID NO: 278044 - RNA, 16 nt, Human adenovirus A
acuuuacaaaccacuu

SEQ ID NO: 278045 - RNA, 14 nt, Human adenovirus A
acuuuauaugcuau

SEQ ID NO: 278046 - RNA, 20 nt, Human adenovirus A
acuuuguagcauacaauuag

SEQ ID NO: 278047 - RNA, 21 nt, Human adenovirus A
agaaaacaucacucuauuuca

SEQ ID NO: 278048 - RNA, 16 nt, Human adenovirus A
agaaacaaacuacaua

SEQ ID NO: 278049 - RNA, 17 nt, Human adenovirus A
agaacacggugaaugug

SEQ ID NO: 278050 - RNA, 19 nt, Human adenovirus A
agaacacggugaauguguu

SEQ ID NO: 278051 - RNA, 15 nt, Human adenovirus A
agaacaucaacugug

SEQ ID NO: 278052 - RNA, 18 nt, Human adenovirus A
agaagaaccuaacuguca

SEQ ID NO: 278053 - RNA, 19 nt, Human adenovirus A
agaagaaccuaacugucau

SEQ ID NO: 278054 - RNA, 16 nt, Human adenovirus A
agaaucggcaacagca

SEQ ID NO: 278055 - RNA, 12 nt, Human adenovirus A
agacaccaccuc

SEQ ID NO: 278056 - RNA, 15 nt, Human adenovirus A
agacauagccaauca

SEQ ID NO: 278057 - RNA, 14 nt, Human adenovirus A
agacaucugugucu

SEQ ID NO: 278058 - RNA, 18 nt, Human adenovirus A
agacaucugugucuuuac

SEQ ID NO: 278059 - RNA, 15 nt, Human adenovirus A
agaccauugguaaca

SEQ ID NO: 278060 - RNA, 22 nt, Human adenovirus A
agacguacccuuuguuacaccc

SEQ ID NO: 278061 - RNA, 17 nt, Human adenovirus A
agacuuaccauuuggcu

SEQ ID NO: 278062 - RNA, 22 nt, Human adenovirus A
agaggaaauuguguacuuuuca

SEQ ID NO: 278063 - RNA, 22 nt, Human adenovirus A
agaggcauuccuucauguguag

SEQ ID NO: 278064 - RNA, 22 nt, Human adenovirus A
agauaacaccugaagcugaaua

SEQ ID NO: 278065 - RNA, 19 nt, Human adenovirus A
agauaauccagucauagca

SEQ ID NO: 278066 - RNA, 16 nt, Human adenovirus A
agaugauugaaccuga

SEQ ID NO: 278067 - RNA, 22 nt, Human adenovirus A
agaugguguuaugaaucuuuau

SEQ ID NO: 278068 - RNA, 15 nt, Human adenovirus A
agauucuucuuccca

SEQ ID NO: 278069 - RNA, 16 nt, Human adenovirus A
agauucuucuucccaa

SEQ ID NO: 278070 - RNA, 17 nt, Human adenovirus A
agauucuucuucccaau

SEQ ID NO: 278071 - RNA, 23 nt, Human adenovirus A
agcaaacccuggaccacaugccu

SEQ ID NO: 278072 - RNA, 19 nt, Human adenovirus A
agcaacuuuuuaaccacug

SEQ ID NO: 278073 - RNA, 15 nt, Human adenovirus A
agcagaaaucuugaa

SEQ ID NO: 278074 - RNA, 15 nt, Human adenovirus A
agcagcaacaaggaa

SEQ ID NO: 278075 - RNA, 13 nt, Human adenovirus A
agcauacaauuag

SEQ ID NO: 278076 - RNA, 13 nt, Human adenovirus A
agcauacuuacca

SEQ ID NO: 278077 - RNA, 18 nt, Human adenovirus A
agcaucagcuaauuccuc

SEQ ID NO: 278078 - RNA, 20 nt, Human adenovirus A
agcaucagcuaauuccucaa

SEQ ID NO: 278079 - RNA, 15 nt, Human adenovirus A
agcauucgaagccaa

SEQ ID NO: 278080 - RNA, 16 nt, Human adenovirus A
agcauuuuuuguugcu

SEQ ID NO: 278081 - RNA, 20 nt, Human adenovirus A
agccguucccggaauugccu

SEQ ID NO: 278082 - RNA, 13 nt, Human adenovirus A
agccucacuggca

SEQ ID NO: 278083 - RNA, 22 nt, Human adenovirus A
agccugaaccuaauagcacuuu

SEQ ID NO: 278084 - RNA, 13 nt, Human adenovirus A
agcgggugacugg

SEQ ID NO: 278085 - RNA, 17 nt, Human adenovirus A
agcucacggugucagaa

SEQ ID NO: 278086 - RNA, 17 nt, Human adenovirus A
agcucauuggaguacaa

SEQ ID NO: 278087 - RNA, 19 nt, Human adenovirus A
agcugauuucagcuucuac

SEQ ID NO: 278088 - RNA, 14 nt, Human adenovirus A
agcugcugucacug

SEQ ID NO: 278089 - RNA, 20 nt, Human adenovirus A
agcugcuguucuuaguaggc

SEQ ID NO: 278090 - RNA, 11 nt, Human adenovirus A
agcugggaugc

SEQ ID NO: 278091 - RNA, 14 nt, Human adenovirus A
agcugggaugcuuu

SEQ ID NO: 278092 - RNA, 17 nt, Human adenovirus A
agcccggggacuaacca

SEQ ID NO: 278093 - RNA, 13 nt, Human adenovirus A
agccugcucuuac

SEQ ID NO: 278094 - RNA, 20 nt, Human adenovirus A
agcgccggaccccacaugau

SEQ ID NO: 278095 - RNA, 22 nt, Human adenovirus A
agcggcauuccccauccaaaac

SEQ ID NO: 278096 - RNA, 23 nt, Human adenovirus A
agcguccggguucacuacagugu

SEQ ID NO: 278097 - RNA, 21 nt, Human adenovirus A
agcuaugggaucgcuugcaac

SEQ ID NO: 278098 - RNA, 21 nt, Human adenovirus A
agcucauuggaguacaagcuu

SEQ ID NO: 278099 - RNA, 14 nt, Human adenovirus A
agcucgacaaggaa

SEQ ID NO: 278100 - RNA, 13 nt, Human adenovirus A
agcugaaaacaac

SEQ ID NO: 278101 - RNA, 15 nt, Human adenovirus A
agcugaaaucagcug

SEQ ID NO: 278102 - RNA, 16 nt, Human adenovirus A
agcugccaagugguau

SEQ ID NO: 278103 - RNA, 23 nt, Human adenovirus A
agcugcugucacugagcacauca

SEQ ID NO: 278104 - RNA, 22 nt, Human adenovirus A
agcugcuguucuuaguaggcua

SEQ ID NO: 278105 - RNA, 15 nt, Human adenovirus A
agcuggcgcacaagu

SEQ ID NO: 278106 - RNA, 15 nt, Human adenovirus A
agcugggugggaugc

SEQ ID NO: 278107 - RNA, 21 nt, Human adenovirus A
agcuuccgcggccgcuucuac

SEQ ID NO: 278108 - RNA, 17 nt, Human adenovirus A
agcuuguacuccaauga

SEQ ID NO: 278109 - RNA, 20 nt, Human adenovirus A
aggaaauuguguacuuuuca

SEQ ID NO: 278110 - RNA, 21 nt, Human adenovirus A
aggaaccgaccugcaacagcc

SEQ ID NO: 278111 - RNA, 14 nt, Human adenovirus A
aggaauguccucca

SEQ ID NO: 278112 - RNA, 21 nt, Human adenovirus A
aggacuuuguagcauacaauu

SEQ ID NO: 278113 - RNA, 20 nt, Human adenovirus A
aggaguugcaggaugaauuu

SEQ ID NO: 278114 - RNA, 19 nt, Human adenovirus A
aggcauuccuucaugugua

SEQ ID NO: 278115 - RNA, 16 nt, Human adenovirus A
aggccauguacuugac

SEQ ID NO: 278116 - RNA, 23 nt, Human adenovirus A
aggcgaggguccaauaguugcau

SEQ ID NO: 278117 - RNA, 22 nt, Human adenovirus A
aggcgggaaaagugacgucaca

SEQ ID NO: 278118 - RNA, 15 nt, Human adenovirus A
aggcgguauuugcua

SEQ ID NO: 278119 - RNA, 19 nt, Human adenovirus A
aggcuggguuuauggaauu

SEQ ID NO: 278120 - RNA, 23 nt, Human adenovirus A
aggcugguuuaauauacaacgcu

SEQ ID NO: 278121 - RNA, 21 nt, Human adenovirus A
aggcuguacgcccugauuucc

SEQ ID NO: 278122 - RNA, 17 nt, Human adenovirus A
aggguccaauaguugca

SEQ ID NO: 278123 - RNA, 22 nt, Human adenovirus A
agggucuacuguugaugcagua

SEQ ID NO: 278124 - RNA, 14 nt, Human adenovirus A
aggucgaggggcac

SEQ ID NO: 278125 - RNA, 21 nt, Human adenovirus A
aggucuagccaacauccagug

SEQ ID NO: 278126 - RNA, 14 nt, Human adenovirus A
aggugacaugauau

SEQ ID NO: 278127 - RNA, 14 nt, Human adenovirus A
agguuuuacagugc

SEQ ID NO: 278128 - RNA, 17 nt, Human adenovirus A
aguaaagauauucccac

SEQ ID NO: 278129 - RNA, 17 nt, Human adenovirus A
aguaacaacacgggcug

SEQ ID NO: 278130 - RNA, 16 nt, Human adenovirus A
aguagcaucagcuaau

SEQ ID NO: 278131 - RNA, 22 nt, Human adenovirus A
auuuuucccacuuuauaugcua

SEQ ID NO: 278132 - RNA, 20 nt, Human adenovirus A
auuuuuuuuuuuuuuuacac

SEQ ID NO: 278133 - RNA, 14 nt, Human adenovirus A
caaaauaaugacua

SEQ ID NO: 278134 - RNA, 18 nt, Human adenovirus A
caaaccacuuaguuuuaa

SEQ ID NO: 278135 - RNA, 19 nt, Human adenovirus A
caaacccccaggaugauuu

SEQ ID NO: 278136 - RNA, 16 nt, Human adenovirus A
caaaccggccagaugc

SEQ ID NO: 278137 - RNA, 16 nt, Human adenovirus A
caaacgcccugcuccg

SEQ ID NO: 278138 - RNA, 17 nt, Human adenovirus A
caaacgcccugcuccga

SEQ ID NO: 278139 - RNA, 20 nt, Human adenovirus A
caaacgguaguggcaaugca

SEQ ID NO: 278140 - RNA, 18 nt, Human adenovirus A
caaacuuuacaaaccacu

SEQ ID NO: 278141 - RNA, 19 nt, Human adenovirus A
caaacuuuacaaaccacuu

SEQ ID NO: 278142 - RNA, 18 nt, Human adenovirus A
caaagaacaucaacugug

SEQ ID NO: 278143 - RNA, 19 nt, Human adenovirus A
caaagaugaggcugguuua

SEQ ID NO: 278144 - RNA, 20 nt, Human adenovirus A
caaaucgcacacuugcuauu

SEQ ID NO: 278145 - RNA, 12 nt, Human adenovirus A
caaaucuaucag

SEQ ID NO: 278146 - RNA, 15 nt, Human adenovirus A
caaaucuuaaaugga

SEQ ID NO: 278147 - RNA, 17 nt, Human adenovirus A
caaaucuuaaauggaag

SEQ ID NO: 278148 - RNA, 21 nt, Human adenovirus A
caaaugaugaaugaaguggcu

SEQ ID NO: 278149 - RNA, 19 nt, Human adenovirus A
caacagcagcaacaaggaa

SEQ ID NO: 278150 - RNA, 14 nt, Human adenovirus A
caacagcugcuguc

SEQ ID NO: 278151 - RNA, 20 nt, Human adenovirus A
caacugucaaaccugacaga

SEQ ID NO: 278152 - RNA, 22 nt, Human adenovirus A
caacugugcuacacgcugccca

SEQ ID NO: 278153 - RNA, 16 nt, Human adenovirus A
caagauggccacuccc

SEQ ID NO: 278154 - RNA, 19 nt, Human adenovirus A
caagcaggagaacaagaag

SEQ ID NO: 278155 - RNA, 17 nt, Human adenovirus A
caagcggcccacuagaa

SEQ ID NO: 278156 - RNA, 19 nt, Human adenovirus A
caaggaaauacuauauuaa

SEQ ID NO: 278157 - RNA, 16 nt, Human adenovirus A
caagucuguuguuuac

SEQ ID NO: 278158 - RNA, 22 nt, Human adenovirus A
caauacagauauaaaguuuaaa

SEQ ID NO: 278159 - RNA, 22 nt, Human adenovirus A
caaugcauuaauaauaaaacca

SEQ ID NO: 278160 - RNA, 15 nt, Human adenovirus A
caaugugcaggcuaa

SEQ ID NO: 278161 - RNA, 18 nt, Human adenovirus A
caauuauuacauggucau

SEQ ID NO: 278162 - RNA, 18 nt, Human adenovirus A
cacaaagaaaacaucacu

SEQ ID NO: 278163 - RNA, 11 nt, Human adenovirus A
cacaaauugcg

SEQ ID NO: 278164 - RNA, 14 nt, Human adenovirus A
cacaucagacguac

SEQ ID NO: 278165 - RNA, 18 nt, Human adenovirus A
cacaucagacguacccuu

SEQ ID NO: 278166 - RNA, 15 nt, Human adenovirus A
cacaugaauguuaaa

SEQ ID NO: 278167 - RNA, 20 nt, Human adenovirus A
cacaugaauguuaaagagua

SEQ ID NO: 278168 - RNA, 14 nt, Human adenovirus A
cacaugauuuccag

SEQ ID NO: 278169 - RNA, 22 nt, Human adenovirus A
cacccccuuuuacuucuuccaa

SEQ ID NO: 278170 - RNA, 20 nt, Human adenovirus A
caccgaacagaggcuccuca

SEQ ID NO: 278171 - RNA, 17 nt, Human adenovirus A
caccgcuacaccacgua

SEQ ID NO: 278172 - RNA, 18 nt, Human adenovirus A
caccuacuucacccuggg

SEQ ID NO: 278173 - RNA, 19 nt, Human adenovirus A
cacgggcuggggacugggu

SEQ ID NO: 278174 - RNA, 12 nt, Human adenovirus A
cacuacagugua

SEQ ID NO: 278175 - RNA, 20 nt, Human adenovirus A
cacucagcgacaaaccuuua

SEQ ID NO: 278176 - RNA, 17 nt, Human adenovirus A
cacucuucgcugcaguu

SEQ ID NO: 278177 - RNA, 22 nt, Human adenovirus A
cacuguagugcaaaauaaugac

SEQ ID NO: 278178 - RNA, 16 nt, Human adenovirus A
cacuuaauuacaaaga

SEQ ID NO: 278179 - RNA, 16 nt, Human adenovirus A
cacuuuauaugcuauu

SEQ ID NO: 278180 - RNA, 23 nt, Human adenovirus A
cacuuuggauggcgaugagcgac

SEQ ID NO: 278181 - RNA, 13 nt, Human adenovirus A
cagaacccaguau

SEQ ID NO: 278182 - RNA, 19 nt, Human adenovirus A
cagaacccaguaugcugaa

SEQ ID NO: 278183 - RNA, 16 nt, Human adenovirus A
cagaauaacaguugaa

SEQ ID NO: 278184 - RNA, 20 nt, Human adenovirus A
cagaauuacuaaaacaguaa

SEQ ID NO: 278185 - RNA, 12 nt, Human adenovirus A
cagacugcugua

SEQ ID NO: 278186 - RNA, 16 nt, Human adenovirus A
cagauucuucuuccca

SEQ ID NO: 278187 - RNA, 18 nt, Human adenovirus A
cagcaaacuuucuccaaa

SEQ ID NO: 278188 - RNA, 20 nt, Human adenovirus A
cagcaacuuuuuaaccacug

SEQ ID NO: 278189 - RNA, 23 nt, Human adenovirus A
cagcagccccaagcuaaccgcuu

SEQ ID NO: 278190 - RNA, 19 nt, Human adenovirus A
cagcagggucuacuguuga

SEQ ID NO: 278191 - RNA, 14 nt, Human adenovirus A
cagccaaaccggcc

SEQ ID NO: 278192 - RNA, 16 nt, Human adenovirus A
cagccuucuggcguua

SEQ ID NO: 278193 - RNA, 16 nt, Human adenovirus A
cagcggggugauaugc

SEQ ID NO: 278194 - RNA, 20 nt, Human adenovirus A
cagcugauuucagcuucuac

SEQ ID NO: 278195 - RNA, 19 nt, Human adenovirus A
cagcugguuacaccugcuc

SEQ ID NO: 278196 - RNA, 22 nt, Human adenovirus A
cagcuuccgcggccgcuucuac

SEQ ID NO: 278197 - RNA, 15 nt, Human adenovirus A
cagcuucuacaauca

SEQ ID NO: 278198 - RNA, 13 nt, Human adenovirus A
caggagaacaaga

SEQ ID NO: 278199 - RNA, 20 nt, Human adenovirus A
caggaucaaaaaaauaaaga

SEQ ID NO: 278200 - RNA, 21 nt, Human adenovirus A
caggaugccucggaguaccug

SEQ ID NO: 278201 - RNA, 22 nt, Human adenovirus A
caggaugccucggaguaccuga

SEQ ID NO: 278202 - RNA, 15 nt, Human adenovirus A
caggggccagcucac

SEQ ID NO: 278203 - RNA, 23 nt, Human adenovirus A
cagggucuacuguugaugcagua

SEQ ID NO: 278204 - RNA, 15 nt, Human adenovirus A
caguaugcugaagaa

SEQ ID NO: 278205 - RNA, 22 nt, Human adenovirus A
cagucauagcaacaacgcuggg

SEQ ID NO: 278206 - RNA, 24 nt, Human adenovirus A
cagugaaacgcccuagauguaauu

SEQ ID NO: 278207 - RNA, 21 nt, Human adenovirus A
cagugccuguugaucugucag

SEQ ID NO: 278208 - RNA, 20 nt, Human adenovirus A
caguggacggucgaccugug

SEQ ID NO: 278209 - RNA, 17 nt, Human adenovirus A
caguggucuuacaugca

SEQ ID NO: 278210 - RNA, 13 nt, Human adenovirus A
caguguaugucag

SEQ ID NO: 278211 - RNA, 12 nt, Human adenovirus A
caguuauugaca

SEQ ID NO: 278212 - RNA, 21 nt, Human adenovirus A
aggaaauacuauauuaacuuu

SEQ ID NO: 278213 - RNA, 15 nt, Human adenovirus A
aggaaccgaccugca

SEQ ID NO: 278214 - RNA, 22 nt, Human adenovirus A
aggauccaaacgguaguggcaa

SEQ ID NO: 278215 - RNA, 23 nt, Human adenovirus A
aggcaaagaacaucaacugugcu

SEQ ID NO: 278216 - RNA, 20 nt, Human adenovirus A
aggcauuccuucauguguag

SEQ ID NO: 278217 - RNA, 18 nt, Human adenovirus A
aggccaucuuugggauga

SEQ ID NO: 278218 - RNA, 21 nt, Human adenovirus A
aggcgcauuggaaaagugcac

SEQ ID NO: 278219 - RNA, 18 nt, Human adenovirus A
aggcgccgcagacggcug

SEQ ID NO: 278220 - RNA, 21 nt, Human adenovirus A
aggcguggaacagccaaaccg

SEQ ID NO: 278221 - RNA, 15 nt, Human adenovirus A
agggccagcauugcc

SEQ ID NO: 278222 - RNA, 15 nt, Human adenovirus A
agggguugaugugau

SEQ ID NO: 278223 - RNA, 19 nt, Human adenovirus A
aggucagauucuucuuccc

SEQ ID NO: 278224 - RNA, 14 nt, Human adenovirus A
aggucuagccaaca

SEQ ID NO: 278225 - RNA, 15 nt, Human adenovirus A
aguaacaacagucag

SEQ ID NO: 278226 - RNA, 21 nt, Human adenovirus A
aguaacaacagucagugucca

SEQ ID NO: 278227 - RNA, 17 nt, Human adenovirus A
aguaaggggacagauug

SEQ ID NO: 278228 - RNA, 23 nt, Human adenovirus A
aguaauaaaaccugugccucagc

SEQ ID NO: 278229 - RNA, 15 nt, Human adenovirus A
aguacaaauacaguu

SEQ ID NO: 278230 - RNA, 14 nt, Human adenovirus A
aguagcaucagcua

SEQ ID NO: 278231 - RNA, 22 nt, Human adenovirus A
aguaucuggagcggucuuaaaa

SEQ ID NO: 278232 - RNA, 15 nt, Human adenovirus A
aguauuccaugagcc

SEQ ID NO: 278233 - RNA, 17 nt, Human adenovirus A
aguauugguagacacug

SEQ ID NO: 278234 - RNA, 18 nt, Human adenovirus A
agucauagcaacaacgcu

SEQ ID NO: 278235 - RNA, 14 nt, Human adenovirus A
agucugacuuuaca

SEQ ID NO: 278236 - RNA, 13 nt, Human adenovirus A
agugacgucacaa

SEQ ID NO: 278237 - RNA, 22 nt, Human adenovirus A
agugcaaaauaaugacuauucc

SEQ ID NO: 278238 - RNA, 14 nt, Human adenovirus A
agugcgguuccaga

SEQ ID NO: 278239 - RNA, 20 nt, Human adenovirus A
agugggauuuuuauccauug

SEQ ID NO: 278240 - RNA, 17 nt, Human adenovirus A
agugguauugauuuucc

SEQ ID NO: 278241 - RNA, 12 nt, Human adenovirus A
aguguaauaguc

SEQ ID NO: 278242 - RNA, 21 nt, Human adenovirus A
aguguaauagucugacuuuac

SEQ ID NO: 278243 - RNA, 16 nt, Human adenovirus A
aguuaaaagaccaaaa

SEQ ID NO: 278244 - RNA, 23 nt, Human adenovirus A
aguuacucaauuauuacaugguc

SEQ ID NO: 278245 - RNA, 20 nt, Human adenovirus A
aguuaucuugguaggcaauu

SEQ ID NO: 278246 - RNA, 19 nt, Human adenovirus A
ccaacugucaaaccugaca

SEQ ID NO: 278247 - RNA, 16 nt, Human adenovirus A
ccaaugugcaggcuaa

SEQ ID NO: 278248 - RNA, 17 nt, Human adenovirus A
ccaccagcgcuuucaag

SEQ ID NO: 278249 - RNA, 21 nt, Human adenovirus A
ccacccuguacgcaagcauuu

SEQ ID NO: 278250 - RNA, 19 nt, Human adenovirus A
ccaccguucccuaucauua

SEQ ID NO: 278251 - RNA, 16 nt, Human adenovirus A
ccacgauuaagacaua

SEQ ID NO: 278252 - RNA, 18 nt, Human adenovirus A
ccacucagcgacaaaccu

SEQ ID NO: 278253 - RNA, 15 nt, Human adenovirus A
ccacuuuauaugcua

SEQ ID NO: 278254 - RNA, 12 nt, Human adenovirus A
ccagaaugauca

SEQ ID NO: 278255 - RNA, 16 nt, Human adenovirus A
ccagagcguugguucg

SEQ ID NO: 278256 - RNA, 22 nt, Human adenovirus A
ccagcucacggugucagaauaa

SEQ ID NO: 278257 - RNA, 20 nt, Human adenovirus A
ccagcugguuacaccugcuc

SEQ ID NO: 278258 - RNA, 20 nt, Human adenovirus A
ccaguggucguacgugguuu

SEQ ID NO: 278259 - RNA, 15 nt, Human adenovirus A
ccaguuauugacaaa

SEQ ID NO: 278260 - RNA, 20 nt, Human adenovirus A
ccauuaaaugcaacuuucau

SEQ ID NO: 278261 - RNA, 14 nt, Human adenovirus A
ccauuguaacugaa

SEQ ID NO: 278262 - RNA, 16 nt, Human adenovirus A
ccauuguaacugaaaa

SEQ ID NO: 278263 - RNA, 22 nt, Human adenovirus A
ccauuuagcgacguaaugccau

SEQ ID NO: 278264 - RNA, 19 nt, Human adenovirus A
cccaaaucgcacacuugcu

SEQ ID NO: 278265 - RNA, 16 nt, Human adenovirus A
cccacuuuauaugcua

SEQ ID NO: 278266 - RNA, 13 nt, Human adenovirus A
cccaguaugcuga

SEQ ID NO: 278267 - RNA, 17 nt, Human adenovirus A
cccaguaugcugaagaa

SEQ ID NO: 278268 - RNA, 14 nt, Human adenovirus A
cccaucugcuuucu

SEQ ID NO: 278269 - RNA, 18 nt, Human adenovirus A
cccaugcauccugugugg

SEQ ID NO: 278270 - RNA, 19 nt, Human adenovirus A
ccccaggggccagcucacg

SEQ ID NO: 278271 - RNA, 15 nt, Human adenovirus A
ccccauuguaacuga

SEQ ID NO: 278272 - RNA, 20 nt, Human adenovirus A
ccccgcggacaugcuuuucu

SEQ ID NO: 278273 - RNA, 19 nt, Human adenovirus A
cccgcugaaacagcagggu

SEQ ID NO: 278274 - RNA, 19 nt, Human adenovirus A
cccugcuccgacaacagcu

SEQ ID NO: 278275 - RNA, 18 nt, Human adenovirus A
cccugugaggaacaguca

SEQ ID NO: 278276 - RNA, 14 nt, Human adenovirus A
cccuuuagcaguug

SEQ ID NO: 278277 - RNA, 20 nt, Human adenovirus A
ccgacaacagcugcugucac

SEQ ID NO: 278278 - RNA, 20 nt, Human adenovirus A
ccgcauuuaagcaacauuaa

SEQ ID NO: 278279 - RNA, 22 nt, Human adenovirus A
ccgcauuuaagcaacauuaaaa

SEQ ID NO: 278280 - RNA, 18 nt, Human adenovirus A
ccgcgcgcggacuuucaa

SEQ ID NO: 278281 - RNA, 19 nt, Human adenovirus A
ccgcgcgcggacuuucaac

SEQ ID NO: 278282 - RNA, 13 nt, Human adenovirus A
ccgggcucaugga

SEQ ID NO: 278283 - RNA, 16 nt, Human adenovirus A
ccuaauagcacuuugg

SEQ ID NO: 278284 - RNA, 17 nt, Human adenovirus A
ccuaauagcacuuugga

SEQ ID NO: 278285 - RNA, 18 nt, Human adenovirus A
ccuaauagcacuuuggau

SEQ ID NO: 278286 - RNA, 12 nt, Human adenovirus A
ccuaccacugua

SEQ ID NO: 278287 - RNA, 13 nt, Human adenovirus A
ccuaccacuguac

SEQ ID NO: 278288 - RNA, 18 nt, Human adenovirus A
ccuauuuuuugggaaccu

SEQ ID NO: 278289 - RNA, 12 nt, Human adenovirus A
ccucacuggcau

SEQ ID NO: 278290 - RNA, 13 nt, Human adenovirus A
ccucacuggcauu

SEQ ID NO: 278291 - RNA, 15 nt, Human adenovirus A
ccucacuggcauuug

SEQ ID NO: 278292 - RNA, 23 nt, Human adenovirus A
ccucccagacugcuguaaugggu

SEQ ID NO: 278293 - RNA, 19 nt, Human adenovirus A
ccucgccuuuggauaccgc

SEQ ID NO: 278294 - RNA, 20 nt, Human adenovirus A
ccugaauguuuguacacuuu

SEQ ID NO: 278295 - RNA, 17 nt, Human adenovirus A
ccugacagacuugcaaa

SEQ ID NO: 278296 - RNA, 23 nt, Human adenovirus A
ccugaggacuuuguagcauacaa

SEQ ID NO: 278297 - RNA, 22 nt, Human adenovirus A
ccugagucccggucuggugcaa

SEQ ID NO: 278298 - RNA, 13 nt, Human adenovirus A
ccugaguguaaua

SEQ ID NO: 278299 - RNA, 23 nt, Human adenovirus A
ccugaucuagaaauugauggaag

SEQ ID NO: 278300 - RNA, 22 nt, Human adenovirus A
ccugcgagagugguuguacuuu

SEQ ID NO: 278301 - RNA, 18 nt, Human adenovirus A
ccugggauacuaccgcug

SEQ ID NO: 278302 - RNA, 16 nt, Human adenovirus A
ccugguaaaacaagcu

SEQ ID NO: 278303 - RNA, 19 nt, Human adenovirus A
ccuguauauuaagguacau

SEQ ID NO: 278304 - RNA, 13 nt, Human adenovirus A
ccugucuuaaaau

SEQ ID NO: 278305 - RNA, 18 nt, Human adenovirus A
ccugugaggaacagucaa

SEQ ID NO: 278306 - RNA, 20 nt, Human adenovirus A
ccuucccauuuuaccuugua

SEQ ID NO: 278307 - RNA, 18 nt, Human adenovirus A
ccuuuaacggaaaacacg

SEQ ID NO: 278308 - RNA, 16 nt, Human adenovirus A
ccuuucccccuuugua

SEQ ID NO: 278309 - RNA, 23 nt, Human adenovirus A
cgaaacugggggcguacacuggc

SEQ ID NO: 278310 - RNA, 16 nt, Human adenovirus A
cgacaaaccuuuacug

SEQ ID NO: 278311 - RNA, 15 nt, Human adenovirus A
cgacaaggaaccgac

SEQ ID NO: 278312 - RNA, 20 nt, Human adenovirus A
cgaccgcuuaucaugugcua

SEQ ID NO: 278313 - RNA, 12 nt, Human adenovirus A
cgaggcaguuuc

SEQ ID NO: 278314 - RNA, 13 nt, Human adenovirus A
cgcagaugauaga

SEQ ID NO: 278315 - RNA, 15 nt, Human adenovirus A
cgcaguggucuuaca

SEQ ID NO: 278316 - RNA, 19 nt, Human adenovirus A
cgcauugcgauaaacugga

SEQ ID NO: 278317 - RNA, 15 nt, Human adenovirus A
cgcccgcuauuggug

SEQ ID NO: 278318 - RNA, 19 nt, Human adenovirus A
cgcgucggggcuacugcuc

SEQ ID NO: 278319 - RNA, 19 nt, Human adenovirus A
cgcuauugguggaaaaaga

SEQ ID NO: 278320 - RNA, 14 nt, Human adenovirus A
cgcuuuacgcuggc

SEQ ID NO: 278321 - RNA, 13 nt, Human adenovirus A
cggauuacaugaa

SEQ ID NO: 278322 - RNA, 22 nt, Human adenovirus A
cggcaacagcagcaacaaggaa

SEQ ID NO: 278323 - RNA, 17 nt, Human adenovirus A
cggccaugcaaagccag

SEQ ID NO: 278324 - RNA, 13 nt, Human adenovirus A
cggccgcuucuac

SEQ ID NO: 278325 - RNA, 22 nt, Human adenovirus A
cgggcgagggauucguuuccau

SEQ ID NO: 278326 - RNA, 23 nt, Human adenovirus A
cggggggaauaucucauuugcaa

SEQ ID NO: 278327 - RNA, 17 nt, Human adenovirus A
cggugccuaugugauaa

SEQ ID NO: 278328 - RNA, 21 nt, Human adenovirus A
cgguuacuucguugauaucaa

SEQ ID NO: 278329 - RNA, 18 nt, Human adenovirus A
cgguuccacggugcacuu

SEQ ID NO: 278330 - RNA, 14 nt, Human adenovirus A
cguagaccaaccac

SEQ ID NO: 278331 - RNA, 17 nt, Human adenovirus A
cgugagacuuaccauuu

SEQ ID NO: 278332 - RNA, 19 nt, Human adenovirus A
cguguacacaaugcauuaa

SEQ ID NO: 278333 - RNA, 21 nt, Human adenovirus A
cguuagcguccacacaguuuc

SEQ ID NO: 278334 - RNA, 13 nt, Human adenovirus A
cuaaaacaagguc

SEQ ID NO: 278335 - RNA, 18 nt, Human adenovirus A
cuaaauauuguauuucca

SEQ ID NO: 278336 - RNA, 15 nt, Human adenovirus A
cuaaauggaagacau

SEQ ID NO: 278337 - RNA, 21 nt, Human adenovirus A
cuaacugucauccgcauuuaa

SEQ ID NO: 278338 - RNA, 16 nt, Human adenovirus A
cuacaaaaaguaacaa

SEQ ID NO: 278339 - RNA, 19 nt, Human adenovirus A
cuacagaauuacuaaaaca

SEQ ID NO: 278340 - RNA, 15 nt, Human adenovirus A
cuacaguguauguca

SEQ ID NO: 278341 - RNA, 14 nt, Human adenovirus A
cuaccgcugcucag

SEQ ID NO: 278342 - RNA, 14 nt, Human adenovirus A
cuaccgucaucucu

SEQ ID NO: 278343 - RNA, 16 nt, Human adenovirus A
cuagcggccacuaaag

SEQ ID NO: 278344 - RNA, 17 nt, Human adenovirus A
cuaggugggauuauaaa

SEQ ID NO: 278345 - RNA, 13 nt, Human adenovirus A
cuaguucuuguca

SEQ ID NO: 278346 - RNA, 14 nt, Human adenovirus A
cuaguucuugucaa

SEQ ID NO: 278347 - RNA, 15 nt, Human adenovirus A
cuauauuaacuuuau

SEQ ID NO: 278348 - RNA, 13 nt, Human adenovirus A
cuaucacuugcaa

SEQ ID NO: 278349 - RNA, 17 nt, Human adenovirus A
cuaugaaucuuuaccag

SEQ ID NO: 278350 - RNA, 18 nt, Human adenovirus A
cuaugggaucgcuugcaa

SEQ ID NO: 278351 - RNA, 19 nt, Human adenovirus A
cuauuaaccugggauacua

SEQ ID NO: 278352 - RNA, 17 nt, Human adenovirus A
cuauucuagcaaaauga

SEQ ID NO: 278353 - RNA, 15 nt, Human adenovirus A
cucaagacuauucua

SEQ ID NO: 278354 - RNA, 15 nt, Human adenovirus A
cucacauuaggcaua

SEQ ID NO: 278355 - RNA, 21 nt, Human adenovirus A
cucaguuguugcguaauuugc

SEQ ID NO: 278356 - RNA, 18 nt, Human adenovirus A
cucauuggaguacaagcu

SEQ ID NO: 278357 - RNA, 17 nt, Human adenovirus A
cuccaaauaaaauugcu

SEQ ID NO: 278358 - RNA, 14 nt, Human adenovirus A
cuccuaccacugua

SEQ ID NO: 278359 - RNA, 15 nt, Human adenovirus A
cuccucacugaucgc

SEQ ID NO: 278360 - RNA, 12 nt, Human adenovirus A
cucgacaaggaa

SEQ ID NO: 278361 - RNA, 16 nt, Human adenovirus A
cucgguaccuauuaaa

SEQ ID NO: 278362 - RNA, 14 nt, Human adenovirus A
cucucgaacugcgg

SEQ ID NO: 278363 - RNA, 15 nt, Human adenovirus A
gaugccacuugaauu

SEQ ID NO: 278364 - RNA, 13 nt, Human adenovirus A
gaugccgcagugg

SEQ ID NO: 278365 - RNA, 14 nt, Human adenovirus A
gauggaaccccaaa

SEQ ID NO: 278366 - RNA, 14 nt, Human adenovirus A
gaugguguuaugaa

SEQ ID NO: 278367 - RNA, 15 nt, Human adenovirus A
gauguaauuaaugga

SEQ ID NO: 278368 - RNA, 15 nt, Human adenovirus A
gauuaagacauaugg

SEQ ID NO: 278369 - RNA, 18 nt, Human adenovirus A
gauuauaaucuccaaaua

SEQ ID NO: 278370 - RNA, 19 nt, Human adenovirus A
gauucucucguugauuaua

SEQ ID NO: 278371 - RNA, 18 nt, Human adenovirus A
gauugauaucuugaaucu

SEQ ID NO: 278372 - RNA, 16 nt, Human adenovirus A
gauuucugcugucauu

SEQ ID NO: 278373 - RNA, 14 nt, Human adenovirus A
gauuugauucaaga

SEQ ID NO: 278374 - RNA, 18 nt, Human adenovirus A
gauuuuauccuacaaaaa

SEQ ID NO: 278375 - RNA, 22 nt, Human adenovirus A
gcaaacagcaaacuuucuccaa

SEQ ID NO: 278376 - RNA, 22 nt, Human adenovirus A
gcaaagaacaucaacugugcua

SEQ ID NO: 278377 - RNA, 22 nt, Human adenovirus A
gcaacuauuggacccucgccuu

SEQ ID NO: 278378 - RNA, 18 nt, Human adenovirus A
gcaacugcugaagcaaac

SEQ ID NO: 278379 - RNA, 17 nt, Human adenovirus A
gcaagaaggccauguac

SEQ ID NO: 278380 - RNA, 21 nt, Human adenovirus A
gcaaggcgguauuugcuauac

SEQ ID NO: 278381 - RNA, 22 nt, Human adenovirus A
gcaauuagggccagcauugccg

SEQ ID NO: 278382 - RNA, 22 nt, Human adenovirus A
gcaccaaggcguggaacagcca

SEQ ID NO: 278383 - RNA, 16 nt, Human adenovirus A
gcacugaaaaaccaac

SEQ ID NO: 278384 - RNA, 22 nt, Human adenovirus A
gcacugaaaaaccaacaaacac

SEQ ID NO: 278385 - RNA, 22 nt, Human adenovirus A
gcacugcggggggaauaucuca

SEQ ID NO: 278386 - RNA, 23 nt, Human adenovirus A
gcacugcggggggaauaucucau

SEQ ID NO: 278387 - RNA, 14 nt, Human adenovirus A
gcagacuaaaugga

SEQ ID NO: 278388 - RNA, 22 nt, Human adenovirus A
gcagacuaaauggaagacauca

SEQ ID NO: 278389 - RNA, 13 nt, Human adenovirus A
gcagcagaaccca

SEQ ID NO: 278390 - RNA, 17 nt, Human adenovirus A
gcagcugauuucagcuu

SEQ ID NO: 278391 - RNA, 22 nt, Human adenovirus A
gcagcugauuucagcuucuaca

SEQ ID NO: 278392 - RNA, 13 nt, Human adenovirus A
gcaggaauggcca

SEQ ID NO: 278393 - RNA, 14 nt, Human adenovirus A
gcaguaauugauga

SEQ ID NO: 278394 - RNA, 10 nt, Human adenovirus A
gcagugaaaa

SEQ ID NO: 278395 - RNA, 22 nt, Human adenovirus A
gcaguggucuuacaugcacauc

SEQ ID NO: 278396 - RNA, 12 nt, Human adenovirus A
gcauaacaguca

SEQ ID NO: 278397 - RNA, 13 nt, Human adenovirus A
gcauggugauuaa

SEQ ID NO: 278398 - RNA, 20 nt, Human adenovirus A
gcauuaauaauaaaaccauu

SEQ ID NO: 278399 - RNA, 21 nt, Human adenovirus A
gcauuccccauccaaaaccag

SEQ ID NO: 278400 - RNA, 14 nt, Human adenovirus A
gccaacauccagug

SEQ ID NO: 278401 - RNA, 15 nt, Human adenovirus A
gccaacauccagugc

SEQ ID NO: 278402 - RNA, 19 nt, Human adenovirus A
gccacaggucgaccgucca

SEQ ID NO: 278403 - RNA, 17 nt, Human adenovirus A
gccacuuaaaaauuuca

SEQ ID NO: 278404 - RNA, 14 nt, Human adenovirus A
gccagcugaacggg

SEQ ID NO: 278405 - RNA, 14 nt, Human adenovirus A
gcccauaacaucag

SEQ ID NO: 278406 - RNA, 14 nt, Human adenovirus A
gccccgcgacacgg

SEQ ID NO: 278407 - RNA, 14 nt, Human adenovirus A
gcccgcacagucac

SEQ ID NO: 278408 - RNA, 12 nt, Human adenovirus A
gccgaaugcgca

SEQ ID NO: 278409 - RNA, 16 nt, Human adenovirus A
gccgccgcugcagcuu

SEQ ID NO: 278410 - RNA, 20 nt, Human adenovirus A
gccggcguagaccaaccacc

SEQ ID NO: 278411 - RNA, 17 nt, Human adenovirus A
gccggucaggaugccuc

SEQ ID NO: 278412 - RNA, 14 nt, Human adenovirus A
gccguacaugggca

SEQ ID NO: 278413 - RNA, 15 nt, Human adenovirus A
gccguauauggcgcc

SEQ ID NO: 278414 - RNA, 21 nt, Human adenovirus A
gccugaaccuaauagcacuuu

SEQ ID NO: 278415 - RNA, 17 nt, Human adenovirus A
gccugguaaaacaagcu

SEQ ID NO: 278416 - RNA, 18 nt, Human adenovirus A
gccugucuuaaaaucucc

SEQ ID NO: 278417 - RNA, 22 nt, Human adenovirus A
gccugucuuaaaaucuccugaa

SEQ ID NO: 278418 - RNA, 18 nt, Human adenovirus A
gcgacacggcacgcggcc

SEQ ID NO: 278419 - RNA, 17 nt, Human adenovirus A
gcgacguaaugccauua

SEQ ID NO: 278420 - RNA, 21 nt, Human adenovirus A
gcgagagugguuguacuuugc

SEQ ID NO: 278421 - RNA, 19 nt, Human adenovirus A
gcgccuucaauuggaacag

SEQ ID NO: 278422 - RNA, 22 nt, Human adenovirus A
gcgcgucggggcuacugcucau

SEQ ID NO: 278423 - RNA, 17 nt, Human adenovirus A
gcggccgcggaagcugc

SEQ ID NO: 278424 - RNA, 18 nt, Human adenovirus A
gcggccgcggaagcugca

SEQ ID NO: 278425 - RNA, 19 nt, Human adenovirus A
gcgggcggugcacgucaca

SEQ ID NO: 278426 - RNA, 15 nt, Human adenovirus A
gcguccacacaguuu

SEQ ID NO: 278427 - RNA, 19 nt, Human adenovirus A
gcgugaaguauuccaugag

SEQ ID NO: 278428 - RNA, 19 nt, Human adenovirus A
gcguggcacgcuauaacag

SEQ ID NO: 278429 - RNA, 22 nt, Human adenovirus A
gcuacaaagggggaaagggagg

SEQ ID NO: 278430 - RNA, 13 nt, Human adenovirus A
gcuacaccacgua

SEQ ID NO: 278431 - RNA, 17 nt, Human adenovirus A
gcuacguugaguacuuc

SEQ ID NO: 278432 - RNA, 18 nt, Human adenovirus A
gcuaugaaucuuuaccag

SEQ ID NO: 278433 - RNA, 18 nt, Human adenovirus A
gcuauuguuaacacugcc

SEQ ID NO: 278434 - RNA, 20 nt, Human adenovirus A
gcucauuggaguacaagcuu

SEQ ID NO: 278435 - RNA, 19 nt, Human adenovirus A
gcucgagacaucugugucu

SEQ ID NO: 278436 - RNA, 17 nt, Human adenovirus A
gcucuauucggugccua

SEQ ID NO: 278437 - RNA, 17 nt, Human adenovirus A
gcugaugccacuugaau

SEQ ID NO: 278438 - RNA, 20 nt, Human adenovirus A
gcugcaaacaaaaaggacga

SEQ ID NO: 278439 - RNA, 21 nt, Human adenovirus A
gcugcaguuuuuuuuccacac

SEQ ID NO: 278440 - RNA, 16 nt, Human adenovirus A
gcuggcgcacaaguug

SEQ ID NO: 278441 - RNA, 17 nt, Human adenovirus A
gcuggcgcacaaguugc

SEQ ID NO: 278442 - RNA, 17 nt, Human adenovirus A
gcugguuuaauauacaa

SEQ ID NO: 278443 - RNA, 19 nt, Human adenovirus A
gcuuaucaugugcuauugu

SEQ ID NO: 278444 - RNA, 19 nt, Human adenovirus A
gcuuccgcggccgcuucua

SEQ ID NO: 278445 - RNA, 18 nt, Human adenovirus A
gcuucgaaugcugugaca

SEQ ID NO: 278446 - RNA, 14 nt, Human adenovirus A
gcuugagugacugu

SEQ ID NO: 278447 - RNA, 21 nt, Human adenovirus A
gcuugcaacugcugaagcaaa

SEQ ID NO: 278448 - RNA, 17 nt, Human adenovirus A
gcuuuguuggauagcaa

SEQ ID NO: 278449 - RNA, 18 nt, Human adenovirus A
gcuuuguuggauagcaaa

SEQ ID NO: 278450 - RNA, 18 nt, Human adenovirus A
gcuuuuccugagacacca

SEQ ID NO: 278451 - RNA, 15 nt, Human adenovirus A
gcuuuucucucugac

SEQ ID NO: 278452 - RNA, 17 nt, Human adenovirus A
gcuuuugggacgcuggu

SEQ ID NO: 278453 - RNA, 23 nt, Human adenovirus A
auucucucguugauuauaaucuc

SEQ ID NO: 278454 - RNA, 16 nt, Human adenovirus A
auugauacacaccuca

SEQ ID NO: 278455 - RNA, 18 nt, Human adenovirus A
auugauacacaccucauu

SEQ ID NO: 278456 - RNA, 22 nt, Human adenovirus A
auugccagcguccggguucacu

SEQ ID NO: 278457 - RNA, 13 nt, Human adenovirus A
auugcucgaugau

SEQ ID NO: 278458 - RNA, 19 nt, Human adenovirus A
auugcucgaugaugcauaa

SEQ ID NO: 278459 - RNA, 16 nt, Human adenovirus A
auuggcaggaguugca

SEQ ID NO: 278460 - RNA, 16 nt, Human adenovirus A
auuguagcuacagaau

SEQ ID NO: 278461 - RNA, 23 nt, Human adenovirus A
auuguguacuuuucaaacuuuac

SEQ ID NO: 278462 - RNA, 15 nt, Human adenovirus A
auuuaagcaacauua

SEQ ID NO: 278463 - RNA, 20 nt, Human adenovirus A
auuuagcgacguaaugccau

SEQ ID NO: 278464 - RNA, 14 nt, Human adenovirus A
auuucugcugucau

SEQ ID NO: 278465 - RNA, 14 nt, Human adenovirus A
auuugacacaucag

SEQ ID NO: 278466 - RNA, 11 nt, Human adenovirus A
auuugcuauac

SEQ ID NO: 278467 - RNA, 21 nt, Human adenovirus A
auuuuuuagauuguuauacua

SEQ ID NO: 278468 - RNA, 20 nt, Human adenovirus A
caaacccuggaccacaugcc

SEQ ID NO: 278469 - RNA, 20 nt, Human adenovirus A
caaaccugacagacuugcaa

SEQ ID NO: 278470 - RNA, 12 nt, Human adenovirus A
caaacuacauag

SEQ ID NO: 278471 - RNA, 17 nt, Human adenovirus A
caaagaccccauuguaa

SEQ ID NO: 278472 - RNA, 14 nt, Human adenovirus A
caaauaaaauugcu

SEQ ID NO: 278473 - RNA, 16 nt, Human adenovirus A
caaaucgcacacuugc

SEQ ID NO: 278474 - RNA, 16 nt, Human adenovirus A
caaaucuuaaauggaa

SEQ ID NO: 278475 - RNA, 14 nt, Human adenovirus A
caacagucaguguc

SEQ ID NO: 278476 - RNA, 19 nt, Human adenovirus A
caacgcugggcauggugau

SEQ ID NO: 278477 - RNA, 19 nt, Human adenovirus A
caacuaccgcccugugagg

SEQ ID NO: 278478 - RNA, 20 nt, Human adenovirus A
caacugcugaagcaaacccu

SEQ ID NO: 278479 - RNA, 18 nt, Human adenovirus A
ggccauuuuggaagcagu

SEQ ID NO: 278480 - RNA, 18 nt, Human adenovirus A
ggccugacgcucuggcag

SEQ ID NO: 278481 - RNA, 11 nt, Human adenovirus A
ggcggccaugc

SEQ ID NO: 278482 - RNA, 22 nt, Human adenovirus A
ggcuaguucuugucaacuacau

SEQ ID NO: 278483 - RNA, 16 nt, Human adenovirus A
ggcucaagacuauucu

SEQ ID NO: 278484 - RNA, 10 nt, Human adenovirus A
ggcuccucac

SEQ ID NO: 278485 - RNA, 16 nt, Human adenovirus A
ggcucuuacuugccga

SEQ ID NO: 278486 - RNA, 18 nt, Human adenovirus A
ggcugguuuaauauacaa

SEQ ID NO: 278487 - RNA, 19 nt, Human adenovirus A
gggaauaucucauuugcaa

SEQ ID NO: 278488 - RNA, 13 nt, Human adenovirus A
gggauauguuucu

SEQ ID NO: 278489 - RNA, 20 nt, Human adenovirus A
gggaucgcuugcaacugcug

SEQ ID NO: 278490 - RNA, 12 nt, Human adenovirus A
gggcauggugau

SEQ ID NO: 278491 - RNA, 16 nt, Human adenovirus A
gggcgacuacccggcg

SEQ ID NO: 278492 - RNA, 14 nt, Human adenovirus A
ggggaauaucucau

SEQ ID NO: 278493 - RNA, 14 nt, Human adenovirus A
gguaagaaucgcaa

SEQ ID NO: 278494 - RNA, 17 nt, Human adenovirus A
gguauugauuuucccau

SEQ ID NO: 278495 - RNA, 21 nt, Human adenovirus A
ggucgaccguccacuguagau

SEQ ID NO: 278496 - RNA, 15 nt, Human adenovirus A
ggucgcgaaacuggg

SEQ ID NO: 278497 - RNA, 20 nt, Human adenovirus A
ggucuacuguugaugcagua

SEQ ID NO: 278498 - RNA, 23 nt, Human adenovirus A
gguguuaugaaucuuuauugaua

SEQ ID NO: 278499 - RNA, 21 nt, Human adenovirus A
gguuuuggcggccaugcaaag

SEQ ID NO: 278500 - RNA, 17 nt, Human adenovirus A
guaaaaugggaaggagg

SEQ ID NO: 278501 - RNA, 15 nt, Human adenovirus A
guaaagaaacugugu

SEQ ID NO: 278502 - RNA, 14 nt, Human adenovirus A
guaacaacagucag

SEQ ID NO: 278503 - RNA, 20 nt, Human adenovirus A
guaacggggcaauaguugag

SEQ ID NO: 278504 - RNA, 16 nt, Human adenovirus A
guaacugaaaauggaa

SEQ ID NO: 278505 - RNA, 20 nt, Human adenovirus A
guaauuuauggacccacugg

SEQ ID NO: 278506 - RNA, 24 nt, Human adenovirus A
guaauuuauggacccacuggcugu

SEQ ID NO: 278507 - RNA, 24 nt, Human adenovirus A
guaauuugcuuucugcccagcugg

SEQ ID NO: 278508 - RNA, 22 nt, Human adenovirus A
guaccaacuaccgcccugugag

SEQ ID NO: 278509 - RNA, 23 nt, Human adenovirus A
guacgcaagcauuuuuuguugcu

SEQ ID NO: 278510 - RNA, 15 nt, Human adenovirus A
guagacauagccaau

SEQ ID NO: 278511 - RNA, 16 nt, Human adenovirus A
guagacauagccaauc

SEQ ID NO: 278512 - RNA, 13 nt, Human adenovirus A
guagcaucagcua

SEQ ID NO: 278513 - RNA, 14 nt, Human adenovirus A
guaugucagcuggg

SEQ ID NO: 278514 - RNA, 16 nt, Human adenovirus A
guauuugcuauaccau

SEQ ID NO: 278515 - RNA, 23 nt, Human adenovirus A
gucaggaugccucggaguaccug

SEQ ID NO: 278516 - RNA, 15 nt, Human adenovirus A
gucauccgcauuuaa

SEQ ID NO: 278517 - RNA, 16 nt, Human adenovirus A
gucauccgcauuuaag

SEQ ID NO: 278518 - RNA, 18 nt, Human adenovirus A
gucaugagcgguggcuua

SEQ ID NO: 278519 - RNA, 16 nt, Human adenovirus A
gucauuuacugcagcc

SEQ ID NO: 278520 - RNA, 12 nt, Human adenovirus A
guccauaugacu

SEQ ID NO: 278521 - RNA, 14 nt, Human adenovirus A
guccauaugacuaa

SEQ ID NO: 278522 - RNA, 22 nt, Human adenovirus A
guccccgcggacaugcuuuucu

SEQ ID NO: 278523 - RNA, 15 nt, Human adenovirus A
gucgcaccacuguag

SEQ ID NO: 278524 - RNA, 16 nt, Human adenovirus A
gucuauauccccacga

SEQ ID NO: 278525 - RNA, 15 nt, Human adenovirus A
gucuuaaaaucuccu

SEQ ID NO: 278526 - RNA, 16 nt, Human adenovirus A
gugagacuuaccauuu

SEQ ID NO: 278527 - RNA, 20 nt, Human adenovirus A
gugagacuuaccauuuggcu

SEQ ID NO: 278528 - RNA, 19 nt, Human adenovirus A
gugcacuuuuccaaugcgc

SEQ ID NO: 278529 - RNA, 18 nt, Human adenovirus A
gugccguuggcagagucu

SEQ ID NO: 278530 - RNA, 13 nt, Human adenovirus A
guggaacagccaa

SEQ ID NO: 278531 - RNA, 23 nt, Human adenovirus A
guggcuccgcuucuccacgaaga

SEQ ID NO: 278532 - RNA, 19 nt, Human adenovirus A
guggcuuauucauugucau

SEQ ID NO: 278533 - RNA, 20 nt, Human adenovirus A
gugggaugcauccgagguga

SEQ ID NO: 278534 - RNA, 22 nt, Human adenovirus A
gugggauuauaaaaggcuggaa

SEQ ID NO: 278535 - RNA, 16 nt, Human adenovirus A
guguaagaacauacaa

SEQ ID NO: 278536 - RNA, 20 nt, Human adenovirus A
guguacuuuucaaacuuuac

SEQ ID NO: 278537 - RNA, 13 nt, Human adenovirus A
guuaaaagaccaa

SEQ ID NO: 278538 - RNA, 21 nt, Human adenovirus A
guucaacagaaucaaucucag

SEQ ID NO: 278539 - RNA, 20 nt, Human adenovirus A
guuccacgauuaagacauau

SEQ ID NO: 278540 - RNA, 15 nt, Human adenovirus A
guugaaaaaggaauu

SEQ ID NO: 278541 - RNA, 16 nt, Human adenovirus A
guugacuggcaugggc

SEQ ID NO: 278542 - RNA, 13 nt, Human adenovirus A
guuguagacauag

SEQ ID NO: 278543 - RNA, 14 nt, Human adenovirus A
guuguagacauagc

SEQ ID NO: 278544 - RNA, 19 nt, Human adenovirus A
guugugccacuauaaaugu

SEQ ID NO: 278545 - RNA, 13 nt, Human adenovirus A
guuuuacagugcu

SEQ ID NO: 278546 - RNA, 19 nt, Human adenovirus A
uaaaagaccaaaauuuuca

SEQ ID NO: 278547 - RNA, 14 nt, Human adenovirus A
uaaaagauguagcu

SEQ ID NO: 278548 - RNA, 15 nt, Human adenovirus A
uaaaaugguuuuauu

SEQ ID NO: 278549 - RNA, 10 nt, Human adenovirus A
uaaaauugcu

SEQ ID NO: 278550 - RNA, 22 nt, Human adenovirus A
uaaacaucaugauuugaagaua

SEQ ID NO: 278551 - RNA, 14 nt, Human adenovirus A
uaaaccauggaauu

SEQ ID NO: 278552 - RNA, 22 nt, Human adenovirus A
uaaacuaucacuugcaaccugu

SEQ ID NO: 278553 - RNA, 13 nt, Human adenovirus A
uaaagaaacugug

SEQ ID NO: 278554 - RNA, 14 nt, Human adenovirus A
uaaagaguauccau

SEQ ID NO: 278555 - RNA, 17 nt, Human adenovirus A
uaaaguuuaaacuacac

SEQ ID NO: 278556 - RNA, 16 nt, Human adenovirus A
uaaauggaagacauca

SEQ ID NO: 278557 - RNA, 11 nt, Human adenovirus A
uaaauugagau

SEQ ID NO: 278558 - RNA, 20 nt, Human adenovirus A
uaaccauuguaaaugcuuug

SEQ ID NO: 278559 - RNA, 21 nt, Human adenovirus A
uaacccuacucacgagaaagu

SEQ ID NO: 278560 - RNA, 20 nt, Human adenovirus A
uaacugucauccgcauuuaa

SEQ ID NO: 278561 - RNA, 13 nt, Human adenovirus A
uaagaacauacaa

SEQ ID NO: 278562 - RNA, 14 nt, Human adenovirus A
uaagaacauacaac

SEQ ID NO: 278563 - RNA, 18 nt, Human adenovirus A
uaagaauuuauacaauuc

SEQ ID NO: 278564 - RNA, 16 nt, Human adenovirus A
uaagaggcauuccuuc

SEQ ID NO: 278565 - RNA, 20 nt, Human adenovirus A
uaagcugggugggaugcauc

SEQ ID NO: 278566 - RNA, 19 nt, Human adenovirus A
uaauagucugacuuuacau

SEQ ID NO: 278567 - RNA, 12 nt, Human adenovirus A
uaauccagucau

SEQ ID NO: 278568 - RNA, 14 nt, Human adenovirus A
uaauuccacuuauu

SEQ ID NO: 278569 - RNA, 16 nt, Human adenovirus A
uacaagguaaaauggg

SEQ ID NO: 278570 - RNA, 22 nt, Human adenovirus A
uacacaaagaaaacaucacucu

SEQ ID NO: 278571 - RNA, 16 nt, Human adenovirus A
uacaccacguaaucaa

SEQ ID NO: 278572 - RNA, 23 nt, Human adenovirus A
uacacccccuuuuacuucuucca

SEQ ID NO: 278573 - RNA, 22 nt, Human adenovirus A
uacacuuuaauaaaaacacugu

SEQ ID NO: 278574 - RNA, 16 nt, Human adenovirus A
uacagaauuacuaaaa

SEQ ID NO: 278575 - RNA, 20 nt, Human adenovirus A
uacagauuggcaccauacaa

SEQ ID NO: 278576 - RNA, 21 nt, Human adenovirus A
uacagauuggcaccauacaac

SEQ ID NO: 278577 - RNA, 22 nt, Human adenovirus A
uacagcuucagaugacuggaca

SEQ ID NO: 278578 - RNA, 14 nt, Human adenovirus A
uacaugaguguaug

SEQ ID NO: 278579 - RNA, 12 nt, Human adenovirus A
uacauuuuagca

SEQ ID NO: 278580 - RNA, 14 nt, Human adenovirus A
uaccaaugaauuaa

SEQ ID NO: 278581 - RNA, 14 nt, Human adenovirus A
uaccagaaugauca

SEQ ID NO: 278582 - RNA, 18 nt, Human adenovirus A
uaccauggacagcuccag

SEQ ID NO: 278583 - RNA, 23 nt, Human adenovirus A
uaccgccugaagaagaaccuaac

SEQ ID NO: 278584 - RNA, 14 nt, Human adenovirus A
uaccgcugcucagc

SEQ ID NO: 278585 - RNA, 11 nt, Human adenovirus A
uacgcaauuug

SEQ ID NO: 278586 - RNA, 22 nt, Human adenovirus A
uacgugccuccccgcuauuugg

SEQ ID NO: 278587 - RNA, 17 nt, Human adenovirus A
uacguugaguacuucgg

SEQ ID NO: 278588 - RNA, 16 nt, Human adenovirus A
uacuaccgucaucucu

SEQ ID NO: 278589 - RNA, 20 nt, Human adenovirus A
uacuccggcccaauauggua

SEQ ID NO: 278590 - RNA, 17 nt, Human adenovirus A
uacucggaauugucacc

SEQ ID NO: 278591 - RNA, 17 nt, Human adenovirus A
uacugcgagccguagaa

SEQ ID NO: 278592 - RNA, 12 nt, Human adenovirus A
uacuucuuccaa

SEQ ID NO: 278593 - RNA, 13 nt, Human adenovirus A
uacuucuuccaau

SEQ ID NO: 278594 - RNA, 12 nt, Human adenovirus A
uagaaauugaug

SEQ ID NO: 278595 - RNA, 20 nt, Human adenovirus A
uagaagcugaaaucagcugc

SEQ ID NO: 278596 - RNA, 17 nt, Human adenovirus A
ccacgauuaagacauau

SEQ ID NO: 278597 - RNA, 20 nt, Human adenovirus A
ccacucagcgacaaaccuuu

SEQ ID NO: 278598 - RNA, 21 nt, Human adenovirus A
ccacucagcgacaaaccuuua

SEQ ID NO: 278599 - RNA, 13 nt, Human adenovirus A
ccagaaugaucac

SEQ ID NO: 278600 - RNA, 21 nt, Human adenovirus A
ccagagcccccgcguccuccu

SEQ ID NO: 278601 - RNA, 18 nt, Human adenovirus A
ccaggcuguacgcccuga

SEQ ID NO: 278602 - RNA, 15 nt, Human adenovirus A
ccaucuuugggauga

SEQ ID NO: 278603 - RNA, 14 nt, Human adenovirus A
ccaugcaaagccag

SEQ ID NO: 278604 - RNA, 16 nt, Human adenovirus A
ccauggcgaccagugu

SEQ ID NO: 278605 - RNA, 14 nt, Human adenovirus A
ccauugaaaccagc

SEQ ID NO: 278606 - RNA, 17 nt, Human adenovirus A
ccauuguaaaugcuuug

SEQ ID NO: 278607 - RNA, 22 nt, Human adenovirus A
ccauuguaacugaaaauggaac

SEQ ID NO: 278608 - RNA, 17 nt, Human adenovirus A
ccauuuuaccuuguaua

SEQ ID NO: 278609 - RNA, 22 nt, Human adenovirus A
ccauuuuauuagcucauuggag

SEQ ID NO: 278610 - RNA, 12 nt, Human adenovirus A
ccauuuugcauu

SEQ ID NO: 278611 - RNA, 15 nt, Human adenovirus A
cccaugauguuacca

SEQ ID NO: 278612 - RNA, 22 nt, Human adenovirus A
cccauuguaacugaaaauggaa

SEQ ID NO: 278613 - RNA, 23 nt, Human adenovirus A
ccccaaaucgcacacuugcuauu

SEQ ID NO: 278614 - RNA, 18 nt, Human adenovirus A
cccuaaauauuguauuuc

SEQ ID NO: 278615 - RNA, 21 nt, Human adenovirus A
cccucgaugaugccgcagugg

SEQ ID NO: 278616 - RNA, 19 nt, Human adenovirus A
cccucuuacgaaaccguga

SEQ ID NO: 278617 - RNA, 19 nt, Human adenovirus A
cccuguacgcaagcauuuu

SEQ ID NO: 278618 - RNA, 17 nt, Human adenovirus A
ccgcauuuaagcaacau

SEQ ID NO: 278619 - RNA, 21 nt, Human adenovirus A
ccgcauuuaagcaacauuaaa

SEQ ID NO: 278620 - RNA, 15 nt, Human adenovirus A
ccgcggaagcugcag

SEQ ID NO: 278621 - RNA, 19 nt, Human adenovirus A
ccgcguguuagacauggcu

SEQ ID NO: 278622 - RNA, 14 nt, Human adenovirus A
ccgcugaaacagca

SEQ ID NO: 278623 - RNA, 14 nt, Human adenovirus A
ccggaaaucugaaa

SEQ ID NO: 278624 - RNA, 21 nt, Human adenovirus A
ccggguuaguguuguagauaa

SEQ ID NO: 278625 - RNA, 20 nt, Human adenovirus A
ccggguucacuacaguguau

SEQ ID NO: 278626 - RNA, 21 nt, Human adenovirus A
ccggguucacuacaguguaug

SEQ ID NO: 278627 - RNA, 16 nt, Human adenovirus A
ccguacaugggcaccu

SEQ ID NO: 278628 - RNA, 20 nt, Human adenovirus A
ccuaacugucauccgcauuu

SEQ ID NO: 278629 - RNA, 14 nt, Human adenovirus A
ccuaccacauucug

SEQ ID NO: 278630 - RNA, 21 nt, Human adenovirus A
ccuagauguaauuaauggacu

SEQ ID NO: 278631 - RNA, 19 nt, Human adenovirus A
ccuaugugauaacccugaa

SEQ ID NO: 278632 - RNA, 13 nt, Human adenovirus A
ccucauaucacuc

SEQ ID NO: 278633 - RNA, 23 nt, Human adenovirus A
ccucauuaaauuuuucaccaaac

SEQ ID NO: 278634 - RNA, 15 nt, Human adenovirus A
ccucuuggccagcug

SEQ ID NO: 278635 - RNA, 16 nt, Human adenovirus A
ccugaauguuuguaca

SEQ ID NO: 278636 - RNA, 13 nt, Human adenovirus A
ccugaccacauga

SEQ ID NO: 278637 - RNA, 22 nt, Human adenovirus A
ccugaccacaugaauguuaaag

SEQ ID NO: 278638 - RNA, 22 nt, Human adenovirus A
ccugauuguagcuacagaauua

SEQ ID NO: 278639 - RNA, 17 nt, Human adenovirus A
ccugcauagcauggcuu

SEQ ID NO: 278640 - RNA, 22 nt, Human adenovirus A
ccugcauagcauggcuugguuu

SEQ ID NO: 278641 - RNA, 19 nt, Human adenovirus A
ccugcuccgacaacagcug

SEQ ID NO: 278642 - RNA, 20 nt, Human adenovirus A
ccugcucuuacccgccugug

SEQ ID NO: 278643 - RNA, 23 nt, Human adenovirus A
ccuguguggauacucugcgcuuu

SEQ ID NO: 278644 - RNA, 21 nt, Human adenovirus A
ccuguugaucugucagugaaa

SEQ ID NO: 278645 - RNA, 19 nt, Human adenovirus A
ccuuaauuuuaguuggaau

SEQ ID NO: 278646 - RNA, 14 nt, Human adenovirus A
ccuucgcuaugaau

SEQ ID NO: 278647 - RNA, 20 nt, Human adenovirus A
ccuuuaacggaaaacacguu

SEQ ID NO: 278648 - RNA, 16 nt, Human adenovirus A
ccuuucgaucccucau

SEQ ID NO: 278649 - RNA, 19 nt, Human adenovirus A
cgaaauauucaagugcagu

SEQ ID NO: 278650 - RNA, 18 nt, Human adenovirus A
cgaacggcagcugccaag

SEQ ID NO: 278651 - RNA, 15 nt, Human adenovirus A
cgaaugcugugacac

SEQ ID NO: 278652 - RNA, 13 nt, Human adenovirus A
cgacaaaugauga

SEQ ID NO: 278653 - RNA, 12 nt, Human adenovirus A
cgcaccacugua

SEQ ID NO: 278654 - RNA, 15 nt, Human adenovirus A
cgcacugaaaaacca

SEQ ID NO: 278655 - RNA, 19 nt, Human adenovirus A
cgcaguggucuuacaugca

SEQ ID NO: 278656 - RNA, 15 nt, Human adenovirus A
cgcauacccauucca

SEQ ID NO: 278657 - RNA, 18 nt, Human adenovirus A
cgcauuggaaaagugcac

SEQ ID NO: 278658 - RNA, 16 nt, Human adenovirus A
cgccaaccucacugcu

SEQ ID NO: 278659 - RNA, 15 nt, Human adenovirus A
cgccaacgcugcaaa

SEQ ID NO: 278660 - RNA, 21 nt, Human adenovirus A
cgcgccacggacaccuacuuc

SEQ ID NO: 278661 - RNA, 17 nt, Human adenovirus A
cgcguauaguguaaaaa

SEQ ID NO: 278662 - RNA, 15 nt, Human adenovirus A
cgcuaugaaucuuua

SEQ ID NO: 278663 - RNA, 19 nt, Human adenovirus A
cgcuaugaaucuuuaccag

SEQ ID NO: 278664 - RNA, 18 nt, Human adenovirus A
cgcugaaacagcaggguc

SEQ ID NO: 278665 - RNA, 13 nt, Human adenovirus A
cgcugcaguuuuu

SEQ ID NO: 278666 - RNA, 21 nt, Human adenovirus A
cggaacgccaacgcugcaaac

SEQ ID NO: 278667 - RNA, 14 nt, Human adenovirus A
cggcagcugccaag

SEQ ID NO: 278668 - RNA, 20 nt, Human adenovirus A
cgggaagauacuaccuacuc

SEQ ID NO: 278669 - RNA, 21 nt, Human adenovirus A
cgggaagauacuaccuacucc

SEQ ID NO: 278670 - RNA, 17 nt, Human adenovirus A
cggggugauaugcauuu

SEQ ID NO: 278671 - RNA, 16 nt, Human adenovirus A
cggugccuaugugaua

SEQ ID NO: 278672 - RNA, 11 nt, Human adenovirus A
cguacacuggc

SEQ ID NO: 278673 - RNA, 15 nt, Human adenovirus A
cguauuauggcuuua

SEQ ID NO: 278674 - RNA, 21 nt, Human adenovirus A
cguccggguucacuacagugu

SEQ ID NO: 278675 - RNA, 18 nt, Human adenovirus A
cguguaagaacauacaac

SEQ ID NO: 278676 - RNA, 13 nt, Human adenovirus A
cgugucacagcau

SEQ ID NO: 278677 - RNA, 17 nt, Human adenovirus A
cguuuauuugaguccau

SEQ ID NO: 278678 - RNA, 14 nt, Human adenovirus A
cuaaaacaaggucu

SEQ ID NO: 278679 - RNA, 19 nt, Human adenovirus A
cuaaagaaacaaacuacau

SEQ ID NO: 278680 - RNA, 20 nt, Human adenovirus A
cuaaagaaacaaacuacaua

SEQ ID NO: 278681 - RNA, 12 nt, Human adenovirus A
cuaauagcacuu

SEQ ID NO: 278682 - RNA, 20 nt, Human adenovirus A
cuacaaagggggaaagggag

SEQ ID NO: 278683 - RNA, 19 nt, Human adenovirus A
cuacaaggcucgcuuuacg

SEQ ID NO: 278684 - RNA, 21 nt, Human adenovirus A
cuacagauuggcaccauacaa

SEQ ID NO: 278685 - RNA, 11 nt, Human adenovirus A
cuaccacugua

SEQ ID NO: 278686 - RNA, 16 nt, Human adenovirus A
cuacccaccaucuuca

SEQ ID NO: 278687 - RNA, 13 nt, Human adenovirus A
cuaccuacuccua

SEQ ID NO: 278688 - RNA, 22 nt, Human adenovirus A
cuacggagggaagaaacaguau

SEQ ID NO: 278689 - RNA, 19 nt, Human adenovirus A
cuagaaaagucaacccaaa

SEQ ID NO: 278690 - RNA, 18 nt, Human adenovirus A
cuagaaucggcaacagca

SEQ ID NO: 278691 - RNA, 20 nt, Human adenovirus A
cuaguucuugucaacuacau

SEQ ID NO: 278692 - RNA, 22 nt, Human adenovirus A
cuaguucuugucaacuacauaa

SEQ ID NO: 278693 - RNA, 21 nt, Human adenovirus A
cuauauuaacuuuauauugca

SEQ ID NO: 278694 - RNA, 14 nt, Human adenovirus A
cuaucacuugcaac

SEQ ID NO: 278695 - RNA, 20 nt, Human adenovirus A
ucucugacugauaccaugga

SEQ ID NO: 278696 - RNA, 20 nt, Human adenovirus A
ucugauugcguugcaaugug

SEQ ID NO: 278697 - RNA, 14 nt, Human adenovirus A
ucugccaacggcac

SEQ ID NO: 278698 - RNA, 14 nt, Human adenovirus A
ucugcugucauuug

SEQ ID NO: 278699 - RNA, 16 nt, Human adenovirus A
ucuggacaugcagguc

SEQ ID NO: 278700 - RNA, 20 nt, Human adenovirus A
ucuguguauacgccuccuau

SEQ ID NO: 278701 - RNA, 14 nt, Human adenovirus A
ucuuaagcagugaa

SEQ ID NO: 278702 - RNA, 13 nt, Human adenovirus A
ucuuacaugcaca

SEQ ID NO: 278703 - RNA, 21 nt, Human adenovirus A
ucuuacgaaaccgugauggca

SEQ ID NO: 278704 - RNA, 21 nt, Human adenovirus A
ucuucaucuuuucuagaugaa

SEQ ID NO: 278705 - RNA, 14 nt, Human adenovirus A
ucuucccaacuguc

SEQ ID NO: 278706 - RNA, 15 nt, Human adenovirus A
ucuucccaacuguca

SEQ ID NO: 278707 - RNA, 17 nt, Human adenovirus A
ucuucccaaucccuacc

SEQ ID NO: 278708 - RNA, 13 nt, Human adenovirus A
ucuucuucccaau

SEQ ID NO: 278709 - RNA, 15 nt, Human adenovirus A
ucuugucaacuacau

SEQ ID NO: 278710 - RNA, 17 nt, Human adenovirus A
ucuuuacaacuguaugc

SEQ ID NO: 278711 - RNA, 19 nt, Human adenovirus A
ucuuuauggccugagugua

SEQ ID NO: 278712 - RNA, 12 nt, Human adenovirus A
uuaaauuguucc

SEQ ID NO: 278713 - RNA, 22 nt, Human adenovirus A
uuaacaacaagcuaauugcuaa

SEQ ID NO: 278714 - RNA, 20 nt, Human adenovirus A
uuaaccacgcguauagugua

SEQ ID NO: 278715 - RNA, 20 nt, Human adenovirus A
uuaaccugggauacuaccgc

SEQ ID NO: 278716 - RNA, 21 nt, Human adenovirus A
uuaacuuuauauugcauuugu

SEQ ID NO: 278717 - RNA, 15 nt, Human adenovirus A
uuaacuuugaugaaa

SEQ ID NO: 278718 - RNA, 14 nt, Human adenovirus A
uuaagaaaucuuuu

SEQ ID NO: 278719 - RNA, 14 nt, Human adenovirus A
uuaagcagugaaaa

SEQ ID NO: 278720 - RNA, 17 nt, Human adenovirus A
uuaagguacauuggcau

SEQ ID NO: 278721 - RNA, 16 nt, Human adenovirus A
uuaauaaaaacacugu

SEQ ID NO: 278722 - RNA, 16 nt, Human adenovirus A
uuaauaauaaaaccau

SEQ ID NO: 278723 - RNA, 20 nt, Human adenovirus A
uuaauggacuuugagcaccu

SEQ ID NO: 278724 - RNA, 18 nt, Human adenovirus A
uuaauuuuaguuggaaua

SEQ ID NO: 278725 - RNA, 13 nt, Human adenovirus A
uuacaaaccacuu

SEQ ID NO: 278726 - RNA, 22 nt, Human adenovirus A
uuacaagaguuacuuuccuuag

SEQ ID NO: 278727 - RNA, 19 nt, Human adenovirus A
uuaccggaaaucugaaaau

SEQ ID NO: 278728 - RNA, 14 nt, Human adenovirus A
uuagauuguuauac

SEQ ID NO: 278729 - RNA, 19 nt, Human adenovirus A
uuaugccucuaccuuguau

SEQ ID NO: 278730 - RNA, 23 nt, Human adenovirus A
uucacgcaauagacucugccaac

SEQ ID NO: 278731 - RNA, 17 nt, Human adenovirus A
uucagcggggugauaug

SEQ ID NO: 278732 - RNA, 17 nt, Human adenovirus A
uuccacgauuaagacau

SEQ ID NO: 278733 - RNA, 18 nt, Human adenovirus A
uuccagcugagcaguuag

SEQ ID NO: 278734 - RNA, 14 nt, Human adenovirus A
uucccaucugcuuu

SEQ ID NO: 278735 - RNA, 18 nt, Human adenovirus A
uuccgcggccgcuucuac

SEQ ID NO: 278736 - RNA, 23 nt, Human adenovirus A
uucgaagccaagugauuguagaa

SEQ ID NO: 278737 - RNA, 22 nt, Human adenovirus A
uucuacggcucgcaguauggca

SEQ ID NO: 278738 - RNA, 16 nt, Human adenovirus A
uugaaaaaauacauga

SEQ ID NO: 278739 - RNA, 17 nt, Human adenovirus A
uugaaaaaauacaugag

SEQ ID NO: 278740 - RNA, 22 nt, Human adenovirus A
uugaaaaaauacaugaguguau

SEQ ID NO: 278741 - RNA, 22 nt, Human adenovirus A
uugaauuaccagaaugaucaca

SEQ ID NO: 278742 - RNA, 20 nt, Human adenovirus A
uugacccauuugacacauca

SEQ ID NO: 278743 - RNA, 15 nt, Human adenovirus A
uugacggaacgccaa

SEQ ID NO: 278744 - RNA, 22 nt, Human adenovirus A
uugacuuccagguuaccauauu

SEQ ID NO: 278745 - RNA, 14 nt, Human adenovirus A
uugagauuggcaau

SEQ ID NO: 278746 - RNA, 15 nt, Human adenovirus A
uugagauuggcaaug

SEQ ID NO: 278747 - RNA, 16 nt, Human adenovirus A
uugaucugucagugaa

SEQ ID NO: 278748 - RNA, 17 nt, Human adenovirus A
uugaucugucagugaaa

SEQ ID NO: 278749 - RNA, 19 nt, Human adenovirus A
uugauuuacaaaccgugca

SEQ ID NO: 278750 - RNA, 23 nt, Human adenovirus A
uugcaaacagcaaacuuucucca

SEQ ID NO: 278751 - RNA, 20 nt, Human adenovirus A
uugcagggcgcccauaacau

SEQ ID NO: 278752 - RNA, 16 nt, Human adenovirus A
uugcauuuuaguaaaa

SEQ ID NO: 278753 - RNA, 17 nt, Human adenovirus A
uuggcaccauacaacaa

SEQ ID NO: 278754 - RNA, 15 nt, Human adenovirus A
uuggcggccaugcaa

SEQ ID NO: 278755 - RNA, 20 nt, Human adenovirus A
uuggcggccaugcaaagcca

SEQ ID NO: 278756 - RNA, 20 nt, Human adenovirus A
uuggcuucgaaugcugugac

SEQ ID NO: 278757 - RNA, 21 nt, Human adenovirus A
uuguacaguuuggguugacuu

SEQ ID NO: 278758 - RNA, 21 nt, Human adenovirus A
uuguagcuacagaauuacuaa

SEQ ID NO: 278759 - RNA, 14 nt, Human adenovirus A
uugucaacuacaua

SEQ ID NO: 278760 - RNA, 21 nt, Human adenovirus A
uugucuccucuguaguuucuu

SEQ ID NO: 278761 - RNA, 16 nt, Human adenovirus A
uugugugcugaauuua

SEQ ID NO: 278762 - RNA, 21 nt, Human adenovirus A
uuuacauaauguaagugaggu

SEQ ID NO: 278763 - RNA, 14 nt, Human adenovirus A
uuuaccuacuuuga

SEQ ID NO: 278764 - RNA, 18 nt, Human adenovirus A
uuuaguauagguauugau

SEQ ID NO: 278765 - RNA, 18 nt, Human adenovirus A
uuuauggacccacuggcu

SEQ ID NO: 278766 - RNA, 13 nt, Human adenovirus A
uuucaaccuauua

SEQ ID NO: 278767 - RNA, 15 nt, Human adenovirus A
uuuccacacaucuca

SEQ ID NO: 278768 - RNA, 20 nt, Human adenovirus A
uuucccacuuuauaugcuau

SEQ ID NO: 278769 - RNA, 12 nt, Human adenovirus A
uuuccugagaca

SEQ ID NO: 278770 - RNA, 16 nt, Human adenovirus A
uuucggccauuuugga

SEQ ID NO: 278771 - RNA, 16 nt, Human adenovirus A
uuucuuaagcagugaa

SEQ ID NO: 278772 - RNA, 22 nt, Human adenovirus A
uuugacuuccagguuaccauau

SEQ ID NO: 278773 - RNA, 15 nt, Human adenovirus A
uuugcaggugccaca

SEQ ID NO: 278774 - RNA, 19 nt, Human adenovirus A
uuugccugguaaaacaagc

SEQ ID NO: 278775 - RNA, 20 nt, Human adenovirus A
uuugccugguaaaacaagcu

SEQ ID NO: 278776 - RNA, 18 nt, Human adenovirus A
uuugggacgcugguucaa

SEQ ID NO: 278777 - RNA, 18 nt, Human adenovirus A
uuugggcuaguucuuguc

SEQ ID NO: 278778 - RNA, 15 nt, Human adenovirus A
uuugguuucgccaag

SEQ ID NO: 278779 - RNA, 14 nt, Human adenovirus A
uuuucuuuauguua

SEQ ID NO: 278780 - RNA, 15 nt, Human adenovirus A
uuuucuuuauguuaa

SEQ ID NO: 278781 - RNA, 17 nt, Human adenovirus A
uuuugacccauuugaca

SEQ ID NO: 278782 - RNA, 17 nt, Human adenovirus A
gacuuuguagcauacaa

SEQ ID NO: 278783 - RNA, 18 nt, Human adenovirus A
gagaaaguguuaaccauu

SEQ ID NO: 278784 - RNA, 14 nt, Human adenovirus A
gagacaucuguguc

SEQ ID NO: 278785 - RNA, 15 nt, Human adenovirus A
gagacuuaccauuug

SEQ ID NO: 278786 - RNA, 17 nt, Human adenovirus A
gagagggcuccuaaccu

SEQ ID NO: 278787 - RNA, 18 nt, Human adenovirus A
gagagggcuccuaaccug

SEQ ID NO: 278788 - RNA, 15 nt, Human adenovirus A
gagcaggauggugua

SEQ ID NO: 278789 - RNA, 22 nt, Human adenovirus A
gagccugaaccuaauagcacuu

SEQ ID NO: 278790 - RNA, 21 nt, Human adenovirus A
gagcguugguucgacgggcca

SEQ ID NO: 278791 - RNA, 15 nt, Human adenovirus A
gagcucgacaaggaa

SEQ ID NO: 278792 - RNA, 23 nt, Human adenovirus A
gagcugacggccauuguucgaga

SEQ ID NO: 278793 - RNA, 23 nt, Human adenovirus A
gaggacgaacggcagcugccaag

SEQ ID NO: 278794 - RNA, 18 nt, Human adenovirus A
gaggcgcgcgaguuaaga

SEQ ID NO: 278795 - RNA, 22 nt, Human adenovirus A
gaggcuggcacgcaaacuauua

SEQ ID NO: 278796 - RNA, 17 nt, Human adenovirus A
gaguacaagcuugacug

SEQ ID NO: 278797 - RNA, 16 nt, Human adenovirus A
gaguacgaaagucugu

SEQ ID NO: 278798 - RNA, 17 nt, Human adenovirus A
gaguugcaggaugaauu

SEQ ID NO: 278799 - RNA, 14 nt, Human adenovirus A
gauaaugagccuga

SEQ ID NO: 278800 - RNA, 19 nt, Human adenovirus A
gauacacaccucauuaaau

SEQ ID NO: 278801 - RNA, 18 nt, Human adenovirus A
gauagaccugaccacaug

SEQ ID NO: 278802 - RNA, 14 nt, Human adenovirus A
gauagcaaagccau

SEQ ID NO: 278803 - RNA, 15 nt, Human adenovirus A
gauagcaaagccauc

SEQ ID NO: 278804 - RNA, 18 nt, Human adenovirus A
gaucgcuugcaacugcug

SEQ ID NO: 278805 - RNA, 15 nt, Human adenovirus A
gaucugucagugaaa

SEQ ID NO: 278806 - RNA, 16 nt, Human adenovirus A
gaucugucagugaaac

SEQ ID NO: 278807 - RNA, 19 nt, Human adenovirus A
gaucuucccgaauauccaa

SEQ ID NO: 278808 - RNA, 21 nt, Human adenovirus A
gaugaacggaacuacucagaa

SEQ ID NO: 278809 - RNA, 22 nt, Human adenovirus A
gaugaagcgcagcagaacccag

SEQ ID NO: 278810 - RNA, 15 nt, Human adenovirus A
gaugauugaaccuga

SEQ ID NO: 278811 - RNA, 19 nt, Human adenovirus A
gauggaguggcgauuccaa

SEQ ID NO: 278812 - RNA, 20 nt, Human adenovirus A
gauguaauuaauggacuuug

SEQ ID NO: 278813 - RNA, 13 nt, Human adenovirus A
gauuaagacauau

SEQ ID NO: 278814 - RNA, 22 nt, Human adenovirus A
gauucaagaggaagaaagagaa

SEQ ID NO: 278815 - RNA, 13 nt, Human adenovirus A
gauucuucuuccc

SEQ ID NO: 278816 - RNA, 20 nt, Human adenovirus A
gauuuacaaaccgugcauca

SEQ ID NO: 278817 - RNA, 23 nt, Human adenovirus A
gcaaacagcaaacuuucuccaaa

SEQ ID NO: 278818 - RNA, 22 nt, Human adenovirus A
gcaaacgcgcgggcuuaugcaa

SEQ ID NO: 278819 - RNA, 23 nt, Human adenovirus A
gcaacaacgcugggcauggugau

SEQ ID NO: 278820 - RNA, 19 nt, Human adenovirus A
gcaacagcagcaacaagga

SEQ ID NO: 278821 - RNA, 12 nt, Human adenovirus A
gcaacagccaag

SEQ ID NO: 278822 - RNA, 17 nt, Human adenovirus A
gcaacuuuuuaaccacu

SEQ ID NO: 278823 - RNA, 19 nt, Human adenovirus A
gcaacuuuuuaaccacugu

SEQ ID NO: 278824 - RNA, 19 nt, Human adenovirus A
gcaaggcgguauuugcuau

SEQ ID NO: 278825 - RNA, 23 nt, Human adenovirus A
gcaaguaccgcgcgcccgcugaa

SEQ ID NO: 278826 - RNA, 23 nt, Human adenovirus A
gcaauaaaauagggguaaugugg

SEQ ID NO: 278827 - RNA, 17 nt, Human adenovirus A
gcaauagacucugccaa

SEQ ID NO: 278828 - RNA, 20 nt, Human adenovirus A
gcacaucaccgaggcaguuu

SEQ ID NO: 278829 - RNA, 19 nt, Human adenovirus A
gcaccaaggcguggaacag

SEQ ID NO: 278830 - RNA, 20 nt, Human adenovirus A
gcaccauacaacaaguacca

SEQ ID NO: 278831 - RNA, 19 nt, Human adenovirus A
gcacccucccagacugcug

SEQ ID NO: 278832 - RNA, 20 nt, Human adenovirus A
gcacuggucgcaccacugua

SEQ ID NO: 278833 - RNA, 14 nt, Human adenovirus A
gcacuuaauuacaa

SEQ ID NO: 278834 - RNA, 16 nt, Human adenovirus A
gcagacuaaauggaag

SEQ ID NO: 278835 - RNA, 21 nt, Human adenovirus A
gcagcugauuucagcuucuac

SEQ ID NO: 278836 - RNA, 23 nt, Human adenovirus A
gcagcuuccgcggccgcuucuac

SEQ ID NO: 278837 - RNA, 12 nt, Human adenovirus A
gcaggaugaauu

SEQ ID NO: 278838 - RNA, 22 nt, Human adenovirus A
gcaggcgcgucggggcuacugc

SEQ ID NO: 278839 - RNA, 16 nt, Human adenovirus A
gcagggauauguuucu

SEQ ID NO: 278840 - RNA, 22 nt, Human adenovirus A
gcagggucuacuguugaugcag

SEQ ID NO: 278841 - RNA, 22 nt, Human adenovirus A
gcaggucgaggggcaccgucac

SEQ ID NO: 278842 - RNA, 19 nt, Human adenovirus A
gcaguagggguugauguga

SEQ ID NO: 278843 - RNA, 15 nt, Human adenovirus A
gcaguauggcagcug

SEQ ID NO: 278844 - RNA, 18 nt, Human adenovirus A
gcauacccauuccaggau

SEQ ID NO: 278845 - RNA, 20 nt, Human adenovirus A
gcauccgaggugacaugaua

SEQ ID NO: 278846 - RNA, 17 nt, Human adenovirus A
gcaugggcgacuacccg

SEQ ID NO: 278847 - RNA, 18 nt, Human adenovirus A
gcauuaauaauaaaacca

SEQ ID NO: 278848 - RNA, 13 nt, Human adenovirus A
gccacggacaccu

SEQ ID NO: 278849 - RNA, 23 nt, Human adenovirus A
gccagcagccccaagcuaaccgc

SEQ ID NO: 278850 - RNA, 19 nt, Human adenovirus A
gccauacugcgagccguag

SEQ ID NO: 278851 - RNA, 20 nt, Human adenovirus A
gccaucuuugggaugaaggu

SEQ ID NO: 278852 - RNA, 15 nt, Human adenovirus A
gccaugcaaagccag

SEQ ID NO: 278853 - RNA, 20 nt, Human adenovirus A
gcccacuagaaucggcaaca

SEQ ID NO: 278854 - RNA, 22 nt, Human adenovirus A
gcccauaacaucaggagcagaa

SEQ ID NO: 278855 - RNA, 19 nt, Human adenovirus A
gcccgaaguugacuggcau

SEQ ID NO: 278856 - RNA, 12 nt, Human adenovirus A
gcccgcauguau

SEQ ID NO: 278857 - RNA, 19 nt, Human adenovirus A
gcccgcgcgcggacuuuca

SEQ ID NO: 278858 - RNA, 13 nt, Human adenovirus A
gcccugauuuccc

SEQ ID NO: 278859 - RNA, 17 nt, Human adenovirus A
gcccuuccuaauuccac

SEQ ID NO: 278860 - RNA, 19 nt, Human adenovirus A
gccgaaugcgcauacccau

SEQ ID NO: 278861 - RNA, 13 nt, Human adenovirus A
gccgauggccuaa

SEQ ID NO: 278862 - RNA, 13 nt, Human adenovirus A
gccgcugcagcuu

SEQ ID NO: 278863 - RNA, 15 nt, Human adenovirus A
gccggaguacgucag

SEQ ID NO: 278864 - RNA, 20 nt, Human adenovirus A
gccuaguugcgcagaugaua

SEQ ID NO: 278865 - RNA, 12 nt, Human adenovirus A
gccucacuggca

SEQ ID NO: 278866 - RNA, 19 nt, Human adenovirus A
gccucaguagccuugcagg

SEQ ID NO: 278867 - RNA, 14 nt, Human adenovirus A
gccucggaguaccu

SEQ ID NO: 278868 - RNA, 13 nt, Human adenovirus A
gccuguugaucug

SEQ ID NO: 278869 - RNA, 23 nt, Human adenovirus A
gccuguugaucugucagugaaac

SEQ ID NO: 278870 - RNA, 17 nt, Human adenovirus A
gccuuacauguggagcu

SEQ ID NO: 278871 - RNA, 22 nt, Human adenovirus A
gccuuacauguggagcuuucaa

SEQ ID NO: 278872 - RNA, 19 nt, Human adenovirus A
gccuuacguccugauugua

SEQ ID NO: 278873 - RNA, 11 nt, Human adenovirus A
gcgacuacccg

SEQ ID NO: 278874 - RNA, 17 nt, Human adenovirus A
gcgcauacccauuccag

SEQ ID NO: 278875 - RNA, 16 nt, Human adenovirus A
gcgccuucaauuggaa

SEQ ID NO: 278876 - RNA, 19 nt, Human adenovirus A
gcgcggcugcgacauuuag

SEQ ID NO: 278877 - RNA, 15 nt, Human adenovirus A
gcgcguacgcggaca

SEQ ID NO: 278878 - RNA, 18 nt, Human adenovirus A
gcggccaugcaaagccag

SEQ ID NO: 278879 - RNA, 15 nt, Human adenovirus A
gcggggugauaugca

SEQ ID NO: 278880 - RNA, 22 nt, Human adenovirus A
gcgguuuuggcggccaugcaaa

SEQ ID NO: 278881 - RNA, 16 nt, Human adenovirus A
gcguuuggaaacugua

SEQ ID NO: 278882 - RNA, 20 nt, Human adenovirus A
gcuacaaagggggaaaggga

SEQ ID NO: 278883 - RNA, 16 nt, Human adenovirus A
gcucaagacuauucua

SEQ ID NO: 278884 - RNA, 13 nt, Human adenovirus A
gcucgcaaguacc

SEQ ID NO: 278885 - RNA, 19 nt, Human adenovirus A
gcugaaaucuggacaugca

SEQ ID NO: 278886 - RNA, 13 nt, Human adenovirus A
gcugaagcaaacc

SEQ ID NO: 278887 - RNA, 21 nt, Human adenovirus A
gcugacggccauuguucgaga

SEQ ID NO: 278888 - RNA, 10 nt, Human adenovirus A
gcugcagcuu

SEQ ID NO: 278889 - RNA, 12 nt, Human adenovirus A
gcugcaguuuuu

SEQ ID NO: 278890 - RNA, 23 nt, Human adenovirus A
gcugccaagugguauugauuuuc

SEQ ID NO: 278891 - RNA, 19 nt, Human adenovirus A
gcugguuuaauauacaacg

SEQ ID NO: 278892 - RNA, 21 nt, Human adenovirus A
gcugucacugagcacaucacc

SEQ ID NO: 278893 - RNA, 12 nt, Human adenovirus A
gcuuaguauuug

SEQ ID NO: 278894 - RNA, 17 nt, Human adenovirus A
gcuuaucaugugcuauu

SEQ ID NO: 278895 - RNA, 18 nt, Human adenovirus A
cucgcaguauggcagcug

SEQ ID NO: 278896 - RNA, 20 nt, Human adenovirus A
cucgcaguauggcagcugau

SEQ ID NO: 278897 - RNA, 17 nt, Human adenovirus A
cucguuaaacuaucacu

SEQ ID NO: 278898 - RNA, 21 nt, Human adenovirus A
cucucugacugauaccaugga

SEQ ID NO: 278899 - RNA, 21 nt, Human adenovirus A
cucugacugauaccauggaca

SEQ ID NO: 278900 - RNA, 13 nt, Human adenovirus A
cucugcgcuuuau

SEQ ID NO: 278901 - RNA, 21 nt, Human adenovirus A
cucuuauaaaauuucccucuu

SEQ ID NO: 278902 - RNA, 19 nt, Human adenovirus A
cucuuccagcugagcaguu

SEQ ID NO: 278903 - RNA, 22 nt, Human adenovirus A
cugaaaaaccaacaaacacgga

SEQ ID NO: 278904 - RNA, 17 nt, Human adenovirus A
cugaaacagcagggucu

SEQ ID NO: 278905 - RNA, 16 nt, Human adenovirus A
cugaagcugaauacau

SEQ ID NO: 278906 - RNA, 22 nt, Human adenovirus A
cugaggacuuuguagcauacaa

SEQ ID NO: 278907 - RNA, 17 nt, Human adenovirus A
cugaucgcgcuaggcga

SEQ ID NO: 278908 - RNA, 18 nt, Human adenovirus A
cugaucuagaaauugaug

SEQ ID NO: 278909 - RNA, 16 nt, Human adenovirus A
cugauugcguugcaau

SEQ ID NO: 278910 - RNA, 19 nt, Human adenovirus A
cugauuuauauaguuugau

SEQ ID NO: 278911 - RNA, 12 nt, Human adenovirus A
cugcaacagcca

SEQ ID NO: 278912 - RNA, 19 nt, Human adenovirus A
cugcagcgugcggccuguu

SEQ ID NO: 278913 - RNA, 16 nt, Human adenovirus A
cugcaggaauggccaa

SEQ ID NO: 278914 - RNA, 14 nt, Human adenovirus A
cugcgacauuuaga

SEQ ID NO: 278915 - RNA, 21 nt, Human adenovirus A
cugcgcuuuauuaaacaucau

SEQ ID NO: 278916 - RNA, 17 nt, Human adenovirus A
cugcggugcgugucaca

SEQ ID NO: 278917 - RNA, 19 nt, Human adenovirus A
cugcugucacugagcacau

SEQ ID NO: 278918 - RNA, 23 nt, Human adenovirus A
cuggaacgagaucggcacgagcc

SEQ ID NO: 278919 - RNA, 19 nt, Human adenovirus A
cuggauuugcgcacugaaa

SEQ ID NO: 278920 - RNA, 13 nt, Human adenovirus A
cuggccaagcaaa

SEQ ID NO: 278921 - RNA, 20 nt, Human adenovirus A
cuggcuuuuggauggaaccc

SEQ ID NO: 278922 - RNA, 15 nt, Human adenovirus A
cuggguuuauggaau

SEQ ID NO: 278923 - RNA, 15 nt, Human adenovirus A
cugguuagagccaug

SEQ ID NO: 278924 - RNA, 14 nt, Human adenovirus A
cuguacgcccugau

SEQ ID NO: 278925 - RNA, 16 nt, Human adenovirus A
cugucauuugugugcu

SEQ ID NO: 278926 - RNA, 15 nt, Human adenovirus A
cuguggaaagcauuu

SEQ ID NO: 278927 - RNA, 18 nt, Human adenovirus A
cuguuaggggaacuggcc

SEQ ID NO: 278928 - RNA, 20 nt, Human adenovirus A
cuguugaucugucagugaaa

SEQ ID NO: 278929 - RNA, 19 nt, Human adenovirus A
cuguuuuauuaaaaaucaa

SEQ ID NO: 278930 - RNA, 14 nt, Human adenovirus A
cuuaaauugagaug

SEQ ID NO: 278931 - RNA, 20 nt, Human adenovirus A
cuuacauguggagcuuucaa

SEQ ID NO: 278932 - RNA, 19 nt, Human adenovirus A
cuuacuugccgaaugcgca

SEQ ID NO: 278933 - RNA, 14 nt, Human adenovirus A
cuuaucaugugcua

SEQ ID NO: 278934 - RNA, 16 nt, Human adenovirus A
cuuaucaugugcuauu

SEQ ID NO: 278935 - RNA, 17 nt, Human adenovirus A
cuucagaugacuggaca

SEQ ID NO: 278936 - RNA, 21 nt, Human adenovirus A
cuucauguguagguuuuacag

SEQ ID NO: 278937 - RNA, 15 nt, Human adenovirus A
cuucccaacugucaa

SEQ ID NO: 278938 - RNA, 16 nt, Human adenovirus A
cuucgcuaugaaucuu

SEQ ID NO: 278939 - RNA, 19 nt, Human adenovirus A
cuucuuccaauggucuuca

SEQ ID NO: 278940 - RNA, 21 nt, Human adenovirus A
cuugagcgcguggcacgcuau

SEQ ID NO: 278941 - RNA, 15 nt, Human adenovirus A
cuugcaaacagcaaa

SEQ ID NO: 278942 - RNA, 21 nt, Human adenovirus A
cuuggcaagcauaacagucag

SEQ ID NO: 278943 - RNA, 20 nt, Human adenovirus A
cuuuaacggaaaacacguua

SEQ ID NO: 278944 - RNA, 23 nt, Human adenovirus A
cuuuacauaauguaagugaggua

SEQ ID NO: 278945 - RNA, 21 nt, Human adenovirus A
cuuuaccaggcaaagaacauc

SEQ ID NO: 278946 - RNA, 16 nt, Human adenovirus A
cuuuaccuacuuugag

SEQ ID NO: 278947 - RNA, 13 nt, Human adenovirus A
cuuuacugcaaug

SEQ ID NO: 278948 - RNA, 19 nt, Human adenovirus A
cuuuaguauagguauugau

SEQ ID NO: 278949 - RNA, 20 nt, Human adenovirus A
cuuuauggccugaguguaau

SEQ ID NO: 278950 - RNA, 20 nt, Human adenovirus A
cuuuauuaaacaucaugauu

SEQ ID NO: 278951 - RNA, 23 nt, Human adenovirus A
cuuucaacaggcgggaaaaguga

SEQ ID NO: 278952 - RNA, 14 nt, Human adenovirus A
cuuucgaucccuca

SEQ ID NO: 278953 - RNA, 19 nt, Human adenovirus A
cuuucgaucccucauauca

SEQ ID NO: 278954 - RNA, 17 nt, Human adenovirus A
cuuucuccaaaucuuaa

SEQ ID NO: 278955 - RNA, 16 nt, Human adenovirus A
cuuuguagcauacaau

SEQ ID NO: 278956 - RNA, 19 nt, Human adenovirus A
cuuuguagcugaaaacaac

SEQ ID NO: 278957 - RNA, 21 nt, Human adenovirus A
cuuuguagcugaaaacaacug

SEQ ID NO: 278958 - RNA, 17 nt, Human adenovirus A
cuuuuaccaaugaauua

SEQ ID NO: 278959 - RNA, 16 nt, Human adenovirus A
cuuuucaaacuuuaca

SEQ ID NO: 278960 - RNA, 22 nt, Human adenovirus A
cuuuucaaacuuuacaaaccac

SEQ ID NO: 278961 - RNA, 23 nt, Human adenovirus A
cuuuucaaacuuuacaaaccacu

SEQ ID NO: 278962 - RNA, 12 nt, Human adenovirus A
cuuuuccaaugc

SEQ ID NO: 278963 - RNA, 18 nt, Human adenovirus A
cuuuucucucugacugau

SEQ ID NO: 278964 - RNA, 21 nt, Human adenovirus A
cuuuuuugccugguaaaacaa

SEQ ID NO: 278965 - RNA, 13 nt, Human adenovirus A
gaaaaaccaccag

SEQ ID NO: 278966 - RNA, 18 nt, Human adenovirus A
gaaaaaccaccaggugua

SEQ ID NO: 278967 - RNA, 17 nt, Human adenovirus A
gaaaaugaugacuucaa

SEQ ID NO: 278968 - RNA, 15 nt, Human adenovirus A
gaaaguguuaaccau

SEQ ID NO: 278969 - RNA, 16 nt, Human adenovirus A
gaaaguguuaaccauu

SEQ ID NO: 278970 - RNA, 18 nt, Human adenovirus A
gaaauauucaagugcagu

SEQ ID NO: 278971 - RNA, 18 nt, Human adenovirus A
gaacaaacagugccuguu

SEQ ID NO: 278972 - RNA, 12 nt, Human adenovirus A
gaacagccaaac

SEQ ID NO: 278973 - RNA, 15 nt, Human adenovirus A
gaacccuuacacuca

SEQ ID NO: 278974 - RNA, 15 nt, Human adenovirus A
gaaccuaacugucau

SEQ ID NO: 278975 - RNA, 16 nt, Human adenovirus A
gaaccuaacugucauc

SEQ ID NO: 278976 - RNA, 17 nt, Human adenovirus A
gaaccuaauagcacuuu

SEQ ID NO: 278977 - RNA, 12 nt, Human adenovirus A
gaacggcagcug

SEQ ID NO: 278978 - RNA, 20 nt, Human adenovirus A
gaagaaaaugaugacuucaa

SEQ ID NO: 278979 - RNA, 17 nt, Human adenovirus A
gaagaaccuaacuguca

SEQ ID NO: 278980 - RNA, 19 nt, Human adenovirus A
gaagaaccuaacugucauc

SEQ ID NO: 278981 - RNA, 20 nt, Human adenovirus A
gaagaagaaccuaacuguca

SEQ ID NO: 278982 - RNA, 18 nt, Human adenovirus A
gaagaaucaccgaacaga

SEQ ID NO: 278983 - RNA, 15 nt, Human adenovirus A
gaagagcucgacaag

SEQ ID NO: 278984 - RNA, 21 nt, Human adenovirus A
gaagaggacgaacggcagcug

SEQ ID NO: 278985 - RNA, 21 nt, Human adenovirus A
gaagauacuaccuacuccuac

SEQ ID NO: 278986 - RNA, 19 nt, Human adenovirus A
gaagauuucugcugucauu

SEQ ID NO: 278987 - RNA, 17 nt, Human adenovirus A
gaagcugaaaucagcug

SEQ ID NO: 278988 - RNA, 20 nt, Human adenovirus A
gaagcugaaaucagcugcca

SEQ ID NO: 278989 - RNA, 12 nt, Human adenovirus A
gaaggaggcagu

SEQ ID NO: 278990 - RNA, 17 nt, Human adenovirus A
gaauaucucauuugcaa

SEQ ID NO: 278991 - RNA, 13 nt, Human adenovirus A
gaaucaaucucag

SEQ ID NO: 278992 - RNA, 19 nt, Human adenovirus A
gacaaaccuuuacugcaau

SEQ ID NO: 278993 - RNA, 13 nt, Human adenovirus A
gacaccuacuuca

SEQ ID NO: 278994 - RNA, 14 nt, Human adenovirus A
gacauagccaauca

SEQ ID NO: 278995 - RNA, 15 nt, Human adenovirus A
gacauagccaaucag

SEQ ID NO: 278996 - RNA, 18 nt, Human adenovirus A
gacauagccaaucaggcu

SEQ ID NO: 278997 - RNA, 15 nt, Human adenovirus A
gacaugauaugaagu

SEQ ID NO: 278998 - RNA, 19 nt, Human adenovirus A
gacauuuagaccacugucg

SEQ ID NO: 278999 - RNA, 20 nt, Human adenovirus A
gacauuuagaccacugucgc

SEQ ID NO: 279000 - RNA, 19 nt, Human adenovirus A
gacccauuugacacaucag

SEQ ID NO: 279001 - RNA, 17 nt, Human adenovirus A
gaccgcuuaucaugugc

SEQ ID NO: 279002 - RNA, 20 nt, Human adenovirus A
uaaaauuucccucuucccaa

SEQ ID NO: 279003 - RNA, 23 nt, Human adenovirus A
uaaacuacacaaagaaaacauca

SEQ ID NO: 279004 - RNA, 16 nt, Human adenovirus A
uaaacuaucacuugca

SEQ ID NO: 279005 - RNA, 19 nt, Human adenovirus A
uaaagaaacaaacuacaua

SEQ ID NO: 279006 - RNA, 15 nt, Human adenovirus A
uaaaugcaacuuuca

SEQ ID NO: 279007 - RNA, 15 nt, Human adenovirus A
uaaauggaagacauc

SEQ ID NO: 279008 - RNA, 22 nt, Human adenovirus A
uaaauggaaggucagauucuuc

SEQ ID NO: 279009 - RNA, 22 nt, Human adenovirus A
uaacaaaagguguuuuugguau

SEQ ID NO: 279010 - RNA, 23 nt, Human adenovirus A
uuaacaacaagcuaauugcuaau

SEQ ID NO: 279011 - RNA, 11 nt, Human adenovirus A
uuaacacugcc

SEQ ID NO: 279012 - RNA, 18 nt, Human adenovirus A
uuaagaacacggugaaug

SEQ ID NO: 279013 - RNA, 23 nt, Human adenovirus A
uuaaguauuaccugcaccuccag

SEQ ID NO: 279014 - RNA, 23 nt, Human adenovirus A
uuaaugcauuguguacacguuua

SEQ ID NO: 279015 - RNA, 19 nt, Human adenovirus A
uuacauguggagcuuucaa

SEQ ID NO: 279016 - RNA, 21 nt, Human adenovirus A
uuacccuuuugacccauuuga

SEQ ID NO: 279017 - RNA, 17 nt, Human adenovirus A
uuacugguacuaugacu

SEQ ID NO: 279018 - RNA, 12 nt, Human adenovirus A
uuacuucuucca

SEQ ID NO: 279019 - RNA, 13 nt, Human adenovirus A
uuacuucuuccaa

SEQ ID NO: 279020 - RNA, 14 nt, Human adenovirus A
uuacuucuuccaau

SEQ ID NO: 279021 - RNA, 23 nt, Human adenovirus A
uuagaccacugucgccaaccuca

SEQ ID NO: 279022 - RNA, 13 nt, Human adenovirus A
uuagaguuucaag

SEQ ID NO: 279023 - RNA, 16 nt, Human adenovirus A
uuagauuguuauacua

SEQ ID NO: 279024 - RNA, 13 nt, Human adenovirus A
uuagcccaugcau

SEQ ID NO: 279025 - RNA, 17 nt, Human adenovirus A
uuaggcaccccaguaag

SEQ ID NO: 279026 - RNA, 22 nt, Human adenovirus A
uuaggggaacuggccaagcaaa

SEQ ID NO: 279027 - RNA, 16 nt, Human adenovirus A
uuauaaucuccaaaua

SEQ ID NO: 279028 - RNA, 13 nt, Human adenovirus A
uuauggaauuaug

SEQ ID NO: 279029 - RNA, 18 nt, Human adenovirus A
uuauuacugguacuauga

SEQ ID NO: 279030 - RNA, 21 nt, Human adenovirus A
uucaacaggcgggaaaaguga

SEQ ID NO: 279031 - RNA, 17 nt, Human adenovirus A
uucaaccccaaauggga

SEQ ID NO: 279032 - RNA, 19 nt, Human adenovirus A
uucaaccccguuuacccuu

SEQ ID NO: 279033 - RNA, 16 nt, Human adenovirus A
uucaaccuauuaaccu

SEQ ID NO: 279034 - RNA, 22 nt, Human adenovirus A
uucaagcuuggcaagcauaaca

SEQ ID NO: 279035 - RNA, 16 nt, Human adenovirus A
uucacuacaguguaug

SEQ ID NO: 279036 - RNA, 21 nt, Human adenovirus A
uucagaugacuggacagcggc

SEQ ID NO: 279037 - RNA, 21 nt, Human adenovirus A
uucagauggcucuuacuugcc

SEQ ID NO: 279038 - RNA, 12 nt, Human adenovirus A
uuccacacaucu

SEQ ID NO: 279039 - RNA, 18 nt, Human adenovirus A
uuccacgauuaagacaua

SEQ ID NO: 279040 - RNA, 17 nt, Human adenovirus A
uuccagggugaaugggg

SEQ ID NO: 279041 - RNA, 17 nt, Human adenovirus A
uuccaguauuuuguaaa

SEQ ID NO: 279042 - RNA, 16 nt, Human adenovirus A
uucccaacugucaaac

SEQ ID NO: 279043 - RNA, 20 nt, Human adenovirus A
uucccacgccuuacaugugg

SEQ ID NO: 279044 - RNA, 14 nt, Human adenovirus A
uuccccauccaaaa

SEQ ID NO: 279045 - RNA, 14 nt, Human adenovirus A
uuccgcggccgcuu

SEQ ID NO: 279046 - RNA, 13 nt, Human adenovirus A
uuccuaauuccac

SEQ ID NO: 279047 - RNA, 21 nt, Human adenovirus A
uuccucaaccuuuugcgauag

SEQ ID NO: 279048 - RNA, 15 nt, Human adenovirus A
uucgaagccaaguga

SEQ ID NO: 279049 - RNA, 20 nt, Human adenovirus A
uucgaagccaagugauugua

SEQ ID NO: 279050 - RNA, 19 nt, Human adenovirus A
uucuaacugauuaugagau

SEQ ID NO: 279051 - RNA, 14 nt, Human adenovirus A
uucuagcaaaauga

SEQ ID NO: 279052 - RNA, 17 nt, Human adenovirus A
uucuccccacagcuggc

SEQ ID NO: 279053 - RNA, 13 nt, Human adenovirus A
uucugcugucauu

SEQ ID NO: 279054 - RNA, 14 nt, Human adenovirus A
uucuggaauaacaa

SEQ ID NO: 279055 - RNA, 14 nt, Human adenovirus A
uucuuaagcaguga

SEQ ID NO: 279056 - RNA, 13 nt, Human adenovirus A
uucuucuucccaa

SEQ ID NO: 279057 - RNA, 14 nt, Human adenovirus A
uucuucuucccaau

SEQ ID NO: 279058 - RNA, 20 nt, Human adenovirus A
uugaagagcucgacaaggaa

SEQ ID NO: 279059 - RNA, 22 nt, Human adenovirus A
uugacacaucagacguacccuu

SEQ ID NO: 279060 - RNA, 21 nt, Human adenovirus A
uugagaugguguuaugaaucu

SEQ ID NO: 279061 - RNA, 13 nt, Human adenovirus A
uugagauuggcaa

SEQ ID NO: 279062 - RNA, 22 nt, Human adenovirus A
uugauggaagaaucaccgaaca

SEQ ID NO: 279063 - RNA, 20 nt, Human adenovirus A
uugcaaacagcaaacuuucu

SEQ ID NO: 279064 - RNA, 21 nt, Human adenovirus A
uugcaaacagcaaacuuucuc

SEQ ID NO: 279065 - RNA, 19 nt, Human adenovirus A
uugcaacugcugaagcaaa

SEQ ID NO: 279066 - RNA, 22 nt, Human adenovirus A
uugcgauagcucuuccagcuga

SEQ ID NO: 279067 - RNA, 14 nt, Human adenovirus A
uugcgcacugaaaa

SEQ ID NO: 279068 - RNA, 19 nt, Human adenovirus A
uugcgcacugaaaaaccaa

SEQ ID NO: 279069 - RNA, 14 nt, Human adenovirus A
uugcguugcaaugu

SEQ ID NO: 279070 - RNA, 13 nt, Human adenovirus A
uugcuuucugccc

SEQ ID NO: 279071 - RNA, 16 nt, Human adenovirus A
uuggauagcaaagcca

SEQ ID NO: 279072 - RNA, 16 nt, Human adenovirus A
uuggauggucaggcca

SEQ ID NO: 279073 - RNA, 15 nt, Human adenovirus A
uuggcauuaggccau

SEQ ID NO: 279074 - RNA, 16 nt, Human adenovirus A
uuggcauuaggccauc

SEQ ID NO: 279075 - RNA, 20 nt, Human adenovirus A
uugggcuaguucuugucaac

SEQ ID NO: 279076 - RNA, 16 nt, Human adenovirus A
uuguagacauagccaa

SEQ ID NO: 279077 - RNA, 17 nt, Human adenovirus A
uuguagacauagccaau

SEQ ID NO: 279078 - RNA, 19 nt, Human adenovirus A
uuguagauaauccagucau

SEQ ID NO: 279079 - RNA, 14 nt, Human adenovirus A
uuguagcauacaau

SEQ ID NO: 279080 - RNA, 17 nt, Human adenovirus A
uuguagccugcuuucag

SEQ ID NO: 279081 - RNA, 21 nt, Human adenovirus A
uuguagcugaaaacaacugca

SEQ ID NO: 279082 - RNA, 14 nt, Human adenovirus A
uuguauuuugagau

SEQ ID NO: 279083 - RNA, 17 nt, Human adenovirus A
uuguguacacguuuauu

SEQ ID NO: 279084 - RNA, 15 nt, Human adenovirus A
uuuaaacuacacaaa

SEQ ID NO: 279085 - RNA, 15 nt, Human adenovirus A
uuuaagcaacauuaa

SEQ ID NO: 279086 - RNA, 16 nt, Human adenovirus A
uuuaagcaacauuaaa

SEQ ID NO: 279087 - RNA, 24 nt, Human adenovirus A
uuuaagcaacauuaaaaucaaccu

SEQ ID NO: 279088 - RNA, 17 nt, Human adenovirus A
uuuagccucacuggcau

SEQ ID NO: 279089 - RNA, 15 nt, Human adenovirus A
uuuauuaaaaaucaa

SEQ ID NO: 279090 - RNA, 12 nt, Human adenovirus A
uuuauuaaacau

SEQ ID NO: 279091 - RNA, 15 nt, Human adenovirus A
uuuauugauacuugu

SEQ ID NO: 279092 - RNA, 12 nt, Human adenovirus A
uuucaaacuuua

SEQ ID NO: 279093 - RNA, 13 nt, Human adenovirus A
uuucagcuucuac

SEQ ID NO: 279094 - RNA, 14 nt, Human adenovirus A
uuucccucuuccca

SEQ ID NO: 279095 - RNA, 14 nt, Human adenovirus A
uuucgaucccucau

SEQ ID NO: 279096 - RNA, 14 nt, Human adenovirus A
uuucugacauggua

SEQ ID NO: 279097 - RNA, 17 nt, Human adenovirus A
uuucuuaagcagugaaa

SEQ ID NO: 279098 - RNA, 16 nt, Human adenovirus A
uuugacggaacgccaa

SEQ ID NO: 279099 - RNA, 21 nt, Human adenovirus A
uuuggcggccaugcaaagcca

SEQ ID NO: 279100 - RNA, 23 nt, Human adenovirus A
uuuggcggccaugcaaagccagc

SEQ ID NO: 279101 - RNA, 17 nt, Human adenovirus A
uuugggaaccuuugaca

SEQ ID NO: 279102 - RNA, 18 nt, Human adenovirus A
uuuguagcauacaauuag

SEQ ID NO: 279103 - RNA, 21 nt, Human adenovirus A
uuuguuggauagcaaagccau

SEQ ID NO: 279104 - RNA, 20 nt, Human adenovirus A
uuuuaccuuguauaccuccc

SEQ ID NO: 279105 - RNA, 14 nt, Human adenovirus A
uuuuacuucuucca

SEQ ID NO: 279106 - RNA, 16 nt, Human adenovirus A
uuuuccacacaucuca

SEQ ID NO: 279107 - RNA, 17 nt, Human adenovirus A
uuuugcuaaauuggccu

SEQ ID NO: 279108 - RNA, 13 nt, Human adenovirus A
uaacaacagucag

SEQ ID NO: 279109 - RNA, 23 nt, Human adenovirus A
uaacaacagucaguguccaucag

SEQ ID NO: 279110 - RNA, 12 nt, Human adenovirus A
uaacagcacgau

SEQ ID NO: 279111 - RNA, 15 nt, Human adenovirus A
uaacugaaaauggaa

SEQ ID NO: 279112 - RNA, 21 nt, Human adenovirus A
uaacugauuaugagauguuua

SEQ ID NO: 279113 - RNA, 13 nt, Human adenovirus A
uaagaaaacgcau

SEQ ID NO: 279114 - RNA, 12 nt, Human adenovirus A
uaagaacauaca

SEQ ID NO: 279115 - RNA, 19 nt, Human adenovirus A
uaagcagugaaaaauaaua

SEQ ID NO: 279116 - RNA, 23 nt, Human adenovirus A
uaagggacaaguuaaaagaccaa

SEQ ID NO: 279117 - RNA, 20 nt, Human adenovirus A
uaaguacgugagacuuacca

SEQ ID NO: 279118 - RNA, 14 nt, Human adenovirus A
uaauagcacuuugg

SEQ ID NO: 279119 - RNA, 20 nt, Human adenovirus A
uaaugagccugaaccuaaua

SEQ ID NO: 279120 - RNA, 14 nt, Human adenovirus A
uaauggacuuugag

SEQ ID NO: 279121 - RNA, 20 nt, Human adenovirus A
uaauucccaucuguguauac

SEQ ID NO: 279122 - RNA, 21 nt, Human adenovirus A
uaauuuauggacccacuggcu

SEQ ID NO: 279123 - RNA, 20 nt, Human adenovirus A
uacaaaccgugcaucagugu

SEQ ID NO: 279124 - RNA, 22 nt, Human adenovirus A
uacaaaccgugcaucaguguaa

SEQ ID NO: 279125 - RNA, 18 nt, Human adenovirus A
uacaaagggggaaaggga

SEQ ID NO: 279126 - RNA, 17 nt, Human adenovirus A
uacaacaaaacaggccg

SEQ ID NO: 279127 - RNA, 12 nt, Human adenovirus A
uacacaccucau

SEQ ID NO: 279128 - RNA, 21 nt, Human adenovirus A
uacaccugcuccagaaacugu

SEQ ID NO: 279129 - RNA, 14 nt, Human adenovirus A
uacagaauuacuaa

SEQ ID NO: 279130 - RNA, 22 nt, Human adenovirus A
uacagaggaaauuguguacuuu

SEQ ID NO: 279131 - RNA, 23 nt, Human adenovirus A
uacagccccuuugaagagcucga

SEQ ID NO: 279132 - RNA, 21 nt, Human adenovirus A
uacaguuuggguugacuuuuc

SEQ ID NO: 279133 - RNA, 18 nt, Human adenovirus A
uacauaaaccauggaauu

SEQ ID NO: 279134 - RNA, 23 nt, Human adenovirus A
uacauaggcuggguuuauggaau

SEQ ID NO: 279135 - RNA, 20 nt, Human adenovirus A
uacauuggcauuaggccauc

SEQ ID NO: 279136 - RNA, 21 nt, Human adenovirus A
uaccaacuaccgcccugugag

SEQ ID NO: 279137 - RNA, 20 nt, Human adenovirus A
uaccacucgaguguacuugg

SEQ ID NO: 279138 - RNA, 15 nt, Human adenovirus A
uaccagaaugaucac

SEQ ID NO: 279139 - RNA, 21 nt, Human adenovirus A
uacccgccugugcgaagucaa

SEQ ID NO: 279140 - RNA, 16 nt, Human adenovirus A
uacccuucgcuaugaa

SEQ ID NO: 279141 - RNA, 17 nt, Human adenovirus A
uacccuucgcuaugaau

SEQ ID NO: 279142 - RNA, 17 nt, Human adenovirus A
uaccggaaaucugaaaa

SEQ ID NO: 279143 - RNA, 13 nt, Human adenovirus A
uaccgucaucucu

SEQ ID NO: 279144 - RNA, 13 nt, Human adenovirus A
uaccuacuccuac

SEQ ID NO: 279145 - RNA, 15 nt, Human adenovirus A
uaccuauuaaagugu

SEQ ID NO: 279146 - RNA, 19 nt, Human adenovirus A
uaccuauuaaaguguccca

SEQ ID NO: 279147 - RNA, 13 nt, Human adenovirus A
uacgcccugauuu

SEQ ID NO: 279148 - RNA, 14 nt, Human adenovirus A
uacgcccugauuuc

SEQ ID NO: 279149 - RNA, 15 nt, Human adenovirus A
uacgcccugauuucc

SEQ ID NO: 279150 - RNA, 17 nt, Human adenovirus A
uacuaaaacaguaacca

SEQ ID NO: 279151 - RNA, 21 nt, Human adenovirus A
uacuaaagaaacaaacuacau

SEQ ID NO: 279152 - RNA, 22 nt, Human adenovirus A
uacuaaagaaacaaacuacaua

SEQ ID NO: 279153 - RNA, 12 nt, Human adenovirus A
uacucaauuauu

SEQ ID NO: 279154 - RNA, 18 nt, Human adenovirus A
uacucaauuauuacaugg

SEQ ID NO: 279155 - RNA, 22 nt, Human adenovirus A
uacucaauuauuacauggucau

SEQ ID NO: 279156 - RNA, 14 nt, Human adenovirus A
uacugaugaucuuc

SEQ ID NO: 279157 - RNA, 20 nt, Human adenovirus A
uacuuaccggaaaucugaaa

SEQ ID NO: 279158 - RNA, 24 nt, Human adenovirus A
uacuucacgcaauagacucugcca

SEQ ID NO: 279159 - RNA, 16 nt, Human adenovirus A
uagaaauugauggaag

SEQ ID NO: 279160 - RNA, 18 nt, Human adenovirus A
uagaaucggcaacagcag

SEQ ID NO: 279161 - RNA, 13 nt, Human adenovirus A
uagccaacaucca

SEQ ID NO: 279162 - RNA, 12 nt, Human adenovirus A
uagcccaugcau

SEQ ID NO: 279163 - RNA, 18 nt, Human adenovirus A
uagccucacuggcauuug

SEQ ID NO: 279164 - RNA, 22 nt, Human adenovirus A
uagcucauuggaguacaagcuu

SEQ ID NO: 279165 - RNA, 20 nt, Human adenovirus A
uagcugaaaacaacugcacu

SEQ ID NO: 279166 - RNA, 13 nt, Human adenovirus A
uaguucuugucaa

SEQ ID NO: 279167 - RNA, 23 nt, Human adenovirus A
uaguuggaauaaguauacugaug

SEQ ID NO: 279168 - RNA, 18 nt, Human adenovirus A
uauaaaguuuaaacuaca

SEQ ID NO: 279169 - RNA, 22 nt, Human adenovirus A
uauacgcgugguuaaacugccu

SEQ ID NO: 279170 - RNA, 14 nt, Human adenovirus A
uauauuaacuuuau

SEQ ID NO: 279171 - RNA, 22 nt, Human adenovirus A
uaucaauguuauccacauugcu

SEQ ID NO: 279172 - RNA, 21 nt, Human adenovirus A
uaucacucuucgcugcaguuu

SEQ ID NO: 279173 - RNA, 20 nt, Human adenovirus A
uaugaaucuuuaccaggcaa

SEQ ID NO: 279174 - RNA, 15 nt, Human adenovirus A
uaugagauguuuauu

SEQ ID NO: 279175 - RNA, 14 nt, Human adenovirus A
uauggaauuauguc

SEQ ID NO: 279176 - RNA, 22 nt, Human adenovirus A
uaugggaucgcuugcaacugcu

SEQ ID NO: 279177 - RNA, 15 nt, Human adenovirus A
uauggguaguagcau

SEQ ID NO: 279178 - RNA, 23 nt, Human adenovirus A
uauuaacuuuauauugcauuugu

SEQ ID NO: 279179 - RNA, 18 nt, Human adenovirus A
uauuacauggucaugagc

SEQ ID NO: 279180 - RNA, 22 nt, Human adenovirus A
uauuacauggucaugagcggug

SEQ ID NO: 279181 - RNA, 13 nt, Human adenovirus A
uauucauugucau

SEQ ID NO: 279182 - RNA, 18 nt, Human adenovirus A
uauucauugucauugcca

SEQ ID NO: 279183 - RNA, 18 nt, Human adenovirus A
uauucggugccuauguga

SEQ ID NO: 279184 - RNA, 23 nt, Human adenovirus A
uauugacaaacgcccugcuccga

SEQ ID NO: 279185 - RNA, 22 nt, Human adenovirus A
uauugcgugaaguauuccauga

SEQ ID NO: 279186 - RNA, 22 nt, Human adenovirus A
uauuugaguccauuuugcauuu

SEQ ID NO: 279187 - RNA, 21 nt, Human adenovirus A
uauuuugaaaaaauacaugag

SEQ ID NO: 279188 - RNA, 12 nt, Human adenovirus A
uauuuugagauu

SEQ ID NO: 279189 - RNA, 22 nt, Human adenovirus A
ucaaaauuuucuccccacagcu

SEQ ID NO: 279190 - RNA, 23 nt, Human adenovirus A
ucaaaauuuucuccccacagcug

SEQ ID NO: 279191 - RNA, 20 nt, Human adenovirus A
ucaaaccugacagacuugca

SEQ ID NO: 279192 - RNA, 19 nt, Human adenovirus A
ucaaacuuuacaaaccacu

SEQ ID NO: 279193 - RNA, 18 nt, Human adenovirus A
ucaacauuaaccuaugca

SEQ ID NO: 279194 - RNA, 14 nt, Human adenovirus A
ucaacccaaacugu

SEQ ID NO: 279195 - RNA, 22 nt, Human adenovirus A
ucaacuacauaaaccauggaau

SEQ ID NO: 279196 - RNA, 19 nt, Human adenovirus A
ucaagauggccacucccuc

SEQ ID NO: 279197 - RNA, 21 nt, Human adenovirus A
ucaagcuuguacuccaaugag

SEQ ID NO: 279198 - RNA, 11 nt, Human adenovirus A
ucaagugcagu

SEQ ID NO: 279199 - RNA, 22 nt, Human adenovirus A
ucacgagaaaguguuaaccauu

SEQ ID NO: 279200 - RNA, 21 nt, Human adenovirus A
ucaggagcagaaaucuugaag

SEQ ID NO: 279201 - RNA, 16 nt, Human adenovirus A
ucaguagccuugcagg

SEQ ID NO: 279202 - RNA, 22 nt, Human adenovirus A
ucagugaaacgcccuagaugua

SEQ ID NO: 279203 - RNA, 13 nt, Human adenovirus A
ucaugugcuauug

SEQ ID NO: 279204 - RNA, 16 nt, Human adenovirus A
uccaaaaccaggucca

SEQ ID NO: 279205 - RNA, 20 nt, Human adenovirus A
uccaaaaccagguccaugau

SEQ ID NO: 279206 - RNA, 18 nt, Human adenovirus A
uccaacuuauuacuggua

SEQ ID NO: 279207 - RNA, 14 nt, Human adenovirus A
uccaauaguugcau

SEQ ID NO: 279208 - RNA, 18 nt, Human adenovirus A
uccaauaguugcauaggu

SEQ ID NO: 279209 - RNA, 15 nt, Human adenovirus A
uccaaugagcuaaua

SEQ ID NO: 279210 - RNA, 23 nt, Human adenovirus A
uccacccuguacgcaagcauuuu

SEQ ID NO: 279211 - RNA, 16 nt, Human adenovirus A
uccacgauuaagacau

SEQ ID NO: 279212 - RNA, 20 nt, Human adenovirus A
uguaggauaaaaucauggac

SEQ ID NO: 279213 - RNA, 15 nt, Human adenovirus A
uguauacgccuccua

SEQ ID NO: 279214 - RNA, 19 nt, Human adenovirus A
ugucagcugggaugcuuuu

SEQ ID NO: 279215 - RNA, 12 nt, Human adenovirus A
ugucagugaaac

SEQ ID NO: 279216 - RNA, 13 nt, Human adenovirus A
ugucccaacaagc

SEQ ID NO: 279217 - RNA, 18 nt, Human adenovirus A
uguccccgcggacaugcu

SEQ ID NO: 279218 - RNA, 19 nt, Human adenovirus A
ugugauuaaucuucccugu

SEQ ID NO: 279219 - RNA, 21 nt, Human adenovirus A
ugugcuauuguuaacacugcc

SEQ ID NO: 279220 - RNA, 16 nt, Human adenovirus A
uguguacacguuuauu

SEQ ID NO: 279221 - RNA, 18 nt, Human adenovirus A
uguuacacccccuuuuac

SEQ ID NO: 279222 - RNA, 22 nt, Human adenovirus A
uguuacacccccuuuuacuucu

SEQ ID NO: 279223 - RNA, 20 nt, Human adenovirus A
uguuaugaaucuuuauugau

SEQ ID NO: 279224 - RNA, 21 nt, Human adenovirus A
uguuaugaaucuuuauugaua

SEQ ID NO: 279225 - RNA, 22 nt, Human adenovirus A
uguugcuccaguuauugacaaa

SEQ ID NO: 279226 - RNA, 15 nt, Human adenovirus A
uguuguuuugaaccu

SEQ ID NO: 279227 - RNA, 21 nt, Human adenovirus A
uuaaaauaaaauaaaacuucc

SEQ ID NO: 279228 - RNA, 15 nt, Human adenovirus A
uuaaacuaucacuug

SEQ ID NO: 279229 - RNA, 24 nt, Human adenovirus A
aaaaaggaauugauacacaccuca

SEQ ID NO: 279230 - RNA, 13 nt, Human adenovirus A
aaaaauacaugag

SEQ ID NO: 279231 - RNA, 13 nt, Human adenovirus A
aaaacacugugcg

SEQ ID NO: 279232 - RNA, 20 nt, Human adenovirus A
aaaaccauuuuauuagcuca

SEQ ID NO: 279233 - RNA, 22 nt, Human adenovirus A
aaaacccacugguuagagccau

SEQ ID NO: 279234 - RNA, 16 nt, Human adenovirus A
aaaaccuagaccauug

SEQ ID NO: 279235 - RNA, 19 nt, Human adenovirus A
aaaauagggguaauguggu

SEQ ID NO: 279236 - RNA, 14 nt, Human adenovirus A
aaaaugaugacuuc

SEQ ID NO: 279237 - RNA, 16 nt, Human adenovirus A
aaaaugaugacuucaa

SEQ ID NO: 279238 - RNA, 13 nt, Human adenovirus A
aaaauggaacccu

SEQ ID NO: 279239 - RNA, 22 nt, Human adenovirus A
aaaauggaacccuuacacucaa

SEQ ID NO: 279240 - RNA, 17 nt, Human adenovirus A
aaaaugggaaggaggca

SEQ ID NO: 279241 - RNA, 12 nt, Human adenovirus A
aaaauugccaac

SEQ ID NO: 279242 - RNA, 18 nt, Human adenovirus A
aaacacugugcgguuuaa

SEQ ID NO: 279243 - RNA, 23 nt, Human adenovirus A
aaacagcagggucuacuguugau

SEQ ID NO: 279244 - RNA, 17 nt, Human adenovirus A
aaacagugccuguugau

SEQ ID NO: 279245 - RNA, 19 nt, Human adenovirus A
aaacaucacucuauuucaa

SEQ ID NO: 279246 - RNA, 15 nt, Human adenovirus A
aaaccaccaggugua

SEQ ID NO: 279247 - RNA, 19 nt, Human adenovirus A
aaaccauuuuauuagcuca

SEQ ID NO: 279248 - RNA, 15 nt, Human adenovirus A
aaacccuggaccaca

SEQ ID NO: 279249 - RNA, 17 nt, Human adenovirus A
aaaccuuuacugcaaug

SEQ ID NO: 279250 - RNA, 23 nt, Human adenovirus A
aaacgcccugcuccgacaacagc

SEQ ID NO: 279251 - RNA, 21 nt, Human adenovirus A
aaacgcugaugccacuugaau

SEQ ID NO: 279252 - RNA, 21 nt, Human adenovirus A
aaacgguccuuguacaguuug

SEQ ID NO: 279253 - RNA, 14 nt, Human adenovirus A
aaacuacacaaaga

SEQ ID NO: 279254 - RNA, 14 nt, Human adenovirus A
aaacuaucacuugc

SEQ ID NO: 279255 - RNA, 17 nt, Human adenovirus A
aaacuauuaacuuugau

SEQ ID NO: 279256 - RNA, 20 nt, Human adenovirus A
aaacuguacaaggaccguuu

SEQ ID NO: 279257 - RNA, 22 nt, Human adenovirus A
aaagaacaucaacugugcuaca

SEQ ID NO: 279258 - RNA, 15 nt, Human adenovirus A
aaagaccccauugua

SEQ ID NO: 279259 - RNA, 15 nt, Human adenovirus A
aaagcauacuuacca

SEQ ID NO: 279260 - RNA, 23 nt, Human adenovirus A
aaagcccgcgcgcggacuuucaa

SEQ ID NO: 279261 - RNA, 22 nt, Human adenovirus A
aaaggaauugauacacaccuca

SEQ ID NO: 279262 - RNA, 17 nt, Human adenovirus A
aaaggacuuuuuugccu

SEQ ID NO: 279263 - RNA, 15 nt, Human adenovirus A
aaaguguuaaccauu

SEQ ID NO: 279264 - RNA, 15 nt, Human adenovirus A
aaaucccccuccuac

SEQ ID NO: 279265 - RNA, 12 nt, Human adenovirus A
aaaucuccugaa

SEQ ID NO: 279266 - RNA, 15 nt, Human adenovirus A
aaaugaugacuucaa

SEQ ID NO: 279267 - RNA, 19 nt, Human adenovirus A
aaauggaacccuuacacuc

SEQ ID NO: 279268 - RNA, 22 nt, Human adenovirus A
aaauggaaggucagauucuucu

SEQ ID NO: 279269 - RNA, 20 nt, Human adenovirus A
aaauuaaguauuaccugcac

SEQ ID NO: 279270 - RNA, 13 nt, Human adenovirus A
aaauuguguacuu

SEQ ID NO: 279271 - RNA, 18 nt, Human adenovirus A
aaauuguguacuuuucaa

SEQ ID NO: 279272 - RNA, 17 nt, Human adenovirus A
aaauuucccucuuccca

SEQ ID NO: 279273 - RNA, 18 nt, Human adenovirus A
aaauuucccucuucccaa

SEQ ID NO: 279274 - RNA, 20 nt, Human adenovirus A
aacaaacacggauacuuaau

SEQ ID NO: 279275 - RNA, 12 nt, Human adenovirus A
aacaaacuacau

SEQ ID NO: 279276 - RNA, 12 nt, Human adenovirus A
aacaacaagcua

SEQ ID NO: 279277 - RNA, 12 nt, Human adenovirus A
aacaacagucag

SEQ ID NO: 279278 - RNA, 17 nt, Human adenovirus A
aacaacugcacuugaau

SEQ ID NO: 279279 - RNA, 19 nt, Human adenovirus A
aacaaguuuagaaacccca

SEQ ID NO: 279280 - RNA, 13 nt, Human adenovirus A
aacaccaucucaa

SEQ ID NO: 279281 - RNA, 16 nt, Human adenovirus A
aacacggauacuuaau

SEQ ID NO: 279282 - RNA, 20 nt, Human adenovirus A
aacacuaccggcccuguugu

SEQ ID NO: 279283 - RNA, 23 nt, Human adenovirus A
aacagaaucaaucucagugucau

SEQ ID NO: 279284 - RNA, 19 nt, Human adenovirus A
aacagaggcuccucacuga

SEQ ID NO: 279285 - RNA, 18 nt, Human adenovirus A
aacagcaaacuuucucca

SEQ ID NO: 279286 - RNA, 20 nt, Human adenovirus A
aacagcaaacuuucuccaaa

SEQ ID NO: 279287 - RNA, 23 nt, Human adenovirus A
aacagcaaacuuucuccaaaucu

SEQ ID NO: 279288 - RNA, 18 nt, Human adenovirus A
aacagcagcaacaaggaa

SEQ ID NO: 279289 - RNA, 15 nt, Human adenovirus A
aacagcugcugucac

SEQ ID NO: 279290 - RNA, 14 nt, Human adenovirus A
aacaguaaccauua

SEQ ID NO: 279291 - RNA, 17 nt, Human adenovirus A
aaccauuguaaaugcuu

SEQ ID NO: 279292 - RNA, 22 nt, Human adenovirus A
aacccucccucuuggccagcug

SEQ ID NO: 279293 - RNA, 18 nt, Human adenovirus A
aacccuggaccacaugcc

SEQ ID NO: 279294 - RNA, 14 nt, Human adenovirus A
aacccuuacacuca

SEQ ID NO: 279295 - RNA, 15 nt, Human adenovirus A
aacccuuacacucaa

SEQ ID NO: 279296 - RNA, 18 nt, Human adenovirus A
aaccgaccugcaacagcc

SEQ ID NO: 279297 - RNA, 13 nt, Human adenovirus A
aacgcccugcucc

SEQ ID NO: 279298 - RNA, 15 nt, Human adenovirus A
aacgcugaugccacu

SEQ ID NO: 279299 - RNA, 19 nt, Human adenovirus A
aacgguaguggcaaugcag

SEQ ID NO: 279300 - RNA, 14 nt, Human adenovirus A
aacgucgccugagu

SEQ ID NO: 279301 - RNA, 18 nt, Human adenovirus A
aacuaccgcccugugagg

SEQ ID NO: 279302 - RNA, 16 nt, Human adenovirus A
aacuaucacuugcaac

SEQ ID NO: 279303 - RNA, 20 nt, Human adenovirus A
aacuaucacuugcaaccugu

SEQ ID NO: 279304 - RNA, 14 nt, Human adenovirus A
aacugaaaauggaa

SEQ ID NO: 279305 - RNA, 14 nt, Human adenovirus A
aagaaaaugaugac

SEQ ID NO: 279306 - RNA, 18 nt, Human adenovirus A
aagaaaucuuuuaccaau

SEQ ID NO: 279307 - RNA, 15 nt, Human adenovirus A
aagaauuuauacaau

SEQ ID NO: 279308 - RNA, 18 nt, Human adenovirus A
aagaauuuauacaauuca

SEQ ID NO: 279309 - RNA, 22 nt, Human adenovirus A
aagaccgaugcguuacccuaga

SEQ ID NO: 279310 - RNA, 21 nt, Human adenovirus A
aagagaacaaacagugccugu

SEQ ID NO: 279311 - RNA, 14 nt, Human adenovirus A
aagaguauccauuu

SEQ ID NO: 279312 - RNA, 16 nt, Human adenovirus A
aagauuucugcuguca

SEQ ID NO: 279313 - RNA, 18 nt, Human adenovirus A
aagauuucugcugucauu

SEQ ID NO: 279314 - RNA, 12 nt, Human adenovirus A
aagcagugaaaa

SEQ ID NO: 279315 - RNA, 24 nt, Human adenovirus A
aagcauaacagucagaauguccuc

SEQ ID NO: 279316 - RNA, 18 nt, Human adenovirus A
aagcauuuuggauuugau

SEQ ID NO: 279317 - RNA, 17 nt, Human adenovirus A
aagcgcagcagaaccca

SEQ ID NO: 279318 - RNA, 14 nt, Human adenovirus A
aagcuaauugcuaa

SEQ ID NO: 279319 - RNA, 21 nt, Human adenovirus A
aagcuacccuucgcuaugaau

SEQ ID NO: 279320 - RNA, 20 nt, Human adenovirus A
aagcugggugggaugcaucc

SEQ ID NO: 279321 - RNA, 16 nt, Human adenovirus A
aagcuuggcaagcaua

SEQ ID NO: 279322 - RNA, 17 nt, Human adenovirus A
aagcuuggcaagcauaa

SEQ ID NO: 279323 - RNA, 20 nt, Human adenovirus A
aagcuuguacuccaaugagc

SEQ ID NO: 279324 - RNA, 13 nt, Human adenovirus A
aaggcugauuuau

SEQ ID NO: 279325 - RNA, 22 nt, Human adenovirus A
aaggcugauuuauauaguuuga

SEQ ID NO: 279326 - RNA, 14 nt, Human adenovirus A
aaaaaaauugccaa

SEQ ID NO: 279327 - RNA, 12 nt, Human adenovirus A
aaaaacacugug

SEQ ID NO: 279328 - RNA, 11 nt, Human adenovirus A
aaaacaagcua

SEQ ID NO: 279329 - RNA, 15 nt, Human adenovirus A
aaaagcauacuuacc

SEQ ID NO: 279330 - RNA, 21 nt, Human adenovirus A
aaaagcuacguugaguacuuc

SEQ ID NO: 279331 - RNA, 15 nt, Human adenovirus A
aaaagucaacccaaa

SEQ ID NO: 279332 - RNA, 16 nt, Human adenovirus A
aaaauaaaacuuccaa

SEQ ID NO: 279333 - RNA, 17 nt, Human adenovirus A
aaaauacaugaguguau

SEQ ID NO: 279334 - RNA, 23 nt, Human adenovirus A
aaaaucaaccuuucgaucccuca

SEQ ID NO: 279335 - RNA, 18 nt, Human adenovirus A
aaaauuucccucuuccca

SEQ ID NO: 279336 - RNA, 22 nt, Human adenovirus A
aaaauuuugguuccacgauuaa

SEQ ID NO: 279337 - RNA, 13 nt, Human adenovirus A
aaaccaacaaaca

SEQ ID NO: 279338 - RNA, 18 nt, Human adenovirus A
aaaccacuuaguuuuaaa

SEQ ID NO: 279339 - RNA, 13 nt, Human adenovirus A
aaaccagguccau

SEQ ID NO: 279340 - RNA, 14 nt, Human adenovirus A
aaaccauuuuauua

SEQ ID NO: 279341 - RNA, 21 nt, Human adenovirus A
aaacccacugguuagagccau

SEQ ID NO: 279342 - RNA, 21 nt, Human adenovirus A
aaacccuggaccacaugccua

SEQ ID NO: 279343 - RNA, 15 nt, Human adenovirus A
aaaccuagaccauug

SEQ ID NO: 279344 - RNA, 22 nt, Human adenovirus A
aaacgguaguggcaaugcagca

SEQ ID NO: 279345 - RNA, 20 nt, Human adenovirus A
aaacgguccuuguacaguuu

SEQ ID NO: 279346 - RNA, 15 nt, Human adenovirus A
aaacuaucacuugca

SEQ ID NO: 279347 - RNA, 13 nt, Human adenovirus A
aaacuuucuccaa

SEQ ID NO: 279348 - RNA, 22 nt, Human adenovirus A
aaagaccccauuguaacugaaa

SEQ ID NO: 279349 - RNA, 15 nt, Human adenovirus A
aaagaguauccauuu

SEQ ID NO: 279350 - RNA, 16 nt, Human adenovirus A
aaagauguagcuuuuu

SEQ ID NO: 279351 - RNA, 17 nt, Human adenovirus A
aaagcuacguugaguac

SEQ ID NO: 279352 - RNA, 18 nt, Human adenovirus A
aaaguaaggggacagauu

SEQ ID NO: 279353 - RNA, 18 nt, Human adenovirus A
aaagucaacccaaacugu

SEQ ID NO: 279354 - RNA, 19 nt, Human adenovirus A
aaaguuuaaacuacacaaa

SEQ ID NO: 279355 - RNA, 12 nt, Human adenovirus A
aaauacaucaug

SEQ ID NO: 279356 - RNA, 16 nt, Human adenovirus A
aaauacaugaguguau

SEQ ID NO: 279357 - RNA, 18 nt, Human adenovirus A
aaauauucaagugcaguu

SEQ ID NO: 279358 - RNA, 17 nt, Human adenovirus A
aaauauuguauuuccag

SEQ ID NO: 279359 - RNA, 16 nt, Human adenovirus A
aaaucgcacacuugcu

SEQ ID NO: 279360 - RNA, 15 nt, Human adenovirus A
aaaucuggacaugca

SEQ ID NO: 279361 - RNA, 16 nt, Human adenovirus A
aaaucuggacaugcag

SEQ ID NO: 279362 - RNA, 15 nt, Human adenovirus A
aaaucuuaaauggaa

SEQ ID NO: 279363 - RNA, 19 nt, Human adenovirus A
aaaucuuuuaccaaugaau

SEQ ID NO: 279364 - RNA, 16 nt, Human adenovirus A
aaauggaacccuuaca

SEQ ID NO: 279365 - RNA, 21 nt, Human adenovirus A
aaauggaacccuuacacucaa

SEQ ID NO: 279366 - RNA, 19 nt, Human adenovirus A
aaaugggaaggaggcaguu

SEQ ID NO: 279367 - RNA, 18 nt, Human adenovirus A
aaauguugaaguuacuca

SEQ ID NO: 279368 - RNA, 19 nt, Human adenovirus A
aaauuucccucuucccaac

SEQ ID NO: 279369 - RNA, 21 nt, Human adenovirus A
aacaacagucaguguccauca

SEQ ID NO: 279370 - RNA, 19 nt, Human adenovirus A
aacaagcaggagaacaaga

SEQ ID NO: 279371 - RNA, 16 nt, Human adenovirus A
aacaagucuucugaca

SEQ ID NO: 279372 - RNA, 19 nt, Human adenovirus A
aacaccugaagcugaauac

SEQ ID NO: 279373 - RNA, 14 nt, Human adenovirus A
aacacguuaccaau

SEQ ID NO: 279374 - RNA, 11 nt, Human adenovirus A
aacacugugcg

SEQ ID NO: 279375 - RNA, 19 nt, Human adenovirus A
aacagcaaacuuucuccaa

SEQ ID NO: 279376 - RNA, 20 nt, Human adenovirus A
aacagcauuaguucuuuucu

SEQ ID NO: 279377 - RNA, 12 nt, Human adenovirus A
aacagccaaacc

SEQ ID NO: 279378 - RNA, 15 nt, Human adenovirus A
aacaucaacugugcu

SEQ ID NO: 279379 - RNA, 19 nt, Human adenovirus A
aacauccgcguccgacaaa

SEQ ID NO: 279380 - RNA, 16 nt, Human adenovirus A
aacccaguaugcugaa

SEQ ID NO: 279381 - RNA, 14 nt, Human adenovirus A
aaccuaacugucau

SEQ ID NO: 279382 - RNA, 15 nt, Human adenovirus A
aaccuaauagcacuu

SEQ ID NO: 279383 - RNA, 20 nt, Human adenovirus A
aaccuaauagcacuuuggau

SEQ ID NO: 279384 - RNA, 17 nt, Human adenovirus A
aaccuagaccauuggua

SEQ ID NO: 279385 - RNA, 14 nt, Human adenovirus A
aaccuaugcaacua

SEQ ID NO: 279386 - RNA, 13 nt, Human adenovirus A
aaccuuuugcgau

SEQ ID NO: 279387 - RNA, 20 nt, Human adenovirus A
aacgcugaugccacuugaau

SEQ ID NO: 279388 - RNA, 14 nt, Human adenovirus A
aacgguaguggcaa

SEQ ID NO: 279389 - RNA, 23 nt, Human adenovirus A
aacuacacaaagaaaacaucacu

SEQ ID NO: 279390 - RNA, 21 nt, Human adenovirus A
aacuacauaaaccauggaauu

SEQ ID NO: 279391 - RNA, 20 nt, Human adenovirus A
accggugaagaugauugaac

SEQ ID NO: 279392 - RNA, 22 nt, Human adenovirus A
accuaacugucauccgcauuua

SEQ ID NO: 279393 - RNA, 12 nt, Human adenovirus A
accuacuuugag

SEQ ID NO: 279394 - RNA, 16 nt, Human adenovirus A
accuguggcaccugca

SEQ ID NO: 279395 - RNA, 22 nt, Human adenovirus A
accuuuaguauagguauugaua

SEQ ID NO: 279396 - RNA, 16 nt, Human adenovirus A
acgagcucccggagga

SEQ ID NO: 279397 - RNA, 15 nt, Human adenovirus A
acgauuaagacauau

SEQ ID NO: 279398 - RNA, 19 nt, Human adenovirus A
acgcugaugccacuugaau

SEQ ID NO: 279399 - RNA, 17 nt, Human adenovirus A
acggcagcugccaagug

SEQ ID NO: 279400 - RNA, 17 nt, Human adenovirus A
acggggcaauaguugag

SEQ ID NO: 279401 - RNA, 13 nt, Human adenovirus A
acgguaguggcaa

SEQ ID NO: 279402 - RNA, 19 nt, Human adenovirus A
acguuuauuugaguccauu

SEQ ID NO: 279403 - RNA, 20 nt, Human adenovirus A
acuaaaacaaaucuaucagu

SEQ ID NO: 279404 - RNA, 13 nt, Human adenovirus A
acuacacaaagaa

SEQ ID NO: 279405 - RNA, 14 nt, Human adenovirus A
acuacaguguaugu

SEQ ID NO: 279406 - RNA, 13 nt, Human adenovirus A
acuaccgcugcuc

SEQ ID NO: 279407 - RNA, 14 nt, Human adenovirus A
acuaccgcugcuca

SEQ ID NO: 279408 - RNA, 16 nt, Human adenovirus A
acuagaaucggcaaca

SEQ ID NO: 279409 - RNA, 19 nt, Human adenovirus A
acuagaaucggcaacagca

SEQ ID NO: 279410 - RNA, 21 nt, Human adenovirus A
acuaugacuguuuuaugcaga

SEQ ID NO: 279411 - RNA, 14 nt, Human adenovirus A
acucacauuaggca

SEQ ID NO: 279412 - RNA, 18 nt, Human adenovirus A
acucuucgcugcaguuuu

SEQ ID NO: 279413 - RNA, 13 nt, Human adenovirus A
acugaaaaaccaa

SEQ ID NO: 279414 - RNA, 13 nt, Human adenovirus A
acugauaccaugg

SEQ ID NO: 279415 - RNA, 17 nt, Human adenovirus A
acugcagccugucuuaa

SEQ ID NO: 279416 - RNA, 21 nt, Human adenovirus A
acugccggucgcgaaacuggg

SEQ ID NO: 279417 - RNA, 16 nt, Human adenovirus A
acugcuagaacaagcc

SEQ ID NO: 279418 - RNA, 14 nt, Human adenovirus A
acuggccaagcaaa

SEQ ID NO: 279419 - RNA, 21 nt, Human adenovirus A
acugggugccgcccgcaugua

SEQ ID NO: 279420 - RNA, 16 nt, Human adenovirus A
acugucgccaaccuca

SEQ ID NO: 279421 - RNA, 17 nt, Human adenovirus A
acugucgccaaccucac

SEQ ID NO: 279422 - RNA, 15 nt, Human adenovirus A
acuuaaauugagaug

SEQ ID NO: 279423 - RNA, 16 nt, Human adenovirus A
acuuaaauugagaugg

SEQ ID NO: 279424 - RNA, 20 nt, Human adenovirus A
acuuaaauugagaugguguu

SEQ ID NO: 279425 - RNA, 13 nt, Human adenovirus A
acuucaaccccgu

SEQ ID NO: 279426 - RNA, 21 nt, Human adenovirus A
acuucaaccccguuuacccuu

SEQ ID NO: 279427 - RNA, 14 nt, Human adenovirus A
acuuccaacuuauu

SEQ ID NO: 279428 - RNA, 16 nt, Human adenovirus A
acuucguugauaucaa

SEQ ID NO: 279429 - RNA, 11 nt, Human adenovirus A
acuucuuccaa

SEQ ID NO: 279430 - RNA, 15 nt, Human adenovirus A
acuugaauucuggaa

SEQ ID NO: 279431 - RNA, 13 nt, Human adenovirus A
acuuuauaugcua

SEQ ID NO: 279432 - RNA, 18 nt, Human adenovirus A
acuuuauauugcauuugu

SEQ ID NO: 279433 - RNA, 18 nt, Human adenovirus A
acuuuucaaacuuuacaa

SEQ ID NO: 279434 - RNA, 16 nt, Human adenovirus A
agaaaacaucacucua

SEQ ID NO: 279435 - RNA, 23 nt, Human adenovirus A
agaaaacgguccuuguacaguuu

SEQ ID NO: 279436 - RNA, 17 nt, Human adenovirus A
agaaaaugaugacuuca

SEQ ID NO: 279437 - RNA, 20 nt, Human adenovirus A
agaaaucuuuuaccaaugaa

SEQ ID NO: 279438 - RNA, 17 nt, Human adenovirus A
agaacaucaacugugcu

SEQ ID NO: 279439 - RNA, 18 nt, Human adenovirus A
agaacaucaacugugcua

SEQ ID NO: 279440 - RNA, 15 nt, Human adenovirus A
agaaccuaacuguca

SEQ ID NO: 279441 - RNA, 15 nt, Human adenovirus A
agaauuuauacaauu

SEQ ID NO: 279442 - RNA, 16 nt, Human adenovirus A
agaccugaccacauga

SEQ ID NO: 279443 - RNA, 20 nt, Human adenovirus A
agacuaaauggaagacauca

SEQ ID NO: 279444 - RNA, 18 nt, Human adenovirus A
agacucugccaacggcac

SEQ ID NO: 279445 - RNA, 14 nt, Human adenovirus A
agacuuaccauuug

SEQ ID NO: 279446 - RNA, 18 nt, Human adenovirus A
agagccaugggaggauau

SEQ ID NO: 279447 - RNA, 16 nt, Human adenovirus A
agagcucgacaaggaa

SEQ ID NO: 279448 - RNA, 17 nt, Human adenovirus A
agagcucgacaaggaac

SEQ ID NO: 279449 - RNA, 17 nt, Human adenovirus A
agagugguuguacuuug

SEQ ID NO: 279450 - RNA, 18 nt, Human adenovirus A
agagugguuguacuuugc

SEQ ID NO: 279451 - RNA, 18 nt, Human adenovirus A
agauacuaccuacuccua

SEQ ID NO: 279452 - RNA, 16 nt, Human adenovirus A
agauauaaaguuuaaa

SEQ ID NO: 279453 - RNA, 19 nt, Human adenovirus A
agaugaguaaagauauucc

SEQ ID NO: 279454 - RNA, 15 nt, Human adenovirus A
agaugugcuguggaa

SEQ ID NO: 279455 - RNA, 14 nt, Human adenovirus A
agauuggcaauguu

SEQ ID NO: 279456 - RNA, 12 nt, Human adenovirus A
agcaacaaggaa

SEQ ID NO: 279457 - RNA, 20 nt, Human adenovirus A
agcaacuuuuuaaccacugu

SEQ ID NO: 279458 - RNA, 13 nt, Human adenovirus A
agcacucacauua

SEQ ID NO: 279459 - RNA, 17 nt, Human adenovirus A
agcagaacccaguaugc

SEQ ID NO: 279460 - RNA, 16 nt, Human adenovirus A
agcagcaacaaggaaa

SEQ ID NO: 279461 - RNA, 10 nt, Human adenovirus A
agcagugaaa

SEQ ID NO: 279462 - RNA, 16 nt, Human adenovirus A
agcaguuagaguuuca

SEQ ID NO: 279463 - RNA, 16 nt, Human adenovirus A
agcauucgaagccaag

SEQ ID NO: 279464 - RNA, 21 nt, Human adenovirus A
agcauuuuuuguugcuccagu

SEQ ID NO: 279465 - RNA, 18 nt, Human adenovirus A
agccauggcgaccagugu

SEQ ID NO: 279466 - RNA, 19 nt, Human adenovirus A
agcccgcgcgcggacuuuc

SEQ ID NO: 279467 - RNA, 14 nt, Human adenovirus A
acagaauuacuaaa

SEQ ID NO: 279468 - RNA, 12 nt, Human adenovirus A
acagaggcuccu

SEQ ID NO: 279469 - RNA, 14 nt, Human adenovirus A
acagcaacuuuuua

SEQ ID NO: 279470 - RNA, 22 nt, Human adenovirus A
acagcaacuuuuuaaccacugu

SEQ ID NO: 279471 - RNA, 19 nt, Human adenovirus A
acagcuggcgcacaaguug

SEQ ID NO: 279472 - RNA, 22 nt, Human adenovirus A
acagucaagcuuguacuccaau

SEQ ID NO: 279473 - RNA, 12 nt, Human adenovirus A
acagucacucaa

SEQ ID NO: 279474 - RNA, 13 nt, Human adenovirus A
acauaaaccaugg

SEQ ID NO: 279475 - RNA, 23 nt, Human adenovirus A
acauaggcuggguuuauggaauu

SEQ ID NO: 279476 - RNA, 16 nt, Human adenovirus A
acaucaacugugcuac

SEQ ID NO: 279477 - RNA, 19 nt, Human adenovirus A
acaucagacguacccuuug

SEQ ID NO: 279478 - RNA, 22 nt, Human adenovirus A
acaugaagauuucugcugucau

SEQ ID NO: 279479 - RNA, 14 nt, Human adenovirus A
acaugaauguuaaa

SEQ ID NO: 279480 - RNA, 14 nt, Human adenovirus A
acaugauaugaagu

SEQ ID NO: 279481 - RNA, 16 nt, Human adenovirus A
acauguggagcuuuca

SEQ ID NO: 279482 - RNA, 15 nt, Human adenovirus A
acauuaaccuaugca

SEQ ID NO: 279483 - RNA, 21 nt, Human adenovirus A
acauugcuucauugaauuacc

SEQ ID NO: 279484 - RNA, 22 nt, Human adenovirus A
acauuuuagcaagccugcgaga

SEQ ID NO: 279485 - RNA, 12 nt, Human adenovirus A
accacuguagac

SEQ ID NO: 279486 - RNA, 21 nt, Human adenovirus A
accacugucgccaaccucacu

SEQ ID NO: 279487 - RNA, 19 nt, Human adenovirus A
accauugguaacaguauug

SEQ ID NO: 279488 - RNA, 15 nt, Human adenovirus A
acccaaacuguacaa

SEQ ID NO: 279489 - RNA, 15 nt, Human adenovirus A
acccaguaugcugaa

SEQ ID NO: 279490 - RNA, 18 nt, Human adenovirus A
acccaguaugcugaagaa

SEQ ID NO: 279491 - RNA, 16 nt, Human adenovirus A
acccauuugacacauc

SEQ ID NO: 279492 - RNA, 16 nt, Human adenovirus A
accccacaugauuucc

SEQ ID NO: 279493 - RNA, 17 nt, Human adenovirus A
accccauuguaacugaa

SEQ ID NO: 279494 - RNA, 19 nt, Human adenovirus A
accccauuguaacugaaaa

SEQ ID NO: 279495 - RNA, 16 nt, Human adenovirus A
acccuucgcuaugaau

SEQ ID NO: 279496 - RNA, 14 nt, Human adenovirus A
acccuuuguuacac

SEQ ID NO: 279497 - RNA, 22 nt, Human adenovirus A
acccuuuugacccauuugacac

SEQ ID NO: 279498 - RNA, 12 nt, Human adenovirus A
accgcugcucag

SEQ ID NO: 279499 - RNA, 15 nt, Human adenovirus A
accggaaaucugaaa

SEQ ID NO: 279500 - RNA, 16 nt, Human adenovirus A
accuaauagcacuuug

SEQ ID NO: 279501 - RNA, 19 nt, Human adenovirus A
accuaauagcacuuuggau

SEQ ID NO: 279502 - RNA, 23 nt, Human adenovirus A
accucauuaaauuuuucaccaaa

SEQ ID NO: 279503 - RNA, 13 nt, Human adenovirus A
accugcaacagcc

SEQ ID NO: 279504 - RNA, 13 nt, Human adenovirus A
accugcuccagaa

SEQ ID NO: 279505 - RNA, 18 nt, Human adenovirus A
accuuuaguauagguauu

SEQ ID NO: 279506 - RNA, 17 nt, Human adenovirus A
acgaacggcagcugcca

SEQ ID NO: 279507 - RNA, 20 nt, Human adenovirus A
acgcaaacuauuaacuuuga

SEQ ID NO: 279508 - RNA, 17 nt, Human adenovirus A
acgcccugauuucccgu

SEQ ID NO: 279509 - RNA, 15 nt, Human adenovirus A
aguauccauuuagcg

SEQ ID NO: 279510 - RNA, 22 nt, Human adenovirus A
aguaugcugaagaaacagaaga

SEQ ID NO: 279511 - RNA, 13 nt, Human adenovirus A
aguauuccaugag

SEQ ID NO: 279512 - RNA, 19 nt, Human adenovirus A
agucaaaagcuacguugag

SEQ ID NO: 279513 - RNA, 13 nt, Human adenovirus A
aguccauaugacu

SEQ ID NO: 279514 - RNA, 15 nt, Human adenovirus A
agucugacuuuacau

SEQ ID NO: 279515 - RNA, 17 nt, Human adenovirus A
agucugacuuuacauaa

SEQ ID NO: 279516 - RNA, 12 nt, Human adenovirus A
agugacugugcg

SEQ ID NO: 279517 - RNA, 21 nt, Human adenovirus A
agugaguaaaagcguguaaga

SEQ ID NO: 279518 - RNA, 17 nt, Human adenovirus A
agugcaguuguuuucag

SEQ ID NO: 279519 - RNA, 13 nt, Human adenovirus A
agugccuguugau

SEQ ID NO: 279520 - RNA, 15 nt, Human adenovirus A
agugcugcaggaaug

SEQ ID NO: 279521 - RNA, 19 nt, Human adenovirus A
aguggcuuuuccugagaca

SEQ ID NO: 279522 - RNA, 22 nt, Human adenovirus A
aguguuguagauaauccaguca

SEQ ID NO: 279523 - RNA, 21 nt, Human adenovirus A
aguuaauugauuuacaaaccg

SEQ ID NO: 279524 - RNA, 19 nt, Human adenovirus A
aguuacucaauuauuacau

SEQ ID NO: 279525 - RNA, 13 nt, Human adenovirus A
aguuauugacaaa

SEQ ID NO: 279526 - RNA, 14 nt, Human adenovirus A
aguuguagacauag

SEQ ID NO: 279527 - RNA, 19 nt, Human adenovirus A
aguuguagauggucuggcu

SEQ ID NO: 279528 - RNA, 17 nt, Human adenovirus A
aguuuaaacuacacaaa

SEQ ID NO: 279529 - RNA, 22 nt, Human adenovirus A
aguuuugauuguauuuugagau

SEQ ID NO: 279530 - RNA, 14 nt, Human adenovirus A
auaaaaacacugug

SEQ ID NO: 279531 - RNA, 18 nt, Human adenovirus A
auaaaaccugugccucag

SEQ ID NO: 279532 - RNA, 16 nt, Human adenovirus A
auaaaccauggaauuu

SEQ ID NO: 279533 - RNA, 22 nt, Human adenovirus A
auaacaccugaagcugaauaca

SEQ ID NO: 279534 - RNA, 14 nt, Human adenovirus A
auaacagucagaau

SEQ ID NO: 279535 - RNA, 17 nt, Human adenovirus A
auaacaguugaaaaagg

SEQ ID NO: 279536 - RNA, 13 nt, Human adenovirus A
auaacccugaaug

SEQ ID NO: 279537 - RNA, 14 nt, Human adenovirus A
auaacccugaaugu

SEQ ID NO: 279538 - RNA, 16 nt, Human adenovirus A
auaaguauacugauga

SEQ ID NO: 279539 - RNA, 13 nt, Human adenovirus A
auaauaaaaccau

SEQ ID NO: 279540 - RNA, 13 nt, Human adenovirus A
auaauccagucau

SEQ ID NO: 279541 - RNA, 15 nt, Human adenovirus A
auaaugagccugaac

SEQ ID NO: 279542 - RNA, 16 nt, Human adenovirus A
auaauguaagugaggu

SEQ ID NO: 279543 - RNA, 16 nt, Human adenovirus A
auacaugaguguaugu

SEQ ID NO: 279544 - RNA, 18 nt, Human adenovirus A
auaccauggacagcucca

SEQ ID NO: 279545 - RNA, 14 nt, Human adenovirus A
auaccgugggauau

SEQ ID NO: 279546 - RNA, 21 nt, Human adenovirus A
auacgcgugguuaaacugccu

SEQ ID NO: 279547 - RNA, 18 nt, Human adenovirus A
auacuauauuaacuuuau

SEQ ID NO: 279548 - RNA, 23 nt, Human adenovirus A
auacuuguuuuuucugacauggu

SEQ ID NO: 279549 - RNA, 17 nt, Human adenovirus A
auagagauaagcaggaa

SEQ ID NO: 279550 - RNA, 12 nt, Human adenovirus A
auagcaaagcca

SEQ ID NO: 279551 - RNA, 16 nt, Human adenovirus A
auagcucuuccagcug

SEQ ID NO: 279552 - RNA, 18 nt, Human adenovirus A
auaucacucuucgcugca

SEQ ID NO: 279553 - RNA, 18 nt, Human adenovirus A
auaucuuuuaacaacaag

SEQ ID NO: 279554 - RNA, 15 nt, Human adenovirus A
auauggagugugcua

SEQ ID NO: 279555 - RNA, 17 nt, Human adenovirus A
aucaccgaggcaguuuc

SEQ ID NO: 279556 - RNA, 17 nt, Human adenovirus A
aucacuugcaaccugua

SEQ ID NO: 279557 - RNA, 18 nt, Human adenovirus A
aucauuaagaacacggug

SEQ ID NO: 279558 - RNA, 17 nt, Human adenovirus A
auccaaaaccaggucca

SEQ ID NO: 279559 - RNA, 19 nt, Human adenovirus A
auccaaacgguaguggcaa

SEQ ID NO: 279560 - RNA, 23 nt, Human adenovirus A
auccauuuggauuuucugaucaa

SEQ ID NO: 279561 - RNA, 17 nt, Human adenovirus A
aucggcacgagccagcu

SEQ ID NO: 279562 - RNA, 20 nt, Human adenovirus A
aucuagaaauugauggaaga

SEQ ID NO: 279563 - RNA, 12 nt, Human adenovirus A
aucuccaaauaa

SEQ ID NO: 279564 - RNA, 18 nt, Human adenovirus A
aucucuacagccccuuug

SEQ ID NO: 279565 - RNA, 23 nt, Human adenovirus A
aucugaaaauacaucauggucuc

SEQ ID NO: 279566 - RNA, 13 nt, Human adenovirus A
aucuggacaugca

SEQ ID NO: 279567 - RNA, 14 nt, Human adenovirus A
aucugucagugaaa

SEQ ID NO: 279568 - RNA, 19 nt, Human adenovirus A
augaagauuucugcuguca

SEQ ID NO: 279569 - RNA, 16 nt, Human adenovirus A
augaagcgcagcagaa

SEQ ID NO: 279570 - RNA, 18 nt, Human adenovirus A
augaaguuuugauuguau

SEQ ID NO: 279571 - RNA, 14 nt, Human adenovirus A
augaugcauaauua

SEQ ID NO: 279572 - RNA, 19 nt, Human adenovirus A
augauuuaccccuaaauau

SEQ ID NO: 279573 - RNA, 11 nt, Human adenovirus A
augcaaagcca

SEQ ID NO: 279574 - RNA, 18 nt, Human adenovirus A
augcaacuuucauuguua

SEQ ID NO: 279575 - RNA, 14 nt, Human adenovirus A
augcaaggcgccgc

SEQ ID NO: 279576 - RNA, 23 nt, Human adenovirus A
augcagacuaaauggaagacauc

SEQ ID NO: 279577 - RNA, 23 nt, Human adenovirus A
augcaggucgaggggcaccguca

SEQ ID NO: 279578 - RNA, 15 nt, Human adenovirus A
augcauuuacaguac

SEQ ID NO: 279579 - RNA, 21 nt, Human adenovirus A
augcuaagggacaaguuaaaa

SEQ ID NO: 279580 - RNA, 21 nt, Human adenovirus A
auggaacaacaggugcaagaa

SEQ ID NO: 279581 - RNA, 16 nt, Human adenovirus A
augggaaggaggcagu

SEQ ID NO: 279582 - RNA, 16 nt, Human adenovirus A
auggguaguagcauca

SEQ ID NO: 279583 - RNA, 17 nt, Human adenovirus A
auggucaggccagugag

SEQ ID NO: 279584 - RNA, 18 nt, Human adenovirus A
auggucaggccagugagu

SEQ ID NO: 279585 - RNA, 23 nt, Human adenovirus A
augguuuuauuauuaaugcauug

SEQ ID NO: 279586 - RNA, 19 nt, Human adenovirus A
auguauggaggagcuaaaa

SEQ ID NO: 279587 - RNA, 15 nt, Human adenovirus A
augugauaacccuga

SEQ ID NO: 279588 - RNA, 13 nt, Human adenovirus A
auguguuccagua

SEQ ID NO: 279589 - RNA, 18 nt, Human adenovirus A
auuaaagcuuuugcuaaa

SEQ ID NO: 279590 - RNA, 15 nt, Human adenovirus A
auuaaugcauugugu

SEQ ID NO: 279591 - RNA, 18 nt, Human adenovirus A
auuaaugcauuguguaca

SEQ ID NO: 279592 - RNA, 21 nt, Human adenovirus A
auuaauggaguuguagacaua

SEQ ID NO: 279593 - RNA, 17 nt, Human adenovirus A
auuacuaaaacaguaac

SEQ ID NO: 279594 - RNA, 18 nt, Human adenovirus A
auuaggcaccccaguaag

SEQ ID NO: 279595 - RNA, 16 nt, Human adenovirus A
auuaugagauguuuau

SEQ ID NO: 279596 - RNA, 13 nt, Human adenovirus A
auucaagugcagu

SEQ ID NO: 279597 - RNA, 17 nt, Human adenovirus A
auucauugucauugcca

SEQ ID NO: 279598 - RNA, 17 nt, Human adenovirus A
auucucucguugauuau

SEQ ID NO: 279599 - RNA, 15 nt, Human adenovirus A
auucuggaauaacaa

SEQ ID NO: 279600 - RNA, 16 nt, Human adenovirus A
auucuggaauaacaag

SEQ ID NO: 279601 - RNA, 18 nt, Human adenovirus A
auucuggaauaacaagcc

SEQ ID NO: 279602 - RNA, 13 nt, Human adenovirus A
auucuucuuccca

SEQ ID NO: 279603 - RNA, 13 nt, Human adenovirus A
auugaaaccagcg

SEQ ID NO: 279604 - RNA, 15 nt, Human adenovirus A
auugaaccugaucua

SEQ ID NO: 279605 - RNA, 22 nt, Human adenovirus A
auugacaaacgcccugcuccga

SEQ ID NO: 279606 - RNA, 17 nt, Human adenovirus A
auugauacacaccucau

SEQ ID NO: 279607 - RNA, 20 nt, Human adenovirus A
auugccgcgcgcauugcgau

SEQ ID NO: 279608 - RNA, 15 nt, Human adenovirus A
auugcguugcaaugu

SEQ ID NO: 279609 - RNA, 15 nt, Human adenovirus A
auuggaguacaagcu

SEQ ID NO: 279610 - RNA, 22 nt, Human adenovirus A
auugguggaaaaagaucaagga

SEQ ID NO: 279611 - RNA, 23 nt, Human adenovirus A
auuguagaagcugaaaucagcug

SEQ ID NO: 279612 - RNA, 17 nt, Human adenovirus A
auuguauuuugagauug

SEQ ID NO: 279613 - RNA, 14 nt, Human adenovirus A
auuguuaacacugc

SEQ ID NO: 279614 - RNA, 16 nt, Human adenovirus A
auuguuuaagaauuua

SEQ ID NO: 279615 - RNA, 21 nt, Human adenovirus A
auuuacugcagccugucuuaa

SEQ ID NO: 279616 - RNA, 20 nt, Human adenovirus A
auuuauacaauucauucuga

SEQ ID NO: 279617 - RNA, 22 nt, Human adenovirus A
auuucccucuucccaacuguca

SEQ ID NO: 279618 - RNA, 23 nt, Human adenovirus A
auuugaguccauuuugcauuuua

SEQ ID NO: 279619 - RNA, 22 nt, Human adenovirus A
auuugcaaggcgguauuugcua

SEQ ID NO: 279620 - RNA, 23 nt, Human adenovirus A
auuugcaaggcgguauuugcuau

SEQ ID NO: 279621 - RNA, 21 nt, Human adenovirus A
auuugcgcacugaaaaaccaa

SEQ ID NO: 279622 - RNA, 20 nt, Human adenovirus A
auuuuagcaagccugcgaga

SEQ ID NO: 279623 - RNA, 20 nt, Human adenovirus A
auuuugaaaaaauacaugag

SEQ ID NO: 279624 - RNA, 15 nt, Human adenovirus A
auuuuucccacuuua

SEQ ID NO: 279625 - RNA, 16 nt, Human adenovirus A
aguucaccggugaaga

SEQ ID NO: 279626 - RNA, 20 nt, Human adenovirus A
aguucaccggugaagaugau

SEQ ID NO: 279627 - RNA, 20 nt, Human adenovirus A
aguucuugucaacuacauaa

SEQ ID NO: 279628 - RNA, 14 nt, Human adenovirus A
aguugcaggaugaa

SEQ ID NO: 279629 - RNA, 22 nt, Human adenovirus A
aguugcagggcgcccauaacau

SEQ ID NO: 279630 - RNA, 15 nt, Human adenovirus A
aguuugauagaccug

SEQ ID NO: 279631 - RNA, 17 nt, Human adenovirus A
aguuuuaaauuguuccu

SEQ ID NO: 279632 - RNA, 13 nt, Human adenovirus A
auaaaaacacugu

SEQ ID NO: 279633 - RNA, 17 nt, Human adenovirus A
auaaaaccugugccuca

SEQ ID NO: 279634 - RNA, 19 nt, Human adenovirus A
auaaaauuucccucuuccc

SEQ ID NO: 279635 - RNA, 20 nt, Human adenovirus A
auaaaauuucccucuuccca

SEQ ID NO: 279636 - RNA, 21 nt, Human adenovirus A
auaaaauuucccucuucccaa

SEQ ID NO: 279637 - RNA, 22 nt, Human adenovirus A
auaaaauuucccucuucccaac

SEQ ID NO: 279638 - RNA, 13 nt, Human adenovirus A
auacaagguaaaa

SEQ ID NO: 279639 - RNA, 19 nt, Human adenovirus A
auacaagguaaaaugggaa

SEQ ID NO: 279640 - RNA, 13 nt, Human adenovirus A
auacacaccucau

SEQ ID NO: 279641 - RNA, 14 nt, Human adenovirus A
auacacaccucauu

SEQ ID NO: 279642 - RNA, 19 nt, Human adenovirus A
auacagauauaaaguuuaa

SEQ ID NO: 279643 - RNA, 15 nt, Human adenovirus A
auacaucauggucuc

SEQ ID NO: 279644 - RNA, 18 nt, Human adenovirus A
auacuaccgcugcucagc

SEQ ID NO: 279645 - RNA, 13 nt, Human adenovirus A
auacuaccuacuc

SEQ ID NO: 279646 - RNA, 15 nt, Human adenovirus A
auacuuaauacuggc

SEQ ID NO: 279647 - RNA, 13 nt, Human adenovirus A
auagcaaagccau

SEQ ID NO: 279648 - RNA, 15 nt, Human adenovirus A
auagcaacaacgcug

SEQ ID NO: 279649 - RNA, 18 nt, Human adenovirus A
auagucugacuuuacaua

SEQ ID NO: 279650 - RNA, 11 nt, Human adenovirus A
auaucacucuu

SEQ ID NO: 279651 - RNA, 22 nt, Human adenovirus A
auauccaaacccccaggaugau

SEQ ID NO: 279652 - RNA, 17 nt, Human adenovirus A
auaugcauuuacaguac

SEQ ID NO: 279653 - RNA, 13 nt, Human adenovirus A
auauggagugugc

SEQ ID NO: 279654 - RNA, 14 nt, Human adenovirus A
auauggagugugcu

SEQ ID NO: 279655 - RNA, 15 nt, Human adenovirus A
auauuguauuuccag

SEQ ID NO: 279656 - RNA, 20 nt, Human adenovirus A
aucaauguuauccacauugc

SEQ ID NO: 279657 - RNA, 23 nt, Human adenovirus A
aucaccgaacagaggcuccucac

SEQ ID NO: 279658 - RNA, 18 nt, Human adenovirus A
aucaccgaggcaguuucu

SEQ ID NO: 279659 - RNA, 21 nt, Human adenovirus A
aucacucuauuucaaccuauu

SEQ ID NO: 279660 - RNA, 15 nt, Human adenovirus A
aucauuaagaacacg

SEQ ID NO: 279661 - RNA, 20 nt, Human adenovirus A
aucccuacccaccaucuuca

SEQ ID NO: 279662 - RNA, 21 nt, Human adenovirus A
aucccuacccaccaucuucau

SEQ ID NO: 279663 - RNA, 21 nt, Human adenovirus A
aucccucgcccgcacagucac

SEQ ID NO: 279664 - RNA, 15 nt, Human adenovirus A
auccgaggugacaug

SEQ ID NO: 279665 - RNA, 17 nt, Human adenovirus A
auccgaggugacaugau

SEQ ID NO: 279666 - RNA, 20 nt, Human adenovirus A
auccgcauuuaagcaacauu

SEQ ID NO: 279667 - RNA, 21 nt, Human adenovirus A
auccuacaaaaaguaacaaca

SEQ ID NO: 279668 - RNA, 20 nt, Human adenovirus A
aucgggaagauacuaccuac

SEQ ID NO: 279669 - RNA, 19 nt, Human adenovirus A
aucucaccuggaccuuuaa

SEQ ID NO: 279670 - RNA, 22 nt, Human adenovirus A
aucugaaaauacaucauggucu

SEQ ID NO: 279671 - RNA, 21 nt, Human adenovirus A
aucuguguauacgccuccuau

SEQ ID NO: 279672 - RNA, 18 nt, Human adenovirus A
aucuucccgaauauccaa

SEQ ID NO: 279673 - RNA, 13 nt, Human adenovirus A
aucuuuauugaua

SEQ ID NO: 279674 - RNA, 22 nt, Human adenovirus A
augaagcgcagcagaacccagu

SEQ ID NO: 279675 - RNA, 23 nt, Human adenovirus A
augaaucuuuaccaggcaaagaa

SEQ ID NO: 279676 - RNA, 20 nt, Human adenovirus A
augagcccggggacuaacca

SEQ ID NO: 279677 - RNA, 20 nt, Human adenovirus A
augcauuuacaguacaaaua

SEQ ID NO: 279678 - RNA, 20 nt, Human adenovirus A
augcugaagaaacagaagaa

SEQ ID NO: 279679 - RNA, 15 nt, Human adenovirus A
auggacccacuggcu

SEQ ID NO: 279680 - RNA, 23 nt, Human adenovirus A
auggaguggcgauuccaaggaau

SEQ ID NO: 279681 - RNA, 23 nt, Human adenovirus A
auggaguuguagacauagccaau

SEQ ID NO: 279682 - RNA, 20 nt, Human adenovirus A
auggccaauaccgugggaua

SEQ ID NO: 279683 - RNA, 15 nt, Human adenovirus A
auggccgauggccua

SEQ ID NO: 279684 - RNA, 17 nt, Human adenovirus A
auggccugaguguaaua

SEQ ID NO: 279685 - RNA, 17 nt, Human adenovirus A
auggcucuuacuugccg

SEQ ID NO: 279686 - RNA, 15 nt, Human adenovirus A
augggcgacuacccg

SEQ ID NO: 279687 - RNA, 20 nt, Human adenovirus A
auggguaguagcaucagcua

SEQ ID NO: 279688 - RNA, 20 nt, Human adenovirus A
auguaucucccuguaaguac

SEQ ID NO: 279689 - RNA, 15 nt, Human adenovirus A
augucagcugggaug

SEQ ID NO: 279690 - RNA, 18 nt, Human adenovirus A
augugauaacccugaaug

SEQ ID NO: 279691 - RNA, 14 nt, Human adenovirus A
auguguagguuuua

SEQ ID NO: 279692 - RNA, 15 nt, Human adenovirus A
auguguagguuuuac

SEQ ID NO: 279693 - RNA, 14 nt, Human adenovirus A
auguguuccaguau

SEQ ID NO: 279694 - RNA, 17 nt, Human adenovirus A
auuaaguauuaccugca

SEQ ID NO: 279695 - RNA, 13 nt, Human adenovirus A
auuaaugcauugu

SEQ ID NO: 279696 - RNA, 14 nt, Human adenovirus A
auuaaugcauugug

SEQ ID NO: 279697 - RNA, 16 nt, Human adenovirus A
auuaauggacuuugag

SEQ ID NO: 279698 - RNA, 11 nt, Human adenovirus A
auuaauggagu

SEQ ID NO: 279699 - RNA, 18 nt, Human adenovirus A
auuacaaagaccccauug

SEQ ID NO: 279700 - RNA, 18 nt, Human adenovirus A
auuaccagaaugaucaca

SEQ ID NO: 279701 - RNA, 16 nt, Human adenovirus A
auuaccugcaccucca

SEQ ID NO: 279702 - RNA, 21 nt, Human adenovirus A
auuagcacuuaauuacaaaga

SEQ ID NO: 279703 - RNA, 21 nt, Human adenovirus A
auuagcucauuggaguacaag

SEQ ID NO: 279704 - RNA, 14 nt, Human adenovirus A
auuaugagauguuu

SEQ ID NO: 279705 - RNA, 15 nt, Human adenovirus A
auuccccauccaaaa

SEQ ID NO: 279706 - RNA, 16 nt, Human adenovirus A
auuccccauccaaaac

SEQ ID NO: 279707 - RNA, 20 nt, Human adenovirus A
auuccuccuccuccuguaag

SEQ ID NO: 279708 - RNA, 19 nt, Human adenovirus A
auucuaacugauuaugaga

SEQ ID NO: 279709 - RNA, 23 nt, Human adenovirus A
caguucgagaggacauucugacu

SEQ ID NO: 279710 - RNA, 23 nt, Human adenovirus A
caguuugggcuaguucuugucaa

SEQ ID NO: 279711 - RNA, 23 nt, Human adenovirus A
caguuuuuuuuccacacaucuca

SEQ ID NO: 279712 - RNA, 16 nt, Human adenovirus A
cauaacaucaggagca

SEQ ID NO: 279713 - RNA, 14 nt, Human adenovirus A
cauaucacucuucg

SEQ ID NO: 279714 - RNA, 16 nt, Human adenovirus A
caucaccgaggcaguu

SEQ ID NO: 279715 - RNA, 23 nt, Human adenovirus A
caucaggagcagaaaucuugaag

SEQ ID NO: 279716 - RNA, 12 nt, Human adenovirus A
cauccgcauuua

SEQ ID NO: 279717 - RNA, 23 nt, Human adenovirus A
cauccgcauuuaagcaacauuaa

SEQ ID NO: 279718 - RNA, 20 nt, Human adenovirus A
caucugaaauuaaaucuugg

SEQ ID NO: 279719 - RNA, 14 nt, Human adenovirus A
caucuguaguggcg

SEQ ID NO: 279720 - RNA, 14 nt, Human adenovirus A
caucugugucuuua

SEQ ID NO: 279721 - RNA, 23 nt, Human adenovirus A
caugagcgguggcuuauucauug

SEQ ID NO: 279722 - RNA, 13 nt, Human adenovirus A
caugcaaagccag

SEQ ID NO: 279723 - RNA, 17 nt, Human adenovirus A
cauggugauuaaauaua

SEQ ID NO: 279724 - RNA, 22 nt, Human adenovirus A
caugugcuauuguuaacacugc

SEQ ID NO: 279725 - RNA, 23 nt, Human adenovirus A
caugugcuauuguuaacacugcc

SEQ ID NO: 279726 - RNA, 21 nt, Human adenovirus A
cauguguagguuuuacagugc

SEQ ID NO: 279727 - RNA, 12 nt, Human adenovirus A
cauuaaccuaug

SEQ ID NO: 279728 - RNA, 23 nt, Human adenovirus A
cauuaguucuuuucuuuauguua

SEQ ID NO: 279729 - RNA, 17 nt, Human adenovirus A
cauugcgauaaacugga

SEQ ID NO: 279730 - RNA, 16 nt, Human adenovirus A
cauuggaaaagugcac

SEQ ID NO: 279731 - RNA, 17 nt, Human adenovirus A
cauuggaguacaagcuu

SEQ ID NO: 279732 - RNA, 22 nt, Human adenovirus A
cauuggauggucaggccaguga

SEQ ID NO: 279733 - RNA, 15 nt, Human adenovirus A
cauuguaacugaaaa

SEQ ID NO: 279734 - RNA, 17 nt, Human adenovirus A
cauuuaagcaacauuaa

SEQ ID NO: 279735 - RNA, 15 nt, Human adenovirus A
cauuugacacaucag

SEQ ID NO: 279736 - RNA, 13 nt, Human adenovirus A
ccaaaaccagguc

SEQ ID NO: 279737 - RNA, 22 nt, Human adenovirus A
ccaaagccauggcgaccagugu

SEQ ID NO: 279738 - RNA, 18 nt, Human adenovirus A
ccaaaucgcacacuugcu

SEQ ID NO: 279739 - RNA, 17 nt, Human adenovirus A
ccaacgcugcaaacaaa

SEQ ID NO: 279740 - RNA, 20 nt, Human adenovirus A
ccaacuaccgcccugugagg

SEQ ID NO: 279741 - RNA, 22 nt, Human adenovirus A
cucugcgcuuuauuaaacauca

SEQ ID NO: 279742 - RNA, 19 nt, Human adenovirus A
cucuguaguuucuuuacaa

SEQ ID NO: 279743 - RNA, 14 nt, Human adenovirus A
cugaaaaaccaaca

SEQ ID NO: 279744 - RNA, 22 nt, Human adenovirus A
cugaaccuaauagcacuuugga

SEQ ID NO: 279745 - RNA, 15 nt, Human adenovirus A
cugaagaagaaccua

SEQ ID NO: 279746 - RNA, 15 nt, Human adenovirus A
cugacagacuugcaa

SEQ ID NO: 279747 - RNA, 18 nt, Human adenovirus A
cugacuuuacauaaugua

SEQ ID NO: 279748 - RNA, 17 nt, Human adenovirus A
cugaucaacgacuaaaa

SEQ ID NO: 279749 - RNA, 23 nt, Human adenovirus A
cugaugaucuucccgaauaucca

SEQ ID NO: 279750 - RNA, 15 nt, Human adenovirus A
cugaugccacuugaa

SEQ ID NO: 279751 - RNA, 21 nt, Human adenovirus A
cugauugcguugcaaugugcc

SEQ ID NO: 279752 - RNA, 16 nt, Human adenovirus A
cugcagccugucuuaa

SEQ ID NO: 279753 - RNA, 13 nt, Human adenovirus A
cugcagcuuccgc

SEQ ID NO: 279754 - RNA, 15 nt, Human adenovirus A
cugccugcauagcau

SEQ ID NO: 279755 - RNA, 20 nt, Human adenovirus A
cugcggugcgugucacagca

SEQ ID NO: 279756 - RNA, 22 nt, Human adenovirus A
cugcucuuacccgccugugcga

SEQ ID NO: 279757 - RNA, 13 nt, Human adenovirus A
cugcugaagcaaa

SEQ ID NO: 279758 - RNA, 21 nt, Human adenovirus A
cugcugucacugagcacauca

SEQ ID NO: 279759 - RNA, 16 nt, Human adenovirus A
cugcuuucuggugcga

SEQ ID NO: 279760 - RNA, 17 nt, Human adenovirus A
cuggaagucaacuaaaa

SEQ ID NO: 279761 - RNA, 18 nt, Human adenovirus A
cuggauuugcgcacugaa

SEQ ID NO: 279762 - RNA, 12 nt, Human adenovirus A
cuguacugcaaa

SEQ ID NO: 279763 - RNA, 13 nt, Human adenovirus A
cuguaguggcgcu

SEQ ID NO: 279764 - RNA, 17 nt, Human adenovirus A
cuguaguuucuuuacaa

SEQ ID NO: 279765 - RNA, 16 nt, Human adenovirus A
cugucacugagcacau

SEQ ID NO: 279766 - RNA, 17 nt, Human adenovirus A
cugucacugagcacauc

SEQ ID NO: 279767 - RNA, 18 nt, Human adenovirus A
cugucacugagcacauca

SEQ ID NO: 279768 - RNA, 17 nt, Human adenovirus A
cugucauccgcauuuaa

SEQ ID NO: 279769 - RNA, 21 nt, Human adenovirus A
cugucuuaaaaucuccugaac

SEQ ID NO: 279770 - RNA, 12 nt, Human adenovirus A
cugugggugaca

SEQ ID NO: 279771 - RNA, 13 nt, Human adenovirus A
cugugggugacaa

SEQ ID NO: 279772 - RNA, 20 nt, Human adenovirus A
cuguuguuuugaaccugaaa

SEQ ID NO: 279773 - RNA, 14 nt, Human adenovirus A
cuuaagcagugaaa

SEQ ID NO: 279774 - RNA, 14 nt, Human adenovirus A
cuuaauuuuaguug

SEQ ID NO: 279775 - RNA, 21 nt, Human adenovirus A
cuuacauguggagcuuucaac

SEQ ID NO: 279776 - RNA, 16 nt, Human adenovirus A
cuuaccggaaaucuga

SEQ ID NO: 279777 - RNA, 22 nt, Human adenovirus A
cuucacgcaauagacucugcca

SEQ ID NO: 279778 - RNA, 20 nt, Human adenovirus A
cuucaucuuuucuagaugaa

SEQ ID NO: 279779 - RNA, 16 nt, Human adenovirus A
cuucccaacugucaaa

SEQ ID NO: 279780 - RNA, 13 nt, Human adenovirus A
cuucgcugcaguu

SEQ ID NO: 279781 - RNA, 15 nt, Human adenovirus A
cuucgcugcaguuuu

SEQ ID NO: 279782 - RNA, 13 nt, Human adenovirus A
cuucuuccaaugg

SEQ ID NO: 279783 - RNA, 21 nt, Human adenovirus A
cuucuuccguuagcugugaaa

SEQ ID NO: 279784 - RNA, 19 nt, Human adenovirus A
cuugaauucuggaauaaca

SEQ ID NO: 279785 - RNA, 14 nt, Human adenovirus A
cuugcaaacagcaa

SEQ ID NO: 279786 - RNA, 20 nt, Human adenovirus A
cuuggcaagcauaacaguca

SEQ ID NO: 279787 - RNA, 15 nt, Human adenovirus A
cuuguacuccaauga

SEQ ID NO: 279788 - RNA, 15 nt, Human adenovirus A
cuugucaacuacaua

SEQ ID NO: 279789 - RNA, 17 nt, Human adenovirus A
cuuguuuuuucugacau

SEQ ID NO: 279790 - RNA, 16 nt, Human adenovirus A
cuuuaacggaaaacac

SEQ ID NO: 279791 - RNA, 21 nt, Human adenovirus A
cuuuacaagaguuacuuuccu

SEQ ID NO: 279792 - RNA, 13 nt, Human adenovirus A
cuuuagcaguugc

SEQ ID NO: 279793 - RNA, 16 nt, Human adenovirus A
cuuuauugauacuugu

SEQ ID NO: 279794 - RNA, 21 nt, Human adenovirus A
cuuucaaccccaaaugggacu

SEQ ID NO: 279795 - RNA, 15 nt, Human adenovirus A
cuuucgaucccucau

SEQ ID NO: 279796 - RNA, 21 nt, Human adenovirus A
cuuucuccaaaucuuaaaugg

SEQ ID NO: 279797 - RNA, 18 nt, Human adenovirus A
cuuuguagcauacaauua

SEQ ID NO: 279798 - RNA, 22 nt, Human adenovirus A
cuuuguuggauagcaaagccau

SEQ ID NO: 279799 - RNA, 14 nt, Human adenovirus A
cuuuuaccaaugaa

SEQ ID NO: 279800 - RNA, 14 nt, Human adenovirus A
cuuuuacuucuucc

SEQ ID NO: 279801 - RNA, 13 nt, Human adenovirus A
cuuuucaaacuuu

SEQ ID NO: 279802 - RNA, 14 nt, Human adenovirus A
cuuuucaaacuuua

SEQ ID NO: 279803 - RNA, 12 nt, Human adenovirus A
gaaaaaauacau

SEQ ID NO: 279804 - RNA, 14 nt, Human adenovirus A
gaaaacaacugcac

SEQ ID NO: 279805 - RNA, 11 nt, Human adenovirus A
gaaaacaucac

SEQ ID NO: 279806 - RNA, 16 nt, Human adenovirus A
gaaaagucaacccaaa

SEQ ID NO: 279807 - RNA, 22 nt, Human adenovirus A
gaaacaaguuuagaaaccccac

SEQ ID NO: 279808 - RNA, 19 nt, Human adenovirus A
gaaacuaggaagugcgguu

SEQ ID NO: 279809 - RNA, 22 nt, Human adenovirus A
gaaacugggggcguacacuggc

SEQ ID NO: 279810 - RNA, 23 nt, Human adenovirus A
gaaacugggggcguacacuggcu

SEQ ID NO: 279811 - RNA, 23 nt, Human adenovirus A
gaaagagaacaaacagugccugu

SEQ ID NO: 279812 - RNA, 23 nt, Human adenovirus A
gaaaguuuaaaggaagcugcugu

SEQ ID NO: 279813 - RNA, 21 nt, Human adenovirus A
gaaauacuauauuaacuuuau

SEQ ID NO: 279814 - RNA, 17 nt, Human adenovirus A
gaaauauucaagugcag

SEQ ID NO: 279815 - RNA, 14 nt, Human adenovirus A
gaaaucuuuuacca

SEQ ID NO: 279816 - RNA, 13 nt, Human adenovirus A
gaaccuaacuguc

SEQ ID NO: 279817 - RNA, 20 nt, Human adenovirus A
gaaccuaauagcacuuugga

SEQ ID NO: 279818 - RNA, 14 nt, Human adenovirus A
gaacgagaucggca

SEQ ID NO: 279819 - RNA, 16 nt, Human adenovirus A
gaacggaacuacucag

SEQ ID NO: 279820 - RNA, 17 nt, Human adenovirus A
gaacggcagcugccaag

SEQ ID NO: 279821 - RNA, 20 nt, Human adenovirus A
gaacugcggugcgugucaca

SEQ ID NO: 279822 - RNA, 19 nt, Human adenovirus A
gaagaaaaugaugacuuca

SEQ ID NO: 279823 - RNA, 18 nt, Human adenovirus A
gaagaaccuaacugucau

SEQ ID NO: 279824 - RNA, 17 nt, Human adenovirus A
gaagauuucugcuguca

SEQ ID NO: 279825 - RNA, 18 nt, Human adenovirus A
gaagauuucugcugucau

SEQ ID NO: 279826 - RNA, 22 nt, Human adenovirus A
gaaggucagauucuucuuccca

SEQ ID NO: 279827 - RNA, 15 nt, Human adenovirus A
gaaguuuugauugua

SEQ ID NO: 279828 - RNA, 12 nt, Human adenovirus A
gaauaacaagcc

SEQ ID NO: 279829 - RNA, 20 nt, Human adenovirus A
gaaugccgcuugagugacug

SEQ ID NO: 279830 - RNA, 16 nt, Human adenovirus A
gaauggccaauaccgu

SEQ ID NO: 279831 - RNA, 16 nt, Human adenovirus A
gaauguuaaagaguau

SEQ ID NO: 279832 - RNA, 16 nt, Human adenovirus A
gaauucuggaauaaca

SEQ ID NO: 279833 - RNA, 18 nt, Human adenovirus A
gaauugauacacaccuca

SEQ ID NO: 279834 - RNA, 22 nt, Human adenovirus A
gacaaggaaccgaccugcaaca

SEQ ID NO: 279835 - RNA, 18 nt, Human adenovirus A
gacauuuagaccacuguc

SEQ ID NO: 279836 - RNA, 20 nt, Human adenovirus A
gaccacugucgccaaccuca

SEQ ID NO: 279837 - RNA, 17 nt, Human adenovirus A
gaccauugguaacagua

SEQ ID NO: 279838 - RNA, 13 nt, Human adenovirus A
gacccacuggcug

SEQ ID NO: 279839 - RNA, 14 nt, Human adenovirus A
gaccugcaacagcc

SEQ ID NO: 279840 - RNA, 22 nt, Human adenovirus A
gacggaacgccaacgcugcaaa

SEQ ID NO: 279841 - RNA, 22 nt, Human adenovirus A
gacggcagcugcaccucguuaa

SEQ ID NO: 279842 - RNA, 22 nt, Human adenovirus A
gacuaacgcuggggcacagcuu

SEQ ID NO: 279843 - RNA, 12 nt, Human adenovirus A
gacucugccaac

SEQ ID NO: 279844 - RNA, 18 nt, Human adenovirus A
gacucuggcgaagggccu

SEQ ID NO: 279845 - RNA, 23 nt, Human adenovirus A
gacuggcggccggcgcggcucaa

SEQ ID NO: 279846 - RNA, 22 nt, Human adenovirus A
gacuguuuuauuaaaaaucaaa

SEQ ID NO: 279847 - RNA, 15 nt, Human adenovirus A
gacuuugagcaccug

SEQ ID NO: 279848 - RNA, 16 nt, Human adenovirus A
gagacaucugugucuu

SEQ ID NO: 279849 - RNA, 13 nt, Human adenovirus A
gagcgucuguuag

SEQ ID NO: 279850 - RNA, 22 nt, Human adenovirus A
gagcuaugggaucgcuugcaac

SEQ ID NO: 279851 - RNA, 15 nt, Human adenovirus A
gaggcgcgcggugga

SEQ ID NO: 279852 - RNA, 18 nt, Human adenovirus A
gaggcguagaugugcugu

SEQ ID NO: 279853 - RNA, 15 nt, Human adenovirus A
gaguaauaaaaccug

SEQ ID NO: 279854 - RNA, 15 nt, Human adenovirus A
gagucgaggucaaga

SEQ ID NO: 279855 - RNA, 14 nt, Human adenovirus A
gauacacaccucau

SEQ ID NO: 279856 - RNA, 17 nt, Human adenovirus A
gauaucaauguuaucca

SEQ ID NO: 279857 - RNA, 22 nt, Human adenovirus A
gaugaucuucccgaauauccaa

SEQ ID NO: 279858 - RNA, 13 nt, Human adenovirus A
caacugugcuaca

SEQ ID NO: 279859 - RNA, 18 nt, Human adenovirus A
caacuuucauuguuauag

SEQ ID NO: 279860 - RNA, 17 nt, Human adenovirus A
caacuuuuuaaccacug

SEQ ID NO: 279861 - RNA, 13 nt, Human adenovirus A
caagaaggccaug

SEQ ID NO: 279862 - RNA, 12 nt, Human adenovirus A
caagacuauucu

SEQ ID NO: 279863 - RNA, 21 nt, Human adenovirus A
caagcauuuuuuguugcucca

SEQ ID NO: 279864 - RNA, 22 nt, Human adenovirus A
caagcauuuuuuguugcuccag

SEQ ID NO: 279865 - RNA, 14 nt, Human adenovirus A
caagcuaaccgcuu

SEQ ID NO: 279866 - RNA, 20 nt, Human adenovirus A
caagcuuguacuccaaugag

SEQ ID NO: 279867 - RNA, 20 nt, Human adenovirus A
caaggucuagccaacaucca

SEQ ID NO: 279868 - RNA, 12 nt, Human adenovirus A
caaguaacaaca

SEQ ID NO: 279869 - RNA, 18 nt, Human adenovirus A
caauaaguacgcaauuug

SEQ ID NO: 279870 - RNA, 14 nt, Human adenovirus A
caauacagauauaa

SEQ ID NO: 279871 - RNA, 17 nt, Human adenovirus A
caauagacucugccaac

SEQ ID NO: 279872 - RNA, 18 nt, Human adenovirus A
caauagacucugccaacg

SEQ ID NO: 279873 - RNA, 23 nt, Human adenovirus A
caaugcauuaauaauaaaaccau

SEQ ID NO: 279874 - RNA, 14 nt, Human adenovirus A
caauguuauccaca

SEQ ID NO: 279875 - RNA, 20 nt, Human adenovirus A
caauguuauccacauugcug

SEQ ID NO: 279876 - RNA, 20 nt, Human adenovirus A
caauuagggccagcauugcc

SEQ ID NO: 279877 - RNA, 21 nt, Human adenovirus A
caauuauuacauggucaugag

SEQ ID NO: 279878 - RNA, 19 nt, Human adenovirus A
cacaaaacacaaauugcgu

SEQ ID NO: 279879 - RNA, 19 nt, Human adenovirus A
cacaaagaaaacaucacuc

SEQ ID NO: 279880 - RNA, 15 nt, Human adenovirus A
cacaguuucuuuacg

SEQ ID NO: 279881 - RNA, 18 nt, Human adenovirus A
cacaucaccgaggcaguu

SEQ ID NO: 279882 - RNA, 22 nt, Human adenovirus A
cacaucucaccuggaccuuuaa

SEQ ID NO: 279883 - RNA, 13 nt, Human adenovirus A
caccgaacagagg

SEQ ID NO: 279884 - RNA, 22 nt, Human adenovirus A
caccguuguacgauaccacucg

SEQ ID NO: 279885 - RNA, 15 nt, Human adenovirus A
caccugaagcugaau

SEQ ID NO: 279886 - RNA, 14 nt, Human adenovirus A
caccugcaaauuca

SEQ ID NO: 279887 - RNA, 16 nt, Human adenovirus A
cacgauuaagacauau

SEQ ID NO: 279888 - RNA, 23 nt, Human adenovirus A
cacgauuaagacauauggcacca

SEQ ID NO: 279889 - RNA, 18 nt, Human adenovirus A
cacgcguauaguguaaaa

SEQ ID NO: 279890 - RNA, 17 nt, Human adenovirus A
cacggacaccuacuuca

SEQ ID NO: 279891 - RNA, 11 nt, Human adenovirus A
cacuacagugu

SEQ ID NO: 279892 - RNA, 17 nt, Human adenovirus A
cacucagcgacaaaccu

SEQ ID NO: 279893 - RNA, 23 nt, Human adenovirus A
cacucagcgacaaaccuuuacug

SEQ ID NO: 279894 - RNA, 19 nt, Human adenovirus A
cacucuauuucaaccuauu

SEQ ID NO: 279895 - RNA, 14 nt, Human adenovirus A
cacugaaaaaccaa

SEQ ID NO: 279896 - RNA, 16 nt, Human adenovirus A
cacugagcacaucacc

SEQ ID NO: 279897 - RNA, 21 nt, Human adenovirus A
cacugcggggggaauaucuca

SEQ ID NO: 279898 - RNA, 21 nt, Human adenovirus A
cacuggcuggcuuuuggaugg

SEQ ID NO: 279899 - RNA, 17 nt, Human adenovirus A
cacuggucgcaccacug

SEQ ID NO: 279900 - RNA, 20 nt, Human adenovirus A
cacuguagauccuaccacau

SEQ ID NO: 279901 - RNA, 15 nt, Human adenovirus A
cacuugaauucugga

SEQ ID NO: 279902 - RNA, 22 nt, Human adenovirus A
cacuugaauucuggaauaacaa

SEQ ID NO: 279903 - RNA, 16 nt, Human adenovirus A
cacuuuaauaaaaaca

SEQ ID NO: 279904 - RNA, 16 nt, Human adenovirus A
cagaaaaaaauugcca

SEQ ID NO: 279905 - RNA, 22 nt, Human adenovirus A
cagaagaaaaugaugacuucaa

SEQ ID NO: 279906 - RNA, 14 nt, Human adenovirus A
cagaaggaguaaua

SEQ ID NO: 279907 - RNA, 21 nt, Human adenovirus A
cagaaugugguaggaucuaca

SEQ ID NO: 279908 - RNA, 15 nt, Human adenovirus A
cagaauuacuaaaac

SEQ ID NO: 279909 - RNA, 20 nt, Human adenovirus A
cagacuaaauggaagacauc

SEQ ID NO: 279910 - RNA, 16 nt, Human adenovirus A
cagacugcuguaaugg

SEQ ID NO: 279911 - RNA, 23 nt, Human adenovirus A
cagaggaaauuguguacuuuuca

SEQ ID NO: 279912 - RNA, 22 nt, Human adenovirus A
cagaugcuaagggacaaguuaa

SEQ ID NO: 279913 - RNA, 14 nt, Human adenovirus A
cagauucuucuucc

SEQ ID NO: 279914 - RNA, 18 nt, Human adenovirus A
cagauuggcaccauacaa

SEQ ID NO: 279915 - RNA, 21 nt, Human adenovirus A
cagcagagucgaggucaagaa

SEQ ID NO: 279916 - RNA, 16 nt, Human adenovirus A
cagcagcaacaaggaa

SEQ ID NO: 279917 - RNA, 21 nt, Human adenovirus A
cagccuucuggcguuacagcu

SEQ ID NO: 279918 - RNA, 17 nt, Human adenovirus A
cagcgucugacgcugcg

SEQ ID NO: 279919 - RNA, 21 nt, Human adenovirus A
cagcugauuucagcuucuaca

SEQ ID NO: 279920 - RNA, 11 nt, Human adenovirus A
cagcugccaag

SEQ ID NO: 279921 - RNA, 12 nt, Human adenovirus A
cagcugccaagu

SEQ ID NO: 279922 - RNA, 16 nt, Human adenovirus A
caguaaguagguccau

SEQ ID NO: 279923 - RNA, 23 nt, Human adenovirus A
caguaugcugaagaaacagaaga

SEQ ID NO: 279924 - RNA, 13 nt, Human adenovirus A
cagucagugucca

SEQ ID NO: 279925 - RNA, 17 nt, Human adenovirus A
cagucaguguccaucag

SEQ ID NO: 279926 - RNA, 16 nt, Human adenovirus A
caguccugaugcuuuu

SEQ ID NO: 279927 - RNA, 13 nt, Human adenovirus A
cagugaguaaaag

SEQ ID NO: 279928 - RNA, 10 nt, Human adenovirus A
cagugccugu

SEQ ID NO: 279929 - RNA, 12 nt, Human adenovirus A
caguguccauca

SEQ ID NO: 279930 - RNA, 21 nt, Human adenovirus A
cauaauuaaacccuuuagcag

SEQ ID NO: 279931 - RNA, 21 nt, Human adenovirus A
cauaggcuggguuuauggaau

SEQ ID NO: 279932 - RNA, 22 nt, Human adenovirus A
cauaucacucuucgcugcaguu

SEQ ID NO: 279933 - RNA, 15 nt, Human adenovirus A
caucaacugugcuac

SEQ ID NO: 279934 - RNA, 18 nt, Human adenovirus A
cauccagugcgcguacgc

SEQ ID NO: 279935 - RNA, 15 nt, Human adenovirus A
cauccgcauuuaagc

SEQ ID NO: 279936 - RNA, 23 nt, Human adenovirus A
caucuuuucuagaugaagcgcag

SEQ ID NO: 279937 - RNA, 17 nt, Human adenovirus A
caugagcccggggacua

SEQ ID NO: 279938 - RNA, 21 nt, Human adenovirus A
caugaguguauguauguguug

SEQ ID NO: 279939 - RNA, 17 nt, Human adenovirus A
caugauuuuauccuaca

SEQ ID NO: 279940 - RNA, 21 nt, Human adenovirus A
caugauuuuauccuacaaaaa

SEQ ID NO: 279941 - RNA, 23 nt, Human adenovirus A
cauggugauuaaauauaucuuuu

SEQ ID NO: 279942 - RNA, 19 nt, Human adenovirus A
cauguauaauaaaacuggu

SEQ ID NO: 279943 - RNA, 16 nt, Human adenovirus A
cauguggagcuuucaa

SEQ ID NO: 279944 - RNA, 22 nt, Human adenovirus A
cauuacuaccgucaucucuaca

SEQ ID NO: 279945 - RNA, 15 nt, Human adenovirus A
cauuccccauccaaa

SEQ ID NO: 279946 - RNA, 16 nt, Human adenovirus A
cauuccccauccaaaa

SEQ ID NO: 279947 - RNA, 20 nt, Human adenovirus A
cauuccccauccaaaaccag

SEQ ID NO: 279948 - RNA, 17 nt, Human adenovirus A
cauugaauuaccagaau

SEQ ID NO: 279949 - RNA, 15 nt, Human adenovirus A
cauugguaacaguau

SEQ ID NO: 279950 - RNA, 18 nt, Human adenovirus A
ggaaaucugaaaauacau

SEQ ID NO: 279951 - RNA, 13 nt, Human adenovirus A
ggaacagccaaac

SEQ ID NO: 279952 - RNA, 21 nt, Human adenovirus A
ggaacagccaaaccggccaga

SEQ ID NO: 279953 - RNA, 15 nt, Human adenovirus A
ggaacaguaucugga

SEQ ID NO: 279954 - RNA, 15 nt, Human adenovirus A
ggaacgagaucggca

SEQ ID NO: 279955 - RNA, 18 nt, Human adenovirus A
ggaacgagaucggcacga

SEQ ID NO: 279956 - RNA, 18 nt, Human adenovirus A
ggaacuggccaagcaaaa

SEQ ID NO: 279957 - RNA, 13 nt, Human adenovirus A
ggaaggaggcagu

SEQ ID NO: 279958 - RNA, 19 nt, Human adenovirus A
ggaauaucucauuugcaag

SEQ ID NO: 279959 - RNA, 14 nt, Human adenovirus A
ggaauuaauggagu

SEQ ID NO: 279960 - RNA, 14 nt, Human adenovirus A
ggacccacuggcug

SEQ ID NO: 279961 - RNA, 14 nt, Human adenovirus A
ggacuuuuuugccu

SEQ ID NO: 279962 - RNA, 21 nt, Human adenovirus A
ggaggauauggagugugcuau

SEQ ID NO: 279963 - RNA, 23 nt, Human adenovirus A
ggaggcguagaugugcuguggaa

SEQ ID NO: 279964 - RNA, 14 nt, Human adenovirus A
ggaguacgucagaa

SEQ ID NO: 279965 - RNA, 15 nt, Human adenovirus A
ggauagcaaagccau

SEQ ID NO: 279966 - RNA, 16 nt, Human adenovirus A
ggauagcaaagccauc

SEQ ID NO: 279967 - RNA, 20 nt, Human adenovirus A
ggauauguuucuguacugca

SEQ ID NO: 279968 - RNA, 21 nt, Human adenovirus A
ggaucgggaagauacuaccua

SEQ ID NO: 279969 - RNA, 18 nt, Human adenovirus A
ggaucguauuauggcuuu

SEQ ID NO: 279970 - RNA, 21 nt, Human adenovirus A
ggcacccucccagacugcugu

SEQ ID NO: 279971 - RNA, 12 nt, Human adenovirus A
ggccaagcaaaa

SEQ ID NO: 279972 - RNA, 18 nt, Human adenovirus A
ggccagcucacgguguca

SEQ ID NO: 279973 - RNA, 17 nt, Human adenovirus A
ggccaugcaaagccagc

SEQ ID NO: 279974 - RNA, 17 nt, Human adenovirus A
uagaaucggcaacagca

SEQ ID NO: 279975 - RNA, 14 nt, Human adenovirus A
uagacauagccaau

SEQ ID NO: 279976 - RNA, 23 nt, Human adenovirus A
uagaccacugucgccaaccucac

SEQ ID NO: 279977 - RNA, 14 nt, Human adenovirus A
uagacucugccaac

SEQ ID NO: 279978 - RNA, 23 nt, Human adenovirus A
uagauguaauuaauggacuuuga

SEQ ID NO: 279979 - RNA, 17 nt, Human adenovirus A
uagauguaucucccugu

SEQ ID NO: 279980 - RNA, 12 nt, Human adenovirus A
uagcaaagccau

SEQ ID NO: 279981 - RNA, 11 nt, Human adenovirus A
uagcauacaau

SEQ ID NO: 279982 - RNA, 21 nt, Human adenovirus A
uagcauggcuugguuuagccc

SEQ ID NO: 279983 - RNA, 19 nt, Human adenovirus A
uagcccaugcauccugugu

SEQ ID NO: 279984 - RNA, 21 nt, Human adenovirus A
uagcucauuggaguacaagcu

SEQ ID NO: 279985 - RNA, 15 nt, Human adenovirus A
uagcugaaaacaacu

SEQ ID NO: 279986 - RNA, 23 nt, Human adenovirus A
uagcugaaaacaacugcacuuga

SEQ ID NO: 279987 - RNA, 14 nt, Human adenovirus A
uagguccauagugg

SEQ ID NO: 279988 - RNA, 21 nt, Human adenovirus A
uaguaaaagauguagcuuuuu

SEQ ID NO: 279989 - RNA, 15 nt, Human adenovirus A
uaguagcaucagcua

SEQ ID NO: 279990 - RNA, 17 nt, Human adenovirus A
uaguauagguauugaua

SEQ ID NO: 279991 - RNA, 15 nt, Human adenovirus A
uaguggcaaugcagc

SEQ ID NO: 279992 - RNA, 17 nt, Human adenovirus A
uaguucuugucaacuac

SEQ ID NO: 279993 - RNA, 21 nt, Human adenovirus A
uauaaaauuucccucuuccca

SEQ ID NO: 279994 - RNA, 22 nt, Human adenovirus A
uauaaauguugaaguuacucaa

SEQ ID NO: 279995 - RNA, 15 nt, Human adenovirus A
uauacaacgcuuugc

SEQ ID NO: 279996 - RNA, 18 nt, Human adenovirus A
uauacaagguaaaauggg

SEQ ID NO: 279997 - RNA, 21 nt, Human adenovirus A
uauacuaaagaaacaaacuac

SEQ ID NO: 279998 - RNA, 15 nt, Human adenovirus A
uauagguauugauaa

SEQ ID NO: 279999 - RNA, 21 nt, Human adenovirus A
uauaucuuuuaacaacaagcu

SEQ ID NO: 280000 - RNA, 14 nt, Human adenovirus A
uaucacuugcaacc

SEQ ID NO: 280001 - RNA, 13 nt, Human adenovirus A
uaugaaucuuuau

SEQ ID NO: 280002 - RNA, 18 nt, Human adenovirus A
uaugcagacuaaauggaa

SEQ ID NO: 280003 - RNA, 19 nt, Human adenovirus A
uaugcauuuacaguacaaa

SEQ ID NO: 280004 - RNA, 15 nt, Human adenovirus A
uaugcuauuuuucag

SEQ ID NO: 280005 - RNA, 21 nt, Human adenovirus A
uaugcuauuuuucagcagagu

SEQ ID NO: 280006 - RNA, 18 nt, Human adenovirus A
uauguauguguugugcca

SEQ ID NO: 280007 - RNA, 16 nt, Human adenovirus A
uauuaaagugucccaa

SEQ ID NO: 280008 - RNA, 22 nt, Human adenovirus A
uauuaaagugucccaacaagca

SEQ ID NO: 280009 - RNA, 15 nt, Human adenovirus A
uauuaaugcauugug

SEQ ID NO: 280010 - RNA, 14 nt, Human adenovirus A
uauucaagugcagu

SEQ ID NO: 280011 - RNA, 16 nt, Human adenovirus A
uauuggguuacagguu

SEQ ID NO: 280012 - RNA, 23 nt, Human adenovirus A
uauugguagacacugauuggccu

SEQ ID NO: 280013 - RNA, 13 nt, Human adenovirus A
uauuucaaccuau

SEQ ID NO: 280014 - RNA, 20 nt, Human adenovirus A
ucaaaaaaauaaagaguuaa

SEQ ID NO: 280015 - RNA, 21 nt, Human adenovirus A
ucaaaagcuacguugaguacu

SEQ ID NO: 280016 - RNA, 22 nt, Human adenovirus A
ucaaaagcuacguugaguacuu

SEQ ID NO: 280017 - RNA, 14 nt, Human adenovirus A
ucaaaauggccgua

SEQ ID NO: 280018 - RNA, 16 nt, Human adenovirus A
ucaaaccugacagacu

SEQ ID NO: 280019 - RNA, 19 nt, Human adenovirus A
ucaaaccugacagacuugc

SEQ ID NO: 280020 - RNA, 22 nt, Human adenovirus A
ucaaaccugacagacuugcaaa

SEQ ID NO: 280021 - RNA, 20 nt, Human adenovirus A
ucaaccuuucgaucccucau

SEQ ID NO: 280022 - RNA, 23 nt, Human adenovirus A
ucaagcggcauuccccauccaaa

SEQ ID NO: 280023 - RNA, 23 nt, Human adenovirus A
ucaccguuguacgauaccacucg

SEQ ID NO: 280024 - RNA, 12 nt, Human adenovirus A
ucacuacagugu

SEQ ID NO: 280025 - RNA, 13 nt, Human adenovirus A
ucacuacagugua

SEQ ID NO: 280026 - RNA, 19 nt, Human adenovirus A
ucagcagagucgaggucaa

SEQ ID NO: 280027 - RNA, 17 nt, Human adenovirus A
ucagcugggaugcuuuu

SEQ ID NO: 280028 - RNA, 20 nt, Human adenovirus A
ucaggagcagaaaucuugaa

SEQ ID NO: 280029 - RNA, 13 nt, Human adenovirus A
ucaggccagugag

SEQ ID NO: 280030 - RNA, 20 nt, Human adenovirus A
ucagugucauuuacugcagc

SEQ ID NO: 280031 - RNA, 13 nt, Human adenovirus A
ucauccgcauuua

SEQ ID NO: 280032 - RNA, 19 nt, Human adenovirus A
ucauccgcauuuaagcaac

SEQ ID NO: 280033 - RNA, 17 nt, Human adenovirus A
ucaucuguaguggcgcu

SEQ ID NO: 280034 - RNA, 17 nt, Human adenovirus A
ucaugagcgguggcuua

SEQ ID NO: 280035 - RNA, 16 nt, Human adenovirus A
ucauggaauacuucac

SEQ ID NO: 280036 - RNA, 19 nt, Human adenovirus A
ucauggcgggcucaccaaa

SEQ ID NO: 280037 - RNA, 21 nt, Human adenovirus A
ucauggcgggcucaccaaagu

SEQ ID NO: 280038 - RNA, 12 nt, Human adenovirus A
ucaugugcuauu

SEQ ID NO: 280039 - RNA, 22 nt, Human adenovirus A
ucauguguagguuuuacagugc

SEQ ID NO: 280040 - RNA, 23 nt, Human adenovirus A
ucauguguagguuuuacagugcu

SEQ ID NO: 280041 - RNA, 16 nt, Human adenovirus A
ucauugaauuaccaga

SEQ ID NO: 280042 - RNA, 15 nt, Human adenovirus A
ucauuguuauagguu

SEQ ID NO: 280043 - RNA, 18 nt, Human adenovirus A
uccaaaucuuaaauggaa

SEQ ID NO: 280044 - RNA, 18 nt, Human adenovirus A
uccaaugcgccugcuuaa

SEQ ID NO: 280045 - RNA, 12 nt, Human adenovirus A
uccaauggucuu

SEQ ID NO: 280046 - RNA, 15 nt, Human adenovirus A
uccaauggucuucaa

SEQ ID NO: 280047 - RNA, 14 nt, Human adenovirus A
uccacacaucucac

SEQ ID NO: 280048 - RNA, 18 nt, Human adenovirus A
uccacgauuaagacauau

SEQ ID NO: 280049 - RNA, 22 nt, Human adenovirus A
uccacgauuaagacauauggca

SEQ ID NO: 280050 - RNA, 19 nt, Human adenovirus A
uccacggugcacuuuucca

SEQ ID NO: 280051 - RNA, 18 nt, Human adenovirus A
uccauagugggauuuuua

SEQ ID NO: 280052 - RNA, 13 nt, Human adenovirus A
uccauuuugguuu

SEQ ID NO: 280053 - RNA, 21 nt, Human adenovirus A
ucccagacugcuguaaugggu

SEQ ID NO: 280054 - RNA, 18 nt, Human adenovirus A
ucccucgaugaugccgca

SEQ ID NO: 280055 - RNA, 14 nt, Human adenovirus A
ucccucuucccaac

SEQ ID NO: 280056 - RNA, 20 nt, Human adenovirus A
uccgacaaaugaugaaugaa

SEQ ID NO: 280057 - RNA, 15 nt, Human adenovirus A
uccuaaccuggaucc

SEQ ID NO: 280058 - RNA, 15 nt, Human adenovirus A
uccugagacaccacc

SEQ ID NO: 280059 - RNA, 13 nt, Human adenovirus A
uccugaugcuuuu

SEQ ID NO: 280060 - RNA, 14 nt, Human adenovirus A
uccugauuguagcu

SEQ ID NO: 280061 - RNA, 16 nt, Human adenovirus A
uccuucccauuuuacc

SEQ ID NO: 280062 - RNA, 20 nt, Human adenovirus A
ucgaaauauucaagugcagu

SEQ ID NO: 280063 - RNA, 17 nt, Human adenovirus A
ucgaugaugcauaauua

SEQ ID NO: 280064 - RNA, 16 nt, Human adenovirus A
ucgcuaugaaucuuua

SEQ ID NO: 280065 - RNA, 18 nt, Human adenovirus A
ucggcacgagccagcuga

SEQ ID NO: 280066 - RNA, 18 nt, Human adenovirus A
ucgggaagauacuaccua

SEQ ID NO: 280067 - RNA, 23 nt, Human adenovirus A
ucgggacacggcugccugcauag

SEQ ID NO: 280068 - RNA, 20 nt, Human adenovirus A
ucguuaaacuaucacuugca

SEQ ID NO: 280069 - RNA, 21 nt, Human adenovirus A
ucuauugcgugaaguauucca

SEQ ID NO: 280070 - RNA, 19 nt, Human adenovirus A
ucuccaaaucuuaaaugga

SEQ ID NO: 280071 - RNA, 19 nt, Human adenovirus A
cauuguaacugaaaaugga

SEQ ID NO: 280072 - RNA, 20 nt, Human adenovirus A
cauuguaacugaaaauggaa

SEQ ID NO: 280073 - RNA, 14 nt, Human adenovirus A
cauuuaagcaacau

SEQ ID NO: 280074 - RNA, 18 nt, Human adenovirus A
cauuuaagcaacauuaaa

SEQ ID NO: 280075 - RNA, 13 nt, Human adenovirus A
cauuuagaccacu

SEQ ID NO: 280076 - RNA, 22 nt, Human adenovirus A
cauuuagcgacguaaugccauu

SEQ ID NO: 280077 - RNA, 16 nt, Human adenovirus A
cauuugacacaucaga

SEQ ID NO: 280078 - RNA, 23 nt, Human adenovirus A
cauuugcaaggcgguauuugcua

SEQ ID NO: 280079 - RNA, 14 nt, Human adenovirus A
cauuuuaguaaaag

SEQ ID NO: 280080 - RNA, 15 nt, Human adenovirus A
cauuuuggauuugau

SEQ ID NO: 280081 - RNA, 19 nt, Human adenovirus A
ccaaaucgcacacuugcua

SEQ ID NO: 280082 - RNA, 22 nt, Human adenovirus A
ccaaaucgcacacuugcuauuu

SEQ ID NO: 280083 - RNA, 17 nt, Human adenovirus A
ccaaaucuuaaauggaa

SEQ ID NO: 280084 - RNA, 11 nt, Human adenovirus A
ccaacaagcag

SEQ ID NO: 280085 - RNA, 16 nt, Human adenovirus A
ccaaccucacugcuuu

SEQ ID NO: 280086 - RNA, 21 nt, Human adenovirus A
ccaacgcgugaaucgcaguca

SEQ ID NO: 280087 - RNA, 20 nt, Human adenovirus A
ccaaggcguggaacagccaa

SEQ ID NO: 280088 - RNA, 15 nt, Human adenovirus A
ccaauacagauauaa

SEQ ID NO: 280089 - RNA, 20 nt, Human adenovirus A
ccaaugcgccugcuuaaaau

SEQ ID NO: 280090 - RNA, 15 nt, Human adenovirus A
ucuuuuaccaaugaa

SEQ ID NO: 280091 - RNA, 13 nt, Human adenovirus A
ucuuuucuuuaug

SEQ ID NO: 280092 - RNA, 14 nt, Human adenovirus A
ugaaaucuggacau

SEQ ID NO: 280093 - RNA, 18 nt, Human adenovirus A
ugaaccuaauagcacuuu

SEQ ID NO: 280094 - RNA, 23 nt, Human adenovirus A
ugaagaagaaccuaacugucauc

SEQ ID NO: 280095 - RNA, 18 nt, Human adenovirus A
ugaagagcucgacaagga

SEQ ID NO: 280096 - RNA, 20 nt, Human adenovirus A
ugaagauuucugcugucauu

SEQ ID NO: 280097 - RNA, 19 nt, Human adenovirus A
ugaaucgcagucaccacca

SEQ ID NO: 280098 - RNA, 17 nt, Human adenovirus A
ugaauguguuccaguau

SEQ ID NO: 280099 - RNA, 19 nt, Human adenovirus A
ugaauuugcaggugccaca

SEQ ID NO: 280100 - RNA, 17 nt, Human adenovirus A
ugacccauuugacacau

SEQ ID NO: 280101 - RNA, 22 nt, Human adenovirus A
ugacuggacagcggccauggau

SEQ ID NO: 280102 - RNA, 17 nt, Human adenovirus A
ugacuguuuuaugcaga

SEQ ID NO: 280103 - RNA, 17 nt, Human adenovirus A
ugagacuuaccauuugg

SEQ ID NO: 280104 - RNA, 12 nt, Human adenovirus A
ugagaugguguu

SEQ ID NO: 280105 - RNA, 17 nt, Human adenovirus A
ugagauguuuauuuuga

SEQ ID NO: 280106 - RNA, 16 nt, Human adenovirus A
ugaguaaagauauucc

SEQ ID NO: 280107 - RNA, 18 nt, Human adenovirus A
ugaguacgaaagucuguu

SEQ ID NO: 280108 - RNA, 15 nt, Human adenovirus A
ugauacacaccucau

SEQ ID NO: 280109 - RNA, 18 nt, Human adenovirus A
ugauacacaccucauuaa

SEQ ID NO: 280110 - RNA, 18 nt, Human adenovirus A
ugauaccauggacagcuc

SEQ ID NO: 280111 - RNA, 15 nt, Human adenovirus A
ugauagagauaagca

SEQ ID NO: 280112 - RNA, 18 nt, Human adenovirus A
ugauaugcauuuacagua

SEQ ID NO: 280113 - RNA, 16 nt, Human adenovirus A
ugaucaacgacuaaaa

SEQ ID NO: 280114 - RNA, 22 nt, Human adenovirus A
ugaucgcgcuaggcgacgccaa

SEQ ID NO: 280115 - RNA, 17 nt, Human adenovirus A
ugaucuucccgaauauc

SEQ ID NO: 280116 - RNA, 17 nt, Human adenovirus A
ugauucccccaucugaa

SEQ ID NO: 280117 - RNA, 15 nt, Human adenovirus A
ugauucuaacugauu

SEQ ID NO: 280118 - RNA, 14 nt, Human adenovirus A
ugauuuauauaguu

SEQ ID NO: 280119 - RNA, 15 nt, Human adenovirus A
ugauuucagcuucua

SEQ ID NO: 280120 - RNA, 10 nt, Human adenovirus A
ugauuuccag

SEQ ID NO: 280121 - RNA, 22 nt, Human adenovirus A
ugauuuccagggugaauggggu

SEQ ID NO: 280122 - RNA, 19 nt, Human adenovirus A
ugcaacugcugaagcaaac

SEQ ID NO: 280123 - RNA, 18 nt, Human adenovirus A
ugcaggugccacaggucg

SEQ ID NO: 280124 - RNA, 23 nt, Human adenovirus A
ugcaguuuuuuuuccacacaucu

SEQ ID NO: 280125 - RNA, 17 nt, Human adenovirus A
ugcauccuguguggaua

SEQ ID NO: 280126 - RNA, 21 nt, Human adenovirus A
ugcauuaauaauaaaaccauu

SEQ ID NO: 280127 - RNA, 21 nt, Human adenovirus A
ugcauuuacaguacaaauaca

SEQ ID NO: 280128 - RNA, 23 nt, Human adenovirus A
ugcccuuccuaauuccacuuauu

SEQ ID NO: 280129 - RNA, 15 nt, Human adenovirus A
ugccgcccgcaugua

SEQ ID NO: 280130 - RNA, 21 nt, Human adenovirus A
ugccgucucguacuaacccua

SEQ ID NO: 280131 - RNA, 21 nt, Human adenovirus A
ugccuaugugauaacccugaa

SEQ ID NO: 280132 - RNA, 19 nt, Human adenovirus A
ugccucaguagccuugcag

SEQ ID NO: 280133 - RNA, 22 nt, Human adenovirus A
ugccuguugaucugucagugaa

SEQ ID NO: 280134 - RNA, 11 nt, Human adenovirus A
ugcgacauuua

SEQ ID NO: 280135 - RNA, 18 nt, Human adenovirus A
ugcgcacugaaaaaccaa

SEQ ID NO: 280136 - RNA, 23 nt, Human adenovirus A
ugcgcagaugauagagauaagca

SEQ ID NO: 280137 - RNA, 21 nt, Human adenovirus A
ugcgcuagcggccacuaaaga

SEQ ID NO: 280138 - RNA, 18 nt, Human adenovirus A
ugcggggggaauaucuca

SEQ ID NO: 280139 - RNA, 18 nt, Human adenovirus A
ugcuauuguuaacacugc

SEQ ID NO: 280140 - RNA, 16 nt, Human adenovirus A
ugcugaaaucuggaca

SEQ ID NO: 280141 - RNA, 19 nt, Human adenovirus A
ugcugaagaaacagaagaa

SEQ ID NO: 280142 - RNA, 12 nt, Human adenovirus A
ugcugaagcaaa

SEQ ID NO: 280143 - RNA, 18 nt, Human adenovirus A
ugcugaagcaaacccugg

SEQ ID NO: 280144 - RNA, 20 nt, Human adenovirus A
ugcuuuguuggauagcaaag

SEQ ID NO: 280145 - RNA, 23 nt, Human adenovirus A
uggaacagccaaaccggccagau

SEQ ID NO: 280146 - RNA, 16 nt, Human adenovirus A
uggaacaguaucugga

SEQ ID NO: 280147 - RNA, 17 nt, Human adenovirus A
uggaacccuuacacuca

SEQ ID NO: 280148 - RNA, 18 nt, Human adenovirus A
uggaacccuuacacucaa

SEQ ID NO: 280149 - RNA, 17 nt, Human adenovirus A
uggaacugcagacagug

SEQ ID NO: 280150 - RNA, 14 nt, Human adenovirus A
uggacuuugagcac

SEQ ID NO: 280151 - RNA, 20 nt, Human adenovirus A
uggaguggcgauuccaagga

SEQ ID NO: 280152 - RNA, 19 nt, Human adenovirus A
uggaucccgcgguuuuggc

SEQ ID NO: 280153 - RNA, 22 nt, Human adenovirus A
uggaucgggaagauacuaccua

SEQ ID NO: 280154 - RNA, 16 nt, Human adenovirus A
uggaucguauuauggc

SEQ ID NO: 280155 - RNA, 16 nt, Human adenovirus A
uggauuuucugaucaa

SEQ ID NO: 280156 - RNA, 18 nt, Human adenovirus A
uggcaagcauaacaguca

SEQ ID NO: 280157 - RNA, 17 nt, Human adenovirus A
uggcaggaguugcagga

SEQ ID NO: 280158 - RNA, 13 nt, Human adenovirus A
uggccaagcaaaa

SEQ ID NO: 280159 - RNA, 14 nt, Human adenovirus A
uggccaagcaaaac

SEQ ID NO: 280160 - RNA, 13 nt, Human adenovirus A
uggccacucccuc

SEQ ID NO: 280161 - RNA, 22 nt, Human adenovirus A
uggccgauggccuaaagccacu

SEQ ID NO: 280162 - RNA, 12 nt, Human adenovirus A
uggcgaccagug

SEQ ID NO: 280163 - RNA, 17 nt, Human adenovirus A
uggcuccgcuucuccac

SEQ ID NO: 280164 - RNA, 23 nt, Human adenovirus A
uggcuugguuuagcccaugcauc

SEQ ID NO: 280165 - RNA, 15 nt, Human adenovirus A
ugggaaggaggcagu

SEQ ID NO: 280166 - RNA, 14 nt, Human adenovirus A
ugggaucgcuugca

SEQ ID NO: 280167 - RNA, 17 nt, Human adenovirus A
ugggcuaguucuuguca

SEQ ID NO: 280168 - RNA, 20 nt, Human adenovirus A
uggguaauguaagaaaagga

SEQ ID NO: 280169 - RNA, 15 nt, Human adenovirus A
uggguuuauggaauu

SEQ ID NO: 280170 - RNA, 14 nt, Human adenovirus A
ugguaaaacaagcu

SEQ ID NO: 280171 - RNA, 18 nt, Human adenovirus A
uggucuccguguacucuu

SEQ ID NO: 280172 - RNA, 17 nt, Human adenovirus A
ugguuaaacugccuccu

SEQ ID NO: 280173 - RNA, 14 nt, Human adenovirus A
uguaagaacauaca

SEQ ID NO: 280174 - RNA, 16 nt, Human adenovirus A
uguaauggguucaagc

SEQ ID NO: 280175 - RNA, 14 nt, Human adenovirus A
uguacacguuuauu

SEQ ID NO: 280176 - RNA, 18 nt, Human adenovirus A
uguacacguuuauuugag

SEQ ID NO: 280177 - RNA, 21 nt, Human adenovirus A
uguacaguuuggguugacuuu

SEQ ID NO: 280178 - RNA, 13 nt, Human adenovirus A
uguacuuggugga

SEQ ID NO: 280179 - RNA, 21 nt, Human adenovirus A
uguagaagcugaaaucagcug

SEQ ID NO: 280180 - RNA, 23 nt, Human adenovirus A
uguagcugaaaacaacugcacuu

SEQ ID NO: 280181 - RNA, 16 nt, Human adenovirus A
uguauaauaaaacugg

SEQ ID NO: 280182 - RNA, 16 nt, Human adenovirus A
uguaucucccuguaag

SEQ ID NO: 280183 - RNA, 18 nt, Human adenovirus A
ugucagaauaacaguuga

SEQ ID NO: 280184 - RNA, 16 nt, Human adenovirus A
ugucauccgcauuuaa

SEQ ID NO: 280185 - RNA, 14 nt, Human adenovirus A
ugucccaacaagca

SEQ ID NO: 280186 - RNA, 21 nt, Human adenovirus A
ugucucgcgaccgcuuaucau

SEQ ID NO: 280187 - RNA, 22 nt, Human adenovirus A
ugugcgguuuaagaaaucuuuu

SEQ ID NO: 280188 - RNA, 14 nt, Human adenovirus A
uguggagcuuucaa

SEQ ID NO: 280189 - RNA, 13 nt, Human adenovirus A
uguguuccaguau

SEQ ID NO: 280190 - RNA, 20 nt, Human adenovirus A
uguuaaagaguauccauuua

SEQ ID NO: 280191 - RNA, 17 nt, Human adenovirus A
uguuaggggaacuggcc

SEQ ID NO: 280192 - RNA, 23 nt, Human adenovirus A
uguucuuaguaggcuaacuguua

SEQ ID NO: 280193 - RNA, 18 nt, Human adenovirus A
uguugaucugucagugaa

SEQ ID NO: 280194 - RNA, 19 nt, Human adenovirus A
uguuggauagcaaagccau

SEQ ID NO: 280195 - RNA, 22 nt, Human adenovirus A
uguuuaagaauuuauacaauuc

SEQ ID NO: 280196 - RNA, 21 nt, Human adenovirus A
uguuuccgauaaugagccuga

SEQ ID NO: 280197 - RNA, 16 nt, Human adenovirus A
uguuuuaugcagacua

SEQ ID NO: 280198 - RNA, 13 nt, Human adenovirus A
uuaaaaauuucaa

SEQ ID NO: 280199 - RNA, 23 nt, Human adenovirus A
uuaaaauaaaauaaaacuuccaa

SEQ ID NO: 280200 - RNA, 18 nt, Human adenovirus A
uuaaacuaucacuugcaa

SEQ ID NO: 280201 - RNA, 16 nt, Human adenovirus A
uuaaagcuuuugcuaa

SEQ ID NO: 280202 - RNA, 11 nt, Human adenovirus A
uuaaauggaag

SEQ ID NO: 280203 - RNA, 12 nt, Human adenovirus A
uuaaauugagau

SEQ ID NO: 280204 - RNA, 17 nt, Human adenovirus A
uuaaauugagauggugu

SEQ ID NO: 280205 - RNA, 19 nt, Human adenovirus A
uuaaauugagaugguguua

SEQ ID NO: 280206 - RNA, 21 nt, Human adenovirus A
cuaucauuaagaacacgguga

SEQ ID NO: 280207 - RNA, 17 nt, Human adenovirus A
cuauuaacuuugaugaa

SEQ ID NO: 280208 - RNA, 17 nt, Human adenovirus A
cuauuguuaacacugcc

SEQ ID NO: 280209 - RNA, 14 nt, Human adenovirus A
cucacauuaggcau

SEQ ID NO: 280210 - RNA, 20 nt, Human adenovirus A
cucacccccgaaacuaggaa

SEQ ID NO: 280211 - RNA, 18 nt, Human adenovirus A
cucagcgggugacuggga

SEQ ID NO: 280212 - RNA, 10 nt, Human adenovirus A
cucaguguca

SEQ ID NO: 280213 - RNA, 11 nt, Human adenovirus A
cucauaucacu

SEQ ID NO: 280214 - RNA, 18 nt, Human adenovirus A
cuccaaaucuuaaaugga

SEQ ID NO: 280215 - RNA, 12 nt, Human adenovirus A
cuccccacagcu

SEQ ID NO: 280216 - RNA, 22 nt, Human adenovirus A
cuccugaacgucgccugaguua

SEQ ID NO: 280217 - RNA, 16 nt, Human adenovirus A
gacgucacaacaagau

SEQ ID NO: 280218 - RNA, 13 nt, Human adenovirus A
gacuacccggcga

SEQ ID NO: 280219 - RNA, 22 nt, Human adenovirus A
gacugcuguaauggguucaagc

SEQ ID NO: 280220 - RNA, 22 nt, Human adenovirus A
gacuugcaaacagcaaacuuuc

SEQ ID NO: 280221 - RNA, 16 nt, Human adenovirus A
gacuuuguagcauaca

SEQ ID NO: 280222 - RNA, 12 nt, Human adenovirus A
uccagaaggagu

SEQ ID NO: 280223 - RNA, 16 nt, Human adenovirus A
uccaugagcccgggga

SEQ ID NO: 280224 - RNA, 21 nt, Human adenovirus A
uccaugauuuuauccuacaaa

SEQ ID NO: 280225 - RNA, 21 nt, Human adenovirus A
uccauuuagcgacguaaugcc

SEQ ID NO: 280226 - RNA, 16 nt, Human adenovirus A
uccccgggcucaugga

SEQ ID NO: 280227 - RNA, 20 nt, Human adenovirus A
ucccucgcccgcacagucac

SEQ ID NO: 280228 - RNA, 19 nt, Human adenovirus A
ucccucuucccaacuguca

SEQ ID NO: 280229 - RNA, 18 nt, Human adenovirus A
uccgcaaguggacaugau

SEQ ID NO: 280230 - RNA, 20 nt, Human adenovirus A
uccgcauuuaagcaacauua

SEQ ID NO: 280231 - RNA, 14 nt, Human adenovirus A
uccucacugaucgc

SEQ ID NO: 280232 - RNA, 19 nt, Human adenovirus A
uccucuguaguuucuuuac

SEQ ID NO: 280233 - RNA, 23 nt, Human adenovirus A
uccugaugcuuuucgccagcagc

SEQ ID NO: 280234 - RNA, 22 nt, Human adenovirus A
uccuucuaaagguacagaggaa

SEQ ID NO: 280235 - RNA, 17 nt, Human adenovirus A
gcuucauugaauuacca

SEQ ID NO: 280236 - RNA, 13 nt, Human adenovirus A
gcuucuccacgaa

SEQ ID NO: 280237 - RNA, 14 nt, Human adenovirus A
gcuugcaacugcug

SEQ ID NO: 280238 - RNA, 15 nt, Human adenovirus A
gcuugcaacugcuga

SEQ ID NO: 280239 - RNA, 18 nt, Human adenovirus A
gcuuugcucgagacaucu

SEQ ID NO: 280240 - RNA, 23 nt, Human adenovirus A
gcuuuguuggauagcaaagccau

SEQ ID NO: 280241 - RNA, 20 nt, Human adenovirus A
gcuuuuggauggaaccccaa

SEQ ID NO: 280242 - RNA, 21 nt, Human adenovirus A
ggaaaucugaaaauacaucau

SEQ ID NO: 280243 - RNA, 23 nt, Human adenovirus A
ggaaccccaaaucgcacacuugc

SEQ ID NO: 280244 - RNA, 13 nt, Human adenovirus A
ggaagaccuuuag

SEQ ID NO: 280245 - RNA, 22 nt, Human adenovirus A
ggaaggucagauucuucuuccc

SEQ ID NO: 280246 - RNA, 23 nt, Human adenovirus A
ggaauggccaauaccgugggaua

SEQ ID NO: 280247 - RNA, 15 nt, Human adenovirus A
ggacagcggccaugg

SEQ ID NO: 280248 - RNA, 14 nt, Human adenovirus A
ggaccaacgcguga

SEQ ID NO: 280249 - RNA, 20 nt, Human adenovirus A
ggacgaacggcagcugccaa

SEQ ID NO: 280250 - RNA, 10 nt, Human adenovirus A
ggacuuucaa

SEQ ID NO: 280251 - RNA, 19 nt, Human adenovirus A
ggagccgucaaaauuuucu

SEQ ID NO: 280252 - RNA, 20 nt, Human adenovirus A
ggagcugacggccauuguuc

SEQ ID NO: 280253 - RNA, 12 nt, Human adenovirus A
ggagugugcuau

SEQ ID NO: 280254 - RNA, 19 nt, Human adenovirus A
ggauacuuaauacuggcua

SEQ ID NO: 280255 - RNA, 22 nt, Human adenovirus A
ggauccaaacgguaguggcaau

SEQ ID NO: 280256 - RNA, 20 nt, Human adenovirus A
ggaucgcuugcaacugcuga

SEQ ID NO: 280257 - RNA, 18 nt, Human adenovirus A
ggaugcauccgaggugac

SEQ ID NO: 280258 - RNA, 22 nt, Human adenovirus A
ggauuugcgcacugaaaaacca

SEQ ID NO: 280259 - RNA, 12 nt, Human adenovirus A
ggcaaugcagca

SEQ ID NO: 280260 - RNA, 13 nt, Human adenovirus A
ggcaccccaguaa

SEQ ID NO: 280261 - RNA, 19 nt, Human adenovirus A
ggcagcugccaagugguau

SEQ ID NO: 280262 - RNA, 21 nt, Human adenovirus A
ggcaguagggguugaugugau

SEQ ID NO: 280263 - RNA, 16 nt, Human adenovirus A
ggccaugcaaagccag

SEQ ID NO: 280264 - RNA, 23 nt, Human adenovirus A
ggccauuggagccguucccggaa

SEQ ID NO: 280265 - RNA, 15 nt, Human adenovirus A
ggccguacaugggca

SEQ ID NO: 280266 - RNA, 16 nt, Human adenovirus A
ggccguauauggcgcc

SEQ ID NO: 280267 - RNA, 21 nt, Human adenovirus A
ggcgcgcaguccugaugcuuu

SEQ ID NO: 280268 - RNA, 21 nt, Human adenovirus A
ggcgcggacgagcucccggag

SEQ ID NO: 280269 - RNA, 16 nt, Human adenovirus A
ggcggugcacgucaca

SEQ ID NO: 280270 - RNA, 20 nt, Human adenovirus A
ggcguaaccaaauacugcua

SEQ ID NO: 280271 - RNA, 15 nt, Human adenovirus A
ggcguaguaugcgca

SEQ ID NO: 280272 - RNA, 21 nt, Human adenovirus A
ggcugauuuauauaguuugau

SEQ ID NO: 280273 - RNA, 23 nt, Human adenovirus A
ggcugggguauggguaguagcau

SEQ ID NO: 280274 - RNA, 15 nt, Human adenovirus A
ggggcuacugcucau

SEQ ID NO: 280275 - RNA, 15 nt, Human adenovirus A
gggggaauaucucau

SEQ ID NO: 280276 - RNA, 23 nt, Human adenovirus A
ggguucacuacaguguaugucag

SEQ ID NO: 280277 - RNA, 13 nt, Human adenovirus A
gguaauguaagaa

SEQ ID NO: 280278 - RNA, 21 nt, Human adenovirus A
ggucagauucuucuucccaau

SEQ ID NO: 280279 - RNA, 15 nt, Human adenovirus A
ggucaggccagugag

SEQ ID NO: 280280 - RNA, 15 nt, Human adenovirus A
ggucgaccuguggca

SEQ ID NO: 280281 - RNA, 12 nt, Human adenovirus A
ggugaauguguu

SEQ ID NO: 280282 - RNA, 13 nt, Human adenovirus A
ggugauaugcauu

SEQ ID NO: 280283 - RNA, 13 nt, Human adenovirus A
ggugggaugcauc

SEQ ID NO: 280284 - RNA, 21 nt, Human adenovirus A
gguuuaagaaaucuuuuacca

SEQ ID NO: 280285 - RNA, 15 nt, Human adenovirus A
guaaaaaaggacuuu

SEQ ID NO: 280286 - RNA, 13 nt, Human adenovirus A
guaagaacauaca

SEQ ID NO: 280287 - RNA, 21 nt, Human adenovirus A
guaaugccauuaaaugcaacu

SEQ ID NO: 280288 - RNA, 19 nt, Human adenovirus A
guaauuaauggacuuugag

SEQ ID NO: 280289 - RNA, 12 nt, Human adenovirus A
guacaagcuuga

SEQ ID NO: 280290 - RNA, 21 nt, Human adenovirus A
guacagaaaaaaauugccaac

SEQ ID NO: 280291 - RNA, 22 nt, Human adenovirus A
guacuuuucaaacuuuacaaac

SEQ ID NO: 280292 - RNA, 15 nt, Human adenovirus A
guagccugcuuucag

SEQ ID NO: 280293 - RNA, 16 nt, Human adenovirus A
guagguuuuacagugc

SEQ ID NO: 280294 - RNA, 19 nt, Human adenovirus A
guaguaugcgcagacgcau

SEQ ID NO: 280295 - RNA, 23 nt, Human adenovirus A
guaguuucuuuacaacuguaugc

SEQ ID NO: 280296 - RNA, 15 nt, Human adenovirus A
guauaauaaaacugg

SEQ ID NO: 280297 - RNA, 19 nt, Human adenovirus A
guauacugaugaucuuccc

SEQ ID NO: 280298 - RNA, 17 nt, Human adenovirus A
guaugucagcugggaug

SEQ ID NO: 280299 - RNA, 14 nt, Human adenovirus A
guauuagcacuuaa

SEQ ID NO: 280300 - RNA, 13 nt, Human adenovirus A
guauugauuuucc

SEQ ID NO: 280301 - RNA, 15 nt, Human adenovirus A
guauuugucuccucu

SEQ ID NO: 280302 - RNA, 17 nt, Human adenovirus A
gucaaaagcuacguuga

SEQ ID NO: 280303 - RNA, 19 nt, Human adenovirus A
gucacaacaagaugaguaa

SEQ ID NO: 280304 - RNA, 22 nt, Human adenovirus A
gucaccguuguacgauaccacu

SEQ ID NO: 280305 - RNA, 18 nt, Human adenovirus A
gucacugagcacaucacc

SEQ ID NO: 280306 - RNA, 18 nt, Human adenovirus A
gucagauucuucuuccca

SEQ ID NO: 280307 - RNA, 20 nt, Human adenovirus A
guccaauaguugcauagguu

SEQ ID NO: 280308 - RNA, 16 nt, Human adenovirus A
guccuuguacaguuug

SEQ ID NO: 280309 - RNA, 21 nt, Human adenovirus A
gucgaaauauucaagugcagu

SEQ ID NO: 280310 - RNA, 18 nt, Human adenovirus A
gucggggcuacugcucau

SEQ ID NO: 280311 - RNA, 23 nt, Human adenovirus A
gucuaauggagcggcugacagag

SEQ ID NO: 280312 - RNA, 16 nt, Human adenovirus A
gucuagccaacaucca

SEQ ID NO: 280313 - RNA, 16 nt, Human adenovirus A
gucugacuuuacauaa

SEQ ID NO: 280314 - RNA, 23 nt, Human adenovirus A
gucuguuaggggaacuggccaag

SEQ ID NO: 280315 - RNA, 14 nt, Human adenovirus A
gucuuaaaaucucc

SEQ ID NO: 280316 - RNA, 12 nt, Human adenovirus A
gugccacagguc

SEQ ID NO: 280317 - RNA, 21 nt, Human adenovirus A
gugcugaauuuaaucaucugu

SEQ ID NO: 280318 - RNA, 20 nt, Human adenovirus A
guggaaaaagaucaaggaaa

SEQ ID NO: 280319 - RNA, 13 nt, Human adenovirus A
guggaaagcauuu

SEQ ID NO: 280320 - RNA, 23 nt, Human adenovirus A
guggaucgggaagauacuaccua

SEQ ID NO: 280321 - RNA, 15 nt, Human adenovirus A
guggcaaugcagcag

SEQ ID NO: 280322 - RNA, 18 nt, Human adenovirus A
guggccgaugcucgcaag

SEQ ID NO: 280323 - RNA, 15 nt, Human adenovirus A
gugguaacaugucca

SEQ ID NO: 280324 - RNA, 15 nt, Human adenovirus A
gugucccaacaagca

SEQ ID NO: 280325 - RNA, 18 nt, Human adenovirus A
guuaaacuaucacuugca

SEQ ID NO: 280326 - RNA, 13 nt, Human adenovirus A
guuaaacugccuc

SEQ ID NO: 280327 - RNA, 21 nt, Human adenovirus A
guuacucaauuauuacauggu

SEQ ID NO: 280328 - RNA, 19 nt, Human adenovirus A
guuagaguuucaagcuugg

SEQ ID NO: 280329 - RNA, 15 nt, Human adenovirus A
guucacuacagugua

SEQ ID NO: 280330 - RNA, 19 nt, Human adenovirus A
guuccacgauuaagacaua

SEQ ID NO: 280331 - RNA, 18 nt, Human adenovirus A
guucccuaucauuaagaa

SEQ ID NO: 280332 - RNA, 15 nt, Human adenovirus A
guugaaguuacucaa

SEQ ID NO: 280333 - RNA, 19 nt, Human adenovirus A
guugauaucaauguuaucc

SEQ ID NO: 280334 - RNA, 18 nt, Human adenovirus A
guuguguaaacacuaccg

SEQ ID NO: 280335 - RNA, 16 nt, Human adenovirus A
guuguuagcuauuuua

SEQ ID NO: 280336 - RNA, 21 nt, Human adenovirus A
guuuaagaaaucuuuuaccaa

SEQ ID NO: 280337 - RNA, 14 nt, Human adenovirus A
guuuagauguaucu

SEQ ID NO: 280338 - RNA, 21 nt, Human adenovirus A
guuugaguacgaaagucuguu

SEQ ID NO: 280339 - RNA, 22 nt, Human adenovirus A
guuuggaaacuguauauuggca

SEQ ID NO: 280340 - RNA, 17 nt, Human adenovirus A
guuuuaugcagacuaaa

SEQ ID NO: 280341 - RNA, 15 nt, Human adenovirus A
uaaaaccuagaccau

SEQ ID NO: 280342 - RNA, 18 nt, Human adenovirus A
uaaaacuuccaacuuauu

SEQ ID NO: 280343 - RNA, 11 nt, Human adenovirus A
uaaaagaccaa

SEQ ID NO: 280344 - RNA, 19 nt, Human adenovirus A
uaaaauuucccucuuccca

SEQ ID NO: 280345 - RNA, 23 nt, Human adenovirus A
ucgaacugcggugcgugucacag

SEQ ID NO: 280346 - RNA, 19 nt, Human adenovirus A
ucgaccguccacuguagau

SEQ ID NO: 280347 - RNA, 20 nt, Human adenovirus A
ucgaucccucauaucacucu

SEQ ID NO: 280348 - RNA, 13 nt, Human adenovirus A
ucgcacacuugcu

SEQ ID NO: 280349 - RNA, 16 nt, Human adenovirus A
ucgccaaguaacaaca

SEQ ID NO: 280350 - RNA, 12 nt, Human adenovirus A
ucgcuugcaacu

SEQ ID NO: 280351 - RNA, 18 nt, Human adenovirus A
ucgcuugcaacugcugaa

SEQ ID NO: 280352 - RNA, 23 nt, Human adenovirus A
ucggcaacagcagcaacaaggaa

SEQ ID NO: 280353 - RNA, 13 nt, Human adenovirus A
ucguugauaucaa

SEQ ID NO: 280354 - RNA, 17 nt, Human adenovirus A
ucguugauuauaaucuc

SEQ ID NO: 280355 - RNA, 15 nt, Human adenovirus A
ucuagccaacaucca

SEQ ID NO: 280356 - RNA, 15 nt, Human adenovirus A
ucuauucggugccua

SEQ ID NO: 280357 - RNA, 14 nt, Human adenovirus A
ucuccccacagcug

SEQ ID NO: 280358 - RNA, 18 nt, Human adenovirus A
ucucccuguaaguacgug

SEQ ID NO: 280359 - RNA, 20 nt, Human adenovirus A
ucugcugucauuugugugcu

SEQ ID NO: 280360 - RNA, 14 nt, Human adenovirus A
ucuguacugcaaac

SEQ ID NO: 280361 - RNA, 12 nt, Human adenovirus A
ucugucagugaa

SEQ ID NO: 280362 - RNA, 12 nt, Human adenovirus A
ucuuaaauggaa

SEQ ID NO: 280363 - RNA, 21 nt, Human adenovirus A
ucuuaaauggaaggucagauu

SEQ ID NO: 280364 - RNA, 13 nt, Human adenovirus A
ucuuggguaaugu

SEQ ID NO: 280365 - RNA, 17 nt, Human adenovirus A
ucuuuaccuacuuugag

SEQ ID NO: 280366 - RNA, 14 nt, Human adenovirus A
ucuuuucuuuaugu

SEQ ID NO: 280367 - RNA, 16 nt, Human adenovirus A
ugaaaaaauacaugag

SEQ ID NO: 280368 - RNA, 14 nt, Human adenovirus A
ugaaaacaacugca

SEQ ID NO: 280369 - RNA, 15 nt, Human adenovirus A
ugaaaacaacugcac

SEQ ID NO: 280370 - RNA, 21 nt, Human adenovirus A
ugaaacagcagggucuacugu

SEQ ID NO: 280371 - RNA, 17 nt, Human adenovirus A
ugaaaucagcugccaua

SEQ ID NO: 280372 - RNA, 20 nt, Human adenovirus A
ugaaaucuggacaugcaggu

SEQ ID NO: 280373 - RNA, 22 nt, Human adenovirus A
ugaaaugaggcgcgcgguggaa

SEQ ID NO: 280374 - RNA, 20 nt, Human adenovirus A
ugaagaagaaccuaacuguc

SEQ ID NO: 280375 - RNA, 22 nt, Human adenovirus A
ugaauaaaagcauacuuaccaa

SEQ ID NO: 280376 - RNA, 18 nt, Human adenovirus A
ugaaucuuuaccaggcaa

SEQ ID NO: 280377 - RNA, 21 nt, Human adenovirus A
ugaauuucagcggggugauau

SEQ ID NO: 280378 - RNA, 13 nt, Human adenovirus A
ugaauuugcaggu

SEQ ID NO: 280379 - RNA, 23 nt, Human adenovirus A
ugaauuugcaggugccacagguc

SEQ ID NO: 280380 - RNA, 21 nt, Human adenovirus A
ugacacaucagacguacccuu

SEQ ID NO: 280381 - RNA, 13 nt, Human adenovirus A
ugacagacuugca

SEQ ID NO: 280382 - RNA, 23 nt, Human adenovirus A
ugagcuaauaaaaugguuuuauu

SEQ ID NO: 280383 - RNA, 14 nt, Human adenovirus A
ugaggaacagucaa

SEQ ID NO: 280384 - RNA, 20 nt, Human adenovirus A
ugaggacuuuguagcauaca

SEQ ID NO: 280385 - RNA, 21 nt, Human adenovirus A
ugaggacuuuguagcauacaa

SEQ ID NO: 280386 - RNA, 20 nt, Human adenovirus A
ugagucccggucuggugcaa

SEQ ID NO: 280387 - RNA, 18 nt, Human adenovirus A
ugauagagauaagcagga

SEQ ID NO: 280388 - RNA, 21 nt, Human adenovirus A
ugauaucuugaaucugucggc

SEQ ID NO: 280389 - RNA, 19 nt, Human adenovirus A
ugaugaauuugcaggugcc

SEQ ID NO: 280390 - RNA, 13 nt, Human adenovirus A
ugaugacuucaac

SEQ ID NO: 280391 - RNA, 19 nt, Human adenovirus A
ugaugcauaauuaaacccu

SEQ ID NO: 280392 - RNA, 15 nt, Human adenovirus A
ugaugccacuugaau

SEQ ID NO: 280393 - RNA, 15 nt, Human adenovirus A
ugauguuaccaccga

SEQ ID NO: 280394 - RNA, 16 nt, Human adenovirus A
ugauuauaaucuccaa

SEQ ID NO: 280395 - RNA, 17 nt, Human adenovirus A
ugauugaaccugaucua

SEQ ID NO: 280396 - RNA, 18 nt, Human adenovirus A
ugauugcguugcaaugug

SEQ ID NO: 280397 - RNA, 22 nt, Human adenovirus A
ugauuuaccccuaaauauugua

SEQ ID NO: 280398 - RNA, 16 nt, Human adenovirus A
ugcaaaauaaugacua

SEQ ID NO: 280399 - RNA, 24 nt, Human adenovirus A
ugcaaacagcaaacuuucuccaaa

SEQ ID NO: 280400 - RNA, 11 nt, Human adenovirus A
ugcaaagccag

SEQ ID NO: 280401 - RNA, 19 nt, Human adenovirus A
ugcaagaaggccauguacu

SEQ ID NO: 280402 - RNA, 23 nt, Human adenovirus A
ugcaagaaggccauguacuugac

SEQ ID NO: 280403 - RNA, 20 nt, Human adenovirus A
ugcaaggcgguauuugcuau

SEQ ID NO: 280404 - RNA, 22 nt, Human adenovirus A
ugcaaugugcccacuaccugag

SEQ ID NO: 280405 - RNA, 15 nt, Human adenovirus A
ugcagccugucuuaa

SEQ ID NO: 280406 - RNA, 14 nt, Human adenovirus A
ugcaggcuaacuua

SEQ ID NO: 280407 - RNA, 21 nt, Human adenovirus A
ugccaagugguauugauuuuc

SEQ ID NO: 280408 - RNA, 23 nt, Human adenovirus A
ugccaagugguauugauuuuccc

SEQ ID NO: 280409 - RNA, 15 nt, Human adenovirus A
ugcccugauauauca

SEQ ID NO: 280410 - RNA, 18 nt, Human adenovirus A
ugccucaguagccuugca

SEQ ID NO: 280411 - RNA, 16 nt, Human adenovirus A
ugccucggaguaccug

SEQ ID NO: 280412 - RNA, 18 nt, Human adenovirus A
ugcgcauacccauuccag

SEQ ID NO: 280413 - RNA, 13 nt, Human adenovirus A
ugcgccugcuuaa

SEQ ID NO: 280414 - RNA, 13 nt, Human adenovirus A
ugcugaagcaaac

SEQ ID NO: 280415 - RNA, 16 nt, Human adenovirus A
ugcugaagcaaacccu

SEQ ID NO: 280416 - RNA, 16 nt, Human adenovirus A
ugcugucacugagcac

SEQ ID NO: 280417 - RNA, 15 nt, Human adenovirus A
uggaaacuguauauu

SEQ ID NO: 280418 - RNA, 20 nt, Human adenovirus A
uggaacaacaggugcaagaa

SEQ ID NO: 280419 - RNA, 16 nt, Human adenovirus A
uggaacgagaucggca

SEQ ID NO: 280420 - RNA, 14 nt, Human adenovirus A
uggaauaacaagcc

SEQ ID NO: 280421 - RNA, 16 nt, Human adenovirus A
uggaauaacaagccua

SEQ ID NO: 280422 - RNA, 22 nt, Human adenovirus A
uggacuuugagcaccugggcaa

SEQ ID NO: 280423 - RNA, 14 nt, Human adenovirus A
uggaguacaagcuu

SEQ ID NO: 280424 - RNA, 16 nt, Human adenovirus A
uggaguacaagcuuga

SEQ ID NO: 280425 - RNA, 17 nt, Human adenovirus A
uggaguuguagacauag

SEQ ID NO: 280426 - RNA, 20 nt, Human adenovirus A
uggauacucugcgcuuuauu

SEQ ID NO: 280427 - RNA, 15 nt, Human adenovirus A
uggauagcaaagcca

SEQ ID NO: 280428 - RNA, 16 nt, Human adenovirus A
uggauagcaaagccau

SEQ ID NO: 280429 - RNA, 14 nt, Human adenovirus A
uggcaccauacaac

SEQ ID NO: 280430 - RNA, 19 nt, Human adenovirus A
uggccaauaccgugggaua

SEQ ID NO: 280431 - RNA, 22 nt, Human adenovirus A
uggccacucccucgaugaugcc

SEQ ID NO: 280432 - RNA, 23 nt, Human adenovirus A
uggcucccacccaugauguuacc

SEQ ID NO: 280433 - RNA, 16 nt, Human adenovirus A
uggcugugggugacaa

SEQ ID NO: 280434 - RNA, 18 nt, Human adenovirus A
uggcuuauucauugucau

SEQ ID NO: 280435 - RNA, 18 nt, Human adenovirus A
ugggaggcguagaugugc

SEQ ID NO: 280436 - RNA, 16 nt, Human adenovirus A
ugggaucgcuugcaac

SEQ ID NO: 280437 - RNA, 12 nt, Human adenovirus A
ugggaugcaucc

SEQ ID NO: 280438 - RNA, 13 nt, Human adenovirus A
uggguaauguaag

SEQ ID NO: 280439 - RNA, 13 nt, Human adenovirus A
ugguuaaacugcc

SEQ ID NO: 280440 - RNA, 14 nt, Human adenovirus A
ugguuaaacugccu

SEQ ID NO: 280441 - RNA, 14 nt, Human adenovirus A
uguaaaugcuuugu

SEQ ID NO: 280442 - RNA, 16 nt, Human adenovirus A
uguaacugaaaaugga

SEQ ID NO: 280443 - RNA, 17 nt, Human adenovirus A
uguaacugaaaauggaa

SEQ ID NO: 280444 - RNA, 18 nt, Human adenovirus A
uguaacugaaaauggaac

SEQ ID NO: 280445 - RNA, 20 nt, Human adenovirus A
uguacagaaaaaaauugcca

SEQ ID NO: 280446 - RNA, 11 nt, Human adenovirus A
uguagacauag

SEQ ID NO: 280447 - RNA, 21 nt, Human adenovirus B (HAdV-B)
aaaaaauacaauggacucuga

SEQ ID NO: 280448 - RNA, 22 nt, Human adenovirus B (HAdV-B)
aaaaacucucucauauuaucac

SEQ ID NO: 280449 - RNA, 18 nt, Human adenovirus B (HAdV-B)
aaaaauauguuaacuguu

SEQ ID NO: 280450 - RNA, 21 nt, Human adenovirus B (HAdV-B)
aaaaauauguuaacuguucac

SEQ ID NO: 280451 - RNA, 14 nt, Human adenovirus B (HAdV-B)
aaaaaucacuuacu

SEQ ID NO: 280452 - RNA, 19 nt, Human adenovirus B (HAdV-B)
aaaaaucacuuacuugaaa

SEQ ID NO: 280453 - RNA, 17 nt, Human adenovirus B (HAdV-B)
aaaaaucuacccagacc

SEQ ID NO: 280454 - RNA, 22 nt, Human adenovirus B (HAdV-B)
aaaaauggggcccauacuaguc

SEQ ID NO: 280455 - RNA, 14 nt, Human adenovirus B (HAdV-B)
aaaacaagccaaga

SEQ ID NO: 280456 - RNA, 12 nt, Human adenovirus B (HAdV-B)
aaaacaugcaac

SEQ ID NO: 280457 - RNA, 13 nt, Human adenovirus B (HAdV-B)
aaaacaugcaaca

SEQ ID NO: 280458 - RNA, 19 nt, Human adenovirus B (HAdV-B)
aaaaccacgaaaaugccaa

SEQ ID NO: 280459 - RNA, 13 nt, Human adenovirus B (HAdV-B)
aaaauagacucuc

SEQ ID NO: 280460 - RNA, 18 nt, Human adenovirus B (HAdV-B)
aaaaucacuuacuugaaa

SEQ ID NO: 280461 - RNA, 16 nt, Human adenovirus B (HAdV-B)
aaaaucuuacauugau

SEQ ID NO: 280462 - RNA, 15 nt, Human adenovirus B (HAdV-B)
aaaaugcaaauucca

SEQ ID NO: 280463 - RNA, 17 nt, Human adenovirus B (HAdV-B)
aaaaugcaaauuccaac

SEQ ID NO: 280464 - RNA, 19 nt, Human adenovirus B (HAdV-B)
aaaauguugaaaugggcau

SEQ ID NO: 280465 - RNA, 12 nt, Human adenovirus B (HAdV-B)
aaacaaaaccaa

SEQ ID NO: 280466 - RNA, 18 nt, Human adenovirus B (HAdV-B)
ugcuuuuguuacuugcau

SEQ ID NO: 280467 - RNA, 19 nt, Human adenovirus B (HAdV-B)
uggaaaaaaacguauaaau

SEQ ID NO: 280468 - RNA, 14 nt, Human adenovirus B (HAdV-B)
uggaacagcaguac

SEQ ID NO: 280469 - RNA, 22 nt, Human adenovirus B (HAdV-B)
uggaacagucagcucuuaccac

SEQ ID NO: 280470 - RNA, 14 nt, Human adenovirus B (HAdV-B)
uggaauuagccaug

SEQ ID NO: 280471 - RNA, 16 nt, Human adenovirus B (HAdV-B)
uggacucugacacucc

SEQ ID NO: 280472 - RNA, 16 nt, Human adenovirus B (HAdV-B)
uggagaauauaugaca

SEQ ID NO: 280473 - RNA, 16 nt, Human adenovirus B (HAdV-B)
uggagcaguaucugga

SEQ ID NO: 280474 - RNA, 21 nt, Human adenovirus B (HAdV-B)
uggaggcucccuuugugccuc

SEQ ID NO: 280475 - RNA, 22 nt, Human adenovirus B (HAdV-B)
uggaguuaucaaccccaaaugg

SEQ ID NO: 280476 - RNA, 23 nt, Human adenovirus B (HAdV-B)
uggaguuaucaaccccaaauggg

SEQ ID NO: 280477 - RNA, 23 nt, Human adenovirus B (HAdV-B)
uggaguuuugauuacaacugaag

SEQ ID NO: 280478 - RNA, 20 nt, Human adenovirus B (HAdV-B)
uggaucacggucaucuggaa

SEQ ID NO: 280479 - RNA, 16 nt, Human adenovirus B (HAdV-B)
uggcaccucaguacga

SEQ ID NO: 280480 - RNA, 19 nt, Human adenovirus B (HAdV-B)
uggcccuuucgaugugugu

SEQ ID NO: 280481 - RNA, 18 nt, Human adenovirus B (HAdV-B)
uggcgaaagauggcguga

SEQ ID NO: 280482 - RNA, 16 nt, Human adenovirus B (HAdV-B)
uggcgaugaugggcug

SEQ ID NO: 280483 - RNA, 21 nt, Human adenovirus B (HAdV-B)
uggcgcccaaaggacacggaa

SEQ ID NO: 280484 - RNA, 19 nt, Human adenovirus B (HAdV-B)
uggcgguucccaauaugcu

SEQ ID NO: 280485 - RNA, 21 nt, Human adenovirus B (HAdV-B)
uggcuaauuccacuuccucua

SEQ ID NO: 280486 - RNA, 16 nt, Human adenovirus B (HAdV-B)
uggcucgcuacaacag

SEQ ID NO: 280487 - RNA, 14 nt, Human adenovirus B (HAdV-B)
uggcucucuugcuu

SEQ ID NO: 280488 - RNA, 20 nt, Human adenovirus B (HAdV-B)
uggcuuuaaguuuaaugagu

SEQ ID NO: 280489 - RNA, 13 nt, Human adenovirus B (HAdV-B)
ugggaauggugca

SEQ ID NO: 280490 - RNA, 15 nt, Human adenovirus B (HAdV-B)
ugggaugcaaaugca

SEQ ID NO: 280491 - RNA, 16 nt, Human adenovirus B (HAdV-B)
ugggauuugcauaugc

SEQ ID NO: 280492 - RNA, 16 nt, Human adenovirus B (HAdV-B)
ugggcauaagauucuu

SEQ ID NO: 280493 - RNA, 19 nt, Human adenovirus B (HAdV-B)
ugggccaaaaggacaagua

SEQ ID NO: 280494 - RNA, 22 nt, Human adenovirus B (HAdV-B)
uggggcccauacuagucuugcu

SEQ ID NO: 280495 - RNA, 20 nt, Human adenovirus B (HAdV-B)
ugggggcgagagaugccauc

SEQ ID NO: 280496 - RNA, 12 nt, Human adenovirus B (HAdV-B)
ugguacacuguc

SEQ ID NO: 280497 - RNA, 13 nt, Human adenovirus B (HAdV-B)
uggugaacaccaa

SEQ ID NO: 280498 - RNA, 21 nt, Human adenovirus B (HAdV-B)
ugguggagaauauaugacaau

SEQ ID NO: 280499 - RNA, 16 nt, Human adenovirus B (HAdV-B)
ugguucgcuagugaau

SEQ ID NO: 280500 - RNA, 18 nt, Human adenovirus B (HAdV-B)
ugguuguacuugaacuau

SEQ ID NO: 280501 - RNA, 17 nt, Human adenovirus B (HAdV-B)
ugguuuccacuaccaca

SEQ ID NO: 280502 - RNA, 23 nt, Human adenovirus B (HAdV-B)
ugguuuuagauuccacauuccaa

SEQ ID NO: 280503 - RNA, 20 nt, Human adenovirus B (HAdV-B)
uguaaaaaaauaaagugaug

SEQ ID NO: 280504 - RNA, 14 nt, Human adenovirus B (HAdV-B)
uguaauaugaugau

SEQ ID NO: 280505 - RNA, 13 nt, Human adenovirus B (HAdV-B)
uguacugcacugu

SEQ ID NO: 280506 - RNA, 19 nt, Human adenovirus B (HAdV-B)
uguacugccaucuaccacu

SEQ ID NO: 280507 - RNA, 23 nt, Human adenovirus B (HAdV-B)
uguagagacgucaauggcuugca

SEQ ID NO: 280508 - RNA, 23 nt, Human adenovirus B (HAdV-B)
uguauaggagcauuugcuuccua

SEQ ID NO: 280509 - RNA, 19 nt, Human adenovirus B (HAdV-B)
uguauaugugucauuacac

SEQ ID NO: 280510 - RNA, 16 nt, Human adenovirus B (HAdV-B)
ugucacuccacagcuu

SEQ ID NO: 280511 - RNA, 18 nt, Human adenovirus B (HAdV-B)
ugucaggaagcaacucca

SEQ ID NO: 280512 - RNA, 16 nt, Human adenovirus B (HAdV-B)
ugucuaccccuaugaa

SEQ ID NO: 280513 - RNA, 14 nt, Human adenovirus B (HAdV-B)
ugucuuucuuccca

SEQ ID NO: 280514 - RNA, 15 nt, Human adenovirus B (HAdV-B)
ugugauacuaugacu

SEQ ID NO: 280515 - RNA, 16 nt, Human adenovirus B (HAdV-B)
ugugauacuaugacua

SEQ ID NO: 280516 - RNA, 19 nt, Human adenovirus B (HAdV-B)
ugugauuauucuuugcuac

SEQ ID NO: 280517 - RNA, 16 nt, Human adenovirus B (HAdV-B)
ugugccauuguaaaua

SEQ ID NO: 280518 - RNA, 15 nt, Human adenovirus B (HAdV-B)
ugugcgcgaguuugc

SEQ ID NO: 280519 - RNA, 17 nt, Human adenovirus B (HAdV-B)
uguggaguuaucaaccc

SEQ ID NO: 280520 - RNA, 16 nt, Human adenovirus B (HAdV-B)
ugugguuguacuugaa

SEQ ID NO: 280521 - RNA, 17 nt, Human adenovirus B (HAdV-B)
uguguaguaacaaguuc

SEQ ID NO: 280522 - RNA, 21 nt, Human adenovirus B (HAdV-B)
uguuaacuucaccuuuccuac

SEQ ID NO: 280523 - RNA, 19 nt, Human adenovirus B (HAdV-B)
uguucugcaagagcuuccu

SEQ ID NO: 280524 - RNA, 22 nt, Human adenovirus B (HAdV-B)
uguugauuuaaaaucaaguguu

SEQ ID NO: 280525 - RNA, 17 nt, Human adenovirus B (HAdV-B)
uguuuaagaaugguggu

SEQ ID NO: 280526 - RNA, 19 nt, Human adenovirus B (HAdV-B)
uguuuacaaaccgguugag

SEQ ID NO: 280527 - RNA, 19 nt, Human adenovirus B (HAdV-B)
uguuuuuucugucuugcag

SEQ ID NO: 280528 - RNA, 14 nt, Human adenovirus B (HAdV-B)
uuaaaaauuuuggc

SEQ ID NO: 280529 - RNA, 18 nt, Human adenovirus B (HAdV-B)
uuaaaaauuuuggcucaa

SEQ ID NO: 280530 - RNA, 22 nt, Human adenovirus B (HAdV-B)
uuaaagaagaacuuagagccaa

SEQ ID NO: 280531 - RNA, 18 nt, Human adenovirus B (HAdV-B)
uuaaagaccagaacuucc

SEQ ID NO: 280532 - RNA, 13 nt, Human adenovirus B (HAdV-B)
uuaacuugcauga

SEQ ID NO: 280533 - RNA, 15 nt, Human adenovirus B (HAdV-B)
uuaaggggacugccc

SEQ ID NO: 280534 - RNA, 22 nt, Human adenovirus B (HAdV-B)
uuaaggggacugccccauggca

SEQ ID NO: 280535 - RNA, 14 nt, Human adenovirus B (HAdV-B)
uuaauguuugcgcu

SEQ ID NO: 280536 - RNA, 15 nt, Human adenovirus B (HAdV-B)
uuaauuugggccauc

SEQ ID NO: 280537 - RNA, 20 nt, Human adenovirus B (HAdV-B)
uuacaagaaacucugccuga

SEQ ID NO: 280538 - RNA, 14 nt, Human adenovirus B (HAdV-B)
uuacaucucucaua

SEQ ID NO: 280539 - RNA, 19 nt, Human adenovirus B (HAdV-B)
uuagaaaaugcaaauucca

SEQ ID NO: 280540 - RNA, 21 nt, Human adenovirus B (HAdV-B)
uuagagccaagggcaugucaa

SEQ ID NO: 280541 - RNA, 16 nt, Human adenovirus B (HAdV-B)
uuagcaaaguuuacag

SEQ ID NO: 280542 - RNA, 19 nt, Human adenovirus B (HAdV-B)
uuagccaugaugcuuccau

SEQ ID NO: 280543 - RNA, 17 nt, Human adenovirus B (HAdV-B)
uuagugguguuguggua

SEQ ID NO: 280544 - RNA, 20 nt, Human adenovirus B (HAdV-B)
uuauacagccaugguuucca

SEQ ID NO: 280545 - RNA, 23 nt, Human adenovirus B (HAdV-B)
uuauacgaauacaauaugauguc

SEQ ID NO: 280546 - RNA, 12 nt, Human adenovirus B (HAdV-B)
uuaucaccaaac

SEQ ID NO: 280547 - RNA, 16 nt, Human adenovirus B (HAdV-B)
uuaugauuaaguggag

SEQ ID NO: 280548 - RNA, 21 nt, Human adenovirus B (HAdV-B)
uuaugucuauguugugccacu

SEQ ID NO: 280549 - RNA, 22 nt, Human adenovirus B (HAdV-B)
aagguuauauuggguugcauga

SEQ ID NO: 280550 - RNA, 17 nt, Human adenovirus B (HAdV-B)
aagucccgcucccacca

SEQ ID NO: 280551 - RNA, 17 nt, Human adenovirus B (HAdV-B)
aagugauguuuauugaa

SEQ ID NO: 280552 - RNA, 18 nt, Human adenovirus B (HAdV-B)
aaguggaauuagccauga

SEQ ID NO: 280553 - RNA, 20 nt, Human adenovirus B (HAdV-B)
aauaaaaaaaaaaaaauaca

SEQ ID NO: 280554 - RNA, 23 nt, Human adenovirus B (HAdV-B)
aauaaaaaaaaaacucaccaagg

SEQ ID NO: 280555 - RNA, 21 nt, Human adenovirus B (HAdV-B)
aauaaaagaaaaauuugccaa

SEQ ID NO: 280556 - RNA, 12 nt, Human adenovirus B (HAdV-B)
aauaaacaucac

SEQ ID NO: 280557 - RNA, 13 nt, Human adenovirus B (HAdV-B)
aauaaguguucca

SEQ ID NO: 280558 - RNA, 17 nt, Human adenovirus B (HAdV-B)
aauaaguguuccauauc

SEQ ID NO: 280559 - RNA, 15 nt, Human adenovirus B (HAdV-B)
aauacaaggaagaaa

SEQ ID NO: 280560 - RNA, 13 nt, Human adenovirus B (HAdV-B)
aauaccuuaucca

SEQ ID NO: 280561 - RNA, 13 nt, Human adenovirus B (HAdV-B)
aauacuacuuuca

SEQ ID NO: 280562 - RNA, 22 nt, Human adenovirus B (HAdV-B)
aauacuacuuucaaaaccggag

SEQ ID NO: 280563 - RNA, 13 nt, Human adenovirus B (HAdV-B)
aauauaugacaau

SEQ ID NO: 280564 - RNA, 23 nt, Human adenovirus B (HAdV-B)
aauaugcauguaagggaaaugau

SEQ ID NO: 280565 - RNA, 16 nt, Human adenovirus B (HAdV-B)
aauaugcuuauuccaa

SEQ ID NO: 280566 - RNA, 12 nt, Human adenovirus B (HAdV-B)
aauauguuaacu

SEQ ID NO: 280567 - RNA, 17 nt, Human adenovirus B (HAdV-B)
aauauguuaacuguuca

SEQ ID NO: 280568 - RNA, 16 nt, Human adenovirus B (HAdV-B)
aauauuugugugacag

SEQ ID NO: 280569 - RNA, 18 nt, Human adenovirus B (HAdV-B)
aaucaaguaccaucugaa

SEQ ID NO: 280570 - RNA, 23 nt, Human adenovirus B (HAdV-B)
aaucgcauuucuuuugaucuagc

SEQ ID NO: 280571 - RNA, 23 nt, Human adenovirus B (HAdV-B)
uucccuacuaauacuacuuucaa

SEQ ID NO: 280572 - RNA, 23 nt, Human adenovirus B (HAdV-B)
uucccucuccucuccugcuugaa

SEQ ID NO: 280573 - RNA, 23 nt, Human adenovirus B (HAdV-B)
uucuauugcuucccuacgcuguc

SEQ ID NO: 280574 - RNA, 17 nt, Human adenovirus B (HAdV-B)
uucucuagaaacuuuua

SEQ ID NO: 280575 - RNA, 16 nt, Human adenovirus B (HAdV-B)
uucucugauguaguaa

SEQ ID NO: 280576 - RNA, 23 nt, Human adenovirus B (HAdV-B)
uucugaaaugugcgaucuggcca

SEQ ID NO: 280577 - RNA, 13 nt, Human adenovirus B (HAdV-B)
uucugcaagagcu

SEQ ID NO: 280578 - RNA, 20 nt, Human adenovirus B (HAdV-B)
uucugcucgcucacaccuca

SEQ ID NO: 280579 - RNA, 12 nt, Human adenovirus B (HAdV-B)
uucuuacuuuaa

SEQ ID NO: 280580 - RNA, 12 nt, Human adenovirus B (HAdV-B)
uucuuagacuca

SEQ ID NO: 280581 - RNA, 13 nt, Human adenovirus B (HAdV-B)
uucuuagacucau

SEQ ID NO: 280582 - RNA, 18 nt, Human adenovirus B (HAdV-B)
uucuuagagauggaagac

SEQ ID NO: 280583 - RNA, 16 nt, Human adenovirus B (HAdV-B)
uucuucaccauacuca

SEQ ID NO: 280584 - RNA, 20 nt, Human adenovirus B (HAdV-B)
uucuugaccacgguggugca

SEQ ID NO: 280585 - RNA, 18 nt, Human adenovirus B (HAdV-B)
uugaaaggauaggcaguc

SEQ ID NO: 280586 - RNA, 23 nt, Human adenovirus B (HAdV-B)
uugaaaggauaggcagucgugcu

SEQ ID NO: 280587 - RNA, 15 nt, Human adenovirus B (HAdV-B)
uugaauucgggaauc

SEQ ID NO: 280588 - RNA, 14 nt, Human adenovirus B (HAdV-B)
uugacgucuuguau

SEQ ID NO: 280589 - RNA, 21 nt, Human adenovirus B (HAdV-B)
uugagcugggaugggugcauu

SEQ ID NO: 280590 - RNA, 22 nt, Human adenovirus B (HAdV-B)
uugagcugggaugggugcauuc

SEQ ID NO: 280591 - RNA, 20 nt, Human adenovirus B (HAdV-B)
uugcaaauagcagcugcaac

SEQ ID NO: 280592 - RNA, 20 nt, Human adenovirus B (HAdV-B)
uugcaccucuggggcaucuc

SEQ ID NO: 280593 - RNA, 12 nt, Human adenovirus B (HAdV-B)
uugcagcacuga

SEQ ID NO: 280594 - RNA, 21 nt, Human adenovirus B (HAdV-B)
uugcaggagaaauauucacug

SEQ ID NO: 280595 - RNA, 13 nt, Human adenovirus B (HAdV-B)
uugccauucucaa

SEQ ID NO: 280596 - RNA, 14 nt, Human adenovirus B (HAdV-B)
uugcgcuacuuuca

SEQ ID NO: 280597 - RNA, 17 nt, Human adenovirus B (HAdV-B)
uugcucagaaauuugcu

SEQ ID NO: 280598 - RNA, 13 nt, Human adenovirus B (HAdV-B)
uugcuggagccaa

SEQ ID NO: 280599 - RNA, 15 nt, Human adenovirus B (HAdV-B)
uugcuucuauugcuu

SEQ ID NO: 280600 - RNA, 14 nt, Human adenovirus B (HAdV-B)
uugcuucuugcaug

SEQ ID NO: 280601 - RNA, 18 nt, Human adenovirus B (HAdV-B)
uugcuuuuguuacuugca

SEQ ID NO: 280602 - RNA, 16 nt, Human adenovirus B (HAdV-B)
uuggaaaaaaacguau

SEQ ID NO: 280603 - RNA, 19 nt, Human adenovirus B (HAdV-B)
uuggaaccggguucugcca

SEQ ID NO: 280604 - RNA, 20 nt, Human adenovirus B (HAdV-B)
uuggaaccggguucugccaa

SEQ ID NO: 280605 - RNA, 14 nt, Human adenovirus B (HAdV-B)
uuggacccaggcca

SEQ ID NO: 280606 - RNA, 22 nt, Human adenovirus B (HAdV-B)
uuggcucuaaguucuucuuuaa

SEQ ID NO: 280607 - RNA, 16 nt, Human adenovirus B (HAdV-B)
uugggagguggccauu

SEQ ID NO: 280608 - RNA, 18 nt, Human adenovirus B (HAdV-B)
uugggagguggccauuaa

SEQ ID NO: 280609 - RNA, 16 nt, Human adenovirus B (HAdV-B)
uugggccauuuuggaa

SEQ ID NO: 280610 - RNA, 17 nt, Human adenovirus B (HAdV-B)
uuggguugcaugauuaa

SEQ ID NO: 280611 - RNA, 14 nt, Human adenovirus B (HAdV-B)
uuguacugcacugu

SEQ ID NO: 280612 - RNA, 12 nt, Human adenovirus B (HAdV-B)
uuguacuugaac

SEQ ID NO: 280613 - RNA, 23 nt, Human adenovirus B (HAdV-B)
uuguagugcuaggaauucuugcg

SEQ ID NO: 280614 - RNA, 20 nt, Human adenovirus B (HAdV-B)
uugucacugccgcucaugga

SEQ ID NO: 280615 - RNA, 20 nt, Human adenovirus B (HAdV-B)
uuguccugagucaggguaga

SEQ ID NO: 280616 - RNA, 22 nt, Human adenovirus B (HAdV-B)
uugugauacuaugacuaugcau

SEQ ID NO: 280617 - RNA, 16 nt, Human adenovirus B (HAdV-B)
uuuaauguuugcgcua

SEQ ID NO: 280618 - RNA, 14 nt, Human adenovirus B (HAdV-B)
uuuacaaaaccaug

SEQ ID NO: 280619 - RNA, 17 nt, Human adenovirus B (HAdV-B)
uuuacuguucugcaaga

SEQ ID NO: 280620 - RNA, 20 nt, Human adenovirus B (HAdV-B)
uuuagauuccacauuccaaa

SEQ ID NO: 280621 - RNA, 17 nt, Human adenovirus B (HAdV-B)
uuuauuaucugugucua

SEQ ID NO: 280622 - RNA, 12 nt, Human adenovirus B (HAdV-B)
uuuauugaacac

SEQ ID NO: 280623 - RNA, 15 nt, Human adenovirus B (HAdV-B)
uuuauuuccccaaau

SEQ ID NO: 280624 - RNA, 20 nt, Human adenovirus B (HAdV-B)
uuuccacuaccacauuccuu

SEQ ID NO: 280625 - RNA, 21 nt, Human adenovirus B (HAdV-B)
uuuccagaagcauuuucccua

SEQ ID NO: 280626 - RNA, 21 nt, Human adenovirus B (HAdV-B)
uuuccccaaauggcuucacac

SEQ ID NO: 280627 - RNA, 19 nt, Human adenovirus B (HAdV-B)
uuucucccagcagcaccuc

SEQ ID NO: 280628 - RNA, 21 nt, Human adenovirus B (HAdV-B)
uuucucccagcagcaccucac

SEQ ID NO: 280629 - RNA, 14 nt, Human adenovirus B (HAdV-B)
uuucuucuucacca

SEQ ID NO: 280630 - RNA, 20 nt, Human adenovirus B (HAdV-B)
uuucuucuucaccauacuca

SEQ ID NO: 280631 - RNA, 13 nt, Human adenovirus B (HAdV-B)
uuugauuacaacu

SEQ ID NO: 280632 - RNA, 14 nt, Human adenovirus B (HAdV-B)
uuugcuaccuauac

SEQ ID NO: 280633 - RNA, 22 nt, Human adenovirus B (HAdV-B)
uuugcuuuuguuacuugcaucu

SEQ ID NO: 280634 - RNA, 21 nt, Human adenovirus B (HAdV-B)
uuuggaaccggguucugccaa

SEQ ID NO: 280635 - RNA, 20 nt, Human adenovirus B (HAdV-B)
uuugggcggggacucaggua

SEQ ID NO: 280636 - RNA, 17 nt, Human adenovirus B (HAdV-B)
uuugucagucgucuucu

SEQ ID NO: 280637 - RNA, 21 nt, Human adenovirus B (HAdV-B)
uuuuaaggggggagucuucag

SEQ ID NO: 280638 - RNA, 19 nt, Human adenovirus B (HAdV-B)
uuuuagauuccacauucca

SEQ ID NO: 280639 - RNA, 16 nt, Human adenovirus B (HAdV-B)
uuuucccuacuaauac

SEQ ID NO: 280640 - RNA, 14 nt, Human adenovirus B (HAdV-B)
uuuugaccaacuua

SEQ ID NO: 280641 - RNA, 17 nt, Human adenovirus B (HAdV-B)
uuuugauuacaacugaa

SEQ ID NO: 280642 - RNA, 22 nt, Human adenovirus B (HAdV-B)
uuuugggaaccuacgauaagcg

SEQ ID NO: 280643 - RNA, 22 nt, Human adenovirus B (HAdV-B)
uuuuuacaagaaacucugccug

SEQ ID NO: 280644 - RNA, 19 nt, Human adenovirus B (HAdV-B)
uaaggcgaauggguauuaa

SEQ ID NO: 280645 - RNA, 22 nt, Human adenovirus B (HAdV-B)
uaaggggacugccccauggcau

SEQ ID NO: 280646 - RNA, 13 nt, Human adenovirus B (HAdV-B)
uaaguucuucacc

SEQ ID NO: 280647 - RNA, 21 nt, Human adenovirus B (HAdV-B)
uaauacuacuuucaaaaccgg

SEQ ID NO: 280648 - RNA, 15 nt, Human adenovirus B (HAdV-B)
uaauagauacucaag

SEQ ID NO: 280649 - RNA, 13 nt, Human adenovirus B (HAdV-B)
uaaucugcaacaa

SEQ ID NO: 280650 - RNA, 18 nt, Human adenovirus B (HAdV-B)
uaaucuguugcaccauaa

SEQ ID NO: 280651 - RNA, 22 nt, Human adenovirus B (HAdV-B)
uaaucuguugcaccauaauuuc

SEQ ID NO: 280652 - RNA, 15 nt, Human adenovirus B (HAdV-B)
uaaugauugcuggaa

SEQ ID NO: 280653 - RNA, 22 nt, Human adenovirus B (HAdV-B)
uaauguguggauuggauuuacc

SEQ ID NO: 280654 - RNA, 21 nt, Human adenovirus B (HAdV-B)
uaauguuugcgcuacuuucac

SEQ ID NO: 280655 - RNA, 14 nt, Human adenovirus B (HAdV-B)
uaauuaauauaauc

SEQ ID NO: 280656 - RNA, 15 nt, Human adenovirus B (HAdV-B)
uaauuacacucucau

SEQ ID NO: 280657 - RNA, 16 nt, Human adenovirus B (HAdV-B)
uaauuacacucucaua

SEQ ID NO: 280658 - RNA, 15 nt, Human adenovirus B (HAdV-B)
uaauucaaaacuaac

SEQ ID NO: 280659 - RNA, 16 nt, Human adenovirus B (HAdV-B)
uaauucaaaacuaaca

SEQ ID NO: 280660 - RNA, 14 nt, Human adenovirus B (HAdV-B)
uacaaaacaugcaa

SEQ ID NO: 280661 - RNA, 15 nt, Human adenovirus B (HAdV-B)
uacaaaacaugcaac

SEQ ID NO: 280662 - RNA, 17 nt, Human adenovirus B (HAdV-B)
uacaaaaucuuacauug

SEQ ID NO: 280663 - RNA, 22 nt, Human adenovirus B (HAdV-B)
uacaaaaucuuacauugauuaa

SEQ ID NO: 280664 - RNA, 19 nt, Human adenovirus B (HAdV-B)
uacaagaacuucuaucacu

SEQ ID NO: 280665 - RNA, 17 nt, Human adenovirus B (HAdV-B)
uacacacaauaacaaaa

SEQ ID NO: 280666 - RNA, 17 nt, Human adenovirus B (HAdV-B)
uacacaccuugcuucac

SEQ ID NO: 280667 - RNA, 20 nt, Human adenovirus B (HAdV-B)
uacaccggauugcagcacug

SEQ ID NO: 280668 - RNA, 14 nt, Human adenovirus B (HAdV-B)
uacagagucucuga

SEQ ID NO: 280669 - RNA, 15 nt, Human adenovirus B (HAdV-B)
uacagagucucugac

SEQ ID NO: 280670 - RNA, 19 nt, Human adenovirus B (HAdV-B)
uacagagucucugacaaag

SEQ ID NO: 280671 - RNA, 20 nt, Human adenovirus B (HAdV-B)
uacagccaugguuuccacua

SEQ ID NO: 280672 - RNA, 23 nt, Human adenovirus B (HAdV-B)
uacaggacaggcgcuuagaaaua

SEQ ID NO: 280673 - RNA, 23 nt, Human adenovirus B (HAdV-B)
uacagugcaguacaagcgcagac

SEQ ID NO: 280674 - RNA, 13 nt, Human adenovirus B (HAdV-B)
uacaucucucaua

SEQ ID NO: 280675 - RNA, 21 nt, Human adenovirus B (HAdV-B)
uacaugagucauuauugaaca

SEQ ID NO: 280676 - RNA, 21 nt, Human adenovirus B (HAdV-B)
uacauugauuaauguuagcaa

SEQ ID NO: 280677 - RNA, 15 nt, Human adenovirus B (HAdV-B)
uaccaauauuuuugc

SEQ ID NO: 280678 - RNA, 18 nt, Human adenovirus B (HAdV-B)
uacccaguugaaaaccac

SEQ ID NO: 280679 - RNA, 17 nt, Human adenovirus B (HAdV-B)
uaccguggaugauuucc

SEQ ID NO: 280680 - RNA, 14 nt, Human adenovirus B (HAdV-B)
uaccuggcaccuac

SEQ ID NO: 280681 - RNA, 21 nt, Human adenovirus B (HAdV-B)
uacgaauacaauaugaugucu

SEQ ID NO: 280682 - RNA, 18 nt, Human adenovirus B (HAdV-B)
uacgagagcgugaugcag

SEQ ID NO: 280683 - RNA, 18 nt, Human adenovirus B (HAdV-B)
uacgcugucucaacccca

SEQ ID NO: 280684 - RNA, 20 nt, Human adenovirus B (HAdV-B)
uacgcugucucaaccccagc

SEQ ID NO: 280685 - RNA, 19 nt, Human adenovirus B (HAdV-B)
uacggacugccgcuucuuc

SEQ ID NO: 280686 - RNA, 14 nt, Human adenovirus B (HAdV-B)
uacguccacuggac

SEQ ID NO: 280687 - RNA, 13 nt, Human adenovirus B (HAdV-B)
uacuaauacuacu

SEQ ID NO: 280688 - RNA, 16 nt, Human adenovirus B (HAdV-B)
uacuaccgucaccucc

SEQ ID NO: 280689 - RNA, 20 nt, Human adenovirus B (HAdV-B)
uacuagucucgcaacucuga

SEQ ID NO: 280690 - RNA, 17 nt, Human adenovirus B (HAdV-B)
uacucauuugugcauuu

SEQ ID NO: 280691 - RNA, 17 nt, Human adenovirus B (HAdV-B)
uacugcgcucugagaag

SEQ ID NO: 280692 - RNA, 16 nt, Human adenovirus B (HAdV-B)
uacuucgaacucccca

SEQ ID NO: 280693 - RNA, 15 nt, Human adenovirus B (HAdV-B)
uacuugaacuaucac

SEQ ID NO: 280694 - RNA, 15 nt, Human adenovirus B (HAdV-B)
uacuugcaucugcgu

SEQ ID NO: 280695 - RNA, 22 nt, Human adenovirus B (HAdV-B)
uacuugcaucugcguauguagc

SEQ ID NO: 280696 - RNA, 22 nt, Human adenovirus B (HAdV-B)
uacuugcucgcacauagucaua

SEQ ID NO: 280697 - RNA, 20 nt, Human adenovirus B (HAdV-B)
uacuuggguugccacuugaa

SEQ ID NO: 280698 - RNA, 19 nt, Human adenovirus B (HAdV-B)
uacuuuaaaggggauguca

SEQ ID NO: 280699 - RNA, 17 nt, Human adenovirus B (HAdV-B)
uacuuucaaaaccggag

SEQ ID NO: 280700 - RNA, 22 nt, Human adenovirus B (HAdV-B)
uacuuucgcuuuuggaaccggg

SEQ ID NO: 280701 - RNA, 13 nt, Human adenovirus B (HAdV-B)
uagaaaaugcaaa

SEQ ID NO: 280702 - RNA, 18 nt, Human adenovirus B (HAdV-B)
uagaaaaugcaaauucca

SEQ ID NO: 280703 - RNA, 13 nt, Human adenovirus B (HAdV-B)
uagaaauuacuug

SEQ ID NO: 280704 - RNA, 19 nt, Human adenovirus B (HAdV-B)
uagaaauuucuucuucacc

SEQ ID NO: 280705 - RNA, 22 nt, Human adenovirus B (HAdV-B)
uagaaauuucuucuucaccaua

SEQ ID NO: 280706 - RNA, 22 nt, Human adenovirus B (HAdV-B)
uagaaguaggcugauugccaca

SEQ ID NO: 280707 - RNA, 24 nt, Human adenovirus B (HAdV-B)
uagaaguaggcugauugccacaga

SEQ ID NO: 280708 - RNA, 17 nt, Human adenovirus B (HAdV-B)
uagaauuaucauugaaa

SEQ ID NO: 280709 - RNA, 20 nt, Human adenovirus B (HAdV-B)
uagacagcaaccccaggcca

SEQ ID NO: 280710 - RNA, 18 nt, Human adenovirus B (HAdV-B)
uagaccaccgaucucuau

SEQ ID NO: 280711 - RNA, 22 nt, Human adenovirus B (HAdV-B)
uagacucaucuaaaaccaugca

SEQ ID NO: 280712 - RNA, 10 nt, Human adenovirus B (HAdV-B)
uagacucucg

SEQ ID NO: 280713 - RNA, 22 nt, Human adenovirus B (HAdV-B)
uagagauggaagacaucaauuu

SEQ ID NO: 280714 - RNA, 18 nt, Human adenovirus B (HAdV-B)
uagauacaugggcauuag

SEQ ID NO: 280715 - RNA, 18 nt, Human adenovirus B (HAdV-B)
uagcagagguuugcaccu

SEQ ID NO: 280716 - RNA, 19 nt, Human adenovirus B (HAdV-B)
uagccacagcaaccccaga

SEQ ID NO: 280717 - RNA, 20 nt, Human adenovirus B (HAdV-B)
uagcgcuaauagauuacgaa

SEQ ID NO: 280718 - RNA, 22 nt, Human adenovirus B (HAdV-B)
uagcuccauugaagggauucau

SEQ ID NO: 280719 - RNA, 22 nt, Human adenovirus B (HAdV-B)
uagcuuugaggccugauaaaca

SEQ ID NO: 280720 - RNA, 22 nt, Human adenovirus B (HAdV-B)
uaggaagacuaggcaacuguua

SEQ ID NO: 280721 - RNA, 21 nt, Human adenovirus B (HAdV-B)
uaggacauaauuacacucuca

SEQ ID NO: 280722 - RNA, 16 nt, Human adenovirus B (HAdV-B)
uaguaacaacacuuuc

SEQ ID NO: 280723 - RNA, 21 nt, Human adenovirus B (HAdV-B)
uagucauauaguucaugugau

SEQ ID NO: 280724 - RNA, 13 nt, Human adenovirus B (HAdV-B)
uaguuacuucaac

SEQ ID NO: 280725 - RNA, 22 nt, Human adenovirus B (HAdV-B)
uauacagccaugguuuccacua

SEQ ID NO: 280726 - RNA, 20 nt, Human adenovirus B (HAdV-B)
uauacgaauacaauaugaug

SEQ ID NO: 280727 - RNA, 13 nt, Human adenovirus B (HAdV-B)
uauaggagcauuu

SEQ ID NO: 280728 - RNA, 17 nt, Human adenovirus B (HAdV-B)
uauaggagcauuugcuu

SEQ ID NO: 280729 - RNA, 19 nt, Human adenovirus B (HAdV-B)
uauaguacuccaccagaac

SEQ ID NO: 280730 - RNA, 16 nt, Human adenovirus B (HAdV-B)
uauaguucaugugaug

SEQ ID NO: 280731 - RNA, 18 nt, Human adenovirus B (HAdV-B)
uauauuggguugcaugau

SEQ ID NO: 280732 - RNA, 15 nt, Human adenovirus B (HAdV-B)
uaucaaggcucugca

SEQ ID NO: 280733 - RNA, 22 nt, Human adenovirus B (HAdV-B)
uaucaccaaacugcuuagccag

SEQ ID NO: 280734 - RNA, 17 nt, Human adenovirus B (HAdV-B)
uaucccgauggauuuuu

SEQ ID NO: 280735 - RNA, 14 nt, Human adenovirus B (HAdV-B)
uauccguguuuacu

SEQ ID NO: 280736 - RNA, 16 nt, Human adenovirus B (HAdV-B)
uauccguguuuacuua

SEQ ID NO: 280737 - RNA, 18 nt, Human adenovirus B (HAdV-B)
uauccguguuuacuuaag

SEQ ID NO: 280738 - RNA, 19 nt, Human adenovirus B (HAdV-B)
uaugaagaugaaagcaccu

SEQ ID NO: 280739 - RNA, 19 nt, Human adenovirus B (HAdV-B)
uaugacaauggaugguuua

SEQ ID NO: 280740 - RNA, 18 nt, Human adenovirus B (HAdV-B)
uaugagaagaugcaugca

SEQ ID NO: 280741 - RNA, 22 nt, Human adenovirus B (HAdV-B)
uaugagagaguuuuuacaacua

SEQ ID NO: 280742 - RNA, 16 nt, Human adenovirus B (HAdV-B)
uaugauuaaguggagu

SEQ ID NO: 280743 - RNA, 14 nt, Human adenovirus B (HAdV-B)
uaugcacuuuuugc

SEQ ID NO: 280744 - RNA, 19 nt, Human adenovirus B (HAdV-B)
uaugcccuagaccaccgau

SEQ ID NO: 280745 - RNA, 20 nt, Human adenovirus B (HAdV-B)
uaugcccuagaccaccgauc

SEQ ID NO: 280746 - RNA, 12 nt, Human adenovirus B (HAdV-B)
ucaaagaugccu

SEQ ID NO: 280747 - RNA, 14 nt, Human adenovirus B (HAdV-B)
ucaaccccaaaugg

SEQ ID NO: 280748 - RNA, 18 nt, Human adenovirus B (HAdV-B)
ucaaccccagcugccuau

SEQ ID NO: 280749 - RNA, 15 nt, Human adenovirus B (HAdV-B)
ucaacccugucuacc

SEQ ID NO: 280750 - RNA, 16 nt, Human adenovirus B (HAdV-B)
ucaagguggucauguc

SEQ ID NO: 280751 - RNA, 14 nt, Human adenovirus B (HAdV-B)
ucaaucugggaaau

SEQ ID NO: 280752 - RNA, 12 nt, Human adenovirus B (HAdV-B)
ucaaugcauggc

SEQ ID NO: 280753 - RNA, 17 nt, Human adenovirus B (HAdV-B)
ucaauggcuugcagggu

SEQ ID NO: 280754 - RNA, 17 nt, Human adenovirus B (HAdV-B)
ucaaugggaaaagcagu

SEQ ID NO: 280755 - RNA, 21 nt, Human adenovirus B (HAdV-B)
ucaaugggaaaagcagugcga

SEQ ID NO: 280756 - RNA, 17 nt, Human adenovirus B (HAdV-B)
ucaauugauguugccau

SEQ ID NO: 280757 - RNA, 14 nt, Human adenovirus B (HAdV-B)
ucaauugcucagaa

SEQ ID NO: 280758 - RNA, 19 nt, Human adenovirus B (HAdV-B)
ucaauuuuucauccuuggc

SEQ ID NO: 280759 - RNA, 14 nt, Human adenovirus B (HAdV-B)
ucacacaaagccca

SEQ ID NO: 280760 - RNA, 15 nt, Human adenovirus B (HAdV-B)
ucacaccucacugua

SEQ ID NO: 280761 - RNA, 18 nt, Human adenovirus B (HAdV-B)
ucacaguccaacugcugc

SEQ ID NO: 280762 - RNA, 14 nt, Human adenovirus B (HAdV-B)
ucaccaaugcaaaa

SEQ ID NO: 280763 - RNA, 18 nt, Human adenovirus B (HAdV-B)
ucaccauacucauuugug

SEQ ID NO: 280764 - RNA, 23 nt, Human adenovirus B (HAdV-B)
ucaccauacucauuugugcauuu

SEQ ID NO: 280765 - RNA, 12 nt, Human adenovirus B (HAdV-B)
ucaccuuuccua

SEQ ID NO: 280766 - RNA, 16 nt, Human adenovirus B (HAdV-B)
ucaccuuuccuacuca

SEQ ID NO: 280767 - RNA, 23 nt, Human adenovirus B (HAdV-B)
ucacuacaagaacuucuaucacu

SEQ ID NO: 280768 - RNA, 18 nt, Human adenovirus B (HAdV-B)
ucacuagcuguguaguaa

SEQ ID NO: 280769 - RNA, 19 nt, Human adenovirus B (HAdV-B)
ucacuucagaggucaucug

SEQ ID NO: 280770 - RNA, 16 nt, Human adenovirus B (HAdV-B)
ucagaaugaccacagc

SEQ ID NO: 280771 - RNA, 23 nt, Human adenovirus B (HAdV-B)
ucagaaugacccgcaggcaguga

SEQ ID NO: 280772 - RNA, 18 nt, Human adenovirus B (HAdV-B)
ucagaauguuaugggauc

SEQ ID NO: 280773 - RNA, 21 nt, Human adenovirus B (HAdV-B)
ucagaugguacuugauuucca

SEQ ID NO: 280774 - RNA, 16 nt, Human adenovirus B (HAdV-B)
ucagcauugucacugc

SEQ ID NO: 280775 - RNA, 16 nt, Human adenovirus B (HAdV-B)
ucaggaagcaacucca

SEQ ID NO: 280776 - RNA, 21 nt, Human adenovirus B (HAdV-B)
ucaggcagaguuucuuguaaa

SEQ ID NO: 280777 - RNA, 15 nt, Human adenovirus B (HAdV-B)
ucagugacuccuuca

SEQ ID NO: 280778 - RNA, 22 nt, Human adenovirus B (HAdV-B)
ucauaacaaggucgcagugcau

SEQ ID NO: 280779 - RNA, 23 nt, Human adenovirus B (HAdV-B)
ucauccauggagguuugggccau

SEQ ID NO: 280780 - RNA, 22 nt, Human adenovirus B (HAdV-B)
ucaugagaagguccuggccauc

SEQ ID NO: 280781 - RNA, 12 nt, Human adenovirus B (HAdV-B)
ucaugagcaaac

SEQ ID NO: 280782 - RNA, 22 nt, Human adenovirus B (HAdV-B)
ucauggaagcuguagugccuuc

SEQ ID NO: 280783 - RNA, 14 nt, Human adenovirus B (HAdV-B)
ucauguugcgcuuc

SEQ ID NO: 280784 - RNA, 13 nt, Human adenovirus B (HAdV-B)
ucauugaguucau

SEQ ID NO: 280785 - RNA, 16 nt, Human adenovirus B (HAdV-B)
ucauuguaaucagcag

SEQ ID NO: 280786 - RNA, 18 nt, Human adenovirus B (HAdV-B)
ucauuucuugcuugcuau

SEQ ID NO: 280787 - RNA, 18 nt, Human adenovirus B (HAdV-B)
uccaaaggugaagaacuu

SEQ ID NO: 280788 - RNA, 20 nt, Human adenovirus B (HAdV-B)
uccaacagaaaaccagcagc

SEQ ID NO: 280789 - RNA, 20 nt, Human adenovirus B (HAdV-B)
uccaacuuauagacuggauc

SEQ ID NO: 280790 - RNA, 21 nt, Human adenovirus B (HAdV-B)
uccaacuuauagacuggaucc

SEQ ID NO: 280791 - RNA, 21 nt, Human adenovirus B (HAdV-B)
uccaagacaauaaguguucca

SEQ ID NO: 280792 - RNA, 13 nt, Human adenovirus B (HAdV-B)
uccaauccaaccu

SEQ ID NO: 280793 - RNA, 18 nt, Human adenovirus B (HAdV-B)
uccacaguagaucccaua

SEQ ID NO: 280794 - RNA, 19 nt, Human adenovirus B (HAdV-B)
uccacauuccaaacaguuu

SEQ ID NO: 280795 - RNA, 17 nt, Human adenovirus B (HAdV-B)
uccacccucggaacuga

SEQ ID NO: 280796 - RNA, 13 nt, Human adenovirus B (HAdV-B)
uccacuaccacau

SEQ ID NO: 280797 - RNA, 22 nt, Human adenovirus B (HAdV-B)
uccagcugggccaaaaggacaa

SEQ ID NO: 280798 - RNA, 22 nt, Human adenovirus B (HAdV-B)
uccaggacucuguuaacuucac

SEQ ID NO: 280799 - RNA, 16 nt, Human adenovirus B (HAdV-B)
uccauccacaguagau

SEQ ID NO: 280800 - RNA, 12 nt, Human adenovirus B (HAdV-B)
uccaucuacugc

SEQ ID NO: 280801 - RNA, 15 nt, Human adenovirus B (HAdV-B)
uccauugaagggauu

SEQ ID NO: 280802 - RNA, 23 nt, Human adenovirus B (HAdV-B)
uccauugcuuauugcuugugcgc

SEQ ID NO: 280803 - RNA, 13 nt, Human adenovirus B (HAdV-B)
ucccaacaccccu

SEQ ID NO: 280804 - RNA, 13 nt, Human adenovirus B (HAdV-B)
ucccaaugcacau

SEQ ID NO: 280805 - RNA, 14 nt, Human adenovirus B (HAdV-B)
ucccaaugcacaug

SEQ ID NO: 280806 - RNA, 19 nt, Human adenovirus B (HAdV-B)
ucccaaugcacaugaucau

SEQ ID NO: 280807 - RNA, 21 nt, Human adenovirus B (HAdV-B)
ucccagcagcaccucacuucc

SEQ ID NO: 280808 - RNA, 22 nt, Human adenovirus B (HAdV-B)
ucccagcagcaccucacuuccc

SEQ ID NO: 280809 - RNA, 12 nt, Human adenovirus B (HAdV-B)
ucccauuuaaca

SEQ ID NO: 280810 - RNA, 15 nt, Human adenovirus B (HAdV-B)
ucccgauggauuuuu

SEQ ID NO: 280811 - RNA, 16 nt, Human adenovirus B (HAdV-B)
ucccgcucccaccacu

SEQ ID NO: 280812 - RNA, 23 nt, Human adenovirus B (HAdV-B)
ucccucuaggacauaauuacacu

SEQ ID NO: 280813 - RNA, 21 nt, Human adenovirus B (HAdV-B)
ucccugggauauguuucuaaa

SEQ ID NO: 280814 - RNA, 16 nt, Human adenovirus B (HAdV-B)
uccuagcaaggacaac

SEQ ID NO: 280815 - RNA, 23 nt, Human adenovirus B (HAdV-B)
uccuaugcacuuuuugcuuuugu

SEQ ID NO: 280816 - RNA, 16 nt, Human adenovirus B (HAdV-B)
uccucaaagaugccua

SEQ ID NO: 280817 - RNA, 19 nt, Human adenovirus B (HAdV-B)
uccucacuacaagaacuuc

SEQ ID NO: 280818 - RNA, 21 nt, Human adenovirus B (HAdV-B)
uccugucguccaggacucugu

SEQ ID NO: 280819 - RNA, 22 nt, Human adenovirus B (HAdV-B)
uccuucaacccugucuaccccu

SEQ ID NO: 280820 - RNA, 13 nt, Human adenovirus B (HAdV-B)
ucgaacuccccaa

SEQ ID NO: 280821 - RNA, 12 nt, Human adenovirus B (HAdV-B)
ucgacaucaugc

SEQ ID NO: 280822 - RNA, 17 nt, Human adenovirus B (HAdV-B)
ucgagaaaaaucagaaa

SEQ ID NO: 280823 - RNA, 15 nt, Human adenovirus B (HAdV-B)
ucgcacauagucaua

SEQ ID NO: 280824 - RNA, 19 nt, Human adenovirus B (HAdV-B)
ucgcacauagucauauagu

SEQ ID NO: 280825 - RNA, 20 nt, Human adenovirus B (HAdV-B)
ucgcagacguccugaaacca

SEQ ID NO: 280826 - RNA, 15 nt, Human adenovirus B (HAdV-B)
ucgccccccucugau

SEQ ID NO: 280827 - RNA, 22 nt, Human adenovirus B (HAdV-B)
ucgcggcacuucuuagacucau

SEQ ID NO: 280828 - RNA, 15 nt, Human adenovirus B (HAdV-B)
ucggaacuggcaccu

SEQ ID NO: 280829 - RNA, 15 nt, Human adenovirus B (HAdV-B)
ucguaacguucucca

SEQ ID NO: 280830 - RNA, 18 nt, Human adenovirus B (HAdV-B)
ucgucauuuauugcucuu

SEQ ID NO: 280831 - RNA, 13 nt, Human adenovirus B (HAdV-B)
ucguccagaugag

SEQ ID NO: 280832 - RNA, 22 nt, Human adenovirus B (HAdV-B)
ucguccaggacucuguuaacuu

SEQ ID NO: 280833 - RNA, 15 nt, Human adenovirus B (HAdV-B)
ucuaccccuaugaag

SEQ ID NO: 280834 - RNA, 16 nt, Human adenovirus B (HAdV-B)
ucuacuguggauggaa

SEQ ID NO: 280835 - RNA, 22 nt, Human adenovirus B (HAdV-B)
ucuacuucgaacuccccaagga

SEQ ID NO: 280836 - RNA, 17 nt, Human adenovirus B (HAdV-B)
ucuagaaacuuuuacau

SEQ ID NO: 280837 - RNA, 14 nt, Human adenovirus B (HAdV-B)
ucuaguuguaaaaa

SEQ ID NO: 280838 - RNA, 14 nt, Human adenovirus B (HAdV-B)
ucuauugcuucccu

SEQ ID NO: 280839 - RNA, 17 nt, Human adenovirus B (HAdV-B)
ucucaaccccagcugcc

SEQ ID NO: 280840 - RNA, 19 nt, Human adenovirus B (HAdV-B)
ucucaaccccagcugccua

SEQ ID NO: 280841 - RNA, 17 nt, Human adenovirus B (HAdV-B)
ucucaauugcucagaaa

SEQ ID NO: 280842 - RNA, 16 nt, Human adenovirus B (HAdV-B)
ucucacgcuugccagc

SEQ ID NO: 280843 - RNA, 21 nt, Human adenovirus B (HAdV-B)
ucucacgcuugccagcacggu

SEQ ID NO: 280844 - RNA, 18 nt, Human adenovirus B (HAdV-B)
ucucccagcagcaccuca

SEQ ID NO: 280845 - RNA, 13 nt, Human adenovirus B (HAdV-B)
ucuccuguaccca

SEQ ID NO: 280846 - RNA, 21 nt, Human adenovirus B (HAdV-B)
ucuccuguacccacaaucuuc

SEQ ID NO: 280847 - RNA, 13 nt, Human adenovirus B (HAdV-B)
ucucuagaauuau

SEQ ID NO: 280848 - RNA, 19 nt, Human adenovirus B (HAdV-B)
ucucuagcagcagugucgc

SEQ ID NO: 280849 - RNA, 22 nt, Human adenovirus B (HAdV-B)
ucucugauguaguaaaagguaa

SEQ ID NO: 280850 - RNA, 21 nt, Human adenovirus B (HAdV-B)
accuccaacagaaaaccagca

SEQ ID NO: 280851 - RNA, 22 nt, Human adenovirus B (HAdV-B)
accuccaacagaaaaccagcag

SEQ ID NO: 280852 - RNA, 15 nt, Human adenovirus B (HAdV-B)
accugcuaccaauga

SEQ ID NO: 280853 - RNA, 22 nt, Human adenovirus B (HAdV-B)
accuguggaaaucaaguaccau

SEQ ID NO: 280854 - RNA, 14 nt, Human adenovirus B (HAdV-B)
accuuuagcauuag

SEQ ID NO: 280855 - RNA, 14 nt, Human adenovirus B (HAdV-B)
acgaaccuguggaa

SEQ ID NO: 280856 - RNA, 20 nt, Human adenovirus B (HAdV-B)
acgaacuuggcccccaacga

SEQ ID NO: 280857 - RNA, 21 nt, Human adenovirus B (HAdV-B)
acgacaaaaauuuaccugcau

SEQ ID NO: 280858 - RNA, 13 nt, Human adenovirus B (HAdV-B)
acgagagcgugau

SEQ ID NO: 280859 - RNA, 21 nt, Human adenovirus B (HAdV-B)
acgagagcgugaugcagcagc

SEQ ID NO: 280860 - RNA, 15 nt, Human adenovirus B (HAdV-B)
acgaugggaaucaua

SEQ ID NO: 280861 - RNA, 15 nt, Human adenovirus B (HAdV-B)
acgaugggagcgaaa

SEQ ID NO: 280862 - RNA, 22 nt, Human adenovirus B (HAdV-B)
acgcaaacguucuacccaacau

SEQ ID NO: 280863 - RNA, 23 nt, Human adenovirus B (HAdV-B)
acgcgccuaccgaaaccaaauac

SEQ ID NO: 280864 - RNA, 15 nt, Human adenovirus B (HAdV-B)
acgcgcggccaaaga

SEQ ID NO: 280865 - RNA, 21 nt, Human adenovirus B (HAdV-B)
acgcugaccuaugcuacuuua

SEQ ID NO: 280866 - RNA, 18 nt, Human adenovirus B (HAdV-B)
acgcugaguuacuuucaa

SEQ ID NO: 280867 - RNA, 18 nt, Human adenovirus B (HAdV-B)
acgcugucucaaccccag

SEQ ID NO: 280868 - RNA, 14 nt, Human adenovirus B (HAdV-B)
acggaaacguccaa

SEQ ID NO: 280869 - RNA, 18 nt, Human adenovirus B (HAdV-B)
acggaacccugcaagcca

SEQ ID NO: 280870 - RNA, 14 nt, Human adenovirus B (HAdV-B)
acggaccuuuggac

SEQ ID NO: 280871 - RNA, 20 nt, Human adenovirus B (HAdV-B)
acggaccuuuggacuugagu

SEQ ID NO: 280872 - RNA, 22 nt, Human adenovirus B (HAdV-B)
acggagucuccgguuuuuggag

SEQ ID NO: 280873 - RNA, 19 nt, Human adenovirus B (HAdV-B)
acggaguucuuacuuuaaa

SEQ ID NO: 280874 - RNA, 14 nt, Human adenovirus B (HAdV-B)
acggcggugaugca

SEQ ID NO: 280875 - RNA, 15 nt, Human adenovirus B (HAdV-B)
acggcggugaugcaa

SEQ ID NO: 280876 - RNA, 21 nt, Human adenovirus B (HAdV-B)
acggcuccagcgagcaagagc

SEQ ID NO: 280877 - RNA, 23 nt, Human adenovirus B (HAdV-B)
acggcuccagcgagcaagagcuc

SEQ ID NO: 280878 - RNA, 15 nt, Human adenovirus B (HAdV-B)
acggggacccugcac

SEQ ID NO: 280879 - RNA, 12 nt, Human adenovirus B (HAdV-B)
acgggucuucca

SEQ ID NO: 280880 - RNA, 13 nt, Human adenovirus B (HAdV-B)
acgguaugcccua

SEQ ID NO: 280881 - RNA, 14 nt, Human adenovirus B (HAdV-B)
acguagaugggauc

SEQ ID NO: 280882 - RNA, 18 nt, Human adenovirus B (HAdV-B)
acgucaauggcuugcagg

SEQ ID NO: 280883 - RNA, 13 nt, Human adenovirus B (HAdV-B)
acguccacuggac

SEQ ID NO: 280884 - RNA, 22 nt, Human adenovirus B (HAdV-B)
acuaaggguugcauucacugcu

SEQ ID NO: 280885 - RNA, 19 nt, Human adenovirus B (HAdV-B)
acuaauucaaaacuaacaa

SEQ ID NO: 280886 - RNA, 19 nt, Human adenovirus B (HAdV-B)
acuacaagaacuucuauca

SEQ ID NO: 280887 - RNA, 23 nt, Human adenovirus B (HAdV-B)
acuaccaauauuuuugcuucuau

SEQ ID NO: 280888 - RNA, 15 nt, Human adenovirus B (HAdV-B)
acuacucccugcuau

SEQ ID NO: 280889 - RNA, 11 nt, Human adenovirus B (HAdV-B)
acuagaacuuu

SEQ ID NO: 280890 - RNA, 23 nt, Human adenovirus B (HAdV-B)
acuagacggauuaauauccggaa

SEQ ID NO: 280891 - RNA, 15 nt, Human adenovirus B (HAdV-B)
acuaggcaacuguua

SEQ ID NO: 280892 - RNA, 16 nt, Human adenovirus B (HAdV-B)
acuaggcaacuguuag

SEQ ID NO: 280893 - RNA, 15 nt, Human adenovirus B (HAdV-B)
acuagucuugcuugu

SEQ ID NO: 280894 - RNA, 15 nt, Human adenovirus B (HAdV-B)
acuaugacuaugcau

SEQ ID NO: 280895 - RNA, 18 nt, Human adenovirus B (HAdV-B)
acuaugacuaugcauagu

SEQ ID NO: 280896 - RNA, 16 nt, Human adenovirus B (HAdV-B)
acuaugcauaguguaa

SEQ ID NO: 280897 - RNA, 21 nt, Human adenovirus B (HAdV-B)
acucauugaguucaucuacuu

SEQ ID NO: 280898 - RNA, 17 nt, Human adenovirus B (HAdV-B)
acucauuugugcauuua

SEQ ID NO: 280899 - RNA, 17 nt, Human adenovirus B (HAdV-B)
acuccacccgcaugaau

SEQ ID NO: 280900 - RNA, 19 nt, Human adenovirus B (HAdV-B)
acuccuacugcgccuacau

SEQ ID NO: 280901 - RNA, 19 nt, Human adenovirus B (HAdV-B)
acuccucggacgauuggac

SEQ ID NO: 280902 - RNA, 15 nt, Human adenovirus B (HAdV-B)
acuccuucaacccug

SEQ ID NO: 280903 - RNA, 18 nt, Human adenovirus B (HAdV-B)
acucuuacaaagugcggu

SEQ ID NO: 280904 - RNA, 20 nt, Human adenovirus B (HAdV-B)
acugaauuaagacucuccua

SEQ ID NO: 280905 - RNA, 15 nt, Human adenovirus B (HAdV-B)
acugaccccagauug

SEQ ID NO: 280906 - RNA, 17 nt, Human adenovirus B (HAdV-B)
acuggaucuacguccac

SEQ ID NO: 280907 - RNA, 21 nt, Human adenovirus B (HAdV-B)
acuggaucuacguccacugga

SEQ ID NO: 280908 - RNA, 22 nt, Human adenovirus B (HAdV-B)
acuggaucuacguccacuggac

SEQ ID NO: 280909 - RNA, 18 nt, Human adenovirus B (HAdV-B)
acuggcaccucaguacga

SEQ ID NO: 280910 - RNA, 19 nt, Human adenovirus B (HAdV-B)
acuggcaccucaguacgau

SEQ ID NO: 280911 - RNA, 18 nt, Human adenovirus B (HAdV-B)
acuguuuggaauguggaa

SEQ ID NO: 280912 - RNA, 22 nt, Human adenovirus B (HAdV-B)
acuuagagccaagggcauguca

SEQ ID NO: 280913 - RNA, 13 nt, Human adenovirus B (HAdV-B)
acuucaaugcaug

SEQ ID NO: 280914 - RNA, 18 nt, Human adenovirus B (HAdV-B)
acuucagaggucaucugg

SEQ ID NO: 280915 - RNA, 20 nt, Human adenovirus B (HAdV-B)
acuucgaacuccccaaggau

SEQ ID NO: 280916 - RNA, 19 nt, Human adenovirus B (HAdV-B)
acuucuuagacucaucuaa

SEQ ID NO: 280917 - RNA, 14 nt, Human adenovirus B (HAdV-B)
acuucuugaccacg

SEQ ID NO: 280918 - RNA, 14 nt, Human adenovirus B (HAdV-B)
acuugaaaucagca

SEQ ID NO: 280919 - RNA, 14 nt, Human adenovirus B (HAdV-B)
acuugaacuaucac

SEQ ID NO: 280920 - RNA, 18 nt, Human adenovirus B (HAdV-B)
acuugaggacuuguuaca

SEQ ID NO: 280921 - RNA, 15 nt, Human adenovirus B (HAdV-B)
acuugaguacacgga

SEQ ID NO: 280922 - RNA, 14 nt, Human adenovirus B (HAdV-B)
acuuguuacagggu

SEQ ID NO: 280923 - RNA, 22 nt, Human adenovirus B (HAdV-B)
acuuguuuauuugaaaaucaau

SEQ ID NO: 280924 - RNA, 22 nt, Human adenovirus B (HAdV-B)
aaucucaauugcucagaaauuu

SEQ ID NO: 280925 - RNA, 24 nt, Human adenovirus B (HAdV-B)
aaucucuccccacgcacagcuuua

SEQ ID NO: 280926 - RNA, 23 nt, Human adenovirus B (HAdV-B)
aaucugcaacaaaacaaaaccaa

SEQ ID NO: 280927 - RNA, 22 nt, Human adenovirus B (HAdV-B)
aaucuucaugucuuucuuccca

SEQ ID NO: 280928 - RNA, 14 nt, Human adenovirus B (HAdV-B)
aaucuugaaaucac

SEQ ID NO: 280929 - RNA, 22 nt, Human adenovirus B (HAdV-B)
aaugcaaaaaaggcauauucug

SEQ ID NO: 280930 - RNA, 22 nt, Human adenovirus B (HAdV-B)
aaugcagagccuugauacaugu

SEQ ID NO: 280931 - RNA, 22 nt, Human adenovirus B (HAdV-B)
aaugcuuguuacauaucuggaa

SEQ ID NO: 280932 - RNA, 13 nt, Human adenovirus B (HAdV-B)
aauggacucugac

SEQ ID NO: 280933 - RNA, 22 nt, Human adenovirus B (HAdV-B)
aauggagugguagauuuggcua

SEQ ID NO: 280934 - RNA, 21 nt, Human adenovirus B (HAdV-B)
aauggcuucacacaaagccca

SEQ ID NO: 280935 - RNA, 17 nt, Human adenovirus B (HAdV-B)
aauguugaaaugggcau

SEQ ID NO: 280936 - RNA, 18 nt, Human adenovirus B (HAdV-B)
aauuaugagaagaugcau

SEQ ID NO: 280937 - RNA, 19 nt, Human adenovirus B (HAdV-B)
aauuaugagaagaugcaug

SEQ ID NO: 280938 - RNA, 20 nt, Human adenovirus B (HAdV-B)
aauuaugagaagaugcaugc

SEQ ID NO: 280939 - RNA, 22 nt, Human adenovirus B (HAdV-B)
aauuaugccaagauagcuuuga

SEQ ID NO: 280940 - RNA, 12 nt, Human adenovirus B (HAdV-B)
aauugcucagaa

SEQ ID NO: 280941 - RNA, 10 nt, Human adenovirus B (HAdV-B)
aauuggcucc

SEQ ID NO: 280942 - RNA, 19 nt, Human adenovirus B (HAdV-B)
aauuggguucuucauuguc

SEQ ID NO: 280943 - RNA, 15 nt, Human adenovirus B (HAdV-B)
aauuuccaauccaac

SEQ ID NO: 280944 - RNA, 22 nt, Human adenovirus B (HAdV-B)
aauuucuucuucaccauacuca

SEQ ID NO: 280945 - RNA, 18 nt, Human adenovirus B (HAdV-B)
aauuugcuaucaucacaa

SEQ ID NO: 280946 - RNA, 23 nt, Human adenovirus B (HAdV-B)
aauuuggaccguaugauaacaga

SEQ ID NO: 280947 - RNA, 22 nt, Human adenovirus B (HAdV-B)
aauuuguuuuuucugucuugca

SEQ ID NO: 280948 - RNA, 23 nt, Human adenovirus B (HAdV-B)
aauuuguuuuuucugucuugcag

SEQ ID NO: 280949 - RNA, 12 nt, Human adenovirus B (HAdV-B)
aauuuuggcuca

SEQ ID NO: 280950 - RNA, 20 nt, Human adenovirus B (HAdV-B)
aauuuuucauccuuggcucc

SEQ ID NO: 280951 - RNA, 14 nt, Human adenovirus B (HAdV-B)
acaaaacaaaacca

SEQ ID NO: 280952 - RNA, 19 nt, Human adenovirus B (HAdV-B)
acaaaacaugcaacaucca

SEQ ID NO: 280953 - RNA, 22 nt, Human adenovirus B (HAdV-B)
acaaaacaugcaacauccaaua

SEQ ID NO: 280954 - RNA, 15 nt, Human adenovirus B (HAdV-B)
acaaaaccaugugac

SEQ ID NO: 280955 - RNA, 13 nt, Human adenovirus B (HAdV-B)
acaaaaucuuaca

SEQ ID NO: 280956 - RNA, 21 nt, Human adenovirus B (HAdV-B)
acaaaccgguugagcugggau

SEQ ID NO: 280957 - RNA, 21 nt, Human adenovirus B (HAdV-B)
acaaaggcuucuauuauggaa

SEQ ID NO: 280958 - RNA, 13 nt, Human adenovirus B (HAdV-B)
acaaagugggcau

SEQ ID NO: 280959 - RNA, 18 nt, Human adenovirus B (HAdV-B)
acaaagugggcauaagau

SEQ ID NO: 280960 - RNA, 23 nt, Human adenovirus B (HAdV-B)
acaaccagaagaacgaaacuuuu

SEQ ID NO: 280961 - RNA, 21 nt, Human adenovirus B (HAdV-B)
acaagauuggaauaagcauau

SEQ ID NO: 280962 - RNA, 15 nt, Human adenovirus B (HAdV-B)
acaagugcagcaaca

SEQ ID NO: 280963 - RNA, 19 nt, Human adenovirus B (HAdV-B)
acaaguuccguaaauguag

SEQ ID NO: 280964 - RNA, 17 nt, Human adenovirus B (HAdV-B)
acaauaacaaaaccugg

SEQ ID NO: 280965 - RNA, 18 nt, Human adenovirus B (HAdV-B)
acaauggaugguuuacaa

SEQ ID NO: 280966 - RNA, 16 nt, Human adenovirus B (HAdV-B)
acaauuuccaauccaa

SEQ ID NO: 280967 - RNA, 13 nt, Human adenovirus B (HAdV-B)
acacaagccgcau

SEQ ID NO: 280968 - RNA, 13 nt, Human adenovirus B (HAdV-B)
acaccaaucaugg

SEQ ID NO: 280969 - RNA, 17 nt, Human adenovirus B (HAdV-B)
acaccaaucaugguacc

SEQ ID NO: 280970 - RNA, 14 nt, Human adenovirus B (HAdV-B)
acaccuuaauccca

SEQ ID NO: 280971 - RNA, 19 nt, Human adenovirus B (HAdV-B)
acaccuuagaaaaugcaaa

SEQ ID NO: 280972 - RNA, 21 nt, Human adenovirus B (HAdV-B)
acaccuugcuucacuuucuua

SEQ ID NO: 280973 - RNA, 15 nt, Human adenovirus B (HAdV-B)
acacucucauaggac

SEQ ID NO: 280974 - RNA, 16 nt, Human adenovirus B (HAdV-B)
acacuuacuuuugcac

SEQ ID NO: 280975 - RNA, 16 nt, Human adenovirus B (HAdV-B)
acagacaccuacuuca

SEQ ID NO: 280976 - RNA, 20 nt, Human adenovirus B (HAdV-B)
acagauacaguagucaauau

SEQ ID NO: 280977 - RNA, 14 nt, Human adenovirus B (HAdV-B)
acagauaugucaau

SEQ ID NO: 280978 - RNA, 23 nt, Human adenovirus B (HAdV-B)
acagcaaaugacaaaggcuucua

SEQ ID NO: 280979 - RNA, 18 nt, Human adenovirus B (HAdV-B)
acagcaaccccagacugu

SEQ ID NO: 280980 - RNA, 15 nt, Human adenovirus B (HAdV-B)
acagcaguagccaca

SEQ ID NO: 280981 - RNA, 16 nt, Human adenovirus B (HAdV-B)
acagccaugguuucca

SEQ ID NO: 280982 - RNA, 21 nt, Human adenovirus B (HAdV-B)
acaggcgacggcgugcuaucc

SEQ ID NO: 280983 - RNA, 15 nt, Human adenovirus B (HAdV-B)
acaguagucaauaua

SEQ ID NO: 280984 - RNA, 17 nt, Human adenovirus B (HAdV-B)
acaguagucaauauaga

SEQ ID NO: 280985 - RNA, 15 nt, Human adenovirus B (HAdV-B)
acaguauaagauuac

SEQ ID NO: 280986 - RNA, 22 nt, Human adenovirus B (HAdV-B)
acaguauggugaacaccaauca

SEQ ID NO: 280987 - RNA, 23 nt, Human adenovirus B (HAdV-B)
acaguauggugaacaccaaucau

SEQ ID NO: 280988 - RNA, 17 nt, Human adenovirus B (HAdV-B)
acagucagcucuuacca

SEQ ID NO: 280989 - RNA, 16 nt, Human adenovirus B (HAdV-B)
acaguccaacugcugc

SEQ ID NO: 280990 - RNA, 17 nt, Human adenovirus B (HAdV-B)
acauaauuacacucuca

SEQ ID NO: 280991 - RNA, 18 nt, Human adenovirus B (HAdV-B)
acauacaaaaucuuacau

SEQ ID NO: 280992 - RNA, 17 nt, Human adenovirus B (HAdV-B)
acauacgggaacaaagc

SEQ ID NO: 280993 - RNA, 18 nt, Human adenovirus B (HAdV-B)
acaucaauugacaugccc

SEQ ID NO: 280994 - RNA, 17 nt, Human adenovirus B (HAdV-B)
acaucaauuuuucaucc

SEQ ID NO: 280995 - RNA, 19 nt, Human adenovirus B (HAdV-B)
acaucauccucgacaugag

SEQ ID NO: 280996 - RNA, 14 nt, Human adenovirus B (HAdV-B)
acaucucucauauu

SEQ ID NO: 280997 - RNA, 21 nt, Human adenovirus B (HAdV-B)
acaugagucauuauugaacau

SEQ ID NO: 280998 - RNA, 18 nt, Human adenovirus B (HAdV-B)
acauggcuucucuuacau

SEQ ID NO: 280999 - RNA, 21 nt, Human adenovirus B (HAdV-B)
acauggcuucucuuacaucuc

SEQ ID NO: 281000 - RNA, 19 nt, Human adenovirus B (HAdV-B)
agauauccuacgagaucac

SEQ ID NO: 281001 - RNA, 22 nt, Human adenovirus B (HAdV-B)
agauauccuacgagaucaccgc

SEQ ID NO: 281002 - RNA, 19 nt, Human adenovirus B (HAdV-B)
agauauuuuucauucucaa

SEQ ID NO: 281003 - RNA, 16 nt, Human adenovirus B (HAdV-B)
agaucaccgcuacuga

SEQ ID NO: 281004 - RNA, 18 nt, Human adenovirus B (HAdV-B)
agaucaccgcuacugacc

SEQ ID NO: 281005 - RNA, 16 nt, Human adenovirus B (HAdV-B)
agaugaaagcaccucc

SEQ ID NO: 281006 - RNA, 17 nt, Human adenovirus B (HAdV-B)
agaugguacuugauuuc

SEQ ID NO: 281007 - RNA, 21 nt, Human adenovirus B (HAdV-B)
agauuaacuugcaugaucuuu

SEQ ID NO: 281008 - RNA, 15 nt, Human adenovirus B (HAdV-B)
agauuccacauucca

SEQ ID NO: 281009 - RNA, 16 nt, Human adenovirus B (HAdV-B)
agcaaaugacaaaggc

SEQ ID NO: 281010 - RNA, 19 nt, Human adenovirus B (HAdV-B)
agcaaccccagacuguaua

SEQ ID NO: 281011 - RNA, 15 nt, Human adenovirus B (HAdV-B)
agcaauaaggucucu

SEQ ID NO: 281012 - RNA, 11 nt, Human adenovirus B (HAdV-B)
agcagcaccuc

SEQ ID NO: 281013 - RNA, 22 nt, Human adenovirus B (HAdV-B)
agcaggcgacggcggugaugca

SEQ ID NO: 281014 - RNA, 23 nt, Human adenovirus B (HAdV-B)
agcaggggacgcuacagugcagu

SEQ ID NO: 281015 - RNA, 12 nt, Human adenovirus B (HAdV-B)
agcaggucagga

SEQ ID NO: 281016 - RNA, 14 nt, Human adenovirus B (HAdV-B)
agcaguacaggaca

SEQ ID NO: 281017 - RNA, 23 nt, Human adenovirus B (HAdV-B)
agcaguagccacagcaaccccag

SEQ ID NO: 281018 - RNA, 16 nt, Human adenovirus B (HAdV-B)
agcaguuggacuguga

SEQ ID NO: 281019 - RNA, 18 nt, Human adenovirus B (HAdV-B)
agcaugacagauauguca

SEQ ID NO: 281020 - RNA, 16 nt, Human adenovirus B (HAdV-B)
agcaugaccaccaucg

SEQ ID NO: 281021 - RNA, 18 nt, Human adenovirus B (HAdV-B)
agcaugaccaccaucgaa

SEQ ID NO: 281022 - RNA, 23 nt, Human adenovirus B (HAdV-B)
agccagcgcaaacccgagaguua

SEQ ID NO: 281023 - RNA, 15 nt, Human adenovirus B (HAdV-B)
agccaugguuuccac

SEQ ID NO: 281024 - RNA, 20 nt, Human adenovirus B (HAdV-B)
agccauguuuuguccugauu

SEQ ID NO: 281025 - RNA, 21 nt, Human adenovirus B (HAdV-B)
agccauuguccaagaccuggg

SEQ ID NO: 281026 - RNA, 21 nt, Human adenovirus B (HAdV-B)
agcccaguuaccacguuguga

SEQ ID NO: 281027 - RNA, 20 nt, Human adenovirus B (HAdV-B)
agccuccagcugggccaaaa

SEQ ID NO: 281028 - RNA, 21 nt, Human adenovirus B (HAdV-B)
agcgacggaugucucacgcuu

SEQ ID NO: 281029 - RNA, 18 nt, Human adenovirus B (HAdV-B)
agcgcuuucacaguccaa

SEQ ID NO: 281030 - RNA, 23 nt, Human adenovirus B (HAdV-B)
agcgcuuucacaguccaacugcu

SEQ ID NO: 281031 - RNA, 13 nt, Human adenovirus B (HAdV-B)
agcgguguuggca

SEQ ID NO: 281032 - RNA, 18 nt, Human adenovirus B (HAdV-B)
agcguuccuaugaugagg

SEQ ID NO: 281033 - RNA, 15 nt, Human adenovirus B (HAdV-B)
agcuaccacugccau

SEQ ID NO: 281034 - RNA, 22 nt, Human adenovirus B (HAdV-B)
agcuaggguaguuuuuaggaua

SEQ ID NO: 281035 - RNA, 21 nt, Human adenovirus B (HAdV-B)
agcucaacgacuacaccgcuu

SEQ ID NO: 281036 - RNA, 18 nt, Human adenovirus B (HAdV-B)
agcucgccugugccauug

SEQ ID NO: 281037 - RNA, 16 nt, Human adenovirus B (HAdV-B)
agcugccuauaguacu

SEQ ID NO: 281038 - RNA, 22 nt, Human adenovirus B (HAdV-B)
agcuuccuauucccugggauau

SEQ ID NO: 281039 - RNA, 16 nt, Human adenovirus B (HAdV-B)
agcuucuaugacugaa

SEQ ID NO: 281040 - RNA, 20 nt, Human adenovirus B (HAdV-B)
agcuucuugcuucuugcaaa

SEQ ID NO: 281041 - RNA, 16 nt, Human adenovirus B (HAdV-B)
agcuugaaccugaaag

SEQ ID NO: 281042 - RNA, 19 nt, Human adenovirus B (HAdV-B)
aggaaagucccgcucccac

SEQ ID NO: 281043 - RNA, 14 nt, Human adenovirus B (HAdV-B)
aggaacaugcagca

SEQ ID NO: 281044 - RNA, 23 nt, Human adenovirus B (HAdV-B)
aggaacgcgcggccaaagagcuc

SEQ ID NO: 281045 - RNA, 21 nt, Human adenovirus B (HAdV-B)
aggaagacuaggcaacuguua

SEQ ID NO: 281046 - RNA, 19 nt, Human adenovirus B (HAdV-B)
aggacauaauuacacucuc

SEQ ID NO: 281047 - RNA, 18 nt, Human adenovirus B (HAdV-B)
aggacccccaaucacuuc

SEQ ID NO: 281048 - RNA, 19 nt, Human adenovirus B (HAdV-B)
aggacucuguuaacuucac

SEQ ID NO: 281049 - RNA, 17 nt, Human adenovirus B (HAdV-B)
aggacuuguuacagggu

SEQ ID NO: 281050 - RNA, 20 nt, Human adenovirus B (HAdV-B)
aggagaaugaagcauguugu

SEQ ID NO: 281051 - RNA, 19 nt, Human adenovirus B (HAdV-B)
aggauaaaacaggacuaua

SEQ ID NO: 281052 - RNA, 19 nt, Human adenovirus B (HAdV-B)
aggccgaaguccaaaugac

SEQ ID NO: 281053 - RNA, 16 nt, Human adenovirus B (HAdV-B)
aggccgauacagcgaa

SEQ ID NO: 281054 - RNA, 22 nt, Human adenovirus B (HAdV-B)
aggccucggcuucccacugaaa

SEQ ID NO: 281055 - RNA, 16 nt, Human adenovirus B (HAdV-B)
aggcgacggcgugcua

SEQ ID NO: 281056 - RNA, 17 nt, Human adenovirus B (HAdV-B)
aggcggagcgguggugu

SEQ ID NO: 281057 - RNA, 14 nt, Human adenovirus B (HAdV-B)
aggcucaaacugca

SEQ ID NO: 281058 - RNA, 20 nt, Human adenovirus B (HAdV-B)
agggcaucuagugguacuga

SEQ ID NO: 281059 - RNA, 20 nt, Human adenovirus B (HAdV-B)
aggguucacuucaaugcaug

SEQ ID NO: 281060 - RNA, 21 nt, Human adenovirus B (HAdV-B)
aggguugcauucacugcuccu

SEQ ID NO: 281061 - RNA, 19 nt, Human adenovirus B (HAdV-B)
aggucaucugggccaaacu

SEQ ID NO: 281062 - RNA, 23 nt, Human adenovirus B (HAdV-B)
aggugaagaacuuaaaguagcau

SEQ ID NO: 281063 - RNA, 18 nt, Human adenovirus B (HAdV-B)
aggugguaauagauacuc

SEQ ID NO: 281064 - RNA, 20 nt, Human adenovirus B (HAdV-B)
agguguacggggaugaugau

SEQ ID NO: 281065 - RNA, 14 nt, Human adenovirus B (HAdV-B)
aguaacaacacuuu

SEQ ID NO: 281066 - RNA, 15 nt, Human adenovirus B (HAdV-B)
auugcccaggacuuu

SEQ ID NO: 281067 - RNA, 23 nt, Human adenovirus B (HAdV-B)
auugccuaccugcgccaccaucc

SEQ ID NO: 281068 - RNA, 14 nt, Human adenovirus B (HAdV-B)
auugcuuuuugggc

SEQ ID NO: 281069 - RNA, 17 nt, Human adenovirus B (HAdV-B)
auuggcucgcucugaaa

SEQ ID NO: 281070 - RNA, 20 nt, Human adenovirus B (HAdV-B)
auuguacugccaucuaccac

SEQ ID NO: 281071 - RNA, 22 nt, Human adenovirus B (HAdV-B)
auugucacugccgcucauggac

SEQ ID NO: 281072 - RNA, 24 nt, Human adenovirus B (HAdV-B)
auugucacugccgcucauggacaa

SEQ ID NO: 281073 - RNA, 17 nt, Human adenovirus B (HAdV-B)
auugugauacuaugacu

SEQ ID NO: 281074 - RNA, 21 nt, Human adenovirus B (HAdV-B)
auuucuucuucaccauacuca

SEQ ID NO: 281075 - RNA, 17 nt, Human adenovirus B (HAdV-B)
auuugaaaaucaauuca

SEQ ID NO: 281076 - RNA, 21 nt, Human adenovirus B (HAdV-B)
auuugccaaaaaaacauucaa

SEQ ID NO: 281077 - RNA, 23 nt, Human adenovirus B (HAdV-B)
auuuggugcgggaaaauaugcau

SEQ ID NO: 281078 - RNA, 22 nt, Human adenovirus B (HAdV-B)
auuugucagucgucuucucuga

SEQ ID NO: 281079 - RNA, 16 nt, Human adenovirus B (HAdV-B)
auuugugugacagugc

SEQ ID NO: 281080 - RNA, 21 nt, Human adenovirus B (HAdV-B)
auuuuagcuccucuccuguac

SEQ ID NO: 281081 - RNA, 17 nt, Human adenovirus B (HAdV-B)
auuuucaaauaaacaag

SEQ ID NO: 281082 - RNA, 16 nt, Human adenovirus B (HAdV-B)
auuuucccuacuaaua

SEQ ID NO: 281083 - RNA, 17 nt, Human adenovirus B (HAdV-B)
auuuucccuacuaauac

SEQ ID NO: 281084 - RNA, 22 nt, Human adenovirus B (HAdV-B)
auuuucccuacuaauacuacuu

SEQ ID NO: 281085 - RNA, 21 nt, Human adenovirus B (HAdV-B)
auuuucucccagcagcaccuc

SEQ ID NO: 281086 - RNA, 20 nt, Human adenovirus B (HAdV-B)
auuuuugcagacuaauucaa

SEQ ID NO: 281087 - RNA, 16 nt, Human adenovirus B (HAdV-B)
caaaaccaugugacca

SEQ ID NO: 281088 - RNA, 21 nt, Human adenovirus B (HAdV-B)
caaaaccggaggugagcucca

SEQ ID NO: 281089 - RNA, 14 nt, Human adenovirus B (HAdV-B)
caaaaccuggaaca

SEQ ID NO: 281090 - RNA, 23 nt, Human adenovirus B (HAdV-B)
caaaacggcuccagcgagcaaga

SEQ ID NO: 281091 - RNA, 13 nt, Human adenovirus B (HAdV-B)
caaaacuaacaau

SEQ ID NO: 281092 - RNA, 18 nt, Human adenovirus B (HAdV-B)
caaaaggacaaguaacuu

SEQ ID NO: 281093 - RNA, 13 nt, Human adenovirus B (HAdV-B)
caaaaugcccaug

SEQ ID NO: 281094 - RNA, 15 nt, Human adenovirus B (HAdV-B)
caaacggaguucuua

SEQ ID NO: 281095 - RNA, 20 nt, Human adenovirus B (HAdV-B)
caaacggaguucuuacuuua

SEQ ID NO: 281096 - RNA, 15 nt, Human adenovirus B (HAdV-B)
caaacucucuccaaa

SEQ ID NO: 281097 - RNA, 22 nt, Human adenovirus B (HAdV-B)
caaacucucuccaaaaugccca

SEQ ID NO: 281098 - RNA, 23 nt, Human adenovirus B (HAdV-B)
caaaggcgugaaggaacaugcag

SEQ ID NO: 281099 - RNA, 23 nt, Human adenovirus B (HAdV-B)
caaauaaacaaguuaaacuuuau

SEQ ID NO: 281100 - RNA, 20 nt, Human adenovirus B (HAdV-B)
caaauacuuuuggaacaguc

SEQ ID NO: 281101 - RNA, 19 nt, Human adenovirus B (HAdV-B)
caaauagcagcugcaacca

SEQ ID NO: 281102 - RNA, 15 nt, Human adenovirus B (HAdV-B)
caaauucaccaaugc

SEQ ID NO: 281103 - RNA, 18 nt, Human adenovirus B (HAdV-B)
caaauucaccaaugcaaa

SEQ ID NO: 281104 - RNA, 12 nt, Human adenovirus B (HAdV-B)
caaauuccaaca

SEQ ID NO: 281105 - RNA, 16 nt, Human adenovirus B (HAdV-B)
caacagaaaaccagca

SEQ ID NO: 281106 - RNA, 15 nt, Human adenovirus B (HAdV-B)
caacagagugcugga

SEQ ID NO: 281107 - RNA, 14 nt, Human adenovirus B (HAdV-B)
caacaguagcaaug

SEQ ID NO: 281108 - RNA, 19 nt, Human adenovirus B (HAdV-B)
caacauacaaaaucuuaca

SEQ ID NO: 281109 - RNA, 20 nt, Human adenovirus B (HAdV-B)
caaccacaggcggaucucua

SEQ ID NO: 281110 - RNA, 18 nt, Human adenovirus B (HAdV-B)
caaccccagcugccuaua

SEQ ID NO: 281111 - RNA, 16 nt, Human adenovirus B (HAdV-B)
caacccccacuacucc

SEQ ID NO: 281112 - RNA, 19 nt, Human adenovirus B (HAdV-B)
caacccguaaucggaauca

SEQ ID NO: 281113 - RNA, 23 nt, Human adenovirus B (HAdV-B)
caacccugucuaccccuaugaag

SEQ ID NO: 281114 - RNA, 22 nt, Human adenovirus B (HAdV-B)
caacgacaaaaauuuaccugca

SEQ ID NO: 281115 - RNA, 22 nt, Human adenovirus B (HAdV-B)
caacgacuacaccgcuuuucca

SEQ ID NO: 281116 - RNA, 18 nt, Human adenovirus B (HAdV-B)
caacgugacagcaaauga

SEQ ID NO: 281117 - RNA, 17 nt, Human adenovirus B (HAdV-B)
caagaacuucuaucacu

SEQ ID NO: 281118 - RNA, 23 nt, Human adenovirus B (HAdV-B)
caagacccagaggaacacauucc

SEQ ID NO: 281119 - RNA, 20 nt, Human adenovirus B (HAdV-B)
caagaccuggguugcggacc

SEQ ID NO: 281120 - RNA, 23 nt, Human adenovirus B (HAdV-B)
caagaccuggguugcggacccua

SEQ ID NO: 281121 - RNA, 14 nt, Human adenovirus B (HAdV-B)
caagauuggaauaa

SEQ ID NO: 281122 - RNA, 14 nt, Human adenovirus B (HAdV-B)
caagcacaguguua

SEQ ID NO: 281123 - RNA, 15 nt, Human adenovirus B (HAdV-B)
caagccaagauaucc

SEQ ID NO: 281124 - RNA, 17 nt, Human adenovirus B (HAdV-B)
caagcuuguuguugauu

SEQ ID NO: 281125 - RNA, 13 nt, Human adenovirus B (HAdV-B)
caaggcucugcau

SEQ ID NO: 281126 - RNA, 22 nt, Human adenovirus B (HAdV-B)
cauacuuuaaaggggaugucaa

SEQ ID NO: 281127 - RNA, 22 nt, Human adenovirus B (HAdV-B)
cauagccccccagguggacaug

SEQ ID NO: 281128 - RNA, 17 nt, Human adenovirus B (HAdV-B)
cauagucauauaguuca

SEQ ID NO: 281129 - RNA, 20 nt, Human adenovirus B (HAdV-B)
cauaguuaucacccagcaaa

SEQ ID NO: 281130 - RNA, 19 nt, Human adenovirus B (HAdV-B)
cauauaguucaugugaugg

SEQ ID NO: 281131 - RNA, 21 nt, Human adenovirus B (HAdV-B)
caucaucuccugcuugcauga

SEQ ID NO: 281132 - RNA, 15 nt, Human adenovirus B (HAdV-B)
cauccaaauucacca

SEQ ID NO: 281133 - RNA, 19 nt, Human adenovirus B (HAdV-B)
cauccaaauucaccaaugc

SEQ ID NO: 281134 - RNA, 22 nt, Human adenovirus B (HAdV-B)
caucccagagguuuugaauguu

SEQ ID NO: 281135 - RNA, 18 nt, Human adenovirus B (HAdV-B)
caucgccccccucugaua

SEQ ID NO: 281136 - RNA, 16 nt, Human adenovirus B (HAdV-B)
caucuaccacuccagc

SEQ ID NO: 281137 - RNA, 20 nt, Human adenovirus B (HAdV-B)
caucuacuucgaacucccca

SEQ ID NO: 281138 - RNA, 14 nt, Human adenovirus B (HAdV-B)
caucuccuguguuc

SEQ ID NO: 281139 - RNA, 17 nt, Human adenovirus B (HAdV-B)
caucugcgcgaucuaca

SEQ ID NO: 281140 - RNA, 18 nt, Human adenovirus B (HAdV-B)
caucugcguauguagcau

SEQ ID NO: 281141 - RNA, 19 nt, Human adenovirus B (HAdV-B)
caugagguagaccuacaga

SEQ ID NO: 281142 - RNA, 22 nt, Human adenovirus B (HAdV-B)
caugagugcgggggcaacauau

SEQ ID NO: 281143 - RNA, 18 nt, Human adenovirus B (HAdV-B)
caugaucuuuuccagggc

SEQ ID NO: 281144 - RNA, 16 nt, Human adenovirus B (HAdV-B)
caugauuccacccucg

SEQ ID NO: 281145 - RNA, 14 nt, Human adenovirus B (HAdV-B)
caugcaacauccaa

SEQ ID NO: 281146 - RNA, 17 nt, Human adenovirus B (HAdV-B)
caugcaacauccaauag

SEQ ID NO: 281147 - RNA, 22 nt, Human adenovirus B (HAdV-B)
caugcuccgggguaguguugua

SEQ ID NO: 281148 - RNA, 21 nt, Human adenovirus B (HAdV-B)
cauggcuaauuccacuuccuc

SEQ ID NO: 281149 - RNA, 23 nt, Human adenovirus B (HAdV-B)
cauggcuucucuuacaucucuca

SEQ ID NO: 281150 - RNA, 18 nt, Human adenovirus B (HAdV-B)
caugguuuccacuaccac

SEQ ID NO: 281151 - RNA, 23 nt, Human adenovirus B (HAdV-B)
caugguuuuagauuccacauucc

SEQ ID NO: 281152 - RNA, 16 nt, Human adenovirus B (HAdV-B)
caugucuuucuuccca

SEQ ID NO: 281153 - RNA, 15 nt, Human adenovirus B (HAdV-B)
cauuauugaacaucc

SEQ ID NO: 281154 - RNA, 17 nt, Human adenovirus B (HAdV-B)
cauuauuguacugccau

SEQ ID NO: 281155 - RNA, 15 nt, Human adenovirus B (HAdV-B)
cauucacugcuccug

SEQ ID NO: 281156 - RNA, 17 nt, Human adenovirus B (HAdV-B)
cauuccccuacaaaaca

SEQ ID NO: 281157 - RNA, 14 nt, Human adenovirus B (HAdV-B)
cauucucaagugau

SEQ ID NO: 281158 - RNA, 20 nt, Human adenovirus B (HAdV-B)
cauugaguucaucuacuucg

SEQ ID NO: 281159 - RNA, 17 nt, Human adenovirus B (HAdV-B)
cauuucuuuugaucuag

SEQ ID NO: 281160 - RNA, 20 nt, Human adenovirus B (HAdV-B)
cauuugcuuccuaugcacuu

SEQ ID NO: 281161 - RNA, 22 nt, Human adenovirus B (HAdV-B)
ccaaacggaguucuuacuuuaa

SEQ ID NO: 281162 - RNA, 17 nt, Human adenovirus B (HAdV-B)
ccaaaggugaagaacuu

SEQ ID NO: 281163 - RNA, 22 nt, Human adenovirus B (HAdV-B)
ccaacaccuuaaucccagaaau

SEQ ID NO: 281164 - RNA, 18 nt, Human adenovirus B (HAdV-B)
ccaacagaaaaccagcag

SEQ ID NO: 281165 - RNA, 23 nt, Human adenovirus B (HAdV-B)
ccaacagaaaaccagcagcggca

SEQ ID NO: 281166 - RNA, 17 nt, Human adenovirus B (HAdV-B)
ccaacgagccagcgcaa

SEQ ID NO: 281167 - RNA, 18 nt, Human adenovirus B (HAdV-B)
ccaacuuauagacuggau

SEQ ID NO: 281168 - RNA, 13 nt, Human adenovirus B (HAdV-B)
ccaagcaggucag

SEQ ID NO: 281169 - RNA, 17 nt, Human adenovirus B (HAdV-B)
ccaauuacgauccaugu

SEQ ID NO: 281170 - RNA, 12 nt, Human adenovirus B (HAdV-B)
ccaauucuucaa

SEQ ID NO: 281171 - RNA, 18 nt, Human adenovirus B (HAdV-B)
ccacaaucuucaugucuu

SEQ ID NO: 281172 - RNA, 15 nt, Human adenovirus B (HAdV-B)
cugggaugggugcau

SEQ ID NO: 281173 - RNA, 16 nt, Human adenovirus B (HAdV-B)
cugguacugcgcucug

SEQ ID NO: 281174 - RNA, 19 nt, Human adenovirus B (HAdV-B)
cugguagauuuuucugcaa

SEQ ID NO: 281175 - RNA, 14 nt, Human adenovirus B (HAdV-B)
cugguauucuaaac

SEQ ID NO: 281176 - RNA, 15 nt, Human adenovirus B (HAdV-B)
cuguauuacgcugga

SEQ ID NO: 281177 - RNA, 16 nt, Human adenovirus B (HAdV-B)
cugucucaaccccagc

SEQ ID NO: 281178 - RNA, 13 nt, Human adenovirus B (HAdV-B)
cugucucuguccg

SEQ ID NO: 281179 - RNA, 22 nt, Human adenovirus B (HAdV-B)
cuguggaaaucaaguaccaucu

SEQ ID NO: 281180 - RNA, 21 nt, Human adenovirus B (HAdV-B)
cuguggaugcaguuauugaca

SEQ ID NO: 281181 - RNA, 19 nt, Human adenovirus B (HAdV-B)
cuguugccagauugugaua

SEQ ID NO: 281182 - RNA, 21 nt, Human adenovirus B (HAdV-B)
cuguuugguaaaacaagccaa

SEQ ID NO: 281183 - RNA, 16 nt, Human adenovirus B (HAdV-B)
cuuaauuugggccauc

SEQ ID NO: 281184 - RNA, 13 nt, Human adenovirus B (HAdV-B)
cuuacaucucuca

SEQ ID NO: 281185 - RNA, 15 nt, Human adenovirus B (HAdV-B)
cuuagaaaaugcaaa

SEQ ID NO: 281186 - RNA, 21 nt, Human adenovirus B (HAdV-B)
cuuagaaaaugcaaauuccaa

SEQ ID NO: 281187 - RNA, 23 nt, Human adenovirus B (HAdV-B)
cuuagacucaucuaaaaccaugc

SEQ ID NO: 281188 - RNA, 13 nt, Human adenovirus B (HAdV-B)
cuucaaugcaugg

SEQ ID NO: 281189 - RNA, 21 nt, Human adenovirus B (HAdV-B)
cuucaaugcauggcuggggga

SEQ ID NO: 281190 - RNA, 15 nt, Human adenovirus B (HAdV-B)
cuuccauccacagua

SEQ ID NO: 281191 - RNA, 18 nt, Human adenovirus B (HAdV-B)
cuucccagaugaccaaga

SEQ ID NO: 281192 - RNA, 19 nt, Human adenovirus B (HAdV-B)
cuuccuauucccugggaua

SEQ ID NO: 281193 - RNA, 22 nt, Human adenovirus B (HAdV-B)
cuucguacgagagcgugaugca

SEQ ID NO: 281194 - RNA, 11 nt, Human adenovirus B (HAdV-B)
cuucuaugacu

SEQ ID NO: 281195 - RNA, 16 nt, Human adenovirus B (HAdV-B)
cuucucuuacaucucu

SEQ ID NO: 281196 - RNA, 20 nt, Human adenovirus B (HAdV-B)
cuucuucaacccggauuuua

SEQ ID NO: 281197 - RNA, 23 nt, Human adenovirus B (HAdV-B)
cuucuucaacccggauuuuacaa

SEQ ID NO: 281198 - RNA, 17 nt, Human adenovirus B (HAdV-B)
cuucuucaccauacuca

SEQ ID NO: 281199 - RNA, 16 nt, Human adenovirus B (HAdV-B)
cuucuugcaaauagca

SEQ ID NO: 281200 - RNA, 23 nt, Human adenovirus B (HAdV-B)
cuugaaacacaauccaguugcau

SEQ ID NO: 281201 - RNA, 17 nt, Human adenovirus B (HAdV-B)
cuugaccacgguggugc

SEQ ID NO: 281202 - RNA, 18 nt, Human adenovirus B (HAdV-B)
cuugaccacgguggugca

SEQ ID NO: 281203 - RNA, 18 nt, Human adenovirus B (HAdV-B)
cuuggguugccacuugaa

SEQ ID NO: 281204 - RNA, 15 nt, Human adenovirus B (HAdV-B)
cuuguacugcacugu

SEQ ID NO: 281205 - RNA, 19 nt, Human adenovirus B (HAdV-B)
cuuguuacauaucuggaaa

SEQ ID NO: 281206 - RNA, 19 nt, Human adenovirus B (HAdV-B)
cuuucacaguccaacugcu

SEQ ID NO: 281207 - RNA, 15 nt, Human adenovirus B (HAdV-B)
cuuucgcuuuuggaa

SEQ ID NO: 281208 - RNA, 21 nt, Human adenovirus B (HAdV-B)
cuuucucuagcagcagugucg

SEQ ID NO: 281209 - RNA, 19 nt, Human adenovirus B (HAdV-B)
cuuucuggucagcugcaaa

SEQ ID NO: 281210 - RNA, 13 nt, Human adenovirus B (HAdV-B)
cuuugcuaccuau

SEQ ID NO: 281211 - RNA, 14 nt, Human adenovirus B (HAdV-B)
cuuugcuaccuaua

SEQ ID NO: 281212 - RNA, 15 nt, Human adenovirus B (HAdV-B)
cuuugcuaccuauac

SEQ ID NO: 281213 - RNA, 22 nt, Human adenovirus B (HAdV-B)
gauccuugugcgaauugccuac

SEQ ID NO: 281214 - RNA, 17 nt, Human adenovirus B (HAdV-B)
gaucuacguccacugga

SEQ ID NO: 281215 - RNA, 14 nt, Human adenovirus B (HAdV-B)
gaugaucgucucaa

SEQ ID NO: 281216 - RNA, 15 nt, Human adenovirus B (HAdV-B)
gaugcaaaugcaaua

SEQ ID NO: 281217 - RNA, 19 nt, Human adenovirus B (HAdV-B)
gaugcaauccccacuggag

SEQ ID NO: 281218 - RNA, 13 nt, Human adenovirus B (HAdV-B)
gaugcaugcauuu

SEQ ID NO: 281219 - RNA, 21 nt, Human adenovirus B (HAdV-B)
gauggaacagcaagcaccgga

SEQ ID NO: 281220 - RNA, 17 nt, Human adenovirus B (HAdV-B)
gaugucauccaaauuca

SEQ ID NO: 281221 - RNA, 17 nt, Human adenovirus B (HAdV-B)
gauguggcaaaucucaa

SEQ ID NO: 281222 - RNA, 16 nt, Human adenovirus B (HAdV-B)
gauguugccauucuca

SEQ ID NO: 281223 - RNA, 17 nt, Human adenovirus B (HAdV-B)
gauguugccauucucaa

SEQ ID NO: 281224 - RNA, 22 nt, Human adenovirus B (HAdV-B)
gauuacuagacggauuaauauc

SEQ ID NO: 281225 - RNA, 17 nt, Human adenovirus B (HAdV-B)
gauucaugcuccggggu

SEQ ID NO: 281226 - RNA, 19 nt, Human adenovirus B (HAdV-B)
gauugguguauucuguuaa

SEQ ID NO: 281227 - RNA, 14 nt, Human adenovirus B (HAdV-B)
gauugugucucauc

SEQ ID NO: 281228 - RNA, 13 nt, Human adenovirus B (HAdV-B)
gauuuuuaucuau

SEQ ID NO: 281229 - RNA, 15 nt, Human adenovirus B (HAdV-B)
gauuuuuuccaggau

SEQ ID NO: 281230 - RNA, 21 nt, Human adenovirus B (HAdV-B)
gauuuuuuuauuuagacuuug

SEQ ID NO: 281231 - RNA, 14 nt, Human adenovirus B (HAdV-B)
gcaaaaaaggcaua

SEQ ID NO: 281232 - RNA, 17 nt, Human adenovirus B (HAdV-B)
gcaacaucaauugacau

SEQ ID NO: 281233 - RNA, 16 nt, Human adenovirus B (HAdV-B)
gcaacgacauugacau

SEQ ID NO: 281234 - RNA, 13 nt, Human adenovirus B (HAdV-B)
gcaagagagccac

SEQ ID NO: 281235 - RNA, 21 nt, Human adenovirus B (HAdV-B)
gcaauaaggucucuguugaaa

SEQ ID NO: 281236 - RNA, 21 nt, Human adenovirus B (HAdV-B)
gcacauagucauauaguucau

SEQ ID NO: 281237 - RNA, 13 nt, Human adenovirus B (HAdV-B)
gcacaugaucauc

SEQ ID NO: 281238 - RNA, 16 nt, Human adenovirus B (HAdV-B)
gcaccuacacccugcu

SEQ ID NO: 281239 - RNA, 22 nt, Human adenovirus B (HAdV-B)
gcaccucaguacgauaccacca

SEQ ID NO: 281240 - RNA, 20 nt, Human adenovirus B (HAdV-B)
gcacgagccaacugaacggg

SEQ ID NO: 281241 - RNA, 20 nt, Human adenovirus B (HAdV-B)
gcacggugggaucugcaauc

SEQ ID NO: 281242 - RNA, 19 nt, Human adenovirus B (HAdV-B)
gcagacucaguuuguacuc

SEQ ID NO: 281243 - RNA, 17 nt, Human adenovirus B (HAdV-B)
gcagcaccucacuuccc

SEQ ID NO: 281244 - RNA, 13 nt, Human adenovirus B (HAdV-B)
gcagcggcaguua

SEQ ID NO: 281245 - RNA, 12 nt, Human adenovirus B (HAdV-B)
gcagcgucucag

SEQ ID NO: 281246 - RNA, 13 nt, Human adenovirus B (HAdV-B)
gcagcugcagcug

SEQ ID NO: 281247 - RNA, 12 nt, Human adenovirus B (HAdV-B)
gcagcugucaug

SEQ ID NO: 281248 - RNA, 22 nt, Human adenovirus B (HAdV-B)
gcaggaacgcgcggccaaagag

SEQ ID NO: 281249 - RNA, 22 nt, Human adenovirus B (HAdV-B)
gcaggaguucgucagaauguua

SEQ ID NO: 281250 - RNA, 16 nt, Human adenovirus B (HAdV-B)
gcaggcgacggcggug

SEQ ID NO: 281251 - RNA, 23 nt, Human adenovirus B (HAdV-B)
gcaggggacgcuacagugcagua

SEQ ID NO: 281252 - RNA, 14 nt, Human adenovirus B (HAdV-B)
gcagugucgcuaac

SEQ ID NO: 281253 - RNA, 13 nt, Human adenovirus B (HAdV-B)
gcaguuauugaca

SEQ ID NO: 281254 - RNA, 19 nt, Human adenovirus B (HAdV-B)
gcauaagaaugccaucauc

SEQ ID NO: 281255 - RNA, 15 nt, Human adenovirus B (HAdV-B)
gcauacaugccacag

SEQ ID NO: 281256 - RNA, 22 nt, Human adenovirus B (HAdV-B)
gcauacuuucuccauacuuuaa

SEQ ID NO: 281257 - RNA, 15 nt, Human adenovirus B (HAdV-B)
gcaugaaaccuuuag

SEQ ID NO: 281258 - RNA, 13 nt, Human adenovirus B (HAdV-B)
gcaugucaauuga

SEQ ID NO: 281259 - RNA, 20 nt, Human adenovirus B (HAdV-B)
gcauuacuaccgucaccucc

SEQ ID NO: 281260 - RNA, 22 nt, Human adenovirus B (HAdV-B)
gcauuacuaccgucaccuccac

SEQ ID NO: 281261 - RNA, 15 nt, Human adenovirus B (HAdV-B)
gcauuuaauguuugc

SEQ ID NO: 281262 - RNA, 17 nt, Human adenovirus B (HAdV-B)
gccaaaaaaacauucaa

SEQ ID NO: 281263 - RNA, 17 nt, Human adenovirus B (HAdV-B)
gccaaaaggacaaguaa

SEQ ID NO: 281264 - RNA, 15 nt, Human adenovirus B (HAdV-B)
gccaagauagcuuug

SEQ ID NO: 281265 - RNA, 19 nt, Human adenovirus B (HAdV-B)
gccaauuacgauccauguc

SEQ ID NO: 281266 - RNA, 22 nt, Human adenovirus B (HAdV-B)
gccagaagccccccgggaacaa

SEQ ID NO: 281267 - RNA, 20 nt, Human adenovirus B (HAdV-B)
gccagauugugauacuauga

SEQ ID NO: 281268 - RNA, 13 nt, Human adenovirus B (HAdV-B)
gccaucaucuccu

SEQ ID NO: 281269 - RNA, 18 nt, Human adenovirus B (HAdV-B)
gccaucauggaagcugua

SEQ ID NO: 281270 - RNA, 19 nt, Human adenovirus B (HAdV-B)
gccauucucgagcugccag

SEQ ID NO: 281271 - RNA, 14 nt, Human adenovirus B (HAdV-B)
gcccaguaauaaca

SEQ ID NO: 281272 - RNA, 19 nt, Human adenovirus B (HAdV-B)
gccccaccggauguggcaa

SEQ ID NO: 281273 - RNA, 12 nt, Human adenovirus B (HAdV-B)
gccccgugagcu

SEQ ID NO: 281274 - RNA, 12 nt, Human adenovirus B (HAdV-B)
gcccgugcugau

SEQ ID NO: 281275 - RNA, 15 nt, Human adenovirus B (HAdV-B)
gccgaaaucuugaaa

SEQ ID NO: 281276 - RNA, 12 nt, Human adenovirus B (HAdV-B)
gccgcucaugga

SEQ ID NO: 281277 - RNA, 23 nt, Human adenovirus B (HAdV-B)
gccgcucauggacaaacagucgu

SEQ ID NO: 281278 - RNA, 17 nt, Human adenovirus B (HAdV-B)
gccgcugccuccuugca

SEQ ID NO: 281279 - RNA, 14 nt, Human adenovirus B (HAdV-B)
ccacagaugucaua

SEQ ID NO: 281280 - RNA, 22 nt, Human adenovirus B (HAdV-B)
ccacagcaaccccagacuguau

SEQ ID NO: 281281 - RNA, 18 nt, Human adenovirus B (HAdV-B)
ccacagcuuucuggucag

SEQ ID NO: 281282 - RNA, 18 nt, Human adenovirus B (HAdV-B)
ccacauuccaaacaguuu

SEQ ID NO: 281283 - RNA, 15 nt, Human adenovirus B (HAdV-B)
ccaccaucgaaacag

SEQ ID NO: 281284 - RNA, 22 nt, Human adenovirus B (HAdV-B)
ccacggcgacgcgugcaauggc

SEQ ID NO: 281285 - RNA, 15 nt, Human adenovirus B (HAdV-B)
ccacuaacaaccaca

SEQ ID NO: 281286 - RNA, 16 nt, Human adenovirus B (HAdV-B)
ccacuaacaaccacag

SEQ ID NO: 281287 - RNA, 20 nt, Human adenovirus B (HAdV-B)
ccagaaaacugcacacuuac

SEQ ID NO: 281288 - RNA, 19 nt, Human adenovirus B (HAdV-B)
ccagaagcauuuucccuac

SEQ ID NO: 281289 - RNA, 21 nt, Human adenovirus B (HAdV-B)
ccagacaucacccuuacacca

SEQ ID NO: 281290 - RNA, 18 nt, Human adenovirus B (HAdV-B)
ccagacguugggucaaag

SEQ ID NO: 281291 - RNA, 21 nt, Human adenovirus B (HAdV-B)
ccagacuguauaggagcauuu

SEQ ID NO: 281292 - RNA, 19 nt, Human adenovirus B (HAdV-B)
ccagagguuuugaauguuu

SEQ ID NO: 281293 - RNA, 14 nt, Human adenovirus B (HAdV-B)
ccagaugaccaaga

SEQ ID NO: 281294 - RNA, 22 nt, Human adenovirus B (HAdV-B)
ccagcaaaaacaagauuggaau

SEQ ID NO: 281295 - RNA, 20 nt, Human adenovirus B (HAdV-B)
ccagcagcaccucacuuccc

SEQ ID NO: 281296 - RNA, 21 nt, Human adenovirus B (HAdV-B)
ccagcaguggaaaaacuugag

SEQ ID NO: 281297 - RNA, 22 nt, Human adenovirus B (HAdV-B)
ccagcugggccaaaaggacaag

SEQ ID NO: 281298 - RNA, 15 nt, Human adenovirus B (HAdV-B)
ccagugcgcgcucau

SEQ ID NO: 281299 - RNA, 15 nt, Human adenovirus B (HAdV-B)
ccaguuugaauauga

SEQ ID NO: 281300 - RNA, 23 nt, Human adenovirus B (HAdV-B)
ccauaauuucauuuuugauauac

SEQ ID NO: 281301 - RNA, 18 nt, Human adenovirus B (HAdV-B)
ccauacggucgaacgcag

SEQ ID NO: 281302 - RNA, 20 nt, Human adenovirus B (HAdV-B)
ccauacucauuugugcauuu

SEQ ID NO: 281303 - RNA, 18 nt, Human adenovirus B (HAdV-B)
ccaucagguucacuuuaa

SEQ ID NO: 281304 - RNA, 15 nt, Human adenovirus B (HAdV-B)
ccaucaucuccugcu

SEQ ID NO: 281305 - RNA, 12 nt, Human adenovirus B (HAdV-B)
ccauccacagua

SEQ ID NO: 281306 - RNA, 19 nt, Human adenovirus B (HAdV-B)
ccaucuacugcauuuguaa

SEQ ID NO: 281307 - RNA, 20 nt, Human adenovirus B (HAdV-B)
ccauggagguuugggccauu

SEQ ID NO: 281308 - RNA, 17 nt, Human adenovirus B (HAdV-B)
ccaugugaccaaccugg

SEQ ID NO: 281309 - RNA, 21 nt, Human adenovirus B (HAdV-B)
ccauuaaaaauuaugccaaga

SEQ ID NO: 281310 - RNA, 17 nt, Human adenovirus B (HAdV-B)
ccauuaucaacgugaca

SEQ ID NO: 281311 - RNA, 22 nt, Human adenovirus B (HAdV-B)
cccaaacggaguucuuacuuua

SEQ ID NO: 281312 - RNA, 21 nt, Human adenovirus B (HAdV-B)
cccaaccagcgcuuccaagac

SEQ ID NO: 281313 - RNA, 19 nt, Human adenovirus B (HAdV-B)
cccaauaugcuuauuccaa

SEQ ID NO: 281314 - RNA, 15 nt, Human adenovirus B (HAdV-B)
cccaaugcacaugau

SEQ ID NO: 281315 - RNA, 19 nt, Human adenovirus B (HAdV-B)
cccaaugcacaugaucauc

SEQ ID NO: 281316 - RNA, 21 nt, Human adenovirus B (HAdV-B)
cccagacguugggucaaagcc

SEQ ID NO: 281317 - RNA, 12 nt, Human adenovirus B (HAdV-B)
cccagguggaca

SEQ ID NO: 281318 - RNA, 20 nt, Human adenovirus B (HAdV-B)
cccauaguuaucacccagca

SEQ ID NO: 281319 - RNA, 17 nt, Human adenovirus B (HAdV-B)
cccauggcaugggaugg

SEQ ID NO: 281320 - RNA, 13 nt, Human adenovirus B (HAdV-B)
cccauuccaagca

SEQ ID NO: 281321 - RNA, 14 nt, Human adenovirus B (HAdV-B)
ccccacgcacagcu

SEQ ID NO: 281322 - RNA, 22 nt, Human adenovirus B (HAdV-B)
ccccagauuggcucgcucugaa

SEQ ID NO: 281323 - RNA, 16 nt, Human adenovirus B (HAdV-B)
cccccaaauuuaauaa

SEQ ID NO: 281324 - RNA, 13 nt, Human adenovirus B (HAdV-B)
ccccggacccaag

SEQ ID NO: 281325 - RNA, 23 nt, Human adenovirus B (HAdV-B)
ccccuaugaagaugaaagcaccu

SEQ ID NO: 281326 - RNA, 17 nt, Human adenovirus B (HAdV-B)
cccgaacccaaccagcg

SEQ ID NO: 281327 - RNA, 17 nt, Human adenovirus B (HAdV-B)
cccgcacgcccuggaaa

SEQ ID NO: 281328 - RNA, 18 nt, Human adenovirus B (HAdV-B)
cccgcuguugccagauug

SEQ ID NO: 281329 - RNA, 23 nt, Human adenovirus B (HAdV-B)
cccguccaacccgccaauucuuc

SEQ ID NO: 281330 - RNA, 19 nt, Human adenovirus B (HAdV-B)
cccguucagcggcauacuu

SEQ ID NO: 281331 - RNA, 21 nt, Human adenovirus B (HAdV-B)
cccuacaaaacaugcaacauc

SEQ ID NO: 281332 - RNA, 20 nt, Human adenovirus B (HAdV-B)
cccuacuaauacuacuuuca

SEQ ID NO: 281333 - RNA, 22 nt, Human adenovirus B (HAdV-B)
cccuacuaauacuacuuucaaa

SEQ ID NO: 281334 - RNA, 18 nt, Human adenovirus B (HAdV-B)
cccuaguguaccaggaaa

SEQ ID NO: 281335 - RNA, 23 nt, Human adenovirus B (HAdV-B)
cccugacucaggacaaguuacuu

SEQ ID NO: 281336 - RNA, 16 nt, Human adenovirus B (HAdV-B)
ccgagcuucuaugacu

SEQ ID NO: 281337 - RNA, 17 nt, Human adenovirus B (HAdV-B)
ccgagcuucuaugacug

SEQ ID NO: 281338 - RNA, 18 nt, Human adenovirus B (HAdV-B)
ccgagcuucuaugacuga

SEQ ID NO: 281339 - RNA, 15 nt, Human adenovirus B (HAdV-B)
ccgcacaacuacuuu

SEQ ID NO: 281340 - RNA, 18 nt, Human adenovirus B (HAdV-B)
ccgcauuaguaacaacac

SEQ ID NO: 281341 - RNA, 13 nt, Human adenovirus B (HAdV-B)
ccgccaauucuuc

SEQ ID NO: 281342 - RNA, 14 nt, Human adenovirus B (HAdV-B)
ccgcuguugccaga

SEQ ID NO: 281343 - RNA, 16 nt, Human adenovirus B (HAdV-B)
ccgcuguugccagauu

SEQ ID NO: 281344 - RNA, 18 nt, Human adenovirus B (HAdV-B)
ccgcuucuguugccgcua

SEQ ID NO: 281345 - RNA, 23 nt, Human adenovirus B (HAdV-B)
ccggaguccauccgcagcaguug

SEQ ID NO: 281346 - RNA, 13 nt, Human adenovirus B (HAdV-B)
ccggauguggcaa

SEQ ID NO: 281347 - RNA, 19 nt, Human adenovirus B (HAdV-B)
ccuaagagaccugcuacca

SEQ ID NO: 281348 - RNA, 16 nt, Human adenovirus B (HAdV-B)
ccuacaaaacaugcaa

SEQ ID NO: 281349 - RNA, 17 nt, Human adenovirus B (HAdV-B)
ccuacaaaacaugcaac

SEQ ID NO: 281350 - RNA, 19 nt, Human adenovirus B (HAdV-B)
ccuacaaaacaugcaacau

SEQ ID NO: 281351 - RNA, 18 nt, Human adenovirus B (HAdV-B)
ccuaccgaaaccaaauac

SEQ ID NO: 281352 - RNA, 22 nt, Human adenovirus B (HAdV-B)
ccuacgagaucaccgcuacuga

SEQ ID NO: 281353 - RNA, 18 nt, Human adenovirus B (HAdV-B)
ccuacuaauacuacuuuc

SEQ ID NO: 281354 - RNA, 19 nt, Human adenovirus B (HAdV-B)
ccuacuaauacuacuuuca

SEQ ID NO: 281355 - RNA, 15 nt, Human adenovirus B (HAdV-B)
ccuacuauagccagc

SEQ ID NO: 281356 - RNA, 21 nt, Human adenovirus B (HAdV-B)
ccuauagaggugggauugaau

SEQ ID NO: 281357 - RNA, 21 nt, Human adenovirus B (HAdV-B)
ccuaugaagaugaaagcaccu

SEQ ID NO: 281358 - RNA, 13 nt, Human adenovirus B (HAdV-B)
ccuaugcacuuuu

SEQ ID NO: 281359 - RNA, 14 nt, Human adenovirus B (HAdV-B)
ccuaugcuacuuua

SEQ ID NO: 281360 - RNA, 22 nt, Human adenovirus B (HAdV-B)
ccucaguacgauaccaccaggu

SEQ ID NO: 281361 - RNA, 13 nt, Human adenovirus B (HAdV-B)
ccuccuaauggau

SEQ ID NO: 281362 - RNA, 14 nt, Human adenovirus B (HAdV-B)
ccucuccugcuuga

SEQ ID NO: 281363 - RNA, 20 nt, Human adenovirus B (HAdV-B)
ccugcugaagacccuaugcg

SEQ ID NO: 281364 - RNA, 13 nt, Human adenovirus B (HAdV-B)
ccuguacccacaa

SEQ ID NO: 281365 - RNA, 17 nt, Human adenovirus B (HAdV-B)
ccuuagaaaaugcaaau

SEQ ID NO: 281366 - RNA, 21 nt, Human adenovirus B (HAdV-B)
ccuuggcuccgcgacacggca

SEQ ID NO: 281367 - RNA, 16 nt, Human adenovirus B (HAdV-B)
ccuuuauaaacccagg

SEQ ID NO: 281368 - RNA, 15 nt, Human adenovirus B (HAdV-B)
cgaaagauggcguga

SEQ ID NO: 281369 - RNA, 16 nt, Human adenovirus B (HAdV-B)
cgaaagugaaccacaa

SEQ ID NO: 281370 - RNA, 17 nt, Human adenovirus B (HAdV-B)
cgaaaucuugaaaucac

SEQ ID NO: 281371 - RNA, 15 nt, Human adenovirus B (HAdV-B)
cgaacccaaccagcg

SEQ ID NO: 281372 - RNA, 16 nt, Human adenovirus B (HAdV-B)
cgaaggcgcauugcca

SEQ ID NO: 281373 - RNA, 19 nt, Human adenovirus B (HAdV-B)
cgaaggcgcauugccagac

SEQ ID NO: 281374 - RNA, 16 nt, Human adenovirus B (HAdV-B)
cgaauaccgcaaccaa

SEQ ID NO: 281375 - RNA, 19 nt, Human adenovirus B (HAdV-B)
cgaauaccgcaaccaaaau

SEQ ID NO: 281376 - RNA, 17 nt, Human adenovirus B (HAdV-B)
cgacggcggugaugcaa

SEQ ID NO: 281377 - RNA, 15 nt, Human adenovirus B (HAdV-B)
cgagagcgugaugca

SEQ ID NO: 281378 - RNA, 16 nt, Human adenovirus B (HAdV-B)
cgagagcgugaugcag

SEQ ID NO: 281379 - RNA, 21 nt, Human adenovirus B (HAdV-B)
cgagaucaccgcuacugacca

SEQ ID NO: 281380 - RNA, 20 nt, Human adenovirus B (HAdV-B)
cgagcuucuaugacugaaga

SEQ ID NO: 281381 - RNA, 17 nt, Human adenovirus B (HAdV-B)
cgagugguacacugucu

SEQ ID NO: 281382 - RNA, 13 nt, Human adenovirus B (HAdV-B)
gccuacaucuacu

SEQ ID NO: 281383 - RNA, 17 nt, Human adenovirus B (HAdV-B)
gccuaccgaaaccaaau

SEQ ID NO: 281384 - RNA, 14 nt, Human adenovirus B (HAdV-B)
gccugcggauccca

SEQ ID NO: 281385 - RNA, 14 nt, Human adenovirus B (HAdV-B)
gcgagagaugccau

SEQ ID NO: 281386 - RNA, 22 nt, Human adenovirus B (HAdV-B)
gcgcaaaguucgacauguguug

SEQ ID NO: 281387 - RNA, 12 nt, Human adenovirus B (HAdV-B)
gcgccaccaucc

SEQ ID NO: 281388 - RNA, 22 nt, Human adenovirus B (HAdV-B)
gcgccuucaauuggagcaguau

SEQ ID NO: 281389 - RNA, 15 nt, Human adenovirus B (HAdV-B)
gcggagcgguggugu

SEQ ID NO: 281390 - RNA, 16 nt, Human adenovirus B (HAdV-B)
gcggagcgguggugua

SEQ ID NO: 281391 - RNA, 14 nt, Human adenovirus B (HAdV-B)
gcggcacuucuuag

SEQ ID NO: 281392 - RNA, 21 nt, Human adenovirus B (HAdV-B)
gcgucgauugacgucuuguau

SEQ ID NO: 281393 - RNA, 20 nt, Human adenovirus B (HAdV-B)
gcuaacaauacaauuuccaa

SEQ ID NO: 281394 - RNA, 22 nt, Human adenovirus B (HAdV-B)
gcuaagcaguuuggugauaaua

SEQ ID NO: 281395 - RNA, 21 nt, Human adenovirus B (HAdV-B)
gcuacaacaguagcaaugugc

SEQ ID NO: 281396 - RNA, 17 nt, Human adenovirus B (HAdV-B)
gcuacuugcuauuccac

SEQ ID NO: 281397 - RNA, 12 nt, Human adenovirus B (HAdV-B)
gcuauacuacca

SEQ ID NO: 281398 - RNA, 22 nt, Human adenovirus B (HAdV-B)
gcucauaggagcuggcuuucau

SEQ ID NO: 281399 - RNA, 20 nt, Human adenovirus B (HAdV-B)
gcuccagcgagcaagagcuc

SEQ ID NO: 281400 - RNA, 13 nt, Human adenovirus B (HAdV-B)
gcucccaaugcac

SEQ ID NO: 281401 - RNA, 16 nt, Human adenovirus B (HAdV-B)
gcucuugcuaccaagg

SEQ ID NO: 281402 - RNA, 15 nt, Human adenovirus B (HAdV-B)
gcugaggugguaaua

SEQ ID NO: 281403 - RNA, 16 nt, Human adenovirus B (HAdV-B)
gcugaguuacuuucaa

SEQ ID NO: 281404 - RNA, 18 nt, Human adenovirus B (HAdV-B)
gcugccuauaguacucca

SEQ ID NO: 281405 - RNA, 17 nt, Human adenovirus B (HAdV-B)
gcugccuccuugcagau

SEQ ID NO: 281406 - RNA, 12 nt, Human adenovirus B (HAdV-B)
gcuggagccaau

SEQ ID NO: 281407 - RNA, 18 nt, Human adenovirus B (HAdV-B)
gcugggccaaaaggacaa

SEQ ID NO: 281408 - RNA, 23 nt, Human adenovirus B (HAdV-B)
gcugucaugaguggaaacgcuuc

SEQ ID NO: 281409 - RNA, 18 nt, Human adenovirus B (HAdV-B)
gcugugcuuuuucaccaa

SEQ ID NO: 281410 - RNA, 19 nt, Human adenovirus B (HAdV-B)
gcuguguaguaacaaguuc

SEQ ID NO: 281411 - RNA, 13 nt, Human adenovirus B (HAdV-B)
gcuguugccagau

SEQ ID NO: 281412 - RNA, 17 nt, Human adenovirus B (HAdV-B)
gcuuccuaugcacuuuu

SEQ ID NO: 281413 - RNA, 12 nt, Human adenovirus B (HAdV-B)
gcuucuaugacu

SEQ ID NO: 281414 - RNA, 19 nt, Human adenovirus B (HAdV-B)
gcuucuugcaugcucagaa

SEQ ID NO: 281415 - RNA, 15 nt, Human adenovirus B (HAdV-B)
gcuuguacugcacug

SEQ ID NO: 281416 - RNA, 22 nt, Human adenovirus B (HAdV-B)
gcuuucacaguccaacugcugc

SEQ ID NO: 281417 - RNA, 23 nt, Human adenovirus B (HAdV-B)
gcuuugcccgggaacucauugag

SEQ ID NO: 281418 - RNA, 13 nt, Human adenovirus B (HAdV-B)
ggaacacauuccc

SEQ ID NO: 281419 - RNA, 16 nt, Human adenovirus B (HAdV-B)
ggaacuggcaccucag

SEQ ID NO: 281420 - RNA, 22 nt, Human adenovirus B (HAdV-B)
ggaaucaaccccauaguuauca

SEQ ID NO: 281421 - RNA, 16 nt, Human adenovirus B (HAdV-B)
ggaaucaccaacuugg

SEQ ID NO: 281422 - RNA, 17 nt, Human adenovirus B (HAdV-B)
ggaaucaccaacuuggg

SEQ ID NO: 281423 - RNA, 16 nt, Human adenovirus B (HAdV-B)
ggaauuacaucauccu

SEQ ID NO: 281424 - RNA, 21 nt, Human adenovirus B (HAdV-B)
ggacaauacauacucuuacaa

SEQ ID NO: 281425 - RNA, 21 nt, Human adenovirus B (HAdV-B)
ggacagaagauuaacuugcau

SEQ ID NO: 281426 - RNA, 14 nt, Human adenovirus B (HAdV-B)
ggacauaauuacac

SEQ ID NO: 281427 - RNA, 22 nt, Human adenovirus B (HAdV-B)
ggaccucaagguggucaugucu

SEQ ID NO: 281428 - RNA, 21 nt, Human adenovirus B (HAdV-B)
ggacgauuggacccaggccau

SEQ ID NO: 281429 - RNA, 17 nt, Human adenovirus B (HAdV-B)
ggacgcuacagugcagu

SEQ ID NO: 281430 - RNA, 23 nt, Human adenovirus B (HAdV-B)
ggacgcuucccgaacccaaccag

SEQ ID NO: 281431 - RNA, 17 nt, Human adenovirus B (HAdV-B)
ggacucuggacagcucc

SEQ ID NO: 281432 - RNA, 19 nt, Human adenovirus B (HAdV-B)
ggacugccccauggcaugg

SEQ ID NO: 281433 - RNA, 12 nt, Human adenovirus B (HAdV-B)
ggacuuguuaca

SEQ ID NO: 281434 - RNA, 22 nt, Human adenovirus B (HAdV-B)
ggagccgaaaucuugaaaucac

SEQ ID NO: 281435 - RNA, 21 nt, Human adenovirus B (HAdV-B)
ggagguucagaugguacuuga

SEQ ID NO: 281436 - RNA, 15 nt, Human adenovirus B (HAdV-B)
ggagguuugggccau

SEQ ID NO: 281437 - RNA, 16 nt, Human adenovirus B (HAdV-B)
ggaguucuuacuuuaa

SEQ ID NO: 281438 - RNA, 15 nt, Human adenovirus B (HAdV-B)
ggauaccauuagaua

SEQ ID NO: 281439 - RNA, 20 nt, Human adenovirus B (HAdV-B)
ggauauguuucuaaauccug

SEQ ID NO: 281440 - RNA, 19 nt, Human adenovirus B (HAdV-B)
ggauccuauagagguggga

SEQ ID NO: 281441 - RNA, 13 nt, Human adenovirus B (HAdV-B)
ggaucuacugugg

SEQ ID NO: 281442 - RNA, 21 nt, Human adenovirus B (HAdV-B)
ggaugaaguuucuguauugca

SEQ ID NO: 281443 - RNA, 12 nt, Human adenovirus B (HAdV-B)
ggaugauuuccu

SEQ ID NO: 281444 - RNA, 16 nt, Human adenovirus B (HAdV-B)
ggaugcaaaugcaaua

SEQ ID NO: 281445 - RNA, 20 nt, Human adenovirus B (HAdV-B)
ggauugcaugaaagccuuug

SEQ ID NO: 281446 - RNA, 13 nt, Human adenovirus B (HAdV-B)
ggcaacaucaauu

SEQ ID NO: 281447 - RNA, 21 nt, Human adenovirus B (HAdV-B)
ggcaccucaguacgauaccac

SEQ ID NO: 281448 - RNA, 14 nt, Human adenovirus B (HAdV-B)
ggcaucaauggagu

SEQ ID NO: 281449 - RNA, 13 nt, Human adenovirus B (HAdV-B)
ggccaucauggaa

SEQ ID NO: 281450 - RNA, 14 nt, Human adenovirus B (HAdV-B)
ggccauguucauga

SEQ ID NO: 281451 - RNA, 19 nt, Human adenovirus B (HAdV-B)
ggccauuugccauucucga

SEQ ID NO: 281452 - RNA, 14 nt, Human adenovirus B (HAdV-B)
ggccgcgucucaga

SEQ ID NO: 281453 - RNA, 17 nt, Human adenovirus B (HAdV-B)
ggccuaagagaccugcu

SEQ ID NO: 281454 - RNA, 18 nt, Human adenovirus B (HAdV-B)
ggccuaagagaccugcua

SEQ ID NO: 281455 - RNA, 22 nt, Human adenovirus B (HAdV-B)
ggccuaagagaccugcuaccaa

SEQ ID NO: 281456 - RNA, 20 nt, Human adenovirus B (HAdV-B)
ggcgacgcgugcaauggcgu

SEQ ID NO: 281457 - RNA, 18 nt, Human adenovirus B (HAdV-B)
ggcgacggcggugaugca

SEQ ID NO: 281458 - RNA, 12 nt, Human adenovirus B (HAdV-B)
ggcggaucucua

SEQ ID NO: 281459 - RNA, 23 nt, Human adenovirus B (HAdV-B)
ggcuauacuaccaauauuuuugc

SEQ ID NO: 281460 - RNA, 13 nt, Human adenovirus B (HAdV-B)
ggcucaaacugca

SEQ ID NO: 281461 - RNA, 19 nt, Human adenovirus B (HAdV-B)
ggcuccagcaaaaacaaga

SEQ ID NO: 281462 - RNA, 14 nt, Human adenovirus B (HAdV-B)
ggcuucucuuacau

SEQ ID NO: 281463 - RNA, 17 nt, Human adenovirus B (HAdV-B)
ggcuucuggcuaagcag

SEQ ID NO: 281464 - RNA, 16 nt, Human adenovirus B (HAdV-B)
gggacgcuacagugca

SEQ ID NO: 281465 - RNA, 24 nt, Human adenovirus B (HAdV-B)
gggacggucaggccagugcacaaa

SEQ ID NO: 281466 - RNA, 13 nt, Human adenovirus B (HAdV-B)
gggaucugcaauc

SEQ ID NO: 281467 - RNA, 18 nt, Human adenovirus B (HAdV-B)
gggaugggugagugcaga

SEQ ID NO: 281468 - RNA, 14 nt, Human adenovirus B (HAdV-B)
gggcaggaugucac

SEQ ID NO: 281469 - RNA, 18 nt, Human adenovirus B (HAdV-B)
gggcaugagguagaccua

SEQ ID NO: 281470 - RNA, 14 nt, Human adenovirus B (HAdV-B)
ggggaggugacuag

SEQ ID NO: 281471 - RNA, 18 nt, Human adenovirus B (HAdV-B)
gggugaaauuaugugcau

SEQ ID NO: 281472 - RNA, 17 nt, Human adenovirus B (HAdV-B)
gggugcauucgggguga

SEQ ID NO: 281473 - RNA, 23 nt, Human adenovirus B (HAdV-B)
ggguuguagcagagguuugcacc

SEQ ID NO: 281474 - RNA, 23 nt, Human adenovirus B (HAdV-B)
gguagaccuacagagucucugac

SEQ ID NO: 281475 - RNA, 12 nt, Human adenovirus B (HAdV-B)
gguauacaacgc

SEQ ID NO: 281476 - RNA, 13 nt, Human adenovirus B (HAdV-B)
ggucuggugcagu

SEQ ID NO: 281477 - RNA, 12 nt, Human adenovirus B (HAdV-B)
ggugaacaccaa

SEQ ID NO: 281478 - RNA, 13 nt, Human adenovirus B (HAdV-B)
gguuacuauggaa

SEQ ID NO: 281479 - RNA, 19 nt, Human adenovirus B (HAdV-B)
gguucagaugguacuugau

SEQ ID NO: 281480 - RNA, 21 nt, Human adenovirus B (HAdV-B)
gguucgcuagugaauuagcua

SEQ ID NO: 281481 - RNA, 17 nt, Human adenovirus B (HAdV-B)
gguugcauucacugcuc

SEQ ID NO: 281482 - RNA, 21 nt, Human adenovirus B (HAdV-B)
gguuguacuugaacuaucaca

SEQ ID NO: 281483 - RNA, 18 nt, Human adenovirus B (HAdV-B)
guaaaacaagccaagaua

SEQ ID NO: 281484 - RNA, 14 nt, Human adenovirus B (HAdV-B)
guaacaacacuuuc

SEQ ID NO: 281485 - RNA, 15 nt, Human adenovirus B (HAdV-B)
guaacaacacuuuca

SEQ ID NO: 281486 - RNA, 18 nt, Human adenovirus B (HAdV-B)
gugccuccgcgauaccug

SEQ ID NO: 281487 - RNA, 15 nt, Human adenovirus B (HAdV-B)
gugcgcgaguuugcc

SEQ ID NO: 281488 - RNA, 17 nt, Human adenovirus B (HAdV-B)
guggaaaaacuugagga

SEQ ID NO: 281489 - RNA, 18 nt, Human adenovirus B (HAdV-B)
guggcucgcuacaacagu

SEQ ID NO: 281490 - RNA, 13 nt, Human adenovirus B (HAdV-B)
gugggaucugcaa

SEQ ID NO: 281491 - RNA, 17 nt, Human adenovirus B (HAdV-B)
guggugcaaaacaauga

SEQ ID NO: 281492 - RNA, 16 nt, Human adenovirus B (HAdV-B)
gugucuaguauaauga

SEQ ID NO: 281493 - RNA, 14 nt, Human adenovirus B (HAdV-B)
gugugguuagcuca

SEQ ID NO: 281494 - RNA, 18 nt, Human adenovirus B (HAdV-B)
guguucaauaaacaucac

SEQ ID NO: 281495 - RNA, 18 nt, Human adenovirus B (HAdV-B)
guuaaacuuuauuuguca

SEQ ID NO: 281496 - RNA, 18 nt, Human adenovirus B (HAdV-B)
guuaacuguucacugguu

SEQ ID NO: 281497 - RNA, 20 nt, Human adenovirus B (HAdV-B)
guuaagcaugacagauaugu

SEQ ID NO: 281498 - RNA, 19 nt, Human adenovirus B (HAdV-B)
guuauauuggguugcauga

SEQ ID NO: 281499 - RNA, 16 nt, Human adenovirus B (HAdV-B)
guuaucacccagcaaa

SEQ ID NO: 281500 - RNA, 17 nt, Human adenovirus B (HAdV-B)
guucaauaaacaucacu

SEQ ID NO: 281501 - RNA, 16 nt, Human adenovirus B (HAdV-B)
guucacuucaaugcau

SEQ ID NO: 281502 - RNA, 12 nt, Human adenovirus B (HAdV-B)
guucaugugaug

SEQ ID NO: 281503 - RNA, 17 nt, Human adenovirus B (HAdV-B)
guucccaauaugcuuau

SEQ ID NO: 281504 - RNA, 21 nt, Human adenovirus B (HAdV-B)
guucccgagugguacacuguc

SEQ ID NO: 281505 - RNA, 15 nt, Human adenovirus B (HAdV-B)
guugaaaugggcaug

SEQ ID NO: 281506 - RNA, 21 nt, Human adenovirus B (HAdV-B)
guugaccgggaggacaauaca

SEQ ID NO: 281507 - RNA, 13 nt, Human adenovirus B (HAdV-B)
guugcaugauuaa

SEQ ID NO: 281508 - RNA, 14 nt, Human adenovirus B (HAdV-B)
guuguuuacaugag

SEQ ID NO: 281509 - RNA, 17 nt, Human adenovirus B (HAdV-B)
guuguuuggcacuccag

SEQ ID NO: 281510 - RNA, 17 nt, Human adenovirus B (HAdV-B)
guuuaaccccacuaaca

SEQ ID NO: 281511 - RNA, 13 nt, Human adenovirus B (HAdV-B)
guuuggaaugugg

SEQ ID NO: 281512 - RNA, 13 nt, Human adenovirus B (HAdV-B)
guuuuagauucca

SEQ ID NO: 281513 - RNA, 16 nt, Human adenovirus B (HAdV-B)
uaaaaaaucacuuacu

SEQ ID NO: 281514 - RNA, 23 nt, Human adenovirus B (HAdV-B)
uaaaaauccaucgggauagucuu

SEQ ID NO: 281515 - RNA, 20 nt, Human adenovirus B (HAdV-B)
uaaaaccaugucuauaucua

SEQ ID NO: 281516 - RNA, 20 nt, Human adenovirus B (HAdV-B)
uaaaagaaaaauuugccaaa

SEQ ID NO: 281517 - RNA, 16 nt, Human adenovirus B (HAdV-B)
uaaaagguaaaugggg

SEQ ID NO: 281518 - RNA, 20 nt, Human adenovirus B (HAdV-B)
uaaacaguauaagauuacua

SEQ ID NO: 281519 - RNA, 19 nt, Human adenovirus B (HAdV-B)
uaaaccccguucagcggca

SEQ ID NO: 281520 - RNA, 15 nt, Human adenovirus B (HAdV-B)
uaaagaaauucccac

SEQ ID NO: 281521 - RNA, 15 nt, Human adenovirus B (HAdV-B)
uaaagaccagaacuu

SEQ ID NO: 281522 - RNA, 11 nt, Human adenovirus B (HAdV-B)
uaaaguagcau

SEQ ID NO: 281523 - RNA, 13 nt, Human adenovirus B (HAdV-B)
uaacaaaaccugg

SEQ ID NO: 281524 - RNA, 22 nt, Human adenovirus B (HAdV-B)
uaacaaccacaggcggaucucu

SEQ ID NO: 281525 - RNA, 22 nt, Human adenovirus B (HAdV-B)
uaacaaguuccguaaauguagu

SEQ ID NO: 281526 - RNA, 18 nt, Human adenovirus B (HAdV-B)
uaacaauacaauuuccaa

SEQ ID NO: 281527 - RNA, 12 nt, Human adenovirus B (HAdV-B)
uaacacugugcu

SEQ ID NO: 281528 - RNA, 18 nt, Human adenovirus B (HAdV-B)
uaacacugugcuuggaau

SEQ ID NO: 281529 - RNA, 19 nt, Human adenovirus B (HAdV-B)
uaacauuauuguacugcca

SEQ ID NO: 281530 - RNA, 17 nt, Human adenovirus B (HAdV-B)
uaaccaacguuguccau

SEQ ID NO: 281531 - RNA, 13 nt, Human adenovirus B (HAdV-B)
uaaccauuaucaa

SEQ ID NO: 281532 - RNA, 13 nt, Human adenovirus B (HAdV-B)
uaacccauuccaa

SEQ ID NO: 281533 - RNA, 17 nt, Human adenovirus B (HAdV-B)
uaaccuauugcauuugc

SEQ ID NO: 281534 - RNA, 18 nt, Human adenovirus B (HAdV-B)
uaacuucaccuuuccuac

SEQ ID NO: 281535 - RNA, 21 nt, Human adenovirus B (HAdV-B)
uaacuucaccuuuccuacuca

SEQ ID NO: 281536 - RNA, 20 nt, Human adenovirus B (HAdV-B)
uaacuugcaacauacaaaau

SEQ ID NO: 281537 - RNA, 18 nt, Human adenovirus B (HAdV-B)
uaacuugccuaucugugu

SEQ ID NO: 281538 - RNA, 16 nt, Human adenovirus B (HAdV-B)
uaagaaugccaucauc

SEQ ID NO: 281539 - RNA, 19 nt, Human adenovirus B (HAdV-B)
uaagacucuccuacggacu

SEQ ID NO: 281540 - RNA, 16 nt, Human adenovirus B (HAdV-B)
uaaggcgaauggguau

SEQ ID NO: 281541 - RNA, 17 nt, Human adenovirus B (HAdV-B)
uaaggggacugccccau

SEQ ID NO: 281542 - RNA, 17 nt, Human adenovirus B (HAdV-B)
uaaggggggagucuuca

SEQ ID NO: 281543 - RNA, 20 nt, Human adenovirus B (HAdV-B)
uaaucacccccgccccagaa

SEQ ID NO: 281544 - RNA, 17 nt, Human adenovirus B (HAdV-B)
uaaucccacucaugaga

SEQ ID NO: 281545 - RNA, 14 nt, Human adenovirus B (HAdV-B)
uaaucugcaacaaa

SEQ ID NO: 281546 - RNA, 16 nt, Human adenovirus B (HAdV-B)
uaaugauugcuggaau

SEQ ID NO: 281547 - RNA, 18 nt, Human adenovirus B (HAdV-B)
uaauggcaccaguagcca

SEQ ID NO: 281548 - RNA, 17 nt, Human adenovirus B (HAdV-B)
uaauuacacucucauag

SEQ ID NO: 281549 - RNA, 17 nt, Human adenovirus B (HAdV-B)
uaauucaaggcuggaaa

SEQ ID NO: 281550 - RNA, 21 nt, Human adenovirus B (HAdV-B)
uacaaaacaugcaacauccaa

SEQ ID NO: 281551 - RNA, 10 nt, Human adenovirus B (HAdV-B)
uacaauggac

SEQ ID NO: 281552 - RNA, 17 nt, Human adenovirus B (HAdV-B)
uacaauuuccaauccaa

SEQ ID NO: 281553 - RNA, 22 nt, Human adenovirus B (HAdV-B)
uacacacaauaacaaaaccugg

SEQ ID NO: 281554 - RNA, 21 nt, Human adenovirus B (HAdV-B)
uacaccggauugcagcacuga

SEQ ID NO: 281555 - RNA, 17 nt, Human adenovirus B (HAdV-B)
uacacugucucuguccg

SEQ ID NO: 281556 - RNA, 22 nt, Human adenovirus B (HAdV-B)
uacagacauggcuucucuuaca

SEQ ID NO: 281557 - RNA, 23 nt, Human adenovirus B (HAdV-B)
uacaguauggugaacaccaauca

SEQ ID NO: 281558 - RNA, 14 nt, Human adenovirus B (HAdV-B)
uacaucucucauau

SEQ ID NO: 281559 - RNA, 20 nt, Human adenovirus B (HAdV-B)
uaccaauauuuuugcuucua

SEQ ID NO: 281560 - RNA, 21 nt, Human adenovirus B (HAdV-B)
uaccaauauuuuugcuucuau

SEQ ID NO: 281561 - RNA, 13 nt, Human adenovirus B (HAdV-B)
auacaauuuccaa

SEQ ID NO: 281562 - RNA, 17 nt, Human adenovirus B (HAdV-B)
auacacaccuugcuuca

SEQ ID NO: 281563 - RNA, 22 nt, Human adenovirus B (HAdV-B)
auacaugccacagaugucauag

SEQ ID NO: 281564 - RNA, 15 nt, Human adenovirus B (HAdV-B)
auaccuggcaccuac

SEQ ID NO: 281565 - RNA, 22 nt, Human adenovirus B (HAdV-B)
auacuaaggguugcauucacug

SEQ ID NO: 281566 - RNA, 19 nt, Human adenovirus B (HAdV-B)
auacucauuugugcauuua

SEQ ID NO: 281567 - RNA, 19 nt, Human adenovirus B (HAdV-B)
auagauauuuuucauucuc

SEQ ID NO: 281568 - RNA, 21 nt, Human adenovirus B (HAdV-B)
auagccccccagguggacaug

SEQ ID NO: 281569 - RNA, 18 nt, Human adenovirus B (HAdV-B)
auaggagcuggcuuucau

SEQ ID NO: 281570 - RNA, 20 nt, Human adenovirus B (HAdV-B)
auaguaacuugcaacauaca

SEQ ID NO: 281571 - RNA, 17 nt, Human adenovirus B (HAdV-B)
auaguacuccaccagaa

SEQ ID NO: 281572 - RNA, 17 nt, Human adenovirus B (HAdV-B)
auauaguucaugugaug

SEQ ID NO: 281573 - RNA, 21 nt, Human adenovirus B (HAdV-B)
auauccggaaugcuuguuaca

SEQ ID NO: 281574 - RNA, 20 nt, Human adenovirus B (HAdV-B)
auaucgggcaggaugucacu

SEQ ID NO: 281575 - RNA, 19 nt, Human adenovirus B (HAdV-B)
auaugacaauggaugguuu

SEQ ID NO: 281576 - RNA, 22 nt, Human adenovirus B (HAdV-B)
auaugacaauggaugguuuaca

SEQ ID NO: 281577 - RNA, 16 nt, Human adenovirus B (HAdV-B)
auaugaugucucguca

SEQ ID NO: 281578 - RNA, 16 nt, Human adenovirus B (HAdV-B)
auaugcuuauuccaau

SEQ ID NO: 281579 - RNA, 18 nt, Human adenovirus B (HAdV-B)
auauguuaacuguucacu

SEQ ID NO: 281580 - RNA, 17 nt, Human adenovirus B (HAdV-B)
auauuugucagcauugu

SEQ ID NO: 281581 - RNA, 14 nt, Human adenovirus B (HAdV-B)
aucaacgugacagc

SEQ ID NO: 281582 - RNA, 14 nt, Human adenovirus B (HAdV-B)
aucacaauuaauca

SEQ ID NO: 281583 - RNA, 15 nt, Human adenovirus B (HAdV-B)
aucacccagucauaa

SEQ ID NO: 281584 - RNA, 23 nt, Human adenovirus B (HAdV-B)
aucacuagcuguguaguaacaag

SEQ ID NO: 281585 - RNA, 18 nt, Human adenovirus B (HAdV-B)
aucacugaacuguggaac

SEQ ID NO: 281586 - RNA, 15 nt, Human adenovirus B (HAdV-B)
aucacuuacuugaaa

SEQ ID NO: 281587 - RNA, 20 nt, Human adenovirus B (HAdV-B)
aucagaaugaccacagcaac

SEQ ID NO: 281588 - RNA, 21 nt, Human adenovirus B (HAdV-B)
aucauccucgacaugaguaaa

SEQ ID NO: 281589 - RNA, 16 nt, Human adenovirus B (HAdV-B)
auccacaagacccaga

SEQ ID NO: 281590 - RNA, 19 nt, Human adenovirus B (HAdV-B)
auccacaguagaucccaua

SEQ ID NO: 281591 - RNA, 12 nt, Human adenovirus B (HAdV-B)
auccgaugacaa

SEQ ID NO: 281592 - RNA, 20 nt, Human adenovirus B (HAdV-B)
auccuacgagaucaccgcua

SEQ ID NO: 281593 - RNA, 19 nt, Human adenovirus B (HAdV-B)
auccuugugcgaauugccu

SEQ ID NO: 281594 - RNA, 21 nt, Human adenovirus B (HAdV-B)
aucgaaggcaaaauagacucu

SEQ ID NO: 281595 - RNA, 21 nt, Human adenovirus B (HAdV-B)
aucgagaaaaaucagaaauuc

SEQ ID NO: 281596 - RNA, 14 nt, Human adenovirus B (HAdV-B)
aucggaucuuucca

SEQ ID NO: 281597 - RNA, 21 nt, Human adenovirus B (HAdV-B)
aucuaaggccauuugccauuc

SEQ ID NO: 281598 - RNA, 17 nt, Human adenovirus B (HAdV-B)
aucuacguccacuggac

SEQ ID NO: 281599 - RNA, 22 nt, Human adenovirus B (HAdV-B)
aucuagaccacugccgccgcuu

SEQ ID NO: 281600 - RNA, 15 nt, Human adenovirus B (HAdV-B)
aucucaauugcucag

SEQ ID NO: 281601 - RNA, 20 nt, Human adenovirus B (HAdV-B)
aucucuccccacgcacagcu

SEQ ID NO: 281602 - RNA, 16 nt, Human adenovirus B (HAdV-B)
aucugaguuggcuuua

SEQ ID NO: 281603 - RNA, 17 nt, Human adenovirus B (HAdV-B)
aucugaguuggcuuuaa

SEQ ID NO: 281604 - RNA, 20 nt, Human adenovirus B (HAdV-B)
aucuucaugucuuucuuccc

SEQ ID NO: 281605 - RNA, 15 nt, Human adenovirus B (HAdV-B)
aucuucugucccuac

SEQ ID NO: 281606 - RNA, 15 nt, Human adenovirus B (HAdV-B)
aucuugaaaucacaa

SEQ ID NO: 281607 - RNA, 17 nt, Human adenovirus B (HAdV-B)
augacagauacaguagu

SEQ ID NO: 281608 - RNA, 15 nt, Human adenovirus B (HAdV-B)
augacagauauguca

SEQ ID NO: 281609 - RNA, 17 nt, Human adenovirus B (HAdV-B)
augaggcgagucgugcu

SEQ ID NO: 281610 - RNA, 21 nt, Human adenovirus B (HAdV-B)
augagucgcagacguccugaa

SEQ ID NO: 281611 - RNA, 22 nt, Human adenovirus B (HAdV-B)
augagucgcagacguccugaaa

SEQ ID NO: 281612 - RNA, 15 nt, Human adenovirus B (HAdV-B)
augauugaggaguua

SEQ ID NO: 281613 - RNA, 23 nt, Human adenovirus B (HAdV-B)
augauugggagguggccauuaaa

SEQ ID NO: 281614 - RNA, 16 nt, Human adenovirus B (HAdV-B)
augauuucucgaguua

SEQ ID NO: 281615 - RNA, 17 nt, Human adenovirus B (HAdV-B)
augauuucucgaguuaa

SEQ ID NO: 281616 - RNA, 18 nt, Human adenovirus B (HAdV-B)
augauuucucgaguuaau

SEQ ID NO: 281617 - RNA, 20 nt, Human adenovirus B (HAdV-B)
augcaaaaaaggcauauucu

SEQ ID NO: 281618 - RNA, 13 nt, Human adenovirus B (HAdV-B)
augcaaaugcaau

SEQ ID NO: 281619 - RNA, 18 nt, Human adenovirus B (HAdV-B)
augcaacguaucauggcg

SEQ ID NO: 281620 - RNA, 19 nt, Human adenovirus B (HAdV-B)
augcacaugaucauccaca

SEQ ID NO: 281621 - RNA, 20 nt, Human adenovirus B (HAdV-B)
augcacaugaucauccacaa

SEQ ID NO: 281622 - RNA, 13 nt, Human adenovirus B (HAdV-B)
augcgauggaguu

SEQ ID NO: 281623 - RNA, 19 nt, Human adenovirus B (HAdV-B)
augcuaccguggaugauuu

SEQ ID NO: 281624 - RNA, 22 nt, Human adenovirus B (HAdV-B)
ucagugauagauaaaaauccau

SEQ ID NO: 281625 - RNA, 22 nt, Human adenovirus B (HAdV-B)
ucauaggacccccaaucacuuc

SEQ ID NO: 281626 - RNA, 16 nt, Human adenovirus B (HAdV-B)
ucauauggguuaaggg

SEQ ID NO: 281627 - RNA, 19 nt, Human adenovirus B (HAdV-B)
ucauccaaauucaccaaug

SEQ ID NO: 281628 - RNA, 14 nt, Human adenovirus B (HAdV-B)
ucaucgaaguugcu

SEQ ID NO: 281629 - RNA, 11 nt, Human adenovirus B (HAdV-B)
ucaucuaaggc

SEQ ID NO: 281630 - RNA, 13 nt, Human adenovirus B (HAdV-B)
ucauuauugaaca

SEQ ID NO: 281631 - RNA, 14 nt, Human adenovirus B (HAdV-B)
ucauuauugaacau

SEQ ID NO: 281632 - RNA, 20 nt, Human adenovirus B (HAdV-B)
ucauugaaaggauaggcagu

SEQ ID NO: 281633 - RNA, 15 nt, Human adenovirus B (HAdV-B)
ucauuugugcauuua

SEQ ID NO: 281634 - RNA, 19 nt, Human adenovirus B (HAdV-B)
uccaaauucaccaaugcaa

SEQ ID NO: 281635 - RNA, 18 nt, Human adenovirus B (HAdV-B)
uccaacaaccguggucau

SEQ ID NO: 281636 - RNA, 15 nt, Human adenovirus B (HAdV-B)
uccaaggucuuccua

SEQ ID NO: 281637 - RNA, 23 nt, Human adenovirus B (HAdV-B)
uccaauuccgccgaggaucugcu

SEQ ID NO: 281638 - RNA, 12 nt, Human adenovirus B (HAdV-B)
uccacagguucg

SEQ ID NO: 281639 - RNA, 19 nt, Human adenovirus B (HAdV-B)
uccacuaccacauuccuua

SEQ ID NO: 281640 - RNA, 22 nt, Human adenovirus B (HAdV-B)
uccagaagcauuuucccuacua

SEQ ID NO: 281641 - RNA, 23 nt, Human adenovirus B (HAdV-B)
uccauacuuuaaaggggauguca

SEQ ID NO: 281642 - RNA, 16 nt, Human adenovirus B (HAdV-B)
uccauaguaacccauu

SEQ ID NO: 281643 - RNA, 21 nt, Human adenovirus B (HAdV-B)
uccauggagguuugggccauu

SEQ ID NO: 281644 - RNA, 16 nt, Human adenovirus B (HAdV-B)
uccaugucuagacuuc

SEQ ID NO: 281645 - RNA, 16 nt, Human adenovirus B (HAdV-B)
ucccagaugaccaaga

SEQ ID NO: 281646 - RNA, 15 nt, Human adenovirus B (HAdV-B)
ucccagcagcaccuc

SEQ ID NO: 281647 - RNA, 15 nt, Human adenovirus B (HAdV-B)
uccccaaauggcuuc

SEQ ID NO: 281648 - RNA, 19 nt, Human adenovirus B (HAdV-B)
uccccacgcacagcuuuaa

SEQ ID NO: 281649 - RNA, 22 nt, Human adenovirus B (HAdV-B)
uccccacgcacagcuuuaaaca

SEQ ID NO: 281650 - RNA, 19 nt, Human adenovirus B (HAdV-B)
uccccuacaaaacaugcaa

SEQ ID NO: 281651 - RNA, 21 nt, Human adenovirus B (HAdV-B)
uccccuacaaaacaugcaaca

SEQ ID NO: 281652 - RNA, 22 nt, Human adenovirus B (HAdV-B)
uccccuacaaaacaugcaacau

SEQ ID NO: 281653 - RNA, 19 nt, Human adenovirus B (HAdV-B)
uccccugcucuuguucccg

SEQ ID NO: 281654 - RNA, 18 nt, Human adenovirus B (HAdV-B)
ucccgaacccaaccagcg

SEQ ID NO: 281655 - RNA, 22 nt, Human adenovirus B (HAdV-B)
ucccuacuaauacuacuuucaa

SEQ ID NO: 281656 - RNA, 21 nt, Human adenovirus B (HAdV-B)
ucccugcuauuaguuacuuca

SEQ ID NO: 281657 - RNA, 15 nt, Human adenovirus B (HAdV-B)
uccgcaagcaauugc

SEQ ID NO: 281658 - RNA, 18 nt, Human adenovirus B (HAdV-B)
uccgccgaggaucugcuc

SEQ ID NO: 281659 - RNA, 19 nt, Human adenovirus B (HAdV-B)
uccgcgauaccuggcaccu

SEQ ID NO: 281660 - RNA, 19 nt, Human adenovirus B (HAdV-B)
uccgcgcaauguuuugcau

SEQ ID NO: 281661 - RNA, 16 nt, Human adenovirus B (HAdV-B)
uccgugcgacugcugu

SEQ ID NO: 281662 - RNA, 14 nt, Human adenovirus B (HAdV-B)
uccguguuuacuua

SEQ ID NO: 281663 - RNA, 16 nt, Human adenovirus B (HAdV-B)
uccguguuuacuuaag

SEQ ID NO: 281664 - RNA, 22 nt, Human adenovirus B (HAdV-B)
uccugggcaggaguucgucaga

SEQ ID NO: 281665 - RNA, 15 nt, Human adenovirus B (HAdV-B)
uccuuguucugccag

SEQ ID NO: 281666 - RNA, 18 nt, Human adenovirus B (HAdV-B)
ucgacagauaaagacagc

SEQ ID NO: 281667 - RNA, 17 nt, Human adenovirus B (HAdV-B)
ucgacccagaaaacugc

SEQ ID NO: 281668 - RNA, 21 nt, Human adenovirus B (HAdV-B)
ucgacgcugaguuacuuucaa

SEQ ID NO: 281669 - RNA, 20 nt, Human adenovirus B (HAdV-B)
ucgagaaaaaucagaaauuc

SEQ ID NO: 281670 - RNA, 15 nt, Human adenovirus B (HAdV-B)
ucgauccgaugacaa

SEQ ID NO: 281671 - RNA, 20 nt, Human adenovirus B (HAdV-B)
ucgcuccgugcgacugcugu

SEQ ID NO: 281672 - RNA, 15 nt, Human adenovirus B (HAdV-B)
ucgcugcugcaauug

SEQ ID NO: 281673 - RNA, 16 nt, Human adenovirus B (HAdV-B)
ucgcugcugcaauugg

SEQ ID NO: 281674 - RNA, 14 nt, Human adenovirus B (HAdV-B)
ucggaguaccugag

SEQ ID NO: 281675 - RNA, 14 nt, Human adenovirus B (HAdV-B)
ucggccaucaugga

SEQ ID NO: 281676 - RNA, 20 nt, Human adenovirus B (HAdV-B)
ucgguggucuuuacacccgg

SEQ ID NO: 281677 - RNA, 20 nt, Human adenovirus B (HAdV-B)
ucguacgagagcgugaugca

SEQ ID NO: 281678 - RNA, 20 nt, Human adenovirus B (HAdV-B)
ucgucagaauguuaugggau

SEQ ID NO: 281679 - RNA, 23 nt, Human adenovirus B (HAdV-B)
ucgucucuaucccucuaggacau

SEQ ID NO: 281680 - RNA, 13 nt, Human adenovirus B (HAdV-B)
ucgucuucucuga

SEQ ID NO: 281681 - RNA, 18 nt, Human adenovirus B (HAdV-B)
ucgugcgucgacgcugag

SEQ ID NO: 281682 - RNA, 18 nt, Human adenovirus B (HAdV-B)
ucgugcugggcaugaaac

SEQ ID NO: 281683 - RNA, 15 nt, Human adenovirus B (HAdV-B)
ucuaccacuccagca

SEQ ID NO: 281684 - RNA, 15 nt, Human adenovirus B (HAdV-B)
ucuaggacauaauua

SEQ ID NO: 281685 - RNA, 20 nt, Human adenovirus B (HAdV-B)
ucuaggacauaauuacacuc

SEQ ID NO: 281686 - RNA, 14 nt, Human adenovirus B (HAdV-B)
ucuagugguacuga

SEQ ID NO: 281687 - RNA, 18 nt, Human adenovirus B (HAdV-B)
ucuaguuguaaaaacucu

SEQ ID NO: 281688 - RNA, 18 nt, Human adenovirus B (HAdV-B)
ucuaucggccaucaugga

SEQ ID NO: 281689 - RNA, 13 nt, Human adenovirus B (HAdV-B)
ucucaagugauuc

SEQ ID NO: 281690 - RNA, 13 nt, Human adenovirus B (HAdV-B)
ucuccauacuuua

SEQ ID NO: 281691 - RNA, 14 nt, Human adenovirus B (HAdV-B)
ucuccauacuuuaa

SEQ ID NO: 281692 - RNA, 20 nt, Human adenovirus B (HAdV-B)
ucuccauacuuuaaagggga

SEQ ID NO: 281693 - RNA, 20 nt, Human adenovirus B (HAdV-B)
ucucccagcagcaccucacu

SEQ ID NO: 281694 - RNA, 14 nt, Human adenovirus B (HAdV-B)
ucuccugcuugcau

SEQ ID NO: 281695 - RNA, 19 nt, Human adenovirus B (HAdV-B)
ucucuagaauuaucauuga

SEQ ID NO: 281696 - RNA, 17 nt, Human adenovirus B (HAdV-B)
ucucuaucccucuagga

SEQ ID NO: 281697 - RNA, 12 nt, Human adenovirus B (HAdV-B)
ucucuauggccu

SEQ ID NO: 281698 - RNA, 17 nt, Human adenovirus B (HAdV-B)
ucucuugcuucuugcau

SEQ ID NO: 281699 - RNA, 22 nt, Human adenovirus B (HAdV-B)
ucugaaaugugcgaucuggcca

SEQ ID NO: 281700 - RNA, 20 nt, Human adenovirus B (HAdV-B)
ucugacgagaaucagaauga

SEQ ID NO: 281701 - RNA, 21 nt, Human adenovirus B (HAdV-B)
ucugcaacggcagagaccuaa

SEQ ID NO: 281702 - RNA, 17 nt, Human adenovirus B (HAdV-B)
ucugcucgcucacaccu

SEQ ID NO: 281703 - RNA, 18 nt, Human adenovirus B (HAdV-B)
ucugcucgcucacaccuc

SEQ ID NO: 281704 - RNA, 19 nt, Human adenovirus B (HAdV-B)
ucugcucgcucacaccuca

SEQ ID NO: 281705 - RNA, 17 nt, Human adenovirus B (HAdV-B)
ucuguuaacuucaccuu

SEQ ID NO: 281706 - RNA, 13 nt, Human adenovirus B (HAdV-B)
ucuguugcaccau

SEQ ID NO: 281707 - RNA, 15 nt, Human adenovirus B (HAdV-B)
ucuguugcaccauaa

SEQ ID NO: 281708 - RNA, 15 nt, Human adenovirus B (HAdV-B)
ucuguuuacagacau

SEQ ID NO: 281709 - RNA, 17 nt, Human adenovirus B (HAdV-B)
ucuuaauuugggccauc

SEQ ID NO: 281710 - RNA, 15 nt, Human adenovirus B (HAdV-B)
ucuuacaucucucau

SEQ ID NO: 281711 - RNA, 19 nt, Human adenovirus B (HAdV-B)
ucuuagagauggaagacau

SEQ ID NO: 281712 - RNA, 16 nt, Human adenovirus B (HAdV-B)
ucuuauguguacugag

SEQ ID NO: 281713 - RNA, 20 nt, Human adenovirus B (HAdV-B)
ucuucgguuaagcaugacag

SEQ ID NO: 281714 - RNA, 18 nt, Human adenovirus B (HAdV-B)
ucuugaaaucacaauuag

SEQ ID NO: 281715 - RNA, 15 nt, Human adenovirus B (HAdV-B)
ucuugcgggugggcu

SEQ ID NO: 281716 - RNA, 11 nt, Human adenovirus B (HAdV-B)
ucuugcuacca

SEQ ID NO: 281717 - RNA, 18 nt, Human adenovirus B (HAdV-B)
ucuugcuuguuuuacuuu

SEQ ID NO: 281718 - RNA, 16 nt, Human adenovirus B (HAdV-B)
ugaaaaucaauucaca

SEQ ID NO: 281719 - RNA, 14 nt, Human adenovirus B (HAdV-B)
ugaaacacaaucca

SEQ ID NO: 281720 - RNA, 14 nt, Human adenovirus B (HAdV-B)
ugaaacaccaucag

SEQ ID NO: 281721 - RNA, 21 nt, Human adenovirus B (HAdV-B)
ugaaacccgagcuucuaugac

SEQ ID NO: 281722 - RNA, 15 nt, Human adenovirus B (HAdV-B)
ugaaaucacaauuag

SEQ ID NO: 281723 - RNA, 20 nt, Human adenovirus B (HAdV-B)
ugaaaugugcgaucuggcca

SEQ ID NO: 281724 - RNA, 17 nt, Human adenovirus B (HAdV-B)
ugaaauuaugugcauuu

SEQ ID NO: 281725 - RNA, 17 nt, Human adenovirus B (HAdV-B)
ugaacacguuguuuaca

SEQ ID NO: 281726 - RNA, 17 nt, Human adenovirus B (HAdV-B)
ugaacuguggaacagac

SEQ ID NO: 281727 - RNA, 11 nt, Human adenovirus B (HAdV-B)
ugaacuuuccg

SEQ ID NO: 281728 - RNA, 18 nt, Human adenovirus B (HAdV-B)
uuugcagacuaauucaaa

SEQ ID NO: 281729 - RNA, 16 nt, Human adenovirus B (HAdV-B)
uuugccgugccgacag

SEQ ID NO: 281730 - RNA, 15 nt, Human adenovirus B (HAdV-B)
uuugcuauacaaaau

SEQ ID NO: 281731 - RNA, 21 nt, Human adenovirus B (HAdV-B)
uuugcuucuauugcuucccua

SEQ ID NO: 281732 - RNA, 18 nt, Human adenovirus B (HAdV-B)
uuuggaagaccuuaggaa

SEQ ID NO: 281733 - RNA, 19 nt, Human adenovirus B (HAdV-B)
uuuguccugauuuaugauu

SEQ ID NO: 281734 - RNA, 18 nt, Human adenovirus B (HAdV-B)
uuugugaauugauuuuca

SEQ ID NO: 281735 - RNA, 19 nt, Human adenovirus B (HAdV-B)
uuugugaauugauuuucaa

SEQ ID NO: 281736 - RNA, 14 nt, Human adenovirus B (HAdV-B)
uuuuacaaccagaa

SEQ ID NO: 281737 - RNA, 14 nt, Human adenovirus B (HAdV-B)
uuuuacaacuagaa

SEQ ID NO: 281738 - RNA, 23 nt, Human adenovirus B (HAdV-B)
uuuucccuacuaauacuacuuuc

SEQ ID NO: 281739 - RNA, 19 nt, Human adenovirus B (HAdV-B)
uuuugcagacuaauucaaa

SEQ ID NO: 281740 - RNA, 21 nt, Human adenovirus B (HAdV-B)
uuuuggaaccggguucugcca

SEQ ID NO: 281741 - RNA, 15 nt, Human adenovirus B (HAdV-B)
uuuuugauugucaca

SEQ ID NO: 281742 - RNA, 19 nt, Human adenovirus B (HAdV-B)
auuugugugacagugcaau

SEQ ID NO: 281743 - RNA, 13 nt, Human adenovirus B (HAdV-B)
auuuucccuacua

SEQ ID NO: 281744 - RNA, 15 nt, Human adenovirus B (HAdV-B)
auuuucccuacuaau

SEQ ID NO: 281745 - RNA, 17 nt, Human adenovirus B (HAdV-B)
caaaacaaaaccaauaa

SEQ ID NO: 281746 - RNA, 19 nt, Human adenovirus B (HAdV-B)
caaaacaugcaacauccaa

SEQ ID NO: 281747 - RNA, 20 nt, Human adenovirus B (HAdV-B)
caaaaccucugggaugcaaa

SEQ ID NO: 281748 - RNA, 22 nt, Human adenovirus B (HAdV-B)
caaaaccucugggaugcaaaug

SEQ ID NO: 281749 - RNA, 22 nt, Human adenovirus B (HAdV-B)
caaaauagacucucgccugcaa

SEQ ID NO: 281750 - RNA, 13 nt, Human adenovirus B (HAdV-B)
caaaaucuuacau

SEQ ID NO: 281751 - RNA, 14 nt, Human adenovirus B (HAdV-B)
caaaaucuuacauu

SEQ ID NO: 281752 - RNA, 15 nt, Human adenovirus B (HAdV-B)
caaaaucuuacauug

SEQ ID NO: 281753 - RNA, 23 nt, Human adenovirus B (HAdV-B)
caaacagucgucucuaucccucu

SEQ ID NO: 281754 - RNA, 14 nt, Human adenovirus B (HAdV-B)
caaacucucuccaa

SEQ ID NO: 281755 - RNA, 12 nt, Human adenovirus B (HAdV-B)
caaagagcucag

SEQ ID NO: 281756 - RNA, 20 nt, Human adenovirus B (HAdV-B)
caaagagcucagagauguca

SEQ ID NO: 281757 - RNA, 19 nt, Human adenovirus B (HAdV-B)
caaagaugccuauguaggu

SEQ ID NO: 281758 - RNA, 22 nt, Human adenovirus B (HAdV-B)
caaagauucgauccgaugacaa

SEQ ID NO: 281759 - RNA, 15 nt, Human adenovirus B (HAdV-B)
caaagcccaaacgga

SEQ ID NO: 281760 - RNA, 14 nt, Human adenovirus B (HAdV-B)
caaaguggagauac

SEQ ID NO: 281761 - RNA, 15 nt, Human adenovirus B (HAdV-B)
caaauaaacaaguua

SEQ ID NO: 281762 - RNA, 17 nt, Human adenovirus B (HAdV-B)
caaaucccggcagucuc

SEQ ID NO: 281763 - RNA, 17 nt, Human adenovirus B (HAdV-B)
caaaucucaauugcuca

SEQ ID NO: 281764 - RNA, 20 nt, Human adenovirus B (HAdV-B)
caaauuuuucuuuuauucaa

SEQ ID NO: 281765 - RNA, 21 nt, Human adenovirus B (HAdV-B)
caacaagugcagcaacaggag

SEQ ID NO: 281766 - RNA, 18 nt, Human adenovirus B (HAdV-B)
caacaggaggauuaaaga

SEQ ID NO: 281767 - RNA, 22 nt, Human adenovirus B (HAdV-B)
caaccacaggcggaucucuaca

SEQ ID NO: 281768 - RNA, 18 nt, Human adenovirus B (HAdV-B)
caacccgccaauucuuca

SEQ ID NO: 281769 - RNA, 16 nt, Human adenovirus B (HAdV-B)
caacccggauuuuaca

SEQ ID NO: 281770 - RNA, 16 nt, Human adenovirus B (HAdV-B)
caacccugucuacccc

SEQ ID NO: 281771 - RNA, 22 nt, Human adenovirus B (HAdV-B)
caacccugucuaccccuaugaa

SEQ ID NO: 281772 - RNA, 16 nt, Human adenovirus B (HAdV-B)
caaccguggucauuuc

SEQ ID NO: 281773 - RNA, 23 nt, Human adenovirus B (HAdV-B)
caacgacaaaaauuuaccugcau

SEQ ID NO: 281774 - RNA, 13 nt, Human adenovirus B (HAdV-B)
caacuagaacuua

SEQ ID NO: 281775 - RNA, 17 nt, Human adenovirus B (HAdV-B)
caacucugguauucuaa

SEQ ID NO: 281776 - RNA, 17 nt, Human adenovirus B (HAdV-B)
caacuucgaugauauua

SEQ ID NO: 281777 - RNA, 22 nt, Human adenovirus B (HAdV-B)
caagaaacucugccugauuaua

SEQ ID NO: 281778 - RNA, 15 nt, Human adenovirus B (HAdV-B)
caagaacuucuauca

SEQ ID NO: 281779 - RNA, 21 nt, Human adenovirus B (HAdV-B)
caagagaguccggcucaguga

SEQ ID NO: 281780 - RNA, 18 nt, Human adenovirus B (HAdV-B)
caagagcucagagccauu

SEQ ID NO: 281781 - RNA, 13 nt, Human adenovirus B (HAdV-B)
caagauagcuuug

SEQ ID NO: 281782 - RNA, 21 nt, Human adenovirus B (HAdV-B)
caagauauccuacgagaucac

SEQ ID NO: 281783 - RNA, 23 nt, Human adenovirus B (HAdV-B)
caagcaccggaucccgcaaugcg

SEQ ID NO: 281784 - RNA, 14 nt, Human adenovirus B (HAdV-B)
caaggacaacaucg

SEQ ID NO: 281785 - RNA, 13 nt, Human adenovirus B (HAdV-B)
caaguuacuuguc

SEQ ID NO: 281786 - RNA, 19 nt, Human adenovirus B (HAdV-B)
caaguuauacgaauacaau

SEQ ID NO: 281787 - RNA, 21 nt, Human adenovirus B (HAdV-B)
caaguuggugcgauuggguuu

SEQ ID NO: 281788 - RNA, 19 nt, Human adenovirus B (HAdV-B)
caauaaggucucuguugaa

SEQ ID NO: 281789 - RNA, 16 nt, Human adenovirus B (HAdV-B)
caauauagaaauuacu

SEQ ID NO: 281790 - RNA, 18 nt, Human adenovirus B (HAdV-B)
caauauagaaauuacuug

SEQ ID NO: 281791 - RNA, 17 nt, Human adenovirus B (HAdV-B)
caauaugcuuauuccaa

SEQ ID NO: 281792 - RNA, 22 nt, Human adenovirus B (HAdV-B)
caauaugcuuauuccaaucuug

SEQ ID NO: 281793 - RNA, 23 nt, Human adenovirus B (HAdV-B)
caauauuugugugacagugcaau

SEQ ID NO: 281794 - RNA, 17 nt, Human adenovirus B (HAdV-B)
caauggaugguuuacaa

SEQ ID NO: 281795 - RNA, 15 nt, Human adenovirus B (HAdV-B)
caauucacaaaaucc

SEQ ID NO: 281796 - RNA, 22 nt, Human adenovirus B (HAdV-B)
caauugauguugccauucucaa

SEQ ID NO: 281797 - RNA, 23 nt, Human adenovirus B (HAdV-B)
caauugauguugccauucucaau

SEQ ID NO: 281798 - RNA, 14 nt, Human adenovirus B (HAdV-B)
caauugcucagaaa

SEQ ID NO: 281799 - RNA, 11 nt, Human adenovirus B (HAdV-B)
caauuuuuaca

SEQ ID NO: 281800 - RNA, 18 nt, Human adenovirus B (HAdV-B)
cacaaaggcgugaaggaa

SEQ ID NO: 281801 - RNA, 21 nt, Human adenovirus B (HAdV-B)
cacaccuugcuucacuuucuu

SEQ ID NO: 281802 - RNA, 22 nt, Human adenovirus B (HAdV-B)
cacaucacugaacuguggaaca

SEQ ID NO: 281803 - RNA, 17 nt, Human adenovirus B (HAdV-B)
cacaugaucauccacaa

SEQ ID NO: 281804 - RNA, 15 nt, Human adenovirus B (HAdV-B)
cacauuccaaacagu

SEQ ID NO: 281805 - RNA, 13 nt, Human adenovirus B (HAdV-B)
caccauaauuuca

SEQ ID NO: 281806 - RNA, 15 nt, Human adenovirus B (HAdV-B)
caccccuuuauaaac

SEQ ID NO: 281807 - RNA, 15 nt, Human adenovirus B (HAdV-B)
cacccgcuguugcca

SEQ ID NO: 281808 - RNA, 22 nt, Human adenovirus B (HAdV-B)
caccgagcuaccacugccaugc

SEQ ID NO: 281809 - RNA, 19 nt, Human adenovirus B (HAdV-B)
caccggauugcagcacuga

SEQ ID NO: 281810 - RNA, 17 nt, Human adenovirus B (HAdV-B)
caccuuaaucccagaaa

SEQ ID NO: 281811 - RNA, 18 nt, Human adenovirus B (HAdV-B)
cacgcacagcuuuaaaca

SEQ ID NO: 281812 - RNA, 17 nt, Human adenovirus B (HAdV-B)
cacgcccuggaaaagau

SEQ ID NO: 281813 - RNA, 15 nt, Human adenovirus B (HAdV-B)
cacggaaacguccaa

SEQ ID NO: 281814 - RNA, 18 nt, Human adenovirus B (HAdV-B)
cacggugggaucugcaau

SEQ ID NO: 281815 - RNA, 20 nt, Human adenovirus B (HAdV-B)
cacuagcuguguaguaacaa

SEQ ID NO: 281816 - RNA, 13 nt, Human adenovirus B (HAdV-B)
cacugaaacacca

SEQ ID NO: 281817 - RNA, 12 nt, Human adenovirus B (HAdV-B)
cacuucaaugca

SEQ ID NO: 281818 - RNA, 15 nt, Human adenovirus B (HAdV-B)
cacuucaaugcaugg

SEQ ID NO: 281819 - RNA, 21 nt, Human adenovirus B (HAdV-B)
cacuucuuagacucaucuaaa

SEQ ID NO: 281820 - RNA, 15 nt, Human adenovirus B (HAdV-B)
cagaaaaccagcagc

SEQ ID NO: 281821 - RNA, 17 nt, Human adenovirus B (HAdV-B)
cagaaaacugcacacuu

SEQ ID NO: 281822 - RNA, 16 nt, Human adenovirus B (HAdV-B)
cagaaauuugcuauca

SEQ ID NO: 281823 - RNA, 21 nt, Human adenovirus B (HAdV-B)
cagaacaccuuagaaaaugca

SEQ ID NO: 281824 - RNA, 20 nt, Human adenovirus B (HAdV-B)
cagaagaacgaaacuuuucc

SEQ ID NO: 281825 - RNA, 21 nt, Human adenovirus B (HAdV-B)
cagaagcauuuucccuacuaa

SEQ ID NO: 281826 - RNA, 14 nt, Human adenovirus B (HAdV-B)
cagaaugaccacag

SEQ ID NO: 281827 - RNA, 17 nt, Human adenovirus B (HAdV-B)
cagacaccuacuucaau

SEQ ID NO: 281828 - RNA, 21 nt, Human adenovirus B (HAdV-B)
cagacauggcuucucuuacau

SEQ ID NO: 281829 - RNA, 23 nt, Human adenovirus B (HAdV-B)
cagaccuccccaauuggcuccag

SEQ ID NO: 281830 - RNA, 13 nt, Human adenovirus B (HAdV-B)
cagacuaauucaa

SEQ ID NO: 281831 - RNA, 22 nt, Human adenovirus B (HAdV-B)
cagacuaauucaaaacuaacaa

SEQ ID NO: 281832 - RNA, 14 nt, Human adenovirus B (HAdV-B)
cagacuagaacuuu

SEQ ID NO: 281833 - RNA, 14 nt, Human adenovirus B (HAdV-B)
cagacuguauagga

SEQ ID NO: 281834 - RNA, 20 nt, Human adenovirus B (HAdV-B)
cagacuguauaggagcauuu

SEQ ID NO: 281835 - RNA, 19 nt, Human adenovirus B (HAdV-B)
cagagccauuguccaagac

SEQ ID NO: 281836 - RNA, 21 nt, Human adenovirus B (HAdV-B)
cagagccuugauacauguaaa

SEQ ID NO: 281837 - RNA, 15 nt, Human adenovirus B (HAdV-B)
cagaggaacacauuc

SEQ ID NO: 281838 - RNA, 19 nt, Human adenovirus B (HAdV-B)
cagaguuucuuguaaaaau

SEQ ID NO: 281839 - RNA, 20 nt, Human adenovirus B (HAdV-B)
cagauuuaccaguuugaaua

SEQ ID NO: 281840 - RNA, 14 nt, Human adenovirus B (HAdV-B)
cagcaaaaacaaga

SEQ ID NO: 281841 - RNA, 16 nt, Human adenovirus B (HAdV-B)
cagcaaacucucucca

SEQ ID NO: 281842 - RNA, 13 nt, Human adenovirus B (HAdV-B)
cagcaaccccaga

SEQ ID NO: 281843 - RNA, 23 nt, Human adenovirus B (HAdV-B)
cagcaggaacgcgcggccaaaga

SEQ ID NO: 281844 - RNA, 17 nt, Human adenovirus B (HAdV-B)
ccaacgacaaaaauuua

SEQ ID NO: 281845 - RNA, 13 nt, Human adenovirus B (HAdV-B)
ccaacguugucca

SEQ ID NO: 281846 - RNA, 20 nt, Human adenovirus B (HAdV-B)
ccaagacaauaaguguucca

SEQ ID NO: 281847 - RNA, 12 nt, Human adenovirus B (HAdV-B)
ccaagauauccu

SEQ ID NO: 281848 - RNA, 22 nt, Human adenovirus B (HAdV-B)
ccaagauauccuacgagaucac

SEQ ID NO: 281849 - RNA, 23 nt, Human adenovirus B (HAdV-B)
ccaauaauaguaacuugcaacau

SEQ ID NO: 281850 - RNA, 17 nt, Human adenovirus B (HAdV-B)
ccaauaugcuuauucca

SEQ ID NO: 281851 - RNA, 18 nt, Human adenovirus B (HAdV-B)
ccaaugggcauacaugca

SEQ ID NO: 281852 - RNA, 20 nt, Human adenovirus B (HAdV-B)
ccaauucuucaacgcugacc

SEQ ID NO: 281853 - RNA, 23 nt, Human adenovirus B (HAdV-B)
ccacagcaaccccagacuguaua

SEQ ID NO: 281854 - RNA, 19 nt, Human adenovirus B (HAdV-B)
ccacauuccaaacaguuuc

SEQ ID NO: 281855 - RNA, 17 nt, Human adenovirus B (HAdV-B)
ccaccaccgaucaaaag

SEQ ID NO: 281856 - RNA, 18 nt, Human adenovirus B (HAdV-B)
ccaccaccgaucaaaaga

SEQ ID NO: 281857 - RNA, 21 nt, Human adenovirus B (HAdV-B)
ccaccacuguauuacuuccuc

SEQ ID NO: 281858 - RNA, 19 nt, Human adenovirus B (HAdV-B)
ccaccaucgaaacagaaga

SEQ ID NO: 281859 - RNA, 20 nt, Human adenovirus B (HAdV-B)
ccaccaucgaaacagaagau

SEQ ID NO: 281860 - RNA, 23 nt, Human adenovirus B (HAdV-B)
ccaccgaucucuaucauugagaa

SEQ ID NO: 281861 - RNA, 21 nt, Human adenovirus B (HAdV-B)
ccaccguugagcaccuugaaa

SEQ ID NO: 281862 - RNA, 24 nt, Human adenovirus B (HAdV-B)
ccaccugcaacccguaaucggaau

SEQ ID NO: 281863 - RNA, 13 nt, Human adenovirus B (HAdV-B)
ccacgguggugca

SEQ ID NO: 281864 - RNA, 21 nt, Human adenovirus B (HAdV-B)
ccagaagaacgaaacuuuucc

SEQ ID NO: 281865 - RNA, 23 nt, Human adenovirus B (HAdV-B)
ccagacaucacccuuacaccaga

SEQ ID NO: 281866 - RNA, 18 nt, Human adenovirus B (HAdV-B)
ccagaggaacacauuccc

SEQ ID NO: 281867 - RNA, 18 nt, Human adenovirus B (HAdV-B)
ccagcauucuuuugacca

SEQ ID NO: 281868 - RNA, 16 nt, Human adenovirus B (HAdV-B)
ccagcgagcaagagcu

SEQ ID NO: 281869 - RNA, 14 nt, Human adenovirus B (HAdV-B)
ccaggacuacucca

SEQ ID NO: 281870 - RNA, 15 nt, Human adenovirus B (HAdV-B)
ccaggacuacuccac

SEQ ID NO: 281871 - RNA, 15 nt, Human adenovirus B (HAdV-B)
ccaggccaugcaacg

SEQ ID NO: 281872 - RNA, 13 nt, Human adenovirus B (HAdV-B)
ccaguaauaucau

SEQ ID NO: 281873 - RNA, 17 nt, Human adenovirus B (HAdV-B)
ccagucauaacaagguc

SEQ ID NO: 281874 - RNA, 15 nt, Human adenovirus B (HAdV-B)
ccaguuagcaauuuc

SEQ ID NO: 281875 - RNA, 19 nt, Human adenovirus B (HAdV-B)
ccaguuugaauaugagggu

SEQ ID NO: 281876 - RNA, 11 nt, Human adenovirus B (HAdV-B)
ccauacuuuaa

SEQ ID NO: 281877 - RNA, 21 nt, Human adenovirus B (HAdV-B)
ccauauccguguuuacuuaag

SEQ ID NO: 281878 - RNA, 21 nt, Human adenovirus B (HAdV-B)
ccaucagcgacggaugucuca

SEQ ID NO: 281879 - RNA, 22 nt, Human adenovirus B (HAdV-B)
ccaucaucuccugcuugcauga

SEQ ID NO: 281880 - RNA, 16 nt, Human adenovirus B (HAdV-B)
ccaucgagugcaccua

SEQ ID NO: 281881 - RNA, 15 nt, Human adenovirus B (HAdV-B)
ccaucuacugcauuu

SEQ ID NO: 281882 - RNA, 19 nt, Human adenovirus B (HAdV-B)
ccaugcaacguaucauggc

SEQ ID NO: 281883 - RNA, 20 nt, Human adenovirus B (HAdV-B)
ccaugcaggcuauacuacca

SEQ ID NO: 281884 - RNA, 15 nt, Human adenovirus B (HAdV-B)
ccauggcaugggaug

SEQ ID NO: 281885 - RNA, 20 nt, Human adenovirus B (HAdV-B)
ccauggccugcggaucccaa

SEQ ID NO: 281886 - RNA, 18 nt, Human adenovirus B (HAdV-B)
ccaugguacagacagauu

SEQ ID NO: 281887 - RNA, 20 nt, Human adenovirus B (HAdV-B)
cccaaccagcgcuuccaaga

SEQ ID NO: 281888 - RNA, 20 nt, Human adenovirus B (HAdV-B)
cccaaugcacaugaucaucc

SEQ ID NO: 281889 - RNA, 13 nt, Human adenovirus B (HAdV-B)
cccacucaugaga

SEQ ID NO: 281890 - RNA, 15 nt, Human adenovirus B (HAdV-B)
cccagaaaacugcac

SEQ ID NO: 281891 - RNA, 17 nt, Human adenovirus B (HAdV-B)
cccagaccgugcagggu

SEQ ID NO: 281892 - RNA, 15 nt, Human adenovirus B (HAdV-B)
cccagaugaccaaga

SEQ ID NO: 281893 - RNA, 22 nt, Human adenovirus B (HAdV-B)
cccagauuggcucgcucugaaa

SEQ ID NO: 281894 - RNA, 19 nt, Human adenovirus B (HAdV-B)
cccagcaaaguggagauac

SEQ ID NO: 281895 - RNA, 14 nt, Human adenovirus B (HAdV-B)
cccaggccaugcaa

SEQ ID NO: 281896 - RNA, 16 nt, Human adenovirus B (HAdV-B)
cccaggccaugcaacg

SEQ ID NO: 281897 - RNA, 17 nt, Human adenovirus B (HAdV-B)
cccaggccaugcaacgu

SEQ ID NO: 281898 - RNA, 17 nt, Human adenovirus B (HAdV-B)
cccaggguuuauuuccc

SEQ ID NO: 281899 - RNA, 21 nt, Human adenovirus B (HAdV-B)
cccauaguuaucacccagcaa

SEQ ID NO: 281900 - RNA, 12 nt, Human adenovirus B (HAdV-B)
cccccucugaua

SEQ ID NO: 281901 - RNA, 20 nt, Human adenovirus B (HAdV-B)
cccuagaccaccgaucucua

SEQ ID NO: 281902 - RNA, 22 nt, Human adenovirus B (HAdV-B)
cccuauuugauuuuggcuggaa

SEQ ID NO: 281903 - RNA, 15 nt, Human adenovirus B (HAdV-B)
ccgaaguccaaauga

SEQ ID NO: 281904 - RNA, 19 nt, Human adenovirus B (HAdV-B)
ccgacuauaaaaguaguuu

SEQ ID NO: 281905 - RNA, 15 nt, Human adenovirus B (HAdV-B)
ccgcaagagcucugc

SEQ ID NO: 281906 - RNA, 14 nt, Human adenovirus B (HAdV-B)
ccgcaggcagugau

SEQ ID NO: 281907 - RNA, 20 nt, Human adenovirus B (HAdV-B)
ccgcccuaguguaccaggaa
